United States Patent Application Publication US 2013/0332133 A1 - sequence listing, part 15

SEQ ID NO: 161980 - protein, 293 aa, Unknown
  Bacterial polypetide isolated from the Sargasso Sea
IFVNKKSNEILIDDGVFENIANIYEKEGSDCWFSDDPQKFLGSKYKAEDFEKLSDIVEVWFDSGSTHSFVLEKRKDLKWPASMYLEGSDQHRGWFHSSLLESCGTRGKAPFESILSHGFVVDGKGLKMSKSLGNVIAPEDILKKYGADILRIWVAASNYAEDLRIDYSILDQHSESYRKIRNTFRYLLGNINDKYEDVNLDKIDVESLPELEKFMLSKIHSLNNKFENYFKKYDFHNLYKELLNFCTTDLSAFYFDIRKDTLYCDPINSEKRKSCVTILNVLLKSLLRMVRSN

SEQ ID NO: 161981 - protein, 239 aa, Unknown
  Bacterial polypetide isolated from the Sargasso Sea
TALAEAEIEYHDHTSTTIFAKFPIKQASNDSLINCNVVIWTTTPWTMPGNRAVAYGKHFEYSLIQVKSVSEDSLAIVNDKIIIASDLIETFVSETKVIDFELVSKISLKDFEGLVLRHPLYELGYDFEVPLLEADFVTTEQGTGFVHIAPGHGSDDFDLGVKNSLPVIETVEDDGYLKNNLPLFGGMHVLRDNEKIADLMVEHKALIGRGSLVHSYPHSWRSKAPLIFRTTPQWFISME

SEQ ID NO: 161982 - protein, 306 aa, Unknown
  Bacterial polypetide isolated from the Sargasso Sea
VRHIPFVLEKRSDLKWPASMYLEGSDQHRGWFHSSLLQSCGTRGRAPFDSILSHGFVVDGKGLKMSKSLGNAISPEDILKKYGADILRVWVTASNYAEDLRIDYSILEQHAEAYRKIRNTFRFLLGNLNDVFSETDFEKVKLEELPELERYMLHKIYLLSEKFQENFKTYTFHNLYKELLNFCTVDLSAFYFDIRKDSLYCDSKKSNKRKECIKLLNIILQTLLSWFAPILSFTTEEIYQLVNKDDNSSIHLKKFVKIPKSWKNEKLNERWKDLIKIRDISNISIEGKRAQKIIGSSLEAKINIKL

SEQ ID NO: 161983 - protein, 314 aa, Unknown
  Bacterial polypetide isolated from the Sargasso Sea
LYERLRKKSQGKTKFVLHDGPPYANGHIHMGTALNKILKDIITKFHQMNDKDSIYVPGWDCHGLPIEWKIEEQYKKIKKNKDEVPIKDFRKECREFAEKWIVIHKKEFKRLGVIGDWENYYSTMSFDAEAQIVRELGKFLKEGSLYRGFKPVLWSTVEKTALADAEVEYKDHKSNTIYAAFKVKKTDKDYLKNTSVIIWTTTPWTIPANKALAYNKDINYVVLDINKNKIIVAEKLIKSVIESCELGNYQILKNFKGSEFKNTLCSHPFKNLGYEHDVPMLEANFVTLEQGTGIVHCAPSHGPDDFNLCLKHGM

SEQ ID NO: 161984 - protein, 302 aa, Unknown
  Bacterial polypetide isolated from the Sargasso Sea
MNKTQINLPRTSFSMKANLPTREPEILEFWDKINLYNELRKSRKGLEKFVLHDGPPYANGNIHMGTALNKILKDIIVKFHQMDGKDSVYVPGWDCHGLPIEWKIEEQYKKNKKNKNEVPIVEFRKECRSFAEKWIKIHKDQFKRLGVVGDWDNYYSTMSFDAEAQIVRELGKFLKEGSLYRGFKPVLWSTVEKTALADAEVEYQDHKSDTIYTCFPVKLSNIQELKGSNIVIWTTTPWTIPANKALAYNESLDYLLVQINDDGEFKSKKIVVAESLIEISIKRLWDFRFTEFKKFKGKQLEI

SEQ ID NO: 161985 - protein, 262 aa, Unknown
  Bacterial polypetide isolated from the Sargasso Sea
MSKEHINLPKTAFSMKASLPTKEPGIIEYWQKINLYEKLREKSKGKEKFILHDGPPYANGNIHMGTALNKILKDIITKFHQMDGKDSVYVPGWDCHGLPIEWKIEEQYKKNKKNKNDVPIVDFRKECREFADKWIGVHKDQFKRLGVIGDWENYYSTMSFDAEAQIVRELGKFLKEGSLYRGYKPVLWSTVEKTALADAEVEYMDYVSDTIYSAFPIKKTNIKGIEGSNIIIWTTTPWTIPANKALAYNSSLTYLVVRINDE

SEQ ID NO: 161986 - protein, 303 aa, Unknown
  Bacterial polypetide isolated from the Sargasso Sea
MILFHLGCGMDWENAYKTVTAEYMEAAWWGFSQAHKRGLVERGKRSISQCPRCETSIAKNEIEYHQVKDPSIYVKFELEDREEFLVIWTTTPWTLPANTFVAVNEEFTYQKVVAVKGGVEEKLWIEKSLVDAVVGKGKYDSWEIEQELKGKDMIEWKYKHPLRQEVPNHVKGDGSLRVYSADFVEVDRTGLVHSAPGHGEDDFRAGKERGLELFCPVGTDGIYTIDAGKYEGKFVKDTNEEIIEDLKNSGLLLAEEKYTHDYGKCWRCNTNIIQIVTDQWFIKITEIKEELIENITKSSWYPE

SEQ ID NO: 161987 - protein, 258 aa, Unknown
  Bacterial polypetide isolated from the Sargasso Sea
EFERLGVCGDWKKPYSTMRYESEASIMAEIGKFLMNGGLYRGVKPVMWSSVEKTALAEAEIEYHDHKSTTIYARFSVKKTKIEQIKDAEIIIWTTTPWTMPGNRAVAYNKKIKYSLLVINEIADLSLARVNDKVVVAKELIDDFIKENKIVDFNNVCNFLGEDLKGTILSHPLRGYGYDHEVPLLEGHFVTTEQGTGFVHIAPGHGADDFELGMANSLPVPETVEDNGFLKDNLPIFGGLHVLRDNEEMAERMSEKGA

SEQ ID NO: 161988 - protein, 269 aa, Unknown
  Bacterial polypetide isolated from the Sargasso Sea
FVVDGKGLKMSKSLGNHILPEDILKKYGADILRIWVASSNYAEDLRVDYSILDQHAESYRKIRNTFRFLLGNIKDNFEEYNFEKLNIDNLPDLEKYILHRLFIINENFHYNFKIYNFHILYKELLNFCTVELSAFYFDIRKDLLYCDPIDSKKRSDCIIVLNIILQCLLKWFAPILSFTTEEIYTLLNDGEKDKSIHLKDFVKIPKNWKNEKLNLDWEKIKKIRDEANISIENQRSNKIIGSSLEANISIKLGNEFYEIANKNDFSEIC

SEQ ID NO: 161989 - protein, 279 aa, Unknown
  Bacterial polypetide isolated from the Sargasso Sea
TAFSMKANLPIREPKILELWKKLNLYEELRNSRKGAEKFVLHDGPPYANGNIHMGTALNKILKDIIIKFHQMDGKDSVYVPGWDCHGLPIEWKIEEQYKKNKKNKNEVPIVEFRKECRSFAEKWIEIHKEQFKRLGVVGDWENYYSTMSFDAEAQIVRELGKFLKEGSLYRGYKPVLWSTVEKTALADAEVEYQDHKSDTIYACFPVKSSDIKEIVGSDIVIWTTTPWTIPANKALAYNESLNYLLIEIIDDVEFKNKRIVIAEALLDSVIKDCGNKEL

SEQ ID NO: 161990 - protein, 269 aa, Unknown
  Bacterial polypetide isolated from the Sargasso Sea
MSKKSNEVLVDEEVTENIANIFEKEGADCWFEGDAQRFLGKKYKIEDYEKMTDIVEVWFDSGSTHAYVLEKREDLKWPASMYLEGSDQHRGWFHSSLLESCGTRGRAPFESILSHGFVVDGKGLKMSKSLGNIIAPEDILKKYGADILRIWVAASDYAEDLRIDYSILEQHAESYRKIRNTFRYILGNLNDKFEKVDLEKININNFPELEQYMLHKIYNLNILFEKNFEKYNFHTIYKEIINFCTSDLSAFYFDIRKDILYCDSLESKK

SEQ ID NO: 161991 - protein, 287 aa, Unknown
  Bacterial polypetide isolated from the Sargasso Sea
PGKEFEGTICSHPFSKIGFDYDIPMLSANFVTTEQGSGIVHCAPSHGPDDFNLCLKNNIKAEETVDDDGKYTKHVPTFEGIHIFKANKIVIEKLKEQKNLLSSGELIHSYPHSWRSKAPLVHRATPQWFISMESHGLRKKALKSIDETNFYPNKGKERLRSMIELRPDWCVSRQRVWGVPIPVFMSKKSNEVLVDDEVNENIANIFEKEGADCWFEGDAQRFLGKKYKIEDYEKMTDIVEVWFDSGSTHAYVLEKREDLKWPASMYLEGSDQHRGWFHSSLLESCEQ

SEQ ID NO: 161992 - protein, 277 aa, Unknown
  Bacterial polypetide isolated from the Sargasso Sea
TKLNCTKDYEKKSAGKTKFVLHDGPPYANGHIHMGTALNKILKDIITKFHQMDDKDSIYVPGWDCHGLPIEWKIEEQYKKRKKNKDEIPIKDFRKECREFAEKWIVIHKKEFKRLGVIGDWENYYSTMSYDAEAQIVRELGKFLKEGSLYRGFKPVLWSTVEKTALADAEVEYKDHKSNTIYAGFDVKKSDKDYLKNTSIIIWTTTPWTIPANKALAYNKDIDYVVLDIGKNKIVVAEKLIKSVIENCNLGKYKILKTFKGIEFKNTLCSHPFKNLG

SEQ ID NO: 161993 - protein, 312 aa, Unknown
  Bacterial polypetide isolated from the Sargasso Sea
FSFGVLWKRDRAPFESILSHGFVVDGKGLKMSKSLGNVIAPEDILKKYGADILRIWVASSNYAEDLRIDYSILDQHAESYRKIRNTFRYLLGNLNDNFEKINLETIKVENLPELEQFMLHKIYNLNFKFNKYFKDYDFHNLYKELLNFCTVDLSAFYFDIRKDTLYCDPINSERRKSTLILLNVILNSLIRWFAPILSFTTEEIYQLISKNKKSIHLEKFLNFPEKFKNSQLNLKWEKLIKIRDICNLSIEQKRASKDIGSSLEAALIVKLNKDNLEIAKNIDLSELCITSSVKVEKIEDNEILGETKKAKG

SEQ ID NO: 161994 - protein, 293 aa, Unknown
  Bacterial polypetide isolated from the Sargasso Sea
MSKDQINLPKTSFSMKANLPNKEPDLIKYWDEIGLYEKLRKNTKGKEKFVLHDGPPYANGNIHMGTALNKILKDIITKFHQMDGKDSVYVPGWDCHGLPIEWKIEEQYKKKKKNKNDIPIVEFRKECREFASKWILIHKEQFKRLGVVGDWENYYSTMSYDAEAQIVRELGKFLKEGSLYKGYKPVLWSTVEKTALSDAEVEYMDHTSDTIYVSFKVKKTSFQELKNTEIIIWTTTPWTIPANKALAYNENLKYLIIKIKDDSDFKDRKIVVAKELLQSMIDECKLEKFEILN

SEQ ID NO: 161995 - protein, 222 aa, Unknown
  Bacterial polypetide isolated from the Sargasso Sea
HKLRDKALKAINETSFYPAKGKERLNSMIETRPDWCVSRQRVWGVPLPIFINKKTKEILLDDEVNENIASIYEKQGSDCWFSDDPQKFLGDKYQAADFQKLSDIVEVWFDSGSTHSFVLEKRKDLKWPASMYLEGSDQHRGWFHSSLLESCGTRGKAPFESILSHGFVVDGKGLKMSKSLGNVIAPEDILKKYGADILRIWVASSNYAEDLRIDYSILDQHA

SEQ ID NO: 161996 - protein, 311 aa, Unknown
  Bacterial polypetide isolated from the Sargasso Sea
DYVVLDIGKNKIVIAEKLIKSVIESCDLENHKVLKTFKGSEFKNTLCSHPFKNLGYEHDVPMLDANFVTLDQGTGIVHCAPSHGPDDFNLCLKHGMKAIETVNNDGLYTKNIPIFEGTHVFKADEIIIKNLREQNNLLGTGSLLHSYPHSWRSKAPLVHRATPQWFISMESHKLRKKAIDSIDKTIFYPEKGKARIRSMIETRPDWCISRQRSWGVPLPIFIDKKNNEPLRDLEVIENIAKIYEQEGSDCWFYDDPQRFLGKKYNKENYIKSNDIVEVWFDSGSTHSFVLEKRKDLKWPASMYLEGSDQHR

SEQ ID NO: 161997 - protein, 286 aa, Unknown
  Bacterial polypetide isolated from the Sargasso Sea
EALRNGALHMGHALNKVLKDIINKYKTLKGFRVHYVPGWDCHGLPIELKVLQNLKSDERKNLDTLSLRKKATDYAYIQINNQMEGFKRWGIWGDWDNPYLTLKKSYESAQIGVFGKMFLNGYIYRGLKPVHWSPSSRTALAEAELEYPEEHYSKSIYVSLKITKLSDEILLKFCKENPNFKKDFFLMNSYITIWTTTPWTIPANEAVAVNPKINYVFAIDEDRRIYLFAKELSSEISNKFNKDFKTLLDLKGSSLEDIEISHPTKNKNCRVVIGGDYITTESGTGI

SEQ ID NO: 161998 - protein, 308 aa, Unknown
  Bacterial polypetide isolated from the Sargasso Sea
ILGDKYNPDEWEKIDDILDVWFDSGSTQAFVLEGDEGIGFPADLYLEGSDQHRGWFQSSLLVGCGTRGKAPFKQVLTHGFVVDKDGKKESKSLGNVTKPEDLINQYGADVIRLWVVSSDYTDDLRVGQDIMKANVESYRKIRNTFRFLLGNLNNFSQDEIVDYEEMPELEKYILHKLYLIDLEVRKAYENYDLKSVFQTLLNFSNLDLSSFYFDIRKDTLYCDSPKSNNRKSTRTVLDLLFNYLVTWFAPILCFTTEEVRRSRFPEKNNSVHEMQFLATKDIWNNSKLFEKWENIRSIRKVVTGAIEL

SEQ ID NO: 161999 - protein, 281 aa, Unknown
  Bacterial polypetide isolated from the Sargasso Sea
LESCGTRGRAPFESILSHGFVVDGKGLKMSKSLGNVIAPEDILKKYGADILRIWVASSNYAEDLRIDHSILDQHAESYRKIRNTFRYLLGNLNDNFEKIDLQKINLSELPELEKFMLHKIYVLNSNFKNYFKNYDFHNLYKELLNFCTVDLSAFYFDIRKDTLYCDPIDSKKRQSTIILLNVILNSLLRWFAPILSFTTEEIYKLIYNNNNSIHLESFLNYPEKFKNDQLNQKWIDLIKIRNICNISIEEKRASKEIGSSLEAKLKINLDKKLSKITENID

SEQ ID NO: 162000 - protein, 291 aa, Unknown
  Bacterial polypetide isolated from the Sargasso Sea
KTKEILVDDKVNENIAAIYEKEGSDCWFSDDPQRFLGKKYDAKEYDKLSDIVEVWFDSGSTHSFVLEKRSDLKWPASMYLEGSDQHRGWFHSSLLESCGTRGRAPFDSILSHGFVVDGKGLKMSKSLGNVIAPEDILKKYGADILRIWVASSNYSEDLRIDYSILDQHADSYRKIRNTFRYLLGNLNDNFELIDYKKINLQDLPELEQYILHRLYNLNETFKKYFKNYDFHNLYKELLNFCTVDLSAFYFDIRKDTLYCDSVNSNKRKSTILLLNIILDSLLKWLHQFYHY

SEQ ID NO: 162001 - protein, 229 aa, Unknown
  Bacterial polypetide isolated from the Sargasso Sea
CISRQRNWGVPITLVVHKDTGEIHPSQKDLFEKFAQTIEKEGISAWDKLSLKDYIDDHEEYIKTSDSLDVWFDSGVTHYAVSEKRFGNNVVADLYLEGSDQHRGWFQSSLLSSIAMNKSAPYKTVLTHGFVVDEQGRKQSKSLGNVVSPQKVWDSLGADILRLWVASTDFRSEMVASDEILKRTSESYRRIRNTFRFILRNLSDFSDKNKVKFERSVELDKWIINETKI

SEQ ID NO: 162002 - protein, 290 aa, Unknown
  Bacterial polypetide isolated from the Sargasso Sea
VEKTALADAEVEYKDHTSNTIYVAFKVKDTKKDFLKEASIIIWTTTPWTIPANKALAFNSTIEYSLVEIESLDYFKEKKIIVASNLVDSIIKSCEIKKHKVLRTFKGSEFQGTICSHPFLKMKFEYDVPMLEAGFVDLEQGTGIVHCAPSHGPDDFNLCLKNNIKSSYTVDNAGLYTNEIPYFTNKHIFKADDLVIEKLKEQNKLLKNDKLLHSYPHSWRSKAPLIYRATPQWFISMEKNSLRNKAIKAINDTNFYPEKGKDRLLSMIEGRPDWCVSRQRVWGVPFTIFI

SEQ ID NO: 162003 - protein, 317 aa, Unknown
  Bacterial polypetide isolated from the Sargasso Sea
ADAEVEYQDHVSDTIYAAFIVKSSNIKEIIGSNIIIWTTTPWTIPANKALAYNQSLDYVLCEINNNDKLHSEKIVIAKELLESVSKDTDLKINLLSEFKGKDFEGTICGHPFHKIGYDYDVPMLEARFVTTEQGTGIVHCAPSHGPDDFNLCLNNGIKAVETVDDDGRYTKHIPIFEGTHIFKANTIVIEKLKETKTLLSNGKLTHSYPHSWRSKAPLVHRATPQWFISMESHKLRDKALKAIDDTTFYPAKGKERIKSMIETRPDWCVSRQRVWGVPLPIFISKKNGEILIDDEVFENIAKIYEKEGSDCWLKKIS

SEQ ID NO: 162004 - protein, 276 aa, Unknown
  Bacterial polypetide isolated from the Sargasso Sea
LPLKEPKILEEWAEEEIFNKLREKSKGRERFVLHDGPPYANGHIHMGTALNKILKDVIVRTQQMAGTDSIYVPGWDCHGLPIEWKIEEQYRKKGKNKDDIPIVNFRKECREFAEKWIEIQKKEFKRLGVEGDWNNPYLTMSNQAEAQIVRELGKFLIDESLYKGARPVLWSVVEKTALADAEVEYEDHTSNTVYVKFLIKKSKNTELNNSNIVIWTTTPWTIPGNRALAYHSDLDYSLIEIAEVQDSSLITKGEKLIIAKELLSKVNEEIGILKYN

SEQ ID NO: 162005 - protein, 266 aa, Unknown
  Bacterial polypetide isolated from the Sargasso Sea
IDDYEQVKDVVEVWFDSGSTHAFCLEQREDLKWPASMYLEGSDQHRGWFHSSLLESSGTRGKAPYESVLTHGFVVDGRGRKMSKSLGNVISPDDILKKYGVDILRLWVVASDYYDDLKLDNSILQSQAESYRRIRNTFRFLIGNLNDFTKQEAIDESQFPELEKYLLHRLWEVDQVVQKCVSTFNFHLMFTTLLNFCSSDLSALYFDIRKDTIYCDSKESVKRRSTRTLLNIIFNYLVRWFAPSISFTSEEAWKAMGNKESIHLQD

SEQ ID NO: 162006 - protein, 150 aa, Unknown
  Bacterial polypetide isolated from the Sargasso Sea
MSSSEKDYKETLFLPTTSFPMRANLPEREKEWLDHWEELKIYKKLRLDSSNRKDFVLHDGPPYANGNLHIGHALNKILKDFVVRGQQVLGNNSIYVPGWDCHGLPIEWKIEEKYREKGKSKEDVPINKLREDCRDFAKHWIEIQKEELKD

SEQ ID NO: 162007 - protein, 245 aa, Unknown
  Bacterial polypetide isolated from the Sargasso Sea
SVIIWTTTPWTIPANRALAYNKSLDYLLIKIKDDGKFKDKKIIFAEALLESVIKECEIKNYKNLKRFKGEEFKNTICNHPFFDMGYDYDIPMLEARFVTTEQGTGIVHCAPSHGPDDFNLCLNNGIKAIETVDGDGKYTKNVLLFEGLHIFKANPIVIEKLKEQKKLLKNSQLTHSYPHSWRSKAPLVHRATPQWFISMESHKLRRKALKAIDETIFYPNKGKERLKSMIETRPDWCVSRQRVWG

SEQ ID NO: 162008 - protein, 291 aa, Unknown
  Bacterial polypetide isolated from the Sargasso Sea
SVISKRNNLNYPADLYLEGSDQHRGWFQSSLLTSVAVNEHAPFKKVLTHGFALDENGRKMSKSLGNIIDPLVIINGGKNKKIEPAYGADVLRLWVSSVDYSTDVPIGSNILKQISDVYRKVRNTSRYLLGNIYDFDYKKDAIDISELPLLDKWMLNRTADVIDEITDSFSNYEFSKFFQIIQNFCVVDLSNFYLDIAKDRLYVSFKSDFRRRSCQTVLSLVVEKLSGLIAPVLCHMAEDIWQNIPYTLEEISVFERGWPKVPESWRNNSSNEHVNELLKLRTVINRNVGKL

SEQ ID NO: 162009 - protein, 276 aa, Unknown
  Bacterial polypetide isolated from the Sargasso Sea
RPDWCVSRQRVWGVPLPIFLSKKDGKPLIDDEIFENIAEIYEKEGSDCWFSDDPQRFLGKNYRSEDYNKMSDIVEVWFDSGSTHSYVLEKRDDLKWPASMYLEGSDQHRGWFHSSLLESCGTRGKAPFESILSHGFVVDGKGLKMSKSTGNVIAPEDILKKYGADILRIWVASSNYAEDLRIDYSILDQHAESYRKIRNTFRYLLGNIQDEYLEVNFKNLDLKEMPDLEKYMLHRIYEINKSFHKYFHSYNFHNLYKELLNFCTVELSAFYFDIRK

SEQ ID NO: 162010 - protein, 266 aa, Unknown
  Bacterial polypetide isolated from the Sargasso Sea
SDGKPGNANKLVIEHIDKEGGLFSSSKYVHSYPHSWRSKAPVIFLSTPQWFISMDQNDLRKNALKAIDNVNWFPSQGRSRIYSMIEHRPEWVISRQRAWGVPIPIFVNRMTGELLKDQSVNERIYNTFIKEGSDSWFSDQGGEKFLGDNYNKSDWEKVNDIVDVWFESGSSHAFVLEENEDLLWPASLYLEGTDQHRGWFHSSLLESCGTRGVAPFESVLTHGFVMDGNGRKMSKSLGNVVSPQKVIDKYGADILRLWVVGSDYTD

SEQ ID NO: 162011 - protein, 187 aa, Unknown
  Bacterial polypetide isolated from the Sargasso Sea
MKDYKDTLNLPGTSFPMKANLPNREPEILKFWDEIDLYRKIRKKRKGEKPFLLLDGPPYANGKIHIGHALNKILKDFIIKSKTLFGHDAPYLPGWDCHGLPIEHQVEKKKGKVGPKLTAREFRDYCREYALKQVEEQKEDFIRLGVPGEWNNPYMTLDKRYEAEQIRAFAEIYGNNHVTFGHKPVHW

SEQ ID NO: 162012 - protein, 307 aa, Unknown
  Bacterial polypetide isolated from the Sargasso Sea
RKKNCSSKKLIEQIIDTCEIKNFKELKTFKGSEFHKTICSHPFSNMDFKYDVPMLDAQFVNLEQGTGIVHCAPSHGPDDFNLCLKNNIPSLYTVDDAGLYTDEIPFFEKTHIFKADTVVIDKLKEQKKLLKNDKLNHTYPHSWRSKAPLIYRATPQWFISMKKNDLREKAIKSINETNFYPKKGKERLLSMIEGRPDWCVSRQRVWGVPLPIFINKKTKEPLRDQKVIDRIATIYEKQGSDCWFTDDSKVFLGDDYDPKDYEKLNDIVEVWFDSGSTHSFVLEKRKDLKWPADMYLEGSDQHRGWFT

SEQ ID NO: 162013 - protein, 305 aa, Unknown
  Bacterial polypetide isolated from the Sargasso Sea
MSKSDINLLKTAFSMKANLPIREPEILNYWKKINLYDELRKSSKGKEKFVLHDGPPYANGNIHMGTALNKILKDIIVKFHQMDGKDSIYVPGWDCHGLPIEWKIEEEYKKNKKNKNDVPIVEFRKECRSFAEKWIEIHKGQFKRLGVVGDWENYYSTMSFDAEAQIVRELGKFLKEGSLYRGYKPVLWSTVEKTALADAEVEYQDHRSDTIYTSFSVRSSKIKELEESEIIIWTTTPWTIPANKALAYNEGLEYIILQVNDEGDFKNRKIVIAKALLESVINECGIKNYKEIKKFKGKEFKDTIC

SEQ ID NO: 162014 - protein, 254 aa, Unknown
  Bacterial polypetide isolated from the Sargasso Sea
VTLEQGTGIVHCAPSHGPDDFNLCLRYGMKAIETVNNDGRYTKNIPIFEGTHVFKADDIIIKNLDEQKNLLGSGSLVHSYPHSWRSKAPLVHRATPQWFISMESHKLRNKALESIDKTSFYPEKGKARIRAMIETRPDWCISRQRSWGVPLPIFINKKTNEPLRDKGVIENIAKIYESEGSDCWFYDDPQRFLGNKYKKEDYIKSSDIVEVWFDSGSTHSFVLEKRKDLKWPASMYLEGSDQHRGWFHSSLLAS

SEQ ID NO: 162015 - protein, 277 aa, Unknown
  Bacterial polypetide isolated from the Sargasso Sea
LVELEEKHLFETILSHGFVVDGKGLKMSKSLGNVISPDDILKKYGADILRIWVAASNYSEDLRIDYTILEQHADAYRKIRNTFRYILGNLRDEFSENDFNKINYNELCELDKLMLHKIYLLNDNYQKNFKSYNFHLLYKDLLNFCTVDLSSFYFDIRKDSLYCDDLKSKRRKDCLQILNVLLDCLLKWFAPILSFTTEEIFKLINKKSNESIHLEKFVTIPDSWKNENLAKKWKEILNVREIANSSIELKRADKLIGSSLEAEIIIELNKEKYDLLK

SEQ ID NO: 162016 - protein, 294 aa, Unknown
  Bacterial polypetide isolated from the Sargasso Sea
DIYEKEGSDTWFTENLQRFLGDKYKLEDYEQVKDVVEVWFDSGSTHAFCLEKREDLKWPASMYLEGSDQHRGWFHSSLLESSGTRGRAPYESVLTHGFVVDGKGRKMSKSLGNVISPDDILKKYGVDILRLWVVASDYYDDLKLDNSILQSQTDSYRRIRNTFRYLIGNLDGFNINEKIDENKFPELEKFILHRLWEVDQIVIRCVTNFNFHLMFTTLLNFCSNELSAFYFDIRKDVIYCNGKNSIERRSARTLLDIIFNYLVRWFAPSLSFTAEEAWKARGNKSSIHLEDFLK

SEQ ID NO: 162017 - protein, 285 aa, Unknown
  Bacterial polypetide isolated from the Sargasso Sea
MIRKNFFGKKYKADDFEKLSDIVEVWFDSGSTHSFVLEKRKDLKWPASMYLEGSDQHRGWFHSSLLESCGTRDRAPFESILSHGFVVDGKGLKMSKSLGNVIAPEDILKKYGADILRIWVASSNYAEDLRIDYSILDQHAESYRKIRNTFRYLLGNLNDNFEEIDLEKIKIEDLPELEQFMLHKIYNLNSKFNKYFKDYDFHNLYKELLNFCTVDLSAFYFDIRKDTLYCDPINSEKRKSTLILLNVILNSLIRWFAPILSFTTEEIYQLISKKNKSIHLEKFLN

SEQ ID NO: 162018 - protein, 244 aa, Unknown
  Bacterial polypetide isolated from the Sargasso Sea
MSDSKKPTPEKSKYPVNLLDTPFPMRGDLPKREPLWVKQWQDKQLYKKIRAARKGAKKFILHDGPPYANGDLHIGHAVNKILKDMVIKARGLTGLDAVYVPGWDCHGMPIEIQIEKQFGKGLPVKEVQEKARAYATGQIARQKADFERLGVLGDWADPYLTMNFRNEADEVRALGKILEKGYVFRGLKPVNWCFDCGSALAEAEVEYADRTDLSIDVGFPFADIDALASAFHVGAEVLKAKPGW

SEQ ID NO: 162019 - protein, 305 aa, Unknown
  Bacterial polypetide isolated from the Sargasso Sea
PEILKIWAGLNLYSKLRNLRKGKEKFILHDGPPYANGHIHMGTALNKILKDMITRFHQMDGKDSVYVPGWDCHGLPIEWKIEEQYKKNKKNKDEVPIKNFRNECREFAEKWIQIHVKEFKRLGVEGDWENYYSTMSFDAEAQIVRELGKFLLDGSLYQGYKPVLWSTVEKTALADAEVEYKDHTSNTVYVGFKVKSSKINLLKDAEVIIWTTTPWTIPANKALAYNKNLDYSIIEINSLLKNFDNKKIIIATQLLDQVSKECEIGNYKLIKKIKGKDFEGTICSHPFENLGYNYDVPMLEANFVT

SEQ ID NO: 162020 - protein, 281 aa, Unknown
  Bacterial polypetide isolated from the Sargasso Sea
PASMYLEGSDQHRGWFHSSLLESCGTRGRAPFESILSHGFVVDGKGLKMSKSLGNVIAPEDILKKYGADILRIWVASSNYAEDLRIDYSILDQHSESYRKIRNTFRYLLGNLNDNFEEIDLEKLNIKELPELEQFMLHKLFKLNQNFNKYFKSYDFHNLYKELLNFCTVDLSALYFDIRKDTLYCDPKDSKKRKSTLLLLNIILNTLLKWFAPILSFTTEEIYQLISKKNKSVHLEKFPDIGEKFENKNLFNKWIELIKIRDICNISIEEKRATKVIGSSL

SEQ ID NO: 162021 - protein, 253 aa, Unknown
  Bacterial polypetide isolated from the Sargasso Sea
MEKRDDLKWPASMYLEGSDQHRGWFHSSLLESCGTRGRAPFESILSHGFVMDGKGLKMSKSLGNQILPDDILKKYGADILRVWVTASDYAEDLRIDYSILEQHAEAYRKIRNTFRYLMGNLNDNFLEQDYEKIKINNLPELEQYMLHKLYVLNESFNKNFKLYNFHVLYKDLLNFCTVDLSSFYFDIRKDTLYCDKKNSDKRANCILTLNIILDGLLRWFAPILSFTTEEIFKLLNKDDTNSIHLKKFPHISV

SEQ ID NO: 162022 - protein, 256 aa, Unknown
  Bacterial polypetide isolated from the Sargasso Sea
EAGTGLVHTAPGHGVDDFNTGRQHDLPVLCPVDEGGWLTEEAGPFAGLNVLKDANPTIIEALSQAGALLKEQRYEHRYPYDWRTKKPTIFRATEQWFASVEGFRERALAAIAEVEWMPASGRNRIEGMVRERGDWCISRQRTWGVPIPVFYHRSSGEVLLNADTLQHIQALIAEHGGDVWWEREEAELLPPAYRDQADQWRKGTDTMDVWFDSGSSWAGVLQGLDGDTSDAALNYPADLYLEGSDQHRGWFQSSLL

SEQ ID NO: 162023 - protein, 275 aa, Unknown
  Bacterial polypetide isolated from the Sargasso Sea
MSKDNLQLPKTSFSMKANLPSKEPAILSKWEKNDMFNKLRKKSFGRKKFVLHDGPPYANGHIHMGTALNKILKDMVTRFHQMTGKDSIYVPGWDCHGLPIEWKIEEQYKKNKKNKDQVPIKDFRNECREFAKKWIKIQTEEFKRLGVVGDYKNYYSTMSFNGEAQIVRELGKFLLDKSLYQGFKPVLWSTVEKTALADAEVEYKDHTSNTIFAAFKVKKTDKDFLKDASVVIWTTTPWTIPANKALAFNSSLEYTVLEIQNLENFKEEKIILAKD

SEQ ID NO: 162024 - protein, 302 aa, Unknown
  Bacterial polypetide isolated from the Sargasso Sea
LLESCGTRDRAPFESILSHGFVVDGKGLKMSKSLGNVIAPEDILKKYGADILRIWVASSNYAEDLRIDYSILDQHAESYRKIRNTFRYLLGNINDKYETINFDELDVDSLPELEQLMLHKIYVLNSNFKKYFKNYDFHNLYKELLNFCTVDLSAFYFDIRKDNLYCDPIDTEKRKSTILLLNIILNALLKWFAPILSFTTEEIFKLLFKDQKSIHLEKFLEFPDKFKNEKLSNKWIELVKIRNICNISIEEKRASKEIGSSLEANLKIEINQKLKNLTENTDFSELCITSKAEVSYKEDAET

SEQ ID NO: 162025 - protein, 291 aa, Unknown
  Bacterial polypetide isolated from the Sargasso Sea
NKIFEKLRKKSKGKEKFVLHDGPPYANGHIHMGTALNKILKDMITRFHQMNGKDSVYVPGWDCHGLPIEWKIEEQYKKKKKNKDEVPIKDFRQECREFAKSWIEVHIKEFKRLGVVGDFENYYSTMSYEAEAQIVRELGKFLLDGSLYQGFKPVLWSTVEKTALADAEVEYLDHTSNTIYVAFKVKETTKDFLKDTSIIIWTTTPWTIPANKALAFNSNIEYSVLEIEDLEYFKGKRIVVAKNLIESITKECEIKNFKELKTFKGFEFKGTECSHPFLNIDFEYNVPMLDA

SEQ ID NO: 162026 - protein, 276 aa, Unknown
  Bacterial polypetide isolated from the Sargasso Sea
KTDKDFLKDSSIIIWTTTPWTIPANKALAYNPNLNYSVLQVDNKKIIIAEKLVNSVVENCGLGKFKILKSFEGKIFKNTICSHPFKNLGYKFDVPMLEADFVTLEQGTGIVHCAPSHGPDDFNLCLKHGMKAIETVNNDGRYTKNIPIFEGIHVFKADEIIIKNLAEQKNLLGSGSLVHSYPHSWRSKAPLVHRATPQWFISMESHKLRNKALKSIDQTAFFPEKGKARIRAMIETRPDWCISRQRSWGVPLPIFVNKKTNEPLRDKEVVENIAKI

SEQ ID NO: 162027 - protein, 272 aa, Unknown
  Bacterial polypetide isolated from the Sargasso Sea
MDHVSDTIYTAFNVKDTNLDIIKGADVIIWTTTPWTIPANKALAYNSGLKYILLEINDNKNFVNRKIVIAKDLLEPFKKDTSIENIKILNEFLGKDLKGTICSHPFSKMGYDYDIPMLDANFVTTEQGTGIVHCAPSHGPDDFNLCLNNNIKAIETVDGDGKYTNEIKLFEGLHIFKANNLIIEKLDEQNNLLKNGKLTHSYPHSWRSKAPLVHRATPQWFISMESHGLRDKALKAIDNTDFYPSKGKERIKSMIETRPDWCVFRQRVWGVP

SEQ ID NO: 162028 - protein, 283 aa, Unknown
  Bacterial polypetide isolated from the Sargasso Sea
PRFTLHDGPPYANGALHVGHALNKTLKDIINKYQLLNGRRARYIPGWDCHGLPIELKVLQSLKGEERRNLSPLELRRKAHAYALEQVEGQRRGFQRWGIWGEWDTPYLTLQKRYEAAQIEVFGRMVLAGHIYRGLKPVHWSPSSRTALAEAELEYPDGHTSPSVFVAFPLEQPSAALKALMESHGEGPVAVAIWTTTPWTLPANVAVAVNGRLDYALCSSGDGRRLLVASELVESLSQQLELPLQSLASLKGEELQGSRYRHPLMERTSPVVVGGDYITTEAG

SEQ ID NO: 162029 - protein, 283 aa, Unknown
  Bacterial polypetide isolated from the Sargasso Sea
GNAQSQVNQQKKDFILLGVLGDWDNPYLSLNKSFEADTVRALGRIIANGHLEKGEKPVHFCMDCGSALAEAEVEYKDKKSHSIDVKFKVKPESIESLSNSFKTKKIKDAFFVIWTTTPWTIPSNVAVCINGSIDYILVKSANEHFVIAKDLMDACSERWNLELEVIGSVQGKEIENIAMTHPLYDRESTLLHADHVTTESGTGCVHTAPAHGLDDYFICIKNGLEFVKALDHRGLFKEDYGPLTGLSTKKGDPVVIELLNEKNALLANKQYDHSYPHCWRHKS

SEQ ID NO: 162030 - protein, 277 aa, Unknown
  Bacterial polypetide isolated from the Sargasso Sea
MKANLPNREPEILKFWDEIHLYKKIREKGQGKKPFLLLDGPPYANGKIHIGHALNKILKDFIIKSKTLFGYDAPYLPGWDCHGLPIEHQVEKKKGKVGPKLTAKEFRDHCREYALKQVEEQKEDFIRLGVPGEWENPYLTLDKKYEAEQIRAFAEIYANNHVTHGHKPVHWCLDCQSALAEAEVDYMDKVSTSVDVLFKVIDTSEFIIRTESKKIDDGRDLYIPIWTTTPWTLPSNEAVAMGKDISYGIYMLTSNEREILVIIANDLKETIKNRWNV

SEQ ID NO: 162031 - protein, 82 aa, Unknown
  Bacterial polypetide isolated from the Sargasso Sea
MSEKKDQKLNLPKTEIPMKANLNEREPKMLEEWSKREVYEKIRKQNSGKEKFILHDGPPYANGKIHIGHAVNKVLKECSNQI

SEQ ID NO: 162032 - protein, 325 aa, Unknown
  Bacterial polypetide isolated from the Sargasso Sea
ADLYLEGSDQHRGWFQSSLLTSMAINDCAPYKAVLTHGFVVDGEGKKMSKSLGNVISPQKIWETMGADVLRAWIASTDYTKEIVLSDDILKRSADSYRRIRNTIRFLLGNLNDYDGQIIEPDKLTELDKWMILRTKTLQEQIKDDYLNYNFHQAFQKIHNFCANDLGGFYLDILKDRLYTARLDSDARRSSQVALSNILQALLRWVSPILSFTAEEAWQSLGSDTKSVHLLEWFQDWTEVGELRFFDEEWEKILEIRSEVNKHIEEARNNEIIGSSLEAELELYCDTDIKTLLDNFSEELRFIFITSEAKVYQLGQNGNDTNIQG

SEQ ID NO: 162033 - protein, 283 aa, Unknown
  Bacterial polypetide isolated from the Sargasso Sea
MSGTYCEHPFKSIGYDFIVPALEADFVNLEQGTGIVHVAPGHGADDYNLGIENDIDVVQTVEDDGKYNRNAIGFEGEHVFKVDLKIAEKLQSLNKLLYLGKLRHSYPHSWRSKAPLIFRNTPQWFISMEKNNLRKKALKSIDETVFYPPQSQTRLRSMIETRPDWCISRQRVWGVPLPLFINKKDGQPLRDINIINRIADIFEKEGSDTWFTYDPQEFLGTDYSADDYDQIQDIVEVWFDSGSTHAFCLEKREDLKWPASMYLEGSDQHRGWFHSSLLESTGY

SEQ ID NO: 162034 - protein, 335 aa, Unknown
  Bacterial polypetide isolated from the Sargasso Sea
RIKSMIETRPDWCVSRQRVWGVPLPIFISKKTNNVLIDDDVFENIANIYEKEGSDCWFSDDPQKFLGDKYKAEDFEKLNDIVEVWFDSGSTHSFVLEKREDLKWPASMYLEGSDQHRGWFHSSLLQSCGTRGKAPFESILSHGFVVDGKGHKMSKSAGNTISPEEILKKYGADILRIWVAASNYAEDLRIDYSILEQHAEAYRKIRNTFRYLLGNLNDEVIDLDFNNIKVNELPELEQIMLNKIQVLNTKFHYNFNIYNFHNLYKELLNFCTVDLSSFYFDIRKDTLYCDTKSSKKRKSCIEVLNVIINCLLKWFAPILTFTTEEIYKIINKDGK

SEQ ID NO: 162035 - protein, 436 aa, Unknown
  Bacterial polypetide isolated from the Sargasso Sea
MIKKTWFEKFAQIIEKDGISAWDKLNLKDYIDDHEEYIKTSDSLDVWFDSGITHYAVSSKRFGKNVVADLYLEGSDQHRGWFQSSLLTSIAMNNYAPYKTVLTHGFVVDEHGRKQSKSLGNVVAPQKVWDSLGADILRLWVASTDFRSEMVASDEILKRTSDQYRRIRNTFRFILGNLSDFSDKNKVKFEDQVELDKWVINELKVLQKEIISLYESYSYHKAIQKIHNFCVNELGGIYLDIVKDRLYTSKNDSLARRSCQTSLDFILNVLVRLIAPILSYTAEEIWQTSNRLNGQEDSVFLSNFDISEINFESNINQSEWKRIFEIKDAVNQSIEEMRNENKIKGSLDSVVDIQASSNDLNILKKLGEELHFLFISSEANVEKSKDFKIKINSSKNPKCTRCWHRCSSVGVNKEHPELCNRCIKNIDDNGEQRSFV

SEQ ID NO: 162036 - protein, 473 aa, Unknown
  Bacterial polypetide isolated from the Sargasso Sea
GKFLKEGSLYKGYKPVLWSTVEKTALADAEVEYQDHVSDTIYVAFPVKKSNINELIGSSVVIWTTTPWTIPANKALAYNQSLDYVLCEIDNNDILENEKIVIAKELLSSVAKDTDYKIKILKEFEGKEFDGTICSHPFHKIGYDYDVPMLEARFVTTEQGTGIVHCAPSHGPDDFNLCINNGIKAIETVDDDGRYTKHIPIFEGTHIFKANDIVIEKLKELKALLKNGKLTHSYPHSWRSKAPLVHRATPQWFISMESHKLRDKALKAINDTTFYPSKGKERIKSMIETRPDWCVSRQRVWGVPLPIFISKKNGEILIDEEVFENIAKIYEKEGSDCWFEDNFQRLLGNKYKAGDFDKTSDIVEVWFDSGSTHSFVLEKREDLKWPASMYLEGSDQHRGWFHSSLLESCGTRGRAPFESILSHGFVVDGKGLKMSKSTGNVIAPEDILKKYGADILRIWVASSNYAEDPRIDY

SEQ ID NO: 162037 - protein, 346 aa, Unknown
  Bacterial polypetide isolated from the Sargasso Sea
MSKAHLNLPKTAFSMKANLPNKEPEYLKFWDKINLYEKLRSQSKGKEKFVLHDGPPYANGNIHMGTALNKILKDIIIKFHQMDGKDSVYVPGWDCHGLPIEWKIEEQYKKNKKNKNDVPIIEFRKECRDFASKWIDIHKDQFKRLGVIGDWENFYSTMSFDAEAQIVRELGKFLKEGSLYKGYKPVLWSTVEKTALADAEVEYQDHVSDTIYAVFQVKKSNINELIGSNIVIWTTTPWTIPANKALAYNQSLDYVLCEIDNKDILENEKIVIAKDLLASVVKDTDYKIEILKEFKGKEFDGTICSHPFHKIGYDYDVPMLEARFVTTEQGTGIVHCAPSHGPDDFI

SEQ ID NO: 162038 - protein, 428 aa, Unknown
  Bacterial polypetide isolated from the Sargasso Sea
YLNQADRWKKGTDTMDVWFDSGSSWSSVISKKENLNYPADLYLEGSDQHRGWFQSSLLTSVAVNEHAPFKKVLTHGFALDENGRKMSKSLGNIIDPLVIINGGSNKKLDPAYGADVLRLWVSSVDYSADVPIGSNILKQISDVYRKVRNTSRYLLGNLYDFDYKIDSIDIANLPLLDKWMLNRTAEVIDEISDAYNNFEFSKFFQIIQNFCVVDLSNFYLDIAKDRLYVSSKSDFRRRSCQTVLSLVIEKISGLIAPVLCHMAEDIWQNIPYDLEEASVFQRGWPNVPKSWRNSSFNCHVTELRKLRAVINRMLESCRNNQELGSSLEASVRVDISDEKVKAAIEWLSESESNNVDVLRDWFLVSSLQIGGEPWAEVLVSEDNDYASVEIAKARGFKCERCWHYEIEMSKNPQHTNICKRCEKIVLAI

SEQ ID NO: 162039 - protein, 398 aa, Unknown
  Bacterial polypetide isolated from the Sargasso Sea
VEIEEQYKKNKKNKNDVPVIEFRKECRDFASKWIEIHKDQFKRLGVIGDWENYYSTMSFDAEAQIVRELGKFLKEGSLFKGYKPVLWSTVEKTALADAEVEYQDHISDTIYAAFLVKSSNIKEIIGSNIIIWTTTPWTIPANKALAYNQSLDYVLCEIKNKDKLNNEKIIIAKELLESVSKDTECKINILSKFKGKKFEGTICSHPFHKIGYDYNVPMLDARFVTTEQGTGIVHCAPSHGPDDFNLCINNGIKAVETVDDDGRYTNHIPIFEGTHIFKANEIVIDKLKETNTLLSNGKLTHSYPHSWRSKAPLVHRATPQWFISMESHKLRDKALKAIDDTTFYPAKGKERIKSMIETRPDWCVSRQRVWGVPLPIFISKKNGEILIDDEVFENIAKI

SEQ ID NO: 162040 - protein, 433 aa, Unknown
  Bacterial polypetide isolated from the Sargasso Sea
MSKSNINLPKTAFSMKANLQNKEPGIIDYWDKIDLYKKLRSIGKGKKKFILHDGPPYANGDIHMGTALNKILKDVIVKFHQMKGEDSVYVPGWDCHGLPIEWKIEEQYKKNKKNKNEVPVNEFRKECRDFAKKWIEVHKKQFKRLGVVGDWENYYSTMSFDAEAQIVRELGKFLKEGSLYRGYKPVLWSTVEKTALADAEVEYMDHKSDTIYAAFNIKKSKNEKLLNTQIIIWTTTPWTIPANRALAYNENLKYVIIKIEDQSDFKDKQIVVAEDLLKSLIEDCNIKKFTKVLNFSGKEFQGTICTHPFSKIGFDYDIPMLSANFVTTEQGSGIVHCAPSHGPDDFNLCLKNNIKAEETVDDDGKYTKHVPTFEGIHIFKANKVVIEKLKEQKNLLSSGELIHSYPHSWRSKAPLVHRATPQWFISMESHGLR

SEQ ID NO: 162041 - protein, 334 aa, Unknown
  Bacterial polypetide isolated from the Sargasso Sea
MTHGFVVDGEGQKMSKSLGNVISPQDIIKEKGSDILRLWIANTDYTKEMTISDEILTRTSESYRRIRNTIKFLLSNINDYTSDGQIQTEDMPLVDKWILNETQDLQDRVTRYYEEFKFHQITQDIQNFCTIYLGGYYLDIIKDRLYTVKTDSMSRRSCQEACKRILKILNKIISPILSFTAEEVFNYYKIKDEESVFYTEWPEHTCNLSDKEQEIGNVLFQLRQTVSKELDDARNANKIGSSLDANIILKLNHKKFNLLKDYEDELKFIFISSSCDIVDNGNDNDEITINSSPHKKCTRCWHKHESVGTIEGHPEICERCFSNIEGDGETRKLA

SEQ ID NO: 162042 - protein, 382 aa, Unknown
  Bacterial polypetide isolated from the Sargasso Sea
MSKEDINLPKTSFSMKANLPNKEPEILKIWDRLDLYKKLRESSKGKEKFVLHDGPPYANGHIHMGTALNKILKDMITRFHQMNGKDSVYVPGWDCHGLPIEWKIEEQYKKNKKNKNDVPVIEFRKECREFANKWIKVHKSEFSRLGVIGDWDNYYSTMSFGAEAQIVRELGKFLKEGSLYRGYKPVLWSTVEKTALADAEVEYMDLVSDTIYAAFKVKESSLDFIKGADIVIWTTTPWTIPANKALAYNAGLKYVLMEVNDDKNFVNRKIVIAKDLLEPFKKDTSIEKVNILEEFNGKEFTNTICRHPFSELGYDYDIPMLEANFVTTEQGTGIVHCAPSHGPDDFNLCINNNIKAIETVDGDGKYTNEIKIFEGLHIFKAN

SEQ ID NO: 162043 - protein, 424 aa, Unknown
  Bacterial polypetide isolated from the Sargasso Sea
ADHWIEIQREEFKRLGVMGDWDNPYTTMAYKAEARIAAEIGKFLINGGLFRGSKPVLWSVVEKTALAEAEVEYMEHKSTTLFVRFPVTSTPDAAIKGTNIVIWTTTPWTIPGNRGIAFSAEDKYGIYEVTAITETSKALIGERLVLADKLAESVREVAHIESWIRVSDVNELDGTICAHPWRGKGFDFDVPVLPGEFVTMEQGTGLVHIGPGHGTDDFNFAIEHGLEIPQTVGEDGSFYAHVPLVTGKVIYTQDGKSGDANGAVIRELLEVDGLLAKSSFRHEYPHSWRSKAPLIFRNTAQWFISMDINDLRKKALNAIDQTKFYPKQGKNRLYSMIENRPDWCVSRQRAWGVPITVFVHKKTGEPLRDQKVVDRIVDAFRKEGADAWFVSPTERFLGDEYDPDDFEQVRDVVDVWFDSGSTHT

SEQ ID NO: 162044 - protein, 276 aa, Unknown
  Bacterial polypetide isolated from the Sargasso Sea
MSKEQINLPKTAFSMKANLPVKEPDLIKYWTNINLYKQLRDKSKGQKKFVLHDGPPYANGNIHMGTALNKILKDIVTKFHQMSGQDSVYVPGWDCHGLPIEWKIEEQYKKNKKNKNDVPIVEFRKECREFAEKWIEIHKDQFQRLGVIGDWNNYYSTMSFDAEAQIVRELGKFLKEGSLYRGYKPVLWSTVEKTALADAEVEYLDHTSDTIYTSFPVKKSKNKYLLDCEVIIWTTTPWTIPANKALAYNKSLKYLIIEVTSDSDFKNKKVIVAKDL

SEQ ID NO: 162045 - protein, 369 aa, Unknown
  Bacterial polypetide isolated from the Sargasso Sea
MSKDTLQLPKTAFSMKASLPLKEPEILKKWEKNKIFEKLRKKSKGKEKFILHDGPPYANGHIHMGTALNKILKDMITRFHQMNGKDSVYVPGWDCHGLPIEWKIEEQYKKKKKNKDEVPIKDFRQECREFAKSWINVHIKEFKRLGVVGDFENYYSTMSYEAEAQIVRELGKFLLNGSLYQGFKPVLWSTVEKTALADAEVEYLDHTSNTIYVAFKVKETNKDFLKDTSIIIWTTTPWTIPANKALAFNSNIEYTILEIDNLEHFKDKRIVVAKNLIESITKACEIKNYKELKSFKGSEFTGTICNHPFLKMDFDYNVPMLDAQFVNLEQGTGIVHCAPSHGPDDFNLCLKNNIPSLYTVDNAGVYTQG

SEQ ID NO: 162046 - protein, 310 aa, Unknown
  Bacterial polypetide isolated from the Sargasso Sea
MTKSQINLPKTAFSMKANLPTREPEILEYWKKINLYEELRNESKGKEKFVLHDGPPYANGNIHMGTALNKILKDIIVKFHQMDGKDSIYVPGWDCHGLPIEWKIEEQYKKNKKNKNEVPIVEFRKECRAFAEKWIEVHKSQFKRLGVVGDWENYYSTMSFGAEAQIVRELGKFLKEGSLYRGFKPVLWSTVEKTALADAEVEYQDHKSDTIYTSFKVKSSDLKDLAGSEIVIWTTTPWTIPANKALAYNDSLDYIILEINDEGDFKNRKIVIAHALLETVVKECGIKNYKKIHTFKGKDFDNTICSHPFL

SEQ ID NO: 162047 - protein, 443 aa, Unknown
  Bacterial polypetide isolated from the Sargasso Sea
MSKSNINLPKTAFSMKANLQNKEPGIIDYWDKIDLYKKLRSSSKGKTKFVLHDGPPYANGDIHMGTALNKILKDVIVKFHQMKGEDSVYVPGWDCHGLPIEWKIEEQYKKNKKNKNEVPINEFRKECRDFAKKWIEVHKKQFKRLGVVGDWENYYSTMSFDAEAQIVRELGKFLKEGSLYRGYKPVLWSTVEKTALADAEVEYMDHKSDTIYAAFNIKKSKNEKLLNTQIIIWTTTPWTIPANRALAYNENLKYVIIKIEDESDFKDKQIIVAEDLLNSLIKDCNIKKFTKVLTLSGREFEGTICSHPFSKIGFDYDIPMLSANFVTTEQGSGIVHCAPSHGPDDFNLCLKNNIKAEETVDDDGKYTKHVPTFEGIHIFKSNKIVIEKLKEQKNLLSCGELIHSYPHSWRSKAPLVHRATPQWFISMESHGLRKKALKSIDET

SEQ ID NO: 162048 - protein, 400 aa, Unknown
  Bacterial polypetide isolated from the Sargasso Sea
MAENNLNLPKTLFSMKANLPSKEPKILDNWDKTKLYEKLRKKSSGKEKFILHDGPPYANGHIHMGTALNKILKDIVTKFHQMNNKDSIYVPGWDCHGLPIEWKIEEEYKKKKKNKDEIPTKDFRKECREFAQKWIGIHKTEFKRLGVIGDWENYYSTMSFDAEAQIVRELGKFLLEGSLYRGFKPVLWSTVEKTALADAEVEYKDHKSNTIYAEFHIKKTDKDFLKDASIIIWTTTPWTIPANKALAYNKDLKYSVLQLDNKKIVVAEKLIDSVIENCGLGKFKILKSFEGQLFKNTICSHPFKNLGYNFDVPMLEADFVTLEQGTGIVHCAPSHGPDDFNLCLKNGMKAIETVNNDGRYTKNIPIFEGTHVFKADEIIIKNLSEQKNLLGSGTLVHSYP

SEQ ID NO: 162049 - protein, 469 aa, Unknown
  Bacterial polypetide isolated from the Sargasso Sea
MIGAFQDKGHGGVPIALLIHTETGELHPETPEVIEKVAVLVEAKGIQAWHDVAIKDLVDDHQDYEKITDCLDVWFDSGVTHACVLSANNELQFPADLYLEGSDQHRGWFQSSLLTSMAINDCAPYKAVLTHGFVVDGEGKKMSKSIGNVISPQKIWETMGADVLRAWIASTDYTKEIVLSDDILKRSADSYRRIRNTIRFLLGNLNDYDGQIIEPDKLTELDKWMILRTKTLQEQIKDDYLNYNFHQAFQKIHNFCANDLGGFYLDILKDRLYTARLDSDARRSSQVALSNILQALLRWVSPILSFTAEEAWQSLGSDTKSVHLLEWFQDWTEVGELRFSDEEWEKILEIRSEVNKHIEEARNNEIIGSSLDAELELYCDTDIKRLLDDFSEELRFIFITSEAKVYKSRQDGNDTNIQGLKINVRKTKYKKCVRCWHSRPEVGTIKGHEAICQRCYENVEGNGEIRIFA

SEQ ID NO: 162050 - protein, 404 aa, Unknown
  Bacterial polypetide isolated from the Sargasso Sea
WFDSGSSWAAVCELRSELKYPADLYLEGSDQHRGWFQSSLLTSVAVNNKPPYKKVLTHGFALDENGRKMSKSLGNVVDPNIIINGGNNKKTDPAYGADVLRLWVSSVDYSVDVPIGSNILKQLSDVYRKVRNTARYLLGNIHDYDPKIDSFEIDQLPLLDQWMLGRLVEVTEQISNAYENYEFSKFFQILQSFCVVDLSNFYLDIAKDRLYVSSKSQFRRRSCQFVMSKVVENLAVLISPVLCHMAEDIWQNIPYSTEEKSVFQRGWPTFSQSWRNQIVNEHIANLRNLRVEINKAIEGCRNKQIIGAALETEVNYLPEDQSLKDSLTWLKEFGNQDVDLFRDWLIVSNFQVVSDLVENSLIIDNNALGKIQINKAQGQKCDRCWHYQKETFNGIQNTKLCKRC

SEQ ID NO: 162051 - protein, 122 aa, Unknown
  Bacterial polypetide isolated from the Sargasso Sea
MKDYKDTLNLPGTSFAMKANLPNREPEILKFWDEIDLYRKIRKKSKGKKPFLLLDGPPYANGKIHIGHALNKILKDFIVKSKTLFGYDAPYLPGWDCHGLPIEHQVEKKKGKGWTQADSKRI

SEQ ID NO: 162052 - protein, 837 aa, Unknown
  Bacterial polypetide isolated from the Sargasso Sea
IFHLIQLQKRLKISWAKNNVFIKSSNRNNRENFVFFEGPPSANGKPGIHHVMARTIKDAFCRYKTIKGFNVKRKAGWDTHGLPVELGVEKELGISKDDIGNKISVSEYNRQCKEAVMKYTSDWESLTKEMGYWIDMSDPYVTFESKYMESVWWIIKDIYKKNLIYKGYTVQPYSPAAGSGLSSHELNQPGAYRDITDTSVVAQFKSVKKGLPNELINLYPFYFLAWTTTPWTLPSNTALTIGKKIKYSFVKTYNQYTKELVTVVIATKLIDKIFSKIFYEVKTEKEFDSYDTKRSNIPYLIFHEVSGKDLENIRYERIWQESPMPLDNPENAFRVIIGDFVTTDDGTGIVHTAPTFGADDYKAAKSAKPEVPPLQVLDKNGIKVPLVDLKGKFIDGIGLISGKYVKNEYYESDSMPEKSVDVEIAIRLKELNRAFKVEKYSHSYPHCWRTDKPVLYYPMESWFIKMDSLSNRMFELNQEINWKPKSTGEGRFGNWLKTANDWNLSRSRFWGIPLPIWTDEENEEIKVIGSAKELINEIETSVKNGHMLSNPYSDFDIGNMSDENYLNLDLHKDIVDEITLTSSKGKPMKREKDIIDVWFDSGSMPYAQFHYPFENKDLIDNKINFPADFIAEGVDQTRGWFYTLHAISTLVFDSISYKNVVSNGLVLDKNGHKMSKRLGNAVDPFKMIDEYGADAVRWYMVSNSNPWDNLKFDQEGVAEVKRKFFGTLHNVYSFFSLYANIDNFSYKEEIIEFEKRSELDQWILSELNSLIKKVDNHYNEYDLTPASREISDFVQEKLSNWYVRLSRRRFWKGEYNNDKISAYQTLYECLASISKVI

SEQ ID NO: 162053 - protein, 284 aa, Unknown
  Bacterial polypetide isolated from the Sargasso Sea
MSKENINLPKTQFSMKANLPSKEPGFIEYWDKIKLYDKLRKSTQGKEKFVLHDGPPYANGNIHMGTALNKILKDIITKFHQMDGKDSVYVPGWDCHGLPIEWKIEEQYKKNKKNKNEVPITEFRKECRDFANKWIKVHKDQFKRLGVIGDWENYYSTMSFDAEAQIVRELGKFLKEGSLYKGYKPVLWSTVEKTALSDAEVEYMDHTSDTIYASFIIKQSKIKELNDSEIIIWTTTPWTIPANKALAYKYKLKYLQVLLLDENEIKNRKIIIAKDFINSVIKGL

SEQ ID NO: 162054 - protein, 414 aa, Unknown
  Bacterial polypetide isolated from the Sargasso Sea
MSKDTLQLPKTAFSMKASLPLKEPEILKKWEKNKIFEKLRKKSKGKEKFVLHDGPPYANGHIHMGTALNKILKDMITRFHQMNGKDSVYVPGWDCHGLPIEWKIEEQYKKKKKNKDEVPIKDFRQECREFAKSWIEVHIKEFKRLGVVGDFENYYSTMSYEAEAQIVRELGKFLLDGSLYQGFKPVLWSTVEKTALADAEVEYLDHTSNTIYVAFKVKETDKDFLKDTSIIIWTTTPWTIPANKALAFNSNIEYTVLEIDQLEHFKNKRIVVAKNLIKSITKECEIKNYKELKTFKGSDFKGTICSHPFFKMDFDYDVPMLDAQFVNLEQGTGIVHCAPSHGPDDFNLCLKNNIPSLYTVDNSGVYTKEVPYFTNTHVFKADPIIIEKLKEQKQLLKNDKLNHSYPHSWRSKAP

SEQ ID NO: 162055 - protein, 415 aa, Unknown
  Bacterial polypetide isolated from the Sargasso Sea
NISSIYEKEGSDCWFSEDFQRFLGKKYKAEDYDKLSDIVEVWFDSGSTHSFVLEKREDLKWPASMYLEGSDQHRGWFHSSLLESCGTRDRAPFESILSHGFVVDGKGLKMSKSLGNVIAPEDILKKYGADILRIWVASSNYAEDLRIDYSILDQHAESYRKIRNTFRYLLGNINDKYETINFDELDVDSLPELEQLMLHKIYVLNSNFKKYFKNYDFHNLYKELLNFCTVDLSAFYFDIRKDNLYCDPIDTEKRKSTILLLNIILNALLKWFAPILSFTTEEIFKLLFKDQKSIHLEKFLEFPDKFKNEKLSNKWIELVKIRNICNISIEEKRASKDIGSSLEADLKIQLNQKLKSLTENTDFSELCITSSAEVSYKDDIETTAITSKANGSKCSICWKIKESACSRANCAVNIA

SEQ ID NO: 162056 - protein, 451 aa, Unknown
  Bacterial polypetide isolated from the Sargasso Sea
ANGHIHMGTALNKILKDVIVRTQQMSGKDSIYVPGWDCHGLPIEWKIEEQYRKKGKNKDDVPIVKFRQECREFAEKWISIQKAEFKRLGVEGDWPNPYLTMSNEAEGQIVRELGKFLLDKSLYKGARPVLWSVVEKTALADAEVEYEDHNSNTIYVKFLITKSKNNEFLDSNIVIWTTTPWTIPGNRALAYGENLEYCLIEVNEINKNSLAIIGEKLILAKDLITRVTEEIGITKFNKIKEFSGSLLKDVECEHPFKKLGYDFVVRLFHGDFVNLDQGTGIVHIAPAHGDDDYYLGIKNDVDIVQTVLDDGKFNQHAKGFEGDHIYKVDNKISDKLKEYNKLLKQGILRHSYPHSWRSKAPLIYRNTPQWFISMEKKDLRKKALKSIDETIFYPAQSKIRLRSMIETRPDWCISRQRVWGVPLPLFVNKKNGQPLRDIEVVNRIANIYEKR

SEQ ID NO: 162057 - protein, 361 aa, Unknown
  Bacterial polypetide isolated from the Sargasso Sea
RKILLEGSLYRGFKPVLWSTVEKTALADAEVEYQDHKSNTIYAEFEVKNTDQDFLKNTSVIIWTTTPWTIPANKALAYNQNLKYSVLQLDNKKIVIAEKLINSVIENCELGKFKILKSFEGKLFQKTVCSHPFKKLGYNYDVPMLDADFVTLEQGTGIVHCAPSHGPDDFNLCLKHGMKAIETVNNDGRYTKNIPIFEGTHVFKADEIIIKNLIQQNHLLGSGTLVHSYPHSWRSKAPLVHRATPQWFISMESHELRKKALASIDKTAFYPDKGRARIRAMIETRPDWCISRQRSWGVPLPIFVNKETNEPLRDSDVIEKIATIYEKEGSDCWFYDDPQRFLGKKYNKKDYTKSEDIVEVW

SEQ ID NO: 162058 - protein, 846 aa, Unknown
  Bacterial polypetide isolated from the Sargasso Sea
QVNRKAGWDTHGLPVELSVEKELGITKEDIGKKISVEEYNEACKNAVMRYTQIWNDLTQKMGYWVDIENPYITYESKYMESVWWLLSKLYNDNLIYKGYTIQPYSPKAGTGLSSHELNQPGCYKDVTDTTVVAQFKLKANKKSNALEKIISKNDCSNLYFLAWTTTPWTLPSNTALTVGPKIDYSIVKTHNVYTKKPIHVVLAKALITKHFGKGYKKVDHSDLVNNFESTDKEIPYFICGQFLGSELLGMQYEQLLPYCEPDENPENAFQIIPGDFVTTEDGTGIVHTAPTFGADDYMAAKQSNVPGMLVKDEKGNLVPLVTLQGKFRPEVSDFANMYVKNEYYADGDAPEKSVDVQIAIKLKEENKAFRVEKYVHSYPHCWRTDKPVLYYPLDSWFIRVTEKKEELIKLNNTIQWKPTSTGTGRFGKWLENANDWNLSRSRYWGIPIPIWSTKDGTEQKCISSIEELKAECQKAVDAGFMDKNPLNKFSVGDMSKENYDAVDLHKHFVDTIVLTSKSGNKMYRESDLIDVWFDSGSMPYAQLHYPFENKDKIESKESFPADFIAEGVDQTRGWFYTLHAIATMVFDSVAYKNVISNGLVLDKNGHKMSKRLGNATDPFDTLSKYGADATRWYMITNAQPWDNLKFDVEGIVEVQRKLFGTLHNTYSFFSLYANIDGFTNEKELIPITERPEIDQWVLSKLNSLIKDVDDLYTSFEPTQAGRLIQDFVNNQLSNWYVRLCRRRFWKSDDAQDKLSAYQTLYTCLKEISIIGSPIAPFYFDQLYCDLTQLSESVHLSDYPTVKESIINIDLEKRMDLAQKICSLSLGLRKKESIKVRQPLEKILIPS

SEQ ID NO: 162059 - protein, 316 aa, Unknown
  Bacterial polypetide isolated from the Sargasso Sea
MSKEHLNLPKTAFSMKANLPNKEPEYLKFWDKINLYKKLRFQSKGKEKFVLHDGPPYANGNIHMGTALNKILKDIIIKFHQMDGKDSVYVPGWDCHGLPIEWKIEEQYKKNKKNKNDVPVIEFRKECRDFASKWINIHKDQFKRLGVIGDWENYYSTMSFDAEAQIVRELGKFLKEGSLYKGYKPVLWSTVEKTALADAEVEYKDHVSDTIFVAFPVKKSNIQELIGSNIIIWTTTPWTIPANKALAYNQSLDYVLCDIDNKDILKNEKIVIAKELLPSVAKDTDYKIKILKEFKGKEFEGTICSHPFHKIGYEYD

SEQ ID NO: 162060 - protein, 449 aa, Unknown
  Bacterial polypetide isolated from the Sargasso Sea
MTGVFLDKEVWGVPIPVFMSKKTNEALVDDEVTNNIANIFEKEGADCWFEGDTQKFLGKKYKSQDYEKQTDIVEVWFDSGSTHAYVLEKRKDLKWPASMYLEGSDQHRGWFHSSLLESCGTRGRAPFDSILSHGFVVDGKGLKMSKSLGNIMSPEDILKKYGADILRIWVAASDYSEDLRIDYSILDQHAESYRKIRNTFRYLLGNLNDKFVKIDFEKINIKELPELEQYMLHKIFNLNNLFKKNFNDYNFHTLYKELLHFCTLDLSAFYFDIRKDTLYCDSIESQKRKSCIKFLNIVFEILLKWFAPILSFTTEEIYSLTKIESNNSIHLEKFPEIPSNWKNEDLETKWGQLIKIRDKCNSSIEIKRASKEIGSSLEVNLTINLNDKLMGIAKEVDFSELCITSAAKIKKLEKTNLEEIIIETNKAEGKKCPVCWKISKNECERHSKK

SEQ ID NO: 162061 - protein, 312 aa, Unknown
  Bacterial polypetide isolated from the Sargasso Sea
LKEGSLYRGYKPVLWSTVEKTALADAEVEYKDHKSDTIFTAFKVKKSNIKKLLNTEIIIWTTTPWTIPANRALAYNEKLKYLIIKIEDETDFKDKEIVIAEDLLKSILENCKIKKYKKIQTFLGKDFEGTICSHPFLAIGFDYDIPMLEANFVTKEEGTGIVHCAPSHGPDDFNLCLKNNIKAIETVDDDGKYTKHVPSFEGTHIFKANKIVIEKLKEQKKLLMSGELVHSYPHSWRSKAPLVHRATPQWFISMESHGLRDKALKAIDETKFFPNKGKERLKSMIELRPDWCVSRQRGMGGSDTCFYVKKNK

SEQ ID NO: 162062 - protein, 117 aa, Unknown
  Bacterial polypetide isolated from the Sargasso Sea
MKSQNSKEQKSDFSYKETLNLLKTDFSMRANSVVREPEIQNFWANNDIDFQLGSKNSGEIFTLHDGPPYANGALHMGHALNKVLKDIINKYKTLRGFRVHFVPGWDCHGLPIELKVL

SEQ ID NO: 162063 - protein, 604 aa, Unknown
  Bacterial polypetide isolated from the Sargasso Sea
MGYDYDIPMLEANFVTTEQGTGIVHCAPSHGPDDFNLCLNNNIKAIETVDGDGKYTNEIKHFEGLHIFKVNNLIIEKLDEQKNLVTNGKLTHSYPHSWRSKAPLVHRATPQWFISMESHGLRDKALKAIDNTDFYPSKGKERIKSMIETRPDWCVSRQRVWGVPLPIFISKKTGDVLVDDEVFENIAKIYEKEGSDCWFNEDYQIFLGDKYKAEDYEKLSDIVEVWFDSGSTHSFVLEKRDDLKWPASMYLEGSDQHRGWFHSSLLESCGTRGVAPFESILSHGFVVDGKGLKMSKSTGNVIAPQDILKKYGADILRIWVASSNYAEDLRIDYSILDQHAESYRKIRNTFRYLLGNIQDQYENLDFEKVKFENFDSLEKFMLHRIYIINENFKNNFKIYNFHNLYKELLNFCTVELSAFYFDIRKDTLYCEALNSDKRKNCITLLNIILQCLLKWFAPILSFTTEEIYQLVKKEEDSQSIHLQNFVSVPNSWNNIEISSDWEYVKKIRDIANISIENMRAEKSIGSSLEAMIEIKLNKEFYDKAKNINFAEICITSSASVIKEENLKNNIDVVAKKARGTKCPICWKIFESSCERHGHLNLNGQ

SEQ ID NO: 162064 - protein, 287 aa, Unknown
  Bacterial polypetide isolated from the Sargasso Sea
MSKEYRDTLNLPQTDLSMKAGLPKKEPEILAFWDSINLYHKIREQNKGKEQFILHDGPPYANGDIHLGHAVNKTLKDITIKFQSMLGKDAPYVPGWDCHGLPIELNVEKKHGKTSDLVRNKQSFIKACREYAQSQVNQQKKDFIRLGVLGDWENPYLSLNKSFEADTVRSLGRIIANGHLEKGEKPVHFCMDCGSALAEAEVEYKDKKSHSIDVKFKVIPQSIESLCNSFKINNIKDAYFVIWTTTPWTIPSNVAVCINKNIDYILVKSSNEHFIIAKDLLDAFQNA

SEQ ID NO: 162065 - protein, 462 aa, Unknown
  Bacterial polypetide isolated from the Sargasso Sea
MTKSQINLPKTAFSMKANLPTREPEILEYWKKINLYEELRNESKGKEKFVLHDGPPYANGNIHMGTALNKILKDIIVKFHQMDGKDSIYVPGWDCHGLPIEWKIEEQYKKNKKNKNDVPIVEFRKECRTFAEKWIEIHKSQFKRLGVVGDWENYYSTMSFGAEAQIVRELGKFLKEGSLYRGFKPVLWSTVEKTALADAEVEYQDHKSDTIYTSFKVKSSGLKDLAGSEIVIWTTTPWTIPANKALAYNETLDYIILKINDEGDFKNRKIVIADALLESVVKECGLKNFKKISTFKGKELNNTICSHPFLNLGYDHDIPMLEARFVTTEQGTGIVHCAPSHGPDDFNLCLNNGIKAIETVDGDGKYTKNVKLFEGIHIFKANPIVIEKLKEQKNLLFNGELVHSYPHSWRSKAPLVHRATPQWFISMESHKLRNKALKAIDETTFYPSKGKERLKSMIETRP

SEQ ID NO: 162066 - protein, 381 aa, Unknown
  Bacterial polypetide isolated from the Sargasso Sea
DQHRGWFQSSLLTSVAVNNKPPYKKVLTHGFALDENGRKMSKSLGNVVDPNIIINGGNNKKIEPAYGADVLRLWVSSVDYSVDVPIGSNILKQLSDVYRKVRNTARYLLGNIHDYDPKIDSFEIDQLPLLDQWMLGRLVEVTDQISNAYENYEFSKFFQILQSFCVVDLSNFYLDIAKDRLYVSSKSQFRRRSCQFVMSKVVENLAVLISPVLCHMAEDIWQNIPYSTKEKSVFQRGWPIFSQSWKNETLNEHITNLRNLRVEINKAIEGCRNKQIIGAALETEVNYLPEDKVIKDSLTWLQRFGNEDVDLFRDWLIVSNFQVVSDLVDHSLIIDKNELGKIQILKADGEKCDRCWHYQKETFSGIQNTKLCKRCSNIINL

SEQ ID NO: 162067 - protein, 433 aa, Unknown
  Bacterial polypetide isolated from the Sargasso Sea
VPLPIFIKKKTGEILVDDEVFNNIAKIYEKEGSDCWFSDDPQKFLGKKYKAEDFEKLSDIVEVWFDSGSTHSFVLEKRKDLKWPASMYLEGSDQHRGWFHSSLLESCGTRDRAPFESILSHGFVVDGKGLKMSKSLGNVIAPEDILKKYGADILRIWVASSNYAEDLRIDYSILDQHAESYRKIRNTFRYLLGNLNDNFEQIDLEKIEIENLPELEQFMLHKIYNLNSKFNKYFKDYDFHNLYKELLNFCTVDLSAFYFDIRKDTLYCDPINSEKRKSTLILLNVILNSLLRWFAPILSFTTEEIYQLISKNKKSIHLEKFLNFPEKFDNSNLNSKWEQLIKIRDICNLSIEQKRASKDIGSSLEAALVVKLNNENQKLLKNIDLSELCITSSVKIENNDTNEIIVETNKASGEKCPICWKIRSAPCERPNCK

SEQ ID NO: 162068 - protein, 393 aa, Unknown
  Bacterial polypetide isolated from the Sargasso Sea
FLGSKYKAEDYEKLSDIVEVWFDSGSTHSFVLEKRQDLKWPASMYLEGSDQHRGWFHSSLLESCGTRGRAPFENILSHGFVVDGKGLKMSKSLGNVIAPEDILKKYGADILRIWVASSNYSEDLRIDYSILDQHAESYRKIRNTFRYLLGNIKDNFEEVDFETVDLNKLPELEQFMLHKLYTLNINFQKYFKNYDFHNLYKDLLNFCTVDLSAFYFDIRKDSLYCDPIESKKRKSTILLLNIILNSLLKWFAPILSFTTEEIYRLLFKDNKSIHLEKFLDFPISFSNEKLNEKWVELIKIRNICNISIEEKRADKEIGSSLEADLNIHLDKKLEEISQNIDFSELCITSKAEISFKQNIETIAHTIKAKGTKCTLCWKINENPCERVHCPKNY

SEQ ID NO: 162069 - protein, 875 aa, Unknown
  Bacterial polypetide isolated from the Sargasso Sea
MGFKESKNFSLNSIAKEIEDFWAKNDVFIKSSNRNNKENFVFFEGPPSANGKPGIHHVMARTIKDAFCRYKTIKGFNVKRKAGWDTHGLPVELGVEKELGISKDDIGNKISVSEYNRACKEAVMKYTSDWESLTKEMGYWIDMSDPYVTFESKYMESVWWIIKDIYNKNLIYKGYTVQPYSPAAGSGLSSHELNQPGAYRDISDTSVVAQFKSIKEGLPNELINLYPFYFLAWTTTPWTLPSNTALTIGEKIKYSFVKTYNQYTKQLVTVVIATKLIDKIFSKIFYEVKTEKELDSYDTQKPNIPYLICHEVSGKDLENIRYERIWEESPLPLDNPENAFRVISGDFVTTDDGTGIVHTAPTFGADDYKAAKSAKPEVPPLQVLDKNGIKVPLVDLKGKFIDGIGLISGKYVKNEYYESDSIPEKSVDVEIAIRLKEINRAFKVEKYSHSYPHCWRTDKPVLYYPMESWFIKMDSLSSRMFELNQEINWKPKSTGEGRFGNWLKTANDWNLSRSRFWGIPLPIWTDEENEEIKVIGSAEELINEIEASVKNGHMLSNPYSDFDIGNMSDENYLNIDLHKDIVDEITLTSSKGKPMKREKDIIDVWFDSGSMPYAQFHYPFENKDLIDNKINFPADFIAEGVDQTRGWFYTLHAISTLVFDSISYKNVVSNGLVLDKNGQKMSKRLGNAVDPFKMIEEYGADAVRWYMISNSNPWDNLKFDQDGVDEVKRKFFGTLHNVYSFFSLYANIDNFSYEEDVVVFEERSELDQWIISELNSLIKRVDNYYNDYELTPASREISDFVQEKLSNWYVRLSRRRFWKGEYNNDKISAYQTLYDCLSSISKLISPIAPFYSEYIYQCINTVTGKEEHESVHLSE

SEQ ID NO: 162070 - protein, 514 aa, Unknown
  Bacterial polypetide isolated from the Sargasso Sea
LTHSYPHSWRSKAPLIHRATPQWFISMESHNLRDKALKAINNTTFYPGKGKERIKAMIETRPDWCVSRQRVWGVPLPIFISKKNGETLIDEEVFENIAKIYEKEGSDCWFDDNFQRLLGDKYKAEDFDKTSDIVEVWFDSGSTHSFVLEKREDLKWPASMYLEGSDQHRGWFHSSLLESCGTRGRAPFESILSHGFVVDGKGLKMSKSTGNVIAPEDILKKYGADILRIWVASSNYAEDLRIDYSILDQHSESYRKIRNTFRYLLGNIQDEYTKLDFDKVDLNNIPELEKYMLHRLYVIGESFNEYFKSYNFHNLYKELLNFCTVELSAFYFDIRKDLLYCDPKDSKKRTDCILILKVILECLLKWFAPILSFTTEEIYHLIHKEDNNGSIHLQKFVKIPNQWKNDELNSKWDKLKLIRDEANISIESKRADKIIGSSLEANIEIKIKDKDMYSLAQNHDFSEICITSSASISNDNNLEKEIEITSSKAVGNKCPVCWKIRENICERDGNCHLS

SEQ ID NO: 162071 - protein, 287 aa, Unknown
  Bacterial polypetide isolated from the Sargasso Sea
MTVNYRDTLNLPDTDFSMKAGLPRKEPEILDLWSKQDLYAKIRKKYENKELFLLHDGPPYANGDIHLGHSVNKILKDITIKYKTLSGFDAPYVPGWDCHGLPIELNVEKKHGKNSELVKNKESFQKACKEYAETQINKQLDDFKRLGVFGDWENSYKSLDPKFEADIVRSLGIIYKEGHLEKGEKPVHWCQDCGSSLAEAEVEYIDKTSKSIDVAFKVDDTSIDKVKDLFNIKEADEISFVIWTTTPWTIPSNVAVCINPEFKYSLIKMNNKFYVIAFEMIDHCKEK

SEQ ID NO: 162072 - protein, 322 aa, Unknown
  Bacterial polypetide isolated from the Sargasso Sea
MKANYRDTLNLPDTEFSMKAGLPRKEPEMLDFWSNKDLYKKIRDKYKDKELFLLHDGPPYANGDIHLGHSVNKILKDITIKFKTLQGFNAPFVPGWDCHGLPIELNVEKKHGKNSKLVKNKESFQKACKEYAETQINNQLEDFKRLGVLGDWENSYKSLDPKFEADIVRSLGIIYNEGYLEKGEKPVHWCQESGSSLAEAEVEYIDKTSKAIDVAFKVDHSSLKKVRDLFSAVDSDEISFVIWTTTPWTIPSNVAVCINPEYKYSLIKMNNKFYVIAFEMIDQCSKRWKQKFDVISTIEGKKLNDIDLIHPFLDRKSVVFMQ

SEQ ID NO: 162073 - protein, 248 aa, Unknown
  Bacterial polypetide isolated from the Sargasso Sea
MEYKDTIFLPKSSFEMRGNLPLKEPKILEQWDKEKIFYKLREKSKGREKFVLHDGPPYANGHIHMGTALNKILKDVIVRTQQMAGKDSIYVPGWDCHGLPIEWKIEESYRKKGKNKDDVPVVKFRQECREFAEKWIDIQKKEFRRLGVEGDWSNPYLTMSNEAEAQIVRELGKFLIDESLYKGAKPVLWSVVEKTALADAEVEYEDHTSNTIYVKFLITSAGDKDLEGSNIVIWTTTPWTIPGNRALA

SEQ ID NO: 162074 - protein, 283 aa, Unknown
  Bacterial polypetide isolated from the Sargasso Sea
MKNNDYKTTLFLPQTAFPMKGGLPRKEPDLLERWRSLDLWKKLRDQSFGREKFVLHDGPPYANGPIHIGTAMNKILKDMINRSYQMLGRDAHYIPGWDCHGLPIEWQIEQEYRKSGKSKDEIPVTQFREECRAYATHWIAEQMKDFKRLGVLGDWDSPYLTMSFPAEAQIVRELGKFLLDGSLYKGAKPVMWSPVEKTALAEAEVEYKDISSTAIYVRFPITEAADNNLVGSSVVIWTTTPWTMPGNQAVAFGKDMDYGHYTVENVAEDSQMKEGERIIIAAS

SEQ ID NO: 162075 - protein, 245 aa, Unknown
  Bacterial polypetide isolated from the Sargasso Sea
MPENNLNLPKTSFSMKANLPSKEPKILETWDKIKLYERLRKKSEGKTKFVLHDGPPYANGHIHMGTALNKILKDIVTKFHQMNDKDSIYVPGWDCHGLPIEWKIEEQYKKRKKNKDEVPIKDFRKECREFAEKWIVIHKKEFKRLGVIGDWENYYSTMSFGAEAQIVRELGKFLKEGSLYRGFKPVLWSTVEKTALADAEVEYKDHKSNTIYAGFNVKKSDKDYLKNTSIIIWTTTPWTIPANKA

SEQ ID NO: 162076 - protein, 351 aa, Unknown
  Bacterial polypetide isolated from the Sargasso Sea
RGWFHSSLLESSGTRGRAPYESVLTHGFVVDGKGRKMSKSLGNVISPDDILKKYGVDILRLWVVASDYYDDLKLDNAILQAQTDSYRRIRNTFRYIIGNLDGFDNSEKIDESEFPDLEKYILHRLWEIDVIITDCVKNFNFHLMFTTLLNFCSNDLSAFYFDIRKDVIYCDGDKSKKRRSARTLLEIIFNYLVRWLAPSLSFTTEEAWKAMGNQTSIHLEDFLHIPAKYENLKINENWKIIKQIRKVITGALEIKRAEKLIGSSLEAHVDIYVDSETLEKIKNYPLDEISITSSFSLHVLTNDSQGFSLEDVADIKIAVSKTNGQKCQRCWKYKEQLIRNEICERCDNAIA

SEQ ID NO: 162077 - protein, 347 aa, Unknown
  Bacterial polypetide isolated from the Sargasso Sea
SSLLESAGTRGRAPYESVLTHGFVVDGKGRKMSKSLGNVISPDKVMSQYGVDILRLWVVASDYYDDLKLDNAILKAQSDSYRRIRNTFRYLIGNLEGFDEKEKINIEEFPELEKYILHRLWEVDQIIQKCVKDFNFHLMFTTLLNFCSNDLSAFYFDIRKDSIYCDSFDSKKRRSARTLLNLIFDHLVRWLAPSLSFTCEEAWKAKGNTSSIHLEDFLKASQDFKNNDIANKWNIIKNIRKVITGAIEKKRAEKLIGSSLEANVIIYVKEDLKKKIEEINFDEIAITSSFQLLDYKNKKDYFALEEIDDVAVTVEKTDGQKCERCWKYTDILQDKQICQRCDEAIKK

SEQ ID NO: 162078 - protein, 579 aa, Unknown
  Bacterial polypetide isolated from the Sargasso Sea
EVFDKKGKDGKANRGIIEKLVEVKSLLARGRLTHSYPHSWRSKAPVIFRNTPQWFVAIDKKPNDKMNDYGDTVRERAIKSIDKLVEWTPISGKNRLHPMISARPDWVLSRQRAWGVPLTCFVKKNKTAADKDFLLRDPEVNKRIVAIFREEGADSWFKKGAKKRFLEGLHDPEMYEQVYDILDVWFDSGSTHAFVLRDREDGVWPADLYLEGTDQHRGWFHSSLLQSCGTRGKAPYLGVLTHGFTLDEKGMKMSKSMGNTVSPDQVIKQYGADILRLWVAQADYSTDLRIGPEILKGVADSYRRLRNTLRFLLGSLVNFDESNELVKYKDLPELERWVLHRVTELDEIVKIGYEKYEFQTVFQQLFQFCTMDLSSFYFDIRKDTLYCDSSTSSLRKSCRTVLNILFYRLVTWLAPVMVFTTEEVWLERFPGDMSSVHLQDFPDETKEWKDQSLAVRWEAIRQVRKVVTGAIEVERQKKVIGSSLEAAPSIFIDNQDLYRVINSIDFAEISITSATSICEGNTSKKAFSLEESPDISVVFNRAAGEKCSRCWKYGTDLVTVQAGALVCHRCSDVISNQKK

SEQ ID NO: 162079 - protein, 423 aa, Unknown
  Bacterial polypetide isolated from the Sargasso Sea
KKTKDILVDDEVNENIASIYEKEGSDCWFSDNPQRFLGKKYKAEDYDKLSDIVEVWFDSGSTHSFVLEKRKDLKWPASMYLEGSDQHRGWFHSSLLESCGTRGRAPFESILSHGFVVDGKGLKMSKSLGNAIAPEDILKKYGADILRIWVASSNYAEDLRIDYSILDQHAESYRKIRNTFRYLLGNLNDNFESLDLEKIDLKKLPELEQYMLHKIYSLNLNFKKYFKIYDFHNLYKELLNFCTVDLSAFYFDIRKDTLYCDPKDSSKRKSTIILLNIILNSLLKWFAPILSFTTEEIYKLLNNDSRSIHLENFLDFPENFRNEKLNKKWNELIKIRNICNISIEEKRASKEIGSSLEVELEIKLDNKLLEVTKDVDFSELCITSKATTFYEEISELSVKAFKAKGSKCPVCWKISEDSCARHS

SEQ ID NO: 162080 - protein, 438 aa, Unknown
  Bacterial polypetide isolated from the Sargasso Sea
MSKDTLQLPKTAFSMKASLPQKEPEILKKWEKNNIFKKLRKKSKGKEKFVLHDGPPYANGHIHMGTALNKILKDMITRFHQMNGRDSVYVPGWDCHGLPIEWKIEEQYKKKKKNKDEIPIKDFRQECREFAKSWIEVHIKEFKRLGVVGDFENYYSTMSFEAEAQIVRELGKFLLDGSLYQGFKPVLWSTVEKTALADAEVEYLDHTSNTIYVAFKVRKTNKDFLKDSSIIIWTTTPWTIPANKALAFNSNIEYSVLEIENLEHFKEKRIVVAKNLIESITKECEIKSYKELMTFKGSEFKGTLCSHPFVKMDFDYNVPMLDAQFVNLEQGTGIVHCAPSHGPDDFNLCLKNNIPSLYTVDNAGVYTKEVPYFTNTHVFKADPIVIEKLKEQNKLLKNDKLNHSYPHSWRSKAPLIYRATPQWFISMQKNKLRDKAVK

SEQ ID NO: 162081 - protein, 510 aa, Unknown
  Bacterial polypetide isolated from the Sargasso Sea
YPHSWRSKAPLVHRATPQWFISMESHKLRDKALKAINDTTFYPSKGKERIKAMIETRPDWCVSRQRVWGVPLPIFISKKSGEILIDDEVFENIAKIYEKEGSDCWFEDNFQRLLGDKYKAEDFDKTNDIVEVWFDSGSTHSFVLEKREDLKWPASMYLEGSDQHRGWFHSSLLESCGTRGRAPFESILSHGFVVDGKGLKMSKSTGNVIAPEDILKKYGADILRIWVASSNYAEDLRIDYSILDQHSESYRKIRNTFRYLLGNIQDEYSKVEFDKIDLNNIPELEKYMLHRLYVINESFNEYFKSYNFHNLYKELLNFCTVELSAFYFDIRKDLLYCDPKDSKKRSDCILILKVILECLLKWFAPILSFTTEEIYHLIHKEDNNGSIHLQKFVKIPNQWKNVELNSKWDKLKLIRDEANISIESKRADKIIGSSLEANIEIKIKDKDMYSLAQNHDFSEICITSSASISNDINLEKEIEITSSKAVGNKCPVCWKIRENICERDGNCHLS

SEQ ID NO: 162082 - protein, 358 aa, Unknown
  Bacterial polypetide isolated from the Sargasso Sea
MTVDYKNTIFLPKTSFPMRAGLPKREPEILAEWEKIGLEKRLRTNRKGKEKFILHDGPPYANGHLHMGHALNKVLKDVINRSQQMLGKDANYVPGWDCHGLPIEWKIEEEYRSKGQDKDSVPILEFRRQCREFAEEWVKVQTAEFKRLGVTGTWDNPYTTMSFNAEAQISRELGKFLMNGGLYKGAKPVLWSAVEKTALADAEVEYHDHKSTTIHVRFPIVETPHSILNGASVIIWTTTPWTIPGNKAVAYGEDYGYGVYEVVDVDDESTAIVGEKIVVGDELIEEVKAAARILNTKKLASLNGTDFEKTKLTHPLKDDGYNFTVPMLPADFVTMDQGSGFVHIAPGAGADDFELGLK

SEQ ID NO: 162083 - protein, 407 aa, Unknown
  Bacterial polypetide isolated from the Sargasso Sea
NINTEIYLLAWTTTPWTLPANNSLAVNENMEYSIIKTINIYTNIPVTVILASSCISHYFENKNLKYELLKKIKGKDLLGFDYEQLLDYVPAEKPAFTILHADFVSSDEGTGIVHISRTFGSDDFFISEKYNIPGIFVKDEKGNNVPIVDKSGKFVKEIQDFSGMSVKNFGNDEELSTDIQIAIKLKKENKAFLVEKYEHSYPHCWRTDKPILYYPLESWFIATTKFKNELIQMNKEINWQPESTGSGRFGNWLENIVDWNLSRSRYWGTPLPIWTTENGDEEICIGSIKELKDEVKNSVKAGFMKNELPNGFDLHRPYIDDIILVSKSGKKMKRQKDIIDVWFDSGAMPFAQHHYPFSNKKNFDKLFPADFIAEGVDQTRGWFFTLHVLGVLLFNKISYKNVISNGL

SEQ ID NO: 162084 - protein, 373 aa, Unknown
  Bacterial polypetide isolated from the Sargasso Sea
MSKEHINLPKTVFSMKANLPNKEPNLIKYWDQIKLYESLRESTKGKEKFILHDGPPYANGNIHMGTALNKILKDIITKFHQMNGKDSVYVPGWDCHGLPIEWKIEEQYKKNKKNKNDIPIVEFRKECRDFANKWIKTHKDQFKRLGVVGDWENYYSTMSFDAEAQIVRELGKFLKEGSLYKGYKPVLWSTVEKTALSDAEVEYMDHTSDTIYVSFDIKKTNLKDLENSEIIIWTTTPWTIPANKALAYNENLTYQVIELNDENDFKNRKIVVAKDLLENVIKDCDIKNYKIIKEIKGENFEGTICSHPFISDGFDYDVPMLEARFVTIEQGTGIVHCAPSHGPDDFNLCLKHDIKALETVDDDGKYTKHIPFI

SEQ ID NO: 162085 - protein, 409 aa, Unknown
  Bacterial polypetide isolated from the Sargasso Sea
EKEGSDCWFTDDAKKFLGEDHDHKDFEKLNDIVEVWFDSGSTHSFVLEKRKDLKWPADMYLEGSDQHRGWFHSSLLESCGTRGTAPFKSILSHGFVVDGKGLKMSKSSGNVISPDDILKNYGADILRAWVASSDYAEDLRIDKNILAQHAESYRKIRNTFRFILGNIKDNFEEEKFSSLDIKKFDELEQYILHKVFTLDSLVKENLVNYNFHKLYKELLNFCALDLSSFYFDIRKDTLYCDSITSNKRRNCIRVLNIILECLLKWFAPIFVFTTDEIYSLVSKDKKNIHEYTFPKIPSSWKNNTLDHKWKELFKIKEVANIAIEEKRVSKEIGSSLEADLKITTDSKKFNILKDIDLAEYFITSKAEKIESKNKDELSIKVIKSKGIKCPRCWKILEKNCDRCKKATNV

SEQ ID NO: 162086 - protein, 134 aa, Unknown
  Bacterial polypetide isolated from the Sargasso Sea
MSDYKATLNLPETAFPMRGNLAQREPKMLKDWQEKGVYSKIREAKKGKKPFILHDGPPYANGDIHIGHAVNKILKDIIVKSKNLSDFDSPYVPGWDCHGLPIELMVEKKVGKPGKKVTAAEFRQKCREYAQKQN

SEQ ID NO: 162087 - protein, 274 aa, Unknown
  Bacterial polypetide isolated from the Sargasso Sea
MTVNYRDTLNLPDTDFSMKAGLPRKEPEILDLWSKTDLYGKIRKKYENKELFLLHDGPPYANGDIHLGHSVNKILKDITIKFKTLQGFNAPYVPGWDCHGLPIELNVEKKHGKNSELVKNKESFQKACKEYAESQINNQLNDFKRLGVFGDWENSYKSLDPKFEADIVRSLGAIFREGHLEKGEKPVHWCQESGSSLAEAEVEYIDKTSKAIDVSFKVDDSSLEKVKDLFSFKDLDEIFFVIWTTTPWTIPSNVAVCINPEFEYSLISMQNKFY

SEQ ID NO: 162088 - protein, 252 aa, Unknown
  Bacterial polypetide isolated from the Sargasso Sea
MSKEHINLPKTAFSMKANLPTKEPGIIEYWQKINLYEKLREKSKGKEKFILHDGPPYANGNIHMGTALNKILKDIITKFHQMDGKDSVYVPGWDCHGLPIEWKIEEQYKKNKKNKNDVPIVDFRKECRDFANKWINIHKDQFSRLGVIGDWKNYYSTMSFDAEAQIVRELGKFLKEGSLYRGYKPVLWSTVEKTALADAEVEYMDHVSDTIYSAFPIKKTNLKEIEDSNIIIWTTTPWTIPANKALAYNPSL

SEQ ID NO: 162089 - protein, 134 aa, Unknown
  Bacterial polypetide isolated from the Sargasso Sea
MKSQNNKEQKSDFSYKETLNLLKTDFSMRANSVVREPEIQNFWANNDIDFKLGSKNSGEIFTLHDGPPYANGALHMGHALNKVLKDIINKYKTLRGFRVHFVPGWDCHGLPIELKVLQNLKSDERKNLDTLNLR

SEQ ID NO: 162090 - protein, 395 aa, Unknown
  Bacterial polypetide isolated from the Sargasso Sea
KTALADAEVEYQDHKSDTIYTSFPVKTSNIDELIGSEIVIWTTTPWTIPANKALAYNKALDYILVQLCDDNDFKNRKVVVAEALLDSVIKNCSIKDFKKIKKFKGNELKDTICNHPFLNIGYNYDIPMLEARFVTTEQGTGIVHCAPSHGPDDFNLCLINGIKAIETVDGDGKYTKNVKLFEGIHIFKANPIVIGKLKEQKKLLSNGELVHSYPHSWRSKAPLVHRATPQWFISMDSHKLRAKALKAIDDTTFYPNKGKERLKSMIETRPDWCVSRQRVWGVPLPIFVNKKTKEILVDDEVNENIANIYEKEGSDCWFSDSPQRFLGTKYEAKDFDKLSDIVEVWFDSGSTHSFVLEKRKDLKWPASMYLEGSDQHRGWFHSSLLESCGTRGRAP

SEQ ID NO: 162091 - protein, 352 aa, Unknown
  Bacterial polypetide isolated from the Sargasso Sea
MTVNYRDTLNLPDTDFSMKAGLPRKEPEILDLWSKQDLYAKIRKKYENKELFLLHDGPPYANGDIHLGHSVNKILKDITIKFKTLQGFNAPYVPGWDCHGLPIELNVEKKHGKNSELVKNKESFQKACKEYAESQINNQLNDFKRLGVLGDWKNSYKSLDPKFEADIVRSLGIIFSEGHLEKGEKPVHWCQESRSSLAEAEVEYIDKISKAIDVSFKVDDSSLKKVKDLFSFEDLDEIFFIIWTTTPWTIPSNVAVCINPEFEYSLISMQNKFYVIASEMIDQCSKRWKQKFDVISTIKGNKLIDIDLIHPFLKRKSVLLHADHVTTETGTGCVHTAPAHGMDDYLICKKNN

SEQ ID NO: 162092 - protein, 440 aa, Unknown
  Bacterial polypetide isolated from the Sargasso Sea
VLHDGPPYAMGNIHMGTALNKILKDIYEKFHQMDGKNSVYVPGWDCHGLPIEWKIEEQYKKNKKNKNEVPITEFRKECRDFANKWIKVHKDQFKRLGVIGDWENYYSTMSFDAEAQIVRELGKFLKEGSLYKGYKPVLWSTVEKTALSDAEVEYMDHTSDTIYTSFPIKKTNLNELKDCQIIIWTTTPWTIPANKALAYNENLKYLVIHLLGDNQFLNSKIVIAKELLESFIKECNIEKYKILNEIPGKVFQGTICKHPFFDIGYDYDVPMLQARFVTTEQGTGFVHCAPSHGPDDFNLCLNNGIKALETVDDDGKYTKHIPIFEGTHIFKANVIVIDKLKEMKKLIANGKLNHSYPHSWRSKAPLVHRATQQWFISMESHGLRKKALKAIDETAFYPSKGKERIKAMIETRPDWCVSRQRVWGVPLPIFVSKKTNKVLI

SEQ ID NO: 162093 - protein, 134 aa, Unknown
  Bacterial polypetide isolated from the Sargasso Sea
MNTKNDKKDFSETLFLPKTSFAMRAGLPEQEPKILDGWSKDNIYEKLRKKSKSRKKFVLHDGPPYANGHLHMGHALNKILKDFVVRSQQMLGNDSSYIPGWDCHGLPIEWKIEEQYREQGRNKDHVDIIKFEKN

SEQ ID NO: 162094 - protein, 292 aa, Unknown
  Bacterial polypetide isolated from the Sargasso Sea
MTKSQINLPKTAFSMKANLPTKEPEILEYWKKINLYDKLRNLSKGNEKFILHDGPPYANGNIHMGTALNKILKDIIVKFHQMDGKDSIYVPGWDCHGLPIEWKIEELYKKNKKNKNEVPVVEFRKECRAFAEKWIEVHKSQFKRLGVVGDWENYYSTMSFDAEAQIVRELGKFLKEGSLYRGFKPVLWSTVEKTALADAEVEYQDHKSDTIYTSFKVKSSDLEVLVGSEIIIWTTTPWTIPANKALAFNESLDYIIIEVNDDNDFKNRKIVIADALLDSVVKECDLKNYKKN

SEQ ID NO: 162095 - protein, 154 aa, Unknown
  Bacterial polypetide isolated from the Sargasso Sea
LGDEYSLDDYEQVKDVVEVWFDSGSTHAFCLEQREDLKWPASMYLEGSDQHRGWFHSSLLESSGTRGKAPYESVLTHGFVVDGRGRKMSKSLGNVISPDDILKKYGVDILRLWVVASDYYDDLKLDNAILQSQAESYRRIRNTFRFFNWKFKQF

SEQ ID NO: 162096 - protein, 360 aa, Unknown
  Bacterial polypetide isolated from the Sargasso Sea
MWSTVEKTALADAEVEYMDHTSDTIYVSFHIQKSKLENLLGAEVIIWTTTPWTIPANKALAYNKSLKYVVIEVNDKGDFNNRKIIVAKDLLKSVVEDCKINDYKIISEINGSNFDGVVCSHPFKNLGYNYDIPMLEARFVTTEQGSGIVHCAPSHGPDDFNLCLNNNIKAVETVDDDGKYTKHVLNFEGIHIFKANPIVIEKLKNEKNLLANGKLNHSYPHSWRSKAPLVHRATPQWFISMESHKLRDKALKAIDDTEFYPAKGKERLRSMIETRPDWCVSRQRVWGVPLPIFISKSDGKVLVDDDVFENIASIYEKEGSDCWFSDDPQKFLGNKYKAEDFVKLKDIVEVWFDSGSTHSF

SEQ ID NO: 162097 - protein, 452 aa, Unknown
  Bacterial polypetide isolated from the Sargasso Sea
MAEAEVEYHDKESFTIWVKFKVIDNEDKELNGSQVVIWTTTPWTIPSNKAVVFGPDIKYGLYEVISRPDECWANIGDRYILADNLADGVMEKARLDNTNYRRIRDVTAEKLSKISLKHPLCSAKDANGEWDEIRDFRGADFVTDTEGTGFVHCAPSHGMEEYELYRELGMLAQVITYNVKDDGSFRDDLPFFGGKYILSRKGGEGDANKAVIDKLIEVDGLLARGKIKHSYPHSWRSKAPVIYRNTPQWFASIDREVGDNKDEFGRTIRERALNSIDKLVSWTPQTGRNRLYSMIETRPDWVLSRQRAWGVPLTCFTKKGALPTDSDFLLKNTAVNERIAEAFENEGADAWYLEDSKERFLNGIVDPAEYEQVYDILDVWFDSGSTHAFVLKEREDGSDDGLADLYLEGTDQHRGWFHSSMLQSCGTNGRAPYRGVLTHGFTLDEKGMKMSK

SEQ ID NO: 162098 - protein, 414 aa, Unknown
  Bacterial polypetide isolated from the Sargasso Sea
INLKDLVDDHDDYVKATDTLDVWFDSGSTHFCVLDKLYGKDLIADLYLEGSDQHRGWFQSSLLTGIAINGKAPYKAVLTHGFVVDENGRKQSKSLGNVVSPQKVCNNLGADILRLWVASTDFRSEMVATDEILKQVSDQYRRIRNTFRFIMGNLNDFDEVSNNINKNDLVEIDKWIISEAIKLHEEIQELNDNYAYHHVIQKIHNFCVHELGGVYLDIIKDRMYVTKSNSNARRSAQFALFEVADILIRLISPILVFTAEEIWQSHELFKKQSASIFMAPQKIVSERESSISDEDWKKIFAVKDAVNQSIEKARADSVIKGSLDSKIIISCDKKTYKALEKIEDELKFVFISSEVEIAESSSSKLDIEVINFDQKKCIRCWNKCSSVGLYVEDPEICSRCYTNVYGDGEIRKFV

SEQ ID NO: 162099 - protein, 236 aa, Unknown
  Bacterial polypetide isolated from the Sargasso Sea
MSDYKDTLNLPQTAFAMKANLPNREPEILSYWEEIDLYGLLKEEGKTKEKFILHDGPPYANGELHIGHAINKTLKDLIIKTQTLNGKYAPYTPGWDCHGLPIELNVEKKVGKAGHKVSKEDFRDACRKYASSQIDIQRDQFKRLGVIGDWENPYISMDFNYEANIVRSLGKIIDNGYLVRGEKPVHWCVDCGSALAEAEVEYKDKVSLAIDFGFLFDPNDMSKVFGYESDKDTFIM

SEQ ID NO: 162100 - protein, 425 aa, Unknown
  Bacterial polypetide isolated from the Sargasso Sea
MEHGEKIDISNFIDDAEDYVKVDDTLDVWFDSGSTHFCVLDKLYGKDLIADLYLEGSDQHRGWFQSSLLTGIAINGKAPYKSVLTHGFVVDENGRKQSKSLGNVVSPQKVCNVLGADILRLWVASTDFRSEMVATDEILKQVSDQYRRIRNTFKFLLGNMFDYDSRNAANLTSDQLTEIDKWIINQTIKLQQEIKQLSNEFAYHIVVQKIHNFCVNELGGIYLDIIKDRMYVCKNDSQARKSAQIAMEKILNILVRVVSPILSFTSEEIWQSSEIFTSQHKSVFLASYESEIFINQKISDQKWEHIFAIKDSVNLAIEQARSEDRVKGSLDCKITLELSTELFNLLKIFDKELKFIFIVSSVEITLDKTLKDNEFHVTKVENFDAPKCIRCWNKSFTVGDSGSDPEICDRCILNIKGDGEVREFA

SEQ ID NO: 162101 - protein, 511 aa, Unknown
  Bacterial polypetide isolated from the Sargasso Sea
MDGKDSVYVPGWDCHGLPIEWKIEEQYKKNKKNKNDVPIIEFRKECRDFASKWIKIHKDQFKRLGVIGDWENYYSTMSFDAEAQIVRELGKFLKEGSLYKGYKPVLWSTVEKTALADAEVEYKDHVSDTIYAAFPIKFSNIKDIIGSSIVIWTTTPWTIPANKALAYNQNLTYVLCEIDNKNILQNKKIIIAKELLSSVSKDAEVKINILSEFKGKELDGTICYHPFNKIGYDYDIPVLEARFVTTEQGTGFVHCAPSHGPDDFNLCINNGIKAVETVDDDGRYTKHIPIFEGTHIFKANNIVIEKLKELKGLLANGKLTHSYPHSWRSKAPLVHRATPQWFISMESHKLRDKALKAIEDTTFYPSKGKERIKSMIETRPDWCVSRQRVWGVPLPIFISKKSGEILIDDEVFENIAKIYEKEGSDCWFEDNFQRLLGEKYDAEDFYKTSDIVEVWFDSGSTHSFVLEKREDLKWPASMYLEGSDQHRGWFHSSLLESCGTRGRAPFENILS

SEQ ID NO: 162102 - protein, 221 aa, Unknown
  Bacterial polypetide isolated from the Sargasso Sea
MEKDYKDTLNLPKTDLPMKAGLPKKEPEILSFWDSINLYNLIRKENAKKDKFILHDGPPYANGDIHLGHSVNKILKDIVIKTKTLEGFDAPYIPGWDCHGLPIELNVEKKYGRSSETVKDKSKFISACREYALSQIENQKNDFIRLGVLGDWENSYKSLDSTFEADTVRSLGRIVTNGHLQKGEKPVHFCYDCKSALAEAEVEYEDKVSKSIDVGFKVKKD

SEQ ID NO: 162103 - protein, 437 aa, Unknown
  Bacterial polypetide isolated from the Sargasso Sea
KKLRDKSKGREKFVLHDGPPYANGHIHMGTALNKILKDVIVRTQQMAGKDSIYVPGWDCHGLPIEWKIEEEYRKKGKNKDDVPTVKFRNECREFAEKWIQIQKKEFRRLGVEGDWENPYLTMSNQAEAQIVRELGKFLIDESLYKGAKPVLWSVVEKTALADAEVEYEDHTSNTIYVKFLIFRSEDKDLIGSNIVIWTTTPWTIPGNRALAYGIDLDYCLIKVNEVEDTSLVQIDDKLIFAKELIENVTKEIGIKKYSILKTFKGTNLSTCECEHPFKKLGYNFIVKPFPAEFVNLEQGTGIVHIAPGHGDDDYVLGIKNNLDIIQTVQDDGKYNNHAVGFEGEHVYKVDQKIADKLKDFSKLLFQGTLRHSYPHSWRSKAPLIYRNTPQWFISMEKKNLRKIALKSIDETIFYPPQGKTRLRSMMKLDQIGGISTK

SEQ ID NO: 162104 - protein, 439 aa, Unknown
  Bacterial polypetide isolated from the Sargasso Sea
MSKSQINLPKTAFSMKANLPTREPEILDYWQKINLYDEIRNSSKGKEKFVLHDGPPYANGNIHMGTALNKILKDIIVKFHQMDGKDSIYVPGWDCHGLPIEWKIEEQYKKNKKNKNEVPIVEFRKECRSFAEKWIEVHKSQFKRLGVVGDWENYYSTMSFGAEAQIVRELGKFLKEGSLYRGFKPVLWSTVEKTALADAEVEYQDHKSDTIYTSFSVKSSNLKELVGSDIIIWTTTPWTIPANKALAYNESLNYVILQLGDDGDFKNRKIVVAEALLESVIKECKIKDYKKIHIFKGQEFKNTICNHPFIKIGYEHDIPMLEARFVTIEQGTGIVHCAPSHGPDDFNLCLNNGIKAIETVDGDGKYTNNVKLFEGIHIFKANSIVIEKLKEQKNLLSNGDLIHSYPHSWRSKAPLVHRATPQWFISMESHKLRDTALKA

SEQ ID NO: 162105 - protein, 264 aa, Unknown
  Bacterial polypetide isolated from the Sargasso Sea
MSKANINLPKTEFSMKANLPNKEPAMIEYWDQIDLYKNLRDKRKQKEKFVLHDGPPYANGDIHMGTALNKILKDLIVKFHQMSGKDSIYVPGWDCHGLPIEWKIEEQYKKNKKNKNEVPINEFRKECRDFANKWIKIHKKQFKRLGVIGDWENYYSTMSFNAEAQIVRELGKFLKEGSLYRGFKPVLWSTVEKTALADAEVEYLDHKSDTIYAAFKIKKTKLDKLKNTDVIIWTTTPWTIPANKALAYNPNLKYSIIEIIKDGD

SEQ ID NO: 162106 - protein, 333 aa, Unknown
  Bacterial polypetide isolated from the Sargasso Sea
MSKSQINLPKTAFSMKANLPVREPEILEYWNKINLYDELRNSSKGKEKFVLHDGPPYANGNIHMGTALNKILKDIIVKFHQMDGKDSIYVPGWDCHGLPIEWKIEEQYKKNKKNKNEVPIVEFRKECRSFAEKWIDVHKGQFKRLGVIGDWENYYSTMSFDAEAQIVRELGKFLKEGSLYRGFKPVLWSTVEKTALADAEVEYQDHKSDTIYTTFPVKSSNIKELEGSEVVIWTTTPWTIPANKALAYNQSLDYVLIQLNDEGDFKNRKIVIAEALLESVIKDCSIENYQKIKKFKGKDLKETICNHPFYNLGYEYDIPMLEARFVTTEQGTG

SEQ ID NO: 162107 - protein, 447 aa, Unknown
  Bacterial polypetide isolated from the Sargasso Sea
MEKDYKNTLNLPKTDLPMKAGLPKKEPEILSFWDSINLYDLIRKENAKKDKFILHDGPPYANGDIHLGHSVNKILKDIVIKTKTLQGFDAPYVPGWDCHGLPIELNVEKKYGRDSDTVKDKTKFISACREYALSQIENQKKDFIRLGVLGDWENSYKSLDSSFEADTVRSLGRIVTNGHLQKGEKPVHFCYDCKSALAEAEVEYEDKVSKSIDVGFKVKKDCLNNLSAAFSKEIDSCSIVIWTTTPWTIPANAAVSIGPELKYTLCNSKFGNLVLATDLIDQCSERWKTDLEKISEVNGNEIKDIVLEHPYLDRDSILIHGEHVTTETGTGCVHTAPAHGIDDHNICKEYNIETIHALDGNGFFNQEYKDLAGLPAIKADQIVIDILKESGTLINEEDFHHSYPYCWRHKTPLIFASTPQWFISMDKSGLLEGSIQAIKDVKWEPSW

SEQ ID NO: 162108 - protein, 396 aa, Unknown
  Bacterial polypetide isolated from the Sargasso Sea
EEYKKVNDILDVWFDSGCTHAFVLDGKNDQIWPASIYLEGTDQHRGWFHSSLLESCGTRGVAPYESVLTHGFILHEDGLKMSKSSSNTVSPAEVIEKSGADILRLWVASSDYSEDLKIGPEIIKSNIDSYRRLRNTLRFILGNLSDFDQDEKVSVDELDELDLYILSELESLKKEVISNYKIFEYQKVFSAIFNFCTNDLSSFYFDVRKDTLYCDSKNNKVRKSTRTVLDILFHDLLSLLAPILCFTTEEAWQSRFGFENSIHEKDFPKLNDTLINKNLSTKWAVYKKLRKVINGAIEVKRKEKVLGSSLEASVKLYISKDEIEKIDQKVLENISIISELEIVNDKPSSDSFISELDKNIGVHVSKTDGEKCERCWKYFSNLKGNVCDRCQEVLSK

SEQ ID NO: 162109 - protein, 466 aa, Unknown
  Bacterial polypetide isolated from the Sargasso Sea
KERLKSMIETRPDWCVSRQRVWGVPLPIFISKKDEKVLVDEEVFNNIANIFEKEGSDCWFENNKQKFLGKKYNENDFYQTTDIVEVWFDSGSTHSFVLEQREDLKWPASLYLEGSDQHRGWFHSSLLESCGTRGEAPFEAILSHGFVVDGKGLKMSKSLGNVISPEEILKKYGADILRIWVAASNYAEDLRIDHKILEQHADAYRKLRNTFRYLLGNLNDELNEIDLDKIKVDTLPELEQLMLHKLYNLNESFMKHFNSYNIHLIYKELLNFCTVDLSSFYFDIRKDTLYCDEKNSKKRKDCQLLLNIILDSLLKWFAPILSFTTEEIFKLVNKNDREKSIHLKKLNVFPQSWHNTKLEQNWQRIIDIRNEVNSSIETMRAEKIIGSSLEANIEIVLNDENYNLGKNYDFSEICITSSAKITKAKEKENPIKVNTVKAEGQKCPICWKINKNGCERHSCSNKNQGE

SEQ ID NO: 162110 - protein, 604 aa, Unknown
  Bacterial polypetide isolated from the Sargasso Sea
ADFVTLEQGSGFVHIAPGHGADDYNLGIANNVEVPETVDENGQYFDHVPLFKGKKVFNDDGSDADANVAVIVELKNHNNLAGKGSLRHSYPHSWRSKAPVIFRNTPQWFISMEKNGLRSTALNEIDKVNWFPKQGKNRIYSMIEDRPDWVVSRQRAWGVPLSIFYNIETGQPLIDKEINQKIIDLYKEEGSDAWFKYSKEELLGDKYDPNDYKKVDDILDVWFDSGCTHSFVLDEKEDQMWPASLYLEGTDQHRGWFHSSLLESCGTRGIAPYESVLTHGFVLHEDGLKMSKSSANIVSPDEIINKSGADILRLWVASSDYSEDLKIGPEIMKSNVDSYRRLRNTLRFILGNLSEFNDNEKISYAELSELDQYILSQLEELKKEVIENYKIFEYQKVFSAIFNFCTNDLSSFYFDIKKDVLYCESKDSHIRMSTRTVLDKLFYNLLTLLAPILCFTSEEAWQSRLGKESSVHEVDFPVLESDVINKELTKKWDLYKQLRKVINGAIEVKRKEKVIGSSLEASVTLFSTKNINEIDSDTLENISIISELTILNEKPPEGSYISESEKDVGIVVKKVDGNKCERCWKYYPNLEKDICLRCEQVMNQ

SEQ ID NO: 162111 - protein, 316 aa, Unknown
  Bacterial polypetide isolated from the Sargasso Sea
SDDMDGLRKVPENIPNQDILIKNLNKPLTQVPDPFGKFNSFGEHNNEMLKTFLNNFKFKYIFKSSTELYRSGFFNDTLIIILHNFDKIMDIILPTLGKERQKTYSPFLPICPDTGKVLEIPVKEINKKNNKIIFENNGKDLETNILDGNCKLQWKVDWAMRWYALDVDFEMYGKDLIESAVLSSKIIKTLGKNNPLGFAYELFLDEKGEKISKSKGNGITIDEWLKYASPESLSLFMYQNPKRAKKLYNEIVSKAVDEYLSFIEKGKTQNLSQLLLNPLWHVHNGEIPKEEIIMSFSMLLNLVETSNASSKDVLWK

SEQ ID NO: 162112 - protein, 208 aa, Unknown
  Bacterial polypetide isolated from the Sargasso Sea
MENKSLKQIIDNRLEKLKKIRELGVEPYAYDFTCSHNTSEINDELIDSKVSIAGRIMSLRRMGKASFANIQDQEGRIQLYIARDDVGEDNYNLFKLTDIGDFVGIEGKVFKTKTDALTIKVSHLTILSKSIKPIPDVKEKDGEKYNLVSDKELRYRKRFLDLIINPETKENFIKRFKIINSIRSFLNNHGYIEVETPVFATNLWRKQC

SEQ ID NO: 162113 - protein, 280 aa, Unknown
  Bacterial polypetide isolated from the Sargasso Sea
EVSRTSMMINALKHIRKIETELITFSDDMDGLRKVPENIPNDKILHDNLGKPLTDIPDPFKKFKSFGEHNNEMLIEFLKRFNFNFVFKSSTQNYKNGTFNNSIVRVLEKFDDIMNIILPTLRSERRKTYSPFLPICPETGKVLEIPVVEIDKKKNILVFDNNGKKIETEILNGKCKLQWKVDWAMRWFAFDVDFEMYGKDLIESAIISSKICKVMGKQPPNGFAYELFLDEKGEKISKSKGNGITIEQWLRYASPESLSLFMYQNPKRAKKLYPDVVPKA

SEQ ID NO: 162114 - protein, 289 aa, Unknown
  Bacterial polypetide isolated from the Sargasso Sea
TGYGPSGLPHIGTFGEVSRTSMMVNALNHIRKINSEIITFSDDMDGLRKVPENIPNDDVLHANLGKPLTDIPDPFRKYKSFGEHNNEMLIEFLNKFKFKFKFKSSTVNYKKGFFNESLTRVLDKYEEIMNIVLPTLRSERKKTYSAFLPMCPNTGKVLEIPVLEIDKKNNKIIFDNKGKKLESSILDGNCKLQWKVDWAMRWFTFDVDFEMYGKDLIESADISRKICKTLGKKPPNGFAYELFLDEKGEKISKSKGNGITIDQWLRYASPESLSLYMYQNPKRAKKLYP

SEQ ID NO: 162115 - protein, 287 aa, Unknown
  Bacterial polypetide isolated from the Sargasso Sea
TSMVVNALNNLSDLPKEIITFSDDMDGLRKVPENIPNLEKLQKNLHKPLTQVPDPFEKFNSFGEHNNEMLKKFLNKFKFNYSFKSSTELYKSGFFNPTLKLILENYKEIMEIIIPTLGKERQKTYSPFLPICPDTGHVLEIPVIEIDTKNSKILFDNNGKKLEQSILDGNCKLQWKVDWAMRWYALDVDFEMYGKDLIESAILSTKIIKLLGKQNPSGFAYELFLDEKGEKISKSKGNGITIDQWLKYASPESLSLYMYQNPKRAKKLYDEVVPKAVDEYLDFIQKG

SEQ ID NO: 162116 - protein, 301 aa, Unknown
  Bacterial polypetide isolated from the Sargasso Sea
ENKGKIILQTGYGPSGLPHIGTFGEVARTSMIVNALNHLTDLPKEIITFSDDMDGLRKVPENIPNSEKLIQNLHKPLTQVPDPFGKFNSFGEHNNEMLKNFLNKFNFKYNFKSSTLLYKSGFFNDSLKLILENYEGIMNIVIPTLGKERQKTYSPFLPICPDTGVVLEIPVLQLDTKNSKIIFDNKGKKLEQSILDGNCKLQWKVDWAMRWYALDVDFEMYGKDLIESAILSTKIIKLLGKPNPSGFAYELFLDEKGEKISKSKGNGITIDQWLEYASPESLSLYMYQNPKRAKKLYREVV

SEQ ID NO: 162117 - protein, 293 aa, Unknown
  Bacterial polypetide isolated from the Sargasso Sea
MHWADVVADKLLESGKKHVISSGITPSGPIHLGSMREILTADAVVRSVNDKGGEAKLIYIADNADPLRKVYPFLDENKFKDYVGRPLAEIPAPDGNGSYDQFFLKPFFKSLEDVGVIPEVVDNYKFYKDGRYKECTKTIIENREEVREILEKISGRQLPKSWFPWTFKDEDGKLCNGKFTRYEWPNVYFENETGKEIVNNLEKGEGKLPWRLDWPSKWRILNVTFEAFGKDHATKGGSFDTGKRIVRNILGSAVPHHIVYEWINLKGKGAMHSSTGLAISADEMLRMAPPEVI

SEQ ID NO: 162118 - protein, 289 aa, Unknown
  Bacterial polypetide isolated from the Sargasso Sea
DDMDGLRKVPDNVPNQELLNKNLHKPLTQVPDPFEKFTSFGEHNNEMLKDFLNSFNFKYSFKSSTSLYKDGFFNPTLKIILENYDGIMNIILPTLGKERQKTYCPFLPICPDTGHVLEIPVIEIDKKNSKIIFDNKSKKLESSILDGNCKLQWKVDWAMRWYALDIDFEMYGKDLIESAILSTKIINLIGKKHPSGFAYELFLDEKGEKISKSKGNGITIDQWLKYASPESLSLYMYQNPKRAKKLYKEIVPKAVDEYLDNIEKSKKQTEQQLVMNPVWHVHNGNIQKK

SEQ ID NO: 162119 - protein, 269 aa, Unknown
  Bacterial polypetide isolated from the Sargasso Sea
KKVINLQTGYGPSGLPHIGTFGEVARTTMILNAIESVSDFEVNLIAFSDDMDGLRKVPDNVPNQDVLSSNLHKPLTSIPDPFGTHESFGSHNNNMLKEFLDQFNFKYNFKSATELYKSGFFDEQIINVLENYEEIKGIVLPTLGEERRKTYSPFLPVCPDTGKVLEVEIKSIDKKNKSITYDNDNKEYETLVTGGNCKLQWKVDWAMRWIALKIDYEMYGKDLIPTFQLSSKICKALGGKPPENFFYELFLDQNGEKISKSKGNGLTIE

SEQ ID NO: 162120 - protein, 133 aa, Unknown
  Bacterial polypetide isolated from the Sargasso Sea
FVEPKLIQPTFLIYYPTEMSPLAKAKTDNPNYVERFEAFIGGMEIANSYSELNDPIIQRERFEEQEAFRETYTSEEDFDRLDEDFLEALEYGMPPTGGLGVGIDRLVMILTEQDTIRDVVLFPQMRTAKNTNE

SEQ ID NO: 162121 - protein, 314 aa, Unknown
  Bacterial polypetide isolated from the Sargasso Sea
HILGTFGEVARTSMVVNALNQLTDIPKEIITFSDDMDGLRKVPDNVPNKELLENNLSKPLTKVPDPFNKFSSFGEHNNEMLKKFLDQFGFKYTFKSSTELYKSGKFNETLKLVFKNYQGIMDLIIPTLGLERQKTYSPFLPICPETGKVLEIPVLETDEKNFKIIFDNNGKKLEKSILNGECKLQWKVDWAMRWYSLDVDFEMYGKDLIESAILSTKIINLLGKRNPSGFAYELFLDEKGEKISKSKGNGITIDQWLEFASPESLSLFMYQNPKRAKKLYKEIVPKAVDEYLDLIYKSKTQDDKTLILNPVWHV

SEQ ID NO: 162122 - protein, 307 aa, Unknown
  Bacterial polypetide isolated from the Sargasso Sea
KKGKITLQTGYGPSGLPHIGTFGEVARTSMMVNALNQLTDLPKEIITFSDDMDGLRKVPDNVPNKYILEENLHKPLTQVPDPFQKFNSFGEHNNEMLKTFLDNFNFDYNFKSSTSLYKSGFFNSSLKVILENYEGIMNIILPTLGKERQKTYSPFLPICPETGHVLEIPVKKIIKDKSKIIFDNNGKELEISILDGNCKLQWKVDWAMRWYALDVDFEMYGKDLIESAILSTKIIKLIGKTNPSGFAYELFLDENGEKISKSKGNGITIDQWLEYASPESLSLYMYQNPKRAKKQYKDIVLKTVDEY

SEQ ID NO: 162123 - protein, 229 aa, Unknown
  Bacterial polypetide isolated from the Sargasso Sea
MNHQEEPSSSTGQPTFIKTPRREIQTRNMNQYEYIQSIRKHDVTFGIGPAGTGKTYLAVAAAIESLQRQDVKRIILVRPAVEAGENLGFLPGDLSQKVDPYLRPMYDALYEMMGFEQVSNLIERRTIELAPLAFMRGRSLNESFIILDEAQNTTVEQMKMFLTRMGFGSKSVVNGDITQIDLPTEKKSGLEHALSVVSDIDKIASVHFSHKDVVRHRIVQEIVEAYEKN

SEQ ID NO: 162124 - protein, 85 aa, Unknown
  Bacterial polypetide isolated from the Sargasso Sea
WELANAYSELNYPLQQRKLMEEQVERGRGGESETQPLDEDFLRCVEYGMPPMGGIGFGIDRMVMLLTGQTTIRDVILFPTMRPEQ

SEQ ID NO: 162125 - protein, 61 aa, Unknown
  Bacterial polypetide isolated from the Sargasso Sea
MTDQNQTVQDENKLIAERRAKLETLRENSKSNGHPNDFRREHLAADLKAEHGEKSKEQLAE

SEQ ID NO: 162126 - protein, 307 aa, Unknown
  Bacterial polypetide isolated from the Sargasso Sea
RKNIIKKKGLITFQTGYGPSGLPHIGTFGEVARTTMMINALNHIEKINHELITFSDDMDGLRKVPDNIPNDQVLKDNLGKPLTNIPDPFKKFDSFGKHNNEKLKEFLNKFNFKFTFKSSTENYKNGIFNKSLIRVAEKYEDVMNIILPTLREERRKTYCPFLPICPKTGKVLEIPLLEIDNKTGKAIFDNRGEKIEISILDGNCKLQWKVDWAMRWFTFDVDFEMYGKDLTESAILSNKICKTLGKNPPNGFAYELFLDEKGEKISKSKGNGISIDQWLRYASPESLSFYMYPNPKRAKKLYAEVVP

SEQ ID NO: 162127 - protein, 259 aa, Unknown
  Bacterial polypetide isolated from the Sargasso Sea
TDLPKEIITFSDDMDGLRKVPENIPNKDILENNLHKPLTNVPDPFKKFNSFGEHNNEMLKNFLNNFKFKYTFKSSTELYKSGFFNDTLKLILKKYSEIMDIIIPTLGKERQKTYSPFLPVCPDTGVVLEVPVLEIDNKNSRIIFDNNGKKLEKNILDGHCKLQWKVDWAMRWYALDVDFEMYGKDLIESAILSTKIIKILGKTNPSGFAYELFLDEKGEKISKSKGNGITIDQWLEYASPESLSLFMYQNPKRAKKLYR

SEQ ID NO: 162128 - protein, 251 aa, Unknown
  Bacterial polypetide isolated from the Sargasso Sea
MEEDEYWKPTPPDYMDGIEPHWREIRTLVLDSASQFPAKPPLPYDLTKGSPFYNQLMEVYEIGNKLSKEQIEIASFWDCNPFVTHHRGHAMFATKKITPGGHWIGITAIATRVAKSSFDEAVNAYANVSIALFDSFISCWDEKWETIVVRPETLINKYIDEDWLPILQTPPFPEYTSGHSVISRAAALALTDIYGENFQFNDTSELEYGLPARKFNSFISASEEAAISRLYGGIHYMMAIEEGVNQGQEIG

SEQ ID NO: 162129 - protein, 123 aa, Unknown
  Bacterial polypetide isolated from the Sargasso Sea
KRLVVGGFDKVFEIRRNFRNEGISTQHNPEFTMLEIYEAYSDFNDMMNFIEKLVLNCLKDLDLGQTISYLNHSIDFKLPWERVSMIEWTSNFLGFDVLNNIKELFNYASKNNIEHFDQEGRVI

SEQ ID NO: 162130 - protein, 219 aa, Unknown
  Bacterial polypetide isolated from the Sargasso Sea
MFKQHIVTEQEKIRREKLEELKKLGIDPYPAELYPVTNFSSDLISKYEDKKQVVIAGRIMSRRIQGNASFAEILDNKGRIQVYFNRDEICEGDDKTKYNIVYKRLLDIGDIIGIHGELFKTRVGEITVLVKDFKILNKSLRPLPLPKVDSQGKEYDSFTDLEQRYRQRYVDLIVNQSVKKTFIKRTKIINSIRNFLNNKEYLEVETPILQPIPGEQQLG

SEQ ID NO: 162131 - protein, 327 aa, Unknown
  Bacterial polypetide isolated from the Sargasso Sea
FWRVARTSMMVNALKNLPDLPTEIITFSDDMDGLRKVPENVPKKELLKENLHKPLTQVPDPFGKFNSFGEHNNEMLKTFLNSFNFEYNFKSSTSLYKSGYFNSALQKILENYDGIMNIILPTLGKERQKTYSPFLPICPNTGHVLEIPVKNINKDKFTIVFDNDGKDLETSILDGNCKLQWKVDWAMRWYALDIDFEMYGKDLIESAILSTKIIKLIGKSNPSGFAYELFLDEKGEKISKSKGNGITIDQWLEYASPESLSLYMYQNPKRAKKLYKEIVPKAVDDYLDFIEKAKTQNDLQLLMNPVWHVHNSKVPKENMIMSFFMLL

SEQ ID NO: 162132 - protein, 266 aa, Unknown
  Bacterial polypetide isolated from the Sargasso Sea
EIITFSDDMDGLRKVPDNVPNPELLNKNLHKPLTSIPDPFKKFNSFGEHNNEMLKSFLNKFNFKYIFKSSTSLYKSGFFNSALENVLHNFQGIMDIIIPTLGKERQKTYSPFLPICPETEVVLEIPIKKIIKDKSKIIFDNNGKELETSIFDGNCKLQWKVDWAMRWYALDVDFEMYGKDLIESAILSTKIVKLLGKNSPNGFAYELFLDEKGEKISKSKGNGITIDQWLNYASPESLSLFMYQNPKRAKKLYKEIVPKAVDEYLE

SEQ ID NO: 162133 - protein, 272 aa, Unknown
  Bacterial polypetide isolated from the Sargasso Sea
KIELSPHFIQERSPQECQRFMDMIAASMLTQVEPVGAAIHLALDVQGWEPPKDFMERFVTRSKKIMRIDGIDTLEFDHNHIATTYGRGETYMFGTAGALQCCIYNKTLEAKHRDKMHFWEGIWQNAVDDDLNGIYNPEETVWRIELRFHQSVLREYAQGIPCNVDTGEVLDHTHGFSRFVDVVPHLTGLWRTAMQSYRLDTRRNLIDPAWQILQDDARFYCHEPGFMYKRARKAPGLGNEKNVTLAFGNLISIYARQGIRTDQAIGYLKRSG

SEQ ID NO: 162134 - protein, 286 aa, Unknown
  Bacterial polypetide isolated from the Sargasso Sea
SVPDPFELFNSFGEHNNSKLKDFLNRFNLPFSFQSSTDAYKSGLFNETIKKIIKNYDEIINVVLPTLGEERRKSYSPFFPISEITGKILQVPIEEINNEEFTVSYYEDGVLKSKSVLDGNCKLQWKVDWAMRWAAFGVDYEMCGKDLTESYTLSSKICKIIGSKPPENLIYELFLDENAEKISKSKGNGISIDDWLKYSIEESLAMFMYQRPTTAKKLYFDVIPKNTDEYLTHVNKLESDDLNPDNPAWHIHKAENPSYKSKINYSLILNIISVCKSEDPNVIFGL

SEQ ID NO: 162135 - protein, 276 aa, Unknown
  Bacterial polypetide isolated from the Sargasso Sea
TFQTGYGPSGLPHIGTFGEVSRTSMMINALNHIKKIDCELITFSDDMDGLRKVPDNIPNEKILHDNIGKPLTSIPDPFEKYSSFGEHNNKMLIEFLNKFKFDFIFKSSTENYKKGIFNNSLERVLEKFDDIMNIILPTLGNERRKTYSPFLPVCPETGNVLEIPVQEIDKKNKTIVFNNNGKKLKTGILNGKCKLQWKVDWAMRWFTFDVDFEMYGKDLIESAILSNKICKVMGKKPPNGFAYELFLDEKGEKISKSKGNGISIEQWLKYASPESL

SEQ ID NO: 162136 - protein, 328 aa, Unknown
  Bacterial polypetide isolated from the Sargasso Sea
TFSDDLDGLRKVPDNVPNKDVLNKNLHKPLTNIPDPFEKFKSFGEHNNEMLKKFLDKFKFEYKFMSSTNLYKSGFFNSTLKKILDNYEGIMNIIIPTLGKERQKTYSPFLPICNETGKVLEIPIIEIDKKNSSLVFDNNGKKLKASILDGNCKLQWKVDWAMRWYTLDVDFEMYGKDLIESAILSSKIIKLLGKNNPSGFAYELFLDDKGEKISKSKGNGVTIEEWLDYASPESLSLFMYQNPKRAKKLYKEIVPKAVDEYLDLIEKSKKQDARELLLNPLWHVHNGNIPSEDNIMSFSMLLNLVETSNASSEEILWKIVKTIKQMLL

SEQ ID NO: 162137 - protein, 275 aa, Unknown
  Bacterial polypetide isolated from the Sargasso Sea
IILQTGYVPSGLPHIGTFGEVARTGMVVNALNYLTDLPKEIITFSDDLDGLRKVPDNVPNKDILKKNLHKPLTDIPDPFGKFKSFGEHNNEMLKKFLDQFNFKYKFMSSTSLYKSGFFNSTLKKVLDNYEGIMNIIIPTLGKERQKTYSPFLPICNQTGKVLEIPIIEINKKNSSLIFDNYGKKLEASILDGNCKLQWKVDWAMRWYTLDVDFEMYGKDLIESAILSNKIIRLLGKNNPSGFAYELFLDDKGEKISKSKGNGVTIEQWLKYVHQK

SEQ ID NO: 162138 - protein, 301 aa, Unknown
  Bacterial polypetide isolated from the Sargasso Sea
MDGLRKVPENVPNQDLLIKNLHKPLTKVPDPFGKYDSFGEHNNEMLKKFLNKFSFNYKFISSTDLYSNGFFNKSLKIILENLDEIMNIILPTLGKDRQKTYSPFLPICPETGIVLEIPIKEIDKKNFKLIFDNNGKELEKSILDGNCKLQWKVDWAMRWFALDVDFEMYGKDLIESAILSTKIIKVLGKKNPSGFAYELFLDENGEKISKSKGNGITIDEWLNYASPESLSMFMYQNPKRAKKLYKEIVSKAVDEYFDFMEKSKKQSQLQILMNPLWHVHNGEIPYENSIMNFSMVIKSCR

SEQ ID NO: 162139 - protein, 174 aa, Unknown
  Bacterial polypetide isolated from the Sargasso Sea
MEKDNIGGEKAIIEERRKKLEQLRDKGDAYGNSFKPQNNAKNLHEEYGAFSKEELADKNIKNISIAGRIVLKRVMGNASFATLRDASGDIQIYVTKNNVDESVYEDFKTWDLGDIVGVSGSLFRTKTDELTIDVWDLEMITKSLRPMPEKFKGLTDIEARYRQRYLDLMTNNST

SEQ ID NO: 162140 - protein, 64 aa, Unknown
  Bacterial polypetide isolated from the Sargasso Sea
RQVERGRGGETETHPLDEDFLRCVEYGMPPMGGIGFGIDRMVMLLTGQTTIRDVILFPTMRPEQ

SEQ ID NO: 162141 - protein, 304 aa, Unknown
  Bacterial polypetide isolated from the Sargasso Sea
TFSDDMDGLRKVPDNVPNQELLQQNLHKPLTKVPDPFQKFNSFGEHNNEMLKDFLNSFNFKYNFKSSTFLYKEGFFNPTLKIILENYEGIMNIILPTLGKERQKTYSPFLPVCPDTGHVLEIPVIEIDRSNSKIIFDNKGKKLESSILDGNCKLQWKVDWAMRWFALDIDFEMYGKDLIESAILSTKIINLLGKKNPSGFAYELFLDEKGEKISKSKGNGITIDQWLKYASPESLSLYMYQNPKRAKKLYKEIVPKAVDEYLDNIEKSKKQTEQQLVMNPVWHIHNGSIPKEDMIMSFFMLLNL

SEQ ID NO: 162142 - protein, 202 aa, Unknown
  Bacterial polypetide isolated from the Sargasso Sea
MDKENISGEKALIEERRKKLDQLRDRGDAYGNSFKPKNNASSLHEEYGDVSKDDLAEKNIKDISVAGRIVLKRVMGNASFATLRDASGDIQIYVTKNNVDESVYEDFKTWDLGDIVGVSGSLFRTKTDELTIDVWDLEMITKSLRPMPEKFKGLTDIEARYRQRYLDLMTNNDTKKVFIKRTKIIDSLRKKMNESGYLEVET

SEQ ID NO: 162143 - protein, 58 aa, Unknown
  Bacterial polypetide isolated from the Sargasso Sea
MYGDDELDRLDEDFLTAIELGMPPTGGLGMGIDRLVMLLTEEISIRDAIIFPHMRTLK

SEQ ID NO: 162144 - protein, 201 aa, Unknown
  Bacterial polypetide isolated from the Sargasso Sea
MFEGFKSKYVKVKKGKVFCKVKGDGPPLLLLHGYPQTHLMWHKTAPELSKIFTVVAADLRGYGNSLAPPSDSKHFNYSKREMASDMKQMMVKLGYAKFFVAGHDRGGRVAHRLARDHRKNVLALSVLDICPTLDMYELTTRDFAKAYFHWFFLIQPKWLPERMIMSDPRKWMKYCLDKWSGNHKFGKVEEGYIKCFKQPKR

SEQ ID NO: 162145 - protein, 335 aa, Unknown
  Bacterial polypetide isolated from the Sargasso Sea
FQTGYGPSGLPHIGTFVKVARTTMMINALNQFEKIRSELITFSDDMDGLRKVPENIPNKDILEKNLGKPLTSIPDPFKKFKSFGEHNNNMLKDFLKEFNFSFNFKSSTNNYKTGIFNNSLQRVAEKYEEIMNIILPTLGNERKKTYSPFLPICKETGKILEIPIVEIKKKESKIIFDNNGKKIEAGMLNGECKLQWKVDWAMRWFTFDVDFEMYGKDLIESAILSKKICQVLGKSPPNGFAYELFLDEKGEKISKSKGNGISIDEWLKYASPESLSLYMFQNPKRAKKLYDEVVPKAVDEYLELLEKFEKQDERKRLLNPIWHVHNGKPPKEKIV

SEQ ID NO: 162146 - protein, 315 aa, Unknown
  Bacterial polypetide isolated from the Sargasso Sea
MKDRKEIIKKKRKITFQTGYGPSGLPHIGTFGEVARTTMMINALNYIEKIDHELITFSDDMDGLRKVPDNIPNEEILKKNLGKPLTSIPDPFKKFDSFGEHNNEKLKEFLNKFNFKFNFKSSTENYKKGIFNDSLIRVVEKYDEIMNIILPTLREERRKTYSPFLPICPKTGKVLEIPLVDKDKKTGKVVFNNNGEKIETSIFNGNCKLQWKVDWAMRWFTFDVDFEMYGKDLSESAILSNKICRALGKSPPNGFAYELFLDEKGEKISKSKGNGISLEQWLRYASPESLSLYMYPNPKRAKKLYSDVVPKQLMI

SEQ ID NO: 162147 - protein, 279 aa, Unknown
  Bacterial polypetide isolated from the Sargasso Sea
TELITFSDDMDGLRKVPENIPNDKILHENIGKPLTDIPDPFKKFKSFGEHNNKMLIDFLKKFNFNFNFKSSTQNYKNGIFNNSIIRVLEKFDDIMNIILPTLRSERRKTYSPFLPICPETGKVLEIPVIEMDKKKNTLVFDNNGKKIKTEILNGKCKLQWKVDWAMRWFAFDVDFEMYGKDLIESAIVSSKICKVMGKQPPNGFAYELFLDEKGEKISKSKGNGITIEQWLRYASPESLSLYMYQNPKRAKKLYPDVIPKAVDEYLSFIEKYENQKEKE

SEQ ID NO: 162148 - protein, 180 aa, Unknown
  Bacterial polypetide isolated from the Sargasso Sea
MEKDNIGGEKAIIEERRKKLEQLRDKGDAYGNSFKPQNNAKSLFEEYGAFSKEELADKNIKNISIAGRIVLKRVMGNASFATLRDASGDIQIYVTKNNVEESVYEDFKTWDLGDIVGVSGSLFRTKTDELTIDVWDLEMITKSLRPMPEKFKGLTDIEARYRQRYLDLMTNNSTKEIFIK

SEQ ID NO: 162149 - protein, 308 aa, Unknown
  Bacterial polypetide isolated from the Sargasso Sea
GLPHIGTFGEVARTSMIVNALNHLTELPKEIITFSDDMDGLRKVPENVPNQDILIKNLNKPLTQVPDPFGKFNSFGEHNNEMLKSFLNNFKFKYTFKSSTELYRNGFFNETLKIILDNFDKIMDIILPTLGKERQKTYSPFLPICPETGKVLEIPVKEINKKNNKIIFENNGKDLETNILDGNCKLQWKVDWAMRWYALDVDFEMYGKDLIESAILSSKIIKTLGKNNPSGFAYELFLDEKGEKISKSKGNGITIDEWLKYASPESLSLFMYQNPKRAKKLYNEIVSKAVDEYLSYTEKGKTQNQSQL

SEQ ID NO: 162150 - protein, 287 aa, Unknown
  Bacterial polypetide isolated from the Sargasso Sea
AWPFIEAKKIIKKARANNKQKIRLQTGYGPSGLPHIGTFGEVARTTMILNAIKLISEIEVELIAFSDDMDGLRKVPDNVPNQNILSEHLHKPLTSIPDPFETSKSFGDHNNEMLQQFLDKFGFNYTFKSATELYTSGFFDNQLINVLNNYDSIKNIILPTLGEERKKTYSPFLPICPDSGHVLEVEIVSINLASNTITYISKNKEVEQSILKGKCKLQWKVDWAMRWGALNIDYEMYGKDLIPTFHLSAKVSRALGYPPPENYFYELFLDQNGEKISKSKGNGLTIE

SEQ ID NO: 162151 - protein, 303 aa, Unknown
  Bacterial polypetide isolated from the Sargasso Sea
AFKLICFSDDMDGLRKVPSNIPNQESMSNYIGHPLTKVPDPFQTHSSFGEHNNSRLKSFLDSFDFEYEFYSATDCYKSGLFDKTLIKVLDNYEKIKQIILPTLGEERRKTYSPFLPICQKTGKVLEVSINEINKKNGTITYTDPADNEKVTISVTGGKCKLQWKCDWAMRWDALGVDYEMAGKDLIDSVTLSSKINKQIGSRPPEGFNYELFLDQNGEKISKSKGNGLTIEEWLSYGPQESLSYFMYGHPKRAKRLYFDVIPKSVDEYLTQIKNFISQSDEERLNNPSLYVHNIQPSEIQKKI

SEQ ID NO: 162152 - protein, 348 aa, Unknown
  Bacterial polypetide isolated from the Sargasso Sea
GEVARTSMIVNALNHLSDLPKEIITFSDDMDGLRKVPENIPHPKKLEENLHKPLTQVPDPFGKFNSFGEHNNEMLKNFLNKFNFKYNFKSSTFLYKSGFFNDTLKLILENYERIMNIIIPTLGKERQKTYSPFLPICPDTGVVLEIPVSEVDTKNSKIIFDNNGKKLEQSILDGNCKLQWKVDWAMRWYALDVDFEMYGKDLIESAILSTKIIKLLGKSNPSGFAYELFLDEKGEKISKSKGNGITIDQWLEYASPESLSLYMYQNPKRAKKLYREVVPKAVDEYLDFIEKGRTQNELQKLMNPVWHVHNSEIPEENSIMSFSMLLNLVETSNADNKELLWKFVKKYK

SEQ ID NO: 162153 - protein, 321 aa, Unknown
  Bacterial polypetide isolated from the Sargasso Sea
MTIVNENSKAWPFIEARKIVKRANLKDHSKIKLQTGYGPSGLPHIGTFGEVARTTMVLNAIKAVSDYEVELIAFSDDMDGLRKVPDNVPNKDILEKNLHKPLTSIPDPFETSKSFGNHNNEMLQAFLDKFGFKYSFKSATELYKSGFFNDQLIKVLNSYDEIKKIILPTLGEERKKTYSPFLPICPETGHVLEVEIISINTEKNTVVYLQNNKEIEQSILDGNCKLQWKVDWAMRWCALDIDYEMYGKDLIPTFQLSSKVCRALGHQPPENYFYELFLDQNGEKISKSKGNGLSIEEWLSYAPKETLSYFMYQNPRRAKKL

SEQ ID NO: 162154 - protein, 521 aa, Unknown
  Bacterial polypetide isolated from the Sargasso Sea
MLESELIQSTSSWPFVEIRKLLKERKDIINKKNKIIFQTGYGPSGLPHIGTFGEVSRTSMMINALNHIKKIESELITFSDDMDGLRKVPENIPNEKILHDNLGKPLTNIPDPFKKYKSFGEHNNKKLIEFLNKFKFQFKFKSSTENYKKGVFNDSIIRVLEKYEDIMNIILPTLRSERRKTYSPFLPICVDTGKVLEIPVLEINKKNNKIIFNNNGKKIEVSILDGNCKLQWKVDWAMRWFAFDVDFEMYGKDLIESAIISGKVCEVLGKRPPNGFAYELFLDENGEKISKSKGNGITIEQWLRYASPESLSLYMYQNPKRAKKLYPEVVPKAVDEYLSYIEKYFMQKNNEKILNPVWHIHNGSPPKEKIVMPFSMLLNIVGSSNAKKKDVLWKFIKKFHQELDPKTHKILDSLTEYAINYFIDRVEPKKNFKKPNDIEKKALTNLINVLKKVSQDSPPEQIQTLIYTAGKENGYSKDLRAWFKLIYEVIFGEENGPRMGFFISFFGIKETIDLMEKKLKI

SEQ ID NO: 162155 - protein, 506 aa, Unknown
  Bacterial polypetide isolated from the Sargasso Sea
MSDNNVIKTVSAWPFVEIRKLLKDRKNLIKSKNRITFQTGYGPSGLPHIGTFGEVARTSMMINALRHLEKIDTELITFSDDMDGLRKVPDNIPNDDILKKNIGKPLSSIPDPFKKFNSFAEHNNAMLKEFLNKFNFKFSFQSSTENYKKGVFNESLKRVAEKYDDIMNIILPTLRSERKKTYCPFLPICPETGKVLEIPMKSLEKKSGKIIFENNGKKIERSIFNGDCKLQWKVDWAMRWFTFDIDFEMYGKDLTESAILSSKVCKILGKTPPNGFAYELFLDERGEKISKSKGNGITIEEWLKYASPESLSLFMYQNPKRAKKLYSEVVPKAVDEYLSLIEKFHEQKEKDQLSNPVWHVHNGKPPKEKIVMPFSMLLNLVGSSNTDDKQVLWKFINRFHKDVNPEKNPILDHLTECAIKFFKDKLKPNKIYKKPNEKEKKALINLAENIEKINENTPPEEIQTVVYSVGKDNGYKENLRDWFKLIYQVLFGDVDGPRLGFFVSFF

SEQ ID NO: 162156 - protein, 369 aa, Unknown
  Bacterial polypetide isolated from the Sargasso Sea
MIKKEVLDKTSAWPFVEAKKMLRERKSFIEKKGKIILQTGYGPSGLPHIGTFGEVARTSMMVNALMQLTDLPAEIITFSDDMDGLRKVPENIPNQKLLQENLHKPLTEVPDPFEKFNSFGEHNNEMLKDFLNSFNFKYSFKSSTALYKTGYFNSTLKIILDNYDGIMNIILPTLGKERQKTYCPFLPICPDTGHVLEIPVVEINKEKSQIIFDNNGKKLEKSILDGNCKLQWKVDWAMRWYALDIDFEMYGKDLIESAILSTKIINLLGKKNPSGFAYELFLDEKGEKISKSKGNGITIDQWLKYASPESLSLYMYQNPKRAKKLYKEIVPKAVDEYLDNIEKSKKQTDQQLIMNPVWHVHEGKIPTEE

SEQ ID NO: 162157 - protein, 461 aa, Unknown
  Bacterial polypetide isolated from the Sargasso Sea
MMVNALNQLTYLPTEIITFSDDMDGLRKVPDNVPNQELLQQNLHKPLTKVPDPFQKFNSFGEHNNEMLKDFLNSFNFKYNFKSSTFLYKEGFFNPTLKIILENYEGIMNIILPTLGKERQKTYSPFLPVCPDTGHVLEIPVIEIDRSNSKILFDNKGKKLESSILDGNCKLQWKVDWAMRWFALDIDFEMYGKDLIESAILSTKIINLLGKKSPSGFAYELFLDEKGEKISKSKGNGITIDQWLKYASPESLSLYMYQNPKRAKKLYKEIVPKAVDEYLDNIEKSKKQTEQQLVMNPVWHVHSGNVPKEDMIMSFSMLLNLVETSNADSKDLLWKFVKKYKSNILETNFPIFDGLVSYAIKYFNDVIKSQKKYKTPSESEKKALEALIKTLEKCNDQMPPEEIQTLIYSTGKENGYAENLRDWFKLIYEVVFGDENGPRMGFFISFFGVNETKDLIMSKLK

SEQ ID NO: 162158 - protein, 399 aa, Unknown
  Bacterial polypetide isolated from the Sargasso Sea
WPFVEAKKILKERKKYIDKKEKIILQTGYGPSGLPHIGTFGEVARTSMVVNALNYLTDLPKEIITFSDDLDGLRKVPDNVPNKDILKKNLHKPLTDIPDPFGKFKSFGEHNNEMLKKFLDEFSFKYKFMSSTALYKSGFFNDTLKKILDNYEGIMEIIIPTLGKERQKTYSPFLPICKETGHVLEIPIVEINKKNSSLIFDNNGKKLETSILDGNCKLQWKVDWAMRWYTLDIDFEMYGKDLIESAILSTRIIKLLGKNNPSGFAYELFLDDKGEKISKSKGNGVTIEEWLNYASPESLSLFMYQNPKRAKKLYKEIVPKAVDEYLDLIEKSKKQDARELLLNPLWHVHNGKIPFEDSIMSFSMLLNLVETSNASSEEILWKFVKNYKKDVAKDKFPYI

SEQ ID NO: 162159 - protein, 520 aa, Unknown
  Bacterial polypetide isolated from the Sargasso Sea
MIKKEVLDKTSAWPFVEAKKMLRERKSFIEKKGKITLQTGYGPSGLPHIGTFGEVARTSMMVNALKQLTDLPTEIITFSDDMDGLRKVPENIPNQNLLNENLHKPLTEVPDPFGKFNSFGEHNNEMLKDFLNSFNFKYTFKSSTELYKTGYFNPTLKIILDNYDGIMNIILPTLGKERQKTYCPFLPICPDTGHVLEIPIIEIDKEKSQIIFDNKGKKLEKSILDGNCKLQWKVDWAMRWYALDIDFEMYGKDLIESAILSTKIITLLGKKNPSGFAYELFLDEKGEKISKSKGNGITIDQWLKYASPESLSLYMYQNPKRAKKLYKEIVPKAVDEYLDNIEKSKKQTEQQLIMNPVWHVHNGKIPSEEMIMTFSMLLNLVETSNADSKDLLWKFVKKYKSDIHEENFPIFDGLVAYAIKYFNDVIKSQKKYKIPNEIEKEALKALVKTLEKCNDGMSPEDIQTLIYSAGKENGYADKLRDWFKLIYEVVFGDENGPRMGFFISFFGVNETKELITSKLK

SEQ ID NO: 162160 - protein, 201 aa, Unknown
  Bacterial polypetide isolated from the Sargasso Sea
MSDQNKSLKQIMDFRLEKLDALREAGINPYPVKFDPSHSSAFIKSNYDEIEGETVKIAGRIMALRKMGKASFSQLMDSEGRIQFFIRRDDVGDESYSCFKLLDIGDYVGVEGFVFTTKTGEISIHTSAISVLAKSIRPLPVVKEKDGQVFDSFSDKELRYRNRHLDLILNPEVKETFISRAAIIRSIREFLDNKGFLEVET

SEQ ID NO: 162161 - protein, 535 aa, Unknown
  Bacterial polypetide isolated from the Sargasso Sea
MTTKLKINDFSKEALEKCNTWPFQEAKKIINRLKYLSEDKLVVFETGYGPSGLPHIGTFCEVFRTNLVRKAFTLLTGRPSKLVCFSDDMDGLRKVPSNIPNQESMSNYVGHPLTKVPDPFQTHSSFGEHNNSRLKSFLDSFNFEYEFYSATDCYKSGLFDKTLIKVLDNYEKIKQIILPTLGEERRKTYSPFLPICQKTGKVLEVSINEINKMNGTITYTDPVDDAKVTISVTGGKCKLQWKCDWAMRWDALGVDYEMAGKDLIDSVALSSKINKQIGSRPPEGFNYELFLDQNGEKISKSKGNGLTIEEWLSYGPQESLSYFMYGHPKRAKRLYFDVIPKSVDEYLTQMKNFISQSDEEQLNNPSLYVHNIQPSEMPKENTTIPFSLLLNLASVCHAEDPEIIWGFIEKYSPGAKLQKNKFLENMVNLSVVYFNDMIKPNKKYRLPDDNETKALKELSNGLIKLDKSSSSEEIQKLVFSIGKENNFENLRDWFKSLYEILLGQSEGPRMGSFISLYGIKETKNLIDDALLGKLK

SEQ ID NO: 162162 - protein, 496 aa, Unknown
  Bacterial polypetide isolated from the Sargasso Sea
MLLNSQISENSKAWPILEARRIINQIQKKNKKKIRLQTGYGPSGLPHIGTFGEVARTTMVLNAIKALSDYEVELIAFSDDMDGLRKVPDNVPNQEILEKNLHKPLTSIPDPFETSTSFGNHNNEMLQAFLDKFGFKYSFKSATELYKSGFFNDQLIKVLNSYDEIKKIILPTLGEERKKTYSPFLPICPETGHVLEVEIISINTEKNTVVYLQNNKEIEQSILDGNCKLQWKVDWAMRWCALDIDYEMYGKDLIPTFQLSSKVCRALGHQPPENYFYELFLDQNGEKISKSKGNGLSIEEWLSYAPKETLSYFMYQNPRRAKKLFLDVIPKSVDEFLSHLNKFKDQKDEEKIENPVWHIMNSHNHIGSIPISFNLILNLVSASGKSDPDFILDFIKKYDDSVINSDHNFMLELITGAISFEKNVNADKIQFKVPSEEEKSIFLDLINRIELLPENVDAETIQTEIYQIGKDYKFDNLRDWFKLIYQVLFGKSDGPR

SEQ ID NO: 162163 - protein, 521 aa, Unknown
  Bacterial polypetide isolated from the Sargasso Sea
MLESELLKSTSSWPFVEIRKLLKDRDSIIKKKNKIIFQTGYGPSGLPHIGTFGEVSRTSMMINALKHIKKIETELITFSDDMDGLRKVPENIPNNKVLHDNLGKPLTEIPDPFKKFKSFGEHNNKMLIEFLKKFNFTFTFKSSTQNYKNGTFNNSIIRVLEKFDDIMNIILPTLRSERRKTYCPFLPICPETGKVLEIPVIEMDKKKNTLVFDNNGKKIKTEILNGKCKLQWKVDWAMRWFAFDVDFEMYGKDLIESAIISSKICKVMGKQPPNGFAYELFLDEKGEKISKSKGNGITIEQWLRYASPESLSLYMYQNPKRAKKLYPDVVPKAVDEYLSLIEKYENQKEKEKLLNPVWHIHNGSPPNEKIVMPFSMLLNIVGSSNAKTKEVLWKFIKKFHSELDPKSHKILDELTNYAINYFTDEVEPKKKYKKPNDSEQKALKNLISVLKQVSQDTPAEEIQTKIYTAGKENGYSKNLRDWFKLIYQVCFGEENGPRMGFFISFFGVKETIDLMEKKLKI

SEQ ID NO: 162164 - protein, 176 aa, Unknown
  Bacterial polypetide isolated from the Sargasso Sea
MENKSLKQIIDNRLEKLKKIRELGVEPYAYDFTCSNNTSEINDKLIDSKVSIAGRIMSLRRMGKASFANIQDQEGRIQLYIARDDVGEDNYNLFKLTDIGDFVGIEGKVFKTKTDALTIKVSHLTILSKSIKPIPDVKEKDGEKYNLVSDKELRYRKRFLDLIINPETKENFIKDQ

SEQ ID NO: 162165 - protein, 520 aa, Unknown
  Bacterial polypetide isolated from the Sargasso Sea
MIKKENFDKTSAWPFVEAKKMLRERKSFIEKKGKIILQTGYGPSGLPHIGTFGEVARTSMIVNALKHLTDLPTEIITFSDDMDGLRKVPDNVPQKELLEKNLHKPLTNVPDPFQKFNSFGEHNNEMLKKFLNNFKFKYNFKSSTSLYKSGFFNSSLQVILENYDGIMNIILPTLGKERQKTYSPFLPICPVTGHVLEIPVKNINKEKSIIVFDNNGKDLETSIYDGNCKLQWKVDWAMRWYALDVDFEMYGKDLIESAILSTKIIKLIGKTNPSGFAYELFLDEKGEKISKSKGNGITIDQWLEYASPESLSLYMYQNPKRAKKLYKEIVSKTVDDYLDLIEKAKNQNELQLLMNPVWHVHNSLVPKENMIMSFSMLLNLVETSNADSKELLWKFVKKYKKDISEKDNPIFDNLVGYAIKYFNDVIKLKKKYKKPNGEEKKALEALVKTLDKCDDKMKPEDIQTMIYSTGKENGYTENLRDWFKLIYEVVFGDENGPRMGFFISFFGVKETKDLILNKIK

SEQ ID NO: 162166 - protein, 520 aa, Unknown
  Bacterial polypetide isolated from the Sargasso Sea
MIKKENLEKTSSWPIVEAKKMLRERKSFLEKKGKITLQTGYGPSGLPHIGTFGEVARTSMMVNALKQLTDLPTEIITFSDDMDGLRKVPDNVPNKELLEKNLHKPLTDVPDPFEKYNSFGEHNNEKLKKFLNNFNFKYNFKSSTQLYKSGFFNPTLQIILDNYDGIMNIIMPTLGKERQKTYCPFLPICPETGHVLEIPVKEIDNSKSKIVFDNKGKDLESSILDGHCKLQWKVDWAMRWYALDVDFEMYGKDLIESAILSTKIIKLIGKKNPSGFAYELFLDEKGEKISKSKGNGITIEQWLEYASPESLSLYMYQNPKRAKKLYNEIVPKAVDEYLEFIEKAKTQDELQLLMNPVWHVHNGSVPKEKMIMSFSMLLNLVETSNAENKELLWKFVKKYKENISEKDHPIFDNLVGYAIKYFNDVIKAKKKYKIPDQIEKKALEALISTLDKCNDKMSPEEIQTLIYSTGKENGYSENLRDWFKLIYEVVFGVENGPRMGFFISFFGVKETKDLIINKIK

SEQ ID NO: 162167 - protein, 454 aa, Unknown
  Bacterial polypetide isolated from the Sargasso Sea
SDLPKEIITFSDDMDGLRKVPENIPNSEKLEQNLHKPLTQVPDPFEKFNSFGEHNNEMLKNFLDKFKFEYSFKSSTVLYKSGFFNDTLKLILENYEGIMNIIIPTLGKERQKTYSPFLPICPDTGIVLEIPVSELDTKNLKIIFDNDGKKLEQSILDGNCKLQWKVDWAMRWYALDVDFEMYGKDLIESAILSSKIIKLLGKSNPSGFAYELFLDEKGEKISKSKGNGITIDQWLEYASPESLSLYMYQNPKRAKKLYREVVPKAVDEYLDFIEKGKTQNELQKLMNPVWHVHNSEIPEENSIMSFSMLLNLVETSNADNKELLWKFVKKYKKDINEDMHPIFDKLISYAIKYFNDVIKSKKIYKKPNESEKIALKALVNSLNNCDDAMKPEDIQTTIYTVGKENGYKENLRDWFKLIYEVVFGVENGPRFGFFISFFGVQETKELIKSKLENV

SEQ ID NO: 162168 - protein, 362 aa, Unknown
  Bacterial polypetide isolated from the Sargasso Sea
MEKSLLDKAKNSNAWPFQEALRILKSLNGKTPDKGYVLFETGYGPSGLPHIGTFGEVARTILVKNAFNIISDIPTKLITFSDDMDGLRKVPDNIPNQDMLKIHIDKPLSKVPDPFEKYNSFAEHNNEKLKSFLNQFNFEYEFKSSTDCYLNGDFDKTLINILNNYEKILEIILPTLGKDRRKTYSPFLPICEETGKVLQVPVKNINLNNGTIEYTNEKGQNIITEVTKGKCKLQWKADWAMRWEALDVNYEMNGKDLTPSFDLSKKIVQIIGGKAPVNMVYELFLDQNGEKISKSKGNGLSIEEWLSYGTEESLTLYMYQNPKRAKRLYFDTIPKNVDEYSRFLSSAKNQDIELLIKNPSMA

SEQ ID NO: 162169 - protein, 440 aa, Unknown
  Bacterial polypetide isolated from the Sargasso Sea
DMDGLRKVPDNVPKKEILNKNLHKPLTSIPDPFEKFDSFGKHNNEMLKKFLNDFNFSYTFKSSTELYKSGFFNSSLKIVLDNYQSIMETILPTLGKERQKTYCPFLPICPETGIVLEIPVIEINKKKSTIIFDNNGKKLETSVLDGKCKLQWKVDWAMRWYALDVDFEMYGKDLIESAILSKKIIKLLGKNDPSGFAYELFLDEKGEKISKSKGNGITIENWLNYASPESLSLFMYQNPKRAKKLYKEIVPKAVDEYLDFIEKGKSQNELQLLMNPAWHVHNGKIPKEKTIMPFSMLLNLVETSNANTKELLWKFVKKYKKNIIDNEYPIFDNLINYAIRYFNDVIKQKKSYKKPNHEEKKALEALVESLESCNDNMQPEDIQTKIYSVGKENGYKENLRDWFKLIYEVVFGDENGPRMGFFISFFGVNETKQLIKEKIK

SEQ ID NO: 162170 - protein, 521 aa, Unknown
  Bacterial polypetide isolated from the Sargasso Sea
MLESDLINSTSSWPFVEIRKLLKDRKEIIKKKNKITFQTGYGPSGLPHIGTFGEVSRTSMMINALNHINKIDTELITFSDDMDGLRKVPDNIPNDKILHDNIGKPLTAIPDPFKKYGSFGEHNNKMLIEFLKKFNFNFIFKSSTENYKKGIFNNSLERVFEKLEDIMNIILPTLGSERRKTYSPFLPICPETGKVLEIPVIEIDKKNKTLVFDNAGKKIKTSILNGECKLQWKVDWAMRWFTFDVDFEMYGKDLIESAILSNKICKAMGKQPPNGFAYELFLDEKGEKISKSKGNGITIEQWLKYASPESLSLYMYQNPKRAKKLYPDVVPKAVDEYLSYIEKFESQKEKEKLLNPVWHIHSGLPPKEKIIMPFSMLLNIVGSSNAKKKDVLWKFIKKFHKEIEPKNHKILDELTDYAINYFIDEVEPKKKFKKPSVEETKALKNLIASLKKVTQDTPPEDIQTIIYTSGKENGYSDNLRNWFKLIYEVIFGEENGPRMGFFISFFGLKETIDLMEKKLKI

SEQ ID NO: 162171 - protein, 464 aa, Unknown
  Bacterial polypetide isolated from the Sargasso Sea
MLDNDIIQSTSSWPFVEVRKLLKDRKDLIKKKNRITFQTGYGPSGLPHIGTFGEVARTSMMINALNFIQKIDHELITFSDDMDGLRKVPDNIPNDEVLKKNLGKPLTSIPDPFNKFNSFGEHNNEMLKEFLKKFNFKFNFKSSTQNYKKGVFNNSLLRVLEKYQEIMNIILPTLREERRKTYCPFLPICPKTGVVLEIPLLNMDQKSGNVIFDNNGEKLEINILNGNCKLQWKVDWAMRWFTFDVDFEMYGKDLTESAILSNKICRTLGKNPPNGFAYELFLDEKGEKISKSKGNGISIEQWLRYASPESLALYMYPNPKRAKKLYSEVVPKTVDEYLSLIEKYPTQDIKDQIQNPVWHVHNGKPPKEKIVMPFSMLLNIVGSSNADNKDVLWKFINRFHKEIKPEDHQILDRLTEYAINYFKDKVEPKKKFKKPNSKEKNALENLIKKLKKIDQSLSPEEIKP

SEQ ID NO: 162172 - protein, 320 aa, Unknown
  Bacterial polypetide isolated from the Sargasso Sea
MKTSTLEFEINPIDNSILANLLGTFDSNIRSIENELNIQIKNRGNLFLLEGQKRKLPLGERILLELHAIASKESIDKEKVHLVIKKIMNHQEKPSSSTEQPTFIKTPRREIQTRNMNQYEYIQSIRNHDVTFGIGPAGTGKTYLAVAAAIESLQRQDVKRIILVRPAVEAGENLGFLPGDLSQKVDPYLRPMYDALYEMMGFEQVSNLIERRTIELAPLAFMRGRSLNESFIILDEAQNTTVEQMKMFLTRMGFGSKSVVNGDITQIDLPTEKKSGLEHALSVVSDIDKIASVHFSHKDVVRHRIVQEIVEAYEKNKDNK

SEQ ID NO: 162173 - protein, 480 aa, Unknown
  Bacterial polypetide isolated from the Sargasso Sea
GYGPSGLPHIGTFGEVARTTMILNAIKSLSEIEVELIAFSDDMDGLRKVPDNVPNKNILEEHLHKPLTSIPDPFETSKSFGDHNNEMLQQFLDNFGFKYTFKSATELYTSGYFDEQLINVLKNYESIKNIILPTLGEERKKTYSPFLPICPKSGHVLEVEIISINPDKNTITYVNKNKEVEQSILKGKCKLQWKVDWAMRWGALDIDYEMYGKDLIPTFQLSAKVSRALGYAAPENYFYELFLDQNGEKISKSKGNGLTIEEWLSYAPKEILSYFMYQNPRRAKKLFHDIIPKSSDEFLGHLNKFNTQSDQEQIENPVWHIMNGENSIGNVNVTYNLILNLVAASGKNDPATILDFVKKYDENINSSNRQFINDLIKGAINFERDITSEKINFKTPSSEERKIFEDLINRLRSQADSADAETIQTEIYQIGKDHNFENLRDWFKLIYQVLFGKEDGPRFGTFIAIYGIKQTIELIEEKLK

SEQ ID NO: 162174 - protein, 393 aa, Unknown
  Bacterial polypetide isolated from the Sargasso Sea
FSDDMDGLRKVPENIPNFKKLEENLHKPLTQVPDPFEKFKSFGEHNNEMLKNFLDKFNFKYNFKSSTALYKSGFFNDTLNLILENYEGIMNIIIPTLGKERQKTYSPFLPICPDTGVVLEIPVSELDRKNSKIIFNNNGKKLEQSILDGNCKLQWKVDWAMRWYALDVDFEMYGKDLIESAILSTKIIKLLGKSNPSGFAYELFLDEKGEKISKSKGNGITIDQWLEYASPQSLSLYMYQNPKRAKKLYREVVPKAVDEYLDFIEKSKTQNELQQLMNPVWHVHNAKIPDENSIMSFSMLLNLVETSNADTKDLLWKFVKKYKKDINENEHPIFDNLIGYAIKYFNDAIKSKKIYKKPNEKEKIALDALVKSLDNCDDSMKPEDIQTTIYTVG

SEQ ID NO: 162175 - protein, 520 aa, Unknown
  Bacterial polypetide isolated from the Sargasso Sea
MIKKENLEKTSAWPFVEAKKLLRERKSIIEKKGKITLQTGYGPSGLPHIGTFGEVARTSMMVNALQHLTDLPTEILTFSDDMDGLRKVPENVPNKELLEENLHKPLTQVPDPFKKFKSFGEHNNEMLKDFLNNFKFIYNFKSSTKLYKSGFFNPSLEVILKNYEGIMNIILPTLGKERQKTYSPFLPICPETGHVLEIPVKEINEKKSIIIFDNKGKDLESSVLDGYCKLQWKVDWAMRWYALDIDFEMYGKDLIESAILSSKIIKLIGKTNPSGFAYELFLDEKGEKISKSKGNGITIDQWLQYASPESLSLYMYQNPKRAKKLYNEIVPKAVDEYLDSIEKAKNQDELQLLMNPAWHVHNSNVPQENIIMSFSMLLNLVETSNADNKELLWKFVKKYKENISEKDHPIFDNLVDYAIKYFNDIIKTKKKYKTPNLEEKKALESLVKTLETCNDKMSPEDIQTLIYSTGKENGYAENLRDWFKLIYQVVFGDENGPRMGFFISFFGVKETKDLIINKIK

SEQ ID NO: 162176 - protein, 487 aa, Unknown
  Bacterial polypetide isolated from the Sargasso Sea
MITLQTGYGPSGLPHIGTFGEVARTSMIVNALKQLTNLPTEIITFSDDMDGLRKVPDNVPNQKLLKENLHKPLTEVPDPFNKYKSFGEHNNEMLKNFLNSFDFNYSFKSSTYLYKSGFFNSTLKLILQNYDGIMNIILPTLGKERQKTYSPFLPICPESGHVLEIPVLEIDKDNSKIIFDYNGKKLEKSILNGHCKLQWKVDWAMRWYALDVDFEMYGKDLIESAILSTKIIKLLGKRNPSGFAYELFLDEKGEKISKSKGNGITIDQWLDYASPESLSLYMYQNPKRAKKLYKEIVPKAVDEYLDFIEKAKKQDELQLLMNPVWHVHNSEIPKENMIMTFSMLLNLVETSNADNKDLLWKFVKKYKTDISEKDHPIFDKLVGYAIKYFNDVIKLGKKYKKPNNNEKMALEALIKTLDKCNDKMTPEDIQTLIYSTGKENGYSDNLRDWFKLIYEVVFGDENGPRMGFFISFFGVQETKDLILNKIK

SEQ ID NO: 162177 - protein, 524 aa, Unknown
  Bacterial polypetide isolated from the Sargasso Sea
MHWADYTAQRLMERGDEQVSASGITPSGEFHIGHLREILSAEMIHRACLDAGMSSKYIFIVDSMDPLRRVYDFLSPEYEEFIGCPLAFIPAPGEDGSPGDGSVTYADHFLSPFLDALEQIGVRPEVVMNHETYEKGLFAEYIDTAISNREEIREIIQQISGRELPSDWFPYNPMGSDGSMDGVTVTGYEKPYVIWRDSSGNEGKSDIRKAHGKMPWRVDWAARWVIHGITCEPAGKDHGAAGGSYDTGIPICRLLGGNPPDKIVYEWIQLKGMGPMSSSSGLTIGPMEALSLVPPEILRYVIARSKINRHIEFDTGSALFQTADEYERLVANPIRDQEEMSKRQLVAAETQRGAIRLSQVNPESDPIDSVGGVSFRHLSMLAQIKSSDGDVWSSLNRSGHIEGDPSDSLRVRLARMRSWIGGAHFPEDAKLEIRSEIGDDARAEIGRDGIAFLRSLSGLLSECEWTDAGIGESISEACDSTGVSRKEGFASIYWAIIGRRHGPKASSLLFEMDRGDIVSLLGSS

SEQ ID NO: 162178 - protein, 338 aa, Unknown
  Bacterial polypetide isolated from the Sargasso Sea
MLDNNVIQSLSAWPFVEIRNLLKERKDLIKSKNKIIFQTGYGPSGLPHIGTFGEVARTTMMINALHQLNKIETELITFSDDMDGLRKVPENIPNEEILKKNLGRPLSSIPDPFGKFNSFAEHNNTMLKQFLKRFNFEFSFKSSTENYKKGKFNESLKRVAEKYEEIMEIILPTLRSERRKTYCPFLPLCPETGKVLEIPMLHLEKNTGKVTFDNNGKKIQTDIYNGNCKLQWKVDWAMRWFTFDVDFEMYGKDLTESAILSSKVCKVLGKVPPSGFAYELFLDEKGEKISKSKGNGITIEEWLNYASPESLSLYMFQNPKRAKKLYSDVVPKAVDEYL

SEQ ID NO: 162179 - protein, 154 aa, Unknown
  Bacterial polypetide isolated from the Sargasso Sea
MTENLSENDLIKQRRSKLEELRNRGNAYPNSFRRDSLSQDLKDQCEGLSKEDLEAKEMTVSVAGRIMLQRIMGKASFITLQDMKGQIQAYVRSNDLPEGQYDDFKTWDLGDIVGIKGKLFLTKTEELTVNAESIEMLTKSLRPLPEKHSGLVDK

SEQ ID NO: 162180 - protein, 44 aa, Unknown
  Bacterial polypetide isolated from the Sargasso Sea
YIEALEYGLPPCAGVGIGIDRLVMLLTGVDSIRDVLLFPQMKPK

SEQ ID NO: 162181 - protein, 64 aa, Unknown
  Bacterial polypetide isolated from the Sargasso Sea
IEDQVAAKDSGDKEAMDYDHDYITALEHGMPPAVGVGMGVDRLVMLLTNQSSIRDVLLFPQLKS

SEQ ID NO: 162182 - protein, 107 aa, Unknown
  Bacterial polypetide isolated from the Sargasso Sea
ISKFFSSNETNPDYADRFELFIGGKEFANGFCELNDPDDQASRFEDQVAAKDSGDKEAMDYDHDYITALEHGMPPAVGVGMGVDRLVMLLTNQSSKRDVLLFPQLKS

SEQ ID NO: 162183 - protein, 223 aa, Unknown
  Bacterial polypetide isolated from the Sargasso Sea
MSEDKIGGEKAILEERRKKLENLRDKGVAYANSFRPKNSTNEIHKLYGDISKDDLAEKNIKNISIAGRIVLKRVMGNASFATLRDASGDIQIYVTKNNVDESIYDDFKTWDLGDIVGVSGSLFRTKTDELTIEVWDLEMITKSLRPMPEKFKGLTDVEARYRQRYLDLMTNTQTKEVFIKRTRIIDSARKKMNERGYLEVETPMMHPLAGGAVARPFVTQHNA

SEQ ID NO: 162184 - protein, 174 aa, Unknown
  Bacterial polypetide isolated from the Sargasso Sea
MEAINKLGSISFHSMSDSDVQLLLEQNGWELEGDYNRGLATQLVFEKTCEDQLVQPTFITDHPRETSPLCKQNRQNPELIERFEAFINGWEIANAYSELNDPVIQRGLMEEQVERGRGGEKDTHPLDEDFLRAMEYGMPPMGGVGFGIDRIVMLLTGQSTIRDVIFFPTMRTEF

SEQ ID NO: 162185 - protein, 258 aa, Unknown
  Bacterial polypetide isolated from the Sargasso Sea
RKRYLDLIINKSSQKTFIKRSKIINSIRDFFNEKDYLEVETPILQPIYGGAAARPFKTYHNTLDMPLYLRIANELYLKRLIIGGFKGVYEFGKDFRNEGMSRFHNPEFTQCELYVAYKDYIWMMNFLEDLFVKVCLDLNGNTNIKCGENEINFKKPWKKYTMYEVIKKFTGIDVTNMGKKELLNLCKDLKIKTDNSMGRGKLIDEIFGEKCEKNLIQPTFITDYPIEMSPLAKKHRSKEGVVERFELICNGKELCNAF

SEQ ID NO: 162186 - protein, 53 aa, Unknown
  Bacterial polypetide isolated from the Sargasso Sea
DTHPLDEDFLRAMEYGMPPMGGVGFGIDRIVMLLTGQSTIRDVILFPTMRNEF

SEQ ID NO: 162187 - protein, 173 aa, Unknown
  Bacterial polypetide isolated from the Sargasso Sea
MSEIRESRLQKANSLVSKGFPSYAESFRVSHTTQFLIQKFYYLENGQEEGFNVSLAGRVMAKRVMGKIAFFTISDQEGQIQLYLDKRIINCNSENQKLLSFEDIKEIVDIGDWIGVYGTIKKTNKGELSIKVEKWEMLSKSLHPLPDKWHGLTDIEKRYRQRYLDLIVNPHSK

SEQ ID NO: 162188 - protein, 277 aa, Unknown
  Bacterial polypetide isolated from the Sargasso Sea
RSLPEKWHGLKDKETRFRQRYLDFIVNDEAKKTIDTRFKVLQLVREFMVNDGFVEVETPTLQPKAGGAIAKPFTTHHNAMGIDMFLRIAPELYLKRLIIGGYEKVFEVGKVFRNEGIDQTHSPEFTMMESYEAYTDVNGVMDMVEKMCEHIFKELNHNLNVEFADKEADFSFPWKRVSMFELVSSHFEIEIKYNSELKDIQSQLIEKHDIDVESTSIGVLVYELFENHIEDNILNPTFVTDYPKEVSPFARESKETEGVTERFELFAFGSELANGFS

SEQ ID NO: 162189 - protein, 86 aa, Unknown
  Bacterial polypetide isolated from the Sargasso Sea
GKEFANGFCELNDPDDQASRFKKQVEAKDSGDKEAMDYDHDYITALEHGMPPAVGVGMGVDRLVMLLTNQSSIRDVLLFPQLKSNE

SEQ ID NO: 162190 - protein, 56 aa, Unknown
  Bacterial polypetide isolated from the Sargasso Sea
ALEIGMPPTGGLGIGIDRLIMLITNSSSIREVIPFPLLKPEITSKKNEKLPLNEVK

SEQ ID NO: 162191 - protein, 68 aa, Unknown
  Bacterial polypetide isolated from the Sargasso Sea
QASRFEDQVAAKDSGDKEAMDYDHDYITALEHGMPPAVGVGMGVDRLVMLLTNQSSIRDVLLFPQLKS

SEQ ID NO: 162192 - protein, 45 aa, Unknown
  Bacterial polypetide isolated from the Sargasso Sea
DENRLIAERRAKLGALREAGPAFPNDFRRTALAGYLQRDFESQDK

SEQ ID NO: 162193 - protein, 120 aa, Unknown
  Bacterial polypetide isolated from the Sargasso Sea
IEPTFIYNYPIEISPLSRSLDEDNSVAERFELFVNGKELGNSFSELNDPEEQAARFESQVKEKDAGDEEAMHFDRDYIEALEYGLAPCAGVGIGIDRLVMLFTGQESIRDVVLFPQLKNK

SEQ ID NO: 162194 - protein, 71 aa, Unknown
  Bacterial polypetide isolated from the Sargasso Sea
PDDQASRFEAQVAAKDSGDKEAMDFDKDYITALEHGMPPAVGVGLGIDRLVMLLTNQSSIRDVLLFPQLKN

SEQ ID NO: 162195 - protein, 106 aa, Unknown
  Bacterial polypetide isolated from the Sargasso Sea
SPLSRRNEDNPDFADRFELFIGGKEFANGFCELNDPDDQASRFEDQVAAKDSGDKEAMDFDQDYITALEHGMPPAVGVGLGVDRLVMLLTNQSSIRDVLLFPQLKN

SEQ ID NO: 162196 - protein, 203 aa, Unknown
  Bacterial polypetide isolated from the Sargasso Sea
MDNDNEYIKVRREKIQKLRDEGINPFKNDIKPSILIIDLIDTYAVTDPESFEKDLKVYSIVGRITAIRSFGKSAFIQIKQDDNNFQVFISKETLGIESLDFFKKFIDIGDFIFVEGTCFFTKTKQLTLDATRMELLTKSLRPLPEKWHGLTNKETRYRQRYLDLISNSDVRKIFEIRSKIFSSIRNFLSKNKFTEVETPILHK

SEQ ID NO: 162197 - protein, 68 aa, Unknown
  Bacterial polypetide isolated from the Sargasso Sea
QASRFEAQVAAKDSGDKEAMDFDKDYITALEHGMPPAVGVGLGIDRLVMLLTNQSSIRDVLLFPQLKN

SEQ ID NO: 162198 - protein, 160 aa, Unknown
  Bacterial polypetide isolated from the Sargasso Sea
MSDSDVQNLLEQNGWELEGDYNRGLATQLVFEKTCEDQLVQPTFIIDHPRETSPLCKQNRQNPELIERFEVFINGWEIANAYSELNDPVIQRGLMEEQVERGRGGEKETHPLDEDFLRAMEYGMPPMGGVGFGIDRIVMLLTGQSTIRDVIFFPTMRTES

SEQ ID NO: 162199 - protein, 48 aa, Unknown
  Bacterial polypetide isolated from the Sargasso Sea
DFDKDYITALEHGMPPAVGVGLGIDRLVMLLTNQSSIRDVLLFPQLKN

SEQ ID NO: 162200 - protein, 143 aa, Unknown
  Bacterial polypetide isolated from the Sargasso Sea
MTEEISQNELLAQRREKLEALRSKGNAYPNNFRRDSLSLKLHESYGDQKKEDLEEKDIKVKVAGRIMLQRVMGKASFITIQDMQGQIQAYVRSDSIGDEIYKDFKTWDLGDIVGIEGTLFKTKTDELTVNAESVSLLTKSLRP

SEQ ID NO: 162201 - protein, 159 aa, Unknown
  Bacterial polypetide isolated from the Sargasso Sea
IEELRAIASEHEIPIKDGYGPGKLILEIYEKTTESSLWGPVYVTDYPIEVSPLSREHRSNPGMTERFEAILAGRELCNGFSELVDPEQQRIRFEEQAAQNAGGDDEAMVVDEDYLRALEYGLPPTGGVGIGIDRLAMLLTGATSIRDVVLFPTLRPEQT

SEQ ID NO: 162202 - protein, 68 aa, Unknown
  Bacterial polypetide isolated from the Sargasso Sea
RLMEEQVERGRGGEKDTHPLDEDFLRAMEYGMPPMGGVGFGIDRIVMLLTGQSTIRDVILFPTMRTEF

SEQ ID NO: 162203 - protein, 123 aa, Unknown
  Bacterial polypetide isolated from the Sargasso Sea
KGDDEAMFIDMDFIKSLEYGMPPTSGIGIGIDRLVMLMTDKTSIQEVLFFPQMKPIKKEPDISEDAKVIFNRLKNIEQILLADFKSEFDLSNKKWDKVLKELRGNDLIDIFKSDDGSLFIKPV

SEQ ID NO: 162204 - protein, 225 aa, Unknown
  Bacterial polypetide isolated from the Sargasso Sea
AYVDYESIMRLVEEMVSGACLEINGSYDLDYGDEIGIINLKPPWKRIELKEAILKFSGFDFMSIKNIDELSAKMKEMNIHVEPNSSWASMIDKVISDKVEPNLIQPTFLIDYPVEMSPLAKRKSAGGDIVERFEAFVMGSELANAFSELNDPIDQRERFEDQEKMRKKFNDEEMDRLEEDFLVAMEHGMPPTGGLGLGIDRLIMLLNKKTTIRDVVLFPQLKSID

SEQ ID NO: 162205 - protein, 232 aa, Unknown
  Bacterial polypetide isolated from the Sargasso Sea
MTEQQVQQQEESQLVAARRAKMQRWIDDYNVYPWGNRVDGLASLAEARAQFSQEAHDASKEEGGKDERPRVKVAGRCIQHRAMGKLTFLVIRDETGDLQISCSKAALPMEQFKVASKLDYGDIIVAEGPIGATQKGEICVWAESFELSCKSLVPPPEKFHGISDAELRYRQRYVDMYTNPETIDTFKKRSDIIRAIRSYMETDAFVEVETPMMQPLAGGAAARPFSTHHNAL

SEQ ID NO: 162206 - protein, 203 aa, Unknown
  Bacterial polypetide isolated from the Sargasso Sea
LKPLPLPKEDREGNLYDEFNDPELRFRQRYVDLIVNSGVKETFIKRTLITNSIREFLNQREYLEVETPILQPIPGGATARPFLTHHNALNIPLYLRIANELYLKRLIVGGFEGVYEFAKDFRNEGMDRTHNPEFTILELYVSYKDYNWMMDMTERLLEKVSIDSTGSTKIKVDNNIIDFKAPYKRISIFGAIKKFTGVDISKM

SEQ ID NO: 162207 - protein, 216 aa, Unknown
  Bacterial polypetide isolated from the Sargasso Sea
MTDDKKNIENTILEERRQKLEQLRDKGDAYSNSFKPKNTAKAIIEAFGEKTKDELVSEKVKNISIAGRIVLKRVMGNASFATLRDGSGDIQIYVSKNNIEESIYADFKSWDLGDIIGVSGSLFRTKTDELTVEVWDLEMITKSLRPMPEKFQGLKDIEARYRQRYLDLMSNKQTKETFIKRTKIIDSIRSKMNEKDYLEVETPMMHPIAGGAVAKP

SEQ ID NO: 162208 - protein, 277 aa, Unknown
  Bacterial polypetide isolated from the Sargasso Sea
LSKSIRPLPIVKEKEGEVFDAFKDKELRYRNRHLDLIVNPETRDVFRKRTEIISDIRSTLDSKQFLEVETPVLQPIYGGANARPFTTYHNALGQKLFLRIADELYLKRLIIGGFEKVYEIAKDFRNEGMDRSHNPEFTMLEFYWAYADYNDCMVLVEELIRNAAKKVGNLSIKWGESDIDLSKKFERKTFYGLLNEEIGLDISSLDDNGLFDVCKNKNLEIDKNANTGQMLDSLMSNLIEPKLINPTFVIDYPKSISPLAKLKRDGSQDIVKDLNYL

SEQ ID NO: 162209 - protein, 61 aa, Unknown
  Bacterial polypetide isolated from the Sargasso Sea
QVAAKDSGDKEAMDYDHDYITALEHGMPPAVGVGMGVDRLVMLLTNQSSIRDVLLFPQLKS

SEQ ID NO: 162210 - protein, 222 aa, Unknown
  Bacterial polypetide isolated from the Sargasso Sea
MLEFYEAYGSLDRTTRFVQKLVQDSISAVNDSLSIIYEDKELNLESDFEVKSLKDLVQEKLKMALDTEKQIFDAAKKTGLKIKSDWGWGKILLELFEEHVEKNLWSPTFVKDYPYEVSPLSRRKNENKDFTDRIELFIAGREFANFFCELNDPIDQEERFDMQLKQKDLGDQEAMAFDDDYINALKHGMPPATGVGLGIDRLVMLATNKSSIRDVVLFPTLK

SEQ ID NO: 162211 - protein, 144 aa, Unknown
  Bacterial polypetide isolated from the Sargasso Sea
MTDQQTDDNKLIAERRAKLSAIREQCRANGFPNSFRRENYADELQAKFGEFDKETLQEQGNKVSIAGRIMAKRGPFMLLQDMTGRIQAYADKDTQKVLKAKYGALDIGDIIGVAGDLHKSGKGDLYVNMAEYELLTKALRPLPE

SEQ ID NO: 162212 - protein, 253 aa, Unknown
  Bacterial polypetide isolated from the Sargasso Sea
MTDEKDLIRERKKKLENISEFSPAYPNKVIKSDTTRSLINTCSNEDKKSLEEKNILTNICGRVMTIREMGNSVFADLHDEYGKIQIYLNKKNLDEISQNMFKNLDLGDIVGISGIIFKTKTQELTINVDSFLILSKCLRPLPEKFHGIADVEIKYRQRYLDLMTNFETRIHFKKRSKIIKIIRNYFDERDYIEVETPMMHIIPGGANAKPFITHHNSLDMDLFLRIAPELFLKRCIIGGYEKVFEINRSFRNE

SEQ ID NO: 162213 - protein, 199 aa, Unknown
  Bacterial polypetide isolated from the Sargasso Sea
MIIKSKEENIPDIDLTPPWKRLDLRKTLIDKVGIDFLEINERNLLVQKMKELKIHVDENATWGRLLDKVISSSIEPDLIQPHFLVDYPLEMSPLAKKKPGSENVVERFEAFVMGSELANAFSELNDPIDQRKRFEDQEKMRAIQGDLEADRLDEDFLVAIEHGMPPTGGLGLGVDRLTMLLSGESSIREILLFPAMRKQ

SEQ ID NO: 162214 - protein, 77 aa, Unknown
  Bacterial polypetide isolated from the Sargasso Sea
SELNDPDDQAERFEDQVKARDGGDDEAMFFDQDYIEALEYGMPPTAGLGVGIDRLVMLFSNQASIRDVLLFPHMRSK

SEQ ID NO: 162215 - protein, 170 aa, Unknown
  Bacterial polypetide isolated from the Sargasso Sea
MSEQNTPIEEHQDVNKLIAERKHKLAGLRELGNPFPNDFRRDATSDQIHAQYEHLSKEELEEKKIRVTVAGRIMLRRIMGKASFTTIQDVGGKLQLYVARDSLAENVYNEGFKKWDLGDIIGGSGVLFKTQTGELTVWLDESRLLTKRCVHCRTNSMVLTIRKLGTVNVI

SEQ ID NO: 162216 - protein, 58 aa, Unknown
  Bacterial polypetide isolated from the Sargasso Sea
KGDEEAQPVDENFIRAMEVGMPPTGGVGIGIDRLVMLLTNNRWIRDVIFFPTMREEKR

SEQ ID NO: 162217 - protein, 226 aa, Unknown
  Bacterial polypetide isolated from the Sargasso Sea
MDTENISGEKALIEERRKKLKHLRDRGGAYSNSFKPQNNAFKLHEEYGEFSKEDLAEKDVKDISIAGRIVLKRVMGNASFATLRDASGDIQIYVTKNNVDETVYEDFKTWDLGDIVGVSGALFKTKTDELTIDVWDLEMITKSLRPMPEKFKGLTDIEARYRQRYLDLMTNNETKNVFIKRTKIIDSLRKKMNECDYLEVETPMMHPLAGGAVARPFITQHNALGQ

SEQ ID NO: 162218 - protein, 481 aa, Unknown
  Bacterial polypetide isolated from the Sargasso Sea
MKKLEILNEKGIDPYPTDFKPTHNTKDCLNLLDETEKKDLEKSNDIHSAGRITAIRKMGKAVFIDILDEAGKIQLLARNNTIDDATEELIELLDIGDWLGVIGPVFRTRRNEPTIQVNSLKMLSKSIKPLPEKWHGLKNVETRYRQRYLDLIANRDVLNIVKQRDSIVFELRKFMKELGFVEVDTPILVPIPAGGMAHPFKTYHNALDRELYLRIATELYLKRMIVGGIEKVFEIGRLFRNEGIDSNHNPEFTTMESYEAYADYNDVMEMVENLFAHIVFNLKGTYEIPYGENKLNFKPPWKRMNLRQSLIEKSGIDYEECNDLEVLKEKMSNIGIDVRNQLSWAGLMDKLISEKLEPDLIQPTFLIDYPLEMSPLAKRSKDNPNIVERFEGFIAGMEVCNAFTELNDPVDQRTRFENQEKLREEFPEEERDRLDEDFLIALEHGMPPTGGVGIGIDRMVMLILNQPSIREVITFPQLRSL

SEQ ID NO: 162219 - protein, 241 aa, Unknown
  Bacterial polypetide isolated from the Sargasso Sea
MNDHLDQRQIRVTKLETLRGKGINPYPYSFQNSHTLPELLEIGKILVESQEEVSISGRLMALRGKGKAVFANIQAQHQRLQIYIRKDEVGEDSFDVFGMCDIGDFLGLQGTMMHTKTGELTLRVKNLQILTKAVRPMPVPKVQEKDGEKIIHDEVRDKEFRYRQRYVDLTLNPEVAKVFRQRNLMMQTIRNYLNEQGFLEVETPTLQPVYGGANATPFHTHHKALDQTFFLRIANELYLKR

SEQ ID NO: 162220 - protein, 55 aa, Unknown
  Bacterial polypetide isolated from the Sargasso Sea
SGDKEAMDYDHDYITALEHGMPPAVGVGLGVDRLVMLLTNQSSIRDVLLFPQLKS

SEQ ID NO: 162221 - protein, 281 aa, Unknown
  Bacterial polypetide isolated from the Sargasso Sea
AIKFTGLSDEQINRIITPLEGIYLIIDHIRTLIFAISDGALPSNVGGGYNLRIMLRRIVSTMDRLKLKFDLDEIIDIQIDYLKNTYPELEDTRDDVKEIISIEAGRYDSSKQRMQKIVSKLDKEPSVTDLIRLYESDGVTPEYLKEMKVISEIPSTFYAKLSDLHQSKKQKEQLTLPLEGIPDTELLFYGDDPREFSAKVLKVFDNFVVLDKTGFYARGGGQEPDHGKIAECDIVDITKHGNIVVHEIKGEIPKEGDTVSCVVDSTRRDGITKNHTSTHII

SEQ ID NO: 162222 - protein, 91 aa, Unknown
  Bacterial polypetide isolated from the Sargasso Sea
ALLALVDQLKNKLGSAVILLGGVFDEKVVLVAGVTQDLTAKVKAGDLMRQAAAAVGGKGGGRPDMAQGGGVDAGKLDEALALAATLVEQAS

SEQ ID NO: 162223 - protein, 260 aa, Unknown
  Bacterial polypetide isolated from the Sargasso Sea
NETIRNNISTKIETMSFKKAQDKGALAFFGDKYGDQVRVLSIGGNFSVELCGGTHVDSAGDIGFVKVTSESSISSGVRRIEACSGKDAEDFSNKFQNSGQEAMRLLNVNEEGLISKIKELMEKNSELEKSIKSSQQKELGEVIKSLEQDIIQINSYKVILKEFEGINLGSARSFIDELKNKNENLICVLASKDGDKSSLLVSSSKSIPKDVFSSNDLLQSLASLIGGKGGGKPDHAQAGGSQVKNFEKVFSEATKYIQNL

SEQ ID NO: 162224 - protein, 267 aa, Unknown
  Bacterial polypetide isolated from the Sargasso Sea
FLYPISKDQISKIETLVNSWIMENHALEIKNMSKSEALEKGAVAMFGEKYDDEVRVVNVPGVSMELCGGTHVKTTSELGSFKIISEEGISAGVRRIEALSGQSALDYFSDRNALVNQLSDLLKANPNQLFERVNNLQAELINKNKEIQKMKDEIAYFKYSSIKSSAEIVNSFSILVNQIDGLDGKSLQSAALNLTSHLGNKAIVILGGIPNPENRKLLFVVSLGDDVVKIGLHAGKLINEIARICSGGGGGKPNFAQAGAKDIDKFK

SEQ ID NO: 162225 - protein, 206 aa, Unknown
  Bacterial polypetide isolated from the Sargasso Sea
CLWWISYGDVLGAGKGWSITINFSDSIQEQFLKFFEDEQKFTLGVCNGCQMLSSIKEIIPGTDSWPSFQKNHSDQFEARLSQVKILKSKSVLLNNMEDWSLPIIVSHGEGRASFENEDEINKLFDSEKICMTFVDSSGYHTEQYPLNPNKSPSGITGITNDNGNITIMMPHPERVFRSHQFSWKPLSWGEFSPWMQIFINAKKFVS

SEQ ID NO: 162226 - protein, 286 aa, Unknown
  Bacterial polypetide isolated from the Sargasso Sea
EGGGQEPDFGEIIHPNGTSKVLDCQKQGTYVIHFCDSKIKVGTVIHGVVDYDRRKQLMDHHTSVHIVGGAARKILGPHVYQAGSNVSEEYGRLDITHYKRLTRDTLDKIESLANEVLQDVDYTTKSELDRKDADLIYGFDLYQGGAPKSKNIRILEIGTHDTQACGGTHHDIPGKIGQIRVVRSTLVQDGVERLQIVAGNAALGYGRRQDQLIRDSASTFGVSEKDLPKTSGRFFEEWKLQRKKIEQLEAEIIRLRTSGVDGDDSSEVDGVRIIIMEVESDIKQMT

SEQ ID NO: 162227 - protein, 48 aa, Unknown
  Bacterial polypetide isolated from the Sargasso Sea
MKKNLTTNEIRNIYLEYFQENGHELVESASLIPHNDPSLLFTNAGMVP

SEQ ID NO: 162228 - protein, 277 aa, Unknown
  Bacterial polypetide isolated from the Sargasso Sea
MNVSLPPINFKVFHENGYFRKQCRVTNLWFWTCDHDRDTCGDTEEDEYTFIGAPIIEGFPQRGRELKDAMRETFLSFLEKHEHTRIDPYPILARWRDDIHLTIASIADFQPHVTSGEVEPPANPLAISQPCIRLNDVDAVGHSGRHLTTFEMMAHHVFNRPDEGRLFYWMEECVAYCHQLLCGTFSIEPKEITYVENPWSGGGNAGAAVEVIVGGLELATLVFMNLEESTEGNIEIKGVNYREMPLQIIDTGYGLERFCWAAAGTPTIYEAIYPESV

SEQ ID NO: 162229 - protein, 297 aa, Unknown
  Bacterial polypetide isolated from the Sargasso Sea
HQTTGLTDEQINRIITPLEGIYLIIDHIRTLIFAISDGALPSNVGGGYNLRIMLRRIVSTMDRLKLKFDLDEIIDIQIDYLKNTYPELEKTREDVKEIISIETGRYDSSKQRMQKIVSKLNKEPKVEDLITLYESDGVTPEYLKEMKVISEIPSSFYSKLSDLHQSKKQKEQVNLPLEGIPDTELLFYDEDPREFDAKVLKSFENFVVLDKTAFYARGGGQEPDHGKISGQEIVDITKHGNIVVHEIKGEIPKEGDVVSCIVDAKRRDGITKNHTSTHIINTSARSVLGSWVWAHSA

SEQ ID NO: 162230 - protein, 39 aa, Unknown
  Bacterial polypetide isolated from the Sargasso Sea
GVQAFELYDTYGFPLELTQEIAEEQGLTVDLDGFEVAME

SEQ ID NO: 162231 - protein, 286 aa, Unknown
  Bacterial polypetide isolated from the Sargasso Sea
LVVTGQSQIKGNLLLSGSSTFAGVLSASNIVASGSAILKDTLNVSGTTTLATTLNVNGDVQAAKDVHIVGGLTISGTFAPGLISSSSPIQTSDQVRVGETLHVSGATTLAGLLSSSAPIQTSDDLRVGEILYVSGAINGASLAVGSIDVNDGNIANVGDIDADSVSVADAANGLNIDFSGANTGTGLITIADNLAAALTVKEGSNEIVKIVSSNSSEEIVLGYKLDLGDNDIENVGTISADVIQPDAAGTGLDIQFEGNTTTNKISLTDNLADALNVTEAGNSYMK

SEQ ID NO: 162232 - protein, 227 aa, Unknown
  Bacterial polypetide isolated from the Sargasso Sea
FGEEYDDDVRVLTMGENSYSVELCGGTHVSRTGDIGFFTITSQSSVASGIRRVEAIAGMQALNYIKKLKEVNSSIQNLLNVSTDDIHDKIKSLIDENKALKSKGTQSSKREIVFSESIEINDWKLVIQQVQLDDTKDLRLLADEQKNTNEKVCVVIFSEQNNKIALVCGVTKNLTDTLSAKDIVSVISEKIGGKGGGRSDFAQGAGESKNIKDFVTSIQDSVKSLAK

SEQ ID NO: 162233 - protein, 235 aa, Unknown
  Bacterial polypetide isolated from the Sargasso Sea
MNKKITSEIFRDDPYKKECEAKILDFGDNWIILNQTVFYAEGGGQLGDTGLIKVGQQEIQIENTIKENDLIKHIFNSKFDFEIGDNVTCIIDWDRRYKLMKMHTSLHLLCSLVNAKVTGGSVGDGKGRLDFNLDFKPNKEELKDNLNDLIQGNHDITISWISAQELDKNPNLVKTMSVLPPRTNGSIRMVRIGDNIDFQPCGGTHVKNTSEIGLVEINKVENKGKLNKRVAISLV

SEQ ID NO: 162234 - protein, 180 aa, Unknown
  Bacterial polypetide isolated from the Sargasso Sea
AYLNERDAVVKQLGDRFKAQPSEIVDRVAVLQEELKSTGKALAAAQAELAVAKAGALAAKAEAVGEFQLLVERLDGVDGAGLQGAAQSLADQLGDGAAVVIGGLPNPADLGKVILVAAFGKQVIAAKLQAGKFIGAIAKLCGGGGGGRPNLAQAGGRDGAQLTSALEAAAVQLQQALANA

SEQ ID NO: 162235 - protein, 49 aa, Unknown
  Bacterial polypetide isolated from the Sargasso Sea
AGDVIKHFAGELGGKGGGRPDMAQGGGSDVAALPTVLASLPEWVAAQLG

SEQ ID NO: 162236 - protein, 145 aa, Unknown
  Bacterial polypetide isolated from the Sargasso Sea
MDWERRYKLMKIHTCLHLLCSIIDGKVTGGSVNDGKGRLDFNLDYKPNKEEVKIKLNKLIQGNYNINYSWINQKELDENPHLIKTMSVLPPRTNGKIRMVRIGEDIDYQPCGGTHVKNTSEIGNIEINKIENKGKLNKRIALSLT

SEQ ID NO: 162237 - protein, 258 aa, Unknown
  Bacterial polypetide isolated from the Sargasso Sea
MQIRRSEELLLEEYRKGSIRGTIHTCIGQEIFPVLLADQTEDYFWFSNHRGHGHYIAKTNDFEGLFAEILGKENSVAHGVGGSQHLSNKNFLSNGIQGGQAAIAAGYSSNINKSKQYKSLMFIGDGTLGAGPIYEAWNMASLYNSKVIYVLEDNEIAQSTPAINTFSGDIKKRVEGFGLKYLETSDKSIEEMKIAIKEAVGSSSQGTPTLIHLHTKRLSSHSKSDDNRSPEYIKKLSEDDLLNVHLKKEDISYDQKEI

SEQ ID NO: 162238 - protein, 289 aa, Unknown
  Bacterial polypetide isolated from the Sargasso Sea
AIDEITGGAGTDVIGGTYGTDGGATTTSYAPGDVVDGAGGSDTLKLSIAGTSTGASDSITGITLKNIETIDVTNFETDETDTTTIESSLYSGVETVGLVASSSSGDTLFTNLPNLVNVNYKNSAGDLNVGFQAAVVAGSADAVTLNLNNNVAGGTVTLASIESVTVNAGAVKSTLAGLAATSATSLTLAGATKTTITAAMGASLKTIDLTAQTGGADITVATTATLIVTGGPGDDTINFDSSLNSLGADIFSGGAGTDTVEIDDAATLTATATAGLTGIEVLAAGATDS

SEQ ID NO: 162239 - protein, 219 aa, Unknown
  Bacterial polypetide isolated from the Sargasso Sea
CPAWGRSLSAGVRRVTGVVGSAAKQAHHTAKKLSSEIDEVAKSSDDHFAEALAALLKNIESATVSLSARAVIETQLVPLRDRAKQLRKAAAAGSRDLAIDHARQLVPESAGFVIARVDMAGDRDALMAALDTVRGNQPEAPVLLLAADLEENKVSIVARVPEAGIAKGLKAGDWARCAAEACGGKGGGRPDMAQAGGKDATLADAAMEAARHFANERLA

SEQ ID NO: 162240 - protein, 227 aa, Unknown
  Bacterial polypetide isolated from the Sargasso Sea
MTIELFRNDSYLKEHNTTISEFVPEGLVLNETIFYPEGGGQPGDEGSITVDNQTIKVVGTRYIDNKLVHLIENVDGLKKDEDVKLNLNWIKRYSYMKVHTSLHLLCSIIPFPVTGGSIGDGRGRLDFDLESKPDKEEVLDKINMLIDEDYSIYISSITDKELDENPELVRTMAVKPPRGSGQIRMIKIGDNIDFQPCGGTHVNKTSEINHVKSVKIENKGKMNKRII

SEQ ID NO: 162241 - protein, 283 aa, Unknown
  Bacterial polypetide isolated from the Sargasso Sea
VIDMYESSYPELQDNKDKILKLFIKEEEIFQKTLNKGLQEINNLISSNKSITPKDAFYLFETFGFPYELTKEISAENKIDINDEDFNKLYDEHKEKSKAEKSLGNENMEIEVELNEFVGYENTESKSKIYQVEPYDDKFIIFTEENPFYFEAGGQISDKGVITIDDTSIEVIDVFQANNGATGLIVDSDIFKVDQEVELSVNKSFRSGVSKSHTGAHIVHSALRNILGDHVAQAGSNVTPGKFRFDFSHTEKVSQEELDEIFALSNSAVFEDYEVNTNIMNID

SEQ ID NO: 162242 - protein, 56 aa, Unknown
  Bacterial polypetide isolated from the Sargasso Sea
VIARGQQAGKFIGTVAKACGGGGGGRPNLAQAGGRDGGALDGALAQARVALQQAMA

SEQ ID NO: 162243 - protein, 246 aa, Unknown
  Bacterial polypetide isolated from the Sargasso Sea
FGEKYGEEVRVVFMGKESNGFFSTELCGGTHVKNTKEVGKFKIISQSSIASGVRRVEALRDKQLTEHENSQEKDRTLKEKTNKEQLEKIKKEILSYKIKPDLSENKDLVENLKNLNKQLEKIKVQNVIKDKNKNKIKDKKIDNYVIREQVLNDFPPKELRSVIDQGKKDIKKGIIISISTFEDKVGVAVGITNDLITKYDAVKFVKIASEILGGKGGGGRKDFAQAGGINKDKIEEAFKAITDKVI

SEQ ID NO: 162244 - protein, 238 aa, Unknown
  Bacterial polypetide isolated from the Sargasso Sea
EEVRVLSMGNEESKYFSTELCGGTHVRNTGDIGKFKIINQSSIAAGIRRVEALRDKQLDDYLKNKEKISDLSAQKDEESINELSEKIIKLGGKPNLDIQDQKGLIKDLSKQLEHLSTKSILEDKSKNIIKDEIINGVKIRLQKVEGLPPKDLRKLVDNGKKEFDEGIVVVFASKDEKVGLAVGVTEKLTNKYDAVKLAKLGSEIIGGKGGGGRKDFAQAGGQDKSRIDEALEKIKSLV

SEQ ID NO: 162245 - protein, 316 aa, Unknown
  Bacterial polypetide isolated from the Sargasso Sea
IFAISDGALPSNVGGGYNLRIMLRRNVSTMDRMKLKFDLDEIIDIQIDYLKNTYPELEDTRDDVKEIISIEAGRYDSSKQRMQKIVSKLDKEPSVTDLIRLYESDGVTPEYLKEMKVISEIPSTFYAKLSDLHQSKKQKEQLTLPLEGIPDTELLFYSDDPREFDAKVLKVFDNFVVLDKTGFYARGGGQEPDHGKIGDCNIVDITKHGNIVVHEIKGEIPKEGDTVSCAVDSTRRDGITKNHTSTHIINTSARSVLGSWVWQHSAFKEADHARLDITHHSALTDEDVVKIEEAANGIIEKSIPVKIENFDRGTAE

SEQ ID NO: 162246 - protein, 239 aa, Unknown
  Bacterial polypetide isolated from the Sargasso Sea
GEEVRVLSMGNEKNKYFSTELCGGTHVRNTGDIGKFKIINQSSIAAGVRRVEALREKQLEKYLKEKEKLSDLSIQKNEEVIKNLSEKIIKFGAKPNLYNKNPNEIIKELTKQLDQLSVEVILQDKTKNIISEEKIKSTKVRFQKIEGLPSKELRKLVDKGKKDLGDGIVIIFTVKDDKIGLAVGVTDSLTKKYNAVDFVKKGSEIIGGKGGGGRPDFAQAGGVEIDEIDEAIRKLKNLI

SEQ ID NO: 162247 - protein, 185 aa, Unknown
  Bacterial polypetide isolated from the Sargasso Sea
SQSSVASGIRRIEALSGPRAQEYLSNLKNQTIQLQKLLNAPAEEIEDKVSKLLKENKSLKKGGKTAKAATIKSSYTHDIDNFKLVIEEAESEDIKELRPLLDEKTKNANNSVFILLSSKNETLTILCSVSKDLQSRISAKDLINALTSPIEGKGGGRVEFAQGAGKPSDREKFVSDIPNIVQSLA

SEQ ID NO: 162248 - protein, 36 aa, Unknown
  Bacterial polypetide isolated from the Sargasso Sea
IYVRATSSQGCIRLGGKHNDLENVGIPFVTILFLKC

SEQ ID NO: 162249 - protein, 67 aa, Unknown
  Bacterial polypetide isolated from the Sargasso Sea
MNSNQIRSTFLNYFKNNGHEVIHSSSLVPDNDPTLMFANSGMVQFKNIFTGKETRDYNRATTAQKCV

SEQ ID NO: 162250 - protein, 319 aa, Unknown
  Bacterial polypetide isolated from the Sargasso Sea
ISVIKSFFGVISSFFVKILEYTNAGTTMLLGEFASIDKYGFIFVFQALPIIIFFSALTSVLFYLGIIQKIVQFLAWSLKKLLGISGPESLTVAGNIFLGQTEAPLLIKAYLEKMNRSELFLVMLGGMATVAGSVMGAYIGFLGGDDPIERLAFAKSLLAASVMAAPGAVVVAKIMYPQTDKIIEHITIPTDKIGNNFIGTLSMGTAEGVRMAVNVGAMLLVFISLIAMINGVFFGIGDGLGLNKWVIENTPYQNFSIELILGYLFAPLMWLIGVETMDVAIMGQLLGLKLVASEFVGYIELASLKDINNTLHFGYQKSI

SEQ ID NO: 162251 - protein, 103 aa, Unknown
  Bacterial polypetide isolated from the Sargasso Sea
GVDGGGLQSAAQGLADQLGDGAAVVWGGLPDPSDLGKVILVAAFGKAVVAKGQKAGQFIGGVAKLCGGGGGGRPNLAQAGGRDGAALDGALEQAKSLLQQALA

SEQ ID NO: 162252 - protein, 192 aa, Unknown
  Bacterial polypetide isolated from the Sargasso Sea
MGFGDISIPYWEESGHVLKICKVTGLRFWTRDINRDTCGDTNEDPYTFIGNPIIEGFDSRGKQLKDEMRETFLSFFDSKGHTRIDPYPVIARWRDDIHLTIASIADFQPHVTSGMVPPPANPLGISQPCIRLTDVAAVGRSGRHLSTFEMMAHHAFNRPMDGNVVYWIDRCVRYCDELLVEKLGIKSTSITY

SEQ ID NO: 162253 - protein, 48 aa, Unknown
  Bacterial polypetide isolated from the Sargasso Sea
LDRGLKLLEDELSKVPKGQEFSGETAFELYDTYGFPQDLTHDALIERG

SEQ ID NO: 162254 - protein, 220 aa, Unknown
  Bacterial polypetide isolated from the Sargasso Sea
AARVTKVNSDGVILDKTVFYPQGGGQPGDTGFIKSTSGGIGRVTNTVKNRESGDHVHLIENAQKFCVGDLVFAEIDWPRRYCFMRMHSALHILCSIVKGGVTGGQIGTEKSRLDFDLGEEKLDRNYIQNTMNLIIKNDHSLLAKWVSERELEQKPELIRTMSVKPPSGAGHIRLIDIKGVDIQPCGGTHIARTSEIGAIRVGKIENKGKRNRRINIHLSD

SEQ ID NO: 162255 - protein, 235 aa, Unknown
  Bacterial polypetide isolated from the Sargasso Sea
MNKKITSEIFRDDPYKKGCEAKILDFGDNWIILDQTVFYAEGGGQLGDTGLIKAGQQEIQIENTIKENDLIKHIFNSKFDFEIGDNITCIIDWDRRYKLMKMHTSLHLLCSLVNAKVTGGSVGDGKGRLDFNLDYKPNKEELKDNLNDLIQGNHDITISWISAQELDKNPNLVKTMSVLPPRTNGSIRMVRIGDNIDYQPCGGTHVKNTSEIGLVEINKVENKGKLNKRVAISLV

SEQ ID NO: 162256 - protein, 202 aa, Unknown
  Bacterial polypetide isolated from the Sargasso Sea
AADSLVIWRADISNNKVCPIENTIKGPDGDIILIPKSDSELPSKDDECQQVINWEKRYKHMRTHTALHLLSVVIPLPVTGGQIAFEKGRLDFNMPDAPKDKEVIERELNNLITSNLCVTDQWIANDELRRNPGLVKTMSVKPPMSSGRIRLVKISDKDVQIDLQPCGGTHVLNTSEIGPVRLGKIENKGRQNRRVSISLDHV

SEQ ID NO: 162257 - protein, 236 aa, Unknown
  Bacterial polypetide isolated from the Sargasso Sea
MDNNKNSIIKVSKLEKPSLGSLGIKTDVNEIMGLDIWTKMKASDIIEHFNYIPDILLSKSLHIFLSDLYLSTSNPPIGNSDNIVKFLETRLYKIKSGGESQKLYQLVTQLPGGKRWDFWKRWQTEYELINRQDKKACQYVNKKSKVNSDNFWQMARIFCFAIDGKVNQSEFILDLIKSRGFSDKIFESLFQIINNNEKTFNLENEYNKIQPLHVIMMDTLKIPIKANYIAHFAVEY

SEQ ID NO: 162258 - protein, 77 aa, Unknown
  Bacterial polypetide isolated from the Sargasso Sea
MTSQLIKKIVTGDEIRNAFLKFYSEKLHKIIPSASLIPDDPTVMLTIAGMLPFKPVFLGLKERPSKRATSSQKCIRT

SEQ ID NO: 162259 - protein, 228 aa, Unknown
  Bacterial polypetide isolated from the Sargasso Sea
FSKELCGGTHVDRTGDILNFKIINQSNVASGIRRIEALTNIAVDQHTKEKMQLGNKILKENMDKISILIDELKDFDKNFNYVYDQNSDLTNNIKELKKLLDQKKQNKNKETSSQNIVVELINDINFVYLVAENYPTKILKQFIDDQKNKYQQKCASLIISHNSDKLSIVLGVTEDLTSDFDSAKVIQEVSKILGGNGGGGRKDLAQAGGASLDNIDQAIEKIKSNLSF

SEQ ID NO: 162260 - protein, 67 aa, Unknown
  Bacterial polypetide isolated from the Sargasso Sea
MASLNEIRSTFLNYFKKNDHEIVSSSPLVPRNDPTLMFTNSGMVQFKNLFNGLEKRDYLRARDRSKV

SEQ ID NO: 162261 - protein, 277 aa, Unknown
  Bacterial polypetide isolated from the Sargasso Sea
MERWQIEYELINRQDKKACQYVNKKSKINSDNFWQMARIFCLAINGKVNQSEFILDLIKSRGFSDKIFENLFQIISDNEKTFNLENENNKIQPLHVIMMDTLKIPIKANYIAHFAVEYTDSLLSLTYLTPSARSFLLDKKMNYSFVNTNKITENYKSVADGNIDIKTALSSYTKIPNGLNRANIWLAIITMKDEIKKAESIITFIKLEIKNGRFKDVADLYIPILEKIDKSSLTRELNDSINKLMIMSKPNLYPDNSLANLIMLKKNKTWDWELILK

SEQ ID NO: 162262 - protein, 232 aa, Unknown
  Bacterial polypetide isolated from the Sargasso Sea
MTEELFRNNSYIQDCEAKIIDIIDEGIILDKTIFYPEGGGQPGDNGQFKFNGKNFEITSTSYKDKKIVHFVNNTSEFDLNQNINCQINWERRFNIMRVHTCLHLLCSLIKAPVTGGQINERKGRLDFDVETKPDREFILENINKLIEEKHDVKISSITEEELDKNPDLVRTMAVQPPRGTGKIRMISIGENIDYQPCGGTHVRNTGEISSVSKVKIENKGRMNKRVILEFNN

SEQ ID NO: 162263 - protein, 478 aa, Unknown
  Bacterial polypetide isolated from the Sargasso Sea
MAAYKKKGFSIGIFIFLVMQFMSPPSGLSEVGWDVASVAVLMAIWWATETVPVAITALLPLALFPLLGVTSFDNAALPYANKNIYLFLGGFMLALGIESSGLHKRIALKMIISVGSSGRKLVGGFMLVAALISMWVMNTSTTLMLLPIGLAVCTVMSETIPGLSDKDKSNFDTALLLGIAYAATIGGMSTLIGTAPNIVFSAFMQDTYGVEISMFDWMMLGVPLASIMLFGAWTLLTKYVFPISFTASTEARDELKTMLLNMGDFSKDEKRISIIFGLAVFAWVFRTLLNKIDFLSGLTDAGIAIIAAILIFMTPSASKKGDLLKWERSKDLPWGLLILFGGGLSLAAQISSSGLGVWIGNSLLVLSSVPPILLILAVATLIIFLTEITSNVTTTTTFLPVFGALAIAIGILPVSLTVPVCLAASCAFMLPVATPPNAIVYGSNKFTIATMMRAGFALNIIGILVVTVFAYYFAPLIF

SEQ ID NO: 162264 - protein, 243 aa, Unknown
  Bacterial polypetide isolated from the Sargasso Sea
MTTQALFREDAYLTQCDAVVLNVGDDGIRLDRTVFYPLGGGQAGDTGTLTLPDGSTIAIADTRKARFDGATPDDAVHVPAPGQEASVAALEPGMRVVAQIDWLRRYRHMRLHTAAHLMCAVLPYAVDGCSVTADYVRLDFATSDAIDRDDVERRLAGLVVGAHPVTTEWITDDEMAARPDLVRTMSVKPPMGLGRVRLLRIEQVDLQPCGGTHVRNTSEIGELRVAKLEKKSARTRRLVLEFA

SEQ ID NO: 162265 - protein, 286 aa, Unknown
  Bacterial polypetide isolated from the Sargasso Sea
MNKWIYIVLLVGLFAISTSPIIAKLLPVVPAVAIAFWRMATASSILWAYSLIKPQPQIKEGNIKLVFFAGFLMAMHFIFWFGALKLTSIASTTILGIVAPAFTLIFERFYYKRELSWATIFALFIIFIGCLVVQINDIENVGGAALGNIMAIVSAIFLGGLFLLGSIIRKTTPVISYTRMLFSVSAIVLLIVSFVLHSPLLGYSNIDYFWLLMLGLVPTLIGHTAFSYSVKFISPSVIAAIPLGEPIIASGLAWLLFSEKVSFNVAVGGIFIGIGLILLIKNNTEK

SEQ ID NO: 162266 - protein, 922 aa, Unknown
  Bacterial polypetide isolated from the Sargasso Sea
MSIESTFRNFVYGRISGNKRPVDLHFGLAQRTVGHLLALHHADIREGLISGIDGQLTCVSTHAHLSPALFLGLPVSVRLTTDRGGIRAINAIVHDARAGQSDGELTVYQLHVCDALSLMDRRTNARMFRSCSVVDILATLMNEWKHRSPALAQAFDFDLSALRAERYPVRELTRQVNESDARFIRRLLRRDGITVFAKAGPIGGASGMPDERPVHTLLFCDDPYRLAEAPAGTLRIHPRDAGVEQRDTVTLFACCQSLSSGKVSRPSWDYKKARVDESTTVTGIDQGESGNDLAHLLTDVAIDIPHVGDSWSDHDRITRDRMLAHQFEAVRHEGISSVRDMPVGHWFTLTGDPELDMKPADHRQFVVTSVRHDIWNNLPKILAGRVNGLFAASRHLAQVVPPAPADASERTDTRYENSFTCVRRGVPLKPSYDPRIDVPPVHLLTGTIVGTQGEEVFCDEAGRVRVQIHGYDPVDHAHAQGAGTTGLAGDSAPIRVGASLAGKHFGALFLPRVGMEVLLGSLSGDPDRLVIIGILSNGANPPATFSDTGSLPGNRYLSGIKTKEIKGHRYNQLRLDDTPSQISAQLASEHAHSQLNLGYLTQPRNDGHGSDRGEGAELRTDAAAALRAAQGMLLTTYARSHATGGQLDRDELIRLLDQCTALFESLGDYAGQHGGQSADTGGQDNLVSAFRHWKPGGSESRATGDASAFMAFGAQAGSLNVTPKTHVMYAGENIDQIAQQHMQITSGERINLHAGHGVAMFAHSNGVSAIANQGKVAIQSQNDDTQIESGKNIRLTAADGKLAGTASDEVVFVTSGGAYLKLHGGDIELGCPGKFTVKSNGHAWDGPASMGVDLPTFDQRALGRVPKLVRPTDGNAAPGFEGQVRTASGTLSDLTTDMAGELPEVDTDRFERLAVQFTKKNV

SEQ ID NO: 162267 - protein, 454 aa, Unknown
  Bacterial polypetide isolated from the Sargasso Sea
MPKTSPSLLSLIGDTPLVEIKNIDTGLCKLFVKMESHNPGGSIKDRTASYIIDQAEKDGLLKPGGTIIEATAGNTGIGLALVGILKGYRVVLVIPDKMSLEKVAHLKALGAEVIFTRSDVGKDHPEYYHNMAEDLIKKIPGSFYADQFNNPANVLAHEETTGPEIFEQMDGDLDAFIAGVGSGGTISGVGKYLKKVSAKTNIIAADPIGSVITDAVKTGTYKYGGGSWFVEGIGEDFIPTNCDLSVIDDAISVSDKEAFEAIHILLKKEGILAGSSAGTLFAGAIKWCKNQKEPKRVVTLICDTGNKYLSKAFNEKWLIHNDLIIKDPKGDLQDVIAFRADKNQIIYVNPNDTLATAFNRMNNSDISQLPVLKEEKLIGMITETDILNHCRNQKGFEKSVSECMQKNYNSLEINSSLDDLIELLKENNIAIILNKEKFVGIITKIDLLAYLKRN

SEQ ID NO: 162268 - protein, 227 aa, Unknown
  Bacterial polypetide isolated from the Sargasso Sea
MIYLKDSYIKNFEEKIVLIEEDKIITQDSSFYAQSGGQPGDKGILEINDQKFNVINTIKHELGIAHVVDTEISDLSGDIKGHIDWDHRYRLMKMHTTMHLLCAALPYYVTGGSIGLEKSRLDFDLGKETFEFETLNKIINEFIQQSLSITYQWITNEELDQKPELVRTLSVKPPRTNDKIRLVKIGDIDLQPCGGTHVANTSEIGEFKFIKYESKGKMNKRVQFTLI

SEQ ID NO: 162269 - protein, 98 aa, Unknown
  Bacterial polypetide isolated from the Sargasso Sea
NKEELKNNLNDLIQGNHDITISRISAQELDKNPNLVKTMSVLPPRTNGSIRMVRIGNNIDYQPCGGTHVKNTSEIGLVEINKVENKGKLNKRVAISLV

SEQ ID NO: 162270 - protein, 208 aa, Unknown
  Bacterial polypetide isolated from the Sargasso Sea
CGGTHLKDTGEAILFKIIQETGVSSGVRRIEGLTRKSAIDFFRSKNDILDSIVKKLNTQYSQVTNKLEQLINEKDQLKQEINRLKKENLTQNSTNSSIDLNGILFEAKVYDDLVPKELKQYAEKLLNSKKLDVVCIISKFNEKVSCVININANLLKKFDAIELVNVVAENVDGSRGGGRPDMAQAGGQNIKKIDFALEKLKNFIKERI

SEQ ID NO: 162271 - protein, 83 aa, Unknown
  Bacterial polypetide isolated from the Sargasso Sea
MTSQLIKKIVTGDEIRNAFLKFYSEKFHKIIPSASLIPDDPTVMLTIAGMLPFKPVFLGLKERPSKRATSSQKCIRTNDIENV

SEQ ID NO: 162272 - protein, 75 aa, Unknown
  Bacterial polypetide isolated from the Sargasso Sea
MPDPGDMGKVILVAAFGKQVIAAKLQAGKFIGGIAKQCGGGGGGRPNLAQAGGRDGAALPAALESARSELAAALA

SEQ ID NO: 162273 - protein, 143 aa, Unknown
  Bacterial polypetide isolated from the Sargasso Sea
MTDLLFNQDSYLKETEASIIGVEENIIQLDRTIFYAESGGQPGDQGEIVLKDQVLKVIDTKKGSKPNEILHIVDGPIDQSLINQSAELKINWELRYAHMKMHSSCHILCSLVDALITGASVGSAKTRIDFDVDPSMLNKEELK

SEQ ID NO: 162274 - protein, 233 aa, Unknown
  Bacterial polypetide isolated from the Sargasso Sea
LSMGDEDGKYFSTELCGGTHVKNTGDIGKFKIVSQSSIAAGVRRIEALRDKQLEEYLNNKEKLSNLSAEKDEETIKDLSQQIIKLGGKPSLDETDQKTLIKNLTKQLEIISVNAILEDKSKNIIKDEEINGIKLKLQKIDGLPPKELRKLIDKGKKDLGEGIVVVFANKDDKVGLAVGVTDNLTSKFDAVQFVKVGSEIIGGKGGGGRKDFAQAGGQDKEKIDEAFEKIKSLI

SEQ ID NO: 162275 - protein, 276 aa, Unknown
  Bacterial polypetide isolated from the Sargasso Sea
MKQKQNRVLRYAVLRHGVIIFFLLTILLPLTWVLMLSIKSLPDSMRGNFWPRRFDFSHYGYVFDKIETLPYNLFNSIYVTGATVLITTFCAVLAGYALVHLKPRGGPFIVAIFLSSLYFPTRVVSIITVYEIQDYLGLINSTSGLILPYITLNLAISVLIMRSIFQLVPHELIDAARIDGAGPWMTLWVVGLPLAKNGLVVVIIVNFVTAWGEYLLCATLSNDQLVRTMPVVLASAHGGMGQWAWPRIAAVYIIVVLPGIIAFTFAQASVFQRIDG

SEQ ID NO: 162276 - protein, 186 aa, Unknown
  Bacterial polypetide isolated from the Sargasso Sea
KGILEINDQKFNVINTIKHELGIAHVVETEISDLSGDIKGHIDWDHRYRLMKMHTTMHLLCAALPYYVTGGSIGLEKSRLDFDLGEETFEFETLNKIINEFIQQSHSITYQWITNEELDQKPELVRTLSVKPPRTIDKIRLVKIGDIDLQPCGGTHVANTSEIGEFKFIKYESKGKMNKRVQFTLI

SEQ ID NO: 162277 - protein, 454 aa, Unknown
  Bacterial polypetide isolated from the Sargasso Sea
MSLSIIILAAGQGKRMHSDKPKVLNLLAGKPLIRHVYETATKIDYRKIYIVYGHGADQVLRALDEDSKISWVEQKEQLGTGHAVKQVLPDIPNDDHVLVLYGDVPLISEASLMKLVNAATDSDFSLLTAYFDEPYGYGRIIRNDNDNIISIIEEKDASEKQKEISEVNAGFMVVKAELLNECVNSLNNQNKQEEYYLTDIVALAVNKKTKVSTVLAESTIEVQGINTRAQLSEAERYYQVLQAHDLMDKGVGISDPSRFDLRGNLQAGSDIEIDVNVVMEGKIKMGDNVYIAPNCIIKNSVIGNNVQVLANSIIENSIIGKDCVIGPFARIRPDSVLGEHVHVGNFVEVKKSSLGNRTKANHLSYIGDAEVGIDTNIGAGVITCNYDGADKHKTVIGNDVFVGSDAQLIAPITIQDGSTIAAGATITKDVASDSLAISRIEQKTIPSWDRPRKK

SEQ ID NO: 162278 - protein, 234 aa, Unknown
  Bacterial polypetide isolated from the Sargasso Sea
MINIVENKFKIEKELLLSLMGIETNYGTYVGKMDILSSLATLSYDKRRSEFFTKELLILLKLIDENQIDYKSLYGSWAGAFGFFQFMPSTIKNHAIDFNTDNYIDLKNSHDAYASAANYLKKIGWKKDSPCFYRIDLKEDIPKKYLNVSAKKLQNKKKLGFFKKYIDNYDDISFLKSNYNVAIITPDKDIIPGADTLNPAYIVFDNYEIILQWNRSLRFALAVCTLKDKFKNEL

SEQ ID NO: 162279 - protein, 454 aa, Unknown
  Bacterial polypetide isolated from the Sargasso Sea
MSKISPSLLSLIGETPLVEIKNIDTGLCQLYVKMESHNPGGSIKDRTASYIINQAEKDGLLKPGGTIIEATAGNTGIGLALVGILKGYRVLLVIPDKMSLEKVAHLKALGAEVIFTRSDVGKDHPEYYHNVAEKLVNEIQGSFYADQFNNPANILAHEETTGPEIYNQMDGNIDAFVAGVGSGGTITGVGRYLRKVSPQTSIVAADPIGSVIKDAVKTGSYKYDGGSWFVEGIGEDFIPNNCDLEVIDDAISVSDKEAFEAIHILLKKEGILAGSSAGTLFAGAIKWCKNQKEEKRVVTLICDTGNKYLSKAYNEKWLIHNDLIIKDPQGDLQDVIAFRADKNQIIYVKPEDTLATAFNRMNNSDISQLPILDKEKLVGMITENDILNHCTNSKGFEKKVSECMQKNYVSLQINSSLEDLIELLKENNIAIILKEEKFVGIITRIDLLAYLKRN

SEQ ID NO: 162280 - protein, 189 aa, Unknown
  Bacterial polypetide isolated from the Sargasso Sea
FIITSQSSVASGIRRIEALSGPRAQEYLSNLKNQTIQLQKLLNAPAEEIEDKVSKLLKENKSLKKGGKTAKAATIKSSNTHDIDNFKLVIEEAESEDIKELRPLLDEKTKNANNSIFILLSSKNETLTILCSVSKDLQSRISAKDLINALTSPIEGKGGGRVEFAQGAGKPSDREKFVSDIPNIVQSLA

SEQ ID NO: 162281 - protein, 300 aa, Unknown
  Bacterial polypetide isolated from the Sargasso Sea
KDINTKGITIGVDNKVSDRYLYGYTIRYTKDDVRSGTPGTSLDTDGYSLSTYASLMTGENKFIDGIFGFSKLDLKNVRKSGSNTLNGDRDGAQLYGSINYSTVLNRNNLNISPNIRFDFSHTRLEEYSETGTDALDYDDQTIKNGALYSGINLNNIFKLNNINFIPSTGIELGLDISPSSDVSIKYVSDPNTTYTRSIDQQEPKSGKVKLGLDVITQTGFSLTTLYERNQSENSHSDTFYLGTAYIKLREVQYALSIQDNVASANYGKKLNGFDILFETDYDLLSEYPEYEANLKISSTF

SEQ ID NO: 162282 - protein, 299 aa, Unknown
  Bacterial polypetide isolated from the Sargasso Sea
MAAYKKKGFSIGIFVFLLMQFSPAPSGLNDVGWDVAAVAVLMAIWWATETVPVAITALLPLALFPLLGVTSFDNAALPYANKNIYLFLGGFMLALGIESSGLHKRIALKMIIAVGSSGRKLVGGFMLVAALISMWVMNTSTTLMLLPIGLAVCTVMSETIPGLSDKDKSNFDTALLLGIAYAATIGGMSTLIGTAPNIVFSAFMQDTYGVEISMFDWMMLGVPLASIMLISAWILLTKYVFPISFTASTEARNELKTMLIKMGDFSKDEKRISVIFGIAVFAWVFRTLLNKIEFLSGLT

SEQ ID NO: 162283 - protein, 406 aa, Unknown
  Bacterial polypetide isolated from the Sargasso Sea
MLLIIATIAVLGVLLLFIWDTSRDQETNSNIFSYYTPFYAESIVRHAYVSSPESVWKSLTDLGAYQSWFPNINRLLPKVDTDRYVHQFSFNKFSLLPGAEFLLRPNSWSPFYKSKVVVVDENAQISFDLKTNPFYREYVDFSLKAEPYGTSIVCRRSSRGLFSILSLWGFSSSKYKILENLGFFIPSDIKDEEEEIGVESSIPTLSREATIAQSVQAGLDGNMDLINAIPDKPTRGMAKATLVQVKRKGGVLPDNLKDALSETPSVASAPKKASKENGGFNSVEEQIHYLVNLALDGNDEPLNAVDNKVVRGKAKAMIVKIKRGSLDRPTMPSTPTKPVVSDIKDSETKLEEPDLSVSKDEDEQGLIDRLVEAGVGGNMDEINALENRVLRGKIKAAIVKKKREQK

SEQ ID NO: 162284 - protein, 229 aa, Unknown
  Bacterial polypetide isolated from the Sargasso Sea
ESLFGEKYEDQVRVLSIGEDDFSLELCGGTHISRTGDLGIFIITSQSSVASGIRRIEALSGPKAQEYLSNLKNQTIQLQKLLNTPAEEIEDKVSKLLKENKSLKKSGKTSKVATIKSSNTHDIDNFKLVIEEAESEDIKELRPLLDEKTKNANNSIFILLSSKNETLTILCSVSKDLQSRISAKDLINALTTPIEGKGGGRVEFAQGAGKPSDREKFVSDIPNIVQSLA

SEQ ID NO: 162285 - protein, 55 aa, Unknown
  Bacterial polypetide isolated from the Sargasso Sea
MAKTLNEIRSAFLDYFEKNDHKIVESSNLVPNNDPTLMFANSGMVQFKNVFTGLG

SEQ ID NO: 162286 - protein, 233 aa, Unknown
  Bacterial polypetide isolated from the Sargasso Sea
GEKYEDTVRVLNIGGEFSCELCGGTHVERSGDIGVFKIISESGIASGVRRIEAITGLEAFVWIENMEAKLQRMAESLKSNVETVDSKLNLQLEKTRKLEKELLQLRGKLASNAGLNLLEETTVIDDISIVAKSIDTADPKSLRDAVDQLKNKLGTAVLILATVNESKVSLVAGVTDDTTNRIKAGDLVNFVAEQVGGRGGGRPDMAQAGGDDPKRLESALAKVPDWVRSQLKN

SEQ ID NO: 162287 - protein, 259 aa, Unknown
  Bacterial polypetide isolated from the Sargasso Sea
EKIVNQEALNNLEVKTELMKLDDAMKSGAMALFGEKYDNDVRVLTMGENSYSVELCGGTHVSRTGDIGFFTITSQSSVASGIRRVEAIAGMQALNYIKKLKEVNSSIQNLLNVSTDDIHDKIKSLIDENKALKSKGTQSSKREIVFSESIEINDWKLVIQQVQLDDTKDLRLLADEQKNTNEKVCVVIFSEQNNKVALVCGVTKNLTDTLSAKDVVSVISKKIGGKGGGRPDFAQGAGESKNIKDFVTSIRDSVKSLAK

SEQ ID NO: 162288 - protein, 70 aa, Unknown
  Bacterial polypetide isolated from the Sargasso Sea
MSDIRNKFLDYYSRKNHEIIESSNIVPNNDPTLMFTNSGMVQFKNVFTGVENKPYKTAVTSQKCIRAGGK

SEQ ID NO: 162289 - protein, 267 aa, Unknown
  Bacterial polypetide isolated from the Sargasso Sea
EKAKSLGVMALFGETYDADSVRVVQMGPSIELCGGTHVSSTGVIQSFRLLSESAIAAGVRRIEAISGDEVLAAYEEQCLDAIRITIEKKLDKLASYNEVIASYNESILTFPDIDLADLDRQDLMDYNTRADRVLKKAENRVRLVKSRAVVQTDFSAFIMQIKGISVFMHVFEGYDPAMLRDVSDQVVQGYAPVIVIAASCKEGKGVLLVRLSEDIDLTVITAAQVVSVITDITGGGGGGKPRMVQAGGLREIKLNQAILAAKTFLEN

SEQ ID NO: 162290 - protein, 145 aa, Unknown
  Bacterial polypetide isolated from the Sargasso Sea
GLGEAKDDSKIIEKAQEELSLITGQKAIKTKAKKAIAGFKIREGMPLGASVTLRNKIMYEFLDRLINIAIPRIRDFRGLDSTSFDGNGNFSFGVKEQIIFPEINYDKIDKVRGLDITICTNANNNEDALELLKNFNMPFRGVETN

SEQ ID NO: 162291 - protein, 243 aa, Unknown
  Bacterial polypetide isolated from the Sargasso Sea
KYDEEVRVLSMGKENGGYFSTELCGGTHVKNTKDIGRFKIVGQSSIAAGIRRIEALRDKQLEDYEKSTKLDKSSKEKNLKDQINIVKKELSKHKIKPDYKEDLELSENLKNLNKQLDKIKVQNIIKDKNKNIIKDKKFGSFILRQQVLTDFPSKELRSIIDQGKKDIKQGIVVSISTFEGKVGVAVGITEELIKKYDAVMLVKIASEILGGKGGGGRRDFAQAGGVKKDKIEDAFKALNKKIN

SEQ ID NO: 162292 - protein, 63 aa, Unknown
  Bacterial polypetide isolated from the Sargasso Sea
NLIAGVTNDLTGKVKAGELVNLVAQQVGGKGGGRPDMAQAGGTQPEAVPAALQSVHSWLEERL

SEQ ID NO: 162293 - protein, 287 aa, Unknown
  Bacterial polypetide isolated from the Sargasso Sea
THQLDDKGKTSLKVIGDHSRAVTQLICDGVTASNLGRGYILRRLLRRVVRHGRLLGIDKPFLVTMGEAAIALLKGAHPSVIERQEVILAELQREEARFLETLERGEKLLAEVLASNPTQISGAQAFELYDTYGFPLELTQEIAEEQGLTVDLDGFEVAMEEQRQRAKAAAVSIDLTLQDAIEQVAAEQPATAFKGYDALDQPSTVQALVVNGAPASTASAGDVVQVVLDSTPFYGEGGGQVGDRGSLSGVDVIVAIDSVSRSRDVFVHSGRIERGHLAVGDTVNAQV

SEQ ID NO: 162294 - protein, 246 aa, Unknown
  Bacterial polypetide isolated from the Sargasso Sea
IKINNIVNDVVTGSTEVQTRIMTPKEAVRMGALALFGEKYGEEVRVVFMGKENNGFFSTELCGGTHVKNTKEVGKFKVISQSSIASGVRRVEALRDKQLEEYEKTKSEDKSQKESKLRKEIELIKKELQKYKIKPEYKEDLDLSENLKNLNKQLNKVKIENIKKDKRKNIIKDKKIGNVLIREQILKDFPPKELRGIIDQGKKDIKSGIVISISTFEDKVGLAVGVSNDLTTKYDAVDLVKAAVII

SEQ ID NO: 162295 - protein, 82 aa, Unknown
  Bacterial polypetide isolated from the Sargasso Sea
LEKGALAFFGEKYGEEVRVVSMGAENNSYFSTELCGGTHVKNTGDIGKFKTVSQSSIAAGVRRVEALRDKQLEIFLKNKEKM

SEQ ID NO: 162296 - protein, 203 aa, Unknown
  Bacterial polypetide isolated from the Sargasso Sea
RTGDIGLLKISSESGIAAGIRRIEAVVGQAALDFVAREEATLTTIARALKGSTDNVGDKVEQLISRSRQLEKELDALKSKLASSAGSDLAGQAKDVNGVKVLAAELDGADVPALRNTMDQLKNKLGSAVIMLASANDGKVTLLAGVTKDLIGKAKAGDAVKEVAAYVDGRGGGKPEMAQAGGQKPEGIADALKAFEEWAAAKL

SEQ ID NO: 162297 - protein, 274 aa, Unknown
  Bacterial polypetide isolated from the Sargasso Sea
SDGVVPTNEGRGYVLRRLIRRAIRAYNQLNASDSSLSFLIEIVIDMYSSSYPDLQDNKDKILKLFIKEEEIFQKTLNKGLQEINNLISSNKSISPKDAFYLFETFGFPYELTKEISVENNIDINDEDFYKLYDEHKEKSKAEKSLGKEYMDIEVELNEFVGYEKTESKSKIYQVESYDDKFVIFTKENPFYYEAGGQISDKGLITMDDNSIEVIDVFQASNGATGLIVDSDIFKVDQEVELSVNKSFRSGVSKSHTGAHIVHSALRNILGDHVA

SEQ ID NO: 162298 - protein, 308 aa, Unknown
  Bacterial polypetide isolated from the Sargasso Sea
IVHSSLRAILGDHVAQAGSYVAPGRFRFDFSHSEKVSNEQLSEIFSLSNKNVFQDLHVSTKVMNIDEAKKEGALAFFGDKYENDVRVVNIGEFSKELCGGTHVGNSNEIGLIVLLNESSIGSNLRRVEMLSGYEAYDFMTNAYNSYKNVSNILKTNIDDVPTKLENFLNTYEELKAKIDKYKQIENNQIVENISNNINVINKFKTYVGSIETDSVDSLRNIAVTAINNEVADYVYLISKIESKYVIVSMKNEKIIKDFNVSDLVIETSQNYGGGASKDETLSIGGGPKDYSIDNTLIFVNENLNKILK

SEQ ID NO: 162299 - protein, 205 aa, Unknown
  Bacterial polypetide isolated from the Sargasso Sea
ISDNNSSSYSVELCGGTHVKKTSEIGNFKIISESSAASGIRRIEALRGNDLISYYETRSKQIEIDLEKKKITEDAKKNNLEKIKKLSQNIQEKIKDGETLIVETCNNLKAKDLRSILDQCKSQFLKNGVIIICAINDGKISFLVGVTNELSNNLSASDVALYAAKITNGKGGGGRKDFAQSGGIYSEKINIKESLQKFLKENIPN

SEQ ID NO: 162300 - protein, 266 aa, Unknown
  Bacterial polypetide isolated from the Sargasso Sea
MKKFQEHQAKSSAFKKEMSDVDKFDVDCNVFTGYENTNTTSEVTFVQNENGSTTIFTESTPFYFEAGGQISDQGSIVFEDKEYTVADVVQSSSGATGLVINEEIKIQSGQKVESKVNEKFRRSVSKSHTSAHIVHSSLRNILGDHVAQAGSYVAPGRFRFDFSHSEKVTQEELNEIFTLSNKNVFSDLKVDTKIMNIDEAKKEGALAFFGDKYDDDVRVVNIGSFSKELCGGTHVSNSNEIGLIVLLNESSIGSNLRRVEMLSGLK

SEQ ID NO: 162301 - protein, 33 aa, Unknown
  Bacterial polypetide isolated from the Sargasso Sea
LLAEGVLPSNEGRGYVLRRIMRRGMRHSSFVRI

SEQ ID NO: 162302 - protein, 275 aa, Unknown
  Bacterial polypetide isolated from the Sargasso Sea
MSDKQLEEIENIVNLVIRQNISTDIYETAYDEAISSGIIALFGEKYGDVVRVVKISDFSEELCGGCHVKATGQIGQFRLVSEEGIAAGIRRIVAVTGKQAELMSQEQGRVTRALRQLLNVPEAEIPEMTEKLAEEKRQLEKEVQSLKSKAALQGISELVAQAEDVEGVSVLAREIEADSAEMLRNIGHSVREQISSGIAWLATTINKKSTLLCVVSDDLIERGIKAGDMVNEVAKIADGQGGGKPNMAQAGIKAPEKIPSALAATTAIVREKLIN

SEQ ID NO: 162303 - protein, 40 aa, Unknown
  Bacterial polypetide isolated from the Sargasso Sea
KDQDGDRYIEIWNLVFMQFEQIQKIKELIYLNHLLIQGWV

SEQ ID NO: 162304 - protein, 277 aa, Unknown
  Bacterial polypetide isolated from the Sargasso Sea
VIFKLVQSLIEQMGGAFPELITQQLTIENTIKDEEIKFKDTLDRGMSLLMNEIDVKVSPGVLSGQKAFELYDTFGFPLDLTEDVLRSYGWKVDHQGFQKCMNEQKIKARKAWSGSGDDAYNQDILKLLLDSPPTNFRGYDENTFETKIDLIIKNNKIVDNVSANEQVDIICNETIFYAESGGQISDKGVIIGKNFKANILNSKKITVGNGKIIFVSTIEIVSGKITVGDIINQVMDFDFRKQICSHHSATHLLHEALRQKLGLHVAQKGSLVTNEKL

SEQ ID NO: 162305 - protein, 256 aa, Unknown
  Bacterial polypetide isolated from the Sargasso Sea
MIHINFWKEIVSEDKIILGSKKDNFWEMGNIGPCGPCSEIHIDIRDEKEKKKNPGAALINKDHPEVIELWNLVFIEFNRKSDGSLEKLPKKHVDTGMGFERLCMILQSKKSSYDTDVFQPIIREIENLASVKYGKQENIDRSIRVIADHFRTVYFSIAEGQLPSNTGAGYVIRRILRRAIRYGFTFLNQKKPFIHKLVDTLSQQLNSVFSELEKEKRLAYNVIREEESSFLKTLDQGLVLLENIIETNKSKTIDGK

SEQ ID NO: 162306 - protein, 66 aa, Unknown
  Bacterial polypetide isolated from the Sargasso Sea
MADKSLNQIRNTFLKYFEKNGHTIVDSSNLVPNNDPTLMFANSGMVQFKNVFTGLKREITKKLRPL

SEQ ID NO: 162307 - protein, 242 aa, Unknown
  Bacterial polypetide isolated from the Sargasso Sea
KLYDTYGFPIDLTRLMAKEKSIFVDEKGFLECMAQQKERSRSQSDFRVTENNIDWISSNDNLTSIFVGYSDATSDAKIIKFRELSNKNYELILDKTPFYPESGGQIGDIGYIKNKNLNFKVLDTQNREGNISHIGFLENGEIKLGEKVVAAIDCNRRLKIKSNHTATHILHESLKQTLGAHIQQSGSLVTDQKLRFDLTHYEKITDNQIIEIENKINKIIRENYNVSTTIQDFEEARKNGAV

SEQ ID NO: 162308 - protein, 295 aa, Unknown
  Bacterial polypetide isolated from the Sargasso Sea
FDFSHNKPIEKEEMSKINNLVNEIVTRASDVQTRIMTPKEAVKMGALALFGEKYGEEVRVVFMGKENNGFFSTELCGGTHVKNTKEVGKFKVISQSSIASGVRRVEALRDKQLKKFEEIQIKDKSQKETDIKNEIDLIKKELQKLKINPDFKGNLDLFENLKNLNKQLNKVKIESIKKDKNKNIIKDKKIGNILIREQILKDFPPKELRNVIDQGKKDIKSGIVISISTFEDKVGLAVGVSQDLTSKYDAVALVKVASIILGGKGGGGRKDFAQAGGVNKNKIEEAFREISKKIS

SEQ ID NO: 162309 - protein, 222 aa, Unknown
  Bacterial polypetide isolated from the Sargasso Sea
ALALFGEKYADDVRVLSIGVKDNNTYSTELCGGTHVNNTSEIGEFEIINESSVSSGIRRIEALRDEDLKLYKEKKISKEQETEEKKIQSEKLKVIYNKNISEIKKQIDEKIKEDTQTHLIVEFYDDLKVSDLRNIVDYAKKSFKREGVIVIGAKNDNKISYLVGVSDQLSNNIGANDIAQYASSISNGKGGGGRKDFAQSGGEIINESDQIKQIKSFIINKL

SEQ ID NO: 162310 - protein, 52 aa, Unknown
  Bacterial polypetide isolated from the Sargasso Sea
MNSNDVRNAFIDYFKNNDHRHVKSGSLVPENDPSLMFANSGMVQFKNVFTGH

SEQ ID NO: 162311 - protein, 266 aa, Unknown
  Bacterial polypetide isolated from the Sargasso Sea
ESRVNDKIRENIPTEIYQTEYQKAIDSGIVAMFGEKYGDVVRVIKLGDFSEELCGGCHVKSTGQIGHFRLVSEEEMLPESGGLSESRGIQAESISRQENRVAQNLRQLLNVPVEKVTETVEKLLDEKRGLEKEIQEMRKQNAGFNAGSLLKEAELIGDVHVLARQVEVQSMDEFRSMADSLRKQLNNGVAWLSAEIDGKSSLLCVVSDPLLERGLKAGELVNAVASLAKGKGGGKPHMAQAGIKAPQLLPQALNQAPDLLRQKLGL

SEQ ID NO: 162312 - protein, 242 aa, Unknown
  Bacterial polypetide isolated from the Sargasso Sea
NTVIEEGSDVETQIMTPDDAVNAGALALFGEKYSDEVRVLKIGKMRNKTFSIELCGGTHVENTSQIGKLKIVNESSVASGVRRVEALRGEDLKVYQMNKAAENKKIEEKKLILETDKSKSKEVVNNLIKEVNDEISNNKSTIIIFCDNSKSSALRPVIDNAKRKFKNGGIIVLGSKKDNKISYLVGVTDNLTKVIGADDIALFASSVSNGKGGGGRKDFAQSGGDLINETDQKNKILKFITD

SEQ ID NO: 162313 - protein, 67 aa, Unknown
  Bacterial polypetide isolated from the Sargasso Sea
MAKTLNEIRTTFLKYFEKNNHTIVESSNLVPNNDPTLMFANSGMVQFKNVFTGLEKRDYVRATTSQK

SEQ ID NO: 162314 - protein, 229 aa, Unknown
  Bacterial polypetide isolated from the Sargasso Sea
VAMGGQAEPFSVELCGGTHVARTGDIGFFQILSESAVAAGVRRIEAVASVSAETHVYQQLDLLDEVSLELRSSRGDVLKRVSSLLGDRKKLESELSQLRRKLASAPNPDGKSAGANVLEIGNLKYAARLLENVPSKDLKGMVDDVKKQIGSGVVAIISVTDGKASIVVGVTEDATDFLNAVDLVKIGSAALGGKGGGGRSDMAQAGGPNASGAERAIDEIREAIAVKSN

SEQ ID NO: 162315 - protein, 183 aa, Unknown
  Bacterial polypetide isolated from the Sargasso Sea
SVSSGVRRIEAVTGAKALELVLEIRSQLQDVQGILNVGASKVSSKVEDLVKENKSLKKGNTSKAKSSVDLKEVIHKIKNLDLVLIEADTQNIQDLRLLVDSSKKDQSQRCVLILSHQDSKVVMVCGVTEDIQESLSANDVIQAIAKASDGKGGGRKDFAQGAGVADNFEEFVNSIPDIVQSIA

SEQ ID NO: 162316 - protein, 286 aa, Unknown
  Bacterial polypetide isolated from the Sargasso Sea
SGQKLISGFKAFELYDTYGFPLELTLEIAEENSISVDVKGFEEEMNAQKERAKAASSNIDLTLEGSLEREIDLFNKTVFNGYESLLSEAEIKGIFLDSTLVKQASEGRKVLIVLDQTTFYGESGGQVGDIGTIFSKDVEVLVDNVMRKKNVFLHYGTIKKGILTIGQKVKTNVSSSNRAKAAANHTATHLLQSALKSVVNESVGQKGSLVAFNKLRFDFNSSNPISKDQISKIETLVNSWIMENHALEIKTMSKSVALEKGAIAMFGEKYDDEVRVVNVPGVSMEL

SEQ ID NO: 162317 - protein, 279 aa, Unknown
  Bacterial polypetide isolated from the Sargasso Sea
ETINKLVNEYVVNSSEVSTRIMTPKAAIEKGALAFFGEKYGEEVRVVSMGKEKEAYFSTELCGGTHVKNTGDIGKFKTINQSSIAAGVRRIEALRDKQLEEFINNKEKLSILSTKKDEKTIKDLSSQIIKLGGKPNIEIKDLKELIKNLTRQLEQLNVSSVLKDKTKNIIQDQEINNIKVRFQKVQDLPSKDLRKLVDSGKKELGNGIIIIFASSEGKVGLGVGVTDKLIDKYDAVKFAKLGSEIIGGKGGGGRKDFAQAGGQDQNKIDEAFEKIKSLI

SEQ ID NO: 162318 - protein, 269 aa, Unknown
  Bacterial polypetide isolated from the Sargasso Sea
ESLSDEEISKIEELVNQEILKNSAVSTKIMDLEDAKNSGAESLFGEKYEDQVRVLSIGEDDFSLELCGGTHISRTGDLGIFIITSQSSVASGIRRIEALSGPKAQEYLSNLKNQTIQLQKLLNAPAEEIEDKVSKLLKENKSLKKGGKTAKAATIKSSNTHDIDNFKLVIEEAESEDIKELRPLLDEKTKNANNSIFIILSSKNETLTILCSVSKDLQSRISAKDLINALTSPIEGKGGGRVEFAQGAGKPSDREKFVSDIPNIVQSLA

SEQ ID NO: 162319 - protein, 66 aa, Unknown
  Bacterial polypetide isolated from the Sargasso Sea
MSEIRRKFLDYFSRNRHEIVDSSNIVPNNDPTLMFTNSGMVQFKNVFTGIEKKNFKTATTSQKCIE

SEQ ID NO: 162320 - protein, 252 aa, Unknown
  Bacterial polypetide isolated from the Sargasso Sea
MGALALFGEKYGEEVRVVFMGKENNGFFSTELCGGTHVKNTKEVGKFKVINQSSIASGVRRVEALRDKQLEAYEKMQKKDKSQKETNIKNEIEFVKKELQKLKINPDFKENFDLSENLKNLNKQLSKVRIEIIKKDESKNIVKDKKIGNILIREQILKDFPPKELRKVIDEGKKDIKSGIVISISIFEDKVGLAVGVSKDLTSKYDAVVLAKAASVILGGKGGGGRKDFAQAGGVDKSKIEEAFKEISKKIN

SEQ ID NO: 162321 - protein, 310 aa, Unknown
  Bacterial polypetide isolated from the Sargasso Sea
IHLMQNNYPDLKSNNDLILNEIKIEEVRFRETLERGEKLLDELISSGQKLISGFKAFELYDTYGFPLELTVEIAEENSISVDIKGFEEEMNAQKERAKAASSNIDLTLEGSLEREIDLFNRTIFNGYDSLLSEAEIKGIFVDSKLVKQATEGQKVLIVLDQTTFYGESGGQVGDNGTIFSKDVEVLVDNVIRKKNVFLHYGIIKKGILTIGQKVKTNVASSNRAKATANHTATHLLQSALKSVVSDSVGQKGSLVAFNKLRFDFNSSNPISKAQISMIENLVNSWIMENHTLQIKNMSKSEALEKGAVAM

SEQ ID NO: 162322 - protein, 63 aa, Unknown
  Bacterial polypetide isolated from the Sargasso Sea
MADKTLNEIRNTFLKYFEKNDHKIVESSNLVPNNDPTLMFANSGMVQFKNVFTGLEKRDYVRA

SEQ ID NO: 162323 - protein, 332 aa, Unknown
  Bacterial polypetide isolated from the Sargasso Sea
RGFEEEMNVQKERAKAASSNIDLTLEGSLEREIDVFNKTIFKGYESLLSEAEVKGIFLDSTLVKEASEGQKVLIILDQTTFYGESGGQVGDIGTIFSNDVEVLVDNVMRKKNVFLHYGTIKKGKLTIGQKVKTNVSSSNRAKAAANHTATHLLQSALKSVINESVGQKGSLVAFNKLRFDFNSSNPISKDQISKIETLVNSWIMENHALEINNMSKSEALEKGAVAMFGEKYDDVVRVVNVPGVSMELCGGTHVKTTSELGSFKIISEEGISAGVRRIEALSGQSALDYFSDRNALVNQLSDLFKANPNQLFERVNILQQSLLIRIKRYKKM

SEQ ID NO: 162324 - protein, 262 aa, Unknown
  Bacterial polypetide isolated from the Sargasso Sea
TSIEVIDVFQASNGATGLIVDSDIFKVDQEVELSVNKSFRSGVSKSHTGAHIVHSALRNILGDHVAQAGSNVTPGKFRFDFSHTEKVSQEELDEIFALSNSAVFEDYEVNTNIMNIDQAKNEGALAFFGDKYEDDVRVVNIGDFSKELCGGTHVHNSHDVGLIVLLQESSIGSNLRRVEMLSGKLAYEFLSNAYKSYKSVSNILKVSVDDVQNKLQSQLETLETYEEKFKKVREQEISNLVSNIDEHKKEINNYKVYIKEVS

SEQ ID NO: 162325 - protein, 211 aa, Unknown
  Bacterial polypetide isolated from the Sargasso Sea
SYSVELCGGTHVKRTGDIGFFIIINQSSVASGIRRIEAIAGMKSIEYINKIRKINTSLQSELNVSNEDIQEKIKSLVEENKKLKKQSGKNKSKESIIFSKTYEIDDWKLIVEQVGIEDTKELRELADNQKNTNEKVCAVIFNADKNKIALVCGVTKNLTDLISAQEVVSVLSEQIGGKGGGRPDFAQGAGETENIKDFVTSIVDSVKSLAK

SEQ ID NO: 162326 - protein, 268 aa, Unknown
  Bacterial polypetide isolated from the Sargasso Sea
LRTVLGDHVEQRGSLVNEDKLRFDFVHKKQVSKEEIKQIEAIVNSEIRANSETITETMPIKEAEKKGALAFFGDKYGEQVRVLSMGGDFSVELCGGTHVQRTGDIGYFKVMAETSISAGVRRIEALTGEAALNLSQDSHDNLDSLALQLNTSSEQVSEKVSQLIDANKSLKQEVDKLKSSNLSATASDLSLESEEIEGIKVFAHKMEGLDSSALRETADQLRNKEKNSLIVLISIFEDKIPIVIARHKDLEKVDARKVMNHMVNLLGG

SEQ ID NO: 162327 - protein, 268 aa, Unknown
  Bacterial polypetide isolated from the Sargasso Sea
AEIERLVNSKIRENLEVETKIMEISDAINSGAIAFFDEKYSDKVRVLSMGNFSAELCGGTHVSQTGELGFFKILSESSIGSGTRRIEALCGIEAERHASNIEKLVRIISSTLETPEVKILDKLGLLIEEKSNLERELKKYKESSLDNIVNDVYERAEEINNIKFVFAKLDNVEPKELRRLADNLKNRPTANGIIVVLASSLGKKLRLVVGVSKKLSNNISAVELINHMVKQDGGKGGGRSDLAQAGGEFISEFKDLIEFGKDWITENI

SEQ ID NO: 162328 - protein, 39 aa, Unknown
  Bacterial polypetide isolated from the Sargasso Sea
DEDGDRLCEIWNLVFMQYEQVSKDKRIVYQNHPLILVWG

SEQ ID NO: 162329 - protein, 57 aa, Unknown
  Bacterial polypetide isolated from the Sargasso Sea
MADKSLNQIRSTFLKYFEKNEHKIVESSNLVPSNDPTLMFDNSGMVQFKNVFTGLEK

SEQ ID NO: 162330 - protein, 93 aa, Unknown
  Bacterial polypetide isolated from the Sargasso Sea
ADHLRASSFLIAEGVLPSNEGRGYVLRRIMRRGMRHSHLLGSKEPIFFNIFKTLKDEMKGNYSEIERAESLIKETLRMEEEKFLVLLDRGIKI

SEQ ID NO: 162331 - protein, 52 aa, Unknown
  Bacterial polypetide isolated from the Sargasso Sea
IAGFSDDKIIRISTKDNFWSMGETGPCGPCSEIFYDHGESYIGKPPSEADET

SEQ ID NO: 162332 - protein, 259 aa, Unknown
  Bacterial polypetide isolated from the Sargasso Sea
QIIADEEESFGKTLLKGIEQFKKIAAKAREEGRDVIDGASAFLLWESFGFPNDLTEIMAEEIGMKVDGAGFEAAFAAAQEKSRQGGKKSTGPSLLFEAEATAWLQNNGVATTDDEHKYAPGANPDATIKAILTLDGFVETTESVPADQPIGIVLDRTSFYAESGGQVADVGTLRCPGGALAVSDAKVAAGFVLHAVSPEGRCAGAIKVGDGCAVLVDYDRRSKIAPNHTMTHVLNHALRAVLGDEVDQKGSLVDDEKLR

SEQ ID NO: 162333 - protein, 268 aa, Unknown
  Bacterial polypetide isolated from the Sargasso Sea
TQLICDGVTASNLGRGYILRRLLRRVVRHGRLLGIDKPFLVTMGEAAIALLKGAHPSVIDRQEVILAELQREEARFLETLERGEKLLAEVLASKPTQISGAQAFELYDTYGFPLELTQEIAEEQGLAVDLDGFEAAMEEQRQRAKAAAVSIDLTLQDAIDQVVADQAATCFEGYEALDQASCVQALVVNGEPASTAKAGDAVQVVLDTTPFYGEGGGQVGDRGVLASSDLIVRIESVSRSRDVFVHAGRVKRGELALGDTVRAQVDRA

SEQ ID NO: 162334 - protein, 244 aa, Unknown
  Bacterial polypetide isolated from the Sargasso Sea
GALALFGEKYTEEVRVVGMGDVQGNTYSTELCGGTHVNRTGDIGQFKLLSESGVSAGIRRIEAVVGLAANLHTNSIQNSLNEVAALLKVTPLEVPSRVEILIQERKKLEKEMNDLRRSFAAGDDSKGKSELAKNISGINFVGRTLTDVPPGQLKSFADELMAKIDNGIVVVLTNTKGKASLVIKVSEDLSGKISAVELCQIGSKILGGNGGGGRPEMAQAGGPNSSSIPLALETIETAIRDRSI

SEQ ID NO: 162335 - protein, 31 aa, Unknown
  Bacterial polypetide isolated from the Sargasso Sea
FSGETAFKLYDTYGFPLDLTQDALREKGRGC

SEQ ID NO: 162336 - protein, 284 aa, Unknown
  Bacterial polypetide isolated from the Sargasso Sea
TDEELVTIDKLVNAYVSNSSEVTTRIMTPKAAIEKGALAFFGEKYGEEVRVVSMGKEKEAYFSTELCGGTHVKNTGDIGKFKTVSQSSIAAGVRRVEALRDKQLEDFIKNKEKLSTLSTQKDEETIKDLSSQIIKLGGKPNVDNKDLKEIIKNLSRQLEQLNVSSVLQDKTKNIIKDDKINNIKVRFQKVQDLPPKDLRKLVDNGKKELGDGIVIVFASSEGKVGLAVGITEKLVDKYDAVKFAKLGSETIGGKGGGGRKDFAQAGGQDKSKIDEAFEKIKSLI

SEQ ID NO: 162337 - protein, 281 aa, Unknown
  Bacterial polypetide isolated from the Sargasso Sea
ITNYIMIDIGRPLHAYDIDKIKGKTLRITKSNKGEKFFALNGNAYELDDNMLVICDEQGVDDLAGIMGGERTGVTKDTTRMFLEAAIFDSVSIANTGRKLNLNSDARYRFERGLDYNSPELVMNYAAEMINKICGGKFSKIVNFKLEQKNKIINFEPNIIYQLTGVKIENKLSKSILEKLGFKIISEDNIWKIIPPTWRPDIDGIADIVEEIVRISGYEKIPSIKLSRSNYIAKPAMSTKHRQAFFASRILASRGYNEVITFSFLNKTLAKQFNGGGLALN

SEQ ID NO: 162338 - protein, 288 aa, Unknown
  Bacterial polypetide isolated from the Sargasso Sea
EAEIKSIFLDSTLVKQASEGQKVLIVLDETTFYGESGGQVGDIGTIFSKDLEVLVDNVIRKKDVFLHYGTIKKGILTIGQKVKTNVKSSNRAKAAANHTATHLLQSALKSIVDESVGQKGSLVAFNKLRFDFNSSNPISKDQIFKIESLVNSWIMENHILEIRNMSKSEALEKGATAMFGEKYDDEVRVVNVPGVSMELCGGTHVKTTSELGSFKIISEEGISAGVRRIEALSGQSAFDYFCDKNALVNQLSDLLKANPNQLFKRVNNLQAELISKNKEIQKLKDEIA

SEQ ID NO: 162339 - protein, 247 aa, Unknown
  Bacterial polypetide isolated from the Sargasso Sea
LFGEKYGEEVRVVFMEKENNGFFSTELCGGTHVKNTREVGKFKVISQSSIASGVRRVEALRDKQLEAYEKIQKKDKSQKETNIKNEVELVKKELQKLKINPDFKENLDLSENLKNLNKQLSKVRIEIIKRDKSKNIVKDKKIGNILIREQILKDFPPKELRKVIDEGKKDIKSGIVISVSIFEDKIGLAVGVSKDLTSKYDAVVLAKAASVILGGKGGGGRKDFAQAGGVDKSKIEEAFKEISKKIS

SEQ ID NO: 162340 - protein, 67 aa, Unknown
  Bacterial polypetide isolated from the Sargasso Sea
MADKSLNEIRNTFLKYFEKNGHTIIDSSNLVPNNDPTLMFANSGMVQFKNVFTGLEKREYQRATTSQ

SEQ ID NO: 162341 - protein, 54 aa, Unknown
  Bacterial polypetide isolated from the Sargasso Sea
MKSNHVRNAFIDYFKNNDHKHLKSGSLIPENDPSLMFANSGMVQFKNVFTGMEK

SEQ ID NO: 162342 - protein, 235 aa, Unknown
  Bacterial polypetide isolated from the Sargasso Sea
MNSGAMALFGEKYDDDVRVLTMGENSYSVELCGGTHVARTGDIGFFIVTTQSSVASGIRRVEAVAGMQALNYIKKLKEVNSSIQNLLNVSANDIQDKIKSLIDENKNLKSKENKSTKREIVFSESFEINDWKLVILQVQLDDTKDLRLIADEQKNTNEKVCVVIFSEQNNKIALVCGVTKNLTDTLSAKDIVSVVSEKIGGKGGGRPDFAQGAGESKNIKDFVTSIQDSVKSLAK

SEQ ID NO: 162343 - protein, 270 aa, Unknown
  Bacterial polypetide isolated from the Sargasso Sea
MRVQQIENLVNETIRNNISTKIETMSFKKAQDKGALAFFGDKYGNEVRVLSIGGDFSIELCGGTHVDSAGDIGFVKVTSESSISSGVRRIEACSGKDAEDFSNKFQNSGQEAMKLLNVNEEGLISKIKELMEKNSKLEKSIKLSQQKEIGEVIKSLEQDIIQINSYKVILKELEGINLGSARSLIDELKNKNENLICVLASKDGDKSSLLVSSSKSIPKDVFNSNDLLQSLASLIGGKGGGKPDHAQAGGSQVKNFEKVFSEATKYIQNL

SEQ ID NO: 162344 - protein, 141 aa, Unknown
  Bacterial polypetide isolated from the Sargasso Sea
SALREVLGDKVFQKGSLVNDEKLRFDYSHGVKLTKSEIEEIENIVNLEIEKATSTETKLMSYQDAIDSGALAFFGDKYGDQVRVVSLGGEFSVELCGGTHVKNTSEIEGFIISNETSVSSGVRRLEAMTGYKFNKEIKRSY

SEQ ID NO: 162345 - protein, 223 aa, Unknown
  Bacterial polypetide isolated from the Sargasso Sea
DFNYFEAIPIEELQQIEQVVNHEIMKNTAVETREMALADVQNNPRIQAVFDDKYGDRVRVVGVGNFSQELCGGTHVQFTGDIGSFRIVSESSIASGVRRIEAVTGMEAVDWTAEEHELLIGVSQKLSVKPNELPARIISLNNQLREAEKKIKSMQSQLATSNIDSYIENLIEINGVPFLSLHIGELPMDNLRQVLDQLRQKISSGVVLVASESSGKACFATSI

SEQ ID NO: 162346 - protein, 279 aa, Unknown
  Bacterial polypetide isolated from the Sargasso Sea
INNIVNEIVAGSSEVQTRIMTPKEAVKMGALALFGEKYGEEVRVVFMGKENNGFFSTELCGGTHVKNTKDVGKFKVISQSSIASGVRRVEALRGKQLEDYEKIQKKDKYQKESDLKNEIKSIKKELENLKIKPNYIENLDLHENLKNLNKQIYKIRIQNIKKNKSKNIIIDKKVGNILVREQVLKDFPPKELRSIIDEGKKEIKSGIIVSVSTFEDKVGLAVGVSQDLISNFDAVELVKAASTILGGKGGGGRKDFAQAGGVDKNKIEEAFKAILEKIN

SEQ ID NO: 162347 - protein, 281 aa, Unknown
  Bacterial polypetide isolated from the Sargasso Sea
ILNEIKIEEVRFRETLERGEKLLDELISSGQKLISGFKAFELYDTYGFPLELTVEIAEENSISVDVKGFEEEMNAQKERAKAASSNIDLTLEGSLEREIDLFNKTVFNGYDLLLSEAEIKGIFLDSTLVKQASEGQKVLIVLDQTTFYGESGGQVGDIGTIFSKDVEVLVDNVIRKKNVFLHYGTIKKGILNIGQKVKTNVKSSNRAKAAANHTATHLLQSALKSIVNQSVGQKGSLVAFNKLRFDFNSSNPISKDQISKIETLVNSWIMENHILEIKKYV

SEQ ID NO: 162348 - protein, 258 aa, Unknown
  Bacterial polypetide isolated from the Sargasso Sea
NIDTGMGLERIAMIMQEKESLFETDLFSSIHKELSKKIKNSNAKYEKIILDHIKASTFMLSDGVVPTNEGRGYILRRLIRRALRAYNKLTEEPSSLDFLIKEVTKLYSEPYPELDNNIEKITKLFKTEEDLFGKTLDKGIQEINTILETGELSAKQAFYLFETYGFPFELTQEIALENKITLNEEEFQQYFENHKIKSKGSSTKINQNMKLDIDTNDFCGYETIDTVSEIYHVEPLKNKSIIFTKINPFYFEAGGQIS

SEQ ID NO: 162349 - protein, 282 aa, Unknown
  Bacterial polypetide isolated from the Sargasso Sea
IKKEDIYVSVFEGSKEDNLEFDQVAFDEWKKFFSENRIISGNKKDNFWEMGDVGPCGPCSEIHIDLRSESDKKKIKGADLVNKDHPQVVEIWNLVFIQFNRKKDGSLIKLDKQYVDTGMGLERLCMALQKKESTYDTDLFADIIKKIEDISNKKYLSGDENIDIAIRVISDHIRALIFTISDGQIPSNNGPGYVIRRILRRAIRYGYTNLDIKTPFIYELVDVVISKYLTIYPDLKNQSEYITSLIHEEEKGFLKTLNQGLSLINQIIESNPNDKKISGEDS

SEQ ID NO: 162350 - protein, 232 aa, Unknown
  Bacterial polypetide isolated from the Sargasso Sea
KRGRGMFGEKYDDEVRVVDLGDKFSIELCGGTHVKRTGDIGTFFITNESSVASGVRRIEAVVGKEALNLINNSMESLREIQKLLKVPASEISSKLAKIIDENKQLRKNQSAKVSKPKVIKKSIIKSANASFEIMQIDEDEINILRAQSDILKQENNSNSHIIFGIGKDKSSIVISVVDAKVGTFSAKELLSQIIASLGGKGGGKDIFAQGVIESTDPKSIMNSIDDVINSSL

SEQ ID NO: 162351 - protein, 191 aa, Unknown
  Bacterial polypetide isolated from the Sargasso Sea
MFVILSESSVSSGVRRIEAVTGAKALELVLEIRSQLQDVQGILNVGASKVSSKVEDLVKENKSLKKGNTSKAKSSVDLKEVIHKIKNLDLVLIEADTQNIQDLRLLVDSSKKDQSQRCVLILSHQDSKVVMVCGVTEDIQESLSANDVIQAIAKASDGKGGGRKDFAQGAGVADNFEEFVNSIPDIVQSIA

SEQ ID NO: 162352 - protein, 77 aa, Unknown
  Bacterial polypetide isolated from the Sargasso Sea
EDGDRFIEIWNLVFMQFEQVTKDKRINLPKPSVDTGMGLERIAALLQGSHDNYETDHFKKIINSASEIVKVKSDKSN

SEQ ID NO: 162353 - protein, 214 aa, Unknown
  Bacterial polypetide isolated from the Sargasso Sea
ELCGGTHVERTGDIGAFKITSESGIASGVRRIEATTGIGALDWIESTEDKLQRIAKLLKSDTETVDSKLTAQLEKNRKLEKELLDLKSKLTSSAGSDLIQNAEVIDGISIIARSLDNTDPKNLRDVVDQLKNKLGTAVLVLATVNDSKVSLVAGVTNDTTSRIKAGELANFVAEQVGGKGGGRPDMAQAGGDNPKELESALAKVPQWVRDQLES

SEQ ID NO: 162354 - protein, 244 aa, Unknown
  Bacterial polypetide isolated from the Sargasso Sea
PRLILRRLLRRVVRHGRLLGIDKPFLVTMGKAAIALLKGAHPSVIERQEVILAELQREEARFLETLERGEKLLAEVLASKPTQISGAQAFELYDTYGFPLELTQEIAEEQGLAVDLDGFEAAMEEQRQRAKAAAVSIDLTLQDAIDQVVADQAATCFEGYEALDHASCVQALVVNGEPASTAKAGDAVQVVLDTTPFYGEGGGQVGDRGVLAGSDLIVRIESVSRSRDVFVHAGRVERGQLALA

SEQ ID NO: 162355 - protein, 638 aa, Unknown
  Bacterial polypetide isolated from the Sargasso Sea
MLVANRGEIASRVFRTAKKMGLRTVAIYTEADRHSPYVGDADLSVKIESSYLDSDAIISAAKKSGAEAIHPGYGFLSENHEFAMRVQNEEIVWVGPDPQSIQIMGDKIEAKKHAIKANLPILESVNDASSVKNIGYPLMIKAAAGGGGKGMRIVRDESQLEESINLAKKEALNAFGDDRIFIEKYIERSRHIEVQVIADKHGNFLHLGERECSIQRRHQKIIEESPSSRIDPKQREKLTKASISLAKQINYVSAGTIEFLYDDDSDELWFLEMNTRLQVEHPVTEMVTGIDIVEMQLKIADHQAIEFSQSDVLFNGHSIEARIYAEDPVNDFLPSNGKLIADRKHLSNEIRWDTGVSEGMTIGTDFDPMLAKVISHDVSRDLAASKLAKELEKTHFGGFPNNIDFLINILRDENFLKGDTTTDFIDRCKPSRSIELDFVETNFLLTSAALWLQHESRTNANVLSHIPSGWHNARLPHQRVSFSIDDQDITVRYKRMRDGSFVNDNNQIAVINEVTDQSIDIEFDKIRRIVNITKHDDLLLIQHERGNKLIELLPRFKNDQELVQKGSLVSPMPGKVMEINVKVGDDVIKGQTLLVMEAMKMNQSISSDQDGIVEEIYVNEGDQLETGTSLLLVKSSDE

SEQ ID NO: 162356 - protein, 58 aa, Unknown
  Bacterial polypetide isolated from the Sargasso Sea
MADKTLNEIRNIFLKYFEKNDHKIVESSNLVPNNDPTLMFANSGMVQFKNVFTGLKKE

SEQ ID NO: 162357 - protein, 104 aa, Unknown
  Bacterial polypetide isolated from the Sargasso Sea
MNSNLIRSNFIKFFEEKGHSFVQSSSIVAKNDPSLMFTNAGMNQFKNIFLGNESSKVKRVANSQKCLRVSGKHNDLEEVGADHYHHTMFEMLGNWSFGDYLKKR

SEQ ID NO: 162358 - protein, 54 aa, Unknown
  Bacterial polypetide isolated from the Sargasso Sea
RLRFDFSHNKPIEKDEMVKINKIVNEMVEGGSDVQTRIMTPKEAVGLGALALFR

SEQ ID NO: 162359 - protein, 67 aa, Unknown
  Bacterial polypetide isolated from the Sargasso Sea
MADKTLNEIRNTFLKYFEKNDHKIVESSNLVPNNDPTLMFANSGMVQFKNVFTGLEKRDYVRATTSQ

SEQ ID NO: 162360 - protein, 90 aa, Unknown
  Bacterial polypetide isolated from the Sargasso Sea
MTSQLIKKIVTGDEIRNAFLKFYSEKLHKIIPSASLIPDDPTVMLTIAGMLPFKPVFLGLKERPSKRATSSQKCIRTNDIENVGVTARHH

SEQ ID NO: 162361 - protein, 61 aa, Unknown
  Bacterial polypetide isolated from the Sargasso Sea
MADKTLNEIRNTFLKYFEKNEHKVVESSNLVPNNDPTLMFANSGMVQFKNVFTGLEKRDYV

SEQ ID NO: 162362 - protein, 222 aa, Unknown
  Bacterial polypetide isolated from the Sargasso Sea
KYGDTVRTIRFGKSIELCGGCHVKNTSEILFFKIINESAIASGIRRIEAITGDAVISHFEQQSMVLDKIGDLIKNQDPVKVFENFVNENNSLKKEIQELNRFKISALKEELKKIVIKKNDLFFLSKEVDLDVKNMKELAFELGSDINSLYLVLGTKKNNKPTLCCFISKDLVKSRNYDASEVVKNLCKYIDGSGGGQKFYASAGGKKISGLKEALDISISFL

SEQ ID NO: 162363 - protein, 537 aa, Unknown
  Bacterial polypetide isolated from the Sargasso Sea
MKPKIKNENTKFERIVLDHMKASTFMLSDGVVPTNEGRGYILRRLIRRAIRAFYGLSTNIESLEFLINPIIDVYADHYPELLKNKAKILKLYLTEEKLFHKTLEKGTIEIQKLIKDKKSFNEEKAFFLFETFGFPYELTKEIAFENGITLEDSKYMKKFEEHQAKSSTFKKESTENSNIEVDCNIFTGYEETSTLSDVLMVSVNELSTTIFMEKNPFYFEAGGQISDQGKIIYEDNEYQVDEVIQTSSGAIGITINQSLTISKGEKIESVVDDSFRRSVSKSHTSAHIVHSSLRQILGDHVAQAGSYVAPGRFRFDFSHSEKVSSEQLSEIFTLSNKNVFQDLDVSTKVMNIDDAKKEGALAFFGDKYEDDVRVVNIGEFSKELCGGTHVGNSNEIGLIVLLNESSIGSNLRRVEMLSGYEAYDFMTNAYNSYKNVSNILKTNIDDVPSKLETFLNTYEELKSKIDKYKQIENNQIVDSISNNLNVINKLKTYVGSIETDSVDSLRNIAVTAINNEVADYVYLIAKIDSKYVIVFDE

SEQ ID NO: 162364 - protein, 214 aa, Unknown
  Bacterial polypetide isolated from the Sargasso Sea
MSNFCGGCHVNRTGDIGFFKIISETGISAGVRRIEAVTGDGAREFIYQREQVLKELGELVKSGVNDLVSKVRQINESNRVLEKEIEFLKQKIAKSAGNELVDQAIDLGDVKLLVAKVEGFNSKSLRDSVDQLKNKLGTSVIVLATVSDDKVSMVAGVSKDLTGKIKAGQLVNMIAEQVGGKGGGRPDMAMAGGTESSALPEALESVETWVKAKL

SEQ ID NO: 162365 - protein, 638 aa, Unknown
  Bacterial polypetide isolated from the Sargasso Sea
MLVANRGEIASRVIRTAKKMGLKTVAIYTEADRHSPYVIDADLSVKIESSYLDSDAIISAAKTTGAGAIHPGYGFLSENHDFATKIQDEGIIWVGPNSDSIQIMGDKIEAKKHAIKAEMPILESVNDAASAKDIGYPLMIKAAAGGGGKGMRIVDDESQLDESIKLAKQEAMNAFGDDRIFIERYIERSRHIEVQIIADKHGNVLHLGERECSIQRRHQKIIEESPSPRIDPEQRDKLTQASLSLAKQINYVSAGTIEFLYDDDSGEIWFLEMNTRLQVEHPVTEMVTGIDIVEMQLRIADDQPITISQSEVSFQGHSIEARIYAEDPANDFLPSNGRLIADRNRDDKNIRWDTGVSEGMMIGTDFDPMLAKVISHDESRELAAAKLRKELENCHFGGFVNNIDFLINILGNESFLNGDTTTDFIARYNPPRSIEIDSNEMSFLLMATTLWLQHKNRSNAVVLGHIPSGWHNARLPYQQTSFELDETELTVRYKRQRDGSFIDEKNQVAFINHVTNESIDIEFNKLRRRVNITQYENLLLVQHDKGNKLIKLIPRFKNEQELIQKGSLVSPMPGKVTEINVKTGDKVEKGQNLLVMEAMKMNHSISSNQDGIVEEIYVQEGDQLETGTSLLFIKSGDE

SEQ ID NO: 162366 - protein, 253 aa, Unknown
  Bacterial polypetide isolated from the Sargasso Sea
MALFGEKYSDEVRVVTMGQDNEVFFSKELCGGTHVNKLGEINKFKITNQSSVASGIRRIEAVSNISVDKYITEIERNLLEKDKNQDNQIEDLKNKIKKINSDYNFKNQFDDKGLLIKELSQIHEKLKQNMSISKNIDNIVIKKIKDLNFIYLIAEDYPSKSLKTFIDEQKKQYNKKSVSLIISNNQNKLSIVLGVTEDITDIFDASKEIREISTILGGKGGGGRKDLAQGGGSNVSQIEESLRYVEDKLNSII

SEQ ID NO: 162367 - protein, 55 aa, Unknown
  Bacterial polypetide isolated from the Sargasso Sea
MKAAEIREKFLKFFESKGHTIVRSSSLVPGNDPTLLYGNSGMVQFKDGSSARNRV

SEQ ID NO: 162368 - protein, 239 aa, Unknown
  Bacterial polypetide isolated from the Sargasso Sea
MTDLLFNQDSYLKETEASIIGVEENIIQLDRTIFYAESGGQPGDQGEIVLKDQVLKVVDTKKGSKPNEILHIVDGPIDQSLINQSAELKINWELRYAHMKMHSSCHILCSLVDALITGASVGSAKSRIDFDVDPSMLNKEELNEKIRDIISKDYPIIINQITGDELKSNPHLAKGAAVSPPVIDNKVQTVQIGEGENIIDLQCCGGTHCQSTKEIGPLEIGKIENKGKRNRRINIRFSS

SEQ ID NO: 162369 - protein, 239 aa, Unknown
  Bacterial polypetide isolated from the Sargasso Sea
DLEDAKNSGAESLFGEKYEDQVRVLSIGEDDFSLELCGGTHISRTGDLGIFIITSQSSVASGIRRIEALSGPRAQEYLSNLKNQTIQLQKLLNAPAEEIEDKVSKLLKENKSLKKGGKTAKTTTIKSSNTHDIDNFKLVIEVAESEDIKELRPLLDEKTKNANNSIFILLSSKNETLTILCSVSKDLQSRISAKDLINALTLPIEGKGGGRVEFAQGAGKPSDREKFVSDIPNIVQSLA

SEQ ID NO: 162370 - protein, 123 aa, Unknown
  Bacterial polypetide isolated from the Sargasso Sea
MASQQGADMLSNAVEINGVKVLIANLEGVEAKSLRSMMDDIKNRIGEGIVVLGVANDAKVNLIAGVTKNLTSKVKAGELVNFVASQVGGKGGGRPDMAQAGGDQPENLGQALDSVNAWLQDKL

SEQ ID NO: 162371 - protein, 58 aa, Unknown
  Bacterial polypetide isolated from the Sargasso Sea
MGQILLTDVRKKFLDYFKKNNHKIVDSSNLVPNNDPTLMFTNSGMVQFKNVFTGLKKE

SEQ ID NO: 162372 - protein, 295 aa, Unknown
  Bacterial polypetide isolated from the Sargasso Sea
FDFSHNKPIEKDEMIKINNIVNEIIAGASDVQTRIMTPKEAVSMGALALFGEKYGEEVRVVFMGKENNGFFSTELCGGTHVRNTGEVGKFKVISQSSIASGIRRVEALRDKQLEEYEKTQSKDKSKKESNLKKEIELIKKDLQKLKIKPDYKENLDLSENLKILTKQLNKLRIESIKKDKSKNIIKDKKIGNILIREQILKDFPPKELRDIIDQGKKDIKSGIIVCISTFEDKVGLAVGISQDLTSKYDAVDLVKTASTILGGKGGGGRKDFAQAGGVDKNKIEDAFKGIFKKIN

SEQ ID NO: 162373 - protein, 422 aa, Unknown
  Bacterial polypetide isolated from the Sargasso Sea
AWHDIEISELIEDSEDYFKVTDCLDVWFDSGVTHASVLSENDELNFPADLYLEGSDQHRGWFQSSLLTSMAINGEPPYKGVLTHGFVVDSEGKKMSKSIGNVISPQKIWDTMGSDVLRAWIASTDYTKEIVLSDDILKRTSDSYRRIRNTVRFLLGNLSDFKHDDSVSKDKFTELDKWMISRTKSLQEEIRKDYENFHFHQAFQKIHNFCANDLGGFYLDILKDRLYTAKTDCDARRSAQTALSNILQALLRWISPILSFTAEEAWLLMKEDEESVHLLEWFEDWHDFGELKISDDDWNKVLEIRSEVNKHIEEARNQEIIGSSLDADLELNCSKELKEFLDIFEEELRFIFITSDAKVNLSEKGIVTGVEGLKIKVAKTQNQKCIRCWHSRPEVGTIKHHETICQRCFENVKGKGEIRLFA

SEQ ID NO: 162374 - protein, 106 aa, Unknown
  Bacterial polypetide isolated from the Sargasso Sea
VATTRPETILGDSGIAVNPSDYRYKDLIGSMVRAPLSNRLIPIVADQYADPEKGTGAVKITPAHDFNDWEVGKRSSLRIINIFDLKARVRLNENEEFLKDCEPDEV

SEQ ID NO: 162375 - protein, 267 aa, Unknown
  Bacterial polypetide isolated from the Sargasso Sea
QALVEKKLKSEGIDKNDLGREKFIEKVWEWKGQYGDIIINQLKKLGCSCDWSRNAFTMDDNLSKSVLKVFVEMYKNGLIYKSKKLVNWDTVLKTAISDLEVDQREVNSKLYHINYPIEGTDKFITIATTRPETMLGDTAVAVNPSDERFKSLVNKNVIVPIVDRKIKIIEDDYADPEQGTGAVKITPAHDFNDYEVGERNNLEIINVFTPDGKINENAPDNYVGLDRFEARKRILKELSDKELFVKEEKIKNKVPYGDRSNSIIEPY

SEQ ID NO: 162376 - protein, 295 aa, Unknown
  Bacterial polypetide isolated from the Sargasso Sea
LSRENIDKNDLGREDFVKKVWEWKEFSENKITGQIKRLGNSVDWSNYRFTLDEGFNEAVLKAFVELYRKEKIYRGYRLVNWDPSLKTAVSDLEVVRQDKKGLIWYIKYPIIGSDDFVTVATTRPETMFGDMAIAVNPKDKRYKNIIGKKVELPFVKRKIPIIGDDYVDKEFGTGCLKITPGHDFNDYEIGKKYCLHCVDNEVHISDDIEDFEPLNIFTDEAHSNDNVPSPFKNLDRFKVRKLVLEEIKKLHLFVKEEEHEISVPRGERSNIVIEPKLSYQWYVTTKGTAAKANKA

SEQ ID NO: 162377 - protein, 65 aa, Unknown
  Bacterial polypetide isolated from the Sargasso Sea
MSSDKYIHSDVENRIYSYWEKNGLFKPKENSKKFSIVIPPPNVTGSLHMGHALNNSIQDLLVRYH

SEQ ID NO: 162378 - protein, 124 aa, Unknown
  Bacterial polypetide isolated from the Sargasso Sea
MLEKYYKHELVEKEIYEGWEKDKDFVSKVTDKNSKPFCIVIPPPNVTGTLHMGHALNNTLQDILIRYQRMQGKDVLWQPGMDHAGIATEMVVERELKKEGIKKSELSREEFVKKYGSGKIFQEV

SEQ ID NO: 162379 - protein, 260 aa, Unknown
  Bacterial polypetide isolated from the Sargasso Sea
ACWVPGTDHASIATEAKVVEMLKEKGIDKSSLTRDEFLKYAWEWKEKYGGIILEQLKKLGASCDWSRTKFTMDEDLSKSVIKVFIDLYDKGHIYRGIRMVNWDPQGKTALADDEVIYKEVDSHLYYINYKIKDSKDHITIATTRPETLLGDTAVCINPKDKRFKHLRNKSAIVPLVEREVPIIFDEYVDMEFGTGCLKVTPSHDENDYKLGEKHNLSSIDIFDDEGKINKNGILYIGKDRFRVRKQIIKDLKKIGQLSKI

SEQ ID NO: 162380 - protein, 67 aa, Unknown
  Bacterial polypetide isolated from the Sargasso Sea
MSFDKYEHNNVENKIYDYWEKNELFKPKENSKKFSIVIPPPNVTGSLHMGHALNNSIQDVLTRFHRM

SEQ ID NO: 162381 - protein, 81 aa, Unknown
  Bacterial polypetide isolated from the Sargasso Sea
MSSDKYIHSEVENKIYSYWEKNNLFKPKKNKKSFSIVIPPPNVTGSLHMGHALNNSIQDLLTRFHRMNNYETLWQPRYRSC

SEQ ID NO: 162382 - protein, 160 aa, Unknown
  Bacterial polypetide isolated from the Sargasso Sea
MGIDKVYNPNEIEIKWLKKWDKENLFKSVPDEREVYTIVIPPPNVTGILHMGHMLNNTIQDILIRRARLKGLNACWVPGTDHASIATEAKVVKMLKEKGIKKSDISRDEFLTYAWDWTEKHGGLILNQLKRIGCSCDWDRTKFTLDSDLSESVIDTFIKL

SEQ ID NO: 162383 - protein, 326 aa, Unknown
  Bacterial polypetide isolated from the Sargasso Sea
ESPTMVGYRFSTAVAQAEIEDRDIDGAYHDIRFNIQDSKENLIISTTRPELLASCVGITAHPDDERYKHLFNKTAISPVFFAPVPIFPSKLVDMQKGTGILMVCTFGDQTDVVWWRENKLPLRQLFGSDGKVLEINFDHKKEKNEWISVNAEKANKNIYKFYNKTLKQSKNLIIEMLKESQNSLDNIVPLVSDPKKILHPVRFYEKGDSPIEYISSRQWFVKITDKKDDLLEIGKNINWHPNYMSKRFENWTQNLAIDWCISRQRFFGVPIPVWYKIDEKGKVDYNDVILPNISNLPIDPEIDIPDNLSEKDRGKPNGFIGEKDVF

SEQ ID NO: 162384 - protein, 297 aa, Unknown
  Bacterial polypetide isolated from the Sargasso Sea
LLVTGFDIIFFWVARMIMMGLNFNDDVPFKDILIHGLVRDSKGRKMSKSLKNTIDPLELSEKHGADALRFSLIEKAAPGQDVPFDEEWTIAAKKFGNKLWNAAKFVHLYSPEEKRTDEIKEITCPENVWIACRFDEVLAEFNELFEKYKISDAYKLIYNFVWSDLFDWYFEFSKNLIDDEKTKDETMFVLRTTFLKSIKILNPAMPHITEEIWSTFEDDLLINNTWPEVEGKELNPEANDVENLKEVISQIRNFKATYQLKNKEILKLNSSKDVSPWFTKQLENIGNKELNLNSPRG

SEQ ID NO: 162385 - protein, 83 aa, Unknown
  Bacterial polypetide isolated from the Sargasso Sea
MEFKKYNHLKEEKKISDFWIKKGLFKPKKTKIKKSFSIVIPPPNVTGRLHMGHALNNSLQDVLVRFNRMKGLETLWQPGTDHA

SEQ ID NO: 162386 - protein, 285 aa, Unknown
  Bacterial polypetide isolated from the Sargasso Sea
EYGDIIINQLKKLGCSCDWSRNAFTMDKNLSESVIKVFVDLYNKGLIYKSKKLVNWDTVLKTAISDLEVDQREVNSKLYYINYQIENSSEFITIATTRPETMLGDTAVAVNPKDERYTNLIGKNVILPITGRKIKIIQDDYADPEQGTGVVKITPAHDFNDYDVGKRNKLEIINIFTEDGKINENAPSDYVGLDRFEARKKILNDLGDKLIKEENIKNKVPYGDRSNSIIEPYLTEQWFADAKKLSVKAKKIVKNKKTKFFPPNWSKTYFQWMNNIEPLVYIKTT

SEQ ID NO: 162387 - protein, 78 aa, Unknown
  Bacterial polypetide isolated from the Sargasso Sea
MSSEKYTHSKVENKIYSYWEKKGLFKPKKNKKKYSIVIPPPNVTGSLHMGHALNNTIQDLLIRFHRMNNFETLWQPRN

SEQ ID NO: 162388 - protein, 73 aa, Unknown
  Bacterial polypetide isolated from the Sargasso Sea
MDNNFNSSQIEQELYKMWEEENFFAPANRDNQKNFCILIPPPNITGTLHMGHAFNHTLIDILIRHSRMTGKRT

SEQ ID NO: 162389 - protein, 287 aa, Unknown
  Bacterial polypetide isolated from the Sargasso Sea
LIRRARMKGYNACWVPGTDHASIATEAKVVEKLKKDGIKKSDLSREEFLKYAWKWTAEYGGIILDQLKMLGCSCDWKRTKFTLDDKMSDSVIKVFIDLYNKGLIYRGYRMLNWDPKAQTTISEEEVLYEERDSKIYHIAYKISDSEEKIVVATTRPETLLGDTAICINPKDKRYSHLTGKSVLVPIVKRKVPIIKDDYVDIDFGTGCLKVTPAHDFNDNILGKKYNLEIIDIFNPDGTLNQNGLHYVGQDRFVVRKKIVNELKEKGLLIKEENINITLLFQRDKSSY

SEQ ID NO: 162390 - protein, 67 aa, Unknown
  Bacterial polypetide isolated from the Sargasso Sea
MTLEKKFNFIEEENIIYDKWYKSNCFKPTKNSEPYCIMMPPPNVTGSLHMGHALTFTIQDILIRYNR

SEQ ID NO: 162391 - protein, 229 aa, Unknown
  Bacterial polypetide isolated from the Sargasso Sea
MNFGREKFLDEVWSWKDYSEEKITSQIKRLGCSVDWNKYRFTLDDGCNEAVIKAFVELHRKNKIYRGYRLVNWDPSLKTAVSDLEVVRQEKDGLLWHIKYPIEDSEDHVIVATTRPETMFGDMAVAVNPNDDRYKNLIGKNIVLPFVGRKIPILADEYVDMEFGTGCLKITPGHDFNDYEIGKKYSLHEVNGQVETSDTASDFKPINIFNEDAWSNKNVPEPFSNLDRF

SEQ ID NO: 162392 - protein, 278 aa, Unknown
  Bacterial polypetide isolated from the Sargasso Sea
GDKMSKSRGNVLDPIDLIDGIDIESLVTKRTAGMMQPQLAEKIAKRTRKQFPDGIQAYGTDALRFTFAAMASTSRDINFDMARVEGYRNFCNKIWNASRFVLMNTEEHDTGRDGGEMVLSMADRWIWAKFQQTLVEFEKALEDYRFDIAAQTVYEFTWNQFCDWYLELTKPVLNNDASTEAEKRGTRHTLINVLESLLRLLHPLMPFITDTIWQRVVPLSALKVEEGASIMVQAFPEVDAAKQDDKVLADIEWVKKFIVGIRNIRGEMDISPNKPLNA

SEQ ID NO: 162393 - protein, 265 aa, Unknown
  Bacterial polypetide isolated from the Sargasso Sea
GREKFIEKVWEWKDQYGDIIINQLKKLGCSCDWSRNAFTMDENLSKSVIKVFVDLYNKGLIYKDKKLVNWDTVLKTAISDLEVDQREVNSKIYFIRYPIDGTEEFITIATTRPETMLGDTAIAVNPKDERFKSFVGKTVTIPIVGRKIKIIEDDYADPEQGTGALKITPAHDFNDYEVGQRNNLEIINIFTEAGKINKNAPQTYVGLDRSEARKKILKELKEKEFFVKEENIKNKVPYGDRSNSIIEPFLTEQWFADASKLSVKA

SEQ ID NO: 162394 - protein, 80 aa, Unknown
  Bacterial polypetide isolated from the Sargasso Sea
MQLDKFFDFLKDEKNLYAQWEQSNSFKPKKGGKPYSIMMPPPNVTGSLHMGHALTFTIQDILIRYHRMKGMEVLWQAGTD

SEQ ID NO: 162395 - protein, 57 aa, Unknown
  Bacterial polypetide isolated from the Sargasso Sea
MELEKFFDFLKDEKHLYSQWEKLNCFKPKKGGEPYSIMMPPPNVTGSLHMGHALTFT

SEQ ID NO: 162396 - protein, 335 aa, Unknown
  Bacterial polypetide isolated from the Sargasso Sea
KTTKYFPTNALVTGPDIIFFWVARMIMSGYEFMGDLPFKDVYFTSILRDEKGRKLSKSLGNSPDPITLFEKYGTDATRFSIMLMSPQGSDVYFSEHGIEVGRNFMTKIWNASRFIMLNHEDSFADEIDIEALDNFDKWILDSLDETVDEVNKYFDKYQFNEAIKKIYDFTWNEFCNWYIEIVKHRFREGDITSKSNSFNISKKIIKKVLLLLHPIAPFASEEIWNHLKDTNEEDIIISSWPKAKNSNVSHNKDEILDFKEIVTSIRTIRSELNVPPSKKIDVIAHVKNESIESRLNPLIDLIKSLSNSENLHLSSKKRKARKLCSSSMQVSGAIY

SEQ ID NO: 162397 - protein, 224 aa, Unknown
  Bacterial polypetide isolated from the Sargasso Sea
TAISDLEVDQREVNSQLYYINYPIENSDKFITIATTRPETMLGDTAIAVNPKDDRFKDLIGKLVTIPLANRKIKVITDDYADPEQGTGAVKITPAHDFNDYDVGIRNKLEVINIFTPDGKINDNAPDPYKGLDRFAARKLILEHLEEGKFLEKIEKLVNKVPYGDRSNSIIEPYLTEQWFVDAKTLAIKAKEVVNNGKTKFFPENWSKTYFQWMDNIEPWCISR

SEQ ID NO: 162398 - protein, 252 aa, Unknown
  Bacterial polypetide isolated from the Sargasso Sea
MSKSKGNVIDPLELINKYSADALRFTLLSMASPGRDVKLSEDRVKGYRNLLNKLWNANNFLIQNKCNFSEKKPKKINININNWIFNELVKVKKDVEAKIKEYRFDEASRLIYQFVWNSYCDWYLELSKTILYSNDKKKIKETQDVSGFIFTQILILMHPFIPFVTEEIWLKNKLDKSGKNYLMFSNWINEKPIKNKEIKNVENIINFTSSIRSFKNELNISPGSFVDVSLGSIKNKKSNFYAKNENTFKKIA

SEQ ID NO: 162399 - protein, 74 aa, Unknown
  Bacterial polypetide isolated from the Sargasso Sea
MKADKYTHSEVENKIYSYWQKNNLFKPKKNKKKFSIVIPPPNVTGSLHMGHALNNSIQDLLIRYHRMNNFETLW

SEQ ID NO: 162400 - protein, 241 aa, Unknown
  Bacterial polypetide isolated from the Sargasso Sea
LSNWDPRLKTTISDLEVIQKEVVGTLWYIDYEIESGNGHITIATTRPETMLGDTAIAVHPEDKRFTDMVGKFAIIPIVEKRIPIVADEYVKMDQGSGAVKITPAHDFNDYELGKRHKLEIINIFNENAELNENCPIEYQGLDRYSAREKIISELKEKEVLSKEEENLHTVPYGDRSGEVIEPLLTNQWFVNAKRLSIEAINNVKNGNTKFIPNNWDKVYFDWMENIQPWCVSRQLIWGHQI

SEQ ID NO: 162401 - protein, 82 aa, Unknown
  Bacterial polypetide isolated from the Sargasso Sea
MELDKFFDFVKDEKNLYSQWENLGCFKPKKGGKAYSIMMPPPNVTGSLHMGHALTFTIQDILIRYYRMKGMEVLWQAGTDHA

SEQ ID NO: 162402 - protein, 270 aa, Unknown
  Bacterial polypetide isolated from the Sargasso Sea
WLENARDWAISRNRFWGTPIPVWKSEDSKVLCVGSVEELEKLTGEKINDLHKHFVDSLVIEHNGETYRRVSEVLDCWFESGSMPYAQEHYPFENKERFEENFPADFICEGLDQTRGWFYTLAVLGTALFDTPAFNNCVVNGFVLAEDGKKMSKRLKNYPDPNDMMNKYGADTVRLYMLNSPAVRGEDLRFSEKGLIETTRQLLLPLWNSLIFLTTYAKIDGWEPNPENLKVKNNNPLDRWILSRLNKLFGEVQKEMDRYDLNRSVAPFVG

SEQ ID NO: 162403 - protein, 315 aa, Unknown
  Bacterial polypetide isolated from the Sargasso Sea
MSKSKGNILDPIDLIDGVSLEELLEKRTEGMMQPQLKEKIIKQTKKQFPEGIESYGTDALRYTFYSLASPGRDINFDIGRIKGYRNFCNKIWNAFRFIEMQVANHGYQTSESSEDILSDWMGSKIHQTAQNCQTHIKQYRFDLASAEIYELIWSNFCDWYIEFSKVAIQKSDETSQINNLIGNLIANFYSILELLHPFMPFITEELSSKLADLAKVEKSGFLVEGGFEHARVSKKKTEQQLDEIINIISSLRVLRAENQNIKNETFNLIVSNDLNSEMQSVISENEEIIAGIAKLDGIEFSDKIPEESIEKTMDG

SEQ ID NO: 162404 - protein, 157 aa, Unknown
  Bacterial polypetide isolated from the Sargasso Sea
SGDQILNQLKKLGCSCDWSRNRFTMDEDLSKAVIKTFVKLYNKNIIYKDTRLVNWDTKLETAISDLEVEQKEVQSNLYYIKYKIINDDKYITIATTRPETMLGDTAVAVNPKDSRYKKYIGKKIIIPIVERKVKIIGDKYVSIEQGSGALKVTPAHD

SEQ ID NO: 162405 - protein, 147 aa, Unknown
  Bacterial polypetide isolated from the Sargasso Sea
YGADALRFTLTAMAAMGRDIKLSEQRVAGYRNFGTKLWNASRFREINGCVLSNESFDPLSCDLTINKWIIAEVSKTAQLTTNSLEAYKFDQAANSLYHFVWHTFCDWYLEFAKSVLQGDTEQDKLETRTTTAWVLNIILRLLHPIMP

SEQ ID NO: 162406 - protein, 308 aa, Unknown
  Bacterial polypetide isolated from the Sargasso Sea
LHTIQDVLVRRARMLGKNACWVPGTDHASIATEAKVVQKLREEGIKKSDLSRDEFLQHAWDWTHKHGGIILDQLKKIGASCDWDRTSFTMDEGYYKSVIKVFCDLHDKGFIYRGERMINWDPEAKTALSDEEVFHKEVNSKLYYVRYKIADSDDEWITIATTRPETILGDTAICINPVDERYQHLKGKKVIVPLINREIPVIFDDYVDVDFGTGCLKITPAHDTNDYNIGKKHNLEVINILNPNGTLNENAILHVGEDRFEVRKLIVHELHSSGYLVKEEDHINKIGFSERTDAIIEPRLSLQWFCSM

SEQ ID NO: 162407 - protein, 94 aa, Unknown
  Bacterial polypetide isolated from the Sargasso Sea
MQLNKFFDFLNDEKHLYSQWEKSNCFKPKKGGQPYSIMMPPPNVTGSLHMGHALTFTIQDILIRYHRMKGMEVLWQDRYRSCRNSYSDGGRKKT

SEQ ID NO: 162408 - protein, 281 aa, Unknown
  Bacterial polypetide isolated from the Sargasso Sea
DKFIKKVWEWKKESGGIILDQLKKLGCSCDWSRTRFTMDKDLSKAVIKVFVDLYKNKLIYKDRKLVNWDTKLQTAISDLEVIQKDVQSQLYFIDYQIKNSDKKITIATTRPETMMGDTAVAVNPKDKRYTNLIGKDVQIPIVNRTIKIIGDHYADPEQGSGAVKITPAHDFNDYEVGKRNKLETINIFEKNGRINKNGIKDFIGMDRFEARKLLIQKLKENGNLVKIENIKNKVPYGDRSNTIIEPLLTDQWFVDAKRLSKKPIQIVNKGRTSFFPNNWSK

SEQ ID NO: 162409 - protein, 78 aa, Unknown
  Bacterial polypetide isolated from the Sargasso Sea
MGSGKYNHKKVENRIYSYWEKNKLFKPKKNKKIFSIVIPPPNVTGSLHMGHALNNSLQDVLVRYHRMNKFETLWQPRN

SEQ ID NO: 162410 - protein, 300 aa, Unknown
  Bacterial polypetide isolated from the Sargasso Sea
DRSASRDTTFSVDTPPPTVSGSLHIGHVFSYTHTDALARYQRMKGKDVFYPMGWDDNGLPTERRVQNVFGIKCQPDLAYQEGVVLDRHHKRKPHEFIEVSRRNFIEACEILTAEDEKAFETLWRKLGLSVDWTLQYSTIDDHCRKMSQVSFLDCVKKDLVKHVEAPGMWDVDFQTAVAQAEIEDREKPGAYHHIRFAIESGGEFVIATTRPELLPACIAVVAHPEDDRFKPFFGQYAVTPLFHARVPILPSTHADPEKGTGILMVCTFGDGEDVTWWKQSGLPVKQVIGRNGCLLPVEFG

SEQ ID NO: 162411 - protein, 67 aa, Unknown
  Bacterial polypetide isolated from the Sargasso Sea
MLEKYYQPSLVEDKIYKSWENDGDFKPLKSSSDAYSIVIPPPNVTGTLHMGHALNNTLQDILVRFYR

SEQ ID NO: 162412 - protein, 68 aa, Unknown
  Bacterial polypetide isolated from the Sargasso Sea
MSSDKYIHTEVENKIYSYWEKNNLFKPKKNKKQFSIVIPPPNVTGSLHMGHALNNSIQDLLTRFHRMN

SEQ ID NO: 162413 - protein, 79 aa, Unknown
  Bacterial polypetide isolated from the Sargasso Sea
MSSEKYIHTKVENKIYSYWEKKQLFKPKKNKKKYSIVIPPPNVTGSLHMGHALNNTIQDLLIRYHRMNNYETLWQPGTD

SEQ ID NO: 162414 - protein, 64 aa, Unknown
  Bacterial polypetide isolated from the Sargasso Sea
MNNYETLWQPGTDHAGIATQALVEKKLTSEKIDKNEIGREKFIEKVWEWKDQYGDIIINQLKKL

SEQ ID NO: 162415 - protein, 78 aa, Unknown
  Bacterial polypetide isolated from the Sargasso Sea
MISDKYIHSKVEDKIYAYWEKNKLFKPQKNSKKFSIVIPPPNVTGSLHMGHALNNSIQDLLVRYYRMNNYETLWQPRN

SEQ ID NO: 162416 - protein, 284 aa, Unknown
  Bacterial polypetide isolated from the Sargasso Sea
VWEWKNASGDKIVNQIKRLGASPDWKRLKFTLDEDLSNAVNHVFINLYKDGLIYKDRRLVNWDTKLQTAISDLEVEQKEQSGNFFYIRYFLENSKQYITVATTRPETLFGDCCIAVNPKDKKYKNYIGKKVYIPLTKKLIPIIADSYVDIEKGTGALKVTPAHDFNDFKIGKRLKISFHEIFDKFGKFNDNVPAKYKGLDRLKARTVIISDLKKNANLEKIEKIIHSVPYGDRSGAIVEPYLTEQWFLDVKSLAKEAILKVKKNETEFIPKSWTKVFYSWMNQI

SEQ ID NO: 162417 - protein, 64 aa, Unknown
  Bacterial polypetide isolated from the Sargasso Sea
MEFKKYNHSKEEKKISNFWIKKGLFKPKKNKSNKKFSIVIPPPNVTGRLHMGHALNNSLQDVLV

SEQ ID NO: 162418 - protein, 193 aa, Unknown
  Bacterial polypetide isolated from the Sargasso Sea
MIRQKLEKTYSPLSVEEKWYDHWLSNDYFSADSKSKKDPYTIVIPPPNVTGMLTVGHVLNNTIQDILIRKARMEGKEACWIPGTDHASIATETKVVEMLQKKGINKKDLSREEFLKYAWDWKEKYGGIIIKQLKRLGCSCDWDRERFTMDEGYTKAVLTAFVKLYEKGLIYKGHRLVNWCPVSKSAISDEEVI

SEQ ID NO: 162419 - protein, 264 aa, Unknown
  Bacterial polypetide isolated from the Sargasso Sea
WKWKNEYGGKITNQLKKLGCSCDWSRDAFTMDKNLSKSVIKVFVELYKKKLIYKSKKLVNWDTVLKTAISDLEVDQKEVNSKLYYIKYQIENSSEFITIATTRPETMLGDTGVAVNPKDTRYTNLVGKFAVLPIVGRKIKIVQDKYADPEQGTGAVKITPAHDFNDFEVGERQKLQKINIFTDSGKINKNAPKEYVGLDRFDARKKILQKLSELGILVKEENIKNKIPFGDRSNSIIEPYLTEQWFVDAKKLSIKAKKMSKIKK

SEQ ID NO: 162420 - protein, 79 aa, Unknown
  Bacterial polypetide isolated from the Sargasso Sea
MSSDKYIHSDVENRIYSYWEKNGLFKPKENKKKFSIVIPPPNVTGSLHMGHALNNSIQDLLVRYHRMNNFETLWQPGTD

SEQ ID NO: 162421 - protein, 118 aa, Unknown
  Bacterial polypetide isolated from the Sargasso Sea
TLWQPGTDHAGIATQALVEKKLENEGIKKNELGREKFIKKVWEWKSQYGDIIINQLKKLGCSCDWSRNAFTMDENLSQSVLKVFEELYKKKLIYKSKKLVNWDTVLKTAISDLEVDQR

SEQ ID NO: 162422 - protein, 52 aa, Unknown
  Bacterial polypetide isolated from the Sargasso Sea
MSSDKYIHKDVENKIYSYWEENNLFKPKENSKKFSIVIPPPNVTGSLHMGHA

SEQ ID NO: 162423 - protein, 219 aa, Unknown
  Bacterial polypetide isolated from the Sargasso Sea
FWVARMTMMAGAFTGEMPFQDVYIHGLVRDEQNRKMSKSAGNGIDPLLLIERYGTDALRFALVREVAGAGQDIRLDYDRKTDTSATVEASRNFANKLWNATRFALMNLGGETPAQLGDPDPAALQLADRWILSRLARVNRETAERYSSYGLGEAAKGLYEFAWNDVCDWYLELSKRRLNPGENPSAEALADQRVAKQVLAKVISQMHMMLHPLMPHLTE

SEQ ID NO: 162424 - protein, 79 aa, Unknown
  Bacterial polypetide isolated from the Sargasso Sea
MSSEKYIHTEVENKIYSYWEKNNLFKPRKNSKKFSIVIPPPNVTGSLHMGHALNNSIQDLLTRYYRMNNYETLWQPGTD

SEQ ID NO: 162425 - protein, 78 aa, Unknown
  Bacterial polypetide isolated from the Sargasso Sea
MDIFNHKDYEKFWYDRWEKKGCFKSQVNTKKESYTIMMPPPNVTGSLHIGHALTFTLQDILIRYFRMKGRDVLWQPGT

SEQ ID NO: 162426 - protein, 249 aa, Unknown
  Bacterial polypetide isolated from the Sargasso Sea
TGRDIKFDIGRMEGYRNFCNKIWNASRYVLSHTEGHELYPGEASLSLADRWILSRLEATLSEVEAAYDSYRFDLASQSLYDFVWNEFCDWYLELSKPLLWDKESAAAEQLAARRTLVEVLEQSLRMLHPFMPFLTEEVWQTIAPLVGMQGDSIMLAPWPEQLPEKLDRESEEEIDWLKQIIVAIRTIRAESNIPPGTELPVFIVNTTPADEARLSRNEAYLGKLAKVSEITVCAQGEEVPTSLMTLCGD

SEQ ID NO: 162427 - protein, 86 aa, Unknown
  Bacterial polypetide isolated from the Sargasso Sea
MEFKKYNHIKEEKKISDFWIKKGLFKPKKSKSNKKFSIVIPPPNVTGRLHMGHALNNSLQDVLVRFNGMKGLETLWQPGTDHAGMQ

SEQ ID NO: 162428 - protein, 291 aa, Unknown
  Bacterial polypetide isolated from the Sargasso Sea
HAGIATQAVVENNPLKEGIKKNDLGREKFIKKIWDWKEESGGIILDQLKKLGCSCDWSRTRFTMDKDLSKAVIKVFVDLYKNKLIYKDKKLVNWDTKLQTAISDLEVNQKDVQSQLYYIDYIIENSDQKITIATTRPETMMGDTAVAVNPNDERYVNLVGKKVFIPIVNRTVKIISDNYADPEQGSGAVKITPAHDFNDYEVGKRNKLEIINIFEKNGKINKNGIKEFHGLDRFEARKLIIKKLKDMGSLVKTENIKNKIPYGDRSNTIIEPLFTEQWFVDAKNYPKNQLI

SEQ ID NO: 162429 - protein, 59 aa, Unknown
  Bacterial polypetide isolated from the Sargasso Sea
MDNNFNSSQIEQELYKIWEEENFFAPADRNNQKNFCVLIPPPNITGTLHMGHAFNHTLI

SEQ ID NO: 162430 - protein, 246 aa, Unknown
  Bacterial polypetide isolated from the Sargasso Sea
VPGTDHASIATEAKVVKMLRDQGITKSDISREKFLDHAWEWTNKHGGLILNQLKRIGCSCDWTRTKFTLDEDLSDSVIDTFIRLFDEGYLYRDKKIVNWDPEAKTTLSNEEVIYKEEETELYYLKYKIVGSNDYLSIATTRPETIFGDTAVAVNPNDKRYKKLKNKKLIVPIVNREIPIVFDDSVEIDFGTGCLKVTPAHSEKDFLIGKKHNLEIIDVFNDDASLNEHAMDFAGKDRFKVKKEIIE

SEQ ID NO: 162431 - protein, 56 aa, Unknown
  Bacterial polypetide isolated from the Sargasso Sea
MSFDKYEHENVENKIYDYWEKNELFKPKENSKKFSIVIPPPNVTGSLHMGHALNNS

SEQ ID NO: 162432 - protein, 241 aa, Unknown
  Bacterial polypetide isolated from the Sargasso Sea
AVVENNLLKEGIKKNDLGREKFIKKIWDWKEESGGIILDQLKKLGCSCDWSRTRFTMDKDLSKAVIKVFVDLYKKKLIYKDKKLVNWDTKLQTAISDLEVNQKDVQSQLYYIDYRIENSDQTITIATTRPETMMGDTAVAVNPKDKRYINLVGKNVVIPIVNRTVKIISDNYADPEQGSGAVKITPAHDFNDYEVGKRNKLEIINIFEENGKINKSGIKEFHGLDRFEARKLIIKKLKDIG

SEQ ID NO: 162433 - protein, 71 aa, Unknown
  Bacterial polypetide isolated from the Sargasso Sea
MSSDKYIHSEVENKIYSYWEKNNLFKPKKNKKSFSIVIPPPNVTGSLHMGHALNNSIQDLLTRFHRMNNYE

SEQ ID NO: 162434 - protein, 69 aa, Unknown
  Bacterial polypetide isolated from the Sargasso Sea
MISDKYIHSKVEDKIYSYWEKNKLFKPKKNSKKFSIVIPPPNVTGSLHMGHALNNSIQDLLVRYYRMNN

SEQ ID NO: 162435 - protein, 126 aa, Unknown
  Bacterial polypetide isolated from the Sargasso Sea
MLEDSYEPLSIEQKWQSEWELKNQFKPVESDKQFSIVIPPPNVTGSLHMGHALEHSIIDVIVRIKRLQGFETLWVPGTDHAGIITQLLVENELSEKGLSKEDVGRENFISKVWEWKEKSGENISGQ

SEQ ID NO: 162436 - protein, 322 aa, Unknown
  Bacterial polypetide isolated from the Sargasso Sea
EKNTGKKMKTYDRAEFLELCKETMKEFTQSMRDTAKRVGLSMDFANEYLTDAPNYRMVTQAIFTELFKKGEIVEDLRPNIYDPVEGTTIADAEVERLQRKTRLVDVKWKTESGDEVVISTTRPELICACGIVVVHPDDERYKHLIGQKINLPLPVSERENFVEIATHPSVKSEFGSGVLMVCSFGDQNDVSIFRELGLNPFQAIDLEGCMTEVAGPFAGMKVKDARDAVIAHLESENLIAQIVEKEQEVPVSERGKNPVEIILLKEWYVRQTHIQDRMKELIEEVDFHPVRNKQFLIDWMDNISIDWPISRRRWYHTEIPIW

SEQ ID NO: 162437 - protein, 78 aa, Unknown
  Bacterial polypetide isolated from the Sargasso Sea
MSLDKYIHSDVEDKIYTYWEKNNLFKPKKNKKKFSIVIPPPNVTGSLHMGHALNNSIQDLLTRYYRMNNYETLWQLWN

SEQ ID NO: 162438 - protein, 285 aa, Unknown
  Bacterial polypetide isolated from the Sargasso Sea
DYSEEKITSQIKRLGCSVDWNKYRFTLDDGCNEAVIKAFVELHRKNKIYRGYRLVNWDPSLKIAVSDLEVIRQEKDGLLWHIKYPIEDSKNFVIVATTRPETMFGDMAIAVNPDDDRYKNLIGKNVVLPFVGRKIPILADEYVDMEFGTGCLKITPGHDFNDYEIGKKYSLHEVDGQVKTSDAASDFEPINIFNEDAWSNENVPEPFSNLDRFKVRKAVLEKLKELNLLEKEEKYHISVPRGERSNIVIEPRLSHQWYVKTEEMAARANDAVNKRRYKIPSWKLG

SEQ ID NO: 162439 - protein, 87 aa, Unknown
  Bacterial polypetide isolated from the Sargasso Sea
MLEKYYQPSLVEDKIYKTWENDGDFKPLESSSDAYSIVIPPPNVTGTLHMGHALNNTLQDILVRFYRMQGKSVLWQPWYRPMLVSRQ

SEQ ID NO: 162440 - protein, 278 aa, Unknown
  Bacterial polypetide isolated from the Sargasso Sea
LSALVEKKLEKENLNKNALGRKRFIEKVWQWKKEYGDIIINQLKKLGCSCDWSRNAFTMDENLSKSVIKVFVELHKKKLIYKAEKLVNWDTVLKTAISDLEVDQREMNSKIYYIRYPIENSSEFITIATTRPETMLGDTAIAVNPKDKRYKTFVGKTVTIPIVGRKIKIIKDNYADPEQGTGALKITPAHDFNDYEVGQRNKLDIINVFTEEGKINDNAPQDYVGLDRFDARKKLLEELKEKDFFVKEENIKNKVPYGDRSNSVIEPFLTEQWFVNAK

SEQ ID NO: 162441 - protein, 309 aa, Unknown
  Bacterial polypetide isolated from the Sargasso Sea
KENQNKNTLGREKFIEKVWDWKNQYGDIIINQLKKLGCSCDWSRNAFTMDENLSKSVIKVFVELHKKKLIYKAEKLVNWDTVLKTAISDLEVDQREMNSKIYYIRYPIDKSSEFITIATTRPETMLGDTAIAVNPKDKRYKSFVGKTVTIPIVGRKIKIIKDNYADPEQGTGALKITPAHDFNDYDVGQRNKLEIINVFTEEGKINENAPKEYVGLDRFDARKKILNELKEKDYFVKEENIKNKVPYGDRSNSVIEPFLTEQWFVDAKKLAIKAKKIVKTKKTNFFPNNWSKTYFQWMNNIEPWCVSRQ

SEQ ID NO: 162442 - protein, 305 aa, Unknown
  Bacterial polypetide isolated from the Sargasso Sea
NPEINYYYPTQDLITGPDILFFWVARMIISGYELREQHPFSNVYLTGLVRDKLGRKMSKQLGNSPDALSLIDNYGADAVRVGLMLSSAAGNDLLFDESLCQQGKNFSNKIWNAFRLIDGFEVVETQTIPTLNASAIKWYQSMFAQTLLKVEDHFNKYRISDALMALYKLIWDDFCSWFLEMIKPSYGQPIDRGTLIAVKFLLEDNLKLLHPFMPFITEELWHFIRTRKKKDSLIISPWPKVQEVDEQLIKDFDMVKQIIAGIRKFRKEKNIGQKEQLILITEGAVPYVEVIQKLGQIQKVKGCSC

SEQ ID NO: 162443 - protein, 281 aa, Unknown
  Bacterial polypetide isolated from the Sargasso Sea
MSKSKGNVIDPLELIESYSADALRFTLLSMASPGRDVKLSEQRVKGYRNFLTKIWNANNFLKVNKCEFNSKINHKKLSLNLNKWIYSELIRTKNSAEKHIKDYRFDEATRIIYRFVWNSYCDWYLELSKTILFSKNKKHIKEVKVTSGFVFKEILILLHPFIPFITEELWLKNKLGNKKEKYLMYSNWIKDSKAQKDKDIVDVNQVIDVISKIRSFKNELNISPGSFIDVSIQSVSKKKQNLFLNNEIMLKKLGRINSIFAKDSANQSATLVISGEVFKIY

SEQ ID NO: 162444 - protein, 271 aa, Unknown
  Bacterial polypetide isolated from the Sargasso Sea
DRWILSRLARVNHETANRYENYALGEAAKGLYEFAWNDFCDWYLELIKRRLNNSENLSSDELFDRKIAKSVLYKVLSDLLIMLHPLMPHLTEELWHGLTGLEEDQFLALQPWPKSNEQDLNLDLESSFSDLFASIRLIRNLRAVAGLKPSQKVPVMLVSGKEVLQKTLTTSINDIAVLTKAKEVQILSPEQAKSLPSMKALAGVSGELEVVLPIEGLIDIASLRSRLEKDLNKAQKEIESLSGRLANKNFVDKAPKEVVEECRTNLTESEA

SEQ ID NO: 162445 - protein, 262 aa, Unknown
  Bacterial polypetide isolated from the Sargasso Sea
WFSSWLWPFAVHGWPDIKTTKYFPTNALVTGPDIIFFWVARMIMSGYEFMGDLPFKDVYFTSILRDEKGRKLSKSLGNSPDPITLFEKYGTDATRFSIMLMSPQGSDVYFSEHGIEVGRNFMTKMWNASRFIILNHEDSFADEIDIEALDNFDKWILDSLDETVNEVNKYFDKYQFNEAIKKIYDFTWNEFCNWYIEIVKHRFREGDITSKSNSFNISKKIIKKVLLLLHPIAPFVSEEIWNHLKDTNEEDIIISSWPKAKN

SEQ ID NO: 162446 - protein, 81 aa, Unknown
  Bacterial polypetide isolated from the Sargasso Sea
MSLDKYNHLEVENRIYSYWEKNNLFKPKKNKKKFSIVIPPPNVTGSLHMGHALNNSIQDLLTRFYRMNNYETLWQPGTDHA

SEQ ID NO: 162447 - protein, 68 aa, Unknown
  Bacterial polypetide isolated from the Sargasso Sea
MLDKRFNFSEIEAKCLDHWSENQIFSFNNDENKKPFCIMMPPPNVTGSLHMGHALTFTLQDILIRFHK

SEQ ID NO: 162448 - protein, 66 aa, Unknown
  Bacterial polypetide isolated from the Sargasso Sea
MSSEKYIHSDVENRIYSYWEKNGLFKPRENSKKFSIVIPPPNVTGSLHMGHALHNSIQDLLIRYHR

SEQ ID NO: 162449 - protein, 182 aa, Unknown
  Bacterial polypetide isolated from the Sargasso Sea
MSKEINKIYNPTDVEEKWYSKWEESSAFEPSGDSENPFTVMIPPPNVTGILHIGHMLNNTIQDVLVRRARMMGKNTLWLPGTDHASIATESKVTKMLSDKGIDKYDIGRDEFLKHSMEWKEKYGGTILKQLKKMGASCDWSKTAFTMDPNYSKAVLEAFVKLYNDGLIYRGKRMVNWDPSGL

SEQ ID NO: 162450 - protein, 63 aa, Unknown
  Bacterial polypetide isolated from the Sargasso Sea
MDKRFDSKSIEDKWYKIWLDSGAFSSNSSSTKKPYVIMMPPPNVTGSLHIGHALTFTIQEYIN

SEQ ID NO: 162451 - protein, 110 aa, Unknown
  Bacterial polypetide isolated from the Sargasso Sea
MKLLDKKHNPSDIENKWYKHWLEKQYFSSQESDNHYTIVIPPPNVTGKLHMGHVLNNTIQDILIRKARMQGKNACWIPGTDHASIATESKVTKMLQEKGINKKDLTREEF

SEQ ID NO: 162452 - protein, 106 aa, Unknown
  Bacterial polypetide isolated from the Sargasso Sea
MLENQFDHKTKEKEWYNIWESSGAFSAIPDSAKKPYTIMMPPPNVTGNLHIGHALTFTLQDILIRFKRKLGFDVLWATRNGPCRNSNTNGSRKKFIERRNIKNRFR

SEQ ID NO: 162453 - protein, 103 aa, Unknown
  Bacterial polypetide isolated from the Sargasso Sea
MLEDSYEPLSIEQKWQSEWELKNQFKPVESDKQFSIVIPPPNVTGSLHMGHALEHSIIDVIVRIKRLQGFETLWVPGTDHAGIITQLLVENELSEKRSFKRRC

SEQ ID NO: 162454 - protein, 72 aa, Unknown
  Bacterial polypetide isolated from the Sargasso Sea
MSLDKYIHSEVENKIYSYWEKNNLFKPKKNKKSFSIVIPPPNVTGSLHMGHALNNSIQDLLTRFHRMNNYET

SEQ ID NO: 162455 - protein, 70 aa, Unknown
  Bacterial polypetide isolated from the Sargasso Sea
MDEFQNKKEYENEIYQLWLDKECFKPKYNFDKNFSICIPPPNVTGSLHMGHALNNTIQDILTKISPYEWL

SEQ ID NO: 162456 - protein, 423 aa, Unknown
  Bacterial polypetide isolated from the Sargasso Sea
LALGVHSWPDEDENLKKFYPTDTLVTGPDIIFFWVARMIITGFEFKAEVPFKDVYFTSILRDETGKKLSKSLGNSPDPFDLFDEFGTDAVRFGTMLMAPQGLDVLFSKERLEVGRNFMNKLWNACRFIQLNLGEQWDSEVHLDYENTDLELPERWIISRLSNMIQDYNNQLDRFHFNEAAKDLYEFTWNDLCDWYLEIAKNRFYGEDKSKADIARVVAIECIRTVLTLLHPYSPFITEELWSHFKPDGSSDLIIMPWIKNGSIQDKDAEDNMDILKEVITSIRSIRSRMNVAPSTRCDLVVRCNDDQKLFIDEHTNLIQALAGVNNISTGKGLDKPSQSATAVSAGMELYIPLKGLVDLEGEKTRMEKRILEIDRLLTSINAKLSNQNFLQRAPEPVIEKERSNLKKLNQELEKVTANLEVLK

SEQ ID NO: 162457 - protein, 332 aa, Unknown
  Bacterial polypetide isolated from the Sargasso Sea
QTRSKTVLARLELLAQMAQDGRHVELPLLGRAIPLITDEWAKPEMGSGCVKITPAHDPNDYDVGIRHQLPMINILHSDGTLNTAAGPYEGLPMNKARTRVVNDLETAGLLLEVEDRVIELAHSDRSKTPIEPFLADQWFISMADLAEPALKVVREKRIQIHPERYAKSYLDWLGEKRDWPVSRQLWWGHQIPIWHVSNITREELENTFSNDPAVAWTPDQEESDDPHPNGWFVCSANESLGVDAINGNPLVRDPDVLDTWFSSALWPHSTLGWPTETELLKHFYPTSTLVTSRDIITLWVARMVILGIFNTGEIQFHHVSIHPKILDRYGET

SEQ ID NO: 162458 - protein, 270 aa, Unknown
  Bacterial polypetide isolated from the Sargasso Sea
DSDDHHPRGWFVCSANENLGVDAINGKPLVRDPDVLDTWFSSALWPHSTLGWPEETDLLKRCYPTSTLVTSRDIITLWVARMVILGIFNTGEIPFHNVSIHPKILDRYGETMSKSKGNGVDPLDVISLLGADALRFGMATMATETQDVRMPVEFQCPTCTARIDQTTQNRTKPRITCPKCNQAFRTQWATNEADLALPRGAAVSERFEAGRNFSNKLWNATRFVLMHLQDSGLSAGLPKLDTITEFPLEDRWLLSRLSTVFSPRFLATSN

SEQ ID NO: 162459 - protein, 326 aa, Unknown
  Bacterial polypetide isolated from the Sargasso Sea
VCGLFQPFGWPNINDPDFKKWYPNSVLVTGFDIIFFWVARMTMMGNTFTKNIPFRDVYIHGLVRDENNKKMSKSSGNGIDPILLIDKYGSDALRFALIREVAGAGQDIRLDFDRKKDTSSTVEASRNFANKLWNATKFVLINKTSNNNYSLNESDETSLELCDKWILSKLNQVNIKVAALLTEYKLGESAKLLYEFTWNDFCDWYVEFAKQRFNNKETKNRQISEKVLIKVLNDILVMIHPFMPHITEELWHVLQLKPDNALLSLQKWPIHENKFVDNKLDNSFQQLFEIIRLIRNLRAELGLKPSEKSPVYLISDNDELIDFLKT

SEQ ID NO: 162460 - protein, 126 aa, Unknown
  Bacterial polypetide isolated from the Sargasso Sea
MDKNFNPRKREHGIFEKWEENSAFRAGANAKPNAESYCIMIPPPNVTGSLHMGHAFNNTIQDILVRWHRMRGFDTLWQPGQDHAGIATQMVVERKLADNSEPSREELGREAFLRKVWEWKEQSGDT

SEQ ID NO: 162461 - protein, 285 aa, Unknown
  Bacterial polypetide isolated from the Sargasso Sea
KKLLSEGIDKNEIGREKFIEKVWEWKNQYGDIIINQLKKLGCSCDWSRNAFTMDENLSKSVIKVFVELYKKKLIYKAEKLVNWDTVLKTAISDLEVDQREVNSIMYHIKYPIDGTNDFITIATTRPETMLGDTAIAVNSKDDRYKNLIGKVAIIPIVDRKIKIIADDYADPEQGTGALKITPAHDFNDYEVGKRNNLEIINIFTENGKINNNAPSHYIGLDRFEARKKLLKELKEKDFFVKEENIKNNVPYGDRSNSIIEPFLTEQWFVDAEKLSIKAKDVVNTK

SEQ ID NO: 162462 - protein, 247 aa, Unknown
  Bacterial polypetide isolated from the Sargasso Sea
MSTSKLDKVYNPVNIEEKWYQYWLENNYFKSKPDPNKEPYTIVIPPPNVTGMLTMGHVLNNTIQDILIRKARMEGKEACWIPGTDHASIATEAKVVQMLQDKGIKKESLSRDEFLKYSWEWKEKYGGIIIQQLKRLGCSCDWDRERFTMDDDYTNSVLEAFVVLYNKGLIYKGFRLVNWCPVSKSAISDEEVIHQEVNGHLWHFRYPIKNSDEVLIVATTRPETMLGDTAVAVHPKDKRFKHLIGKT

SEQ ID NO: 162463 - protein, 154 aa, Unknown
  Bacterial polypetide isolated from the Sargasso Sea
MDAKYFPIEIEEKWSKVWAERELNKPESEQNFSQIIPPPNVTGTLHMGHSFQYAIMDFYTRYHHMNGANSYWQVGTDHAGIATQMVVENNLVNEGKDKNDLGREKFLKEVWKWKDYSEEKITSQIKRLGCTVEWDKYRFTFDDDFCEAVNKAFV

SEQ ID NO: 162464 - protein, 325 aa, Unknown
  Bacterial polypetide isolated from the Sargasso Sea
ALVRDEKGQKMSKSKGNVIDPLELIEKYSADALRFTLLSMASPGRDVKLSEDRVKGYRNFLNKVWNANNFLRQNECDFSDIKKPENLKLTINKWILSELVKVKNDTENSLKNYRFDEAAKNIYQFVWHSFCDWYLELSKTVFNSNNEEETKELRQTSSYVFREILIILHPFIPFVTEEIWLNNKLDKNGNEFLMHANWLENDYHEKKSYDEINNIINFITSIRSFKNELNISPGSFIEISTENTNKEYKNFLSANENILKKNGRIKSFHDNDLKKSSASIVINGELFKLYFDEDVDLNMIKSTLEKKIKKISEEMKKIDVRLSNK

SEQ ID NO: 162465 - protein, 162 aa, Unknown
  Bacterial polypetide isolated from the Sargasso Sea
MDKRYKPLIIEEKWSELWAKNNLGKNNSSQTFSQVIPPPNVTGTLHMGHSFQYSIMDFYARYNHLNDLNTHWQIGTDHAGIATQMVVENNLSRENIDKNDLGREDFVKKVWEWKEFSENKITGQIKRLGNSVDWSNYRFTLDEGFNEAVLKAFVELYRKEKI

SEQ ID NO: 162466 - protein, 117 aa, Unknown
  Bacterial polypetide isolated from the Sargasso Sea
MSNDKYNHLVVEDKIYKYWENHKLFKPKKNKKKFSIVIPPPNVTGSLHMGHALNNSIQDLLTRYHRMNNYETLWQPGTDHAGIATQALVEKKLEKEGINKNDIGREEFIKKVWEWKG

SEQ ID NO: 162467 - protein, 144 aa, Unknown
  Bacterial polypetide isolated from the Sargasso Sea
MLEKYYQPSLVEDKIYKTWENDGDFKPLESSSDAYSIVIPPPNVTGTLHMGHALNNTLQDILVRFFRMQGKSVLWQPGTDHAGIATEMVVERELKKRDINKKDLSREQFIEYVWEWKNQSGNEIINQLKRLGCSCDWSREKVYS

SEQ ID NO: 162468 - protein, 121 aa, Unknown
  Bacterial polypetide isolated from the Sargasso Sea
MQLDKFFDFLKDEKDLYSQWEQSNCFKPKKGGEPYSIMMPPPNVTGSLHMGHALTFTIQDILIRYHRMKGMEVLWQAGTDHAGIATQMVVERKLSDSNLDRRSLGREKFIEKVWEWKKESG

SEQ ID NO: 162469 - protein, 297 aa, Unknown
  Bacterial polypetide isolated from the Sargasso Sea
TLGWPNKTKYLKKFYPTTVLVTGFDIIFFWVARMIMFGMEFMKKEPFKDIYVHALVRDEKGQKMSKSKGNVIDPLELIEKYSADALRFTLLSMASPGRDVKLSEDRVKGYRNFLNKLWNANNFLIMNKCNFNKSSKLPKLTLNINKWIYAELLEVKNKVEKHIKDYRFDEASRNAYQFVWHSYCDWYVELSKTILNSNNQKDIKEVKTVSSYIFKQILILMHPFIPFITEEIWLKNKLDDKKKNYLMLANWPKDKSKKDESYKEVKKIINMISEIRSFKNELNVNPGSFIDVSIEKI

SEQ ID NO: 162470 - protein, 286 aa, Unknown
  Bacterial polypetide isolated from the Sargasso Sea
ISFFSWVARMIMFGMEFLNKEPFKDIYVHALVRDEKGQKMSKSKGNVIDPLDLIEKYSADALRFTLLSMASPGTDVKLSEDRVKGYRNFLNKLWNANNFLITNNCDFNKTDKVPKTSLNINKWIYSEMIEIKDKIQKNIKDYRFDEAAKNAYQFAWHSYCDWYIELSKTILYSDDKKSKNEVKEVSAYVFKQILIMLHPFIPFVTEEIWLKNKFDKSNKNFLMYKNWPSGKIKKDKSQKDVEKIINIISELRSFKNELNVSPGSFVDLSMNKIAKKNRSLMDNNEI

SEQ ID NO: 162471 - protein, 222 aa, Unknown
  Bacterial polypetide isolated from the Sargasso Sea
KRDLGRKDFLEKVWEWKKESGGNISRQLRRLGASADWKRERFTMDSGLSEAVRKVFVQLHKEGIIYRDKRLVNWDPMLQTAISDLEVEQREETKGSLWYFRYQCASDVNNYIVVATTRPETMFGDAAVAVHPNDKRWVNLIGKKVILPLTGRQIPVIADEYADPDQGSGAVKITPAHDFNDFEVGKRHSLEMLNIFDSKANLNDAVPEEYRGLERFAARKKV

SEQ ID NO: 162472 - protein, 288 aa, Unknown
  Bacterial polypetide isolated from the Sargasso Sea
SAAVISTFIKLFNKGLIYWGFRMVNWDPEAKSTLSDEEVIYQEREGQLYHIAYRVVNSEEKVIIATTRPETLFGDTAVCVNPHDERFSHLKGKKLIVPISNRKIPIIMDEYVDMEFGSGCLKVTPAHDINDKVLGEKHDLAIINIFNEDATLNHYCLSFEGLDRFIARKKIAKVLEESGELVKKENYSHKIGTSERTKAIIEPRLSDQWFLKMEDLAKPAIDAVLKSDNIRLVPEKFKNTYRNWMENIRDWNISRQLWWGQQIPAYYFSNDKSEFVVAKDIESALYKA

SEQ ID NO: 162473 - protein, 87 aa, Unknown
  Bacterial polypetide isolated from the Sargasso Sea
MEFKKYNHSKEEKKISDFWIKNDLFKPKKNKSNKKFSIVIPPPNVTGRLHMGHALNNSLQDVLVRFNRMKGLETLWQPGTDHAGIAT

SEQ ID NO: 162474 - protein, 185 aa, Unknown
  Bacterial polypetide isolated from the Sargasso Sea
MKKNYEPKGIEKKIYDKWESSGYFTAIPDEKKEPFCIMIPPPNVTGTLHMGHGFQNTLMDSLIRRKRMSGFDVLWQVGVDHAGIATQMVVERQLESEGKTKESIGRDAFEKRVWEWKEKSGGKITQQLRRLGASVDWSREAFTMSEDLSLAVKEVFVSLFDEGLIYRGERLVNWDVVLQTALSDL

SEQ ID NO: 162475 - protein, 317 aa, Unknown
  Bacterial polypetide isolated from the Sargasso Sea
VWSWKNHSEKKIISQIKRLGCSVDWSKYRFTLDDGCNEAVIKAFVELHRKNKIYRGYRLVNWDPSLKTAVSDLEVIRQEKDGLLWYIKYPIEDSKDFVIVATTRPETMFGDMAVAVNPNDDRYKNLIGKNVNLPFVDRKIPILADEYVDMEFGTGCLKITPGHDFNDYEIGKKYSLHEEDGQVRTSNLASDFEPINIFNEDAWSNENVPEPFSNLDRFKVRKVVLEKLKELNLLEKEEKHHISVPRGERSNIVIEPRLSHQWYVKTDEMAARANDAVNKGEIRFHPGNWGKTYFNWMNNIEDWCISRQIWVGSQKYP

SEQ ID NO: 162476 - protein, 158 aa, Unknown
  Bacterial polypetide isolated from the Sargasso Sea
MSSEKYTHSKVENKIYSYWEKKGLFKPKKNKKKYSIVIPPPNVTGSLHMGHALNNTIQDLLIRFHRMNNFETLWQPGTDHAGIATQALVERKLESENIDKQSIGREAFIKKVWDWKKEYGDIIINQLKKLGCSCDWSRNAFTMDKNLSASVIKVFIDL

SEQ ID NO: 162477 - protein, 153 aa, Unknown
  Bacterial polypetide isolated from the Sargasso Sea
MTEMNDQLSLENYSPFEVEKKWQEKWESLKAFSPNPQDDGEPFCVVIPPPNVTGSLHMGHAFNTALIDVVVRFQRLLGKNVLCLPGTDHASIAVQTILEKQLKSEGKTSEDIGRDEFLKRAWNWKEQSGGRIVSQLKRIGYSVDWTRERFTLD

SEQ ID NO: 162478 - protein, 297 aa, Unknown
  Bacterial polypetide isolated from the Sargasso Sea
KNVLCLPGTDHASIAVQTILEKQLKSEGKTSVDIGRDEFLKRAWNWKEQSGGRIVSQLKRIGYSVDWTRERFTLDQKLNEAVIEAFNILYKKNLIYRGEYLVNWCPESQSAVSDLEVEMQEVNGHLWHFKYPLISESGEYLDKYLEIATTRPETLLGDTAVAVNPDDDRYKEFIGHKVKVPFVDREIPIIADSHVDKDFGTGCVKVTPAHDPNDFAIGKRHNLKQINVMNKDGTLNINAGIFQNLDRYDARKKIIKELDNLGLLTKIEDYKHTVPFSDRGKVPIEPLLSTPVVFENG

SEQ ID NO: 162479 - protein, 73 aa, Unknown
  Bacterial polypetide isolated from the Sargasso Sea
MTEMNDQLSLENYSPFEVEKKWQEKWESLKAFSPNPEDDGEPFCVVIPPPNVTGSLHMGHAFNTALIDVVVRF

SEQ ID NO: 162480 - protein, 125 aa, Unknown
  Bacterial polypetide isolated from the Sargasso Sea
MKKNFDPSEIETKWYKFWEESNFFKAQPESKKEPFCIMIPPPNVTGTLHMGHGFQNALIDTLIRYKRMNGYDALWQVGTDHAGIATQMVVERQLELEGTTKEDLGREEFIKRVWDWKESSGNTIT

SEQ ID NO: 162481 - protein, 152 aa, Unknown
  Bacterial polypetide isolated from the Sargasso Sea
MSTDKYIHSDVENKIYSYWENNKLFQPKENTNKFSIVIPPPNVTGSLHMGHALNNSIQDLLVRFHRMNNYETLWQPGTDHAGIATQALVERKLEKDGIKKNDLGRDKFIKKVWEWKNEYGDIIINQLKKLGCSCDWSRNAFTMDENLSKSVL

SEQ ID NO: 162482 - protein, 254 aa, Unknown
  Bacterial polypetide isolated from the Sargasso Sea
MGHALNNSIQDVLTRFHRMNNYETLWQPGTDHAGIATQALVEKKLTKEGVKKNDLGREKFIEKVWEWKNEYGDIIINQLKKLGCSCDWSRNAFTMDENLSKSVIKVFVDLYNKKLIYKAKKLVNWDVVLKTAISDLEVDQREVNSQLYYINYPIENSDKFVTIATTRPETMLGDTAIAVNPKDDRFKDIVGKLVTIPLANRKIKVITDDYADPEQGTGAVKITPAHDFNDYDVGIRNKLEVINIFTPDGKINDN

SEQ ID NO: 162483 - protein, 268 aa, Unknown
  Bacterial polypetide isolated from the Sargasso Sea
WSRNAFTMDANLSKSVIKVFVDLHKKKLIYKSTKLVNWDTVLKTAISDLEVDQREVNSKLYYIKYQIENSSDYITIATTRPETMLGDTAIAVNPKDERYTSIVGKFAILPIVGRKLKIVYDNYADPEQGTGAVKITPAHDFNDFEVGKRHRLKTINIFTDDGKINKNSPAEYIGLDRFEARKKILQELTNLELLIKEENIKNKIPYGDRSNSIIEPYLTEQWFVDAKKLSVKAKNIVKNKKTNFFPENWSKTYFQWMNNIEPWCISRQ

SEQ ID NO: 162484 - protein, 160 aa, Unknown
  Bacterial polypetide isolated from the Sargasso Sea
MKFKKYNHLKEEKKVSDFWIKKGSFKPKKGKSKKTFSIVIPPPNITGKLHMGHALNNSLQDVLVRFNRMKGLETLWQPGTDHAGIATQAIVEKNLENKGIKKNDLGREKFIKKVWKWKEQSGGIILEQLKKLGCSCDWSRTRFTMDEDLSNAVIKVFVEL

SEQ ID NO: 162485 - protein, 127 aa, Unknown
  Bacterial polypetide isolated from the Sargasso Sea
MSSDKYIHSDVENRIYSYWEKNGLFKPKENSKKFSIVIPPPNVTGSLHMGHALNNSIQDLLVRYHRMNNFETLWQPGTDHAGIATQALVEKKLSSEKIDKNKIGREKFIEKVWEWKEQYGDIIINQL

SEQ ID NO: 162486 - protein, 104 aa, Unknown
  Bacterial polypetide isolated from the Sargasso Sea
MSSDKYNHNEVENRIYSYWVKNELFKPKKNKKKFSIVIPPPNVTGSLHMGHALNNSIQDLLTRYHRMNSYETLWQPGTDHAGIATQALVEKKLENEGIAKNDLG

SEQ ID NO: 162487 - protein, 118 aa, Unknown
  Bacterial polypetide isolated from the Sargasso Sea
MSADKYIHTDVENKIYSYWEKNKLFEPKQNTSKFSIVIPPPNVTGSLHMGHALNNSIQDLLVRFHRMNNFETLWQPGTDHAGIATQALVEKKLEKDGIKKNDLGRDKFIEKVWQWKKE

SEQ ID NO: 162488 - protein, 103 aa, Unknown
  Bacterial polypetide isolated from the Sargasso Sea
MSFDKYEHNNVENKIYDYWEKNELFKPKKNTKKFSIVIPPPNVTGSLHMGHALNNSIQDVLIRFHRMNNYETLWQPGTDHAGIATQALVEKKLAKDGIKKNDL

SEQ ID NO: 162489 - protein, 228 aa, Unknown
  Bacterial polypetide isolated from the Sargasso Sea
TGFDIIFFWVARMMMFGMEFLNKQPFKEIYVHALVRDEKGQKMSKSKGNVIDPLILIDKYSADALRFTLLSMASPGRDVKLSEDRVKGYRNFLNKLWNANNFLAMNKCDFSKSKKEPRVKLNINKWIISELNTVSKQVEKNINNYRFDEAARNVYQFVWHSYCDWYVELSKTILNSKEKSSILEVKQTLSYVFKQILILLHPFIPFITEELWLKNKLDKPKNNYLMFA

SEQ ID NO: 162490 - protein, 95 aa, Unknown
  Bacterial polypetide isolated from the Sargasso Sea
MTQLASSYDPATFETDLYDGWEKAGHFKPSGKGKPYTILLPPPNVTGTLHMGHAFQQTLMDALVRYHRMRGYDTLWQVGTDHAGIATEMVVSRNL

SEQ ID NO: 162491 - protein, 92 aa, Unknown
  Bacterial polypetide isolated from the Sargasso Sea
MSSDKYNHNEVENRIYSYWVKNELFKPKKNKKKFSIVIPPPNVTGSLHMGHALNNSIQDLLTRFHRMNNYETLWQPGTDHAGIATQALVEKN

SEQ ID NO: 162492 - protein, 141 aa, Unknown
  Bacterial polypetide isolated from the Sargasso Sea
MISDKYIHSKVEDRIYTYWEKNKLFKPKKNSKKYSIVIPPPNVTGSLHMGHALNNSIQDFLVRYYRMNNYETLWQPGTDHAGIATQALVEKKLEKESLTKATLGREKFIEKVWEWKNEYGDIIINQLKKLGCSCDWSRNAF

SEQ ID NO: 162493 - protein, 143 aa, Unknown
  Bacterial polypetide isolated from the Sargasso Sea
VAERFTMDEGLSKAVLKVFVDLYKKGLIYKDQRLVNWDPKLHTAVSDLQVVQKSIDGNLWYFRYPIEDQPDRFVTVATTRPETMLGDTGVAVHPDDKRYFDLVGKNVVLPLVGRTIKIVADEYADPEQGSGAVKITPAHDFND

SEQ ID NO: 162494 - protein, 229 aa, Unknown
  Bacterial polypetide isolated from the Sargasso Sea
MKKTFSPKSIEQKWYEEWETSGYFNANPKSKKPSFCIMIPPPNVTGSLHMGHGFQNTLMDALIRHKRMSGYDALWQVGTDHAGIVTQIVVEREIEKEGLTREGLGREKFIDKVWKWKNKSGNNITNQLRRLGASVDWSREAFTMSPEMSIAVQEVFIRLYDQGLIYRGKRMVNWDIVLQTALSDLEVSNEEGNGNLWFFKYPLTDKGHITIATTRPETMLGDTAVAVNP

SEQ ID NO: 162495 - protein, 89 aa, Unknown
  Bacterial polypetide isolated from the Sargasso Sea
MSSDKYIHENVENKIYSYWEEKNLFKPKSNKKQFSIVIPPPNVTGSLHMGHALNNSIQDLLTRFHRMNNFETLWQPGTDHAGIATQALV

SEQ ID NO: 162496 - protein, 285 aa, Unknown
  Bacterial polypetide isolated from the Sargasso Sea
TQWFVKMKDLSKPALESVLNNEIKFHPKKYVNTYKYWMDNVRDWNISRQLYWGHRIPVYYLKNDSSKYVVAKNIEEAVLNFKNKGINITIDNIVQDNDVLDTWFSSWLWPITVFDGVRNPNNEEINYYYPTSTVVTGPDIIFFWIARMVVSGYMLKDQKPFENVYFTGIVRDNQRRKMSKQLGNSPDPIELINKYGADSVRIGLLFSAPAGNDLLFDDNLCVQGRNFSNKIWNAYRLIEGFNISESNSISDHCEKALLWFENRLQSTLKEINFCFEKFRISDALM

SEQ ID NO: 162497 - protein, 94 aa, Unknown
  Bacterial polypetide isolated from the Sargasso Sea
MKKYNHKKVENQIYKLWEKKNCFKPIKNTKKKKFIIVIPPPNVTGKLHMGHALNNSIQDLLVRFNRNRGVETLWQPGTDHAGIATQLVVEKKLL

SEQ ID NO: 162498 - protein, 97 aa, Unknown
  Bacterial polypetide isolated from the Sargasso Sea
MSSEKYIHSDVENRIYSYWEKNGLFKPRENSKKFSIVIPPPNVTGSLHMGHALNNSIQDLLIRYHRMNNYETLWQPGTDHAGIATQALVEKNYLQKK

SEQ ID NO: 162499 - protein, 134 aa, Unknown
  Bacterial polypetide isolated from the Sargasso Sea
MSNDKYIHSEVENKIYSYWEKNGLFKPKENSKKFSIVIPPPNVTGSLHMGHALNNSIQDLLVRYHRMNNFETLWQPGTDHAGIATQALVEKKLTSEKIDKNKIGRDKFIEKVWEWKEQYGDIIINQLKKLGCSC

SEQ ID NO: 162500 - protein, 244 aa, Unknown
  Bacterial polypetide isolated from the Sargasso Sea
MGHVLNNTIQDILIRKARMEGKNTCWIPGTDHASIATEAKVVSMLKEKGIDKNDLTREEFLNHAWEWKDKYGGIIIKQLKTLGCSCDWDRERFTMDEEYSKAVMHAFVELYRKELIYKGKRLVNWCPVSKSAISDEEVIHQEKNGKLWYLKYPLVGHEEYLVVATTRPETMLGDTAVAVNPKDERFKDYIGKKIKLPLTEREIPIISDEFVNIEFGTGCVKVTPAHDPNDFEMGQRHNLKFINI

SEQ ID NO: 162501 - protein, 286 aa, Unknown
  Bacterial polypetide isolated from the Sargasso Sea
NYETLWQPGTDHAGIATQALVEKKLNSENIKKNDLGREKFIQKVWDWKNQYGDIIINQLKKLGCSCDWSRNAFTMDDNLSKAVIKVFVDLYNKKIIYKSEKLVNWDTVLKTAISDLEVDQREVNSKIYYIRYPIDGLDEHITIATTRPETMLGDTAVAVNPKDMRYKKYVNKYVTIPIVGRKVKIIEDDYADPEQGTGALKITPAHDFNDYEVGKRNKLEIINIFTEDGKINKNAISNYVGLDRFIARKKILDELKEKNYFVKEENIKNKVPYGDRSNSIIEPFLT

SEQ ID NO: 162502 - protein, 177 aa, Unknown
  Bacterial polypetide isolated from the Sargasso Sea
MTEMNDQLSLENYSPFEVEKKWQEKWESLKAFSPNPEDDGEPFCVVIPPPNVTGSLHMGHAFNTALIDVVVRFQRLLGKNVLCLPGTDHASIAVQTILEKQLKSEGKTSEDIGRDEFLKRAWNWKEQSGGRIVSQLKRIGYSVDWTRERFTLDQKLNEAVIEAFNILYKKNLIYRGE

SEQ ID NO: 162503 - protein, 232 aa, Unknown
  Bacterial polypetide isolated from the Sargasso Sea
MLEKYYQPSLVEDKIYKTWENDGDFKPLKSSSDAYCIVIPPPNVTGTLHMGHALNNTLQDILVRFYRMQGKSVLWQPGTDHAGIATEMVVERELKKRDINKKDLSREQFIEHVWEWKNQSGNEIINQLKRLGCSCDWSRERFTLDEGLSKAVRFVFVKLYNDKLIYKDKRLSNWDPKLKTTISDLEVIQKEVKGSLWYIDYKLENEDKVITILHTRPETMLGDTAIAVHPED

SEQ ID NO: 162504 - protein, 121 aa, Unknown
  Bacterial polypetide isolated from the Sargasso Sea
MTEMNDQLSLENYSPFEVEKKWQEKWASLKAFSPNPEEDGEPFCVVIPPPNVTGSLHMGHAFNTALIDVVVRFQRLLGKNVLCLPGTDHASIAVQTILEKQLKSEGKTSEDMEEMNFLKEQ

SEQ ID NO: 162505 - protein, 306 aa, Unknown
  Bacterial polypetide isolated from the Sargasso Sea
PFKTVYLHGLVRTRDGKKMSKSDPLTCIDPLESIRDYGTDALRLALIQGTGPGQDLRLYPEKLESCRRFANKVWNAGRYILMNIPSGTSLDPPRNVQNDAARWLLHELDLLIGKTRQGLEAFRLSEVIDNLRSFFWGTFCDWYLEMDKRRDWNEEDNRVLAYALSTQLKLLHPYVPFVTEALWGNLGQDKMLAKAPWPESQGYDFGESHQKIQLVCESVSQLRTLREKARLGLNQKVDAGIDSEPHAEVFEIHSGLIKKLARISELKIRKVPAIPSGEALSSYFQDSLVSINANALDFSQEIQTSR

SEQ ID NO: 162506 - protein, 283 aa, Unknown
  Bacterial polypetide isolated from the Sargasso Sea
GIKMSKSKGNTLDPLDIIDGINLSDLSAKRTEGLMQPQMKERIEKQTKKDFPEGISAYGTDALRLTFCSLATGGRDINFDMKRVEGYRNFCNKLWNASRFIEMQIESYGVSEESDEGLIEKWINYRFNLTAKKVNDAFENFRFDLATKAIYEFIWYEFCDWYIELSKIKLSNEGEENSKIVKSMVTILEETLRLAHPIMPFITEEIWMHFKPYHQNSEKSIMIAETPKHKENLSDDGYQSIEWLKEIVSGIRNIRGEMLIKPSMTIKAFYEGGDKIDRNRSKD

SEQ ID NO: 162507 - protein, 116 aa, Unknown
  Bacterial polypetide isolated from the Sargasso Sea
MKSDKYIHSQVEDKIYSYWENNKLFKPKPNKKKFSIIIPPPNVTGSLHMGHALNNSLQDLLIRYYRMNNYETLWQPGTDHAGIATQALVEKKLKKENLDKNKLGREKFVKKVWDWK

SEQ ID NO: 162508 - protein, 149 aa, Unknown
  Bacterial polypetide isolated from the Sargasso Sea
MQNSNYNHSDIENEIYEYWEKNNFFKPKKNKNKHFSIVIPPPNVTGSLHMGHALNNSLQDLLIRFYRMNGYETLWQPGTDHAGIATQAVVEKKLSDQGSKKEDLGREKFIEEVWKWKKESGDLILNQLKKLGCSCKWSRNRFTMDEDLS

SEQ ID NO: 162509 - protein, 123 aa, Unknown
  Bacterial polypetide isolated from the Sargasso Sea
MSLDKYIHSEVEDKIYSYWIKNNLFKPKKNKKKFSIVIPPPNVTGSLHMGHALNNSIQDLLIRYYRMNNYETLWQPGTDHAGIATQALVEKKLSSENIKKSDLGRDKFIEKVWDWKGEYGDII

SEQ ID NO: 162510 - protein, 234 aa, Unknown
  Bacterial polypetide isolated from the Sargasso Sea
MTLSKTYDPHSFESEIYKRWEEKGVFRADNTCEAPAFTISMPPPNATGQLHVGHAVMLALEDILIRWHRMKGDEALWLPGTDHAAIATENVVLNQIRNEEGIQDPRETLGREEVLRRIAAYVENSRGTIRNQVKAMGSSCDWSRERYTMDPQLNRCVNESFVRMYEEGLIYRGPRIVNWDPKLKTNVSDDEVERKETRSPFYTFQYGPFQIGTVRPETKFGDKYVVMHPEDERY

SEQ ID NO: 162511 - protein, 222 aa, Unknown
  Bacterial polypetide isolated from the Sargasso Sea
IINQLKRLGCSCDWSRERFTLDEGLSKAVRFVFVKLYNDKLIYKDKRLSNWDPKLKTTISDLEVIQKEVKGSLWYIDYKLENEDKVITIATTRPETMLGDTAIAVHPEDERFKDFVGKYAYIPIINKKIIIIADEYVKVGQGSGAVKITPAHDFNDYEIGKRHNLEVINIFNENAELNESCPIEYQNLDRFKAREKIVNELETIGALNKVEENIHTVPYGDR

SEQ ID NO: 162512 - protein, 171 aa, Unknown
  Bacterial polypetide isolated from the Sargasso Sea
MSFDKYEHKNVENKIYDYWEKNELFKPKEKSKKFSIVIPPPNVTGSLHMGHALNNSIQDVLTRFHRMNNYETLWQPGTDHAGIATQALVEKKLAKDGVKKNDLGREKFIEKVWEWKNQYGDIIINQLKKLGCSCDWSRNAFTMDENLSKSVIKVFVDLYNKKLIYKAKKLV

SEQ ID NO: 162513 - protein, 265 aa, Unknown
  Bacterial polypetide isolated from the Sargasso Sea
ETLWQPGTDHAGIATQAVVENKLLKEGVKKNDLSREKFIENVWKWKEESGSIILDQLKKLGCSCDWSRTRFTMDEDLSRAVIKVFVDLYNNKLIYKDKKLVNWDTKLQTAISDLEVVQKDVQSQLYYIDYPIENSDQKITIATTRPETMMGDSAVAVNPNDKRYFNLIGKNVLIPIVDRTIKIISDRYADPEQGSGAVKITPAHDFNDYEVGKRNKLKIINIFEKNGKINQFGVKEFHGLDRFEARKLLIKRLKEKGYLVKIENI

SEQ ID NO: 162514 - protein, 129 aa, Unknown
  Bacterial polypetide isolated from the Sargasso Sea
MSSDKYIHKEVENRIYSYWEENNLFKPKKNTKQFSIVIPPPNVTGSLHMGHALNNSIQDLLIRFHRMNNFETLWQPGTDHAGIATQALVENKLKKDGVNKNDLGRENFIKKVWEWKQQYGDIIINQLKK

SEQ ID NO: 162515 - protein, 301 aa, Unknown
  Bacterial polypetide isolated from the Sargasso Sea
LVEKKLNSENIKKKDLGREKFIEKVWDWKKQYGDIIINQLKKLGCSCDWSRNAFTMDKNLSKAVIKVFVDLHKKKLIYKAEKLVNWDTVLKTAISDLEVDQREVNSKIYYIRYPIDGTTEYITIATTRPETMLGDTAVAVNPKDKRYKKYVNKTVTIPIVGRKIKIIEDDYADPEQGTGALKITPAHDFNDYEVGKRNKLEIINIFTEEGKINNNAISSYIGLDRFEARKKILNDLKEKDYFVKEENIKNKVPYGDRSNSIIEPFLTEQWFADAKKLSIKAKKIVKNKKTNFFPENWSKTY

SEQ ID NO: 162516 - protein, 150 aa, Unknown
  Bacterial polypetide isolated from the Sargasso Sea
MDKRFDSNYIEKKWYKRWLESGAFASNSQSSKEPYVIMMPPPNVTGSLHIGHALTFTIQDILIRFHRMQGLDVLWQPGTDHAGIATQMVVERELAKSNLTRHGLGREKFVEKVWEWKEKSGGEITNQLRALGASPDGKKSDLQWMRDYQK

SEQ ID NO: 162517 - protein, 85 aa, Unknown
  Bacterial polypetide isolated from the Sargasso Sea
MTEMNDQFSLENYSPFEVEKKWQEKWESLKAFSPNPKDDGEPFCVVIPPPNVTGSLHMGHAFNTALIDVVVRFQRLLGKNVLCLP

SEQ ID NO: 162518 - protein, 98 aa, Unknown
  Bacterial polypetide isolated from the Sargasso Sea
MSSEKYNHSIVENKIYSYWEKNNLFKPKKNKKKFSIVIPPPNVTGSLHMGHALNNSIQDLLTRYHRMNNYETLWQPGTDHAGIATQALVEKKLASENI

SEQ ID NO: 162519 - protein, 214 aa, Unknown
  Bacterial polypetide isolated from the Sargasso Sea
MSSDKYIHSDVENRIYSYWEKNGLFKPKENSKKFSIVIPPPNVTGSLHMGHALNNSIQDLLIRYHRMNNYETLWQPGTDHAGIATQALVEKKLSSEQIDKNEIGREKFIEKVWEWKDQYGDIIINQLKKLGCSCDWSRNAFTMDENLSKSVIKVFVDLYNKGLIYKDKKLVNWDTVLRTAISDLEVDQREVNSKIYFIRYPIDGTEEFITIATT

SEQ ID NO: 162520 - protein, 294 aa, Unknown
  Bacterial polypetide isolated from the Sargasso Sea
KSGDKIIEQLKRLGASCDWDRNRFTMDPGFHDAVIKVFVALYQKGLVYRGKRLVNWDPLLETAISDLEVEQIEVDGFTWHLRYKLFDNIVYNHPLKFDNNNNPVEFEERDYIVVATTRPETMLGDSGIAVNPLDKRYEALIGKKAIVPFSNRLIPIVADDYADSKKGTGAVKITPAHDFNDWEVGKKCGLNVINVFDTKGRIKVEANKEFLNDCIPDEKVFSFDGLDRYEVRNRIVQIAKNEGWLHDIQKEKHVVPHGDRSNVAIEPLLTSQWFVDTKKIVQPAIDAVKDGRTK

SEQ ID NO: 162521 - protein, 299 aa, Unknown
  Bacterial polypetide isolated from the Sargasso Sea
FLPSSVLVTGFDIIFFWVARMVMMTTHFTGKVPFHTVYVHGLVRDAEGQKMSKSKGNTLDPIDIVDGIDLDTLVAKRTTGLMNPKQAATIEKKTRKEFPDGIAAFGTDALRFTMASMATLGRNVNFDLARCEGYRNFCNKLWNATRFVLMNCEGHDCGSDKPEVCGAGDCGPGGYLDFSAADRWIVSLLQRTEADIAKGFADYRFDNIASSIYKFVWDEYCDWYLELAKVQIQNGTPEQQRATRRTLLRVLETVLRLAHPIIPFITEALWQKVAPLAGRYPQGKAEGEASLITAGPCLA

SEQ ID NO: 162522 - protein, 161 aa, Unknown
  Bacterial polypetide isolated from the Sargasso Sea
MDKRYNPTEVEEKWVDIWSKNVFFNKDAKNTFSQVIPPPNVTGTLHMGHSFQYAIMDFYTRYNHMSGKKSHWQVGTDHAGIATQLVVENNLSKKNISRLQLGRDEFLNEVWKWKDFSEEKIQSQIKRLGSSVDWNKYRFTLDERFSKTVNKAFIDLYRSNK

SEQ ID NO: 162523 - protein, 145 aa, Unknown
  Bacterial polypetide isolated from the Sargasso Sea
MKPNQSIKAYNPKEIERKWVDSISISRDFDSSKKVFSLAIPPPNVTGSLHLGHALNSTVQDVLVKYYYLKGFNVQWTPGTDHAGIATQLLVEKSLSKKGLNLKELSNDELIEEIWKWKEINGDQIINQLRTLGLSCDWDDKKFTL

SEQ ID NO: 162524 - protein, 107 aa, Unknown
  Bacterial polypetide isolated from the Sargasso Sea
MSLDKYVHSKVENEIYAYWEKNKLFKPTKNKKKFSIVIPPPNVTGSLHMGHALNNSIQDFLIRFYRMNGYETLWQPGTDHAGIATQALVEKKLSSENIDKNDLGREN

SEQ ID NO: 162525 - protein, 260 aa, Unknown
  Bacterial polypetide isolated from the Sargasso Sea
VWEWKGQYGDIIINQLKKLGCSCDWSRNAFTMDDNLSKSVLKVFVEMYKNGLIYKSKKLVNWDTVLKTAISDLEVDQREVNSKLYHINYPIEGTDKFITIATTRPETMLGDTAVAVNPSDERFKSLVNKNVIVPIVDRKIKIIEDDYADPEQGTGAVKITPAHDFNDYEVGERNNLEVINVFTPDGKINENAPDNYIGLDRFEARKRILKELTDKNLFVKEEKIKNKVPYGDRSNSIIEPYLTEQWFADAKKLSIKAKEI

SEQ ID NO: 162526 - protein, 265 aa, Unknown
  Bacterial polypetide isolated from the Sargasso Sea
KVELPFVKRIIPIIGDEYVDKEFGTGCLKITPGHDFNDYEIGKKYCLHCVDNEVHISDDIENFEPLNIFTDEAHSNDNVPSPFKNLDRFKVRKLVLEEIKKLDLFVKEEPHEISVPRGERSNIVIEPKLSYQWYVKTKDMADKANKAVENGEIKFHPENWIKTYFNWMNNIEDWCISRQIWWGHRIPAWYDDHGNVYVGYSENEVRTHYSLDNRSLRQDDDVLDTWFSSSLWPFASMGWPNESKNLKTFFPTNLLVTGFDIIFFW

SEQ ID NO: 162527 - protein, 287 aa, Unknown
  Bacterial polypetide isolated from the Sargasso Sea
GLWPFSTLGWPNTNDPDFKKWYPNSVLVTGFDIIFFWVARMTMMGNTFTNNIPFKDVYIHGLVRDENNKKMSKSSGNGIDPILLIDKYGSDALRFALIREVAGAGQDIRLDFDRKKDTSSTVEASRNFANKLWNATKFVLINKTSNNNYSLNESDETSLELCDKWILSKLNQVNIKVAALLKEYKLGESAKLLYEFTWNDFCDWYVEFAKQRFNNKETKNRRISEKVLIKVLNDILVMIHPFMPHITEELWHVLQLKPDNVLLSLQKWPIHENKFVDNKLDNSFQQL

SEQ ID NO: 162528 - protein, 95 aa, Unknown
  Bacterial polypetide isolated from the Sargasso Sea
MISDKYIHSDVENRIYSYWEKNGLFKPKENSKKFSIVIPPPNVTGSLHMGHALNNSIQDLLVRYHRMNNFETLWQPGTDHAGIATQALVEKKVIF

SEQ ID NO: 162529 - protein, 207 aa, Unknown
  Bacterial polypetide isolated from the Sargasso Sea
GWPNKNEYLKKFYPTTVLVTGFDIIFFWVARMMMFGMEFLNKEPFKDIYVHALVRDEKGQKMSKSKGNVIDPLDLIQKYSADALRFTLLSMASPGTDVKLSEDRVKGYRNFLNKLWNANNFLIQNKCNLKNAKKLPKLKININKWIYFELLETSNLIKKNIEDYRFDEAAKNAYHFAWHKYCDWYLELSKTILFSDNLKAKNEVKEV

SEQ ID NO: 162530 - protein, 193 aa, Unknown
  Bacterial polypetide isolated from the Sargasso Sea
MSNFKSYNHRNIEDKIYKYWEKNNCFKPRKSKNKKYFSIVIPPPNVTGSLHMGHALNNSIQDLLIRHNRNKGLETLWQPGTDHAGIATQLIVEKQLNKKGISRKDLGREKFLKEVWKWKEKSGGIITGQLKKLGSSCDWSRDRFTMDEGLSKAVLKVFVKLYNKKLIYKDFKLTNWDTKLQTAISDLEVRKEK

SEQ ID NO: 162531 - protein, 293 aa, Unknown
  Bacterial polypetide isolated from the Sargasso Sea
IGTQFLKTAVSDLEVVRQEKEGVIWHIDYPLVDSSEKVTVATTRPETMFGDMAVAVNPKDKRYQKLIGKYVELPFVGRKIPILGDDYVDMEFGTGCLKITPGHDFNDYEIGKKYALHQVKDTVETSKETEKFQPINIFTEEAFTNNEVPKDFANLDRFKVRKVVIEKLKEKNLLAKEEKHIISVPRGERSNMVIEPRLSFQWYVKTKEMAAKANEAVNKKEVVFHPENWIKTYFNWMDNIQDWCISRQIWWGHRIPAWYDDEGNVYVGYDEKELREFYKLDDRKLTQDEDVLD

SEQ ID NO: 162532 - protein, 210 aa, Unknown
  Bacterial polypetide isolated from the Sargasso Sea
MDSDKYIHSEVEDDIYSYWEKNELFKPKKNSKKYSIVIPPPNVTGSLHMGHALNNSIQDLLVRYYRMNNYETLWQPGTDHAGIATQALVEKKLEKENLNKNDLGREKFIEKVWEWKNQYGDIIINQLKKLGCSCDWSRNAFTMDENLSKSVVKVFVELHKKKLIYKAEKLVNWDTVLKTAISDLEVDQREMNSKIYYIRYPIDNSNDFIT

SEQ ID NO: 162533 - protein, 186 aa, Unknown
  Bacterial polypetide isolated from the Sargasso Sea
VAGNKMSKSKGNVLDPLDMIDGIDLEALVEKRTGNMMQPQLAAKIEKSTRKEFENGIEAHGTDALRFTLAAMASTGRDINWDMKRLDGYRSFCNKLWNASRYVLMNTEGQDCGPNSPDYQGGEMELSLADRWIIGLFNQTVKTYDDHMANYRFDLAANTLYEFTWNQFCDWYLELTKPVLQNGNEA

SEQ ID NO: 162534 - protein, 290 aa, Unknown
  Bacterial polypetide isolated from the Sargasso Sea
ASCDFDRTRFTMDEMCATAVRHAFFILFQDGLIYRGKRLVNWDPVTRTALADDEVEMEEIEGHMWYLRYPLEDGSGHVVVATTRPETMLGDTAVAINPKDPRADALVGKKVILPIADRVIPIIADDYVIMEDEESDDPKAKFASGFLKVTPAHDPNDWDIGLRHGLNVINVLGPDGSISEEYGWDDASPTAKQFVGLSRDEARVAIVDWFDEHDLLAEVREYTHSVGHSYRSHAPIEPWLSDQWYVAVTDDRLRGSALRAQRPDQVPDLPDGVSERSSSSGDGELTFYPQ

SEQ ID NO: 162535 - protein, 100 aa, Unknown
  Bacterial polypetide isolated from the Sargasso Sea
MEKKFNPQDVESRLIKAWQQSNTFKVGSNAKPGKGAFSIVIPPPNVTGNLHMGHAFNNTIQDILVRWNRMRGFDTLWQPGQDHAGIATQMVVERELEKTD

SEQ ID NO: 162536 - protein, 283 aa, Unknown
  Bacterial polypetide isolated from the Sargasso Sea
MIRYHRMNNFETLWQPGTDHAGIATQALVEKNLKAKNIDKNKIGRQKFIKKVWEWKENYGGKIIKQLKKLGCSCDWSRNAFTMDENLSKSVIKVFVDLYKKKLIYKSKKLVNWDTVLKTAISDLEVDQREVNSKLYYIKYQIENSSDFITIATTRPETMLGDTGIAVNPKDDRYTNLIGKFAILPIVGRKLKIFQDEYADPEQGTGAVKITPAHDFNDFDVGERQKLKKINIFTEEGKINKNAPKEYIGIDRFEARKKIIEKLSELQILIKEEKIKNKVPYGD

SEQ ID NO: 162537 - protein, 225 aa, Unknown
  Bacterial polypetide isolated from the Sargasso Sea
MEFKKYNHLLEEKRISDYWIKRGCFKPKKGKFKNTFSIVIPPPNITGRLHMGHALNNSLQDVLIRFNRMKGVETLWQPGTDHAGIATQAVVEKNLEKKGIKKRDLGRDKFIKKVWSWKEESGGIILDQLKKLGCSCDWSRTRFTMDNDLSKAVMKVFVDLYKDKLIYKDKKLVNWDMHLQTAISDLEVVQKDVQSNLYYINYQIENSEKKITIATTRPETMMGDT

SEQ ID NO: 162538 - protein, 87 aa, Unknown
  Bacterial polypetide isolated from the Sargasso Sea
MSNDKYIHSEVENKIYSYWEKNELFKPKKNSKKFSIVIPPPNVTGSLHMGHALNNSIQDLLVRYHRMNNFETLWQPGTDHAGIATQA

SEQ ID NO: 162539 - protein, 297 aa, Unknown
  Bacterial polypetide isolated from the Sargasso Sea
GREKFIEKVWEWKKKSGGQISNQLRRLGASADWSRERFTMDDGLSNAVKKVFVKLYNDGIIYKDKRLVNWDPKLLTAISDLEVEQRECEGSLWHIKYPINNDEYIIVATTRPETMLGDTAVAVNPDDLKYKNLIGKLCNLPLSNRKIPIIADQYADPDKGSGAVKITPAHDFNDFDIGKKHNLEFINIFNEFAKLNNNVPKYFQNLDRFEARKLVLKKLEEMSLLVKEEKQQMVIPYGDRSGIIIEPWLTDQWFCDAKKLSIDPIKSINKKQSNFIPKQWENTFFNWMENIQPMVYL

SEQ ID NO: 162540 - protein, 114 aa, Unknown
  Bacterial polypetide isolated from the Sargasso Sea
MTEMNDQLSLENYSPFEVEKKWQEKWESLKAFSPNPEDDGEPFCVVIPPPNVTGSLHMGHAFNTALIDVVVRFQRLLGKNVLCLPGTDHASIAVQTILEKQLKSEGKTSEDIGR

SEQ ID NO: 162541 - protein, 307 aa, Unknown
  Bacterial polypetide isolated from the Sargasso Sea
MNNFETLWQPGTDHAGIATQALVERKLESENIDKQSIGREAFIKKVWDWKKEYGDIIINQLKKLGCSCDWSRNAFTMDKNLSASVIKVFIDLYNKGLIYKSKKLVNWDTVLKTAISDLEVDQREVNSKLYYINYQIENSSEFITIATTRPETMLGDTAVAVNPKDERYTNLVGKNVVLPITGRKIKIIQDDYADPEQGSGAVKITPAHDFNDYDVGKRNKLEIINIFTEDGKINENAPSDYVGLDRFEARKKILNELGDKLIKEENIKNKVPYGDRSNSVIEPYLTEQWFADAKKLSVKAKKIVKNK

SEQ ID NO: 162542 - protein, 280 aa, Unknown
  Bacterial polypetide isolated from the Sargasso Sea
IKVFVDLYKKGLIYRGKRLVNWDPHFETAISDLEVENIEVAGHMWHFKYPLKSGETYTYIEKDEEGNITLQEERDYISIATTRPETMLGDGAVAVHPSDQRYKPLIGKFCEIPVGPRQYRRLIPIITDEYPDPNFGSGAVKITGAHDFNDYQVAKRSNIPMYSLMDKKGVMRVDGSPYKDEVVKAQAILNEEITWDENLIASMNLVPDEYRGLDRFEARKKVVAEITAEGLAVMTDSTDNDGNFSTKPFVESKAIMQPFGDRSKVVIEPMLTDQWFVETS

SEQ ID NO: 162543 - protein, 296 aa, Unknown
  Bacterial polypetide isolated from the Sargasso Sea
TDHAGIATQMVVERQLAERGKKRTDFSRDEFLEKIWNWKKKSGGTIINQLQRLGASCDWDREAFTMSGAPNAPKDEDGNFHDAVIKVFVDLYKKGLIYRGKRLVNWDPHFETAISDLEVENIEVAGHMWHFKYPLKGGETYTYIEKDENGNITLQEERDYISIATTRPETMLGDGAVAVHPSDQRYKPLLGKFCEIPLGPKQYRRLIPIITDEYPDPNFGSGAVKITGAHDFNDYQVAKRSNIPMYSLMDKKGVMRVDGLPYQDEVAKAQAILNEEISWDENLIASMNLVPDEYRG

SEQ ID NO: 162544 - protein, 273 aa, Unknown
  Bacterial polypetide isolated from the Sargasso Sea
RMKGLETLWQPGTDHAGIATQAVVENNLLKEGIKKNDLGREKFIQKIWKWKEQSGGIILDQLKKLGCSCDWSRTRFTMDKDLSKAVIKVFVDLYNNKLIYKDKKLVNWDTKLQTAISDLEVVQKDVQSQLYYIDYSIESSDQKITIATTRPETMMGDTAVAVNPRDKRYINLIGKNVLIPIVNRTVKIISDHYADPDQGSGAVKITPAHDFNDYEVGKRNKLEIINIFEKNGKINKNGVKEFQGLDRFEARKLLIKKLKEIGSLVKIENIKNK

SEQ ID NO: 162545 - protein, 216 aa, Unknown
  Bacterial polypetide isolated from the Sargasso Sea
MGIEKIYDPLLIENKWLVKWEKEDFFKSDPNDDKPYTILIPPPNVTGILHMGHMLNNSIQDILIRKARLSGYNACWVPGTDHASIATEAKVVNKLKEMGIKKHELSRDEFIQHAWDWTNKHGGIILNQLKKIGCSCDWSKTKFTLDPDMYESVQNMFIKLYDDGYLYRDKKIVNWDPEAKTTLSNEEVVYKEKKAKLFYLKYKLESSEEFLLVATT

SEQ ID NO: 162546 - protein, 117 aa, Unknown
  Bacterial polypetide isolated from the Sargasso Sea
MEFPKFFDFIQEEEKIYSKWEKEGCFKPVKSKSPYSIMMPPPNVTGSLHMGHALTFTIQDILIRYHRMKGMEVLWQAGTDHAGIATQMVVERQLSEKNIDRKNLGREKFIDKIWEWK

SEQ ID NO: 162547 - protein, 205 aa, Unknown
  Bacterial polypetide isolated from the Sargasso Sea
NIFEKNGKINKNGIKEFHGLDRFEARKLLIKKLKEKGYLSKIENIKNKVPYGDRSNTIIEPLLTEQWFVDAKKLSKKPIKKVKEGKTSFFPNNWSKTFFQWMNEIEPWCISRQIWWGHRIPAWYDDHGNIFVAENEKEAVALAKKKNNNKQFRLRQETDVLDTWFSSALWPFATLGWPNKTKELDKFYPTSVLVTGFDIIFFWVA

SEQ ID NO: 162548 - protein, 249 aa, Unknown
  Bacterial polypetide isolated from the Sargasso Sea
VLVTGFDIIFFWVARMIMMTKKFTGKIPFKDIYITGLIRDESGDKMSKSKGNVLDPIDLIDGIDLESLVEKRTAGMMQPQLAEKIVKRTRKQFPDGIHAYGTDALRFTFAAMASTSRDINFDMSRVEGYRNFCNKIWNASRFVLMNTEEHDTGANGGEMVLSLADRWIWAKFQQTLVEVEKALSDYRFDIAAQTIYEFTWNQFCDWYLELTKPVLSNDASSEAEKRGTRHTLINVLESLLRLMHPIMPF

SEQ ID NO: 162549 - protein, 278 aa, Unknown
  Bacterial polypetide isolated from the Sargasso Sea
NPYVIVIPPPNVTAALHMGHGLNNTVQDVLIRWRRMQGRAALWVPGTDHAGIATQNVVERLLASQGFTREDFGREKFVAAVWDFVDETGDRILGQLKSIGASCDWERTRFTLDDDLAKAVREVFVTLYEKDLLYRGEYIINWCPRCLTALSNEEAEGEETEGSLWHLRYPLSGGVGEIAEAAVEAGADAIGQLEDGRWYLTVSTTRPETMLGDMGVAVSPDDERYRGLVGSEVLLPLTGRTIPIVSDDFVDPEFGSGMVKVTPAHDPNDFDIAGRAGL

SEQ ID NO: 162550 - protein, 316 aa, Unknown
  Bacterial polypetide isolated from the Sargasso Sea
RVKTFYPTSVLITGFDIIFFWVARMIMMGKKFVGEVPFKEIYVHGLVKDSSGNKMSKSKGNIIDPIDLIDGIDLNSLIDKRASDLMQPEMAQKIIKNTKKDYPDGIGAYGTDALRFTFASLASTGRDINFDLKRVEGYRNFCNKLWNAARYVKMQGDVKIENLDNKNFKNEDIWIRNKLANLITEIKNNYKNYRFDYAAKSLYSFVWQDYCSWYIEISKSNLNIKNITENEKNLIILNLRDVLKSILLLLHPIMPFITEEIYKDIFNEDKFIQDNSYPNSSDFESSRNTDNISWMVELFQLSERQDQKLGFSQIKK

SEQ ID NO: 162551 - protein, 135 aa, Unknown
  Bacterial polypetide isolated from the Sargasso Sea
MRAWPLGSCPCFVPDLPKTYDPVGTEARWQQAWEDQGAFHPTPKAPGEAFSVVIPPPNVTGSLHMGHAFNTALIDTIVRYQRLAGKNVLCLPGTDHASIAVQTILEKQLKQEGKTRHDLGREAFLERAWQWKAES

SEQ ID NO: 162552 - protein, 264 aa, Unknown
  Bacterial polypetide isolated from the Sargasso Sea
GRRIVNWCPQCESVISDLEVDEIETDSHLWHIRYPGVDGGPDVVVATTRPETMLGDTGVAVHPDDDRFKDAIGKKVMLPLVEREIPIVADEAADPEMGSGAVKVTPSHDPSDYEIGQRHDLPEIQVIGLDGTMTEEAGDYAGQDRYACRKAVIAALEAGGYMVKIDDHSHAVPHHDRCGTVVEPLAMEQWFVSMRNLADQALPFLRDNAICYVPDRFRGYTVDWLENIRDWCISRQIWWGHRIPAWTHKQTGEVIVSKDPPANA

SEQ ID NO: 162553 - protein, 78 aa, Unknown
  Bacterial polypetide isolated from the Sargasso Sea
MDSNFDPHEIEKALYSEWEELGYFSPNPADESYCIVIPPPNVTGSLHMGHAFQHTLMDALIRYHRMKGHETLWQMGKD

SEQ ID NO: 162554 - protein, 167 aa, Unknown
  Bacterial polypetide isolated from the Sargasso Sea
MTEMNDQLSLENYSPFEVEKKWQEKWESLKAFSPNPEDDGEPFCVVIPPPNVTGSLHMGHAFNTALIDVVVRFQRLLGKNVLCLPGTDHASIAVQTILEKQLKSEGKTSEDIGRDEFLKRAWNWKEQSGGRIVSQLKRIGYSVDWTRERFTLDQKLNDAVIEAFNIL

SEQ ID NO: 162555 - protein, 123 aa, Unknown
  Bacterial polypetide isolated from the Sargasso Sea
MSSEKYIHKKVENRIYSYWEKKKLFKPKKNKRKYSIVIPPPNVTGSLHMGHALNNTIQDLLIRYHRMNNFETLWQPGTDHAGIATQALVEKKLESQNINKKTIGRDKFIKKVWEWKKEYGGII

SEQ ID NO: 162556 - protein, 285 aa, Unknown
  Bacterial polypetide isolated from the Sargasso Sea
MKKSGAINGEKNGIYSFDRNKTREEIFSIDTPPPTVSGSLHVGHVFSYTHTDAIARYQRMAGKEVFYPMGWDDNGLPTERRVQNFFGVRCDPSLPYDPDFETPADAGNPKKIKERGEFDISRRNFIDLCHILTAEDEKAFEALWRRLGLSVDWSLTYATIDEKCQRVAQRAFLRNLNRGEAYQTEAPSLWDVTFRTAVAQAELEDRERPGAYHTLTFHTESDEDLHIATTRPELLPACVALVAHPDDSRYKNLFGTTVTTPVFGVEVPVCKHQLADPEKGTGIAM

SEQ ID NO: 162557 - protein, 135 aa, Unknown
  Bacterial polypetide isolated from the Sargasso Sea
VTLVTGFDIIFFWVARMMMMGLYFTDKVPFNEVYVHALVRDEKGQKMSKSKGNVIDPLVMMDEFGADALRMTLCSMAAQGRDIKLSKQRVEGYRNFITKIWNAVKLCEINGCNFNDYNISNTQNIFNLWILSELE

SEQ ID NO: 162558 - protein, 200 aa, Unknown
  Bacterial polypetide isolated from the Sargasso Sea
MSSEKYIHSKVENKIYSYWEKKGLFKPKKNKKKYSIVIPPPNVTGSLHMGHALNNTIQDLLIRFHRMNNFETLWQPGTDHAGIATQALVEKKLQKENIDKQSIGRDAFIKEVWNWKDEYGDIIINQLKKLGCSCDWSRNAFTMDKNLSTSVIKVFIDLYNKGLIYKSKKLVNWDTVLKTAISDLEVDQREVNSKLYYINY

SEQ ID NO: 162559 - protein, 91 aa, Unknown
  Bacterial polypetide isolated from the Sargasso Sea
MSSDKYEHLNVEAKIYDYWQKNNLFKPKKNSKKFSIVIPPPNVTGSLHMGHALNNSIQDVLVRFHRMNNYETLWQPGTDHAGIATQALVEK

SEQ ID NO: 162560 - protein, 301 aa, Unknown
  Bacterial polypetide isolated from the Sargasso Sea
QEKDVLDTWASSWLWPLGVHDWPDRSKDLDKFFPTNTLVTGPDIIFFWVARMIMTGYEFLGKKPFSDVYFTSILRDDTGKKLSKSLGNSPDPLDLFEEYGTDAVRFGIMLMAPQGLDVLFSKDRLEIGRNFMNKLWNACRFIEMNTPESWNDDLDVEQGGLELADKWILNQLFNSIEKYNKQLDRLHFNEAAKVLYDFVWNDFCDWYIEIAKTRFYSENVESKMITYSTCLKCIRIILPLMHPFTPFITEELWSFFKDKNQPDLIVSMWPNGDYDFDDDVDGAMTVLQDLITSIRAIRSRM

SEQ ID NO: 162561 - protein, 246 aa, Unknown
  Bacterial polypetide isolated from the Sargasso Sea
PYVDVEFGTGCLKVTPAHDINDYNLGKKHSLDTIDIFDTNANLNKHGLHYEGKNRFVVRKEMEDELIKNKLLIKKENYVHNVGRSERTNSVIEPKVSKQWFLKMDEITKPAIINVLENENIKFFPNKFKSTYKYWLENIKDWNISRQLSWGHQIPVFYYGNDDEYIVATSKEEALKKANEDLKLNLKDSDLSQDQDVLDTWFSSWLWPISVFDGVRNPDNDEIKYYYPTQDLVTGPDIIFFLGLQK

SEQ ID NO: 162562 - protein, 165 aa, Unknown
  Bacterial polypetide isolated from the Sargasso Sea
MSLDKYIHSDVEDKIYTYWEKNNLFKPKKNKKKFSIVIPPPNVTGSLHMGHALNNSIQDLLTRYYRMNNYETLWQPGTDHAGIATQALVEKKLNSENIKKNDLGREKFIEKVWEWKNQYGDIIINQLKKLGCSCDWSRNAFTMDENLSKAVIKVFVDLHKKKLIY

SEQ ID NO: 162563 - protein, 98 aa, Unknown
  Bacterial polypetide isolated from the Sargasso Sea
MTLSKFFNFLEEEKNIYHNWEKTDSFKSKKNKESYSIMMPPPNVTGSLHMGHALTFTIQDILIRYHRMQGKEVLWQAGTDHAGIATQMVVERHYQKQD

SEQ ID NO: 162564 - protein, 140 aa, Unknown
  Bacterial polypetide isolated from the Sargasso Sea
MSLDKYIHSEVEDEIYSYWIKNKLFKPKKNKKKFSIVIPPPNVTGSLHMGHALNNSIQDLLIRYFRMNNYETLWQPGTDHAGIATQALVEKKLSSENIKKSDLGRDKFIEKVWDWKSEYGDIIINQLKKLGCSCDWSRNA

SEQ ID NO: 162565 - protein, 162 aa, Unknown
  Bacterial polypetide isolated from the Sargasso Sea
MSSNKYNHSEVENRIYLYWEKNKLFKPKKNKKKFSIVIPPPNVTGSLHMGHALNNSIQDLLTRYHRMNNYETLWQPGTDHAGIATQALVEKKLENEGIKKNDLGREKFIKKVWEWKGQYGDIIINQLKKLGCSCDWSRNAFTMDENLSQSVLKVFEVLYKKK

SEQ ID NO: 162566 - protein, 118 aa, Unknown
  Bacterial polypetide isolated from the Sargasso Sea
MSSDKYIHSDVENRIYSYWEKKGLFKPKENSKKFSIVIPPPNVTGSLHMGHALNNSIQDLLVRYHRMNNFETLWQPGTDHAGIATQALVEKKLTSEKIDKNEIGREKFIEKVWEWKEQ

SEQ ID NO: 162567 - protein, 302 aa, Unknown
  Bacterial polypetide isolated from the Sargasso Sea
SLYRKNEITFSIATTRPETMLGDGAVAVHPSDQRYKPLVGKFCEIPLGPRQYRRLIPIITDEYPDPNFGSGAVKITGAHDFNDYQVAKRSNIPMYSLMDKKGVMRVDGSPYKDEVAKAQAILNEEITWDEDLIASMNLVPEEYRGLDRFEARKKVVAEITAEGLAVMTDSTDNDDNFSTKPFVESKAIMQPFGDRSKVVIEPMLTDQWFVETSKIVKPALDAVKNGEIKIIPTSGEKTYYHWLNNIEPWCISRQLWWGHQVPVWFDKDGKQYCAVTESEAQEQAGSDVQLTRDPDVLDTWFS

SEQ ID NO: 162568 - protein, 181 aa, Unknown
  Bacterial polypetide isolated from the Sargasso Sea
MEFKKYNHKKVETKIYSYWEKNNLFKPKKNKHTFSIVIPPPNVTGSLHMGHALNNSLQDVLIRFHRMNSYETLWQPGTDHAGIATQALVEKNLKSQGIDKNKIGREKFVKKVWEWKDEYGGKIINQLKKLGCSCDWSRNAFTMDKNLSNAVIKVFIDLYKKKLIYKAKKLVNWDTVLKTAI

SEQ ID NO: 162569 - protein, 50 aa, Unknown
  Bacterial polypetide isolated from the Sargasso Sea
IIRDPDVLDTWFSSGLWPFATLGWPDKKDFVKKFYPTSVLVTGFDIIFFW

SEQ ID NO: 162570 - protein, 113 aa, Unknown
  Bacterial polypetide isolated from the Sargasso Sea
MDKRYNPTEVEEKWVDIWSKKVFINKDATETFSQVIPPPNVTGTLHMGHSFQYAIMDFYTRYNHMTGKKVHWQVGSDHAGIATQLVVENNLAQENIDKKEIGREKFLNEVWDW

SEQ ID NO: 162571 - protein, 86 aa, Unknown
  Bacterial polypetide isolated from the Sargasso Sea
MSSDKYIHSDVENRIYSYWEKNGLFKPKENSKKFSIVIPPPNVTGSLHMGHALNNSIQDLLVRYHRMNNFETLWQPGTDHAGIATQ

SEQ ID NO: 162572 - protein, 264 aa, Unknown
  Bacterial polypetide isolated from the Sargasso Sea
FTMSEDLSLAVKEVFISLFDEGLIYRGERLVNWDVVLQTALSDLEVTSEEETGSLWYFDYPVENGSSITVATTRPETMLGDSAVAVNPEDERFKELIGQFVIMPITERKIPIIEDSYVDSDFGTGCVKITPAHDFNDFEIGKRHGLEVINILNLDGTLNEFVPKKYRGLTTTEARKEVLIEMESLGHLNKVEPHKIQIPKSQRSDSVLEPLITNQWFVDVKKMSKEAIRVVRENETGFIPKNWENTYFDWMNKIQDWCISRQLW

SEQ ID NO: 162573 - protein, 137 aa, Unknown
  Bacterial polypetide isolated from the Sargasso Sea
MEKKYSHQDIEKRIYSQWEESNCFSASTDINNQKETYCIVIPPPNVTGNLHMGHALNNTLQDILIRYNRMQGKDVLWQAGTDHAGIATQMVVERKLDTEKNLRKEDLGREEFVNEIWKWKEESGGQIINQLKRLGSS

SEQ ID NO: 162574 - protein, 265 aa, Unknown
  Bacterial polypetide isolated from the Sargasso Sea
QLKKLGCSCDWSRNAFTMDENLSKSVIKVFVDLYKKGLIYKDKKLVNWDTVLKTAISDLEVDQREVNSKIYYIKYPIDGTDEFITIATTRPETMLGDTAIAVNPKDERFKSSVGKTVTIPIVGRKIKIIEDDYADPEQGTGALKITPAHDFNDYDVGQRNNLEIINIFTEAGKINDNAPKEYVGLDRFEARKRILKELKDKEFFVKEENIKNKVPYGDRSNSIIEPFLTEQWFADAGKLSVKAKEVVNSKKTNFFPENWSKTYFQ

SEQ ID NO: 162575 - protein, 284 aa, Unknown
  Bacterial polypetide isolated from the Sargasso Sea
LHKNKLIYKDKKLVNWDTKLQTAISDLEVNQKDVQSQLYYIDYTIENLDKKITIATTRPETMMGDTAVAVNPKDERYVNLVGKNVLIPIVNRTVKIISDNYADPEQGSGAVKITPAHDFNDYEVGKRNKLEIINIFEENGKINKNGIKEFHGLDRFEARKLIIKKLKDNGSLVKIENIKNKVPYGDRSNTIIEPLLTEQWFVDAKKLSKKPIKIVKEGKTTFFPSNWSKTFFQWMNDIEPWCISRQIWWGHRIPAWYDENGNIFVAESEKDALKLAKKKNKKKQ

SEQ ID NO: 162576 - protein, 287 aa, Unknown
  Bacterial polypetide isolated from the Sargasso Sea
MPVPSKYEHIEIEKKWYSYWIKNNLFKSIPNDKEPFTIVIPPPNVTGLLHMGHMLNNTIQDILVRRARMLGKNACWVPGTDHASIATEAKVVENLKEKGIDKLDISRDEFLKYAWDWTEKYGGGILEQLKMLGCSCDWDRTKFTLDDEMYESVLTAFKILHDKGLIYRGYRMINWDPEAKTTVSDEEVNYVEEKSNLYYLKYKIVDSDQDMIIATTRPETIFGDTAVCVNPKDKRYKSLIGKQAIVPICDRKVPVIADPYVDVEFGTGCLKVTPAHDINDYNLGKKH

SEQ ID NO: 162577 - protein, 129 aa, Unknown
  Bacterial polypetide isolated from the Sargasso Sea
ESEMYIRDKYNISDSINLTQDNDVLDTWFSSSLWPFSTLGWPDHTKELEDFYPTSVLVTGFDIIFFWAARMIMMGMKFMDKVPFKTIYIHGLVRDSDGKKMSKSIGNVIDPIDVIDGIRQSDLIEKRIS

SEQ ID NO: 162578 - protein, 303 aa, Unknown
  Bacterial polypetide isolated from the Sargasso Sea
GILDPRNELGRDEILKRIANYVKNSQGTIRSQVKAMGSSCDWSRERYTMDHQLNRCVNETFLRMYNDDLIYRGQRIVNWDPHLKTNVSDDEVERRSTNSPFYTFQYGPFQIGTVRPETKFGDKYVVMHPDDNRYSKHKHGDTFECEWINGMVTATILKDDVVDPEFGTGVMTITPWHDHVDFGIAERHDLEKEPVIDFEGNLLPIAKEFAGMGIEEARPKIVAKLQKKGLLVNTDSEYIHSKAFNTRGGGPIEPQIREQWFIDVNKPAVQWKGEAHSLKKVLIDVVRSGEIRLVPERFNSTYF

SEQ ID NO: 162579 - protein, 284 aa, Unknown
  Bacterial polypetide isolated from the Sargasso Sea
GLWPFATLGWPENNDYVKKFYPTSVLVTGFDIIFFWVARMIMFGIEFLNKEPFKDIYVHALVRDEKGQKMSKSKGNVIDPLDLIEKYSADALRFTLLSMASPGTDVKLSEDRVKGYRNFLNKLWNANNFLITNECDFSEIDKVPKLSLNINKWIYAKLIEVKSQIEKNLEDYRFDEAAKNAYQFVWHSYCDWYVELSKTILFSDDEEAKSEVKKVSSYVFKQILILLHPFIPFVTEEIWLKNKFDKSGKDFLMLTNWPAGEINKDATTQQVENIISIISEIRSF

SEQ ID NO: 162580 - protein, 265 aa, Unknown
  Bacterial polypetide isolated from the Sargasso Sea
FIELYRQKKIYRGYRLVNWDPSLKTAVSDLEVVRQEKKGLIWHLNYPIDGSDKFISVATTRPETLFGDMAIAVNPKDTRYKSLIGKHAILPFVNRKLPIIGDEYVDMEFGTGCVKITPGHDFNDYEIGKKYSLHEINGTVFTSKNIDDFKPINIFNDDAWTSEDVPEPFNNLDRFKVRKLVIKELNELKLLVKEEEYDISVPRGERSNVVIEPKLSNQWYVKTSEMAKKANAEVKKGNIKFHPQNWIKTYFNWMDNIEDWCISRQ

SEQ ID NO: 162581 - protein, 284 aa, Unknown
  Bacterial polypetide isolated from the Sargasso Sea
HRFSSGLWPFSTLGWPNTNDPDFKKWYPNNVLVTGFDIIFFWVARMTMMGNTFTNNIPFKDVYIHGLVRDENNKKMSKSSGNGIDPILLIDKYGSDALRFALIREVAGAGQDIRLDFDRKKDTSSTVEASRNFANKLWNATKFVLINKTSNNTYSLNESDETSLELCDKWILSKLNQVNIRVAALLKEYKLGESAKLLYEFAWNDFCDWYVEFAKQRFNNKETKNRQISEKVLIKVLNDILVMIHPFMPHITEELWHVMQLRPDKELLSLQKWPIQENKFVDNK

SEQ ID NO: 162582 - protein, 273 aa, Unknown
  Bacterial polypetide isolated from the Sargasso Sea
MFEKKLASEKIDKNEIGREKFIEKVWEWKEQYGDIIINQLKKLGCSCDWSRNAFTMDENLSKSVIKVFVDLYNKKLIYKDKKLVNWDTVLKTAISDLEVDQREVNSKIYYIRYPIDGTDEFITIATTRPETMLGDTAIAVNPNDDRFKSLVGKTTTIPIVGRKIKIIEDDYADPEQGTGALKITPAHDFNDYNVGQRNNLEIINIFTEAGKINDNAPKEYIGLDRFEARKKILKDLKDKEFFVKEDNIKNKVPYGDRSNSIIEPFLTEQWFAD

SEQ ID NO: 162583 - protein, 296 aa, Unknown
  Bacterial polypetide isolated from the Sargasso Sea
DWSRARFTMDADLTNAVIKVFVKLYNDKLIYKDKKLVNWDTQLKTAISDLEVTQKDVNSKLYYIEYKLENSDKKITIATTRPETMMGDTAIAVNPKDDRYVDLINKIVEIPIVGRTIKIISDNYADPDQGSGAVKITPAHDFNDYQVGKRNKLEIINIFEKDGTINENGIKEFKGLDRFEARKLLVQKLKEKGNLIKIETIKNKVPYGDRSNSIIEPLLTEQWFVNAKKLSKKPIKVVNEGKTSFFPKNWTKTFYQWMKDIEPWCISRQIWWGHRIPAWYDEKNNIFVAENERDAK

SEQ ID NO: 162584 - protein, 299 aa, Unknown
  Bacterial polypetide isolated from the Sargasso Sea
KKLGCSCDWSRNAFTMDDNLSKSVIKVFVDLYNRGLIYKSKKLVNWDTVLKTAISDLEVDQREVNSKLYYIKYPIENSEDFITIATTRPETMLGDTAVAVNPKDKRYKNLVSKNVILPIVEKKIKIIADDYADPEQGSGAVKITPAHDFNDYDVGIRNKLEIINIFTEDGKINENAPSEYIGLDRFEARKKILLELKNKNLFVREEDIKNKVPYGDRSNSIIEPFLTEQWFADAKKLSVKAKKIVRSKKTNFFPTNWSKTYFQWMDNIEPWCVSRQLWWGHQIPAWYGPDKKIFVAENE

SEQ ID NO: 162585 - protein, 196 aa, Unknown
  Bacterial polypetide isolated from the Sargasso Sea
MSSEKYTHSKVENKIYSYWEKKGLFKPKKNKKKYSIVIPPPNVTGSLHMGHALNNTIQDLLIRFHRMNNFETLWQPGTDHAGIATQALVERKLESENIDKQSIGREVFIKKVWDWKKEYGDIIINQLKKLGCSCDWSRNAFTMDKNLSASVIKVFVDLYNKGLIYKSKKLVNWDTVLKTAISDLEVDQREVNSKLY

SEQ ID NO: 162586 - protein, 323 aa, Unknown
  Bacterial polypetide isolated from the Sargasso Sea
MILFSFGLLEWMMMGSYLIKKEPFSKIYVHALVRDEKGQKMSKSKGNVIDPLEIINKYGADSLRFTLISMAAPGRDVKLSEERVKGYRNFLNKIWNANKFSKINEFKITNNFNIKKAKLDVNKWIYFELTKVNKIVIEHIENFRFDEAARIIYQFVWHSYCDWYIEFLKPIFDSKDKKNHEESRNIAAFIQANILILLHPFIPFFTEKIWQDFKFINTFKKPLMFKEWKIKSHASFNNSHTKISWLIDLVTNIRSTKVTLNVSPGSFIEVSTVELGKEKKLVIKDNLNVFKGLGRVSNVHHEKLDRDGVKNIAGGETLILYFD

SEQ ID NO: 162587 - protein, 205 aa, Unknown
  Bacterial polypetide isolated from the Sargasso Sea
MSSDKYIHSDVENRIYSYWEKNGLFKPKENSKKFSIVIPPPNVTGSLHMGHALNNSIQDLLVRYHRMNNFETLWQPGTDHAGIATQALVEKKLTSEKIDKNEIGRDKFIEKVWEWKEQYGDIIINQLKKLGCSCDWSRNAFTMDENLSKSVIKVFVDLYNKGLIYKDKKLVNWDTVLKTAISDLEVDQREVNSKIYYIRYPIDGT

SEQ ID NO: 162588 - protein, 163 aa, Unknown
  Bacterial polypetide isolated from the Sargasso Sea
KWQEKWESLKAFSPNPEDDGEPFCVVIPPPNVTGSLHMGHAFNTALIDVLVRFQRLLGKNVLCLPGTDHASIAVQTILEKQLKSEGKTSEDIGRDEFLKRAWNWKEQSGGRIVSQLKRIGYSVDWTRERFTLDQKLNEAVIEAFNILHKKNLIYRGEYLVNWC

SEQ ID NO: 162589 - protein, 322 aa, Unknown
  Bacterial polypetide isolated from the Sargasso Sea
FSTLGWPEKTKRLQKFYPTNVLVTGFDIIFFWVARMIMMGLKFTGKPPFKEVYIHGLVRDSDGQKMSKSKGNVLDPLDLIDGIKLEDLVTKRTMGLMQPQLTEKIEKSTRKHFPNGIAAYGTDSLRFTFASLATQGRDIRFDIGRIDGYRNFCNKIWNATRFVLMNIESQKIDINNDKKKFGLTERWIISQLSKTLNATHEGIKTYRFDLASQALYEFVWNEYCDWYLEFSKSTLNDKEKSDEEKRGTLYTLVHILETSLRGLHPFIPFITEELWQRVASILNKNSETIMLESYPSESEFEKDKKADEEIEWIKSFIMGVRK

SEQ ID NO: 162590 - protein, 312 aa, Unknown
  Bacterial polypetide isolated from the Sargasso Sea
KDYIKKFYPTTVLVTGFDIIFFWVARMIMFGMEFLNKEPFKDIYVHALVRDEKGQKMSKSKGNVIDPLDLIEKYSADALRFTLLSMASPGTDVKLSEDRVKGYRNFLNKLWNANNFLITNKCDFKKTNKVPKISLNINKWIYSELIETKNKIQKNIEDYRFDEAAKIAYQFAWHSYCDWYIELSKTILYSEDKKVKKEVKEVSAYVFKQILVMLHPFIPFVTEEIWLKNKFDESNKNFLMYKNWPTGKIKKDQSLKEVEKIIKIISELRSFKNELNVSPGSFVDVAINKIAKKNKLLVNNNDVILKKLGSYQ

SEQ ID NO: 162591 - protein, 268 aa, Unknown
  Bacterial polypetide isolated from the Sargasso Sea
KSGENISGQMKKLGMSCDWSRERFTMDEGLSAAVRQVFVTLYDSGFIYKGSRMVNWDTKLMSAVSDLEVNLEEQTGKLWSVKYKCGDEFITIATTRPETILADTAVAVDPDDERYKSFIGKTAIIPIVNREVPIIADEYVDKEFGSGCVKITPAHDFNDYEIGLKHDLEVISCMKLDGTMSDDDFMPDNYKNLDRFEARDQIVNELSELGFLVSADEHVIQLPKGDRSKSILEPMITDQWFVKTKELADRGIAEVENENMKFIPKNWE

SEQ ID NO: 162592 - protein, 193 aa, Unknown
  Bacterial polypetide isolated from the Sargasso Sea
MNTDKYIHSEVENIIYSYWEKNRLFKPKKNSKKFSIVIPPPNVTGSLHMGHALNNSIQDMLVRYYRMNNYETLWQPGTDHAGIATQALVEKKLEKENLNKKDLGREEFIKKVWEWKDQYGDIIINQLKKLGCSCDWSRNAFTMDDNLSKSVIKVFVELHKKKLIYKAKKLVNWDTVLKTAISDLEVDQREMNS

SEQ ID NO: 162593 - protein, 101 aa, Unknown
  Bacterial polypetide isolated from the Sargasso Sea
MSLDKYVHFEAEKQIYRYWEKNKLFKPKINKKKYSIVIPPPNVTGSLHMGHALNNSIQDLLVRYHRMNGYETLWQPGTDHAGIATQALVEKKLSSENINKT

SEQ ID NO: 162594 - protein, 182 aa, Unknown
  Bacterial polypetide isolated from the Sargasso Sea
MSLDKYIHSDVEDNIYTYWEKNNLFKPKKNKKKFSIVIPPPNVTGSLHMGHALNNSIQDLLTRYYRMNNYETLWQPGTDHAGIATQALVEKKLNSENIKKNDLGREKFIEKVWDWKNQYGDIIINQLKKLGCSCDWSRNAFTMDENLSKAVIKVFVDLHKKKLIYKAEKLVNWNTVLKTAIF

SEQ ID NO: 162595 - protein, 296 aa, Unknown
  Bacterial polypetide isolated from the Sargasso Sea
MNNYETLWQPGTDHAGIATQALVEKKLNSENIKKNVLGREKFIKRVWDWKNQYGDIIINQLKKLGCSCDWSRNAFTMDKNLSKAVAKVFVDLYKKKIIYKDEKLVNWDTVLKTAISDLEVDQREVNSKIYYIRYPIDGSNDYITIATTRPETMLGDTAVAVNPKDKRYKKYVNKTVTIPIVGRKVKIIEDDYADPEQGTGALKITPGHDFNDYEVGKRNKLEIINIFTEDGKINKNGILEYVGLDRFEARKKILNDLKEKNYFVKEENIKNKVPYGDRSNSIIEPFLTEQWFADAK

SEQ ID NO: 162596 - protein, 191 aa, Unknown
  Bacterial polypetide isolated from the Sargasso Sea
MEFKKYNHSKEEKKISDFWIKKGLFKPKKNKSNKKFSIVIPPPNVTGRLHMGHALNNSLQDVLVRFNRMKGLETLWQPGTDHAGIATQAVVENNLLKEGIKKNDLGREKFIKKIWDWKEESGGIILDQLKKLGCSCDWSRTRFTMDEDLSKAVIKVFVDLHKNKLIYKDKKLVNWDTKLQTAISDLEVNQK

SEQ ID NO: 162597 - protein, 259 aa, Unknown
  Bacterial polypetide isolated from the Sargasso Sea
TWGWPNKNEYLKKFYPTTVLVTGFDIIFFWVARMMMFGMEFLNKEPFKDIYVHALVRDEKGQKMSKSKGNVIDPLDLIQKYSADALRFTLLSMASPGTDVKLSEDRVKGYRNFLNKLWNANNFLIQNKCNLKNAKKLPKLKVNINKWIYFELLQTSNLIKKNIEDYRFDEAAKNAYHFAWHKYCDWYLELSKTILFSDNLKAKNEVKEVSAFVFRQILIMLHPFIPFVTEKIWLTNKFDNKNKNFLMLSNWISGKSKKD

SEQ ID NO: 162598 - protein, 295 aa, Unknown
  Bacterial polypetide isolated from the Sargasso Sea
NNYETLWQPGTDHAGIATQALVERKLEKENQNKNTLGREKFIEKVWDWKNQYGDIIINQLKKLGCSCDWSRNAFTMDENLSKSVIKVFVELHKKKLIYKAEKLVNWDTVLKTAISDLEVDQREMNSKIYYIRYPIDKLSEFITIATTRPETMLGDTAIAVNPKDKRYKSFVGKTVTIPIVGRKIKIIKDNYADPEQGTGALKITPAHDFNDYDVGQRNKLEIINVFTEEGKINENAPKDYVGLDRFDARKKILNELKEKDYFVKEENIKNKVPYGDRSNSVIEPFLTEQWFVDAK

SEQ ID NO: 162599 - protein, 162 aa, Unknown
  Bacterial polypetide isolated from the Sargasso Sea
MSSEKYTHSKVENKIYSYWEKKGLFKPKKNKKKYSIVIPPPNVTGSLHMGHALNNTIQDLLIRFHRMNNFETLWQPGTDHAGIATQALVERKLESENVDKQSIGREAFIKKVWDWKKEYGDIIINQLKKLGCSCDWSRNAFTMDKNLSASVIKVFIDLYNKG

SEQ ID NO: 162600 - protein, 154 aa, Unknown
  Bacterial polypetide isolated from the Sargasso Sea
KGSLWNLRYPLADGKKTAEGNDYLIVATTRPETMLGDSAVAVHPEDERYKALIGSFVELPLLGRRIPIIADDYCDPEFGTGCVKITPAHDFNDYEVGKRHNLPLINIFDKNAAVLTTAQVFNLDGSVNEQIEANIPAQFAGLDRFQARKQIVAA

SEQ ID NO: 162601 - protein, 196 aa, Unknown
  Bacterial polypetide isolated from the Sargasso Sea
MENSNYNHTSIENEIYNYWEKNNFFKPKKNKKKHFSIVIPPPNVTGSLHMGHALNNSLQDLLIRFYRMNGYETLWQPGTDHAGIATQAVVEKKLLEKGIKKNEIGREKFIDEVWNWKKESGDKILNQLKKLGCSCDWSRNRFTMDKDLSDAVTKTFVQLYKKKLIYKDTKLVNWDTKLETAISDLEVNKEKVNLIC

SEQ ID NO: 162602 - protein, 219 aa, Unknown
  Bacterial polypetide isolated from the Sargasso Sea
TGAHDFNDYQVARRNNIPLYRLMDTKGRMRSDGAPYKEAASLAVNFSRGGEFSEAVIDSLNLVPEEFRGLDRFEARKLIVDHITDQGLAVYTDKEQPNGEHSEKIPFVEEKPIMQPFGDRSKVVIEPMLTDQWFVDTAKIVGPALDAVKSGRVEIIPNSDKKTYYHWLENIEPWCISRQLWWGHQIPVWFDQDGNQYCAINKEDAQRLAGNGAKLTRDP

SEQ ID NO: 162603 - protein, 303 aa, Unknown
  Bacterial polypetide isolated from the Sargasso Sea
DIIFFWVARMIMFGLKFTDQVPFHEVYVHGLVRDADGEKMSKSKGNVLDPLDLIDGIELEALVEKRTTGLMQPQMAERIAKTTRRQFPDGIPSFGTDALRFTFASLATQGRDIRFDLGRIEGFRNFCNKLWNASRFVMMNTESLSGHPLRDFETGPAERWITSRLQQVAGEISKSMEAYRFDQVVQTLHAFTWDEYCSWYLEIAKIQLSDAELSDSRKEGVRQTLVNTLDSALRLTHPVMPFITEALWQQLQSRTTGEGESIMHQPYPQRDEQLIDGSAVEDLEWVQAVVGGIRNIRGEMNIE

SEQ ID NO: 162604 - protein, 289 aa, Unknown
  Bacterial polypetide isolated from the Sargasso Sea
EEIGREKFLEKIWEWKAQSGGMIIEQLKRLGASCDWERNRFTMDTDFQNSVLTAFVKMYEMGYIYKGERLVNWDPHFKTAISDLEVENIEVDGYFWHIKYPLKNGENYDYRELDENGKISFKDNRNYISIATTRPETMLGDGAIAVNPDDERYKNIVGKEVIIPIANRSIPIIADEFADPNFGSGAVKITGAHDFNDYKVAKKHKLEFFKLMDESACLLNEDFIPNKYRGLERFKAREMLLEELDKANFLLKTEQKKIIQPFGDRSKVVVEPFLTKQWFVDTKKIVQPA

SEQ ID NO: 162605 - protein, 277 aa, Unknown
  Bacterial polypetide isolated from the Sargasso Sea
NEIINQLKRLGCSCDWSRERFTLDDGLSKAVRFVFVKLYNDKLIYKDKRLSNWDPKLKTTISDLEVIQKEVKGSLWYIDYKLENEDKVITIATTRPETMLGDTAIAVHPDDERFRDFVGKYAYIPILNKKIIIIADEYVKVDQGSGAVKITPAHDFNDYEIGKRHNLEVINIFNENAELNENCPIEYQNLDRFKAREKIVNELETIGALNKIEENIHTVPYGDRSGEVVEPWLTDQWFVNAKKLSLNAIDKVKTKETVFVPQNWEKTYFDWMENIQP

SEQ ID NO: 162606 - protein, 129 aa, Unknown
  Bacterial polypetide isolated from the Sargasso Sea
MEFKKYNHTKEEKKISDFWIKKGLFKPKKSKSNKKFSIVIPPPNVTGRLHMGHALNNSLQDVLVRFNRMKGLETLWQPGTDHAGIATQAVVENNLLKEGIKKNDLGREKFIQKIGNERAVRWNYLDQLK

SEQ ID NO: 162607 - protein, 70 aa, Unknown
  Bacterial polypetide isolated from the Sargasso Sea
DNIEDWCISRQIWWGHRIPAWYDDNGNIYVGENEQDVRNYYKLDAIDLKQDEDVLDTWFSSSLWPFGSLG

SEQ ID NO: 162608 - protein, 216 aa, Unknown
  Bacterial polypetide isolated from the Sargasso Sea
MEFKKYNHSKEEKKISDFWIKKGLFKPKKNKSNKKFSIVIPPPNVTGRLHMGHALNNSLQDVLVRFNRMKGLETLWQPGTDHAGIATQAVVENNLLKKGIKKNDLGREKFIKKIWDWKEESGGIILDQLKKLGCSCDWSRTRFTMDKDLSKAVIKVFVDLHKNNLIYKDKKLVNWDTKLQTAISDLEVNQKDVQSQLYYIDYAIENSDQKITMPPP

SEQ ID NO: 162609 - protein, 270 aa, Unknown
  Bacterial polypetide isolated from the Sargasso Sea
AVSDLEVVRQEKDGVLWHISYPLADSDEVLIVATTRPETMFGDMAVAVNPKDDRFKQHIGKYVELPFVGRKIPVIGDEYVDMEFGTGCLKITPGHDFNDYDIGKKYALHEVDGIVQTSDKLEDFAPINIFTDEAFSNDMVPAPFNNLDRFKVRKAVLEELKNKGLLVKEEKHHISVPRGERSNIVIEPKLSYQWYVKTEEMAQKANDAVNKGEVVFHPGNWDKTYFNWMDNIQDWCISRQIWWGHRIPAWHDSEGNTYVGYDEDEVREFY

SEQ ID NO: 162610 - protein, 253 aa, Unknown
  Bacterial polypetide isolated from the Sargasso Sea
YVELPFVGRKIPVIGDEYVDMEFGTGCLKITPGHDFNDYDIGKKYALHEVDGIVKTSDKLEDFAPINIFTDEAFSNDMVPAPFNNLDRFKVRKAVLEELKNKELLVKEEKHHISVPRGERSNIVIEPKLSYQWYVKTEEMAQKANDAVNRGEVVFHPGNWDKTYFNWMDNIQDWCISRQIWWGHRIPAWHDSEGNTYVGYDEDEVREFYQLDTRELTQEEDVLDTWFSASLWPFGSLGWPEDTADFKKFFPTT

SEQ ID NO: 162611 - protein, 245 aa, Unknown
  Bacterial polypetide isolated from the Sargasso Sea
MVEKFYPTSVLVTGFDIIFFWVARMIMFGTEFLNKEPFKDIYVHALVRDEKGQKMSKSKGNVIDPLDLIEKYSADALRFTLLSMASPGTDVKLSEDRVKGYRNFLNKLWNANNFLITNECDFTNIDKISNLSININKWIYAELIDAKSKIEKNLEDYRFDEAAKNAYQFAWHSYCDWYLELSKTILFSDNEEAKSEVKKVSSYIFKQILILLHPFIPFVTEEIWLKNKFDNSSKDFLMFANWADR

SEQ ID NO: 162612 - protein, 236 aa, Unknown
  Bacterial polypetide isolated from the Sargasso Sea
CGDEFITIATTRPETILADTAVAVNPDDERYKNFIGKTAIIPIVNREVPIIADEYVDKEFGSGCVKITPAHDFNDYEIGLKHDLEVISCMKLDGTMSDDDFMPENYKNLDRFEARDQIVNELSELGFLVSADDHIIQLPKGDRSKSILEPMITDQWFVKTKELADRGIAEVENENMKFIPKNWEKTYFEWMYNIQDWCISRQIWWGHQIPAWYDEDGNIYVATTESEVRAKYKLSD

SEQ ID NO: 162613 - protein, 319 aa, Unknown
  Bacterial polypetide isolated from the Sargasso Sea
MMMLGMEFLNKEPFKEIYVHALVRDEKGQKMSKSKGNVIDPLALIESYSADALRFTLLSMASPGRDVKLSEQRVKGYRNFLTKIWNANNFLKVNKCNFNGQINSKKLKLNINKWIYSELVNTINSAENCIKSYRFDEASKIIYKFVWNSYCDWYLELSKTILFSKNKKFIQEVRNTSGLVFKEILVILHPFIPFITEELWLKNKLGSKKNKYLMLTPWIKQGRVKQDKEIFNVNQVIEVISLLRSFKNELNVNPGSFVDISIKSVSKSKQNLFLNNEVILKKLGRINSIHTHDLNTEFASLVVAGEILKIYFDKSVDLS

SEQ ID NO: 162614 - protein, 210 aa, Unknown
  Bacterial polypetide isolated from the Sargasso Sea
AHTNDNVPKQFQDLDRFKVRKVVLEELKNKGLLVKEEKHPISVPRGERSNIVIEPRLSYQWYVKTADMAKKANAAVNKGEVKFHPNNWIKTYFNWMDNIQDWCISRQIWWGHRIPAWQDAEGNTYVGFDEEEVRSFYKLDNRKLNQVEDVLDTWFSSSLWSFGSLGWPNNTEGGERYFPTSLLVTGFDIIFFWVALNDDDEPGVHRANSI

SEQ ID NO: 162615 - protein, 279 aa, Unknown
  Bacterial polypetide isolated from the Sargasso Sea
AGIATEMVVERELKKMNINKKDLSREQFIEHVWEWKKQSGNEIINQLKRLGCSCDWSRERFTLDEGLSKAVRFVFVKLYNDKLIYKDKRLSNWDPKLKTTISDLEVIQKEVKGSLWYIDYKLENEDKVITIATTRPETMLGDTAIAVHPDDERFKDFVGKYAYIPILNKKITIIADEYVKVDQGSGAVKITPAHDFNDYEIGKRHNLDVINIFNENAELNENCPIEYQNLDRFEAREKIINELETIGALNKVEENIHTVPYGDRSGEVVEPWLTDQWFV

SEQ ID NO: 162616 - protein, 129 aa, Unknown
  Bacterial polypetide isolated from the Sargasso Sea
MSNDKYNHLEVEDKIYKYWENHKLFKPKKNKKKFSIVIPPPNVTGSLHMGHALNNSIQDLLTRYHRMNNYETLWQPGTDHAGIATQALVEKKLENEGINKNDIGREEFIKKVWEWKGEYGDIIINQLKS

SEQ ID NO: 162617 - protein, 273 aa, Unknown
  Bacterial polypetide isolated from the Sargasso Sea
DHAGIITQLLVEKDLEESGVTKHDLGRDNFLSKVWEWKEKSGDNITNQMKSLGMSCDWSRERFTMDEGLSKAVLKVFVSLYDNDLIYKGTRMVNWDTKLKSAVSDLEVSSETQLGKLWTIKYKVGEEFLSIATTRPETLLGDTAVAVNPTDERYKHLIGKNIQIPIVNRDVKIIADEYVDTNFGSGCVKITPAHDFNDYEIGQTHDLELIQCIDFDGKIVNDDFVPEHLRGLERFEAREKIIQILEKEGLLEKVEDHEIQIPKEDRSKTIWNQ

SEQ ID NO: 162618 - protein, 100 aa, Unknown
  Bacterial polypetide isolated from the Sargasso Sea
MDKRYEPLIIEEKWSELWAKNNLGKNNSSQTFSQVIPPPNVTGTLHMGHSFQYSIMDFYARYNHLNDVNTHWQKGTDHAGIATQMVVENNLSREKIDKND

SEQ ID NO: 162619 - protein, 298 aa, Unknown
  Bacterial polypetide isolated from the Sargasso Sea
DIIFFWVARMMMFGMEFLNKEPFKNIYVHALVRDEKGQKMSKSKGNVIDPLDLIEKYSADALRFTLLSMASPGTDVKLSEDRVKGYRNFLNKLWNANNFLITNKCDFKKIDKVPKTTVNINKWIYSELIQTKDKIERNLKDYRFDEAAKNVYQFAWHSYCDWYIELSKTILFSDDKKSKKEVKEVSAYIFKQILVILHPFIPFVTEKIWLKNKFDKSDKNFLMHANWPSGKTKKDQSMKDVESIINVISELRSFKNELNVSPGSFIDISINKIAKKNKKLMTNNEIILKKLGRINNFY

SEQ ID NO: 162620 - protein, 231 aa, Unknown
  Bacterial polypetide isolated from the Sargasso Sea
MKLLDKKYSPSELEDRWYNHWLEKDYFSSKPSDNHYTIVIPPPNVTGKLTMGHVLNNTIQDILIRKARMEGKNACWVPGTDHASIATESKVAKMLQEKGIDKKDISREEFLEHAWEWKEKYGGIIINQLQKLGCSCDWDKLSFTMDEKYSDAVLESFVRLFNKGLIYKGNRLVNWCPKSQTALSDEEVIFNEVNGKLWYIKYAIENSDTFIEIATTRPETMLGDVAIAVNP

SEQ ID NO: 162621 - protein, 216 aa, Unknown
  Bacterial polypetide isolated from the Sargasso Sea
MSLDKYIHSDVEDKIYTYWEKNNLFKPKKNKKKFSIVIPPPNVTGSLHMGHALNNSIQDLLTRYYRMNNYETLWQPGTDHAGIATQALVEKKLNSENIKKNDLGREAFIEKVWDWKNQYGDIIINQLKKLGCSCDWSRNAFTMDENLSKAVIKVFVDLHKKKLIYKAEKLVNWDTVLKTAISDLEVDQREVNSKIYYIRYPIDGTSEYITIATTRP

SEQ ID NO: 162622 - protein, 138 aa, Unknown
  Bacterial polypetide isolated from the Sargasso Sea
MSSDKYIHSDVENRIYSYWEKNGLFKPKENSKKFSIVIPPPNVTGSLHMGHALNNSIQDLLVRYHRMNNFETLWQPGTDHAGIATQALVEKKLTSEKIDKNEIGREKFIEKVWEWKEQYGDIIINQLKKLGCSCDWSR

SEQ ID NO: 162623 - protein, 308 aa, Unknown
  Bacterial polypetide isolated from the Sargasso Sea
CPLAFFSLGWPDETYDLKTFYPTNVLVTGFDIIFFWVARMVMMGLKFMNEIPFKEIYIHGLIKDKNGQKMSKSKGNILDPIDLIDGISLDELLDKRVQGLMQPEMEKRIINDTKKEFPNGIPDFGTDALRFNFAIQASTGRDIRLDLKRVEGYRNFCNKIWNASRFIKMNTNDFELLEIKDTKGHPIDQWIQSKFVETIDEVEKQFSQYRFDLAATAMYEFVWNDFCDWYIELSKALINEPGIKQSQKDYTKNNLIKMLDAILRMLHPTIPFITEEIWQSLSEENNKKSIMKADFPSSKNWKADTEIA

SEQ ID NO: 162624 - protein, 122 aa, Unknown
  Bacterial polypetide isolated from the Sargasso Sea
MISDKYIHSKVEDKIYAYWERNKLFKPQKNSKKFSIVIPPPNVTGSLHMGHALNNSIQDFLVRYYRMNNYETLWQPGTDHAGIATQALVERKLEKEDLNKISLGREKFIEKVWEWKNEYGDI

SEQ ID NO: 162625 - protein, 167 aa, Unknown
  Bacterial polypetide isolated from the Sargasso Sea
MSFDKYEHKNVENKIYDYWEKNELFKPKENSKKFSIVIPPPNVTGSLHMGHALNNSIQDVLTRFHRMNNYETLWQPGTDHAGIATQALVEKKLAKEGVKKNDLGREKFIEKVWEWKNEYGDIIINQLKKLGCSCDWSRNAFTMDENLSKSVIKVFVDLYNKKLIYKA

SEQ ID NO: 162626 - protein, 223 aa, Unknown
  Bacterial polypetide isolated from the Sargasso Sea
DQIPFKDVYVTGLIRDENGQKMSKSKGNVIDPLDLIYGISQDDLVEKRTTNLMQEGKAKKIENKTRNQFPKGIDSYGTDALRMTFYSLATHTKDISFEMGRLKGYRNFCTKVWNAARFINGYPAGNDKFQSTNKTDEWIYEEFENSKKQIEKNIKDYRLDYAINEVYEFFWNKFCDVYIEECKKSGETDNLRPLLKEILIMMHPFAPFITEEIHSLLFDSPII

SEQ ID NO: 162627 - protein, 229 aa, Unknown
  Bacterial polypetide isolated from the Sargasso Sea
MIIPPKYNHIEIEKKWYSYWMKNNLFKSIPNDKEPFTIVIPPPNVTGLLHMGHMLNNTLQDILVRRARMLGKNACWVPGTDHASIATEAKVVENLKKKGINKTDISRDEFLKHAWDWTDKYGGGILDQLKKLGCSCDWDRTKFTLDDDMYESVIKAFEILHKKGLIYRGNRMINWDPEAKTTVSDEEVNYVEEDSSLYYIRYLIEDSNIDLEMATTRPETIFGDTAICV

SEQ ID NO: 162628 - protein, 173 aa, Unknown
  Bacterial polypetide isolated from the Sargasso Sea
MSQDRYNHKKVENRVYSYWEKNKLFKPKKNKKSFSIVIPPPNITGSLHMGHALNNSLQDVLARYYRMNNHETLWQPGTDHAGIATQALVEKKLKSINIDKNQIGREKFIKKVWEWKNEYGGKIINQLKKLGCSCDWSRNTFTMDKNLSKSVLKVFVELHQKKLIYKSKKLVNW

SEQ ID NO: 162629 - protein, 153 aa, Unknown
  Bacterial polypetide isolated from the Sargasso Sea
MSSDKYIHENVENKIYSYWEEKNLFKPKSNKKQFSIVIPPPNVTGSLHMGHALNNSIQDLLTRYHRMNNFETLWQPGTDHAGIATQALVEKKLKSEGIDKNDLGRDKFIEKVWEWKGQYGDIIINQLKKLGCSCDWSRNAFTMDENLSKSVLK

SEQ ID NO: 162630 - protein, 216 aa, Unknown
  Bacterial polypetide isolated from the Sargasso Sea
MSFDKYEHKNVENKIYDYWEKHELFKPKENSKKFSIVIPPPNVTGSLHMGHALNNSIQDVLTRFHRMNNYETLWQPGTDHAGIATQALVEKKLAKEGVKKNDLGREKFIEKVWEWKNEYGDIIINQLKKLGCSCDWSRNAFTMDENLSKSVLKVFVDLYNKKLIYKAKKLVNWDVVLKTAISDLEVDQREVNSQLYYINYPIENSDKFITIATTKT

SEQ ID NO: 162631 - protein, 185 aa, Unknown
  Bacterial polypetide isolated from the Sargasso Sea
MEFKKYNHTKEEKKISDFWIKKGLFKPRKNNSNKKFSVVIPPPNVTGRLHMGHALNNSLQDVLVRFNRMKGLETLWQPGTDHAGIATQAVVENNLHKEGLKKNDLGREKFIKKVWDWKEESGGIILDQLKKLGCSCDWSRTRFTMDKDLSEAVIKVFVDLYNNNLIYKDKKLVNWDTKLQTAILT

SEQ ID NO: 162632 - protein, 292 aa, Unknown
  Bacterial polypetide isolated from the Sargasso Sea
MSIPSKFISKKIEKKWYSHWIENNFFDSIPDSRDPYTIVIPPPNVTGVLHMGHMLNNTLQDILIRRARMMGYNACWVPGTDHASIATEAKVVEKLKKDGIKKSDLSREDFLEYAWEWKGKYGDIILNQLKKLGCSCDWKRTKFTLDDKMSDSVIKVFIDLYNKGLIYRGYRMLNWDPKAQTTLSEEEVLFEEREAKLYHIAYELYGSEEKIIIATTRPETLIGDTAVCINPKDERYSHLTEQSVLIPIVNRKVPIIKDDYVDIDFGTGCLKVTPAHDFNDNVLGEKHNLEVI

SEQ ID NO: 162633 - protein, 200 aa, Unknown
  Bacterial polypetide isolated from the Sargasso Sea
MSSEKYIHTKVENKIYSYWEKKQLFKPKKNKKKYSIVIPPPNVTGSLHMGHALNNTIQDLLIRYHRMNNYETLWQPGTDHAGIATQALVEKKLESQNINKKSIGRDKFVKKVWEWKNEYGGIIINQLKKLGCSCDWSRNAFTMDKNLSSSVIKVFIDLYNKGLIYKSKKLVNWDTVLKTAISDIEVDQREVNSKLYYINY

SEQ ID NO: 162634 - protein, 379 aa, Unknown
  Bacterial polypetide isolated from the Sargasso Sea
IMFGTEFLNKEPFKDIYVHALVRDEKGQKMSKSKGNVIDPLDLIEKYSADALRFTLLSMASPGTDVKLSEDRVKGYRNFLNKLWNANNFLITNECEFKDIDKVPSLNVNINKWIYSELVETKNKIEKNLEDYRFDEAAKNAYQFAWHSYCDWYLELSKTILFSEDEKAKAEVKKVSSFVFKQILILLHPFIPFVTEEIWLKNKFDNDGSDYLMLKNWLSGEINKDTSTEQVENIINIISEIRSFKNELNVSPGSFIDVSISNINKNQKDFINTNEIILKKLGRINSILDKDLDKPAATMVVSGDLFKIYFDKDVDLKLIKENLTNKQSRLEQEMNKISQRLENKSFVDRAPKEIVEQEKNNYNNLKNDIEKISVTIKGI

SEQ ID NO: 162635 - protein, 210 aa, Unknown
  Bacterial polypetide isolated from the Sargasso Sea
MDKKPYDPSDIEQKLYKAWEDSGLFAPGDNPEAYSLAIPPPNVTGTLHMGHGFQNAIMDCLIRYYRMSGKNTLWQVGTDHAGIATEMVVERRLNAEGKTKSDIGREAFEEEVWNWKKVSGNKITSQLRRLGSSLDWSSERFTLDEEYQHAVLSAFIQLFEEGLIYQGQRLVNWDPVLETSLSDLEVVNKDLKIKIWEIKYQLEATDEFVT

SEQ ID NO: 162636 - protein, 131 aa, Unknown
  Bacterial polypetide isolated from the Sargasso Sea
MLEKHYKPSFLEEKFYKIWEKSGVFSANPESCKQPYAIMMPPPNVTGSLHMGHGLTFSLQDILIRYYRKTGRDTLWQPGTDHAGIATQMVVERQLAVEGVSRQELGRTKFLEKVWQWKRESGGKITEQLRS

SEQ ID NO: 162637 - protein, 220 aa, Unknown
  Bacterial polypetide isolated from the Sargasso Sea
MPSNQLDKTYRSNLVEDKWYEHWIEQDYFTADSSSEKEPYTIVIPPPNVTGMLTVGHVLNNTIQDILIRKARMEGKEACWIPGTDHASIATESKVVAMLHEKGINKNDLSREEFLEHAWEWKEKYGGIIIRQLKKLGCSCDWSRERFTMDEGYTNAVLTAFVELYNKGLIYKGHRLVNWCPISRSAISDEEVIHKEKQGFLWHFRYPITNSDQYIVVQQR

SEQ ID NO: 162638 - protein, 262 aa, Unknown
  Bacterial polypetide isolated from the Sargasso Sea
MKNTPLDKRYKPSKIEDKWYQHWMGKKYFKADEHSKKEPFTIVIPPPNVTGILHLGHVLNNTIQDVLIRKARMEGKEACWIPGTDHASISTESKVVEMLKSKGINKKDLDRDEFLKYAMDWKDEYGGIIIKQLKKLGCSCDWDRETFTMDEGYSKAVLTAFVNLYKKGIIYRGNRLVNWCPISQSAISDEEVIYREIKGKLWYFKYPIKGLKEFIVVATTRPETMLGDSAVAINPGDKRFKHLIGESVILPLVDKEIPIISD

SEQ ID NO: 162639 - protein, 346 aa, Unknown
  Bacterial polypetide isolated from the Sargasso Sea
MGNSFMGKEPFSEVYIHALVRDEKGQKMSKSKGNVVDPLDLVDKYGADSLRFTLTAMAAQGRDVKMSESRVQGYRNFGTKIWNASKFCEINKINEFNSFDSKSLSYPLNIWVLNEFSKMQTQLENNLKEYRFNEAANNIYQFVWGTFCDWYIELIKPHLSEKDDEYADEIKETCSYILDSILITLHPFMPFITEEIWQNIKRRDNPLIIEKWRKISLLDDENNFEQEVNDLIEIISNIRSIRVELNIKPKEDLAIEIMNNSDVLKIKNLKFYLLKIANITNIIEVSKFSEKSANFNVNNSQLSLIIPESIDLSDELQRVVKEEEKLENDIHSITNRLNNEDFVAKA

SEQ ID NO: 162640 - protein, 164 aa, Unknown
  Bacterial polypetide isolated from the Sargasso Sea
MGFGKYNHKKVESRIYSYWEKNKLFKPKKNKKTFSIVIPPPNITGTLHMGHALNNSLQDVLVRFYRMNNYETLWQPGTDHAGIATQALVEKNLKSKNIDKNIIGREKFIKKVWQWKDEYGEKIINQLKKLGCSCDWSRNAFTMDKNLSKSVIKVFVELHEKKLI

SEQ ID NO: 162641 - protein, 388 aa, Unknown
  Bacterial polypetide isolated from the Sargasso Sea
IIFFWVARMMMFGMEFLNKEPFKDIYVHALVRDEKGQKMSKSKGNVIDPLDLIEKYSADALRFTLLSMASPGTDVKLSEERVKGYRNFLNKLWNANNFLITNKCDFKKTDKVPKVTLNINKWIYSELMDIKNKIQKNIEDYRFDEAAKNAYQFAWHSYCDWYIELSKTILYSDDKKAQKEVKEVSAYIFKQILIMLHPFIPFVTEEIWLKNKFDKSNKNFLMYKNWPKGKVKKDQSQKDVEKIINIISELRSFKNELNVSPGSFVDVSINKIAKKNKSLMNNNEIVLKKLGRINNFYDKDQNKPSATLVISGDIFKVYFDENVDLNLIKQNLLKRQNKYQEEMDKISQRLSNKGFVDRAPKNIVEQEKTNYSNLKDDIKKISLTIESL

SEQ ID NO: 162642 - protein, 175 aa, Unknown
  Bacterial polypetide isolated from the Sargasso Sea
MSSDKYIHSDVENRIYSYWEKNGLFKPKENKKKFSIVIPPPNVTGSLHMGHALNNSIQDLLVRYHRMNNFETLWQPGTDHAGIATQALVEKKLTSEKIDKNEIGREKFIEKVWEWKEQYGDIIINQLKKLGCSCDWSRNAFTMDENLSKSVIKVFVDLYNKGLIYKDKKLVNWDT

SEQ ID NO: 162643 - protein, 358 aa, Unknown
  Bacterial polypetide isolated from the Sargasso Sea
MIGLETVKDLSKFYPTNALVTGPDIIFFWVARMIITGYEFIGQKPFTDVYFTSILRDETGKKLSKSLGNSPDPFDLFDEYGTDAVRFGIMLMAPQGIDVLFSKERLEIGRNFMNKLWNACRFISMNKPDDWFEEYSPDPEELKLPDKWILSRLNQAIEKYNHQLERFHFNEAAKVLYDYIWNDFCDWYIEIAKTRFYSEDIDSKMMTYYVCISSIRKTVALLHPYTPFITEELWSFFKDENSNDLIISKWPKESKDLIDEKVTQAMEILKDIISSVRAIRSRMNIPPSKKINLYIKCKEAQVDFIYQNNNLIMSLAKLESYSAGSSIQKPSQSAAAVVHGMELYIPLEGLVDLGKERL

SEQ ID NO: 162644 - protein, 189 aa, Unknown
  Bacterial polypetide isolated from the Sargasso Sea
DFEIGKRHELDSINIMNDDASINDNAPKKYIGQSRFDARKQIVNDIEKAGLLEKTEKYLHTVGYSERGDVPIEFYMSDQWFMKMSELVQPAIEAVDAGEIRFHPAHWVKTYNHWMKNIKDWCISRQLLWGHQIPVWYHKNDSAKIHVSVDGPKDKENWYQDSDVLDTWASSWIWPMGVHDWPRDSEGSK

SEQ ID NO: 162645 - protein, 267 aa, Unknown
  Bacterial polypetide isolated from the Sargasso Sea
LGWPKENELEKYFPTSLLVTGFDIIFFWVARMMMMSLEFTGKVPFKDVYVTGLIRDENGQKMSKSKGNIIDPIDLIYGIDLEDLVTKRTANLMQEGLAEKIERKTRKQFPNGIESYGTDALRMTFFSLATHTRDISFELGRLKGYRNFCNKIWNAARFINNYPHESTEFVAKNDHDKWIEKEFEQVSQQIKKNIDEYRLDFAVNEVYEFFWGKFCDKYIEDCKKSGETSNLHPMLKKILVLMHPFAPFITEEVNELVFKDGSLMDSK

SEQ ID NO: 162646 - protein, 409 aa, Unknown
  Bacterial polypetide isolated from the Sargasso Sea
KKYYPGSVLVTGFDIIFFWVARMMMMGMHFMDQKVPFKDIYIHGLVRDEKGQKMSKSKGNVMDPLDLSEKYGADALRFTLAALATQGSDIKLSETRIAGYRNFSTKIWNATKFLENNKCTFNKDYRPKKLKNNINIWIVNEFNSTLKKLYENLNSYKFNEAADNIYKFFWNSYCDWYIELIKPSLSEKSVSEDISEFRNVSSWILFNSLSIINPFMPYVTETLSKEYFGSKELLIVSKWPEPCLIEDNNIAKNEINFLISLLTEIRIIRSELNIPYKQKLELLIRNNESLKLSIITKYEDIICDISKLSSIKIISHEFPNGSATGVVGELSIGIPLSGTINLDDEIIRLKKEINKVDEEILKFDQNLSNKNFINRAPEKVVNELKNKRNASIDKKNKLNEALNRVDFKK

SEQ ID NO: 162647 - protein, 438 aa, Unknown
  Bacterial polypetide isolated from the Sargasso Sea
VLVTGFDIIFFWVARMIMMTTHFINEVPFKKILIHGLIKDSEGQKMSKSKGNTLDPLDIIDGINLDNLIKKRTEGLMQPKMRDRIIKQTKKEFPNGIEAYGTDALRLTFCSLATGGRDINFDVKRVEGYRNFCNKLWNAARFIDLNIDNYGISTKRSESSIDSWIDYKFNQTVKKVDQSMNEFRFDLTTKAIYEFIWYEFCDWFIELQKISLRKNDMNKAEIVRSLVDILEKTLRLAHPIMPFITEEIWKQFKVHHNSTHESIMVSEYPLGSENTSERDYQSVEWLKDIVSGIRNIRGELLIKPSIKISSIFKGGDQLDKGNLNEIGSYIEKLCGLKEIIWAEESSQDIPSSIFTRDNLKVMIPLEGLIDAKEEMQRLNKKISKLIQEKEMLGSKLSNQNFVENAPKDLVEAQKDRFSLLSKELENLDLQIKEIKKMI

SEQ ID NO: 162648 - protein, 112 aa, Unknown
  Bacterial polypetide isolated from the Sargasso Sea
MSFDKYEHKNVENKIYDYWEKNDLFKPKENSKKFSIVIPPPNVTGSLHMGHALNNSIQDVLTRFHRMNNYETLWQPGTDHAGIATQALVEKKLTKEGVKKNDLGREKFIEKV

SEQ ID NO: 162649 - protein, 51 aa, Unknown
  Bacterial polypetide isolated from the Sargasso Sea
MVWARWRNFCCRKFRWRSQDSQGTLQKDVKLVQDEDVLDTWFSSALWPFST

SEQ ID NO: 162650 - protein, 201 aa, Unknown
  Bacterial polypetide isolated from the Sargasso Sea
MSSDKYIHENVENKIYSYWEEKNLFKPKSNKKQFSIVIPPPNVTGSLHMGHALNNSIQDLLTRYHRMNNFETLWQPGTDHAGIATQALVEKKLKSEGIDKNDLGREKFIEKVWEWKGQYGDIIINQLKKLGCSCDWSRNAFTMDDNLSKSVLKVFVEMYKNGLIYKSKKLVNWDTVLKTAISDLEVDQREVNSKLYYINLS

SEQ ID NO: 162651 - protein, 608 aa, Unknown
  Bacterial polypetide isolated from the Sargasso Sea
MEPKITEKAWEPKLEEAILKKWEDEKLYDFKLEDNNYTIDTPPPYPSGRPWHIGAASHYAQIDMIARTARMNGKNVYFPIGIDRNGLPVELYTEKKHGIRMRETERGEFLKLCQNALDDLEAEMIEIMKSLGLSGDFKNYYRTDSEEYRKFTQETFIDLWKKGVIYLATRPNNYDWVSGTTIADAEIVYDDLPTKLVYMKFIVKDENKEIIIASTRPELLCACKTVIVNPEDERYSDLIGKKLVVPLTNKEVTITPHHSAKIEFGSGAVMVCSYGDQNDVALFRELQLEEVIAIGLDGRMTESAGDYQGLKPKQARTKIIEDLENSNLVEKIEEISHRTPLSERSKTPIEIVPMEEYYLKQKDSIDKMKKLGSEIEFYPNMHKQILMNWLESISIDWPISRRRFYGTEIPIWYCKECSEPFVPEPGKYYRPWKDSCPAEKCEKCGNTEFIGEDRTFDTWMDSSVSPLFVTKFNRDDEFFKKTYPTGIRPQAKDIVRTWLYYTLLRCEKLTEQKPWSEAWIMGYGLDEKGMKMSKSKGNAIDPLPVIQKSGADTFRFWSASEINQGYDFRCSEQKIESTKKFLSKLWNVSRFLSSFPIIESGKLTDSDK

SEQ ID NO: 162652 - protein, 104 aa, Unknown
  Bacterial polypetide isolated from the Sargasso Sea
MDEEKENLFSNYNPKRIEEEWLDTIISENNTDGTDFYSIAIPPPNVTGNLHLGHALNSTIQDVLIKYNSLIGLNVRWTPGTDHAGIATQLLVEKALNSEGVDSS

SEQ ID NO: 162653 - protein, 149 aa, Unknown
  Bacterial polypetide isolated from the Sargasso Sea
MELDKFFDFLKDERHLYSQWEESNCFKPKKGGEPYSIMMPPPNVTGSLHMGHALTFTVQDILIRYHRMKGMEVLWQAGTDHAGIATQMVVERKLSESNLDRRSIGREKFINKVWEWKKESGGQISNQLRRLGASRRLVKRKIYDGRWSF

SEQ ID NO: 162654 - protein, 92 aa, Unknown
  Bacterial polypetide isolated from the Sargasso Sea
MDKRYEPLIIEEKWSELWAKNNLGKNNSSQTFSQVIPPPNVTGTLHMGHSFQYSIMDFYARYNHLNDVNTHWQMGTDHAGIATQMVVETIYP

SEQ ID NO: 162655 - protein, 190 aa, Unknown
  Bacterial polypetide isolated from the Sargasso Sea
MLEDSYEPLSIEQKWQSEWELKNQFKPVESDKQFSIVIPPPNVTGSLHMGHALEHSIIDVIVRIKRLQGFETLWVPGTDHAGIITQLLVENELSEKGLSKEDVGRENFISKVWEWKEKSGENISGQMKKLGMSCDWSRERFTMDEGLSAAVRQVFVTLYDSGFIYKGSRMVNWDTKLMSAVSDLEVNLEE

SEQ ID NO: 162656 - protein, 355 aa, Unknown
  Bacterial polypetide isolated from the Sargasso Sea
EKGQKMSKSKGNVIDPLDLIQKYSADALRFTLLSMASPGTDVKLSEDRVKGYRNFLNKLWNANNFLIQNKCNSKNAKKLPKLKVNINKWIYFELLQTSNLIKKNIEDYRFDEAAKNAYHFAWHKYCDWYLELSKTILFSDNLKAKNEVKEVSAFVFRQILIMLHPFIPFVTEKIWLTNKFDNKNKNFLMLSNWISGKSKKDSDHKQVQQIIDIISEIRSFKNELNVSPGSFIDISINSIKKNNQNFMINNEIIIKKLGRINNFFKKDQNKPAASLIISGDLFKIYFDENVDLNAIKENLLKRQNKYQEEMDKISQRLSNKGFVQRAPKDIVQQEKTNYSNLKNDIKKISLTIESL

SEQ ID NO: 162657 - protein, 126 aa, Unknown
  Bacterial polypetide isolated from the Sargasso Sea
MSFDKYEHINVENKIYDYWEKNRLFKPKENSKKFSIVIPPPNVTGSLHMGHALNNSIQDVLTRFHRMNNYETLWQPGTDHAGIATQALVEKKLAKEGVKKNDLGREKFIDKVWEWKNEYGDIIINQ

SEQ ID NO: 162658 - protein, 141 aa, Unknown
  Bacterial polypetide isolated from the Sargasso Sea
YFAPDMDSGKEPFTITLPPPNVTGELHLGHALEKAIEDALVRWKRMTGHKVLWQPGSDHAGIATQWAVELQLAKEGISRHDLGRDKFLEKVWEHVDKFGGIIHEQSRRLGISADWDRHLFTLDPGPSLAVRTTFVNCTRRG

SEQ ID NO: 162659 - protein, 59 aa, Unknown
  Bacterial polypetide isolated from the Sargasso Sea
MDKKYQPHKFEEKHYKCWEENGYFKPQGKGDPYCIVIPPPNVTGTLHMGHAFQIQLWIV

SEQ ID NO: 162660 - protein, 129 aa, Unknown
  Bacterial polypetide isolated from the Sargasso Sea
MEFKKYNHSKEEKKISDFWIKKGLFKPKKNKLNKKFSIVIPPPNVTGRLHMGHALNNSLQDVLVRFNRMKGFETLWQPGTDHAGIATQAVVENNLLKEGIKKNDLGREKFIKKIWDWKEESGGIILDQL

SEQ ID NO: 162661 - protein, 303 aa, Unknown
  Bacterial polypetide isolated from the Sargasso Sea
MSISAKFDPKSFEDKWYKYWLDNNIFKSTPDKRKPYTIVIPPPNVTGVLHMGHMLNNTIQDILIRRARMKGYNACWVPGTDHASIATEAKVVEKLKNEGIMKNSLSRDQFLDYAWKWTNEYGDVILDQLKKIGCSCDWDRTKFTLDPMMSKSVINVFIDLYNKGHIYKGYRMVNWDPKAQTTLSDEEVIFKEQKGKLFYVSYMIYGEKNKSITIATTRPETILGDTAICINPNDKRYINLHGKKVVVPIVGRVIPIILDEYVDPDFGTGCLKVTPSHDPNDKILGEKFDLELIDVLNLDGTVN

SEQ ID NO: 162662 - protein, 407 aa, Unknown
  Bacterial polypetide isolated from the Sargasso Sea
YGEEKDDFVVASNFDEALIKANEKSGRTIKAEDLHQDEDVMDTWFSSWIWPIAVFDGFNEDNTKELDYYYPTNDLVTAPEIMFFWVARMIISGYEYKNNPPFKNVYYTGIVRDKLGRKMSKSLGNSPDPLELIKKFGADGVRVGMLLSSPAGNDLLFDSNLCEQGRNFTNKVWNAFRLINSWTVNDDLEQLESSKVAVKWMSEKFYSNLESINQSYDKFRISEALMGTYKTVWDDFCSLFLEMVKPAYEHPIDSTTFNDVKVLFDLVLRLIHPFTPFIAEEIWQQLDNRKPEEFIVNASWPKKPSTLKIDYLEDFNEFQQVITELRNLRNQKNIANKVSIDLKIKNNESRSKKFDSVLIKLGNISTLEYITDSVKGAYSFVVNAKEFFIPFNDEIDVDAELDKIQHE

SEQ ID NO: 162663 - protein, 357 aa, Unknown
  Bacterial polypetide isolated from the Sargasso Sea
RDEKGQKMSKSKGNIIDPLVLLDKYGADTLRFTLTALLNPGRDVKLAEDRVKGYKSFTNKIWNAANFLNINQVLFIDSLDNENISLDTSKWILKEYQNVQAQYFKNIEKYQFHEIASLIYHFTWHTFCDWYIEFIKSDFANDEKSEETKKVSGWIFIQILKLLHPIMPFITEKLWLSLVDSQSFLMSQNFTKITFDDSFIKSNKYTKKVIEVMTALRNLRADLNISYKNEIEIFVETKNEDLKKFINNFQNEFKRLIKTKSIKFEKVSSQKKSAFIVLNEITILVPLEGIVDTEKEKSKLNDKKNIYSKKLEAVLDKLNNKAFIDKAPNNVIENFKIQEKEINSSIEKINEIMNTIN

SEQ ID NO: 162664 - protein, 97 aa, Unknown
  Bacterial polypetide isolated from the Sargasso Sea
MGTGKYNHKKVEGKIYSYWEKNKLFKPKKNKKTYSVVIPPPNVTGSLHMGHALNNSLQDVLIRFHRMNEFETLWQPGTDHAGIATQALVEKYLKSKN

SEQ ID NO: 162665 - protein, 112 aa, Unknown
  Bacterial polypetide isolated from the Sargasso Sea
MSLTKFFNFIEDEKKIYVNWENSDSFKSKKNEESYSIMMPPPNVTGSLHMGHALTFTIQDILIRYHRMQGKEVLWQAGTDHAGIATQMVVERKLLDEGLDRRTLGREKFMKK

SEQ ID NO: 162666 - protein, 265 aa, Unknown
  Bacterial polypetide isolated from the Sargasso Sea
LGWPEKTDDFKSFFPTSLLVTGFDIIFFWVARMIMMSIEFTGKIPFKDVYVTGLIRDENGQKMSKSKGNIIDPIDLIYGISIEDLVEKRTSNLMQEGIAEKIERKTRKQFPNGIESYGTDALRMTFYSLATHTKDISFEFGRLKGFRNFCTKMWNAARFIDGYANEKDKFKAENVHDKWIYDEFSKTKKQINKNISDYRLDFAVNEIYEFFWNKFCDVYIEQCKKSGETSNLRPLLKEILQLVHPFAPFITEEINTILFDERIIT

SEQ ID NO: 162667 - protein, 175 aa, Unknown
  Bacterial polypetide isolated from the Sargasso Sea
ALWTFSTLDWPNKTYELEKFYPSNVLVTGFDIIFFWVARMMMMGSYFMKETPFKDIYIHPLIRDEKGQKMSKSKGNIIDPLELLDKYGADTLRFTLTALLNPGRDVKLSEARVKGYKSFTNKIWNAGKFLQMNNSVFKDDISINEISFEANKWIIKELNDLISQLDQLTKKVFVS

SEQ ID NO: 162668 - protein, 303 aa, Unknown
  Bacterial polypetide isolated from the Sargasso Sea
FLEIISDYKVKSLFFAPTAFRAIKKEDPEGKFFSKYNLSNFESLFLAGERADPDTIKWAENLLKVPVIDHWWQTETSWAISSNCTGIEMMKTKYGSACKAVPGYDVKIIKSDQTLAKPNEMGDIVVKLPLPPGTFPTLWNADERYKDNYMSNYNGYYQTYDAGHIDEDGYIWIMSRTDDIINVAGHRLSTGAIEEVLSDHQSVAECAVLGISDKLKGQLPIGLIVLKAGVDKDNETISKECVKMVRDKIGPVAAFKVTIVIKRLPKTRSGKILRGTIRKIADNVEYKVPPTIDDPTILDEIKE

SEQ ID NO: 162669 - protein, 321 aa, Unknown
  Bacterial polypetide isolated from the Sargasso Sea
FWEKLKFKCGNTLAVCDLRGKYKEKFSYSELADLITKVSSSFENKYGLKKGDVVTVISENSPRWLAVDQGLMRLGAINAVRGINSPSVELDYIIEHSNSVGLIVQSKEIWLKLNNKEELKKRLKFIINLEDEQFESLISWSKFISSVEKENSQNNNLEKFNPKIDDVATILYTSGTTGKPKGVPLTHANFLHQIINLAYIADPEPGTSVLSVLPIWHSYERSAEYFFFSCGCSQHYTIPKFLKDDITQVKPVVMATVPRLWEAIHDGFFQALKKMPSKKQKLIKFLISNSSVFKRSLRKIRNIDINQITFKSKIPLLGSVI

SEQ ID NO: 162670 - protein, 305 aa, Unknown
  Bacterial polypetide isolated from the Sargasso Sea
GSNEFAYILYTSGTTGIPKGIVRDIGGHIVALKWTMKNIYNIDEDDVWWSASDIGWIVGHSYIVYAPLFKGCTTVLFEGKPVGTPDAGVFWRIISEYKIKSLFTAPTAFRAIKKEDPEGKFFSKYDLSSFESLFLAGERADPDTIKWAENLLKVPVIDHWWQTETSWAISSNCTGIEMQKTKYGSACKAVPGYDVKIIKPDQTLAEPNEMGDIVVKLPLPPGTFPTLWNADERYKENYMTNYEGYYQTYDAGHIDEDGYIWIMSRTDDIINVAGHRLSTGAIEEVLSEHQSVAECAVLGIADKLK

SEQ ID NO: 162671 - protein, 293 aa, Unknown
  Bacterial polypetide isolated from the Sargasso Sea
SLSNAKDTDCIEMGSNEFAYILYTSGTTGVPKGIVRDIGGHIVALKWTMKNIYNIDINDVWWSASDIGWIVGHSYIVYAPLFKGCTTVLFEGKPVGTPDAGVFWRVISEYKIKSLFTAPTAFRAIKKEDPDGEFFSKYDLSSFESLFLAGERADPDTIKWAENLLKVPVIDHWWQTETSWAISSNCTGIEMQKTKYGSACKAVPGYDVKIIKTDQSLAKPNEMGDIVVKLPLPPGTFPTLWNADKRYEENYMSNYKGYYQTYDAGHIDEDGYIWIMSRTDDIINVAGHRLSTG

SEQ ID NO: 162672 - protein, 361 aa, Unknown
  Bacterial polypetide isolated from the Sargasso Sea
AHYSIPMTGGVINTINTRLDAETIAYILDHSDAKLLIADTQFSPTIKKALNIFGKQIPIIDIHDDQAIFKEGEGEKIGDCTYEEFLETGDDNFNWSLPDDEWQAISLSYTSGTTGKPKGVVYHHRGSYLMSTGSVTAWNMPNKLTFLYTVPMFHCNGWGYPWTAALIHAKIVCCRYIAAKNIYNLIDKHKVTHFGGAPIVLSLIANADEKDKKEIKHKVFVLTAGAPPTSAILEKMDNLGFEVMHVYGLTETYGHILQCAWNEEWNQLSNAKKADINARQGVRYPNTEEVCVADPETYKPVPMDGETMGEILIRGNVVMKGYYKNKEATETSMRQGWFHSGDLAVVYPDGYIQIKDRSKDI

SEQ ID NO: 162673 - protein, 315 aa, Unknown
  Bacterial polypetide isolated from the Sargasso Sea
RLNTPNEVSWEEVVSNAKNTDCVEMNSNEFAYILYTSGTTGTPKGIVRDTGGHIVALKWTMKNIYNVNTNDIWWSASDIGWIVGHSYIVYAPLFKGCTTVLFEGKPVGTPDAGAFWKIISDYKVKSLFTAPTAFRAIKKEDPEGKFFSKYDLSNFESLFLAGERADPDTIKWAENLLKVPVIDHWWQTETSWAISSNCTGIEMMKTKYGSACKAVPGYDVKIIKSDKTIAKPNEMGDIVVKLPLPPGTFPTLWNADERYKQTYMSNYEGYYQTYDAGHIDEDDYIWIMSRTDDIINVAGHRLSTGAIEEVLSEHK

SEQ ID NO: 162674 - protein, 248 aa, Unknown
  Bacterial polypetide isolated from the Sargasso Sea
MNLHEYQAKDLLRKYNLPILEGKSYIKNVDGLEKDLQNIKGPPWVIKSQIHAGGRGAGKFLIPFNTKGGVQITESIDDAQKIAKGMMGNILITKQTGNEGKLVNRIYLEAGCEIDREYYLSILLDRNQSKLMMMVSDAGGVDIEDVAEKTPERIQYVYFDNLEDFTISDSLQNKLNFSINEFNQFKEIISNLCKAYVEIDASLIEINPLVVTKDEKLILLDAKINIDDNALYRQADIEKIKDTSEEND

SEQ ID NO: 162675 - protein, 343 aa, Unknown
  Bacterial polypetide isolated from the Sargasso Sea
SSYRSNWEKIKFKCGDTLAVCDLRGKYQERFSYSELADLITKVSFSFKNYGLVKGDVVTVISENSPRWLVVDQGLMRLGAINAVRGINSPSVELEYIIEHSNSVGLVVQSKQIWLKLKNKEELKKRLKFIINLEDEQFENLISWSKFISSVEKENSQNNNFEKNNPEIDDVATILYTSGTTGKPKGVPLTHANFLHQIINLAYIADPEPGTSVLSVLPIWHSYERSAEYFFFSCGCSQYYTIPKFLKDDITQIKPVVMATVPRLWEAIHDGFFQALKKMPSKKEKLIKFLISNSSVFKRSLRKIRNLDINQITFKSKIPLLGSLIGRYPLHKLSTIFLWPNIS

SEQ ID NO: 162676 - protein, 304 aa, Unknown
  Bacterial polypetide isolated from the Sargasso Sea
MRLVWEESLINAKYKDCVEIGANEFAYILYTSGTTGIPKGIVRDVGGHIVALKWTMKNIYNIDKNDVWWSASDIGWIVGHSYIVYAPLFKGCTTVLFEGKPVGTPDAGVFWRMISEHKIKSLFTAPTAFRAIKKEDPDGKFFSKYDLSSFESLFLAGERADPDTIKWAENLLKVPVIDHWWQTETSWAISSNCTGIEMQKTKYGSACKAVPGYDVKIIKPDHSIAKPNEMGDIVIKLPLPPGTFPTLWNADKRYEENYMSNYKGYYQTYDAGHIDEDGYIWIMSRTDDIINVAGHRLSTGAIEE

SEQ ID NO: 162677 - protein, 266 aa, Unknown
  Bacterial polypetide isolated from the Sargasso Sea
MLNLSATLEYSAKTNPDDPAIYFSNKVFSYNEVNLMSNKIANGLITAGIKKGDKVALCCPNIPQFIFSYFAILKAGCVVLPFNVLLKNNEIEFILNDSQARGIICFEGTPELAIAKEAMQAVEKSSSCKKMWVIKSSESFNVNNKNVFDFSSLIEESKDDFDTIQCSSEDTAIILYTSGTTGKPKGAELTHSNVLLNSFIGKDLAKLQKTDRVIMSLPLFHVYGQVVMMLSSILSGSSLIVLPRFDPIEVLKAMESFKATVLEECQ

SEQ ID NO: 162678 - protein, 320 aa, Unknown
  Bacterial polypetide isolated from the Sargasso Sea
DCVEMNSNEFAYILYTSGTTGTPKGIVRDIGGHIVALKWTMKNIYNIDEGNIWWSASDIGWIVGHSYIVYAPLFKGCTTVLFEGKPVGTPDAGAFWKIISDYKVKSLFTAPTAFRAIKKEDPEGKFFSKYDLSNFESLFLAGERADPDTIKWAENLLKVPVIDHWWQTETSWAISSNCTGIEMMKTKYGSACKAVPGYDVKIIKSDQTLAEPNEMGDIVVKLPLPPGTFPTLWNADQRYKENYMSNYEGYYQTYDAGHIDEDGYIWIMSRTDDIINVAGHRLSTGAIEEVLSEHQSVAECAVLGISDKLKGQLPIGLIVL

SEQ ID NO: 162679 - protein, 312 aa, Unknown
  Bacterial polypetide isolated from the Sargasso Sea
MKIKPIHIKKLNSEVNLACRALINLGAKKDDRISIWSTNRTEWLITNYAAMRLGLIVVTINPAFRTSEVKYVLENSESTFLFMAENFRTFSYLDSISSIKDNLIKLKSVVVFGNKVEPYLSWDSFMKLGFKIDKNIVSVIEEKIAFDQPCHIQYTSGTTGKPKGALLTNYNLINNGYFVGLNQNFSINDKICLPVPFFHCFGSVLGAFAALSHGSCIVLPSESFDPKICMEVIQKYKCTALYGVPMMFISILSLPNLLNYNFKSLRTGAIGASPCPKEVMKKIINILNIKEITIVYGMTETSPISFQTNIGD

SEQ ID NO: 162680 - protein, 282 aa, Unknown
  Bacterial polypetide isolated from the Sargasso Sea
IDDSKAKILITASCGFEPGRTVEYRPLVDGALKLAKHKVEKVILYQRKGHEVKLNQPLEISWEESLVNASEKDCVEMGSNEFAYILYTSGTTGVPKGIVRDIGGHIVALKWTMKNIYNVDADDVWWSASDIGWIVGHSYIVYAPLFKGCTTILFEGKPVGTPDAGTFWKIISDYKVKSLFTAPTAFRAIKKEDPEGKFFSKYDLSSFESLFLAGERADPDTIKWAENLLKVPVIDHWWQTETSWAISSNCTGIEMQKTKYGSACKAVPGYDVKIIKPDQSLA

SEQ ID NO: 162681 - protein, 305 aa, Unknown
  Bacterial polypetide isolated from the Sargasso Sea
HKIKSLFTAPTAFRAFKKEDPEGKFFSKYDLSSFESLFLAGERADPDTLKWAESLLKVPVIDHWWQTETSWAISSNCTGIEMLKTKYGSACKPVPGYNLKVLKSDKSEAKANEMGDIVVKLPLPPGTFPTLWNADERYKKTYMSNYEGFYQTYDAGHVDEDGYVWIMSRTDDIINVAGHRLSTGAIEEVLSEHKSVAECAVIGIADKLKGQIPIGLLALKAGVKQSNEEIVKECIQMVRNKVGPVAAFKTAMVVKRLPKTRSGKILRGTIRKIADKEEYKMPATIDDPAILDEIKEDLISSSILK

SEQ ID NO: 162682 - protein, 267 aa, Unknown
  Bacterial polypetide isolated from the Sargasso Sea
SLFLAGERADPDTIKWAENLLNVPVIDHWWQTETSWAISSNCTGIEMMETKYGSACKAVPGYDVKIIKPDQSLAKPNEMGDIVVKLPLPPGTFPTLWNADERYKENYMSNYKGYYQTYDAGHIDDDGYIWIMSRTDDIINVAGHRLSTGAIEEVLSAHQSVAECAVLGIADKLKGQLPIGLVVLKSGVDKDNNTISKECVQMVRDKIGPVAAFKVVIVIKRLPKTRSGKILRGTIRKIADGVEYKIPPTIDDPAILTEIKEDLINHK

SEQ ID NO: 162683 - protein, 169 aa, Unknown
  Bacterial polypetide isolated from the Sargasso Sea
MSVLIDKKTKIIVQGFTGKMGTFHAEEMIKYGSNIVGGVTPGKGGTKHLNLPVFNTVKDAVKHTGATASILFVPPAFAADSAMESADAGIKICVAIVDGIPSHDMIRIKRYMRRYTKSSKMTLVGPNCAGIISPGKSMLGIMPGHIYKEGRVGIISRSGTLGYEAAQQL

SEQ ID NO: 162684 - protein, 68 aa, Unknown
  Bacterial polypetide isolated from the Sargasso Sea
NHKIKKPIVGFIAGITAPPGRRMGHAGAIISGGKGGAKDKIKKMEDCGITIANSPSKIGKTLLNKLSN

SEQ ID NO: 162685 - protein, 90 aa, Unknown
  Bacterial polypetide isolated from the Sargasso Sea
ANGTNCFVAGVNPKKAGEDFEGIPIYATVKDAKARTGATVSVIYVPPAGAADAIWEAVEAELDLVVCITEGIPVRDMMMVIAGRPSVPTI

SEQ ID NO: 162686 - protein, 227 aa, Unknown
  Bacterial polypetide isolated from the Sargasso Sea
MKNIYNIDENDVWWSASDIGWIVGHSYIVYAPLFKGCTTVLFEGKPVGTPDAGVFWRIISEYKIKSLFTAPTAFRAIKKEDPDGKFFSKYDLSSFKSLFLAGERADPDTIKWAENLLNVPVIDHWWQTETSWAISSNCTGIEMQKTKYGSACKAVPGYDVKIIKPDHSIAKPNEMGDIVVKLPLPPGTFPTLWNADKRYEENYMSNYKGYYQTYDAGHIDEDGYIWI

SEQ ID NO: 162687 - protein, 45 aa, Unknown
  Bacterial polypetide isolated from the Sargasso Sea
MSVLINKNTKVICQGFTGSQGTFHSEQAIKYGTQMVGWGDTKEKG

SEQ ID NO: 162688 - protein, 315 aa, Unknown
  Bacterial polypetide isolated from the Sargasso Sea
DCFVCFEPGRTVEYKPLVDEAIKIANHKIEKMILFQRPGHEVKLNAPNEVSWEEVISNAEDTDCVEMNSNEFAYILYTSGTTGTPKGIVRDIGGHIVALKWTMKNIYNIDTDDIWWSASDIGWIVGHSYIVYAPLFKGCTTVLFEGKPVGTPDAGVFWKIISDYKVKSLFTAPTAFRAIKKEDPEGKFFSKYDLSSFESLFLAGERADPDTIKWAENLLKVPVIDHWWQTETSWAISSNCTGIEMMETKYGSACKAVPGYDVKIIKPDQSLAKPNEMGDIVVKLPLPPGTFPTLWNADQRYKENYMSNYEGYYQT

SEQ ID NO: 162689 - protein, 91 aa, Unknown
  Bacterial polypetide isolated from the Sargasso Sea
AVVLIGEIGGTAEQEAAEFIKIMSKPVVAFIAGATAPPGRRMGHAGAIIAGAAGTAEAKQRALREAGAHVVENPGDIGSTMLDVLKNQGLA

SEQ ID NO: 162690 - protein, 247 aa, Unknown
  Bacterial polypetide isolated from the Sargasso Sea
ITDREFSPVIKKVLQKLEDPPLVIDIDDPMAEGGELIGEMDYEAFLKTGDENFEWNLPEDEWQAVSLNYTSGTTGKPKGVVYHSRGAHLLAIDNILAWGMPRHPVYLWTLPMFHCNGWCFPWTITLLVGTHVCLRKVNAANIYDSIVKHGVTHLCGAPIVMGMIANAEDQDQRVLSDQVQIMTAAAPPPPPVIARMEEMGFQVTHVYGLTETYGPSVVSAWQEEWNDLSPTDQALKKGRQGVNYPGW

SEQ ID NO: 162691 - protein, 297 aa, Unknown
  Bacterial polypetide isolated from the Sargasso Sea
VALKWTMKNIYNIEEGDIWWSASDIGWIVGHSYIVYAPLFKGCTTVLFEGKPVGTPDAGAFWKIISDYKVKSLFTAPTAFRAIKKEDPDGKFFSKYDLSSFESLFLAGERADPDTIKWAENLLKVPVIDHWWQTETSWAISSNCTGIEMMKTKYGSACKAVPGYDVKIIKSDQTLAKPNEMGDIVVKLPLPPGTFPTLWNADLRYKENYMSNYEGYYQTYDAGHIDEDGYIWIMSRTDDIINVAGHRLSTGAIEEVLSEHQSVAECAVLGVADKLKGQLPIGLIVLKAGVDKDNETN

SEQ ID NO: 162692 - protein, 118 aa, Unknown
  Bacterial polypetide isolated from the Sargasso Sea
MSILIDKNTKVICQGFTGKHGTFHSEQAIKYGTQLVGGVTPKKGGQKHLNLPVFDTVKDAINKTGATATMIYVPAKFAASAIIEAMDAEIDLIVCITEGVPVLDMVKVKNLLKKSKSR

SEQ ID NO: 162693 - protein, 301 aa, Unknown
  Bacterial polypetide isolated from the Sargasso Sea
DEAVKQATHKISKMILFQRKGHEVKLNAPMEISWDEAHANAKDTDCVEMNSNEFAYILYTSGTTGTPKGIVRDIGGHIVALKWTMKNIYNIDEDDIWWSASDIGWIVGHSYIVYAPLFKGCTTVLFEGKPVGTPDAGAFWKIISDYEVKSLFTAPTAFRAIKKEDPEGKFFSKYDLSKFESLFLAGERADPDTIKWAENLLKVPVIDHWWQTETSWAISSNCTGIEMMKTKYGSACKAVPGYDVKIIKSDQTLAKANEMGDIVVKLPLPPGTFPTLWNADQRYKENYMSNYEGYYQTYDAG

SEQ ID NO: 162694 - protein, 243 aa, Unknown
  Bacterial polypetide isolated from the Sargasso Sea
MGNLAYWPSAKPFSKKDEFAKNRDFIENLNHIDQIWENLKFKCGDTLAVCDLRGKYKEKFSYSELADLITKVSFSFKNYGLVKGDIVTVISENSPRWLIADQGLMRIGAINAVRGVNSPSLELGYIIEHSNSVGLIVQSKEIWLKLNNKEELKKRLKFIINLEDEQFESLISWSQFISAQEKENSQNNFIEKFNPKIDDVATILYTSGTTGKPKGVPLTHANFLHQIINLAHIADPEPGTSVL

SEQ ID NO: 162695 - protein, 269 aa, Unknown
  Bacterial polypetide isolated from the Sargasso Sea
TTGVPKGIVRDIGGHIVALKWTMKNIYNIDPDDVWWSASDIGWIVGHSYIVYAPLFHGCTTVLFEGKPVGTPDAGVFWRIISEHKVKSLFTAPTAFRAIKKEDPNGTFFKKYDLSKFESLFLAGERADPDTIKWAEGLLKVPVIDHWWQTETSWAISANCAGIGLEKTKYGSACKPVPGYDVKILKSDGKEAKPNEMGDVVVKLPLPPGTFPTLWGADQRYKETYMSNYPGYYQTYDAGHIDEDGYIWIMSRTDDIINVAGHRLSTGAM

SEQ ID NO: 162696 - protein, 271 aa, Unknown
  Bacterial polypetide isolated from the Sargasso Sea
MAYTIEHSETKFIFVADDCRDLVASAVAQQNNSVKLIKLDPVRGPDLAALPVELNDLKLEDIKSKPNDIALLMYTSGTTGKPKGVMLSHANLLAAGRFISTGHEIDGNDSGLCVLPIYHINGMCVTVMGTIVSASTLVIPNRFSVNSFWKIIAKFKCSWFSAVPTQFSYILNYEETPEDISSLRFARSASAPLSPDIHKKFEKRFGIPIIETMGLTETGSQITTNPMPPGQRKIGSPGKAYGNQIMIGDDQFEALPAGETGEILVKGDNVM

SEQ ID NO: 162697 - protein, 196 aa, Unknown
  Bacterial polypetide isolated from the Sargasso Sea
GLIVQSKEIWLRLNNKEELKKRLKFIINLEDEQFESLISWSTFISSVEKENSQNNNLEKFNPEIDDVATILYTSGTTGKPKGVPLTHANFLHQIINLAYIADPEPGTSVLSVLPIWHSYERSAEYFFFSCGCSQYYTIPKFLKDDITQIKPVVMATVPRLWEAIHDGFFQALKKMPFKKQKLIKFLISNSSVFKRN

SEQ ID NO: 162698 - protein, 267 aa, Unknown
  Bacterial polypetide isolated from the Sargasso Sea
YKPLVDEALNLANHKPDKTILFQRKGHEVKLNAPKEISWDEALSDAKDADCVEMNSNEFAYILYTSGTTGVPKGIVRDIGGHIVALKWTMKNIYNIDTDDVWWSASDIGWIVGHSYIVYAPLFKGCTTVLFEGKPVGTPDAGAFWKIISEYKVKSLFTAPTAFRAIKKEDPDGKFFSKYDLSKFEALFLAGERADPDTIKWAETLLKVPVIDHWWQTETSWAISSNCTGIEMMKTKYGSACKAVPGYDVKIIKPDQSLAKPNEMGDI

SEQ ID NO: 162699 - protein, 108 aa, Unknown
  Bacterial polypetide isolated from the Sargasso Sea
MSILVNKNTKVICQGFTGNHGTFHSEQAIKYGTQLVGGVTPKKGGQKHLGLPVFNTVEDAKKVTKANATMIYVPQKFAASAIIEAIDSEIEIIVCITEGIQIIDMIKV

SEQ ID NO: 162700 - protein, 311 aa, Unknown
  Bacterial polypetide isolated from the Sargasso Sea
FWRIISEYKIKSLFTAPTAFRAIKKEDPDGKFFSKYDLSSFQSLFLAGERADPDTIKWAENLLNVPVIDHWWQTETSWAISSNCTGIEMQETKYGSACRAVPGYDVKVIKPDHSIAKPNEMGDIVVKLPLPPGTFPTLWNADKRYKENYMTNYEGYYQTYDAGHIDEDGYIWIMSRTDDIINVAGHRLSTGAIEEVLSEHQSVAECAVLGIADKLKGQLPIGLVVLKSGVEKDNNTISKECVQMVRDKIGPVAAFKVVIVIKRLPKTRSGKILRGTIRKIADKEDYKMPATIDDPAILDEITQSLIENKIL

SEQ ID NO: 162701 - protein, 304 aa, Unknown
  Bacterial polypetide isolated from the Sargasso Sea
STVSIIAANTPELFEAHYSIPMTGGVINTINTRLDADTIAYILDHSDAKLLITDTQFSPTMKKALKIYGKNIPIIDIHDDQAVFKDGEGEQIGEMTYEEFLQTGDDNYNWSLPEDEWQAISLSYTSGTTGKPKGVVYHHRGSYLMSTGSVTAWNMPNKLTFLYTVPMFHCNGWGYPWTAALIHAKIICCRYIVAKDIYNLIDKYNVTHFGGAPIVLSLIANADERDKKEINHKVYVLTAGAPPTSAILEKMDNLGFEVMHVYGLTETYGHILQCAWNEEWESQSKSEKADIKARQGVRYPNTEE

SEQ ID NO: 162702 - protein, 86 aa, Unknown
  Bacterial polypetide isolated from the Sargasso Sea
IITQDPNVRCILINIFGGIVRCDMVASGIVEAFRKVNLQIPVVVRLEGTNAEEAQKIIESSGFGDRLQMADGLGEAAEMAVAAAAK

SEQ ID NO: 162703 - protein, 306 aa, Unknown
  Bacterial polypetide isolated from the Sargasso Sea
TVEYRPLVDGALKLAKHQIEKVILFQRKDHEVKLNKPLEISWNEALSGANDKDCVEMGANDYAYILYTSGTTGIPKGIVRDIGGHIVALKWTMKNIYNIDQDDVWWSASDIGWIVGHSYIVYAPLFKGCTTLLFEGKPVGTPDAGVFWRIISEYKIKSLFTAPTAFRAIKKEDPEGKFFSKYDLSSFESLFLAGERADPDTIKWAENLLKVPVIDHWWQTETSWAISSNCTGIEMQKTKYGSACKAVPGYDVKIIKPDQTIAKPNEMGDIVVKLPLPPGTFPTLWNADERYKENYMSNYNGYYQTY

SEQ ID NO: 162704 - protein, 178 aa, Unknown
  Bacterial polypetide isolated from the Sargasso Sea
MRIDHWLSETQKKYPQKTAIIFKGKNWTFTKLNILISETSSFLQNQCKLKIGDRFCFYGLNNPEQIILLFAASKIGAIIFPINWRLANPEIEYQIKNSKPKLIFYDPRFENNLENLNINKLIKKISIKKTIKTKKNLSDERKNKLQVKSLDNNNLPLLLVYTSGTTGKPKGALISQKS

SEQ ID NO: 162705 - protein, 253 aa, Unknown
  Bacterial polypetide isolated from the Sargasso Sea
MQYEKIEKFLNNNIKIISIDKITAKIENFSEIFKKTNLINESYNQKIRRNDLACIIYTSGTTGKPKGVMLSHGGILSNCEGALEILSSIVEKKKPVFLTWLPLSHSYEHTVQFVQISLGAKVYYAESLDKLIPNMILAKPTIMTAVPRFYQNLYNKISLNFSKLSGFKKKLIMNTLNLGTKKLKKENLNFGENILNFFCEILVRKKIKKQFGGELQAFVSGGGALDKKIGEFLNSIGLPTLQGYGLTEASPVV

SEQ ID NO: 162706 - protein, 145 aa, Unknown
  Bacterial polypetide isolated from the Sargasso Sea
ERPQAPAQLTAPRDIDWASWAAAAEPVECVPVAASDPLYILYTSGTTGKPKGIVRDNGGHAVALKYSMSAVYDVDVGDVYWAASDVGWVVGHSYFVYGPLLAGCTTFVYEGKPVKTPDAGAFWRVVAEHKVNSFFVAPTAFRAIK

SEQ ID NO: 162707 - protein, 161 aa, Unknown
  Bacterial polypetide isolated from the Sargasso Sea
FPGYYESGDAGYCDEDGYLYIMARTDDVINVAGHRLSTGQLEEVLADHPDIAECAVIGVADQLKGQLPLGLICLYSASQRKAEDIIAEAIDLVRTRVGRIAALNQIVVVERLPKTRSGKVLRGTVAKIADGAEWTMPATIDDPVILDEITAALKTIGYAGG

SEQ ID NO: 162708 - protein, 58 aa, Unknown
  Bacterial polypetide isolated from the Sargasso Sea
FIAGITAPPGRRMGHAGAIISGGKGGAKDKIKKMEDCGITMANSPSKIGKTLFDKLSD

SEQ ID NO: 162709 - protein, 215 aa, Unknown
  Bacterial polypetide isolated from the Sargasso Sea
LAKTNQLTHALREFGVKSGDVVATVLPNSVEYYISYLACAQSGFYMVPINWHLAGPEIAYILEDSGAKAFIASGEVPAMEEACQKAVSAINFPEQGCISTTQMSGFTHLDEFISSQPITNPEERTAGQVMNYTSGTTGKPKGVKRALIPGDPDDVLSMFAMILSFFEIQPQENNVHIVGSPLYHTAVLVHSSAALHYGHSVVLMEKFNAEQMLYL

SEQ ID NO: 162710 - protein, 260 aa, Unknown
  Bacterial polypetide isolated from the Sargasso Sea
DTIKWFEKLSNSPVIDHWWQTETSWAITSSCTGIENFPVKYGSAFKPVPGYDLKVLNSEGKEVGLGKMGDIVVKLPLPPGTFPTLWGADKRYKENYMTTYPGYYQTYDAGHIDEDGYVWIMSRTDDIINVAGHRLSTGAIEEVLAEHTNVAECAVIGIADKLKGQIPIGLLALKAGVTKDKKEIISECVKMVREKVGPVAAFKIAIVVKRLPKTRSGKVLRGTVRKIADNEPYKMPATIDDPAILDEIKQDLKDNNILKL

SEQ ID NO: 162711 - protein, 263 aa, Unknown
  Bacterial polypetide isolated from the Sargasso Sea
LQESGTHRQTLKTTWDRANQLAGALAKFGICQEDRVASFMWNNYRHLELYQAVPCMGAVLHTLNIRLSPVELTYIINHAEDRVIFVDNDLLPVLEPILKNTPKVELVIVCDGDLTLPKSADYENFIADYPIDFQWPTIEETAPMGLCYTSGTTGKPKGVMYTNRSTYLHTMAQAMTDAMQLSALDSVCGIVPMFHAMGWGLPFTACMLGCKQVMPHRFTSTEQLAKLMASEEVTISAGVPTIWQGLKAWFEQHQEKKYDLSKL

SEQ ID NO: 162712 - protein, 253 aa, Unknown
  Bacterial polypetide isolated from the Sargasso Sea
VFGGFAANELASRIDDSKAKIIVSASCGYEPGRVVEYKPLLNKALDLANHKPNKCIIFQREKNKAKLNPKMDITWEDSLKNATSQDCVEMKSTDYAYILYTSGTTGLPKGIVRDIGGHIVALKWTMKNIYNINQNDVWWSASDIGWIVGHSYIVYGPLFYGCTTILFEGKPVGTPDAGVFWRVISEHKVKSLFTAPTAIRAIKKEDPDGKFFKKYDLTKFDTLFLAGERADPDTIKWFENLSKSPVVDHWWQT

SEQ ID NO: 162713 - protein, 166 aa, Unknown
  Bacterial polypetide isolated from the Sargasso Sea
MSILINKATKIIVQGLTGKTGTFHTEQALAYHGTQMVAGTHPKKGGQTWTSADGQNLPLFSTVAEAKAHTGANASVIYVPPAGAAAAIEESIDAEIELITCITEGVPVLDMVQVKEKLNKSNSRLIGPNCPGLMTPDECKIGIMPPSIFRKGSVGVLSRSGTLTYE

SEQ ID NO: 162714 - protein, 312 aa, Unknown
  Bacterial polypetide isolated from the Sargasso Sea
DDSKAKLLVTASCGFEPGRIVEYKPLVDEAIKIANHKIEKMILFQRPGHEVKLNAPLEISWDEVVSKAEPADCVEMNSNEFAYILYTSGTTGTPKGIVRDVGGHIVALKWTMKNIYNIDTNDIWWSASDIGWIVGHSYIVYAPLFKGCTTVLFEGKPVGTPDAGAFWKIISDYKVKSLFTAPTAFRAIKKEDPNGEFFSKYDLSGFESLFLAGERADPDTIKWAENLLKVPVIDHWWQTETSWAISSNCTGIEMMETKYGSACKAVPGYDVKIIKPDQTLAKTNEMGDIVVKLPLPPGHFLPYGMLTKDIKK

SEQ ID NO: 162715 - protein, 321 aa, Unknown
  Bacterial polypetide isolated from the Sargasso Sea
LLSKWTMKSIYNIDADDIWWSASDIGWIVGHSYIVYAPLFKGCTTVLFEGKPVGTPDAGAFWKIISDYKVKSLFTAPTAFRAIKKEDPEGKFFSKYDLSNFESLFLAGERADPDTIKWAENLLKVPVIDHWWQTETSWAISSNCTGIEMMETKYGSACKAVPGYDVKIIKPDQSLAKPNEMGDIVVKLPLPPGTFPTLWNADQRYKENYMSNYEGYYQTYDAGHIDDDGYIWIMSRTDDIINVAGHRLSTGAIEEVLSEHQSVAECAVLGIADKLKGQLPIGLVVLKSGVDKDNDTISKECVQMVRDKIGPVAAFKVAIVI

SEQ ID NO: 162716 - protein, 184 aa, Unknown
  Bacterial polypetide isolated from the Sargasso Sea
MAVIIHKDTKILIQGFTGKMGTFHAEEMIKYGSNVVGGVTPGKGGTKHLSLPVFNTVKEAVKDTGASASILFVPPAFAADSAMEAADAGIKTCVAIVDGIPSHDMIRIKRYMRRYSKAEKMSLVGPNCAGIISPGKSMLGIMPGHIYKEGRVGIISRSGTLGYEAAQQLKKLNIGVSTKCRNWR

SEQ ID NO: 162717 - protein, 248 aa, Unknown
  Bacterial polypetide isolated from the Sargasso Sea
PNGDFFKKYDLSKFEKLFLAGERADPDTIKWFEKLSGAPVIDHWWQTETSWAITSDCTGIESFPVKYGSAFKPVPGYDLKVLNSDGKEVGPGKMGDIVVKLPLPPGTFPTLWGADKRYKENYMSTYPGYYLTYDAGHIDEDGYVWIMSRTDDIINVAGHRLSTGAIEEVLAEHKDVAECAVLGIADKLKGQIPIGLLALKAGVTKDKKEIISECIKMVREKVGPVAAFKIAIIVKRLPKTRSGKILRG

SEQ ID NO: 162718 - protein, 81 aa, Unknown
  Bacterial polypetide isolated from the Sargasso Sea
LSDKNVKGILINIFGGIMRCDVLAEGVVEAAKEIKIEVPLVVRLAGTNFKEGKKILDNSGLKIISASDLSDAAKKVVDEIK

SEQ ID NO: 162719 - protein, 258 aa, Unknown
  Bacterial polypetide isolated from the Sargasso Sea
KWAENLLKVPVIDHWWQTETSWAISSNCTGIEMMETKYGSACKAVPGYDVKIIKLDQSLAKPNEMGDIVVKLPLPPGTFPTLWNADKRYKENYMTNYEGYYQTYDAGHIDDDGYIWIMSRTDDIINVAGHRLSTGAIEEVLSEHQSVAECAVLGIADKLKGQLPIGLVVLKTGVEKDNETVSKECVQMVRDKIGPVAAFKTVIVIKRLPKTRSGKILRGTIRKIADGVNYKIPPTIDDPTILNEIKDDLVNHKILNYG

SEQ ID NO: 162720 - protein, 298 aa, Unknown
  Bacterial polypetide isolated from the Sargasso Sea
TASCGFEPGRTVEYRPLVDGALKLAKHKIEKIIFFQRQGHEIKLNAPLEISWDESLTNAKDTDCVEMGSNEFAYILYTSGTTGIPKGIVRDIGGHIVALKWTMKNIYNIDSDDVWWSASDIGWIVGHSYIVYAPLFKGCTTVLFEGKPVGTPDAGVFWRVISEHKIKSLFTAPTAFRAIKKEDPDGKFFSKYDLSSFESLFLAGERADPDTIKWAENLLKVPVIDHWWQTETSWAISSNCTGIEMQKTKYGSACKAVPGYDVKIIKPDQSLAKPNEMGDIVVKLPLPPGTFPTLWNAD

SEQ ID NO: 162721 - protein, 138 aa, Unknown
  Bacterial polypetide isolated from the Sargasso Sea
MRLGAINAVRGINSPSLELEYIIEHSNSVGLIVQSKEIWLKLNNQEELKKRLKFIINLEDEKFESLISWNQFISAGEKENSKNNIIEKFNPKINDVATILYTSGTTGKPKGVPLTHANFLHQIINLAYIADPEPGTSV

SEQ ID NO: 162722 - protein, 90 aa, Unknown
  Bacterial polypetide isolated from the Sargasso Sea
LMIGEIGGEEEENAAEFISNSKRKKPVSAFIAGQSAPKGKRMGHAGAIVSGSKGTAHSKIKSLENAGVLVSKSPASLGKTMKLAMQNGNN

SEQ ID NO: 162723 - protein, 204 aa, Unknown
  Bacterial polypetide isolated from the Sargasso Sea
MNQFSINLDKNKANYVPLSPLSFISRVKDIYPNYESLVYGNRNYTWLETYERCTKFASALTKQGIGKGNTVSILAANTPELFEAHYSIPMTGAVINTINTRLDAETIAYILDHSDAKLLITDTQFSPTIKKALGIYGKKIPIIDICDDQAILKEEEGEKLGNWTYEDFLETGDNHFKWSLPDDEWQAISLSYTSGTTGKPKGVV

SEQ ID NO: 162724 - protein, 335 aa, Unknown
  Bacterial polypetide isolated from the Sargasso Sea
DSKAKILVTASCGFEPGRTVEYKPLVDEAVKQANHKIDKMILFQRSGHEVKLNAPKEISWEDAVSNAKEIDCVEMNSNEFAYILYTSGTTGTPKGIVRDIGGHIVALKWTMKNIYNIDEGDIWWSASDIGWIVGHSYIVYAPLFKGCTTVLFEGKPVGTPDAGAFWKIISDYKVKSLFTAPTAFRAIKKEDPEGKFFSKYNLSKFESLFLAGERADPDTIKWAENLLNVPVIDHWWQTETSWAISSNCTGIEMMETKYGSACKAVPGYDVKIIKSDKSLAKPNEMGDIVVKLPLPPGTFPTLWNADQRYKENYMSNYEGYYQTYDAGHIDEDGYI

SEQ ID NO: 162725 - protein, 255 aa, Unknown
  Bacterial polypetide isolated from the Sargasso Sea
MIDLGTTFLSSVDRCPQAIAITYENKRLNYSNWLIKISSLAISLKKIGLRKGDKLMTLLPNTFEACTIHWACQLIGIIIVPINWRVKSEEIIFFLKNSKSKCIIFDDFTEKEIKSSNLSNSIIKISTSSQTSNYENFKSLIKLKTIFESSESNYKDCSIILYTSGTTGKPKGVPRSHFAERSSAIAHIAQNKYERYESTLGVMPLYHTMGVRSLLSMTILNGNFVAQSKYNPREAIDLINKNNISSLYLVPTLYH

SEQ ID NO: 162726 - protein, 280 aa, Unknown
  Bacterial polypetide isolated from the Sargasso Sea
IRKGSTVSIIAANTPELFEAHYSIPMTGGVINTINTRLDAETIAYILDHSDAELLITDTQFSPTIKKALSIYGKKIPIIDIQDEQAVLKNDEGEKLGDWTYEEFLNTGDNNFKWSLPDDEWQAISLSYTSGTTGKPKGVVYHHRGSYLMSTGSVTAWNMPNKLTFLYTVPMFHCNGWGYPWTAALIHAKVICCRYIIAKDIYNLIDKHKVTHFGGAPIVLSLIANADLKDKKEISHKVFVLTAGAPPTSAILEKMDKLGFEVMHVYGLTETYGHILQCAW

SEQ ID NO: 162727 - protein, 79 aa, Unknown
  Bacterial polypetide isolated from the Sargasso Sea
DKNVKGILINIFGGIMRCDVLAQGVVDAAKEINLSVPLVVRLAGTNFKEGKEILDKSNLKILSASDLNDAAKKIVEAIK

SEQ ID NO: 162728 - protein, 302 aa, Unknown
  Bacterial polypetide isolated from the Sargasso Sea
EMVVSIWGCLKAGGAYVPVDPSFPKERIGYILSDTKAELILSQRHLIDDRSLGLPDDKVIDVSLEEEIYDLEVGPLGSYSSAEHLAYVIYTSGTTGKPKGVMVEHKGVINLIADLLGKYNVIPSERFLLFANYVFDASVEQIFLPLLSGASLYVIENKSILDHSKFTTFITKNEITHLHATPSYLYSIDPSLISTVKRVVFGAEYLSNDLFAKYKKNIPVVINEYGPTEATITSLISINSYLLNNVSIQNVKIYVLDGNGHPVPVGVAGELYISGTGLARGYLNNEALTRERFVENPFATES

SEQ ID NO: 162729 - protein, 290 aa, Unknown
  Bacterial polypetide isolated from the Sargasso Sea
CTTVLFEGKPVGFPDAGVFWRVISEHKVKSLFTAPTAIRAIKKEDPNGDFFKKYDLSKFDKLFLAGERADPDTIRWFEKLSNSPVIDHWWQTETSWAITSSCTGIENFPVKYGSAFKPVPGYDLKVLNSEGKEVGPGKMGDIVVKLPLPPGTFPTLWGADKRYKENYMTTYPGYYQTYDAGHIDEDGYVWIMSRTDDIINVAGHRLSTGAIEEVLAEHPNVAECAVIGIADKLKGQIPIGLLALKAGVTKDKKEIISECVKMVREKVGPVAAFKIAIVVKRLLKLDREKC

SEQ ID NO: 162730 - protein, 298 aa, Unknown
  Bacterial polypetide isolated from the Sargasso Sea
VDEAIKLASHKISKMILFQRKGHEAKLNAPNEISWEEALADAKDTDCIEMNSNEFAYILYTSGTTGTPKGIVRDIGGHIVALKWTMKNIYNIDEGDIWWSASDIGWIVGHSYIVYAPLFKGCTTVLFEGKPVGTPDAGAFWKIISDYKVKSLFTAPTAFRAIKKEDPEGKFFSKYDLSNFESLFLAGERADPDTIKWAENLLNVPVIDHWWQTETSWAISSNCTGIEMMKTKYGSACKAVPGYDVKVIKSDQTLAKPNEMGDIVVKLPLPPGTFPTLWNADQRYKENYMSNYDGYYQT

SEQ ID NO: 162731 - protein, 289 aa, Unknown
  Bacterial polypetide isolated from the Sargasso Sea
LYTSGTTGTPKGIVRDIGGHIVALKWTMKNIYNIDTDDIWWSASDIGWIVGHSYIVYAPLFKGCTTVLFEGKPVGTPDAGAFWKIISDYKVKSLFTAPTAFRAIKKEDPEGKFFSKYDLSNFESLFLAGERADPDTIKWAENLLKVPVIDHWWQTETSWAISSNCTGIERMETKYGSACKAVPGYDVKIIKPDQSLAKSNEMGDIVVKLPLPPGTFPTLWNADQRYKENYMTNYEGYYQTYDAGHIDEDGYIWIMSRTDDIINVAGHRLSTGAIEEVLSEHQSVAECAV

SEQ ID NO: 162732 - protein, 97 aa, Unknown
  Bacterial polypetide isolated from the Sargasso Sea
MFENDDQTEAIVMVGEIGGTAEEAAAQYIKENITKPVVSYIAGVTAPSGKRMGHAGAIIAGGKGTADDKFEALKSAGVYTVKSPAEIGKGLKELTGW

SEQ ID NO: 162733 - protein, 261 aa, Unknown
  Bacterial polypetide isolated from the Sargasso Sea
IFLTTFLHDYISSGDRCLLLSENRPEWLIADIAIMNSRGVTVPLFTTYSALDYEYIINDCGPKICIVSNKLQYEKIKKFLNENIKIISIDEISDKIENFSKIFKKTNLINQNYNKEIKRNDLACIIYTSGTTGKPKGVMLSHGGILSNCEGALEILSSIVEKKKPVFLTWLPLSHSYEHTVQFVQISLGAKVYYAESLDKLIPNMKVAKPTIMTAVPRFYQNLYNKISFSFSKLSGLKKILITNTLKLGTKKLKKENLNFC

SEQ ID NO: 162734 - protein, 139 aa, Unknown
  Bacterial polypetide isolated from the Sargasso Sea
VIVQSKEIWLKLNNKEELKKRLKFIINLEDEQFESLISWSTFITSVEKENSQNNNLEKFNPKIDDVATILYTSGTTGKPKGVPLTHANFLHQIINLAYIADPEPGTSVLSVLPIWHSYERSAEYFFFSCGCSQYYTIPK

SEQ ID NO: 162735 - protein, 85 aa, Unknown
  Bacterial polypetide isolated from the Sargasso Sea
FKIILEDLDVKVVLVNIFGGIVRCDLIAKGIIAAIKEVEVKIPVVVRLEGNSAEEGSKILSKADIKIDSINDLAYAAKKAVELAK

SEQ ID NO: 162736 - protein, 333 aa, Unknown
  Bacterial polypetide isolated from the Sargasso Sea
NKANYAPFTPLSHLRRASTVFSDITAVFYGSHRKNYYEYYQRCSQLASALEKIGIKPGDVVATVLPNIPAQAEAHFGVPACGAVLNTINTRLDLNTITYIFEHGGAKLVFADTQFLSVVEDAIAKLKGPRPTLIEVPDEFAGFPATGKYETYESFLKTGNVHFDWIMPQDEWESLALNYTSGTTGKPKGVVYHHRGAYLMTMGTIVSWRMTLNPVFMAIVPLFHCNGWNHTWMMPVLGGSLVCCRDITSQAIYDAIADEGVQYFGGAPIVLNMIVNTNDTERREFDHTVEVFTAGAPPAPATLLKIEKLGFNVTQVYGLTETYGHVTECYWKT

SEQ ID NO: 162737 - protein, 104 aa, Unknown
  Bacterial polypetide isolated from the Sargasso Sea
FKDILEKFEEDNETDAVLMIGEIGGPQEVAAGKFAKENMKKPVIAYIAGLTAPKGRVMGHAGAIVSAYGESAVEKVELLKECGVIISKNPSVMGETVKSVLIKK

SEQ ID NO: 162738 - protein, 182 aa, Unknown
  Bacterial polypetide isolated from the Sargasso Sea
MTVLIDKNSKIIIQGFTGKMGSFHADEMIKYGSNVVGGVTPGKGGSMHLNLPVFNTVKDAVSVTGADASILFVPPAFAADSAMEAADAGIKTCVAIVDGIPSHDMIRIKRYMRRYTKSSKMTLVGPNCAGIISPGKSMLGIMPGHIYKEGRIGIISRSGTLGYEAAQQLKNLNIGVSTSVGM

SEQ ID NO: 162739 - protein, 288 aa, Unknown
  Bacterial polypetide isolated from the Sargasso Sea
YVYIFNHSEVKYVFVSDEEILGKVLKAKEESPTIIDVYTFDTIQGAKHWTEVLQLGKGQHQNELQQRINNITETDLATIIYTSGTTGKPKGVMLSHNNLISNVVAGKPLLPTEIGDKALSFLPVCHVFERTVLNLYLLGGIKIYYAESLETIGDNIKEVKPHVFTAVPRLIEKVYDKVIAGGSEKSGIIKKLFFWAVGKAQNFEIGTNRNFIADKLVYSKIRQGLGGNVKVIVSGSAALQERLQKFFWGIGLPILEGYGLTETSPIISVNTLLDNGTKFGTVGKVMKK

SEQ ID NO: 162740 - protein, 280 aa, Unknown
  Bacterial polypetide isolated from the Sargasso Sea
MNSNEFAYILYTSGTTGTPKGIVRDTGGHIVALKWTMKNIYNIDIDDIWWSASDIGWIVGHSYIVYAPLFKGCTTVLFEGKPVGTPDAGAFWKIISDYKVKSLFTAPTAFRAIKKEDPEGKFFSKYDLSSFESLFLAGERADPDTIKWAENLLKVPVIDHWWQTETSWAISSNCTGIQMMETKYGSACKAVPGYDVKIIKPDQSLAKPNEMGDIVVKLPLPPGTFPTLWKADQRYKENYMSNYEGYYQTYDAGHIDEDGYIWIMSRTDDIINVAGHRLST

SEQ ID NO: 162741 - protein, 247 aa, Unknown
  Bacterial polypetide isolated from the Sargasso Sea
MIIVWQTETSWAISSNCTGIEMMKTKYGSACKAVPGYDVKIIKPDQSLAKPNEMGDIVVKLPLPPGTFPTLWNADERYKENYMSNYDGYYQTYDAGHIDDDGYIWIMSRTDDIINVAGHRLSTGAIEEVLSEHQSVAECAVLGIADKLKGQLPIGLVVLKSGVDKDNETISKECVQMVRDKIGPVAAFKVVIVIKRLPKTRSGKILRGTIRKIADNVEYKIPPTIDDPAILSEIKEDLIKNKILNNG

SEQ ID NO: 162742 - protein, 97 aa, Unknown
  Bacterial polypetide isolated from the Sargasso Sea
FLEDKDTESIVMIGEIGGSSEEEAADFIKRSKIKKPMVGFVAGLTAPPGRRMGHAGAIISGGKGGADDKIDIMKSAGITISKSPADIGKTLFEKLKS

SEQ ID NO: 162743 - protein, 291 aa, Unknown
  Bacterial polypetide isolated from the Sargasso Sea
VFGGFASNELASRIDDSKAKILITASCGFEPGRTVEYRPLVDGALKLAKHKVEKVIFFQRKDHEVNLNSPLEISWDEVLVKAKNKDCVEIGANEFAYILYTSGTTGIPKGIVRDVGGHIVALKWTMKNIYNIDENDVWWSASDIGWIVGHSYIVYAPLFKGCTTVLFEGKPIGTPDAGVFWRIISEYKIKSLFTAPTAFRAIKKEDPDGKFFSKYDLGSFESLFLAGERADPDTIKWAENLLNIPVIDHWWQTETSWAISSNCTGIEMQKTKYGSACKAVPGYDVKIIKPD

SEQ ID NO: 162744 - protein, 302 aa, Unknown
  Bacterial polypetide isolated from the Sargasso Sea
RIDDSKAKLLVTASCGFEPGRTVKYKPLVDKALELSSHKIEKVIFFQRPGNEAKLNEPRDIDWNEALSTAESTDCVEMNSNDYAYILYTSGTTGIPKGIVRDIGGHIVALKWTMKNIYNIDADDVWWSASDIGWIVGHSYIVYAPLFKGCTTVLFEGKPVGTPDAGAFWKIISDYKVKSLFTAPTAFRAIKKEDPDGNYFSKYDLSSFKSLFLAGERADPDTIKWAEKLLKVPVIDHWWQTETSWAISSNCTGIEMQKTKYGSACRAVPGYDVKVLKSDSSIAKPNEMGDIVVKLPLPPGTF

SEQ ID NO: 162745 - protein, 314 aa, Unknown
  Bacterial polypetide isolated from the Sargasso Sea
GFASNELASRIDDSKAKLLVTASCGFEPGRTVEYKPLVDEAIKQAQHKISKMILFQRKGHEVKLNTPMEISWDEAHANAKDTDCVEMNSNEFAYILYTSGTTGTPKGIVRDIGGHIVALKWTMKNIYNIDADDIWWSASDIGWIVGHSYIVYAPLFKGCTTVLFEGKPVGTPDAGAFWKIISDYKVKSLFTAPTAFRAIKKEDPEGKFFSKYDLSKFESLFLAGERADPDTIKWAENLLKVPVIDHWWQTETSWAISSNCTGIEMMKTKYGSACKAVPGYDVKIIKSDQTLAKPNEMGDIVVKLPLPPGTFPTL

SEQ ID NO: 162746 - protein, 260 aa, Unknown
  Bacterial polypetide isolated from the Sargasso Sea
PDTIKWAENLLYVPVIDHWWQTETSWSISGNCTGIEMQKTKYGSACKPVPGYDVKIIKPDSTLAKPNEMGDIVVKLPLPPGTFPTLWNADERYKENYMTNYEGYYQTYDAGHIDEDGYVWIMSRTDDIINVAGHRLSTGAIEEVLSEHQSVAECAVIGIKDQLKGQLPIGLIALKAGVTKENEIISKECIQMVRDKVGPVAAFKTVIVVKRLPKTRSGKILRGTVRKIADKEEYKMPATIDDPVILDEIKDNLIKNGILK

SEQ ID NO: 162747 - protein, 109 aa, Unknown
  Bacterial polypetide isolated from the Sargasso Sea
MSILVNKNSKVIVQGFTGSEGTFHATQMLEYGTNVVGGVTPGKGGLSHLEKPVFNTVYDAKKNTGANVSIIFVPPAFAADAILESIDSEVEVIVAITEGIPVKDMIKVK

SEQ ID NO: 162748 - protein, 254 aa, Unknown
  Bacterial polypetide isolated from the Sargasso Sea
AENLLNVPVIDHWWQTETSWSISGNCTGIEMQKTKYGSACKPVPGYDVKVIKPDNSLAKPNEMGDLVVKLPLPPGTFPTLWNADQRYKENYMTNYEGYYQTYDAGHIDEDGYVWIMSRTDDIINVAGHRLSTGAIEEVLSEHQSVAECAVIGIKDQLKGQLPIGLIALKAGVSKDNETISKECIQMVRNKVGPVAAFKTVIVVKRLPKTRSGKILRGTVRKIADKEDYKMPATIDDPAILDEIKQDLIKNNILK

SEQ ID NO: 162749 - protein, 251 aa, Unknown
  Bacterial polypetide isolated from the Sargasso Sea
LVDEAFKLANHKPSKTILFQRQGHEVRLNVPNEISWDEALANAEEVDCVEMSSNDFAYILYTSGTTGIPKGIVRDIGGHIVALKWTMKNIYNIDADDVWWSASDIGWIVGHSYIVYAPLFKGCTTVLFEGKPVGTPDAGAFWKIISEYKVKSLFTAPTAFRAIKKEDPDGKFFSKYDLSKFEALFLAGERADPDTIKWAESLLKVPVIDHWWQTETSWAISSNCTGIEMMKTKYGSACKAVPGYDVKVIKP

SEQ ID NO: 162750 - protein, 73 aa, Unknown
  Bacterial polypetide isolated from the Sargasso Sea
AEFILNHKIKKPIVGFIAGITAPPGRRMGHAGAIISGGKGGAEHKIKKMEESGITIAKSPSIIGKTLFNKLSN

SEQ ID NO: 162751 - protein, 220 aa, Unknown
  Bacterial polypetide isolated from the Sargasso Sea
MNQFSTNLDKNKANYVPLSPLSFLTRAKDIYPNYESVIYGNRSYTWLQTYNRCVKFASALTKKGIGLGSTVSIIAANTPEIFEAHYSIPMTGGVINTINTRLDAETIAYILEHSDAKILITDTQFSPTVKKALSIYGKKIPVIDIHDDQAIFKDGEGEKIGDYNYEDFLSTGDENYNWSLPEDEWQAISLSYTSGTTGKPKGVVYHHRGSYLMSTGSVTA

SEQ ID NO: 162752 - protein, 253 aa, Unknown
  Bacterial polypetide isolated from the Sargasso Sea
HSVVFGGFASNELASRIDDSKAKILITASCGFEPGRTVEYKPLVDEAVKQANHKIDKMILFQRPGHEVKLNEPSEVSWEEVISNTKEVDCVEMNSNEFAYILYTSGTTGTPKGIVRDIGGHIVALKWTMKNIYNIDEGDIWWSASDIGWIVGHSYIVYAPLFKGCTTVLFEGKPVGTPDAGAFWKIISDYKVKSLFTAPTAFRAIKKEDPEGKFFSKYDLSKFESLFLAGERADPDTIKWAENLLKVPVIDHW

SEQ ID NO: 162753 - protein, 259 aa, Unknown
  Bacterial polypetide isolated from the Sargasso Sea
TIKWAENLLNVPVIDHWWQTETSWAISSNCTGIEMQKTKYGSACKAVPGYDVKIIKPDHSIAAPNEMGDIVVKLPLPPGTFPTLWNADRRYEENYMTNYKGYYQTYDAGHIDEDGYIWIMSRTDDIINVAGHRLSTGAIEEVLSEHQSVAECAVLGIADKLKGQLPIGLVVLKSGVEKNNETISNECIKMVRDKIGPVAAFKVVIVIKRLPKTRSGKILRGTIRKIADKEDYKMPATIDDPAILDEITQSLIENKILTK

SEQ ID NO: 162754 - protein, 152 aa, Unknown
  Bacterial polypetide isolated from the Sargasso Sea
MTVLVDKNSKIIIQGFTGKMGSFHADEMIKYGSKVVGGVTPGKGGSKHLDLPVFNTVKDAVNETEADASILFVPPAFAADSAMEAADAGIKICVAIVDGIPSHDMIRIKRYMRRYTKSAKMTLVGPNCAGIISPEKSMLGIMPGHILKKEES

SEQ ID NO: 162755 - protein, 292 aa, Unknown
  Bacterial polypetide isolated from the Sargasso Sea
ASRIDDSKAKILITASCGFEPGRTVEYRPLVDGALKLAKHKVEKVIFYQRKDHEIKLNAPLEISWAEALSNTKNMDCVEMGANEFAYILYTSGTTGVPKGIVRDIGGHIVALKWTMKNIYNIDVDDVWWSASDIGWIVGHSYIVYAPLFKGCTTVLFEGKPVGTPDAGAFWKIISDYKVKSLFTAPTAFRAIKKEDPDGKFFSKYDLSSFESLFLAGERADPDTIKWAENLLNVPVIDHWWQTETSWAISSNCTGIEMMKTKYGSACKAVPGYDVKIIKPDQSLAKPNEMGD

SEQ ID NO: 162756 - protein, 281 aa, Unknown
  Bacterial polypetide isolated from the Sargasso Sea
MTPSKKIKQTSARFPEKVAMRYKEFGVWQETSYEEFWRKSNYLSMALKFFGIEKGNSVAIHSENRPEWFIADIGIQSIGAVSVGLYPTNPASEVEYLLSHSESKILFAEDQEQVDKALQAIDSLPILEKIIYFEDRGLYNYDHPKLMSFDEFLEIGKSEYGSFPEYVDQQLDQIEDEDVAFLVYTSGTTGKPKGSMITHGNISWVASQIPNFSLVENVKAKEPQFLSYLPLCHIFGRLIDLLIASHTMATINFAESIDTVQSDLVEIQPTIFPAVPRILER

SEQ ID NO: 162757 - protein, 89 aa, Unknown
  Bacterial polypetide isolated from the Sargasso Sea
NDRRIGGSAEEDAAEFIIKSSIKKPTAAFIAGITAPKGKRMGHAGAIISGNKGTAESKIKALEQSNVLIAPSPAKLGETMLKAMQKSYT

SEQ ID NO: 162758 - protein, 301 aa, Unknown
  Bacterial polypetide isolated from the Sargasso Sea
DCVEMNANEFAYILYTSGTTGIPKGIVRDIGGHITALKWTMKNIYNIDQDDVWWSASDIGWIVGHSYIVYAPLFKGCTTVLFEGKPVGTPDAGAFWKIISDYKVKSLFTAPTAFRAIKKEDPEGKFFSKYDLSSFESLFLAGERADPDTIKWAESLLNVPVIDHWWQTETSWAISSNCTGIEMMKTKYGSACKAVPGYDVKVIKPDHSIAKPNEMGDIVVKLPLPPGTFPTLWNADERYKKTYMTNYKGYYQTYDAGHIDEDGYIWIMSRTDDIINVAGHRLSTGAIEEVLSEHQSVAECA

SEQ ID NO: 162759 - protein, 297 aa, Unknown
  Bacterial polypetide isolated from the Sargasso Sea
MNSNEYAYILYTSGTTGVPKGIVRDIGGHIVALKWTMKNIYNIDEGDVWWSASDIGWIVGHSYIVYAPLFKGCTTVLFEGKPVGTPDAGAFWKMISDYKIKSLFTAPTAFRAIKKEDPEGKFFSKYDLSSFESLFLAGERADPDTIKWAENLLKVPVIDHWWQTETSWAISSNCTGIEMMKTKYGSACKAVPGYDVKIIKPDQTIAKANEMGDIVVKLPLPPGTFPTLWNADKRYKDNYMSNYDGFYQTYDAGHIDEDGYIWIMSRTDDIINVAGHRLSTGAIEEVLSEHKSVAELL

SEQ ID NO: 162760 - protein, 302 aa, Unknown
  Bacterial polypetide isolated from the Sargasso Sea
SNEFAYILYTSGTTGTPKGIVRDTGGHIVALKWTMKNIYNIDTDDIWWSASDIGWIVGHSYIVYAPLFKGCTTVLFEGKPVGTPDAGAFWKIISDYKVKSLFTAPTAFRAIKKEDPEGKFFSKYDLSSFESLFLAGERADPDTIKWAENLLKVPVIDHWWQTETSWAISSNCTGIEMMETKYGSACKAVPGYDVKIIKPDQSLAKPNEMGDIVVRLPLPPGTFPTLWNADQRYKENYMSNYEGYYQTYDAGHIDEDGYIWIMSRTDDIINVAGHRLSTGAIEEVLSEHQSVAECAVLGIADK

SEQ ID NO: 162761 - protein, 281 aa, Unknown
  Bacterial polypetide isolated from the Sargasso Sea
FKKYDLANFDTLFLAGERADPDTIKWFEKLSNAPVIDHWWQTETSWAISSNCAGIEKFPIKYGSAFKPVPGYDLKVLNSEGKENKSGQMGDIVVKLPLPPGTFPTLWNADERYKKVYMSTYKGYYQTYDAGHIDEDGYVWIMSRTDDIINVAGHRLSTGAIEEVLAEHKNVAECAVIGIADKLKGQLPIGLIALKAGVNRDNKEITKECVALVREKVGPVAAFKLAIVVKRLPKTRSGKVLRGTVRKIADGETYKVPPTIDDPAILDEIKKDLKDNNILKG

SEQ ID NO: 162762 - protein, 122 aa, Unknown
  Bacterial polypetide isolated from the Sargasso Sea
MSILVDKNTKLICQGFTGSHGTFHSEQALKYGTNLVGGVTPRKGGQIHLGKPVFNSVKDAVTATNANASMIYVPAKFAANAIIEAINASIEIIVCITEGIPVIDMLNVKKHLSNSKSKLIGP

SEQ ID NO: 162763 - protein, 114 aa, Unknown
  Bacterial polypetide isolated from the Sargasso Sea
LLRAQNSSMLLISFLSDDETQSIIMIGEIGGNAEEETCEYLIKERKKGRSKPIAGFIAGRTAPKGRRMGHAGAIVAGGMGAAEDKMEAMKKAGIVVSDSPATLGEAVQEAIQKN

SEQ ID NO: 162764 - protein, 120 aa, Unknown
  Bacterial polypetide isolated from the Sargasso Sea
LTTAVGIGGDSVIGSSMIDILKHFNNDSETQGVVMIGEIGGNMENEAAKWIKDNMEKPVVSFIAGQTAPKGKRMGHAGAIISEGSETAEAKIKILKECGVTISNTVSEIGNTMKKIMGEI

SEQ ID NO: 162765 - protein, 341 aa, Unknown
  Bacterial polypetide isolated from the Sargasso Sea
YFREKIHEVKLNKPLEISWDEALSGANDKDCVEMGANDYAYILYTSGTTGIPKGIVRDIGGHIVALKWTMKNIYNIDQDDVWWSASDIGWIVGHSYIVYAPLFKGCTTLLFEGKPVGTPDAGVFWRIISEYKIKSLFTAPTAFRAIKKEDPEGKFFSKYDLGSFKSLFLAGERADPDTIKWAENLLNVPVIDHWWQTETSWAISSNCTGIEMQETKYGSACKAVPGYDVKIIKPDQTIAKPNEMGDIVVKLPLPPGTFPTLWNADERYKENYMSNYKGYYQTYDAGHIDDDGYIWIMSRTDDIINVAGHRLFTGAIEEVLSEHQSVAECAVIGIKDQLKGQ

SEQ ID NO: 162766 - protein, 68 aa, Unknown
  Bacterial polypetide isolated from the Sargasso Sea
DIDSNALFRQEKIAKFHDTSEEDPLELKASEYGLNYIKLDGNVGCMVNGAGLAMATMDIVKHHGRRTS

SEQ ID NO: 162767 - protein, 290 aa, Unknown
  Bacterial polypetide isolated from the Sargasso Sea
KGDVVTVISENSPRWLAVDQGLMRLGAINAVRGINSPSVELDYIIEHSNSVGLIVQSKEIWQKLNNKEELKKRLKFIINLEDEQFESLISWSTFISSVEKENSQNNNLEKFNPKIDDVATILYTSGTTGKPKGVPLTHANFLHQIINLAYIADPNPGTSVLSVLPIWHSYERSAEYFFFSCGCSQYYTIPKFLKDDITQIKPVVMATVPRLWEAIHDGFFQALKKMPSKKQKLIKFLISNSSVFKRSLRKIRNIDINQITFKSKIPLLGSIISRYPLHKLSTIFLWPEYS

SEQ ID NO: 162768 - protein, 90 aa, Unknown
  Bacterial polypetide isolated from the Sargasso Sea
VSAAFKIILSDKNVKGILINIFGGIMRCDVLANGLVNAAKKNKLSVPLVVRLAGTNVEQGKEILNKSGLKIISANNLSDAAKKIIEAIKQ

SEQ ID NO: 162769 - protein, 260 aa, Unknown
  Bacterial polypetide isolated from the Sargasso Sea
IWWSASDIGWIVGHSYIVYAPLFKGCTTVLFEGKPVGTPDAGAFWKIISDYKVKSLFTAPTAFRAIKKEDPEGKFFSKYDLSNFESLFLAGERADPDTIKWAENLLKVPVIDHWWQTETSWAISSNCTGIQMMKTKYGSACKAVPGYDVKIIKPDQSLAKPNEMGDIVVKLPLPPGTFPTLWNADQRYKENYMSNYDGYYQTYDAGHIDDDGYIWIMSRTDDIINVAGHRLSTGAIEEVLSEHQSVAECAVLGIADKLKV

SEQ ID NO: 162770 - protein, 307 aa, Unknown
  Bacterial polypetide isolated from the Sargasso Sea
QKGIVRDIGGHIVALKWTMKNIYNIDSDDIWWSASDIGWIVGHSYIVYAPLFKGCTTVLFEGKPVGTPDAGAFWKIISDYKVKSLFTAPTAFRAIKKEDPEGKFFSKYDLSNFESLFLAGERADPDTIKWAENLLKVPVIDHWWQTETSWAISSNCTGIEMMETKYGSACKAVPGYDVKIIKPDQSLAKPNEMGDIVVKLPLPPGTFPTLWNADERYKENYMSNYVGYYQTYDAGHIDDDGYIWIMSRTDDIINVAGHRLSTGAIEEVLSEHQSVAECAVLGIADKLKGQLPIGLVVLKSGVDKNND

SEQ ID NO: 162771 - protein, 266 aa, Unknown
  Bacterial polypetide isolated from the Sargasso Sea
DFVPRPGNEVKLFAPNEVSWEEVVSNAKDADCVEMSSNEFAYILYTSGTTGTPKGIVRDIGGHIVALKWTMKNIYNIDSDDIWWSASDIGWIVGHSYIVYAPLFKGCTTVLFEGKPVGTPDAGAFWKIISDYKVKSLFTAPTAFRAIKKEDPEGKFFSKYDLSSFESLFLAGERADPDTIKWAENLLKVPVIDHWWQTETSWAISSNCTGIEMMETKYGSACKAVPGYDVKIIKPDQSLAKPNEMGDIVVKLPLPPGTFPTLWNAD

SEQ ID NO: 162772 - protein, 283 aa, Unknown
  Bacterial polypetide isolated from the Sargasso Sea
NTRTYSELTQRIDSISSLISSFGILSKSNIAIVASNSIEYMEIVLAASQLGHPIATVNPKLTTKEIVSICEDAQASLIFVDQKVSTLLEGIHIDGAQRIINIENELSNLIDHSSQMGGLPAIDEKETFTIPYTSGTTGKPKGVLVPHRSRALTLYGMADAYGCFSSDDRFLSIAPMCHGAGMIFSLAPIFFGGYAEIMDDFNPELVMKTIEEENITGFFGVPTHFYGMLGIDQSILDSCTGSSLKTIISNAAALPQSLKEKIVEHFGEGLLYECYGSTEGELF

SEQ ID NO: 162773 - protein, 247 aa, Unknown
  Bacterial polypetide isolated from the Sargasso Sea
MNNFDKNLEKNTANYVPLSPLSFISRVKDIYPNYDSLVYGNRSYTWLQTYNRCTKFASALIKQGINKGSTVSIIAANTPELFEAHYSIPMIGAVINTINTRLDAETVAYILEHSDAKLLITDTQFSPIIKKALSIYGKKIPIIDIHDEQAIFKEGEGEKIGDWSYEEFLATGEDNFQWHLPDDEWQAISLSYTSGTTGKPKGVVYHHRGSYLMSTGSVTAWNMPNKLTFLYTVPMFHCNGWGYPWTA

SEQ ID NO: 162774 - protein, 46 aa, Unknown
  Bacterial polypetide isolated from the Sargasso Sea
MAVWVGNETKVICQGFTGSQGTFHSEQAIAYGTNLVGGCSPGKGGT

SEQ ID NO: 162775 - protein, 288 aa, Unknown
  Bacterial polypetide isolated from the Sargasso Sea
KKALQMYGKNIPIIDIHDDQAIFKDGEGEKIGEMTYEEFLQTGDDNYNWTLPKDEWQAISLSYTSGTTGKPKGVVYHHRGSYLMSTGSVTAWNMPNKLTFLYTVPMFHCNGWGYPWTAALIHAKIICCRYIVAKDIYNLINKYKVTHFGGAPIVLSLIANAEEKDKKEINHKVYVLTAGAPPTSAILEKMDNLGFEVMHVYGLTETYGHILQCAWNEEWQSQTKSEKADIKARQGVRYPNTEEVCVVDPETYEKVPMDGETMGEILIRGNVVMKGNYKNKEATETSMK

SEQ ID NO: 162776 - protein, 103 aa, Unknown
  Bacterial polypetide isolated from the Sargasso Sea
IDCLELFLKDKDTQSIVMIGEIGGSAEEEAAEFLKNSKIKKPTVGFIAGLTAPPGRRMGHAGAIISGGKGGAKDKIEVMKSAGITISKSPADIGRTLYEKLNN

SEQ ID NO: 162777 - protein, 116 aa, Unknown
  Bacterial polypetide isolated from the Sargasso Sea
MSVLVNKNTRLICQGFTGSHGTFHSEQAIKYGTKLVGGVTPKKGGQKHLGLPVFNTVKEAKDAENANASMIYVPAKFAAEAIIESIDASIELIVCITEGIPIQDMLKGNKDYQNQK

SEQ ID NO: 162778 - protein, 252 aa, Unknown
  Bacterial polypetide isolated from the Sargasso Sea
ASRIDDSKAKLLVTASCGFEPGRTVEYKPLVDEAIKIANHKIDKMILFQRPGNEVKLSAPTEISWEEAVSNATDADCVEMNSNEFAYILYTSGTTGTPKGIVRDTGGHIVALKWTMKNIYNIDTDDVWWSASDIGWIVGHSYIVYAPLFKGCTTVLFEGKPVGTPDAGAFWKIIADYKVKSLFTAPTAFRAIKKEDPEGKFFSKYDLSSFESLFLAGERADPDTIKWAENLLKVPVIDHWWQTETSWAISSN

SEQ ID NO: 162779 - protein, 80 aa, Unknown
  Bacterial polypetide isolated from the Sargasso Sea
MTLKIDRNTKVIVQGITGKEGGFHALKCQEYGTQIVGGVTPGKGGQLFNNSIPVFNSVIEAKDITDANTSLIFVPAPLHQ

SEQ ID NO: 162780 - protein, 219 aa, Unknown
  Bacterial polypetide isolated from the Sargasso Sea
MNDLAYWTSAKSLSKKNKFTKNRDFVENLNHIDQLWDNLKSRCGDTLAVCDLRGKYKEKFSYSELADLITKVSFSFKNYGLVKGDVVTVISENSPRWLVVDQGLMRLGAINAVRGINSPSVELNYIIEHSNSVGLIVQSKEIWLKLNNKEELKKRMKFIINLEDEQFESLISWNKFISAAEKENSQNNNLEKFNPKIGDVATILYTSGTTGKPKGVPLT

SEQ ID NO: 162781 - protein, 298 aa, Unknown
  Bacterial polypetide isolated from the Sargasso Sea
AYILYTSGTTGTPKGIVRDIGGHIVALKWTMKNIYNIDIDDIWWSASDIGWIVGHSYIVYAPLFKGCTTVLFEGKPVGTPDAGAFWKIISDYKVKSLFTAPTAFRAIKKEDPDGKFFSKYDLSSFESLFLAGERADPDTIKWAENLLKVPVIDHWWQTETSWAISSNCTGIEMMETKYGSACKAVPGYDVKIIKQDQSLAKPNEMGDIVVKLPLPPGTFPTLWNADQRYKENYMSNYEGYYQTYDAGHIDDDGYIWIMSRTDDIINVAGHRLSTGAIEEVLSEHQSVAECAVLGIADK

SEQ ID NO: 162782 - protein, 315 aa, Unknown
  Bacterial polypetide isolated from the Sargasso Sea
EYKPLVDEAIKIANHKIEKMILFQRPGHEVKLNAPLEISWDEVVSNAKPADCVEMNSNEFAYILYTSGTTGTPKGIVRDVGGHIVALKWTMKNIYNIDTNDIWWSASDIGWIVGHSYIVYAPLFKGCTTVLFEGKPVGTPDAGAFWKIISDYKVKSLFTAPTAFRAIKKEDPDGKFFSKYDLSSFESLFLAGERADPDTIKWAENLLKVPVIDHWWQTETSWAISSNCTGIEMMETKYGSACKAVPGYDVKIIKPDQSLAKPNEMGDIVVKLPLPPGTFPTLWNADKRYKENYMSNYDGYYQTYDARHIDDDGYI

SEQ ID NO: 162783 - protein, 303 aa, Unknown
  Bacterial polypetide isolated from the Sargasso Sea
HIVALKWTMKNIYNIDTDDIWWSASDIGWIVGHSYIVYAPLFKGCTTVLFEGKPVGTPDAGAFWKIISDYKVKSLFTAPTAFRAIKKEDPEGKFFSKYDLSSFESLFLAGERADPDTIKWAENLLKVPVIDHWWQTETSWAISSNCTGIEMMKTKYGSACKAVPGYDVKIIKPDQSLAKPNEMGDIVVKLPLPPGTFPTLWNADQRYKENYMSNYEGYYQTYDAGHIDDDGYIWIMSRTDDIINVAGHRLSTGAIEEVLSEHQSVAECAVLGIADKLKGQLPIGLVVLKSGVDKDNDTISKEC

SEQ ID NO: 162784 - protein, 133 aa, Unknown
  Bacterial polypetide isolated from the Sargasso Sea
MSVLIDKNTKVICQGFTGSHGTFHSEQSIKYGTNLVGGVTPKKGGQIHLERPVFNTVKEAKDATGADATMIYVPAKFASSAIIEAIDASIELIVCISEGIPILDMLKVKKKLQNSKSRLIGPNCPGIITPNEC

SEQ ID NO: 162785 - protein, 101 aa, Unknown
  Bacterial polypetide isolated from the Sargasso Sea
LFLEDDETEGILMIGEIGGEEEENAAEFISNSKIKKPVSAFIAGQSAPKGKRMGHAGAIISGSKGTARSKIETLKNAGVLVSKSPASLGKTMQLAMQNGNN

SEQ ID NO: 162786 - protein, 58 aa, Unknown
  Bacterial polypetide isolated from the Sargasso Sea
MAILVNENTKVICQGITGSQGTFHSEQAIEYGTKMVGGVTPGKGGSNHLGLPIFDTVR

SEQ ID NO: 162787 - protein, 242 aa, Unknown
  Bacterial polypetide isolated from the Sargasso Sea
MSLSFQQAIEQVCAPGGLFEITETEVRGIPTKVFAGTPPNLRFLYQMAAEREDEFVIYEDERWTMPEVLKLSGQLGSALEKKFSIQKGDRVAIAMRNYPEWIAAFAAITSIGAVAVPLNAWWEPDELGFALNDSGAKVVFADIERIQKISDSNVNIRTLEIIKVRSESQDNFDTNLLESLLESDSTMPEVEIDPDENATILYTSGTTGKPKGAVSSHRAILSALLGFSARAQVAELVEPQKG

SEQ ID NO: 162788 - protein, 59 aa, Unknown
  Bacterial polypetide isolated from the Sargasso Sea
RLIGPNCPGIITPDECKVGIMPGNIHKKGSCGIISSSGTLTYEAVAQTSENGLGHSTVI

SEQ ID NO: 162789 - protein, 327 aa, Unknown
  Bacterial polypetide isolated from the Sargasso Sea
KWTMKNIYTFNQGDVWWSASDIGWIVGHSYIVYAPLFKGCTTVLFEGKPVGTPDAGAFWKIISDYKVKSLFTAPTAFRAIKKEDPDGKFFSKYDLSKFESLFLAGERADPDTIKWAENLLKVPVIDHWWQTETSWAISSNCTGIEMMKTKYGSACKAVPGYDVKIIKSDKTLAKANEMGDIVVKLPLPPGTFPTLWNADKRYKENYMSNYEGYYQTYDAGHIDEDGYIWIMSRTDDIINVAGHRLSTGAIEEVLSEHKSVAECAVVGIADKLKGQLPIGLLTLKSGVDEDNENISKDCIKMVRDKIGPVAAFKIAIVVKRLQRQDQA

SEQ ID NO: 162790 - protein, 274 aa, Unknown
  Bacterial polypetide isolated from the Sargasso Sea
FSKYDLSKFESLFLAGERADPDTIKWAENLLKVPVIDHWWQTETSWAISSNCTGIEMMKTKYGSACKAVPGYDVKVIKSDKTLAKPNEMGDIVVKLPLPPGTFPTLWRADQRYKENYMSSYEGYYQTYDAGHIDEDGYIWIMSRTDDIINVAGHRLSTGAIEEVLSEHQSVAECAVLGIADKLKGQLPIGLVVLKAGVDKDNKIISKECVKMVRDKIGPVAAFKVVIVIKRLPKTRSGKILRGTIRKIADNVEYKMPPTIDDPTILSEINKILL

SEQ ID NO: 162791 - protein, 82 aa, Unknown
  Bacterial polypetide isolated from the Sargasso Sea
ILSDKKVKGILINIFGGIMRCDVLAQGVVDAAKETNIKVPLVVRLAGTNFEKGKDILEKSDLKILSASDLNDAAKKIVEAIK

SEQ ID NO: 162792 - protein, 223 aa, Unknown
  Bacterial polypetide isolated from the Sargasso Sea
IVFVPAKFFLNAAKDALNSGIKLLVAIPEHVPIRDAMEAIELAKQKDAVMIGPNTPGVIVPGLIKVGIMPASPFSSGKVAVLSKSGTLLYEISNNLTSAGFGQNITIGIGGDPVNGTRMIDAFDMVKDDPELEAMVVVGEIGGDSEEILAQHIIDTGFKKPIVGYIAGRQAPKEKRMGHAGAIVMGTYGSAESKISMFAKANIPVAKRPGEVAVLLARQMSSQ

SEQ ID NO: 162793 - protein, 228 aa, Unknown
  Bacterial polypetide isolated from the Sargasso Sea
MNFHTFYTPPGTTGVPKGIVRDIGGHIVALKWTMKNIYNIDDNDIWWSASDIGWIVGHSYIVYAPLFKGCTTILFEGKPVGTPDAGVFWRIISDYKVKSLFTAPTAFRAIKKEDPDGKFFTKYNLSSFKSLFLAGERADPDTIKWAENLLKVPVIDHWWQTETSWAISSNCTGIDMQKTKYGSACKAVPGYDVKVLKSDKSIAKPNEMGDIVVKLPLPPGTFPTLWNA

SEQ ID NO: 162794 - protein, 319 aa, Unknown
  Bacterial polypetide isolated from the Sargasso Sea
PKGIVRDVGGHIVALKWTMKNIYNIDENDVWWSASDIGWIVGHSYIVYAPLFKGCTTVLFEGKPVGTPDAGVFWRIISEYKIKSLFTAPTAFRAIKKEDPDGKFFSKYDLSSFESLFLAGERADPDTIKWAENLLSVPVIDHWWQTETSWAISSNCTGIEMQKTKYGSACKAVPGYNVKIIKPDHSIAKPNEMGDIVVKLPLPPGTFPTLWNADKRYEKNYMTNYKGYYQTYDAGHIDEDGYIWIMSRTDDIINVAGHRLSTGAIEEVLSEHQSVAECAVLGIADKLKGQLPIGLVVLKSGVEKDNDTISKECVQMVRD

SEQ ID NO: 162795 - protein, 251 aa, Unknown
  Bacterial polypetide isolated from the Sargasso Sea
AREIGGSKWVVKAHFFSGARGKAGGIIVCNNPLEVAQATDKLLGKKLVTNQTGPEGKIVNRIYIEEATDIERELYLGLVFDRSSESIMVVASTEGGMSVEEISKEKPETIIRSKIEVAVGMQSFQARELAFGLGIEPDLIRRASETIIGCYKAFSELDATMVEVNPLVISKQKQILALDCKMSFDNNAMFRRNQVSELRDKTQEDSKEVFASDRGLNYVSLDGNIGNIINGAGLAMASMDMIKLAGGSPAN

SEQ ID NO: 162796 - protein, 319 aa, Unknown
  Bacterial polypetide isolated from the Sargasso Sea
VFASNELASRIDDSKAKLLITASCGFEPGRTVEYRPLIDGAIKLAKHKLEKVVFFQRKKHEINLNAPLEISWDEALSNAKDKDCVEMGSNDFAYILYTSGTTGVPKGIVRDIGGHIVALKWTMKNIYNINEDDVWWSASDIGWIVGHSYIVYAPLFKGCTTVLFEGKPVGTPDAGVFWRIISDYKIKSLFTAPTAFRAIKKEDPEGKYFSKYDLSSFESLFLAGERADPDTIKWAENLLKVPVIDHWWQTETSWSISGNCTGIEMQKTKYGSACKPVPGYDVKIIKPDNSLAKPNEMGDIVVKLPLPPGTFPTLGMQIK

SEQ ID NO: 162797 - protein, 283 aa, Unknown
  Bacterial polypetide isolated from the Sargasso Sea
YSGMINVPLNLVAGDEQLSYIIKHSEAKILFSTKSNLQLARRIIEKSNLHVELIEIDKNNFVDNLEDVKKKETFELNGSDNALLMYTSGTTGKPKGVMLTHDNILNGGKNVLLSHNLDKLDKALCVLPLYHINGFIVTVMGPLVSQSSVVLCEKFSATNFWHQISEFKCTWFSIVPTIVSSLINKYSESEFKLINTNLVKFGRSASAALAPETHKKFEKKFKINLIETMGLTETCAPILSNPMDPRKIKYGSPGIAYGNDVKILDHNFIEVKKNEIGQICVRS

SEQ ID NO: 162798 - protein, 94 aa, Unknown
  Bacterial polypetide isolated from the Sargasso Sea
DEETKSILMMEKIGGSAEEEASEFLKNHKIKKPVVGFIAGITAPKGRRMGHAGAIISGGKGDAKDKIRKMQECGITIAHSPAEIGKTLLHKLSN

SEQ ID NO: 162799 - protein, 253 aa, Unknown
  Bacterial polypetide isolated from the Sargasso Sea
KLSNAPVIDHWWQTETSWAISANCAGIEKFPIKYGSAFKPVPGYDLKVLNSEGKENKPGQMGDIVVKLPLPPGTFPTLWNADERYKKVYMSTYDGYYQTYDAGHIDEDGYVWIMSRTDDIINVAGHRLSTGAIEEVLAEHKNVAECAVIGIADKLKGQLPIGLIALKAGVNRDNKEITKECVALVREKVGPVAAFKLAIVVKRLPKTRSGKVLRGTVRKIADGEAYKIPPTIDDPAILDEIKKDLRDNNILKN

SEQ ID NO: 162800 - protein, 283 aa, Unknown
  Bacterial polypetide isolated from the Sargasso Sea
KGIVRDIGGHIVALKWTMKNIYNIDTDDVWWSASDIGWIVGHSYIVYAPLFKGCTTVLFEGKPVGTPDAGVFWRVISEYKIKSLFTAPTAFRAIKKEDPEGKFFSKYDLGSFKSLFLAGERADPDTIKWAENLLKVPVIDHWWQTETSWAISSNCTGIEMQKTKYGSACKAVPGYDVKILKPDQSLARPNEMGDIVVKLPLPPGTFPTLWNADKRYEENYMSNYKGYYQTYDAGHIDDDGYIWIMSRTDDIINVAGHRLSTGQIEEVLSEHQSVAECAVIGIK

SEQ ID NO: 162801 - protein, 175 aa, Unknown
  Bacterial polypetide isolated from the Sargasso Sea
MSILVNNKTKLVVQGITGREGSFHAIRCKNYGTNLVAGVTPGQGGNKFDQTVPIFDTVEEAVRMTGANTSLIFVPPPFAIEAISESIDSGIEVIACITEGVPALDSLKIYNYLQNSSSILVGPNCPGMISPNDHCKVGIMPGSIHLPGRIGVVSRSGTLTYEAVGQLSNLGIGQS

SEQ ID NO: 162802 - protein, 94 aa, Unknown
  Bacterial polypetide isolated from the Sargasso Sea
ASKEKVSAALKIILSDRNVKGILINIFGGIMRCDVLAQGVVDAAKEINISVPLVVRLAGTNFKEGKEILDNSGLKLISAENLDDAAKKIVEAIK

SEQ ID NO: 162803 - protein, 90 aa, Unknown
  Bacterial polypetide isolated from the Sargasso Sea
KSILMIGEIGGSAEEEAAEFVKNHEIKKPMVGFIAGVTAPPGRRMGHAGAIISGGKGGAKDKIKKMEDCGIEVATSPSEIGKTLLNKLSN

SEQ ID NO: 162804 - protein, 104 aa, Unknown
  Bacterial polypetide isolated from the Sargasso Sea
FIDCLDLFLRDKDTHSIVMIGEIGGSAEEDAAEFLKKSKLKKPTVGFIAGLTAPTGRRMGHAGAIISGGKGGAEDKIEVMKSADITISKSPADIGKTIYEKLNN

SEQ ID NO: 162805 - protein, 182 aa, Unknown
  Bacterial polypetide isolated from the Sargasso Sea
PSCLPSIWGADDAFIEKYLTTFPGYYETGDAGYKDEDGYLYIMARTDDVINVAGHRLSTGQLEEVLAEHPDVAECAVIGVADELKGQLPLGLICLYPNCEKPVEQVCSESIDLVKGRVGRVSAFNLVVAIDRLPKTRSGKVLRGTMAKIADGEEWTMPATIDDPVILDEIGAALKTIGYPKS

SEQ ID NO: 162806 - protein, 271 aa, Unknown
  Bacterial polypetide isolated from the Sargasso Sea
DLSSFESLFLAGERADPDTIKWAENLLKVPVIDHWWQTETSWAISSNCTGIEMMETKYGSACKAVPGYDVKIIKPDQSLAKPNEMGDIVVKLPLPPGTFPTLWNADQRYKENYMSNYAGYYQTYDAGHIDDDGYIWIMSRTDDIINVAGHRLSTGAIEEVLSEHQSVAECAVLGIADKLKGQLPIGLVVLKSGVDKDNDTISKECVQMVRDKIGPVAAFKVVIVIKRLPKTRSGKILRGTIRKIADGVEYKIPPTIDDPSILTEIKEDLIN

SEQ ID NO: 162807 - protein, 126 aa, Unknown
  Bacterial polypetide isolated from the Sargasso Sea
MSILIDKNTKLLVQGITGSQGMLHTKGCIDYGTNVVAGVTPGKGGQEFEGVPIFNSVSEAIRETDANASMILVPPAFTSDAIMEAAAAEIPLIVSITEGVPVVDMVQAVDFVSKKGCRLIGPNCPG

SEQ ID NO: 162808 - protein, 286 aa, Unknown
  Bacterial polypetide isolated from the Sargasso Sea
VSIIAANTPELLEAHYSIPMTGGVINTINTRLDAETIAYILEHSDAKLLITDTQFSPTIKKALNIYGKKIPIIDIHDDQAIFKEEEGEKFGEWTYEEFLQTGDDNFQWSLPDDEWQAISLSYTSGTTGKPKGVVYHHRGSYLMSTGSVTAWNMPNKLTFLYTVPMFHCNGWGYPWTAALIHAKVICCRYIIAKDIYNLIDKHKVTHFGGAPIVLSLIANADEKDKKEINHKVFVLTAGAPPTSAILEKMDNLGFEVMHVYGLTETYGHILQCSWNEEWNHLSNTEK

SEQ ID NO: 162809 - protein, 239 aa, Unknown
  Bacterial polypetide isolated from the Sargasso Sea
MSVRDLIDLRAKEIPDLPFLLTPINPFPINFQQLKDYCSRISTGLEALGVEEGQTVATMMPNGLASTLLNLSIFYKGKILCPLNLAAGDMQLSYVLEHSESRLLLLASELRARAEAILKTLPNPPEMVEIAADEIPFENAGNQWESENQTDALKIGLLMYTSGTTGKPKGVMLSHRSLISGGLNAMESHDLKPEDRALCVLPLYHINGLINTMMGPLVSGSSVFMPPKFKTSEFWGLDS

SEQ ID NO: 162810 - protein, 300 aa, Unknown
  Bacterial polypetide isolated from the Sargasso Sea
PADCVEMNSNEFAYILYTSGTTGTPKGIVRDVGGHIVALKWTMKNIYNIDTNDIWWSASDIGWIVGHSYIVYAPLFKGCTTVLFEGKPVGTPDAGAFWKIISDYKVKSLFTAPTAFRAIKKEDPEGKFFSKYDLSNFESLFLAGERADPDTIKWAENLLKVPVIDHWWQTETSWAISSNCTGIEMMETKYGSACKAVPGYDVKIIKPDQSLAKPNEMGDIVVKLPLPPGTFPTLWNADKRYKENYMSNYEGYYQTYDAGHIDDDGYIWIMSRTDDIINVAGHRLSTGAIEEVLSEHQSVL

SEQ ID NO: 162811 - protein, 248 aa, Unknown
  Bacterial polypetide isolated from the Sargasso Sea
MNWKSLSNNPNITIDIIRENPGKPFDWEWISFNPNITWDIIRENPGKEWDWNKISKHPNITWDIIKENLDLPWKWYKISCNPNITIDIIRENPDKPWNWQWISRNPNITMEIIKDNLDLPWDWRWISRNINITIDFILENPDKPWRWDVLSRYQIITWDIIRENPDKPWNWDYISCNPNITMDIIKENLDKPWNFQWISSNPNITMDIIKENLDMPWDWKYISQNPNITMDIIRDNPDKPWCWYSISG

SEQ ID NO: 162812 - protein, 253 aa, Unknown
  Bacterial polypetide isolated from the Sargasso Sea
FRAIKKEDPEGKFFSKYDLSSFESLFLAGERADPDTIKWAESLLKVPVIDHWWQTETSWAISSNCTGIEMMKTKYGSACKAVPGYDVKVIKPDQTLAKPNEMGDIVVKLPLPPGTFPTLWNADERYKKTYMTNYEGYYQTYDAGHIDDDGYIWIMSRTDDIINVAGHRLSTGAIEEVLSEHQSVAECAVIGIADKLKGQLPIGLIALKAGVQKDNVAISKECIQMVRDKVGPVAAFKTAIVVKRLPKTRSGKI

SEQ ID NO: 162813 - protein, 318 aa, Unknown
  Bacterial polypetide isolated from the Sargasso Sea
EISWEESLSSAKDTDCVEMGSNEFAYILYTSGTTGVPKGIVRDIGGHIVALKWTMKNIYNIDTDDVWWSASDIGWIVGHSYIVYAPLFKGCTTVLFEGKPVGTPDAGVFWRIISEYKIKSLFTAPTAFRAIKKEDPEGKFFSKYDLSSFKSLFLAGERADPDTIKWAENLLKVPVIDHWWQTETSWAISSNCTGIEMQKTKYGSACKAVPGYDVKIIKPDQTLAKPDEMGDIVVKLPLPPGTFPTLWNADKRYEENYMSNYKGYYQTYDAGHIDEDGYIWIMSRTDDIINVAGHRLSTGQIEEVLSEHQSVAECAVME

SEQ ID NO: 162814 - protein, 219 aa, Unknown
  Bacterial polypetide isolated from the Sargasso Sea
LEVAQATDKLLGKKLITNQTGPEGKIVNRIYIEEATDIEKELYLGLVFDRSSESIMVVASTEGGMSVEEISKEKPETIIRSKIEVAVGMQNFQARELAFGLGIEPDLIRRASDTIIGCYKAFSELDATMVEVNPLVISKQRQILALDCKMSFDNNAMFRRSQVSELRDKTQEDSKEIFASDRGLNYVSLDGNIGNIINGAGLAMASMDMIKLAGGAPAN

SEQ ID NO: 162815 - protein, 299 aa, Unknown
  Bacterial polypetide isolated from the Sargasso Sea
MFQFASALAKKGITKGSTVSIIAANTPELFEAHYSIPMTGGVINTINTRLDAETIAYILDHSDAKLLITDTQFSPTMKRALQIYGKNIPIIDIHDDQAIFKDGEGEQIGEMTYEEFLQTGDDNYNWSLPEDEWQAISLSYTSGTTGKPKGVVYHHRGSYLMSTGSVTAWNMPNKLTFLYTVPMFHCNGWGYPWTAALIHAKIICCRYIIAKDIYNLIDKYKVTHFGGAPIVLSLIANADEKDKKEINHKVFVLTAGAPPTSAILEKMDNLGFEVMHVYGLTETYGHILQCAWNEEWESQ

SEQ ID NO: 162816 - protein, 251 aa, Unknown
  Bacterial polypetide isolated from the Sargasso Sea
LAGERADPDTIKWAENLLNVPVIDHWWQTETSWAISSNCTGIEMMETKYGSACKAVPGYDVKIIKPDQSLAKPNEMGDIVVKLPLPPGTFPTLWNADQRYKENYMSNYDGYYQTYDAGHIDDDGYIWIMSRTDDIINVAGHRLSTGAIEEVLSEHQSVAECAVLGIADKLKGQLPIGLVVLKSGVDKDNDTISKECVQMVRDKIGPVAAFKVVIVIKRLPKTRSGKILRGTIRKIADNVEYKVPPTIDDPA

SEQ ID NO: 162817 - protein, 234 aa, Unknown
  Bacterial polypetide isolated from the Sargasso Sea
FVAILGRNRPDLYIAMVAIQMVGATPVPQYQDSVAEEMEYVLAHCGAKFVIAGDQEQVDKILEIEAKLPDFKQMIYLDGRGLRKYDHSKLHSFVSIMENGKNSGPASRSTLNERESALTYDSTCVMLYTSGTTGKPKGVVLSNANIIETSKTTCEFDDLKQSDEILAYLPMAWVGDFIFSVGQAMWRGFCVNCPESADTLSNDLREIGPTYYFAPPRVFEMQLTNVMIRMEDSG

SEQ ID NO: 162818 - protein, 266 aa, Unknown
  Bacterial polypetide isolated from the Sargasso Sea
WNDALKGAQEVDCVEMNANDFAYILYTSGTTGVPKGIVRDIGGHIVALKWTMKNIYNINQNDVWWSASDIGWIVGHSYIVYAPLFKGCTTVLFEGKPVGTPDAGVFWRIISEYKIKSLFTAPTAFRAIKKEDPEGKFFSKYDLSCFESLFLAGERADPDTIKWAESLLKVPVIDHWWQTETSWAISSNCTGIEMQKTRYGSACMPVPGYDVKVLKSDKSEAKANEMGDIVIKLPLPPGTFPTLWNADERYKKTYMSNYEGYYQTYD

SEQ ID NO: 162819 - protein, 84 aa, Unknown
  Bacterial polypetide isolated from the Sargasso Sea
KIILSDKNVKGILINIFGGIMRCDVLAQGVVDAAKEINITVPLVVRLAGTNFKEGKEILDNSGLKLISAENLDDAAKKIVEAIK

SEQ ID NO: 162820 - protein, 205 aa, Unknown
  Bacterial polypetide isolated from the Sargasso Sea
SGIKLLVAIPEHVPIRDAMEAIELAKQKDAVMIGPNTPGVIVPGLIKVGIMPASPFSSGKVAVLSKSGTLLYEISNNLTSAGFGQNITIGIGGDPVNGTRMIDAFDMVKDDPELEAMVVVGEIGGDSEEILAQHIIDTGFKKPIVGYIAGRQAPKEKRMGHAGAIVMGTYGSAESKISMFAKANIPVAKRPGEVAVLLAGKMSSQ

SEQ ID NO: 162821 - protein, 276 aa, Unknown
  Bacterial polypetide isolated from the Sargasso Sea
EDDVWWSASDIGWIVGHSYIVYAPLFKGCTTVLFEGKPVGTPDAGVFWRMISEYKIKSLFTAPTAFRAIKKEDPEGKFFSKYDLSSFESLFLAGERADPDTIKWAENLLNVPVIDHWWQTETSWAISSNCTGIEMQKTKYGSACKAVPGYDVKIIKPDQTLAEPNEMGDIVVKLPLPPGTFPTLWNADERYKENYMTNYEGYYQTYDAGHIDEDGYIWIMSRTDDIINVAGHRLSTGAIEEVLSEHQSVAECAVLGIADKLKGQLPIGLIVLKSGV

SEQ ID NO: 162822 - protein, 305 aa, Unknown
  Bacterial polypetide isolated from the Sargasso Sea
MESISEYKIKSLFTAPTAFRAIKKEDPEGKFFSKYDLSSFESLFLAGERADPDTIKWAENLLKVPVIDHWWQTETSWAISSNCTGIEMQKTKYGSACKAVPGYDVKIIKPDQSLAKPNEMGDIVVKLPLPPGTFPTLWNADKRYEENYMSNYKGYYQTYDAGHIDEDGYIWIMSRTDDIINVAGHRLSTGQIEEVLSEHQSVAECAVVGIKDQLKGQLPIGLIALKAGVTKENEAISNECIQMVRDKVGPVAAFKIAIVVKRLPKTRSGKVLRGTIRKIADKEDYKMPATIDDPAILTEITEEFI

SEQ ID NO: 162823 - protein, 113 aa, Unknown
  Bacterial polypetide isolated from the Sargasso Sea
GIGGDPFPGSSFIDMLKLFEEDEQTEAIVMVGEIGGNAEEAAADYIKNNVNKPVISYIAGQTAPAGKRMGHAGAIIAGGKGTAAEKIKKLKECGVHVADNLVSIGSKVAEVLG

SEQ ID NO: 162824 - protein, 294 aa, Unknown
  Bacterial polypetide isolated from the Sargasso Sea
DAGAFWKIISDHRVKSLFTAPTAFRAIKKEDPEGKFFSKYDLSNFESLFLAGERADPDTIKWAENLLKVPVIDHWWQTETSWAISSNCTGIEMMETKYGSACKAVPGYDVKIIKPDQSLAKPNEMGDIVVKLPLPPGTFPTLWNADQRYKENYMTNYEGYYQTYDAGHIDDDGYIWIMSRTDDIINVAGHRLSTGAIEEVLSEHQSVAECAVLGIADKLKGQLPIGLVVLKSGVDKDNESISKECVQMVRDKIGPVAAFKVVIVIKRLPKTRSGKILRGTIRKIADGVDYKVPP

SEQ ID NO: 162825 - protein, 267 aa, Unknown
  Bacterial polypetide isolated from the Sargasso Sea
LAGERADPDTLKWAEGLLKVPVIDHWWQTETSWAISANCAGIGLEKTKYGSACKPVPGYDVKILKSDGKEAKPNEMGDVVVKLPLPPGTFPTLWGADQRYKETYMSNYPGYYQTYDAGHIDEDGYVWIMSRTDDIINVAGHRLSTGAMEEVLAEHKDVAECAVLGIADKLKGQLPIGLLTLKAGVTKKHEDISKECVQMIRQKIGPVAAFKTAIVIKRLPKTRSGKILRGTVRKIADNEPYKMPATIDDPAILDEIKGDLKKHNILK

SEQ ID NO: 162826 - protein, 279 aa, Unknown
  Bacterial polypetide isolated from the Sargasso Sea
CYYGTNNPEQIVLLFAASKIGAIMFPINWRLANPEIEYLINHSNPNVIFFDTKFGDKISQIHIPRSIKTIAVDNSEINHKSLEARRLSCNGRIKKTIKNNLPLLLVYTSGTTGKPKGALLGQKAIISNAKMSHDAHSLKSSDKVLISLPLFHVGGINILLLPALLKSATVVLQERFEPDQALEIIRKFKISKMITVPTILDQMIKSRFWIKPNYKYLQVISIGSTNVPKYLLKKLHSIKIPVIQIYGATETGPLAIYQKVKDAFTTEGSIGKAGSLCKI

SEQ ID NO: 162827 - protein, 296 aa, Unknown
  Bacterial polypetide isolated from the Sargasso Sea
ILYTSGTTGTPKGIVRDVGGHIVALKWTMKNIYNIDTNDIWWSASDIGWIVGHSYIVYAPLFKGCTTVLFEGKPVGTPDAGAFWKIISDYNVKSLFTAPTAFRAIKKEDPDGKFFSKYDLSNFESLFLAGERADPDTIKWAENLLKVPVIDHWWQTETSWAISSNCTGIEMMETKYGSACKAVPGYDVKIIKPDQTLAKPNEMGDIVVKLPLPPGTFPTLWNADKRYKENYMSNYEGYYQTYDAGHIDDDGYIWIMSRTDDIINVAGHRLSTGAIEEVLSEHQSVAECAVLGIADK

SEQ ID NO: 162828 - protein, 70 aa, Unknown
  Bacterial polypetide isolated from the Sargasso Sea
NIFGGIMRCDVLAQGVVDAAKEMKINVPLVVRLAGTNFKEGKEILDNSGLKLISAENLDDAAKKIVEAIN

SEQ ID NO: 162829 - protein, 320 aa, Unknown
  Bacterial polypetide isolated from the Sargasso Sea
KEISWDEAMSDAKDTDCVEMNSNEFAYILYTSGTTGVPKGIVRDIGGHIVALKWTMKNIYNINTDDVWWSASDIGWIVGHSYIVYAPLFKGCTTVLFEGKPVGTPDAGAFWRIISEYNVKSLFTAPTAFRAIKKEDPDGKFFSKYDLSKFEALFLAGERADPDTIKWAESLLKVPVIDHWWQTETSWAISSNCTGIEMMKTKYGSACKAVPGYDVKIIKPDQSLAKPNEMGDIVVKLPLPPGTFPTLWNADKRYEENYMTNYKGYYQTYDAGHIDDDGYIWIMSRTDDIINVAGHRLSTGAIEEVLSEHQSVAECAVIGI

SEQ ID NO: 162830 - protein, 306 aa, Unknown
  Bacterial polypetide isolated from the Sargasso Sea
MHANELASRIDDSKAKILVTASCGFEPGRTVEYKPLVDKALEIAKHKPEKLILYQREGHEVDLNNINEISWNDALKGAQEVDCVEMNANDFAYILYTSGTTGIPKGIVRDIGGHIVALKWTMKNIYNINQNDVWWSASDIGWIVGHSYIVYAPLFKGCTTVLFEGKPVGTPDAGVFWRVISEYKIKSLFTAPTAFRAIKKEDPEGKFFSKYDLSCFESLFLAGERADPDTLKWAESLLKVPVIDHWWQTETSWAISSNCTGIEMQKTKYGSACMPVPGYDVKVLKADKSEAKANEMGDIVVKLPLP

SEQ ID NO: 162831 - protein, 171 aa, Unknown
  Bacterial polypetide isolated from the Sargasso Sea
MTVLIDKNSKIIIQGFTGKMGSFHADEMIKYGSNVVGGVTPGKGGSMHLNLPVFNTVKDAVSETGADASILFVPPAFAADSAMEAADAGIKTCVAIVDGIPSHDMIRIKRYMRRYTKSSKMTLVGPNCAGIISPGKSMLGIMPGHIYKEGRIGIISRSGTLGYEAAQQLKN

SEQ ID NO: 162832 - protein, 260 aa, Unknown
  Bacterial polypetide isolated from the Sargasso Sea
NELASRIDDSKAKLLVTASCGFEPGRTVEYKPLVDEAIKIANHKIKKMILFQRPGYEVKLNAPSEVSWEEVVSNAKDADCVEMNSNEFAYILYTSGTTGTPKGIVRDIGGHIVALKWTMKNIYNIDSDDIWWSASDIGWIVGHSYIVYAPLFKGCTTVLFEGKPVGTPDAGAFWKIISDYKVKSLFTAPTAFRAIKKEDPEGKFFSKYDLSSFESLFLAGERADPDTIKWAENLLKVPVIDHWWQTETSWAISSNCTGKK

SEQ ID NO: 162833 - protein, 281 aa, Unknown
  Bacterial polypetide isolated from the Sargasso Sea
SYIVYGPLFYGCTTVLFEGKPVGTPDAGVFWRIISEHKVKSLFTAPTAIRAIKKEDPNGEFFKKYDLSKFDKLFLAGERADPDTIKWFEKLSNSPVIDHWWQTETSWAITSSCTGIENFSIKYGSAFKPVPGYDLKVLNSEGKEVGPGKMGDIVVKLPLPPGTFPTLWGADKRYKENYMSTYPGYYQTYDAGHIDEDGYVWIMSRTDDIINVAGHRLSTGAIEEVLAEHQDVAECAVIGIADKLKGQIPIGLLALKAGVTKDKKDIISECVKMVREKVGPV

SEQ ID NO: 162834 - protein, 201 aa, Unknown
  Bacterial polypetide isolated from the Sargasso Sea
LLVTNQTGPEGKIVNRIYIEEATDIEKELYLGLVFDRSSESIMVVASTEGGMSVEEIAKEKPETIIRSKIEVAVGIQSFQARELAFGLGIESDLIARASDTIIGCAKAFSELDATMVEVNPLVISKQKQILALDCKMSFDNNAMFRRNKVSELRDKSQEDEKEVYASDRGLNYVSLEGNIGNIINGAGLAMASMDMIKLAG

SEQ ID NO: 162835 - protein, 261 aa, Unknown
  Bacterial polypetide isolated from the Sargasso Sea
PDTIKWFEKLSGSPVIDHWWQTETSWAITSSCTGIEKFPVKYGSAFKPVPGYDLKVLNSEGKEVGPGKMGDIVVKLPLPPGTFPTLWGADKRYKENYMSNYPGYYQTYDAGHIDEDGYVWIMSRTDDIINVAGHRLSTGAIEEVLAEHKSVAECAVIGIADKLKGQIPIGLLALKAGVSKKNSDIIKECVSMVREKVGPVAAFKIAIIVKRLPKTRSGKVLRGTVRKIADNEPYKMPATIDDPAILDEIKADLIENKILKN

SEQ ID NO: 162836 - protein, 300 aa, Unknown
  Bacterial polypetide isolated from the Sargasso Sea
SSFGILSKSNIAIVASNSIEYMEIVLAASQLGHPIATVNPKLTINEIVSICEDAQASLIFVDQKVSSLLEGIQIDGAQRIINIENELSNLIDHSSQMVDLPAIDEKETFTIPYTSGTTGKPKGVLVPHRSRALTLYGMADAYGCFSSDDRFLSIAPMCHGAGMIFSLAPIFFGGYAEIMDDFNPELVMKTIEDENITGFFGVPTHFYGMLGIDQSILDSCTGSSLKTIISNAAALPQSLKEKIVEHFGDGLLYECYGSTEGGIISNLKPEDQLRKKQCVGEPFPFTEIKILNHDGNECDQ

SEQ ID NO: 162837 - protein, 268 aa, Unknown
  Bacterial polypetide isolated from the Sargasso Sea
WPDSIFFISPGNNSTEKSELSYSVAATKIKSYENYFSQSGYGYGERIALLLGNSVEHYLVKLAANNLGISVVPLNPDSSKSEIIYILNDSNSVLLITNKNHSKLASSVKDKLETSILIVNIEEFSKSLPASRTPIQKVVVTHNSEASLLYTSGTTGKPKGCILSHEYELMCGDSYRSAGPPVGLKVNQDRVYNPLPSFHINAGILTLFGCILTGNCLIQPARFSSNNWWIDIKETQATVFHYLGVIIAVLLQNEKTSDIKPNSLRLGL

SEQ ID NO: 162838 - protein, 279 aa, Unknown
  Bacterial polypetide isolated from the Sargasso Sea
MHAIRKAGGVSVPIPYRSTPAEASYLLGHADAKILIIEATYLPVLSSIRDQLPMLQHVIAYGNAEQYSGILLWEDALGDAQTPASEGKAESALTMIYTSGTTGKPKGAMRRVGGEINQYGALLEFIGWDKMEELIFLTTGPLYHSGPSGFARRAQLVGATIVCQYTFDPEDWLRLVETHRVSATFSAPTPIRRITALPKETKDKYDVSSMQSMIANAAPWTMALKKAYLRDFPPDSLWEIYGSTELSVCTVLAPEDQLRKPGSCGLPSPGVEIQLIDDE

SEQ ID NO: 162839 - protein, 271 aa, Unknown
  Bacterial polypetide isolated from the Sargasso Sea
RLKFIINLEDEQFESLISWNQFINAEEKENSKNNIIEKFNPKIDDVATILYTSGTTGKPKGVPLTHANFLHQITNLAYIADPEPGTSVLSVLPIWHSYERSAEYFFFSCGCSQYYTIPKFLKDDITQIKPVVMATVPRLWEAIHDGFFQALKKMPSKKQKLIKFLISNSSVFKRSLRKIRNLDINQITFKSKIPLLVTVSFRYPLHKLSTIFLWPNILRQLCGEKLKFPINGGGALPEHVDLFFESLGVDVLVGYGLTETSPVLTCRRREL

SEQ ID NO: 162840 - protein, 259 aa, Unknown
  Bacterial polypetide isolated from the Sargasso Sea
MSNFDTNLDKNSANFVPLSPLSFISRVKDIYPNYDSLVYGNRSYTWLETYNRCTKFASALAKKGITKGSTVSIIAANTPELFEAHYSIPMTGGVINTINTRLDAETIAYILDHSDAKLLITDTQFSPTMKKALKIYGKNIPIIDIHDNQAVFKDGEGEQIGEMTYEEFLQTGDDNYNWSLPEDEWQAISLSYTSGTTGKPKGVVYHHRGSYLMSTGSVTAWNMPNKLTFLYTVPMFHCNGWGYPWTAALIHAKIICCRY

SEQ ID NO: 162841 - protein, 301 aa, Unknown
  Bacterial polypetide isolated from the Sargasso Sea
ISDYKVKSLFTAPTAFRAIKKEDPEGKFFSKYDLSKFESLFLAGERADPDTIKWAENLLKVPVIDHWWQTETSWAISSNCTGIEMMKTKYGSACKAVPGYDVKIIKSDQTLAKPNEMGDIVVKLPLPPGTFPTLWNADQRYKENYMSNYNGYYQTYDAGHIDEDGYIWIMSRTDDIINVAGHRLSTGAIEEVLSEHQSVAECAVLGIADKLKGQLPIGLIVLKAGVDKDNETISKECIQMVRDKIGPVAAFKVAIVIKRLPKTRSGKILRGTIRKIADNVKYKMPPTIDDPAILDEIKEDL

SEQ ID NO: 162842 - protein, 295 aa, Unknown
  Bacterial polypetide isolated from the Sargasso Sea
WKIISDYKVKSLFTAPTAFRAIKKEDPEGKFFSKYDLSSFESLFLAGERADPDTIKWAENLLKVPVIDHWWQTETSWAISSNCTGIEMMETKYGSACKAVPGYDVKIIKPDQSLAKPNEMGDIVVKLPLPPGTFPTLWNADERYKENYMSNYEGYYQTYDAGHIDDDGYIWIMSRTDDIINVAGHRLSTGAIEEVLSEHQSVAECAVLGIADKLKGQLPIGLVVLKSGVDKDNDTISKECVQMVRDKIGPVAAFKVVIVIKRLPKTRSGKILRGTIRKIADGIDYKVPPTIDDPA

SEQ ID NO: 162843 - protein, 200 aa, Unknown
  Bacterial polypetide isolated from the Sargasso Sea
KVKSLFTAPTAIRAIKKEDPNGEFFKKYDLSKFDKLFLAGERADPDTIKWFEKLSNSPVIDHWWQTETSWAITSDCTGIESFPVKYGSAFKPVPGYDLKVLNSDGKEVGPGKMGDIVVKLPLPPGTFPTLWGADKRYKENYMSTYPGYYQTYDAGHIDEEGYVWIMSRTDDIINVAGHRLSTGAIEEVLAEHKMLLSVRS

SEQ ID NO: 162844 - protein, 158 aa, Unknown
  Bacterial polypetide isolated from the Sargasso Sea
MTVLIDKKSKIIIQGFTGKMGSFHAEEMIEYGSNVVGGVTPGKGGSKHLNLPVFNTVKDAVSETGADASILFVPPAFAADSAMEAADAGIKTCVAIVDGIPSHDMIRIKRYMRRYTKSSKMTLVGPNCAGIISPGKSMLGIMPGHIYKEGRIGIISRS

SEQ ID NO: 162845 - protein, 303 aa, Unknown
  Bacterial polypetide isolated from the Sargasso Sea
MIAVRPSSYRNSKISSGIRSSARRTPDKISFSMDNKQVTYKSFVKRLDKVAVAGIDGLGLCKGDHVAIFSSNCIEFIEIVVGLADAGIATAMIPPSVTVPEVEHICNDSNAKVLFCHKGLEDIARAANLESVEKIIVIGKNYESLIADAGSRPPNTNLEEWDVFSIPYTSGTTGKPKGCLLSHRSRVMAFYTMGVEFGCYSPDDRALALAPLFHGAGFAFALAPIFFGGTCEILPKFDPEIVLKKLQDLNLSNTFFVPTHFHQIFSLEKKILQKYKPNSLRTIISNAAPLPQATKEKIVKYFG

SEQ ID NO: 162846 - protein, 103 aa, Unknown
  Bacterial polypetide isolated from the Sargasso Sea
MSVLVNKDTKLICQGFTGTHGTFHSEQAIKYGTKLVGGVTPKKGGQTHLKLPVFNTVLEAKEQTSANATMIYVPPKFAGAAIIEAIEAKIELIVCITEGIPIL

SEQ ID NO: 162847 - protein, 292 aa, Unknown
  Bacterial polypetide isolated from the Sargasso Sea
RLANPEIEYLIQHSNPNVIFFDTKFEDKMSQICIPKRIKTITVSNSEINQTSLEARRLSCNGRIKRPIKNNLPLLLVYTSGTTGKPKGALLGQKAIISNAKMSHDAHSLKSSDKVLISLPLFHVGGINILFLPALLKSATVVLQEKFEPDQALEIIGKYKITKMITVPTILDQMIKSKFWIEANYKFLQVISIGSTNVPKYLLKKLHSINIPIIQIYGATETGPLAIYQKVKDAFITEGSIGKSGSLCKIKLVDEDLNEVSIGQPGQILVKGENILECYWNDEIASQPKYKR

SEQ ID NO: 162848 - protein, 276 aa, Unknown
  Bacterial polypetide isolated from the Sargasso Sea
AVPALASALKKKGVVPGTTVSVMAPNVPELLEAHFGVLMTGGVLNALNIRLEAETLAYILEHGESQVLITDREFSPVIQKVLQQLEDPPLVIDIDDPMAEGGELLGEMDYEAFLKTGDEDFEWNLPEDEWQAVSLNYTSGTTGKPKGVVYHSRGAHLLAIDNILAWGMQRHPVYLWTLPMFHCNGWCFPWTITLLAGTHVCLRKVNAANIYDSIDKHGVTHLCGAPIVMGMIANAEDQDQRVLSDQVQIMTAAAPPPPPVIARMEEMGFQVTHVYG

SEQ ID NO: 162849 - protein, 279 aa, Unknown
  Bacterial polypetide isolated from the Sargasso Sea
MKSNEYAYILYTSGTTGVPKGIVRDIGGHIVALKWTMKNIYNIDEGDIWWSASDIGWIVGHSYIVYAPLFKGCTTVLFEGKPVGTPDAGAFWKMISDYKIKSLFTAPTAFRAIKKEDPEGKFFSKYDLSSFESLFLAGERADPDTIKWAENLLQVPVIDHWWQTETSWAISSNCTGIEMMKTKYGSACKAVPGYDVKIIKPDQTLAKPNEMGDIVVKLPLPPGTFPTLWNADKRYKENYMSNYEGYYQTYDAGHIDEDGYIWIMSRTDDIINVAGHRLS

SEQ ID NO: 162850 - protein, 260 aa, Unknown
  Bacterial polypetide isolated from the Sargasso Sea
LSKKNKFAKNRDFIKNLDHIDQIWEKLKFKCGDALAVCDLRGKYKEKFSYSELADLITKVSFSFENYGLVKGDVVTVISENSPRWLAVDQGLMRLGAINAVRGINSPSVELDYIIGHSNSVGLIVQSKEIWLKLNNKEELKKRLKFIINLEDEQFESLISWSTFISSVEKENSQTNNIEKFKPKIDDVATILYTSGTTGKPKGVPLTHANFLHQIINLAYIADPEPGTSVLSVLPIWHSYERSAEYFFFSCGCSQILYNS

SEQ ID NO: 162851 - protein, 100 aa, Unknown
  Bacterial polypetide isolated from the Sargasso Sea
LDVGGGASKEKVTAAFKLILADKNVKGILINIFGGIMRCDVLAQGVVEAAKQVNLSVPLVVRLAGTNFEEGKEILNKSNLKILSASDLNDAAKKIVEAIK

SEQ ID NO: 162852 - protein, 277 aa, Unknown
  Bacterial polypetide isolated from the Sargasso Sea
FSKYDLSSFESLFLAGERADPDTIKWAENLLNVPVIDHWWQTETSWAISSNCTGIEMQKTKYGSACKAVPGYDVKIIKPDHSIAEPNEMGDIVVKLPLPPGTFPTLWNADKRYEENYMTNYKGYYQTYDAGHIDEDGYIWIMSRTDDIINVAGHRLSTGAIEEVLSDHQSVAECAVLGIADKLKGQLPIGLVVLKSGVEKDNETISKECIQMVRDKIGPVAAFKVVIVIKRLPKTRSGKILRGTIRKIADKEDYKMPATIDDPAILDEITQSLIENK

SEQ ID NO: 162853 - protein, 259 aa, Unknown
  Bacterial polypetide isolated from the Sargasso Sea
MHDLAYWPSAKPLSKKDKFTKKRDFIKNLHHIDQIWEKLKFKCGDTLAVCDLRGKYKEKFSYSELADLITKVSFSFKNYGLVKGDVVTVISENSPRWLVVDQGLMRLGAINAVRGINSPSVELDYIIEHSSSVGLIVQSKEIWLKLNNKEELKNRLKFIINLEDDQFESLISWNQFIKAAEKENTQTNNIEKFNPKIDDVATILYTSGTTGKPKGVPLTHANFLHQIINLAYIADPEPGTSVLSVLPIWHSYERSAEYF

SEQ ID NO: 162854 - protein, 265 aa, Unknown
  Bacterial polypetide isolated from the Sargasso Sea
MGDLAYWSSAKPLFKNDKFVKNRDFIENLNHIDQIWENLKIKCGNTLAVCDLRGKYKEKFSYSEIADLITKVSFAFKNYGLVKGEVVTVISENSPRWLIADQGLMRLGAINAVRGINSPSVELEYIIEHSNSVGLIVQSKDIWLKLNNKEELKKRLKFIINLEDEQFESLISWRQFISVEEKENSQNNIIEKFNPKIDDVASILYTSGTTGKPKGVPLTHANFLHQIINLAYIADPEPGTSVLSVLPIWHSYERSAEYFFFSCGC

SEQ ID NO: 162855 - protein, 247 aa, Unknown
  Bacterial polypetide isolated from the Sargasso Sea
MNNYLYSQLIHPNLDNKETFLLLDDGKSFSYEEIISIASKISHKLIKLGLKVGDPLLVKAPKCKETIALYLSSIMTGAVYFPLNSNYTSIETNYFVKDSKPAFLICEESDIKNLKPICDEVGCKILSMSANGEGEITDGLKNFDNYFKPAFRKDEDLAALLYTSGTTGKPKGAMLTQQNLVSNAIQLVNLWNINRDDTLIHSLPIYHTHGLFVAMNTTMMAGATVRFLKNFNLDYVFEAFNKSTLMM

SEQ ID NO: 162856 - protein, 238 aa, Unknown
  Bacterial polypetide isolated from the Sargasso Sea
TSGTTGTPKGIVRDIGGHIVALKWTMKNIYNIDTDDIWWSASDIGWIVGHSYIVYAPLFKGCTTVLFEGKPVGTPDAGAFWKIISDYKVKSLFTAPTAFRAIKKEDPEGKFFSKYDLSNFESLFLAGERADPDTIKWAENLLKVPVIDHWWQTETSWAISSNCTGIEMMQTKYGSACKAVPGYDVKIIKPDQSLAKPNEMGDIVVKLPLPPGTFPTLWNADKRYKENYMSNYEGYYQT

SEQ ID NO: 162857 - protein, 307 aa, Unknown
  Bacterial polypetide isolated from the Sargasso Sea
TSGTTGIPKGIVRDVGGHIVALKWTMKNIYNIDENDVWWSASDIGWIVGHSYIVYAPLFKGCTTVLFEGKPVGTPDAGVFWRIISEYKIKSLFTAPTAFRAIKKEDPDGKFFSKYDLSSFESLFLAGERADPDTIKWAENLLDVPVIDHWWQTETSWAISSNCTGIEMQKTKYGSACKAVPGYDVKIIKPDYSIAKPNEMGDIVVKLPLPPGTFPTLWNADKRYEENYMTNYNGYYQTYDAGHIDEDGYIWIMSRTDDIINVAGHRLSTGAIEEVLSDHQSVAECAVLGIADKIKGQLPIGLVVLKS

SEQ ID NO: 162858 - protein, 94 aa, Unknown
  Bacterial polypetide isolated from the Sargasso Sea
EETVEKGFQIITQDPNVRCILINIFGGIVRCDMVASGIVEAFRKVNLQIPVVVRLEGTNAEEAQKIIGSSGFGDRLQMADGLGEAAEMAVAAAA

SEQ ID NO: 162859 - protein, 257 aa, Unknown
  Bacterial polypetide isolated from the Sargasso Sea
MAFEYINKDGNRKPKITPNIENISDFKKDFIWEEMFEEIPWLPGGGLNNAYVCIDSHVDSGAGDNVAMIWNGKNDEEETYTFKDLKVHTDKFANVLKSLGVNKGDRVFVFMDRLPECYISVFGGLKIGAIVGPLFSAFGPDPVKDRMLDSGAKILVTQPELRKKIESILPDLPDLEKIIIVNKNNREENALVGEDLSYEELMASSEPIESIENTSQYDYSIMHYTSGTTGKPKGALHRHQSIVQQYATGKWALDFQK

SEQ ID NO: 162860 - protein, 60 aa, Unknown
  Bacterial polypetide isolated from the Sargasso Sea
MSVLVNSQTRVICQGFTGSQGTFHSEQAIDYGTNMVGGVTPGKGGQAHLGLPVFNSVADA

SEQ ID NO: 162861 - protein, 284 aa, Unknown
  Bacterial polypetide isolated from the Sargasso Sea
GGHIVALKWTMKNIYNINEDDVWWSASDIGWIVGHSYIVYAPLFKGCTTVLFEGKPVGTPDAGVFWRVISEHKIKSLFTAPTAFRAIKKEDPDGKFFSKYDLSSFESLFLAGERADPDTIKWAENLLNVPVIDHWWQTETSWAISSNCTGIEMQKTKYGSACKAVPGYDVKIIKPDQTIAKPNEMGDIVVKLPLPPGTFPTLWNADKRYEENYMSNYKGYYQTYDAGHIDDDGYIWIMSRTDDIINVAGHRLSTGAIEEVLSEHQSVAECAVIGIKDQLKGQLP

SEQ ID NO: 162862 - protein, 297 aa, Unknown
  Bacterial polypetide isolated from the Sargasso Sea
VALKWTMKNIYNIDTNDIWWSASDIGWIVGHSYIVYAPLFKGCTTVLFEGKPVGTPDAGTFWKIISDYKVKSLFTAPTAFRAIKKEDPDGKFFSKYDLSSFESLFLAGERADPDTIKWAENLLKVPVIDHWWQTETSWAISSNCTGIEMMETKYGSACKAVPGYDVKIIKPDQTLAKPNEMGDIVVKLPLPPGTFPTLWNADQRFKENYMTNYKGYYQTYDAGHIDDDGYIWIMSRTDDIINVAGHRLSTGAIEEVLSEHQSVAECAVLGIADKLKGQLPIGLVVLKSGVDKNNDTI

SEQ ID NO: 162863 - protein, 281 aa, Unknown
  Bacterial polypetide isolated from the Sargasso Sea
FFKYDLSSFESLFLAGERADPDTIKWAENLLKVPVIDHWWQTETSWAISSNCTGIEMMETKYGSACKAVPGYDVKIIKPDQTLAKPNEMGDIVVKLPLPPGTFPTLWNADKRYKENYMSNYEGYYQTYDAGHIDDDGYIWIMSRTDDIINVAGHRLSTGAIEEVLSEHQSVAECAVLGIADKLKGQLPIGLVVLKSGVDKDNETISKECIQMVRAKIGPVAAFKVAIVIKRLPKTRSGKILRATIRKIADNVEYKVPPTIDDPAILSEIKEDLIRNKILNG

SEQ ID NO: 162864 - protein, 109 aa, Unknown
  Bacterial polypetide isolated from the Sargasso Sea
GGLNFIDTLKLFEADPDTDAVIMIGEIGGNAEVDAGRWIKENMSKPVVSFIAGASAPPGKRMGHAGAIISGGDDTAEAKFAILEECGVAIARSPAELGERVEEVLKSRG

SEQ ID NO: 162865 - protein, 266 aa, Unknown
  Bacterial polypetide isolated from the Sargasso Sea
SKGCITIDDLEGFIHLDKFVEGESHADPEERTAGQVMNYTSGTTGKPKGVKRSLVEGDPDDVLSMFAMILSFFEIQPEEENVHIVGSPLYHTAVIIHSTAALHYGHSLVVMEKFNAERMLYLIDKYKVTTSHMVPTQFHRLLQLPGEVKDKYDCSSTRAMIHAAAPCPIHTKQEMIAWWGNSIWEYYAATEGGGTVVGANDWSNFPGTVGKAWPGADIKIILDNQEEASVNEQGTVYMRLGDATKFEYKGDKAKTQKERLELDDSV

SEQ ID NO: 162866 - protein, 286 aa, Unknown
  Bacterial polypetide isolated from the Sargasso Sea
CGFEPGRTVEYRPLVDGALKLAKHKVEKVIFYQRKDNEVKINSPLEISWNEALVNAKNKDCVEIGANEFAYILYTSGTTGIPKGIVRDVGGHIVALKWTMKNIYNIDENDVWWSASDIGWIVGHSYIVYAPLFKGCTTVLFEGKPVGTPDAGVFWRIISEYKIKSLFTAPTAFRAIKKEDPDGKFFSKYDLSCFESLFLAGERADPDTIKWAENLLNVPVIDHWWQTETSWAISSNCTGIEMQKTKYGSACKAVPGYDVKIIKHDHSIAKPNEMGDIVVKLPLPPG

SEQ ID NO: 162867 - protein, 293 aa, Unknown
  Bacterial polypetide isolated from the Sargasso Sea
CDCNAWGVQEIGAIHSVFFGGFASTELASRIDDSKAKLLVTASCGFEPGRTVEYKPLVDEAIKIANHKIEKMILFQRPGHEVKLNAPLEISWDEVVSNAEPADCVEMNSNEFAYILYTSGTTGTPKGIVRDVGGHIVALKWTMKNIYNIDTNDIWWSASDIGWIVGHSYIVYAPLFKGCTTVLFEGKPVGTPDAGAFWKIISDYKVKSLFTAPTAFRAIKKEDPNGEFFSKYDLSSFESLFLAGERADPDTIKWAENLLKVPVIDHWWQTETSWAISSNCTGIEMMETKYGSA

SEQ ID NO: 162868 - protein, 290 aa, Unknown
  Bacterial polypetide isolated from the Sargasso Sea
SDIGWIVGHSYIVYAPLFKGCTTVLFEGKPVGTPDAGAFWKIISDYKVKSLFTAPTAFRAIKKEDPEGKFFSKYDLSSFESLFLAGERADPDTIKWAENLLNVPVIDHWWQTETSWAISSNCTGIEMMKTKYGSACKAVPGYDVKIIKPDQSLAKPNEMGDIVVKLPLPPGTFPTLWNADKRYEENYMTNYKGYYQTYDAGHIDDDGYIWIMSRTDDIINVAGHRLSTGAIEEVLSEHQSVAECAVLGIADKLKGQLPIGLVVLKAGVKKNNETISKECIQMVRDKIGPV

SEQ ID NO: 162869 - protein, 232 aa, Unknown
  Bacterial polypetide isolated from the Sargasso Sea
MHIKSHNKIGKVEANYTPLSPISFLSKAAKIFPKRTSIIYESQKFTWLETYSRCKKLASVLSNQFSNGDVIGFFAANTPELYEAHFGVPMAGMVLNALNIRLDPETIGYIIDHSEIKIIFVDDEFLELVIKAIEIAHEKPQLIRIKDNFLDISHNNFDYMNYEEFISNGDENFEPVKLMDEWDSISINYTSGTTGKPKGVVYHHRGAYLNALGNALEWEMNMHPSVSLDTPD

SEQ ID NO: 162870 - protein, 269 aa, Unknown
  Bacterial polypetide isolated from the Sargasso Sea
LFLAGERADPDTIKWAEKLLKVPVIDHWWQTETSWAISANCTGIEMMKTKYGSACKAVPGYDVKIIKPDQTLAKPNEMGDIVVKLPLPPGTFPTLWNADKRYKETYMSNYQGYYQTYDAGHIDEDGYVSIMSRTDDIINVAGHRLSTGAIEEVLSEHQSVAECAVIGIADKLKGQMPIGLITLKAGVKKENETISKECIQMIRDKVGPVAAFKTAIVVKRLPKTRSGKILRGTVRKIADKEEYKMPATIDDPAILDEIKQDLIKNNILK

SEQ ID NO: 162871 - protein, 104 aa, Unknown
  Bacterial polypetide isolated from the Sargasso Sea
DCLELFLSDPETESIIMIGEIGGSAEEEAAEFLRKEKVKKPTVGFIAGTSAPPGRRMGHAGAIVSGGKGGAEDKIEAMKSAGIQISNSPAALGSTLLEVLKNQN

SEQ ID NO: 162872 - protein, 214 aa, Unknown
  Bacterial polypetide isolated from the Sargasso Sea
DHWWQTETSWAISSNCAGIEKFPIKYGSAFKPVPGYDLKVLNNEGKENKPGQMGDIVVKLPLPPGTFPTLWNADERYKKVYMSTYKGYYQTYDAGHIDEDGYVWIMSRTDDIINVAGHRLSTGAIEEVLAEHKNVAECAVIGIADKLKGQLPIGLIALKAGVDRDNKEITKECVALVREKVGPVAAFKLAIVVKRLPKTRSGKVLRGTVRKIAD

SEQ ID NO: 162873 - protein, 209 aa, Unknown
  Bacterial polypetide isolated from the Sargasso Sea
MVSLPALLRKNAASFGSKAAFREKEFGIWQTWSWAKALDEAENFALGLIELGVEPGDFVAILGRNRPDLYIAMIAIQMVGATPVPQYQDSVAEEMEYVLAHCGAKFVIAGDQEQVDKILEIEAKLPDFKQMIYLDGRGLRKYDHSKLHSFVSIMENGKNSGPASKSTLNERESALTYDSTCVMLYTSGTTGKPKGVVLSNANIIETSKT

SEQ ID NO: 162874 - protein, 311 aa, Unknown
  Bacterial polypetide isolated from the Sargasso Sea
QHKISKMILFQRKGHEVKLNAPMEISWDDALTNAKDTDCEEMNSNEFAYILYTSGTTGTPKGIVRDIGGHIVALKWTMKNIYNIDEDDIWWSASDIGWIVGHSYIVYAPLFKGCTTVLFEGKPVGTPDAGAFWKIISDYKVKSLFTAPTAFRAIKKEDPEGKFFSKYDLSKFESLFLAGERADPDTIKWAENLLKVPVIDHWWQTETSWAISSNCTGIEMMKTKYGSACKAVPGYDVKIIKSDQTLAKPNEMGDIVVKLPLPPGTFPTLWNADQRYRENYMSNYKGYYQTYDAGHIDEDGYIWIMSRTDDI

SEQ ID NO: 162875 - protein, 106 aa, Unknown
  Bacterial polypetide isolated from the Sargasso Sea
RDIIEKFENDDETIAVLMIGEIGGPQEVEAGQFAKENMSKPVIAYIAGLTAPKGRVMGHAGAIVSAYGESAIEKVELLKECGVTISKNPSVMGETVKKVLVDNNLN

SEQ ID NO: 162876 - protein, 161 aa, Unknown
  Bacterial polypetide isolated from the Sargasso Sea
YYLTGDEGTKDEDNYLFVMGRTDDVINVAGHRLSTGEMEELIAGHPAVAECAVTGIDDELRGQVPVGFVVLKDGVEMSQEQMQKELVDIIRRDIGAVAYFRQSGIVKRLPKTRSGKILRKTIRKIAVENEVSVPPTIDDPVILDEIRDVMRERGIGQFALS

SEQ ID NO: 162877 - protein, 92 aa, Unknown
  Bacterial polypetide isolated from the Sargasso Sea
TVKNGFRIILSDKNVKAVLINIFGGIVRCDRVANGVVEAVKELGLDVPVVVRLEGTNAEEAQIILEQSGVSIIPAKGMKDAAEKVVSAALGS

SEQ ID NO: 162878 - protein, 305 aa, Unknown
  Bacterial polypetide isolated from the Sargasso Sea
KIKSLFTAPTAFRAIKKEDPDGKFFSKYDLSSFESLFLAGERADPDTIKWAENLLKVPVIDHWWQTETSWAISSNCTGIEMQKTKYGSACKAVPGYDVKIIKPDQTLAKPNEMGDIVVKLPLPPGTFPTLWNADKRYEENYMSNYKGYYQTYDAGHIDEDGYIWIMSRTDDIINVAGHRLSTGQIEEVLSEHQSVAECAVIGIKDQLKGQLPIGLIALKAGVTKDNETISKECIQMVRDKVGPVAAFKVAIVVKRLPKTRSGKVLRGTIRKIADKEEYKMPATIDDPQILTEIKEDLIQNKILKI

SEQ ID NO: 162879 - protein, 317 aa, Unknown
  Bacterial polypetide isolated from the Sargasso Sea
DAGVFWRIISEYKIKSLFTAPTAFRAIKKEDPDGKFFSKYDLTSFKSLFLAGERADPDTIKWAENLLNVPVIDHWWQTETSWAISSNCTGIEMQKTKYGSACKAVPGYDVKVIKPDHSIAKTNEMGDIVVKLPLPPGTFPTLWNANKRYEENYMTNYKGYYQTYDAGHIDEDGYIWIMSRTDDIINVAGHRLSTGAIEEVLSEHQSVAECAVLGITDKLKGQLPIGLVVLKSGVEKDNETISRECIKMVRDKIGPVAAFKVVIVIKRLPKTRSGKILRGTIRKIADNEDYKMPATIDDPSILEEITQSLIENKILIK

SEQ ID NO: 162880 - protein, 421 aa, Unknown
  Bacterial polypetide isolated from the Sargasso Sea
MNEFSTNLDKNKANYVPLSPLSFILRAKDIYPNYESVVYGNRSYTWLQTYKRCAKFASALTKRGIGFGSTVSIIAANTPELLEAHYSIPMTGGVINTINTRLDAETIAYILEHSDAKLLITDTQFSPTIKKALSIYGKKIPIIDIHDDQAIFKEEEGEKLGEWTYEEFLQTGDDNYNWSLPDDEWQAISLSYTSGTTGKPKGVVYHHRGSYLMSTGSITAWNMPNKLTFLYTVPMFHCNGWGYPWTAALIHAKVICCRYIIAKDIYNLIDKHKVTHFGGAPIVLSLIANADEKDKKKINHKVFVLTAGAPPTSSILEKMDNLGFEVMHVYGLTETYGHILQCSWNEEWNHLSSSEKADIKARQGVRYPNTEAVCVADPETYETVPMDGETMGEILIRGNVVMKGYYKNKQATETSMKNGWF

SEQ ID NO: 162881 - protein, 357 aa, Unknown
  Bacterial polypetide isolated from the Sargasso Sea
PELLEAHFGVLMTGGVLNALNIRLEAETLAFILEHGESQVLITDREFSPVIKKVLQQLEDHPLVIDIDDPMAEGGELLGEMDYEAFLKTGDEDFEWNLPEDEWQAVSLNYTSGTTGKPKGVVYHSRGAHLLAIDNILAWGMPRHPVYLWTLPMFHCNGWCFPWTITLLAGTHVCLRKVNAANIYDSIVKHGVTHICGAPIVMGMIANAEEQDQRVLSDQVQIMTAAAPPPPPVIARMEEMGFQVTHVYGLTETYGPSVVSVWQEEWNGLSSTDRALKKGRQGVNYPGLEGLMVADPETLKEVPSDGQTLGEVFMKGNLVMKGYFKNPEATQEAFRGGWFHSGDLGVRHPDGYIELKD

SEQ ID NO: 162882 - protein, 311 aa, Unknown
  Bacterial polypetide isolated from the Sargasso Sea
WGLFGELYSEHKVKSLFTAPTAFRAIKKEDPNGTFFKKYDLSSFETLFLAGERADPDTLKWAEGLLKVPVIDHWWQTETSWAISANCVGIGLEKTKYGSACKPVPGYDVKILKSDGKEAKPNEMGDVVVKLPLPPGTFPTLWGADQRYKETYMSNYPGYYQTYDAGHIDEDGYVWIMSRTDDIINVAGHRLSTGAMEEVLAEHQDVAECAVLGIADKLKGQLPIGLLTLKAGVTKKHEDISKECVQMIRQKIGPVAAFKTAIVIKRLPKTRSGKILRGTVRKIADNEPYKMPATIDDPAILDEIKGDFKKT

SEQ ID NO: 162883 - protein, 274 aa, Unknown
  Bacterial polypetide isolated from the Sargasso Sea
MGDLAYWPSAKLLSKKVKFAKNRDFIKNLDHIDQIWEKLKFKCGDTLAVCDLRGKYKEKFSYSELADLITKVSFSFKNYGLAKGDVVTVISENSPRWLVVDQGLMRLGAINAVRGINSPSVELDYIVEHSNSVGLIVQSKEIWLKLKNKEELKKRLKFIINLEDEHFESLISWNQFIRSAEKENSQNNNLEKFSTKIDDVATILYTSGTTGKPKGVPLTHANFLHQIINLAYIADPEPGTSVLSVLPIWHSYERSAEYFFFSCGCSQYYTIPKF

SEQ ID NO: 162884 - protein, 196 aa, Unknown
  Bacterial polypetide isolated from the Sargasso Sea
MKKNNLPVFPLGLVALPGTIQNLQIFEPRYINMVKNCMKNSQGFVIVFQKPTDSIDDFEISKKGSYVEIIDFNNLPNGLLGISVKSINKVVVNNLIQLKDGLHIAEINPLVDPEVDDQALLAEFPEITNILNQLVKHPRIVDMPIEVDFNSADSVAYHLAGLIPIPWTSKQNLLEAFDASQRLKILSKYIDEISSN

SEQ ID NO: 162885 - protein, 285 aa, Unknown
  Bacterial polypetide isolated from the Sargasso Sea
MNLAIWLERTALKHPDREALFLGSECIGTYKDFWLAVCALRFHLEKEGIKRGDRVAVYMPNCPEFLVAFYAVWSMGAVILPINAKLHTREVSWILDNAKCWYVLGDAILSSEIRLPNITIFNPKWDDLSKSVQVSPVSCSFNDLAWLFYTSGTTGKPKGVMITHGMIKTMALSYFADVDQVYPSDTTLYAAPMSHGAGLYSIMHVLAGTRHAIPVSGGFDEEEIFNLAEKLKNVHMFAAPTMVKRLTNFAKKNNKDGSGFRTVVYAGAPMYLSDVIEAVEHFGPI

SEQ ID NO: 162886 - protein, 650 aa, Unknown
  Bacterial polypetide isolated from the Sargasso Sea
MSNHESGQVWKPGQRELQHAGIVKLMHALGVPSYEELMRVSIAEPERYWTTVMDECAIAWDALPTGYADLSRGPQFPSWFPGGKLNWVNTIYGWARNPATAQQKAVVAEREDGSVSELTYAELEQRVSDFAAGLVRHGVRQGDRVGLLMENGVEATVSLLAIVHLGALVVPLFSGFGVDAIVARLSAAEARIVIASTGFSRRTKRVDVQGALRDAWRQLPLLEHVIWKRGEGDTAQDTRDLDWQETASAGQGQGVPPVSVTPDTPFMVIYTSGTTGKPKGVVHTHGSFPIKIAHDSLVHFDVHPGDVYCWPADMGWIAGTLVLGCALLRGATLVCYDGAPDYPDWSRMSRVVERHRVTHFGSAPTLIRGMASHEALALAGDRSTVRLLITAGEGIAPEHFNWFLQRFGDGTAPVINYTGGTEASGALLASVPIRPIPPSGFNTVSPGVAADVVNADGQSVTGEIGELAIRAPFVGMTQSFWHDDERYLETYWQTIPGIWVHGDLALRTSTGNYFMMGRSDDTLKVAGKRLGPAEVEEVVLELPDVAEAAAIGVADADKGQKLVVFVVPKPDADGTGADLEAIVSGHVDKRLGRPFRPGRVHVVAQLPKTRSSKIMRRVIRSVYCGQPPGDLSSLDNPGALDEVRAAATSA

SEQ ID NO: 162887 - protein, 303 aa, Unknown
  Bacterial polypetide isolated from the Sargasso Sea
MNQFSTDLDKNKANFAPLSPLSFITRAKDIYPNYESVVYGNRSYTWLKTYDRCTKFASALTKQGIGIGSTVSIIAANTPELLEAHYSIPMTGGVVNTINTRLDAQTIAYILEHSDAKMLITDTQFSPTIKKALDLYGKKIPIIDIHDEQAIFKEGEGEKIGDWTYEEFLGTGDDDFDWSLPEDEWQAISLSYTSGTTGKPKGVVYHHRGSYLMSTGSVTAWNMTNKLTFLATVPMFHCNGWGYPWTAALIHAKVVCCRYIVAKDIYNLIDKHKVTHFGGAPIVLNLIANAEEKDKKPINHKIY

SEQ ID NO: 162888 - protein, 503 aa, Unknown
  Bacterial polypetide isolated from the Sargasso Sea
MPSTYKHTNISDGIRSACLKNPLKIAYKHGKNTRTYIELAQRIDSISSLISSFGIPSKSNIAIVASNSIEYMEIVLAASQLGHPIATVNPKLTIKEIVSICEDAQASLIFVDQKVSTLLEVIHIDGTQRKINIDYELSNLIDQSSQMGGLPAIDEKETFTIPYTSGTTGKPKGVLVPHRSRALTLYGMADAYGCFSSDDRFLSIAPMCHGAGMIFSLAPVFFGGYAEIMDDFNPELVMKTIEDENITGFFGVPTHFYGMLGIDQSILDSCTGSSLKTIISNAAALPQSLKEKIVEHFGEGLLYECYGSTEGGIISNLKPEDQLRKKQCVGEPFPFTEIKILNQDGHECGPNEIGEVFTSSPYIFNGYWQKEKETRDAFDGEWLTVGDLAKKDEDGFLYIVDRKKDMIISGGINIYPREIEEILLEHPDINDIAIVGEPDEKWGEIIKAFIVFKETQLSLDEIHDFCSDKIASIKIPKIIETINALPRNANGKVLKTELRGKKL

SEQ ID NO: 162889 - protein, 177 aa, Unknown
  Bacterial polypetide isolated from the Sargasso Sea
MAVIIQKDTKILIQGFTGKMGTFHAEEMIKYGSNVVGGVTPGKGGQKHLDRPVFNTVKDAVQETGATASILFVPPAFAADSAMEAADAGIKTCVAIVDGIPSHDMIRIKRYMRRYSRKEKMTLVGPNCAGIISPGKSMLGIMPGHIYKEGRVGIISRSGTLGYEAAQQLKDLNIGVS

SEQ ID NO: 162890 - protein, 524 aa, Unknown
  Bacterial polypetide isolated from the Sargasso Sea
DYIIEHSNSVGLIVQSKEIWLKLNNKEELKKRLKFIINLEDEQFESLISWSKFISSEEKENSQNYNFEKFNPEIDDVATILYTSGTTGKPKGVPLTHANFLHQIINLAYIADPEPGTSVLSVLPIWHSYERSAEYFFFSCGCSQYYTIPKFLKDDITQIKPVVMATVPRLWEAIHDGFFQALKKMPFKKQKLIKFLISNSSVFKRSLRKIRNIDINQITFKSKIPLMGSVISRYPLHKLSTIFLWPNILRQLCGEKLKFPINGGGALPEHVDLFFESLGVDVLVGYGLTETSPVLTCRRRELNVRGSSGQPLSFTEIKIVNDDKKKILKFREVGKILVRGPQVMKGYLNNAIATNDVLSKDGWFDTGDLGFLIPNGSLFITGRAKDTIVLSSGENIEPNPLETEILSSEFINQIQLVGQDKKCLTALVVPNVELVKSKFLEEDLSKLNLNKKIGTFFKSQINNLLKSRLGARSEEQILDCYFVDAFTLENGLLTQTLKQKRKEIEKKYSLQIENMYENKFSKKI

SEQ ID NO: 162891 - protein, 503 aa, Unknown
  Bacterial polypetide isolated from the Sargasso Sea
MPSSFKHTVISDGILSACSQSPSKVAYKHGQKTRTYHELKQRIDSISGIIHSFQIPMKCNIAIVASNSIEYMEIVLAASKLGHPIATVNPKLTANDIVSICEDAEAKLVFVDQKVSSLLVGRNIRGVQEIIGIDNEMETLIAQTECPSQLPTIKEKETFTIPYTSGTTGKPKGVLVPHRSRALTLYGMADAYGCFSSDDRFLSIAPMCHGAGMIFSLAPIFFGGYAEIMDDFNPELVMKTLEDEEMTGFFGVPTHFYGMLGVDQSILDNCSGSSLKTIISNAAALPQSLKEKIVKHFGEGLLYECYGSTEGGIISNLGPDDQLRKKQCVGEPFPFTEIKILNNDGDECEPNEVGEVFTSSPYIFNGYWQKEKETQDAFDGEWLTVGDLAKKDEDGFLYIVDRKKDMIISGGVNIYPREIEEVLLEHPEINDIAIVGEPDEKWGEIIKAFIVFKEEELSLDVIQDFCSNKIASIKMPKIIEKIDALPRNANGKVLKTELRGTKA

SEQ ID NO: 162892 - protein, 524 aa, Unknown
  Bacterial polypetide isolated from the Sargasso Sea
MSDLGFYRFANAQPDEIAIVEPSEKIWTRGELLAKTNQLTHALKDFGVETGDVVATVLPNSVEYYIAYLACAQSGFYMVPINWHLAGPEIAYILEDSGAKAFIASGEVPAMEEACKKAVAAIDFPKEGSISTTDMDGFIHLDDFVAPHPTSNPVERTAGQVMNYTSGTTGKPKGVKRALVPGDPDDILSMFAMILSFFEIQPNEDNVHIVGSPLYHTAVLVHSSAALHYGHSVVLMEKFNAEKMLYLIDKYKVTTSHMVPTQFHRLLQLPDEIKNKYDCSSTRAMIHAAAPCPIHTKQAMIEWWGNSIWEYYAATEGGGTVVDAESWSKFPGTVGKAWPGAEIKIINDDGSEADTDNQGTVYMKLGEATKFEYKGDQAKTKKERLVIDEQVYFTVGDIGYLNDEGYLFLCDRKIDMIISGGANIYPAEIESTFLMHPAVADVAVFGIPNEEWGEEVKAVIELNSDQKSSEELLGELMGFAQENLAKMKLPRSIDFIKKLPRDENGKLYKRRLRDPYWENQSTQV

SEQ ID NO: 162893 - protein, 218 aa, Unknown
  Bacterial polypetide isolated from the Sargasso Sea
TPKGIVRDVGGHIVALKWTMKNIYNIDPDDVWWSASDIGWIVGHSYIVYAPLFHGCTTVLFEGKPVGTPDAGVFWRVISEHKVKSLFTAPTAFRAIKKEDPNGNFFKKYDLSCFKSLFLAGERADPDTIKWAEKLLKAPVIDHWWQTETSWAISANCTGLELAKIKYGSACKPVPGYNVKILKSDGKESKPNEMGDVVVKLPLPPGTFPTLWGADLTL

SEQ ID NO: 162894 - protein, 112 aa, Unknown
  Bacterial polypetide isolated from the Sargasso Sea
MSIIVNKDSKVLVQGFTGSEGTFHSEQMIEYGTNVVCGVTPGKGGTKHLDKPVYNSVAEAMINEDINTSIIFVPPMFAADAIMEAAESGINTIVAITEGIPVNDMTKSCVLY

SEQ ID NO: 162895 - protein, 162 aa, Unknown
  Bacterial polypetide isolated from the Sargasso Sea
MTVLVDKNSKIIIQGFTGKMGSFHADEMIKYGSNVVGGVTPGKGGSKHLDLPVFNTVKDAVNETGADASILFVPPAFAADSAMEAADAGIKICVAIVDGIPSHDMIRIKRYMRRYTKSSKMTLVGPNCAGIISPGKSMLGIMPGHIYKEGRVGIISRSGTLG

SEQ ID NO: 162896 - protein, 252 aa, Unknown
  Bacterial polypetide isolated from the Sargasso Sea
MPSTYKHTNISDGVRSACLKNPSKIAYKHGKNTRTYSELAQRIDSISSLISSFGILSKSNIAIVASNSIEYMEIVLAASQLGHPIATVNPKLTIKEIVSICEDAQASLIFVDQKVSTLLEGIQIDGAQRKINIENELSNLIDQSSQMDGLPAIDEKETFTIPYTSGTTGKPKGVLVPHRSRALTLYGMADAYGCFSSDDRFLSIAPMCHGAGMIFSLAPVFFGGYAEIMDDFNPELVMKTIEDENITGFFGV

SEQ ID NO: 162897 - protein, 166 aa, Unknown
  Bacterial polypetide isolated from the Sargasso Sea
KSYLSTFPGFYETGDAGLIDNDGYVYIMARTDDVINVAGHRLSTGAMEEALSNHADVAECAVIGVSDQLKGQIPLGFLCLTKGVNRPHEEIVSECIKLVRNQIGPVASFKLAAIVPRLPKTRSGKILRATMVKIADGQEFKMPATIDDPVILDEIKASLQTLGYAK

SEQ ID NO: 162898 - protein, 281 aa, Unknown
  Bacterial polypetide isolated from the Sargasso Sea
FKKYDLSKFDTLFLAGERADPDTIKWFEKLSNAPVIDHWWQTETSWAISANCAGIEKFPIKYGSAFKPVPGYDLKVLNSEGKENKSGQMGDIVVKLPLPPGTFPTLWNADERYKKVYMSTYEGYYQTYDAGHIDEDGYVWIMSRTDDIINVAGHRLSTGAIEEVLAEHKNVAECAVVGIADKLKGQLPIGLIALKAGVDRDNKEITKECVALVREKVGPVAAFKLAIVVKRLPKTRSGKVLRGTVRKIADGETYKVPPTIDDPVILDEIKKDLKDNNILKS

SEQ ID NO: 162899 - protein, 114 aa, Unknown
  Bacterial polypetide isolated from the Sargasso Sea
VGIGGDPIPGSSFIDILELFEADDQTDAIVMVGEIGGNAEEEAAEFISQNVTKPVVSYIAGQTAPPGKRMGHAGAIISGGKGTAEDKIKKLNESGVVVAKNLLEIGSTIKSLMS

SEQ ID NO: 162900 - protein, 113 aa, Unknown
  Bacterial polypetide isolated from the Sargasso Sea
GGDPINGSSFRDIIEKFETDEETDAILMIGEIGGPQEVAAGHFAKENMKKPVIAYIAGLTAPKGRVMGHAGAIVSAYGESAVEKVELLKECGVTISKNPSVMGDTVKEVLGKS

SEQ ID NO: 162901 - protein, 70 aa, Unknown
  Bacterial polypetide isolated from the Sargasso Sea
MKNHKIKKPTVGFIAGITAPPGRRMGHAGAIISGGKGGAEDKIKKMEECGIIVAKSPSIIGKTLFDKLSN

SEQ ID NO: 162902 - protein, 318 aa, Unknown
  Bacterial polypetide isolated from the Sargasso Sea
TPDAGAFWKIISDYKVKSLFTAPTAFRAIKKEDPEGKFFSKYDLSSFESLFLAGERADPDTIKWAESLLKVPVIDHWWQTETSWAISSNCTGIEMMKTKYGSACKAVPGYDVKVIKPDQTLAKPNEMGDIVVKLPLPPGTFPTLWNANERYKKTYMSNYEGYYQTYDAGHIDEDGYIWIMSRTDDIINVAGHRLSTGAIEEVLSEHQSVAECAVIGIADKLKGQLPIGLIALKAGVQKDNETISKECIQMVRDKVGPVAAFKTAIVVKRLPKTRSGKILRGTVRKIADKEEYKMPATIDDPAILEEIKEDLIKNNILK

SEQ ID NO: 162903 - protein, 523 aa, Unknown
  Bacterial polypetide isolated from the Sargasso Sea
MELGFYRFANKEPNKLAIVGPNEELVSRGELLSKANKLTHALRDLGLKKFDTVAVVLPNSVEYFVVYMACLQAGFYLVPINWHLAGPEIAYILEDSEAKAFIASGKNPDMEKACINAVSEISFDKKGCITIDELEGFRHIDDFTKSMPDENPHDRSAGQVMNYTSGTTGKPKGVKRNLVEGDPDDVLSLFAMIFSFYNIQPEDENVHIVGSPLYHTAVIVHSTASLHYGHSVVVMDKFDAEKMLYLIDKYKVTTSHMVPTQFHRLLQVNDSIKKKYDCTSTRAMIHAAAPCPIHTKQEMIDWWGDSIWEYYAATEGGGTVISAKDWSRFPGTVGQAWPGAEIKIIRDDGTEADIDEQGTVYMRLGDTTKFEYKGDKAKTEKERLVIGDSVFFTVGDIGYMNSEDYLFLCDRKIDMIISGGANIYPAEIESVFLMHPKVQDVAVFGIPNEEWGEEIKAVVELSDEEIIEEDIKNDLMEFASKNLAKMKHPRSIDLIDKLPRDENGKLFKRKLRDPYWENQDRQV

SEQ ID NO: 162904 - protein, 177 aa, Unknown
  Bacterial polypetide isolated from the Sargasso Sea
MSVRDLIDLRANEISDLPFLLTPANPFPINFQELKDHCSRISLGLGALGVGESQTVATMMPNGLASTLLNLSILYKGKTLCPLNLATGDMQLSYVLEHSESRLLLVASELRARAEAILKTLPNPPEMVEIPADEIPFENAGNQWEIENQTDASDTGLLMYTSGTTGKPKGVMLSHRN

SEQ ID NO: 162905 - protein, 138 aa, Unknown
  Bacterial polypetide isolated from the Sargasso Sea
VMGRMDDVINVAGHRLSTGQIEEVVAKHTVIAECAVVGINDKEKGQVPVSLVVLKDGANMMPEALEKELVMMVREAVGPIANFKRILIVERLPKTRSGKILRQIMRKMIDREEYSVPSTIEDPSVIGELETGIANWKL

SEQ ID NO: 162906 - protein, 112 aa, Unknown
  Bacterial polypetide isolated from the Sargasso Sea
MSILVGNKSKIVVQGITGSEGTFHSHQMIEYGTNIVAGVTPGKGGQTALETKVPVFDCVEDSIKETGANVSIIFVPPPFAADAIIEASESGIDLVVCITEGVPVHDMVKAKR

SEQ ID NO: 162907 - protein, 273 aa, Unknown
  Bacterial polypetide isolated from the Sargasso Sea
FESLFLAGERADPDTIKWAENLLKVPVIDHWWQTETSWAISSNCTGIEMMETKYGSACKAVPGYDVKIIKPDQTLAKPNEMGDIVVKLPLPPGTFPTLWNADKRYKENYMSNYEGYYQTYDAGHIDDDGYIWIMSRTDDIINVAGHRLSTGAIEEVLSEHQSVAECAVLGIADKLKGQLPIGLVVLKSGVDKDNETISKECIQMVRAKIGPVAAFKVAIVIKRLPKTRSGKILRGTIRKIADNVEYKVPPTIDDPAILSEIKEDLIRNKILDG

SEQ ID NO: 162908 - protein, 239 aa, Unknown
  Bacterial polypetide isolated from the Sargasso Sea
MELNKINSLVELFFKKCEEKKVKPNLPFLKWLKVDKKDFLTWGEVEHNISILSEYLRNILSPGDRCVLLSENRPEWLIADIAIMNAGGVTVPLFTTYSKNDYEYIINDCKPKVCIISNDIQFKKLEKSISNETVVLSIENFSKKIESIENIFNKYSKKEKKFLSLKYNQNIYRKDLACIIYTSGTTGKPKGVMLSHGGILSNCEGAKEILESLVKDEEPVFLTWLPLSHSYEHTVQYVQ

SEQ ID NO: 162909 - protein, 510 aa, Unknown
  Bacterial polypetide isolated from the Sargasso Sea
MIGICISRGASIVPAMLGVLTHGAGYLPLDPQMPDERLRYIVKDAQLRAVIVDAATHERLSALVDCALYRIDDLLKGPAAGLAGSAFARGAPLDPQRTAYVIYTSGTTGKPKGVVIERGMLAHLIASLTGRYRRDASTRWLQFASVNFDASVLEIFNPLTHGGHLIVAPEAVRTDADALSAFLDAERITHAFLPPAILKLLPRRALPHLDTILCGGEASDDETIRFWSGMLRLSNIYGPTETTVMATENTFDGDKAANQLGHPLPGYQIHLLDEEGEPVPLGGIGEICIGGAAVARGYLLRPELTGQKFRANPFGPGRLYRSGDLGRFQPDGAIEFLGRSDFQVKIRGYRIELGEIEASIVEQPEVRSAYVGTCERQGGTALVAWYAGAALEPAVLRSRLAQRLAHYMVPAFLLPVEALPLTLNGKIDRSRLPAPQAGPADSAKRAFDAFELAVQAIWSEVLGVPLDSVGEDSHFFHLGGHSLLATLVWHRVSASLSAPSQLKTLFEHPQ

SEQ ID NO: 162910 - protein, 96 aa, Unknown
  Bacterial polypetide isolated from the Sargasso Sea
EKDEQTEAIVMIGEIGGDAEEQAADYVKNNVTKPIVSFIAGQTAPPGRRMGHAGAIISGGHGTAEEKMSALREAGIYVINSLDEIGIKMLEALEKA

SEQ ID NO: 162911 - protein, 278 aa, Unknown
  Bacterial polypetide isolated from the Sargasso Sea
MKIENINSLVELYFKKYDEIKNKKGPPFLFGLSSKDKNSSLNWNEVTLKIKSLTTFLQDYITPRDRCVLLSENRPQWLIADIAIMNSGGVTVPLFTTYSDSDYEYIINDCGPKVCIVSNKLQYEKIEKFLNDKIKIISIDKFTNQIENFSDIFKKTNFTNKNYNNKIKRNDLACIIYTSGTTGKPKGVMLSHGGILSNCEGALEILASIVKKKKPVFLTWLPLSHSYEHTVQFVQISLGAKVYYAESLDKLIPNMSVAKPTIMTAVPRFYQNLYNKIL

SEQ ID NO: 162912 - protein, 114 aa, Unknown
  Bacterial polypetide isolated from the Sargasso Sea
MLFDKNTKVLVQGLGKDGSFQAKKSIEYGTNVVACVHPNRKGQLFEEKIPFFETVIEAKEKTGANAGVIYVPAPFAIDAIIEQIDAGLDLVVCITEGIPVHDMVKVKNYLKDKK

SEQ ID NO: 162913 - protein, 539 aa, Unknown
  Bacterial polypetide isolated from the Sargasso Sea
MLPAADRYDDLLSRFAWDVPARYNIGVDVCDKWADGSGRLALIHETAQGDVFRITFDDLRNASNRLANSFVRAGLRRGDRIGIFLAQGPETAVAHLAAYKLGAIAVPLFTLFGVDALEYRLANSEAAALVTDAAGYAKIAPLRARLPALHTVYCIGDDAPDQPGVLRYDAALAAETPDFVPADTAADDPAVIIYTSGTTGKPKGALHAHRVLLGHLPGVEMSQQCFPRDARLFWTPADWAWIGGLLDVLLPSWHHGVPVLARRFEKFDGDAAFALMARHGVTHAFLPPTALKLMRTVPAPRERYALSLKSVASGGESLGTELTAWGRDALGVTINEFYGQTECNMVLSSCAALFDAQPGAIGRAVPGHAVAIVDADGTPLPPGVEGRIAVRRPDPVMFLEYWRNADATRDKFAGDYLLTGDTGTIDADGFVRFVGRDDDVITSAGYRIGPGPIEDCLLTHPAVRMAAVVGVPDATRTEIVKAFVVLNPGHTGDDALVQALQAHVRTRVAAHEYPRAIAFVDSLPMTATGKIVRRALRDA

SEQ ID NO: 162914 - protein, 379 aa, Unknown
  Bacterial polypetide isolated from the Sargasso Sea
MSPISPFEENLPKNQANYSPLTPLSFLTRTAEVFPERTAIIHGEIKRSWRETLKRCTRLASALKKKGVVQGTTVSVMAPNVPELLEAHFGVLMTGGVLNALNIRLEAETLAYILVHGESKVLITDREFSPVIQKVLQKLEDPPLVIDIDDPMAEGGELLGEMDYEAFLKTGDENFEWNLPEDEWQAVSLNYTSGTTGKPKGVVYHSRGAHLLAIDNILAWGMPRHPVYLWTLPMFHCNGWCFPWTITLLAGTHVCLRKVNAANINDSIVKHGVTHLCGAPIVMGMIANAEDQDQRVLSDHVQIMTAAAPPPPPVIARMEEMGFQVTHVYGLTETYGPSVVSAWQEEWNELSPTDQALKKGRQGVNYPGLEGLMVADSET

SEQ ID NO: 162915 - protein, 216 aa, Unknown
  Bacterial polypetide isolated from the Sargasso Sea
MNQFSTDLDKNKANFTPLSPLSFITRAKDIYPNYESVVYGNRSYTWLQTYDRCTKFASALTKQGISIGSTVSIIAANTPELLEAHYSIPMTGGVVNTINTRLDAQTIAYILEHSDAKMLIADTQFSPTIKKALDIYGKKIPIIDIHDEQAILKEGEGEKLGDWTYEEFLGTGDADFDWSLPEDEWQAISLSYTSGTTGKPKGVVYHHRGSYLMSTR

SEQ ID NO: 162916 - protein, 310 aa, Unknown
  Bacterial polypetide isolated from the Sargasso Sea
MSNFDTNLDKNSANFVPLSPLSFITRVKDIYPNYDSLVYGKRSYTWLETYNRCTKFASALAKKGITKGSTVSIIAANTPELFEAHYSIPMTGGVINTINTRLDADTIAYILDHSDAKLLITDTQFSPTMKKALKIYGKNIPIIDIHDDQAVFKDGEGEQIGEMTYEEFLQTGDDNYNWSLPEDEWQAISLSYTSGTTGKPKGVVYHHRGSYLMSTGSITAWNMPNKLTFLYTVPMFHCNGWGYPWTAALIHAKIICCRYIVAKDIYNLIDKYKVTHFGGAPIVLSLIANADEEDKKEINHKVYVLTAGAP

SEQ ID NO: 162917 - protein, 110 aa, Unknown
  Bacterial polypetide isolated from the Sargasso Sea
MSILVNKNTKVICQGFTGKHGTFHSEQAIKYGTNLVGGVTPKKGGQMHLSKPVFNSVKEAKEKTGANASMIYVPAKFAASAIIEAIEASMELITCITEGIPVLDMLKVKK

SEQ ID NO: 162918 - protein, 96 aa, Unknown
  Bacterial polypetide isolated from the Sargasso Sea
LLDEQTEGILMIGEIGGSAEEEAANFVKNHTIKKPIAGFIAGRTAPPGRTMGHAGAIVSGGSGDAETKIKTFEECGIEVALSPSDLGEAIVRAMKG

SEQ ID NO: 162919 - protein, 105 aa, Unknown
  Bacterial polypetide isolated from the Sargasso Sea
EEFLGTGDDDFDWSLPEDEWQAISLSYTSGTTGKPKGVVYHHRGSYLMSTGSVTAWNMTNKLTFLATVPMFHCNGWGYPWTAALIHAKVVCCRYIVAKDIYNLIR

SEQ ID NO: 162920 - protein, 198 aa, Unknown
  Bacterial polypetide isolated from the Sargasso Sea
MNLHEYQAKDLLRKYNLPILQGKSYIEKIDNFSKDIENIKGPPWVIKSQIHAGGRGAGKFLKPFNDKGGVQISNTSEDAEKIAKGMMGNTLVTKQTGNEGKLVKRVYLEAGCEIDREYYLSILLDRNQSKLMFMVSDAGGINIEDVAEKTPERIHYIHFDNLENIIVSDNLQKKLNFSINEFSQFKEIISNLCRAYLK

SEQ ID NO: 162921 - protein, 312 aa, Unknown
  Bacterial polypetide isolated from the Sargasso Sea
MGDLAYWPAAKPLSKKNTFAKNRDFIKNLDHIDQIWEKLKFKCGDTLAVCDLRGKYKEKFSYSELADLITKVSFSFENYGLKKGDVVTVISENSPRWLAVDQGLMRLGAINAVRGINSPSVELDYIIGHSNSVGLIVQSKEIWLKLNNKEELKKRLKFIINLEDEQFESLISWSTFISSVEKENSQNNNLEKFNPEIDDVATILYTSGTTGKPKGVPLTHANFLHQIINLAYIADPEPGTSVLSVLPIWHSYERSAEYFFFSCGCSQYYTIPKFLKDDITQIKPVVMATVPRLWEAIHDGFFQALKKMPFKK

SEQ ID NO: 162922 - protein, 242 aa, Unknown
  Bacterial polypetide isolated from the Sargasso Sea
MNNFDTNLDKNTANFVPLSPLSFISRAKDIYPNYESLVYGKRSYTWKETYNRCTKFASALEKQGIGKGDTVSIIAANTPEIFEAHYSIPMIGAVINTINTRLDAETIAYILDHSDAKLLITDSQFSPTMKKALSLYGKNIPIIDIHDDQALFKEGEGERIGKWTYEDFLLTGDDNFEWSLPDDEWQAISLSYTSGTTGKPKGVVYHHRGSYLMSTGSVTAWNMTNKLTFLYTVPNVSLQWMG

SEQ ID NO: 162923 - protein, 295 aa, Unknown
  Bacterial polypetide isolated from the Sargasso Sea
FRAIKKEDPEGKFFSKYDLSSFESLFLAGERADPDTIKWAENLLKVPVIDHWWQTETSWAISSNCTGIEMMETKYGSACKAVPGYDVKIIKPDQSLANPNEMGDIVVRLPLPPGTFPTLWNADERYKENYMSNYEGYYQTYDAGHIDDDGYIWIMSRTDDIINVAGHRLSTGAIEEVLSEHQSVAECAVLGIADKLKGQLPIGLVVLKSGVDKDNETISKECVQMVRDKIGPVAAFKVVIVIKRLPKTRSGKILRGTIRKIADGVDYKVPPTIDDPAILTEIKEDLIKHKILNNG

SEQ ID NO: 162924 - protein, 497 aa, Unknown
  Bacterial polypetide isolated from the Sargasso Sea
VGLYPTNPASEVEYLLSHSESKILFAEDQEQVDKALQVIENLPLLEKIVYFEDRGLYSYDHPKLMRFDEFLEIGKSEYESFPEYVDQQLEEINDEDVAFLVYTSGTTGKPKGSMITHGNISWVASQIPNFSLVENVKAKDPQFLSYLPLCHIFGRLTDLLIASHTMATINFAESIDTVQMDLAEIQPTIFPAVPRILERMHSGAMVKMRDASFIKRQLFKISMYLGNIGAERKLKYGFNDVFANFLISIGWLLSFRTLKKKLGLSKAETAISGAAPIAPEILKFFMALGVPIFEGYGMTENCGYASGNNDKKMKLGTVGVPNHGMEIKLAEDGEILTRGGAVFKGYFKNEEATKETIDEDGWLHTGDVGVFEGEFLKIVDRKKDIIITSGGKNVSPQEIENKIKISPFIKDAIVIGDKRKFLSALVAIEFDTVSNWALRKNIAHTTYRDLSEKQEVKDLVWKEIVKANEQTSSLEIRKFRMIPKELDHEDGELTATQ

SEQ ID NO: 162925 - protein, 388 aa, Unknown
  Bacterial polypetide isolated from the Sargasso Sea
GIQRDQSIAIAAPNSTASCLMFMAVVCSGFVAVPLNLVAGSAILAYTIEHSEAKFIFVADDCKDLIDSAVAQQNSSVKLIKLDPVRGPDLAALPSEVKKFQLEGIDSKPTDIALLMYTSGTTGKPKGVMLSHANLLAAGRFISTGHEIDRNDSGLCVLPIYHINGMCVTVMGTIVSASTLVIPHKFSVNSFWKTIAKFKCSWFSAVPTQFSYILNNEEVPEDLSSLRFARSASAPLSPDIHKKFEKRFNIPIIETMGLTETGSQITTNPMPPGQRKIGSPGKAYGNQIMIGDDQFEALPAGEAGEILVKGDNVMQGYFKQPEETHKTILGNGWLRTGDLGYLDTDGYVFVSGRIKELIIKGGENIAPREIDEALLTHPGILEAAAFAV

SEQ ID NO: 162926 - protein, 311 aa, Unknown
  Bacterial polypetide isolated from the Sargasso Sea
KIISDYKVKSLFTAPTAFRAIKKEDPDGKFFSKYDLSKFESLFLAGERADPDTIKWAENLLKVPVIDHWWQTETSWAISSNCTGIEMMKTKYGSACKAVPGYNVKIIKPDQSLANPNEMGDIVVKLPLPPGTFPTLWNADKRYKENYMTNYEGYYQTYDAGHIDEDGYIWIMSRTDDIINVAGHRLSTGAIEEVLSEHQSVAECAVLGIADKLKGQLPIGLVVLKSGVDKDNETISKECIQMVRDKIGPVAAFKVVIVIKRLPKTRSGKILRGTIRKIADNVEYKVPPTIDDPAILTEIKEDLINNNLLKN

SEQ ID NO: 162927 - protein, 105 aa, Unknown
  Bacterial polypetide isolated from the Sargasso Sea
SFRDIIEKFETDDETDLILMIGEIGGPQEVAAGEFAKENMKKPVVAYIAGLTAPKGRVMGHAGAIVSAYGESAIEKVEILKECGITISKNPSVMGDTVKSVLEKM

SEQ ID NO: 162928 - protein, 402 aa, Unknown
  Bacterial polypetide isolated from the Sargasso Sea
EKNEANYVPLTPLSHLRRASTVFSDRTAVIYGAYRKSYSEYYQRCSQLASALAKIGIQPGEVVATVLPNIPAQAEAHFGVPACGAVLNTINTRLDIGTISYIFEHGEARLVFADTQFLSVVEAAIEKLSGPRRPTLIEVPDDSAGFPATGKYETYESFLRTGNVDFDWIMPQDEWESLALNYTSGTTGKPKGVVYHHRGAYLMTMGTIVSWRMTLNPVFMAIVPLFHCNGWNHTWMMPVLGGSLVCCRDITSQAIYDAIADEGVQYFGGAPIVLNMIVNTKETERRDFDHTVEVFTAGAPPAPATLLKIENLGFNVTQVYGLTETYGHVTECYWETEKWSKLEGEQRASIKARQGIAFPMMEHITVMDQSMSDVPKDGKTQGEIMIRGNSVMKGYFKKQGSN

SEQ ID NO: 162929 - protein, 73 aa, Unknown
  Bacterial polypetide isolated from the Sargasso Sea
VLVNIFGGIVRCDLIAEGIVAAIKEVEVKIPVVVRLEGNNADIGSKILSKAKIKIESINDLAEAAKKAVLLAK

SEQ ID NO: 162930 - protein, 568 aa, Unknown
  Bacterial polypetide isolated from the Sargasso Sea
MNERHYPHWPPHVPKHLTLPETNIFYNAEVSAARYPNKPFIIFYDTPVTFAAFKDEAERIAGFLQQECHVKAGDRVLLYMQNSPQWIIAYYGILRANAVVVPVNPMNMSGELAHYVEDSGATTIITPQCLFANVAPLIGTGPGRGIEHAIVATYSDYVKGPSSIPVPELVAAPRKTFDMPGVTPWREVLEKHLAPGPLTTGPDDLCVMPYTSGTTGKPKGCMHTHRSVMSTLLGGCVWFSAPSDGVYLSVLPLFHVTGMQGGMNSAVFSGATIVILPRWDREAAALCMQKYRVSAWQSITAMMVDFLSNPKLDEYDLSSLTGARGGGAAMPEAIARKLKSLTGLDYVEGYGMSETIAGTHINPPHRPKPQCLGIPVFDVDSRVIDPVTLQELPQGETGEIIVNAPQVMQGYWRNPKATDEAFIQLDGKRFLRTGDLGHIDEDGYFFMTDRLKRMINASGYKVWPAEVEALMYRHPAIHEVCVIGVKDAKRGETVKALVVPAAAHAGAISEQEIVDWAHEQMASYKAPRIVEFVTSLPKSGSGKILWRKLQEEDAARTAAASQSEGGAS

SEQ ID NO: 162931 - protein, 126 aa, Unknown
  Bacterial polypetide isolated from the Sargasso Sea
TTDLGFGQSSCVGIGGDPIPGSSFIDMLKLFEEDDQTEAIVMVGEIGGNAEESAAEFIKNNITKPVISYIAGKTAPAGKRMGHAGAIIAGGKGTAEDKIKKLTECGVHVADNLVSIGSKVDEILKS

SEQ ID NO: 162932 - protein, 80 aa, Unknown
  Bacterial polypetide isolated from the Sargasso Sea
MSILVNKDTRVICQGFTGAQGTFHSEQSIKYGTKMVGGVTPGKGGQKHLGLPVFDTVKEARETTGAEASVIYVPAPFCKE

SEQ ID NO: 162933 - protein, 458 aa, Unknown
  Bacterial polypetide isolated from the Sargasso Sea
MKKINPEIDDVATILYTSGTTGKPKGVPLTHANFLHQIINLAYIADPEPGTSVLSVLPIWHSYERSAEYFFFSCGCSQYYTIPKFLKDDITQIKPVVMATVPRLWEAIHDGFFQALKKMPSKKQKLIKFLISNSSVFKRSLRKIRNIDINQITFKSKIPLLGSVISRYPLHKLSTIFLWPNILRQLCGEKLKFPINGGGALPEHVDLFFESLGVDVLVGYGLTETSPVLTCRRRELNVRGSSGQPLAFTEIKIVNDDKKKILKFREVGKILVRGPQVMKGYLNNEIATKDVLSKDGWFDTGDLGFLIPNGSLFITGRAKDTIVLSSGENIEPNPLETEILSSEFINQIQLVGQDKKCLTALIVPNVELVKNKFLEEDISKLNLDKNIGIFFKSQINNLLKSRLGARSEEQILDCYFVDAFTLENGLLTQTLKQKRKEIEKKYSLQIENMYEQKFSKKN

SEQ ID NO: 162934 - protein, 254 aa, Unknown
  Bacterial polypetide isolated from the Sargasso Sea
MNNFDTNLNKNSANFVPLSPLSFISRAKDIYPNYESLVYGNRSYTWLETYNRCSKFASALQKQGISKGDTVSIIAANTPEIFEAHYSIPMIGAVINTINTRLDAETIAYILEHSDAKLLITDTQFSPTMKKALNLYGKEIPIIDIHDEQAIFKEGEGERIGKWSYEEFLLTGDDNFNWSLPDDEWQAISLSYTSGTTGKPKGVVYHHRGSYLMSTGSVTAWNMPNKLTFLYTVPMFHCNGWGYPWTAALIHAKV

SEQ ID NO: 162935 - protein, 95 aa, Unknown
  Bacterial polypetide isolated from the Sargasso Sea
MSILVGKDTKVICQGFTGGQGTLHSEASIAYGTKMVGGVTPGKGGSEHLGLPVFDTVSEAVDKTGATASVIYVPAGFCKDSILEALDAGIELIVC

SEQ ID NO: 162936 - protein, 334 aa, Unknown
  Bacterial polypetide isolated from the Sargasso Sea
LFKGCTTILFEGKPVGTPDAGAFWKIISDYKVKSLFTAPTAFRAIKKEDPEGKFFSKYDLSSFESLFLAGERADPDTIKWAESLLKVPVIDHWWQTETSWAISSNCTGIEMMKTKYGSACKAVPGYDVKVIKPDNTLAKPNEMGDIVVKLPLPPGTFPTLWNADERYKKTYMTNYDGYYQTYDAGHIDEDGYIWIMSRTDDIINVAGHRLSTGAIEEVLSEHQSVAECAVIGIADKLKGQLPIGLIALKAGVKKDNETISKECIKMVRDKVGPVAAFKTAIVVKRLPKTRSGKILRGTVRKIADKEEYKMPATIDDPAILTEIKEDLIKNNILK

SEQ ID NO: 162937 - protein, 181 aa, Unknown
  Bacterial polypetide isolated from the Sargasso Sea
KLIALDAKITIDDDSLFRHKDLEELFDESQINKSELDAQKNDLAYIKLGGGEVGCMVNGAGLAMATMDITMKAGAMPANFLDVGGSASEERISQAYNIIASDEDVKLILVNLFGGILRCDVAAQGIIEGFKLNQKSVPMVVVLRGTNSEEAKEILKGSDMEIYFSDDLPSAAREINKRLGR

SEQ ID NO: 162938 - protein, 154 aa, Unknown
  Bacterial polypetide isolated from the Sargasso Sea
MINILNKESNNVLVQGLGRDGSFQSQKCIDFGTKIVSGVHPTKAGDNFNGIPIYGSVKEAVKKTSPDIGLIFVPAPFASDAIIEQVDSGIETIVCITEGIPINDMLKVNNYIEGKNVRLLGPNCPGFLIPRKKLKVGIIPGSIVSDGKVGVVSR

SEQ ID NO: 162939 - protein, 126 aa, Unknown
  Bacterial polypetide isolated from the Sargasso Sea
MSVLVNKNTKVICQGFTGSHGTFHSEQAIKYGTNLVGGVTPKKGGQKHLDRPVFNSVLEAKNEVGADATMIYVPAKFAAAAIIEAIDASVELIVCITEGIPIQDMLKVRQKLSGSKCRLIGPNVQE

SEQ ID NO: 162940 - protein, 296 aa, Unknown
  Bacterial polypetide isolated from the Sargasso Sea
CLGVQDWCIHSVVFGGFASTELASRIDDSKAKLLVTASCGFEPGRTVEYKPLVDEAIKIANHKIEKMILFQRSGHEVKLNAPLEISWDEVVSIAEPADCVEMNSNEFAYILYTSGTTGTPKGIVRDVGGHIVALKWTMKNIYNIDTNDIWWSASDIGWIVGHSYIVYAPLFKGCTTVLFEGKPVGTPDAGAFWKIISDYKVKSLFTAPTAFRAIKKEDPEGKFFSKYDLSSFESLFLAGERADPDTIKWAENLLKVPVIDHWWQTETSWAISSNCTGIEMMETKYGSACKAVPGYD

SEQ ID NO: 162941 - protein, 280 aa, Unknown
  Bacterial polypetide isolated from the Sargasso Sea
HSVVFGGFASNELASRIDDSKAKILITASCGFEPGRTVEYRPLVDGALKLAKHKVEKVILFQRNDYEVKLNSPLEISWEEALVNAKNKDCVEIGANEFAYILYTSGTTGIPKGIVRDVGGHIVALKWTMKNIYNIDENDVWWSASDIGWIVGHSYIVYAPLFKGCTTVLFEGKPVSTPDAGVFWRIISEYKIKSLFTAPTAFRAIKKEDPKGNFFSKYDLSSFQSLFLAGERADPDTIKWAENLLNVPVIDHWWQTETSWAISSNCVGIEMQKTKVWFSM

SEQ ID NO: 162942 - protein, 254 aa, Unknown
  Bacterial polypetide isolated from the Sargasso Sea
MSIIIHKNTKILVQGFTGKIGSFHAEEMIKYGSNVVGGVTPGKGGMTHLNLPVFNTVKEAVNKTGASTSILFVPPAFAADSAMEAADAGIKTCVAITDGIPSHDMVKIKRYMRRYPKDKKMGLVGPNCAGIISPGKSMLGIMPGHIYKEGKIGIVSRSGTLGYEAAQQLKDLEIGVSTSVGIGGDPINGSSFRDIIEKFENDDETIAVLMIGEIGGPQEVEAGQFAKENMSKPVIAYIAGLTAPKGRVMGHAGA

SEQ ID NO: 162943 - protein, 113 aa, Unknown
  Bacterial polypetide isolated from the Sargasso Sea
MSILIDKNTKVICQGFTGTHGTFHSEQALKYGTKLVGGVTPKKGGQKHLDLPVFNTVAEAKKITDANATMIYVPPKFAADAIIEAINAKIELIVCITEGIPVIDMLKVKKGTC

SEQ ID NO: 162944 - protein, 147 aa, Unknown
  Bacterial polypetide isolated from the Sargasso Sea
LPVKVGIISRSGTLTYEAVKQTTDLGFGQTSCIGIGGDPIPGTSFIDVLDLFEKDKSTEAIVMVGEIGGTAEEAAAEFIQSNVTKPVVSYIAGVTAPPGKRMGHAGAIIAGGKGTAEEKFKALELAGVYTVKSPAEIGKGVAEVTGW

SEQ ID NO: 162945 - protein, 119 aa, Unknown
  Bacterial polypetide isolated from the Sargasso Sea
STCIGIGGDPINGTNFIDCLDLFLKDEETKSILMIGEIGGSAEEEAAEFVKNHDIKKPMVGFIAGVTAPPGRRMGHAGAIISGGKGGAKDKIRKMEDCGIEVATSPSEIGKTLLNKLSN

SEQ ID NO: 162946 - protein, 123 aa, Unknown
  Bacterial polypetide isolated from the Sargasso Sea
MSVIINKETKVICQGFTGSQGTFHSEQAIKYGTNMVGGVTPNKGGTTHLNLPVFNSVSEAKDKTGADASVIYVPPAYAANAIIEAMESEIDLIVCITEGIPVMDMMKVKDKLSNSKSRLIGPN

SEQ ID NO: 162947 - protein, 150 aa, Unknown
  Bacterial polypetide isolated from the Sargasso Sea
HIYKEGRVGIISRSGTLGYEAAQQLKDLNIGISTSVGIGGDPINGSSFKDIIGKFEEDDETDAILMIGEIGGPQEVAAGQFAKDNMKKPVIAYIAGLTAPKGRVMGHAGAIVSAYGESAVEKVEILREFGVTISKNPSVMGDTVKEVLTK

SEQ ID NO: 162948 - protein, 204 aa, Unknown
  Bacterial polypetide isolated from the Sargasso Sea
MTVLIDKNSKIIIQGFTGKMGSFHADEMIKYGSNVVGGVTPGKGGSKHLNLPVFNTVKDAVSETGADASILFVPPAFAADSAMEAADAGIKTCVAIVDGIPSHDMIRIKRYMRRYTKSSKMTLVGPNCAGIISPGKSMLGIMPGHIYKEGRIGIISRSGTLGYEAAQQLKNLNIGVSTSVGIGGDPINGSSFRDIIEKFETDDE

SEQ ID NO: 162949 - protein, 121 aa, Unknown
  Bacterial polypetide isolated from the Sargasso Sea
FGQSSCVGIGGDPVPGSSFIDMLGLFESDPATEAIVMVGEIGGTAEEAAAEFIQSEVSKPVVSYIAGVTAPSGKRMGHAGAIIAGGKGTAEEKFKALEAAGVHTVRSPAEIGSGVGEITGW

SEQ ID NO: 162950 - protein, 255 aa, Unknown
  Bacterial polypetide isolated from the Sargasso Sea
MSILIDRNTPVIVQGITGKMARFHTEDMVKYGTNVVGGVVPGKGGMEVEGLPVFDTVADAVENTGAEASLVFVPPPFAADSIMEAADAGIKYSVCITDGIPAQDMIRVKRYMYRYPLERRMVLTGPNCAGTISPGKALLGIMPGHIYLQGNIGIVSRSGTLGYEAAAQLKAHGIGVSTSVGIGGDPINGSSFKDILQRFKDDDETDVICMIGEIGGPQEAEAAAYLKEHIKKPVVAYVAGMTAPKGRTMGHAGAI

SEQ ID NO: 162951 - protein, 136 aa, Unknown
  Bacterial polypetide isolated from the Sargasso Sea
MSIIINKNTKVICQGFTGSQGTYHSQQAIDYGTQMVGGVTPGKGGSTHLGLPVFNSVKEAKDHTQADATVIFVPAKFATQAIHEALDANIKIITCITEGIPVLDMVEIKKRILEQKTYFIGPNCPGLVTPGECKIK

SEQ ID NO: 162952 - protein, 308 aa, Unknown
  Bacterial polypetide isolated from the Sargasso Sea
VITMLACGRIGAVHSVLFGGFAANELASRIDDSKAKLLVTASCGYEPGRTVHYKPLVNKALELAKHKPSKCIIFQREKDKAELNSKIDITWDDAHKDAKPAECEKMNANDYAYILYTSGTTGLPKGIVRDIGGHIVALKWTMKNIYNIDQDDVWWSASDIGWIVGHSYIVYAPLFYGCTTVLFEGKPVGTPDAGVFWRVISEHKVKSLFTAPTAIRAIKKEDPNGEFFKKYDLSKFDKLFLAGERADPDTIKWFEKLSNSPVIDHWWQTETSWAITSDCTGIESFPVKYGSAFKPVPGYDLKVLSSEG

SEQ ID NO: 162953 - protein, 161 aa, Unknown
  Bacterial polypetide isolated from the Sargasso Sea
GKSMLGIMPGHIYKEGRVGIISRSGTLGYEAAQQMKNLNIGISTSVGIGGDPINGSSFRDIIEKFETDDETDAILMIGEIGGPQEVAAGEFAKGNMKKPVIGYIAGLTAPKGRVMGHAGAIVSAYGESAIEKVEILKECGVTISKNPSVMGDTVKSVLEKI

SEQ ID NO: 162954 - protein, 125 aa, Unknown
  Bacterial polypetide isolated from the Sargasso Sea
MSIIIDKNTKVICQGFTGSQGTYHSQQAIDYGTKMVGGVTPGKGGTTHLDLPVFDTVKEAKEHTQADATVIYVPAKFATKAIHEALDADIKIITCITEGIPVLDMVEIKKRIIEQKTYFIGPNCP

SEQ ID NO: 162955 - protein, 312 aa, Unknown
  Bacterial polypetide isolated from the Sargasso Sea
ELASRIDDSKAKLLVTASCGYEPGRTVHYKPLVNKALELANHKPDKCIIFQREKDKAELDSKIDITWEDAHKNAKPAKCEKMNANDYAYILYTSGTTGLPKGIVRDIGGHIVALKWTMKNIYNINQDDVWWSASDIGWIVGHSYIVYAPLFYGCTTVLFEGKPVGTPDAGVFWRVISEHKVKSLFTAPTAIRAIKKEDPNGEFFKKYDLSKFDKLFLAGERADPDTIKWFEKLSNSPVIDHWWQTETSWAITSDCTGIESFPVKYGSAFKPVPGYDLKVLNSEGKEVGPGKMGDIVVKLPLPPGTFPTLWGC

SEQ ID NO: 162956 - protein, 120 aa, Unknown
  Bacterial polypetide isolated from the Sargasso Sea
QSTCIGIGGDPINGTNFIDCLDLFLDDDETESILMIGEIGGSAEEEAAEFIKNHKIKKPTVGFIAGVTAPPGRRMGHAGAIISGGKGGAEDKIKKMEDCGITMANSPSKIGKTLLNKLSN

SEQ ID NO: 162957 - protein, 216 aa, Unknown
  Bacterial polypetide isolated from the Sargasso Sea
MSIIIHKNTKILVQGFTGKIGTFHTEEMIKYGSNIVGGVTPGKGGMSHLNLPVFNTVKEAVEQTGASTSILFVPPAFAADSAMEAADAGIKTCVAITDGIPSHDMVKIKRYMRRYSKDKKMGLVGPNCAGIISPGKSMLGIMPGHIYKEGKIGIVSRSGTLGYEAAQQLKDLGIGVSTSVGIGGDPINGSSFKDIIEKFESDDETIAVLMIGEIGG

SEQ ID NO: 162958 - protein, 233 aa, Unknown
  Bacterial polypetide isolated from the Sargasso Sea
NETGADASILFVPPAFAADSAMEAADAGIKICVAIVDGIPSHDMIRIKRYMRRYTKSSKMTLVGPNCAGIISPGKSMLGIMPGHIYKEGRIGIISRSGTLGYEAAQQLKNLNIGVSTSVGIGGDPINGSSFRDIIEKFETDDETDAILMIGEIGGPQEVAAGEFAKENMKKPVIAYIAGLTAPKGRVMGHAGAIVSAYGESAIEKVEILEECGITISKNPSVMGDTVKSVLEK

SEQ ID NO: 162959 - protein, 279 aa, Unknown
  Bacterial polypetide isolated from the Sargasso Sea
ASCGYEPGRTVHYKPLVNKALELASHKPDKCIIFQREKDKAELNPSMDITWEESLKDVKPADCEKMNANDYAYILYTSGTTGLPKGIVRDIGGHIVALKWTMKNIYNIEQDDVWWSASDIGWIVGHSYIVYAPLFYGCTTILFEGKPVGTPDAGVFWRVISEHKVKSLFTAPTAIRAIKKEDPNGEFFKKYDLSKFEKLFLAGERADPDTIKWFEKLSNSPVIDHWWQTETSWAITSDCTGIESFPVKYGSAFKPVPGYDLKVLNSEGKEVGPGKMGDI

SEQ ID NO: 162960 - protein, 205 aa, Unknown
  Bacterial polypetide isolated from the Sargasso Sea
KTCVAIVDGIPSHDMIRIKRYMRRYTKSSKMTLVGPNCAGIISPGKSMLGIMPGHIYKEGRIGIISRSGTLGYEAAQQLKNLNIGVSTSVGIGGDPINGSSFRDIIEKFETDDETDAILMIGEIGGPQEVAAGEFAKENMKKPVIAYIAGLTAPKGRVMGHAGAIVSAYGESAIEKVEILKECGITISKNPSVMGDTVKSVLEKM

SEQ ID NO: 162961 - protein, 275 aa, Unknown
  Bacterial polypetide isolated from the Sargasso Sea
ANGNYEKKPVIVQGITGKYGSTHAKLMLEYGTNIVAGVTPGKGGQKFEDKIPVYNTVKEAVDATGAEISIVFVPAKFFLDAAKDALNSGIKLLVAIPEHVPIRDAMEVIELAKQKDAIMIGPNTPGVIVPGLIKVGIMPASPFSAGKVAVLSKSGTLLYEISNNLTSAGFGQNITIGIGGDPVNGTRMIDAFDMVKDDPELEAMVVVGEIGGDSEEILAQHIIDIGFKKPIVGYIAGRQAPKEKRMGHAGAIVMGTYGSAESKISMFAKANIPVA

SEQ ID NO: 162962 - protein, 245 aa, Unknown
  Bacterial polypetide isolated from the Sargasso Sea
MTVLINKNSKIIIQGFTGKMGSFHADEMIKYGSNVVGGVTPGKGGSKHLNLPVFNTVKDAVNETGADASILFVPPAFAADSAMEAADAGIKTCVAIVDGIPSHDMIRIKRYMRRYTKSSKMTLVGPNCAGIISPGKSMLGIMPGHIYKEGRIGIISRSGTLGYEAAQQLKNLNIGVSTSVGIGGDPINGSSFRDIIEKFETDEETDAILMIGEIGGPQEVAAGEFAKENMKKPVIAYIAGLQLQR

SEQ ID NO: 162963 - protein, 131 aa, Unknown
  Bacterial polypetide isolated from the Sargasso Sea
QTTEVGLGQSTCVGIGGDPIHGMDFVDCIKLFLEDDETEGILMIGEIGGEEEENAAEFISNSKRKKPVSAFIAGQSAPKGKRMGHAGAIVSGSKGTAHSKIKSLENAGVLVSKSPASLGKTMKLAMQNGNN

SEQ ID NO: 162964 - protein, 140 aa, Unknown
  Bacterial polypetide isolated from the Sargasso Sea
MSVLINKNTKVICQGFTGSHGTFHSEQSIKYGTNLVGGVTPKKGGQIHLERPVFNTVKEAKNQTGANATMIYVPAKFASSAIIEAIEASLELIVCISEGIPILDMLKVKKKLLNSNSRLIGPNCPGIITPDECKIGIMPG

SEQ ID NO: 162965 - protein, 307 aa, Unknown
  Bacterial polypetide isolated from the Sargasso Sea
ASRIDDSKAKLLVTASCGYEPGRTVHYKPLVNKALDLANHKLNKCIIFQREKDKAELDSKIDITWEDAHKNVKPTECEKMNANDYAYILYTSGTTGLPKGIVRDIGGHIVALKWTMKNIYNINQDDVWWSASDIGWIVGHSYIVYAPLFYGCTTVLFEGKPVGTPDAGVFWRIISEHKVKSLFTAPTAIRAIKKEDPNGEFFKKYDLSKFDKLFLAGERADPDTIKWFEKLSNSPVIDHWWQTETSWAITSDCTGIESFPVKYGSAFKPVPGYDLKVLNSDGKEVGPGKMGDIVVKLPLPPGTFPTL

SEQ ID NO: 162966 - protein, 313 aa, Unknown
  Bacterial polypetide isolated from the Sargasso Sea
LWSASDIGWIVGHSYIVYAPLFKGCTTVLFEGKPVGTPDAGAFWKIISDYKVKSLFTAPTAFRAIKKEDPDGKYFSKYDLSSFESLFLAGERADPDTIKWAENLLKVPVIDHWWQTETSWAISSNCTGIEMMKTKYGSACKAVPGYDVKIIKSDHTLAKPNEMGDIVVKLPLPPGTFPTLWNADQRYKENYMTNYNGYYQTYDAGHIDEDGYIWIMSRTDDIINVAGHRLSTGAIEEVLSEHKSVAECAVLGIADKLKGQLPIGLVVLKAGVNKDHEEISKECIKMVREKIGPVAAFKIAIVIKRLPKTRSGK

SEQ ID NO: 162967 - protein, 289 aa, Unknown
  Bacterial polypetide isolated from the Sargasso Sea
SVVFGGFASNELASRIDDSKAKLLVTASCGFEPGRTVEYKPLVDEAIKIAKHKIEKMILFQRPGHEVKLNAPNELSWEEVVSNAKNADCVEMNSNEFAYILYTSGTTGTPKGIVRDIGGHIVALKWTMKNIYNIDTDDIWWSASDIGWIVGHSYIVYAPLFKGCTTVLFEGKPVGTPDAGAFWKIISDYKVKSLFTAPTAFRAIKKEDPEGKFFSKYDLSSFESLFLAGERADPDTIKWAENLLKVPVIDHWWQTETSWAISSNCTGIEMMETKYGSACKAVPGYDVKI

SEQ ID NO: 162968 - protein, 213 aa, Unknown
  Bacterial polypetide isolated from the Sargasso Sea
AMEAADAGIKTCVAITDGIPSHDMIKIKRYMRRYLRSQKMTLVGPNCAGVISPGKSMLGIMPGHIYKEGRVGIIGRSGTLGYEAAQQLKNLNIGVSTSVGIGGDPINGSSFRDILEKFEEDDETDAVLMIGEIGGPQEVNAGKFAKENMKKPVIAYIAGLTAPKGRVMGHAGAIVSAYGESATEKVEILKDYGVSISKNPSVMGETVKKALEK

SEQ ID NO: 162969 - protein, 192 aa, Unknown
  Bacterial polypetide isolated from the Sargasso Sea
DMIRIKRYMRRYSKNEKMTLVGPNCAGIISPGKSMLGIMPGHIYKEGRVGIISRSGTLGYEAAQQMKNLNIGISTSVGIGGDPINGSSFRDIIEKFETDDETDAVLMIGEIGGPQEVAAGEFAKENMKKPVIGYIAGLTAPKGRVMGHAGAIVSAYGESAIEKVEILKECGVTISKNPSVMGNTVKSVLEQI

SEQ ID NO: 162970 - protein, 206 aa, Unknown
  Bacterial polypetide isolated from the Sargasso Sea
IKSCVAIVDGIPSHDMIRIKRYMRRYSKSEKMSLVGPNCAGIISPGKSMLGIMPGHIYKEGRVGIISRSGTLGYEAAQQLKNLNIGVSTSVGIGGDPINGSSFKDIIGKFEEDDETDAVLMIGEIGGPQEVAAGKFAKENMKKPVIAYIAGLTAPKGRVMGHAGAIVSAYGESAVEKVEILKEYGITISKNPSVMGDTVKGVLSKS

SEQ ID NO: 162971 - protein, 122 aa, Unknown
  Bacterial polypetide isolated from the Sargasso Sea
GQTTALGIGGDPIIGTDMIAALELFENDPETDGIVMIGEIGGQMENEAAQWAKDNVTKPIVGFIAGQTAPPGRRMGHAGAIVSGGDETAEAKNKILAECGISVARSVAEIGNKMKTSLTLKA

SEQ ID NO: 162972 - protein, 105 aa, Unknown
  Bacterial polypetide isolated from the Sargasso Sea
EPANFLDVGGGASKEKVSAAFKLILSDKNVKAILINIFGGIMRCDVLAQGVVDAAKESKLNIPLVVRLAGTNFTEGKAILDKSGLKILSASDLNDAAKKTVEAIK

SEQ ID NO: 162973 - protein, 125 aa, Unknown
  Bacterial polypetide isolated from the Sargasso Sea
CISEGIPVRDMKKVKSALDNSSSTLIGPNCPGLITAEESKIGITPGFICKKGSIGILSRSGTLTYEAIDQIVNVGLGMTTAVGIGGDPIIGSSMIDILKHFANDDETKGVVMIGEIGGSMENEAA

SEQ ID NO: 162974 - protein, 121 aa, Unknown
  Bacterial polypetide isolated from the Sargasso Sea
MSILVNKDTKLIVQGFTGSQGTLHSEQSIEYGTNIVGGVTPGKGGMEHLGKPVFNSVNEAVEELVPNASIIFVPAKFCKESIIESAEAGIKLIVCITEGIPTLDMLEVKKRIDDLGVRLMT

SEQ ID NO: 162975 - protein, 243 aa, Unknown
  Bacterial polypetide isolated from the Sargasso Sea
MSIIIHKNTKILVQGFTGKIGSFHAEEMIKYGSNVVGGITPGKGGITHLNLPVFNTVREAVDQTGASTSILFVPPAFAADSVMEAADAGIKTCVSITDGIPSHDMVKIKRFMRRYPKDKKMGLVGPNCAGIISPGKSMLGIMPGHIYKEGKIGIVSRSGTLGYEAAQQLKDLEIGVSTSVGIGGDPINGSSFRDIIEKFEYDDETIAVLMIGEIGGSQEVEAGQFAKENMSKPVIAYIAGLTA

SEQ ID NO: 162976 - protein, 197 aa, Unknown
  Bacterial polypetide isolated from the Sargasso Sea
MAVIIDKNTKIIIQGFTGKMGTFHADEMIKYGSNVVGGVTPGKGGTKHLNLPVFNTVKEAVESTNATASILFVPPAFAADSAMEAADAGIRTCVAIVDGIPSHDMIKIKRYMRRYSKSEKMSLVGPNCAGIISPGKSMLGIMPGHIYKEGRVGIISRSGTLGYEAAQQLKDLNIGISTSVGIGGDPINGSSFKDIIG

SEQ ID NO: 162977 - protein, 218 aa, Unknown
  Bacterial polypetide isolated from the Sargasso Sea
FVPAKFAKSAIIEAAESGINLIICITEGVPVLDMVDVVNVLKSHPEVRLIGPNCPGVISPGKAKLGIMPASIHLEGTVGIVSRSGTLTYEAVKQTTDADLGQSTCIGIGGDPVNGTSFIDALEMFENDSQTESIVMVGEIGGSAEEEAAEYIRDNIKKPVVSYIAGVTAPKGKRMGHAGAIISGGKGTAQDKFKALESAGVGVVTDLNLIGSRLKESL

SEQ ID NO: 162978 - protein, 120 aa, Unknown
  Bacterial polypetide isolated from the Sargasso Sea
QSTCIGIGGDPINGTNFIDCLKLFLQDDETKSIVMIGEIGGSAEEEAAEFLKREKIKKPTVGFIAGLTAPPGRRMGHAGAIISGGKGGAEEKIEIMKSADITISKSPADIGKTLFDKLNS

SEQ ID NO: 162979 - protein, 286 aa, Unknown
  Bacterial polypetide isolated from the Sargasso Sea
TPDAGVFWRIISEHKVKSLFTAPTAIRAIKKEDPNGEFFKKYDLSKFDKLFLAGERADPDTIKWFEKLSNSAVIDHWWQTETSWAITSDCTGIETFPVKYGSAFKPVPGYDLKVLNSEGKEVGAGKMGDIVVKLPLPPGTFPTLWGADKRYKENYMTTYPGYYQTYDAGHIDEDGYVWIMSRTDDIINVAGHRLSTGAIEEVLAEHPNVAECAVIGIADKLKGQLPIGLLALKAGVTKEKKEIIDECVKMVREKVGPVAAFKIAIVVKRLPKTRSGKVLRGTVRKI

SEQ ID NO: 162980 - protein, 163 aa, Unknown
  Bacterial polypetide isolated from the Sargasso Sea
ITPGECKMGIMPGYIHLPGKVGVISRSGTLTYEAVKQTTDLGFGQTSCVGIGGDPVPGSSFIDILDLFQNDHKTEAIVMVGEIGGTAEEAAAEFIQSNVTKPVVSYIAGVTAPAGKRMGHAGAIIAGGKGTAEDKFKALEKAGVHTVKSPADIGKGVAEITGW

SEQ ID NO: 162981 - protein, 147 aa, Unknown
  Bacterial polypetide isolated from the Sargasso Sea
QKGSIGILSRSGTLTYEAIDQIVNVGLGMTTAVGIGGDPIIGSSMIDILKHFVDDEETKGVVMIGEIGGSMENEAAEWIKSNFNKPVVSFIAGQTAPKGKRMGHAGAIISEGSETADAKIKILKKCGVSVAKTVSEIGETMLKLIEE

SEQ ID NO: 162982 - protein, 218 aa, Unknown
  Bacterial polypetide isolated from the Sargasso Sea
EKTGAEASLVFVPPPFAADSIMEAADAGIKYCVCITDGIPAQDMIQVKRYMYRYPKEKRMVLTGPNCAGTISPGKALLGIMPGHIYLQGNVGIVGRSGTLGYEAAAQLKAHGIGVSTSVGIGGDPINGSSFKDILQRFEEDDDTHLICMIGEIGGPQEAEAAAYIKDHVKKPVVAYVAGLTAPKGRTMGHAGAIISAFGESASEKVEILSAAGVTVAP

SEQ ID NO: 162983 - protein, 99 aa, Unknown
  Bacterial polypetide isolated from the Sargasso Sea
MAVLIDEKTKVICQGFTGSQGTFHSEQAIAYGTKMVGGVTPGKGGGDHLGLPVFNSVHEAKHITNADASVIYVPPPFAADSILEAIDARMGLIVCITEG

SEQ ID NO: 162984 - protein, 139 aa, Unknown
  Bacterial polypetide isolated from the Sargasso Sea
SGTWTYEAVPQTTAVGLGQTTCIGIGGDPVNGTNFIECLELFMADSETEGVVMIGEIGGSAEEAAAEYLQSLGAKRKPVVGFIAGTTAPPGRRMGHAGAIVAGGSGGAQAKIDALKGAGVHVVGSPAEIGVAMQAAVKK

SEQ ID NO: 162985 - protein, 191 aa, Unknown
  Bacterial polypetide isolated from the Sargasso Sea
CGSSAILRRYKSDKRMQLIGPNCAGVISPGKALLGIMPGHIYQEGEVGIIGRSGTLGYEAASQLKAEGIGVSTSVGIGGDPINGSSFKDHLAAFETDPQTRVVVMIGEIGGPQEAEAAQFARDHMNKPVVGYIAGLTAPKGRTMGHAGAIVSAAGESAEEKVEILRQCGVTVVERPSEFGSTVREVLATIS

SEQ ID NO: 162986 - protein, 311 aa, Unknown
  Bacterial polypetide isolated from the Sargasso Sea
VGHSYIVYAPLFKGCTTVLFEGKPVGTPDAGVFWKIISEYKVKSLFTAPTAFRAIKKEDPEGKFFSKYDLSSFKNLFLAGERADPDTIKWAEKLLKVPVIDHWWQTETSWAISANCTGIEMMKTKYGSACKAVPGYDIKIIKPDQTLAKPNEMGDIVVKLPLPPGTFPTLWNADKRYEETYMSNYKGYYQTYDAGHIDEDGYISIMSRTDDIINVAGHRLSTGAIEEVLSEHQSVAECAVIGISDKLKGQLPIGLITLKAGVNKENEIITKECVQMVRDKVGPVAAFKVAIVVKRLPKTRSGKILKGNSKK

SEQ ID NO: 162987 - protein, 157 aa, Unknown
  Bacterial polypetide isolated from the Sargasso Sea
KIGIMPGFIHHKGSVGIISRSGTLTYEAVHQTSICGLGQSTCIGIGGDPIKGLNFIECLSLFEEDPETEGIVMVGEIGGSDEEKAAEFIKENISKPVVAYVAGISAPPGKRMGHAGAIVTGNEGTALSKYEALNDAGVSTTDSPALIGKIMKDLLNR

SEQ ID NO: 162988 - protein, 314 aa, Unknown
  Bacterial polypetide isolated from the Sargasso Sea
IVRDIGGHIVALKWTMKNIYNINQDDVWWSASDIGWIVGHSYIVYAPLFYGCTTILFEGKPVGTPDAGVFWRVISDYKVKSLFTAPTAIRAIKKEDPDGKFFKKYDISNFDTLFLAGERADPDTIKWFQKLSNAPVIDHWWQTETSWAISSNCAGIEKFPIKYGSAFKPVPGYDLRVLNNEGKENKPGQMGDIVVKLPLPPGTFPTLWNADERYKKVYMSTYNGYYQTYDAGHIDEDGYVWIMSRTDDIINVAGHRLSTGAIEEVLAEHKNVAECAVVGIADKLKGQLPIGLIALKAGVKRDNKEITKECVGLG

SEQ ID NO: 162989 - protein, 175 aa, Unknown
  Bacterial polypetide isolated from the Sargasso Sea
MTLIGPNCAGVISPGKAMLGIMPGHIYKEGNIGIIGRSGTLGYEAAQQLKNLNIGISTSVGIGGDPINGSSFRDIIEKFEEDKETEAILMIGEIGGPQEVAAGKFAKENMKKPVIAYIAGLTAPKGRVMGHAGAIVSAYGESAIEKVEILKQYGISISKNPSVMGETVKAALENK

SEQ ID NO: 162990 - protein, 298 aa, Unknown
  Bacterial polypetide isolated from the Sargasso Sea
AIHSVVFGGFASNELASRIDDSKAKILVTASCGFEPGRTVEYKPLVDEAVKLASHKISKMILFQRKGHEAKLNEPNEISWDEALADAKDTECVEMNSNEFAYILYTSGTTGTPKGIVRDIGGHIVALKWTMKNIYNIDERDIWWSASDIGWIVGHSYIVYAPLFKGCTTVLFEGKPVGTPDAGAFWKIISDYKVKSLFTAPTAFRAIKKEDPDGKFFSKYDLSSFESLFLAGERADPDTIKWAENLLKVPVIDHWWQTETSWAISSNCTGIEMMKTKYGSACKAVPGYDVKIIKSDQT

SEQ ID NO: 162991 - protein, 118 aa, Unknown
  Bacterial polypetide isolated from the Sargasso Sea
MSVLVNKNTKVICQGFTGKHGTFHSEQAIRYGTNLVGGVTPKKGGQKHLNLPVFNSVEEAKNKTGANATMIYVPPAFAGEAIIEAIEAKIELIVCITEGIPVLDMLKVKKELKRSSLR

SEQ ID NO: 162992 - protein, 105 aa, Unknown
  Bacterial polypetide isolated from the Sargasso Sea
MSVLINKNTKLICQGFTGAHGTFHSEQSIKYGTNLVGGVTPGKGGQTHLNKPVFNSVKEAKDKTNANATMIYVPAKFAAAAIIEAIEAKIELIVCITEGIPILDI

SEQ ID NO: 162993 - protein, 160 aa, Unknown
  Bacterial polypetide isolated from the Sargasso Sea
VNECKLGIMPGFICEKGNIGVVSKSGTLTYEAIDQLVNSGLGQTTAIGIGGDPIIGTTMKDCLELFENDSETEGVVIIGEIGGQMEIEAAHWAKKNMSKPIAGFIAGQTAPPGKRMGHAGAIVSGGNDTAKAKMEVLVDCGISVSESVADIGSLMKTLMN

SEQ ID NO: 162994 - protein, 301 aa, Unknown
  Bacterial polypetide isolated from the Sargasso Sea
YQSAQILAAGGVTVPRGIAATTVEECVKAAEQLKGDEVVIKSQILAGGRGLGTFTNGFQGGVHVIPKSQTEEFAKKMIGQTLVTKQSGPEGKPVNTVLMAEKMDLVNEMYFAILLDRAFGGPVVIACAEGGTSIEDLAEKYPEKIKKVPIDIVAGMTDQQASEIVDALEISGSKPAAIEQVKALYGVFRDSDCTMVEVNPLAEDSNGTLIAADAKLGFDDNTAFRQKDIFAQRDHSQEDPRDVAAEKWDLNYIGLDGSIGCMVNGAGLAMATMDIIQMHGGSPANFLDVGGSAKKEQIVEA

SEQ ID NO: 162995 - protein, 178 aa, Unknown
  Bacterial polypetide isolated from the Sargasso Sea
MAILIDENTRVVVQGLTGREGQFHALRNRDYGTNIVAGTRPGKGGENIESIPIFNTVEEAVKEEGANVAMTFVPPAFAKEAVLEAAFAGCELIVCITEGIPAKDEAEMYDIIKKETNSKLLGPNCPGLISPGKSNVGIMPHEITKQGNVGVVSRSGTLTYQAVHELTQLEIGQSTCIG

SEQ ID NO: 162996 - protein, 232 aa, Unknown
  Bacterial polypetide isolated from the Sargasso Sea
MGATASILFVPPAFAADSAMEAADAGIKSCVAIVDGIPSHDMIRIKRYMRRYTKSEKMSLVGPNCAGIISPGKSMLGIMPGHIYKEGRVGIISRSGTLGYEAAQQLKNLNIGVSTSVGIGGDPINGSSFKDIIGKFEEDDETDAILMIGEIGGPQEVAAGKFVKENMKKPVIAYVAGLTAPKGRVMGHAGAIVSAYGESAVEKVEILKEYGITISKNPSVMGDTVKNVISKS

SEQ ID NO: 162997 - protein, 209 aa, Unknown
  Bacterial polypetide isolated from the Sargasso Sea
AGIRFCVAITDGIPSQDMIRVKRYMRRYKAEEKMVLTGPNCAGTISPGKSMMGIMPGHIYMPGNVGVIGRSGTLGYEAASQMKEIGIGISTSVGIGGDPINGSSFKDHLEMFEKDDETKAVVIIGEIGGPQEVEAAMWAKENMSKPVVGYIAGLTAPKGRRMGHAGAIISAVGESAAEKVEILEECGVSVVPNPSSFAPIIKDVLDKAS

SEQ ID NO: 162998 - protein, 108 aa, Unknown
  Bacterial polypetide isolated from the Sargasso Sea
MDGEPANFLDVGGAANVDTIKNGFKIILSDPNVKSVLINIFGGIVRCDRVANGVIQAVKELNLNVGVVVRLQGTNAKLAKQILDESDIELISAETIDEAAKKAVGLVS

SEQ ID NO: 162999 - protein, 128 aa, Unknown
  Bacterial polypetide isolated from the Sargasso Sea
MSVLVNKDTKVICQGFTGAHGTFHSEQSIKYGTNLVGGVTPKKGGQVHLERPVFNTVQEAKTETGANATMIYVPAKFAAAAIIEAIDASMELIVCITEGIPILDMLKVKKKLFKSNSRLIGPNCPGII

SEQ ID NO: 163000 - protein, 122 aa, Unknown
  Bacterial polypetide isolated from the Sargasso Sea
MSILINKNTKVICQGFTGSHGTFHSEQAIKYGTNLVGGVTPKKGGQKHLDKPVFNTVKEAIEETRATATMIYVPAKFASNAIIEAIEASMELIVCITEGIPVLDMLKVKKKLSVSKSRLIGP

SEQ ID NO: 163001 - protein, 255 aa, Unknown
  Bacterial polypetide isolated from the Sargasso Sea
MIPEAVVAMLACGRIGAIHSVVFGGFASNELASRIDDSKAKILITASCGFEPGRTVEYRPLVDGALKLANHQVQKVILFQRKDHKVKLNKPLEISWDEALSGADDKDCVEMGANDYAYILYTSGTTGIPKGIVRDIGGHIVALKWTMKNIYNIDQDDVWWSASDIGWIVGHSYIVYAPLFKGCATLLFEGKPVGTPDAGVFWRIISEYKIKSLFTAPTAFRAIKKEDPEGKFFSKYDLSSFESLFLAGERADPDT

SEQ ID NO: 163002 - protein, 204 aa, Unknown
  Bacterial polypetide isolated from the Sargasso Sea
NLCRIVDGIPSHDMIRIKRYMRRYSRVQKMTLIGPNCAGVISPGKAMLGIMPGHIYKEGKVGIIGRSGTLGYEAAQQMKNLGIGVSTSVGIGGDPINGSSFKDILEKFEEDKETDAVLMIGEIGGPQEVAAGKFAKENMKKPVIAYIAGLTAPKGRVMGHAGAIVSAYGESAVEKVELLQECGVTISKNPSVMGETVKSVLGKK

SEQ ID NO: 163003 - protein, 131 aa, Unknown
  Bacterial polypetide isolated from the Sargasso Sea
QLKDLEIGVSTSVGIGGDPINGSSFRDIIEKFENDDETIAVLMIGEIGGPQEVEAGQFAKENMSKPVIAYIAGLTAPKGRVMGHAGAIVSAYGESAIEKVELLKECGVTISKNPSVMGETVKKVLVENNLD

SEQ ID NO: 163004 - protein, 83 aa, Unknown
  Bacterial polypetide isolated from the Sargasso Sea
MSVLVDKNTKVICQGFTGSQGTFHSEQAIAYGTQIVGGVTPGKGGSIHLDLPVFDTVADAVKGTDANASVIYVPPPFAADAIL

SEQ ID NO: 163005 - protein, 137 aa, Unknown
  Bacterial polypetide isolated from the Sargasso Sea
SRSGTLTYEAFKQTTDAGLGQSTCIGIGGDPVNGTSFIDALEMFENDSQTESIVMVGEIGGSAEEEAAEYIRDNIKKPVVSYIAGVTAPKGKRMGHAGAIISGGKGTAQDKFKALESVGVGVVTDLNLIGSRLKESL

SEQ ID NO: 163006 - protein, 274 aa, Unknown
  Bacterial polypetide isolated from the Sargasso Sea
DIWWSASDIGWIVGHSYIVYAPLFYGCTTILFEGKPVGTPDAGVFWRIISEHKVKSLFTAPTAIRAIKKEDPNGDFFKKYDLSKFEKLFLAGERADPDTIKWFEKLSGSPVIDHWWQTETSWAITSDCTGIESFPVKYGSAFKPVPGYDLKVLNSEGKEVDPGKMGDIVVKLPLPPGTFPTLWGADKRYKENYMSTYPGYYLTYDAGHIDEDGYVWIMSRTDDIINVAGHRLSTGAIEEVLAEHKDVAECAVLGIADKLKGQLPIGLLALKAGV

SEQ ID NO: 163007 - protein, 295 aa, Unknown
  Bacterial polypetide isolated from the Sargasso Sea
VALKWTMKNIYNIKPEDVWWSASDIGWIVGHSYIVYGPLFYGCTTVLFEGKPVGTPDAGVFWRIISEHKVKSLFTAPTAIRAIKKEDPNGEFFKKYDLSKFDKLFLAGERADPDTIKWFEKLSSSPVIDHWWQTETSWAITSSCTGIENFPVKYGSAFKPVPGYDLKVLNSEGKEVGPGKMGDIVVKLPLPPGTFPTLWGADKRYKENYMTTYPGYYQTYDAGHIDEDGYVWIMSRTDDIINVAGHRLSTGAIEEVLAEHTNVAECAVIGIADKLKGQIPIGLLALKAGVTKDKK

SEQ ID NO: 163008 - protein, 54 aa, Unknown
  Bacterial polypetide isolated from the Sargasso Sea
MSIIVNKTTKVICQGFTGSQGTFHSQQAIIYGTNMVGGVTPGKGGTKHLDLPVY

SEQ ID NO: 163009 - protein, 248 aa, Unknown
  Bacterial polypetide isolated from the Sargasso Sea
KHLNLPVFNTVKEAVENTGASASILFVPPAFAADSAMEAADAGIRTCVAIVDGIPSHDMIRIKRYMRRYSKSEKMSLVGPNCAGIISPGKSMLGIMPGHIYKEGRVGIISRSGTLGYEAAQQLKDLNIGISTSVGIGGDPINGSSFKDIIGKFEEDDETDAILMIGEIGGPQEVAAGQFAKDNMKKPVIAYIAGLTAPKGRVMGHAGAIVSAYGESAVEKVEILREFGVTISKNPSVMGETVKEVLSK

SEQ ID NO: 163010 - protein, 227 aa, Unknown
  Bacterial polypetide isolated from the Sargasso Sea
SILFVPPAFAADSAMEAADAGIKICVAIVDGIPSHDMIRIKRYMRRYTKSSKMTLVGPNCAGIISPGKSMLGIMPGHIYKEGRVGIISRSGTLGYEAAQQLKNLNIGVSTSVGIGGDPINGSSFRDIIEKFETDDETDAILMIGEIGGPQEVAAGEFAKENMKKPVIAYIAGLTAPKGRVMGHAGAIVSAYGESAIEKVEILKECGITISKNPSVMGDTVKSVLEKM

SEQ ID NO: 163011 - protein, 133 aa, Unknown
  Bacterial polypetide isolated from the Sargasso Sea
MSILVNQNSKVLVQGFTGSEGTFHASQMIDYGTNVVGGVTPGKGGSTHLDKPVFNTVSEAVASTGANVSIIFVPPAFAADAIMEAANSGIKVIVCITEGIPVKDMIKAKDYINDYDCTLIGPNCPGIITADEA

SEQ ID NO: 163012 - protein, 217 aa, Unknown
  Bacterial polypetide isolated from the Sargasso Sea
PPMFAADAIMEAAESGIKTIVTITEGIPINDMTKVVSYIKGKNIRLIGPNCPGIITPDEAKIGIMPGFVFKKGNVGIVSKSGTLTYEAADQVVKSGHGISSAIGVGGDPIIGTTLLDSIQLFMEDDDTDLIVLIGEIGGQLEIDAAEWIKNNGNKKPVVGFIAGETAPKGRKMGHAGAIIGGKDDTASAKKRIMRESGVNVVDSPADIGKTVNEILK

SEQ ID NO: 163013 - protein, 148 aa, Unknown
  Bacterial polypetide isolated from the Sargasso Sea
MSILVNKNSRVVVQGITGSEGEFHTKQMLDYGTNIVAGVTPGKGGQSVLDGSINVYDSVEQSIEKTSANTAIIFVPPPFAAEAIIESSYAGIETIVCITEGVPIHDMVKVKQIVKRNQTRLIGPNCPGIITVDECKLGIMPGFICKKG

SEQ ID NO: 163014 - protein, 117 aa, Unknown
  Bacterial polypetide isolated from the Sargasso Sea
SVGIGGDPINGSSFRDIIEKFETDDETDAILMIGEIGGPQEVAAGEFAKENMKKPVIAYIAGLTAPKGRVMGHAGAIVSAYGESAIEKVEILKECGITISKNPSVMGDTVKSVLEKM

SEQ ID NO: 163015 - protein, 135 aa, Unknown
  Bacterial polypetide isolated from the Sargasso Sea
SGTLTYEAVKQTTDAGLGQSTCIGIGGDPVNGTSFIDALEMFENDPQTESIVMVGEIGGSAEEEAAEYIRDNIKKPVVSYIAGVTAPKGKRMGHAGAIISGGKGTAQDKFKALESAGVGVVTDLNLIGSRLKESL

SEQ ID NO: 163016 - protein, 222 aa, Unknown
  Bacterial polypetide isolated from the Sargasso Sea
RFGSPGKAMYGYGVKLIDEATGEELTGPNQKGVVAIEGPLPPGCMQTVWRDDARFVNTYWKSIPGRLIYSTFDWGIRDADGYHFILGRTDDVINVAGHRLGTREIEESIASHPNIAEVAVVGVADSLKGQVAMAFAVVRDASGLTDDAARLKLEGEVMKQVDHQLGAVARPSRVYFVTVLPKTRSGKLLRRALQAVAERRDPGDLTTMEDPAALQQVKDLVG

SEQ ID NO: 163017 - protein, 287 aa, Unknown
  Bacterial polypetide isolated from the Sargasso Sea
LYTSGTTGLPKGIVRDIGGHIVALKWTMKNIYNIKPEDVWWSASDIGWIVGHSYIVYGPLFYGCTTVLFEGKPVGTPDAGVFWRVISEHKVKSLFTAPTAIRAIKKEDPNGEFFKKYDLSKFDKLFLAGERADPDTIKWFEKLSNSPVIDHWWQTETSWAITSSCTGIENFPVKYGSAFKPVPGYDLKVLNSEGKEVGPGKMGDIVVKLPLPPGTFPTLWGADKRYKENYMTTYPGYYQTYDAGHIDEDGYVWIMSRTDDIINVASHRLSTGAIEEVLAEHPNVAEC

SEQ ID NO: 163018 - protein, 203 aa, Unknown
  Bacterial polypetide isolated from the Sargasso Sea
EQGIPLIICITEGVPTMDMLVVKNKIDQLGITLIGPNCPGIITPDEAKLGIMPGDIHKKGRIGIISRSGTLTYEAVKQTTDLGLGQSSCVGIGGDPIPGSSFIDMLALFNDDPDTDAIIMVGEIGGNAEEEAAKYISNHVNKPVISYIAGQTAPSGKRMGHAGAIIAGGKGTAEDKMKTLQSAGVHVVDNLLEIGIRTQQVLD

SEQ ID NO: 163019 - protein, 280 aa, Unknown
  Bacterial polypetide isolated from the Sargasso Sea
RIGAIHSVVFGGFASNELASRIDDSKAKILITASCGFEPGRTVEYRPLVDGALKLAKHQVEKVIIFQRKDHEVKLNKPLEISWDEALSGANDKDCVEMGANDYAYILYTSGTTGIPKGIVRDIGGHIVALKWTMKNIYNIHQDDVWWSASDIGWIVGHSYIVYAPLFKGCTTLLFEGKPVGTPDAGVFWRIISEYKIKSLFTAPTAFRAIKKEDPEGKFFSKYDLSSFESLFLAGERADPDTIKWAENLLKVPVIDHWWQTETSWAISSNCTGIEMQETK

SEQ ID NO: 163020 - protein, 210 aa, Unknown
  Bacterial polypetide isolated from the Sargasso Sea
MSILIDENTKIIVQGFTGKIGSFHAQEMIDYGSNVVGGVTPGKGGSTHLDLPVFNTVKDAVKETGAEASILFVPPSYAADSAMEAADAGIKVCVAITDGIPSHDMIKVKRYMRRYAKSEKMTMIGPNCAGIISPGKSMLGIMPGHIYKKGNVGIVGRSGTLGYEAASQMKELDIGVSTSVGIGGDPINGSSFRDVLARFEEDPDTDIILM

SEQ ID NO: 163021 - protein, 192 aa, Unknown
  Bacterial polypetide isolated from the Sargasso Sea
VIISMLACARIGAIHSVVFGGFAAEELASRISDVMPKVVISASCGLEPKRIIDYKEILDKALSLTSHKPLKQIIYQREQHLCKLSLENDISWNEFVDTSSSINCVPIGSNEPLYILHTSGTTGIPKGIVRTNGGHAVALLNSMKMTYDISEDDVFWAASDVGWVVGHSYIVYAPLLLGCSTVLYEGKPVGTH

SEQ ID NO: 163022 - protein, 125 aa, Unknown
  Bacterial polypetide isolated from the Sargasso Sea
MSIIINKDTKVICQGITGSQGTFHSQQAINYGTNLVGGVTPGKGGIKYLGLPVFNTVHEAAESTKADATVIYVPAKFATKAIHEALDAKIKTIVCITEGIPVLDMVRIKQRIIDQKTILSALIVL

SEQ ID NO: 163023 - protein, 289 aa, Unknown
  Bacterial polypetide isolated from the Sargasso Sea
TTGLPKGIVRDIGGHIVALKWTMKNIYNIDQNDVWWSASDIGWIVGHSYIVYAPLFYGCTTILFEGKPVGTPDAGVFWRVISEHKVKSLFTAPTAIRAIKKEDPEGKYFKKYDLSKFDTLFLAGERADPDTIKWFENLSNSPVIDHWWQTETSWAITSSCTGIEKFPVKYGSAFKPVPGYDLKVLNSEGKEVGPGKMGDIVVKLPLPPGTFPTLWGADKRYKENYMTNYPGYYQTYDAGHIDEDGYVWIMSRTDDIINVAGHRLSTGAIEEVMAEHKSVAECAVIGIAD

SEQ ID NO: 163024 - protein, 99 aa, Unknown
  Bacterial polypetide isolated from the Sargasso Sea
MSILIDSSTKVICQGFTGGQGTLHSEQAIAYGTKLVGGVTPGKGGTQHLDLPVFDTVADAVNNTGATASVIYVPAGFCKDSILEALDAGIELKVCITEG

SEQ ID NO: 163025 - protein, 109 aa, Unknown
  Bacterial polypetide isolated from the Sargasso Sea
MYGNKPANFLDVGGGASKEKVSAALKIILSDKNVKGILINIFGGIMRCDVLAQGVVDAAKEINISVPLVVRLAGTNFKEGKEILDNSGLKLISAENLDDAAKKIVEAIK

SEQ ID NO: 163026 - protein, 235 aa, Unknown
  Bacterial polypetide isolated from the Sargasso Sea
GGSKHLNLPVFNTVKDAVNETGADASILFVPPAFAADSAMEAADAGIKICVAIVDGIPSHDMIRIKRYMRRYTKSSKMTLVGPNCAGIISPGKSMLGIMPGHIYKEGRIGIISRSGTLGYEAAQQLKNLNIGVSTSVGIGGDPINGSSFRDIIEKFEADDETDAILMIGEIGGPQEVAAGEFAKENMKKPVVAYIAGLTAPKGRVMGHAGAIVSAYGESAIEKVEILKEVWNYNF

SEQ ID NO: 163027 - protein, 148 aa, Unknown
  Bacterial polypetide isolated from the Sargasso Sea
MSVLINKNTKVICQGFTGSHGTFHSEQAIKYGTNLVGGVTPKKGGQVHLQRPVFNTVKEAKENTGANASMIYVPAKFAGTAIIEAIDASIELIICITEGIPVLDMLKVKQKLTKSNSRLIGPNCPGIITPDECKIGIMPGNIHKKGSV

SEQ ID NO: 163028 - protein, 314 aa, Unknown
  Bacterial polypetide isolated from the Sargasso Sea
IVALKWTMKNIYNINQDDVWWSASDIGWIVGHSYIVYAPLFYGCTTVLFEGKPVGTPDAGVFWRVISEHKVKSLFTAPTAIRAIKKEDPNGDFFKKYDLSKFEKLFLAGERADPDTIKWFEKLSGSPVIDHWWQTETSWAITSDCTGIESFPVKYGSAFKPVPGYDLKVLNSDGKEVGPGKMGDIVVKLPLPPGTFPTLWGADKRYKENYMSTYPGYYLTYDAGHIDEDGYVWIMSRTDDIINVAGHRLSTGAIEEVLAEHKDVAECAVLGIADKLKGQLPIGLLALKSGVIKDKNEIISECVKMVRDKVGPVA

SEQ ID NO: 163029 - protein, 175 aa, Unknown
  Bacterial polypetide isolated from the Sargasso Sea
MTLVGPNCAGIISPGKSMLGIMPGHIYKEGRIGIISRSGTLGYEAAQQLKNLNIGVSTSVGIGGDPINGSSFRDIIEKFETDDETDAILMIGEIGGPQEVAAGEFAKENMKKPVIAYIAGLTAPKGRVMGHAGAIVSAYGESAIEKVGILKECGITISKNPSVMGDTVKSVLEKK

SEQ ID NO: 163030 - protein, 167 aa, Unknown
  Bacterial polypetide isolated from the Sargasso Sea
MSIYINKDTKVITQGITGKTGQFHTEKCQEYANGKNAFVAGVNPKKAGESIFNIPIYASVKEAAQQTGATVSVIYVPPAGAADAIWEAVEADLDLAICITEGIPVKDMLMVRNKMKAKEAAGGKKTLLLGPNCPGLITPDEIKIGIMPGHIHRKGRIGVVSRSGTLT

SEQ ID NO: 163031 - protein, 207 aa, Unknown
  Bacterial polypetide isolated from the Sargasso Sea
MLGIKYSVCITDGIPAQDMIRVKRYMYRYPIEKRMVLTGPNCAGTISPGEALLGIMPGHIYLQGTVGIVSRSGTLGYEAAEQLKAHGIGVSTSVGIGGDPINGSSFKDIMQRFEEDGDTHIICMIGEIGGPQEAEAAAYIKEHVKKPVVAYVAGLTAPKGRTMGHAGAIISAFGESASEKVEILSAAGVTVAPNPAVIGDTIAKVMK

SEQ ID NO: 163032 - protein, 229 aa, Unknown
  Bacterial polypetide isolated from the Sargasso Sea
ASILFVPPAFAADSAMEAADAGIKTCVAIVDGIPSHDMIKIKRYMRRYSRTEKMTLVGPNCAGVISPGKAMLGIMPGHIYKEGKIGIIGRSGTLGYEAAQQLKNLNIGVSTSVGIGGDPINGSSFKDILEKFEQDDETEAVLMIGEIGGPQEVAAGKFAKENMKKPVIAYIAGLTAPKGRVMGHAGAIVSAYGESAVEKVELLKECGVIISKNPSVMGETVKLALNSKT

SEQ ID NO: 163033 - protein, 284 aa, Unknown
  Bacterial polypetide isolated from the Sargasso Sea
ASCGYEPGRTVHYKPLVNKALELASHKPDKCIIFQREKDKADLNPAMDITWEDSLKDVKPADCEKMNANDYAYILYTSGTTGLPKGIVRDIGGHIVALKWTMKNIYNINQDDIWWSASDIGWIVGHSYIVYAPLFYGCTTILFEGKPVGTPDAGVFWRVISEHKVKSLFTAPTAIRAIKKEDPNGEFFKKYDLSKFEKLFLAGERADPDTIKWFEKLSNSPVIDHWWQTETSWAITSDCTGIESFPVKYGSAFKPVPGYDLKVLSSDGKEVGPGKMGDIVVKLP

SEQ ID NO: 163034 - protein, 213 aa, Unknown
  Bacterial polypetide isolated from the Sargasso Sea
MEAADAGIKSCVAIVDGIPSHDMIRIKRYMRRYTRSEKMSLVGPNCAGIISPGKSMLGIMPGHIYKEGRIGIISRSGTLGYEAAQQLKNLNIGVSTSVGIGGDPINGSSFKDIIGKFEEDDETDAILMIGEIGGPQEVAAGEFAKDNMKKPVIAYIAGLTAPKGRVMGHAGAIVSAYGESAVEKVEILKEYGITISKNPSVMGETVKSVLSKS

SEQ ID NO: 163035 - protein, 315 aa, Unknown
  Bacterial polypetide isolated from the Sargasso Sea
FGGFAANELASRIDDSKAKIIISASCGYEPGRTVHYKPLLNKAIEIANHKPEKCIIWQREKDKAELDPKRDIDWLECLKGAKPAECEKMNANDYAYILYTSGTTGTPKGIVRDIGGHIVALKWTMKNIYNIDQDDVWWSASDIGWIVGHSYIVYAPLFYGCTTVLFEGKPVGTPDAGIFWKIISEYKVKSLFTAPTAIRAIKKEDPDGKFFKKYDLSKFDTLFLAGERADPDTIKWFEKLSNAPVIDHWWQTETSWAISANCAGIEKFPIKYGSAFKPVPGYDLKVLNSEGKENKPGQMGDIVVKLPLPPGTFPT

SEQ ID NO: 163036 - protein, 117 aa, Unknown
  Bacterial polypetide isolated from the Sargasso Sea
CIGIGGDPINGTNFIDCLDLFLKDESTKSIVMIGEIGGSAEEEAAEFISKHQIKKPMVGFIAGLTAPKGKRMGHAGAIISGGKGGAKEKIKILQKAGITITESPADIGKTLLNKLSL

SEQ ID NO: 163037 - protein, 236 aa, Unknown
  Bacterial polypetide isolated from the Sargasso Sea
MSIIIHKNTKILVQGFTGKIGSFHAEEMIKYGSNVVGGVTPGKGGLTHLNLPVFNTVKEAVEKTGASTSILFVPPTFAADSAMEAADAGIKTCVAITDGIPSHDMVKIKRYMRRYSKDKKMGLVGPNCAGIISPGKSMLGIMPGHIYKEGKIGIVSRSGTLGYEAAQQLKDLDIGVSTSVGIGGDPINGSSFRDIIEKFEADDETIAVLMIGEIGGPQEVATGQFAKENMNKPVIA

SEQ ID NO: 163038 - protein, 280 aa, Unknown
  Bacterial polypetide isolated from the Sargasso Sea
KNKASLNSKMDITWEESLNNVKPESCVEMNANDYAYILYTSGTTGLPKGIVRDIGGHIVALKWTMKNIYNIDQDDVWWSASDIGWIVGHSYIVYAPLFYGCTTILFEGKPVGTPDAGVFWRVISEHKVKSLFTAPTAIRAIKKEDPDGKFFKKYDLSKFDTLFLAGERADPDTIKWFENLSNSPVIDHWWQTETSWAITSSCTGIEKFPVKYGSAFKPVPGYDLKVLNSEGKEVGPGKMGDIVVKLPLPPGTFPTLWGADKRYKENYMTNYPGYYQTYDA

SEQ ID NO: 163039 - protein, 154 aa, Unknown
  Bacterial polypetide isolated from the Sargasso Sea
MPGSIHKKGSVGIVSRSGTLTYEAVAQTSINGMGQSTCIGIGGDPINGTNFIDCLELFLKDNDTKSIVMIGEIGGSAEEEASEFLKKEKIKKPMVGFIAGLTAPPGRRMGHAGAIISGGKGGAEDKIEMMKSAGITISKSPADIGKTMYDKLNS

SEQ ID NO: 163040 - protein, 144 aa, Unknown
  Bacterial polypetide isolated from the Sargasso Sea
GSIGIVSRSGTLTYEAVDQTTACKLGQTTCVGIGGDPVPGTNFIDTLELFLADESTQGIIMIGEIGGSAEEEAAEFIKRSKIKKPMVGFIAGLSAPEGKRMGHAGAIISGGSGGAEDKIEALKSAGVSIASSPATIGEEMLKII

SEQ ID NO: 163041 - protein, 291 aa, Unknown
  Bacterial polypetide isolated from the Sargasso Sea
HSVVFGGFASTELASRFDDSKAKLLVTASCGFEPGRIVEYKPLVDEAIKIANHKIEKMILFQRPGHEVKLNAPLEISWDEVVSNAQPADCVEMNSNEFAYILYTSGTTGTPKGIVRDVGGHIVALKWTMKNIYNIDANDVWWSASDIGWIVGHSYIVYAPLFKGCTTVLFEGKPVGTPDAGAFWKIISDYKVKSLFTAPTAFRAIKKEDPEGKFFSKYDLSSFESLFLAGERADPDTIKWAENLLKVPVIDHWWQTETSWAISSNCTGIEMMETKYGSACKAVPGYDVKII

SEQ ID NO: 163042 - protein, 114 aa, Unknown
  Bacterial polypetide isolated from the Sargasso Sea
DIIKQFGEEPANFLDLGGTANKDRVIMGFKIIQSDPNVKSILINIFGGIIHCDMIANGIVEAVKELDFKLPLVVRFQGTNSSEGRDVINNSDLKLISIDDFTEAAKKVVDLAKG

SEQ ID NO: 163043 - protein, 121 aa, Unknown
  Bacterial polypetide isolated from the Sargasso Sea
IIVNLETKVICQGFTGAQGTFHSEQAIAYGTNMVGGVSPGKGGSNHLDLPVYNTVDEAVYNTGANTSVIYVPPPFAADAILEAIEANLDLIVCITEGIPILDMVRVKNVLNNSKSRLIGPN

SEQ ID NO: 163044 - protein, 102 aa, Unknown
  Bacterial polypetide isolated from the Sargasso Sea
MSILVNKNTRLICQGFTGSQGTFHSQQAIAYGTNLVGGVTPGKGGKTHLNLPVFNSVSEAVKQTKANATVIYVPAKFATKAIHEALDANIELIVCITEGIPV

SEQ ID NO: 163045 - protein, 263 aa, Unknown
  Bacterial polypetide isolated from the Sargasso Sea
SASDIGWIVGHSYIVYAPLFYGCTTVLFEGKPVGTPDAGVFWRIISEYKVKSLFTAPTAIRAIKKEDPDGKFFKKYDLSKFDTLFLAGERADPDTIKWFEKLSSAPVIDHWWQTETSWAISANCAGIEKFPIKYGSAFKPVPGYDLKVLNSEGKENKAGQMGDIVVKLPLPPGTFPTLWNADERYKKVYMSTYDGYYQTYDAGHIDEDGYVWIMSRTDDIINVAGHRLSTGAIEEVLAEHKNVAECAVIGIADKLKGQLPIGL

SEQ ID NO: 163046 - protein, 251 aa, Unknown
  Bacterial polypetide isolated from the Sargasso Sea
SKHLNLPVFNTVKEAVETTGASASILFVPPAFAADSAMEAADAGIKTCVAIVDGIPSHDMIRIKRYMRRYSRVQKMTLVGPNCAGVISPGKAMLGIMPGHIYKEGRVGIIGRSGTLGYEAAQQMKNLGIGISTSVGIGGDPINGSSFKDILEKFEEDKETDAVLMIGEIGGPQEVAAGKFAKENMKKPVIAYIAGLTAPKGRVMGHAGAIVSAYGESAVEKVELLKECGVTISKNPSVMGETVKSVLVKNR

SEQ ID NO: 163047 - protein, 159 aa, Unknown
  Bacterial polypetide isolated from the Sargasso Sea
SMLGIMPGHIYKEGRIGIISRSGTLGYEAAQQLKNLNIGVSTSVGIGGDPINGSSFKDIIGKFEEDDETDAILMIGEIGGPQEVAAGEFAKENMKKPVIAYIAGLTAPKGRVMGHAGAIVSAYGESAVEKVEILKDYGITISKNPSVMGDTVKSVLGKS

SEQ ID NO: 163048 - protein, 126 aa, Unknown
  Bacterial polypetide isolated from the Sargasso Sea
MSIIIDKNTKVICQGFTGSQGTYHSQQAIDYGTQMVGGVTPGKGGTTHLGLPVFNTVKEAKDYTQADATVIYVPAKFATQAIHEALDANIKIITCITEGIPVLDMVEIKKRIIEQKTYFIGPKLSW

SEQ ID NO: 163049 - protein, 282 aa, Unknown
  Bacterial polypetide isolated from the Sargasso Sea
IDWLDALKGAKPTECEKMNSNDYAYILYTSGTTGTPKGIVRDIGGHIVALKWTMKNIYNINQDDVWWSASDIGWIVGHSYIVYAPLFYGCTTVLFEGKPVGTPDAGVFWRIISDYKVKSLFTAPTAIRAIKKEDPDGKFFKKYDLSNFDTLFLAGERADPDTIKWFEKLSNAPVIDHWWQTETSWAISSNCAGIEKFPIKYGSAFKPVPGYDLKVLNSEGKENKPGQMGDIVVKLPLPPGTFPTLWNADERYKKVYMSTYDGYYQTYDAGHIDEDGYVWIMS

SEQ ID NO: 163050 - protein, 228 aa, Unknown
  Bacterial polypetide isolated from the Sargasso Sea
MSILVDENTKLLIQGLGRDGSFQASKTLEYGTNVVAAVHPGKEGTKFENKVPYFSSVEKAVQKTEANTGVIFVPAPFAMDAIIEQVDAGINLIVCITEGVPVLDMIKIMSYIENKSVRLIGSNCPGLLTPSTKTKVGIIPGNIVRPGNIGVVSRSGTLTYEAIAQLVQNGFGQSTCVGIGGDPVHGTTFTDVLQMFESDKETEAIVLIGEIGGTREQLAAEYIKKHVT

SEQ ID NO: 163051 - protein, 94 aa, Unknown
  Bacterial polypetide isolated from the Sargasso Sea
MSILINNKTKVICQGFTGSQGTFHSQHAIEYGTKLVGGVTPGKGGSTHLDLPVFDSVKDAVDHLEPDATVIYVPAKFATKAIHEALDSNIKIIV

SEQ ID NO: 163052 - protein, 269 aa, Unknown
  Bacterial polypetide isolated from the Sargasso Sea
NIYNINQDDVWWSASDIGWIVGHSYIVYAPLFYGCTTVLFEGKPVGTPDAGVFWRIISDYKVKSLFTAPTAIRAIKKEDPDGKFFKKYDLSSFDTLFLAGERADPDTIKWFEKLSNAPVIDHWWQTETSWAISSNCAGIEKFPIKYGSAFKPVPGYDLKVLNSEGKENKPGQMGDIVVKLPLPPGTFPTLWNADERYKKVYMSTYKGYYQTYDAGHIDEDGYVWIMSRTDDIINVAGHRLSTGAIEEVLAEHKNVAECAVIGIADKLKG

SEQ ID NO: 163053 - protein, 203 aa, Unknown
  Bacterial polypetide isolated from the Sargasso Sea
CVAIVDGIPSHDMIRIKRYMRRYTKSSKMTLVGPNCAGIISPGKSMLGIMPGHIYKEGRIGIISRSGTLGYEAAQQLKNLNIGVSTSVGIGGDPINGSSFRDIIEKFETDDETDAILMIGEIGGPQEVAAGEFAKENMKKPVIAYIAGLTAPKGRVMGHAGAIVSAYGESAIEKVEILKECGITISKNPSVMGDTVKSVLEKL

SEQ ID NO: 163054 - protein, 135 aa, Unknown
  Bacterial polypetide isolated from the Sargasso Sea
TLTYEAVKQTTDYGFGQSTCVGIGGDPIPGSNFIDILKLFQEDPQTEAIVMIGEIGGSAEEEAAAYIKKHVTKPVVSYIAGVTAPAGKRMGHAGAIISGGKGTADEKFAALEDAGVKTVKSLADIGKALKELTGW

SEQ ID NO: 163055 - protein, 260 aa, Unknown
  Bacterial polypetide isolated from the Sargasso Sea
HSVVFGGFASNELASRIDDSKAKILVTASCGFEPGRTVEYKPLVDEAIKIANHKIDKMILFQRPGHEVKLNASKEISWEEVVSNSKDADCVEMNSNEFAYILYTSGTTGTPKGIVRDIGGHIVALKWTMKNIYNIDTDDIWWSASDIGWIVGHSYIVYAPLFKGCTTVLFEGKPVGTPDAGAFWKIISDYKVKSLFTAPTAFRAIKKEDPEGKFFSKYDLSSFESLFLAGERADPDTIKWAENLLKVPVIDHWWQTETSW

SEQ ID NO: 163056 - protein, 104 aa, Unknown
  Bacterial polypetide isolated from the Sargasso Sea
MSILINKSTKVICQGFTGSQGTFHSEQAIKYGTNLVGGVTPNRGGDNHLGLPVFNTVYEAKEKTNADASVIYVPPAFSADAILEAIDAKIELIVCITEGIPQHD

SEQ ID NO: 163057 - protein, 183 aa, Unknown
  Bacterial polypetide isolated from the Sargasso Sea
MSILVNKSSKVVIQGITGSEGQFHGGQMLDYGTNIVSGVTPGKGGIKTLNERVPVFNSVEEAVEKTEANTSIIFVPPPFSAEAVIEASYAGIELVVCITEGVPVQDMVKVKNVLKRNNTRLIGPNCPGIITVDECKLGIMPGFICKRGNIGVISKSGTLTYEAIDQLVNVGLGQTTAIGIGGD

SEQ ID NO: 163058 - protein, 241 aa, Unknown
  Bacterial polypetide isolated from the Sargasso Sea
MAVIINKDTKIIIQGFTGKMGTFHAEEMIKYGSNVVGGVTPGKGGTKHLDLPVFNTVKEAVENTEATASILFVPPAFAADSAMEAADAGIRTCVAIVDGIPSHDMIKIKRYMRRYSKSEKMSLVGPNCAGIISPGKSMLGIMPGHIYKEGRVGIISRSGTLGYEAAQQLKDLNIGISTSVGIGGDPINGSSFKDIIGKFEEDVETDAILMIGEIGGPQEVAAGEFAKDNMKKPVIAYIAGL

SEQ ID NO: 163059 - protein, 309 aa, Unknown
  Bacterial polypetide isolated from the Sargasso Sea
FAANDLASRIDDSKAKILVTASCGYEPGRTVHYKPLVNKALELANHKPDKCIIFQREKDKAELDSKIDITWDDAHKNAKPAECEKMNANEYAYILYTSGTTGLPKGIVRDIGGHIVALKWTMKNIYNINQEDVWWSASDIGWIVGHSYIVYAPLFYGCTTVLFEGKPVGTPDAGVFWRVISEHKVKSLFTAPTAIRAIKKEDPNGEFFKKYDLSKFDKLFLAGERADPDTIKWFEKLSNSPVIDHWWQTETSWAITSDCTGIESFPVKYGSAFKPVPGYDLKVLNSEGKEVGPGKMGDIVVKLPLPPGT

SEQ ID NO: 163060 - protein, 119 aa, Unknown
  Bacterial polypetide isolated from the Sargasso Sea
ITTAIGIGGDPIIGTTTKEAVELLINDPETECVVMIGEIGGQLEADAAKWYKESGSKKPIVGFIAGETAPAGRTMGHAGAIVGGSDDTAAAKKRIMRENGIHVVDSPAEIGKKVKEVMG

SEQ ID NO: 163061 - protein, 123 aa, Unknown
  Bacterial polypetide isolated from the Sargasso Sea
MLACARIGAIHSVVFGGFASNELAVRIDDAKPKAIIAGSCGVEPTGIIPYKPLLDKAIDQAEHSPKFCVIFQRDELQAPLVVGRDYEWDDFQKASTEILCVPVLGSDPLYILYTSGTTGQPKG

SEQ ID NO: 163062 - protein, 159 aa, Unknown
  Bacterial polypetide isolated from the Sargasso Sea
EAKVGIMPGFVFSKGNVGVISKSGTLTYEAADQVVKQGYGISTAIGIGGDPIIGTTTKDAIELFMNDTETECIVMIGEIGGQLEAEAAKWIKRNGNKKPVVGFIAGETAPKGRTMGHAGAIVGGSEDTAQAKKNIMSECGIHVVDSPADIGKKVAEILK

SEQ ID NO: 163063 - protein, 381 aa, Unknown
  Bacterial polypetide isolated from the Sargasso Sea
VRDIGGHIVALKWTMKNIYNINQDDVWWSASDIGWIVGHSYIVYAPLFYGCTTVLFEGKPVGTPDAGVFWRIISEYKVKSLFTAPTAIRAIKKEDPDGKFFKKYDLSKFDTLFLAGERADPDTIKWFEKLSNAPVIDHWWQTETSWAISANCAGIEKFPIKYGSAFKPVPGYDLKVLNSEGKENKPGQMGDIVVKLPLPPGTFPTLWNADERYKKVYMSTYEGYYQTYDAGHIDEDGYVWIMSRTDDIINVAGHRLSTGAIEEVLAEHKSVAECAVIGIADKLKGQLPIGLIALKAGVDRDNKEITKECVALVREKVGPVAAFKLAIVVKRLPKTRSGKVLRGTVRKIADGETYKVPPTIDDPVILDEIKKDLKENNILKS

SEQ ID NO: 163064 - protein, 224 aa, Unknown
  Bacterial polypetide isolated from the Sargasso Sea
MYPPAFAADSAMEAADAGIKTCVAIVDGIPSHDMIRIKRYMRRYSKTEKMTLVGPNCAGIISPGKSMLGIMPGHIYKEGRVGIISRSGTLGYEAAQQMKNLDIGISTSVGIGGDPINGSSFRDIIEKFEVDDETDAVLMIGEIGGPQEVAAGEFAKENMKKPVIGYIAGLTAPKGRVMGHAGAIVSAYGESAIEKVEILKDCGVTISKNPSVMGDTVKSVLEKM

SEQ ID NO: 163065 - protein, 482 aa, Unknown
  Bacterial polypetide isolated from the Sargasso Sea
SRIDDSKAKILVTASCGFEPGRTVEYKPLVDEAIKIANHKIEKMILFQRPGHEVKLNTPNEVSWEEVVTNAQDADCVEMNSNEFAYILYTSGTTGTPKGIVRDIGGHIVALKWTMKNIYNIDTDNIWWSASDIGWIVGHSYIVYAPLFKGCTTVLFEGKPVGTPDAGAFWKIISDYKVKSLFTAPTAFRAIKKEDPEGKFFSKYDLSNFESLFLAGERADPDTIKWAENLLKVPVIDHWWQTETSWAISSNCTGIEMMETKYGSAVKAVPGYDVKIIKPDQSLAKPNEMGDIVVKLPLPPGTFPTLWNADQRYKENYMSNYDGYYQTYDAGHIDDDGYIWIMSRTDDIINVAGHRLSTGAIEEVLSEHQSVAECAVLGIADKLKGQLPIGLVVLKSGVDKDNETISKECVQMVRDKIGPVAAFKVVIVIKRLPKTRSGKILRGTIRKIADGVDYKVPPTIDDPAILTEITEDLINHKILNNG

SEQ ID NO: 163066 - protein, 467 aa, Unknown
  Bacterial polypetide isolated from the Sargasso Sea
MCFEPGRTVEYKPLVDEAIKQAHHKISKMILFQRKGHEVKLNAPMEISWNEAHANAKDTDCVEMNSNEFAYILYTSGTTGTPKGIVRDIGGHIVALKWTMKNIYNIDADDIWWSASDIGWIVGHSYIVYAPLFKGCTTVLFEGKPVGTPDAGAFWKIISDYKVKSLFTAPTAFRAIKKEDPEGKFFSKYDLSKFESLFLAGERADPDTIKWAENLLKVPVIDHWWQTETSWAISSNCTGIEMMKTKYGSACKAVPGYDVKIIKSDQTLAKPNEMGDIVVKLPLPPGTFPTLWNADQRYKENYMSNYEGYYQTYDAGHIDEDGYIWIMSRTDDIINVAGHRLSTGAIEEVLSEHQSVAECAVLGIADKLKGQLPIGLIVLKAGVDKDNETISKECIQMVRDKIGPVAAFKVAIVIKRLPKTRSGKILRGTIRKIADSVEYKMPPTIDDPAILDEIKEDLIKNNIIKSA

SEQ ID NO: 163067 - protein, 268 aa, Unknown
  Bacterial polypetide isolated from the Sargasso Sea
MTDIYEILRGKKDADGNYEKKPVIVQGITGKYGSTHAKLMLEYGTNIVAGVTPGKGGQKFEDKIPVYNTVKEAVDATGAEISIVFVPAKFFLDAAKDALNSGIKLLVAIPEHVPIRDAMEVIELAKQKDAIMIGPNTPGVIVPGLIKVGIMPASPFSAGKVAVLSKSGTLLYEISNNLTSAGFGQNITIGIGGDPVNGTRMIDAFDMVKDDPELEAMVVVGEIGGDSEEILAQHIIDIGFKKPIVGYIAGQQAPKEKRMGHAGAIVMG

SEQ ID NO: 163068 - protein, 169 aa, Unknown
  Bacterial polypetide isolated from the Sargasso Sea
MSVLINKDTKVICQGFTGAHGTFHSEQSIKYGTNLVGGVTPKKGGQIHLERPVFNTVKEAKDQTGANATMIYVPAKFAASAIIEAIDSSIELIVCISEGIPVLDMLKVKRRLSNSKSRLIGPNCPGIITPDECKIGIMPGNIHKKGTVGIVSRSGTLTYEAVAQTSENG

SEQ ID NO: 163069 - protein, 175 aa, Unknown
  Bacterial polypetide isolated from the Sargasso Sea
MSLVGPNCAGIISPGKSMLGIMPGHIYKEGRIGIISRSGTLGYEAAQQLKNLNIGVSTSVGIGGDPINGSSFKDIIGKFEEDDETDAILMIGEIGGPQEVAAGEFAKDNMKKPVIAYIAGLTAPKGRVMGHAGAIVSAYGESAVEKVEILKEYGITISKNPSVMGETVKSVLSKS

SEQ ID NO: 163070 - protein, 262 aa, Unknown
  Bacterial polypetide isolated from the Sargasso Sea
YGTNIVAGVTPGKGGQKFEDKIPVYDTVKEAVDATGAEISIVFVPAKFFLDAAKDALNSGIKLLVAIPEHVPIRDAMEVIELAKQKDAIMIGPNTPGVIVPGLIKVGIMPASPFSAGKVAVLSKSGTLLYEISNNLTSAGFGQNITIGIGGDPVNGTRMIDAFDMVKDDPELEAMVVVGEIGGDSEEILAQHIIDIGFKKPIVGYIAGRQAPKEKRMGHAGAIVMGTYGSAESKISMFAKANIPVAKRPGEVAVLLAGKMNS

SEQ ID NO: 163071 - protein, 151 aa, Unknown
  Bacterial polypetide isolated from the Sargasso Sea
MSILINKDTRVICQGFTGSNGTFHSQQSINYGTNIVGGVTPNKGGQIHLSRPVFNTVAEAKKVTDANATMIYVPAKFAGDAIIEAIESSIELIVCITEGIPILDMLKVKNHLLKSKSRLIGPNCPGIITPDECKLGSCQEIFIKKVQSELY

SEQ ID NO: 163072 - protein, 153 aa, Unknown
  Bacterial polypetide isolated from the Sargasso Sea
MPGFIHQKGSIGIISRSGTLTYEAVHQTSMCGLGQSTCIGIGGDPIKGLNFIECLSLFEEDPATEGIVMVGEIGGSDEEKAAEFIKDNITKPVVAYVAGVSAPPGKRMGHAGAIVTGNEGTASSKYKALNDAGVKTTDSPALIGEIMKELLNQ

SEQ ID NO: 163073 - protein, 152 aa, Unknown
  Bacterial polypetide isolated from the Sargasso Sea
MSILVNKDSKVVVQGITGSEGEFHAKQMLDYGTNIVAGVTPGKGGQSVIDGSINVYDSVEQSVEKTSANTAIIFVPPSFAAEAIIESSYAGIETIVCITEGVPVHDMIKVKQIIKRNKTRLIGPNCPGIITVDECKLGIMPGFICKKGNVGV

SEQ ID NO: 163074 - protein, 186 aa, Unknown
  Bacterial polypetide isolated from the Sargasso Sea
MSVLIDKNTKILIQGFTGKMGTFHAEEMIKYGSNVVGGVTPGKGGSKHLNLPVFNTVKEAVESTGASASILFVPPAFAADSAMEAADAGIKTCVAIVDGIPSHDMIKIKRYMRRYSRVQKMTLVGPNCAGVISPGKAMLGIMPGHIYKEGKVGIIGRSGTLGYEAAQQMKNLGIGISTSVGIGGDP

SEQ ID NO: 163075 - protein, 432 aa, Unknown
  Bacterial polypetide isolated from the Sargasso Sea
HSVVFGGFAANELASRIDDSKAKILVTASCGYEPGRTVHYKPLVNKALELANHKIKKCIIFQREKDIAELNPAIDITWDDAHKDVKPADCEKMNANDYAYILYTSGTTGLPKGIVRDIGGHIVALKWTMKNIYNIKPEDVWWSASDIGWIVGHSYIVYGPLFYGCTTVLFEGKPVGTPDAGVFWRVISEHKVKSLFTAPTAIRAIKKEDPNGEFFKKYDLSKFDKLFLAGERADPDTIKWFEKLSNSPVIDHWWQTETSWAITSSCTGIENFPVKYGSAFKPVPGYDLKVLNSEGKEVDPGKMGDIVVKLPLPPGTFPTLWGADKRYKENYMTTYPGYYQTYDAGHIDEDGYVWIMSRTDDIINVAGHRLSTGAIEEVLAEHPNVAECAVIGIADKLKGQIPIGLLALKAGVTKDKKDIISECVKMVREKVG

SEQ ID NO: 163076 - protein, 126 aa, Unknown
  Bacterial polypetide isolated from the Sargasso Sea
GLGQTTCIGIGGDPVHGINFIDCLDLFLKDEETKGILMIGEIGGTAEEDAAEFILDSSINKPMSAFIAGVSAPKGKRMGHAGAIISGNKGTAESKIEALRKANIAVAPSPAKMGETMLVEMQKRYN

SEQ ID NO: 163077 - protein, 121 aa, Unknown
  Bacterial polypetide isolated from the Sargasso Sea
MAILVNENTRVICQGFTGSQGTFHSEQAIEYGTNMVGGVTPGKGGLEHIGLPVFNSVHEAKSATGANASVIYVPPPFAADSILEALDAEIELIVAITEGIPVLDMVKVKRALETSKSTLIG

SEQ ID NO: 163078 - protein, 129 aa, Unknown
  Bacterial polypetide isolated from the Sargasso Sea
MSVLINKNTKVICQGFTGSHGSFHSEQAIKYGTNLVGGVTPKKGGQIHLDRPVFNTVKEAKNKTGANATMIYVPAKFAYSAIIEAIEASIELIVCITEGIPVLDMLKIKKKLRNSGSRLIGPNCPGIIT

SEQ ID NO: 163079 - protein, 457 aa, Unknown
  Bacterial polypetide isolated from the Sargasso Sea
VQYKPLVDEALKLASHKIEKLILFQRPDNEVKLNSPNEISWEEALSNAKNVDCVEMNANEFAYILYTSGTTGIPKGIVRDIGGHIAALKWTMKNIYNIDQDDVWWSASDIGWIVGHSYIVYAPLFKGCTSILFEGKPVGTPDAGAFWKIISEYKVKSLFTAPTAFRAIKKEDPEGKFFSKYDLSSFESLFLAGERADPDTIKWAESLLKIPVIDHWWQTETSWAISSNCTGIEMMKTKYGSACKAVPGYDVKVIKPDQTLAKPNEMGDIVVKLPLPPGTFPTLWNADDRYKKTYMTNYEGYYQTYDAGHIDDDGYIWIMSRTDDIINVAGHRLSTGAIEEVLSEHQSVAECAVIGIADKLKGQLPIGLIALKAGVKKDNETISKECIQMVRDKVGPVAAFKTAIVVKRLPKTRSGKILRGTVRKIADKEDYKMPATIDDPAILDEIKQDLINNNILK

SEQ ID NO: 163080 - protein, 406 aa, Unknown
  Bacterial polypetide isolated from the Sargasso Sea
PEAVIGMLACGRIGAIHSVVFGGFASNELASRIDDSKAKVLLTASCGFEPGRTVHYKPLVDEALKLASHKIEKLILFQRPDNKVKLNAPKEISWEEALSNAKNVDCVEMNANEFAYILYTSGTTGIPKGIVRDIGGHIAALKWTMKNIYNIDQDDVWWSASDIGWIVGHSYIVYAPLFKGCTTVLFEGKPVGTPDAGAFWKIISDYKVKSLFTAPTAFRAIKKEDPQGKFFSKYDLSSFESLFLAGERADPDTIKWAESLLNVPVIDHWWQTETSWAISSNCTGIEMMKTKYGSACKAVPGYDVKVIKPDHSIAKPNEMGDIVVKLPLPPGTFPTLWNADERYKKTYMTNYEGYYQTYDAGHIDDDGYIWIMSRTDDIINVAGHRLSTGAIEEVLSEHQSVAECAV

SEQ ID NO: 163081 - protein, 128 aa, Unknown
  Bacterial polypetide isolated from the Sargasso Sea
MSVLVDKNTKVICQGFTGSHGTFHSEQAIKYGTNLVGGVTPKKGGQVHLERPVFNTVKEAKENTGANASMIYVPAKFAGAAIIEAIEASIELIICITEGIPVLDMLKVKQKLTKSNSRLIGPNCPGII

SEQ ID NO: 163082 - protein, 228 aa, Unknown
  Bacterial polypetide isolated from the Sargasso Sea
MTVLVDKNSKIIIQGFTGKMGSFHADEMIKYGSNVVGGVTPGKGGSKHLDLPVFNTVKDAVNETGADASILFVPPAFAADSAMEAADAGIKICVAIVDGIPSHDMIRIKRYMRRYTKSSKMTLVGPNCAGIISPGKSMLGIMPGHIYKEGRVGIISRSGTLGYEAAQQLKNLNIGVSTSVGIGGDPINGSSFRDIIEKFETDDETDAILMIGEIGGPQEVAAGEFKRK

SEQ ID NO: 163083 - protein, 389 aa, Unknown
  Bacterial polypetide isolated from the Sargasso Sea
GTTGIPKGIVRDIGGHIVALKWTMKNIYNIDEDDVWWSASDIGWIVGHSYIVYAPLFKGCTTVLFEGKPVGTPDAGVFWRIISDYKIKSLFTAPTAFRAIKKEDPEGKFFSKYDLSSFKSLFLAGERADPDTIKWAENLLKVPVIDHWWQTETSWSISGNCTGIEMQKTKYGSASKPVPGYDVKIIKPDNSLAKPNEMGDIVVKLPLPPGTFPTLWNADQRYKENYMTNYEGYYQTYDAGHIDEDGYVWIMSRTDDIINVAGHRLSTGAIEEVLSEHQSVAECAVIGIKDQLKGQLPIGLIALKAGVTKDNETISKECIQMVRDKVGPVAAFKRAIVVKRLPKTRSGKILRGTVRKIADKEEYKMPATIDDPAILDEIKQDLIKNNILN

SEQ ID NO: 163084 - protein, 371 aa, Unknown
  Bacterial polypetide isolated from the Sargasso Sea
MKWTMKNIYNINQDDVWWSASDIGWIVGHSYIVYAPLFYGCTTVLFEGKPVGTPDAGVFWRVISEHKVKSLFTAPTAIRAIKKEDPNGEFFKKYDLSKFDKLFLAGERADPDTIKWFEKLSNSPVIDHWWQTETSWAITSDCTGIESFPVKYGSAFKPVPGYDLKVLNSEGKEVGPGKMGDIVVKLPLPPGTFPTLWGADKRYKENYMSTYPGYYQTYDAGHIDEDGYVWIMSRTDDIINVAGHRLSTGAIEEVLAEHKDVAECAVIGIADKLKGQLPIGLLALKAGVTKDKKDIISECIKMVREKVGPVAAFKIAIVVKRLPKTRSGKVLRGTVRKIADNEPYKMPATIDDPAILDEIKADLVDNKILKL

SEQ ID NO: 163085 - protein, 267 aa, Unknown
  Bacterial polypetide isolated from the Sargasso Sea
MAVIIDKNTKIIVQGFTGKMGSFHAEEMIKYGSNVVGGVTPGKGGSKHLDLPVFNTVKEAVKSTGATASILFVPPAFAADSAMEAADAGIKSCVAIVDGIPSHDMIRIKRYMRRYTKSEKMSLVGPNCAGIISPGKSMLGIMPGHIYKEGRVGIISRSGTLGYEAAQQLKNLNIGVSTSVGIGGDPINGSSFKDIIGKFEEDDETDAILMIGEIGGPQEVAAGKFAKEKYEKTSYCLYCRLNCPKRKSYGSCWCNSICLWRKCGRKS

SEQ ID NO: 163086 - protein, 193 aa, Unknown
  Bacterial polypetide isolated from the Sargasso Sea
MSELGFYRFAKKDPSEVAIIGPNEEAISRGDLLKKANQLSHALRKLGLNKGDTVAIVLPNSIEYYIAYMACLQVGFYMVPINWHLAGPEIAYILEDSEAKAFIASGSHPDMRDACLKAVSSINFDSKRCITIDDLEGFIHLDEFIEGESDADPEERTAGQVMNYTSGTTGKPKGVKRSLVEGDPDDVLSHVCN

SEQ ID NO: 163087 - protein, 89 aa, Unknown
  Bacterial polypetide isolated from the Sargasso Sea
MVRVKKALASSKSRLIGPNCPGIITPDQCKIGIMPGHIHQKGSVGIVSRSGTLTYEAVGQKTACGLGQTTCIGKRGDPVNGTNIIDCLD

SEQ ID NO: 163088 - protein, 210 aa, Unknown
  Bacterial polypetide isolated from the Sargasso Sea
MEQQELLKGIVRDIGGHIVALKWTMKNIYNINQDDVWWSASDIGWIVGHSYIVYAPLFYGCTTVLFEGKPVGTPDAGVFWRIISEHKVKSLFTAPTAIRAIKKEDPDGKFFKKYDLSKFDTLFLAGERADPDTIKWFEKLSNAPVIDHWWQTETSWAISANCAGIEKFPIKYGSAFKPVPGYDLKVLNSEGKENKAGQMGDIVVKLPLPP

SEQ ID NO: 163089 - protein, 117 aa, Unknown
  Bacterial polypetide isolated from the Sargasso Sea
MFGIGGDPIIGSSMIDILKHFANDDETKGVVMIGEIGGSMENEAAEWIKDNFNKPVVSFIAGQTAPKGKRMGHAGAIISEGSETADAKIKILKECGVSVAKTVSEIGETMLKMIEEK

SEQ ID NO: 163090 - protein, 455 aa, Unknown
  Bacterial polypetide isolated from the Sargasso Sea
YKPLVDEALKLASHKIEKLILFQRPNNEVKLNTPKEISWEEALSNAKNTDCVEMGSNEFAYILYTSGTTGIPKGIVRDIGGHIAALKWTMKNIYNIDQDDVWWSASDIGWIVGHSYIVYAPLFKGCTTVLFEGKPVGTPDAGAFWKIISDYKVKSLFTAPTAFRAIKKEDPEGKFFSKYDLSSFESLFLAGERADPDTIKWAESLLKVPVIDHWWQTETSWAISSNCTGIEMMKTKYGSACKAVPGYDVKVIKPDQTLAKPNEMGDIVVKLPLPPGTFPTLWNADERYKKTYMTNYEGYYQTYDAGHIDEDGYIWIMSRTDDIINVAGHRLSTGAIEEVLSEHQSVAECAVIGIADKLKGQLPIGLIALKAGVQKDNETISKECIQMVRNKVGPVAAFKTAIVVKRLPKTRSGKILRGTVRKIADKEEYKMPATIDDPAILDEIKGDLIKNNILK

SEQ ID NO: 163091 - protein, 125 aa, Unknown
  Bacterial polypetide isolated from the Sargasso Sea
MFMGAGLAMATMDIIKLYNGAPSNFLDVGGGASKEKVSSALKIIMSDKSVKGVLINIFGGIMRCDILAEGVVDAAKEMQIKIPIVVRLAGTNFEEGQKILKSSNLKIIPAFDLSDAAKKIVEEIR

SEQ ID NO: 163092 - protein, 131 aa, Unknown
  Bacterial polypetide isolated from the Sargasso Sea
MSVLVNKNTKVICQGFTGAHGTFHSEQAIKYGTNIVGGVTPKKGGQTHLERPVFNTVKEAKNATGANATMIYVPAKFAAAAIIEAIECSLELIVCITEGIPVLDMLKVKTKLSNSKSRLIGPNCPGIITPR

SEQ ID NO: 163093 - protein, 41 aa, Unknown
  Bacterial polypetide isolated from the Sargasso Sea
MELRASEWDLNYVSLEGNIGCLVNGAGLAMATMDIIKLAGG

SEQ ID NO: 163094 - protein, 171 aa, Unknown
  Bacterial polypetide isolated from the Sargasso Sea
PNCAGSISPGKSMMGIMPGHIYSPGNVGLIGRSGTLGYEAASQMKEEGIGISTSVGIGGDPINGSSFKDHLEFFEQDDETKAIVLIGEIGGPQEVEAAMWAKDNMKKPVIGYIAGLTAPKGRRMGHAGAIISAVGESAAEKVEILQECGVSVVPNPSSFAPVVKGVLDKAS

SEQ ID NO: 163095 - protein, 121 aa, Unknown
  Bacterial polypetide isolated from the Sargasso Sea
MSVLVNKNTKVICQGFTGTHGTFHSEQALMYGTKLVGGVTPKKGGQKHLNLPVFNTVQEAKDKTSANATMIYVPPKFASAAILEAIEAEMELIVCITEGIPVIDMLKVKKNLKKSRSRLIG

SEQ ID NO: 163096 - protein, 335 aa, Unknown
  Bacterial polypetide isolated from the Sargasso Sea
LFYGCTTILFEGKPVGTPDAGVFWRVISEHKVKSLFTAPTAIRAIKKEDPEGNYFKKYDLSQFDTLFLAGERADPDTIKWFEKLSGSPVVDHWWQTETSWAITSSCTGIEKFPVKYGSAFKPVPGYDLKVLNSEGKQVGPGKMGDIVVKLPLPPGTFPTLWGADKRYKENYMTNYPGYYQTYDAGHIDEDGYVWIMSRTDDIINVAGHRLSTGAIEEVLAEHKSVAECAVIGIADKLKGQLPIGLLALKAGVSQSNEEIIKECIGMVREKVGPVAAFKTAIIVKRLPKTRSGKVLRGTVRKIADNEPYKMPATIDDPSILDEIKADLIENKILKL

SEQ ID NO: 163097 - protein, 483 aa, Unknown
  Bacterial polypetide isolated from the Sargasso Sea
ELASRIDDSKAKILITASCGFEPGRTVEYRPLVDGALKLAKHQIEKVILYQRKGHEVKLNEPLEISWEESLVNATDKDCVEMGSNELAYILYTSGTTGIPKGIVRDIGGHIVALKWTMKNIYNINTDDVWWSASDIGWIVGHSYIVYAPLFKGCTTVLFEGKPVGTPDAGAFWKVISDYKVKSLFTAPTAFRAIKKEDPEGKFFSKYDLASFKSLFLAGERADPDTIKWAENLLKVPVIDHWWQTETSWAISSNCTGIEMQKTKYGSACKAVPGYDVKVIKPDQSLAKPNEMGDIVVKLPLPPGTFPTLWNADKRYEENYMSNYKGYYQTYDAGHIDEDGYIWIMSRTDDIINVAGHRLSTGAIEEVLSEHQSVAECAVIGIKDQLKGQLPIGLIALKAGVTKDNETISKECIEMVRNKVGPVAAFKTAIVVKRLPKTRSGKVLRGTVRKIADKEEYKMPATIDDPTILDEIKENLINNKILK

SEQ ID NO: 163098 - protein, 216 aa, Unknown
  Bacterial polypetide isolated from the Sargasso Sea
MEAADAGIKTCVAITDGIPSHDMVKIKRYMRRYPKDKKMGLVGPNCAGIISPGKSMLGIMPGHIYKEGKIGIVSRSGTLGYEAAQQLKDLEIGVSTSVGIGGDPINGSSFRDIIEKFENDDETIAVLMIGEIGGPQEVEAGQFAKENMIKPVIAYIAGLTAPKGRVMGHAGAIVSAYGESAIEKVELLKECGVTISKNPSVMGETVKKVLVENNLN

SEQ ID NO: 163099 - protein, 114 aa, Unknown
  Bacterial polypetide isolated from the Sargasso Sea
MSIIVNKDTKVICQGFTGSQGTFHSQQAIEYGTKLVGGVTPGKGGNKHLNLPIFNTVKEAVDLTAADATVIYVPAKFATSAINEALDANLEIIICITEGIPVLDMVKIKKRIVE

SEQ ID NO: 163100 - protein, 227 aa, Unknown
  Bacterial polypetide isolated from the Sargasso Sea
MAVIIDKNTKIIIQGFTGKMGTFHADEMIKYGSNVVGGVTPGKGGTKHLNLPVFNTVKEAVDSTNATASILFVPPAFAADSAMEAADAGIRTCVAIVDGIPSHDMIKIKRYMRRYSKSEKMSLVGPNCAGIISPGKSMLGIMPGHIYKEGRVGIISRSGTLGYEAAQQLKDLNIGISTSVGIGGDPINGSSFKDIIGKFEEDDETDAILMIGEIGGPQEVAAGELQN

SEQ ID NO: 163101 - protein, 125 aa, Unknown
  Bacterial polypetide isolated from the Sargasso Sea
QTTDAGLGQSTCIGIGGDPVNGTSFIDALEMFENDSQTESIVMVGEIGGSAEEEAAEYIRDNIKKPVVSYIAGVTAPKGKRMGHAGAIISGGKGTAQDKFKALESAGVGVVTDLNLIGSRLKESL

SEQ ID NO: 163102 - protein, 143 aa, Unknown
  Bacterial polypetide isolated from the Sargasso Sea
GVVSRSGTLTYEAVHQLTILGIGQSSCVGIGGDPIIGTNYVDILNLYEEDPDTDIIVFIGEIGGTMEQEAAEYIKHHITKPVCSLIVGATAPAGKRMGHAGAIITGSTATAASKVAALKDAGCHIIPTPADIGDVVAKVLANN

SEQ ID NO: 163103 - protein, 111 aa, Unknown
  Bacterial polypetide isolated from the Sargasso Sea
IKLHGQEPANFLDVGGGASKEKVAAAFKIILSDKNVKGILINIFGGIMRCDVLAQGIVEAAKESKINIPLVVRLAGTNAKEGKKILDESGLKIISASDLGDAAKKIVKQVE

SEQ ID NO: 163104 - protein, 266 aa, Unknown
  Bacterial polypetide isolated from the Sargasso Sea
MSILIDRNTPVIVQGITGKMARFHTEDMVKYGTNVVGGVVPGKGGMEVKGLPVFDTVADAVENTGAEASLVFVPPPFAADSIMEAADARIKYSVCITDGIPAQDMIRVKRYMYRYPLEKRMILTGPNCAGTISPGKALLGIMPGHIYLQGNVGIVSRSGTLGYEAAAQLKAHGIGVSTSVGIGGDPINGSSFKDILQRFEDDDETHVICMIGEIGGPQEAEAAAYLKEHIKKPVVAYVAGMTAPKGRTMGHAGAIISAFGESASEK

SEQ ID NO: 163105 - protein, 134 aa, Unknown
  Bacterial polypetide isolated from the Sargasso Sea
MSIIVNKDTKVICQGFTGSQGTFHSEQAIKYGTQLVGGVTPKKGGTSHLGLPVFDTVSEAKEKTDTNASVIYVPPQFAAAAIVEAIESQIELIICITEGIPVIDMMMVKDKLKSSKSRLIGPNCPGIITPDECK

SEQ ID NO: 163106 - protein, 366 aa, Unknown
  Bacterial polypetide isolated from the Sargasso Sea
NIYNIDEGDIWWSASDIGWIVGHSYIVYAPLFKGCTTVLFEGKPVGTPDAGAFWKIIADYKVKSLFTAPTAFRAIKKEDPDGKFFSKYDLNNFESLFLAGERADPDTIKWAENLLKVPVIDHWWQTETSWAISSNCTGIEMMKTKYGSACKAVPGYDVKIMKSDQTLAKPNEMGDIVVKLPLPPGTFPTLWNADERYKDNYMSNYEGYYQTYDAGHIDEDGYIWIMSRTDDIINVAGHRLSTGAIEEVLSEHQSVAECAVLGVADKLKGQLPIGLIVLKTGVEKDNETISKECIQMVRDKIGPVAAFKVAIVIKRLPKTRSGKILRGTIRKIADNVQYKIPPTIDDPAILDEIKEELIKTKILKSA

SEQ ID NO: 163107 - protein, 393 aa, Unknown
  Bacterial polypetide isolated from the Sargasso Sea
IPQAQLELQKGIVRDVGGHIVALKWTMKNIYNIDTKDIWWSASDIGWIVGHSYIVYAPLFKGCTTVLFEGKPVGTPDAGAFWKIISDYKVKSLFTAPTAFRAIKKEDPNGEFFSKYDLSSFESLFLAGERADPDTIKWAENLLKVPVIDHWWQTETSWAISSNCTGIEMMETKYGSACKAVPGYDVKIIKPDQTLAKPNEMGDIVVKLPLPPGTFPTLWNADKRYKENYMSNYDGYYQTYDAGHIDDDGYIWIMSRTDDIINVAGHRLSTGAIEEVLSEHQSVAECAVLGIADKLKGQLPIGLVVLKSGVDKDNETISKECIQMVRAKIGPVAAFKVAIVIKRLPKTRSGKILRGTIRKIADNVEYKVPPTIDDPAILSEIKEDLIRNKILDG

SEQ ID NO: 163108 - protein, 128 aa, Unknown
  Bacterial polypetide isolated from the Sargasso Sea
KNLDIGISTSVGIGGDPINGSSFRDIIEKFETDEETDAVLMIGEIGGPQEVAAGEFAKVNMKKPVIAYIAGLTAPKGRVMGHAGAIVSAYGESAIEKVEILKECGITISKNPSVMGDTVSSVLKKINK

SEQ ID NO: 163109 - protein, 479 aa, Unknown
  Bacterial polypetide isolated from the Sargasso Sea
IDDSKAKIIISASCGYEPGRTVHYKPLLNKAIEIAKHKPEKCIIWQREKDKAELDPKKDIDWLDALKGAKPTECEKMNSNDYAYILYTSGTTGTPKGIVRDIGGHIVALKWTMKNIYNIDQDDVWWSASDIGWIVGHSYIVYAPLFYGCTTVLFEGKPVGTPDAGVFWRIISEHKVKSLFTAPTAIRAIKKEDPDGKFFKKYDLTKFDTLFLAGERADPDTIKWFEKLSNAPVIDHWWQTETSWAISANCAGIEKFPIKYGSAFKPVPGYDLKVLNSEGKENKAGQMGDIVVKLPLPPGTFPTLWNADERYKKVYMSTYDGYYQTYDAGHVDEDGYVWIMSRTDDIINVAGHRLSTGAIEEVLAEHKNVAECAVVGIADKLKGQLPIGLIALKAGVNRDNKEITKECVALVREKVGPVAAFKLAIVVKRLPKTRSGKVLRGTVRKIADGETYKVPPTIDDPAILDEIKKDLKDNNILKT

SEQ ID NO: 163110 - protein, 450 aa, Unknown
  Bacterial polypetide isolated from the Sargasso Sea
DGAIKLAKHKIEKVVFFQREGHEINLTAPLEISWDEALSNAKDKDCVEMGSNDFAYILYTSGTTGIPKGIVRDIGGHIVALKWTMKNIYNIDENDVWWSASDIGWIVGHSYIVYAPLFKGCTTVLFEGKPVGTPDAGVFWRIISDYKIKSLFTAPTAFRAIKKEDPEGKYFSKYDLSSFESLFLAGERADPDTIKWAENLLNVPVIDHWWQTETSWSISGNCTGIEMQKTKYGSACKPVPGYDVKIIKPDNTLAKPNEMGDIVVKLPLPPGTFPTLWNADQRYKENYMSNYQGYYQTYDAGHIDEDGYVWIMSRTDDIINVAGHRLSTGAIEEVLSEHQSVAECAVIGIKDQLKGQLPIGLIALKAGVTKENEIISKECIQMVRDKVGPVAAFKTVIVVKRLPKTRSGKILRGTVRKIADKEEYKMPATIDDPAILDEITENLVQNGIIK

SEQ ID NO: 163111 - protein, 456 aa, Unknown
  Bacterial polypetide isolated from the Sargasso Sea
YKPLVDEAIKLANHKIDKMILFQRPGHEVKLNAPNEVSWEEVVSNAKNTDCVEMNSNEFAYILYTSGTTGTPKGIVRDTGGHIVALKWTMKNIYNVDTNDIWWSASDIGWIVGHSYIVYAPLFKGCTTVLFEGKPVGTPDAGAFWKIISDYKVKSLFTAPTAFRAIKKEDPEGKFFSKYDLSNFESLFLAGERADPDTIKWAENLLKVPVIDHWWQTETSWAISSNCTGIEMMKTKYGSACKAVPGYDVKIIKPDQSLAKPNEMGDIVVKLPLPPGTFPTLWNADKRYKENYMTNYEGYYQTYDAGHIDEEGYIWIMSRTDDIINVAGHRLSTGAIEEVLSEHQSVAECAVLGIADKLKGQLPIGLVVLKSGVEKDNETISKECVQMVRDKIGPVAAFKVVIVIKRLPKTRSGKILRGTIRKIADKVEYKIPPTIDDPAILTEIKEDLFKNNILKD

SEQ ID NO: 163112 - protein, 387 aa, Unknown
  Bacterial polypetide isolated from the Sargasso Sea
GTPKGIVRDIGGHIVALKWTMKNIYNIDNDDIWWSASDIGWIVGHSYIVYAPLFKGCTTVLFEGKPVGTPDAGAFWKIISDYKVKSLFTAPTAFRAIKKEDPDGKFFSKYDLSSFKSLFLAGERADPDTIKWAENLLKVPVIDHWWQTETSWAISSNCTGIEMMETKYGSACKAVPGYDVKIIKPDQSLAKPNEMGDIVVKLPLPPGTFPTLWNADQRYKENYMSNYEGYYQTYDAGHIDDNGYIWIMSRTDDIINVAGHRLSTGAIEEVLSEHQSVAECAVLGIADKLKGQLPIGLVVLKSGVDKDNETISKECIKMVRDKIGPVAAFKVVIVIKRLPKTRSGKILRGTIRKIADKVEYKIPPTIDDPAILTEIKEDLIKNNILKD

SEQ ID NO: 163113 - protein, 90 aa, Unknown
  Bacterial polypetide isolated from the Sargasso Sea
KGEVIVAFVSLEKDVNGSLELVEDLKKHVVNEIGIIAKPEKIIISDSLPKTRSGKIMRRILRSLAAGEEISGDISTLEDSSVLEKLKELS

SEQ ID NO: 163114 - protein, 83 aa, Unknown
  Bacterial polypetide isolated from the Sargasso Sea
FVSLEKDVKSSSELVENLKKHVVNEIGIIAKPEKIIISDSLPKTRSGKIMRRILRSLAAGEKISGDISTLEDSSVLEKLKELS

SEQ ID NO: 163115 - protein, 68 aa, Unknown
  Bacterial polypetide isolated from the Sargasso Sea
LIKQLRAHVGTEIGPIARPDEIRCSDALPKTRSGKIMRRILRALAAGQEVSGDTSTLEDRSVLDRLRA

SEQ ID NO: 163116 - protein, 52 aa, Unknown
  Bacterial polypetide isolated from the Sargasso Sea
RRTGGKIDWHAGRDLWMHELTAGESRPSASRNGSAPSIRCSFLYTSGSTGKP

SEQ ID NO: 163117 - protein, 176 aa, Unknown
  Bacterial polypetide isolated from the Sargasso Sea
MAKRSKKKKRKSKSKKKKNFKRKKKKTLRRRKKKTLRRKKKKILSKKKGSKQTEDADGNIVFKVPPSWEKQAYVNQSQYTKKYKLSIKDNEGFWKKEGKRITWIKPYTKIKDVKYSKEDVSIKWYYDGTLNASANCIDRHLDKKGNKTAIIWVGDDSSDSKKITYKELHKKCCKAA

SEQ ID NO: 163118 - protein, 277 aa, Unknown
  Bacterial polypetide isolated from the Sargasso Sea
FEEATKKVLETDDLYQFSEYIYNGQIYKTFVNTPQTLHELLEYGKKTRQWDEFIVYENERITYFEFIDKVNSVAAFLQKELGVKKGDKVAIAMRNFPEYPILLMGIVSIGAIVVFVNAWWTTSEMEYGFNDSAAKICFADKERLNVILPFSNDRGIKLIGIRSEHGKNVLDYEKDVASYPSKNLRVPNIDPKDDFGIMYTSGSTGNPKGVVLTHRGAISAVFSWLMMEKIGSYVYPEKVAAKKPSSILLLSPLFHVNGSHPNFLYGIAKGSKITLMY

SEQ ID NO: 163119 - protein, 212 aa, Unknown
  Bacterial polypetide isolated from the Sargasso Sea
MDIQVVDESGNEVEPETKGSLVIKTPWPGMLLGLWKDEQKYKDVYWSKFESVYYPGDYAIKDSDGYLWLLGRSDDVLKVAGHRIGTAELESSIVSHNDVAESAVCGIPDDVKGESIIAFVVLKESAKDSDEKLRTDLRETIRTQIGPIATPSQFYIVNRLPKTRSGKIMRRLLKAIANNEKIGDVSTLEDGSAVSEIQSAFDELQKNVQNQQ

SEQ ID NO: 163120 - protein, 211 aa, Unknown
  Bacterial polypetide isolated from the Sargasso Sea
MIFKNNLLPKNLKEYNMLYKQSVDNSEVFWNDVAESFIWKNKWSKVVDFDFSKPSFKWFKDAKLNITENCLDRHVEDHPDKTAIIFEPNDPNQPAEHISYRELHIRVCKFSNVLKNNNIQKGDRVCIYLPMVPELAIAVLACARVGAIHSVVFAGFSSSALSARINDASCKMVLTSDGSFRGNKTIDLKSIVDEALKDCDCVDSVIVLSRI

SEQ ID NO: 163121 - protein, 257 aa, Unknown
  Bacterial polypetide isolated from the Sargasso Sea
ELSNISHFLMRPSPSRGHKPGTCVIHQREAVTATLIDGRDVEWQAAHDGAEELAPVTVKATDPLYILYTSGTTGQPKGVVRDNGGHAVALNWSMPNIYDTQPGEVYWAASDIGWVVGHSYITYAPLIAGCSSVLFEGKPIGTPDAGVFWRVIQDHRVKVLFTAPTAFRAIKRADPGGEYLQHYDTSSLEYLFLAGERADPDTIIWAQEKLGIPVIDHWWQTETGWSICANPMGVEALPVKPGSPSVAMPGFEIDILD

SEQ ID NO: 163122 - protein, 88 aa, Unknown
  Bacterial polypetide isolated from the Sargasso Sea
MDKISIKPDWKKDALIDESKYKSMYDDSINENDLFWSEQGKRISWIKPYTKIKDVKYSSSDVSIKWYYDGKLNASYNCIDRHVKNDPN

SEQ ID NO: 163123 - protein, 128 aa, Unknown
  Bacterial polypetide isolated from the Sargasso Sea
GHRIASSEVESICLSLEEVKEACAVSRNNEISGYKVILFISANLSDEIDKSLLKESIKKRIILKLSSYHLPEEIYFFDSLPKTRSGKIMRRIMRTLANGNVLDTSQDFSTLLNKKEFLDSVNKFNIEA

SEQ ID NO: 163124 - protein, 192 aa, Unknown
  Bacterial polypetide isolated from the Sargasso Sea
MPKKKKKSKSLKKRKKNSKPKRRKKFTKSKKAKKLEGPKEIVYKVKNDWIKKSTINKSQYEKKYKQSLKDNEGFWKKEGKRITWIKPYSKIKDVKYSKSDVHIRWYYDGTLNASANCIDRHLKRNRDKTAIIWVGDDPKVQKKITYKQLHQEVSRAANGLKELGVKKGDRVTIYLTMIPELAYTMLACARIG

SEQ ID NO: 163125 - protein, 48 aa, Unknown
  Bacterial polypetide isolated from the Sargasso Sea
EIIDKYSVNIFYTAPTAIRALRGAGDEYVKGTDRSSWRLLGTVGEPIN

SEQ ID NO: 163126 - protein, 135 aa, Unknown
  Bacterial polypetide isolated from the Sargasso Sea
MDYHSIYKSWQADPESFWMEAAGGIDWDKKPTFALNESNEPLFEWYTDSYVNTCFNAVDRHVEKGQGDQTAIIYDSPITGKKQHISYAQLLEKTSLLAGSLLKKGITKGDRVIIYMPMVPEAIVAMLACARMEQS

SEQ ID NO: 163127 - protein, 24 aa, Unknown
  Bacterial polypetide isolated from the Sargasso Sea
AEIESAFVAHPKVAEAAVVVTHTT

SEQ ID NO: 163128 - protein, 292 aa, Unknown
  Bacterial polypetide isolated from the Sargasso Sea
EGCVSYEEISNTKDLDWPEDNATDEDLTVLLYTSGSTGLPKGVMLTHLAIINALFSFYTLGELRKIVHEEQLLIVENASVLINVPLFHVTGLITQFLLSMLAKRKIIIMKKWDASYALDLIQQHKVTNLSGVPTQSWDLMNHSNVDDYDLSSLIDIGAGGAARPEDQVFNLHEKFNIPMTFAWGMTETSALGTILRGDDYLKRPNSAGLIVPDITEIGIMDDDNNFLQTNAVGEIVFKSPSNTIGYLKNEEETRKTIVNGWLKTGDLGYLDEDGYLFILDRKKALIIRGGEN

SEQ ID NO: 163129 - protein, 184 aa, Unknown
  Bacterial polypetide isolated from the Sargasso Sea
MPKKKKRKKIKKKKSKKRKVKIIKKRLKKVNSKKIHNTELIYKPKSDWIKKAIVNKSAYEKKYSESLKNNDNFWKKEGKRITWIKPYTKIKDYKYSKTDVNIKWFYDGTLNASANCIDRHLKKNKDKTAIIWVGDDPKVQKKISYKQLHQEVSKAANGLKEIGVKKGDRVTIYLTMIPELAYTM

SEQ ID NO: 163130 - protein, 123 aa, Unknown
  Bacterial polypetide isolated from the Sargasso Sea
KYKLSIKHNEGFWAKEGKRITWIKPYTKIKDVKYSKEEVSIKWYYDGTLNASANCIDRHLDKKGNKTAIIWVGDDPSDSKKISYKELHKNVCKAANGLKSIGIQKGDRVTIYLTMIPELAYTM

SEQ ID NO: 163131 - protein, 304 aa, Unknown
  Bacterial polypetide isolated from the Sargasso Sea
TVSENDWAYILYTSGSTGKPKGVLAPHRCYHGRLMWMWQTFPLEVGEVGIHKTAATWVDHIQEIFGYLGGGATVVTANESARKDVRILTSLCHQYEVSRIVLMPSLLRLIVDMYGKQLAEDLPKLRCVISSGEPLPVELVKDFISNASSRTTLVNAYGSTEIAGDVTWAAFTASHMPEPGSSGFATVGTPMRGVQLHVLDPDKLVPVGAGEVGEIFVAGDFVAEGYLNRESEQDLCFLKIPSLNPDCMGGMRGWNPERVFRTGDFGRFDGEFLYLQGRKDQQVKVHGQRIEVLQCRARPPRESL

SEQ ID NO: 163132 - protein, 46 aa, Unknown
  Bacterial polypetide isolated from the Sargasso Sea
SDSLPKTRSGKIMRRILRSLAEGEKISGDISTLEDSSVLEKLKEIS

SEQ ID NO: 163133 - protein, 154 aa, Unknown
  Bacterial polypetide isolated from the Sargasso Sea
MIYKTKKEWTRQSLVNKKEYEKKYNQSIKDNDGFWRKEGKRINWIKPYTKIKDVKYSKTDVHIKWYYDGTLNASANCIDRHLKKNKNKTAIIWVGDDPKVQKKISYKQLHQEVSKAANGLKSLGIKKGDRVTIYLTMIPELAYTMLACARIGAI

SEQ ID NO: 163134 - protein, 204 aa, Unknown
  Bacterial polypetide isolated from the Sargasso Sea
MAKRRRKKKRRNKTKKRSKKRRRKSQKKIKGSKKKSSKETLDSDGNFVFKVSENWAKQAYVNKSQYEKKYKLSLKDNEGFWNKEGKRITWIKSYTKVKDVKYSKQEVNIKWYYDGTLNASANCIDRHLEKKGNKTAIIWIGDDPSDSKKITYKELYKNVSKAANGLRSIGVQKGDRVTIYLTMIPELAYIMLACARIGAVHSII

SEQ ID NO: 163135 - protein, 73 aa, Unknown
  Bacterial polypetide isolated from the Sargasso Sea
IYLGMTPEIVVSMLACARFGAVHSVVFGGFSAEALADRINDAEAKVVITADRRMEKRRNCSSKGERRQLIRTN

SEQ ID NO: 163136 - protein, 89 aa, Unknown
  Bacterial polypetide isolated from the Sargasso Sea
YAFVTLMVGEEFSDELSAELRNFVGKEIGPIAKPDLIQNAPGLPKTRSGKIMRRILRKVAEGDFENLGDTTTLAEPAVVSDLINNKKSL

SEQ ID NO: 163137 - protein, 192 aa, Unknown
  Bacterial polypetide isolated from the Sargasso Sea
MAKRTKKKKRKSKLNKKKKNRRKKKRTLKSKKKRGSSRKNNSKQIKDADGNLVFKVPQKWEKQAYVDQKQYTNKYKLSIKDNENFWAKEGKRISWIKPYSKIKDVKYSKEEVSIKWYYDGTLNASSNCIDRHLQKRGNKTAIIWVGDDPSDSKKITYKELHKNVCKAANGLKSIGIQKGDRVTIYLTMISRA

SEQ ID NO: 163138 - protein, 277 aa, Unknown
  Bacterial polypetide isolated from the Sargasso Sea
AILAANSLEFLITYLGIMRAGMVAVPINHKFPMETIEFILSDADCKLIFADDARRHQIPVGYKFIVFDTNGSNEFCDFLDYGHYETIRPADDEVAMFLYTSGSTGRPKGVPLTHKGHLWVIEMRLKQRPESDHRMLVAAPLYHMNGLAICKVAFAGHLGIVLLPQFDAKEYISAIEKYKVTWLTSVAAMMAMVVREGDLLSTTNLSSVRIVRMGSAPVSEQLVRDIKRTLPNAKITNGYGTTEAGPVVYGQHPEGLAQPDISVGYPIANIARLVDGN

SEQ ID NO: 163139 - protein, 265 aa, Unknown
  Bacterial polypetide isolated from the Sargasso Sea
EFNLTYKKTLDFIYKLNDYFFNNKIKKKEKIIVIFDNSILLSLLFLGITSTNRVFVPVNPEIGKYEFLNILKTSGAKILIIDEIYKKKFSKLFKKKSIYIKNHLEFVDDILTRKNKKFDKSFSGLCEILYTSGSTGNPKGVMLTHQSILANINGLEKILNLKKFKNFLAITPLFHNNGQFIPTLLSIKTFGTSLPVNSKTSVIIFWDLVKEFKINYSSVMATHISYLLKTSKKVRDHNLDGLFCGGAKLDKNIQKKFEKKFAVKI

SEQ ID NO: 163140 - protein, 46 aa, Unknown
  Bacterial polypetide isolated from the Sargasso Sea
GPLACGGTQVVFEGVPTYPDAGRFWKMIGDHKVTVFYTAPTAIRSL

SEQ ID NO: 163141 - protein, 163 aa, Unknown
  Bacterial polypetide isolated from the Sargasso Sea
NKYYPGDYAICDSDGYFWLLGRSDDVLKVAGHRIGTAELESSLVSHDYVAESAVCSIPDEIKGESIIAFVVLNDGIEITQEKIVNELRNTVRNSVGAIAIPQEFYIVSKLPKTRSGKIMRRLLKAIANKEKVGDVSTLEDGAAVTEVQSAFDEIQKSVNISDR

SEQ ID NO: 163142 - protein, 63 aa, Unknown
  Bacterial polypetide isolated from the Sargasso Sea
SKTIGPIAKPEKIQIVPGLPKTRSGKIMRRILRKIASGEKKNFGDISTLLNPEVVEQILKNSI

SEQ ID NO: 163143 - protein, 122 aa, Unknown
  Bacterial polypetide isolated from the Sargasso Sea
MSKRKKKKRKKNIKKRKKKIKKKITSRKKDTQQTTDSDGNIVYKVSEKWSKQAYANKSQYEKKYKLSIRENENFWKKEGKRITWIKPYTKIKDVKYSKEKVSIKWYYDGTLNASANCIDRHL

SEQ ID NO: 163144 - protein, 38 aa, Unknown
  Bacterial polypetide isolated from the Sargasso Sea
MRRILRKIAESDVESIGDTSTLADPSVVDDLISNRPAN

SEQ ID NO: 163145 - protein, 47 aa, Unknown
  Bacterial polypetide isolated from the Sargasso Sea
SSKTRSGKIMRRILRKIAANEQDQLGDTTTLADPSVVDSLVENRKNI

SEQ ID NO: 163146 - protein, 230 aa, Unknown
  Bacterial polypetide isolated from the Sargasso Sea
MAKRPKKKKKPIKKKRVKRLKKKRRKTLKSRSSKKHNKIKKTNSESDEKIYKTKSEWIKKALVTKNLYQKKYNQSIKDNEGFWRKEGKRINWIKPYTKIKDVKYSKSDVHIKWFYDGTLNASANCIDRHLKNNKDKTAIIWVGDDPKVQKKISYKQLHTEVCKIANGLKSIGVKRGDRVTIYLTMIPELAYTMLACARIGAIHSIIFGGFSPDSIAGRFNDCNSDYIVTA

SEQ ID NO: 163147 - protein, 75 aa, Unknown
  Bacterial polypetide isolated from the Sargasso Sea
ALEQELTKFVSKEIGPIAKPDLIQNAPGLPKTRSGKIMRRILRKIAEGDFDNLGDTTTLAEPAVVASLLENSKKL

SEQ ID NO: 163148 - protein, 180 aa, Unknown
  Bacterial polypetide isolated from the Sargasso Sea
MPSHAFSSLLTPSLALSSPPTPSHAFPRPRAQSEPVMPVKDPTSDMAVFSKKGSQLMRDVRERRERERATKEKFNMAGTVIGNILGVKEEKVEEGTGQRTDVQDDAYSSALKADAAGAGDDDDEGGEGGDYKKDSMYAHGEAQTAFHGLPWPSMAFHGLTCPSMGFHGLPWPSMPFDGLL

SEQ ID NO: 163149 - protein, 183 aa, Unknown
  Bacterial polypetide isolated from the Sargasso Sea
MPKKKAKVKKKKSIKRKKNFKKKSDQNIEKELIYKTKKDWISKATVNKSQYEKKYKSSLSDNDAFWKKEGKRISWIKPYTKIKDVKYSNSDVRIKWFYDGTLNASTNCIDRHLKKNKDKTAIIWVGDDPKIQKKITYKELHKEVSKAANGLKEIGVKKGDRVTIYLTMIPELAYTMLACARIG

SEQ ID NO: 163150 - protein, 25 aa, Unknown
  Bacterial polypetide isolated from the Sargasso Sea
MRTVYGDHQRFIDTYFSHLMKIFYR

SEQ ID NO: 163151 - protein, 160 aa, Unknown
  Bacterial polypetide isolated from the Sargasso Sea
MNEIDPSILTRRSLRSLNSGLRGNKVVPLKSIVDEALSLVAPEERSVEAVLVVDRLKAWTAPSSPLRAVAGAAAKASGSLKSDSCFSGEDGDSSLLNGRPQKHRDVPYSEAVAKASPVCEPTSVDSEDPLFILYTSGSTGKPKGVLHTSAGYLLGASMTH

SEQ ID NO: 163152 - protein, 243 aa, Unknown
  Bacterial polypetide isolated from the Sargasso Sea
MAKKKKRKKLRKKRVKKFKKRKTKKTKKKIKKTKRIRKNKKIKNSKSSELVFKVPKKWANKAYVDKKEYERKYKLSIKDNEGFWKKEGKRIDWIKPYKKIKDVKYSKTDVKIKWFYDGTLNASANCIDRHLKDKKNKTAIIWVGDDPKDSKHISFKELHKNVCKAANGLKNIGIKKGDRVTIYLTMIPELAYVMLACARIGAIHSIIFGGFSPDSIAGRINDCPSDYIITADESIRGGKTIPL

SEQ ID NO: 163153 - protein, 71 aa, Unknown
  Bacterial polypetide isolated from the Sargasso Sea
EHQIGPIATPRQFYIVNRLPKTRSGKIMRRLLKAIANNEKIGDVSTLEDGAAVSEIQSAFDELQKNVRNQQ

SEQ ID NO: 163154 - protein, 268 aa, Unknown
  Bacterial polypetide isolated from the Sargasso Sea
IVECDQDDIAMFLYTSGSTGRPKGVPLSHYGHLWVIEMRSKGGDIASHRLLVAAPLYHMNALAIAKAALLGHATIILLPQFTTDGYVKAIEHFQCTWLTSVPTMMALVTKDTALVEATDVSSVKIVRMGSAPATQRLFDDIRKAFPGAAISYGYGTTEAGPVCFGPHPGGLPTPDLSIGYPVAEVRMRLVQGDNLDADEGELQMDCPAKTPGYHKLPEKTAEVMTADGYYKTGDIIRRDANGFHYFVDRVDDMFVCNGENVFPVEVER

SEQ ID NO: 163155 - protein, 218 aa, Unknown
  Bacterial polypetide isolated from the Sargasso Sea
MTPRNLGNLIDRNTDPERVVVIDIKDPANPFILKCGTLVARIDAVARSITARGFEKGDAVAILSANSADYLCAYFGVMRAGLVAVPLSYKFPVETIRYMLADCGAKLVIADKDRAQYCPEEIPIIQFDDEGSNGFETFLNTGSFDCVETNGNDIAMILYTSGSTGRPKGVPLTHAGQLWVINNIIGDGSSFKHHRFLVAAPLFHMNGLFMSKVVAASP

SEQ ID NO: 163156 - protein, 119 aa, Unknown
  Bacterial polypetide isolated from the Sargasso Sea
MEILKDWVNNAKVNYDEYTKLYNESIVNNENFWSKEGKRIDWIKDYTKIKNIKYSKNEVNIKWFHDGTLNVSYNCIDRHAKETPERIAIIWEGDNPNDVKKITYKELLKNVSKAANVLK

SEQ ID NO: 163157 - protein, 87 aa, Unknown
  Bacterial polypetide isolated from the Sargasso Sea
VTLMSGETPTEELRLELRNWVRTEIGPIASPDLIQWAPGLPKTRSGKIMRRILRKIAENDYGSLGDTSTLAEPAVVDDLIINRMNET

SEQ ID NO: 163158 - protein, 36 aa, Unknown
  Bacterial polypetide isolated from the Sargasso Sea
YKKIKNVKYSKSEVSIKWYYDGTLNASANCIDRHLK

SEQ ID NO: 163159 - protein, 36 aa, Unknown
  Bacterial polypetide isolated from the Sargasso Sea
DGILNASVNCIDRHLSKKANETAIIGSLMIQMLIRK

SEQ ID NO: 163160 - protein, 51 aa, Unknown
  Bacterial polypetide isolated from the Sargasso Sea
RTWFAKTRSGKIMRRILRKIAANEPDNLGDTTTLADPSVVTSLVENRQNKG

SEQ ID NO: 163161 - protein, 201 aa, Unknown
  Bacterial polypetide isolated from the Sargasso Sea
MLPATGNLGDLTNRSLDQNKTALIDASDFENPISLSHGDLDRRANAVARALVARGYARGDRIAILAANSANFLATYLGTMRAGMISVPVNWRFPSETIAYILSDCDAKFIFVDEIRRDAVPDGLPMVQFGTDFETFLDPGPFDIVNCDQDDIAMFLYTSGSTGRPKGVPLSHYGHLWVIAMRSKGGDIASHRLLVAAPLYH

SEQ ID NO: 163162 - protein, 70 aa, Unknown
  Bacterial polypetide isolated from the Sargasso Sea
LEEDLKKHVVNEIGIIAKPEKIIISDSLPKTRSGKIMRRILRSLAAGERISGDISTLEDSSVLETLKESS

SEQ ID NO: 163163 - protein, 86 aa, Unknown
  Bacterial polypetide isolated from the Sargasso Sea
VTLMKGEDFNDALEQELTKFVSKEIGPIAKPDLIQNAPGLPKTRSGKIMRRILRKIAEGDFDNLGDTTTLAEPAVVASLLENSKKL

SEQ ID NO: 163164 - protein, 271 aa, Unknown
  Bacterial polypetide isolated from the Sargasso Sea
MPKKKKKRKVKKKSLKKRKFKKSSKKKRKSRKKRIKKNKSKIKSKESGEKFYKTKSEWIKNAYVNKSVYEKKYKESLRNNNEFWSKEGKRITWIKPYTKIKDVTYSSTDVNIKWYYDGTLNASANCIDRHLKKNKDKTAIIWVGDDPKVQKKISYKQLHDEVSKAANGLKKLGVQKGDRVTIYLTMIPELAYTMLACARIGAIHSIIFGGFSADSIADRVNNCRSDYIVTADEGIRGGKTIHLKSITDEALIHCPNVKKCIVVKRTGNRIN

SEQ ID NO: 163165 - protein, 104 aa, Unknown
  Bacterial polypetide isolated from the Sargasso Sea
GSWRPDDTTGQAIVGYCILRGGNEPSDELREEIRQHVATKLGAIARPKAVVLVPDLPKTRSGKIMRRLLRDVAEGRKLGDTTTLADESVVDEIRDRAAEAPQED

SEQ ID NO: 163166 - protein, 63 aa, Unknown
  Bacterial polypetide isolated from the Sargasso Sea
DPSKVKKISYQELQTKVCKMANVLKKIGVKKGDRVTIYLTMIPELAYVMLACARIGAIHSIIF

SEQ ID NO: 163167 - protein, 228 aa, Unknown
  Bacterial polypetide isolated from the Sargasso Sea
MRSIGVKKGDRVVGIVTNNAETLISFLAVNSIGAVWSSCSPDFGEQAILDRFSQIEPKILFYSSSYMYGGKKFKILEKIKNVESKLNTLEVSICIDYSQKDKSFIDEKLNFFEENNRELSELSFERCQFNDPMYILYSSGTTGKPKCIVHNTGGPLIQHLKEQQLHCEICENDKLFYFTTCGWMMWNWLISGLASKATVVLYEGSPFFPHQDSLFKVAEEEEITCFGT

SEQ ID NO: 163168 - protein, 306 aa, Unknown
  Bacterial polypetide isolated from the Sargasso Sea
KAFQKKLSSTKEFSYDLLYKWSLDNIEEFWNLVWDDANIIGAKGKSIINDYNDLIKSKFFPKGHLNFAENLLVGEDHREAIIFYGEGKEKKSLSLKELKSKVEVLAKWLIKNGVKKGDRVAVLATNSPETIISMLATAAVGGIFTSCSPDFGEEGIIDRFGQCNPKIFITTDGYIYGGKKYDISDKANNISNRISSIEQTIHIRYIDETGLKYNNDWHEILSEKNNDKFEFVKFSFNDPLYILYSSGTTGKPKCIVHSAGGTLIQHIKEHKYHCDMKENDRIMYFTTCGWMMWNWMVTALASKVTL

SEQ ID NO: 163169 - protein, 191 aa, Unknown
  Bacterial polypetide isolated from the Sargasso Sea
MPKKKKIRKKVISKKPKETVYKTKKEWISKATVNKSQYIKKYNESIKDNDGFWKKEGKRINWIKPYKKIKDVKYSKDDVHIKWFYDGTLNASANCIDRHLKKNANKTAIIWVGDDAKVQKKITYKELHKEVSKAANGLKNLGVQRGDRVTIYLTMIPELAYTMLACARIGAVHSIIFGGFSPDSISGRIND

SEQ ID NO: 163170 - protein, 123 aa, Unknown
  Bacterial polypetide isolated from the Sargasso Sea
ESSIVSHNDVAESAVCGIPDEVKGESIIAFVVLKESAHSSDEKLRTELREIIRTQIGPIATPNQFYIVNRLPKTRSGKIMRRLLKAIANNEKIGDVSTLEDGAAVSEIQSAFDELQKNVQNQQ

SEQ ID NO: 163171 - protein, 68 aa, Unknown
  Bacterial polypetide isolated from the Sargasso Sea
KHVRGEIGSFASPDIVQWASGLPKTRSGKIMRRILRKIAINEIDNLGDTSTLAEPEVVNNLIENRENK

SEQ ID NO: 163172 - protein, 72 aa, Unknown
  Bacterial polypetide isolated from the Sargasso Sea
APPAALEQAATISGMPAYRALAAEAENDYEGFWARLAREGLAWHKPFTKVLDESNAPFYKWFDDGELNASYN

SEQ ID NO: 163173 - protein, 228 aa, Unknown
  Bacterial polypetide isolated from the Sargasso Sea
MIIQELDPVYIISERDLSEITEGKTINFSHHKDLKIADEEINKYQLEVTYLNPTNREDLSVILYTSGSTGVPKGVMLSNQNTLLTIGNIIEFCKFHSTSFELVTLPLTHSFGLGQIYSMLFSGGSAFIEMGMLRMKRIFQAMDEYTITGFPTTPKGVDLILSRYSEIFRSKGRDLTGMIINSAPLSPHQTKELQSLLPHINIYVYYGLTEGSRSTFVCLSNLKEELHT

SEQ ID NO: 163174 - protein, 222 aa, Unknown
  Bacterial polypetide isolated from the Sargasso Sea
MSKLFNLGDLIDRSADSSKLALIDLSRVGKPKKYTHKEIDQMVMAVARGLSNLKLDRGDRIAILAANSLEFITTYLGIMRAGMVAVPINHKFPMDTIEFILSDADCKVVFADEARCLQIPEGYKFFIFDSDAGSKFGKFLDYGEFETVMPSEDEVAMFLYTSGSTGRPKGVPLTHKGHLWVIEMRLKQKPEPDHRMLVAAPLYHMNGLAICKVALAGHLSIV

SEQ ID NO: 163175 - protein, 266 aa, Unknown
  Bacterial polypetide isolated from the Sargasso Sea
LLPRGFLQVVAVLGVLKAGGAYVPLDDTYPRLRIASIGEDCGMKVCVSTCAGGLWQKAADFGAFAVEDVNLDALGTSGNCGRLENVGVGTKNLCYVLYTSGSTGKPKGVEVAHRSVSNFGQLILFDSVFFGSFRRHCVLCVSRLSWDMSVRSMIQSWGLTGVLCLVPVALSTHMSMNLNMLMQKMEITSLDCPPGLLSGLDEMSSLRIVWAGGDILPPKIIQRLLDHGVKVRNSYGPTEATVDATHHAVTGSDPSLINGTPVSIGG

SEQ ID NO: 163176 - protein, 157 aa, Unknown
  Bacterial polypetide isolated from the Sargasso Sea
DVFFWTNTTNWTAGYLSGNTSSDTRPFRISSYAIIDSLLHQIALNNPMLEQIVFAGFSAGGQFVNRYIGGNNITEFLFSEFSVPIRFIIGSPSSYLYMNNERRVAGSTDQFNIPSGCSGYNEYKYGLDDLNSYMSLAGVDSIRSRYERRNVVYLVGS

SEQ ID NO: 163177 - protein, 106 aa, Unknown
  Bacterial polypetide isolated from the Sargasso Sea
MLYEKLMSAWKACDISSWRSCYHEDYTFVSHANGTTMSAADMSDEIMLGMMQTTTLEKQRCIYEDENILVEHSFATFGSGAREAVLAVHTKKDGLIWQTETGATPI

SEQ ID NO: 163178 - protein, 479 aa, Unknown
  Bacterial polypetide isolated from the Sargasso Sea
MGSYLQNDLGVKKGDRIAVAMRNYPEYTVLFMAIVSIGAVIVFVNGWWTTEEMEYGFDDSGAHICFADRERIEVIKPFADKKNVKLISVRAEEINNILSYGKILKNAKNRDIKVNIYTDDDCAVMYTSGSTGHPKGVVLTHRGAISATFSWLMAERVGGLLADQEKLETRRPSSILNASPLFHVNGTHPNFLYSIARGSKIILMYKWDPKEAVDIIERESVTRITAVPTVVADLVAEASTQNKSLETLEFLGAGGAKRPPPQVGVEKKALPSTDIASGYGMTETNALGIGIAGDEYLDNPELAGRLYPPIQEIKIVDEKGKEVNYGELGEIALKSPANMRCYLNKPDATRDVLRDGWMHTGDLATLNSSGFVVIRDRKKNIIIRGGENISCLEVEGAIQKHPDIVESIVFPVPSNRFGEEVGVCIHAKDDHSLSNVSIIEFLKDKLAKFKIPVHFWWINKSLPRGATDKLDRILTKNYV

SEQ ID NO: 163179 - protein, 211 aa, Unknown
  Bacterial polypetide isolated from the Sargasso Sea
MPKKKKKKKKSVKKIKKKIDNNEIIFKTKKDWVSKATVNNKEYQKKYKQSIKDNDGFWKKEGKRIDWIKPYTKIKDVKYSKSDVHIKWFYDGVLNASANCIDRHLKKNKNKNAIIWVGDDPKIQKKITYKQLHQEVSKTANALKDVGVQKGDRVTIYMTMIPELAYTMLACARIGAIHSIIFGGFSPDSIAGRINDCKSDYVVTADEGIRG

SEQ ID NO: 163180 - protein, 203 aa, Unknown
  Bacterial polypetide isolated from the Sargasso Sea
MAKRSKKKKSKKRGKKLFKKRKLNSKKKKSLKKRKIIRKKVSKETKDVDGNLVFKVPEKWSKQAYVNKSQYEKKYKFSIKNNEDFWAKEGKRINWIKPYTKIKDVKYSKEDVHIKWYYDGTLNASANCIDRHLEKKSNKPAIIWVGDDPSDSKKISYKELHKNVCKVANGLRSLGIQKGDRVTIYLTMIPELAYTMLACTRIG

SEQ ID NO: 163181 - protein, 153 aa, Unknown
  Bacterial polypetide isolated from the Sargasso Sea
MTTNDGGIDALLQEDRTFPPSKDFVSNANISDPDIYDKAKADPESFWAGFAKELDWFQGWDQVLDWKAPDAKWFINGKLNASYNCVDRHAKSEKRNKAALIWEGEPGDWKVYTYWDLLREVSKCANALKSLGVHKGDRVTIYLPMVPELVISM

SEQ ID NO: 163182 - protein, 322 aa, Unknown
  Bacterial polypetide isolated from the Sargasso Sea
MKNIAVVFGGFSSEYEVSVKSGKFIYENLKDNHSLNVYQICISKETNYVIYDNNKYDLDYTNLSFNINGKKINLDGIFNIIHGEPGENGDLANILEKNNIPQTGCNSFVSDLTFDKKKYIDFVNKLDIPSSKHILLTSENQYDLKKIMSEINIPCIVKPNNGGSSIGVSKVNHINDLENKIKIAFKECNEVLIEDFLFGKEVSVGVIQKKDKRIILPVTEIISENELFDYEAKYLGQSTEITPANISNEEKNLIQKYINIIYDNIEFNGFTRSEFIIVDGIPHILETNTIPGFTKQSIIPQQIEALGLSVKDEINYQIESIL

SEQ ID NO: 163183 - protein, 358 aa, Unknown
  Bacterial polypetide isolated from the Sargasso Sea
MWQASEKRRKQSNLVKYHSYLKKSYSINFDYEYDSLFNWSIAKPNLFWTSLLSYLDISYSGNENPAISESENIYDKKFFPNLKLSYSENIINNLNSIPILYVNEIGFKKYYSKEEVIHKVNLVAKYLRSIGVKKGDRVVGIVTNNAETLISFLAVNSIGAVWSSCSPDFGEQAILDRFSQIEPKILFYSSSYMYGGKKFEILEKIKNIESKLNTLEVSICIDYSQKDKSFFDEKLNFFEENNKELNELSFERCQFNDPMYILYSSGTTGKPKCIVHNTGGPLIQHLKEQQLHCEISEKDKLFYFTTCGWMMWNWLISGLASKATVVLYEGSPFFPHQDSLFKVAEEEEITCFGTSAKV

SEQ ID NO: 163184 - protein, 557 aa, Unknown
  Bacterial polypetide isolated from the Sargasso Sea
MPETKITTKTNLEAAFAELREANPLFDLENRTLLNGVEYKVFKSAPKTMRDLLEAIPLLHGDFPVLLDQGQQLTYAETIAKAKNLANYLTEQGIRPGDRVGICMQNCSEWIIAHLAISGHGATSVPLNSWWHKEELTYGVEHSEIKIIFVDEKRYEFIKDLPVEKIITGSNQIDGCVNFSTTIEGNIDTWPEQNANDEDVNVILYTSGSTGMPKGVMLTHLSVINALFGFYTFGELRGIIHQEELLDMENASILLNVPLFHVTGLITQFLLSMLAKRNIILMRKWDATEALELIAQHKVTNLSGVPAQSWDLLNHPDVDNYDLSSLTDIAAGGAARPEEQVISLNKKFNIPQSFAWGMTETTAIGTLLRGNDYLHRPNSAGLCVPDLTDIRIVDDDWNFLDTGQIGEMVFKSPTNTIGYLKNPEETEKTFKDGWLKTGDLGYLDEDGYIFIVDRKKALIIRGGENISCLEVENALDKYKGIVESCVCGIYDEKFGEVVGAYIYTEDQLDIESIKEFLSTYLANYKVPEIFKFTNKPLPRIASEKLDRVGIKELLSND

SEQ ID NO: 163185 - protein, 35 aa, Unknown
  Bacterial polypetide isolated from the Sargasso Sea
MGVPVIDHWWQTETGWTIVGNPMGIEQLPIKVGSP

SEQ ID NO: 163186 - protein, 79 aa, Unknown
  Bacterial polypetide isolated from the Sargasso Sea
LKGESIKAYVTLMLNITESPEVESELKTHVRNVLSPIAVPSAIDFLPVLPKTRSGKIMRRLLKAQELGLDPGDITTLEE

SEQ ID NO: 163187 - protein, 234 aa, Unknown
  Bacterial polypetide isolated from the Sargasso Sea
MNLKEIYEKSIKKPDEFWREVANDIFWFKKPTKILNSDNPPFYKWYEDGVTNTCYNALDLHIQNGLGDKTALIYDSPITGNKSKFTFKELKNKVSKFAGALKNQGIARGDRVVIYMPMVPEAVIAMLACGRIGAVHSVVFGGFASNELASRIDDSKAKILITASCGFEPGRTVEYRPLVDGALKLAKHKLDKVIFYQRKDHEIKLNAPLEISWDESLQNAKDTDCVEMKSNDYA

SEQ ID NO: 163188 - protein, 396 aa, Unknown
  Bacterial polypetide isolated from the Sargasso Sea
MPRLLWSPSNERVKKTNLYNYFIFLEEKNKIQLSFDYSKIWSWSINHPVEFWLSLIDYLGIKYKGSSNPVIEKNKFIYNQEFFKNIKVNYAENILSNLNSCPITFINELGFKKNYYKEDLVSKTSTLANYFRSIGVKKGDRIAAVAVNSAETLIAFLAVNSIGAIWSSCSPDFGEIAILDRFNQIKPKVLLYSKIYLYGGKKFDIEKKIKNVINNIKTLEHTICINYPDKKLDKGIDEVSLNSIFQKKTYQGKIIFEENSFNDPMYILYSSGTTGKPKCIVHNTGGPLLQHVKEQQLHCDLKIGDKLFYYTTCGWMMWNWLITGLASGVSLVLYDGSPFYPEKETLFKIAEEEEITCFGTSAKFIDALRNDKVNILEKYKLDKLQSILSTGSPTYK

SEQ ID NO: 163189 - protein, 122 aa, Unknown
  Bacterial polypetide isolated from the Sargasso Sea
MNQKFSEIYSNSIKNPDEFWKNVSEDMFWFKKPTKILNRSNHPFYKWYEDGTTNTCYNALDIHVDNDRGERAALIYDSPITGNKKKFTYKELKEKVSKFAGALKNQGIKKGDRVIIYMPMIP

SEQ ID NO: 163190 - protein, 557 aa, Unknown
  Bacterial polypetide isolated from the Sargasso Sea
MPETKITTETNLKAAFAELRKANPLFELENRKLVNGIEYNVFKSAPKTLRDLFDVIHLLHGDFPVLLDEGIQLSYLETMAKAKNLAHYLTGRGIKPGDRVGICMQNCSEWIIAHLAISAHGATSVPLNSWWREEELKYGVEHSEVKIIFLDTKRYEFIKDLPVEKVIVGDEQIDGCTNFSSTVEGSYDSWPELNATEEDVNVILYTSGSTGMPKGVMLSHLSVINALFGFYTFGELRGLIHQEELLDVENASILLNVPLFHVTGLITQFLLSMLAKRNIILMRKWDATEALELITKHKVTNLSGVPAQSWDLLNHPEVDNYDLSSLTDIAAGGAARPEEQVVNLDKKFNIPQSFAWGMTETTAIGTLLRGNDYLERPNSAGLCVPDLTEIKIIDEKWNFLKAGQIGEMVFKSPTNTIGYLKNPEETNNTIKDGWLKTGDLGYLDSEGYIFIVDRKKALIIRGGENISCLEVENALDKYNGIIESCVCGIYDEKFGEIVGAYIYVEEELDTESIKDFLSKYLANYKVPEIFIFTDKPLPRIASEKLDRVGIKELLSRK

SEQ ID NO: 163191 - protein, 263 aa, Unknown
  Bacterial polypetide isolated from the Sargasso Sea
MLALNISVLSNIIFAQVNIGSNRFFIYEENDSLSLPYYSNYSLNEYNNHTKLAIIYLHGASRNADDYYNNIFAIVNATGNIDSTIIIAPQFLRSQDLSDDNLTDDVFFWTNTTNWTAGYLSGNTSSDTRPFRISSYAIIDSLLHQLALNNPMLEQIVFAGFSAGGQFVNRYIGGNNITEFLFSEFSVPIRFIIGSPSSYLYMNNERRVAGSTDQFDIPSGCNGYNEYKYGLDDLNSYMSLAGVDSIRSRYKRRNVVYLVGSSD

SEQ ID NO: 163192 - protein, 69 aa, Unknown
  Bacterial polypetide isolated from the Sargasso Sea
QQVLREWVSEQVGAIAKPDEIRFSDNLPKTRSGKIMRRLLRAIAREEAITQDISTLEDESIIRQLQGEE

SEQ ID NO: 163193 - protein, 458 aa, Unknown
  Bacterial polypetide isolated from the Sargasso Sea
MYSHLFSEIRVGSRTLKNRVALPATLTNYGRGNQITEHWKNFLIERAKGGVGLIISEIIAVDPEALAQQAIVTGFDDTNEVGFRETSEAVHKEGALLVGQLWHPGRQQLWHPTKAPMGVSEQPDALSWTVPHVMSVDAVQRIIQAYVNTAKRLHKCGFAGVELHGAHGYLIGQFLSPWSNKRDDRYGGEVTGRARFVTEIAAGIRASCSPDFIIGLKMPGDEGVRGGIDSEEALAITSNLVRTKNFDYFSYGQGNFSLSLENHVPDIHFKPGHFLNIHKKMREAARGVPVMALGRVDSPELAERVIAEGYGDIVGTSRTLIADPAWPQKAFKGRSKLIRPSVFDNWCWGEVHQGKPLQEHHNPYLGEVGEAFAEDRLPPARNPRGIVVIGGGPGGLETAWVAAARGHQVSLYNGSSALGGKLRRDAALPGRCEILKIIEYQTHMEDLYGVDVRLGKFA

SEQ ID NO: 163194 - protein, 65 aa, Unknown
  Bacterial polypetide isolated from the Sargasso Sea
REWVGEQVGAIAKPDEIRFSDNLPKTRSGKIMRRLLRVIAKGEAITQDISTLEDESIIKQLQGED

SEQ ID NO: 163195 - protein, 63 aa, Unknown
  Bacterial polypetide isolated from the Sargasso Sea
QIGPIALPDLIQFSPGLPKTRSGKIMRRILRKIASNEHEQLGDTTTLADPGVVKSLVENRKNI

SEQ ID NO: 163196 - protein, 580 aa, Unknown
  Bacterial polypetide isolated from the Sargasso Sea
MVAQSKKKNPAQASKYAKRGNAKAKKKDYRGALSDYKKAYQLNPSSNYKKKVQQLTSLAKKQAGSKGSSKKVSKKQVAQASQYAKRGNAKAKKKDYAGALKDYQRALRLNPSSSNQKRVKQLTSLVKKSGKSTASRKTTKARMPKVADIPTISPIKYANDIYNIAEGFEMSTRNLARATSILENRQNKKIETIKLQRTPSTSELESAARSEPNDFRKQVDLARNYEAVGRFDDSKEIYLKLAAQNPLNADAHFHLGAYYARFDQMTKARHAFDEALDIQPSHRATIEAMATFFGKKEQRSFSDGILAKSAEKDPAGPAQQINKIRKNLDEFNYEYAARLAQSGQDMFPKQGSFILLKGKAFEGMGDTQNAKSSYQESIKNDPTHHESYVALGDLYSSQGKHLYAALTYSDAIRLDPANENVRFKQGLGYFKASEWGRAASAWEDLLYYDPKNQKVNLLLPQAYYILAVEYNRSGQSSLGQSAFRKAININRNSAAWLPGSMRTLGGFYREKGMYKESLAAYQEAIELKPSDSQTYLGLGITYWKMKEEALAKAAWSRSMELDPTNNDARGWLLLSGKISG

SEQ ID NO: 163197 - protein, 81 aa, Unknown
  Bacterial polypetide isolated from the Sargasso Sea
GEDFNDALEQELTKFVSKEIGPIAKPDLIQNAPGLPKTRSGKIMRRILRKIAEGDFDNLGDTTTLAEPAVVASLLENSKKL

SEQ ID NO: 163198 - protein, 107 aa, Unknown
  Bacterial polypetide isolated from the Sargasso Sea
KVAEAACIGKSHEVKGQAIVAFVTIKDQISTSDDLVTELKQHVATKIGPMARPDDIYFAAELPKTRSGKIMRRLLRDVAEGRTLGDTTTLADPAVVESLKSQYEDDE

SEQ ID NO: 163199 - protein, 50 aa, Unknown
  Bacterial polypetide isolated from the Sargasso Sea
PGLPKTRSGKIMRRILRKIAEDDFNSLGDTSTLAEPAVVEDLIENRMNRK

SEQ ID NO: 163200 - protein, 118 aa, Unknown
  Bacterial polypetide isolated from the Sargasso Sea
MSEKIENLLGEDRTFDPPSSITENANATQEWFDLANEDRLAYWQKQALERITWYKEPKEILDDSDAPFYKWFKDGELNLSYNCLDRHLETDRDRIAFYWEGEPGDSQEIHIKIFMRGV

SEQ ID NO: 163201 - protein, 255 aa, Unknown
  Bacterial polypetide isolated from the Sargasso Sea
MFQPGSDIQRTSTLTAFLRGCGIDSYEELVRRSNEDPDWFWGQIIDHAGIRFARPYSRLRDISEGPESIRWAVGSTLNLTETCLDARIADGLGDKVAIDWVGEDGSRRRWTYSDLTAEASRVASALATRGVRPGQAVGIYMPMIPEIEAALLGIARLGAVAVPLFSGFAPHAIVSRPDDADAVAVLTADATPRARQAGLDGGEPRPGFDRRAIGSYRDQPATVRRCGSRSRPRSGLERNRGPRQSGVCRRSRQCR

SEQ ID NO: 163202 - protein, 283 aa, Unknown
  Bacterial polypetide isolated from the Sargasso Sea
MNSSQLSPLELPRSYNAATHFIDRHLDEGRASKIAVIDEQGSYTYAQLAERVNRAAGALLQLGLEPEQRVLLCLLDTIDFPTVFWGAIKAGLVPVPVNTLLTLQDYAYLLDDSRARALVVSSALYDGFARHLDQHGLLEQVIVSGNESHDHRSLDDLLATSSPMTQPASTTCDDTAFWLYTSGSTGTPKGAVHRHSDLVQTAHLYGQGVLGIREEDVVFSAAKLFFAYGLGNAMSFPFHVGATAVLLAQRPTPHAVLDRLKQCAATIFYGVPTLYGAMLCDAG

SEQ ID NO: 163203 - protein, 122 aa, Unknown
  Bacterial polypetide isolated from the Sargasso Sea
MSEQKIFEIPVSAKEKAWIDNDTYLKMYQESVEDPEGFWNKQADRLEWFKKWDRTLDWDYNKAYIRWYEGGKLNVSHNCLDRHLEARGDQKALIWESDDPKVDRSFTYKQLHSEVSKFANVM

SEQ ID NO: 163204 - protein, 439 aa, Unknown
  Bacterial polypetide isolated from the Sargasso Sea
MLALNIFVLSNIILAQVNIGSNRFFIYEENDSLSLPYYSNYSLNEYNNHTKLAIIYLHGANRNADDYYNNIFAIVNATGNMDSTIIIAPQFLRSQDLSNDNLTDDVFFWTNTTNWTAGYLSGNTSSDTRPFRISSYAIIDSLLHQIALNNPMLEQIVFAGFSAGGQFVNRYIGGNNITEFLFSEFSVPIRFIIGSPSSYLYMNNERRVAGSTDQFDIPSGCSGYNEYKYGLDDLNSYMSLAGVDSIRSRYERRNVVYLVGSSDDGGTTDCASETQGNNRYERSIIYYNYLQYYFGNQIVNNHQHAVIPNMDHDNYYVFNSSCGRKAIFGNGNCNELDFLNTNYSQITNEFTITYNFPNPFNAITKIYYETHTTNDIYINIYNILGDHVKEFKIQNQAPGNHSAIWDGTNHFNKDLSSGVYVYQIRIDETIAKNKMIMLK

SEQ ID NO: 163205 - protein, 101 aa, Unknown
  Bacterial polypetide isolated from the Sargasso Sea
MTDTKVISPERGFSNPHLSSLDEYKRLYEQSINDPVTFFQNAAKENLSWSKPFTTTFNKQFKNAKWFEDGELNIAYNCIDRHLEHHQDKTAFIWEGDDPAE

SEQ ID NO: 163206 - protein, 83 aa, Unknown
  Bacterial polypetide isolated from the Sargasso Sea
MKEKEFDESLSEELVKFVSKEIGPIAKPDLIQNAPGLPKTRSGKIMRRILRKIAEGDFDNLGDTTTLAEPAVVESLLENSKKL

SEQ ID NO: 163207 - protein, 104 aa, Unknown
  Bacterial polypetide isolated from the Sargasso Sea
MTKETIYEPSEEIINDAVISNNEFEELYKESINNPDQFWDKQARNYLSWDKEWDVVKESDLTKGNISWFKGAKLNASVNCIDRHLENNGEKTAIIWEGDDPQDS

SEQ ID NO: 163208 - protein, 140 aa, Unknown
  Bacterial polypetide isolated from the Sargasso Sea
MQGKYKEIYDSSINQKENFWKEVAESIFWYKKPTKILNSSNPPFYKWYEDGVTNTCYNAIDFHIDKGRGEKLAIIYDSPITGSKKTFTYNQLKEKVSLFAGALKNQGINKGDRVIIYMPMIPEAVIAMLACGRIGAVHSV

SEQ ID NO: 163209 - protein, 124 aa, Unknown
  Bacterial polypetide isolated from the Sargasso Sea
VFQDIVLGTMEIESALVSHKSVAESAVVGKKDDLKGEVIVAFVSLEKDVNSSPELVENLKKHVVNEIGIIAKPEKIIISDSLPKTRSGKIMRRILRSLAAGEKISGDISTLEDSSVLEKLKELS

SEQ ID NO: 163210 - protein, 92 aa, Unknown
  Bacterial polypetide isolated from the Sargasso Sea
NGLYCYVTLNAGETENGDLERDLKLWVRKQIGPLATPDLIHFTPGLPKTRSGKIMRRILRKIAANEHGQLGDTTTLADPSVVDSLVDNRKNI

SEQ ID NO: 163211 - protein, 151 aa, Unknown
  Bacterial polypetide isolated from the Sargasso Sea
MPMIPEAVIAMLSCVRIGAIHSVVFGGFASNELASRIDDSKAKVLITASCGFEPGRTVEYRPLVDEALKLAKHNVKKVILFQRKGYEVKLNAPLEISWEESLSNSKDVDCVEMGSNEYAYILYTSGTTGIPKGIVRDTGGHIVALKWTMKN

SEQ ID NO: 163212 - protein, 186 aa, Unknown
  Bacterial polypetide isolated from the Sargasso Sea
MQRITSLSGYFKKYEQSVKDPEKFWAEIADTFVWKKKWDKVLDWDFDSVDIKWFKNAKLNITENILEKNLIDRADKTAIIWEPNDPTEPSIHITYKELYEETCKFSNALREKGIKKGDRVIIYMPMVPEAAIAMLACARVGAVHSVVFAGFSSTSLADRINDCQAKMVLTSDGNFRGNKTIPVKPV

SEQ ID NO: 163213 - protein, 76 aa, Unknown
  Bacterial polypetide isolated from the Sargasso Sea
SSDKIKSGILDMVTKDIGPHAKPDKIQFTPALPKTRSGKIMRRILRKIAEGDYNNLGDISTLADPSVVENLISENQ

SEQ ID NO: 163214 - protein, 352 aa, Unknown
  Bacterial polypetide isolated from the Sargasso Sea
ALIYDSPITGNKAKFTYNELRSKVSKFAGALKNQGLRKGDRAIIYMPMVPEAVVAMLACGRIGVIHSVVFGGFASNELASRIDDSKAKVLITSSCGFEPGRTVEYRPLVDGALKLAKHKIDKIIFFQREGHEVKLNLPHEISWDEALSNAKDTDCVEMNSNEYAYILYTSGTTGVPKGIVRDIGGHIVALKWTMKNIYNIDEGDVWWSASDIGWIVGHSYIVYAPLFKGCTTVLFEGKPVGTPDAGAFWKIISDYNVKSLFTAPTAFRAIKKEDPEGKFFSKYNLSKFESLFLAGERADPDTIRWAENLLNVPVIDHWWQTETSWAISSNCTGIEMMKQNMVPHVKLFLDMM

SEQ ID NO: 163215 - protein, 143 aa, Unknown
  Bacterial polypetide isolated from the Sargasso Sea
MTQEIYNPDPGFSNPHIKDFDEYLSLYKESIENPEKFFGDLAKENISWIEDFKEVHNSEFQESKWFVGGKTNITLNCIDRHLEKNGDKIALIWEGDEPGNSKEITFKELHSEVCRFANILKTLQIKKGSRVCIYMPMIPKLHC

SEQ ID NO: 163216 - protein, 33 aa, Unknown
  Bacterial polypetide isolated from the Sargasso Sea
MDIYWCTADIGWITGHSYIVYGPLSNAVTQVYL

SEQ ID NO: 163217 - protein, 219 aa, Unknown
  Bacterial polypetide isolated from the Sargasso Sea
MARHPGARQVPVKRAVVSPSVRRIDTGRGTVDRLLLTLAPTVFGPSAVTESNTSIESVLQEQRVFQPPAEMAAAARIGSLETYRAMAEAATTDPDGFWGEAARRELHWFEPFHTVLDWSEPPFARWFEGGTTNLSYNCLDRHLEGAKAEKTALIWEGEPGDVRRFTYRELHAEVCKAANALKAMGIGKGDLVALYMSMIPEAAIAMLACARIGAPHSVV

SEQ ID NO: 163218 - protein, 154 aa, Unknown
  Bacterial polypetide isolated from the Sargasso Sea
PGITSTKPGSACGPYPGVDSVIIDEKGNEVGKGEGGYLAIKSPWPSMLRTVYGDDKRYIDTYWSQHEGLYFAGDGAKYDDDGYVWLLGRVDDVMNISGHRISTAEVESALVSHESVAEAAVIGRSDEISGEAIAAFVSLIGTDAGDEKLISELR

SEQ ID NO: 163219 - protein, 257 aa, Unknown
  Bacterial polypetide isolated from the Sargasso Sea
MKKYSVPKYFQSSVGHNSLDNYQSLRENANQDSNSYWESVANRIDWFDKWTTVNNTDYSKARIEWFSNGKLNASYNCIDRHIENGLGEKIALIWQSNDPTISKNVTYNELLENVSLFANGLKRAGIKKGDRVCIYMQMIPEAIVAMLACARIGAVHSVVFGAFSSDALKNRINDSECKLLITQDNGVRGSKFDIPMKENADKIADECPSLSTVVMVERSGNDMFMKEGRDMTWNQFIDGCSIDCHAEVMDAEDPLFI

SEQ ID NO: 163220 - protein, 299 aa, Unknown
  Bacterial polypetide isolated from the Sargasso Sea
SNGASPADPVPVDATDPLYILYTSGTTGLPKGVVRDNGGHAVALKYSMKSIFNSDPGDVYWAGSDVGWVVGHSYIVYAPLIHGCTTILYEGKPVRTPDAGSFWRVISEHQVNTFFTAPTAFRAVKKEDPTAKLKEKYDISCLRTLFLAGERLDPPTYKWLTGILNIPVIDHWWQTESGWPMCSNMMGLDPNPVKMGSPTFPVPGYNIKVLDDEGNSCQSGETGNIVVKLPLPPSCLTTLWNDDKRFRDSYLSKYPGYYLTGDGGIIDEDGYVFVMGRVDDVINVAGHRLSTGQMEELMH

SEQ ID NO: 163221 - protein, 170 aa, Unknown
  Bacterial polypetide isolated from the Sargasso Sea
MKYSEIYKDWKDNPIEFWKKNAENVSWIKFPEKILKKNSNYFYEWFSDGVLNTCYNAVDKNILEGRGDQVAIYYDSPITNSKSKLTYNELKSKVERFAGALKKYNISQGDRVIVYMPMIPEAIIAVLAIARIGAVHSVVFGGFAAKELAVRIDDCSPKIIISASTGIEPR

SEQ ID NO: 163222 - protein, 49 aa, Unknown
  Bacterial polypetide isolated from the Sargasso Sea
LSNIYKELGVKKGDRVILYMPMIPEAAYAMLACARICAVHSIIFGGFSP

SEQ ID NO: 163223 - protein, 90 aa, Unknown
  Bacterial polypetide isolated from the Sargasso Sea
QGIYAFVTLMTGSKENENIIQNILNTVKKEIGPHAKPDKIQFTPSLPKTRSGKIMRRILRKIAEDDLENLGDISTLADPSVVEELIKSKI

SEQ ID NO: 163224 - protein, 47 aa, Unknown
  Bacterial polypetide isolated from the Sargasso Sea
MPKTRSGKIMRRILRKIAANEHDQLGDTSTLADPSVVDDLISNRLNK

SEQ ID NO: 163225 - protein, 139 aa, Unknown
  Bacterial polypetide isolated from the Sargasso Sea
MSDKFNKIYNHSIKNPEKFWQEAAEDIFWFKKPTKILNKSNPPFFKWFENGVTNTCYNALDIHIDQGRGKNTALIYDSPITSNKSKFTYEELRSKVAKFAGALKNQGVNKGDRVIIYMPMIPEAVIAMLGCARIGAIHS

SEQ ID NO: 163226 - protein, 99 aa, Unknown
  Bacterial polypetide isolated from the Sargasso Sea
PHNIKGQGIYAFVSLKADVDYEDEAISKELNSTVRDVIGPIASPDHIQITPSLPKTRSGKIMRRILRKIAENNFGDLGDTSTLADPTVVDDLISNRKNK

SEQ ID NO: 163227 - protein, 256 aa, Unknown
  Bacterial polypetide isolated from the Sargasso Sea
MAKRKKKKVKKKRKKNKKIRKKIKRKIKRSTKSKKNKKILSNELIFKVPKKWSNNAYVDKNAYEKKYKLSLKDNDGFWNKEGKRIDWIKPYKKIKDVKYSKTDVKIKWYYDGTLNASANCIDRHLKNKKNKTAIIWVGDNPKESKQISYKELHKNVCKTANGLKELGIKKGDRVTIYLTMIPELAYVMLACARIGAIHSIIFGGFSPDSISGRINDCQSDYMITADEGIRGGKIIPLKKIADEALKNVKCKKMCCD

SEQ ID NO: 163228 - protein, 74 aa, Unknown
  Bacterial polypetide isolated from the Sargasso Sea
RNELIKWVRKEIGPIASPDLIQWAPGLPKTRSGKIMRRILRKVAENDFGSLGDTSTLAEPAVVQDLIDNRENRG

SEQ ID NO: 163229 - protein, 280 aa, Unknown
  Bacterial polypetide isolated from the Sargasso Sea
MAKRKKSKRKIRSKKRRPKRKKGLRKKSYKRSAPKSSAKQIKDTEGSLVFKVPENWSKQALVNKNKYEKKYNLSIKDNEKFWAKEGKRITWMKPYSKIKDVKYSKEEVNIKWYYDGTLNASANCIDRHLEKKGNKTAIIWVGDDPSDSKKISYKELHKNVSKAANGLKSLGIQKGDRVTIYLTMIPELAYVMLACARIGAVHSIIFGGFSPDSIATRINDCESDYVITADEGVRGGKIIPLKKIADEAMMQCPNVKKCVVVKRTGNSINWDDERDVAYDD

SEQ ID NO: 163230 - protein, 127 aa, Unknown
  Bacterial polypetide isolated from the Sargasso Sea
VISGFRDIGLGTMEIESALVSHKSVAESAVVGKKDDLKGEVIVAFVSLEKDVNGSSELIENLKKHVVNEIGIIAKPEKIIISDSLPKTRSGKIMRRILRSLAAGEKISGDISTLEDSSVLEKLKELS

SEQ ID NO: 163231 - protein, 49 aa, Unknown
  Bacterial polypetide isolated from the Sargasso Sea
MGLPKTRSGKIMRRILRKIASNDFENLGDTSTLADPSVVDDLIKNRKNK

SEQ ID NO: 163232 - protein, 223 aa, Unknown
  Bacterial polypetide isolated from the Sargasso Sea
MAKRSKKKKRKSKSKKKKSFKRKKKKILRKKNKKISTKKKGSKQREDSDGNIVFKVPPSWEKRAYVNQSQYSKKYKLSLKDNEGFWAKEGKRITWMKPYTKIKDVRYSKENVSIKWYYDGTLNASANCIDRHLDKKGNKTAIIWVGDDPSDSKKISYKELHKNVCKAANGLKSIGIQKGDRVTIYLTMIPELAYTMLACARIGAVHSIIFGGFSPDSIATRIN

SEQ ID NO: 163233 - protein, 106 aa, Unknown
  Bacterial polypetide isolated from the Sargasso Sea
EAAVVGFPHSIKGNGLYCYVTLNANEKATGDLERDLKLWVRKQIGPIATPDVVQFSPGLPKTRSGKIMRRILRKIAANEPENLGDTTTLADPSVVDSLIENRQNKG

SEQ ID NO: 163234 - protein, 298 aa, Unknown
  Bacterial polypetide isolated from the Sargasso Sea
NRKNTFLWFHKGKLNTCYNCLDRHVENGKNDKVAIIYDSPITKTKKQITYGQLLNKVSALAASLKKIGVKKGDRVVLYMPMIPEVIISMLACARLGAIHSVVFGGFAAKELASRISDVTPKVIISASCGIEPNKIINYKEILNSALSQTLHKPVKQIIYQREQYRCRLDKTNDISWDEFIDFSSKTSCVSVDANDPLYILHTSGTTGIPKGIVRTNGGHAVALLNSMKMTYDISENDVFWAASDVGWVVGHSYIVYAPLLLGCSTVLYEGKPVGTPDAGQFWRVISEYNVKTMFTAPT

SEQ ID NO: 163235 - protein, 48 aa, Unknown
  Bacterial polypetide isolated from the Sargasso Sea
MPKTRSGKIMRRILRKIAANEHKELGDTTTLADPSVVESLVENRQNKD

SEQ ID NO: 163236 - protein, 260 aa, Unknown
  Bacterial polypetide isolated from the Sargasso Sea
LIDRRDIDWCDAHYKVTPVDCVEVEATDPVYILYTSGTTGIPKGVVRPTAGHLVSLKWSMKSIYDVDPGDVYWAASDVGWVVGHSYIVYAPLFHGCTSILYEGKPVGTPDAGAFWRVISEHQVNCMFTAPTAIRAIKKEDPYGKLVEKYNLNCLRSQFLAGERCDPDTLEWTKNMLNVPVIDHWWQTETGWPIASNCLGIEQMDIKPGSPTCAVPGWKIDVLDEFSRPVPRGEIGAISLKLPLPPGSLPTLWQNDERFVD

SEQ ID NO: 163237 - protein, 169 aa, Unknown
  Bacterial polypetide isolated from the Sargasso Sea
KEGKRINWIKPYKKIKDVKYSKDDVYIKWFYDGTLNASANCIDRHLKKNADKTAIIWVGDDPKVQKKISYKELHKEVSKAANGLKNLGVQKGDRVTIYLTMIPELAYTMLACARIGAVHSIIFGGFSPDSISGRINDCESDYVITADEGVRGGKTIPLKSITDEALQSC

SEQ ID NO: 163238 - protein, 147 aa, Unknown
  Bacterial polypetide isolated from the Sargasso Sea
LRDEDGHYRITGRVDDVIIVSGHNLGTAPIEEAINEHNIVAESAIVGYPHDIKGSALYGYVIIKESIQNEDELAALRKEINSLISAQVGPIAKLDKIQFVSGLPKTRSGKIMRRILRKIAEGDVSNLGDISTLLNPDVVAEIQEGKI

SEQ ID NO: 163239 - protein, 306 aa, Unknown
  Bacterial polypetide isolated from the Sargasso Sea
FYKWFEDGTTNTCYNALDFHIDNGLGEKTALIYDSPITSNKAKFTYNELRSKVSKFAGALKNQGLQKGDRAIIYMPMVPEAVVAMLACGRIGVVHSVVFGGFASNELASRIDDSKAKILITASCGFEPGRTVEYRPLVDGALKLAKHKIEKVIFFQRKGHELKLNAPKEISWDDALSNAKDTDCVEMNSNEYAYILYTSGTTGVPKGIVRDIGGHIVALKWTMKNIYNIDEGDIWWSASDIGWIVGHSYIVYAPLFKGCTTVLFEGKPVGTPDAGAFWKMISDYKIKSLFTAPTAFRAIKKEDPEG

SEQ ID NO: 163240 - protein, 93 aa, Unknown
  Bacterial polypetide isolated from the Sargasso Sea
GDGLYCYVTLNAGETETGELERDLKLWVRKQIGPLATPDLIHFTPGLPKTRSGKIMRRILRKIAANEHEQLGDTTTLADPSVVNSLVENRKNI

SEQ ID NO: 163241 - protein, 77 aa, Unknown
  Bacterial polypetide isolated from the Sargasso Sea
KKLGIKKGDRVTIYLTMIPELAILMLACARIGAVHSIIFGGFSAECISGRVNDCESEYIITADEGVRGGKTIPLKYT

SEQ ID NO: 163242 - protein, 137 aa, Unknown
  Bacterial polypetide isolated from the Sargasso Sea
MIKNYVNVTGKINKKEYEELYIESIKNNKSFWNKHGKRIDWIKPYTKISDFNYSKEKVEIKWFYDGTLNVSYNCIDRHAKTNPNKVAIIWEGDDPTEVKKITYNELLIKVSKTANALKSLGVKKGDCVTIYLTMLPE

SEQ ID NO: 163243 - protein, 243 aa, Unknown
  Bacterial polypetide isolated from the Sargasso Sea
MKSDFEKIYNESIKNPEEFWKKVADDMFWFKKPSKILNKSKPPFYKWYEDGVTNTCYNALDIHIDNGKGDRTALIYDSPITDNKKKFTYKELREKVSKFAGALQNQGIKKGDRVIIYMPMIPEAVIGMLACGRIGAVHSVVFGGFASNELASRIDDSKAKILLTASCGFEPGRTVQYKPLVDEALKLASHKIEKLILFQRPDTEVKLNSPNEISWEEALSNAKNVDCVEMNANEFAYILYTSG

SEQ ID NO: 163244 - protein, 74 aa, Unknown
  Bacterial polypetide isolated from the Sargasso Sea
MERELKLWVRKQIGPIATPDLIHFSPGLPKTRSGKIMRRILRKIAANEHDQLGDTTTLADPSVVQSLVDERKNV

SEQ ID NO: 163245 - protein, 192 aa, Unknown
  Bacterial polypetide isolated from the Sargasso Sea
VVKLPLPPSCLPTLWNDDKRFRDSYLSKYPGYYLTGDGGLIDKDGYVYVMGRVDDVINVAGHRLSTGQMEELIAAHPAVAECAVVGIDDELRGQIPVGFAVLKDGINISQDQLEQEMVSIIREEIGAVAYFRQSVIVSRLPKTRSGKILRKTIRQLAKGEDVPAPPTIDDPAILKEICQVMESCGVGSFASK

SEQ ID NO: 163246 - protein, 258 aa, Unknown
  Bacterial polypetide isolated from the Sargasso Sea
MAKRKKGKRKKKLRKRKKTLRTRKKIRKRKKKLRKRKKTLRTRKKIRKRKKKTKSRKIKKAKSSGSAELVFKIPKKWSNNAYADKNFYEKKYKLSIKDNEGFWRKEGKRIDWIKPYTKIKDVKYSKSDVKIKWYYDGTLNASANCIDRHLEDKKNKTAIIWVGDNPKESKQISYKELHKNVCKTANGLKEIGIKKGDRVTIYLTMIPELAYVMLACARIGAVHSIIFGGFSPDSIAGRINDCQSDYIITADEGVRGGK

SEQ ID NO: 163247 - protein, 283 aa, Unknown
  Bacterial polypetide isolated from the Sargasso Sea
PKGEFIKKFDLTSLQSLFLAGERADPDTVLWLERKLKVPIIDHWWQTETGWPVAANPLGIEALPIKTGSPTIAMPGYDVRVLSEEGEEVPKDTLGAISIKLPLPPGSLPSLWNADDRFIESYLSTFEGFYETGDAGYQDEDGYLYIMSRTDDVINVAGHRLSTGAMEETLSNHVDVAECAVIGVSDDLKGQVPLGLICLNKGCNKTHEDVCREVVDLVRNEIGPVAAFKSVAVVSALPKTRSGKILRATIRKIADKVEWEMPATVDNPIVFKEIEEALKPLGY

SEQ ID NO: 163248 - protein, 254 aa, Unknown
  Bacterial polypetide isolated from the Sargasso Sea
MPKKRKSKTRKKSSKKRKPIKRKSKIKKIRVKKKNRSTGKKEDNSTTELIIKTKPEWIKSSLANKSQYQKKYSESIKNNNAFWKKEGKRISWIKPYKKIKEVKYSKDEVKIKWFEDGTLNASANCIDRHLKDKKDKTAIIWVGDDPKDSQKISYKQLHQKVSKAANGLRKLGIQKGDRVTIYLTMIPELAILMLACARIGAVHSIIFGGFSAESISGRVNDCESEYIITADEGIRGGKTIPLKATTDEALTNCP

SEQ ID NO: 163249 - protein, 82 aa, Unknown
  Bacterial polypetide isolated from the Sargasso Sea
AGEKSTLDLERDLKLWVRKQIGPIATPDLIQFAPGLPKTRSGKIMRRILRKIAANEHGQLGDTTTLADPSVVESLVDNRKNI

SEQ ID NO: 163250 - protein, 281 aa, Unknown
  Bacterial polypetide isolated from the Sargasso Sea
MPKKKKVKKRSKKKKSKRKFKKHNSKKRIKRKISKPKAEKELIIKTKKEWVSKAIVNKSQYEKKYKSSIKDNDGFWKKEGKRITWIKPYSKIKDVKYSRDDVRIRWFYDGTLNASTNCIDRHLKKNKDKTAIIWVGDDPKIQKKISYKELHKEVSKAANALKNLGVQKGDRVTIYLTMIPELAYTMLACARIGAIHSIIFGGFSPDSISGRINDCKSDYVITADEGLRGGKTIPLKSITDEALVNCPNVKKCIVVKRTGNFVNMDPNRDVWYHEITKNVQI

SEQ ID NO: 163251 - protein, 246 aa, Unknown
  Bacterial polypetide isolated from the Sargasso Sea
PKKKKKRKSRRKIKRKSSKKRKSRKISKSKKKRNRKKNSKTGSKDSSEKIYRTKSDWVKNALINKSMYEKKYKESVRNNNDFWAKEGKRITWIKPYTKIKDVTYSKTDVSIKWFYDGTLNASANCIDRHLKKNKDKTAIIWVGDDPKVHKKISYKQLHDEVSKAANGLKKLGVQKGDRVTIYLTMIPELAYTMLACARIGAIHSIIFGGFSADSIADRVNNCKSDYIVTADEGIRGGKTIHLKSIT

SEQ ID NO: 163252 - protein, 83 aa, Unknown
  Bacterial polypetide isolated from the Sargasso Sea
MVGEKSTLDLERDLKLWVRKQIGPIATPDLIQFSPGLPKTRSGKIMRRILRKIAANEHDQLGDTTTLADPSVVKSLVENRKNT

SEQ ID NO: 163253 - protein, 71 aa, Unknown
  Bacterial polypetide isolated from the Sargasso Sea
AFVAHPKVAEAAVVGYPHDIKGNGLYCYVTLNGGRKINFRFRERSKAMGKKTNWSDSYTRFNTIFTWASKD

SEQ ID NO: 163254 - protein, 238 aa, Unknown
  Bacterial polypetide isolated from the Sargasso Sea
KNQELIIKTRSDWAKKALVNKNQYTKKYNQSLKKNDDFWKKEGKRITWIKPYKKIKNVKYSKSDVHIKWYYDGTLNASANCIDRHLKKNKDKTAIIWVGDDPKVQKKISYKQLHIEVSKTANALKDLGIKKGDRVTIYLTMIPELAYTMLACARIGAIHSIIFGGFSPDSIAGRINDCKSDYVITADEGLRGGKIIPLKSITDEALINCPNVKKCIVVKRTGNRINWDESRDVWYNDI

SEQ ID NO: 163255 - protein, 259 aa, Unknown
  Bacterial polypetide isolated from the Sargasso Sea
MPKKKKTKKKVISKKPKETIYKTKKEWISKATVNKSQYTKKYNESIKDNDGFWKKEGKRINWIKPYKKIKDVKYSKDDVHIKWFYDGTLNASANCIDRHLKENANKTAIIWVGDDPKVQKKITYKELHKEVSKAANGLKNLGVQKGDRVTIYLTMIPELAYTMLACARIGAVHSIIFGGFSPDSISGRINDCESDYVITADEGVRGGKTIPLKSITDEALQSCPNVKKCIVVKRTGTKKIDWFNDRDVWYHKMTSKVSA

SEQ ID NO: 163256 - protein, 51 aa, Unknown
  Bacterial polypetide isolated from the Sargasso Sea
MKVFQIIRIGLGGGKIVDKYKVNIFYTAPTAIRAMMREGDGPVKKTSRKSL

SEQ ID NO: 163257 - protein, 82 aa, Unknown
  Bacterial polypetide isolated from the Sargasso Sea
AGESETGDLERELKLWVRKQIGPLATPDLIHFTPGLPKTRSGKIMRRILRKIAANEHGQLGDTTTLADPSVVDSLVENRKNT

SEQ ID NO: 163258 - protein, 224 aa, Unknown
  Bacterial polypetide isolated from the Sargasso Sea
INYNTEKKYQSSIKDNEGFWRKEGKRITWIKPYNKIKDVKYSKTDVHIKWFYDGTLNASANCIDRHLKKNKDKTAILWVGDDPKVHKKISYKQLHQEVSKTANGLKELGVQKGDRVTIYLTMIPELAYTMLACARIGAIHSIIFGGFSAESIAGRINDCKSDYVVTADEGVRGGKIIPLKSTTDEALIHCPNVKKCIVVKRTGNRINWEESRDVWYHEMIKKVS

SEQ ID NO: 163259 - protein, 185 aa, Unknown
  Bacterial polypetide isolated from the Sargasso Sea
TSSSASCFPSLWNDDERFRKSYLSQFPGYYQTGDGGIIDEDGYVFVMGRVDDVINVAGHRLSTGQMEELIGSHPGVAECAVVGIDDELRGQVPVGFAVLKDGVEMNHQDLEKELVSIIRKEIGAVACFRKSALVKRLPKTRSGKILRKTIRQLATTPEVPIPPTIDDPAIIDEIRDAMQTSGIGN

SEQ ID NO: 163260 - protein, 55 aa, Unknown
  Bacterial polypetide isolated from the Sargasso Sea
DYIHITAGYPKTRSGKIMRRILRKIASNEFENLGDTSTLADPTVVDNLIENRKNK

SEQ ID NO: 163261 - protein, 248 aa, Unknown
  Bacterial polypetide isolated from the Sargasso Sea
MKKYSVPKNFHSSVGHDSLDRYQSLRENAKQDSNSYWESVANRVDWFDKWTTVNNTDYSKAHIEWFSNGKLNASYNCIDRHIENGLGEKTALIWQSNDPTISKNVTYNELLEKVSLFANGLKRAGIQKGDRVCIYMQMIPEAIVAMLACARIGAVHSVVFGAFSSDALKNRINDSECKLLITQDNGVRGSKFDIPMKENADKIADECPSLTTVVMVERSGNNMFMKEGRDITWNQFVDGCSSECPAEV

SEQ ID NO: 163262 - protein, 68 aa, Unknown
  Bacterial polypetide isolated from the Sargasso Sea
EVSKHDLTSLRVLGTVGEPINPEAWMWSHENIGGSQTPIVDTWWQTETGGNMITPLPGVTTTKPGSAC

SEQ ID NO: 163263 - protein, 265 aa, Unknown
  Bacterial polypetide isolated from the Sargasso Sea
EEESKVRKKKSKVRKKTSKKVKRRSKVRKKSSKKPKKRIKAKKENGNTPPEVVIKTKPEWVKSGLANKSKYQQKYSQSIKSNDEFWRKEGKRITWIKPYKKIKDVKYSTKEVKIKWFEDGTLNASANCIDRHLKDKKDKTAIIWVGDDPKDSQKISYKQLHQKVSKAANGLKKLGIKKGDRVTIYLTMIPELAILMLACVRIGAVHSIIFGGFSADSISGRVNDCESEYIITADEGVRGGKTIPLKYTVDEALMSCPNVKKCIVV

SEQ ID NO: 163264 - protein, 104 aa, Unknown
  Bacterial polypetide isolated from the Sargasso Sea
MTKDIYRVPDNIKSNSLMTNDEYKNLYNESIENPEKFWSDQAHKYLDWDSEWTNVKHEDFLKGEVRWFENAKINASKNCIDRHLNKSGDKIAIIWEGDDPELFK

SEQ ID NO: 163265 - protein, 42 aa, Unknown
  Bacterial polypetide isolated from the Sargasso Sea
APRDIGYVDSLPKTRSGKIMRRLLKARELGLPEGDTSTLEDD

SEQ ID NO: 163266 - protein, 73 aa, Unknown
  Bacterial polypetide isolated from the Sargasso Sea
ERELKLWVRKQIGPVATPDFIHFSPGLPKTRSGKIMRRILRKIAANEHNELGDTTTLADPSVVESLVKNRKNI

SEQ ID NO: 163267 - protein, 104 aa, Unknown
  Bacterial polypetide isolated from the Sargasso Sea
AAVVGFPHEIKGNGLYCYITLNAGENPNGDLERELKLWVRKQIGPIATPDYIQFAPGLPKTRSGKIMRRILRKIAANEHHDLGDTTTLADPSVVESLIENRKEK

SEQ ID NO: 163268 - protein, 205 aa, Unknown
  Bacterial polypetide isolated from the Sargasso Sea
PLPGLTETKPGTATRPFPGIEAAIRDGSGEDTTAGYLAITKPWPSMLRTVWGDEQRFRETYWSKWPKVYFPGDGAKVDEDGYFWILGRVDDVLNVAGHRIGTMEVESALVDHPTVVESAVVGKAHEIKGESIAAFVTLREGVEGSDELGTELRAHVSAKIGAIAKPELVVFTAELPKTRSGKIMRRLLRDIAEGRAIGDTTTLAD

SEQ ID NO: 163269 - protein, 137 aa, Unknown
  Bacterial polypetide isolated from the Sargasso Sea
MKSDFEKIYNESIKNPEEFWKKVADDIFWFKKPSKILNKSKPPFFKWYEDGVTNTCYNALDIHIDNGRGDKTALIYDSPITGNKKKFTYKELREKVSKFAGVLQNQGIKKGDRVIIYMPMIPEAVIGMLACGRIGAV

SEQ ID NO: 163270 - protein, 272 aa, Unknown
  Bacterial polypetide isolated from the Sargasso Sea
RKVSKKRQAFKAPYQSKDSDGNTLIKVSDSWAHHAYVNESKYKKKYKLSIKENEKFWAKEGKRISWIKKYTKVKDVKYSKEEVKIKWYYDGTLNASANCIDRHLKKNAKKTAIIWVGDDPSDSKKISYKELHQNVCKAANGLKSIGVQKGDRVTIYLTMIPELAYVMLACARIGAVHSIIFGGFSPDSIATRINDCESDYLITADEGVRGGKIIPLKKIADDALTQCPDVKKCVVVQRTGNQVDWDNERDISYKEMIASASNKCDPEEMGAE

SEQ ID NO: 163271 - protein, 78 aa, Unknown
  Bacterial polypetide isolated from the Sargasso Sea
PTEGFKSDLIQLVAKEIGAIAKPDIIQWSPGLPKTRSGKIMRRILRKIASNEVNDLGDTTTLADPSVVEELIHNRENK

SEQ ID NO: 163272 - protein, 47 aa, Unknown
  Bacterial polypetide isolated from the Sargasso Sea
MPKTRSGKIMRRILRKIAANEHDQLGDTTTLADPSVVQELVNNRLNK

SEQ ID NO: 163273 - protein, 260 aa, Unknown
  Bacterial polypetide isolated from the Sargasso Sea
LDPPTYHWLKEHLKIPVIDHWWQTETGWTISGNMAGIELLETRPGSITLPAPGYDVRVLDENGLEVGPNQEGAIVVKGPLPPSGFPTVWRDHDRYENGYWKDYPGFYLTGDGGYRDEDGYIYVMGRMDDVINVAGHRLSTGQIEEVVAKHTVIAECAVVGINDKEKGQVPVSLIVLKDGANMTPETLEKELVTMVREAVGPIANFKRILIVERLPKTRSGKILRQIMRKMIDREEYSVPSTIEDPSVIGELETGIANWKL

SEQ ID NO: 163274 - protein, 88 aa, Unknown
  Bacterial polypetide isolated from the Sargasso Sea
LMIGEEESENLIKDLQNFVAKEISPIAKPDLIQWAPGLPKTRSGKIMRRILRKVASGEFDNLGDTSTLADPGVVDDLIKNKRDLKKTN

SEQ ID NO: 163275 - protein, 222 aa, Unknown
  Bacterial polypetide isolated from the Sargasso Sea
MVLQLFPIPGFDIHILDEDANLCNPGETGNIVIKLPLPPGCFPTLWNDDNRFIESYLKKYQGYYLTGDGGLIDIDGYVFVMGRVDDVINVAGHRLSTGQMEEIIASHPAVAECAVVGINDELRGQVPVGFTVIKDGFLVDQDELEKEIIGLIRNKIGAVACFRQSVIVKRLPKTRSGKILRKNIRQIASKEDFSIPPTIDDPLIIEEIVDVMESVGVGIYKK

SEQ ID NO: 163276 - protein, 197 aa, Unknown
  Bacterial polypetide isolated from the Sargasso Sea
MEIKKHWKDNALVTTKDYEDLYALSIKDNEGFWESQGERLDWIKKYSKIKDIKYSSTDVKIKWYYDGELNVSENCIDRHAKNNPNKIAIIWEGDDPNNTLKITYKELLLNVSRTANALKKLGVQKGDRVTIYLTMIPELAYTMLACARIGAIHSIIFGGFSSESIAGRITDCKSEFVITADEGIRGGKTIPLKKIMD

SEQ ID NO: 163277 - protein, 91 aa, Unknown
  Bacterial polypetide isolated from the Sargasso Sea
GLYGYVTLNAGEKSTLILERDLKLWVRKQIGPIATPDLIQFAPGLPKTRSGKIMRRILRKIAANEHGQLGDTTTLADPSVVDSLVDNRKNI

SEQ ID NO: 163278 - protein, 148 aa, Unknown
  Bacterial polypetide isolated from the Sargasso Sea
YVFVMGRVDDVINVAGHRLSTGQMEELIAAHPAVAECAVVGIDDDLRGQIPVGFAVLKDGTNISQNQLEQEMVGIIRKQIGAVAYFRQCVIVSRLPKTRSGKILRKTIRQLAKGENIPAPPTIDDPAILGEMGQVMQTCGIGSFASKS

SEQ ID NO: 163279 - protein, 76 aa, Unknown
  Bacterial polypetide isolated from the Sargasso Sea
GDLERELKLWVRKQIGPIATPDHIQFSPGLPKTRSGKIMRRILRKIAANEHHDLGDTTTLADPSVVDSLVENRKNK

SEQ ID NO: 163280 - protein, 214 aa, Unknown
  Bacterial polypetide isolated from the Sargasso Sea
MSYQDLYQQSIEQPEVFWRKQAELIKWYEFPEKILSQDENGFFRWFAGGKLNTSYLALDAQIEDGRGNQLALIYDSPATNSQRKFTYNELRDEVAFFAGGLKNLGVCKGDRVIIYMPMVAEAVIAMLACARLGSVHSVVFGGFAPHELAVRINDAKPKVLVTASCGIEFTNIIEYKPLVDKALEIAEFAPEKTVVLQRPQAEAEMQSGRDYDWV

SEQ ID NO: 163281 - protein, 81 aa, Unknown
  Bacterial polypetide isolated from the Sargasso Sea
KVAEAAVVGYPHDIKGNGLYCYVTLNAGERETGELERDLKLWVRKQIGPLATPDLIHFTPGLPKTRSGKIIEKNFKKNRCK

SEQ ID NO: 163282 - protein, 40 aa, Unknown
  Bacterial polypetide isolated from the Sargasso Sea
RCPIVDTWWQTETGGHMITPLPGATPTVPGSCTLPLPGTN

SEQ ID NO: 163283 - protein, 262 aa, Unknown
  Bacterial polypetide isolated from the Sargasso Sea
MPMIPEAVIGMLACGRIGAVHSVVFGGFAPNELASRIDDSKAKIILSASCGYEPGRTIEYKPLLKKAIELAKHKPEKCIIYQRKDFKVDLEKNEIDWNDAVKEAKPVECVEMNANDYAYILYTSGTTGVPKGIVRDIGGHIVALKWTMKNIYNIDPDDVWWSASDIGWIVGHSYIVYAPLFHGCTTVLFEGKPVGTPDAGVFWRIISEHKVKSLFTAPTAFRAIKKEDPNGNFFKKYDLSSFESLFLAGERADPDTLKWAEG

SEQ ID NO: 163284 - protein, 212 aa, Unknown
  Bacterial polypetide isolated from the Sargasso Sea
MSGKYREIYDSSIKSKENFWKEVSEDIFWYKKPSKILNSSNPPFYKWYEDGVTNTCYNALDFHIDKGRGDKTAIIYDSPITGTKYNLSYKELREKVSVFAGALKNQGISKGDRVIIYMPMIPQAVVAMLACGRIGAIHSVVFGGFAANELASRIDDSKAKIIISASCGYEPGRTVHYKPLLNKAIEIANHKPEKCIIWQREKDKAELDPKKD

SEQ ID NO: 163285 - protein, 137 aa, Unknown
  Bacterial polypetide isolated from the Sargasso Sea
MHQCKSGRKNMSYQKEYRESIENPEAFWSRQAELITWYEKPKSILSQDEKGFYHWFKGGKLNTSYLALDFHVENGRADQAALIYDSPVTETVRSYRYRELLDEVARFAGVLQNQGVEKGDRVIIYMPMIPEAVAAML

SEQ ID NO: 163286 - protein, 56 aa, Unknown
  Bacterial polypetide isolated from the Sargasso Sea
PDLIQFSPGLPKTRSGKIMRRILRKIAANEHNQLGDTTTLADPSVVKSLVDNRKNI

SEQ ID NO: 163287 - protein, 136 aa, Unknown
  Bacterial polypetide isolated from the Sargasso Sea
NYRITGRVDDVVIVSGHNLGTAPIEDVINMHDNVVESALVGYPHDIKGNALYAYVILKDDSKKDDIKVEINQLISKTIGPIAKPEKIQLVPGLPKTRSGKIMRRILRKIASGEKDNFGDISTLLNPEIVEQIVEGS

SEQ ID NO: 163288 - protein, 172 aa, Unknown
  Bacterial polypetide isolated from the Sargasso Sea
RDSYLSKYPGYYLTGDGGLIDKDGYVYVMGRVDDVINVAGHRLSTGQMEELIASHPAVAECAVVGIDDELRGQIPVGFAVLKDGINISQDQLEQEMVSIIRKEIGAVAYFRQSVIVSRLPKTRSGKILRKTIRQLAKGEDVPAPPTIDDPAILKEICQVMESCGVGSFASKQ

SEQ ID NO: 163289 - protein, 104 aa, Unknown
  Bacterial polypetide isolated from the Sargasso Sea
ALKHPDVTSVEKVIVFQRTGGKIDWVEGRDVWWHSLVETASEHCAVEEMGAEDPLFLLYTSGSTGNPKGVSFQIRLLDYSIPQVQRVIQKAYCTLLVVIWCMPP

SEQ ID NO: 163290 - protein, 32 aa, Unknown
  Bacterial polypetide isolated from the Sargasso Sea
MTHEYVFDYKPGEIYWCTADVGWITGHSYIGI

SEQ ID NO: 163291 - protein, 91 aa, Unknown
  Bacterial polypetide isolated from the Sargasso Sea
GLYCYVTLNAGEKVSGDLERELKLWVRKQIGPIATPDFIQFSPGLPKTRSGKIMRRILRKIAANEHEQLGDTTTLADPSVVESLVNNRKNI

SEQ ID NO: 163292 - protein, 56 aa, Unknown
  Bacterial polypetide isolated from the Sargasso Sea
PDLIQNAPGLPKTRSGKIMRRILRKIAEGDLSNLGDTTTLADPSVVKSLISNKISL

SEQ ID NO: 163293 - protein, 78 aa, Unknown
  Bacterial polypetide isolated from the Sargasso Sea
SRCVLVKHGLRVDWIKPFTKIKNVSYEHPNVSIKWFEDGELNVSANCIDRHLKSRAEQTAIIWEGDNPSESKYVTYNE

SEQ ID NO: 163294 - protein, 259 aa, Unknown
  Bacterial polypetide isolated from the Sargasso Sea
MPKKKKKKSKVKKKSSKKVNKKTKTKKVSKKKKSKKENGSSPPEVVIKTKPEWVKASLANKSKYQQKYSQSIKSNDDFWRKEGKRITWIKPYKKIKDVKYSTKEVKIKWYEDGTLNASANCIDRHLKDKKDKTAIIWVGDDPKDSQKITYKQLHQKVSKAANGLKKLGIKKGDRVTIYLTMIPELAILMLACVRIGAVHSIIFGGFSAESISGRVNDCESEYIITADEGVRGGKTIPLKYTTDEALTSCPNVKKCIVVK

SEQ ID NO: 163295 - protein, 123 aa, Unknown
  Bacterial polypetide isolated from the Sargasso Sea
EWFGEGKLNVSYNCVDRHVLAGHGDRTALIWEGDDSRESRHISYKTLQEEVSKLANVLKHDLGVQKGDRVSICLPMIPETVFSMLACARIGAVHSVIFGGFSADAVSGRVVDCQSKVVITADG

SEQ ID NO: 163296 - protein, 167 aa, Unknown
  Bacterial polypetide isolated from the Sargasso Sea
MRSKKVELTEETKEVIYKVKTDWVKKAIVNKSEYEKKYKQSLKDNDGFWKKEGKRISWMKPYTKIKDVKYSKSDVHIKWYYDGTLNASANCIDRHLKRNKDKTAIIWVGDDPKVQKKISYKQLHQEVSKVANGLKELGVKKGDRVTIYLTMIPELAYTMLACARIGA

SEQ ID NO: 163297 - protein, 117 aa, Unknown
  Bacterial polypetide isolated from the Sargasso Sea
MNDIYKIKDEWLKNAKISKAQYEKMYKESVSNNENFWSEHGKRIDWFKPYTKIKDVLYSKNEVKIKWYFDGTTNVSYNCVDRHAKNTPDKTAIIWEGDNPTKVKKISYKELQSKVCK

SEQ ID NO: 163298 - protein, 79 aa, Unknown
  Bacterial polypetide isolated from the Sargasso Sea
EPDDELTKEIRAWVRTELSPIATPDMIQWSRGLPKTRSGKIMRRILRKIAANEHEQLGDTSTLADPSVVDTLIEERLNK

SEQ ID NO: 163299 - protein, 216 aa, Unknown
  Bacterial polypetide isolated from the Sargasso Sea
NRNWGAIMCANYATTNIRPGSMGKPFPGVTMGILDDQYNELGAGESGILAVRPGWPSQMFAYWQQDEMYNSRFKKGWYITGDQASIDEDGYFWFQGRADDVINTAGHLVGPFEVESALIEHKAVAEAGVIGKPDPIAMEVVKAFVTLNPDYEATDQLRRELIGFARDKLSAGVAPREIDFIDVMPKTRSGKIMRRLLKARELGLPEGDTSTLEDDG

SEQ ID NO: 163300 - protein, 59 aa, Unknown
  Bacterial polypetide isolated from the Sargasso Sea
IAKPDIIQWAPGLPKTRSGKIMRRILRKVAANEMDALGDISTLADPSVVDDLIKGRNSK

SEQ ID NO: 163301 - protein, 155 aa, Unknown
  Bacterial polypetide isolated from the Sargasso Sea
MSLDKKNSINNILEERRIFSPSKEFAEKSNIRSEKELLSLKKQSLDNPIRFWDSFARSEIDWFEPFQTVLDSDNAPFFKWFKEGKLNITHNCLDRHIKRGLGGKTALIWEGEPGDSKKYTYEELLKEVCKAANALKAIGVKKGDLVCIYMPMIPE

SEQ ID NO: 163302 - protein, 95 aa, Unknown
  Bacterial polypetide isolated from the Sargasso Sea
IKGQGIYAYVTLMVDENFSENLKNELINFVSKEIGPIAKPDLLQNAPSLPKTRSGKIMRRILRKIAEGDFDNLGDTSTLAEPAVVNDLMLNKQSL

SEQ ID NO: 163303 - protein, 232 aa, Unknown
  Bacterial polypetide isolated from the Sargasso Sea
TFKKVKRKTKVRKKRSKKLKKKIKKRKDDGNSTPDIIIKTKPEWAKQSLANKTQYQKKYNDSIKNNSGFWKKEGKRITWIKRYKKIKDVKYSSKDVKIKWFYDGTLNASANCIDRHLKDKKDKTAIIWVGDDPKDNQKITYKQLYQKVSKAANGLKKLGIQKGDRVTIYLTMIPELAILMLACARIGAVHSIIFGGFSADSISGRVNDCESEYIITADEGVRGGKTIPLKST

SEQ ID NO: 163304 - protein, 82 aa, Unknown
  Bacterial polypetide isolated from the Sargasso Sea
AGEESSLDLERDLKLWVRKQIGPIATPDLIQFSPGLPKTRSGKIMRRILRKIAANKHDQLGDTTTLADPSVVKSLVNNRKNV

SEQ ID NO: 163305 - protein, 179 aa, Unknown
  Bacterial polypetide isolated from the Sargasso Sea
MRKDELSEFENAYTESIKEPEKFWFTAAQEIDWFKTPTKTLDISTAPHGHWFVDGELNTCFNALDRHINAGRGENAALIYDSPVTSTLKTFSFRELRDQVALCAGGLTELGVGRGDRVIIYMPMIPETIIAMLACARIGAIHGVVFGGFASAELAVRIDDARPKAIVSASCGIEVNKVI

SEQ ID NO: 163306 - protein, 236 aa, Unknown
  Bacterial polypetide isolated from the Sargasso Sea
MAKRSKKKRSKISKRKKISNKNKKQKLSEKNQDLIVKTKSDWIKKAIINKKQYEKKYSYSLKNNDDFWKKEGKRINWIKPYKKIKNIKYSKSEVSIKWYYDGTLNASANCIDRHLKKNKDKTAIIWVGDDPKVQKKITYKQLHHEVSKTANALKELGIKKGDRVTIYLTMIPELAYTMLACARIGAIHSIIFGGFSPDSISGRINDCKSDYVVTADEGLRGGKTIPLKSITDEALV

SEQ ID NO: 163307 - protein, 291 aa, Unknown
  Bacterial polypetide isolated from the Sargasso Sea
MPKKKKSKKKKAKKVKKKKSSKKRRKIKRVSKTKRTSVKRSKKKNIDKISSNEQIIKTKPEWVKRSLANKAQYQKKYSDSIKNNNSFWKKEGKRITWIKPYKKIKDVKYSKDEVRIKWFEDGTLNASANCIDRHLKDKKDKTAIIWVGDDPKDTQKISYKQLHQKVSKAANGLKKLGIQKGDRVTIYLTMIPELAILMLACARIGAVHSIIFGGFSAESISGRVNDCKSEYIITADEGVRGGKTIPLKATTDEALSNCPDVKKCIVVKRTGNYVYWDQGRDVWYHDLIKDV

SEQ ID NO: 163308 - protein, 249 aa, Unknown
  Bacterial polypetide isolated from the Sargasso Sea
MNSEKFDIGLGNNDSTIRDSGKKDYISFWNECAKSLSWFEPWAETLQWNPPFARWFTGGKINAAYNALDIHQDSKSKKSAILWEGEDGTDRKITYHEMFVQVQKLANVLKSLGVKKGDRVTIYLPMIPELPISMLACARIGAVHTVVFSGFSATSLSDRVEDSQSKVIITADGGYRKGKIINLKQIVDESASSVQFVKNVIVYQRTGQEIQMNEKDLLWSDVMDSASPECDAEVLDSTDSLYILYTSGT

SEQ ID NO: 163309 - protein, 98 aa, Unknown
  Bacterial polypetide isolated from the Sargasso Sea
MVGYPHDIKGNALYAYVILKDESTRDNIKTEINQLIAKTIGPIAKPEKIQLVPGLPKTRSGKIMRRILRKIASGEKSKFGDISTLLNPEIVNEIVKGS

SEQ ID NO: 163310 - protein, 294 aa, Unknown
  Bacterial polypetide isolated from the Sargasso Sea
IPEAIIAMLAVARLGAVHSVVFGGFASKELAVRIDDCKPKLIISASCGFEPNRVVEYKPLLDEALKIAEHKVGKCIIYQRKDFNADLNPEIDIEWFEFLNDAVDAECVMVSGKDPLYILYTSGTTGQPKGVVRDNGGHAVSLKWSMKNIYGLDPGEVFWAGSDIGWVVGHSYIVYAPLFHGCSTILYEGKPVGTPDAGAFWRVIEDYNVKVFFTAPTALRAVKKDDPKGDFINRSKLSNLKALFLAGERADPDTVTWLEQQLGIPVIDHWWQTETGWPIASNPIGIENLPLKKG

SEQ ID NO: 163311 - protein, 183 aa, Unknown
  Bacterial polypetide isolated from the Sargasso Sea
MPKKKSKKRKQKRKQKRKKKKILEKKTNELIYKTKSDWVKKALINKSGYEKKYSQSLKDNDSFWRKEGKRITWIKPYTKIKDVKYSKSEVNIKWFYDGTLNASANCIDRHLKKNKDKTAIIWVGDDPKVQKKISYKQLHQEVSKTANGLREIGVKKGDRVTIYLTMIPELAYTMLACARIGAI

SEQ ID NO: 163312 - protein, 292 aa, Unknown
  Bacterial polypetide isolated from the Sargasso Sea
MNWAEVMSNEKGKKSKCASLDSEDPLYILYTSGTTGIPKGIVRTNGGHAVALYNSMKMTYDIKKDDVFWAASDVGWVVGHSYIVYAPLLFGCTTVLYEGKPIGTPDAGQFWRVISEHNVSTMFTAPTAIRAIKKIDPQGKEIKKYKFNNFKYLFLAGERADPETIKWSTDHLKVPVIDHWWQTETGWSIAGNFPEFGIFEIKYGSTGKAAPGYQVEVLDEKGKNLEKEKMGNLVIKLPLPPGCSSSIWNDPERFFKAYLEKYNGYYNTSDAGVIDKDGYISVMSRTDDIINC

SEQ ID NO: 163313 - protein, 217 aa, Unknown
  Bacterial polypetide isolated from the Sargasso Sea
YKVKGDWIKKATVNKSEYEKKYKQSLKDNDSFWKKEGKRITWIKPYSKIKDVKYSKSDVHIKWYYDGTLNASANCIDRHLKRNKDKTAIIWVGDDPKVQKKISYKQLHQEVSKAANGLKELGVKKGDRVTIYLTMIPELAYTMLACARIGAIHSIIFGGFSPDSISGRINDCKSDYVITADEGIRGGKTIHLKSITDEALVDCPKCKKMYCCKKNWK

SEQ ID NO: 163314 - protein, 146 aa, Unknown
  Bacterial polypetide isolated from the Sargasso Sea
CYLKKYPGYYLTGDGGLIDKDGYLFVMGRVDDVINVAGHRLSTGQMEEIIASHPAVAECAVVGIDDEIRGQVPVGFSVIKDGFSINQNELEKEIIGLIRHKIGAIACFKRSVIVNRLPKTRSGKILRKNIRQIASKEEFSIPHNNR

SEQ ID NO: 163315 - protein, 75 aa, Unknown
  Bacterial polypetide isolated from the Sargasso Sea
DLERELKLWVRKQIGPLATPDFIQFAPGLPKTRSGKIMRRILRKIAANEYDQLGDTTTLADPSVVKSLVENRKNN

SEQ ID NO: 163316 - protein, 47 aa, Unknown
  Bacterial polypetide isolated from the Sargasso Sea
LFILYTSGSTGKPKGVLHTTGGYIMYSAITHKFIFDYQDGEVYWCTA

SEQ ID NO: 163317 - protein, 94 aa, Unknown
  Bacterial polypetide isolated from the Sargasso Sea
KGNGLYCYVTLNAGEKSTLDLERDLKLWVRKQIGPIATPDLIQFAPGLPKTRSGKIMRRILRKIAANEHGQLGDTTTLADPSVVDSLVDNRKNI

SEQ ID NO: 163318 - protein, 112 aa, Unknown
  Bacterial polypetide isolated from the Sargasso Sea
VLHKNVSEAAVVFFPHDIKGQGIYAYVTLMTGQDYNENLKKELIAWVKSVIGPIAAPDVIQWAPNLPKTRSGKIMRRILRKVACKEEESIGDTSTLNDPSVVNELVDNRGKN

SEQ ID NO: 163319 - protein, 244 aa, Unknown
  Bacterial polypetide isolated from the Sargasso Sea
MVYKTKKDWISKATVNKSQYEKKYKTSISDNENFWKKEGKRINWIKPYTKIKDVKYSSSDVKIKWFYDGTLNASANCIDRHLKKNKDKTAIIWVGDDPKVQKKISYKELHKEVSKAANGLKKIGVQKGDRVTIYLTMIPELAFTMLACARIGAIHSIIFGGFSPDSISGRINDCNSDYVITADEGIRGGKTIHLKSIMDEALVECPKVKKCVVVKRTGNRINWDQSRDVWYHEMIQNVSAKCDP

SEQ ID NO: 163320 - protein, 33 aa, Unknown
  Bacterial polypetide isolated from the Sargasso Sea
TMPKTRSGKIMRRLLKARELGLPEGDTSTLEDD

SEQ ID NO: 163321 - protein, 104 aa, Unknown
  Bacterial polypetide isolated from the Sargasso Sea
AAVVGYEHEIKGQGIYCYVTLMLGEELSEDLKNDLIQLVAKEIGAIAKPDIIQWAPGLPKTRSGKIMRRILRKIASNEVNDLGDTTTLADPSVVEELIRNRENK

SEQ ID NO: 163322 - protein, 97 aa, Unknown
  Bacterial polypetide isolated from the Sargasso Sea
DIKGWGIYAYITLKTDFNESNELKKELIDEVRKVVGPIASPDLIQWAPGLPKTRSGKIMRRILRKIAADESDQLGDVSTLADPAVVQDLVNARLNKK

SEQ ID NO: 163323 - protein, 143 aa, Unknown
  Bacterial polypetide isolated from the Sargasso Sea
MTNKDLYKPALDIVKNSHANETIYKKMYRESINSPEEFWKEHGQRIDWIKPYTKVKDVSYEKENLHIKWYEDGTLNASFNCLDRHLKTNGKKTAIIWEGDNPNESKHISYSDLYKDVCKFSNVLKDAGAKKGDRITIYMPHDP

SEQ ID NO: 163324 - protein, 115 aa, Unknown
  Bacterial polypetide isolated from the Sargasso Sea
MEIESALVSHKSVAESAVVGKKDDLKGEVIVAFVSLEKDVNGSSELVENLKKHVVNEIGVIAKPEKIIISDSLPKTRSGKIMRRILRSLAAGEKISGDISTLEDSSVLEKLKELS

SEQ ID NO: 163325 - protein, 81 aa, Unknown
  Bacterial polypetide isolated from the Sargasso Sea
GEEPNGELERELKLWVRKQIGPLATPDIIHFSPGLPKTRSGKIMRRILRKIAANEHEQLGDTTTLADPSVVKSLVENRKNI

SEQ ID NO: 163326 - protein, 256 aa, Unknown
  Bacterial polypetide isolated from the Sargasso Sea
MPKKRKKKKIASKKTKETIYKTQKDWISKAIVNKSQYLKKYNESIKNNDGFWKKEGKRINWIKPYKKIKDVKYSKDDVHIKWFYDGTLNASANCIDRHLKKNADKTAIIWVGDDPKVQKKISYKELHKEVSKAANGLKNLGVQKGDRVTIYLTMIPELAYTMLACARIGAIHSIIFGGFSPDSISGRINDCESDYVITADEGVRGGKTIPLKSITDEALENCPNVKKCIVVKRTGTKKIDWFNDRDVWYHHMTKKV

SEQ ID NO: 163327 - protein, 197 aa, Unknown
  Bacterial polypetide isolated from the Sargasso Sea
MANYEQIYREALRNNEAFWLDAASAIDWTKEPKTALDKKNPPLYRWFPDGEMNTCFNAVDRHVLAGRGTQNAIIYDSPITGQKSSTTYAELKNQTERFAGMLASLGVTRGDRVIIYMPMIPEAIVAMLGCARIGALHSVVFGGFAAAELAKRFDDSTPKVVISASCGHEPGRIVEYKPLLDAAIEFARHKPTNCVIV

SEQ ID NO: 163328 - protein, 245 aa, Unknown
  Bacterial polypetide isolated from the Sargasso Sea
MQRIKTLSEYFKKYELSEKDPEKFWSQIADSFLWKKKWDNVLESDFENADFKWFKNAQLNITENIFERNLSERGDKTAIIWEPNDPKESPIYLSYKELYEQTCTFSNALRSKGIKKGDRVIIYMPMVPEAAIAMLACARVGAVHSVVFAGFSAASLADRINDCEAKMVLTSDGNFRGNKTIPVKDVVDEALEKCSSIKSVIVLERTKQNINMEDGRDFWWHECIEDEPNTCDSEVMDSEDLLFIL

SEQ ID NO: 163329 - protein, 212 aa, Unknown
  Bacterial polypetide isolated from the Sargasso Sea
LKNNANATSAWFKDAEKDRLEYWKQQALNRITWFKEPTEVLDDSNAPFFKWFSDGELNLSYNCLDRHLETDGDRVAYYWEGEPGDTQEITYRDLYERVCKLSNALKSLGVQKGDRIAIYLGMTPEIVVSMLACARIGAVHSVVFGGFSAEALADRINDAEAKVVITADGAWRRGEIVPLKENVDNSLELTEFIESVVVVKRTEQEVNMKDGR

SEQ ID NO: 163330 - protein, 167 aa, Unknown
  Bacterial polypetide isolated from the Sargasso Sea
MREFKLSNPLLSQDQYEEMYAESFNNKEQFWSKIARSQLSWFKDFTKIKNTNYDGDVSIKWFEDGELNVCYNCVDRYAETRPEEIAIIWEGDETSQNKTYTYKDLKSEISKFSNVLKKLGVQKGDVVTIYLTMIPEVAFAMLACARIGAIHSVIFGGFAPESLHDAL

SEQ ID NO: 163331 - protein, 82 aa, Unknown
  Bacterial polypetide isolated from the Sargasso Sea
DEGVKNIQEELKKELLNWVCKIIGPIATPDKIQWAPSLPKTRSGKIMRRILRKLACNEEDSIGDISTLNDPNVVNELIKNRD

SEQ ID NO: 163332 - protein, 62 aa, Unknown
  Bacterial polypetide isolated from the Sargasso Sea
MGPIATPDLIQFAPGLPKTRSGKIMRRILRKIAANEHGQLGDTTTLADPSVVESLVDNRKNI

SEQ ID NO: 163333 - protein, 146 aa, Unknown
  Bacterial polypetide isolated from the Sargasso Sea
MATKYQEIYQRSIEKPETFWSEVASDIFWYKKPSKILNANNPPFYTWFQDGTTNTCYNAVDLHVENGKGDKVAIIYDSPITKSQKKITYTQLKDQVSIFAGALVKQGIKKGDRIIIYMPMIPEAVIAMLACGRIGAVHSVVFGGFA

SEQ ID NO: 163334 - protein, 198 aa, Unknown
  Bacterial polypetide isolated from the Sargasso Sea
MKFEQIYNKSITKPEEFWREISEDIFWFKKPTKILNKTNPPFYKWFEDGTTNTCYNALDFHIDNGLGEKTALIYDSPITGNKAKFTYNELRSKVSKFAGALKNQGLQKGDRAIIYMPMVPEAVVAMLACGRIGVIHSVVFGGFASNELASRIDDSKAKILITASCGFEPGRTVEYRPLVDGALKLAKHSIEKVIFFQR

SEQ ID NO: 163335 - protein, 260 aa, Unknown
  Bacterial polypetide isolated from the Sargasso Sea
MPKKKKKKSKVRKKRSKVRKKTSKKTKKKIKAKKENGNIPPEVIIKTKPEWIKSSLANKSKYQQKYTQSIKNNDEFWRKEGKRITWIKPYKKIKDVKYSSKEVKIKWFEDGTLNASANCIDRHLKDKKDKTAIIWVGDDPKESQKITYKELHKKVSKAANGLKKLGIKKGDRVTIYLTMIPELAILMLACVRIGAVHSIIFGGFSAESISGRVNDCESEFIITADEGVRGGKVIPLKDTTDEALLNCPNVKKCIVVKRTG

SEQ ID NO: 163336 - protein, 215 aa, Unknown
  Bacterial polypetide isolated from the Sargasso Sea
MGTCTKALPGIEIGIIDNNGNEIFSKNEGGNLVIKKPWPSMLRGIWGDKNRYIDTYWKKYNNKYYVTGDTARYDEYGNIWIMGRSDDVVNISGHRLGTMEIESAIVSHEFVAESAVVSYKHEIKGEAIHAFVTLGEKYSKDIGPDVAEEIREWVKDKIGSIAKPDKISFSTSLPKTRSGKIMRRLLRNIARGEDISGDTSTLENEDILDQLKKSL

SEQ ID NO: 163337 - protein, 96 aa, Unknown
  Bacterial polypetide isolated from the Sargasso Sea
DIKGQGIYCYVTLMAGEPQSDELKDSLVGLVSKEIGPIAKPDIIQWAPALPKTRSGKIMRRILRKIASNEIEDLGDTTTLAEPSVVEDLIKNRENY

SEQ ID NO: 163338 - protein, 163 aa, Unknown
  Bacterial polypetide isolated from the Sargasso Sea
RYKNVYFSAYPGYYFPGDGAFRDEDGNYRITGRVDDVVIVSGHNLGTAPIEDVINMHDNVVESALVGYPHDIKGNALYAFVILKDDSKKDDIEVEINKLISKTIGPIAKPEKIQLVPGLPKTRSGKIMRRILRKIASGEKDNFGDISTLLNPEIVEQIVEVSQ

SEQ ID NO: 163339 - protein, 272 aa, Unknown
  Bacterial polypetide isolated from the Sargasso Sea
MHQCKSGRKNMSYQKEYRESIENPEAFWSRQAELIRWYEKPKSILSQDEKGFYHWFKGGKLNTSYLALDFHVENGRAEQAALIYDSPVTETVRSYTYRELLDEVARFAGVLQNQGVEKGDRVIIYMPMIPKAVVTMLACARLGAIHSVVFGGFAPNELAIRIDDAKPKALVTASCGIEFTNIIEYKPLVDEALRISSHAPETVILLQRSQAKASMQAGRDLDWNDLMSSANPADPVLMDATDPLYILYTSGTTGLPKGVIRENGGHAVALKY

SEQ ID NO: 163340 - protein, 270 aa, Unknown
  Bacterial polypetide isolated from the Sargasso Sea
MPKKKKKKSKVRKKKSKVRKKTSKKVKKKSKVRKKTSKKLKKKNKAKKENGNTHPEVVIKTKPEWVKSSLANKSKYQQKYSQSIKSNDEFWRKEGKRITWIKPYKKIKDVKYSTKEVKIKWFEDGTLNASANCIDRHLKDKKDKTAIIWVGDDPKDSQKISYKQLHQKVSKAANGLKKLGIKKGDRVTIYLTMIPELAILMLACVRIGAVHSIIFGGFSADSISGRVNDCESEYIITADEGVRGGKTIPLKYTVDEALMSCPNVKKCIVV

SEQ ID NO: 163341 - protein, 278 aa, Unknown
  Bacterial polypetide isolated from the Sargasso Sea
VYLQRPQAKVIIQSERDYDWYELVNQSEPIAPVAVEATDPLYILYTSGTTGLPKGVVRDNGGHAVALKYSMKAVYNTDPGDVYWAGSDVGWVVGHSYIVYAPLLHGCTTIVYEGKPVRTPDAGAFWRVISEYKVNTFFTAPTAFRAVKKEDPEAKLKKSYDISSLRTLFLAGERLDPPTYHWLKEILKEDSDEGIPVVDHWWQTETGWAICSNPMGIEPHPVKNGSPTVPMPGYNVQVLDDDGSTSKPGETGNIVIHLPLPPSCLPTLWNDNKRFKQS

SEQ ID NO: 163342 - protein, 269 aa, Unknown
  Bacterial polypetide isolated from the Sargasso Sea
MGGHAVALHWTMQNIYDVKPGEVYWAASDVGWIVGHSYIVYAPLLHGNTTVLFEGKPVGTPDAGTFWRVIAEHKVACMFTAPTAIRAIKQQDPDGEFAKHYDLSHLRSLFLAGERCDPPTLAWAEAILGVPVIDHWWQTETGWAIASNCLGIETLPIKAGSAARATPGWDVLVLDADGHEMAAGEVGAIACRLPLPPGTLPGLWQANDRYKHAYLDRFEGFYETGDAGYIDEDGYIFVMARTDDIINVAGHRLSTGAMEEVLAAHPDVA

SEQ ID NO: 163343 - protein, 214 aa, Unknown
  Bacterial polypetide isolated from the Sargasso Sea
MLYKTKKDWISKAIVNKSQYEKKYKNSISDNDNFWKKEGKRINWIKPYTKIKDIKYSSSDVKIKWFYDGTLNASANCIDRHLKKNKDKTAIIWVGDDPKIQKKISYKELHKEVSKAANGLKKIGVQKGDRVTIYLTMIPELAYTMLACARIGAIHSIIFGGFSPDSISGRINDCKSDYVVTADEGVRGGKIIHLKSIMDEALVECPKVKKCVVV

SEQ ID NO: 163344 - protein, 259 aa, Unknown
  Bacterial polypetide isolated from the Sargasso Sea
DTLEWTEKMLKVPVVDHWWQTETGWPIASNCLGIELLDIKPGSPTCAVPGWKIDVLDESCKPVPPGEIGAISLKLPLPPGSLPTLWQNDKRFVDSYLTRYPGYYETGDAGIIDQDGYLHVLSRTDDIINVAGHRLSTGGMEQVLAEHQDVAECAVLGVSDQLKGQVPLGLLVLKDGVNTEHKQIIEDVIRMVRAEIGPVAAFKVAVIVKRLPKTRSGKILRGIIQKIADSADYDLPATIDDPHILMEIKEALQNIGYAT

SEQ ID NO: 163345 - protein, 287 aa, Unknown
  Bacterial polypetide isolated from the Sargasso Sea
KKKSKVRKKTSKKVKRRSKVRKKTSKKVKRRSKVRKRSSKKPKKRIKTKKENGNTPPEVVIKTKPEWVKSSLANKSKYQQKYSQSIKSNDEFWRKEGKRITWIKPYKKIKDVKYSTKEVKIKWFEDGTLNASANCIDRHLKDKKDKTAIIWVGDDPKDSQKISYKQLHQKVSKAANGLKKLGIKKGDRVTIYLTMIPELAILMLACVRIGAVHSIIFGGFSADSISGRVNDCESEYIITADEGVRGGKTIPLKYTVDEALMSCPNVKKCIGVKRTGNYINWDQNRDV

SEQ ID NO: 163346 - protein, 76 aa, Unknown
  Bacterial polypetide isolated from the Sargasso Sea
WRARRDLKLWVRKQIGPLATPDLIHFTPGLPKTRSGKIMRRILRKIAANEHGQLGDTTTLADPSVVDSLVDNRKNI

SEQ ID NO: 163347 - protein, 122 aa, Unknown
  Bacterial polypetide isolated from the Sargasso Sea
SGHRIGTAEVEGAIGAASGVAEAAVIGYSHEIKGEGIYAFVTLMTGVEASAEIEQDILSTVTKIIGPHAKPSAIQFCSGLPKTRSGKIMRRILKKIAQNETDDLGDTSTLADPSVIDSLLQK

SEQ ID NO: 163348 - protein, 274 aa, Unknown
  Bacterial polypetide isolated from the Sargasso Sea
SQDPLYILYTSGTTGDPKGMVRENGGHAVALKNSMSMIYGINSDDTFWAASDIGWVVGHSYIVYGPLLKGCTTVLFEGKPVGNPDAGAFWRVISEHNVSVMFTAPTALRAIKREDPEGKHIKKYDLNNFKMQFLAGERADPATIEWAKKHLNVPIIDHWWQTETGWAIAGNFSGLGIFDIRPGSTGKPSPGFDVCCLDEKGNIKPFDEIGSLAIKLPLPPSCSSTLWQDKKRYNISYLNEFKGWYSSADAGYIDKDGYIWVMSRTDDIINCAGH

SEQ ID NO: 163349 - protein, 313 aa, Unknown
  Bacterial polypetide isolated from the Sargasso Sea
AGTFWRIISEYKVKVLFTAPTALRAVKRDDPNGEFIKKFDLTSLQSLFLAGERADPDTVLWLEKKLKVPIIDHWWQTETGWPVAANPLGIEPLPIKIGSPTTAMPGYDVRVLSENGKEVPRGSLGAISIKLPLPPGSLPSLWNADDRFIEAYLSTFEGFYETGDAGYQDEDGYLYIMSRTDDVINVAGHRLSTGAMEETLSNHVDVAECAVVGVSDDLKGQVPLGLICLNNGCNKTHEDVCKEVVDLVRNEIGPVAAFKSVAVVSALPKTRSGKILRATIRKIADKVEWEMPATVDDPQVFKEIEEVLKPLGY

SEQ ID NO: 163350 - protein, 393 aa, Unknown
  Bacterial polypetide isolated from the Sargasso Sea
MKYKSVYNQWRNDPEKYWQNLANDISWKVFPKTILNKKNEYLYEWFPDGILNTCYNAVDKNIVEGRGNQVAIYYESPITNSKSKITYNDLRDKVSKFAGGLKKLNIEKGDRVIIYMPMVPEAIIAMLAVARLGAVHSVVFGGFASKELAVRIDDCKPKLIISASCGFEPNRVVKYKPLLNEALNIANHKVSDCIIYQRKGFEADLNPEIDIEWFEFLKDVDEEECVMVYGKDPLYILYTSGTTGQPKGVVRDNGGHAVSLKWSMKNIYGLNPGEVFWAGSDIGWVVGHSYIVYAPLFHGCSTVLYEGKPVGTPDAGAFWRVIENYNVKVFFTAPTALRAVKKEDPKGKFINQSKLSSLKALFLAGERADPDTVTWLEKQLSIPIIDHWWQTET

SEQ ID NO: 163351 - protein, 255 aa, Unknown
  Bacterial polypetide isolated from the Sargasso Sea
MSDKIFPVPKKSNLVPLISEEKYSELYRFSIDNPKEFWGEQALSRLNWIKPFDDVLSTNMEKAEFEWFSNGKLNACFNCVDKHLENNGNDIAFIWESDDGSTSKKITYNELYEEVCRLSNLLKSRGIKKGDRVCIYMPMILEAIYSMLACARIGAVHSVVFGGFSVESLKDRILDSDCQTIITANEGLRGGKKVPLKNNVDSAVEQCPNVHTVIFVKNTDTAININPEIDVAYSDVISNFEPHCECEPMDSEDPL

SEQ ID NO: 163352 - protein, 217 aa, Unknown
  Bacterial polypetide isolated from the Sargasso Sea
MVATETGAIMCANYPSENIKPGSMGQPFPGITMGILDDQYNELPADASGILAVRPGWPSQMFAYWKQDDMYNSRFKKGWYITGDQASRDKDGYFWFQGRADDVINTAGHLVGPFEVESALIEHPAVAEAGVIGKPDPIAMEIVKAFVSLNPGFEQSDDLRKELIRFAREKLSAGVAPREIDFLETMPKTRSGKIMRRLLKARELGEPEGDISTLEDD

SEQ ID NO: 163353 - protein, 180 aa, Unknown
  Bacterial polypetide isolated from the Sargasso Sea
MADNTFKPQPKISERAHISSLEQYGELYKRSINDPTEFWEEIAQRLDWYKPWNKVREFDFVNGEIEWFSGGELNACYNCIDRHINEGHGEDIAIIWEGNDPNQSRKFSYNDLLKEVSQFANALKELGVQKGDRVCLYMQMIPELAIAVLACARIGAVHSVVFGAFSSDSLRDRINDSECK

SEQ ID NO: 163354 - protein, 77 aa, Unknown
  Bacterial polypetide isolated from the Sargasso Sea
GDLERDLKLWVRKQIGPIATPDVIQFAPGLPKTRSGKIMRRILRKIAANEPDNLGDTTTLADPSVVTSLVENRQNKG

SEQ ID NO: 163355 - protein, 124 aa, Unknown
  Bacterial polypetide isolated from the Sargasso Sea
MKSDFDQIYKESINNPEKFWQEISNDIFWFKKPSKILNKSNPPFYKWFEDGTTNTCYNALDLHVDNGRGDKTALIYDSPITGNKKKFSYLELKEKVSKFAGSLDNLGIKKGDRVIIYMPMIPEA

SEQ ID NO: 163356 - protein, 65 aa, Unknown
  Bacterial polypetide isolated from the Sargasso Sea
RKQIGPIATPDLIQFAPGLPKTRSGKIMRRILRKIAANEHGQLGDTTTLADPSVVDSLVDNRKNI

SEQ ID NO: 163357 - protein, 72 aa, Unknown
  Bacterial polypetide isolated from the Sargasso Sea
RELKLWVRKQIGPLATPDLIHFTPGLPKTRSGKIMRRILRKIAANEHGQLGDTTTLADPSVVDSLVDNRKNT

SEQ ID NO: 163358 - protein, 152 aa, Unknown
  Bacterial polypetide isolated from the Sargasso Sea
MAGNYKKTYDSSIKDMESFWKTISEGIFWFKKPSKILNSSNPPFYKWFEDGITNTCYNAVDVHIDNGRGDKTAIIYDSPITGTKYKLSYKDLKEKVSNFAGALKNQGIKKGDRVIIYMPMIPQAVIAMLACGRKGAIHSVVLEGLQLTNSKQ

SEQ ID NO: 163359 - protein, 241 aa, Unknown
  Bacterial polypetide isolated from the Sargasso Sea
MPKKKKKKSKVKKKSSKKVKKRTKVKKVSNKIKKKTKSKKKTKKENGSSPPEIVIKTKPEWVKASLANKSKYQQKYSQSIKSNDDFWRKEGKRITWIKPYKKIKDVKYSTKEVKIKWYEDGTLNASANCIDRHLKDKKDKIAIIWVGDDPKDSQKITYKQLHQKVSKAANGLKKLGIKKGDRVTIYLTMIPELAILMLACVRIGAVHSIIFGGFSAESISGRVNDCESEYIITADEGVRGG

SEQ ID NO: 163360 - protein, 219 aa, Unknown
  Bacterial polypetide isolated from the Sargasso Sea
MNEKIENLLNEDRLFEPSEELKNNANATSEWFQDAEKDRLEYWKQQALNRITWFKEPTEVLDDSNAPFFKWFSDGELNLSYNCLDRHLETDGDRVAYYWEGEPGDTQEITYRDLYERVCKLSNALKSLGVQKGDRIAIYLGMTPEIVVSMLACARIGAVHSVVFGGFSAEALADRINDAEAKVVITADGAWRRGEIVPLKENVDNSLELTEFIESVVVV

SEQ ID NO: 163361 - protein, 181 aa, Unknown
  Bacterial polypetide isolated from the Sargasso Sea
MKEKLFKPLKELSQKAHVGSLEEYNNEYDRSIKDQNLFWEEKAERISWYKKWDSVGSFDYVNGVIKWFDGGKLNVSYNCLDRHVESGKGDRTALIWEGNNPEENKTFSYNDLLIEVKKFSNVLIGLGIQKGDRVCLYMQMVPQLPIAMLACARIGAVHSVVFGAFSSDSLRDRINDSTCKI

SEQ ID NO: 163362 - protein, 95 aa, Unknown
  Bacterial polypetide isolated from the Sargasso Sea
IKGQGIYAYVTLNAGEETSDELYKELVAWVRKEIGPIASPDLIQWAPGLPKTRSGKIMRRILRKIAENDYSNLGDTSTLAEPAVVNDLVENRMNK

SEQ ID NO: 163363 - protein, 127 aa, Unknown
  Bacterial polypetide isolated from the Sargasso Sea
MSNKFKDLYKKSIENPEIFWQEASRDIFWFKEPTKILNKSNAPFYKWFEDGVTNTCYNALDIHIDQGNGERTALIYDSPITDNKSKFTYKELKLKVSRFAGALEKSGVNKGDRVIIYMPMIPEAVIA

SEQ ID NO: 163364 - protein, 115 aa, Unknown
  Bacterial polypetide isolated from the Sargasso Sea
MEIESALVSHKSVAESAVVGKKDDLKGEVIVAFVSLEKDVNGSSELIENLKKHVVNEIGIIAKPEKIIISDSLPKTRSGKIMRRILRSLAAGEKISGDISTLEDSSVLEKLKELS

SEQ ID NO: 163365 - protein, 68 aa, Unknown
  Bacterial polypetide isolated from the Sargasso Sea
MCASEIGANAKPDFIQWAPGLPKTRSGKIMRRILRKIAANDFSNLGDTSTLADPEVVEDLMNSRQAFD

SEQ ID NO: 163366 - protein, 135 aa, Unknown
  Bacterial polypetide isolated from the Sargasso Sea
MSLKFNEIYENSINNPEKFWQEASEDIFWFKKPTKILNKSNPPFFKWFEDGVTNTCYNALDIHIDQGRSKKTALIYDSPITGNKSQFTYEELRSKVSKFAGALKAQGTNKGDRVIIYMPMIPEAVVAMLACARIG

SEQ ID NO: 163367 - protein, 138 aa, Unknown
  Bacterial polypetide isolated from the Sargasso Sea
MDINFKEIYQKSISKPEEFWSEISNDIFWFQKPTKILNKSNPPFYKWFEDGKTNTCFNALDIHIDQGKGDKTALIYDSPITGNKKKFTYKELKEKVSKFAGALKNQGVNKGDRIIIYMPMIPEAVVAMLACGRIGAIH

SEQ ID NO: 163368 - protein, 157 aa, Unknown
  Bacterial polypetide isolated from the Sargasso Sea
MKFDIDSFVNPNLKDFLEYQSLYNDSVKDPSNFFLKQALKEIDWIKEPTKGSTGSLSSPKWFEDGMLNISYNCIDRHAENHPEKTAIIWQGDEREKNENISYIQLQKQVCKLANGLKSIGVSKGDRVCIYMPMVPPAAYAMFACMRIGAIHSVVFGG

SEQ ID NO: 163369 - protein, 92 aa, Unknown
  Bacterial polypetide isolated from the Sargasso Sea
QGIYAYVTLNAGEETSDKLYKELVAWVRKEIGPIASPDLIQWAPGLPKTRSGKIMRRILRKIAENDYSNLGDTSTLAEPAVVNDLVENRMNK

SEQ ID NO: 163370 - protein, 146 aa, Unknown
  Bacterial polypetide isolated from the Sargasso Sea
MHECKSGRKNMSYHKEYRESIENPEAFWSRQAELIIWYEKPKSILSQDEKGFYHWFKGGKLNTSYLALDFHVENGRAEQAALIYDSPVTETVQSYTYRELLDEVARFAGVLQNRGVDKGDRVIIYMPMIPEAVVAMLACARLERFT

SEQ ID NO: 163371 - protein, 123 aa, Unknown
  Bacterial polypetide isolated from the Sargasso Sea
MSDNIKIPVFENFKDSAHLTKDKYEEAYKFALDNPEAFWEKEGKRINWINPYTMVKDVTWSNNDVNIKWYYDGTLNASYNCIDRHLSDKSDQIAIIWEGDDPNESKKITYKELHQKVSKFANM

SEQ ID NO: 163372 - protein, 102 aa, Unknown
  Bacterial polypetide isolated from the Sargasso Sea
AVVGIEHEIKGQAIYAYVILKDNDKDKKIINIEILEEVSKIIGKIAKPEVIQFTRDLPKTRSGKIMRRILRKIANNEFKNLGDTTTLADPSIVEELIKNKNE

SEQ ID NO: 163373 - protein, 380 aa, Unknown
  Bacterial polypetide isolated from the Sargasso Sea
ATDPLYILYTSGTTGLPKGVVRDNGGHAVALKYSMKAIFNSEPGDVYWAGSDVGWVVGHSYIVYAPLIHGCTTVLYEGKPVKTPDAGSFWRVISEHQVNTFFTAPTAFRAVKKEDPTAKLKEKYDISCLRSLFLAGERLDPPTYEWLTEILNIPVIDHWWQTESGWPMCSNMMGLDPYPVKIGSPTFPVPGYDVKVLDDEGNSCKSSETGNIVVKLPLPPSCLPTLWNDDKRFRDSYLSKYPGYYLTGDGGLIDEDGYLFVMGRVDDVINVAGHRLSTGQMEELIAAHPAVAECAVVGIDDNLRGQIPVGFSVLKDGINVSQDQLEQEMVGIIRKEIGAVAYFKQCVIVSRLPKTRSGKILRKTIRQLAKGENVPAPPTM

SEQ ID NO: 163374 - protein, 139 aa, Unknown
  Bacterial polypetide isolated from the Sargasso Sea
YLNNEEATNQTIDPEGWLKTGDIAEVDEDGYFKIVDRVKELIKYKGFQVAPAELEALLLTHPSIADCAVVPAEDPEAGEIPVGFVVYKENMVENPETIMEFIAQKVSPQKKIRRIIQIEQIPKSPSGKILRRHLRDQIA

SEQ ID NO: 163375 - protein, 241 aa, Unknown
  Bacterial polypetide isolated from the Sargasso Sea
MVEGFAFPKLKTIMSGAAPLGPELAKDCARRLGCTVKQGYGLTETSPVTHLNPEPPGRVVPGSIGICIPNTECRIVDYETGKDLGTGKQGELWIRGPQVMKGYLNNEEATNQTIDPEGWLKTGDIAEVDEDGYFKIVDRVKELIKYKGFQVAPAELEALLLTHPSIADCAVVPAEDPEAGEIPVGFVVYKENMVENPETIMEFIAQKVSPQKKIRRIIQIEQIPKSPSGKILRRHLRDHIE

SEQ ID NO: 163376 - protein, 130 aa, Unknown
  Bacterial polypetide isolated from the Sargasso Sea
QTIDPEGWLKTGDIAEVDEDGYFKIVDRVKELIKYKGFQVAPAELEALLLTHPSIADCAVVPAEDPEAGEIPVGFVVYKENMVENPETIMEFIAQKVSPQKKIRRIIQIEQIPKSPSGKILRRHLRDKIA

SEQ ID NO: 163377 - protein, 245 aa, Unknown
  Bacterial polypetide isolated from the Sargasso Sea
CRVSGCGIAGGTVTTVNPTYGAEEVRFQLLDASATILVTIEAAMPIALEAIEGTDVQEIIVVGEHENATSLSEVLEAKPIDQVEVDLANHHVVLPYSSGTTGLPKGVMLTHRNLVANLCQCESAIPYDQDSSGLAVLPFFHIYGMQVLMNGLLANGCTVISMPRFDLVQALELIQKHKITHFFAVPPMILALAKQPIIDNYDLSSLEMVMSGAAPLGAELSEEAAARIQCDVIQGYGMTELSPVS

SEQ ID NO: 163378 - protein, 285 aa, Unknown
  Bacterial polypetide isolated from the Sargasso Sea
LCHGATVFCMSRFDLEQFLVLMQKHKVTRAHLVPPIVLALAKHPMVEGYAFPKLKTIMSGAAPLGPELAEDCARRLGCTVKQGYGLTETSPVTHLNPEPPGRVVPGSIGICIPNTECRIVDYETGKDLGTGKQGELWIRGPQVMRGYLNNEEATNQTIDPEGWLKTGDIAEVDENGYFKIVDRVKELIKYKGFQVAPAELEALLLTHPSIADCAVVPAEDPEAGEIPVGFVVYKENMMENPETIMEFIAQKVSPQKKIRRIIEIEQIPKSPSGKILRRYLRDQIA

SEQ ID NO: 163379 - protein, 261 aa, Unknown
  Bacterial polypetide isolated from the Sargasso Sea
HGRGVGLTVEDRQIVVLPLFHANAQYYSFAPAIWSGASVALMHTFSASNFLPQCARHSATAASLFAAPIRMILARGEEVDGVRLRHCWYAQNVTGEQYEQLSRWLGCRARQLYGMTETIPAVLTEAVDKPRHDSMGSVTEGCELQLQDAEGRPVGVGEIGEIAVRGVPGETIFGGYLDDPVATTASFRNGWFLSGDRARRDEDGRHYFDGRHSEVLKVAGENVSTVEVEGVLSTHPDVHEAAVLGSPDLIRDEVPVAFVVP

SEQ ID NO: 163380 - protein, 264 aa, Unknown
  Bacterial polypetide isolated from the Sargasso Sea
MQKHEVTRAHLVPPIVLALAKHPMVEGYAFPKLKTIMSGAAPLGPELAEDCARRLGCTVKQGYGLTETSPVTHLNPEPPGRVVPGSIGICIPNTECRIIDYETGKDLGTGKQGELWIRGPQVMRGYLNNEEATNETIDPEGWLKTGDIAEVDEDGYFKIVDRVKELIKYKGFQVAPAELEALLLTHPSIADCAVVPAEDPEAGEIPVGFVVYKENMMENPETIMEFIAQKVSPQKKIRRIIQIEQIPKSPSGKILRRHLRDQIA

SEQ ID NO: 163381 - protein, 298 aa, Unknown
  Bacterial polypetide isolated from the Sargasso Sea
YHIYGMTVILNSALSHGATVVCMSRFDLEQFLVLMQKHEVTRAHLVPPIVLALAKHPMVEGYAFPKLKTIMSGAAPLGPELAEDCARRLGCTVKQGYGLTETSPVTHLNPEPPGRVVPGSIGICIPNTECRIVDYETGKDLGTGKQGELWISGPQVMKGYLNNEEATNQTIDPEGWLKTGDIAEVDEDGYFKIVDRVKELIKYKGFQVAPAELEALLLIHPSIADCAVVPAEDPEAGEIPVGFVVYKENMVENPETIMEFIAQKVSPQKKIRRIIQIEQIPKSPSGKILRRYLRDQIA

SEQ ID NO: 163382 - protein, 347 aa, Unknown
  Bacterial polypetide isolated from the Sargasso Sea
MMLAYTSGTTGHPKGVIHCHKPVRNTYERAMLLGHNRNDVHLSYLPLFHAYGFSEVAMMVALTGGSQVLFDVFEPDQVLDAVEEEGGTVLHGFDSHWADLIREQQQRERDVTSLRVGTLPAGMESTVPIARQVQDIFCPTTSGFGMSETWAFIASSHVTNTLEQRTEASGYPMYGIEFEVRDLDQGHVLGENEQGALYVRGYTVTSGYWGKPEATAEVLDDDGWLDTGDVALLRSDGHVVFIGRHKDMLKVGGENVSPAEVEGYLLEVEGVEEIAVVGYPDDRLVEVPVAFVVSSTDLSAEALIERCRGKIASFKIPRHIIFIDEMPSTPSGKIRKIELREWALQKI

SEQ ID NO: 163383 - protein, 483 aa, Unknown
  Bacterial polypetide isolated from the Sargasso Sea
MSHYDINLDKNEANYIPLTPLTFLKRAKDIYPDYEAVIYEDRKYSWTEVYKRTVKFASALTKIGVKKGDTVSFLAFNTPEIFEGHYSVPMTGAVLNTINIRLDAKTIAYILNHSDAKVLVVDRQLHGEVKKALNTLNKKIIIIDIVDKFADQSKCEKIGELEYESFLNTGDENFDWKMPKDEWQAISLSYTSGTTGNPKGVVYHHRGSYLMSTGSAVAWDMPNRLNFLTIVPMFHCNGWGYPWTVPMLNGRTICLRNIDVKKIFELIDKYNITHFGGAPIVLNMITSAPESDRKKLKQKVFVLTAGAPPPSIIFKKMKELGFEVMHVYGLTETYGHVTQCAWNESWNKFDEEKQNEIKARQGVRYPNTEGIAVMDPKTMKEVSKDGKTIGEIMIKGNVVMKGYFKDKDATNKAMDGGWFHSGDLAVMHSDGYVKIQDRSKDIIISGGENISSIEIENTLAKHPSVSIAAVVAKPDQKWGEVPC

SEQ ID NO: 163384 - protein, 546 aa, Unknown
  Bacterial polypetide isolated from the Sargasso Sea
MATSKDIGASDGKKNKANYWALTPISFLERTNKIWPEKIAWIHGSKNNTYKELRSRCLNIANGLKIKGIKKGDTVAALLPNVPAMIECHFSVMMAGAILNTINTRLDSKAIAFILKHGKAKMIFVDPEFNEVITEAIEYLPLKERPLIIKCKDEEFIKNSPIKNEITNDDLAEIGNIKSTLEWPNDEWDACSLNYTSGTTGDPKGVLYHHRGAWLTAMSNQMVWSMGKHPVYLWTLPMFHCNGWCFPWTITALAGTHICLRTISAKNIYESITKHNVTHMCGAPIILSMIINAEKNEIIEIKNKVNIMTAAAAPPPAILAEIEKKGFEVTHVYGLTEVYGPAVVCEWKEEWNNLKTEPKSKKKARQGVQYPSLEELSIRDPKTMKSIPKDGKTIGEVMMRGNMVMKGYHNNKKATNDSFSGNWFHTGDLGVMHEDGYIELKDRSKDIIISGGENISSIEIEEALYKNSKVLLAAVVAKPDKKWGETPCAFVELKDGENATEKEIIEFCKAHIASFKCPKTIIFQIIPKTSTGKIQKFQLREIAKEL

SEQ ID NO: 163385 - protein, 329 aa, Unknown
  Bacterial polypetide isolated from the Sargasso Sea
PTIKKALSICGKKIPIIDIHDEQAIFKEGEGEKIGEWTYEEFLETGDDNFNWSLPEDEWQAISLSYTSGTTGKPKGVVYHHRGSYLMSTGSVTAWNMPNKLTFLYTVPMFHCNGWGYPWTAALIHAKIVCCRYIVAKDIYSLIDKHKVTHFGGAPIVLSLIANADEKDKKEIKHKVFVLTAGAPPTSAILEKMDNLGFEVMHVYGLTETYGHILQCAWNEDWNQLSNTEKADINARQGVRYPNTEEVCVADPETYEPVPMDGKTIGEILIRGNVVMKGYYKNKEATETSMKKGWFHSGDLAVVYPDGYIQIKDRLKDIIISGGENISSV

SEQ ID NO: 163386 - protein, 447 aa, Unknown
  Bacterial polypetide isolated from the Sargasso Sea
TINTRLDADTIAYILDHSDAKLLITDTQFSPTMKKALKIYGKNIPIIDIHDDQAVFKDGEGEQIGEMTYEEFLQTGDDNYNWSLPEDEWQAISLSYTSGTTGKPKGVVYHHRGSYLMSTGSVTAWNMPNKLTFLYTVPMFHCNGWGYPWTAALIHAKIICCRYIVAKDIYNLIDKYKVTHFGGAPIVLSLIANADEKDKKEINHKVYVLTAGAPPTSAILEKMDNLGFEVMHVYGLTETYGHILQCAWNEEWESQSKSEKADIKARQGVRYPNTEEVCVADPETYEKVPMDGETMGEILIRGNVVMKGYYKNKEATETSMNNGWFHSGDLAVVYPDGYIQIKDRSKDIIISGGENISSVEVENVVAKHPAVSLVAVVAKPDEKWGETPCAFVELAPGKNATEEDIIQFCKENMAGFKRPKHVIFGELPKTSTGKIQKFELRTKAKEL

SEQ ID NO: 163387 - protein, 441 aa, Unknown
  Bacterial polypetide isolated from the Sargasso Sea
DAETIAYILDHSDAKILITDTQFSPTIKKALSIYGKKIPIIDIHDDQAIFKDGEGEKIGDWTYEEFLKTGEDNFNWSLPKDEWQAISLSYTSGTTGKPKGVVYHHRGSYLMSTGSVTAWNMTNKPTYLATVPMFHCNGWGYPWTAALVHAKVVCCRYIVAKDIYNLIDKHKVTHFGGAPIVLNLIANADEKDKKEINHKIYVLTAGAPPTSAILEKMDNLGFEVMHVYGLTETYGHVLQCAWNEEWNNLSNSEKADLNARQGVRYPNLEEAIVADPETHIPVPKDGKTMGEILIRGNVVMKGYYKNKEATELSMRNGWFHSGDLAVVYPDGYIQIKDRSKDIIISGGENISSVEVENVVAKHPAVSLVAVVAKPDEKWGETPCAFVELAPGKQATSDEIISFCKENMAGFKRPKYVIFGELPKTSTGKIQKFELRKKAKEI

SEQ ID NO: 163388 - protein, 469 aa, Unknown
  Bacterial polypetide isolated from the Sargasso Sea
CRNTPELLEAHYSIPMTGGVVNTINTRLDAQTIAYILEHSDAKLLITDTQFSPTIKKALSIYGKKIPIIDIHDDQAIFKEGEGEKIGDWTYEEFLNTGDDNFNWSFPEDEWQAISLSYTSGTTGKPKGVVYHHRGSYLMSTGSVTAWNMTNKLTFLATVPMFHCNGWGYPWTAALVHAKVVCCRYIVAKDIYNLIDKHKVTHFGGAPIVLNLIANAEDKDKKAIKHKIYVLTAGAPPTSAILEKMDNLGFEVMHVYGLTETYGHVLQCAWNEEWNNLSNSEKADLNARQGVRYPNLEEAIVADPETNTPVPRDGKTMGEILMRGNVVMKGYYKNKEATETSMRNGWFHSGDLAVVYPDGYIQIKDRSKDIIISGGENISSVEVENVIAKHPAVSLVAVVAKPDEKWGETPCAFVELAPGKNSTEEEIIQFCKENMAGFKRPKNVIFGELPKTSTGKIQKFELRKKAKEI

SEQ ID NO: 163389 - protein, 543 aa, Unknown
  Bacterial polypetide isolated from the Sargasso Sea
MSNFDTNLDKNSANFVPLSPLSFITRVKDIYPNYDSLVYGNRSYTWLQTYNRCTKFASALEKKGITKGSTVSIIAANTPELFEAHYSIPMTGGVINTINTRLDAETIAYILDHSDAKLLISDTQFSAIMKKAMQIYGKNIPIIDIHDEQAILKDGEGEQIGEMTYEEFLKTGDDNYSWSLPEDEWQAISLSYTSGTTGKPKGVVYHHRGSYLMSTGSVTAWNMPNKLTFLYTVPMFHCNGWGYPWTAALINAKIICCRYIVAKDIYNLIDKYKVTHFGGAPIVLSLIANADEKDKKEINHKVYVLTAGAPPTSAILEKMDNLGFEVMHVYGLTETYGHILQCAWNQEWESQSKSKKADIKARQGVRYPNTEEVCVADPETYEKVPMDGETMGEILIRGNVVMKGYYKNKEATETSMKKGWFHSGDLAVVYPNGYIQIKDRSKDIIISGGENISSVEVENVVAKHPAVSLVAVVAKPDEKWGETPCAFVELAPGKNATEDDIIEFCKENMAGFKRPKHVIFGELPKTSTGKIQKFELRTKAKEL

SEQ ID NO: 163390 - protein, 491 aa, Unknown
  Bacterial polypetide isolated from the Sargasso Sea
MVEKKSIEKDAIIFKDQHWTFSHLNKLITKTSLFLQNECQLKVGDRFCYYGTNNPEQIVLLFAASKIGAIMFPINWRLANPEIEYLINHSNPNVIFFDTKFEDKISQIHIPRSIKTITVGNSEINQKSLEARRLSCNGRIKRSIKNNLPLLLVYTSGTTGKPKGALLGQKAIISNAKMSHDAHSLKSSDKVLISLPLFHVGGINILFLPALLKSATVVLQEKFEPDQALEIIRKFKITKMITVPTILDQMIKSKFWIKANYKYLQVISIGSTNVPKYLIKQLHLINIPVIQIYGATETGPLAIYQKVKDAFKTEGSIGKAGSLCKIKLVDEDFSEVSIGQPGQILVKGENILECYWNDETASNESIKDGWFFSGDIAKIDEDGNYWFIDRIKNVIISGGENIYPAELEVLLSNNKDLVEYSIVGKHDVKWGEVPVIVAVKKNKSVTSDQILYIFNEKVAQYKIPKEVIFVNNIPKNALGKIEIDKVKQLVN

SEQ ID NO: 163391 - protein, 454 aa, Unknown
  Bacterial polypetide isolated from the Sargasso Sea
MTGGVINTINTRLDAETIAYILDHSDAKLLITDTQFSPTMKKALKIYGKNIPIIDIHDDQAVFKDGEGEKIGEMTYEEFLQTGDDNYNWSLPEDEWQAISLSYTSGTTGKPKGVVYHHRGSYLMSTGSVTAWNMPNKLTFLYTVPMFHCNGWGYPWTAALIHAKIICCRYIVAKDIYNLIDKYKVTHFGGAPIVLSLIANADERDKKEINHKVYVLTAGAPPTSAILEKMDNLGFEVMHVYGLTETYGHILQCAWNEEWESQSKSEKADIKARQGVRYPNTEEVCVADPETYEKVPMDGETMGEILIRGNVVMKGYYKNKEATETSMKKGWFHSGDLAVVYPDGYIQIKDRSKDIIISGGENISSVEVENVVAKHPAVSLVAVVAKPDEKWGETPCAFVELAPGKNATEEDIIHFCKENMAGFKRPKHVIFGELPKTSTGKIQKFELRTKAKEL

SEQ ID NO: 163392 - protein, 309 aa, Unknown
  Bacterial polypetide isolated from the Sargasso Sea
AMLTHRNLVANVEQFKAFVPDALRPAQEVIVTAIPLYHIFALMVNLISYFAVGARNWLVPNPRDLDALIDVLNAARPSVFMGVNTLYAGLAAHPGTQGVDFSNLRLAGGGGAAILPSVSARWQAITGQFIREGYGLSETSPVVAFNPASVTAFSGSTGLPLPSTDVLLLDEQDHPVPLGQPGEVCVKGPQVMGGYWQQPEANAAAFTRDGYFRTGDIGQLDERGFLKIVDRKKDMVIVSGFNVFPNEVEAVATACPGVLECACIGVPDEKTGEALRLYVVRAAGTAPPVDADQIAAHCRAALTPYKVPR

SEQ ID NO: 163393 - protein, 267 aa, Unknown
  Bacterial polypetide isolated from the Sargasso Sea
MLWEKKYPEDVDWNSDIKGQPLYSVLDNTVKNFGNRPCIDFLGKEFSYKKISNMIDKAALGFQKLGVAKGTKVGLFLPNCPQFVVSYFGILKAGGVVVNFSPLYAEKEIIHQLEDSDTDIMVTLNLKVLYPKIFNLLTKTRLKKIVVGTLAEVIPFPKNILFPLVKRKEISNFEITTDIITFAELLNNDGDYKSITVEPDEDIAVLQYTGGTTGVSKGAMLTHSNLYANLIQERLWFPGFNMGEESVMAVLPFFHVFAMTVVMNMSV

SEQ ID NO: 163394 - protein, 246 aa, Unknown
  Bacterial polypetide isolated from the Sargasso Sea
LPLFHIFSFTVNCLTFLKIGAENVLIANPRDLKSFLKVLKKKKFTVMTAVNTLFNLLLTSKKFKELDFSGFKFSVGGGMAVMSETAKNWKKVTGTNITQGYGLTETSPVVSINKIDNPFNGSIGLPVQSTNIKIIDESGKNVDDEQPGELCVKGPQVMSGYWKYKEDQENPFTDDGFFKTGDIAAISKDGYLTIVDRKKDMIISSGYNVFPNELEDFLSTHPDILEAGVIGVPDKNRGEYIKVFIV

SEQ ID NO: 163395 - protein, 288 aa, Unknown
  Bacterial polypetide isolated from the Sargasso Sea
MSILLINLEKVIKDTNIEHVIISDMGDMLGVLKGTLVNFVVKYVKKMVPSYSIDNFYTFKDAISKGKSYTYNQVKVESNDIAFLQYTGGTTGVSKGAMLSHKNVISNVIQVSSWMDIMLEEKKEIVITALPLYHIFALVCNALVMFKYGARNILITNPRDMDGFIKELSKYNFSIITGVNTLFNGLLNNSKFSNLDFNNLKVAFGGGMAVQDIVANKWKSVTGCPLVEGYGLTETSPVVTINPLDGTNKIGTIGLPIPQTDVKFIDDAGKEVPHGERGEICVYGPQVM

SEQ ID NO: 163396 - protein, 213 aa, Unknown
  Bacterial polypetide isolated from the Sargasso Sea
MNLAALLEKSARRFGDRPAIALGHELFSSYQNTAERVARLAGGLLRRGLRPGDRIAIAMKNCPQYSDILFASWHAGATAVPMNAKLHSREFAYMLDHSSARLCFVTEDLEPVIRAAAMETQSGVEIIVANSQEYDALLKNNLAPLAQLEPDATAWIFYTSGTTGRPKGAMLTHRNLLMMTVSYFGDVDAIDETESLLHAAPMSHGSGLYILPY

SEQ ID NO: 163397 - protein, 302 aa, Unknown
  Bacterial polypetide isolated from the Sargasso Sea
MCLPNCPYFAILYFAALRVGAIVVNFNPLYTERELEHQIRDSGTRMMAVPDVRIIHEKVQAVAPRAGLDKIVLCGMRDMLPWLQGLGFALFKRKDHARILDEGLHVRLKALLAHDAEPDAVERHPDDVAVLQYTGGTTGVPKGAMLTHANLTANSAQMVVHVGGLRPQQERTLGVLPMFHVFALTTVLNFSVEIGAEIVLLPRFEMKQVLNTMKRKPPTQFFGVPTIYVALNALPDDEIPDLSAVRACISGGAPLPLEVREEFEARTRARVVEGYGLSETAPIIACNPLFGTVKDNSCGPSF

SEQ ID NO: 163398 - protein, 311 aa, Unknown
  Bacterial polypetide isolated from the Sargasso Sea
MHFKTGLIVDNINPLFTSRELKAQLNDSGSETIIIAENFAFNLQKIIHETSIKNIIITSLGDFIGFKGQIINFIIKHIKKMVPKYNLPNAKNFKKVLNEGSKYNFEEQKINSEDIAFLQYTGGTTGGIKAAILSHRNILANAIQVREWLGKQLRFGEDIAICALPLYHIFSLTCNSIVFFYFGSNNILITNPRDIRGFVKELKKYQFTFISGVNTLFNKLLEEPKFSSCDFSKLNISIAGGMPVQKSVGDRWQKVTGCLLVVGYGLSETAPAASIDPINGKAFSDTIGLPLPSTEMSIQNKKGEILSAGEV

SEQ ID NO: 163399 - protein, 297 aa, Unknown
  Bacterial polypetide isolated from the Sargasso Sea
LPNTPVKHIVVASMGDLLGGLKGMLVNFVVRSVKKMVPAWELPNCIRFNTALEEGAKQTLKPTSVGPDDVAFLQYTGGTTGVSKGATLLHRNIVANVLQSEAWMNPALTKPGRDGRMLAADEEIVTITALPLYHIFALTVCCLLSMRKGGLAVLIPNPRDIPGFIKVLKQYRFHMFPAVNTLYNALLNNPEFKDVDCSNLRVANGGGMAVQEAVAKKWLEVTGCPIIEGYGLSETSPSAICNPTDTDKFSGTVGLPIPGTEIAIRDDEGRDLPIGQPGEICIRGPQVMAGYWKRPDE

SEQ ID NO: 163400 - protein, 64 aa, Unknown
  Bacterial polypetide isolated from the Sargasso Sea
KNDRELVKLFVSVVEGETITEDEILEHCRNNLTAYKVPKLLEIVDEIPKSNVGKILRRELREKN

SEQ ID NO: 163401 - protein, 49 aa, Unknown
  Bacterial polypetide isolated from the Sargasso Sea
DTLTEQDIIAACRKHLTNYKIPKAIEFRATLPKSNVGKILRRELRHQSS

SEQ ID NO: 163402 - protein, 306 aa, Unknown
  Bacterial polypetide isolated from the Sargasso Sea
ITFDEYSSLVDMFDKTCDRFQSKKAFTNFGKSISFNEIYIKSQNLAKFLQNDLKLEKGSRVAIMMPNLLQYPISTFGILKAGLIVENINPLYTERELEIQLSNSQSETIIILDNFAHLIEKILHKTNIKNIIITSVGELLGLKGYLMNFVLKKIKKMVPNYNLLKLYRFKDIINNKDNISLQSVSIHLDDVAFLQYTGGTTGSVKAAMLTHKNILSNVFQVKEWLGSQLKYGEDIAICALPLYHIFALTCNSLTFFNFGANNILITNPRDIPSFIKELKKHKFTFISGVNTLFNKLLLENEFSKCD

SEQ ID NO: 163403 - protein, 497 aa, Unknown
  Bacterial polypetide isolated from the Sargasso Sea
MFLKRVLEHGDKVALREKDFGLWNEYSWSDWGDFAKWVGLGLASLGFSRGDVCSIASEVNKEWMFADLGVITMGGVTNGVYPTDAPNQVEYLITDSGTRFYFAEDEEQLDKVLEVRERTPTLEKIIIFDMEGLRNFDDPQCLSFTKLIELGQQYELDHPRLWSEEVGKAGPDDLMILTYTSGTTGPPKGAMISQQNMMYMMKNLQSVYGIYPEDEQLGFLPLAHIAGRMFYTFAVIEACSTINLIEEPETAVRDQQEIAPTIHFAVPRVWEKQYSLVTIKVKEATWIGRWSYEFAINLGARVAEQRKKGLVARWWLRVAHFLADFLVLKNIRILLGIDRCRWLSTAAAPIAPDLIDWFWALGKPMYEVYGQTECTGIATANTSKDNRVGSVGRATYGTEVVLSEDREILIKGPGVIQGYWNKPEKTAETFVGDWLHTGDVGRIDEDGYIYIVDRMKDIIITAGGKNITPSEIENQLKFSPFVSDAVVVGDKRPYLTC

SEQ ID NO: 163404 - protein, 330 aa, Unknown
  Bacterial polypetide isolated from the Sargasso Sea
MNNKWTEQYPNNLNSEIDCIDDSTVTDLLESAVNKFSSNTAFYSLNTSIDYKMTSLLSKRIAAYLQYLGVTKDTKVAIMLPNLLTYPITLFGSYYCGATVVNINPMYKSREINDILIDSEAEYIFVLDKFYQELQPCIPTSKLKKIIVCKITDLLSPFMRIVIPIVMLYKKQSVSIKKQNNIVFFKDIISNNFSFEDILIDENDIALLQYTGGTTGKSKAAILTHKNLLSNVQQVSNWIEPHIKQGQEIIITALPLFHIFSFTVNCLTFLKLGSENVLIANPRDLDSFIKVLSKKKFTVITAVNTLFNLLLTSRKFRDLDFSNFKFSVGG

SEQ ID NO: 163405 - protein, 458 aa, Unknown
  Bacterial polypetide isolated from the Sargasso Sea
MTANRNKPWLKSYPEGTPEFITLDSRKTIVKLLDEAESNYPDNDAFVNFGVSLSYKDVQTKSKKFAAYLQNVLGLKKGDRIAMMMPNLLQYPVAIFGALRAGLIVVNVNPLYTPRELEHQLRDSGSKAILIFENSAHVLSAVIENTEIEHVIITKIGDFLGPIKGSLMNFVVKYLKRMVPKYSLPGNIDFKSTLGRPVTDLDEAPISIDDLAFLQYTGATTGLSKGAMLSHGNVIASLEQLEAMLVDVIEEDGSDIYINALPIYHIYSLSVLVLAGYTNGGLNVLITNPRDTDGFVKEIRKWRFTFFNGVNTLYESLLNHPEIKSVNFDSMKLSGTGGSACRKSTAERWQELTGNVLLEGYGLSETSPSVSVSPSYLTKFNGFVGLPVPSTEISIRDETGKQVRRGAPGEICVKGPQVMQGYWNNEEATKEAIDEEGFFKTGDIGTLNSDGFIKIVDR

SEQ ID NO: 163406 - protein, 556 aa, Unknown
  Bacterial polypetide isolated from the Sargasso Sea
MTANRNKPWLKSYPEGTPEFITLDPRKTIVKLLDEAESNYPDNDAFVNFGVSLSYKDVQTKSKKFAAYLQNVLGLKKGDRIAMMMPNLLQYPVAIFGALRAGLIVVNVNPLYTPRELEHQLRDSGSKAILIFENSAHVLSAVIENTEIEHVIITKIGDFLGPIKGSLMNFVVKYLKRMVPKYSLPGKIDFKSTLGRPVTDLDDAPISIDDLAFLQYTGATTGLSKGAMLSHGNVIASLEQLEAMLVDVIDEDGSDIYINALPIYHIYSLSVLVLAGYTNGGLNVLITNPRDTDGFVKEIRKWRFTFFNGVNTLYESLLNHPEIKSVNFDFMKLSGTGGSACRQSTAERWQELTGNVLLEGYGLSETSPSVSVSPSYLTKFNGFVGLPVPSTEISIRDETGKQVRRGAPGEICVKGPQVMQGYWNNQEATKEAIDEEGFFKTGDIGTLNSDGFIKIVDRKKDMILVSGFNVYPNEIEDVVSLHPEIIEAACIGVDDEKTGEAVKLFVVKNNPSLSADEVMDYCRDNFTGYKVPKHIEFIDELPKSNVGKVLRRSLRE

SEQ ID NO: 163407 - protein, 384 aa, Unknown
  Bacterial polypetide isolated from the Sargasso Sea
SETLGSIDNDTIIDLLNHSARKYESKIAYYSLNSSLNYKMTSLLAKRLAAYLQYLGVRKNTKIAIMLPNLLTYPISLFGSYYCGATVINVNPMYKSREIQHLLEDSEAEYIFVLDKFYNELQPCIKNSKLKKIIICKVNDLLNPLMKFVVPMVMLCKKQTVNIEKNNKNIYFKDIISNNFGFEDVHVEQDDIALLQYTGGTTGKSKAAVLTHKNLLSNVQQVSNWIEPHIKSGEEIIITALPLFHIFSFTVNCLTFLKIGAENVLIANPRDLKSFLKVLKKKKFTVMTAVNTLFNLLLTSKKFKELDFSGFKFSVGGGMAVMSETAKNWKKVTGTNITQGYGLTETSPVVSINKIDNPFNGSIGLPVQSTNIKIIDESGKNVDD

SEQ ID NO: 163408 - protein, 539 aa, Unknown
  Bacterial polypetide isolated from the Sargasso Sea
MLDLGRTYLQSVERSPNALALVDGDMTLTYAQWHRIIENVAEGLRELGLAHGDRLLVVLQNRWEMATLHWACQFAGIVIVPLNWRAKPEELDYCVTDAGVKAIVYEPVSAEAVTQSPAAQTLPRIGLDDAQGRTAGFATLLAERSRDAGIQTTRANADDYSLILYTSGTTGKAKGVPRRHRHERAAALAHVAQNLYRHGERTLGVMPLYHTMGVRSLLSMAMVDGVFVCARRWNARFALDSIAQYRISCLYLVPTLYHDLLADPAFAAIDTTSVKKLGFAGAPMNDGLLKRLSAAFKPELFVNHYGSSEVYTFSIDQDATRKPGSAGRAGINTRLRVVKLDAQTPEDLAQVGEEGQIIADLLGDEAFEGYWNRPDANAKSLRDGWYFTGDTGFFDLDGDLYVSGRVDDMIISGGENISPVDIESVLSLHPAVDEVAVAGVKDERWGQRVVAFVKRREYVDAETLDAYCRTSNLVNFKRPRDYVFVDDIPKSPVGKILRRKLSAGEYERDGRDQPDDANDGDRSRASGAFIATHTETTKE

SEQ ID NO: 163409 - protein, 556 aa, Unknown
  Bacterial polypetide isolated from the Sargasso Sea
MATNRNKPWLKSYPEGTPEFITLDPRKTIVKLLDEAESSYPQNNAFVNFGVSMSYQDVQTKSKKFAAYLQNVLGLKKGDRIAMMMPNLLQYPVAIFGALRAGLIVVNVNPLYTPRELEHQLRDSGAKAILIFENSAHVLSAVIENTEIEHVIITKIGDFLGPIKGSLMNFVVKYLKRMVPRYSLPGKIDFKSTLGRPVTDLDESPISIDDLAFLQYTGATTGLSKGAMLSHGNVIASLEQLESMLVDLIDEEGSDIYINALPIYHIYSLSVIVLAGYTNGGLNVLITNPRDTDGFIKEIKKWRFTFFNGVNTLYESLLNHPEIKNVNFDSMKLSGTGGSACRQSTAERWQELTGNVLLEGYGLSETSPSVSVSPAYLTKFNGFVGLPVPSTEISIRDETGKQVRRGDPGEICVKGPQVMQGYWENEEATNEAIDEEGFFKTGDIGTLNSDGFIKIVDRKKDMILVSGFNVYPNEIEDVVSLHPDIIEAACIGVDDEKTGEAVKLFVVKSNSSLSIDEVMDYCKDNFTGYKVPKHIEFIDELPKSNVGKVLRRSLRE

SEQ ID NO: 163410 - protein, 186 aa, Unknown
  Bacterial polypetide isolated from the Sargasso Sea
MTQTVDIENTDNVLSRRDSNAETQQMLRQRFETQPDLMPAQLASELGIAELEVVTALPQAQRVFLPLAHMDELLQSLPEWGSLTTIVMLSGSVFEFKGDFPQGKFAHGYYNLYSKGDGLHGHLKLDGMRAIALISRPFRGSESHSINFFGPHGEVVFKVYLGRDKQRVLFPDQVRRFKALAATFAD

SEQ ID NO: 163411 - protein, 309 aa, Unknown
  Bacterial polypetide isolated from the Sargasso Sea
ITEGKEMIITALPLYHIFSFTVNFLYFYSIGSNNVLIANPRDLKSFVKELTKHRFTVITAVNTLFNLLLTSSKFRKIDFSSLKFSVGGGMAVLSSTAKRWKKITGTEITQGYGLTETSPIVSINPINNKFNGSIGLPVPSTDISIRDDTGNQLGYEEPGELCVKGPQVMSEYWNKKHDSLSSFTKDGFFKTGDIASIDKNGFLTIVDRKKDMIISSGFNVYPNEIEEYVSQHPNVNECGVIGIDDSNRGESIHLFIVRSSDTLTEIDIIEFCKEGLTIYKVPKKVHFINEIPKNNVGKILRRKLRELKY

SEQ ID NO: 163412 - protein, 94 aa, Unknown
  Bacterial polypetide isolated from the Sargasso Sea
ILVSGFNVFPNEIEEVAAMHENIVEAAAVGVPHEVSGEVVKLFVVRNSDSLTEKDVIAHCRNHLTGYKVPKQVVFKDDLPKTNVGKILRRELRD

SEQ ID NO: 163413 - protein, 280 aa, Unknown
  Bacterial polypetide isolated from the Sargasso Sea
MNIASLLIKTSILHRNRWAIAIGSEFKSTYLDKANRVARLAGGLKDRVKVKAGDRVALAMKNCAEYSDILFASWQIGAITVPMNAKLHAKEFAYAIEDSGARICFVTEDLFEAIQGSIRSLSDPPQIIVVGSEKYAGLLEANPAELTEVKPDDVAWLFYTSGTTGRSKGAMLTHRNLLMMTIGYYGDVDNVVATDTLLHCAPMSHGSGLYILPYVAKGACQVLPLSGGFEPTEFLDLVSAHESVNCFLAPTMIKRILDIYQDSFGNLKNLKTIIYGGGPM

SEQ ID NO: 163414 - protein, 282 aa, Unknown
  Bacterial polypetide isolated from the Sargasso Sea
VKAAILSHRNVLANAIQVREWLGENLKFGEDLAICALPLYHIFALTCNSVVYFYFGANNILITNPRDIPGFIKILKKYKFTFISGVNTLFNKLLEDKNFKECDFSKLNITIAGGMPVQKSVGDRWQKTTGCLMVVGYGLSETAPAASIDPIDGKTFSDTIGLPLPSTEMSIQDDKGKILSAEKEGEICIRGPQVMRGYWNNEKDSKNALTKDGWFKTGDIGKMRKDGHFQIVDRKKDMIIVSGFNVYPSDVEEVAMQHQKILEAGCIGVSGKNGQELVKLFV

SEQ ID NO: 163415 - protein, 210 aa, Unknown
  Bacterial polypetide isolated from the Sargasso Sea
EGVPAEINPDQYSSLVEMFEESVNEFADQPAFVNMGQTITYRRLEEQSRAFAAYLQNELKLSQGDRVAVMMPNLLQYPIAVFGILRAGMIVVNVNPLYTPRELEHQLKDSGAKAIVIVSNFAHTLEKVVYDTPVKHVILTRMGDNLGLAKGTLVNFVVKYVKKLVPKYNLPHASTMRQALAKGRYLQYIKPEINNDDLAFLQYTGGTTGL

SEQ ID NO: 163416 - protein, 250 aa, Unknown
  Bacterial polypetide isolated from the Sargasso Sea
HTDLKPGDRIAVQMPNVLQYPIAVFGAMRAGLIVVNTNPLYTAREMRHQFKDAGVRALVYLNMFGKLVQEVLPDTEIEYLIEARMGDLLPSLKGWLVNTVVKKVKKMVPDYHLPQAIAFKQVLRQGHGQALAPVTASHEDVAVLQYTGGTTGVAKGAMLTHGNLVANMLQVDACLSQLGPDGTPLMKQGQEIMIAPLPLYHIYAFTANCMCMMVNGNHNVLITNPRDIPGFVKELGKWKFSALLGLNTLF

SEQ ID NO: 163417 - protein, 277 aa, Unknown
  Bacterial polypetide isolated from the Sargasso Sea
GSNNILIANPRDLKSFVKELTKHRFTVITAVNTLFNLLLTSSKFRKINFSSLKFSVGGGMSVLSSTAKKWKKITGTEITQGYGLTETSPIVSINPINDKYNGSIGLPVPSTDILIIDDSGKPLGYEEPGELCVKGPQVMSKYWNKEDDTLSSFTKDGFFKTGDIAVINKNGFLRIVDRKKDMIISSGFNVYPNEIEDYVSQHPDVIECGVIGIDDSNRGESIHLFIVRSSDNLTEIDIIEFCKKGLTIYKVPKKVHFINEIPKNNVGKILRRKLREL

SEQ ID NO: 163418 - protein, 276 aa, Unknown
  Bacterial polypetide isolated from the Sargasso Sea
MLENFWKDKYPEGVSSEINPDSYPNVLAVLKDSCQRFANKPAFSNLGKTLTYGELYTLSGQFAAYLQQHSGLQPGDRIAIQMPNVLQYPIAVFGAMRAGFVVVNTNPLYTKREMEHQFNDSGAKALVCLANMAHLAEDVVPKTGVKHVIVTEVGDMLPPLKRLLINAAVKYVKKMVPAYNIPGMVRFNDAMAKGRGQNFTDANPKSEDIAVLQYTGGTTGVAKGAMLTHRNLVANMLQAKELMASNMTDGEEVIICPLPLYHIYAFTFHCMAMMVS

SEQ ID NO: 163419 - protein, 172 aa, Unknown
  Bacterial polypetide isolated from the Sargasso Sea
PLPSTYVKLVDNDGRDVNELGQPGEVAVLGPQVMAGYWQRPDETAKVMTADGYFLTGDIGTMDERGFVKIVDRKKDMVIVSGFNVYPNEVEDVVSNCPGVLECAVVGVPDEKSGEAIKLIVVKKDPALTEQAIRDYCQANLTGYKRPRHIVFRADLPKTPVGKILRRELRDA

SEQ ID NO: 163420 - protein, 183 aa, Unknown
  Bacterial polypetide isolated from the Sargasso Sea
VISTTFSGNIGLPLPGIDIAIKDDEGNSLPQGESGEICIRGPNVMVGYYNQPEENAKAFTPDGFMRTGDIGIMDPQGYTRIIDRKKDMILVSGFNVFPNELEQVISLCPGVVECAAIGVPDEKQGEAIKVFIIKNDPALTEDEVANYCHQNLTGYKRPKYIEFRDELPKSNVGKILRRELRKA

SEQ ID NO: 163421 - protein, 209 aa, Unknown
  Bacterial polypetide isolated from the Sargasso Sea
RWQKVTSTRLVEGYGLTECAPLVTVSPYNLPAYNGSIGFPAPSTDIKLVNDAGVEVAAGEAGEMWVKGPQVMKGYYNRPDETAKVLNAEGWLATGDIARVDDDGFFYIVDRKKDMILVSGFNVYPNEIEEVVAMNDKVLEVAAIGVPNESTGEAVKIFVVKKDQSLTDIELIQHCKERLTGYKVPKLVEFRTELPKTNVGKILRRELKG

SEQ ID NO: 163422 - protein, 540 aa, Unknown
  Bacterial polypetide isolated from the Sargasso Sea
MEKIWLDAYPPGVPAEIDSGEYRNISALIERSFSRFHANPAFACDGKQITYGELDVMSGALAAWLQSRGLERGARVAIMMPNVLQYPISICAVLRAGYVVVNVNPLYTPRELQHQLNDSGAEAIVILDGCTATLDAILAHTQVKHVLVAAQGNASGAEQKPSPYAAFDDAIEEGSRSKFIPASQSPDDVAFLQYTGGTTGVSKGATLLHRNIVANVLQSDVWLKPARDLRPDVTQFITVAALPLYHIFALNVCCLLTIHMGALSVLVPNPRDIGGMIKSLAGYKITNFPGVNTLFNAMLHHPEFPRLDFSNLLVASGGGMATQEAVARRWKEMTGAPIIDGYGLSETSPCVAINPVTGSEFNGTIGLPLPSTEVSIRDDDGNELPAGEAGELCIRGPQVMAGYWQRPDETAKVMTADGFFRSGDIASISEAGFVRIVDRKKDMILVSGFNVYPNEIEEVVANHPGVYEVAAIGVPDEHSGEAVKLFVVRKDPALTFEDLMAFCKGQLTGYKRPKSIEFRDSLPKSNVGKILRRELRVSNH

SEQ ID NO: 163423 - protein, 544 aa, Unknown
  Bacterial polypetide isolated from the Sargasso Sea
MTKRHWTGSYGSIPAEIDPDRFPSVSALLDDAMRRFADRPAFHSYGRTLTYADVDRLSTALAAYLQQVVGVRKGDRVAVMLPNVLAFPVAFVAVAKIGAIQVNVNPLYTARELEHQLDDAGVEVALVCGGSMGTFAEVVGGTRVRTVLSVGRGDLGVVDAPAGTCDALPPGSIPLADAIAAGESLTFEPVALGGEDLLLLQYTGGTTGLSKGAALSHRNLVANIEQFGAIVPAAREPGEEVVVTAIPMYHIFALTVNFLSYFAIGAQNWLIANPRDMDGFIDVLKAARPTVFVGVNTLYAGLAGHPRLTEVDWSRLKLSAGGGAAVIDVISSRWKAVTGNFIREGYGLSETSPVVSFNPQSIDSFTGTTGLPLPSTDVKLLDEQDNEVAIGGAGEICVKGPQVMGGYWQKPDANAAAFTADGYFRTGDVGVFDEAGFLRIVDRKKDMIIVSGFNVYPNEVEAVATAVPGVAECACIGVPDARTGEAVKLFVVLAQDADVTDAQLVAHCRESLAAYKVPKLIRFVDRLPKSTVGKILRRELSRTD

SEQ ID NO: 163424 - protein, 534 aa, Unknown
  Bacterial polypetide isolated from the Sargasso Sea
MAYDQESQLELGKYSSLIDLIERTSQRFGDKTAYACLGKSSSFNEIERDSRYFAAYLQNNTHLKPGDRIAIQLPNITQFVIAAYGALRAGLILVNTNPLYTERELIHQFNDSGAKALVVLSDLLPTLAKVVATTPIELVISTHPLDLIDPQVQPKTGLKNVEFCHVLKQGAELPFTRFMPALGDLAALQYTGGTTGLSKGAMLTHGNMLANAAQVKSRIGSVITEGEDIFVAPLPIYHIYAFMVNLVLYFECGGCSVLIPNPRDINGLIKTLAKYPFTGFAGLNTLFVALCHQPEFKALDFSHLKITISGGTALTAAAANLWQQTTGNTISEGYGLSETSPVISLNAPGYQKIGTIGKPVLGTEVKLLDENGNEVAQGEAGELAARGPQVMLGYWNNPQETANVMTADGFFKTGDIAILNEEGFHQIVDRKKDMIIVSGFNVYPNEVENVLASHPNIIECAVVGVKDEHSGEAVKACIVLKDDSQDPELMKTTIINFCREQLTAYKLPKLIEFMPQLPKSTVGKILRRELKNQP

SEQ ID NO: 163425 - protein, 183 aa, Unknown
  Bacterial polypetide isolated from the Sargasso Sea
YNGSIGLPVCSTDIRLVDDAGQVIHELGKPGEMQVRGPQVMSGYWQRPEATAEVMQDGWLCTGDIAVCDEQGFFKIVDRKKDMILVSGFNVYPNEIEDVVALHPKVLEVAAVGVPHKVSGELVKIFVVKKDAKLQEDEIIAHCRKHLTAYKVPKLVEFRDELPKTNVGKILRRVLRDEEIAKQ

SEQ ID NO: 163426 - protein, 445 aa, Unknown
  Bacterial polypetide isolated from the Sargasso Sea
MYTPRELEHQLIDSGAQAIVLLDTFAKTLEAVQARTSVRHVVLTSIGEMLGAGSPVIAGDLPPASCIALDDAIARGAEAGFTPVALTQNDVAVLQYTGGTTGVSKGATLLHGNLIANVLQSALWREPVYRERSDIKQYITVVALPLYHIFGLTICGLLTMRCGGLGILIPNPRDLPGMIKALQGFALNSFPGVNTMYNALLNEPDFRTLDFSKLVQSNGGGMAVQQAVAQRWQALTGVPIVEGYGLSETSPCATTNLPTSTAFTGTVGLPLPSTDISIRDDAGREVPLGERGEICIRGPQVMAGYWNRPDETAKVMTPDGFFKSGDIGLMTEEGFVKIVDRKKDMILVSGFNVYPNEIEDVVAKHPGVFEVVAVGVPDAEAGEVVKLYVVKKDPALTEAEILAFCKEQLTGYKRPKIIEFRSELPKTNVGKILRRVLRDEVKSAG

SEQ ID NO: 163427 - protein, 534 aa, Unknown
  Bacterial polypetide isolated from the Sargasso Sea
MAYDQESQLELGKYSSLIDLIERTSQRFGDKTAYACLGKTSSFNDIERDSRYFAAYLQNNTNLKPGDRIAIQLPNITQFVIAAYGALRAGLILVNTNPLYTERELIHQFNDSGAKALVVLSDLLPTLAKVVATTPIELVISTHPLDLIDPQVQPKTGLKNVEFCQVLKQGAELPFSRFVPAANDLAALQYTGGTTGLSKGAMLTHGNMLANAAQVKSRIGSVITEGEDIFVAPLPIYHIYAFMVNLVLYFECGGCSVLIPNPRDISGLIKTLAKYPFTGFAGLNTLFVALCHQPEFKALDFSHLKITISGGTALTAAAANIWQQTTGNTISEGYGLSETSPVISLNAPGYQKIGTIGKPVLGTEVKLLDENGNEVAQGEAGELAARGPQVMRGYWNNPQETANVMTADGFFKTGDIAILNEEGFHQIVDRKKDMIIVSGFNVYPNEVENVLASHPNIIECAVVGVKDEHSGEAVKAFVVLKDDSQDHEQMKTAILNFCREQLTAYKLPKLIEFMPQLPKSTVGKILRRELKHQA

SEQ ID NO: 163428 - protein, 534 aa, Unknown
  Bacterial polypetide isolated from the Sargasso Sea
MAYDQESQLELGKYSSLIDLIERTSQRFGDKTAYACLGKTSSFNDIERDSRYFAAYLQNNTNLKPGDRIAIQLPNITQFVIAAYGALRAGLILVNTNPLYTERELIHQFNDSGAKALVVLSDLLPTLAKVVATTPIELVISTHPLDLIDPQVQPKTGLKNVEFCQVLKQGAELPFSRFVPAAGDLAALQYTGGTTGLSKGAMLTHGNMLANAAQVKSRIGSVITEGEDIFVAPLPIYHIYAFMVNLVLYFECGGCSVLIPNPRDISGLIKTLAKYPFTGFAGLNTLFVGLCHQPEFKALDFSHLKITISGGTALTAAAANIWQQTTGNTISEGYGLSETSPVISLNAPGYQKIGTIGKPVLGTEVKLLDENGNEVAQGEAGELAARGPQVMLGYWNNPQETANVMTADGFFKTGDIAILNEEGFHQIVDRKKDMIIVSGFNVYPNEVENVLASHPNITECAVVGVKDEHSGEAVKAFVVLKDDSQDHEQMKTAILNFCREQLTAYKLPKLIEFMPQLPKSTVGKILRRELKNHA

SEQ ID NO: 163429 - protein, 392 aa, Unknown
  Bacterial polypetide isolated from the Sargasso Sea
MRVIIPIVMLYKKQSVSIKKQNNIVFFKDIISNNFSFEDILIDENDIALLQYTGGTTGKSKAAILTHKNLLSNVQQVSNWIEPHIKQGQEIIITALPLFHIFSFTVNCLTFLKFGSENVLIANPRDLDSFIKVLYKKKFTVITAVNTLFNLLLTSRKFRDLDFSNFKFSVGGGMAVLSDTAQKWRDVTGTNITQGYGLTETSPVVAINRIDDPFNGYIGLPVQSTKIKIIDDDENILGCNQAGELCVRGPQVMSGYWKISNEKNKYFTDDGFFKTGDIATMSDEGYLKIVDRKKDMIISSGYNVYPNELEDYLATHPDILEAGVIGVDDKNRGEYIKAFVVTKNEHLSSSDIIAFCKNGLTEYKVPKRIVFIKELPKTNVGKILRRELRELN

SEQ ID NO: 163430 - protein, 523 aa, Unknown
  Bacterial polypetide isolated from the Sargasso Sea
MTQPTQAQFSSAAVSAAPAHTADQPSGQTPGQPANHAPNTDGIWYESYPADVPHEIDVNQYESVVQFFDECIAQFRERVAYVSVGANMTYGELGRKAAAFAAYLQSIGVKAGERVAIMLPNTFQYPVSLFGVLKAGGVVVNVNPLYTVRELAHQLKDSGAQTIIVFENFAKTVEDALPGTRVQNVIVTGLGDLLADGLNLKGRLLNFMLRHVKKMVPPYNLPQAVPLLDALSIGYTRPLTPVRPTHNDIAFLQYTGGTTGVAKGAMLTHKNIIANLLQAKAWSEGQLSGEIETVLTPLPLYHIYSLTVNALIFMGLGGRNILIANPRDMKRVMMIIRHEKFTGMTAVNTLYNAFLDNEEFCKRDFSNLKLAMAGGMATQKSVADRFKAVTGKPIIEGYGLTECSPIVSMNPVDLTNLRDFEGSIGLPAPSTQVRFRKDDGTWANIGEAGELCVKGPQVMKGYWNRPEETAKVIDDDGWLATGDIGVMDSRGFIRLIDRKKDMILVSGFNVYPNEVEDVIAALP

SEQ ID NO: 163431 - protein, 208 aa, Unknown
  Bacterial polypetide isolated from the Sargasso Sea
MNIHEHQAKQILKKYGANVPEGVFAYNVSDLLQKTKELKTDKYVLKAQIHAGGRGKAGGVKIVDNLENLEKEANILLGKNLITHQTGPLGREVKRLYVEEVSNISKEFYLSCLVDRASSKIAFISSDQGGMNIEEVAQNTPEKILTTKVDFNQEISEADCKKIIKVFELDDNSGSEAISLIKAIYKLFIENDANLVEINPLILTKENK

SEQ ID NO: 163432 - protein, 166 aa, Unknown
  Bacterial polypetide isolated from the Sargasso Sea
MNIHEHQAKQILKKYGANVPEGVFAFNVSDLLQKTKELKTDKYVLKAQIHAGGRGKAGGVKIVDNLENLEKEANILLGKNLITHQTGPLGREVKRLYVEEVSNISKEFYLSCLVDRVSSKIAFISSDQGGMNIEEVAQNTPEKILTTKVDFNQEISEIDCKKIIKV

SEQ ID NO: 163433 - protein, 140 aa, Unknown
  Bacterial polypetide isolated from the Sargasso Sea
MNLHEYQGKALFAEYNLPVSKGKIIYSADEVTDACNEIGGTSWVVKAQVHAGGRGKSGGVQLINTPEDGIKFAEKWLGNNLVTYQTDAKGQPVNSILIEECTNISKELYLSAVIDRDLQKIVFIGSSEGGVNIEDVAKNM

SEQ ID NO: 163434 - protein, 254 aa, Unknown
  Bacterial polypetide isolated from the Sargasso Sea
MNLHEYQSKKLFLDHGIPVLKGEIANSPDEAKSAAEKLQSGIWVVKAQVHAGGRGKAGGVKIAKSIAEVGEMAAEMLGTNLITKQTDHLGLLVSKVYIESGTSIQSEYYLSLLVDRTKESWTFIASKEGGVDIEAVAEESPDKIINYTIDPLKGLEIESLKEMADRMGFIDDIQSQFISITKKMFEIAKEKDVNLIEVNPLILDDENQLIALDAKITIESNALFRQKELLLLKDDSQENELEVKASQHDLSYVS

SEQ ID NO: 163435 - protein, 81 aa, Unknown
  Bacterial polypetide isolated from the Sargasso Sea
MNIHEHQAKQILKKYGAVVPEGVFALNVAELIQKAKALKTEKYVLKAQIHAGGRGKAGGVKILNSIEELTLAAKELLGKTL

SEQ ID NO: 163436 - protein, 65 aa, Unknown
  Bacterial polypetide isolated from the Sargasso Sea
MNIHEHQAKQILKKYGAAVPKGVFGFSVDDIVKKAKELNTQKYVLKAQIHAGGRGKAGGVKILDN

SEQ ID NO: 163437 - protein, 144 aa, Unknown
  Bacterial polypetide isolated from the Sargasso Sea
MNLHEYQGKALFAEYNLPVSKGKIIYSADEVADACNEIGGTSWVVKAQVHAGGRGKSGGVQLINTPEDGIKFAEKWLGNNLVTYQTDAKGQPVNSILIEECTNISQELYLSAVIDRDSQKIVFIGSSEGGVNIEDVAKNMPEKI

SEQ ID NO: 163438 - protein, 102 aa, Unknown
  Bacterial polypetide isolated from the Sargasso Sea
MNIHEHQAKEILKKYGAIVPEGVFSHSVEELLQKAKSLKTEKFVLKAQIHAGGRGKAGGIKIVNTIEELNSAAKEMLGKKLITHQTGPQGREVKRLYVESSS

SEQ ID NO: 163439 - protein, 87 aa, Unknown
  Bacterial polypetide isolated from the Sargasso Sea
MNIHEHQAKEILKEFGAPVSNGTVILNPEELDAKIKIFKSNKIVIKAQIHAGGRGKAGGVKLVNKSDCKKETEKMFGKTLITHQTGP

SEQ ID NO: 163440 - protein, 85 aa, Unknown
  Bacterial polypetide isolated from the Sargasso Sea
DWRIGGTAEEEAAEFLKKEKIKKPMVGFIAGLTAPPGRRMGHAGAIISGGKGGAEDKIETMKSAGITISKSPADIGKTLYQKLNG

SEQ ID NO: 163441 - protein, 76 aa, Unknown
  Bacterial polypetide isolated from the Sargasso Sea
MNIHEHQAKQILKKYGIAVPNGVFSFSADDIAEKAKKLNTNKYVLKAQIHAGGRGKAGGIKIIDNINELTEASKKM

SEQ ID NO: 163442 - protein, 61 aa, Unknown
  Bacterial polypetide isolated from the Sargasso Sea
MNIHEHQAKEILREFDLPVSKGEIILSISEIKEKISKLKDQEFVLKAQIHAGGRGKAGGVK

SEQ ID NO: 163443 - protein, 148 aa, Unknown
  Bacterial polypetide isolated from the Sargasso Sea
MNIHEHQAKQILKKYGAIVPEGVFAFNVPDLLKKIKTLKTDKYVLKAQIHAGGRGKAGGVKIVDNIKNLEEEANNLLGKILITHQTGPSGREVKRLYVEAASNISKEFYLSCLIDRASSRIAFISSDQGGMNIEEVAQNAPEKILTTK

SEQ ID NO: 163444 - protein, 129 aa, Unknown
  Bacterial polypetide isolated from the Sargasso Sea
MNLHEYQGKALFAEYNLPVSKGKIIYSADKITDACNEIGGTSWVVKAQVHAGGRGKSGGVELINTPEDGIKFAEKWLGNNLVTYQTDAKGQPVNSILVEECTNISQELYLSAVIDRDSQKIVFIGSSEG

SEQ ID NO: 163445 - protein, 80 aa, Unknown
  Bacterial polypetide isolated from the Sargasso Sea
MNIHEHQAKQILREFGIEVPNGVFALSVEDLIKKAKQLNTEKYVLKAQIHAGGRGKAGGVKILNNIDELTKASKELLGQK

SEQ ID NO: 163446 - protein, 46 aa, Unknown
  Bacterial polypetide isolated from the Sargasso Sea
MDIHEYQAKKILSGFGVTIPRGGIAYSPENAENKARELGGSKWVVK

SEQ ID NO: 163447 - protein, 268 aa, Unknown
  Bacterial polypetide isolated from the Sargasso Sea
MNLHEYQSKKLFSDHGIPVLEGNIASSPDEAKSSAEKLKGDIWVVKAQVHAGGRGKAGGVKIARSIAEVHEMASEMLGTNLITKQTDEKGLPVNQVYIESGTSIQSEYYLSLLVDRTKESWTYIASIEGGVDIEAVAEESPEKIINYTIDPLKGLELSSLKQMADRMGFTDDVHSQFVSITKKMFEIAKEKDANLIEVNPLILDDHNQLIALDAKISIESNALFRQEELLSFKDNSQENELEVKASEHDLSYVSLDGNIACMVNGAGL

SEQ ID NO: 163448 - protein, 169 aa, Unknown
  Bacterial polypetide isolated from the Sargasso Sea
MDIHEYQAKKILSDFGVKIPTGGIVYSPENAENKAREIGGSKWVVKAQVHSGARGKAGGIIVCNSPLEVADATDKLLGKKLVTNQTGLEGKIINRIYIEEATDIKHELYLGLVFDRSSESIMVVASTEGGMSVEEISKEKPETIIRSKIEVAVGIQQFQAREIAFWFRY

SEQ ID NO: 163449 - protein, 111 aa, Unknown
  Bacterial polypetide isolated from the Sargasso Sea
MNIHEHQAKELLKEFGAPVSKGVVIYSLSEIDKKIKELTSNKFVLKAQIHAGGRGKAGGVKLVKDIDELKKEAKILLGKKLVTPQTGPNGKEVKRLYIEEASEISKEFYLS

SEQ ID NO: 163450 - protein, 159 aa, Unknown
  Bacterial polypetide isolated from the Sargasso Sea
MNLHEFQSKDLFRKYGIPVPKGAIATTPNEAKSVAHELGGEKWVVKAQIHSGGRGKAGGVKIAKNQDEVTKFAKEMLGKTFVTKQTGSSGLPSNSVYIESATDYEKELYISLLVDREDECISVISSQSGGGNIEEVAEEDPNSVFKIPINSALGICPIN

SEQ ID NO: 163451 - protein, 60 aa, Unknown
  Bacterial polypetide isolated from the Sargasso Sea
MNLHEYQSKKLFLDHGIPVLKGEIANSPDEAKSAAEKLQSGIWVVKAQVHAGGRGKAGGV

SEQ ID NO: 163452 - protein, 75 aa, Unknown
  Bacterial polypetide isolated from the Sargasso Sea
MNIHEHQAKVILKKYGAIVPEGVFSHSVEELLQRAKSLKTEKFVLKAQIHAGGRGKAGGIKIVNTIEELNSAAKE

SEQ ID NO: 163453 - protein, 220 aa, Unknown
  Bacterial polypetide isolated from the Sargasso Sea
MVETPFRWTFTSIPPLVWRICRATSHSNPPRQETQVDLFEYQGKQFFKQFGMPVSDGEVAFTVQEAVDAAERLGTPVMVKAQVHTGGRGKAGGVKFAATVEDVQEHASNILGLDINGHIVQRLWIEKASDISEEYYASFTLDRSAKQHLGMLSAEGGVEIETVAAENPDAISKVHVDPAIGLTREAAQAWVEGAKLNPVAVEGAIDIVPHLYEAYVNGDA

SEQ ID NO: 163454 - protein, 127 aa, Unknown
  Bacterial polypetide isolated from the Sargasso Sea
MNIHEHQAKIILKNYGAKVPNGIFASNVKDLLEKAKTLETEKYVLKAQIHSGGRGKAGGIKLVNNLEELEKEAKNLIGKILVTHQTGPNGRKVQRLYVEEASLINKEFYLSCLVDRESSKIAFISSD

SEQ ID NO: 163455 - protein, 62 aa, Unknown
  Bacterial polypetide isolated from the Sargasso Sea
MNIHEHQAKQILKKFGIPVPKGDFGFSAEEIVEKAKKLNLNQYVLKAQIHAGGRGKAGGIKI

SEQ ID NO: 163456 - protein, 80 aa, Unknown
  Bacterial polypetide isolated from the Sargasso Sea
MNIHEHQAKEILKKYGAVVPEGVYAFNVNELIEKVKNLKADKYVLKAQIHAGGRGKAGGVKIVDNIALLEEEAKKLFGKT

SEQ ID NO: 163457 - protein, 149 aa, Unknown
  Bacterial polypetide isolated from the Sargasso Sea
MNLHEYQSKKLFLDHGIPVLKGEIANSPDEAKSAAEKIQSSIWVVKAQVHAGGRGKAGGVKIAKSIAEVGERAAEMLGINLITKQTDDLGLPVRKVYIESGTSIQSEYYLSLLVDRTKESWTFIASKEGGVDIEAVAEESPDKIINYTI

SEQ ID NO: 163458 - protein, 67 aa, Unknown
  Bacterial polypetide isolated from the Sargasso Sea
MDIHEYQAKKILSDFGIGIPRGGIAYSPENAEYKAKEIGGSRWVVKAQVHSGARGKAGGIIVLHDAL

SEQ ID NO: 163459 - protein, 99 aa, Unknown
  Bacterial polypetide isolated from the Sargasso Sea
MDIHEYQAKKILSDFGIGIPKGGIAYSPENAEYKAKEIGGSKWVVKAQVHSGARGKAGGIIVCNDALEVAQATDKLLGKKLITNQTGPAGKIINRVYIE

SEQ ID NO: 163460 - protein, 114 aa, Unknown
  Bacterial polypetide isolated from the Sargasso Sea
MNIHEHQAKQILKKYGANVPKGVFAFNVSDLLQKTKELKTDKYVLKAQIHAGGRGKAGGVKIVDNLENLEKEANILLGKNLITHQTGPLGREVKRLYVEEVSNISKEFYLSCLV

SEQ ID NO: 163461 - protein, 102 aa, Unknown
  Bacterial polypetide isolated from the Sargasso Sea
MNLHEYQAKELLLKFKLPILKGKIYFNKIENLDEDLENFRGPPWVVKAQIHAGGRGAGHFKNSSNQSKKQAGVQIVKNKDDLINIANSMLGNTLITKQTGEM

SEQ ID NO: 163462 - protein, 253 aa, Unknown
  Bacterial polypetide isolated from the Sargasso Sea
KIMNLFEYQGKDLYKKYSITTPKSIFINSISDLTENHGLSFPLVVKAQVQVGGRGKAGGIKVAKNHQELEEHIDAILGMDIKGHKVESLLIEEASEIISEYYISFTLDRSEKKYLMMLSSKGGMDIEEVAANSPEDLIKIYISPSLGLESKIITQAIKDANLNLDYIDELHEIISKLYKLFTEGDCDLVEVNPLAITNQGVSALDSKVSLDMNAIYRHDDFKKYEEEIPIPESEKSARSKGLNFIKLDGSVGI

SEQ ID NO: 163463 - protein, 130 aa, Unknown
  Bacterial polypetide isolated from the Sargasso Sea
MDIHEYQAKKILSDFGIGIPKGGIAYSPENAEYKAKEIGGSKWVVKAQVHSGARGKAGGIIVCNDALEVAQATDKLLGKKLVTNQTGPAGKIINRVYIEEASDIEKELYLGLVFDRGSECIMVVASTEGG

SEQ ID NO: 163464 - protein, 130 aa, Unknown
  Bacterial polypetide isolated from the Sargasso Sea
FCGHHCNGAGLVMSTLDVVAEHGGSASNFLDIGGGAKSETVSAALEVLETDSNVKSVLINIFGGITRCDLVADGIVEATSGKKLKWPIIIRLDGTNSKEGLEILKNNPNDNIFISENMDEAAKLAVESGI

SEQ ID NO: 163465 - protein, 149 aa, Unknown
  Bacterial polypetide isolated from the Sargasso Sea
GKRLVTYQTDETGQPVSRILVEACIGISEELYLGAVVDRASRRIVFMASTEGGVEIKKVARETPEKIIRTTIDPLTGAQSYQGRELAFRLGLSGVQINQFVNIFLGLARLFQEKDLSLIEVNPLIVTYEGDLKCLDAKVVADSNALYRH

SEQ ID NO: 163466 - protein, 109 aa, Unknown
  Bacterial polypetide isolated from the Sargasso Sea
MNLHEYQGKEIFAKYDLPVSKGKVVTSLDEVEQACTDIGGSRWVAKAQVHAGGRGKSGGVALCDTIEEVANFTKKWLGKRLVTYQTDKEGQLVSCILVEECTNIADELY

SEQ ID NO: 163467 - protein, 138 aa, Unknown
  Bacterial polypetide isolated from the Sargasso Sea
MNIHEHQAKQILKKYGVKVPNGIFGFTVDEVITKAKSLKTNRYVLKAQIHSGGRGKAGGVKILNNINELNKEAKQLLGKVLVTNQTGSQGKKVNRLYVEESSNIEKEFYLSCLVDRSSSKIAFISSDQGGMDIEEGPN

SEQ ID NO: 163468 - protein, 210 aa, Unknown
  Bacterial polypetide isolated from the Sargasso Sea
MDIHEYQAKKILSGFGVTIPRGGIAYSPENAENKARELGGSKWVVKAQVHSGARGKAGGIVLCNSPLEVAQATDKLLGKKLVTNQTGPSGKIINRVYIEEATDIKKELYLGLVFDRSSESIMVVASTEGGMSVEEISKEKPETIIRSKIEVAVGMQQFQAREIAFGLGIDPKLISRMADTIIGCYRAFSELDATMVEVNPMVISNHRSKF

SEQ ID NO: 163469 - protein, 209 aa, Unknown
  Bacterial polypetide isolated from the Sargasso Sea
MNLHEYQSKKLFLDHGIPVLKGEIANSPDEAKSAAEKLQSGIWVVKAQVHAGGRGKAGGVKIAKSIAEVGEKAAEMLGTNLITKQTDDLGLPISKVYIESGTSIQSEYYLSLLVDRTKESWTFIASKEGGVDIEAVAEESPDKIINYTIDPFKGLEIESLKEMADTMGFIDDIQSQFISITKKMFEIAKEKDANLIEVNPLILDDENQL

SEQ ID NO: 163470 - protein, 83 aa, Unknown
  Bacterial polypetide isolated from the Sargasso Sea
EIGGTAEEEAAEFIKNHKIKKPIVGFIAGVTAPPGRRMGHAGAIISGGKGGAKDKIKKMEDCGIIIANSPSKIGKTLFNKLSN

SEQ ID NO: 163471 - protein, 246 aa, Unknown
  Bacterial polypetide isolated from the Sargasso Sea
MNLHEYQSKKLFFDHGIPVLDGDIASSPDEAKSAAEKLKGDIWVVKAQVHAGGRGKAGGVKIASSITEVHESASEMLGTNLITKQTDEKGLPVNQVYVESGTSIQSEYYLSLLVDRTKESWTYIASIEGGVDIEAVAEESPEKIINYTIDPLKGLELSSLKQMADRMGFTDDVHSQFVSITKKMFEIAKEKDANLIEVNPLILDDHNQLIALDAKISIESNALFRQEELLSFKDNSQENKLEVKAS

SEQ ID NO: 163472 - protein, 183 aa, Unknown
  Bacterial polypetide isolated from the Sargasso Sea
MNIHEHQAKQILKKYGAAVPEGVFAFNVPDLLKKITTLKTDKYVLKAQIHAGGRGKAGGVKIVDNIKNLEEEANNLLGKILITHQTGPSGKEVKRLYVESASNISKEFYLSCLVDRASSKIAFISSDQGGMNIEEVAKDTPEKIITTKVDFVQEISDEDCKKIIKVFNLDKDSKVSKLINLIK

SEQ ID NO: 163473 - protein, 109 aa, Unknown
  Bacterial polypetide isolated from the Sargasso Sea
VISESGSQPANFLDIGGGADEDKVAEAMKIICSDTDVDKIFVNLFGGILRCDVAARGIVQASKETTIPPIIVRMLGTNADEGAQILLDSSLEVKLIHDLHDARKEFLKS

SEQ ID NO: 163474 - protein, 146 aa, Unknown
  Bacterial polypetide isolated from the Sargasso Sea
MNLHEYQGKALFAEYNLPVSKGKIIFKAEDVIEACNEIGGSKWVVKAQVHAGGRGKAGGVELIDDPNEGVKFANKWLGKNLITYQTDKDGQPVNSILIEECTEIVKELYLSAVIDRESQKIVFIGSYEGGVNIEEVAKNAPEKNIY

SEQ ID NO: 163475 - protein, 65 aa, Unknown
  Bacterial polypetide isolated from the Sargasso Sea
MDIHEYQAKKILSDFGIGIPRGGIAYSPENAEYKAKEIGGSRWVVKAQVHSGARGKAGGIIICND

SEQ ID NO: 163476 - protein, 122 aa, Unknown
  Bacterial polypetide isolated from the Sargasso Sea
MNIHEHQAKKILKKYGASVPDGVFSDSVEELLEKSKSLKTEKFVLKAQIHAGGRGKAGGIKIVNTIEELSLAAKEMMGKKLITHQTGAEGKEVKRLYVESSSEISKEFYLSCLVDRASSKIA

SEQ ID NO: 163477 - protein, 79 aa, Unknown
  Bacterial polypetide isolated from the Sargasso Sea
MNLHEYQAKKLFKDYDISVSEGLPASSSQEAEKIALSLNVDKWVVKAQVHAGGRGKSGGVELVDSIEKVKAFADKWLGK

SEQ ID NO: 163478 - protein, 143 aa, Unknown
  Bacterial polypetide isolated from the Sargasso Sea
MNIHEHQAKQILKKYGVIVPNGVFAFSTEELITKAKSLKTEKFVLKAQIHAGGRGKAGGVKILNTIEELNIAAKEMLGKTLITHQTGPDGRKVKRLYVEESSNIDKEFYLSCLIDRASSKIAFISSDQGGVDIEKVAKETPNK

SEQ ID NO: 163479 - protein, 218 aa, Unknown
  Bacterial polypetide isolated from the Sargasso Sea
MNLHEYQSKALFIEYGINVPRGIAVESSVEALKAVEEISADIWVVKAQAHTGGRGKAGGVKLAHSLDEVCKYTDEMLGMTLVTYQTGPEGLPVNKVYIEEASEIERELYLSILVDRDNGRISFVASAEGGVDIESVAAKTPEKIFTISISPDVGLQDYQIRQLAFKLDFNKEQIKQFSLLLNNLYQLYLEKDASLIEINPLIINKLGNLVALDGKINI

SEQ ID NO: 163480 - protein, 133 aa, Unknown
  Bacterial polypetide isolated from the Sargasso Sea
MDIHEYQAKEILSNYGVQILAGELVHNTTEAVDAFKKLNTDLCVVKAQVHSGARGKAGGIVLCKSNEEVKAASEKLFGTYLKTIQTGDEGKLIEKLYIESGCDIDREIYLAFVMDRASQRIVIVASAEGGMSI

SEQ ID NO: 163481 - protein, 238 aa, Unknown
  Bacterial polypetide isolated from the Sargasso Sea
MNIHEHQAKEILKEFGAPTTEGVVIYDTNNLIEKIKVLDSEELVLKAQIHAGGRGKAGGVKLVKRSKILDEAKKLFGKVLVTQQTGKEGKEVKRIYVQKAYDISKELYLSCLVDRQSGKIAFISSTEGGVDIELVAKNTPKKIVTTKVDFKKSLSEQDIKNVIKIFDFDSEQKKDGSKLVNAIYNIMISKDASLIEINPLIITKDKKILCLDAKMNFDDNSIFRHPEISQLRDLNEED

SEQ ID NO: 163482 - protein, 159 aa, Unknown
  Bacterial polypetide isolated from the Sargasso Sea
MNIHEHQAKQILKKYGANIPEGVFAFNVSDLLQKTKELKTDKYVLKAQIHAGGRGKAGGVKIVDNLENLEKEAKILLGKNLITHQTGPLGREVKRLYVEEVSNISKEFYLSCLVDRASSKIAFISSDQGGMNIEEVAQNTPEKILTTKVDFNQEISEVD

SEQ ID NO: 163483 - protein, 166 aa, Unknown
  Bacterial polypetide isolated from the Sargasso Sea
MNIHEHQAKEILKKYGAKVPRGVFAFKVEDLLEKANNLKKEKYVLKAQIHSGGRGKAGGIKLVNNLDELEKEAENLIGKTLVTNQTGANGRKVSRLYVEEVSEINKEFYLSCLVDRASSKITFISSDQGGMDIEEVAKKNPEKIITTKVEFRSQISEDDCKKIINI

SEQ ID NO: 163484 - protein, 112 aa, Unknown
  Bacterial polypetide isolated from the Sargasso Sea
MNIHEHQAKALLKKFGAPVPNGISGKSVEEVLEKAKDLKTDKFVLKVQIHAGGRGKAGGVKILDNIEELGKESRKLLGKKLVTHQTGSEGKVVKRLYVEESSNIEKNFIYHV

SEQ ID NO: 163485 - protein, 269 aa, Unknown
  Bacterial polypetide isolated from the Sargasso Sea
MNLHEYQSKKLFFDHGIPVLNGDIASSPDEAKSAAEKIEGDIWVVKAQVHAGGRGKAGGVKIAKSITEVHEMASKMLGINLITKQTDENGLPVNQVYIESGTSIQSEYYLSLIVDRTKESWTYIASKEGGVDIEAVAEESPEKIINYTIDPLSGLELSSLNKMAERMGFTDEVHTQFVSITKKMFEIAKDKDANLIEVNPLILDDHNKLIALDAKISIESNALFRQEELLLFKDDSQENELEVKASEHDLSYVSLDGNIACMVNGAGLA

SEQ ID NO: 163486 - protein, 67 aa, Unknown
  Bacterial polypetide isolated from the Sargasso Sea
MNIHEHQAKQILKQFGAAVPEGVFGFTVEELLEKCKGLQTDKYVLKAQIHAGGRGKAGGVKILDNLK

SEQ ID NO: 163487 - protein, 176 aa, Unknown
  Bacterial polypetide isolated from the Sargasso Sea
MDIHEYQAKKILSDFGIGIPRGGIAYSPENAEYKAKEIGGSRWVVKAQVHSGARGKAGGIIICNDALEVARAADKLLGKKLITNQTGPSGKIINRVYIEEASDIERELYLGLVFDRGSECIMVVASTEGGMSVEEISNKKPETIIRSKIEAAVGIQEFQAREIANNLGVETGLISR

SEQ ID NO: 163488 - protein, 80 aa, Unknown
  Bacterial polypetide isolated from the Sargasso Sea
IGGTAEEEAAEYIKDNVSKPVISYIAGQTAPAGKRMGHAGAIIAGGKGTAADKIKKLKECGVHIAENLLQIGTKTKEVLG

SEQ ID NO: 163489 - protein, 191 aa, Unknown
  Bacterial polypetide isolated from the Sargasso Sea
MNLHEYQSKKLFSDHGIPVLEGNIASSPDEAKSSAEKLKGDIWVVKAQVHAGGRGKAGGVKIARSIAEVHEMASEMLGTNLITKQTDEKGLPVNQVYIESGTSIQSEYYLSLLVDRTKESWTYIASIEGGVDIEAVAEESPEKIINYTIDPLKGLELSSLKQMADRMGFTDDVHSQFVSITKKMFEIAKEK

SEQ ID NO: 163490 - protein, 78 aa, Unknown
  Bacterial polypetide isolated from the Sargasso Sea
MNLHEYQSKKLFLDHGIPVLKGEIANSPNEAKSAAEKIQSGIWVVKAQVHAGGRGKAGGVKIAKSLAEVGEKAAEMLG

SEQ ID NO: 163491 - protein, 39 aa, Unknown
  Bacterial polypetide isolated from the Sargasso Sea
MKIHEYQAKQILTKYGVPVPKGNVAFSVDEALMVAEDLK

SEQ ID NO: 163492 - protein, 194 aa, Unknown
  Bacterial polypetide isolated from the Sargasso Sea
MNIHEHQAKQILKKYGANVPEGVFAFNVSDLLQKTKELKTDKYVLKAQIHAGGRGKAGGVKIVDNLENLEKEANILLGKNLITHQTGPLGREVKRLYVEEVSNISKEFYLSCLVDRGSSKIAFISSDQGGMNIEEVAQNTPDKILTTKVDFNQEISEVDCKKIIKVFELDDNSGSEAISLIKAIYKLFIENDAN

SEQ ID NO: 163493 - protein, 210 aa, Unknown
  Bacterial polypetide isolated from the Sargasso Sea
MDLFEYQGKSLYQDFDISHPKSSLVKDPKELQELKGLSYPVVVKAQVQVGGRGKAGGIKVANNHDELIELGNQIYGMDIKGHKVEVLLIEEASEILEEYYLSFTLDRSAKKYLMMLSAKGGMDIEQVAKDNPKDLVKLHISPSQGLDKKDLDKSIIEANLNQKFKNELSEIIIKLYELFDEGDCDLVEVNPLAITKEGVRALDSKVALEM

SEQ ID NO: 163494 - protein, 80 aa, Unknown
  Bacterial polypetide isolated from the Sargasso Sea
MNLHEYQGKALFAEFNLPVSKGKVVFDADEIIDACNEIGGSKWVVKAQVHAGGRGKAGGVELIDNPQDGVEFAKKWLGKN

SEQ ID NO: 163495 - protein, 93 aa, Unknown
  Bacterial polypetide isolated from the Sargasso Sea
MNLHEYQSKKLFLDHGIPVLKGEIASSPDEAKSAAEKLQSGIWVVKAQVHAGGRGKAGGVKIAKSIAEVGERAAEMLGTNLITKQTDDLGLRV

SEQ ID NO: 163496 - protein, 159 aa, Unknown
  Bacterial polypetide isolated from the Sargasso Sea
MNLHEYQSKKLFSDHGIPVLKGEIANSPDEARSAAEKLQSSIWVVKAQVHAGGRGKAGGVKIAKSIAEVEERAAEMLGTNLITKQTDDLGLPVRKVYIESGTSIQSEYYLSLLVDRTKESWTFIASKEGGVDIEAVAEESPDKIVNYTIDPLKGLEIGC

SEQ ID NO: 163497 - protein, 90 aa, Unknown
  Bacterial polypetide isolated from the Sargasso Sea
MDIHEYQAKKILSDFGVSIPRGGIAYSPENAENKAREIGGNKWVVKAQIHSGARGKAGGIILCDTPLAVAQATDKLLGKKLVTNQTGPEG

SEQ ID NO: 163498 - protein, 199 aa, Unknown
  Bacterial polypetide isolated from the Sargasso Sea
MDIHEYQAKEILAKFGVGVPPGALAYSPEQAAYRAREIGGDTWVVKAQVHAGGRGKAGGVKVCHSDTEIVETCENLFGSKLVTHQTDSNGKGVYRVYVEGGVPIDREIYLGFVLDRSSQRVMIVASAEGGMEIEDISADKPESIVRSTVEPAVGLQDFQCRQIAFKLGIEPVLTQSMVRTLQGCYRAFREHDATMVKLT

SEQ ID NO: 163499 - protein, 116 aa, Unknown
  Bacterial polypetide isolated from the Sargasso Sea
VSELRDKTQEDSKEIFASDRGLNYVSLDGNIGNIINGAGLAMASMDMIKLAGGAPANFLDVGGGATPEKIVKAFKLVTMDEKVKVILVNIFAGINRCDWVAEGIVDALKKIEIKVP

SEQ ID NO: 163500 - protein, 161 aa, Unknown
  Bacterial polypetide isolated from the Sargasso Sea
MSVLISSKTKAIFQGFTGSQATMHAEQCIAYGTNVVGGVTPGKGGQEHLNLPVFNSVKEAVSETNANTSVIFVPARFAKAAIIEAAENGVELIICITEGVPVLDMIDVIDVLNHNPNVRLIGPNCPGVITPGEAKLGIMPASIHTKGSVGIVSRSGTLTYE

SEQ ID NO: 163501 - protein, 243 aa, Unknown
  Bacterial polypetide isolated from the Sargasso Sea
MDIHEYQAKKILSDFGVKIPTGGIVYSPENAENKAREIGGSKWVVKAQVHSGARGKAGGIIICNSPLEVADATDKLLGKKLITNQTGPEGKIINRIYIEEATDIKHELYLGLVFDRSSESIMVVASTEGGMSVEEISKEKPETIIRSKIEVAVGIQQFQAREIAFGLGIESKLISRAANTIIGCYKAFSELDATMVEVNPLVVSHQDEILALDCKMSFDNNAMFRRDEIAELRDKTQENSNEV

SEQ ID NO: 163502 - protein, 181 aa, Unknown
  Bacterial polypetide isolated from the Sargasso Sea
MNIHEHQAKEILKKYGAIVPEGVFSHSVEELLQKAKSLKTEKYVLKAQIHAGGRGKAGGIKIVNTIEELNSAAKEMLGKKLITHQTGPQGREVKRLYVESSSEIEKEFYLSCLVDRASSKIAFISSDQGGMDIEDVSKNNPKKIVTTKINLDEKILDKDCEKIIEIFNLSLEAKKQSFKFD

SEQ ID NO: 163503 - protein, 165 aa, Unknown
  Bacterial polypetide isolated from the Sargasso Sea
MFRRSPVSVLRDLTQEDSQEIFASDRGLNYVSLDGDIGNLINGAGLAMASMDMIKLAGGSPANFLDVGGGATPEKIVKAFKLITMDEKVKVILVNIFAGINRCDWVAEGIVEALKKIEIKVPLIIRLAGTNVEKGNKILKDSKINYIEANTLEDAANKAVAALKK

SEQ ID NO: 163504 - protein, 267 aa, Unknown
  Bacterial polypetide isolated from the Sargasso Sea
MDIHEYQAKKLLADFGVIIPRGGIAYSPENAENKAREIGGSKWVVKAQIHSGARGKAGGIILCNSPLEVAQATDKLLGKKLVTNQTGPQGKIVNRIYVEEATDIKKEFYLGLVFDRSSESIMVVASTEGGMSVEEISKEKPESIIRSKIEVAVGMQKFQAREIAFGLGVAPELINRTAETIIGCYRAFSELDATMVEINPLAVSGQGQILALDCKMSFDNNALFRRNQISELRDKTQENPSEVYASDRGLNYVSLDGNIGNIIKWSR

SEQ ID NO: 163505 - protein, 178 aa, Unknown
  Bacterial polypetide isolated from the Sargasso Sea
MNIHEHQAKKILKKYGAPVPEGVYGFSVAEIVDKAKNLNTKKFVLKAQIHAGGRGKAGGIKILNNIDELKVASAELLGKKLITPQTGIDGKEVKRIYVEESSEISKEFYLSCIVDRATSKIAFISSDQGGMDIEEVAKNNPEKIITTRIDFQTEIKHEDCEEVIKIFKLNSDANNQAI

SEQ ID NO: 163506 - protein, 144 aa, Unknown
  Bacterial polypetide isolated from the Sargasso Sea
MNIHEYQAKEILKNFGLPVLNGKAYNKNLDNLEADLINLNGPPWVVKSQIHAGGRGAGHFKDPFNDKGGVQVIFEKEQVFPVAKSMMGNVLITKQTGENGKTVNRIFIEEGCNIEREFYLSLLIDRNNSKVMLMISAAGGMDIE

SEQ ID NO: 163507 - protein, 151 aa, Unknown
  Bacterial polypetide isolated from the Sargasso Sea
MGILINNNTKLLVQGITGSQGQLHTRGCRDYGTNIVAGVTPGKGGQDFEGIPIFNTVQEAVNATGANASMIFVPPPFAADAVMEAAGAKIPLIVAITEGVPVTDMVRAVDFVRRQGVRLVGPNCPGVITPGQCKIGIMPGPIHEPGKVGVV

SEQ ID NO: 163508 - protein, 54 aa, Unknown
  Bacterial polypetide isolated from the Sargasso Sea
MDIHEYQAKKILSNFGVTIPRGGIVYSPENAENKAREIGGSRWVVKAQIHSGAR

SEQ ID NO: 163509 - protein, 42 aa, Unknown
  Bacterial polypetide isolated from the Sargasso Sea
MNIHEYQAKALLKSYGAPVADGVAILTKDEVDAAGPSFPARF

SEQ ID NO: 163510 - protein, 119 aa, Unknown
  Bacterial polypetide isolated from the Sargasso Sea
MNIHEHQAKELFREYNIPVSTGSVAFSKDQIEQSVNEVSGPTWVVKAQIHAGGRGKGGGVKVVSSSEDAVSSAEKMFGMNLITPQTGKKGKIVNRVYIENGSDIEKELYLSCLVDRATS

SEQ ID NO: 163511 - protein, 158 aa, Unknown
  Bacterial polypetide isolated from the Sargasso Sea
MKVHEYQGKELFRKYQIPTPNGVPVFSVEEALKAYDELATDTVVVKAQIHAGGRGKGGGVKLAHSKEEVESLSKEILGMTLVTHQTGPDGKEVQRLLIESGANIEKEFYAAITLDRSKEMDVFMVSIEGGVDIEKVADETPEKIVKTWIDPMLGMNSF

SEQ ID NO: 163512 - protein, 74 aa, Unknown
  Bacterial polypetide isolated from the Sargasso Sea
MDIHEYQAKKILSNFGVTIPRGGIVYSPENAENKAREIGGSRWVVKAQIHSGARGKAGGIIVCNTPFRSLLSNR

SEQ ID NO: 163513 - protein, 160 aa, Unknown
  Bacterial polypetide isolated from the Sargasso Sea
MDIHEYQAKKILSGFGVTIPRGGIAYSPENAENKARELGGSKWVVKAQVHSGARGKAGGIIICNSSLEVAQAADKLLGKKLVTNQTGPEGKITNRVYIEEATDIKKELYLGLVFDRSSESIMVVASTEGGMSVEEISKKKPETIIRSKIEVAVGMQKFQA

SEQ ID NO: 163514 - protein, 118 aa, Unknown
  Bacterial polypetide isolated from the Sargasso Sea
TCIGIGGDPINGTNFTDCLDLFLKDEETKSILIIGEIGGTAEEEAAEFYKNHKIKKPMVGFVAGITAPPGRRMGHAGAIISGGKGGAEDKIKKMEDCGITIAKSPAEIGKTLLNKLSN

SEQ ID NO: 163515 - protein, 111 aa, Unknown
  Bacterial polypetide isolated from the Sargasso Sea
DPINGTNFIDCLDLFLNDADTQSILMIGEIGGTAEEEAADFIKNHKIKKPIVGFIAGVTAPPGRRMGHAGAIISGGKGGAKEKIKKMEDCGITMADSPSKIGKTLLNKLSN

SEQ ID NO: 163516 - protein, 162 aa, Unknown
  Bacterial polypetide isolated from the Sargasso Sea
QELYVSLVVDRISQKIVLMGSSEGGMDIEEVAEKHPELIHKVIVEPSTGLLDAQADDLAAKIGVPAASIPQARAILQGLYKAFWETDASLAEINPLNVSGDGKVIALDAKFNFDSNALFRHPEIVAYRDLDEEDPAEIEASKFDLAYISLDGNIGCLVNGAG

SEQ ID NO: 163517 - protein, 158 aa, Unknown
  Bacterial polypetide isolated from the Sargasso Sea
MDIHEYQAKKILAGFGVAVPRGGIVYSPENAENKARELGGSKWVVKAQIHSGARGKAGGIIVCKTELEVAQATDKLLGKKLVTNQTGPEGKIVNRVYIEEATDIKKELYLGLVFDRSSESIMVVASTEGGMSVEEISKQKPETIIRSKIEVAVGMQQF

SEQ ID NO: 163518 - protein, 128 aa, Unknown
  Bacterial polypetide isolated from the Sargasso Sea
NIINGAGLAMASMDMIKLAGGAPANFLDVGGGATPEKIVKAFKLVTMDEKVKVILVNIFAGINRCDWVAEGIVDALKKIEIKVPLVIRLAGTNVEKGNKILKESKINYIEANTLEDAANKAVAALNKS

SEQ ID NO: 163519 - protein, 249 aa, Unknown
  Bacterial polypetide isolated from the Sargasso Sea
MDIHEYQAKEILASFGVTIPRGGIVYSPETAENKAREIGGSKWVVKAQIHSGARGKAGGVIVCNSPLEVAQATDKLLGKKLITNQTGPEGKIVNRIYIEEATDIEKELYLGLVFDRSSESIMVVASTEGGMSVEEIAKDKPESIIRSKIEVAVGIQNFQARELAFGLGIEPELIRRASETIVGCAKAFSELDATMVEVNPLVISKQKQILALDCKMSFDNNAMFRRDKVSELRDQTQEDEKEFTLQIEV

SEQ ID NO: 163520 - protein, 171 aa, Unknown
  Bacterial polypetide isolated from the Sargasso Sea
MNLHEYQGKELLAKFGLPVSNNAVVTSPDDVLSACRDIGGDKWVVKAQVHAGGRGKAGGVKLVVSPEEAIEFANHWLGNRLVTYQTDSNGQLVSSILVEECTDIAKELYLSAVIDRGTQRIVFIGSSEGGVNIEEVAEKTPEKIIYEPIDPLTGAMGFQARKISKVLGFGI

SEQ ID NO: 163521 - protein, 195 aa, Unknown
  Bacterial polypetide isolated from the Sargasso Sea
MNLHEYQGKELFAKFGLPVSRNTVITSPDDILSACRDIGGDKWVVKAQVHAGGRGKAGGVKLVDTPEEAIDFAKHWLGKRLVTYQTDSNGQLVSSILVEECTDITKELYLSAVIDRGTQRIVFIGSSEGGVNIEEVAEKTPEKIIYEPIDPLTGPMGFQARKISKVLGLDSEQTKQFSKMLSQLTELFISYDLSL

SEQ ID NO: 163522 - protein, 240 aa, Unknown
  Bacterial polypetide isolated from the Sargasso Sea
MNIHEHQAKEILKEFEAPVSNGVVIYSKDEIEDKISILKSKQYVLKAQIHAGGRGKAGGVKLIKNLSDLVSEAKKMMGKILITHQTGLEGKEVKRLYIEEASDISKEFYLSCLIDRESSKIAFISSTEGGMDIEKVAEETPNKIITTKIDLKSEGPSKEEIENIISIFNFDALQKNVATKLVKSLYKILIEKDASLIEINPLIITKDNKIICLDAKMNFDDNAIFRRPEILKLRDLNEED

SEQ ID NO: 163523 - protein, 138 aa, Unknown
  Bacterial polypetide isolated from the Sargasso Sea
MDIHEYQAKKILSNFGVTIPRGGIVYSPENAENKAREIGGSKWVVKAQIHSGARGKAGGIIVCETPLEVAQATDKLLGKKLVTNQTGPQGKIVNRIYIEEATEIEKELYLGLVFDRSSESIMVVASTEGGMSVEEISK

SEQ ID NO: 163524 - protein, 117 aa, Unknown
  Bacterial polypetide isolated from the Sargasso Sea
MNIHEHQAKQILKKYGAEVPEGVFALEVDELIEKAKALKTEKYVLKAQIHAGGRGKAGGVKILNSIEELTVAAKELLGKTLVTHQTGPEGREVKRLYVEESSNIEKEFYLSCLGDRA

SEQ ID NO: 163525 - protein, 191 aa, Unknown
  Bacterial polypetide isolated from the Sargasso Sea
HEFASLWLGKNLVTYQTNENGQPVSKILVETCTDIENELYLGAVIDRESQRLIFMASEEGGVNIEEVAEKTPEKIFKAPIDPIKGANQEQAVYLAENLNLSESQTEQFVDLFLKLSKLFLDKDLSLLEINPLVINADQNLICLDAKINIDSNALYRQEELHQINDESQEDAREVEASKWDLNYVALDGNIG

SEQ ID NO: 163526 - protein, 92 aa, Unknown
  Bacterial polypetide isolated from the Sargasso Sea
MDIHEYQAKEILASFGVTIPRGGIVYGPETAENKAREIGGSKWVVKAQIHSGARGKAGGVIVCNSPLEVAQATDKLLGEKLVTNQTGPEGKI

SEQ ID NO: 163527 - protein, 111 aa, Unknown
  Bacterial polypetide isolated from the Sargasso Sea
IKLAGGEPANFLDVGGGATPEKIVKAFKLISMDEKVKVILVNIFAGINRCDWVAEGIVQALDKIEIKVPLVIRLAGTNVDKGNKILRESKIKYIEANSLEDAANKAVKILK

SEQ ID NO: 163528 - protein, 267 aa, Unknown
  Bacterial polypetide isolated from the Sargasso Sea
MFDKKNTSKVADSLVLETGTEWFVIKAQIHAGGRGKGGGVKIAKNRKELDKVVSEILGMRLVTPQTSREGKLVNQVLLSEDVYYPGQSEKSEFYVSVLLNRKTGKNMIMYSTEGGVDIESVAEKTPELIFYEEIDPLIGIVPFQARKVAFNLGLNGNAYKEMVKFITLLYKCYVSSDASLFEINPVLKTSDDKIIAVDAKVSLDDNSLFRHKNYESLRDFKEENPSETEARAVGLNYVDLDGNVGCMVNGAGLAMATMDLIKQSGGE

SEQ ID NO: 163529 - protein, 230 aa, Unknown
  Bacterial polypetide isolated from the Sargasso Sea
IHEFQAKELLRAAGVPVLNGKVVRTPDDAADAFESLGTPVCAVKAQIHAGGRGKGHVEGSEQRGVELAKSADDASRIARGLLNKTLVTIQTGPEGQIVRQVFVESGCDIQQELYCAILVDRAAGSPVLIASTAGGMDIEEVAVKTPELILSEPFDPDRGLGAYQARLMASKLGLPTASWRYAVQFFQALCKAFVSLDASLLEINPFVLTGEGTLVALDAKMTFDDNAMFR

SEQ ID NO: 163530 - protein, 180 aa, Unknown
  Bacterial polypetide isolated from the Sargasso Sea
MKVHEYQGKELFRKYQIPTPNGVPVFSVEEALKAYDELATDTVVVKAQIHAGGRGKGGGVKLAHSKEEVESLSKEILGMTLVTHQTGPDGKEVQRLLIESGANIEKEFYAAITLDRGKEMDVFMVSIEGGVDIEKVADETPEKIVKTWIDPMLGMNSFQARKLAFGLNLSGSAFKEACSI

SEQ ID NO: 163531 - protein, 208 aa, Unknown
  Bacterial polypetide isolated from the Sargasso Sea
MNIHEHQAKDILKDFGAPTTEGVIIFNSEGIIDKIKDLNTDQLVLKAQIHAGGRGKAGGVKLVKKKDIVDEAKKLFGKVLVTPQTGPDGRVVKRIYIQKAYDIKKELYLSCLVDRQSSKIAFISSTEGGVDIEAVAKKTPEKIITTKVDLKQNLSPEEIKNILQIYQLDKNQMNSAVKLVNAMYSALIKKDASLIEINPLVITKNNEI

SEQ ID NO: 163532 - protein, 204 aa, Unknown
  Bacterial polypetide isolated from the Sargasso Sea
MNLHEYQGKALFAEYNLPVSKGKIIYSADEVTDACNEIGGTSWVVKAQVHAGGRGKSGGVQLINTPEDGIKFAEKWLGNNLVTYQTDAKGQPVNSILIEECTNISQELYLSAVIDRDSQKIVFIGSSEGGVNIEEVAKNMPEKIIYQGVVYGDKSLPDNASNIAKVLKLNDIQTIQFISMIDNLLRLFVEKNISLLEINPLVIT

SEQ ID NO: 163533 - protein, 243 aa, Unknown
  Bacterial polypetide isolated from the Sargasso Sea
MNIHEHQAKQLLKEFGVPVPNGVYGFSVNEIIKKSKILNTEKYVLKAQIHAGGRGKAGGITIASNINELEQAANQLLGKILITHQTGPKGKKVERLYVEEASNIAKEFYLSCLVDRKSSKMAFISSVQGGMDIEETALKNPEKIITTKVDFEEDISETDCEKIIKVFNLEYDARDQGIELIKSLYKMFREKDASLIEINPLILTKENNIVCLDAKVILDDNAIFKHPEHLELRDLKEEDPTEI

SEQ ID NO: 163534 - protein, 126 aa, Unknown
  Bacterial polypetide isolated from the Sargasso Sea
MNIHEYQAKELLKKFGAPVPNGVHGYTSEDLLNKSKLLKTEKYVLKAQIHSGGRGKAGGIKITNSLEELKQAADPMLGKTLVTNQSGPKGKKVKKLYVEESSTIDKEFYLSCLVDRAKSKIAFISW

SEQ ID NO: 163535 - protein, 154 aa, Unknown
  Bacterial polypetide isolated from the Sargasso Sea
MDIHEYQAKKILSNFGVTIPRGGIVYSPENAENKAREIGGSKWVVKAQIHSGARGKAGGIIVCNTPLEVAQATDKLLGKKLVTNQTGPEGKIVNRIYIEEATDIEKELYLGLVFDRSSESIMVVASTEGGMSVEEISKEKPETIIRSKIEVAVG

SEQ ID NO: 163536 - protein, 241 aa, Unknown
  Bacterial polypetide isolated from the Sargasso Sea
MKIHEFQAKQILKKNGVAVPRGDVAFSVDEALKISQKIDKNESCVIKAQIHAGGRGKGGGVRICEGKNMIRQNAQEILGMHLITNQTDAKGQKVKQLLVEESIDIKKELYCSVLVDRAKKSIVLIASTEGGMDIEEVARKNPSKIFKIYAYPGMGLNKYQVNELVFLLKINEINHNLIQPCTEFFLKIFETFIKEDCSLLEINPLVVTKDNQIIALDAKMTFDENATFRQIGHNKLRDLDE

SEQ ID NO: 163537 - protein, 218 aa, Unknown
  Bacterial polypetide isolated from the Sargasso Sea
DQELIARASDTIIGCAKAFSELDATMVEVNPLVISKQKQILALDCKMSFDNNAMFRRNKVSELRDKTQEDEKEVFASDRGLNYVSLEGNIGNIINGAGLAMASMDMIKLAGGQPANFLDVGGGATPDKIVKAFRLITMDEKVKVILVNIFAGINRCDWVAEGIVQALEKIEIKVPLVIRLAGTNVEKGNEILKNSNINYIAADTLEEAANKAVEALKG

SEQ ID NO: 163538 - protein, 107 aa, Unknown
  Bacterial polypetide isolated from the Sargasso Sea
GAPANFLDVGGGATPEKIVKAFKLVTMDEKVKVILINIFAGINRCDWVAEGIVDALKKIEIKVPLVIRLAGTNVEKGNKILKESKINYIEANTLEDAANKAVAALNK

SEQ ID NO: 163539 - protein, 214 aa, Unknown
  Bacterial polypetide isolated from the Sargasso Sea
MNIHEHQAKQLLKKFGAIVPNGEACFTVQEVLEKAKKLNLKKYVLKAQIHAGGRGKAGGVKILDNLSDLEKAAKDLLGKKLITHQTGPSGKEVKRLYLEEPSNIKKEFYLSCLIDRASSKIAFISSDQGGMDIEEVAKSNPNKINTVKISFKADIEDEDCKKIIRNFNLDDDANLKCIKIIKSIYKTFVSTDASLIEINPLILTKENNIVCLDA

SEQ ID NO: 163540 - protein, 223 aa, Unknown
  Bacterial polypetide isolated from the Sargasso Sea
MNIHEHQAKQILKKYGAAVPNGVFGFSTDEIIEKAKKLNTEKYVLKAQIHAGGRGKAGGVKILDNIQDLTSASKEMLGKVLITHQTGPAGKEVKRLYVEESSNIKKEFYLSCLVDRVSSKIAFISSDQGGMDIEEVAKSNPKKIITTKVDFFEDIKDVDCKKIIEIFNLDEKASLQGIKLIKSIYKMFVSTDANLVEINPLILTEENILLCLDAKMNFDDNSI

SEQ ID NO: 163541 - protein, 50 aa, Unknown
  Bacterial polypetide isolated from the Sargasso Sea
ESIIEYAEAGIKLIVCITEGIHTLDMLEVKKRIDDLGVRLIGPNCPGVIT

SEQ ID NO: 163542 - protein, 230 aa, Unknown
  Bacterial polypetide isolated from the Sargasso Sea
FQARELAFGLGIEPDLIRRASDTIIGCYKAFSELDATMVEVNPLVISKQKQILALDCKMSFDNNAMFRRSQVSELRDKTQEDSKEIFASDRGLNYVSLDGNIGNIINGAGLAMASMDMIKLAGGAPANFLDVGGGATPEKIVKAFKLVTMDEKVKVILVNIFAGINRCDWVAEGIVDALKKIEIKVPLVIRLAGTNVEKGNKILKESKINYIEANTLEDAANKAVAALNK

SEQ ID NO: 163543 - protein, 223 aa, Unknown
  Bacterial polypetide isolated from the Sargasso Sea
MNIHEHQAKEILKKYGAVVPEGVYALNVNELIQKVKNLNADKYVLKAQIHAGGRGKAGGVKIVDNLALLEEEANKLFGKTLVTHQTGPSGREVKRLYVETASEIEKEFYLSCLVDRASAKIAFISSDQGGMNIEEVAIKSPEKIITTKVDFNESISEEDCSKIIKIFDLDNDASKQAINLIKSIYKMFIDTDANLVEINPLILTKKNKIVCLDAKMTFDENAL

SEQ ID NO: 163544 - protein, 147 aa, Unknown
  Bacterial polypetide isolated from the Sargasso Sea
MNLHEYQGKEIFAKYDLPVSKGKVVTSLDEVEQACTDIGGSRWVAKAQVHAGGRGKSGGVALCDTIEEVANFTKKWLGKRLVTYQTDKEGQLVSCILIEECTNIVDELYYSAVVDRSSREVAIIASSEGGVNIEKVAEETPEKIASI

SEQ ID NO: 163545 - protein, 112 aa, Unknown
  Bacterial polypetide isolated from the Sargasso Sea
IIKLAGGFPANFLDVGGAVNKESVTEAFKIIISDSKVKSILINVFGGIVRCDVVAEGIISAIKDVGIKIPVVVRLKGNNSEIAKTLLEKSKLNVFTELDLSKAAKKAVELSE

SEQ ID NO: 163546 - protein, 164 aa, Unknown
  Bacterial polypetide isolated from the Sargasso Sea
MDIHEYQAKKILSGFGVTIPRGGIAYSPENAENKARELGGSKWVVKAQVHSGARGKAGGIIICNSSLEVAQAADKLLGKKLVTNQTGPEGKITNRVYIEEATDIKKELYLGLVFDRSSESIMVVASTEGGMSVEEISKKKPETIIRSKIEVAVGMQKFQAREIA

SEQ ID NO: 163547 - protein, 219 aa, Unknown
  Bacterial polypetide isolated from the Sargasso Sea
MDIHEYQAKEILSSFGVTIPRGGIVYSPENAENKAREIGGSKWVVKAQIHSGARGKAGGIIVCNSPLEVAQATDKLLGKKLVTNQTGPEGKIVNRIYIEEATDIEKELYLGLVFDRSSESIMVVASTEGGMSVEEIAKEKPETIIRSKIEVAVGIQSFQARELAFGLGIDSDLIARASDTIIGCAKAFSELDATMVEVNPLVISKQKQILALDCKMSFD

SEQ ID NO: 163548 - protein, 188 aa, Unknown
  Bacterial polypetide isolated from the Sargasso Sea
MDIHEYQAKKILSDFGVKIPTGGIVYSPENAENKAREIGGSKWVVKAQVHSGARGKAGGIIICNSPLEVADATDKLLGKKLITNQTGPEGKIINRIYIEEATDIKHELYLGLVFDRSSESIMVVASTEGGMSVEEISKDKPETIIRSKIEVAVGIQQFQAREIAFGLKIESKLISRAANTIIGCYKAF

SEQ ID NO: 163549 - protein, 107 aa, Unknown
  Bacterial polypetide isolated from the Sargasso Sea
MNIHEYQAKELLKKFGAPVPNGVHGETSKDLLNKSKLLKTEKYVLKAQIHSGGRGKAGGIKITNSLEELKQAVDQMLGKTLVTNQTGPKGKKVKKLYVEESSNIDKE

SEQ ID NO: 163550 - protein, 94 aa, Unknown
  Bacterial polypetide isolated from the Sargasso Sea
MNIHEYQAKELLKKFGAPVPNGVHGETSKDLLNKSKLLKTEKYVLKAQIHSGGRGKAGGIKITNSLEELKQAADQMLGKTLVTNQTGPKGKKVK

SEQ ID NO: 163551 - protein, 133 aa, Unknown
  Bacterial polypetide isolated from the Sargasso Sea
MDIHEYQAKKILSGFGVTIPRGGIVYSPENAENKARELGGSRWVVKAQIHSGARGKAGGIIVCNSALEVAQAADKLLGKKLVTNQTGPEGKITNRVYIEEATEIKKELYLGLVFDRSSESIMVVASTEGGMSV

SEQ ID NO: 163552 - protein, 246 aa, Unknown
  Bacterial polypetide isolated from the Sargasso Sea
MNIHEHQAKEILKRYGAKVPEGIFAFNVKDLINKAKFLKTEKFVLKAQIHAGGRGKAGGIKIVDNLSDLERESDLLLGKKLITHQTGQNGKEVKRLYVETSSKIKKEFYLSCVVDRASSKIAFISSAQGGMDIEEIAKNTPEKILTTRLEHKNEISEEDCKKIIDIFELEENAQKEAISLVKSIYKMFLEKDASLVEINPLILTEENNIVCLDAKINFDENALFKHPDILNLRDPSEEDEIETEAS

SEQ ID NO: 163553 - protein, 70 aa, Unknown
  Bacterial polypetide isolated from the Sargasso Sea
MDIHEYQAKKILAGFGVAVPRGGIVYSPENAENKARELGGSKWVVKAQIHSGARGKAGGIIVLYSELEVA

SEQ ID NO: 163554 - protein, 188 aa, Unknown
  Bacterial polypetide isolated from the Sargasso Sea
NPLIQNKSGEILALDAKITFDEDALFRQNLIKELRDLSQENPVEIETAKLGIKYIQLQGNVGCIVNGAGLAMATMDVINVSGLKPANFLDIGGGADENKVSEAMLAVLSDQNVELVLINLFGGILRCDVAARGFLSALDKYNKKAPELIIRMLGTNSDEGKEILSASKYKISFADNLNEISKILLTKR

SEQ ID NO: 163555 - protein, 267 aa, Unknown
  Bacterial polypetide isolated from the Sargasso Sea
LVFDRSSESIMVVASTEGGMSVEEISKEKPETIIRSKIEVAVGIQQFQAREIAFGLGIEPKLISRAANTIIGCYKAFSELDATMVEVNPLVVSQQNEIFALDCKMSFDNNAMFRRDEISELRDKTQENSNEVYASDRGMNYVSLDGNIGNIINGAGLAMASMDMIKLAGGAPANFLDVGGGATPEKIVKAFKLISMDTKVKVILVNIFAGINRCDWVAEGIVQALSKIEIKHPLVIRLAGTNVEKGNEILKKSNINYIEASTLEDAA

SEQ ID NO: 163556 - protein, 252 aa, Unknown
  Bacterial polypetide isolated from the Sargasso Sea
MSILVDRNTRVICQGITGKVGEFHTRGCLEYGTRMVGGVTPGKGGETIADLPVFNTVAEARDATGANATMIFVPPPFAADAILEAVAAEVELVIAVTEGIPVLDMARVLPAFENSKSRLIGPNCPGVITPGQCKIGIMPGYIHTPGNVGVMSRSGTLTYEAVWQLTQLGHGQSTCVGLGGDPLVGSSFINILELFEQDDDTHAILMMGEIGGSAEEEAAAYVKKHVTKPVAAFIAGRTAPPGKRMGHAARYS

SEQ ID NO: 163557 - protein, 150 aa, Unknown
  Bacterial polypetide isolated from the Sargasso Sea
ENEKEVFASDRGLSYVSLDGNIGNIINGAGLAMASMDMIQLAGGQPANFLDVGGGATPDKIVKAFKLITMDEKVEVILVNIFAGINRCDWVAEGIVQALEKIEVKIPLVIRLAGTNVEKGNKILKESKIKYIEANTLEDAANKAVAALKK

SEQ ID NO: 163558 - protein, 165 aa, Unknown
  Bacterial polypetide isolated from the Sargasso Sea
MNIHEHQAKQILKEFGAVVPEGVFAFTVKDLIEKCKKLKTDKYVLKAQIHAGGRGKAGGVKILNNLDELEKSANELLGKKLITHQTGPEGREVKRLYVETSSNIEKEFYLSCLIDRATSKIAFISSNEGGMDIEEVAVKSPDKILTNKIDLTEEISDKECEKIIK

SEQ ID NO: 163559 - protein, 38 aa, Unknown
  Bacterial polypetide isolated from the Sargasso Sea
MNIHEYQAKEILKEFGAPVSNGIVINSIDEIKEKISKL

SEQ ID NO: 163560 - protein, 92 aa, Unknown
  Bacterial polypetide isolated from the Sargasso Sea
PATEAIVMIGEIGGTAEEEAAEFISQNVTKPVVSYIAGVTAPKGKRMGHAGAIISGGKGTADEKFAALEAAGVGTVRSLADIGSALQEITGW

SEQ ID NO: 163561 - protein, 88 aa, Unknown
  Bacterial polypetide isolated from the Sargasso Sea
MDIHEYQAKKILSNFGVTIPRGGIVYSPENAENKAREIGGSRWVVKAQIHSGARGKAGGIIVCNTPLEVAQATDKLLGKKLVTNQTGP

SEQ ID NO: 163562 - protein, 181 aa, Unknown
  Bacterial polypetide isolated from the Sargasso Sea
MNIHEHQAKNILRKYGAKVPDGVYALDVNELLEKAKNLKTDKYVLKAQIHAGGRGKAGGVKIVNDLKSLETEAKSLLGKKLITHQTGPSGRIVKRLYVEVSSNIDKEFYLSCVVDRASSKIAFISSDQGGMDIEEVAMKSPEKILTTKVDLDNEISDENCNKIISIFNLDEETKEQGISLI

SEQ ID NO: 163563 - protein, 164 aa, Unknown
  Bacterial polypetide isolated from the Sargasso Sea
MDIHEYQAKKILSDFGVTIPRGGIAYSPENAENKAREIGGNKWVVKAQIHSGARGKAGGIIVCDTPLAVAQATDKLLGKKLVTNQTGPEGKIVNRIYIEEATEIKKELYLGLVFDRSSESIMVVASTEGGMSVEEIAKQKPETIIRSKIEVAVGMQQFQAREIA

SEQ ID NO: 163564 - protein, 180 aa, Unknown
  Bacterial polypetide isolated from the Sargasso Sea
MDIHEYQAKKILAGFGVTIPRGGIAYSPENAENKARELGGSKWVVKAQVHSGARGKAGGIVVCKTALEVAQASDKLLGKKLVTNQTGPEGKIINRVYIEEATDIKKELYLGLVFDRSSESIMVVASTEGGMSVEEISKEKPETIIRSKIEVAVGMQKFQAREIAFGLGIESKLIARAADT

SEQ ID NO: 163565 - protein, 241 aa, Unknown
  Bacterial polypetide isolated from the Sargasso Sea
MDIHEYQAKQILVSFGVSIPRGGIVYSPETAENKAREIGGLKWVVKAQIHSGARGKAGGIIVCNSPLEVAQATDKLLGKKLVTNQTGPGGKIVNRIYIEEATDIDKELYLGLVFDRSSESIMVVASTEGGMSVEEISKEKPETIIRSKIEVAVGIQSFQARELAFGLGIDPELITRASDTIIGCAKAFSELDATMVEVNPLVISKQKQILALDCKMSFDNNAMFRRNKVSELKIKHKKMIK

SEQ ID NO: 163566 - protein, 81 aa, Unknown
  Bacterial polypetide isolated from the Sargasso Sea
MILKRLCRSVQRATFSRTAMNIHEYQGKQLFRDAGLSVQDGVHCTSIEQALAAYDKLGSKVVAVKSQIHAGGRGKGTLYDP

SEQ ID NO: 163567 - protein, 152 aa, Unknown
  Bacterial polypetide isolated from the Sargasso Sea
MDIHEYQAKKLLADFGVIIPRGGIAYSPENAENKAREIGGSKWVVKAQIHSGARGKAGGIILCNSPLEVAQATDKLLGKKLVTNQTGPQGKIVNRIYVEEATDIKKEFYLGLVFDRSSESIMVVASTEGGMSVEEISKEKPESIIRSKIEVA

SEQ ID NO: 163568 - protein, 199 aa, Unknown
  Bacterial polypetide isolated from the Sargasso Sea
MNIHEYQAKEILKQFGLPVLNGKAYNKNLDTIDSDLIDLKGPPWVVKSQIHAGGRGAGHFKDSFNNKGGVQVIFEKNQVSSIAKSMMGNVLITKQTGEMGKTVNRIFIEEGCDIEREFYLSVLVDRNNSKVMAMISAAGGMDIEEVALTNPEKIINIHFEKHQDISLNKSLQKKLAISNDQFDELNLIINQLLHTFISI

SEQ ID NO: 163569 - protein, 286 aa, Unknown
  Bacterial polypetide isolated from the Sargasso Sea
IGMNIITPQTSDSGKIVRRVYLEKGYEIKNELYICITVDRETGGNTIIYSQKGGVNIEDVSEKNPEEIHNMKISPGSDLLTHHARTIVYNLGLKGTVAKKAQKNILSIYKAFVALDAAMIEVNPFAITKQDDVVIIDCKASFDDNALYRQRAVAEMKDENEYDPLELEAARHDLNYVKLDGNIGLMVNGAGLSMATMDIVKYYGGEAANFMDVAGAATPERVAAAFKLIYKDPDVKGILINIFGGMMRCNDIATGLVNASKEVGLKKPLVVRLEGTNVDMGKENIS

SEQ ID NO: 163570 - protein, 86 aa, Unknown
  Bacterial polypetide isolated from the Sargasso Sea
MIGEIGGTAEEEASEFIKKSKIKKPMVGFVAGLTAPPGRRMGHAGAIISGGKGGAQDKIEVMKSAGITISKSPADIGKTLFEKLKA

SEQ ID NO: 163571 - protein, 113 aa, Unknown
  Bacterial polypetide isolated from the Sargasso Sea
GGDPIPGSHFIDILSLFQEDSSTEAIVMVGEIGGTAEEEAAAYIKSNVTKPVVSYIAGVTAPPGKRMGHAGAIIAGGKGTADEKFAALEDAGVKTVRSLGEIGDALSEMTGWP

SEQ ID NO: 163572 - protein, 222 aa, Unknown
  Bacterial polypetide isolated from the Sargasso Sea
MDIHEYQAKKILSDFGVKIPTGGIVYSPENAENKAREIGGSKWVVKAQVHSGARGKAGGIIVCNSPLEVADATDKLLGKKLITNQTGPEGKIINRIYIEEATDIKHELYLGLVFDRSSESIMVVASTEGGMSVEEISKEKPETIIRSKIEVAVGIQQFQAREIAFGLGIEPKLISRAANTIIGCYKAFSELDATMVEVNPLVVSQQDEIFALDCKMSFDNNA

SEQ ID NO: 163573 - protein, 162 aa, Unknown
  Bacterial polypetide isolated from the Sargasso Sea
MKIHEYQGKEIFRSFNIPVPIGYAVTNLDDVEKVIKKVQNESKKEAVVVKAQIHAGGRGKGGGVKFSSDLSIAMNNAKDIFGMNLITHQTGESGQKVRKILIEEASNISKEFYCAITLDRTLGQFVFMVSTEGGVEIEKVAEEKPEKIIKVWIDPIDGYENF

SEQ ID NO: 163574 - protein, 69 aa, Unknown
  Bacterial polypetide isolated from the Sargasso Sea
MDIHEYQAKKILSNFGVTIPRGGIVYSPENAENKAREIGGSRWVVKAQIHSGARGKAGGIIVCNTPLEV

SEQ ID NO: 163575 - protein, 151 aa, Unknown
  Bacterial polypetide isolated from the Sargasso Sea
MDIHEYQAKEILANFGVGVPPGALAYSPEQAAYRARELGGDTWVVKAQVHAGGRGKAGGVKVCHSDTEIVETCENLFGSKLVTHQTDSNGKGVYRVYVEGGVPIDREIYLGFVLDRSSQRVMIVASAEGGMEIEDISAEKPDSIVRSTVSQ

SEQ ID NO: 163576 - protein, 80 aa, Unknown
  Bacterial polypetide isolated from the Sargasso Sea
MQLHEYQAKEILKENNIPVPDGNIAATSKASEEIAISLGGKCVIKAQVHAGGRGKAGGIKIAKDPKEAFQFADQMVGFVA

SEQ ID NO: 163577 - protein, 214 aa, Unknown
  Bacterial polypetide isolated from the Sargasso Sea
YKAELSDVISKLYKLFVEGDCDLVEVNPLAITDNGVSALDSKVSLDMNAIYRHENFKDFENEIPIPVSEQFAKEKNLNFIKLEGSVGIIGNGAGLVMSTLDVVSEHGGMAANFLDIGGGAKAETVTAALEVLESEDNVKSVLINIFGGITRCDLVANGIVEATKGKELKWPIIVRLDGTNSKEGLSILEQNTNEKITISSSMDEAAKLAVEGAN

SEQ ID NO: 163578 - protein, 193 aa, Unknown
  Bacterial polypetide isolated from the Sargasso Sea
MDIHEYQAKKILSGFGVTIPRGGIVYSPENAENKARELGGSKWVVKAQVHSGARGKAGGIVVCNTVLEVAQAADKLLGKKLITNQTGPEGKIINRVYIEEATEIKKELYLGLVFDRSSESIMVVASTEGGMSVEEISKKKPETIIRSKIEVAVGMQKFQAREIAFGLKIEPKLIARAADTIIGCYRAFSELDA

SEQ ID NO: 163579 - protein, 132 aa, Unknown
  Bacterial polypetide isolated from the Sargasso Sea
DGNIGNIINGAGLAMASMDMIKLAGGSPANFLDVGGGATPEKIVKAFKLVTMDEKVKVILVNIFAGINRCDWVAEGIVEALKKIEVNVPLVIRLAGTNVEKGNQILKESKINYIEANTLEDAANKAVAALKK

SEQ ID NO: 163580 - protein, 152 aa, Unknown
  Bacterial polypetide isolated from the Sargasso Sea
MSILVNKESKVIVQGITGSEGQFHTTQMLEYGTNIVAGVTPGKGGTKVIDDKIDVFNSVEEARKDTKANVSIIFVPPPFAAEAIIEASEAGIEVVVCISEGIPVRDMVVVKKIVNQNKTRLIGPNCPGVITVDECKLGIMPGFICKKGDIGV

SEQ ID NO: 163581 - protein, 38 aa, Unknown
  Bacterial polypetide isolated from the Sargasso Sea
NGTNFIDCLDLFLNDDQTESILMIGEIGGTAEEEAVPP

SEQ ID NO: 163582 - protein, 88 aa, Unknown
  Bacterial polypetide isolated from the Sargasso Sea
ILMIGEIGGTAEEEAAEFVKNHKIKKPMVGFIAGVTAPPGRRMGHAGAIISGGKGGAKDKIKKMEDCGITIASSPSKIGKTLFNKLSN

SEQ ID NO: 163583 - protein, 150 aa, Unknown
  Bacterial polypetide isolated from the Sargasso Sea
MQLHEYQAKEILNCSKVPIPDGKVAKSGIEAKEIASSFGGNCVVKAQVHAGGRGKAGGIKLANNPDEALHHADNMIGSTLKTFQSGDTEFPINEVYIEEASSILKEYYLAVTMDFDFKCPVIIFSSEGGMNIEEVAEKYPDKIIKIHVDP

SEQ ID NO: 163584 - protein, 176 aa, Unknown
  Bacterial polypetide isolated from the Sargasso Sea
MNIHEHQAKQILKQFGAVVPEGVFGFTVEELLEKCKSLKTDKYVLKAQIHAGGRGKAGGVKILNNLNELEKSAKELLGKKLITHQTGPEGREVKRLYVEVSSNIEKEFYLSCLVDRASSKIAFITSDQGGMDIEEVAAKSPNKILTTKVELNEEISDEDCEKIIKIFNLEDSSKKE

SEQ ID NO: 163585 - protein, 198 aa, Unknown
  Bacterial polypetide isolated from the Sargasso Sea
MNIHEHQAKKILKNYGAKVPKGIFAFEVQDLLEKAKTLETDKYVLKAQIHSGGRGKAGGVKLVNNLDELQKEAKNLIGKTLVTHQTGPNGRKVKRLYVEESSKINKEFYLSCLVDRESSKIAFISSDQGGMDIEEVAKNNPKKILTTKVEFRDKISEEDCQKITEVFKLDKSANEEASKLIKSIYKMFIEKDASLVEI

SEQ ID NO: 163586 - protein, 154 aa, Unknown
  Bacterial polypetide isolated from the Sargasso Sea
MNIHEFQAKKLFADYSIPVPEGSVATTPQEAIEISSIHNNNVVVKAQIHAGGRGKAGGVKLFSDSKEIESFSANLLGSNLITAQTGKSGVPVNKLLVEKIYDIHREIYLAIIIDAVTKSIICVASEFGGVNIEEVAESNPDKIFTVVADPILGL

SEQ ID NO: 163587 - protein, 134 aa, Unknown
  Bacterial polypetide isolated from the Sargasso Sea
MNIHEHQAKTILKEFGVPVSNGVVILSLDNIKEEITKLKSKEFVLKAQIHAGGRGKAGGVKLVKNISELEAEAKKMMGKKLVTHQTGPEGKEVKRLYIEEASEISKEYYLSCLIDRETSKIAFISSTEGGMDMR

SEQ ID NO: 163588 - protein, 148 aa, Unknown
  Bacterial polypetide isolated from the Sargasso Sea
QKEVFASDRGLNYVSLDGNIGNIINGAGLAMASMDMIKLAGGSPANFLDVGGGATPEKIVKAFKLVTMDEKVKVILVNIFAGINRCDWVAEGIVEALKKIEVNVPLVIRLAGTNVEKGNQILKESKINYIEANTLEDAANKAVAALNK

SEQ ID NO: 163589 - protein, 232 aa, Unknown
  Bacterial polypetide isolated from the Sargasso Sea
MDIHEYQAKKILSDFGVKIPTGGIVYSPENAENKAREIGGSKWVVKAQVHSGARGKAGGIIICNSPLEVADATDKLLGKKLITNQTGPEGKIINRIYIEEATDIKHELYLGLVFDRSSESIMVVASTEGGMSVEEISKEKPETIIRSKIEVAVGIQQFQAREIAFGLGIESKLISRAANTIIGCYKAFSELDATMVEVNPLVVSHQDEILALDCKMSFDNNAMFRRDEIAEL

SEQ ID NO: 163590 - protein, 192 aa, Unknown
  Bacterial polypetide isolated from the Sargasso Sea
MNIHEHQAKEILKEFGAPVSNGFVILDTNELDKIIQKIKSQKIVIKAQIHAGGRGKAGGVKLVDKLDCKTEIKKMFGKILVTHQTGPEGKVVKRIYLQEAYDIEKEFYLSCLIDRQSSKIAFISSTEGGVDIESVAKKSPEKIITTKIDLKKNLNETDINDIVKIFQLDKNQKEDAIRLVNALYNILIHKDA

SEQ ID NO: 163591 - protein, 106 aa, Unknown
  Bacterial polypetide isolated from the Sargasso Sea
MNIHEHQAKGLLRKFGVPVPDGYPAFSVEEAVNNAKKLPGPVYVVKAQIHAGGRGKAGGVKVVQNIEEVENASEEILGKVLVTPQTGSKGKKVQRLYIEDGCQIDK

SEQ ID NO: 163592 - protein, 213 aa, Unknown
  Bacterial polypetide isolated from the Sargasso Sea
KSLKTEKFVLKAQIHAGGRGKAGGIKIVNTIEELNSAAKEMLGKKLITHQTGPQGREVKRLYVESSSEIEKEFYLSCLVDRASSKIAFISSDQGGMDIEDVAKNNPKKIVTTKINLDDKISDKDCEKIVEIFNLSPDAKKQAINLIKSIYKMFIDIDANLVEINPLILTKENKIICLDAKMSFDDNALFRNPEILNLRDLNEEEEIEIEANKH

SEQ ID NO: 163593 - protein, 147 aa, Unknown
  Bacterial polypetide isolated from the Sargasso Sea
MSIIVNKDSKVLVQGFTGSEGTFHSEQMLEYGTNIVAGVTPGKGGMTHLGIPVFNSVSEAVNKLEINTSIIFVPPMFAADAIMEAVESDIKTIVAITEGIPTADMIKVKAYIRNKGVILIGPNCPGVITPEEAKIGIMPGFIFKKGR

SEQ ID NO: 163594 - protein, 49 aa, Unknown
  Bacterial polypetide isolated from the Sargasso Sea
MDIHEYQAKEILSSFGVTIPRGGIVYSPETAENKAREIGGSKWVVKAQI

SEQ ID NO: 163595 - protein, 98 aa, Unknown
  Bacterial polypetide isolated from the Sargasso Sea
MNIHEHQAKELLNKFGVPVPEGFPAFSVNEAVNCAKNLPGPVYVVKAQIHAGGRGKAGGVKVVNSIDQVKTSAEEILGKILVTPQTGEKGKKVQRLYI

SEQ ID NO: 163596 - protein, 182 aa, Unknown
  Bacterial polypetide isolated from the Sargasso Sea
MNIHEHQAKQILKKYGAVVPEGVFALNVGELIQKAKALKTEKYVLKAQIHAGGRGKAGGVKILNSIEELTVAAKELLGKTLVTHQTGPDGREVKRLYVEESSNIDKEFYLSCLVDRASSKIAFISSDQGGMDIEEVASSSPEKIITTKVDMSDEISESDCEKIINIFNLNEDAKKQAITLIK

SEQ ID NO: 163597 - protein, 247 aa, Unknown
  Bacterial polypetide isolated from the Sargasso Sea
MNIHEHQAKKILKKYGIIVPEGVFSYSVEELLQKAKSLKTEKFVLKAQIHAGGRGKAGGIKILNTIDELNLAAKEMLGKKLITHQTGPKGREVKRLYVESSIEIEKEFYLSCLVDRASSKIAFISSDQGGMDIEDVAKNSPKKILTTKVNLDDKISDFDCEKIVEIFNLSQEVKKHAINLVKSIYKMFIDIDANLVEINPLILTKENKIICLDAKMSFDDNALFRNPDILNLRDLNEEEETEIEASK

SEQ ID NO: 163598 - protein, 68 aa, Unknown
  Bacterial polypetide isolated from the Sargasso Sea
MNLHEYQAKEILSGFGVRIQRGYVASTPENAVAFANKLNEKTGSDFFVIKAQVHAGGRGKGGGVKLAK

SEQ ID NO: 163599 - protein, 144 aa, Unknown
  Bacterial polypetide isolated from the Sargasso Sea
MDIHEYQAKKILSNFGVTIPRGGIVYSPENAENKAREIGGSRWVVKAQIHSGARGKAGGIIVCNTPLEVAQATDKLLGKKLVTNQTGPEGKIVNRIYIEEATDIEKELYLGLVFDRSSESIMVVASTEGGMSVEEFQKKTQNNY

SEQ ID NO: 163600 - protein, 128 aa, Unknown
  Bacterial polypetide isolated from the Sargasso Sea
GNIINGAGLAMASMDMIKLAGGSPANFLDVGGGATPEKIVKAFKLVTMDEKVKVILVNIFAGINRCDWVAEGIVEALKKIEVNVPLVIRLAGTNVEKGNKILKESKINYIEANTLEDAANKAVAALKG

SEQ ID NO: 163601 - protein, 70 aa, Unknown
  Bacterial polypetide isolated from the Sargasso Sea
GDPIHGTNFIDCLDLFLNDEKTESIVMIGEIGGTAEEEAAEFIKNHKIKKPMVGFVAGITAPPGRRMGHA

SEQ ID NO: 163602 - protein, 99 aa, Unknown
  Bacterial polypetide isolated from the Sargasso Sea
MNIHEHQAKELLKEFKIPVPKGNVIFSLNEIDKKIKNLNTNNLVVKAQIHAGGRGKAGGIKLVKNKDDLLKETSAMFGKTLVTHQTGKKGKKVKRIYMK

SEQ ID NO: 163603 - protein, 204 aa, Unknown
  Bacterial polypetide isolated from the Sargasso Sea
MNIHEHQAKQLLKKFGAIVPNGEACFTVQEVLENAKKLNLKKYVLKAQIHAGGRGKAGGVKILDNLSDLEKAAKDLLGKKLITHQTGPIGKEVKRLYLEEPSNIKKEFYLSCLIDRASSKIAFISSDQGGMDIEEVAKSDPNKINTVKISFKEDIEDEDCKKIIHNFNLDDDANLKCIKIIKSIYKTFVSTDASLIEINPLILT

SEQ ID NO: 163604 - protein, 274 aa, Unknown
  Bacterial polypetide isolated from the Sargasso Sea
GKAGGIKVAKNHQELEEHIDAILGMDIKGHKVESLLIEEASEIISEYYISFTLERSEKKYLMMLSSKGGMDIEEVAANSPEDLIKIYISPSLGLESKIITQAIKDANLNLDYIDELHEIISKLYKLFTEGDCDLVEVNPLAITNQGVSALDSKVSLDMNAIYRHDDFKKYEEEIPIPESEKFAKSKGLNFIKLDGSVGIIGNGAGLVMSTLDVVAEHGGKAANFCDIGGGAKAETVTAALEVLESEEEVTSVLINIFGGITRCDLVAEGIVEAT

SEQ ID NO: 163605 - protein, 112 aa, Unknown
  Bacterial polypetide isolated from the Sargasso Sea
MNIHEYQAKKILKEFGLTVPAGIIIFSENEIKEKIKKFNKKNFVLKAQIHSGGRGKAGGIKLVNNIHVLFKEIKNMLGKKLITNQTGPKGKTVKRVYVEEATEIDKEIYLSW

SEQ ID NO: 163606 - protein, 234 aa, Unknown
  Bacterial polypetide isolated from the Sargasso Sea
MNIHEHQAKQILKQFGVVVPEGVFGFTVKELIEKCKSLKTDKYVLKAQIHAGGRGKAGGVKILDNLDELEKSAKDLLGKKLVTHQTGSAGREVKRLYVEVSSNIEKEFYLSCLVDRASSKIAFISSDQGGMDIEKVATESPNKIITTKVELLDEISVEECEKIIKIFNLEDGTKGEAISLIKSIYKMFIKTDANMVEINPLILTKEKKIICLDAKVNFDSNALFRHPEILELRD

SEQ ID NO: 163607 - protein, 126 aa, Unknown
  Bacterial polypetide isolated from the Sargasso Sea
IHEHQAKEILKKYGAVVPEGVYAFNVNELIEKVKNLKADKYVLKAQIHAGGRGKAGGVKIVDNLTLLEEEANKLFGKTLVTHQTGPSGSEVKRLYVETASEIEKEFYLSCLVDRASAKIAFISSDQ

SEQ ID NO: 163608 - protein, 91 aa, Unknown
  Bacterial polypetide isolated from the Sargasso Sea
MDIHEYQAKQLLSKFGVVVPPGEVVYQTHEAENIVSWLNEEKIIVKAQVHAGGRGKAGGVKLCKNNEEVVETVDKMIGMKIVTPQTSEEGK

SEQ ID NO: 163609 - protein, 149 aa, Unknown
  Bacterial polypetide isolated from the Sargasso Sea
MNLHEYQGKELFAKFGLPVSRNAVITSPDDILSACRDIGGDKWVVKAQAHAGGRGKAGGVKLVDTPEEAIDFAKHWLGNRLVTYQTDSNGQLVSSILVEECTDIAKELYLSAVIDRGTQRIVFIGSSEGGVNIEEVAEKTPEKIIYEPH

SEQ ID NO: 163610 - protein, 121 aa, Unknown
  Bacterial polypetide isolated from the Sargasso Sea
MNIHEHQAKQILKKYGAVIPDGVFAHSVEELVEKAKTLKSKKLVLKAQIHAGGRGKAGGVKILNSIDELHIAAQEMLGKKLITHQTGPEGKEVKRLYVESSSNIDKEFYLSCLVDRTSSKI

SEQ ID NO: 163611 - protein, 90 aa, Unknown
  Bacterial polypetide isolated from the Sargasso Sea
MDIHEYQAKKILSNFGVTIPRGGIVYSPENAENKAREIGGSRWVVKAQIHSGARGKAGGIIVCNTPLEVAQATDKLLGKKLVTNQTGPEG

SEQ ID NO: 163612 - protein, 184 aa, Unknown
  Bacterial polypetide isolated from the Sargasso Sea
DDHVLALDCKMSFDDNALFRNPQLSELRDKSQEDPKETYAADRGLNYIPLDGDIGNIINGAGLAMASMDMIQLAGGQPANFLDVGGGATPEKFVKAFKLISGDPNVKVILINIFAGINRCDWVAQGIVDALAQIKIEQPLVIRLAGTNVDEGIKILKDSKIDYIEAFTLEDAANKAVKALKELG

SEQ ID NO: 163613 - protein, 187 aa, Unknown
  Bacterial polypetide isolated from the Sargasso Sea
MDIHEYQAKKILSNFGVTIPRGGIVYSPENAENKAREIGGSRWVVKAQIHSGARGKAGGIIVCNTPLEVAQATDKLLGKKLVTNQTGPEGKIVNRIYIEEATDIEKELYLGLVFDRSSESIMVVASTEGGMSVEEISKEKPETIIRSKIEVAVGMQNFQARELAFGLGIEPDLIRRASDTIIGCYKA

SEQ ID NO: 163614 - protein, 154 aa, Unknown
  Bacterial polypetide isolated from the Sargasso Sea
MNIHEYQGKQVLAEYGVAVPRGHVAFTVDEAVKAAEELGGDVFVVKSQIHAGGRGAGRFKDKPDGNGGVRVVKTVDEVRENAAEMLNHVLVTKQTGPDGKEVKRLYIEEGCDIARELYMGMLLDRQSSRLLIMASTEGGMEIEEVAEATPEKIL

SEQ ID NO: 163615 - protein, 167 aa, Unknown
  Bacterial polypetide isolated from the Sargasso Sea
VKILNSIEELTVAAKELLGKTLVTHQTGPEGREVKRLYVEESSNIDKEFYLSCLVDRASSKIVFISSDQGGMDIEEVASSSAEKIITTKVDMGDEISDSDCEKIINIFNLNEDAKKQAITLIKSIYTMFVGTDANMVEVNPLILTKEEKIVCLDAKVNFDSNALFRH

SEQ ID NO: 163616 - protein, 248 aa, Unknown
  Bacterial polypetide isolated from the Sargasso Sea
KPETIIRSKIEVAVGMQNFQARELAFGLGIEPDLIRRASDTIIGCYKAFSELDATMVEVNPLVISKQKQILALDCKMSFDNNAMFRRSQVSELRDKTQEDSKEIFASDRGLNYVSLDGNIGNIINGAGLAMASMDMIKLAGGAPANFLDVGGGATPEKIVKAFKLVTMDEKVKVILVNIFAGINRCDWVAEGIVDALKKIEIKVPLVIRLAGTNVEKGNKILKESKINYIEANTLEDAANKAVAALNK

SEQ ID NO: 163617 - protein, 183 aa, Unknown
  Bacterial polypetide isolated from the Sargasso Sea
MNIHEHQAKKILKNYGAKVPNGIFASDVSDLLEKAKTLDTEKYVLKAQIHSGGRGKAGGIKLVNNLEELEKEAKNLIGKILVTHQTGPNGRKVQRLYVEESSLINKEFYLSCLVDRESSKIAFISSDQGGMDIEEVAKNNPEKILTTKVEFKDQISDEDCKQIIEIFNLDQEAYEEAQKLIKS

SEQ ID NO: 163618 - protein, 263 aa, Unknown
  Bacterial polypetide isolated from the Sargasso Sea
MNIHEHQAKKILKSYGAKVPNGIFASNVKDLLEKAKTLETEKFVLKAQIHSGGRGKAGGIKLVNNLEELEKEAKNLIGKTLVTHQTGPNGRKVQRLYVEEASSINKEFYLSCLVDRESSKIAFISSDQGGMDIEEVAKNNPEKILTTKVEFKDQISNEDCKKIIEIFDLDQEAYEEAQKLIKSIYKMYIEKDASLVEINPLILTKDNKIVCLDAKMKFDDNALFKHPEIIDLRDLNEEEETEIEASKYDLAYIKLDGKIGCMV

SEQ ID NO: 163619 - protein, 171 aa, Unknown
  Bacterial polypetide isolated from the Sargasso Sea
MNIHEHQAKQILKKYGATVPNGIYGFSVDDIVEKAKKLKTRKYVLKAQIHAGGRGKAGGVKILDNIEDLAKASKEMLGKVLITHQTGPAGKEVKRLYVEESSNIKKELYLSCLVDRASSKIAFISSDQGGMDIEEVAKSNPEKIITTKIDLLDDIKDEDCKKIIKIFNLDQ

SEQ ID NO: 163620 - protein, 252 aa, Unknown
  Bacterial polypetide isolated from the Sargasso Sea
MDIHEYQAKEILSSFGVTIPRGGIVYSPETAENKAREIGGSKWVVKAQIHSGARGKAGGIILCNSPLEVAQATDKLLGKKLITNQTGPEGKIVNRIYIEEATDIEKELYLGLVFDRSSESIMVVASTEGGMSVEEIANDKPETIIRSKIEVAVGIQNFQARELAFGLGIDSELIRRASDTIIGCAKAFHELDATMVEVNPLVISKQKQILALDCKMSFDNNAMFRRDKVSELRDKTQEDEKEVYASDRGLIM

SEQ ID NO: 163621 - protein, 278 aa, Unknown
  Bacterial polypetide isolated from the Sargasso Sea
YISFTLDRSEKNYLIMLSSKGGMDIEKVAEDNPDDLIKYHIGASEELTEDIIHEIIGKAKLNQEYTKSITDIIQNLFLMFVKGDCDLVEVNPLAITDAGVMALDSKVALDMNAKFKHSYFEDFEKEIPIPESEKNAKEKGLNFIKLDGSVGIIGNGAGLVMSTLDVVAENGGNAANFLDIGGGAKAETVSAALEVLEADKNVKSVLINIFGGITRCDLVAEGIVEATKGKDLVWPIVIRLDGTNSSEGLEILKNNPNEKIFIEESMDSAARLAVERGA

SEQ ID NO: 163622 - protein, 368 aa, Unknown
  Bacterial polypetide isolated from the Sargasso Sea
MRLLEYQAKELFKEFGIRTPPSISSKDIEKGRKDAKELGYPFVIKVQVPVGGRGKAGGIQKCSSDDEFELKYPQLLNMSIKGEKTRAILLEKMADIEKELYLSLFLNRSKRCYTIIASSEGGVEIESVKNQTIREVGLGDVDAQTAKEVANEIGLKDSQEEQFVEMLQKLSKLTIEKEAELAEINPLAILKDGTLMALDGKVMTDDNSNFRHDELQQYQEKSALEEQAEKSGFSLVELDGNIAVIGNGAGLVMSTFDLVTDNGGKPATFLDVGGGATTESVYEALTLISKMSRVKGILVNLYGGIVKTTTVAEAFIQAYNNNLIDLPVFARLMGTESDKAKEMLKDTKTKMFDSIEEAINGVVMETNK

SEQ ID NO: 163623 - protein, 217 aa, Unknown
  Bacterial polypetide isolated from the Sargasso Sea
MNLHEYQSRDLLSKYNIKFPEGNLGTDPDEIYEISKKIQGQVVVKAQIHSGGRGKAGGVKLCNSPEEAKTFAKGILGKKIVTEQTDSEGVIVEKLLVTELTNIKKELYLSIIIDPDVEGPSLIISSEGGTDIEKTAENNPEKIKKINFDPIVGLKPYQIRQIASELDIPKSSTISFYNLLNNLQTAFSDIDSTLIEINPLVIDDNDNLIPLDCKNKY

SEQ ID NO: 163624 - protein, 99 aa, Unknown
  Bacterial polypetide isolated from the Sargasso Sea
MNLHEYQAKQLFREYGIAVSDGIAASSAEQAEKAALSLGVSKWVVKAQVHAGGRGKAGGVEVVHKIEKVREFADKWLGTNLVTFQTDADGQPVNQILVE

SEQ ID NO: 163625 - protein, 109 aa, Unknown
  Bacterial polypetide isolated from the Sargasso Sea
INGTNFIDCLDLFLKDEKTKSILMIGEIGGTAEEEAAEFAKNHTIKKPIVGFIAGLAAPSGRRMGHAGAIISGGKGGAKEKIKKMEECGITVAKSPSEIGKTLFNKLSN

SEQ ID NO: 163626 - protein, 170 aa, Unknown
  Bacterial polypetide isolated from the Sargasso Sea
MSILVNKDTRLIVQGFTGSQGTLHSEQSIEYGTNIVGGVTPGKGGKIHLNKPVYNSVEEAVKEVSPNASIIFVPAKFCKASILEAAEAGIKLIICITEGVPTLDMLEVKKKVDELGVRLIGPNCPGVITPGEAKLGIMPGSIHLPGSIGIISRSGNVTYEAVKQTTDLGF

SEQ ID NO: 163627 - protein, 149 aa, Unknown
  Bacterial polypetide isolated from the Sargasso Sea
MNIHEHQAKKILKKYGATVPDGVFSFDVKDLIEKAKILKTDKYVLKAQIHAGGRGKAGGVKIVENIQNLEAEARKLLGKTLITHQTGPSGREVKRLYVEASSQISKEFYLSCLVDRASSKIAFISSDQGGMDIEEVANKTPEKIITTKV

SEQ ID NO: 163628 - protein, 103 aa, Unknown
  Bacterial polypetide isolated from the Sargasso Sea
MDVGGGATKEKVSKAFQIILSDENVEGILVNIFGGIMRCDIIAEGIIAAAKEVSLNVPLVVRLEGTNVDMGKNILEQSGLPIISAEDLDDAANKIVLATTEVS

SEQ ID NO: 163629 - protein, 279 aa, Unknown
  Bacterial polypetide isolated from the Sargasso Sea
YLGLVFDRSSESIMVVASTEGGMSVEEISKEKPETIIRSKIEVAVGMQNFQARELAFGLGIEPDLIRRASDTIIGCYKAFSELDATMVEVNPLVISKQKQILALDCKMSFDNNAMFRRSQVSELRDKTQEDSKEIFASDRGLNYVSLDGNIGNIINGAGLAMASMDMIKLAGGAPANFLDVGGGATPEKIVKAFKLVTMDEKVKVILVNIFAGINRCDWVAEGIVDALKKIEIKVPLVIRLAGTNVEKGNKILKESKINYIEANTLEDAANKAVAALNK

SEQ ID NO: 163630 - protein, 88 aa, Unknown
  Bacterial polypetide isolated from the Sargasso Sea
MDIHEYQAKKILSNFGVTIPRGGIVYSPENAENKAREIGGSRWVVKAQIHSGARGKAGGIIVCNTPLEVAQATDKLLGKKLVTNQTGQ

SEQ ID NO: 163631 - protein, 193 aa, Unknown
  Bacterial polypetide isolated from the Sargasso Sea
MNIHEHQAKQILKKYGATVPEGVFSFDVKELIEKAKFLKTDKYVLKAQIHAGGRGKAGGVKIVDTLKKLEQEAIQLLGKTLITNQTGHNGRKVKRLYVEASSEISKEFYLSCLIDRASSKIAFISSDQGGMDIEEVALKTPDKIITTKVDLYDEISDEDCKDIIKIFNLNESDNNQAVNLIKSIYKKFVETRC

SEQ ID NO: 163632 - protein, 368 aa, Unknown
  Bacterial polypetide isolated from the Sargasso Sea
MRLLEYQAKELFKEFGIRTPPSISSKDIEKGRKDAKELGYPFVIKVQVPVGGRGKAGGIQKCNSDDEFELKYPQLLNMSIKGEKTRAILLEKMADIEKELYLSLFLNRSKRCYTIIASSEGGVEIESVKNQTIREVGLGDVDAQTAKEVANEIGLKDSQEEQFVEMLQKLSKLTIEKEAELAEINPLAILKDGTLMALDGKVMTDDNSNFRHEELQKYQEKSALEEQAEKSGFSLVELDGNIAVIGNGAGLVMSTFDLVTDNGGKPATFLDVGGGATTESVYEALTLISKMSRVKGILVNLYGGIVKTTTVAEAFIQAYNNNLIDLPVFARLMGTESDKAKEMLKDTKTKMFDSIEEAINGVVMEANK

SEQ ID NO: 163633 - protein, 204 aa, Unknown
  Bacterial polypetide isolated from the Sargasso Sea
MNLHEYQAKELLSLNGVPTQRGKMVNNIKDVDTAANQLKNDTSTDFFVVKAQIHAGGRGKGGGVKVAKNLTELKDYSSSILGMMLKTPQTPKEGKLVKKILIAEDVYYPGPSEHSEFYVSVLLNRSTSKLMIMYSTEGGVDIESVAENTPHLIFYEEVDPSVGLMPNQARKVAFNLGLSGDSYKNMVRFISSLYTAYVKCDASL

SEQ ID NO: 163634 - protein, 169 aa, Unknown
  Bacterial polypetide isolated from the Sargasso Sea
MDIHEYQAKKILSDFGVTIPRGGIAYSPENAENKAREIGGNKWVVKAQIHSGARGKAGGIIVCDTPLAVAQATDKLLGKKLITNQTGPEGKIVNRIYIEEATEIKKELYLGLVFDRSSESIMVVASTEGGMSVEEIAKQKPETIIRSKIEVAVGMQQFQAREIAFWFRY

SEQ ID NO: 163635 - protein, 195 aa, Unknown
  Bacterial polypetide isolated from the Sargasso Sea
MNIHEHQAKQILKKYGAVVPDGVFSHSVEELVEKAKSLKTEKLVLKAQIHAGGRGKAGGIKIVNTIEELNSAANEMLGKNLITNQTGPQGREVKSLYVESSSNIDKEFYLSCLVDRASSKIAFISSDQGGMDIEEVAKNNPKKIITTNVNLEEKISDEDCEKIVEIFNLDFDTKKKAINLVKSIYKMFIDIDANL

SEQ ID NO: 163636 - protein, 148 aa, Unknown
  Bacterial polypetide isolated from the Sargasso Sea
TYAADRGLNYIPLDGDIGNIINGAGLAMASMDMIQLAGGQPANFLDVGGGATPEKFVKAFKLISGDPKVKVILINIFAGINRCDWVAQGIVDALNQINISQPLVIRLAGTNVDEGIKILKDSKIKYIEAYTLEDAANKAVKALKELEE

SEQ ID NO: 163637 - protein, 42 aa, Unknown
  Bacterial polypetide isolated from the Sargasso Sea
MNIHEYQAKEILTKYGVETPKGGNAYSPENAKDMATELGGDM

SEQ ID NO: 163638 - protein, 90 aa, Unknown
  Bacterial polypetide isolated from the Sargasso Sea
MNLHEYQAKQLFREYKISVSEGLAAETSEEAVSIAKSLDVDKWVVKAQVHAGGRGKAGGVEVVDSVDQVKDFAEKWLGQNLVTFQTERKA

SEQ ID NO: 163639 - protein, 144 aa, Unknown
  Bacterial polypetide isolated from the Sargasso Sea
MNLHEYQAKSLFKSYSLPVSKSELIFSIDDIEQATTNLKAKEYVVKAQVHAGGRGKAGGVLLTKSPEEIREFCKKWLGKNLVTYQTDAKGQPVSCILLEECTDIEKELYLGLVIDRTTRSIALIASPEGGVDIETVATNSPEKI

SEQ ID NO: 163640 - protein, 110 aa, Unknown
  Bacterial polypetide isolated from the Sargasso Sea
QPANFLDVGGGATPEKFVKAFKLISGDPKVKVILINIFAGINRCDWVAQGIVDALNQITIDQPLVIRLAGTNVNEGMKILKDSKIDYIEASTLEEAANKAVAALKDMENK

SEQ ID NO: 163641 - protein, 197 aa, Unknown
  Bacterial polypetide isolated from the Sargasso Sea
VRCNNGRGKSYVISNQDQILALDCKMSFDNNALFRRNQVSELRDKTQENANEVYASDRGLNYVNLEGNIGNIINGAGLAMASMDMIKLAGGEPANFLDIGGGATPEKIVKAFKLISMDKKVKVILINIFAGINRCDWVAEGIVQALQKIDIKVPLVIRLAGTNVDKGNQILKESKINYIEANTLEEAANKAVKALES

SEQ ID NO: 163642 - protein, 226 aa, Unknown
  Bacterial polypetide isolated from the Sargasso Sea
MNIHEHQAKQILKKYGAVVPEGVFALNVDDLLDKVKSLKTEKYVLKAQIHAGGRGKAGGVKILNTIEELELAAKELFGKILITHQTGPEGREVKRLYVEESSNIEKEFYLSCLVDRASSKIAFISSDQGGMDIEEVASKTPEKIITTKVAINDEISNNDCEKIIKIFNLNNDAKNQAITLIKSIYKMFISTDANMVEVNPLILTKEEKIVCLDAKVNFDSNALVRH

SEQ ID NO: 163643 - protein, 214 aa, Unknown
  Bacterial polypetide isolated from the Sargasso Sea
MDIHEYQAKKILSGFGVTIPRGGIAYSPENAENKARELGGSKWVVKAQVHSGARGKAGGIIICNSSLEVAQAADKLLGKKLITNQTGPEGKITNRVYIEEATDIKKELYLGLVFDRSSESIMVVASTEGGMSVEEISKKKPETIIRSKIEVAVGMQKFQAREIAFGLKIEPNLIARAADTIIGCYRAFSELDATMVEVNPLRNIKSRSNISFRL

SEQ ID NO: 163644 - protein, 196 aa, Unknown
  Bacterial polypetide isolated from the Sargasso Sea
MDIHEYQAKKILSGFGVTIPRGGIAYSPENAENKARELGGSKWVVKAQVHSGARGKAGGIIICNSPLEVAQAADKLLGKKLVTNQTGPEGKITNRVYIEEATEIKKELYLGLVFDRSSESIMVVASTEGGMSVEEISKNKPETIIRSKIEVAVGMQKFQAREIAFGLGIEAKLIARAADTIIGCYRAFSELDATMV

SEQ ID NO: 163645 - protein, 280 aa, Unknown
  Bacterial polypetide isolated from the Sargasso Sea
MDIHEYQAKKILSDFGVKIPTGGIVYSPENAENKAREIGGSKWVVKAQVHSGARGKAGGIIICNSPLEVADATDKLLGKKLITNQTGPEGKIINRIYIEEATDIKHELYLGLVFDRSSESIMVVASTEGGMSVEEISKEKPETIIRSKIEVAVGIQQFQAREIAFGLGIESKLISRAANTIIGCYKAFSELDATMVEVNPLVVSHQDEILALDCKMSFDNNAMFRRDEIAELRDKTQENSNEVYASDRGMNYVSLDGNIGNIINGAGLAMASMDMIKLAG

SEQ ID NO: 163646 - protein, 176 aa, Unknown
  Bacterial polypetide isolated from the Sargasso Sea
MNIHEHQAKEILKKYGAVVPEGFYALNVNELIEKVKNLRAKKYVLKAQIHAGGRGKAGGVIVVDNIALLEEEANKLFGKTLVTHQTGPSGREVKRLYVETASDIEKEFYLSCLVDRASAKIAFISSDQGGMNIEEVAIKSPEKIITTKVDFNESISEEDCGKIIKIFDLDNDASKQ

SEQ ID NO: 163647 - protein, 126 aa, Unknown
  Bacterial polypetide isolated from the Sargasso Sea
MQLHEYQAKEILNNSEVPIPDGKVAKSGKEAQEIAFSLGGNCVVKAQVHAGGRGKAGGIKLANNPHEASEHADNMIGSSLKTFQSGDTEFPINEVYIEKASSILKEYYLAVTMDFDFKCPVIIFST

SEQ ID NO: 163648 - protein, 204 aa, Unknown
  Bacterial polypetide isolated from the Sargasso Sea
MDIHEYQAKKILSDFGVNIPRGGIAYSPENAENKAREIGGNKWVVKAQIHSGARGKAGGIILCETPLAVAQATDKLLGKKLVTNQTGPEGKIVNRIYIEEATAIKKELYLGLVFDRSSESIMVVASTEGGMSVEEIAKQKPETIIRSKIEVAVGMQQFQAREIAFGLGIEPQLIRRAAETITGCYRAFSELDATMVEVNPLVIS

SEQ ID NO: 163649 - protein, 114 aa, Unknown
  Bacterial polypetide isolated from the Sargasso Sea
MGGDPINGTNFIDCLDLFLNDEETKSILMIGEIGGTAEEEAAEFVKNHSIKKPIVGFIAGLAAPPGRRMGHAGAIISGGKGGAEEKIKKMEECGITVAKSPSEIGKTLFNKLSN

SEQ ID NO: 163650 - protein, 247 aa, Unknown
  Bacterial polypetide isolated from the Sargasso Sea
MNIHEHQAKEILKKYGAIVPEGVYALNVNELIEKVKNLKADKYVLKAQIHAGGRGKAGGVKIVDNITLLEDEANKLFGKTLVTHQTGPSGREVKRLYVETVSEIEKEFYLSCLIDRASAKIAFISSDQGGMNIEEVAIKSPEKIITTKVDFNESISEGDCSKIIKIFDLDNNASKQAINLIKSIYKMFIDTDANLVEINPLILTKKNKIVCLDAKMTFDDNALFKHPEIQKLRDFNEEEETEMKQAN

SEQ ID NO: 163651 - protein, 134 aa, Unknown
  Bacterial polypetide isolated from the Sargasso Sea
MDIHEYQAKKLLADFGVIIPRGGIAYSPENAENKAREIGGSKWVVKAQIHSGARGKAGGIILCNSPLEVAQATDKLLGKKLVTNQTGPQGKIVNRIYVEEATDIKKEFYLGLVFDRSSESIMVVASTEGGMSVK

SEQ ID NO: 163652 - protein, 149 aa, Unknown
  Bacterial polypetide isolated from the Sargasso Sea
MNIHEHQAKQILKKYGAIVPEGVFSHSVEELLQKARSLKTDKFVLKAQIHAGGRGKAGGIKILNTIEELNSAAKEMLGKKLITHQTGPQGREVKRLYVESSSEIEKEFYLSCLVDRASSKIAFISSDQGGMDIEDVAKNKPKKNCNYKN

SEQ ID NO: 163653 - protein, 145 aa, Unknown
  Bacterial polypetide isolated from the Sargasso Sea
MNLHEYQGKEIFAKYDLPVSKGKVITSLDEVEQACTDIGGSRWVAKAQVHAGGRGKSGGVALCDTIEEVADFTKKWLGKRLVTYQTDKEGQLVSCILVEECTNIADELYYSAVVDRSSREVAIIASSEGGVNIEKVAEETPEKIA

SEQ ID NO: 163654 - protein, 238 aa, Unknown
  Bacterial polypetide isolated from the Sargasso Sea
MDIHEYQAKKILSGFGVTIPRGGIAYSPENAENKARELGGSKWVVKAQVHSGARGKAGGIIICNSSLEVAQAADKLLGKKLVTNQTGPEGKITNRVYIEEATDIKKELYLGLVFDRSSESIMVVASTEGGMSVEEISKKKPKTIIRSKIEVAVGMQKFQAREIAFGLKIEPNLIARAADTIIGCYRAFSELDATMVEVNPLVISNQDQILALDCKMSFDNNALFRRNQVSELRDKTQE

SEQ ID NO: 163655 - protein, 150 aa, Unknown
  Bacterial polypetide isolated from the Sargasso Sea
MNIHEHQAKQLLKKFGAIVPNGEACFTVQEVLENAKKLNLKKYVLKAQIHAGGRGKAGGVKILDNLSDLEKAAKDLLGKKLITHQTGPIGKEVKRLYLEEPSNIKKEFYLSCLIDRASSKIAFISSDQGGMDIEEVAKSDPNKINTVKIS

SEQ ID NO: 163656 - protein, 321 aa, Unknown
  Bacterial polypetide isolated from the Sargasso Sea
GGSSSNNPDELIELGNQIYGMDIKGHKVEVLLIEEASEILEEYYLSFTLDRSAKKYLMMLSAKGGMDIEQVAKDNPKDLVKLHISPSEGLDKKDLDKSIIEANLNQKYKNELSEIISKLYELFEEGDCDLVEVNPLAITNEGVMALDSKVALDMNAKFKHENFQILEDEIPIPEEEKFAKEKGLNFIKLEGFVGIIGNGAGLVMSTLDVVAEHGGSASNFLDIGGGAKSETVSAALEVLETDPNVKSVLINIFGGITRCDLVADGIVEATSGKKLKWPIIIRLDGTNSKEGLEILKNNPNDNIFISENMDEAAKLAVESGV

SEQ ID NO: 163657 - protein, 74 aa, Unknown
  Bacterial polypetide isolated from the Sargasso Sea
RIASYGSDNDMRLTGLHETQSIEKFSYGVSDRGASIRIPVATVENDWNGYLEDRRPASNADPYKILSHIVGTLT

SEQ ID NO: 163658 - protein, 313 aa, Unknown
  Bacterial polypetide isolated from the Sargasso Sea
MNTFEYIWLDGYQPEPMMRSKVKATEDDTPPDWSFDGSSTQQAEGGSSDCLLLPVQTYANPNGHDLVMTQVQAADHSVHPSNTRAAAAEVTTDEWWFGFEQEFFFTDPQTGEPLGWEDGTPREQGEYYCGVGAGNVVGREISDAHLEACLDLGITLTGTNAEVALGQWEYQCFGKGIKAADDLWVSRYLLYKIAEEYGVGVNIHPKPKTGDWNGSGMHCNFSNEAMRTAGSEELFSSMCDKLGEVHEEGIASYGSDNDMRLTGLHETQSIDKFSYGVSDRGASIRIPVYTVEHDWNGYLEDRDQHQTLILYRY

SEQ ID NO: 163659 - protein, 289 aa, Unknown
  Bacterial polypetide isolated from the Sargasso Sea
ADMQEDGAGFAGFASWLDMTPAHPDMLAVPDPESVIQLPWKRDVAWLAADCFIDADPVKQAPRNVLKSLISKTLESNLRVKTGIEAEFFLLLPDGSDISDPYDNAVKPCYDQQALMRRYDVIAEICDYMLELGWGPYQNDHEDANGQFEMNFEFDDVLKTADKHSFFKFMVKSIAEKHGLRATFMPKPVEHLTGNGCHAHISVWDLTGQNNVFADDSEELGLSKKGLNFLGGIINHATSMTAITNPTVNSYKRINAPRTLSGASWAPNTVTWTSNNRTHMVRVPGARKI

SEQ ID NO: 163660 - protein, 228 aa, Unknown
  Bacterial polypetide isolated from the Sargasso Sea
MSKSKLEYIWLDGYKPTQSLRSKTKIVSDFDGKLSSCPMWSFDGSSTLQAPGGSSDCLLKPVAIYPDPERKNGFLVMTEVLNADGTAHESNGRSTIDDSDNDFWFGFEQEYFLIDTETNLPLGFPKDQTPQGQFYCSVGGANTFGREIMDRHLDVCLEAGINVEGTNAEVAAGQWEFQTFAKGAQQAGDEMWVARYLLERIAEDYAIKIEYHPKPLGNTDWNGSGMHA

SEQ ID NO: 163661 - protein, 293 aa, Unknown
  Bacterial polypetide isolated from the Sargasso Sea
MDTSDPSIFFDNDGISNHYHDFQNNVLPKWNHGIGREKELKDFIDKIKLDAGDNEFNCILGLSGGVDSSYMLHHCVKNLGLNPLVFHVDAGWNSELANKNIQSLVSKLNINLYTEVVNWKDVQDLQHCFFKAGVPHLDTPQDMAFVAVLYKFAKKHNIKWILNGGNLSTESVQIPLKILYYATDMKHNKDIMKKFATRDLSNFPFSSIWHHKLYLPYFKGIKVFKPLNFFEYKKKDAIDTLKNEYGWTPYPQKHFESRFTKFFEGYWLPSRFGFDMRRVQFSSLILSGQMERD

SEQ ID NO: 163662 - protein, 275 aa, Unknown
  Bacterial polypetide isolated from the Sargasso Sea
FEYIWLDGYQPEPMMRSKVKATEDDTPPDWSFDGSSTQQAEGGSSDCLLLPVQTYANPNGHDLVMTQVQAADHSVHPSNTRAAAAEVTTDEWWFGFEQEFFFTDPQTGEPLGWEDGTPREQGEYYCGVGAGNVVGREISDAHLEACLDLGITLTGTNAEVALGQWEYQCFGKGIKAADDLWVSRYLLYKIAEEYGVGVNIHPKPKTGDWNGSGMHCNFSNEAMRTAGSEELFSSMCDKLGEVHEEGIASYGSDNDMRLTGLHETQSIEKFSYGVS

SEQ ID NO: 163663 - protein, 80 aa, Unknown
  Bacterial polypetide isolated from the Sargasso Sea
MSSSKVLKMMKDNKIDYVDLRFSDPRGKLQHLTMDSTVVDNDMLNEGVFFDGSSIAGWKAINESDMILKPDLSRTIIDPF

SEQ ID NO: 163664 - protein, 218 aa, Unknown
  Bacterial polypetide isolated from the Sargasso Sea
MNTFEYIWLDGYQPEPMMRSKVKATEDDTPPDWSFDGSSTQQAEGGSSDCLLLPVQTYANPNGHDLVMTQVQAADHSVHPSNTRAAAAEVTTDEWWFGFEQEFFFTDPQTGEPLGWEDGTPREQGEYYCGVGAGNVVGREISDAHLEACLDLGITLTGTNAEVALGQWEYQCFGKGIKAADDLWVSRYLLYKIAEEYGVGVNIHPKPKTGDWNGSGMH

SEQ ID NO: 163665 - protein, 159 aa, Unknown
  Bacterial polypetide isolated from the Sargasso Sea
AFANATTNSYKRLIPGFEAPVLLAYSARNRSASCRIPITLSKKGARCEIRFPDASGNPYLTFASMLMAGIDGIKNKIDPGKSFDKDLYALSEKELKKVPTVCGSLREAMESLDKDRKFLTQGNVFTDDQIDAYIALKFEEIHNFEHTPHPIEFDMYYSC

SEQ ID NO: 163666 - protein, 237 aa, Unknown
  Bacterial polypetide isolated from the Sargasso Sea
VFFKFMVKSIAEKHGLRATFMPKPFDELTGNGCHAHASLWDLKKKQNHFLDKNNELGLSKMGYHFIGGIMKSVDSFSAWFNPSLNSYDRLNARTTNSGSTYSPTAVTYSGNNRTHMIRIPDAGRIEFRPADGAVNPYLLQAGLIAMGLDGIKNKRNPGKRIDVNMYSQGHKLKRIKKLPQSLMESLNKFKASEVVKKSIGAKVVTQYIKLKKRELAEHNKISDENKKEWERKNIIDC

SEQ ID NO: 163667 - protein, 190 aa, Unknown
  Bacterial polypetide isolated from the Sargasso Sea
FGREIMDRHLDVCLDAGINVEGTNAEVAAGQWEFQTFAKGAKEAGDEMWVARYLLERIAEDYAIKIEYHPKPLGATDWNGSGMHANFSNTTLRTCGSKETYEKICEAFRPVVDDCIAVYGAYNDQRLTGDHETQSITEFSYGVSDRGASIRIPIMTVESGWKGWLEDRRPSSNADPYKVAAIIVKTVKSA

SEQ ID NO: 163668 - protein, 52 aa, Unknown
  Bacterial polypetide isolated from the Sargasso Sea
KKFSYGVSDRGASIRIPIYTVENNWNGYLEDRRPASNADPYKIINHIVSTLK

SEQ ID NO: 163669 - protein, 263 aa, Unknown
  Bacterial polypetide isolated from the Sargasso Sea
MKTYEYIWLDGYTPESSMRSKVKATKDETPPDWSFDGSSTQQAEGGSSDCLLLPVQTYENPNGHDLVMTQVQSADHSTHPSNFRAAAAEVVTDEWWFGFEQEYFLTDPETGEPLGWENGEPGPQGPYYCAVGAGNVIGREISDAHLYACLDLGIELTGTNAEVALGQWEYQCFGKGIKAADDLWVSRYLLYKIAEDFGVGVNIHPKPKTGDWNGSGMHCNFSNEAMRTSGSEELFNSMCEKLGEVHEEGIASYGSDNDMRLTG

SEQ ID NO: 163670 - protein, 274 aa, Unknown
  Bacterial polypetide isolated from the Sargasso Sea
MSDYKTYEYIWLDGYKPEANMRSKVKATDEDTPPDWSFDGSSTLQAEGGSSDCLLLPVQTYSNPNGHDFVLTQVHAADHTTHPSNFRAAAEEVVTDEWWFGFEQEFFFTDPTTGEPLGWEDGTPREQGEYYCGVGAGNVVGREISDAHLQACLDIGITLTGTNAEVALGQWEYQCFGKGIKAADDLWMSRYLLFKVAEEFGVGVNIHPKPKTGDWNGSGMHSNFSNEEMRTNGSEELFTSYCEKLGEVHEEGIASYGSDNDMRLTGLHETQSIE

SEQ ID NO: 163671 - protein, 276 aa, Unknown
  Bacterial polypetide isolated from the Sargasso Sea
RIKHESIKFIDLQFTGLTGRFHHTTISADTFTPQQMEDGLPKLDGSSIVGFTDIADSDLILKPDPSTFAIIPWLTEKKTARLLCDVYWGGGRGRLESDPRGICQKAEAFVKTQGFDFSNWGPEVEFFVFDKVHWDVLTPYKGQSYSIESSESPWSQEGTGYPMGLQEGYYPSTPSDTLAPFRNECVDVLNDNFGILCDNHHHEVATAGQCEIDIKYDLMTNSADGAQSYKYVVRNVAQQFGKVATMMPKPISMDAGSGMHTNVSLWKKDEKIRFMI

SEQ ID NO: 163672 - protein, 154 aa, Unknown
  Bacterial polypetide isolated from the Sargasso Sea
TNPTVNSYKRLNAPRTASGATWAPNSVTWTGNNRTHMVRVPAPGRFELRLADGATNPYLLQAVILAAGLDGLEKKSDPGPHYDIDMYSDEHLVKDAAKLPLNLLDALRAFDKSTGLKEALGLDFSKAFLKLKHDEWRAFTADFSEWEKNNALDV

SEQ ID NO: 163673 - protein, 93 aa, Unknown
  Bacterial polypetide isolated from the Sargasso Sea
MAGLDGIKNKIDPGKSFDQDLYALTEKQVKKVPTVCGSLREAMEALDKDRNFLKQGNVFTDDQIDAYIELKYEEIHNFEHTPHPIEFDMYYSC

SEQ ID NO: 163674 - protein, 253 aa, Unknown
  Bacterial polypetide isolated from the Sargasso Sea
RSNETEMIAFPDPTTFQILPWRPDEPSVAKINCDILNKDGSPSNFDSRFILKNKVEELINNGLNFYVAPEIEYYYLESSESMEPIDEKTYFDQIGIHGDLGSDLRRNTVLGLEKMGIPIQKFHHEVSPGQQEISLRYSDSVTMADSFQTFKIIVKEIAMLSDVFATFMPKPFEEFEGNGMHLHISLFKDDKNLFTQNSSKSGISKDGEFFTAGLLKHVTDFMIISNQWVNSYKRLVSKNESPSHISWSNTPNN

SEQ ID NO: 163675 - protein, 155 aa, Unknown
  Bacterial polypetide isolated from the Sargasso Sea
MKFDCKSPKELLNKIKDLNINMVDLRFTDLPGTTQHFTIPISYLNEDVFEEGLGFDGSSVRGFQEIQNSDMIVLPDVNSAYIDPFYSEKTLALHCNIKDPVTLEDYTRDPRNIAKKAENYLKTSGIADTAYFGPEAEFFVFNNVQYDSGSNFSFY

SEQ ID NO: 163676 - protein, 283 aa, Unknown
  Bacterial polypetide isolated from the Sargasso Sea
GKSISDPRDIQSKPCYDQSALMRRYDLIKEICDCMIELGWNPYQNDHEDANGQFEMNWDYSDSLITADRHTFFKFMVKSLAEKHGLRATFMPKPFENLTGNGCHAHISLWDGKSNMFLEKGDRLGLSKLAYNFLGGIIKNTTSLAAFFNPTINSYRRINAPPTKSGASWSPSSISYTGNNRTHMIRVPDPGRFELRLMDGSSNPYLLQAGVMAAGLDGINNKTDPGEPLFCNMYTDHKNYPNLERLPNELEESLENLENNKILRDAFGEKVISSYVKLKKQEI

SEQ ID NO: 163677 - protein, 91 aa, Unknown
  Bacterial polypetide isolated from the Sargasso Sea
MKIKAEYIWIDGLTPTAKLRSKTKIIEQGTEPPIWGFDGSSTQQATGDQSDCVLKPVAQFPDPIRGGDNILVMCEVMNVDMTPHASNTRAA

SEQ ID NO: 163678 - protein, 267 aa, Unknown
  Bacterial polypetide isolated from the Sargasso Sea
ISDPKDIQSKPCYDQSALMRRYELIKEICDCMIELGWNPYQNDHEDANGQFEMNWDYSDSLITADRHTFFKFMVKSLAEKHELRATFMPKPFENLTGNGCHAHISLWDGKSNKFLEKGDRLGLSKLAYNFLGGIIKNATSLAAFFNPTINSYRRINAPPTKSGASWSPSSISYTGNNRTHMIRVPDPGRFELRLMDGSSNPYLLQAGVMAAGLDGINNKTDPGEPLFCNMYTDHKNYPNLERLPNELEESLENLENSKVLREALEKK

SEQ ID NO: 163679 - protein, 97 aa, Unknown
  Bacterial polypetide isolated from the Sargasso Sea
RSSGSEELFTSMCEKLGKVHEEGIAVYGTDNSMRLTGLHETQSIDKFSFGVSDRGASIRIPVYTVEHNWNGYLEDRRPASNADPYKIVSHIVGTLTK

SEQ ID NO: 163680 - protein, 73 aa, Unknown
  Bacterial polypetide isolated from the Sargasso Sea
AAYGSDNNMRLTGLHETQSIDKFSYGVSDRGASIRIPVYTVEHNWNGYLEDRRPASNADPYKIVSHIVGTLTK

SEQ ID NO: 163681 - protein, 93 aa, Unknown
  Bacterial polypetide isolated from the Sargasso Sea
MKIKAEYIWIDGLTPTAKLRSKTKIIEQGTEPPIWGFDGSSTQQATGDQSDCVLKPVAQFPDPIRGGDNILVMCEVMNVDMTPHASKYKSCIG

SEQ ID NO: 163682 - protein, 261 aa, Unknown
  Bacterial polypetide isolated from the Sargasso Sea
MNKYEYIWLDGFEPEPSLRSKIKVTDGEPPEWSFDGSSTQQAEGGSSDCLLLPVEQYENPTNDGSLVMCQVHTGEHEVHPSNTRAAAEAVVSDEWWFGFEQEYFFTDNKGNPLGWEDGTPRPQGDYYCGVGSSNVVGREISEAHLDACLDAGIELTGTNAEVALGQWEYQCLGKGIKAGDDLWVSRYLLHKVAEEFGVSVNIHPKPKTGDWNGSGMHTNFSNEEMRTSGSEELFNSMCEKLGAVHEEGIASYGSDNDMRLT

SEQ ID NO: 163683 - protein, 165 aa, Unknown
  Bacterial polypetide isolated from the Sargasso Sea
MIIAEYVWLDRDFKFRSKSRTLQNPSVIPEWNYDGSSTGQAEGNFSEIILRPRARFNCPFRRGTNILVLCDTFYPDGNPTSENFRYNANKTFELSLEDKPWFGLEQEYFMINPKTKKPFGFPNECLPEKQGKYYCGTGMDNVFGRKIADLHYQMCLEAGIKISGI

SEQ ID NO: 163684 - protein, 88 aa, Unknown
  Bacterial polypetide isolated from the Sargasso Sea
MKIKAEYIWIDGKTPTSKVRSKTKILEQGIEPPIWGFDGSSTEQATGDNSDCVLRPVSTFNDPIRGGDNILVMCEVLNVDMTPHTFKY

SEQ ID NO: 163685 - protein, 57 aa, Unknown
  Bacterial polypetide isolated from the Sargasso Sea
TQSIDTFSYGVSDRGASIRIPIYTVENDWNGYLEDRRPASNADPYKIISHIVGTLTQ

SEQ ID NO: 163686 - protein, 59 aa, Unknown
  Bacterial polypetide isolated from the Sargasso Sea
IDLKFTDIHGKWQHLTLTSDMIEEDSFTEGLAFDGSSIRGWKAINASDMSMVPDASTAW

SEQ ID NO: 163687 - protein, 109 aa, Unknown
  Bacterial polypetide isolated from the Sargasso Sea
MSARDVLKLMKSKEIEYLDLRFTDPRGKLQHLTMDSTIVDEGMLNDGVFFDGSSIAGWKAINESDMILKPDLSRKVIDPYTSHNTLILFCDILDAVNRHPYERDPRGIA

SEQ ID NO: 163688 - protein, 238 aa, Unknown
  Bacterial polypetide isolated from the Sargasso Sea
MKFNCSAPAELLKQIKDLDIKMVDMRFTDVPGTTHHFTIPIKFLEEDIFEDGLGFDGSSVRGFQAIENSDMIVVPDVTTAYIDPFFSEKTIAFYCDIKDPITKENYSRDPRNIAKKAEGYLKSSGMGDTAYFGPEAEFFIFNDVKYDSGSNFAFHEVDSNEGTWNTGKDEGPNLGHKPRHKEGYFPLPPVDSMHDVRTEMVITMQDIGLTVEAHHHEVATGGQQEIDLEFAPLVSMAD

SEQ ID NO: 163689 - protein, 90 aa, Unknown
  Bacterial polypetide isolated from the Sargasso Sea
MSAKDVLKLMKSKEIEYLDLRFTDPRGKLQHLTMDSTIVDEGMLNDGVFFDGSSIAGWKAINESDMILKPDLSRKVIDPYTSHNTLIFIL

SEQ ID NO: 163690 - protein, 63 aa, Unknown
  Bacterial polypetide isolated from the Sargasso Sea
MSAKDVLKFISSKEVEYVDLRFTDPRGKLQHLTMDGKMVDEEMLNEGVFFDGSSIAGWKAINE

SEQ ID NO: 163691 - protein, 97 aa, Unknown
  Bacterial polypetide isolated from the Sargasso Sea
SAMMLAGLDGIKNKIDPGEAIDRDLYALSKEELKDIPHVAVTLNGALKALDEDRAFLTDTGVFCDDVIDAYIDLKKEHVEQLRMSTHPLEFQLYYSV

SEQ ID NO: 163692 - protein, 37 aa, Unknown
  Bacterial polypetide isolated from the Sargasso Sea
PVYTVEHNWNGYLEDRRPASNADPYKILSHIVGTLTK

SEQ ID NO: 163693 - protein, 89 aa, Unknown
  Bacterial polypetide isolated from the Sargasso Sea
MGTANEVLKKFKNGEVKYLDMRFTDPKGKLQHLTMDGTVVDDDLLNSGVFFDGSSISGWKAINESDMILMPDLSTTVMDPFTAQPTLIV

SEQ ID NO: 163694 - protein, 279 aa, Unknown
  Bacterial polypetide isolated from the Sargasso Sea
RDLPFEENTPLFLAELTDAEVCPRGLLKKVLSLMEKDKIFSRSAFEYEFFLFSENSHSIREKEFKKLNNFTPGMFGYSVLRNSVESDLYNELLQLCISMDMPLEGLHTETGPGVLEAAILVDESLNSADKATLFKTFSKVMFQKKGLIANFMAKWSADYPGQSGHIHLSLQDEKGKSIFASSKDELPKSLLYFIGGLQTYMREFSVMIAPTVNSYKRLCPGAWAPINMTWGIENRTCAFRVIKGDSNSQRIENRLPGADSNPYLALAATLGAGYLGIKE

SEQ ID NO: 163695 - protein, 264 aa, Unknown
  Bacterial polypetide isolated from the Sargasso Sea
RKNGYLVMTEVLNADGTPHESNGRATIDDSDNDFWFGFEQEYFLWDTETNLPLGFPKDQTPQGQFYCSVGGANTFGREIMDRHLDVCLDAGINVEGTNAEVAAGQWEFQTFAKGAQEAGDEMWVARYLLERIAEDYAIKIEYHPKPLGATDWNGSGMHANFSNTTLRTCGSKETYEKICEAFRPVVDDCIAVYGAYNDQRLTGDHETQSITEFSYGVSDRGASIRIPIMTVESGWKGWLEDRRPSSNADPYKVAAIIVKTVKSA

SEQ ID NO: 163696 - protein, 178 aa, Unknown
  Bacterial polypetide isolated from the Sargasso Sea
LNADINVEGINAEVAAGQWEYQIFAKGAKNAGDQVWVARYLAERNAEKWGFSIDLHPKPIKGDWNGSGMHANFSNGVMRTCGDEKVFNRICEGFDGKNIKKHMSVYGAHNEERLTGLHETQSIDKFSYGISDRGASIRIPIGTVEDGWKGRLEDRRPASNGDPYQIAAVIVSTTKAAL

SEQ ID NO: 163697 - protein, 309 aa, Unknown
  Bacterial polypetide isolated from the Sargasso Sea
FAVSYGLQAKLEYIWLDGYEPTQSMRSKTMIRSNFGGTVEECPMWSFDGSSTQQAEGGDSDCLLKPVFICPDPDRINGYLVMCEVLNADGTPHASNGRATIDEDDDDFWFGYEQEYFLWDPESNLPLGFPRDQTPQGQFYCSVGAMNTFGRDVIEAHLDMCLDAGLNVEGINAEVAVGQWEYQIFAKGAKEAGDQIWVSRYLAERNAEKYGLAIEWHPKPLGATDWNGSGMHVNFSDGRMRDEGGEELMSQICEAFGQNIKKHIDVYGAHNEQRLTGLHETQSIHEFSYGVSDRGASIRIPIGTIEDGW

SEQ ID NO: 163698 - protein, 274 aa, Unknown
  Bacterial polypetide isolated from the Sargasso Sea
MSDNKILEYIWLDGYQPEPTLRSKIKVTNDDSAPNWSFDGSSTQQAEGGSSDCILIPVQTYKGPLFSDSLIMCEVQNGDHEVHPSNTRAAAASIVSDEWWFGFEQEYFFTGDNGEPLGWEDGTPRPQGDYYCGVGAGNVEGRDISEAHLEACLEAGIELTGTNAEVALGQWEYQCFGKGIKAADDLWVSRYLLYKIAEDFGVGVNIHPKPKTGDWNGSGMHTNFSNEEMRTAGSEDLYNSLCDKLGQVHKERIALYGSDKHMRLTGLHETQSIE

SEQ ID NO: 163699 - protein, 125 aa, Unknown
  Bacterial polypetide isolated from the Sargasso Sea
MDLRSKTRTLEGPFRSVEDLPAWNYDGSSTNQAPGQDSEVILVPRKVYRDPFRATAMDKDHILDHDRKNSSVHNRALYVEHRSLDKPALSPVAEPERSSATRPEILDGCRNLLVMCDTYDSSGRP

SEQ ID NO: 163700 - protein, 246 aa, Unknown
  Bacterial polypetide isolated from the Sargasso Sea
MSKSKLEYLWLDGYKPTQSLRGKTKVVSDFSGKLEDCPVWAFDGSSTQQAPGGSSDCLLKPVAIYPDPVRKNGFIVMNEVLSSDGSPHESNGRATIDDDDDDFWFGFEQEYFLWDPETNLPLGFPKDQTPQGQFYCSVGGKNAFGREIMDRHLDICIDAGINIEGTNAEVAAGQWEFQIFAKGAAKAGDEIWVARYFLERLAEDYGLAIEYHPKPLGATDWNGSGMHANFSNSTLRTCGSKETYEA

SEQ ID NO: 163701 - protein, 291 aa, Unknown
  Bacterial polypetide isolated from the Sargasso Sea
MKTYEYIWLDGYTPESSMRSKVKATKDETPPDWSFDGSSTQQAEGGSSDCLLLPVQTYENPNGHDLVMTQVQSADHSTHPSNFRAAAAEVVTDEWWFGFEQEYFLTDPETGEPLGWENGEPGPQGPYYCAVGAGNVIGREISDAHLYACLDLGIELTGTNAEVALGQWEYQCFGKGIKAADDLWVSRYLLYKIAEDFGVGVNIHPKPKTGDWNGSGMHCNFSNEAMRTSGSEELFNSMCEKLGEVHEEGIASYGSDNDMRLTGLHETQSIDTFSYGVSDRGASIRILYTLL

SEQ ID NO: 163702 - protein, 205 aa, Unknown
  Bacterial polypetide isolated from the Sargasso Sea
GSGMHTHLSLFSEGKNVFHDPSGSLSSIGQSFVAGLLYHAREITAITNQLVNSYKRINEGYEAPRYVSWARNNRSSLVRIPVHKQDKPDSARIEYRAVDPACNPYLAFSVMLSAGLKGIEENYELPPEATTNLYEMSRAEQKELGVASLPANLSEALDEMEASELVREALGDHIFEWFLRNKRTEWNEYQRQVTPFEIDQYLPNW

SEQ ID NO: 163703 - protein, 142 aa, Unknown
  Bacterial polypetide isolated from the Sargasso Sea
MKILEYIWLDGYKPEPSLRSKIKVTKDETPPDWSFDGSSTQQAEGGSSDCLILPVQTYDGPLFADQLVMCEVETGEHKAHPSNMRAGADQVVTDEWWFGFEQEYFFTDINGEPLGWEDGTPRPQGDYYCGVGESNSAGQRNI

SEQ ID NO: 163704 - protein, 65 aa, Unknown
  Bacterial polypetide isolated from the Sargasso Sea
MRLTGLHETQSIDQFSYGVSDRGASIRIPVYTVEHNWNGYLEDRRPASNADPYKILAHIVGTLTK

SEQ ID NO: 163705 - protein, 264 aa, Unknown
  Bacterial polypetide isolated from the Sargasso Sea
MSDYKTYEYIWLDGYQPEANMRSKVKATDEDTPPDWSFDGSSTQQAEGGSSDCLLLPVQTYSNPNGHDFVLTQVHAADHTVHPSNFRAAAEEVVTDEWWFGFEQEFFFTDPTTGEPLGWEDGTPREQGEYYCGVGAGNVVGREISDAHLQACLDIGITLTGTNAEVALGQWEYQCFGKGIKAADDLWMSRYLLFKVAEEFGVGVNIHPKPKTGDWNGSGMHSNFSNEEMRTKGSEELFTSYCEKLGEVHEEGIASYGSDNDMRL

SEQ ID NO: 163706 - protein, 245 aa, Unknown
  Bacterial polypetide isolated from the Sargasso Sea
MKLKSSTPKDLMSEIKDMDIKMVDMRFTDIPGTTQHFTIPIKFLDEDIFSDGLGFDGSSVRGFQEIQDSDMIVLPDATTAYIDPFFSEKTLALHCNIKDPVTLVDYSRDPRNIAKKAEGYLKSSGIGDTAFFGPEAEFFVFNNVQFDSGSNFAFHEVDSVEGTWNSGADENPNLGHKPRHKEGYFPLPPVDTLQDVRTEMVMTMQDIGLTVEAHHHEVATGGQCEIDLEFSPLLKMADDMMKYKY

SEQ ID NO: 163707 - protein, 107 aa, Unknown
  Bacterial polypetide isolated from the Sargasso Sea
MHCNFSNEAMRTAGSEELFSSMCDKLGEVHEEGIASYGSDNDMRLTGLHETQSIDKFSYGVSDRGASIRIPVYTVEHDWNGYLEDRRPASNADPYKILAHIVGTLSK

SEQ ID NO: 163708 - protein, 182 aa, Unknown
  Bacterial polypetide isolated from the Sargasso Sea
MKKLEYVWLDGYQPEPMMRSKVKVIDGEIPGNSGSDLPDWSFDGSSTQQAEGGDSDCILKPVTTYPGPLHSDSLVMCEVMSPDKSPHPSNTRNACIDLLSDEWWFGFEQEYFFTNPEDGTILGWEDGTPRPQGDYYCGVGAGDVYGREISQAHMDACIDAGIKITGTNAEVALGQWEYQCFE

SEQ ID NO: 163709 - protein, 115 aa, Unknown
  Bacterial polypetide isolated from the Sargasso Sea
MSSRDVIKLIKDKDIEYIDLRFTDPRGKLQHLTLDKTIVDEEMLNEGVFFDGSSIAGWKAINESDMILKPDLSRKVIDPYTSHNTLILFCDILDAVKKDPYERDPRGIAKKAEAY

SEQ ID NO: 163710 - protein, 59 aa, Unknown
  Bacterial polypetide isolated from the Sargasso Sea
HETQKITEFSYGVSDRGASIRIPVYTVEHDWNGYLEDRRPASNADPYKILSHIVGTLTK

SEQ ID NO: 163711 - protein, 298 aa, Unknown
  Bacterial polypetide isolated from the Sargasso Sea
MDYYVAVSSDTYYRDDPYVVTATFTEGLDGYETEVNDNYEQADTIVLGDVTGIVGSVSNRADKDWYVFDVASPSIFTVDLNSTTPGDPSGYDYFDITVYDSTLQAISYRNGSGRDYYDGDLAFDVSAPTSGLYYVEVTDSTYHTDAPYTLSVLPNDTPLYDYETESNDYVDPNGDDVMSFGKGMYGSLLSRQDVDFYQLDVTAPGIINLDFRSISQNTSNYDTWNVALYTSESFYSNVPLAEGSGGTEGFSFEVAASDTSLDYYVAVSSDTYYRDDPYVVTATFTEQVNLANETEPNN

SEQ ID NO: 163712 - protein, 164 aa, Unknown
  Bacterial polypetide isolated from the Sargasso Sea
AKAINAFSNSTTNSYKRLIPGFEAPVLLVYSARNRSASCRIPITLSKKASRCEIRFPDAAGNPYLTFSAMLMAGIDGIKNKINPGKPVDEDLYAMSEDKVKNIPTVCGSLREAMENLDTDRKFLTQGGVFTDDQIDAYIALKFEEIYKLEHTPHPMEFEMYYSC

SEQ ID NO: 163713 - protein, 249 aa, Unknown
  Bacterial polypetide isolated from the Sargasso Sea
YVDIRFTDPRGKLQHVTVMADQVDSDFIEEGFMFDGSSIAGWKSIEASDMKLMIDTDSAYVDPFYAEKTLCVHCSVVEPDTGEAYERDPRGTAEKAEAYLKSSGVGDVAYMGPEAEFFLFDNVKFSNEMNKVSFEVDALDAAWNTDTDYEMGNTGHRPGVKGGYFPVNPIDDGQDIRSEMLSTMKRLGMKVDKHHHEVASCQHELGLIFNSLTKQGDELQNLSPRAARAPPSPRPGVGVGRPPGGGCRS

SEQ ID NO: 163714 - protein, 90 aa, Unknown
  Bacterial polypetide isolated from the Sargasso Sea
LFSSMCEKLGEVHKEGISLYGSDNDMRLTGLHETQSIDTFSYGVSDRGASIRIPIYTVEHDWNGYLEDRRPASNADPYKIVAHIVGTLTS

SEQ ID NO: 163715 - protein, 254 aa, Unknown
  Bacterial polypetide isolated from the Sargasso Sea
LPGSLINKNIFKNKKYYFNENIRSSFDIEWKDIIKENHLSLMPNKFFIIYESLPKNILNALKKHTLYAFYTSLGKSEINIKEIYVSIFLILSAIILPKWNFIISGWNNNPLYIPNVTKIYLICLIIIFLFYLILKKIKIFKKNYFFEIISKTIFFFLFSYGIYKWNASIASWVENSIFYIPHITKIYISILIIGSFVYRGLVRPLKRKEEIKFLLPFNWIIIGFMGLTIDLIKSPFYVFVSVITNFLRTLRLIK

SEQ ID NO: 163716 - protein, 452 aa, Unknown
  Bacterial polypetide isolated from the Sargasso Sea
MTITFNNLKKAIQKDEIDTVLVCVSDMQGRLNGKRVTGKAFLDYVHKETHMCDYLYTVDMDMFTVPGYKSSSWETGYGDMTVIPDLKTIKIATWLEKTAIVICDCLDHHGKKPLVHSTRQILRDVIAKANKMGFDPMIGSELEFFLFNQTYEEIHNNNYTNFKEASWYIEDYMIFQTTKEEDVMRELRNSLLKSGIYVECSKGEAAPGQEEINVVFTDALNMADNHILIKNAAKEIAFKHNKAVTFMAKYNKDVCGSSCHIHNSLFDKKTKKNIFNNPKDKYGMSDTFKSYVAGQIRFLSDISIFLAPNINSYKRFQDGSFAPTKSVWGIDNRTAGFRLAGHGSSIRIECRVPGADVNPYLAFAALVGAGLYGIKNKLKLEEPYSGNIYEKKVREVPKTLNEAIQLAKKSKLLPEIFSTDVLEHYIHAAEWEQKDYDSSVNDWQLRRYFERG

SEQ ID NO: 163717 - protein, 175 aa, Unknown
  Bacterial polypetide isolated from the Sargasso Sea
MKYNCKTAKELLKKIKNEDIKMVDLRFTDMPGSTHHISIPIKYLKEDLFVDGVGFDGSSVRGFQSIENSDMTMVPDVTTGYLDPFYSEKTIAFYCNVVDPITYKSYPRDPRYIAQKAEKYLKSSGLGDTAYFGPEAEFFVFNDVKYDSGSNFAFHEVDSTEGAWNTGRDESPNLG

SEQ ID NO: 163718 - protein, 193 aa, Unknown
  Bacterial polypetide isolated from the Sargasso Sea
MKFNCSTPGELLKEIKDLEIKMVDMRFTDVPGTTHHFTIPIKFLEEDIFEDGLGFDGSSVRGFQAIENSDMIVVPDVTTAYIDPFFSEKTIAFYCDIKDPITRENYSRDPRNIAKKAEGYLKSSGMGDTAYFGPEAEFFIFNDVKYDSGSNFAFHEVDSNEGTWNTGKDEGPNLGHKPRHKEGYFPLPPVDSM

SEQ ID NO: 163719 - protein, 258 aa, Unknown
  Bacterial polypetide isolated from the Sargasso Sea
MNTFEYIWLDGYQPEPMMRSKVKATEDDTPPDWSFDGSSTQQAEGGSSDCLLLPVQTYANPNGHDLVMTQVQAADHSVHPSNTRAAAAEVTTDEWWFGFEQEFFFTDPQTGEPLGWEDGTPREQGEYYCGVGAGNVVGREISDAHLEACLDLGITLTGTNAEVALGQWEYQCFGKGIKAADDLWVSRYLLYKIAEEYGVGVNIHPKPKTGDWNGSGMHCNFSNEAMRTAGSEELFSSMCDKLGEVHEEGIASYGSDND

SEQ ID NO: 163720 - protein, 268 aa, Unknown
  Bacterial polypetide isolated from the Sargasso Sea
MKTYEYIWLDGYKPEPSMRSKVKATKDETPPDWSFDGSSTEQAEGGSSDCLLLPVQTYENPNGHDLVMTQVQAADHTTHPSNFRAAAAEVVTDEWWFGFEQEYFFTDPETGEPLGWENGEPGPQGPYYCAVGAGNVSGREISDAHLLACLDLGIELTGTNAEVAIGQWEYQCFGKGIKAADDLWVSRYMLYKIAEEFGVGVNIHPKPKTGDWNGSGMHTNFSNEAMRSAGSEELFSSMCDKLGEVHEEGIAAYGSDNDMRLTGLHETQ

SEQ ID NO: 163721 - protein, 420 aa, Unknown
  Bacterial polypetide isolated from the Sargasso Sea
MKIRKLKSAGEIKKLLEASKTRYVKVALTDIDGILRGKYMHVDKFIKSSKNGFGFCDVIFGWDSNDELYELNVKQEELYTGWHSGFPDAKASIVPNSGRINPYEEEVPFFLAELAEGNVCPRGLLKNVLSKMEKEGLMSKSAFEYEFFLFNETPHSIREKKYTGLNNFTPGMYGYSILRNSVHSDLYNELLNLCSAMDMHLEGLHTETGPGVIEAAIMVDDSMNAADKATLFKTFSKVMFQRNNLIANFMAKWSDKYPGQSGHIHVSLQDLDGKSLFSSKKDELPKELYYFLGGLQRYMREFSVLIAPTVNSYKRLCPGAWAPINMTWGIENRTTAFRAIKGDSSSQRIENRLPGADSNPYLALAATLGAGFLGIKEKIKPTNETIGGAYDLNVEKNYQVPKNLGEAANLFKNSEAAKDL

SEQ ID NO: 163722 - protein, 465 aa, Unknown
  Bacterial polypetide isolated from the Sargasso Sea
MKIRKLKSAEDVKKFLDSSKTEYVKVGLTDIDGILRGKYMHVDKFIKSSKKGFGFCDVIFGWDSSDELYELKNESVDDLYTGWHSGFPDAKANIIPESGRINPFEENIPFFLAELSEDEVCPRGLLNKLIKKMENVGIRSKSAFEYEFFLFNETPHSIRSKNYSNLANFTPGMFGYSILRSSVESQLYNDLLNLCLDMDMHLEGLHTETGPGVIEAAITVDDSLNAADKATLFKTFSKVLFQKNDLMANFMAKWSDKYPGQSGHIHTSLQDMEGKSLFASSQEDLPEQLKYFIGGLQKYMREFSIMIAPTVNSYKRLCPGAWAPINMTWGIENRTTAFRAIKGDSTSQRIENRLPGADSNPYLALAATLGAGFLGIQEKIDPTEETLGGAYDLNLERKYQVPSNLGEAANLFKNSESAKNLFGETFVKHFANTRIWEFKEFQKNKNFFDSDEISLWELDRYFEII

SEQ ID NO: 163723 - protein, 255 aa, Unknown
  Bacterial polypetide isolated from the Sargasso Sea
MGADTLLKLIADEDAEYVDIRFTDPRGKLQHVTVMSDQVDADFIEEGFMFDGSSIAGWKSIEASDMKLMMDTDSAYIDPFYAEKTICVHCYIVEPDTGEAYNRDPRGTAMKAEAYLKSSGIGDTFFVGPEAEFFLFDDVRFSNSMNKVSFEVDALDASWNTDSDYEIGNTGHRPGVKGGYFPVNPIDDGQDIRSEMLSTMKRLGMSVDKHHHEVASCQHELGLIFSSLTKQGDELQKYKYVIHNVCSAYGKSATF

SEQ ID NO: 163724 - protein, 365 aa, Unknown
  Bacterial polypetide isolated from the Sargasso Sea
MTFEEIKLKISKQEIDTVLVCMVDMQGRLMGKRFHAEAFLEMAEDETHCCNYLLATDLEMATPDGYASTSWSTGYGDYVMKPDLGTLRQVPWIEGTAICLCDVLDHNTHKPVPFSPREVLKTQISKAEAMGFSSIMATELEFFLFQGTHDEIAANGFRELKPISNYNEDYHIFQTSKEEHVMRPIRNYLREMGIPVEGTKGEAEAGQEELNIKYADVLSTADHHTLAKHGVKEIAHQQGYAATFLPKWNKDRVGSASHVHQSLFKKGTNVFYDAKAPMGKSKIMDHYLAGLLKYASEITIFLAPYVNSYKRFAKGTFAPTHTVWSVDNRTAAFRVVGDGSKSIRIECRTPGSDMNPYLATAAMMA

SEQ ID NO: 163725 - protein, 452 aa, Unknown
  Bacterial polypetide isolated from the Sargasso Sea
MTITFNELKKAIRKDNIDTVLVCVSDMQGRLNGKRVTGKAFLDYVHKETHMCDYLYTVDMDMFTVPGYKSSSWETGYGDMTVIPDLKTIKIATWLEKTAIVICDCLDHHGKKPLIHSTRQILKDTISKANKMGFEPMIGSELEFFLFNQPYEEIHNNNYTNFKEASWYIEDYMIFQTTKEEDVMRELRNSLLKSGIYVECSKGEAAPGQEEINVVFTDALNMADNHILIKNAAKEIAFKHNKAVTFMAKYNKDVCGSSCHIHNSLFDKKTKKNIFHNPKDKFGMSDVFKSYIAGQIKFLSDISIFLAPNINSYKRFQDGSFAPTKSVWGIDNRTAGFRLAGHGSSIRIECRVPGADVNPYLAFAALVGAGLYGIKNKLKLEEPYSGNIYEKKVREVPKTLNEAINLAKKSKLLTEIFDPYVLEHYIHAAEWEQKDYDTSVNDWQLRRYFERG

SEQ ID NO: 163726 - protein, 302 aa, Unknown
  Bacterial polypetide isolated from the Sargasso Sea
MTEIKTYEYIWLDGFQPEPSIRSKIKATDEDTPPDWSFDGSSTQQAEGGSSDCLLLPVQTYDCPLFADHLVMCQVHAGDHSVHPSNTRAAAEAVLSDEWWFGFEQEYFFTNKDGSPLGWEDGTPRPQGDYYCGVGSDNVAGREISEAHLEACLDAGLTLTGTNAEVALGQWEYQCFGKGIKAADDLWVSRYLLYKIAEEFGVGVNIHPKPKTGDWNGSGMHTNFSNEEMRSNGSEALFSSMCDKLGEVHEEGIASYGSDNDMRLTGLHETQNIEQFSYGVSDRGASIRIPIYTVEHDGTDIR

SEQ ID NO: 163727 - protein, 185 aa, Unknown
  Bacterial polypetide isolated from the Sargasso Sea
GLSKIAYNFLGGVIKNALSLSAFFNPTINSYRRINAPPTKSGASWSPSSISYTGNNRTHMIRIPDPGRFELRLMDGSANPYLLQASILAAGLDGIKNKINPGNPLYCNMYEDFAKYPDLPKLPNELDQSLSQLKDNKSMNEAFGSDVISSYVKLRNTEIKEFKSKESFDKAKAVTKWEKDNTLDC

SEQ ID NO: 163728 - protein, 49 aa, Unknown
  Bacterial polypetide isolated from the Sargasso Sea
SYGISDRGASIRIPIHTVEHNWNGYLEDRRPASNADPYRIINHIVGTLS

SEQ ID NO: 163729 - protein, 261 aa, Unknown
  Bacterial polypetide isolated from the Sargasso Sea
MPYKVIGGKATQIKYSSDEVFSRIKHEGIKFIDLQFTGLTGRFHHTTISADTFTPQQMEDGLPKLDGSSIVGFTDIADSDLILKPDPSTFAIIPWLTEKKTARLLCDVYWGGGRGRLESDPRGICQKAEAFVKTQGFDFSNWGPEVEFFVFDKVHWDVLTPYKGQSYSIESSESPWSQEGTGYPMGLQEGYYPSTPSDTLAPFRNECVDVLNDNFGILCDNHHHEVATAGQCEIDIKYDLMTNSADGAQSYKYVVRNVAQQ

SEQ ID NO: 163730 - protein, 143 aa, Unknown
  Bacterial polypetide isolated from the Sargasso Sea
MKVKAEYIWIDGYEPTANLRSKTKVLDGAVSSVSELPTWGFDGSSTLQADGGDSDCLLKPVWMCPDPIRGGENILVMNEVCNPDGTPHRSNSRAALVGIAEKFKEHKPWFGIEQEYTLMDGKQPAGWPEEGFPERPQGPYYCK

SEQ ID NO: 163731 - protein, 52 aa, Unknown
  Bacterial polypetide isolated from the Sargasso Sea
TFSYGVSDRGASIRIPIYTVENNWNGYLEDRRPASNADPYRIISHIVGTLTK

SEQ ID NO: 163732 - protein, 97 aa, Unknown
  Bacterial polypetide isolated from the Sargasso Sea
MSARDVLKLMKSKEIEYLDLRFTDPRGKLQHLTMDSTIVDEEMLNDGVFFDGSSIAGWKAINESDMILKPDLSRKVIDPYTSHNTLILFCDILDAVN

SEQ ID NO: 163733 - protein, 277 aa, Unknown
  Bacterial polypetide isolated from the Sargasso Sea
MSAEKLLKLITDEDAEYVDIRFTDPRGKLQHVTVMSDQVDADFIEEGFMFDGSSIAGWKSIEASDMKLMMDTDSAYIDPFYAEKTICVHCYVVEPDTGEAYNRDPRGTAMKAEAYLKSSGIGDTFFVGPEAEFFLFDDVRFSNSMNKVSFEVDALDASWNTDTDYEIGNTGHRPGVKGGYFPVNPIDDGQDIRSEMLSTMKRLGMSVDKHHHEVASCQHELGLIFSSLTKQGDELQKYKYVIHNVAQAYGKSATFMPNQLQAIMAQECIAICRFGKM

SEQ ID NO: 163734 - protein, 453 aa, Unknown
  Bacterial polypetide isolated from the Sargasso Sea
MSITFKELEKKIKSKEIDTVLVSLSDMQGRLVGKRVTGKAFLDYVHKETHFCDYLYTVDMDMYTVPGFKSSSWETGYGDMTVKPDQRTIKVLPWLDKTALVLGDAFQHDGKTPVSHSTRQVLREAIIKANKMGFEPMLGSELEFFLFKQTYEDIHSSYYKNLKETSWYIEDYMIFQTSKEEPFNQELRNSLLDSGIYVECTKGEASPGQQEINVVFTDALSMADNHILIKNAAKEIAFKHNRAVSFMAKYKQDFCGSSCHIHNSLFDKKTKKNIFSDTKDKYGMSKIFKSYVAGQILFLRDLSIFLAPNVNSYKRFQESSFAPTSAAWGIDNRTAGFRLAGHGSSIRIECRVPGADVNPYLAFAGLIQAGLYGIENKLELEEPLSGNIYQNRKAKNVPGTLYEAIELAKKSKLLPKIFHSDVLDHYIHAAKWEQSEYDKSVNDWEHRRYFERG

SEQ ID NO: 163735 - protein, 105 aa, Unknown
  Bacterial polypetide isolated from the Sargasso Sea
FNPYLAFSAILMAGLDGVKNKINPGKPTDINIYEAPASVLAKIPSTPGSLAESLNALEKDNKYLLQGGVFTKDNIESYISYKRENEVSPMDLRPHPHEFHLYYDA

SEQ ID NO: 163736 - protein, 58 aa, Unknown
  Bacterial polypetide isolated from the Sargasso Sea
ETQNIEQFSYGVSDRGASIRIPVYTVENNWNGYLEDRRPASNADPYKILAHIVGTLTK

SEQ ID NO: 163737 - protein, 55 aa, Unknown
  Bacterial polypetide isolated from the Sargasso Sea
SIDKFSYGVSDRGASIRIPVYTVEHDWNGYLEDRRPASNADPYKILAHIVGTLTK

SEQ ID NO: 163738 - protein, 87 aa, Unknown
  Bacterial polypetide isolated from the Sargasso Sea
MSKSPQDVLSQIKDEGIELIDLKFTDIHGKWQHLTLTSDMIEEDSFTEGLAFDGSSIRGWKAINASDMSMVPDASTAWIDPFYKHKT

SEQ ID NO: 163739 - protein, 56 aa, Unknown
  Bacterial polypetide isolated from the Sargasso Sea
QSIDQFSYGVSDRGASIRIPVYTVEHNWNGYLEDRRPASNADPYKILAHIVGTLTK

SEQ ID NO: 163740 - protein, 456 aa, Unknown
  Bacterial polypetide isolated from the Sargasso Sea
MKIRKLSSAKDVKKFIDSTKTGYVKVALTDIDGILRGKYMHVDKFIKSTEKGFGFCDVIFGWDSNDELYEFGRTSEEELFTGWHSGFPDTEAMIIPDSGRINPLEEDIPFFLAELKDSSICPRGLLKNLLKTMEAEGLRSKSAFEYEFFLFSESPHSIREKNYQNLKNFSPGMFGYSTLRNSVHSDLYSQLLNLCSQMDMPLEGLHTETGPGVLEAAIMVDESLNAADKATLFKTFSKVLFQKNDLVANFMAKWSENYPGQSGHIHLSLQDLDGQSLFGSKDGKLPKTLQYFVGGLQTYMREFSVMYAPTVNSYKRLCPGAWAPINMTWGTENRTTAFRVITGDSNSQRVENRLSGADNNPYLALAATLGAGYLGIKEKIKPSDETIGGAYDLKLSRDRMVPSNLGEAAQLFKASEAAKNLFGELFVNHFANTRTWEFNEYKKNIGFFDNALIQSG

SEQ ID NO: 163741 - protein, 405 aa, Unknown
  Bacterial polypetide isolated from the Sargasso Sea
MSKNLSKIAKQKKIKYFLISFVDLFGVLRSKLVPARAISEMQKNGAGFAGFATWLDMTPADSDMFAIPDPDSLVILPWNREVGWLASDLWMDGKPVEASPRIMLKNQIEKLSKRNLKMKSGVECEYFLLSVDGKSISDPRDIQSKPCYDQSALMRRYELIKEICDCMIELGWNPYQNDHEDANGQFEMNWDYSDSLITADRHTFFKFMVKSLAEKHGLRATFMPKPFENLTGNGCHAHISVWDGKSNRFLDKGDRLGLSKLAYNFLGGIIKNATSLAAFFNPTINSYRRINAPPTKSGASWSPSSISYTGNNRTHMIRIPDPGRFELRLMDGSSNPYLLQAGVMAAGLDGINNKIDPGEPLFCNMYKDHKNYPNLERLPNELEESLENLENSKILREAFGEKVIS

SEQ ID NO: 163742 - protein, 304 aa, Unknown
  Bacterial polypetide isolated from the Sargasso Sea
MEPQKEYVLRTVEERGVRLIRLWFTDVLGKLKSVAISPAELEGAFEEGLQFDGSAIDGYSRVQESDVLAVPDANSFELLPWVDPSEPTGRIFCDIKSLDGSPFQGDPRQVLRRNLQAAHDKGFTFFTAPEIEFFYFNNASDRKPLDNAGYFDLTTLDLGSGLRRRTLHMLEAMGIPVEYSFHEDNASQHEIDLRYTETLDMADNIMTLRLVVRKIALDAGIHATFMPKPIDEGQGSGMHTHMSLFEGDVNVFHDPGDVLGLSDIARKFMAGILHHAPEFTAVTNQLINSYKRMVSGYESPVYVS

SEQ ID NO: 163743 - protein, 380 aa, Unknown
  Bacterial polypetide isolated from the Sargasso Sea
SDMFAIPDPESLIILPWNREVGWLASDLWMDGKPVEASPRVMLKKQNEKLSNKNLKMKSGVECEFFLLSEDGNSISDPRDIQPKPCYDQSTLMRRYDLIKEICDSMIELGWNPYQNDHEDANGQFEMNWDYSDSLVTADRHTFFKFMVKSLSEKHGLRATFMPKPFENLTGNGCHAHISLWDGKSNKFLDKSDRLGLNKLAYNFLGGIIKNAQALSSFFNPSINSYRRINAPPTKSGASWSPSSISYTGNNRTHMIRVPDPGRFELRLMDGSVNPYLLQAGVMAAGLDGINNKIDPGEPLFCNMYTDYKNYPNLPKLPDELEDSLNNLEDSKVLREAFGEKVISSYVKLKKQELESFDKEERFDKRSSITAWEKINTLDC

SEQ ID NO: 163744 - protein, 65 aa, Unknown
  Bacterial polypetide isolated from the Sargasso Sea
MRLTGLHETQKITEFSYGVSDRGASIRIPVYTVEHDWNGYLEDRRPASNANPYRILSHIVGTLSD

SEQ ID NO: 163745 - protein, 87 aa, Unknown
  Bacterial polypetide isolated from the Sargasso Sea
SMCEKLGEVHKEGIALYGSDNDMRLTGQHETQSIDTFSYGVSDRGASIRIPIYTVEHDWNGYLEDRRPASNADPYKIIAHIVGTLTS

SEQ ID NO: 163746 - protein, 245 aa, Unknown
  Bacterial polypetide isolated from the Sargasso Sea
MSDIKTYEYIWLDGYQPEPSMRSKIKATDEDSPPDWSFDGSSTQQAEGNSSDCLLLPVQTYDNPTFSDHLVMCQVHAADHTVHPSNTRAAAEALLSDEWWFGFEQEYFLTGKDGSPLGWEDGQPRPQGDYYCGVGADNVQGREISEAHLEACLDAGLTLTGTNAEVALGQWEYQCFGKGIKAADDLWVSRYLLYKVAEDFGVGVNIHPKPKSGDWNGSGMHTNFSNEEMRSNGSEQLFSSLCEKL

SEQ ID NO: 163747 - protein, 267 aa, Unknown
  Bacterial polypetide isolated from the Sargasso Sea
MSDIKTYEYVWLDGYKPEPSIRSKIKATDLRGTDKGELNDDMPPRWSFDGSSTQQAEGGSSDCLLIPVQMYDNPTAPDHLVMCQVLAADGSIHPSNTRDAADAVVSDEWWFGFEQEYFFTNPDGSPLGWEDGEPRPQGDYYCGVGADNVSGREISEVHLQACIEAGINLTGTNAEVALGQWEYQCFGKGIKAADDLWMSRYLLYKIAEEYGVGVNIHPKPKTGDWNGSGMHANFSNEEMRTNGSEKLFHSICDKLGEVHDEGIASYG

SEQ ID NO: 163748 - protein, 121 aa, Unknown
  Bacterial polypetide isolated from the Sargasso Sea
MGTANEVLKKFKNGEVKYLDMRFTDPKGKLQHLTMDGKAVDDDLLNSGVFFDGSSISGWKAINESDMVLKPDLTTTVMDPFTAQPTLIVFCDVLDAVSKELYERDPRGTARKAEEYVKASG

SEQ ID NO: 163749 - protein, 449 aa, Unknown
  Bacterial polypetide isolated from the Sargasso Sea
MNEWVLAGIAIHKAGGVLVPINTRMKGKEAAYILNNAEAKILFSVKTFLGTNYFKLLENEELPHLQHQISLDENHLSDQIKSIGSIKEHASEAKFPEINESDMADIIFTSGTTGKPKGVMSTHVQNIKVFDYWSSYIGLNEKDQYLIVNPFFHTFGYKAGWLASIMRGATAYPCPVFDADKIIEIINKEKISMLPGPPTLYQSILTSNLIETMDISSLRLGVTGAASIPVQLIKDMKEKLGFDTVITAYGLTESTGVVTMCTPDDDYKTIATTSGCAIADVEVKCVNQDGQDIPAGEPGEILVRGYNITKGYFNNPEATQEAIDDDGWLHTGDIGILDENGYIKITDRSKDMFIVGGFNAYPAEIENILCDHPSISQAAVIGIEDERMGEVAKAFVVLKPDQDLNSDSLIEWSKENMANYKVPRIVEFVQELPTNAAGKIMKYLLKDSS

SEQ ID NO: 163750 - protein, 161 aa, Unknown
  Bacterial polypetide isolated from the Sargasso Sea
MKILEYIWLDGYQPEPSLRSKIKVTKDETPPDWSFDGSSTQQAEGGSSDCLILPVQTYDGPLFADQLVMCEVETGEHKTHPSNMRAGAAQVVTDEWWFGFEQEYFFTDMNGEPLGWEDGTPRPQGDYYCGVGASNVQGREISEVHLEACLAAGIEITGTNA

SEQ ID NO: 163751 - protein, 454 aa, Unknown
  Bacterial polypetide isolated from the Sargasso Sea
MSIFYTFSMLTNISNYLQNKFLARTRNKLMMNWSSESLMIQERRKREEIRISENRPHKVFYYHQVDDPYSILVLPILEKIKKSYRIDLECILVGNPPGKTIPEPTMFQIHCLNDVRNIAKWYGQERKISNYPSKTDIDSANKILSNCTQANFIQLASDIMECLWFEDGKNINDVTIEPSQLNKETNLVIEKGNKFRKENGYYSSSSFYYEGESYWGLDRLNHLEDRLIDLGLKSLDTYGYLADRKSNIQNYSTKDNSLNLTIYPSLNSPYTYICFPRIRHIIDKYQINVITKPVLPMLMRGMHIPRYKGKYILGDAAREGRINDIYFDKIYSPLGKPAELAYSLFPIINEYNKGFAYIEKLTIASFHDGINIGNTTFLKNLVNDLNLSWDEIKKDLGKKEWKKILDENLKEMYDGNCWGVPSFKVTDENDENPFYQWGQDRIWLIEEEIIKRLN

SEQ ID NO: 163752 - protein, 182 aa, Unknown
  Bacterial polypetide isolated from the Sargasso Sea
SDAHLEACLDLGITLTGTNAEVALGQWEYQCFGKGIKAADDLWVSRYLLYKIAEEYGVGVNIHPKPKTGDWNGSGMHCNFSNEAMRTAGSEELFSSMCDKLGEVHEEGIASYGSDNDMRLTGLHETQSIDKFSYGVSDRGASIRIPVYTVEHDWNGYLEDRRPASNADPYKILAHIVGTLSK

SEQ ID NO: 163753 - protein, 108 aa, Unknown
  Bacterial polypetide isolated from the Sargasso Sea
MSAANVLKFIKEKEAEFVDLRFTDPRGKLQHLTMDSSVVDEGMLNEGVFFDGSSIAGWKAINESDMILKPDTARMFMDPFTSHNTVVLFCDILDAIKKDPYERDPRGV

SEQ ID NO: 163754 - protein, 77 aa, Unknown
  Bacterial polypetide isolated from the Sargasso Sea
MSAKDVLKFIKDKEAEFVDLRFTDPRGKLQHLTMDSTAVDDGMLNDGVFFDGSSIAGWKAINESDMILKPRFIKIFF

SEQ ID NO: 163755 - protein, 146 aa, Unknown
  Bacterial polypetide isolated from the Sargasso Sea
GDHLWMARYLLYRAGEMHGLTISIDAKPMKGDWNGAGMHTNFSTNAMRDSYEAVEKAAQSMGAPGKPEEHLAGYGVGIEDRLTGEHETQRFDQFSYGVSDRGASIRIPWQVARDGKGYLEDRRPNANADPYVVAALLTNTCCEVLA

SEQ ID NO: 163756 - protein, 226 aa, Unknown
  Bacterial polypetide isolated from the Sargasso Sea
MANESKEALKLMQDNGCDVLDIKFIDLPGVWQHVSVPITEVNDGLFANGTGFDGSSIRGFQSIDESDMLLVPDKSTVKIDPFVDGQVTVIADIKDPVTGEFYTKDPRNVAKKAQEYLKSTGVGDSSFWGPEVEFFIFDSASFDYGPNHGFHHVDSDEGIWNSGESHMLDGITLNKSHRPKHKGGYFPVSPVDTQQDIRNEMIRIMQDSFDIKVEKQHHEVATAGQG

SEQ ID NO: 163757 - protein, 92 aa, Unknown
  Bacterial polypetide isolated from the Sargasso Sea
MSSTQVLKFIKDKEIEYVDLRFTDPRGKLQHLTMDATIVEEKMLNEGVFFDGSSIAGWKAINESDMILKPDLSRKVVDPFTSHNTLILFCDI

SEQ ID NO: 163758 - protein, 177 aa, Unknown
  Bacterial polypetide isolated from the Sargasso Sea
QACLDLRITLTGTNAEVALGQWEYQCFGTGIKAADDLWISRYLLYKIAEEYGVGVNIHPKPKTGDWNGSGMHTNFSNEEMRSKGSEELFSSLCDKLGAVHEEGIAAYGSDNDMRLTGLHETQSIDQFSYGVSDRGASIRIPVYTVEHNWNGYLEDRRPASNADPYKILAHIVGTLTK

SEQ ID NO: 163759 - protein, 136 aa, Unknown
  Bacterial polypetide isolated from the Sargasso Sea
ILKPDLSRKVIDPYTSHNTLILFCDILDAVKKDPYERDPRGIAKKAEAYLKKTGIGDTAYFGPEPEFFVFDDVRIKNDMNETSFSIDSSEGPYNSGKSYDNGNMGHRPGVKGGYFPVPPVDSAQDMRGEYLKGLRD

SEQ ID NO: 163760 - protein, 123 aa, Unknown
  Bacterial polypetide isolated from the Sargasso Sea
MSSKDVLKVMKDKSIEFVDLRFTDPRGKLQHLTMDSSVVDDGMLNDGVFFDGSSIAGWKAINESDMILKPDLSRKIVDPYTSHNTLILFCDILDAVKKDPYERDPRGIAKKAEKYLIKSGDRR

SEQ ID NO: 163761 - protein, 173 aa, Unknown
  Bacterial polypetide isolated from the Sargasso Sea
YIGGILKHAPSFLAFTNPTTNSYKRLVPGFEAPVNLVYSEGNRSAAVRIPLTGPSPKAKRLEFRSGDALANPYLAFSVMMLAGIDGIKNQIDPGDGVDVDLFELPADELAKIDTVPSSLNDSLNALKADKDYLLAGGVFTEDFIDNFIDIKYEEVQQLRQRPHPHEFFMYYDA

SEQ ID NO: 163762 - protein, 192 aa, Unknown
  Bacterial polypetide isolated from the Sargasso Sea
GKTPVFSGNKYAGLSQTALYYIGGILKHAKAINAFANATTNSYKRLIPGFEAPVLLAYSARNRSASCRIPITLSKKGARCEIRFPDASGNPYLTFASMLMAGIDGIKNKIDPGKSFDKDLYALSEREVKKVPTVCGSLREAMENLDKDRKFLTQGNVFTDDQIDAYIALKFEEIHNFEHTPHPIEFDMYYSC

SEQ ID NO: 163763 - protein, 67 aa, Unknown
  Bacterial polypetide isolated from the Sargasso Sea
MSARDVLKQIKSKNVEYVDLRFTDPRGKLQHLTMDKTIVDEDMLNEGVFFDGSSIAGWKAINESDMI

SEQ ID NO: 163764 - protein, 247 aa, Unknown
  Bacterial polypetide isolated from the Sargasso Sea
MANESKEALKLMKDNGCDVLDIKFIDLPGVWQHVSVPISEVDDGLFANGTGFDGSSIRGFQSIDESDMLLVPDQSTVKIDPFVDGQVTVIADIKDPVTGEKYNKDPRNIAKKAEEYLKSTGVGDTSFWGPEVEFFIFDSAQFDYGPNYSIHNVDSDEGIWNSGNPFMLDGETINKAHRPKHKGGYFPVSPVDTQQDIRNEMIRIMQDSFGIKVEKQHHEVATAGQGEIDIVYNTLLDTADNVMAYKY

SEQ ID NO: 163765 - protein, 189 aa, Unknown
  Bacterial polypetide isolated from the Sargasso Sea
NVVGREVSDAHLLACLDLGIELTGTNAEVALGQWEYQCFGKGIKAADDLWVSRYLLYKIAEEFGVGVNIHPKPKTGDWNGSGMHCNFSNEAMRSQGSEELFTSMCDKLGEVHEEGIASYGSDNDMRLTGLHETQSIDKFSYGVSDRGASIRIPVYTVEHDWNGYLEDRRPASNADPYKILAHIVGTLTK

SEQ ID NO: 163766 - protein, 75 aa, Unknown
  Bacterial polypetide isolated from the Sargasso Sea
MSASNVLKFIKDKEAEFVDLRFTDPRGKLQHLTMDATAVDEGMLNDGVFFDGSSIAGWKAINESDMILKPDLSRF

SEQ ID NO: 163767 - protein, 107 aa, Unknown
  Bacterial polypetide isolated from the Sargasso Sea
MSSSEVLKLMKDKEVEYVDLRFTDPRGKLQHLTMDSTVVDESMLNEGVFFDGSSIAGWKAINESDMILKPDLSRKVIDPYTSHNTLILFCDILDAVKKNPYERDPRG

SEQ ID NO: 163768 - protein, 127 aa, Unknown
  Bacterial polypetide isolated from the Sargasso Sea
MTASNVLKLIKDKEVEYVDLRFTDPRGKLQHLTMDATVVDEGMLNDGVFFDGSSIAGWKAINESDMILKPDLGRKVVDPFTSHNTLILFCDILDAVKKDPYERDPRGIAKKAEAYLKKTGIGDKAYF

SEQ ID NO: 163769 - protein, 93 aa, Unknown
  Bacterial polypetide isolated from the Sargasso Sea
MAGLDGIQNKIHPGDAMDKDLYDLPPEELSQIPTVCGSLREALDALNEDRSFLAQGNVFTDEQIDAYIDLKMEDVIRLEHTPHPVEFDIYYSY

SEQ ID NO: 163770 - protein, 235 aa, Unknown
  Bacterial polypetide isolated from the Sargasso Sea
SVVTDECGFGFEQEYFLTNPDGTILGWEDGTPTRPQGEYYCAVGAANVKGREISDAHLDACLDAGIELTGTNAEVALGQWEYQCFGKGIKAADDLWMSRYILYKVAEEFGVSVNIHPKPKTGDWNGSGMHSNFSNEEMRTSGSEELFSSMCDKLGEVHKEGITLYGSDNDMRLTGLHETQSIDQFSYGVSDRGASIRIPIYTVEHDWNGYLEDRRPASNADPYKIVAHIVGTLTS

SEQ ID NO: 163771 - protein, 100 aa, Unknown
  Bacterial polypetide isolated from the Sargasso Sea
AFSAMLMAGLDGIKNKIDPGDPTDINLYAASDEVLSKIQSTPGSLAESLEALEKDHAFLLEGDVFTKDVIETYISYKKESEVDPINIRPHPHEFKLYYDV

SEQ ID NO: 163772 - protein, 248 aa, Unknown
  Bacterial polypetide isolated from the Sargasso Sea
RSAHPSNTRSACVDILTDDWWFGFEQEYFFTNPEDGTILGWEDGTPRPQGDYYCGVGSGNVQAREVSEAHMDACLEAGITITGTNAEVALGQWEYQCFGKGLKAADDLWVSRYLLHLIAEEYGVSVNIHPKPQEGDWNGSGMHTNFSNEQMRSAGSEELFNSMCEKLGEVHAEGIANYGSDNDKRLTGNHETQSIDTFSYGVSDRGASIRIPIYTVENDWNGYLEDRRPASNADPYKIISHIVGTLTQ

SEQ ID NO: 163773 - protein, 172 aa, Unknown
  Bacterial polypetide isolated from the Sargasso Sea
LGITLTGTNAEVALGQWEYQCFGKGIKAADDLWVSRYLLYKIAEEYGVGVNIHPKPKTGDWNGSGMHCNFSNEAMRTAGSEELFSSMCDKLGEVHEEGIASYGSDNDMRLTGLHETQSIDKFSYGVSDRGASIRIPVYTVEHDWNGYLEDRRPASNADPYKILAHIVGTLSK

SEQ ID NO: 163774 - protein, 219 aa, Unknown
  Bacterial polypetide isolated from the Sargasso Sea
YFFTSDNGEPLGWEDGTPRPQGDYYCGVGAGNVEGRDISEAHLEACLEAGIELTGTNAEVALGQWEYQCFGKGIKAADDLWVSRYLLYKIAEDFGVGVNIHPKPKTGDWNGSGMHTNFSNEEMRTAGSESLYNSLCDKLGQVHKEGIALYGSDNNMRLTGLHETQSIEKFSYGVSDRGASIRIPIYTVENNWNGYLEDRRPASNADPYKIINHIVSTLK

SEQ ID NO: 163775 - protein, 108 aa, Unknown
  Bacterial polypetide isolated from the Sargasso Sea
MSNSIIAEYIWLDKNKNLRSKARTLNFSTDSTISIPTNAWPKWTYDGSSTGQASGHDSEITIIPRAVFDCPFRGNRHKLIICDTYDSEGKPTESNTRYSADHIFRSFR

SEQ ID NO: 163776 - protein, 123 aa, Unknown
  Bacterial polypetide isolated from the Sargasso Sea
MSSNKVLKLMKDKEIEFVDLRFTDPRGKLQHLTMDSTIVDDDMLNDGVFFDGSSIAGWKAINESDMILKPDLSRQVIDPYTSHNTLIIFCDILDAVKKTPYERDPRGIAKKAEAYLKKSGVGD

SEQ ID NO: 163777 - protein, 132 aa, Unknown
  Bacterial polypetide isolated from the Sargasso Sea
MKIKAEYIWIDGKTPTAKLRSKTKIMDQGTEPPIWGFDGSSTEQATGDQSDCVLKPVAQFPDPIRGGDNILVMCEVLNVDMTPHASNTRAACVASSENFSEFEPMFGLEQEYTFYEQSYDSLKYGQPLGSLL

SEQ ID NO: 163778 - protein, 84 aa, Unknown
  Bacterial polypetide isolated from the Sargasso Sea
MAEYIWIGGDKTTGGFDLRSKTKTLSSKPGSVADLPVWNYDGSSTGQAPGTDSEVLLKPVRIYADPFRGGDNIMVLCETLSPKM

SEQ ID NO: 163779 - protein, 226 aa, Unknown
  Bacterial polypetide isolated from the Sargasso Sea
MSSSADILKKIKDEEIEYLDLRFTDPRGKLQHVSILGDGVDEDLLDDGWMFDGSSIAGWKSIDQSDMKLVADCSSSYVDPFYAEKTLCIHCNVAEPDTGELYNRDPRSTAVKAESYLKSSGLGDVSYFGPEAEFFLFDDVKFSNTMNKVSYEVDAIDASWNTDADLEMGNMGHRPGVKGGYFPVNPVDAGQDIRSEMLSTMKRMGMSVDKHHHEVASNQHELGLIF

SEQ ID NO: 163780 - protein, 222 aa, Unknown
  Bacterial polypetide isolated from the Sargasso Sea
VDTQLPPGFPVNGYPGPQGPYYCSVGAGNAFGRECVEEHFDMCLAAGINVEGINAEVAAGQWEFQVFAKGAKRAGDETWVARYLLERVGEKYGFSINWHPKPFGKLDWNGSGMHANFSNEVMRTAGEEAVFTKICEEFGKNIERHISVYGADNDQRLTGDHETQSIDTFSYGISDRGASIRIPVSTHTDGWIGRLEDRRTASNADPYKVAAAIVKTTKEALA

SEQ ID NO: 163781 - protein, 125 aa, Unknown
  Bacterial polypetide isolated from the Sargasso Sea
MNKIRAEYIWMDGHEPTQKLRSKTKVLDGPIDSLEKLPFWGFDGSSTNQAEGNNSDCMLKPVFKTLDPIRGGNDILVMCEVMNADGSPHPTNSRNNLKTISEKYSNEEPWFGIEQEYTLFEGRNP

SEQ ID NO: 163782 - protein, 144 aa, Unknown
  Bacterial polypetide isolated from the Sargasso Sea
GFEAPVLLAYSARNRSASCRIPFVGSPNGKRVEVRFPDATANPYLAFSAMLMAGLDGIQNKIHPGDPMDKDLYELPESELQNIPTVCGSLREAVDALKDDMSFLTKGGVFTEDQIEAYIDLKMEEVIEFEHAPHPVEFKMYYSS

SEQ ID NO: 163783 - protein, 117 aa, Unknown
  Bacterial polypetide isolated from the Sargasso Sea
KAARCEIRFPDAAGNPYLTFSAMLMAGLDGIKNKINPGKPVDEDLYTMPEEKVKNIPTVCGSLREAMESLDRDRKFLIQGGVFTDDQIDAYIALKFEEIYKLEHTPHPMEFEMYYSC

SEQ ID NO: 163784 - protein, 230 aa, Unknown
  Bacterial polypetide isolated from the Sargasso Sea
MKKLEYVWLDGYQPEPMMRSKVKVIDGEIPGNSGSDLPDWSFDGSSTQQAEGGDSDCILKPVTTYPGPLHSDSLVMCEVMSPDKSPHPSNTRNACIDLLSDEWWFGFEQEYFFTNPEDGTILGWEDGTPRPQGDYYCGVGAGDVYGREISQAHMDACIDAGIKITGTNAEVALGQWEYQCFGKGLKAADDLWMSRYLLHLVAEEFGVAVNTHPKPQEGDWNGSGMHTNFS

SEQ ID NO: 163785 - protein, 161 aa, Unknown
  Bacterial polypetide isolated from the Sargasso Sea
VALGQWEYQCFGKGIKAADDLWVSRYLLYKVAEEYGVGVNIHPKPKSGDWNGSGMHTNFSNEAMRTAGSEELFSSMCDKLGEVHAEGIAAYGSDNDQRLTGLHETQKITEFSYGVSDRGASIRIPVYTVEHDWNGYLEDRRPASNADPYKIIAHIVGTLTK

SEQ ID NO: 163786 - protein, 311 aa, Unknown
  Bacterial polypetide isolated from the Sargasso Sea
YFLFEADRNGEPVPLDRSSYFDLTTSDVVSNIRRKTLTTLEAMGIPVEYSFHEDAPSQYEIDLRYTDALTMADNVMTFRLIVREIALEHGVHATFMPKPLSGVQGSGMHTHLSLFKDGSNAFHDPESPDGLSDVAKGFIAGLLHHAREITAVTNQLVNSYKRLVTGYEAPVNVSWARANRAALIRVPAAREAGVDDTTRIEYRAPDPACNPYLTFAVILAAGMKGIEQGYELPLEAPPSMTGFTEHGGLIDQAQLPQSLDEALDEMEKSDLVADTLGDHLFSWFLRNKRREWNEYKAQVTPFELDRYYTSL

SEQ ID NO: 163787 - protein, 171 aa, Unknown
  Bacterial polypetide isolated from the Sargasso Sea
MTPKEAVEFAKSNNARILDLKFMDFIGSWQHFSVPIGELEESLFEDGLGFDGSSIRGWQAINNSDMIVIPDPGTTVMDPFMKDATVSMICNIFDPITKEKYSRDPRNIAQKAEAYLKSTGIGDTAYFGPEAEFFIFDNVQYDSTANESFYSIDSEEGTWNTGSDEAPNLGH

SEQ ID NO: 163788 - protein, 168 aa, Unknown
  Bacterial polypetide isolated from the Sargasso Sea
LTGTNAEVALGQWEYQCFGKGIKAADDLWVSRYLLYKIAEEFGVGVNIHPKPKTGDWNGSGMHCNFSNEAMRTAGSEELFTSMCDKLGEVHEEGIASYGSDNDMRLTGLHETQSIDKFSYGVSDRGASIRIPVYTVEHDWNGYLEDRRPASNADPYKILAHIVGTLSK

SEQ ID NO: 163789 - protein, 148 aa, Unknown
  Bacterial polypetide isolated from the Sargasso Sea
PGFEAPTILGLSARNRTAAFRVPMYDPDNKAAKRVEFRSADGTCNPYLAFPAMLMAGLDGIENEIDPGDVLDQDLFSMSDEEQAKLKQVPSSIDGALNALEDDHEFLLKGDVFTSDLLEAWISYKRETEVDQVRTRPHPWEYYLTFNA

SEQ ID NO: 163790 - protein, 200 aa, Unknown
  Bacterial polypetide isolated from the Sargasso Sea
HLDGSGMHTHISLFKGNQNVFYNPKDPFYLSKEARQFMAGLYRHSSEITAITNQWVNSYKRLVPGFEAPAFNSLAFSGGWGNLIRVPKSRPEKGNSVRVEYRSPDPACNPYLAFSVILAAGLEGIKNSYEIPNKEDKSNIIGERLPTNLKDALDKLSKSSLVKKCLGKETLEIFLNNKYREWEEYQKTVSEVEIKKYINL

SEQ ID NO: 163791 - protein, 91 aa, Unknown
  Bacterial polypetide isolated from the Sargasso Sea
MSASKIKKLMKDKEVEYVDLRFTDPRGKLQHLTMDSTVVDEEMLEKGVFFDGSSIAGWKAINESDMILKPDLNRPIIDPFNSHTTLNIFCD

SEQ ID NO: 163792 - protein, 235 aa, Unknown
  Bacterial polypetide isolated from the Sargasso Sea
MDIKMVDMRFTDIPGTTQHFTIPIKFLDEDIFSDGLGFDGSSVRGFQEIQDSDMIVLPDPSTAYIDPFFSEKTLALHCNIKDPVTLVDYSRDPRNIAKKAEAYLKSSGIGDTAFFGPEAEFFVFNNVQFDSGSNFAFHEVDSIEGTWNSGSDEGPNLGHKPRHKEGYFPLPPVDTLQDVRTEMVMTMQDIGLTVEAHHHEVATGGQCEIDLEFSPLLKMADDMMKYKYVVKNGCQ

SEQ ID NO: 163793 - protein, 144 aa, Unknown
  Bacterial polypetide isolated from the Sargasso Sea
ADDLWVSRYLLYKIAEEFGVGVNVHPKPKTGDWNGSGMHCNFSNEAMRTAGSEELFTSMCDKLGEVHEEGIASYGSDNDMRLTGLHETQSIDKFSYGVSDRGASIRIPVYTVEHNWNGYLEDRRPASNADPYKIVSHIVGTLTK

SEQ ID NO: 163794 - protein, 237 aa, Unknown
  Bacterial polypetide isolated from the Sargasso Sea
MKLKSSTPKDLMSEIKDMDIKMVDMRFTDIPGTTQHFTIPIKFLDEDIFSDGLGFDGSSVRGFQEIQDSDMIVLPDATTAYIDPFFSEKTLALHCNIKDPVTLVDYSRDPRNIAKKAEAYLKSSGIGDTAFFGPEAEFFVFNNVQFDSGSNFAFHEVDSVEGTWNSGADENPNLGHKPRHKEGYFPLPPVDTLQDVRTEMVMTMQDIGLTVEAHHHEVATGGQCEIDLEFSPLLKMA

SEQ ID NO: 163795 - protein, 92 aa, Unknown
  Bacterial polypetide isolated from the Sargasso Sea
MSSKNILKLMKDKQVEYVDLRFTDPKGKLQHLTMDSTVVDEDMLDKGVFFDGSSIAGWKAINESDMILKPDLGRQLIDPLILIQLLIYFVIS

SEQ ID NO: 163796 - protein, 177 aa, Unknown
  Bacterial polypetide isolated from the Sargasso Sea
DACLEAGIMITGTNAEVALGQWEYQCFGKGLKAADDLWVSRYLLHLIAEEYGVSVNIHPKPQQGDWNGSGMHTNFSNEQMRSAGSEELMTSMCDKLGEVHAEGISNYGSDNDMRLTGNHETQSIDTFSYGVSDRGASIRIPIYTVENDWNGYLEDRRPASNADPYKIISHIVGTLTK

SEQ ID NO: 163797 - protein, 201 aa, Unknown
  Bacterial polypetide isolated from the Sargasso Sea
MAKTSQDVLRQIKDEGIELIDLKFTDLHGKWQHLTVCTDLLEEESFTEGLAFDGSSIRGWKGIQASDMAMVPDPNTAWVDPFYRHKTLSMICSIQEPRTGLPYERCPRALAQRALDYLSSTGLADMAFFGPEPEFFLFDDVRYNSSSGGAFYSVDTIEAGWNTGRLEEGGNLAYKIQEKEGYFPVAPNDTAQDIRSEMLLL

SEQ ID NO: 163798 - protein, 294 aa, Unknown
  Bacterial polypetide isolated from the Sargasso Sea
MKKLEYIWLDGFQPEPSLRSKVKVTDGSPPDWSFDGSSTQQADGSSSDCIIRPVNEYVGPRNSDSLVMCEVLSSDRSAHPSNTRSACVDILTDDWWFGFEQEYFFTNPEDGTILGWEDGTPRPQGDYYCGVGSGNVQAREVSEAHMDACLEAGIMITGTNAEVALGQWEYQCFGKGLKAADDLWVSRYLLHLIAEEYGVSVNIHPKPQEGDWNGSGMHTNFSNEQMRSAGSEELFNSMCEKLGEVHAEGIANYGSDNEKRLTGNHETQSIDTFSYGVSDRGASIRIPIYTVEND

SEQ ID NO: 163799 - protein, 70 aa, Unknown
  Bacterial polypetide isolated from the Sargasso Sea
MSSSDVLKTIKDKDIEYVDLRFTDPRGKLQHVTMDAKMVDEDMLNEGIFFDGSSIAGWKAINESDMILKP

SEQ ID NO: 163800 - protein, 237 aa, Unknown
  Bacterial polypetide isolated from the Sargasso Sea
MKLKSSTPKDLMSEIKDMDIKMVDMRFTDIPGTTQHFTIPIKFLDEDIFSDGLGFDGSSVRGFQEIQDSDMIVLPDATTAYIDPFFSEKTLALHCNIKDPVTLVDYSRDPRNIAKKAEAYLKSSGIGDTAFFGPEAEFFVFNNVKFDSGSNFAFHEVDSVEGTWNSGADENPNLGHKPRHKEGYFPLPPVDTLQDVRTEMVMTMQDIGLTVEAHHHEVATGGQCEIDLEFSPLLKMA

SEQ ID NO: 163801 - protein, 70 aa, Unknown
  Bacterial polypetide isolated from the Sargasso Sea
MSSNKVLKLMKDKEIEFVDLRFTDPRGKLQHLTMDSTIVDDDMLNDGVFFDGSSIAGWKAINESDMILKP

SEQ ID NO: 163802 - protein, 257 aa, Unknown
  Bacterial polypetide isolated from the Sargasso Sea
SSLTQVHSADHKTHPSNTRAAAEAVVSDEWWFGFEQEYFFTNKDGSPLGWEEGEPRPQGDYYCGVGADNVSGREVSEAHLDACLAAGISLTGTNAEVALGQWEYQCFGKGIKAADDLWVSRYLLYKVAEEYGVGVNIHPKPKKGDWNGSGMHTNFSNEAMRTAGSEELFSSMCDKLGEVHAEGIAAYGSDNDQRLTGLHETQKITEFSYGVSDRGASIRIPVYTVEHDWNGYLEDRRPASNADPYKIIAHIVGTLTK

SEQ ID NO: 163803 - protein, 112 aa, Unknown
  Bacterial polypetide isolated from the Sargasso Sea
EIRFPDAAGNPYLTFSAMLMAGLDGIKNKINPGKPLDEDLYALPEDKVKNIPTVCGSLREAMESLDRDRGFLKQGGVFSDDQIDAFIALKFEEIYNLEHTPHPMEFEMYYSS

SEQ ID NO: 163804 - protein, 166 aa, Unknown
  Bacterial polypetide isolated from the Sargasso Sea
MKLKSSTPKDLMSEIKDMDIKMVDMRFTDIPGTTQHFTIPIKFLDEDIFSDGLGFDGSSVRGFQEIQDSDMIVLPDATTAYIDPFFSEKTLALHCNIKDPVTLVDYSRDPRNIAKKAEAYLKSSGIGDTAFFGPEAEFFVFNNVQFDSGSNFAFHEVDSVEGTGIG

SEQ ID NO: 163805 - protein, 169 aa, Unknown
  Bacterial polypetide isolated from the Sargasso Sea
HAKGLTAITNPTTNSYHRLVPGYEAPVYIAWSSSNRSATIRIPGHFKGEKYAYMKRMEYRVPDPASNPYLVFSAVLAAGLDGIKKKIEPGDPVKEDIYKMTKSERKKHGIDTLPANLGRALDELESDRKYLTPIFSSEVLDKIIDLERRDHREIAIRPHPHEFYLYFDV

SEQ ID NO: 163806 - protein, 259 aa, Unknown
  Bacterial polypetide isolated from the Sargasso Sea
TAGQCEIDIKYDLMTNSADGAQSYKYVLRNVAQQFGKVATMMPKPISMDAGSGMHTNVSLWKKDENTFYDKDEVLELSQTGRYFCGGVMEHAKGLTAITNPTTNSYHRLVPGYEAPVYIAWSSSNRSATIRIPGHFKGEKYAYMKRMEYRVPDPASNPYLVFSAVLAAGLDGIKKKIEPGDPVKEDIYKMTKSERKKHGIDTLPANLGRALDELESDRKYLNPIFSNEVLDKIIELERRDHREIAIRPHPHEFYLYFDV

SEQ ID NO: 163807 - protein, 252 aa, Unknown
  Bacterial polypetide isolated from the Sargasso Sea
DIKYDYMTNAADGAQSYKYVVRNVAAEFGKVATMMPKPISMDSGSGMHTNVSLWKKDVNTFYDKDEELELSQTGRYFCGGVMEHAKGLTAITNPTTNSYHRLVPGYEAPVYIAWSSSNRSATIRIPGHFKGEKYAFMKRMEYRVPDPASNPYLVFSAVLAAGLDGIKKKIEPGDPVKEDIYKMTKSERIKRGIDTLPANLGRALDELESDRKYLSPIFDNEVLDKIIELERRDHREIAIRPHPHEFYLYFDV

SEQ ID NO: 163808 - protein, 293 aa, Unknown
  Bacterial polypetide isolated from the Sargasso Sea
MGKSKLEYLWLDGYKPTQSLRGKTKVVSDFSGKLEDCPIWAFDGSSTQQAPGGSSDCLLKPVAIYPDPVRKDGWIVMNEVLNSDGSPHESNGRATIDDDDDDFWFGFEQEYFLWDPETNLPLGFPKDQTPQGQFYCSVGGKNAFGREIMDRHLDICIDAGINIEGTNAEVAAGQWEFQIFAKGAAKAGDEIWVARYFLERLAEEYGLAIEYHPKPLGATDWNGSGMHANFSNTTLRTCGSKETYEAICEAFRPVVNEHIAVYGAYNDQRLTGDHETQSITEFSYGVSDRGASI

SEQ ID NO: 163809 - protein, 135 aa, Unknown
  Bacterial polypetide isolated from the Sargasso Sea
SEGPYNTGKDYENGNMGHRPGIKGGYFPVPPVDSAQDMRGEFLKALRDMGIKAEKHHHEVAPSQHELGIYFDTLTTQADNMQLYKYGVQMVAHSFGKTATFMPKPVKGDNGSGMHTHQSLWKGSTALFSGNKYAG

SEQ ID NO: 163810 - protein, 34 aa, Unknown
  Bacterial polypetide isolated from the Sargasso Sea
TALHYIGGILKHAKAINAFSNATTNSYKRLIPGF

SEQ ID NO: 163811 - protein, 72 aa, Unknown
  Bacterial polypetide isolated from the Sargasso Sea
MSAKDVLKLMKSKNIEFVDLRFTDPRGKLQHLTMDTTIVDEGMLNDGVFFDGSSIAGWKAINESDMILKPDL

SEQ ID NO: 163812 - protein, 118 aa, Unknown
  Bacterial polypetide isolated from the Sargasso Sea
KKGARCEIRFPDAAGNPYLTFSAMLMAGLDGIKNKIHPGESFDKDLYTLPEEEIKNIPTVCGSLREAMESLDTDREFLKQGNVFTDDQIDAYIALKFEEIYNLEHTPHPIEFQMYYSS

SEQ ID NO: 163813 - protein, 237 aa, Unknown
  Bacterial polypetide isolated from the Sargasso Sea
AAEAVVSDEWWFGFEQEYFFTNKDGSPLGWEEGEPRPQGDYYCGVGADNVSGREVSEAHLDACLAAGISLTGTNAEVALGQWEYQCFGKGIKAADDLWVSRYLLYKVAEEYGVGVNIHPKPKKGDWNGSGMHTNFSNEAMRTAGSEELFSSMCDKLGEVHAEGIEAYGSDNDQRLTGLHETQKITEFSYGVSDRGASIRIPVYTVEHDWNGYLEDRRPASNADPYKIIAHIVGTLTK

SEQ ID NO: 163814 - protein, 95 aa, Unknown
  Bacterial polypetide isolated from the Sargasso Sea
MSASNVLKFIKDKEAEFVDLRFTDPRGKLQHLTMDTTAVDEGMLNEGVFFDGSSIAGWKAINESDMILKPDLSRFFLDPFTSHNTVVIFCDILDA

SEQ ID NO: 163815 - protein, 40 aa, Unknown
  Bacterial polypetide isolated from the Sargasso Sea
TATFMPKPDAGDNGSGMHTHQSIWKGDTPVFSGDAYSGLS

SEQ ID NO: 163816 - protein, 235 aa, Unknown
  Bacterial polypetide isolated from the Sargasso Sea
MKYNCKTAKELLKKIKNEDIKMVDLRFTDLPGSTHHISIPIKYLKEDLFKDGVGFDGSSVRGFQSIENSDMTMVPDVTTGYIDPFYSEKTIAFYCNIVNPITYESYPKDPRYIAQKAEQFLKSSGLGDTAYFGPEAEFFVFNDVKYDSGSNFAFHEVDSIEGAWNTGRDENPNLGHKPRHKGGYFPLPPADSLQDVRTEMVLTMEEIGVNVEASHHEVATGGQCEIDLEFSPLLS

SEQ ID NO: 163817 - protein, 268 aa, Unknown
  Bacterial polypetide isolated from the Sargasso Sea
MKKLEYIWLDGFQPEPSLRSKVKVTDESPPDWSFDGSSTQQADGSSSDCIIRPVNEYVGPRNSDSLVMCEVLSPDRSAHPSNTRSACVDILTDDWWFGFEQEYFFTNPEDGTILGWEDGTPRPQGDYYCGVGSGNVQAREVSEAHMDACLEAGIMITGTNAEVALGQWEYQCFGKGLKAADDLWVSRYLLHLIAEEYGVSVNIHPKPQEGDWNGSGMHTNFSNEQMRSAGSEELFNSMCEKLGEVHAEGIANYGSDNEKRLTGNHETQ

SEQ ID NO: 163818 - protein, 97 aa, Unknown
  Bacterial polypetide isolated from the Sargasso Sea
MSAKDVLKFIKDKEAEFVDLRFTDPRGKLQHLTMDATAVDDGMLTDGVFFDGSSIAGWKAINESDMILKPDLTRFFLDPFTSHNTVVLFCDILDAIK

SEQ ID NO: 163819 - protein, 147 aa, Unknown
  Bacterial polypetide isolated from the Sargasso Sea
MVPGFEAPVMLAYSARNRSASIRIPYVASPKARRIEARFPDPAANPYLAFAALLMAGIDGIQNKIHPGDAADKNLYDLPPEEGKLIPQVCGSLKEALEELDKGRAFLTKGGVFSDDFIDAYIELKSEEEIKVRTFVHPLEYDLYYSV

SEQ ID NO: 163820 - protein, 247 aa, Unknown
  Bacterial polypetide isolated from the Sargasso Sea
NTGLEPEFSLFKRDEKGGLQTVDDTDVLDKPCYDYKGLSRSREFLETLVESLQKVDFDVYQIDHEDANGQFEINYTYGDALESADRFTFVRMAAGEIANDLGMICSFMPKPASDRTGNGMHFHLSITDDAGKNLFNDDSDVNGMGLSKMAYHFTAGLLHHAKALCAISAPTVNSYKRLVVGGSASGATWAPAYIAYGDNNRSAMVRIPYGRLEFRLPDSGCNPYLVHAALIAAGLDGIERELDPGEP

SEQ ID NO: 163821 - protein, 125 aa, Unknown
  Bacterial polypetide isolated from the Sargasso Sea
MSSSEVLKLIKDKEIEYVDLRFTDPRGKLQHLTMDTTVVDNTMLNEGVFFDGSSIAGWKAINESDMILKPDLSRKVIDPFTSHNTLVLFCDILDAVKKDPYERDPRGIAKKAEAYLKKTGIGDKA

SEQ ID NO: 163822 - protein, 73 aa, Unknown
  Bacterial polypetide isolated from the Sargasso Sea
MSAANVLKFIKEKDAEFVDLRFTDPRGKLQHLTMDASIVDEDMLNQGVFFDGSSIAGWKAINESDMIFKPDTA

SEQ ID NO: 163823 - protein, 276 aa, Unknown
  Bacterial polypetide isolated from the Sargasso Sea
MKVLEYIWLDGYQPEPSLRSKIKVTKDERPPDWSFDGSSTQQAEGGSSDCLLLPVQTYDGPLFADSLVMCEVQTGEHKTHVSNMRAAAAKIVTDEWWFGFEQEYFFTDEKGEPLGWENGTPRPQGDYYCGVGASNVEGREISELHLEACLEAGIELTGTNAEVALGQWEYQCFGKGIKAGDDLWVSRYLLYKIAEDFGVGVNIHPKPKTGDWNGSGMHTNFSNDEMRTNGSESLYTSLCEKLGEVHDDAIISYGSDNDMRLTGLHETQSIDKFSYG

SEQ ID NO: 163824 - protein, 132 aa, Unknown
  Bacterial polypetide isolated from the Sargasso Sea
MSDVSSVLEMIKENDIRFVDLRFTDPRGKWQHLTQAVSTIDEDSLIEGFMFDGSSIAGWKAINESDMCLKPDLSTATIDPFFAQATLVLVCDISEPTTGAAYNRDPRSTAKAAIEYMASQGIGDTAFLARKQ

SEQ ID NO: 163825 - protein, 155 aa, Unknown
  Bacterial polypetide isolated from the Sargasso Sea
EYQCFGKGLKAADDLWVSRYLLHLIAEEYGVSVNIHPKPQQGDWNGSGMHTNFSNEQMRSAGSEELMTSMCDKLGEVHAEGISNYGSDNDMRLTGNHETQSIDTFSYGVSDRGASIRIPIYTVENDWNGYLEDRRPASNADPYKIISHIVGTLTK

SEQ ID NO: 163826 - protein, 175 aa, Unknown
  Bacterial polypetide isolated from the Sargasso Sea
MTAAKDILKQFQNGEVKYLDLRFTDPKGKLQHLTLDGSVVNDELFADGAFFDGSSISGWKAINESDMVLMPDPSTTIIDPFTAQPTMIVFCDILDALTKETYERDPRGIARRAEEYLKTSGIGDTIYMGPEAEFFVFDDVKFQVDMNKSMFEVDSVEGPYNSGRSYESNNLGHRP

SEQ ID NO: 163827 - protein, 148 aa, Unknown
  Bacterial polypetide isolated from the Sargasso Sea
MGTANEVLKKFKNGEVKYLDMRFTDPKGKLQHLTMDGTAVDDDLLNSGVFFDGSSISGWKAINESDMVLKPDLSTTVMDPFTAQPTLIVFCDVLDAVSKEPYERDPRGTARKAEEYVRASGIGDTIYMGPEAEFFIFDDVKFQVDMNK

SEQ ID NO: 163828 - protein, 136 aa, Unknown
  Bacterial polypetide isolated from the Sargasso Sea
MRAENVLKFIKEKDAEFVDLRFTDPRGKLQHLTMDASIVDADMLNEGVFFDGSSIAGWKAINESDMILKPDTARMFMDPFTSHNTVVLFCDILDAIKKDPYERDPRGVAKKAEEYLKASGIGDKAFFGPEPEFFVF

SEQ ID NO: 163829 - protein, 306 aa, Unknown
  Bacterial polypetide isolated from the Sargasso Sea
RICPFLDMTPSYPDMFCLPDPEAVIQLPWKPEVAWVPGNLSMNDKLVDQAPRVILSKLIDKAKTSGYVMMGGVEPEFMLISKDGQSISDSKDIAGKPCYDQQALMRRYDVISEICDSMINLGWGTYQNDHEDANGQFEMNWDYSDLMTTADRQAFFKFMVKSIAEKHELRATFMPKPFSHLTGNGCHMHISLWNTNKSKNLFHDDKGELGLSSLGYNFLGGLIQNAIGMCAITNPTVNSYKRLNAPVTNSGATWSPNTVTYGGNNRTHMIRIPGPGRIEFRLADGAANPYLMAAAILASGLDGIEN

SEQ ID NO: 163830 - protein, 141 aa, Unknown
  Bacterial polypetide isolated from the Sargasso Sea
IRGWKAINESDMAMVPDASTAWVDPFYGEKTLSLICSIQEPRSGQPYERCPRALAQKAIDHLASTGLADTAFFGPEPEFFIFDDVRFNSGNGSSFYSCDSVEAPWNSARQEEGGNLAYKIQLKEGYFPVAPNDTMQDMRSE

SEQ ID NO: 163831 - protein, 180 aa, Unknown
  Bacterial polypetide isolated from the Sargasso Sea
IGRYFCGGVMEHAKGLTAITNPTTNSYHRLVPGYEAPVYIAWSSSNRSATIRIPGHFKGEKYAYMKRMEYRVPDPASNPYLVFSAVLAAGLDGVKKKIEPGDPVKEDIYKMTKSERKKHGIDTLPANLGRALDELESDRKYLTPIFSNEVLDKIIDLERRDHREIAIRPHPHEFYLYFDV

SEQ ID NO: 163832 - protein, 124 aa, Unknown
  Bacterial polypetide isolated from the Sargasso Sea
LDPKPVKGDWNGAGMHTNFSTKQMRDDGGYEAIIAGCEALGKNAELHVKNYGSGIEDRLTGDHETQKFDTFSYGVSDRGASIRIPWQVEVEKKGYLEDRRPNANADPYVIAMLMIDTVCSAASS

SEQ ID NO: 163833 - protein, 127 aa, Unknown
  Bacterial polypetide isolated from the Sargasso Sea
MSSSNVLKFIKDNKIEYVDLRFTDPRGKLQHLTMDCTVVDKDMLEDGVFFDGSSIAGWKAINESDMILKPDLSRTVVDPFTSHNTLILFCDILDAIKKTPYERDPRGIAKKAEAYLKSTGIGDKAFF

SEQ ID NO: 163834 - protein, 241 aa, Unknown
  Bacterial polypetide isolated from the Sargasso Sea
RSKVKVIDDEIPGNSGSDLPDWSFDGSSTQQAEGGDSDCILRPVTTYPGPLHSDSLVMCEVMSPDKSPHPSNTRNACIDLLSDEWWFGFEQEYFFTNPEDGTILGWEDGTPRPQGDYYCGVGAGDVYGREISQAHMDACIDAGIKITGTNAEVALGQWEYQCFGKGLKAADDLWMSRYLLHLVAEEFGVAVNTHPKPQEGDWNGSGMHTNFSNDEMRNSGSEELMNSLCEKLGAVHEEGIS

SEQ ID NO: 163835 - protein, 101 aa, Unknown
  Bacterial polypetide isolated from the Sargasso Sea
MSASKVLKMMKDKQIEFVDLRFTDPRGKLQHLTMDASVVDGDMLTDGVFFDGSSIAGWKAINESDMILKPDLNRQIVDPFTSHNTLVLFCDILDAIKRNPY

SEQ ID NO: 163836 - protein, 254 aa, Unknown
  Bacterial polypetide isolated from the Sargasso Sea
VRSKLGEHEVHPSNTRSAAASVVTDEWWFGFEQEYFFTDKNGEPLGWEDGTPRPQGDYYCGVGASNVQGREISEVHLEACLAAGIEITGTNAEVALGQWEYQCFGKGIKAGDDLWVSRYLLYKIAEDFGVGVNIHPKPKTGDWNGSGMHANFSNEEMRTNGSEELYTSLCDKLGEVHSDAIASYGSDNDMRLTGLHETQSIDKFSYGVSDRGASIRIPIATVENSWNGYLEDRRPASNADPYSIMSHLVGTLTK

SEQ ID NO: 163837 - protein, 124 aa, Unknown
  Bacterial polypetide isolated from the Sargasso Sea
MCVNIHPKPKTGDWNGSGMHTNFSNEAMRTGGSEELYSSICDKLGAVHEEGIASYGSDNDMRLTGLHETQSIEKFSYGVSDRGASIRIPVATVENDWNGYLEDRRPASNADPYKILSHIVGTLT

SEQ ID NO: 163838 - protein, 83 aa, Unknown
  Bacterial polypetide isolated from the Sargasso Sea
MSASSVKKIIKDKEIEYVDLRFTDPRGKLQHVTMDATIVDEDMLNEGVFFDGSSIAGWKAINESDMILKPRFIKNGSRSIYIA

SEQ ID NO: 163839 - protein, 118 aa, Unknown
  Bacterial polypetide isolated from the Sargasso Sea
MSSKNVLKIMKDKEIEYVDLRFTDPKGKLQHLTMDATAVDEGVLNDGVFFDGSSIAGWKAINESDMILKPDLNRKVIDPFTSHNTLVLFCDILDAVNKNPYERDPRGIAKKAEVYLKK

SEQ ID NO: 163840 - protein, 216 aa, Unknown
  Bacterial polypetide isolated from the Sargasso Sea
PQTGEPLGWEDGTPREQGEYYCGVGAGNVVGREISDAHLEACLDLGITLTGTNAEVALGQWEYQCFGKGIKAADDLWVSRYLLYKIAEEYGVGVNIHPKPKTGDWNGSGMHCNFSNEAMRTAGSEELFSSMCDKLGEVHEEGIASYGSDNDMRLTGLHETQSIDKFSYGVSDRGASIRIPVYTVEHDWNGYLEDRRPASNADPYKILAHIVGTLTK

SEQ ID NO: 163841 - protein, 151 aa, Unknown
  Bacterial polypetide isolated from the Sargasso Sea
TIGSWIEAPVNIAYSAANRTASVRILNNYTASPKAKRIEFRCPDPSSNPYLAFSAILMAGLDGVKNKINPGKPTDINIYEAPASVLAKIPSTPGSLAESLNALEKDHKYLLNGDVFTKDNIETYISYKRDNEVSPMDLRPHPHEFNLYYDV

SEQ ID NO: 163842 - protein, 110 aa, Unknown
  Bacterial polypetide isolated from the Sargasso Sea
RFPDAAGNPYLLFSALLMAGLDGIKNKIDPGKSLDKDLYALSESEVKKIPTVCGSLREAMESLDKDRKFLTQGNVFTDDQIDAYIALKYEEIYNFEHTPHPMEFQMYYSC

SEQ ID NO: 163843 - protein, 129 aa, Unknown
  Bacterial polypetide isolated from the Sargasso Sea
SASCRIPITLSKKGARCEIRFPDAAGNPYLTFSAMLMAGLDGIKNKINPGKPLDEDLYALPEDKVKNIPTVCGSLREAMESLDRDRGFLKQGGVFSDDQIDAFIALKFEEIYNLEHTPHPMEFEMYYSS

SEQ ID NO: 163844 - protein, 115 aa, Unknown
  Bacterial polypetide isolated from the Sargasso Sea
MSSKNILKLMKDKQVEYVDLRFTDPKGKLQHLTMDATVVDEDMLTNGVFFDGSSIAGWKAINESDMILKPDLNRPIIDPFNSHPTLNIFCDILDAVKKDPYERDPRGTAKKAEEY

SEQ ID NO: 163845 - protein, 148 aa, Unknown
  Bacterial polypetide isolated from the Sargasso Sea
GIKAADDLWVSRYLLMKTAEEHGVGVNFHPKPKTGDWNGSGMHTNFSNEQMRSSGSEELFTSMCDKLGKVHEEGIAAYGSDNNMRLTGLHETQSIDKFSYGVSDRGASIRIPVYTVEHNWNGYLEDRRPASNADPYKIVSHIVGTLTK

SEQ ID NO: 163846 - protein, 130 aa, Unknown
  Bacterial polypetide isolated from the Sargasso Sea
AEEYGVGVNIHPKPKTGDWNGSGMHTNFSNEAMRTGGSEDLFKSMCEKLGEVHEDGIAAYGSDNDMRLTGLHETQSIEKFSYGVSDRGASIRIPVYTVEHNWNGYLEDRRPASNADPYKILSHIVGTLTK

SEQ ID NO: 163847 - protein, 97 aa, Unknown
  Bacterial polypetide isolated from the Sargasso Sea
MNAKDVLKLMKEKQVEFVDLRFTDPRGKLQHLTMDSTVVDDEMLNNGVFFDGSSIAGWKAINESDMILKPDLDRPIIDPFNSHTTLNIFCDILDAVK

SEQ ID NO: 163848 - protein, 242 aa, Unknown
  Bacterial polypetide isolated from the Sargasso Sea
MKYNCKTPKELLKKIKNEEIKMVDLRFTDMPGSTHHISIPVKYLTEDLFKDGVGFDGSSVRGFQSIENSDMAMVPDVTTGYIDPFYSEKTIAFTCDVVDPITYESYVRDPRYIAKKAEKYLRSSGMGDTAYFGPEAEFFVFNDVKYDSGSNFAFHEVDSVEGAWNTGKDENPNLGHKPRHKGGYFPLPPSDSLQDVRTEMVLTMEDIGINVEASHHEVATGGQCEIDLEFSPLLSMADDLLR

SEQ ID NO: 163849 - protein, 167 aa, Unknown
  Bacterial polypetide isolated from the Sargasso Sea
LKHAKAINAFSNATTNSYKRLIPGFEAPVILAYSARNRSASCRIPIINNPKAARMEIRFPDAAGNPYLTFASMLMAGIDGIKNKIDPGKSFDKDLYTLSESEVKKLPTVCGSLREAMQNLDKDRKFLTQGGVFTDDQIDAYIDLKFQEIYKFEHTPHPIEFEMYYSG

SEQ ID NO: 163850 - protein, 141 aa, Unknown
  Bacterial polypetide isolated from the Sargasso Sea
MSAQNVLKFIKEKEAEFVDLRFTDPRGKLQHLTMDSTVVDADMLNEGVFFDGSSIAGWKAINESDMILKPDTSRMFMDPFTSHNTVVLFCDILDAIKKDPYERDPRGVAKKAEEYLKASGIGDKAFFGPEPKFFVFDDVRI

SEQ ID NO: 163851 - protein, 261 aa, Unknown
  Bacterial polypetide isolated from the Sargasso Sea
MSSIIRNDDAIEYALREAHDNDVKFIRLWFTDILGTIKGFAITIDELENSLNRGMGFDGSAIEGYARSDERDLYALPDPTTFSILPWRPRTNAVARMFCDIVTPEDKYFDGDPREVLRQNLKRASDKGFTYYVSPELEYFYFKDSDNTKLLDSSGYFDQENSDLGTDLRRETVLTLEELGIPVASSHHEAAPSQHEIDLRHTDALTMADTVMTYKTVVKEIAMKHGYFASFMPKPLSNINGSGMHTNVSLFKGDENIFYSS

SEQ ID NO: 163852 - protein, 185 aa, Unknown
  Bacterial polypetide isolated from the Sargasso Sea
DPDLLSRTAKYYIAGLLKHASEMTLITNQWVNSYKRLVPGYEAPIYKTWATVSRSDLVRVPAYKPGKESAMRVEYRSPDPACNPYLAFAVMLASGLEGIENRYKLQKANEADVSRMAEAESKKAKVGVLPKDLSQAIEEAQGSKVLRSALGDHVFEKFIENKKIEWDNYRAQVTTYELDQYLKVL

SEQ ID NO: 163853 - protein, 229 aa, Unknown
  Bacterial polypetide isolated from the Sargasso Sea
MVVCFEQEYFFTNPEDGTILGWEDGTPRPQGDYYCGVGSGNVQAREVSEAHMDACLEAGIMITGTNAEVALGQWEYQCFGKGLKAADDLWVSRYLLHLIAEEYGVSVNIHPKPQEGDWNGSGMHTNFSNEQMRSAGSEELFNSMCEKLGEVHAEGIANYGSDNEKRLTGNHETQSIDTFSYGVSDRGASIRIPIYTVENDWNGYLEDRRPASNADPYKIISHIVGTLTQ

SEQ ID NO: 163854 - protein, 219 aa, Unknown
  Bacterial polypetide isolated from the Sargasso Sea
MKLKSSTPKDLMSEIKDMDIKMVDMRFTDIPGTTQHFTIPIKFLDEDIFSDGLGFDGSSVRGFQEIQDSDMIVLPDATTAYIDPFFSEKTLALHCNIKDPVTLVDYSRDPRNIAKKAEAYLKSSGIGDTAFFGPEAEFFVFNNVQFDSGSNFAFHEVDSVEGTWNSGADENPNLGHKPRHKESYFPLPPVDTLQDVRTEMVMTMQDIGLTVEAHHHEVA

SEQ ID NO: 163855 - protein, 99 aa, Unknown
  Bacterial polypetide isolated from the Sargasso Sea
MSASKVLSFIKENDVRFVDLRFTDTKGKEQHVTIPASQINEDFFEDGKMFDGSSIAGWKGINDSDMILMPQADTMLLDPFSEETTINITCDVIEPSTMQ

SEQ ID NO: 163856 - protein, 161 aa, Unknown
  Bacterial polypetide isolated from the Sargasso Sea
TNPTTNSYHRLVPGYEAPFYIAWSSSNRSATIRIPGHFKGEKYAYMKRMEYRVPDPASNPYLVFSAVLAAGLDGIKKKIEPGDPVKEDIYKMTKSERKKHGIDTLPANLGRALDELESDRKYLTPIFSNEVLDKIIDLERRDHREIAIRPHPHEFYLYFDV

SEQ ID NO: 163857 - protein, 55 aa, Unknown
  Bacterial polypetide isolated from the Sargasso Sea
MSVEDVLKIVKEKEVKFIDYRFTNTNGKEQHVTVTANEDGIKTDFAEGKMFDGSS

SEQ ID NO: 163858 - protein, 240 aa, Unknown
  Bacterial polypetide isolated from the Sargasso Sea
MKSKLEYIWLDGYSPTQSLRSKTQIRDNFGGTLEECPMWSFDGSSTQQADGSSSDCLLKPVAIIPDPDRQNAYLVMTEVLNADGTPHPTNGRATIDDDDADFWFGFEQEYFLWDIDTQLPPGFPQNGFPGPQGPYYCSVGASNAFGRDCVDEHLDLCLEAGINVEGINGEVAAGQWEFQVFAKGAADAGDQTWLARYLLERTGEKYGYAINWHPKPFGALDWNGSGMHANFSNGLMRDSG

SEQ ID NO: 163859 - protein, 125 aa, Unknown
  Bacterial polypetide isolated from the Sargasso Sea
MSSKNVLKLIKDKQVEFVDLRFTDPKGKLQHLTMDSTVVDEDMLNNGVFFDGSSIAGWKAINESDMILKPDLERPIIDPFNSHTTLNIFCDILDAVKKDPYERDPRGTAKKAEAYLKKTGIGDKS

SEQ ID NO: 163860 - protein, 95 aa, Unknown
  Bacterial polypetide isolated from the Sargasso Sea
MSASKIKKLMSDKEVEYVDLRFTDPRGKLQHLTMDSTVVDEDMLEKGVFFDGSSIAGWKAINESDMILKPDLNRPIIDPFNSHTTLNIFCDIMDA

SEQ ID NO: 163861 - protein, 151 aa, Unknown
  Bacterial polypetide isolated from the Sargasso Sea
FGKGIKAADDLWVSRYLLYKIAEDYGVGVNIHPKPKTGDWNGSGMHTNFSNDEMRNNGSEKLYHSLCDKLGEVHKDGINAYGSDNEMRLTGLHETQSIDQFSYGVSDRGASIRIPIYTVENNWNGYLEDRRPASNADPYRIVKHIVGTLTK

SEQ ID NO: 163862 - protein, 88 aa, Unknown
  Bacterial polypetide isolated from the Sargasso Sea
MSAANVLKFIKDKDAEFVDLRFTDPRGKLQHLTMDVSVVDEGMLNEGVFFDGSSIAGWKAINESDMILKPDTARMFMDPFTSHNTVVL

SEQ ID NO: 163863 - protein, 225 aa, Unknown
  Bacterial polypetide isolated from the Sargasso Sea
GFEQEYFFTNKDGSPLGWEDGTPRPQGDYYCGVGSDNVAGREISEAHLEACLDAGLTLTGTNAEVALGQWEYQCFGKGIKAADDLWVSRYLLYKIAEEFGVGVNIHPKPKTGDWNGSGMHTNFSNEEMRSNGSEALFSSMCDKLGEVHEEGIASYGSDNDMRLTGLHETQNIKQFSYGVSDRGASIRIPIYTVEHDWNGYLEDRRPASNADPYKILAHIVGTLTK

SEQ ID NO: 163864 - protein, 221 aa, Unknown
  Bacterial polypetide isolated from the Sargasso Sea
RGVYATFMPKPLNGVQGSGMHTHLSLFSQGKNVFHDPSGSLSATGQSFVAGLLYHAREITAVTNQLVNSYKRINEGYEAPRYVSWARNNRSSLVRIPVHKQDKPDSARIEYRAVDPACNPYLAFSVMLSAGLKGIEKNYELPPEATTNLYEMSRAEQKDLGVASLPSNLSEALDEMEASELVREALGDHIFEWFLRNKRTEWNEYQRQVTPFEIDQYLPNW

SEQ ID NO: 163865 - protein, 185 aa, Unknown
  Bacterial polypetide isolated from the Sargasso Sea
REISDAHLAACLDLGITLTGTNAEVALGQWEYQCFGKGIKAADDLWVSRYLLFKIAEEYGVGVNLHPKPKTGDWNGSGMHTNFSNKEMRSSGSKELFSSLCDKLGAVHEEGIASYGSDNDMRLTGLHETQKITEFSYGVSDRGASIRIPVYTVEHDWNGYLEDRRPASNADPYKIIAHIVGTLTK

SEQ ID NO: 163866 - protein, 186 aa, Unknown
  Bacterial polypetide isolated from the Sargasso Sea
GREISDAHLEACLDLGITLTGTNAEVALGQWEYQCFGKGIKAADDLWVSRYLLYKIAEEYGVGVNIHPKPKTGDWNGSGMHCNFSNEAMRTAGSEELFSSMCDKLGEVHEEGIASYGSDNDMRLTGLHETQSIDKFSYGVSDRGASIRIPVYTVEHDWNGYLEDRRPASNADPYKILAHIVGTLTK

SEQ ID NO: 163867 - protein, 244 aa, Unknown
  Bacterial polypetide isolated from the Sargasso Sea
PSNFRAAAAEVVSDEWWFGFEQEFFFTDPETGEPLGWENGEPRAQGEFYCGVGAGNVVGREISDHHLQACLDLGITLTGTNAEVALGQWEYQCFGTGIKAADDLWISRYLLYKIAEEYGVGVNIHPKPKTGDWNGSGMHTNFSNEEMRSKGSEELFSSMCDKLGKVHEEGIAAYGSDNDMRLTGLHETQNIDQFSYGVSDRGASIRIPVYTVEHDWNGYLEDRRPASNADPYKILAHIVGTLTK

SEQ ID NO: 163868 - protein, 118 aa, Unknown
  Bacterial polypetide isolated from the Sargasso Sea
KKGARCEIRFPDASGNLYLTFASMLMAGLDGIKNKIDPGESFDKDLYALSEDEVKKVPTVCGSLREAMENLDKDRDFLKQGDVFTDDQIDAYIALKFEEIHNFEHTPHPIEFDMYYSC

SEQ ID NO: 163869 - protein, 203 aa, Unknown
  Bacterial polypetide isolated from the Sargasso Sea
PRPQGDYYCGVGSGNVQAREVSEAHMDACLEAGIMITGTNAEVALGQWEYQCFGKGLKAADDLWVSRYLLHLIAEEYGVSVNIHPKPQEGDWNGSGMHTNFSNEQMRSAGSEELFNSMCEKLGEVHAEGIANYGSDNEKRLTGNHETQSIDTFSYGVSDRGASIRIPIYTVENDWNGYLEDRRPASNADPYKIISHIVGTLTQ

SEQ ID NO: 163870 - protein, 124 aa, Unknown
  Bacterial polypetide isolated from the Sargasso Sea
MSSSNVLKTIKDKEIEYVDLRFTDPRGKLQHVTMDAKIVDGDMLNEGIFFDGSSIAGWKAINESDMILKPDLSRTVVDPFTSHNTLNIFCDILDAIKKDPYERDPRGTAKKAEAYLKQSGMEIK

SEQ ID NO: 163871 - protein, 95 aa, Unknown
  Bacterial polypetide isolated from the Sargasso Sea
MLMAGLDGIKNKIDPGKSLDKDLYALSESEVKKVPTVCGSLREAMECLDRDRAFLKQGNVFTDDQIDAYIALKFEEIHNFEHTPHPIEFEMYYSC

SEQ ID NO: 163872 - protein, 66 aa, Unknown
  Bacterial polypetide isolated from the Sargasso Sea
MSSKQVLKLMKDKQVEYVDLRFTDPRGKLQHLTMDATIVDEGMLNDGVFFDGSSIAGWKAINESDM

SEQ ID NO: 163873 - protein, 135 aa, Unknown
  Bacterial polypetide isolated from the Sargasso Sea
YSARNRSASCRIPITLSKKGARCEIRFPDASGNPYLTFAAMLMAGLDGIKNKIHPGESFDKDLYELPPEEVKSIPTVCGSLREAMENLDKDREFLTQGDVFTDDQIDAYIALKFEEIHKFEHAPHPVEFEMYYSS

SEQ ID NO: 163874 - protein, 131 aa, Unknown
  Bacterial polypetide isolated from the Sargasso Sea
MSAANVLKFIKEKDAEFVDLRFTDPRGKLQHLTMDASIVDEGMLNEGVFFDGSSIAGWKAINESDMILKPDTARMFMDPFTSHNTVVLFCDILDAIKKDPYERDPRGVAKKAEEYLKASGIGDKAFFGPRT

SEQ ID NO: 163875 - protein, 73 aa, Unknown
  Bacterial polypetide isolated from the Sargasso Sea
MSANDVLKTIKDKDIEYVDLRFTDPRGKLQHVTMDGKMVDEGMLNEGIFFDGSSIAGWKAINESDMILKPRFI

SEQ ID NO: 163876 - protein, 144 aa, Unknown
  Bacterial polypetide isolated from the Sargasso Sea
MWVARWLLYRIAEDYNISATLTPKPVKGDWNGAGMHTNFSTKQMREDGGYDAIVAGCEALGKNAEFHVQNYGAGIEDRLTGDHETQRFDTFSYGVSDRGASIRIPWQVEVDKKGYLEDRRPNANADPYVIATVMIDTVCSAASA

SEQ ID NO: 163877 - protein, 339 aa, Unknown
  Bacterial polypetide isolated from the Sargasso Sea
VPDPSSVIQLPWKPDVAWVAADCYMDGEPVGQAPRNVLTRQIRAAKENKLLIKTGIEAEFFLISKDGDNISDSFDIAEKPCYDQQALMRRYEVIAQICDYMLDLGWKPYQNDHEDANGQFEMNWEYDGAMQTADKHSFFKFMVKSVAEMHDLRATFMPKPFKGLTGNGCHCHISVWDLHETENAFADDKMEFGLSKHGRAFLGGLMRHATALAAITNPTVNSYKRLNAPRTTSGATWAPNTVTWTGNNRTHMVRVPAPGRFELRLPDGATNPYLLQAVIIAAGLNGLQSNADPGRHYDVDMYEEGHLIKDAPMLPLNLLDALRAYDNDKDLKNSMGNDF

SEQ ID NO: 163878 - protein, 125 aa, Unknown
  Bacterial polypetide isolated from the Sargasso Sea
RIPVSDSPKGKRVEVRFPDPTANPYLAFAAMLMAGMDGIKNKIHPGDASDQDLYELSDNEVAKLPTVCGSLREALEAVDQDRAFLTEAGVFTDDQIDGYIDLKMQEVYDLEHSPHPVEFKNYFSA

SEQ ID NO: 163879 - protein, 187 aa, Unknown
  Bacterial polypetide isolated from the Sargasso Sea
QAREVSEAHMDACLEACIMITGTNAEVALGQWEYQCFGKGLKAADDLWVSRYLLHLIAEEYGVSVNIHPKPQEGDWNGSGMHTNFSNEQMRSAGSEELFNSMCEKLGEVHAEGIANYGSDNEKRLTGNHETQSIDTFSYGVSDRGASIRIPIYTVENDWNGYLEDRRPASNADPYKIISHIVGTLTQ

SEQ ID NO: 163880 - protein, 209 aa, Unknown
  Bacterial polypetide isolated from the Sargasso Sea
MATVNDILKDIRDNGVKYLDLRFTDPRGKLQHLTMDCSVVDEGLLNEGVFFDGSSIAGWKAINESDMVLKPDLSTTVMDPFTAQPTMMVFCDILDAVTKKSYERDPRCTARKAEEFVNSSGIGDTVYMGPEAEFFVFDDVKFQVDMNKSMFEIDSNEGPYNSGRNYESGNLAHRPGVKGGYFPVPPVDSAQDIRTEFLEELKNLGLKME

SEQ ID NO: 163881 - protein, 229 aa, Unknown
  Bacterial polypetide isolated from the Sargasso Sea
MKSKLEYIWLDGYSPTQSLRSKTQIRDNFGGTIEECPMWSFDGSSTQQADGSSSDCLLKPVAIIPDPDRQNAYLVMTEVLNADGTPHPTNGRATIDDDDADFWFGFEQEYFLWDIDTQLPPGFPQNGFPGPQGPYYCSVGASNAFGRDCVDEHLDLCLEAGINVEGINGEVAAGQWEFQVFAKGAADAGDQTWLARYLLERTGEKYGYAINWHPKPFGALDWNGSGMHA

SEQ ID NO: 163882 - protein, 157 aa, Unknown
  Bacterial polypetide isolated from the Sargasso Sea
QWEYQCFGKGIKAGDDLWVSRYLLFKIAEEHGVGVNIHPKPKTGDWNGSGMHTNFSNEQMRTGGSEELFSSMCDKLGKVHEEGIAAYGPDNDMRLTGLHETQSIDQFSYGVSDRGASIRIPVYTVELNWNGYLEDRRPASNADPYKILAHIVGTLTK

SEQ ID NO: 163883 - protein, 238 aa, Unknown
  Bacterial polypetide isolated from the Sargasso Sea
IAEKFKDHKPWFGIEQEYTLMDGKQPAGWPEEGFPERPQGPYYCSVGAEDVAARSMVEDHLDLCLEAGLEVSGINAEVMLGQWEYQVGPLPALEVGDQLWVARWLLERVGEEYGLRVELHPKPIKGDWNGSGAHINYSTESMRADGGLKVIEEACEKLGQNIDKHIEVYGDANEERLTGDHETCSIKEFKYGVSDRGASIRIPMGVANDGKGYLEDRRPASNVDPYKACAALIDTTCS

SEQ ID NO: 163884 - protein, 134 aa, Unknown
  Bacterial polypetide isolated from the Sargasso Sea
LHLVAEEFGVAVNTHPKPQEGDWNGSGMHTNFSNDEMRNSGSEELMNSLCKKLGAVHEEGISNYGSDNEKRLTGNHETQSIDTFSYGVSDRGASIRIPIYTVENNWNGYLEDRRPASNADPYKIISHIVGTLTK

SEQ ID NO: 163885 - protein, 290 aa, Unknown
  Bacterial polypetide isolated from the Sargasso Sea
WAFDGSSTQQAPGGSSDCLLKPVAIYPDPVRKNGWIVMNEVLNSDGSPHESNGRATIDDDDDDFWFGFEQEYFLWDPETNLPLGFPKDQTPQGQFYCSVGGKNTFGREVMDRHLDICIDAGINIEGTNAEVAAGQWEFQIFAKGAAKAGDEIWVARYFLERLAEEYGLAIEYHPKPLGATDWNGSGMHANFSNTTLRTCGSKETYEAICEAFRPVVNDHIAVYGAYNDQRLTGDHETQSITEFSYGVSDRGASIRIPIITVENGYKGWLEDRRPASNGDPYKIAAIIIKT

SEQ ID NO: 163886 - protein, 289 aa, Unknown
  Bacterial polypetide isolated from the Sargasso Sea
WSFDGSSTKQADTIGSDCLLIPVQKYKNPTRLDFLVMCQVLDSNRKALVSNTRVLADAVVSNEWWFGFEQEYYLTHPDGVILGWENGTPRAQGEYYCGVGSKNIVGRDISEKHMLACIDAGIALTGTNAEVALGQWEYQCFGKGIKAADDLWVSRYLLNKIAEEHGLCVNYHPKPKKGDWNGSGMHTNFSNYAMRTKGSEDIFIDICKKLGKGHEEGIAAYGSDNDMRLTGKHETQDISKFSYGISDRGASIRIPIYTVQNKWKGYLEDRRPSSNADPYRIIEHIVKTL

SEQ ID NO: 163887 - protein, 231 aa, Unknown
  Bacterial polypetide isolated from the Sargasso Sea
MKYNCKTAKELLKKIKNEDIKMVDLRFTDMPGSTHHISIPIKYLKEDLFVDGVGFDGSSVRGFQSIENSDMTMVPDVTTGYLDPFYSEKTIAFYCNVVDPITYESYPRDPRYIAQKAEKYLKKSGLGDTAYFGPEAEFFVFNDVKYDSGSNFAFHEVDSTEGAWNTGRDEGPNLGHKPKHKGGYFPLPPSDSLQDLRTEMVLTMEDIGINVEASHHEVATGGACEIDLEFS

SEQ ID NO: 163888 - protein, 111 aa, Unknown
  Bacterial polypetide isolated from the Sargasso Sea
MSSKNVLKLIKDKEIEYVDLRFTDPKGKLQHLTMDSTAVDEGMLNDGVFFDGSSIAGWKAINESDMILKPDLNRKIVDPFTSHNTLVLFCDILDAVNKNPYERDPRGIAKK

SEQ ID NO: 163889 - protein, 221 aa, Unknown
  Bacterial polypetide isolated from the Sargasso Sea
MKYNCKTPKELLKKIKNEDIKMVDLRFTDMPGSTHHISIPFKFLKEDLFKDGVGFDGSSVRGFQSIENSDMAMVPDVTTAYIDPFYSEKTIAFYCDVVDPISYESYEKDPRYIAKKAEKYLKSSGLGDTAYFGPEAEFFVFNDVKYDSGSNFSFHEVDSTEGAWNTGKEENPNLGHKPRHKGGYFPLPPSDSLQDVRTEMVLTMEEIGINVEASHHEVATG

SEQ ID NO: 163890 - protein, 73 aa, Unknown
  Bacterial polypetide isolated from the Sargasso Sea
MSASNVLKFIKDKEAEFVDLRFTDPRGKLQHLTMDCTVVDEGMLNDGVFFDGSSIAGWKAINESDMILKPDLS

SEQ ID NO: 163891 - protein, 336 aa, Unknown
  Bacterial polypetide isolated from the Sargasso Sea
MKSKLEYIWLDGYKPTQSLRSKTRVESDFGGTLEECPMWVFDGSSTQQAEGGSSDCLLKPVYIIPDPERTNAYLVMTEVLNADGSPHESNGRATIDDDDDDFWFGFEQEYFLWDVDTNLPPGFPENGFPAPQGPYYCSVGAKNAFGRDCVDDHLDLCLDAGLNVEGINAEVAAGQWEFQVFAKSAKTAGDETWLARYLLERTGEKYGYSINWHPKPFGPLDWNGSGMHANFSNGEMRESGKEETFTKICENFGKNIERHISIYGADNDQRLTGDHETQSIDTFSYGVSDRGASIRIPVTTKEDGWIGRLEDRRTASNADPYKVAAAIIKTTKEALA

SEQ ID NO: 163892 - protein, 318 aa, Unknown
  Bacterial polypetide isolated from the Sargasso Sea
MNKFEYIWLDGFQPEPTLRSKIKVTDGEPPEWSFDGSSTQQAEGGSSDCLLLPVEQYENPTNDGSLVMCQVHTGEHEVHPSNTRAAAEAVVSDEWWFGFEQEYFFTDNKGNPLGWEDGTPRPQGDYYCGVGSSNVVGREISEAHLDACLDAGIELTGTNAEVALGQWEYQCLGKGIKAGDDLWVSRYLLHKVAEEFGVSVNIHPKPKTGDWNGSGMHTNFSNEEMRTSGSEELFNSMCEKLGAVHEEGIASYGSDNDMRLTGTHETQSINEFSYGVSDRGASIRIPIYTVEHDWNGYLEDRRPASNADPYRIIAHLVE

SEQ ID NO: 163893 - protein, 330 aa, Unknown
  Bacterial polypetide isolated from the Sargasso Sea
YIWLDGYKPTQSLRSKTRVESDFSGKVEDCPMWSFDGSSTEQADGSDSDCLLKPVACIPDPDRKNSYLVMTEVLNADGTPHESNGRATIEDDDDDFWFGFEQEYFLWDPESNLPPGFPKSGYPRPQGPYYCSVGANNAYGRDIIEEHLDLCLDAGLNVEGINGEVAAGQWEFQVFAKSAKTAGDETWLARYILERTAEKYGYAIEWHPKPLGDTDWNGSGMHANFSNSVMRESGKEETFTKICEEFGKNIPRHISVYGADNDQRLTGAHETQSIDQFSFGVSDRGASIRIPVGTVEDGWKGRLEDRRPASNADPYKVAAAIVKTTKESGV

SEQ ID NO: 163894 - protein, 186 aa, Unknown
  Bacterial polypetide isolated from the Sargasso Sea
METIRRFIRYWLYTICGGILKHAKAINAFSNSTTNSYKRLIPGFEAPVLLAYSARNRSASCRIPITLSKKAARCEVRFPDAAGNPYLTFSALLMAGLDGVKNKIDPGKSLDKDLYALSESEVKKIPTVCGSLREAMESLDKDRKFLTQGNVFTDDQIDAYIALKYEEIHNFEHTPHPIEFQMYYSC

SEQ ID NO: 163895 - protein, 323 aa, Unknown
  Bacterial polypetide isolated from the Sargasso Sea
MNTFEYIWLDGYQPEPMMRSKVKATEDDTPPDWSFDGSSTQQAEGGSSDCLLLPVQTYANPNGHDLVMTQVQAADHTTHPSNFRAAAAEVVTDEWWFGFEQEYFFTDPQTGEPLGWEDGTPRPQGEYYCGVGAGNVVGREISDAHLEACLDLGITLTGTNAEVALGQWEYQCFGKGIKAADDLWVSRYLLYKIAEEYGVGVNIHPKPKTGDWNGSGMHCNFSNEEMRTAGSEELFSSICDKLGEVHAEGIASYGSDNDMRLTGLHETQSIDKFSYGVSDRGASIRIPVYTVEHDWNGYLEDRRPASNADPYKILAHLVGTLTK

SEQ ID NO: 163896 - protein, 193 aa, Unknown
  Bacterial polypetide isolated from the Sargasso Sea
ADGAQSYKYVVRNVAQQFGKVATMMPKPISMDAGSGMHTNVSLWKKDENTFYDKDEVLELSQTGRYFCGGVMEHAKGLTAITNPTTNSYHRLVPGYEAPVYIAWSSSNRYATIRIPGHFKGEKYAYMKRMEYGVPDPASNPYLVFSAVLAAGLDGIKKKIEPGDPVKEDIYKMTKSERKKHGIDTYQQILEEH

SEQ ID NO: 163897 - protein, 273 aa, Unknown
  Bacterial polypetide isolated from the Sargasso Sea
LLLPVEQYENPTNDGSLVMCQVHTGEHEIHPSNTRAAAEAVVSDEWWFGFEQEYFFTDNKGNPLGWEDGTPRPQGDYYCGVGSSNVVGREISEAHLDACLDAGIELTGTNAEVALGQWEYQCLGKGIKAGDDLWVSRYLLHKVAEEFGVSVNIHPKPKTGDWNGSGMHTNFSNEEMRTSGSEELFNSMCEKLGAVHEEGIASYGSDNDMRLTGTHETQSINEFSYGVSDRGASIRIPIYTVEHDWNGYLEDRRPASNADPYRIIAHIVGTLTS

SEQ ID NO: 163898 - protein, 136 aa, Unknown
  Bacterial polypetide isolated from the Sargasso Sea
YLLYKIAEEYGVGVNIHPKPKTGDWNGSGMHCNFSNEAMRTAGSKELFSSMCDKLGEVHEEGIASYGSDNDMRLTGLHETQSIDKFSYGVSDRGASIRIPVYTVEHDWNGYLEDRRPASNADPYKILAHIVGTLTK

SEQ ID NO: 163899 - protein, 116 aa, Unknown
  Bacterial polypetide isolated from the Sargasso Sea
AARCEIRFPDASGNPYLTFASMLMAGLDGIKNKIDPGKSFDKDLYALSESEIKKIPTVCGSLREAMESLDKDRKFLTQGSVFTDDQIDAYIDLKMEEIHNFEHTPHPIEFDMYYSC

SEQ ID NO: 163900 - protein, 129 aa, Unknown
  Bacterial polypetide isolated from the Sargasso Sea
SASCRIPITLSKKGARCEIRFPDASGNPYLTFASMLMAGLDGIKNKIDPGKSFDQDLYALTEKQVKKVPTVCGSLREAMEALDKDRNFLKQGNVFTDDQIDAYIELKYEEIHNFEHTPHPIEFDMYYSC

SEQ ID NO: 163901 - protein, 143 aa, Unknown
  Bacterial polypetide isolated from the Sargasso Sea
FEAPVLLAYSARNRSASCRIPITLSKKGARCEIRFPDASGNPYLTFASMLMAGLDGIKNKIDPGKSFDKDLYALSEKELKKVPTVCGSLREAMESLDKDRKFLTQGNVFTDDQIDAYIALKFEEIHNFEHTPHPIEFDMYYSC

SEQ ID NO: 163902 - protein, 326 aa, Unknown
  Bacterial polypetide isolated from the Sargasso Sea
MSEFKTYEYIWLDGFQPEPSMRSKIKATDDDEPPEWSFDGSSTQQAEGGSSDCLLLPVQTYDNPTAPDHLVMCQVNAADHSVHPSNTRAAAEALVSDEWWFGFEQEYFFTNKDGSPLGWEEGEPRPQGDYYCGVGADNVSGREISEVHLQACLDAGITLTGTNAEVALGQWEYQCFGKGIKAADDLWVSRYLLYKIAEEYGVGVNIHPKPKTGDWNGSGMHTNFSNEEMRTNGSEELFNSICDKLGKVHDEGIAAYGSDNDMRLTGLHETQKITEFSYGISDRGASIRIPVYTVEHDWNGYLEDRRPASNADPYKILAHIVGTLTK

SEQ ID NO: 163903 - protein, 326 aa, Unknown
  Bacterial polypetide isolated from the Sargasso Sea
MSDIKTYEYIWLDGFKPEPSMRSKIKATTEDSAPEWSFDGSSTEQAEGSSSDCLLLPVQTYDNPTFSDFLVMCQVHAADHTVHPSNTRAAAEVVVTDDWWFGFEQEYFFTNKDGSPLGWEEGEPRPQGDYYCGVGADNVSGREVSEAHLEACLDAGITLTGTNAEVALGQWEYQCFGKGIKAADDLWVSRYLLYKIAEEYGVGVNIHPKPKKGDWNGSGMHTNFSNEEMRSKGSEELFSSICEKLGKVHQDGIAAYGSDNDQRLTGLHETQKITEFSYGVSDRGASIRIPVYTVEHDWNGYLEDRRPASNADPYKILAHIVGTLTK

SEQ ID NO: 163904 - protein, 324 aa, Unknown
  Bacterial polypetide isolated from the Sargasso Sea
MKKYEYVWLDGYQPEPYLRSKVKVTSDRNPPEWSFDGSSTQQADTEGSDCILIPVQEYKNPLFGDSLVMCGVQTSAREAHSTNMRHAASEIVTDEWWFGFEQEYFLTNPDGSILGWEEGIPEKPQGEYYCGVGAANVKGREVSEAHLEACLEAGIELTGTNAEVALGQWEYQCLGKGIKAGDDLWMSRYLLQKVGEEFDVCVNFHPKPQEGDWNGSGMHTNFSNEQMRSNGSEELFTSFCEKLGEVHDQGIASYGSDNDKRLTGLHETQKITEFSYGVSDRGASIRIPIYTVEHNWNGYLEDRRPASNADPYKIISHIVGTLTS

SEQ ID NO: 163905 - protein, 317 aa, Unknown
  Bacterial polypetide isolated from the Sargasso Sea
MSDIKTYEYVWLDGYKPEPSIRSKIKATDLRGTDKGELNDAMPPRWSFDGSSTQQAEGGSSDCLLIPVQMYDNPTAPDHLVMCQVLAADGSIHPSNTRDAADAVVSDEWWFGFEQEYFFTNPDGSPLGWEDGEPRPQGDYYCGVGADNVSGREISEVHLQACIEAGINLTGTNAEVALGQWEYQCFGKGIKAADDLWMSRYLLYKIAEEYGVGVNIHPKPKTGDWNGSGMHANFSNEEMRTNGSEKLFHSICDKLGEVHDEGIASYGSDNDMRLTGLHETQKITEFSYGISDRGASIRIPVYTVEHDWNGYLEDRRP

SEQ ID NO: 163906 - protein, 334 aa, Unknown
  Bacterial polypetide isolated from the Sargasso Sea
MSKSKLEYIWLDGYKPTQSLRSKTKVVSDFDGKLSSCPMWSFDGSSTLQAPGGSSDCLLKPVAIYPDPERKNGFLVMTEVLNADSTPHESNGRATIDDSDNDFWFGFEQEYFLWDTETNLPLGFPKDQTPQGQFYCSVGGANTFGREIMDRHLDVCLEAGINVEGTNAEVAAGQWEFQTFAKGAQEAGDEMWVARYLLERIAEDYAIKIEYHPKPLGATDWNGSGMHANFSNTTLRTCGSKETYEKICESFRSVVNECIAVYGAYNDQRLTGDHETQSITEFSYGVSDRGASIRIPIMTVESGWKGWLEDRRPASNADPYKVAAIIVKTVKSVS

SEQ ID NO: 163907 - protein, 337 aa, Unknown
  Bacterial polypetide isolated from the Sargasso Sea
MSEFSKLEYIWLDGYEPTQNMRSKTMIQKNFGGNLDECPMWSFDGSSTKQADGGDSDCLLKPVSIYPDPQRDHGFLVMCEVMNADGTPHSSNGRSTIDDDDDDFWFGFEQEYFIMDVDTQLPLGFPVGGYPGPQGLYYCSVGGKNTHGRDLVEQHANLCIEAGLGFEGINQEVACGQWEFQIFAKGAKKAGDELWIGRYMLDRLTESYGYYIEYHPKPIKGDWNGSGMHANFSDSTMRDTGGEKIFTKICESFGKNIKKHMEVYGAHNEERLTGLHETQSIDQFSYGVSDRGASIRIPIGTIEEGWKGRLEDRRPASNGDPYKIGSVIISTTKSAYN

SEQ ID NO: 163908 - protein, 131 aa, Unknown
  Bacterial polypetide isolated from the Sargasso Sea
IAEEYGVSVNIHPKPQEGDWNGSGMHTNFSNEQMRSAGSEELFNSMCEKLGEVHAEGIANYGSDNEKRLTGNHETQSIDTFSYGVSDRGASIRIPIYTVENDWNGYLEDRRPASNADPYKIISHIVGTLTQ

SEQ ID NO: 163909 - protein, 323 aa, Unknown
  Bacterial polypetide isolated from the Sargasso Sea
MKTYEYIWLDGYKPEPMMRSKVKATEDETPPEWSFDGSSTQQAEGGSSDCLLIPVQTYSNPDGHDLVMTEVQSADHTTHPSNFRAAAAEVVTDEWWFGFEQEYFLTDPATGEPLGWEDGEPREQGEYYCGVGAGNVVGREVSDVHLQACLDMGITLTGTNAEVALGQWEYQCFGKGIKAADDLWVSRYLLYKIAEEFGVGVNIHPKPKTGDWNGSGMHCNFSNEAMRTAGSEELFTSMCDKLGEVHEEGIASYGSDNDMRLTGLHETQSIDKFSYGVSDRGASIRIPVYTVEHNWNGYLEDRRPASNADPYKIVSHIVGTLTK

SEQ ID NO: 163910 - protein, 334 aa, Unknown
  Bacterial polypetide isolated from the Sargasso Sea
MSKSKLEYIWLDGYKPTASLRSKTKIIENFDGKLESCPMWAFDGSSTRQAEGGSSDCLLKPVSIYKDPERKNGFLIMNEVLNADGSPHESNGRATIDDDDDDFWFGFEQEYFLWDPETDLPLGFPKDQTPQGQFYCSVGGANTFGREIMDRHLDVCLDAGINVEGTNAEVAAGQWEFQTFAKGAQQAGDEMWVARYLLERIAEDYGLAIEYHPKPLGATDWNGSGMHANFSNTTLRTCGSKETYEKICESFRPVVNECIEVYGAYNDQRLTGDHETQSITEFSYGVSDRGASIRIPIMTVESGWKGWLEDRRPASNADPYKVAAIIVKTVKGAK

SEQ ID NO: 163911 - protein, 242 aa, Unknown
  Bacterial polypetide isolated from the Sargasso Sea
NTRSACVDLVTDDWWFGFEQEYFFTNPEDGTILGWEDGTPRPQGDYYCGVGSGNVQAREVSEAHMDACLEAGIMITGTNAEVALGQWEYQCFGKGLKAADDLWVSRYLLHLIAEEYGVSVNIHPKPQQGDWNGSGMHTNFSNEQMRSAGSEELMTSMCDKLGEVHAEGISNYGSDNDMRLTGNHETQSIDTFSYGVSDRGASIRIPIYTVENNWNGYLEDRRPASNADPYRIISHIVGTLTK

SEQ ID NO: 163912 - protein, 127 aa, Unknown
  Bacterial polypetide isolated from the Sargasso Sea
MSSKNILKLMKDKQVEFVDLRFTDPKGKLQHLTMDSTVVDEDMLNKGVFFDGSSIAGWKAINESDMILKPDLDRPIIDPFNSHTTLNIFCDILDAVKKDPYDRDPRGKAKKAEAYLKKTGYRRINLI

SEQ ID NO: 163913 - protein, 95 aa, Unknown
  Bacterial polypetide isolated from the Sargasso Sea
MLMAGLDGIKNKIDPGKSFDKDLYALSEDEVKKIPTVCGSLREAMESLDKDRDFLKQGNVFTDDQIDAYIALKFEEIHNFEHTPHPIEFEMYYSC

SEQ ID NO: 163914 - protein, 232 aa, Unknown
  Bacterial polypetide isolated from the Sargasso Sea
MKKLEYIWLDGFKPEPSLRSKVKVTDENPPDWSFDGSSTQQADGSSSDCILRPVNEYTGPRNSDSLVMCEVLSPDRSAHPSNTRSACVDLVTDDWWFGFEQEYFFTNPEDGTILGWEDGTPRPQGDYYCGVGSGNVQAREVSEAHMDACLEAGIMITGTNAEVALGQWEYQCFGKGLKAADDLWVSRYLLHLIAEEYGVSVNIHPKPQQGDWNGSGMHTNFSNEQMRSAGSE

SEQ ID NO: 163915 - protein, 203 aa, Unknown
  Bacterial polypetide isolated from the Sargasso Sea
PRPQGDYYCGVGADNVSGREISEVHLQACIEAGINLTGTNAEVALGQWEYQCFGKGIKAADDLWMSRYLLYKIAEEYGVGVNIHPKPKTGDWNGSGMHANFSNEEMRTNGSEKLFHSICDKLGEVHDEGIASYGSDNDMRLTGLHETQKITEFSYGISDRGASIRIPVYTVEHDWNGYLEDRRPASNADPYKILAHIVGTLTK

SEQ ID NO: 163916 - protein, 172 aa, Unknown
  Bacterial polypetide isolated from the Sargasso Sea
AGIELTGTNAEVALGQWEYQCFGKGIKAADDLWMSRYILFKVAEEFGVSVNIHPKPKTGDWNGSGMHTNFSNEEMRTSGSEDLFSSMCDKLGEVHKEGIALYGSDNDMRLTGLHETQSIDQFSYGVSDRGASIRIPIYTVEHDWNGYLEDRRPASNADPYKIVAHIVGTLTS

SEQ ID NO: 163917 - protein, 142 aa, Unknown
  Bacterial polypetide isolated from the Sargasso Sea
DLWVSRYLLYKIAEEFGVGVNIHPKPKTGDWNGSGMHCNFSNEAMRTAGSEELFTSMCDKLGEVHEEGIASYGSDNDMRLTGLHETQSIDKFSYGVSDRGASIRIPVYTVEHDWNGYLEDRRPASNADPYKILAHIVGTLSK

SEQ ID NO: 163918 - protein, 323 aa, Unknown
  Bacterial polypetide isolated from the Sargasso Sea
MKTYEYIWLDGYKPEPMMRSKVKATEDETPPEWSFDGSSTQQAEGGSSDCLLIPVQTYSNPDGHDLVMTEVQSADHTTHPSNFRAAAAEVVTDEWWFGFEQEYFLTDPATGEPLGWEDGEPREQGEYYCGVGAGNVVGREVSDVHLQACLDMGITLTGTNAEVALGQWEYQCFGKGIKAADDLWVSRYLLYKIAEEFGVGVNVHPKPKTGDWNGSGMHCNFSNEAMRTAGSEELFTSMCDKLGEVHEEGIASYGSDNDMRLTGLHETQSIDKFSYGVSDRGASIRIPVYTVEHNWNGYLEDRRPASNADPYKIVSHIVGTLTK

SEQ ID NO: 163919 - protein, 322 aa, Unknown
  Bacterial polypetide isolated from the Sargasso Sea
MKTYEYIWLDGYQPEPSMRSKVKATKDETPPDWSFDGSSTEQAEGGSSDCLLLPVQTYENPNGHDLVMTQVQAADHTTHPSNFRAAAAEVVSDEWWFGFEQEYFFTDPETGEPLGWENGEPGPQGPYYCAVGAGNVSGREISDAHLLACLDLGIELTGTNAEVAIGQWEYQCFGKGIKAADDLWVSRYLLYKIAEEFGVGVNIHPKPKTGDWNGSGMHTNFSNEAMRTAGSEELFTSMCDKLGEVHEEGIAAYGSDNDMRLTGLHETQSIDTFSYGVSDRGASIRIPVYTVEHDWNGYLEDRRPASNADPYKILSHIVGTLK

SEQ ID NO: 163920 - protein, 323 aa, Unknown
  Bacterial polypetide isolated from the Sargasso Sea
MNTFEYIWLDGYQPEPMMRSKVKATEDDSPPDWSFDGSSTQQAEGGSSDCLLLPVQTYVNPNGHDLVMTQVQAADHSVHPSNTRAAAAEVTTDEWWFGFEQEFFFTDPQTGEPLGWEDGTPREQGEYYCGVGAGNVVGREISDAHLEACLDLGITLTGTNAEVALGQWEYQCFGKGIKAADDLWVSRYLLYKIAEEYGVGVNIHPKPKTGDWNGSGMHCNFSNEAMRTAGSEELFSSMCDKLGEVHEEGIASYGSDNDMRLTGLHETQSIDKFSYGVSDRGASIRIPVYTVEHDWNGYLEDRRPASNADPYKILAHIVGTLSK

SEQ ID NO: 163921 - protein, 94 aa, Unknown
  Bacterial polypetide isolated from the Sargasso Sea
LMAGLDGIKNKINPGKSLDKDLYALSENEVKKVPTVCGSLREALESLDRDRAFLKQGNVFTDDQIDAYIALKFEEIHNFEHTPHPIEFEMYYSC

SEQ ID NO: 163922 - protein, 323 aa, Unknown
  Bacterial polypetide isolated from the Sargasso Sea
MKTYEYIWLDGYQPEPMMRSKVKATEDETPPDWSFDGSSTQQAEGGSSDCLLLPVQTYSNPDGHDIVMTQVQAADHTTHPSNFRAAAAEVVTDEWWFGFEQEYFFTDPQTGEPLGWEDGEPREQGEYYCGVGAGNVVGREISDTHLQACLDMGITLTGTNAEVALGQWEYQCFGKGIKAADDLWVSRYLLYKIAEEFGVGVNIHPKPKTGDWNGSGMHCNFSNEAMRTAGSEELFTSMCDKLGEVHEEGIASYGSDNDMRLTGLHETQSIDKFSYGVSDRGASIRIPVYTVEHDWNGYLEDRRPASNADPYKILAHIVGTLSK

SEQ ID NO: 163923 - protein, 135 aa, Unknown
  Bacterial polypetide isolated from the Sargasso Sea
YMLYKIAEEFGVGVNIHPKPKTGDWNGSGMHTNFSNEAMRTGGSEELYSSICDKLGAVHEEGIASYGSDNDMRLTGLHETQSIEKFSYGVSDRGASIRIPVATVENDWNGYLEDRRPASNADPYKILSHIVGTLT

SEQ ID NO: 163924 - protein, 107 aa, Unknown
  Bacterial polypetide isolated from the Sargasso Sea
MSASSVLKFIKDKDAEFVDLRFTDPRGKLQHLTMDATAVDENMLDEGVFFDGSSIAGWKAINESDMILKPDSSRFFLDPFTSHNTVVLFCDILDAIKKTPYERDPRG

SEQ ID NO: 163925 - protein, 335 aa, Unknown
  Bacterial polypetide isolated from the Sargasso Sea
MGKSKLEYLWLDGYKPTQSLRGKTKVVSDFSGKLEDCPIWAFDGSSTQQAPGGSSDCLLKPVAIYPDPVRKNGWIVMNEVLNSDGSPHESNGRATIDDDDDDFWFGFEQEYFLWDPETNLPLGFPKDQTPQGQFYCSVGGKNTFGREVMDRHLDICIDAGINIEGTNAEVAAGQWEFQIFAKGAAKAGDEVWVARYFLERLAEEYGLAIEYHPKPLGATDWNGSGMHANFSNSTLRTCGSKETYETICEAFRPVVNDHIAVYGAYNDQRLTGDHETQSITEFSYGVSDRGASIRIPIITVENGYKGWLEDRRPASNGDPYKIAAIIIKTVKSAKI

SEQ ID NO: 163926 - protein, 159 aa, Unknown
  Bacterial polypetide isolated from the Sargasso Sea
LGQWEYQCFGTGIKAADDLWISRYLLYKIAEEYGVGVNIHPKPKTGDWNGSGMHTNFSNEEMRSKGSEELFSSLCDKLGAVHEEGIAAYGSDNDMRLTGLHETQSIDQFSYGVSDRGASIRIPVYTVEHNWNGYLEDRRPASNADPYKILAHIVGTLTK

SEQ ID NO: 163927 - protein, 130 aa, Unknown
  Bacterial polypetide isolated from the Sargasso Sea
PLKGDWNGSGCHTNFSTAIMRCDIKTVSDDRESGGDKTGLDYIQEAINKLSKKHQEHMKVYGDDNDQRMTGEHETASFDNFSCGIGNRGCSVRIGNDTLRDKCGYFEDRRPASNMNPYLVTGKLLETVME

SEQ ID NO: 163928 - protein, 118 aa, Unknown
  Bacterial polypetide isolated from the Sargasso Sea
KKGARCEIRFPDAAGNPYLTFSAMLMAGLDGIKNKIHPGESFDKDLYTLPEEEIKNIPTVCGSLREAMESLDTDRDFLKQGNVFTDDQIDAYIALKFEEIYNLEHTPHPIEFLMYYSS

SEQ ID NO: 163929 - protein, 306 aa, Unknown
  Bacterial polypetide isolated from the Sargasso Sea
MRSKVKATEEKSAPDWSFDGSSTQQAEGGSSDCLLLPVQTYSNPNGHDIVMTQVQAADHTTHPSNFRAAAAEVVSDEWWFGFEQEFFLTDAKTGEPLGWEDGTPREQGEFYCGVGAGNVVGRAISDAHLKACIDLGITLTGTNAEVALGQWEYQCFGKGIKAADDLWVSRYLLMKTAEEHGVGVNFHPKPKTGDWNGSGMHTNFSNEQMRSSGSEELFTSMCDKLGKVHEEGIAAYGSDNNMRLTGLHETQSIDKFSYGVSDRGASIRIPVYTVEHNWNGYLEDRRPASNADPYKIVSHIVGTLTK

SEQ ID NO: 163930 - protein, 323 aa, Unknown
  Bacterial polypetide isolated from the Sargasso Sea
MKKLEYIWLDGYKPEPNLRSKVKVTDSSPPDWSFDGSSTLQAEGGSSDCILRPVNEYIGPRSSDNLVMCEVLSPDKTPHPSNTRNACVDLVSDDWWFGFEQEFFFTNPEDGTILGWEDGIPRPQGEYYCSVGSRNVRAREVSEAHMDACLEAGIQITGTNAEVALGQWEYCVLGEGLKAADDLWVSRYLLHLICEEYGVSANFHPKPQKGDWNGSGMHTNFSNSEMRDSGTEDLMKAMCDKLGEVHEEGISNYGSDNDMRLTGDHETQDINTFSYGVSDRGASIRIPIYTVENNWHGYLEDRRPASNADPYKIISHIVGTLTK

SEQ ID NO: 163931 - protein, 119 aa, Unknown
  Bacterial polypetide isolated from the Sargasso Sea
GTAKKAEAYLKKSGIGDKAYFGPEPEFFVFDDVRYKNDMNETSFSIDSSEGPYNTGKKYENGNMGHRPGIKGGYFPVPPVDSAQDMRSEYLKAMKDMGIKVEKHHHEVAPSQHELRNVF

SEQ ID NO: 163932 - protein, 112 aa, Unknown
  Bacterial polypetide isolated from the Sargasso Sea
MSASKIIKLIKDKEVEYVDLRFTDPRGKLQHLTMDCSVVDEDMLDKGVFFDGSSIAGWKAINESDMILKPDLSRPIIDPFNSHTTLNIFCDIMDAVKKDSYGRDPRGTAKKA

SEQ ID NO: 163933 - protein, 256 aa, Unknown
  Bacterial polypetide isolated from the Sargasso Sea
MCQVQTGEHETHPSNSRAAADAVVSDEWWFGFEQEYFLTNPDGTILGWEDGTPSRPQGEYYCAVGAANVKGREISEAHLDACLDAGIELTGTNAEVALGQWEYQCLGKGIKAGDDLWVSRYLLHKVAEEFGVSVNIHPKPKTGDWNGSGMHTNFSNEAMRTSGSEEMFTSMCEKLGAVHEEGISLYGSDNDMRLTGLHETQSIDQFSYGVSDRGASIRIPIYTVEHDWNGYLEDRRPASNADPYKIIAHIVGTLTS

SEQ ID NO: 163934 - protein, 311 aa, Unknown
  Bacterial polypetide isolated from the Sargasso Sea
MKKLEYIWLDGFKPEPSLRSKVKVTDESPPDWSFDGSSTQQADGSSSDCILRPVNEYTGPRNSDSLVMCEVLSPDRSAHPSNTRSACVDLVTDDWWFGFEQEYFFTNPEDGTILGWEDGTPRPQGDYYCGVGSGNVQAREVSEAHMDACLEAGIMITGTNAEVALGQWEYQCFGKGLKAADDLWVSRYLLHLIAEEYGVSVNIHPKPQQGDWNGSGMHTNFSNEQMRSAGSEELMTSMCDKLGEVHAEGISNYGSDNDMRLTGNHETQSIDTFSYGVSDRGASIRIPIYTVENNWKWLSRRQKAGFKCRSI

SEQ ID NO: 163935 - protein, 454 aa, Unknown
  Bacterial polypetide isolated from the Sargasso Sea
MPANALGSVPRFDSVDEAQTYLAQHGVKYVLAQFVDIHGVAKAKSVPVAHLGSVLTAGAGFAGFAIWGVGIEPNGPDYMAVGDLATLTPVPWQSGLARIACDGHVDGAPWAFDSRVTLKKQVARLTERGWTLFTGLEPEFSLLKRSASGTLEPCDPSDTLAKPCYDYKGLSRTRVFLEKLTESLRAVGIDVYQIDHEDANGQFEINYTYTDCLTSCDHYVFFKMAASEIANELGMICSFMPKPFANRPGNGMHMHMSIGDGKRNLFADDGDALGMGLSTLGYRFTAGLLAHAPALTALCNPTVNSYKRLVVGRSLTGATWAPAYISYGDNNRSTMVRMPGGRIELRLPDGACNPYLATAAVIVAGLDGIDRDLSPGAPANENLYEWSAQKLRDHGIGVLPQTLGEALDALEADRTICDALGPVVNEFIKLKRMEWLEYMRHVSDWEIKQYVEFF

SEQ ID NO: 163936 - protein, 132 aa, Unknown
  Bacterial polypetide isolated from the Sargasso Sea
MLQSGFQNNYTASPKAKRVEFRCPDPSSNPYLAFSAILMAGLDGVKNKINPGKPTDINIYEAPANVLAKIPSTPGSLSESLNALEKDHKYLLEGNVFTKDNIETYISYKRENEVSPMDLRPHPHEFNLYYDV

SEQ ID NO: 163937 - protein, 324 aa, Unknown
  Bacterial polypetide isolated from the Sargasso Sea
MKKYEYVWLDGYQPEPYLRSKVKVTTDRTPPEWSFDGSSTQQADTEGSDCILIPVQEYKNPLFGDSLVMCGVQTSAREAHSTNMRHSASEIVTDEWWFGFEQEYFLTNPDGSILGWEEGIPERAQGEYYCGVGAANVKGRDVSEAHLEACLEAGIELTGTNAEVALGQWEYQCLGKGIKAGDDLWMSRYLLQKVGEEFDVCVNFHPKPQEGDWNGSGMHTNFSNEVMRSNGSEELFTGFCEKLGEVHDQGIASYGSDNDKRLTGLHETQKITEFSYGVSDRGASIRIPIYTVEHNWNGYLEDRRPASNADPYKIISHIVGTLTS

SEQ ID NO: 163938 - protein, 95 aa, Unknown
  Bacterial polypetide isolated from the Sargasso Sea
MLMAGLDGIKNKIDPGKSFDKDLYALSEKELKKVPTVCGSLREAMESLDKDRKFLTQGNVFTDDQIDAYIALKFEEIHNFEHTPHPIEFDMYYSC

SEQ ID NO: 163939 - protein, 177 aa, Unknown
  Bacterial polypetide isolated from the Sargasso Sea
NVEGINAEVAAGQWEFQVFAKGAKRAGDEIWVARYLLERIGEKYGYAIDWHPKPLGKTDWNGSGMHANFSNELMRTCGDKEVFTTICEGFGGVVERHISVYGADNDQRLTGQHETQSIDQFSYGVSDRGASIRIPVGTIDDGWKGRLEDRRPASNADPYKVAAAIIKTVKGAAGAAV

SEQ ID NO: 163940 - protein, 127 aa, Unknown
  Bacterial polypetide isolated from the Sargasso Sea
SCRIPITQSKKAARCEVRFPDAAGNPYLTFSALLMAGLDGIKNKIDPGKSLDKDLYALSESEVKKIPTVCGSLREAMESLDKDRKFLTQGNVFTDDQIDAYIALKYEEIYNFEHTPHPMEFQMYYSC

SEQ ID NO: 163941 - protein, 237 aa, Unknown
  Bacterial polypetide isolated from the Sargasso Sea
ACVDILSDDWWFGFEQEYFFTNPEDGTILGWEDGTPRPQGDYYCGVGSGNVQAREVSEAHMDACLEAGIMITGTNAEVALGQWEYQCFGKGLKAADDLWVSRYLLHLIAEEYGVSVNIHPKPQEGDWNGSGMHTNFSNEQMRSSGSEELFNSMCEKLGEVHAEGIANYGSDNDKRLTGNHETQSIDTFSYGVSDRGASIRIPIYTVENDWNGYLEDRRPASNADPYKIISHIVGTLT

SEQ ID NO: 163942 - protein, 189 aa, Unknown
  Bacterial polypetide isolated from the Sargasso Sea
DVYGREISQAHMDACIDAGIKITGTNAEVALGQWEYQCFGKGLKAADDLWMSRYLLHLVAEEFGVAVNTHPKPQEGDWNGSGMHTNFSNDEMRNSGSEELMNELCEKLGAVHKEGISNYGSDNEKRLTGNHETQSIDTFSYGVSDRGASIRIPIYTVENNWNGYLEDRRPASNADPYKIISHIVGTLTK

SEQ ID NO: 163943 - protein, 199 aa, Unknown
  Bacterial polypetide isolated from the Sargasso Sea
GEYYCGVGAGNVVGREISDAHLEACLDLGITLTGTNAEVALGQWEYQCFGKGIKAADDLWVSRYLLYKIAEEYGVGVNIHPKPKTGDWNGSGMHCNFSNEAMRTAGSEELFSSMCDKLGEVHEEGIASYGSDNDMRLTGLHETQSIDKFSYGVSDRGASIRIPVYTVEHDWNGYLEDRRPASNADPYKILAHIVGTLTK

SEQ ID NO: 163944 - protein, 194 aa, Unknown
  Bacterial polypetide isolated from the Sargasso Sea
MPDSKISPESETSDAIKIVDELGLDYKLLDINSIHKEFNMILEPNDRALGNLRARIRMNILYYYANLKNLVALGSSDKSEFNIGYFTKFGDGGADALPIVSLYKTQVRELARYLGINETIVTKKSSPHLWPNHEAEHEIGLEYEQIDVILHCILDKNLSLEDTAKQADINIELVKKIHQMYQNSEHKRVNPKAL

SEQ ID NO: 163945 - protein, 162 aa, Unknown
  Bacterial polypetide isolated from the Sargasso Sea
MLPITANIKVEFSVKAQILTEMKVLKTIDPEFEVQRRVAFIKSKLQAARSKALVLGISGGVDSSTAGRLCQLAVDSLNSEHTDGGYQFIAVRLPYQIQKDEHEAQQACQFIQPTKLVTINVHQGVDGVHQATLTAFVEAGLHSPDAAKVDFIKGNVKARMRM

SEQ ID NO: 163946 - protein, 140 aa, Unknown
  Bacterial polypetide isolated from the Sargasso Sea
MRAEIMAEMKVQPTIDVNAEISRRVNFIKARLVAAHSRSLVLGISGGVDSSTCGRLCQLAVNELNEEHSTNKYQFIAVRLPYGVQADEDEAQMAVDFIQPSKRMTVNIQPAADALHEQVLIAMTSSGDALPEQSSIDFIK

SEQ ID NO: 163947 - protein, 182 aa, Unknown
  Bacterial polypetide isolated from the Sargasso Sea
DEHEAQLAVDAIKPDECHTVYIGTAVLGLAAATQALDPLSPAQRDFVLGNTKARMRMVAQYTIANARQGLVIGTDHAAEAVMGFFTKFGDGACDLTPLAGLVKDQVRQIAAALGAPDQLVHKVPTADLEELSPGKPDEAAHGVRYRNIDDFLQGKPVPDEAARIIIDTYDKTAHKRQLPKEP

SEQ ID NO: 163948 - protein, 197 aa, Unknown
  Bacterial polypetide isolated from the Sargasso Sea
MNKLSIIKPFINTNVFDGLFISSIADDSRDIQENSIFIARQGVDSHGNEFIRDAIQKGASCIITDQKLDEEVDIPIHCLENLEDKILEILFSFYGLSEDDFIFHGVTGTNGKTTTAFMAHNIIRALKKPSVYIGTLGAIINDDLLETKGNTTPGIFEIFQILQTCKFQQETYIFIEISSHALAQKRLGKLPFSRTCS

SEQ ID NO: 163949 - protein, 148 aa, Unknown
  Bacterial polypetide isolated from the Sargasso Sea
MKSKAHNLKDLLYGIKDAPPIKYNNICDDSRYVNKGTVFFAIKGLSSDGCDFIESAINSGACAVVYEPPYDLSNIETSIPIIAVDDLKLEIANIVSRHYESSINEMSIIGVTGTNGKTTVSRLIHQGFKKIGYKSGYIGTLGYGLENL

SEQ ID NO: 163950 - protein, 140 aa, Unknown
  Bacterial polypetide isolated from the Sargasso Sea
MDRDSQWSDLSVCVVGLGVAGYSCADALMQLGASVTIVDESPGDIHQERAEVLGSLGVEIRFGEAADLPLDSDLVVVSPGIRPSAPVISPALAREIPIWGELELAWRLRRGPRDAQWLCVTGTNGKTTVTLMLESMLTAS

SEQ ID NO: 163951 - protein, 125 aa, Unknown
  Bacterial polypetide isolated from the Sargasso Sea
MQDPVVVVGLGRSGIGAARLLNARGADVWLLESNSSAELKQRADELSSIGIQVELGKPLALESFEALPRWPSTVVISPGIAFDHPVLNQLRDRGCRVVGEVELAWQAMESIPWVGITGTNGKTTV

SEQ ID NO: 163952 - protein, 187 aa, Unknown
  Bacterial polypetide isolated from the Sargasso Sea
MIDNHSSKRNINLVIGLGKSGFWAAKYLRSINKRVIVWESKDGIEFLERKTALEELDIIVSLNKEFVFEKIQPFLKEIESVVVSPSIPYDHITINELKKKGIKVIGEINVAWEILKDTNWIGITGTNGKTTVTHLLSHILCDTGLYAPFAGNIGTPLCKYAHSKKHEKIDWVVAELSSYQIEISPEV

SEQ ID NO: 163953 - protein, 145 aa, Unknown
  Bacterial polypetide isolated from the Sargasso Sea
MKPDLSNIKISGISFDSRDIKRGNLFVSIKGNKFDGKKYINDAISKGASVVIHSQPIKRKRKVIYIKVKDTRSALAELSVKYYKNKPKNIVAVTGTNGKTSISDFFHQIFILQNKKVGFIGTLGFKKNGHLKKRSLTTSDAISLN

SEQ ID NO: 163954 - protein, 156 aa, Unknown
  Bacterial polypetide isolated from the Sargasso Sea
MIDNHSSKRNINLVIGLGKSGFWAAKYLRSINKRVIVWESKDGIEFLERKTALEELNIIVSLNKEFVFEEIQPFLKEIESVVVSPSIPYDHITIIELKKKGIKVIGEINVAWEILKDTNWIGITGTNGKTTVTHLLSHILCNTGLYAPFAGNIGTP

SEQ ID NO: 163955 - protein, 206 aa, Unknown
  Bacterial polypetide isolated from the Sargasso Sea
MDYHLHACFTWVSIVEIKIIQVQDKKPLIIGLGLTGKSLVNFLSKSHDELFVVSESVKPHEIEDIERLGVKVHLNPTIDEVLINKVSVIYPSPGVPYDHEIMKFARQRGVPISSDIELFLSLHKSKKILVTGTNGKTSSCLMIYSLFQYFYPNKRIKVLGNIGTPVLSHLNEEIDIAIVEISSFQLELLNKTEFDIGVLLNIEEDH

SEQ ID NO: 163956 - protein, 144 aa, Unknown
  Bacterial polypetide isolated from the Sargasso Sea
MPIKNNSKKEEKINFVIGLGRSGFWAAKYLRSIGKRVIVWESKENKELLETKEILEKLDISVCLNKKFLFNEFSTCLKQIESIVVSPAIPFDHKTIIKLKERGILVIGEINIAWESLKNINWIGITGTNGKTTVTHLLSHILRE

SEQ ID NO: 163957 - protein, 236 aa, Unknown
  Bacterial polypetide isolated from the Sargasso Sea
FKFLKEKNKIYLFDDNKKISLIHKITKLKFDIIILSPGINKRKCKLKNFLKKNSNIIYTDLDVFKSYFDNQCITITGTNGKSTTSQLIYEVLKNQGYDVKLAGNIGYPILSIKNIKPKTIFVIEASSFQLDYSRLFSSKYSMILNISPDHLERHKTLKNYIIAKFKLIKNQNSNSVAFLNKHDFNIKNYLKKNKFKTKIIKVDTKLNDKYLLKFQNKYFFSKTNKANLLFALEILK

SEQ ID NO: 163958 - protein, 124 aa, Unknown
  Bacterial polypetide isolated from the Sargasso Sea
MNIFKSSFLILGEGITFKHCSNFFRENDIIYYSTTTSDIVDISDNEILCKKSKIDLNQIDYVVVSPGISPTNTILQKLISSGCKLTTDIEIVQNLSQSKFICITGTNGKTFTVNLIADILNDND

SEQ ID NO: 163959 - protein, 199 aa, Unknown
  Bacterial polypetide isolated from the Sargasso Sea
MTDEREPDISLAKLIKGGVPVLTCTAPRLELAHAAARFWRRQPGMIAAVTGTNGKTSIVDFLRQIWSRVTWDAASIGTLGLQYDDPRKMQGSMHGLPSLTTPDAVSLHSALQPLTVARVTHLAIEASSHGLAQHRLDGLNIHIAAFTNLSRDHLDHHADMDSYFAAKSRLFTDLLLDGGSAVINIDDEYGAKLAASMRA

SEQ ID NO: 163960 - protein, 145 aa, Unknown
  Bacterial polypetide isolated from the Sargasso Sea
MRSIKIHKLLDLVGVIPSLNLIDREINNISFNSKEVQKGTLFLGMPGLNIDGGEYCIEAIENGAEAAIIGSAAKEKIGSIDRERILVIEDNLDYIFGQIVAEFWNRPSRKLKLIGVTGTNGKTTITFLLEYLLKRLGKKTALFGT

SEQ ID NO: 163961 - protein, 132 aa, Unknown
  Bacterial polypetide isolated from the Sargasso Sea
MNLRVSDVAEYLSSSFEGTDRVISKIVIDSREVKRGDLFLAISGINNDGHKYITDAIDKGAACIICEKPHNFISSSTPIIIVKNSIQALGNIAKKYKNKIGQPHTIGITGTNGKTTVTKLCTSILSTSFRTS

SEQ ID NO: 163962 - protein, 162 aa, Unknown
  Bacterial polypetide isolated from the Sargasso Sea
MKLIIGLGLTGTSCAAFLKKKSIPFIIFDTRPKTEVDDRYIEKEAENIFFENIMKKDLINVDEAIISPGLDKSHKVFKILKDLNINIITDIDLFKRSNSIPIISITGTNGKTTIVNMLQHVLNNIGINSIACGNNGISPLLIPSSQYKYIILELSSYQLDYM

SEQ ID NO: 163963 - protein, 213 aa, Unknown
  Bacterial polypetide isolated from the Sargasso Sea
MKFITNTSDLSKYLSIPFKENSVIKSISTDTRSIKKDSMFIAIRGKNFDGNDFVDEALEKGAVIILADHKRYQEKKNKKIIYVENTISALKKISENIIKEFKGNVIAITGSNGKTTTTNLVYKTLKNSSKTLKNFNNEIGMPLSIMNASCKSNNLVLEIGASKFRDINYLSKILKPNVGVITNIGHSHLEKLGNIEGVFKVKSELVNNIQKDG

SEQ ID NO: 163964 - protein, 161 aa, Unknown
  Bacterial polypetide isolated from the Sargasso Sea
MLITDNNLVHLEKFIISNSKRAIKFSDRFCIDSRKVKSGQIFISIDSDESKNFKNIKNAISNGASGFVTQFLYKRSDLKTSIPFLIQKNLDNLFHMLFNVDLIGYKHKVKTIGITGTNGKTSSVLLLAQSLTYLKKKVGVITSEGCGIYPALVDSDYTTPP

SEQ ID NO: 163965 - protein, 307 aa, Unknown
  Bacterial polypetide isolated from the Sargasso Sea
LGVIAQKHKINHGSPFTIGITGTNGKTTVTKLTAQILKQSYITSTTIGNFNNDIGLPLSIIQSINTKIDKCVYELGASKRGDISRLVKICEPDMTTLLNVSEAHMESFGSMKNLILTKEEIFSHLKTNQVILNIDDINFQNWRKINNNKKIITISLNNIADYFIKSSDHLSYSFSTVKGDFSVRKDYVSEILPINLLFSISLSMEAGASIEDVKNGLKTFEGVNGRFRSYISSKKAIIIDDSYNANPESMKSSLDQLKQYNENKIFVMGDMGELGKKSREHHLSIFKTAKTQNIMYLFYMGKYKDEA

SEQ ID NO: 163966 - protein, 146 aa, Unknown
  Bacterial polypetide isolated from the Sargasso Sea
MLLKELIKEIENLDVRGSTNIKVNNVSKNSNEIKPGDLFVAIKGSKADGHDFINDAIIKGAKCILCEKSIDVEDDNLTFVITKCSKETYSRVCSNFFDNPSNKLKLIGITGTNGKTTSSNLLYQMFTINNIKSGLISTNEIIIGSD

SEQ ID NO: 163967 - protein, 276 aa, Unknown
  Bacterial polypetide isolated from the Sargasso Sea
MIDNHSSKRNINLVIGLGKSGFWAAKFLRSINKRVIVWESKDGIEFLERKTALEDLNIIVSLNKEFVFEEIQPFLKEIESVVVSPSIPYDHITIIELKKKEIKVIGEINVAWEILKDTNWIGITGTNGKTTVTHLLSHILCDTGLYAPFAGNIGTPLCKYAHSKKHEKIDWVVAELSSYQIEISPEVKPNIGIWTTFTEDHLERHKTLENYFNIKKSLLEKSDFRIYNYDDKNLRNHYSSLSRGVWITTSFDKSNFIHCDYWIDEQAYIVERGKKL

SEQ ID NO: 163968 - protein, 158 aa, Unknown
  Bacterial polypetide isolated from the Sargasso Sea
MLLSELLNPFVELPKKMDREVLGITTDSRDVEPGYVFIAQVGYGQHDGRDFIQDALHSGAIAVLSELTVNQDTKTSLLMPAHTSHVVVPHIQIYNLTELVGHVADKFYNQPSMQMQMIGVTGTNGKTTITTLLSKAMKRLDILAGLIGTHGQGLDGDN

SEQ ID NO: 163969 - protein, 134 aa, Unknown
  Bacterial polypetide isolated from the Sargasso Sea
MLLGKVLKNINQKYKSIKFKNIRFNSKDCKFNDIFFSIGGNNLNGNNYINDAINNGARIIVSNLKYEGFNKHKILFIRSKDPRKLLAESASNFYYKKPKNIIAVTGTNGKTSIANFYYQILTLNNKKAAAIGTL

SEQ ID NO: 163970 - protein, 117 aa, Unknown
  Bacterial polypetide isolated from the Sargasso Sea
MDNKGKDLSYLVSNSNVQLYGNVNIKISNLSENSKKIKNDSIFFAIKGNNYDANEFINEAIKNGAHTIASELDPTRNDVTWIKTNNIRKLISEISNNLYGNYKFKIIGITGTNGKTS

SEQ ID NO: 163971 - protein, 272 aa, Unknown
  Bacterial polypetide isolated from the Sargasso Sea
YLGLEDRCTTKFKNNISFTKVYAHHPLEIKLILDSFKNNNDYKIIAIYEPFGSKIFFENTKDEFKNCFDSSDEIIMLKYTNIKSKININKIFDKINHSNKKRIENYLDVFNYLKSQISKTAFIFFGVPNKFNNYNVLNIADNLYFNKFTYKNCKKMDNKGKDLSYLVSNSNVQLYGNVNIKISNLSENSKKIKNDSIFFAIKGNNYDANEFINEAIKNGAHTIASELDPTRNDVTWIKTNNIRKLISEISNNLYGNYKFKIIGITGTNGKTS

SEQ ID NO: 163972 - protein, 294 aa, Unknown
  Bacterial polypetide isolated from the Sargasso Sea
LEGKCKELIVTDSQNIDDYNSRNARTEFGGHKKETFEQCDLLIVSPGVSKDDFFVRVAFDSGAEVVSEVEFAWRLSNVPFVSITGTNGKTTTLTMLSRILETSGFRIAVGGNIGRPLIDIVQNETQDLDFILSEISSFQLELSTTICPHLAIITNVTEDHIGRHNSIEDYLSVKAKLFSNQKKNDVKIINSDDPISRHLQFEGDQQTLTFSRKNKVNKGSFVNNGKIYVVLEDEIKEICDISEMYLTGLHDLENFLAACAAGAYLGADIVAMKDTAKFFKGLPHRMELILEKDG

SEQ ID NO: 163973 - protein, 278 aa, Unknown
  Bacterial polypetide isolated from the Sargasso Sea
MELSMLSTVSNGNLIGNSLDIENFSLDSRNIKQGDLYIALQGTNFDGHDFVEEAISKGASAAVVHKSIRSDIPHILVNDTYDFMKSVALFNRSNFEGKVIGITGTNGKTSTKQILSNLLDNNNECHKTSGNKNNQIGVPFSLLNLINQYKFSVIEMGTSEPGEIEVLNGLVKPDISAITNVSKGHLAALKSTDMIAKEKGEIYKFHSDNGVAFLPRDSKFFDYWKSSTNAKEIFSFGLHKSSDFLISDIKTDIESNMTEFCLRFDGLTENFSINSIAQ

SEQ ID NO: 163974 - protein, 213 aa, Unknown
  Bacterial polypetide isolated from the Sargasso Sea
MLRYQNRSIAIYGMGVTGCSAAKAFNRLRAKVFCWDDDVKIRKKITKNKKFVLRKFWLNSAASCRIDNIVVSPGIDIEKCKIKNFLKKNLKKIITDLDLFFELNKKNLIISITGTNGKSTTCKIVEKILKTAKYNVRTVGNIGNPILSSVHSKRKCAYVLEVSSYQLQYSKLFRSKHAAILNISPDHLERHRNMKNYTLVKSRNIFSSRIALI

SEQ ID NO: 163975 - protein, 167 aa, Unknown
  Bacterial polypetide isolated from the Sargasso Sea
MIDNNHSSHRKNINLVIGLGKSGFWAAKYLRSINKRVIVWESKDGKEFLETKKELEELNILVSLNKEFIFEEIHPFIKEIESVVVSPSIPYDHETIIKLKKKGIKVIGEINVAWEILKDTNWIGITGTNGKTTVTHLLSHILCETELYAPYAGNIGTPLCKYASKKN

SEQ ID NO: 163976 - protein, 205 aa, Unknown
  Bacterial polypetide isolated from the Sargasso Sea
MKIAQNIFLEKKILIYGLGKSGISSFKFLKDLAQVYLFDDNLKIKKLLNKKFINLSEITKIKVDIIIISPGINISNCKLSKFLKKNKSKIFTDLDIFYSFYKNKSITITGTNGKSTTAKILHDVLLDQKKDVRLVGNIGNPVLNERKIKKETIFVIEASSYQLDYSKIFTSKYAIILNISPDHLERHKNLKKYVDAKFKLLKFQD

SEQ ID NO: 163977 - protein, 106 aa, Unknown
  Bacterial polypetide isolated from the Sargasso Sea
SNFYTKKPKNIIAITGTNGKTSIANFFYQILSLSKKKAAAIGTLGVLSKKIKLKTNNTTIDPIKMHQILQRLKNSNIDNVIIEASSHGLKQHRLVGLNLKTALFTN

SEQ ID NO: 163978 - protein, 139 aa, Unknown
  Bacterial polypetide isolated from the Sargasso Sea
MLLKQLINNLPKEKKNININGLTTNSKNIKKGFIFFAIKGHIVNGENYIPEAVKKGAIVVICSKKCKYQNNEILIIKTSNIRFFLSEISSKFYKLKPKNLIAVTGTNGKTSVADLYYQILHLNNIPVASIGTLGLKYNN

SEQ ID NO: 163979 - protein, 154 aa, Unknown
  Bacterial polypetide isolated from the Sargasso Sea
MALNSKEVKKGFIFFAVKGNRFNGENYINQAIKNGAIVIICSSSCKFKSKKVFVIKTKEIRKYLSKIVSNFYKLKPKNIIAVTGTNGKTSVADFFYQILDINNVPVASIGTLGIKFKKKFIKTNLTSPDTITLHKYLEELKKNKIDNVIIEASS

SEQ ID NO: 163980 - protein, 256 aa, Unknown
  Bacterial polypetide isolated from the Sargasso Sea
MVYGLGRTGISSYEFLKKKALVYLFDDNPETVRKIHKKCISLKELKRIKFDKIIISPGIDISNCKLSNFLKKNFLKIYTDLDIFYSFFKNDCFTITGTNGKSTTCKLLHEVLLDQKFDTKLVGNIGNPILSSKNIKKKTIFVVEASSYQLEYSKIFRSKFAVILNISPDHIERHKTINKYVKAKFSLINNQRKGNFAFVKKNDYLISNIIKHNKFKSTIIEVQQKNFDTYINKLENNYFFTDSNKENLSFVLAISK

SEQ ID NO: 163981 - protein, 168 aa, Unknown
  Bacterial polypetide isolated from the Sargasso Sea
MKKIIKSLPIEKKKLKILGISNNSKKIKKGYLFFAIKGKNFNGEKFIDEAIKKGAIAIFCSKNCKYRHKDIPVVKFSNIRRILSKVCSDFYKLKPKNIIAVTGTNGKTSVADLFYQILELNNIPVASIGTLGIKYKKKTIKSNLTSPDTIVLHEALKKIKKNNINNVI

SEQ ID NO: 163982 - protein, 149 aa, Unknown
  Bacterial polypetide isolated from the Sargasso Sea
MKPLINILRGINVISVYGNNNILIKGLSVDSRLVQDDYLFFAVDGNNFDGHEYINFSIKKGCTAIVATKKPKDLLNDICYIIIDNIREAIHRISSNFFENPSKKIKIITVTGTNGKTSITYFLYNFLKSIGKNVGMFSTMKIKLEIDLL

SEQ ID NO: 163983 - protein, 139 aa, Unknown
  Bacterial polypetide isolated from the Sargasso Sea
MNKKLVVLGIGISGLGVANLAFNKGFKVFVSDIGAINQKIKKQLDNLKIFWEENTSEATCLNDANYLIKSPGVPDNSPTVLKAKYLEIPVISEIEFASIYTNAKIIGITGTNGKTSTTELTYHILKKSGINVELRKHRH

SEQ ID NO: 163984 - protein, 194 aa, Unknown
  Bacterial polypetide isolated from the Sargasso Sea
MKDLENFRDIKIRSIHLDSREVKEGGLFFAVKGHDKDGSDFISSAISNGASLVISDTYQKYREKVIYFEELKKYIGIFASRFYNSPSSKIKSICVTGTNGKTTSVETFANMSNLLGYKSGFMSTINFSKDGLMLEKSDLTTPDAIKIHKNIKDSLESDAIYIAMEASSHGLEQDRLIGLDIDYAILTSFSHDHL

SEQ ID NO: 163985 - protein, 104 aa, Unknown
  Bacterial polypetide isolated from the Sargasso Sea
LIDKAEIFNSAAIPVEVFKVAMLRKNAGFIISRFYGNPSKNIKVTGVTGTNGKTTVSYLIAYVMHELKNNSAFIGTLGYGLFGQIETSKTTTPDPVKLHSLFSL

SEQ ID NO: 163986 - protein, 261 aa, Unknown
  Bacterial polypetide isolated from the Sargasso Sea
MIKSISTDTRSIFKKSMFIALKGNNFNGNDYVEEALKKGAVIALTDDKRFLNSKNKKIIYVKNTIVALGKISRNIIKEFNGTVIAVTGSNGKTTTTNIIASTLKESSSTIENFNNEIGMPLSLINASFKSKQLVLEIGASKFKDIDYLSKILNPHIGIITNIGNSHLEKLQNIQGVLKVKSEIIKNIRSDGFLIVPNEKKQYLNYWKKIRTDIRILTFGINKEADFHATNIKTKKNGTDFYIASKFLDKPILIKTNLEGTH

SEQ ID NO: 163987 - protein, 269 aa, Unknown
  Bacterial polypetide isolated from the Sargasso Sea
SCFNFLKKNNQIKIYDDNHKTIPKNIKNNYFIKINNIKKDFYEYIVISPGIDINKCRLKFFLLKNKNKIITDLDLFYFQNINNTKITITGTNGKSTTSKLLYTIIKKHKKNVKLIGNIGKPVLDQKAKNSKTIFVIEASSYQIEYSKYYKTDYSMILNISPDHLERHQTMKNYVNAKFKLVKNQKDNGYAYIAKNNIYLKRISKKTKLKSKIILVDFKNIETIKSNILNPYFKNINNLQNLSFIFEISKKLGLKKKKIIESLNSFHGLK

SEQ ID NO: 163988 - protein, 110 aa, Unknown
  Bacterial polypetide isolated from the Sargasso Sea
MEITGLTADSRVVKPGFLFAALPGSNVDGRSFIAAAIENGAAAVLAPEDTNTPEGAPLIAALDARAALAHMAAAFYADQPHTIAAVTGTNGKTSVAHFTRQIGRRWQQRR

SEQ ID NO: 163989 - protein, 272 aa, Unknown
  Bacterial polypetide isolated from the Sargasso Sea
IIWVNDSIKALKTISNNIIKDYSGNVIAITGSNGKTTTTNIIGKTLKNNSKTLKNFNNEIGMPLSLMNASSKSKNLIFEIGASKLNDIDYLSKILRPNVGLITNIGNSHLESLKNIDGVFKVKSEIVKNIKKNGFLVVPNDNKKHLNKWKKMRSDITTISFGMRDDSDFYPIDVKIKQNGLSFLVASRLLEKSIKISSSLEGLHNVKNILSACAVHYCLGQNPKDFSKSISLSKLDNLRQVKCKWLKGSTLIDDSYNANPDSTKKSIDLLSN

SEQ ID NO: 163990 - protein, 167 aa, Unknown
  Bacterial polypetide isolated from the Sargasso Sea
MLLGEVFKNIDKKYKKIKFKDIKFNSKDCKLNDIFFAIKGNNLDGRKYIRDAIKNGAKIIVSSLKLNKSKKKDILFIRNKNPRKLLSLISSRIYKSKPSNIIAVTGTNGKTSVANFYQQILNLNNIKVASIGTLGVSSRNFNLNSSNTTLDSVSIHKILYKLKKLKI

SEQ ID NO: 163991 - protein, 215 aa, Unknown
  Bacterial polypetide isolated from the Sargasso Sea
MSIFLDKKILIYGLGKSGISTYHFLKNKSDISLFDDFQNKFKNLDIKKKIVSYKKVLKIKFDQIILSPGIDINNCKLSKFLKKNRERIYSDLDIFYSFYKNDNITITGTNGKSTTCQLLYEVLLNHKFDVKLVGNIGNPILSSKYIKKKTIFVIEASSYQLEYSQIFKSKYAAILNISPDHIERHKTLNRYIKAKFKLLKNQRKGNFAFVKDNDP

SEQ ID NO: 163992 - protein, 305 aa, Unknown
  Bacterial polypetide isolated from the Sargasso Sea
FCWDDNKKIRRKIKNLNYPVSKFWSKENLIDTIVISPGIDINKCKLKSFLKKNKNKTITDLDIFFDLNKKAIIISITGTNGKSTTCKIIEKILKTADHKVKTLGNIGNPILSKNNINRKNIIILEVSSYQLQYSKLYRSHHAAILNISPDHLDRHRSMKEYIEIKSKIFFAQNKSDFSYINENNKHSKKIEKIFNSKKLKSKLINIKGNECKKILKNVKNKYFKSKGNIENLSFAYKIAKKLKVSNKNIFKAINQFKGLPHRQEIIFSNKKILCINDSKATSFDACAQSLENYDKIYWIVGGVQS

SEQ ID NO: 163993 - protein, 179 aa, Unknown
  Bacterial polypetide isolated from the Sargasso Sea
MNKSLFYLVEDLIEPKYNYKNINISGIKTDSNKVLPGDLFIAVPGIQFDGHDFISQAIRNGASAVITNGREVDIDPIPQIKVANPRRAVSFVSSKFFDSPSRDIIVIGITGTNGKTTTAYLIANALNKAGYKTAQIGTTGVIAEGFDQKKTLTTPDAVRLQELFFEFKNSKFTHVVMEV

SEQ ID NO: 163994 - protein, 206 aa, Unknown
  Bacterial polypetide isolated from the Sargasso Sea
MLDLKENFNNKKILIYGYGISGKACFHYLKKKNKVFIYDDNKKIIPSVTKKKITKEKILKTKFDIIIISPGIDKKKCGLSKFIKKNDRKTVTELDIFYLNNLKNKKITITGTNGKSTTAKLIYEIIKKNNKDVRLVGNIGKPLLFEKNINKNTLFVIEASSYQIEYSKYFRSDIAAILNISPDHLERHQTFSKYISAKLKLIKNQN

SEQ ID NO: 163995 - protein, 286 aa, Unknown
  Bacterial polypetide isolated from the Sargasso Sea
VSDLSKDKEVINNRDTIIDKGIDCEIGKHTNRIYDADYWIVSPGVPSDIDIIKKAKKLKIPIIGEIEFASRLTNIPIIAVTGSNGKSTTVSIIHNMLKTKNLSPILAGNIGIPLSKIILEEIKNPDIGNILILEISSFQLEFIDQFRPIISVFLNISPDHLDRHKNMDEYIQMKLKMIANSREDDKIVYNEDDDTFRKQFSGRRPNEIPFSIKRKTQFFSVCKTKIYGEKNDLFCSLDDILLKGEHNLSNLIASATVAKILNVDNQTIKNTMQNYSGIDHRLQTIR

SEQ ID NO: 163996 - protein, 133 aa, Unknown
  Bacterial polypetide isolated from the Sargasso Sea
NCANIPILQCDNPRHIMALMAARVWPSQPGMVDAVTGTNGKTSTTEFLRQLWQRATWQAVAIGTLGVTGTDMIKADGTILSLPPLTTPDSISLHGAIAPLAKAGVTHLAMEASSHGLSQHRLDGINIHLAAFT

SEQ ID NO: 163997 - protein, 279 aa, Unknown
  Bacterial polypetide isolated from the Sargasso Sea
MVDEKNPIFALSTPKARGAIGVFRISGKNCHNIIKKISSKKRWKKNTTSINYLLDEEKRKIDKTITVFFNSPNTYTGENMVEISCHGGLAIINKISQTLINSGLRPANPGEFTKRSLFNDKLDLTQVEGVSDLVNAETEQQRIIAFKNLEGHTSSAIKRLNLKITKMLADTEALIDFSDEDLPKNTLTNLKEQNKNIIKLIKKDVKRSGLSRPIRDGFLIGILGKPNTGKSSFLNYISGREVAIVTNIPGTTTDSLEVPIDIDGYKFRFIDTAGHKKTQ

SEQ ID NO: 163998 - protein, 300 aa, Unknown
  Bacterial polypetide isolated from the Sargasso Sea
MIDNHSSKRNINLVIGLGKSGFWAAKFLRSINKRVIVWESKDGIEFLERKTALEDLNIIVSLNKEFVFEEIQPFLKEIESVVVSPSIPYDHITIIELKKKEIKVIGEINVAWEILKDTNWIGITGTNGKTTVTHLLSHILCDTGLYAPFAGNIGTPLCKYAHSKKHEKIDWVVAELSSYQIEISPEVKPNIGIWTTFTEDHLERHKTLENYFNIKKSLLEKSDFRIYNYDDKNLRNHYSSLSRGVWITTSFDKSNFIHCDYWIDEQAYIVERGKKLFKLEHFSLKGMHNLQNLLLVMQQQ

SEQ ID NO: 163999 - protein, 139 aa, Unknown
  Bacterial polypetide isolated from the Sargasso Sea
MQLKKLIKNLAFEKKNILIRGLSANSKFVKKGFIFFAIKGFKVDGEKFINEAIKKGASVIVCSKRSNYNNKKILVIKTSNVRKLLSKVASKFYLPKPKNIIAVTGTNGKTSVADLFYQILNLNKIPVACIGTLGIKSKG

SEQ ID NO: 164000 - protein, 261 aa, Unknown
  Bacterial polypetide isolated from the Sargasso Sea
SQIINSTLDITDNSVLFINHQSKEKLEKYISEALDKNLQTIVTSENCSISNEKIIKVKNYEEKYNEVLIKLCPGYQGKNFYGITGTNGKTTTGFYLNQLINKPSLFIGTTEEDIFKKVTNEEHLTTPKLFNILKLLGLNENKDINNVIIEVSSHALEQERLKGLKFKISGFTNLSQDHFDYHKNIENYFNSKLKLFSNNVSEKLVYIDSDWGNKINSLSKIPSFSIGRSKKNNLYIKKINIDKEKYDLTFEIEGKSLKLQF

SEQ ID NO: 164001 - protein, 266 aa, Unknown
  Bacterial polypetide isolated from the Sargasso Sea
MKKNLNIFFNKKILIYGLGKSGISTFNFLKNKSDVFLYDDFYKNSKKILSYNSVNNTNFDYIIISPGIDINKCRLSKYLKKNFKKIYSDLDVFYSVYKNDCITITGTNGKSTTCQLLFEILKKQNCDVKLVGNIGNPILSAKKIKSKTIFVVEASSYQLEYSKIFKSKYAAILNISPDHIERHKTIERYVNAKFSILNNQSKKSFGFVKENDNFIKKKLRRERFNCKIIRVNSFKKNHIVNKIKNEYFSTEANKENLLFALKISEK

SEQ ID NO: 164002 - protein, 267 aa, Unknown
  Bacterial polypetide isolated from the Sargasso Sea
MNTLNNDELSLIKKLNSNQIINSTLDITDNSVLFINHESKEKLEKYISEALDKNLQTIVTSENCSISNEKIIKVKNYEEKYNEVLIKLCPGYQDKNFYGITGTNGKTTTGFYLNQLINDPSLFIGTTEEDIFKKVTNEEHLTTPKLFNILKLLGLSENKDINNVIIEVSSHALEQERLKGLKFKISGFTNLSQDHFDYHKNIENYFNSKLKLFSNNVSEKLVYIDSDWGNKINSLSKIPSFSIGRSKKNNLYIKKINIEKDKYDLTF

SEQ ID NO: 164003 - protein, 283 aa, Unknown
  Bacterial polypetide isolated from the Sargasso Sea
DINSCKLKRYLKKNLKKINTDLDIFFCKYYKNKIITITGTNGKSTTAKILYEVLKKQKKDVRLVGNIGNPILLEKNITNKTIFVIEASSYQLEYSKIFKSNISAILNISPDHLERHKTLKNYIKAKFKLINNQTKKDIAILNINNGYIKKYIKNKKYLPKIIKVNGNVKSTILNKINNPYFKTEANIENLSFILKIIKILKIKEKNILNILKNFKGLNYRQQIIFKSKDLTIINDSKSTSFSSSSGILKSLSNAYWIVGGLKKRGDKFLLSKNDCKNFKAYIF

SEQ ID NO: 164004 - protein, 132 aa, Unknown
  Bacterial polypetide isolated from the Sargasso Sea
MRSIKLHKLLDLVGIIPSLDLIDHEINNISFNSKEVQKGTLFLGMPGLNVDGGKYCIEAIANGAEAAIIGSTAKEKIGFIDRKRILVIEDNLDYIFGQIVSEFWNRPSRKLKLIGVTGTNGKTTITFLLEYL

SEQ ID NO: 164005 - protein, 196 aa, Unknown
  Bacterial polypetide isolated from the Sargasso Sea
MININKSTKINIRDKKITVIGLGVSGKAASILANHLGAIVFASDLNSNDEVNLNAMELIHDHHISTETGLHSQKIYNSDLWVLSPGISIDSKIVKIAYKKNIPIVSEIEFASWYTKSPIIGITGSNGKTTTTHILHKIFQTSEIKGVMAGNVGIPFSECVLNEILKPTKKLLYLLEVSSFQLEFICTLRPYNSYFH

SEQ ID NO: 164006 - protein, 189 aa, Unknown
  Bacterial polypetide isolated from the Sargasso Sea
MIKSISTDTRSIVKKSMFIALKGNNFNGNDYVEEALKKGAVIALTDDKRFLNSKNKKIIYVKNTILALGKISRNIIKEFNGTVIAVTGSNGKTTTTNIIASTLKESSSTIENFNNEIGMPLSLINASFKSKQLVLEIGASKFKDIDYLSKILNPHIGIITNIGNSHLEKLQNIKGVLKVKSEIIKNIRK

SEQ ID NO: 164007 - protein, 253 aa, Unknown
  Bacterial polypetide isolated from the Sargasso Sea
MIWKSSGSNQIAVNNVSNNSKKIKSGDIYIAIKGSNFDGHDFIDDAIKEGAVCVICEVYPLNRLENITYIITKSSKETYSRICSNYFDNPSHKLKLIGVTGTNGKTSCTSLMHQMFNLNGLKCGLISTNKIIVGSKEYDTNLTTPDSYDLNYYLNEMIKTDIKYCFMEVSSHSIDQRRISGLKYELAIFTNITHDHLNYHKNFKNYLNVKKKFFDDLDNNAHSLINSDDKNSKYIIQNTKSKVYTYSISKNAD

SEQ ID NO: 164008 - protein, 278 aa, Unknown
  Bacterial polypetide isolated from the Sargasso Sea
MRITLPNSRTFSKIFQKATGKSISEKINGIATDSREVQEGDLYIAIKGEKVDGSDFLGQVFENGASYAMVSKKQNYTKGEQIEVGDTIKTIGKIATEWRLQFSIPVIGITGTNGKTSTKELLKHILSSKFDVHATEGNYNTSIGLPLTLLQLTKFHGASILEMGANQIGDIDILAKIAKPNIGVITNIAPAHLEGFGSIEAVAKTKAAIFENLPNGTAFINYADERVKKIKVNGKSVSFGINPDCDYPADLHYEDDGSITLTINAEEIPTFSSNLSFA

SEQ ID NO: 164009 - protein, 115 aa, Unknown
  Bacterial polypetide isolated from the Sargasso Sea
MLLKNLISNLKPNVAATKIRGISFDSRNIKKGDLFVSIKGNKFNGNDYINQAISKGAKAIVHSQTIKKNKKIVYIKVKDTRDAFARLSTNYYKNKPKNIIAVTGTNGKTSISDFF

SEQ ID NO: 164010 - protein, 309 aa, Unknown
  Bacterial polypetide isolated from the Sargasso Sea
MHLSDLNNPEILLPKNADKIPIKSITSDSRKLTKDCMFVAIKGYEKDGHDFIDEAISGGASNILVDYNYKDTKQLPLSKSKNVRKALALVASIYFNKQPNIIAAVTGTNGKTSVCTFLKQIWDLNNFKSASLGTLGLNTSKEIKHKETQNENLTTLDPLKLHECISQIKQLGVDRLALEASSHGLEQHRLDGVKVSLACFTNLSHDHIDFHKSLDNYKKQKFRLFTEILQDSGTAVINIDDINSKELLDKLHNRNINIITFGKSSNANWKIKKIFEIGDHKTFELLVNKKRFIIPTALNSNFQIYNAVA

SEQ ID NO: 164011 - protein, 123 aa, Unknown
  Bacterial polypetide isolated from the Sargasso Sea
MLLKELIKEIENLDIRGSTNIKVNNVSKNSNEIKPGDLFVAIKGSKSDGHDFINDAIIKGAKCILSEKIIDIEDDNLTFVITKCSKETYSRVCSKFFGNPSNKLKLIGITGTNGKTTSSNLLY

SEQ ID NO: 164012 - protein, 203 aa, Unknown
  Bacterial polypetide isolated from the Sargasso Sea
MVAAGLDGQSSVSWPGAETEDPEIVRVSHDSRSVASGDLFCCVAGGTHDGHRFAADAVATGAVGLLVEHSVIDASVPVVRVSSVRQVIGPLAAALHSWPSRSLDLVGVTGTNGKTSVVHLLRSILKASGRRAESWGTLSGERTTPEGTDLQATIASWVAGGVDAAALEVSSHALAQHRVDGTTFAAVAFTTLGRDHLTSTAPW

SEQ ID NO: 164013 - protein, 207 aa, Unknown
  Bacterial polypetide isolated from the Sargasso Sea
MKFTNDLYFKKKILIYGLGISGISCLNYLKKNNLVKCFDDNKSNLKHKKFKKYLISKKKITKFNFDHIIMSPGINSLQCSLKNYIKKNKSKVCTDLDVFYSEYYNNFIIAITGTNGKSTVSKLLNDILKKDKYDSRLVGNIGNAILNEKKIYKKTIFVVEISSYQILYSKIFKPNYGILLNISPDHLERHKTFNNYCKTKFKLMFSI

SEQ ID NO: 164014 - protein, 300 aa, Unknown
  Bacterial polypetide isolated from the Sargasso Sea
YIQESISNGACAILCNDRFDVSKINVPYIVCQDTLKSLASLAAGYRKIIGSPLTIGITGTNGKTTVTQLTTAILKQCFSVSTTLGNYNNDIGLPLSILRSSDENCQRCVYELGASKKNDISYLVNICEPKMTALLNVSEAHMESFGSFETLINTKEEIFSHTNTDQVVLNKDDERFVRWKKMNKYKKITTISIFSDADYFIEKIDDEFLYISTPKGKFELIKKNSTEILAINLLFSIALAMEAGADIQSVKDGIYSFSGVQGRFFSFVSSNKSIVIDDSYNANPESMKSSLNQIKHSKKQ

SEQ ID NO: 164015 - protein, 135 aa, Unknown
  Bacterial polypetide isolated from the Sargasso Sea
MIDNYSSKRNINLVIGLGKSGFWAAKYLRSINKRVIVWESKDGIEFLERKTALEELNIIVSLNKEFVFEEIQPFVKEIESVVVSPSIPYDHITIIELKKKGIKVIGEINIAWEILKDTNWIGITGTNGKTTVTHL

SEQ ID NO: 164016 - protein, 132 aa, Unknown
  Bacterial polypetide isolated from the Sargasso Sea
MKNLKEILFKVTVDAIYGDTSTLVKDICFSSKKVDKDSLFVAINGYNTDGHNFIHEAINNGASTVICEVLPKDFKKLKSVFVKVTCSKSALSIISSNFYDNPSSKIDLIGITGTNGKTTISSLLFDLFNRFS

SEQ ID NO: 164017 - protein, 310 aa, Unknown
  Bacterial polypetide isolated from the Sargasso Sea
VYRNFRCKAFRSLKAKVFCWDDNKNIRKKIKKLNFKVNKFWLDKKPVDNIVISPGIDIRKCKIKNYLKKNLNKIITDLDLFFELNKNSTIISITGTNGKSTTCKIIEKIIKTAKLNVKTVGNIGNPILSIGKKTKKCIFILEASSYQLEYSKLFRSKHAAILNISPDHLERHKNIKNYIKVKSKIFFAQKKSDYLYINKGNKYFKVIEKIYKRKKIRSKLKLIKKANYKILLKKINNKYFKSDGNIENLGFAYEIAKNLRIKDKIIIKALNRFKGLPHRQEIVFSKKNITCINDSKATSFDASLQSLLNT

SEQ ID NO: 164018 - protein, 232 aa, Unknown
  Bacterial polypetide isolated from the Sargasso Sea
MIDNHSSKRNINLVIGLGKSGFWAAKYLRSINKRVIVWESKVGIEFLERKTELEELNILVSLNKEFVFEEIQPFVKEIESVVVSPSIPYDHITIIELKKKGIKVIGEINVAWEILKDINWIGITGTNGKTTVTHLLSHILCDNGLYAPFAGNIGTPLCKYAHSKKHEKIDWVVAELSSYQIEISPEVKPNIGIWTTFTEDHLERHKTLENYFNIKKSLLEKSDFRIYNYDDK

SEQ ID NO: 164019 - protein, 190 aa, Unknown
  Bacterial polypetide isolated from the Sargasso Sea
MDVPSLILDNDENSFCIYGLGKTGSSVVNYFNRKGFTEYKVWDDDKILRSTYGFRNSSQKEEELFSQHLDSTQYIVLSPGINIKKAKLKKKLIKNKHKIISDLDLFYLLNPKIRTILITGTNGKSTICKILEHVFKENKINVKLGGNIGKPILDLDIKGDPMFIIEASSFQLAYSKFIKPKSASNIKCNQ

SEQ ID NO: 164020 - protein, 216 aa, Unknown
  Bacterial polypetide isolated from the Sargasso Sea
MLLSELGNIINYKHIINLSKNKEFNRVSSSSKEVNKKTIFFINNKKKIKTEYLLEALNKKTPAIISNKIFSNLLIPQFIVKDVDKEINKILKKLKPNKPLTSIAITGTNGKTSVAWYIAQICKINNIKNKMQGTLGFFIDNKKFKNEALTTPSYETLYQNAFTKKNNKYNFIFEASSHALQQDRIKNFPINIAAITNISHDHLDNHKSFLNYKKAK

SEQ ID NO: 164021 - protein, 308 aa, Unknown
  Bacterial polypetide isolated from the Sargasso Sea
ILITGTNGKTSVTRMTEFLLSKFYGEEKVALGGNIGEPALDLLSKDIEYSVIEVSSFQLEYIQQIRSEISVFLNLGQDHLDRHKTLEEYRRIKERIFLNSNFLIFQDSTSPLQSNEQVSLNFLSEFKEVNEDIKSLLPKGWPEYETMNLKASISIYMALEMLKHNSVNFSKIDFIKENLEKIMRFYNDFSRSPHRFDVLGTINSALYIDDSKSTNVSSMINALDSARQIKDGKEVILILGGDAKGQDFQSINKSSLRGVKSAIIFGKDSNLICDSINSKCNCDVVENLEDAVNLSKNIAKKDDIILLS

SEQ ID NO: 164022 - protein, 143 aa, Unknown
  Bacterial polypetide isolated from the Sargasso Sea
MTTMLLKNLINNLDPKIAGERVKGIASDSRNVKKGDLFISIKGNKLDGNSFIKDAISRGAKAIVYSGSIKKKYSNIILIKVTDPRSKLAEISSKFYQKKPKNIVAVTGTNGKTSVSDFFYQILKLFKMPVGMIGTLGFKKKYN

SEQ ID NO: 164023 - protein, 97 aa, Unknown
  Bacterial polypetide isolated from the Sargasso Sea
AESRKIKKGDLFVSIKGNKFDGNKFIDQAILKGAKVVIYPGPLKKKNNNIISIKTKNTRERLAEISSKYFKKKPKNIIAVTGTNGKTSVSEFFHQIL

SEQ ID NO: 164024 - protein, 303 aa, Unknown
  Bacterial polypetide isolated from the Sargasso Sea
MHLEPTVGGSRDVGSAIISTLFETGEDGRIPVAAVTGTNGKTTVTRLLAHVASTGGATVGIACTEGVWVGDRQLDSGDCSGPASARRILAQPNVTTAVLETARGGILREGCGFDACDVAVVTNISSGDHLGLHEIDTPEQLAWVKGAIVAAVRTSGAAVLNAADPLVVDMKKWCQGRVIYFSLNPEFPVLTEHLASGGLGATIRDGWIVLCDGPRETRLANLDKVPLVHQGLVSFQVENALAASAAAWSMGVPLELVRLGLESFSSGALGSPGRFNMLELDGATVVVDYGHNVPSLEQVCLTL

SEQ ID NO: 164025 - protein, 153 aa, Unknown
  Bacterial polypetide isolated from the Sargasso Sea
MLLGKVLKKINKKYKSIRFKNIKCNSKDCKPNDIFFAIKGNKSNGNNFISEAIKNGAKIIVSNLKFRGFDKDGNLFIYEKEPRQLLSEAANLFYQKKPRNLIAVTGTNGKTSIANFFYQILNYNNKAVATIGTLGVISKKLKLKTANTTIDPN

SEQ ID NO: 164026 - protein, 312 aa, Unknown
  Bacterial polypetide isolated from the Sargasso Sea
SGISSLNYLKKNNYIRCFDDNLKNFKNKVFKSYFISKKEINKAKFDHIIISPGIDSLKCLLKKYLIRNKTKICTDLDVFYAKHSENLIIGITGTNGKSTTAKLLCDILKKNRSDARLVGNIGNAILKENKISPKTIFVVEISSYQISYSKIFKPNYGVLLNISPDHLERHKTINNYIKTKFKLILSLKKNDYGYINKNDLIQKNFIKNKKFNCKIIKVENKLSEQDKSLLKNNYFKTLNNQQNLSFVLKICSTLRIKKSIIFKVVNDFKALNFRQQIIYNSNKLRIINDSKSTSFSSSINLLDNMDCIFWIL

SEQ ID NO: 164027 - protein, 208 aa, Unknown
  Bacterial polypetide isolated from the Sargasso Sea
MNLSKLAEISEGQLFGEVTSIDSFSIDSRTIKQNDIYIALKGKNYDGAQFIPEAINKGAVGIISNNQIEQDIPNIVVASTYEFMNRVANYNRSKFSGKVIGITGTNGKTSTKQILSNLLNDGKSCHKTLGNKNNQIGVPYTLLSLKNVYDFSVIEMGTSESGEIAILNNQVKPDIAAITNVSIGHLDGLRDTESIAREKGNILNFYND

SEQ ID NO: 164028 - protein, 138 aa, Unknown
  Bacterial polypetide isolated from the Sargasso Sea
MPVENITGDPDISGITEDSRRVESGFLFVAISGVRFDGINYLEEAVRRGASAVLIEEGKTCKAPGVTVVSTSRDLRHSYSLLAAQLYDMQPKSVVAVTGTNGKTSVVSFLRQIWSFNGIQAASLGTLGLEAPAIKHHD

SEQ ID NO: 164029 - protein, 238 aa, Unknown
  Bacterial polypetide isolated from the Sargasso Sea
MDYYIYACLTWFSSTQTKINQVRKRIPLVLGFGITGQSILNYLSKKYNEIYLIEDWEENPSLREIDRFGIKIHVNPQLNRDLFSKVSDIYSSPGVPIHHKALSLASEHKINIFSDIEEFIKINKSIKILITGTNGKTSTCQILETLLKSVFSDLKIVSIGNIGRPVLNYIDNDIDVSIIEVSSFQLELLNEVKFDIGLLLNIEEDHLDRHSDIEDYRNVKNSVLKNADINISYNDRNI

SEQ ID NO: 164030 - protein, 115 aa, Unknown
  Bacterial polypetide isolated from the Sargasso Sea
MTILQRLNCGDSILIIGLGKTGFCSARFFANLGLKVRVMDQSSSPKYLSEIELLFPQIELCCGTINISWLQQATTIVLSPGISPYKSSWLHPYLTKVVSDVELFCRCVDSKYYSS

SEQ ID NO: 164031 - protein, 185 aa, Unknown
  Bacterial polypetide isolated from the Sargasso Sea
MLLKKLIKNLSPKTSALKITGISQDSRKVKKGYLFVALKGEKYDGNKYIPQAISKGARAVIYSGKIKKNKKTEFIRFKDTRNIFASLSANYYKNKPKNIVAVTGTNGKTSVADFYYQIFKLQNIKSGFIGTLGFRKNKLLKKRNLTTLDSFTLNKDLNEMSRRNINNVIIEASSHGLKQKRVNFL

SEQ ID NO: 164032 - protein, 161 aa, Unknown
  Bacterial polypetide isolated from the Sargasso Sea
MHLSELCPPYVGKISGGSNPIITGITDDSREVIPGFLFVALLGSKNDGAVFISDAAAKGASAILALDGITLPDSAATIPLVSSPNPRRSLAICASRYFKTQPQTVAAVTGTNGKTSVAWFTKQLWSRLEKKSASIGTLGMHTDQEPQSLGKGLTTEDPDYA

SEQ ID NO: 164033 - protein, 148 aa, Unknown
  Bacterial polypetide isolated from the Sargasso Sea
MRSIKLHKLLDLVGIIPSLDLIDHEINNISFNSKEVQKGTLFLGMPGLNVDGGKYCIEAIENGAEAAIIGSAAKEKIGSIDRERILVIEDNLDYIFGQIVAEFWNRPSRKLKLIGVTGTNGKTTITFLLEYLLKKLGKKTALFGTLLN

SEQ ID NO: 164034 - protein, 297 aa, Unknown
  Bacterial polypetide isolated from the Sargasso Sea
MELKDLALVSNGLLHGDSLEISEFSIDTRSVKEGDVYIAIKGNNFDGHDFIEEAENKKAKALIVNKVVRSNLPFVVVSNTLNFMEAIAAHNRSSFKGNVIGITGTNGKTTSKQIISNLLSQIHKTHKTVGNKNNHIGVPLSMLNMVNEYLSSVIEIGTSQVGEIKSLTSLVRPNIAAITNVSAGHLEGLRDTDSIAKEKGDILQFSDSEGVAVLPRDSSFFNSWINSTNAKKIVSFGFHKDSDFRVMSPTIDVVNNLTSFQLIHSGYREECSINGIGIHNSLNAAMGLAICSVLGLN

SEQ ID NO: 164035 - protein, 216 aa, Unknown
  Bacterial polypetide isolated from the Sargasso Sea
MKFITNTSDLAKFLNKKIKFNALIKSISIDTRSLKKNSLFIAIKGENFDGNDFVDEALSKGSNIIIADNKRFKNSKDKRIIWVNDSIKALKTISNNIIEDYGGNVIAITGSNGKTTTTNIIGKTLKNNSKTLKNFNNEIGMPLSLMNASLKSKNLIFEIGASKLNDIDYLSKILQPNVGLITNIGNSHLESLKNIDGVFKVKSEIVKNIKKNGFLV

SEQ ID NO: 164036 - protein, 120 aa, Unknown
  Bacterial polypetide isolated from the Sargasso Sea
MLLKNLIDNLNSKIGNLKIRKISADSRKIKKGDLFVSIKGNKFDGNKFIDQAILKGAKVVIYSGPLKKKNNNIIFIKTKNTRERLAEISSKYFKKKPKNIIAVTGTNGKTSVSDFFHQNF

SEQ ID NO: 164037 - protein, 177 aa, Unknown
  Bacterial polypetide isolated from the Sargasso Sea
MRSIKLHKLLDLVGIIPSLGLIDHEINNISFNSKEVQKGTLFLGMTGLNVDGGKYCIEAIENGAEAAIIGPAAKQKIGSIDRERILVIEDNLDYIFGQIVAEFWNRPARKLKLIGVTGTNGKTTITFLLEYLLKKLGKKTALFGTLLNRWPGFSEVASHTTDFADKLQKKLNAAVEA

SEQ ID NO: 164038 - protein, 235 aa, Unknown
  Bacterial polypetide isolated from the Sargasso Sea
LKEGEVYIAIKGENFDGHDFLDEAEKNKAKALIVSREVNSKLPFIVVKDTLDFMQTIALHNRSVFKGNVIGITGTNGKTTSKQILSNLLSYSHETHKTVGNKNNHIGVPFSMLNMDNRYKSSVIEMGTSQLGEIKNLTSLVKPEIAAITNVSAGHLEGLKDTESIANEKGDILKFYGSEGVAVLPRDSVFFNYWCDKTNAKKIVSFGFHKNSEFKVISPTIDIENNLTSFQLEHR

SEQ ID NO: 164039 - protein, 151 aa, Unknown
  Bacterial polypetide isolated from the Sargasso Sea
MVPNLEISGISEMSKDVQAGDLFLAVGDSALQKTHITEAKHRGAVCVLTDQTTSFGGDLSGVPLICIGDLATRRGALASTFYSNPSRELECVGITGTNGKTSIAYWVADLSSRIGFKTGYSGTLGWGTLESLRPAILTTPNAVEIQKRLFH

SEQ ID NO: 164040 - protein, 206 aa, Unknown
  Bacterial polypetide isolated from the Sargasso Sea
MRSIKLHKLLDLVGIIPSSNFIDQEINNISFNSKEVKKGTLFLGMPGLNVDGGKFCIEAIENGAEAAIIGPTAKQKIGSFDRKRILVIEDNLDYIFGQIVAEFWNRPSRKLKLIGVTGTNGKTTITFLLEYLLKKLGKKTALFGTLFNRWPGFSELASHTTDFADKLQNKLNAAVEAESEFAILEVSSHSIAQNRISGCEFEAAIF

SEQ ID NO: 164041 - protein, 129 aa, Unknown
  Bacterial polypetide isolated from the Sargasso Sea
MAQTVVVGLGRSGQGAARLLQATGHPVAVIDSGQSEQLEKKAEGLRQQGIEVQLQAPLAIDSFRPWLDQLQRVVISPGIPWDHPTLKDLRQHGVAVDGEMAVAWDALKHIPWVGITGTNGKTTVTHLLS

SEQ ID NO: 164042 - protein, 236 aa, Unknown
  Bacterial polypetide isolated from the Sargasso Sea
MHLSDLNNPEILLPKNADKIPIKSITSDSRKLTKDCMFVAIKGYEKDGHDFIDEAISGGASNILVDYNYKVTKQLPLSKSKNVRKALALIASIYFNKQPNIIAAVTGTNGKTSVCTFLKQIWDLNNFKSASLGTLGLNASKEVKHKETQNENLTTLEPIELHECISKIKRLGVDRLALEASSHGLEQHRLDGVKVSLACFTNLSHDHIDFHKSLNNYKKQKFRLFTEILQDSGTAV

SEQ ID NO: 164043 - protein, 153 aa, Unknown
  Bacterial polypetide isolated from the Sargasso Sea
MKLYKKYLSKFLNQYNGILSNEINIKYEELGEICTDTRKLKKNDIFIALSGENFNGNTFVPIAFENGAAFCISEEINSNSIHVKSTLDFIQKFSAFILQEEDRIFKIGITGTNGKTSTKEIMASVLGQKFVVHKTQGNNNNNIGLPLTILDLN

SEQ ID NO: 164044 - protein, 168 aa, Unknown
  Bacterial polypetide isolated from the Sargasso Sea
MLLSNLSKVIRINKTYNFNKNKYFSAITSNSKFTNNKTLFIYDKNTKVKKIYLDEVLKNKTPAIISNKYIKNLQIPQFVVSNINFETCSLLTKLHSNLPFKTLAVTGTNGKTSVVWYISKILNSLKYNNTIVGTLGHFVNGKKINDINLTTPAYEELFRYGSSNKKEK

SEQ ID NO: 164045 - protein, 132 aa, Unknown
  Bacterial polypetide isolated from the Sargasso Sea
MRSIKLFKLLDLVGIIPSLNLIDQEINNISFNSKEVQKGTLFLGMPGLNVDGGKFCIEAIKNGAEAAIIGSAAKEKIGSIDRERILVIEDNLDYIFGQIVAEFWNRPSRKLKLIGVTGTNGKTTITFLLEHL

SEQ ID NO: 164046 - protein, 195 aa, Unknown
  Bacterial polypetide isolated from the Sargasso Sea
MLLKNLISNLKPQIADTKINGISFDSRKIKKGNLFVSIKGNKFNGNDYIKEAISKGAKVVISSQKIKENTKALFIKSKDTRNILAKISSRFFKNKPKNIIAVTGTNGKTSIADFFCQIFILQKKKTGFIGTLGLRTNKILKQRNLTTLDSLTLNKDLNEIWKRGINNIIVEASSHGLKQKRLNYLNIKARYFYQT

SEQ ID NO: 164047 - protein, 139 aa, Unknown
  Bacterial polypetide isolated from the Sargasso Sea
MLLKNLISNLKPDISALKIRGISFDSRSIKRGDLFVSIKGDKFDGNDYINQATSKGASAVVHSQPVKKNKKTIYIRVKDTRHALARLSTKYYKNKPKNIIAVTGTNGKTSVSDFFHQIFVLQNKKVGFIGTLGFKKNQY

SEQ ID NO: 164048 - protein, 148 aa, Unknown
  Bacterial polypetide isolated from the Sargasso Sea
MRSIKLHKLLDLVGIIPSLDLIDHEINNISFNSKEVQKGTLFLGMPGLKVDGGKYCIEAIKNGAEAAIIGSAAKQKIGSIDRERILVIEDNLDYIFGQIVAEFWNRPSRKLKLIGVTGTNGKTTITFLLEYLLKKLGKKTALFGTCSI

SEQ ID NO: 164049 - protein, 179 aa, Unknown
  Bacterial polypetide isolated from the Sargasso Sea
MIKLSELNVKWIRKEGNWSQRDPNISGIETNSSKIKRGEIFFALKGISSHGADFADDAIKRGASLIITDYDGSQIIKRNTNEFQIPVLICENTSEILTKMCFKFFPSLPSNLMAVTGTNGKTSVVNFIQQLLELNDLSCVTVGTLGVKGVMNISTNTTTPTQVELYKILKNARELGTDY

SEQ ID NO: 164050 - protein, 148 aa, Unknown
  Bacterial polypetide isolated from the Sargasso Sea
MSQLRLSELLRRDVASDPEITAVTADSRQVVPGALFVALPGTQADGRAFIPQALAKGAAAVLAPSDTPAGAAPLLVGSGDVHRAYAIAARAFYGAQPRTCVAVTGTNGKTSVANFCRQIWAGMGLKSASMGTLGVVGQKGDKTYALTG

SEQ ID NO: 164051 - protein, 167 aa, Unknown
  Bacterial polypetide isolated from the Sargasso Sea
MLLSNLSKVIRVNKTYNFNKNKYFSAITSNSKFTNNKTLFVYDKNTKVKKIYLDEVLKNKTPAIISNKYIKNLKIPQFVVSNINFEIHYLLTKLHSNLPFKTLAVTGTNGKTSVVWYISKILNSLKYNNTMVGTLGHFVNGKKINDINLTTPAYEELFRYGSSNKKE

SEQ ID NO: 164052 - protein, 112 aa, Unknown
  Bacterial polypetide isolated from the Sargasso Sea
MLLSNLSKIIKINKTYNFKKNKSFFEITANSKLTNKKTLYIFDKNSKANTAYIKEAIKNNVPAIISNKYYKFIPIPQFIVSDIYEETNLLLKKIHKNYPKKTIAITGTNGKT

SEQ ID NO: 164053 - protein, 357 aa, Unknown
  Bacterial polypetide isolated from the Sargasso Sea
IFNEEVDALMLFAFIIESLIKKTKRLKLVEVVFLLKEITSLEMDLRFEAAAANEYAENTKNDVGFEVPKIYWDYTSENIMTLDWINGVSIRETEALEKRSIDTKKIATDIIQHFLRHAVRDGFFHADMHQGNIFINESGQIVPIDFGIMGRLDNVSKRFLAEILFGFIQRDYKKVAEVHLAAGLVPNNVPVNDLAQALRSIGEPIFGHSIKNISGGKLLKQLFDVTEKFNMQTQPQLLMLQKTMVVVEGVARRLNPETNIWETSKPVLEKWLKETKDPINSINETLKDSVEVLKRLPNLPEVMDKANQALNYLASGQIPQNSNSYNELNTKKEEMKSFRNQSIIGLLSLVILTLLVF

SEQ ID NO: 164054 - protein, 227 aa, Unknown
  Bacterial polypetide isolated from the Sargasso Sea
MIDNHSSKGNINLVIGLGKSGFWAAKYLRSINKRVIVWESKDGIEFLERKTELEELNIIVSLNKEFVFEEIDPFVEEIESVVVSPSIPYDHITIIKLKKKGIKVIGEINVAWEILKDTNWIGITGTNGKTTVTHLLSHILCETELYAPYAGNIGTPLCKYAYSKKREKIDWIVAELSSYQIEISPEVKPNIGIWTTFTEDHLERHKTLENYFNIKKSLLEKSDFRIY

SEQ ID NO: 164055 - protein, 441 aa, Unknown
  Bacterial polypetide isolated from the Sargasso Sea
NSRTFSKIFKKAIGADIVENINGITTDSREIQKGDLYVAIKGENVDGNIFLNDVFKKGALCAIVSELMPDVNGDQIEVSDTIKAIGRVATEWRSQFDIPVIGITGTNGKTSTKELLKHILSSKFDIHATEGNYNTSIGLPLTLLQLTSFHGASILEMGANQIGDINTLAKIAKPNIGLITNIAPAHLEGFGSIEAVAKTKAAIFENLQHGIAFVNYADDKVRKIKVPSKSISFGINPDCDYPADIHYEEDGTITLTINAEEIPTLSSNLSFAKNIIACSAIARELGVEWDAIKDRVQTFTPPNGRCEVKNNGSYVVIDDTYNANLESTVAAIDYLNAFSGEGKKIFIFGDMLELGDLSVNQHMAVGKKCDEINLEAVLTYGNHTYSTNEAIKKVKINHHFKTKTELAEFASEIISPHDKVLVKGSRGMEMETIVKKLLEIK

SEQ ID NO: 164056 - protein, 446 aa, Unknown
  Bacterial polypetide isolated from the Sargasso Sea
MKFITNTSNLSKYLSIPIKGNSVIKSISTDTRSIKKDSMFIAIKGKHFDGNDFVDEALEKGAVIIIADHKRYQEKKNKKIIYVKNTISSLKKISENIIKEFEGNVIAITGSNGKTTTTNLVYKTLKNSSKTLKNFNNEIGMPLSIMNASSRSKNLVLEIGASKFRDINYLSKILKPNVGVITNIGHSHLEKLGNIEGVFKVKSELVDNIQKDGFLIVPNDNQDHLKKWKKLRSDIKVISFGLSSDADFYASKIKIKESGLSFVISSKLIKKSILIKTSIEGEHNIKNILASSAVHFCLNEDLENFANALKTDNFNELRQIKSKWINGSTLIDDTYNANPDSTKKSIDLLSNYKKNTVLVLGDMLELGRYKKKLHKEIGIYAKKKGINTILGYGDLTKYTIEGFGKGARFFKDEKNLKFYLKENITSKDVILMKGSRGMKMERFKNV

SEQ ID NO: 164057 - protein, 206 aa, Unknown
  Bacterial polypetide isolated from the Sargasso Sea
MGMGITGRSISSYLSNQSIHHLVMDSCPKNNANLSSYVDEFLISEDTSILKEISKIFVSPGIDNNNIFLNEAIKREIPISTDMDLYLSQTKSKPILITGTNGKTSVTRMTEFLLGKVYGVDKVALGGNIGEPVIELLSEDIEYSVIEISSFQLEYMQEIRSEISVFLNLGQDHLDRHKTIEEYRRIKERVFLNSNFLIFQDSTSPL

SEQ ID NO: 164058 - protein, 108 aa, Unknown
  Bacterial polypetide isolated from the Sargasso Sea
MENFRDINIRSIHLDSREVKEGGLFFAIKGHDRDGSDFISSAISNGASLVISDTYQKYKERVIYFEDLKKYVGIFASRFYNSPSSKIKSICVTGTNGKTTSVETFASM

SEQ ID NO: 164059 - protein, 137 aa, Unknown
  Bacterial polypetide isolated from the Sargasso Sea
MDLSLNLSKKSFAIYGLGKTGRSIIKYFNKIGFKNYITWDDNKSLKRKWNLNERRKKRFKSLLSTVDYIVVSPGISLKSAKLKKILIKNKSKIITDLDLFYIFNPKIRSIVITGTNGKSTTCKILHHVLKKNGNKCS

SEQ ID NO: 164060 - protein, 128 aa, Unknown
  Bacterial polypetide isolated from the Sargasso Sea
MKELKEILFGVNIDSVYGDTNLSISGISFDSRQIKQNNIFIAIKGYDLDGHNYIDQSINNGAIVVVCESLPKTINKYEIVFIKVKCSKIALYTISSNLYGNPSSKIDLIGVTGTNGKTTITSLLYKLF

SEQ ID NO: 164061 - protein, 139 aa, Unknown
  Bacterial polypetide isolated from the Sargasso Sea
MLFSDIQKILINAKIIGNLNNKKIKFITDHSKDVNSNTLLVVDKNKKIKQMYLQDAITNGLKIIITNTFFRNLQITQVVVKDLNKDVYKLLNLIQPYKPNKSIAITGTNGKTSTAWYLAQICKLNNISTKLSGTLGYYK

SEQ ID NO: 164062 - protein, 232 aa, Unknown
  Bacterial polypetide isolated from the Sargasso Sea
MNRLKICTSFILKNSDRGECLSDRISIDSRRINQNQVFISLEPDVAKNITNIKHAIANGASGFISPFYISRQKIKTSLPFLIERGIDKIYVDLFKADFKDKELKPVIIGITGTNGKTSTALLLAQALRHQNKKIGVISSEGAGVYPNLAENEYTTPPLDINYKYLRSFCKKKCDYVIIECSSQGLHQGRLEGIHFTYSIITNIDQDHIEYHKSIKNYINSKLKIMHQSRTSI

SEQ ID NO: 164063 - protein, 445 aa, Unknown
  Bacterial polypetide isolated from the Sargasso Sea
MKLSTEDIAKALGVSPINTNANLSLNNISIDSRDPQKDNIFIAIKGEHHNGHDFIDDAFEKGASIAITEQHHHSHPVFVVDNTIKALGKIANYYSLLINPITIGITGTNGKTTVTNLVANILKKNNKTIQTLGNYNNSIGLPLSIMKAEDDTEYFVLEMGARKIGDIRELTAIAKPNIVALLNVSSAHLDTFHTIENILKTKEEIFEDQGYKKIVILNKDDINFNRWHKKSSRHEIRTISRTKDADYKVTAVSPDKLLLKTYRGDMLSINIKNTEDYYIDNILFSVALATEAGASISDVKNGIESFEIPSGRFNKIKGINDCTIIDSTYNANPASFKASIDSLVSIPGDHLMIMGEMGELGNDSFNHHLDVISYAINKGTSKIFLKCSFSDKIKERYDKNIIIFDNIDELKNLIYPVLNSNSVILVKASRFMRFEEITKILEFRN

SEQ ID NO: 164064 - protein, 197 aa, Unknown
  Bacterial polypetide isolated from the Sargasso Sea
MNLRVSDVANYLSSSFEGTDREIKKIVIDSRNVKKGDLFLAIPGIKNDGHEFIKDAIDNGAACIVCEKPHDFGSPSISTFIVNSSIHALGNIAREYKINIGQPYTIGITGTNGKTTVTKLCTAILSSSFKTSSTIGNYNNELGLPLSILKATQETEKCIYEHGARKQNDISYLTQISQPDFTTLLNVSEAHMESFKS

SEQ ID NO: 164065 - protein, 438 aa, Unknown
  Bacterial polypetide isolated from the Sargasso Sea
MLKSKCFSKKSYVVIGMGKTGCSIYKSLTNSGAVVYFWEDNPKHSKKILNKGYKKYSSKISQIDYVIPSPGIATKGKSAHKLIKKLTSKNTKLISELDLFQIYLDNLNTRNLIKIIAVTGTNGKSTTVSLIHHILKKNKFNTELAGNIGNPIFETKMIKKGFYVLELSSYQLESSKIFQPDIACILNLTPDHLARHNTMSNYGNAKLNIFKNINSSQKGFFNNDSIIKKLIKKNNHLNKMKNLKQINKNKKNSIKKLNENQYNLLSNDQNYHFSYEILKEVGLSSNKIFNAFKSFRGLEFRQQIIFSDKRKLIINDSKSTNYHSLIAALKKYKDIILICGGQIKSNNISILDDSLSNIKKVIIIGEESNTFHKYFQSKVTTVYVQSLDKAVVEMSKFMKTNTDFNTFLFSPGAASFDQYNNFEERGRHFNKLISKLSK

SEQ ID NO: 164066 - protein, 133 aa, Unknown
  Bacterial polypetide isolated from the Sargasso Sea
MHLSDLNNPEILLPKNADKIPIKSITSDSRKLTKDCMFVAIKGYEKDGHDFIDEAISGGASNILVDYNYKVTKQLPLSKSKNVRKALALVASIYFNKQPNIIAAVTGTNGKTSVCTFFEQIWDLNNFKSASFR

SEQ ID NO: 164067 - protein, 447 aa, Unknown
  Bacterial polypetide isolated from the Sargasso Sea
MINELPIAILGFGKTGVSVAEYLHKKNKHFYVFENNETVEKLNQFNSLSDASKNKIFFGNFDRTELYKVQYIVQSPGIALSKKIKDKISKNNIKIVSDIDIFMKNYKSKVIAITGSNGKTTVTELLNYVLNKLNYKSVSCGNNGIPILSIEHCKYDYICLEVSSYQLEISGNINSDVAFITNITPDHIERHGSFEIYKKIKYKIFEKAKQIIIDKSNLNIDYSGSGKLISFGISSSNSYTINLIDKNNDFIIYYLSKEILKLSDINLTGYHNLKNVAFVLCSIIALGLDVNKAAKIISKFKPLPHRMEYFYKNNNFHFINDSKSTNIESTLAALRSFESPIVLILGGRSKTDNFSDIINFIKEKDIKLIVYGDAGKHFENYNESYTNFTIIKNLSDVVNKLKIILGKFDQEKKINILFSPACSSFDQFENYEKRGEFFKKIIKNNFK

SEQ ID NO: 164068 - protein, 433 aa, Unknown
  Bacterial polypetide isolated from the Sargasso Sea
MNENSNIFINKKILIYGLGKSGISSFKFLKKKNQVFLFDDNNKIKLNSYTKKNLISLSLIKKIKFDLIVISPGINNKKCKLNKFLKKNSKIIYTDLDVFYSFYKNLCITITGTNGKSTTCQLLHQVLKKQKYDVRLAGNIGYPILSIKKIKEDTIFVIEASSYQLEYSKLFKSKYAAILNISPDHLERHETINNYISAKFKLIKNQNKNSIVLINKFDKYIQNRVKKIKYKSKIIKVDTKLKKKFINIFHNEYFLSASNIENLSFVIELAKKFNVKKSNLIQAVKKFKGLNYRQQIIFKNKKISIINDSKSTSYSSSIEMLKRKNNIYWLMGGIPKIGDKFNLSKNYCSNVRGYIFGVNQKKFSLDLKKKIKIKKFFNLSKALNELFKDVKKDNSSKKTILFSPAAASFDNFKNFEDRGKYFNKLIKKYINVR

SEQ ID NO: 164069 - protein, 149 aa, Unknown
  Bacterial polypetide isolated from the Sargasso Sea
MLLGKVLKNINTKYKSIKFKNIRFNSKECKPNDIFFAISGNEVNGNNYIKNAINKGAKIIVSDLKFEGFDNNKVLFVRSKNTRNSLAEAASKIYYKKPKNIIAITGTNGKTSVANFYYQILTLNNKKAATIGTLGVYQKKFIIKQIIQL

SEQ ID NO: 164070 - protein, 214 aa, Unknown
  Bacterial polypetide isolated from the Sargasso Sea
MKFITNTSDLAKFLNKKIKFNALIKSISTDTRSLKKNSLFIAIKGENFDGNDFVDEALSKGSNIIIADNKRFKNNKDKRIIWVNDSIKALKTISNNIIKDYGGNVIAITGSNGKTTTTNIIGKTLKNNSKTLKNFNNEIGMPLSLMNASSKSKNLIFEIGASKLNDIDYLSKILQPNVGLITNIGNSHLESLKNISGVFKVKSEIVKNIKKNGF

SEQ ID NO: 164071 - protein, 138 aa, Unknown
  Bacterial polypetide isolated from the Sargasso Sea
MKKLIKNIPLDKEKIVINGLAVSSKEVKKGYIFFAIKGHNDNGEKFIKEAIKKGASVIVCSKSCKYFNKSIVIIKTSNVRSLLSEIVSKFFNLKPKNIIAVTGTNGKTSVADLFYQILKINNVPVASIGTLGSKLKKK

SEQ ID NO: 164072 - protein, 127 aa, Unknown
  Bacterial polypetide isolated from the Sargasso Sea
MNKLSIIKPFINTNKFDSLFISSITDDSKDVQENSLFIARQGVDSHGNEFIRDAVQKGASCIITDQKLDKEADIPIHYLDNLEDKILEILFSFYDLSEDNFIFHGVTGTNGKTTTAFMAHNIIRALN

SEQ ID NO: 164073 - protein, 177 aa, Unknown
  Bacterial polypetide isolated from the Sargasso Sea
MGQSGLAMARWLARSGSDVLVFDDRAQPPGLDALHAQVLGATFHSRTLDAGVLDAAGQIDLLAWSPGVSCETGAGAALHAAARERGIPVHGELDFFMDAIATLRAQGARTDVVAITGTNGKTTVTRLCAFLANEAGLEAVAAGNISPSMLDALMDRLGDLPIEPVPAPLQESAPRGR

SEQ ID NO: 164074 - protein, 138 aa, Unknown
  Bacterial polypetide isolated from the Sargasso Sea
MKKLKEILFKVNIDSVYGDTNINVSKITFDSREVKDQALFVAIKGHNFDGHNYINQATKNGASVVVCENLPVNFEKSSAVYICVKSSKEALSIIASNFFDNPSSRIDLIGVTGTNGKTTISSLLNNLFDELKFESGLI

SEQ ID NO: 164075 - protein, 471 aa, Unknown
  Bacterial polypetide isolated from the Sargasso Sea
MNTLNNDELSLIKELNSNQIINSTLDITDNSVLFINHESKEKLEKYISEALDKNLQTIVTSDNCSISNEKIIKVKNYEEQYNEVLIKLCPGYQGKNFYGITGTNGKTTTGFYLNQLINDPSLFVGTTEEDIFKKVTNEEHLTTPKLFNILKLLGLNENKDINNVIIEVSSHALEQERLKGLKFKISGFTNLSQDHFDYHKNIENYFNSKLKLFSNNVSEKLVYIDSDWGNKINSLSKIPSFSIGNSKKNNLYIKKINIDKEKYDLTFEIEGKSYEITVPLSGPESHLNYLLALSMAYFSEISNLENILEASTSLMNPIGRFEIIKYKKNNDVIIDFAHTPESITQVINFVKNKYRKVIVIFGAGGNRDKEKRILMGKSVNLADQIIITNDNPRNENEEDIAKDILKGIKLNKETKVILDRKEAIIEGINNLDKDSVLLILGKGHEKIQEFESSSIKFSDQDVVNKYIRENS

SEQ ID NO: 164076 - protein, 128 aa, Unknown
  Bacterial polypetide isolated from the Sargasso Sea
MNKLSLIKPFIKTNIFDKCFISSIADDSRDVKKNSLFVARQGINSHGLKFAKQAIKNGASCIISDQNLEEELEVPFYFFNNLEEKVTEILYKFYGLNEDNFIFHGVTGTNGKTTTAFMAHNIIRELNR

SEQ ID NO: 164077 - protein, 153 aa, Unknown
  Bacterial polypetide isolated from the Sargasso Sea
MNIHQDSFLILGKGMTYQSCKEFFDNESVTYQVLETREILEIKDRRLILENNIINLNNIDHIIISPGISKKNSIVKKLIMLNCSITTDIEILQTITKLNYICITGTNGKTSTVNLISDILNSNHIKSLACGNNGVSVFKSLEDNYDFIVLEIS

SEQ ID NO: 164078 - protein, 174 aa, Unknown
  Bacterial polypetide isolated from the Sargasso Sea
MIDTHSSKRNINLVIGLGKSGFWAAKYLRSINKRVIVWESKDGIEFLERKTALEELNIIVSLNKEFVFEEIQPFLKEIESVVVSPSLPYDHITIIELKKKGIKVIGEINVAWEILKDTNWIGITGTNGKTTVTHLLSHILCDTGLYAPFAGNIGTPLCKYAHSKKHEKIDWVVA

SEQ ID NO: 164079 - protein, 212 aa, Unknown
  Bacterial polypetide isolated from the Sargasso Sea
MTRLKICTNFILKNSDGARYLSDRFCLDSRRINNNQIFISLEPDMEKSITNINHAISKGASGFITPLCITRQKIRSSIPFLIERGIKKIYVELFKADFEENERKPVIIGITGTNGKTSTTLLLAQSLTHQNKKVGVISSEGSGIYPKLEENEYTTPPIDICYKYQRFFSKKKCDYVIIECSSQGLHQGRLDGIHFTYSIITNIDQDHIEYHK

SEQ ID NO: 164080 - protein, 200 aa, Unknown
  Bacterial polypetide isolated from the Sargasso Sea
MNTLNNDELSLIKKLNSNQIINSTLDITDNSVLFINHESKEKLEKYISEALDKNLQTIVTSENCSISNEKIIKVKNYEEKYNEVLIKLCPGYQDKNFYGITGTNGKTTTGFYLNQLINDPSLFIGTTEEDIFKKVTNEEHLTTPKLFNILKLLGLNENKDINNVIIEVSSHALEQERLKGLKFKISGFYNLSQDHFDYHK

SEQ ID NO: 164081 - protein, 151 aa, Unknown
  Bacterial polypetide isolated from the Sargasso Sea
MKFIANTSDLNRYLGVDIAGNIPIKSISTDTRSIKKNSLFIAIKGENFDGNDFVEDAITKGALYAIADKKKYENQKNKKIIYVKNTVKALKKISGNIINEYKGKVIAVTGSNGKTTTTNIISKTLKNNSKTLKNFNNEIGMPLSIMNASSK

SEQ ID NO: 164082 - protein, 202 aa, Unknown
  Bacterial polypetide isolated from the Sargasso Sea
KIKEQNKNIIKKIETELRHARLSEPIRNGVSVAIIGKPNTGKSSFINFISKKDVAIVTNIPGTTTDAITSSIDIKGFKFTFIDTAGLRKHKNKIEKIGIQKTKDIIKKSDLNLVFLEKNEKNKYKKVQNKLFVRSKSDIRKKIVSKASHHNISSITGEGVDLLLKEISKKTTKTGKITPVLSRERHIRYNGACIKNIKVYKV

SEQ ID NO: 164083 - protein, 172 aa, Unknown
  Bacterial polypetide isolated from the Sargasso Sea
MKKILIYGMGKTGIELKKFCKRNSINFCTFDDKTDNQSDFIKLSEKCSYIVVSPGIGLRNKNLKIAIKKKIKIISEIEFASKFLDKPIIAITGTNGKTTTAMLTEKLLTSAGIKVFLGGNIGTPLINAVNSKEKFDLILVEVSSFQLQFIDLSFKPFVSALLNISETILTII

SEQ ID NO: 164084 - protein, 236 aa, Unknown
  Bacterial polypetide isolated from the Sargasso Sea
MKFITNTSDLAKFLNKKIKFNALIKSISTDTRSLKKNSLFIAIKGENFDGNDFVDEALSKGSNIIIADNKRFKKNKNKRIIWVNDSIKALKTISHNIIKDYSGNVIAITGSNGKTTTTNIIAKTLKNNSKTLKNFNNEIGMPLSLMDASSKSKNLIFEIGASKLNDIDYLSKILRPNVGLITNIGNSHLESLKNIDGVFKVKSEIVKNIKKNGFLVVPNDNKKHLNKWKKMRSDIT

SEQ ID NO: 164085 - protein, 184 aa, Unknown
  Bacterial polypetide isolated from the Sargasso Sea
MYGITDAPPIKYNNICDDSRYVNKGTVFFAVKGLSSDGCDFIEPAINSGACAVVYEPPYDLSNIETSIPIIAVEDLKLEISNIVSRHYESSINEMSIIGVTGTNGKTTVSWLIHQGFKKIGYKSGYIGTLGHGLENLNLNELTTPSCMKLHKILSEFQNSGVEYVVMEISSHAIDQRRIEGINF

SEQ ID NO: 164086 - protein, 182 aa, Unknown
  Bacterial polypetide isolated from the Sargasso Sea
MISLKDIKDDFSSDVIIKGVTCDSRKVEPGYIFVAIQGEINRGEDFIDEAIRKGASVIVTSLDSDLKLDIPLIKDENPRRYLSYISSIVFNNSPETVCAITGTNGKTSTTNFLQQIWNLMGLKSSSIGTLGIIGNEEIQDTNITTPDPVLLHKTLEKLSNQSFTHLALEASSHGLSQYRIDN

SEQ ID NO: 164087 - protein, 435 aa, Unknown
  Bacterial polypetide isolated from the Sargasso Sea
MLEKTLILGFGTTGKSFVDYLLSQDQQIKIYDGKLQKIPNIILKNKNIEFFQDIVPDNILDDVFQVFISPGFNPQHQIMKMINDKKLDISTDIDLFKKQTSSKIISVTGTNGKTTIVSMIEHVLRKLKISCIACGNNGLPPLTITQSNYEYIILEISSYQLEYMNNFKSFISLLTNVTPDHLERHDTFTNYLMIKKKIFNDSDHCIANIKLKNQLDIKKMSYYGYEPKSKKYYINNKIQKKLLITDNLIKCNSTKLNYKGGHILENILSVISVIDNLNINIDLENILDSIKSFKSLPHRIEKIASLDNVDWYNDSKSTNCESTIAALNTLEKDIILIIGGSHKIIDYKYLSEEINQRVKKIIFVGQNKEILKSKLSLKIDSYDAYDYEDAVNLIMSLVSPGDKVLLSPASPSFDMFNNFEHRGDTFKKVVKKYVS

SEQ ID NO: 164088 - protein, 264 aa, Unknown
  Bacterial polypetide isolated from the Sargasso Sea
MAQTVVVGLGRSGQGAARLLQATGHPVSVIDSGQGEQLEKKAEGLRQQGVEVQLQAPLAIDSFRPWLDQLQRVVISPGVPWDHPTLDDLRQRGVAVDGEMAVAWDALKHIPWVGITGTNGKTTVTHLLSHVLCQAGLAAPMGGNMGVSAAEMALNLQQEHTTAPDWLVMELSSYQIEAANRIRPRIGIWTTLTPDHLERHGTVEAYRAIKRGLLERSDHAILNADDPDLRQQRQSWTGGTWVSAESAQLDGHPADLWINAEGWG

SEQ ID NO: 164089 - protein, 354 aa, Unknown
  Bacterial polypetide isolated from the Sargasso Sea
MLPSDLGSQVSKNTSRSLILGLGQTGLSLFNYLIKFEQEPIIFDTRSDPPCKKELLKKSKNPLIISNLKEMAFDEIRSCYVSPGFDISHEIVTKLNTHNIEILSDLDLFLRVHAKKSILVTGTNGKTSVVSLLQHIMKSLELKVKSIGNNGFPVLNHIEDQLDYFVIEVSSFQIERTKSLSSLVSVLLNISPDHLDVHDSFQQYTKIKKRIFENSNFKIGPEGIGLDLDFIMPEITDHEIYNQEAVKRILLHIGLKKKSIEEKILSFKPPPHRLEDISLNKYLTIINDSKSTNPHSLNAAINKYKNKKIILIMGGLKKNLSFRPLKEVLKKKTKKVFVYGADREKISNEIEELN

SEQ ID NO: 164090 - protein, 263 aa, Unknown
  Bacterial polypetide isolated from the Sargasso Sea
IDYGFFALAGSKTHGALYVKDAITKGANLIITDTQGLKIIEEMQLNAAIIIFSEPRKLISEIATYFFTKIPQNIVGITGTNGKTSVAHYIRQFWENLGYNSASIGTTGVNGLINFKTQHTTPDAITLRWYLNKLVKKGVDKIALEASSHGLVQDRLNGIKMSIGVFTNLSRDHYDYHGNINSYFDAKAILFKELVEENGGAAIAIDGPKSDLMLKIAQSRIPKIITVGKKKEAKLRIISQILTDKGQKLKFSWNENEYVIDLK

SEQ ID NO: 164091 - protein, 127 aa, Unknown
  Bacterial polypetide isolated from the Sargasso Sea
MVKERILIYGMGITGKAVKNFCKYKKIPYAIYDDTKSKDNFKKILKNISTIVLSPGIKKSNLNIKFALENKIKVISEIEFAAKFTEKPIIAVTGTNGKTTTTLLTHEILKNHGLKVFIGGNIGTPFI

SEQ ID NO: 164092 - protein, 227 aa, Unknown
  Bacterial polypetide isolated from the Sargasso Sea
MNGISNIFINKKILIYGLGKTGLSSSNFLKKQNTIFLYDDYRKNSISKKKIEKLKFDAIVISPGIDINKCKLSKFLKKNLKIIYTDLDIFYSFFNNICITITGTNGKSTTCQLLYEVLKKERKDVRLAGNIGYPILSIKNFNKKTIFVIEASSYQLEYSKLFKSKYAAILNISPDHLERHKTLQKYVSAKFKLIENQKKNSLALINKNNTLMMSKIKKKKYQSKIIK

SEQ ID NO: 164093 - protein, 277 aa, Unknown
  Bacterial polypetide isolated from the Sargasso Sea
MNANSNIFINKKILIYGLGKTGISTFQFLKGKNEVFLFDDNNKINLVSNSKKNLIPLNKLKKLKFDLIILSPGINKAKCKLNKFLKKNSKIIYTDLDVFNSYYKNLSITITGTNGKSTTCQLFYQILKKQKYDVRLAGNIGYPILSIKKIRKNTIFVIEASSYQLDYSKLFKSKYAVILNISPDHLERHKTINNYISAKFKIIKNQNKDSIAFINKYDKYIQNKIKKTRCKSKIIKVNTKPKKNFYKIFNNEYFSSASNLENLSFIIELAKRFNIKK

SEQ ID NO: 164094 - protein, 271 aa, Unknown
  Bacterial polypetide isolated from the Sargasso Sea
MPGQKIPNIEITGITTDSKTVNKGDVFIAIPGKNHDGHDYIKEAILAGAKAIISNGRDLGQLSVPQIKVTNPRLATSIIAAEFYKNPSKDLIIIGITGTNGKTTTASLINSILKNAGYKTAQIGTLGLIADGINHINTLTTPDAITLQRILSNLREKKFSHVIMEVSSHSLDQFRVADIQFDIAVFTNLTPEHLDYHLTMEDYFKAKLRLFTTLSFESTSIVNTSNSYGERIKKMSNAPVISFSTNSNSSTHFENLKVSTSGIKGNIKTED

SEQ ID NO: 164095 - protein, 228 aa, Unknown
  Bacterial polypetide isolated from the Sargasso Sea
MFKNKNFFFKKKILIYGLGKTGLSSYYFLKKYNDLILFDDNKITNKKYPKKFFLSINKIKKVKFDYILISPGININKCKLRKFLKKNLLKIITDLDVFYCMNYNNKIIAITGTNGKSTTAHLTYLILKKQNKDARLCGNIGNPILFEKKISKKTIFVVEVSSYQIEYSKFFKADFAIILNISPDHLERHNSMKNYIDAKFKLIKNQSKDGFAFINEKDKYLKSRIKNK

SEQ ID NO: 164096 - protein, 114 aa, Unknown
  Bacterial polypetide isolated from the Sargasso Sea
MIGERETDVTGLSTNTQTLEPGEAYVALKRARDGHEFVRHALDVGAAAVVVDHAMEVDASQVVVQSTDAGLSSLARTFYGRPADSLKVIGVTGTNGKTTTTYLIQAALNAAGLS

SEQ ID NO: 164097 - protein, 222 aa, Unknown
  Bacterial polypetide isolated from the Sargasso Sea
MLPHKKIFFKKKILIYGLGKTGLSSYYFLKKYNDLILFDDNKIRNNKYSKKIISNINKIKKSKFDYIIISPGININKCKLKKYLKKNLQKIITDLDIFYCKNFKNKIIAITGTNGKSTTAHLVYLILKNQKKDVRLCGNIGNPILLEKKISKKTIFVVEVSSYQIEYSKFFKANFAIILNISPDHLERHNSMKNYIDAKFKLIKNQSKNSFAFINAKDKYLK

SEQ ID NO: 164098 - protein, 467 aa, Unknown
  Bacterial polypetide isolated from the Sargasso Sea
MSELNLSELKFTEIDIKNFVNSSLDVEEGSVLFINHDDKDKLDKYVDESLKKKVKLVITSLNCSSNDDKVIKAKNYSEVFLDSYNYLCNDYESKKYFGITGTNGKTTTGSYLKELLGSESLFIGTNENELFSEITNEKHLTSPKLFNILKLLGKSDFKKYNNIILEASSHALDQDRFNGIRFNTSGFTNLSQDHFDYHTNIENYFNSKLKLFSNQLSDKYVYIDNEWGNKVAQNSSLPSFKISSDTQADLQILEKKTYPKTNLKIEINKKIYDFELDIVGPNFYQNFLLAFSMAYYSKIKNVDQIIENISNLKNPKGRFDLINFKTNKIIVDYAHTPESISQVIKYVNPYFSEVVVLFGAGGNRDKEKRKLMGTASQLADSVIVTNDNPRNEDPIQISNDILKGCDLSKTNVILDRKEAITSAINELRENSVLLVLGKGHEMYQEINNSHIPFNDNDFINETIGGLI

SEQ ID NO: 164099 - protein, 265 aa, Unknown
  Bacterial polypetide isolated from the Sargasso Sea
MKNTLKKLLKGINGIKNIPEIPISGISTNSALIKPGNLYIAIKGNRYDGNKFIPEAINNGASAVITEYDYSNKLSTPIIKVTNSRKVVSRAAAEYYDHPTKKMSVVGITGTNGKTSTASLLTSILKSAGKKTAQIGTLGIIAQGLSKEKGLTTPDSITLHQNLSELYNDGYTHIVMEASSHALDQYRVNDIDFNYTVFTNLYPEHLDYHGTIEKYFEAKTKLFTSYPNSTAAVINIDNEYGKIISNRCTVPIINTSMISNTDISS

SEQ ID NO: 164100 - protein, 439 aa, Unknown
  Bacterial polypetide isolated from the Sargasso Sea
SKIASLLSLDLNGPDTDICNFTIDSREVKTGDFFVAIEGKNYDGHDYIQESIDNGALAILCNERFDTSKITVPYIICQDTLKSLGVLATGYKSIIGSPFTIGITGTNGKTTVTQLTTEILKQCFSVSTTLGNYNNDIGLPLSILQSPEENYQRCIYELGASKRDDISYLVNICEPDMTALLNVSEAHMESFGSFENLMRTKEEIFSHTNTSQVVLNKDDKNFARWEEMNKHKKITTISISSDADYFIEKIDDDVLYISTPKGKFELSKKNCSGILAINLLFSIALSMEAGADIQYVTDGIDNFSGVKGRFYSYISSNKSIVIDDSYNANPESMKSSLNQLKNFKENKIFIMGDMGELGDKSLDHHLSVFKLAKDIDVKYLLYMGKYKNEAKSIFGDSCRTFDDIIKLIGYARSISDESTVVLIKASRFMNFDIIAKGLK

SEQ ID NO: 164101 - protein, 227 aa, Unknown
  Bacterial polypetide isolated from the Sargasso Sea
MVVSIYVNPTQFNDKKDFESYPQNSIEDIKKLNQSDCDILFFPKTSDLYPDGLKKNKLIFDYRDILCDKFRPGHFDGVTTVVNSLFDLIKPNFAFFGEKDFQQLKIIQKLSLTNNFQTIIKSCPSIRLPNGMSYSSRYYNFSFDQKKIFNKIALEIKKHLNFIKENNNQNTLNNLNNSILLAGANKIEYLEIREENNLNISKKNKNSRLFIAFYIDTIRVIDNFILY

SEQ ID NO: 164102 - protein, 180 aa, Unknown
  Bacterial polypetide isolated from the Sargasso Sea
MEIFKSKSDLINTLKKLEGPLGLVPTMGGIHEGHLSLIQKAFRENASVIVSIFVNPIQFDNIDDLKNYPRNLKKDALVISEISDDIKIYAPTQKDVYGKKFKKNKYDFDKLDKVMEGIKRKNHFNGVANIIEFLFKTFNPQNAYFGEKDYQQLQIIRNLNKRLGDSINVIQCPTIRNKNG

SEQ ID NO: 164103 - protein, 160 aa, Unknown
  Bacterial polypetide isolated from the Sargasso Sea
CDKFRPGHFDGVTTVVDLFFNMIKPTNSYFGEKDFQQVKIIQDLVKINHHNIKIIQCSSVRDKIGMSLSSRNSKFSNDQLKIFNVLGNKIKEYINLLKQNEINNLDQLKIELLKNNIKKIDYLEIRNENNLEITKNYSKARLFIALYIGDIRVIDNFKLY

SEQ ID NO: 164104 - protein, 231 aa, Unknown
  Bacterial polypetide isolated from the Sargasso Sea
KKNKNILVSIFVNPKQFNSKNDFKSYPRNFKKDVQILKKLKVKYLFYPNYNDVFLFKTKNKIYLHPFSKKLCGKYRPGHFRGVLDVVNRLLEILKPKYMILGEKDFQQLFLIRKHIIKNNIKTSIIAHKTVRNQNFIPYSSRNLNLSKYDKILASKVFKTLRNEKFLIKRKKIKKINLLSVKNKILKMGIKKVDYIEALNLKSLKKAKKFNENFNIFSAFYIGNVRLIDNF

SEQ ID NO: 164105 - protein, 229 aa, Unknown
  Bacterial polypetide isolated from the Sargasso Sea
MKIITSIFDLNKEIKNYKNIGFVPTMGGIHAGHESLIKASQRKKSKTIVSIFINPTQFNKKNDFKKYPRNINKDIAILKKLNVDYLFRPSVKDVYRFKSKKFNLKKSDKILCAKSRNGHFEGVLDVMNRLMSIIKSKDLYMGEKDYQQLYLIKKFLSKKFRVRINSCPTIRIKNNIALSTRNKLLTKKHLKIASEIALILRRLKRKSKFQPLKTALDLPNYKILMETKV

SEQ ID NO: 164106 - protein, 186 aa, Unknown
  Bacterial polypetide isolated from the Sargasso Sea
LYIPTFKDIYGFRTKNKVFLDKSSKELCGKFRKGHFQGVLNVVNRFIEIIKPRYIFLGKKDYQQLFLIKKHVEKRKIKSKIIECKTIREYNGVACSSRNLNLSRSQMKIASNIFHYLSSLKKKIKKNYSLFKINKIKKELTKLGASKIDYLENYNTKSFKKIKKTNKEYNLFFAYYIKKVRLIDNI

SEQ ID NO: 164107 - protein, 239 aa, Unknown
  Bacterial polypetide isolated from the Sargasso Sea
MLVFFVNPKQFSANEDFDTYPRNLEKDLDDLDGVGVDVVFIPKHEDIYNKNIQEFSFEHPLAKILEGRARPHFFPGVINVVSRLFNIVNPNVAYFGKKDAQQLLLIEKMVQLGGYPIKVVRGETVREPNGLAMSSRNQYLSASAKERAACLNLSLVTAENMLDGGETRVEKIKKEMFEVINKDESISIGYVSILCLNTLVEVNNRVNGPILISVAAVLGGVRLIDNIFYDSISKPMSTL

SEQ ID NO: 164108 - protein, 61 aa, Unknown
  Bacterial polypetide isolated from the Sargasso Sea
VAKLLFNSMPDFALFGEKDFQQVLVIRRMVIDMLLPVQIVSMPTCRETDGLAMSSRNRSLS

SEQ ID NO: 164109 - protein, 270 aa, Unknown
  Bacterial polypetide isolated from the Sargasso Sea
MKITKKISELKDIILTLKNSNKKIGLVPTMGNIHEGHLSLISKAKKNDDYVITTIFVNPTQFNNKDDYLTYPNTFEEDVFKLKSQNCNLLFMPSTKDLYPKGLFKENTVKKYRNILCDLYRPKHFDGVTTIVNILFDIIKPDNAYFGEKDYQQLKIIQELVKIKKFKTKIIQCPSIRDKFGMSLSSRNSKLNYSQKLIFQDVAKKIQNLKFLLKENRDETLLNNFTEELVALNINKVDYIEIRSEDDLEIAKDYVKARIFIALYIDDIRV

SEQ ID NO: 164110 - protein, 252 aa, Unknown
  Bacterial polypetide isolated from the Sargasso Sea
MIIFKSINKLKEKVNIMANIGFVPTMGSLHKGHVALIRISKKRCNKTLVSIFVNPSQFNKKADYQKYPRNLNNDLKILKKLKVDYVLVPKIKDIYQTKKQMKIKLKKKDKILCSKYRPGHFEGVLGVISIFLKNIRAKFMFLGDKDFQQVYLIKKYLGKKFKTKIINCKTIRFKNSLAYSSRNKLLTKKYLNNGIVISKIIKNFHNKIIKDFSKVKEIKNIRYKISNICSRIEYFEIRNKNNLTTNINKKNF

SEQ ID NO: 164111 - protein, 212 aa, Unknown
  Bacterial polypetide isolated from the Sargasso Sea
NDYNSYPKTLDEDIEKLKYSNCDLLYLPTVDDIYPEGLVKEKSISKYRNILCDIFRPGHFDGVTTVVNTFFNIIKPNNSYFGEKDYQQLKLINEMVGLKKLNINIIACTSVRDKNGMSLSSRNSNFNSFQSEIFQSLAKKINLLTESIKQKDTKINYDEFKNELSKININKIDYLEIRDERNLEITNDYTSARLFVAVYIDDIRIIDNFKLY

SEQ ID NO: 164112 - protein, 210 aa, Unknown
  Bacterial polypetide isolated from the Sargasso Sea
MQIVYNRESLSDKIREYKSKGNKITLIPTMGNLHPGHQALFSKAPHNTIRVATIYVNPLQFNNIDDYKNYPRSLQTDLQVCRQNNISLVYVPDEDISDEIVPEKSIDLPKFTRYLCGQKREGHFLGVYRVVKHLFSIVNPDFACFGKKDYQQLLLTKYLASTYFPKTNIIDVETVRDSNNTALSSRLARLSNESSSSTFRIYETLQNMKL

SEQ ID NO: 164113 - protein, 55 aa, Unknown
  Bacterial polypetide isolated from the Sargasso Sea
ELINELEAFGMKVEYFELRRATDLALPKNDEKSFVILIAVWLGKARLIDNIAIDL

SEQ ID NO: 164114 - protein, 80 aa, Unknown
  Bacterial polypetide isolated from the Sargasso Sea
MKIASNIYYYLNNLKKRIKKNYNLFNINKIKKDLINLGANKIDYLENINIKSLKKIKKSNKKFNLFFAYHIKNTRLIDNI

SEQ ID NO: 164115 - protein, 184 aa, Unknown
  Bacterial polypetide isolated from the Sargasso Sea
QPDASTTVVISKLTDCLCATSRPGFFDGVGTVVTKLLIQALPDLAIFGEKDYQQLLVIKRLTRDLDIPVEIIGAPTIREADGLAVSSRNVFLSQTNRETASKVFEILKKTATAIALGNDVLAACKEARTELILAGFSEIDYFEARHSETLELIQNFENNGRLFAAVWLGSTRLIDNLEIKEYTD

SEQ ID NO: 164116 - protein, 124 aa, Unknown
  Bacterial polypetide isolated from the Sargasso Sea
MIIFKSINTLNKEVNFKANIGFVPTMGALHKGHISLIKSSKKVCKKTLVSIFINPSQFNNTNDFKNYPKNLKKDIAILKKLKVDYLLAPKVKEIYRNKKISKIKLKKKDKVMCALFRPGHFEGV

SEQ ID NO: 164117 - protein, 266 aa, Unknown
  Bacterial polypetide isolated from the Sargasso Sea
MKIFKSKYKLQKEISNIKNISFVPTMGGLHRGHISLIKKSQLFKGKTLVSIFVNPTQFNDKKDFLNYPRNLKNDLKILKHLNVDLVYLPTTKDIFSFHVQNKIFLDKFSKKLCGKTRKGHFKGVINIVNRFLELIKPKYILLGIKDFQQSYLITKHILKRKIDTIVINCKTIREKNGIPCSTRNNHLNKKQLKIASNVVKYLKNKKKLINKKLSNFKLIDLEKDLINLGVTKIDYIKLYNLNTLKKPRNKREKFKIFIAFYLNKLG

SEQ ID NO: 164118 - protein, 250 aa, Unknown
  Bacterial polypetide isolated from the Sargasso Sea
MFLLWGAIHKGHLSLINKSDKHCKKTIVSIFVNPKQFNNKTDLKSYPRNIKKDLEILKETKKVDFIYLPKFNDIYKDKKKSKIKLLKKEKILCAKFRKGHFEGVLDVMNKLTKIVKPQKIFMGEKDFQQLYLVKKKLSRKYNAKVIPCKTIRDKNNVALSSRNSLLNKTNLNKAANIYKNLVNIKKNIKNNKNILNFLKLRKKELINNYKIKIDYLELRNKNNLKNSNTNKNSRLFIAYYLNNVRLIDNI

SEQ ID NO: 164119 - protein, 68 aa, Unknown
  Bacterial polypetide isolated from the Sargasso Sea
MKIIKSFKTLKYRINHIKKIGFVPTMGSLHNGHLSLIKKAKKKSQKVLVSIFVNPSQFNERKDFIKYP

SEQ ID NO: 164120 - protein, 269 aa, Unknown
  Bacterial polypetide isolated from the Sargasso Sea
MIIFKSINKLNKEVNFKANIGFVPTMGALHKGHISLINSSKKKCKKTLVSIFINPSQFNKKKDLKKYPKKLRKDIKILKKLKVDYLLLPKIKEIYKNKKTMKINIIKKDKVLCAKYRPGHFEGVLAVINQFLINIKPKFIFFGEKDYQQIILIKKFIKKKFKTKIVECKTVRLNNLVPYSSRNFHLTKNEIANASFVSKSIKKLYSSIKKNFNNRFNINLVKKKIESKKIWTDYFEIRNKTNLSKNFNKKNFKIFIAYYLNDVRLIDNF

SEQ ID NO: 164121 - protein, 127 aa, Unknown
  Bacterial polypetide isolated from the Sargasso Sea
QQQILIKKMAKSLHPQISLIKAPIIRSKNGIALSSRNNYLSEKELEIAANLFKCLQNSVNSYQKRQKLNEILDNANSFLVSKDLVPDYFELRDSELNIISKDNYEGNKVFLGSVTINNTRLIDNIEF

SEQ ID NO: 164122 - protein, 165 aa, Unknown
  Bacterial polypetide isolated from the Sargasso Sea
MQIVKKISEIKEILSDLEKNNSKINLIPTMGNIHEGHLSLLKEANKFEGINVVSVFINPTQFNDIKDFENYPDTFDQDVKLLSKNNCQIIFTPNINEIYPNGLETKKTIFEYRDILCDAFRPGHFDGVTTVVNLLLDIIKPSNVFFGEKDFQQLKIVEKLIYQIN

SEQ ID NO: 164123 - protein, 199 aa, Unknown
  Bacterial polypetide isolated from the Sargasso Sea
NDYLRSKWRQEFEVIKAGQEWKLPYSIIRPTTVYGPRGFYGGGQLLMGAAQSPVHAIPASFTARIPFVHVVDVCKAALFLAKKPKAKGQVFNVNDDSRITNVEFMKYMAALEGKSAVILPSVPVPQVRTAALGFARLIDNIAMLFGKRSPLEVDSLNYVGRDLVIANDKLKDLGYEFEYADARDGIRDTVKWFYQEGWM

SEQ ID NO: 164124 - protein, 161 aa, Unknown
  Bacterial polypetide isolated from the Sargasso Sea
YRNILCDNFRPGHFDGVTTVVKRLFFIIKPDFAFFGEKDFQQLMIIKKMVTILNLPIKIIGCESVRNKNGLSFSSRFNLFKKDQKIILKKIGDTINRNLKKNSKNFNINLLLKELKKIKINKIEYIEIRNDKTLHISRNNPRLFISLYIDNVRIIDNFKLY

SEQ ID NO: 164125 - protein, 71 aa, Unknown
  Bacterial polypetide isolated from the Sargasso Sea
MKILLNNNDLNKALIRVNNLGFVPTMGSLHKGHISLINRSKKDSSKTLVSIFVNPTQFNNKKDFKRYPRNI

SEQ ID NO: 164126 - protein, 245 aa, Unknown
  Bacterial polypetide isolated from the Sargasso Sea
MKIITSIFDLNKEIKNYKNIGFVPTMGGIHAGHESLIKASQKKKSKTIVSIFINPTQFNKKNDFKKYPRNIKKDIAILRKLNVDYLFRPNVKDVYGFKSKKFNLKKSEKILCAKSRNGHFEGVLNVMNRLMTIIKSKDLYMGEKDYQQLYLIKKFLSKKFRVRINSCPTIRINNNIAISTRNKLLNNKHLKIGSEIALILRKLKRKSKFQPSKIALDLPNYRVFMETKYNIKIDYLEFRDEKNLE

SEQ ID NO: 164127 - protein, 130 aa, Unknown
  Bacterial polypetide isolated from the Sargasso Sea
MKILKNVFELNKAVKNYKNVGFVPTMGGIHKGHVSLIKNSQKNNKETIVSIFVNPTQFDQKKDFKNYPRNIRKDISILKKLKVNYLFLPEVNEIYKNKIKNFKLNKSDKILCAKYRIGHFEGVLNVMNRL

SEQ ID NO: 164128 - protein, 227 aa, Unknown
  Bacterial polypetide isolated from the Sargasso Sea
MASLIKISQKKKEKTIVSIFVNPTQFNEKKDFKKYPRNIKRDISILKKLKVSYLFLPEVEEIYKKKMKNFTLNKSDKILCAKHRKGHFEGVLNVMNRLLSLIKSKYVFMGEKDFQQYALIKRILGKKYNIKIIGCPTIREKSKIASSTRNKLLSNSATKKASKIANKLIKLKEISRTNKLTNLIKLKKEFEKKYKIKIDYLEFRDEKKFKLNNFKSKYRLFVAYYIN

SEQ ID NO: 164129 - protein, 260 aa, Unknown
  Bacterial polypetide isolated from the Sargasso Sea
MTKSLRHFSDIGFVPTMGSIHNGHLSLISKSNQICHKTIVSIFVNPKQFNNKKDFKTYPKNIKKDLKTLSQTKKVDFVYIPKFKDIFKNKKKPRIRLDKKDKILCAKYREGHFEGVLDVMDKLTNIVKPSKIFMGNKDFQQMFLVKNYLKNKYNTEVVGCATIRDDNKVALSSRNYLLSKKNLKLASKIVGKLINLKKNIKNKKNKNKYLLTLKDDFQKKFEIKIDYLELRNIDNLKLSNVIKRSRLFVAYYLNGVRLID

SEQ ID NO: 164130 - protein, 109 aa, Unknown
  Bacterial polypetide isolated from the Sargasso Sea
MKIFKNKHTLQKEILKTNGISFVPTMGGLHKGHISLIKKSKKSKFKTLVSIFVNPTQFNKKSDFRSYPRSTKKDLKKLKKLKVNYLYIPTFKDIYGFKTKEKVFLDKFR

SEQ ID NO: 164131 - protein, 97 aa, Unknown
  Bacterial polypetide isolated from the Sargasso Sea
MIIFKSINKLNKEVNFKAKIGFVPTMGSLHNGHISLIKTSKKNCKKTLVSIFVNPSQFNKKSDLKNYPKNLKKDINILKKLKIDYLLIPSIKEIYKN

SEQ ID NO: 164132 - protein, 270 aa, Unknown
  Bacterial polypetide isolated from the Sargasso Sea
MIIFKSINKLNKEVNFKANLGFVPTMGSLHQGHISLIKSSKRNCKKTLVSIFVNPSQFNKKSDLQNYPKNLKKDIKILKNHKVDYLLLPRIKEIYKSNNDKKIKLSKKDKIMCAKYRPGHFEGVLAVISQFLKNIKPKNIFLGDKDYQQLYLIKKLIKKNFNTRVFSCKMIRDKNKVALSSRNNLLSKNDLKKSSYIANLLFNLRNKLKNNVTFKYEIKNIIKQINNLKNIKIEYLEIRNKKNLSKKYNKNNFKIFLAYYNKNIRLIDNY

SEQ ID NO: 164133 - protein, 86 aa, Unknown
  Bacterial polypetide isolated from the Sargasso Sea
MKILKNVFELNKAVKNYENVGFVPTMGGIHKGHVSLIKISQKNNKETIVSIFVNPTQFNQKKDFKNYPRNIKKDISILKKLKVNYL

SEQ ID NO: 164134 - protein, 66 aa, Unknown
  Bacterial polypetide isolated from the Sargasso Sea
MNTFSSYRNLNNALRNRKGSLGLVPTMGSLHNGHLSLVEKAVKENSSVIVSIFVNPTQFDNKSDLE

SEQ ID NO: 164135 - protein, 173 aa, Unknown
  Bacterial polypetide isolated from the Sargasso Sea
DRPNKKIKIHPFKKKLCGKFRSGHFEAVVDVIDRFIKIIMPKNVYLGEKDMQQLKLIDHYITRKYKNINVVPCKTIREKNGVACSSRNYLLSFKEKSIASKIYQLLKRTKNNLIKRKINLNLIKNKIKNIGVSKIDYIEILDINKIIKPYLKKSKYKIFIAYYLRKTRLIDNI

SEQ ID NO: 164136 - protein, 233 aa, Unknown
  Bacterial polypetide isolated from the Sargasso Sea
MLIFKSINKLNKEVNFKAKIGFVPTMGCLHKGHVSLIKSSKKICKKTLVSIFINPSQFNKYSDLRNYPKNLKKDLEILKKHKVDYLLLPNTKEIYKKKKDRKIKLSKNDKILCAKFRPGHFEGVLAVINQFLYNFKPKYIFFGEKDYQQLFLIKNFVKKKFKTKVVSCSTVRDNNKVALSSRNILLSKNDIKKSSFIAKLLLKFKIDLKKNILVKKKIKNLFFKINNIKNIKV

SEQ ID NO: 164137 - protein, 199 aa, Unknown
  Bacterial polypetide isolated from the Sargasso Sea
DISKLENIGCNLLFLPKVQEIYPKGLAKKKIVNNFRNILCDKFRPGHFDGVTTVVDLFFNMIKPTNSYFGEKDFQQVKIIQDLVKINHHNIKIIQCPSVRDKMGMSLSSRNSKFSNDQLKIFNVLGNKIKEHINLLTQNEINNLDQLKIELLQNNINKIDYLEIRNENNLELTKNYSKARLFIALYIDGIRIIDNFKLY

SEQ ID NO: 164138 - protein, 132 aa, Unknown
  Bacterial polypetide isolated from the Sargasso Sea
GEKDYQQLLIITSLVKDLDIPCQIVPINTVRDNNGLAISSRNQYLSPKQINIANNINIIMTEAAKNFYNVDINETISFVRKSIEKVGINKIDYIEIRDNHNLENISNNNKSNARLFIAIYIDEVRLIDNIKL

SEQ ID NO: 164139 - protein, 224 aa, Unknown
  Bacterial polypetide isolated from the Sargasso Sea
MLHIYNPTQFNNEYDFSSYPKTIDDDISKLEEIGCNLLFLPSTKDIYPKGLEKKKIVNNFRDILCDKFRPGHFDGVTTVVDLFFNIIKPTNSYFGEKDFQQVKIIQELAKINNHNINIIQCPSIRDISGMSLSSRNSKFSNDELKIFKILGDKVNEYIYLLKQNEINNLDQLKKELLQNNINKIDYLEIRDENNLQITKNYSEARLFIALYIGDIRIIDNFKLY

SEQ ID NO: 164140 - protein, 183 aa, Unknown
  Bacterial polypetide isolated from the Sargasso Sea
MKIIRKTDELQNILHSVKDSRKSIGLVLTMGNIHNGHLSLIKKAQTDNDFVIATIFINPTQFNNKKDYNSYPQTLENDVEKLKSFNCDLLYLPEVKDIYPKGLIREKSITKYRDILCDKFRPGHFDGVTTVVDTFFNIIKPNNSYFGEKDFQQIKYINELVKIKNHKINVISCLSVRDNLGMS

SEQ ID NO: 164141 - protein, 262 aa, Unknown
  Bacterial polypetide isolated from the Sargasso Sea
MKILLSNNDLNEALNNVSNLGFVPTMGSLHKGHISLIKKSLKECKKTIVSIFVNPTQFNNKNDFKNYPRNNKKDLSILKKLNINFLYIPKTKDVYYLKRKSSIKLKKRDKILCAKFRKGHFEGVIDVMERLTKIIKPQKIYLGEKDFQQLYLVKKYISKKYNTKIVSCKTIRNDKKLAFSSRNKLLSKDELKQAGNISKEIFLFKKKLSKNRNIKRLISQKKDELIDSFNIKFDYLELRDIFNLRISNKTKNSKLFIAYYIN

SEQ ID NO: 164142 - protein, 276 aa, Unknown
  Bacterial polypetide isolated from the Sargasso Sea
FSSLRVFSSHKELIKSIDSTKLVGLVPTMGSLHEGHIYLINRAINDNEQVIVTIYVNPTQFNNKSDLNKYPRNLKKDLRKLECFESIFVYTPSDNDLYKEVVSKNYDLDDLDKVLEGKFRPGHFNGVATIVEKLFNLFTPNNAYFGEKDYQQLTIIKLMVEKLKLNVNIVPCDTVREPDGLAMSSRNKLMNKEERLYAGKIHSLMIKAKEIYLDNKIDNIENILKNELNNLKHCRVEYIKIDNLSKYSDWIKDEGYRLFIACWIGKTRIIDNILLR

SEQ ID NO: 164143 - protein, 144 aa, Unknown
  Bacterial polypetide isolated from the Sargasso Sea
MVITRTRDELYKTLEEFSKRPGKLALIPTMGNLHDGHLSLIKLAKLKASKTITTIFINPLQFGRNEDFKKYPRTEKLDIEKLKKEHCDILFIPKNIEEVFSKIEKLKTLDSGSLGSELCGKIRPGHFDGVLTVVNRLFELINPD

SEQ ID NO: 164144 - protein, 249 aa, Unknown
  Bacterial polypetide isolated from the Sargasso Sea
MKIFKDKHTLKKEISKTKGISFVPTMGGLHKGHISLIKQSKKSKLKTLVSIFVNPKQFNKKSDFKSYPRNTEKDLKQLKKLKINYLYMPTFKDIYGFKPKKKVFLDKFSKKLCGRYRKGHFEGVLNVVNRFIEIIKPRYIFLGKKDYQQLYLIKKHIEKRKIKCKIIECKTIREINGIACSSRNSNLNKNEMKIASNIYFYLFYLKKKIKKNYNLFNMNKIKKDLIDLGASKIDYLENYNIKSFKKVKK

SEQ ID NO: 164145 - protein, 99 aa, Unknown
  Bacterial polypetide isolated from the Sargasso Sea
MSSRNNYLTENEKMQAAKIYSTLVDTKNLIFKNGFKRKDLKNKINYLKKNNINVIYFDLFDAESLESINESPRLKGDFVLATAAKIGNTRLIDNIVFSI

SEQ ID NO: 164146 - protein, 134 aa, Unknown
  Bacterial polypetide isolated from the Sargasso Sea
MRIFNSIQEFNEARDELGKLSFVPTMGNLHQGHSSLVDIAKQFKNKIIASIYVNKLQFNDDNDYLNYPKTLNSDIELLEKHGCDYVLIPDDSILDNIQSMQAPPKSKKLCGQSRPGHFEGVLTILNKFFRIIDP

SEQ ID NO: 164147 - protein, 150 aa, Unknown
  Bacterial polypetide isolated from the Sargasso Sea
EGVLNVVNRFLEIIKPKYIFLGKKDYQQLYLIKKHIEKRKIKSKIIECKTIRDNNGVALSTRNSNLDKNQMKIASNIYNYLNNLKKKIKKNYNLFNLNKVKKDLKDLGVSKIDYLENYNTKNFKKIKKQSEKFNLFIAYYIKKIRLIDNI

SEQ ID NO: 164148 - protein, 295 aa, Unknown
  Bacterial polypetide isolated from the Sargasso Sea
MAALLYSSGTTGKPKGIMLSHKNLSSNAEALAKVWGFSNEDRLLHVLPIYHVHGLFIALGPVLLTGASMSWHNRFDVDSVMKTLTECTVMMGVPTYYTRLLDNPKLDPEYCKNMRVFICGSAPLLPETFKEFELKTGHTILERYGMTETGINASNPLAGKRIAGSVGQALPGTKAQIVDDAGKVVRPGETGNLQVKGDNVFSGYWKMPEKTAEDFTSDGFFNTGDKAVINNQGYISIVGRSKDMIISGGLNIYPREIELVIDQIPGIIESAVIGTTDHDFGEKVVAVVACTDKSI

SEQ ID NO: 164149 - protein, 63 aa, Unknown
  Bacterial polypetide isolated from the Sargasso Sea
MKIFKSINKLCKEVNFKANIGFVPTMGSLHKGHMALIKNSKKKCKKTLVSIFVNPTPFNKKMI

SEQ ID NO: 164150 - protein, 213 aa, Unknown
  Bacterial polypetide isolated from the Sargasso Sea
MKIITSIFDLNKEIKNYKNIGFVPTMGGIHAGHESLIKASQKKKSKTIVSIFINPTQFNKKNDFKKYPRNIKKDIAILKKLNVDYLFRPSVKDVYSFKSKKFNLKKSDKILCAKSRKGHFEGVLDVMNRLMTIIKSKNLYMGEKDYQQLYLIKKFLSKKFSVQINSCPTIRIKNNIALSTRNKLLNKKHLKIASEIALILRKLKRKCKFQPSK

SEQ ID NO: 164151 - protein, 114 aa, Unknown
  Bacterial polypetide isolated from the Sargasso Sea
MKILLNNNDLNKALTSVSNLGFVPTMGALHKGHISLIKNSKKKSNKTLVSIFVNPKQFNNSKDFKSYPKNTKKDLSVLKKLKVDYVFLPSQDDIYKFKKFKKIKLSQKQKIMCA

SEQ ID NO: 164152 - protein, 147 aa, Unknown
  Bacterial polypetide isolated from the Sargasso Sea
MKILKNIFELNKAVKNYKNVGFVPTMGGIHKGHISLIKISQKNNKETIVSIFVNPTQFNQKKDFKNYPRNIRKDISILKKLKVNYLFLPEVNEIYKNKMKNFKLNKSDKILCAKYRKGHFEGVLNVMNRLLSVVKSKHVYMGEKDFQ

SEQ ID NO: 164153 - protein, 146 aa, Unknown
  Bacterial polypetide isolated from the Sargasso Sea
MIIFKSINKLNKEVNFKANIGFVPTMGSLHMGHISLIKSSNKVCKKTLVSIFVNPSQFNKKADLKNYPKNLKRDIEILKKLKVDYLLVPNVSDIYKKQKDKKIKINKNDKIMCALYRPGHFEGVLAVINQFLQRFKPKYIFFGEKD

SEQ ID NO: 164154 - protein, 233 aa, Unknown
  Bacterial polypetide isolated from the Sargasso Sea
MIIFKSINKLNKEVNFKANVGFVPTMGALHKGHISLIKSSKKMCKKTLVSIFVNPLQFNKKKDLKRYPKNLNKDLKLLKKLRVDYLFLPKISEIYKNKRNIKIKLNKKDKVLCAKYRPGHFEGVLAVINKFLLNFKPKAMFLGEKDYQQIILIKKFVKNKFKIKIIKCKTVRSNNLLPYSSRNSLLSNEDIKKASFVSNTICNYFVSIKRNFNNILKINEVKKNIESKRIKTD

SEQ ID NO: 164155 - protein, 140 aa, Unknown
  Bacterial polypetide isolated from the Sargasso Sea
MIIFKSINKLKNEVNFKANIGFVPTMGSLHNGHISLIKLSKKKCDKTLVSIFVNPSQFNKKNDYDTYPRNIKADIKILKKLRVDYVLIPNVKDIYRTKKEMRINLKNSDKILCSKYRPGHFEGVLGIISIFFKNIKAKIM

SEQ ID NO: 164156 - protein, 215 aa, Unknown
  Bacterial polypetide isolated from the Sargasso Sea
MLIIKDIYNLNTYLKAFRDKGYSIGYVPTMGALHEGHGSLIEKSHNDNQKTIISIFINEKQFNDTQDFEAYPRNKGDDYNFCQKHNVDIIFEPSAEEVYPKEYKSIQNSYFQNILCDEYRPGHFNGVVTVLSRLFTIIKSDKVYFGEKDFQQLKIVEKLIKENFLNLKLVPVSTVRSDEGIALSSRNKKLSKKQMTDYILFQKEVVKFIANLDKK

SEQ ID NO: 164157 - protein, 264 aa, Unknown
  Bacterial polypetide isolated from the Sargasso Sea
MKIIKKISEIKEIVSNLKKNKKEINLIPTMGSIHAGHLSLLSEANKYDGINIVTIFVNPAQFNDLNDFNNYPNTLEADIKILSKTNCKIIFAPSKKEIYPLGIITEKVVFKYRDILCDLFRLGHFDGVTTIVKILLDLIEPSKIFFGEKDFQQLKIIEQLIFQNNLKINLIRCPSIRDSYGMSLSSRYSTFSKDERSKFKKCAQIIDANLLKLKKDFNYKILDNIKKELRGYGISKIDYFEVRNEEDLSLSIKNERRRLFIAFY

SEQ ID NO: 164158 - protein, 158 aa, Unknown
  Bacterial polypetide isolated from the Sargasso Sea
FFPGVINVVSRLFNIVNPSLSFFGKKDAQQLILISKMVDVGGFPVKIIPVETVREPSGLAMSSRNIYLSKTQTISASKIYKSLLLAKNLLSGGEQESKTIKNEIKKSLLADSTISIDYISVLCLDDLKEFSGSVSAPALISIAVYIGGVRLIDNIFYE

SEQ ID NO: 164159 - protein, 194 aa, Unknown
  Bacterial polypetide isolated from the Sargasso Sea
MKLFTNKKQLQTEIRKFNNINFVPTMGALHKGHESIIRKSVKGSGKTLVSIFVNPKQFNNKRDLNTYPRNNSEDVKILKKLKVHYLYKPSYDDIYKFKTENKIHLDKFSKELCGQFRKDHFKGVIDVVNRFLEIIKPKSILLGKKDFQQLYLIKKHIKKNKIKTRVFSCKTIRNKYFIAYSSRLNKLNYNEKIK

SEQ ID NO: 164160 - protein, 186 aa, Unknown
  Bacterial polypetide isolated from the Sargasso Sea
YPRTIEEDKEKLLACGCDFLFTPTTQEFYPKTLYPHTQVKVPGLSDILCGLERPGHFEGVCTVVIKLINIVSPNNAYFGLKDYQQYLIIKKMTKDLKIDTRIVGLEIVRDADGLALSSRNGFLSDHELHKARQIYRSLQKTAKRIYLREAKFQDLEKLAHQELLETGLTPEYFVIRNSESLKSATT

SEQ ID NO: 164161 - protein, 233 aa, Unknown
  Bacterial polypetide isolated from the Sargasso Sea
QIILVSIFVNPLQFCKGEDFKKYPRNINRDAELAFSAGADGIWVPDYFEVFPGGEDSHFKIQVPETLHNQLCGVERKGHFDGVATVIIRLIKIIQPEKLILGEKDWQQLIIIRKLFQELSIPIRIESFATQRDQSGFAYSSRNTYLSDSERVNAQALPNVIQDAKDIFSKEKIISLKKIESKLKHSNLEIEYIKIVDAFSLEEKENIKGICLLAAAVRCGSTRLIDHTFLMHR

SEQ ID NO: 164162 - protein, 270 aa, Unknown
  Bacterial polypetide isolated from the Sargasso Sea
MIIFKSINKLNKEVNFKANIGFVPTMGSLHNGHIYLIKSCKKYCKKTLVSIFINPSQFNKKKDLKNYPRNLQKDIKILKKLKVDYLLTPVTSEIYQKSKNKKIQLIKKDKIMCSLFRPGHFEGVLAVINQFLKRFKPKKIFLGEKDYQQLFLIKKLIKQKFNVKVIQCKNIRDKNNVALSSRNILLSKKDLKKSAFIATLLLNYQKKLKKNFNLQNEISKIKRIINSIKGIKLEYLEIRNRKNLTTKITKNNFKIFISYYNKKIRLIDNY

SEQ ID NO: 164163 - protein, 244 aa, Unknown
  Bacterial polypetide isolated from the Sargasso Sea
MKIFKDKHTLQKEISKTNGVSFVPTMGGLHKGHISLIKQSKKSKLKTLVSIFVNPKQFNKKSDFRSYPRNMKKDLKQLKKLNINYLYIPSYKDIYGFKPKEKVFLDKFSKKLCGQFRRGHFEGVLNVINRFIEIIKPKYIFLGKKDYQQLYLIKKHIEKRKIKCKIIECKTIRENNGVALSTRNSNLNENQIRIASNVYYYLYKLKKKIKKNYNVFNLNKIKKDLRDLGASKIDYLENYNIKKF

SEQ ID NO: 164164 - protein, 91 aa, Unknown
  Bacterial polypetide isolated from the Sargasso Sea
MKIITSIFELNKEIKDYKNVGFVPTMGGIHAGHKSLIKASQNKKSKTIVSIFVNPTQFNKRNDFKKYPRNIRKDITILKKMNGRIFIQTKC

SEQ ID NO: 164165 - protein, 165 aa, Unknown
  Bacterial polypetide isolated from the Sargasso Sea
MEGKSRVNHFNGVATIVEKLFKIFKPNFAYFGEKDFQQLIIIKSLLKQKSLKVKIISCPTVRENDGLAMSSRNKLLNKKERKTATVLYRTLLEAKGLMNSSEPTEIEKTISTKFSNIKDVDLLYFKILTEGSFADLKNLKDKENFRAFIACNIGNIRLIDNMILE

SEQ ID NO: 164166 - protein, 202 aa, Unknown
  Bacterial polypetide isolated from the Sargasso Sea
MPDVKEVLHERQAFLVNPPPSLGTILEGEFRKDFFVGVSTIVLKLFHCVNPKVAVFGKKDYQQALIIRSMCNQFNLPVKIVLAETVREIDGLAMSSRNNRLSPTERTESCFLYQKLKELSAQILELNRQKKLNSTKISQLEDAAFQEFKLKKWQPDYFSVRRKIDLDIPSFEYGEGKLNELIILAAASLGKNRLIDNLEIKS

SEQ ID NO: 164167 - protein, 267 aa, Unknown
  Bacterial polypetide isolated from the Sargasso Sea
MKILKNVFELNKAVKNYKNVGFVPTMGGIHKGHESLIKISQKNNKETIVSIFVNPTQFNQKKDFKNYPRNIRKDISILKKLKVNYLFLPEVNEIYKKKMKNFKLNKSDKILCAKYRKGHFEGVLNVMNRLLSIVKSKCVYMGEKDFQQYMLIKRILGKKYKINIVGCPTIRENNKIALSTRNKLLNKSSIKKASKIAMKLDKLKRLSKTNKYVDLSKYKYELENKFKIKIDYLEFRDEKKMKLNNFKSNFRLFIAYHINGVRLIDNF

SEQ ID NO: 164168 - protein, 277 aa, Unknown
  Bacterial polypetide isolated from the Sargasso Sea
MKIVKKIDELENALKPIKSTNKSIGLVLTMGNIHKGHLSLVDRAFSENNFIVVTIFINPTQFNNKDDYKLYPKTLAKDVEKLHSANCHLLYLPDVNSIYPKGLIKEKTVTKYRDILCDKYRPGHFDGVTTVVDRFFELIKPNRSYFGEKDYQQLQFVKELVKIKEHNINIIPCSSIRDETGMSYASRNSNFTKDQYILFKKLSEKIYKFINLSKNKKTKIDTENLKTDLLTINITKIDYLEVRNEKDLEISNNYKDARLFIALYIDQIRIIDNFRLN

SEQ ID NO: 164169 - protein, 244 aa, Unknown
  Bacterial polypetide isolated from the Sargasso Sea
MGSLHQGHISLIKRSLKVCNKTIVSIFVNPTQFNNKNDYKNYPRNTKKDLLILKKLKVDFVYLPQSKDIFNYFKRKIILRKKDKILCAKFRKGHFEGVIDVMQRLTKKINPNKIFLGEKDFQQLYLIKKYVKKNNNLSIIGCKTIRDRNKLALSSRNNLLNKTRLKYARSIAKNLILFKKKIINKKKLKSLLENKKKELIELYNIKIDYLELRNKTNLAISNKTKNSKIFIAYYLNSVRLIDNY

SEQ ID NO: 164170 - protein, 272 aa, Unknown
  Bacterial polypetide isolated from the Sargasso Sea
MKIIRQKKDLKNLISKINCLSFIPTMGGLHKGHEFLIKKAKKKSKFTIVSIFVNPKQFNSKKDFITYPRNYKRDLKILKKLNVKYLYMPNSRDIFSFKTSNKIYLHPFSNKLCGKYRPGHFKGVIDVVNRFLELLTPKYIFLGKKDYQQLFLIKKHIDKNKIKTFVISCNTIRENKFLPYSSRNFNLNKYDKVLALKVYKLLRKEKNIIKKNKIQKINFSNIKKKILKIGIKKIDYIEAINLDNFKKAKKFNENFNIFSAFYVNKVRLIDNF

SEQ ID NO: 164171 - protein, 116 aa, Unknown
  Bacterial polypetide isolated from the Sargasso Sea
MKSKKISSLKIISSIKEMQKISLNIRKKGTHKISVIPTMGALHEGHLSLIKKAQEKKIITIVTIFVNPIQFDDKKDLTNYPSNLKNDIHKLKSIGVNYLFTPNIKDIYPEGYKTKV

SEQ ID NO: 164172 - protein, 134 aa, Unknown
  Bacterial polypetide isolated from the Sargasso Sea
MKIITSIFDLNKDIKNFKIVGFVPTMGGIHKGHISLIKASQKKKNKTIVSIFVNPTQFNRASDFKKYPKNIKKDIILLKKLKVDYLFLPTTKEIYKFKAKVFILKKKEKILCAKFRKGHFEGVLNVMNRLMSIV

SEQ ID NO: 164173 - protein, 91 aa, Unknown
  Bacterial polypetide isolated from the Sargasso Sea
LNPDQRSKAVYLYESLVRASKKIYKNSGDYMSILDTEIERLNKDDLNVDYLELRKTDNLSNVEDYKNISGQYILLGAIRLGATRLIDNIIL

SEQ ID NO: 164174 - protein, 212 aa, Unknown
  Bacterial polypetide isolated from the Sargasso Sea
INYPNNINSDIEKLKNLKVDAIFIPEIREIYPLGFSTNVDVGQISKVLEGKFRPAHFTGVATIITKLFSIIKPDHAYFGQKDAQQCLVIKKLNDELNLGVKIFINPTVRDQNGIAISSRNKNLNKIHLKAAESLFKSLCLSKQLFEKGIDNTKYIKDEMKKVIMQSYPTKIDYISIANSNTLEELDKIAIPTLISLAVWFGETRLIDNILLK

SEQ ID NO: 164175 - protein, 224 aa, Unknown
  Bacterial polypetide isolated from the Sargasso Sea
MKIITSIFDLNKEIKNYKNIGFVPTMGGIHAGHESLIKASQKKKSKTIVSIFINPTQFNKKNDFKKYPRNIKKDIAILKKLNVDYLFRPSVKDVYRFKSRKFNLKKSDKILCAKSRNGHFEGVLNVMNRLMSIIKSKDLFMGEKDYQQLYLIKKFLSKKFRVRINSCPTIRIKNNVALSTRNKLLNKKYLKKASEIALILRNLKRKSKFQPSKTSLDLPNYKIL

SEQ ID NO: 164176 - protein, 81 aa, Unknown
  Bacterial polypetide isolated from the Sargasso Sea
MQTAHSVAQVREHVRGWHRKGQSVGFVPTMGNLHDGHISLVREARTRCDVVVVSIFVHPTQFGPNEDFDRYPRTLDADAAA

SEQ ID NO: 164177 - protein, 220 aa, Unknown
  Bacterial polypetide isolated from the Sargasso Sea
MQIIRSVKDLEAVLQQYEEINFVPTMGNLHAGHLSLVSEANKYDGITLVSIFINPLQFAPNEDLDIYPRTEKQDLKELEKINCDVVFCPEPNFAEGAKQLHANADLSKKLCGISRPHFFHGVISILNHFFQLIKPKNVFFGLKDYQQYLIVKDFLTQSTLKASIHGIPIVREPDGLAMSSRNNLLTPDQRLIASKLSVILKDTAQQAKIKNLEHLRVEGI

SEQ ID NO: 164178 - protein, 284 aa, Unknown
  Bacterial polypetide isolated from the Sargasso Sea
MSKKENSLKILKSIKSTKKYLMELDKPKVLIPTMGALHDGHLSLIEIAKKLNIHTIVSIFINPIQFNDKKDLEKYPRTLIQDIQKLKALNVNTLFTPNVENIYDKNFQTSISVKNLQKNLCGTNRPGHFDGMATIVLKLFNIIKPDYAIFGKKDFQQLEIIKRMCLDLNLNIKIIEGKIIREKSGLAMSSRNSLLTKNNLILAPKIYEGLKLVKKIFTSSNKLESQSVIKKLRDFYLKNGLKKIDYIEIVDKETLVKTKKIKKGDTIAVAIKLGKIRLIDNLQF

SEQ ID NO: 164179 - protein, 81 aa, Unknown
  Bacterial polypetide isolated from the Sargasso Sea
MKILKNVFELNKAVKNYKNVGFVPTMGGIHKGHVSLIKISQKNNKETIVSIFVNPTQFNQKKDFKNYPRNFRKDISILKKL

SEQ ID NO: 164180 - protein, 125 aa, Unknown
  Bacterial polypetide isolated from the Sargasso Sea
MKLFTNKKQLQTEIRKFNNINFVPTMGALHKGHESIIRKSVKGSGKTIVSIFVNPKQFNNKRDLNTYPRNNNEDVKILKKLKVHYLYKPSYDDIYKFKTENKIHLDKFSKELCGQFRKGHFKGVI

SEQ ID NO: 164181 - protein, 271 aa, Unknown
  Bacterial polypetide isolated from the Sargasso Sea
MKILLNKTSLTKSLGPFNDIGFVPTMGSIHKGHLSLINKSNQVCNKTIVSIFVNPKQFNNKKDFKTYPKNMKKDLQLLNKTKQVDFIYIPKFKDIFNNNKKPKIKINKKDKILCAKFRKGHFEGVLDVMERLTNIVKPNKIFMGEKDFQQLFLVKKFLKNKYGTEVIGCKTIREKNKVALSSRNYLLSKENVALASVIIRKLINLKKNIKLKKNKNRYLKTVKNELEKKFNINIEYLELRNIYNLKLSSVINKSRLFVAYYLNGVRLIDNL

SEQ ID NO: 164182 - protein, 271 aa, Unknown
  Bacterial polypetide isolated from the Sargasso Sea
MKIILNNNSLFKSLRPFSDIGFVPTMGSIHRGHLSLIDRSNRACKKTIVSIFVNPKQFNNRKDFKNYPKNINNDIKILKKTKKVDFLYIPKFKDVFNNNKKSNIKIIKKDKVLCAKYRKGHFEGVLDVMGRLTNLVNPKKIFMGKKDYQQYFLIKNYLKNKYKTSIIPCKTIRDKSKIALSSRNNHLDLNRIKKASFLSKSLIKLKRNLVNSKKIKQNLRIQMKYFEKLLKIKIEYLELRSIKNLKMSNTVRESRLFIAYYIDKVRLIDNF

SEQ ID NO: 164183 - protein, 106 aa, Unknown
  Bacterial polypetide isolated from the Sargasso Sea
MQIISSANDLETYLQQFEEINFVPTMGNLHAGHLRLVSEAKKYDGITLVSIFVNPLQFAPNEDLEIYPRTEKQDLKELKKINCDAVFCPGPDFAEGAKKLLANADL

SEQ ID NO: 164184 - protein, 203 aa, Unknown
  Bacterial polypetide isolated from the Sargasso Sea
MKLFTNKKQLQTEIGKSNNISFVPTMGALHKGHESIIRKSVKKSGKTLVSIFVNPKQFNNKKDLNTYPKNNKNDLKILKRLKVNYLYKPSYYDIYKFKAEKKIYLDSFSKELCGKFRKGHFKGVIDVVNRFLEIIKPKTILLGNKDFQQLYLIKKHIKKNKIKTKVLSCKTIRDKNFIAYSSRLNKLNYNEKIILVSVIGFLK

SEQ ID NO: 164185 - protein, 126 aa, Unknown
  Bacterial polypetide isolated from the Sargasso Sea
MKIVKKISEIKEIVSNFKKNKKEINLIPTMGNIHAGHLSLLSKANKFDGINIVSIFVNPTQFNDEDDFNNYPNTFEADMEILSKANCNIIFAPCRNQVYPDGIKSEKTVFKYRDILCDLYRLGHFD

SEQ ID NO: 164186 - protein, 249 aa, Unknown
  Bacterial polypetide isolated from the Sargasso Sea
MKILKTKDDLKEAILDCKHLGFVPTMGSLHKGHISLIKNSQKKSSKTIVSIFVNPTQFNDKNDYKTYPKNINQDIKILKKLRVNFVFIPKVKDIYNNKINSKFRLKKSEKILCADKRKGHFEGVLEVMDRLLNLIKPKFLYLGEKDFQQQYLINKYLHKKHKFKLIICKTIRHNKMALSSRNLKLKKKSLKTVQLIAEELSRIKNKYKNYNFRIKNNNFFLIKYLENKYLIKVEYLDFRNINNLNSSKF

SEQ ID NO: 164187 - protein, 151 aa, Unknown
  Bacterial polypetide isolated from the Sargasso Sea
MGALHAGHIQLIKEGKKLKLPLIVSIFVNPIQFNDKDDFANYPKTIDKDIEILNNLQVDYLFIPDSEYIYPSNGFESIDSGELGRKYEGESRQGHFDGVLTVVNRLFELIEPKAVIFGKKDAQQLFLIKKLVLDKKYKIQIIECKTVRDSN

SEQ ID NO: 164188 - protein, 142 aa, Unknown
  Bacterial polypetide isolated from the Sargasso Sea
MDIVQADNSFFGEKDYQQLVVIKKMRNELNFNTNIIPIKTVRNKNGLPLSSRNKYLEINEIEIANKINKICKYLIPKVKNKLNTTKILAHAKRELRKNGIDKIDYLTILTDNLEKRKSLKSKSRIFIAANVGSTRLIDNFPI

SEQ ID NO: 164189 - protein, 77 aa, Unknown
  Bacterial polypetide isolated from the Sargasso Sea
MKILFNKNDLNEALNNVKNLGFVPTMGSLHNGHISLIRKSKKVCKKTIVSIFVNPTQFNNKKDFEKYPRNYKKDLKI

SEQ ID NO: 164190 - protein, 277 aa, Unknown
  Bacterial polypetide isolated from the Sargasso Sea
MQIIQKTSEIKEILSDLEKNNLKINLIPTMGNIHEGHLSLLKEANKFEGTNVVSIFINPTQFNDIKDFENYPNTFDQDVNLLSKNNCEIIFAPNISEMYPNGLETKKTIFEYREILCDAFRPGHFDGVTTIVNLLLDILKPSNVFFGEKDFQQLKIVEKLIIQNKLKVNLVKCSSIRGLNGMSLSSRYNKLNTKEKTQFDECAQIIDKNLSDLINSFDTKILENIKKELQSIGISKIDYCEVREESNLEISKTNLQSRLFVAFYVNKIRIIDNFVLY

SEQ ID NO: 164191 - protein, 206 aa, Unknown
  Bacterial polypetide isolated from the Sargasso Sea
SYPRNTKTDLKKLKKLKINFLYIPTFKDIYGFKPKEKVYLDKFSKKLCGRFRKGHFEGVLNVVNRFLEIIKPKYIFLGKKDYQQLYLIKKHIEKRKIKSKIIECKTIRENNGVALSTRNSSLDEKQMKIASNIYYYLYNLKKKIKKNYNLFNLNKIKKDLKDLGVSKIDYLENYNTKNFKKIKKQSKKFNLFIAYYIKDVRLIDNI

SEQ ID NO: 164192 - protein, 269 aa, Unknown
  Bacterial polypetide isolated from the Sargasso Sea
MIIFKSIKVLNNNVNFNNNIGFVPTMGALHEGHISLIKASKRKCQKTIVSIFINKPQFNKKKDFKNYPRNIKKDLKILRKLKVDYLLMPNEKDIYSSNKQKKIKINKKDLIMCAKFRSGHFEGVLAVINQFLIKIKPSVMFLGEKDFQQIYLIKRFISGKFKTKIVQCKTIRNKNGLPYSSRNVLLNKKNFQTAVNVSQIIKKFYSALKLNFKKTRDIYLIKNKIINKNVKLEYLEIRNKLNLSKKINKKNFKIFIAYHVNGIRLIDNY

SEQ ID NO: 164193 - protein, 91 aa, Unknown
  Bacterial polypetide isolated from the Sargasso Sea
RNNYLSGQEFKIAIKINKLLKKLPPLIRTKLKINKILNHAKKVLIDHGVDKIDYLTVLNDDLSVRKKISDKSRIFIAAKIGNTRLIDNIKI

SEQ ID NO: 164194 - protein, 130 aa, Unknown
  Bacterial polypetide isolated from the Sargasso Sea
GYQQLMVIRHMVRQFALPIDIVAGETCRAADGLALSSRNGYLSLEERQEAVALSQALKRLAQQWLDASDRSALEAQAQDALRARGWAPDYLTVRRRADLLPATAEDAAGTLVALGAARLGSTRLIDNLEF

SEQ ID NO: 164195 - protein, 71 aa, Unknown
  Bacterial polypetide isolated from the Sargasso Sea
MDESIKLLRKNSETISLVPTMGNLHEGHISLIELAKKQSSKVIVSIFVNPLQFGENEDFEKYPRTWNKIRL

SEQ ID NO: 164196 - protein, 277 aa, Unknown
  Bacterial polypetide isolated from the Sargasso Sea
MKIVKKISEIKEIVSNFKKIKKEINLIPTMGNIHAGHLSLLSKANKFDGINIVSIFVNPAQFNDEDDFNNYPNTFEADIEILAKSNCNIIFAPSNNQIYPDGIKYEKTVFKYRDILCDLYRLGHFDGVTTIVKILFKLIEPSKVFFGEKDFQQLKIIEQLIFQNNLKINLIKCPSIRDSHGMSFSSRYSKFSKDEKSKFKKCAQIINANLLKLKRDFDHKILDNIKKELRSYGISKIDYFEVRNEENLSLSVKNESSRLFIAFYLNKVRVIDNFLLY

SEQ ID NO: 164197 - protein, 106 aa, Unknown
  Bacterial polypetide isolated from the Sargasso Sea
MTVDTIGGLRALVARARGKNKKVALVPTMGNLHDGHIALIHGAMQRVDFVVASIFVNPLQFGANEDLASYPRTPDADREKLVKAGCDVLFAPAVEEIYPNGMLNQT

SEQ ID NO: 164198 - protein, 140 aa, Unknown
  Bacterial polypetide isolated from the Sargasso Sea
IEIINPKYIYFGKKDYQQLYLIKKHIKKRKIKTKVIQCKTVREKNGVAYSSRNVRLNYKQIKIASNIIYYLLKLKKKIKKNYNLFKINKIKKDIISLGATKIDYIEIYNLKNFKKIKKPNKRSNLFIAYYIKNTRLIDNI

SEQ ID NO: 164199 - protein, 95 aa, Unknown
  Bacterial polypetide isolated from the Sargasso Sea
MIIESLPLLRQHIRRLRQEGKRIALVPTMGNLHDGHMQLVDTAKASADVVVVSIFVNPMQFDRPDDLSRYPRTLQDDCEKLNKRKVDFVFAPAPA

SEQ ID NO: 164200 - protein, 224 aa, Unknown
  Bacterial polypetide isolated from the Sargasso Sea
MKIFEKKKDLDQALAKIREEGQKIGLIPTMGSIHKGHLSLVKKSKKMNFYSIVSIFVNPTQFEDKKDFKDYPDNKDIDIKELKKINCDAIYFPSINEIYPKEIKSKKTIYDFRNILCDRFRAGHFDGVTTVVDSLFNIIKPDYAFFGEKDFQQLKIIIKLVEILNHKITIESCPSVRYENGMSYSSRYKNFSKEQKNIFNEIAVIINNYVKNLKVKIESNTLEK

SEQ ID NO: 164201 - protein, 246 aa, Unknown
  Bacterial polypetide isolated from the Sargasso Sea
MNSTGNINELKTSLELLKKAGKTIGLVPTMGNLHDGHINLVKESLEKNDYTVVSIFVNPLQFNPNEDLETYPRTIEEDKEKLLACGCDFLFIPTTQEFYPETLYPHTQVKIPGLSDILCGLERPGHFEGVCIVVTKLLNIVNPDNAYFGLKDYQQYLIVKKMAKDLMIDTRIVGLEIVRDAGGLALSSRNGFLSDHELQKARQIYHSLQKTAKRIYRSEAKFRDLETLAHQELLDAGLTPEYFVIR

SEQ ID NO: 164202 - protein, 236 aa, Unknown
  Bacterial polypetide isolated from the Sargasso Sea
MLIIKDISNLKSYLTAYQNRKYSIGFVPTMGALHKGHGELIKKSKNDNHKTIVSIFVNEKQFNSKEDFNSYPRNKGLDYEFCSNNDVDLLFEPSAEEIYNNDGTILKNVNFKNILCDKFRKGHFDGVITVLDKFFTIIKSNKVYFGEKDYQQLKIIEKFILKKYKSLQLVSVPTKRSEEGIAYSSRNEKLSKKQLQDFVSFHQKVENFLKSLEKTFDIEIANQKAKDFILNKILKN

SEQ ID NO: 164203 - protein, 244 aa, Unknown
  Bacterial polypetide isolated from the Sargasso Sea
GGIHEGHKSLIKASQNKKRMTIVSIFVNPTQFNKKDDFKKYPRNIQNDIAILKKLNVEYLFTPNAKEMYKFKAKKFNLKKKDKILCAKFRAGHFEGVLNVMNRLLTIIKSKDLYMGEKDYQQLYLIKKFLSKKFKVRINSCPTIRINNKIALSTRNKLLNKRSFKKASEIASFLKKIKYRSKSQASELAFKLPDYKKELEKKYKIKIDYLEFRDEKNLKLNNFKNKYRLFVAYKIDNVRLIDNY

SEQ ID NO: 164204 - protein, 202 aa, Unknown
  Bacterial polypetide isolated from the Sargasso Sea
MKIITSIFDLNKEIKNYKNVGFVPTMGGIHNGHISLIKASQKKKSKTIVSIFVNPTQFNKTVDFKKYPRNIKKDIISLKKLNVNYLFLPTTKDIYKFKAKKFVLRKKDKILCAKFRKGHFEGVLNVMNRLMSIVKSKDLFMGEKDYQQLYLIKKFLSKKFNVRVNACPTIRTTDKIALSTRNKLLNKKSLEKASNIAKLLIK

SEQ ID NO: 164205 - protein, 113 aa, Unknown
  Bacterial polypetide isolated from the Sargasso Sea
MRTFKKSKKINAFLMKKQEAGMHIGFVPTMGALHEGHLSLIEQAKKYSDLVVCSIFVNPLQFNRKEDLVNYPKRIVEDTKLLEGAGCNCLFIPEVEEVYPQPPKIKFDFGSIG

SEQ ID NO: 164206 - protein, 270 aa, Unknown
  Bacterial polypetide isolated from the Sargasso Sea
MKIITSIFDLNKEIKNYKNIGFVPTMGGIHEGHKSLIKASQNKKRKTIVSIFVNPTQFNKKDDFKKYPRNIQKDIVILEKLNVEYLFTPNVKDIFKFKGKKFNLKKRDKILCAKFRSGHFEGVLNIMNRLMTIIKSKDLFMGEKDYQQLYLIKKFLSKKFKVQINSCPTIRLKNNIALSTRNKLLKKRSIKKASEIASFLKKVKYKSKSQGSRLAFHLPDYKKKLEKKYNIKIDYLEFRDEKNLKLSNFKNKYRLFVAYNIDNVRLIDNY

SEQ ID NO: 164207 - protein, 265 aa, Unknown
  Bacterial polypetide isolated from the Sargasso Sea
MKIITSIFELNKEIKNYKNIGFVPTMGGIHEGHKSLIKASKNKKRMTIVSIFVNPTQFNKKDDFKKYPRNIQNDIAILKKLNVEYLFTPNVKEMYQFKAKKFNLRKKDKILCAKFRVGHFEGVLNVMNRLLTIIKSKDLYMGEKDYQQLYLIKKFLSKKFKVRINSCPTIRIDNKIALSTRNKLLKKKSFNKASEIALFLKKIKYKSKLQGSKLAFNLPDYKKELEKKYNINIDYLEFRDEKNLKLNNFKNKYRLFVAYEIDNVR

SEQ ID NO: 164208 - protein, 277 aa, Unknown
  Bacterial polypetide isolated from the Sargasso Sea
MKILNNLNDFNQILSELLKNREKIGLVPTMGSIHKGHLSLLKKSKKLNYYSIVTIFVNPTQFNDLEDYNNYPKNEDRDIKVLKDNKCDLLFLPNVKDIYPEKVEINKNIDDFRDILCDRFRPGHFDGVVTVVDLLFKLIKPNAVFFGEKDFQQLKIIERYIKNNNLPILFYSCSSIRMSNGMSYSSRYNQFTNDDKKIFDKTSQLIYQHIRILNKNFNPKVIDNLVGEVSKLGIKKIDYFEVREESNLKISKNKNNSRLFVAFYINKVRVIDNFILY

SEQ ID NO: 164209 - protein, 246 aa, Unknown
  Bacterial polypetide isolated from the Sargasso Sea
MGNLHEGHLKLVEQAGKVSKFVCVSIFVNPLQFGPEEDFSSYPRTLSEDLSKLEKTNCSLVFAPKIDDMTFEIRKQKADPFLSSILCGRTRQNHFDGVVTIVNRLFELFQPKITFFGEKDYQQLMIIKEFVERKKLKIAVEGVPTERELSGLAKSSRNNYLSRDEINKAALIHKTLINLGQLIRDFNEIDTVIKQAAEFLEEKDFNVDYLEARDRHTLKESSNPNNIILLCAATLNKVRLIDNLKL

SEQ ID NO: 164210 - protein, 249 aa, Unknown
  Bacterial polypetide isolated from the Sargasso Sea
MRGNLSAGSKLGLVPTMGALHEGHVSLISESIKANDRTILSIFVNPTQFNDPKDLQSYPSNLKQDIEIAEKAGVDFVFLPRHEDVYRDKFEYQIHETRLSKELCGADRPGHFTGVLTVVMKLLNLIAPDRAYFGLKDFQQYELIRGMCEAFFLNVEICAVETIRDSKGLAISSRNRLLNHESKEMACKFNKTLSLDTHDEAIHELLEELGFTVNYVETRKGRRFGSVTISSNENKIRLIDNIKLEDSYQ

SEQ ID NO: 164211 - protein, 144 aa, Unknown
  Bacterial polypetide isolated from the Sargasso Sea
FAQILPDYAFFGEKDFQQLLVIKQMAKDLDFSVEIINCPTIRENDGLALSSRNSYLSHEERKIAPLLYQILNNILKETLSGKPITETVKSAKIQLLKGGFTKVDYITICDSADLREIGKLEMGGRILGAAHLGNTRLIDNIEIT

SEQ ID NO: 164212 - protein, 63 aa, Unknown
  Bacterial polypetide isolated from the Sargasso Sea
MKIIREIEGWMTLRNSLKGKVGFVPTMGALHSGHAELIKRSLQENDFCVVSIFVNPTQFNDST

SEQ ID NO: 164213 - protein, 212 aa, Unknown
  Bacterial polypetide isolated from the Sargasso Sea
YPRNLTRDASLISEISDKIKIYAPNQEDVYGKKIKPKKYSFKKLDKVMEGIKRENHFNGVANIIEFLFKTFNPENVYFGEKDYQQLQIVRSLNKILRMSINIIQCPTIRSKNGLALSSRNQNLTSNEQSIAPEIYKCLLDVKKMAKVNSYEEIQNEVSSRFLKIKQCNLEYFTISNPKTLEEINSTDSILGNRAFIAVKIGDTRLIDNIELS

SEQ ID NO: 164214 - protein, 244 aa, Unknown
  Bacterial polypetide isolated from the Sargasso Sea
PNLVSIKDKGLSIGLVLTMGNLHDGHLSLIREAQLHNEFVICSIFINPTQFNNENDFNSYPKTIDEDISKLENIGCNLLFLPEVQEIYPKELAKKKIVNNFRNILCDKFRPGHFDGVTTVVDLFFNMIKPTNSYFGEKDFQQVKIIQDLVKINHHNIKIIQCPSVRDKMGMSLSSRNSKFSNDQLKIFNVLGNKIKEHINLLTQNEINNLDQLKIELLQNNINKIDYLEIRNENNLEITKNYSE

SEQ ID NO: 164215 - protein, 124 aa, Unknown
  Bacterial polypetide isolated from the Sargasso Sea
MRIIKSINKLNKEVNFKANIGFVPTMGALHKGHLSLIDSCKKKCDKTLASIFVNPSQFNKKNDYKKYPRNLSRDIKILKKKGVDYVFIPNVRHIYKNKKKRRIKIINKDKVLCAKFRRGHFEGV

SEQ ID NO: 164216 - protein, 168 aa, Unknown
  Bacterial polypetide isolated from the Sargasso Sea
MIILKDNEHIFNNKNLCLVPTMGALHEGHIALINAAKKTEQEVIVSIFVNRLQFNDDLDFKNYPRDLEKDISILNRLNIEYAFFPDEEYMFPESGFDKIDAGNLGKKYEGNSRPGHFDGVITVVNRLFELITPKTAVFGAKDFQQLFLINKLILEKKYNIKLIENKTV

SEQ ID NO: 164217 - protein, 258 aa, Unknown
  Bacterial polypetide isolated from the Sargasso Sea
MGSLHAGHTSLVDQAVAECDDVVTSIFVNPSQFGPQEDFEKYPRDFDADFNLLARHNVRWIFAPDVHEMYPPGDSTRIEIGGPAEPYEGTIRPGHFSGVATIVFRLLQAAPSHAVYFGAKDWQQVLVVRKMVHDLQLDVEVMTCPTVRDTDGLALSSRNTYLSESERNRAQTIYAALKQAEQNWCRGLAIDTIEQKLRDMLSAKEIQIDYADIVHAESLKKISEVSQDTPAIFLIACRLGSTRLIDNILLPSQALSSC

SEQ ID NO: 164218 - protein, 264 aa, Unknown
  Bacterial polypetide isolated from the Sargasso Sea
IFDLNKEIKDYKNIGFVPTMGGIHAGHKSLIKASQDRKSKTIVSIFVNPTQFNKKDDFKKYPRNIKQDIAILKKLNVEYLFTPNSKDIYKFKNKKFNLKKKDKILCAKFRGGHFEGVLNVMNRLMTIIKSKDLYMGEKDFQQLYLIKKYLSKKFKVRVNSCPTIRVKRNLALSSRNKLLKVNSLKKASEIASFLKKIKNKSKLQGSRLAFNLPVYKKKLEKKYNIKIDYLEFRDEKSLKLSNFKSKYRLFVAYEIDNVRLIDNY

SEQ ID NO: 164219 - protein, 156 aa, Unknown
  Bacterial polypetide isolated from the Sargasso Sea
MKIFKSINKLNKQVDFKANIGFVPTMGALHKGHMSLIDSSKKKCKKTLVSIFVNPSQFNKKSDYNKYPKNLNKDLNILKKMKVDYVFIPKIREIYKNKKKMKITISSRDKILCAKYRKGHFEGVLAVINQLLNTIKARYMFLGNKDYQQVYLIKKF

SEQ ID NO: 164220 - protein, 236 aa, Unknown
  Bacterial polypetide isolated from the Sargasso Sea
MRAYSSYKDIIKLINKVDSVGLVPTMGSLHEGHLSLIRSALSENEKVIVSIYVNPLQFNNSDDLKKYPRDIRNDLQKLEALSDIIAYVPNDKEIYKKGEKKKKYNFGHFTKIMEGKMRPGHFSGVATIIEKLLRMFKPTNAYFGEKDFQQLILIKALVREQKLKVNIIGCKTIREDDGLAMSSRNKLLNNTERESASHIIRLLKKARQLYKSSTLEETKRNILKENLMIKNLNLEY

SEQ ID NO: 164221 - protein, 268 aa, Unknown
  Bacterial polypetide isolated from the Sargasso Sea
KLFTNKKKLQSEIGKIHNIGFVPTMGALHKGHESIIRKSIKESEKTIVSIFVNPKQFNSKKDLNNYPKNIKNDLKILKRLKVDYLYMPSYNDIYKFKTKNKIYLDKFSRELCGQFRKGHFIGVIDVVNRLLEIIKPQKILLGNKDFQQLYLIKKHIKKNKIKTKVFSCKTVRNKNFIAYSSRLKKLNLSEKIKLIRIINVLKKYKNDLVSKKQIYNFYKIKKIIMTMGAKKVDYIKLIDLKTMQKPKKNKFNLFYAFYLGKVRIIDNF

SEQ ID NO: 164222 - protein, 213 aa, Unknown
  Bacterial polypetide isolated from the Sargasso Sea
MSHFIQNNKVINFVPTMGNLHEGHLSLVDASNKFTGVTLTSIFVNPLQFAPNEDLEIYPRSLEEDIKKLRIRSCDAVFCPELNLSKNIVKLSANPLLAKKLCGISRPHFFDGVISILNYFFRLIHPANTFFGLKDYQQYLIVKDFLQNSDIQTIIHGVPIIREIDGLAMSSRNNLLSMDQRKIAKNIYLTLNDIALGIRTDTFENLRIKSIKK

SEQ ID NO: 164223 - protein, 207 aa, Unknown
  Bacterial polypetide isolated from the Sargasso Sea
MKIIKSIFNLNKEIKDFKNIGFVPTMGGLHDGHISLIKTSQKKNIKTIVSIFVNPTQFNNINDFRNYPRNIKNDISTLKKMNVDYLFYPNVKEIYKLKSKKFILKKTDQILCAKHRPGHFEGVLDVMNRLMTVIKSKNIYMGEKDYQQIFLINKFLSKKFNVNIKSCPTIRIKNTFALSTRNILLNKKSINKVLQIAITLKKLKKKS

SEQ ID NO: 164224 - protein, 157 aa, Unknown
  Bacterial polypetide isolated from the Sargasso Sea
FRRSHFLGVVNVVNRLLEIIKPRFIYFGKKDYQQLFIIKKHIKKRNIKTKLISCKTIRSNNGVALSSRNKNLNNNSILIASKVFKLLKTEKRNLKKGSFIKLNKSSIIKKLNKLGVKKIDYIECINLNTLKKPLNTNSKFNIFIAYYLNGTRLIDNV

SEQ ID NO: 164225 - protein, 266 aa, Unknown
  Bacterial polypetide isolated from the Sargasso Sea
KSILDLNKEIKNYKNVGFVPTMGGIHNGHISLIKASQKKKSKTIVSIFVNPTQFNKTIDFKNYPRNIRKDIITLKKLNVNYLFLPTKKDIYKFKARKFVLRKKDKILCAKFREGHFEGVLNVMNRLMSIVKSKDLFMGEKDYQQLHLIRKFLSKKFDARINACPTIRTANKIALSTRNKLLHKKSLEKVSNIAKLLIEIKKRSKLRSSKFKLDLSDYKKKLEKKFNVKIEYLEFRDEKNLKLNNFKNKFRLFIAYNINKIRLIDNF

SEQ ID NO: 164226 - protein, 240 aa, Unknown
  Bacterial polypetide isolated from the Sargasso Sea
KGHEYLIKQSQKRCKQTLVSIFVNPTQFNNKKDYLSYPKNLKKDLNILKKLKVNFVYIPNKKDIYSFKRKKTIVLKKENKILCAKSRKGHFEGVIDIMDRLTNIIKPNKIFMGEKDYQQLLLVKKFIEKKYETKIVPCKTVRNKNKLALSSRNQLLNKKDLIKAGKIARDLLHFKIFLKNKKKTKNLLQKKIELLKENFDIKIDYLEIRKKNNLKSSLNIRNSKIFIAYFINKVRLIDNF

SEQ ID NO: 164227 - protein, 142 aa, Unknown
  Bacterial polypetide isolated from the Sargasso Sea
PDAAVFGQKDAQQAAVIRRLTADLNLGVDILMIPSVREADGLAKSSRNVYLTEEERRGAPVLFHALQQGKSLAVSGIRSRDRLIRTVTSIIETVSCARIEYVEAVKAGDLREEPDLKGPILLAVAVRFGKARLIDNVLVPAT

SEQ ID NO: 164228 - protein, 227 aa, Unknown
  Bacterial polypetide isolated from the Sargasso Sea
LIKASQKKKRETIVSIFVNPTQFNNTIDFRKYPRDIKKDIVCLKKLNVNYLLLPSTKDIYKFKARKFVLRKKDKILCAKFRKGHFEGVLNVMNRLMSIVKSKDLFMGEKDYQQLYLIRKYLSKKFDVRINSCQTIRTADKIALSTRNKLLNKKSLEKASHIAKLLIKIKKSKLQSSKFKLDLSDYKIELEKKFNIKVDYLEFRDEKNLKLNNLKDKFRLFIAYNINK

SEQ ID NO: 164229 - protein, 273 aa, Unknown
  Bacterial polypetide isolated from the Sargasso Sea
MASDIGYPIIIKATAGGGGKGMRVVHTEAALLNAWQLTRSEAQAAFGNDTVYMERYLEKPRHVEFQVLADTQGEVVILGDRDCSMQRRHQKVLEEAPAPGITDALRAEMGERCANACRQIGYRGAGTFEFLYENGEFFFIEMNTRLQVEHPITEAITGIDIVREQIKIAAGEPLSVTQKDIRLQGHAVECRINAENATTFMPSPGTITRYHQPGGPGVRVDSHIFNNYRVPPYYDSLIAKVITHGEDREQALQRMSGALREMVVDGIDTNIAL

SEQ ID NO: 164230 - protein, 271 aa, Unknown
  Bacterial polypetide isolated from the Sargasso Sea
MKIFKDKHSLQREIFKTKGVSFVPTMGGLHKGHISLIKQSKKSKFKTLVSIFVNPKQFNKKSDFRSYPRNAKKDIKLLKKLKIDYLYIPTFKDIYGFRPKDKVFLDKSSKELCGKFRKGHFEGVLNVVNRFIEIIKPKYIFLGKKDYQQLYLIKKHIEKRKINSKIIECKTIRENNGVACSSRNLNLNKSQMKIASNIFHYLNNLKKKINKNYSLFKINRIKKELIKLGANKIDYLENYDTKSFKKIKKNNKKCNLFFAYYINKVRLIDNI

SEQ ID NO: 164231 - protein, 134 aa, Unknown
  Bacterial polypetide isolated from the Sargasso Sea
MIILKDNEHIFNNKNLCLVPTMGALHEGHIALINAAKKTEQEVIVSIFVNRLQFNDDLDFKNYPRDLEKDISILNRLNIEYAFFPDEEYMFPESGFDKIDAGNLGKKYEGNSRPGHFDGVITVVNRLFELITPK

SEQ ID NO: 164232 - protein, 247 aa, Unknown
  Bacterial polypetide isolated from the Sargasso Sea
MGNLHRGHISLIDTAKQYKNKVIASIYINKLQFNDKNDYLNYPKTIENDINILDKHGCDYVLIPDDSIVENILNIKAPPKSNKLCGQGRPGHFDGVLTILNKFFQIINPEIVFFGKKDYQQFVLVRDFIRDNNLNIEIVGVDTVRNDSGLALSSRNNLLSNQEKIIATELYKALKDIAYNKTILDSNLIDLKKDYLKSLGINVDYLISCDCDTFEESYKISEKDILVAVAAYIGKIRLIDNIKLIKL

SEQ ID NO: 164233 - protein, 192 aa, Unknown
  Bacterial polypetide isolated from the Sargasso Sea
MLIIKDISNLQSYLSAYQNRKYSIGYVPTMGALHKGHGELIKQSKKGNHKTIVSIFVNEKQFSSKEDFETYPRNKGFDYDFCIDNEVDILFEPSSEEIFKNDQTLLNNKNFKDILCDKFRRGHFDGVITVLDKFFSIIKSNKVYFGEKDYQQLKIIEKFIEEKYKSLDLVSVPTQRHEEGIAYSSRNEKLSK

SEQ ID NO: 164234 - protein, 261 aa, Unknown
  Bacterial polypetide isolated from the Sargasso Sea
AEIRNKGSKIGLIPTMGSIHNGHLSLVRRSKKEGFFSIVSIFVNPTQFEDLKDFENYPRNEESDLKKLIKGNCDALYFPLAIDLYPNGIKSKKTIFEYRDILCDKFRTGHFDGVTTVVHSLFNIVQPSAVFFGEKDFQQLKIINQLIEQNNIPLKLKNCTSIRLKNGMSLSSRYNNFTSEQKNLFNHIAIKINEYVEILRQKIDIDNLKRLSQHLLNYKSIKIDYIEIRDEDNLKLTQVNNRARLFIAFYIDNIRIIDNFK

SEQ ID NO: 164235 - protein, 108 aa, Unknown
  Bacterial polypetide isolated from the Sargasso Sea
MKILKTIDAIQQYTAQRPSGTWALVPTMGNLHPGHRSLIKRAQQAADHVMVSLFVNPMQFAPHEDFDAYPRTPKEDLQALEADAVDAVFMPTNAELYPHGMREHTHID

SEQ ID NO: 164236 - protein, 209 aa, Unknown
  Bacterial polypetide isolated from the Sargasso Sea
PRTMNQDISKLKQLNCDILFAPKTKNEVFNNIDNLKNLEAGPKGNILCGKIRPGHFDGVLKVIYMLFQLTQPDLSVFGLKDFQQLYLIKQMAKMYFPKLKIISAPTIRTKNGLALSSRNSYLDKRSMKIAPVFYKILLDGVINLKNSNDVEKTVNYIKTNLEKNSFLVNYVSFLTTKLEKIKLNTPDKKILLSSVKLGQTRLIDNVEFS

SEQ ID NO: 164237 - protein, 65 aa, Unknown
  Bacterial polypetide isolated from the Sargasso Sea
MKIFRKASELEPNLVSIKEQGQSIGLVLTMGNLHDGHLSLIREAQLHNEFVICSIFVNPTQFNNE

SEQ ID NO: 164238 - protein, 236 aa, Unknown
  Bacterial polypetide isolated from the Sargasso Sea
EFGLSTMVTIFINELQFDSKEDFNNYPSKIEDDIKTLDNLDIDYLFIPENNYIYPDSKFEKIDSGAIGKKFEGKSRPGHFDGMLTVVNRLFQLTLPKIAIFGKKDAQQLFLIKEMVNRKKYPIKIFEGLTVRDNLGLALSSRNLLLSKHGEEKARLINQILNNSKKEFCETKNLNIFKKLKSYYSDGDIEIDYLAIVDSETFGEPLEETENYIIIIAAYIENIRLIDNIEFKLERV

SEQ ID NO: 164239 - protein, 149 aa, Unknown
  Bacterial polypetide isolated from the Sargasso Sea
MIILKDNEHIFNNKNLCFVPTMGALHEGHIALINAAKKTEQEVIVSIFVNRLQFNDDLDFKNYPRDFEKDISILNRLNIEYAFFPDEEYMFPESGFDKLDAGNLGKKYEGNSRPGHFDGVITVVNRLFELIAPKTAVFGAKDFQLIVFN

SEQ ID NO: 164240 - protein, 205 aa, Unknown
  Bacterial polypetide isolated from the Sargasso Sea
MRIFNSIQEFNEARDGLGKLSFVPTMGNLHQGHSSLVDIAKQFKNKIIASIYVNKLQFNDDNDYLNYPKTLNSDIELLQKHGCDYVLIPDDSILDNIQSIQAPPKSKKLCGQSRPGHFEGVLTILNKFFKIIDPNIVIFGKKDYQQFIMVRDFIKNNNLNIKIIGGNTVRESSGLALSSRNNILSTQKKLIASKLYEVLNDIESK

SEQ ID NO: 164241 - protein, 249 aa, Unknown
  Bacterial polypetide isolated from the Sargasso Sea
RKYSIGYVPTMGALHKGHGELIKQSKKDNHKTIVSIFVNEKQFSSKEDFETYPRNKGFDYDFCTDNEVDILFEPSSEEIFKNDETLLNNNYFKDILCDKFRKGHFDGVITVLDKFFSIIKSNKVYFGEKDYQQLKIIEKFTEENYKSLDLVSVPTQRHEEGIAYSSRNEKLSKKQTQDFVDFHKKVKNFIGSLEGYLDIETANQKANDFMKLQDIDKFDYFEFRNDTDLSFVGTVPQARLFYAIYKGKE

SEQ ID NO: 164242 - protein, 269 aa, Unknown
  Bacterial polypetide isolated from the Sargasso Sea
MKIITSIFDLNKEIKDYKNIGFVPTMGGIHAGHISLIKTSQNKKSRTIVSIFVNPTQFNKADDFKKYPRNIQKDIAILKKLNVEYLFTPNAKDIYKFKAKKFNLKKKDKIMCAKYRIGHFEGVLNVMNRLMTIIKSKDLYMGEKDYQQLYLIRKFLSKKFKVRINSCPTVRINNIALSTRNKLLKKRSIKKASEIALFLKNVKYKSKFKDTKLAFDLHNYKIKLEKKYNIKIDYLEFRDEKNLRLNNFKSKYRLFVAYKIDNVRLIDNY

SEQ ID NO: 164243 - protein, 235 aa, Unknown
  Bacterial polypetide isolated from the Sargasso Sea
MGNLHQGHISLIELAKQYENEIISSIFINRLQFNEKNDYEKYPKSLESDIELLEKNGCDYLLIPDESILDNIKLIKAPSKSKKLCGKNRPGHFDGVLTILNKFFKIINPEISIFGKKDYQQFLLVKEFVIKNCLNIKIIGGDTIREDSGLALSSRNNLLSEKEKHIASSIYKVLCDIESSKNLLNKELLENKKKYLKKLGFEVDYLTICDALTLEDSFSIDTNDLLVAVAAKLEK

SEQ ID NO: 164244 - protein, 234 aa, Unknown
  Bacterial polypetide isolated from the Sargasso Sea
ETNLKTLVSIFLNRKQFNNDDDFKNYPIELEQDIHFLKSRGVDFIFLPQESYIYPSEGVPSIAPGKVGSILEGASRPGHFEGVLTVVNRLFDLIKPSHAVFGKKDAQQLFLIKDMVNRLDLDIEIIEGEIFRDINGLALSSRNKHLSQDAKLIAANIFKSLQKVAKEINLGKSFEESVELGINSLNQNEIDLDYLEIVDEENFNYPNKYSKKLKLLTAAYVENVRLIDNIDIEI

SEQ ID NO: 164245 - protein, 131 aa, Unknown
  Bacterial polypetide isolated from the Sargasso Sea
KDFQQYIIVKKMISDLFIDTSVESFPTIRESNGLALSSRNSYLTKSEKNQASHIYKMLRLGKNEFQKDMLKSEDLINIMTNYLTKNTTITIEYLNIVNHKNLKKVKEASSNNRILFAGHLNTTRLIDNINL

SEQ ID NO: 164246 - protein, 161 aa, Unknown
  Bacterial polypetide isolated from the Sargasso Sea
MIIFKSINKLNKEVNFKANIGFVPTMGALHKGHISLIKSSKKICKKTLVSIFINPSQFNRKADLNKYPKNLKKDIKILKKIKVDYLLIPKVNDLYKLKKDKKIKLKKREKIMCALHRPGHFEGVLAVINQFLIKLKPKYMFLGEKDYQQLFLIKNFIKNKL

SEQ ID NO: 164247 - protein, 244 aa, Unknown
  Bacterial polypetide isolated from the Sargasso Sea
HLTLVDKSLRTSEVTVVSIFVNPLQFNKAEDFKNYPTAYDKDIKILIEKKVDLIFFPDQKDMYPEDFSTYINLKKYNHILCGKKRKGHFSGVAIIVLKLFSLVNPNFAYFGEKDYQQLVIIKKLVKDLNLDIKIFSIRTVRDKNGLALSSRNKLLDKEEKIKASKINSILNKVTLKKLHNQKNLFIEIKRKLNSCGIYKIEYLEVRDERSLKLYDPTTRCNENYRVFIAVKIGKVRLIDNKRVI

SEQ ID NO: 164248 - protein, 277 aa, Unknown
  Bacterial polypetide isolated from the Sargasso Sea
MKILENKRELDELLAKIRANGTKIGLIPTMGSIHDGHLSLVENSIKENFFSITSIFVNPTQFNDLKDFKKYPQNKKQDIEKLNTVKCDAVFFPQIEELYPEGIKRKKTILKYRDILCDKFRPGHFDGVTTVVKSLFDIVTPDTVFFGEKDFQQLKIIKELIKKNNLPIQLIDCPSVRSKNGMSLSSRYNNFNTNQEILFNQISLKINDCVNLLKKQIDINNLKNLYQYLEEDKKIKVDYLEVRDDDELLLTQKNKNARLFISFYIEDIRIIDNFKLY

SEQ ID NO: 164249 - protein, 278 aa, Unknown
  Bacterial polypetide isolated from the Sargasso Sea
MNTFSSYRNLNNALRNRKGSLGLVPTMGSLHTGHLSLVEKAVKENSNVIISIFVNPTQFDSKSDLKNYPQNLKNDLKQLQKFNNVFVYVPDIQDLYPKNTISKKYNFGRLDKIMEGESRVNHFNGVATIVEKLFKIFKPNFAYFGEKDFQQLLIIKSLLKQKSLKVKIISCPTVRENDGLAMSSRNKLLNKKERKTATVLYRTLLEAKRLMNSSKPPEIEKTISTKFSNIKDIDLLYFKILTDGSFSDLKNLKSKENVRAFIACNIGNVRLIDNMILE

SEQ ID NO: 164250 - protein, 277 aa, Unknown
  Bacterial polypetide isolated from the Sargasso Sea
MKIIKKISEIKEIVSNFKKNKKEINLIPTMGSIHAGHLSLLSEANKYDGINIISIFVNPAQFNDLNDFNNYPNTLEADIKILSKTNCKMIFAPSKKDIYPLGIKTEKSVFKYRGILCDLFRLGHFDGVTTIVKILLDLIEPSKVFFGEKDFQQLKIIEQLIFQNNLKINLIRCPSIRDSYGMSLSSRYSTFSNDEKSKFKKCAQIIDANLLKLKKNFNHKILDNIKNELRSYGISKIDYFELRNEEDLSLSIKNERSRLFIAFYLNKVRVIDNFLLY

SEQ ID NO: 164251 - protein, 242 aa, Unknown
  Bacterial polypetide isolated from the Sargasso Sea
MLIIKDISNLQSYLTAYQNRKYSIGFVPTMGALHKGHGELIKKSKNDNHKTIVSIFVNEKQFNSKEDFNSYPRNKGLDYEFCSDNDVDLLFEPSAEEIYNKDRTILKNINFKNILCDKFRKGHFDGVITVLDKFFTIIKSNKVYFGEKDYQQLKIIEKFILKKYKSLQLVSVPTKRSEEGIAYSSRNEKLTKKQLQDFVSFHQKVENFLKSLEKTFDIEIANQKAKDFIVEQDIEELDYFEF

SEQ ID NO: 164252 - protein, 284 aa, Unknown
  Bacterial polypetide isolated from the Sargasso Sea
MTGSGVVKIVRSIAEMRDVVADWRRMDATVGLVPTMGGLHAGHLSLVHMAGERSDKVIATLFVNPAQFSADEDFDAYPRNEDDDCRMFEEAGASLLFAPPIEEVYPADHVTKVHVGGLSSLLEGEFRPQFFTGVATVVSKLLIQAMADVAVFGEKDYQQLQVIRRMARDLDIPTEIIGAPTVREHDGLAMSSRNRYLSEDERPRAAKLFSAISDIARATAEGADPAPLCDAAARQLTEAGFREVDYVTVRDANTLEQYRCSEGPGRVLAAAWLGKARLIDNVAV

SEQ ID NO: 164253 - protein, 276 aa, Unknown
  Bacterial polypetide isolated from the Sargasso Sea
MLIIKDISNLQSYLSAYQNRKYSIGYVPTMGALHKGHGELIKQSKKDNHKTIVSIFVNEKQFSSKEDFETYPRNKGFDYDFCTDNEVDILFEPSSEEIFKNDETLLSNNYFKDILCDKFRKGHFDGVITVLDKFFSIIKSNKVYFGEKDYQQLKIIEKFIEGKYKSLDLVSVPTQRHEEGIAYSSRNEKLSKKQTQDFVDFHKKVKNFIGSLEGSLDIETANQKANDFMKLQDIDKFDYFEFRNDTDLSFVGTVPQARLFYAIYKGKVRLIDNLKV

SEQ ID NO: 164254 - protein, 59 aa, Unknown
  Bacterial polypetide isolated from the Sargasso Sea
MKLIKSIKYLNKILDRYRSDGFKIHLTPTMGALHAGHLKLVKESKKLKSIVVVSIFVNP

SEQ ID NO: 164255 - protein, 134 aa, Unknown
  Bacterial polypetide isolated from the Sargasso Sea
MKIFETENDIEDNRLNAKSLSLIPTMGNLHDGHLSLIKEAKNYNDKTIVSIFINPLQFGPNEDFKNYPRTVVSDIKKLKKIDCDYAFIPQENFAKELKLIKAPSISKKLCGKDRPGHFDGVLTIINKIFSVIRP

SEQ ID NO: 164256 - protein, 213 aa, Unknown
  Bacterial polypetide isolated from the Sargasso Sea
MISTQADLDAFHSRLAQPLQFVPTMGGLHDGHGELIRRAAAHGPVLVSVFVNPLQFGPAEDFDRYPRSLESDLTLADRCGAAALWAPSVQMIYPDGACPSRHAADGLQQHLCGAGRPGHFDGVVTVVARLLHLVRPASLWLGEKDWQQLVILRRLVADLCFPVKVQGVATVREVDGLAMSSRNRYLTSAERHQAATLPAALRAADATTPLDIT

SEQ ID NO: 164257 - protein, 280 aa, Unknown
  Bacterial polypetide isolated from the Sargasso Sea
GMKIVHKKSELEGSIKEAGTEALTAFGNGAVYMEKFLQNPRHIEIQVIGDGKGTVVHLGERDCSLQRRHQKILEEAGSPALNSNVRDSIGETTCNALSSLHYRNAGTVEFLYEGGEFYFIEMNTRLQVEHPVTEMVTGIDIVREQIKLASGSDISFSQNDITFNGHAIECRINAETPIDFRPSPGKVNTYHPPGGIGVRVDSGLYSGYSVLPHYDSLISKLVVHATTRNECLMRLNRALEEYVINGIETTIPLHQEIIKNRDFVNGDYNIHWLENFVETR

SEQ ID NO: 164258 - protein, 269 aa, Unknown
  Bacterial polypetide isolated from the Sargasso Sea
MKVIKNTKIIKRILKGSRSLSFIPTMGSLHNGHISLIKKAKRDKNKIVVSIFVNPKQFENNKDYKSYPRNLSKDLNILKKQKIDFVFLPRVKDIYLYKTKNKIYLDKFSKNLCGKYRSGHFKGVIDIVNRLVEIVRPKKIYLGKKDYQQLILIKKHFSKNNFKIKIIECNTYRDAFGLAESSRNKSLNKNQLNVARNVYQILKKNKLFIKRNLKNYRLNNLKKQIISLGLKIEYIKLLNLKTLKYPKINENFNIFIAYYLGKIRLIDNI

SEQ ID NO: 164259 - protein, 269 aa, Unknown
  Bacterial polypetide isolated from the Sargasso Sea
MKIFKSFNVLNKEINFNEIIGFVPTMGSLHDGHLSLIRSAKKKSKKVLVSIFINPTQFNEKKDFDKYPRNLKKDISILKRLKVNYLFLPSKREIYQKGINKKINILQNDKILCAKYRNGHFEGVLAVVNRFMENIKAKYIFFGEKDFQQIYLIKKYLQKKFSIKIICCRSVRNFNGLPLSSRNILLTKKNLKQSEEISKLLFEFKNKIIKNFININQIKLYKSKINRLCDKIEYFEIRNSKNMTKKINKTNFKIFIAYRQKKIRLIDNI

SEQ ID NO: 164260 - protein, 260 aa, Unknown
  Bacterial polypetide isolated from the Sargasso Sea
MSENICLIPTMGAIHEGHLSLVDIGKETNLKTLVSIFLNKRQFNNEDDLKNYPIELEQDIQFLESRGVDYIFLPQESYIYPSVGVTSIVPNKVGYILEGASRPGHFEGVLTVVNRLFDLVKPSHAVFGKKDAQQLFLIKDMINRFDLNIEIIEGEIFRDINGLALSSRNKHLSKDAKLNAANIFKSLQKVATEINLGKSFEESVELGVNLFNKNEIDLDYLEIVDEENFNYPNKYSKKLKLLTAAYVENVRLIDNIDIEI

SEQ ID NO: 164261 - protein, 258 aa, Unknown
  Bacterial polypetide isolated from the Sargasso Sea
INSVFNSVKKTGFVPTMGSLHKGHEYLIKKSLKQNHVTFVSIFLNPKQFNSKRDLKNYPKKLNDDIKICKKNRVDYLFIPSFKEVYSWKTKKKRFPKINNIMENKYRRGHFDGVIKVIDKLIDIIPASRMYLGEKDFQQIKVIKDFFKINKIKTKIIKCKTIRDKNGLALSSRNKLLNNNNLKKVAELVKFIKKIKLKNYSISCKKKTIKKFLKNNKITYDYVEYINLKKFNVSKIQSFNVRLFIAFYINKIRLIDNI

SEQ ID NO: 164262 - protein, 245 aa, Unknown
  Bacterial polypetide isolated from the Sargasso Sea
IHAGHLSLLSEANTFDGINIVSIFVNPTQFNDEDDFNNYPNTFEADMEILSKTNCKIIFAPSRNQMYPEGIKSEKTVFKYRDILCDFYRLGHFDGVTTIVEILFNLIEPSKVFFGEKDFQQLKIVEQLIFQNNLKINLIKCPSMRDSNGMSFSSRYSTFSKDEKSKFEKCAKIINTNLLKFKKNFNHKILDNIKLELRSYGISKIDYFEVRNEEDLSLSIKNERSRLFVAFYLNKVRVIDNFLLY

SEQ ID NO: 164263 - protein, 270 aa, Unknown
  Bacterial polypetide isolated from the Sargasso Sea
MIIFKSINRLNKEVNFKANIGFVPTMGALHKGHISLIKSSKKMCKKTLVSIFINPSQFNKANDFKNYPKNLKKDIAILKKLKVDYLLAPKVKEIYRNKKNSKIKLKKKDKVMCALYRPGHFEGVLAVINQFLIKIKPKHIFFGEKDYQQLLLIKKFVKNKFKIKIHICPTIRGKDNIALSSRNMLLSNTDIKKSAYIANLILNFKRNMKRNILFKKNLTNIIDKINNIKKIKIEYLEIRNKINLSKNYNQHNFKIFIAYYNNTVRLIDNY

SEQ ID NO: 164264 - protein, 61 aa, Unknown
  Bacterial polypetide isolated from the Sargasso Sea
MKVVSNIAELRALLGKWVGNSSSIGFVPTMGALHTGHLSLISRSIKENDKTCVSIFVNPKT

SEQ ID NO: 164265 - protein, 223 aa, Unknown
  Bacterial polypetide isolated from the Sargasso Sea
MKIFKSIEEFIISKSGLGKLTFIPTMGNLHKGHASLIDIGKEFKNDVISTIYVNKLQFNDQNDYLRYPKSLDNDIELLERHGCNYLLIPDDTILDEIISVKAPSKFNKLCGKNRPGHFDGVLTILNKMFKIIEPEIAIFGKKDYQQFVLVKDFIKENNLNIKIIGAETIREESGLALSSRNNLLTRNEKLIAKNINKVLIDLKDNKQTIGLNFINSKNKIFRK

SEQ ID NO: 164266 - protein, 276 aa, Unknown
  Bacterial polypetide isolated from the Sargasso Sea
MKIFRKASELEPNLVSIKDKGQSIGLVLTMGNLHDGHLSLIREAQLHNEFVICSIFINPTQFNNENDFNSYPKTIDEDISKLENIGCNLLFLPEVQEIYPKGLAKKKIVNNFRNILCDKFRPGHFDGVTTVVDLFFNMIKPTNSYFGEKDFQQVKIIQDLVKINHHNIKIIQCPSVRDKMGMSLSSRNSKFSNDQLKIFNVLGNKIKEHINLLTQNEINNLDQLKIELLQNNINKIDYLEIRNENNLEITKNYSEARLFIALYIGDIRIIDNFKLY

SEQ ID NO: 164267 - protein, 232 aa, Unknown
  Bacterial polypetide isolated from the Sargasso Sea
KQFKNKIIASIYVNKLQFNDNNDYLRYPKTLDADIELLERHGCDYLLIPDDIILENIQRIQAPLKSTKLCGQNRPGHFDGVLTILNKFFKIIDPNIVIFGKKDYQQFILVRDFIKNNNLNIKIIGGHTIREPSGLALSSRNNHLCDSEKSIAAKLYEVLKDIESEKDKLSLDFINSKKDYLESFGINVDYLISCDPESFEESYEIHNKNLLIAIAAFVGKVRLIDNLKLTKL

SEQ ID NO: 164268 - protein, 231 aa, Unknown
  Bacterial polypetide isolated from the Sargasso Sea
YEVIVSIFVNPLQFGKDEDFDSYPKTLKEDKLKLISKECDYLFLPKSEELLNGIHQETSKYNNFLCGIDRPEHFNGVASIIRKFLELIKPNSIIMGEKDFQQTLVIKELIIKHNFKCKLITIPTARENSGLAMSSRNNYLTETQRMQAAKIYSTLVDTKNLIFKNGFKKKDLKNKINYLKKNNINVIYFDLFDAESLKSINESPHLKGNFVLATAAKIGNTRLIDNIVFSI

SEQ ID NO: 164269 - protein, 277 aa, Unknown
  Bacterial polypetide isolated from the Sargasso Sea
MKILENKRELDELLAKIRTNGTKIGLIPTMGSIHNGHLSLVENSMKENFFSITSIFVNPTQFNDLKDFKKYPQNKKQDIEKLNTVKCDAVFFPQIEELYPEGIKRKKTISKYRDILCDKFRPGHFDGVTTVVKSLFDIVTPDAVFFGEKDFQQLKIIKELIKKNNLPIQLIDCPSVRSKNGMSLSSRYNNFNTNQEILFNQISLKVNDCVNLLKKQIDINNLKNLNQYLEEDKKIKVDYLEVRDDDELLLTQKNKNARLFISFYIEDIRIIDNFKLY

SEQ ID NO: 164270 - protein, 267 aa, Unknown
  Bacterial polypetide isolated from the Sargasso Sea
MKIIKNIFELNKAIKNYKNIGFVPTMGGIHKGHASLIKISQKNNKKTIVSIFVNPTQFNVKKDFKKYPRNIKKDISILKKLKVSYLFLPSVEEIYKKKMKKFNLKKSDKILCAKHRKGHFEGVLNVMNRLLSIIKSKNVFMGEKDFQQCNLIKKILGKKYNIKIIFCPIIREKNKIALSTRNKLLTNSAIERASKIANKLINLKKISKTNNLINLSKFKKNLENKYNIQIDYLEFRSEKNLKLNKFKSKYRLFIAYHINGVRLIDNF

SEQ ID NO: 164271 - protein, 270 aa, Unknown
  Bacterial polypetide isolated from the Sargasso Sea
MKIITSIFDLNKEIKNYRNIGFVPTMGGIHEGHKSLIKASQSKKKMTIVSIFVNPTQFNKKDDFKKYPRNIQNDIAILKKLNVEYLFTPNAKEIYRFKAKKFNLKKKDKILCAKFRVGHFEGVLNVMNRLLTIIKSKDLYMGEKDYQQLYLIKKFLSKKFKVRVNSCPTVRINNKIALSTRNKLLKKGSFKKASEISLFLKKIKFKSKLEGSKLAFNLHNYKKELEKKYKIKIDYLEFRDEKNLKLNNFKNKYRLFVAYKIDNVRLIDNY

SEQ ID NO: 164272 - protein, 279 aa, Unknown
  Bacterial polypetide isolated from the Sargasso Sea
MKIITSVEDQKKLSKELINDNRNISLIPTMGNLHLGHESLLKSSTEDDYRVSSLFINPLQFDDINDYNNYPKTIEKDIEILKSYKIDCLFLPYKEGIISNVSNNERLSLPKFTDTLCGKYRKNHFQGVFIIVKKLFEIVQPSKAYFGKKDYQQILLIKHLVNEYFGGNIEIIQCETIRENNGLAMSSRNSHLTQDQRDLAAIVYKKICFLKEAFLDNKDLFDQHKKIVLKNLLDLGIKIEYLEILSRNTLTKPRQNDKEVNIFVAFYVGNTRLIDNIEI

SEQ ID NO: 164273 - protein, 272 aa, Unknown
  Bacterial polypetide isolated from the Sargasso Sea
MKIFKSIQEFNEARDGLGKLSFVPTMGNLHQGHSSLVDIAKQLKNKIIASIYVNKLQFNDDNDYLNYPKTLNSDIELLEKHGCDYVLIPDDSILDNIQSMQAPPKSKKLCGQSRPGHFEGVLTILNKFFRIIDPNIVIFGKKDYQQFIMVRDFIKNNNLNIKIIGGNTVRESSGLALSSRNNLLSAQEKLIAAKLYEVLNDIESKKYNLNTDFINSKKDYLESYGIKVDYLTTCDPESLEESYEINNKDLLVAIAAYVGKVRLIDNLIIRKL

SEQ ID NO: 164274 - protein, 292 aa, Unknown
  Bacterial polypetide isolated from the Sargasso Sea
IYNSSKLIKVQSPEDVLIQAAEIAMERYEGNIIGVTGSNGKTTTKNILNSCIKDSYATYQNYNNEIGLPLCALELDSQKSTAIFEMGAAKMGDIDLLSKIIKPNIGIITHIGHSHLDGLNSVQGVLKVKSELINNIKHKGSAIVPDGKYINYWKKIRNDITFYTFGEKSSASYFPTKIKMSKRGLSFFIESMHLKKRIHVKTRLIGMHNVLNILASFAAIHISQLNVEEFLDGLSSLQNPPQRLDLKTWVKQSQVIDDTYNANPDSMRAAIDVLCQFKGRKIAILWRYGRAR

SEQ ID NO: 164275 - protein, 466 aa, Unknown
  Bacterial polypetide isolated from the Sargasso Sea
MLSLGEAARLIPGATVHGDAGVTFDRVSTDSRTAGPGDLFVALKGERFDAHDFLGDVAARGAAAALVAHVPAGVAMPAIEGGETRAALGALAHGWRTRFALPLVAVTGSNGKTTVKEMIASIFAAAVGADARLATAGNLNNDVGLPLTLLRLSAAHRLAVIEIGMNHPGETEVLARLTAPTVALVNNAQREHQEFMATVEAVALEHAAVIHALPPDGVAVFPADDAYAGIWRVAATGNRILDFALHDAERQTDAQVTGRLHGGELAIDTPAGAVTVRLRALGEHNARNALAATAAALGAGVALSAIKQGLESFEPVKGRLQVKQAIAGSLAGATVVDDTYNANPDSMRAAIDVLAAQPAPRVLVIGDMGEVGDEGPAFHREVGAYARERGIDVLFALGEASRDACTAYGDTARHFDDVGALVEALLAAGYGAQATLLVKGSRYMKMERVVDALTNQPAAGTAPAAH

SEQ ID NO: 164276 - protein, 468 aa, Unknown
  Bacterial polypetide isolated from the Sargasso Sea
MFSLREAAALIPGATVLGDESVAFERVSTDSRSAGPGDLFVAIKGERFDAHDFLPEVASRNVTAVLLTHAPDNWHVPALRVADTRVALGALARGWRQKFNLPLVAVTGSNGKTTVKEMIASIFAAAVGVDARLATAGNFNNDIGLPLTLFRLHAAHQLAVVELGMNHPGETSLLAKIAEPTVAVVNNAQREHQEFMATVEAVALEHASVIHALTPEGVAVFPADDAYASIWRVAATGNRIVDFALNNAGRTTEAAVTGTFEDNVLSIDTPEGHIDVTLQVLGAHNAHNALAATSAALAAGVSLDAIKRGLESFGAVKGRLQVKRAVLGTLAGATVIDDTYNANPDSMRAAIDVLASRESPRVLVMGDMGEVGDNGPAFHREIGAYAKERGIDALYAMGDASRDACTAYGPGAHHVADIGTLVAQLQQAAFGSAATLLVKGSRFMQMERVVDAVTSPQPNAAGSAPAAH

SEQ ID NO: 164277 - protein, 85 aa, Unknown
  Bacterial polypetide isolated from the Sargasso Sea
CRWYNVTDDNPRNEDSDKIRKSILETCPSAIEIPNRKEAIITAINQGEKGDSILIAGKGHEKFQIISDKKIPFSDQEIIREVIGD

SEQ ID NO: 164278 - protein, 182 aa, Unknown
  Bacterial polypetide isolated from the Sargasso Sea
MIYGYGISGKSIEKYLNNRNCDYHIYDDYKKIKKKKFINKDYLLKNIKKYNFFIVSPSIKIEKGHFLYKYKKKILIDLDFLSLELSKQKVIGVTGTEGKSTTCIYLKDILSKKYNTQIVGNFGNTILENKNLKNLLSKIDILIIELSSYQLDKVKFLKLNYALITNIFSDHLDYHNNLKTIY

SEQ ID NO: 164279 - protein, 69 aa, Unknown
  Bacterial polypetide isolated from the Sargasso Sea
MGIKKREKITIEIDRFKAINESIKFANKKDIVLIAGKGHEDYQILNDKVINFDDRKIAYKLLKEKNKSQ

SEQ ID NO: 164280 - protein, 52 aa, Unknown
  Bacterial polypetide isolated from the Sargasso Sea
HQGRLDGLEFKFGIFTNFSQDHLDYHKSMKNYFKAKMLLVFKNKKKKRFYNL

SEQ ID NO: 164281 - protein, 268 aa, Unknown
  Bacterial polypetide isolated from the Sargasso Sea
KDYLNSKLFLFRNLLKKKSNIITDSTIPQYKIIKKISEKKRYKIFTIGQKNSYIKLIKHSYLDDRQLLQIERKSRIYNIVLNLIGKIQIKNILMTIILAEKSNIKFEKIIKCLKKIKSVEGRFEKIGHLKNNSKVILDFAHTPDALNNCLHNLKEQFMDHKISIVFGCGGNRDKSKRSKMGKIANKYCHKIYLTDDNPRFENPKKIRSMVKKFISKSKLLEFSNREVAISNAISNLKTGDILLVAGKGHEQNQDYGSFIKKISDKKII

SEQ ID NO: 164282 - protein, 205 aa, Unknown
  Bacterial polypetide isolated from the Sargasso Sea
MKSAITVLLIIAATLILGGCVVLNLARFGAAPDAQQQKAYSGSANYNAGKQAFHNQVTTPVLKEGVSTWSVMWGNLTSSADNLAPQGAIPVNKVDFKSLPREENLIVRLGHSGFYLQLNGQRILVDPVFSDYASPFSFMVKAFKGTTIFTVDDLPEIDVLLISHDHYDHLDYHTRRSAQKQGKKRCLFRWVSAPIFLTGTTHQSS

SEQ ID NO: 164283 - protein, 250 aa, Unknown
  Bacterial polypetide isolated from the Sargasso Sea
MINLKKKFLIYGYGISGKSIETYFINNNCNYNIYDDVKIINNSKFVNRGYLSNHLDRYDYFVVSPSIKIDKNHFLFRYKEKIIIDLDFLSIELTNQKIIGVTGTEGKSSTCNYLNEILSKKYNTKIIGNFGNTILNNKNLTKYLSKIDFLIIELSSYQLDKLKFLKLNYAIITNIFCDHLDYHDNIKNYIKSKFRIQYLLYNNSNLHLSKKLYSNYSKSIKINKKRIILNNYNISITNDLTKHFKVLNLH

SEQ ID NO: 164284 - protein, 314 aa, Unknown
  Bacterial polypetide isolated from the Sargasso Sea
SVCLEVSSHALDQNRLDGIQWLNSASILNIGEDHLDYHKDISSYRDSKFRIFKMNSPIKLVIDESNNFAKDYDFLNETKLTSISSKNNFSDIFYKITKANFKNCEFKIFLNNPPSGQEIHKNKKYKFKCTLFPEFNITNLVFAISSIGFDKFSDKHVNDLSFIKLPKGRTEVINNISKNIIIDYAHNSHSFEVLLCSIKKYFDNLILVFGFGGDRDKSKRAKMLQIALDNSSKIFLTSDNSRSEKFENIIKDAMKGNNEGDITIIEDRKEAIINANKFLDKNSCLLILGKRHEQTQEIDGKIYHFSDHEVVDEI

SEQ ID NO: 164285 - protein, 231 aa, Unknown
  Bacterial polypetide isolated from the Sargasso Sea
MVVAGKGHENYQEYKKRRFFSDKKYILKYINLKNKKIYNDWKLNVISEKINIKNFNKNLKINSASINSKEINKNDIFVGIKGKKKDGNKFANDAIKNGASIALVQRNYLKRNKRKIKINNTYNFLKETSKLIRKVSPIISIAVTGSSGKTSVKDLLGKTLNKLSATSYSKKSFNNKYGVPLSLYNIKKNDKFGVFEVGMDKKGEINNLTKLILPKRRFNHKIFHMLTLKIL

SEQ ID NO: 164286 - protein, 252 aa, Unknown
  Bacterial polypetide isolated from the Sargasso Sea
EKFVYVDSEWGNKLKHESKLPSFSIGYKSNNNLYIEKINVDKESFDLEFYLDGKKYEISVPLSGPLAHMNYLLALSMAYFSEQYKLSELLEASADIKNPLGRYEIISIDTNDIIIDYAHTPESIKQSIAYVKGKYKNTTVIFGAGGNRDKDKRPLMGDAVNEADKIIITNDNPRDENEEDIAKDILEGVNLNKDVEVVLNRKEAIRKGIENLKNDSVLLILGKGHEKIQEFENNTIKFSDQQVVKEMIKEIQ

SEQ ID NO: 164287 - protein, 268 aa, Unknown
  Bacterial polypetide isolated from the Sargasso Sea
IFLTDDNPRYENPKKIRSQIKKKISRSKLVEIASREKAIKVAIESLNSGDILLVAGKGHEIYQEYKGKKKIFSDKKCILKQINSKNKKLFQNWKANILHEQCNLNSVSKDLKINKASINSKNIKKNDIFFAIKGPKNDGNNYADEAIKKGASLAIVNKLGKLNKVKKIKINNTIRVLTNASKDVRKVSNAKFISITGSSGKTSLKDLLAFCLNKLAPTTKSNNSFNNKYGVPLSLFNVNKNDKFAVLEAGMDKAGEIDYLTGIIKPDF

SEQ ID NO: 164288 - protein, 102 aa, Unknown
  Bacterial polypetide isolated from the Sargasso Sea
ENEKKWGRIAKLYANIIYITDDNPRFEDSSKIRQSILKYCKNDAIEIPERKKAIIRAINDLKKNEILIIAGKGHENFQIINDISYPLDDYKIARKALRKYSK

SEQ ID NO: 164289 - protein, 244 aa, Unknown
  Bacterial polypetide isolated from the Sargasso Sea
NLKNYLKAKLYLFENLIHKRGNVIVDQLIPEFKIIKKITINKKLKLHTLDDNKNNLELLSHNFKGEGQFLRIKLNSSIRDLNLNLIGKIQLKNVLMAIIAAKYSGLSLDKILNTIPKLKPVEGRFEKIGKIKNQSKVILDYAHTPDALKTCLLNLKEQFPNKKITVLFGCGGNRDQNKRSKMGKIASDFADSIILTNDNPRFENPQKIRGDIKKGIKKKRITEISNRAIAITQAIRNLNSGDIL

SEQ ID NO: 164290 - protein, 242 aa, Unknown
  Bacterial polypetide isolated from the Sargasso Sea
INPKNIVGGNRGLMGKTSVSDFFHQIFTHENIKSGFIGTLGLKKNKVLKKRNLTTLDSLSLNRDLDQLKKSKINNVIIEASSHGLKQKRLNFLKIKAGIFTNLSHDHLDYHKNMKDYFQSKLILFKNILEQNSTVITDTDIKQYKHIKKLQIRKKLKILTIGSKSNILQVLNHKIFENFQLLEIMYKKKIFKLKVNLYGSIQIKNLLMAILAAKVCGLKISKIFKNIEKIKSVKGRLELIKI

SEQ ID NO: 164291 - protein, 256 aa, Unknown
  Bacterial polypetide isolated from the Sargasso Sea
NPKKNIVCIDSSFGKKLHSKLLKDNKETYSISIKENADFHASFEKSPIGLKVNLKAFGKHLTFELKTFSRYLASNIICSMAVLILEGVKLSEISKITKDIVLPQGRLERIIKNQQVIYIDYAHSPEALECTLKELNNIHNEPIWCLFGCGGNRDKDKRPLMGKIAQKYSNHVVLTNDNPRDEDEMDIINDILSGIKEMEQISINLDRKDAIESSILEMERNHINGVLLIAGKGHEHYQEVNDNLYELNDKNIVNSL

SEQ ID NO: 164292 - protein, 279 aa, Unknown
  Bacterial polypetide isolated from the Sargasso Sea
KIANKLCNYIYLTDDNPRNENPKNIRASIKKSILQSKMIEIPSRKLAIKKAILNSKSDEVLIIAGKGHENTQEYTRKNKFSDKDNIRKSIILKNRFLLNDWKLNILKEIINNKKLDRIKNLKISTNSKEKNKGKIFLGIKGKSLNGNDFADEALKNGAKLAILQNNKNDSKKKINVKSTLELLIKFSQKIRISSNASQVAITGSSGKTSLKELLGQCLQKNYSTTFSKNSFNNKFGLPISLINLNKDTTYGIFEIGMDKKGEIDYLSKIIKPDIGVITN

SEQ ID NO: 164293 - protein, 88 aa, Unknown
  Bacterial polypetide isolated from the Sargasso Sea
IANNYAAKVYITDDNPRYENPLLIRKKILKYCPNAYEIPDRKKAIIKAVQDIKKNEILIVAGKGHEKIQIIKNKELKFDDFQIVKKII

SEQ ID NO: 164294 - protein, 246 aa, Unknown
  Bacterial polypetide isolated from the Sargasso Sea
YALITNIFSDHLDYHRNIKNYISSKFRIQDFLYNNSPLFLSNYLFLKHRSHVKINKNRLILNDKKIIHKKELPNHIRELNLYSIKNLIYFIDSRIKIKNINVSDDLSHRIQLIYNKNSLKIYNDSKCTNLNNAVYKNNLINSSKKILILGGILKKQDKNLKFNIKNTLVLTFGNQKDLFINQLNLIDSNYFKFNRLIELINFLKLIVKLRKYEYILFSPGGESFDSFKNYIDRGNYFNRLINKAIT

SEQ ID NO: 164295 - protein, 150 aa, Unknown
  Bacterial polypetide isolated from the Sargasso Sea
INNVIIESSSHGLNQKRLHHINFKGAIFTNFSQDHLDYHKTMSSYLNAKLVLFREILGKKSTIISDKNIMPFTFLKKISKKKNLRLLDISKEYEKIKNTFFKPTSDFKIKNLAMAIKASKLCGLRDKLIYKAIKKVQDVNGRLELVKKYR

SEQ ID NO: 164296 - protein, 279 aa, Unknown
  Bacterial polypetide isolated from the Sargasso Sea
IVEKHCDKIYITDDNPRRENPKNIRKDIIAGLKKNNFFEIGNRKLAIKTALQNSTHDEIIIIAGKGHENTQDYGKKIYKISDKKIINSVKISFKGNTKRKTDENFAKKVFQISTKKKLPFKFDGISIDSKNIKKNNIFVAIKGKKRDGHNYIKDAIKKGASFCVVTKKQNDNRCFALKNSNQFLKKFAKNNRMSSKAKIIGVTGSTGKTSLKDLLGETLNLYKSTYSSPRSYNNQYGVPLSLSNLKFSHKFGIFEIGMSNMGEINNLAKLVAPDLGIIT

SEQ ID NO: 164297 - protein, 26 aa, Unknown
  Bacterial polypetide isolated from the Sargasso Sea
MEQLKIIRIVILDYAHTPDALKFCLL

SEQ ID NO: 164298 - protein, 205 aa, Unknown
  Bacterial polypetide isolated from the Sargasso Sea
MKHHGAQVGIPVKLFADYNLLNIFLGLPFFMSCSESIHLFFEKIPKLKLPTGRLQLFEKNNKKVFIDFAHTPEAIEKTLASIKKMKPKRIILVFGAGGERDQGKRVQMGEVAEKYADQSIITSDNPRNENPNKISEMITKTMSRNYNYEVENDRKEAIVKAFDCLKDHEILLIAGKGHENYQIIEGSKQKYSDIEEVKRCLKLLD

SEQ ID NO: 164299 - protein, 117 aa, Unknown
  Bacterial polypetide isolated from the Sargasso Sea
LESHFKKRVNIVFGCGGNRDKGKREKMAKIANKFCKKIIVTDDNPRDENPKNITKQIYKFIDKGLIINNRKLAIKKAIQEIGQNEVLLVAGKGHENYQIIKGRKFHFSDYEEIIKNL

SEQ ID NO: 164300 - protein, 169 aa, Unknown
  Bacterial polypetide isolated from the Sargasso Sea
NLNLIGKIQLKNVLMAIIAAKYSGIGLDKILNTIPKLKPVEGRFEKIGKIKNQSKVILDYAHTPDALKTCLLNLREQFPNKVITVLFGCGGNRDQNKRSKMGKIASDFADSIILTNDNPRFENPQKIRRDIKKGINKKRITEIANRAIAIKQAIHNLNSGDILLVAGKG

SEQ ID NO: 164301 - protein, 89 aa, Unknown
  Bacterial polypetide isolated from the Sargasso Sea
LRYANKIYITDDNPRYENPSIIRKSIKKYCSKGVEISNRQKAIYKAISNLDVNDILIIAGKGHEKYQLIKNKKIKFDDYEIVKNFIKYL

SEQ ID NO: 164302 - protein, 27 aa, Unknown
  Bacterial polypetide isolated from the Sargasso Sea
MTNLTRDHLDYHGSMEEYAKAKRLLLE

SEQ ID NO: 164303 - protein, 241 aa, Unknown
  Bacterial polypetide isolated from the Sargasso Sea
NVLTDPHFTERASPFTFAGPKRYMPPGMKIDDLPKIDVVTISHSHYDHLDYHSVKLLSEKFDDVLFIVPLGLKEWFEGKGIYNVRELDWWDSIKVKQTIITFAPVQHWSARGLFDRNESLWGAWHFKNASHSFIHLGDTGYTEDFKEIRRKLGPVDLAAIPIGAYEPRWIMEFSHINPEEAVMTYFDLEATKAIGMSWGTFILTDEPVTEPPKKLDEALKRYDLTNKDFFVLSHGETYLIN

SEQ ID NO: 164304 - protein, 244 aa, Unknown
  Bacterial polypetide isolated from the Sargasso Sea
HGIDYINEAIVNGASCVLHNKKDYYEQHKIPCFFIEDLFERQKEICLNFYNICEENLKFLVFTGTNGKTSTAFFSYQILLKKNKDAVLAGTLGLESRTRFKETGNTTPNLFELFEFISKEKYENELFICIEASSHGLEQNRLMGIDAETRAILNIEQDHLDFHKNIQNYIDSKLKILDFPSHNKIILNGDCETSASLIDNELAEHDKCIVSSTNKKADYFFSIDKTNKNGCDFKLIYSKKCLEL

SEQ ID NO: 164305 - protein, 52 aa, Unknown
  Bacterial polypetide isolated from the Sargasso Sea
MKRSKAMEEAKKNSEEGDIVLIAGKGHEDYQILKNKVIKFNDFKIAKKIFNK

SEQ ID NO: 164306 - protein, 211 aa, Unknown
  Bacterial polypetide isolated from the Sargasso Sea
MKIKRKKKIYKIELKLIGKIQVKNILMAMLAAEKNNISFDKIVRVISKIKNVNGRLEKIGILKNNSKVILDYAHTPEALFCSLQNLKEQFKNKKIAIVFGCGGNRDKAKRPKMGKIANYFCSKIYLTDDNPRHENPKKIRSEIKKKIKKNKLYEFSNRENAISSAIKNLNSGEILLVAGRGHETNQDYGSYSKKFSDKKIIEKNIINKNKS

SEQ ID NO: 164307 - protein, 235 aa, Unknown
  Bacterial polypetide isolated from the Sargasso Sea
MIEIPSRKLAIKKAILNSKSDEVLIIAGKGHENTQEYIKKNKFSDKDYIKKSIILKNRILSNDWKLNILKEIINNKKLDRIKNLKISTNSKEQNKGKIFVGIKGKSFNGNDFADEALKNGAKLAILQNNKNDSKKKINVKNTLRLLIKFSQKIRISSNASQVAITGSSGKTSLKELLGQCLQNNYSTTFSKNSFNNKFGLPISLINLNKDTTYGIFEIGMDKKGEIDYLSKIIKP

SEQ ID NO: 164308 - protein, 197 aa, Unknown
  Bacterial polypetide isolated from the Sargasso Sea
KHDINLNVTGPKFNLNFLLALSMAHFSEKLNIQNYDENFQNIQNPKGRFEMINYKSNKIVVDYAHTPDAIKTTVDFVTQYFSNVIVIFGAGGDRDTEKRLLMGNATKNADKIIITNDNPRHEDPEKIANDILGGCDKEKTVVMLDRKEAISYGINQLKDNSVLLVLGKGHEMHQEINNKKINFNDFDYISDLLGGIS

SEQ ID NO: 164309 - protein, 277 aa, Unknown
  Bacterial polypetide isolated from the Sargasso Sea
NIKILNSKYKQNNQIVKISINSKVFNLEVPLIGYFQLKNLFMAILAASVCGLNQTKILNQIHKIKPVPGRLECVANLNNNSNIIVDFAHTPDALKQSLITLKKQFKKEIIIVFGCGGERDKKKRLTMGKIANKYCRKVFVTDDNPRNENPQKIRNTIINGCKKIAIDIANREKAIKTAIHELRSDEILLVTGKGHEEIQDYGNKIKNFSDKKIIKKIINKSKFLPEKSSYQNFLLKKIFDKNFINNTNYDGVSINTRTIKKNDLFFAIKGKNNDGHK

SEQ ID NO: 164310 - protein, 242 aa, Unknown
  Bacterial polypetide isolated from the Sargasso Sea
MGRIANAYCNKIYLTDDNPRRENPKKIRNQIKVKINKKKLIEIPSRKLAIKTAIKNIKSEEIVVVAGKGHETYQEYKKKKYFSDKDCIIKSIKEKNKSLNKNWKTNILEENLDNRLNHKIIINEACINSKEIKKNNIFFGIRGKKIDGNKFANEAIKKGASISIIDKNYGKKIKNKIKVNNTLKFFTKCATKVRASSDIIAIGITGSAGKTSLKELLGQSLSKIHNTTYSKKSFNNKYGVPV

SEQ ID NO: 164311 - protein, 199 aa, Unknown
  Bacterial polypetide isolated from the Sargasso Sea
RGSSVKTGYSGTLGWGTLGKLQPANLTTPNAVDIQKRLFHLLKEGCSRTAIEVSSHSLDQGRVSDVHFDIGVFSNLTRDHLDYHKSMKAYAECKAKLFKDFDLKKAVVCVDDPFGESIADYLGNRVLTYGLKGDVSWVARPSPYGYTVSWNTPWGDFENEFPFFCDFSISNLGAVIGVILSAGGSVKHLARELNYLKQI

SEQ ID NO: 164312 - protein, 159 aa, Unknown
  Bacterial polypetide isolated from the Sargasso Sea
NIHLPNGRFEVLDFKTKHKKVIIDFAHTPEAMEKLLSQLSENYKETIYLVFGCGGDRDKGKRPKMGAIAEKYATKIFLTSDNSRSESADQIIDMIAAGIKDKSKIQININREKAIKLAINSMSRNNVLVIAGRGHENFQIEQGNRLKFSDREIVKKCLV

SEQ ID NO: 164313 - protein, 289 aa, Unknown
  Bacterial polypetide isolated from the Sargasso Sea
QYFKNYQSINIIFNNQKFFFKTSLIGKVQIKNLLMAVIAATKVLSIRKIINSLESVKSVNGRFEEIGKIRNLSRVILDYSHTPDALRTCINDIKDQFNLSNISIVFGCGGERDKSKRQIMGKIANEMCQRIYLTDDNPRKENPIAIRNQIKKKINKNKLFEIPSRDLAIRTAITELKSGDILIVSGKGHENYQEYKDKKKFSDKHLIKKYIKQKNQSLSKYWKNNILNESLKIFRTFNFREIKGISTNSKKIGKNSIFIGLKGKKFDGSKFVNQAVKNNAIISIVDSKT

SEQ ID NO: 164314 - protein, 59 aa, Unknown
  Bacterial polypetide isolated from the Sargasso Sea
ITTLDPLNLHQSLQLIKNKKINNVILEASSHGLKQSRIDHLKFTCSIFTNLSRDHLDYH

SEQ ID NO: 164315 - protein, 161 aa, Unknown
  Bacterial polypetide isolated from the Sargasso Sea
GILSKNFNVKTINTTLDPINLHKILNKLKEQKVDNVILEASSHGLKQHRLNCIKFNTALFTNLSRDHLDYHKTFKDYLNSKLILFDKLLRRKGNIIFDNRIIEAKKLEKISKKRKLKKYTFGTNKSFMNVIHIQKFKKKKKIDFSLNNKIYSFESELIGEV

SEQ ID NO: 164316 - protein, 230 aa, Unknown
  Bacterial polypetide isolated from the Sargasso Sea
KQGRLDGINFKAGIFTNFSQDHMDYHKSMKNYLNAKLILPRKLLKKGDYIITDRNISEFKKIDKIAKKNKLKKIYIDYMKKEYDLKEFKPIGNFQKKNLMMAIKACEIIGLSKKKISKCISKLKSVKGRLELVKEFPDQTKIFIDFAHTPDAINSAISSLKTHYKKDVTIVFGCGGERDKSKRKKIGKIVNGLCNKIFVTDDNPRGEKPELIRKAIIKHIKKEKVVEEGN

SEQ ID NO: 164317 - protein, 52 aa, Unknown
  Bacterial polypetide isolated from the Sargasso Sea
ESIKFAKKKDIVLIAGKGHEDYQILNDKVINFDDRKIAYKLLVEKNNLNKIS

SEQ ID NO: 164318 - protein, 91 aa, Unknown
  Bacterial polypetide isolated from the Sargasso Sea
KSNGVSLKLNNTTVDAITINKILTDLKNKKIENVILEASSHGLHQKRLHGIKFSTSIFTNLSRDHLDYHKNYKNYFNSKLILFNELTKKNG

SEQ ID NO: 164319 - protein, 132 aa, Unknown
  Bacterial polypetide isolated from the Sargasso Sea
EKTLKSIKIEYPNNKIITVFGCGGDRDIKKRAKMGEVSVRYSDKVYLTNDNPRTEDPKKIINDIVDGTKNSKKIKIILNREEAIKKAIVTADKKDVILIAGKGHENYQEINGVREAYSDHKVVSKILKNETL

SEQ ID NO: 164320 - protein, 214 aa, Unknown
  Bacterial polypetide isolated from the Sargasso Sea
MLVAGKGHEKTQDFGIRKIFLSDRKIILNAIKIKNLTLSKNLKINIIKELSGKKKISSRIIIKKARISSKEIKKEDIFFAIKGKKNDGNKFIDEAFKNKASLAIVNKINKNNNAKRQIKVQNTLKFLTKNSIIFRQNINTKIVAITGSCGKTTLKELLGNALKKISRTSISPKSYNNKYGVPLSLFNLNQNDDYGVLEVGMDKKGEIDYLSKIV

SEQ ID NO: 164321 - protein, 70 aa, Unknown
  Bacterial polypetide isolated from the Sargasso Sea
FDTSIFTNLSRDHLDYHKTYKEYLNSKLILFNKLTKKGGNIIYENDISQSKILKKICIKKNLKSLTIGKK

SEQ ID NO: 164322 - protein, 280 aa, Unknown
  Bacterial polypetide isolated from the Sargasso Sea
GGNRDQNKRSKMGKIASDFSDKIYLTDDNPRFENPDKIRRDIKKGIKRKKIIEISNRAKAIFEATKNLNTGEILLVAGKGHEKIQDIGKRKIYFSDKKIILKAIKIKNLSLSDNLKLNIIKEISGNKRVSSSLSIKQAKINSNEVKKDDIFFAIKGEKNDGNKFVKQSFKNRASLAIVNRFQNSLNKSKQIKVKDSLKFLTDISKIFRKNIDAKIIAITGSCGKTTLKELLGNTLKKISKVSISPKSYNNKYGVPLSLFNLTNKDNFGVLEVGMDKKGGN

SEQ ID NO: 164323 - protein, 158 aa, Unknown
  Bacterial polypetide isolated from the Sargasso Sea
KFHHIPGRLEQFELINNNHAIIDFAHSPDSFTNILSTIKEVTNKKIITIFGCGGDRDRTKRPIMAAIAEKFSYHVYITNDNPRTENEDLIIDQTIKGFKSNQFTVMKNRKGAIEYVLNNAKNTIVIILGKGRDDYQIINNEKMHHSDFESIEKYLNEN

SEQ ID NO: 164324 - protein, 444 aa, Unknown
  Bacterial polypetide isolated from the Sargasso Sea
MNKRAKIGKIVNKLCNKIFVTDDNPRRENPKLIRKAIIKYIKKEKLIEIGDRRKAIHSAIKQASANEIILIAGKGHENIQDYGKKKFKISDFKIVKDFKIKKIQSKRKANIHQNNFFINKIIKKKLNKKFLGVSINSKSIKKENLFVAIKGKNNDGHNYVKEAILKGASGCVVSKNFNKIKKNKIIKVSSTYNFLKKLAIVKRNYFNGKIIAVTGSSGKTTVKDLLGNLLKNYGDTYYSPSSFNNFYGVPLSLCNLEKEHKFGVFEIGMSKSGEINDLSKIVKPDLAIITNIAEAHIENFKNLKHIAKAKGEIIDHISSSGYLIVDRDNKFYNYFKSRANKKKIKVISVGYNAKSDIRVLKEKRFFEYKLITIRSFQKEYKFKIKDQLTKNIIFALAAIEILNLDVNKVKNKIKNINILEGRGKVYKIKYNNLNFNLIDESYNA

SEQ ID NO: 164325 - protein, 319 aa, Unknown
  Bacterial polypetide isolated from the Sargasso Sea
MKFLGKPKNKTYENIILEASSHALDQERFKGIKFNTSGFTNLSRDHFDYHNNINKYFEAKLKLFSKNLSDKFVYIDSEWGNRVKENSVIPSFKIGNNNDSNLRILEEKLFPNINLKIQINEDKHDINLNVTGPNFNLNFLLALSMAYFSEKSDIQNYEENFQNIQNPKGRFEIINFKSNKIVVDYAHTPDAIKTTVDFVTQYFSSVIVVFGAGGDRDIEKRLLMGNATKNADQIIITNDNPRNEDPEKIAKDILEGCDKEKTIVILDRKEAITYGINQLKENSVLLVLGKGHEMHQEIKNKKINFNDFDYISDLIGDIN

SEQ ID NO: 164326 - protein, 298 aa, Unknown
  Bacterial polypetide isolated from the Sargasso Sea
SHALDQKRMTKINWFYSLSIMNIRSDHLDYHLNIDAYIDSKFEIFRLNSSIKLIDEELLDHSKSYDFNNNYSLTSISNTNNFSDIFFNIEKLSLNKCIFSIQINNPPLCQKHEKHKKYKFFCKIFPEYNISNLVFAICSIGFDEFSENEINDLSYLKLPKGRLELIKNIPANVIIDYAHNEHSFHTVLSSLKEYFENLIVVYGCGGNRDKSKRSKMLSIATENCAQVIFTSDNSRTESFNNILADSKKGNDLDKVISIEDRKKAIIHGTELIKEKDCLLILGKGHEVTQDIGGEIKHF

SEQ ID NO: 164327 - protein, 150 aa, Unknown
  Bacterial polypetide isolated from the Sargasso Sea
FLYSGATAIVDYAHTPDAYTKVLSTIKELMIDSEANIYVVFGCGGNRDKSKRSIMGAIVEQFATHSFITPDNPRNEKISVINQEIINGFKKNNFDVFLDREKGLKTALNKAVKNDIVIALGKGREDYQEMNNELIPYSDINIINEYSHEN

SEQ ID NO: 164328 - protein, 432 aa, Unknown
  Bacterial polypetide isolated from the Sargasso Sea
MKVLRDLGLNINEDIFISGLTSSSGLIEKDQCFIALQGLRSHGLDYIDEAIANGASCVLHDKENYNEQHKIPCFFIEDLFKRQKEICLNFYNIREKNLKFLIFTGTNGKTSTAFFSYQILLKTNKDALLAGTLGIESKTRFKETSNTTPNLFELFEFISGEKYEDDLFVCIEASSHGLEQNRLIGIDAETRAILNIEQDHLDFHKNIQNYIDSKLKILNFSSHNKIILNGDCETSASLIGKELAEYEKCIVSSSNKKADYFFSIDKTNKNGCNFRLISNDRCIDLKVRFFQKHNIYNLVFAIACLDQIEKNIFFDKELIKSIDLPSGRAKIISKNNKNILIDYAHNFGGIRAIVNSVSNIYHDLIIVYGCGGERDSSERGKIMKFTCANSRKVIFTSDNCRNESFQSILDDSRKDQEYSNLIVEPDRKQAIK

SEQ ID NO: 164329 - protein, 329 aa, Unknown
  Bacterial polypetide isolated from the Sargasso Sea
MFSKNHSNEYFDKSKEHHTPHGFTNPFLSDGPQNKNFYDLIKMMREKRPDKPKKIKVEEISSSEIEDLIKKGENFYLWIGHSTAFLHINGKNILTDPIFSDRCSPSQLFGPKRYSEPSISINSLPKIDLIVISHNHYDHLDYHTVKLIGDSTFWFVPLGLKKWFNDNDVKNVIEMDWFESYDYGGIKVDCLPSQHWSKRTAFKSFDTLWASWSIEVEDFKFWFAGDTGYNDVQFKSIGRDYGPFDFAAIPIGAYEPRWFMKDFHINPDEAVQIHLDVLSKKSVGIHYGTFILTTEPIDDPIKKLDIARQKYGLDINDFSDSKLGKIIKL

SEQ ID NO: 164330 - protein, 414 aa, Unknown
  Bacterial polypetide isolated from the Sargasso Sea
MIKLNKKFLIYGYGVSGKSVEKYLINNNCNFNIYDDFKKIINKRVISKKYLENKINQYSYFVVSPSIKIEKNHFLYKHKNKILIDLDFLSLEISSQKILGVTGTEGKSSTCSYINQILSKKYKTKIIGNFGNTILDKTNLNKYLSKIDILIIELSSYQLDKLKFLKLHYALITNIFSDHLDYHTNIKNYISSKFRIQNFLYKNSPLFLSNYLFLKHRSHVKINKNRLILNDEKLIPKKELPNHIRELNLYSIKNLIYFIDSRIKIKNINVYDDLSHRIQLIYNKNSLKIYNDSKCTNLNNAVYKNNLINSSKKILILGGILKKQDKNLKFNIKNTLVLTFGNQRDLFINQLNLIDSNYFKFNRLIELIKFLKLIVKLRKFEYILFSPGGESFDSFKNYIDRGNYFNRLIKKAIS

SEQ ID NO: 164331 - protein, 427 aa, Unknown
  Bacterial polypetide isolated from the Sargasso Sea
MKVLRDLDININEDIFISGLASSSRLIEKDQCFIALQGLRSHGLDYIDEAIANGASCVLHNKKNYYEKHKIPCFFVEDLFERQKEICINFYNIIEENLKFLIFTGTNGKTSTAFFSYQILLKKNKDAVLAGTLGLESKTRFKETRNTTPNLFELFDFISKEKYEDDLFICIEASSHGLEQNRLIGINAETRAILNIEQDHLDFHKNIQNYIDSKLKILDFSSQNKIILNGDCETSASLIDKELAEYDKCIVSSSNKKADYFFLIDKTNKNGCNFKLISSDRSIQLKVRFFQKHNIYNLVFAIACLDQIEKNIFFDKELIKSIDLPSGRAKIISKNNKNILIDYAHNFGGIRAIVNSVSNIYHDLIIVYGCGGERDTSEREKIMKFTCTNSRKVIFTSDNCRNESFQSILDDSRKDQEYSNLIVDPDR

SEQ ID NO: 164332 - protein, 487 aa, Unknown
  Bacterial polypetide isolated from the Sargasso Sea
MSEYEEILGIKIPKNTKIKAVTNSSKKVTKDSIFFGFKGTKVHGSKYAKDAIKNGASLVIHDDPLFVKNNEKIIYSKDLKKNIIKFLDSFYSIDINSNNFFAFTGTNGKSSTAYICHQLLRNMDYESLYVGTLGIKHNDEKIQTKFSNKTTPDIFELYEILGSLNFGLDSISICLEVSSHALDQNRLDGIQWLNSASILNIGEDHLDYHKDISSYRDSKFSIFKMNSPIKLVIDESNNFVKDYDFLNETKLTSISSKNNFSDIYYKITKANFKNCEFKIFLNNPPSGQEIHKNKKYKFKCTLFPEFNITNLVFAISSIGFDKFSDKHVNDLSFIKLPKGRTEVINNISKNIIIDYAHNSHSFEVLLCSIKKYFDNLILVFGFGGDRDKSKRAKMLQIALDNSSKIFLTSDNSRSEKFENIIKDAMKGNNEGDITIIEDRKEAIINANKFLDKNSCLLILGKGHEQTQEIDGKIYHFSDHEVVDEIYN

SEQ ID NO: 164333 - protein, 316 aa, Unknown
  Bacterial polypetide isolated from the Sargasso Sea
EVSSHALEQNRLKYIEEFVATSILNIEKDHLDYHKTEKAYQDAKFKMFNLSSESIKIIDEDLKGSMESYKSIVDINDVTFISNKNRFSDIYYEITESSIEKTTFLLTLKVNDEKTTKKKIKRFKFTCTLFPDFNIHNLVFALSSIGSIEEYFDENIVNDLSFLDLPKGRSELIPNISSNVIIDYAHNPRAFSFFLSSLEKYFENLVVVFGCGGNRDKSKRSEMLKIAIKHASKVIFTSDNSRDEGFDDIYQDAIENNTLEKVIPIRDREKAILHGSTLIGENDCLTILGKGHEEIQEENGKILFFSDHEVVNEIYK

SEQ ID NO: 164334 - protein, 65 aa, Unknown
  Bacterial polypetide isolated from the Sargasso Sea
MKNRELAVSIPDREQAIRHCLEHAHESDIIIVAGKGHEDYQIIGDKKTNYNERAVVARLQQEYSK

SEQ ID NO: 164335 - protein, 47 aa, Unknown
  Bacterial polypetide isolated from the Sargasso Sea
DRDKGKRPLMGQAAEVGADAIVITTDNSRSESPESIAEDIICGFEKP

SEQ ID NO: 164336 - protein, 455 aa, Unknown
  Bacterial polypetide isolated from the Sargasso Sea
MTSSSGLIEKDQCFIALQGIRSHGLDYIDEAIANGASCVLHNKENYNEQHKIPCFFIEDLFERQKEICLNFYNIREKNLKFLIFTGTNGKTSTAFFSYQLLLKTNKDAVLAGTLGLESKTRFKETRNTTPNLFELFEFISGEKYENDLFVCIEASSHGLKQSRLIGIDAETRAILNIEQDHLDFHKNIQNYIDSKLKILNFSSHNKIILNGDCETSASLIGKELAEYEKCIVSSSNKKADYFFSIDKTNKNGCNFRLISNDRCIDLKVRFFQKHNIYNLVFAIACLDQIEKNIFFDKELIKSIDLPSGRAKIISKNNKNILIDYAHNFGGIRAIVNSVSNIYHDLIIVYGCGGERDSSERGKIMKFTCANSRKVIFTSDNCRNESFQSILDDSRKDQEYSNLIVEPDRKQAIKNGIDALKEDDILLILGKGHEEFQEIKGTKIPFNDQRVVEEIL

SEQ ID NO: 164337 - protein, 482 aa, Unknown
  Bacterial polypetide isolated from the Sargasso Sea
MSKLEKILKVSFPNGTKIINATNSSKKIKENTLFFALQGQKMHGSVFIEDAINMGVSAVVHNNSKFRSDSPLVFFIQDLDSKIIDILTCLNKIDINNNNFFAFTGTNGKTSSAYFCHQILRFGGYDSLYIGTLGIQYNESKLEKKFSDKTTPDIFELFEIIKSFSFKNPVNICIEISSHALDQKRLQGIKFLNSAAVLNIKSDHIDYHKSIEKYRDAKFEIFRMNSALKLINENLKEFIDSYDHIVNNQYKLLCVSERNEFSDIFYKIEKISIDETIFEIHINSSGHFYGFSNKKKYKFICKIFPSFNIENLVFAICSIGFDLFKESELNDLSFLEMPKGRAEFIKNIPTNIIIDYAHNHEAIEIFLHSIKDYYKNLIVILGCGGDRDKSKRDKMLRSAIKNSSKVIFTSDNSRSENFNDIFSHASENNDVKNVHKIKDRKEAINYGVTILSKDDCLVILGKGHEETQEENGKFMFFSDHEV

SEQ ID NO: 164338 - protein, 447 aa, Unknown
  Bacterial polypetide isolated from the Sargasso Sea
KIVLLFGCGGNRDQNKRSKMGKIASLYADQIYLTDDNPRLENPNKIRKDIKRGINSKKISEISDRAKAISEAVKNLTTGNILLVAGKGHEKIQEIGNHKIYFSDKKIILNAIKLKNLNLSNNLKLNLIKESSGDKKLNTNLTLGQARINSKEVKKNDIFFAIRGRKNDGNKFVEEALKKKASIVVVNKIKKKLDYKKQIKVMDSLKFLTETSSIFRENIDAKIIAITGSCGKTTLKELLGKTLKKISKTTISPKSYNNKYGVPLSLFNLSKNDNYGVLEVGMDKKGEIDYLSKIIKPDISVITNINYAHAKNFKNIKDIALAKSEIISNTKPNGFVILNADDNFFTLHKKIATKNNVNTISFGIKNHKSDVKLINIIKINNNFKIKIKAKDLYKSFVISNNFQNNIYNILAALAVMSINIDITKLDKKVFFNFTTPQGRGDLSRIKI

SEQ ID NO: 164339 - protein, 214 aa, Unknown
  Bacterial polypetide isolated from the Sargasso Sea
MLLGNYFDGIHKNYKKLFFSGISFNTRSLKKNNIFFAIKGNSIDGNKFISKAIEKGSKIIVTEQKIKDYRNGIFFIRTKNIRKLLAEVSFKIYNKIPKNLVAVTGTNGKSSVAEFYLQIMQLNKKKVASIGTLGVKSKNINLNLFNTTTDPINLAQILQKLKKEKVDNVIMEASSHGLKQYRLDGLKFKSGIFTNLSQDHLDYHKNLKNYLKQN

SEQ ID NO: 164340 - protein, 101 aa, Unknown
  Bacterial polypetide isolated from the Sargasso Sea
MGSIAEEFSDQLFITSDNPRSEEPQKIVNDILMGIKKREKITIEIDRFKAINESIKFANKEDIVLIAGKGHEDYQILNDKVINFDDRKIAYKLLKEKRKFQ

SEQ ID NO: 164341 - protein, 104 aa, Unknown
  Bacterial polypetide isolated from the Sargasso Sea
LKKVLQSIKKLCEGKLITVFGCGGDRDRSKRPLMGSIAEELSDQLFITSDNPRSEEPQKIVNDILMGIKKREKITIEIDRFKAINESIKFANKRRYCFNCRKRT

SEQ ID NO: 164342 - protein, 162 aa, Unknown
  Bacterial polypetide isolated from the Sargasso Sea
ILKKIINPPGRLQKVLNNNKNYKVFIDYAHTPEALKEVLISKTSNKKKPNIVFGCGGDRDKGKRKKMGRIANLYANRIYITDDNPRFEDSSKIRQSILKYCNSRALEIPDRKKAIINAVNDLKKNETLIIAGKGHESFQIIKNISNPLDDYKVAIKVLKKKL

SEQ ID NO: 164343 - protein, 124 aa, Unknown
  Bacterial polypetide isolated from the Sargasso Sea
MDSKIRTVIGCGGDRDKAKRPEMGKIAHRYSDSVVFTSDNPRTENPQIIINEMLSGLSEDQQIDAFVNLDRLEAIKMALSFSKDKDIVLIAGKGHEKYQEINGVKHQFDDMAITKRILKIKQEL

SEQ ID NO: 164344 - protein, 196 aa, Unknown
  Bacterial polypetide isolated from the Sargasso Sea
KILNTIPKLKPVEGRFEKIGKIKNQSKVILDYAHTPDALKTCLLNLREQFPNKAITVLFGCGGDRDQNKRSKMGKIASDFADNIILTNDNPRFEKPQKIRRDIKKGIKKRITEISNRAIAIIQAVYNLNSGDILLVAGKGHEKTQEIGNKKIFFSDRKLILNAIKHKNNNLSDNLKLNVVKEAAKIKKLSASISLK

SEQ ID NO: 164345 - protein, 258 aa, Unknown
  Bacterial polypetide isolated from the Sargasso Sea
MSQDHLDYHGSIENYLNSKAKLFQQGVSEKFVYIDSPESTQIVSASNIESFSIGTNDHNHVKYKEIDDQILKFTIDSNQVECQIQLSGPKFIENFLLAFSMAYYSNLFELEDLIHKSKYVVNPPGRFETINRNNKTVIIDYAHTPGAIKEAIKYAQNKYEKVNVILGAGGDRDKGKRMKMGEASSNADYVIITNDNPRNEDPLEISKNILEGIPLNKSSEVILDRKEAIHKGVQLLKENEVLLVLGKGHEKYQEIDNK

SEQ ID NO: 164346 - protein, 314 aa, Unknown
  Bacterial polypetide isolated from the Sargasso Sea
MKENHKIIKVKNVREALGKICAKFYINKPKNIIAVTGTNGKSSVADFFHQILTYNNIPVATIGTLGIKTNKIKKNSLTSPDVISLHKELEILKDKKINNVLLEASSHGLSQGRINGINIKAGIFTNFTQDHMDYHKSMKNYLNSKLILFNKILKKNSYVITDKTIPAIKKISKITQKRKLKKIFIDYTKKEYDFSNFKLIGNFQKKNLIMAAKACEIIGLNKKKISKCFKKLKNVKGRVELVKEYPDQTKVFIDFAHTPEAIKTVINSLKNHFKRDVTIVFGCGGERDKNKREKIGKIVNKLCNKIFVTDDNPR

SEQ ID NO: 164347 - protein, 296 aa, Unknown
  Bacterial polypetide isolated from the Sargasso Sea
MLLKDYFPNLNKKYQKVSFKGIAFNSRKIKKGYIFFAFKGNNTDGNLFIKDAIKNGSKIIISDKLKKNGWKNNILFLNFKDPRKLLALFSSRIFNKKPNNLIAVTGTNGKSSIANFYFQIARLNKVKAASIGTLGINGLKIKKNFSNTTFDPIEINNILQKLKQKKINNVILEASSHGLNQNRLYGLKFDVGIFTNLSRDHLDYHKTFQNYLNSKLILFRKLMKKNSCAIYDDKLKIASNLNRITKSNKIKKLTIGSSASSFVILNHQFLKDEQKVIFKFNNKKYSFSTKLMEEYK

SEQ ID NO: 164348 - protein, 316 aa, Unknown
  Bacterial polypetide isolated from the Sargasso Sea
HKTYFSGVAFNSNQVKKDNIFFAIEGNKFDGNKYISDAINKGAKIIISKKNIKFDDKNLIFLRDSNPRKLLAEISFKLIKKKPKNLVAVTGTNGKSSVADFYYQILNLDKKKTASIGTIGVQSNNKKNLLENTTLDPIKLRKIINNLIKKKISNVILEASSHGLEQNRLDGLLFDVGIFTNLSHDHLDYHKNLNDYLNAKLYLFKNLIKKKGTVITDPSIPQFKKIKKLVNKKRLKLLTICNSNADLELISHEYKNDHQILKIKERNKKKIIKLNLNLIGKIQIKNILMAILAATSNRVDINSITKSIIKLRPAEG

SEQ ID NO: 164349 - protein, 274 aa, Unknown
  Bacterial polypetide isolated from the Sargasso Sea
KRENIFFAINGHINNGNLFINDAIKNGAKTIISDNSFSGYKNDVLFIKNKNPRKLLANLINKIHSKKPKNLIAVTGTNGKSSIANFYYQILKLNNLKVASIGTLGVQTNFKKYSTENTTSDPVIINKILNEIKKQKIDNVILEASSHGLKQHRLDGIKFNTGIFTNLSRDHLDYHKSYKDYLNSKLILFKNLLKKKSNVIFDKEIQQAKKLEQICNKKKYKKITIGNNKAELTIINHRYINNFQEVKIQFKKKFFTFRTSLIGKLQIKNLLMAI

SEQ ID NO: 164350 - protein, 286 aa, Unknown
  Bacterial polypetide isolated from the Sargasso Sea
MQTLNNSKNQLQILSHCFSGEKQILKIKYNNLIREVNLNLIGKIQLKNILMAILAAKNSNLSLIKSLNVLSKLKSIDGRFEKIGKIKNKSRVILDYAHTPDALRICLSNLKEQFPNKKIILLFGCGGNRDQNKRYKMGKIASDYSNEIYLTDDNPRFEDPQKIRNDIKKGIKNTFIKEIPDRKKAISEAIKNLNTGDILLVAGKGHEKTQDFGKKKIYFSDKKIILDCIKIKNINLSKNLKINIIKEVSKIKNKIPLIKVATAKINSKEVNKNDIFFAIRGKKNDG

SEQ ID NO: 164351 - protein, 321 aa, Unknown
  Bacterial polypetide isolated from the Sargasso Sea
TLNDEKNNLELLSHNFKGEGQFFRIKLNSSIRDINLNLIGKIQLKNVLMAIIAAKYSGISLDKILNTIPKLKPVEGRFEKIGKIKNQSKVILDYAHTPDALKTCLLNLREQFPNKKITVLFGCGGNRDQNKRSKMGKIASDFADSIILTNDNPRFENPQKIRRDIKKGIKKKRIVEISNRAIAITQAIYNLNSGDILLVAGKGHEKTQDIGNKKIFFSDRKVILNAIKHKNNNLSDNLKLNVVKEAVKIKKLSLSTSLKTARINSQEVTKNDIFFAIRGKKNDGNKYVAQSFNRKASLAVVNKIQNKLNKSRQIKVKDTLK

SEQ ID NO: 164352 - protein, 211 aa, Unknown
  Bacterial polypetide isolated from the Sargasso Sea
MFLKDYFPKIEKKYQKHFFSNITFDSLKIKKNFIFFAIKGNKYDGHNFISNAIKKGAKIIVHEKKFSGLKNKILFISTKNIRKLLAKVSFKINHLKPKNLVSVTGTNGKSSVADFFYQILNLNKIKVASIGTLGIKTKNSLRSLPNTTIDPITLSKILKNLKKKNIDNVIMEASSHGLKQHRLDGLLFDTGIFTNFSHDHLDYHKNLKDYL

SEQ ID NO: 164353 - protein, 292 aa, Unknown
  Bacterial polypetide isolated from the Sargasso Sea
MLLGNYFHNIDKNYKNFSFSGISFDTKSIKKNNIFFAIKGNSIDGNEFIPKAIKKGSKIIVTEKKTNKFQNGILYIYTNNVRKLLAETAFKIYNKKPKNLIAVTGTNGKSSVADFYNQILKLNNKKSASIGTLGVKSERTNLNLSNTTIDPIKLAKILSKLKSQKIENVIMEASSHGLKQNRLDGLKFNSGIFTNLSQDHLDYHKNLKNYLKAKLYLFEKLIQKRGNVITDQLIPEFKNIKKITINKKLKLHTLNDKKNNLELLSHNFQGESQFLRLKLNSSIRDINLNLIW

SEQ ID NO: 164354 - protein, 298 aa, Unknown
  Bacterial polypetide isolated from the Sargasso Sea
LHKNLQFFSKKKINNLILEASSHGLDQNRLDNLNIKIGIFTNLSHDHLDYHKNIRSYFKAKLYLFNKLLGKKSTVITDKDIKEYKTIKKITKRRSIKIKTIGKNNSSIKILNHENKEDVQLIKILFNSKIYDLEVPLIGYFQVKNLLMSVIAAHTCGIKIEKILNKIKKIKPISGRLECVAKVKKNSRIIIDFAHTPDALEQSLTAIKKQFRKKIIIVFGCGGDRDKKKRYLMGKVAKKYCRKIFITDDNPRNENPKKIRNSIIRGCKNKAVNIADRKKAIKLAIKELGLNEILLVAG

SEQ ID NO: 164355 - protein, 237 aa, Unknown
  Bacterial polypetide isolated from the Sargasso Sea
EMKKSKIDNVIIEASSHGLAQKRLDFLNIKSGIFTNLSHDHLDYHKNMQNYFSAKLILFKKILKKNSIMITDSEIKEYPALKRLQKKRNLILRSIGKSGNTFKILNHRIFNNYQLINISHNNKIYNFKINLIGSIQIKNLLMAILACNICGLDFHSIFKVINKIKSVNGRLEFIRCLPNQSKIFLDYAHTPEALKNAIISLEEHFNKKITVVFGCGGERDIPKRSKMGRIVNKLCDK

SEQ ID NO: 164356 - protein, 235 aa, Unknown
  Bacterial polypetide isolated from the Sargasso Sea
MKYPEFKTINKIAKKKRLKIITLNDKKNDFRILSHTFKGETQLLKIKYNNSIKEINLNLIGKIQLKNILMAIFAAKKIINLKKILDIIEKIKPVEGRFEKIGKIKNKSKIILDYAHTPEALKTCLLNLREQFPNKKLCLLFGCGGNRDQNKRSKMGKIASDFSDKIYLTDDNPRFENPDKIRRDIKKGIKKKKIIEISNRAKAIFEATKNLNTGEILLVAGKGHEKTQDIGKRKI

SEQ ID NO: 164357 - protein, 312 aa, Unknown
  Bacterial polypetide isolated from the Sargasso Sea
MKSISKKKSLKLLDINDIKNKIDKKSNYRFNKFQLKNIAMAVQAARLCNLSERSIFNKLDEIKDIDGRLELVKTFPNNIRVFVDFAHTPDALKEVLSELKNQYGENISLVFGCGGDRDLKKRPLMAKIANSNCKKIYVTDDNPRNERPESIRKEILKHIKSTPCFNISKRSLAIKSAILSAEPNEIILVAGKGHESKQIYKNKVIHISDKETIHKLRLNLKKISHKEQTFRENKKILREIYKTSTLKNFHGLSIDSRTIKKNNLFLTIKGKNKDGVNFMSDALNNGAQYIVSSKKTKKLRHKTLKVNNEIKF

SEQ ID NO: 164358 - protein, 208 aa, Unknown
  Bacterial polypetide isolated from the Sargasso Sea
MLLGKVFKDINPKHKNIKFNNIKFNSKKCKSNDIFFALRGNNNNGNNFIKDAINNGAKIIVSNLKFKGFNKKKILFIHSKDPKNKLAEVAKNFYLKKPKNIIAVTGTNGKTSIANFYYQILTLNKKRAAAIGTLGILSKKINLKTNNTTLDSVNIFKIFKKLKEQKVNNVIMEASSHGLKQHRLDGIIFNTALFTNLSRDHLDYHKTY

SEQ ID NO: 164359 - protein, 245 aa, Unknown
  Bacterial polypetide isolated from the Sargasso Sea
MKLSALIPELKLSSCLNDKEVSSIHIDSRDVKEGGIFFALKGRNFDGNDYINEALEKGACLVVTDTGKYNNSEKIIYLKNLRENLSDIASRFYENPSANLKTICVTGTNGKTTAVETFAMLGNLLGEKSSYMSTINFSINGSIQHTSDLTTPDTITINRNLSHSIRENSIYFSMEASSHGLEQDRLQGLDIDYAVLTSFSHDHLDYHGDLESYKLAKKKLFVNHSPQTNIVCIDSEFGAELICRT

SEQ ID NO: 164360 - protein, 124 aa, Unknown
  Bacterial polypetide isolated from the Sargasso Sea
VFAPERVVGLICVIGCGGDRDQGKRKEIGKIVSELSDFAWLTSDNPRSEDPMKIIRQVASGFTTGNYSVSLDRKDAIRQAITSSEDQDIVMLLGKGDESTQEVNGVFSPHSDRDIAKQVVGGLV

SEQ ID NO: 164361 - protein, 259 aa, Unknown
  Bacterial polypetide isolated from the Sargasso Sea
MDIEIFGITSNTKKIAEGYLFVALRGAKFDGHDFITEAIEKGAVAILGQSGSKFQLSLDNSFSSCFIACEDPRGTYPKLCSVYYNKQPEMIAGITGTNGKSSVAEFTRQLWSFNSLSAASLGTLGLVTENFSKKTNLTTPDPAELFSLVKRLAESNITHLALEASSHGLDQHRLDYLDIGVAAFTNLSRDHLDYHKNMRDYLSAKTLLFSDLLRNNGTAVINADDANYSHIISSLNSPKISVIDYGARAKTLRLLERKV

SEQ ID NO: 164362 - protein, 309 aa, Unknown
  Bacterial polypetide isolated from the Sargasso Sea
KTSIADFFHQIFTLNKRSVGLIGTLGFKKNNSLKKRNLTTSDSISLHRDLNDMKNSKIENVILEASSHGLKQKRLDFLNINSGIFTNLSHDHIDYHKNMSNYLSAKLILFKKILKKNSTIITDSEIKQYPLMKNIKKKRKLNLLSIGSLGNTFKILNHKIFNDYQLIRVSYKRKIYNLKINLYGSIQIKNLLMSILACEKCGLKTKNIFKIINKIKSVDGRLELIRKLPNRSKIFLDYAHTPEALKKAINSLQEHFNKKITLVFGCGGERDKHKRKLMGKIANKLCSKVYVTDDNPRNENRNVIRKNII

SEQ ID NO: 164363 - protein, 244 aa, Unknown
  Bacterial polypetide isolated from the Sargasso Sea
MNNDNPLNLLAKFSSKIFNEKPNNLIGVTGTNGKSSIANFYFQILTYNKIKAASIGTLGVNGLKIKKKLQNTTFDTIQINKILKKLKEKKIENVILEASSHGLNQNRLDGLEFDVGIFTNLTRDHLDYHKTFKNYFNSKLILFKKLMKKKSYAIYDNDLKISSDLNKITRLNKIKKLTLGNTKSSLEIIDHQYFKDEQKIKFRFDKKQYSFSTKLIGKVQIKNLLMAIMAAMKSKISLEKILKV

SEQ ID NO: 164364 - protein, 299 aa, Unknown
  Bacterial polypetide isolated from the Sargasso Sea
FVALPGAEHDGRDFIEPALAAGAVAVLMESGRELHRDDARVIPISGLKGELGALANRLYGSPSCDLKVVAVTGTNGKTSVVDLTAQLLRRTGRKTGTIGTLGMRLDQERTETGNTTPDCLALQRQLRQWRDDGVECVTLEASSHALDQGRLDGLAVDVGVFTNLTRDHLDYHDSMDAYCEAKLKLFREFEPASRIYNADDEAVVTHSDIWWSGGLGVSTGGANTEIRIEVVQAVPQVLKLKTPWGDGRLQTALSGRFNAFNVGASLAAALSLDVDFAEALAAAEALEPVLGRLQAVGDG

SEQ ID NO: 164365 - protein, 225 aa, Unknown
  Bacterial polypetide isolated from the Sargasso Sea
MLLGNYFNNISKNYKNFSFSGISFDTKSIKKNNIFFAIKGNSVDGNKFIPTAIRKGSKIIVTEKKANTLQNGILYIYTKNIRKLLAEISFKIYNKQPKNLIAVTGTNGKSSVADLYYQILNLNNIKVASIGTLGVKSKSINFNLPNTTIDPIKLAQILSKLKIQKIENVIMEASSHGLKQNRLDGLKFNSGIFTNLSQDHLDYHKNLKNYLNSKLYLFENLRKKK

SEQ ID NO: 164366 - protein, 269 aa, Unknown
  Bacterial polypetide isolated from the Sargasso Sea
RKLVSEIASKYYKNVSANLVAVTGTNGKSSIANFYFQILNNKKLKVAAIGTLGIKTNNNNKLTDNTTLDSVTINKTLSLLKKRKIKNTILEASSHGLKQYRLNGLRFDTTIFTNLSRDHLDYHKTYKDYLNSKLILFNKLTKKGGTIIYDNDISQSKILKKICIKKSLKSLTIGKKNSNLIIKKHEYLGNFQKIEIEFNKKKYSFTTNLIGKIQVRNLLFAALAASKSKIKFSKIVELMSKTKAVEGRLENVGNIKNNSKVILDYAHTP

SEQ ID NO: 164367 - protein, 262 aa, Unknown
  Bacterial polypetide isolated from the Sargasso Sea
IIGITGTNGKTTTGCLLDSIIRSANESTGFIGTLGVSGPGVEAHTGLTTPDSLELQRTLALFVDGGLTHAVLEVSSHALELERVAHVDFDIAIFTNFSQDHLDFHGSMDKYFSAKAKLFSSLSSDKSVILNANDPKSAIIEKLTKAKIIKYGIEVDSDIKFDNWGMSIDGIIGSIEFEGQKIDISSKLIGSYNLHNILAAITAAKEMEIPIDKIQKGINSLDTVPGRVEQILSPNGATIIIDYAHTPDAFMKLFYSLSELLP

SEQ ID NO: 164368 - protein, 249 aa, Unknown
  Bacterial polypetide isolated from the Sargasso Sea
YSGIFTIYLKIHLDYHKNLNDYLNAKLYLFEKLVKKKGNVITDDKIHEFKKIKKISLRRGLRINSLFSKNYKFQILSHFFKDETQVLKIKYKNSIKKINLKLIGKIQLKNILMAIIAAEKSNIDMNKILKVIPKIKSIEGRFEKVGKIKNQSKVILDYAHTPGALKTCLLNLREQFPDKKIITLFGCGGNRDQNKRSKMGRIADDYSDEIYLTDDNPRYENPNKIRKDIKRGISRNKIIEISNRKRAIV

SEQ ID NO: 164369 - protein, 244 aa, Unknown
  Bacterial polypetide isolated from the Sargasso Sea
HLDYHKNLKNYLKAKLYLFENLIEKKGNVITDKDIPQYKTIKQISLKKKLKISAINEKQNNFQILSHRYDNENQLIKIKYKNLIKEINLNLIGKIQIKNILMAVTAAQKSNLNFENILKVLPELKPVEGRLEKIGTIKNNSIVILDYAHTPDALKFCLLNIREQFPGKKLNLLFGCGGNRDQNKRMKMGKIASIYADNIYLTDDNPRLENPVKIRKDIKKGIKFKKIKEISNRSIAISEAIKNL

SEQ ID NO: 164370 - protein, 307 aa, Unknown
  Bacterial polypetide isolated from the Sargasso Sea
KVKKGFIFFAYKGDNYDGNEFIEDAFKNGACLAISDSDKLETQKNVIKVDDIRTAAGIACSNFYNFPQNKVKLIGITGTNGKTSTSTILKSILDAENEKTLQIGTSGIKPPLEINSDLTTPDIFDLYEILNYAVNGGFKNVVLEVSSHALSQRRIENIFFDITAFTNLTLDHLDYHKTMEEYFCEKLKLFDLNKENASSVVMIDDEYGKRISELNPHAKCISLENKDADYSCTNFSINDLGIVGTLVWDSKTLDFQSKLIGSFNLENIILAASIAVELNISTQSISEGIKNCINIDGRLHLVKNKNN

SEQ ID NO: 164371 - protein, 262 aa, Unknown
  Bacterial polypetide isolated from the Sargasso Sea
MNFENIVTITGTNGKTSVAWFVNNIWHKIGLKSASIGTLGVFDGKNIYKTDLTTPNIDQTYEQLSYLNKNDFKNVIIEASSHGIDQNRIGGLSISIAAITTLSRDHLDYHLSYKNYKMAKLKLFSKVSKNGVAIINDSIKEYKEFIEIALKNKLKILLVGKKNNSDLSYQIKVLKNGEQLVKVNYKNFKGSFSTKLIGGFQVNNLITSMAILLETGVPFNTLINSMKDISSPPGRMEYICSVNQARIFVDFAHTPDALKNVL

SEQ ID NO: 164372 - protein, 212 aa, Unknown
  Bacterial polypetide isolated from the Sargasso Sea
MFLSEVCNIIKTIKIINLNKNRKVKTITNSTEIAENSSILVINSIKFKKQFLTKSQKKNIPALITNKYIKEFYNTQFIVKNTNKESLKIMQSLFPFKPDKSVAITGTNGKTSVAWYLSQICKQANLKTKMLGTLGFYKNHKKIKNTFLTTPAFEDLYQFSHSKNKSTYNFIFEASSHALSQNRLRNIPVDIAAITNISNDHLDYHKNMSNYT

SEQ ID NO: 164373 - protein, 39 aa, Unknown
  Bacterial polypetide isolated from the Sargasso Sea
AKAGDLVLIAGKGHEDYQILGTNKVHFDDREQAALALKA

SEQ ID NO: 164374 - protein, 202 aa, Unknown
  Bacterial polypetide isolated from the Sargasso Sea
MKNLIRVISKDKKNIIISGISTNSKKIKKNFIFFAIRGKKYNGEKFIKDAVNKGASVVVCSKSCKFRNNSTLIIKTNKPRHLLSDISSKFYKSKPKNIIAVTGTNGKTSVSDMFYQILRINNIRVASIGTLGIKYNDKIIKTNLTSPDAITLHKNLEYLKNKKIDNVIIEASSHGLDQKRLHHIKFKGAVFTNFSQDHLDYH

SEQ ID NO: 164375 - protein, 285 aa, Unknown
  Bacterial polypetide isolated from the Sargasso Sea
TPDALTTCVKNVKEQFKLRKINIVFGCGGERDKPKRKIMGAIANKYCDKIYLTDDNPRREDPKKIRKDIKSNISKNKVLEIPSRESAIKAAILDIKSNEVVIIAGKGHEAYQEYFTKKLFSDKSCIKKFIKIKNKSLNKNWKSNIVSEITKKKLKKNTNINKASIDSRKVKKNNIFFAIKGKNFDGNKFVYQAFKNGASVSINENKKKNKFKNDIYVKDSLKIFSEIAKLVRVSSNISSIAITGSSGKTSLKEMLGQMMSKIFQTSYSKKSFNNKYGVPISLFNI

SEQ ID NO: 164376 - protein, 281 aa, Unknown
  Bacterial polypetide isolated from the Sargasso Sea
MSKFADILGIDIPKGTKILSATNSTKKIKKDSIFFGLQGSKIHGSNYAEEALNLGASIVVHNDVNFTSQNSKIFYIKNLENKIIDFLNTLYEIDINQNNFFTFTGTNGKTSAALLCHQLLTSMEYDSLYVGTMGIQYKNNKFNTSFSSKTTPDIFELFEIIDSFNFGLDSISICIEISSHALDQKRLSNIYWLNSASILNISNDHLDYHENISSYIDTKFDIFKINSSIKLINDDSNKLKNHNYDLRCISNKNNFSDIFYEIKKISLTRCEFNILINKPPQ

SEQ ID NO: 164377 - protein, 244 aa, Unknown
  Bacterial polypetide isolated from the Sargasso Sea
MGIKKNDIIKTVSKLKKPEGRFQEIGELNNDSRVVVDYAHTPEALQNILLASNLKGKKPNVLFGCGGNRDKNKRKIMGHIANKYASKVYVTDDNPRNEDPSIIRKSIIAGCPSAIEIANRRLAIHKAIDDLEKKSTLIIAGKGHEKVQIINNKIKKFNDSQIAAEYLKKKKLKNKSKDLFYKVQNYLIRNSNKIKINSRDIKRGDVFVALKGLSDHGMRYIDDAFKKGAKYIITNKISKLTKNK

SEQ ID NO: 164378 - protein, 142 aa, Unknown
  Bacterial polypetide isolated from the Sargasso Sea
MYCYNSQEIKKGDTFLCLPGGAPYVNDAKSRGALEVKHVTRREMAELAHDYYKHPSKSLCVYGVTGTNGKTSVCHFLHCALTYLGRVSYLQGTLTHRLTTPESLDTVNVMARHRDSGGTDFVMEVFVTWHFATSRLRYRVLM

SEQ ID NO: 164379 - protein, 209 aa, Unknown
  Bacterial polypetide isolated from the Sargasso Sea
MLLSDLRKIIDIKKILKIRNDKTFNKISGYSKELSKFSIFVIDYNNNIKKEYINEAIRKKIPAIITNKFIKNINITQFLVKNIEKETKKLLYYLKPNKPINTIAITGTNGKTSVCWYISEICRLNKIKIKMQGTLGYYVNGKKIKSEILTTPQYVNLHQNSFSKSNNFYNYVFEASSHALDQNRINNFPINIAAITNITHDHLDYHKTL

SEQ ID NO: 164380 - protein, 220 aa, Unknown
  Bacterial polypetide isolated from the Sargasso Sea
MIYACKDIQFQTIGSVDVEIFGITSNTKKITEGDLFVALQGAKFDGHDFITEAIKKGAVAILGQSGSKFQLSLDNSFSSCFIACQDPRGAYPKLCSIYYNKQPEMIAGITGTNGKSSVAEFTRQLWSFHSLSAASLGTLGLVAENFSEKTNLTTPDPAELFSSLKRLADINITHLALEASSHGLDQHRLDCLDIGIAAFTNLSRDHLDYHKNMQEYLLAK

SEQ ID NO: 164381 - protein, 219 aa, Unknown
  Bacterial polypetide isolated from the Sargasso Sea
MAMNSNEVNKGDIFIAIPGTKLDGHNFIEQAIDKGASAIISNGTDLGKLPVPQIKVANPRRAASIVASEFYGHPTKHLKVIGVTGTNGKTTTASILKSILDNAGYKVAQIGTLGLIADDFEQIKTLTTPDPITLQKLFSKLKEANYSHIVMEVSSHALDQFRVADVNFNIGVFTNLSPEHLDYHATIESYFQSKLRLFTMLTINSAAIVNISDSFGKRI

SEQ ID NO: 164382 - protein, 210 aa, Unknown
  Bacterial polypetide isolated from the Sargasso Sea
MLVSYKSTTVKIATKLIGSFNAYNLLAVVASLLTMDFKLSEIAEALQGITPVEGRMESYGGGDKPTVIVDYAHTPAALEEVLVSLQRYCERRLVCVFGCGGDRDSGKRKLMGQIAERYADHVIITDDNPRHESSKRIVEQVLRGFLCPWAVDVIHDRTKAIVHAIDEAMPGDVILIAGKGHESYQIIGDEKIAFSDKEQVKFLLNLRADA

SEQ ID NO: 164383 - protein, 251 aa, Unknown
  Bacterial polypetide isolated from the Sargasso Sea
FIKFKNFKIKTFSMAIAAAKLCNLKKKEIFLSLNKIKDVNGRLELVKIFSNNVRVYVDFAHTPDALLKSITALEESDNKNVSIVFGCGGNRDFKKRPLMGKIASQNCKNIYVTDDNPRDEKPEKIRNEIIKNIKNKNCYNIKNRSLAIKTAIINAEPNEIILIAGKGHESQQIYKKKTISISDKKIVKSFNYKSKKLSNKHLTFLQNKKIFKEIKKNTKIKDFHGLAIDSRLVKKNNLFLTIKGKNHDGLD

SEQ ID NO: 164384 - protein, 278 aa, Unknown
  Bacterial polypetide isolated from the Sargasso Sea
VRSTLSYAASKFYNKKPKNIIGITGTNGKSSIANFYYQILSQNKKSSASIGTLGIKSKSYNKNFNITTLDPVNLHYNLQNIKNEKIDNVILEASSHGLKQSRLDHLQFNCSIFTNISRDHLDYHKTFKDYINSKLKLFRFLAKKNSTIIFDNDLPTSKILKHISNVKKLKPITIGSKNSNLNINKIYYKQDSLLVKFKYKKKNYLINLNLIGKLQVKNILMACLAAEKSGLKFSKIISNIHKIKPVEGRLQQIQKIKNNSKVILDFAHTPDALKSSLQ

SEQ ID NO: 164385 - protein, 284 aa, Unknown
  Bacterial polypetide isolated from the Sargasso Sea
KSYHKIFFSGIAFNSSHVKKNNIFFAIKGNKFDGNNYIEDAIKKGAKIIVSEKKINLKKNNIIFIKNSNPRKLLSQFSYRNVKKNLKKIIAVTGTNGKSSVADFYFQILNLNDKKTASIGTIGVKQKNNIREISNTTLDPVELSKIINQLSSKNIKYIVLEASSHGLKQNRLDGLSFDIGIFTNLSQDHLDYHKNFRDYLLAKLYLFKHLLKKDGCIISDSTIPQIKNLKKISKEKKIKLETVFGKNSELELIDHVYNNEQQIIKVKYKSKLHELKINLIGKVQ

SEQ ID NO: 164386 - protein, 273 aa, Unknown
  Bacterial polypetide isolated from the Sargasso Sea
LAQICKINKIPSKLTGTLGYFIDLKKYKDSKLTTPSNLDLYQFANASKKNKFCFIAEASSHGLHQGRFKNFNIDIAAITNLSHDHLDYHKNFRSYVNSKVSLFTNILHSKGVAIINSRLKNYKTLEKKIKERKIKIITYGAKDVYFYKNNYLELYILGKKYNLTKFKLTNNIQKENLECAIACALAMNISIKKIINSLDKLKSAPGRFEIINFRKKNSKIIIDYAHTPAALENILKTFSYDNFKPSLVFGCGGNRDKEKRKKMAIIAKKFQIG

SEQ ID NO: 164387 - protein, 206 aa, Unknown
  Bacterial polypetide isolated from the Sargasso Sea
MYLGNFIENLEKKYSKLSFSGLAFNSREVKKNYIFFAIKGNKFDGNNYINDAINRGARIIISKKNSKINKKGINFITNKNPRKLLSELSYKFLIKKPKNLVAVTGTNGKSSVSDFYYQILNLNKKKSASIGTIGVQFENKNKTITNTTLNPIKLREIINFLIKKKINNIILEASSHGLKQNRLDGLDFDIGIFTNLSHDHLDYHKN

SEQ ID NO: 164388 - protein, 224 aa, Unknown
  Bacterial polypetide isolated from the Sargasso Sea
SSHGIDQSRIFGLNFKGGVFLNISHDHLDYHKTFKDYRDVKKVFFDQLPKGAFALSNFDDKNGKYILQNTLAEKKSFSINSYADFNAIILEIDFSGMLIKINNTDFWTHLVGKYNASNLLAVYSVAMLLKLDSISVLSHLSKLKNVRGRFDIIQTKKAKIIIDYAHTPDALKNVLSSINEIRKDFKKLITIVGCGGERDKKKRPIIGKIASIKSDKVIFTSDNP

SEQ ID NO: 164389 - protein, 234 aa, Unknown
  Bacterial polypetide isolated from the Sargasso Sea
MLLGKLIKNIKPAYKFIRFNNIRFNSKDCKTNDIFFSIQGNNSNGNNYIKDAIRNGSKIIISNINFEGFNKDKILFVKSKNPRKTLAEAASNFYTKKPRNIIAITGTNGKTSISNFFYQILSLSKKKAATVGTLGVLSKKINLKTNNTTIDPIKIHYILQKLKGSKIDNVIIEASSHGLKQHRLDGINFKTALFTNLSRDHLDYHKTFKDYLNSKLILFDKLLLNKGNIIFENG

SEQ ID NO: 164390 - protein, 290 aa, Unknown
  Bacterial polypetide isolated from the Sargasso Sea
IFFAIKGVNHDGNKYIKKAIDRGCKVIVHQKKFQGIKDSILYISSKNVRKDLSLIAHKYFKSKPKNILAVTGTNGKSSIADFYYQILSMNKKKVASIGTLGIKTKKNIFKVNNTTLDPITLAKSFKLLDYFKINNVILEASSHGLHQNRLDGIKFNGGIFTNLSHDHLDYHKSLKNYLNSKLYLFNNLLKKNSFIATSANIPQYNNIKKIAKNKKLKLISLFNKSGIEILDHKYIGEKQFLTIIYKKKKYSFETHLIGKIQINNLLMAGIAAKSSKLKFEKIIDTFNQIK

SEQ ID NO: 164391 - protein, 274 aa, Unknown
  Bacterial polypetide isolated from the Sargasso Sea
MIKIHCYKNKDVGILGAGLSGLAAAKILLSSKANIYIFDDKKDKPDLIKKNSWKNYKTWPWESLTTLVVSPGIPINAKKKHNAIKLAIKNKVKIINEIDLFFETKPKARIIGITGTNGKSTTVALLFHILKFNKIKCVIGGNYGFPACEIKDPGRRGIIILELSSYQLDGAMKLSLDLASIINITPDHLDYHETFCKYKLSKLKIINFLKVNGTFFLDVKNKLLKEIIDYKRYNSINIIKIKNNEFDNYVNDNDYLKGSHNRVNGSIALSIARY

SEQ ID NO: 164392 - protein, 238 aa, Unknown
  Bacterial polypetide isolated from the Sargasso Sea
MLLKELIKDLPNKDKKIKIRGLSTCSKKVKKGFIFFAIKGNKFNGENYIHEAVKKGASVIICSKNCKYSKKNLIIKKTSDIRFLLSKICSKFYNLKPKNIFAVTGTNGKTSVADLFYQILKLNNIPVASIGTLGIKINGKIINSNITSPDPITLHKTLLKLKRRKIDNVIIEASSHGLYQKRVEHINFKAGIFTNFSQDHLDYHKTMKSYLNAKLHLFNNILSKKKVIITDKNLKEYP

SEQ ID NO: 164393 - protein, 246 aa, Unknown
  Bacterial polypetide isolated from the Sargasso Sea
MKLKKILGSVSKKNGNIVINGISFNSTKIKKGNVFFSIRGKKTSGKKFIQDVAAKKASCVITDENIYKKNYKIPIIKVRNCRKSLSEASSNIYNLKPKNIIAVTGTNGKSSIANFFFQILTLNKKLSASIGTLGINTRDFKKKNKLTSSDPITLHKNLFQLAKKKINHVILEASSHGLDQSRLDHVKFNSAIFTNLSHDHLDYHKSYKNYFNSKLILFKNLLKKKSNIITDMDIAQYKILNSIAKE

SEQ ID NO: 164394 - protein, 122 aa, Unknown
  Bacterial polypetide isolated from the Sargasso Sea
SNLPIDLEHKIIIFGCGGDRDKSKRSKMAKIASKYTDIQIITDDNPRNENPSNIRRILFENSSNPLEIPSRKKAIERGFKLLKNKKGLLIIAGKGHENIQIYKNKKLTFNDYQVAKSYAKYL

SEQ ID NO: 164395 - protein, 333 aa, Unknown
  Bacterial polypetide isolated from the Sargasso Sea
QKYKKIFFSGISFNTRLLKKNNIFLQIKGNSIDGNKFISKAIEKGSKIIVTEQKIKDYRNGILFIRTKNIRKLLSEVSFKIYNKIPKNLVAVTGTNGKSSVAEFYLQIMQLNKKKVASIGTLGVKSKNINLNLFNTTTDPINLGQIFQKLKKEKVDNVIMEASSHGLKQYRLDGLKFKSAIFTNLSQDHLDYHKNLKNYFKAKLYLFENLIEKRGNVITDKDIPQYKTIKQISLKKKLKISAINEKQNNFQILSHRYDNENQLIKIKHKDSIKEINLNLIGKIQIKNILMAVIAAQKSNLNFENILKVLPELKPVEGRLEKIGTIKNNSDCYS

SEQ ID NO: 164396 - protein, 274 aa, Unknown
  Bacterial polypetide isolated from the Sargasso Sea
MLLKDYIPDIPKRFYQINFSGIAFDSLKVKKNDIFFAIKGKKFDGNNFISQAIKKGAKVIISQKKNQKKNTDVIFLHSSNPRKLLAEVSYKIYNKRVEKLVAVTGTNGKSSVADFYFQILKLNSKKVASIGTLGLKYKFKTKNLENTTSDPIQIGLMLKNLRKKKIKFAIMEASSHGLDQNRLDGLKFDIGIFTNLSHDHLDYHKNMKNYLNSKLYLFKNLIKKEGHIITDENIPEAQKIKRISIKKNINLSLIHNESNGIQLVSHRFKKEKQI

SEQ ID NO: 164397 - protein, 256 aa, Unknown
  Bacterial polypetide isolated from the Sargasso Sea
VLNDEIKNINNFKKRISNRQIRILTFGSNKSDVFVYTNNKNTNLKIYNKNFKIKKINYNKFELSNLSCSIACCVAMGININSIVKSIIFIKKPEGRLQKVSSNKNIPKIYIDYAHTPDALKNILISNTSKKNNKPNVLFGCGGDRDKSKRKKMGIIANRYANKVYITDDNPRNEDPSKIRRTIINSCKKAIEVPGRRNAIKKAINELNLNEILIIAGRGHEKKQIIKNKEFNLNDFQTAKLFVSKKKYDIQKKSQK

SEQ ID NO: 164398 - protein, 247 aa, Unknown
  Bacterial polypetide isolated from the Sargasso Sea
DDDAWEGLEGGGRKVVSYSLVRKADVRARDIRLSSTGTSFRMTVAGQDLNISLPLIGRYNVENALAASAAAIAVGVSLECVAQRLEVAPQVAGRLEAVVAEPFGVLIDFAHTPAALEGALEAVRPLTEGRLIVLFGAGGDRDRSKRRLMAQAVARLADVAVLTSDNPRTEDPDRIIDDLVEGIGSTDFIRMTDRRDAIRKALEVARPGDTVVLAGKGHETYQVVGKEKQPFLEADIARDALRELGVL

SEQ ID NO: 164399 - protein, 285 aa, Unknown
  Bacterial polypetide isolated from the Sargasso Sea
MIGKLFKIKNKKIRNHFFSGLSFNSNTCKKNFIFFAIKGNLQDGNKYIDEAIENGARTIIHQKSFEGFKGEVLFLSFKNIRKILASTSFKFYNKIPNNIIAVTGTNGKSSVSDFYYQILKINNVSVGSIGTLGIKFKNKLISLNNTTLDSLNLSKYLSFLKKKKIDNVILEASSHGLQQHRLDSLNITSAIFTNFSHDHLDYHKNLKNYLNSKLYLFNTLLKKNSLLITDRSIKEFKKIFNISKKRKLRLKTILDEKSDLQLINHAYEGEKQKIQIKYKNKIYSF

SEQ ID NO: 164400 - protein, 272 aa, Unknown
  Bacterial polypetide isolated from the Sargasso Sea
DIKKGFIFFAIRGNKFNGENYINEAIKKGARLVICSKKCKFKKKKVDIIKTVRVRDYLSEITANFYKIKPKNLIAVTGTNGKTSVADFYYQLLNLNKIPVASIGTLGIKSKNSKIQTNLTSPDIITLHKNLELLKKQKIDNVIIEASSHGLAQQRLDRLDFKAGIFTNFSQDHLDYHKSMKDYLNAKLILFKKLLVKNKYIITDGSSKEFSTLKKIAKKRKLKILDSTKEDLLKNFIPKDFINTFQSKNLSMAILAAQVSKLNKIKIKNKIK

SEQ ID NO: 164401 - protein, 220 aa, Unknown
  Bacterial polypetide isolated from the Sargasso Sea
MLLKNLISNLKPEVGALKIKGISFDSRSIKKGDLFVSIKGDKFDGNDYISQATSKGAKVIVHSRPIKKNKKATFIKFKDSRNILARLSTKYYKNKPKNIIAVTGTNGKTSVADFFYQIFMLQKKKSGFIGTLGFRKNKSLKRRNLTTLDSLTLNRDLNEMKRSGINNVIIEASSHGLKQKRLDFLKIKVGIFTNLSHDHLDYHKNMKDYLHSKLLLFRDI

SEQ ID NO: 164402 - protein, 151 aa, Unknown
  Bacterial polypetide isolated from the Sargasso Sea
KLDDNNLCFIDYAHTPEALEFALKELRSLGESTLWCLFGCGGERDKLKRMEMGKVSKLYSDKVVLTNDNPRGEEPSLIIGDIMKGIESNNDIKVELDRKKAIDYCLTEMMGNKKKNILLIAGKGHEEYQEINGKKKEFSDFIQVEKFLEEV

SEQ ID NO: 164403 - protein, 324 aa, Unknown
  Bacterial polypetide isolated from the Sargasso Sea
YFHKINKNYKNFSFSGISFNTKSIKKNNIFFAIKGNSIDGNKFIPKAIKKGSKIIVSETKTNPFQNGILYIHTNNVRKLLAETAFKIYNKKPKNLIAVTGTNGKSSVADFYYQILKLNNKKGASIGTLGVKSKSINLNLSNTTIDPIKLAKILSKLKEQKIENVIMEASSHGLKQNRLDGLKFNSGIFTNLSQDHLDYHKNLKNYLNAKLYLFENLISRKGNVITDKLIPEFKNIKKIAINKKLKLHTLNDEKNNLKLLSHNFKGEGQFLRFKLNSSIRDINLNLIGKIQLKNVLMAIIAAKYSGVSLNKILNTVSKLKPVKKR

SEQ ID NO: 164404 - protein, 77 aa, Unknown
  Bacterial polypetide isolated from the Sargasso Sea
KVFLDYAHTPEALEKAIISLREHFHKKITILFGCGGERDKTKRRLMGQVAKKYCDKIYITDDNPRKENAKKIRKEIM

SEQ ID NO: 164405 - protein, 243 aa, Unknown
  Bacterial polypetide isolated from the Sargasso Sea
QIIKNKKINNVILEASSHGLKQSRLDHLRFNCSIFTNFSRDHLDYHKNYKDYLNSKLKLFKNLTKKNATVIFDNDLSTSKILKKICNLKKFKIKTIGKKNSDLNINRISCFKDLQVVEFDYKKKNYLINLKLVGKLQVKNILMACLAAECSGVKFSKIISNIHKIKPVEGRMEQIKTIKNGSKVILDFAHTPDALKSSLKNLKEQYPLNKLDIVFGCGGNRDKAKRPLMGKIADTYCEKVYLT

SEQ ID NO: 164406 - protein, 315 aa, Unknown
  Bacterial polypetide isolated from the Sargasso Sea
INDAIARGARIIVSNKYKTGVNKGVLYIKVSNPRLALTNFANKYYNKKPNNIIAVTGTNGKSSIVNFYYQILKLNKKRVASIGTLGVKSNGVSLKLNNTTVDAITINKILANLKNKKIENVILEASSHGLHQKRLHGIKFSTSIFTNLSRDHLDYHKNYKNYFNSKLILFNELTKKNGNLIFDNDLKYSQILKKIAYRKKLNSLNIGTSDSHLKINSIKILNKYQHVKFTFQTKEYQFKTSLVGKIQIKNLMMAVAAAIKSNLKIDDIVKKLKYIKPATGRLEIIGKAKDNSIFILDYAHTPEALKTSIENIKEQ

SEQ ID NO: 164407 - protein, 324 aa, Unknown
  Bacterial polypetide isolated from the Sargasso Sea
AKYVKLSEKKILNSLTKIKSVDGRLELVKTFSNNVRVFVDFAHTPDALKKSLLSLKAQYKEDVSLVFGCGGDRDTKKRPFMAKIASSNCKNIYVTDDNPRNERPEKIRAEIIRQIKNKNFFNIGNRSKAIRAAILNAEPNEIILIAGKGHEQEQIYKNKVILISDKEIVKNLKVKIKKISEKKRNYLQNKEILKSIQKKNNLKDFHGIAIDSRVVKKNNLFLTIKGKNNNGVKFIPNALKKGAQYIISSNYLKKYKNKTIKVKNEIKFLNRFASEKRKISKAKVFAVTGSAGKTSLKNLLKKLLQNFGDTFCSPNLIIIILVCL

SEQ ID NO: 164408 - protein, 311 aa, Unknown
  Bacterial polypetide isolated from the Sargasso Sea
FALPGLRTDGNEHLQEALDRGAKVIISGKDEIDLPLGVTGLKVDDPRLALAEFARRYHGSPDSVLRVVGITGTNGKTTVSTLTRHLMERPGRPVGLIGTVRYHLGDREIPSFKTTPESSDLFALLRGMLAAGCSETVMEVSSHGIHQARVAGLGLEVAAFLNLTRDHLDYHGNMESYFREKRKIFNGANGTLPKIAVINGDCPYGRRLIEELPPQVQVLSFGLEEDNHFRAKNLSLQSGGSEFILEAPAGTMVVTSPLIGSYNVMNVLASFAILHALGHSVPDAVRKVGAFEGVDGRMEAVERGQSYQVIV

SEQ ID NO: 164409 - protein, 243 aa, Unknown
  Bacterial polypetide isolated from the Sargasso Sea
MEFIPQLKNIDQEIKGVCADSRQVKKGDLFFAYKGISTDGNIYIEQAIQKGAIAIISDSISDPKKNIYRHDSLKNDLGIIISNLFNNPSKKLKLFAVTGTNGKTSTVEFISGLINKQQGKCGYLSTIGWCLDGVNFQKGSSLTTPNSLEINKQLNKMHIRGMNYAALEASSHGLDQGRLDGLEIDTAIFTSFSQDHLDYHQTMQNYADSKKKLFLELHPKKSVINIDNALSKSIYTELTKNNL

SEQ ID NO: 164410 - protein, 314 aa, Unknown
  Bacterial polypetide isolated from the Sargasso Sea
ALNKALETLKNIEGGKVSLVFGCGGNRDKSKRPLMGKIASDNCEKIYVTDDNPRKEKPDKIRQEIIKNIKNKNYFNIGNRAKAIKSAILNAEPNETILIAGKGHESEQIYKNKTILISDKQIIKKLKLNIKKISPQVRLFLENKNILSSILKKRKKENFHGLAIDSRVLKKNNLFLTIKGKNNDGIKFVSQALKKGAKYIISTKKIKKYNQKIIKVNNEIKFLNKFAKCKRTSTSAKIIAITGSAGKTSLKNLTKDLLNVYSETFCSPKSYNNHFGVPLSLSNLKTIHKFGVFEIGMSKAGEIGKLSELIRPHV

SEQ ID NO: 164411 - protein, 260 aa, Unknown
  Bacterial polypetide isolated from the Sargasso Sea
SDSSKVKKNDIFFAIKGNKIDGNIFIDEAIKKGARIIVSEKKINKQKKNIIFLHSSNVRKLLAETSYKILNKKPKKLIAVTGTNGKSSIADFYYQILDYNFKRVASIGTIGVRYKKGKVKLDNTTLDPIRLSSILKNLKKKKIDNIILEASSHGLDQNRLDGLLFDVGIFTNLSHDHLDYHKNMKNYLNSKLYLFNKLIKKKGDIITDENIPQKKILKNISFKRNVNFNLIFNRYKGIELVRHKYENERQVLEIRYKNKN

SEQ ID NO: 164412 - protein, 243 aa, Unknown
  Bacterial polypetide isolated from the Sargasso Sea
MLLGKYFHNINKNYRNFYFSGISFDTKSIKKNNIFFAIKGNTIDGNKFITKAIKKGSKIIVTEKKVNQFQNGILYIHTKNIRKLLAETAFKIYNKKPKNLIAVTGTNGKSSVADFYYQILKLNNKKAASIGTLGIKSKRINLNLPNTTIDPIKLAKILSKLKTQKIENVIMEASSHGLKQNRLDGLKFNSGIFTNLSQDHLDYHKNLKNYLKAKLYLFENLIQKRGNVITDQLIPEFKNIKKI

SEQ ID NO: 164413 - protein, 280 aa, Unknown
  Bacterial polypetide isolated from the Sargasso Sea
NDFIEDAFKNGACLAITDSNKLESQKNVVKVEDVRIAAGIACSNFYNFPQNKVKLIGITGTNGKTSTSTILKSILDAKNEKTIQIGTSGIKPSIEINPGLTTPDIFDLYEILNYAVNENYKNVILEVSSHALSQRRIENIFFDITAFTNLTHDHLDYHETMDEYFSEKLKLFNLNKDNGSSVVMIDDDYGKRIAELNSNVKCISLKNEDADYFCTSHSINSFGLAGTLAWDSETLDFESKLIGSFNLENLTLAASIAIELNISVKYIAKGIENCTNIDGR

SEQ ID NO: 164414 - protein, 295 aa, Unknown
  Bacterial polypetide isolated from the Sargasso Sea
MVFGCGGERDKPKRSIMGKIANDLCDKIYLTDDNPRTESPKKIRSEIKAKIYKSKLIEMPSRKEAVEKAIKDLRSDEILIVAGKGHENYQEYKTKKFFSDKACMIDAIKKKNKKLSNNLKINIINECLNKKINNNFFINEASINSKDVKKNNIFFGIKGKNIDGNKFADEALKKKASICILEKNYSKKNSRKIFVKDTLKTFSNLSCIIRRSLGTPIVAITGSAGKTSLKELIGQSLNTLIPTSYSKKSFNNKYGVPLSLFNINRKHKIGVFEIGMDKKGEIHKLSNLIQPDIGV

SEQ ID NO: 164415 - protein, 286 aa, Unknown
  Bacterial polypetide isolated from the Sargasso Sea
MLLKNLIKNFKQGKSDTKIRRISFDSRKIKKGDLFISIKGNKFNGNDYIDQAIKKGARVIVHSQPIKKKKKNIYIKVKDTREILAKLSSKFYKKKPKNIVAVTGTNGKTSVSDFFHQIFTLQKKKVGFIGTLGFKKNNNLKKRNLTTLDSLSLNKDLYEMKKEGIENVIIEASSHGLKQKRLNFLKVKAGVFTNLSRDHLDYHKNMKNYLNSKLLLFKNILEKKSSIITDTDIKQYKILKKIQKKRKLKIYTIGSRGNTLQILNHKIYKDHQFLEIKIRNKVYGIK

SEQ ID NO: 164416 - protein, 295 aa, Unknown
  Bacterial polypetide isolated from the Sargasso Sea
DSNKLESQKNVVKVEDVRIAAGIACSNFYNFPQNEVKLIGITGTNGKTSTSTILKSILDAKNEKTIQIGTSGIKPSIEINPGLTTPDIFDLYEILNYAVNENYKNVILEVSSHALSQRRIENIFFDITAFTNLTHDHLDYHKTMDEYFSEKLKLFNLNKDNGSSVVMIDDEYGKRIAELNSNIKCISLKNEDADYFCTSYSINSFGLAGTLAWDSETLDFESNLIGSFNLENLILAASIAIELNISAQSIAKGIENCTNIDGRLHLVENQKNQMIYLDYAHSPDAYFRTLKALEE

SEQ ID NO: 164417 - protein, 258 aa, Unknown
  Bacterial polypetide isolated from the Sargasso Sea
MRLKNFFKNLNKDFSNRSFKGFEFNSKKIKKNYIFFAIQGNKFDGNNFINDAIIRGASIIVSNKFKTGIDKGILYINTSDPRLALSNFASKFYNKKPNNIIAVTGTNGKSSIVNFYYQILKLNKKRVASIGTLGVKSNSFSSKLDNTTVDAITINKILSNLKNKKIENVILEASSHGLHQKRLHGINFSTSIFTNLSRDHLDYHKNYKNYFNSKLILFNELTKKNGNLIFDNDINYSHTLKKIAKKQKLKIIKIGASI

SEQ ID NO: 164418 - protein, 302 aa, Unknown
  Bacterial polypetide isolated from the Sargasso Sea
FAFKGNNTDGNFFIDDAIKNGSKIIISDKFKKSGWKNNILFLSFNNTRALLAQVCSKMFNKKPNNLIAVTGTNGKSSIANFYFQILNLNNLKVASIGTLGVKGFNIRKTFSNTTFDTIKINTILQKLKQKKIENVILEASSHGLYQNRLDGLKFNIGIFTNLTRDHLDYHRTFQNYFNSKLILFKKLMKKKSYAIYDNELKTASNLNRISKLNRINKFTLGSSNSNILILDHQFLKDEQKITFQFKNKKYSFSTQLIGRVQIKNLLMAIMAAIKSKIPLEKILKIIKKIKSVNGRLEKVGRL

SEQ ID NO: 164419 - protein, 291 aa, Unknown
  Bacterial polypetide isolated from the Sargasso Sea
VRPGYLFAALPSASANSGADGRDFIGDAMARGASAILAPEGTQIDNLAENTPCLITDENPRWRLSQFAARFYEIQPKHVVGVTGTNGKSSVAGFACQIWRLLGHTSGAIGTLGVDADGFRFGSSLTTPDPVALHSTLSRMATSGIDHLALEASSHGLEQYRLDGVRFAAAAFTNLSRDHLDYHSSEENYLNAKMRLFRHLLPVDGAAVLNADSTHFETFAEICRSAGHRVRSFGIQTSDIHIADVSALPDGLRLCITVKDQSLETRLNLVGGFQPTTCSPPSASWRRPAPI

SEQ ID NO: 164420 - protein, 262 aa, Unknown
  Bacterial polypetide isolated from the Sargasso Sea
KLKTVEGRFEKIGKIKNQSKVILDYAHTPDALKTCLLNIREQFPNKKITVLFGCGGNRDQNKRSKMGKIASVFADSIILTNDNPRFENPLKIRRDIKKGIKKKRITEISNRAIAITQAVYNLNSGNILLVAGKGHEKTQDIGNKKIFFSDRKVILNAIKHKNNNLSDNLKLNVVKEAAKIKKLPPSASFKTARINSQEVTKNDIFFAIRGKKNDGNKYVLQSFNRKASLAVVNKIQNKLNKNRQIKVKNTLKFLTDISKTFR

SEQ ID NO: 164421 - protein, 263 aa, Unknown
  Bacterial polypetide isolated from the Sargasso Sea
KNLVSECPNHLRETKISDLALDSRIVKKNNLFFALKGHHKNGANFIKEAIKNGAAAIITSKKDNHKRSIFIKHNKIKNLLFDTCEKFYKERPSNLIAVTGTNGKSSVAEFYKQIMLMSKKRVATIGTFGIFINNKKISNNLTTPDIITIHKILQKLKKKKIENVMIETSSHGLKQGRLGTIKFMSGVFTNFSRDHLDYHGSMSKYFYSKMILFRKNMKKKGSIILSKQLPELKKIKKITKKNLKLIYSNKYEKTFKKIKFHNL

SEQ ID NO: 164422 - protein, 222 aa, Unknown
  Bacterial polypetide isolated from the Sargasso Sea
MVGTLGHFINGKKINDINLTTPAYEELYRYGSSNKKEKNIYIFEASSHALEQNRLRNYPINIAAITNISKDHLDYHKTFSNYKKSKIKLFSNHLANNGFAIINSRLNISSELKKSLIKKNIKIKYFGNKNIKLIKINGFVYLNINYKKNKLENLKLKTNIELENLECAISCCLALNISQSKIVRVLPKITNPSGRLETIEYKKKKSKIIIDYAHTPDALKKI

SEQ ID NO: 164423 - protein, 230 aa, Unknown
  Bacterial polypetide isolated from the Sargasso Sea
MNEFEKILGIQLPKNIEISSVVNTTDKVIKDSIFFGLQGTRVHGSKYADKALELGASVVIHNDPDFNSNHKNIFYIKDLHDKLVLFLDAFYNIDINRHNFYAFTGTNGKTSAAYFTHQLLQKMNYDSVYIGTLGVKFNKEEIDTSFSKKTTPDIFELFEIVNSINCKMDSINVCMELSSHALDQKRIDKINRFYSLSIINIRSDHLDYHLNIDAYIDSKFGIFRLNSSIK

SEQ ID NO: 164424 - protein, 254 aa, Unknown
  Bacterial polypetide isolated from the Sargasso Sea
MDPIQLAFQLNKLKKQNIDHVILEASSHGLKQNRLDGLQFKTGIFTNLSHDHLDYHKNYSDYLNSKLYLFKRLLNKGSKVIADTSIPEFKKIKKISKKKNLNMKTILNHNNSLSLISHRYEGENQIIKIKYKNSTYSFSVKLFGKIQIKNILMAMLAAESKNLQFDKIVEKINETKPVNGRLQKIGKIKNNSMVVLDYAHTPDALKVCLKNLKDQFKDRKIYIVFGCGGNRDKFKRPRMGKIANYYCEKIYLTD

SEQ ID NO: 164425 - protein, 243 aa, Unknown
  Bacterial polypetide isolated from the Sargasso Sea
NYQRPSNLVAVTGTNGKSSIANFYYQILKINKIKVSSLGTLGTEGIKIKKKISNTTYDPIMLNNILKILKKKRIDNVILEASSHGLKQHRLDGLKFNLGIFTNLSRDHLDYHKTYKDYFDSKLILFKKLMKKNSSIIFDEDLIIAKIIKKIIKKYNFKPLSIGYANSNLKIIDHKYLGSEQYVKFLYKNNIYKFSTKLIGKVQIKNLLMSILAASKSNLNLKSILNSIKKIKSVPGRFEKVGK

SEQ ID NO: 164426 - protein, 286 aa, Unknown
  Bacterial polypetide isolated from the Sargasso Sea
HGDMAAYAAAKASLFPPSVPQRIINIDDAVGRQWCKQWTDGELLRYGWQHPAVHDVPASACVYAEDVRCSATGVTATLKTPWGCGRMQSPVLGSFNVSNVLAVAAMLGSVGIPFEDMLWSLSQLQPVPGRMQRIQQPQAPLVVVDFAHTPDALAQVLQALRAGCHGRLWCVFGCGGDRDRSKRSLMAAQAQQHADTVVVTSDNPRSEDPLAIMDDIRSGFQNQGSVCYIAAREQAIAHAVIAAAVDDVVLVAGKGHEQIQIIGQKKHPFCDVAQVHVALEQRSHCL

SEQ ID NO: 164427 - protein, 300 aa, Unknown
  Bacterial polypetide isolated from the Sargasso Sea
CLREKIFYFKTKLVGKIQISNLLMSVLAASKFLPMKKIVESLKFVKPVIGRLEVVQKLKNNSTIILDYCHTPDALNHCLQNIKDQYKLSKINLVFGCGGERDKQKRQIMGKIANQYCNKIYLTDDNPRNENPNLIRKAIKKFIKKNKLLEIPSREKAIKTSIEKIESGEVLIIAGKGHENYQEYKKKINFSDRYFIKKYSKIKNKTLSNYWKTNLFNEELKFLKLNKNINIENVSINSKKIIKNSVFFGLKGKNFNGSKFAAEANKNNALFSVIETSKKKLYQNKKVKVKNTLKTLSKIS

SEQ ID NO: 164428 - protein, 277 aa, Unknown
  Bacterial polypetide isolated from the Sargasso Sea
FKKIKKITINKRLKLYALNDKKNNLQVISHSFKGEAQSFKIKLNNSIQNINLNLIGKIQLKNVLMAIIAAKNSNIGLNKILNKISKLKPVEGRFEKIGKIKNHSKVILDYAHTPDALKTCLLNLREQFPAKKIIVLFGCGGNRDQNKRSKMGKIASYFADKIILTNDNPRLENPQKIRRDIKKGIKKKKIIEISDRAMAITRAIHDLNSGDILLVAGKGHEKTQDIGSKKIFFSDKKVILSAIKNKNINLSNNLKINVVKETGKIKRLSPFNIFKKS

SEQ ID NO: 164429 - protein, 216 aa, Unknown
  Bacterial polypetide isolated from the Sargasso Sea
MLLKNLISNLKPNFASLKIRGISSDSRNLKKGHIFISVKGNKFDGNKYINQAISKGANVIVHSRSIKKNKKTIFIKVKDPRETLARMSTKYYKKKPKNIIAVTGTNGKTSISHFFHQIFTNQKKRVGFIGTLGFKKNNYLKRRSLTTSDPLSLNKDLEEMKKAEINNVIIEASSHGLKQKRLDFLKIKAGIFTNLSRDHLDYHQNMNNYLNSKLIL

SEQ ID NO: 164430 - protein, 284 aa, Unknown
  Bacterial polypetide isolated from the Sargasso Sea
MPDIRLSGISADSREIKKGYLFVSLSGRKYEGNDFISDALSKGAAAVITDKPPKKDNGKDLPIFCLANLRQDLGEYASRFFGFPSKNMQIIALTGTNGKTSVTHFLAQVMQKRRFSPGIIGSLGYGEPGKLVSTDLTTPDAVRLQGILRALYDKGCEHVFLEASSHGLHQSRLSGVDIDIAVLTNISQDHLDYHGTMDAYKEAKAKLFTLGSLKKAVINKDDEYAINLQRLLSPDVEVKTYGCRQPADIRLISVSFNRKGISLSVSCSGFKFSLDLPLFGTFNV

SEQ ID NO: 164431 - protein, 258 aa, Unknown
  Bacterial polypetide isolated from the Sargasso Sea
MLLKNLIKNSPQSLRNLKIKGLALNSKDVKKGFIFFAVKGNQSNGENYINDAIKNGAIIIICSKSCKFQSTKIKVIKTKKVRKYLSEITSKFYKLKPKNIIAVTGTNGKTSVADFFYQILDINNIPVASIGTLGIRYRKKFIKTNLTSPDVITLHKNLEKLKKNKIDNVIIEASSHGLDQNRLDNLNLKAGIFTNFSQDHLDYHKTMKDYLRAKLILFSKLLPKKSYVIADKFIKEYSILEKISKNRKLRLLDINKKI

SEQ ID NO: 164432 - protein, 225 aa, Unknown
  Bacterial polypetide isolated from the Sargasso Sea
MKKVKDILYKISVETIIGSTEVNVEHITYDSRNVLKNSLFIALVGVDFDGHFFIDDAIKNGARVIICERLPSNIVDEKVYVVVNNSRLALGFIASNFYNNPSEKLDLIGVTGTNGKTTISTLLHKVFNSLDIASGLISTLEIKFGKRSISTTLTTPDPLIINSLLDEMVQLGIKKCFMEVSSHGIDQKRVSGLRFKGILFTNLTHDHLDYHKTFKNYRDVKKPSF

SEQ ID NO: 164433 - protein, 266 aa, Unknown
  Bacterial polypetide isolated from the Sargasso Sea
NNIRECLGKICSKFYSRKPKNIIAVTGTNGKSSVADFFHQILTLNRVSAATIGTLGVKIKKFKPTNHTSPDIINLHKELSNLKEKKIENVLIEASSHGLVQGRLNGINFKAGIFTNLSQDHLDYHKSMEKYLDAKLLLFRKLLKNNDYIITDKNIPEYKKLKNIAQKKNFRKKYINFLEKKYDLTKFKLIGDFQKKNLLMAIRACEIIGLSKKKISYSLDKLKAVKGRLELVKEFSDKTKVFIDFAHTPEAISTAINSLKSYLKRT

SEQ ID NO: 164434 - protein, 259 aa, Unknown
  Bacterial polypetide isolated from the Sargasso Sea
MLLKKLIENLKPEIGAIKINRISFDSRRTKKKDLFVAIKGEKYNGNNYINHAISKGAKVIIHSGKIEKNKKTKFINVKDTRNTLAELSTKYYKNKPKNIIAVTGTNGKTSVSDFFYQIFKLQNIKSGFIGTLGCRKNKFIKRRNLTTLDTLTLNQDLEEMTKKKINNVIIEASSHGLKQKRLNFLKLKAGIFTNLSHDHLDYHKNMKDYFKSKLILFNDLLKKKDTIITDTDIKQFKDIKKVQKKRNLKFLTIGSKSNT

SEQ ID NO: 164435 - protein, 286 aa, Unknown
  Bacterial polypetide isolated from the Sargasso Sea
KSNLGLNKILKVIPKIRSVEGRLEKIGNIKNKSKVILDYAHTPDALKISLLSLREQFPNKKIVLLFGCGGNRDQNKRLKMGKIASLYADQIYLTDDNPRLENPNKIRKDIKRGINSKKISEISNRAKAISTAVKNLTTGNILLVAGKGHEKIQEIGNRKIYFSDKKIILNAIKLKNLNLSNNLKLNLIKESSGDKKLNTNLTLKQARINSKEVKKNDIFFAIRGRKNDGNNFVEEALKQKASIVVVNKIKKKLNYKKQIKVIDSLKFLTETSSIFRENIDTKIIAI

SEQ ID NO: 164436 - protein, 269 aa, Unknown
  Bacterial polypetide isolated from the Sargasso Sea
LDTDIKEFKFIKSIADKRKIKINSIGFKSGTIKILSNKYIDNKQVIKILFNSKNFQLTIPLIGFFQIKNLLMAVLAALKCGLSYKKIFNQLHKIKSVDGRLELVSKLKNNSMIVVDFAHTPDALKQTLIAIKKQFKGEIVIVFGCGGERDKKKRLHMGRIANKYCRKIIVTDDNPRNENPKKIRKSIIKGCKKKAISIGNRKKAINTGIKELRSNEILLIAGKGHEKTQDYGNREINFSDKKVAKQIISKRKFYFKKSNYQNLLLKKYF

SEQ ID NO: 164437 - protein, 271 aa, Unknown
  Bacterial polypetide isolated from the Sargasso Sea
IYPKLNKKYKNIKFKGISFDSKNIKKNFIFFALKGSNSDGNKYINDAIKKGSKIIISENCQTGFKEKILYLKNENPRKLLADFSVKLNNEKPKNLIAVTGTNGKSSIANFYYQILKINKIKAASIGTLGVNGINFKEKNNNTTFDPIQINKLLKVLKTKKINNVILEASSHGLKQHRLDGLKFNIGIFTNLSRDHLDYHKSFKDYLDSKLILFKKLMKKNSYIIYDNDLIISSKLKYISKKRNLKNLTLGTKKSKLIIIDHKFENMIQKVK

SEQ ID NO: 164438 - protein, 305 aa, Unknown
  Bacterial polypetide isolated from the Sargasso Sea
YVKKIIFFFSIKGNEKDGNKFISHAISNGAKTIIYNKKFQGFKNGVLYLRFKNVRKILAELSHKIFYSKLNNLIAVTGTNGKSSICNFYFQILNLNKKKAASLGTLGIKTASRILPLSNTTMDPIHLSKCLKNLKKKKINNIILEASSHGLKQHRLDGLKFNTGIFTNLSHDHLDYHKNFNNYLNAKLYLFKNLLSKKAKIITDKDIPEYIKILKIAKEKNLKLKTISNQNGDIKILLHKYIGEKQFLKIKYKNSIYSFYLNLIGKLQIKNLFMAILAAENKNLKFKNIVKILNKIQPVNGRLEK

SEQ ID NO: 164439 - protein, 257 aa, Unknown
  Bacterial polypetide isolated from the Sargasso Sea
KISKNKKLKLNFILSDKKNLGIKVVSHIFDGEKQIVNLNYKKKNLKFRVNLIGKIQIKNVLMALLAAEKSGVKITNIIKSLNHLKPINGRLEKIGQIKNNSKVILDYAHTPEALKTVLENLKEQFPNNKISIVFGCGGNRDIKKRSKMGKIVNIFCHQIYLTDDNPRNENPNLIRKEIKKGIKIKNLFEIADRKEAINRAILNLKSSEILLIAGKGHETTQTYKNKVRFFSDRDVIKVAIRNKNKDLSTNVKLNIIQ

SEQ ID NO: 164440 - protein, 296 aa, Unknown
  Bacterial polypetide isolated from the Sargasso Sea
LKKEGFEKDVLYLNCQNPRKLLAETASNIYKRKPKNLISITGTNGKSSVANFFIQILKHCNKTAASVGTLGVNSMGINIPLINTTLDPLSLNKILENLTKRGIKNVILEASSHGLKQHRLDGIKFDTGLFTNFSRDHLDYHKSFKDYFDSKMILFNELMKKNSQVIYDRDILESKKIEKIIKKKKLKYYCLGKKKSDLKVTEHSFVGKKQKIAFLFKNQKYSFESNLIGAIQIKNLLFAALAANKILPMKKIIKSLSKIKSVSGRFEKIGNLKNNSIVILDFAHTPQALKICLENI

SEQ ID NO: 164441 - protein, 279 aa, Unknown
  Bacterial polypetide isolated from the Sargasso Sea
KSCIKNVKEQFKFRKINLVFGCGGERDKYKRKTMGNIADKYCDKIYLTDDNPRSEDPIKIRRDIKANISKSKVFEIPSRERAIKSAIMDIKSNEVVIVAGKGHEVYQEYVSKKFFSDKKFIEKFIRIKNKSLNRNWKTNIVSEITKKKIEKNININEVSIDSRKTKKNNIFFGIKGKNFDGNKFVNQALKNGASIAINQNKPVNQVKNKIYVKNSLKIFSESAKLVRISSNISSIAITGSAGKTSLKEMLGQMLGKLCQTSYSKKSFNNKYGVPISLFT

SEQ ID NO: 164442 - protein, 230 aa, Unknown
  Bacterial polypetide isolated from the Sargasso Sea
PKLNKKYHGLSFKGIAFNSKEIKNGYIFFALKGNNTDGNFFITDAIKNGSKIIITDKLKINGWKNKVLFLNHNNPRKLLAKFSSKIFNKKPNNLIGVTGTNGKSSIANFYFQILTLNRIKAASIGTLGVAGLKVKKNFSNTTLDTIQINKTLKKLKERKIENVILEASSHGLNQNRLDGLKFDIGIFTNFTRDHLDYHKTYKNYLNSKLILFKKLLKKKSYAIYDNELKI

SEQ ID NO: 164443 - protein, 257 aa, Unknown
  Bacterial polypetide isolated from the Sargasso Sea
AKYSGINLDKILNTIPKLKPVVGRFEKIGKIKNQSKVILDYAHTPDALKTCLLNLREQFHNKAIKVLFGCGGNRDQNKRSKMGKIASDFADSIILTNDNPRFENPKKIRNDIKKGIKKKRITEIANRAIAIKQAIHNLNSGDILLVAGKGHEKTQDIRNKKIFFSDRKVILNAIKDKNNNLSNNLKLNVVKEESKIKKLSPSISLKTARINSKEVTKNDIFFAIKGKKNDGNKYVVQSFKRKASLAVVNKIQNKLNK

SEQ ID NO: 164444 - protein, 252 aa, Unknown
  Bacterial polypetide isolated from the Sargasso Sea
LSKKRGLSIYTLNNFAKNFKILSHRFSGDNQVLKIRYKNLIHEINLNLIGKIQVKNLIMAIIAAIRSNINLKKILNVIPKIKSVTGRLEKIGKIKNHSKVILDYAHTPGALKTCLLNLREQFPEKKILLLFGCGGNRDQDKRSKMGKIADIYADEIFLTDDNPRYENPAQIRKEIKKGIKRKKIYEVSDRLKAIKKAIERLNTGEILLIAGKGHEETQDIGKQKIHFSDKKIIIREIKIKNSNLSNNLKLNI

SEQ ID NO: 164445 - protein, 230 aa, Unknown
  Bacterial polypetide isolated from the Sargasso Sea
IDYGRHAKDIVILNGQICGSGQDLELEIFGVTHQSRLPLPGDFQTANALAAVGLAVSTGMPVDRAVQALSKLKSVPGRMNLVANHPNGANIYVDYAHTPDALRSMLSALRAHVKGGLHIVFGCGGNRDPGKREEMGRLAASKADYVIVTDDNPRTEDPESIRKEILIGCPGATEVSDRAEAIAASILALAPGDALVISGKGHEVLQDIGGQMVPFDDAEIARQVVQGLIA

SEQ ID NO: 164446 - protein, 107 aa, Unknown
  Bacterial polypetide isolated from the Sargasso Sea
MEVSSHGLVQGRVDAVPFDVAVFTNLTRDHLDYHGDMKNYAAAKQMLFCFDALRHGLVNLDDPVGAAWLSELANVPAKMWGFSIEAHTEAAFYTKNAQFNDQGVQAT

SEQ ID NO: 164447 - protein, 238 aa, Unknown
  Bacterial polypetide isolated from the Sargasso Sea
IKGIQFNGSDFINEAKENGAFLIITDKSEDKTVISTNEISTRLVYTILLASFYNKQPKEIIGVTGTNGKTSTVEFCRQLWVQAGWKAASMGTLGIKIENGLNKSFLKSPKQNLTTFDPGELYKELCSLEHQEISHLALEASSHGLDQFRLDSVKFTGAIFTNLSHDHLDYHKNIENYFHCKKRLFTEILKKNSSIAINIDDDFGKRLFNEIKNNRHIIVTFGKSSDANVKIISIKQND

SEQ ID NO: 164448 - protein, 270 aa, Unknown
  Bacterial polypetide isolated from the Sargasso Sea
SKLIPVKKIVDKIKKIKSVNGRFEMIGQIKNNSRVILDYSHTPEALRTCIKNIRKQFSFSRIILVFGCGGDRDKIKRSIMGRIANEFCDKIILTDDNPRNEDPKKIRDQIKVKINKKKFIEISSRENAIKKSIFELKSGDVLIVAGKGHENYQQYKKKIKFSDKSIIKKYIILKNNKLSREWKTNILKESLKNPKVRNKSNIQNASINSNKIPKNSIFFGIKGKKLDGNKFANAAIKNGAVLSIVDKNFSKKNKRKIKVKNSLKTFSKVQ

SEQ ID NO: 164449 - protein, 254 aa, Unknown
  Bacterial polypetide isolated from the Sargasso Sea
MLLGNYFHNINKNYKNFSFSGISFDTKSIKKNNIFFAIKGNTIDGNKFIPEAIKKGSKIIVTEKKVNQFQNGILYIHTKNIRKLLAETAFKIYNKKPKNLIAVTGTNGKSSVADFYYQILKLNNKKAASIGTLGVKSKRINLNLSNTTIDPIKLAKILSKLKTQKIENVIMEASSHGLKQNRLDGLKFNSGIFTNLSQDHLDYHKNLKNYLKAKLYLFENLIQKRGNVITDQLIPEFKNIKKVTINKKLKLHTL

SEQ ID NO: 164450 - protein, 261 aa, Unknown
  Bacterial polypetide isolated from the Sargasso Sea
FIEEAILKGASVIVCSTRCNFKHKTVLIIKKNDLRGFLSEISSKFYNLKPKNIFAVTGTNGKTSVADIFYQILRLLKKPVASIGTLGIKYNDKIIKTNLTSPDTVFLHKSLEFLKKKKIDNVIIEASSHGLDQKRLHNIIFKAAIFTNFTQDHLDYHKNMSSYLNAKLILFREILNKGSTIISDKDIKPFPNLKKIAKKKNLRILDIAKVIDKIKYVATNSSSDFKYKNLAMSIKAIGLCGFKERQILGKINQIKEVSGRL

SEQ ID NO: 164451 - protein, 294 aa, Unknown
  Bacterial polypetide isolated from the Sargasso Sea
KILNTIPQLKPVEGRFEKIGKIKNQSKVILDYAHTPDALKTCLLNLREQFPNKAITVLFGCGGNRDQNKRSKMGKIASDFADSIILTNDNPRYENPQKIRRDIKKGIKKKRITEISNRAIAIKKAIHNLNSGDILLVAGKGHEKTQDIGNKKIFFSDRKVILNAIKNKNNNLSNNLKLNVIKDTAKIKNLSPSTSLKIARINSQEVTKNDIFFAIKGKKNDGNKYVAQSFNRKASLAVVNRFQNNLNKSRQIKVKNTLKFLTDISKTFRKSIDTNVIAITGSCGKTTLKELLGN

SEQ ID NO: 164452 - protein, 263 aa, Unknown
  Bacterial polypetide isolated from the Sargasso Sea
IKKEYIFFAFKGNDTDGNFFIEDAIKNGSKIIISDSLKKNYWKNNILFLSYKNPRKLLAHFSTKIFNKKPNNLIAVTGTNGKSSIANFFFQILNLNKVKVASIGTLGVNGLKIRSSSSNTTFDTIQINKILNRLKEKKIENVILEASSHGLDQNRLDGLKFDTGIFTNLTRDHLDYHKTYKSYLESKLILFKDLMKKKSHALYDDTLKISSNLNRISKLNNIKKFTIGNAKSSIVIIEHQFLKDEQKIMLKYKNKKYSFVAKL

SEQ ID NO: 164453 - protein, 286 aa, Unknown
  Bacterial polypetide isolated from the Sargasso Sea
IKGISFNSKKINRGDVFFAIKGNKTSGNRYANEALKKGASAVVSNKKIKLKNKNIPLILVNDTRKALAEACSNFYNKKPSNIIAVTGTNGKSSVADFFCQIFSLNNIPAASIGTLGVFSKNYNKKTKLTSLDPLSLHKHLQNIKKKKINHVILEASSHGLAQKRLDNLNISTGIFTNLSHDHLDYHRDMKSYFASKMYLFKNLLNKNSHIISDEENKEFTILKKISQKRRIKMITIGKNTGDIKILNLIYNENKQIVKVLINSKIFILEIPLIGFFQVKNLLMAII

SEQ ID NO: 164454 - protein, 291 aa, Unknown
  Bacterial polypetide isolated from the Sargasso Sea
IKKKGNIITDDKIPEFKKINKIAKQKRLKIITLNDKKNDFRILSHSFKGEIQLLKVKYNNSIKEINLNLIGKIQLKNILMAVFAAKKIISLKKILDIIEKIKPVEGRFEKIGKIKNKSKIILDYAHTPEALKTCLLNLREQFPDKKLCLLFGCGGNRDQNKRSKMGKIASDFSDKIYLTDDNPRFENPDKIRRDIKKGIKRKKIIEISNRAKAIFEATKNLNTGEILLVAGKGHEKIQDIGKRKIYFSDKKIILKAIKIKNLSLSDNLKLNIIKEISGNKRVSSSLSISKQ

SEQ ID NO: 164455 - protein, 288 aa, Unknown
  Bacterial polypetide isolated from the Sargasso Sea
SSLDGNKFIKEAISKGSRIVISEIHREGFKKNILYLKSKNPRKLLSIFATKLNRKKPNNLIAVTGTNGKSSIANFYYQILKLNRIKVSSIGTLGINGINKKKESSNTTLDSIQINKLLERLKQKKINNVILEASSHGLKQHRLDGLKFNIGIFTNLSRDHLDYHKTYKNYLNSKLILFKKLMKKNSYIVFDNDLNISSKIKNISKKNNLKNLSIGTKGSNLKIVDHKFSNLEQKITFSLNNNTFYFSTKLIGSVQIKNILMSILAAYKSKLSLKNIINTINKLKPGSR

SEQ ID NO: 164456 - protein, 276 aa, Unknown
  Bacterial polypetide isolated from the Sargasso Sea
IISDIKYEGYKKNILFLHSSNTRKLLSETANRIYNKKPKNLIAVTGTNGKSSIASFFFQILKLNKKKVASIGTLGINLNSLSLNTSNTTIDPITLNKTLHEVKKKKIENVILEASSHGLKQNRLDGLKFNIGIFTNLSRDHLDYHKSFNDYLKSKMILFNRLLKKNSKIIYDNSILESKLLKNISIKRKLNPITIGEKDSNLKIIKHKFIENKQEVKFIFKNNEYFFVTNLIGKIQIKNLIMAIIAANNCGLSMKRIIKSISRIKPVKGRLNKWKL

SEQ ID NO: 164457 - protein, 266 aa, Unknown
  Bacterial polypetide isolated from the Sargasso Sea
IKDISEKQKKLIIRGLATNSKKVKKGYIFFAVKGLRVNGEKFIKEAVGKGASVIICSNKCKYNNERILVKKTTDIRSFLSKICSKFYKLKPKNIIAVTGTNGKTSVADLFYQILTINRIPAASIGTLGIKYKNKIVKSNLTSPDTILLHKTLENLKKNKIENVIIEASSHGLDQKRLHHINFKAGIFTNFTQDHLDYHKSMKLYLKAKLVLFNKILKRKKIIISDKSSKVFPILKKISKKRNLKIRDISTIKKKLNDQFSEKFNEF

SEQ ID NO: 164458 - protein, 301 aa, Unknown
  Bacterial polypetide isolated from the Sargasso Sea
LIRGHKLNENEFIKLAFERGASLVIADTETEDTSDVIYFKDLKQHIGIFASRFYGDPSLSLKTICITGTNGKTTAVETFSGLSNLLGSRCAYMSTVNFSMDGLSLEKASLTTPDAISIHRNMKNAIHNDAKYLAMEASSHGLEQQRLNGIEIDYAVLTSFSHDHLDYHGDINHYKSAKEKLFFDLHPKSNIICIDSSFGRKLYEDLLKINPNTYSVSIKQKADFQASFKESPLGIKVNLLALDQELTFELRTISKYLASNIICSMAILSLEGFNNSLLEKYAQDINLPSGRLEKIVKDNLT

SEQ ID NO: 164459 - protein, 273 aa, Unknown
  Bacterial polypetide isolated from the Sargasso Sea
VILDYAHTPDALEICLKNIREQFKLRKINLVFGCGGERDRSKRKIMGKIANNYCNKIYLTDDNPRRENPNKIRNEIKVSILKNKLFEIPSRNLAIKKAISSIKSDEILVVAGRGHEIYQEYKTKRYFSDRNCIVKAINKKNKHLNQNWKCNVVEEILGRKLNNNIKINNASINSKKIKKNNIFFGINGKNLDGNKFADFAIKKGASLSIVDKNYGKKNIKKIKVNNSLKFFSKCSSLIRISSNICSIAITGSSGKTSLKEMLGRSLNKIYKTT

SEQ ID NO: 164460 - protein, 309 aa, Unknown
  Bacterial polypetide isolated from the Sargasso Sea
YFKEAEIDGISNNSKKIKKNFIFFAFSGDKTNGNLYIDEARKNGATIIISQEKQTKDVIKLPKKNYSLIYAYLCSSFYSKKPKNIIAVTGTNGKTSVTDFCRQLWNFYGLKSASLGTLGLRDSTQNYYHKIGNNLTTLDSSELNKQLSKLYDKQISYVALEASSHGIIQNRLDGINFNGAIFTNLSHDHLDYHKNMAQYFNAKKKLFTEHLNDGTCVSINLDDQYGMKLYNEIKNKNFKFVNFGFNEKSELKLIKINKIEKFWQLEILYQNKSYKTNIGLVGHFQIYNALAAASICLGLGMKEDSIFKS

SEQ ID NO: 164461 - protein, 217 aa, Unknown
  Bacterial polypetide isolated from the Sargasso Sea
MLLGQVFKNIKKKYKLIKFKNIKFNSKECKLNDIFFSISGNNLNGNNYINNAIVNGAKIIVSNLKFEGFNKNKILFIHSKNPRKLLAEVSSRYYNTKPKNIIAVTGTNGKTSIANFYYQILNLNKKNVAAIGTLGVVSKKFNFKTDNTTIDPIKIHKILKKLKNLKIDNVILEASSHGLKQYRLNGINFNTAIFTNLSRDHLDYHKTFKDYLNSKLI

SEQ ID NO: 164462 - protein, 280 aa, Unknown
  Bacterial polypetide isolated from the Sargasso Sea
PKLKSVEGRLEKIGEIKNNSKVILDYAHTPAALELALLNLKEQFPRNKINLVFGCGGDRDFKKRSIMGKIAEKYSDIIYLTDDNPRNENPSKIRKDIKKGIKKTKIKEFSNRKKAIHKAIMSLNTGDLLLVAGKGHEKFQDYGEKKYFFSDQKVILKSIKLKNRSLSNNLKLNIIKEVSRSKVSNKLVIKNICINSKMIKRNDIFFAIKGKRFDGNKFVSEALKRKSSLAIVNKIDKKAFKSKQIKVGNTLSFLTKCSSIYRENINAKIISITGSWEKQL

SEQ ID NO: 164463 - protein, 296 aa, Unknown
  Bacterial polypetide isolated from the Sargasso Sea
MSTINFSKDGFILQKSDLTTPDAIKIHKNIKDSLASGAIYIAMEASSHGLEQDRLIGLDIDYAILTSFSHDHLDYHGDIQSYQSAKEKLFLDLNPKKNIVCIDSSFGKKLYSKLLKNNKETYSISIKENADFHASFEKSPIGLMVNLKAFEKNFSFELKTFSRYLASNVICSMAVLILEGVKLSDIAKIAKDIVFPQGRLERIFKNEQVIYIDYAHTPEALECTLKELNNIHNEPIWCLFGCGGNRDKDKRPLMGKIAQKYSNHVVITNDNPRDEDEMDIINDIFSEVNEMEQISI

SEQ ID NO: 164464 - protein, 254 aa, Unknown
  Bacterial polypetide isolated from the Sargasso Sea
MGKIANKLCNYIYLTDDNPRSENPENIRAGIKKSILPSKMIEIPSRKLAIKKAILNSKSDEVLIIAGKGHENTQEYIKKKKFSDKDNIRKSIILKNRFLSNDWKLNILKEIINNKKLDRIKNFKISTNSKEKNKGKIFFGIKGKSFNGNDFADEALKNGAKLVILQNNKNDSKKKIYVKSTLELLTKFSQMIRISSYASQVAITGSSGKTSLKELLGQCLQKNYSTTFSKNSFNNKFGLPISLINLNKNTTYGI

SEQ ID NO: 164465 - protein, 246 aa, Unknown
  Bacterial polypetide isolated from the Sargasso Sea
IQGNKFDGNNFINDAIKKGAHVIVSNKFKTGIYKGTYYINVIDPRLVLSNFANKYYNNKPNNIIAVTGTNGKSSIVNFYYQILKLNKKKVASIGTLGVKSNGVSSELNNTTVDAVTINKILSNLKSKKIENVILEASSHGLHQKRLHGIKFSTSIFTNLSRDHLDYHKNYENYFNSKLVLFNELTKKNGNLIFDEESKNSKTFKNIAKKKKLNLLSIGKSNCDLKIDSIKILNNYQYVKFSYKNKE

SEQ ID NO: 164466 - protein, 283 aa, Unknown
  Bacterial polypetide isolated from the Sargasso Sea
TNLAPEHLDYHGTMESYYKAKLRLFTMLAIDATAVVNISDGFGKRILKKSSAPVITFSNSDQNSIYYQSKKISITGITGKIIAGHDSYSIKSKLTGDFNCENILAAVSVAHALGQSKIDIEEGIQNCSLVPGRMEIYGIASGANVIVDYAHTPDSYEKVLYTLKNIIPDSSNMYVVFGAGGDRDTKKRPEMAKIAEKFANHCFVTPDNPRTEDPENISNEIAAGFKGNAFTIFSDRGRGLRAAIERTDNKDIVVVLGKGREEYQEIKGKKVIYSDIQIIREYK

SEQ ID NO: 164467 - protein, 278 aa, Unknown
  Bacterial polypetide isolated from the Sargasso Sea
NNYQLIKILHNKKKYILKINLIGSIQIKNLFMAILACKICGLSIQNIFKVINKIRSVNGRLEFIRCLPNQSKIFLDYAHTPEALKNAIISLEEHFNKKITVIFGCGGERDRSKREKMGKIVNKLCEKIIVTDDNPRNENPSKIRKQIIKAIDERKVKEISGRKKAITFALKNSSPYEIILVAGKGHENYQNLGKKEIFFSDKITIKKVHLGEISNKKNQLKYNDIIINKILKNKKENLFSGVSINSKTIKKNNLFVAIKGKNKDGHNFLNQAISKGAN

SEQ ID NO: 164468 - protein, 285 aa, Unknown
  Bacterial polypetide isolated from the Sargasso Sea
SNIIGVTGTNGKSSVADFFYQILSLNKIPVASIGTLGIHSKKYKKEIQLTSPDPVSLHKNLEILARHKINNVILEASSHGLEQKRLDHLNFKIGIFTNLSHDHLDYHKNMKSYFNSKMHLFKNLLNKDSKIITDEENKEFKFLKNISTQRKIKRITIGNNSGNIKVLYNKYLENKQFVKISINSKISTLEIPLIGYFQIKNLLMATLAASCCGLDLNKIISKLNKIKPVSGRLECVSTLKNNSNIIVDFAHTPEALKESLISIKKQFKKKIVIVFGCGGERDKKK

SEQ ID NO: 164469 - protein, 299 aa, Unknown
  Bacterial polypetide isolated from the Sargasso Sea
LIKNCPKDLENINVKGLSSDTRDLKKGELFFALKGSENNGEKFVSLALKKGACAVISSKKIRGNTKVIKNKNVKKCLANTCSKFYFKKPKNIIAVTGTNGKSSVADFFHQILSLNNIPAATIGTLGIKTKSIKKNKLTSPDIISLHKELSFIKEKKIENVIIEASSHGLDQGRLEGINFKAGIFTNLSQDHLDYHKTMKNYLNSKLILFKKLLKKNSYVITKKNIPEFKKINSIVRQRRLRSKFIDYFEKEYDFANFKLIGEFQKDNLSMAVKACEILKINKNDISKCFDKLKSITGRY

SEQ ID NO: 164470 - protein, 263 aa, Unknown
  Bacterial polypetide isolated from the Sargasso Sea
NKFINEAITKGAAVIITNKKVKYYSKKVPIILVLDARKSLAEACSNFYKKKPKNIIAVTGTNGKSSVADFFYQILNFNNIPVASIGTLGIKYKGYSKKNKLTSMDALRLHQNLEKLSENKINHVILEASSHGLKQKRLDNLNINLGIFTNLSHDHLDYHKNMKSYLHSKLYLFRSLLKKNSKIITDTDNKEFEIIKKNTKKKGIKIISIGSNFGDIKILENRYIENKQLVKIEFNSKIFSLGIPLIGFFQVKNLLMAILAATN

SEQ ID NO: 164471 - protein, 135 aa, Unknown
  Bacterial polypetide isolated from the Sargasso Sea
KNILMAIIAAKNSNISLIKILNVLSQLKPIDGRLEKIGKIKNRSKVILDYAHTPDALRICLSNLREQFPNKKIILLFGCGGNRDQNKRFKMGKIACDYSNEIYLTDDNPRFEDPRKIRDDIKKGIHDTLIKEIPN

SEQ ID NO: 164472 - protein, 312 aa, Unknown
  Bacterial polypetide isolated from the Sargasso Sea
KVKKLKRITFFFAIKGNNVDGNNYIQSAIKNGSKIIVSERKKNKFYKGILFINTKNIRKLLAEVSFKIFNNRPNNLIAVTGTNGKSSIAEFYYQILRLNNKKVASIGTLGVKSKNDNLNLSNTTSDPIQLGQILERLKNQKIDNVIMEASSHGLKQNRLDGLTFNSGIFTNLSQDHLDYHKNLNDYLKSKLYLFRNLIKKRGNVITDAEISEFNKIKKITINKKLKLHTLNGKNNFKILSHSFKGECQILKIQHNKIIKDIKINLIGKIQLKNLLMSIIAANQSNLKITKILQIIHRIKSVEGRFQQIGKLK

SEQ ID NO: 164473 - protein, 306 aa, Unknown
  Bacterial polypetide isolated from the Sargasso Sea
MRSFGGLKKKEIDFALKKIKSVDGRLELIKILPNNSKVYIDFAHTPGALSTVLKSLRKNYTGKISLVFGCGGERDQKKRGEMAKIARRLTDKIYVTDDNPRRESPKKIREMIIKKLKKANYLEIGNRSKAIKTAIQKSEPGEIILIAGKGHETTQDYGKKILNISDRSIIKNANFIGKKFNKSNYNKHLNSEILKKIVDKNKKFTFEGVSFNSKEIKKGNLFIAIKGIRNDGHKFVNEAIKKGANFCVVSKNIKVRNKSHLIKCDNTIKFLNNLAFLKRTLSKAKIIAVTGSSGKTTVKTLLGKML

SEQ ID NO: 164474 - protein, 272 aa, Unknown
  Bacterial polypetide isolated from the Sargasso Sea
MYSSNFLQELKDLENFRDIKITSIHLDSREVKEGGLFFAINGHDKDGSDFISSALSNGASLVISDTYQKYAERVIYFEELKKYIGIFASRFYNFPSSKIKSICVTGTNGKTTSVETFANMSNLLGYKSGFMSTINFSKDGLILEKSDLTTPDAIKIHKNIKDSLESDAIYIAMEASSHGLEQDRLIGLDIDYAILTSFSHDHLDYHGDIQSYQSAKEKLFLDLNPKKSVVCIDSSFGKKLHSKLLKSDKETYSISIKEDADFHASFEKSPIG

SEQ ID NO: 164475 - protein, 234 aa, Unknown
  Bacterial polypetide isolated from the Sargasso Sea
MLLGELIKNIKPAYKSIKFNNIRFNSKDCKTNDIFFSIQGNKLKGNNYIKDAIKNGSKIIISNLNFEGFNKEKILFIKNKNPRKALTDAASIFYKKKPKNIIALTGTNGKTSISNFFYQILSLSKKKVAAIGTLGVLSKKIKLKTNNTTIDPIKMHQILQKLKNSNIDNVIIEASSHGLKQHRLDGLNLKTALFTNLTRDHLDYHKTFKDYLNSKLILFNKLLLNKGNIIFENG

SEQ ID NO: 164476 - protein, 220 aa, Unknown
  Bacterial polypetide isolated from the Sargasso Sea
PNLNKKYHKISFKGIAFNSREIKKGYIFFAFKGNNTDGNLFIKDAIKNGSKIIITDKLKKNVWKNDILFLSFKDPRKLLALFSSKIFNKKPNNLIAVTGTNGKSSIASFYFQIANLNKLKVASIGTLGVNGLKIKKNFSNTTFDTIQINNILQKLKQKKIENVILEASSHGLNQNRLYGLKFDVGIFTNLSRDHLDYHKTLKNYLNSKLILFKDLMKKNS

SEQ ID NO: 164477 - protein, 300 aa, Unknown
  Bacterial polypetide isolated from the Sargasso Sea
TFKDYLNSKLKLFRLLMKKNSTIIFDNDLPISNIFKQIGKSKKLKSITIGVKNSDLNINKIYYRDELLLVEFNYKKKNYLIKLKLIGKLQIKNLLMACLAAEKSGLKFSKIISNINKIKPVEGRLQQMNKIKNNSKVILDFAHTPDALKYSLQNLKEQFPFSNLNIVFGCGGNRDIEKRPLMGAIANKYCEKVYLTDDNPRDENPKKIRSQIKSKIGKKKLIEIPSRRSAISKAIYSLKSGDILLVAGKGHEKFQQYGSKKIIFSDKLIINQEIKKKNNKLFNDLKLNILNENCGLKKIK

SEQ ID NO: 164478 - protein, 35 aa, Unknown
  Bacterial polypetide isolated from the Sargasso Sea
VLIAGKGHEDYQILGTEKVHFDDREQAEQALRGRL

SEQ ID NO: 164479 - protein, 228 aa, Unknown
  Bacterial polypetide isolated from the Sargasso Sea
RFVDQALRAGAAAVLVEGHEWDPSQSRTNCFPVDDLKKQVGLIANRFFGSPSHALCVIGITGTNGKTTCASLLAQALGLLGHQSGLIGTTGWGMTGDLQPAALTTPDAITLQSQLADLVEQGADSVCLEVSSHAIDQGRIEGVEFNSALFTNLSRDHLDYHQTMERYAETKLLLFRRTELESVIINVADAVGCAFASQEFSAKLWTYGHDDSADVFPVKIDVESGGIT

SEQ ID NO: 164480 - protein, 284 aa, Unknown
  Bacterial polypetide isolated from the Sargasso Sea
MQLRNFIPDIDKNYFSRICINSSNVKKNDIFFAIKGNKYDGNKFINIALKKGAKIIISEKKKKIKKEGIIFVKTSKIRKLLAETCYSFLKKKPKNLVAVTGTNGKSSIADFYYQILNLNSKKVASIGTLGVRYKNKKKKLNNTTLDPISLCKTLVKLRHEKINHIIMEASSHGLQQNRLDGLMFDTTIFSNLSHDHLDYHKNMRNYLKTKLYLFEKLTKKEGHIITDASIPQSKEIKKISNKKKINLNLIFDNKKGIELISHKFKGEKQILKNKFKNISYHFEF

SEQ ID NO: 164481 - protein, 299 aa, Unknown
  Bacterial polypetide isolated from the Sargasso Sea
LTTENPLFIRKFLKKVQNHTRYVFFEASSIGINQKRLDGLEIKHVGFTSFAEDHLDYHQTTSNYISSKLELLSNRSLETLAFNQDMNITKEIKQNANARSMFSISSSNKKAEIYYEILDIDENGWIRFDTFTPWGQFSSNARLWADYNVLNLLISLPYYYYCFGEIKSFFRKIENILLPNGRFEVLDFKTKHKKVIIDFAHTPEAMEKLLSQLSINYKNKIFLVFGCGGDRDKGKRPKMGAIAEKYATKIFLTSDNSRSESTDEIIDMIAAGIKNKFKIQINIDREKAIQLAINSMSHD

SEQ ID NO: 164482 - protein, 169 aa, Unknown
  Bacterial polypetide isolated from the Sargasso Sea
MNRTLSELKKLKFEKVYLEASSHALEQERLKDINIENAVFTNLTHDHLDYHKNMKNYFNAKRRLFKDFDIKNAVINVDTQYGEKLAKKIDRNIKLLTFSNKKKTANAYIKNYKLNENGIDFVLDVELNQIKCSINLYGFYNIENLSLAILNLINQGYSPKEIEKSLKNL

SEQ ID NO: 164483 - protein, 249 aa, Unknown
  Bacterial polypetide isolated from the Sargasso Sea
FKSKIHNIIAVTGTNGKSSICNFYFQILNLNKKKVASLGTLGVKTQSKNFTSTNTTMDPLQLSKYLKYLTNKKIDNIILEASSHGLKQHRLDGLKFNKGIFTNLSHDHLDYHKSYNDYLNAKLYLFKYLLSKKATIIADKDIPEYKNILRISKEKKLSLKLISKKNGNIEILEHKFIGEKQFLKIKYNNLKFSFYLNLIGKIQIKNLFMAILAAENKSLKFDKIVKVLNKIKPINGRLEKIGKLKNNAI

SEQ ID NO: 164484 - protein, 283 aa, Unknown
  Bacterial polypetide isolated from the Sargasso Sea
NFNKNKYFSAITSNSKFTNNKTLFVYNKNTKVKKIYLDEAIKNKTPAIISNKYIKNLKIPQFVVSNINFDTYSLLNKLHSNPPFKTVAVTGTNGKTSVVWYISKILNSLKYNNTTVGTLGHFINGKKINDIKLTTPAYEELYKYGSSNKKEKNIYIFEASSHALEQNRLRNYPINIAAITNISKDHLDYHKTFSKYKKSKIKLFSNHLVNSGFAIINSRLKISSELKKKLIKKNVQIKYFGNKNIKLKKINDFVYLYINNKNYKLENLKLKTNIEFENLECAI

SEQ ID NO: 164485 - protein, 174 aa, Unknown
  Bacterial polypetide isolated from the Sargasso Sea
MLDQSKTYAYDSRQVKSGDCFICLPKGDVYIEDALNNGATDVIHLNRKDFAISANDYFDDPTTRVSLIGITGTNGKTSVAYFTAQLLEAMGHNVLVIGTINSKLTTPESWDILAKIKAHADNGGTHVVLEVSSHGIDQYRVYGFNFHVKCLTNIYPDHLDYHQTFEKYKSTKLH

SEQ ID NO: 164486 - protein, 267 aa, Unknown
  Bacterial polypetide isolated from the Sargasso Sea
MKDDGCIDGLIIKGVTCDSRQVKPGYLFAAFQGTNENGCTFVSEAIFKGAAAIILEKNLAKTLNCKEVPIITVSNSRKAYAVISSNVYKPSPKTIVAITGTNGKTSSASFLRQIWSGLGVPSCSGGTLGLELAGPNLNKNKNLISKSNLTTPDSADLHRYLQQLSIHNINNVVLEASSHGLAQYRLDGLQISAAAFTNLSRDHLDYHGDFKKYMAAKRRLFTELLVKKGLAVVNNDDPFSMNLISDLQKDCHKILSYGFRGDEIKIV

SEQ ID NO: 164487 - protein, 321 aa, Unknown
  Bacterial polypetide isolated from the Sargasso Sea
RCGSHCIRSFISWVSQNRLDHVNITSRAFTNLSRDHLDYHGGLDEYFLAKAILFRKNPNLGAISIVNIDEYYGRLMKLVAEDNGFNVFGVGQFQGSKFRIIKQSMQVGGQFLSVSFDNKTYNFQLKLMGAFQGENVVMAAALAIASGANPDKVFSILPNLTAPEGRLQVISEMKSGAKIFLDYAHSPEALRKVLLAVRPHTLGNLSLVFGAGGDRDKGKRKIMGEVAEVHADKIYITDDNPRFENANMIRKEIKRGCSKGIDVPDRAKAILVAISELKSGDNLIVAGKGHERGQQIGNTNYPFDDSEQISMSVELLENQLR

SEQ ID NO: 164488 - protein, 273 aa, Unknown
  Bacterial polypetide isolated from the Sargasso Sea
LTKKNATVIFDNDLSFSKILKKICNLKKFKITTIGKKNSDLNINRISCFKDLQVVEFDYKKKKYSINLKLLGKLQVKNILMACLAAECSGIKFSKIISNIHKIKPVEGRMEQIKTIKNGSKVILDFAHTPDALKSSLKNLKEQYPLNNLNIVFGCGGNRDKAKRPLMGKIADKYCEKVYLTDDNPRNEIPKKIRSQIKSKISRKKLIEISSRKNAILKAINNLSSGDILLVAGKGHETYQQYGSTKKSFSDREIIITGINIKNKSLFNDWKLN

SEQ ID NO: 164489 - protein, 268 aa, Unknown
  Bacterial polypetide isolated from the Sargasso Sea
MYLGKFIKNLEKKYHDLYFSGLAFNSKKVKKGNIFFAIQGTKLDGNKYINEAIEKGAKIIVSDRYIKLKKNIVLIKNKNPRKLLAEISYKLIRKNPKNFIAVTGTNGKSSVADFYYQILNLNKKKAASVGTVGIQFNNKKKYIENTTLDPIKFTKVINNLILRKVNNIILEASSHGLKQNRLDGLLFDIGIFTNLSHDHLDYHKNLKEYLNAKLYLFKNLVKQRGIVITELSTPHLKIIKQIVKKRNLKLLTIFDKNSDLELVSHHYE

SEQ ID NO: 164490 - protein, 255 aa, Unknown
  Bacterial polypetide isolated from the Sargasso Sea
MLFSSLIKKINNYTIYNYKKDFKIKGISSNSKLIKKNYIFLANYDKQIKASYIKEAIKNGANLILTNKKIKNIQTSQLIFKNLEKALKIFLRNIFPYPPKNVIGITGTNGKTSVMWMVSSIIHSIERNVVSLGTIGLFKNLKKISYSNLTTPEKEFIYSKAFSKKKINIKNFVFEISSHGISKKRINLIPINIAAITNITQDHLDFHKTFTNYRNTKLRLFKEYLLPNGFAIINDNINNINKLKLALAKKNIKII

SEQ ID NO: 164491 - protein, 291 aa, Unknown
  Bacterial polypetide isolated from the Sargasso Sea
KLILFKKLLKKNSTIITDSEIKQYPLFKRIEKERKLNLLSIGKLGNTFKILNHKIFNSYQSIKIEYNRKIYNLKINLYGSIQIKNLLMAVLASKMCGLNIKNIFRTINKIKSVDGRLEFVRKLPNQSRIFLDYAHTPEALKKAVISLQEHFNKKITLVFGCGGERDKPKRKLMGKIADKLGDKVYITDDNPRNENRNTIRKQILSVIKKNKVKEIPDRKKAIIYALKNSDPYEIILIAGKGHESYQDFGKRKIFLSDKKVIKNFTPNRIAFKKYKLNFNNEIVKKITKSQK

SEQ ID NO: 164492 - protein, 246 aa, Unknown
  Bacterial polypetide isolated from the Sargasso Sea
MLKKLIKHCPEKFSNIKISGLSLNSKDIKPGYIFFAKKGYNKNGSDYVLDALNRGARVIISENLITINKRIIFIRVTNISEHIEYACKAFFKDLPKNIIAVTGTNGKTSVADFFRQIFLINKTQVASIGTLGIKKNSQTKPSTLTSPDIISLYKELSIMKKNKINNVIIEASSHGLHQGRLNGLNIKCGIFTNFSQDHLDYHKSMKRYYDAKTILFKKLLKRKSTVITSSDFVKLKNLKKICKAKD

SEQ ID NO: 164493 - protein, 270 aa, Unknown
  Bacterial polypetide isolated from the Sargasso Sea
LKKAVISLQEHFNKKITLVFGCGGERDKPKRKLMGKIANKFGHKIYITDDNPRNENRNTIRKEILSVITNSNVREIPDRKKAIIHSLKNSDPYEIILIAGKGHERYQDFGKRKIFLSDKKVIKNFTSKKIEYKKHKLKFNHEIIKKIVKSQKDNSFRGVSINSKNIKRTSLFIAIKGKKNDGHNFLNEAIMNGASHCVVSKKVKKKFKPIRVKNTFKFLKKLSQKKRDASSAKFIAVTGSTGKTTVKTMIGNMLKKYSKTYFSPQSYNNH

SEQ ID NO: 164494 - protein, 259 aa, Unknown
  Bacterial polypetide isolated from the Sargasso Sea
KNKLAIVNLDDKWGSKLIKLIGKKINVVTYSLKDRKADFYLENIVKKNQKSNLFIKSGDKEYKVETLLFGDHNFQNILASFAYSIMKGLDIKEIQKRIKNYTGAPGRLQRVKNTELEIFIDYAHTPDALKKSIISLKKHFSDKNIVVLFGCGGNRDVGKREKMGGVAEKFADKIVVTSDNPRFENPKVIIDHICKGFKADKKKLKKTIVNRKEAISWSVRNMKRSEVLLIAGKGHENYQAIKGINFKFSDYNEVKKCLK

SEQ ID NO: 164495 - protein, 290 aa, Unknown
  Bacterial polypetide isolated from the Sargasso Sea
MITWDYHKKMQLYLNSKMHLFKKLLKINSKIITDEDNKEFNIIKKIAKKRKLKKITIGSKKGDIKILKVKYKNKKQTIKILSDSKIYRLEIPLIGYFQVKNLLMAVLAASLCGLNKSKIFKQLSKIKSVPGRLECVATLKNNSDIIVDFAHTPDALEKSLTALKKQFKRQIIIVFGCGGERDKKKRFFMGRIARKYCRKIFITDDNPRNENPRNIRKAILKGCGKMGVEIGNRKKAIHSAIDELKSNEILLVAGKGHEENQDYGNRVVNFSDKKIIKKIIRKKNFYLKKK

SEQ ID NO: 164496 - protein, 498 aa, Unknown
  Bacterial polypetide isolated from the Sargasso Sea
MNKVFSNIPPVEFAKIKFTQKIIKSVNLKPNLILRGISENSNEIGIDYGFFALAGSKTHGALYVKDAITKGANLIITDTQGLKIIGEMQLNAAIIIFSEPRKLISEIATYFFTEIPHNIVGITGTNGKTSVAHYIRQFWENLGYNSASIGTTGVNGLINFKTQYTTPDAITLRWYLNKLVKKGVDKIALEASSHGLAQDRLNGIKMSIGVFTNLSRDHYDFHGNINSYFDAKAILFRELVEENGGAAIAIDGPKGDLMLKIAQSRLPKIITVGEKKEANLRILSQILTDNGQKLKFRWNENEYVIDLKLFGNFQAQNVLLTFACMNLLEKEIEKNKNHAISLLSKLKPVPGRMQEVASKKNGAKIFVDFAHTPDALESVLKSVRSHFIGKIHLIFGAGGNRDIGKRSIMGKIASKLSDRVIITDDNPRFENPSTIRSQIMKFCPKAIEIADRSEAILTGVDQLKSGDALIIAGKGHENFQIYGDKEYPFNDSEEASLQ

SEQ ID NO: 164497 - protein, 295 aa, Unknown
  Bacterial polypetide isolated from the Sargasso Sea
RVANINFNLAAFTNLTPEHLDYHITIENYFHSKMKLFKNLDKNSKAIINIGDQYGKKLAKETDATIVSFLDINNSSIFFETLDISTQGIIGNIKAENIIYSIQSKLLGNFNSENILTAVSICHSLGINKSKIENGIKSVSLVSGRMESYQLRTGVLAIIDYAHTPDAYEKVLKTLHELLINGSQLYVVFGAGGERDKIKRPLMGGIAEKYSSHCYVTPDNPRKENIKKINDEIIEGFQNQNFTTFLDRGMGVREAINNAKMGDIVAILGKGKEEYQEIDGKKIYYSDVEIILEYL

SEQ ID NO: 164498 - protein, 298 aa, Unknown
  Bacterial polypetide isolated from the Sargasso Sea
MLLKDYIPNLNKINKKIFFSGISFDSSKVKKNFIFFAIKGSNYDGNDFIKEAIKNGAKVIVSEEKFPKEKNDVVYLKVSNVRKLLSSVAYKIIGKKPKKLVAVTGTNGKTSVADFYYQILTANKKKVAAIGTIGIKFKNQKKISNTTTLDPIELSLVLKNLKKNEIDFVIMEASSHGLKQHRLDGLLFDIGIFTNFSHDHLDYHKNIDNYLNSKLYLFKKLIKEKGSIISDTNIPQKNEIRKISFKNKLDLKLIFNKKSGVELISHKFENEKQILEIKFRSQKFKFKLNLIGKIQIKN

SEQ ID NO: 164499 - protein, 467 aa, Unknown
  Bacterial polypetide isolated from the Sargasso Sea
RKLLKKNGNIVTDYSIPEFKKIKKISKIKKLKLNLILSDKKDLGIKVVSHIFDGEKQIVILNYKKKILEFKVNLIGKIQIKNVLMAILAAEKSGIKISNIIKNLNYLKPINGRLEKIGQIKNNSKVILDYAHTPEALKTVLENLKEQFPNNKISIVFGCGGDRDIKKRSKMGKIANIYCNQIYITDDNPRNENPNLIRKEIKKEIKKKDLFEIADRKEAINRAIFNLKSSEILLIAGKGHETTQTYKNKVRFFSDREVIKVAIKNKNKDLSNNIKLNIIKEISKSKLSLKKINFNNAVINSRDVNRNDIFFTIKGKKNDAHRYLSEVFRRKASIAIVEKILKKSNYTKQIKVKDTLNFLTRCATTLRDSLETKFIAITGSCGKTSLKDMLGLVLNKHFKTTFSKKSFNNKYGVPLSLFNINQRDKFGVLEVGMDKKGEIDFLSKIIKPDVGMITNISFAHIKNFKNI

SEQ ID NO: 164500 - protein, 488 aa, Unknown
  Bacterial polypetide isolated from the Sargasso Sea
LKLHALNDNKNNLELLSHNFKGEGQFLRLKSNSSIWDLNLNLIGKIQLKNVLMAIIAAKNSNIGLDKILNIIPKLKPVEGRFEKIGKIKNQSKVILDYAHTPDALKTCLLNLREQFPNKKITVLFGCGGNRDQNKRSKMGKIASDYADSIILTNDNPRFENPQQIRRDIKKGIKKKKITEISNRAIAITQAIHNLNSDDILLVAGKGHEKTQDIRNKRIFFSDRKVILNAITNKNKNLSDNLKLNVIREVAKIKKLPTSISLNLARINSQEVSKNDIFFAIKGKKNDGNKYVTQSFKRKASIAVVNKIQNKLNKNRQIKVKNTLKFLTDISKTFRKSIDTNIIAITGSCGKTTLKELLGNVLSKVSKVSISPKSYNNKFGVPLSLFNLKQNDEFGILEVGMDKKGEIDYLSKIINPDVGVITNINYAHAKNFKNINQIALAKSEIINNIKSHGFVVLNADDNFFQLHKKIAKEKKLTVISFGIKNQKA

SEQ ID NO: 164501 - protein, 292 aa, Unknown
  Bacterial polypetide isolated from the Sargasso Sea
MPNHSLLEEIKSKKIKFNGVSSDSRSIKKGNIFFAIPGNEIDGSRFINQAIKKGAAAIVVPSYSKKRYPKNTTVIKAKDIRKSLSLLAFEINKNNIETKIAITGTNGKTSVAYFLSYLLRISGKSVATIGTLGNSVLKRNKYNLTSPEPIDLSKQLKKIGQKKIKYLVMEASSHGLHQSRFYGMNFDVCALTNISHDHLDYHKTINNYIKSKMILFKDYIHKDSKLIINSKTKYIKKIRSILKKNKSVKPLYFQENRDYKIIKILKKNDMQHVKAIVGSKQIHLKFKNFPNF

SEQ ID NO: 164502 - protein, 488 aa, Unknown
  Bacterial polypetide isolated from the Sargasso Sea
MNELEQIFGTQLPKNIKISSVVNTTDKVIKDSIFFGLQGTRVHGSKYADKALELGASLVIHNDPDFISKHKNIFYIKDLHDKLVVFLNAFYNIDINSNNFYAFTGTNGKTSAAYLTHQLLQKMNYDSVYIGTLGVKFNKEEIDTSFSKKTTPDIFELFEIVNSINGKMDSINVCMELSSHALDQKRIEKINWFYSLSIMNIRSDHLDYHLNIDAYIDSKFEIFRLNSSKKLIDAELLDHSKSYDFINNNHSLISISNTNNFSDIFFNIEKLSLNKCIFSIQINNPSVCKKHEKHKKYKFSCKIFPEYNISNLVFAICSIGFDEFSKNEINDLSYLKLPKGRLELIQNIPANIIIDYAHNEHSFHTVLSSLKEFFENLIVVYGCGGNRDKSKRSKMLSIATKHCTQVIFTTDNSRTESFNNILADSKKGNDLDRVISIEDRKKAIIHGSELIKEKDCLVILGKGHEVTQDIGGEIKHFSDHEVINEIYK

SEQ ID NO: 164503 - protein, 433 aa, Unknown
  Bacterial polypetide isolated from the Sargasso Sea
MIEINKVLNTILNESIELPEVLVQGLANNSSKVKKGYIFFAFKGENNDGNDFIEDAFKNGACLAITDSYKVESQKNVIKVDDVRTAAGIACSNFYNFPQNKLRLIGITGTNGKTSTSTILKSILDAENEKTLQIGTSGIKPSLDMNPGLTTPDIFDLYEILNHAVNEDYKNVILEVSSHALSQRRIENIFFDITAFTNLTLDHLDYHKTMDEYFSEKLKLFNLNKENGSSVLMIDDEYGKRIAELNPHAKCISLETKDADYFCEIYSINNLGITGTLTWDSKTLDFESKLIGSFNLENLILAASIAIELNISKQYISEGIKNCTKIDGRLHLVENKSNQMIFLDYGHSPDAYLKVLKTLKDNFNHPLKVLFGAGGGRDKSKRPKMAEVVEKYSAECYLAPDNPRFEDIESINDDVINGFSNENYHSFNDRKEA

SEQ ID NO: 164504 - protein, 462 aa, Unknown
  Bacterial polypetide isolated from the Sargasso Sea
MKLKSELNQIKNFIIKITRKKNNLYNHLAFTSKSSCKNKILILTNVKNNYIYNYINEAIKKNIRAVITDNKIDIRKVNKDIPILYSKNLSTNLNMLLDDIYSFPLQNKILIGVTGTDGKTSTVNYLAQCLSNKLIKKRVGIISSLGNGIYPSLKSTSYTTPPSHILYENFKDFDKKKVDIIIIECSSHGLDQGRLNGINFNTSIFTNITSDHLDYHVTKSEYIKAKLKLMRQTSETIYINDDCMTLKRIKKRRNIQFIKYHFTEKNQIRLKDKIYPKDLILKYLCNNYNLSQEILLATLEKLKPIKGRYTYLSKLNKKIIIDSAHTPASFKNILKYIRSVEEFKKKSLKLITVFGCGGERDKTKRKKMGAIASKYSDYIYLTNDNPRQEDPMNIISQITQGIIDKSNVTVTLDRKLAIKKALSKATKRHLVLISGKGDEKYIEEMSKKVPHNDIKYVKMLLR

SEQ ID NO: 164505 - protein, 322 aa, Unknown
  Bacterial polypetide isolated from the Sargasso Sea
MSKFSDILGIDIPKGTKILSATNSTKKIKKDSIFFGLQGSKIHGSNYAEEALNLGASIVVHNDVNFISQNSKIFYIKNLENKIIDFLNALYEIDINHNNFFTFTGTNGKTSAAHLCHQLLTSMEYDSLYVGTMGIQYKNNKFNTSFSSKTTPDIFELFEIIDSFNFGLDSMSICIEISSHALDQKRLSNIYWLNSASILNISNDHLDYHENISSYIDTKFDIFKIKSSIKLINDDSNKLKNHNYDLRCISNKNNFSDIFYEIKKISLTRCEFNILINKPPQGQEQELKKKYKFSCQIFPKFNISNLVFAITSIGFDNFFEDS

SEQ ID NO: 164506 - protein, 262 aa, Unknown
  Bacterial polypetide isolated from the Sargasso Sea
MNSNFKHQSIQKHFGVIIENDKVITNITDSTENISKGSIFFAREGMSSHGSDYINLALKRGAILIISSKAINNKKVHYVPDLENILAGFLYDYYDIEQKKVKFFGITGTNGKTSIAYLAHKITQDHKQSSAYVGTLGYISENFRSKSNNTTPSIFFIFDCISQTKYSNTLYVYLELSSHGLSQRRLNNLCFEKVCICNIASDHLDYHENHEAYTKSKLSALKLYARREPLINHEITEKNAMNVNHYSISEINENATFYVNIV

SEQ ID NO: 164507 - protein, 286 aa, Unknown
  Bacterial polypetide isolated from the Sargasso Sea
FDYASIINIHSDHLDYHQTIKNYTDSKLLILKQSKKAILNYDSSLIMKNNFDKFRNVKYFYFSKSRHNNKNILSTCKKDNKISFHNQEFKLDKTKKDYFNIYSLLMICSLLKLENYGIKEITSSMSALTKLPGRRQVIKTKNKGTFIIDYAHTTQSFRDIYKEFKSYGHITTLFGCGGDRDPSKRADIAKIVDNNSSFSIITEDNSRNEKLSSIFNNIISGFTDTKRYVVIKSRRAAIKYLFTNSSEKHINFILGKGNENYLIKNNSKVKHNDIIYLNNLINKNES

SEQ ID NO: 164508 - protein, 141 aa, Unknown
  Bacterial polypetide isolated from the Sargasso Sea
GGKVYVDFAHTPDALKNSIVESKKLETSNVHVLFGCGGNRDRKKRPLMGKIASKYADKATVTDDNPRYENPARIREEVIGNLKNISEIGNRKLAIKKAISELKRGDLLLIAGKGHEKFQSIMGKKFPFDDVKIAEKYLQKK

SEQ ID NO: 164509 - protein, 440 aa, Unknown
  Bacterial polypetide isolated from the Sargasso Sea
MIEIDKVLNTILNESIELPKVLVQGLTNNSLKVKKGYIFFAFEGENNDGNDFIDDAFKNGACLAITDSDKLESQKNVVKVKDVRIAAGIACSNFYNYPQNKVKLIGITGTNGKTSTSTILKSILDAKNEKTLQIGTSGIQPSFEINPGLTTPDIFDLYEILNHAVNENYKNVILEVSSHALSQRRIENIFFDITAFTNLTLDHLDYHKTMDEYFSEKLKLFKLNKDNGSSVVIIDNEYGKRITELNSNVKCISFKTEDADYFCTSYSINSLGIAGTLAWDSKTLNFESKLIGSFNLENLILAASIAIELNISRQSIIEGIKNCENIDGRLHLVKNKSNQMIFLDYAHSPDAYFRTLKALKENFSRPLKVLFGAGGGRDKSKRPKMAEVVEKYSIECYLAPDNPRFEDIELINNDVIEGFSYENHHIFNDRKEALKFALTI

SEQ ID NO: 164510 - protein, 290 aa, Unknown
  Bacterial polypetide isolated from the Sargasso Sea
MISLKDIKDHLSSDVIIKGVTCDSRKVEPGYIFVAIQGEINRGEDFIDEAIKKGASVIVTSSDSDLKLDIPVIKDENPRRYLSYISSIVFNNSPETVCAITGTNGKTSTTNFLQQIWNLMGLKSSSIGTLGIIGNEEIQDTNITTPDPVLLHKTLEKLSNQSFTHLALEASSHGLSQYRIDNVKIRAAGFTNISQDHLDYHNTMEEYFDAKKRLFTEILPKDNYSVICIDTEEGRELSSIINASGKGVIEVGESANALNLRRLVPTELGMEMIFQYSGRQFSIPLKVKVF

SEQ ID NO: 164511 - protein, 216 aa, Unknown
  Bacterial polypetide isolated from the Sargasso Sea
IKNIIIKKNITIVDVFIKSKLYKFKFKDFPIFQIKNFILAAVGLSLIGFDEKKMTRFSIKCPHVTGRMELAGKKKNGARVYIDFAHTPDALKNVLLEAKLICKGQLVVLFGCGGNRDKKKRPIMGNIAERFADIGIVTDDNPRDENADKIRQEILKNSQKLINLKNRRTAIKKSISLLKCEDILIIAGKGHEKYQIIKDKRLPFDDLKIAKSFLTR

SEQ ID NO: 164512 - protein, 373 aa, Unknown
  Bacterial polypetide isolated from the Sargasso Sea
QLLINKGLNSIYVGTLGTQLNNKNFNTSFSSKTTPDIFELFEILNFYKDYIGNSINVCIEISSHALDQKRLKDINDFHSAALLNITSDHLDYHKDFESYRDSKFEIFRNNSFIKIIDEDLIIHKDNFSFIKDDQNDLRSISSINNFSDIFFEVEEKSLEESLFTIYINNPPNAYAGESKRKYRFFCKLFPEFNISNLVFAICSIGFDSFSEEIINDLSFLILPKGRAELIKNIPRNIIIDYAHNEKAMDYFLFQIKSYFDDLIVVFGCGGDRDKSKRPLMLKVALMHSSSVIFTSDNSRNENFDSIFADASKNNSVDNIIKIKNRKEAIKHGVSLLEKNDCMIIFGKGHEETQEENGKIIFFSDHEVVNEIYK

SEQ ID NO: 164513 - protein, 239 aa, Unknown
  Bacterial polypetide isolated from the Sargasso Sea
MLLGNYFHNIKKNYRNFSFSGISFDTKSIKKNNIFFAIKGNTIDGNKFIPKAIKKGSKIIVTERKTNPFQNGILYIHTNNVRKLLAETTFKIYNKKPKNLIAVTGTNGKSSVADFYYQILQLNNKKGASIGTLGVKSKSINLNLSNTTIDPIKLAKILSKLKNQKIENVIMEASSHGLKQNRLDGLKFNSGIFTNLSQDHLDYHKNLKNYLNAKLYLFENLILKRGNVITDQLIPEFKT

SEQ ID NO: 164514 - protein, 302 aa, Unknown
  Bacterial polypetide isolated from the Sargasso Sea
MPELVRSTNFKNCKISSLHLDSREVKKGGVFFAIKGKNLSGIDFIEEAKSKGAELIISEELVKDKEVIHCSDLKQLLGKFSTRFYSSPSKQLTTFCATGTNGKTTSVEAYSKICKNLGKQCGYLSTIGKSVDGKKVNEPYLLTTPDPISLNKSFSEMLSKGTTHAAFEASSHGLDQGRLSGIDIDYAVLTSFSQDHLDYHKSIEEYGNAKRLLFKELKPRNSFIQIDSEFGKNLYENLLKDGAEVFSVSLKEESDFYASFRKNNDSLEVNFKSPYGSFEFSLGTISRYIASNVICSLAALCV

SEQ ID NO: 164515 - protein, 651 aa, Unknown
  Bacterial polypetide isolated from the Sargasso Sea
KNVLMAIIAAKYSSISLDKILNTIPKLKPIEGRFEKIGKIKNHSKVILDYAHTPDALKTCLLNLREQFPNKTITVLFGCGGNRDQNKRPKMGKIASDFADTIILTNDNPRFENPQKIRRDIKKGIKKKRIIEISNRAIAITQGVYNLNSGDILLVAGKGHEKTQDIGNKKIFFSDRKVILNAIKHKNNNLSDNLKLNVVKEAAKIKKLSASISLKTARINSQEVTKNDIFFAIRGKKNDGNRFVSQSFNRKASLAVVNKIQNKLNKSRQIKVKNTLEFLTDISKTFRKSIDTNIIAITGSCGKTTLKELLGNVLSKITKVSISPKSYNNKFGVPLSLFNLKQNDEFGILEVGMDKRGEIDYLSKIIEPDVGVITNINYAHAKNFKNIKQIAMAKSEIINNIKPNGYTVLNADDSFFQLHKKIAIENKIKVVSFGIKSQKSDIKLINIKAFGKNFRINIRLNNKKKYFVLSNDFQNNIYNTLSALAVISIYKNIFKLNENIFLNFKIPEGRGDHSVVKIDNKKINLIDQSYNSNPLSLKSAIKNFDKINSKKSNKYLLIGDMLELGSHSKKLHQSIAPIINQTKIDKVFVKGKMASIIFAGISKAKKGKVLLNNSQIIELIRKDLNNNDYLMIKASLATGFNEIVKDLKGLH

SEQ ID NO: 164516 - protein, 459 aa, Unknown
  Bacterial polypetide isolated from the Sargasso Sea
MNFEKRNFVSNSKYIKDDDIFISLNNGIKYLSQEDINKLSLILIDSKFKQKDDLKILKIDNLEENYLSWVDEIYDIQQSAFKNFFVTGTNGKSTTIELLSQAFSFNSIPNSTIGTLGTYLNGNKYFSNSLTTEEPLFVRSVMRKCLENNIKNIFIEASSIGLDQNRLKGLAVEHAALTNISRDHLDYHKNFDEYLAAKLKLAEKSSLKTLSYNLDEKHFSNIENVFKGEKIYSVSSKNEKADIYFEIKEFHQDGRINFLAKTPWGQFNSSPKLHAEYNIYNLLLSLPYYHSVTSNCAGFFSAVEEMTLPSGRLQKISNENIFIDFAHTPDALEAVCSELKKKNHKGLKLVFGAGGDRDQGKRELMGNVAQKYAKKVYITSDNPRFEKPEEIIEMIVAGISDKDKVIIEPDRAEAISMAISELNKDEILLITGKGHEEYQIIENEKKPFSDYEEILKCIK

SEQ ID NO: 164517 - protein, 482 aa, Unknown
  Bacterial polypetide isolated from the Sargasso Sea
MNIKFPDNCNISNITNNSKKVKKDSVFFGLCGKNNHGSKYSLEALKLGASFVVHDDERFQVKNSNVFFVRNLENKIIQFLNSFYKIDINNNNFFTFTGTNGKTSSAFLCHQLLLNMGYESIYIGTIGVKHNNSNLETSFSSKTTPDIFELFEIINSVEWSDESLNICIEVSSHALDQKRLKGVNWFNSSSLMNIKDDHLDYHKDISSYRDAKFSIFKTNSPVKLIHENISDFSRDYEFVNNSDSQLISISNKNNFADIYFKIKTISINSSEFYILINNPPHTQEHEKGKKYHFKCNLFPEFNITNLVFTICSIGFDNFSEHTVNDLSFLNLPKGRTEFIKNIPDNIVIDYAHNEEAIEFILKSLSNYFDNLVVVFGCGGNRDKNKRSKMLRSAIENSTNVIFTSDNLRNETFEDIFIDAKGDNKLDSVIAIEDRREAIIQGTKMIKNNDCLVVLGKGHENFQETNSNFIKFSDHEVINEIYS

SEQ ID NO: 164518 - protein, 272 aa, Unknown
  Bacterial polypetide isolated from the Sargasso Sea
MLLKDYYPKLNKKFIKVKFNGIAFESSNIKNNYIFFAIKGNNLDGNKFIKEAIKKGSKIIISEKVKEEFKNNILYLNNKNPRKLLAEFAVKINNKCPNNLVAVTGTNGKSSIANFYYQILKLNKKKVASIGTLGISGISYKKNIFNTTYDPIELNKIFRILKKKKINNVILEASSHGLKQCRLDGLKFNLGIFTNLSRDHLDYHKTFKDYFNSKLILLKRLMKKKSRIIFDEDLKISKKIKRISKIKKLKTLSLESNNADLKIIEHKFINSK

SEQ ID NO: 164519 - protein, 456 aa, Unknown
  Bacterial polypetide isolated from the Sargasso Sea
NLRKISIVFGCGGERDKPKRRIMGKIANKYCDKIYLTDDNPRSENPDKIREEVKVNILKSKLIEIPSRNFAIKKAIFDGKSNEIVVVAGRGHELFQEYKSKKYFSDRDCIVKAINKKNNQLNKSWKSNIVGEILGKKLKDNIIINNATISSKKIKKNNIFFGIKGKKIDGNKFADYAIKRGASLSIIDKNYGKRNKKKIKVKNSLNFFSQCASQIRISSNISSIAITGSSGKTSLKEMLGRLLNKIYKTTYSNRSYNNKYGVPISLFNIDKRDKFGVFEVGMDRSGEIDYLTKIIKPNVGVITNISYAHIKNFKNLNGIAKAKSEIINNIVKNGTLVINADDQFFDYLKLKALKKNLKVISFGTKNKADIVLKKIIKLKKKTYIFINFNGKEKKFLIDRNLEIYRDNVMASLAVISNYFDLENLNVKFFNDYITPEGRGDQSIIKIKKKKINLIDE

SEQ ID NO: 164520 - protein, 313 aa, Unknown
  Bacterial polypetide isolated from the Sargasso Sea
MEVSSHALDQNRLDGIQWLNSASILNIGEDHLDYHKDISSYRDSKFSIFKMNSPIKLVIDESNNFVKDYDFLNETNLTYISSKNNFSDIYYKITKANFKNCEFKIFLNNPPSGQEIHKNKKYKFKCALFPEFNITNLVFAISSIGFDEFSDKYVNDLSFIKLPKGRTEVINNISKNIIIDYAHNAHSFEVLLFSIKKYFDNLILVFGFGGERDKSKRAKMLKIALENSSKIFLTSDNSRSEKFENIIKDAMKGNNQRSITIIEDRKEAIINANKFLDKNSCLLILGKGHEQTQEIDGKIYHFSDHEVVDEIYN

SEQ ID NO: 164521 - protein, 110 aa, Unknown
  Bacterial polypetide isolated from the Sargasso Sea
VLFGCGGNRDRKKRPLMGKIASKYADKATVTDDNPRYENPARIREEVIGNLKNLSEIGDRKLAIKKAISELKRGDLLLIAGKGHEKFQSVMGKNLPFDDVKIAKKYLLKK

SEQ ID NO: 164522 - protein, 293 aa, Unknown
  Bacterial polypetide isolated from the Sargasso Sea
YSGQNTWLDEGFNIIDNILDWAKPHEMYVILDLHAAPGGQGRNTDISDYDPDKPSLWESEQNKSKTVALWKKIAERYKDNEWIGGYDLLNEPNWELPGGVDLKDLYVRITNAIREVDNKHIIIIEGNDYANNFTGLTPPWDDNLVYSFHKYWNSTNADDLNWILPMREQHNVPLWMGESGENSNTWYTDAVTLFEDNNVGWAWWAMKKIGSVNSPYRIRVNEGYQKILNYWKDGGDKPSEQDAYDAMMKLAENALSENCIYRKGISDALLRQPHTDNTIPFKNTQQIPGVVFL

SEQ ID NO: 164523 - protein, 150 aa, Unknown
  Bacterial polypetide isolated from the Sargasso Sea
MNSDIRIHHELNEMKKDPPVNCSAGMNNGQLRHWNASIIGPDDSPYQGGIFHLDIYFGSEYPFTPPKVNFKTKIYHPNISNTNICLDILKDKWSPALSISKVLLSLCSLLTDPNPEDPLDNEIGQLYKTNLEEYNNMARTWTLTYATHEL

SEQ ID NO: 164524 - protein, 93 aa, Unknown
  Bacterial polypetide isolated from the Sargasso Sea
IPDNYPFKPPKVRFNTRIFHPNINKHGSICLDILNKNWSPALTLSKVLLSISSLLSDPNPDDPLDIRAADIYNKDKDEFFQTAKTYTLKYASI

SEQ ID NO: 164525 - protein, 148 aa, Unknown
  Bacterial polypetide isolated from the Sargasso Sea
MSIKRLKKELEEIQKEPPVNCSAGIIDDDIHTWEATIIGPEKTPYESGVFKLSILFPDNYPFKPPKVKFDTRIFHPNINKQGSICLDILNKNWSPALTVAKLLLSISSLLSDPNPDDPLDIRAAEIYNKSRDEYFQTAKSYTLKYASC

SEQ ID NO: 164526 - protein, 121 aa, Unknown
  Bacterial polypetide isolated from the Sargasso Sea
LDYYEWNATITGPQGSPYENGIFNLSISFPPNYPFKPPYVNFITKIYHPNISRKGEICLDILKDQWSPALTITKVLLSICSLLTDPNPDDPLRPEVADLYIKNKLEYDMNARVHTSKYAMY

SEQ ID NO: 164527 - protein, 101 aa, Unknown
  Bacterial polypetide isolated from the Sargasso Sea
NGIFKFNIIFSEEYPLKPPNIKFLSRMFHPNIYTNGNICLDILQSKWSPVQDTKSILISIISLLTDPNTDSPANTQASQLYISNRKEYNKKVRQCSEESIC

SEQ ID NO: 164528 - protein, 134 aa, Unknown
  Bacterial polypetide isolated from the Sargasso Sea
MTHDLSYDFEALKSSSAFSALSAIKRGVERECLRINPTGMLAMTPHPKALGAALTHESITTDYSESLLEFITPPESDVNTTLAQLEDVHKFTIDNIGDERLWPLSMPCFIENAQDIPIAYFGESNVGKMKKAYR

SEQ ID NO: 164529 - protein, 287 aa, Unknown
  Bacterial polypetide isolated from the Sargasso Sea
MFRKNENLLKHINFSPKIDLKGKIGIEKESLRVLDCYISDENHNENLGSPLCNKFITTDFAEAQIELVTPPFSKSENLFSFLDNIQHFVTHNINDEYLWPFSMPARIKNEKEIKTAFYGISNEAKFKHIYRSGLAKRYGKPMQTISGIHVNFSFSEEFWNSLKINFSQINEKAIKNDIYFRLIRNFQRNNWLLLYLFGASPVLGKSLIDDAYDFIELNNDAYYLPYATSLRMSSMGYSNLGQSKLNISLDSLSSYVSDLKAATQKRSNEFNEIKSSGDNPYQLNPNL

SEQ ID NO: 164530 - protein, 124 aa, Unknown
  Bacterial polypetide isolated from the Sargasso Sea
MIRFSLDEIKKSKASSELNFINRGIERESLRVDSSGKISQTPHPSGLGSALTNPYITTDFSEALLELVTPTFNSASECLKFLSDLHIFVNQNLEGESLWPLSMPCFIDSEDDIPIGNYGTSNQG

SEQ ID NO: 164531 - protein, 271 aa, Unknown
  Bacterial polypetide isolated from the Sargasso Sea
KELIEGDKGDFLKLDSNSFYLPYATSLRMSDFGYQNSKRSLDVSLNSIDEYIANLMEATATVDQKFLELEKNGLEVQISPNILQIEDEFYAIARAKSQDLSNDRSLKKLKKSGVEFIELRSIDINPFSVLGIDKDSVYFIEMFLIYCFFKPSAPLSKASLETLKSNDLLVSKFGRDKKLKIKREENPINLKDWGIEILDEMTEIAESMDNNDKKYSNAIRRFKGELEDPNKTLSSKLLDRIFTEKISYFDLGFTLAEQNKSHYENRRVSDN

SEQ ID NO: 164532 - protein, 274 aa, Unknown
  Bacterial polypetide isolated from the Sargasso Sea
HPRNAVDFQSDRYLALIRNFRRTNWLLMYLFGASPALDRRFLRDRKHTLETFDADTLYRPYATSLRMSDLGYSNTTAQAALHADYDTLPGYLDALAKAVSQPYPAYEAIGTQRDGEWVQINTNVLQIENEFYSTIRPKRVTYPGERPLHALAARGVQYVEVRCMDIDPFEPTGISLETSRFLDAYLLVCALDDSAPLPPDAYAEANQNFGSVTMEGRKPGLELTRDGKPIAMTDWANELFIQIDAAAAKLDALHGGDAHARAVAVQRAKLADAS

SEQ ID NO: 164533 - protein, 213 aa, Unknown
  Bacterial polypetide isolated from the Sargasso Sea
GARLAPYTPRKFISAGGITTFRTPPKPLIGASVADHSPIYRKLLEAEPTWLSQIRRGVEKESLRVSRHQATLAQTPHPAGLGSALTHSAITTDYSEALLEFITPVSNSISDTEQALADLHRFTARQLDAELLWNTSMPCIVHADAGIPIAEFGSSNVGQMKRIYRNGLSVRYGRKMQAIAGIHYNFSLPETFWVRASEVAGDNHSQADFQTAG

SEQ ID NO: 164534 - protein, 80 aa, Unknown
  Bacterial polypetide isolated from the Sargasso Sea
LFGSALTNQFITTDFSESQMEFVTPPLKTNSEALNFLESIHLNVSKKIDEEILWPLSMPPFIDCDTDIPIAYYGESEVAM

SEQ ID NO: 164535 - protein, 291 aa, Unknown
  Bacterial polypetide isolated from the Sargasso Sea
MRIENDRISKSFHPQSLGSSLCNRFITTDFSEAQIEMITPPETDRLISYRFLSEVHHFVSKSIKDEYLWPFSMTPIISSDNDVPIGNYGTSNKGMFKRIYRNGLANRYGKIMQAISGIHFNYSLPESFWSSELSERNEYKKSKDYFKILRNIYRYNWIILYLFGASPVISEKFIGGNNNDFLKLDEHTFYLPFATSLRMSDLGYQNQSRANFSPSLDSLDEYIKDLNRATSTIDTNFAKIPRFGVEPSQLNSYILQIDDEFYAVARPKSSSNSDHQTIYKLKNSGVDYIEI

SEQ ID NO: 164536 - protein, 218 aa, Unknown
  Bacterial polypetide isolated from the Sargasso Sea
MSLLHKFLYSELGDEILWNFSMPCAFTNEKEIRIAEYGKSNSGMLKHIYRKGLRLRYGSIMQCISGIHYNFSFTKNSWKTIDNNPDQDYINEKYLGMIRNIKRNFWFILEQFGASPITHKSYLFDRKHSLKKHNINDLFLPYATSLRMSDVGYQSYIQDSLKISYNDLDEFINALVKGIKTPVKKFSDIGMFDDAGVAQQISTGILQIENELYDIVRP

SEQ ID NO: 164537 - protein, 78 aa, Unknown
  Bacterial polypetide isolated from the Sargasso Sea
MTADNTCFDARVKALKSPEFLASLKDIKRGVEREALRINPNGTLAQTPHPKPLGSALTHESITTDFSESLLEFITPPR

SEQ ID NO: 164538 - protein, 228 aa, Unknown
  Bacterial polypetide isolated from the Sargasso Sea
MNPSDFDISETSFNRGIERETLRVTNDGELALTPHPQALGAKLTHPCITTDFCESQLELITPVFQTIKDVLAELTRIHHYVHHTLENELLWPASMPCVLPHESDIPLADYGNSNVAIHKKTYRSGLGIRYGRSMQTISAVHYNFSPDDTVFAQLADHEQAADTKGFRSERYFGLMRNFREVSWLPVYLFGASPAVASSFVLPGKHGLSNFGNQTLIKPYATSLRNGNL

SEQ ID NO: 164539 - protein, 224 aa, Unknown
  Bacterial polypetide isolated from the Sargasso Sea
MIRFSLDEIKKSKASSELNFINRGIERESLRINSSGKISQTPHPLGLGSALTNPYITTDFSEALLELVTPTFNSASECLKFLSDLHIFVNQNLEGESLWPLSMPCFIDSEDDIPIGNYGTSNQGMMKTIYRRGLSNRYGSMMQAIAGIHYNFSFSDKFLQIFADINSIDLKKFKNEVYLGIARNFRRYGWLYLLLFGSSPIANKSFAENRSHNMDDLNTEDLFQ

SEQ ID NO: 164540 - protein, 218 aa, Unknown
  Bacterial polypetide isolated from the Sargasso Sea
MEKNLFSELKDHLSDAKVGFEKESLRVINSNIAQSPHPESLGSSLCNQYITTDFSEALLELVTPPFLDKKKALRFLDDIHHFISCNLEDEILWPFSMPVAINREEDIPIAYYGASNLGEFKRIYRNGLSHRYGRMMQTISGVHYNYSVPDSIWQSSLFGKMDIDSKKVRSAAYFNMLRNIYRINWLILYLFGASPILTKNFLTEDTQLFKQLDKQTLY

SEQ ID NO: 164541 - protein, 309 aa, Unknown
  Bacterial polypetide isolated from the Sargasso Sea
FSMPVDIIEEEIPIAYYGSSNLGVLKQTYRNGLSHRYGRIMQAISGLHYNYSVPEDLWGSLSFHKMEKDSKKARSAAYFNMLRNIYRINWLILYLFGASPILMKSFLAEDTKIFKKLDKKTLYLPYATSLRMSNYGYQNSNRKKLEVSVNSIDEYISDLRNAANAAHPEFLKIQDTNTKLQAQINKNVLQIDDEYYAVARAKSKIVSDEQTTSKLNKGGVDFIELRSLDLNPFSRVGIDRETRDFIEVLLTDCFIRKGEYFTDDEIKTINHNDGLVATKGRYPKLELLKDGEPISLKDWGNQIIDRCAN

SEQ ID NO: 164542 - protein, 292 aa, Unknown
  Bacterial polypetide isolated from the Sargasso Sea
ICSPLTNKFITTDFSEALIELVTPTFNSVDEVYEFLLDLHIFTASAMESDEVLWSNSMPCFIGDESEIRIAEYGSSNIGKLKNIYRKGLRVRYGSIMQCVAGVHYNFSIDDDSLRLFNKDLNKETKSDIYLGLIRNFKRNFWFLLYFFGASPIFDKSFVSGRNHSIKNTNKSDLYDEYATSLRMSEVGYQSYHQKALDIKYNSLDSFIESLKKGIFEEYEVFESLGLYDENNERQQISSGILQIENELYDSIRPKRKGASETRPIELLSAKGIEYVEVRGIDLSPNYSYRNI

SEQ ID NO: 164543 - protein, 250 aa, Unknown
  Bacterial polypetide isolated from the Sargasso Sea
MIHLTEAENFNLDASLIKGGLIGIERESLRVGNGKISSGQHPSVLGKKLENCFITTDFSESQTEFISPPLNNKNDALDFLHDLNYFFYNNVDEALWPFSMPPFISNQDEINLADFGNTNEGIFKRIYRQGLSNRYGKYMQCISGIHFNYSFPETIFEYISEKNGLTNNKKFKSEIYFKTIRNISRYNWLLLYLFGASPIVSKNFYNTNNLFVKHKQSFYLPNATSLRMSNIGYQTPKQSDFLVSLNSLDE

SEQ ID NO: 164544 - protein, 311 aa, Unknown
  Bacterial polypetide isolated from the Sargasso Sea
QTSHPESLGSSLCNQYITTDFSEAQLELVTPPLKDKRKALMFLDDVHHYISHNIQDEYLWPFSMPLDIHSDQDIPIASYGKSNIARFKEIYRNGLSERYGKMMQAISGIHYNYSVPDAIWENELFINLDIDPKETRSAAYFNMMRNVYRVNWLVFYLFGASPVISKSFLNQDSQPFKKLDKKTLYLPYSTSLRMSNYGYQNARRKKLEVSINSIAEYISDLRKATNRIHEEFRNIQPENSNLQAQINENILQIDDEYYAIARAKSKIISDQRTTSKLNQGGVDFIELRSLDIDPFSRIGIKEETALFLEVF

SEQ ID NO: 164545 - protein, 206 aa, Unknown
  Bacterial polypetide isolated from the Sargasso Sea
MIRFSLEEIKKSKVSSELNFINRGIERESLRVDSSGKISQTPHPLGLGSALTNPYITTDFSEALLELVTPTFNSASECLKFLSDLHIFVNQNLEGESLWPLSMPCFIDSEDDIPIGNYGTSNQGMMKTIYRRGLSNRYGSMMQAIAGIHYNFSFSDKFLQIFADINSVDLKKFKNEVYFGIARNFRRYGWLYLLLFGSSPIANKSF

SEQ ID NO: 164546 - protein, 273 aa, Unknown
  Bacterial polypetide isolated from the Sargasso Sea
GREHDLLERFDHSLYRPQATSLRMSDLGYQNNAQSSLAISYNNLDEYVSTLTHAINTPEPAYEKMGVKVTDADGNVKYQQLNANILQIENEYYSSIRPKRTIKPGERPTTALQERGVEYIEIRALDLNPFEPVGINQQEIRFLDLFATYCLLRESPQLEKCDLHASKENLRKVVYDGRNTDIQLYNWGKSVSLKNWASEKLTQMQPIAELFDRAHGGNNYAEALAHQQEKVDNPSATPSAQILEQLESRNQGFFQFAMEQALAHRDHFLSGQR

SEQ ID NO: 164547 - protein, 469 aa, Unknown
  Bacterial polypetide isolated from the Sargasso Sea
MQRGIEKESLRVKSNGNISQSPHPNRLGSALTNPYITTDFSEALLELITPVSQTIDGCLEELENIHRYTQQNIENDEILWATSMPCPLSPNTEIPIAQYGKSNIGKLKTLYRHGLHHRYGSLMQAIAGIHYNFSMPDSFWESYKPLCKFKGSIQEFKTEKYLHLIRNFHRFSWLLLYLFGASPTACKCFVEGRAHNLSELDDSTLFKPFATCLRMGNLGYKSEAQQSLFVCYNDLETYVECLGGAIKTPYPEYVKIGHEKDGKYKQINTNLLQLENEFYSTIRPKRNVKNGEKPLDALTNRGIEYVEVRALDLDPYSPVGINREQIHFLDSFLLHCLLAESPDCNKDEFFEVGNNLNLVVNRGREANLRLSSKGKQRVLGEWSMEIINDIKHSAFILDKVNQSNEYSLSAIKQEAKIKNPELTPSGRMLDQMKKEGVSFFEFSMEHSKRHSKTLREAEIDKNFLAHIKN

SEQ ID NO: 164548 - protein, 518 aa, Unknown
  Bacterial polypetide isolated from the Sargasso Sea
MIRFSLDDVKKSKATSELNFINRGIEKESLRVDSSGKISQKPHPKGLGSALTNPYITTDFSEALVELVTPTFNSAEECLEFLSDLHVFVNQNLEDESLWPLSMPCSIDSEEEIPIGNYGLSNQGMMKTIYRRGLSNRYGSMMQAIAGIHYNFSFSDNFLKILADSNSHNLKELKNEVYLGIARNFRRYGWLYLLLYGSSPITSKSFAANRSHDLDNLNSNDLYKVNATSLRMGDLGYISHAQDNLNISYNSLKDYSSDLKSALKTTYQEYKELGEFKDGERIQLNDSIIQIENEYYSTIRPKRVCPSGERPINVLNDQGIDYLEVRCIDLNPNTFVGISREQVYFLDLLILYCFFTESPEILEDESKELFKNHKTIVNDGRDPSAKIKTLNGDVLVKEEAMRILDGMSEVATFMDEEVFKEGNIWSETVGNQKKIIENYDLSLSGSLLEEVNKSGITFQEYGLGISLTHKKQMNDLETDNDNEFRNKASESLKSAKKLEEEHQISFENYLEEFLNKIS

SEQ ID NO: 164549 - protein, 314 aa, Unknown
  Bacterial polypetide isolated from the Sargasso Sea
GASPITHKSYLFEREHSLEKYNANDLFLPYATSLRMSDVGYQSNIQDSLKISYNNLDEFINALVTGIKTPVKKFNDIGMFDDAGIAQQISTGILQIENELYDIVRPKRSGPSGFRPASLLKTGGIEYLELRGIDVNPFIPEGIDVSKIKLLDIYITHSLISESPLISDKEIEEIKVNQKIMVSKGRLKNVMLSKNGDLISLAELRKNFLAELEQTAEALDEYSEGYLKAFHLEINKNMLLSEKILTEMDVKGFEFQEYALNQSKKIAENYDSSDTSDFYALTNSAQTSIENLRNLEESSSMDINKYVELYNSKI

SEQ ID NO: 164550 - protein, 258 aa, Unknown
  Bacterial polypetide isolated from the Sargasso Sea
MIRFSLDDVKKSKATSELNFINRGIEKESLRIDSAGKISQKPHPKGLGSALTNPYITTDFSEALVELVTPTFNSAEECLKFLSDLHVFVNQNLEDESLWPLSMPCSIDSEEEIPIGDYGLSNQGMMKTIYRRGLSNRYGSMMQAIAGIHYNFSFSDNFLKILADSNSHNLKELKNEVYLAIARNFRRYGWLYLLLYGSSPITSKSFAANRSHDLDNLNSDDLYKVNATSLRMGDLGYISHAQDNLNISYNSLKDYSSD

SEQ ID NO: 164551 - protein, 247 aa, Unknown
  Bacterial polypetide isolated from the Sargasso Sea
MSPENIITKNITSDIGSIFNKGKIGIEKESLRVRDLRISKIDHPNKLGSALCNKYITTDFSEAQLELVTPPFKDKMKTLHFLDNIHQFVNLNIDDEILWPFSFPPQTNSEKDIRIAKYGKSNDALFKEIYRKGLASRYGRRMQAISGIHINYSLPPRLLEEISLQERQHSSSSHHSEVYFRMMRNLYRVNWLILYLFGASPILTKDQLNKESKDFKKIDKNTFYLPYATSLRMSDLGYQNADRVKLE

SEQ ID NO: 164552 - protein, 316 aa, Unknown
  Bacterial polypetide isolated from the Sargasso Sea
MPRVNLNSILTSERLAKLKTAGVYLPTLQRGIEKEALRSMLDGGLSQAAHPRILGSPLTNPNITTDFSEAQVELITQVHPSITNCLQELAEIQTFVSDSLEEELLWPFSMPCNIKEDDSIPIAQYGSTNLAKAKTIYRRGLSNRYGSKMQTISGIHYNFSLSDACWEELGYSDQESRTRGYFDLIRNFRRWSWLLVYLFGASPTIPKQLVPASDLASLSFLDDQNCYMPHATSLRMGPMGYQSTAQNNLAISYNSLEDYLEGMTLALSQTHSEYQKVGLKQNSIYQQLNTAILQIENEFYGYIRPKRSLSDGERPI

SEQ ID NO: 164553 - protein, 537 aa, Unknown
  Bacterial polypetide isolated from the Sargasso Sea
MSNTMTHRQSELLLKRLDALSSGPTRQHLPDGLRGIEKESLRVTRDGMIAFTPHPRALGSALTHPALTTDYSEALIELITPAEGDAAITLERLDDLHRYVYASLGDEMLWNDSMPGLLPADDQIPIADYGTSNIGRLKTVYRRGLAYRYGRTMQCIAGIHYNYSLHEEVWRRLHAEEGSTATLVDYQSERYLAQIRNFRRRSWLLMYLFGASPALDTKFLRGKPHRLDTFDADTLYLPYATSLRMSDLGYSNTTAQAALHVDYNTLPGYLDALSKAVSEPYPAYEAIGTHRDGEWIQINTNVLQIENEFYSTIRPKRVTYSGERPLHALASRGVQYIEVRCLDIDPFEPTGIALETARFIDAFLLACALDESPALDCPAYKEANANFGSVTMEGRKPGLTLQRDGETVTLQAWADALMADIETISRRLDEIRGGDEHVRAIAAQREKLADPERTPSARVLRTMRERGQSFLEFALTQSEAHAAHFRANPPSAETLRTEQALAAKSLAEQAELEAKEAGSFDAFVAAYRAYTLNRFSV

SEQ ID NO: 164554 - protein, 521 aa, Unknown
  Bacterial polypetide isolated from the Sargasso Sea
MTALGSPERLTALKGIRRGIERECLRITPEGTLAQTDHPRSLGSALTHANITTDYSESLLEFITPATDSIDSLMEQLGDIHRHTIHHLDDERIWPLSMPCFVGDEENIRLAQYGSSNIGRMKTLYRQGLKNRYGSLMQVIAGVHFNFSMPDSFWCEWQELVCEGCCSQRFISDKYMGLIRNVYRFGWLVPYLFGASPAICDSFLKGRKSNLPFQKTGKGTLYLPYATALRLSDLGYTNSAQAGLKISHDSLPAYVSSLRRAINTHDPDFAKIGVKVNGEYRQLNDNVLQLENELYAPIRPKRTPRSGEKPSDALEQRGIEYIELRTVDVNPFTPYGIEVDQIRFFDLFLVWCLLRPSPVLGDEEIARNRRNQTKVVLEGRRPGLELEDEQGHAIGLKEYGLKLFDELAEVAALLDRCCGRNRYRETLAMHREKLLNPELTYSARLLKQLLESGQDNGCFGDELANRYREEMLAGELQYWDEAYFAGEARDSLAKQRERERSDSLSFDDFLADYFGTSKTPA

SEQ ID NO: 164555 - protein, 513 aa, Unknown
  Bacterial polypetide isolated from the Sargasso Sea
MSHGTKINTFHSLSSEEKKSLSSGKKGIEREAIRVLKNRLISDQSHKNYFGSALCHSYFTTDFSESLLEIITPPFSENSELINFLEKSHQYVSQSINNEQLWPASMPPNFHDDDIQIAKYGVSNIAKFKTIYRKGLSKRYGKPMQAISGVHFNYSFPEIIWKLNHKDGSENNTQSFRNTFYFQTIRNISRISWLILYLFGASPILNKSFLRTVPNGSKCFKDNIYFPYATSLRMSHLGYQNDSQADIEVSINSIDEYISDLKKLTSEQRNKVKIKLPSELNSLEELNDFQLQIEDEYYSMIRPKSMSNEDIRPTSKLRKFGVEYIEVRSLDIDPWSPIGINQSTVSFIEALILYSSFCESPPISDSEYKTIRKNNHLVATLGRQPNLYLEKDKKNISLKEWARCIIDEMEPFLHIVKVDSAQIDNYKEMISNPEYTPSARLINGVLKGSYSLDEYMANISEKNKEYFLSIDKNTNDMWEKFDAEFEISLDKQKKLEQLQEVSFEEFLNSYINS

SEQ ID NO: 164556 - protein, 382 aa, Unknown
  Bacterial polypetide isolated from the Sargasso Sea
MSTILEKKLRQLSENNEPVVFCGGKKGLEKESLRVNEEGSLSLKRHPSSLGSALKNKYITTDFSEALLEFVTPAYENSWEVISMLNDIHQFTYNNINDEILWIASMPCRLDGDKSIPIADYGSSNIGKMKSIYRSGLGLRYGRNMQAISGIHFNYSLPENFWPVYKKIENNNSAAEDFISSSYMDMIRNLKRFGWLILYLFGASPAICKSFLSDNNTSMPSLDKKTLFQPYGTSLRMSDLGYTSSVQSNINISLNNLDHYIEDLTTAMKTPEPSYQNFGFKKNGKYQQLSLNKLQIENEYYSTVRPKRVANSGERPTSALKRGGIEYIEIRSLDVNVYDPVGINQDTMRFIESFMIFCLLEESPLIDEIENREIMKNYSDTS

SEQ ID NO: 164557 - protein, 114 aa, Unknown
  Bacterial polypetide isolated from the Sargasso Sea
MCQKFLNKIKFGDKRVFIINGKVCGAISRVPKSGSILSNMSKGAKPKIAFLSNKELKVSNIIAKKIKKDGIYFAGIDFIDGKLNGDINVTSPTGIKTYFDLSQINLAKTFWKGL

SEQ ID NO: 164558 - protein, 219 aa, Unknown
  Bacterial polypetide isolated from the Sargasso Sea
VDEDYNNALHLLDLAKHNGAVIHNNPCALKKFNEKVFATHFPEFIPKTLISSSINKISAFFDSHKKIIIKPLDGMGGTSIYKVDDLNEDNLKIIRTMTNSEKTQIICQSFIEDVYEGDFRILIINGKPFPKTLARIPKDGDFKGNLAAGGKGVAKDITENQKKIAEAIAPILVKNEISFAGIDIVGKYLTEINITSPTCAREIFDQTKMNPIEEYFKGL

SEQ ID NO: 164559 - protein, 49 aa, Unknown
  Bacterial polypetide isolated from the Sargasso Sea
FVGIDIIGDYLTEINVTSPTCIKELDNIYNIKIADKLMNVIEKKTKEII

SEQ ID NO: 164560 - protein, 293 aa, Unknown
  Bacterial polypetide isolated from the Sargasso Sea
MTNKIVAIQGDNLKKINIKTDTTIFLANEAQNKGYKLFYYYPENLSNIRGKTVSEGYFIKIDYSKKKFYKIIKKSKLDLSFAKYILIRQDPPFNLEYISTTLMLDRIKDKTKIVNDPTSVRNISEKFYSLNFKNYMADSIFTKDLIEIKKFFKKHKKIIIKPIHSYGGNDINLISGKLNLLKIKQILKKHGHIMCQKFLNKIKFGDKRVFIINGKVCGAISRVPKSGSILSNMSKGAKPKIAFLSNKELKVSNIIAKKIKKDGIYFAGIDFIDGKLNGDINVTSPTGIKTYFD

SEQ ID NO: 164561 - protein, 263 aa, Unknown
  Bacterial polypetide isolated from the Sargasso Sea
IDGGIVYTASREILSAGSTQVEGIIKQVVRLSDFKFSFMRKDPPVNENYINALHFLGLAEKQGAVVFNKPTSIKEFNEKIFALHFKEFIPKTLITSDIDKIENFFELHKAIIIKPIDGMGGASIYKINELNEENKSLLIKMTNSEQTHIICQEFIEEIYDGDFRILIIHGKPFQKTLARIPQGDSFKGNLAAGGRGEARDITDYQTMISKKVGEYLIEKHINFAGIDMIGKYLTEINITSPTCAREILDQTGLNPITEYFKGL

SEQ ID NO: 164562 - protein, 219 aa, Unknown
  Bacterial polypetide isolated from the Sargasso Sea
MSYITNTHILETLHPNTFVVNNPFEVRNAPEKLLVNKFKDFIPETLITRDLVEINKFKKEHKEIIVKPLYGNGGKQIFHIRENDPNFSSLLEMFFEYSNEPLIIQRYLPEVRNGDCRVIMIDGEIAGAVNRIPPEGQARSNLHVGGKAEKKILNNRELEICEALSEELKKKELILVGLDIIGNYLTEINVTSPTGVQEISRFDDSNISSMFWDAVESYI

SEQ ID NO: 164563 - protein, 89 aa, Unknown
  Bacterial polypetide isolated from the Sargasso Sea
AISRVPKSGSILSNMSKGAKPKIAFLSNKELKVSNIIAKKIKKDGIYFAGIDFIDGKLNGDINVTSPTGIKTYFDLSKINLAKTFWKGL

SEQ ID NO: 164564 - protein, 91 aa, Unknown
  Bacterial polypetide isolated from the Sargasso Sea
ARIHKDNNVKDNFHAGGQPRKTDLMYRDKEICDALRSDLKKKNLFLVGIDTIGNYLTEINVTSPTGLKQINELNDTNLEKIYWNKLEEKFF

SEQ ID NO: 164565 - protein, 268 aa, Unknown
  Bacterial polypetide isolated from the Sargasso Sea
YYPGNLSNIRGKTVSEGYFIKIDYSKKKFYKILKKSKIDLSFAKYILIRQDPPFNLEYISTTLMLDRIKDKTKIINDPTSIRNISEKFYSLNFKNYMADTIFTKDLFEIKKFFKKHKKIIIKPIHSYGGNDINLISGKLNALKIKQILKKHGHIMCQKFLNKIKFGDKRVFIINGKVCGAISRVPKSGSILSNMSKGAKPKIAFLSNKELKVSKIIAKKIKKDGIYFAGIDFIDGKLNGDINVTSPTGIKTYFDLSQINLAKTFWKGL

SEQ ID NO: 164566 - protein, 87 aa, Unknown
  Bacterial polypetide isolated from the Sargasso Sea
GEIRANLHVGAKPAKGVLSKKEIEICNAVGPVLKKYNLYFAGIDVIGGKYLTEINVTSPTGLQEINKFENKRCEIDIWKFIESNISS

SEQ ID NO: 164567 - protein, 295 aa, Unknown
  Bacterial polypetide isolated from the Sargasso Sea
DTSVAFIREAWRRGQAVDTCEVGDLGQRDGAPFVRATATSAGADVGGWASVTSARREPLAAYDAVWMRKDPPLDDAYLFATLLMSRAEGPVMVNDPSALRDENEKLFALEFPELCPTTLVSRDVEELLAFRDELGGEMIVKPLDGNGGRDVFHLTPGDRNARAIVEAGTGHGRRLLMAQQYLPAVREGDKRIILIEGEPAGAVLRVPAADEARANLHVGGRAVHAELTERDREICARIGPRLREKGVIFAGIDVVGDHLTEINITSPTGVREIEQLSGVALEAKVLDAVEVRRGS

SEQ ID NO: 164568 - protein, 205 aa, Unknown
  Bacterial polypetide isolated from the Sargasso Sea
PFSTIVVNDPTAVRNSTEKLFTFNFKEFMPPTLVTKDLKIIEEFLDKEEDIITKPLYGNGGEGIHRFDKSNFNSKILEEYLQLPIMVQKFINEIEHGDRRIVFFDGEYFGSVSRIPQEGNVKANFHAGGKAVKTGLVYRDKEIIENLGPKLKEHNLFFVGIDIIGNYLTEINVTSPTGLKQINALNNVNLEKDFWDKLEAKYKLV

SEQ ID NO: 164569 - protein, 175 aa, Unknown
  Bacterial polypetide isolated from the Sargasso Sea
PLLVQKDLKIIEEFLDKEEDIITKPLYGNGGEGIHRFDKSNFNSKILEEYLHLPIMVQKFINEINDGDRRVVFFDGEYYGSVARIPQEGNVRANFHAGGKAVKTGLVYRDKEIIEILGPKLKEHNLFFVGIDIIGNYLTEINVTSPTGLKQINALNNVNLEKDFWDKLEAKYKLV

SEQ ID NO: 164570 - protein, 193 aa, Unknown
  Bacterial polypetide isolated from the Sargasso Sea
NDPTSVRNISEKFYSLNFKNYMADTIFTKDLIEIKKFFKKHKKIIIKPIHSYGGNDINLISGKLNLLKIKQILKKHGHIMCQKFLNKIKFGDKRVFIINGKVCGAISRVPKSGSILSNMSKGAKPKIAFLSNKELKVSNIIAKKIKKDGIYFAGIDFIDGKLNGDINVTSPTGIKTYFDLSQINLAKTFWKGL

SEQ ID NO: 164571 - protein, 276 aa, Unknown
  Bacterial polypetide isolated from the Sargasso Sea
KKYKIFYYDPKNLSVVNSKVIAKGFFIKFNYRQKKFYKILKKQNLDLTKCKFLLIRQDPPFNLEYISTTYILDKIKRKVKIINNPTSIRNISEKLYSSKYQKYMPATIFTQNMDEIKKFFKKNKKVILKPIHSFSGNDIHLLTKFNSKLINKFIKKNDHIMCQQFLPRISKGDKRVFIINGKVCGAISRVPKKGSILSNMSKGAKPTNIRLTSKENKVSKLIAKDLMKENIFFAGIDFIDQKLNGDINVTSPTGIKTLYDLSGINLAKTFWKELKA

SEQ ID NO: 164572 - protein, 279 aa, Unknown
  Bacterial polypetide isolated from the Sargasso Sea
MTDKVLFITDTYKDLNIKKDTSILMMEETIKLGFNTFQCEINDLYIDEGMVYAASRKILSAGSAQVEGISKQEIRLSDFKFSFMRKDPPVNENYMNALHLLGLAEKQGAVVFNKPTAIKEFNEKIFALHFKEFIPKTLVTSDINKIEDFFELHKTIIIKPVDGMGGASIYKIDELNEENKDLLMKMTNSQQTHIICQEFIEDIYDGDFRILIIHGKPFQKTLARIPQGNSFKGNLAAGGRGEARDISDYQKMIGEKVGEFLIEKHINFAGIDVIGKHLT

SEQ ID NO: 164573 - protein, 114 aa, Unknown
  Bacterial polypetide isolated from the Sargasso Sea
MCQKFLNKIKFGDKRVFIINGKVCGAISRVPKSGSILSNMSKGAKPKIAFLNNKEQKVSNIIAKKIKKDGIYFAGIDFIDGKLNGDINVTSPTGIKTYFDLSRINLAKTFWKGL

SEQ ID NO: 164574 - protein, 154 aa, Unknown
  Bacterial polypetide isolated from the Sargasso Sea
MKLAVVMDPIERIKPEKDGTLDLLLSAQSFGYELTRFHSEELKIIDGRPLGIGRSITVNDDVKNWFAYGTENEFCLSDFDVILMRKDPPFDMEYIYATYILDLAKMGGAKVINDPSAIRNLNEKVSITMFPSVTPPTLVTSNQSDLESFVNQQE

SEQ ID NO: 164575 - protein, 275 aa, Unknown
  Bacterial polypetide isolated from the Sargasso Sea
KGYKLFYYYPENLSNIRGKTVSEGYFIKIDYSKKKFYKIIKKSKLDLSFAKYILIRQDPPFNLEYISTTLMLDRIKDKTKIINDPTSVRNISEKFYSLNFKNYMADTIFTKDLIEIKKFFKKHKKIIIKPIHSYGGNDINLISGKLNLLKIKQILKKHGHIMCQKFLNKIRFGDKRVFIINGKVCGAISRVPKSGSILSNMSKGAKPKIAFLSNKELKVSNIIAKKIKKDGIYFAGIDFIDGKLNGDINVTSPTGIKTYFDLSQINLAKTFWKGL

SEQ ID NO: 164576 - protein, 82 aa, Unknown
  Bacterial polypetide isolated from the Sargasso Sea
IFHAGGKASKTDLVYRDKEIIENLGPKLKEHNLFFVGIDIIGNYLTEINVTSPTGLKQINALNNVKLEKDFWDKLEAKYKLV

SEQ ID NO: 164577 - protein, 94 aa, Unknown
  Bacterial polypetide isolated from the Sargasso Sea
PIAALRRIPKNNEIRSNIHVGGNCEAVKISRQDLNICNEIKAFLKDEGLFFVGIDVIGKYLTEINVTSPTCIQEIKKLHKIDISKIIWDQLLKK

SEQ ID NO: 164578 - protein, 267 aa, Unknown
  Bacterial polypetide isolated from the Sargasso Sea
MGSSILFITDPFDSLKQEKDTSIFIMKEAFKRNFEVFQCEMSDLTLNQRLSSQCSQVINNNNNLEIAKRNLIDLASFSFCFMRKDPPVDQDYMNCLHLLNIASQDGVNIINSPNAIKIFNEKIFAMEFSDLMPPTIISADSTKIEEFLKIHEEIVIKPLNGMGGDNIHKVSSNDPESLGKIIDLTEDSRIQIIGQKFLPKINEGDFRILVIDGKPFEYCLARIPKEGSFLGNLAQGGKGVAKKITSNQREIGEKVGARLKSENILFA

SEQ ID NO: 164579 - protein, 65 aa, Unknown
  Bacterial polypetide isolated from the Sargasso Sea
RNYLKILGPKLKEHNLFFVGIDIIGNYLTEINVTSPTGLKQINALNNVNLEKDFWDKLEAKYKLV

SEQ ID NO: 164580 - protein, 114 aa, Unknown
  Bacterial polypetide isolated from the Sargasso Sea
MCQKFLNKIKFGDKRVFIINGKVCGAISRVPKSGSILSNMSKGAKPKVAFLSNKELKVSNIIAKKIKKDGIYFAGIDFIDGKLNGDINVTSPTGIKTYFDLTRINLAKTFWKGL

SEQ ID NO: 164581 - protein, 229 aa, Unknown
  Bacterial polypetide isolated from the Sargasso Sea
MTEKVLFITDTFENLNFKKDTSILMIEEALKKEMNVFQCEINDLFVDNNDVLVNCREINSLIEDIDTEVKKIDIDLKDFKYCFMRKDPPVDEDYNNALHLLDLAKHNGAVIHNNPCALKKFNEKVFATHFPEFIPKTLISSSINKIRAFFDSHKKIIIKPLDGMGGASIYKVDDFNEDNLKIIRTMTNSEKTQIICQSFIEDVYEGDFRILIINGKPFPKTLARIPKDG

SEQ ID NO: 164582 - protein, 217 aa, Unknown
  Bacterial polypetide isolated from the Sargasso Sea
ENYINALHLLGLAEKHGAIIHNKPNAIKEFNEKIFAIHFSEYIPSTLVTSKKSKIENFYKTHKSIIIKPLDGMGGTSIYKIENWDEEKIELIEQMTDSEKTQIICQKFIEDIYDGDYRILIINGKPFEKTLARIPKEGSFKGNLAAGGYGEARDITDFQKRIGEEIGKILMENGISFAGIDIIGELLTEINITSPTCAREILDQTKMNPIKEYFAGL

SEQ ID NO: 164583 - protein, 273 aa, Unknown
  Bacterial polypetide isolated from the Sargasso Sea
VGQQLFLIDPVARLRPDKDSSVALMQAGQRAGETIWVAEPSDLAAGAGGPQVRATAINTEPWYSAGQCCWLPLNHFQRVWMRKDPPVDEAYLYATHLLELAEASGVQVLNRPAGLRAWNEKLGALQFPELMAPTLVASQVELLSSFAREHCEVVLKPLGGRAGQGVVRASGSAPGLGALLELVTQQQRLPVMIQAFLPEVDAGDKRILLVQGEPLGAVNRKPKAGEFRSNLAVGGQPEATELTERERQICAALRPALIDAGLFFVGIDVIAGR

SEQ ID NO: 164584 - protein, 279 aa, Unknown
  Bacterial polypetide isolated from the Sargasso Sea
SIFIMKEALRRDFEVFQCEMSDLTLKQKLSSQCSQVINNNDILETAKKNEIDLASFSFCFMRKDPPVDQDYMNCLHLLNIASQDGANIINNPNAIKIFNEKIFATEFSDLMPPTIVSADSSKIEEFLRIHEEIVIKPLNGMGGENIHKVSTNDPKRLEKIIDLTENSKTQIIGQKFLPKINEGDFRVLVIDGEPFEYCLARIPKDGSFLGNLAQGGKGVAKQITSNQREIAKKVGTRLKSENILFAGIDIIDDKLTEINITSPTCAVQIFDQTGENPIT

SEQ ID NO: 164585 - protein, 183 aa, Unknown
  Bacterial polypetide isolated from the Sargasso Sea
MNFKEFMPPTLVTKDLKIIEEFLYKEEDIITKPLYGNGGEGIHRFDKSNFNSKILDEYLHLPIMVQKFINEIEHGDRRIVFFDGEYFGSVARIPQEGNLKANFHAGGKASKTDLVYRDKEIIENLGPKLKEHNLFFVGIDIIGNYLTEINVTSPTGLKQINALNNVKLEKDFWDKLEAKYKLV

SEQ ID NO: 164586 - protein, 307 aa, Unknown
  Bacterial polypetide isolated from the Sargasso Sea
MKFLFVIDPIKNINPLKDSSAALMQASSKKKIEVWTCTPQDLEARGDEVWASSWRAEVCPWVSFKENKCIPLTEFNCIWMRKDPPVNEGYLYATHLLEVAERKGVKVINKPSSLRAWNEKLGALRYSHLMAPTIVASKVKDLINFAQNNHDVVVKPLGGKGGQGVIRLTKDSPGIKAMIELITSQEELPVMMQKFIPEVKEGDKRIIIVNGEPIGSINRIPQGGDFRSNLAMGGKAEKTNLTAKEKKICTELSQHFKEEGLFFVGIDVINGMLSEINVTSPTGLREIETLSNKSVSNQVIEKLLEII

SEQ ID NO: 164587 - protein, 308 aa, Unknown
  Bacterial polypetide isolated from the Sargasso Sea
MTNKIVAIQGDIPSKLNPETDTSIFLANEIQNKSYKIFYYEPKNLSIINSKVVAKGYFVTINYNKKKFFKVLKKKTLELVKCKFILIRQNPPFNLEYISTTYILDSIKTKVKIINDPTSIRSISEKLYSSRYQKYMPNTIFTQNINEIKAFFKKNKKVILKPIHGYSGNDIHLLTRFKLNLIKRFVKKNGHIMCQKYLPKISNGDKRVFVINGKLCGVISRIPKKGSFLSNMSKGAKVINTKLTKVEKQISNLIAKDLKKENIFFAGIDLIDQKLNGDINVTSPTGIKTYYDLSGKNLAKTFWKELKA

SEQ ID NO: 164588 - protein, 310 aa, Unknown
  Bacterial polypetide isolated from the Sargasso Sea
MQGTSSLFITDSLDELNPKKDTTILCMQEAFNMGSQIFQCEMSDLTYKDKQTCAGFSAIKDPNDHPQISEHVNLIKALRDFDYVFMRKDPPVDENFMNALHLLSQAESEGANIINRPSALQKFNEKIFALRFSNWMPDSSVICKVEDFKQFKQKYSTIILKPLNGMGGESIYKFDESSTDHLEIFRSLTNNYQSMVMVQNFLPEIYDGDYRILIIHGKPFPIALARIPQGGSFKGNLAAGGIGEARELSDDQARVSTEIGKLLLEEGILFAGIDMIGNYLTEINITSPTGAREILSQTGKNPIKTLLQSI

SEQ ID NO: 164589 - protein, 306 aa, Unknown
  Bacterial polypetide isolated from the Sargasso Sea
MGNSILFITDPFNSLKQEKDTTIFIMKEALRRDFEVFQCEMRDLTLKQRLSSQCSQIINNNDILETAKKNEIDLAIFSFCFMRKDPPVDQDYMNCLHLLNIATQDGANIINNPNAIKIFNEKIFASEFSDLMPPTIISADSMKIEEFLRIHEEIVIKPLNGMGGDNIHKVSTNDPKSLGNIIDLTEDSKTQIIGQKFLPKINEGDFRVLVIDGEPFEYCLARIPKDGSFLGNLAQGGKGVAKKITSNQREIGEKVGARLKSENILFAGIDIIDDKLTEINITSPTCAVEIFDQTGENPITKIFDSL

SEQ ID NO: 164590 - protein, 306 aa, Unknown
  Bacterial polypetide isolated from the Sargasso Sea
MGNSILFITDPFNSLKQEKDTSIFIMKEALRRDFEVFQCEMSDLTHKQKLSSQCSQIINNNDILETAKKNEIYLASFSLCFMRKDPPVDQDYMNCLHLLNIASQDGANIINNPNAIKIFNEKIFAMEFNDLMPPTIISADSIKIEDFLKIHQEIVIKPLNGMGGDNIHKVSTNDPKSLGKIIDLTEDSKTQIVGQKFLSKINEGDFRVLVIDGEPFEYCLARIPKDGSFLGNLAQGGKGVAKKITSNQREIGKKVGARLKSENILFAGIDIIDDKLTEINITSPTCAVEIFDQTGENPITKIFDCL

SEQ ID NO: 164591 - protein, 307 aa, Unknown
  Bacterial polypetide isolated from the Sargasso Sea
MKFLFVIDPIKNINPLKDSTAALMQASSKKNIEIWSCTPQDLEARGDEVWASSVKVEVIPWISFKENDCIPLAEFNCIWMRKDPPVNEAYLYATHLLEVAERKGVKVINKPSSLRAWNEKLGALRYSHLMAPTIVASKVKDLINFANINNEVVIKPLGGKGGQGVIRINKNSPGIKSIIELITSQEELPVMMQKFIPEVIEGDKRIIIVNGEAIGSINRIPQGGDFRSNLAMGGKAEPTLLTEKEKSICSELSQHFKDEGLFFVGIDVINGMLSEINVTSPTGLREIENLSNKNVSEEVIEKLVEII

SEQ ID NO: 164592 - protein, 307 aa, Unknown
  Bacterial polypetide isolated from the Sargasso Sea
MTNKIVAIQGDNLKKINIKTDTTIFLAHEAQNKGYKLFYYYPENLSNIRGKTVSEGYFIKIDYSKKKFYKILKKSKLDLSFAKYILIRQDPPFNLEYISTTLMLDRIKDKTKIINDPTSVRNISEKFYSLNFKNYMADTIFTKDLFEIKKFFKKHKKIIIKPIHSYGGNDINLISGKLNVLKIKQILKKHGHIMCQKFLNKIKFGDKRVFIINGKVCGAISRVPKSGSILSNMSKGAKPKIAFLSNKELRVSKIIAKKIKKDGIYFAGIDFIDGKLNGDINVTSPTGIKTYFDLSQINLAKTFWKGL

SEQ ID NO: 164593 - protein, 228 aa, Unknown
  Bacterial polypetide isolated from the Sargasso Sea
RKDPPFDMEYIYATYILDLAKMGGAKVINDPSAIRNLNEKVSITMFPSVTPPTLVTSNQSDLESFLNQQEKIVVKPLDGMGGRSIFIVEKGEPNTKTIFEEMTRNNSKTIMAQKYIPEIKDGDKRIHLVFGNHVDMALARVPSEKDHRGNLVMGAVGEVRKLTQRDIEICKTIGGTLLKGGVYFAGIDVIGDYLSEINITSPTGMREISKNSDVNVSDRFFEALQKSN

SEQ ID NO: 164594 - protein, 308 aa, Unknown
  Bacterial polypetide isolated from the Sargasso Sea
MDHISSIDIKTDSTYLLALEAQRRGHTVLHYQVKDLFLENNIVYANTQKLLLKKNTKKFFQLLPIKKTKLTDVDIILMRQDPPFNMNYITATHLLEKLQPNVFILNDPKSVRNSPEKLLVTKFNKLMPPTLVSSDEKEILRFKNKYKDIIIKPLFGNGGEGIIRIKNGDQNFSSIFEVLNKIYNEPLMIQKFIKEVYKGDKRIVLLNGEIIGAINRIPAKGEIRANMHVGGKPKKTTLSKQEIEICNIISPELKKHNLYLAGIDVIGEKYLTEINVTSPTGLQEINKFDKKRCEIEIWNYIEKTIKTH

SEQ ID NO: 164595 - protein, 42 aa, Unknown
  Bacterial polypetide isolated from the Sargasso Sea
IDVIDGMLSEINVTSPTGIREVERLMQQPLADQVIERLRGLL

SEQ ID NO: 164596 - protein, 308 aa, Unknown
  Bacterial polypetide isolated from the Sargasso Sea
MKIAVQMDHVSKLSIKGDTTLALCLEAQKRKFKLYQYLPDNLTFIDGRLKVVVEELKLFDDCEDFFELGKPFTDDLNSFDTVLMRQEPPFDMHYITYTHLLDHLDKKVRVINNPVSVRNAPEKLLVTHFADLMPKTIISKNFDEIKEFVSKLNKVVLKPLYGKGGEGIILLESNDKMFDKKLENFLLGEHEPIMAQEYLPIVKKGDKRIILINGEPVGCLNRIPAEGEFRSNLGVGGLPELSELSPRDIEICQRISKTLIDYDLYFVGIDVIGDFLTEINVTCPTGVRQIKELGGPDIAKLFWDNINS

SEQ ID NO: 164597 - protein, 123 aa, Unknown
  Bacterial polypetide isolated from the Sargasso Sea
KEPLMAQKYIPEIVEGDRRIILIDGEYCGSVARVPESNNLKANFHAGGKPKKTDLVYRDKDICDALKADLIEKNLFLVGIDVIGNYLTEINVTSPTGLKQINSLNNVNLEKIYWDKLEKKFFN

SEQ ID NO: 164598 - protein, 305 aa, Unknown
  Bacterial polypetide isolated from the Sargasso Sea
GNSILFITDPFDSLKQEKDTSIFIMKEALKRDFEVFQCEMSDLTLKQRLSSQCSQIIKNNDILETAKKNEINLASFSFCFMRKDPPVDQDYMNCLHLLNIASQDGANIINNPNAIKIFNEKIFAMEFGDLMPPTIISADSIKIEGFLRTHEEIVIKPLNGMGGDNIHKVSTNDPKSLGKVIDLTEDSKTQIIGQKFLPKINEGDFRVLVIDGEPFEYCLARIPKDGSFLGNLAQGGKGVAKKITSNQREIGEKVGARLKSENILFAGIDIIDDKLTEINITSPTCAVEIFNQTGENPITKIFDSL

SEQ ID NO: 164599 - protein, 131 aa, Unknown
  Bacterial polypetide isolated from the Sargasso Sea
SEMETLLKMTNNESTQIITQEFIEDIYEGDFRILIIHGKPFKKTLARIPQGDSFKGNLAAGGKGVVKDISDFQFEMASEIGDFLIQKDINFAGIDVIGNFLTEINVTSPTCARQILDQSGENPIQEYFERL

SEQ ID NO: 164600 - protein, 306 aa, Unknown
  Bacterial polypetide isolated from the Sargasso Sea
MGNSILFITDPFDSLKQEKDTSIFIMKEALRRDFEVFQCEMNDLTLKQKLSSQCLQIINNNDILETAQKNEIDLASFSFCFMRKDPPVDQDYMNCLHLLNIASQDGANIINNPNAIKIFNEKIFAMEFNDLMPPTIISADSTKIEEFLKIHEEIVIKPLNGMGGDNIHKVSTNNPKSLGKIIDLTEDSKTQIIGQKFLPKINEGDFRILVIDGEPFEYCLARIPKDGSFLGNLAQGGKGIAKKITSNQREIGKKVGAKLKSENILFAGIDIIDDKLTEINITSPTCAVEIFDQTGENPITKIFDPL

SEQ ID NO: 164601 - protein, 185 aa, Unknown
  Bacterial polypetide isolated from the Sargasso Sea
KIFAVHFPEFIPDTLVSSKISEIKKFYSSHKEIIIKPLDGMGGTSIFKINDLNTESLNIIKDLTNSEETQIICQEFIEDIYEGDFRILIINGKPFQKTLARVPQSGSFKGNLAAGGKGIAKDITSVQQKIAEKIAPVLVKNGISLAGIDVIGKYLTEINITSPTCAREIFEQTKINPISEYFEGL

SEQ ID NO: 164602 - protein, 201 aa, Unknown
  Bacterial polypetide isolated from the Sargasso Sea
GAVIHNNPCALKKFNEKVFATYFPEFIPKTLISSSINKIRAFFDSHKKIIIKPLDGMGGTSIYKVDDLNEDNLKIIRTMTNSEKTQIICQSFIEDVYEGDFRILIINGKPFPKTLARIPKDGDFKGNLAAGGKGVAKDITENQKKIAEAIAPILVKNEISFAGIDIVGKYLTEINITSPTCAREILDQTQMNPIEEYFKGL

SEQ ID NO: 164603 - protein, 471 aa, Unknown
  Bacterial polypetide isolated from the Sargasso Sea
AKNESKASFGDDRIFAEKFITEPHHIEIQILADKKGNAIFLGERECSIQRRHQKVVEEAPSPFINDQTRQEMGAQAIALAKAVDYESAGTVEFIVDKNQNFYFLEMNTRLQVEHPVTEMVTGIDLVEQMIKVAYGEELEFKQSDIKTNGWAIESRVYAEDPYREFMPSIGRLSKYLTPDHSENVRVDTGIREGSEVSMFYDPMIAKLITHGENRDKAIENMMSAIDQYVIDGLSHNLNFLSSIMHNETFQSGYTTTDFIEQEYSDGFKGEAITEKEFEVFASILGACHLLDQMKLNFLYVNEKKFIVSFEEQNIEINIKKDGDNFVTHVDNNEYHLSLNSQSNDPRITCLVNGQNMVVQVRKEKPRYQLVHKGKIAMALISEQRVAELNELMPEKIPQDMSKFLLSPMPGLLIKVCVKEGQEVKAGEELAVVEAMKMENSLRASKDLKIKSILGSEGDNLSVDQKILEFED

SEQ ID NO: 164604 - protein, 87 aa, Unknown
  Bacterial polypetide isolated from the Sargasso Sea
AGETRSNMHVGGQAQPVKLTERDREICKVIGPILKNKGQIFVGIDVIGKYLTEINVTSPTGIQELERFDHINVAEIIWQTLEEKFKN

SEQ ID NO: 164605 - protein, 189 aa, Unknown
  Bacterial polypetide isolated from the Sargasso Sea
HIMMNFPELTPPTLISSNIEIITKFIKKNKEVIIKPAYGNGGLGIQKIYFNKPNLNLFIKNYLKKFFNSPIIVQRFLKNFNKGDKRIILINGKIAGGVLRVPKTNSIKANFHAGGKPVKTNITLKEKLICKKIKPFLIKNGLIFVGIDVIDGYLTEINITSPTGIQEINRLNNSKIEKDIIDFVSKSLQ

SEQ ID NO: 164606 - protein, 311 aa, Unknown
  Bacterial polypetide isolated from the Sargasso Sea
MHFLMIPLEKLILKGDTTLLLAFEAQRRKHKISFFKPDDLILKSNDVFANICKLELFSEKCLNEFKYYEKTIRSLKEYDVVMMRQDPPFNMAYITATHILEKVPYSTLVVNNPFEVRNSPEKLFVTNFSHLMPQTLITRNINAIRDFRENFKNIIIKPLYGNGGQGVFHVLPEDENFNSILEMFFSQSTEPLMIQEYLKDVRDGDKRIILLNGEPVGAINRIPKKGESRSNMHVGGKPEKTKLTKRDQFICNEISESLKQRGLYFVGIDIIGDYITEINVTSPTGIVEIKNLDSLAIEEMFWAFIENKLEV

SEQ ID NO: 164607 - protein, 245 aa, Unknown
  Bacterial polypetide isolated from the Sargasso Sea
YLIGYPKQVRVDNFNFVFIRQDPPYNMEYISSMHLLEQVKGPTKFINRPNGIRNAPEKISMLSYKEIIPPTVITREKKEINDFIKQNGKCVIKPLYGNGGESIFLLDKHDENYNQIIERFIDQLKEPFIIQKFLPEIKNGDKRIILVNGEPIAALRRIPKNNEIRSNIHVGGNCEAVKISRQDLNICKEIKGFLKDEGLFFVGIDVIGKYLTEINVTSPTCIQEIKKLHKIDISKIIWDQLLKTN

SEQ ID NO: 164608 - protein, 54 aa, Unknown
  Bacterial polypetide isolated from the Sargasso Sea
PTLKKQGLLFVGIDVIGRHLTEINVTSPTGIQELTRFSGINVAKIIWEAIESKL

SEQ ID NO: 164609 - protein, 248 aa, Unknown
  Bacterial polypetide isolated from the Sargasso Sea
LSEDIDTEVKKIDIDLKDFKYCFMRKDPPVDEDYNNALHLLDLAKHNGAVIHNNPCALKKFNEKVFATHFPEFIPKTLISSSINKIRAFFDSHKKIIIKPLDGMGGTSIYKVDDLNEDNLKIIRTMTNSEKTQIICQSFIEDVYEGDFRILIINGKPFPKTLARIPKDGDFKGNLAAGGKGVAKDITENQKKIAEAIAPILVKNEISFAGIDIVGKYLTEINITSPTCAREILDQTEMNPIEEYFKGL

SEQ ID NO: 164610 - protein, 161 aa, Unknown
  Bacterial polypetide isolated from the Sargasso Sea
KDIIIKPLYGNGGEGVFRIKPKDENFNTIIEMFLKQHKEQFMVQEYLADVRKGDKRIILIDGETIGGVNRVPAVGDSRSNMHAGGTPKKTKLTANDHLICKTISPFLKEKGLFFVGIDIIGKYITEINVTSPTGIQEINKFNKIKVEQIFWDKLEKKLLNH

SEQ ID NO: 164611 - protein, 274 aa, Unknown
  Bacterial polypetide isolated from the Sargasso Sea
HPNDLYIDNGLVKARGFYIELFEHDKNYFNFLTEKIEINLEEFKFIFLRQDPPFNMHYITSTYLLDCLSDTTVVINNPTSVRNCTEKILPFKFKEFMPPTLISQNIKDIESFLNIHKDVITKPLYGNGGEGINRSNKGSLIGIDTASEYLDMPIIAQKYIPEIKDGDRRIIFFDGEYAGSVARIPTKGSIKANFHAGGIAKKTDLVFRDQQIIEAVGPELKKLDLFFVGIDIIGNFLTEINVTSPTGIKQINQLNNVKLEQVFWDKLEAKYKIV

SEQ ID NO: 164612 - protein, 196 aa, Unknown
  Bacterial polypetide isolated from the Sargasso Sea
SSIRNSSEKIYPLEFEKFMAPTIITQNIASIKEFLLEHKDIVTKPLYGNGGEGIFRSRIENNKLQGIDESKTNLNEPIIVQKYIPEIIEGDRRIILIDGEYAGSVARIPEKNNLKANFHAGGTPQKTELIRKDEEICNALSKDLKLKDLFLVGIDVIGDYLTEINVTSPTGLKQINLLNKIKLEKIYWDKLENKFF

SEQ ID NO: 164613 - protein, 102 aa, Unknown
  Bacterial polypetide isolated from the Sargasso Sea
MMGKPVEYALARIPAPGETRGNLAAGAEAEGRKLTERDRWICSEVGPVLKKQGIIFAGLDVIGDYLTEINVTSPTGIRELDRQYGIDIAAMLIEAIERKLEN

SEQ ID NO: 164614 - protein, 267 aa, Unknown
  Bacterial polypetide isolated from the Sargasso Sea
MSLIVAIQMDPIEAIDIDVDSTFIMALEAQARGHCLYHYLPQDLVLNNGRVIAGVRPLLVRREMGNHFTLGAQEWIDLALVDVVLMRQDPPFDMAYITATHLLEHVHPDTLVVNDPVSVRNAPEKLFITHFPELMPPTLITSSKEQVLEFRDEHKDLIIKPLFGNGGAGVFHIGPGDENLNALLELFTELYREPTIVQRYEPAVRDGDKRIILIDGKPAGALNRVPANGESRSNLHVGGTAQKAALTKREREICEAIGPALAERGLI

SEQ ID NO: 164615 - protein, 217 aa, Unknown
  Bacterial polypetide isolated from the Sargasso Sea
YITSTYLLDCIPNSTVVVNNPTSVRNCTEKILPFKFKEYMPPTLISQNIKDIKNFLNMHKDVITKPLYGNGGEGINRSNDDNLVGIETVKEYLDMPIIAQKYIPEIKEGDRRIIFFDGEYVGSVSRIPIEGSIKANFHAGGIAKKTDLVFRDSEIIEKVGAELKELDLFFVGIDIIGNFLTEINVTSPTGIKQINQLNNVKLEQVFWDKLEAKYKIV

SEQ ID NO: 164616 - protein, 180 aa, Unknown
  Bacterial polypetide isolated from the Sargasso Sea
KKIIPETIITRSKKEVKSFIKKYGKSVIKPLYGNGGESIFLLDQDDENYNQIIETFIDKQKEPFIVQKFLREIKNGDKRIILIDGKPIAALRRIPKNNEIRSNIHVGGSCEVTEISKNDLRICNEIKNFLQSEGLFFVGIDIIGEYLTEINVTSPTCIQEIKKLHGIDISEVIWDQLSKK

SEQ ID NO: 164617 - protein, 125 aa, Unknown
  Bacterial polypetide isolated from the Sargasso Sea
MSFSAEPLMIQKYLPEVRNGDKRIILIDGEPAGATNRVPASGEARSNMHVGGRAEKSKITERDFEICATIGPELRRRGLVFVGIDVIGKYLTEINVTSPTGLQEINRFNKTNLETSIWDAIEFRL

SEQ ID NO: 164618 - protein, 99 aa, Unknown
  Bacterial polypetide isolated from the Sargasso Sea
MIKLGIVMDPISEINIKKDSSFAMLMAAQERGYQLFYMEMADLAMVNGVAMGNMRPLKVINDANKWFELGDAQDTPLSELNVVLMRKDPPFDTEFIYAT

SEQ ID NO: 164619 - protein, 209 aa, Unknown
  Bacterial polypetide isolated from the Sargasso Sea
SKKTLIINNPYEVRNAPETIFVTQFEQIMPKTMITRDVESIKLFRDKYKDIIIKPLYGNGGEGVFRIKPKDENFNTIIEMFLKQHKEQFVVQEYLADVRKGDKRIILIDGETIGGVNRVPAVGDSRSNMHAGGTPKKTKLTANDHLICQTISPFLKEKGLFFVGIDIIGKYITEINVTSPTGIREINKFNKIKVEQIFWDKLEKKLLNH

SEQ ID NO: 164620 - protein, 250 aa, Unknown
  Bacterial polypetide isolated from the Sargasso Sea
FDDSVDFFELGEPFVDDLNSFDTVLMRQEPPFDMHYITYTHLLDHLDKRVRVINNPVSVRNSPEKLLVTHFIDLMPKTIISKNFSEIKEFSKKLNKVVLKPLYGKGGEGIILLEVDEQMFDKKLGDFLSNEYEPIMVQEYLPIVKKGDKRIILINGEPVGCLNRVPAEGEFRSNLGVGGLPELSELSSRDIEICQRIRKTLIDYDLYFVGIDVIGDYLTEINVTCPTGVRQIKELGGPDIAKLFWDNIQI

SEQ ID NO: 164621 - protein, 221 aa, Unknown
  Bacterial polypetide isolated from the Sargasso Sea
MGYITNTHLLDLVAKETLIVNNPFWVRNLPEKLLVLEFPDLIPNTLISRDLEEIKEFKRKFKDIIVKPLYGNGGAGIFRLKEDDKNLTSLHELFSSMSSEPIIAQAFLPDVKNGDKRIILVDGEPVGAINRVPKAGEIRSNMHVGGKAEPAKLSQRDREICSAIGPTLKSKGQVFVGIDVIGEYLTEINVTSPTGIQELERFDNVNIAEMIWYAVEEKLKK

SEQ ID NO: 164622 - protein, 273 aa, Unknown
  Bacterial polypetide isolated from the Sargasso Sea
MRLILLGDTSFRLALEAQRREHLVHVYQPEDLSWKEGVVSAKVQAVTLRDVVGNHVTIGPSKTTPLEMFDVILMRQDPPFDMAYITATHLLEQLPKTTQVINNPREVRNAPEKLLVTNFLDLMPPTLISSDLNEIISFRAKYKDIIIKPLYGNGGAGVFRLQPNDQNLNSLLEMFSGISREPLMIQAYLPAVQNGDKRIMIVDGRAVGAINRIPAENEARSNMHVGGRAEPCELTDRDHYICEKIGPTLKARGLLFVGIDVIGDYLTEINVTS

SEQ ID NO: 164623 - protein, 143 aa, Unknown
  Bacterial polypetide isolated from the Sargasso Sea
FLLDINDKNFNQITENFVKFKSEPFIIQKFLPEIRKGDKRIILVDGQPIAAIRRIPKNNEIRANIHVGGSTEAVEISKQDKIICNEIGGFLRNEGLFFVGIDIIGNYLTEINVTSPTCIQEIKRLHKLDVAKIIWDSLTNPNK

SEQ ID NO: 164624 - protein, 251 aa, Unknown
  Bacterial polypetide isolated from the Sargasso Sea
HFSLSEPIKVSIKDFKFFFIRQDPPFDSNYLTNCYILELHQINNKSPFFVNNPSAIKNFTEKIFPLYFNDLIPKTFITSNPSEFKRILNDLKIVVVKKLYNKGGEGVYKIRLDDSNALDIFKMCSTNFTELLVVQEYMDEVIFGDKRIILVDGIPKGAVNRVPRMGEFKANLHLGAKADRTELTLKEKKICNTLKNTLKKNKLFLVGIDVINEKLTEINVTSPTGLVQISRLEKKNLAGIVWKSLLKKFAL

SEQ ID NO: 164625 - protein, 171 aa, Unknown
  Bacterial polypetide isolated from the Sargasso Sea
ITRSRKEIDLFMSSCKRSVIKPLYGNGGQGIFLLDKNDKNYNQIIEKFIDEDSVPFIVQKFLPDIIKGDKRIILINGEPIAALKRIPKKNEFRSNIHVGGSTKAVALTRNDIKICNIIKETLISEKLFFVGIDIIGNYLTEINVTSPTCIQEIKRVHKIDIAKIIFDRLGY

SEQ ID NO: 164626 - protein, 201 aa, Unknown
  Bacterial polypetide isolated from the Sargasso Sea
NNPFYVRNCPEKIFVNKYMKFMPHTLITRNVNEIIKFRDKHEKIIIKPLYGNGGANVFYSDSADRNFGSIIENFLESSNEPFIIQQFIPKVKDGDKRIILIDGEIAGAINRLPQDGEIRSNMHVGGLPAKTEITEGDAKICNAISQDLKDFGLFFAGIDVIDNLITEINVTSPTGIREILQLSGIDVAKIFWDQAEKKINN

SEQ ID NO: 164627 - protein, 226 aa, Unknown
  Bacterial polypetide isolated from the Sargasso Sea
MRQDPPFDMNYITTTYILDLLPDTTKIINNPTAVRNATEKLFTFNFEEFMPPSIVTKNINDILIFLDDFGEIITKPLYGNGGLGIHRFNKQNFNPDILKQYLHLPIMIQKYIKEIDQGDRRLILIDGEYYGSVARIPKDGYIKANFHAGGIPSKTALVFRDKEIIDKLGPKLRKNDLFLVGIDIIGDYLTEINVTSPTGIKQINTLNNVNLEKVFWDKLEAKYKLV

SEQ ID NO: 164628 - protein, 287 aa, Unknown
  Bacterial polypetide isolated from the Sargasso Sea
FTTTSSSVVFVATGDNGEILRSTNKGSSFDNATSPTGNRLRGVTFGNDIISAGGVSGNIVRSTDNGSSFDNVTSPTSSNLNGFSFGNDIFVAVGNSGNILRSTDNGSTFDNVTSPTGKNLFGVTFGNDIFLGVGQSGNIVRSTDNGSSWDNTTSPTGNNLRSIEFGNDIFVAVGVSGNIVRSTDNGSTFDNVTSPTGNNLFGVTFGNDIFVAVGNSGNILRSTDNGSTFDNVTSPTGKNLFGVTFGNDIFLGVGQSGNIVRSTDNGSSFDNATSPTGTTLYGVSFSE

SEQ ID NO: 164629 - protein, 241 aa, Unknown
  Bacterial polypetide isolated from the Sargasso Sea
EKIVINLEIFKFIFLRQDPPFNMNYITSTYLLDCLPSSVIVINNPAAVRNATEKIFPINFYKFMPKTIISNDIIELKNFLDNNNDIVIKPLYGNGGEGIFRINHKNFDNVLKDYNFLDLPIVAQKFIPEIKYGDRRIILLDGEYIGSVARIPEEGSIKANFHAGGSAKKTDLVFRDEEIIREVGKELKNRNLFFVGIDLIGDYLTEINVTSPTGIKQINSLNNIKIESIFWDKLEAKYKIV

SEQ ID NO: 164630 - protein, 186 aa, Unknown
  Bacterial polypetide isolated from the Sargasso Sea
ATLISRDSDAIHAFRAKHKDIIVKPLFGNGGTGVFRIQPNDQNLNSLLEIFFTNSREPIMLQAYLPAVRDGDKRVILVNGEPVGVVNRIPRDGEVRSNFHVGGTAAAARLTARDRHICATIGPELKRRGLLFVGIDIIGIYLTEINVTSPTGIREIQRLSNIDIAAITIDAIEQQHPLNASNSAVR

SEQ ID NO: 164631 - protein, 250 aa, Unknown
  Bacterial polypetide isolated from the Sargasso Sea
HISTVKIGGDSTFAMSLEAQNRGYNLFHYTPDRLSLRDGKVFATVEPMTLRDKEGDHYTLGAAERVDLSTMDVVLLRQDPPFDMAYITSTHLLERIHPKTLVVNDPAWVRNSPEKIFVTEFADLMPPTLITKDENEIKRFREEMGDIILKPLYGNGGAGVFHSTRDDRNFTSLLEMFAQMFREPYIAQAYLPAVRKGDKRIILVDGEFAGAINRVPAETDSRSNMHVGGRAEAAGLTEREKEIAPASALR

SEQ ID NO: 164632 - protein, 194 aa, Unknown
  Bacterial polypetide isolated from the Sargasso Sea
NSPEKLFVTNFSHLMPKTLITRNIDAIRDFRDNFKNIIIKPLYGNGGQGVFHVLPEDENFNSILEMFFTHNNEPLVIQEYLKDVRDGDKRIILLNGKPVGAINRIPKKGESRSNMHVGGKPEKTKLTKRDNFICNEICESLKQKGLYFVGIDIIGDYITEINVTSPTGIREIKNLDSIAIEDMFWDFIENKVKG

SEQ ID NO: 164633 - protein, 289 aa, Unknown
  Bacterial polypetide isolated from the Sargasso Sea
TSYLLIMEAQKRGYEVFYFNPIDLQFNQGIIQAWGFFIEVLNDSNNHFKYISKKKELLNLADFNVVLIRQDPPFDMNYISSTYILEKLPSSTIVLNNPTSIRNAAEKFYPFKFEKYIPPTIVTQNIEMIKNFLNEHKDIVTKPLYGNGGEGIYRSKFNDSNLNGIDESKNFLDEPIMAQRYIPEIIDGDRRIILIDGEYFGSVARIPQNNKLKANFHAGGKPKKTDLIYRDQEICNVLKNDLKEKNLFLVGIDIIGNYLTEINVTSPTGLKQINELNKINLEKDLLGQI

SEQ ID NO: 164634 - protein, 150 aa, Unknown
  Bacterial polypetide isolated from the Sargasso Sea
YGNGGEGINRSNNGILVGIETASEYLHMPIIVQKYIPEIQEGDRRIIFFDGEYVGSVSRIPIEGSIKANFHAGGIAKKTDLVFRDNEIIEAVGAELKELDLFFVGIDVIGNFLTEINVTSPTGIKQINQLNNVKLEQVFWDKLEAKYKIV

SEQ ID NO: 164635 - protein, 128 aa, Unknown
  Bacterial polypetide isolated from the Sargasso Sea
LTDNGSTQVMAQKYIPEIVEGDKRILMIDGEPLPWALARIPAAGESRGNLAAGGTGIGQPLSQRDKEIAKQLGPELRKRGLTFVGIDVIGDYLTEINVTCPTCIRELDQQFDANISADLMNCIENKLS

SEQ ID NO: 164636 - protein, 93 aa, Unknown
  Bacterial polypetide isolated from the Sargasso Sea
GATNRIPASGEARSNMHVGGQAEKSKLTERDFEICTTIGPELQRRGLIFVGIDVIGKYLTEINVTSPTGLQEINRFDKTNLESSIWDAIEFRL

SEQ ID NO: 164637 - protein, 169 aa, Unknown
  Bacterial polypetide isolated from the Sargasso Sea
FRSRKIDNFIKKYKKIILKPLFGNGGKDVFYLSFKDLNVKVIVEKLLENDVHIIVQKFIPQVIKGDKRILLINGDPVGAVNRIPNKNEIRANLHIGAKSKKVVISKSDLHICKKLRPFLREKGLYFAGIDIIDGFLTEINVTSPTCIREIDKYNKVNIASIFWDGLEKT

SEQ ID NO: 164638 - protein, 121 aa, Unknown
  Bacterial polypetide isolated from the Sargasso Sea
PVMMQQFLPEVKNGDKRILLVNGEPLGAINRRPKKGDFRSNLALGGKAEITELTPKEIEICDQIKPALQDEGLFFVGIDVIGGMLSEINVTSPTGIREVENLMNIPLADQVINYLIDHLNN

SEQ ID NO: 164639 - protein, 229 aa, Unknown
  Bacterial polypetide isolated from the Sargasso Sea
MGLSIAIQMDKVETLQIARDTTFALGLEAQKRGHRLWYYTPDLLSLNEGIIYARGQELAFYDKVGGHFKTGMTEIKSLQDFDIILMRQDPPFDMAYITATYLLEMLSPKTMVVNNPAEVRNSPEKLLVTLYPDLIPPTLISRDPEAITAFRHKHKDIIVKPLFGNGGAGVFRIQPDDLNLNSLLEMFFNLNLEPVVVQAYLPAVRNGDKRIILIDGDPVGAVNRIPNDG

SEQ ID NO: 164640 - protein, 197 aa, Unknown
  Bacterial polypetide isolated from the Sargasso Sea
SLRAWNEKLGALRFSDLMAPTLVASRVEQLITFAKEYGEVVLKPLGGKGGQGVIRIAKDAPGLEALLELVTSQEHLPVMMQQFLPEVINGDKRILLVNGEPLGAINRRPKEGDFRSNLALGGKAETTKLTPKEIEICNQIKPALQEEGLFFVGIDVIGGMLSEINVTSPTGIREVENLMNVPLADQVIDYLIDHLNN

SEQ ID NO: 164641 - protein, 120 aa, Unknown
  Bacterial polypetide isolated from the Sargasso Sea
MAQKYIKEINQGDRRLILIDGEYCGSVARIPKDGDIKANFHAGGKAKKTDLVFRDREIIESVGPQLAKNNLFFVGIDIIGDYLTEINVTSPTGIKQINTLNNVNLEKLFWDKLEAKYKLV

SEQ ID NO: 164642 - protein, 304 aa, Unknown
  Bacterial polypetide isolated from the Sargasso Sea
MDKIETIDYEFDTSFLIGYEAQQRNYKIFYYNPNDLTIKNGNVEATGYYIKLNLDKKNYFKYISEKITVNLKNFNFIFLRQDPPFDMNYITSTYILDLLPETTKVINNPTSVRNSTEKLFTFNFKEFMPPTIVTKNIDDIYNFLENVQEIITKPLYGNGGVGIHKFNKHNFNPKILEKYLHLPIMIQKFIEEIDEGDRRLILIDGEYCGSVARIPEKGNIKANFHAGGIPYKTDLVFRDKEIIDVVGPNLIKNNLFFVGIDIIGDYLTEVNVTSPTGIKQINTLNNVNLEKVLWDKLEAKYKLV

SEQ ID NO: 164643 - protein, 185 aa, Unknown
  Bacterial polypetide isolated from the Sargasso Sea
RFKKFIAPTLITQDIETLRKFLSKHKDIVTKPLYGNGGEGIFRSTIKNNKLNGINERKRILKNPIMAQKYIPEIKKGDRRLILIDGDYVGSVARIPKKGKLKANFHAGGFPQKTGLVRRDKEICRALKKILKDNNLFFVGIDIIGDYLTEINVTSPTGIKQINIINNTNLEKIFWDKLETKYNIV

SEQ ID NO: 164644 - protein, 129 aa, Unknown
  Bacterial polypetide isolated from the Sargasso Sea
TQHGKTPIMAQRFVPEITEGDKRILMINGEPVPYALARIPKEGELRGNLAAGGTGQGRELSDRDRWICEQVGPTLKRKGLYFVGLDVIGDYLTEINVTSPTCVRELDAIFDINIAGQLFDALLELRSTS

SEQ ID NO: 164645 - protein, 205 aa, Unknown
  Bacterial polypetide isolated from the Sargasso Sea
NNPKGIRNAPEKISMLAFKKIIPPTMITKSSSEVAKFIKRFGKAIIKPLYGNGGESIFLLDANDKNYNQIIENFINCRTEPFIIQKFLPEVRKGDKRIILLDGEPIAAIKRIPPVNDIRANIHVGGKSQAVKISKQDIIICNEIRGFLKKEGLFFVGIDIIGNFLTEINVTSPTCIQEIKKLHKLDISKLIWDRLTKKNNSLNFK

SEQ ID NO: 164646 - protein, 241 aa, Unknown
  Bacterial polypetide isolated from the Sargasso Sea
MKLGVVMDPIETINFKKDSTLAMMIEAQRKEHEIFYMTPESLFIDSGMAFARTSKVQVRNDPSDWFSLDKEQLINLSELDVILMRQDPPFNSSYIYNTYVLEIASREGAKVLNNPQSLRDCNEKVYATEFPQCCTKHLVSSDKELLKNFVLDKGDTVIKPLDGMGGASIFRLKEGDANLNVILETITYHFTEKVMIQEYIPEITEGDKRILVINGKPMSAAIARVPAKGELRRHPCGGCLS

SEQ ID NO: 164647 - protein, 307 aa, Unknown
  Bacterial polypetide isolated from the Sargasso Sea
MNKVLFITDTFKDLNVKKDTSILMIEEAIKRDFNVYQCETSDLFINDGVVYASSRNILSAGSTQIEGIIKEDIKVCDFHMSFMRKDPPVDEIYINALHLLGLAEKQGASIYNKPNSIKEFNEKIFALHFKKFTPKTLVTAKIDKINEFFKLHEKIVVKPLDGMGGLSIYKFDQMNEENLNILKNMTDVEQTQIICQEFVEDIYQGDYRVLIIHGKPFSKTLARIPQEGGFKGNLAAGGKGVAKDITEFQRQLGEEIGDYLMKVGINFAGIDIIGEYLTEINITSPTCAREILDQTDMNPISEYFQGL

SEQ ID NO: 164648 - protein, 308 aa, Unknown
  Bacterial polypetide isolated from the Sargasso Sea
MNKKVLFITDTLEELDLKKDTSILMMEESIKLGFDVYQCLVEDLYAENSEVIVFAKKITTAGSSEIKFEDASTHSIKTFEYSFMRKDPPVDEDYINALHLLGLAQAMGTKVFNNPVSIKEFNEKVFAIHFAKYIPETLISSKIDKIKSFIKDKKEIVVKPLDGMGGKSIYKMDKIQNSEIKTLLKMTNNESTQIITQEFIEDIYEGDFRILIIHGKPFKKTLARIPQGGSFKGNLAAGGKGVVKDISDFQFEMASEIGDFLIQKDINFAGIDVIGNFLTEINVTSPTCARQILDQSGENPIQEYFEKL

SEQ ID NO: 164649 - protein, 312 aa, Unknown
  Bacterial polypetide isolated from the Sargasso Sea
MKKSIAIQMDNIEKIDYEFDTSFLIGYEAQERDYDIFYYNPKDLFIKENTIQASGYYLELQLDEKNYFNFKSNKIIAKLEDFQFVFLRQDPPFDMNYITSTYILDLLPSSTIVVNDPTAVRNSTEKLFTFNFKEFMPPTLVTKDLKIIEEFLDKEEDIITKPLYGNGGEGIHRFDKTNFNSKILDEYLHLPIMVQKFINEIEHGDRRIIFFDGEYFGSVARIPQEGNLKANFHAGGKASKTDLVYRDQEIIKNLGPKLKKHNLFFVGIDIIGNYLTEINVTSPTGLKQINALNNVKLEKDFWDKLEAKYKIV

SEQ ID NO: 164650 - protein, 242 aa, Unknown
  Bacterial polypetide isolated from the Sargasso Sea
MKLGVVMDPIESINFKKDSTLAMMIEAQRKGHEIIYITSDSLFIKSGIPYASSNKIEVRNDPSDWFTKEEEIVIELCKLDSILMRQDPPFNSGYIYNTYVLEMAARQGVNIFNNPRSLRDCNEKVYATEFPQCCTKHIVTSRKDLLTNFVMENKDTVIKPLDGMGGASIFRVKANDPNLNVILETITHRFTQKVMIQEFIPEISEGDKRVLIVNGKPMSASIARVPAEGELRGNLAAGASAV

SEQ ID NO: 164651 - protein, 315 aa, Unknown
  Bacterial polypetide isolated from the Sargasso Sea
MKLGVVMDPIESINFKKDSTLSMMLEAQAREHQLLYMTPDSLYLNTTGAHALASAITVKNDPMGWFECDEKKQIRLSELDVILMRQDPPFNSNFIYNTYVLESAEREGVLVINKPASLRDCNEKVFATEFPECCTPFLVSSEASLLKSFIEDHKDTVIKPLDGMGGSSIFRLRNTDPNLNVILETITDSFKTKVMIQTYIPEITDGDKRVLLINGMPMNAAVARVPAAGELRGNLAAGASAVARSLTEKDLWICEQVGPKLKDLGLVLVGLDIIGDYLTEINVTSPTCFREYENLCDINVALSFLDAVEDLQKNV

SEQ ID NO: 164652 - protein, 269 aa, Unknown
  Bacterial polypetide isolated from the Sargasso Sea
MKLAVVMDPIERIKPEKDGTLDLLLSAQSFGYELTRFHSEELKIIDGRPLGTGRPITVNDDVKNWFAYGTENELCLSDFDVILMRKDPPFDMEYIYATYILDLAKMGGAKVINDPSAIRNLNEKVSITMFPSVTPPTLVTSNQSDLESFLNQQEKIVVKPLDGMGGRSIFIVEKGEPNTKTIFEEMTRNNSKTIMAQKYIPEIKDGDKRIHLVFGNHVDMALARVPSEKDHRGNLVMGAVGEVRKLTQRDIEICKTIGGTLLKGGVYFA

SEQ ID NO: 164653 - protein, 311 aa, Unknown
  Bacterial polypetide isolated from the Sargasso Sea
MKLAVVMDPIERIKPEKDGTLDLLLSAQSFGYELTRFHSEELRISDGKPLGIGRSISVFDDINSWFNYGSENEFCLNDFDVILMRKDPPFDMEYIYSTYVLDLAKMNGAKVINEPSAIRNLNEKVSITLFPNVTPPTLVSSSQQDLRSFLNEHKKIVVKPLDGMGGRSIFIVEKGEKNTNTIFEEMTKNDSKTIMAQKYIPEIKNGDKRIHLVFGKHVDMALARVPSEEDHRGNLVMGAVGEVRKLTQRDKEICNQIGATLLKAGVYFAGIDVIGDYLSEINITSPTGMREISKNSEVNVSDVFFKALQKN

SEQ ID NO: 164654 - protein, 208 aa, Unknown
  Bacterial polypetide isolated from the Sargasso Sea
KEGGLVVNKPSSLRDCNEKVFATEFPECCTPFLVTSDLNLLKSFIEDHRDTVIKPLDGMGGSSIFRLRYSDPNLNVILETITESFTTKVMIQIYIPEITDGDKRILLINGNPMDAAVARVPAEGELRGNLAAGASAVARSLTEKDLWICEQVGPKLKDLGLVLVGLDIIGDYLTEINVTSPTCFREYESLCDIDVAHSFIEEVEGLLK

SEQ ID NO: 164655 - protein, 308 aa, Unknown
  Bacterial polypetide isolated from the Sargasso Sea
MTDKVLFITDAYKDLNTKKDTSILMMEEAISLGFNTFQCEINDLYVDEGIVYSTSREILSAGSTQIEGISKQEIRLSDFKFSFMRKDPPVNENYINALHLLGLAEKQGAVVFNKPTAIKEFNEKIFALHFKEITPKTLVTSNINKIENFFELHKTIIIKPLDGMGGASIYKIDQLNEENKDLLMKMTNSQRTHIICQEFIEDIYDGDFRILIIHGKPFQKTLARIPQGNSFKGNLAAGGRGEARDISDYQKMIGEKVGEFLIEKHINFAGIDVIGKHLTEINITSPTCAREIFDQTGLNPIAEYFKGL

SEQ ID NO: 164656 - protein, 263 aa, Unknown
  Bacterial polypetide isolated from the Sargasso Sea
MGIGRSITVNDDKKNWFAYGTENEFCLSDFDVILMRKDPPFDMEYIYATYILDLAKMGGAKVINDPSAIRNLNEKVSITMFPSVTPPTLVTSNQSDLESFLNQQEKIVVKPLDGMGGRSIFIVEKGEPNTNTIFEEMTRDNSKTIMAQKYIPEIKDGDKRIHLVFGNHVDMALARVPSEKDHRGNLVMGAVGEVRKLTQRDIEICKTIGGTLLKGGVYFAGIDVIGDYLSEINITSPTGMREISKNSDVNVSDRFFEALQKSN

SEQ ID NO: 164657 - protein, 309 aa, Unknown
  Bacterial polypetide isolated from the Sargasso Sea
MKEKLLFITDTYKELNLKKDTSILMIEEALRNNFLVYQCELNDLFVDQEKVYAQARKIIAAGATQVEGISKEDISFKNFKYTFMRKDPPVDENYINALHLLGLAEIQGAKIFNKPNSIKEFNEKIFAIHFKDLIPRTLITSNLSKIEDFHKELEEPIVVKPLDGMGGKSIYMMEEINEEEYVILKELTNNYKTQIVVQEFLPDIYDGDVRVLIIHGKPYEKTLARIPQGGSFKGNLAAGGKGEVRDISDIQMRIGSVVGEFLMEKDINFAGIDIIGQKLTEINITSPTCAREIFEQSGMNPIEEYFKKL

SEQ ID NO: 164658 - protein, 284 aa, Unknown
  Bacterial polypetide isolated from the Sargasso Sea
ESQKRKNTNYIFHPNDLYFQKNKVLAQSSQIKFTSANFKAYKLGSKKTLDLGSLDIIFVRQDPPYDMSYISSMHLLEQVNSKTKIINHPRGIRNAPEKLLMLKYPKLIPPTIITRSEKEVNQFMRIYKNCVIKPLYGNGGEGIFFLNKSDRNYKQILEIFLNKSNEPFIVQKFLPEIQKGDKRIILVNGNPVGAVKRMPQGNEIRSNIHVGGKCIKTKLSKRDLEICNFLKDDLLENGLFFVGIDVIGNFLTEINVTSPTCIQEIKRLYKIDIAKIIWNNLNNK

SEQ ID NO: 164659 - protein, 183 aa, Unknown
  Bacterial polypetide isolated from the Sargasso Sea
FEKYIAPTIITQKISSLKKFLETNQDIITKPLYGNGGEGIFRTKISDEKLQGIDESNEFLEEPLMAQRYIPEIREGDRRIILIDGDYAGSVARIPQENNIKANFHAGGKPEKSELIYRDKEICEALQKDLKEKNLFLTGIDVIGNYLTEINVTSPTGLKQVNKLNEINLEKIYWNKLEEKFFN

SEQ ID NO: 164660 - protein, 310 aa, Unknown
  Bacterial polypetide isolated from the Sargasso Sea
MQGTSSLFITDPLNELNPKKDTTIVWMQEVYEMGGQILQCEMKDLIYKDQQTFANCVEIQDPNQHPQISERVDDTKRLKDINYIFMRKDPPVDEDYMNALHLLSQAESEGANVINRPTALKKFNEKIFALQFSNWMPDTSVICKEEDFKLFKNKYSTIILKPLDGMGGESIYKFDESSTDHIEIFKSLTNHYQTMVMVQNFLPEIYAGDYRILIIHGKPFPIALARIPQGGSFKGNLAAGGIGEARELSDDQLKVSLEIGKVLMDEGILFAGIDMIGNYLTEINITSPTGAREILAQTGKNPIKTLLQSI

SEQ ID NO: 164661 - protein, 314 aa, Unknown
  Bacterial polypetide isolated from the Sargasso Sea
MRKHNNINALFQIDSLSQLNPETDSSLDIIKEGLKLGLNIWITNPDNLTFYAGRISFTASKVKDSSLKLYKSKKIFLEKFDFFFIRQDPPFDMKYISNCYLLELHQKFNKKPFFINDPTGIKNFTEKIFPLYFHSFMPKTMVSSSVKDLVYMFEKHDTLVFKPLYCKGGEDIYKFSRKDKHYLRTFQMLLTKYKSPVVIQKFIEKVKYGDKRVILVNGKAVGAVNRIPQSGAFKANLHLGGTASSTKLTKKEIDICNLLGSVLRENKLFFVGIDLIDQKLTEINVTSPTGIVQLRELYNVNVSKLLWEELMSIV

SEQ ID NO: 164662 - protein, 263 aa, Unknown
  Bacterial polypetide isolated from the Sargasso Sea
RGDEPMAVALPVTPDPWIAVGAPERQSLAGFDVIWMRKDPPVDEAYLYATHLLEVAERAGVRVLNRPSALRAWNEKLGALRFSRWMAPTLVAGRVSELMAFAREQGDVVLKPLGGRAGLGVIRVQAEAPGLKALLELVTEQERLPVMAQRFLPDVTEGDKRILLVDGDPLGAVNRRPSEGEFRSNLAVGGQAEATELSERERQICAALAPALRAEGLFFVGIDVIGGMLSEINVTSPTGVREVERLMQQPLADQTIERLRSLV

SEQ ID NO: 164663 - protein, 300 aa, Unknown
  Bacterial polypetide isolated from the Sargasso Sea
SKKTPSFAMLLEMQRRGYTTHYLEPHDIWVQDGIIWGKMHTIDVQDNPTQWYTVGNAIAQPLAELDFLLMRKDPPVDMDFFYLTYLLDLAEQQGLKVFNRPSSIRDANEKLFACHFPQCTPPHVVTAQHDLIRAFLEQHPHAVIKPLNGMGGQGIFQLQANDPNLTALLDTATDGGTTRVMVQQYLDDIQQGDKRVIVINGEPIPYGIARVPAPGDFRGNLAAGATAKDIELSERDRWIANEVGPRLMEQGLVFVGLDIIGDYLTEINVTSPTGVREIERFRQINVLETLFDHIENTCQC

SEQ ID NO: 164664 - protein, 142 aa, Unknown
  Bacterial polypetide isolated from the Sargasso Sea
MAIKLGIISDPISGFNIKKDTGFAMMMQAQERGYEIYYMEMDDLSLRKGKSYATAAKARVFNNEEKWYELEEKTTIALADLDVILMRKDPPFDTEYIYATYLLERAEDEGTLIINKPQSLRDANEKLFTAWFSEHTPDTLVT

SEQ ID NO: 164665 - protein, 137 aa, Unknown
  Bacterial polypetide isolated from the Sargasso Sea
ADRNFGSIIENFMNISNEPFIIQKFIPNVSHGDKRIILINGQIAGAINRLPQNGEIRSNMHVGGQAVKTDITPNEREICEVLSKDLINFGLFFVGIDVIDNFITEINVTSPTGIREIHKLTGQNIAENFWNEAEKLL

SEQ ID NO: 164666 - protein, 192 aa, Unknown
  Bacterial polypetide isolated from the Sargasso Sea
NPTEKIYTFQFKQYMAPTIVTQKLEDIKKFILDHKDIIIKPLYGNGGEGIYRCKDGIINGVDINKNFLDQPIMIQKFIPEITEGDRRIILIDGEYVGSVARIPEKGNIKANFHAGGKAKKIDLVFRDEEIIGVVGPELKKRNLFFVGIDIIGNYLTEINVTSPTGIKQINALNNVSIEKIFWDKLEAKYDIV

SEQ ID NO: 164667 - protein, 311 aa, Unknown
  Bacterial polypetide isolated from the Sargasso Sea
MSGYLKIAFLMDPLETLDLQGDTTFALALEAQKRKHDISFFKPDDIIFNNNDVLANICKFELSSSNDVHEFKYHETFIKPLSKYDVIMMRQDPPFNMAYISATHILEKLPSSTLVVNNPFEVRNCPEKIFVTNFSHLMPKTLITRNISAIKEFRREFKDIIIKPLYGNGGQGIFHILPEDENLNSILEMFFNQNKEPLMIQEYLKDVRYGDKRIILLNGKAVGAINRVPKLGESRSNMHVGGKPEKTELTKRDKFICNEISHYLVEKELFFVGIDIIGNYITEINVTSPTGIREIKNLDSVAIEEMFWDFI

SEQ ID NO: 164668 - protein, 308 aa, Unknown
  Bacterial polypetide isolated from the Sargasso Sea
MTKKVLFITDTFENLNFKKDTSILMIEEALKKEMNVFQCEINDLFVDNNDVLVNCREINSLSEDIDTEVKKIDIDLKDFKYCFMRKDPPVDEDYNNALHLLDLAKHNGAVIHNNPCALKKFNEKVFATYFPEFIPKTLISSSINKIRAFFDSHKKIIIKPLDGMGGTSIYKVDDLNEDNLKIIKAMTNSEKTQIICQSFIEDVYEGDYRILIINGKPFPKTLARIPKDGDFKGNLAAGGKGVAKDITENQKKIAEAIAPILVKNEISFAGIDIVGKYLTEINITSPTCAREILDQTQMNPIEEYFKGL

SEQ ID NO: 164669 - protein, 169 aa, Unknown
  Bacterial polypetide isolated from the Sargasso Sea
MKLAVVMDPIERIKPEKDGTLDLLLSAQSFGYELTRFHSEQLRIRDGKPLGIGRTISVFDDINSWFKYGSETEFCLNDFDVILMRKDPPFDMEYIYSTYVLDLAKMNGAKVINEPSAIRNLNEKVSITLFPNVTPPTLVSSSQQDLRSFLNEHKKIVVKPLDGMGGRSI

SEQ ID NO: 164670 - protein, 217 aa, Unknown
  Bacterial polypetide isolated from the Sargasso Sea
MKLAVVMDPIERIKPEKDGTLDLLLSAQSSGYELTRFHSEQLRISDGKPLGIGRSISVFDDINSWFNYGNENEFCLNDFDVILMRKDPPFDMEYIYSTYVLDLAKMNGAKVINEPSAIRNLNEKVSITLFPNVTPPTLVSSSQQDLRSFLNENKKIVVKPLDGMGGRSIFIVEKGEKNTNTIFEEMTKNDSKTIMAQKYIPEIRNGDKRIHLVFGKH

SEQ ID NO: 164671 - protein, 313 aa, Unknown
  Bacterial polypetide isolated from the Sargasso Sea
MKIKIAIQMDDIKTIDYAFDSSFMIGLEGQKRNYEIFYYHPNDLYIDNGLVKARGFYIELFEQDKNYFKFLSEKIEINLEEFKFIFLRQDPPFNMNYITSTYLLDCLSDTTIVINNPTSVRNCTEKILPFKFKDFMPPTLISQNIKDIENFLNIHKDVITKPLYGNGGEGINRSNEGNLIGIETANDYLDMPIIAQKYIPEIKDGDRRIIFFDGEYAGSVARIPAEGSIKANFHAGGIAKKTDLVFRDQQIIEAVGPELKKLDLFFVGIDIIGNFLTEINVTSPTGIKQINQLNNVKLEQVFWDKLEAKYKIV

SEQ ID NO: 164672 - protein, 307 aa, Unknown
  Bacterial polypetide isolated from the Sargasso Sea
MNELLFITDTYKNLNIKKDTSVLMIEEAIKNNFIVFQCELNDLFVQDGIVHASSRNIISAGLTQVEGILKEDKKISDFKFSFMRKDPPVDENYLNALHLLGLAEKQGATIFNKPNSIKEFNEKIFALHFNKYVPKTLITSNIEKIKDFYELHKKIIVKPLDGMGGISIYKIDDLNEDNLNIINEMTNSEQTKIICQEFLEDIYDGDFRVLIIHGEPFEKTLARIPQKGNFKGNLAAGGKGIAMDISDFQRKLGEEIGEYLIKMGINFAGIDIIGECLTEINITSPTCAREIYEQTGINPITRYFEGL

SEQ ID NO: 164673 - protein, 313 aa, Unknown
  Bacterial polypetide isolated from the Sargasso Sea
MKLGVVMDPIETINFKKDSTLAMMIEAQKRNHEIFYITPNSLFINSGISYATTSNIEVRNDPLDWFSLEEEKIIKLSELDAILMRQDPPFNSDYIYNTYILEMASREGVSVFNDPRSLRDCNEKVFASEFPQCCTKHLVTSNKQLLSDFVEEHRDTVIKPLDGMGGASIFRLKKNDPNLNVILETITHHFTQKVMIQEYIPEISEGDKRVLLVNGQPMSAAIARIPAEGELRGNLAAGASAVAKSLSERDMWICKEVGPSLVEKGLLLVGLDIIGDYLTEINVTSPTCFKEYKELCDIDVAKTFIEAVEELTP

SEQ ID NO: 164674 - protein, 307 aa, Unknown
  Bacterial polypetide isolated from the Sargasso Sea
MRQLFVLDPLAQIRPEKDSTAALMQASQRAGDDIWACTPSDLIARGDEPLAMAVPVTPDPWITVGAPERQSLAGFDVIWMRKDPPVDEAYLYATHLLEVAERAGVRVLNRPSALRAWNEKLGALRFSRWMAPTLVAGRVSELMAFARDQGDVVLKPLGGRAGLGVIRVQAEAPGLKALLELVTEQERLPVMAQRFLPDVTEGDKRILLVDGEPLGAVNRRPSAGEFRSNLAVGGQAEATELSERERQICSALAPALRAEGLFFVGIDVIGGMLSEINVTSPTGVREVERLMNQPLADQTIERLRSLV

SEQ ID NO: 164675 - protein, 315 aa, Unknown
  Bacterial polypetide isolated from the Sargasso Sea
MTIKKVAIQMDPIEKIDLDFDTSFLLAKEAQDRGYEIFYYNPKDLEYKNRSIFALGHFVELFNDKNKYYNYLSSKKEIFNLENADVILIRQDPPFDMNYITSTYLLEKLSPSTTVLNNPSSIRNSSEKIYPLEFEKFMAPTIITQNIASIKEFLLEHKDIVTKPLYGNGGEGIYRSRIENNKLQGIDENKTNLNEPIIVQKYIPEIVEGDRRIILIDGEYAGSVARIPEKNNLKANFHAGGKPQKTELIRKDEEICNALSKDLKLKDLFLVGIDVIGDYLTEINVTSPTGLKQINLLNKIKLEKIYWDKLENKFF

SEQ ID NO: 164676 - protein, 303 aa, Unknown
  Bacterial polypetide isolated from the Sargasso Sea
MKLAVVMDPIERIKPEKDGTLDLLLSAQSFGYEVTRFHSEELKIIDGRPLGIGRSITVNDDVKNWFAYGTENEFCLSDFDVILMRKDPPFDMEYIYATYILDLAKMGGAKVINDPSAIRNLNEKVSITMFPSVTPPTLVTSNQSDLESFLNQQEKIVVKPLDGMGGRSIFIVEKGEPNTNTIFEEMTRDNSKTIMAQKYIPEIKDGDKRIHLVFGNHVDMALARVPSEEDHRGNLVMGAVGEVRKLTQRDIEICKIIGGTLLKGGVYFAGIDVIGDYLSEINITSPTGMREISKNSDVNVSDR

SEQ ID NO: 164677 - protein, 308 aa, Unknown
  Bacterial polypetide isolated from the Sargasso Sea
MKFGFQIDPVHTLNHDTDSTLPMILESQKRKNRNFIFSPSSLTFKKNTVYALVKEIKFKNNKLNSYIISSEKILNLNSLNCIFIRQDPPYNMEYISSMHLLEQLNPKTKVINSPAGIRNAPEKILMLKFKDIIPPTLITRSRKEIDLFMSSCKRSVIKPLYGNGGQGIFLLDKKDKNYNQIIEKFIDEDSVPFIVQKFLPEIIKGDKRIILINGEPVAALKRIPKTNEFRSNIHVGGNTKAVKLSKNDRKICSIIKETLINEKLFFAGIDVIGNYLTEINVTSPTCIQEIKKLHKIDVAKIIFDKLVE

SEQ ID NO: 164678 - protein, 108 aa, Unknown
  Bacterial polypetide isolated from the Sargasso Sea
VLPIIKIDTKREFYNYEAKYLDDNTSFSFPEFSTEKELSIKEVCLKAFESLNCRGWGRVDFFIDKDINLIEINTIPGMTSHSLVPMSAKHLGMSYLQLVEELLINAKK

SEQ ID NO: 164679 - protein, 117 aa, Unknown
  Bacterial polypetide isolated from the Sargasso Sea
TVTVIDNVCFPPIEIITNNEFYDYEAKYISNDTLHIEADLNQDEIKEIKEISLKAFKSLGCKGWARVDLFQDTDKNLSIIEINTVPGMTSHSNVPKSGSLINLSYSDVVQRIINASL

SEQ ID NO: 164680 - protein, 143 aa, Unknown
  Bacterial polypetide isolated from the Sargasso Sea
WPYGETVMVERFVRGREFTCGVIDGKSLCVTEIVPVGQKFYDFDAKYKPGGSKHILPAEVKPNIYQKIQSLAVQAHQIMGCRGVSRSDFRFDEERGEEGLIWLEINTQPGMTPTSLVPEMAAEAGMSFSAFLRWMVEDASCLR

SEQ ID NO: 164681 - protein, 274 aa, Unknown
  Bacterial polypetide isolated from the Sargasso Sea
ACLELGYETTPVDFKGDFSSILNDLKCSDIVFNALHGTVGEDGTIQSWLDGENIGYTGSGPDSSKLCMNKNKSKKIIRKNNYLTPSWFTIDNKSSKLPGEVIKSIAFPCIVKPNAQGSTFGLSIVNDTNELAEAIKLSGKYDDTSLVEEYIIGREITVGILDERALPIVEIVPDHKLYDYECKYSPGKSQYLCPADIGFNKEKQIKKDSEKIFKLLGCNGYGRLDFLLDNNGRYFFLELNTLPGMTSTSLLPIAAAESGKSFPDLVDTIIRLSI

SEQ ID NO: 164682 - protein, 233 aa, Unknown
  Bacterial polypetide isolated from the Sargasso Sea
VLESLKIKYTHSGVLSSSIAMDKIISKEIFIKNKILTPKYFKFIFEGNTLKKSKIINKIKLKLKFPVIIKPINEGSSVDVFICSEKNLIKNLKKLKKYEEILIEEYIGGREIQVAILGKKKLGAIELKPKRKFYDYKAKYSLSAKTEHLIPVNLSSKNMNKVLDISLKAHNCLRCRGVTRSDFKFYNDKFYLLEVNTQPGMTKLSLVPEIAAHIGMNFLNLLEWILNDASTNK

SEQ ID NO: 164683 - protein, 230 aa, Unknown
  Bacterial polypetide isolated from the Sargasso Sea
QSWLDKNNINYTGSGSYASRSCMDKNESKKIVRKNNYLTPEWTTIDNNDTIITKEITRSIDFPCIVKPNSQGSTFGLSIVNDKIELMAAIELAGQYDDITLIEEYIVGREITVGILGNKALPIVEIIPDNQLYDYECKYSPGKSQYLCPAEIDSNKVKQIKEDSEKIFKILGCRGYGRIDYILDSNDRHFFLELNTLPGMTSTSLLPIAAEKSGKSFSQLVDIIIGLSIQ

SEQ ID NO: 164684 - protein, 201 aa, Unknown
  Bacterial polypetide isolated from the Sargasso Sea
KNILRQHNLPTPDFSVYKTFQEIIESKNKIEEQFQEGVFIKPCKEGSSIDIIKVTDFSKSDLEKIKVDLVDRERKFLVERFVEGREFTVGFLNDHILEPLEIITKREFYDYEAKYDDDETQIIKADLNENDLDTLKEIAKSCFKVFGLSRWGRVDILQDQKGNFFVLELNTVPGMTDHSLFPYAASLKGFSFDELVNEITK

SEQ ID NO: 164685 - protein, 195 aa, Unknown
  Bacterial polypetide isolated from the Sargasso Sea
RTPKYLVFNFESNKKEIFAKIKKYLGFPVVIKPINEGSSVGVYICKKKNFLFNLNKLKKYKEILIEEYIPGREIQVAILGKKKLGAIELKPKRQFYDYKAKYNASAGTKHIIPVQIDKKNLKQVLSIALKAHQLLKCRGVTRSDFRFYNNKFYLLELNTQPGMTSLSLVPEIASYYGISFIKLIEILINDASIKK

SEQ ID NO: 164686 - protein, 128 aa, Unknown
  Bacterial polypetide isolated from the Sargasso Sea
MLLSGGWSAEREVSIRSGAAVSAALDRLSIGYTHIDLSSEQDAKNLSEEYDLAFIALHGRGGEDGFIQEILESKDIKYTGSNSSSCKTSLNKIEAKKIWRELLLPTPDFVEIINVGDPEMKLTPHLSG

SEQ ID NO: 164687 - protein, 150 aa, Unknown
  Bacterial polypetide isolated from the Sargasso Sea
LEAAYRHASTFGADVMAEQFVSGPEYTVAILGDRALPSIRIDVSGDFYDFEAKYHSEETRFTCPSDLATQEEAALSELALAAFAAVGGEVWGRVDVMREAGGDWQLLEVNTVPGMTSHSLVPLAAKVAGLSLLDLLTEIYQHSLEVRHAD

SEQ ID NO: 164688 - protein, 115 aa, Unknown
  Bacterial polypetide isolated from the Sargasso Sea
MGNEPLPVIEIEPKSGIYDYKSKYTAGESRYTCPADLTLEKYQFVQDCALSVHKMLKCDVYSRVDFKFYDNNFYFLEINTLPGMTETSLFPMAAKRHGFSFKDIIYKIIKLSLQK

SEQ ID NO: 164689 - protein, 149 aa, Unknown
  Bacterial polypetide isolated from the Sargasso Sea
ISDEDSLRAAYKKCTNPNRGFLFEEYIHGREITVTIIDKECYPPIEIITKNEFYDYDAKYISDDTLHVEAELTQKELDEIKLIAVNAFEVLDCKAWARVDMIQDKKGKFYVIEINTVPGMTSHSNVPKSGSLLGLTYNEVVQKIIDASL

SEQ ID NO: 164690 - protein, 71 aa, Unknown
  Bacterial polypetide isolated from the Sargasso Sea
SKALKIHKLLECRHYSRVDFILDKNLKPWFLEVNTLPGMTETSLVPKSAAVAGLSFEELIEKIIMESLIDE

SEQ ID NO: 164691 - protein, 183 aa, Unknown
  Bacterial polypetide isolated from the Sargasso Sea
HFREIIESKNKIEEQFQEGVFIKPCKEGSSIDIIKVTDFTKSDLEKIKVDLVDRERKFLVERFIEGREFTVGFLNAHILEPLEIITKREFYDYEAKYDDDETQIIKADLDENDLDTLKEIAKSCFNVFGLSRWGRVDILQDQKGNFFVLELNTVPGMTDHSLFPYAASLKGFSFDELVNEITK

SEQ ID NO: 164692 - protein, 236 aa, Unknown
  Bacterial polypetide isolated from the Sargasso Sea
MGNINKIAVLYGGSSSEREVSIQSGKGVHNAICDLGYESDLIDFKDLNNLNELKMYDFIFIALHGFEGEAGKLQRDLDDLNILYSGSGHEACMKTWNKKVTKETLKENNINTPVSLSISEFSLEDANQSLNTSLFDRFRPFNYLFLKPEEDGFSIDIFKISDEESLKNAYKKCTNRERGFLFEEYIDGRELTVTIIDKECYPPIEIITKNEFYDYDAKYISDDTLHIEAELTQSEL

SEQ ID NO: 164693 - protein, 68 aa, Unknown
  Bacterial polypetide isolated from the Sargasso Sea
HICLKTLDIFQATGWLRVDLMQDNNQNFYVLEVNTVPGMTSHSLFPKSAESIGISYDELVNRILNAKN

SEQ ID NO: 164694 - protein, 178 aa, Unknown
  Bacterial polypetide isolated from the Sargasso Sea
IESKNKIEEQFQEGVFIKPCKEGSSIDIIKVTDFSKSDLEKIKVDLVDRERKFLVERFIEGREFTVGFLNDHILEPLEIITKREFYDYEAKYDDDETQIIKADLDENDLDTLKEIAKSCFNVFGLSRWGRVDILQDQKGNFFVLELNTVPGMTDHSLFPYAASLKGFSFDELVNEITK

SEQ ID NO: 164695 - protein, 264 aa, Unknown
  Bacterial polypetide isolated from the Sargasso Sea
MKKVCILYGGNSSEREVSLKSGKFIHKSLVKNGYKSQLIDYADLTELEKLKDFDLVFIALHGEEGESGILQSKMDELGIYYTGSGFEACKNSWDKEICKNILRQHNLPTPDFFVYKTFQEIIESKNKIEEQFQEGVFIKPCKEGSSIDIIKVTDFSKSDLDKIKVDLVDRERKFLVERFIEGREFTVGFLNDHILEPLEIITKREFYDYEAKYDDDETQIIKADLDENYLDTLKEIAKNCFNVFGLSKWGRVDILQDQKEIFLY

SEQ ID NO: 164696 - protein, 178 aa, Unknown
  Bacterial polypetide isolated from the Sargasso Sea
MRNKNIQFPIVIKPIDEGSSLGVYICKNKNEFKKNYNKLKKKYDKILIEEYIPGKEVQVAVMGNKPLGAIELVPKRKFYDYKAKYSSKAKTKHIMPAPLTKKKYQEVLRIAKKAHKALGCRGITRSDFRFFRNRFYLLETNTQPGMTSLSLVPEIANHEGIIFEDLVCWIAKDASINR

SEQ ID NO: 164697 - protein, 190 aa, Unknown
  Bacterial polypetide isolated from the Sargasso Sea
QILIKKNQNISTNEKIKRITFPCIIKPNNGGSSIGLSKVYKEVDLNDKIQIAFKEDKEVLIENFLDGQEVSVGVIQNKNERIILPITEIISDNELFDYNAKYLGESQEITPGNISDKSKKLIFKYLNMIYDNINLNGITRSEFIIIDEVPHILETNTIPGFTAQSIIPQQIKAHNLKVKDVINNLVKSII

SEQ ID NO: 164698 - protein, 212 aa, Unknown
  Bacterial polypetide isolated from the Sargasso Sea
MKKKYGKVLVLMGGWSNEREISLISGKYVLESLISSGVNAISFDLNKDNLHEIKQINPDRVFIILHGKGGEDGEIQLFLDNLNIPYTGSGSNASKICMNKRISKDILLDNNISTPFYKKFDNKDDIEDLEKIFKYPFIVKPSSEGSSIGVNIVENRQDFHQAIKDNKLISNDILIEEYIDGIEYTVGILHDRALPVIKLIPPGKFYDFNAKI

SEQ ID NO: 164699 - protein, 225 aa, Unknown
  Bacterial polypetide isolated from the Sargasso Sea
KYTHSGVLSSSLAIDKEISKKIFIRNNILTPPYFKLTFNNIINHKKIIKKIEQKLKFPVVLKPINEGSSVGIYISKKKNFSQNLMKLQKFKEILIEKYIPGREIQAAILGNKKLGIIELRPRRKFYDYKAKYSASAKTEHIIPVNISNKNFKKVNSIAMKAHKLLKCRGVSRSDFRFYNNKFYLLELNTQPGMTSLSLVPEIARYKKISFINLIEEIMKDASINK

SEQ ID NO: 164700 - protein, 239 aa, Unknown
  Bacterial polypetide isolated from the Sargasso Sea
HGEEGESGILQSKMDKAGIDYIGSGFEACRNSWDKEICKNILRQHNLPTPDFFVYKTFQEIIESKNKIEEQFQEGVFIKPCKEGSSIDIIKVTDFSKSDLEKIKVDLVDRERKFLVERFIEGREFTVGFLNDHILEPLEIITKREFYDYEAKYDDDETQIIKADLDENDLDTLKEIAKNCFNVFGLSRWGRVDILQDQKGNFFVLELNTVPGMTDHSLFPYAASLKGFSFDELVNEIAK

SEQ ID NO: 164701 - protein, 245 aa, Unknown
  Bacterial polypetide isolated from the Sargasso Sea
MHGVGGEDGTVQKYLEKIPVSSIGSGSESSRLSFNKITTKEIWLENGLQTPKYCAISQDIFENNILDTFGDKVVLKPIESGSSVGIKILNKKDLITKKNTSPFDYLCSFMDINIDPDKYFIEEYINCPEYTAPIIKDVVYPIIKIETDREFYNYDAKYIDEDTSFIFPEFSRDIQELINNVALDAFHSLGCKNWGRVDFFMDDSYNINLIEVNSIPGMTSHSLVPMSANKAGLSYHDLIMLILNN

SEQ ID NO: 164702 - protein, 272 aa, Unknown
  Bacterial polypetide isolated from the Sargasso Sea
MDKINNIAVIYGGTSSEREISIKSGNGVHNALLDLGYQSKLIDFKDLEYFDELINFDFVFIALHGFEGEGGFLQQELDKLNILYSGSGPAACANTWDKGLTKKILDLNKINTPNSIEIDQFTEEISEAGLHSSIFDPLRPFDSIFLKPKEDGSSVDIFKIFDDDSLKQAYKKCLNPNRGFLFQEFIKGKELTVTVIDNECFPPIEIITNNEFYDYEAKYISNDTLHIAADLNEIEIKEIKEISLKAFKSLGCKGWARIDLFQDTDKNFSIMK

SEQ ID NO: 164703 - protein, 285 aa, Unknown
  Bacterial polypetide isolated from the Sargasso Sea
DSYMNTEQLLKVAKEVGADAIHPGYGFLSENADFAKQVRSAGMHFIGPSPDWIERMADKVEARKLMKSAGVPTFPGSGQITNEKEAREFVSENGLPVIVKPSGGGGGIGMKVVFDESELGEAISNASEMAEKSFSNGSVYLERWMEDSRHVEFQILADLKGNVMHLFERDCSVQRRNQKLIEEAPAFGIDRAECENLADRIAGTVSKLGYDNLGTIETLRSSSGEYGFLEMNTRIQVEHGVTEEVTGVDLVAAQIRLAAGEGLPETTDLDGFAVEARVYAEDPVS

SEQ ID NO: 164704 - protein, 241 aa, Unknown
  Bacterial polypetide isolated from the Sargasso Sea
MIDINDLEGLKELRAYDFVFIALHGFEGEGGTLQKCLDDLNILYSGSGSKCCKNTWNKKLTKKILKQNNINTPLWSEVSKLPSYDSPDAKFSAKYFDKFRPFDAIFLKPQEDGSSIDIFKITNEESNRNAIKACSNPNRGFIYEEYIEGKEFTVTIVDDECFPPIEIISKNEFYDYDAKYLSDKTILKEAKLNRNELIEINKIATDAFKALNCDGWARVDLIQGSDGKFYVIEINTVPGMT

SEQ ID NO: 164705 - protein, 98 aa, Unknown
  Bacterial polypetide isolated from the Sargasso Sea
NELFDYGAKYLGQSKEITPANISNEEINLIHKYINIIYDNIEFNGFTRSEFIIVDGIPHILETNTIPGFTKQSIIPQQIEAHGLSVRDEINYQIESIL

SEQ ID NO: 164706 - protein, 43 aa, Unknown
  Bacterial polypetide isolated from the Sargasso Sea
MLEVNTLPGMTETSLYPDGALHIGYTFPALIQLLVEEAYSRSN

SEQ ID NO: 164707 - protein, 217 aa, Unknown
  Bacterial polypetide isolated from the Sargasso Sea
MTGSSVGIVSGASGVVSSLDLADNKFDVSVIEERDSISGEGNFGSVELLLPFDGSNGATSTSDSSDRGNSITFNGDAQISTAQSKFGGSSLGLDGTGDYLDVGDTYWNTALNNTDFTIEFWVRFDSVTGIRRIIVNNSGSNGLGVYLNSSGYVDAFFYSGTWRYMQYDDGSATKTAVSADTWYHVAWTRSGDVWTFFLNGNIERQKTMSYTIAASSL

SEQ ID NO: 164708 - protein, 55 aa, Unknown
  Bacterial polypetide isolated from the Sargasso Sea
VYGRIDYLIDKDGCHYFLEVNTLPGMTQTSLLPKSLASIGIAFDSLIKNIVDLSI

SEQ ID NO: 164709 - protein, 247 aa, Unknown
  Bacterial polypetide isolated from the Sargasso Sea
AVFNIIHGDPGENGDLAEILERNKIPQTACDVYVSKLTSNKKKYIEFVNSLGIPSSKQVLITNNDINNLSSLSSSITFPCIVKPNNGGSSIGVSKVYKSDELNEKVQIAFKEDDEVLIESFLDGQEVSVGVIQNKNDRIILPITEIISDNELFDYSAKYLGKSQEITPGNVSEKSKKLIHEYLNNIYDNINLNGITRSEFIIVDNIPYILETNTIPGFTEQSIVPQQIEAQKLNVKDVINDILRSIL

SEQ ID NO: 164710 - protein, 274 aa, Unknown
  Bacterial polypetide isolated from the Sargasso Sea
MDDIKKIAVICGGSSLEREISLQSGSGVGNALIELGYQTSIIDFQDLNDLGILKNYDLVFIALHGFEGEGGDLQESLDNLGIKYTGSNKLGCKNTWNKAKCKNILSQNDVSSPKAIISSSLDNEDFNPFIKFEKEFGYKKNLFMKPSEDGSSIDIYKISNNDDFISARMSCINKSREFIFEEEIKGKEYTLTIINNECFPPIEIQTKNDFYDYDAKYISNETILAEAKLSDKELDLMNKISLKAYKALNCSGWARVDILEDEDGNLYVLEINTV

SEQ ID NO: 164711 - protein, 226 aa, Unknown
  Bacterial polypetide isolated from the Sargasso Sea
QNKIPYTGSDYEACKITWNKNTFKKILRENRIPTPNWISVPSLHEFKSNLDDSIFDQFRPFNEIFLKPTEDGSSIDVFKLSTNDDLQKAISDSMDSKRQFIFEESIDFKELTVPILNGKCLPPVEIITKESFYNFNAKYVNDDTELNEFIISDKKKIELEQICLKTLDIVKARGWLRVDLMQDSNQNFYVLEVNTVPGMTSHSLFPKSAESIGLSYDELVNEIINA

SEQ ID NO: 164712 - protein, 171 aa, Unknown
  Bacterial polypetide isolated from the Sargasso Sea
EEQFQEGVFIKPCKEGSSIDIIKVTDFSKSDLEKIKVDLVDRERKFLVERFIEGREFTVGFLNDHILEPLEIITKREFYDYEAKYDDDETQIIKANLDENDLDTLKEIAKNCFNVFGLSRWGRVDILQDQKGNFFVLELNTVPGMTDHSLFPYAASLKGFSFDELVNEITK

SEQ ID NO: 164713 - protein, 135 aa, Unknown
  Bacterial polypetide isolated from the Sargasso Sea
RVMAETWVEGDEYTVPILGETILPVIKLETKRKFYDYDAKYNDDKTKYICPCGLDQVSESAIGEVSKKACSLLGVSGWSRVDLMIDSNKQEWLIEVNTIPGMTSHSLVPMSAKKAGISFEVLVTQILATSFKKGL

SEQ ID NO: 164714 - protein, 223 aa, Unknown
  Bacterial polypetide isolated from the Sargasso Sea
AGIDYTGSGFEACKNSWDKEICKNILRQHNLPTPDFSVYKTFQEIIESKNKIEEQFQEGVFIKPCKEGSSIDIIKVTDFSKYDLEKIKVDLVDRERKFLVERFIEGREFTVGFLNDHILEPLEIITKREFYDYEAKYDDDETQIIKADLNENDLDTLKEIAKSCFKVFGLSRWGRVDILQDQNGNFFVLELNTVPGMTDHSLFPYAASLKGFSFDELVNEITK

SEQ ID NO: 164715 - protein, 162 aa, Unknown
  Bacterial polypetide isolated from the Sargasso Sea
INEGSSVNVFICNQLNIKKFLKKLKIYKEILIEEYIPGREIQAAILGNSKLGAIELKPKRKFYDYEAKYNSKAKTEHIIPVNLTKTKFKELMNISLKVHNLLGCRGVTRSDFKYYKDKFYLLETNTQPGMTKLSLVPEICLHKGINFMKLIKLLLDDASTNK

SEQ ID NO: 164716 - protein, 216 aa, Unknown
  Bacterial polypetide isolated from the Sargasso Sea
MASALTMTKVRTKCFWQGLGLPTPAFQQLTPETNWQAVIEALGSVFVKPALEGSSLGMSKADNAQELEAAYRHASTFGDDVMAEQFVSGPEYTVVILGDIALPSIRIDVSGDFYDFDAKYHSEETRFTCPSDLAAPEEAALTELALAAFAAVGGEVWGRVDVMREAGGDWQLLEVNTVPGMTSHSLVPLAAKVAGLSLLDLLTEIYQHSLKVRHVD

SEQ ID NO: 164717 - protein, 144 aa, Unknown
  Bacterial polypetide isolated from the Sargasso Sea
SNLNKLKKYKEILIEEYIPGREIQVAILDEKKLGAIELKPKRLFYDYKAKYNASAGTKHVIPIQIDKKNLNKVLSIALKAHKLLKCRGVTRSDFRFYNNKFYLLELNTQPGMTSLSLVPEIAAYYGISFIKLIEILINDASIKK

SEQ ID NO: 164718 - protein, 73 aa, Unknown
  Bacterial polypetide isolated from the Sargasso Sea
TRNILNNTIRKAYNVIGCSCWGRLDFFIKGKKIILLEINTIPGMTDHSLVPKAAKEKGISYYQLILKILDING

SEQ ID NO: 164719 - protein, 180 aa, Unknown
  Bacterial polypetide isolated from the Sargasso Sea
FLFNNQTYDDIKIKFGSSFFVKDTCSGSSNNIYLINNINDFKNFLKTKDNREYMIEEKIEADEYTAAILNDDVLPIIKIISSNKFYDFDAKYNSNETKFLFPILDEKIVNYINNIILQAFKALGCKTWARIDFFIDKDKIVLLEINTIPGMTDHSLVPKAAKKIGLTYYDLILKILGINA

SEQ ID NO: 164720 - protein, 88 aa, Unknown
  Bacterial polypetide isolated from the Sargasso Sea
MEEIKKIIVICGGSSSEREISLQSGKGVYDALKKLGYETTIVDFKTISDLNIFKTYDLIFIALHGFEGEGGNLQEKFDDLSIPYTGSG

SEQ ID NO: 164721 - protein, 256 aa, Unknown
  Bacterial polypetide isolated from the Sargasso Sea
INQIIIKNDYKLYLDDFKSCDIVFNALHGPTGEDGTIQLWFEKNNITYTGSGPRSSSICMDKNNSKKIIKDLGLSTPKWDLVGPQINYNLIKYPCIIKPNSQGSTYGLSIVNNVDELSDAINFARKYDSDVLIEEYINGREITVGVLGSKALPIVEIKPQNDIYDYDCKYKPGMSSYFCPAKFNDQIASKIKIDSELIFKALGCKGYGRIDYIIDKNMNYYFLELNTLPGMTSTSLLPIAAKALNISFNDLVHKII

SEQ ID NO: 164722 - protein, 256 aa, Unknown
  Bacterial polypetide isolated from the Sargasso Sea
MESIKNIIVVCGGSSSERTISLDSGQGIYESLLRLGFDAEIVDFININDLNIFKNYDLVFIALHGHEGEAGLLQKKLELLEIKYTGSASEVCRLTWDKSATKKFLNKKQISTPKSIDVSEIKKLELKFSDIPFDHFFIKPSMEGSSINIFEIKDNNDYEIALEKLKECSGLFIIEEAINYKEYTVSIIGDKCYPPIEIITENNFYDYDAKYISDKTQLIEVSKDNLQFRSIVDLSIKTFNALGCSGWCRIDILEEK

SEQ ID NO: 164723 - protein, 143 aa, Unknown
  Bacterial polypetide isolated from the Sargasso Sea
MKIAVLLGGTSMERDVSVASGTQVISALRSVGHKVIVVESSRGVLSTTEERELLAYGINTEPPRNMEDTEGWLPVLANKLQMAEVDLVFLALHGGWGEDGTIQAVFEKVGLPYTGSNKLGSRLAMDKNMAKKIFCASEVPTPK

SEQ ID NO: 164724 - protein, 151 aa, Unknown
  Bacterial polypetide isolated from the Sargasso Sea
NDRELNVAIALARKFTRIVLIEDFVKGREITVTIIGNKPYPIVEIIPKKGLYDYESKYSKGLTDYFCPADIKSDLTTTIQATALTIHQLLGCRHYSRVDFILDKSLNAWFLEVNTLPGMTETSLVPKSAAGAGLSFKGLIEKIIMECMIDG

SEQ ID NO: 164725 - protein, 235 aa, Unknown
  Bacterial polypetide isolated from the Sargasso Sea
GELQARLDKMNIIFTGSKYSACSNTWNKNLCKTILNENSINTPNSILLNNLKNCSNNPFDCFEKKFGYKPNLFMKPCEDGSSIDIFKISNDEDYKKAKLNCLNLEREFIFEESIEGREFTVTIIGNKCYPIIEIKTQNDFYDYDAKYISDDTILDQAKLSDNELNIINDIALRAFHVLKCNGWARVDIIQDKNGNFNVIEINTVPGMTSHSCVPKSASFMGLSYQDVIKEILINV

SEQ ID NO: 164726 - protein, 139 aa, Unknown
  Bacterial polypetide isolated from the Sargasso Sea
SELILIESFIDGREITVPIIGNKAYSIVEIIPSHDFYDYECKYTKGMSEYICPAELGINLSESIKDQALKVHKILDCRHYSRVDFILDKNNDPWFLEINTLPGMTETSLLPKSLKASGVEFKDVIQKIINEAINSPRFY

SEQ ID NO: 164727 - protein, 336 aa, Unknown
  Bacterial polypetide isolated from the Sargasso Sea
MSKINLLLLCGGGSAEHDISLLSANYFETSLAKSEQFNVLRVVLDKFGQYQTAAGDDCELTNNREIRFRDETKAPWPVDYVIPCIHGYPGETGDIQSYFNLIQLPYFGCESEASSNCFNKITAKMWFSALGIPNTPYIFLNQYDDEAIAQTQAALKNWGSIFVKAASQGSSVGCYKVDDNSKVADVLKDAFGYAPYVIVEKTIKARELEVAVYEYQGEVVATLPGEIICDTNTFYTFDEKYASSSKARTDVVAQNVPTEISEQIRQYAIKAFKGMKLRHLSRIDFFLTADNEILLNEINTFPGSTPISMFPKMLQNHGHDFTEYLSLVINGQLAAK

SEQ ID NO: 164728 - protein, 261 aa, Unknown
  Bacterial polypetide isolated from the Sargasso Sea
KNFIKNLKKIKPNVIFNALHGTFGEDGFVQSILENLKIKYTHSGVISSSIAMNKLLSKKIFINNKIRTPKYLLFNFESNKKEIFAKIKKYLGFPVVIKPINEGSSVGVYICKKKNFLFNLNKLKKYKEILIEEYIPGREIQVAILGKKKLGAIELKPKRQFYDYKAKYNASAGTKHIIPVQIDKKNLKQVLSIALKAHKLLKCRGVTRSDFRFYNNKFYLLELNTQPGMTSLSLVPEIASYYGISFIKLIEILINDASIKK

SEQ ID NO: 164729 - protein, 293 aa, Unknown
  Bacterial polypetide isolated from the Sargasso Sea
MVRKYGKVLVLMGGWSNEREISLISGKSVLDSLISSGVDAHELILDKKNIELIKEISPDRVFIALHGEGGEDGEIQSYLDRFSIPYTGSSSSSSEICMNKRKTKLKLLENKFQTPKYLKIENNTEIKFIEKNFSYPFVVKPSSEGSSIGVFIVDNKYEFYDAVEENRKISEDFIVEQYIDGEEYTVGIINDLALPSIKLKPPGKFYDYDAKYKSSEMQYICPSGLDIEKEKEIKEISINCFKTLECRGWGRVDIILDRKYNPWIIEINTVPGMTKHSLLPMAAKEFGIDFSEL

SEQ ID NO: 164730 - protein, 371 aa, Unknown
  Bacterial polypetide isolated from the Sargasso Sea
MKKKLCIVFGGKSVEHEISIISANAILNHIDQKKYIVYGVFVGKNGVFYESIAKKYNKKLKFENKKQNKVTFLYGDTKDIGIIKDNKIMDKRKIDIFFPLIHGTGGEDGSIQGLLETINKPYIGCNVESSSICMNKILTKKILSNESIRTTKFYSYAKDEWKTNKTNIIKKIVSDIKFPCFVKASNLGSSVGVYKVKNKSDLKSKIQNTFKFSNKVLVEEAVINPEEVEVSVLQGDQTIVSKPGRVISSDEFYTYKAKYLDGKSSMEIPYKRSLENRTLSNEIKETSIKIYKILQCTGMARIDFLFGKTSSTKKSKLYLSEVNTIPGFTEISMFPKLLNEEGLELKEIINILIQSSEVEFKKKQKLITNFV

SEQ ID NO: 164731 - protein, 221 aa, Unknown
  Bacterial polypetide isolated from the Sargasso Sea
MESIKRIAVLYGGSSSEREISLSSGQGVYAALCEIGYQCQLIDYKNLKDLNELKNYDFVFIALHGFEGEGGELQKDLDDLNILYSGSKSEACRKTWNKGLTKKILKANNIDTPSFIELEKFDPEIVRNKIKDASFDLFQPNDNLFLKPNEDGSSVDIFIIHNEDSIKKAYEKCSNPHRSFLIEEYIDGREITVTVIGKDCFPPIEIITNNEFYDYDAKYIS

SEQ ID NO: 164732 - protein, 313 aa, Unknown
  Bacterial polypetide isolated from the Sargasso Sea
MSGIDPKRFGKVAVLFGGESSEREVSLTSGKLVLQGLRDAGIDAHPFDPAERPLSALKDEGFVRAFNALHGGYGENGQIQGALDFYGIRYTGSGVLGSALGLDKFRTKLVWQQTGVPTPPFETVLRGDDLAARATDIVAKLGLPLFVKPASEGSSVAVLKVKTADALPAALAEAAKHDPIVIVEKSIEGGGEYTACIAGDLDLPVIKIVPAGEFYDYHAKYVADDTQYLIPCGLPADKEAELKRVARRAFDVLGCTDWGRADFMLDAAGNAYFLEVNTAPGMTDHSLPPKAARAVGISYSELVVKVLSLTLND

SEQ ID NO: 164733 - protein, 157 aa, Unknown
  Bacterial polypetide isolated from the Sargasso Sea
GLTVVNNDRELNVAIASARKFTRIVLIEDFVKGREITVTIIGNKPYPIVEIIPKKGLYDYESKYSKGLTDYFCPADIKSDLTTTIQATALAIHQLLGCRHYSRVDFILDKSLNAWFLEVNTLPGMTETSLVPKSAAGAGLSFKGLIEKIIMESMNDG

SEQ ID NO: 164734 - protein, 302 aa, Unknown
  Bacterial polypetide isolated from the Sargasso Sea
MNKDKKIMLLYGGISAEREISIITSKEISKSLKNMGYNIVEIDANENLLADLELHKPDIVFNGLHGTWGEDGSVQEILEKYGVPYTHSGIESSKLAMDKYKSAELFIENGFNHPLTKLMKIEEVKDQNIFDFPYVLKPRNEGSSVGVSIIRNHEELNKYLSENKFRNELLLQQFIEGPEINVAVIGTNKTGSIEIDPKNEFYDYESKYFDAGKTKHIIPPRLESDLIKKVEGLGLDAHKLLGCKGISRTEFILDKVTKKFYILELNTQPGMTPTSLVPEIANYKGINFDNLINWILLDATQN

SEQ ID NO: 164735 - protein, 159 aa, Unknown
  Bacterial polypetide isolated from the Sargasso Sea
LQEGSSIDIIKVTDFSKSDLEKIKVRLVNRERKFLVERFIEGREFTVGFLNDHILEPLEIITKREFYDYEAKYDDDNTQIIKADLDENDLDTLKEIAKNCFNVFGLSRWGRVDILQDQKGNFFVLELNTVPGMTDHSLFPYAASLKGFSFDELVNEIAK

SEQ ID NO: 164736 - protein, 322 aa, Unknown
  Bacterial polypetide isolated from the Sargasso Sea
MVNIAVVFGGYSSEYEVSVKSGKFIYENLKDNSDWNVYEVCISNDKNFVRYNEKVYDLDYESFSFRVNGKFVKPNAVFNIIHGDPGENGDLAKILERNKIPQTACDVFVSKLTFNKKKYIEFVNSLGIPSSKQVLIKRNEIDSLSSFLSSITFPCIVKPNNGGSSIGLSKVYKSNELNKKVQIAFKEDDEVLIESFLDGQEVSVGVIQNKNERIILPITEIISDNEFFDYSAKYLGESLEITPGNVSEKSKKLIHEYLNNIYDNINLNGITRSEFIIVNDIPYILETNTIPGFTQQSIVPQQIEAQKLNVKDVINDLIRSIL

SEQ ID NO: 164737 - protein, 168 aa, Unknown
  Bacterial polypetide isolated from the Sargasso Sea
NKPIVVKPCREGSSFGISIVQDTSNGVNEEILAARSYDNRVILEEFIEGTELTVPILDGKALAPISIKPNSKFYDYEAKYERTDTVYEASKLDKQRMKEVKGLALKAYSVLGCKGWARVDLIESKEENFYLIEINTVPGLTNTSLFPKSAALEGISFTELVIRMLKTA

SEQ ID NO: 164738 - protein, 100 aa, Unknown
  Bacterial polypetide isolated from the Sargasso Sea
IITKREFYDYEAKYDDDETQIIKADLDENDLDTLKEIAKSCFNVFGLSRWGRVDILQDQKGNFFVLELNTVPGMTDHSLFPYAASLKGFSFDELVNEITK

SEQ ID NO: 164739 - protein, 323 aa, Unknown
  Bacterial polypetide isolated from the Sargasso Sea
MDELNKIAVLYGGTSSERNISLKSGEAVYRSMLDLGYKSNLIDFKELSSINILKKYDFIFIALHGFEGEGGELQRKLDDLNVPYSGSSPESCFNTWNKALTKEILRKKNIKTPNWKLVENNHKLESLDDDSNLLPFKKHSDKESQTSLINIFGKNGSIFLKPITDGSSLDIYKVSSNKQFLESIKSSSDPNRTFMIEEAIEGREFTMTIIDEKCYPPIEIITKNQFYDYDAKYLSNETRLEKAPLNKEEMEKIMEISLSAFKALNCRAWGRVDLMQNKKDGEFYIIEINTVPGMTKHSCVPRSGQFAGVSFNEIVKRIINASL

SEQ ID NO: 164740 - protein, 112 aa, Unknown
  Bacterial polypetide isolated from the Sargasso Sea
MNAYPPIEIIYKNDFYDYDAKYLSDDTILKQANLNSNELEEIKMASIKAFNALNCSAWGRVDLIQCSKTREFYVIEINTVPGMTSHSCVPKSASFIDLSYVEVVEKIIDAST

SEQ ID NO: 164741 - protein, 299 aa, Unknown
  Bacterial polypetide isolated from the Sargasso Sea
MKVGLLSGGNSTEREVSLASGKSIYKACRDLGYQVKILDPIDGIRSIKDSILSVDIIFNGLHGGDGENGEVAKYLESLNIPYTGSDQLSSATCMDKNKTKTIVFENNFLTPGWVMKNKDSDDIIDIDLTFPLVVKPNDQGSTIGLSIVKNKKELRKAFELAGKYTSSILLESFINGREITVPVVANKAYSIVEIIPSHDLYDYECKYTKGMSEYICPADLSINLSESIKDLALKVHKILNCRHYSRVDFLLDKNNDPWFLEINTLPGMTETSLLPKSLKASGIEFKDIIQKILNEAIKS

SEQ ID NO: 164742 - protein, 102 aa, Unknown
  Bacterial polypetide isolated from the Sargasso Sea
FDVYDYRSKYTKGESDYICPAKLDDSLSKDIQDTALRIHNLLDCKVYSRVDFRLDKDNRFWLLEINTLPGMTETSLFPMAAKVIGLNFEDLIDKIIKLSLEK

SEQ ID NO: 164743 - protein, 336 aa, Unknown
  Bacterial polypetide isolated from the Sargasso Sea
MSKINLLLLCGGGSAEHDISLLSANYFETSLAKSEQFNVLRVVLDKFGQYQTAAGDECELTNNREIRFRDETKSPWPVDYVIPCIHGYPGETGDIQSYFNLIQLPYFGCESEASSNCFNKITAKMWFSALGIPNTPYIFLNQYDDDAIAQTQAALENWGSIFVKAASQGSSVGCYKVDDSSKVAGVLKDAFGYAPYVIVEKTIKARELEVAVYEYQGEVVATLPGEIICDSNTFYTFDEKYAKSSKARTDVVAQNVPTDISEQIRAYAIKAFKGMKLRHLSRIDFFLTQDNEILLNEINTFPGSTPISMFPKMLQNHGHDFTEYLSLVINGQLAAK

SEQ ID NO: 164744 - protein, 223 aa, Unknown
  Bacterial polypetide isolated from the Sargasso Sea
MDQIQWHVEILWNKRLAKEILKKNNIRTPVWLEVKLTKTIVNNGLRVSPYDRFRPFEYLFLKPEEDGSSVDIFKISDEDSLRAAYKKCTNPNRGFLFEEYIHGREITVTIIDKKCFPPIEIITKNEFYDYDAKYISDDTLHVEAEVTQNELDEIKSIAMNAFEALDCKAWARVDMIQDKKGKFYVIEINTVPGMTSHSNVPKSGSLLGLTYNEVVQKIIDASL

SEQ ID NO: 164745 - protein, 261 aa, Unknown
  Bacterial polypetide isolated from the Sargasso Sea
EDFFKKVKTFKPDIVFNALHGQFGEDGYIQTILESQKIKYTHSGVLASSIAMDKEISKKIFLKNKILTPKHIKYDFNKKNKNIISQIQKKLKFPVVIKPINEGSSVNVYICSKRNFLKNLKKLSNYNQILIEEYIPGREIQVAIMGKKKLGAIELKPKRKFYDYKAKYSVKAQTKHIIPVDLKKNKMKEIMNIALKAHKLIGCRGVTRSDFKFFKNKFYLLEINTQPGMTNLSLVPEIANYYGINFANLIEWILKDASSNR

SEQ ID NO: 164746 - protein, 181 aa, Unknown
  Bacterial polypetide isolated from the Sargasso Sea
DNLSSFSSSITFPCIVKPNNGGSSIGVSKVYKSNELNEKVQIAFKEDDEVLIESFLDGQEVSVGVIQNKNERIILPITEIISDNELFDYSAKYLGESQEITPGNVTKKSKKLIHEYLNNIYDNINLNGITRSEFIIVNDIPYILETNTIPGFTQQSIVPQQIEAQKLNVRDVINDLVRSIL

SEQ ID NO: 164747 - protein, 143 aa, Unknown
  Bacterial polypetide isolated from the Sargasso Sea
MSSSPTTVGVVFGGCSGEHDVSIRSAQTVVKGLNLGANLERYRIVLVYIDRDGRWWGPDLAEKVLSSGCPPADSDLPQPLPAPGFRGLPAGTDAVAVWYPVLHGPNGEDGTIQGLFELMQQPYVGAGVLGSAVSMDKQARKRR

SEQ ID NO: 164748 - protein, 305 aa, Unknown
  Bacterial polypetide isolated from the Sargasso Sea
MAGGWSAEREISLKSGAAVLEALRELKLNCYFIDLHTEEGVLEMPSEIDLAFIALHGRGGEDGYIQKILEDKGVAYTGSDPQSCELAMDKPQAKKIWRDLLLPTPDFVEIKKGGTPQMKLTPYLSGEEDITSLDKSFVVKPSREGSSFGISIVKPGEGSLEEAMKEALKFDENLIIEAFVPGRELTVSILGEEVFHPIHIKPSGQFYDFESKYNSLETEYLKASLKDDEIKEIKDIAWHAFSSLGCKGWGRVDFMQDENGNFQIIEVNTVPGLTKTSLFPKAASYEGVNFKELIAKILLLACNGH

SEQ ID NO: 164749 - protein, 186 aa, Unknown
  Bacterial polypetide isolated from the Sargasso Sea
MDKFKGNLDDSIFDQFRPFNEIFLKPTEDGSSIDVFKLSTNNELKKAISDSLDSKRQFIFEESIDFKELTVPILNGKCLPPVEIITKESFYNFNAKYVSEDTELIEFIISDKKKIELEQICLKTLNIVKACGWLRVDLMQDSNQNFYVLEVNTVPGMTSHSLFPKSAESIGLSYDDLVNEIINAEI

SEQ ID NO: 164750 - protein, 149 aa, Unknown; identical to SEQ ID NO: 164689
  Bacterial polypetide isolated from the Sargasso Sea

SEQ ID NO: 164751 - protein, 334 aa, Unknown
  Bacterial polypetide isolated from the Sargasso Sea
MQRKGNKMFTPSVSIHSQKTHSPNEYGKVAVLLGGDSAEREVSLNSGNAVLNALLRQGVDAFAFDPAERPLTDLIDLNVDRALIMLHGRGGEDGSMQGALQFLKIPYTGSRVLGSALAMDKIHTKQVWQSLGLPTAKYEIADKRHFEAGKCSAIMDKLGNEVMVKPAREGSSIGMARVTSAKQLETAIQDAFKYDNQVLLEQYIDGPEFTVSVLQGQALPSIRMSTPHTFYDYAAKYQDNTTEYYCPSGLSEEQEAQLAKLASRAFDAISGSGWGRIDVMQDNQRQFYLLEANTVPGMTEKSLVPKAAKVAGLTFDELVLSILSTSFDDVANKA

SEQ ID NO: 164752 - protein, 336 aa, Unknown
  Bacterial polypetide isolated from the Sargasso Sea
MSKINLLLLCGGGSAEHDISLLSANYFETSLAKSEQFNVLRVVLDKFGQYQTAAGDDCELTNNREIRFRDESKAPWPVDYVIPCIHGYPGETGDIQSYFNLIQLPYFGCESEASSNCFNKITAKMWFSALGIPNTPYIFLNQYDDEAIAQTQAALEKWGSIFVKAASQGSSVGCYKVDDSSKVPGVLKDAFGYAPYVIVEKTIKARELEVAVYEYQGEVIATLPGEIICDSNTFYTFDEKYAKNSKARTDVVAQNVPTEISDQIRAYAIKAFKGMKLRHLSRIDFFLTADNEILLNEINTFPGSTPISMFPKMLQNHGHDFTQYLSLVINSQLAAK

SEQ ID NO: 164753 - protein, 324 aa, Unknown
  Bacterial polypetide isolated from the Sargasso Sea
MKKNIGIVYGGYSSEYKISIKSGEFIFKILNNNPDWNVYKVLLSKNSTSVILLDDKIEEINHDDFSFKHGGNRVKFDAIYNIIHGSPGETGEFSSLLEKIGIPQTSCSSDICKLTFDKHEYVKFINSLNLKTAKQFFIKKGQEYNVSDIAEKLGIPCFVKPNKSGSSFGVSKVKNKDLLNDKINYAFQEGDEVLVESFLDGKEVSVGVINIDGQRTILPITEIRSKNEFFDFDAKYNGESDEITPGELKASELDDIHKMINTIYDNINLSGITRSEIILVDGIPHLVETNTIPGFTEQSIVPQQIKAAGLSIHKVIESQIKSLL

SEQ ID NO: 164754 - protein, 305 aa, Unknown
  Bacterial polypetide isolated from the Sargasso Sea
KKKILILGGGISKEREISLETAKQVNNVLKKKYWTLLSEPNDNLIKNIKKFKPNIIFNALHGRFGEDGYIQSVLESLKIKYTHSGVLSSSIAMDKIISKEIFIKKKILTPKYLKFIFDSSVLKKNKIINKIKLKLKFPVIIKPINEGSSVDVFICSKKNLIKNLKKLKKYKEILIEEYIGGREIQVAILGKKKLGAIELKPKRKFYDYKAKYSLSAKTAHLIPVSLSPKNMNKVLNISLKAHNCLGCRGVTRSDFKFYNNKFYLLEVNTQPGMTKLSLVPEIAAYMGMDFLNLLEWILNDASTNK

SEQ ID NO: 164755 - protein, 317 aa, Unknown
  Bacterial polypetide isolated from the Sargasso Sea
MDPIAILQQQKILLLYGGWSAERNISINSGTAVAGALKRNGISFSEYDLTSEEDAKLLSTDYDLAFIALHGRGGEDGFIQEILESKNIRYTGSDTISCKTSLNKIESKKIWRDLLLPTPDFVEILNVGRPEMKLTPHLSGENDITALDKTYVVKPANEGSSFGITIVRPDNGTLEKAMLDASKFDSSILVEAFVDGRELTVSILGDDVFHPIHIKPSGDFYDFDSKYNNKGTEYIKADLSVEKLNEIKDYAWHAFSSLGCSKWGRVDFIEDKEGNFQIIEVNTVPGLTETSLFPKAASYEGIDFDELIIKVLHLSCK

SEQ ID NO: 164756 - protein, 214 aa, Unknown
  Bacterial polypetide isolated from the Sargasso Sea
MKTIFSNLKLPQVNYLVFQNEDLNDKQVKNKIINEILKKLKFPVFVKPSNSGSSLGISKVKNESEILLALEKAREIDPRILIEEGLEVREIECGIIGNSKLSTSEIGEVNYESDWYDYNSKYHSNNKIIIPAEIDSKITKEIKEIAIKSCRALNIFGFARVDFFLEKSSNKILLNEINTIPGFTKNSMFPMLWEASGLKIEQLVAKLVDISLDL

SEQ ID NO: 164757 - protein, 287 aa, Unknown
  Bacterial polypetide isolated from the Sargasso Sea
KRIAVLLGGTSAEREVSLESGRQCTEALHEAGYDAYEVDVTANIDALLDALEPRPHAVFNALHGRFGEDGNIQGLLNLLELPYTHSGVLASALAMDKAAARTIFETQGMGIARGMRATREELLAGDVMPRPYVVKPNSEGSSVGVQIIEDGPNGPDPYALETDTLLVEEFIPGRELTVAVMGAPGEDPRALAVTELRPTKGFYDYEAKYTDGVTEHLVPAPVSEGIYDKAMAWAARAHKALYCRGVTRADFRYDDDRDALVILEVNTQPGMTRLSLVPEQATHCGIA

SEQ ID NO: 164758 - protein, 95 aa, Unknown
  Bacterial polypetide isolated from the Sargasso Sea
SKYYSNNKIIIPAEIDSKIKKEIEEIAIKSCRALNIFGFARVDFFLEKSSNKILINEINTIPGFTKNSMFPMLWEASGLKIEQLVAKLVDISLDL

SEQ ID NO: 164759 - protein, 63 aa, Unknown
  Bacterial polypetide isolated from the Sargasso Sea
ALNIFGFARVDFFLEKTSNKILLNEINTIPGFTKNSMFPMLWEASGLKIEQLVAKLVDISLDL

SEQ ID NO: 164760 - protein, 192 aa, Unknown
  Bacterial polypetide isolated from the Sargasso Sea
MLRVPEEFSFEDAVQDLGDTLFVKPCREGSSLGVSKVRTADEYSDALRYAFDVDSKVLVEEAVSGREIECSVLGNDFPEAASVLGEIAPAHEFYSYEAKYVDEDGADLIVPAEIDLDVSLNIRQTAVEAFQITECRGMARIDFFLNRDNSFILNEINTLPGFTNISMYPKLWEASGLLYPELLERLIELALE

SEQ ID NO: 164761 - protein, 190 aa, Unknown
  Bacterial polypetide isolated from the Sargasso Sea
MKKITSTLGNNICIKPPNQGSALGVTLISKAEDIEAALNDAFKFGSKVLVEERVFGREITVGLLDTEEGVKAFPLIEVTTPKDTWYDYKHRYTVGLSNHVIPARIPSELSLSIQACAIEAHRALGCRDLSRADFLVRGDEYFLLEINTLPGMTGTSLYPEGAEGFGMNFPQLLDHLIDRAFRRGLTTNLK

SEQ ID NO: 164762 - protein, 224 aa, Unknown
  Bacterial polypetide isolated from the Sargasso Sea
CSAVSMDKQAMKAALAGAGLAQVPYVCAQADELSDAARLEALLKRIESGLGYPCFIKPANLGSSVGISKARNREELIQGLRLAAAFDPRLVVEQGVQARELECAVLGGTTLRASVVGEVRFDADWYDYESKYTAGRSTTLIPAPLPNDIIDTIQSQSIQACAAVGVTGMARVDFFYDDSSGRVWLNEINSLPGFTSQSMYPMLWEASGVTLEQLVHELLESAGQ

SEQ ID NO: 164763 - protein, 294 aa, Unknown
  Bacterial polypetide isolated from the Sargasso Sea
MKKKPNRIAVLEGGSSAEADVSRSSAAQITKALETQGYQTTLIDIGNTRLTDQILTFKPDVIFPALHGPIGEDGTIQGFLEILAIPYVGSNVRGSALAMDKSVSKKIFDSLAIPTAAGIMVDELPVSMNSLQQNIEENLGEKIVIKPVNQGSALGVEIVSDLSDLQTRLTRSLDYGPCLIESFIEGREITVGVLDIGGQTKPFPVIEVVTPENEWYNFTNRYGKNLSEHIIPASLPDSVSKRLQNFAVSAHKGLGLRDLSRADFIVSGEGELVILEVNTLPGMTETSLYPDALN

SEQ ID NO: 164764 - protein, 272 aa, Unknown
  Bacterial polypetide isolated from the Sargasso Sea
MGYEAELVDYPSDFSPEKFLQGDFVFIALHGQDGESGELQSFLQQNNIPYTGSGYEACKNTWNKDTFKKILRENGIPTPNWISVPSLDKFKGNLDDSIFDQFRPFNEIFLKPTEDGSSIDVFKLSTNNELKKAISDSLDSKRQFIFEESIDFKELTVPILNGKCLPPVEIITKESFYNFNAKYVSEDTELIEFIISDKKKIELEQICLKTLNIVKACGWLRVDLMQDSNQNFYVLEVNTVPGMTSHSLFPKSAESIGLSYDDLVNEIINAEI

SEQ ID NO: 164765 - protein, 193 aa, Unknown
  Bacterial polypetide isolated from the Sargasso Sea
MLRVPEELSFEDAVKDLGDTLFVKPCREGSSLGVSKVRTADEYSNALREAFAADSKVLVEEAVSGREIECSVLGNDFPQAASVLGEIAPAHEFYSYEAKYVDEDGADLIVPAEIDLDVSLNIRQTAVEAFQITECRGMARIDFFLNRDNSFILNEINTLPGFTNISMYPKLWEASGLSYPELLERLIELALEL

SEQ ID NO: 164766 - protein, 112 aa, Unknown
  Bacterial polypetide isolated from the Sargasso Sea
TSEIGEVKYESDWYDYNSKYNLNNKIIIPAELDFKITKEIKEIAIQSCRALNIFGFARVDFFLEKSSNKILLNEINTIPGFTKNSMFPMLWKASGFNIEQLVAKLVDISLES

SEQ ID NO: 164767 - protein, 252 aa, Unknown
  Bacterial polypetide isolated from the Sargasso Sea
YSHLDKGVDRAFIALHGKGGEDGLIQGLLESYQIPYTGSGVIPSAIAMNKIASKRVFLSKNLPVPNYKLLRNKKDLKDAQTDLGFPMILKPASEGSSLGMFKVCQSNELLDAFETVLKFDGIVLAEEYIHGNEITVSILKEKTLPSIKIRTKRDFYDFTAKYESDDTEYKCPGFDDNKNEKLYSELAKKAFNSLKCKGWGRVDFICDHNDYPKILEINTIPGMTKKSLVPKAAAKEGIDFNTLCLNILETSI

SEQ ID NO: 164768 - protein, 139 aa, Unknown
  Bacterial polypetide isolated from the Sargasso Sea
KYDSQVLVEQWIHAREFTIAVLRGQVLPPIALGTPHVFYDYDAKYIANDTQYRIPCGLDSVKEQELIDLTARACNAIGIEGWGRLDVMQDEQGRFWLLEVNTAPGMTDHSLVPMAARAAGLDFQQLVLAILAESVATRG

SEQ ID NO: 164769 - protein, 284 aa, Unknown
  Bacterial polypetide isolated from the Sargasso Sea
MPSSPITVGLVFGGRSGEHDVSIRSAATVVRGLRSGQNRERYTVQPIYIDREGRWWGTDLSEATLAFETAPELNPPLPPSGFQGFPEGCDAVDLWYPVLHGPNGEDGTIQGLFQLTGKPFVGAGVLGSAVSMDKQAMKSAFSSAGLSQVPYVALHASELENAISRSALVDRIERELNYPCFVKPANLGSSVGISKVHSRQELEAGLNQAAALDPKLVVEQGVNAREVECAVLGGRMLEASVIGEVRFDADWYDYETKYTAGRSTTLIPAPLPDEVADRIRAQAL

SEQ ID NO: 164770 - protein, 252 aa, Unknown
  Bacterial polypetide isolated from the Sargasso Sea
EKLKDFNLVFIALHGEEGESGILQSKMDKAGIDYTGSGFEACKNSWDKEICKNILRENNLPTPDFSVYKTFQEIIESKNKIEEQFQEGVFIKPCKEGSSIDIIKVTDFSKPDLEKIKVDLVDRERKFLVERFIEGREFTVGFLNDHILEPLEIITKREFYDYEAKYDDDETQIIKADLDENDLDTLKEIAKSCFNVFGLSRWGRVDILQDQKGNFFVLELNTVPGMTDHSLFPYAASLKGFSFDELVNEITK

SEQ ID NO: 164771 - protein, 328 aa, Unknown
  Bacterial polypetide isolated from the Sargasso Sea
MSKTRVLLLFGGQSAEHEVSVVSARSVYQAIDSDRYEVILAGISRTGQWFLEDGKASLLEHSEVSNGNGSPVQLGAGQRDLVALDGNPVGSAAFDVVFPLLHGPRGEDGSVQGLLELADVAYVGAGIAASAVGMDKELARAVFAQAGLRQTDYLVIRRSAWNVDRQGTIEDIEAKLRYPLFVKPVNLGSSIGISKVHDTQSLESAIDLAAGYDLKIMVEASVENARELECAVLGNDEPKASVIGEIIPGAEFYDYTTKYIDDRSQLIVPAELPESISGEIQRMSVDAFRSIDCAGLGRVDFLMTSSGNIFLNEINTMPGFTPISMYPR

SEQ ID NO: 164772 - protein, 304 aa, Unknown
  Bacterial polypetide isolated from the Sargasso Sea
MISAYHIQKALDRNRFDVRMIGISQDGSWFLGDSENFLENHEDVRKVAFTSSLPVTIPERQSLVIRPENTGSLDEIDVFFPITHGRLGEDGALQGLLELAGKPYVGSDVYGSAICMDKDVCKRLLIQNDLPVVSYRVFCSGDFIDYEELILELGPTLFVKPCREGSSLGVSKVHNAREFQVAIKDAFGIDRKIMIEKAVQGREIECSVLGNDSPKAAEVLGEIVPRHDFYSYEAKYVDDEGADLIIPAQIESKTSLKIREAAVEAFRCTECRGMARVDFFLNQDDVFFINEINTLPGFTSISMY

SEQ ID NO: 164773 - protein, 306 aa, Unknown
  Bacterial polypetide isolated from the Sargasso Sea
MDDIKKIAVICGGSSPEREISLQSGSGVGNALIELGYQTSIIDFRDLNDLNILKNYDLVFIALHGFEGEGGDLQESLDSLGIKYTGSNNVGCKNTWNKVKCKNILFQNDVSSPKAIISSSLDNEDFNPFIKFEKEFGYKKNLFMKPSEDGSSIDIYKISNDDDFISAKMSCINKSREFIFEEEIKGKEYTLTIINNECFPPIEIQTKNDFYDYDAKYISNETILAEAKLSDKELDLMNKISLKAYKALNCSGWARVDILGDEDGNLYVLEINTVPGMTSHSCVPKSGGFAGLSYSDVVTKIISSNV

SEQ ID NO: 164774 - protein, 298 aa, Unknown
  Bacterial polypetide isolated from the Sargasso Sea
MSGKKIIVLSGGTSAEREVSLKSGSQIHSALIQLGHQVELEDLLTINQINHLKKNVEVFIALHGFEGESGILQDKLTNLGIDYFGTNAQGCINTWNKANCKKILIENGINTPKFLTTKNIKAMEFPSDIFLKNGFYIKPSEEGSSIDTFAVKSNEEFKSLKQNLANPEREFLIEETINGREFTVSVLKGRCLAPLEIIPASGIYDYHAKYIAEDTIIQKAQLKPDQIKLLCDIALKACTVCECKDWARVDVMQNEDGEFYVLEINTVPGMTDHSLFPAAAKISGLSFNELIHEIISDD

SEQ ID NO: 164775 - protein, 308 aa, Unknown
  Bacterial polypetide isolated from the Sargasso Sea
MGSINKIAVLYGGSSSEREVSIQSGMGVHNAICDLGYESDLIDFKDLNNLNELKIYDFIFIALHGFEGESGKLQKDLNDLNILYSGSGPEACSKTWNKKITKKILKENNINTPISIGISEFSYQVANNGLKISPYDCFRPFNYLFLKPDEDGSSIDIFKISDDESLKNAYKKCTNNKRGFLFEEYIEGRELTVTVIDKECFPPIEIITKNEFYDYDAKYISDDTLHIEAKLSKSELIDIKSISLEAFEALNCKAWARIDLIQDKKGNFYVIEINTVPGMTSHSNVPKSGSLLGLTYNEVVQKIIDASL

SEQ ID NO: 164776 - protein, 310 aa, Unknown
  Bacterial polypetide isolated from the Sargasso Sea
MQLPKYSAKDFGKVAVLMGGESAEREISLESGKAVHAALTQSGIDAHVIDYKPGLCNQLVDNAYDRVFLALHGRGGEDGTVQKELELVGIPYTGSSSSASALAMDKVKSKSIWHKAGLSTPDSIEVNENSNWKSVAKKIGLPVMIKPVREGSSFGAAKIDRIEDLFQAWINASQFDDRVMAESWITGQEYTVPILDDKVLPIIKLETKNKFYDYDAKYNDSDTKYICPCGLDESFESDLGDVSKEACRLLGVSGWARVDLLVDSNNQEWLIEVNTIPGMTSHSLVPMSAKKAGITFENLVKEILLTSFKQ

SEQ ID NO: 164777 - protein, 253 aa, Unknown
  Bacterial polypetide isolated from the Sargasso Sea
CLHGPNGEDGVIQGLFKSTGKPFVGSGVLGSALGMDKIAMKSVFKSYNLPQVPYISLNKADIQNNLYMKSIYEQINKIISYPCFIKPANLGSSVGITKAYSKEEFITGIKFAAKYDERIIVEKGIEGRELECGVLGKSVMKSSVVGEVKFQTDWYTYESKYNANLSSTIIPADLNIEISNKIQKLAIEACKAINAYGLARVDFFYQESTQQIYINEVNTLPGFTKTSMYPTLWEASGLKLEKLVASLIEIAKE

SEQ ID NO: 164778 - protein, 75 aa, Unknown
  Bacterial polypetide isolated from the Sargasso Sea
EQIKDIAIRSCRALNIYGFARVDFFLEKISNKIFLNEINTIPGFTSKSMFPMLWNASGLNIDQLVAKLVDISSDL

SEQ ID NO: 164779 - protein, 316 aa, Unknown
  Bacterial polypetide isolated from the Sargasso Sea
MSEMSSIDPKQFGKVAVLLGGDSAEREVSLNSGRLVLQGLRDAGIDAHPFDPAERPLAALKDEGFVRAFNALHGGYGENGQIQGALDFYGIRYTGSGVLGSALGLDKFRTKLVWQQLGIPTPPFEAVLRGDDYEARAKDIVAKLGLPLFVKPASEGSSVAVIKVKSADALPAALLEAVKYDRIVVVEKSIEGGGEYTACIAGDLDLPVIRIVPAGEFYDYHAKYIANDTQYLIPCGLPADEEARLKVLARRAFDVLGCTDWGRADFMLDAAGNPYFLEVNTAPGMTDHSLPPKAARAVGISYQDLVVGVLALTLKD

SEQ ID NO: 164780 - protein, 304 aa, Unknown
  Bacterial polypetide isolated from the Sargasso Sea
MSRKFGKVAVMFGGTSAEREVSLRSGAAVLAALQKQGVDAHAFDPKDQPLSALTAAGFDRVFIVLHGRGGEDGTMQGALQLMGLPYTGSRVLGSALAMDKIRCKWLFQAQGLPTAKFLVAEAGKQLNYQDILQQLAGKVMVKPANEGSSIGMSAASTAEELEQALVVATKYDSDVLVEQWIQGREFTVTVLNGKALPIVEMRTPRSFYDYEAKYQSNSTEYLCPAPLTAEQTAFLQQVAAAAFTAVGASGWGRVDAMLDEQGNFYLLEVNTVPGMTEKSLVPMAAKAAGLSFEQLVLQILEQTL

SEQ ID NO: 164781 - protein, 307 aa, Unknown
  Bacterial polypetide isolated from the Sargasso Sea
MDKIKKIAVLYGGLSSEREISLKSGMGVHKAICDLGYESDLIDFKNLNNLHELKAYDFIFIALHGFEGEGGKLQEDLDNLNILYSGSNSMACRNTWNKRLAKEILKKNNIRTPVWLEVKLTKTIVNNGLRVSPYDRFRPFEYLFLKPEEDGSSVDIFKISDEDSLRAAYKKCTNPNRGFLFEEYIHGREITVTIIDKKCFPPIEIITKNEFYDYDAKYISDDTLHVEAQVTQNELDEIKSIAMNAFEALDCKAWARVDMIQDKKGKFYVIEINTVPGMTSHSNVPKSGSLLGLTYNEVVQKIIDASL

SEQ ID NO: 164782 - protein, 259 aa, Unknown
  Bacterial polypetide isolated from the Sargasso Sea
MNELKVYDFIFIALHGFEGEAGKLQRDLDDLNILYSGSGPEACMKTWNKKVTKEILIENNINTPVSLSISEFSLEDANQSLNTSSFDRFRPFNYLFLKPEEDGSSIDIFKISDEESLKNAYKKCTNRKRGFLFEEYIDGRELTVTVIDKECFPPIEIITKNEFYDYDAKYISDDTLHIEAKLTQSELVDIKSVSLDAFEALNCKAWARVDLIQDKKGNFYVIEINTVPGMTSHSNVPKSGSLLGLTYNEVVQKIINASI

SEQ ID NO: 164783 - protein, 316 aa, Unknown
  Bacterial polypetide isolated from the Sargasso Sea
MKKKPNRIAVLEGGSSAEADVSRSSAAQITKALETQGYQTTLIDIGNTRLTDQILTFKPDVIFPALHGPIGEDGTIQGFLEILAIPYVGSNVRGSALAMDKSVSKKIFDSLAIPTAAGIMVDELPVSMNSLQQNIEENLGEKIVIKPVNQGSALGVEIVSDLSDLQTRLTRSLDYGPCLIESFIEGREITVGVLDIGGQTKPFPVIEVVTPENEWYNFTNRYGKNLSEHIIPASLPDSVSKRLQNFAVSAHKGLGLRDLSRADFIVSGEGELVMLEVNTLPGMTKTSLYPDGAKHLGYKFPVLIQLLIEEAFSRSN

SEQ ID NO: 164784 - protein, 299 aa, Unknown
  Bacterial polypetide isolated from the Sargasso Sea
MKEVCVLYGGNSSEREVSLKSGKFIHKSLVNNGYKSHLIDYADLTELEKLKDFNLVFIALHGEEGESGILQSKMDKVGIDYTGSGYEACKRSWDKEICKNVLRQHNLPTPDFFVYKTFQEIIESKNKIEEHFQEGVFIKPCKEGSSIDIIKVTDFSKSDLEMIKVDLVDRERKFLVERFIQGREFTVGFLNDHILEPLEIITKREFYDYEAKYDDDETQIIKADLNENDLDTLKEIAKSCFNVFGLSRWGRVDILQDQKGNFFVLELNTVPGMTDHSLFPYAASLKGFSFDELVNEITK

SEQ ID NO: 164785 - protein, 106 aa, Unknown
  Bacterial polypetide isolated from the Sargasso Sea
MKDFVDATAFNSEQGNRARKLFAAVVLAALDDAIADDRKYGNGPEQIARWARSRDGREVLSCAGIDPNERVVEGLMEFVEKGIRTSVALSREESERRNAAMEAEAA

SEQ ID NO: 164786 - protein, 142 aa, Unknown
  Bacterial polypetide isolated from the Sargasso Sea
MNKKYELIYEGKAKKVFTHDDANKVKIEFKDEATAFNALKKEKFEGKGKLNCLISARIFEILIKKNIPTHFIELENENTMIAKKIKVIPLEIVLRNTAYGSLCKQTTIKPGTLLSKPLIDIYLKNDELKDPLITKDRIELMK

SEQ ID NO: 164787 - protein, 238 aa, Unknown
  Bacterial polypetide isolated from the Sargasso Sea
MKKLNEITKGKAKSMFTTDNEDHLIMHFSDDTSAFDGKKREALLGKGAVNNQFNAFIMEHLKNNDIETHLIEVIDSTDSLVYKLDMFPIECVIRNRASGSICKRLGTEDGLILENPLFEFFLKDDDLGDPLINDEHIISFGWANPEQIQEMKKQTYKVNQVLSKLFLDSGLILVDFKVEYGVHKDKILLADEFTPDGCRLWDSKTLKKMDKDRFRQGLGDVVESYHQVADRLGMNIET

SEQ ID NO: 164788 - protein, 227 aa, Unknown
  Bacterial polypetide isolated from the Sargasso Sea
MENIEKGELITTGKAKSLYSTNQDDYLVMHYRDDTSAFDGKKIESLEGKGTINNKFNAFIMEYLEKEGIPTHFEKLLSETDSLVKKLEMAPVECVVRNVAAGSICKRLGLEEGIDLNPPTFEFFYKDDDLGDPMINEYHIKSFGWATSEQVEQMQEKTFQVNDALKKLFSDAGMLLVDYKLEFGSFKGELLLGDEFTPDGCRVWDVETREKLDKDRFRPRPRRRCGV

SEQ ID NO: 164789 - protein, 212 aa, Unknown
  Bacterial polypetide isolated from the Sargasso Sea
HFSDDTSAFDGKKREALLGKGAVNNQFNAFIMNHLKDNGVESHLIEVIDSTDSLVYKLDMFPIECVIRNRASGSICKRLGTEDGLVLENPLFEFFLKDDDLGDPLINDEHIISFGWASNEHIQEMKKQTYLVNEILSKLFLNSGLILVDFKVEYGLYKDKILLADEFTPDGCRLWDSETLKKMDKDRFRQGLGDVVESYHQVADRLGMNIET

SEQ ID NO: 164790 - protein, 147 aa, Unknown
  Bacterial polypetide isolated from the Sargasso Sea
MTVNKGKKLYEGKAKIIYEGPEKGTAIQHFKDDASAFNNQKKSTVEGKGVLNNRISEHIFKNLNQIGIKTHLIKRLNMREQLIKLCEIFPVKFIVRNIATGSLTKRLGIPDGTVLSKPLIEFSYKNNDLDHPIISKEHILEFKWVND

SEQ ID NO: 164791 - protein, 95 aa, Unknown
  Bacterial polypetide isolated from the Sargasso Sea
MSLADSVLAVNNDLPIRTDSPVHSGKVRSVYWLTDADSRRLIQTKGYNVPEDTPLAIMVISDRISAFDCIFHGEGGLKGIPSKGAAFNAISNHWV

SEQ ID NO: 164792 - protein, 90 aa, Unknown
  Bacterial polypetide isolated from the Sargasso Sea
MSLADSVLAVNNDLPIRTDSPVHSGKVRSVYWLTDADSRRLIQTKGYNVPEDTPLAIMVISDRISAFDCIFHGEGGLKGIPGKGAALNAI

SEQ ID NO: 164793 - protein, 224 aa, Unknown
  Bacterial polypetide isolated from the Sargasso Sea
MFTTESDDHLVMHFSDDTSAFDGKKKEALLGKGAVNNQFNAFIMDHLKTNGVETHLVEVIDSTDSLVYKLDMFPIECVIRNRASGSICKRLGTEDGLILKSPLFEFFLKDDELGDPLINDEHIISFGWADIKQINEMKIQTYKINEILSKLFLDSGLILVDFKVEFGVFKDKIILADEFTPDGCRLWDTKTLKKMDKDRFRQGLGDVVESYHQVADRLGMNIDT

SEQ ID NO: 164794 - protein, 279 aa, Unknown
  Bacterial polypetide isolated from the Sargasso Sea
LHPIDKSAFDRVLASIPFKGQVLNLTSAWWFEKTKHIIPNQVLKIPDPNVTLAKKCTVFPIEFVVRGYITGSTSTSLWTVYNKGDREYCGNILPEGLKKNQKLSSNMLTPTTKEEHHDRPIAPPEIISEGWMTKEDWDYCSQKALDLFAFGQEKAAENGMILVDTKYEMGKDHDGNIVLIDEIHTPDSSRYWISKTYDERFGSGQEPQNIDKEFLRLWFVDNCDPYNDETLPDAPEDLVVELSSRYIFLYETITGNKFPFPGAEKKVNDRINENLKDEL

SEQ ID NO: 164795 - protein, 89 aa, Unknown
  Bacterial polypetide isolated from the Sargasso Sea
MTLATQVLAVNDDLPIRTDLPVHSGKVRSVYWLTAADSARLIREKNYPVAPDTPLAIMVISDRISAFDCIWHGENGLDGVPGKGAALNA

SEQ ID NO: 164796 - protein, 238 aa, Unknown
  Bacterial polypetide isolated from the Sargasso Sea
MENIEKGELITTGKAKSLYESNESDYLIMHYRDDTSAFDGKKIESLDGKGTINNKFNAFIMEYLEGEGIPTHFEKLISETDSLVKRLDMAPVECVVRNVAAGSICKRLGLEEGMDLNPPTFEFFYKDDDLGDPMINEYHIKSFGWATEDQVTQMQTKTFQVNDALKKLFSEAGMILVDYKLEFGDFKGELLLGDEFTPDGCRVWDVETREKLDKDRFRQGLGDVVESYQIMAKKLGVI

SEQ ID NO: 164797 - protein, 158 aa, Unknown
  Bacterial polypetide isolated from the Sargasso Sea
VYKLEMFPIECVIRNRASGSICKRLGTEDGLILENPLFEFFLKDDDLGDPLINDEHIISFEWADSNQIQEMKKQTYLVNEILSKLFLDSGLILVDFKVEFGVYKDKILLADEFTPDGCRLWDVNTLKKMDKDRFRQGLGDVVESYHQVAERLGMNIET

SEQ ID NO: 164798 - protein, 171 aa, Unknown
  Bacterial polypetide isolated from the Sargasso Sea
LPPSTKAEYGLHDEPISREKIISSLVDEEIYKKAEEYALQLFNEGQKWANEQGLILVDTKYEFGIYDGELIVIDEIHTPDSSRYWIKDEYQQRFEKNKNQKMLDKENIRQWLIERGFKGEGVPPKLSDDIRIYLSEKYIELYKRLTGKEFVPSTGDVKSRISQSLKSASII

SEQ ID NO: 164799 - protein, 197 aa, Unknown
  Bacterial polypetide isolated from the Sargasso Sea
KRSLKSKGEINNKFNAFIMEHLSNNGVETHFLKLVEKNESLVKRLDMLPVECVVRNIATGSLCRRLGVEEGIKFEDPLFEFFLKDDDLGDPLINDNHITAFGWGTEEEIATMKEITFRINHLLCKLFKEVGLILVDYKVEYGRSNGSLILGDEFTPDGCRIWDAETGESLDKDRFRKDLGDVVESYQIVAHKLGISL

SEQ ID NO: 164800 - protein, 213 aa, Unknown
  Bacterial polypetide isolated from the Sargasso Sea
GYLTGSTSTSLWTHYKNGGRNYCGNELNDGMVKNQKLPTNIVTPTTKEKEHDRPISLADIVKEGWMKQDDLDYCVAKTLEVFVYAQEVAATRGLILVDTKYEFGRDADGTIRLIDEINTPDSSRYWLSESYAERQAKGMEPDMIDKEFLRLWFAERCDPYKDEVLPEAPADLVAELSSRYVKLYEMITGEMFEVPASSSDVNERMRNALKGVL

SEQ ID NO: 164801 - protein, 45 aa, Unknown
  Bacterial polypetide isolated from the Sargasso Sea
DNCRLWDLNQNSDTIVSLDKDRFRNDLGGLIEAYSEINRRINDFI

SEQ ID NO: 164802 - protein, 120 aa, Unknown
  Bacterial polypetide isolated from the Sargasso Sea
MSFSILFSVNTASAFDWKAHSGKTITILMNEHPVLDGIRSLIPEFEEDTGIKVKVNALAEDLYFDRMEVNLRAPKGADAHFCPMDATAFNQFSDGLLQPLNGFLDDANATHPGYDVNDFP

SEQ ID NO: 164803 - protein, 160 aa, Unknown
  Bacterial polypetide isolated from the Sargasso Sea
SLVYKLDMFPIECVIRNRASGSICKRLGTEDGLVLENPLFEFFLKDDDLGDPLINDEHIISFGWASYEHIQEMKKQTYLVNEILSKLFLDSGLILVDFKVEYGLYKDKILLADEFTPDGCRLWDSETLKKMDKDRFRQGLGDVVESYHQVADRLGMNIET

SEQ ID NO: 164804 - protein, 149 aa, Unknown
  Bacterial polypetide isolated from the Sargasso Sea
MKEIDNLSQTYNLEFKGKVRDIYNFENDKLLIFTSDRISAFDFTFDDQIDGKGKVLTKMAKFWFNKTKHIIENHLCENKIKLSSYLNDRCMIVKRTKVIPIEAIVRGHIAGSAWQTYKDNNLVNNEKLTKEYNKYDKFDEPIFTPSTKA

SEQ ID NO: 164805 - protein, 238 aa, Unknown
  Bacterial polypetide isolated from the Sargasso Sea
MKKINEITKGKAKSMFSTENEDHLIMHFSDDTSAFDGKKREALLGKGAVNNQFNAFIMNHLKDNGVESHLIEVIDSTDSLVYKLDMFPIECVIRNRASGSICKRLGTEDGLVLENPLFEFFLKDDDLGDPLINDEHIISFGWASHEHIQEMKKQTYLVNEILSKLFLDSGLILVDFKVEYGLHKDKILLADEFTPDGCRLWDSETLKKMDKDRFRQGLGDVVESYHQVADRLGMNIET

SEQ ID NO: 164806 - protein, 139 aa, Unknown
  Bacterial polypetide isolated from the Sargasso Sea
SKKALELFAFGQKKAMENGMVLVDTKYEMGKDSNGGIVLIDEIHTPDSSRYWIAESYNDRIENNKEPQNIDKEFLRLWFVDNCDPYNDETLPDAPLDLVAELSSRYIYLYETITGGIFPFPDAGKPIQKRINENLEDQI

SEQ ID NO: 164807 - protein, 160 aa, Unknown
  Bacterial polypetide isolated from the Sargasso Sea
ETDSLVKRLDIAPVECVVRNVAAGSICKRLGLEEGMDLNPPTFEFFYKDDDLGDPMINEYHIKSFGWATEDQVEQMQVKTFEVNNALKKLFSDAGMILVDYKLEFGDFKGELLLGDEFTPDGCRVWDAETREKLDKDRFRQDLGDVVESYQIMAKRLGVI

SEQ ID NO: 164808 - protein, 257 aa, Unknown
  Bacterial polypetide isolated from the Sargasso Sea
NGNIEDSEQLLSKINESLANEKNIRNTKGKAKSMFTTENEEHLVMHFSDDTSAFDGKKKEALLGKGAVNNQFNAFIMDHLKSNGVDTHLVEVIDSTDSLVYKLDMFPIECVIRNRASGSICKRLGTEDGLILENPLFEFFLKDDDLGDPLINDEHILSFGWANDEQIKEMKKQTYKVNEILSKLFLDSGLILVDFKVEYGVYKDKILLADEFTPDGCRLWDSKTMKKMDKDRFRQGLGDVVESYHQVADRLGMNIET

SEQ ID NO: 164809 - protein, 189 aa, Unknown
  Bacterial polypetide isolated from the Sargasso Sea
NKLPEGLEKNQRLKENMLTPTTKEEHHDRPISPNEIVNEGWMTAEDWEYCSRKALELFQFGQEKALENGMILVDTKYEMGKDENGNIVLIDEIHTPDSSRYWIAETYDQRIKDNKEPQNIDKEFLRLWFVDNCDPYSDKELPEAPRELVVELSSRYIYLYETITGGIFPFPDSKKTIQNRINNNLKDLI

SEQ ID NO: 164810 - protein, 262 aa, Unknown
  Bacterial polypetide isolated from the Sargasso Sea
MNTATEPYTFTDADGAFSLSSTNGTQKVVVTTNSATAGNLAINAIDGSSGAALTGVTLTGPSGSSVLSPASTLLEKSDLTEAEVAAALGLDGISLTSFNPYADGVDADNALAFEKVATQVITTVKAISAAAQGSGAAAEAASNAAFSSIISVVATKATAGETLDLSAAADLTSIQTQAATDLVAVAGVDATAFNAVLATAMTAVGNVNTQVAAITDTDLTASATKGLFATADFLSTQVLDAAAAELALAGSGVAGITLSDAA

SEQ ID NO: 164811 - protein, 230 aa, Unknown
  Bacterial polypetide isolated from the Sargasso Sea
LTKLRSFWFNKTQHIIKNHLLDDSELQDLIPKSHESCMLVKKCRPIRIESIVRGYLSGSAYTEYLKNGEVSDISMKPGLKLNDRFDVPIFTPSTKAEVGDKDESITFTQMKELIGNDEAIYINKKSIELYNFAHEYALSKGLCLIDTKFEFGYDDQNNIILIDEIFTPDCSRYCLAQDMNKKDVDFFDKQFFRDYLREIGWQGTQIDIPEKIKNILITRYQQVYNTIIND

SEQ ID NO: 164812 - protein, 238 aa, Unknown
  Bacterial polypetide isolated from the Sargasso Sea
MKKISEITKGKAKSMFTTENEEHLVMHFSDDTSAFDGKKKEALLGKGAVNNQFNAFIMDHLKSNGVDTHLVEVIDSTDSLVYKLDMFPIECVIRNRASGSICKRLGTEDGLILENPLFEFFLKDDDLGDPLINDEHIISFGWANDEQIKEMKKQTYKVNEILSKLFLDSGLILVDFKVEYGVYKDKILLADEFTPDGCRLWDSKTMKKMDKDRFRQGLGDVVESYHQVADRLGMNIET

SEQ ID NO: 164813 - protein, 286 aa, Unknown
  Bacterial polypetide isolated from the Sargasso Sea
MNTIESTNKYTESISKSINNTLTNTKINAGAKKTGKVRDQYDLGDKLALITTDRQSAFDRVLASIPFKGQVLNLTSAWWFEKTRDIIQNQVISIPDPNVTLAKKCEVFPIEFVVRGFITGSTSTSLWTVYNNGDREYCGNLLPEGLKKNQKLEKNMITPTTKEEDHDRPIAPNEIVSEGWMTQKDWDYCSSKAMELFEFGQTTALKNGLILVDTKYEMGKDIDGNIVLIDEIHTPDSSRYWLADTYQERIESGNEPQNIDKEFLRLWFVDNSDPYNDKELPNAPEE

SEQ ID NO: 164814 - protein, 151 aa, Unknown
  Bacterial polypetide isolated from the Sargasso Sea
KSTIEGKGVLNNRISEHILSNMSQIGIKNHLVKRLNMREQVIKLVNILPIEFVVRNVATGSLTKRLGIEDGTVIKEPLIEYCLKDDKLGDPLIAEEHIYVFEWATKKEIDKIKKMILRINDFMIGMFRGVGINLIDFKLEFGRIKINEKNE

SEQ ID NO: 164815 - protein, 238 aa, Unknown
  Bacterial polypetide isolated from the Sargasso Sea
MENIKKGELITTGKAKSLYESNESDFLIMHYRDDTSAFDGKKIESLEGKGTINNKFNAFIMKYLEDEGISTHFEELISETDSLVKRLDMAPVECVVRNVAAGSICKRLGLEEGMDLNPPTFEFFYKDDDLGDPMINEYHIKSFGWATEDQVEQMQVKTFEVNNALKKLFSDAGMILVDYKLEFGDFKGQLLLGDEFTPDGCRVWDAETREKLDKDRFRQDLGDVVESYQIMAKRLGVI

SEQ ID NO: 164816 - protein, 106 aa, Unknown
  Bacterial polypetide isolated from the Sargasso Sea
MKDFVDATAFNSEQGNRARKLFAAVVLAALDDAIADDRKYGNGPEQIARWARSRDGREVLSCAGIDPNERVVAGLMEFVEKGIRTSVALSREESERRNAAMEAEAA

SEQ ID NO: 164817 - protein, 65 aa, Unknown
  Bacterial polypetide isolated from the Sargasso Sea
SPDTCRLWDQETEKKLDKDRFRKDLGGVVEAYQEVARRLGILHEQSNIRPIKFPKPTAVKLKKNK

SEQ ID NO: 164818 - protein, 223 aa, Unknown
  Bacterial polypetide isolated from the Sargasso Sea
FTTDNDDYLVMHFSDDTSAFDGKKKEALLGKGAVNNQFNAFIMEHLKNNGVNTHLIEVIDSTDSLVYKLDMFPIECVIRNRASGSICKRLGTEDGLILENPLFEFFLKDDDLGDPLINDEHIISFGWANNEQIQEMKEQTYKVNEILSNLFIDSGLILVDFKVEYGIHKDKILLADEFTPDGCRLWDSKTMKKMDKDRFRQGLGDVVESYHQVADRLGMNIET

SEQ ID NO: 164819 - protein, 280 aa, Unknown
  Bacterial polypetide isolated from the Sargasso Sea
NFEQGKVRESYALPDGRRVMIATDRQSAFDQVLASVPYKGQVLNQTARFWFDNTLDICPNHVIDYPDPNVIIAKGLSMLPVEMVVRDYITGSTETSIWPMYDRGERSMYGIPFPEGLKKNQKLPDTILTPTTKAAQGDHDAPITPEEIVSQGLLSQKHWDELAEISLAIFARGREISAKNGLILVDTKYEFGLDNDGNITLADEVHTPDSSRYWLASSYEDRLASGKEPESLDKEFLRLWIAGQCDPYKDPIPEIPENTILEFSKKYIALYEQVTGLEFE

SEQ ID NO: 164820 - protein, 53 aa, Unknown
  Bacterial polypetide isolated from the Sargasso Sea
MEKKLDKDRFRKDLGNIIEGYQEVARRLGIMPEIANVKEVNFNKQSSIKFKKK

SEQ ID NO: 164821 - protein, 238 aa, Unknown
  Bacterial polypetide isolated from the Sargasso Sea
MEEIKKGNLVNSGKAKSLFESSIDDHYVMHYRDDTSAFDGVKTESLSGKGEINNKFNAFIMEVLEKNGIATHFVRLLSDTDSLVKKLNMLPIECVIRNIAAGSICKRLGIEEGLDLDPPTFEFFYKDDDLHDPMINEFHIDSFGWASEDEVGQMKELTFKVNKVLKKLFLDAGMILVDYKLEFGSFDNKLLLGDEFTPDGCRVWDIDTREKLDKDRFRQDLGDVVESYHIIANKLGID

SEQ ID NO: 164822 - protein, 225 aa, Unknown
  Bacterial polypetide isolated from the Sargasso Sea
MNENGVYNGKVRCVEDIGYNCLILSASDRLSAFDKYICDVPNKGLILNNISVWWFNKTKHIIDNHYLYHENNHMVVKKAKPIKLEIIVRAYMTGSTNTSIWPMYNRGEREIYGINFRDNYKKNEKLDNIIITPTTKGSTDRPITPKEIIDLKYLSHEEWDFISKKALELFKYGQKEASKKGLLLVDTKYEFGWLNDTIILIDELHTCDSSRYWLKDSYDDRFKLG

SEQ ID NO: 164823 - protein, 217 aa, Unknown
  Bacterial polypetide isolated from the Sargasso Sea
NQQDYLVMHYRDDTSAFDGKKIESLEGKGTINNKFNAFIMNYLEKEGIQTHFVDLLNDTDSLVKKLDMAPVECVVRNVAAGSICKRLGLEEGIDLNPPTFEFFYKDDELGDPMINEYHIRSFGWASEEQVKQMQIKTFEVNEALKKLFSDAGMILVDYKLEFGDFQGTLLLGDEFTPDGCRVWDEETREKLDKDRFRQGLGDVVESYQIMAKRLGVI

SEQ ID NO: 164824 - protein, 78 aa, Unknown
  Bacterial polypetide isolated from the Sargasso Sea
SDGELYLIDEVLTPDSSRFWAIENYELGSSPPSFDKQYLRDYLETLDWDKTAPGPELPQEVIDNTASKYKNAFKQIAE

SEQ ID NO: 164825 - protein, 234 aa, Unknown
  Bacterial polypetide isolated from the Sargasso Sea
LNKISEWWFKKTEKLVPNHFISSEDRCMIVKKADVFPIEFVMRNYLTGSTSTSIWKNYEAGMRYYCGHKLKDGMIKDQKLERAILTPTTKGKKDELISKKIIIERGIMTKEDYEVCERYAHKLFEIGVHEAGKRGLILVDTKYEFGKTKDGNIVLIDEVHTPDSSRYWLEHSYKSRFKEGKSPEMIDKEIIRKWIRKNYEDPYTANKIMISDDIRMLTYVRYIQLYEIITGESF

SEQ ID NO: 164826 - protein, 212 aa, Unknown
  Bacterial polypetide isolated from the Sargasso Sea
VTGSSSTSLWTIYNRGDREYCGITFPDGLTKNQALEEAVLTPTTKEEDHDRPISPADIVSEGWMTQEHWDFAAQKALDLFNRGQKISADHGLILVDTKYEMGIAEDGEITLIDEIHTPDSSRYWIAESYERRMGEGLEPENIDKEFLRLWFKDHCDPYEDETLPAAPDDLVVELSARYIHLFEIITGENFTFPEADLPISDRIAHNLAKYLA

SEQ ID NO: 164827 - protein, 95 aa, Unknown
  Bacterial polypetide isolated from the Sargasso Sea
MSLADSVLAVNNDLPIRTDSPVHSGKVRSVYWLTDADSRRLIQTKGYNVPEDTPLAIMVISDRISAFDCIFHGEGGLKGIPGKGAALNAISNHWV

SEQ ID NO: 164828 - protein, 151 aa, Unknown
  Bacterial polypetide isolated from the Sargasso Sea
QWDELARISLAIFARGREIAADNGLILVDTKYEFGLDETGTITLADEVHTPDSSRYWLKSSYEKRLAEAKEPESLDKEFLRLWISGKCDPYTDPIPDIPEDTIIEFSGKYIALYEQVTGLKFVYPDNSQPVGERVRANLAAALPEFFSKDG

SEQ ID NO: 164829 - protein, 194 aa, Unknown
  Bacterial polypetide isolated from the Sargasso Sea
MPADATAFNVSNLTAATQFAVSVVAHNALGASLPSPSSWLTTLPTVPQTPGAPECDAKRTTHDSLSIVLDPPARDNGQPIEQYEYRLVAGQPSPGTPAVREAAAQPADVLLVSTLPPSQTTVDVSNRTVDVSNRYPIEPGATYLVTARARNALGWSAWSAASGSCIARDVPVPPFNWIPLIAALGGFMLLAILC

SEQ ID NO: 164830 - protein, 61 aa, Unknown
  Bacterial polypetide isolated from the Sargasso Sea
EFGKFQDKMLLADEFTPDGCRLWDKDTLTKMDKDRFRQDLGNVIETYGEVGKRLGMQIKLD

SEQ ID NO: 164831 - protein, 207 aa, Unknown
  Bacterial polypetide isolated from the Sargasso Sea
SSAFDGKKKEALLGKGSVNNQFNAFIMKHLKENGVETHLIDVIDSTDSLVFKLDMFPIECVIRNRASGSICQRLGTQDGLVLENPLFEFFLKDDDLGDPLINDEHIISFGWANNEQIEEMKKQTYRVNEILSKLFLDSGLILVDFKVEYGVYKDKILLADEFTPDGCRLWDSKTMKKMDKDRFRQGLGDVVESYHQVAERLGMNIET

SEQ ID NO: 164832 - protein, 100 aa, Unknown
  Bacterial polypetide isolated from the Sargasso Sea
MKDFVDATAFNSEQGNRARKLFAAVVLAALDDAIADDRKYGNGPEQIARWARSRDGREVLSCAGIDPNERVVEGLMEFVEKGIRTSVALSREESERRNAA

SEQ ID NO: 164833 - protein, 280 aa, Unknown
  Bacterial polypetide isolated from the Sargasso Sea
MITTDRQSAFDRVLASIPFKGQVLNLTSAWWFDQTKDIIKNHVLSVPDPNVTIAKKCYVFPIEFVVRGYITGSTSTSLWTVYNNGDREYCGNVLPEGLKKNQKLEENMITPTTKDENHDMPISPDAIVSDGWMTSEDWKFCSQKAMQLFEFGQKTALENGMILVDTKYEMGKDRDGNIVLIDEIHTPDSSRYWIANTYHERIKNGKEPQNIDKEFLRLWFVDNCDPYNDETLPNAPEDLVVELSKRYIYLYETITGKSFPFPDENIPVNERIKNNLKDQL

SEQ ID NO: 164834 - protein, 149 aa, Unknown
  Bacterial polypetide isolated from the Sargasso Sea
MKILKLFLIFTSVLFSFNAANAFDWKAHSGKTITILMNEHPVLDGIRSLIPQFEADTGIKVKVNALAEDLYFDRMEVNLRAPKGADAHFCPMDATAFNQFSDGLLQPLNGFLDDSNATHPDYDVNDFPAGFLNATNFPRGPGSNYYCIP

SEQ ID NO: 164835 - protein, 102 aa, Unknown
  Bacterial polypetide isolated from the Sargasso Sea
IISFGWASHEHIQEMKKQTYLVNEILSKLFLDSGLILVDFKVEYGLYKDKILLADEFTPDGCRLWDSETLKKMDKDRFRQGLGDVVESYHQVADRLGMNIET

SEQ ID NO: 164836 - protein, 238 aa, Unknown
  Bacterial polypetide isolated from the Sargasso Sea
MKKTGKVRDQYELDNQIALITTDRQSAFDRVLASIPFKGQVLNLTSAWWFEQTKHIIPNQVISIPDPNVTLAKKCKVFPIEFVVRGYITGSTSTSLWTVYKSGDREYCGNIIPDGLLKNQKLESNMLTPTTKEKHHDRPIAPDQIISEGWMSLEDWNYCSKKALELFEFGQKKAAENGMILVDTKYEMGKDEDENILLIDEIHTPDSSRYWIADSYEERMEKQLEPQNIDKEFLRLWL

SEQ ID NO: 164837 - protein, 124 aa, Unknown
  Bacterial polypetide isolated from the Sargasso Sea
NPLFEFFLKDDELGDPLINDEHIISFGWANSDQIQEMKKQTYLVNKILSKLFFDSGLILVDFKVEYGIYKDKILLADEFTPDGCRLWDSKTLKKMDKDRFRQGLGDVVESYHQVADRLGMNIET

SEQ ID NO: 164838 - protein, 238 aa, Unknown
  Bacterial polypetide isolated from the Sargasso Sea
MKKINEITKGKAKSMFSTENEDHLIMHFSDDTSAFDGKKREALLGKGAVNNQFNAFIMNHLKDNGVESHLIEVIDSTDSLVYKLDMFPIECVIRNRASGSICKRLGTEDGLVLENPLFEFFLKDDDLGDPLINDEHIISFGWASHEHIQEMKKQTYLVNEILSKLFLDSGLILVDFKVEYGLYKDKILLADEFTPDGCRLWDSETLKKMDKDRFRQGLGDVVESYHQVADRLGMNIET

SEQ ID NO: 164839 - protein, 179 aa, Unknown
  Bacterial polypetide isolated from the Sargasso Sea
KLEENMLTPTTKEEDHDRPISPSDIVSENWMTQEDWDYCSKKALELFEFGQEKAAEHGMILVDTKYEMGKDEDGNILLIDEIHTPDSSRYWIAGSYEDCIAQGKEPQNIDKEFLRLWFVDNCDPYNDKELPAAPDELVIELSSRYIYLYETITGSVFPFPDKGKEVTERIKENLKDYIK

SEQ ID NO: 164840 - protein, 316 aa, Unknown
  Bacterial polypetide isolated from the Sargasso Sea
MIKQQLKYPLEETNFDDQGELYRGKVRDNYINEDTITMVTTDRISAFDKVLGTVPFKGQSLVELADWWFGETADIVANHVIRRPHPNVWTVRRCDPIQVEMVVRGYITGVTSTSAWTAYDKGERNFCGNELPDGMRKNEKLPEPIITPSTKAAQGEHDESVAPSELYKRGVVDPALYSELARISMRLYERGVSRAADHGLIFVDTKYEFGISNGKIMLMDEVNTPDSSRYWISEDYEKRFENNEEPRKLDKEYVRTWLADQGFTGKGKPPKLTDEIRVEAASRYMEVVETFTGEPMQLEVGPVDESIYSILNPFAY

SEQ ID NO: 164841 - protein, 225 aa, Unknown
  Bacterial polypetide isolated from the Sargasso Sea
MVVESAIKNTDFNFENLKKKYTGKVRDVYHFEDKLVMVVSDRISAFDVVLPKPIPFKGQILNQIAEKFLKMTEDIVPNWIISVPDPNVTIGKNCDTFPVEMVIRGYLTGHAWREYNSGKRIICGVSMPEGMREHDKFPKPIITPTTKAKIGHDIDTSKDEIISKNLISKVEYEELEKITRKLFERGTDFAKSKNLLLVDTKYEFGKFGNEITLIDEIHTPDSSRY

SEQ ID NO: 164842 - protein, 328 aa, Unknown
  Bacterial polypetide isolated from the Sargasso Sea
MNVLESVSQYKDRISVELNNTLTETELGSAKKKTGKVRDQYDLGDALALITTDRQSAFDRVLASIPFKGQVLNLASAWWFEETKHIIDNHIINVADPNVIVAKKCKVFPIEFVVRGFITGSTSTSLWTVYNNGDREYCGNSLPEGLKKNQKLVKNMLTPTTKEEHHDRPISPAEIVSENWMTQEDWDYCSEKAMELFEFGQKKAKENGMILVDTKYEMGKDEDGNILLIDEIHTPDSSRYWIAETYEERMSSGQEPQNIDKEFLRLWFVDNCDPYNDKELPPAPDELIIELSSRYIYLYETITGSVFPFPDKGKAVQERINENLKEYL

SEQ ID NO: 164843 - protein, 325 aa, Unknown
  Bacterial polypetide isolated from the Sargasso Sea
MKSKNKYTDSISKSINNTLTNTSLGSGQKKTGKVRDQYDLGDKIALITTDRQSAFDRVLASIPFKGQVLNLTSAWWFDKTKDIIPNHVIDIPDPNVTLAKKCDVFPIEFVIRGFITGSTSTSLWTVYNNGDREYCGNALPDGLKKNQRLDKNMITPTTKEEHHDRPISPDEIVSEKWMTEEDWNYCSQKAMELFEFGQKTALSHGMILVDTKYEMGKDADGNIVLIDEIHTPDSSRYWIAESYQERIDSGQEPQNIDKEFLRLWFVDNCDPYNDETLPDAPDELVVELSSRYIYLYETITSNDFPFPNNDLPINERINHNLKDLL

SEQ ID NO: 164844 - protein, 199 aa, Unknown
  Bacterial polypetide isolated from the Sargasso Sea
EALDNKGKVNNQFNAFVMEFLASKGIETHFIKLLSNHESLVHKLEMFPIECVVRNRATGSLCKRLGIEDGLILDPPLFEFFLKDDDLGDPLINDHHIESFGWATQEDADAMRDLTLKINDILVEFFMEANLILVDYKLEFGKLQDKMLLADEFTPDGCRLWDKDTLTKMDKDRFRQDLGDVIETYGEVGERLGMKIKLD

SEQ ID NO: 164845 - protein, 239 aa, Unknown
  Bacterial polypetide isolated from the Sargasso Sea
MEKISQITTGKAKSLFTTNEPDQLIMEFRDDTSAFDGKKIEALDNKGKVNNQFNAFVMEFLASKGIETHFIKLLSNHESLVYKLEMFPIECVVRNRATGSLCKRLGIEDGLILDPPLFEFFLKDDDLGDPLINDHHINSFGWATQEDADAMRDLTLKINDILVDFFMEANLILVDYKLEFGKFNGKMLLADEFTPDGCRLWDKDTLTKMDKDRFRQDLGNVIETYGEVGERLGMQIKLD

SEQ ID NO: 164846 - protein, 238 aa, Unknown
  Bacterial polypetide isolated from the Sargasso Sea
MNKIKEITKGKAKSMFTTENEEHLIMHFSDDTSAFDGKKKEALLGKGVVNNQFNAFIMDHLKQNGIETHLIEVIDNSDSLVYKLEMFPIECVIRNRASGSICKRLGTEDGLILENPLFEFFLKDDDLGDPLINDEHIISFGWATQEQILEMKKLTYKVNEILSSLFLDSGLILVDFKVEYGVYNDKILLADEFTPDGCRLWDSETMKKMDKDRFRQGLGDVVESYHQVADRLGMNIKT

SEQ ID NO: 164847 - protein, 125 aa, Unknown
  Bacterial polypetide isolated from the Sargasso Sea
TAKKNDLILVDTKYEIGTDSSGKIKFVDEIHTPDSSRFWISGSYKERINAGQEPENIDKEFLRLWFAKNCDPYNDEALPDAPDDLVAELSARYILLYELITGEKFVFPNLDDINKRITENIKELL

SEQ ID NO: 164848 - protein, 231 aa, Unknown
  Bacterial polypetide isolated from the Sargasso Sea
MPSGIKRSGKVRDQYDLGDSIALITTDRQSAFDRVLASVPFKGQVLNLTSAWWFEATKDIIANHVIDIPDPNVTLAKKCDVFPIEFVVRGFITGSTSTSLWTVYNNGDREYCGNDLPEGLKKNQRLEQNMLTPTTKEEDHDRPISPTDIVKEKWMTQEDWDYCSKKALELFAFGQEKAKENGLILVDTKYEMGKDKDGNIVLIDEIHTPDSSRYWISESNEERFNSGKEPQ

SEQ ID NO: 164849 - protein, 328 aa, Unknown
  Bacterial polypetide isolated from the Sargasso Sea
MNVLESVSQYKDRISVELNNTLTETELGSAKKKTGKVRDQYDLGNALALITTDRQSAFDRVLASIPFKGQVLNLASAWWFDETKHIIDNHIISVADPNVIIAKKCKVFPIEFVVRGFITGSTSTSLWTVYNNGDREYCGNSLPEGLKKNQKLVSNMLTPTTKEEHHDRPISPDEIVSENWMTQEDWDYCSKKALELFEFGQKKAKENGMILVDTKYEMGRDEDGNILLIDEIHTPDSSRYWIAETYEERMSNGQEPQNIDKEFLRLWFVDNCDPYNDKELPPAPDELIIELSSRYIYLYETITGSVFPFPDKGKAVQERINENLKEYL

SEQ ID NO: 164850 - protein, 310 aa, Unknown
  Bacterial polypetide isolated from the Sargasso Sea
MTNTIQDTNIDAPNKKVGKVRDAYFLNEKVVMISTDRQSAFDRVLAAIPYKGAVLNSVSAWWFKQTEHLFPNHLISTPDPNVSIVEKCDVFPVEFVVRGYITGTTDTSLWTVYNKGDREYCGNILPEGLTKNDKLDVPMLTPTTKDKVHDRPVSREEIIELGLMTAEDYDFAAKMSLDLFSFGQKTAEKNGLILVDTKYEIGKDSSGKIKFVDEIHTPDSSRFWISGSYKDRIKNGQEPENIDKEFLRLWFAKNCDPYNDEVLPDAPDELVAELSARYILLYELITGEKFVFPNLDNINKRITENIKELL

SEQ ID NO: 164851 - protein, 237 aa, Unknown
  Bacterial polypetide isolated from the Sargasso Sea
MIEKLNLISEGKAKSLYETSEASELLMVYRDDTSAFDGKKKEALKGKGEINNKFNAFIMEHLSNNGVETHFLKLVEKNESLVKRLDMLPVECVVRNIATGSLCRRLGVEEGIKFEDPLFEFFLKDDDLGDPLINDNHITAFGWGTEEEIATMKEITFRINHLLCELFKEVGLILVDYKVEYGRSNGSLILGDEFTPDGCRIWDAETGESLDKDRFRKDLGDVVESYQIVAHKLGISL

SEQ ID NO: 164852 - protein, 116 aa, Unknown
  Bacterial polypetide isolated from the Sargasso Sea
MNKGKKLYEGKAKILYEGPEKGTAIQHFKDAATAFNNQKKSVVEGKGVLNNRISEHILLNLSQIGIKTHLIKRLNMREQLVRLVEIIPIKFIVRNVATGSLTKRLGIADGTVMSKP

SEQ ID NO: 164853 - protein, 238 aa, Unknown
  Bacterial polypetide isolated from the Sargasso Sea
MNKIQEITKGKAKSMFTTENDDHLIMHFSDDTSAFDGKKKEALLGKGAVNNQFNAFIMDHLKENGVDTHLIEMIDNTDSLVYKLEMFPIECVIRNRASGSICKRLGTEDGLVFESPLFEFFLKDDDLGDPLINDEHIISFGWANLSQIEEMKKQTYRVNEILSKLFLDSGLILVDFKVEFGVYKDKILLADEFTPDGCRLWDSKTMKKMDKDRFRQGLGDVVESYHQVADRLGMNIET

SEQ ID NO: 164854 - protein, 106 aa, Unknown
  Bacterial polypetide isolated from the Sargasso Sea
MKDFVDATAFNTEQGNRARKLFAAVVLAALDDAIADDRKYGNGPEQIARWARSRDGREVLSCAGIDPNERVVEGLMEFVEKGIRTSVALSREESERRNAAMEAEAA

SEQ ID NO: 164855 - protein, 237 aa, Unknown
  Bacterial polypetide isolated from the Sargasso Sea
MIEKLSLISEGKAKSLYETSETSELLMVYRDDTSAFDGKKKEALKGKGEINNKFNAFIMQYLANNGVETHFIKLVQDNESLVKRLDMLPVECVVRNIATGSLCRRLGVEEGIKFEDPLFEFFLKDDDLGDPLINDNHITAFGWGTEQEISEMKEITFKINQLLCDLFKDVGLILVDYKVEYGRSNASLILGDEFTPDGCRIWDAETGESLDKDRFRKDLGDVVESYQIVAHKLGISL

SEQ ID NO: 164856 - protein, 310 aa, Unknown
  Bacterial polypetide isolated from the Sargasso Sea
MTNTIQDTNISAPNKKVGKVRDAYFLNDKVVMISTDRQSAFDRVLAAIPYKGAVLNSVSAWWFKKTEHLFPNHLISTPDPNVSIVEKCTVFPVEFVVRGYITGTTDTSLWTVYNNGDREYCGNSLPEGLKKNDKLDKPMLTPTTKDKVHDRPVSREEIIDLGLMSAEDYDLAAKMSLDLFAFGQETAKKNGLILVDTKYEIGTDSKGKIKFVDEIHTPDSSRFWISSSYKDRINSGQEPENIDKEFLRLWFAKNCDPYNDEVLPDAPDDLVAELSARYILLYELITGEKFIFPNLNDINKRITENIEELL

SEQ ID NO: 164857 - protein, 327 aa, Unknown
  Bacterial polypetide isolated from the Sargasso Sea
MNAIKSTEHYKARIKAEIDNTLTETNLQSGTKKTGKVRDQYDLGDKIALITTDRQSAFDRVLASIPFKGQVLNLTSAWWFEQTKHIIDNQVIDIPDPNVTLAKKCKVFPIEFVVRGYITGSTSTSLWTVYNNGDREYCGNILEEGLVKNQKLDENMLTPTTKEEHHDRPISPEDIVKEGWMSQEDWDYCSNKALELFSFGQEKAADHGMILVDTKYEMGKDSDGNIVLIDEIHTPDSSRYWIADTYDERMKDGKEPQNIDKEFLRLWFVDNCDPYNDDELPDAPEDLVTELSSRYIYLYETITGGLFPFPDSGKTIGDRIAENLKDV

SEQ ID NO: 164858 - protein, 48 aa, Unknown
  Bacterial polypetide isolated from the Sargasso Sea
MKKGKKLYEGKAKIIFASPEKNLVIQHFKDEATAFNNQKKANLDGKGI

SEQ ID NO: 164859 - protein, 230 aa, Unknown
  Bacterial polypetide isolated from the Sargasso Sea
HIIGNHFLYMANDPKINEVFASEALIRELPADIARQSMIVREAKRIDVECVVRGYITGSAWTEYKREGTVSGRIMPKGLVEGQKFSEPLFTPTTKAEQGHDENMSMDEVRKLVGNEVAFALETKSKEVYNFAHDYAVQKDIILADTKMEFGFIGDNLILIDELLTPDSSRFWEADKYVPGNSLPNYDKQLVRNWLESSGWDKESTPPNLPSYVIENTINRYTEVYQLLSQ

SEQ ID NO: 164860 - protein, 30 aa, Unknown
  Bacterial polypetide isolated from the Sargasso Sea
VLADEISPDTCRLGIQKQKKSWIRTDLEKI

SEQ ID NO: 164861 - protein, 328 aa, Unknown
  Bacterial polypetide isolated from the Sargasso Sea
MNAIESNKHYKKRINSELQNTLTETNLSQGNKRTGKVRDQYELEDKIVLITTDRQSAFDRVLASIPFKGQVLNLTSAWWFEQTKEIIPNQVINIPDPNVTLAKKCNVIPIEFVVRGFITGSTSTSLWTVYNNGDREYCGNIIPDGLVKNQKLEENMLTPTTKEEDHDRPIAPSEIVSEGWMTQNDWDYCSAKALELFSFGQKKAAENGMILVDTKYEMGHDDDGNILLIDEIHTPDSSRYWIADTYEERMANGFEPQNIDKEFLRLWFVDNCDPYNDEQLPEAPNDLVSELSSRYIYLYETITGQSFPFPEADLSIHERINSNLKDLI

SEQ ID NO: 164862 - protein, 82 aa, Unknown
  Bacterial polypetide isolated from the Sargasso Sea
MSTLYESTLHSLPLLGRGKVRDNYAVGNDQLLIVTTDRLSAFDVIMGEPIPNKGRVLNEMANFWFEKLKHVVPNHLTGVAPE

SEQ ID NO: 164863 - protein, 238 aa, Unknown
  Bacterial polypetide isolated from the Sargasso Sea
MKKINEITKGKAKSMFTTDVEDHLIMHFSDDTSAFDGKKREALLGKGAVNNQFNAFIMEHLKKNGIETHLIEVIDSTDSLVYKLDMFPIECVIRNRASGSICKRLGTEDGLILENPLFEFFLKDDDLGDPLINDEHIISFGWANAEQIQEMKKQTYKVNQVLSKLFLDSGLILVDFKVEYGVYKDKILLADEFTPDGCRLWDSKTLKKMDKDRFRQGLGDVVESYHQVADRLGMNIET

SEQ ID NO: 164864 - protein, 255 aa, Unknown
  Bacterial polypetide isolated from the Sargasso Sea
NLTSAWWLEQTKHIIDNQVIDIPDPNVTLAKKCKVFPIEFVVRGYITGSTSTSLWTVYNNGSRDYCGNALEEGLVKNQKLDANMLTPTTKEVDHDRPISPEDIVKEGWMNQEDWDYCSSKALELFSFGQEKAAANGMILVDTKYEMGRDSDGNIVLIDEIHTPDSSRYWIAETYDERMNAGEEPQNIDKEFLRLWFMDNCDPYNDEVLPEAPNELVTELSSRYIYLYETITGGLFPFPDSGKTIGDRIAENLKDK

SEQ ID NO: 164865 - protein, 60 aa, Unknown
  Bacterial polypetide isolated from the Sargasso Sea
CRLWDSKTEKKLDKDRFRKDLGNIIQGYQEVARRLGIMPEETNISEVNFGKTIPIKFKKK

SEQ ID NO: 164866 - protein, 124 aa, Unknown
  Bacterial polypetide isolated from the Sargasso Sea
LTFNWLNVMQLDLIDENLSRLNDFLLGMFRGVGIKLIDFKVEFGFTHESEKTQIILADEISPDTCRLWDTLTDKKLDKDRFRKDLGDIIPAYTEVAKRLGILHEQSNVSAVNVTQLSSVKRKKK

SEQ ID NO: 164867 - protein, 112 aa, Unknown
  Bacterial polypetide isolated from the Sargasso Sea
MKKGKKLYEGKAKIIYATNDKNLVIQYFKDDATAFNNQKKTTIEGKGVLNNRISEHILSNLSEVGIKNHLVKRINMREQLVKLVDIIPIEFIVRNIATGSLTKRLGIEEGTV

SEQ ID NO: 164868 - protein, 80 aa, Unknown
  Bacterial polypetide isolated from the Sargasso Sea
GKTKSNDTIMLADEISPDTCRLWDQKTDKKLDKDRFRKDLGNVVEAYQEVARRLGILHEQPNIRPIKFSKPTAVKIKKSK

SEQ ID NO: 164869 - protein, 163 aa, Unknown
  Bacterial polypetide isolated from the Sargasso Sea
MKKGKKLYEGKAKIVYATNDKSLGIQHFKDSATAFNNKKRATIDGKGILNNRISEHILSNLSQIGIKNHLVKRLNMREQLIKLVEIIPIEFIVRNVATGSLTKRLGIEDGTELRKPLIEFCLKNDELGDPLISKEHIFAFEWASKKEIDKIEGNLHRMNDFMI

SEQ ID NO: 164870 - protein, 100 aa, Unknown
  Bacterial polypetide isolated from the Sargasso Sea
GVNHAKEKGIIIADTKFEFGLDGDGELYLIDEVLTPDSSRFWAIENYELGSSPPSFDKQYLRDYLETLDWDKTAPGPELPQEVIDNTASKYKNAFKQIAK

SEQ ID NO: 164871 - protein, 280 aa, Unknown
  Bacterial polypetide isolated from the Sargasso Sea
MSQKSIYNSNLPNITHAGKVRDTYELNDELLLMVVTDRISAFDVVMDTAIPRKGEVLAKMSEFWFKKTNHIIPNHFIGLASDSKTFELISDFPIAKHLDEGLRKRSMVVKKAKRIDIECIVRGYITGSAWSEYKKTKTVNKMPIPQDLVEAAEFPEFIFTPSTKAEVGHDEPLSPNETKELIGEDLYDQVKSKSIEIYTYANEYSRSKGMILADTKFEFGFIDNKLSLIDEALTPDSSRFWSINDYKPGKSPLPYDKQYLRNWLLTQNWNKKPPPPQMPK

SEQ ID NO: 164872 - protein, 151 aa, Unknown
  Bacterial polypetide isolated from the Sargasso Sea
MKKGKKLYEGKAKIIYATSDKNLVIQYFKDDATAFNNQKKSNIEGKGVLNNRISEHILSNLSQVGIKNHLVKRLNMREQLVKLVDIIPIEFIVRNIATGSLTKRLGIEDGTILERPLIEYCLKDDKLGDPLISKEHILTFNWLSKTQLDFV

SEQ ID NO: 164873 - protein, 45 aa, Unknown
  Bacterial polypetide isolated from the Sargasso Sea
MNKGKKLYEGKAKILYETKDKELIIQHFKDDATAFNNLKKASVEG

SEQ ID NO: 164874 - protein, 107 aa, Unknown
  Bacterial polypetide isolated from the Sargasso Sea
MNSKFGLIYEGKAKKIFSHQDSEKVIIEFKDDATAFNALKKAKFEGKGELNCLISSKIFEFLIKNNIPTHYLEVINKNSMIAQKIKIIPLEIVLRNIAYGSLVNRLQ

SEQ ID NO: 164875 - protein, 264 aa, Unknown
  Bacterial polypetide isolated from the Sargasso Sea
MNTPLRSIYQEIKSSSSKSVLDEHCFNGITENQIEQLNGDGYGYYEGKVRQCFSKEDKLFVVHTDRLSAFDRLIGLVPYKGAVLNAISDFWLDKAKEVLPTHLISKSDDRTLETLKAEPVKAEVIVRSYLAGSMMRAYNDGEREFCGNSLPDGLEDYGVLPKRIITPTTKAAAFEHDENTTASELIERNIVTEDEWKQIEKMSLDLFELGSKIYAEKGWILVDTKYEFGRLPNGEIIVIDEIHTPDSSRFWVKESYEKNVKEGL

SEQ ID NO: 164876 - protein, 185 aa, Unknown
  Bacterial polypetide isolated from the Sargasso Sea
MREQLVELVNIIPIEFVIRNIATGSLTKRLGIEEGTILDYPLIEYCLKNDKLGDPIISREHILNFKWLDTIELDLINEQCLRINDFLQGIFRGVGIKLVDFKVEFGKTKSNDKIILADEISPDTCRLWDHQTDKKLDKDRFRKNLGNVVESYQEIARRLGILHEQSNIRPIKFPKPIAVKIKKNK

SEQ ID NO: 164877 - protein, 155 aa, Unknown
  Bacterial polypetide isolated from the Sargasso Sea
MNKGKKLYEGKAKILYETKEKGLAIQHFKDDATAFNNQKKANVEGKGVLNNRISEHILQNLNQAGIKTHLVKRLNMREQLVRLVEIIPIEVIIRNIATGSLTKRLGIPDGTVLEKPLIEFSYKNDELGDPLVAKEHILAFNWATEDELKIIEEQT

SEQ ID NO: 164878 - protein, 156 aa, Unknown
  Bacterial polypetide isolated from the Sargasso Sea
LEEGLTNSSKLTEPIFTPSTKEDEGHDENISFEVMSDMIGKDLSEQLKDISLNLYKTASEYALTKNIIIADTKFEFGIINEKITLIDEVLTPDSSRFWDIDDYQPGKSQDSYDKQIVRDWLETTDWDKEPPSPDLPEEIMNKTYERYKSALEKLTS

SEQ ID NO: 164879 - protein, 195 aa, Unknown
  Bacterial polypetide isolated from the Sargasso Sea
MKKGKKLYEGKAKIIYATNDKNLVIQHFKDDATAFNNQKKDVIEGKGILNNRISEHILTQLSNVGIKNHLVKRLNMREQLVKLVEIIPIEFIVRNIATGSLTKRLGIEDGTVLDYPLVEYCLKKDELGDPLVSREHILAFKWMDVFELDFIYEEVRRINDFLQGMFRGVGIKLVDFKVEFGRSEIDGKRESMLAD

SEQ ID NO: 164880 - protein, 205 aa, Unknown
  Bacterial polypetide isolated from the Sargasso Sea
MLNSARLLPASEEVKMTLATQVLAVNDDLPIRTDLPVHSGKVRSVYWLTAEDSARLIREKNYPVALDTPLAIMVISDRISAFDCIWHGENGLNGVPGKGAALNAISNHWFSLFKQHGLADSHILDIPHPLVWIVQKARPVKIEAIARQYITGSMWRAYSKGEREFCGITLPEGLQKDQKLPDILITPSTKGILTGLDGVPEADDV

SEQ ID NO: 164881 - protein, 109 aa, Unknown
  Bacterial polypetide isolated from the Sargasso Sea
MKKGKKLYEGKAKIIYATSDKNLVIQYFKDDATAFNNQKKSTIEGKGVLNNRISEHILSNLNQIGIKNHLVKRLNMREQLVKLVDIIPIEFIVRNIATGSLTKRLGIEE

SEQ ID NO: 164882 - protein, 50 aa, Unknown
  Bacterial polypetide isolated from the Sargasso Sea
MKKGKKLYEGKAKIVFATSDKNVVIQHFKDDATAFNNQKKSIIEGKGILN

SEQ ID NO: 164883 - protein, 179 aa, Unknown
  Bacterial polypetide isolated from the Sargasso Sea
KKNIPTHFIELENENTMIAKKIKVIPLEIVLRNIAYGSLCKQTTIKPGTFLSKPLIDIYLKNDELNDPLITKDRIELINILSSDDLQLIINLTLKVNEILKSFFKNIQLQLVDFKLEYGYDLKNNILLGDEISPDNCRLWDLNQKNDTIVSLDKDRFRNDLGGLIEAYSEIHRRINNFL

SEQ ID NO: 164884 - protein, 191 aa, Unknown
  Bacterial polypetide isolated from the Sargasso Sea
VKRINMREQLVKLVDIIPIEFIVRNIATGSLTKRLGIEEGTVLERPLIEYCLKDDKLGDPIISREHILTFNWLNLAQLDWIDENLSRLNDFLLGMFRGVGIKLVDFKVEFGFTHESEKNKIILADEISPDTCRLWDTLTDKKLDKDRFRKDLGDLIPAYTEVAKRLGILHEQSNVSAVNVTQLSSVKRKKK

SEQ ID NO: 164885 - protein, 163 aa, Unknown
  Bacterial polypetide isolated from the Sargasso Sea
MNKGNKLYEGKAKIIYETTNKNLVIQHFKDDATAFNNLKKSKVEGKGVLNNRISEYILTNLSQCGIKTHLVKRLNMREQLVRKAEIFPIEFIVRNIATGSLTKRLDISEGTVLEKPLLEYCYKKDELQDPLVSRDHIYSFGWASEKELKEIDKTSLRINDLLL

SEQ ID NO: 164886 - protein, 101 aa, Unknown
  Bacterial polypetide isolated from the Sargasso Sea
FLVGMFRGIGIKLVDFKVEFGRLKNSNKNEIILADEISPDTCRLWDTNTEKKLDKDRFRKNLGNLIEAYQDVARRLGILHEHSNIRPLKFPKPKEVKIKKK

SEQ ID NO: 164887 - protein, 200 aa, Unknown
  Bacterial polypetide isolated from the Sargasso Sea
MKKGKKLYEGKAKIIFATSDKNTVIQHFKDDATAFNNQKKANIDGKGILNNRISEHLLKSLSDIGIKNHLIKRLNMREQLVELVNIIPIEFVIRNIATGSLTKRLGIEEGTVLDYPLIEYCLKDDKLGDPIISREHILNFKWLNLIELDLINEQCLRINDYLQGLFRGIGIKLVDFKVEFGKTKSDETIILADEISHRYM

SEQ ID NO: 164888 - protein, 195 aa, Unknown
  Bacterial polypetide isolated from the Sargasso Sea
KDHSKGKGEINAKISSLIFQQLERATIKTHFIQSAGPGIMRCKKVDIIPIEVVVRNVADGSIVRETTIPKDTVFNPPLVEFYLKDDDKNDPLLTEDRLTLMGYTNLRRIKQYAKETNAVVSDLFKRIGIVLIDFKLEFGTTVNGDIVVADEISPDGCRLRNKETNQSMDKDLFRKGTGDIIGAYTEIMDKLIEIC

SEQ ID NO: 164889 - protein, 186 aa, Unknown
  Bacterial polypetide isolated from the Sargasso Sea
MREQLVQHIEIIPIEFIVRNIATGSLTKRLGIEDGTVLDNPLIEYCLKDDELGDPLVSTEHILAFKWMEKDELKLINKELNRINDFLQGMFRGVGIKLVDFKVEFGRYEKNGKKEIMLADEISPDTCRLWDVNSDKKLDKDRFRKGLGNLIEAYQEVARRLDILHEQSNIRPLKYTKPQAVKIKKK

SEQ ID NO: 164890 - protein, 79 aa, Unknown
  Bacterial polypetide isolated from the Sargasso Sea
MNDKYELLYEGKAKKVFSHDDKDKVIIEFKDDATAFNALKKAKFEGKGKLNCLISARIFELLIKNNIPTHFLELKNENT

SEQ ID NO: 164891 - protein, 77 aa, Unknown
  Bacterial polypetide isolated from the Sargasso Sea
MPEELLYEGKAKKLFITEDPQILRVEYKDDATAFNGKKFDRLRDKGRLNNAITVFFFEHLDTKDIPSHFVRKISETE

SEQ ID NO: 164892 - protein, 155 aa, Unknown
  Bacterial polypetide isolated from the Sargasso Sea
MKKGKKLYEGKAKIIYATTTKDLVIQYFKDDATAFNNQKKSTIEGKGVLNNRISEHILSSLSQIGIKNHLVKRLNMREQVVKLVEIIPIEFIVRNIATGSLTKRLGIEDGTVLKEPLIEYCLKDDKLGDPLIAEEHILAFDWASKKEIEKVKKMI

SEQ ID NO: 164893 - protein, 45 aa, Unknown
  Bacterial polypetide isolated from the Sargasso Sea
MKKGKKLYEGKAKIIYACAEKNLVIQHFKDDATAFNNQKKSVIEG

SEQ ID NO: 164894 - protein, 93 aa, Unknown
  Bacterial polypetide isolated from the Sargasso Sea
LADTKFEWGHDTEGQLMLVDEVLTPDSSRFWPAELACKGEVPESFDKQFVRDWLASSGWDRMSTPPPLPPEIVDGTRQKYLDVCQRLTGSLPC

SEQ ID NO: 164895 - protein, 134 aa, Unknown
  Bacterial polypetide isolated from the Sargasso Sea
MKKGKKLYEGKAKIIYSTSDKDLAIQYFKDDATAFNNVKRTTIEGKGVLNNRISEHILSNLSQIGIKNHLVKRLNMREQIIKFVEIIPIEFIIRNVATGSLTKRLGIEDGTVLKEPLIEYCLKDDKLGDPLISE

SEQ ID NO: 164896 - protein, 93 aa, Unknown
  Bacterial polypetide isolated from the Sargasso Sea
MKKNKIYEGKAKIMYKGPEPGTLIQHFKDDATANNNEKMEIFEGKGVINNRISEHLFKLLSSLDIPNHFIRRLNMREQLIHEVEIFPLEVVVR

SEQ ID NO: 164897 - protein, 63 aa, Unknown
  Bacterial polypetide isolated from the Sargasso Sea
EFGRLPDGTVILADEISPDNCRLWQVGTDERMDKDRFRRDLGGLIEAYQEIAHRLGLNVPQQG

SEQ ID NO: 164898 - protein, 52 aa, Unknown
  Bacterial polypetide isolated from the Sargasso Sea
MKKGKKLYEGKAKIIYATNDKNLVIQYFKDDATAFNNQKKTTIEGKGVLNNR

SEQ ID NO: 164899 - protein, 226 aa, Unknown
  Bacterial polypetide isolated from the Sargasso Sea
AFNNQKKATIDGKGILNNRISEYILSNLSQIGIKNHLVKRINMREQLVKFVEIIPIEFIVRNIATGSLTKRLGIEDGTMLNRPLIEYCLKKDELGDPLISREHILTFDWLNIIDLDWITEECKRINDFLQGMFRGVNIKLVDFKVEFGRSSIDNNIILADEISPDTCRLWDTKTERKLDKDIFRKNLGNLIDGYQEVARRLDILHEQTNIRPLKFTKPKAVKIKKK

SEQ ID NO: 164900 - protein, 158 aa, Unknown
  Bacterial polypetide isolated from the Sargasso Sea
RLGIEEGTVLERPLIEYCLKDDKLGDPIISREHILTFNWLNVMQLDWIDENLSRLNDFLLGMFRGVGIKLVDFKVEFGFTHESEKTKIILADEISPDTCRLWDTLTDKKLDKDRFRKDLGDLIPAYTEVAKRLGILHEQSNVSAVNVTQLSSVKRKKK

SEQ ID NO: 164901 - protein, 134 aa, Unknown
  Bacterial polypetide isolated from the Sargasso Sea
LGDPIISREHILNFKWLKLIELDLINEQCLRINDYLQGLFRGVGIKLVDFKVEFGKAKSDEAIILADEISPDTCRLWDQETDKKLDKDRFRKDLGNIVEAYQEVARRLGILHEQSNIRPIKFSKPTAVKIKKNK

SEQ ID NO: 164902 - protein, 71 aa, Unknown
  Bacterial polypetide isolated from the Sargasso Sea
MKKGKKLYEGKAKIIYACAEKNLVIQHFKDDATAFNNQKKSVIEGKGILNNRISEHILTCLSQAGIKNHLV

SEQ ID NO: 164903 - protein, 123 aa, Unknown
  Bacterial polypetide isolated from the Sargasso Sea
MKKGKKLYEGKAKIIYATSDKNLVIQHFKDDATAFNNQKKDVIEGKGILNNRISEHILTQLSNVGIKNHLVKRLNMREQLVKLVEIIPIEFIVRNIATGSLTKRLGIEDGTILDYPLVEYCLK

SEQ ID NO: 164904 - protein, 166 aa, Unknown
  Bacterial polypetide isolated from the Sargasso Sea
MKKGKKLYEGKAKIIFASNDKKYVIQHFKDDATAFNNQKKAVMDGKGILNNRISEHILTQLNNVGIKNHLVKRLNMREQLVQHVEIIPIEFIVRNIATGSLTKRLGIEDGTVLDNPLIEYCLKDDDLGDPLVSTEHILAFKWMEKDELNLINKELNRINDFLQGMV

SEQ ID NO: 164905 - protein, 66 aa, Unknown
  Bacterial polypetide isolated from the Sargasso Sea
FKLEFGYNSNGQIVLGDEISPDNCRLWDLNQKNGKIVSLDKDRFRNDLGGFIEAYSEINKRINNFI

SEQ ID NO: 164906 - protein, 73 aa, Unknown
  Bacterial polypetide isolated from the Sargasso Sea
KEIMLADEISPDTCRLWDVNSDKKLDKDRLEKGLGNLMEAYQEVARRLDILHEQSNIRPLKYTKPQAVKIKKK

SEQ ID NO: 164907 - protein, 97 aa, Unknown
  Bacterial polypetide isolated from the Sargasso Sea
MKNNPKIIYHSNIKSLKLINSGKVRDIYEVDDEHLLIVTSDRLSAFDVILPDPIPGKGYVLTEVSNFWFERFKNIIPNHITETKISDVINSEEELKI

SEQ ID NO: 164908 - protein, 109 aa, Unknown
  Bacterial polypetide isolated from the Sargasso Sea
EEVRRINDFLQGMFRGVGIKLVDFKVEFGRSEVDGKREVMLADEISPDTCRLWDMRTDKKLDKDRFRNDLGNLVEAYQEVAIRLNLLHEQSNIRPLNYPKPKAVKIKKK

SEQ ID NO: 164909 - protein, 132 aa, Unknown
  Bacterial polypetide isolated from the Sargasso Sea
IISKEHIITFSWATKKELEKIDNMLLRINDFMVGMFRGIGIKLVDFKVEFGRLKTGQKTEIILADEISPDTCRLWDSNTDKKLDKDRFRKNLGNLIPAYQEVAKRLGILHEEANVRHVNFSKPKSVKLKKNK

SEQ ID NO: 164910 - protein, 80 aa, Unknown
  Bacterial polypetide isolated from the Sargasso Sea
MKKGKKLYEGKAKIIYATQDKGLVIQYFKDDATAFNNQKKSTIEGKGVLNNRISEHILSNLSQIGIKNHLVKRLNMREQV

SEQ ID NO: 164911 - protein, 88 aa, Unknown
  Bacterial polypetide isolated from the Sargasso Sea
MKKGKKLYEGKAKIIYATSDKNLVIQYFKDDATAFNNQKKSTIEGKGVLNNRISEHILSNLNQIGIKNHLVKRLNMREQLVKLVDIIP

SEQ ID NO: 164912 - protein, 179 aa, Unknown
  Bacterial polypetide isolated from the Sargasso Sea
LVDIIPIEFIVRNIATGSLTKRLGIEDGTVLDYPLIEYCLKDDKLGDPNISREHILAFNWLNAIQLDLIDENLKRLNDFLLGLFRGVGIKLVDFKVEFGFTHDSGKNEIILADEISPDTCRLWDSITDKKLDKDRFRKDLGDLIPAYTEVAKRLGILHEQSNVSAVNVTKLSSIKKKSK

SEQ ID NO: 164913 - protein, 50 aa, Unknown
  Bacterial polypetide isolated from the Sargasso Sea
MSPDHGELLYEGKAKRIYATDHLDQVLVEYKNDATAFNAQKKAQLGDKGR

SEQ ID NO: 164914 - protein, 66 aa, Unknown
  Bacterial polypetide isolated from the Sargasso Sea
SFRSEGEKLIIADEISPDTCRLWDSKTKKRLDKDVFRLNEGSISIAYTEVADRFDLLPKNVRSAVR

SEQ ID NO: 164915 - protein, 120 aa, Unknown
  Bacterial polypetide isolated from the Sargasso Sea
MEIDELNLINKELNRINDFLQGMFRGVGIKLVDFKVEFGRYEKNGKKEIMLADEISPDTCRLWDVNSDKKLDKDRFRKGLGNLIEAYQEVARRLDILHEQSNIRPLKYTKPQAVKIKKKQ

SEQ ID NO: 164916 - protein, 171 aa, Unknown
  Bacterial polypetide isolated from the Sargasso Sea
EFVIRNIATGSLTKRLGIEEGTVLDYPLIEYCLKDDKLGDPIISREHILNFKWLSLIELDLINEQCLRINDYLQGLFRGIGIKLVDFKVEFGKTKSDETIILADEISPDTCRLWDQETDKKLDKDRFRKDLGNILEAYQEVARRLGILHEQSNIRPIKFSKPTAVKIKKSK

SEQ ID NO: 164917 - protein, 112 aa, Unknown
  Bacterial polypetide isolated from the Sargasso Sea
DLIDENLSRLNDFLLGMFRAVGIKLVDFKVEFGLTHESGKTQIILADEISPDTCRLWDSITDKKLDKDRFRKDLGDLIPAYTEVAKRLGILHEQSNVSAVNVTKLSSIKKKK

SEQ ID NO: 164918 - protein, 152 aa, Unknown
  Bacterial polypetide isolated from the Sargasso Sea
GTVLERPLIEYCLKDDKLGDPIISREHILTFNWLKGTQLDWIDENLSRLNDFLLGMFRGVGIKLVDFKVEFGLTHESEKNQIILADEISPDTCRLWDTVTDKKLDKDRFRKDLGDLIPAYTEVAKRLGILHEQSNVAAVNVTQLSSVKRKKK

SEQ ID NO: 164919 - protein, 234 aa, Unknown
  Bacterial polypetide isolated from the Sargasso Sea
MVKRRRIYEGREKVLYNGPEPGSLVLSFKDDVTSECGKREGTITGKGVLNNRISEFIMMRLHEIGIPTHFIRRLNMREQLIREVEIIPLEVMVRNAAAGQFAERFGIKSGTQMPRSIVEYYYKSTELEQPMVSEEHITAFGWAAPQDIDDMLALALRVNDFLSGLFLGAGLRLIDFRSEFGRLYEETGEMRVVLADEVSPDSCRIWDIESNEPLDSDRFELDLGRESEAYQEMP

SEQ ID NO: 164920 - protein, 119 aa, Unknown
  Bacterial polypetide isolated from the Sargasso Sea
MNKGKKLYEGKAKILYEGPEKGTAIQHFKDDATAFNNLKKATVEGKGVLNNRISEHIFNNLNQIGIKTHLIKRLNMREQLVRLVDVMPVEFIVRNIATGSLTKKLGIPDGTVLSKPLIE

SEQ ID NO: 164921 - protein, 149 aa, Unknown
  Bacterial polypetide isolated from the Sargasso Sea
MNKGKKLYEGKAKILYETKEKGLAIQHFKDDATAFNNQKKANVEGKGVLNNRISEHILQNLNQAGIKTHLVKRLNMREQLVKLVEIIPIEVIIRNIATGSLTKRLGIADGTILDKPLLEFSYKNDELGDPLVAKEHILAFNWATNDELQ

SEQ ID NO: 164922 - protein, 69 aa, Unknown
  Bacterial polypetide isolated from the Sargasso Sea
ADEISPDTCRLWDQKTDKKLDKDRFRKDLGNVVEAYQEVARRLGILHEHSNIRPIKFSKPTAVKIKKNK

SEQ ID NO: 164923 - protein, 64 aa, Unknown
  Bacterial polypetide isolated from the Sargasso Sea
MNNKYELIYEGKAKKVFTHDDADKVKIEFKDDATAFNALKKEKFEGKGKLNCLISARIFEILIK

SEQ ID NO: 164924 - protein, 103 aa, Unknown
  Bacterial polypetide isolated from the Sargasso Sea
MKKGKKLYEGKAKIVFATSDKNLVIQHFKDDATAFNNQKKDVIDGKGILNNRISEHILTNLNQVGIKNHLIKRLNMREQLVQHVEIIPVEFIIRNIATGSLTK

SEQ ID NO: 164925 - protein, 39 aa, Unknown
  Bacterial polypetide isolated from the Sargasso Sea
MNSKLKFIYEGKAKKIFAYEDSDKVIIEFKDDATAFNAL

SEQ ID NO: 164926 - protein, 161 aa, Unknown
  Bacterial polypetide isolated from the Sargasso Sea
MKKGKKLYEGKAKIIFASNDKKYVIQHFKDDATAFNNQKKAVMDGKGILNNRISEHILTQLNNVGIKNHLVKRLNMREQLVQHVEIIPIEFIVRNIATGSLTKRLGIEDGTVLDSPLIEYCLKDDDLGDPLVSTEHILAFKWMEIDELNLINKELNRINDF

SEQ ID NO: 164927 - protein, 175 aa, Unknown
  Bacterial polypetide isolated from the Sargasso Sea
MKKGKKLYEGKAKIIYATNDKNLVIQYFKDDATAFNNQKKTTIEGKGVLNNRISEHILSNLSEVGIKNHLVKRINMREQLVKLVDIIPIEFIVRNIATGSLTKRLGIEEGTILERPLIEYCLKDDKLGDPIISREHILTFNWLNVMQLDWIDENLSRLNDFLLGMFRGVGIKLVD

SEQ ID NO: 164928 - protein, 218 aa, Unknown
  Bacterial polypetide isolated from the Sargasso Sea
IDGKGILNNRISEHLLKSLSEVGIKNHLIKRLNMREQLVELVNIIPIEFVIRNIATGSLTKRLGIEEGTVLDYPLIEYCLKDDKLGDPIISREHILNFKWLNLLELDLINKLCLRINDYLQGLFRGIGIKLVDFKVEFGKTKSDETIILADEISPDTCRLWDQETEKKLDKDRFRKDLGNVVEAYQEVARRLGILHEQSNIRPIKFTKPTAVKIKKNK

SEQ ID NO: 164929 - protein, 67 aa, Unknown
  Bacterial polypetide isolated from the Sargasso Sea
MNKGNKLYEGKAKIIYETKDKNLVIQHFKDDATAFNNLKKAKVEGKGVLNNRISEYILNNLSQCGIK

SEQ ID NO: 164930 - protein, 63 aa, Unknown
  Bacterial polypetide isolated from the Sargasso Sea
MNKGKKLYEGKAKIVYETSDKNLVIQHFKDDATAFNNLKKAKVEGKGVINNRISEYIFTNLGQ

SEQ ID NO: 164931 - protein, 144 aa, Unknown
  Bacterial polypetide isolated from the Sargasso Sea
MKKGKKLYEGKAKIIYATNDKNLVIQYFKDDATAFNNQKKTTIEGKGVLNNRISEHILSNLSEVGIKNHLVKRINMREQLVKLVEIIPIEFIVRNIATGSLTKRLGIEEGTVLERPLIEYCLKDDKLGDPIINREHILTFNWLN

SEQ ID NO: 164932 - protein, 88 aa, Unknown
  Bacterial polypetide isolated from the Sargasso Sea
MNKGKKLYEGKAKIIYETKEKGLVIQHFKDDATAFNNQKKATVEGKGVLNNRISEHILQNLNQVGIKTHFIKRLNMREQLVKLVEIIP

SEQ ID NO: 164933 - protein, 63 aa, Unknown
  Bacterial polypetide isolated from the Sargasso Sea
GSLLLADEISPDTCRLWDVGVADRQGRILDKDRFRKDLGGVVEAYGEVLKRVQGLGPAPRQYR

SEQ ID NO: 164934 - protein, 214 aa, Unknown
  Bacterial polypetide isolated from the Sargasso Sea
MEFRDDTSAFDGKKTAALENKGKVNNQFNAFIMEFLSTKEINTHFIKLLSNNESLVRNLDMFPIECVVRNRATGSLCKRLGIEDGYILQTPLFEFFLKDDDLGDPLINDNHIISFGWATKEELGVMQSITLKVNEILVDFFSEANLLLIDFKLEFGKFKDQIMLGDEFTPDGCRLWDKDTLNKMDKDRFRQDLGNVIETYGEVADRLGMQIKLD

SEQ ID NO: 164935 - protein, 120 aa, Unknown
  Bacterial polypetide isolated from the Sargasso Sea
MNNKYVLIYEGKAKKVFTHDDEEKVRIEFKDDATAFNALKKEKFEGKGKLNCLISARIFEILIRNNIPTHFIELENENTMIAKKIKVIPLEIVLRNTAYGSLCKQTTIKPGTFLSKPLID

SEQ ID NO: 164936 - protein, 130 aa, Unknown
  Bacterial polypetide isolated from the Sargasso Sea
MKKGKKIYEGKAKIIYASNDKNLVIQHFKDDATAFNNQKKDIIEGKGILNNRISEHILTQLSNVGIKNHLVKRLNMREQLVKLVEIIPIEFIVRNIATGSLTKRLGIEDGTILDYPLVEFCLKMTNWVIH

SEQ ID NO: 164937 - protein, 144 aa, Unknown
  Bacterial polypetide isolated from the Sargasso Sea
MKKGKKLYEGKAKIIYATNDKSLVIQYFKDEATAFNNQKKTTIEGKGVLNNRISEHILSNLSQIGIENHLVKRLNMREQIIKLVEIIPIEFIVRNVATGSITKRLGIEDGSVLKEPLIEYCLKDDKLGDPLISEEHILVFDWAT

SEQ ID NO: 164938 - protein, 44 aa, Unknown
  Bacterial polypetide isolated from the Sargasso Sea
MARRAKIYEGKAKILYEGPEPGTIVQYFKDDATAFNAEKKEVIE

SEQ ID NO: 164939 - protein, 55 aa, Unknown
  Bacterial polypetide isolated from the Sargasso Sea
MKKGKKIYEGKAKIIFATNEKNTVIQHFKDDATAFNNQKKARIEGKGILNNRISE

SEQ ID NO: 164940 - protein, 233 aa, Unknown
  Bacterial polypetide isolated from the Sargasso Sea
MWFNKTKHIIDNHMVALSEDLAPTSSQFQNIPEEVSKRGMVVNRANRLDVECIVRGYLAGSAWGEYKSKGTIFGSKAPEGMKEGQKLETPIFTPTTKAEIGHDENITIEEMKGIFGEDLTNQLEKISIELYNYANDYSVSKGIILADTKFEFGMINDKLTIIDEVLTPDSSRFWDLSTFEEGSQPPNFDKQFVRDWLDTSGWNHEPPAPELPEEIVNKTIERYKLAFEMLTKA

SEQ ID NO: 164941 - protein, 161 aa, Unknown
  Bacterial polypetide isolated from the Sargasso Sea
LTKRLGIEDGTVLDNPLIEYCLKDDALGDPLISTEHILAFKWMETDELKIINKELNRINDFLQGMFRGVGIKLVDFKVEFGRYEKNGKKEIILADEISPDTCRLWDVNSDKKLDKDRFRKGLGNLIEAYQEVARRLDILHEQSNIRPLKYTKPQAVKIKKK

SEQ ID NO: 164942 - protein, 94 aa, Unknown
  Bacterial polypetide isolated from the Sargasso Sea
MKKGKKLYEGKAKIIYATNDKNLVIQYFKDDATAFNNQKKTTIEGKGVLNNRISEHILSNLSEVGIKNHLVKRINMREQLVKLVDIIPNRIYSK

SEQ ID NO: 164943 - protein, 174 aa, Unknown
  Bacterial polypetide isolated from the Sargasso Sea
PIEFIVRNIATGSLTKRLGIEDGTVLDYPLVEYCLKNDDLGDPLVSREHILAFKWMDVFELDFIYEEVRRINDFLQGMFRGVGIKLVDFKVEFGRFESDNKREIMLADEISPDTCRLWDMRTDKKLDKDRFRNNLGNLVEAYQEVAIRLNLLHEQSNIRPLTYPKPKEVKIRKK

SEQ ID NO: 164944 - protein, 119 aa, Unknown
  Bacterial polypetide isolated from the Sargasso Sea
ASKKEIEKIDKYLLRMNDFMIGMFRGIGIKLVDFKVEFGRYKNNGKTEIILADEISPDTCRLWDLSSDKKLDKDRFRKNLGNVMQGYQDVARRLGILHEESNIRTVKFPKPKAVKIKRK

SEQ ID NO: 164945 - protein, 75 aa, Unknown
  Bacterial polypetide isolated from the Sargasso Sea
VDFKIEIGRSFRSEYEKLIIADEISPDTCRLWDSKTKKRLDKDVFRMNEGSISIAYTEVADRFDLLPKNVKRAVQ

SEQ ID NO: 164946 - protein, 99 aa, Unknown
  Bacterial polypetide isolated from the Sargasso Sea
LADTKFEFGQLAGVEKPLLIDEIFTPDSSRFWPAADWEPGREQASFDKQIVRNYLETVVSSGDWDKTPPGPELPDDVVEKGIARYLEAYELLTGSSLSI

SEQ ID NO: 164947 - protein, 186 aa, Unknown
  Bacterial polypetide isolated from the Sargasso Sea
MREQLVKLVEIIPVEFIVRNIATGSLTKRLGIEDGTVLDYPLVEYCLKNDELGDPLVSREHILAFKWMDVFELDFIYEEVRRINDFLQGMFRGVGIKLVDFKVEFGRFEADGKREVMLADEISPDTCRLWDMRTDKKLDKDRFRNNLGNLVEAYQEVAIRLNILHEQSNIRPLTYPKPKAVKIKKK

SEQ ID NO: 164948 - protein, 100 aa, Unknown
  Bacterial polypetide isolated from the Sargasso Sea
MKKGKKLYEGKAKIIYATNDKNLVIQYFKDDATAFNNQKKTTIEGKGVLNNRISEHILSNLSQIGIKNHLVKRLNMREQIIKLVEIIPIEFIVRNVATGS

SEQ ID NO: 164949 - protein, 41 aa, Unknown
  Bacterial polypetide isolated from the Sargasso Sea
MKKGKKIYEGKAKIVFATENKNLVIQHFKDDATAFNNQKKT

SEQ ID NO: 164950 - protein, 136 aa, Unknown
  Bacterial polypetide isolated from the Sargasso Sea
DLGDPLISREHILAFKCMDVFELDFIYEEVRRINDFLQGMFRGVGIKLVDFKVEFGRFEADGKREIMLADEISPDTCRLWDMRTDKKLDKDRFRNNLGNLVEAYQEVAIRLNILHEQSNIRPLTYPKPKAVKIKKK

SEQ ID NO: 164951 - protein, 100 aa, Unknown
  Bacterial polypetide isolated from the Sargasso Sea
MKKGKKLYEGKAKIIFATSDKNIVIQHFKDDATAFNNQKKASIEGKGILNNRISEHILSSLSEVGIKNHLIKRLNMREQLVEMVNIIPIEFVIRNIATGS

SEQ ID NO: 164952 - protein, 100 aa, Unknown
  Bacterial polypetide isolated from the Sargasso Sea
MVCLGGINIKLVDFKVEFGRYKNNGKNEIILADEISPDTCRLWDAKSEKKLDKDRFRNNLGNLIEAYQDVARRLGILYEQANITPIKYMKPHSLKFKKTK

SEQ ID NO: 164953 - protein, 118 aa, Unknown
  Bacterial polypetide isolated from the Sargasso Sea
MDKGKKLYEGKAKIIYATKDKNHVIQHFKDDATAFNNLKKTTIEGKGILNNRISEHILSNLSQIGIKNHFVKRLNMREQLVNHVEIIPIEFVVRNIATGSLTKRLGIEDGTVLEKPLL

SEQ ID NO: 164954 - protein, 127 aa, Unknown
  Bacterial polypetide isolated from the Sargasso Sea
LDLMEWLKESTLSLYKEARDYALDRGIILADTKFEFGQLAGAEKPLLIDEIFTPDSSRFWPAADWEPGREQASFDKQIVRNYLETVVASGDWDKTPPGPELPDDVVEKGIARYLEAYELLTGSSLSI

SEQ ID NO: 164955 - protein, 146 aa, Unknown
  Bacterial polypetide isolated from the Sargasso Sea
MKKGKKLYEGKAKIIYASNDKNLVIQHFKDDATAFNNQKKDVIEGKGILNNRISEHILTQLSNVGIKNHLVKRLNMREQLVKLVEIIPIEFVVRNIATGSLTKRLGIEDGTVLDYPLVEYCLKNDDLGDPLVSREHILAFKWMDVF

SEQ ID NO: 164956 - protein, 80 aa, Unknown
  Bacterial polypetide isolated from the Sargasso Sea
MKKGKKLYEGKAKIIYATTDKDLVIQYFKDDATAFNNQKKSTIEGKGVLNNRISEHILTSLSQIGIKNHLVKRLNMREQV

SEQ ID NO: 164957 - protein, 186 aa, Unknown
  Bacterial polypetide isolated from the Sargasso Sea
MEKRDELYRGKAKTVYYTDDSEKLILHFRNDTSAFDGEKIEQLDRKGEVNNKFNHFIMNKLEDAGIATQVEALVSDTESLVKKLDMIPVECVVRNLSAGSLVRRLGVEEGQTLNPPIFEFFLKDDALHDPMVNDFHIISFGWATQSQISEMKALTFKVNNVLKALFDNAGMLLVDYKLEFGVDSDG

SEQ ID NO: 164958 - protein, 162 aa, Unknown
  Bacterial polypetide isolated from the Sargasso Sea
SLTKRLGIEDGTVLDYPLVEYCLKNDELGDPLISREHILAFKWMDVFELDFIYEEVRRINDFLQGMFRGVGIKLVDFKVEFGRSEIDGKRSIMLADEISPDTCRLWDMRTDKKLDKDRFRNNLGNLVEAYQEVAIRLDLLHEQSNVRPLSYPKPKAVKIKKK

SEQ ID NO: 164959 - protein, 54 aa, Unknown
  Bacterial polypetide isolated from the Sargasso Sea
MKKGKKIYEGKAKIIYATQEKNLVIQYFKDDATAFNNQKKSTIEGKGVLNNRIS

SEQ ID NO: 164960 - protein, 70 aa, Unknown
  Bacterial polypetide isolated from the Sargasso Sea
VLADEISPDTCRLWDVKTEKKLDKDRFRKDLGNIIQAYQEVARRFGIMPEETNISEVNFGKTIPIKFKKK

SEQ ID NO: 164961 - protein, 86 aa, Unknown
  Bacterial polypetide isolated from the Sargasso Sea
FKLNLALPMESEKTQIILADEISPDTCRLWDTLTDKKLDKDRFRKDLGDLIPAYTEVAKRLGILHEQSNVSAVNVTKLSSIKRKKK

SEQ ID NO: 164962 - protein, 177 aa, Unknown
  Bacterial polypetide isolated from the Sargasso Sea
MKKGKKLYEGKAKIIYETSDKDLVIQYFKDDATAFNNQKKSIIEGKGVLNNRISEHILSSLSQIGIKNHLVKRLNMREQVVKLVEIIPIEFIVRNVASGSLTKRLGIEDGTILKEPLIEYCLKDDKLGDPLIAEEHIIAFEWASKKEIEKVKKMILRINDFMIGMFRGVGIKLIDFK

SEQ ID NO: 164963 - protein, 119 aa, Unknown
  Bacterial polypetide isolated from the Sargasso Sea
FLKDDDLGDPLINDNHIISFGWANREDLSVMQSMTLKVNELLVDFFAKANLLLIDFKLEFGKHDGKIILGDEFTPDGCRLWDKDTLTKMDKDRFRQDLGDVIETYGEVADRLGMQIKLD

SEQ ID NO: 164964 - protein, 81 aa, Unknown
  Bacterial polypetide isolated from the Sargasso Sea
MKKGKKLYEGKAKIIFATNDKNVVIQHFKDDATAFNNQKKASIEGKGILNNRISEHILSLLSEIGIKNHLIKRLNMREQLV

SEQ ID NO: 164965 - protein, 152 aa, Unknown
  Bacterial polypetide isolated from the Sargasso Sea
MKKGKKLYEGKAKIIFASNDKKYVIQHFKDDATAFNNQKKAVMDGKGILNNRISEHILTQLNNVGIKNHLVKRLNMREQLVQHVEIIPIEFIVRNIATGSLTKRLGIEDGTVLDSPLIEYCLKDDDLGDPLVSTEHILAFKRMEKDELNLIN

SEQ ID NO: 164966 - protein, 284 aa, Unknown
  Bacterial polypetide isolated from the Sargasso Sea
MTTGQENQLKGFDLIHKGKVRDIYRYKSNEILIITSDRISAFDFIFNDEIDGKGKILTSLTKYWFRQTKDIIKNHLIDEIPKLESQLLDRAMLAREARVIPYEAVVRGYLTGSAWNEYKSNQTIGGVNVKSGYKEFDALVNPAFTPTTKAKVGDKDKPVTFKQMENNLGKDLAGQIREYSIKLFEFARNSYEKKGVILVDTKFEFGLDADNKLMLVDEIFTPDCSRFWMKDDVDNKVYNPYDKQIFRNYLLEINWDNEQMNLSEDIKNKLIDSYEKIYNKIANV

SEQ ID NO: 164967 - protein, 152 aa, Unknown
  Bacterial polypetide isolated from the Sargasso Sea
MPEPIFTPAAKAEMGHHDENITYNEMERRIGTELSATIRDISIKLYKEAADYAATRGIIIADTKFEFGLDNHGQLYLMDEALTADSSRFWPADQYQVGTNPPSFDKQFVRDWLETQPWKKEPPAPKLPDDVVTKTGEKYQEALERLTGHKLA

SEQ ID NO: 164968 - protein, 71 aa, Unknown
  Bacterial polypetide isolated from the Sargasso Sea
MKTNGKQEIILADEISPDTCRLWDVNSDKKLDKDRFRKGLGNLIEAYQEVARRLNILHEQSNIRPLKYTKP

SEQ ID NO: 164969 - protein, 43 aa, Unknown
  Bacterial polypetide isolated from the Sargasso Sea
MKKGKKLYEGKAKIIYACAEKNLVIQHFKDDATAFNNQKKSVI

SEQ ID NO: 164970 - protein, 74 aa, Unknown
  Bacterial polypetide isolated from the Sargasso Sea
MFAAGGLLLVDFKLEFGRQDGKMYLGDEMTPDGCRVWDAETRKKLDKDRFRQGLGDVIESYQEIASRIGVSLEN

SEQ ID NO: 164971 - protein, 71 aa, Unknown
  Bacterial polypetide isolated from the Sargasso Sea
IVLADEISPDTCRLWDIKSERKLDKDRFRKDLGNIIQAYQEVARRLGIMPEETNISEVKFGKPKSVDIKKK

SEQ ID NO: 164972 - protein, 163 aa, Unknown
  Bacterial polypetide isolated from the Sargasso Sea
MKKGKKLYEGKAKIIYAGPEEGTAIQHFKDEATAFNNLKKSTIEGKGILNNRISEHILSNLNQVGIETHLIKRINMREQLIKLVEIIPIEFVVRNIAAGSLSKRLGIEEGTVLKDPLLEFYYKKDELGDPLISREHIFAFEYCNVMSLDFISSQCLRINIFTG

SEQ ID NO: 164973 - protein, 239 aa, Unknown
  Bacterial polypetide isolated from the Sargasso Sea
MEKIKQITSGKAKSLYTTNDGNFLVMEFRDDTSAFDGKKTAALENKGKVNNQFNAFIMEYLATQNIDTHFVKLLSNTESLVKNLEMFPIECVVRNRATGSLCKRLGIEDGLILETPLFEFFLKDDDLGDPLINDNHIISFGWANREDLSVMQSMTLKVNELLVDFFAKANLLLIDFKLEFGKHDGKIVLGDEFTPDGCRLWDKDTLTKMDKDRFRQDLGDVIETYGEVADRLGMQIKLD

SEQ ID NO: 164974 - protein, 103 aa, Unknown
  Bacterial polypetide isolated from the Sargasso Sea
KRINDFLQGLFRGVGIRLVDFKVEFGKTSNDEIILADEISPDTCRLWDEKTERKLDKDIFRKDLGSLVEGYQEVARRLNILHEQSNIKPISFPKPKEVKIKKK

SEQ ID NO: 164975 - protein, 164 aa, Unknown
  Bacterial polypetide isolated from the Sargasso Sea
MKKGKKLYEGKAKIIYASNDKNLVIQHFKDDATAFNNQKKDVIEGKGILNNRISEHILTQLSNVGIKNHLVKRLNMREQLVKLVEIIPIEFVVRNIATGSLTKRLGIEDGTVLDYPLVEYCLKNDDLGDPLVSREHILAFKWMDVFELDFIYEEVRRINDFLQG

SEQ ID NO: 164976 - protein, 196 aa, Unknown
  Bacterial polypetide isolated from the Sargasso Sea
MKKGKKIYEGKAKIVFATSDKNLVIQHFKDDATAFNNQKKDVIDGKGILNNRISEHILTNLNQVGIKNHLIKRLNMREQLVQHVEIIPIEFIVRNIATGSLTKRLGIEDGTVLEYPLVEYCLKNDELGDPLISKEHILAFKWMDDFEIDFVNNELARINDFLQGMFRGVGIKLVDFKVEFGRLEKNGKKDIILADE

SEQ ID NO: 164977 - protein, 166 aa, Unknown
  Bacterial polypetide isolated from the Sargasso Sea
MNNKYELIYEGKAKKIFSHDDADKVRIEFKDDATAFNALKKEKFEGKGKLNCLISARIFEILIKENIPTHFIQLENENTMIAKKIKVIPLEIVLRNTAYGSLCKQTTIKPGTFLSKPLIDIYLKNDELNDPLITKDRIKLMNIINSDDLELVINLTLKVNEILKSS

SEQ ID NO: 164978 - protein, 86 aa, Unknown
  Bacterial polypetide isolated from the Sargasso Sea
MTRRRQLYEGKAKVIFEGPEPETVVAYFKDDATAFNNQKKGMITGKGVINNSISEFMMSKLSEIGISTHFIKRLNMREQLLHKVEI

SEQ ID NO: 164979 - protein, 151 aa, Unknown
  Bacterial polypetide isolated from the Sargasso Sea
MQSTELKNLELVAKGKVRDIYAVDSDHLLIVTTDRMSAFDVVLPNPIPGKGEVLTQLSEFWFEKTQSIVSNHMTDDLELVDLLDSPDQLDYFSKRSMIVKRLNPLPIEAVVRGYLIGSGWKDYQATGSVCGIQLEKGLQMAQKLPVTLPDR

SEQ ID NO: 164980 - protein, 79 aa, Unknown
  Bacterial polypetide isolated from the Sargasso Sea
MKKGKKLYEGKAKIIYASTEKNLVIQHFKDDATAFNNQKKAVIDGKGILNNRISEYILSSLNEIGIKNHLVKRINMREQ

SEQ ID NO: 164981 - protein, 139 aa, Unknown
  Bacterial polypetide isolated from the Sargasso Sea
KNDDLGDPLVSREHILAFKWMDVFELDFIYEEVRRINDFLQGMFRGVGIKLVDFKVEFGRFEANGKREIMLADEISPDTCRLWDMRTDKKLDKDRFRNNLGNLVEAYQEVAIRLNILHERSNIRPLTYPKPKAVKIKKK

SEQ ID NO: 164982 - protein, 202 aa, Unknown
  Bacterial polypetide isolated from the Sargasso Sea
MKKGKKLYEGKAKIIFASNDKKYVIQHFKDDATAFNNQKKAVMDGKGILNNRISEHILTQLNNVGIKNHLVKRLNMREQLVQHVEIIPIEFIVRNIATGSLTKRLGIEDGTVLDNPLIEYCLKDDDLGDPLVSTEHILNFKWMEKDELNLINKELNRINDFLQGMFRGVGIKLVDFKVEFGRYENKWKTRDHTCGRNKPRHL

SEQ ID NO: 164983 - protein, 158 aa, Unknown
  Bacterial polypetide isolated from the Sargasso Sea
KKSGYRRGYSFGLSFDGICLKNDELGDPIVSREHILNFNWLSNIELDLINEQCFRINDFLQGMFRGVGIKLVDFKVEFGKAKSDGKIILADEISPDSCRLWDQETDKKLDKDRFRKDLGDLVEAYQEVAKRLGILHEQTNIRPIKFPKPTAVKIKKNK

SEQ ID NO: 164984 - protein, 73 aa, Unknown
  Bacterial polypetide isolated from the Sargasso Sea
MANRKKLYEGKAKILYKGPRPGTLVQYFKDDATAFNNEKRGVITGKGVLNNTISEYMMTRLTEIGITTHFIER

SEQ ID NO: 164985 - protein, 88 aa, Unknown
  Bacterial polypetide isolated from the Sargasso Sea
MKKGKKLYEGKAKIIYASPQKNLLIQHFKDDATAFNNQKKASIEGKGILNNRISEYILSNLNQVGIKNHLVKRINMREQLVKSVEIFL

SEQ ID NO: 164986 - protein, 53 aa, Unknown
  Bacterial polypetide isolated from the Sargasso Sea
MPEELLYEGKAKKLFITEDPQILRVEYKDDATAFNGKKFDRLRDKGRLNNAIT

SEQ ID NO: 164987 - protein, 146 aa, Unknown
  Bacterial polypetide isolated from the Sargasso Sea
MKKGKKLYEGKAKIIYASNDKNLVIQHFKDDATAFNNQKKDVIEGKGILNNRISEHILTQLSNVGIKNHLVKRLNMREQLVKLVEIIPIEFVVRNIATGSLTKRLGIEDGTVLDYPLIEYCLKNDDLGDPLVSREHILAFKWMDVF

SEQ ID NO: 164988 - protein, 108 aa, Unknown
  Bacterial polypetide isolated from the Sargasso Sea
MNKGKKLYEGKAKILYETKEKGLAIQHFKDDATAFNNQKKANVEGKGVLNNRISEHILQNLNQSGIKTHLIKRLNMREQLVKLVEIIPIEVIIRNIATGSLTRRLGIA

SEQ ID NO: 164989 - protein, 222 aa, Unknown
  Bacterial polypetide isolated from the Sargasso Sea
KKANIDGKGILNNRISEHLLKSLSEIGIKNHLIKRLNMREQLVELVNIIPIEFVIRNIATGSLTKRLGIEEGTVLDYPLIEYCLKDDKLGDPIISREHILNFKWLNVIELDLINDQCLRINDYLQGLFRGIGIKLVDFKVEFGKTKSDEIIILADEISPDTCRLWDQETDKKLDKDRFRKDLGNVVEAYQEVARRLGILHEQSNIRPIKFSKPTAVKIKKSK

SEQ ID NO: 164990 - protein, 290 aa, Unknown
  Bacterial polypetide isolated from the Sargasso Sea
MFQSYIPHLKLLGRGKVRDIYEADDQHLLIVATDRLSAYDVIMPNPIPGKGEILTSLSNFWFDMMSDLVPNHLTKLNINSYISDKREIKILEKRSIIVKKLKPLPIESVVRGYLIGSGWRDYEKNSAICGIKLPKNLNQAQKLPEIIYTPATKAAAGDHDINIDYEMTESLIGKELAKRVKEISIDIYKRAFDYAISRGIIIADTKFEFGLDDEENLYLIDEILTPDSSRFWPKDSYKVGVSPPSYDKQYLRDYLDTLSWEKVAPGPDLPDEIIQNTYQKYLESKQILAH

SEQ ID NO: 164991 - protein, 179 aa, Unknown
  Bacterial polypetide isolated from the Sargasso Sea
LVEIIPIEFVVRNIATGFLTKRLGIEDGTVLDYPLVEYCLKNDELGDPLVSREHILAFKWMDVFELDFIYEEVRRINDFLQGMFRGVGIKLVDFKVEFGRSEVDGKREVMLADEISPDTCRLWDMRTDKKLDKDRFRNDLGNLVEAYQEVAIRLNLLHEQSNIRPLNYPKPKAVKIKKK

SEQ ID NO: 164992 - protein, 97 aa, Unknown
  Bacterial polypetide isolated from the Sargasso Sea
MKKGKKLYEGKAKIIYATNDKNLVIQYFKDDATAFNNQKKSIIEGKGVLNNRISEHVLSNLSQIGIKNHLVKRLNMREQIIKLVEIIPIEFIIRNVA

SEQ ID NO: 164993 - protein, 63 aa, Unknown
  Bacterial polypetide isolated from the Sargasso Sea
MKKGKKLYEGKAKIIYATSDKNLVIQYFKDDATAFNNQKKTTIEGKGVFNNRISDHILSNLSQ

SEQ ID NO: 164994 - protein, 160 aa, Unknown
  Bacterial polypetide isolated from the Sargasso Sea
PQGILEAQRFEKPIFTPSTKASEGHDEPLSSNAGKKLIGDKLYEQLEEISIDLYIKAHDFCENKGIILADTKFEFGIIDNEIILIDEVLTPDSSRFWKKDDYSEGNSPNPYDKQFLRDWLNQQDWNKTPPPPSIPNEVINNTLGRYLEIYELLTNDKLNI

SEQ ID NO: 164995 - protein, 171 aa, Unknown
  Bacterial polypetide isolated from the Sargasso Sea
EFVIRNIATGSLTKRIGIEEGTVLDYPLIEYCLKNDELGDPIVSREHILNFNWLKSIELDFINEQCLRINDFLQGMFKGVGIKLVDFKVEFGITKSDGKIILADEISPDSCRLWDQETDKKLDKDRFRKDLGDLVEAYQEVAKRLGILHEQTNIRPIKFPKPTAVKIKKNK

SEQ ID NO: 164996 - protein, 223 aa, Unknown
  Bacterial polypetide isolated from the Sargasso Sea
NKKANYRISNPRYYATHSLFNLHYKNLDNTRATIKNINLKLIGEHNVLNASAAAAVCINLGVKTDIIKKALKNFTGVQRRMTKVLKKNENEFFDDYAHHPTEISSILEGVRKVYNNRKIISVFEPHRYSRVMSLKLDFSKAFIKSDLVLICPIYAAGEKRNLKFNLINFAKLISKNSNTQVVIVKNQKELSNYFKRNLINNEIIIGMGAGSISKWMRELKFSL

SEQ ID NO: 164997 - protein, 116 aa, Unknown
  Bacterial polypetide isolated from the Sargasso Sea
FGTNTRLGKGEWIIVEADESDGTFLKLDPYISVVTNIDKEHLEYYGNYNELKKSFRRFISNIPFYGFAVVCIDDPSIKSLVQIIKNTNIITYGTDKKSNIRAFNIRYKKEKTFFDI

SEQ ID NO: 164998 - protein, 205 aa, Unknown
  Bacterial polypetide isolated from the Sargasso Sea
FDLNIKLPNKKNQIIKKFKIPLLGNHNIKNSVAAAALALTVGLSINNIKKGLKNFKGVQRRFNKIFNFNNVDFYDDYAHHPTEIKEVLDGVKNVYRDYEKICIFQPHRISRLKDLKKEFTFAFKNADRVILFPIYTAGEKLRLGFNYINFAKEIIKNSKVQLFLVDDKLQLAKFIKANIYGKKIVIGMGAGTISSWMRELPKLLS

SEQ ID NO: 164999 - protein, 321 aa, Unknown
  Bacterial polypetide isolated from the Sargasso Sea
MKGMGFKIQGSDISPNKNIERLKKNNVKVIIGHNKKNINKATIIVISSAIKKNNPEVLFAKKKNLPIYKRGDMLGHITSLTKNITVVGSHGKTTTTSLISGIFSKTKLDPTIINGGVINSLDNSARLGKSEWSILELDESDGSFIKVLPTYSIITNIDREHMDYYKSMDNLFKLFKEFIGKVPSFGKSFICLDDKNNKKLIDKIKFKNFYTYGINKKSQFQIKNIYQSKSYSKFDLNIQLQSKKNTLIKNIKIPLIGLHNIRNATAAVAVSWIIGISKDIIKKGLNEFKGVHRRFNKIFEFMGVKFFDDYAHHPSEIKEVL

SEQ ID NO: 165000 - protein, 168 aa, Unknown
  Bacterial polypetide isolated from the Sargasso Sea
MKIHILGICGTFMGGLARILIESGHKVTGSDNNFYPPMSDQLRELDVELTKGFEPSSMPEADLYVIGNALSRGNKCVEEILNKNLPYKSGPEMLGDIIKDRFVIAVSGTHGKTTTSFMIAKIFQSLGKDIGYLIGGISPDFSFSAKIGSDEIFIIEADEYDSAFFDKR

SEQ ID NO: 165001 - protein, 168 aa, Unknown
  Bacterial polypetide isolated from the Sargasso Sea
LAFTIGLPEKYIKLGLYNFKGVQRRFSHLFNHNKISFYDDYAHHPTEISSVLSGVKNVHKNKEIVCVFQPHRVSRVKNLKKEFSKCFKKADTVLLCPIYTANEKLKLNFTYHAFAKLIIKNSNVKLIQVNNESQLRSFIRQNAFGKKIYIGMGAGSISNWMKNLKNIF

SEQ ID NO: 165002 - protein, 81 aa, Unknown
  Bacterial polypetide isolated from the Sargasso Sea
MNLLKKIKHIHFVGIGGAGMIGIARILLKKGFKISGSDIAHNNDLRKLSLRGAKIFIGHDEKNVNGANLLVVSSAINNKNV

SEQ ID NO: 165003 - protein, 137 aa, Unknown
  Bacterial polypetide isolated from the Sargasso Sea
MKIHILGICGTFMGGLARILIESGHKVTGSDNNFYPPMSDQLRELDVELTKGFEPSSMPEADLYVIGNALSRGNKCVEEILNKNLPYKSGPEMLGDIIKDRFVIAVSGTHGKTTTSFMIAKIFQSLGKDIGYLIGGI

SEQ ID NO: 165004 - protein, 321 aa, Unknown
  Bacterial polypetide isolated from the Sargasso Sea
MLQNQGIDLINGYELKDLPKADCYVIGNALSRGNPLVEEILRRNYNFISGPEWILQNILTEKKVIAVSGTHGKTTTTSMIAWILEDLGFKPGYLIAGKPKNFDASSSLGSGDIFVIEADEYDTAFFDKRAKFIHYRPEVLVINNLEFDHADIYKDLEQIKVQFHHLVRTMSSDSTVITPMNEEAIDEVLSMGLWSNLIQYGYGNDSKYSYKNLNEDFSKLQFSINGSEGSLEWDQFGEYNAMNAMSAVISLEHFGINIADSINALKRFKGVARRQEILLDTENLVIIDDFAHHPTAIKQTLEGLRNRYPNKKIISLIELRS

SEQ ID NO: 165005 - protein, 253 aa, Unknown
  Bacterial polypetide isolated from the Sargasso Sea
LGHSKKNIQSVTAVVFSSAIKKNNPEIKAAVSKKIPILSRADMLAELMKNKKSIAIAGSHGKTTTTSMIGNILNQSNLDPTIVNGGIINSLSKNNKYGKGEWMVVEADESDGSFLKLPHQISIITNLDIEHLDFYKSRDNLIKSFENFVNMLPFYGTAIICFDDKNLKSIIKKNKTRNIITYSIKNKKADVFIYDIIKKTTKTSFKLNINNNKITHNNNYKFILTAIGNHNVLNATASIIASKLVGVNKYFNK

SEQ ID NO: 165006 - protein, 51 aa, Unknown
  Bacterial polypetide isolated from the Sargasso Sea
MGLTNILINRALNNYIGVKRRFSYLGKKNKAFIYDDYAHHPTEISATLDAA

SEQ ID NO: 165007 - protein, 88 aa, Unknown
  Bacterial polypetide isolated from the Sargasso Sea
MNKIKINLNQKIHFVGIGGIGMSGLAQIMKNMGFKIQGSDMASSKNVERCRKIGIKVFRSHKRENIYNTSILVKSSAIKSNNPEIKAA

SEQ ID NO: 165008 - protein, 228 aa, Unknown
  Bacterial polypetide isolated from the Sargasso Sea
SAIKKNNSEYIEARRKKLPIITRGRMLAHIVSLMKNIVVVGSHGKTTTTSLITSILQKTKLDPTIINGGVINSIKNTAKLGKSDWTVLEADESDGSFLHIPPTYSIITNIDREHMDFYKSMDDLEKYFIDFIKKVPSFGKSFICLDDPVNNKIIKKLRNRNFYTYGLNPKSNFFIKNINQNKNFTEFDILVNVPNKKKIKIKKIRIPLLGIHNVRNYVAATAVAITIG

SEQ ID NO: 165009 - protein, 48 aa, Unknown
  Bacterial polypetide isolated from the Sargasso Sea
MKIELAKNEIIHFIGIGGIGMSGLSLVMKGKGFKVQGSDLSLNKNIER

SEQ ID NO: 165010 - protein, 54 aa, Unknown
  Bacterial polypetide isolated from the Sargasso Sea
MSELPLSIGTLHFTGIGGIGMSGIAEILFELGYQVQGSDSSENANVRRLREKGI

SEQ ID NO: 165011 - protein, 302 aa, Unknown
  Bacterial polypetide isolated from the Sargasso Sea
TTSCIKAGIKVYIGHSKKNVKSSTIIVRSSAIKNDNSEIKFAREKKIPIYSRAEVLADVVSLKKNIIITGSHGKTTTTSLVSKILSDQKLDPTIINGGVINSLNSNAKLGKGEWAILEADESDGSFLKLPINYSIVTNIDYEHIDFYKNYQNLEKSFIKFIEKTPPTGKAIICIDSKKIKKIFSKIKNKNILTYGEDKKANYKISNIRYKVDYSSFDLIYKDLKKNYKKIKNIQLKLLGKHNVLNAAAAVTVCLNLGVNQNIIKKSLKKFSGVQRRMTKIFTKNKNDFYDDYAHPPDRNKLN

SEQ ID NO: 165012 - protein, 308 aa, Unknown
  Bacterial polypetide isolated from the Sargasso Sea
MKQHIYFLGIGGTLMGSLAQLAKSQGYQVSGSDNQIYPPMSDLLADAKIEVFNHFDPAQLTPTPDQIVIGNASQARGNPAIEYILDQGLDYVSGAEWLGSQILRDKWVIAVSGTHGKTTTASMLAWILEKAGLEPGFLIGGSPANFNCSARLGKSPFFVVEADEYDTSFFDRRSKFVHYRPKTLVINNLEYDHADIFPSIKEIQNQFHLLIRSIPSDGLIITPADDQTIQETLDMGCWTPHQTIQTMSGETESDQVTKSCDWASHGEATNFQVFEKGKLAGQVRWSLFGEHNRCNGLSAIAAASHVGV

SEQ ID NO: 165013 - protein, 295 aa, Unknown
  Bacterial polypetide isolated from the Sargasso Sea
RLEKKVVSGPDWLYQNILSNKKVIAVSGTHGKTTVTSMIAHTLINNNFDPNYLIAGIPKKLEKSWNISNDEVFVIEADEYDTCYFDKRPKFFHYRPNILLINNIEFDHADIYENIEMIEKNFFELIKTMPSKSKVLINEKKVSKSFRNKLNKEKLKTTLQFLSLNTSNIHEENKLLAAHAIEDLISKEKVLNGLKDYSGVKRRFETIFNNKNFKLIDDFAHHPTAIEETIKMIREQTDSLTLIVELGSNSMKRGVHDKRLVDIFKNQETYTINASAEQEKIFSVHAKELTNDDIC

SEQ ID NO: 165014 - protein, 285 aa, Unknown
  Bacterial polypetide isolated from the Sargasso Sea
INCYPPISDQLDEMGIDVIPNYDVDQLKLSPDLIVIGNVMTRDTEIIEYILNHGLTYTSGPEWLGKNILANRRVISVAGTHGKTTTSSIIASALKELGEDPGYLIGGVPINFEASASLGSSPYFVIEADEYDTAFFDKRSKFIHYPAETFIINNLEFDHADIFKDLDQIKWHFHQLIRSLPSKTEVRVPINDDNISDLLDMGNWSSTKSFGMSNEADYSIISNDENLHIKEGDVLHGNLSPKLFGKHNFMNIISAFSALRSIGFEGDKILDAINQFNGVKRKLQQ

SEQ ID NO: 165015 - protein, 270 aa, Unknown
  Bacterial polypetide isolated from the Sargasso Sea
LAEFLCKNYTITGSDLSNNEISTKLKKKGIKVYEHQLAENITNQNLVIYTSAIKKNNPELVEAKKRGIKCITRGKALGEFTRNDKNICITGTHGKSTTTNYLAQILLNCEKKPSVFLGAINTKLKTNFIYNRSSLNVIEADESDNSFNFLNSMYSVITNIDFDHMDFYKTKKNLYFAFENFIKKTTNKVIVNIDCPNIKKIITKNPNKRIVRFSNIDKNIEFYFEIINRKKSTEIILYKKKNILGLFKFQRISQYNCYNVVSSIVTAIEM

SEQ ID NO: 165016 - protein, 177 aa, Unknown
  Bacterial polypetide isolated from the Sargasso Sea
IKNAASAVAVSFSIGISDNLIKKGLSEYTGVQRRFNYLFEHNRSIFVDDYAHHPTEIRSVLDGVRKVYNKKEIICVFQPHRISRVKNLKLEFSKCFKKADTVLLCPIYKANENINLGFSYNSFAKLIIKNSKVKLINIENELNLRKFLKQTAYGQKIYIGMGAGSISNWMKNLKNNI

SEQ ID NO: 165017 - protein, 126 aa, Unknown
  Bacterial polypetide isolated from the Sargasso Sea
MKIKSKIHFIGISGIGMSGIAELMLDKGYLIQGSDISINDNTKRLKKKGIKFFLGHNKKNIKYAHAVVYSSAIKKNNPEIREAYIKKIPVLSRADMLSELMKNKKSIAIAGSHGKTTTTSLVGNHF

SEQ ID NO: 165018 - protein, 54 aa, Unknown
  Bacterial polypetide isolated from the Sargasso Sea
MKKINLGQKDVIHFVGIGGIGMSGLAQIMKNMGFKIQGSDQTKNKNTISCSKAG

SEQ ID NO: 165019 - protein, 148 aa, Unknown
  Bacterial polypetide isolated from the Sargasso Sea
GVQRRFNKIFSYNNIDFYDDYAHHPTEIKFVLDGVDKVYKKYEKVCIFQPHRVSRLKDLRKEFSFAFKKANTVILCPVYTAGEKMQLGFDYLNFAKDIIKNSKVKLFLVNDNYQLAKFLKNNMYGNKIVIGMGAGTISNWIRKLPDLM

SEQ ID NO: 165020 - protein, 123 aa, Unknown
  Bacterial polypetide isolated from the Sargasso Sea
MIGIGGSGMMGIAELLHNLGFKVRGSDIQENNAIKRLREMKIKVFIGHDSKNIDLRDIIVFSNAIQKNNIELKFSRQNSLTVLSRMEILAELMRLKYGISITGSHGKTTTTSLLSHIMYKNKT

SEQ ID NO: 165021 - protein, 238 aa, Unknown
  Bacterial polypetide isolated from the Sargasso Sea
MHIHILGICGTFMGSLAVLAKESGHHVTGSDINCYPPISDQLDEMGIDVIPNYDVDQLKLSPDLIVIGNVMTRDTEIIEYILNHGLTYTSGPEWLGKNILANRSVISVAGTHGKTTTSSIIASALKELGEDPGYLIGGVPINFEASASLGSSPYFVIEADEYDTAFFDKRSKFIHYPAETFVINNLEFDHADIFKDLDQIKWHFHQLIRSLPSKTELRVPMNDDNISDLLGMGNWSST

SEQ ID NO: 165022 - protein, 81 aa, Unknown
  Bacterial polypetide isolated from the Sargasso Sea
MKLFKKTKNIHFVGIGGAGMIGIAKVLLQKGYKISGSDISDSQELKKLRNDGAKVYIGHSEKNISGSDLLVMSSAIDKKNP

SEQ ID NO: 165023 - protein, 269 aa, Unknown
  Bacterial polypetide isolated from the Sargasso Sea
DPMKTVLEKSNIKYQEGYNQKILNKKFDLIIVGNVMSRGMPIIEKLIESKIKYISGPQWLYENVLYNKFVIAISGTHGKTTTSSLVAWILKYAKLNPSYLIGGQPMNFSSPAKLTNSKYFVIEADEYDTSFFDKRSKYIHYKPNILIINNIEFDHADIFEDINAIVKNFHHLIRIIPKNGTIIYNHDDKNIQDLIEKGLWSKQKSLTMGKSKNNSMWSLKNVGDKYLLSKGHKKSNIETSLLGLHNYKNISQAILAALEIKLTMSKNVL

SEQ ID NO: 165024 - protein, 199 aa, Unknown
  Bacterial polypetide isolated from the Sargasso Sea
DILKNIKRRVITFGLNKKSDITISEINYFFDYVDFKVYIKDTNKKHKFRLSLQGKYNIYNAVAAIAVAIEEGISIQTIRAALKSFSGVERRLERFKLIIKNKQVTHIDDYGHHPKEIEQVIVSLRRHFKKKKVLMIFQPHRFSRTKMLLKDFISTLSKVDKVFLLPIYSASEKEIKGVSSKNMAQKLNTINGKDFCSLV

SEQ ID NO: 165025 - protein, 112 aa, Unknown
  Bacterial polypetide isolated from the Sargasso Sea
MKIELAKKEIIHFIGIGGIGMSGLSLIMKGKGFKVQGSDISNNKNIERLKKEKIKIFFGHYKKNLKKVTIVVISSAIKKNNPELIEAKKKRIPIIKRGKMLASIVSLMKNMS

SEQ ID NO: 165026 - protein, 109 aa, Unknown
  Bacterial polypetide isolated from the Sargasso Sea
MKFFKKVKHIHFVGIGGAGMIGIAKVLLKKGYKISGSDISDSRELRKLEKHGAKVFIGHSSKNIKGADLLVISSAISSRNPELVQAKKDSITSIPRAEMLGSIMIGYES

SEQ ID NO: 165027 - protein, 247 aa, Unknown
  Bacterial polypetide isolated from the Sargasso Sea
ETKLDPTVINGGVLKSLSNSARLGKSDWCILESDESDGSFLNLPPTYSIVTNIDNEHLDYYKSYRNLENHFLNFIKKTPSFGKCFICLDDENIKKIITKLKNKNFLTYGINNKSNFKLINVSQGEKFSVFDLVVKLPNKKKKILKNISIPLIGIHNLLNATAAIAVSYYIGIPFLKIHDGLKNYKGVERRFNKILKFRNSQIFDDYAHHPTEIKKVLEGVKKVYLNKKLICIFQPHRVSRFNSLYKD

SEQ ID NO: 165028 - protein, 115 aa, Unknown
  Bacterial polypetide isolated from the Sargasso Sea
QPHRYSRLKDLFEDFCTCFNDADTVIVADVYPAGEIPINGINRDNLINGLRSHGHRDVLPLKDGESLSSLIKEIATDGDIVICLGAGNITSWANNLPHELSANSGANNLTNEANP

SEQ ID NO: 165029 - protein, 219 aa, Unknown
  Bacterial polypetide isolated from the Sargasso Sea
FLIKNIRQNKKFTKFDLLVNLPNKKRFMLKKIKIPLLGIHNVRNSVAAVAVALTIGISTLNIKKGLLNFKGVQRRFNKIFTYNEIDFYDDYAHHPTEIKFVLDGVNKVYKAYDKVCVFQPHRISRLKDLRKEFSFAFKKADTVVLCPVYTAGEKIKLGFNYLNFAKEIIKNSKVKLFLVHNKNQLAKFLKKNMYGKKIVIGMGAGSISNWMRELPELMK

SEQ ID NO: 165030 - protein, 61 aa, Unknown
  Bacterial polypetide isolated from the Sargasso Sea
IQERLISLDAVRANIESSLALKPQASVVVVSDRDADAGLLVRVIDQSRLAGASSVSLAAQK

SEQ ID NO: 165031 - protein, 273 aa, Unknown
  Bacterial polypetide isolated from the Sargasso Sea
YKSIGNLKSKFIEFVNKTPSYGKCFICSDDKINKSIIKKIENKNFFTYGIEKKSNFSIKNISQTKNFSKFDVQISLPNKKTKYIKNIVIPMIGIHNIRNSTAALAVSYIIGVTDNIILKGLKTFNGVQRRFNYLFKLQGTDFVDDYAHHPTEISSVLEGVKKVYKEEKIYCIFQPHRISRLKSLKDEFSKSFSNADYLILCPIYKAGENIKLNFKYEQFAKQIIKNSKVKLIMINNENELKKYVTQNIYGKNIVIGMGAGSISQWMRNLPNKL

SEQ ID NO: 165032 - protein, 110 aa, Unknown
  Bacterial polypetide isolated from the Sargasso Sea
AKSLKNKVIVVFQPHRYTRTKILIKEFINVLSKVDYLFLLETYSAGEKIIKGATSKDIFSKILKKNKNTTYLKNIGDLNKLMKTHTMNQNTIVFMGAGSISSIAKKYLNN

SEQ ID NO: 165033 - protein, 65 aa, Unknown
  Bacterial polypetide isolated from the Sargasso Sea
MKINLGKTELIHFVGIGGIGMSGLALIMNELGFKIQGSDISNNKNIERLKKKKIPIFLSHNKKNV

SEQ ID NO: 165034 - protein, 243 aa, Unknown
  Bacterial polypetide isolated from the Sargasso Sea
MLSDSPLKIYFSGICGTATASLAILMKNRGHEVQGSDENIYPPMSDLLEQNQIRVDSGFHQSNLEPKPDLVVIGNALSRGNPEVEAVLSRKIPYISVSELLKNHFIQNCCSLVVSGTHGKTTTSSLLAWVFECAGLNPGFMIGGVAENFGSGCRDGEGNYFITEGDEYDTAFFDKRSKFLHYLPDQLIINNIEFDHADIFESLESIEYSFRMLLRLVPENGVIVANGDEPTVMRVLQNAYSPV

SEQ ID NO: 165035 - protein, 66 aa, Unknown
  Bacterial polypetide isolated from the Sargasso Sea
MKIKLAKSELIHFVGIGGIGMSGLALIMKGKGFKVQGSDIASNKNIERLKKEKIKVFIGHKKQNID

SEQ ID NO: 165036 - protein, 251 aa, Unknown
  Bacterial polypetide isolated from the Sargasso Sea
KSIICIDDKNIKKIFSKLKNRNVLTYGESSKADYKVFNVRFKTDYSIFDLIFKDLKKKNRTIKNIHLKLLGKHNVLNAAAAVTVCLNLGVNQNIIKKSLKKFTGVQRRMTKVFTKNQNDFYDDYAHHPTEIKSILESVKNAHKERKIISIFEPHRYSRVLSLKDKFSKSFLNSDLVLLCPLYAAGEKKSHKFDKINFAKHISKYSKTQVIIINNFDELGNFLKSFLNSNEIIIGMGAGSISKWMSELKLVV

SEQ ID NO: 165037 - protein, 179 aa, Unknown
  Bacterial polypetide isolated from the Sargasso Sea
PLLGNHNIKNSVAAVALALTVGLPINNIKKGLKNFKGVQRRFNKIFNFNNVDFYDDYAHHPTEIREVLDGVKNVYKEYEKICIFQPHRISRLKDLKKEFTFAFKNADKVILFPVYTAGEKLRLGFSYINFAKEIIKNSKVQLFLVDDKFQLAKFIKANIYGKKIVIGMKAGTISGWMRE

SEQ ID NO: 165038 - protein, 229 aa, Unknown
  Bacterial polypetide isolated from the Sargasso Sea
MKINIGQKEIIHFIGMGGIGMSGLAQIMKIMGFKVQGSDISMNKNIENCKKLGIKFFLGQKKKNIKKATILVKSSAIKSNNQEVKEAKKRKLPIYERVEVLANIVSLKKNIIISGSHGKTTTTSLVSKILLESRLDPTIINGGVINSIKNNAKHGKGEWAVLEADESDGSFLKLPINYSIVTNIDNEHIDYYKNYKNLENSFLQFINKTPPIGKCIICIDDKNIKKLKK

SEQ ID NO: 165039 - protein, 294 aa, Unknown
  Bacterial polypetide isolated from the Sargasso Sea
MMPDKTYFIYNGFDKTIVEADEFDRSFLNLQPYSGCITSIDADHLDIYKNHNSLKKAFIDFSKKIKNKLIIHHSIPLDGITYGINVKADYVFNNLVQSKNGYYVDLITPGQKILNVFCRVLGKYNLENMLAAIALADQSGQNINEIISSLKSFQGIYRRMSIYEIKNKILIDDYAHHPTEISSVHEALREKYPDSFIEVVFQPHLFSRTRDFIDDFAFQLSKFDRIKLMKIYPARENPIKGINSKNLLKKITSNASFLNDKYFNKNLDENNANVIAVLGAGSIGEFFNNYIKLK

SEQ ID NO: 165040 - protein, 45 aa, Unknown
  Bacterial polypetide isolated from the Sargasso Sea
MSKIEIGLKEKIHFIGIGGIGMSGLAQVMKTMGFMVQGSDLSSSK

SEQ ID NO: 165041 - protein, 297 aa, Unknown
  Bacterial polypetide isolated from the Sargasso Sea
LHKKGYNISGSDIFKTKDLDELAKSGVDVTYSHKSKNINNKDLIVLSSAIDSSNVEVSCAKKKNIPIIPRAEMLSGISRGYQGIAVAGSHGKTTTTSLIAHIFNQALLSPTYVIGGKILSSDGNSRLGDGNFFIFEADESDKSFLSFYPDSAVITNIDDDHLEAYEDNINNLKKSFLDFSDNIPFFGYVIANYDDKNTRDILKNIKRRVITFGLNKKSDITISEINYFFDYVDFKIYIKDTNKKHKFRLSLQGKYNIYNAVAAIAVAIEEGISIQTIRAALKSFSGVERRLERFKLI

SEQ ID NO: 165042 - protein, 203 aa, Unknown
  Bacterial polypetide isolated from the Sargasso Sea
MAAAGASVVVVSSARASARGGGEGDDARRGSKAWVTSLAGAIAGASARVCVAPLDVVKIRLQVQLEAGAAGKYRGLTHAVSTILREEGVRAMWAGTTPALLLWVPYTAIQFTVLNAFKDAADEWERARPGSTRGVPMNFIGGAVAGSAATVVTYPFDVIRTLLASQGHPKVYKGILDAAAGVARERGVARGLYAGISVTLAEI

SEQ ID NO: 165043 - protein, 192 aa, Unknown
  Bacterial polypetide isolated from the Sargasso Sea
MKIHILGICGTFMGGLAQILQESGHEVSGTDLQFYPPMSDQLNSMGITLISGYESSNLPKADLYVIGNALSRGNKSVEYILNEKLPFKSGPEILGEILKEKNVIAVSGTHGKTTTAYMIAHILKQNKKDIGYLVGGISPNFKDSASLGSDNIFVIEADEYDSAFFDKRSKFIHYSPNTLLINNIEFDHADIF

SEQ ID NO: 165044 - protein, 317 aa, Unknown
  Bacterial polypetide isolated from the Sargasso Sea
ISSIFTEAKLDPTIINGGILNLFGNSAKLGKSNWCIIESDESDGSFLKIPFTYSIVTNIDAEHLDYYKSLNKIKESFSQFLEKIPSVGKGFLCIDDKNIKEILKKTKNKNFYTYGIKNHSNFQILNISQKANFSRFDIKINIPGKKKLIKNIKIPLIGLHNIKNVTSVFAVAFSIGISEKIIKKGLLGFKGVQRRFSFLFKHRDAIFIDDYAHHPTEISSVLDGVKEVYGKKEIICVFQPHRISRVKNLKIEFSKCFKKADTVLLCPIYKANENLKLGFSYSSFARLIIKNSKVKLINVNNDIELKKFLKQTAYGKK

SEQ ID NO: 165045 - protein, 80 aa, Unknown
  Bacterial polypetide isolated from the Sargasso Sea
MQKINLGQKEVIHFVGIGGIGMSGLAQIMKNMGFKVQGSDQNKNKNTITCIKAGIKVFIGHSKKNVRSSTILVRSSAIKN

SEQ ID NO: 165046 - protein, 287 aa, Unknown
  Bacterial polypetide isolated from the Sargasso Sea
KGKGFRVQGSDISINKNIERIKKEKIKVLIGHKKQNINKATILVVSSAIKKNNPEMLEAIKKQLPIYKRGEMLANIVSLTKNIVVVGSHGKTTTTSLITSIFQETKIDPTIINGGVINSINNSAKLGKSEWSILEADESDGSFVHTPPTYAIITNIDREHMDYYGSMDKLNKYFVNFVKKVPSFGKSFICLDNKNNKVLIKKLKNKNFYTYGVDDKSNFCIKNIKQFKEYSKYDLKIKLPNKKIKTFKQIKIPLLGLHNIKNSAAASALALTVGLSISNIKKGLRNF

SEQ ID NO: 165047 - protein, 113 aa, Unknown
  Bacterial polypetide isolated from the Sargasso Sea
GWKRRIVVAFQPHLYSRTLQFHKEFAKSLQIADVIIITDIYPAREEPIIGVSARMIYNHLDKDKKGNCYFIPDLNHLEKELDNILQPNDLFLTIGAGTIWRYNESYTRHLSQI

SEQ ID NO: 165048 - protein, 207 aa, Unknown
  Bacterial polypetide isolated from the Sargasso Sea
MGVSIVCGDDTVVKELKINFQRPHISYGFEPSNDYVLSSYSTDGRNSYFKLTSNTDSFDFKLNMLGKHNVLNAAAAIVLCLQEGIAVKVIQDSLSNFMGIDRRMQILGERKIGSTTCLYIDDYGHHPTEIKKTIEAIRTSFPDFELKMVFQPHRFTRTKDLYEEFIEVLRHVDELFLLDIYSAGENPIEGVNSSNIQSSLIRSGFDN

SEQ ID NO: 165049 - protein, 217 aa, Unknown
  Bacterial polypetide isolated from the Sargasso Sea
GVVPSFGSNARNGASDLLVAEADESDGSLVRFRPSVGLLTNLELDHTDHYPNLEALIATMQRFAGNCSSLLANHDDPILQEHFRPDHWWSTQPGSAADFRAEPIHLAGDGSRADYIEQGQHLGEVHLPLAGHHNLSNALAAMAACRLVGAAFEPLQRALRQLQPPGRRFDLRGEIAGRLIVDDYAHHPSEVEATLTMAQLMVSSGRSTLPWVPQRVV

SEQ ID NO: 165050 - protein, 94 aa, Unknown
  Bacterial polypetide isolated from the Sargasso Sea
MTKIDIGKKEKIHFVGIGGIGMSGLAQIMKVMGFNIQGSDLSKNKNIENCRKSGIKIFIGHSKKNISKATIVVKSTAITKYNIELVEARKKKIP

SEQ ID NO: 165051 - protein, 290 aa, Unknown
  Bacterial polypetide isolated from the Sargasso Sea
GSLAVLAKESGHHVTGSDINCYPPISDQLDEMGIDVIPNYDVDQLKLSPDLIVIGNVMTRDTEIIEYILNHGLTYTSGPEWLGKNILANRRVISVAGTHGKTTTSSIIASALKELGEDPGYLIGGVPINFEASASLGSSPYFVIEADEYDTAFFDKRSKFIHYPAETFVINNLEFDHADIFKDLDQIKWHFHQLIRSLPSKTEVRVPINDDNISDLLDMGNWSSTKSFGMSDEADYSIISNEENLHIKEGDVLHGNLSPKLFGKHNLMNIISAFSALRSIGFKGDKILDA

SEQ ID NO: 165052 - protein, 57 aa, Unknown
  Bacterial polypetide isolated from the Sargasso Sea
MKINIASNEVIHFIGIGGIGMSGLAQIMNNMGFTIQGSDLSRNKNTDRLTKSGVKVY

SEQ ID NO: 165053 - protein, 109 aa, Unknown
  Bacterial polypetide isolated from the Sargasso Sea
ASGHEVSGSDNQFFPPMSDYIRNIGLITFEGYSKKALPKADLYVIGNALSRGNESVEEILEKKLPFVSGPEMLGRELKSRDVFAVSGTHGKTTTSYMLAHIFRDQGKDV

SEQ ID NO: 165054 - protein, 280 aa, Unknown
  Bacterial polypetide isolated from the Sargasso Sea
IYWSNKKVIAVSGTHGKTFVTSMIAHTLINNNFDPNYLIAGIPKKLEKSWNISNDEVFVIEADEYDTCYFDKRPKFFHYRPNILLINNIEFDHADIYENIEMIEKNFFELIKTMPSKSKVLINEKKVSKSFRNKLKKEKLKTTLQFLSLNTSNIHEENKLLAAHAIEDLISKEKVLNGLKDYIGVKRRFETIFNNKNFKLIDDFAHHPTAIEETIKMIREQTDNLTLIVELGSNSMKRGVHDKRLVDIFKNQETYTINASAEQEKIFSVHAKELTNDDIV

SEQ ID NO: 165055 - protein, 105 aa, Unknown
  Bacterial polypetide isolated from the Sargasso Sea
HQPHRYTRLNALFKDFCSCFNNADIVAIGDVYSAGEKKIPGASRDDLITGLVSHGHRHAVAVSNLQDLTQLIAKNAKSGDIVICLGAGTISSWANSLPKLLLSEC

SEQ ID NO: 165056 - protein, 270 aa, Unknown
  Bacterial polypetide isolated from the Sargasso Sea
SGHKVSGSDNNFYPPMSDQLRELDIELTKGFEPSSMPEADLYVIGNALSRGNKCVEEILNKNFPYKSGPEMLGDIIKDRFVIAVSGTHGKTTTSFMIAKIFQSLGMDIGYLIGGISPDFSFSAKIGSDEIFVIEADEYDSAFFDKRSKFIHYSPNILLINNIEFDHADIFNDLDEIKKQFHHLLKIIPSSGKIILFNHDKNALDVINNGCWADIIEINGDASRASFDSSSSKIKFDENSVYINDLPFYGSHNNLNAAAAIISAASYGIKS

SEQ ID NO: 165057 - protein, 114 aa, Unknown
  Bacterial polypetide isolated from the Sargasso Sea
TLDTIDKIYPRKKIIMIFQPHRYSRTKAYWRLFKDVFKKLDQIILLPTYSAGEKNNSYDSLFLYGKIINKNKSLLHSLNDVSVALNNINLGNSILVLQGAGDIKNIINLIKRKK

SEQ ID NO: 165058 - protein, 61 aa, Unknown
  Bacterial polypetide isolated from the Sargasso Sea
MKKINLGQKDVIHFVGIGGIGMSGLAQIMKNMGFRIQGSDQSKNKNTVNCSKLGIKVFIGH

SEQ ID NO: 165059 - protein, 155 aa, Unknown
  Bacterial polypetide isolated from the Sargasso Sea
MKIHILGICGTFMGGLARILIESGHKVTGSDNNFYPPMSDQLRELDVELIKGFEPSSMPEADLYVIGNALSRGNKCVEEILNKNLPYKSGPEMLGDIIKDRFVIAVSGTHGKTTTSFMIAKIFQSLGKDIGYLIGGISPDFSFSAKIGSDEIFII

SEQ ID NO: 165060 - protein, 242 aa, Unknown
  Bacterial polypetide isolated from the Sargasso Sea
PSFGKSFVCIDDKINHSLIKRLKSNNFYTYGTNPKSNFFIKKINQNIKYTEFDLSTNVPNKKKLLIKNIKIPLLGIHNVRNAVAATAVALTIGISVKDIKKGLLNFKGVERRFSKIFRYNNIDFYDDYAHHPTEIKMVLDGVNKVYPNFEKVCIFQPHRISRLKDLKKEFSFAFRNADTVILCPIFTAGEKIKLGFKYSSFAKEIIKNSKVKLFLVNDLKQLAIFLKRNMYGKKIVIGMGAG

SEQ ID NO: 165061 - protein, 139 aa, Unknown
  Bacterial polypetide isolated from the Sargasso Sea
FTFNNIDFYDDYAHHPTEIEFVLDGVDKVYKNYEKICVFQPHRISRLKDLRKEFSFAFKKADMVILCPIYTAGEKIKLGFSYLKFAKEIIKNSKVKLFFVKNNDHLAKFLKRNMYGKKIVIGMGAGTISSWMRKIPELM

SEQ ID NO: 165062 - protein, 199 aa, Unknown
  Bacterial polypetide isolated from the Sargasso Sea
MKIHILGICGTFMGGLARILIESGHKVSGSDNNFYPPMSDQLRELDVELRKGFEPSSMPEADLYVIGNALSRGNKCVEEILNKNLPYKSGPEILGEIIKDRFVIAVSGTHGKTTTSFMIAKIFQSLGMDIGYLIGGISPDFTFSAKIGSDEVFVIEADEYDSAFFDKRSKFIHYSPNILLINNIEFDHADIFNDLDEIK

SEQ ID NO: 165063 - protein, 269 aa, Unknown
  Bacterial polypetide isolated from the Sargasso Sea
GIGMSGLALIMKGKGFRVQGSDISINKNIERLKKEKIKVLIGHKKQNINKATILVISSAIKKNNPEMLEAIKKQLPIYKRGEMLANTVSLTKNIVVVGSHGKTTTTSLIASIFQETKIDPTIINGGVINSINNSAKLGKSEWSILEADESDGSFVHTPPTYAIITNIDREHMDYYGSMDKLNKYFVNFVNKVPSFGKSFICLDNKNNRNLLKKLKNKNFYTYGIDDKSNYSVKNIKQFREYSEYDLKIRLPNKKIVIIKKIKIPLLGLH

SEQ ID NO: 165064 - protein, 236 aa, Unknown
  Bacterial polypetide isolated from the Sargasso Sea
MPKIKKPIITYGESKKADYRAKNINYSKNKSKYDLFYKNKNIGEIRINVPGKHNVLNSLAAIALGMEINVPINNLKRGINSYKGVRRRFEIKKNKTDIILVDDYAHHPTEVNATIRAAKNGWNKRIISVFQPHLFSRTRDFFKEFALALLESDEIIITEIYAAREEPIDDIKSKLILDELILLGHNNTHHLQSLDNLNSLLTEIVKPGDMVITMGAGNIWRYSDKYNQYLNDNHDG

SEQ ID NO: 165065 - protein, 98 aa, Unknown
  Bacterial polypetide isolated from the Sargasso Sea
MKIKLAKSEVIHFVGIGGIGMSGLALVMSRMGFEVQGSDININKNIERLKNNKIKIFIGHEKINISRATIIVISSAVKKNNIEVISAKARSLPVYKRG

SEQ ID NO: 165066 - protein, 66 aa, Unknown
  Bacterial polypetide isolated from the Sargasso Sea
MKIKLAKSELIHFVGIGGIGMSGLSLIMKGKGFNVQGSDISNNKNIERLKKEKIKIFIGHKKQNID

SEQ ID NO: 165067 - protein, 106 aa, Unknown
  Bacterial polypetide isolated from the Sargasso Sea
MTNKNSSIKIYFIGIGGIGMSGIAELMYEIGYTVLGSDEIESENVKRLKKIGINIKIGHNKKNLKNVNAVVYSSAISQKNPEIQEAKNKKIPIVSRADMLSEINEK

SEQ ID NO: 165068 - protein, 219 aa, Unknown
  Bacterial polypetide isolated from the Sargasso Sea
MENHFICIDDKINNDIVRKLNSQNFYTYGLNSKSNFLIKNIKQNIKFTEFDLFVNVPNKKKIIIKKIKIPLLGVHNVRNSVAAIAVALTEKISISNIKKGLLNFRGVQRRFNKIFTYNKIDFYDDYAHHPTEIKVVLEGVNKVYKGYDKVCIFQPHRISRLKDLRKEFSFAFQNADTVVLCPIYTAGEKIKLGFSYFNFAKELIKNSKVKLFLVNDSKQ

SEQ ID NO: 165069 - protein, 252 aa, Unknown
  Bacterial polypetide isolated from the Sargasso Sea
QGYQKEQLPEADLYVIGNALSRGNECVEEILDKKLPFVSGPEMLGKELKNRNVFAVSGTHGKTTTSYMLAHILKKQGKDIGFLIGGISKNFENSAKLGTDKSFVIEADEYDSAFFDKRSKFIHYSPQNLVINNIEFDHADIFDDIDDIKKQFHHLIKIVPQSGNIIYFKDDKNSTDLIKDGSWCGKTEINSDSIKIDFKLMQLEIDNKKFSLEDLPLIGQHNFKNYISAILAAKLDGVPINDSIESLKTFKG

SEQ ID NO: 165070 - protein, 125 aa, Unknown
  Bacterial polypetide isolated from the Sargasso Sea
MKKINLGQKELIHFIGIGGIGMSGLAQIMKNMGFKVQGSDQIKNKNTISCNKAGIKVFIGHSKKNVKSTSIVVKSSAIKENNSEIRYAKQKKIPIYSRANVLADIVSLKKNIVITGSHGKTLQHH

SEQ ID NO: 165071 - protein, 298 aa, Unknown
  Bacterial polypetide isolated from the Sargasso Sea
GHQILRDKWVIAVSGTHGKTTTASMLAWILEKAGLEPGFLIGGSPANFNCSARLGKSPFFVVEADEYDTSFFDRRSKFVHYRPKTLVINNLEYDHADIFPSIKEIQNQFHLLIRSIPSNGLIITPADDQNIQETLDMGCWTPHQTIQTMSGETESDQVTKSCDWASHGEATNFEVFEKGKLAGQVKWSLFGGHNRCNGLSAIAAASHVGVSVDKACEALSSFKGVKRRLETIYRSDTITVYDDFAHHPSAIKKTLEGIRKQYPHELILAAIEPRTHTMSLGALQADLVSCNKDADQTF

SEQ ID NO: 165072 - protein, 135 aa, Unknown
  Bacterial polypetide isolated from the Sargasso Sea
GHHPEEIKAALSAAKLIKNNSKILAIFQPHRYTRLKNHFEEFCSSFNDADKVILLNIYAAGEKKLINYENTDLEEGIRNYGHKNVESLKDDEKIFEKIFKNLKNFDIIIFLGAGNITNIANSLSKQVKTLRGNIQ

SEQ ID NO: 165073 - protein, 282 aa, Unknown
  Bacterial polypetide isolated from the Sargasso Sea
NYSIITNIDNEHLDYYKTLRNLKNRFVEFIDKTPSFGKAFLCSDDKNINDILPKLKNNNYYTFGLSTKSNFQIFNIIQNKNFSKFSVKIKIPGKIKTIKNIAIPLLGLHNIKNAASALAVAFSIGVSDKVIKSGLKNFKGVQRRFNYLFDINNVPFFDDYAHHPTEIASVLDGVRKVYNQEDIVCIFQPHRISRVKNLKNEFTNCFNKADTILLCPIYKAGEKLKLGFSYNSFAKLIAKNSKVNLIMIKNELELKKLIRTYAYGNKIFISMGAGSISNWVRN

SEQ ID NO: 165074 - protein, 107 aa, Unknown
  Bacterial polypetide isolated from the Sargasso Sea
MKKINLGQKDIIHFIGIGGIGMSGLAQIMKNMGFKVQGSDQAKNKNIISCIKNGIKTFIGHSTKNLRGATIIVKSTAIKNNNIEIKFAKKNKIPVYNRVEVLADAVS

SEQ ID NO: 165075 - protein, 82 aa, Unknown
  Bacterial polypetide isolated from the Sargasso Sea
MKIDLGKNELIHFVGIGGIGMSGLAMIMNGLGYKVQGSDIVNNRNIERLNEKKIRVFLNHKKANIKKTTVLVISSAIKKNNP

SEQ ID NO: 165076 - protein, 283 aa, Unknown
  Bacterial polypetide isolated from the Sargasso Sea
FKIQGSDQNKNKNTISCNKAGIKVFIGHSKKNVKSSTILVRSSAIKNNNSEIKYAREKKIPIYSRAEVLADVVSLKKNIIITGSHGKTTTTSLVSKILSDQKLDPTIINGGVINSFNSNAKLGKGEWAILEADESDGSFLKLPINYSIVTNIDNEHVDFYKNFKNLENSFIKFIEKTPPTGKSIICIDNKNIKKIFNRLKNKNILTYGESINANYQITNIRYKIDYTIFDFSYKDIKKKNKKIKNIQLRLLGKHNVFNAAAAISICLNLGVSRNIMKKSLKNF

SEQ ID NO: 165077 - protein, 102 aa, Unknown
  Bacterial polypetide isolated from the Sargasso Sea
MKDIRIGQKEIIHFVGIGGIGMSGLAQVMKTMGFKIQGSDQNKNKTTQNCLKAGIKVFIGHAKKNIQNVTIVVKSTAIKDNNIEIKEAKKRKISIYSRAEIL

SEQ ID NO: 165078 - protein, 147 aa, Unknown
  Bacterial polypetide isolated from the Sargasso Sea
FKGVQRRFNYIFEKNGTHFFDDYAHHPTEISSVLDGVKKVYKKKEIVCIFQPHRISRLRSLKSEFSKCFIKANTIILCPIYKAGENINLGFSYISFAKQIIKNSKVNLIMIKNETDLKKVVGNLAFGNKIFIAMGAGSISGWVRNLK

SEQ ID NO: 165079 - protein, 285 aa, Unknown
  Bacterial polypetide isolated from the Sargasso Sea
EKIGIKTISGFKEDTLPDADLYVIGNAMSRGNECIEKILEKKFPFVSGPELLGKELKERKVFAVSGTHGKTTTAYMLAHIFTEQGRDIGYLIGGISKNFKNPAKLGSDPTFVIEADEYDSAFFDKRSKFIHYFPSNLIINNIEFDHADIFDDINDIKKQFQHLLKIIPCDGNIISFDDDTNTNDIFKQGIWCNQICINKDEVFADYKKRELKVDNVKFSLNDLPLIGEHNFKNYVCAIMAAKLDGIQISDSIKCLKNFNGVKRRMDFVREIEKIKIFDDFAHHPT

SEQ ID NO: 165080 - protein, 293 aa, Unknown
  Bacterial polypetide isolated from the Sargasso Sea
MSALAIYLKKNKINITGSDITFNANTVNLEKYKIPVFIGHKSSNIKDRDIIFYSSAIKNNPEIKEAKKNKIPCYNRSKLLQLICKDKFTIVVSGSHGKTSTTSILGHLLVRAGLNPTIISGGIMQNFGQNIYLTNSNYVVVEADESDGTVFKLSPKYLLFLNVDREHIDFYKTYSNFKSKIKNYILGQIKKDVKIFINNDDYFLFSLKKYSKNIKTFGSNTKANYSYKLINLTDKKSSFDIFKGKKIISKNLSTNLLGEHNVQNLTAVLSIVDDLGYEIKKSHILNFKVLKEE

SEQ ID NO: 165081 - protein, 178 aa, Unknown
  Bacterial polypetide isolated from the Sargasso Sea
NIKNSVAATAVALNVGLSISNIKKGLKNFKGVQRRFNKIFTFNKVDFFDDYAHHPTEIKEVLNGVKTVYSNYEKICIFQPHRISRLKDLKSEFASAFKDADKVILFPIYTAGEKIKLGFSYYNFAKEIIKKSKVELFLVNDKYQLAKYIKHNIYGDKIVIGMGAGSISLWMREMPKFL

SEQ ID NO: 165082 - protein, 126 aa, Unknown
  Bacterial polypetide isolated from the Sargasso Sea
MYRVCGTGMGAAACLLKESGYEVEGGDITYTPPMSEYLQTTGIICHDLNKLEKNYLSGFDLIVVGNVVPKGSRDADLIENSNVSYTSFPAALGALVLKDFNVVGVSGTHGKTTTTYFLSQMFTHFN

SEQ ID NO: 165083 - protein, 220 aa, Unknown
  Bacterial polypetide isolated from the Sargasso Sea
MDKKTYYFIGINGIGMSGLAEILINKGQVVLGSDTSPTLRSDHFKALGISVFEKQEKQNILSSDWIIVISSAIKDDNEELLQAKKLGCQIIKRGKLLAMIFDEFEEKIAIIGTHGKTTTTSLVIKIFSEQMEKPSYFVGGHLEGVPHANLQSSKTFITELDESDGSFLDAIPTSTIITNIEHEHIDFYKTKNDVMDAFLRFISNTINNNGKCTINIDDPI

SEQ ID NO: 165084 - protein, 244 aa, Unknown
  Bacterial polypetide isolated from the Sargasso Sea
MHIHILGICGTFMGGLAQIAKALGHEVTGSDQNMYPPMSEELIKLNIDVMVGYEPEHLYSQPDLVLVGNTLSRGNPVIEYMLNQRLLFTSGPEWLYREVLHKRHVLAVSGTHGKTTTTSILSWILEFAGLNPSFLIGGVAENFEKSASYTDSQFFVIEADEYDTAFFDKRSKFIHYHPDTLIINNIEYDHADIFHDLAAIRREFHNLIRILPKDAKIIYPSEDKEIERVLSMGCWTASETFLGG

SEQ ID NO: 165085 - protein, 196 aa, Unknown
  Bacterial polypetide isolated from the Sargasso Sea
SKKNTLIKNIKIPLIGLHNIRNATAAVAVSWTIGISKDIIKKGLNEFKGVHRRFNKIFKFRGIEFFDDYAHHPSEIREVLSGVKDVYKEESIICIFQPHRISRLKDLKKEFTLSFKKADQVILCPVYAAGEKIKLGFNYYNFAKNIAKNSKVKIFLVKDQFSLAKFIKQNIYGKKIVIGMGAGSISNWIKGLPNLI

SEQ ID NO: 165086 - protein, 292 aa, Unknown
  Bacterial polypetide isolated from the Sargasso Sea
AQGIEIKEGYQVSHLKPAPDLVIIGNALSRGNVAVEYVIEEGLPYVSGPQWLAENVLRDKWVLGVAGTHGKTTTSAMLAWILEFAGSKPGFLIGGVTNNFPDSARLGDSQFFVVQADEYDSAFFDKRSKFVHYSPRTAILNNLEFDHADIFNNLEEIEKQFHHLIRTIPGNGTIISPHEDSGIEKVIDMGCWSYRQHFGVNLPDLKCKKAALDMEIFWNAEFEGEQGNEFQLVKYEKKSGQVIKTEGLVKWSQNGQHNVKNALAAVAAANQVGVDLSVAVKALENFEGVKRR

SEQ ID NO: 165087 - protein, 281 aa, Unknown
  Bacterial polypetide isolated from the Sargasso Sea
SIVTNIDSEHLDFYKSVNNLKKNFSDFIEKTPSLGKTFICIDDKYSREILKKIKKKNYYSYGLNKKANFQIHNIFQSEKFSKFDLKIRIPGKKTSISNIKIPLIGLHNIKNATSAFAVSFSIGINSSIIKNGLLKFKGVERRFNFLFKKNNAIFFDDYAHHPTEITSVLDGVKKVYNKKEIISIFQPHRISRVKNLKFEFSKSFIKSDTVLLCPIYKASETINLGFSYNSFAQLIIKNSKVKLIIIKNEKELQNFLKQTAYGNKIYIGMGAGSISNWMRNL

SEQ ID NO: 165088 - protein, 171 aa, Unknown
  Bacterial polypetide isolated from the Sargasso Sea
CFDSLFNLGANISLIKNSLKKFSGVQRRMTKVFSKNKNDFYDDYAHHPTEISSILDGVQKVNSNRKIISVFEPHRYSRVLSLKKEFSKCFFKSDIVLLCPIYAAGEKKNLSFDLIKFGKLIGKYSKTQVIIIKNELELCKFLRKNLIKDEIIIGMGAGAISKWMANLKNTL

SEQ ID NO: 165089 - protein, 160 aa, Unknown
  Bacterial polypetide isolated from the Sargasso Sea
MKNSITQYLKNKSFFLIGIGGAGMMGIAELLHNLGFKVRGSDIQDNNAIKRLRKMKIKVFIGHDSKNINLKDVVVFSNAIQKNNIELKFSRQNSLTVLSRMQIIAELMRLKYGISITGSHGKTTTTSLLSHIMYKNKLDPTYLIGGKLKTDDPHVKLGNS

SEQ ID NO: 165090 - protein, 270 aa, Unknown
  Bacterial polypetide isolated from the Sargasso Sea
MIIVGNVMSRGNPVIEYILKHKIIFTSGPKWLYENILKDKKVIAVSGTHGKTTTTSMIVHIMNKNKLNPSYLIGGDPNGKTSSVKLTKSKYFVIEADEYDTAFFDKQSKFLHYNPYILLINNIEFDHADIFKDIDEIIKTFHNLIRHVPSNGKIIINKNDLNIKKLIKNGCWSKIITIDDKRTNGDLNLVSDKKHMLVLNNNRYKLPEHMIGQHNYLNATAAIAVCCQLKISISKQIKSLETFKGVQKRMEYIGQINGIKIYDDFAHHPT

SEQ ID NO: 165091 - protein, 80 aa, Unknown
  Bacterial polypetide isolated from the Sargasso Sea
MKIKLAKTELIHFVGIGGIGMSGLALIMKGKGFKVQGSDIANNKNIERLRKEKIKVFIGHKKQNLEKGTILVVSSAIKKI

SEQ ID NO: 165092 - protein, 262 aa, Unknown
  Bacterial polypetide isolated from the Sargasso Sea
DLSSNEISTKLKKKGIKVYEHQLAKNITNQNLVVYTSAIKKNNPELVEAKKRGIKCITRGKALGEFTRKDTNICITGTHGKSTTTNYLAQILLNCGKKPSVFLGAINTKLKTNFIYNRSSLNIIEADESDNSFNFLNSMYSVITNIDFDHMDFYKTKKNLYFAFENFIKKTTNKVIVNNDCPNIKKIITKNPNKKIVRFSNIDKDIEFYFEIINRKKSTEIILYKKKNIIGLFKFQRISQYNCYNVVSSIVTAIEMGISTKE

SEQ ID NO: 165093 - protein, 146 aa, Unknown
  Bacterial polypetide isolated from the Sargasso Sea
MKKINLGQKEVIHFVGVGGIGMSGLALIMKNMGFQIQGSDQNKNKNTITCAKSGIKVFIGHSKNNVKSSSILVRSSAIKNNNIEIKYARKKKIPIFSRAEILADVVSLKKNIIITGSHGKTTTTSLVAKILSDQKLDPTIINGGVI

SEQ ID NO: 165094 - protein, 114 aa, Unknown
  Bacterial polypetide isolated from the Sargasso Sea
SYDIAKQISDKKIVIVFQPHRYTRTKILQNEFVKILTKVDILYILDIYSAGEKSIPNINSKNLVKKIKIKNKNTFYIKNPKILRSLLKEYFNDKNIIVFMGAGSITNLANELIS

SEQ ID NO: 165095 - protein, 173 aa, Unknown
  Bacterial polypetide isolated from the Sargasso Sea
MKICVLGVSGTFMANVAVLAVSLGHEVVGYDNQCYPPMSAVLEQAGIDVFPFPNTPSVPTDVDCIIVGNCVRLDGPWPAYLETLSIPCKSGPEWLRETILQDRLVIAVSGTHGKTTTTSLLVHAMRAHGENPGYLIGGVPQGLASSTALGESPFFIIEADEYSTAYLTEAPSS

SEQ ID NO: 165096 - protein, 253 aa, Unknown
  Bacterial polypetide isolated from the Sargasso Sea
DKLNRYFENFVNKVPSFGKSFICLDDKNIKNLIKKIKNKNFYTYGLDKRSNFSIKNIRQSKKFSEFDLNIKLPNKRNQLIKKFKIPLLGTHNIKNSVAAAALALTVGLPINNIKKGLKNFEGVQRRFNKIFNFNNVDFYDDYAHHPTEIKEVLDGVNNVYKDYEKICIFQPHRISRLKDLKKEFTYAFKNADKVILFPIYTAGEKLKLGFNYMNFAKEIIKNSRVQLFLVDNRFQLAKFIKANIYGKKIVIGM

SEQ ID NO: 165097 - protein, 302 aa, Unknown
  Bacterial polypetide isolated from the Sargasso Sea
ELTNAALAQIDTVVVGNVLSRGNAALESVIESGLPYVSGPQWLYEHVLSRRRVCAIAGTHGKTTTSSMVAWILQCAGLNPGFLIGGLPHNFQTSARLTDSEFFVIEADEYDTAFFDKRPKFLHYRPRTLVLNNLEFDHADIYSDLEAIQQQCHYLLRTVPAKGGVILNADDPHLPAVLKKGCWSRQTTFSLLQSAHWQAHKRTQDGSVFDLWYHGQTIGEVTWSLVGDYNLSNALAAAAAAFDCGVSFEAILTGLSTFTGVAKRMQCVVENDNIKVHRDFAHHPTAIENVITAVRSQPETQR

SEQ ID NO: 165098 - protein, 162 aa, Unknown
  Bacterial polypetide isolated from the Sargasso Sea
ISISDIKKGLLNFKGVERRFNKVFKYNGIDFYDDYAHHPTEIKVVLDGVKKVYQNFNKVCIFQPHRISRLKNLRKEFSYAFEDADTVILCPIYTAGEKIKLGFNYLKFAKEIIKNSKVNLFLVENNNQLAKFIKNNMYGKKIVIGMGAGSISNWMRKIPQLI

SEQ ID NO: 165099 - protein, 239 aa, Unknown
  Bacterial polypetide isolated from the Sargasso Sea
LRELDVELTKGFEPSSMPEADLYVIGNALSRGNKCVEEILNKNLPYKSGPEMLGDIIKDRFVIAVSGTHGKTTTSFMIAKIFQSLDKDIGYLIGGISPDFSFSAKIGSDEIFIIEADEYDSAFFDKRSKFIHYSPNILLINNIEFDHADIFNDLDEIKKQFHHLLKIIPSSGKIILFNHDKNALDVINEGCWADIIEINGNASRASFDSSSSMIKFDGKSVCINDLPFYGSHNNLNAAA

SEQ ID NO: 165100 - protein, 42 aa, Unknown
  Bacterial polypetide isolated from the Sargasso Sea
MFRKTKHIHFIGIGGIGMSGMAELLSKLGYKISGSDKQTSEI

SEQ ID NO: 165101 - protein, 146 aa, Unknown
  Bacterial polypetide isolated from the Sargasso Sea
GVKRRFSFLGKIKKASIYDDYAHHPSEIKASYEIAKQISEKKIVIVFQPHRYSRTKILQNEFIKILMKIDVLYILDIYAAGEKSILNINSKNLVKKIKIKNKKTFYIQNPKNLKFHLKEFFNEENIIVFMGAGSITNLAHELVSKK

SEQ ID NO: 165102 - protein, 257 aa, Unknown
  Bacterial polypetide isolated from the Sargasso Sea
MDKDLIPKIHFHFIGVGGIGMSAVAMGLLKKGYSVSGSDLVKNNETNKLKKLGAIIFNSQVGQNIEFITSKFNNKLINFVVSTAIKPENKELSYCREKNLPVKHRSEILALLMQSYTSLAVAGSHGKTSTCTFLSTLLELCTHSSSSITGGIIPIYNSNCYLEDTKFLVAEVDESDGTITRYKSSIGIINNIDFDHCDHFSDLGEVISSFKDFAKNSKKLLINFDCEITRNNFNSENKWSNTTPSNVAYALIPTVIN

SEQ ID NO: 165103 - protein, 64 aa, Unknown
  Bacterial polypetide isolated from the Sargasso Sea
MKIKLAKTELIHFVGIGGIGMSGLSLIMKGKGFRVQGSDLFFNKNIERLKKEKIKIFIGQKNKI

SEQ ID NO: 165104 - protein, 129 aa, Unknown
  Bacterial polypetide isolated from the Sargasso Sea
ILESGKLDPTIVNGGIINSISKNNKFGKGEWMVVEADESDGSFLKLPHQISIITNLDIEHLDYYKSSANLNLAFEQFVKNLPFYGISVINEDNKNLKKLILKNDTRKIISFSNKNKNANVYIEEVNFYK

SEQ ID NO: 165105 - protein, 269 aa, Unknown
  Bacterial polypetide isolated from the Sargasso Sea
MGIDVIPSYDVDQLKLSPDLIVIGNVMTRDTEIIEYILNHGLTYTSGPEWLGKNILANRRVISVAGTHGKTTTSSIIASALKELGEDPGYLIGGVPINFEASASLGSSPYFVIEADEYDTAFFDKRSKFIHYPAETFVINNLEFDHADIFKDLDQIKWHFHQLIRSLPSKTEVRVPINDDNISDLLDMGNWSSIKSFGMSDEADYSIISNDENLHIKEGDVLHGNLSPKLFGKHNLMNIISAFSALRSIGFEGDKILDAINQFNGVKRR

SEQ ID NO: 165106 - protein, 149 aa, Unknown
  Bacterial polypetide isolated from the Sargasso Sea
RRFTHVDTINGVKIIDDYGHHPAEISAVLKSVRDTTTGRIIAVHQPHRFSRLKLLFDEFCTCFNDADLVLISDVYSAGEKELEGINKQALVDGLINHGHKRVFSLEHESQLKNFFLEHTAPGDVFVCLGAGSITDWANVLPSQIRNEKF

SEQ ID NO: 165107 - protein, 292 aa, Unknown
  Bacterial polypetide isolated from the Sargasso Sea
TTTTAMIAHIFKAHDYPTLPLVGGKTKETPFPSLKKPHYIIAEADESDGSFTKYRPNHSIVTNIDFEHPDYYSSYKMLFKTFEIHTKKIHPGGALIYNDDNKGSKELGNNYLGNKTSYGLNTNSNLRGGDYKLSPTETLFTVTHKTNRYRCRIKQLGLHNISNALASIATGLYYDISPKISCESLSTFSGVARRLELIYHNPLKNIFIYDDYAHNPEKTYSAITALKNTYPQLKLHAIFQPHRYSRIQGLYNNFTSSFKSANSVNLVPFCSAGEEKPNSLRLEKFSADISLH

SEQ ID NO: 165108 - protein, 172 aa, Unknown
  Bacterial polypetide isolated from the Sargasso Sea
AAASLAFTIGLPEKYIKLGLCNFKGVQRRFSHLFDHNKISFYDDYAHHPTEISSVLTGVKKVFKNKEIVCVFQPHRISRVINLKKEFSKCFKMADTVILCPIYSANEKLRLNFTYQSFAKLIIKNSNVKLIQVDDELQLQSFIKQNVFGKKIYIGMGAGSISNWMKNLKNIF

SEQ ID NO: 165109 - protein, 70 aa, Unknown
  Bacterial polypetide isolated from the Sargasso Sea
MKKISLGQKDVIHFVGIGGIGMSGLAQIMKNMGFRIQGSDQNKNKNTINCSKLGIKIFIGHSPTNVKGST

SEQ ID NO: 165110 - protein, 100 aa, Unknown
  Bacterial polypetide isolated from the Sargasso Sea
MKIKLAKSELIHFVGIGGIGMSGLAIIMKELGFKVQGSDISNNKNIDRVKQKNIKIYIGHKKQNINKSTILVISSAIKKNNSEVLWQKKGKYRFIQGVKC

SEQ ID NO: 165111 - protein, 259 aa, Unknown
  Bacterial polypetide isolated from the Sargasso Sea
FLEFLNSVPFYGAAILCLDDPNLQSLLPKIEKRTITYGLKTQADYTAREISVSELKTNFTVFYQGKKLGGISSCSLGNHNICNTLAAVAVGMELNMDFPTIADALKGFSGVQRRFEILHHSDSLIIVDDYGHHPAEIQATLSTAKEVWPNRRLVVVFQPHRFSRTQHLMESFYSSFNNADQLFLLDIYGAGEKPIEGIHSRKMAEGIREFGHKNVNYIEKVDILFPHLQNSLQSGDVVLTLGAGNIGELAHKLVAQFHD

SEQ ID NO: 165112 - protein, 120 aa, Unknown
  Bacterial polypetide isolated from the Sargasso Sea
MKKFEKVRNIHFVGIGGAGMIGIARVLLKKGYKVSGSDIDYSNDLKKLKNDGAIVYEGHHEKNIKDKDLLVVSSAIDSENVELLQAKKDSITIIPRAEMLGSLMIGYESIAVAGSHGKQQ

SEQ ID NO: 165113 - protein, 267 aa, Unknown
  Bacterial polypetide isolated from the Sargasso Sea
ITNQLNQDGIKVDFNLNNLKYSKKILYIYSSAISINETTLKDYLDSDNVLSRPEFLNILSKENKIIGITGTHGKTSTTALLAHIFHYNERNVSYIFGGITSFHGIGGHYGDQNQPIILETDEAFNTFKDINIDDLLVTNIDVDHLDYFKNFKNLLNAFKHVIENVKGNLVLNFDDQNLRELKTSNNCISYSSSEIADIQIQYPNKIIIENEEYVVTTKLIGNHFISNIAGAIALAYLNGIKIEDSIEAVETFPGVKRRTEYLGSIKG

SEQ ID NO: 165114 - protein, 177 aa, Unknown
  Bacterial polypetide isolated from the Sargasso Sea
MVWNALAAISVARIMNVSINKIINSLEKFDGVKRRFDIINNDESLMVVDDYGHHPVEVESVIKAIKDNWNRRLVVAFQPHLYSRTEQFFKEFSESLLLADSVLITEIFASRELDNNSINSQMIVDEMLRLGHQSVMPTTLENLVDDVESVYKKGDIILTIGAGNIWRYSDLIKERLI

SEQ ID NO: 165115 - protein, 205 aa, Unknown
  Bacterial polypetide isolated from the Sargasso Sea
MRIHILGICGTFMAGLAQILKESGHDVSGSDIQFYPPMSHYLESLNIKTSKGYKKDTLPKADLYVIGNAISRGNDCVEYILENNLPHTSGPEILGRELKNRKVYAISGTHGKTTTSYMLAHIFSKIGIDIGYLIGGMSKNFADPAKLGSDKIFVIEADEYDSAFFDKRSKFVHYNPTNLIINCIEFDHADIFDDIKDIRKQFNHL

SEQ ID NO: 165116 - protein, 200 aa, Unknown
  Bacterial polypetide isolated from the Sargasso Sea
MHIHILGICGTFMGSLAVLAKESGHHVTGSDINCYPPISDQLDEMGIDVIPNYDVDQLKLSPDLIVIGNVMTRDTEIIEYILNHGLTYTSGPEWLGKNILASRRVISVAGTHGKTTTSSIIASALKELGEDPGYLIGGVPINFEASASLGSSPYFVIEADEYDTAFFDKRSKFIHYPAETFVINNLEFDHADIFKDLDQN

SEQ ID NO: 165117 - protein, 223 aa, Unknown
  Bacterial polypetide isolated from the Sargasso Sea
MKIHILGICGTFMGGLARILIESGHKVTGSDNNFYPPMSDQLRELDVELTKGFELSSMPEADLYVIGNALSRGNKCVEEILNKNLPYKSGPEMLGDIIKDRFVIAVSGTHGKTTTSFMIAKIFQSLGKDIGYLIGGISPDFPFSAKIGSDEIFVIEADEYDSAFFDKRSKFIHYSPNILLINNIEFDHADIFNDLDEIKKQFHHLLKIIPSSGKIILFNHDKN

SEQ ID NO: 165118 - protein, 248 aa, Unknown
  Bacterial polypetide isolated from the Sargasso Sea
IAKYLVQQNIDVAGYDQRKSFITNQLNQDGIKVDFNLSKLKYSKKILYIYSSAISIKETTLKDYLDSDNVLSRPEFLNILSKENKIIGITGTHGKTSTTALLAHIFHYNERNVSYIFGGITSFHGIGGHYGDQDQPIILETDEAFNTFKDINIDDLLVTNIDVDHLDYFKNFKNLLNAFKHVIENVKGNLVLNFDDQNLRELKTTNNCISYSSSEIADIQIQYPNKIIIENEEYVVTTKLIGNHFISN

SEQ ID NO: 165119 - protein, 165 aa, Unknown
  Bacterial polypetide isolated from the Sargasso Sea
LALTVGLPILTIKKGLRNFKGVQRRFNKIFTYNKVDFFDDYAHHPTEIKEVMEGVDHVYKDFEKICIFQPHRISRLKDLKKEFTYSFKNADKVILFPIYAAGEKIKLGFNYKDFAKQIIKNSKVQLFLVDDKFQLANYIKNNIYGKKIVISMGAGTISSWIRELP

SEQ ID NO: 165120 - protein, 98 aa, Unknown
  Bacterial polypetide isolated from the Sargasso Sea
MKIELARTEVVHFIGIGGIGMSGLSLIMKGKGFKVQGSDISENKNIDRLKKEKIKIFIGQKKQNLKNATIVVISSAIKKNNPEMAEAKRKNIPIITRR

SEQ ID NO: 165121 - protein, 264 aa, Unknown
  Bacterial polypetide isolated from the Sargasso Sea
RKNFGNFMKRLPFYGVAYVCADDPEALDLIRDIKANVVTYGLNEGADYRALHVKHENGKEIFDLSISGRSNNIPFVLNMSGEHNVQNALAAIAVAVDLGIEINTLKRSLEIFGGIDRRFQVYEKVKLSSSLVTVVDDYSHHPTEIKAVIKTIRRRWPNNRLVILFQPHRFSRTKELFEDFVNVLSESDMVILFEVYSAGEKQIVGADGRSLARSLRNRGNFDPVFLDHFVSLDVAVSAVAKNGDVIAVIGAGSIGRLVEEFLAA

SEQ ID NO: 165122 - protein, 266 aa, Unknown
  Bacterial polypetide isolated from the Sargasso Sea
KNFINFIENTPSFGKSFICLDDKNNRNIIKKLKTKNYNTYGVNKNANFQIKNIFQNSNFSKFDLKVTLLGAKSYLIKNIKIPTIGLHNIRNATAAIAVAVSVGISKKIILKGLKEFKGVQRRFTKIFTFKGVTFFDDYAHHPTEIREVLNGVKNVYNNKEIICVFQPHRISRVKNLNKEFSFSFKKADTVVLCPIYKAGENIKLGFKYINFAKSIIKNSKVNLILIKNNFDLIKYTKQNIFGDKIVIGMGAGSVSNWIRDLPNHLK

SEQ ID NO: 165123 - protein, 152 aa, Unknown
  Bacterial polypetide isolated from the Sargasso Sea
YNFKGVERRFSHLFNYNKISFYDDYAHHPTEINSVLSGVKSVYKSKEIVCVFQPHRISRINNLKKEFTKCFKMADTVLLCPIYTANEKLRVNFTYDSFAKLIIKNSKVKLIQIENEIQLKRFVKQNSFGQKIYIGMGAGSISNWMKNLKNIF

SEQ ID NO: 165124 - protein, 63 aa, Unknown
  Bacterial polypetide isolated from the Sargasso Sea
MNIKLAKEEIIHFVGIGGIGMSGLALIMKGLGFKVQGSDIANNKNIERLKKKKIKIFFNQKKN

SEQ ID NO: 165125 - protein, 171 aa, Unknown
  Bacterial polypetide isolated from the Sargasso Sea
AAVAFSVGIPSKIIKKGLEKFSGVQRRFTKVFSFQNVPFFDDYAHHPTEITEVLNGVREVYKKKEIVCIFQPHRVSRLKNLHEDFSKSFKKADSVILCPIYRAGENINLGFTYNNFAKKIIKNSKVKLILIKNNLDLVKYVKQNIYGNKIVIGMGAGSISNWIRDLPKHIK

SEQ ID NO: 165126 - protein, 100 aa, Unknown
  Bacterial polypetide isolated from the Sargasso Sea
MKKISLGQKDIIHFVGIGGIGMSGLAQIMHNMGFKVQGSDLARNKNTLSCSKVGIKIFVGHSKRNVKSSTILVKSSAIKNNNKELRYARKKKIPVYQEQK

SEQ ID NO: 165127 - protein, 63 aa, Unknown
  Bacterial polypetide isolated from the Sargasso Sea
MKINLGKKEIIHFIGIGGIGMSGLALIMKQLGFKIQGSDISVNKNIERLKKSNIKIFTKHKIS

SEQ ID NO: 165128 - protein, 177 aa, Unknown
  Bacterial polypetide isolated from the Sargasso Sea
NATAAFAVASSIGLSKKIIKKGLLNFTGVQRRFNELFKIRETLFFDDYAHHPTEIVEVLNSVKEVYKNKEIIVIFQPHRISRVNDLRREFSNSFKNCDSLVLCPIYSAGEKIKLKFNYKKFAKEIIKNSKVKLFMVRGEEDLYKFINQSIYGNKIVIGMGAGSISNWMRNLKNKINN

SEQ ID NO: 165129 - protein, 39 aa, Unknown
  Bacterial polypetide isolated from the Sargasso Sea
MDHLNKKGRIFLVGIGGIGMSGIAEILHNLGYEVTGSDQ

SEQ ID NO: 165130 - protein, 109 aa, Unknown
  Bacterial polypetide isolated from the Sargasso Sea
MKINLGKNELIHFVGIGGIGMSGLALIMNGLGYKVQGSDIANNRNIERLSEKKIRVFLNHKKENIKKTTVLVISSAIKKNNPELVEANKQNLPIYTRGDMLGHIVSFMR

SEQ ID NO: 165131 - protein, 184 aa, Unknown
  Bacterial polypetide isolated from the Sargasso Sea
LHNIRNATASAAICYSIGIPKKIIRHGLFKFNGVQRRFTHLFDMNGSKFFDDYAHHPTEIESVLEGVRNVYKKNQIFSIFQPHRISRLNSLKKEFSKSFINSDTVLLCPIYRAGENIKLKFSYEKFANSIIKNSNVKLILIKNELELYKYIKNVAYGNKIFIGMGAGSISNWLKNIKIRLNAFR

SEQ ID NO: 165132 - protein, 63 aa, Unknown
  Bacterial polypetide isolated from the Sargasso Sea
MKINLGKTELIHFVGIGGIGMSGLALIMNSLGFKIQGSDIADNKNLTTLRKKKIPIYLKHNKK

SEQ ID NO: 165133 - protein, 253 aa, Unknown
  Bacterial polypetide isolated from the Sargasso Sea
TGKSIICLDNKNLKKVLSKIKNKNILTYGENKYSNYRISNIKYNTNFSSFNLSFKDINKKRKTIENIQLKLLGKHNVLNAAAAISVSLNLGINQNILKKSLKNFSGVQRRMTKIFTKNGNDFFDDYAHHPTEIKSTLDSVKNVFKNRKIISIFEPHRFSRVLSLKKEFAKSFLKSNIVMLCPIYAAGEKKSYKFSMVKFAKLISRFSKTQVIIINNFKEIKNYLKKNLLNNEIIIGMGAGQISKQMRELKNFL

SEQ ID NO: 165134 - protein, 81 aa, Unknown
  Bacterial polypetide isolated from the Sargasso Sea
MKIKLAKTELIHFIGIGGIGMSGLALIMKGKGFRVQGSDISINKNIERLKKEKIKVFIGQKKENINSATILVVSSAIKKNN

SEQ ID NO: 165135 - protein, 217 aa, Unknown
  Bacterial polypetide isolated from the Sargasso Sea
MKIHILGICGTFMGGLARILIESGHKVTGSDNNFYPPMSDQLRELDVELTKGFEPSSMPEADLYVIGNALSRGNKCVEVILNKNLPYKSGPEMLGEIIKDRFVIAVSGTHGKTTTSFMIAKIFQSLGKDIGYLIGGISPDFSFSAKIGSDEIFVIEADEYDSAFFDKRSKFIHYSPNILLINNIEFDHADIFNDLDDIKKQFHHLLKIIPSSGKIIL

SEQ ID NO: 165136 - protein, 217 aa, Unknown
  Bacterial polypetide isolated from the Sargasso Sea
FEKIPSVGKGFICSDDHNLKKVLKKSINKNFYTYGENKTSNFQIINIKQTAKFSNFDIKINIPSKKKIIKGIKLPMIGIHNIQNATAAVSLAFTIGLPEKYIKLGLYNFKGVQRRFSHLFSHNNISFYDDYAHHPTEISSVLSGVRNIYKDKEIVCVFQPHRISRVINLKKEFSKCFKLADTVLLCPIYTANEKIKLNFTYHSFAKLIIKNSNVKLI

SEQ ID NO: 165137 - protein, 202 aa, Unknown
  Bacterial polypetide isolated from the Sargasso Sea
MVKLPNKDNIQIKDIKIPLLGIHNIRNTVGAIGVALTVGIPIQKIKSGLNNFKGVQRRFNKIFSYNNIDFYDDYAHHPTEIKVVLQGVKQVYKNYEKICIFQPHRISRVKDLKKEFSNAFKDADKVILCPIYTAGEKMKLGFSYESFAEKIIKNSNVKLFMVENNNQLAKYLKQTMYGKKIVISMGAGSISNWIKELPDLMK

SEQ ID NO: 165138 - protein, 239 aa, Unknown
  Bacterial polypetide isolated from the Sargasso Sea
KIINKVKNKNILTYGENPNANFRVSNIRFKFNYTVFDLDYKSQDRKKIKIKNIYLKLLGRHNVLNAVAAIVVCLNIGVSTRIIKSSLKKFSGVQRRMTKIFTKNNNDFYDDYAHHPTEISSTLNGIKNVSKKRKIISVFEPHRYSRVLSLKKEFAKSFVKSNIVILCPLYAAGEKKNSKFSQINFAKLISKMSKTQVIVLKKNEELKRYLKKNLFEDEIVVGMGAGLISKWMRDLKDIL

SEQ ID NO: 165139 - protein, 276 aa, Unknown
  Bacterial polypetide isolated from the Sargasso Sea
SDINKNKNIEKLKKQSVRVFIGHKKQNLKDVTIVVISSAIKKNNPELLEAKRRKLPIIRRGKMLANLVSLMKNIVVVGSHGKTTTTSLVSSIFENTKLDPTIINGGIINSIKSTAKLGKSDWSILEADESDGSFTHISPTYSIITNIDREHMDFYKSMNDLKNHFIHFIKKVPSFGKSFICIDDKVNNELIKDIKNKNFYTYGIKSKANFLIKNIIQNKHFSKFDLFVNLPNKKKIILKKFQIPLLGIHNIKNSVAAIAVALTVGIPVSNIKKGLK

SEQ ID NO: 165140 - protein, 188 aa, Unknown
  Bacterial polypetide isolated from the Sargasso Sea
LSTNLLGEHNVQNLTAVLSIIDDLGYKIKKSHILSFKGTKRRMNILGKLKKTIFIDDYAHHPTEIEKLINVISLYKKKNICLIIEPHRYSRLNDLYNEYLKVLKNINNLIILKTYEAGESYKKGMKNSKNLVNDLNVLNNQKTKYIDNYSDLFSLLDQYVKNKRENMIISAGAGEISNQIRFFYDSKK

SEQ ID NO: 165141 - protein, 209 aa, Unknown
  Bacterial polypetide isolated from the Sargasso Sea
YSFFDLLINVPGKNKKTINKIKIPLIGKHNIRNATAAFAVASSIGLSKKIIKKGLLNFTGVQRRFNELFKIRETLFFDDYAHHPTEIVEVLNSVKEVYKNKEIIVIFQPHRISRVNDLRREFSSSFKNCDSLVLCPIYSAGEKIKLKFDYKKFAKEIIKNSKVKLFMVRGEEDLYKFVNQSIYGNKVVIGMGAGSISNWMRNLKNKISN

SEQ ID NO: 165142 - protein, 297 aa, Unknown
  Bacterial polypetide isolated from the Sargasso Sea
TYVVITNIDREHIDFYRTFDNLNRAFRNFVENIPFYGVAFICIDSPDTENLCKDIKYRKLITYGFNRKSDLMISNVKVKNSLTYFDITINKSNLSKNKFIKNLVIPIPGDHNIRNACASIAVALELGIKEKTIKDVLKNFRGVERRFSFVGSVNNIKIIDDYAHHPTEIKNTLKAARLLCNGKLIVVFEPHRFSRIIDLYDEFINSFFDADILFVTKIYSAGEKQIADINEKIIANSIQKIGHKNVKCFKDEKFMEVELSEVSSSNDFIIFLGAGSISKKARSMEESMLKIIRKEFK

SEQ ID NO: 165143 - protein, 94 aa, Unknown
  Bacterial polypetide isolated from the Sargasso Sea
MNINLAKSEIIHFVGIGGIGMSGLALIMIGLGFEVQGSDKSLNKNVERLKKRRIKFFLGHSSSNIKKATILVISSAIKKSNIEVREAKKRNLPI

SEQ ID NO: 165144 - protein, 281 aa, Unknown
  Bacterial polypetide isolated from the Sargasso Sea
QLTELDIELTKGFEPSSMPEADLYVIGNALSRGNKCVEEILDKNLPYKSGPEMLGEIIKDRFVIAVSGTHGKTTTSFMITKIFQSLGKDIGYLIGGISPDFSFSAKMGSDEIFVIEADEYDSAFFDKRSKFIHYSPNILLINNIEFDHADIFNDLDEIKKQFHHLLKIIPSSGKIILFNHDKNALDVINEGCWADIIEINGNASRAGFDSSSSVIKFDGKSVCINDLPFYGSHNNLNAAAAIISAASYGINLNVAHNGLKDFSGVLRRLEEKGTFNGITIL

SEQ ID NO: 165145 - protein, 137 aa, Unknown
  Bacterial polypetide isolated from the Sargasso Sea
MFDINNTPFFDDYAHHPTEISCLLEGVRKVYNKKEIVCIFQPHRLSRLKKLKHEFSKCFSKADTIFLCPIYKAGENIKLGFSYYSFAKLLAKNSKVNLIMLKDEFELKKVTKNLAFGNKIFIAMGAGSISNWVRNLN

SEQ ID NO: 165146 - protein, 281 aa, Unknown
  Bacterial polypetide isolated from the Sargasso Sea
GHKVSGSDNNFYPPMSDQLRELDVELTKGFEPSSMPEADLYVIGNALSRGNKCVEEILNKNLPYKSGPEMLGDIIKDRFVIAVSGTHGKTTTSFMIAKIFQSLGKDIGYLIGGISPDFSFSAKIGSDEIFIIEADEYDSAFFDKRSKFIHYSPNILLINNIEFDHADIFNDLDEIKKQFHHLLKIIPSSGKIILFNHDKNALDVINEGCWADIIEINGNASRASFDSSSSIIQFDGKSVCINDLPFYGSHNNLNAAAAMISAASYGIDLNDAYDGLKDFSG

SEQ ID NO: 165147 - protein, 202 aa, Unknown
  Bacterial polypetide isolated from the Sargasso Sea
MDNQRSKKYAFCIRQPGFHNIYNATASIAVCIEEGLTINAIKKGIKEFTGVGRRYEKADIEINSNNKILIDDYGHHPIEILSNIKACKEEFPRKKICMIFQPHRFSRTAQLFDDFIQVLKKVDSLIMLDIYAASENPIKGIDSRTIVETLKQNGHKDVSYIKKHNDVIKLIQSKENSFDVLITQGAGSVSSVCELIKETWKK

SEQ ID NO: 165148 - protein, 224 aa, Unknown
  Bacterial polypetide isolated from the Sargasso Sea
YEVSGCDFNTYPPMSDLLQNQDIDLITGYDVKDLPKADSYVIGNALSRGNPLIEEILNKKKNYISGPDWIYQNVLKERRVIAVSGTHGKTTTTSMIAWILEDLGYNPGYLVAGNPKNFGKSSSLGSKDIFVIEADEYDTAFFDKRAKFIHYRPEVLVINNLEFDHADIYQDLEQIKIQFHHLVRSMSSNSSIVTPTNNKAIDEVLSMGLWSNLVQYGSESESKY

SEQ ID NO: 165149 - protein, 66 aa, Unknown
  Bacterial polypetide isolated from the Sargasso Sea
MKINLGKTELIHFIGIGGIGMSGLAIIMNGLGFRVKGSDISNNKNIERLKEKKILIFLKHNKKNLK

SEQ ID NO: 165150 - protein, 284 aa, Unknown
  Bacterial polypetide isolated from the Sargasso Sea
VTNIEYEHVDHYKNIEELIKTMQKFEQNCEQLIANFDCKNVKNNIKGSIWFSTKKIHQMDFALIPKESNGYEIIAEYYEKEKFIDIIQVPIPGIHNLSNTIAAIAACRTAGIVFKDLKKAIKLLKLPERRFDYKGLWKNRLIVDDYAHHPSEIDAAISIASSIIKTKNNMSKLSPKRLVSVFQPHRFTRTKTFKKELAKSLVKSDLVFVTPIYSAGEDLIEGIDNHSIGSEIKKLNPNIEIYTPNNNKELIKLIKEKTIENDLILIMGAGDINTVFTNLFLELI

SEQ ID NO: 165151 - protein, 79 aa, Unknown
  Bacterial polypetide isolated from the Sargasso Sea
MKIKLGKTELIHFIGIGGIGMSGLALIMKELGFKVQGSDISINKNIERLKKNKIKVFEGHKISNLNKTTVLVKSSRIKK

SEQ ID NO: 165152 - protein, 221 aa, Unknown
  Bacterial polypetide isolated from the Sargasso Sea
MNQKPSGKLRRGWTTGACAAAATKAAYQALITGDFPDTVSIVLPKGEVPVFQLFNKEIGPDFTAASIIKDAGDDPDVTDRAEIKIKVMWGIKGSGVVFKAGPGVGTVTKSGLKLEIGEPAINPVPQQLMRNVVTEIAEKFQDTGDLVITVSVPGGKELAKKTWNPRLGIVGGISILGTTGIVIPYSCSAWIHSIHRGIDVARANFLPHVAGCTGSTSEKAQ

SEQ ID NO: 165153 - protein, 177 aa, Unknown
  Bacterial polypetide isolated from the Sargasso Sea
IRNATAAAAVSITIGISINIIKESLSRFEGVQRRFNKVFTFRDVNFFDDYAHHPTEITELINGVNKVYKKEEIYCVFQPHRVSRLNDLRKEFSLSFKKADAVILCPVYKAGEKIKLNFNYLSFAKEIIKNSKVKVYLINDQYELGKFIKQYIHPNKVVIGMGAGSISNWMRQLPKLL

SEQ ID NO: 165154 - protein, 77 aa, Unknown
  Bacterial polypetide isolated from the Sargasso Sea
MKIKLAKSELIHFVGIGGIGMSGLALIMNQLGFKIQGSDISYNKNIERLKKNKIKIIIGHKKQNISNSTILVVSSAI

SEQ ID NO: 165155 - protein, 157 aa, Unknown
  Bacterial polypetide isolated from the Sargasso Sea
MLKKRNVHFIGIGGIGMSAIAEILHGKGFNVSGSDINDNLIIKRLRKKGIKIFSRHTHQNVINADIVVYSSAIKFSNLEIKSALKKKIPLYSRAMMLADVMRLKSSITVSGSHGKTTSTSLISSILEGANFDPTIINGGIINKIGANAKLGKGEWIV

SEQ ID NO: 165156 - protein, 238 aa, Unknown
  Bacterial polypetide isolated from the Sargasso Sea
MIAKILSVANLSPTYIVGGKVLSTDENSDLGKGKYIVAEADESDGSFVHLQPDVAVLTNIDDDHLAHFNNIFENLLDSFVLFSENVPFYGYLIINGDDKNIKKISKRISRSQVTFGESKECDYKITKIISKNGKQDFQIFDKKTRKVHKFKINLPGKHNVFNATAAIAVALEEGISISSIRNGIKEFTGVGRRYEKHDIKIDEKSLALIDDYGHHPLEIESNIKAYKEEYKNKKVCMI

SEQ ID NO: 165157 - protein, 261 aa, Unknown
  Bacterial polypetide isolated from the Sargasso Sea
MKIHILGICGTFMGGLAQILVEKGHSVSGSDKQFYPPMSDQLDSLGVDMVMGYEESDLPAADLYVIGNALSRGNPSVEHILNHKLEYTSGPKILGEIIQDKTIIAVSGTHGKTSTSFLICEIFKARGIDVGFLVGGVSESFKNSARLGSSNFFVVEADEYDSAFFDKRSKFIHYHPHTFIINNIEFDHADIFEDLSDILKQFHHAVRTVPENGHILFHGKDKNILKLIDMGCWSNLHQIGDKENIQLAIEEGVIKYDSEKI

SEQ ID NO: 165158 - protein, 148 aa, Unknown
  Bacterial polypetide isolated from the Sargasso Sea
PLLGLHNMKNSVAAAALALTVGLPINNIKKGLKNFKGVQRRFNKIFNFNDVDFYDDYAHHPTEIKEVLDGVKNVYKEYEKVCIFQPHRISRLKDLKKEFTFAFKNADKVVLFPIYTAGEKLNLGFSYINFAKEIIKNSKVQLFLIDDK

SEQ ID NO: 165159 - protein, 45 aa, Unknown
  Bacterial polypetide isolated from the Sargasso Sea
MKIKLAKTELIHFVGIGGIGMSGLALIMKGKGFKVQGSDITNNKN

SEQ ID NO: 165160 - protein, 110 aa, Unknown
  Bacterial polypetide isolated from the Sargasso Sea
AVVQPHRYSRLSALFVDFCGCFHDADEVLVANVYAAGETPIEGVDRDALVSGLRDHGHKAASPLLHQDDLAGEIVARTSSGDLVMCLGAGDITNWAANLPDELEKLGGTE

SEQ ID NO: 165161 - protein, 248 aa, Unknown
  Bacterial polypetide isolated from the Sargasso Sea
ICIDSKNIKKIFSRIKNKNILTYGENKNANYRISKIRYKVDYSIFDLSYRDITRRKKTIRNIQLKLLGKHNVLNAAAAITVCLNLGVDQNIMKKSLKKFSGVQRRMTKIFSKNKNDFYDDYAHHPTEIASILEGVKNVYKKRKIITIFEPHRYSRVLSLKNQFARSFEKSDLVLICPIYPAGEKKDSRFKITEFSKQISKLSKTQVIIIKNFKEIQNYLKKNLVSDEIIIGMGAGVISKHMRELETFL

SEQ ID NO: 165162 - protein, 264 aa, Unknown
  Bacterial polypetide isolated from the Sargasso Sea
MQSNHSNLKSIFFAGICGTGMASLAVLLKLRGHIVSGSDENVYPPMSDLLAENNVAVHEGFSPKNLEPLPDLVVIGNALSRGNPEVEAILDLKLPYISMAELLKEHFIRGKKSLVVTGTHGKTTTTSLLAWVFETAAKNPGFMIGGIAENFGTSCRDTKGSFFITEGDEYDTAFFDKRSKFFHYLPEQLILNNLEFDHADIFNSLDEIKKAFRLMLRLIPKSGLIAANGDDLNVQAVLHAANSPVIRFGFGEPCDVRVDSIKNS

SEQ ID NO: 165163 - protein, 182 aa, Unknown
  Bacterial polypetide isolated from the Sargasso Sea
NVLNAAAAIVLCLQEGIAVKVIQDSLSNFMGIDRRMQILGEKKIGSSTCLYIDDYGHHPTEIKKTIQAIRTSFPDFDLKMVFQPHRFTRTKDLYEEFIEVLSHVDELFLLDIYSAGENPIEGINSSSLQNSLIRSGFDNVKLLNSNEVAKEYDKDLAKDTIFVFQGAGDISSISQSIFEEFK

SEQ ID NO: 165164 - protein, 157 aa, Unknown
  Bacterial polypetide isolated from the Sargasso Sea
MHIHILGICGTFMGGLAALAREAGHKVTGCDAGVYPPMSDQLRALGIDLIEGFSADQLALQPDMFVVGNVVSRARLADGSPKFPLMEAILDAGLPYTSGPQWLAEHVLQGRHVLAVAGTHGKTTTTSMLAWILESAGQQPGFLIGGVPLNFGVSARL

SEQ ID NO: 165165 - protein, 125 aa, Unknown
  Bacterial polypetide isolated from the Sargasso Sea
MNLHSDSPLKIYFSGICGTATASLAILMKNRGHEVQGSDENIYPPMSDLLEQNQIRIDSGFHQSNLEPKPDMVVIGNALSRGNPEVEAVLSLRIPYISVPELLKNHFIQNRCSLVVSGTHGKTTT

SEQ ID NO: 165166 - protein, 66 aa, Unknown
  Bacterial polypetide isolated from the Sargasso Sea
MKIDLGKNELIHFVGIGGIGMSGLALIMNGLGYKVQGSDIAHNRNIERLNEKKIKVLLNHKKENIK

SEQ ID NO: 165167 - protein, 212 aa, Unknown
  Bacterial polypetide isolated from the Sargasso Sea
IFNIIQSRKYSKFSIRIKIPSKTKIIKNISIPLLGLHNIKNAASALAVAFSIGVSDKIIKLALKNFKGVQRRFNYLFEINKVPFFDDYAHHPTEISSVLDGVSKVYDKEKIVCIFQPHRISRVKNLKIEFSNCFKNANTVLLCPIYKASETIKLGFSYTSFAKLIAKNSKVNLIMLKNEADLKKIVRNIAFGNKIFISMGAGSITNWVRNLN

SEQ ID NO: 165168 - protein, 68 aa, Unknown
  Bacterial polypetide isolated from the Sargasso Sea
MKKINLGNKEVIHFVGIGGIGMSGLAQIMKNMGFKIQGSDQNKNKNTISCVKSGIKVFVGHSKKNVKK

SEQ ID NO: 165169 - protein, 464 aa, Unknown
  Bacterial polypetide isolated from the Sargasso Sea
MHIHILGICGTFMGGLAVLARGAGHTVTGCDAGVYPPMSTQLEAQGIRLIEGYGAEQLDGLNADLFVVGNVVTRGNPLMEAILNRGLPYVSGPQWLGEHVLNGKWVLAVAGTHGKTTTSSMLTWLLEDAGLNPGFLIGGVPLNFGVSARLTDSSFFVIEADEYDTAFFDKRSKFVHYRPKTAILNNLEFDHADIFPDLAAIETQFHHLIRTVPGIGRIVTNGREDALERVLTRGCWSEVERFGVQGGWETLPAEDGEPVDERFAVYHNSERVGVVEWQVQGEHNRMNALAAIAAARHVGVPPAQAAKSLASFRNVKRRMEVRGSVDGVTVYDDFAHHPTAIETTVAGLRARVGHENTRILAVLEPRSNTMKLGVMKAQLPASLAGADLVFGYGAPSGRDALGWNLAEALAPLGGKAQAFDNLDALVKAVVHAARPGDQILVMSNGGFGGVHQKLLDALSARGTS

SEQ ID NO: 165170 - protein, 297 aa, Unknown
  Bacterial polypetide isolated from the Sargasso Sea
GSFVFIPPTYSIITNIDREHMDYYGTMDKLNKYFENFVNKVPSFGKSFICLDEKNNRNLIKNIKNKNFYTYGLDKKSNFCIKNIKQFKEFSEFDLNIKLPNKKNQIIKKFKIPLLGNHNIKNSVAATALALTVGLPINNIKKGLKNFKGVQRRFNKIFNFNNVDFYDDYAHHPTEIKEVLDGVKNVYKDYEKICIFQPHRISRLKDLKKEFTFAFKNADKVILFPIYTAGEKLKLGFSYTNFAREIIKNSKVQLFLVDDKFQLAKFIKVNIYGKKIVIGMGAGTISSWMRELPKLLS

SEQ ID NO: 165171 - protein, 461 aa, Unknown
  Bacterial polypetide isolated from the Sargasso Sea
MHIHILGICGTFMGGLAVLAREAGHTVTGCDAGVYPPMSTQLEAQGITLIEGYGAEQIDLKPDLFVIGNVVTRGNPLMEAILDRGLPYVSGPQWLGEHVLAGKWVLAVAGTHGKTTTSSMLAWLLEDAGLNPGFLIGGVPLNFGVSARLTDSSFFVIEADEYDTAFFDKRSKFVHYRPRTAVLNNLEFDHADIFPDLAAIETQFHHLVRTVPGVGRIVTNGRSDALERVLARGCWSEVERFGVDGGWQALPAEDGVPVDERFAVYSHAERVGEVAWQVQGDHNRMNALAAIAAARHVGVPPAQAAESLASFRNVKRRMEVRGSVDGVTIYDDFAHHPTAIDTTIAGLRARIGRQNARILAVLEPRSNTMKLGVMKSQLPASLADADLVFGYGAPTGRDALGWNLAEALAPLGEKAHAFDDLHLLVKSVVAAARPGDHVLVMSNGGFGGVHQKLLDALGSRP

SEQ ID NO: 165172 - protein, 175 aa, Unknown
  Bacterial polypetide isolated from the Sargasso Sea
MRIHILGICGTFMAGLAQILKESGHDVSGTDIQFYPPMSEYIEKIGIKTFKGYEKKSLPKADLYVIGNSLSRGNECVEEILERNLPYVSGPEILGKELKERKVFAVSGTHGKTTTSYMLAHIFLEQGREIGYLVGGISKDFENSASLGRDSIFVIEADEYDSAFFDKRSKIIHYC

SEQ ID NO: 165173 - protein, 335 aa, Unknown
  Bacterial polypetide isolated from the Sargasso Sea
MSALAMGLLKKGCSVSGSDLVKNDETNKLEKLGAVIFTSQIRQNIEFIISKFTNKLINFVVSSAIKPENEEFSYCREKNLSIKHRSEILAMLMRTYTALAVAGSHGKTSTSTFLSTILELCTNNSSSITGGIIPIYNSNCHLENTKYLVAEVDESDGTINKYKSDIGIINNIDFDHCDHFSNLSEVISSFKSFATNSKKLLLNFDCETSRNNFYSNCKWSNTTAKNVAYAIIPTEINSKYTIGKYYENGNFISSLNIPIPGLHNLSNITAAIAASRMIGVDFIEIKKNIKHLKLPKKRFEFRGQIDQRSLYDDYAHHPNEIKETIKLGEIIYSAK

SEQ ID NO: 165174 - protein, 321 aa, Unknown
  Bacterial polypetide isolated from the Sargasso Sea
MRIHILGICGTFMAGLAQILKESGHEVSGSDNQFYPPMSDYIGNIGIKTFEGYSKKDLPKADLYVIGNALSRGNESVEEILEKKLPFVSGPEMLGRELKSRDVFAVSGTHGKTTTSYMLAHIFRDQGKDVGYLIGGISEQFLDSAKLGTDKIFVIEADEYDSAFFDKRSKFIHYSPLNLIINNIEFDHADIFNNINDIKKQFHHLVKIIPKSGSLIYFDDDQNSSDVIKSGLWCDKVVIGSDHIAIDILHKALIVDKKKYSLKDMPLSGEHNFKNYVCAILAATKGGLTIEQSIDSLKRFRGVKRRMDLVADISNIKVTMI

SEQ ID NO: 165175 - protein, 446 aa, Unknown
  Bacterial polypetide isolated from the Sargasso Sea
MHIHILGICGTFMGSLAVLAKESGHHVTGSDINCYPPISDQLDEMGIDVIPNYDLDQLKLSPDLIVIGNVMTRDTEIIEYILNHGLTYTSGPEWLGKNILADRRVISVAGTHGKTTTSSIIASALKELGEDPGYLIGGVPIDFEASASLGSSPYFVIEADEYDTAFFDKRSKFIHYPAETFVINNLEFDHADIFKDLDQIKWHFHQLIRSLPSKTEVRVPINDDNISDLLDMGNWSSTKSFGMSDEADYSIISNDENLHIKEGDVLHGNLSPKLFGKHNLMNIISAFSALRSIGFEGDEILDAINQFNGVKRRLQQLDQFISHNVFDDFAHHPTAIKYGINAIKERFPDKKLCVLAELASNTMRKGTLKDEVVNSFSEADYAFISASDDFEWDIENEFGSHEGVHVVKSNQDLINKLASIDTDGLNFLIMTNKSSLPFINALESRI

SEQ ID NO: 165176 - protein, 238 aa, Unknown
  Bacterial polypetide isolated from the Sargasso Sea
MHVHILGICGSFMGGIAAIAKSLGHKVTGSDKNVYPPMSTQLEALGIELTEGYCESQFDPAPDMVVIGNAMSRGNPAVEYVLNRNLPYTSGPQWLLDNLLKDRWVIGLSGTHGKTTTSSMVAWILEHASLNPGYLIGGVPENFGVSARVGESPFFVIEADEYDSAFFDKRSKFVHYRPKTLVINNLEFDHADIFADLGAIQTQFHHLVRMVPENGLILTPNNTPAIEDMLKKGCWSSR

SEQ ID NO: 165177 - protein, 371 aa, Unknown
  Bacterial polypetide isolated from the Sargasso Sea
MHIHILGICGTFMGSLALLARESGHEVTGSDINCYPPISDQLDEMGIDIIPNYDIDQLNIEPDLVVIGNVMSRDMEIIEHILDKGFAYTSGPEWLGKNILSDRKVISVAGTHGKTTTSSIIASALKHMGEDPGYLIGGVPINFEASAALGSSPYFVIEADEYDTAFFDKRSKFIHYPAETLVINNLEFDHADIFKDLDQIKWHFHQLIRSLPSQTKVRVPFGDENIKDLLSMGNWSSTKSFGFNKEADYTMIIKDDHFMIKECDAIEGTMKPKLFGKHNLMNIVSAFSALRSLGFDRERIFEAINQFDGVKRRLQHLQQFENHLVFDDFAHHPTSIKFGIDAVKERDPNKKLCVLAELASNTMRQGTLKDE

SEQ ID NO: 165178 - protein, 329 aa, Unknown
  Bacterial polypetide isolated from the Sargasso Sea
MRIHILGVCGTFMAGLAHILKESGHEVSGSDVQYYPPMSDYLEKIGIKIIQGYQKSLMPKSDLYVIGNALSRGNESVEEILDKRLPFVSGPEMLGKELKNRNVFAVSGTHGKTTTAYMLAHILKHQGKDIGYLIGGISKNFDNPASLGTHKSFVIEADEYDSAFFDKRSKFIHYSPMNLIINNIEFDHADIFDDIKSIKKQFHNLIKIIPCSGNIIYFEDDENSNDLINDGIWCQKTAINSDIIKTNFKNMEFTLNENKFSLKDLPLIGEHNFKNYVAAILAARLDKISINDSIESLKTFKGVMRRLEPIAETLNIKIYDDFAHHPTAI

SEQ ID NO: 165179 - protein, 432 aa, Unknown
  Bacterial polypetide isolated from the Sargasso Sea
MRIHILGICGTFMAGLAQILKESGHDVSGADAKFYPPMSDYLKKIGIKTIEGYEKKSLPEADLYVIGNALSRGNECVEEILDQKLPYVSGPEMLGKELKNRNVFAISGTHGKTTTSYMLAHIFLDQGREIGYLVGGISDDFDNSACLGKDPIFVIEADEYDSAFFDKRSKFIHYSPTNLIINNIEFDHADIFNDIEDIKKQFHHLIKIIKSSGNIIYFDDDSTSKEVIEKGIWCNKIGINSNGVKADFESKELIIDDEIFQLNELPLIGEHNFKNYVCSILAAKLVGISETESINSLKKFKGVKRRMDFIKEISGIRIYDDFAHHPTAIKLSCSAIRNKYSDKKILGLIELGSNTMSSGYHKENLINSFDSLDEFLMLDPNKNYKINNAFDSENELLKNLEEKIFDYDIILIMTNKDSRKFINPIINSIEKK

SEQ ID NO: 165180 - protein, 467 aa, Unknown
  Bacterial polypetide isolated from the Sargasso Sea
MRTPFTGKGSGMHIHILGICGTFMGGLAVLAKQLGYRVTGSDANVYPPMSTQLEQQGIELTEGYDPSQLDPAPDLVVVGNAMSRGNPCVEYVLDRNLPYISGPQWLLEHVLQDRWVLAVAGTHGKTTTASMLAWVLEYAKLEPGFLIGGVPGNFPVSARLGSAPFFVIEADEYDCAFFDKRSKFVHYHPRTLVMNNLEFDHADIFPDLAAIQRQFHHLMRTVPSNGRVLFPKGDENLAAVRKMGCWSEVELVGQDDAQWKAVKLADDGSAFEVWLDGVKQGEVHWECIGEHNVNNGLMAIAAARHAGVMVEHGIAALCQFKSPKRRMELKGEVAGISVYDDFAHHPTAIETTLGGLRAKVGKARILAVLEPRSNTMKLGVHKEELAGCFDGADEVFFFQPPNIGWDLGEVTAHMTRPAKVFNDLETLINRLVAECRDGDHILIMSNGGFGGIHDKLIARLKDYHGQL

SEQ ID NO: 165181 - protein, 193 aa, Unknown
  Bacterial polypetide isolated from the Sargasso Sea
MHIHILGICGTFMGSLAVLAKESGHHVTGSDINCYPPISDQLDEMGIDVIPNYDVDQLKLSPDLIVIGNVMTRDTEIIEYILNHGLTYTSGPEWLGKNILANRRVISVAGTHGKTTTSSIIASALKELGEDPGYLIGGVPINFEASASLGSSPYFVIEADEYDTAFFDKRSKFIHYPAETFVINNLEFDHADI

SEQ ID NO: 165182 - protein, 314 aa, Unknown
  Bacterial polypetide isolated from the Sargasso Sea
MKIHILGICGTFMGGLARILSESDHDISGSDVAFYPPMSDQLNDLGINLTSGYAAKDLPGADLYIIGNALSRGNESVEYILEKKLNFTSGPAMLGNVLKDKNVLAVSGTHGKTTTAAMLCKIMHDKYKDIGYLVGGVAEDLEGSAKLGKGEYFIIEADEYDSAFFDKRSKFIHYSPNTLIINNIEFDHADIFSDVDEIYKQFHHLVRIIPNNGNIIFHSDDKDVGKLIQMGCWSNLFALGEESISYNQQENIISADNNHFPIDKLPFFGRHNYQNAVAAMHAAYLNGVDYKSAFNSLQGVWWRKETIAGCIQQR

SEQ ID NO: 165183 - protein, 275 aa, Unknown
  Bacterial polypetide isolated from the Sargasso Sea
MHIHILGICGTFMGGIAAIAKSLGHKVTGSDANVYPPMSTQLEQLGIELTQGYDPVQLQPAPDLVIIGNAMSRGNPAVEYTLDQNIPYNSGPQWLAEQVLHQRWVLAVSGTHGKTTTSSMLAWVLEYAGLKPGFLIGGIPQNFDSSARLGDSPFFVIEADEYDTAFFDKRSKFVHYRPRTLVINNLEYDHADIFPDLAAIQRQFHHLLRMVPSTGLVLSPAKVEAVDQTLAMGCWSEQQRYGKDWTVELKQPDGSVFELFYQSVSQGTLSLGFMW

SEQ ID NO: 165184 - protein, 266 aa, Unknown
  Bacterial polypetide isolated from the Sargasso Sea
KKSFLDFSDNIPFFGYVIANYDDKNTRDILKKIKRRVITFGSNKKSDIIISEINYFFDYVDFKIYIKDTNKKHKFRLSLQGKYNIYNAVAAIAVAIEEGISIQTIRAALKSFSGVERRLERFKLIIKNKQVTHIDDYGHHPKEIEQVIVSLRKHFKKKKVLMIFQPHRFSRTKMLFKDFVSTLNKVDKVFLLPIYSASEKEIKGVSSKKMAQKLNKVNGKDFCNLVNHENVNDMVEQCIHKYDVVITQGAGNVSMVSKGLIKRWKI

SEQ ID NO: 165185 - protein, 115 aa, Unknown
  Bacterial polypetide isolated from the Sargasso Sea
TTQHQKYGKTKKKIVVFQPHRYTRTKDLFDEFIKTLSNIENLLLLDIYPASEKIIKGYEGKDLFHALKKNGSNVVFCQNHNEVIEKLENMTAGNEVIITQGAGTTSELARKISNQ

SEQ ID NO: 165186 - protein, 216 aa, Unknown
  Bacterial polypetide isolated from the Sargasso Sea
IKNIIQDKLFSKFDLSINLPNKKKTILKNFKIPLLGVHNIRNSTAAIAVALTLGIPVSNIKKGLKNFKGVQRRFNKIFTFNGVDFYDDYAHHPTEIKSVLEGVKKVFDKCEKVCIFQPHRISRLKDLRNEFTHCFRDADTIILCPIYTAGEKIKLGFNYNDFAREIIKNSKVKLFMIKNNLELAKFLKQNIYGNKIVIGMGAGSISNWMKKLPKLM

SEQ ID NO: 165187 - protein, 133 aa, Unknown
  Bacterial polypetide isolated from the Sargasso Sea
MRRRIRKKNEESEINITPMLDIVFIMLIFFIVTTSFVKEISIDVNRPTKSPIKEQKKSDVISVRILDSGQILIQERLIALDAVRANIESNLALKPQASVVVVSDRDADAGLLVKVIDQSRLAGASNVSLAAQK

SEQ ID NO: 165188 - protein, 133 aa, Unknown
  Bacterial polypetide isolated from the Sargasso Sea
MKRRIKKKNEESEINITPMLDIVFIMLIFFIVTTSFVKEISIDVNRPTKSPIKEQKKSDVISVRILDSGQILIQERLISLDAVRANIESSLALKPQASVVVVSDRDADAGLLVRVIDQSRLAGASSVSLAAQK

SEQ ID NO: 165189 - protein, 345 aa, Unknown
  Bacterial polypetide isolated from the Sargasso Sea
TTTTSLISSIFAKSNIDATVINGGILNAFENSARLGKSNWCILESDESDGSFLNLPLTYSIVTNLDSEHLDYYKSLENLKKNFINFINKTPSFGKNFICIDDKNNKSILSKLKNTNFLTYGVDKKSNFRIFNISQNIYYSKFDIKIAIPGKKDKYLRNLKIPLNGLHNIRNATAASAVASTVGISKDFIKNGLKSFKGVQRRFSFLFKYRDSIFIDDYAHHPTEISEVLSGVKNVYKNKKIICVFQPHRISRVKNLRKEFSKSFKNADEVILCPIYKAGETSKTEINYDNFAKEIIKNSDVKLILINDQYELSKYVRQCVYGQSIVIGMGAGTISNWMKMIPNLI

SEQ ID NO: 165190 - protein, 156 aa, Unknown
  Bacterial polypetide isolated from the Sargasso Sea
MSYNKYFFIGVGGIGMSSIASYLIDTKNIVFGYDRSSNKLVDKLIDNGLKFTDKLDIGLVPQEFLEDNVIVVYTPAIKNDNVFLDFFANKKRNKIFKRSEILGQISANSKCIAVAGTHGKTSTTAILSHLLYSNQVKFRSFVGGIMKGFDSNYLST

SEQ ID NO: 165191 - protein, 432 aa, Unknown
  Bacterial polypetide isolated from the Sargasso Sea
MRIHILGICGTFMAGLAQILKESGHDVSGSDIQFYPPMSYYLGSLNIKTSKGYKKDSLPKADLYVIGNAISRGNDCVEYILENNLPHTSGPEILGRELKNRKVYAISGTHGKTTTSYMLAHIFSKIGKDIGYLIGGMSKNFDDPAKLGTDQIFVIEADEYDSAFFDKRSKFIHYNPTNLIINCIEFDHVDIFDDIKDIRKQFNHLIKTIKKSGNVIYFKDDHNSAKVIENGIWCNNIIINSDEIATNFSKRELLYDEITYSLDSLPLIGGHNFKNYVCAIVAARLENISIEESIKALMSFEGVKRRMDKIAEISGVKIFDDFAHHPTAIRLSTSALKDNYPDKKILGILELGSNTMSSGFHKEDLLNSLASLDQTLILDHKNVYTQDNIFNDLDCLLSNIKDTIIDYDIILIMTNRDSQKFTKPLMSYLESK

SEQ ID NO: 165192 - protein, 133 aa, Unknown; identical to SEQ ID NO: 165187
  Bacterial polypetide isolated from the Sargasso Sea

SEQ ID NO: 165193 - protein, 201 aa, Unknown
  Bacterial polypetide isolated from the Sargasso Sea
DKKTKKIHKFKINLPGKHNVFNATAAIAVALEEGISISSIKSGISNFTGVGRRYEKHDININSKSITLIDDYGHHPLEIESNIKAYKEEYKNKKVCMVFQPHRFSRTAQLFDDFIKVLKKTDSLIMLDIYSASEKPIKGINSKTIVETLKQNGHKDVIYLKNHDQIIDLISDKKDTFDILVTQGAGSVSKVCEIIKNRWEA

SEQ ID NO: 165194 - protein, 90 aa, Unknown
  Bacterial polypetide isolated from the Sargasso Sea
MTFRKIKNVFFVGIGGIGMSGIAELLLNLGFNVSGSDITENDNVQRLKNLNIDVKIGHSPSNLNQDTDVLVYSSAVPIENPEIVRARQKG

SEQ ID NO: 165195 - protein, 133 aa, Unknown
  Bacterial polypetide isolated from the Sargasso Sea
YYDDYAHHPTEICELLRSIKTVYKSKKIISVFQPHRISRVNYLKHRFTKCFEFSDRVLLCPIYKAGENLKLKFDYFRFAKEIIRNSKVELIMINNERELAKYVKNNIYRDNIVIGMGAGTISNWMRNLPKLIK

SEQ ID NO: 165196 - protein, 275 aa, Unknown
  Bacterial polypetide isolated from the Sargasso Sea
GKSDWCVLESDESDGSFLHLPATYSIVTNIDQEHMDYYKNLKNLKDKFVSFIENTPSFGKSFICIDDVNIKTIVKNLNHKNFYTYGVDKNSNYRIFNIRKKIEFSTFDLKISLPGKKLKIIKNIKIPIIGIHNIRNATAALAVSSSIGISDATIKKALNNYEGVQRRFNKLFTFQEAIFFDDYAHHPTEIREVLKGAREVYKNKKIICVFQPHRISRLKNLRKKFASAFENADTVLLCPIYKAGENILLGFSYEKFAKEIMNKSKVKLVFVNDQY

SEQ ID NO: 165197 - protein, 133 aa, Unknown; identical to SEQ ID NO: 165188
  Bacterial polypetide isolated from the Sargasso Sea

SEQ ID NO: 165198 - protein, 282 aa, Unknown
  Bacterial polypetide isolated from the Sargasso Sea
MLTGITRHNRIHLIGVGGSGMIGIARILLKQGFDVSGSDLNDSDELQILKSLGLRLQNNHSPNLIKDAELIIVSSAISANNLELIYANKNKIIVIPRSEMLSSLMKPFRSIAVAGSHGKTTTTSLIANIFNEADLSPTYVIGGKILSDDQSADLGKGEYMIVEADESDGSFLSLNPEIIVITNIDNDHLAFYDSKQSKLNEGFLKFINNLPFNGYVLLNQDDPNVRLIKNNIKRKVITYGTSYPCDYQIIFHDSENFSQEFKVINKKNRLSIDLKTSLLGKT

SEQ ID NO: 165199 - protein, 174 aa, Unknown
  Bacterial polypetide isolated from the Sargasso Sea
MIGVDFLEIKKNIKYLKLPKKRFEFRGQIDKRTLYDDYAHHPNEIKETIKLGRLLIQQKQNIECQKSRLIAIFQPHRYSRVKQFTKEFAEELSKADVIYVTSIYGAGERNEDKITSKIITDLIYKKNKNVYYINNYYEVTKNFYEITQKGDLILNMGAGDCHNFWSILNKKQLK

SEQ ID NO: 165200 - protein, 62 aa, Unknown
  Bacterial polypetide isolated from the Sargasso Sea
MKLFKKIKKIHFVGIGGAGMIGIARLLLKKGYKISGSDITDSSELRKLRKDGARVLLDIQKR

SEQ ID NO: 165201 - protein, 147 aa, Unknown
  Bacterial polypetide isolated from the Sargasso Sea
FEIKKNKTNIFVVDDYAHHPSEVEATINAAKSGWNKRIVCVFQPHLFSRTRDFFKEFAKSLFKSDIIIITKIYPAREKPIDGVNSNLILDELGHLGHSSIYSLENLNDLNNVLEKIVQPNDMVITMGAGDIWRYSDKYNEYLDGKLI

SEQ ID NO: 165202 - protein, 432 aa, Unknown
  Bacterial polypetide isolated from the Sargasso Sea
MRIHILGICGTFMAGLAQILSESGHEVSGSDIQFYPPMSDYLENTGIKTIKGYDKELLPEADLYVIGNALSRGNESVEEILEKKLSFLSGPEMLGQELKGRNVFAISGTHGKTTTSYMLTHIFRDQGRDIGFLVGGISKNFDNSAKLGTDKTFVIEADEYDSAFFDKRSKFIHYSPINLVINNIEFDHADIFDDIEDIKKQFHHLVKIIPQSGNIIYFDDDNNVNDVISKGLWCNKIPINSQKININFESMELVVEEEAFSLKDLPLIGEHNFKNYICAILAAKLDGVTIQESINSLKSFKGVKRRMDYVGEISSIKIYDDFSHHPTAIKLSTSAIKNKYPDKRIIGLIELASNTMSSGHHEENLIDSFSSLDEVLLLDHKKVYDYKNAYDSIESLIIKLQEIVFDYDIILIMTNKDSQKFINPIINHLESK

SEQ ID NO: 165203 - protein, 286 aa, Unknown
  Bacterial polypetide isolated from the Sargasso Sea
ARLGLITNLELDHTDHYSGLDDLIGTMRRFADGCDQVLANRDCATLEDHIQADAWWSVTQANGVDYAALPLQLDGDRCHARFYEQGEPVGDFVLPLPGLHNLSNAAGALAACRMEGVPFDRLVDGLSALKPPGRRFDWRGTWEGRHIVDDYAHHPSEVKATLAMAQLMVSSGRSPLPTPPQRLLAVFQPHRYSRTQEFLDSFANALQNCDSLLLAPVYGAGETPLSGVCSQTLADRIHELRPDLEVAVADNLDHLTELVRSRSRREDLVLAMGAGDVNGLWPRLAA

SEQ ID NO: 165204 - protein, 181 aa, Unknown
  Bacterial polypetide isolated from the Sargasso Sea
HNIRNATAAFAVASSIGLSEKIIKKGLLNFTGVQRRFNELFKIRETIFFDDYAHHPTEIIEVLNSVKKVYKNKEIIVIFQPHRISRVNDLKKEFASSFKNCDSLVLCPIYSAGEKIKLKFNYKKFAKEIIKNSKVKLFMVKGEDDLYKFINQSIYGNKIVIGMGAGSISSWMRNLKNKIIN

SEQ ID NO: 165205 - protein, 353 aa, Unknown
  Bacterial polypetide isolated from the Sargasso Sea
ILSDRKVISVAGTHGKTTTSSIIASALKHMGEDPGYLIGGVPINFEASAALGSSPYFVIEADEYDTAFFDKRSKFIHYPAETLVINNLEFDHADIFKDLDQIKWHFHQLIRSLPSQTKVRIPFGDENIKDLLSMGNWSSTKSFGFNKEADYTMIIKDDHFMIKECDAIEGTMKPKLFGKHNLMNIVSAFSALRSLGFDRERIFEAINQFDGVKRRLQHLQQFENHLVFDDFAHHPTSIKFGIDAVKERDPNKKLCVLAELASNTMRQGTLKDEVVNSLSGADCVFILFNDDFEWDIEDAFKSSESVKIVKSNEELINNLESLDTDEYNFLIMTNKSSIPFVETLEMGLKEYER

SEQ ID NO: 165206 - protein, 247 aa, Unknown
  Bacterial polypetide isolated from the Sargasso Sea
MRIHILGICGTFMAGLAQILKESGHDVSGSDNQFYPPMSEYIWKMGIETYKDYSKHNLPKAELYVIGNALSRGNEHVEEIIENRLPFISGPAMLGRVLKNRDVFAVSGTHGKTTTSYMIAHIFRNQNKDIGYLIGGISEQFEDSAKLGTDKIFVIEADEYDSAFFDKRSKFIHYSPLNLIINNIEFDHADIFNNIDDIKKQFHHLLKIIPKSGNLIYFKEDQNTSDVIKSGLWCNEIVIGSNEIEID

SEQ ID NO: 165207 - protein, 140 aa, Unknown
  Bacterial polypetide isolated from the Sargasso Sea
IFNFNNVDFYDDYAHHPTEIKEVLEGVKNVYKDYEKICIFQPHRISRLKDLKKEFSFAFKNADRVILFPIYTAGEKIKLGFDYLNFAKEIIKNSGVKLLLVDNKFQLAKYIKANIYGKKIVIGMGAGTISAWMRELPKLL

SEQ ID NO: 165208 - protein, 325 aa, Unknown
  Bacterial polypetide isolated from the Sargasso Sea
MKSLIFGYGQTGKSFENYLENKNISFDIYDDDKSKLSEIHQEKNISPSFSDLKDYQDIYISPGVKLENYLTKEEISNLNLKSDLDIFFLEHNSFKIGITGTNGKSTLVHLLEQALNHSSSAIALGNIGNPVLENLNHQNKYSVIEVSSYQLDKMENNLFDLSVITNIEPDHIKFHGTFQKYKEAKLKICRDQTKTIFCEGHDYENIATRIAQDLEPNSSYENLRFSLLPHRLEEFSGRFIDDSKSTNSSSLRHALSKLKFSGVLIMCGDPDKECLSEINIKGPNRVYIFGKHRKNLVKIVKHHNIKDFATLDEVLGDLRSLKTPQ

SEQ ID NO: 165209 - protein, 463 aa, Unknown
  Bacterial polypetide isolated from the Sargasso Sea
MKIHILGICGTFMGGLARILIESGHKVSGSDQNFYPPMSDQLNELGIQLVKGYEVSKLPEADLYVIGNVLSRGNECVEEILNKKLPYKSGPEMLGEIIKDRLVIAVSGTHGKTTTSFMIAKIFQSVGKDIGYLIGGLCPNFEFSAKLGNDEVFVVEADEYDSAFFDKRSKFIHYCPDILIINNLEFDHADIFRDIEDIKRQFMNLLNTMPNGAKVINFPCQPGANNPHVDDVLHYHGNSIKKVNIGIGSYYDGWFDEDDNFIIFDDESYNLFIGRESRGREVTLNSLPIYGLHNMKNATAAIVAAATYGINFTDAYHGLSDFGGVRRRLEEKYSKNGITIIDDFAHHPTAIEFAIDSVHKKYKDKRILNVIELGSNTMSGGYHEEELMDIDSKYESLFREQCKIFWLDHKYCLPDDVYHLFWSHDDLNKAIAENYRDFEVILIMTNRDSTKIIEPLKELIEAS

SEQ ID NO: 165210 - protein, 268 aa, Unknown
  Bacterial polypetide isolated from the Sargasso Sea
MSHNKYFFIGVGGIGMSSIANYLIDTKNIVFGYDRSSNKLVDKLIDNGLKFTDKLDIDLVPKEFLDNNVIVVYTPAIKNDNVFLNYFSNKKRNKIFKRSEILGQISANSKCIAVAGTHGKTSTTAILSHLLYSNQVKFRSFVGGIMKGFDSNYISTGDEYVIIEADEYDRSFLALDPDYSLITSIEKDHLDVYDDLESILTSFGIFCDKTKKSVIAEKGINVKKDFSFSIDEDADYSVDIIKNNFNGIHFNFKTPNNLISNIHARVIG

SEQ ID NO: 165211 - protein, 359 aa, Unknown
  Bacterial polypetide isolated from the Sargasso Sea
MKSLIFGYGQTGKSFENYLENKSISFDIYDDDKSKLSEIHQEKNISPSFSNLKNYQDIYISPGVKLENYLTKEEISNLNLKSDLDIFFLEHDSFKIGITGTNGKSTLVHLLEQALNHASSAIALGNIGNPVLENLNHQNKYSVIEVSSYQLDKMENNLFDLSVITNIEPDHIKFHGTFQKYKEAKLKICRDQTKTIFCEGHDYENIATRIAQDLEPNSSYENLRFSLLPHRLEEFSGRFIDDSKSTNSSSLRHALSKLKFSGVLIMCGDPDKECLSEINIKGPNRVYIFGKHRKNLVKIVKHHNIKDFATLDEVLGDLRSLNDSSKILFSPGNPSGKDFKNFSERGQHFKNKVLEYFGE

SEQ ID NO: 165212 - protein, 250 aa, Unknown
  Bacterial polypetide isolated from the Sargasso Sea
MCIDDVNNRSLLKKNLVKNYFTYGVNKDSNFRITNIKYKLNRSIFDLIIKIPNKKKISVNNIEIPLIGFHNISNAAATFALTSHIGISTSLIKKSLKDFQGVERRFNKVFDFNGVTFFDDYAHHPTEIKEVLNGVKKSFLNKKVISIFQPHRISRLNDLSNDFSKSFKNSDQVLLCPVYKAGEKIKLKFKYEKFARDISKNSKALVIMVNQKQDLVNFFKNNLKGNEIVIGMGAGSISGWLKELKNFLKQ

SEQ ID NO: 165213 - protein, 437 aa, Unknown
  Bacterial polypetide isolated from the Sargasso Sea
GGLAQIAKQLGHKVTGSDQNVYPPMSEELVKLNIDVMSGYDSEHLSSNPDIVLVGNTLSRGNPAIEYMLNQKMHYMSGPEWLYRQVLHDRHVLAVSGTHGKTTTTSMLSWILEYTGLNPSFLIGGVAENFDRSARYTDSKYFVIEADEYDTAFFDKRSKFIHYHPDVLIINNIEYDHADIFHDLAAIRAQFHNLVRMLPENATIVFPLEDKEIDEVISMGCWARLETFSVTNGDWSIFDASKDFRNFSVKSPKKETGFVEWQTIGEHNAMNALAAIVAANNIGISVDSACEALSKFKSVKRRLECIFEFDGIRIFDDFAHHPTAIRKSIQALSSTLDEGRIIAIMEPRSNTMRMGVHSEVLSDAFLDADLVYFFQPNDLNWNIKEHVSQLGDRCQIFKDVDKIAEHVCSNIRTNDQIIIMSNGAFGGIHKKIAERLN

SEQ ID NO: 165214 - protein, 306 aa, Unknown
  Bacterial polypetide isolated from the Sargasso Sea
MRIHILGICGTFMAGLAQILKESGHEVSGSDNQFYPPMSDYIKKIGIKTVEGYSKKDLPKADLYVIGNALSRGNESVEEILEKKLPFVSGPEMLGRELKSRDVFAVSGTHGKTTTSYMLAHIFRDQEKDVGYLIGGISEQFSDSAKLGTDKIFVIEADEYDSAFFDKRSKFIHYSPLNLIVNNIEFDHADIFNNINDIKKQFHHLLKIVPKSGNLIYFDDDQNTSDVIESGLWCNKVVIGSDHIEIDILQKSLIVDNKKYSLKNLPLSGEHNFKNYVCAILAATKGGITIEQSIDSLKKFRGVKRR

SEQ ID NO: 165215 - protein, 68 aa, Unknown
  Bacterial polypetide isolated from the Sargasso Sea
MNCLEYTNYYFIGIGGIGMSSLAEYMLHLNKKVEGYDREKSFQSNRLNKLGIRIIFSENEQIINSNFK

SEQ ID NO: 165216 - protein, 44 aa, Unknown
  Bacterial polypetide isolated from the Sargasso Sea
MKINLGKKEIIHFIGIGGIGMSGLALIMKQLGFKIQGSDISVNK

SEQ ID NO: 165217 - protein, 129 aa, Unknown
  Bacterial polypetide isolated from the Sargasso Sea
MALQQKVHFIGIGGIGMSGLAQVMKTMGFNVQGSDLVSSKNVERCKKIGIKIFKNHNKKNIKDCTIIVKSSAVKNNNPEIKAAKEKKLNILKRAEMLAHIVSLKTNIVITGSHGKTTTTSLISNILSSA

SEQ ID NO: 165218 - protein, 282 aa, Unknown
  Bacterial polypetide isolated from the Sargasso Sea
LGDNVLFDRHVLAIAGTHGKTTTTAMLTFILNSAGLRPGYLIGGVPIASDSSADLGDSGFFVVEADEYDSAFFDKRSKFLHYHSNTLVINNIEYDHADIFADLESIKKQFHHLIRTLPESGTVIFPAGDEAIESVLAAGCWSNQSRYGHLEGDWRYHVADQSAKFEILRDTPGRLQQGKVDWLLSGRHNVYNGVAAVMAAYQAGVSVKYSCEILSRFPGVKRRMETLYNEDDFVLYDDFAHHPTAIETTLAGLRQKVGKSRIVAVIEPRSASMRRGVHNERL

SEQ ID NO: 165219 - protein, 218 aa, Unknown
  Bacterial polypetide isolated from the Sargasso Sea
MKLNKNKLIHIVGVGGIGMSGIAEILSEMGYQVQGSDIKINANIVRLNKKKIKTFNSHKKSNLKNVSLVVYSSAISKNNIELEHSKKLKIPSISRAEILFQIVKLKKTIAISGSHGKTTTTSLISAVLNGARMKPTVINGGIINQFGTNTKLGSGDWLVVEADESDGTFVKLPASISVVTNIDREHLDYYSNFQNLKNYFKRFITQVPFYGFASYMYR

SEQ ID NO: 165220 - protein, 145 aa, Unknown
  Bacterial polypetide isolated from the Sargasso Sea
MKINIASNEVIHFIGIGGIGMSGLAQIMKNMGFIIQGSDLSQNKNTERLIKRGIKVYFGHNKKNLKRATMIVISSAIKKNNRELKAAQYKRLPVFKRGEMLANIVALKKNVVITGSHGKTTTTSLVANILLEARIRSNCNQWRCN

SEQ ID NO: 165221 - protein, 194 aa, Unknown
  Bacterial polypetide isolated from the Sargasso Sea
MEIEIAKKEIIHFIGIGGIGMSGLALIMKSKGFKVQGSDLNSNKNVDRLKKEKIGVFIGHKKKNINNATIIVISSAIKPNNPEIIQAKKKHLPIYKRGDMLAHIVSLNQNIVIAGSHGKTTTTSLIAGIFSNAKLDPTIINGGVLNSLKGSARLGKSNWCILESDESDGSFVKLPPTYSVITNIDREHIEYYKS

SEQ ID NO: 165222 - protein, 167 aa, Unknown
  Bacterial polypetide isolated from the Sargasso Sea
MNKIKINLNQKIHFIGIGGIGMSGLAQIMKNMGFNVQGSDMINSKNVERCRKIGIKIFRSHKKENIDHTSIVIKSSAIKNNNPEIKAATEKNITVLKRAEMLAHVVALKTNIVITGSHGKTTTTSLISNILSQAKFDPTIINGGIINSFNGNARLGKGNWAVLEADE

SEQ ID NO: 165223 - protein, 221 aa, Unknown
  Bacterial polypetide isolated from the Sargasso Sea
MQQFKKIRNIHFIGIGGSGMIGIATILHKKGYNISGSDISKTKDLDELAKSGVEVTYSHKSKNINNKDLIVLSSAIDSSNVEVSSAKKKNIPIIPRAEMLSGISRGYQGIAVAGSHGKTTTTSLIAHIFNQALLSPTYVIGGKILSSDGNSRLGDGNFFIFEADESDKSFLSFYPDSAVITNIDDDHLEAYEGNINNLKESFLDFSDNIPFFGYVIANYDD

SEQ ID NO: 165224 - protein, 262 aa, Unknown
  Bacterial polypetide isolated from the Sargasso Sea
GNGEWMVVEADESDGSFAKLNPTVAIITNIDLEHLDYHKSEENLERAFLHFVSSIPFYGFVCLCIDNPRTQKLISKLENKKVITYGLSANADIRATNISYKENKMFFSLNISNLKEHNYKNYEIEFSMIGLHNIQNALASIAVGIELDIPITKIKKTLKSFTGIQRRFQKVGNFNETFIIDDYGHHPVEISAALAAARLITPKHKIISVFQPHRYSRLRDLFNDFCSCFNDADHVLLLDVFSAGEEPITNFKSTDLEVGLSN

SEQ ID NO: 165225 - protein, 181 aa, Unknown
  Bacterial polypetide isolated from the Sargasso Sea
MEKSKISFSERIHFIGIGGIGMSGLAEVMKDMGFNVQGSDIANNKNIERCRKNGIKIFLKHNKRNIRNSSIIVKSSAIGNNNPEIIFAKNNKLKILKRAEMLAHVVSLKKNIVITGSHGKTTTTSLISRILYDAKLDPTIINGGVINSIKSSARLGKGDWAVLEADESDGSFLNFQSIILL

SEQ ID NO: 165226 - protein, 308 aa, Unknown
  Bacterial polypetide isolated from the Sargasso Sea
GEGDYIIVEADESDGSFLHLHPDISVITNIDNDHLDFYESNQEKLNQSFVSFAENLPFYGYILLNLDDLNIKKISKDIHRRQITFGFGAKNRFQITDIKLRNGVQKFKITDHSNKKYYKFTTHLSGKHNLYNVTAAICVAIEENISIKNISKGLNDFQGVGRRFEISNLNFYDKPRILIDDYGHHPVEITATIQAIRQKFPRKKICMIFEPHRFTRTQQLFNDFVKVLSQVDSLLLLDIYPASEKPIKGISSKKLISKIAKSHKNAEYIGKSDPLVWLQSNYKNFSILITQGAGTISKLNKKIKHKWQ

SEQ ID NO: 165227 - protein, 204 aa, Unknown
  Bacterial polypetide isolated from the Sargasso Sea
MKIKLAKKEIIHFIGIGGIGMSGLSLIMKSQGFKVQGSDISTNKNIERLKKEKIKIFLGQSKKNLKNITIVVISSAIKKNNPELIEAKRKKIPIIRRGEMLASIVSLMKNIVVVGSHGKTTTTSLIASIFQETKIDPTIINGGVINSIKNTARLGKSDWSILEADESDGSFVHIAPTYSIITNIDREHMDFYKSMNALKNILLN

SEQ ID NO: 165228 - protein, 236 aa, Unknown
  Bacterial polypetide isolated from the Sargasso Sea
MNKYKEVYILGIGGSGMSSIAKYLVQQNIDVAGYDQRKSFITNQLNQDGIKVDFKLSNLKYSKKILYIYSSAISINETTLKDYLDSDNVLSRPEFLNILSKENKIIGITGTHGKTSTTALLAHIFHYNERNVSYIFGGITSFHGIGGHYGDQDQPIILETDEAFNTFKDINIDDLLVTNIDVDHLDYFKNFKNLLNAFKHVIENVKGNLVLNFDDQNLRELKTSNNCISYSSSEVQ

SEQ ID NO: 165229 - protein, 139 aa, Unknown
  Bacterial polypetide isolated from the Sargasso Sea
MQQFKKIRNIHFIGIGGSGMIGIATILHKKGYNISGSDISKTKDLDELAKSGVDVTYSHKSKNINNKDLIVLSSAIDSSNIEVSSAKKKNIPVIPRAEMLSGISRGYQGIAVAGSHGKTTTTSLIAHIFNQALLSRELM

SEQ ID NO: 165230 - protein, 210 aa, Unknown
  Bacterial polypetide isolated from the Sargasso Sea
MSKKRVHILGICGTFMGGLALLGKEKGMDISGCDNNVYPPMSDHLNDMGIEIIESYDPSHLPKADEYVIGNSIIRGNPALEHLLSSKANIMSGPEWLYSNILKNRKVIAVSGTHGKTTTTAMIAWIFQDQGIETGYLIAGKPKDFEKSARKGKQDIFVLEADEYDTAFFDKRSKFIHYKPDTLIINNLEFDHADIFPDLSYIYREFHNLI

SEQ ID NO: 165231 - protein, 231 aa, Unknown
  Bacterial polypetide isolated from the Sargasso Sea
KIIRTGFHRESDIKCIKLRHKANETIFDVYVKEKNQTIKNIKLPFHGVYNVNNALAAIAVGLQLNVKPEIIKKSLNSFKGVQRRLTELWSNNNIRVVDDYAHHPTEINNVLKGLVDADKKNRIITIFQPHRFSRVLDLKNKFTTCFKYSESVFVSDVYGAGEKKPKNFDLNRFISKIAKNSKVKAEYFVKNDQLFELTKKNRSKMIFLFLGAGTVTDWAQNFAKELKKIYE

SEQ ID NO: 165232 - protein, 169 aa, Unknown
  Bacterial polypetide isolated from the Sargasso Sea
MTGTLAEGKIDLGSRLSIHIVGIGGAGMRAIALVLSSMGHSVSGSDLKSSSGLDRLTASGIEVTIGHDISNVGRIDIVTRSTAVTDRNIEIREARKRDIPVVSRAEILSAITRMKRTVSVAGTHGKTTTSSMLAVLLAKANLNPSFIIGGEVNEIGCGALWEDDSNLFV

SEQ ID NO: 165233 - protein, 253 aa, Unknown
  Bacterial polypetide isolated from the Sargasso Sea
MTGFLQGNILHIHILGICGTFMASLAGIAKEKGIKVTGQDKAYYPPMSNQLQDLNIKENLTEDITDDLKNCDSVIIGNSLSRGDKSVEYVLKNNLSFFSGPEWIRNNILQDKFVFVVAGTHGKTTTTAMLIEILNGCGFNPSYLVGGILKNENKGYRYTDSDYFIIEGDEYDTSFFDKRSKFIHYKPNVLIINNIEYDHSDIFEDIEQIKKQFHFLIRSMPSNANIICNPKDINTKSLLEMGCWSNKINFYPI

SEQ ID NO: 165234 - protein, 263 aa, Unknown
  Bacterial polypetide isolated from the Sargasso Sea
MLYSIKKVHLIGIGGIGMSGIAELLKNKEFVVSGSDIADSPNVQRLIDLGINVSIGHNKENISDAELVIYSDAIPKENSELVEALAKNIIVYSRARMISEIAKLNNSTVAIAGTHGKTTTTSMVGTILKAINLDPTIIVGGVVKSLESNSVLGKGDTFVVEADEYNKSLLHLSPTIAVINNIDFEHIECFKDIDDLKNTFLQFANSVPFYGTVCACKDSKNVASILSKIDKPLITYGIDSQDIDIKAENLYQENGNISFDVRV

SEQ ID NO: 165235 - protein, 154 aa, Unknown
  Bacterial polypetide isolated from the Sargasso Sea
MEKSKISYREKIHFIGIGGIGMSGLAEVMKDMGFNVQGSDVSNSKNIERCRKNGIKVFIKHNKKNIKNSSIIVRSSAISNKNPEIKFAKKRKIKILRRAEMLAHVVALKKNIVVTGSHGKTTTTSLISRILYDAKLDPTIINGGVINSIKSSAR

SEQ ID NO: 165236 - protein, 282 aa, Unknown
  Bacterial polypetide isolated from the Sargasso Sea
MKIDLAKSEIIHFVGIGGIGMSGLALIMHGMGFQIQGSDISLNKNIERLKKKKIKISIGHNKRNINTATVLVISSAIKKNNPEFKEGKMKNLPIYKRGEMLGHIASLTKNITVVGSHGKTTTTSLIASIFSKTKIDPTIVNGGVLNSFNSSARLGNSNWSILELDESDGSFIEVLPTYSIITNIDREHMDYYKNMENLKNLFKKFLEKVPSFGKSFICLDDKINKQIIKKLKIKNYYTYGVNKKSNFNITNISQNKNFSKFDLKIFLPGKKKDIIKNIKIPI

SEQ ID NO: 165237 - protein, 181 aa, Unknown
  Bacterial polypetide isolated from the Sargasso Sea
MLGDHNVQNCLAAIGVALEMNIDAERIRQALAAFGGVGRRFEAKGISNGVTVIDDYGHHPVEITAALKAGRMLCGNNKLIAVVQPHRFSRLADLFTDFCSCLNEADEVLVADVYAAGEAHIEGADKAALVAGLRDYGHKSAASLEGPESLATEIATRTSAGDVVMCLGAGDITRWAAALPA

SEQ ID NO: 165238 - protein, 246 aa, Unknown
  Bacterial polypetide isolated from the Sargasso Sea
MEKKLLLKSHFHFIGIGGIGMSALAMGLLKKGCSVSGSDLVKNDETKKLEELGALIFPSQIRQNIEFVISKFSNKLINFVVSSAIKPENEEFSYCREKNLSIKHRSEILAMLMRTYTALAVAGSHGKTSTSTFLSTILELCTRNSSSITGGIIPIYNSNCHLENTKYLVAEVDESDGSINKYNSDIGIINNIDFDHCDHFSNLSEVISSFKSFAKNSKKLLFNFDCETSRNNCYSNFQWSNNTAKN

SEQ ID NO: 165239 - protein, 217 aa, Unknown
  Bacterial polypetide isolated from the Sargasso Sea
MKLFKKAKNIHFVGIGGAGMIGIARVLLQKGYKISGSDISDSNELEKLKKDGAKVYIGHSKENILGADLLVVSSAIHKKNPEIIKARKESITIIPRAEMLGSIMIGYESIAVAGSHGKTTTTSMIAKILSVANLSPTYVVGGKVLSTDENSNLGEGNYIVAEADESDGSFTHLQPDVAVITNIDDDHLSYYDNIFDNLLDSFIKFLENIPFYGYMVI

SEQ ID NO: 165240 - protein, 129 aa, Unknown
  Bacterial polypetide isolated from the Sargasso Sea
MKINIASNEVIHFIGIGGIGMSGLAQIMNNMGFSIQGSDLNRNKNTDRLIKSGIKVYLGHHSRNLKKATMVVISSAVKKNNKELKFSKEKNLPIFKRGEMLANIIALKKNIIITGSHGKTTTTSLVANI

SEQ ID NO: 165241 - protein, 279 aa, Unknown
  Bacterial polypetide isolated from the Sargasso Sea
LQAKKKHLPIYERAEMLANIVALKKNIIVTGSHGKTTTTSLIAKILSEAELDPTIINGGVINSINSNAKLGKGDLTVLEADESDGSFLKLPVNYSVITNLDLEHLDFYKTYENLKKAFIKFINKTPPIGKCFICSDNVDLRNILKNTKTKNYETYGFNKNCDYQICNEKFSINNSKFDLTIKDKNKNKKYFKNIIVSLMGKHNILNTTAAISICLNLGIAPKIIKKALYNFSGVQRRMTKIFSKNKVEFYDDYAHHPTEIFSVLESVKKVFQKRKIISI

SEQ ID NO: 165242 - protein, 290 aa, Unknown
  Bacterial polypetide isolated from the Sargasso Sea
SLPVYKRGDMLAHVVSLLNRNIVVAGSHGKTTTTSLVSSIFSKSKLDPTIINGGVINSFNNSAKLGKSDWCILESDESDGSFIKVSPTYSIITNIDQEHMDYYKNITKLKELFIKFIEKTPSFGKSFICIDDKNNKEIIKKIKIKNFHTYGVEKNSQFCIQNIIQSKEYSRFSIDIKLPGKKKNKIHNIKIPLLGLHNIRNATAAVAVATTIGISAKIIKQALKEFKGVQRRFNKIFTFRKVDFFDDYAHHPTEIIELLKGVRNSYKKEEIICVFQPHRISRINNLKKRV

SEQ ID NO: 165243 - protein, 249 aa, Unknown
  Bacterial polypetide isolated from the Sargasso Sea
MGGIIPIYNSNCHLENTKFLVAEVDESDGTINKYKSDIGIINNIDFDHCDHFSDLDDVLCSFKDFASNSKKLLLNYDCEITRNNFHSNNTWSITTKNNVSYAIIPTEINKSYTIGKYYENGNFINNLKIPIPGLHNLSNITASIAAARMIGVDFIEIKKNIQYLKLPKKRFEFRGQIDARYIYDDYAHHPNEIKATIKLGRLFIKENPNNDLRSNRLIAVFQPHRYSRVKQFAQEIAKELSKADIIYVT

SEQ ID NO: 165244 - protein, 277 aa, Unknown
  Bacterial polypetide isolated from the Sargasso Sea
SHGKTTTTSLIASIFQETKIDPTIINGGVINSINNSAKLGKSEWSILEADESDGSFVYTPATYAIITNIDREHMDYYQSMDKLNKYFVNFVNKVPSFGKSFVCLDNKNNKSLIKKLKNKNFYTYGTDNKSNFSIKNIKQFREYSEYDLKVILPNKKIRIIKKIKIPLLGLHNIKNSTAATALALSVGLSISNIKKGLRNFKGVQRRFNKIFTFNRVDFFDDYAHHPTEIKEVLNGVKKVYSNYEKICIFQPHRISRLKDLRAEFASAFKNADKVILF

SEQ ID NO: 165245 - protein, 268 aa, Unknown
  Bacterial polypetide isolated from the Sargasso Sea
GKVDWAILEADESDGSFLKLPINYSIVTNIDFEHIDYYKNYKNLENAFIQFINKTPPIGKSLICIDNKNIMKILKKIKNKNILTYGFNKKANYRISNPRYYATHSLFDFHYKNLDNSKATIKNINLKLIGEHNVLNASAAAAVCINLGVKTDIIKKALKNFSGVQRRMTKVFTKNKNEFFDDYAHHPTEISSILEGVHKVYNNRKIISVFEPHRYSRVMSLKLNFSKAFIKSDLVLICPMYAAGEKKNLNFNLLNFAKLISKNSRTQV

SEQ ID NO: 165246 - protein, 236 aa, Unknown
  Bacterial polypetide isolated from the Sargasso Sea
MKIKLAKTELIHFIGIGGIGMSGLALIMKGKGFRVQGSDISINKNIERLKKEKIKVLIGHKKQNINKATILVISSAIKKNNPEMLEAINKQLPIYKRGEMLANIVSLTKNIVVVGSHGKTTTTSLVASIFQETKIDPTIINGGVINSINNSAKLGKSEWSILEADESDGSFVHTPPTYAIITNIDREHMDYYGSMDKLNKYFVNFVNKVPSFGKSFICLDNKNNKNLLNKLKNKNF

SEQ ID NO: 165247 - protein, 298 aa, Unknown
  Bacterial polypetide isolated from the Sargasso Sea
TILEKAKYDPTVINGGVINSYNSNAKLGRSDWMVVEADESDGSFLKLPASFVIVTNIDAEHIDFYKSFKELKNAFKKFINNIPFYGAAIICIDDPTIQSIISEIEDKKIITYGLSPQADFRATNIVFKDSKTFFSLEISPKKDASAKKIENMVSNIPGIHNVQNILSVCSMAVELGIDLEIIKLALLGFEGVNRRFSLIKNYKGIQIFDDYGHHPIEIKATLSASREITKDKVVAIVQPHRYTRLKLLFEDFTSAFNDADIVFITEIYSAGESHSFDLTNYTLINALISRGHKDVRAF

SEQ ID NO: 165248 - protein, 161 aa, Unknown
  Bacterial polypetide isolated from the Sargasso Sea
IRINVIKRSLKKFTGIQRRLTKIFTIKGREFFDDYAHHPTEIKSVLKSLKATSTGRKVVSVFQPHRYSRLRSLKKDFASSFSNSDLVILCPVYPAGEKIDKKYDPINFSKLISQQSKVQVIMAKDEKYLKNFFNKNLIHDEIVVCMGAGSISKWIREMDLK

SEQ ID NO: 165249 - protein, 124 aa, Unknown
  Bacterial polypetide isolated from the Sargasso Sea
MKIDLGKNELIHFVGIGGIGMSGLALIMNGLGYKVQGSDIVDNRNIDKLKEKKIKVFLNQKKENIKKTTVLVISSAIKKNNPELIEAIKKNLPVYTRGDMLGHIVSFMRNVVVTGSHGKTTTTS

SEQ ID NO: 165250 - protein, 130 aa, Unknown
  Bacterial polypetide isolated from the Sargasso Sea
DYAHHPTEIKAVIKGAREVYKKRKIICVFQPHRYSRVKMLKNQFAESFSNADTVVLCPVYSAGEKIKYNFDQKIFFKLISKKSNMQVININNKNDLKIYFKKNLLDDEIIICMGAGSISNWIREIGNELK

SEQ ID NO: 165251 - protein, 252 aa, Unknown
  Bacterial polypetide isolated from the Sargasso Sea
MGIINNIDFDHCDHFSNLSEVISSFKSFAKNSKKLLLNFDCETSRKNFYSNCKWSNSTVKNVAYAIIPTEINSKYTIGKYYENGNFISNLNIPIPGLHNLSNITAAIAASRMIGVDFIEIKKNLKYLKLPKKRFEFRGQIDERSFYDDYAHHPNEIKETLKLGRLFIKQKNNNEFQKNRLVALFQPHRYSRVKQFNKEFAEELSKADVIYVTSIYGAGEGNEEKITSKIITDLIYKKNKNVSYINNYYEVTK

SEQ ID NO: 165252 - protein, 244 aa, Unknown
  Bacterial polypetide isolated from the Sargasso Sea
NKDRRLLTYGLSATADVKAININFLNEFTSFDLVLSNKISNDSLIWKNVKLPMHGHHNVLNCLASIAISVEMGISEKSIRKSLENFKGIKRRFEKKGSTNTGVKVVDDYGHHPVEINYALSSGRILAKKNKLIAVFQPHRFSRLRDLFHDFCGCFNNADYVFITDVYAAGEEEIQGYNKETLVSGILDYGHNNVSAVNNENEIYHKVNEIAKADDVVIFLGAGNITNFSDTIISKINNLGVNND

SEQ ID NO: 165253 - protein, 62 aa, Unknown
  Bacterial polypetide isolated from the Sargasso Sea
MLRSPKNLGIIHFIGIGGIGMSGIAEILFQSGYQVQGSDLNKSNNTTRLENLGIKIYIDRKN

SEQ ID NO: 165254 - protein, 253 aa, Unknown
  Bacterial polypetide isolated from the Sargasso Sea
TKLDPTIINGGVINSIKNTAKLGKSDWTVLEADESDGSFLHIPSTYSIITNIDREHMDFYKSMNDLEKYFIDFIKKVPSFGKSFICLDDPVNNKIIKKLKNRNFYTYGLHSKSNFFIKNINQNKNFTEFDLFVNVPNKKKIKIKKIRIPLLGIHNVRNSVAATAIAITIGISISDIKKGLKNFKGVQRRFNKIFTYNNIDFYDDYAHHPTEIKVVLDGVNKVYKNYEKVCIFQPHRVSRLKDLRKEFSFAFKN

SEQ ID NO: 165255 - protein, 281 aa, Unknown
  Bacterial polypetide isolated from the Sargasso Sea
VFFVGIGGIGMSGIAELLLNLGFNVSGSDINENDNVKRLKNLNIDVKIGHSPSNLNRDTDVLVYSSAVPIENPEIIRARQKGIPIIRRAEMLGELISVKETSIAVSGTHGKTTTSSMIGTILAYAKKDPTMVVGGLVHNIDTNSKLGNGDIIVVEADEFDRSFLALKPTIGIITNIELEHTDCYDDLIDLQDAFIQFCKSVPFYGEVILCADSPAVQEIIPKIERPMTTYGRSRDAAYRAKNIRFQENKSTYSIFRAEECLGEIKLNVPGEHNVLNSLAAV

SEQ ID NO: 165256 - protein, 261 aa, Unknown
  Bacterial polypetide isolated from the Sargasso Sea
MKIKLAKTELIHFVGIGGIGMSGLALIMKGKGFKVQGSDIANNKNIERLRKEKIKVFIGHKKQNIEKGTILVVSSAIKKNNPELLAAKKKQLPIYKRGEMLANIVSLTKNIVVVGSHGKTTTTSLIASIFQETKIDPTIINGGVINSINNSAKLGKSDWSILEADESDGSFVYIPPTYSIITNIDREHMDYYGTMDKLNKYFENFVNKVPSFGKSFVCLDDKNNKNLIKNIKNKNYYTYGLDNKSNFCIKNIKQLKEHSEL

SEQ ID NO: 165257 - protein, 223 aa, Unknown
  Bacterial polypetide isolated from the Sargasso Sea
MTRSQKHFGELKRIHLIGIGGSGMIGLATVLQKKGFNISGSDLLMTEELSSLKALGAKVQLGHDPRYIKSSDVVVASSAIAKNNAELKYAKKNNIIIIPRAVMLASILHGYRTIAVSGSHGKTTTTSLISNIFDAAKLSPTYVVGGQILGGRNSSHLGDGLHMIVEADESDGSFLHLHPEVIVITNIDNDHLSFYENDQQKLNTAFLNFTKNLPFYGYVLMNI

SEQ ID NO: 165258 - protein, 277 aa, Unknown
  Bacterial polypetide isolated from the Sargasso Sea
IKSNNVEINYAKKKKLPIYSRADVLADVVSLKKNIVITGSHGKTTTTSLVSKILSDQKLDPTIINGGVINSLRNNAKLGKGEWAILEADESDGSFLKLPFNYSVVTNLDHEHIDFYKNFRNLENSFIEFIEKTPPTGKTIICASNRNIKKILKRIKNKNLLTYGDEKGVDYRISNLRFKVDYSIFDLNYRDNNNIKKKINNICVKLLGKHNIFNATAAVIVCINLGVPQSVIKRSLKRFTGVQRRMTKLFSRNSNDFYDDYAHHPTEIKSSLSSVKN

SEQ ID NO: 165259 - protein, 267 aa, Unknown
  Bacterial polypetide isolated from the Sargasso Sea
INLDDLLVTNIDVDHLDFYKNFKNLLSAFKHVIKKIEGNLVLNYDDQNLRKMKINNNFFTYSSSEVSDIQIIYPNKIVKEKKEYIIKTNLIGFHFISNIAGALALAYLNGIKIEESLEAIKTFPGVNRRIEYLGKVDGIKIYDDYGHHPTEIEATITALKKITEGKLYVVFQPHRYTRTKNNLEDFKKSLLKSDQSIVVDIYPAGEKPIPGVSSKNFEDKNIKYLKSMRMVPSYLSSIVKENDTILTLGAGDITLLGPQILKYLDEK

SEQ ID NO: 165260 - protein, 253 aa, Unknown
  Bacterial polypetide isolated from the Sargasso Sea
FYGTVILCSDSDSLMRILPKIKKPITTYGLSDGSDYRAKNIEYSKNKSKYNLIYKNKNLGEININVPGKHNVLNSLASIALGMEIDVPLSKLKKGINSYIGVRRRFEIKKNKTDIFVVDDYAHHPTEVKATINAAKTGWGKRIVSVFQPHLFSRTRDFFKEFAQSLFKSDIIIITEIYPAREKPIDGISSKLILDELNHLEHKNTHHLDDLNNLNNILEKIVQPEDMVITMGAGDIWRYSDKYNEHLNDKMGK

SEQ ID NO: 165261 - protein, 289 aa, Unknown
  Bacterial polypetide isolated from the Sargasso Sea
MARKKKIPIYSRADVLADVVSLKKNIIITGSHGKTTTTSLVAKILSDQKLDPTIINGGVINSLNSNAKLGKGEWAILEADESDGSFLKLPINYSIVTNIDYEHLDFYKNYRNLENSFIKFIEKTPPTGKAIVCIDNLKIKKMLKKVKNKNLLTYGENKNSHFQISNIRFRKDHSIFNLKYKDNTKKYKILKNVNLRLLGKHNVLNAVAAITVCLNLGVNQNIIKNSLKSFSGVERRMTKVFSKKQNDFYDDYAHHPTEITSILEGVKNAYKDRKIISVFEPHRYSRILS

SEQ ID NO: 165262 - protein, 296 aa, Unknown
  Bacterial polypetide isolated from the Sargasso Sea
MKINIASNEVVHFIGIGGIGMSGLAQIMNNMGFTIQGSDLNENKNTDRLLRSGIKIFFGHHPKNLRKATMVVISSAVKKNNNELIATKKKKIPVFKRGEMLANIVGLKKNIVITGSHGKTTTTSLVANILVESGLDPTVINGGVINSLRSNAQLGKGEWAVIESDESDGSFLKIPVTYSIVTNVDKEHLDFYGSFEKLKKSFCTFVENTPSFGKSIICIDNNNLKSLISKFKTRNFLTYGFDKNANYQIINVRKKEKYSIFDLKIKFPSNKSSTVKNIVVNLIGDHNITNATASIA

SEQ ID NO: 165263 - protein, 315 aa, Unknown
  Bacterial polypetide isolated from the Sargasso Sea
KIDLGKNELIHFVGIGGIGMSGLALIMNELGYKVQGSDIADNRNIERLNEKKIKIFLNHKKENIKKTTVLVISSAIKKNNPELVEAIKKNLPVYTRGDMLGHIVSFMRNVVVTGSHGKTTTTSLVSSIFTAGKLDPTIINGGVLNSFGSPAKLGKSNWCVTESDESDGSFLKIPFTYSIATNLDSEHLDFYKNINNLKKSFLKFFEKIPSVGKGFVCNDDQNLKKVLKKLKNKNFYTYGKSKKSNFQIINIKQNTNFSCFDIKINIPSKKKIIKRIKIPMIGVHNIQNATAAVSLALTIGLPEKYIKLGLYNLKE

SEQ ID NO: 165264 - protein, 200 aa, Unknown
  Bacterial polypetide isolated from the Sargasso Sea
MFHKVNNIHFVGIGGIGMSGIAELLINQGFVISGSDIVESEITKKLEINGAKIFIGHNKNNINGSELLVYSSAVTKNNVELVEAEKSKIPIIKRAEMLGELVALKETSIGVAGTHGKTSASSMLGALLTYGKMDPTLVVGGLVQNLNTNSLLGQSDLIVFEADEYDKSFLQMNPTIAIINNIEEEHMDCYKDINDLHDSF

SEQ ID NO: 165265 - protein, 164 aa, Unknown
  Bacterial polypetide isolated from the Sargasso Sea
MKIKLAKSELIHFVGIGGIGMSGLALIMKELGFKVQGSDIAYNKNIERIKQKKIKIFIGHKKQNVNKSTILVISSAIKMNNPEVEYAKKIKIPIYKRGEMLANVVSLMKNIVVAGSHGKTTTTSLISSIFTQAKIDPTVINGGVLNSFSGSAKLGKRRLVHSGV

SEQ ID NO: 165266 - protein, 246 aa, Unknown
  Bacterial polypetide isolated from the Sargasso Sea
HFIGIGGIGMSAIATGLLKKGSSVSGSDLVKNNETDKLEQLGAVIFTSQVRQNIEFVISKFTNKLINFVVSSAIKPENEEFSYCKEKNLSIKHRSEILAMLMRTYTALAVAGSHGKTSTSTFLSTILELCTHNSSSITGGIIPIYNSNCHLENTKYLVAEVDESDGTITKYKSDIGIINNIDFDHCDHFSNLSEVISSFKSFATNSKNLLINFDCKTSRNNFYSNNKWSITTAKNVAYAIIPTEVN

SEQ ID NO: 165267 - protein, 277 aa, Unknown
  Bacterial polypetide isolated from the Sargasso Sea
VGIGGIGMSALALIMKGKGFKVQGSDISINKNIERLKKEKIKVLIGHKKQNINKATILVISSAIKKNNPEMLEAIKKQLPIYKRGEMLANIVSLTKNIVVVGSHGKTTTTSLIASIFQETKIDPTIINGGVINSINNSAKLGKSEWSILEADESDGSFVHTPPTYAIITNIDREHMDYYGSMDNLNKYFVNFVNKVPSFGKSFICLDNKNNKNLLKKLKNKNFYTYGIDNKSNYSVKNIKQFREYSEFDLKIRLPNKKITIIKKIKIPLLGSHNIKN

SEQ ID NO: 165268 - protein, 145 aa, Unknown
  Bacterial polypetide isolated from the Sargasso Sea
MKIKLAKSELIHFVGIGGIGMSGLAVIMKELGFKIQGSDISFNKNIDRVKKRKIKVYIGHKKQNIKNSTILVISSAIKKNNPELMFAKKRKIPIYKRGDMLANVVSLMKNVVVAGSHGKTTTTSLISSIFSQAKIDPTVINGGVL

SEQ ID NO: 165269 - protein, 282 aa, Unknown
  Bacterial polypetide isolated from the Sargasso Sea
YSSAVPIENPEIVRARQKGIPIIRRAEMLGELISVKETSIAVSGTHGKTTTSSMIGTILAYAKKDPTMVVGGLVHSIDTNSKLGNGDIIVVEADEFDRSFLALKPTIGIITNLELEHTDCYDDLKDLQDAFIQFCRSIPFYGEVILCADYPAVQEIIPKIERPMTTYGRSRDAAYRAKNIRFQENKSTYSLFRAEECLGEIKLNVPGEHNVLNSLAAVVLGIEMGLSFNDIQKGIYNYKGVRRRFDIKGTFNDVMVLDDYAHHPTEVKATIEAAKTGWDRRI

SEQ ID NO: 165270 - protein, 165 aa, Unknown
  Bacterial polypetide isolated from the Sargasso Sea
MKINIGSNEVVHFIGIGGIGMSGLAQIMKNTGFIIQGSDSGRNKNTERLIKLGIKVYFGHHQKNLKKATMIVISSAIKKNNKELKFARSKKLPIFKRGDMLANIVALKKNIVVTGSHGKTTTTSLVANILLEAGLDPTVINGGVINSFKNTAQLGKGDWAVIESD

SEQ ID NO: 165271 - protein, 223 aa, Unknown
  Bacterial polypetide isolated from the Sargasso Sea
MYKTEIGLNEKVHFIGIGGIGMSGLAQVMKTIGYEVQGSDISFGKNIERCKKIGIKVFNKHNKKNIKNCAIIVKSSAIKSNNPEIIAAKNKKLTILKRSEMLAHVVSLKKNIVITGSHGKTTTTSLIAKILSESDLDPTIVNGGVVNSLKGSAKVGKGDWAVLEADESDGSFLNLPINYSVVTNLDREHLDFYKTFNKLKECFVKFLNKTPGMGKSFICIDDK

SEQ ID NO: 165272 - protein, 242 aa, Unknown
  Bacterial polypetide isolated from the Sargasso Sea
DKNLKKIIARNNTRKIISYSSKNKTADVFIKKVIFKKQYSKFELKFNIPINNFSGLQPYTVKAIGLHNIYNSTASIIASLLAGVKNNYIRSALTNYIGVKRRFTHLGKVNLSNIYDDYAHHPTEILATLKGAKQINKNIVVVFQPHRYSRTKILFDEFLKVLSKIKKLYLLDTYSAGEKKIRGFETIDIYNKLIETKKNIFYIKEKDLNKIIYKETNKKNIIIFMGAGSISKIACNFLKINE

SEQ ID NO: 165273 - protein, 132 aa, Unknown
  Bacterial polypetide isolated from the Sargasso Sea
MKIELAKNENIHFVGIGGIGMSGLALIMQGMGFKIQGSDISTNKNTERLKKHKIKIILGHSKKNINKATILVISSAIKKNNPEVQQAKSKNLPIYKRGDMLAHIVSLTQNIVVAGSHGKTTTTSLISGIFSK

SEQ ID NO: 165274 - protein, 131 aa, Unknown
  Bacterial polypetide isolated from the Sargasso Sea
MKINLGKTELIHFVGIGGIGMSGLALIMNGLGFKVQGSDISKNKNVERLQEKKIKIFFKHKKKNIDKTTILVISSAIKSDNPELIQAKKLKLPIYKRGEMLGHIVSLMRNVVITGSHGKTTTTSLISSIYR

SEQ ID NO: 165275 - protein, 61 aa, Unknown
  Bacterial polypetide isolated from the Sargasso Sea
MISNIPQNVGRFHFVGIGGIGMSGIAEILLQSGYLVQGSDINQTKITKRLNRLGAKIFYWS

SEQ ID NO: 165276 - protein, 197 aa, Unknown
  Bacterial polypetide isolated from the Sargasso Sea
MKIDLRKNELIHFVGIGGIGMSGLALIMNSLGYKVQGSDIANNRNIARLNKKKIRIFLNHKKENIKKTTVMVISSAIKKNNPELVEAIKKNLPVYTRGDMLGHIVSFMRNVVISGSHGKTTTTSLVSSIFTAANLDPTIINGGVLNSFGNSAKLGKSNWSVTESDESDGSFLKIPFTYSIATNLDSEHLDFYKNITN

SEQ ID NO: 165277 - protein, 273 aa, Unknown
  Bacterial polypetide isolated from the Sargasso Sea
RLNKKKIKTSSSHKQSNLKNVSLVVYSSAISKNNIELKYAKKIKIPSISRAEILSQIVKLKKTIAISGSHGKTTTTSLISTVLNGAKMKPTVINGGIINQFGTNTKLGSGDWLVVEADESDGTFVKLPATISVVTNIDKEHLDYYSNFQNLKKHFKQFITQVPFYGFAVVCIENDVLHKLVNKISTTKIIKTGFHKDSDIKSINLRHKNNEIVFDVFVKEGNQVIRNVKLPLHGAYNVNNALLAIAVGLQLNINTGIIKKSLNSFSGFKEGLR

SEQ ID NO: 165278 - protein, 226 aa, Unknown
  Bacterial polypetide isolated from the Sargasso Sea
VKLGISISYDHNPNNLRDIEMVVISSAISDDNPELASAKEQLIPVLARAEMLSSLMNNKRGIAIAGTHGKTTTTSLVASIMTNANLDPTFINGGIINSFNTNAQLGEGDYLIAEADESDKSFLLLQPSVSIITNIEPDHLVNYDGSFDNLKKAFLEFIKKLPFNGVAIVCGDDTVVKELKINFQRPHISYGFEPTNDYVLSSYRTDGRKSYFKLTSDTDSCDFKLN

SEQ ID NO: 165279 - protein, 191 aa, Unknown
  Bacterial polypetide isolated from the Sargasso Sea
MELQVPGRYNLSNAAAAYCVGSLLGISHQDLLTGIASFTGTLRRFQLVGRVADVSVFDDYAHHPTELRATLGAARRVVTGQGRVIACFQPHLFSRTRDFAGEFGSALTLADRVIVSDIYPAREDPIPGVTGELVHDAVIAAGGDSRYVPDKQDLPEALAEEVRPGDLVITLGAGDVTLVGPVLVGLLEGKA

SEQ ID NO: 165280 - protein, 188 aa, Unknown
  Bacterial polypetide isolated from the Sargasso Sea
GKFNFKANFFGEHNILNATASIITSLLANIPLKKIRYSLNNFQGVKRRFSYLGNISKASIYDDYAHHPAEIKASYEIAKHISRKKIIVIFQPHRYSRTKILLDDFMKVLSKIDVLYLLDIYPAGEKTLKNINSKNIVKKLKLKNKNTYYLDKKENIRLVLQPYFSANNTIVFMGAGSITNIAHSLFDK

SEQ ID NO: 165281 - protein, 184 aa, Unknown
  Bacterial polypetide isolated from the Sargasso Sea
MKIDLGKNELIHFVGIGGIGMSGLALIMNGLGYKVQGSDIADNRNIERLNEKKIKVFLNHKKENIKKTTVLVISSAIKKNNPELVEAVKKKLPVYTRGDMLGHIVSFMRNVVVTGSHGKTTTTSLVSSIFTAGKLDPTIINGGVLNSFGNSAKLGKSNWCVTESDESDGSFLKIPFTYSIVTNL

SEQ ID NO: 165282 - protein, 155 aa, Unknown
  Bacterial polypetide isolated from the Sargasso Sea
MNKLKKIKIHFVGIGGIGMSGIAELMFDLGYTVQGSDINMNTNIRRLKKRGIKIYNSHHKANVQNMSAIVFSSAIKKNNPELLESKKLYIPLITRADMLAELMKLKKSIAIAGSHGKTTTTSLIGSIFDNAKYDPTIVNGGIINSYSKNNRYGKS

SEQ ID NO: 165283 - protein, 106 aa, Unknown
  Bacterial polypetide isolated from the Sargasso Sea
MKIELAKKEIIHFIGIGGIGMSGLSLIMKGKGFKVQGSDILNNKNIERLKKEKIKIFLGHSKKNLKKATIVVVSSAIKKNNSELIEAKKRKIPVIKRGKMLASIVS

SEQ ID NO: 165284 - protein, 183 aa, Unknown
  Bacterial polypetide isolated from the Sargasso Sea
NVRNALAAIAIATDEGVSDQTIVQALASFSGVGRRFEVSSEIILAGKSLTLVDDYGHHPTEVEAVIDTARKMWPGKRIAMVYQPHRFSRTLDLFDEFVNVLSKVDELVLLDVYDAGESAIDGASSKDLSVSLRNINGSCPLVFSRCEEVISRLQQHSQSADVLIVQGAGNVSSISKALRESNA

SEQ ID NO: 165285 - protein, 256 aa, Unknown
  Bacterial polypetide isolated from the Sargasso Sea
MNKKLRHKDHFHFIGIGGIGMSAIAMALIKKGYSVSGSDLIQNKETKSLKTLGAIIFDSQIKKNIDFVISKFHNHTINCVISSAIKNENEELCFCKKNNFSIKHRSEILAMIMNSYTSLSIAGSHGKTSTSTFLSTLLELCTHDSSSITGGIIPIYDSNAHIENTKYLVTEIDESDGTIENYNSDIGIINNIDFDHCDHYSNIDEVLSSFKKFASNSQKLLINYDCKFTKNNFTSENQWYIKESNKIAYSLIPKKL

SEQ ID NO: 165286 - protein, 106 aa, Unknown
  Bacterial polypetide isolated from the Sargasso Sea
MIALPIDIGIVHFVGIGGIGMSGIAEALHSLGYKVQGSDISENSNVKRLRSLGVSIYLGHRKENLGDARVLVVSTAINASNPEIKAARHKFIPVVQRAEMLGELMR

SEQ ID NO: 165287 - protein, 313 aa, Unknown
  Bacterial polypetide isolated from the Sargasso Sea
NERPCSDYEKYGFKVQGSDMINSKNVERCRKIGIKIFRSHKKENIDHTSIVIKSSAIKNSNPEIKAAIEKNITILKRAEMLAHVVALKTNIVITGSHGKTTTTSLISNILSQAKFDPTIINGGIINSFNGNARLGKGNWAVLEADESDGSFLNFPINYSVVTNIDREHMDFYKNFKNLKNAFLKFLNKTPLIGKSFICIDDNEIKKLSKKIKNKNFYTYGFSKKADFQILNPEYNKDYSIFDLKISIPGENKRTIKKIKLNLIGSHNILNSVGAISLCIHIGIKIKIIKNSLKKFSGIQRRLTKRFTFKEEGI

SEQ ID NO: 165288 - protein, 213 aa, Unknown
  Bacterial polypetide isolated from the Sargasso Sea
MKINLGKTELIHFVGIGGIGMSGLALIMNGLGFKVQGSDISGNKNTERLQEKKIKVFLNHKRNNINKTTILVISSAIKSDNPELIEAKKLNLPIYKRGEMLGHIVSLMRNIVVTGSHGKTTTTSLISNIFTQAKLDPTIINGGILNSFGNSAKLGKSNWCIIESDESDGSFLKIPFTYAIITNIDSEHLDYYKSLNNLKNKFSEFLEKIPSLG

SEQ ID NO: 165289 - protein, 200 aa, Unknown
  Bacterial polypetide isolated from the Sargasso Sea
MKFSKLISSKVHIIGINGIGMSALAIYLKKNNIDVTGSDIAYNSNTINLEKHKIVVFIGHKTSNIKDRDIIFYSSAIKNNPEINEAKKNNIPCYSRSKLLQLICKDKFTIVVSGSHGKTSTTSILGHLLVSAGLNPTIISGGIMQNFGQNIYLTNSKYVVVEADESDGTIFKLSPRYLLYLNVDREHIDFYKTYSNLKSK

SEQ ID NO: 165290 - protein, 247 aa, Unknown
  Bacterial polypetide isolated from the Sargasso Sea
VKRLESLGIEISIGHDSSNFRGANAVVYSSAVPMDNPEILTAINKSIPVIRRAEMLGELINLKRTSIAVGGTHGKTTTSSMIGMILEKSGYDPTLVVGGLVSNLNTNVKLGSGDLIIVEADEFDRSFLALNPTIAIVTNLEMEHTDCYKDLNDIEDAFLQFCKSVPFYGTVILCTDSDSLMRIMPKIKKPITTYGISEGSDYRAINIEYSKNRSKYRLLHKNKDLGEININVPGKHNVLNSLASIAL

SEQ ID NO: 165291 - protein, 284 aa, Unknown
  Bacterial polypetide isolated from the Sargasso Sea
VINSFNSNAKLGKGHWAILEADESDGSFLKLPINYSIVTNIDLEHLDYYKSYKNLENAFIQFINKTPPIGKSLICIDNKNIKKILNKIKNKNILTYGFNKEANYRISNPRYNTTHSLFDLNYKNLDNKKVAIKNINLKLIGEHNVLNASAAIAVCINLGIKIDIIKKALRDFSGVQRRMTKVFIKNKNEFFDDYAHHPTEISSILDGVNKVYNNRKIITVFEPHRYSRIKSLKNAFSKSFVKSDLVLICPIYAAGEKKNSSFSLLNFAKLISKNSKTQTVLVKN

SEQ ID NO: 165292 - protein, 154 aa, Unknown
  Bacterial polypetide isolated from the Sargasso Sea
MKIEIAKAEIIHFIGIGGIGMSGLSLIMKGKGFKVQGSDLSLNKNVERLKKEKIKIFIGHKKQNLKDATIVVVSSAIKKNNPEIIEAKRKNLLIIKRGKMLAHIVSLMKNIVVVGSHGKTTTTSLITSIFQTTKIDPTIINGGVINSINNTAKL

SEQ ID NO: 165293 - protein, 292 aa, Unknown
  Bacterial polypetide isolated from the Sargasso Sea
IGQKKQNLKKATILVTSSAIKKNNPELIEAKRKKLPVIKRGKMLAHIVSLSKNIVVVGSHGKTTTTSLIASIFQKTKLDPTIINGGVINSIKNSAKLGKSDWSILEADESDGSFVHIPPTYSVITNIDREHMDFYKSMDDLKKYFLQFMNKVPSFGKSFICIDDKVNYMLVKKLKNRNYYTYGLNPKSNFYIKNIKQNKKFSEFDLNINLPNKKKIKITSIKIPLIGLHNIRNSVAATAVSLTIGISIQDIKKGLSNFGGVQRRFNKIFTFNKIDFYDDYAHHPTEIRNVLE

SEQ ID NO: 165294 - protein, 178 aa, Unknown
  Bacterial polypetide isolated from the Sargasso Sea
MRRTDNRQDGSEGGCMTALPLSIGTIHFTGIGGIGMSGIAEILHELGYKVQGSDLSQNANVKRLQARGIRVSVPQAAENLNNVSLIVISTAITPDNIEVVEAHRRFLPVVHRAEMLGELMRLRWTVAVAGTHGKTTTTSLVATLLDAADIDPTVVNGGIISSWDSNARLGAGDWMVVE

SEQ ID NO: 165295 - protein, 291 aa, Unknown
  Bacterial polypetide isolated from the Sargasso Sea
IDVAGYDQRKSFITNQLNQDGIKVDFNLSNLKYSKKILYIYSSAISINETTLKDYLDSDNVLSRPEFLNILSKENKIIGITGTHGKTSTTALLAHIFHYNERNVSYIFGGITSFHGIGGHYGDQEKPIILETDEAFNTFKDINIDDLLVTNIDVDHLDYFKNFKNLVNAFKHVIENVKGNLVLNFDDQNLRELKTSNNCISYSSSEVADIQIKYPNKIIIENEEYIVTTKLIGNHFISNIAGAIALAYLNGIKIEDSIEAVETFPGVKRRTEFLGSIKGIKLYDDYGHHPT

SEQ ID NO: 165296 - protein, 227 aa, Unknown
  Bacterial polypetide isolated from the Sargasso Sea
LIHIVGVGGIGMSGIAEILSEMGYQVQGSDIKINANIVRLNKKKIKTFNSHKKSNLKNVSLVVYSSAISKNNIELEHSKKIKIPSISRAEILSQIVKLKKTIAISGSHGKTTTTSLISTVLNGARMKPTVINGGIINQFGTNTKLGSGDWLVVEADESDGTFVKLPASISVVTNIDKEHLDYYSNFQNLKNYFKRFITQVPFYGFAVICIDDNELRKLAAKISTTKI

SEQ ID NO: 165297 - protein, 184 aa, Unknown
  Bacterial polypetide isolated from the Sargasso Sea
MKIKLAKTELIHFIGIGGIGMSGLALIMKGKGFRVQGSDISINKNIERLKKEKIKVLIGHKKQNINKATILVISSAIKKNNPEMLEAINKQLPVYKRGEMLANIVSLTKNIVVVGSHGKTTTTSLIASIFQETKIDPTIINGGVINSINNSAKLGKSEWSILEADESDGSFGHTPPTYAIITNI

SEQ ID NO: 165298 - protein, 145 aa, Unknown
  Bacterial polypetide isolated from the Sargasso Sea
MKINLGKTELIHFIGIGGIGMSGLALIMNGLGFKVQGSDISNNKNIDRLKEKRIPIYLNHHKKNLKKSTIIVFSSAIKKKNPELSEAKKLKLPIYSRGEMLGHIVSLMRNVVVTGSHGKTTTTSLISNIFSQAKLDPTIINGGIL

SEQ ID NO: 165299 - protein, 277 aa, Unknown
  Bacterial polypetide isolated from the Sargasso Sea
MKLSKIKNIHFIGIGGVGMVGIAEMLLNQGFSVSGSDLVENKNTERLKYLGAKIFIGHNEKNVRDSDVVVYSTAVTESNPEMRSARSLNKTIIARAEMLSSLMRGFQSIAVAGSHGKTTTTSLIANIFIKANLDPTYIIGGRILGQEDKSILGSSEYLIVEADESDASFLHLSPEISVITNVDNDHLDFYENNIEKLNKTFHQFLENLPFYGTAIICIDEEKGEKLFNDLSRPKISYGFNKSADYYLKDLKQTSSFQEFTLVRNSVGKEVRLQLKIA

SEQ ID NO: 165300 - protein, 134 aa, Unknown
  Bacterial polypetide isolated from the Sargasso Sea
YKYEDKVIVDDYAHHPTEIKSIFDTIDSNYQDKPKAVIFQPHLYTRTRDLMDDFAKVLSYFNEVYLLDIYPAREKPINGITSEVLLNKIDASKKEIVKKVEINNLINNTNCKIIAILGAGDLTINLNKKIFTNE

SEQ ID NO: 165301 - protein, 302 aa, Unknown
  Bacterial polypetide isolated from the Sargasso Sea
TIGHERHNVGQVDLVARSTAVADENIEIKEARDSGIPVVSRADILSAITKIKPTVSVAGTHGKTTTSSMLAVLLAQANLNPSFIIGGEVNEIGCGALWEAESNLFVVEADESDGTFLTLDSDYGIITNVEPDHLGQYGDEANLRDAFNQFLKNIKDKAFVCFDDEGLKDLIGEPDVITYGVDPEADYSIEGYKGSRFGSSFSLNGPSGNLGNFSLATPGLYNVRNAVAALSFADYLGADINLLREGLGQFGGVARRFHYRGEKNGISFIDDYAHLPTEVSSVLEAAKEGDWGRIICVFHHTG

SEQ ID NO: 165302 - protein, 257 aa, Unknown
  Bacterial polypetide isolated from the Sargasso Sea
LSNLPFYGVAIVNEDDKNLKKIILRNGTRKIISYSNKNKTADVFIKKVKFKKQYSTFELKFNISINHISGLQSYTVKAIGLHNIYNSTASIIAGLVAGVKNNYVKSALTNYIGVKRRFTYLGKVNLSNIYDDYAHHPTEILATLKGAKQINKNIVVVFQPHRYSRTKILFNEFLKVLSKTNKLYLLDTYSAGEKIIRGFETKDIFNHLTKSKKNIFYVKEKDLNKSIYKETNKKNIIIFMGAGSISKIASNFLKINE

SEQ ID NO: 165303 - protein, 180 aa, Unknown
  Bacterial polypetide isolated from the Sargasso Sea
RMISYSKSQNSDVKIIKITKSKKGNNFSLYFKKGVIKGIKGKYHFKTNLMGDHNIFNSTAAIIASLLAEIPIKKIKNSLKDFQGVKRRFSFIGKVNKASIYDDYAHHPSEIKASYDIAKQISDKKIVIVFQPHRYTRTKILQNEFVKILSKVDILYILDIYSAGEKPIPNINSKNLVKQN

SEQ ID NO: 165304 - protein, 256 aa, Unknown
  Bacterial polypetide isolated from the Sargasso Sea
PIYKRGEMLGHIVSLMRNVVVTGSHGKTTTTSLISNIFTEAKLDPTIINGGILNSFGNSAKLGKSNWCIIESDESDGSFLKIPFTYSIVTNLDAEHLDFYKSLKNLKKNFSLFLEKIPSVGKGFLCIDDKNIREILNKTKNKNYYTYGINKKSNFQILNIFQSTNFSNFDIKINIPGNKKIIKNFKVPLIGMHNIKNVTSAVAVAFSIGISVKIIKKGLIKFKGVQRRFSYLFKHNNAIFIDDYAHHPTEISSVLE

SEQ ID NO: 165305 - protein, 167 aa, Unknown
  Bacterial polypetide isolated from the Sargasso Sea
NSRFIIAGVKNNYIKLALINYIGVRRRFTHLGKVNLSNIYDDYAHHPTEIHATLKGAKQVNKNIIVVFQPHRYSRTKILINEFVSVLSKINKLYLLETYSAGEKKIKGFETKDIYNKLRKNKKNVVYVRKKNLNKIIFKETYQKNIIIFMGAGSISKIASNFVKINE

SEQ ID NO: 165306 - protein, 261 aa, Unknown
  Bacterial polypetide isolated from the Sargasso Sea
ANVVSLMKNVVVAGSHGKTTTTSLISSIFTHAKIDPTVINGGVLNSFSGSAKLGKSDWCILESDESDGSFTKIPSTYSIVTNIDKEHLDYYKSLEILKKNFINFIEKTPSFGKTFICFDNQNNRDVIKKIKNLNYNTYGTNKLSNFKISNISQNKNYSKFDIKINLPGTKINFIKNIKIPLIGLHNIRNSTAAVAVAFSVGIPIEIIKKGLKKFSGVQRRFTKVFSYQNVPFFDDYAHHPTEISEVLDGVREVYKDKEIEC

SEQ ID NO: 165307 - protein, 45 aa, Unknown
  Bacterial polypetide isolated from the Sargasso Sea
MNLKIRTRLPLDLGKLHFIGIGGIGMSGIAELIYNLGYKVSGSDL

SEQ ID NO: 165308 - protein, 193 aa, Unknown
  Bacterial polypetide isolated from the Sargasso Sea
LHNLSNATAALAACRMEGLSLDRLMGGLAVLQTPGRRFDLRGTWQGRHIVDDYAHHPSEVRATLEMARLMVDSGRSPLPSPPRRLLAVFQPHRYSRTQEFLGEFALALQNCDALMLAPVYAAGEKPIAGVCSRTLADRVRALRPELPVHVADNIDELVSLVRDASRPEDLVLAMGAGDVNGLWSRLSRTPVAA

SEQ ID NO: 165309 - protein, 205 aa, Unknown
  Bacterial polypetide isolated from the Sargasso Sea
MKIEIAKTEIIHFVGIGGIGMSGLSLIMKGKGFKVQGSDLISNKNVERLKKERIKIFIGQKKQNLKKATIIVISSAIKKNNPEIIEAKRKNLPIITRGEMLAHIVSLTKNIVVAGSHGKTTTTSLVTSIFQKTKLDPTIINGGVINSIRNTAKLGKSDWSILEADESDGSFVHIPPTYSIITNIDREHMDYYKSIDDLKNIFLSL

SEQ ID NO: 165310 - protein, 207 aa, Unknown
  Bacterial polypetide isolated from the Sargasso Sea
RLGEGDWMIVEADESDGTLVEIPSTISIITNLDPEHLDHYGTFTALKKTFLEFLNSIPFYGVAICFIDHPEVKKLISKVKDRKVLTYGYSSVSDFQIKNLEYKKNKAFFQIYNKLNEENLKFELPMYGDHNVANAAAAITVALYLNIPIESIKNGLKNFKGVKRRFTKVCNWNGIEIIDDYAHHPVEILAVLSAARKYTSGRVIAIH

SEQ ID NO: 165311 - protein, 323 aa, Unknown
  Bacterial polypetide isolated from the Sargasso Sea
KNVKNATIIVRSSAITENNLEIREAKKRKIPIYSRAEVLANVVSLKKNIIITGSHGKTTTTSLVAKILSDRRLDPTIINGGVINSFKSNAKLGKGEWAILEADESDGSFLKLPINYSIVTNLDFEHIDYYNNFKNLENAFIQFINKTPPIGKSLICLDNKNIQNILKKIKNKNILTYGFHKDANYKVSNARYFIDNTIFDLNYTNFISKQKVKIKNINVKLIGKHNVLNASAAISVCLNLGIKINIIKNALKNFSGVQRRMTKLFKKNKNEFFDDYAHHPTEITSVLDGVSKVYKNRKIISVFEPHRYSRIMSLKKAFSKSFI

SEQ ID NO: 165312 - protein, 147 aa, Unknown
  Bacterial polypetide isolated from the Sargasso Sea
MKIKLAKTELIHFVGIGGIGMSGLALIMKGKGFKVQGSDIANNKNIERLRKEKIKVFIGHKKQNIEKGTILVVSSAIKKNNPELAAAKRKQLPIYKRGEMLANIVSLTKNIVVVGSHGKTTTTSLIASIFQETKIDPTIINGGVINS

SEQ ID NO: 165313 - protein, 276 aa, Unknown
  Bacterial polypetide isolated from the Sargasso Sea
RNEIIHFVGIGGIGMSGLAQVMKNMGFKIQGSDQNKNKNTKSCSKVGIKVYIGHSPKNIKSSTILVKSSAIKNNNNEIKYAKEKKIPIYSRAEVLADVVSLKKNIIITGSHGKTTTTSLVSKILSDQKLDPTIINGGVINSLNSNAKLGKGDWAILEADESDGSFLKLPINYSIVTNIDYEHIDFYKNFKNLENSFLKFIEKTPPTGKSILCADNKNIKKLFTKIKNKNVLSYGESRNVNYRISNIRYKIDYSIFDLNYKDLRKKNKKIRNIKVKL

SEQ ID NO: 165314 - protein, 303 aa, Unknown
  Bacterial polypetide isolated from the Sargasso Sea
VQIGHKKRHLSNATILVISSAIKKQNPEYLEAKRKKIPIYKRGDMLANIVSLFKNVVVAGSHGKTTTTSIVSTIFSKSKLDPTTINGGVINSIGNSAKLGKGEWCVLESDESDGSFLKLPFTYSIITNIDNEHLEHYGSIENLKKSFVKFSDKTPSFGKTLICLDDKNNRSIIRKIKNQNIVTYGLNAKSNFRIKNIELQNNFSKFDLEVNLPNQEKKLFKSFKIPLIGNHNIKNCTASIAVAMLMGISISLIKKAISEFRGVERRFNFIFEFQKSIFYDDYAHHPTEKHELLKSSKEVYKSK

SEQ ID NO: 165315 - protein, 233 aa, Unknown
  Bacterial polypetide isolated from the Sargasso Sea
MKLSKIKNIHFIGIGGVGMVGIAEMLINQGYRVSGSDLVSNNNVKRLKSLGAHISIGHHATNIKNCDVVVFSSAVGSNNSEMKEARKQSKIIIPRAEMLSGLMTGYQSIAVAGSHGKTTTTSLISYIFTEAKLDPTYIIGGRILGKEEKSILGKSNFIIVEADESDGSFLHLNPEISVLTNIDNDHLDFYDNKPHKLEKTFFNFMEKLPFFGTAIICVDCKKSDRVFKKLSRQ

SEQ ID NO: 165316 - protein, 281 aa, Unknown
  Bacterial polypetide isolated from the Sargasso Sea
MVQIVLLSSNTQRLEGMGIKIYYEHKSSNLEGVEMLVKSTAVPEDNVEIKEARDRFIPVLARAEMLSSLMNNKKGIAVAGTHGKTTTTSLVASIMSDAGLDPTFINGGIINSFNSNAQLGQGEYLIAEADESDQSFLLLQPSVSIITNIEPDHLINYENSFENLKNAFLEFIKNLPFNGISIVCGDDEVIKVLKKNFQRNHISYGFEPTNDYVISNYKSEGMKSFFKLTSPHESIDLSLNMLGKHNVLNAAAAAILCIQEGISLNVIKGSFNNFMGIDRRM

SEQ ID NO: 165317 - protein, 296 aa, Unknown
  Bacterial polypetide isolated from the Sargasso Sea
YKVSGSDSTSSSNTQRLEGMGIKIYYEHKSSNLEGVEMLVKSTAIPEDNVEIEEARDRFIPVLARAEMLSSLMNNKKGIAVAGTHGKTTTTSLVASIMSDAGLDPTFINGGIINSFNSNAQLGQGEYLIAEADESDQSFLLLQPSVSIITNIEPDHLINYENSFENLKNAFLEFIKNLPFNGISIVCGDDEVIKGLKKNFQRNHISYGFEPTNDYVISNYKSEGMKSLFKLTSPHESIDLSLNMLGKHNVLNAAAAAILCIQEGISLNVIKGSLKNFMGIDRRMQILGSKKIKTHH

SEQ ID NO: 165318 - protein, 237 aa, Unknown
  Bacterial polypetide isolated from the Sargasso Sea
MGGIAELCLQMGCCVMGSDAKDNLMTRRLREIGIKIEIGHHATLSGKIDCVVYSSAIAEDNIQLVSARSQGLRCVRRGDFLAELMTNTNGIAVCGTHGKTTTTGLITSMLVGCGRDPAFAIGGMHQQLGCYSRLGKDNLFVVEADESDVSFLALPAQVAVITNIDYDHMEAYSDDFSILQQAFSEFVTKLPATGCAVVCWDDPVVREIMQAYKGKMLSYGEHEDSDFCVKKYKQIGL

SEQ ID NO: 165319 - protein, 183 aa, Unknown
  Bacterial polypetide isolated from the Sargasso Sea
MNNKKIKIHFIGISGIGMSGIAELMKDKGYLIQGSDVALNDNTKRLKKKGIKFFLGHKNKNVKDVDAVVFSSAIRKNNPEIKEAIIKKIPLLSRADMLSELMKNKKAIAIAGSHGKTTTTSLIGNILSQGNLDPTIVNGGIINSLSKNNRFGKGDWMVVEADESDGSFLKLPHQISVITNLDI

SEQ ID NO: 165320 - protein, 239 aa, Unknown
  Bacterial polypetide isolated from the Sargasso Sea
KKNIIVTGSHGKTTTTSLIAKILLESKLDPTIINGGVINSLKNNAKLGKGEWTVLEADESDGSFLKLPINYSIVTNIDKEHLDYYKNFDNLEKNFIKFINRTPPIGKCIICGDDKNIKNIIKKIDTNNILTYGFNKNNHFQITKPKFNPNNCKFDLVIKRLNRKKLMLKNITLNLIGKHNILNSVAAISVCLSLGINIKIIKKALIKFTGVQRRMTKIFVKNENEFYDDYAHHPTEISS

SEQ ID NO: 165321 - protein, 271 aa, Unknown
  Bacterial polypetide isolated from the Sargasso Sea
MKNKIRIHFIGISGIGMSGIAELMQDQGYYIQGSDISLNDNSKRLKKKGVKFFLGHDKKNIKSVDAVVFSSAIKRNNPEVKAALIKKIPLLSRADMLGELMKNKKSIAIAGSHGKTTTTSLIGNILSQSNFDPTIVNGGIINSLSKNNRYGKGEWMVVEADESDGSFLKLPHQISIITNLDIEHLDFYKSKENLINSFENFINMLPFYGYSIVCIDDSNLYKLVKKNKSRNIITYSIKNKNADVYIYEIIKKTSSTSFKLKIKNMNILPLQ

SEQ ID NO: 165322 - protein, 236 aa, Unknown
  Bacterial polypetide isolated from the Sargasso Sea
KEVKTKNYLTYGFNDKAHYQILKTKYKSNFTNFEIKYKNNISKNIVIKNITLNLIGKHNVLNATAAIAICLNLGIKINIIKKALRKFSGVQRRLTKIFTKDNKDFYDDYAHHPTEIRSVLEGIKQVYKKRKILSIFQPHRYSRIKSLKFEFSKSFSNSDLVILCPIYAAGEKKDIKYNQNNFSKIIAKNSKVQVVNIKDEIDLKKFLKINLIKDEIIIGMGAGSISKWMIDLENKL

SEQ ID NO: 165323 - protein, 121 aa, Unknown
  Bacterial polypetide isolated from the Sargasso Sea
MKNKNIRIHFIGIGGIGMSGIAELMHKIGYTVLGSDIIESENIKRLRENGIIVKIGHHKKNIGNVNAVVYSSAVNQNNPEIKEAKKHKIPIVSRADMLAELMKNKKCIAVAGSHGKTTTTS

SEQ ID NO: 165324 - protein, 281 aa, Unknown
  Bacterial polypetide isolated from the Sargasso Sea
INSKIHFIGISGIGMSGIAELMLDKGYSIQGSDISVNDNTKRLKKKGIKFFLGHNKKNIKNAHAIVYSSAIKKNNPEIREAYIKKIPVLSRADMLSELMKNKKSIAIAGSHGKTTTTSLVGNIFNEAGLDPTIVNGGIINSFSNNNRYGKGEWMIVEADESDGTFLKLPHQISIITNLDIEHMDFYKSKKNLINAFEKFINLLPFYGTTIMCYDDNNLKLLINKIKTRNILTYSIKNKKADVLIFDIKQNKLKTSFKLKINNKIIHSSNYKFTINAIGNHN

SEQ ID NO: 165325 - protein, 235 aa, Unknown
  Bacterial polypetide isolated from the Sargasso Sea
MDKKLLLKSHFHFIGIGGIGMSALAIGLLKKGCSVSGSDLVKNDETQKLEKSGAVIFTSQIRQNIDFVISKFNNKLINFVVSSAIKPENEEFLYCREKNLSIKHRSEILAMLMRTYTSLAVAGSHGKTSTSTFLSTILELCTRNSSSITGGIIPIYNSNCHLENTKFLVAEVDESDGTINKYKSDIGIINNIDFDHCDHFSNLSEVISSFKSFAKNSKKLLLNFDCETSRNNFYS

SEQ ID NO: 165326 - protein, 128 aa, Unknown
  Bacterial polypetide isolated from the Sargasso Sea
MKIDLGKNELIHFVGIGGIGMSGLALIMNGLGYKVQGSDITNNRNIERLSEKKIKVFIKHKKENIKKTSMLVISSAIKKSNPEVVEAIKKDLPIYTRGDMLGHIVSFMRNVVVTGSHGKTTTTSLVSS

SEQ ID NO: 165327 - protein, 309 aa, Unknown
  Bacterial polypetide isolated from the Sargasso Sea
KSEWSILEADESDGSFVHTPPTYAIVTNIDREHMDYYQSMNKLNKYFVNFVNQVPSFGKSFVCLDNKNNKSLIKKLKNKNFYTYGTDDKSNFSIKNIRQFREYSEYDLKIRLPNKKIKLIKKIKIPLLGLHNIKNSAAATALSLTVGLDISDIKKGLKNFKGVHRRFNKIFTFNKVDFFDDYAHHPTEIKEVLNGVKKVYSNYEKICIFQPHRISRLKDLRAEFASAFKNADKVILFPIYTAGEKIKLGFNYSDFAKEIIKKSKVQLFLLNDKYQLAKYIKHNIYGDKIVIGMGAGSISSWMREMPKFL

SEQ ID NO: 165328 - protein, 270 aa, Unknown
  Bacterial polypetide isolated from the Sargasso Sea
NLPVYTRGDMLGHIVSFMRNVVVTGSHGKTTTTSLVSSIFTAGNLDPTIINGGVLNSFGNSAKLGKSNWCITESDESDGSFLKIPFTYSICTNLDSEHLDFYKNINNLKKSFLKFIEKIPSVGKGFVCNDDQNLKKVLKKSKNKNFYSYGEDKKSNFQIKNVKQTYNFSSFDIKINIPSKKKIIKGIRVPMIGIHNIRNATAAVALAFTIGLPEKYIKHGLNNFKGVQRRFSHLFDYNNISFYDDYAHHPTEISSVLNGVKNVFKNKEIV

SEQ ID NO: 165329 - protein, 316 aa, Unknown
  Bacterial polypetide isolated from the Sargasso Sea
KDKDLIIIGNVMSRGNPVVEYILKNNMNYVSGPQWLYDNILKHKKVIAVSGTHGKTTTTAMIVHIMKKNKMNPSYLIGGSPKGNFKSVSLTSSKYFVIEADEYDTAFFDKRSKFIHYNPFIAVINNIEYDHADIFENIDEIIKSFSHMIRLIPSDGTIIANKNDHNIKKLLQKGCWSKLKTVDSIKASGDFNLIKKKHYMLKFNNKNFLLPVNIIGKHNYMNAVTAIAACRELKVPINIQIKALSNFKGVSKRTDLVCEIDGMKVFDDFAHHPTAIKSSISSIKDTFTGKRVLTIFVPGSNSMRLGVHNDQLIPSL

SEQ ID NO: 165330 - protein, 127 aa, Unknown
  Bacterial polypetide isolated from the Sargasso Sea
MNKLNKIKIHFIGIGGIGMSGIAELMFELGYAVQGSDISMNANIRRLKKRGIKIYNSHHKNNIRNMSAIVFSTAIKKNNPEILESKRLYIPLITRADMLAELMKLKKSIAIAGSHGKTTTTSLVGSI

SEQ ID NO: 165331 - protein, 156 aa, Unknown
  Bacterial polypetide isolated from the Sargasso Sea
MKIEIAKTEIIHFVGIGGIGMSGLSLIMKGKGFKVQGSDLSLNKNVERLKKEKIKIFIGQKKQNLKDATIVVVSSAIKKNNPEIIEAKRKNLPIIKRGKMLAHIVSLMKNIVVVGSHGKTTTTSLITSIFQTTKIDPTIINGGVINSINNTAKLGK

SEQ ID NO: 165332 - protein, 143 aa, Unknown
  Bacterial polypetide isolated from the Sargasso Sea
TKVFTISKREFYDDYAHHPTEIKAVINSARQVYKKRKIICVFQPHRYSRVKYLKNEFASSFKSSDIVLLCPVYSAGEKIKYNFDQNNFSKLISKKSKVQVINLQNQNELKNYFKKNLYQNEMVICMGAGSISNWIRDIGKELA

SEQ ID NO: 165333 - protein, 238 aa, Unknown
  Bacterial polypetide isolated from the Sargasso Sea
MDKQKEYHFIGINGVGMSALAKILSKQGYVVTGSDYSPTLNMDAFKKYGITVYKEHNKKHISKNQIIIISSAISQANVEYKAAVGYGCKIVKRGDLLATIAAECKTCIAIAGTHGKTTTASMIVAIFEQAGKNPSYFIGGFLRNKENIRFENKDVFITEVDESDGSFLNISANQALISNIEQDHLDYYKSKAHINDSFSIFIDNVLNKQNGQFAINLDDPNTKKIIKEYNADRLITYA

SEQ ID NO: 165334 - protein, 134 aa, Unknown
  Bacterial polypetide isolated from the Sargasso Sea
MNEKIHFVGIGGIGMSGLAQVMKTMGFKVQGSDIAKTKNVDRCKKIGIKIFNNHNKKNIKNATIIVKSSAIKKNNPEIIAAKKKKLIVLKRAEMLAHVVSLKTNIVITGSHGKTTTTSLISKILSVAKLDPTIV

SEQ ID NO: 165335 - protein, 303 aa, Unknown
  Bacterial polypetide isolated from the Sargasso Sea
INGGVINSIKNTAKLGKSDWTVLEADESDGSFLHIPPTYSIITNIDREHMDFYKSMDDLEKYFTNFIKKVPSFGKSFICLDDHINYKIIKKLSNRNFYTYGFHPNSNFFIKNINQNKNFTEFDVLVNVPNKKKIKIKKIRIPLLGIHNVRNSVAAAAVAITIGISISDIKRGLKNFKGVQRRFNKIFTHNNIDFYDDYAHHPTEIKVVLDGVNKVYKDYEKVCIFQPHRVSRLKDLRKEFSFAFKNADIVVLCPVYSAGEKIKLGFNYTKFAKEIIKNSKVKLFLVNDNFQLAKFIKRNMREK

SEQ ID NO: 165336 - protein, 229 aa, Unknown
  Bacterial polypetide isolated from the Sargasso Sea
MIHFVGIGGIGMSGLALIMKGKGFKVQGSDISNNKNIERLRKEKIKVFIGHKKQNIAKGTILVISSAIKKNNPELTAAKNKQLPIYKRGEMLANIVSLTKNIVVVGSHGKTTTTSLIASIFQETKIDPTIINGGVINSINNSAKLGKSDWSILEADESDGSFVFIPPTYSIITNIDREHMDYYGTMDKLNKYFENFVNKVPSFGKSFICLDDKNNKNIIKNINNKNFYT

SEQ ID NO: 165337 - protein, 140 aa, Unknown
  Bacterial polypetide isolated from the Sargasso Sea
MIHFVGIGGIGMSGLALIMKGKGFKVQGSDIANNKSIERLRKEKIKVFIGHKKQNIEKGTILVVSSAIKKNNPELLASKKKQLPIYKRGEMLANIVSLTKNIVVVGSHGKTTTTSLIASIFQETKIDPTIINGGVINSIN

SEQ ID NO: 165338 - protein, 273 aa, Unknown
  Bacterial polypetide isolated from the Sargasso Sea
LGKSDWSILEADESDGSFIFIPPTYSIITNIDREHMDFYNSMKKLNKYFIDFVEKVPSFGKSFICLDDKNNKNLIKNIKKKNFYTYGEDPKSNFSIKNINQFKEFSKFDLLIKLPNKRNRYLKNITIPLLGNHNIKNAVAALAVSLTVGISIFDIKKGLKNFKGVQRRFNKIFSFNNVNFFDDYAHHPTEIREVLKGVMKVYKGYEKICIFQPHRISRVKDLKKEFSFAFRDADKVILFPIYNAGEKMKLGFSYLSFAKQIIKNSRVELLMIK

SEQ ID NO: 165339 - protein, 171 aa, Unknown
  Bacterial polypetide isolated from the Sargasso Sea
MKIKLGKTEVIHFIGIGGIGMSGLSLIMKGKGFKVQGSDLSSNKNIERLKKQKIKVFIGQKKQNLKNATIVVISSAIKKNNPEVIEAKRKNLPIISRGKMLAHIVSLMKNVVVAGSHGKTTTTSLVASIFQNTKLDPTIINGGVINSIRNTAKLGKSDWSILEADESDGSF

SEQ ID NO: 165340 - protein, 127 aa, Unknown
  Bacterial polypetide isolated from the Sargasso Sea
MKIKLAKSELIHFVGIGGIGMSGLAIIMKELGFKVQGSDISANKNIDRVKQKNIKIYIGHKKQNINKSTILVISSAIKKNNSEVLLAKKRKIPIYTRGEMLANVVSLMKNVVVAGSHGKTTTTSLIS

SEQ ID NO: 165341 - protein, 201 aa, Unknown
  Bacterial polypetide isolated from the Sargasso Sea
MQQFKKIRNIHFIGIGGSGMIGIATILHKKGYNISGSDISKTKDLDELAKSGVDVTYSHKSKNIINKDLIVLSSAIDSSNVEVSSAKKKNIPIIPRAEMLSGISRGYQGIAVAGSHGKTTTTSIIAHIFNQALLSPTYVIGGKILSSDGNSRLGDGNFFIFEADESDKSFLSFYPDSAVITNIDDDHLEAYEGDINNLKKS

SEQ ID NO: 165342 - protein, 281 aa, Unknown
  Bacterial polypetide isolated from the Sargasso Sea
AKKRKLPIYERVEMLSNIVSLKKNIIVTGAHGKTTTTSLVAKILSESKLDPTIINGGVINSINNNAKLGKGEWAVLEADESDGSFLKLPINYSIVTNIDHEHMDYYKNYNNLEKSFLKFINRTPPIGKCIICLDDKNIKKITKKIKTKNILSYGFDKNSDYQIINTKFNNKNSKFDLLVKNFFGKKKIIKNIYLNLIGKYNILNSTAAICVCINLGIKIDIIKKSLSKFSGVQRRMTKILEKNSNIFYDDYAHHPTEISSVLEGIRKISNKKEITAVFQPH

SEQ ID NO: 165343 - protein, 200 aa, Unknown
  Bacterial polypetide isolated from the Sargasso Sea
EIQAAKNRKLIILKRAEMLAHVVSLKKNIVITGSHGKTTTTSLISRILYEAKLDPTIINGGVINSIKSPARLGRGDWAVLEADESDGSFLNLPINYSVVTNIDREHIDFYKSFENLKKSFLKFLNKTPTIGKAFLCVDDKEIKKIIPTIKNKNFLTYGFSKKANFKIFNTVYKKDYSMFDLKISIKGLKKTIIKKIKLNP

SEQ ID NO: 165344 - protein, 195 aa, Unknown
  Bacterial polypetide isolated from the Sargasso Sea
MLYSIKKVHLIGIGGIGMSGIAELLKNKEFVVSGSDIADSPNVQRLIDFGIKVSIGHNKENISDAELVIYSDAIPKDNVELIEALAKNIIVYSRARMISEIAKLNNSTVAIAGTHGKTTTTSMVGTILKAINLDPTIIVGGVVKSLESNSFLGRGDIFVVEADEYNKSLLHLSPTIAVINNIDFEHIECYNDIND

SEQ ID NO: 165345 - protein, 55 aa, Unknown
  Bacterial polypetide isolated from the Sargasso Sea
MDKKLLLKSHFHFIGIGGIGMSALAIGLLKKGCSVSGSDLVKNDETKKLEKLGAV

SEQ ID NO: 165346 - protein, 225 aa, Unknown
  Bacterial polypetide isolated from the Sargasso Sea
MKINKKQLIHIIGIGGIGMSGIAEILKGLGYSVQGSDISLNSNILRLKGKKIRVFIGHSKNNLKNVDLVIYSSAIKKNNKELKFAKDKLIPSIPRSNILAQLVSLKKTIAVSGSHGKTTTTSLIASVLSKSRYKPTIINGGIINEYGTNTRLGNGKWMVVEADESDSTFLELSSTISVITNIDEEHLDHYKSFLNLKKSFMKFITQVPFYGCAIVCNDNKHVRNG

SEQ ID NO: 165347 - protein, 226 aa, Unknown
  Bacterial polypetide isolated from the Sargasso Sea
MKKINLGQKDVIHFVGIGGIGMSGLAQIMKNMGFKIQGSDQNKNKNTISCSKSGIKLFIGHSIHNIKGATIVVKSSAIKNSNVEIKYAKKNKIPIYPRADVLADVVSLKKNIIITGSHGKTTTTSLVAKILSDQKLDPTIINGGVINSFNSNAKLGKGDWSILEADESDGSFLKLPINYSIVTNIDREHLDYYKNYKNLEKSFLEFINKTPTTGKSIICIDNTNIR

SEQ ID NO: 165348 - protein, 168 aa, Unknown
  Bacterial polypetide isolated from the Sargasso Sea
MKINIGSSEIVHFIGIGGIGMSGLAQIMNNMGFFVQGSDLNKNKNTERLTKLGVKFFFGHNKKNLKKATLVVISSAVKKNNSELKFARFKKLPIFKRGDMLANIVALKKNIVVTGSHGKTTTTSLVANILVEAGLDPTVINGGVINSLKNNAQLGKGEWAVIESDESD

SEQ ID NO: 165349 - protein, 216 aa, Unknown
  Bacterial polypetide isolated from the Sargasso Sea
IIKKIKNKNILTYGFSSVANYRIDNTRYYLNYSIFDLNYKNLDNKKIKIKNINLKLIGEHNILNATAAIAVCLNLGVKINTIKKALKNFSGVQRRMTKIFTKNKNEFFDDYAHHPTEIHSTLDGVSKVYNQRKIISVFEPHRYSRVISLKKAFSKCFIKSNIVLICPIYAAGEKKNKNFNYFNFARLISKNSKTQVIIVKNLKRAYKLFKKKPSQK

SEQ ID NO: 165350 - protein, 250 aa, Unknown
  Bacterial polypetide isolated from the Sargasso Sea
AFCCTDHPEVQALVGKVTDRRIITYGFNAQADVRALNVTFMDGFSYFDVLLQKENKTLDRLSLPMPGNHNISNSLAAIAIARHLNIDENSIKKSLSLFKGVNRRFTQVAELDGIKIIDDYGHHPVEISAVLRAARQTSTGKVFAIHQPHRYTRLSSLFEDFCSCFNEADFVGILEVYSAGEAPIEGASRSDLVSGLIRHGHRNVVSIDHERDLEKFIRRHAKSGDIVVCLGAGTISVWANNLPSRLIDMR

SEQ ID NO: 165351 - protein, 217 aa, Unknown
  Bacterial polypetide isolated from the Sargasso Sea
MKIELAKTEIIHFVGIGGIGMSGLANIMSGLGFKVQGSDIQSNKNIERLKKKRIKVCIGHAKKNISNSTILVISSAIKSSNPEVLFAKKKKIPIYKRGDMLAHVVSLLKRNVVVAGSHGKTTTTSLISSIFSETKLDPTIINGGVLNSFNNSAKLGKGDWCILESDESDGSFVKVPSTYSIITNVDKEHMDYYKDMNNLKKLFIKFIEKTPSFGKSF

SEQ ID NO: 165352 - protein, 224 aa, Unknown
  Bacterial polypetide isolated from the Sargasso Sea
MKINIASNEIIHFIGIGGIGMSGLAQIMHNMGFQIQGSDLSHNKNTERLIKTGIRTYIGHNKKNIKRATMAVISSAIKKNNKELIASKNKKIPIISRGDMLANIVSLKKNIVVSGSHGKTTTTSLIANILAEAGLDPTIINGGVINSLKNTAHLGEGEWAVIESDESDGSFLKLPITYSIVTNLDKEHLDFYKNFNKLKNSFRIFIEKTPSFGKSLVCLDNNNL

SEQ ID NO: 165353 - protein, 231 aa, Unknown
  Bacterial polypetide isolated from the Sargasso Sea
MLLKSHFHFIGIGGIGMSALAIGLLKKGCSVSGSDLVKNDETKKLEKLGAVIFSSQIQQNIEFVISRFTNKLINFVVSSAIKPENEEFSYCREKNLSIKHRSEILAMLMRTYTALAVAGSHGKTSTSTFLSTILELCTRDSSSITGGIIPIYNSNCHLENTKYLVAEVDESDGTINKYKSDIGIINNIDFDHCDHFSNLNEVISSFKSFAKNSKKLLLNFDCETSRNKFLF

SEQ ID NO: 165354 - protein, 321 aa, Unknown
  Bacterial polypetide isolated from the Sargasso Sea
VFIGQKKQNLKIATIAVISSAIKKNNPEYIEARRKKLPIITRGRMLAHIVSLMKNIVVVGSHGKTTTTSLITSILQKTKLDPTIINGGVINSIKNTAKLGKSDWTVLEADESDGSFLHIPPTYSIITNIDREHMDFYKSMDDLEKYFINFIKKVPSFGKSFICLDDPINNRIIKKLSNRNFYTYGLNPKSNFFIKNINQNKNFTEFDVLVNVPNKKKIKIKKIRIPLLGIHNVRNSVAAAAVAITIGISIFDIKRGLKNFKGVQRRFNKIFTHNNIDFYDDYAHHPTEIKVVLDGVNKVYKDYEKVCIFSPHRVSRLKDLR

SEQ ID NO: 165355 - protein, 286 aa, Unknown
  Bacterial polypetide isolated from the Sargasso Sea
IIGHNKNNIQAPDVVVYSSAINKTNPEIQNAIKLNIPVIRRAEMLAELIKLKKISIAIAGTHGKTTTASMLGSILTASSFEPTMVIGGIVNKFQSNSISGKGNIIVVEADEFDRSFLTLQPTIGVITNLDLEHLDCYKNLEDLKGAFTQFANAVPFYGKIALGTDNKNAANIVKNINRPVISFGLNKNAYIRATKLFFSKNKSSFTLIENNKKLGVLNINVPGEHNIKNALAAITIALQLDISFQNIKDGLKQYSGVRRRFDIKYNTSNQIMIVDDYAHHPAEVLA

SEQ ID NO: 165356 - protein, 197 aa, Unknown
  Bacterial polypetide isolated from the Sargasso Sea
ENITLYSLSLPMPGNHNVLNSLAAIAIARHLDIDEKSIKKSLSQFKGVNRRFTQVAELNGIKIIDDYGHHPVEISAVLKAARQTATGKVFAIHQPHRYTRLNSLFEDFCSCFNEADFVGIMEVYSAGEAPIDGASRSNLVSGLVRHGHRNVFSVDNEDDLETLIRSQAKSGDIIVFLGAGTVSAWANSLSLRLSDLG

SEQ ID NO: 165357 - protein, 262 aa, Unknown
  Bacterial polypetide isolated from the Sargasso Sea
QNVNRLESRGVKISIGHSAKNIDNVDVVVYSSAVKQENIEIITAKKRNIPVIRRAEMLAQLINLKETSIAVGGTHGKTTTSSMVGTVLEGSSFDPTLVVGGLVSNLNSNVKLGHGDIIVVEADEYDRSFLALNPTIAIITNLEMEHTDCYANLEELESAFLQFCNSIPFYGEIILCADSEPLMKLSNSIKKPVVTYGTVLDADFRADNIIFNQNCSEYDLYHKEKKLGKIKINVPGKHNVLNSLAAISLGIELGVSIDILKN

SEQ ID NO: 165358 - protein, 179 aa, Unknown
  Bacterial polypetide isolated from the Sargasso Sea
MKIDLGKNELIHFVGIGGIGMSGLAMIMNGLGYKVQGSDINKNRNIERLNEKKIKVFINHKKENIKKTTVLVTSSAIKKNNPEVSEAIKRNLPIYTRGDMLGHIVSFMRNVVVTGSHGKTTTTSLVSNIFTSGNLDPTIINGGILNSIGNSAKLGKSNWCITESDESDGSFLKIPFTYS

SEQ ID NO: 165359 - protein, 294 aa, Unknown
  Bacterial polypetide isolated from the Sargasso Sea
RSDTEEKKKIPIYNRADVLADVVSLKKNIIVTGSHGKTTTTSLISKILSDQKLDPTIINGGVINSLKSNAKFGKGEWAILEADESDGSFLKLPINYSIVTNLDYEHIDYYRNFKNLEKSFIRFIEKTPPTGKSIICIDDKKIQKIFKKIMNKNILTYGESKFANYKISNIRYKVDYTFFDISYKNIERKNKKIKNIQLKLLGKHNVFNATAAIAICLNLGVNQNIIKKSLRKFSGVQRRMTKIFFKGKNDFYDDYAHHPTEIRSILDGVKNVNANRNIISVFEPHRYSRVLFSK

SEQ ID NO: 165360 - protein, 250 aa, Unknown
  Bacterial polypetide isolated from the Sargasso Sea
YKRGEMLASIVSLYKNVVVAGSHGKTTTTSIVSTIFSKSSLDPTIINGGVINSIGNSAKLGKGEWCILESDESDGSFLQLPFTYSIITNIDEEHLEHYGSIDNLKKSFIKFAEKTPSFGKTLICIDDKHNRSILRKINNQNIITYGINEKSNFRIKNIQLKSKISKFDLDVKLPNQEKKIFKSFEIPLIGIHNIKNCCASIAVAIMMGISIKTIKKAIFEFKGVQRRFNFIFEHRKSIYFDDYAHHPTEI

SEQ ID NO: 165361 - protein, 251 aa, Unknown
  Bacterial polypetide isolated from the Sargasso Sea
MKIDLGKNELIHFVGIGGIGMSGLALIMNGLGYKVQGSDIADNRNIERLNKKKIKIFLNHKKENIKKTTVLVISTAIKKNNPELVEAIKKNLPVYTRGDMLGHIVSFMRNVVITGSHGKTTTTSLVSSIFTAGKLDPTIINGGVLNSFGNSAKLGKSNWCVTESDESDGSFLKIPFTYSIATNLDSEHLDFYKNINNLKKSFHKFIDKIPSVGKGFLCNDDLNLKNVFKKSTNKNFYTYGKSKNSNFQIIN

SEQ ID NO: 165362 - protein, 276 aa, Unknown
  Bacterial polypetide isolated from the Sargasso Sea
IKLAKTELIHFVGIGGIGMSGLAIIMNGLGFKIQGSDISNNKNIERLKKNKIKVFIGHNKKNIKKSTILVVSSAIKKNNKEYIYAKKKKLPIYTRGEVLGHIVSLMKNIVVAGSHGKTTTTSLISSIFSQANLDPTIINGGVLNSFGNSAKLGKSNWCILESDESDGSFLKVPSTYSIVTNIDQEHMDYYGSMSNLKKSFINFIEKTPSFGKAILCIDDNNIKNILKKIKNKSYLTFGTNIYSNFNILNIEQKIIYSKCDIKINLPNKKITIIKNL

SEQ ID NO: 165363 - protein, 63 aa, Unknown
  Bacterial polypetide isolated from the Sargasso Sea
MISKNKKIKIHFIGIGGIGMSGIAELMHKIGYTVLGSDNNESENVKRLKSIGINVKIGHSKKN

SEQ ID NO: 165364 - protein, 132 aa, Unknown
  Bacterial polypetide isolated from the Sargasso Sea
FDDYAHHPTEIRAVLDGARLVFNNKKIICVFQPHRYSRVKNLKQEFASSFKLCDEIILCPVYSAGEKEKYNFKQENFSKLISKKSNVQVINIKDKSDLKNYIKKNLFNNEIIICMGAGSISSWIREIGNELK

SEQ ID NO: 165365 - protein, 281 aa, Unknown
  Bacterial polypetide isolated from the Sargasso Sea
MKIRIGQKEIIHFIGIGGIGMSGLAQVMKTMGFKIQGSDQSKNKSTSDCAKAGIKIFIGHAKKNIKNSTLVVKSSAIKDNNVEIKQAKKNKIPIYSRAEVLANVVSLKKNIIITGSHGKTTTTSLVAKILSDQKLDPTIINGGVINSFKSNAKLGKGDWAILEADESDGSFLKLPINYSIVTNIDFEHIDYYKNYKNLENAFIQFINKTPPIGKSLICIDNKNIKRILKKIKNKNILTYGFNKKANYRISNPRYYTTHSLFNLHYKNLDNTKAKIKNINLN

SEQ ID NO: 165366 - protein, 314 aa, Unknown
  Bacterial polypetide isolated from the Sargasso Sea
KFREVTMQKGKNVEGCKKIGIKIFYNHKSKNVKNCKIIVKSSAINSDNPEIIEAKKKKLLILKRAEMLAHVVSLKKNIIITGSHGKTTTTSLISKILTEAKLDPTIINGGVINSFKSNARLGKSDWAVLEADESDGSFLNLPINYSVVTNLDKEHLDFYKSFSNLKNSFVKFLNKTPSIGKSFVCIDDFEIKKILPKINRRVFFTYGFSKKSNFQAFDIKYKKNYSVFSLRVSVPGIKKAIFKKIKLNLIGAHNVQNSLAAISLCLHIGVKINVIKQSLKRFSGIQRRLTKVFQINKKEFYDDYAHHPTEIKSV

SEQ ID NO: 165367 - protein, 190 aa, Unknown
  Bacterial polypetide isolated from the Sargasso Sea
MKINLGKAELIHFVGIGGIGMSGLALIMNGLGFKIQGSDISNNKNIDRLKAKKIPIFLNHRKKNIIKSTILVVSSAIKKNNPEVVSAKKLNLPIYSRGEMLGHIVSLMRNIAVTGSHGKTTTTSLISSIFTKARLDPTIINGGVLNSFGNSARLGKSNWCLIESDESDGSFLKIPFTYSIVTNIDSEHLD

SEQ ID NO: 165368 - protein, 293 aa, Unknown
  Bacterial polypetide isolated from the Sargasso Sea
LKLPINYSVVTNLDNEHLDFYKNFNNLKNAFVKFINKTPPIGKTIICLDDLNLKNILKKIKTKNYLTYGFNKNADFQILNAKYEKKYSKFDLKFKDHKSKKIIIKNIVLNLIGKHNVLNSTAAIIICLNLGIQIKTIKKSLTMFSGVQRRLTKIFDINGKEFYDDYAHHPTEILSVLMGLRQVYKNRKIISIFQPHRYSRLKSLKKEFASSFSMSDLVLLCPIYAAGEKKDLSYNQDSLAKLISQNSKTQVVIIKDQLDVKKYLNKCLVGNEIVIGMGAGSISKWMRELKGQI

SEQ ID NO: 165369 - protein, 151 aa, Unknown
  Bacterial polypetide isolated from the Sargasso Sea
LHIGIDIKIIRNALRKFTGIQRRLTKVFENNGREFFDDYAHHPTEIKSVLHSLRITYKGRKIISVFQPHRYSRIKLLKGDFAFSFKDSNLVILCPVYPAGEKVDKHYDKKNFAKLIAKKSKVQVITVEDEKDLRKFFKKNLISNELILCMG

SEQ ID NO: 165370 - protein, 237 aa, Unknown
  Bacterial polypetide isolated from the Sargasso Sea
MQQFKKIRNIHFIGIGGSGMIGIATILHKKGYNISGSDISKTKELDELANSGVDVTYSHKSKNISNKDLIVLSSAIDSSNVEVSSAKKKNIPIIPRAEMLSGISRGYQGIAVAGSHGKTTTTSLIAHIFNQALLSPTYVIGGKILSSDGNSRLGDGNFFIFEADESDKSFLSFYPDSAVITNIDDDHLESYQGDINNLKKSFLDFSDNIPFFGYVIANYDDKNTRDILKKIKRRIIT

SEQ ID NO: 165371 - protein, 196 aa, Unknown
  Bacterial polypetide isolated from the Sargasso Sea
MKINLGKKEIIHFIGIGGIGMSGLALIMKQLGFKIQGSDISVNKNIERLKKGNIKIFTKHKISNLNKANIIVISSAIKNNNVELNAAKKKDLPIYKRGDMLAHMTSLKKNIVVAGSHGKTTTTSLIANIFSKAKLDPTIINGGVINSINNSAKLGKSEWCVLESDESDGSFIKVPFTYSIITNIDREHMDFYKSED

SEQ ID NO: 165372 - protein, 225 aa, Unknown
  Bacterial polypetide isolated from the Sargasso Sea
ISYSKSQNSDVKIIKITKDKKGNNFSLYFKKGVIKGIKGKYHFKTNLMGDHNIFNSTAAIIAALLAEIPIKKIKNSLKDFQGVKRRFSFIGKINKASIYDDYAHHPSEIKASYDIAKQISDKKIVIVFQPHRYTRTKILQNEFVKILTKVDILYILDIYSAGEKSIPNINSKNLVKKIKIKNKNTFYIKNPNNLRFFLSEYFNDKNIIVFMGAGSITNLANELIA

SEQ ID NO: 165373 - protein, 251 aa, Unknown
  Bacterial polypetide isolated from the Sargasso Sea
MKNIRIGQKEIIHFVGIGGIGMSGLAQVMKTMGFKIQGSDQNKNKSTLNCSKAGIKVFIGHSKKNIKNATIIVKSSAIKDSNVEIKEAKKSKISIYSRAEILANVVSLKKNIIITGSHGKTTTTSLVAKILSDQKLDPTIINGGVINSFKSNAKLGKGDWAILEADESDGSFLKLPINYSIVTNIDLEHLDYYKSYNNLENAFVEFINKTPPIGKSIICIDNTNIKKILKKIKNRNTLTYGFSKNANYRIS

SEQ ID NO: 165374 - protein, 138 aa, Unknown
  Bacterial polypetide isolated from the Sargasso Sea
MKKINLGQKEIIHFVGIGGIGMSGLAQIMKNMGFKIQGSDQSKNKNTVSCLKAGIKIFIGHSKKNVKSSTIIVRSSAIKNNNCEIKYAKEKKIPVYSRADVLADAVSLKKNIIITGSHGKTTTTSLVSKILSDQKLDP

SEQ ID NO: 165375 - protein, 72 aa, Unknown
  Bacterial polypetide isolated from the Sargasso Sea
MFRHVKKLHFVGIGGIGMSGIAELLLNQGFKITGSDINNSKVIQNLKDKGAEIFIGHDTKNLTDADVLVYSS

SEQ ID NO: 165376 - protein, 205 aa, Unknown
  Bacterial polypetide isolated from the Sargasso Sea
MKIDLRKNELIHFVGIGGIGMSGLALIMNELGYKVQGSDIANNRNIERLNEKKIRVFLNHKKENIKKITVLVVSSAIKNNNPELVESIKKNLPVYTRGDMLGHIVSFMRNIVVTGSHGKTTTTSLVSSIFTACKLDPTIINGGVLNSFGNSAKLGKSNWCITESDESDGSFLKIPFTYSIVTNLDYEHLDFYKNIKNLKKSFFKF

SEQ ID NO: 165377 - protein, 191 aa, Unknown
  Bacterial polypetide isolated from the Sargasso Sea
MFRKVNKVHFVGIGGIGMSGIAELLLNLGFEISGSDVSDSEIIDRLRSNGAKVNIGHKTDNLFETEVVVYSSAIPEDNVELIFAREMNIPTIKRAEMLGELIALKNTSIAVGGTHGKTSTSSIIGTLLSHSKLDPTLIVGGLVKNLDSSSKLGSGEIVVVEADEYDKSFLQLKPTVAVITNMKRSIWMLSK

SEQ ID NO: 165378 - protein, 138 aa, Unknown
  Bacterial polypetide isolated from the Sargasso Sea
MTFRKINRIHFVGIGGIGMSGIAELLKNLGFKITGSDIKQSKNVKRLIDLGVNIKIGHKSENLGSADVLVYSSAVSIENPEIIKARQMDIPIIKRAEMLGELITFKKTSIAVAGTHGKTSTSSMIGSVLYEGKIDPTM

SEQ ID NO: 165379 - protein, 231 aa, Unknown
  Bacterial polypetide isolated from the Sargasso Sea
MTNNKYFFIGIGGIGMSSIAQYLYEKENTILGYDASENKSVKILEKKGIEVTNKLSLKSIPDYMKNDDVIVVYTPAIPDDNIFLKYFRANGNKKIQKRSEILGEISKQSKCIAIAGTHGKTTTTAIISHLFHSSGIHFKAFIGGIMKCFDSNYINTGNDFILVEADEYDRSFLNLNPNYAVITSIESDHLDIYGDYKSLSESFQLFRNNVKDVLITDAEIDIDKDFSFSIK

SEQ ID NO: 165380 - protein, 221 aa, Unknown
  Bacterial polypetide isolated from the Sargasso Sea
MIHFVGIGGIGMSGLALIMKGKGFKVQGSDIANNKNIERIKKEKIKVFIGHKKQNIEKGTILVVSSAIKKNNPELLAAKKKQLPIYKRGEMLANIVSLTKNIVVVGSHGKTTTTSLIASIFQETKIDPTIINGGVINSINNSAKLGKSDWSILEADESDGSFVYIPPTYSIITNIDREHMDYYSTMDKLNKYFVNFVNKVPSFGKSFICLDDKNNKNLIKN

SEQ ID NO: 165381 - protein, 268 aa, Unknown
  Bacterial polypetide isolated from the Sargasso Sea
KNNPELSAAKIKQLPIYKRGEMLANIVSLTKNIVVVGSHGKTTTTSLIASIFQETKIDPTIINGGVINSINNSAKLGKSDWSILEADESDGSFVYIPPTYSIITNIDREHMDYYGTMNKLNKYFENFVNKVPSFGKSFICLDDKNNKNLIKNIKNKNFYTYGLDVKSNFRIKNIKQLKEYSEFDLNIKLPNKKNQLIKKFKIPLLGTHNIKNSVAAAALALTVGLPIHNIKKGLKNFKGVQRRFNKIFSFNNVDFYDDYAHHPTEIKE

SEQ ID NO: 165382 - protein, 264 aa, Unknown
  Bacterial polypetide isolated from the Sargasso Sea
FYGFKVLCIDHPAVQNLNPLNKDRRLLTYGQSTSADVRAVSIKFTEGHSYFDLILSDRMICRRKVWHNVKLPMLGIHNVLNCLAGIAVAIEMGISENLIRNSLVEFKGIKRRFEIKGKSNCGITVIDDYGHHPIEIKYALSAARELAKNKKVIAIVQPHRYTRLKELFEDFCSCFNDADIVYVSDIFSAGEKPIPDFNKDKLASGIIDHGHQNVLKLNDPKFLAKSICEVSDSDDIVILLGAGSITNWSNKLVDELNECRESKC

SEQ ID NO: 165383 - protein, 290 aa, Unknown
  Bacterial polypetide isolated from the Sargasso Sea
LDPTIINGGVINSINNSAKLGKSDWSILEADESDGSFVFIPPTYSIITNIDREHMDYYGTMDKLNKYFENFVNKVPSFGKSFICLDDKNNKHLIKNIKNKNFYTYGLDKKSNFCIKNIKQLKDFSEFDLNIKLPNKKIKLIKKFKIPLIGTHNIKNSVAAAALALTVGLPINNIKKGLKNFKGVQRRFNKIFNFNNVDFYDDYAHHPTEIKEVLDGVKNVYKDYEKICIFQPHRISRLKDLKKEFTFAFKNADKVILFPIYTAGEKLKLGFSYANFAKDIIKNSKVELFL

SEQ ID NO: 165384 - protein, 215 aa, Unknown
  Bacterial polypetide isolated from the Sargasso Sea
MKINSNIHFIGISGIGMSGIAELMLDKGYSIQGSDISVNDNTKRLKKKGIKFFLGHNKKNIKYSHAVVYSSAIKKNNPEIKEAYIKKIPVLSRADMLSELMKNKKSIAIAGSHGKTTTTSLVGNIFNEAGLDPTIVNGGIINSFSKNNRYGKGEWMIVEADESDGTFLKLPHQISIITNLDIEHLDFYKSKKNLINAFEKFVNLLPFYGTTIMCY

SEQ ID NO: 165385 - protein, 298 aa, Unknown
  Bacterial polypetide isolated from the Sargasso Sea
SENENVKRLKELGVDVRIGHNVNNVTNDIDVLVYSSAVSLENPEIMRAKQKGIPVIRRAEMLGELISVKETSIAIGGTHGKTTTSSMVGAILSYAKMDPTLVVGGLVHNLDTNSKLGSGDIIVVEADEFDRSFLALKPTISIITNIELEHMDCYKDLDDLQNAFISFCKSVPFYGAIIACIDSPAVQEIITKIERPMITYGRSRDAAYRAKNLRFYENKSTYTVFRAEECLGEIELNVPGEHNILNSLAAVTLGLEMGLSFTNISKGIQAYKGVRRRFDIKRIHNEIFVVDDYAHHPT

SEQ ID NO: 165386 - protein, 166 aa, Unknown
  Bacterial polypetide isolated from the Sargasso Sea
MNHSTNKPDKIHFVGIGGSGMSGLAEVLLNLGYSVSGSDLEESFITQRLSSLGAKVYIGHKKSNVTDKDMLIISSAISKENEEILEANKNNLPILARAELLASLMNLKKGIAIAGTHGKTTTTSILASIMTDANLDPTFINGGIINSFATNAKLGSGDYLIAEADE

SEQ ID NO: 165387 - protein, 52 aa, Unknown
  Bacterial polypetide isolated from the Sargasso Sea
MSSIKNIHLIGIGGAGMSGIAEILHNQDYSVSGSDLEDTNVTKRLKNLGVKI

SEQ ID NO: 165388 - protein, 323 aa, Unknown
  Bacterial polypetide isolated from the Sargasso Sea
IIQKLLFAKKRKIPIYKRGDMLANVVSLMKNVVVAGSHGKTTTTSLISNIFLHAKIDPTVINGGVLNSFSGSAKLGKSDWCILESDESDGSFIKIPSTYSIVTNIDKEHMDFYKSLDELKKNFVKFIEKTPSFGKSFICLDDDNNKDVIKKLKNLNYNTYGVNNSSNFKILNVIQKENFSSFDIKINLPGVKNNYIKNIKIPLIGLHNIRNSTVAAAIAFSVGIPIKIIKKGLEKFSGVQRRFTKVFSFQNVPFFDDYAHHPTEIKEVINGVREVYKKKEIVCIFQPHRISRLKKLNDEFSKSFKNADTVILCPIYKAGEILN

SEQ ID NO: 165389 - protein, 170 aa, Unknown
  Bacterial polypetide isolated from the Sargasso Sea
MKIEIAKSEVIHFIGIGGIGMSGLALVMSRMGFKIQGSDINSNKNIERLKHNGIKIFIGHGKKNISRATIIVISSAVKKNNTEIIAAKERNLPIYKRGDMLGHITSLTKNIVVVGSHGKTTTTSLVASILSSSNLDPTIINGGVLKSSNNSARLGKSNWTIVELDESDGS

SEQ ID NO: 165390 - protein, 130 aa, Unknown
  Bacterial polypetide isolated from the Sargasso Sea
MKINLGKNELIHFVGIGGIGMSGLALIMNGLGYKVQGSDIADNRNIERLNKKKIRIFLNHKKENIKKTTVMVISSAIKKNNPELVEAIKKKLPVYTRGDMLGHIVSFMRNVVITGSHGKTTTTSLVSSIF

SEQ ID NO: 165391 - protein, 193 aa, Unknown
  Bacterial polypetide isolated from the Sargasso Sea
KNLHQKFEKFINTTTLLGKAIVCSDDKKLKKIAEKNLNKNILTYGYNSKADFRILNSQNTNMGMKFDLKLQQKKKKITLNNFYINLIGKHNVLNATASIALALSIGINQKVIKHSLKEFKGVQRRMTQLMNFNNKLFYDDYAHHPTEITAVLKACRANFSKRKIISVFQPHRYSRLKYLYDKFTKSFYNSDVV

SEQ ID NO: 165392 - protein, 216 aa, Unknown
  Bacterial polypetide isolated from the Sargasso Sea
MFRHVKKLHFVGIGGIGMSGIAELLLNQGFKIAGSDINDSKVIQNLKDKGAEIFIGHDSKNLTDADVLVYSSAVNRDNPEISSAIKKHIPIIRRAEMLGELIALKETSIGVAGTHGKTSTSSMVGSMLSKANLDPTLVVGGLVRNINTNSLLGEGEIIVVEADEFDRSFLSLQPTIGIITNIELEHTDCYEDIYDLQNAFTQFANASPFYGAVIIW

SEQ ID NO: 165393 - protein, 268 aa, Unknown
  Bacterial polypetide isolated from the Sargasso Sea
MRKFEIGLKEKIHFIGIGGIGMSGLAQVMKTMGFNVQGSDLTLSKNVERCKKIGIKVFKTHSRKNINDSSIVVRSTAIKNNNPEIKAAKERKINILKRAEMLAQVVSLKTNIVITGSHGKTTTTSLISKVLTSSGLDPTIINGGVINSFKSSARLGKGQWAVLEADESDGSFLNFPVNYSVITNLDKEHLDYYKSFNNLKKSFIKFLHKTPPIGKSFICIDDYELRKLIKKINKKNILTYGFSKGANFQILKPIYKKDYSLFNLKISV

SEQ ID NO: 165394 - protein, 234 aa, Unknown
  Bacterial polypetide isolated from the Sargasso Sea
MKNIRIGQKEIIHFIGIGGIGMSGLAQVMKTMGFNIQGSDQSKNKSTINCKRANIKVFIGHSRKNIKNATIIVKSSAIQNNNLEIQEAKKKRIPIYSRADVMADVVSLKKNIIVTGSHGKTTTTSLIAKILSDQKLDPTIINGGVINSFKSNAKLGKGDWAILEADESDGSFLKLPINYSIVTNIDYEHIDFYKNYKNLENAFIQFINKTPPIGKSLICLDSKNIKKILSKIKN

SEQ ID NO: 165395 - protein, 159 aa, Unknown
  Bacterial polypetide isolated from the Sargasso Sea
MKIKLAKAELIHFVGIGGIGMSGLALIMKGKGFKVQGSDIANNKNIERLRKEKIKVFIGHKKQNIEKGTILVVSSAIKKNNPELLVAKKKQLPIYKRGEMLANIVSLTKNIVVVGSHGKTTTTSLIASIFQETKIDPTIINGGVINSIKNSAKLEKVIV

SEQ ID NO: 165396 - protein, 177 aa, Unknown
  Bacterial polypetide isolated from the Sargasso Sea
MRISLGKKEVIHFIGIGGIGMSGLALIMKELGFNVKGSDQQISKNIDRLKKNRIKIQLGHKKKNISNATIIVVSSAIKKNNPEFIEAKNRKIPIYKRGEMLASIVSLYKNVVVAGSHGKTTTTSIVSTIFSKSNLDPTTINGGVINSIGNSAKLGKGEWCVLESDESDGSFLELPFT

SEQ ID NO: 165397 - protein, 188 aa, Unknown
  Bacterial polypetide isolated from the Sargasso Sea
MKINLGKTELIHFVGIGGIGMSGLALIMNGLGFKVQGSDILKNKNIERLEEKKIKVFLKHKKKNIDKTTILVISSAIKSDNPELTHAKKLNLPIYTRGEMLGHIVSLMRNIVVTGSHGKTTTTSLISSIFTEAKLDPTIINGGVLNSFGNSAKLGKSNWCIIESDESDGSFLRSHSHILLLQILMLNI

SEQ ID NO: 165398 - protein, 131 aa, Unknown
  Bacterial polypetide isolated from the Sargasso Sea
LVYDDYAHHPTEIKATLAAAKKIRKKIIVIFQPHRYSRTQVLINEFVEVLSKIKELYLLKTYSAGEKVIQTATSKALIEKISKYQKNVNYIKNEDRLYNLLTRHSAQHSIILFMGAGSITRIAHEFMNKND

SEQ ID NO: 165399 - protein, 276 aa, Unknown
  Bacterial polypetide isolated from the Sargasso Sea
HLDYYKNYRNLEKSFLEFINKTPPTGRSIICIDNVNIRKILNKIKNKNILTYGENKKAHYTINKIRYNFESTIFDLSFKDKNKKKKKIKNINVKLLGKHNVLNAAAAFIVCLNLGADVKIIKKSLRNFSGVQRRMTKVFSKNSNDFYDDYAHHPTEIKSILEGVQKVNPSRKIISIFEPHRYTRVMTLKDEFSKCFSKSNLVIICPIYAAGEKRNPKFDLIQFANLIAKNSKTQVTCVKNELDLCNYFRKNLVSNEIIIGMGAGVISKWMANIKYS

SEQ ID NO: 165400 - protein, 169 aa, Unknown
  Bacterial polypetide isolated from the Sargasso Sea
RHLNIDENSIKNSLSLFKGVNRRFTQVAELNGIKIIDDYGHHPVEISAVLKAARQTATGKVFAIHQPHRYTRLNSLFEDFCSCFNEADFVGITEIYSAGEAPLEGASRSDLINGLVRHGHRNVISIDDEGDLENLIRRHAKSGDIIVCLGAGTISVWANNLPSRLSDLG

SEQ ID NO: 165401 - protein, 159 aa, Unknown
  Bacterial polypetide isolated from the Sargasso Sea
DIKVIKNALEKFSGIQRRLTKVFSHEKREFFDDYAHHPTEIKSVLKSMRKISSGRKIISVFQPHRYSRLKLLKSEFASSFQDSNTVILCPVFSAGEKVDKNYDTFKFASLISKKSNVQVITVENQKDLKNFFKKNLISNELVLCMGAGSISKWIREMEL

SEQ ID NO: 165402 - protein, 188 aa, Unknown
  Bacterial polypetide isolated from the Sargasso Sea
MNLLSSFKKVFIMGIGGSGMSSIAKYLKQKGHDVKGYDQRISYITNLLENDGVKTYQKFDGFRYEKDVLYIISSAIDLEGTFLEHFKENENVISRPKFLDLLSEEVKIIGITGTHGKTSTTALVSHIFHFNNKNVSFIYGGVSSFGNLGGHCGDDALPLILETDEAFNTFKNINIEDLIVTNIDNDHI

SEQ ID NO: 165403 - protein, 295 aa, Unknown
  Bacterial polypetide isolated from the Sargasso Sea
KKHSMNKYTEVYILGIGGSGMSSIAKYLVQQNIDVAGYDQRKSYITNQLNQDGIRVDFNLRNLKYSKNILYIYSSAISINETTLKDYLDSDNVLSRPEFLNILSKENKIIGITGTHGKTSTTALLAHIFHYNERNASYIFGGITSFHGIGGHYGDQDQPIILETDEAFNTFKDINIDDLLVTNIDVDHLDYFKNFKNLLNAFKHVIDNVKGNLVLNFDDQNLRELKTSNNCISYSSSEVADIQIQYPNKIIIENEEYVVTTKLIGNHFISNIAGAIALAYLNGIKIEDSIEAVET

SEQ ID NO: 165404 - protein, 137 aa, Unknown
  Bacterial polypetide isolated from the Sargasso Sea
FSIGEREFFDDYAHHPTEIKSVLKSLKTTSNNRRIVSVFQPHRYSRLRLLKKDFSYAFKDSDLVLLCPVYPAGEKIDKKYKEVDFARLIFRNSKAQVVIVRNQHDLKKFFIKNLLENEIIVCMGAGSISKWIREMDL

SEQ ID NO: 165405 - protein, 323 aa, Unknown
  Bacterial polypetide isolated from the Sargasso Sea
TTTTQMVAAVMETGNLDPTVVNGGIIQDYGSNARLGEGDWMVVEADESDGTLVKIPSTISIITNLDPEHLDHYGSFAALKKTFIKFINNIPFYGVAICFIDHPEVKKLISKIKDRRVITYGYSSEADIQITNLEYKKNKAHFQIYKKQNEEHFKFKLPMYGDHNVANATAAITVAFHLKIPLEDIKNGLENFKGVKRRFTKVYTWNGIDIIDDYAHHPVEISAVLSAARKYASGRVIAIHQPHRYSRLANLMKDFSKCFDEADIVGITPVYEAGENPIKGVNSEKLIKLLNDRSINANLVYNENDLLKFLKFYGKPGDIFIVR

SEQ ID NO: 165406 - protein, 233 aa, Unknown
  Bacterial polypetide isolated from the Sargasso Sea
MKIDLGKNELIHFVGIGGIGMSSLALIMNGLGYKVQGSDIAENKNIGRLIEKKVRVFLNHKKENIKKTSILVISSAIKKNNPEVKEAIKKNLPVYTRADMLGHIVSFMRNVVVTGSHGKTTTTSLVSNIFTVGNLDPTIINGGVLNSIGNSAKLGKSNWCVTESDESDGSFLKIPFIYSIVTNLDSEHLDFYKNMNNLKKSFLKFIEKIPSVGKGFLCSDDQNLKKIIKKTKK

SEQ ID NO: 165407 - protein, 53 aa, Unknown
  Bacterial polypetide isolated from the Sargasso Sea
MKNINKKVNNIVHFIGIGGIGMSGIAELMLDQGFIIQGSDLHINENIKRLKKK

SEQ ID NO: 165408 - protein, 204 aa, Unknown
  Bacterial polypetide isolated from the Sargasso Sea
MKINLGKNELIHFVGIGGIGMSGLALIMNGLGYKVQGSDIAANRNIERLKEKKIRVFFNHKKENIKKTTVLVISSAIKKNNPELIEAVKKNLPVYTRGDMLGHIVSFMRNVVITGSHGKTTTTSLVSSIFTAANLDPTIINGGVLNSFGNSAKLGKSNWCVTESDESDGSFLKIPFTYSIVTNLDSEHLDFYKNINNLKKSFIK

SEQ ID NO: 165409 - protein, 299 aa, Unknown
  Bacterial polypetide isolated from the Sargasso Sea
IINGGVINSLKSNAKLGKGEWAILEADESDGSFLKLPINYSVVTNLDNEHLDYYKNYKNLEKSFIEFINKTPPTGKSIICIDNNNIRKILNKIKNKNILTYGESKKADYQLKNIKYKFDSTSFDLLFKNKKEKKNIKNINVKLIGKHNALNAAAAFTVCLNLGANLNTIKKSLKNFSGVQRRMTKIFTKNSNDFYDDYAHHPTEIRSILEGVHNVSPKRKIISVFEPHRFSRVISLKKEFSKCFSKSNLVIMCPLYAAGETKDYKFNLIKFASLIAKNSKTQVIIVKNEIELSNYLKRI

SEQ ID NO: 165410 - protein, 238 aa, Unknown
  Bacterial polypetide isolated from the Sargasso Sea
MKNKKSIAIAGSHGKTTTTSLVGNILNQASLDPTIVNGGIINSLSKNNRYGKGKWMIVEADESDGSFLKLPHQISIITNLDIEHLDFYKSKDNLIKSFENFINMLPFYGTSIICLDDKNLKSLVSKIKTRNIITYSIKSKNADVYIYDIIKKTTKTSFKLKIKRNKILHSNNYKFVLNAVGNHNILNATASIIASKLVGVENLFINKALKNYIGVKRRFSFLGKKNKALIYDDYAHHP

SEQ ID NO: 165411 - protein, 253 aa, Unknown
  Bacterial polypetide isolated from the Sargasso Sea
DHLENHKNSFDVLKKNFLKFISNLPFYGLCLLNLNDINTKSIINKISRPFKTYGLDILADYNGKTLNINSIPSTFIYTENDTEYEIKSNMPGRYNAMNSLAALSLARELGIPIKTIQKAIESFPGISRRFEIHGEFEVNNKKFTWVDDYGHHPTEIKEVLETINNVWKEQRVVMVFQPHRYSRTAEYFSQFVDTLKNVQDLILMEIYAANEREIENISSSALVEEIRKYGVNVVLINNHKKLKNFISQTIKNN

SEQ ID NO: 165412 - protein, 267 aa, Unknown
  Bacterial polypetide isolated from the Sargasso Sea
KYAHAVVYSSAIKKNNPEIREAYIKKIPVLSRADMLSELMKNKKSIAIAGSHGKTTTTSLVGNIFNVAGLDPTIVNGGIINSFSNNNRYGKGEWMIVEADESDGTFLKLPHQMSIITNLDIEHMDFYKSKKNLINTFEKFINLLPFYGTTIMCYDDKNLKLLINKIKTRNILTYSIKNKKADVLIFDIIQNKLKTSFKLKINNKIIHSSNYKFTINAIGNHNILNATASIIAAKLNGIKNKDINNALTNYVGVKRRFSFIGKKNKSF

SEQ ID NO: 165413 - protein, 136 aa, Unknown
  Bacterial polypetide isolated from the Sargasso Sea
MKIELAKKETVHFVGIGGIGMSGLALIMKRKGFKVQGSDISNNKNVERLKKEKIKIFLGHSKQNLKNATIVVVSSAIKKNNPELIEAKKKKIPIIKRGKMLASIVSLLKNIVVVGSHGKTTTTSLITSIFQETKLD

SEQ ID NO: 165414 - protein, 272 aa, Unknown
  Bacterial polypetide isolated from the Sargasso Sea
YKNINNLKKCFLKFIEKIPSVGKGFICYDDQNLKKVLKKSANKNFYTYGKNKKSNFQIINIKQTSNFSSFDIKVNIPSKKKIIKGIKLPMIGLHNILNAAAAVSLAFTIGLPEKNIKVGLYNFKGVQRRFSHLFNHNNIGFYDDYAHHPTEIRSVLNGVRKVYKNKEIVCIFQPHRISRVINLKKEFSKCFKMADTVLLCPIYTANEKLRLNFTYVSFAKLIIKNSNVKLVQVDDELQLQRFIKQNAFGEKIYIGMGAGSISNWMKNLENIF

SEQ ID NO: 165415 - protein, 212 aa, Unknown
  Bacterial polypetide isolated from the Sargasso Sea
MKINLGKRELIHFVGIGGIGMSGLALIMNGLGLKVQGSDISNNKNIESLKEKKIPIFLNHYKKNINKITILVISSAIKSNNPELQEAKKLKLPIYTRGEMLAQIVSLMKNVVVTGSHGKTTTTSLISSIFTQAKLDPTIINGGVLNSFGNSAKLGKSNWCLIESDESDGTFLKIPFTYSIITNIDAEHLDYYKSIKNLKKKFSEFIEKTPSL

SEQ ID NO: 165416 - protein, 180 aa, Unknown
  Bacterial polypetide isolated from the Sargasso Sea
MNKKLISKNHFHFIGIGGIGMSAIAMALIKKGYSVSGSDLVQNKETKSLKRLGAIIFDSQIKKNIDFVISKFQDQTINFVISSAIKDENEELYFCKKNNLLIKHRSEILAMIMNSYTSLSIAGSHGKTSTSTFLSTLLELCTHDSSSITGGIIPIYDSNAHIENTKYLVTEIDESDGTIK

SEQ ID NO: 165417 - protein, 76 aa, Unknown
  Bacterial polypetide isolated from the Sargasso Sea
MDKKLLLKSHFHFIGIGGIGMSALAIGLLKKGCSVSGSDLVKNDETQKLEKSGAVIFTSQIRQNIDFVISKFNNKL

SEQ ID NO: 165418 - protein, 271 aa, Unknown
  Bacterial polypetide isolated from the Sargasso Sea
ENNFSLLKEAFVSFAKKIPFDGLIVACGDDLQVKELLPQFSRRVINYGFNEDNYYQIKNFSAKGLTSSFDLCEDGNKVLDVELNILGRHNALNAVAAIIVAIEEGVPLNTIQSSLKDFSGINRRMDIKGKIKLNNKTCTLIDDYGHHPTEIRSTYQSIQESFPDSHIHMVFQPHRFTRTKDLFDDFVEVLSNVGKVLLLDIYSAGEEKIEGISSQALLDVLNKNSSNNLLIQKKDLALTLTKEVEDNSIILMQGAGNISELTDILLSKYKA

SEQ ID NO: 165419 - protein, 273 aa, Unknown
  Bacterial polypetide isolated from the Sargasso Sea
NYCWQKKRKIPIYKRGEMLANVVSLMKNIVVAGSHGKTTTTSLISSIFTHAKIDPTVINGGVLNSFSGSAKLGKSNWCILESDESDGSFTQIPQTYSIVTNIDKEHLDFYKSLENLKKNFINFIEKTPSFGKAFICLDNNINKEVIKKIKNFNYNTYGLSKLSNFNILNISQKENYSSFDIKINLPSAKINYIRNIKLPLIGLHNIRNSTAAAAVAFSVGIPNKIIKKGLENFSGVQRRFTKIFSYKNVSFYDDYAHHPTEIAEVLNGVREST

SEQ ID NO: 165420 - protein, 169 aa, Unknown
  Bacterial polypetide isolated from the Sargasso Sea
MDYKNIYILGIGGSGMSSIGKYLKQKGLNVIGYDQRKSYVTNLLKQDGIEVVFSESNIPYDKNNLYIFSSAIPIESEKFLELHDKENVISRPEFLKNLSRENKIVGITGTHGKTSTTALLSHIFHFNNVNVSYIYGGVTNFSGIGGHYGDSNLPIILETDEAFNTFENI

SEQ ID NO: 165421 - protein, 309 aa, Unknown
  Bacterial polypetide isolated from the Sargasso Sea
NVKRLKNLNIDVKIGHSPSNINQDTDVLVYSSAVPIENPEIVRARQKGIPIIRRAEMLGELISVKETSIAVSGTHGKTTTSSMIGTILAYAKKDPTMVVGGLVHNIDTNSKLGNGDIIVVEADEFDRSFLALKPTIGIITNIELEHTDCYDDLKDLQDAFIQFCKSVPFYGEVILCADSPAVQEIIPKIERPMTTYGRSRDAAYRAKNIRFQKNKSTYSIFRAEECLGEIKLNVPGEHNVLNSLAAVVLGIEMGLSFNDIQKGIYNYKGVRRRFDIKGTFNDIMLLDDYAHHPTEVKATIEAAKAGWDR

SEQ ID NO: 165422 - protein, 214 aa, Unknown
  Bacterial polypetide isolated from the Sargasso Sea
FVDKIYFDNQYSYFTLNFNFLDNKFSKSYSYKLKARGLHNIYNGTASIIAGHLIGVKNIFIKDALKNYIGVKRRFTHLGRINSADIYDDYAHHPTEIAATLLGAKQIHKNIIVVFQPHRYSRTKLLFNDFIKTLSKINKLYLLDTYSAGEKILKGYETKNIFIKLKKKNRKVEYTSIKKLNNIIYNETKTNNIIIFMGAGSISKIAHNFIKINA

SEQ ID NO: 165423 - protein, 215 aa, Unknown
  Bacterial polypetide isolated from the Sargasso Sea
MKINLGKNELIHFVGIGGIGMSGLALIMNGLGYKVQGSDIADNRNIERLNKKKIRIFLNHKKENIKKTTVMVISSAIKKNNPELVEAIKKKLPVYTRGDMLGHIVSFMRNVVITGSHGKTTTTSLVSSIFTAGNLDPTIINGGVLNSFGNSAKLGKSNWCVTESDESDGSFLKIPFTYSIATNLDSEHLDFYKNINNLKKSFHKFIEKIPSVGKG

SEQ ID NO: 165424 - protein, 227 aa, Unknown
  Bacterial polypetide isolated from the Sargasso Sea
NSFSFGKDKSNDYQIKDIKQNISGTSFKLKDNFFKKDYSFSMSMHGEHNVMNATSAIIAAIQENIDVSIIKKSLKTCSSIERRFEIISHDIFSKKITLVDDYGHHPKEIKYSHDTASEIWKNKKKIVVFQPHRYTRTKDLFDEFIKTLLNIENLLLLDIYPASEKIIKGYEGKDLFHALKKNGSNVVFCQNHTEVIEKLENMTAGNEVIITQGAGTTSELARKISNL

SEQ ID NO: 165425 - protein, 213 aa, Unknown
  Bacterial polypetide isolated from the Sargasso Sea
VSNKILSSADTWKKITLPMLGKHNVLNCLASICIAIEMGISENSIRNTLNNFKGIKRRFESKGVTNNGIKIIDDYGHHPVEITFALSSGRILASKNKLIAIFQPHRYSRLKDLFDEFCQCFNNADYVFITNVYAAGESEIENFNKETLAAGISDFGHNNVSTINNENEICDKIHSVAKPNDVVIFLGAGSITKWSETIVHQLNNSGLKNETIF

SEQ ID NO: 165426 - protein, 132 aa, Unknown
  Bacterial polypetide isolated from the Sargasso Sea
MKIDLGKNELIHFVGIGGIGMSGLALIMNGLGYKVQGSDIANNRNIERLNKKKIRIFLNHKKENIKKTTVMVISSAIKKNNPELVEAIKKNLPVYTRGDMLGHIVSFMRNVVITGSHGKTTTTSLVSSILQQ

SEQ ID NO: 165427 - protein, 199 aa, Unknown
  Bacterial polypetide isolated from the Sargasso Sea
MHQFKKIRNIHFIGIGGSGMIGIATILHKKGYNISGSDISKTKDLDELAKSGVDVTYSHKSKNINNKDLIVLSSAIDSSNVEVSSAKKKNIPIIPRAEMLSGISRGYQGIAVAGSHGKTTTTSLIAHIFNQALLSPTYVIGGKILSSDGNSRLGDGNFFIFEADESDKSFLSFYPDSAVITNIDDDHLEAYDGNINNLK

SEQ ID NO: 165428 - protein, 234 aa, Unknown
  Bacterial polypetide isolated from the Sargasso Sea
MTISLGKKEIIHFVGIGGIGMSGLALIMKELGFSVKGSDQQIGKNIDRLKKNKINIQIGHKKKNLSNATILVISSAIKKNNPEYLEARKKKIPIYKRGDMLANIVSLYKNVVVAGSHGKTTTTSIVSTIFSKSNLEPTTINGGIINSIGNSAKLGKGEWCVLESDESDGSFLKLPFTYSIITNIDDEHLEHYGSIESLKKSFIKFAEKTPSFGKTLICVDDKNNRSILSKIKNQ

SEQ ID NO: 165429 - protein, 245 aa, Unknown
  Bacterial polypetide isolated from the Sargasso Sea
MDRELMLKHHFHFIGVGGIGMSALAMGLLKKGYSVSGSDLVKNDETNKLEHLGALIFTSQIQQNIKFVISKHNNKLINFVVSSAIKQENEELSYCRKNNLAIKHRSDILAMLMQSYTSLAIAGSHGKTSTSTFLSTLLELCTHNSSSITGGIIPIYNSNCHLENTKFLVAEVDESDGTISKYKSDIGIINNIDFDHCDHFANLGQVLSSFKDFASKSRKLLLNYDCEVTRNNLYSDSQWSNTTTS

SEQ ID NO: 165430 - protein, 199 aa, Unknown
  Bacterial polypetide isolated from the Sargasso Sea
MIHFVGIGGIGMSGLALIMKGKGFKVQGSDILNNKNIERLRKEKIKVFIGHKKQNINKGTILVISSAIKKNNPELVAAKKKQLPIYKRGEMLANIVSLTKNIVVVGSHGKTTTTSLIASIFQETKIDPTIINGGVINSINNSAKLGKSDWSILEADESDGSFIFIPPTYSIITNIDREHMDYYGNMDKLNKYFENFVNK

SEQ ID NO: 165431 - protein, 302 aa, Unknown
  Bacterial polypetide isolated from the Sargasso Sea
FIGIGGVGMVGIAEMLINQGFYVSGSDLVKNKNTIRLNSLGAKIFIGHNEKNVRNSDVVVYSSAVNISNPEMKAAKSLNITLIPRAEMLSSLMRGFQSIAVAGSHGKTTTTSLIADIFVRAKLDPTFIIGGKILGQENKSILGTGDYLIVEADESDASFLHLNPEISVVTNIDNDHLDYYENNLEKLDSTFLQFLENLPFFGSAIICTDSERSKKVFENLSRPKISYGFDKKADYFIKDLKQQAKFQKFKIIRNSTGKEISLELTLSGKHNALNAAAAFIVAQKAGINTKVIKDSFKNFGGV

SEQ ID NO: 165432 - protein, 129 aa, Unknown
  Bacterial polypetide isolated from the Sargasso Sea
MSSIKNIHLIGIGGAGMSGIAEILHNQDYSVSGSDLEDTNVTKRLKNLGVKIFKGHKVNNVLKKDLVVISSAISKTNIELKKAISLGIPVIPRAEMLANLMMLKNSIAVAGSHGKTTVTCIMAHIFTEA

SEQ ID NO: 165433 - protein, 194 aa, Unknown
  Bacterial polypetide isolated from the Sargasso Sea
MTFRKIKNVFFVGIGGIGMSGIAELLLNLGFNVSGSDITENDNVQRLKNLNIDVKIGHSPSNLNQDTDVLVYSSAVPIENPEIVRARQKGIPIIRRAEMLGELISVKETSIAVSGTHGKTTTSSMIGTILAYAKKDPTMVVGGLVHNIDTNSKLGNGDMIVVEADEFDRSFLALKPTIGIITNIELEHTDCYDD

SEQ ID NO: 165434 - protein, 108 aa, Unknown
  Bacterial polypetide isolated from the Sargasso Sea
KIIDDYGHHPVEISAVLRAARQTVTGKVFAIHQPHRYTRLNSLFEDFCSCFNEADFVGIMDVYSAGEAPIEGASRSDLVNGLVRHGHRNVVSIDHEEDLEKLIRQHAK

SEQ ID NO: 165435 - protein, 241 aa, Unknown
  Bacterial polypetide isolated from the Sargasso Sea
MKINSNIHFIGISGIGMSGIAELMLDKGYSVQGSDISVNDNTERLKKKGIKFFLGHNKKNIKYAHAIVYSSAIKKNNPEIREAYIKKIPVLSRADMLSELMKNKKSIAIAGSHGKTTTTSLVGNIFNEAGLDPTIVNGGIINSFSNNNRYGKGEWMIVEADESDGTFLKLPHQMSIITNLDIEHMDFYKSKKSLINAFEKFINLLPFYGTTIMCYDDKNLKLLINKIKTRNILTYSIKNKK

SEQ ID NO: 165436 - protein, 311 aa, Unknown
  Bacterial polypetide isolated from the Sargasso Sea
MKIELAKKETIHFIGIGGIGMSGLSLIMKRKGFKVQGSDITSNKNIERLKKNRIKIYLSQKKNNLKNATIIVISSAIKKNNAELIEAKKKNLPIINRGKMLAHIVSLMKNIVIVGSHGKTTTTSLVASIFQKTKLDPTIINGGVINSINSSAKLGQSDWSILEADESDGSFIHIPPTYSIITNIDREHMDFYNSIEDLKNYFIEFIKKTPSFGKSFICLDDDINSQIIKKLKNKNFYTYGVNPKSNFLIRNVKQTVKYSEFDLLINLPNKKKSIIKKLRIPLLGIHNIRNSVAATAVALTVGISQADIKRD

SEQ ID NO: 165437 - protein, 252 aa, Unknown
  Bacterial polypetide isolated from the Sargasso Sea
MIINLGKKETIHFVGIGGIGMSGLALIMKDLGFNIKGSDQQSSKNIERLKKNKINILIGHKKKNLSNATMLVISSAIKKNNPEYLEAKKKKIPIYKRGEMLANIVSLYKNVVVAGSHGKTTTTSIVSTIFSKSKLDPTTINGGVINSIGNSAKLGKGEWCVLESDESDGSFLQLPYTYSIITNIDDEHLEHYGSVNNLKKSFIEFAEKTPSFGKTLICLDDANNKSIINKIKNQNIITYGLNEKSNFRIKNV

SEQ ID NO: 165438 - protein, 272 aa, Unknown
  Bacterial polypetide isolated from the Sargasso Sea
FHLIPFYGFKVLCIDHPIVQKLIPLNKDRRLLTYGLSTTADVKAANIEYFDNHTSFDVVVSNKILSSAETWKKITLPMLGKHNVLNCLASICIAIEMGISENSIRNTLNNFKGIKRRFESKGVTNDGIKIIDDYGHHPVEITYALSSGRILASKNKLIAIFQPHRYSRLKDLFDEFCQCFNNADYVFITDVYAAGESEIENFNKETLAAGISDFGHNNVSIINNENEICDKIHSIAKPNDVVIFLGAGSITKWSETIVHQLNNSGLKNEKIF

SEQ ID NO: 165439 - protein, 351 aa, Unknown
  Bacterial polypetide isolated from the Sargasso Sea
MAKEKIHILGICGTFMGGLAILGKEAGLEISGCDSNIYPPMSDHLSEMGIDIISGYDPSDIPEADFYVIGNTISRGNAALEELLNRKANLISGPQWLYNFILKEKKVIAVSGTHGKTTTTAMIAWIFEFLNKDVGYLIAGKPKDFKKSARKGSEDIFILEADEYDTAFFDKRSKFIHYKPDTLIVNNIEFDHADIFKDISAIHREFHNLIRSMPEKAEIIFPTDDLNIAKVLNMGCWSKQESYGFGDRAQNTYKAIASDYSKLKFKVGSEEGKLEWQMLGEHNARNAMSAILATNKYGISLNQSLEALSNFKGVSKRQDILLESENLIVMEDFAHHTTAIEMTLSGLRQKV

SEQ ID NO: 165440 - protein, 300 aa, Unknown
  Bacterial polypetide isolated from the Sargasso Sea
MKIELARTEVIHFVGIGGIGMSGLSLIMKGKGFKVQGSDIVSNKNIERLKKEKIKIFIGQKKQNLKNATIVVLSSAIKKNNPEMIEAKRKNIPIITRGKMLAHIVSLMKNIVVVGSHGKTTTTSLVASILRKTKLDPTIINGGVINSIKNTARLGKSEWSVLEADESDGSFVHIPPTYSIITNIDREHMDFYKTMDKLRNYFIQFIEKVPSFGKSFICIDDKISNELVRKLNSQNFYTYGINTKSNFLIKNIKQNKKFTEFDLMVNVPNKKKLFIKKIKTPLLGVHNVRNSVAAAASSLT

SEQ ID NO: 165441 - protein, 335 aa, Unknown
  Bacterial polypetide isolated from the Sargasso Sea
MKIELAKSEVIHFVGIGGIGMSGLSMIMKRKGFKVQGSDISNNKNINRIRKEKIKVYVGHKKQNISKATILVVSSAIKQNNPELIEAKSKGLPIYKRGEMLANIVSLSKNIVVVGSHGKTTTTSLIASIFQNTKIDPTIINGGVINSINNTAKLGKSDWSILEADESDGSFIFIPPTYSIITNIDREHMDFYNSMKKLNKYFIDFVEKVPSFGKSFICFDDKNNKNLIKNIKKKNFYTYGEDPKSNFSIKNINQYKEFSKFDLLIKLPNKKNRFLKNIIVPLLGNHNIKNAVAALAVSLSVGISIFDIKKGLKNFKGVQRRFNKIFSFNNVDFFD

SEQ ID NO: 165442 - protein, 279 aa, Unknown
  Bacterial polypetide isolated from the Sargasso Sea
MKIDLGKNELIHFVGIGGIGMSGLALIMNGLGYKVQGSDIAYNKNIERLNDKKIKIFLNHKRENIKKTTVLVISSAIKKSNPEIQEAIKKNLPIYTRGDMLGHIVSFMRNIVVTGSHGKTTTTSLVSNIFSTSKLDPTIINGGVLNSFGNSAKLGKSNWCVTESDESDGSFLKIPFVYSIVTNLDYEHLDYYKNISNLKKSFLEFIEKIPSVGKGFICNDDKNLKDVLNKSKNKNFYTYGEDKTSNFQIINIKQNFKLSSFDVKINIPSKKKIIKNIKL

SEQ ID NO: 165443 - protein, 439 aa, Unknown
  Bacterial polypetide isolated from the Sargasso Sea
MKVHILGISGTFMSGIAILAKKKGHEVTGSDTSCYDPIKSILEKENISVIKGHKIKDIKDKDLIIIGNVMSRGNPIVEYILKNNINYISGPQWLYDNILKHKKVIAVSGTHGKTTTTAMIVHIMKKNKMNPSYLIGGSPKGNFKSVALTNSRYFVIEADEYDTAFFDKRSKFIHYNPFLAVINNIEYDHADIFKNIDEIIKSFSHMIRLIPSNGTIIINKNDHNIKKLLQRGYWSKLITVDSKKPSGDFNLIKKKQYMLKYNNKNFLLPVNIIGKHNYINAITAIAACRELKVPINTQIKALSSFKGVSKRTDLVCEIDGIKVFDDFAHHPTAIKSSINSIKDTFIGKRVLTIFVPGSNSMRLGVHNDQLVPSLKKSDRVLVLTRFKPLKRLIGNNIKINVIETEAQIREYLDKENNFDIVLVLSNRNTENILRYIKNG

SEQ ID NO: 165444 - protein, 371 aa, Unknown
  Bacterial polypetide isolated from the Sargasso Sea
NLSIKHRSEILAMLMGTYTTLAVAGSHGKTSTSTFLSTILELCTRNSSSIIGGIIPIYNSNCHLENTKYLVAEVDESDGTISKYKSDIGIISNIDFDHCDHFSDLSEVISSFKSFAKNSKKLLLNFDCETSRNNFYSNYKWSNTTAKNVAYAIIPTEINSNYTIGKYYENGNFISSLNIPIPGLHNLSNITAAIAASRMIGVDFIEIKKNIKYLKLPKKRFEFRGQIDERSLYDDYAHHPNEIKETIKLGRLLIQQKHNNECQKSRLIAIFQPHRYSRVKQFTKEFAEELSKADVIYVTSIYEAGEVNEDQITSKIITDLIYKKNKNVSYINNYYEITKNFFELTQKGDLILNMGAGDCHNFWSILNEKNN

SEQ ID NO: 165445 - protein, 166 aa, Unknown
  Bacterial polypetide isolated from the Sargasso Sea
MKKINLGQKELVHFVGIGGIGMSGLAQIMSNMGFKIQGSDINKNKNTNSCLKAGIKIFIGHSKKNIKNCTILVKSSAIKNNNCEIVYAKKKKIPVYSRAEVLADVVSLKKNIIITGSHGKTTTTSLVSKILSDQKLDPTIINGGVINSFNSNAKLGKGDWSILEAD

SEQ ID NO: 165446 - protein, 300 aa, Unknown
  Bacterial polypetide isolated from the Sargasso Sea
MKINKKQLIHIIGIGGIGMSGIAEILNGLGYSVQGSDLSLNSNILRLRAKKIKVFIAHSKKNLKNVNLVIYSSAIKKNNVELKFAKSNSIPSIPRSNILAQLVSLKKTIAVSGSHGKTTTTSLIASVLSKSNYRPTIINGGIINEYGTNTRLGSGKWMVVEADESDSTFLKLSSTISIITNIDEEHLDYYKSFSNLKKSFSKFITQVPFYGCAIVCGDNEHIRMIISNISTTKIIKYGFSSKNDVRATNIRTKDNKTIFDIFIKDDNKKIKKYKNFSIPLVGKYNVLNSLATIAVTSHIG

SEQ ID NO: 165447 - protein, 450 aa, Unknown
  Bacterial polypetide isolated from the Sargasso Sea
MSKQRVHILGICGTFMGGLALMGKEKGIEISGCDENIYPPMSDHLQDMGIEIIEGYDSTELPVADYYVIGNSISRGNPALEYLLSKKSNLISGPEWLYDSVIKNKKVIAVSGTHGKTTTTAMIAWIFEDNNVDVGYLIAGKPKDFEKSARLGSEDIFVIEADEYDTAFFDKRSKFIHYKPDTLVLNNLEFDHADIFPDITYIFREFHNLLRTLNKEAQIIFPNDDSNISKVLGMGTWSKLISYDVNNNNNKNSVMFNDDSKQTTYKIDQEEGRIDWEMFGEHNARNAMAAALAVKQYGISLKDSLSSLEKFQGVSKRQDILLDTEDLMIIEDFAHHPTAIKTTLDGLRKKFPKKRLLAAIELRSNTMKSGFHDEQLLHSVSEADLIFWKGDDSKQVKGLIDKNPSKFSDICNIDNFVDDIDSLSFAGDVLLIMSNGNFDNLSKKLLKKYI

SEQ ID NO: 165448 - protein, 331 aa, Unknown
  Bacterial polypetide isolated from the Sargasso Sea
MKIELAKTEVIHFIGIGGIGMSGLSLIMKGKGFKVQGSDVSSNKNIDRLKKEKIKVFIGQKKQNLKNATIAVISSAIKKNNSEYIEARRKKLPIITRGKMLAHIVSLMKNIVVVGSHGKTTTTSLITSILQKTKLDPTIINGGVINSFKNTAKLGKSDWTVLEADESDGSFLHIPPTYSIITNIDREHMDFYKSMDDLEKYFINFIKKVPSFGKSFICLDDPINNKIIKKLENRNFYTYGLHSKSNFLIKNINQNKTFTEFDILVNVPNKKRIKIKKIRIPLLGVHNVRNSVAATAVAITIGISISDIKKGLKNFKGVQRRFNKIFTYNQY

SEQ ID NO: 165449 - protein, 440 aa, Unknown
  Bacterial polypetide isolated from the Sargasso Sea
MSGLALIMDSLGFKIQGSDKSDNKNLNLLRKRKIPIYLNHNKQNIKNCTVLVVSSAIKKSNPEYRHAKKLNLPIYKRGELLGHIVSLMKNIVVTGSHGKTTTTSILSNIMNYAKLDPTIINGGVLNSIGSSAKLGKSDWSLVESDESDGSFLQIPFNYSIITNIDNEHLDYYRTMKNLKNKFIEFIDKTPSFGKAFLCLDDKNVKNILPKIKNNNYYTFGLNKKSNFHIFNIIQNKNYSKFNIKIKIPGKTKIIKNISIPLLGLHNIKNATSALAVAFSIGVSDKIIKLGLKNFNGVQRRFNFLFEINKVPFFDDYAHHPTEISSVLDGVSKVYNKEEIVCIFQPHRISRVKNLKIEFSKCFKNANTVLLCPIYKASETIKLGFSYTSFAKLIAKNSKVNLIMLKNEIDLKKITKNIAFGNKIFIAMGAGSITNWVRNLN

SEQ ID NO: 165450 - protein, 318 aa, Unknown
  Bacterial polypetide isolated from the Sargasso Sea
MRPFKKVKNIHFVGIGGAGMIGIAKVLLQKGYKISGSDISDSNDLQRLRKDGAQVYIGHSTKNIKGANLLVVSSAINKNNPELIQAKKDSITTIPRAEMLGSLMIGYESIAVAGSHGKTTTTSIIAKIMSVANLSPTYVVGGKILSTDENSALGEGKYIVAEADESDGSFIHLQPDVAVLTNIDDDHLTHFNNIFENLLDSFVLFSENVPFYGYMVINGDDKNIKKISKRISRTQITFGESKKCDYRITSIKAYKGKQKFEIVDKKINKTHKFKINLPGKHNVFNAAASIAVALEEGIPITSIKQGIYEFTGVGEGRE

SEQ ID NO: 165451 - protein, 283 aa, Unknown
  Bacterial polypetide isolated from the Sargasso Sea
INNIDFDHCDHFSNISEVISSFKSFAKNSKKLLINFDCETSRNNFYSNYRWSNNTPKSVTFAIVPTEINSNYTIGKYYENGTFISSLNIPIPGLHNLSNITAAIAASRMIGIDFIKIKKNIKYLKLPKKRFEFRGQIDERSLYDDYAHHPNEIKETIKLGRLLIQQKHNNCQKSRLIAIFQPHRYSRVKQFTKEFAEELSKADIIYVTSIYGAGEENEDKITSEIITDLIYKKNKNVSCISNYYEVTKNFHELTQKGDLILNMGAGDCHNFWSILNKKNNQKR

SEQ ID NO: 165452 - protein, 299 aa, Unknown
  Bacterial polypetide isolated from the Sargasso Sea
MKIDLGKNELIHFVGIGGIGMSGLALIMNGLGYKVQGSDIMDNRNIERLKKKKIKVFINHKKENLKKTSILVISSAIKKNNPEVIEAMKKNLPIYTRGDMLGHIVSFMRNVVVTGSHGKTTTTSLVSSIFTSGNLDPTIINGGVLNSFGNSAKLGKSNWCITESDESDGSFLKIPFTYSIATNLDSEHLDFYKNINNLKKCFTKFIEKIPSLGKGFVCNDDHNLKNIIRKTKNKNFYTYGKDKKSNFQIVNIKQTSTFSSFDIKINIPSKKKIIKKIKLPMIGIHNIQNATAAISLAFT

SEQ ID NO: 165453 - protein, 135 aa, Unknown
  Bacterial polypetide isolated from the Sargasso Sea
MKIELAKKEIIHFIGIGGIGMSGLALIMIAKGFQIQGSDINKNKNIEKLKKQGVKIFIGQKKQNIKDVTIVVTSSAIKKSNPELLEAKRKKLPIIKRGKMLANLVSYMKNIVVVGSHGKTTTKSLVSSIFENTKL

SEQ ID NO: 165454 - protein, 464 aa, Unknown
  Bacterial polypetide isolated from the Sargasso Sea
MKIELAKSEIIHFIGIGGIGMSGLALIMKGMGFKIQGSDISLNKNIERLKKNNVKVVIGHSIKNINKSTIIVISSAIKNNNPEVLFAKKKQLPIYKRGDMLGHITSLTKNITVVGSHGKTTTTSLISGIFSKTKLDPTIINGGVINSLDNSAKLGKSKWSILELDESDGSFIKVLPTYSIITNIDREHMDYYKSMDNLFRLFQQFIGKVPSFGKSFICLDDKNNKKLIDKIKFKNFYTYGINKKSQFQIKNIYQSKNYSKFDLNIQLQTKKNILIKNIKIPLIGLHNIRNATAAVAVSWIIGISKDIIKKGLNEFKGVHRRFNQIFEFRGVKFFDDYAHHPSEIKEVLSGVKDVYKQENIICIFQPHRISRLKDLKKEFTLSFKKADQVILCPIYAAGEKMKLGFNYYNFAKNIAKNSKVKIFLVKDQLSLAKFIKQNIYGKKIVIGMGAGSISNWIKDLPNLI

SEQ ID NO: 165455 - protein, 285 aa, Unknown
  Bacterial polypetide isolated from the Sargasso Sea
MSKLGFQKFKKIHMIGIGGSGMIGIATILQKTGFKITGSDLVISDELKELKKIGVKVQIGHEPELVKNADLVVASSAISKKNTELLYSKKCGLTIIPRAEMLGTLMRPYRSIAIAGSHGKTSTTSIIASIFNAANLSPTYVVGGQVLSVGRSSNLGDGNYIIVEADESDGSFMHLQPDVAVITNIDNDHLYFYENNQDKLNQSFVSFAENLPFYGHIILNIDDKNIYKISRNIHRKQITFGFSGKGRFQISDASFQNGSQKFKLTDNLNKKCHNFSTNLNGKHNL

SEQ ID NO: 165456 - protein, 325 aa, Unknown
  Bacterial polypetide isolated from the Sargasso Sea
YSSSFWRKIPIYNSNCHLENTKFLVAEVDESDGTINKYKSDIGIINNIDFDHCDHFSNLSEVISSFKSFAKNSKKLLLNFDCETSRNNFYSNCNWSNTTVKNVAYAIIPTEINSKYTIGNYYENENLISSLNIPIPGLHNLSNITAAIAASRMIGVDFVEIKKNIKYLKLPKKRFEFRGQIHERSLYDDYAHHPNEIKETIKLGRLLIQQNNYNEFQKNRLIVIFQPHRYSRVKQFTEEFAEELSKADVIYVTSIYGAGEGNEDKITSKIITDLIYKKNKNVSYINNYYEVTKNFYELTQKGDLILNMGAGDCHNLWSILNKKNY

SEQ ID NO: 165457 - protein, 262 aa, Unknown
  Bacterial polypetide isolated from the Sargasso Sea
FENFINLLPFYGVSIICLDDKNLQYLVNRNKTRNIITYSIKNKKADILICNIERKKTNTSFKLRVRTNKISHSKNYKFTINTIGKHNVLNGAASIIASKIVGVRNSVINKSLSSYIGVKRRFTFLGKINKSIIYDDYAHHPTEIEATLESAKYLKINLVVVFQPHRYSRTKMLMSSFVKALSKVDDLIILDTYSAGEKKISGATSKDMYLKLVKVNKNTIYLKNIKNLNIILSKYTLKKNIIIFMGAGSISTIAKEYFAFNE

SEQ ID NO: 165458 - protein, 122 aa, Unknown
  Bacterial polypetide isolated from the Sargasso Sea
MKIDLGKNELIHFVGIGGIGMSGLALIMNGLGYKVQGSDIADNRNIERLNKKKIRVFLNHKKENIKKTTVLVISSAIKKNNPELVEAIKKNLPVYTRGDMLGHIVSFMRNVVITGSHGKTTT

SEQ ID NO: 165459 - protein, 146 aa, Unknown
  Bacterial polypetide isolated from the Sargasso Sea
MTNISIGKKELIHFVGIGGIGMSGLAQIMKTMGFNVQGSDLGKNKNIDNCKKVGIKIFIGHSKRNISKATMLVKSTAIKKNNVELAEGRKKKLPIYERAEMLANIVTLKKNIIVTGSHGKTTTTSLVAKILSASRLDPTIINGGVI

SEQ ID NO: 165460 - protein, 294 aa, Unknown
  Bacterial polypetide isolated from the Sargasso Sea
MKIELAKKENIHFVGIGGIGMSGLALIMKGMGFKVQGSDISKNKNIDRLKKNKIKIFTGHSKKNIDRATILVISSAIKKNNSEVQQAKIKNLPIYKRGDMLAHIVSLTQNVVVAGSHGKTTTTSLISGIFSKAKLDPTIINGGVINSIQNSARLGKSKWCVLESDESDGSFIKVPPTYSVVTNIDREHMDYYKSMEKLKNHFLEFINKVPSFGKSFICKDDKINSQIIKKIKTKNFYTYGTKKDSNFVIKNIRRFRDMSIFDVIISLPGKKKITLKNINIPLLGLHNIRNATAA

SEQ ID NO: 165461 - protein, 396 aa, Unknown
  Bacterial polypetide isolated from the Sargasso Sea
VSSAINKNNPELVQAKKKSITTIPRAEMLASIMIGYESIAVAGSHGKTTTTSMIAKIISKAELSPTYVVGGKVLSTDENSDLGEGKYIVVEADESDGTFTHLQPDVAVLTNIDDDHLVHYNNIFDNLLDSFVMFAENVPFYGYLVINGDDINIKKISKKISRSQVKFGQSKGCDYQITKISSSKGKQSFEIFDRKNSKAHKFKINLPGKHNVFNATAAIAVSMEEGIPLRAIKNGIQEFSGVGRRYEKHDLVINERNITLIDDYGHHPLEIESNINAYKEEYPNKKVCMIFQPHRFTRTAQLFDDFVRVLSKTDLLILLDIYSASEKPIRGIHSRAISEMLEQEGHKNVTYLQSHDDVNDLIMDKIEDFDILVTQGAGSVSKVCESIKNKWTKSKK

SEQ ID NO: 165462 - protein, 161 aa, Unknown
  Bacterial polypetide isolated from the Sargasso Sea
MKVHILGISGTFMSGIAILAKKKGYEVTGSDTSCYDPIKSILEKENISVIKGHKIKDIKDKDLIIIGNVMSRGNPIIEYILKNNINYISGPQWLYDNILKHKKVIAVSGTHGKTTTTAMIVHILKKNKMNPSYLIGGSPKGNFKSVALTGSRYFVIEADGI

SEQ ID NO: 165463 - protein, 387 aa, Unknown
  Bacterial polypetide isolated from the Sargasso Sea
FFNVEVSSAKKKNIPIIPRAEMLSGISRGYQGIAVAGSHGKTTTTSLIAHIFNQALLSPTYVIGGKILSSDGNSRLGDGNFFIFEADESDKSFLSFYPDSAVITNIDDDHLESYQGDINNLKKSFLDFSDNIPFFGYVIANYDDKNTRDILKKIKRRIITFGLNKKSDIIISEINYFFDYVDFKINIKDTNKKHKFRLSLQGKYNIYNAVAAIAVAIEEGISIQTIRAALKSFSGVERRLERFKLIIKNKQVTHIDDYGHHPKEIEQVIVSLRRHFKKKKVLMIFQPHRFSRTKMLFKDFISTLSKVDKVFLLPIYSASEKEIRGVSSKNMAQKLNTINGEDFCSLVKHENVNDMVEQCIDKYDVLITQGAGNVSMVSKGLIKKWKI

SEQ ID NO: 165464 - protein, 417 aa, Unknown
  Bacterial polypetide isolated from the Sargasso Sea
MHIHFLGICGTFMASLAGIALQMGYKVTGQDKQYYDPMKSLLNELGINEEISVEASKNLIQSDLVIIGNAISRGNPAAEYILNNRLKYSSGPAWLSKNVLKDKKVIVIAGTHGKTTTSFMVQQILQDNGHDPGYLIGGISNNTNKSFRYSHSEYFIIEGDEYDTAFFDKRSKFIHYKPHILGITNIEYDHSDIFQNLDDIYKQFQNLFRVMPTSSIVLSHHINTNIKKLTKSQFWSKTKFLEKEDLQISNLLGKHNNENATLAINIASQLNIDKKESTKSLQKFLGVKRRLEIIYNKDFIVYDDFAHHPTEIKASVETINKLYNKNKIHYILQIGSNTMISGEHKDALINIFSETENLYLYTPDQTDWLPNNYLSISYSSLKDLTRDLFEEVNKEDVVVFMSNKNSEEFINLVYDYG

SEQ ID NO: 165465 - protein, 202 aa, Unknown
  Bacterial polypetide isolated from the Sargasso Sea
MKFFKKVKHIHFVGIGGAGMIGIAKVLLKKGYKISGSDISDSLELRKLEKHGARVFIGHSSKNINGADLLVTSSAISNRNPELVQAKKESITSIPRAEMLGSLMIGYESIAVAGSHGKTTTTSIIAKILSVANLSPTYVVGGKVLSTDENSDLGQGKYIVAEADESDGSFVHLQPDVAVLTNIDDDHLVHFNNIFENLLDSF

SEQ ID NO: 165466 - protein, 357 aa, Unknown
  Bacterial polypetide isolated from the Sargasso Sea
MHIHILGICGTFMTGIATLAQSLGHEVTGSDTNFYPPMSNHLENMKIEVTKNYGSSQLKNKPDQVIVGNVMTRGHEVIESLLDSHIPFTSGPQWLYENILREKYVIAVTGTHGKTTTTSMLSWILEDNNYHPSFLIGGAPRDFDSSARLTASKFFVIEGDEYDSAFFDKRPKFIHYHPKISIINNIEFDHADIYKDLKEIIFQFHQLIRLVPSNGKIIYNGDDKNTADLIDFGHWCNTESYGSHSDSEWKADFGSRDNIEICHNNFDHYSSDWLLKGSYNKENALSAIIAANTIGISPDKSLDSLKRFSGVKRRFELLGNFNGLVIYDDFAHHPTSIKRTLDDIAELYPDKIISVSI

SEQ ID NO: 165467 - protein, 271 aa, Unknown
  Bacterial polypetide isolated from the Sargasso Sea
MKIKLAKTELIHFIGIGGIGMSGLALIMKGKGFKVQGSDISINKNIERLKKEKIKVLIGHKKKNINNATILVVSSAIKKNNPEMLGAIKKQLPIYKRGEMLANIVSLTKNIVVVGSHGKTTTTSLIASIFQETKIDPTIINGGVINSINSSAKLGKSEWSILEADESDGSFVHTPPTYAIITNIDREHMDYYGSMDKLNKYFVNFVNKVPSFGKSFICLDNKNNKNLLKKLKNKNFYTYGIDNNSNYSIKNIKQFREYSEYDLKIRLPNKK

SEQ ID NO: 165468 - protein, 296 aa, Unknown
  Bacterial polypetide isolated from the Sargasso Sea
MFRHVKKLHFVGIGGIGMSGIAELLLNQGFKITGSDINDSKVIRNLKDKGAEIFIGHDTKNLTDADVLVYSSAVNTDNPEIISAMNKHIPIIRRAEMLGELIALKETSIGVAGTHGKTSTSSMVGAMLSKANLNPTLVVGGLVRNINTNSLLGEGEIIVVEADEFDRSFLSLQPTIGIITNIELEHTDCYEDIYDLQNAFTQFANASPFYGAVIIGNQSPAAADIIHNIKRPLITFGLTKKSDFYASDIAHNKSETTFAVFYKQKRLGVIHLQVPGEHNVVNALASVALGVEMNIP

SEQ ID NO: 165469 - protein, 60 aa, Unknown
  Bacterial polypetide isolated from the Sargasso Sea
MTKVELAKLRTVIPEMRRVRRIHFIGIGGAGMGGIAEVLANEGYQVTGSDLARNAVTERL

SEQ ID NO: 165470 - protein, 266 aa, Unknown
  Bacterial polypetide isolated from the Sargasso Sea
MDKKLLLKSHFHFIGIGGIGMSALAMGLLKKGCSVSGSDLVKNDETNKLEKLGALIFTSQVRQNIEFVTSKFTNRLINFVVSSAIKPENEEFSYCKEKNLSIKHRSEILAMLMRTYTALAIAGSHGKTSTSTFLSTILELCTRNSSSITGGIIPIYNSNCHLENTKYLVAEVDESDGTIDKYKSDIGIINNIDFDHCDHFSNLSEVISSFKSFAKNSKKLLLNFDCETSRKNFYSNCKWSNSTAKNVAYAIIPTEINSKYTIGKIL

SEQ ID NO: 165471 - protein, 245 aa, Unknown
  Bacterial polypetide isolated from the Sargasso Sea
NNNLKSLLNKCEKKNFLTYGFNKRSNYQIINVKKYINYSIFDLKIKFVGDKTYTIKNIKVNLLGNHNISNATASVAIALNLGIKLDKIKKALKKFLGIQRRFTKIFSLGKIEFFDDYAHHPTEIRAVINSSREVYKDRKIISVFQPHRYSRVKALKNEFASSFKSADSVVLCPVYSAGEKIKYNFNQKRFAKLISKKSKIQVINIKNQNELKNYFRKNLLKDEIVICMGAGSISNWIREIASELK

SEQ ID NO: 165472 - protein, 84 aa, Unknown
  Bacterial polypetide isolated from the Sargasso Sea
MGRVKHIHFIGIGGAGMGGIAEVLKTLGYEVSGSDIKKTSITKRLESLGIKVSIGHNIRNIINTDVVVRTSAINDDNEELVAAK

SEQ ID NO: 165473 - protein, 393 aa, Unknown
  Bacterial polypetide isolated from the Sargasso Sea
ELGFKVQGSDLLYNKNIERLKEKKINIFLNHKSSNIKKCTILVISSAIKKSNPELKQAIKLKLPIYTRGEMLGNIVSLMRNVVVTGSHGKTTTTSLISSIFTHAKLDPTIINGGVLNSFGNSARLGKSNWCIIESDESDGSFLKIPFTYSIITNIDSEHLDFYKSLKNLKKNFSKLLNKTPSLGKSFICFDDLNNRDILKKINNKNFYTYGTSANCNFQITKILLRTKYSKFNLKINIPGTKKIIKNIKLPLLGFHNIRNAASAVAVSYSIGVSEKLIKKGLSKFKGVQRRFNYLFAYNDTIFFDDYAHHPTEIKSVLEGVKKVYKKKEIVCIFQPHRISRVKNLKAEFSNCFKKANTVLLCPIYKAGENLKLNFSYNSFAKLIIKNSKVNLI

SEQ ID NO: 165474 - protein, 332 aa, Unknown
  Bacterial polypetide isolated from the Sargasso Sea
MKSNYSQGIYEHTISTLNHVHNGIGGSGMSSIAKYLFQKGIEVSGYDQRSSYITNLLNNDGIKVDYDISNSKYNSETLYIVSSAINMETTFLGDFVNKPNVLKRPDFLKLLSESVDVIGVTGTHGKTSTTALLAHIFKFNDIDISYIYGGVTSFNGIGGHYGDENLPLILETDEAFNTFKDIQIKNLLVTNIDHDHIDYFQSFENLVKAFKHVISNVEGQCVINVDDDQLSKLIRPEDISYSFTKDSNYKLKSYTNFEYEGKKFKIKTKLIGDHFISNIIGAIALANLNGLSIEQSLNAIEHFTGVKRRTEFIGEFNGVHFYDDYGHHQTEN

SEQ ID NO: 165475 - protein, 349 aa, Unknown
  Bacterial polypetide isolated from the Sargasso Sea
HGKTTTTSMIAKILSVANLSPTYVVGGKILSTDENSDLGEGKYIVAEADESDGTFVHIQPDVAVLTNIDDDHLVHYKNIFENLLESFVMFSENVPFYGYLMINGDDKNIKKISKRIYRTKITFGESKSCNYQINNIVPNAGKQSFEIYDKKNNKNYKFKINLPGKHNVFNAAASIGVAMEEGIPIGSIKKGISSFSGVGRRYEKHKIKIDSKLITLIDDYGHHPLEIESNIKAYKEEYPKKKVCMIFQPHRFSRTAQLFDDFVKVLNRTDSLILLDIYSASEKPIRGIHSRTILESIKQLGHKDVTYLKNHKDVINLLNQKKDSFDVLVTQGAGSVSKVCESIKDKWKA

SEQ ID NO: 165476 - protein, 75 aa, Unknown
  Bacterial polypetide isolated from the Sargasso Sea
MNKKLISKNHFHFIGIGGIGMSAIAMALIKKGYSVSGSDLVQNKETKSLKRLGAIIFDSQIKKNIDFVISKFQDQ

SEQ ID NO: 165477 - protein, 398 aa, Unknown
  Bacterial polypetide isolated from the Sargasso Sea
QGYDASLIPDADRYVIGISISRGNPALEYLLSTKADLISGPDWLYKTILKDKKVIAVSGTHGKTTTTAMIAWIFEDQGIDVGYLIAGRPKDFHKSARRGKDDVFVIEADEYDTAFFDKRSKFIHYKPDTLIINNLEFDHADIFPDISYIYREFHHLIRTLKEEAKIIFPTDDLNISEVLNMGCWSKLISYGINGQHENSISFSEDNTPILLRIAGDEGQLDWTMLGEHNARNAITAVLAAKQYGIEIKDALNSLKKFKGVAKRQDLLFEDHRLVLIEDFAHHPTAIKSTLEGIKKKFPNKRLIAAIELRSNTMKSGFHDNNLVEAIAAADKVFWKSEDFTQTEKLVGAVPSKSSQIINISEFVKEFKKLNQADDLLVVMSNGNFDNLTKLLLKEYKND

SEQ ID NO: 165478 - protein, 153 aa, Unknown
  Bacterial polypetide isolated from the Sargasso Sea
DSLNAIESFAGVKRRIELIGISKGVLIYDDYGHHPTEMEATITALKQQTKSKLYVVFQPHRYTRTMEYFSSFKDSLKLADFAIVTDIYPAGESPIPGISSKNFEEESIKYLKSIRYVPEYLSKKVQNGDIVLTLGAGDITLLGPKILKYLNEY

SEQ ID NO: 165479 - protein, 79 aa, Unknown
  Bacterial polypetide isolated from the Sargasso Sea
MDKKLLLKSHFHFIGIGGIGMSALAIGLLKKGCSVSGSDLVKNDETQKLEKSGAVIFTSQIRQNIDFVISKFNNKLIYF

SEQ ID NO: 165480 - protein, 74 aa, Unknown
  Bacterial polypetide isolated from the Sargasso Sea
MNTSQYKLNNIHFVGIGGSGMSGIAEVLNNLGYKVSGSDSVPSSNTDRLEKLGITISYDHNQNNLTDVEMVVIS

SEQ ID NO: 165481 - protein, 290 aa, Unknown
  Bacterial polypetide isolated from the Sargasso Sea
EIFIVEADEYDKTFLKMKPNIASILNVDGDHYDIYDDIDDINNSFKKFANSLKKNGILFHNSTLNFNGITFGEDSFADAKIINKKNYNDRLIFDIQYQNNVYKNIVLNMLGDHNAFNAMAAFIIAISLDIESEVIIKALKSFPGIKRRFSVELKNPKIFIDDYAHHPSEIESIYNSVKSLYPNKKKLVIFQPHLFSRTRDFLREFAEALEKFDKIALLDIYPAREEPINGVSSKSIFDKINNKNKVLIKKSEIPELLFEDEHELVISMGAGDIGDLVETIKKTIIDQNEN

SEQ ID NO: 165482 - protein, 385 aa, Unknown
  Bacterial polypetide isolated from the Sargasso Sea
KNNPELIEAMKKNLPIYTRGDMLGHIVSFMRNVVVTGSHGKTTTTSLVASIFTSSNLDPTIINGGVLNSFGNSAKLGKSNWCVTESDESDGSFLKIPFTYSIATNLDSEHLDFYKNINNLKKCFTKFIEKIPSVGKGFVCNDDQNLKNIIRKTKNKNFYTYGKDKKSNFQIVNVKQTSNLSSFDIKINIPSKKKIIKRIKLPMIGMHNIRNATAAISLAFTIGLPEKCIKAGIYNFKGVQRRFSHLFDYNNISFYDDYAHHPTEISSVLSGVEKVYKNKEIVCVFQPHRISRVISLKKEFSKCFKKADTVLLCPIYAANEKLRLNFTYHSFAKLIIKNSNVRLIQVENELQLQKFIKQNVFGKKIYIGMGAGSISNWMKNLKNIF

SEQ ID NO: 165483 - protein, 152 aa, Unknown
  Bacterial polypetide isolated from the Sargasso Sea
MKINLGKKEIIHFIGIGGIGMSGLALIMKQLGFKIQGSDISVNKNIERLKKSNIKIFTKHKISNLNKANIIVISSAIKNNNIELNAAKKKDLPIYKRGDMLAHMTSLKKNIVVAGSHGKTTTTSLIANVFSKAKLDPTIINGGVINSINNSA

SEQ ID NO: 165484 - protein, 311 aa, Unknown
  Bacterial polypetide isolated from the Sargasso Sea
GKSTFVSVLNEILQKSGLKSCIAGNIGIPVLSLNTDEFDIIILELSSFQLELIDEFRADISVLLNVFEDHNERYESYEVYQKTKTKIFLNQRNSDHAIFDDFYLSEKALKEINPSPKHVLFKDNEFNDLSNKISQNGIIKKFLPALIKVTDILDVDRNFVINQLKKFKNLNHRIYEVCSKNGVSFINDSKATNPAAANFAASQFKDIYWILGGLSKNNDLTKLNLSNKNIKKIFLIGSSSDQLSQIIPKKVKFEVSHNLENATRSAYKEVLKSQKGCILLSPGCSSQDQFIDYQERGNKFTKIVNNLVVKC

SEQ ID NO: 165485 - protein, 271 aa, Unknown
  Bacterial polypetide isolated from the Sargasso Sea
SYQLEYSKFFKSEYSLILNISPDHLERHGNFENYVKVKFKLIKTQSKNSYAFIENKNYLLNNLIKKNKINSKIFRVNYKKYQKYNKMITNEYFMNVSNLKNLSFIFAISKNLKLSLKKIINVANKFKQLNFRQQIIYRSKKLIIINDSKSTTLSSTLPLLESFKNIYWILGGIAKKGDQLNLKKENFRKIKAFIYGKDKIFFSKILSNKINYKISKNLNYSLLQVFKDLRKKEEQKKILLFSPSAASFDQFKNFEDRGKYFNKIIKKYLKK

SEQ ID NO: 165486 - protein, 201 aa, Unknown
  Bacterial polypetide isolated from the Sargasso Sea
MQRDELPLIGAHNVTNALAAALTARLAGAGSGGVVAGLGSARALPHRLEPVADRAGVLWINDSKATNVAATRSALSSLDRSVILLLGGKDKGEDFAQLTEAMRGRARIVVGYGAAGSRAINELSEALRVGINEEEESIGGPRASPSLRLVEGSLEDVVVSARNWAESGDVVLLSPACSSFDMYENYEHRGQHFTLLARAEV

SEQ ID NO: 165487 - protein, 256 aa, Unknown
  Bacterial polypetide isolated from the Sargasso Sea
YIILSPGISLHQSKYKRSLIKYKHKILTDIDLIYLLKKNFKSIVVTGSNGKSTTCKIIYHVLKKNKFKTLLGGNIGTPILSLNPKKNNFLIIEASSFQLAHSKFIKPDYAFLLNISNDHLDWHGSMKNYIESKFKIFELQKKTHYSFINKKFKKKFKNKNLLGKLIIPNVKNYEEIKSKINNNYIKSNINDENMRNVFALSKILGIKEKNLIKSLKTFKSLPHRYEIFLKRKNSVFINDSKATSFQSTKFALQNTK

SEQ ID NO: 165488 - protein, 291 aa, Unknown
  Bacterial polypetide isolated from the Sargasso Sea
QLTNQNIKIHDLSDPSIWSNIDLLLISPGIPYLYPNAHPAVIQALNNSVRIDNDIGIFFEDLEKKKKNTTIICVTGSNGKSTTVSLINHVLLNFKKNSEVGGNIGRPVLGLSTDESNTFKVLELSSYQIEIAKFLSPDIAIFLNLSSDHLDRHGGIGGYFNSKARLFYSGMPKYSIINVDQPEGKYLANYLEQSANFDTKVIHISSKKILNKSNWSISLINGSIIERKNGIELFRSNISDFINLPGDHNLMNACTAYAACKLFQKSSLEILNKMKNFKALPHRSAFVRKIK

SEQ ID NO: 165489 - protein, 179 aa, Unknown
  Bacterial polypetide isolated from the Sargasso Sea
MIPKNIENKEIGLLGLGVSGKSAFKSLKAGGGNIYAYDDNISNDPIVIEPDKWPWEKLNKIVVSPGISLNHPIIKKAEVFKVDIINEIDVFANSKPKAKVIGVTGTNGKSTTSALLGHILNLNGFKTKVGGNIGEAATSIDDPGEDGFIILELSSFQLETCSDLKLDGAILLNITPRSS

SEQ ID NO: 165490 - protein, 56 aa, Unknown
  Bacterial polypetide isolated from the Sargasso Sea
MLSPACASFDQFSNFEDRGDYFKSLVEELPGTHQDPFEEPGLVPSLSDKKNKGVPK

SEQ ID NO: 165491 - protein, 221 aa, Unknown
  Bacterial polypetide isolated from the Sargasso Sea
LSKSGESILNYLNSINENYFCWDDNIKIRKKIKRINKKNNFIEPEKLNFELIKESFITPGISLKNKKTNILKKYKVKLYRDLELYSRIAHKKTIIAVTGTNGKSTTTKLISNILEQNDIPNFMGGNIGIPLLDFPTKYNKLKHHVIELSSYQLESFKKFDPYISILLNISRDHLDRYKNFNEYISQKEKLIISNRKGYKIICIDDKHTYLIYQKYKKKIIP

SEQ ID NO: 165492 - protein, 158 aa, Unknown
  Bacterial polypetide isolated from the Sargasso Sea
PESVIESLQSFKGLDHRYKRVAIYKGIEFINDSKATNLGALKSALENYTDETVVLIAGGEGKGSRFEEFSKIIDGKLKTLIVMGRDGGRLAVISERLNISTYQVSSIEEAVKKGFEIANEGDTILLSPACASLDMFKNFEERGQRFEFAVRQLINERS

SEQ ID NO: 165493 - protein, 279 aa, Unknown
  Bacterial polypetide isolated from the Sargasso Sea
RKKYNYHVIELSSFQLETVKNIDTKISIITNLSNDHLDRYENIKDYIDQKKNIITKTGINIISIDDIYSRKIYLKKNIKNKICFSTHDSSADIYMSKDFILDNYFNRNKKLYIKNISRDLYGNFNNQNIIIAYICCKLLKISLKNFLYVIKNYKGLPFRSNTIFENKKLIITNNSKATNLNSTINSIINHNKIYLILGGIAKDRNFEIIAKYKEKICFVYVYGKSAKLIENKLKKLINIKKFKNLKLVLREVFNDLKLDKNQSSVLFAPACSLTINMII

SEQ ID NO: 165494 - protein, 263 aa, Unknown
  Bacterial polypetide isolated from the Sargasso Sea
YVLELSSFQLETTYSLKPTVAALINFAEDHLDRYECSQDYLEAKLKILKNAKVAVLNSDDDVLNSVEFSGQKVRFGQNEPTKESYGLTRDFAGHHLSKGSVKYADIESLRIFGKHNITNALASLAICGVVIELSPKVIRGLQAFKGLPHRSELVGTFKGTTFIDDSKATNISATKAGINACLSEKKGVLILGGLFKGGNLEDLIKTIEVRVHTVVLIGQSAELFYRLLRGRVPCIRANCMTSAVGVASAFAADGEVVLLSPAC

SEQ ID NO: 165495 - protein, 316 aa, Unknown
  Bacterial polypetide isolated from the Sargasso Sea
DDSKVRKQITQTKFKKFFNTSKVWKTIDYVVPSPGISIIGKSQHKLINIAKKNNKRIISELDLFQIAISKNDKINKSNIKIIAVTGTNGKSTIVTLINHLLKSNGIKTSLIGNIGNSIFSSKLIRNGFLIIEVSSYQLETSKIFAPNIAVISNLSSDHLSRHKNMRNYFNQKAKILKNLTNDDTAILNCNHDLIKSKALKLLKNKKNNTISLHFEKRKSQSYSSKKKLIVTSKLRKIKHSNPHLNGEHNEENVQITYQIFSSLQLKNLFTKKALNSYIGLNHRQELIFDNNKTMIINDSKATNIESMVRAIKNIKI

SEQ ID NO: 165496 - protein, 284 aa, Unknown
  Bacterial polypetide isolated from the Sargasso Sea
IITDLDLAFLFKRFYKSIVVTGTNGKSTTCKIINHLLNKNKFNSLLGGNIGTPVLNLKSSKKNFLIMEASSFQLAYSKFLKPDYAILLNITNDHLDWHGSMKNYINSKFKIFTNQNQNQYSFINKKFKLNFYKRNLKSKLLIPEIQKYKKIKFKIKNSYLSLNINDENTSFVYSLSKVLKINEKHFINALNSFQGLPHRYEIFLKKKNCIFINDSKATSFQATKYALQNTKNIYWIVGGLPKKNDKINVKDLKKNIIKSYIIGNHVNFFKKDLQSQIKICVTKN

SEQ ID NO: 165497 - protein, 211 aa, Unknown
  Bacterial polypetide isolated from the Sargasso Sea
MKYIYGLSRSGESIINYLNSIDENFFCWDDNIRIRNKIKKINKKNNLIEPDKLNFKLINESFVTPGISLKNKKISILKNYKVKLYRDLELYSRIAYKKKIIAITGTNGKSTTTKLVSDILNQSDIPNFMGGNIGIPLLDFPKKHKNLKYHVIELSSYQLESFEKFNPYISILLNISRDHLDRYKNFKEYIDQKEKLIFTNRKGYNIVCIDD

SEQ ID NO: 165498 - protein, 256 aa, Unknown
  Bacterial polypetide isolated from the Sargasso Sea
GNLGNSLLNSFLTTKKYTHHVIELSSFQLELIKNFNPSVSILLNLSKDHLDRYENFRHYINQKKKVFSKNQYGLNLISIDDNNSKTIYNDEKISNKISFSVNNSKADVYLKNNTIYDNYFFKRKKIIVKNISIDLAGDFNYQNILVAYIVSRIFKIQLNVFKNIVKNFVGLPHRYNIIEQNNKFVAINNSKATNIHSTCSSLKNLKNVILILGGRAKDNNFNQINKSANHIIKAYVYGESSKQITKKIKSKIKVSV

SEQ ID NO: 165499 - protein, 306 aa, Unknown
  Bacterial polypetide isolated from the Sargasso Sea
IELFFRFNPEEKYIGVTGTNGKSTTVSLLSHVFKKLKINNSLSGNIGRPVFDLKRFKKIFNILEISSFQLELMKRTTFKVAVLLNITKDHIERHQSFKKYINEKIKIFNNQSEDDVSIIGVDNEVTSSLVRKLKKKLDSKIITVSGENNKADIYIKNKKLIINFNLRKNKISKIIDIGQFNNFLGVHNYQNIAAVYAIVLSLGFYKWKQIENSIKSFKALPHRLQKIKQINNITFVNDSKATNIDATNQALKNFKNVFWILGGRLKERSLQKLKKHFFRIKHVFLVGETKFLYQKIFKKFFRLYNC

SEQ ID NO: 165500 - protein, 234 aa, Unknown
  Bacterial polypetide isolated from the Sargasso Sea
MDLKKLSFLVYGLGVTGRSVIKFLKKKNLKNFYIWDDNKKSSFKDKRPLNLNKCIKEVDFIILSPGISLLTSKYRNQLTKFKKKIITDLDLIFLFQKNFKSIVVTGTNGKSTTCKIIKHVLKKNNFRSLLGGNIGTPVLELNPKKNNFLIIEASSFQLSYSKFINPDYSILLNITNDHLDWHGSMKNYINAKFKIFQLQNKNQFSLLNKKFEKNFKSRKLLGKLIIPKFKNYKK

SEQ ID NO: 165501 - protein, 40 aa, Unknown
  Bacterial polypetide isolated from the Sargasso Sea
PIKFASKNETVLLSPACASFDLFENYEDRGNQFKKAVRAL

SEQ ID NO: 165502 - protein, 234 aa, Unknown
  Bacterial polypetide isolated from the Sargasso Sea
NMPSDHLDWHGNFKNYLEAKSKIIKFTKKNNILVYSDLIREIADYETIRIISNTSSFNIDTPFSDELLVPFWDLIYLLDLNIENLEEAFQKFLINLNQLEHRYEKIDFKGNIKFINDSKATNFHAVTNAINRSKNIILILHGLTKNIPSEELKLTSDVKKIFVQSEMNLDLNKFNGKKIIYNSINEIKNLIKNEMEDGDTVLFSCGGASFNDFKNYKDRGKFFKNIVKEIENET

SEQ ID NO: 165503 - protein, 258 aa, Unknown
  Bacterial polypetide isolated from the Sargasso Sea
FLNFKIFDDKHKNLFKQYRTKNLNQTLKQVDYIVLSPGINLSKNKNLSQYKHKIITDIDLFYLTNDNFKSIVVTGTNGKSTTCKILEHLLKKNNFKCFLGGNIGNPILSINKRLNGNSFVIIEASSFQLYYSKFIRPDFAFFLNFTNDHLDWHGSMNAYLNAKLKIFQDQDKYQYALVNKKLKMIFKKKKFLSKQINPELKNYNKIKLKIKNKYLSSSSNDENMSFVFEFSRLIKISEKSFIKSIQSFKGLEHRFEIF

SEQ ID NO: 165504 - protein, 82 aa, Unknown
  Bacterial polypetide isolated from the Sargasso Sea
MVCSKVKAIICLGKDNNKLIDVFSSHTDVIVSTDKISDAVSSAYKISKPGDVVLLSPACASFDLFKSFEDRGEQFKEEVRKL

SEQ ID NO: 165505 - protein, 210 aa, Unknown
  Bacterial polypetide isolated from the Sargasso Sea
MYVDFKKNYLSFYCSSKKIFIKKNIQNANVSNSHLLGSHNKENVFFAIQISRLLNIKYSKVLNAIRTFKGLEHRQEIVLENKKMMIINDSKATNFESLIPALKNYKNIYLICGGLAKDHNIKILDRYINQLVVVFIIGLNENPFLNYFKDKIETHYVKNLSLAVKMAVSRARNNKSNNTILFSPGAASFDQFKNFEMRGKRFKKLIKLNK

SEQ ID NO: 165506 - protein, 286 aa, Unknown
  Bacterial polypetide isolated from the Sargasso Sea
SLDDPGEHGTLVLELSSYQLETTPSLKTSISILLNISPDHLDRHGGMAGYIAAKALILERLEKSGLAIVGAGDEHVRTLAKVTAAKGIRTMIASPDLAPDDQKASTALAGTHNAENAAAAALALCALGLDDQMINRGVSSFTNLPHRLQRVASCGKVQFINDSKATNGIAAAKALTSFNDIYWVAGGLAKQDGLSPTMPHLGAVKKAYLIGTAAPTFATSLSGICPVAICDSLEQATRAAFDDASANPDGGTILLAPAAASFDQFPNFGARGDEFAALAKALCAAG

SEQ ID NO: 165507 - protein, 247 aa, Unknown
  Bacterial polypetide isolated from the Sargasso Sea
AAVASLDAAGVTSFAHDDNSPDTPVSNGTLLPWQDWPWQDLDALVISPGIPHLHPAPHPAAARASAANIEILSEVEIALRGMPQAPIVVITGTNGKSTTTTLVGHCLQEAGKAVAIGGNIGRAACSLDDPGPDGVIVLELSSYQLETTPALSPTIAVVLNITPDHLDRHAGMAGYVAAKTRALTTLRADGTAILGRSDDHVKQLANACIARGVRTLLAMPDQAPAGRKHCLALRGDHNAENAAAAGL

SEQ ID NO: 165508 - protein, 164 aa, Unknown
  Bacterial polypetide isolated from the Sargasso Sea
MKSLIFGYGVTGQSFERYLKKKNIDFEIYDANVIGPNITNILPDQKKLESYEMIYMSPGINLQEIYLKGEFDEIPYLTDVDIFFQEDRSYKIGITGTNGKSTCCYHLYQLLENSQLVGNIGTPVLDNINSCLYSIIELSSFQLEKAKELQLDFGVLLNISPGSC

SEQ ID NO: 165509 - protein, 243 aa, Unknown
  Bacterial polypetide isolated from the Sargasso Sea
ILKKLSFLVYGLGLTGQSVVKFFKKNNFKNFQVWDDKIKNLYKSKRANNLTNTLKTANFIVLSPGVSLNKNIKRLEKYKRKIITDIDLIFLLYKFKKSIVVTGTNGKSTTCKIIAHVLKNNKFKVLLGGNIGTPILDLKVKKNTFLIIEASSYQLAHSKFIRPDYAFLLNISNDHLDWHGNMKNYVNSKFKIFKHQKKFQYSFVNKKLKKNFQKRKFSGKLIIPNTNEYTKLKAKIKNPYFKM

SEQ ID NO: 165510 - protein, 186 aa, Unknown
  Bacterial polypetide isolated from the Sargasso Sea
MKDYVYGISKSGLSVIKLLKIQNKNFDCWDDSKKTTYLLKKKFRNLNLIPINKTNLKNYNNIYVTPGISVNDDKFSKVKKSKIKRDLNLYYENITTEKIIAVTGTNGKSTTTKLIGDILKNCSKKVFVGGNIGDPLCSSILQKKLFSYHVIELSSYQLETIKNFEPKISIILNLSKDHLDRYKNFG

SEQ ID NO: 165511 - protein, 243 aa, Unknown
  Bacterial polypetide isolated from the Sargasso Sea
MQNPNVRSIVVTGTNGKSTTCKIIEHLLKKNGFSTQLGGNIGKTILNIKKRNNKRTFFIIEASSFQLAYSKFIKPNYAFILNISKDHLDWHGNMGRYIKSKFKIFSLQEKNDFAFLKDKKLIKIFRKNKNLSKLQSVSSKYYKKIQNKIDNKYLGSKANVENMSFVYKFSKILKIKDKFFIESFKKFNGLPHRYEIFFKKRNIRFINDSKATSFESSRFALESNRNILWIVGGLPKSGDKFYL

SEQ ID NO: 165512 - protein, 144 aa, Unknown
  Bacterial polypetide isolated from the Sargasso Sea
LSYGGLPHRSQIVAEAGGVTYVNDSKATNVDSAAKALSAFKRIRWICGGLEKEGGVSALSDAAGAVVKAYVIGREAAGFAIQLSGVETEVCTTMEEAVRRAASDAEAGDTVLLAPAAASFDQYDSFERRGEDFMAQVAKVTGAA

SEQ ID NO: 165513 - protein, 286 aa, Unknown
  Bacterial polypetide isolated from the Sargasso Sea
EFASKFTNKPIVAVTGSNGKSTTVNILFEMLKVGGYKPLLAGNIGEPFSKGIYELLNNIIKVDIIILEISSFQLEFIDQFRPYISLYLNITADHLDRHNSMEEYLKMKLKMIKNMKQDDFIVYNKDDEIINKSFEHTAPNKISYSLIEKNKFFSLNSTKIYDENLESFIAIKDILLKGKHNLSNLIASATVAKILNIKNKNIKSVMEQFPGIKHRLQFIKKLKEVTYINDSKATNISSVIAAIKSFDSPIVLLLGGKNKDSDFRLLLPHTKRHVKHIVSFGEAGGE

SEQ ID NO: 165514 - protein, 240 aa, Unknown
  Bacterial polypetide isolated from the Sargasso Sea
MIFKKILKNKSFLVYGLSLTGLSVVKFLKKSYAKNIFLWDDNIKKRKTFNLKENDNSIRKKFSDVDYIILSPGISINNSKKKNLLYENKEKIITDIDLFFLTNKIFKSIVVTGTNGKSTTCSIIQKVLSDSGFKTLLVGNIGKPILNYNLGKKRNVVLIIEMSSFQLEYSKYVKPDHAILINITKDHLDWHGNMQNYIKAKLKVFSLQNKKNYAYLPNNQKIIKEFKKNKIQSSVQIIKS

SEQ ID NO: 165515 - protein, 54 aa, Unknown
  Bacterial polypetide isolated from the Sargasso Sea
VIVSTDKISDAVSSAYKISKPGDVVLLSPACASFDLFKSFEDRGDQFKEEVRKL

SEQ ID NO: 165516 - protein, 289 aa, Unknown
  Bacterial polypetide isolated from the Sargasso Sea
MGENMGVSAAEMALSLQRQSAAPPDWLVMELSSYQIEAAERIRPRIGIWTTLTPDHLERHGTVEAYRAIKRGLLKRSDQAIFNADDPDLRQQRRSWNGGIWVSAESAQPDGLPADLWIDDEGWVHEPTQRLFRADALAMPGAHNRQNLLLVTAAARRIGLSPAAIEAGLRSFPGVPHRLEPLGCIGGSQVFNDSKATNYDAAAVGLRAMRGPVVVLAGGTTKQGDASDWLAELNRRACAVVLFGAGAEELQGLITTSGFPGPLSLCNDLSAAVDQAVQRAEALGASNLL

SEQ ID NO: 165517 - protein, 177 aa, Unknown
  Bacterial polypetide isolated from the Sargasso Sea
MTEYVYGLNKSGISVIKLLRLQKKTFSCWDDSKKIRDSLKRKYSRLNFTSINKTNLKIYNNIYLTPGVSIFDKKFSKISKSIIKRDLNLYHQNLKNEKVIAITGTNGKSTTTKLIGDIIKRKFKNTFVGGNIGDALCNSIVNKSRYSHHVIELSSFQLETIKKFEPKISIILNLSKD

SEQ ID NO: 165518 - protein, 135 aa, Unknown
  Bacterial polypetide isolated from the Sargasso Sea
RLEKVRTEGGVTFYNDSKATNLDSVKVAIKSFESPIILIIGGRNKGGSFKELKSLFPNRVKLVIAIGEAADEIEKDFYKSPPVQKAISMASAVSLAYKNSIKGDIVLLSPGCTSFDMFKNFEERGNIFKKEVMRL

SEQ ID NO: 165519 - protein, 255 aa, Unknown
  Bacterial polypetide isolated from the Sargasso Sea
KIILLGDDKNYLKKNKKLYKKKGKDFLKLCNFVDYIIVSPGININKTKLKKTLLRNYSKIITDLDLFYMINQKVKSIVVTGTNGKSTTCKIIYHLLKKNKFNTVIGGNIGKPVLDLNLSRKPIVIIEASSFQLSYSKYIRPSYALILNITNDHLDWHGTMSNYINAKFKIFSLQNKNNFAFINDKRLKRKFKKNKYLAKLIFINFKKYLKIKKKIKNNYLNSEANEENMSFIFALSKILKINEKSFIKSLRSFKG

SEQ ID NO: 165520 - protein, 306 aa, Unknown
  Bacterial polypetide isolated from the Sargasso Sea
LKLLYKSDYIVKSPGININSVKFKKHLLKNKHKIISDLDLFYIKNSNSSSIVITGTNGKSTTCKIIEHLLKKNGFKVNLGGNIGEPVLNFKNNKNTFSIIEASSFQLAYSKFIKPKYALIINISNDHLDWHGKMQNYLNSKFKIFKFQKKNDIALLKEKELIKKFKREKYFSKLKIVSDKKYRKISDKIKNRYLKIKSNYENMSFAYQLGKILKITDSNFIKSFKNFKGLPHRYEIFYKKNNINFINDSKATSFRSSKYALEDNKNIYWIVGGLPKLGDKFHVNNLKKNITKSFIIGKNTKFFERH

SEQ ID NO: 165521 - protein, 287 aa, Unknown
  Bacterial polypetide isolated from the Sargasso Sea
MKYIYGLSKSGESILNYLNSINENFFCWDDNIRIRNKIKKMNKKNHLIEPEKLNYKLISESFISPGISLNNKKINILKSYKVKLYRDLELYSRIAYKKKIIAVTGTNGKSTTTKLISNILNKNNISNFMGGNIGIPLLDFPKKNNDLKYHVIELSSYQLESFNKFNPFISILLNVSRDHLDRYKNFKEYIYQKEKLIFSNLKGYNIICIDDKNTLSIYKKYKKRAIPISSKPFKGTVFYKNKSIIDDYFEKNKKIELKEISSSLFGNFNIQNILAAYAVSKILNINV

SEQ ID NO: 165522 - protein, 300 aa, Unknown
  Bacterial polypetide isolated from the Sargasso Sea
DKNLIRELDLLVVSPGVPHLYPRAHPIVTLAYELNIRVDNDIGLFFSSHIQEEYETFSDPPKIIAITGSNGKSTATALASHVLSKFFSDVEMGGNIGKPVLELSPLREGSIRILELSSYQIELAKCLAPNFAAFINFSSDHLQRHGGLGGYFYAKARLFLENLTDMSVINIDTAEGLFLYQRLKSSDNKMIAVSSKLNVKDYFWAVGLKGYFITEWKKGRQVYSHDLRDLGNSFFSLRESLLTVYALGRSFGIAPKSILTKCDGFMPLAHRNQLVDVIGGIAFINDSKATNVDATIHALS

SEQ ID NO: 165523 - protein, 278 aa, Unknown
  Bacterial polypetide isolated from the Sargasso Sea
MHTYHIASETGIQSEKVYDSDLWVLSPGVSKDNAIVLKAIEKGIPIVGEIEFASWFTESPIIAITGSNGKTTTSYILSEMCQTENINGVMAGNMGLPFSERVLNEILSPDENMIYILEVSSFQMEFTKHFSPTFSIYTNISPDHLDRHNTMKEYIGMKLKVTNNLKKDGSIIFNDDDSLLKKAVSKINKKTRAFSTIRKDVLFYLDNEKIVGPSKKSLLDINDLRVQGKHNISNLFAAATCSHLIGINEEHISNVMKNFKGVEHRLEHVEFINNVEYI

SEQ ID NO: 165524 - protein, 190 aa, Unknown
  Bacterial polypetide isolated from the Sargasso Sea
FSNDRNISIHEDEISLKGIHNISNIMVAAEIAYKVGIKKDNIFKAIKNFKGLEHRFEFLKSFNSIDYINDSKSTNVDSTVKALKSITKKVVLILGGIPKENDFNDILLHKSKILKIVVYGEAKDMIYDSLSQEVEVLKIHEFDDAVHLAIQNATKDSVVLLSPACASFDQFNSYEERGIKYKNIIERFYA

SEQ ID NO: 165525 - protein, 59 aa, Unknown
  Bacterial polypetide isolated from the Sargasso Sea
MLQCPELESAVNLAETAVQRHQATTLLLSPACASFDQYRDFEARGEHFRTLIQPLLDVA

SEQ ID NO: 165526 - protein, 140 aa, Unknown
  Bacterial polypetide isolated from the Sargasso Sea
RLEWIGQINEVNYFNDSKATNIAAATAAIKSFKKNIILILGGQDKGDTDFSILKPIMKNRINEIIAYGDSGIKIKNTLDKYFKISFHNKFEDAVYNAHIKSKNGDTVLLSPACASYDQFKNYEERGETFIKLFKRLEIEC

SEQ ID NO: 165527 - protein, 145 aa, Unknown
  Bacterial polypetide isolated from the Sargasso Sea
FLTFSGLPHRLEKFLKIQGVNYINDSKATNVNAAYYALDSMQSPTIWIAGGVDKGNDYSDLLPIVREKVKAIICLGIDNTKIMETFKPVIEIIVETESITEAVKVANKIAVKKDNVLLSPACASYDLFENYEDRGNQFKDAVRNL

SEQ ID NO: 165528 - protein, 258 aa, Unknown
  Bacterial polypetide isolated from the Sargasso Sea
IYKSVVVTGTNGKSTTCSIIQKVLTFSGFKTIAVGNIGKPILNYNLDKKKTIVVIEMSSFQLEYSKHVRPDHAILINISKDHLDWHGSMKNYLNAKLKIFSLQSKNDFAYFSQDKNINRHFKKNKFKSNKFLIKKNIRKLIKKNIKNNYLKSNSNLENLSFVYNLKKNLKVSDKKFFSALNKFKGLPHRQEMFLRKKNIYFINDSKATSFQATKECLENYNKIIWIVGGLRKQGDNFYLNHIKKNVTKAFIIGKERNF

SEQ ID NO: 165529 - protein, 231 aa, Unknown
  Bacterial polypetide isolated from the Sargasso Sea
MIFKQILKNKSFLVYGLGLTGQSVIKFLKKTKVKNIYLWDDNINLRKKFNLRENNYSIKKKFSEVDYIILSPGISLRKSNKKKQLNKNQRKIITDIDLFFLTNKIFKSVVVTGTNGKSTTCSIVKKVLSDSGYNTVAVGNIGKPILNYNIGKKKNVVIVIEMSSFQLEYSKFVRPNHAILTNITRDHLDWHGSMKNYINSKFKIFLLQNKKDYAYLPKNKNIIKLFKKNNM

SEQ ID NO: 165530 - protein, 232 aa, Unknown
  Bacterial polypetide isolated from the Sargasso Sea
MIKYKNKIITDIDLIFLQKKFFKSIVITGTNGKSTTSKIIDHTLKKNGYKTLLGGNIGLPILDLNIKKDHFLIIEASSFQLSHSKFINPDYALLLNLSNDHLDWHGNMKDYENSKFKIFKHQNKNQYSLINKKLKAKFKKRNLLGKLILPRLSNYQKVKSKIKNSYLISDMNNENMSFVFALIKLLGINQKSFFKSLKTFKGMPHRYEIFLKKKNCIFINDSKATSFQATKC

SEQ ID NO: 165531 - protein, 35 aa, Unknown
  Bacterial polypetide isolated from the Sargasso Sea
SLLLSPACASFDQYRDFEARGDHFRTLITPLLDVA

SEQ ID NO: 165532 - protein, 235 aa, Unknown
  Bacterial polypetide isolated from the Sargasso Sea
MYLSNSNFKSIVVTGSNGKSTTCKIIAHVLKKNKFNVELGGNIGKPVLNLKIKKNTFFVIEASSFQLSHSKFIHPNYAILLNITNDHLDWHGSMQAYIKSKFKIFDLQKRNNFALVNDDFKDIFRKKKYLSKLVSVKIQDYKKIKSKIKNNYLKSSTNDENMNFVYTLVKLLKIKKDSFIKSISSFSGLPHRYEIFLKKRVLLLSMIQKQPVFQLQNLLWLAVKTFIGYLGGLPK

SEQ ID NO: 165533 - protein, 236 aa, Unknown
  Bacterial polypetide isolated from the Sargasso Sea
MNIKNKRITVLGLGKSGYGVAKLANHLGARVFVSDQGSKKATLSYANELLIKHNIAFETGLHSKNIYNSSLIIVSPGISKNSKVVKDALQLKIPVISEIEFAFQYTKSPIIAITGSNGKTTTSKILFDMLKKTNKNPVLGGNIGISFSEQVLSEKVNPKKNQIYILEISSFQLEMVKNFQPNIAIFLNISSDHLDRHITMDEYIKMKFRLIENMVKKDIVIYNGDDEILVKGFKNI

SEQ ID NO: 165534 - protein, 276 aa, Unknown
  Bacterial polypetide isolated from the Sargasso Sea
GGNIGKPLLDFKNNYDLSNYHVIELSSFQLESAPNFKSYISILLNISKDHLDRYGNIKTYSFAKAKIFNKNTKYNIISIDDNYSKKIYQSLKSHNKIAISLNKKLKKGIYYFDNKIFDNYFYKNKMIEINKISESLKGEFNIQNLLFTYTVSKILKINSKIFNKTIKNFKGLPHRLEKIFEDKKLIIINNSKATNLESTLQSINIYDNIYLILGGVAKQKNFKSIIKYKDKLNKCYLIGKSSNEIYKQIKNDINSKITKNIENSVNEIFMDIKNKN

SEQ ID NO: 165535 - protein, 95 aa, Unknown
  Bacterial polypetide isolated from the Sargasso Sea
NDKININQFRKKIIKAYIIGNHTNFFVKKIRNKIKYEVTKNLKVTVNKIFRFIKKKQKLIILFSPASASYDQFKNFVERGEKFKNLVKYNAKKFN

SEQ ID NO: 165536 - protein, 150 aa, Unknown
  Bacterial polypetide isolated from the Sargasso Sea
MTSATIASSERRLIFGLGATGQSVARWWRQQGLAFAALDTRVELADDAAAVADIYRDNAAFGDVDAAFVDHCTEMIVSPGVALDHPLIERAREQGCRVRGDIDLFMEAAQAPVVGITGSNGKSTVTSILGAMIAACGVKVAVGGNLGRPA

SEQ ID NO: 165537 - protein, 275 aa, Unknown
  Bacterial polypetide isolated from the Sargasso Sea
NKKQLTKYKKKIITDIDLIFLIKKNFKSIVVTGTNGKSTTCKILYHVLKKNGFRVKLGGNIGTPILDLDIKKKSIIIIEASSFQLSHSKFIIPDYAFLLNITNDHLDWHGSMKNYVNSKFKIFNLQKKNHYSFINNKFKLFYKKKKLKGKLIIPSLLDYRKFKKNIYNSYLNLNINDENMSYVFAFSKILRINKNALIKSLKTFVGLPHRYEVFLKKKKCTFINDSKATSFQATKFALMNTKNIYWIVGGLPKKKDIINIKKLKKNIIKTYIIGK

SEQ ID NO: 165538 - protein, 306 aa, Unknown
  Bacterial polypetide isolated from the Sargasso Sea
QKDIVDNIVISPGININKSKISRFLKKNRKRIITDLDLFFEFNKKASIISITGTNGKSTTCKIIEKILRTAGLKTKTVGNIGKPILFSANFKNRNIFILEVSSYQLEYSKPIRSKHAAILNITPDHLDRHKNMKNYANIKSKIFAAQLNSDYSYLDTENKYSKKIENRFKNKKLKSRLILINKNVPNFFTKQINNKYFRSKGNIQNLYFAYKIAKNLKINDKTIIRAVNKFKGLSHRQEIVLSNKKLLCINDSKATSFDACSQSLLNNNNIYWIVGGLPKDKDYFDLKKIKNKIIKAYVIGKNTNF

SEQ ID NO: 165539 - protein, 297 aa, Unknown
  Bacterial polypetide isolated from the Sargasso Sea
SMKYIYGLSKSGESILNYLNSINENYFCWDDNIKIRKKIRRINKKTNFIEPEKLDFELIKESFITPGISLKNKKTNILKKYKVKLYRDLELYSRIAHKKKIIAVTGTNGKSTTTKLISDILKQNDMPNFMGGNIGIPLLDFPTKYNKLKHHVIELSSYQLESFKNFDPYISILLNISRDHLDRYKNFNEYIAQKEKLIISNRKGYKIICIDDKHTYLIYQKYKKKIIPISSKPFKGSIFYENNTIVDDFFEKNKKIELKDISSSLFGNFNIQNILAAYAVSKILNINLIKFTNIYQN

SEQ ID NO: 165540 - protein, 107 aa, Unknown
  Bacterial polypetide isolated from the Sargasso Sea
QSINGHIVLIAGGVAKGADFAPLTPVINKWAKELVLIGKDAEEMASNFNQDIPTNFAKDMEDAVGIASEKASPGDVVLLSPACASFDMYTNFEHRGQAFIDSVKNLL

SEQ ID NO: 165541 - protein, 199 aa, Unknown
  Bacterial polypetide isolated from the Sargasso Sea
MRDKRVTVIGLGISGVEAAKLANYHGARVFASDLSSSEMVNTHSMDLMHKHHIPSETGVQSDKIYDSDLWIVSPGISKNNEIVLEAIRKDIPVVGEIEFASWFTDSPIIAITGSNGKTTTAHVLSEMCQNKDINGVMAGNMGLPFSERVLNETLTPDKNRLYILEVSSFQMEFTKHFSPDFAVFTNISEDHLDRHSTRK

SEQ ID NO: 165542 - protein, 87 aa, Unknown
  Bacterial polypetide isolated from the Sargasso Sea
GLGADIDGKLVLIAGGDGKGADFSALRAPIARYCRAVVLLGRDAQRLADALADTTTLVHVATLDEAVQRAAECAEAGDAVLCRRPVP

SEQ ID NO: 165543 - protein, 283 aa, Unknown
  Bacterial polypetide isolated from the Sargasso Sea
QTFDIHPFPGSVGAEIIGLDLSRPVNDQDFARIHRAHLDYHVIVFRDQRITPEQQIAFSRRFGVLQIHVLKQFLLANHPEILIVSNIIENGQSIGLGDAGKFWHSDLSYKELPSLGSMLHAQELPSEGGDTLFADMHKAWEHLPGHLRNAVEGRSAAHSYTARYSETKFEGNWRPTLTPEQLAQVAEVVHPVVRTHPENGRKALFVSEGFTTRIVGLPDDESRDLLAQLYAHSVLPENIYRHQWQPHDLVFWDNRSLIHLAAGCPSHLRRKLYRTTIQGDAPF

SEQ ID NO: 165544 - protein, 319 aa, Unknown
  Bacterial polypetide isolated from the Sargasso Sea
MGLARSGKAAVASLVLGGATVLAWDDDPKRREEISGDGVEIRDLHDINFKDLDALVLSPGIPHSFPKPHPVAAKAKTSGVPIIGDIDIFAQNSNNTPIIGVTGTNGKSTTASLIGHLLSHSNISNEVAGNIGRPVLEISPDPGPDFIVLELSSYQLELSPSLGCSIAVLLNITPDHLDRHGGMEGYVRAKRRIFDKLIHDPKIIIGIDDEITRSIYQQLKHETDFSIIPISGYEIPNEGVGVKSGNLRSKLPGIPKCEINLKGMKTLIGGHNYQNAAAAVAIALSLRVEKPEIELALQCFKGLPHRQELVRELFGVNFI

SEQ ID NO: 165545 - protein, 331 aa, Unknown
  Bacterial polypetide isolated from the Sargasso Sea
SIEAGNVGRPVLEALESDADVVVMELSSFQLETTSSLVLEAATVLNISDDHLDRHGTLEHYVDAKHRIFANAKSAVVWRDGEFVAPDDALNVEGQANAQKANQNGLLRSAIEYGLGASDSGFSIVTMLDSKHIAFNGKPIIALSDIHLAGMHNVLNIMAALGICCKLGVSPDQAVKHLHSFKSAPHRCVEVARVNSVRYIDDSKATNIGATIAALEGISPTIAGKLLLIAGGDAKGADISSLAPYLTQYVSHVFALGKDAHLFAQSFAHTTQVATMKEAVKGALRLAAPGDAVLLSPACASIDMFKNYMHRGEMFKQTVHDLLDIKQEALS

SEQ ID NO: 165546 - protein, 276 aa, Unknown
  Bacterial polypetide isolated from the Sargasso Sea
FRYIFRHNNSYKIVYPGPNGKSSFAYYLEQILNQVSSGIIVGNFGNPVLDFLQHKKKYSIIELSSFQLEKLNKSLLDLSVVTNISPDHLDFHGNFENYKKAKLKICNNKTKTFFANNDISLKDFAIEIASSLEKIDLDTSRTLNDLPHRLEEVIPGIINDSKSTNSASLLYAIKKLNFDGNLIICGDPRKERKSYEVRGPQQVYIFGMHRNELKDKVKGSSVKIFSNLDLVLQDIKKSDSKPNILFSPGNSSGEDFKNFEDRGNFFKEKVLKYFSD

SEQ ID NO: 165547 - protein, 306 aa, Unknown
  Bacterial polypetide isolated from the Sargasso Sea
VLKQNKINVKLGGNIGKPILDINLNSNPIVIIEASSFQLAYSKFIKPDFAAILNITKDHLDWHGSMKDYVDSKFKIFSNQNNNDFAYLNNKVLIKKFKKNKFSSKLKYININKYKKLQNKINNSYLRSDVNIENLSYIFELSKKLKIKENNIIKTLKNFKGLEHRHEIFYKKNNKIFINDSKATSFDATKSALKSNKNIFWIVRGLPKIGDKFKINGLKKNIIKAYVIGNYLKYFQKIFTNHIDFELSKNMKNAICSLFKDIRKLNQKKITILLSPACASYDQYENFEQRGNNFKNLVMQYAKKYF

SEQ ID NO: 165548 - protein, 428 aa, Unknown
  Bacterial polypetide isolated from the Sargasso Sea
MLENYENIIIYGLGLSGLEVLNKLKNKKNIFIWDDSEKKRKELEKKGYQFLDPRDWPWENIDLLISSPGIPINFGMNSFIIKESKKNNIKIIGDIEVFYQEFQNFKNKKIIAVTGTNGKSTFATILYEILSKSGLKVSLGGNIGIPALSLNINECDIIIFEISSFQLELIEDFKADISILLNITEDHAERYESFEEYQKTKIKIFLNQKDEDYAILDNTYLSKKILDEINPLPRKIYFNELKTNAPNLNLNKNRVLKYILPALINVTDILRINRDFVIDELSKYKNLNHRIDEICSLNGINFVNDSKATNPAAANFAINQFNDIYWILGGLSKDNDLNKLDLSNQNIKKIFLIGSSSKQISKIIPKNINFEVSYNLENATRSAYEEALKDQKGCVLLSPGCSSQDEFNDYQDRGNMFTKIVNNLEVKC

SEQ ID NO: 165549 - protein, 176 aa, Unknown
  Bacterial polypetide isolated from the Sargasso Sea
MIEEYFLIIGSGLSGVSVSEYLLKKDLPFDIADTREVPPFEINPSKNGKAFFGDDFKKIDFQKYQKIYLSPGFNPEQIVEFSSKFITELDLFLNDSSAPIIAVTGTNGKSSTINQLEQILSMQGLKSAKGGNIGIPMLNNLKLDDQIDVHLIELSSFQLESFKGKKLEHNSSTFGV

SEQ ID NO: 165550 - protein, 431 aa, Unknown
  Bacterial polypetide isolated from the Sargasso Sea
MNDRQVFFKNKKILIYGFGKSGISCFNFLKKNNICRIFDDNKKNIPFKLRKELINVSKLSLISFDYIVLSPGIDIKKCKISNYLKKNRSKIITELDIFEISYPKINKITITGTNGKSTTSKLLFEVLKNNKMDVRLTGNIGYPVLMEKRIKKNTIFVIEASSYQLDYSKYFRSKYSVILNLNPDHLERHGTFKKYAEAKFKIVKSQGKNDYAFVDKENKFLSQLIKKNRLKSKITKVNYLKYKKYFKQIDNVYFNNSSNKKNLSFVLAVAKTLNIKIKKVINTANKFKGLNYRQQIIHKSKNLLIINDSKSTSFSSTVPLLEAYENIHWIVGGQAKKGDKFKLKRKYFSNIKAYIYGKNRNFLINSLSNKIFYKSSLTLNEAIRNLNNNIKNDKQKKVILFSPCAASFDQFKNFEERGKFFNKNIQHILNT

SEQ ID NO: 165551 - protein, 343 aa, Unknown
  Bacterial polypetide isolated from the Sargasso Sea
RAQSFERYLEKQGEAYEIYDANVKGSNIINKLPDRKKLDSYKMIYLSPGINIRKIYSGGEFNNVPYTTDLDIFFKEDNSVKIGITGTNGKSTCCYHLHQLLAGSQLIGNIGTPVLDNINSCSYSIIEISSFQLEKLEDINLDFGVLLNIAPDHIDHHGSFAEYKKIKNKIKKSKISTNQSDPKKLWSMITGREENEVKDIKLLDLPHRLEHILTMRNLVFINDSKATNTNALKFALNQVSNPLELILCGDPVKEQYDSLKIVGPKKVYIFGTHAKEIDKKVLHPDKILFHNQDLASVLNLIKKKDYDFRTNILFSPGHPSGKDYINFEKRGNHFTQLVMNLDD

SEQ ID NO: 165552 - protein, 285 aa, Unknown
  Bacterial polypetide isolated from the Sargasso Sea
CRVFTGKNRFSTYEAATILNITEDHLDHHLNMDAYIRSKHKIFSKAKVSIFNRDDKNTFPTHQRTMASFGSRISSNENGWAIEQQGSKKLVTRAGRKMAVLEGLGLNSHHAELNVLCVIALAFNFVDPESVIESLQSFKGLDHRYKRVAIYEGIEFINDSKATNLGALKSALENYTHETVVLIAGGEGKGSRFEEFSEIIDGKLKTLIVMGRDGGRLAVISERLNIATLQVSSIEEAVEKGFEIANEGDTVLLSPACASLDMFKNFEERGQRFEFAVRQLINESS

SEQ ID NO: 165553 - protein, 237 aa, Unknown
  Bacterial polypetide isolated from the Sargasso Sea
MVSVRNFKELTFLVYGLGSTGKSVVTFFKKNNIKNYYVWDDYEKSLYKRKRVRNLKKTIKEVNYIILSPGVSLKKTYYRKELIKNKKKIITDIDLIFLLKRFFKSIIVTGTNGKSTTCKIISHLLKKNKYKTLLGGNIGTPILNLDIKKKNFLVIEASSFQLAHSKFISPDYALLLNITNDHLDWHGSMKNYINSKFKIFKLQRASQYALLNKKLKLNYKRRSFSGKLIVPETRKEL

SEQ ID NO: 165554 - protein, 177 aa, Unknown
  Bacterial polypetide isolated from the Sargasso Sea
GDSFLSLWESVLTVYALARSFGMAPKSILTKCSGFVPLAHRSQWVDEIKGVAFINDSKATNVDATIHALKTFKNVHLILGGRAKEDNFCRLQDSMKNISRIYLIGEAASLIASNLEGHEIEQFDTLNDAFDSAISIATQGDTILFSPACASFDQYLNFEERGKHFISLVKEYRKNVI

SEQ ID NO: 165555 - protein, 362 aa, Unknown
  Bacterial polypetide isolated from the Sargasso Sea
NSIKEVLRELSIQWLKFFKKPIIAITGSNGKTTTKEMIRLIFGSIKKNNYTIGNYNSSIGLPINLFNFSLSSDPIILEMGANNPGEIDYLCKIAKPDYSLITNIQNAHIGNFKSIQELVETKVSIFKHTHNNGLIFENSDDIYLSNICKNFSNKIRFGFNDKNVDFFGSIKIIDDKINFYINGKKIENSNMNEIMAKNMLAAYSIANTYGIDHQIIKNVLQEFNFLKGRGNHIHNNGYLIIDDTYNANLDSFKQGIDSFSTINCKGRKFLIIGDMKELGDKKKIHHLELGKYINNHKIDFVFGIGKEIQNTINAINNSQIYSRYFKNKFFLINFLKLELKKGDSIYLKASRSMCFEDIVEQL

SEQ ID NO: 165556 - protein, 244 aa, Unknown
  Bacterial polypetide isolated from the Sargasso Sea
MLEDSQLIGNIGAPVLDNINACSYSIIELSSFQLEKLQKINLDFGVLLNIAPDHIDHHGSFDEYAKIKNRIKKSKISTKQSDPKKLWSMITGREINEVKDIKLLDLPHRLEYLVTQGNLLFINDSKATNTNALEFALNQVPRPYELILCGDPLKEQYNSYKLLGPKKVYIFGNHAKDIDKRVLHPKKKIFHMQDLSSVMNSIRKQDYNFQTSILFSPGHPSGKDYKNFEERGNHFTKLSMSFYD

SEQ ID NO: 165557 - protein, 321 aa, Unknown
  Bacterial polypetide isolated from the Sargasso Sea
MIFKKILKDKSFLIYGLGLTGESVLNFLKKSKAKDIYLWDDNTKLRNKFKTGNNENHLKAKIICSDFIVLSPGISLLNCKHGKLLKKNKNKIITDIDLFFLTNKIFKSIVVTGTNGKSTTCSIIQKVLKSSGINAITVGNIGKPILSYNLGKQRRTVIVIEMSSFQLEYSKYTRPNHAILINISKDHLDWHGNFKNYIDAKFKIFSLQNKDDFAYLPQDKKIINLFKKNKFQSSIVYINKKTKKLIKRNTKNNYLKSNNNIENLSFIYKLKKNFGINDYNFFSKLKKFKGLPHRQEIFLKKKNISFVNDSKATSLKQQKIV

SEQ ID NO: 165558 - protein, 327 aa, Unknown
  Bacterial polypetide isolated from the Sargasso Sea
LLAPFAGNIGTPLCEIAHSTKSKNIDWIVAELSSYQIEIATNCIKPKIGIWTTFTPDHLDRHKNIDNYFKIKNSLLKRAEFRIYNYDDKYLKENFKSLSNGTWITTSSDESDLDQCDYWINNENFIVERGEKLLSLKIFKLKGNHNVQNLLLAVAAARKIGLSTEIIKNALLSYEQLPHRMETIFQCNELEIINDSKATNFDSSVAGINAIKGSPIIISGGRLKNGDYNEWVKIINKKAKAVFLFGESSQTLKKLIIEGGFKNDILTFNDLSEVINYAYSYIKNNQTETLLFSPSCSSFDQFRDYEHRGDIFKKLIHEKFNIKFFAH

SEQ ID NO: 165559 - protein, 58 aa, Unknown
  Bacterial polypetide isolated from the Sargasso Sea
EINVEKIEHFENAVHKAIDSAVESSVVLLSPACASFDQFSNYEERGKKFKNIIERYYA

SEQ ID NO: 165560 - protein, 176 aa, Unknown
  Bacterial polypetide isolated from the Sargasso Sea
SLKGIHNISNIIIAAEIARRVGIDQENIRKAVREFEGLEHRFEHFISYNGIDFINDSKSTNIDSAKKALESISEKIVLILGGIPKEDDFSDISLFKKSILKIIVYGEASHKIYNSLPKDVSIERIEKFEDAVQVAINSAVENSVVLLSPACASFDQFDNYKERGKKFKNIVERFYA

SEQ ID NO: 165561 - protein, 256 aa, Unknown
  Bacterial polypetide isolated from the Sargasso Sea
RAIKRGLLERSDHAIFNADDPDLRQQRQSWTGGTWVSAESTQPDGQPADLWINGEGWVCDRSQPLFPAEALAMPGSHNRQNLLLVTAAARQIGLSPASIEAGLRSFPGVPHRLEPLGRIRNAQVFNDSKATNYDAAAVGLKAMQGPVVVLAGGSTKQGDATGWLEELNRKACAVVLFGAGAEELHGLITGANFTGALTRRRDLTSAVEEAVRSAEALGASSLLLSPACASFDQYRDFAARGDHFKQLIHQVQSGLS

SEQ ID NO: 165562 - protein, 262 aa, Unknown
  Bacterial polypetide isolated from the Sargasso Sea
HLDRYDYKLANYAASKMRIVQNQTSADAFIYCADDDETKKALDTVNIAAQAYPFSILKKVENGAYLEDNNIYINTNLNNTLTMSISDLALQGKHNIYNSMASGIVAKVLELRNETIRESMGEFKNIDHRLEFVAKINDVTYINDSKATNVNSTWYALESVNTDVVLIMGGVDKGNDYEMLKDLVKSKVKAIVCLGKDNKRIHDAFEDDVDVIVNTFSAEEAVQVAYHLAKKGSTVLLSPACASFDLFKSYEDRGNQFKAAVK

SEQ ID NO: 165563 - protein, 264 aa, Unknown
  Bacterial polypetide isolated from the Sargasso Sea
AIENGVAIDNDIGLFFRSIGSSDWAKFESIPKIIAVTGSNGKSTTSALIHHILISENRPSQLAGNIGKGVFDLEPLTDGETVVLELSSYQTEVANSLTPDVAVFTNFAPDHLERHGGIGGYYAAKKRLFTSGCPDRSVIGVDEFEGELLAQEVADHLHDDRIIRVSGSRKITNLGWTVFASKGFLSEYRRGKQIASLDLRKCKYLKGSHNHQNACAAYAAVRTLGIGPRAVEKALKSFTGLAHRAQYVTEISGVVFINDSKATN

SEQ ID NO: 165564 - protein, 297 aa, Unknown
  Bacterial polypetide isolated from the Sargasso Sea
MYLIYGIQKSGLSILNYFENKKIKFKMWDDNPIVRKAIKKNYNKDYFFNIKKDNLNDFEKIFVSPGISLRQKKFKRKNISKKVNRDLNLYISNLTNQKIVAITGTNGKSTTTKLIGDILKKNSIKTFVGGNIGESLCNAFLLKKKYKVHVIELSSFQLETVKSLDSRISVITNLSGDHLDRYKGISDYINQKKNIISKNGINLLSIDDIYSRKIFNQKKIKNKISFSLVDKSADCFANNDYILDNYFKKSRKLFIKKISKDLEGHFNIQNILIAYICSKIFKIPESNFLKVIKTFKG

SEQ ID NO: 165565 - protein, 241 aa, Unknown
  Bacterial polypetide isolated from the Sargasso Sea
RYFTAKIKQLSPDREGLGSISFGFSNPSESESGGVRENQFDFCILRGSQEMCSVPKAYLGGRVHYLLNIVAALASIYPFNSAAEFESIESFEGLRHRFELVNEVNGVRFINDSKATNVSATESALRNFESKEQVILILGGDAKGVDLSLLEISISKRVFGLVILALDPAPLLELGRRCGIETFATISMEEAVKEAYRLVNTSADAKNVVLSPACASFDLFTDYQERGRSFEAAVKKLSEIG

SEQ ID NO: 165566 - protein, 212 aa, Unknown
  Bacterial polypetide isolated from the Sargasso Sea
MALDLAGSEYGVIQHQGESWLVVAGSPLMPVRDMTIVGLHNQFNALASCALALAAGASRAGLIDALKTFVSLPHRCQLVLDNKGVRWVNDSKATNVGATLAAIAGLRAEVKGKLILIAGGDGKGADFSELATVLNTDVDHLITLGQDGPAIAALKAGSFEVKDLMAAVKTAAQLATADDLVLLSPACASLDMFKNYEDRGQQFAAAVQKVWL

SEQ ID NO: 165567 - protein, 274 aa, Unknown
  Bacterial polypetide isolated from the Sargasso Sea
AAKLAYKFGANVFVSDLNKNQKIKIKGINSEFGNHSSKILESDFIIKSPGISRESKIMKSILDLSIPIFSELEFASWFTKSFIIALTGTNGKTTTVELINTILKDCGFKTFLGGNIGIPFSDNVIHEIDENDNLKNNFHILEVSSFQLEDIKFFKPNISIILNISPDHLDRYNSFKDYIKTKLNILINQDKDCYAIINDSNINIHNKNYNSNILKFSISNSQLLINGKEKKIDISNTKLFGTHNYENIAAASIVSSLCGIKESSIINSINKFSP

SEQ ID NO: 165568 - protein, 202 aa, Unknown
  Bacterial polypetide isolated from the Sargasso Sea
MPGTEGPVLDLAECMLEGTHNAENLMAAWLVGRAMKLLPAEMVPVLQTLRTGEHRCELVAEWEGVRFYNDSKATNVHALVSALRSMPPAKQAARNVWLIAGGQGKGMDYQAAASAVGERVKEAWLIGASAAEIQSAWSPFAPCNLVADLIEAIAEAGRNAAPGDVVLLSPACASFDMFDSYQHRGNQFRAAVTEWVESRQGD

SEQ ID NO: 165569 - protein, 145 aa, Unknown
  Bacterial polypetide isolated from the Sargasso Sea
CVPHRLERIREFSGITFYNDSKATNYDASLVALQSLERPLVVLAGGRAKRGEPGAWLEALHHTAAAVVLFGEARSTFSELLGSAGYPGVIEQQEHLDQALPLARRLAEQLNCQAVLLSPACASFDQYRDFEVRGDHFRQLVEAMA

SEQ ID NO: 165570 - protein, 303 aa, Unknown
  Bacterial polypetide isolated from the Sargasso Sea
EVSSYQLALTQDLTFDIAVLLNISEDHLEMHGSFQSYIKLKKKIFNQGRLATAIICTDDENSKSIYEEICGYENINCVEVTTSKIVNDGISIIDGLLHENGKAVFDLTKVTRLKGAHNWQNAGASWAVARNMKVPIEKIYRAFSSFPGLAHRMEFVATIDGISFINDSKATNFAATARALSSFENIFWVAGGRSKLGSSDIIHDHLNNIKAAFIYGECADKICNDINKKVKVTKFSTLKEAVSAAMDCAKNETIEDKVVLFSPACSSFDQFVNFEARGDEFKKLVNFLDHHIQICKEREFEQL

SEQ ID NO: 165571 - protein, 222 aa, Unknown
  Bacterial polypetide isolated from the Sargasso Sea
CINTKKYSIIELSSFQLDKMTTNKLDFGILLNIQTDHLDYHGNFESYKLAKERILDAKKSISFEDNPYDLFEWITDQKSSEINLKNLPFRFQHISKNIINDSKSTNYHSLSYAVKRANEIFLNNEYVLIVCGSPKKEEFRKINIKGPDQIYIFGKHANEINKCVKNKNKKVFNELSDVISHLNKHNQKNVLFSPGYPSGDDFSNFEDRGVSFNKIFGNLNEN

SEQ ID NO: 165572 - protein, 269 aa, Unknown
  Bacterial polypetide isolated from the Sargasso Sea
MHTHHIASETGIHSDKIYDSELWVISPGIPKDSDIVLKATQKKIPIVGEIEFASWFSNDPIIAITGSNGKTTTSHMLNKMCQTKEIKGTMAGNMGIPFSERVLNNIKNPEGNILYILEISSFQLEFIKHFSPDILVYTNITPDHLDRHGSMEEYINMKLNAIMNMENKGHIVYNKDDALLDEVLSPLPHKKEPFSTKNKDVLFNLDSSNIVGPYNDKLLHINELSIPGEHNLQNFLAASTCSHLTGITQNQIVKSLKEFKGVEHRLEHV

SEQ ID NO: 165573 - protein, 298 aa, Unknown
  Bacterial polypetide isolated from the Sargasso Sea
EHEALQQAKNLNIPIQTDIDIYLKYSHSYNILVTGTNGKTTTVSMLEHLLKGFLRNKSISAIGNIGKPVLDFLDQKIDIAIIEISSFQIESSSRLESEIGLLLNIEEDHIDRHKSFEIYKSLKLRVLRESNINISKLENKIAGKEFYDYEDYFPEPHILNNPALKKWPMHDVFNLKASLLALKLILEEKENLKIYDVNDFLDKAIGVFASFEKQPHRYEVLGKVNDVTYVNDSKATNFDATLKSIESSRNLNKQGNIYLICGGDLKEQDLSKENAVIFKEIKKCFIYGKDKDLLKELL

SEQ ID NO: 165574 - protein, 269 aa, Unknown
  Bacterial polypetide isolated from the Sargasso Sea
EKLNKIVVSPGISLNHPVIKKAESFKVDIINEIDVFANSKPKAKVIGVTGTNGKSTTSALIGHILNLNGFNTKVGGNIGEAATSIDDPGEDGFIILELSSFQLETCSDLELDGAILLNITPDHLDWHGNLDNYFNSKLKIGTFLKEGAPIVVSNTNNLTKKACELFYKNKIKVIEVLKNDISHLQTILENKFYNENHLTIIQLLKEFGVKKERSIEAIKSFNELPHRLEFCYQKNNLTFINDSKATNAEATINALEKYRNIYWIAGGIG

SEQ ID NO: 165575 - protein, 242 aa, Unknown
  Bacterial polypetide isolated from the Sargasso Sea
TLTPDHLDRHVTIERYRSIKASLLRRSRIQILNGDDPDLLHHAAEWPDARWVTAGPRDGLKGIDPQLWIDGDRICDATGGLFPATALAMPGRHNRQNLMLSVAVSRACGLTTSQIESGCRTFPGVPHRLERLRQRSGVTYYNDSKATNYDAALVALQALEYPLVVLAGGQAKRGEPGAWLSALKQKAAAVVLFGEATPTFRELLGVSGYGGRIEQREHLDAAVPLAAQLAGELGATAVLLSP

SEQ ID NO: 165576 - protein, 215 aa, Unknown
  Bacterial polypetide isolated from the Sargasso Sea
MIPKNIENKEIGLLGLGVSGKSAFKSLKAGGSNIYAYDDNISNDPKVIKPDKWPWEKLNKIVVSPGISLNHPVIKKAESFKVDIINEIDIFANSQPKAKVIGVTGTNGKSTTSALLGHILNLNGFKTKVGGNIGEAATSIDDPGEDGFIILELSSFQLETCNDLKLDGAILLNITPDHLDWHGNLDNYFNSKLKIGTFLKEGAPIVVSNTNNLTK

SEQ ID NO: 165577 - protein, 294 aa, Unknown
  Bacterial polypetide isolated from the Sargasso Sea
RISSITVSPGIDWEHIALKELRQKNIHMRGEVELAWERLNHIQSIGITGTNGKTTVTNMLNHVLKLNNLNTDMGGNVGKALSKIALESMKNDYQELNWLVLELSSYQIEGSSKVSPTIGIWTTFTPDHLERHNDIETYFKIKRSLLEKSSIRIYNSDDKYLSSKRKELPKGTWVGTNQQSFYSEYTKFWIDKKGYIFEDKKQLFHSSIIKIPGNHNLQNLLLVTAAAREIGIDHSSIAKSITSFKSIPHRLEYLGKVNNLSFYNDSKATNFDSSITGLKSIACPIILLAGGIQK

SEQ ID NO: 165578 - protein, 236 aa, Unknown
  Bacterial polypetide isolated from the Sargasso Sea
GFSVAIGGNYGKPALDLLDEKADLYVLELSSFQLEKIQNLNLHTGVFLNFSDDHLDYHGSRASYLDAKRRIFDFSDRKVFSRQDKATFPDREGLGSISFGFGNPSESESWGVRENQFDYCILRGSEEMCSLPKAYLGGRVHYLLNIVAALASIYPFNSAAKFESIKYFEGLRHRFELVNEVNGVRFINDSKATNVSATEAALRNFESKERVILILGGDAKGVDLSILRMSISKKVS

SEQ ID NO: 165579 - protein, 239 aa, Unknown
  Bacterial polypetide isolated from the Sargasso Sea
LNINSSSNLIGNIGNTMLDKINNNRDYSVIELSSFQLDKMKKNNLDYGILLNIDIDHLDYHGDFELYKLAKEKILHAKESISFEMDPYKLFHWITKSKAEEIKFKNLPYRFEFISNKIINDSKSTNSHSLFYALRKANKIFDSDYILIVCGDPKKERFREILIDGPKEVLIFGQHLNELNKCIKNNNKHSFVTLQELFNFIKNENKFQNILFSPGYPSGKDFKNFIERGEAFNSFAKNI

SEQ ID NO: 165580 - protein, 257 aa, Unknown
  Bacterial polypetide isolated from the Sargasso Sea
SADTIITSPGIPPREWPDTNIEIISDIEFAYRILKYENRLPRFIGVTGTNGKTTVTAGIAHALDVKAYGNIGYPLISEVDQLSSESTVVIELSSFQLFSSPTLHCDIAIIVNIEPDHLDWHESFDHYEKAKKTLIKSSNQIVYLPQRLANECEVNGSELREIESLATTNWQQFNGRHNQLNANIIQSICKELGQSDNELTKRMATFTLPPFRCEIIYSSERRIIINDSKATNMAATLAAVQSFSGKKLLILSGEPKE

SEQ ID NO: 165581 - protein, 222 aa, Unknown
  Bacterial polypetide isolated from the Sargasso Sea
MTFSGKVDLSAADRLFDWSGVHVVIAGLGTSGYAAADALLELDATVLVLDDCDDDSHRDKGGLLEVLGAEVRLGPGSASDLPEETDLVVVSPGWRPTQPLVAHALTRGIPVWGEPELAWRLMHPDRVIPWLAITGTNGKTTTTQMTESILHAAGLKACAVGNIGRPILEAMADEINYDVFAVELSSFQLHWSNSLSLHSAAVLNLHQDHLEWYAHESDPLGS

SEQ ID NO: 165582 - protein, 295 aa, Unknown
  Bacterial polypetide isolated from the Sargasso Sea
KDSSHRRHARAAKCEVIGDIELLVRTQRWCNFIGVTGTNGKSTTTALLGHIMQVAGREAEVGGNLGIPVLTLDPLGAEGTYVLEMSSYQLELTPSATFDVAVLLNISADHLDRHGGMDGYIAAKRIIFQRQTKPRAAVIGMDDNICRGICDELKATDEQVVIPVSGQDRVHGGVYAINGVLYDDMDGDETPVCNLRQNPSLLGSHNGQNAAAAYAAAKTAGVAPHAIMACLQSYPGLVHRQEAVAIVDGVAYLNDSKATNDEAAARALACFNNVYWILGGQPKKSRSSRLSAASR

SEQ ID NO: 165583 - protein, 227 aa, Unknown
  Bacterial polypetide isolated from the Sargasso Sea
MSKARRVIAGLGKTGLSYAKFLTAQNLEYEVLEDNLTEEQMSQLNKIKKGVKVSSFSDHRLLDVSEIYLSPGVPKFKKCIDQAVKNGAQIVSDIKIFFDRARCPVVAITGTNGKSTVSELVALALSNHYENILLAGNIGKPVLDHINSNPALAVLELSSFQLENLVEVSPEVAVVLNLSPDHMDRYYDVNSYFSTKLSIYDNCKKAVINRALSEKIKGSFKRIATLA

SEQ ID NO: 165584 - protein, 275 aa, Unknown
  Bacterial polypetide isolated from the Sargasso Sea
LLNYKNIYLTPGLSILDKRLSYVPKSKIKRDLNLYYNNLKNEKIIAITGTNGKSTTTKLIGNILKEKYKNIFVGGNIGDALCNSIENKNKYSHHVIELSSFQLETIKKFEPKISILLNLSKDHLDRYKNFKSYISTKKNIFNTENKKLNLISLDDPYSKKIFNDKNIKNKISFSIKKTYADIFYNKGYIVDQYFYKLKRFKLNDISVDLQNNHNIQNILASYIVCKYLKIPMKFFFEGVKKFKGLPYRSKIIYNSKKKIIINNSKATNISSAIAS

SEQ ID NO: 165585 - protein, 262 aa, Unknown
  Bacterial polypetide isolated from the Sargasso Sea
MQGYVAAKKRIFRSRKDRPQIAVIGTDDEYGRKICSELSADDHWQVIPVSVGTKNDGVYVFDSILHDADGNNLDISGLETLRGNHNWQNAAASWAVARARGLPPDAIGRAFANYPGLPHRLEAVGEIDGIRFINDSKATNGEAAARALSSYQNIYWIVGGIAKEDGLEPTFPWLDRVAHGFLIGEAAETFAETLSERGNQVTISGDLGTAIANAFEQAWTAGGEAVVLLSPACASFDQFSNFALRGDRFRELATAICAEGRQ

SEQ ID NO: 165586 - protein, 208 aa, Unknown
  Bacterial polypetide isolated from the Sargasso Sea
MKEIQLDLGVLLNISPDHIDHHENFKEYKKIKNRIKESKKTTEESNPKKLWSMITGRPQRLVQDIELKDLPHRHQFISTHDHVVFINDSKATNLAALQFALNKMSNPYVLILCGDPDKERYESYEIEGPTRVYIFGNHAEEISKKIFHPKKILFHNQGLSSVMKSILKEKYDSQTHILFSPGHPSGQDYRNFEERGDHFIKLAMSSND

SEQ ID NO: 165587 - protein, 200 aa, Unknown
  Bacterial polypetide isolated from the Sargasso Sea
HNGQNAAAAYAAAKTAGVASHAIMACLQSYPGLVHRQEAVAIVDGVAYVNDSKATNDEAAARALACFNNVYWILGGRPKKVDLAACMPHLNRVRHAYLIGEAAVTFSQVLDGKVPFSLSGELDAAVVAAHEQALADGLPRPIVALSPACASFDQFASFEARGEVFKSLVEALPGDHLDPFEKPGIFPGTTEADGTTESRI

SEQ ID NO: 165588 - protein, 198 aa, Unknown
  Bacterial polypetide isolated from the Sargasso Sea
MKSLIYGYGETGKSFERYLANKNLEFEIFDANVAKFNKEYNLKDFDQILCSPGISKSNYEKLIKEHNNVLTDIDIFFHIDKSIKIGITGTNRKSTTAYHLFQLFENYSSSNLIGNIGNPVLESINNDKEFSIIELSSFQLEKMKINKLDFGILLNIDIDHLDYHGDFESYKAAKEKILLAKKSISYITCPYELYEWIT

SEQ ID NO: 165589 - protein, 291 aa, Unknown
  Bacterial polypetide isolated from the Sargasso Sea
ENGVAIDNDIGLFFRFAGSADWGKFESIPKIIAVTGSNGKSTTSALIHHILKADNRPSQLAGNIGKGVFDLEPLTDGETVILELSSYQTEVANSLTPDVAVFTNFTPDHLERHGGIGGYYAAKKRLFTSGWPDRSVIGVDEFEGKLLAQQLADHLHDDRIIRVSSSSKITNLGWAVFANKGFLSEYRLGKQVASLDLRKCNALQGSHNHQNACAAYAAVRALGIGPRSIEEALNSFTGLAHRSQLVTKINGVVFINDSKATNVDSAMKSLETFPKVRWICGGEQKEQDIFR

SEQ ID NO: 165590 - protein, 270 aa, Unknown
  Bacterial polypetide isolated from the Sargasso Sea
ISLRQKKFQRKNIFRKVNRDLNLYISNLSNKNIVAITGTNGKSTTTKLIGDILKKNNIKTFVGGNIGEPLCNAFLLKKKYKVHVIELSSFQLETVKSLDSIISVITNLSGDHLDRYKNINDYINQKKNIISNNGINLLSIDDIYSRKIFNQKKIKNKISFSLVDKSADCFANDDYILDNYFKKGRKLFLKKISKDLEGHFNIQNILIAYICSKVLKIPETNFLKVIKTFKGLPFRSSTIFRNKKLKIINNSKSTNLNSTINSVVNYNNIY

SEQ ID NO: 165591 - protein, 257 aa, Unknown
  Bacterial polypetide isolated from the Sargasso Sea
AYRAIKRGLLERSEYPLFNADDPDLRQQRSSWDCGSWVSSEGARPDGQPADLWIDEEGMVRNNSTRLFAADALAMPGHHNRQNLLLVTAAALEVGLSPQQIADALRTFPGVPHRLEHLGTLAGASVFNDSKATNYDAAEVGLRAVQEPVVVLAGGQTKQGDASGWLKQLHTKACCLILFGAGANELTSLAKAAGYPGELLQCLELESAVSLSVTAVQRHQASSLLLSPACASFDQYPDFEARGEHFRSLIQPLLNVT

SEQ ID NO: 165592 - protein, 335 aa, Unknown
  Bacterial polypetide isolated from the Sargasso Sea
IGPGIPWDHPTLVELRSEGVQVRGEMDLAWDALQQIPWIGITGTNGKTTVTHLLSHVLEASGLMAPMGGNMGQSAAELAYQIASGAVPGPDWLVMELSSYQIEAAPTVAPKIGIWTTLTPDHLERHGSLEAYRAIKRGLLERSEYALFNADDPDLSQQRSSWDRGTWVSSEGARPDGQPADLWIDEEGMVRNNATRLFAADALAMPGRHNLQNLLLVTAAALEVGLSPQQIADALRTFPGVPHRLEHLGTLAGASVFNDSKATNYDAAEVGLRAVQEPVVALAGGQTKQGDASGWLKQLHTKACCLIPVGAGGNELASPRKAAGYPGELLQCLEL

SEQ ID NO: 165593 - protein, 303 aa, Unknown
  Bacterial polypetide isolated from the Sargasso Sea
ISPGVPSDIYIIEKAKKLNIPIIGEVEFASNLTELPIIAVTGSNGKSTTVSIMHNMLKTEHLNPILAGNIGIPLSKIILEEIKNPDIGNILILEISSFQLEFINQFRPIISVFLNISPDHLDRHKDMDEYIRMKLKMITNSKEGDKIVYNEDDQTLKKEFSKKKSNEISFSIKNKTQFFSVNKTKIYDEKNELFCSLSEILLKGKHNLSNLMASATVAKILDVDSQKIKNTMKTYSGIDHRLQTIRKLNGVTYINDSKATNIQSVIVAINSFENPIILILGGKNKNSDFRLLLPHTKRHVKHI

SEQ ID NO: 165594 - protein, 161 aa, Unknown
  Bacterial polypetide isolated from the Sargasso Sea
GLRSSPGVPHRLEPVGRIGNAQVFNDSKATNYDAAAVGLKAMQGPVVVLAGGSTKQGDASGWLEELNRKACSVVLFGAGAEELHGLITGASFTGELTRRTELTSAVEEAVRSAEALGASSLLLSPACASFDQYKDFEARGDHFKQLIHQVQSGLNETNRLD

SEQ ID NO: 165595 - protein, 206 aa, Unknown
  Bacterial polypetide isolated from the Sargasso Sea
MYDWCQLKTVGVIGLGRTGRSVVSYLHSQNINIIAFEEDLMSSGIDFIKEFYSNVECRVGAMSAWDWHELAEHLDLLVVSPGVDLRQPVLQNWLRSGLPLCGDIDIFCHFTTSSIVAVTGSNGKTTVSTLIAESLSLSGKTVSLAGNVGKPVLDLLQSPEAEYTVLELSSFQLESINRLRNHVGLVVNYSPDHMDRYHDFKEYVVT

SEQ ID NO: 165596 - protein, 264 aa, Unknown
  Bacterial polypetide isolated from the Sargasso Sea
MVASKRINPKNKNIAIIGIGETGQGAALLAKKLGANVLVSDSSEINNKTFFKKAHEMGIKLETGGHTNKIYNSDLWILSPGISDKIEIVRNAKNKGIAIVSEIEFASWYTDKPIIAVTGTNGKTTTVSIINDILNKSDLNPVLAGNIGFAFSKAILDDLAKCDENRIYVLELSSFQLEHISTFKPFISIILNITPDHQDRYENMEAYIKAKMKIAINHDSESYLLFNSDDSQLVNKCKNLHTNKISFGLVNDNQNTIKINNSHI

SEQ ID NO: 165597 - protein, 177 aa, Unknown
  Bacterial polypetide isolated from the Sargasso Sea
MRSLIYGYGDTGKSFERYLDKKKYDYEIFDTNISQYNLNYDFQDFDQILCSPGIPKDIFENIKTQNNNVFTDVDIFFNEDRSIKIGITGTNRKSTTAFHLHQLFKKYKPSNLVGNIGNTMLDYINNGKKFSIIELSSFQLDKMDHNRLDYGILINIEEDHLDYHGNFKSYKQAKERI

SEQ ID NO: 165598 - protein, 183 aa, Unknown
  Bacterial polypetide isolated from the Sargasso Sea
MLSINKIPIQGKHNLQNSMAAISVAQILKISNQKIKESLKTFKSIPHRLEHFLTIQKVKYINDSKATNVNSAFYALDSFDGPIVWIAGGVDKGNNYDDLIPMVSSKVKAIICLGKDNNKLIDVFSSYTDVIVSTDKISDAVSSAYKISKPGDVVLLSPACASFDLFKSFEDRGDQFKEEVRKL

SEQ ID NO: 165599 - protein, 287 aa, Unknown
  Bacterial polypetide isolated from the Sargasso Sea
DALDRGARLVIAQSPFDTSGYDNVLVIPELDLRRGEIAARYHHHPSREMLVCAVTGTNGKSSVTHYVAQSLNALSRPCGIVGTLGVGMIGDLTNLGSTTPGALTLQQSLASLRDGSAQAVSIEASSHGLDQGRLLGCEVDVAVLTNISNDHLDYHGSFDAYKQAKFSLFDLPTVRHWIVNVDDASGRELIGRAAHPVNVVRFSLTNDVDSDVHVLRSSFRRDGIEAQVQTPWGTLALHMSLLGKFNLSNVLATVGVLGALGYSLTDIERSIRDLQPVIGRMQVFHVE

SEQ ID NO: 165600 - protein, 136 aa, Unknown
  Bacterial polypetide isolated from the Sargasso Sea
FSNKRIKIINDSKATNFESLIPALKSYKNIYLICGGLAKDNNIMILNKYINQVVMVFIIGSDEKPFFNYFKKRTETYYVKNLAKAVKMVLSSVNDCKSKSTILFSPGAASFDQFKNFEVRGEKFKKLIRSRKAYGG

SEQ ID NO: 165601 - protein, 217 aa, Unknown
  Bacterial polypetide isolated from the Sargasso Sea
MKSLIFGYGVTGQSIGRYLEKKSKAFEIYDENVKGPNIFNALPNQKKLNSYEMVYLSPGINIKKIYPNGEFNNISYLTDIDIFFQEDKSFKIGITGTNGKSTCCYHLHQLLEESQLVGNIGAPVLDNINSCRYSIIELSSFQLEKMKEIQLDLGVLLNISPDHIDHHGNFAEYKRAKNRIKESKKVTKESDPIKLWSMITGKPQRAVQDIELKDLPH

SEQ ID NO: 165602 - protein, 268 aa, Unknown
  Bacterial polypetide isolated from the Sargasso Sea
YFFHEDESIKIGFTGTNKKSTTCFHLMQLLEEDYSVNLIGNIGKPVLDVLNNGKKYSIIELSSFQLDKVSNIDLDYGILLNLDSDHLDYHENIEDYVQSKKRILEAKKSIQNDDIKIIYEFITGSAPPMKELKDLPFRFQKINQNTINDSKSTNFHSLKYAMREASKIFNDFALILIGNPKKEGYKEIEISNPSLVVICGKHANEIFPCINHENKVLCEDLSLAIKQIKKSNIKNILFSPGYPSGDDYINFEERGKAFNKLIERKYGT

SEQ ID NO: 165603 - protein, 275 aa, Unknown
  Bacterial polypetide isolated from the Sargasso Sea
PKIAVILNITPDHLDRHESFMQYVGLKEKIYANQTKNDSLILNYDDSNTRSMGGNCPAKQIFFSLESELGSGVYVSKGKIFARINEFEGEVFALSSLSRGLAWQIENVLPAVAAALLLKISLESIKKVLGNFTGLEHRLEWVCSQDGVDFINDSKGTNVGSAYKSLNTFDRPIILIAGGKDKNADFSSLKKIMKKKVKHLILIGETRPKFRSLLNGSFGYEESDSLKDAVHKAKEKADKGDVVLLSPACASFDMFTDYIDRGNQFKSIVKNLEGN

SEQ ID NO: 165604 - protein, 205 aa, Unknown
  Bacterial polypetide isolated from the Sargasso Sea
MKSLIYGYGKTGKSFARFLESKKYKFDIYDDNLPKYSKKIDLKKYNQILCSPGVPKNIFEKIRNINKNVLTDLDIFFQEDTSIKIGITGTNRKSTTAFHLYQLFEKFEPASLIGNIGNPMLDCINTKKYSIIELSSFQLDKMITNKLDFGILLNIQTDHLDYHGNFEFYKLAKERILDAKKSISFEDNPYDLFEWITGQKSSEIN

SEQ ID NO: 165605 - protein, 265 aa, Unknown
  Bacterial polypetide isolated from the Sargasso Sea
DHLDRHGTLERYRSIKAGLLLQSGRQFLNADDRDLYAHAAEWPQALWVSGGDKDQFSAAMTPHLWVSGGQLCNQTGPLFPCAALAMPGAHNRQNLALATAVALECGLSPAQIEAGCRSFPGVPHRLERIRELSGITYYNDSKATNYDASLVALQSLERPLVVLAGGRAKRGEPGAWLEALGQKAAAVVLFGEAQSTFRELLGSAGYPGVIEQQEHLDQALPLARRLAEQHNCQAVLLSPACASFDQYRDFEVRGDHFRQLVEAMA

SEQ ID NO: 165606 - protein, 158 aa, Unknown
  Bacterial polypetide isolated from the Sargasso Sea
SPAQIEAGCRSFPGVPHRLERIRELSGITYYNDSKATNYDASLVALQSLERPLVVLAGGRAKRGEPGAWLEALRRKAAAVVLFGEARSTFSELLGSAGYPGVIEQQEHLDQALPLARRLAEQLNCQAVLLSPACASFDQYRDFEVRGDHFRQLVEAMA

SEQ ID NO: 165607 - protein, 216 aa, Unknown
  Bacterial polypetide isolated from the Sargasso Sea
MKSITILGAGESGFGAAMLARQKGLDVFVSDLNKINEDRKLEMIKNSIVFEEENHSFDKIKLSDYVIKSPGISNTSEIILKINSSGIPIISEIEFASSYSNSFKICITGTNGKTTTTKLIYHILKRAGLDVGLAGNIGDSFSKMLLSGDKDIYVLEISSFQLDDIKKFRPNISVITNIIEDHLDRYENDFGKYVDAKMKIAKNQKSSDYLIYNSDD

SEQ ID NO: 165608 - protein, 308 aa, Unknown
  Bacterial polypetide isolated from the Sargasso Sea
MLASKKGYNVFVSDLNQIDDNIKLLFEDNSIEYEENKHSIDKIQSSDLIIKSPGIPNSADIIIKIKSLEIPIISEIEFASTNSNSFKICITGTNGKTTTTNLIYNILKAAGLSVGIAGNVGDSFSKMLLSGDKDIYVLEISSFQLDDIKDFKPNISVITNVLEDHLDRYDFNFSKYIDAKMKIISNQDNSDYLIYNSDDKQLVDALNNEKSTVNRISYGIENQNKNLINIKKNILSNKKKTIMINTEELALKGRHNLLNAMAALTVSDLLKIENEIIRESLLGFSGLPHRLENFLKIQGVNYINDSKA

SEQ ID NO: 165609 - protein, 197 aa, Unknown
  Bacterial polypetide isolated from the Sargasso Sea
DGKNILIKNKKKTLMINIEELSLKGRHNLLNAMAAITVADLLKISKDSIRDSLLTFKGLPHRLENVLTIQGVNYINDSKATNVNAVFYALDSMNSQTVWIVGGVDKGNDYSELLPLVREKVKAIICLGVDNKKIIETFSPIVDLIVETESMEEAVKISRKIAEKKDTVLLSPACASFDLFKDYEDRGNQFKEAIRNL

SEQ ID NO: 165610 - protein, 227 aa, Unknown
  Bacterial polypetide isolated from the Sargasso Sea
MIDINGQQISIIGLGKSGYSAAKLASFFNAKVHVSDNGKSKIIKIYKKELEELGVVVEAGKYSDKIYNSQLWILSPGVTLPKTIILKAKSKDILIISEIEFASWFAKFPIVGVTGSNGKTTTVNLIYTICNNQNICPKLAGNIGIPFSKIVLEDLIKKPKKRLYIVEVSSFQLEKVNHFRAKISIFLNISEDHLDRHKTMKNYIKTKMALIKNARKDDYIIYNYDDE

SEQ ID NO: 165611 - protein, 281 aa, Unknown
  Bacterial polypetide isolated from the Sargasso Sea
ETTQRFHPKVAIILNITPDHLDRHKSFEKYSTVKEKIFANQTKNDFLILNQDDPITRDLGNNCPAKKIYFSMENPLESGVYIKSEKIIAHLNNYEGKVCDLSSLSPGLRWQAENVLPAVATALILNIPLDAIQNILRNFPGLEHRLEWVCNQDGIDFINDSKGTNVGSVCKSLNTFDRPIILIAGGKDKNIDFSGLKKIIKKKVKYLILIGETKQKFKSILNGNFDYEESDSLVEAVRLAKTKAKKGDVVLLSPACASFDMFEDYIDRGNQFKSIVKRLEG

SEQ ID NO: 165612 - protein, 168 aa, Unknown
  Bacterial polypetide isolated from the Sargasso Sea
MKKIILGYGSTGKSFEKYLKKNSEKYLIYDHLEEKSQLKKNELNKFDTFYVSPGIRLEDLFSKTDLQKKTFLTDLDIFFKKNSSYKIGITGTNGKSTFAYYLFQYLSLSTKVSLVGNIGKPMLECIGSTARFTIIELSSFQLHKMKKNFLDLSVITNIQTDHLDYHGN

SEQ ID NO: 165613 - protein, 139 aa, Unknown
  Bacterial polypetide isolated from the Sargasso Sea
MPWIRDLSGVSFYNDSKGTNVGATVAAIEGLGHRIKGDVILIAGGLAKGADFSPLVPAINKWAKELVLIGEDAEEMASNFCKNIPTNFARDMDDAVGIANEKASPGDAVLLSPACASFDMYRNFQHRGQVFMKSVGNLS

SEQ ID NO: 165614 - protein, 296 aa, Unknown
  Bacterial polypetide isolated from the Sargasso Sea
MINTHAMELMHRHHIASETGIQSDKIYDADLWVLSPGVSKNNHIILKAIEKGIPIVGEIEFASWFTDSPIIAITGSNGKTTTAHILAEMCQNKDINGVMAGNMGLPFSERVLNEILKPEKNRLYILEVSSFQMEFTKHFSPDFAIYTNISQDHLDRHNTMKEYIQLKINLAKNLKKEGYIIYNIEDDELNKALKNHPRQKETFSISRKDTLFYLDKNKIIGPSKNILANVEDLKIQGKHNLENLFAAATCSYLIGVQENNICSTIKSFQGVEHRLEHVKIINNVEFINDSKATNIE

SEQ ID NO: 165615 - protein, 256 aa, Unknown
  Bacterial polypetide isolated from the Sargasso Sea
PNPTHDGSRGQTAIVGAGRTGMSFARYLSNRGRPYILLDQAPTEGQRAELREISGAGLLEFNRSRLLTAREIMLSPGVPRAGADIQAALASGIPVRGDLDVFAGDCGHSASVMAITGTNGKSTVTTLLGQMAEDADMSMKVGGNLGIPCLDLLDESAKGYILEISSYQLESAGAFRSDVATVLNLAPDHLDRYDNLEHYYETKASLYRRTNIAVVNKETDYPFDLSGCEEIFSFGREKPNDTREFGLVGDALYQGE

SEQ ID NO: 165616 - protein, 284 aa, Unknown
  Bacterial polypetide isolated from the Sargasso Sea
GAPLTHPKPHWSVERAHEAGVPVIGDVELFARALAALPPGERPRVVAITGTNGKSTTTALIGWVLKQAGLSVHIGGNIGIGVLALPEPTADAVYVIEVSSYQLDLTTGFAPDVAILTNVSPDHLDRHGGMEGYVAAKRRIFQAQDAEALALVGVDEEWGRKAAADLRAQGRRVETVVSLPSPTRGEGYGAAAGVLTAGGDLLADLTAARSLPGRHNAQNAAFAYAAARALGVSHEAAVEGLLSFPGLSHRMEAVGRLGSVRFINDSKATNADAARQALASYPSV

SEQ ID NO: 165617 - protein, 224 aa, Unknown
  Bacterial polypetide isolated from the Sargasso Sea
MKYIYGLNKSGRSIIDYLDSINENYFCWDDNYKKREELKNINNAISYAEPNNLNFKLIDESFITPGVSFKDKKIQILKNNKIPLLRDLELYSRISKDKKIIAITGTNGKSTTTKLISDVLKKNNIKNFVGGNIGLPLLECFKEKNKLEFHVIELSSFQLECKTSLKPYISVLLNISPDHLDRYKSYDEYATYKEKIIHLNKNGFNIVSIDDSKTLEIYKKNIKN

SEQ ID NO: 165618 - protein, 278 aa, Unknown
  Bacterial polypetide isolated from the Sargasso Sea
MLAHHKGFNVFVSDLNKINENRKSEMIKKSIMFEEENHSFDKIKLSDFVIKSPGISNSSEIILKIKSNGIPIISEIEFASNYSNSFKICITGTNGKTTTTKLIYNILKRAGLNVGLAGNIGDSFSKMLLSGDKDIYVLEISSFQLDDIKKFRPNISVITNIIEDHLDRYENDFGRYVDAKMKIAKNQKSSDYLIYNSDDKILLEALRVNKLEVNKIPIGIKTKGQNQISLDKNILYNKKKTIMINTDEFALKGRHNLLNAMAAITVSDLLKIDNAIIR

SEQ ID NO: 165619 - protein, 287 aa, Unknown
  Bacterial polypetide isolated from the Sargasso Sea
IDFNVAAFTNISPEHLDYHGSFKKYKKTKAKLFKLLKDNSIAVINIDDDFGEKLSKKLSKKVLPFSKNDPNSLHFRSINFSTNGISGIASYENEKFLIKSNLIGSFNSENILTALGVSLALGINNNSIKNGIKNCPLVPGRMESFHLKNQSIAIIDYAHTPDSYNKLMITLKELQKKNGNLYVVFGAGGDRDKQKRPKMAQITEKYAKHCFITPDNPRFEKQSEINADIVSGFKKKNYSIYHSRAKGVKAALELLRKNDIIAILGKGREEYQDIQGEKLYYSDLDVI

SEQ ID NO: 165620 - protein, 303 aa, Unknown
  Bacterial polypetide isolated from the Sargasso Sea
TTTAMLTHHILKTAGFDVGLVGNIGNSFAKDVAENDHEYYVLEISSFQLDDIINFAPKIGVITNITPDHLDRYDYDFSKYLKSKLRINQNQTQRDFLLFNADDPELNKAIKQIDTLATIHGFGYNSFDTNTTYLEDDQIVIKTKKEKIMIDTLDFTLKGRHNLLNAMAASTVANLLEVSKKTIRESLLNFKGAPHRLEQVLKIEKINFINDSKATNINSVYFALESMKSPTVWIVGGVDKGNDYEALYPLVREKVKAIVCLGIDNQKIIDSFNPFIDIILETQSMKQAGMIAHKIADKMKMYY

SEQ ID NO: 165621 - protein, 304 aa, Unknown
  Bacterial polypetide isolated from the Sargasso Sea
KKSYPEIDSKKFISEIEFASRFTDAFIIAVTGSNGKTTTATLIYHILKSAGLNVGLAGNIGVSFASSVCDYSYDYYVLEVSSFQLDHSLTFKPNISVITNISPDHLDRYDEDFDLYTLSKYSIVKNQKPNDFFIYNKDCNVTKKIFSRIQINSKSISFSTKQNSGLKDSIYVNNKNIISSINKEKFMLSTDKIQIKGIHNIQNSMAAISVAQILKISNQKIKESLKTFKSIPHRLEHFLTIHKVKYINDSKATNVNSVYYALNSFDEPIIWVVGGIDKGNNYDDLIPLVKRKVKAIICLGKQNK

SEQ ID NO: 165622 - protein, 186 aa, Unknown
  Bacterial polypetide isolated from the Sargasso Sea
MPSLIYGFGVTGKSFQRYLDIKGEEFEIYDTLHSDSLKIASKIEDGFYKNIYVSPSVPKEKFKNLKKYSTVFTDMDIFFNEDDSIKIGITGTNKKSTTCYHLMQLLEEKYSTNLVGNIGKPVLDVLNNGKKYSIIELSSFQLDKVSNIDLDYGILLNIDSDHLDYHENIEDYVQSKKRIWRLKKVS

SEQ ID NO: 165623 - protein, 283 aa, Unknown
  Bacterial polypetide isolated from the Sargasso Sea
DLNVFKKIFLSPGISLRKKQFKHLNKINKLQRDLNLYTSYLTKEKIIAITGTNGKSTTTKLIGDILKKNKMKTFIGGNYGKPLCKSITSNKKFDYHVIELSSFQLETIKNINTKISIITNLSNDHLDRYYNIADYIKQKKNIISKNGVNLISVDDKYSKKIFQTTRNKKFISFSIYNKSANLYMGENFILDNYFKKNKKIFISEISSDLEGSFNNQNILIAYICVKLLKLPEKIFLDVIKKFKGLPYRASIIFNSNKLKIINNSKSTNIKFTINSIKNIKIFI

SEQ ID NO: 165624 - protein, 247 aa, Unknown
  Bacterial polypetide isolated from the Sargasso Sea
MNKSLNLSKKSFAIYGLGKTGKSVINYFERKGFENWSAWDDNAKEKDFCGPIKKKEGERLFTKRLDSAKFIVISPGISLHKASLKKKLIENKEKIITDLDLFYLLNPKIKTIVITGTNGKSTTCKILEHVLRKNNTNVRLAGNIGKPILDLNLKNSPIVIIEASSFQLAYSKFVRPNYAAILNITNDHLDWHGSSKNYINSKFKIFSNQIKKDIAFIDNIKFLKKYKKAKYLAKLKFIKTETYKQDK

SEQ ID NO: 165625 - protein, 426 aa, Unknown
  Bacterial polypetide isolated from the Sargasso Sea
MRESYNFKDKSFAVYGLGVTGNSVVDFLNKNRAYKIYTWDDYLSKSNLYLKNRFIDGLNTVDYIVMSPGINILRSKFKKLLLKNKKKIITDLDLFFLKNKVQKSIVITGTNGKSTTCSLIHHIFKKNGIKNKLVGNIGKPILDVKFIKKEIYIIEASSFQLEYSKFIKPYCAAILNISQDHLDWHGSKKKYIKSKIKIFNNQTKNDIAFLNDLNLKRLYKRNNFLGKLKYIKNNSIKITDNQNRYLKLEANKNNVKFAYYIAKIFNIDKKAFLKSLKSFEGLAHRHEIFLKKNNKIFINDSKATSFQSSKFALQSNKNIFWIVGGMPKLGDKFKLGKLKNNIVKSYIVGKHMGIFKAQLNRKVDFQLSKTLNNATISIFKDIKNIVDKKITILLSPASASYDQFKNFEERGNKFKILVKNYARKYL

SEQ ID NO: 165626 - protein, 319 aa, Unknown
  Bacterial polypetide isolated from the Sargasso Sea
MKFEEKNIGILGLGKSGYWSAKLAKSLKNNVFVSDSNTNVNEMFVDDLKMLGIDVEIGIHSNQILESDLIIKSPGIPNDSEIMNKINSEKIPVISEIEFAGNHSKTKNICITGTNGKTTTVSLVTEILSKEMNVLKSGNIGIPFSKIVLENKLYDQNDIDYCILELSSFQLEHCSKLKKEISVILNISLDHMDRYDSFEDYFETKIKIFENAKYCLFNYDDNFLNERIKSNDKNIIPLSISEEKGYYYYDTNKILSNGNSISIDIEDISLKGIHNVSNIIIAAEIAKKVGIDQKNICRAVREFEGLEHRFEHFISYNGN

SEQ ID NO: 165627 - protein, 370 aa, Unknown
  Bacterial polypetide isolated from the Sargasso Sea
PGIATEGKNVHKYIKRLKSKKCKIISELDLFQHFINSINKLKKIKIIGITGTNGKSTTVSMIHHSLKKNNVNSVLIGNIGQPIFSSKKLNRGVYILELSSYQLEQAKIFKPDISCILNLTPDHLDRHITMHNYTTAKCNIFQNISARDVCYYDSNKNIKKIANTNLDKKKLKLLIPVKKISSSFKNNKNISLISKKHNMQNLYFSFLILKKLGLKTSDIYKSFSSFSGLPHRQEIIVKRKNFIVINDSKSTNFESLVPALNNFKNIILICGGQIKSNKIKILDKNRHNVIKAIVIGETKNIFFNYFNKYVDTSYVKTLNKAVKMSLSIANIMNEYCTILFSPGAASFDQYNNFEERGDDFRRKIKVDILK

SEQ ID NO: 165628 - protein, 443 aa, Unknown
  Bacterial polypetide isolated from the Sargasso Sea
MSGTKIGILGLGLSGMAAANALAAAGARLWLHDDNATPRDEVPQGAQLCGWQHWPWDELTSMVISPGIPHAHPKPHPAAARAGEAGVEVISEIEIAMRAAPQARIVAITGTNGKSTTTALTGHCLRSAGSAVAVGGNIGDAACNLDDPGADGVIVLELSSYQLETTPSLRADIAMLLNITPDHLARHGGMEGYIAAKARILDAAGAEGLVVIATGPHLEPLADARRKAGSKVNIINPADAPATIAGVASLAGPHNAENAAAAAACLAALGLAEDEITEGMAGFGGLPHRLQTVAKHGGISFVNDSKATNGAAAAKALATFDNVYWIAGGEAKEDGLGEAARETAKVAHAYLIGSAAQAFAVELDGIVKTSLSGDLETATTSAFADASAATGTDGRDATILLSPAAASFDQFASFVARGDAFTAIARRLAADAGAAAVQGGAHA

SEQ ID NO: 165629 - protein, 308 aa, Unknown
  Bacterial polypetide isolated from the Sargasso Sea
DFELSDQDITFIIELSSYQIELSPNIKPDIGILLNISPDHLDRHGDMDKYTGIKFDIFKHQNEDDISIIGLDGEIVSSEIKKRNFESNLILYKNNPQDGKKMAELHASGEVSKYDISRYSASHKITYPSNISACIACMHAMKIEYNSYCKHFNSFRGLPHRTELIHEYKNIQYINDSKATNADAAKQALTIYNNIYWILGGVEKYGGISQITQYFSKIKKAYLIGESAESLSTTLFNSKIEYENCVTLRNAINRSTKDAEKSKSKVTILFSPACASFDQYKNFEERGLEFTTIVGEVVKERNEIQQIN

SEQ ID NO: 165630 - protein, 460 aa, Unknown
  Bacterial polypetide isolated from the Sargasso Sea
MNYKINTKKRTVAVLGLGITGKSIIDYFKNSEIELICWDDDLIKRRQLINQKIRLHNLSDPEIWADIDSLLISPGIPYLYPKAHPAVINALENSVRIDNDIGLFFRNIINKNKKPFTICVTGSNGKSTTTSLINHILNSISNNSELGGNIGRPVLELNNNKSIKFNVLELSSYQIEIANFLSPDIAIFLNLSSDHLERHGGIGGYFNAKARLFYYGLPKFSIINIDQPEGKYLANILEKNSNMDTQVICLSSNKTNTNSKWSISLEDDFIVERKDGLETFRYNIHQYVNLPGEHNLMNSCIAFITCKLLQIDSTQILNNMINFKGLPHRAELVRKINEVSFINDSKATNMDSALKSIMTYDRIRWIVGGQKKDGDKVNIESQKKKIKKIYLIGSSSFELSKSFDGMDYSMCINLDNAVERAFKDSEPGDTILFAPGCASFDQFENFEKRGEKFCELVNFL

SEQ ID NO: 165631 - protein, 260 aa, Unknown
  Bacterial polypetide isolated from the Sargasso Sea
MIKIKDITILGSGISGLGSAKLAKKFGINVFVSDKNSITEKVKKHLNNNKISFKENGHDLERLLKSDEVIISPGISFSNLKKTFPNIKEEKFISELEFASRYTDAYLIAVTGSNGKTTTASLIYHLLKNNGFNVGLAGNIGVSFAESVCDFSYDYYVLEVSSFQLDHILNFKPNIAIITNISPDHLDRYDYKFQNYTNSKYRIVKNQKIEDHFIYNYNCEVTKNIFKKTKINSKIYSFSLTKNQVKNPQVFLDKNHINSL

SEQ ID NO: 165632 - protein, 496 aa, Unknown
  Bacterial polypetide isolated from the Sargasso Sea
MSYNVREHSYVVGGLGVTGQACVRFLLQKQATVKAFDTRANFTAPGDLDTDMQAFMAEKVTCTALSEDYFDGVDTLVLSPGLALNIEQVVLAQKCGVEVIGDVELFARLNASPSSATPAKRVVGITGSNGKTTVTLLVNHLLKSCGVKSIEAGNVGRPVLEALQSDADVVVMELSSFQLETTSSLVLEAATVLNISDDHLDRHGTLEAYIDAKHRIFDNAKSAVVWRDGEFVASYEQLITDAKGIAASNAVSDGESNAASNEESLASKNIVEYGLGESTTGFAIASFDGDGSARDDEQSLYITFKGEKLIALNDIHLAGMHNVLNIMAALGICLQLGVSPALAVKHLHSFKAAPHRCVEIARVNDIRYIDDSKATNIGATVAALEGLAPTIQGKLILIAGGDAKGADMASLSPYLNKYVSHVFALGKDAHLFDKSFAHTTRVATMKDAVKAATRLAAPCDVVLLSPACASLDMFKNYMHRGDVFKQDVHDLLNLHG

SEQ ID NO: 165633 - protein, 203 aa, Unknown
  Bacterial polypetide isolated from the Sargasso Sea
MPSLIYGFGVTGKSFQRYLDIKGEEFEIYDTLHSDSLKIASKIEDGFYKNIYVSPSVPKEKFKNLKKYSTVFTDMDIFFNEDDSIKIGITGTNKKSTTCYHLMQLLEEKYSINLVGNIGKPVLDVLNNGKKYSIIELSSFQLDKVSNIDLDYGILLNIDSDHLDYHENIEDYVQSKKRILEAKKSIQSDDIKTIYKFITGSIP

SEQ ID NO: 165634 - protein, 289 aa, Unknown
  Bacterial polypetide isolated from the Sargasso Sea
MLENYENIIIYGLGQSGISSYEKLKDRKNIFIWDDCEKKRKELEKKGYEFIEPRKWPWEKIDLLISSPGIALNFGTNSFIVKESIKNKIKIVGDIEVFYQELKSLGIRKKIIAVTGTNGKSTFVSVLNEILQKSGLKSCIAGNIGIPVLSLNADESDIIILELSSFQLELIDEFRADISVLLNVFEDHNERYGSYEEYQKTKTKIFLNQRKSDHAIFDDFYLSEKVLKEINPSPKHVLFKDNEFNDLSNKISQNEIIKKFLPALIKVTDILDVDRNFVINQLKKFKNLN

SEQ ID NO: 165635 - protein, 347 aa, Unknown
  Bacterial polypetide isolated from the Sargasso Sea
MKSLIYGYGKTGKSFERYLNNKKLDFDIYDANISKFNKKYDLKIFDQILCSPGIPKKKFEEIKKENNNVLTDLDIFFKDDTSIKIGITGTNRKSTTAYHLHQLFNIYSSSNLLGNIGNPVLDSINNNKKYSIIELSSFQLDKMRSNKLDFGILLNIEVDHLDYHGDFELYKLSKEKILLSKDSISYEMNPYKLFEWITKKKAEKIEFENLPFRFQMISNNIINDSKSTNFHSLSYALKEAKRLFNSEYILIICGDPRKEQYREIYLDGPETIFIFGNHSNEINKCIKNTNKQIFKSIEDLFNFLKSNNIKHNLLFSPGYPSGSDFNDFIERGEYFNFIAEKYINAGH

SEQ ID NO: 165636 - protein, 392 aa, Unknown
  Bacterial polypetide isolated from the Sargasso Sea
MNIKDRDKIEIKGKKVVVLGLALSGVSAATLAIYKGADVFVSDQGNSQYLADSFNELKKIGSKGEIGKHSDKIYDADLWVISPGIPQNSKLIENAIVKKIPVVSEIEFASWYTEAPIIAITGSNGKTTTAHILEKMVQSDELHGLMAGNVGIPFSKMVLNDLKNPDSKRIWILEISSFQMEFIVHFKPFVSIFLNITPDHLNRYNSMKEYIAAKMNMWSNQSKDDFIVYNVEDNILVEEIAESTSRKIAFGLNYHPEAIFQPNRTKIYTQDHATLIQMDEILIPGQHNVLNSLAAATAANLIGITNQDIFSALSTFSGVPHRLEKVSDINGVTYINDSKATNLDAVQVALESFSQPIILLLGGMDKGGDFRSLLPHTHKYLKTVIASGKLRK

SEQ ID NO: 165637 - protein, 356 aa, Unknown
  Bacterial polypetide isolated from the Sargasso Sea
MKYEGKNIGILGLGKSGYWSAKLAKSLNNNVFVSDSNENINQIFIDDLKMLGVELEIGVHSNQILKSDIIIKSPGIPNNSKILRKINAERIPVISEIEFAGNLSKSKNICITGTNGKTTTVSLLTDILSTQKKVLKSGNIGIPFSKIVLENRLYEKNEIDFCILELSSFQLEHCETLKKEISVILNISVDHMDRYNSIEEYFETKLNIFNNSKHCFFNYDDKFLKNKVDDSYKNIMPYSIAEEKGNYFYKKNKIFSNDLSISFDTNSISLRGIHNVSNIIIASEIASMIGVSNDNIHKAICEFESLEHRFEHFNSYQGIDFINDSKSTNIDSVIKALESISKKVILILGGIPKEDD

SEQ ID NO: 165638 - protein, 256 aa, Unknown
  Bacterial polypetide isolated from the Sargasso Sea
MYINLTPDHLDRHITMHKYATAKCNIFQNISARNVCYYDSNKNIKKIATTNLDMKKLKLLIPVKKISSSFKNNKKISLISKKHNMQNLYFSFLILKKLGIKTSDIYKSFSSFSGLPHRQEILLKRKNFIVINDSKSTNFESLVPALNNYKNIILICGGQIKSNKINILNKNRHNVIKAIVIGETKNIFFNYFNKYVDTSYVKNLNKAVKMSLSIANIVNEHCTILFSPGAASFDQYNNFEERGDDFRRKVKAEILK

SEQ ID NO: 165639 - protein, 461 aa, Unknown
  Bacterial polypetide isolated from the Sargasso Sea
MIDIKIRENINLRDKRVTVIGLGISGVEAAKLANYHGARVFASDLNSNEMVNAHAMDLMHTYHIASETGLQSEKVYDSDLWVLSPGVSKNNEIVLKAIEKGIPIVGEIEFASWFTESPIIAITGSNGKTTTSYILSAMCQAENINGIMAGNMGLPFSERVLNEILNPDENRIYILEVSSFQMEFTKHFSPAFSIYTNISPDHLDRHNSMKEYIDMKLMLANNLKKDGSIIFNDDDSILQKSLSKINKKTKAFSITRKDVLFHLDNEKIVGPSKKSLLDINELRIQGKHNIANLFAAATCSHLIGITEEQISNVMKDFKGVEHRLEHVEFINNVEYINDSKATNIQSVIVAIESFRKPIVLILGGYNKGADFRLLLPHIKSSHVRDIISYGDAGGQINTELGDAVRSVQVTNLSSAVKKAHSLAAPGDIVLLSPGCASYDEFENFEVRGVFFKSIVKELVKL

SEQ ID NO: 165640 - protein, 344 aa, Unknown
  Bacterial polypetide isolated from the Sargasso Sea
MPSLIYGFGVTGKSFQRYLDIKGEEFEIYDTLHNDSLIIASKIEDGFYKNIYVSPSVPKEKFRNLKKYSTVITDMDIFFNEDGSIKIGITGTNKKSTTCYHLMQLLEEDYSTNLVGNIGKPVLDVLNNGKKYSIIELSSFQLDKVSNINLDYGILLNIDSDHLDYHKNIEDYAQSKKRILEAKRSIQNDDINIIYKFITGSIPPKKELKDLPFRFQKINQNTINDSKSTNSHSLKFAMHEASKVFNDFALILIGNPEKEGYKEIEISNASLVAICGKHANEIFPCVKHENKVLCENLSLAIKEIEKANIKNILFSPGYPSGNDYINFEERGKAFNKLIEEKGGT

SEQ ID NO: 165641 - protein, 478 aa, Unknown
  Bacterial polypetide isolated from the Sargasso Sea
MIDNHHSSKRKNINLVIGLGKSGFWAAKYLRSINKRVIVWESKDGIEVLERKTALEELNIIVSLNKEFVFEEIQPFVKEIESVVISPSIPYDHITIIELKKKGIKVIGEINVAWEILKDTNWIGITGTNGKTTVTHLLSHILCDTGLYAPFAGNIGTPLCKYAHSKKHEKIDWVVAELSSYQIEISPEVKPNIGIWTTFTEDHLERHKTLENYFNIKKSLLEKSDFRIYNYDDKNLRNHYSSLSRGVWITTSFDKSNFIHCDYWIDEQAYIVERGKKLFKLEHFSLKGMHNLQNLLLVIAAARKVGLSGKKIKDSLSNYKQLPHRMETIYKNNDLEIINDSKATNFDSSIAGISSIEGQIIIIAGGRLKGNEYSEWIKVLKKKVKCVFLFGESSKVLKMALINEGFKKNIFEFSELKELLNFVFHYLQNNRVGTLLFSPSCSSFDQFKNYEERGDYFKKLISEKLKINKSIFWSNIIS

SEQ ID NO: 165642 - protein, 438 aa, Unknown
  Bacterial polypetide isolated from the Sargasso Sea
MYLIYGIQKSGLSIVNYFENKKIKFKMWDDNPIVRKAIKKNYNKDYFFNIKKDNLNDFKKIFVSPGISLRQKKFKRKNISKKVNRDLNLYISNLTNQKIVAITGTNGKSTTTKLIGDILKKNNIKTFVGGNIGESLCNAFLLKKKYKVHVIELSSFQLETVKSLDSRISVITNLSGDHLDRYKGISDYVSQKKNIITKNGINLLSIDDIYSRKIFNQKKIKNKISFSLVDKSADCFANNDYILDNYFKKNKKLFIKKISKDLEGNFNIQNILIAYICSKILKIPESNFLKVIKTFKGLPFRSSTIFTNNKLKIVNNSKSTNLNSTINSVVNYNNIYLILGGIAKEKNFEILLKYKNKISCVYTYGKSGNFIEKKLKKELVVKKLANLKSVIKETFKDIKKNSNQSTILFAPACASYDQYKNFEERGIHFNKLIKNYIN

SEQ ID NO: 165643 - protein, 434 aa, Unknown
  Bacterial polypetide isolated from the Sargasso Sea
MNERKINFKNKKILIYGFGKSGISCFNFLKGNNTCTIYDDNTKNIPTKFKKKLINIKKLFNISFDFIVLSPGIDINKCRISAYLSRNRPKIITELDIFEISYPKINKITITGTNGKSTTSKLLHDLLKNNKMDVRLTGNIGYPILMEKKIKKNTIFVIEASSYQLDYSQYFKSKYSVILNLNPDHLERHGTFKNYVNAKFKIVKLQTKNDYTFIDSENKILNELVKKRKIKSKVIKIDYFKYKKYFRLIDNIYFKNSSNRKNLSFIFNIAKVLKINFKTVISTANKFKGLDFRQQIIYQSRKLLIINDSKSTSFSSSVPLLESYKNIYWILGGLAKKGDKFKLNKKYSSNIKAFVYGKDRNLLINCLPSKIFCQSSLTLKKILKNLKNNIKNDDRKKVILFSPSAASFDQFKNFEERGKFFNKNIKYIIKEVRT

SEQ ID NO: 165644 - protein, 177 aa, Unknown
  Bacterial polypetide isolated from the Sargasso Sea
MKIVGAHNQANALAAMALCDAVGIPREPQLRVLRRFEGLPHRARFVREVNGVRWINDSKATNVGATLAAVAGVRESVKGRLLLLAGGQGKGQDFGPVQALLGSQIDHMYCFGQDAEVLLALGEQTERVADLDAAVAKAAADARPGDWVLLAPACASLDQFKSFEARGDRFTELVQKL

SEQ ID NO: 165645 - protein, 369 aa, Unknown
  Bacterial polypetide isolated from the Sargasso Sea
IIRAKEKRIPIISEIEFASWYTDSPIIAITGSNGKTTTAHILEKMVQTDQIHGLLAGNVGVPFSDMVLNDLNNPNPKRVWVLEISSFQMEFIIHFKPFISIFLNITPDHLNRYSSMKEYISAKMNMWSNQTKEDFIVYNVDDDILVEEIAESTSRKVAFGLNYHPEAIFQPNRTKIYTQEHATLIQMKDISLPGKHNLSNALAAATAANIIGIPNKKISTVLSSFSGVPHRLEKVAEINNIIYINDSKATNLDAVNVALQSLSQPIILLLGGLDKGSDFRSLLPHTHKYLKTVIAFGQAKELILLAIRDAVRSTSAMDLKEALSLAQNYSQPGDIILLSPGCASFDQFDNFEHRGDYFKDLVNTMEISE

SEQ ID NO: 165646 - protein, 207 aa, Unknown
  Bacterial polypetide isolated from the Sargasso Sea
MSDFIYGLNKSGISVAKFLLKKQIKFDLWDDDISKRKKLKKIFKNHNFLKLSNKNFYKYNNIYVSPGISFKDSKFKKINKNKILKRDLNLYWNYTKKQKIIAITGTNGKSTSTKLIGDILNKNNFKTFIGGNIGIPLCDNFLSKKKYDYHVIELSSFQLEKINNFNPKISIILNLSKDHMDRYNNITEYINQKKKILNKSLNGYNLI

SEQ ID NO: 165647 - protein, 174 aa, Unknown
  Bacterial polypetide isolated from the Sargasso Sea
MEGKKLVIMGAGKSGYGAALLGKKEGYNVLVSDNNSISDSVKKSLNKIRVEWEENGHSQDRILASDLVVKSPGISDEQAIIKSLDKNKIPVISEIEFAGRYCNGFKICITGSNGKTTTTLMLHHILSNAGLDVAAVGNVGYSYAQSVAENPKDYYVIELSSFQLDRMYEFKADI

SEQ ID NO: 165648 - protein, 304 aa, Unknown
  Bacterial polypetide isolated from the Sargasso Sea
GHILNLNGLKTKVGGNIGEAATSIDDPGEDGFIILELSSFQLQTCNDLKLDGAILLNITPDHLDWHGNLDNYFNSKLKIGTFLKEGAPIVVSNTNNLTKKACEFFYKNKIKVIEVLKNDISHLQIILENKFYNENHLTIIQLLKEFGVKKDKSIEAIKLFNELPHRLEFCYQKNNITFINDSKATNAEATINALEKYRNIYWIAGGIGKTDGVKATLKHLKNVNKCYLIGKSKKDFFETLNSKIDCTISENLSKALKEIFKETLNKSNEITVLLSPAASSFDQFLNFESRGNAFKSLISEIWEL

SEQ ID NO: 165649 - protein, 339 aa, Unknown
  Bacterial polypetide isolated from the Sargasso Sea
MTGSNGKTTTVNMLYEMLKGDNYSPILAGNMGFAFSRAILNDLNKKTDDRIYILELSSFQLENIIHFKPFISIILNITPDHQDRYIDMNAYVEAKLNIIANQDSNDFLIYNSDDPILNKRCKNAVPKILSFSINNNSENLFKIRDSKIIEGDSHILDLSKIALAGKHNLSNFLAASTAAKILNISNRQISETISNFSGIEHRLEKVVINNGVAYYNDSKATNIESVIAAIQSFSNSVILILGGKDKDSNFVELIPFIKHNVKKIISYGQASKKIAIALRDAVELDQVSSLRDAVEVCHKSAVPGDIVLLSPGCASFDQFNNYEERGNEFKKIVNEMAQA

SEQ ID NO: 165650 - protein, 344 aa, Unknown
  Bacterial polypetide isolated from the Sargasso Sea
MPSLIYGFGVTGKSFQRYLDIKGEEFEIYDTLHSDSLKIASKIEDGFYKNIYVSPSVPKENFKNLKKYSTVFTDMDIFFNEDDSIKIGITGTNKKSTTCYHLMQLLEEKYSTNLVGNIGKPVLDVLNNGKKYSIIELSSFQLDKVSNIDLDYGILLNIDSDHLDYHENIEDYVQSKKRILEAKKSIQSDDIKTIYKFITGSMPPKKELKDLPFRFQKINQNTINDSKSTNSHSLKFAICEASKIFNDFALILIGNPEKEGYKEVEISNPSLVVICGKHANEIFSCVKHENKVLCENLSLAVKEIEKANIKNILFSPGYPSGDDYINFEERGKAFNKLIEENSGT

SEQ ID NO: 165651 - protein, 344 aa, Unknown
  Bacterial polypetide isolated from the Sargasso Sea
MKSLIYGYGKTGKSFARFLESKKHKFDIYDDNLPKYSKKIDLQKYNQILCSPGLPKNIFEKIRNINKNVLTDLDIFFHEDSSIKIGITGTNRKSTTAFHLYQLFEKFDPANLIGNIGNPMLDCINKKKYSIIELSSFQLDKMTTNKLDFGILLNIQTDHLDYHGNFESYKLAKERILDAKKSISFEDNPYDLFEWITGQKSSHINFKNLPFRFQHISKNIINDSKSTNYHSLSYAVKRANEIFLNNGYVLIVCGSPKKEEFRKIDIKGPDQIYIFGKHAKEINKCVNNKNKKVFNELSDVADHLNKHNQKNVLFSPGYPSGDDFSNFEERGVAFNKIFGNLNEN

SEQ ID NO: 165652 - protein, 357 aa, Unknown
  Bacterial polypetide isolated from the Sargasso Sea
MKKSLILGYGITGKSFANYLSKKKLNFEIYDKNLEGKNFIAFPEYKYLKKYENIYISPGFKLKEYLSETEISSLKFQTDLDIFFKHNNSYKIGVTGTNGKSSFAYYLEQILNQVSSGIIVGNFGNPVLDFLHHKKKYSIIELSSFQLEKLNKSLLDLSVVTNISPDHLDFHGNFENYKKAKLKICNNRAKTFFANTNMSLKDFAFEIASSLEKIDSNTSRPLNDLPHRLEEVIPGIINDSKSTNSASLLYAIKKLNFDGNLIICGDPRKEPKSYEVYGPQQVYIFGMHRNELMEKVKSRRSNIKTFSNLDLVLQDIKKADSKPNILFSPGNSSGKDFKNFEDRGNFFKDKVLEYFSD

SEQ ID NO: 165653 - protein, 444 aa, Unknown
  Bacterial polypetide isolated from the Sargasso Sea
MKFEGKNIGIVGLGKSGYWASKLAKNLYYNVFVSDTNSKIDTSMIGDLENLGVEIELGKHTNKILNSDIIIKSPGISNDIEILKKIKESDIPIISEIEFAGMISNVKNICITGTNGKTTTVSLIDQILKEDLNVLKSGNIGIPFSQIVLEHRLYDKNDIDYCILELSSFQLEHCSHLKKEISAFINISNDHLDRYESFNDYFNTKLKIFENSKYCFFNNEDKILKEKIKNDNIDKEPFSTQEDKGNFFFDNNKIFSNDRSISINIDEISIKGIHNISNIMIAAEIAHKVGIKKENIFKAIKNFKGLEHRFEFLKSFNSIDYINDSKSTNVDSTVKALKSITKKVVLILGGIPKENDFNEILLYKSKFLKIVVYGEAKDLIYDSLSQEVEVLKIHSFDDAVHIAIKNAIKDSVVLLSPGCASFDQFNNYEERGIKYKNIIERFYA

SEQ ID NO: 165654 - protein, 102 aa, Unknown
  Bacterial polypetide isolated from the Sargasso Sea
AHITGGGLPENLPRCLPAGCRAQVNPSSWAPPSLFDWLQHAGDIPERALWHTFNLGVGFCLVVPEDQTNLAIETCRAQQLQAWPIGSIVKGNPEDGVIGLPD

SEQ ID NO: 165655 - protein, 120 aa, Unknown
  Bacterial polypetide isolated from the Sargasso Sea
MNKKKFTYKKSGVNIKAADKFVNFISTISSKKRGKKKFSNIGGFGSITNIPSNIKQPKIVACTDGVGTKIEIANTLNKFDTIGIDLVAMSVNDLIVQGAKPLLFLDYISINKIDLKKLKA

SEQ ID NO: 165656 - protein, 132 aa, Unknown
  Bacterial polypetide isolated from the Sargasso Sea
MNKKKFTYKKSGVNIKAADKFVDFISTVSAKKRGKKKFFNIGGFGSITNIPSNIKQPRIVACTDGVGTKIEIANTLNKFDTIGIDLVAMSVNDLIVQGAKPLLFLDYISINKIDNKKLKAIIKGINKGCRQS

SEQ ID NO: 165657 - protein, 105 aa, Unknown
  Bacterial polypetide isolated from the Sargasso Sea
MKKTKNSYKKSGVNIETADKFTKYIARFSKQAFKKKKKFIGQDIGGFGSVYNFLKLKIKDPLLVSTTDGVGTKLEIANKFNKFNSIGIDLVAMCINDLIVQGAKP

SEQ ID NO: 165658 - protein, 89 aa, Unknown
  Bacterial polypetide isolated from the Sargasso Sea
MAGVDIDQGNKLVEQIKSDVASTHNVNVLGNIGGFAGMYKLSNEFKNPILVACTDGVGTKVALAQQYQNLKGIGQDLVAMCVNDLIVCG

SEQ ID NO: 165659 - protein, 125 aa, Unknown
  Bacterial polypetide isolated from the Sargasso Sea
RIIKPTIIYSKSVLSCLEKYEVNSMAHITGGGFKENIIRSIPDGFQAIIDKKSWNLPSVFHWIQGEAHIDSDEMLKTFNCGIGYVIVVKKDIRDSVINHFQDEGIEAYEIGSIKSGEKSVIINHG

SEQ ID NO: 165660 - protein, 172 aa, Unknown
  Bacterial polypetide isolated from the Sargasso Sea
MKLTFNAPFTISYTIISCFVYFILLENNLYENAFFLNGTSNFNNWEWYAGTIGYIVGHANFNHLASNFMFILLLGPIVENHYGSLKLTLMVLATALLTSAIHIFFWDHRIIGASGIVFMLIILAALIPSKVKEIPFTFLIIICLYIGKEIIGSFSEDSVSHFAHITGGILGG

SEQ ID NO: 165661 - protein, 111 aa, Unknown
  Bacterial polypetide isolated from the Sargasso Sea
YVNEILSLKEVCSINGMAHITGGGLNENLSRIANGMTLCVDKSKWSVPEIFEEIKALGNIPEEEMFNVFNCGIGFCLVLDKENAKKAIEENSELIEIGFVSDRDEVDFKFI

SEQ ID NO: 165662 - protein, 117 aa, Unknown
  Bacterial polypetide isolated from the Sargasso Sea
MNKNLFTYKKSGVDIPAAEKFVKFITNISKKNKVNSSFNKIGGFGSINEIPNKFKNPKIVACTDGVGTKVEIANLLNKFDTIGIDLVAMSVNDLIVQGAEPIFFLDYISINKMTKKV

SEQ ID NO: 165663 - protein, 220 aa, Unknown
  Bacterial polypetide isolated from the Sargasso Sea
KGISKGCELADCKLVGGETAEMPGTYAKGKFDLAGFSVGFVNKKNIFKKENIRDNDLILAIPSSGLHSNGYSLIRYIIKKHKININKNNFLKKELIKPTKIYTKEILELNKKKLVKSCANITGGGLKDNLKRIIPKGLKAEINLSNIKILKIFKWIKKFEIEDIEMLKTFNCGVGFCIIIKKENLHKVKKQFSKKYKPYIIGKISKGKKSVILNEKINWK

SEQ ID NO: 165664 - protein, 117 aa, Unknown
  Bacterial polypetide isolated from the Sargasso Sea
NYSSLIGQILNKGINIKSISHITGGGLVDNVPRVIPEDVSLEVDIKSWNKIPIFDFLKNNLDIETKDLYQTFNMGVGLVFIVEQSEKDRLISLIGKDSCSKIGVVVNDSVNAVHLYG

SEQ ID NO: 165665 - protein, 170 aa, Unknown
  Bacterial polypetide isolated from the Sargasso Sea
ALKSNGIHSNGFSLVRKIIENTNQIEKQFEKKYHLDFYDQLLKPTKIYFKIVNQILSQNIQIKGMSHITGGGIPENLPRCMPSDFIPYIDTKSWEIPALFEFLKDVGQIPDQDFWNTFNLGVGFCLIIDKKYKDEILNICDAHEISSWVLGKVLKKDNSNENYFLPEIII

SEQ ID NO: 165666 - protein, 104 aa, Unknown
  Bacterial polypetide isolated from the Sargasso Sea
MNKKKYTYKKSGVNIGAADKFVNFISTVSAKKRGKKKFSNIGGFGSITNIPSNIKQPRIVACTDGVGTKIEIANTLNKFDTIGIDLVAMSVNDLIVQGAKPLFF

SEQ ID NO: 165667 - protein, 114 aa, Unknown
  Bacterial polypetide isolated from the Sargasso Sea
LALKKIVSINAISHITGGGFIENIPRMLSDHQKAIIEHEFSDWPAGKYFEWLMQTADIPKENMLDTFNCGVGLVLSVNEADEENVLGALNQRYFAKRIGRIEDKEENEEPINFV

SEQ ID NO: 165668 - protein, 252 aa, Unknown
  Bacterial polypetide isolated from the Sargasso Sea
MVWNENQSNRFVSIDKSVVRIDVVLNTNPYSQQAIDTIPILRNQAKIAASNVGIASESILIGGETAEIHDTRNANNRDSIVVLPLILLAIGFILSILLRSLIAPIYLIATIAITYFATLGLSMTIFKFILDHEGIGTGVAFYLFVFLNALSVDYNIYLMSRVKEEAKRSTLNDAIREALSRTGGVITSAGLILAGTFSALMLLPLQDLFQLGFAVAIGVLMDTFITRTLIVPALISQFGKWNWWPTKINQSQ

SEQ ID NO: 165669 - protein, 200 aa, Unknown
  Bacterial polypetide isolated from the Sargasso Sea
EMPGTYEKGKFDIAGFSIGIVDQNKILHKNKIKKNNLILAIPSNGIHSNGYSLIRHILAKKKINLKNNSFLKNDLIKPTKIYVREVLKLINKKYINGCANITGGGLGDNIKRVIPHGLTAKINLNNIKVLKIFKWLKNNNLSENEMLKTFNCGVGFCLIINSKNLKKVQNTFSKNFKPYVIGKIVSGKNKVKFNDKINWL

SEQ ID NO: 165670 - protein, 103 aa, Unknown
  Bacterial polypetide isolated from the Sargasso Sea
MKSQKFTYRNSGVNIKNADKFIDFISNLTKRTKKSGDFKNIGGFGAISSIPKNFKNPHIVTSTDGVGTKLEVANEIKKFNTIGVDLVAMCVNDLIVQGAKPFL

SEQ ID NO: 165671 - protein, 204 aa, Unknown
  Bacterial polypetide isolated from the Sargasso Sea
EHPGSFPDDSFDLAGFSLGVVDEEEMIGTDGPKNGDVLIGVSSSGFHANGFSLIRKVLENYKISLDDDIEGERLGTILLKPTNIYVQEVLNLSKLLKISSIAHITGGGFFENIPRMLNKNQKTDITFNFSDWPAYKYFKWIQDTAKISEENMLKTFNCGIGLVIAISPEDVEMALGTLNQSSFNAKTIGSVYEKQGNEPELNFV

SEQ ID NO: 165672 - protein, 130 aa, Unknown
  Bacterial polypetide isolated from the Sargasso Sea
MNNKKTDYKSAGVDIEAGNAAVDLIKEKVKSTHTKEVLTGIGSFGSLYSIKEILSDYVNPVLVQSIDGVGTKTIIARKMKKFNTIGIDLLSACANDILVMGAKPLTFLDYIANDRLNPMIVDEIVEGMTK

SEQ ID NO: 165673 - protein, 154 aa, Unknown
  Bacterial polypetide isolated from the Sargasso Sea
SGLHSNGFSLVRKILKKKNKILSTFLKKEIIKPTKIYVKELNQINKKKLIHGCANITGGGLLDNLQRIIPKNLCLNINFSKIKTKPIFKWLKKNNITDSEMVKTFNCGVGFCLISKRKNLNQIKRLFEKNYQPYEIGFVSRDKKNIKISGKIIW

SEQ ID NO: 165674 - protein, 312 aa, Unknown
  Bacterial polypetide isolated from the Sargasso Sea
DKGPNTGGMGCIIEWYNMLPFMSLNDLKESEMINETVLKELNSLGKKNKCLDNYTGILYGSFIKTQNGIKIIEYNSRFGDPECIVALKILKSNFFDICQNIVKGTLTSDIQFIRKACICVYLTPKNYCKKSELDKFDVYLNDVDKNDITFSNIEVKDNHIYSLGSRTMALCETHETLYSCFHLIYSKIKKIGGNLHYRTDIGSDFLSSYEKYGVSIKNGEKSLKSIKKSILSTYNENIISDFGSFGGEYKIDNNILVASIDGVGTKTLLSKKFKQKQGMSDLGRDIVAHSINDILVQGAFPLFFLDYYGTQS

SEQ ID NO: 165675 - protein, 102 aa, Unknown
  Bacterial polypetide isolated from the Sargasso Sea
MKKNLFTYKKSGVNIDAADKFVNFIANISSKKRGNKKFNNIGGFGSVSNLPKNIKNPKIVACTDGVGTKIEIANTLNKYDTIGIDLVAMSVNDLIVQGAKPL

SEQ ID NO: 165676 - protein, 45 aa, Unknown
  Bacterial polypetide isolated from the Sargasso Sea
TDGVGTKIEIAKELNNFDTIGIVLVAMCVNDLIVCGAEPLVFLDY

SEQ ID NO: 165677 - protein, 69 aa, Unknown
  Bacterial polypetide isolated from the Sargasso Sea
DGCKISNCELVGGETAEMPGTYTKGKFDFAGFCVGLVEKNKILKQKNIKKGDIIIGIPSSGLPSNGFSL

SEQ ID NO: 165678 - protein, 95 aa, Unknown
  Bacterial polypetide isolated from the Sargasso Sea
MNKKKFTYKKSGVNINAADNFVNFISNVSSKKKGKKKFSNIGGFGSITSIPGKINQPKIVACTDGVGTKIEIANILNTYDTIGIDLVAMSVNDLI

SEQ ID NO: 165679 - protein, 177 aa, Unknown
  Bacterial polypetide isolated from the Sargasso Sea
KEILKKNNIKKNNLVIAIPSNGIHSNGYSLIRYVLEKKRINLKKNKFLANEFIRPTKIYVNEIMTLTEKNLINSCANITGGGIGENLRRIIPNNLVANIDLRKIKTQKIFKWLKSNNISDSEMLKTFNCGVGFCLIIKPENLIKIKRLFEKKFQPYVIGKITSGKNKIRLYNKINWS

SEQ ID NO: 165680 - protein, 101 aa, Unknown
  Bacterial polypetide isolated from the Sargasso Sea
PRVLPPNARVTINGGAWTPPPVFQWLAKSSQAGEAEMLRTFNCGIGMVLVVGASEAQSVCAMLQAEGEAPVIMGEVEASVKGDRVMGGEQVSVVGTGAWGW

SEQ ID NO: 165681 - protein, 173 aa, Unknown
  Bacterial polypetide isolated from the Sargasso Sea
MNKKKFTYKKSGVNIKAADKFVDFISTVSAKKRGKKKFSNIGGFGSITNIPNNIKQPKIVACTDGVGTKIEIANTLNKFDTIGIDLVAMSVNDLIVQGAKPLLFLDYISINKIDLKKLKAIIKGINKGCNQSECELVGRETAEMPGTYEKGKFDIAGFAVGVCSKNKFLIKIK

SEQ ID NO: 165682 - protein, 128 aa, Unknown
  Bacterial polypetide isolated from the Sargasso Sea
MSKLYKKSGVDVIKTDRLIGQALKFIKSSHNDKVLGNKLGFSAEYRVNKEVTLCAATDGVGTKAILAAELNEYKGIGQDLVAMCSNDLLCNKAKPLFFLDYFACNSVKPKQYTEILKSITSACKKINC

SEQ ID NO: 165683 - protein, 56 aa, Unknown
  Bacterial polypetide isolated from the Sargasso Sea
RHEMYRTFNCGVGLVIVVDESDTDAALNILKQHGENAWVIGDIAAKDGEEQVEINA

SEQ ID NO: 165684 - protein, 138 aa, Unknown
  Bacterial polypetide isolated from the Sargasso Sea
GLNHYFFLDYMAIGKIDLSKMKKIIKGIIDGCKISDCILVGGETAEMPGTYTKNKFDLAGFTVGLVSKKKLISEKKVKKNYIILAIPSSGLHSNGFSLVRSVIKNMKVDNKIKNELIKPTKIYTNEVLKLVKKDLIAS

SEQ ID NO: 165685 - protein, 106 aa, Unknown
  Bacterial polypetide isolated from the Sargasso Sea
MKKNKNRLTYKKSGVDIAKASSLISVLKDKRKRSGVLSGIGGFASLFAIDNKKYKNPVIVCGTDGVGTKLKLATLLNQHNSIGQDLLAMCVNDVITTGAEPILFLD

SEQ ID NO: 165686 - protein, 125 aa, Unknown
  Bacterial polypetide isolated from the Sargasso Sea
MNKKLFTYKKSGVNINAADKFVNFISNISSKKQGNKKFNNIGGFGSISNIPSNIKRPKIVACTDGVGTKIEIANLLKKYDTIGIDLVAMSVNDLIVQGAKPILFLDYISINKIDLKKLKSILKGI

SEQ ID NO: 165687 - protein, 130 aa, Unknown
  Bacterial polypetide isolated from the Sargasso Sea
NISIEDCLLAPHTNYSSLITRIINAGINIKSISHITGGGLVDNIPRVIPREFSLEIDTTSWKKIPIFNFLQNNLDIDTKDLYQTFNMGIGLVLIVDETKKEKLISFIGRENCNSIGVVVNDKDNIVHLYG

SEQ ID NO: 165688 - protein, 92 aa, Unknown
  Bacterial polypetide isolated from the Sargasso Sea
MTKEIIENDPYKLAGVDIDAGNSLVDKIKKSVAASHNKNVLDNIGGFAGMYELDKDTYPPPPPRAPGHAAAPAPPVSRFQSFQNMPPSPGRA

SEQ ID NO: 165689 - protein, 99 aa, Unknown
  Bacterial polypetide isolated from the Sargasso Sea
MRRSNLTYRKSGVNIKAADKFINYISSLAKKRDNNKESKNIGGFGSISKIPKYYSNGYLVASTDGVGTKIEIANDLSKFDTIGIDLVAMSVNDKNSSRS

SEQ ID NO: 165690 - protein, 159 aa, Unknown
  Bacterial polypetide isolated from the Sargasso Sea
VRKIIEVTGADLAATAPGETGQTLGEALLEPTRLYKKAVSCALATGGVHGIVHVTGGGLIKNPPRVYDDDVSLVLDLTTKSLPPLFSWLKAAGNIETYELARTFNCGIGMLFFAAPDSADALLAALVEGPEPDAYVAGSLIERKSQPAVILQNIESWAS

SEQ ID NO: 165691 - protein, 137 aa, Unknown
  Bacterial polypetide isolated from the Sargasso Sea
MDARVSSGQKTLGEVLLEPTRIYVRPLLKLMQTIPIKGMVHVTGGGLPGNLPRMLPEGAAVELDSGSWESLPVFDWLQEKGNLSQEEMLPVFNMGIGFVICLSPENRDQVFSILHQEGEQPVTIGKVISGNRNVIIH

SEQ ID NO: 165692 - protein, 95 aa, Unknown
  Bacterial polypetide isolated from the Sargasso Sea
EKILPGDQLIGLPSSGIHSNGFSLVRKILRRYLHASESEHGRSCFFWSKNPWRGFAGTHQDLRQTIIKIDANHSDKGDGSCNRRGTARKPSSDVA

SEQ ID NO: 165693 - protein, 134 aa, Unknown
  Bacterial polypetide isolated from the Sargasso Sea
MRLKNFTYEKSGVSIKKADKFIKFISSRSKKSKKSGNFKNIGGFGAITKLPNNLKNPYLVTSTDGVGTKIEVANLLDKFDTIGVDLVAMCVNDIIVQGAKPLLFLDYISVEKINTKKLENIIRGIIKGCKLADC

SEQ ID NO: 165694 - protein, 247 aa, Unknown
  Bacterial polypetide isolated from the Sargasso Sea
HEHHANYFPWLKLRKKIDVRSLPVDENGGFEFSDLKKVLDKKTKLVALSHGLYNSGLILPVKEIGNELQKENIPYFLDTAQTVGCIGEFDFADTGCDFMSFNGSKWLCGPMGTGVFYCKRESSDLLEPSNIGGETAETNENGELTYKELPDRFQAGFRNYVGLAGMESSVTFLQNIGWNNIRNHIISLSNLFIDEIGKISESKVFCPKDESERTSIVSFEIEKQDPEKIVSELSQKGIIIAKREIYE

SEQ ID NO: 165695 - protein, 114 aa, Unknown
  Bacterial polypetide isolated from the Sargasso Sea
MVKKTKNTNKSELTYKDSGVDIDGGNKLITDIAQITETTSNKGSIGELGGFGGLFDLKKHDFQDPILVSSTDGVGTKLQLAVRTKSYFNVGIDLVAMCANEYFSTKEHNPFIFY

SEQ ID NO: 165696 - protein, 85 aa, Unknown
  Bacterial polypetide isolated from the Sargasso Sea
MDYKTSGVDIEAGREFVSEIKQAVEGTHTSNVIEGIGGFGGLFRIPIDSFKKPVLVSGTDGVGTKLELAQSKNFHFEVGIDLVAM

SEQ ID NO: 165697 - protein, 236 aa, Unknown
  Bacterial polypetide isolated from the Sargasso Sea
IFSLTTIAVPKINLKKMKSIIKGVVTGCKISDCMLVGGETAEMPGTYTYNKFDLAGFAVGVVSKNKLLHKGRVKNNDVILAVPSSGLHSNGFSLVRHILKKQKINNFLKRELIEPTKIYANSIVKLSNKNLLHAAVNITGGGLIENIPRSIPNGYTANIDLSKIKVLNIFKWIKSKNVSDLEMLKTFNLGVGFCIITDKQKVKKVKKFFSKKFEPYQIGYINKSSSKINFIKKIKW

SEQ ID NO: 165698 - protein, 276 aa, Unknown
  Bacterial polypetide isolated from the Sargasso Sea
PGGPGDFGPGDFGPGGPGDFGPGDFGPGGPGDFGPGGLGDFGPGGPGDFGPGGLGGFGPGGPGDFGPGGPGGPGGLGGFGPGGPGDFGPTGIAGGPLIPGGPGDFGPGGPGDFGPGGPGDFGPGGPGGPGDFGPGGPGGPGDFGPGGPGGPGDFGPGGSSSSLPGTFLPPGSFQPPGTIQQPGAYNPGLQGFAPIMVVTTAPVPGSETGGFNQPGESGGAFHGGSHGNEQVSDGPGGGPSGVGDTGFAIGGPMDPSFGGGPMGFGDPMMGRRFRRT

SEQ ID NO: 165699 - protein, 101 aa, Unknown
  Bacterial polypetide isolated from the Sargasso Sea
MNKNILTYKKSGVDIKAADKFIKFISSISSKKKGKKKFNNIGGFGSITNIPDNLKNPKIVACTDGVGTKIEIANLLKKFDTIGIDLVAMSVNDLIVQGANP

SEQ ID NO: 165700 - protein, 137 aa, Unknown
  Bacterial polypetide isolated from the Sargasso Sea
KANKEEISAIKEMVLKPTILYPKLIMNLINNFKINSISHITGGGLTENLPRSISKNLCVEIKTDSWDMPKVFKWLKEEGDISNKDMFRIFNCGIGMVLIVDKKDVKDISNKISGMNLKNYVIGAVKEKNQEQSVIYS

SEQ ID NO: 165701 - protein, 89 aa, Unknown
  Bacterial polypetide isolated from the Sargasso Sea
LKYIKTLSHITGGGVYSNFKRSIPKGTKFDLNIMKLPKEYDFIKNNINISNLELMEIFNCGIGMIFVINKKHYKRFIKRNLFSLIGEIK

SEQ ID NO: 165702 - protein, 57 aa, Unknown
  Bacterial polypetide isolated from the Sargasso Sea
AEYEMYRTFNCGVGMIVALPADKVDAALALLAAEGEQAWLIGAIAAREGNEEQVEIL

SEQ ID NO: 165703 - protein, 101 aa, Unknown
  Bacterial polypetide isolated from the Sargasso Sea
MLKPTKIYMECFNIIEKYKDILLGMAHITGGGLIDNIKRIIPKKLNIKLDIKIENEFKWIMEKSKINENDMMNTFNCGYGMVLIFKKDFINKEFEEIGYLD

SEQ ID NO: 165704 - protein, 176 aa, Unknown
  Bacterial polypetide isolated from the Sargasso Sea
RDVMKEDDLLYGIRSSGFHSNGYSLIRKVLKDKNIDLHGKTDFKSSYETNAAALMAPTKLYFPFLKKILTTNLINGISHITGGGIIGNAPRMLSENLSARIDKKFICDEEIFQWFQSLANISDEEMLKTFNCGLGLIMTISKNNYKEFEQLIKDENLDIFEIGKIEVNKSSRCTIS

SEQ ID NO: 165705 - protein, 361 aa, Unknown
  Bacterial polypetide isolated from the Sargasso Sea
MGRQDLLVADGRIAWMGRGLSVPADWPLTRVDARGRYLVPGLVDPLAHITGGGGEGGFGFRTPELAAREALSAGVTTLVAALGTDSLTRSPAQVLGKVREFRAAGVSAFMYTGSYHLPVKTLTGTVESDIMLIPEVLGVGEVAISDHRSSAPTYDELARLVSEARVAGLLAGKSGVSFFHLGDGRGALAPLRALRDGTDIPLRQLYPTHCNRNPWLFAEAIEWGRAGGWVDLTTSSFPDLLDDGERLAADALVELLAAGVPADCISFSSDANASLPRFDGEGRLIELRCGQIGSLWQALVEACGKGVALEVALAVVTANPARALGLATKGTLAVGQDADLLLIDPDTLTIERVMSGGRWRT

SEQ ID NO: 165706 - protein, 178 aa, Unknown
  Bacterial polypetide isolated from the Sargasso Sea
IVEKKLIIDSSKVRKNNIIIGIESSGAHSNGYSLINKLIRESKLTKSEKEKLTKLALKPTHLYTNVILDLVKKVKVKSIANITGGGLLENIPRSIPNTLSSEIYLKNWKMPQFFATLQKLGKIEMSDMLRIFNCGIGMTVIIEPRELDSTIKVLSKHKFKGFMIGKVIKKSSSAITFL

SEQ ID NO: 165707 - protein, 174 aa, Unknown
  Bacterial polypetide isolated from the Sargasso Sea
RLWFQWLCGPMGTGVFYCKRESSDLLEPSNIGGETAETNENGELTYKELPDRFQAGFRNYVGLAGMESSVTFLQNIGWNNIRNHIISLSNLFIDEIGKISESKVFCPKDESERTSIVSFEIEKQDPEKIVSELSQKGIIIAKREIYEKPVLRISPHIYNTKDEILSLVEELKKL

SEQ ID NO: 165708 - protein, 168 aa, Unknown
  Bacterial polypetide isolated from the Sargasso Sea
LLYGIRSSGFHSNGYSLIRKVLKDKNIDLHKETEFKSSYETNAAALMAPTKLYFPFLKKILTTNLINGISHITGGGIIGNAPRMLSENLSARIDKKFICDEEIFQWFQSLANISDEEMLKTFNCGLGLIMTISKNNYKEFEQLIKDENLDIFEIGKIEVNKSSRCTIS

SEQ ID NO: 165709 - protein, 381 aa, Unknown
  Bacterial polypetide isolated from the Sargasso Sea
MNFDSISEEFQTDKTYLNNASVSVMPKTSIEAMKQFLIDYSEMGPDSPESEIFIKGLWEKTRTSIAKVVKCNPDEIIITQSVTDGINIVANGMKFENDSNIIIRGGEHEHHANYFPWLKLQKKIDVRSLPVDENGGFEYSDLKKVLDEKTKLVALSHGLYNSGLILPVKEIGKELQKENIPYFLDTAQTVGCIGEFDFADTGCDFMSFNGSKWLCGPMGTGVFYCKRESSDLLEPSNIGGETAETNENGELTYKELPDRFQAGFRNYVGLAGMESSVTFLQNLGWNNIRNHIISLSNLFIDEIGKIPESKVFCPENESERTSIVSFEIEKQDPEKIVSELAQKGIIIAKREIYEKPVLRISPHIYNTKDEILSLVEELKKL

SEQ ID NO: 165710 - protein, 103 aa, Unknown
  Bacterial polypetide isolated from the Sargasso Sea
MNKKKFTYKKSGVNINAADNFVNFISNVSSKKKGKKKFSNIGGFGSITSIPHGINQPKIVACTDGVGTKVEIANTLNKYDTIGIDLVAMSVNDLIVQGAKPLL

SEQ ID NO: 165711 - protein, 61 aa, Unknown
  Bacterial polypetide isolated from the Sargasso Sea
MVFNAIQSIGSIDESEMFRTFNMGIGMICIVSSDDVSSIKQLISVREVGEIVSGAGGVKVV

SEQ ID NO: 165712 - protein, 113 aa, Unknown
  Bacterial polypetide isolated from the Sargasso Sea
MNKNLLTYKKSGVDIKAADKFIKFISSISSKKRGKKKFNNIGGFGSITNIPNNLKNPKIVACTDGVGTKIEIANLLKKFDTIGIDLVAMSVNDLIVQGATPFFFLDYISINKI

SEQ ID NO: 165713 - protein, 131 aa, Unknown
  Bacterial polypetide isolated from the Sargasso Sea
KNIIAKRCLEPTLLYPKLIMELISNYKINSLSHITGGGLTENLPRSISDNLCVEIDTDSWEMPNIFKWLQENGNISDDDMYRIFNCGIGMVLFVDEDEELNISSRIKALKMNSFVIGRVKNKKEESSVIFV

SEQ ID NO: 165714 - protein, 169 aa, Unknown
  Bacterial polypetide isolated from the Sargasso Sea
TSKVKKNNIIIGIESSGAHSNGYSLINKLIKESKLSKSEKEKLIKLALKPTHLYTNVILDLVKKVKVKSIANITGGGLTENIPRSIPNTLSSEIYLKNWKMPKFFATLQKLGKIEMSDMLRIFNCGIGMTVVIEPKELDSTIKVLSKHKFKGFMIGKVIKKSSSAITFL

SEQ ID NO: 165715 - protein, 144 aa, Unknown
  Bacterial polypetide isolated from the Sargasso Sea
SLHLNQSMDAHVTSGQKTLGEVLLEPTRIYVRPLLKLMQTIPIKGMVHVTGGGLPGNLPRMLPEGAAVELDSGSWENLPVFDFLLEKGNLSQEEMLPVFNMGIGFVICLSPEHLDQVFSILHQEGEQPLTIGKVVSGNRNVIIH

SEQ ID NO: 165716 - protein, 226 aa, Unknown
  Bacterial polypetide isolated from the Sargasso Sea
MSASYSSAGINLNQMEILKDTFKAFGNLTNTEHVINNAGSFAGLYKLPSFQNPILVAGTDGVGTKLKISAAMGHYESLGKDLVVLNANDILCKGAQPLFFLNYIAFSKFNQHMLESLMKGMVWACKSLDCSLISGETANMPGVYEDNEFDLAGFIVGAVEENELIHAQDVTAGDSVYALSSNGIHTNGYSLVRQVFDLDSDTAPLFQYMDELQHTLGEELLQPHRN

SEQ ID NO: 165717 - protein, 169 aa, Unknown
  Bacterial polypetide isolated from the Sargasso Sea
IKKDNLILAVPSSGLHSNGFSLVRYILNQKKIDIRKNKFLKSELLKPTKIYVNEILKLINKNLINGCANITGGGLADNIKRVIPDRMVANIYLNQIKTLEIFKWLKKNGISEKEMLKTFNCGVGFCLIINPKDLKKVTKHFSRDYKPYVIGKISKDGSKVKFNGSIDWS

SEQ ID NO: 165718 - protein, 100 aa, Unknown
  Bacterial polypetide isolated from the Sargasso Sea
MSKQVNPRRTYKSAGVDIDSGNALVEDIKPLAASTARAGSYGSIGSFGALFDIAAAGYKDPILVSGTDGVGTKLLMAIETNIYDTIGIDLVAMCANDVLA

SEQ ID NO: 165719 - protein, 112 aa, Unknown
  Bacterial polypetide isolated from the Sargasso Sea
MNLINNFKINSISHITGGGLTENLPRSISKNLCVEIKTDSWDMPKVFKWLKEEGDISNKDMFRIFNCGIGMVLIVDKKDVKDISNKISGMNLKNYVIGAVKEKNQEQSVIYS

SEQ ID NO: 165720 - protein, 697 aa, Unknown
  Bacterial polypetide isolated from the Sargasso Sea
FDKTNPGIIATSFTTNNVYGPTLAKVDDVGEISIAFDENIRSIATFLNAYEISLSGNGQNYSYNYTFSDSNNNGTVSLNMLASDSAGNQSDTLIDAVYFDKTSPTVISVYEGSLASDQVYTKYSDSLQLAWTVLESESGSKTAYMGLGSDSGSVDILNWSPASEITQASFTSMNLSNNSKYFGAVFVEDNVGNISDSVWGNGITVDIEAPNPGIIWDGFLSDDIDYTADSTELYVRWSDFTDNQSIDYYEASVGSQEDTTNISDWQQSTDLDNIQFTGLSLEKSVQYFAYLRAVDSATNISSVIRSDGVEFDNTPPDIKSIYPLFDSLEVLSVLDNDEIQITFNKPILKFGLNVSVGQDTAVNYTLTEQDSGITISILDTLPSYEIITVALDTAIAFNLLNYTDTIIFRSKLWGDLNNDYQISVEDVLAFNQSWPHSSTDLGPVSGSPPYLFPSPDGELNLTDLSAFGKMWIWYYHEYSTDSLSTLVSAFDNGLNATVSKNKIELSIPDQTYGAEVVFFNSNESLDGLIINNLNVGAFNYSISDSDQNSISFIVADKNGLDSLLFFSLPYDLPDNFISNVKYKFIDEISNQIDEGAGPLKLTILPDKFDVYQNYPNPFNAETIVRYELPQIEDVTIKIYDVIGREIFSVYHKKQRPGKNTFIWKGNSDLGGLASSGMYFLQISAGKEIRRMKMILLK

SEQ ID NO: 165721 - protein, 180 aa, Unknown
  Bacterial polypetide isolated from the Sargasso Sea
QPDDVAIGIASSGFHSNGYSLIRKVVFEIAGLKKDDRVSECDEKTVGELLLEPTQLYARPIRSVLRHYRVKQVVHGIAHITGGGLEENLARIVPPSIQIQIERGSWEIPSVFGWLQKLGSIEQAEMDRVFNMGVGMVLVVSPHFVDSIMHQLREHGMQSWKIGYATAADDGSDRVVVSKA

SEQ ID NO: 165722 - protein, 144 aa, Unknown
  Bacterial polypetide isolated from the Sargasso Sea
MTKEILENDPYKLAGVDIEAGEDLIKKIKNDVASTHGENVIGNIGGFAGMFKLPKEFQNPILVACTDGVGTKVALAQEFGDLHGIGQDLVAMCVNDLIVCGAKPLFFLDYYATSKLNVREASIVIKSIADACIDSGCSLLGGET

SEQ ID NO: 165723 - protein, 150 aa, Unknown
  Bacterial polypetide isolated from the Sargasso Sea
MNKKKFTYKKSGVNIRAADKFINFISTVSSKKRGKKKFSNIGGFGSITNIPNNIKEPKIVACTDGVGTKIEIANTLNKFDTIGIDLVAMSVNDLIVQGAKPLLFLDYISINKIYLKKLKAIIKGINEGCNQSECELVGGETAEMPDTYGK

SEQ ID NO: 165724 - protein, 115 aa, Unknown
  Bacterial polypetide isolated from the Sargasso Sea
MTKEIIENDPYKSAGVDIDAGNELIEKIKADVASTQNVNVLGNIGGFAGMYEIGKEFEEPILVACTDGVGTKVSLAMEYNYIDGIGQDLVAMCVNDLIVTGAKPLFFSDYYAASK

SEQ ID NO: 165725 - protein, 134 aa, Unknown
  Bacterial polypetide isolated from the Sargasso Sea
MKKLNYKSAGVDIDAGNEAVDRIKDGVKSTFSSNVLTGLGGFGSLYNLTPIFKTYTNPVMVQSIDGVGTKTIIARKLKKFDTIGIDLLSACANDILVMGARPLTFLDYIANDKLNPKIIDEIVSGMVQACRDTG

SEQ ID NO: 165726 - protein, 109 aa, Unknown
  Bacterial polypetide isolated from the Sargasso Sea
MTTDDKEQNHKELSYRQSGVDVEAGYALVDKIKPFVEKTKRPEILSGLGSFSALSRIPKHIKNPILVTCTDGVGTKIEIAKELNNFDTIGIDLVAMCVNDLIVCGAEPL

SEQ ID NO: 165727 - protein, 232 aa, Unknown
  Bacterial polypetide isolated from the Sargasso Sea
GIADGCVECEAALIGGETAEMPGVYPDGGFDLAGFAVGAAERGTLLSRGMPQEGDVAIALPSSGVHANGFSLVRKIIDVTGTCLDDRIDGLDLPLGEALLEPTRIYHHGTRAAHTAGHVTGICHVTGGGLVENPPRVFGEDLSLAIDCTSWKLPSIFSWLSRKGGIEAGEMARTFNCGIGLLIFTSEDSAGSCLSAIRDGPEPDAWIAGRLSARGDGPAVVFSGQESWSAAS

SEQ ID NO: 165728 - protein, 244 aa, Unknown
  Bacterial polypetide isolated from the Sargasso Sea
QNPMIFLDYISINKINLKKMKEIVQGIILGCKVSGCQLAGGETAEMPDTYSKGKFDIAGFAVGLVDKKNILKKNKIKKNNIILGIPSSGIHSNGFSLIRHLLKVKKINLNKNNFLKKQFLIPTKIYVKEILKLIEKKYINGCANITGGGIEDNIKRVIPEKLTAVIDLNKIKTFKIFSWLKSRGINDKEMLKTFNCGIGFCLIVDKKNVSKIKKIFSKNYKPYEIGKIIKGNNKVKLNGKINWL

SEQ ID NO: 165729 - protein, 220 aa, Unknown
  Bacterial polypetide isolated from the Sargasso Sea
MKKIIKGIINGCKISDCILAGGETAEMPGTYEKNKFDLAGFTVGIVTRNKLVTEKKVKSNNIILAIPSSGLHSNGFSLVRNVIKNSKIDKKIKIELLKPTKIYTKEILKLIDKNLISSAANITGGGIIENIIRSVPKKLTVNIDLSKIKIPFIFKWLKNKNISDHEMLRTFNCGVGFCLIVKRKNIKQIQAHFKKDYMPYEIGFISNSKKRLNLINKVEW

SEQ ID NO: 165730 - protein, 146 aa, Unknown
  Bacterial polypetide isolated from the Sargasso Sea
KLIEDNSVDLDEMINGEKIGAQIIKPTIIYSRSVLSCIEKYEVSSMAHITGGGFQENIIRVIPEGCQAIIDKNSWSLPPVFEWIQEQAGIDSNEMLRTFNCGIGYVLIVKADVKNSVIKHFQNEELEAYEIGSITSGEKSVIINHG

SEQ ID NO: 165731 - protein, 163 aa, Unknown
  Bacterial polypetide isolated from the Sargasso Sea
MNKKAFTYKKSGVNIGAADKFVSFISHISSKKRGNKKFNNIGGFGSISNLPKNIKRPKIVACTDGVGTKIEIANLLNKFDTIGIDLVAMSVNDLIVQGAKPILFLDYISINKIDLKKLKSILKGIVKGCEIAKCELVGGETAEMPGTYEKGKFDIAGFAVGVS

SEQ ID NO: 165732 - protein, 96 aa, Unknown
  Bacterial polypetide isolated from the Sargasso Sea
MTKDSLTYEKSGVNIKEADKFVKFISSLSKKRTKSKNYENIGGFGSVTNISKKFKNPQLVASTDGVGTKIEIANLLNKYDTIGIDLVAMCVNDLIV

SEQ ID NO: 165733 - protein, 142 aa, Unknown
  Bacterial polypetide isolated from the Sargasso Sea
GTKIEIANLLNKYDTIGIDLVAMSVNDLIVQGAKPLFFLDYISINKIDLDKLKSIIRGIVKGCNISQCSLVGGETAEMPDTYAKGKFDIAGFAVGVTDKKKILYKNKIKKGDLILAVPSSGLHSNGFSLVRHLLKIKKIDIK

SEQ ID NO: 165734 - protein, 223 aa, Unknown
  Bacterial polypetide isolated from the Sargasso Sea
MKSQKFTYKNSGVNIKNADKFIDFISNLTKKTKKSGDFKNIGRFGAISSIPKNFKYPHIVTSTDGVGTKLEIANEIKKFNTIGIDLVAMCVNDLIVQGAKPFLFLDYISIDKINLKKMKEIIKGIVKGCELSSCNLVGGETAEMPGTYSPGKFDLAGFSVGLVEKKNILINKIKNNDLILAIPSNGIHANGFSLVRKVLKDKKIKINKNKYLKKELIKPTKIY

SEQ ID NO: 165735 - protein, 230 aa, Unknown
  Bacterial polypetide isolated from the Sargasso Sea
IDLSKLKSILKGIIKGCKISNCELVGGETAEMPGTYEKGKFDIAGFAVGVVDQKKILNKNKIKINDLILAIPSNGIHSNGYSLIRHILKKKRIDIKKNSFLKKELIRPTKIYVREILNLNKSKLLNGCANITGGGLEDNIKRIIPQNLCAKINLSKIKTLKIFKWLRQNNIQDKEMLKTFNCGVGFCLVINPENLHKINRYFSKEFKPYVIGNIIKGPIKVKLNDKIKWT

SEQ ID NO: 165736 - protein, 244 aa, Unknown
  Bacterial polypetide isolated from the Sargasso Sea
CTNDILAVGARPLFFLDYFATGKLSVETIEEVVSGLSKACKENSCSLIGGETAEMPDFYQEGEYDISGTIVGVVDKKYMMPMRKTNPGDLLIGLPSTGLHTNGYSLARRALLERYHVDRYFDELGMTLGMSLLSIHKSYLPVLDSILECDWLHGISHVTGGGLVENTHRVIEDGQDIEVDWDSWTWPEIFNMIQKNGDVPLDDMRRSFNLGIGMVLIVSPDGFEQLETHLKSINEEYTLIGKVI

SEQ ID NO: 165737 - protein, 172 aa, Unknown
  Bacterial polypetide isolated from the Sargasso Sea
MASNKLTYSKSGVNIPKADSFVKFISSLVRKSSKSGDFKNIGGFGAISPIPRQLKDPHIVTSTDGVGTKIEIANDINKFDTIGIDLVAMCVNDLVVQGAKPYLFLDYISISKINLKKLKHLVRGIVKGCDIAGCKLVGGETAEMPGTYSKGKFDIAGFAVGLVEKKKYLIKN

SEQ ID NO: 165738 - protein, 123 aa, Unknown
  Bacterial polypetide isolated from the Sargasso Sea
KSCLAALKTGGIHALAHITGGGLVENLPRVLPHDLCANINGAAWTPPAIFQWLSATGGIDDGEMLRTFNCGIGMAVVCAADYTNSVVHTLEDAGETVINIGRISRRSGDAAISIQSQAELWKN

SEQ ID NO: 165739 - protein, 137 aa, Unknown
  Bacterial polypetide isolated from the Sargasso Sea
MGCTVGEELLKVHRSYGPLVQSLVRTYNKAGRARVIKGLAHITGGGFIDNIPRVLPDKCGVKIERGSWPVLPVFEFIQKHGKVDNAEMHQVFNMGIGMTAIVNAAKADSVLRSIRRLNHGAWIIGSITRGRRRVKLA

SEQ ID NO: 165740 - protein, 158 aa, Unknown
  Bacterial polypetide isolated from the Sargasso Sea
MNYDTYKTTYDIDIDESNEFVDDLKNSGLIKNNFCAMYEHNGIQFGASTDGCGTKLDMANEHGLLGQIGIDLVAMNVNDLLAGGCKPMFFMDYIAIDKMDKNKCKQIVKGIIKGCEKCDCKLIGGETAEMKGIYLKNKLDLAGFAVGEKVYDLPKFNQ

SEQ ID NO: 165741 - protein, 269 aa, Unknown
  Bacterial polypetide isolated from the Sargasso Sea
VDIVILSGYMQIVPDILYNDFYTINIHPSLLPKYKGMKGGDIHKLKLMNDEKFIGCTLHEVTGDVDGGRILSQRQAILDKTKFNLQIRNMQLYEVKKQIQSLEKSCIYDFIMNYDTYKTTYDIDIDESNEFVDDLKNSGLIKNNFCAMYEHNGIQFGASTDGCGTKLDMANEHGLLGQIGIDLVAMNVNDLLAGGCKPMFFMDYIAIDKMDKNKCKQIVKGIIKGCEKCDCKLIGGETAEMKGIYLKNKLDLAGFAVGEKVYDLPKFNQ

SEQ ID NO: 165742 - protein, 206 aa, Unknown
  Bacterial polypetide isolated from the Sargasso Sea
MKKINLSYAKSGVNIKAADKFVKYISSRTSKIKKNVKSKNIGGFGAISKIPNNLKSPYLVTSTDGVGTKLEIANNLKKFDTIGIDLVAMSVNDLIVQGAKPLLFLDYISISKIDLKKLQSILNGIIKGCMIADCELAGGETAEMPGTYTQGKFDLAGFAVGLVEKKNILKKEKIKNGNIVLGVPSSGLHSNGFSLIRNILKRKKII

SEQ ID NO: 165743 - protein, 110 aa, Unknown
  Bacterial polypetide isolated from the Sargasso Sea
MSKNKLTYAKSGVNIKKADKFVNFITSLSKRTNKNGDFKDIGGFGAISKVPKNFKNPYIVTSTDGVGTKLEIANKLNKYNTIGIDLVAMCVNDLIVPGSKPFLFLDYISI

SEQ ID NO: 165744 - protein, 146 aa, Unknown
  Bacterial polypetide isolated from the Sargasso Sea
MRAKNFTYEKSGVSIKKADKFIKFISASTKKSKKSGHFENIGGFGALTKLPSNLKKPYLVTSTDGVGTKIEIANLLGKFDTIGVDLVAMCVNDIIVQGAKPLLFLDYISVEKIDTKKLKNIISGIIKGCKLADCELVGGETAEMPG

SEQ ID NO: 165745 - protein, 129 aa, Unknown
  Bacterial polypetide isolated from the Sargasso Sea
MLKNKRNTSKSKITYRASGVDIDEGNKIIKDISQITEATSNKGSIGKLGGFGGLFDLKKCGFKDPILVSSTDGVGTKLQLAIKTKSYFNVGIDLVAMCVNDVLAQGAQPLFFMDYYATGKLNKSVAIEV

SEQ ID NO: 165746 - protein, 176 aa, Unknown
  Bacterial polypetide isolated from the Sargasso Sea
MRKSNLTYRKSGVNIKAADKFVNYISSLAKKRSNSRENKNIGSFGSISKIPKSYSDGYLVASTDGVGTKIEIANDLRKFDTIGIDLVAMSVNDLIVQGAKPFIFLDYISIDKIILNKLKMIIKGISKGCELSECMLVGGETAEMPGTYTKGKFDLAGFAVGFVKKKNILKKKNLKS

SEQ ID NO: 165747 - protein, 166 aa, Unknown
  Bacterial polypetide isolated from the Sargasso Sea
MDSHQLGLHSNGFSLIRKLLQSKKINLKARMGKTTLGKVLLKPTKIYVKVVRELSKSIPLKQICHITGGGIVENLPRVIPNGKCAHIDFSRGYPFHKDLFHLISSKANLTIEEMTQVFNCGVGLIVIIHPADKANLEQKLKKIRQPFVRLGKVVNDKSKKLEIQFG

SEQ ID NO: 165748 - protein, 157 aa, Unknown
  Bacterial polypetide isolated from the Sargasso Sea
MNKKKFTYKKSGVNIKAADKFVDFISTISTKKRGKKKFSNIGGFGSITNIPSNIKQPKIVACTDGVGTKIEIANTLNKFDTIGIDLVAMSVNDLIVQGAKPLLFLDYISINRIDLKKLKAIIKGINKGCNQSECELVGGETAEMPGTYEKGKFDIAG

SEQ ID NO: 165749 - protein, 135 aa, Unknown
  Bacterial polypetide isolated from the Sargasso Sea
MNKKKFTYKKSGVNINAADNFVNFISNVSSKKKGKKKFSNIGGFGSITSIPSKISQPKIVACTDGVGTKIEIANTLNKHDTIGIDLVAMSVNDLIVQGAKPLLFLDYISINKIDLKKLKSIIKGILKGCKLSGCE

SEQ ID NO: 165750 - protein, 125 aa, Unknown
  Bacterial polypetide isolated from the Sargasso Sea
MISSKLTYRKSGVNISKADSFVKFISSLTRKSNKSGDFKNIGGFGAISKIPKGLKDPHIVTSTDGVGTKIEIANELKKFNTIGIDLVAMCVNDLVVQGAKPYLFLDYISISKINLNKLKNLAIGI

SEQ ID NO: 165751 - protein, 165 aa, Unknown
  Bacterial polypetide isolated from the Sargasso Sea
MNKKKFTYKKSGVNIKAADKFVDFISTVSAKKRGKKKFSNIGGFGSITNIPSNIKQPKIVSCTDGVGTKIEIANTLNKFDTIGIDLVAMSVNDLIVQGAKPLLFLDYISINKIDLKKLKAIIKGINHGCRQSECELVGGETAEMPGTYEKDKFDIAGFAVGVVGK

SEQ ID NO: 165752 - protein, 225 aa, Unknown
  Bacterial polypetide isolated from the Sargasso Sea
KKLKNIIRGIIKGCKLADCELVGGETAEMPGTYSKGKFDIAGFSLGLVDKDKILLNKINEKDLVIAIPSSGLHSNGFSLVRHIIKKKNINLKKNLFLKKELLIPTKIYVMHILELIKKKYLNACANITGGGLKDNIKRIIPDNYCAEIHLEKIKTLNIFRWLKSQGISDQEMLKTFNCGVGFCLIVKPTNYKKIIKFFPKKYKPYIIGEIIKNSKKVKLSGKVIW

SEQ ID NO: 165753 - protein, 183 aa, Unknown
  Bacterial polypetide isolated from the Sargasso Sea
IGIVDHNKILKKNKIKKNNLILAIPSSGIHSNGYSLVRYIIDKKKINIKKNKFLRNELLKPTKIYVNEILYLIKKKLINGCANITGGGLEDNIKRIIPDGLTANINLNKIKTKKIFNWLKKNNIKDNEMLKTFNCGVGFCIIVNTKNLKKINKFFKNGYKPYIIGKIIKGKSKVKLNEKINWS

SEQ ID NO: 165754 - protein, 226 aa, Unknown
  Bacterial polypetide isolated from the Sargasso Sea
KLQTILKGIVKGCKISKCELVGGETAEMPGTYEKGKFDIAGFAVGLVEQRKILNKKKIKKNDLILAVPSNGIHSNGYSLVRKILEIKKIDIKKNKFLKRELIKPTKIYVDEILSLHKKNLINGCANITGGGLSDNIKRIIPDEFCADIDLNKIKTLKIFQWLKQNNISDKEMLKTFNCGVGFCLIINPKNLSKINRHFDKKFEPYVIGRITKNNKKLILNEKINWT

SEQ ID NO: 165755 - protein, 166 aa, Unknown
  Bacterial polypetide isolated from the Sargasso Sea
MKKKLFTYKKSGVNIDAADKFVKFIASISSKKKDNKKFSNIGGFGSISNLPKNIKNPKIVACTDGVGTKIEIANLLKKYDTIGIDLVAMSVNDLIVQGAKPLFFLDYISINKIDLKKMKSIIKGIIKGCNLSECILVGGETAEMPDTYEKGKYDIAGFAVGIVSGE

SEQ ID NO: 165756 - protein, 65 aa, Unknown
  Bacterial polypetide isolated from the Sargasso Sea
YLITDKINLKKSKEIISGIPNGCKNSNCSLIGGETAEHPKNFPKGKYDLAGFSVGIIEKENLKKE

SEQ ID NO: 165757 - protein, 155 aa, Unknown
  Bacterial polypetide isolated from the Sargasso Sea
MNKKKFTYKKSGVNIKAADKFVDFISTVSAKKRGKKKFSNIGGFGSITNIPSNIKQPKIVACTDGVGTKIEIANTLNKFDTIGIDLVAMSVNDLIVQGAKPLLFLDYISINKIDLKKLKAIIKGINKGCNQSECELVGGETAEMPGTYEKGKFDI

SEQ ID NO: 165758 - protein, 190 aa, Unknown
  Bacterial polypetide isolated from the Sargasso Sea
MTTYKEAGVDIESTDALVEDISSLSQTTARSGIYEGIGGFGGIFDLKKCGYDDPLLVSGTDGIGTKILLGIETDILDGLGHDLVGMCLNDVLCHGAEPLFFLDYYASSKIDKKSFLRIMKSITEACKINNCMLLGGETAEMPGLYKENDFDFAGFCVGAVERKKILPKKNVMKEGDLLFGIKSSGFHSNG

SEQ ID NO: 165759 - protein, 198 aa, Unknown
  Bacterial polypetide isolated from the Sargasso Sea
MPGTYSKGKFDIAGFSVGIVEKKNILDKSKIKLNDLILAIPSNGVHSNGYSLIRNILKKKNIKLKKNKFLKKELIKPTKIYVEEVLNLINKKLINGCANITGGGIEDNIKRILPLNLCASIDLKKIKTNSIFKWIHDQGVNEKEMLKTFNCGVGFTIIINPKNLKKINKYFKKNYQPYVIGKIISGKKNVDLNGKIKW

SEQ ID NO: 165760 - protein, 244 aa, Unknown
  Bacterial polypetide isolated from the Sargasso Sea
TFLDYVAGSSLDKNIVSQVIKSVAQECKQHGVSLVGGETAEMPGTYHANEYDLVGVATGVVEKNKIIDGSSVCDGDVAIGVFSNGLHTNGYSLARKLIFESMALTTSDTLPGYNISIGDSLLAPHTNYSSLIEKTVGAGIALKSISHITGGGLVDNVPRVVPKDFSLSVNTKSWGKIPIFKFLQNNLDIKKEDLYQTFNMGIGLVLIIDKSQKERLISLVGKDNCSEIGFIIKDGLNSVHLSGQ

SEQ ID NO: 165761 - protein, 105 aa, Unknown
  Bacterial polypetide isolated from the Sargasso Sea
MKKNNLTYEKSGVNIKGADNFVKFISSLSKTRENSKNFQNIGGFGSINRIPRNLKNPQIVASTDGVGTKIEIANELNKFNTIGIDLVAMCVNDLIVQGAKPLIFF

SEQ ID NO: 165762 - protein, 189 aa, Unknown
  Bacterial polypetide isolated from the Sargasso Sea
YAKNNFDLAGFSVGVVERSGLIDGKSIKPGNILIGIESSGPHSNGYSLIRSIIKKHQPPDSILQALLKPTHLYTAAILELIKKINVKGMAHITGGGLTENIPRILKSGLVADVNLSSWKFPKAFKWLQVKGKISQTDMLRIFNCGIGMICIINKTDLEKAQNILLNHKFRTFQIGSIIKSNLKEQIRYY

SEQ ID NO: 165763 - protein, 141 aa, Unknown
  Bacterial polypetide isolated from the Sargasso Sea
MKKLSYSSSGVSINKGNKFVSEIKNIIRKDKNLKKSNIGGFSGQFVLDSKIKKPILVGATDGVGTKIEIARMMKNHKTIGIDLVAMCVNDLIVDQAKPLFFLDYISTGKLDISKGKEIIGGIIKGCKMSKCSLLGEKQLNI

SEQ ID NO: 165764 - protein, 166 aa, Unknown
  Bacterial polypetide isolated from the Sargasso Sea
NDLILAVPSSGMHSNGYSLVRHVINKKKINIKKNKFLKKELLKPTKIYVREVSNLIKKNLISGCANITGGGIRDNLKRIIPDNLVANINLNKIKTKKIFSWLKKNNIEDNEMLKTFNCGVGFCLIVKPKNKKKIKKFFKKQYKPYLIGKIVSGKNKVKLDEKINWS

SEQ ID NO: 165765 - protein, 157 aa, Unknown
  Bacterial polypetide isolated from the Sargasso Sea
MPNKSPKKNTSLDYKSSGVDVEAGYKLVNSIKPFVEKTKRKEIMSGLGSFSAMSKLPSNIKDPVLVTCTDGVGTKIEIARKMNNFGSVGKDLVAMCVNDLVTCGAEPFLFLDYYVTDSLKVKTAASVIEGIAKGCEEANCSLVGGETAEHPNSFPEN

SEQ ID NO: 165766 - protein, 129 aa, Unknown
  Bacterial polypetide isolated from the Sargasso Sea
MPTRIYAASIQKLLGSIEVLGMAHITGGGLTENLPRMLKNNEHSILLDLVSWEIPEIFNWLQENGNISRREMLRTFNCGVGFVICVSADQAKKTCDLLNSVNEKPWIIGKIARPDYPEQETQLLIHGAE

SEQ ID NO: 165767 - protein, 144 aa, Unknown
  Bacterial polypetide isolated from the Sargasso Sea
MNKKNSPITYSSSGVDIEKGNQLVEEIKPIIKETKVPGADIEIGGFGGLFDIMKLGFNDPLLISSTDGVGTKLLLAIESNNVTGVGIDLVAMCVNDLIVQGAQPLFFLDYFATGILSKTTAKEVIKSIADGCIQSKCALIGGET

SEQ ID NO: 165768 - protein, 154 aa, Unknown
  Bacterial polypetide isolated from the Sargasso Sea
MTKEIIENDPYKLAGVDITAGNDLVDKIKNDVATSHNQNVLGNIGGFAGMYELDKDYIEPVMVACTDGVGTKVALAQENNQIEFIGQDLVAMCVNDLIVCGAKPLFFLDYFASSKLEVEEASKIIKNISEACKNSGCALLGGETAEMPGHYVGK

SEQ ID NO: 165769 - protein, 246 aa, Unknown
  Bacterial polypetide isolated from the Sargasso Sea
ETYESAGVNIAAGEEAVRRITPLVETTLRPEVLTSIGGFGGAFDITQTGRKHPVLVSSTDGVGTKAQVAVMADQYETIGIDLVAMCVDDLVCVGAEPLFFLDYISVGTLIPDQIESIVKGISAGCKEAGCALIGGEMAEHPGLMESGEFELVGFSAGVVDKEDMITGDNVAPGDTIIGLHSPGLRSNGYSLARKVFFDIAKKSLNDPAWDSADVTVAQELLRPSVIYTPTILKILEHHPIKSIAHI

SEQ ID NO: 165770 - protein, 98 aa, Unknown
  Bacterial polypetide isolated from the Sargasso Sea
MKKSKFTYEKSGVSINAADIFVKFISSISAKNKGNKKFKNIGGFGSVSDIPKNFKEPKIVASTDGVGTKIEIANILRKYDTIGIDLVAMCVNDLIVQG

SEQ ID NO: 165771 - protein, 169 aa, Unknown
  Bacterial polypetide isolated from the Sargasso Sea
LKSNGVHSNGFSLVRKIIQNNNQIDKEFEKVSHLNFYDELLKPTKIYNNVINQMLSENIEIKAMSHITGGGIPENLPRCMPSDFIPYINTGSWEIPTLFKFLKEKGSIPEKDFWYTFNLGVGFCLIIDKQFKDVILSICKEHEIDSWEIGKIVQKNDSTISKFLPEILT

SEQ ID NO: 165772 - protein, 214 aa, Unknown
  Bacterial polypetide isolated from the Sargasso Sea
LKIIKSITEACKINSCSLLGGETAEMPGLYKENDFDFAGFCVGAVERNKILPKKELMKEGDLLYGLKSSGFHSNGYSLIRKVIKDSKLDLSKPTEFQSSFKTISEALMTPTLLYYPMLKNILKKNYITGISHITGGGLTGNVPRMLPDNLSATIDKKFVCCDEIFKWFQELANISNEEMLKTFNCGLGLVITISKKDYKNFEDLIKTENLDIFE

SEQ ID NO: 165773 - protein, 165 aa, Unknown
  Bacterial polypetide isolated from the Sargasso Sea
MPNKSPKKNTSLDYKSSGVDVEAGYKLINSIKPFVEKTKRKEIMSGLGSFSAMSKLPSNIKNPVLVTCTDGVGTKIEIARKMNNFGSVGKDLVAMCVNDLVTCGAEPFLFLDYYVTDSLKVKTAASVIEGIAKGCEEANCSLVGGETAEHPNSFPENSFDLAGFA

SEQ ID NO: 165774 - protein, 175 aa, Unknown
  Bacterial polypetide isolated from the Sargasso Sea
MGRTIKPNDIIIGLPSSGLHTNGYSLARKLFFNTAKYNVDQYIETLGATVGEALLEPHINYTNHIGKILELDVEIKGVAHITGGGLVENLPRILPSNCSVNINKGSWPILPIFSLMQDIGSIDEGEMFRAFNMGIGMTIVIDSHSKEQVFDALSDFTTPYEIGSVCSGRCEVAIV

SEQ ID NO: 165775 - protein, 175 aa, Unknown
  Bacterial polypetide isolated from the Sargasso Sea
KILTKKKIKKNNIILAIPSSGVHSNGFSLIRYILKKKKITLKKNNFLKSELLKPTKIYVKEILKLIKKNFINGCANITGGGITDNIKRIIPNGLCAEIKLSKIKTKKIFKWIKNQNVSDKEMLKTFNCGVGFCLVVDKKNLNKIGKFFNNDYKPYVIGKIISGKKKIKLNENIKW

SEQ ID NO: 165776 - protein, 219 aa, Unknown
  Bacterial polypetide isolated from the Sargasso Sea
GIIKGCDISQCILVGGETAEMPDTYERGKFDIAGFAVGIADKKKILNKNKIKKGDLILAVPSSGLHSNGFSLVRHLLKVKKIDIKKNPFLKKELIRPTKIYVKEIFNLVKKNLLNGCANITGGGLADNISRVIPNNLCAEIDLNKIKPLKIFKWLKKNNISDREMLKTFNCGVGFCLIINPKNIKRINKFFLKEYKPYVIGKISKKKNKVILNGKVNWI

SEQ ID NO: 165777 - protein, 133 aa, Unknown
  Bacterial polypetide isolated from the Sargasso Sea
LDSLGCTIGESLLKPHINYTNHVLCALNTNEQIKGVAHITGGGLTENIPRILPKGCSANIKRGTWPSIPVFDTIKELGNIETEEMYRAFNMGIGMVFVIERKSVDTITDSLKTITPVYNIGIIDEGEGHTNYV

SEQ ID NO: 165778 - protein, 259 aa, Unknown
  Bacterial polypetide isolated from the Sargasso Sea
KKIKERPIKITYKSSGVDTNKTSKLVNNIENITSTNIRREVIKNTGGFCSLFDLKKLRYKDPILLSSTDGVGTKLCVAINYNKLDYLGFDLVAMCVNDILASGGEPLFFLDYISSSRIEKKDFLKLVKSINKACKVSNCSLVGGETAEMPGLYKNNDFDIAGFSVGVVERKNLLKKGNVKKGDLIIGLESNGIHSNGFSMVRKILEINKISLDEKLSFNSKKKVGDELIKPTKIYIDYILPTNKKKNDQINCSYYWWRD

SEQ ID NO: 165779 - protein, 152 aa, Unknown
  Bacterial polypetide isolated from the Sargasso Sea
MNKNLLTYKKSGVDIKAADKFIEFISSISSKKKGKKKFNNIGGFGSITNIPNNLKNPKIVACTDGVGTKIEIANLLKRFDTIGIDLVAMSVNDLIVQGATPLFFLDYISINKINLPKLKSIIKGIVKGCNISGCDLVGGETAEMPGTYEKNK

SEQ ID NO: 165780 - protein, 219 aa, Unknown
  Bacterial polypetide isolated from the Sargasso Sea
MKGIIKGCTLADCKLVGGETAEMPGTYTSGKFDIAGFSVGLVEKHKILKGKIKKNDLILAIPSNGIHSNGYSLIRELIKRKKIDINKNKFLKTELIKPTKIYVKEVLNLINNNILNGCANITGGGLKENIKRIIPDHLCAEIDLNKINTLKIFKWLKNSGIEENEMLKTFNCGVGFCLIINKKNLKKVKKYFSKKFQPYVVGKISNNKKRVKIDGKIKW

SEQ ID NO: 165781 - protein, 95 aa, Unknown
  Bacterial polypetide isolated from the Sargasso Sea
MKKLSYSSSGVSINKGNEFVSKISNLIKKDKGLITTEIGGFSGQFPLSTKIKKPILVGATDGVGTKIQIAEKMNDHKTIGIDLVAMCVNDLIVDK

SEQ ID NO: 165782 - protein, 160 aa, Unknown
  Bacterial polypetide isolated from the Sargasso Sea
MTTYKEAGVDIDLANQAVVKIKDLVKGTFNENTLTDIGGFGGCYLFPKDKYENPVLVSSTDGVGTKLKIAFLSDTHNTVGQCLVNHCVDDILAVGARPLFFLDYFATGKLSVEKIEQVMYGFSKACKENSTVLIGGETAEMPDFYQQGEYDISGTVVGVV

SEQ ID NO: 165783 - protein, 181 aa, Unknown
  Bacterial polypetide isolated from the Sargasso Sea
MNKKITYKDAGVDIKKADEAIEMSKKEISSTFSKHVLSTIGGFGSMYSLKDIFNNYRDPVLVQSIDGVGTKMSVAMAANNFQFIGHDLVNACCNDVASTGAVPLTFLDYVAGSDLDKSIISDIIKSVAQECKEHGVSLVGGETAEMPGTYHKNEYDLVGVATGIIEKNNIIDGTSVQAGDV

SEQ ID NO: 165784 - protein, 101 aa, Unknown
  Bacterial polypetide isolated from the Sargasso Sea
MAYSKLTYADSGVNIKKADKFVNFISSLSKKTNKSGDFKNIGGFGAISKVPKNLNNPHIVTSTDGVGTKIEIANELKLFNTIGIDLVAMCVNDLIVQGAKP

SEQ ID NO: 165785 - protein, 118 aa, Unknown
  Bacterial polypetide isolated from the Sargasso Sea
MTSDNKDSKLDYKKSGVDVDAGYELVERIKPFVKKTKRPEIMSGLGSFSAISRIPSHIKNPLLVTCTDGVGTKIEIAKAENKFENLGIDLVAMCVNDLVVCGAEPLLFLDYYVTDKLQ

SEQ ID NO: 165786 - protein, 145 aa, Unknown
  Bacterial polypetide isolated from the Sargasso Sea
MSKSSKNSDPYSKAGVNIDIGNKLISQIKKSVVSSHNANVIDGIGGFAGLYEINQKFKNPVIVACTDGVGTKLNLCLQYQKFNTIGQDLVAMCVNDLVACGAKPLFFLDYYATSKLELHQSSKIIKGVAKACREFSCPLLGGETA

SEQ ID NO: 165787 - protein, 245 aa, Unknown
  Bacterial polypetide isolated from the Sargasso Sea
PLTFLDYVAGSDLNKNIISDIIKSVAQECKEHGVSLVGGETAEMPGTYHKNEYDLVGVATGIIEKNNIIDGSSVQAGDVAIGVFSNGLHTNGYSLARKLIFDTFGLSTSDSLPGYNVSVGGCLLAPHTNYSSLIGQVLNKGINIKSISHITGGGLVDNVPRVIPGDVSLEVNINSWEKIPIFDFLKNNLDIETKDLYQTFNMGIGLVFIVEQSEKNRLISSIGKDSCSEIGVVINDSVNAVHLYG

SEQ ID NO: 165788 - protein, 136 aa, Unknown
  Bacterial polypetide isolated from the Sargasso Sea
NYKKNKNLKKWLLEPTKIYVKEISKLIDLKLINGCAHITGGGIRDNLSRIIPKGKCAKINLSKIRVKKVFSWLKNNNISDSEMLKTFNCGVGFILIINQNNLNKVKKYFKKDYAPYVIGKITDGNSKVMLNGKVNW

SEQ ID NO: 165789 - protein, 149 aa, Unknown
  Bacterial polypetide isolated from the Sargasso Sea
MNKKITYKDAGVDIKKADEAIEMSKKEISSTFNKNVLSSIGGFGSMYSLKDILNNFEDPVLVQSIDGVGTKMSVAMAAKNFQFIGHDLVNACCNDVAATGAEPLTFLDYVAGSNLDKNIISDVIKSVAHECKEHGVSLVGGETAEMPGT

SEQ ID NO: 165790 - protein, 193 aa, Unknown
  Bacterial polypetide isolated from the Sargasso Sea
YDLAGFAVGVVERSNILPSAIKENYFLLGLQSSGLHSNGFSLIRDIVSTFNIDIHDKAPFSRKKLGDILLTPTRIYINNLLQLIEKKYVYGISHITGGGLVENIMRVIPRNLTIQIDLSTIKPQKIYSWIRDISNISDNEMLKTFNCGLGMVLVVDEGNVKNSLKLLKSLGENPRVIGSVIKGKSPSLKGSLF

SEQ ID NO: 165791 - protein, 235 aa, Unknown
  Bacterial polypetide isolated from the Sargasso Sea
FFLDYIAVQKIKLKKVKSIIKGIVKGCKMSGCILAGGETAEMPGTYESNKFDLAGFAVGVVSKKKLIHKGRVKNRNIILAIPSSGLHSNGFSLVRQILKKQKINNFLKKELLKPTKIYVDPVLKLSEKNLLNSSANITGGGIIGNITRSIPSELTANIDLSKIKVTKIFKWIKNKNLSDKEMLETFNCGVGFCLIVEKNKINKIKKFFQKKFKPYEIGFISRSSKKIKLLNRIKW

SEQ ID NO: 165792 - protein, 246 aa, Unknown
  Bacterial polypetide isolated from the Sargasso Sea
MSKLYKKSGVDVIKTDKLIGQALKFIKSSHSDKVLGNKLGFSAEYKVNKDVTLCAATDGVGSKAILAAELKEYKGLGQDLVAMCSNDLLCNKAKPLFFLDYFACSSVKSKQYTEILKSITSACKKINCSLIGGETAEMPSLYRGNHFDIAGFLVGIKENHKNLKISKGDLIFGIKSNGFHSNGYSFIRDIIKKNKIDIKRAIFNKQKLSKLIMKPTRLYHQLISNNDLRYIKTLSHITGGGIYSKF

SEQ ID NO: 165793 - protein, 109 aa, Unknown
  Bacterial polypetide isolated from the Sargasso Sea
MSTIKSKKTKTYIDAGVNIDIGDKFIDQIKPLVQETNTSGTKSSLGGFGGVFDLSKLLLKEPLLISSTDGVGTKLEIAIKMQRHDTIGIDLVAMCVNDILAEGAQPLFF

SEQ ID NO: 165794 - protein, 166 aa, Unknown
  Bacterial polypetide isolated from the Sargasso Sea
MNKNLFTYKKSGVDIKAADKFINFISNITTKKGGRKKLNNIGGFGSINKIPKNIKNPRIVACTDGVGTKIEIANLIKNYDTIGIDLVAMSVNDLIVQGAKPLIFLDYISINKINIKKLKSIIKGIFQGCKISECALVGGETAEMPGTYEKGKFDIAGFAVGIVMKK

SEQ ID NO: 165795 - protein, 224 aa, Unknown
  Bacterial polypetide isolated from the Sargasso Sea
KSIIKGILKGCKQSGCQLVGGETAEMPGTYEKGKFDIAGFAVGVVDGKKVLSKNKIKVNDLVIAIPSSGLHSNGYSLIRYLIKKKKINIKRNNFLKNELLKPTKIYVKELLKLINRNLINGCANITGGGISDNVKRIVPNNLIAEINLNKIKTLKIFKWLKKNGISDKEMLQTFNCGVGFCLIINPRNYKKIARYFTRGFKPYIIGKITRGKDKVKLNGSINWI

SEQ ID NO: 165796 - protein, 217 aa, Unknown
  Bacterial polypetide isolated from the Sargasso Sea
GIAEACIDSGCSLLGGETAEMPGHYIDNNFDLAGFAVGCVEKDKIISSEKVSAGNILIGIESSGPHSNGFSLIRKVLTNYAGPINIKKKMIEEALVPTTLYPKLISNILEKYQVNSMSHITGGGLLENLPRSIPKNLSAEINSKSWQMPSIFDWLKNEGNILQQDMYRIFNCGIGLVLIVNEEDVDSISKEIKSNNFNSFVIGKVIEKNQKESVIFK

SEQ ID NO: 165797 - protein, 190 aa, Unknown
  Bacterial polypetide isolated from the Sargasso Sea
MGGETAEMPLVYKEQMTDLVGCIVGLKNTNFFKNKIVNNSKIIGFSSNGPHTNGFSLINKIDNIDNSIANTLLNPHTCYLSLVKELVEKYGYDFILGMAHITGGGLIENISRVIPDNLNLKITNTLPLPEWCQYLSKKLSLSKQEMLNVYNCGIGFVLIIEPQFIHKINKTEFNYIDLGIIVENQQVILQ

SEQ ID NO: 165798 - protein, 135 aa, Unknown
  Bacterial polypetide isolated from the Sargasso Sea
MKKTKNSYKKSGVDIKTADKFAKYIGKYSKQVFKKKVNKFNKNNIGNFASVFDLSKLKIKNPLLVASTDGVGTKIEIANYFNKFDTIGVDLVAMCVNDLIVQGAKPLFFLDYIAVGKINLKKMKKIIKGIVHGAK

SEQ ID NO: 165799 - protein, 106 aa, Unknown
  Bacterial polypetide isolated from the Sargasso Sea
MKKTKNSYKKSGVNIETADKFTKYIGKYSQQVFKKKLNKFNKNNIGKFASVFDPGKFKLKNSLLVASTDGVGTKLELANKFNKFDTIGIDLVAMCVNDLIVQGAKP

SEQ ID NO: 165800 - protein, 72 aa, Unknown
  Bacterial polypetide isolated from the Sargasso Sea
MYKLKKEYEDPILVACTDGVGTKVSLAQDFNNLSGIGQDLVAMCVNDLIVCGAKPLFFLDYYASSELNIKEA

SEQ ID NO: 165801 - protein, 228 aa, Unknown
  Bacterial polypetide isolated from the Sargasso Sea
NLTKLKNIIKGIHEGCKMSDCQLVGGETAEMPGTYSKNKFDLAGFSVGLVNKNNVLKKKKIKKNNLILAIPSSGLHSNGYSLLREVLKKKRINIKKNKFLRNEILKPTKIYVKEIMNLLDRKLINGCANITGGGIGDNIERVIPKNLCARIDLDKIKTHKIFSWIKKNGVSQKEMLKTFNCGVGFCLIIKKNNFHKILKFFPKQYRPYIIGEIIKNKSKVKFTNNICW

SEQ ID NO: 165802 - protein, 223 aa, Unknown
  Bacterial polypetide isolated from the Sargasso Sea
LKNIVRGIIKGCNIANCKLVGGETAEMPGTYAKGKFDIAGFAVGIVEKKKILNNKIKDKDLILAVPSNGLHSNGFSLVRFLIKKKKINLKTNKFLKKELIKPTKIYVKELSIINEKELINGCANITGGGLADNIKRVIPKKLGAEINLSSIKTLNIFKWLHQMGISENEMLKTFNCGVGFCLIVNPKNLNSVIKYFGKNFKPYIIGKIVKNSNKVKLSGKIPW

SEQ ID NO: 165803 - protein, 168 aa, Unknown
  Bacterial polypetide isolated from the Sargasso Sea
MKSQKLSYKNSGVNIKSADKFIDFISNLTKKTKKSGNFKNIGGFGAISSIPKNFKNPHIVTSTDGVGTKLEIANEIKKFDTIGIDLVAMCVNDLIVQGAKPFLFLDYISVDKINLNKMKEIIKGIVKGCELSSCNLVGGETAEMPGTYSPGKFDLAGFSVGLVEKKNI

SEQ ID NO: 165804 - protein, 173 aa, Unknown
  Bacterial polypetide isolated from the Sargasso Sea
MTSNKLTYSKSGVNIPKADSFVKFISSITRKSSKSGDFKNIGGFGAISPIPKKLIEPQIVTSTDGVGTKIEIANDLNKFDTIGIDLVAMCVNDLVVQGAKPYLFLDYISISKINLKKLKNLVKGIVKGCEIADCKLVGGETAEMPGTYSKDKFDIAGFAVGLVEKKKNTQQKN

SEQ ID NO: 165805 - protein, 139 aa, Unknown
  Bacterial polypetide isolated from the Sargasso Sea
VNTSVKDKIKGVGNLGDALLRPTEIYVKPVLESLKKCKINGLAHITGGSFTKLLRLKQIGYHLDNMPKTPPLMQLIEDTGVKNEEMYKTFNMGVGFCIIAPENQVKGIHKIFAKYKMKSYEIGRISKNKGVFINKLKIA

SEQ ID NO: 165806 - protein, 209 aa, Unknown
  Bacterial polypetide isolated from the Sargasso Sea
CSLVGGETAEMPGTYDKGKFDIAGFAVGIVDENKILVKSKIKNNDLILAIPSSGLHSNGYSLVRNILKKKKINLKKKTFLKKELIRPTKIYVKEIISLIDKNLINGCANITGGGLADNIKRVIPDKLSANIYLNKIKPLKIFQWLKRNQIEDNEMLKTFNCGVGFCLIINPSKFNKVKRIFSYKYKPYVIGKISRDTKKVKLNEKINWF

SEQ ID NO: 165807 - protein, 155 aa, Unknown
  Bacterial polypetide isolated from the Sargasso Sea
MNKKKITYKKSGVNIKAADKFVNFISTVSAKKKGKKKFSNIGGFGSISSIPSNIKQPKIVACTDGVGTKIEIANSLNKFDTIGIDLVAMSVNDLIVQGAKPFLFLDYISINKIDLTKLKSIIRGIIKGCAQSNCELVGGETAEMPGTYEKGKFDI

SEQ ID NO: 165808 - protein, 178 aa, Unknown
  Bacterial polypetide isolated from the Sargasso Sea
MSKHPVDKYKLAGVDRNSAEQIKDSLANIAKSSHGKEVLSGIGGFGGLYKLASYTNPVLVSSTDGVGTKLLLGKLTGNYKNLGIDLVNACLNDVIVSGATPIFFLDYIAIGKIDQTIINQLVSGMNLACEDAGCALIGGETAEMPGIYDDDDFDMAGFVVGVAEEDELLNSNAINAGD

SEQ ID NO: 165809 - protein, 182 aa, Unknown
  Bacterial polypetide isolated from the Sargasso Sea
EEAEILGIEGPKNDDILIGIESSGFHSNGFSLIRKVIDDFDIDLEKKIGGEKLGNILLKPTHVYVNEILALKKITSINAIAHITGGGFDENIPRMLGENQKAIIEHDFDDWPSGKYFKWLMETTGIPKENLVNTFNCGVGLVISVNKSNEEDVLGALNQSLFAKTIGKVQEKEPNESQVSYV

SEQ ID NO: 165810 - protein, 100 aa, Unknown
  Bacterial polypetide isolated from the Sargasso Sea
AHITGGGFQENIIRAIPEGCQAIIDKNSWNLPPVFQWIQNQAGIDSNEMLRTFNCGIGYVLIVKADVKNSVIKHFQDEELEAYEIGSITSGEKSVIINHG

SEQ ID NO: 165811 - protein, 266 aa, Unknown
  Bacterial polypetide isolated from the Sargasso Sea
MNKKITYKDAGVDIKKADEAIEMSKKDISSTYSKNVLSSIGGFGSMYSLKDVLSEFKDPVLVQSIDGVGTKMSVAMAANNFKYIGHDLVSACCNDVAATGAVPLTFLDYVAGSSLDKNIVSEVIKSVAHECKQHGVSLVGGETAEMPGTYRANEYDLVGVATGVVEKNKIIDGSSVCDGDIAIGVFSNGLHTNGYSLARKLIFESMGLTTSDTLPGYNISIGDSLLAPHTNYSSLIEKTVGAGIALKSISHITGGGLVDNVPRVFL

SEQ ID NO: 165812 - protein, 180 aa, Unknown
  Bacterial polypetide isolated from the Sargasso Sea
MVLLKKKILNKKIKNNDLILAVPSNGLHSNGYSLVRYVLKKKKINLKTIKFLKDELIRPTKIYVKELSLINEKNLINGCANITGGGLVDNIQRIIPKNLCAEIDLNRVKTLKIFKWLYKMGVSEKEMLKTFNCGIGFCLVINPRNLNSVSKYFGKKFKPYTIGKIVKNSKKVKLSGKISW

SEQ ID NO: 165813 - protein, 170 aa, Unknown
  Bacterial polypetide isolated from the Sargasso Sea
KKIKKNNIILAIPSSGVHSNGFSLIRYILKKKKINLKKNNFLKSELLKPTKIYVKEVLKLIKENLINGCANITGGGIPDNLKRIIPNGLCAEIDLSKIKAKKIFKWIKNQNVSDKEMLKTLNCGVGFCLIINAKKLNKIGKFFNKDFKPYIIGKIISGKNKIKLNEKIKW

SEQ ID NO: 165814 - protein, 160 aa, Unknown
  Bacterial polypetide isolated from the Sargasso Sea
MNKRTFTYKKSGVDINSSDKFIKYISNISSKKKGKKKFNNIGGFGSITNLPNNLKNPKIVACTDGVGTKIEIANTLNKFDTIGIDLVAMSVNDLIVQGAKPLIFLDYISINKINLKKLKLIIKGILKGCKQSGCELVGGETAEMPGTYEKGKFDIAGFAV

SEQ ID NO: 165815 - protein, 134 aa, Unknown
  Bacterial polypetide isolated from the Sargasso Sea
MNSNKLTYAKSGVNIKKADKFINFITSLSKKTNKSGDFKNIGSFGAISKVPNNLKNPHIVTSTDGVGTKIEIANELKKFDTIGIDLVAMCVNDLIVQGAKPYIFLDYISIDKINLTKLKNILKGIMKGCEIADL

SEQ ID NO: 165816 - protein, 84 aa, Unknown
  Bacterial polypetide isolated from the Sargasso Sea
MTKEIIENDPYKLAGVDIDAGNNLIDKIKKSVAASHNQNVLNNIGGFAGMYELDKDIDNPVLVACTDGVGTKVSLAQEFNVFLA

SEQ ID NO: 165817 - protein, 97 aa, Unknown
  Bacterial polypetide isolated from the Sargasso Sea
AHITGGGLVENIPRILPKGMGIEIYHSRIPKNKLFKNIQDYSGLNFEEMIKVFNMGIGFVICINEKDLGVLSKILNSKNEKFYVLGNVVKGSEFKII

SEQ ID NO: 165818 - protein, 170 aa, Unknown
  Bacterial polypetide isolated from the Sargasso Sea
FIIGLKSSGVHSNVFSLVRKILDVSKTQLDSNTPFNEFTFSEELLKPTRIYVKTIISLLNKTNAINAIAHITGGGITENLPRVFGSGKVQAEIYKDSWEKPEIFHWLQNAGNIEESEMLKTFNCGIGMILVVNPKETNNLLNKLKELGEEPALIGKIIHNENPETLVLYK

SEQ ID NO: 165819 - protein, 198 aa, Unknown
  Bacterial polypetide isolated from the Sargasso Sea
MPGTYSKNKFDVAGFAVGIVDQKKIIKKKNIKKNNLILAVPSSGIHSNGYSLIRHILKKKKIKIKKNIFLKKELLKPTKIYVREILRLNDKKLINGCANITGGGIIDNIKRIIPNGLSADIDLSKIKVKKIFKWIKNQNIDDLEMLKTFNCGVGFCLIIDKKNLKKINKFFTHEFKPYIIGKIIKGKNKTKFNEKISW

SEQ ID NO: 165820 - protein, 216 aa, Unknown
  Bacterial polypetide isolated from the Sargasso Sea
MTNKSNPNDPYAKAGVNIDDGNALIKLIKSSVNATHNKSVMGGIGGFAGLYELNHQLKKPTLVACTDGVGTKVALSKKYNTLGSVGQDLVAMCVNDMAACGASPLFFLDYFASSKLELKETATIIKGIAKACKKTNMALLGGETAEMPGHYTKGNFDLAGFAVGVVDKSKIISGKKIKTNHVILGIESSGPHSNGYSFIRKILSRHKPPLSVLKTL

SEQ ID NO: 165821 - protein, 204 aa, Unknown
  Bacterial polypetide isolated from the Sargasso Sea
MIKKKFTYKKSGVNIGAADKFVDFISAISSKKRGKKKFSNIGGFGSITNIPSNIKQPRIVACTDGVGTKIEIANTLNKFDTIGIDLVAMSVNDLIVQGAKPLIFLDYISINKIDLKKLKAIIKGINHGCNQSECELVGGETAEMPGTYEKGKFDIAGFAVGVVNKNKILNKKKIKKNNLILAVPSSGLHSNGYSLIRYLIKQKK

SEQ ID NO: 165822 - protein, 170 aa, Unknown
  Bacterial polypetide isolated from the Sargasso Sea
KDDVLIGIESSGFHSNGYSLLRKIIADFQLDLGSKIQKEEIGKILLEPTNIYVSAILALKKVLEINAIAHITGGGFFENIPRMLNENQKAIINHNFNDWPAGHYFEWLMQLTNMPKENLLNTFNCGVGMVIAVSQADEEDALGMLNQSYFAKTIGKVEERKVNEEEISFV

SEQ ID NO: 165823 - protein, 119 aa, Unknown
  Bacterial polypetide isolated from the Sargasso Sea
MNKNLFTYKKSGVNIDAADKFVKFITNISSKKRGNKKIKDIGGFGSISNLPKNIKNPKIVACTDGVGTKIEIANLLKKYDTIGIDLVAMSVNDLIVQGAKPLFFLDYISINKIDLKKMK

SEQ ID NO: 165824 - protein, 179 aa, Unknown
  Bacterial polypetide isolated from the Sargasso Sea
MASNKLTYSKSGVNIPKADSFVKFISSLTRKSSKSGDFKNIGGFGAISPIPRQLKDPHIVTSTDGVGTKIEIANDLNKFDTIGIDLVAMCVNDLVVQGAKPYLFLDYISISKINLSKLKHLVKGIVKGCDIAGCKLVGGETAEMPGTYTKGKFDIAGFAVGLVEKKKILNKKIRNNDLI

SEQ ID NO: 165825 - protein, 154 aa, Unknown
  Bacterial polypetide isolated from the Sargasso Sea
MKNNNLTYEKSGVNIKAADNFVKFISSLSKKSRNSKNFQNIGGFGSITNIPKNIKNPQLVTSTDGVGTKIEIANELNKFDTIGIDLVAMCVNDLIVQGAKPLIFLDYISINKIDLRKLNQIIKGINKGCKISNCELVGGETAEMPGTYSKGKFD

SEQ ID NO: 165826 - protein, 147 aa, Unknown
  Bacterial polypetide isolated from the Sargasso Sea
MKKNKNRLTYKKSGVDIAKASSLISVLKDKRKRSGVLSGIGGFASLFAIDNKKYKNPVIVCGTDGVGTKLKLATLLNQHNSIGQDLLAMCVNDVITTGAEPILFLDYLATGSINLKIHKTVLKGIKSACDKHNIILIGGETAEMPGM

SEQ ID NO: 165827 - protein, 255 aa, Unknown
  Bacterial polypetide isolated from the Sargasso Sea
VAMCVNDLIVQGAKPLIFLDYISINKLELKKLKSVMKGIIKGCKISGSSLVGGETAEMPGTYDKGKFDIAGFSVGVVDENKILKKKKIKKNNIILAIPSNGIHSNGFSLVRYILKKKKINLKKNNFLKSELLKPTKIYVTEILKLIKKNFINGCANITGGGITDNIKRIIPDGLCAEIKLSKIKTKKIFKWIKNQNVSDKEMLKTFNCGVGFCLIIDKKNLNKIGKFFKKDYKPYVIGKIISGKNKKKLNENIKW

SEQ ID NO: 165828 - protein, 211 aa, Unknown
  Bacterial polypetide isolated from the Sargasso Sea
SNCELVGGETAEMPDTFEQDKFDIAGFAVGLVDEKKILNKNRIKKNDLVLAIPSSGLHSNGYSLVRYILKKNKINLKKNIRLKKHLLEPTKIYVKEVLKLNNKGLINGCANITGGGLVDNLMRVIPNNRNIEIDLSKITTHEIFKWIKKNNVSNKEMLKTFNCGVGFCLIINPKNLEKVKSFFTKKYKPYVIGSVTKGLNKVKLNGSINWK

SEQ ID NO: 165829 - protein, 172 aa, Unknown
  Bacterial polypetide isolated from the Sargasso Sea
MTKEIIENDPYKLAGVDINAGNELVEKIKKDVSKTHNSNVLGNIGGFAGMYKLKKEYQDPILVACTDGVGTKVSLAQDFNDLSGIGQDLVAMCVNDLIVCGAKPLFFLDYYASSKLNIKEASVVIKSIANACNDSGCALLGGETAEMPGHYIDNNFDLAGFAVGCVDEKKII

SEQ ID NO: 165830 - protein, 345 aa, Unknown
  Bacterial polypetide isolated from the Sargasso Sea
MKKVDYKSAGVNIDAGNKAVDLIKDGVKSTFTKNVLTGIGSFGSLYDLKPILDEYQNPVMVQSIDGVGTKTIIARKLNKFDTVGIDLLSACANDILVMGAKPLTFLDYVANDKLRPGVVKEIVSGMVSACKETGVSLVGGETAEMPDTYLPGEHDLVGVITGVVEKEKIITGERIAIGDCIVGLPSSGLHTNGYSLARKVFFDIGGYSVKDKISELQSSIGLTLLEPHINYTNHLFSTLDAGIDIHGIAHVTGGGIIENLPRVLPDGCAASIQKDSWPVLDVFNAIQSIGGVSEDEMFRAFNMGIGMIFIINKEDVSAVSSALSDTSPIFKIGEIVAGNREVKIR

SEQ ID NO: 165831 - protein, 228 aa, Unknown
  Bacterial polypetide isolated from the Sargasso Sea
IDYKKLKSIISGIIKGCKLADCELVGGETAEMPGTYSKGKFDIAGFSLGLVDKDKILLNKIKEKDLVLAIPSSGLHSNGYSLVRHIIKKKKINLKKNSFLKKELLVPTKIYVMHILELIKKKYLNACANITGGGLNDNIKRIIPDNYCAEINLEKIKTLKIFRWLKSQGVSDQEMLKTFNCGVGFCLIVKRSNYKKIIRFFPKKYKPYVIGKITKNSEKVKLSGKVIW

SEQ ID NO: 165832 - protein, 172 aa, Unknown
  Bacterial polypetide isolated from the Sargasso Sea
MNKKITYKDAGVDIKKADEAIEMSKKDISSTFSKNVLSAIGGFGSMYSLKDVLSEFEEPVLVQSIDGVGTKMSVAMAANNFKYIGHDLVNACCNDVAATGAVPLTFLDYVAGSSLNKNIISDVIKSVARECKQRGVSLVGGETAEMPGTYHANEYDLVGVATGVVEKSKIID

SEQ ID NO: 165833 - protein, 92 aa, Unknown
  Bacterial polypetide isolated from the Sargasso Sea
MSSGKLTYAKSGVNIKKADKFVKHISKKTNKSGNFKNIGGFGAISNIPKNLNNPHIVTSTDGVGTKIEIANDIKKFNTIGIDLVAMCVNDLI

SEQ ID NO: 165834 - protein, 299 aa, Unknown
  Bacterial polypetide isolated from the Sargasso Sea
FGGLFSTDNLPKDSILVSTTDSVGTKVKISGRIGLHKNLGIDIVNHCINDLIPQGAHPLYFLDYLAFGKLDEKTVLQVVEGISEACKKVNCAIIGGETATLPGVYYENDYDVVGFMVGSVTKSNLKTKDNVKEGYKLVALPSSGLHTNGFSLVRSIFDIDNNVKNLSLSVPNEDKNLGELLAEPHREYLTTIKPFFEDVKAISHVTGGGLYKNLPRVFNSNLQARINKKSWEIPNLFKFIYQKGNIDEKEMFDVFNMGVGLVMIVDSSKSEDILEKCPEAWLLGEIVSKPSNQESVVIE

SEQ ID NO: 165835 - protein, 162 aa, Unknown
  Bacterial polypetide isolated from the Sargasso Sea
ILAVPSNGLHSNGYSLVRYLLKKKKINLKKSKFLKDELIRPTKIYVKELSLINEKNLINGCANITGGGLVDNIQRIIPKNLCAEIDLNRVKTLKIFTWLHEMGVSEKEMLKTFNCGVGFCLMTNPRNLNSLSKYFGKKFKPYIIGKIVKNSKKVKLSGKISW

SEQ ID NO: 165836 - protein, 229 aa, Unknown
  Bacterial polypetide isolated from the Sargasso Sea
MNKKITYKDAGVDIKKADEAIEMSKKDISSTYSKNVLSSIGGFGSMYSLKDVLSEFKDPVLVQSIDGVGTKMSVAMAANNFKYIGHDLVSACCNDVAATGAVPLTFLDYVAGSSLDKNIVSEVIKSVAQECKQHGVSLVGGETAEMPGTYRANEYDLVGVATGVVEKNKIIDGSSVCDGDIAIGVFSNGLHTNGYSLARKLIFESMGLTTSDTLPGYNISIGDSLLAPH

SEQ ID NO: 165837 - protein, 119 aa, Unknown
  Bacterial polypetide isolated from the Sargasso Sea
MTKNKNKDKYKDAGVNIDEGQKFIDDIKNLTSALNTKYSLSSIGGFSGYVEIPKNISNPVYALACDGVGTKMRVALRLNDLSTIGIDLVAMCVNDLIVSGDKPVAFLDYYGCATLDRKK

SEQ ID NO: 165838 - protein, 373 aa, Unknown
  Bacterial polypetide isolated from the Sargasso Sea
MGEPMDYASSGVDIDLEAKAVASLIGSLASSSRAPGEFGAPVHLPGGFGGIIEFGDSCLALATDGVGSKLQIASKVGQLGGVGFDCVAMNVNDLICVGAEPLAFVDYIAVPEADPEVHSSLGESLSQACNIARVTLAGGETATLPGIVKELDLSGTALGWFPKGGGITGENLEEGDVLIGLPSSGIHSNGFTLVRAVIERSGYSLEDSCPFDPSHDYREVRRFSEKEGATTLAEVILNPTRIYVDPVVELVLESRKGGGVVGPDCIKAIAHITGGGLSNLLRLHSTLGWEIQMPLDPHPEFQWISEIGSVSTLEMHRTFNMGMGMVVAVSEDCADSAERWLSERLPGSRIVGRVVSNGRRVTHSDPEVVFSHY

SEQ ID NO: 165839 - protein, 124 aa, Unknown
  Bacterial polypetide isolated from the Sargasso Sea
MTSNKLTYSKSGVNISKADNFVKFISSLTRKSSKSGDFKNIGGFGAISKIPRKMNDPHIVTSTDGVGTKIEIANDLAKFDTIGIDLVAMCVNDLIVQGAKPYLFLDYISISKINLNKLKNLVRG

SEQ ID NO: 165840 - protein, 215 aa, Unknown
  Bacterial polypetide isolated from the Sargasso Sea
HGVSLVGGETAEMPGTYRANEYDLVGVATGVVEKNKIIDGSSVCDGDVAIGVFSNGLHTNGYSLARKLIFESMGLTTSDTLPGYNISIGDSLLAPHTNYSSLIEKTVGAGIALKSISHITGGGLVDNVPRVVPKDFSLSVNTKSWGKIPIFKFLQNNLDIKKEDLYQTFNMGIGLVLIIDKSQKERLVSLVGKDNCSEIGFIIKDGLNSVHLSEQ

SEQ ID NO: 165841 - protein, 80 aa, Unknown
  Bacterial polypetide isolated from the Sargasso Sea
MTKDIIENDPYKLAGVDIDAGEDLVQKIKADVASTHNKNVIGNIGGFAGMFKLPEEFKKPILVACTDGVGTKVALAQECG

SEQ ID NO: 165842 - protein, 103 aa, Unknown
  Bacterial polypetide isolated from the Sargasso Sea
MTDNTNKETSYKDAGVSIEKGDELVSRLKKIVNNNQKGAIGKLGGFGGLFDLSELGYKKPVLVSGTDGVGTKIKVAIENDVHETVGIDLVAMCVNDIIVQGAK

SEQ ID NO: 165843 - protein, 345 aa, Unknown
  Bacterial polypetide isolated from the Sargasso Sea
MKPEISYADSGVDIDAADDAVRRLTPHAQSTFRPEVLSEVGGFGSVVAIPAGYKEPVLVSGNDGVGTKLLVAQKLGKLDTIGIDLVAMCVDDIVTSAAEPLFFLDQITVGAVNAAVIEQLVIGMAAGCSEAGCSLTGGEIAEHPGSMAADDIDISGFAVGVAERSEIPSRDAVVAGDVLVGIASPGIRCNGYSLARQVLMDDRSMDDPAWIGADRSIGDELLRPSVIYAPTVLQAFKGFGVRAAAHITGGGLAGNLRRVINDNVSIELDLNRWPRPRIFEEIASRGPVSEAEMRKVFNLGVGMVLVSPPEQAKPIIELANRNGHDAWLIGQIARGNGDVRWSEDG

SEQ ID NO: 165844 - protein, 113 aa, Unknown
  Bacterial polypetide isolated from the Sargasso Sea
MLNKTNAINAIAHITGGGITENLPRVFSSGKVRAEIYKDSWEKPEIFHWLQNAGNIEESEMLKTFNCGIGMILIVNPKETNNLLNKLKELGEEPSLIGKIIHNENPETLVVYK

SEQ ID NO: 165845 - protein, 280 aa, Unknown
  Bacterial polypetide isolated from the Sargasso Sea
LICVGAEPLAFVDYIAVPEADPEVHSSLGESLSRACNIARVTLAGGETATLPGIVKELDLSGTALGWFPKGEGITGENLEEGDVLIGLPSSGIHSNGFTLVRAVIERSGCSLEDSCPFDPSHDYREVRRFAGKEGATTLAEVILNPTRIYVDPVVELVLESRRTGGVVGPDCIKAIAHITGGGLSNLLRLHSTLGWEIQMPLDPHPEFQWISEIGSVSTLEMHRTFNMGMGMVVAVSEEWADSAERWLSERLPGSRIVGRVVSNGRRVTHSDPEVVFSHY

SEQ ID NO: 165846 - protein, 183 aa, Unknown
  Bacterial polypetide isolated from the Sargasso Sea
FAVGLVEKKKILNKKIRNNDVILAIPSNGLHSNGYSLVRYLLKKKKLNFKKSKFLKDELIRPTKIYVKELSLINEKNLINGCANITGGGLVENIQRIIPKNLCAKIDLNRVKTLKIFKWLHKMGVSEREMLKTFNCGVGFCLVTNPRNLNSLSKYFGKKFKPYIIGKIVKNSKKVKLSGKISW

SEQ ID NO: 165847 - protein, 160 aa, Unknown
  Bacterial polypetide isolated from the Sargasso Sea
MTKEIIENDPYKLAGVDINAGNELIEKIKKDVSKTHNINVLGNIGGFAGMYKLNKDYDNPILVACTDGVGTKVSLGQEFNDLSGIGQDLVAMCVNDLIVCGANPLFFLDYYASSKLDIDEASIIIKSIANACIKSDCALLGGETAEMPGHYIDNNFDLAG

SEQ ID NO: 165848 - protein, 178 aa, Unknown
  Bacterial polypetide isolated from the Sargasso Sea
VSKDKIIKNDNVICGNVLIGIESSGPHSNGFSLIRKIIKESKVNEEEKNIIAKRCLEPTLLYPKLIMELISNYKINSLSHITGGGLTENLPRSIPDNLIVEIDTDSWEMPNIFKWLQENGNISDDDMYRIFNCGIGMVLFVDEDEELKISRRIKELKMNSFVIGKVKNKKEESSVIFV

SEQ ID NO: 165849 - protein, 304 aa, Unknown
  Bacterial polypetide isolated from the Sargasso Sea
MASEYKQSGVDLEKSDLIKDKLINNILRTHNDQVINNGDGFGGLFSGRNINKNSVLVSTTDSVGTKVKISAKLGLHKNLGMDIVNHCINDLIPQGARPMFFLDYLAFASLDEKIVLDVIEGVSEACSKVGCAVIGGETATLPGVYNEGDYDVVGFMVGSVDKNKLKTRENSKEGDILIALPSSGLHTNGYSLVRNIFNSDENISNLSKKVEGEEKNLGELLAEPHKEYLTTLDPVLDDINAISHITGGGLRKNLPRVFDKKLTAKINKNSWSIPPLFRSIMKQGNVSENEMFDVFNMGVGIILI

SEQ ID NO: 165850 - protein, 186 aa, Unknown
  Bacterial polypetide isolated from the Sargasso Sea
NNFDLAGFSVGVVEKNNVIDGRKIKPGHILLGVESSGPHSNGYSLIRSILKKHKAPEKILQVLLKPTHLYPASVLELIKKTNVKGMAHITGGGLTENIPRILKKGLVANVDLTAWKFPKAFLWLQEKGKISTLDMLRIFNCGIGMVCILDKEEISKAQKIFSAHKLRTFEIGTITKGSLQEQIQYS

SEQ ID NO: 165851 - protein, 108 aa, Unknown
  Bacterial polypetide isolated from the Sargasso Sea
MTKEIIENDPYKSAGVDIDAGNSLVDKIKKSVAASHNKNVLDNIGGFAGMYELDKDIENPVLVACTDGVGTKVSLAQQYNDLSGIGQDLVAMCVNDLIVCGAKPLFFF

SEQ ID NO: 165852 - protein, 103 aa, Unknown
  Bacterial polypetide isolated from the Sargasso Sea
MPSSGFHSNGYSLINKIINSKKTDRKLQKKLLTPTKIYVKEVLELTKKLKINGMAHITGGGLEENLSRINSSYTMIIDRDKCKLKGYFFRNYETRQHHKKRDV

SEQ ID NO: 165853 - protein, 149 aa, Unknown
  Bacterial polypetide isolated from the Sargasso Sea
GYSLARKALLSKYSVKDKIKGVGNLGDALIRPTEIYVKPVLEALKKCKINGLAHITGGSFTKLLRLKQIGYHLDNMPKTPPLMQLIEDTGVKNEEMYKTFNMGVGFCIVAPENQVRGIQKIFTKHKMKSYEIGRISKNKGVFINKLKIA

SEQ ID NO: 165854 - protein, 144 aa, Unknown
  Bacterial polypetide isolated from the Sargasso Sea
TQLDSNTPFNEFTFGEELLKPTKIYVKTIISLLNKTKAINAIAHITGGGITENLPRVFGSNKVQAEIYKDSWKKPEIFHWLQEAGNIEESEMLKTFNCGIGMILVVNPKETNNLLNELKELGEEPLLIGKITHNENPETLVAYK

SEQ ID NO: 165855 - protein, 110 aa, Unknown
  Bacterial polypetide isolated from the Sargasso Sea
INKNLINSAAHITGGGLIENITRSIPSNLSINIDLSKIKTKRIFKWLKSKNISDLEMLRTFNCGVGFCIIVNKKNIKKIKKYFTKDYMPYEIGYVSKNIKKLNLYNSIIW

SEQ ID NO: 165856 - protein, 227 aa, Unknown
  Bacterial polypetide isolated from the Sargasso Sea
KAHEIIKGIYKGCKNSNIALIGGETAEMPILYKKGDFDLAGFSVGLVDKHKILPKKVSPGDILIGVKSDGLHSNGYSLINLLIKEKKIKLNDKIGNKYLKDLLIKPTKIYTNLINLKNLKDIKSMANITGGGLSENIPRVLSNKTSAIINKNLLCRSSLYNYIVEKKIISQNEMYKTFNCGIGMVLIVSNSKANLTVKNLKKIGFSSSIIGHVQKSKFKKVFYENNL

SEQ ID NO: 165857 - protein, 132 aa, Unknown
  Bacterial polypetide isolated from the Sargasso Sea
ASLLPPVQAILARGADFSLVEGAGGWRVPLAGEENLSDLAVALGIPVILVVGVRLGCINHALLSAEAIERDGLKLAGWVANIVEPKTSRLEENLATLTERLPAPCLGRVPHLDKATAAAVAEHLKLELLADW

SEQ ID NO: 165858 - protein, 46 aa, Unknown
  Bacterial polypetide isolated from the Sargasso Sea
MSAAYFITGTDTDVGKTTIAAGLLHAARLSGKSTAAGKPVASGCQL

SEQ ID NO: 165859 - protein, 220 aa, Unknown
  Bacterial polypetide isolated from the Sargasso Sea
MTKGLFITGTDTDVGKTAVAVAILQQCVLQRIDCRAYKPVASGVQSHPSDIDRLWSASGNAGTRDDVCPQSFQLPVAPEQAAAAEGSQIDDALLRQGLYPHMRADVVVIEGAGGLFSPLSHQTLNADLARDFQIPVVIVDSSRLGAIGRTLTAVTAAESVGLTVSAVVLSQLEAGHHGENQKPESPEVIAIQSQVELQRRLPYIVVCGLGYEASTIEPFV

SEQ ID NO: 165860 - protein, 177 aa, Unknown
  Bacterial polypetide isolated from the Sargasso Sea
MNHPSPQIVVCGTDTDVGKTVVSAWLVQGLNAHYWKPVQSGLEDGGDRGRVQDLLQLAPDRMLPEAYAFQEPVSPHWAAELDSTMLNPEALVVPHGSAPLVVETAGGLMVPLTRQWLQIDQLQRWGLPIVLVARSGLGTLNHTLLSLEALKRRQLTVLGLILNGPAHADNPATLNTS

SEQ ID NO: 165861 - protein, 214 aa, Unknown
  Bacterial polypetide isolated from the Sargasso Sea
MQLVVCGTDTDVGKTVVSALLVQGLQASYWKPIQSGLEGGGDRNRVRQLLDLNEERMLPEAYAFSQPVSPHWASELDGTALDPRSLALPDHPGPLVVETAGGLLVPLTRNWLQIDQLQVWNLPIVLVARSGLGTLNHTLLSLEALKKRQINVLGLILNGPLHADNPRTLEQFGGVPVLAELPSLVPLSAETLAAQWQQQGLGPKFRRLEDQASP

SEQ ID NO: 165862 - protein, 219 aa, Unknown
  Bacterial polypetide isolated from the Sargasso Sea
MNHPSPQIVVCGTDTDVGKTVVSAWLVQGLNAHYWKPVQSGLEDGGDRGRVQSLLNLPPDRMLPEAYAFQQPVSPHWAAELDGIPLNPDDLVVPHCTAPLVVETAGGLMVPLTRRWLQIDQLQRWDRPIVLVARSGLGTLNHTLLSLEALNRRQLTVLGLILNGPAHADNPGTLEQFGGVPVLAHLPTLSPLTAESLAREWQHQGLSSKFQDLLGIQQQ

SEQ ID NO: 165863 - protein, 231 aa, Unknown
  Bacterial polypetide isolated from the Sargasso Sea
MFFVTGTDTDSGKTLVSTALLTAFNREAACIGAVNLSLGVKPVASGCEITEQGLRNSDALKLMSASSLKLNYEQVNPISFEPAIAPHIAAKQQGVNLSPEAILATLDRQAFAQADFCLIEGAGGWRLPLGDGRYLSELVQQLNLPVVLVVGMKLGCLNHALLTQEAIIADGLTVAGWVANCVDPNMSVFDENLASLKEMMTSPFLGCIPHLKQADAEHAAHFIDIQALLMK

SEQ ID NO: 165864 - protein, 209 aa, Unknown
  Bacterial polypetide isolated from the Sargasso Sea
MTNFFITGTDTGVGKTRVTITIMAALKNAGFDVVGMKPVASGAQMINGKLINDDAKLIQKQCSHSVSYEAVNPFVFRFPAAPHIAAELEHKSIDHNQIIKNYHALDSASDILIMEGIGGWEMSLNEEYTLPDLVESLNLAVILVVGLRLGCINHAILTAQSIAGRGIKLCGWVSNHLDKEYLTPDQTIMTLKKRINCPHIADLPYNPNF

SEQ ID NO: 165865 - protein, 226 aa, Unknown
  Bacterial polypetide isolated from the Sargasso Sea
MTPKHRHPHQLVVVGTDTDVGKTVISALVVQGLSAHYWKPVQCGDLEIGGDTGRVANLCGLSEAEQQQRLLAEAYRLKAPASPNQAAREEGFAVDPAQLNLPPVDGPLVVETAGGLLVPLRDDYLQIQQIQQWQLPVLLVARSGLGTLNHTLLSLEALQRRQIPVLGLILNGPRHSANHQTLSAMGGTTVLAEVEPQPTLDQQALSRLWSSSGLAERLPAALEARA

SEQ ID NO: 165866 - protein, 231 aa, Unknown
  Bacterial polypetide isolated from the Sargasso Sea
MFFVTGTDTDSGKTLVSTALLTAFNREAARTGAAHLSLGVKPVASGCETTEQGLRNSDALKLMSASSLKLNYEQVNPISFGPAIAPHIAAKQQGVNLSPEAILATLDRQAFAQADFCLIEGAGGWRLPLGDGRYLSELVQQLNLPVILVVGMKLGCLNHALLTQEAIIADGLTVAGWVANCVDPNMSVFDENLASLKEMMTSPFLGCIPHLKQADAEHAAHFIDIQALLMK

SEQ ID NO: 165867 - protein, 231 aa, Unknown
  Bacterial polypetide isolated from the Sargasso Sea
MFFVTGTDTDSGKTLVSTALLTAFNREVLRAGFSRSSLGVKPVASGCEITEKGLRNSDALKLMSASSLKLSYEQVNPISFEPAIAPHIAAKQQGVNLSPEAILAKLDRAAFAQADFCLIEGAGGWRLPLGEGRYLSELVQQLNLPVILVVGMKLGCLNHALLTQEAILADGLTVAGWVANCVDPNMSVFDENLASLKEMMVSPFLGCIPHLKQADAEHAANFMNIQPLLMK

SEQ ID NO: 165868 - protein, 236 aa, Unknown
  Bacterial polypetide isolated from the Sargasso Sea
REPFVEAAGVGITDRGLKLLKDPIPTATYTGRQFVQDQSALEQQAATAAAGLDTLVGADAYKQFMSPYQQEVIDTSLAAMDREQAKGITSLRQRAAQSGAFGGGREAAALGEYQATADIARAVEEARLREAGFQNARQAAAADLAARQGLGTYQQQIGAQGRQLDQAKLAADQEAARETAFADYTQLGLVGPQLASVIGGFPAATQVQSTPPPSATQQLLGLGIGAAGLAGALRRI

SEQ ID NO: 165869 - protein, 163 aa, Unknown
  Bacterial polypetide isolated from the Sargasso Sea
GVLYGGFMLTKSGVKVIEYNARFGDPEAMNVLSILKSDFLSVCMSIVGGSLEKQEVCFERLATVCKYVVPVGYPNKPSRGFEVVCNQNDSSLFLASVMLKDKKLIACGSRTAAVVGKSSDIKQAESFAEDKISKISGNLFHRKDIGTKKLIDSRTKRMKELLG

SEQ ID NO: 165870 - protein, 183 aa, Unknown
  Bacterial polypetide isolated from the Sargasso Sea
KIKKQVDREIITPTLKALKKNGHPYKGILYAGLMIKDGYARLVEYNIRFGDPECQVLMLRMKNDLIRLILNCLQGSLSKTKLEWKDDNCATVVVAAKGYPGDYKKNTKIIGYENFESNDLFQVFHAGTKHDGNNLLANGGRVLSVTAKNKNLRDALNMIYAYIGQLDWPDGYYRRDIGKKAIK

SEQ ID NO: 165871 - protein, 305 aa, Unknown
  Bacterial polypetide isolated from the Sargasso Sea
HAICYFLKKSKKVSEIFCFPGNAGTRIIAKNVLINPDKFDHIKNFIHEKKIDLVIVGPEKPLVDGLVDYLEKFNIKVFGPNKMASQLEGSKIFTKQLCKKFNIPTAKFGIFESKDKCKQFIKKSDFPIVVKADNLASGKGVYICKDIKESELAINEIFDGKFGYAKSILVEEFLTGEEMSFFTIHDGKKFKTFGTAQDHKRVLEGDQGKNTGGMGAYSPSRLITPELEDKIINKIIKPTLLGLNELGSTYKGFLYTGLMIINNEPYLIEYNVRMGDPECQTILPCLKTDLCEIFLACCEGNLNKI

SEQ ID NO: 165872 - protein, 92 aa, Unknown
  Bacterial polypetide isolated from the Sargasso Sea
MKVGIIGSGGREHSICESIKKSKNVEKIYCFPGNAGTENIAQNINLNLDDFETLKNFIIESQIDLIIVGPEKPLVNGIVDYLEKFNINVFGP

SEQ ID NO: 165873 - protein, 119 aa, Unknown
  Bacterial polypetide isolated from the Sargasso Sea
MKIAILGNGGREHAIATKISKSPKLQKLYCIPGNAGTDLIAENVEIDFYNYESLLQFIKENKIDLVIVGPEKPLVDGVVDFLSKENIKVFGPNKKVSQLEGSKIFTKKICEKYNIPTAQ

SEQ ID NO: 165874 - protein, 91 aa, Unknown
  Bacterial polypetide isolated from the Sargasso Sea
MLIVGSGGREHAFTWKASQSDLVEKIFVAPGNAGTSLEPKAENINISASDIGALISFSKKENIDLVIVGPEDPLVNGITDEFKKVGIKCFG

SEQ ID NO: 165875 - protein, 89 aa, Unknown
  Bacterial polypetide isolated from the Sargasso Sea
MIIAIIGSGGREHSICKKISESPRVKKIFCIPGNAGTHEIAENIEIDLNNFEEIKNFLKKIKADIVIVGPEKPLVDGIVDYLEKENIKV

SEQ ID NO: 165876 - protein, 167 aa, Unknown
  Bacterial polypetide isolated from the Sargasso Sea
LMISTLDDKPYLLEYNCRMGDPETQNILMYLDKNEVDFLDLIGFDNSQYPDNFNLSFIDNKKYSGYCCTIVLAATGYPEKPIKDFYIDLSQLEENEFVKVFHAGTQINNGSLKVTGGRILSVNTYGEDKQSAIDTAYESISKIKAYTDSDLKNEDDSLVFFRSDIGS

SEQ ID NO: 165877 - protein, 212 aa, Unknown
  Bacterial polypetide isolated from the Sargasso Sea
MPFSCDHKPVFDGNKGPNTGGMGVYSSPPHLKKAQQDFIETSVTEKLVSAMAAEGLTYQGTIYPGMMLTSSGPRVVEINARFGDPETEALMPRLKSDLIDIVEAVANQTLNDIHPEWSNEYSVGVIMASAGYPNSYTAGHLISGIEDTDDNVQVFLAGADRDEDNNLITAGGRVLCVVGTGTTLEDAREITYDNVNRITFEGAHFRTDIGSL

SEQ ID NO: 165878 - protein, 170 aa, Unknown
  Bacterial polypetide isolated from the Sargasso Sea
MKILILGGGGREHALAWAVSQNPKCEDLFCAPGNAGIKKLATCVALNILDKSAVVDFCKKNQISFVIIGPEAPLEIGIADALESEEILTFGPSAKGSLLESSKAFTKEVCRLGKIPTAPSQVFNKEHEAIDFINASNLPIVIKADGLASGKGVTICTLRESAFVAIKDLF

SEQ ID NO: 165879 - protein, 45 aa, Unknown
  Bacterial polypetide isolated from the Sargasso Sea
MNLAVIGSGGREHSICYKLKQSAKIGKIICIPGNAGTKDLAENIN

SEQ ID NO: 165880 - protein, 136 aa, Unknown
  Bacterial polypetide isolated from the Sargasso Sea
MAISSTRPHPLPDLQRVLVVGGGGREHALSWALQRHDAIETVWITPGNAGSDQQALAIAETDSAALIAHCQTHSVDLVVVGPEAPLAAGVADALRQAGIAVFGPGAEGAQLEASKAWAKQLMQEAGVPTAGHWAVT

SEQ ID NO: 165881 - protein, 174 aa, Unknown
  Bacterial polypetide isolated from the Sargasso Sea
KPTISGMNKIGCPYKGILYAGIILKNNEPKLIEYNIRFGDPECQVLMMRLKNDLFDLIESTFDGSLKNKDIKWTEEPCITVVAASKGYPKEFEKNIEIKNVKDLKLNDKVQLFHAATFLDEKGLMRNNGGRVFSSTVMDSSLKIARKKALELLDLIDWKNKYYRKDIAFRIIDK

SEQ ID NO: 165882 - protein, 120 aa, Unknown
  Bacterial polypetide isolated from the Sargasso Sea
GRSVANIVVETHSGCAVATVLASGGYPGSYAKGKPIHLPTELDSDDLVLFHAGTARNEDALVTSGGRVLAVAAVAKTFAEAAEASRAGASQIGFEGAFYRADIGWREQARVDLPPEGDTG

SEQ ID NO: 165883 - protein, 168 aa, Unknown
  Bacterial polypetide isolated from the Sargasso Sea
MNILIIGGGGREHSIARSISISKNCNKIYILPGNAGTAEVGENIEGDVNDFNLIKKTVLSNQVSVVFVGPEDPIVNGIYDFFKKEQLLKDVLIVAPGKRAAKLEGSKDFAKVFMKKNNIPTAKYATFSKETIQQAYSFLDQMKPPYVLKADGLAAGKGVLILNNLNEA

SEQ ID NO: 165884 - protein, 253 aa, Unknown
  Bacterial polypetide isolated from the Sargasso Sea
FNGKFGKAKNLLVEEYLNGEEMSFFTIHDGNIFKNFGTAQDHKRVLEGDKGKNTGGMGAYSPSRLINDELEKKIINRIIKPTLLGLSELGNQYRGFLYTGLMIVKNEPYLIEYNVRMGDPECQTILPKLKTDLSDIFLACCQKKLNKINIEWENKKSLCIVLCSKGYPEDFKKNIEIKNLDKIELNKNNFIYHAGTSENNNKIYAIGGRVLNFVSTSESFDFARKNIINNLKKLNWSGGFFRSDIGHKVIQEK

SEQ ID NO: 165885 - protein, 65 aa, Unknown
  Bacterial polypetide isolated from the Sargasso Sea
FEDSNEAHKWISKNNTPVVIKADGLAAGKGVFIADTKEEPLNAVSSIMSKRIFGKSGDKIVIEEK

SEQ ID NO: 165886 - protein, 186 aa, Unknown
  Bacterial polypetide isolated from the Sargasso Sea
TRLKKTNELVAKQLFEETGTPYVGILYGGFMLTRGGVKVIEYNARFGDPEAMNILSILESDFLSICISMVDGNLKNQDVSFEKLATVCKYVVPVGYPEKPTKNFEVFCDQNDRSVFLASVMLKDQKLIACGSRTVAVVGKNKDVFQAELFAETGIANISGNLFHRKDIGTKKLIDSRIKRMKKLLQ

SEQ ID NO: 165887 - protein, 125 aa, Unknown
  Bacterial polypetide isolated from the Sargasso Sea
MNVLVIGNGGREHALCYGIKQSPNCFNLYCIPGSDAISEIASSINIDVDDHDAILLFCLESKIELVVIGPELPLTRGLSNLLINNSILVFGPDQKGADLEKSKKFTKDICKKLNIETAAYDVFYN

SEQ ID NO: 165888 - protein, 200 aa, Unknown
  Bacterial polypetide isolated from the Sargasso Sea
MGAYSPARLLTNNLEDKIKKKIIEPTLKAMEKLGHPYNGFLYAGLMVSKGEPYLIEYNIRMGDPECQVLMMRLKTDLLEIIDCVTRNKSQNLKIEWNENESITIVLCANGYPGNYVKNKEIKNLSSIFSDKNNQIFHAGTYKKNNKIFSNGGRVLNITCSAKNLEKARDQSLVNIKKINWTDGFFRKDIGWRVIKKNENN

SEQ ID NO: 165889 - protein, 255 aa, Unknown
  Bacterial polypetide isolated from the Sargasso Sea
NKIDKIFCFPGNAGTKDIAENINIDLDNFEILKNFILEKKIDLMIIGPEKPLVEGLVDYLEKFKIKVFGPGKIASQLEGSKIFTKQICEKYKIPTANFGIFENKNDSKKFLKSTNYPTVIKADNLASGKGVYICNNENEAIIAIEEIFNGKFGEAKNLLIEEFLEGEEMSFFTIHDGKNFKTFDTAQDHKRVLEGDKGKNTGGMGAYSPSRLINKDLKNKIIEKIIRPTLEGLDELGTKYKGFLYTGLMIVKNEP

SEQ ID NO: 165890 - protein, 201 aa, Unknown
  Bacterial polypetide isolated from the Sargasso Sea
KNTGGMGAYSPSGLINEILEKKIINKIISPTLKAIEDMGEKYKGFLYAGLMISENEPYLIEYNVRMGDPECQTILPLLKTDLIDIFNACCDENLENLNIKWREEKSLCIVLCSMGYPDKFTNNIKIENLNNLKLNNNDFIFHAGTKNEKNEIFSNGGRVLNFVSLSNSFKNSRKRAIKLINQLNWGNGFFRKDIGFKIIDK

SEQ ID NO: 165891 - protein, 173 aa, Unknown
  Bacterial polypetide isolated from the Sargasso Sea
TNSKLVNKIYALPGNGGTSTIATNIQGDVNDFKKIKEEVINNNISLVFVGPEDPIVNGIYDFFKSDNSLKNIKIIAPSKLAGQLEGSKEFAKKFMDRYNIPTAKHGTFTKDNIDQSDAFLESMNPPYVLKADGLAAGKGVLIIDNLQNAKDELRSMILDKKFGDSSSKVVIEE

SEQ ID NO: 165892 - protein, 241 aa, Unknown
  Bacterial polypetide isolated from the Sargasso Sea
MIEEFLDGEEMSYFIVADGKNYKFFGSAQDHKRVGEGDVGKNTGGMGCYSPSRLLSDDLEFKIKKRIIEPTLNAIREHGGVYKGFLYVGLMIKNDNPYLIEFNVRMGDPECQTILPTLNTDLMDVFQSCCEGTLSQLKINFSKSKSICVVLCSKGYPDKFENNIEIKDLEHLITLKNQNIFHAGTLKTKTGIISNGGRVLNFISTSDDFLKSRNEAINLIKKLNWKNGYYRSDIGYKVIKL

SEQ ID NO: 165893 - protein, 89 aa, Unknown
  Bacterial polypetide isolated from the Sargasso Sea
MKALVIGSGGREHCLAWKIAQSPIVDKVYVAPGNAGSAQEPGVFNVNIAAMDFDALIEFATKESIDLTVIGPEAPLVAGIVDVFALAGL

SEQ ID NO: 165894 - protein, 269 aa, Unknown
  Bacterial polypetide isolated from the Sargasso Sea
ETIDDAKDALIKCFKDNSFGDAGSVVVIEEFLVGEEVSLFSLVDKNGFVLPLTTAQDHKKILEGEKGLNTGGMGAYTPVPSISADKMNELSKTFVEPIIQYLAEQGINYQGMFYAGLIVTDKGTNLLEINVRFGDPETQAIIPLLETDLLELLHASAVGTLNEIKKIKWKNDYAMTVVMASNGYPEDYKKLTSINNLENLSLTKDDYLFHAGTILREHKWLSNGGRVLNISSTGKELKTIRQNIHKVINQINWDEGYYRKDIGWRYIDD

SEQ ID NO: 165895 - protein, 105 aa, Unknown
  Bacterial polypetide isolated from the Sargasso Sea
LDSYDIEWTQAHSCGVVIASKGYPENYESNKEIQININDENDTKLFHAGTKYENNKILTSGGRVFCATALGVDLKEAQQNAYNLVNKVDFEGAFYRKDIGYKGIK

SEQ ID NO: 165896 - protein, 107 aa, Unknown
  Bacterial polypetide isolated from the Sargasso Sea
MRKSAWRRSYAFAGEKVLVLGSGGREHALALTLAKSSRVSSVICVPGNGGCSGGKLRRANVPRTYLVDDGDYRQAGKRSIGQTVLCPDDANITSNIHLQSFARFTTQ

SEQ ID NO: 165897 - protein, 207 aa, Unknown
  Bacterial polypetide isolated from the Sargasso Sea
EGDKGKNTGGMGAYSPSRLISSQLETKIINKIIKPTLEYLKKENGIYIGFLYAGLMIKDTEPYLIEYNVRMGDPECQTILPLLNNDLLELINNCVDGTLDKLDISWQDKKSICIVLTSKGYPEKFKKNVKIKNLEKVVPKINQYIFHAGTKFSNEEFFSNGGRVLNFVTIDSNFKLAKEKSIDLIKNLNWENGYYRNDIGYKVINNK

SEQ ID NO: 165898 - protein, 143 aa, Unknown
  Bacterial polypetide isolated from the Sargasso Sea
MLEVNTRFGDPECQVILPRLESDLLTALRATREGRLNEIELTWQDQAALCVVMASKGYPESYTKGSIIRGIVDTEAATSAIVFHAGTSLADGEITATGGRVLGVTTLGDDIAAAQAAAYRAVEMIDWPGGFYRRDIGWRALGR

SEQ ID NO: 165899 - protein, 38 aa, Unknown
  Bacterial polypetide isolated from the Sargasso Sea
MKVLVIGGGGREHALAWKAAQSPKVSQVFVAPGHAGTA

SEQ ID NO: 165900 - protein, 210 aa, Unknown
  Bacterial polypetide isolated from the Sargasso Sea
HKRVHEGDKGKNTGGMGAYSPSRLFNEKLEKKIIEKIIKPTLFGLKDLKITYKGFLYAGLMIKNNEPYLIEYNVRMGDPECQTILPKLDSDLLDIFLTCCDGNLKETKISWNNKKSLSIVLCSNGYPDEYKKNILINNLEKIKQDQDNLCFHAGTIKELDKIMSVGGRVLNFVCIADNFNEARKNAINNINILNWDKGFYRKDIGYKVID

SEQ ID NO: 165901 - protein, 219 aa, Unknown
  Bacterial polypetide isolated from the Sargasso Sea
NSSELAAVCDYKRIFENDKGPNTGGVGAYSPPEFWDKKLEDKIKDEILYPTINALELENSSYSGLLYIGIMVTKTGPQVIEYNCRFGDPETQILMSKLDSDLFEICMDISKNHFDPNKVVWNNKNFCFVMMTADGYPGDYETGKLISGLENARDYNIIHSGTKKVDKKIFTNGGRVIGVVGEGSSMEEAIKHSYKGIKKISFKNSFYRKDIGKRAINDK

SEQ ID NO: 165902 - protein, 155 aa, Unknown
  Bacterial polypetide isolated from the Sargasso Sea
VTKSGVKVIEYNARFGDPEAMNVLSILKSDFLSVCMSIVGGSLEKQEVCFERLATVCKYVVPVGYPNKPSRGFEVVCNQNDSSLFLASVMLKDKKLIACGSRTAAVVGKSSDIKQAESFAEDKISKISGNLFHRKDIGTKKLIDSRTKRMKELLG

SEQ ID NO: 165903 - protein, 40 aa, Unknown
  Bacterial polypetide isolated from the Sargasso Sea
MKVLIVGSGGREHALSWKISKSPLVKEIYVAPRKWRNRIG

SEQ ID NO: 165904 - protein, 191 aa, Unknown
  Bacterial polypetide isolated from the Sargasso Sea
YTPPEFWDEKLSHQIISKIISPTLNSMNKNQTPFQGILYAGIMITESGPKVIEFNCRFGDPECELIMPMFQGNLSEVFLDIANKKFDNKKVSWKNKKGVCVVVCSGGYPNSYKKGLEISGIDKIKNNLIFHSGTKKIENKIISDGGRVLVLSNLDENIMKSRSNIYKEIDKIKFKGSFYRKDIGLRAENNE

SEQ ID NO: 165905 - protein, 183 aa, Unknown
  Bacterial polypetide isolated from the Sargasso Sea
KKIIDPTLGAMKDLGHPYKGFLYAGLMINKNEPYLIEYNIRMGDPECQVLMMRLKTDLVKIIDNATKNSLNNLKIEWDKNSCMTIVLCSKGYPGSYIKDIEIKNLTKSTSDKNNQIFHAGTYEKNNKVFSNGGRVLNITSLANNLLGARNKSLDNLEKINWTDGFFRKDIGWKAIKKDENNKW

SEQ ID NO: 165906 - protein, 231 aa, Unknown
  Bacterial polypetide isolated from the Sargasso Sea
MSYFVISDGKTFKKFNTAQDHKRVGEGDKGKNTGGMGAYSPSGLINDELDIKIIENVIKPTLKAIEDMGEKYKGFLYVGLMIKDNNPYLIEYNVRMGDPECQTILPLLNSDLLELMLSCCEGNLENQTINWKNKKSMCIVLCSNGYPDIYKKNVEIPNLEKVTKNNSTFIYHAGTKLIDNKVYATGGRVLNFVNISEDLKKSRESVINEIENLGWAKGFYRKDIGFRIINK

SEQ ID NO: 165907 - protein, 69 aa, Unknown
  Bacterial polypetide isolated from the Sargasso Sea
MIKVLIVGSGGREHAFTWKASQSKLVDKIFVAPGNAGTSLEPKAENIDISSSDIEGLVSFSKRENIGLV

SEQ ID NO: 165908 - protein, 63 aa, Unknown
  Bacterial polypetide isolated from the Sargasso Sea
MNIGIIGSGGREHSICFKLKQSSLVNRIYCIPGNAGTSELSENLNIDINDFEKIYREIKNKEY

SEQ ID NO: 165909 - protein, 91 aa, Unknown
  Bacterial polypetide isolated from the Sargasso Sea
MKIAILGSGGREHALTFSISKSNKVKKIYCIPGNAGTSSLAENISIDINNFETVYEFLKKNNIDFVVVGPEDPLVNGIVDYLEKLNIKVFG

SEQ ID NO: 165910 - protein, 231 aa, Unknown
  Bacterial polypetide isolated from the Sargasso Sea
MSYFVISDGKTFKKFNTAQDHKRVGEGDKGKNTGGMGAYSPSGLINKELDLKIIENVIKPTFGAIKDLRQAYKGFLYVGLMIKDNEPYLVEYNVRMGDPECQTILPLLENDLLELILSCCEENLEKQIIKWKNKKSMCIVLCSKGYPDAYKKNLEIPNLDKLTNDKNTFVYHAGTELIESKVYATGGRVLNFVSISDNLKESRNSAIKEIRNLNWENGFYRQDIGFRVIDK

SEQ ID NO: 165911 - protein, 229 aa, Unknown
  Bacterial polypetide isolated from the Sargasso Sea
FCNIQNGKTFKRFNTAQDHKRVGEGDKGKNTGGMGAYSPSGLINNDLDSKILDRIVKPTFAAIKDMGETYKGFLYVGLMIKDNNPYLVEYNVRMGDPECQTILPLLKTDLLNLIIACCNNKLNEQNIDWYKKKSLSIVLCSKGYPENYKKNIEIPNLSNIELDENTFLYHAGTNMSDGVVHAIGGRVLNFVSISDNYLDSRNKAIDQIKKLDWKYGFYRSDIGYKIIDK

SEQ ID NO: 165912 - protein, 85 aa, Unknown
  Bacterial polypetide isolated from the Sargasso Sea
MKIAILGSGGREHAIALQISKSKKLEKLYCIPGNAGTNSIAKNINIGLNNFDKITSFLKKEKVNLVIVGPEKPLVDGIVDYLEQK

SEQ ID NO: 165913 - protein, 304 aa, Unknown
  Bacterial polypetide isolated from the Sargasso Sea
SKIFTKQLCEKFNIPTAKFGIFKNKNSAKEFLKKTNYPTVIKADNIASGKGVYICNNEIDALLAIEEIFNGKFGKAKNLLIEEFLEGEEMSFFTIHDGNTFKNFETAQDHKRVLEGDKGKNTGGMGAYSPSRLINDELKDKIIKKIIQPTLIGLNELGSKYKGFLYTGLMIIKNEPYLIEYNVRMGDPECQTILPKLESDLLDIFLACCNEKLKEINIKWVTKKSLCVVLCSKGYPDSFEKGVEINNLNRIKLNKNEYLFHAGTTEKEDKIYAVGGRVLNFISISEDLSSARQNIFKNIEKLNW

SEQ ID NO: 165914 - protein, 231 aa, Unknown
  Bacterial polypetide isolated from the Sargasso Sea
MSFFVICDGKNFKIFKTAQDHKRVGEGDEGKNTGGMGSYSPSGLINEALEIKIIDKIISPTLKALKEMGEKYKGFLYAGLMILDNEPFLIEYNVRMGDPECQTILPLLKTDLIEIFNACCDQELDNLNIEWKEEKSLCIVLCSKGYPDKFTNNIKIDNLNNLILNNNDFIFHAGTIGKGNEIFSNGGRVLNFVSLSNSFKSSRERAVKLIEQLNWENGFFRKDIGFKIIDK

SEQ ID NO: 165915 - protein, 189 aa, Unknown
  Bacterial polypetide isolated from the Sargasso Sea
ASTPFHGILYAGLMLTSQGPKVLEFNVRFGDPECQALCIRLESSLLELIDAAVDRRLNEIASPTWKSGASVTVVMASEGYPETVEKGHAIRGLGPASELNNVVVFHAATTTNPDNPETILTTGGRVLGVTAHAESLARAKLKAYEGVKAIRWRGAWCRKDIADKGLRHEQEQAASESTDSSSPSSEGTA

SEQ ID NO: 165916 - protein, 130 aa, Unknown
  Bacterial polypetide isolated from the Sargasso Sea
YKGILYGGFMATRDGVKLIEYNARFGDPEAMNLLTLLDSDFASVCMSMANGSLVDVKFRKEASVCKYVVPKGYGSNPANDATLIVNDSYREHSDLYYAAVNINDSGEITTTSSRAAAIVSTGHDIGTAES

SEQ ID NO: 165917 - protein, 156 aa, Unknown
  Bacterial polypetide isolated from the Sargasso Sea
MNILVLGSGAREHSICWAIKKSKTCDKLFCSPGNAGIQKIAECKFINLKKRIKILNFCKKNSIDLVIIGPEEYLADGVSDYLQDKGIKTFGPVKKAAKLETSKSFAKSFLLKNKILTPKYRKFTSVNKALNYLNSINFPIVIKADGLAAGKGVIIC

SEQ ID NO: 165918 - protein, 273 aa, Unknown
  Bacterial polypetide isolated from the Sargasso Sea
GGKGVIITEELSEARQALRSLIEDKKFGAASEKVLLEKFLKGIEVSFFVLTDGDDYRILPEAKDYKRIGEKDTGPNTGGMGAVSPVVFADRAFKEKVSKTIIRPTIEGLKKEGIDFCGFIFFGLINVGGNPFVIEYNVRMGDPETEVVLPRIKSDFLELLIATADRKLIDTEIEYERYTASTVVYVSRGYPEFYEKGHEITIGDAKTVLSFHAGTTTKDGKLVTNGGRVLALTGLGKNLGEALSKSYAGGKEIEWEGKKFRQDIGFDLKALGQ

SEQ ID NO: 165919 - protein, 190 aa, Unknown
  Bacterial polypetide isolated from the Sargasso Sea
PLLTNKLEEKIKKKIIEPTLKAMKNLGHPYKGFLYAGLMINKGEPYLIEYNIRMGDPECQVLMMRLETDLLEIIDRATKNKINNLKIEWNKKSSITIVLCAKGYPYNYIKDSEIKNLPNVLTDKNNQIFHAGTYEKNNKTYSSGGRVLNITSSSESLTEARNKSLANIDKINWSDGFFRKDIGWRTINNK

SEQ ID NO: 165920 - protein, 101 aa, Unknown
  Bacterial polypetide isolated from the Sargasso Sea
MKIAILGSGGREHAIAIKIYKSKKFENKLYCIPGNGGTKSIAQNVDIKLNDFSKIYNFLKQKKIDLVIVGPEKPLVDGIVDYLEKKNIKVFGPNQKVSQLE

SEQ ID NO: 165921 - protein, 240 aa, Unknown
  Bacterial polypetide isolated from the Sargasso Sea
DGKFGSANKVLLEEFLEGEEMSYFVISDGNTFKKFHTAQDHKRVGEGDKGKNTGGMGAYAPSALINDELDLKIIENVIKPTFEAIKDMGEVYKGFLYVGLMIKDNNPYLVEYNVRMGDPECQTILPLLSSDLLELMLSCCEENLENHKVEWKDKKSICIVLCSSGYPDTYKKNVEIPNLEKITNNNTFIYHAGTELINNKVYAIGGRVLNFVSISNDLKKSRESLIYKIENFNWKNGFYR

SEQ ID NO: 165922 - protein, 299 aa, Unknown
  Bacterial polypetide isolated from the Sargasso Sea
KLAGQLEGSKEYAKKFMERHNIPTAKHGTFTKENIDQSDAFLESMSPPYVLKADGLAAGKGVLIINNLQEAKDELRSMILDKKFGDSSSKVVIEEFLDGIELSCFVLTDGKNYKTLPFAKDYKKIGEGDTGLNTGGMGAISPVPFLDNKFLEKIEERIIKPTIHGINKENMEYMGVVFIGLIKVDEDPYVIEYNVRMGDPETEVVFPRIKNDLLDLFSSMGTTEFKKIKLLIDDRHAATIIMVSGGYPLNYEKNKIISGLPEETDSIIFHAGTKKVDDNFLTSGGRVIAVTSLSENYKD

SEQ ID NO: 165923 - protein, 208 aa, Unknown
  Bacterial polypetide isolated from the Sargasso Sea
PEKPLVDGIVDFLEKNNIKVFGPRKIPSQLEGSKIFTKNICKNYNIPTFKFGIFENIENAINYLKNVNFPIVVKADGLASGKGVYISNNFDEAKLAVKEIFGGKFGIAKNILIEEFIKGEEMSFFIISDGKSFKIFKTAQDHKRVYEGDEGKNTGGMGAYSPSGLINEELEKKIINKIILPTLKAIEDMGEKYKGLIYAGLMISNNEP

SEQ ID NO: 165924 - protein, 217 aa, Unknown
  Bacterial polypetide isolated from the Sargasso Sea
MLNILVIGSGAREHAIVRSLSGSSKKKEIYCLATNHNPGIAELCKDMAVADINNQETVKIYAKKKKIDFAIIGPENPLANGVADALFDIGVESVGPKKDLAQIETSKSFTRNLLTEYKIPGCPKFKTFSSMEGVEEFLDELGDYYVVKYDGLAGGKGVKVAGDHLHSHGEAISYCKELIDSGGSFVIEKKLIGEEFSLMSFCDGSNLSHMPAVQDHK

SEQ ID NO: 165925 - protein, 73 aa, Unknown
  Bacterial polypetide isolated from the Sargasso Sea
MIICVLGSGGREHAICKTISLSSKISKIYCIPGNAGTQQLAENIDLDIDNFEKILKFIKNSKVDLVIVGPEKP

SEQ ID NO: 165926 - protein, 178 aa, Unknown
  Bacterial polypetide isolated from the Sargasso Sea
MEPVVQALRQRGINYRGVIYAGLMLTSTGPQVIEFNCRFGDPECQTLMPLLQGDLAEVLLACANGQLDQAPALTIAPLCSACVVAAAAGYPGTPQLGDPICDKGPGLDRSQNSSQLFAAGVKANANGELHTSGGRVLAAVAQGHDFDEAFAKAYERLAQVRFTGMQLRRDIGHQVRRL

SEQ ID NO: 165927 - protein, 141 aa, Unknown
  Bacterial polypetide isolated from the Sargasso Sea
MKIAILGNGGREHAIATKISKSPKLERLYCIPGNAGTDSIAVNVDLDFYNFESLLQFLKENKIDLVIVGPEKPLVDGVVDFLLKENIKVFGPNKKVSQLEGSKIFTKKICERYNIPTAQFGVFRTAVEAYSYLKNANMPIV

SEQ ID NO: 165928 - protein, 86 aa, Unknown
  Bacterial polypetide isolated from the Sargasso Sea
MTNSEKTNVLLLGNGGREHAIAWKLAQSPNLDKLFIAPGNAGTAEVGTNVQLSLDDPAKLLEYAKSQSIGLTVVGPEAPLALGVVN

SEQ ID NO: 165929 - protein, 42 aa, Unknown
  Bacterial polypetide isolated from the Sargasso Sea
MKVLVVGGGGREHALAWKLSKSNLVTNVFVAPGNGGTEIEDL

SEQ ID NO: 165930 - protein, 135 aa, Unknown
  Bacterial polypetide isolated from the Sargasso Sea
MVNVLVVGSGGREHALTWKLSNSDKVEQVFTAPGNGGTSNNVLISVDDIDELVKFAQEKNCFTVVGPEAPLANGIVDKFHEKHMPIFGPSQNAAQLESSKIWAKEFMKRNSIPTADFEIFDDAQKAKDFVKSYDK

SEQ ID NO: 165931 - protein, 132 aa, Unknown
  Bacterial polypetide isolated from the Sargasso Sea
TQPIMMRLKSDLVTLCLASFNNTLAKCKAKWVEHAALGVVAASAGYPASASKGDLITGLDSKFSDHIKVFHAGTSIIDNKVVTAGGRVLCVTALGETVVDAKKYAYKAIENITYEGMFFRNDIGHRAVTREN

SEQ ID NO: 165932 - protein, 39 aa, Unknown
  Bacterial polypetide isolated from the Sargasso Sea
MNVGILGSGGREHAICFCIKKSKNVKNIYCLPGNAGTST

SEQ ID NO: 165933 - protein, 163 aa, Unknown
  Bacterial polypetide isolated from the Sargasso Sea
LLADFLYAGVMIDSNQNIKVLEFNCRFGDPETQPIMMRLKTDLAELCLKACKKELSDEDLDWDDRKSLGVVMASGGYPANYEKGNIIEGIPDEAEDIKVFHAGTTYQEGNIKTNGGRVLCVTTLGESVLLAQKKAYDAISNISWKECFYRNDIGYRAIEREEN

SEQ ID NO: 165934 - protein, 108 aa, Unknown
  Bacterial polypetide isolated from the Sargasso Sea
MKVGIIGSGGREHAICETVKKSNKIDKIFCFPGNAGTKDIAENINIDLDNFEVLKNFILEKKIDLIVVGPEKPLVDGLVDYLEKYKIKVFGPNKIAAQLEGSKIFTKQ

SEQ ID NO: 165935 - protein, 37 aa, Unknown
  Bacterial polypetide isolated from the Sargasso Sea
MKVLIIGSGGREHALAWKCAQDDIVKHVFVCPGNAGT

SEQ ID NO: 165936 - protein, 69 aa, Unknown
  Bacterial polypetide isolated from the Sargasso Sea
MKIAIIGSGGREHALVHHLSNSKKITKIYSIPGNAGTEKISFNIDLNLENFQELYDFIYKEQIELVIVG

SEQ ID NO: 165937 - protein, 160 aa, Unknown
  Bacterial polypetide isolated from the Sargasso Sea
MKVGIIGSGGREHAICQSLRNSNKIDSIYCFPGNAGTADIAENVILNLENFENIKNFILNKKIDLVVIGPEKPLTEGLVDYLIKFKIKVFGPNKIASQLEGSKIFTKKLCEKFNIPTAKFGIFQNKNDAKLFCKKSKYPTVIKADNLASGKGVYICHNEA

SEQ ID NO: 165938 - protein, 48 aa, Unknown
  Bacterial polypetide isolated from the Sargasso Sea
SWVQGAPIVIKADGLAAGKGVTVAETHARSGSGFGRCPKAGNFWRGWT

SEQ ID NO: 165939 - protein, 95 aa, Unknown
  Bacterial polypetide isolated from the Sargasso Sea
MKVLVLGQGGREHAIAWKLSRSPKIEKVFICPGNGGTALEKNIENVDLSIDDSDLLINFTKKENIDITIVGPEGPLVDGLVDKFKEHNLKIFGPT

SEQ ID NO: 165940 - protein, 268 aa, Unknown
  Bacterial polypetide isolated from the Sargasso Sea
MSINSKSSKCFNRLENILIIGNGGRENSLAWAIQKNELVNKVYLIPGNAGSERINKCERIKIDLDNKIELFEKLKFLKIDLIVIGPEIPLANGLADFLRKKDFKVFGPGKDGAKLEYSKSWAKEFMRDADIPTASFWKVNSLEEAQKIIHSSSIPLVVKADGLASGKGVFVPDSKEECFKAAESIFNGKFGKSGNVVVLEEKIQGPEVSVFALCDGKKYILLPTAQDHKRLEEKDKGPNTGGMGAYSPAPLITKDYLDEIIKKIIEPT

SEQ ID NO: 165941 - protein, 133 aa, Unknown
  Bacterial polypetide isolated from the Sargasso Sea
MSINSNDSKSSKKLENILIIGSGGRENALAWAIEKNDLIKNIYLLPGNAGSDKVNKSQRINLDLHNIEELIKQLKYLKIDLVVIGPETPLAEGLGDILRENNFDVFGPGSDGAKLESSKSWAKEFMKEAKIPT

SEQ ID NO: 165942 - protein, 190 aa, Unknown
  Bacterial polypetide isolated from the Sargasso Sea
MKVGIIGSGGREHAICESLKNSKKIHKLFCFPGNAGTANIAENININIENFDSLKSFIFSNKIDLIIIGPEKPLVDGLVDYLEKHKIKVFGPNKVASQLEGSKIFTKELCKNYNIPTAKFGTFKNSIDAKKFLKSSTYPIVIKADNLASGKGVYICNSKKESFLAVEEIFNGKFGLAKNVLIEEFLKEKK

SEQ ID NO: 165943 - protein, 136 aa, Unknown
  Bacterial polypetide isolated from the Sargasso Sea
MNVLVVGQGGREHALAWKLSKSKQVSKIFVAPGNGGTANEAKCFNKSINVNNFSALEELVNSENIELIVVGPEDPLVNGINDYFQDSKVKVFGPTKEGAQLEGSKIFSKKFMFENNIPTGAASFFSESKLAKNYLK

SEQ ID NO: 165944 - protein, 138 aa, Unknown
  Bacterial polypetide isolated from the Sargasso Sea
NCRFGDPETQPIMLRLKSDLIEMIQTCFTGNISNYKVEWDERSAMGIVMSSIGYPESYETGKEISGLDTFYNILDTKVFHSGTRLEGNNVLTNGGRVLCVTALGDNLKQSNKKAYSAVKQIDWNGKYFRKDIGYRVME

SEQ ID NO: 165945 - protein, 253 aa, Unknown
  Bacterial polypetide isolated from the Sargasso Sea
MDDALRQGIFGEAGQKVVIEEFLEGEEMTVLAFVDGETVLPLVPSQDHKPIFDGDRGPNTGGMGAYSPVPHLEQWLREIQRLILKPLAKGLTESGQPYRGLLYTGLMLNESGPKVVEFNVRFGDPEAQVVLPLLENDLVEILSASCEGKLYEVELEWKKEASVCVIAAAPGYPGPPMKGLAIELPEFLEDGTQIFHAGTRIQENTLVTSGGRVFGVTAQARDIEQARNRVYQLMENIKFRGMQFRYDIGAKAL

SEQ ID NO: 165946 - protein, 138 aa, Unknown
  Bacterial polypetide isolated from the Sargasso Sea
MRIAIIGSGGREHSICQKIYESRNVNSLFCIPGNGGTENIATNVEINLKDFEKIKNFLKEKVIDLTIVGPEEPLVNGIVDFLRKHDLNVFGPDKFCSKLEGSKIFTKKICDLKKIPTANFKILNNLKNSIKYLENKKY

SEQ ID NO: 165947 - protein, 170 aa, Unknown
  Bacterial polypetide isolated from the Sargasso Sea
MNVGIIGSGGREHAICYMLNKSKKVSRIFCFPGNAGTNLIAQNVNLNSDNFSELEEYCLEKNIKMLIVGPEKPLVNGIVNHFKDKSIKVFGPDKISSQLEGSKIFTKKICQKYNIPTSKFKICESLNQTINYLKNSHFPLVIKADGLASGKGVYICENFNEAKIASEEIF

SEQ ID NO: 165948 - protein, 180 aa, Unknown
  Bacterial polypetide isolated from the Sargasso Sea
MKVAILGSGGREHALCHSLKKSNKVSQIFSIPGNAGTASISENININLDDFNEIKNFIIRSKIDLVIIGPEKPLVDGLVDFLYENNIKVFGPNKDASQLEGSKIFTKDLCKNNNIPTARYGIFRSKEAAIQFINKSSHPIVVKADGLAAGKGVYICENIQQSTNAINEIFDGKFGIAEKY

SEQ ID NO: 165949 - protein, 219 aa, Unknown
  Bacterial polypetide isolated from the Sargasso Sea
KKFETAQDHKRVFEGDKGKNTGGMGAYSPSRLINDQLEKKIIEKIINPTLQGLEDRKINYIGFLYAGLMIKNNEPYLIEYNVRMGDPECQTILPKLETQLLDILLSCTNKTLDKINIKWSNEKSLCVVVCSNGYPDEYKKNVLINNLDKIYLDNKNLCFHAGTISKGNQILAVGGRVLNFVSLSNSFNIAREKIFDNLKILNWGQGFFRKDIGYKVIDL

SEQ ID NO: 165950 - protein, 209 aa, Unknown
  Bacterial polypetide isolated from the Sargasso Sea
MNIGLIGSGGREHALCKKISESNNVKNLYCFPGNAGTADIATNIDIDILNFKKLLKIIKILEIDLIIVGPEEPLVRGIVDYLKRNNIKVFGPNKNASKLEGSKSFVKKICSKYNIPTAKFKICKNKKHVNVFLKTCKLPIVVKADGLASGKGVSICQSKKQVINSCNKIFNGKFKSSKKVVLEEFLYGEEASYFLIVDNKNFKFFGTAQ

SEQ ID NO: 165951 - protein, 240 aa, Unknown
  Bacterial polypetide isolated from the Sargasso Sea
PEVSVFALCDGKKYILLPTAQDHKRLNDNDKGPNTGGMGAYSPTPLLTKSNLENITKEIIEPTIDTLIRKNIDYRGVLYFGLMITKSGPKVIEYNCRFGDPECQTLMPLMDKDFVILLQKCAKGNLLGNEKIEMPNKFSGCVIATSKGYPNFYEKGFRINYGNIDLEDCQIFDSGTSLNSKGEFITDGGRVLSVVCQGQNFDKVFEKAYKNLKEISFEGIYYRKDIGHQVRDKKLIDRTN

SEQ ID NO: 165952 - protein, 215 aa, Unknown
  Bacterial polypetide isolated from the Sargasso Sea
VLPLVPSQDHKPIFEGDRGPNTGGMGAYSPVPHLEQWLTEIQRLILKPLAKGLAESGQPYRGLLYTGLMLNESVPKVVEFNVRFGDPEAQVVLPLLENDLVEILSASCEGRLNEVELDWKKEASVCVIAAAPGYPGPPTKGLAIELPEFLEDGTQIFHAGTRIQENTLVTSGGRVFGVTAQATDIEQARNRVYQLMENIKFRGMQFRSDIGAKAL

SEQ ID NO: 165953 - protein, 265 aa, Unknown
  Bacterial polypetide isolated from the Sargasso Sea
KFCKFPVVVKADGLAAGKGVTICNDKKKVLKISDEIFKGKFKSSRKIVLEEFLEGEEASYFLIVDEKSFKFFGSAQDHKRVGEKDKGPNTGGMGAYSPAPIINESIERKIINKIVKPTLSALKKRKHPYKGFLYVGLMIKDNEPYLIEFNVRMGDPECQVILPRLKSDLLKIIINVVTNRLDKTYIKWKKQKCMTIVLCSKGYPGNYKKNKNINNIDKIKLSKNDFIYHAGTKLENNKLLSNGGRVLNIISLGKSYLAIRKKIIK

SEQ ID NO: 165954 - protein, 221 aa, Unknown
  Bacterial polypetide isolated from the Sargasso Sea
MQDANIPTANFWKVNSLEEAKKIINSSLMPLVVKADGLASGKGVFIPNSKNECFKSAESIFNGRFGNSGNVVVLEEKIQGPEVSVFALCDGKRYILLPSAQDHKRLNEKDKGPNTGGMGAYSPAPLLTEDYLDRIIKEIIEPTINELNKRNIDYRGVIYFGLMITESGPKVIEYNCRFGDPECQTIMPLMDPNFVFLLEKCSMGNFTGDEKLILLKKLVVA

SEQ ID NO: 165955 - protein, 267 aa, Unknown
  Bacterial polypetide isolated from the Sargasso Sea
CESKKQVLNVSEEIFKGKFESSKKLVIEEFLIGEEASYFLIVDKNSFKFFGTAQDHKRVREKDIGPNTGGMGAYSPAPIINKNIEKKIINKIVKPTLKALRKENHPYTGFLYVGLMIIKNEPYLIEYNVRMGDPECQVILPRLKTDLLKIIKFSINNNLKKINIKWSKEKSMTIVLCSKGYPGKYKKNILISNLKNLKENKKDIVYHAGTKIINGKLLSVGGRVLNFTSSGNNLFMVREKIIKMIKKLKWKSGFFRKDIGWKILDRK

SEQ ID NO: 165956 - protein, 244 aa, Unknown
  Bacterial polypetide isolated from the Sargasso Sea
AILEGSKVFAKEFMKNYDIPTADYQMFSSADEARDFVKDKKHPIVIKADGLAAGKGVVVSNSIEESNEAIDNLLSSKHSDYLVIEEFLSGQELSAIYVCNFKGCSYEIALPWTKDYKSRDEYNNGPNTGGMGAVTHPLSYEHKNTVFKLHLDIEKIMVKTIASINDYNKKHGYLGFLYIGLMIDSHNNIKVLEYNCRLGDPETQNLMLTLENKKIDFIDLILNQPINDIKDINLDRIEKTDNSF

SEQ ID NO: 165957 - protein, 95 aa, Unknown
  Bacterial polypetide isolated from the Sargasso Sea
MKLGIIGSGGREHAICETVKKSNKIDKIFCFPGNAGTKDIAENINIDLDNFEVLKNYILEKKIDLIVVGPEKPLVDGLVDYLEKYKIKVFGPNKI

SEQ ID NO: 165958 - protein, 71 aa, Unknown
  Bacterial polypetide isolated from the Sargasso Sea
MNIALIGSGGREHALCKKLKECTKIKKIFCIPGNAGTAELATNLNIDYLNFNLLLKSIKHYNIKLVVVDPK

SEQ ID NO: 165959 - protein, 150 aa, Unknown
  Bacterial polypetide isolated from the Sargasso Sea
ASQLEGSKIFTKKLCEKYKIPTAKFGIFSNTKMALSFLQSCSFPIVIKADGLAAGKGVYISENFSEATKAVHEIFDGKFGTAENLLIEEFLSGEEMSFFIISDGQSYKMFGTAQDHKRVFEGDKGKNTGGMGAYSPSRLESDKLNEKIIN

SEQ ID NO: 165960 - protein, 117 aa, Unknown
  Bacterial polypetide isolated from the Sargasso Sea
ALAKALDKVEATWDPRPTVGVVLAAGGYPGDYAKGDVIEGLDEAAKLDGKVFHAGTALKDGQIVTAGGRVLCATAIGASVADAQQQAYRLAEKIRWNGMFHRNDIGYRAIARERGED

SEQ ID NO: 165961 - protein, 165 aa, Unknown
  Bacterial polypetide isolated from the Sargasso Sea
GSNYCGFLYAGIMVDTNERIKVLEFNCRFGDPETQPIMMRLKTDLAQLCLKACKKELSDEKLDWDERKSLGVVMASGGYPFAYDKGNIIQGITEESEDLKVFHAGTIYEEGDIKSSGGRVLCVTTLGDSVSLAQKKAYDAISSIKWKDCFYRNDIGYRAIEREKN

SEQ ID NO: 165962 - protein, 169 aa, Unknown
  Bacterial polypetide isolated from the Sargasso Sea
MVNVLVVGAGGREHALSWKLSTSEKIDQVYAAPGNGGTLQNVELSVTDIEGLAKFAQEKNCFTVVGPEDPLAAGIVDAFVEKGLPIFGPSKNAAKLESSKIWAKEFMKRNSIPTADFEIFDDAQKAKDFVKSYEKPVVIKADGLAAGKGVIVCKNKDEANDAIDTILTK

SEQ ID NO: 165963 - protein, 70 aa, Unknown
  Bacterial polypetide isolated from the Sargasso Sea
MNILIIGSGGREHALAWKCAQDQNVNQVFVAPGNGGTSLDKGIENLRINIENADSIANICNQNGIDLVII

SEQ ID NO: 165964 - protein, 224 aa, Unknown
  Bacterial polypetide isolated from the Sargasso Sea
MNVLVIGNGGREHALCYGIKQSSNCSNLYCIPGSDSISEIAFSIVIDVNDHDAILQFCIESKIDLVVIGPELPLTKGLSNLLMNNAILVFGPDQMGAELEKSKKFTKDICKKLNIATAAYDVFDNYDDALNFCQNQSYPVVIKADGLAAGKGVIICQKKEDAKDALIKCFKDNSFGDAGSVVVIEEFLVGEEVSLFSLVDKNGFVLPLTTAQDHKKILEGEKGL

SEQ ID NO: 165965 - protein, 142 aa, Unknown
  Bacterial polypetide isolated from the Sargasso Sea
EEASYFLIVDKKNYKFFGTAQDHKRVGENDKGPNTGGMGAYSPAPIINSTLEKKIIKKIVEPTLQALKKKKSPYKGFLYVGLMIVNNEPYLIEYNIRMGDPECQVILPRLETDFLKIIDKAVNNNLKKLKIKRRKQKCMTIV

SEQ ID NO: 165966 - protein, 71 aa, Unknown
  Bacterial polypetide isolated from the Sargasso Sea
MNIALIGSGGREHALCQKIYESPLTQKIFCIPGNAGTSKIAENVKINILDFKKILKFIRLSKVKLVIVGPE

SEQ ID NO: 165967 - protein, 116 aa, Unknown
  Bacterial polypetide isolated from the Sargasso Sea
MKIAILGSGGREHALAFSISNSKQTKEIYCIPGNAGTSKIAQNILINLNDFEKIYKFLNKKKIDLVVVGPEEPLVNGIVDYLEKFNIKVFGPNKLASQLEGSKIFTKKICKKYNIP

SEQ ID NO: 165968 - protein, 258 aa, Unknown
  Bacterial polypetide isolated from the Sargasso Sea
ALFGSAGEEIVVEEFLDGEEASFFAVVGGGKAVPLASAQDHKRVGDGDTGLNTGGMGAYSPAPVVTPEIADKVMRDIIKPTVDGMAAEGCPFTGVIFAGLMITKDGNVKLLEHNIRFGDPECQVLMARLTSDLTALLLAAANGTLKNAEVTWSDDSAVVVVMAANGYPGSYAKGEVISKLDAAGDIDGVKVLHAGTASNDAGDVVSAGGRVLGVTAYGSSITEAAARSYQAVDTIQWPGGFNRRDIGWRAIAREKEGR

SEQ ID NO: 165969 - protein, 207 aa, Unknown
  Bacterial polypetide isolated from the Sargasso Sea
MKILVIGGGGREHALVWKLNQSAHVEKIFCAPGNPGISEMAECVPIAVNQVDQLAEYAESQKMDLTVVGPEEPLVLGVVDEFKKRGLKIYGPDRQSAKLEGSKAYAKSVMKRFGIHTARYEEFTDFEDALGYLRVQGAPIVIKADGLAAGKGVTVAETQQEAEAALDDALRQGIFGEAGQKVVIEEFLEGEEMTILAFVDGETVLPL

SEQ ID NO: 165970 - protein, 133 aa, Unknown
  Bacterial polypetide isolated from the Sargasso Sea
MNIALIGSGGREHVLCQKIYESKLSKNIICIPGNAGTAKIAKNIDLDFLNFKKLLKTIKSHKIDLVVVGPEEPLVKGIVDFLRKKKVKVFGPNKFAAKLEGSKAFMKSICKKYKIPTAQFKICKNKKDVIKFL

SEQ ID NO: 165971 - protein, 119 aa, Unknown
  Bacterial polypetide isolated from the Sargasso Sea
MNIGLIGSGGREHALCQKISYSTLVNKIVCMPGNAGTAKLAINEDIDILDFNKVLKTIKFHNIDLVIIGPEEPLVKGLVDFLERKKIKVFGPRKYAAKLEGFKAFMKKYVKKQNPDWQF

SEQ ID NO: 165972 - protein, 214 aa, Unknown
  Bacterial polypetide isolated from the Sargasso Sea
AQDHKRVNERDEGKNTGGMGAYSPSGLINESLEIKIIDKIISPTLKALQEMGEKYKGFLYAGLMILDNEPFLIEYNVRMGDPECQTILPLLKTDLIDIFNACCNQELDNMNIEWKEEKSLCIVLCSRGYPDKFKNNIKINNLNNLTLNNNDFIFHAGTTGKGNEIFSNGGRVLNFVSLSNSFKSSRERVIKLIEQLNWENGFFRKDIGFKIIDK

SEQ ID NO: 165973 - protein, 269 aa, Unknown
  Bacterial polypetide isolated from the Sargasso Sea
QNRKMPLVIKADGLAAGKGVYICKDKESSKNAVIEIFNGKFGETDQILVEEFLEGDEMSYFIISDGLSFKSFNTAQDHKRVGEGDTGKNTGGMGSYAPSKLINQNLEEKIVNKIIKPTLKAIRDMDEKYNGFLYAGLMIKDNEPYLIEYNVRMGDPECQTILPLLKTDLLDLILACCNSNLKEKNIDWFEKKSLCIVLCSKGYPESYKKNVDIPNLNNLTPNNNNFIYHAGTEISGDKVHAVGGRVLNFVSISDNYLDCRNEAINLIEK

SEQ ID NO: 165974 - protein, 70 aa, Unknown
  Bacterial polypetide isolated from the Sargasso Sea
MIVGVIGSGGREHAICSKLYTSKKISKIYCFPGNAGTSKIAENVNLDLKSFSKLKKFIYKYKIELLIVGP

SEQ ID NO: 165975 - protein, 221 aa, Unknown
  Bacterial polypetide isolated from the Sargasso Sea
MNILILGSGGREHSLAWAIKQNPKCDNIFVAPGNAGIAQIAKCISVDILNATHVVNTVREYNIDFVLIGPEAPLAAGVSDVLKKEGILTFGPSKASSQLETSKKFTKEICDASGAPTAEYRSFDSLEPALTYIKTKEAPLVVKADGLAAGKGVIVATDIKMALSAVHKIFGGSFGNAGASVVIEEFLEGEEASLFLLIDGETILPIGTAQDHKRAGDGDTG

SEQ ID NO: 165976 - protein, 225 aa, Unknown
  Bacterial polypetide isolated from the Sargasso Sea
MEERMEGPEVSVFALCDGERMVLLPPAQDHKRLKDGDRGPNTGGMGAYAPAPLLNAEGLEEVRRIVLEPTLKALRQRGIDYRGVIYAGLMITADGPQVIEFNCRFGDPECQTLMPLLGPELGAVLQACALGRLDLAPQLSIAERCSACVVAAAEGYPEAPRKGDAIRIALAPSPNHQLFHAGTRRDSSGELLTAGGRVLAVVAQGDDFDAAFAGAYNSLNQLDYA

SEQ ID NO: 165977 - protein, 52 aa, Unknown
  Bacterial polypetide isolated from the Sargasso Sea
MNVLVIGGGGREHALAFKAAQSSEVSTVFVAPGNAGTATEPKLENVPIDVND

SEQ ID NO: 165978 - protein, 111 aa, Unknown
  Bacterial polypetide isolated from the Sargasso Sea
MINILIVGSGGREHAFTWKASQSDLVEKIFVAPGNAGTSLEPKTENIDIGASDIEALISFSKKEDIDLVIVGPEDPLVNGITDEFKKFGIKCFGPESLGTQLEGSKDFAKA

SEQ ID NO: 165979 - protein, 313 aa, Unknown
  Bacterial polypetide isolated from the Sargasso Sea
SNKINKSERIILNLSNIKELIKKLNYLNIDLVVIGPEIPLAQGLGDVLRENNFNVFGPGADGAKLESSKSWAKEFMKSANIPTANFWKVKSFEEAKKIILNSPNPLVVKADGLASGKGVFIPESKEASLKATEEIFKGKFGNAGEIVVLEEKIEGPEVSVFALCDGKKYVLLPTAQDHKRLNENDKGPNTGGMGAYSPTPLITKNILKRITKEIIRPTIDTLLRKNIDYRGVLYFGLMITKSGPKVIEYNCRFGDPECQTIMPLMDNNFVNLLQKCALGNLVGDEYIKMTDKFSGCVIATSQGYPNSYQTGFS

SEQ ID NO: 165980 - protein, 247 aa, Unknown
  Bacterial polypetide isolated from the Sargasso Sea
LKISKKVVIEEFLEGEELSYFLVVDKKSFKFFGSAQDHKRVGLKDTGPNTGGMGAYSPARLMSHDLERKILKRIVIPTIKFLKKKSSFTGFLYVGLMIKKNNPYLVEFNVRMGDPECQVILPRVKTDLFNIIYNSCKNKLNKININWKKSKALTIVLCSKGYPNSFKKGFEINNLKQISKNNNFYLFHAGTKTNGNKIVSDGGRVLNFVGLGSSFKTIRFNIIKKIKEIKWEHGFFRRDIGWRVIKK

SEQ ID NO: 165981 - protein, 243 aa, Unknown
  Bacterial polypetide isolated from the Sargasso Sea
VFIEEYLEGDELSYFIITDGKDFKCIGTAQDHKRIGEGDKGLNTGGMGAYSPSQIINKSLEQKIIKKIIKPTIKGMSKIGYKYSGILYAGIIVKNNEPKLIEYNIRFGDPECQVLMMRLESDLIRLMLSIFNKKLKNTKIKWSKNPGITIVAANKGYPKKFKKNSEIKGIKNFLGNKNKQLFHAGTEINDNGKFIATGGRVLNSTVVSKSLKKARDEALLVLDKLKWKNKYYRRDIGFKVIRK

SEQ ID NO: 165982 - protein, 158 aa, Unknown
  Bacterial polypetide isolated from the Sargasso Sea
LYAGLMIENEKAILVEYNIRFGDPECQVLMMKLKSDLIDLIMHSINGSINDYDCDWHNEDCATVVLASKGYPGEYKKNTEIKGLENIKTSQNLQVFHAATIESDKKILANGGRVLSVTAKDKSLRSALSTIYDGVKKIEWDECYYRNDIGHKALKNEH

SEQ ID NO: 165983 - protein, 275 aa, Unknown
  Bacterial polypetide isolated from the Sargasso Sea
MGINSPSPRSSNRLDNILIIGNGGRENSLAWAIQKNELVKKVYLIPGNAGSERINKCERIKIDISNKNELVEKLDFLKIDLVVIGPEIPLANGLADFLRKKDFKVFGPNKDGAKLEFSKSWAKEFMQDANIPTANFWKVNSLEEAKKIINSSFIPLVVKADGLASGKGVFIPNSKDECFKAAESIFNGKFGNSGNIVVLEEKIQGPEVSVFALCDGERYILLPTAQDHKRLNEKDKGPNTGGMGAYSPAPLLTEDYLDRIIKEIIEPTINELKKK

SEQ ID NO: 165984 - protein, 264 aa, Unknown
  Bacterial polypetide isolated from the Sargasso Sea
GNGGTRSSLEAQQDHLSHHHAVQHLGQTGAGEQNEGGLHQLAAIQSVPELQVSAPEFAEVLSFCQENKVSLLVVGPEQPLADGIVDVLSAAGVLVFGPSKAAAELEASKAFAKEFMQRHKIPTAEFRAFEGKENLEAALQYVKEHASGEGKEQKQLVVKASGLAAGKGVVVPETLQETERAVRDALEKRVFGAAGETLVLEERLSGPEVSVFVLTDGERYLFLPPAQDHKRALDNDCGPNTGGMGAFAPSPLLSTEGLRQGRSG

SEQ ID NO: 165985 - protein, 75 aa, Unknown
  Bacterial polypetide isolated from the Sargasso Sea
MKILVIGSGGREHALAWKCSTDKFVEKVYVAPGNAGTFLEEKIENISLDINNNEDVSNFCVSNNIELVIVGPEDP

SEQ ID NO: 165986 - protein, 159 aa, Unknown
  Bacterial polypetide isolated from the Sargasso Sea
MKVGIIGSGGREHALCVSLEKSEIIEKIYCVPGNAGTNQIAENVNIDISDFKKLTSFVKEKKIEIVLVGPEKPLVDGIVDYLENENVKVFGPNKFASQLEGSKIFTKKICKKYEIPTAKFEIYNDKEKAHSFFKNCNFPVVVKADGLAAGKGVYIAKKK

SEQ ID NO: 165987 - protein, 248 aa, Unknown
  Bacterial polypetide isolated from the Sargasso Sea
SGKEVIVEDYLIGEEISCLALVDGKNYIPLLLSQDHKKIYENDKGPNTGGMGAYCPLPYIKRNIQDQINKEIIEPTIRAMNKENRMFNGILYAGLMLVGKKIYLIEFNVRFGDPECQPLIFLLKSDLLKILINCTNKKLSKTKIKWKREYALSVVMVNKGYPGKYKNIGVIKNLNLVAKKRNVKVFHSGTSLNNKNDIIASGGRVLSVTASDKNFNVAKKNAYQIVKKIKWQNSFFRRDIGFRAKKMK

SEQ ID NO: 165988 - protein, 268 aa, Unknown
  Bacterial polypetide isolated from the Sargasso Sea
VYISETNDQAKIAVKEIFDGKFGEAKQLLIEEFLDGEEMSFFIISDGKNYKQFGTAQDHKRVLEGDKGKNTGGMGAYSPSRLENKVLNKKIIDKIIEPTLKALKEGNSTFRGFLYAGLMISKGEPFLIEYNVRMGDPECQTLLPKLKTDFGLLIKACIDENLKNTSIEWHNDKSLCIVMCSKGYPDEYKNNVELKLNNLILGKSEFLFHAGTKLIDGKTYSNGGRVLNIVVRSNFFKSARDKALSLLAKLNWENGFYRKDIGHKVVDQ

SEQ ID NO: 165989 - protein, 195 aa, Unknown
  Bacterial polypetide isolated from the Sargasso Sea
MNVLVIGNGGREHALCYGIKQSPNCSNLYCIPGSDSISEIASSIIIDVDDHDAILQFCLENKIDLVVIGPELPLTKGLSNLLMNNSILVFGPDQMGAELEKSKKFTKDICKKLHIATAAYDVFNNYDDAFIFCQNQSYPLVIKADGLAAGKGVIICQTMEDAKDALIKCFKDNSFGDAGSVVVIEEFLVGEEVSL

SEQ ID NO: 165990 - protein, 128 aa, Unknown
  Bacterial polypetide isolated from the Sargasso Sea
MNIGLIGSGGREHALCLKISKSKLVKKIFCFPGNAGTAEIAKNIEVDVLNFKKLLQFIKFYKVDLVVIGPEEPLTKGLVDYLEKNKIKVFGPNKISSKLEGSKAFMKKLCKKYKIPTANYKICTNKNQ

SEQ ID NO: 165991 - protein, 174 aa, Unknown
  Bacterial polypetide isolated from the Sargasso Sea
MNVLVIGNGGREHALCLGIKNSSKCENLFCMPGSDSIKEIATCVDYDVTNHQSIVDFCEDNKINLVVIGPELPLTQGLTDSLSQNSILVFGPDQKGAELEKSKQFTKDICKTLNIPSANYAVFSNYDEAIQFCKNHQYPLVIKADGLAAGKGVIICETFDEAEKAISKCFKDKA

SEQ ID NO: 165992 - protein, 63 aa, Unknown
  Bacterial polypetide isolated from the Sargasso Sea
EIFHAGTKTKNNKIVTSGGRVLNINGYGKNLVDAKEKAYSLVKKINWSGCYYRKDIGWRALKE

SEQ ID NO: 165993 - protein, 157 aa, Unknown
  Bacterial polypetide isolated from the Sargasso Sea
MKVVVIGSGGREHSIVWKLSLDNRVKNIYTFTDNSGIVALSTFSEPLNNLENIIDKVLEINPDIVVVGPEEPLSKGITNILNEKNIKVFGPSKEAARIESSKIFSKKLMLDNNIPTAYAEFFSDFDKAKEYSEKKGFQNIVIKADGLAAGKGVFLPD

SEQ ID NO: 165994 - protein, 135 aa, Unknown
  Bacterial polypetide isolated from the Sargasso Sea
FSKKENIDLVIVGPEDPLVNGITDTFTKDGIKCFGPESLGAQLEGSKDFAKSFMKKHNIPTANYESFSDANEVKKYVEDNELPLVIKADGLAAGKGVVIAEDHETASKTIDQFIGETKFGDASKKIIIEDFLVGQ

SEQ ID NO: 165995 - protein, 128 aa, Unknown
  Bacterial polypetide isolated from the Sargasso Sea
MIVGIIGSGGREHALCESLKRSNKINKIYCFPGNAGTDSIAENINVNVNDFENLKNIILERNIDIIIVGPEKPLVDGLVDYLEKYKIKVFGPNKIASQLEGSKIFTKKICEKYKILQQNLEFIQVMKR

SEQ ID NO: 165996 - protein, 129 aa, Unknown
  Bacterial polypetide isolated from the Sargasso Sea
MNIALIGSGGREHALCKKLRESKKINTIYCLPGNAGTSKHAQNLKIDINNRRNLLKVINFLNIKVVIVGPEEPLVNGIVDFLTKNKIKVFGPSKYASQLEGSKSFMKLICKKYQIPTADFKICRKISEV

SEQ ID NO: 165997 - protein, 204 aa, Unknown
  Bacterial polypetide isolated from the Sargasso Sea
MNVGIIGSGGREHAICVSLKNSKKINNVYCFPGNAGTSLIAQNIEADLNNFEELKKLIQKLNIDLIIIGPEKPLVNGLVDYLEENKIKVFGPKKIASQLEGSKIFTKKLCEKYKIPTANFGVFENVAKSLSFLKHCNFPIVVKADGLAAGKGVYICETFESSKTAVEEIFDGKFGKAKEVLIEEFLEGEEMSFFIISDGKTFKK

SEQ ID NO: 165998 - protein, 219 aa, Unknown
  Bacterial polypetide isolated from the Sargasso Sea
MSNILVIGSGGREACIIKKLLKDSKVIDKKIKIFCLASNKNPFITDNCLYEIYNHLSLSILEIVLNKFTPDFAIIGPEAPLELGFSDFLESMNIPCIGPLEMYAKIETSKIFCRNIINKAGLHDLSPRFWIIPSNSDIESCSVILSSINCDIVIKKNGLCGGKGVKVQGVDFVNHDDILNELTHCDHEILIEEKLCGEEFSLMSMLDGSDSIYHFPPIQ

SEQ ID NO: 165999 - protein, 92 aa, Unknown
  Bacterial polypetide isolated from the Sargasso Sea
MKVGIIGSGGREHALCLSLKKSEKIDKIYCFPGNAGTSFIAENIQTDLNNFEKLKEIIQKLKIDIIIIGPEKPLVDGIVDFFEKNQIKVFGP

SEQ ID NO: 166000 - protein, 119 aa, Unknown
  Bacterial polypetide isolated from the Sargasso Sea
MNLLVIGSGGREHAICYKLRQSNRVNELFCLPGNAGTKKIAKNINQDISNFEEIYKIIKQNKVDIVIIGPEEPLVNGITDFLKERSVRVLGPSKFAAQLEGSKAFMKNLCKKNNIPTAD

SEQ ID NO: 166001 - protein, 271 aa, Unknown
  Bacterial polypetide isolated from the Sargasso Sea
EVPLVDGISDLFERNNLNIFGPKKYFAQLEGSKVFSKKFMQDNKLPTADYKEFDDIEKAVYYVKSKKPPIVVKYDGLAAGKGVDVCESQDQAESSIKNLLKPKEKIIVEDFIKGIELSSIYICNPNASKKTIGLPWIKDYKSRDEYNSGPNTGGMGAITHPYCSFKKNDVYSLNTEIEKIIIKTIVSINNSSGDQSNYNGFLYLGLMISTEDNKPYLLEYNCRMGDPETQNLMMYLYNNDVDFLDLIGFDNSEYPDNFNLTFIDDKKYSGF

SEQ ID NO: 166002 - protein, 240 aa, Unknown
  Bacterial polypetide isolated from the Sargasso Sea
MKIAILGNGGREHALASQISKSPKIEKIYCIPGNAGTSMVAENVKIEIDDFNKIYNFVKINQLDLVIVGPEKPLVDGIVDFLEKKKVKVFGPSQKASQLEGSKIFTKQICQKFNIPTAKFGIFNNGQEALEYLKNTKFPIVIKADCIAAGKGVYICKDLESSKIAINEIFNGKFEKADQLLIEEFLEGEEMSYFIISDGNSFQSFNTAQDHKRVGEGDVGKNTGGMGAYSPSSLINPELE

SEQ ID NO: 166003 - protein, 250 aa, Unknown
  Bacterial polypetide isolated from the Sargasso Sea
RIKIDISNKNELVEKLDFLKIDLVVIGPEIPLANGLADFLRKKDFKVFGPDKDGAKLEFSKSWAKEFMQDANIPTAKFWKVNSLEEAEKIINSSSIPLVVKADGLASGKGVFIPNSKDECSKAAESIFNGRFGESGNIVVLEEKIQGPEVSVFALCDGKRYTLLPTAQDHKRLNEKDQGPNTGGMGAYSPAPLLTEDYLDRIIKEIIEPTINELNKRDIDYRGVIYFGLMITKSGPKVIEYNCRFGDPRV

SEQ ID NO: 166004 - protein, 254 aa, Unknown
  Bacterial polypetide isolated from the Sargasso Sea
KGVVLSNQISVVFVGPEDPIVNGIYDFFKTDKALKDVVIIAPAKAAALLEGSKDFAKVFMQKNNIPTAKYSTFSKENLEEAYSFLDEMKPPYVLKADGLAAGKGVLIINDLNEAKQELQNMLLKNKFGKASSRVVIEEFLDGIELSCFVITNGKDYKILPFAKDYKKIGESDIGLNTGGMGAISPVPFIDTDFKKKIEDRIIKPTIRGIQQERMDYIGFIFIGLIKVKGEPYVIEYNVRMGDPKTEVVFPRIKS

SEQ ID NO: 166005 - protein, 212 aa, Unknown
  Bacterial polypetide isolated from the Sargasso Sea
HKKVGEGDTGLNTGGMGAYSPARNLTWELENKIKKKIIEPTLKAMKALENPYTGFLYAGLMIKDGEPYLIEYNIRMGDPECQVLMMKLKTDFLSIVEATINNNLNKLKIEWDNKKCITIVLCAKGYPGEYVKDKEIKNLSKIHLDKNNQIFHAGTYELNNKIFSKGGRVLNVTSSSEDLDEARINSLSNLEKIEWENGFFRKDIGWRAIKKK

SEQ ID NO: 166006 - protein, 213 aa, Unknown
  Bacterial polypetide isolated from the Sargasso Sea
MNILVLGNGAREHALCYAIAKSQKLSKLFCAPGNYGISNVAEVYNFDINNFDMLYDFCTEKSIDLVVVGPEVPLVNGVVDFLETKDIKSFGPKKVPAMLEGSKIFMKDVCAQYNIPTARYQNFTEKTSAEAYLRKQPLPVVVKASGLAAGKGVTIATTLDEGLNAINDIFNDKFGSGCELVIEEFMDGEEASYFVFTEWYKLYSHYLVLKIIK

SEQ ID NO: 166007 - protein, 181 aa, Unknown
  Bacterial polypetide isolated from the Sargasso Sea
MNVLVIGNGGREHALCYGIKQSPNCSNLYCIPGSDSISEIASSIITDVDDHDAILQFCLENKIDLVVIGPELPLTKGLSNLLINNSILVFGPDQMGAELEKSKKFTKDICKKLNIATAAYDVFDNYDDALNFCQNQSYPLVIKADGLAAERGVIICQTMEDAKKGLIKCFKDNSFGDAGSV

SEQ ID NO: 166008 - protein, 144 aa, Unknown
  Bacterial polypetide isolated from the Sargasso Sea
MIVGIIGSGGREHAICKKVKESSKIDKIFCIPGNAGTNNIAENIDIKIDDFASIKNFCLKSKIELLIVGPEQPLVDGIVDYFHDTNINVFGPNKLASKLEGSKTFTKELCKKYDIPTANFNIFENLKTTELSLKNFRYPLVIKA

SEQ ID NO: 166009 - protein, 260 aa, Unknown
  Bacterial polypetide isolated from the Sargasso Sea
SNKIDKIFCFPGNAGTKDIAENINIDLDNFEVLKNFILEKKIDLIVVGPEKPLVDGLVDYLEKYKIKVFGPNKIAAQLEGSKIFTKQICKKYKIPTASFGIFENKKDAKKYLKSTNYPTVIKADNLASGKGVYICNNENEAIIAIDEIFNGKFGEAKNLLIEEFLNGEEMSFFTIHDGITFKTFDTAQDHKRVLEGDKGKNTGGMGAYSPSRLINEDLKNKIINKIIKPTLEGLAGFGSKYKGFLYTGLMIVKNEPYLIE

SEQ ID NO: 166010 - protein, 279 aa, Unknown
  Bacterial polypetide isolated from the Sargasso Sea
LNIFNININLSNLDELINFVSTESIDLTIVGPEQPLVSGIVDVFKKNGLNIFGPSKKASRIEGSKIWAYKLMEKYNIPCPKSEVFDQSELAKKYVRNFNPNDLVLKVDGLAGGKGVFLPKTEDEINKTIEDILDKKIFGSLNSKILISERIYGPEVSVFAFVDGGKTSELAAVCDYKRIFENDEGPNTGGVGAYSPPEFWKRKLEDKIKSEILYPTINALSLENSSYSGVLYIGVMVTKTGPMVIEYNCRFGDPETQILMSKLDSDLFEICMDISKKIF

SEQ ID NO: 166011 - protein, 182 aa, Unknown
  Bacterial polypetide isolated from the Sargasso Sea
MIVGIIGSGGREHAICESLYKSKKINKLYCFPGNAGTSKVATNIILDLNNFEEIKDFVLENRIDLVIVGPEKPLVDGIVDYLEKFNIKVFGPNKVASQLEGSKIFTKNICQKYNIPTANFGIFINEEEAYKFLETSNFPIVIKADNLASGKGVYICENREQSSTAVQEIFGGKFGEAKNVLY

SEQ ID NO: 166012 - protein, 161 aa, Unknown
  Bacterial polypetide isolated from the Sargasso Sea
MAVERILVVGNGGRENALAWALARSPQQPQVWISPGNGASAAIPGCKVLNHSASDDEALAGSCQTLEIGLVVIGPEAPLAAGLADQLRGHGIAVFGPGADGAQLEASKEWAKTLMQEAGIPTAGFWVASDAEQGQAIAQRENKALVVKADGLAAGKGVTVA

SEQ ID NO: 166013 - protein, 97 aa, Unknown
  Bacterial polypetide isolated from the Sargasso Sea
MIVGIIGSGGREHAICSKIKESRKISKIYCIPGNAGTSSIAENIDLEINDFKSIKKFCVINKIELLIVGPEQPLVEGIVDYFKNTKIKIFGPNKIAS

SEQ ID NO: 166014 - protein, 263 aa, Unknown
  Bacterial polypetide isolated from the Sargasso Sea
MKKVLVLGSGAREVAITRSVSQSSIENAIFCISKDINPQINDLCEDYHVCDVSDVASIVSYSKKREVDLVIVGPENPLAGGVVNALEQAGVGCVGPKKEVAMIETSKAFARMIVDLCCPEKNPQRKEFDSIKGVKNFMEALGGEYVVKFDGLMGGKGVRISGEHLKNTNEGLDYANEIVKGGGKFLVEEKLVGEEFSLMSFVDGKTCKHMPVVQDHKRAFEGDVGPNTGGMGTYSYGNHSLPFLTKEDVLEAQKTNELVAKQL

SEQ ID NO: 166015 - protein, 195 aa, Unknown
  Bacterial polypetide isolated from the Sargasso Sea
MNLAVIGSGGREHALCYKLGQSKEVKKIFCIPGNAGTKKLAENISEDLSNFEGIYKIIKEKKIDCVIVGPEEPLVNGIVDFLTKKNIKVFGPDKFSSQLEGSKAFMKNLCKKNNIPTANFGIFENFEEAINFIKSNKLPIVVKADGLAAGKGVSICQTKEEAEKKVKEIIEGKFKSSNKVVLEQYIDGEELSYFS

SEQ ID NO: 166016 - protein, 50 aa, Unknown
  Bacterial polypetide isolated from the Sargasso Sea
MNLAVIGSGGREHAICYKLKQSSKIKKLFCIPGNGGTKKIAENIVEDTSN

SEQ ID NO: 166017 - protein, 168 aa, Unknown
  Bacterial polypetide isolated from the Sargasso Sea
MKIAILGSGGREHAMAYKISKSPKLKKLYCIPGNAGTSFIAENVNIEISDFNEISKFIEKFKIDLVIVGPERPLVDGIVDFLKQKKIKVFGPNKKVSQLEGSKIFTKKICEKYEIPTAKFGIFNSKSKAVDFIKKSKMPIVVKADGLAAGKGVYICENLESSKRAVNE

SEQ ID NO: 166018 - protein, 283 aa, Unknown
  Bacterial polypetide isolated from the Sargasso Sea
CFPGNAGTNDIAENISIDLENFENLKKFIFDNKINLIVIGPEKPLVDGLTDYLEKHNILVFGPNKIASQLEGSKIFTKQLCKKFNIPTAKFGIFNNREESIKFLKNSKFPIVIKADNLASGKGVYISENEKEAQIAVNEIFDGKFGEAKNLLIEEFLYGEEMSFFTIHDGKCFKNFGTAQDHKRVLEGDKGKNTGGMGAYSPSRLINNELEKKIINKIINPTLKGLSELGVEYKGFLYAGLMIVENEPFLIEYNVRMGDPECQTILPKLKTDLCDVILACCKK

SEQ ID NO: 166019 - protein, 177 aa, Unknown
  Bacterial polypetide isolated from the Sargasso Sea
MKVGIIGSGGREHAICQIIKNSNKIDKIFCFPGNAGTKDIAENINIDLENFENLKNFILDKKIELIIVGPEKPLVGGLVDYLEKFKIKVFGPNKIASQLEGSKIFTKQLCQKYNIPTAKFGIFENINDAKKFLKETSFPAVVKADNLASGKGVYICKNKDEGFSAVEEIFNGKLEKQ

SEQ ID NO: 166020 - protein, 246 aa, Unknown
  Bacterial polypetide isolated from the Sargasso Sea
AGKGVYISKNFSEAKEAVDEIFDGKFGEAKKILVEEFLNGEEMSFFIICDGKNFKLFKTAQDHKRVNEGDEGKNTGGMGAYSPSGLINKDLENKIIKKVILPTLKAIEEMGEKYKGFLYAGLMILDNEPFLIEYNVRMGDPECQTILPLLKTDLIDICDACCTENLQNINIEWKEEKSLCIVLCSQGYPEKFTNNIKIDNLNKLQLSINDFVFHAGTKKEKNEIFSNGGRVLNFVSLSSSFKSSRE

SEQ ID NO: 166021 - protein, 74 aa, Unknown
  Bacterial polypetide isolated from the Sargasso Sea
MINVLIVGSGGREHAFTWKASQSDLVDKIFVAPGNAGTALEPKAENINIGASDIDALVSFSKKVNIDLVIVGPE

SEQ ID NO: 166022 - protein, 161 aa, Unknown
  Bacterial polypetide isolated from the Sargasso Sea
KTIDQFIGETKFGDASKKIIIEDFLVGQELSYIVMVDGTEYLPLATSQDHKTIGEGDVGLNTGGMGAYSPVPFVNDQLDITIREKVIEPTIRGLSEEGIMFRGFLYAGLMIDSNYNLKVLEYNCRFGDPETQPIMLRLKSDLIDMIQACFSGKISNYEIEW

SEQ ID NO: 166023 - protein, 300 aa, Unknown
  Bacterial polypetide isolated from the Sargasso Sea
HIAENINIDLDIFEVLKNYILEKKIDLIVVGPEKPLVDGLVDYLEKYKIKVFGPNKIAAQLEGSKIFTKQICEQYKIPTASFGIFDNKKDAKKFLKSTNYPTVIKADNLASGKGVYICNNESEAVIAIEEIFNGKFGEAKNLLVEEFLKGEEMSFFTIHDGITFKTFDTAQDHKRVMEGDKGKNTGGMGAYSPSRLINEDLKNKIINKIIKPTLKGLAGFGSKYKGFLYTGLMIVKNEPYLIEYNVRMGDPECQTILPKLKTDISEIFLACCEEELNNVNIEWTDKKSLCIVVCSKGYPD

SEQ ID NO: 166024 - protein, 197 aa, Unknown
  Bacterial polypetide isolated from the Sargasso Sea
MGAYSPTTLINDEIDLKIRKKIIEPTIRAMKEKGFPYKGILYAGLMIKNSEPKLIEYNIRFGDPECQVLMMRLKSDLLEIILSTLNNKLDKINIDWIKDYCITVVAASKGYPKNFKIKKEIKKIREIKQDSSQQLFHASTIKDENGKIFSNGGRVLSSTVLNSSLKEARNKALKILDNIEWENKYYRRDIGHKVIKK

SEQ ID NO: 166025 - protein, 278 aa, Unknown
  Bacterial polypetide isolated from the Sargasso Sea
MKILVIGQGGREHALAWKLSQSKKSKIIFVAPGNGGTSTEEKCVNVNIKADDFPSIRKFIIEKQIDLVVIGPEDPLVNGIVNYLEDLNILVFGPCSNGARLEGSKIFSKKFLFENDIPTGKASFFSDPVSAYSFLDSCVYPIVLKADGLAAGKGVLVSKNIQEAKEWVDSVMNNSLFGAAGNKILIEECLYGTELSFMGIMTPSEFIPFETSVDYKPLLDGNKGPNTGGMGCISPSPFMNDTLREKVMKKVVHPTISGLNKIGVSYYGFMYFGLMVKD

SEQ ID NO: 166026 - protein, 231 aa, Unknown
  Bacterial polypetide isolated from the Sargasso Sea
MSYFIISDGKSFKYFGSAQDHKRVGEGDTGKNTGGMGAYSPSRLFNEELEQKILEKILKPTLKGINDLGTKYKGFLYAGLMIVKDEPYLIEYNVRMGDPECQTILPTLDTDIIKIFQSCIDEKLDELEIKWINKKSLCVVLCSNGYPDKYEKNIMIKNFEKLSLNENNYLFHAGTKKKDNKIYAVGGRVLNFISLSNTYTEAKKNIYKNLEKLNWGKGFFRKDIGYKVIDK

SEQ ID NO: 166027 - protein, 200 aa, Unknown
  Bacterial polypetide isolated from the Sargasso Sea
MNLAVIGSGGREHALCYKLRETKEVKKLICIPGNAGTEKIAKNINKNLSDFEGIYKVIKKEGIHIVIVGPEEPLVNGIIDFLEKKNIKAIGPDKFSSQLEGSKAFMKNLCKENDIPTANFGVFEDLQSAQSFISNSKIPLVVKADGLAAGKGVSICKSKKDAINKTKEIIEGKFQSSKKVVLEEFIEGEELSYFVVVDKK

SEQ ID NO: 166028 - protein, 215 aa, Unknown
  Bacterial polypetide isolated from the Sargasso Sea
MKVGIVGSGGREHALCAILRKSSKISEIFCFPGNAGTSTIAQNIDLDANNFEDLKNFILKQKIDLMIIGPEKPLVEGIVDYFEKHKIKVFGPNKIAAQLEGSKIFTKKICQKYKIPTAKFGIFQNKIDSKKYLEGWNYPAVIKADNLASGKGVYICNNQKESYTAINEIFDGKFGEAKNILIEEFLEGEEMSFFIISDGKTFKCFGTAQDHKRVF

SEQ ID NO: 166029 - protein, 213 aa, Unknown
  Bacterial polypetide isolated from the Sargasso Sea
MVNVLVVGAGGREHALSWKLSTSEKIDQVYAAPGNGGTLQNVELSVTDIEGLAKFAQEKNCFTVVGPEDPLAAGIVDAFVEKGLPIFGPSKNAAKLESSKIWAKEFMKRNSIPTADFEIFDDAQKAKDFVKSYQKPVVIKADGLAAGKGVIVCKNKDEANDAIDTILTKKSFGDAGSKIIIEERIDGVEASYIALCDGKIGIPMATSQDHKRV

SEQ ID NO: 166030 - protein, 228 aa, Unknown
  Bacterial polypetide isolated from the Sargasso Sea
FIIVDKKSYHFFGSAQDHKKVGEGDTGPNTGGMGAYSPAVLLTNNLEEKIKKKIIEPTLQAMKNLGHPYEGFLYAGLMITKEEPYLIEYNIRMGDPECQVLMMKLKTDLLEIVDCTTQNNLNNLKIEWNKNNCITIVLCANGYPSNYIRDKEIKNLSTIISDENNQIFHAGTYEKDNKIFSKGGRVLNITCSAKSLREARDQSLVNLKKINWTDGFFRKDIGWRAIKK

SEQ ID NO: 166031 - protein, 171 aa, Unknown
  Bacterial polypetide isolated from the Sargasso Sea
TVRGLSKDGISFRGFLYAGLMIDSNMNPKVLEYNCRFGDPETQPIMLRLKSDLIDMIQTCFSGCISDYNVKWDNKSAMGVVISSHGYPESYETGKEIIGLETLSDRNDVKVFHSGTRSVNDSILTNGGRVLCVTALGNDLNQSNENAYRAVDQIDWDGKYFRKDIGFRVMK

SEQ ID NO: 166032 - protein, 172 aa, Unknown
  Bacterial polypetide isolated from the Sargasso Sea
MNIALIGSGGREHVLCQKIVESSKVGKVFCIPGNAGTSKIATNLNIDFLNFTLLLKIIKKNKINLVIVGPEQPLVYGMVDFLKKNKIKVFGPDKYASQLEGSKSFMKKLCKKNKIPTANFKICKKKSDVLEFLKNSKTPLVVKADGLASGKGVTICYSQNEVLKISNEIFLG

SEQ ID NO: 166033 - protein, 281 aa, Unknown
  Bacterial polypetide isolated from the Sargasso Sea
VVKADGLASGKGVFIPDSKDECIRAAESIFSGKFGNSGNVVVLEEKINGPEVSVFALCDGKRYILLPTAQDHKRLNEKDKGPNTGGMGAYSPAQLLTEEYLDQIIKEIIEPTIDELKKKNIDYRGVIYFGLMITKSGPKVIEYNCRFGDPECQTIMPLMDENFVFLLEKCSMGNLIGDEKIDIPDMVSGCVVATSKGYPYEYETGFPIKIGKIDPNNCQIFDSGTSLSKKGELLTDGGRVLSIVCQEKNFDMVFDKAYKNLKEINFNGIYFRNDIGHQVRK

SEQ ID NO: 166034 - protein, 170 aa, Unknown
  Bacterial polypetide isolated from the Sargasso Sea
MNIGLIGSGGREHALCKKLHESKLCKKIFCFPGNAGTENLAKNLEVDILNFSKLLKLIKFYKIDLVLVGPEEPLSLGIVNFLNKNKIQVFGPSKYAARLEGSKAFMKKICKKNNIPTAKFQICKNKRQVVKFLKRSKLPIVVKADGLAAGKGVTICKTKKQVLNVSEEIF

SEQ ID NO: 166035 - protein, 90 aa, Unknown
  Bacterial polypetide isolated from the Sargasso Sea
MNIALIGSGGREHALCEKISNSKIKNKIFCFPGNAGTSKIATNIDTNILNFNNLLRLLKLYKIQLVIVGPEEPLVKGLVDFLNKNKIKAF

SEQ ID NO: 166036 - protein, 260 aa, Unknown
  Bacterial polypetide isolated from the Sargasso Sea
NGLADFLRKKDFKVFGPNKDGAKLEFSKSWAKEFMQDDNIPTAKFWKVNSIEEAKKIINSSPIPLVVKADGLASGKGVFIPNSKDECIKAAETIFNGRFGNSGKVVVLEEKIQGPEVSVFALCDGKRYTLLPTAQDHKRLKEKDKGPNTGGMGAYSPAPLLTADSLDRIIKEIIEPTINGLNKRNIDYRGVIYFGLMITKSGPKVIEYNCRFGDPECQTIMPLMDQNFVFLLEKCSMGTLTGDEKINASHKVSGCVIATS

SEQ ID NO: 166037 - protein, 211 aa, Unknown
  Bacterial polypetide isolated from the Sargasso Sea
FGGLPLKNSRLKVFGPNKLASQLEGSKIFTKNLCQKYNIPTAKFGIFQNKNDAKKFLTETKYPTVIKADNLASGKGVYICNDQSEANLAVDEIFNGKFGEAKNLLVEEFLYGEEMSFFIISDGKTFKNFGTAQDHKRVLEGDKGKNTGGMGAYSPSRLISGELEKKILEKIIKPTLKGLSELGTNFKGFLYAGLMIDNNEPYLIEYNVRMG

SEQ ID NO: 166038 - protein, 299 aa, Unknown
  Bacterial polypetide isolated from the Sargasso Sea
IAKNIKIDIDDFDKIKEFVIKNKIDLLVVGPEKPLVNGIVNYFKNHNIKIFGPEKIASQLEGSKTFTKKICEKYKIPTAKFADLKNLKEANLFLKKSSFPIVIKADGLASGKGVYICENIKIAKKAVNEVFNGKFGVANNVLIEEFLIGEEMSYFIITDGKSIKKFQTAQDHKRVLEGDKGKNTGGMGAYSPSRLINKDLDEKIINKIIKPTIQALNDMGVKFTGFLYAGLMIIKNEPYLIEYNVRMGDPECQTILPKLKTDIVDIFLACCEGNLSSINIEWYKEKSLCNVLCSKGYPD

SEQ ID NO: 166039 - protein, 322 aa, Unknown
  Bacterial polypetide isolated from the Sargasso Sea
LADFLRKKAFKVFGPGKDGAKLEYSKSWAKEFMLEANIPTASFWKVNSLEEAKKIIHLSSIPLVVKADGLASGKGVFIPNSKDECFRAAESIFNGKFGNSGNVVVLEEKIQGPEVSVFALCDGKRYILLPTAQDHKRLNERDKGPNTGGMGAYSPAPLLTEDCLNIIVEEIIEPTINHLNKKNIDYKGVIYFGLMITNSGPKVIEYNCRFGDPECQTIMPLMDQNFVFLLEKCSMGNLTGNEKIDPSDMVSGCVIATSKGYPHKYKTGIPIKIGKIDSRNCQIFDSGTSLSKNGELVTDGGRVLSIVCQDKDFDMVFEKAYK

SEQ ID NO: 166040 - protein, 165 aa, Unknown
  Bacterial polypetide isolated from the Sargasso Sea
MNVLVIGNGGREHALCYGIKKSSNCKNLSCIPGSDAISEIANSININIDDHEAILKYCLENTIDLVVIGPELPLTKGLSNHLLSNSILVFGPDQMGAELEKSKKFTKDICKKLNIATAAYDVFDNYDDALTFCQKKFYPLVIKADGLAAGKGVIICETIDDAKDA

SEQ ID NO: 166041 - protein, 61 aa, Unknown
  Bacterial polypetide isolated from the Sargasso Sea
MKVLVIGSGGREHAICWGISNNKKIDKIYCAPGNAGISNIAEIVNIKTDNLEGLVNFAKKE

SEQ ID NO: 166042 - protein, 122 aa, Unknown
  Bacterial polypetide isolated from the Sargasso Sea
MNILVIGSGGREHSICWAIKKSPQVNKLYCIPGNAGISNIANCIEEKDLNNENIIKICRKFDIELVVIGPEAYLVNGLSDILIKENIKVFGPNKVASTLESSKSFTKNLCSKYNIPTAKYET

SEQ ID NO: 166043 - protein, 247 aa, Unknown
  Bacterial polypetide isolated from the Sargasso Sea
MKSVLVVGSGAREVAIARCISQSSIKNSLFCVSKDINPQIFDLCKDYFVTDLANISDIVSYSRKNKIDFAIIGPENPLANGIVNELENVGVRCVGPKKEVALIETSKTFARKIIDLCFPEKNPQRKEFGSIEGVESFIKQLGGEYVIKFDGLMGGKGVRVSGEHLKNIDEGVAYANEIINIGGKFLIEEKLVGEEFSLMSFVDGKVCKHMPVVQDHKRAYEGDAGPNTGGMGTYSFGNHSLPFLSEK

SEQ ID NO: 166044 - protein, 204 aa, Unknown
  Bacterial polypetide isolated from the Sargasso Sea
DKGPNTGGMGAYSPAPILTKKLETKIIKKIIKPTLTHLKKNKNSFTGFLYAGLMIKNGNPFLIEYNVRMGDPECQVILPRLETDFAKIISYAIKNKLKKIKLKWTKKKCMTVVICSKGYPGKYKKGIEIKNIDKINENNNNYIFHAGTERKNNKIISVGGRVLNITRLGSNYKNIRTKITKIIKTINWKSGFFRRDIGWRVIKK

SEQ ID NO: 166045 - protein, 250 aa, Unknown
  Bacterial polypetide isolated from the Sargasso Sea
ANIPTANFWKVNSLEEAKKIINSSSIPLVVKADGLASGKGVFIPNSKDECLRATESIFNGKFGNSGNIVVLEEKINGPEVSVFALCDGESYTLLPTAQDHKRLNEADKGPNTGGMGAYSPAPLLTEDHLDRIIKEIIEPTLDELIKKNIDYRGVIYFGLMITESGPKVIEYNCRFGDPECQTIMPLMDQNFVFLLEKCSMGKLIGDEIIDISDKVSGCVIATSKGYPSEYKTGIPIKIGEINLSDCQIFD

SEQ ID NO: 166046 - protein, 90 aa, Unknown
  Bacterial polypetide isolated from the Sargasso Sea
MNIGLIGSGGREHALCQKIYDSKFSKKIVCIPGNAGTSKIAENVDVDIKNFKKLYNIIKLKKIDLVVVGPEEPLVNGLVDFLSKKKIKVF

SEQ ID NO: 166047 - protein, 90 aa, Unknown
  Bacterial polypetide isolated from the Sargasso Sea
MSDKLKILVVGKGAREHALAWKVSQSSLVDDVFVAPGNGGTAEIAKNIDISETDISRLLDFVLKEKIDVTIVGPESSLEVGIVNLFRSRN

SEQ ID NO: 166048 - protein, 94 aa, Unknown
  Bacterial polypetide isolated from the Sargasso Sea
MNLAVIGSGGREHSICYKLSLSKKIGKIVCIPGNAGTKKIAENIQENISDFEAVYKIIKRKNIDIVIIGPEQPLTDGMVDYFKERSINVIGPDK

SEQ ID NO: 166049 - protein, 168 aa, Unknown
  Bacterial polypetide isolated from the Sargasso Sea
MNIGIIGSGGREHSLCFKLKESKLVKKIFCFPGNAGTETIAENINLDITDFEKIHKTCEQKKIELVIVGPEKPLVDGIVEYFKNTKIKIFGPDKISSQLEGSKTFTKKLCKKYKIPTSNFEIFNEEELALNYLSSIQYPIVVKADGLAAGKGVYICKNLDDAKKAVKE

SEQ ID NO: 166050 - protein, 221 aa, Unknown
  Bacterial polypetide isolated from the Sargasso Sea
MAVERILVVGNGGRENALAWALARSPQQPQVWISPGNGASAAIPGCRVLVHSASDAEALAGSCQTLGIDLAVIGPEAPLAAGLADQLRGHGIAVFGPGADGAQLEASKEWAKTLMQEAGVPTAGFWVASTAEQGHAIAQQQGQALVVKADGLAAGKGVTVASSLEETLAAITDCFSGRFGDAGQRVVLEECLEGPEVSVFALCDGERLVLLPPAQDHKRIG

SEQ ID NO: 166051 - protein, 118 aa, Unknown
  Bacterial polypetide isolated from the Sargasso Sea
MNIALIGSGGREHALCKKLIKSKKIKRIFCIPGNAGTLKISTNIKADLNNFNSILSIIKKNDIKLVIVGPEEPLVKGIVDFLEKNKIRVFGPNKYASQLEGSKAFMKSICKKYNIPTA

SEQ ID NO: 166052 - protein, 76 aa, Unknown
  Bacterial polypetide isolated from the Sargasso Sea
MNIALIGSGGREHAICQKIYESQLSSKIFCIPGNAGTVKIAQNIDIDILNFQKILKIIKFYKIDLVVIGPEEPLVK

SEQ ID NO: 166053 - protein, 92 aa, Unknown
  Bacterial polypetide isolated from the Sargasso Sea
MNIALIGSGGREHALCRKLKVSREISNIFCIPGNAGTAKISINLNIDFLNFKLLLKTLKSHKIQLVIVGPEEPLVRGIVNFLEKNKYKSFRA

SEQ ID NO: 166054 - protein, 61 aa, Unknown
  Bacterial polypetide isolated from the Sargasso Sea
MIVGVIGSGGREHAICHALNKSKKIDKIYCFPGNAGTTKLAENINLDLNNFKNIKDFIINK

SEQ ID NO: 166055 - protein, 233 aa, Unknown
  Bacterial polypetide isolated from the Sargasso Sea
FGEAKNVLIEEFLTGEEMSFFIVTDGNDIKLFNTAQDHKRVLEGDKGKNTGGMGAYSPSRLINIDLENKIINQIIHPTLEGLKEMKIEYSGFLYAGLMIKNDNPYLIEYNVRMGDPECQTILPRLESDLTNIILACCEKKLNEIEIKWKKDNSICIVLCSDGYPEKYKKNVLIKNLEKINTDDKNYCFHAGTNIIDKKTYAVGGRVLNFVSLSSNFSEARKKIFDSLNNLNWN

SEQ ID NO: 166056 - protein, 231 aa, Unknown
  Bacterial polypetide isolated from the Sargasso Sea
EISILAISDGEKAVALSPAQDFKRLHDNDLGPNTGGMGAYSPVPIATPSLVDNVLNNFIQPTITELRRRGIDYRGVLYAGLMMTEDGPKLLEYNVRFGDPEAQVVLPRFESSLTELLLEASRGDIRTTPAFTSDAMVTVVCATEGYPTSPRVGDPIRGIEEATHTSGVEKVYVAGIKLDKEQQPVTAGGRVLAVTGRGNTIEAARQNAYTGAEKIHWEGLHKRQDIAEAIK

SEQ ID NO: 166057 - protein, 128 aa, Unknown
  Bacterial polypetide isolated from the Sargasso Sea
MKVGIIGSGGREHALCQSLKNSNKTDKIYCFPGNAGTSNIAENININPEDFENIKNFIIDNKIDLVIVGPEKPLVEGIVDYLEKFKIKVFGPNKLASKLEGSKIFTKKICEKFNIPTAKFGIFKNKND

SEQ ID NO: 166058 - protein, 66 aa, Unknown
  Bacterial polypetide isolated from the Sargasso Sea
MKILVIGSGGREHALAWKCSTDKFVEKVYVAPGNAGTFLEEKIENISLNINNNEDVSNFCISNNMN

SEQ ID NO: 166059 - protein, 177 aa, Unknown
  Bacterial polypetide isolated from the Sargasso Sea
MNLAVIGSGGREHSICYKLKQSTKIKKLICIPGNAGTKEIAENINIDIKNFEEIHAILIKKHIDIVVVGPEEPLVNGIVDFLINRGVKVLGPNKFASQLEGSKAFMKDLCKKNDIPTARFGVFENYESAVEFLNKNKTPIVVKADGLAAGKGVSICKNMDEAKEKIKEIVNGKYKSS

SEQ ID NO: 166060 - protein, 322 aa, Unknown
  Bacterial polypetide isolated from the Sargasso Sea
RCTEIYCSPGNAGTSMLATNLDIDINSNRKIIEKCKEYSIDIVVVGPEKQFEQGLTDALKEKNFLVFGPSREASQLETSKSFTKIMCKYKNIPTANYEIFSGENDAKEFLRSQPKPYVIKADGLAAGKGVLVSSDFEESTQFISSIFDGKIGTGKNTVIIEEYLEGQEMSVFFAIDRNTVKCIGSAQDYKRAYDKDHGPNTGGMGAFSPSPLLTKGNLDKIIRRIIKPTIEYMKEIGSEFSGILYAGLIFNKGEPKLIEYNVRFGDPECQALCIRLGAQILDIYFNGAKNELSDLSINEANDSAITVICCRKGLSQQSKEWL

SEQ ID NO: 166061 - protein, 58 aa, Unknown
  Bacterial polypetide isolated from the Sargasso Sea
MKVLIIGSGGREHALAWKCAQDDIVKHIFVCPGNAGTHLEDKVSNIELNLNEFSSIEK

SEQ ID NO: 166062 - protein, 70 aa, Unknown
  Bacterial polypetide isolated from the Sargasso Sea
MKVLVIGSGGREHALAWKLSKSNLVSEIFVAPGNGGTEIEESIKNIDIDSNDLDGLLDFAEQSSIDLTIV

SEQ ID NO: 166063 - protein, 278 aa, Unknown
  Bacterial polypetide isolated from the Sargasso Sea
LVLGSGAREHSICWAVKKSKACKKLFCSPGNAGIEKVANCKFINLKKKRHILNFCKKNSIDLVIVGPEEYLADGVSDYLQIRGIKTFGPIKKAAKLETSKSFAKSFLLKNKILTPKYRKFTTSSKALNYLNSLNFPIVIKADGLAAGKGVVICKNFSQAEQTIKLMMEKKKFGDAGKKIIIEEFIDGFEISYFSFFDKKTFLPLGYALDHKRAFDNDLGPNTGGMGCFTPSKKVSKNLEKKIIKNIIEKTYLGLKKENFTYRGILFFGLMIKNNEPYV

SEQ ID NO: 166064 - protein, 325 aa, Unknown
  Bacterial polypetide isolated from the Sargasso Sea
IDMLDFKKLLKVIKFYKISLVIVGPEEPLVKGVVDFLIKNKIKVFGPNKYAAKLEGSKAFMKSLCKKNNIPTAEFKICRNKNDVNNFLKKNIFPLVVKADGLAAGKGVTICKNKKQVLKVSDEIFKGKFKSSKKLVLEEFLEGEEASYFLLVDKKSFKFFGSAQDHKKVGEKDTGPNTGGMGAYSPAKIITQDLEKKIIKKIVSPTLKALKQKKKNYTGFLYVGLMIKNNEPFLIEYNVRMGDPECQVILPRLNTDLVKIISYAVKNKLNTFDIKWKKIKCMTIVLCSKGYPRKYKKLIKINNLKNIKLKKNSFIFHAGTKYINK

SEQ ID NO: 166065 - protein, 251 aa, Unknown
  Bacterial polypetide isolated from the Sargasso Sea
FFARHAIPTAKYGNFSEVEAALEYLGTCSFPIVVKASGLAAGKGVLICQTLEEAEAATRDMLAGSSFGESGREVVIEEFLDGEEASLHLICSGESYLALPISQDHKKVGEGDQGLNTGGMGAYAPTRLVSPEMLHGYEETIVRPTLSGLRAEGIEFRGTLYVGLMLTADGPKVLEFNVRFGDPETQVILPLLADDLVPLLLASARGDELPEKVNFKDASAMVVVLASAGYPESYPKGEPISVPEVLPEGSQ

SEQ ID NO: 166066 - protein, 107 aa, Unknown
  Bacterial polypetide isolated from the Sargasso Sea
MIICIIGSGGREHAICKTISTSPKVSKIYCLPGNAGTKELAENINLDINDFEKILKFLKESKVDLVIVGPEKPLVNGIVDYLESNNIKVFGPRKIPSQLEGSKTFTK

SEQ ID NO: 166067 - protein, 309 aa, Unknown
  Bacterial polypetide isolated from the Sargasso Sea
MKLVKKKFLQFCKNQNISLVIIGPEQFLEEGFSDFLTNNGILVFGPSKKASKLEYSKSFAKKFLKKNKIPSANFKEFSSYSLAEKYLKEVQFPIVIKADGLAAGKGVVICNNLSEAKKGLKEIMITKKFGKAGKKILIEEFLQGFEVSYFVLFDKNSFSVLNYALDHKRAFDFNKGPNTGGMGAFTPSNKVDNNLEKIISDRIVKKTFEGLKKDKIIYRGILFIGLMITKNGPYVIEFNVRFGDPECQVLMRNLDTDILKIVKAVAKDKLNTVKIKNKKLCTICVVIASKGYPNTYKINKQIKNIKEAQ

SEQ ID NO: 166068 - protein, 118 aa, Unknown
  Bacterial polypetide isolated from the Sargasso Sea
MIICIIGSGGREHAICKTISISSKVNKIYCLPGNAGTQRLAENIDLDINDFEKVLKFLKESKVDLVIIGPEKPLVNGIVDYLENNNITVFGPRKIPSQLEGSKTFTKNICKKYNIPTA

SEQ ID NO: 166069 - protein, 110 aa, Unknown
  Bacterial polypetide isolated from the Sargasso Sea
MKVGIIGSGGREHAICQSLKISNKFTEIFCFPGNAGTSLIAQNVSLDLNNFEKIKNFILKKKIDLIIIGPEKPLVDGLVDYLEKFKIKIFGPNKIASQLEGSKIFTKELC

SEQ ID NO: 166070 - protein, 309 aa, Unknown
  Bacterial polypetide isolated from the Sargasso Sea
KLNFFKIDLVVMGPEIPLANGLADFLRKKNFKVFGPNKDGAKLEFSKSWAKEFMQDANIPTANFWKVNSLEEAKKIINSSSIPLVVKADGLASGKGVFIPNSKDECFKAAETIFNGKFGNSGNVVVLEEKIQGPEVSVFALCDGKRYILLPTAQDHKRLNEKDKGPNTGGMGAYSPAPLLTEDYLERIIKEIIEPTINELNKRNIDYRGVIYFGLMITKSGPKVIEYNCRFGDPECQTIMPLMNQNFVFLLEKCSMGSLTGYERINTSDKVSGCVIATSEGYPNEYKTGYQINIGKIDSNDCQIFDSGT

SEQ ID NO: 166071 - protein, 91 aa, Unknown
  Bacterial polypetide isolated from the Sargasso Sea
MNLAVIGSGGREHAICFKLKQSRKIKKLICIPGNAGTQKIAKNIKENISNFNGIYKIIKKQKIDIVIVGPEQPLVEGLVNYLNEKKVKVFG

SEQ ID NO: 166072 - protein, 189 aa, Unknown
  Bacterial polypetide isolated from the Sargasso Sea
PFVNNALDTTIKENVIEPTVRGLSKDGISFRGFLYAGLMIDSNMNPKVLEYNCRFGDPETQPIMLRLKSDLIDMIQTCFSGCISDYNVEWDNKSAMGVIISSHGYPESYETGKEIIGLETLSDRNDVKVFHSGTRSVNDSILTNGGRVLCVTALGNDLNQSNENAYRAVDQIDWDGKYFRKDIGFRVMK

SEQ ID NO: 166073 - protein, 91 aa, Unknown
  Bacterial polypetide isolated from the Sargasso Sea
MKILVIGSGGREHALAWKCSTDKFVEKVYVAPGNAGTFLEEKIENISLDINNNEDVSNFCVSNNIELVIVGPEDPLVNGLVDFLESKNIKV

SEQ ID NO: 166074 - protein, 194 aa, Unknown
  Bacterial polypetide isolated from the Sargasso Sea
MNVGIIGSGGREHAICYMLNKSKKVSKIFCFPGNGGTSLIAQNVNLNPDNFSELEKHCIEKEIKLLIVGPEKPLVNGIVDYFKGKSIKVFGPDKISSKLEGSKIFTKKICQENNIPTSNFKICKNLNQAIDYLKKCNFPIVVKADGLASGKGVYICKNFDDAKIASEEIFNGKFGPAEQILVEEFLEGEEMSYF

SEQ ID NO: 166075 - protein, 210 aa, Unknown
  Bacterial polypetide isolated from the Sargasso Sea
MCLKITLAFFLIINKLYNIIFKMNIGLIGSGGREHALCQKIFESKYSKQIICFPGNAGTSKIARNVNVDLLDFKKVLSLIIFFKIDLVIIGPEEPLVKGLSDYLRKNNIKVFGPSKYSAKLEGSKSFVKQLCKENKIPTANFKICNKVKDVENFLKINKFPIVVKADGLAAGKGVVICKSKKQVIKISNEIFKGKFKSSRKLVLEEFLTG

SEQ ID NO: 166076 - protein, 261 aa, Unknown
  Bacterial polypetide isolated from the Sargasso Sea
NDAIDTILTNKTFGDAGSKIIVEERIDGIEASYIALCDGKIGIPMATSQDHKRIFDDDRGPNTGGMGAYSPTPIIDDHLASEIQEKIIDKTIVSMNKEGIEFKGFLYAGIMIKDGMPYVLEYNVRMGDPECQPILMRLDSDLYEYLLASYEGNLKDLPKISWKQEYAVCVVLASKGYPESYPKNDKITGFENIPENSFVFHAGTKKEDENILSNGGRVLGVAALGLTLQNAIDNAYSACQKLDWKNKYHRNDIGKKGLSYL

SEQ ID NO: 166077 - protein, 242 aa, Unknown
  Bacterial polypetide isolated from the Sargasso Sea
KIVIEEGLVGPEISILAISDGKKAVALSPAQDFKRLHNNDFGPNTGGMGAYSPVPIATPSLVDDVLNNFIQPTITELRRRGIDYRGVLYAGLMITEGGPKLLEYNVRFGDPEAQVVLPRFESSLTDLLLEASRGDIRTTPVFTSDAMVTVVCASEGYPSSPRVGDRIRGMEEATNTGGVEKVYAAGIKLDEEQQPVTAGGRVLAVTGRGNTIEEARQNAYTGAGKIHWEGLHKREDIAEAIK

SEQ ID NO: 166078 - protein, 92 aa, Unknown
  Bacterial polypetide isolated from the Sargasso Sea
MNIGIIGSGGREHALCFKLSKSKKVKRIFCFPGNAGTEKIAINIDVDLSDFRQLKKIILEKKIKLIVVGPEKPLVDGIVDYLEKNNILVFGP

SEQ ID NO: 166079 - protein, 213 aa, Unknown
  Bacterial polypetide isolated from the Sargasso Sea
MKVGIIGSGGREHAICQSLKISNKFKEIFCFPGNAGTSLLAKNINLDLNNFERFKNYILEKKIDLIIIGPEKPLVDGLVDYLEKFKIKVFGPNKIASQLEGSKIFTKELCQKYKIPTANFRICKNKFDAKEFLENTNYPIVVKADNLASGKGVYICENKTEASNAVNEIFDGKFGKANKLLIEEFLKGEEMSFFTIHDGQIFKNFGTAQDHKR

SEQ ID NO: 166080 - protein, 248 aa, Unknown
  Bacterial polypetide isolated from the Sargasso Sea
MKIAILGNGGREHAIADKISESPKLSKLYCLPGNAGTNLIAENVNLDIYDFEKLGKFVDENQIDLVIVGPEKPLVDGVVDFLKKKKVKVFGPNKISSQLEGSKIFTKKICEKYKIPTAKFGIFDSLKSATDYLEKVNKPIVVKADGLAGGKGVYICENTASAKNAVNEIFKGKFGIANQVLIEEFMQGEEMSYFVISDGKTFRKFNTAQDHKRVGEGDKGKNTGGMGAYSPSGLINKDLDLKIIEKIV

SEQ ID NO: 166081 - protein, 53 aa, Unknown
  Bacterial polypetide isolated from the Sargasso Sea
MKVGIIGSGGREHALCQSLKNSKKIDEIFCFPGNAGTALIAKNITINLENFEI

SEQ ID NO: 166082 - protein, 276 aa, Unknown
  Bacterial polypetide isolated from the Sargasso Sea
ANHPIVIKADNLASGKGVYICKNLNESTNAVEEIFGGKFGYAENILVEEFLEGEEMSYFIISDGKNFRNFGTAQDHKRVGEGDTGKNTGGMGAYSPSRLFNNELNQKILNKIIKPTLKGLSDLGTDYIGFLYAGLMIKNNEPYLIEYNVRMGDPECQTLLPILNTDFLDILIACVEQNLENINIEWANKKSLCVVLCSKGYPDKYEKKIKINNLNALKLDNNNHLFHAGTVIKNNEILAVGGRVLNFISLSENLSNARENIHNNLNKLNWVEGFYR

SEQ ID NO: 166083 - protein, 387 aa, Unknown
  Bacterial polypetide isolated from the Sargasso Sea
NAGTSQIAKNINLKTNNFRNIKEYILQNEIDLIIVGPEKPLVDGIVDYLEKYNIKVFGPNQIASKLEGSKIFTKKICKKYNIPTANFGVFKNVNNSRKFLEMSNFPVVVKADNLASGKGVYICKNFDESLVAIKEIFDGKFGKAKKVLIEEFLEGEEMSYFIISDGVSIKNFGTAQDHKKVLEGDKGKNTGGMGAYSPSRLITNKLEKKIIKKIIKPTLLAIKELGTSYKGFLYAGLMIIKNEPFLIEYNVRMGDPECQTILPILKTDLTEVILACCEKKLHKTKIEWHKKKSICIVLCSNGYPDKFSKNIEIRGINKIKTNKNNFIFHAGTSRQNGKIFAVGGRVLNFISISNDFIMARKKIINNLKKLNWSKGFYRKDIAFKVIE

SEQ ID NO: 166084 - protein, 269 aa, Unknown
  Bacterial polypetide isolated from the Sargasso Sea
MKVCVVGSGGREHAFVETLSRDAEVIITPGSLAVPESTDKPPIEVDADLFVIGPEIPLVDGLADELRSRGHKVFGPGSDGALLEGSKAWMKDVVHAAGVPTARYGSFESSQVDRAIEFLSSMSPPFVIKTDGLAGGKGVLVTDNYSDAKADIETKLAGLSFGDAGRRVIIEEGLRGPELSLFAICDGQKAVLVPTSAQDHKRLGNGDLGPNTGGMGCYSPIPEIQRSQLDDLMEIAVHPTVEELKNRNIDYRGVLFAGFMMTEDGPKNK

SEQ ID NO: 166085 - protein, 305 aa, Unknown
  Bacterial polypetide isolated from the Sargasso Sea
IPTSNFKIFKSLNQTIDYLKNSHFPLVIKADGLAAGKGVYICKNFNDAKIASEEIFNGKFGDADQILIEEFLDGEEMSYFIVTDGKNFKFFGSAQDHKRVGEGDTGKNTGGMGCYSPSRLLSKNLESKIKTKIIEPTLNAIKEYGGVYKGFLYIGLMIKNNDPYLIEFNVRMGDPECQTILPTLNVDLFDVLISCCDGTLNKTNINFSKSKSICVVLCSRGYPEKFENNVKIKNLEQINLLQNQNIFHAGTLKTKTGIVSNGGRVLNFVSTSDNFSKCRDETINLIKKLNWENGYFRRDIGHKVI

SEQ ID NO: 166086 - protein, 443 aa, Unknown
  Bacterial polypetide isolated from the Sargasso Sea
MGINTPSSRNFIRLENILIIGNGGRENSLAWAIQKNEFVKKVYLIPGNAGSERINKCERIKIDINNKNELVEKLDFFKIDLVVIGPEIPLANGLADFLRKKDFKVFGPNKDGAKLEFSKSWAKEFMQEANIPTANFWKVNSLEEAKKIINSSSIPLVVKADGLASGKGVFIPNSKDECFKAAETIFNGKFGNSGNVVVLEEKIQGPEVSVFALCDGKRYTLLPTAQDHKRLNEKDKGPNTGGMGAYSPAPLLTEDYLDRIIKEIIEPTIDELNKKNIDYRGVIYFGLMITESGPKVIEYNCRFGDPECQTIMPLMDQDFVFLLEKCSMGSLTGDEKITTSDKVSGCVIATSKGYPHEYKTGYQIKIGKIDLNDCQIFDSGTSFSKSGKLLTAGGRVLSIVCQDKDFDTAFEKAYKNLKEIHFEGIYFRNDIGHQVRKNFSKEN

SEQ ID NO: 166087 - protein, 239 aa, Unknown
  Bacterial polypetide isolated from the Sargasso Sea
MAWKCSTDKFIEKVFVAPGNAGTLLEEKIENISLDINNNEDVSSFCISNNIELVIVGPEDPLVNGLVDFLESKNIKVFGPRKGAAQLEGSKTFAKDFFIKYGIPTANYQSFDNHHDALKYLDKIDFPSVVKADGLAAGKGVIICDDREAAEKALEDIFESNAFGDAGNRVVIEDFLNGEEASFIAVVSDDQIIPLATSQDHKAVGDGDVGLNTGGMGAYSPAPIVTDEIHNRVIDEVML

SEQ ID NO: 166088 - protein, 176 aa, Unknown
  Bacterial polypetide isolated from the Sargasso Sea
KVIEPTVRGLSQDGIAFRGFLYAGLMIDYDLSPKVLEYNCRFGDPETQPILLRLKSDLIDMIQTCFSGNISNYDTEWDEKSSIGVVMSSSGYPESYETGKEISGLDTLYDKNDIKVFHSGTRIENQNILTNGGRVLCVTALGDDLSESYQNAYSVIEQINWDGKYYRKDIGFRVMK

SEQ ID NO: 166089 - protein, 238 aa, Unknown
  Bacterial polypetide isolated from the Sargasso Sea
GEEASYFLLVDKNNFKFFGSAQDHKRVGEKDTGPNTGGMGAYSPAPIINKNLEKKILKKIVKPTLSALRKKKRAYKGFLYVGLMIKNNEPYLIEYNVRMGDPECQVILPRLKTDLVKIILSSVNDKLKYTKILWHKKKCMTVVLCSKGYPGKIKKNIEIENLKKINNEKNTFIFHAGTKIAFDKIYTNGGRILNFTGVGSNFSNIRAKIIKLIKKLNFKNGFFRKDIGWKVINKNADY

SEQ ID NO: 166090 - protein, 102 aa, Unknown
  Bacterial polypetide isolated from the Sargasso Sea
MINVLIVGSGGREHAFTWKASQSNLVEKVFVAPGNAGTSLEPKAENIDISASDIDALISFSKKENIDLVIVGPEDPLVNGITNEFKKVGIKCFGPEISGASL

SEQ ID NO: 166091 - protein, 200 aa, Unknown
  Bacterial polypetide isolated from the Sargasso Sea
KNTGGMGAYSPSRLESEKLEKKIIEKIIEPTLKGLKDINNKFKGFLYAGLMIIDDEPFLIEYNVRMGDPECQTILPRLKTDFLDIVTATVNENLKDINLEWFEEKSICIVLASKGYPDKYENNLEINGLKEIKLKNNEYIFHAGTKINNSKIHSNGGRVLNFVIKSDNLKIGRDQAISLIKKLNWQNGYFRKDIGYKIIS

SEQ ID NO: 166092 - protein, 199 aa, Unknown
  Bacterial polypetide isolated from the Sargasso Sea
MQIDTILTKKTFGDAGSKIIIEERIDGIEASYIALCDGNVGIPMATSQDHKRIFDDDKGPNTGGMGAYSPTPIIDDKLAFQIQEKIIDKTIASMNEEGINFKGFLYAGIMIKDGSPYVLEYNVRMGDPECQPILMRLDSDLYEYLLASYEGKLKDLPKLSWKQEYAVCVVLASKGYPKSYTKNDKITGFENIPENSFVF

SEQ ID NO: 166093 - protein, 159 aa, Unknown
  Bacterial polypetide isolated from the Sargasso Sea
MVVGSGGREHALTWKLSSSDNVEQVFTAPGNGGTPNNVSISVDDIDGLVKFAQEKNCFTVVGPEDPLANGIVDTFHEKNLPIFGPSKNAAQLESSKIWAKEFMKRNSIPTADFEIFDDAQKAKEFVKSYDKPVVIKADGLAAGKGVIVCDSKDEANDAN

SEQ ID NO: 166094 - protein, 118 aa, Unknown
  Bacterial polypetide isolated from the Sargasso Sea
MKVGIIGSGGREHAICQSLKNSNKTDKIFCFPGNAGTKEIAENINLDLENFESLKNFILDKKIDLIVVGPEKPLVDGLVDYLENFKIKVFGPNKVASQLEGSKIFTKKLCEKFQIPTA

SEQ ID NO: 166095 - protein, 242 aa, Unknown
  Bacterial polypetide isolated from the Sargasso Sea
MLGRAPLVDGITDYLEKFKIKVFGPNKIASQLEGSKIFTKNICKKYNIPTANFGVFENETESNKFLDKSKFPIVIKADNLASGKGVYICENKKQSLEAIKEIFDGKFGKAKNVLIEEFLKGEEMSFFIISDGDNYQNFGTAQDHKRVLEGDKGKNTGGMGAYSPSRLINNELEKKILDKIINPTLKAIKDLGTVYKGFLYAGLMIINNEPFLIEYNVRMGDPECQTLLPKLDTDLFEILNSC

SEQ ID NO: 166096 - protein, 169 aa, Unknown
  Bacterial polypetide isolated from the Sargasso Sea
MKLGIIGSGGREHALCEALSKSKKVDKIYCFPGNAGTSKIAENILINADDFNALKKFILSENIQLIIVGPEKPLVEGIVDFFESINIPIFGPNKFASQLEGSKIFTKKICEKYKIPTAKFGIFENIDKAKSFIGETKFPLVVKADGLAAGKGVYICENKDNASNAIEEI

SEQ ID NO: 166097 - protein, 92 aa, Unknown
  Bacterial polypetide isolated from the Sargasso Sea
MRVLVIGSGGREHALAWKLSLSDRVTEVLVAPGNAGTALEAKVRNLEVDTNDFTGLIDRALAERVDFTLVGPEIPLVEGIVDAFQGAGLRIF

SEQ ID NO: 166098 - protein, 311 aa, Unknown
  Bacterial polypetide isolated from the Sargasso Sea
KKYKIPTAKFGIFKNKQDTLQFIRNKKMPLVIKSDGLAAGKGVYICKNLKYARKAITEIFGGKFGKANQILVEEFLGGEEMSYFIISDGINYKCFNTAQDHKRVGEKDTGKNTGGMGAYSPSGLINKVLEKKIIKKIIKPTLIAIKEMKQHYKGFLYAGLMIKNNEPYLIEYNVRMGDPECQTILPLLKTDLLDLIIACCNSKLLNKKVEWYKKKSLCVVLCSNGYPENYKKNIEIPKLNKLKIKKNNYLFHAGTKEIENKVYAIGGRVLNFVSISDDFLKSRNEIINQLKKLNWNRGFYRSDIGYKVIKK

SEQ ID NO: 166099 - protein, 350 aa, Unknown
  Bacterial polypetide isolated from the Sargasso Sea
KPLVDGVVDFLTNKGIMVFGPNKISSQLEGSKIFTKKICEKYKIPSAQFGVFDSREDAHNYLEKANKPIVVKADGLAAGKGVYICEDTDSAKSAVDEIFNGKFGKANQVLIEEFLKGEEMSYFVISDGKTFKKFNTAQDHKRVGEGDKGKNTGGMGAYSPSGLINDELDIKIIGNVIKPTLKAIEDMGEKYKGFLYVGLMIKDNNPYLIEYNVRMGDPECQTILPLLNSDLLELMLSCCEGNLENQKINWKNKKSMCIVLCSDGYPDTYKKNVEIPNLEKITKNNSTFVYHAGTELIDNKVYATGGRVLNFVNISEDLKKSRDSVINEIKNLGWTNGFYRKDIGFRIIDK

SEQ ID NO: 166100 - protein, 443 aa, Unknown
  Bacterial polypetide isolated from the Sargasso Sea
MGIHSPSPKSFTRLENILIIGNGGRENSLAWAIQKNELVKKVYLVPGNAGSERINKCVRIKIDINNENELVEKLDFLKIDLVVIGPEIPLSNGLANLLRKNDFKVFGPNKDGAKLEFSKSWAKEFMQKANIPTANFWKVNSIEEAKKIINSSSIPLVVKADGLASGKGVFIPNSKDECLKAAESIFNGKFGNSGNIVVLEEKIQGPEVSIFALCDGERYTLLPTAQDHKRLNEKDTGPNTGGMGAYSPAPLLTEEYLDKIIKEIIEPTINELNKRNIDYRGVIYFGLMITKSGPKVIEYNCRFGDPECQTIMPLMDQNFVFLLEKCSMGNLTGDEKISTSDKVSGCVIATSKGYPHEYKTGFQIKLGKIDSNDCQIFDSGTSLSTNGKLLTDGGRVLSIVCQDKDFNMVFERAYKNLKEIHFEGIYFRNDIGHQVRKNFSKDN

SEQ ID NO: 166101 - protein, 163 aa, Unknown
  Bacterial polypetide isolated from the Sargasso Sea
WNLFRGFLYAGLMIDSNLKPKVLEYNCRFGDPETQPIMLRLKSDLIDMIQSCFSGDIGNYEIEWDKRSALGVVMSSNGYPESYETGKVISGLDALVGKNDTKVFHSGTRIESEGVFTNGGRVLCVTALGDDLNQSNKNAYLAINEIDWDGKYYRRDIGFRVMK

SEQ ID NO: 166102 - protein, 263 aa, Unknown
  Bacterial polypetide isolated from the Sargasso Sea
DEAVIEAKKILNGKFKSSKKVVLEEFLEGEELSYFVLVDKNSYSFFGSAQDHKKVGEGDTGLNTGGMGAYSPARNLTDVLETKIRNKIIEPTLNAMKALGYPYTGFLYAGLMIKNDEPYLIEYNIRMGDPECQVLMMKLKTDLLSIIEATTNNNLSKLKIEWDNKKCITIVLCAKGYPGEYVKDKEIKNLSKIHLDKNNQIFHAGTYEFNGKVFSKGGRVLNVTSSSKDLDEARNGSLSNLKKINWDSGFFRKDIGWRAIKKK

SEQ ID NO: 166103 - protein, 226 aa, Unknown
  Bacterial polypetide isolated from the Sargasso Sea
GHSLCYKLKESSLINEIFRFPGNAGTELIAENINLDVSDFEKIHKICEEKKIELIVVGPEKPLVNGIVDYFKNTKIKIFGPDKIGAQLEGSKTFTKKLCKKYKIPTSSFEIFQEKKLALNYLASVKYPLVVKADGLAAGKGVYICKNQVDANLAVKEIFGGRFGKADCVLVEEFLNGEEMSYFIVSDGVTHKFFQTAQDHKRVGENDTGKNTGGNGRILSLKALYK

SEQ ID NO: 166104 - protein, 125 aa, Unknown
  Bacterial polypetide isolated from the Sargasso Sea
MKIAILGSGGREHALVNQMSLSKKTTKIYCIPGNAGTCHLAENVNLNLDNFESIYDFILKNKIELVVVGPEKPLVDGIADFLQEKKIKVFGPNKVLSQFEGSKTFTKNVCKKYNIPTAKFNILKN

SEQ ID NO: 166105 - protein, 406 aa, Unknown
  Bacterial polypetide isolated from the Sargasso Sea
MSENILLVGSGAREHSIAKAINRSTNLNDMFCLASNMNPGIASLCKEFIVDDFNDPETVSSYATKNNISMAVIGPENPLQKGVVDSLWNLGVGVVGPKKDLAQIETSKTFTRNLLKKHNIPGGPKYKTFISLDGVKDFLKELDENYVVKFDGLAGGKGVKVSGDHLASHEEALEYCKELISKSQPFIIEEKFIGQEFSLMSFSDGKTLKHMPAVQDHKRAYENDEGPNTGGMGTYSDADHSLPFLQKKDIEEAHEINQATTNALIKEFGYGYKGILYGGFMATKDGVKLIEYNARFGDPEAMNVLSILETDFIKICHGIISEKLDQVDVRFKNKATVCKYAVPEGYPNEPIKGAEINLSKIKNQESLFYASVDVQNGVLVEAGSRTIAVIGIDNTIKGAEKIAEKE

SEQ ID NO: 166106 - protein, 150 aa, Unknown
  Bacterial polypetide isolated from the Sargasso Sea
KNKKLKVLEFNCRFGDPETQPIMMRLKSDLASLCDQACDDNLIEQTLEWDSRKAIGVVLAARGYPHGYAKGKDITNIPSEKDDLKIFHAGTKIESNSLKSNGGRVLCVTSLGDSVESAKNKAYDAISKIVWEDAFYRKDIGYRAIERERK

SEQ ID NO: 166107 - protein, 223 aa, Unknown
  Bacterial polypetide isolated from the Sargasso Sea
MKVGIIGSGGREHAICQTLKNSDKIEKIFCFPGNSGTQKIAENININLENFENLKNFIFEKKIDLIVIGPEKPLVEGLVDFLESFNIKVFGPNKVASQLEGSKIFTKKLCQKFKIPTAQFGIFENKDSAKEFLKKTKFPTVVKADNLASGKGVYICNKESEALIAINEIFGGKFGKAKNLLIEEFLQGEEMSFFTIHDGNTFKTFDTAQDHKRVLEGDMGKNT

SEQ ID NO: 166108 - protein, 152 aa, Unknown
  Bacterial polypetide isolated from the Sargasso Sea
IDKHGNPKVIEFNCRFGDPEAQPVMYRLRSDLLEACEKAVSGELKDYHLEFDERVALGVVMAAGGYPVEYESGDIIEGLDVAASNTKVFHAGTIEVEGEIKTSGGRVLCVVGAGESVASAAESAYARVNNIKWKDHYFRRDIGHRAIKRQSD

SEQ ID NO: 166109 - protein, 159 aa, Unknown
  Bacterial polypetide isolated from the Sargasso Sea
MKIAILGSGGREHAIAFSISQSKKVKKIYCIPGNAGTSEICENVFIDINKFKEIQKFLNKNNIDLVIVGPENPLVNGIVDYLEKSNIKTFGPNRNASQLEGSKIFTKNLCKKYNIPTANFGVFKTIKDSKIFLENSQHPIVIKADNLAAGKGVYICEKF

SEQ ID NO: 166110 - protein, 231 aa, Unknown
  Bacterial polypetide isolated from the Sargasso Sea
MSYFVISDGKTIKNFGTAQDHKRVNEGDKGKNTGGMGAYSPSRLINKELDGKIIEKIIKPTLKGLQDQNIKYKGFLYAGLMIVNNEPYLIEYNVRMGDPECQTILPMLYTDLLEIIESTIDEKLENIEIQWLGKKSLCVVLCSNGYPDHYEKNIEIKNLNKLNLDKNNYLFHAGTEKIDEKILAIGGRVLNFTSLSKDYGESRKNIHENLKKLNWNNGFYRKDIGYKVIDK

SEQ ID NO: 166111 - protein, 153 aa, Unknown
  Bacterial polypetide isolated from the Sargasso Sea
APDGSAKVLEYNCRFGDPETQPIMMRLQSDIVELCLAATRGELDKVSAEFDSRAAVGVVMAAGGYPDAYNKGDVIDGLTLGDVNGKVFHAGTEMKDGHVVTNGGRVLCATALGHSVTEAQQAAYALVDAIHWDDVYFRTDIAYRAIAREQGKA

SEQ ID NO: 166112 - protein, 236 aa, Unknown
  Bacterial polypetide isolated from the Sargasso Sea
FCDGSSLSHMPAVQDHKRAYEGDTGPNTGGMGTYSDSDHSLPFLEKSHILAAQKINQMTADALRDKFEEGYKGILYGGFIATKDGVKVIEYNARFGDPEAMNVLSILETDLIDICSAIINEELNTIDIRFNNSATVCKYAVPEGYPDDPIKNKEIDVAEVADTDKLFYASVELKNDKLFEIGSRTVAVVGAGDSIWEAEEIAEKEVSKIKGPLFHRKDIGTTELIQKKINNMHSLK

SEQ ID NO: 166113 - protein, 382 aa, Unknown
  Bacterial polypetide isolated from the Sargasso Sea
IAINVDIDILDFKKVLKVIKKNHIDLVVVGPEEPLVKGLIDFLKKNKVKAFGPNKFASKLEGSKAFMKKLCKTKKIPTANFKICKNNVQVLKFLKESKLPIVVKADGLAAGKGVFICKNKTEVLKITTEIFKGKFKSSNKLILEEFLEGEEASFFILADNNTFKVFGTAQDHKRVGENDTGLNTGGMGAFSPSVIINKEIQKKIINKIVKPTLLALKNKKKPYKGFLYVGLMIKNNEPYLIEFNVRMGDPECQVILPRLKSDLVKIFLNTIKNKLNKTNISWSKKKCMTIVLCSKGYPGKYQKDKPIKNLNKIKLKKNNFIFHAGTKFKNSKLVSNGGRVLNITSTGSNFRNIRKGIIKIIKKINWKYGFFRRDIGWKVITK

SEQ ID NO: 166114 - protein, 105 aa, Unknown
  Bacterial polypetide isolated from the Sargasso Sea
IKFDSRAAVGVVLAAGGYPDDYRKGDVISGLPTEDSREAKVFHAGTVLKDGQVLTAGGRVLCATALGANVTAAQKAAYELTDKVQWDGVFSRRDIGYRAIKREKN

SEQ ID NO: 166115 - protein, 165 aa, Unknown
  Bacterial polypetide isolated from the Sargasso Sea
GSPYVGFLYAGLMIDKHGNPKVIEFNCRFGDPEAQPVMYRLRSDLLEACEKAVSGELEDYHLEFDERVALGVVMAAGGYPIEYETGDIIEGLHLASSNTKVFHAGTIEVEGEIKTNGGRVLCVVGAGESVASAAELAYARVNSIKWKDYYFRGDIGHRAIKRESD

SEQ ID NO: 166116 - protein, 214 aa, Unknown
  Bacterial polypetide isolated from the Sargasso Sea
SQDHKRVFDNDEGPNTGGMGAYSPTPIMDEKLETEIQEKIIDKTIHAMRDEGFEFKGFLYAGIMIKDGTPYVLEYNVRMGDPECQPILMRLDSDLYDYLHASSEGKLSELPEISWKNQYSVCVVLASKGYPSSYPTGDEITGFENIPSDALVFHAGTKRQDNKIKSNGGRVLGVTALGSSLQDAINNAYDACNHIRWTNKYHRTDIGKKGLSNL

SEQ ID NO: 166117 - protein, 391 aa, Unknown
  Bacterial polypetide isolated from the Sargasso Sea
IPGNAGTAEIAENISIELNDFEKIYNFINENNIELVIVGPEEPLVNGIVDFLENLNIKVFGPNKIASQLEGSKIFTKNLCKKYKIPTAEFSTFKNEKDSKNYIERAKHPLVIKADNLAAGKGVYICQEKKDSYKAVEEIFDGKFGLAKNILFEEFLVGEEMSYFIISDGKNIKNFGTAQDHKRVGEGDKGKNTGGMGAYSPSRLINKELEKKILSKIIKPTLNALYDNGTSYKGFLYAGLMIVNNEPYLIEYNVRMGDPECQTILPTLNTDLVDIFLCCVNQKLDDIKIEWLNKKSLCVVLCSNGYPEKYEKNIEINNFDKLNLDSNNYLFHAGTKINKSKVLAIGGRVLNFISLSDHFLSARENIHNNLEKLNWDKGFYRKDIAFRVIKK

SEQ ID NO: 166118 - protein, 255 aa, Unknown
  Bacterial polypetide isolated from the Sargasso Sea
VKEIFDGKFGKADQIVIEEFLEGEEMSFFVISDGKSFKQFNTAQDHKRVGEDDTGKNTGGMGAYSPSALINKDLEKKIIDKIIEPTFRAIRDFGEEYIGFLYAGLMIKNNEPFLIEYNVRMGDPECQTILPLLKSDFLDIINACCEQKLNQSNVDWSDKKSLSIVLCSKGYPESYEKNVEIKNLNKIKNNKNNFMFHAGTISKNDKIFANGGRVLNFVSISESYLEARKSAIDKIKDLNWGGGFFRKDIGFKAID

SEQ ID NO: 166119 - protein, 243 aa, Unknown
  Bacterial polypetide isolated from the Sargasso Sea
KILVEEFLNGEEMSFFIISDGKNFKLFKTAQDHKRVFEGDEGKNTGGMGAYCPSGLINDTLEKKIIEKIILPTFRAIKEMGEKYKGFLYAGLMISNNEPFLIEYNVRMGDPECQTILPLLKTDLTDIFKACCDENLDNLKIEWKEEKSLCVVLCSKGYPDKFDNNVKINNLNNLKLNNNDFIFHAGTKKNGNEIFSNGGRVLNFVSLSKSYKDSRERALKLINQLNWGNGFFRKDIGFKIIDK

SEQ ID NO: 166120 - protein, 332 aa, Unknown
  Bacterial polypetide isolated from the Sargasso Sea
KYSIPTAKFHISSDMKDAKDFIEQAKLPIVLKADGLAAGKGVFICHDNKEVNDALEKLFNIDKFNSVVIEEFLVGQELSAIYVCNFRGCSYEIGLPWTKDYKSRDEYNSGPNTGGMGAVSHPFCFQHKNNIYKNHIEIEKILTKTIVAINDVNKTSMSGYLGFLYLGLMVDSDNNIKVLEYNCRLGDPETQNLMLYLTNKGISLLNLIENNPKLPVQDYNLDRLDSKNQDYCCTIVLAAKGYPESYKKDFFIDLSGIKENEHIKIFHSGTVIQNSKIKAIGGRILSVNVYSENKEKAVKKAYNAIEAIRCYEDEEFSVENSDYVFYREDIGQ

SEQ ID NO: 166121 - protein, 63 aa, Unknown
  Bacterial polypetide isolated from the Sargasso Sea
FKEAMIKEGLDVVGTSIDGKLVEMIEIPKHKWFLACQFHPEFTSNPRDGHPIFNSYIKSTIRK

SEQ ID NO: 166122 - protein, 42 aa, Unknown
  Bacterial polypetide isolated from the Sargasso Sea
EIKDHPWFIGCQFHPEFTSSPLAGHPLFYSFIEAAVEYSKKN

SEQ ID NO: 166123 - protein, 54 aa, Unknown
  Bacterial polypetide isolated from the Sargasso Sea
MGKGSRTKFIFVLGGVMSGLGKGIAASSIGYLLKNSGLRVTILKLDPYLNVDPG

SEQ ID NO: 166124 - protein, 30 aa, Unknown
  Bacterial polypetide isolated from the Sargasso Sea
VQFHPEFKSRPLAPHPLFSSFIKAAKNHKK

SEQ ID NO: 166125 - protein, 181 aa, Unknown
  Bacterial polypetide isolated from the Sargasso Sea
LFLLNLWRKIYNKVKQDCSKIHPGLVEIIEKNLHEIENNWPKSLPSGIIHADLFPDNIFFKEDKLTGIIDFYFSCHDFYAFEIAICLNALCFEGKNENLSFNVTKAKKFIDGYSEIREISEEEKKSLKILCQGAAMRFLLTRVFDYLNLTEGAIVKIKDPIEYLKRLEFHNNVKNYEDYFF

SEQ ID NO: 166126 - protein, 58 aa, Unknown
  Bacterial polypetide isolated from the Sargasso Sea
KVAGRSKDKSLVEVIELNSHPWFIGCQFHPEFTSNPRAGHPLFSGFIKAADKYKRLKK

SEQ ID NO: 166127 - protein, 100 aa, Unknown
  Bacterial polypetide isolated from the Sargasso Sea
LHAILLDGSKVASIYGASQIEERHRHRYEVDTKYQKKLESAGLVFSGMSPDGRLPEIIEWTDHPWFIGVQFHPELKSKPFDTHPLFRDFIGAAKKMSRLV

SEQ ID NO: 166128 - protein, 91 aa, Unknown
  Bacterial polypetide isolated from the Sargasso Sea
RVARIYNSSSIVERHRHRYEVDIKYKEQLENHGLTFSGISPSGKLPEIIEISTHPWFIGVQFHPELKSKPFEPHPLFADFIRAALEQSRLV

SEQ ID NO: 166129 - protein, 38 aa, Unknown
  Bacterial polypetide isolated from the Sargasso Sea
EIPNHKWFLACQFHPEFTSNPRDGHPIFNSYIKSTITK

SEQ ID NO: 166130 - protein, 182 aa, Unknown
  Bacterial polypetide isolated from the Sargasso Sea
MASKYARENSIPYFGLCLGMQIAVIDYARNVLGLENANSEEFDPDTPDPVIHIMDEQKSISDKGATMRLGACPCALKKGTASSTAYAKEEVSERHRHRFEFNNAYRKDLEKAGLVVAGVNPDRDLVEIVEVVDHPWFVGVQFHPEFQSKPNKAHPLFAAYIEATLAKSLAGIQEAEKAEDSS

SEQ ID NO: 166131 - protein, 126 aa, Unknown
  Bacterial polypetide isolated from the Sargasso Sea
IENNTDNPIIDLLPEQDGVTDMGGSLRLGANEINVKPDTIANKIYGDVKISKRHRHRYEFNTKYLDEFSQKGMIFSGESDNGRRMEILEIPDHKFFVGVQFHPEFNSRPGYPEHVFKAFTTAANQN

SEQ ID NO: 166132 - protein, 109 aa, Unknown
  Bacterial polypetide isolated from the Sargasso Sea
LGCTMRLGAYECHLTEGSIARRLYGEKAIFERHRHRYEVNIAYRDQLADAGMLISGLSPDGSLPEIVERADHPFFVAVQFHPELKSKPFEPHPLFTGFIAASMEKSRLV

SEQ ID NO: 166133 - protein, 32 aa, Unknown
  Bacterial polypetide isolated from the Sargasso Sea
FIGVQFHPEFKSRPLTPHPLFSSFIKAAKNYK

SEQ ID NO: 166134 - protein, 72 aa, Unknown
  Bacterial polypetide isolated from the Sargasso Sea
NKYLKRLEKDGLIFSGINPDLKVVEAIEIPGNSWYVATQYHPELKSRINKAHPLFREFIKAAKTLKLKHVNQ

SEQ ID NO: 166135 - protein, 112 aa, Unknown
  Bacterial polypetide isolated from the Sargasso Sea
GSMRLGCKDIFLEESKLSSIYKKKNITERHRHRYIINNEYIQSLNKHGCLISGFATIKTEEKGNSRIIEAIEDEKHPWYIGCQYHPEYKSSPFNPHPLFVSFIKKCVENNSM

SEQ ID NO: 166136 - protein, 38 aa, Unknown
  Bacterial polypetide isolated from the Sargasso Sea
STPLFIGVQFHPEFKSRPLNLHPLFASFIKAAKNKLND

SEQ ID NO: 166137 - protein, 66 aa, Unknown
  Bacterial polypetide isolated from the Sargasso Sea
PMLEGSGLKISGLSEKDEFVDMVELVDHPWFIACQFHPEFTSKPLSAHPLFISFLEAARKAQASRR

SEQ ID NO: 166138 - protein, 285 aa, Unknown
  Bacterial polypetide isolated from the Sargasso Sea
QDKTRNKISMFTNVTNNDVFSCHDVDSIFQVPEILYDQGLVDVIFKKFNKMGYVNASQNWDTWNKIVNSLHNEGDPINIAMVGKYVTLADSYVSVNHALKHAAASIGKKITIDWIDSENINGNVDTLSKYNGILVPGGFGTRGSEGIIKTANFAREQNIPYLGICFGFQLAAVSFARNVCSHTDANSTEIEQNTNNPIIDLLPEQDGITDMGGSLRLGANEINVKPDTIANKIYGQDKISKRHRHRYEFNTKYLEEFAQKGMIFSGESDEGRRMEILEIPSHKFL

SEQ ID NO: 166139 - protein, 231 aa, Unknown
  Bacterial polypetide isolated from the Sargasso Sea
VDVGNIYDVPMNLHQNGLDSEVLNIFNLEQKNKPNFIKWEKISSNASSLEESVKVSIVGKYIQLQDAYKSLDEAIYHAGLINKIKVNVEWVDSELLESSPPIDYLDSTDAILVPGGFGQRGSEGKINAIRFAREKKVPYLGICFGMQMAIVEMSRSLLKLHGANTTEFGDTDHPVVDLMKQWKKGKTTEKRDENTDLGGTMRLGAYDAVLKKGSKIEEIYKANKINERHRH

SEQ ID NO: 166140 - protein, 36 aa, Unknown
  Bacterial polypetide isolated from the Sargasso Sea
MGLFGVQFHPEFKSRPLNPHPLFSSFIKAAKSFNGK

SEQ ID NO: 166141 - protein, 145 aa, Unknown
  Bacterial polypetide isolated from the Sargasso Sea
QLLHSGRKMCSLENANSTEITTNTKNPIIDLLPEQKDETDMGGSLRLGANEIKISKNSLAHKIYNSDKISKRHRHRYEFNTKYRDEFLKKGMIFSGESDNGKRMEILEVPTHKFFLGVQFHPEFNSRPGFPEDVFKTFVTSASQN

SEQ ID NO: 166142 - protein, 70 aa, Unknown
  Bacterial polypetide isolated from the Sargasso Sea
RYEVNPKYKDDMIKKGLDVVGTSIDGKLVEMIEIPKHKWFLACQFHPEFTSNPRDGHPIFNSYIKSTLRK

SEQ ID NO: 166143 - protein, 50 aa, Unknown
  Bacterial polypetide isolated from the Sargasso Sea
MLVEVIEIPNHPWFVGCQFHPEFTSKPIEGHPLFTGFINAAITDNESKSI

SEQ ID NO: 166144 - protein, 529 aa, Unknown
  Bacterial polypetide isolated from the Sargasso Sea
MTSITGETGAGKSIAIDALGLCLGNRADASSVRPGASKTEVSARFSLEDVPLAKRWLEDNDLELDDECILRRTIGSDGRSRAYINGNPVPLTQLKLLGQLLVGIHGQHAHHAMLKSEHQLTLLDSYANHRLLIDTVAASYQRCKQIEAELKQLEASQQERIARKQLVQYQVEELDEFDLKVGEFEEIEQEHKRLANGTELVDSCQASLFLLTDGEESNIESLLNKAVGLAENLQSYAPELTNVSTMLNEALIQVQESAGELQHYLSKLELDPAHFAYLEERLSKAMQLARKHHVSPDKLAEHHLALRAELTTLDDDENKLEDIQRQVEASRVAYLANAQKLSQSRARYAKELEKLVTQSIHELNMPKGKFTIEVNFNPEIMSMNGSDNIEFMVTTNPGQPLQPISRVASGGELSRIGLGIQVITAKKVATPTLIFDEVDVGISGPTAAVVGRMLRSLGESTQVLCVTHLPQVAGNGHQHMFVNKFNKAGSTETTMTPLDREQRIQELARLLGGDTITTNTLANARELLQ

SEQ ID NO: 166145 - protein, 93 aa, Unknown
  Bacterial polypetide isolated from the Sargasso Sea
KIYQKDIITERHRHRYEFNDYYKERLNSKGFITSGVCPDNNLVEISEISDHPFMIGSQFHPEFGSRLDRPHPLFDHFIKASANQKKTGAQFQL

SEQ ID NO: 166146 - protein, 201 aa, Unknown
  Bacterial polypetide isolated from the Sargasso Sea
MITIVDYDMGNSRSVVNMLQRIGFKAEITRDHKKLESAEKLILPGVGSFDTAMKNLEHFELKELLDRKALIEKVPFLGICLGMQILTNSSEEGNLSGLGWIKGSASKFKSNNDIKVPHMGWNYIQPSSNSRLCKNLEDNSRFYFVHSYYVQVREEEHSSMKTTYSLEFDSGIEKDNIFGVQFHPEKSHKFGMQILKNFAEL

SEQ ID NO: 166147 - protein, 39 aa, Unknown
  Bacterial polypetide isolated from the Sargasso Sea
IKNHPWFLGCQFHPEFTSNPRDGHPIFNSFISSTIKTKK

SEQ ID NO: 166148 - protein, 552 aa, Unknown
  Bacterial polypetide isolated from the Sargasso Sea
MLCQLSINNFAIVRFLELDFRPGMTSITGETGAGKSIAIDALGLCLGNRADASSVRPGASKTEVSARFSLHDVPLAKRWLEDNDLELDDECILRRTIGSDGRSRAYINGNPVPLTQLKLLGQLLVGIHGQHAHHAMLKSEHQLTLLDSYANHRLLIDTVAASYQRCKQIEAELKQLEASQHERIARKQLVQYQVEELDEFDLKIGEFEDIEQEHKRLANGTELVDSCQASLYLLTDGEESNIESLLNKAVSLAENLQSYDPALTNVSTMLNEALIQVQESAGELQHYLSKLELDPAHFAYLEERLSKAMQLARKHHVSPDKLAEHHLALKAELTTLDDDETKLEEIQLQVEASKTAYLANAQKLSQSRARYAKELDKLVTQSIHELNMPKGKFTIEVNFNPEIMSVNGSDNIEFMVTTNPGQPLQPISRVASGGELSRIGLGIQVITAKKVATPTLIFDEVDVGISGPTAAVVGRMLRSLGESTQVLCVTHLPQVAGNGHQHMFVNKFNKAGSTETTMMPLDREQRIQELARLLGGDTITSNTLANARELLQ

SEQ ID NO: 166149 - protein, 50 aa, Unknown
  Bacterial polypetide isolated from the Sargasso Sea
LDGNLVEIVELSDHPWFVGCQFHPEFSSTPRDGHPLFNSFVRASLKNERT

SEQ ID NO: 166150 - protein, 44 aa, Unknown
  Bacterial polypetide isolated from the Sargasso Sea
MHFVFITGGVASSLGKGIASASLATLLKSRKFKVRIRKLDPYLN

SEQ ID NO: 166151 - protein, 52 aa, Unknown
  Bacterial polypetide isolated from the Sargasso Sea
YLGICLGLQIAVIEFARHVAGMKSANSTEFDETGEFPVVALVTEWTEGDGQL

SEQ ID NO: 166152 - protein, 96 aa, Unknown
  Bacterial polypetide isolated from the Sargasso Sea
LGAYDCKLLDNSFVSSIYKKKTISERHRHRYEVNNKYITDFKKYGLIFSGMSPDNSLPEILEVPKHPWFIGVQFHPELKSKPFEPHPLFSSFIMQV

SEQ ID NO: 166153 - protein, 62 aa, Unknown
  Bacterial polypetide isolated from the Sargasso Sea
MNKPKYIFVTGGVTSSLGKGIVSASLARLLQAQGLNVAIQKLDPYINVDPGTLNPYEHGECY

SEQ ID NO: 166154 - protein, 86 aa, Unknown
  Bacterial polypetide isolated from the Sargasso Sea
MIHSIYKKNIINERHRHRYEVNEKFISKFKNKGYIFSGMSPDGLLPEVLESKLHRWFIGVQFHPELKSRPLDPHPLFVSFIKNCIK

SEQ ID NO: 166155 - protein, 80 aa, Unknown
  Bacterial polypetide isolated from the Sargasso Sea
EIVERHRHRYEVNPEFRDGFNTKGMNIVGTSVDDMLVEMIEIKNHPWFLGCQFHPEFTSNPRDGHPIFNSFISSTIKTKK

SEQ ID NO: 166156 - protein, 138 aa, Unknown
  Bacterial polypetide isolated from the Sargasso Sea
QKNPVIDILPNQNLEKDDVGASMRLGTYPCKIKEETMASYIYNNEIVYERHRHRYEVNNKFRNQLEENGLIFSGVSPDEDLVEMIEIKDHPYFVASQFHPEFKSRPWEPAPMFNSFIEASKKIEIPQKTIDDEAKVRD

SEQ ID NO: 166157 - protein, 55 aa, Unknown
  Bacterial polypetide isolated from the Sargasso Sea
MAKTKYIFITGGVVSSLGKGIAAASIGALLEARGLSVSLIKVDPYINVDPGTMSP

SEQ ID NO: 166158 - protein, 47 aa, Unknown
  Bacterial polypetide isolated from the Sargasso Sea
MIELKDHPWFVAGQFHPEFTSTPRDGHPLFEGFVAAASAHQKRDLKK

SEQ ID NO: 166159 - protein, 32 aa, Unknown
  Bacterial polypetide isolated from the Sargasso Sea
MARYIFITGGVVSSLGKGIAAASLASLFKLRG

SEQ ID NO: 166160 - protein, 99 aa, Unknown
  Bacterial polypetide isolated from the Sargasso Sea
LLSDGSRSASAYGASNIFERHRHRYEFNSNYRQRLEEAGLVIAGTKPDKSLVEIVEVADHPWFVAVQFHPEFKSKPTAAHPLFADLVAAAVAHHAGVKT

SEQ ID NO: 166161 - protein, 40 aa, Unknown
  Bacterial polypetide isolated from the Sargasso Sea
MARYIFVTGGVVSSLGKGLSSASLGYLLRSQGYKVRIRKM

SEQ ID NO: 166162 - protein, 192 aa, Unknown
  Bacterial polypetide isolated from the Sargasso Sea
MFCNVDIKNVIETVDVKTIYEAPISFAKEKLDVQVLNYFKIKSKKSNNLTPWKKITKITLNTKRNVNIAIIGKYVELKDAYKSLDEALTHGGISNNLKVNLVRIDSEKLKVSEIKNKLKNVSGILIPGGFGKRGTEGKIEAIRYARINKIPFLGICYGMQMAIIEFARNQLKIKKATSSEFDKGGVHIIGLM

SEQ ID NO: 166163 - protein, 48 aa, Unknown
  Bacterial polypetide isolated from the Sargasso Sea
MHFVFITGGVASSLGKGIASSAIATLLKARKFKVRIRKLDPYLNVDPG

SEQ ID NO: 166164 - protein, 131 aa, Unknown
  Bacterial polypetide isolated from the Sargasso Sea
KNPVVCLMTEWIKNNTKVNRNINSEKGGTMRLGSYPCKILKNSLVYKVYKNLRINERHRHRYEVNTNYIDKFKEKGYIYSGMSPDNMLPEIIESTKHSWFVGVQFHPELKSRPLKPHPLFSSFIKACLEKK

SEQ ID NO: 166165 - protein, 38 aa, Unknown
  Bacterial polypetide isolated from the Sargasso Sea
MANTKYIFITGGVVSSLGKGIAAASIGALLESRGLSVS

SEQ ID NO: 166166 - protein, 293 aa, Unknown
  Bacterial polypetide isolated from the Sargasso Sea
HTTLLPFIHAAGEIKTKPTQHSVMRLREIGLEPDLLVCRTEENHHLSKKLKKKLGLFCNVETDYVFESPDVETIYEIPLVLYKQGFDNAVCDCLNIANNKKHNDIEVLENSIAKFKSSSHEVNIAICGKYNGLHDAYKSILEAFIHSGIYHSTHVNVKWIDTEELESSSTPESHFENIDGVLIPGGFGDRGIEGKILSSKISREKQIPFFGICLGLQCAIIDFSRNVCGFPNANSTEFKKRIKYPVVDLMDGQKTVKDKGATMRLGSYPCEVQTGTKAYSAYKKKKINERHRH

SEQ ID NO: 166167 - protein, 41 aa, Unknown
  Bacterial polypetide isolated from the Sargasso Sea
MARYIFVTGGVVSSLGKGLSSASLASLLQSRGFKVRVRKWD

SEQ ID NO: 166168 - protein, 46 aa, Unknown
  Bacterial polypetide isolated from the Sargasso Sea
PEIIELKNHPWFIGVQFHPEFKSRPLNPHPLFSSFIKAAKIKNAKY

SEQ ID NO: 166169 - protein, 104 aa, Unknown
  Bacterial polypetide isolated from the Sargasso Sea
RLGLYDAVIKNNSLISKIYSEKRIKERHRHRYEVNIKYKKEFEKKGLIFSALSPDGTLPEIIELNNHPWFVGVQFHPEFKSRPFTPHPLFSSFIKAANLRRRIN

SEQ ID NO: 166170 - protein, 32 aa, Unknown
  Bacterial polypetide isolated from the Sargasso Sea
MARYIFVTGGVVSSLGKGLSSASLGYLLRSQG

SEQ ID NO: 166171 - protein, 154 aa, Unknown
  Bacterial polypetide isolated from the Sargasso Sea
MVIEFSKNVLGLKDANSTEFDLETSNPVIDIIESQKGLQETGGTMRLGGYRCYLAPESLARKIYDKEEIIERHRHRYEFNDYFKETLNSNGFITSGICPDNNLVEISEIKDHPFMIGSQFHPEFGSRLDKPHPLFDSFIKACINQKKIGAQFKL

SEQ ID NO: 166172 - protein, 111 aa, Unknown
  Bacterial polypetide isolated from the Sargasso Sea
KIYGDYTNERHRHRYEFNNLLKSRLQDAGLIISGETENGNLVEIIEVPSQNHPWFVGVQFHPEFSSTPKNGHPLFKSFIDASLSFSNSRIESSKSKKYSNFDKGIHETSGF

SEQ ID NO: 166173 - protein, 68 aa, Unknown
  Bacterial polypetide isolated from the Sargasso Sea
YEVNSNLRHKFEQKGLFFSGMSPDNDLTEIIELKNHKWFIGVQFHPEFKSRPFHPHPLFSSFIKVAKK

SEQ ID NO: 166174 - protein, 63 aa, Unknown
  Bacterial polypetide isolated from the Sargasso Sea
IFNSFEKKGMLFSGMSPDIKLPEIIELKNHPWFIGVQFHPEFKSRPLNPHPLFSSFIKAAKFY

SEQ ID NO: 166175 - protein, 230 aa, Unknown
  Bacterial polypetide isolated from the Sargasso Sea
KSKKEPDLNIWNDVSSRYRSSEGSVKIAVVGKYTKLEDAYKSLSEALIHGGLANKTNVEVTWLESEEFEKSAQTKRLNKYDGILIPGGFGKRGTEGKIKVIKYAREKQIPFLGICLGMQLLVIEYARNCAGLKEASSEEFDEKSDSSEDHLIYHLSKWIKDQKVEIRSKVQNKGGTMRLGAYPAKIKKGTMAYSIYKKAIVSERHRHRFEVNVNYQEALEDNGLTFSGFS

SEQ ID NO: 166176 - protein, 82 aa, Unknown
  Bacterial polypetide isolated from the Sargasso Sea
NISERHRHRYEVNIDYKDKFEDKGLIFSGISPDNKLPEIIELKNHPWFVGVQFHPEFKSRPLNPHPLFSSFIKAAKIKNAKY

SEQ ID NO: 166177 - protein, 36 aa, Unknown
  Bacterial polypetide isolated from the Sargasso Sea
MARYIFITGGVVSSLGKGIAAASLASLFKLRGYQVS

SEQ ID NO: 166178 - protein, 122 aa, Unknown
  Bacterial polypetide isolated from the Sargasso Sea
MKYVVVSGGVVSGLGKGVTASSIGVLLKASGLRVTSVKIDPYINIDAGTMSPFEHGETYVLDDGGESDLDLGNYERFVDVSLTRDHNVTTGKVYQVREARRRGRGSRGGDAAAFLNSRRANE

SEQ ID NO: 166179 - protein, 172 aa, Unknown
  Bacterial polypetide isolated from the Sargasso Sea
YLGICLGMQMAVIEAARNVVGYKNAGSEEFDHEAGKKRFEPVVYHLKEWIQGNQTIERSVSDDKGGTMRLGAYNAILLDKSKVASIYGVSQIEERHRHRYEVDTKYQKKLESAGLIFSGMSPDGRLPEIIEWADHPWFIGVQFHPELKSKPFEPHPLFRDFIGAAKKMSRLV

SEQ ID NO: 166180 - protein, 114 aa, Unknown
  Bacterial polypetide isolated from the Sargasso Sea
EKRTIDSDLGGTMRLGAYEAKLKNNSKVREIYDSELISERHRHRYEVNNNYAKDFEINGVHFSGYSPDGLLPEIVELKDHPWFIGVQFHPELKSKPFDPHPLFKSFIEAAKNKT

SEQ ID NO: 166181 - protein, 92 aa, Unknown
  Bacterial polypetide isolated from the Sargasso Sea
KGSIIEKIYSKNKINERHRHRYEVNTSYFEKFEKNGYEFTGMSPDKLLPEVLEFTKHPWFIGVQFHPELKSRPQSPHPLFVSFIKHCIKTHE

SEQ ID NO: 166182 - protein, 139 aa, Unknown
  Bacterial polypetide isolated from the Sargasso Sea
HLDGANSTEFNKKTPYPVIDLMESQRAIKAKGGTMRLGAYDCTLKKGTKAFSAYRKNNISERHRHRWEVNNRYRDRLEKNGLIISGENSELNLVEIVELKDHPWYIAAQFHPELKSRVSKAHPLFRDFIKASVKQLKKK

SEQ ID NO: 166183 - protein, 47 aa, Unknown
  Bacterial polypetide isolated from the Sargasso Sea
MAQTKYIFITGGVVSSLGKGIAAASIGALLESRGLSVSLIKVDPYIN

SEQ ID NO: 166184 - protein, 62 aa, Unknown
  Bacterial polypetide isolated from the Sargasso Sea
MSKPKYIFVTGGVTSSLGKGIISASLAKLLQSQGYNSAIQKLDPYINVDPGTLNPYEHGECY

SEQ ID NO: 166185 - protein, 75 aa, Unknown
  Bacterial polypetide isolated from the Sargasso Sea
ERHRHRYEVNPKYKNEMINNGLDVVGMSIDGKLVEMIEIPKHKWFSACQFHPEFTSNPRDGHPIFNSYIKSTITK

SEQ ID NO: 166186 - protein, 110 aa, Unknown
  Bacterial polypetide isolated from the Sargasso Sea
DKHSDLGGSMRLGGQVCKLKKKSNSYKMYKNLEIVERHRHRYEVNPKFKDKMISAGLDVVGTSIDGNLVEMIEIPNHKWFLACQFHPEFTSNPRDGHPIFNSYIKSTLKK

SEQ ID NO: 166187 - protein, 173 aa, Unknown
  Bacterial polypetide isolated from the Sargasso Sea
PYLGICLGMQMAVIEAARNVVGYKNAGSEEFDHEAGKKRFEPVVYHLKEWIQGNQTIERSVSDDKGGTMRLGAYSATLIDGSKVASIYETSQIEERHRHRYEVDTKYQKKLESAGLVFSGMSPDGRLPEIIEWADHPWFIGVQFHPELKSKPFDPHPLFRDFIGAAKKMSRLV

SEQ ID NO: 166188 - protein, 64 aa, Unknown
  Bacterial polypetide isolated from the Sargasso Sea
DFEKKGLIFSAISPDGTLPEIIELRDHPWFIGVQFHPEFKSRPFTPHPLFSSFIKAAGANERKN

SEQ ID NO: 166189 - protein, 92 aa, Unknown
  Bacterial polypetide isolated from the Sargasso Sea
KDKSKIRDIYKSRLIKERHRHRYEVDISYKEKFEKKGLMFSGLSPDHKLPEIIELKNHPWFIGVQFHPEFKSRPLKPHPLFSSFIKAAKNHR

SEQ ID NO: 166190 - protein, 80 aa, Unknown
  Bacterial polypetide isolated from the Sargasso Sea
KERHRHRYEVNIKYKNDFEKKGLIFSALSPDGMLPEIIELKNHPWFVGVQFHPEFKSRPFTPHPLFSSFVKAAEINMRRN

SEQ ID NO: 166191 - protein, 39 aa, Unknown
  Bacterial polypetide isolated from the Sargasso Sea
EIKNHPWFIGVQYHPEFKSRPLTPHPLFSSFIKAAKFYK

SEQ ID NO: 166192 - protein, 144 aa, Unknown
  Bacterial polypetide isolated from the Sargasso Sea
EFDAQTKHPVIALITEWTTPDGGVETRTGESDIGGSMRLGAQSCKLARGSIVAEAYQSELISERHRHRYEFNNTYTMELEAAGLRVAGRSLDGNLVEIVEIPSHPWFVGCQFHPEFASTPRLGHPLFISFVNAGIAKKEGSCRE

SEQ ID NO: 166193 - protein, 61 aa, Unknown
  Bacterial polypetide isolated from the Sargasso Sea
RKFENKGMIFSGMSPDGKLPEIIELKNHPWFIGVQYHPEFKSRPLTPHPLFSSFVKAAKFY

SEQ ID NO: 166194 - protein, 86 aa, Unknown
  Bacterial polypetide isolated from the Sargasso Sea
KKTKIFERHRHRYEVNYNYLKSIVKSGITLSGMSPNRKLVEIIEREKHPWFIGVQFHPELKSTPFNPHPIFNSFISAVLKFKNHNN

SEQ ID NO: 166195 - protein, 43 aa, Unknown
  Bacterial polypetide isolated from the Sargasso Sea
MARYIFVTGGVVSSLGKGLSSASLAYLLKSQGYKVRIRKMDPY

SEQ ID NO: 166196 - protein, 190 aa, Unknown
  Bacterial polypetide isolated from the Sargasso Sea
GGFGNRGISGKIEAIRHARENQIPFLGICLGMQLSIIEFTKNVLKMKNSGSSEFGKHTNNVISLMTEWSKKNQKVIRTKENDLGATMRLGSYPCYIKEKSLASKVYKKKLIYERHRHRYEVNPKYRSFIEKKGLVFSGFSKDKKLLEIIEIKNHKWFLGVQFHPELKSKPFKPHPIFFSFIKNSLINKNA

SEQ ID NO: 166197 - protein, 80 aa, Unknown
  Bacterial polypetide isolated from the Sargasso Sea
FERHRHRYEVNNIFISDFKKNGMIFSGMSPDNLLPEIFELQEHPWFIGVQFHPELKSKPFDPHPLFSSFINASLKQSRLL

SEQ ID NO: 166198 - protein, 57 aa, Unknown
  Bacterial polypetide isolated from the Sargasso Sea
MMFSGISPDNKLPEIIELKNHPWFIGVQFHPEFKSRPLNPHPLFSSFIKAAKSFNGK

SEQ ID NO: 166199 - protein, 41 aa, Unknown
  Bacterial polypetide isolated from the Sargasso Sea
MARFIFVTGGVVSSLGKGLSSASLAYLLQSRGYKVRLRKLD

SEQ ID NO: 166200 - protein, 231 aa, Unknown
  Bacterial polypetide isolated from the Sargasso Sea
EVIPLIDVDNVYRVPMILEGYGLGNSITKTLGLPPGSISNNNSWSSAISEMDALEEVVSIALVGKYVEYPDAYMSVKEAITHAGLRVGRRTQIKWVHSEDLERDGAEQHLSDVSGIVVPGGFGKRGVEGMILAAEYARTNNIPYLGLCLGMQVMIIEWCRNVLNLFQADSEEFQPDTPNPVIHVMPDQIDVTNKGGTMRLGMYPCSLDLQSKSHGFYESNSVEERHRHRFE

SEQ ID NO: 166201 - protein, 52 aa, Unknown
  Bacterial polypetide isolated from the Sargasso Sea
SGMSPDNKLPEIIELKNHPWFIGVQFHPEFKSRPLAPHPLFSSFIQASKNHK

SEQ ID NO: 166202 - protein, 202 aa, Unknown
  Bacterial polypetide isolated from the Sargasso Sea
FERAREFNADLSKWDVAQGTNFRGMFETALSFDADLSKWNVAKGTDFRFMFGLASSFNADLSEWNVAKGTSFSHMFTGAHEFNADLSQWDVAKGTDFEAMFVNAKSFNADLSEWNVAQGTDFEHMVRGARPRGGVISNQLARAANGAVSIAHRRAPAASQFLNANSFDADLSEWNVAQGTNFNGMFYNAGCTTTKCGCTSCA

SEQ ID NO: 166203 - protein, 55 aa, Unknown
  Bacterial polypetide isolated from the Sargasso Sea
MLKDTRFIFVTGGVVSSLGKGIASASIGSLLESKGYTVTVIKLDPYFNVDPGTMS

SEQ ID NO: 166204 - protein, 85 aa, Unknown
  Bacterial polypetide isolated from the Sargasso Sea
MYSKTSIKERHRHRYEVNGNLVVDFEKNGLAFSGQSKEGNLMEMIELKNHSWYVGCQFHPEFTSSPINGHPLFNGFINAASKRKI

SEQ ID NO: 166205 - protein, 52 aa, Unknown
  Bacterial polypetide isolated from the Sargasso Sea
NDRSISSALIHMTYIPYLSSAGELKTKPTQHSVKELLNAGIQPDIIMCRSER

SEQ ID NO: 166206 - protein, 70 aa, Unknown
  Bacterial polypetide isolated from the Sargasso Sea
YRERLEQAGLVFSGLSSDRKLVEMIELKDHPWFVAGQFHPEFTSTPRDGHPLFEGFVAAASAHQKRDLKK

SEQ ID NO: 166207 - protein, 248 aa, Unknown
  Bacterial polypetide isolated from the Sargasso Sea
KTERKKISLFCNVPIDNVIETVDVKTIYEAPISFHKEKLDERVLSYFRIKSKKSPDLSKWKNITSRVLNPKKDVNIGIIGKYVDLKDAYKSLDEALIHGGISNNVKVNLKRIDSENLKPENIKSILKDVTGVLIPGGFGKRGTEGKIAAIKYARLNHIPFFGICFGMQMAVIEAARNLLNIKNASTSEFGNNCTPVVGLLEEWQKGKKKIKGTKMNLGGTMRLGLYDAVLKNNSLISKIYSGKKIKER

SEQ ID NO: 166208 - protein, 94 aa, Unknown
  Bacterial polypetide isolated from the Sargasso Sea
LKKGSNVFKMYKKKEIVERHRHRYEVNPEFRDGFNTKGMNIVGTSVDDMLVEMIEIKNHPWFLGCQFHPEFTSNPRDGHPIFNSFISSTIKTKK

SEQ ID NO: 166209 - protein, 52 aa, Unknown
  Bacterial polypetide isolated from the Sargasso Sea
SADKSLVEVIEYKDHPWFVASQFHPEFTSSPRDGHPLFTSFIEAALICQTGK

SEQ ID NO: 166210 - protein, 33 aa, Unknown
  Bacterial polypetide isolated from the Sargasso Sea
MARYIFVTGGVVSSLGKGLSSASLAYLLQSRGL

SEQ ID NO: 166211 - protein, 221 aa, Unknown
  Bacterial polypetide isolated from the Sargasso Sea
ELRSIGIQPDLLVCRSDKSINEALKKKLSGFCGVSINSVIEALDADSIYSVPLSLKKEGLCKETLKYLDLEDKKCDLKNWEQLIHNLRNPGAPIKVALVGKYIELGDAYLSVVEALRHACIEQKALLDLHWVSAEMIEKNSSETYLNEVDAIVVPGGFGNRGVNGKISAIKFARENKVPFLGLCLGMQCAVIEWARNVANLPDASSSELDPNTPNPVIHLL

SEQ ID NO: 166212 - protein, 152 aa, Unknown
  Bacterial polypetide isolated from the Sargasso Sea
MIEKNSAKTYLNEVDAIVVPGGFGNRGVNGKISAIKFARENKIPFLGLCLGMQCAVIEWARNVANLPDASSSELDPNTPNPVIHLLPEQEDVVDLGGTMRLGVYPCRLTKNTTGKNLYDEDVIYERHRHRYEFNNYYKQSFLDSGYKISVHH

SEQ ID NO: 166213 - protein, 109 aa, Unknown
  Bacterial polypetide isolated from the Sargasso Sea
KGGTMRLGAYNCTLKKGTKAFSAYRKNNISERHRHRWEVNNRYRDRLEKNGLIISGENSELNLVEIVELKDHPWYIAAQFHPELKSRVSRAHPLFRDFIKASVKQLKKK

SEQ ID NO: 166214 - protein, 96 aa, Unknown
  Bacterial polypetide isolated from the Sargasso Sea
KNSKTEKIYNKKVISERHRHRYEFNNKYLTQLHEGDLIPSGINPETNLVEIIEHKEHPWFIGVQFHPEYSSTVLEPHPLFKSFINSSIENLKNNTN

SEQ ID NO: 166215 - protein, 47 aa, Unknown
  Bacterial polypetide isolated from the Sargasso Sea
MKFIFITGGVVSSLGKGITAGSLGALLESCGYRVTCMKLDPYINIDP

SEQ ID NO: 166216 - protein, 215 aa, Unknown
  Bacterial polypetide isolated from the Sargasso Sea
HAAASIGKKITIDWIDSENINGNADTLSKYNGILVPGGFGTRGSEGIIKTANFARENNIPYLGICFGFQLAAVSFARNVCNHTDANSTEIESETNNPIIDLLPEQDGVTDMGGSLRLGANEIDVKSDTIANRIYGQTKISKRHRHRYEFNTKYLDEFAQKGMIFSGESDNGRRMEILEIPDHKFFVGVQFHPEFNSRPGYPEDVFKAFTTAANQN

SEQ ID NO: 166217 - protein, 274 aa, Unknown
  Bacterial polypetide isolated from the Sargasso Sea
MWKTLRPNRANLVIWQWLLLVLCFVLWYALTSPTLLPPFYFDDPNKAAFFFGEPQKVLQRIWEWFTGGEIYLHLWITLVETVLAFALGTAFGLGVGLWLALSPLASALFDPYIKAANSMPRVILAPIFGVWFGLGIWSKVALGVTLVFFIVFFNVYQGVKEVSPVVLANARMLGANRKQLLRFVYLPSAMSWVFSSLHTSVGLAFVGSVVGEYLGSARGVGYLILQAEGTFDINTVFAGILVLTAFALILDAIVGIGERRLMKWQPKSGDTEKL

SEQ ID NO: 166218 - protein, 40 aa, Unknown
  Bacterial polypetide isolated from the Sargasso Sea
MANTKYIFITGGVVSSLGKGIAAASIGALLESRGLSVSLI

SEQ ID NO: 166219 - protein, 82 aa, Unknown
  Bacterial polypetide isolated from the Sargasso Sea
VSERHRHRFEVNNRYRKKLQKGGLIISGVNENLGVVETIEIAGHPWFVAAQFHPELKSRVNKSHPLFREFIKASKKYNKRRS

SEQ ID NO: 166220 - protein, 133 aa, Unknown
  Bacterial polypetide isolated from the Sargasso Sea
EEIIYHLSHWFKDQKLEVREKIQDKGGTMRLGAYPAKIKKGSIAHSIYKTDTISERHRHRYEVNLKYKKNLENKGLCFSGFSIDGQLPEIVEIPSHSFFIGVQFHPELKSKPFQPHPLFSSFIKAALEQTRLV

SEQ ID NO: 166221 - protein, 73 aa, Unknown
  Bacterial polypetide isolated from the Sargasso Sea
HRHRYEVNPFFKDMMVNAGLNIAGTSIDNKLVEMIEINNHKWFLACQFHPEFTSNPRDGHPIFNSYIKSTIIK

SEQ ID NO: 166222 - protein, 54 aa, Unknown
  Bacterial polypetide isolated from the Sargasso Sea
GFVFSGMSPDNVLPEILESIKHKWFIGVQYHPELKSRPLAPHPLFSSFIKHCIK

SEQ ID NO: 166223 - protein, 45 aa, Unknown
  Bacterial polypetide isolated from the Sargasso Sea
MARYVFVTGGVVSSLGKGLSSASLAALLQSRGFNVRIRKLDPYLN

SEQ ID NO: 166224 - protein, 43 aa, Unknown
  Bacterial polypetide isolated from the Sargasso Sea
MARFIFVTGGVVSSLGKGLSSASLAYLLQSRGYKVRLRKLDPY

SEQ ID NO: 166225 - protein, 48 aa, Unknown
  Bacterial polypetide isolated from the Sargasso Sea
NKLPEIIELKNHPWFIGVQFHPEFKSRPLSPHPLFKSFIKAAKNYHGK

SEQ ID NO: 166226 - protein, 166 aa, Unknown
  Bacterial polypetide isolated from the Sargasso Sea
IIEFARNVVGIEEANSGESRPDHKENVIDLMPEQKGHQETGGTMRLGSQITVLKKGSRIAAMYNKTTISERHRHRYEVMNEFVPKLEEAGLKITGHHPERNLVETFELPEHPWFIGCQYHPELQSKPLKPHPMFTSFIKAAFDNRQSRLGHVPTSSKKASVPQQKT

SEQ ID NO: 166227 - protein, 46 aa, Unknown
  Bacterial polypetide isolated from the Sargasso Sea
NQLPEIIELKNHPWFIGVQFHPEFKSRPLSPHPLFSSFIKAAKNHK

SEQ ID NO: 166228 - protein, 103 aa, Unknown
  Bacterial polypetide isolated from the Sargasso Sea
MRLGSYDAELSNNSLIKKIYKSKIIKERHRHRYEVNINYKNQFEKKGLIFSGNSPDKNLPEIIELKNHPWFIAVQFHPEFKSRPLSPHPLFSSFIKAAKNHKK

SEQ ID NO: 166229 - protein, 298 aa, Unknown
  Bacterial polypetide isolated from the Sargasso Sea
MSKSDIQIAREAKMDPINKVLAKINVPDEPSTFSPMGRHIAKINFDYLKTLENKKNGKLILVTAITPTPAGEGKTTVSVGLSDGINKIGKKSIVCLREPSLGPSFGMKGGAAGGGYAQVVPMEQINLHFTGDFHAITSAHNLLSALIDNHIYWGNKLNIDDKKIVWKRVMDMNDRALRTININTKGASKDFPREDGFDITVASEVMAIFCLSNNLEDLEKKIGNITIAYNKEGKPIYAKDLNAQGPMTVLLKEAIRPNVTQTLENNPALIHGGPFANIAHGCNSVIATKAALKLSDYV

SEQ ID NO: 166230 - protein, 347 aa, Unknown
  Bacterial polypetide isolated from the Sargasso Sea
CMENIKQKLKTKFGEKLKNKSDGKLILVTAITPTPAGEGKTCTSIGIAQAFGKLGVKHALAIREPSMGPTFGIKGGAAGGGYSQVLPMEDINIHFTGDLHAISAAHNLLSAVLDNSIHFDNPLNIDINKVTWRRTIDLCDRQLRNGEIGLGSKFDGFPHKTGFDIVAASEIMTIMALAEDISDLRDRLGRIVVAYSTSGKPIFAKELDCIGALCVILKDALKPNLVQTCEHTPVFVHCGPFGNIAHGSNSVRATRLALKLAPYVVTEAGFAADLGAEKFVNIKCRQAGLKPNGAVLVATVRALKFHGGEEKENLKIENLEALKKGCDNLKTHAENIGKYGLPLVVAI

SEQ ID NO: 166231 - protein, 270 aa, Unknown
  Bacterial polypetide isolated from the Sargasso Sea
MGKVKSDIEIAREAKMKPIQEVLNGLNVPDKAEVYSPIGRYIAKIKTEYLETLKNKKDGKLILVTAITPTPAGEGKTTTSVGLNDGLNKIGKKSIVCLREPSLGPSFGMKGGAAGGGYAQVVPMEQINLHFTGDFHAITSAHNLLSALIDNHIYWGNKLNIDVRRIVWKRVMDMNDRSLRSIVVDLGGVANGYPRQDGFDITVASEIMAIFCLSNDLKDLENRIGNITVAYTRDKKPIYAKDLNAHGPMTVLLKDAIRPNVTQTLENNPA

SEQ ID NO: 166232 - protein, 180 aa, Unknown
  Bacterial polypetide isolated from the Sargasso Sea
MADQGSDIEIARAATLQPITEIGTKLDIPADALHLYGANKAKIDYEFLNDIAERPRGKLILVTAITPTPAGEGKTTTTVGLGDGLNRIGKNAMICIREPSLGPCFGLKGGAAGGGYAQVVPMEDINLHFTGDMHAIGAAHNLLSAMIDNHMYWDNNLCMDSRRVSWRRVVDINDRALRDI

SEQ ID NO: 166233 - protein, 149 aa, Unknown
  Bacterial polypetide isolated from the Sargasso Sea
MKTDIEIAREAEPKTIDKIADQLGIGEEYLERYGKFKSKIDLSINQEQLKDSKNGKLILVTAISPTPAGEGKTTTSVGLVDGLCHIGKKAMICLREPSLGPCFGMKGGAAGGGHAQVIPMTDINLHFTGDFHAIGAAHNLLSALIDNHI

SEQ ID NO: 166234 - protein, 265 aa, Unknown
  Bacterial polypetide isolated from the Sargasso Sea
MAKTDIEIAREAKMKPIQEILDGINVPDKAEVYSPIGRYIAKIKTEYLESLKNKKNGKLILVTAITPTPAGEGKTTTSVGLCDGLNKIGKKSIVCLREPSLGPSFGMKGGAAGGGYAQVVPMEQINLHFTGDFHAITSAHNLLSALIDNHIYWGNKLNIDVRRIVWKRVMDMNDRSLRSIVVNLGGIANGYPRQDGFDITVASEIMAIFCLAKDLKDLENRIGNITIGYTRDKNPIYAKDLNAQGPMTVLLKDAIRPKYNSNFRK

SEQ ID NO: 166235 - protein, 250 aa, Unknown
  Bacterial polypetide isolated from the Sargasso Sea
MSDIKSDIQIAREAKMLPIKDILAKVNVPDESSAFSPMGRHIAKINLEYLDTLKNKPDGKLILVTAITPTPAGEGKTTTSVGLNDGLNKIGKKSIVCLREPSLGPSFGMKGGAAGGGYAQVVPMEQINLHFTGDFHAITSAHNLLSALIDNHIYWGNKLNIDVRRVVWKRVMDMNDRALRSININLGGVANGFPREDGFDITVASEIMAIFCLANNLEDLENRIGNITVAYTREKKPIYAKDLNAHGPMT

SEQ ID NO: 166236 - protein, 78 aa, Unknown
  Bacterial polypetide isolated from the Sargasso Sea
YEKFPVCVAKTQYSFSTDPSKRGAPTDHEIPIREVRLSAGAEFIVMVCGDIMTMPGLPKVPAAERIDIDDDGNIVGLF

SEQ ID NO: 166237 - protein, 114 aa, Unknown
  Bacterial polypetide isolated from the Sargasso Sea
PLFKKIEKIAQEIYRASEVVADTKIREQLKDFESKGFGNLPICVAKTQYSFSTDPNLKGAPNGHVLPVREVMLSSGAQFIVVVCGSIMTMPGLPKVPAAESIKINKDGEVEGLF

SEQ ID NO: 166238 - protein, 219 aa, Unknown
  Bacterial polypetide isolated from the Sargasso Sea
MGGVKKDELKNENVDAVKKGLVNLERHIENIQKFGLPVTVAINHFVLDTDKEVDEVTRFCEQKGIKASISKHWEKGGEGAIDLANDVVELCEKDSDFKFLYDDKTSLFKKIETIAKELYRASEVVADTKIRDQLKAFEERGYQSLPICIAKTQYSFSTDPNLKGAPSGHVLPIREVRLSSGAEFIVVVCGAIMTMPGLPKVPAADSIRINEKGETEGLF

SEQ ID NO: 166239 - protein, 74 aa, Unknown
  Bacterial polypetide isolated from the Sargasso Sea
PVCIAKTQYSFSTDPKLKGAPSNHEIPIREVRLSSGAEFIVVVCGSIMTMPGLPKVPAADKIKLNKKGEIEGLF

SEQ ID NO: 166240 - protein, 236 aa, Unknown
  Bacterial polypetide isolated from the Sargasso Sea
LKPNAVVLVATIRALKMHGGVDKKNLEPENISAVIKGVSNLKRHIENIHKFGLPAIVAVNHFVNDTEKEIEALKEECLKMNVEVILCEHWAKGGEGTIQLAKKIVELTDKENKFDYLYKDDESLIDKIKKITSEIYRAEEVIISKKIKDQLKQYENQGYGNFPICIAKTQYSFSTDPSKIGAPESHSIPIREVRLSSGAEFIVVVCGEIMTMPGLPSVPAANSIKLDSNGQIEGLF

SEQ ID NO: 166241 - protein, 245 aa, Unknown
  Bacterial polypetide isolated from the Sargasso Sea
LDIKCRKSNLKPDCVVIVATIRALKMHGGVSKDDLKNENVKALNKGLVNLERHINNVRKFGLPVAVAVNHFITDTDKEVSALMDFCKTQGVKSSICKHWSDGGEGTKDLANIVVDICNNKNTFKFLYEDKIPLFKKIETIAQEIYHASEVVADTKIRDQLKDFESKGYGNLPICIAKTQYSFSTDPSLKGAPSGHVVPIREVRLSSGAEFIVVVCGAIMTMPGLPRVPAADSIKLNEKGDIEGLF

SEQ ID NO: 166242 - protein, 241 aa, Unknown
  Bacterial polypetide isolated from the Sargasso Sea
MSDVKSDIQIAREAKMHPINEVLAKINVPDESTAFSPMGRHIAKINLEYLETLNDKPDGKLILVTAITPTPAGEGKTTTSVGLNDGLNKIGKKSIVCLREPSLGPSFGMKGGAAGGGYAQVVPMEQINLHFTGDFHAITSAHNLLSALIDNHIYWGNKLDIDVRRIVWKRVMDMNDRSLRSININLGGVANGFPREDGFDITVASEIMAIFCLSNDLEDLEKRIGKYTIAYTRDKKPVYAK

SEQ ID NO: 166243 - protein, 195 aa, Unknown
  Bacterial polypetide isolated from the Sargasso Sea
MTAYPTDLEIANAANKKPINEIAKLIDIDEKGLIKFGDDKAKLNSDFINSISKNENGKLILVTAISPTPAGEGKTTTSVGLVDGLCHIGKKAMICLREPSLGPCFGMKGGAAGGGYAQVIPMTDINLHFTGDFHAIGAAHNLLSALIDNHIHWDNELDIDPRRITWKRVVDMNDRSLRDITCGLGGTGNGIPRQS

SEQ ID NO: 166244 - protein, 244 aa, Unknown
  Bacterial polypetide isolated from the Sargasso Sea
KCRKANIKPSCVVLVATIRALKMHGGVKKEDLKKENLESLKKGLPNLERHIQNIKKFGLDVIVAINHFITDTDEEIKVVEGYCEKLGVKASLCKHWEKGGEGTRDLANNVVEMCNKAKKNGFKFLYSGEMPLLDKIQAIAKEIYGASKIEADDEIKKQIKKIEEAGFNKFPICIAKTQYSFSTDPNLKGAPSGHTLPIREVRLSSGAEFVVVVCGSIMTMPGLPKIPAANNIKLNDKDEIEGLF

SEQ ID NO: 166245 - protein, 227 aa, Unknown
  Bacterial polypetide isolated from the Sargasso Sea
TIRALKMHGGVLKDELKNENVKALKKGLVNLERHINNTRKFGIPVTIAVNHFITDTEKEMKTLLDFCKTQGVKASKCTHWSNGSEGTKELAENVVAICEDNQDTFKFLYEDKLPLFKKIEKIAQEIYHASEVVADTKVRQQLKDFEEKGYGNLPVCIAKTQYSFSTDPNLKGAPTGHVLPIREVRLSSGAEFVVVVCGEIMTMPGLPRVPAADSIKLNNNGEIEGLF

SEQ ID NO: 166246 - protein, 129 aa, Unknown
  Bacterial polypetide isolated from the Sargasso Sea
KSKPKNFKYLYEEKLPLWKKIETISKEIYRAKGITASDNVKEQIKNFEISGYGNLPICIAKTQYSFSVDPKLKGAPENHEIPIREVRLSSGANFIVVVCGSIMTMPGLPKVPAADNIKLNKNGETEGLF

SEQ ID NO: 166247 - protein, 162 aa, Unknown
  Bacterial polypetide isolated from the Sargasso Sea
MKSDIEIAQAAKLEKISEIASKLDIPEDSLEPFGHYKAKISLEYLNSLNSNPDGKLILVTAISPTPAGEGKTTTSVGLGDALNHIGKKALVTIREPSLGPVFGMKGGAAGGGMSQVIPMEDINLHFTGDFNAIQLANNLLAAMLDNHIHHGNSLGIDVRRVS

SEQ ID NO: 166248 - protein, 241 aa, Unknown
  Bacterial polypetide isolated from the Sargasso Sea
IKCRKSNLKPSCVVIVATIRALKMHGGVAKDDLKNENVEALKKGLVNLERHIENVKKFGLPVAIAVNHFIKDTDSEVKALIDFCDSLGVKASLCTHWANGGEGTKELAAHVADLCEKKDAKFNFLYESKTPLFKKIETIAKEIYRADEVIADTKIRDQLKSFEEAGYGELPICVAKTQYSFSTDPNLKGAPIGHVLPVREIRLSSGAEFIVVVCGAIMTMPGLPRVPAADSIKLNEKGEIE

SEQ ID NO: 166249 - protein, 255 aa, Unknown
  Bacterial polypetide isolated from the Sargasso Sea
REAKMEPINDVLSKINVPDEPNAFSPMGRHIAKINFEYLETLKDKKDGKLILVTAITPTPAGEGKTTVSVGLSDGINKIGKKSIVCLREPSLGPSFGMKGGAAGGGYAQVVPMEQINLHFTGDFHAITSAHNLLSALIDNHIYWGNKLNIDDKKIVWKRVMDMNDRALRAININTKGVAKDFPREEGFDITVASEIMAIFCLSNNLQDLEKRIGNITIAYNKSNKPIYAKDLKAQGPMTVLLKEAIRPNVTQTLE

SEQ ID NO: 166250 - protein, 172 aa, Unknown
  Bacterial polypetide isolated from the Sargasso Sea
DNNKEIDEVTKFCEQKGIKASISKHWEKGGEGATDLANDVVELCKKNSDFKFLYDDKTSLFKKIETIAKELYRASEVVADTKIRDQLKAFEEIGYQSLPICIAKTQYSFSTDPNLKGAPSGHVLPIREVRLSSGAEFIVVVCGAIMTMPGLPKVPAAEAIRINEKGETEGLF

SEQ ID NO: 166251 - protein, 176 aa, Unknown
  Bacterial polypetide isolated from the Sargasso Sea
MSTYPSDLEIASAANKISIDKVAATIDITDKDLIKFGDDKAKISRSLIEKLKKNEDGKLILVTAISPTPAGEGKTTTSVGLVDGLCHIGKKAMICLREPSLGPCFGMKGGAAGGGYAQVIPMTDINLHFTGDFHAIGAAHNLLSALIDNHIHWDNQLNIDPRRITWKRVVDMNDRS

SEQ ID NO: 166252 - protein, 209 aa, Unknown
  Bacterial polypetide isolated from the Sargasso Sea
MSDVKSDIQIAREAKMQPINEVLAKINIPDESTAFSPMGRHIAKINLEYLDTLNDKPEGKLILVTAITPTPAGEGKTTTSVGLNDGLNKIGKKSIVCLREPSLGPSFGMKGGAAGGGYAQVVPMEQINLHFTGDFHAITSAHNLLSALIDNHIYWGNKLDIDVRRIVWKRVMDMNDRSLRSININLGGVANGFPREDGFDITVASEIMA

SEQ ID NO: 166253 - protein, 164 aa, Unknown
  Bacterial polypetide isolated from the Sargasso Sea
MDFCKNLGVDISLCTHWSNGGEGTKDLANTVVQICEKSKSTFKFLYEDKTPLFKKVETIAQEIYHAREVVADTKIRSQLKDFESKGYADLPICVAKTQYSFSTDPSLKGAPTGHVLPIREVKLSSGAEFIVVICGEIMTMPGLPKVPAADSIKINDKGETEGLF

SEQ ID NO: 166254 - protein, 210 aa, Unknown
  Bacterial polypetide isolated from the Sargasso Sea
MSTVKSDIEIARGAKMKPIQEVLNGLNVPDKAEVYSPMGRYIAKIKPEYLDTLKNKKDGKLILVTAITPTPAGEGKTTTSVGLCDGLNKIGKKSIVCLREPSLGPSFGMKGGAAGGGYAQVVPMEQINLHFTGDFHAITSAHNLLSALIDNHIYWGNKLNIDVRRVVWKRVMDMNDRSLRSININLGGVANGYPREDGFDITVASEIMAI

SEQ ID NO: 166255 - protein, 55 aa, Unknown
  Bacterial polypetide isolated from the Sargasso Sea
NAILATKTALKLSEYVVTEAGFGADLGAEKFLDIKGRKAGIQPSCVVLVATIRAL

SEQ ID NO: 166256 - protein, 170 aa, Unknown
  Bacterial polypetide isolated from the Sargasso Sea
MTAYPSDLEIANAAHKKSIDEIASVLNINEKNLIKFGDDKAKLNSDFIDSVSKNENGKLILVTAISPTPAGEGKTTTSVGLVDGLCHIGKKAMICLREPSLGPCFGMKGGAAGGGYAQVIPMTDINLHFTGDFHAIGTAHNLLSALIDNHIHWDNELNIDPRRITWKRVV

SEQ ID NO: 166257 - protein, 245 aa, Unknown
  Bacterial polypetide isolated from the Sargasso Sea
IKCRKAGIQPKCVVLVATIRALKMHGGVEKDNLKLENLDALKKGLPNLKRHIENIKKFGLDLVVAINHFKTDTEEEVKIIEKYCNDLNVQVSLCTHWANGGKGTKDLANKVVKLCNEAKKAKFNFIYDDKISLLEKIETVANKIYRASSVEISDTIKEQLSKLEQAGYSKFPICIAKTQYSFSVDPKLKGAPTDYKLEVREIRLSSGAEFIVVVCGSVMTMPGLPRAPAADKIRLNTKGDVEGLF

SEQ ID NO: 166258 - protein, 254 aa, Unknown
  Bacterial polypetide isolated from the Sargasso Sea
ADLGAEKFLDIKCRKSNLKPDCVVIVATIRALKMHGGVAKEDLKKENVSALKDGMVNLRRHINNIRKFGLPVTVAVNHFITDTEDEMKNLLDFCETQGVKASKCTHWSNGSEGTVELAKNVTEICEDKKDTFKFLYEDDLPLFKKIEKIAQEIYSASEVVADTKVRQQLKDFEEKGYGKLPVCIAKTQYSFSTDPNLKGAPTGHVLPVREVRLSSGAEFIVVVCGEIMTMPGLPRVPAADSIKLNDKGEIEGLF

SEQ ID NO: 166259 - protein, 251 aa, Unknown
  Bacterial polypetide isolated from the Sargasso Sea
LGAEKFFNIKCRKAGLKPDAVVLVATARALKMHGGVAKADLNTENVGALVDGLENLGRHLRNIGQFGVPAVVAINKFVSDTPAEIDAIRTYCKEFGVEVFECSHWADGGAGTEELAQHVATLADSSNSQFRPLYDDHLSLWEKVRTVARSIYGAEDIIADKKVRSQFEDFEERYSHFPVCMAKTQYSFSTDPNLLGAPSGHVVPIRELRLSAGAEFVVAICGEIMTMPGLPRVPAANSIFVNDEGEIEGLF

SEQ ID NO: 166260 - protein, 301 aa, Unknown
  Bacterial polypetide isolated from the Sargasso Sea
MAEVKSDIQIAREAKMQPIKDILSKVGVPDENFAFSPMGRHIAKINLEYLNTLKKENGKLILVTAITPTPAGEGKTTTSVGLNDGLNKIGKKSIVCLREPSLGPSFGMKGGAAGGGYAQVVPMEQINLHFTGDFHAITSAHNLLSALIDNHIYWGNKLNIDVRRVVWRRVMDMNDRSLRSIIVDLGGVANGYPRQDSFDITVASELMAIFCLATDLKDLENRIGNITIGYTRDKQSIYAKDLNAQGPMTVLLKEAIRPNVTQTLENNPAIIHGGPFANIAHGCNSVIATKAGLKLSDYVVT

SEQ ID NO: 166261 - protein, 280 aa, Unknown
  Bacterial polypetide isolated from the Sargasso Sea
SCADYVVTEAGFGAEMGAEKALQIKAQAAGKIPDCLILNVTVRAMKLHGGGFSTGGGKRPPKEELEGENVEATRSGATTNLRRHVLNLSSTNVPVIVSINRFSSDTDAELEAIREEAIAAGARDVVIFEGHAKGGEGAVNLADAVVEACASHDAAGRPYDPIVEPGMPADQTILRIATKVYGAHTVDFSPEAIKTLESLREWGLENLPVCMAKTQYSFSHKPTELGAPIGFTLPIRELRLNSGAGFIVAVCGSMMTMPGLPVRPAAIDMDMDDDGRLTGV

SEQ ID NO: 166262 - protein, 238 aa, Unknown
  Bacterial polypetide isolated from the Sargasso Sea
NLKPSCVVIVATIRALKMHGGVAKDDLKNENVEALKKGLINLERHIENVKKFGLPVAVAINHFIKDTDKEVNALVEFCKKLKVNASICKHWADGGEGTKDLAKHVTDLCEKNEAKFKFLYESKTPLFKKIETIAKEIYRADEVIADTKIRDQLKNFEEAGYGELPICVAKTQYSFSTDPSLKGAPTGHSLPIREIRLSSGAEFIVVVCGAIMTMPGLPRVPAADSIKLNKDGDIEGLF

SEQ ID NO: 166263 - protein, 256 aa, Unknown
  Bacterial polypetide isolated from the Sargasso Sea
GADLGAEKFMDIKCRKSNLKPSCIVIVATIRALKMHGGVEKEDLKKENIEALKKGLVNLERHINNVKKFGVETVVAINHFVMDTESEIKVLKEYCDSIGVKVSKCTHWSDGGEGTKDLAKKVVEIAENSKPENFKFLYDENDTLWKKIEKIAKEIYKASNIAADDNIKEQLKTFEKNGYGKLPVCIAKTQYSFSVDPKLKGAPSDHEIPIREVRLSSGAEFIVVVCGSIMTMPGLPRVPAADSIKLNNKGEIEGLF

SEQ ID NO: 166264 - protein, 102 aa, Unknown
  Bacterial polypetide isolated from the Sargasso Sea
MPSIPSDIEISQNASMKQIPEIASMLDIDLDGLDLYGKYKAKIENSVWELVKDNPDGKLILVTAITPTPAGEGKTCTSIGLAQAFGKLGIKHALALPIQTGN

SEQ ID NO: 166265 - protein, 234 aa, Unknown
  Bacterial polypetide isolated from the Sargasso Sea
MGKIKSDIEIAREAKMKPIQEVLNGLNVPDKAEVYSPIGRYIAKIKTEYLDTLKNNKDGKLILVTAITPTPAGEGKTTTSVGLNDGLNKIGKKSVVCLREPSLGPSFGMKGGAAGGGYAQVVPMEQINLHFTGDFHAITSAHNLLSALIDNHIYWGNKLNIDVRRIVWKRVMDMNDRSLRSIVVDLGGVANGYPRQDGFDITVASEIMAIFCLANDLTDLENRIGNITIAYTRD

SEQ ID NO: 166266 - protein, 179 aa, Unknown
  Bacterial polypetide isolated from the Sargasso Sea
DYHFALDTSKEVKTVLNFCKDKKVEVSECKHWAKGGKGASDLAKKVVKICKKKKSKFNFLYKDNLKLWDKIELIAKKIYKADKITASNEVIDELDKFENNGHGHLPVCIAKTQYSFSTDPKLKGAPSNHEIPIREVRLSSGAEFVVIICGSVMTMPGLPKVPAANKIKLNKKGEIEGLF

SEQ ID NO: 166267 - protein, 248 aa, Unknown
  Bacterial polypetide isolated from the Sargasso Sea
SKTDIQIAREANMKPIQEILDGVGVPDNAEAYSPISRYIAKIKLEYLETFKNKKDGKLILVTAITPTPAGEGKTTTSVGLSDGLNKIGKKSIVCLREPSLGPSFGMKGGAAGGGYAQVVPMEQINLHFTGDFHAITSAHNLLSALIDNHIYWGNKLNIDVRRIVWKRVLDMNDRALRSININLGGVANGFPREDGFDITVASEIMAIFCLSNDLHDLENRIGNITVAYTRDKKPIYAKDLNAHGPMTV

SEQ ID NO: 166268 - protein, 213 aa, Unknown
  Bacterial polypetide isolated from the Sargasso Sea
MSKSDIQIAREAKMKPINEILGKINVPDEPSAFSPMGRHIAKINLEYLDSLKDKQNGKLILVTAITPTPAGEGKTTTSVGLNDGLNKIGKNSIVCLREPSLGPSFGMKGGAAGGGYAQVVPMEQINLHFTGDFHAITSAHNLLSALIDNHIYWGNKLNIDVRRVVWRRVMDMNDRSLRSININLGGVANGFPREDGFDITVASEIMAIFCLAN

SEQ ID NO: 166269 - protein, 209 aa, Unknown
  Bacterial polypetide isolated from the Sargasso Sea
MGKIKSDIEIAREAKMKPVQEVLNGLNVPDKPEVYSPIGRYIAKIKTEYLDTLKNKKDGKLILVTAITPTPAGEGKTTTSVGLNDGLNKIGKKSIVCLREPSLGPSFGMKGGAAGGGYAQVVPMEQINLHFTGDFHAITSAHNLLSALIDNHIYWGNKLNIDVRRIVWKRVMDMNDRSLRSIVVDLGGVANGYPRQDGFDITVASEIMA

SEQ ID NO: 166270 - protein, 134 aa, Unknown
  Bacterial polypetide isolated from the Sargasso Sea
DVVELCEEKSEFKFLYSDDTPLFKKIEAIAKELYGASDVVADTKIREQLKNFQDNGYKKLPICIAKTQYSFSTDPNIKGAPSGHVLPIREVRLSSGAEFIVVVCGAIMTMPGLPKVPAADSIRINEKGETEGLF

SEQ ID NO: 166271 - protein, 293 aa, Unknown
  Bacterial polypetide isolated from the Sargasso Sea
MTEVKSDIQIAREAKMHPIKDILSKIGVPDENFAFSPMGRHIAKINLEYLDTLKNENGKLILVTAITPTPAGEGKTTTSVGLNDGLNKIGKKSIVCLREPSLGPSFGMKGGAAGGGYAQVVPMEQINLHFTGDFHAITSAHNLLSALIDNHIYWGNKLNIDVRRVVWRRVMDMNDRSLRSIIVDLGGVANGYPRQDSFDITVASELMAIFCLATDLKDLENRIGNITIGYTRDKQAIYAKDLNAQGPMTVLLKEAIRPNITQTLENNPAIIHGGPFANIAHGCNSVIATKAGL

SEQ ID NO: 166272 - protein, 196 aa, Unknown
  Bacterial polypetide isolated from the Sargasso Sea
ERHINNTRKFGIPVTIAVNHFITDTDKEMKTLLDFCKTQGVKASKCTHWSNGGEGTKELAENVVEICKDNQSTFKYLYEDSLSLFKKIEKIAQEIYHASEVVADTKVRQQLKDFEEKGYGKLPVCIAKTQYSFSTDPSLKGAPTGHVLPVREVRLSSGAEFVVVVCGEIMTMPGLPKVPAADSIKLNDKGEIEGLF

SEQ ID NO: 166273 - protein, 365 aa, Unknown
  Bacterial polypetide isolated from the Sargasso Sea
AMTTSLADMEQRLGNMVVGPDRAGGPVTCDDLGVTGALMALMRDALKPTLMQTLEATPVLVHAGPFANIASGNSSIIADQIGLSMVGKGGFVVTEAGFGADIGLEKFVNLKCRKSGLKPNCAVIVATVRALKCHGGGPPVKAGQPLDHSYTTENVDMVREGMCNLVRHIENTKAFGIPVVVAINAFPTDTEAEHAAIRELSLAAGAEDAVLCTHHARGGAGAVDLAAAVKAACEKNEDCKDFKFGYDLSADIKSKIEAVAKNVYKAGAVEFSEQAEEKIKLYTEQGFGELPICMAKTQYSFSHDLNLKGAPSGFTLPIGDVRLSAGAGFLVPLVGAFPTIPGLPTRPAYYEISVDTESEQILGLS

SEQ ID NO: 166274 - protein, 264 aa, Unknown
  Bacterial polypetide isolated from the Sargasso Sea
MGKIKSDIEIARAAKMKPIQDVLNGLNVPDKAEVYSPIGRYIAKIKTEYLDTLKNKKDGKLILVTAITPTPAGEGKTTTSVGLNDGLNKIGKKSIVCLREPSLGPSFGMKGGAAGGGFAQVVPMEQINLHFTGDFHAITSAHNLLSALIDNHIYWGNKLNIDVRRIVWKRVMDMNDRSLRSIVVDLGGVANGYPRQDGFDITVASEIMAIFCLANDLTDLENRIGNITVAYTRDKKPIYAKDLNAHGPMTVLLKDAIRPNRHKH

SEQ ID NO: 166275 - protein, 232 aa, Unknown
  Bacterial polypetide isolated from the Sargasso Sea
MSAIKSDIQIAREAKMQPIKDILAKINVPDESSAFSPMGRHIAKINLEYLDSLKNKKEGKLILVTAITPTPAGEGKTTTSVGLNDGLNKIGKKSIVCLREPSLGPSFGMKGGAAGGGYAQVVPMEQINLHFTGDFHAITSAHNLLSALIDNHIYWGNKLNIDVRRIVWKRVLDMNDRALRSININLGGVANGFPREDGFDITVASEIMAIFCLANNLEDLENRIGNITVAYT

SEQ ID NO: 166276 - protein, 219 aa, Unknown
  Bacterial polypetide isolated from the Sargasso Sea
MSKIKSDIQIAREAKMQPIKDILAKINVPDESSAFSPMGRHIAKINLEYLDSLKTKKDGKLILVTAITPTPAGEGKTTTSVGLNDGINKIGKKSIVCLREPSLGPSFGMKGGAAGGGYAQVVPMEQINLHFTGDFHAITSAHNLLSSLIDNHIYWGNKLNIDVRRVVWKRVMDMNDRSLRSIIVDLGGVANGYPRQDGFDITVASEIMAIFCLATDLND

SEQ ID NO: 166277 - protein, 456 aa, Unknown
  Bacterial polypetide isolated from the Sargasso Sea
MNLHLTGDFHALTAAHNLAAAALDARLFHERKLGDQFSARTGLQRLDIDADNILWPRTLDMNDRALRHLTIGQGGAADGVERQDRFVITAASELMAILALASDLKDLRQRIGRIQLARDLRGKPITAEQLEVAGAMTVLLKEALQPTLMQTTEQTPVLVHAGPFANIAHGNSSVIADRMALGLTDYVVTEAGFGSDMGLEKFFNIKHRQSGITPACVVLVATVRGLKANSGLLDIRPGQPLPESLLREDLPTLEQGCANLGWHIANARRYGVPVVVAINRFPTDSEAELALLAREAARAGACGSAISSAFAQGGAGASELAQAVVAACEQPGKVKLLYPDEMSLDAKLATLVECGYGGRGVTLSDKARRQLAQLSAEGWDHLPVCVAKTPLSISHDPALKGVPTDFEVPIEEVKLCAGAGFVYALAGPIMTMPGLGSLPAYRHIDIDDDGEIVGLS

SEQ ID NO: 166278 - protein, 209 aa, Unknown
  Bacterial polypetide isolated from the Sargasso Sea
MLKVKSDIEIAREAKMKPIQEVLNGLDVPDKAEVYSPIGRYIAKIKTEYLDTLKNKKDGKLILVTAITPTPAGEGKTTTSVGLNDGLNKIGKKSIVCLREPSLGPSFGMKGGAAGGGYAQVVPMEQINLHFTGDFHAITSAHNLLSALIDNHIYWGNKLNIDVRRIVWKRVMDMNDRSLRSIVVDLGGVANGYPRQDGFDITVASEIMA

SEQ ID NO: 166279 - protein, 272 aa, Unknown
  Bacterial polypetide isolated from the Sargasso Sea
MSEYKTDLEIAREANKKPIIELAKEKLSISDQDLIPYGHYKAKISSNFLDKVENEKDGKLILVTAMTPTTAGEGKTTTSVGLNDGLNYIGKKSMVALREPSLGPCFGMKGGAAGGGYAQVVPMEDINLHFTGDFHAITSAHMLLSAMIDNHVYWNLEPKIDPRRITWRRVVDMNDRALRSIINSLGGVPNGYPREDGFDITVASEIMAILCLSKNFEDLTHRLGKIIIGYTRELQPVYCKDIKADGAMSVLLKDALQPNLVQTLENNPAFIH

SEQ ID NO: 166280 - protein, 139 aa, Unknown
  Bacterial polypetide isolated from the Sargasso Sea
ELAETVVKVIDESENNFKFLYEDDLDLWSKMETIAQKIYGAKNITATSAVKKQIDELQKNGYGKYPVCVAKTQYSFSTDPSLRGAPSGHEISIREVRLAAGAEFIVMVCGDIMTMPGLPKVPAAEKIDLDDKGNVTGLF

SEQ ID NO: 166281 - protein, 263 aa, Unknown
  Bacterial polypetide isolated from the Sargasso Sea
PVYAKDLKAHGPMTVLLKDAIRPNVTQTLENNPAIIHGGPFANIAHGCNSVIATKTGLKLADYVVTEAGFGADLGAEKFLDIKCRKSNLKPSCVVIVATIRALKMHGGVAKDDLKNENVEALKKGLVNLERHIENVKKFGLPVAIAVNHFIKDTDSEVKALIDFCDSLGVKASLCTHWANGGEGTKELAAHVADLCEKKDAKFNFLYESKTPLFKKIETIAKEIYRADEVIADTKIRDQLKSFEEAGYGELPICVAKTQYSFQ

SEQ ID NO: 166282 - protein, 299 aa, Unknown
  Bacterial polypetide isolated from the Sargasso Sea
VIPMEDINLHFSGDFNAIQLANNLLAAMVDNHIHHGNSLNIDVRRVTWKRVLDMNDRALRKTVCSLGSIGNGYPREDGFDIVVASEVMAIFCLATSLSDLKKRLGDIVIGYTRDKEPILAKQINAHGAMTVLLKDAVMPNLVQTLENNPAIIHGGPFANIAHGCNSVIATKASLKLADYVVTEAGFGADLGAEKFLDIKCRKANLKPSVVVLVATIRALKYHGGCPKEDFSKEGCDYLKKGLVNLEKHVENLKDHYGLPVVVGINGFASDTDAERKILQDKSSELNVPIVSSTHHANGG

SEQ ID NO: 166283 - protein, 285 aa, Unknown
  Bacterial polypetide isolated from the Sargasso Sea
SQYCTWAVIQVVATKLALKLADYVVTEAGFGADLGAEKFFDIKCRKSGLKPDAVVLVATTKALKMHGGVTKDKLGAENVDAVTKGCKNLKRHIENIKKFGVPVMVAINDYVTDSKDEHAAIIQYCKEIGVECRISSHWEKGGKGASELAEEVVKIADSNSSDFKPLYDNKMSLWDKTQFIAKNIYGASEIIADKKVRNQFKKLEDDGFGEYPICMAKTQYSFSTDPLLIGAPSGHDVPVREVRLSAGAEFIVVVCGEIMTMPGLPRIPASEGIDVDDEGLIQGLF

SEQ ID NO: 166284 - protein, 271 aa, Unknown
  Bacterial polypetide isolated from the Sargasso Sea
KTGLKLADYVVTEAGFGADLGAEKFLDIKCRKSNLKPNCVVIVATIRALKMHGGVAKDDLKNENVEALKKGLVNLERHIENVKKFGLPVAIAVNHFIKDTDSEVKALIDFCDSLEVKASLCTHWANGGEGTKELAAHVADLCEKKDAKFNFLYESKTPLFKKIETIAKEIYRADEVIADTKIRDQLKSFEEAGYGELPICVAKTQYSFSTDPNLKGAPIGHVLPVREIKLSSGAEFIVVVCGAIMTMPGLPRVPAADSIKLNEKGEIEGLF

SEQ ID NO: 166285 - protein, 119 aa, Unknown
  Bacterial polypetide isolated from the Sargasso Sea
SEVMAIFCLANDLKDLERRLGNITIGYTRNKKPIFAKDLKAEGPMTVLLKQALMPNLVQTLENNPAIIHGGPFANIAHGCNSVIATKTSLKIADYVVTEAGFGADLGAEKFLDIKCRKA

SEQ ID NO: 166286 - protein, 282 aa, Unknown
  Bacterial polypetide isolated from the Sargasso Sea
IREASLGPCFGMKGGAAGGGYAQVIPMEDMNLHFTGDFHAITSAHNLLSAMIDNHIYWGNKENIDPRRITWRRVIDMNDRALRKVITSLGGVPNGYPRESSFDIVAASEVMAILCLSTNFNDLKFRLGNIIIGYRYDKSPVFSRDIHANEAMSVLLKDAILPNLVQTLENNPVFVHGGPFANIAHGCNSISATITALQNSEFVVTEAGFGADLGAEKFLNIKCRLANLQPDCVVIVATVRALKMNGGVNKENLLNENLSAVKEGCQNIKRHIENIKIFGVTP

SEQ ID NO: 166287 - protein, 258 aa, Unknown
  Bacterial polypetide isolated from the Sargasso Sea
CLATDADDLKKRIGNIVIGYSRSNEPIRAKQLKADGALSVLLQDAFQPNLVQTLENNPAFIHGGPFANIAHGCNSVVATKTALKLADYVVTEAGFGADLGAEKFFDIKCRKSDLKPDAVVLVATTKALKMHGGVKKEDLASENVDAVIGGCKNLERHVKNIRKFGVPVIVGINDYVTDTENEHAAIIDFCKNMGVACKISSHWEKGGEGASDLAKEVAKLADSGTSEFKTLYDNEMSLWDKTEYIAQNIYGASEIIAD

SEQ ID NO: 166288 - protein, 353 aa, Unknown
  Bacterial polypetide isolated from the Sargasso Sea
MGPSFGMKGGAAGGGYAQVVPMEQINLHFTGDFHAITSAHNLLSALIDNHIYWGNKLEIDPENIVWKRVVDLNDRSLRKIKINLEQLKANTPRDDSFDITVASEVMAIFCLSNDINELERKIGNITVAYTKSKKPIYAKDLNAHGPMTVLLKEAIRPNAVQTLENNLAIIHGGPFANIAHGCNSILATKTALKLSEYVITEAGFGADLGAEKFLNIKCRKAGIQPKCVVLVATIRALKMHGGVEKDNLKLENLDALKKGLPNLKRHIENVKKFGLDLVVAINHFKTDTEKEVQIIEKYCNDLNVQVSLCTHWANGGKGTKDLANKVVKLCNEAKKAKFNFIYDDKISLLEKMK

SEQ ID NO: 166289 - protein, 313 aa, Unknown
  Bacterial polypetide isolated from the Sargasso Sea
MPKSDIEIARAANMKPIKEILEVLNVPDDPKAFSPMGRHIAKINLEYLDQQKSTKDGKLILVTAITPTPAGEGKTTTSVGLNDGLNKIGKKSIVCLREPSLGPSFGMKGGAAGGGYAQVVPMEQINLHFTGDFHAITSAHNLLSALIDNHIYWGNKLNIDVRRVVWKRVMDMNDRSLRSIVVDLGGVANGYPRQDGFDITVASEIMAIFCLANDLKDLENRIGNITIAYTRDKKPIYAKDLNAQGPMTVLLKDAIRPNVTQTLENNPAIIHGGPFANIAHGCNSVIATKAGLKLADFVVTEAGFGADLGAESF

SEQ ID NO: 166290 - protein, 260 aa, Unknown
  Bacterial polypetide isolated from the Sargasso Sea
EQGSVQTLGAEKFLDIKCRKAGLKPSCVVIVATIRALKMHGGVEKENLKKEDTNALIKGLVNLERHILNIKKFGLKPIVAINHFALDTKKEIDVVLNFCKNMNVQVSECKHWAMGGKGTTDLAKKVVKTCKDSKKSNFKLLYEDNLNLWDKIEKIVKEIYRGNGIIANEDIKEQLKVFENNGYKSLPVCIAKTQYSFSTDPKLKGAPSNHEIPIREVRLSSGAEFVVVVCGSIMTMPGLPKVPAANNIKLNKKGEVEGLF

SEQ ID NO: 166291 - protein, 243 aa, Unknown
  Bacterial polypetide isolated from the Sargasso Sea
MLKSDIEIARKAKTISIQKVGSKLGLKEEHLLPYGNDKAKISEKFIKSVQKNKNGKLILVTAINPTPAGEGKTTTTVGLGDGLNALGKKTSVCIREASLGPCFGMKGGAAGGGLSQVIPMEDMNLHFTGDFHAITSAHNLLSAMIDNHIYWGNKEKIDLRRVVWRRVVDMNDRALRDIVTSLGGVSNGVPKQTGYDITVASEVMAILCLANDLQDLQRRLGDIIVAYRSDKSPVYCRDIKADG

SEQ ID NO: 166292 - protein, 286 aa, Unknown
  Bacterial polypetide isolated from the Sargasso Sea
FTGDFNAIQLANNLLAAMLDNHIHHGNKLGIDVRRVTWKRVLDMNDRALRKTVCSLGSVGNGYPREDGFDIVVASEIMAIFCLSTSIMDLKERLGKIVIAYTRDKKPILAKDINAHGAMTVLLKDALMPNLVQTLENNPAMIHGGPFANIAHGCNSVIATKASLKLADYVVTEAGFGADLGAEKFLDIKCRKANLKPSVVVLVATIRALKYHGGCDLKELNKESLDYLEKGLENLERHIHNLKNNFGLPVVVGINGFSFDTENEKDLLQKKSKGYRVPIISSTHWA

SEQ ID NO: 166293 - protein, 258 aa, Unknown
  Bacterial polypetide isolated from the Sargasso Sea
EAGFGADLGAEKFFNIKCRKSGLKPDAVVLVATTRALKMHGGLSKDDLNTENLNALDKGLCNLERHIRNIKLFGVNVVVAINKFHSDTQKEFDLIKNSCSKNNVNVFECNHWAEGGEGTVDLANHVVEVTSKNDSGFVTLYQDKMSLVDKVRKICRKIYSAEDIVFDQKVEKQFKRFQELYGNFPICMAKTQYSFSTDNNLLGAPVNHNIPIRELRLSAGAEFIVVVCGEIMTMPGLPRSPAANQIFVNDEGNIEGLF

SEQ ID NO: 166294 - protein, 303 aa, Unknown
  Bacterial polypetide isolated from the Sargasso Sea
EPSLGPSFGMKGGAAGGGYAQVVPMEQINLHFTGDFHAITSAHNLLSALIDNHIYWGNKLNIDVRRVVWRRVMDMNDRSLRSIIVDLGGVANGYPRQDSFDITVASELMAIFCLATDLKDLENRIGNITIGYTRDKQSIYAKDLNAQGPMTVLLKEAIRPNVTQTLENNPAIIHGGPFANIAHGCNSVIATKAGLKLSDYVVTEAGFGADLGAEKFLNIKCRKSGLKPDCVVIVATIRALKMHGGVNKEDLKKENVSALKDGLVNLRRHINNIRKFGLPVTVAVNHFITDSEDEMKTLLDFCE

SEQ ID NO: 166295 - protein, 240 aa, Unknown
  Bacterial polypetide isolated from the Sargasso Sea
MSNYPTDLEIANAAHIKPIEEIANSLDINPDDLIRYGNDKAKLSSKLINSLSKKENGKLILVTAISPTPAGEGKTTTSVGLVDGLCHIGKKAMICLREPSLGPCFGMKGGAAGGGHAQVIPMTDINLHFTGDFHAIGAAHNLLSALIDNHIHWENKLNIDPRRITWKRVVDMNDRSLRDITCGLGGIGNGIPRQSGYDITVASEIMAVFCLASDIDDLQERIGNIVIGYTRDKEPVRAKQ

SEQ ID NO: 166296 - protein, 302 aa, Unknown
  Bacterial polypetide isolated from the Sargasso Sea
TDMKIAREAKMNPIQKFLDGINVPDKAEVYSPMGRYIAKIKTEYLESLKNKKNGKLILVTAITPTPAGEGKTTTSVGLCDGLNKIGKKSIVCLREPSLGPSFGMKGGAAGGGYAQVVPMEQINLHFTGDFHAITSSHNLLSALIDNHIYWGNKLNIDVRRIAWKRVMDMNDRSLRSIVVDLGGIANGYPRQDGFDITVASEIMAIFCLAKDLKDLENRIGNITIGYTRDKKPIFAKDLNAQGPMTVLLKDAIRPNVTQTLENNPAIIHGGPFANIAHGCNSVIATKTALKLSDYVITEAGFG

SEQ ID NO: 166297 - protein, 257 aa, Unknown
  Bacterial polypetide isolated from the Sargasso Sea
KLKNNIPRDDNFDITVASEVMAIFCLSKNIKDLEKKIGNITVAYTKKNEPIYAKDLRAEGPMSVLLKEAIRPNAVQTLENNLAIIHGGPFANIAHGCNSILATKTALKLSDYVVTEAGFGADLGAEKFLNIKCRKAKIQPSCVVLVATIRALKMHGGLEKDDLKKENLEALKKGLPNLERHIENIKKFGLEVLVAINHFVSDTDKEVQLIKEYCKKLGVKVNLCKHWAEGSSGAKGLAENVIEICKNSNKEKFKYLY

SEQ ID NO: 166298 - protein, 239 aa, Unknown
  Bacterial polypetide isolated from the Sargasso Sea
GFPREAGFDITVASEVMAILCLAKDLNDLQTKLGNMIVAYRRNRSPVFCRDIKADGAMTVLLKDAIKPNLVQTLENNPAFVHGGPFANIAHGCNSLIATQTALKLSDYVVTEAGFGADLGAEKFLNIKCRKAGLSPAVIVLVATIRAMKMNGGVAKEDLGQENVSAVKSGCTNLGCHIENLKSFGVPVIVAINHFVKDTQNEIDAVMQFVTSQGSEAIVSKHWEFGSEGSIDLANRVSE

SEQ ID NO: 166299 - protein, 256 aa, Unknown
  Bacterial polypetide isolated from the Sargasso Sea
DNHIYWGNKLNIDPENIVWKRVVDLNDRALRSVKINLDKLKNNIPRNDGFDITVASEVMAIFCLSNNLEDLENKIGNITIAYTKDKKPIYAKDLKAQGPMTVLLKEAIRPNVTQTLENNPAIIHGGPFANIAHGCNSIIATKTALKLSEYVVTEAGFGADLGAEKFLDIKCRKAGIQPNCVVIVATIRALKMHGGVEKEDLKKENLEALKKGFPNLEKHINNVKKFGLELVVAINHFITDSHKEVKLIQEYFQNLG

SEQ ID NO: 166300 - protein, 287 aa, Unknown
  Bacterial polypetide isolated from the Sargasso Sea
KRVVDMNDRSLREITCGLGGTGNGIPRQSGFDITVASEIMAVFCLASDADDLKKRIGNIVIGYTRSNQPVKAKQLKADGAISALLQDAFQPNLVQTLENNPAFIHGGPFANIAHGCNSVVATKTALKLADYVVTEAGFGADLGAEKFFDIKCRKSGLKPDAVVLVATTKALKMHGGIKKEDLGSENVDAVKSGCKNLERHIKNIRKFGVPVIVGINDYVSDTENEHKAIIDFCINMGVACKLSSHWEKGGEGAADLAKEVAKLADSGISEFKTLYDNQMSLWDKQSI

SEQ ID NO: 166301 - protein, 291 aa, Unknown
  Bacterial polypetide isolated from the Sargasso Sea
RHLSWWAVCNIAHGCNSVVATKTALKLADYVVTEAGFGADLGAEKFFNIKCRKSGLRPDAVVLVATTRALKMHGGLSKDDLNTENLNALDKGLCNLERHIRNIKLFGVNVVVAINKFHLDTQKEFELIMNSCSKNNVNVFECNHWAEGGEGTIDLANHVVEVTSKNDSGFVTLYEDKISLVEKVRKICREIYSAEDIVFDQKVEKQFKSFQELYGDFPICMAKTQYSFSTDNNLLGAPVNHNIPIRELRLSAGAEFIVVVCGEIMTMPGLPRSPAANQIFVNDEGNIEGLF

SEQ ID NO: 166302 - protein, 293 aa, Unknown
  Bacterial polypetide isolated from the Sargasso Sea
RDITCGLGGTGNGIPRESGFDITVASEIMAVFCLASDIKDLQKRIGNIVIGYTKSNEPVRANQLKADGAITALLKDAFQPNLVQTLENNPAFMHGGPFANIAHGCNSVVSTKTALKLADYVVTEAGFGADLGAEKFFNIKCRKSGLQPDAVVLVATTKALKMHGGVKKEDLGEENVDAVTLGCKNLEKHVENINKFGVPVIVAINDYVSDTKREHNTIINFCKNLGIQCKISSHWEKGGKGASELAEEVAKLVDSNISEFKTLYEDAMSLWDKTKYVAQNIYGAQDIIADKQS

SEQ ID NO: 166303 - protein, 233 aa, Unknown
  Bacterial polypetide isolated from the Sargasso Sea
MSDYSTDLEIANAAHKKPIEEIADLLDIDSDDLIRYGNDKAKLSTKAVNSLSKKENGKLILVTAISPTPAGEGKTTTSVGLVDGLCHIGKKAMICLREPSLGPCFGMKGGAAGGGHAQVIPMTDINLHFTGDFHAIGAAHNLLSALIDNHIHWENKLNIDPRRITWKRVVDMNDRSLRDITCGLGGIGNGIPRQSGYDITVASEIMAVFCLASDIDDLQKRIGNIVIGYTRDR

SEQ ID NO: 166304 - protein, 290 aa, Unknown
  Bacterial polypetide isolated from the Sargasso Sea
YWGNELDIDTRRVVWRRVVDMNDRALRQITASLGGVSNGFPREAGFDITVASEVMAILCLAEDLADLQKRLGDMIVAYRRDRSPVFCRDIKADGAMTVLLKDAIQPNLLQTLENNPAFVHGGPFANIAHGCNSVIATKTALKLAEYVVTEAGFGADLGAEKFLNIKCRKAGLSPSAVVLVATVRAMKMNGGVEKNDLNNENVAAVKAGCPNLGRHIENLRLFGVPVLVAINHFVKDTDAEVQAIQNYCSKMGAEAIVSKHWSDGSAGSENLAKRVAEVADAGEANFSPIY

SEQ ID NO: 166305 - protein, 138 aa, Unknown
  Bacterial polypetide isolated from the Sargasso Sea
MSSDIEIARKANMEPILDIGAKLDIPFKALRPFGHFKAKLSPTWLQNKSKKKNAKLILVTAINPTPAGEGKTTTSVGLNDGLNAIGKKSIVCLREPSLGPCFGMKGGAAGGGYAQVVPMEDINLHFTGDFHAITSAHN

SEQ ID NO: 166306 - protein, 320 aa, Unknown
  Bacterial polypetide isolated from the Sargasso Sea
RGAQAGGYSQFLPMEDINLHSPGDFSAIEKAHNLLSAIVDNNIQSKTNSLGIDSRTVTWKRVMDMNDRSLRNIVVGLGGPTSGVPRETGFDITAASEIMAILCLSNDLADLKTRLGNIFIGYTFKKEPIYCRDLKVEGAMAALLKDAVKPNLVQTIEGNPAIIHGGPFANIAQGTNSVLATKMGMTLSDYTVTEAGFGADLGAEKFLDIKCQSAGLTPKAVVVTTTIRALKYHGGADLKSLTTENVDALKKGIPNLEKHLENIQQFNLVPIISINRFVSDSDEEIETIIQFAKDNNIRVSLAEVWAKGGKGSVDLAKQVV

SEQ ID NO: 166307 - protein, 308 aa, Unknown
  Bacterial polypetide isolated from the Sargasso Sea
KVASKLDLKEENLRPYGHHIAKIDMSSINKLQEKKSKLILVTAITPTPAGEGKTTTSVGLSDGLCKIGKKSLVCLREPSLGPSFGMKGGAAGGGHAQVIPMEHINLHFTGDFHAITSANNLLASLIDNHIYWGNKLGIDTRRVLWKRCLDLNDRALREITANLGGISNGYPRLDGFNITVASEVMAIFCLAKDLKDLERRLGNITIAYTRDKKPIYAKDLKAQGPMTVLLKQALMPNLVQTLENNPAIIHGGPFANIAHGCNSVIATKASLKISDYVVTEAGFGADLGAEKFLNIKCRKAGWNQMRLF

SEQ ID NO: 166308 - protein, 254 aa, Unknown
  Bacterial polypetide isolated from the Sargasso Sea
QVVPMEEMNLHFTGDFHAITTAHNLLSAMIDNHIYWGNELAIDERRVVWRRVLDMNDRALRDTVTSLGGVANGFPRQTGFDITVASEVMAILCLATDLDDLQRRLGDIIVAYTRKKEPITCRDIQADGAMTVLLKDAMQPNLVQTLENNPAFVHGGPFANIAHGCNSVMATTTALKIADYVVTEAGFGADLGAEKFMNIKCRKAGLAPSVVVVVATVRAMKMNGGVAKADLGGENVDAVKKGCPNLGRHIENVK

SEQ ID NO: 166309 - protein, 239 aa, Unknown
  Bacterial polypetide isolated from the Sargasso Sea
MTVYLSDLEIANAAHKKPINEIASILDIDEKNLIKFGDDKAKLNSDFIDSVSKNENGKLILVTAISPTPAGEGKTTTSVGLVDGLCHIGKKAMICLREPSLGPCFGMKGGAAGGGYAQVIPMTDINLHFTGDFHAIGAAHNLLSALIDNHIHWDNELNIDPRRITWKRVVDMNDRSLRDITCGLGGTGNGIPRQSGFDITVASEIMAVFCLASDIEDLQKRIGNIVIGYTKSNEPVRAS

SEQ ID NO: 166310 - protein, 258 aa, Unknown
  Bacterial polypetide isolated from the Sargasso Sea
DEPSAFSPMGRHIAKINLEYLDSLKDKQNGKLILVTAITPTPAGEGKTTTSVGLNDGLNKIGKNSIVCLREPSLGPSFGMKGGAAGGGYAQVVPMEQINLHFTGDFHAITSAHNLLSALIDNHIYWGNKFNIDVRRVVWRRVMDMNDRSLRSININLGGVANGFPREDGFDITVASEIMAIFCLANDLEDLEKRIGNITVAYTRDRKPIFAKDLNAHGPMTVLLKEAIRPNVTQTLENNPAIIHGGPFANIAHGCNSV

SEQ ID NO: 166311 - protein, 278 aa, Unknown
  Bacterial polypetide isolated from the Sargasso Sea
HLNVPDSPEAYSPMGRHIAKINLEYLEKHKDKKDGKLILVTAITPTPAGEGKTTTSVGLNDGLSKIGKKSIVCLREPSLGPSFGMKGGAAGGGYAQVVPMEQINLHFTGDFHAITSAHNLLSALIDNHIYWGNKLNIDVRRITWRRVVDMNDRALRSINVNLGGIANGFPREDGFDITVASEIMAIFCLANDLDDLEKRIGNITIGYTRDKKPIYAKDLNAHGAMSVLLKEAIRPNITQTLENNPAIIHGGPFANIAHGCNSVIATKAGLKLADYVLR

SEQ ID NO: 166312 - protein, 294 aa, Unknown
  Bacterial polypetide isolated from the Sargasso Sea
ADGAITALLKDAFQPNLVQTLENNPAFIHGGPFANIAHGCNTVVATKLALKLADYVVTEAGFGADLGAEKFFDIKCRKSGLKPDAVVLVATTKALKMHGGVTKDNLRAENVDAVTKGCKNLKRHIENIKKFGVPVMVAINDYVTDTKDEHAAIIQYCKEIGIECRISSHWEKGGKGASDLAEEVVKIADSNSSDFKPLYDNKMSLWDKTQFIAQNIYGASEIIADKKVRNQFKKLEDDGFGEYPICMAKTQYSFSTDPLLMGAPSGHDVPVREVRLSAGAEFIVVVCGEIMTMP

SEQ ID NO: 166313 - protein, 286 aa, Unknown
  Bacterial polypetide isolated from the Sargasso Sea
KLKNNIPRNDGFDITVASEVMAIFCLSNNLEDLENKIANITIAYTKDRKPIYAKDLNAQGPMTVLLKEAIRPNVTQTLENNPAIIHGGPFANIAHGCNSIIATKTALKLSDYVVTEAGFGADLGAEKFLDIKCRKAGIQPNCVVIVATIRALKMHGGVEKDDLKKENLDALKKGLPNLERHINNVKKFGIELVVAINHFITDTNKEVKLIQEYCSKLGVKVSLCTHWSDGGKGTEDLAKNVVESCKKNNKDKFKYIYKDDMPILKKVETIAKEVYGASGIEIDDKA

SEQ ID NO: 166314 - protein, 260 aa, Unknown
  Bacterial polypetide isolated from the Sargasso Sea
EAGFGADLGAEKFLDIKCRKAGLKPSCVVIVATIRALKMHGGVEKENLKKEDSDSLKKGLVNLERHILNIKKFGLEPIVAINHFALDTKKEINGVLNFCKNMNVQVSECKHWAMGGKGTTDLAKKVVKTCKDSKKSSFKLLYEDDLNLWDKIEKIVKEIYRGNGITANEDVKEQLKVFENNGYKSLPVCIAKTQYSFSTDPKLKGAPSNHEIPIREVRLSSGAEFIVVVCGSIMTMPGLPKVPAANNIKLNKKGDVEGLF

SEQ ID NO: 166315 - protein, 299 aa, Unknown
  Bacterial polypetide isolated from the Sargasso Sea
LRVPDKPEAFSPMGRHIAKINFEYLKRLKNKKEGKLILVTAISPTPAGEGKTTTSVGLSDGINKIGKKSIVCLREPSLGPSFGMKGGAAGGGYAQVVPMEQINLHFTGDFHAITSAHNLLSALIDNHIYWGNKLNIDENRIVWKRVLDMNDRALRFININTKGVAKNYLRQDGFDITVASEVMAIFCLANDLKDLENRIGNITIAYNKQNKPIYAKDLNAHGPMTVLLKEALRPNVTQTLEHNPAIIHGGPFANIAHGCNSVIATKTALKLSDYVVTEAGFGADLGAEKFLNIKCRKSK

SEQ ID NO: 166316 - protein, 112 aa, Unknown
  Bacterial polypetide isolated from the Sargasso Sea
MSDIEIARAAQKKPIFEIGDVLGIPSSELVPFGHDKAKISQNFINSVQKNAEGKLILVTAINPTPAGEGKTTTTVGLGDGLNRIGKKAMICIREASLGPNFGMKGGAAGGGY

SEQ ID NO: 166317 - protein, 305 aa, Unknown
  Bacterial polypetide isolated from the Sargasso Sea
MTVLLKEALQPNLVQTLENNPAFIHGGPFANIAHGCNSVVATRAGLELGDYVITEAGFGADLGAEKFLNIKCRKANLKPDAVVIVATIRALKMNGGIPKDQLSKENVGALEKGSINLLRHIENIKKFNLPVIVGINHFVSDTNNEVEKLLDIVSSSGSEAIVCKHWSDGSEGTKQLAQKVVGICDSNSADFQPLYRDDLPLIDKIKCVATEIYRAADISADKKIINQLNDWEKAGYGNLPICMAKTQYSFSADPNLLGAPEGHIIPIREVRLSAGAGFIVVICGDIMTMPGLPSVPAAEKIHIDK

SEQ ID NO: 166318 - protein, 298 aa, Unknown
  Bacterial polypetide isolated from the Sargasso Sea
MLQKNFPIDESNLVPFGHYKAKLSSEYVNKLESKDDGKLILVTAMTPTTAGEGKTTTSVGLTDGLNYIGKKAMVALREPSLGPCFGMKGGAAGGGYAQVVPMEDINLHFTGDFHAITSAHMLLSAMVDNHIYWNLEPRIDSRRVTWRRVVDMNDRALRSITNSLGGISNGFSREDGFDITVASEVMAILCLSKNFDDLTSRLGKIIVGYSRDLEPILCKDVKADGAMSVLLKDALQPNLVQTLENNPAFIHGGPFANIAHGCNTVIATKTALKLTDYVVTEAGFGADLGAEKFLNIKC

SEQ ID NO: 166319 - protein, 291 aa, Unknown
  Bacterial polypetide isolated from the Sargasso Sea
AREAKMQHINEVLAKINVPDESTAFSPMGRHIAKINLEYLDTLKDKPEGKLILVTAITPTPAGEGKTTTSVGLNDGLNKIGKKSIVCLREPSLGPSFGMKGGAAGGGYAQVVPMEQINLHFTGDFHAITSAHNLLSALIDNHIYWGNKLDIDVRRIVWKRVMDMNDRSLRSININLGGVANGFPREDGFDITVASEIMAIFCLSNDLEDLEKRIGNITIAYTRDKKPVYAKDLKAHGPMTVLLKDAIRPNVTQTLENNPAIIHGGPFANIAHGCNSVIATKTGLKLADYVV

SEQ ID NO: 166320 - protein, 177 aa, Unknown
  Bacterial polypetide isolated from the Sargasso Sea
ERVVDLNDRALRSIKINLGKLKNNIPRDDGFDITVASEVMAIFCLSNNLEDLEDKIANITIAYTKDKKPIYAKDLNAQGPMTVLLKEAIRPNVTQTLENNPAIIHGGPFANIAHGCNSIIATKTALKLSDYVVTEAGFGADLGAEKFLDIKCRKAKIQPNCVVIVATIRALKMHGGV

SEQ ID NO: 166321 - protein, 277 aa, Unknown
  Bacterial polypetide isolated from the Sargasso Sea
KKENGKLILVTAITPTPAGEGKTTTSVGLNDGLNKVGKKSIVCLREPSLGPSFGMKGGAAGGGYAQVVPMEQINLHFTGDFHAITSAHNLLSALIDNHIYWGNKLNIDVRRVVWRRVMDMNDRSLRSIIVDLGGVANGYPRQDSFDITVASELMAIFCLATDLKDLENRIGNITIGYTRDKKSIYAKDLNAQGPMTVLLKEAIRPNVTQTLENNPAIIHGGPFANIAHGCNSVIATKAGLKLADYVVTEAGFGADLGAEKFLNIKCRKSGLKPDCVV

SEQ ID NO: 166322 - protein, 81 aa, Unknown
  Bacterial polypetide isolated from the Sargasso Sea
MSYKSDIEIARSAEKKAIQDVGAHLGIPVEHLLPYGHDKAKVSQEFINGVQDKENGKLILVTAINPTPAGEGKTTTTVGWR

SEQ ID NO: 166323 - protein, 266 aa, Unknown
  Bacterial polypetide isolated from the Sargasso Sea
CLASDIDDLKKRICNIVIGYTKSNEPVRAKQLNADGAITALLKDAFQPNLVQTLENNPAFIHGGPFANIAHGCNSVVSTKLALKLADYVVTEAGFGADLGAEKFFDIKCRKSGLKPDAVVLVATTKALKMHGGVEKENLGSENIDAVNKGCKNLERHIENIRKFGVPVIVAINDYVTDTEKEHDEILNFCKKIGVQCKISSHWEKGGEGAADLAEEVAKIADSGSSEFKTLYDNKMSLWDKTQYIAQNIYGAADIIADKKVRNQFK

SEQ ID NO: 166324 - protein, 185 aa, Unknown
  Bacterial polypetide isolated from the Sargasso Sea
MSSDIEIARNARLEPIMDVGAKLDIPFKALRPYGHFKAKLSSSWLENKLENKNSKLILVTAINPTPAGEGKTTTSVGLNDSLNKIGKKSIVCLREPSLGPCFGMKGGAAGGGYAQVVPMEDINLHFTGDFHAITSAHNLLSAMIDNHIYWGNKQEIDPRRVSWKRVVDMNDRALRNIVVSLGGVS

SEQ ID NO: 166325 - protein, 303 aa, Unknown
  Bacterial polypetide isolated from the Sargasso Sea
PNLVQTLENNPAFIHGGPFANIAHGCNTVVATKLALKLADYVVTEAGFGADLGAEKFFDIKCRKSGLKPDAVVLVATTKALKMHGGVTKDNLGVENVDAVTKGCKNLKRHIENIKKFGVPVMVAINDYVTDTKDEHAAIIQYCKEIGVECRISSHWEKGGKGASELAEEVVKIADSNSSDFKPLYDNKMSLWDKTQFIAQNIYGASEIIADKKVRNQFKKLEDDGFGEYPICMAKTQYSFSTDPLLMGAPSGHDVPVREVRLSAGAEFVVVVCGEIMTMPGLPRVPASEGIDVDDEGLIQGLF

SEQ ID NO: 166326 - protein, 286 aa, Unknown
  Bacterial polypetide isolated from the Sargasso Sea
RQSGYDITVASEIMAVFCLASDIDDLKKRIGNMVIGYSRSNEPIRAKQLNADGAITALLKDAFQPNLVQTLENNPAFIHGGPFANIAHGCNSVVSTKLALKLADYVVTEAGFGADLGAEKFFDIKCRKSGLKPDAVVLVATTKALKMHGGIAKDNLGGENVDAVTKGCKNLERHIENITKFGVPVIVAINDYVTDTKDEHDAIINYCKEIGVECRISSHWEKGGKGASDLAEEVVKIADSDSSEFKPLYDNKMSLWDKTEYIAKNIYGASEIIADKKVRNQLRNRR

SEQ ID NO: 166327 - protein, 280 aa, Unknown
  Bacterial polypetide isolated from the Sargasso Sea
RPRLHSVRATKMALKLSDYVVTEAGFGADLGAEKFFNIKCRKAGLKPDAVVLVATARALKMHGGVAKADLNAENVTALVDGLENLGRHLRNIEQFGVPAVVAINKFVSDTPAEIDAIRAYCREFGAEVFECSHWADGGAGTEQLAEHVAALADSSNSQFRPLYDDQLSLWEKVRTVARSIYGAEDIIADKKVLSQFEDFEERYSHFPVCMAKTQYSFSTDPSLLGAPSGHVVPIRELRLSAGAEFVVAICGEIMTMPGLPRVPAANSIFVNDEGEIEGLF

SEQ ID NO: 166328 - protein, 269 aa, Unknown
  Bacterial polypetide isolated from the Sargasso Sea
ALKLSDYVVTEAGFGADLGAEKFLNIKCRKSGLAPSCVVIVATIRALKMHGGVEKDDLKKENVDALKKGLVNLERHISNIKKFGLEPIVAINHFVLDTNLEIRTVLDFCKERKVEVSECKHWAKGGKGAMDLAKKVVKICKKKKNKFDFLYKDDLKLWDKIELIAKQIYKADKITANSDVIKELDKFEKNGHRNLPVCIAKTQYSFSTDPKLKGAPSNHEIPIREVRLSSGAEFVVVICGSVMTMPGLPKIPAADSIKLNKKGEIEGLF

SEQ ID NO: 166329 - protein, 283 aa, Unknown
  Bacterial polypetide isolated from the Sargasso Sea
YWGNKLDIDPENIVWKRVVDLNDRALRSIKINLGKLKNNIPRNDGFDITVASEVMAIFCLSNNLEDLENKIGNITIAYTKDKKPVYAKSLKAQGPMTVLLKEAIRPNVTQTLENNPAIIHGGPFANIAHGCNSIIATKTALKLSEYIVTEAGFGADLGAEKFLDIKCRKAGIQPNCVVLVATIRALKMHGGVEKEDLKKENIEALKKGLPNLEKHINNVKKFGLELVVAINHFITDTDNEVKLIQDYCLKLGVKVSLCTHWSDGGRGTEDLAKNVVETCKKNN

SEQ ID NO: 166330 - protein, 262 aa, Unknown
  Bacterial polypetide isolated from the Sargasso Sea
TKDKKPIYAKDLKAQGPMTVLLKEAIRPNVTQTLENNPAIIHGGPFANIAHGCNSIIATKTALKLSEYVVTEAGFGADLGAEKFLDIKCRKAGIQPNCVVVVATIRALKMHGGVEKEDLKKENLDALKKGLPNLERHINNVKKFGLDLVVAINHFITDTDKEVNLIKEYCLKLGVKVSLCTHWSDGSKGTEDLAKNVVEVCKKNNKGSFKYLYKDETSILKKVEIIAKEIYGANGINYDDKVKEQVNIIEKSGFGKFPVCIA

SEQ ID NO: 166331 - protein, 265 aa, Unknown
  Bacterial polypetide isolated from the Sargasso Sea
GFDITVASEIMAIFCLSKNLRDLENRIGNITIGYTRDKKPIYAKDLKAQGPMTVLLYRAFRPNVVQTLENNPAIIHGGPFANIAHGCNSILATQTALKLSDYVVTEAGFGADLGAEKFIDIKCRKSGLKPSCVVIVATIRGLKMHGGLDKNQLKKENMSALIKGMINLERHINNMKKFGVPVTVAINKFVNDTRKEENAVIDFCKSMGIKANLCTHWSDGGKGTKDLAKTVVKLSSKKNSKFKYLYDSKLPLFKKIEKIAIELYK

SEQ ID NO: 166332 - protein, 267 aa, Unknown
  Bacterial polypetide isolated from the Sargasso Sea
IGYTRDRKPIYAKDLKAQGPMTVLLKDAFRPNMVQTLENNPAIIHGGPFANIAHGCNSVIATKAGLKLGEYVITEAGFGADLGAEKFIDIKCRKSGLKPDCVVIVATIRALKMHGGINKDDLKQENLKALKKGLVNLERHINNVRKFGLPVTVAINHFVTDTKKEVNAVVDFGKTLGVKTSVCTHWSDGGEGAKDLAKTVDEICREEKNTFKFLYDDKMPLFKKIQTIAQELYHASEVVADTKIRAQIKTFQEDGYGNLPISMAKTQ

SEQ ID NO: 166333 - protein, 254 aa, Unknown
  Bacterial polypetide isolated from the Sargasso Sea
MKTDIEIAREAKPKRIEEIASSIGISGEYLEHYGKFKGKVNLSINDEKLKDQDNGKLILVTAISPTPAGEGKTTTSVGLVDGLCHIGKKAMICLREPSLGPCFGMKGGAAGGGHAQVIPMADINLHFTGDFHAISAAHNLLSALVDNHIHWSNDLDIDPRRITWKRVVDMNDRSLREVTCGLGGTGNGIPRQSGFDITVASEIMAVFCLATDADDLKKRIGNIVIGYSRSNEPIRAKQLKADGALSVCFKTHST

SEQ ID NO: 166334 - protein, 282 aa, Unknown
  Bacterial polypetide isolated from the Sargasso Sea
RFININTKGVAKEFPREDGFDITVASEVMAIFCLSNDLKDLEKRIGNITIAYNTDGKPVYAKDLKAQGPMTVLLKDALRPNVTQTLENNPALIHGGPFANIAHGCNSVIATKSALKLADYVVTEAGFGADLGAEKFLDIKCRKSNIKPSCVVIVATIRALKMHGGVEKENLKNENVVALKKGLVNLERHISNIKKFGLTPIVAINSFILDTKKEISSIKDFCKNKKVEVSESTHWADGGKGAKDLAKKVVKICNASKKKDFKFLYDDNQSLWSKVETISKEI

SEQ ID NO: 166335 - protein, 119 aa, Unknown
  Bacterial polypetide isolated from the Sargasso Sea
DDLQKRIGNIVIGYTKDNEPVRAKQLKADGAITALLKDAFKPNLVQTLENNPAFMHGGPFANIAHGCNSVVSTKTALKLADYVVTEAGFGADLGAEKFFNIKCRKSDLKPDAVVLVATT

SEQ ID NO: 166336 - protein, 205 aa, Unknown
  Bacterial polypetide isolated from the Sargasso Sea
MKSDIEIAQAAKLEKISDIAAKLDIPEESLEPFGHYKAKISLDYLNSIDSNPDGKLILVTAISPTPAGEGKTTTSVGLGDALNHIGKKALVTIREPSLGPVFGMKGGAAGGGMSQVIPMEDINLHFTGDFNAIQLANNLLAAMLDNHIHHGNKLGIDVRRVAWKRVLDMNDRALRSTVCSLGSVGNGFPRQDGFDIVVASEIMAI

SEQ ID NO: 166337 - protein, 272 aa, Unknown
  Bacterial polypetide isolated from the Sargasso Sea
MSTYPSDLEIASAANKISIDKVAATIDITNEDLIKFGDDKAKISSSLIEKLKKNEDGKLILVTAISPTPAGEGKTTTSVGLVDGLCHIGKKAMICLREPSLGPCFGMKGGAAGGGYAQVIPMTDINLHFTGDFHAIGAAHNLLSALLDNHIHWDNQLNIDPRRITWKRVVDMNDRSLRDITCGLGGTGNGIPRQSGFDITVASEIMAVFCLASDIDDLQKRIGNIVIGYSKDNEPIRAKQLKADGAICALLKDAFKTNLVQTLENNPAFMHG

SEQ ID NO: 166338 - protein, 159 aa, Unknown
  Bacterial polypetide isolated from the Sargasso Sea
ILLFGYTRDKKPIYAKDLNAHGAMAVLLKEAIRPNVTQTLENNPAIIHGGPFANIAHGCNSVIATKAGLKLADYVVTEAGFGAYLGAEKFLDIKCRKSGLKPSCVVIVATIRALKMHGGLSKDELKNENISALKKGIVNLERHIENVKKFGLPVAVAVN

SEQ ID NO: 166339 - protein, 284 aa, Unknown
  Bacterial polypetide isolated from the Sargasso Sea
MGDFHAITSAHNLLSALIDNHIYWGNKLNIDVRRVSWRRVMDMNDRSLRSIIVDLGGVANGYPRQDSFDITVASELMAIFCLATDLKDLENRIANITIGYTRDKKPIHAKDLNAQGPMTVLLKEAIRPNVTQTLENNPAIIHGGPFANIAHGCNSVIATKAGLKLADYVVTEAGFGADLGAEKFLNIKCRKSGLKPDCVVIVATIRALKMHGGVSKDELKNENVKALKKGLVNLERHINNTRKFGLPVTIAVNHFVTDSDKEMKTLLDFCKTQGVKASKCTHWS

SEQ ID NO: 166340 - protein, 273 aa, Unknown
  Bacterial polypetide isolated from the Sargasso Sea
MHDKKEGNLILVSAISPTPAGEGKTTTTVGLGDGLNRIGKKTLICLREPSLGPVFGVKGGAAGGGYAQIVPMEDINLHFTGDFSAIALANNLLAAIIDNHIHHGNALQIDSRRVTWKRVVDMNDRALRDIAVGLGGPGNGYTRQDGFDIVVASEVMAIFCLAESVDDLKTRLGQIVIGSTREGKLITAKDLNAHGAMTVLLKDALQPNLVQTLENNPAFVHGGPFANIAHGCNSVIATKTALRLADYVVTEAGFGADLGAEKFIDIKCRKTGL

SEQ ID NO: 166341 - protein, 291 aa, Unknown
  Bacterial polypetide isolated from the Sargasso Sea
MSTVKSDIEIARAAKMKPIQEILDGIDVPDKAEVYSPMGRYIAKIKPEYLDTLKNKKNGKLILVTAITPTPAGEGKTTTSVGLCDGLNKIGKKSIVCLREPSLGPSFGMKGGAAGGGYAQVVPMEQINLHFTGDFHAITSAHNLLSALIDNHIYWGNKLNIDVRRITWKRVIDMNDRSLRSININLGGVTNGYPREDGFDITVASEIMAIFCLSNDLKDLENRIGNITIGYTRDKKPIYAKDLKAEGPMTVLLKDAIRPNVTQTLENNPAIIHGGPFANIAHGCNSVIATK

SEQ ID NO: 166342 - protein, 293 aa, Unknown
  Bacterial polypetide isolated from the Sargasso Sea
MEILPIGYTRDKNPIFAKDLNAQGPMTVLLKDAIRPNVTQTLENNPAIIHGGPFANIAHGCNSVIATKTALKLSDYVITEAGFGADLGAEKFINIKCRKSNLKPDCVVIVATIRALKMHSGVGKDELTKENVEALKKGVVNLERHINNVRKFGLPVAVAINHFVTDSEEEVNFLMNFCKNLGVDISLCTHWSNGGEGTKDLANTVVNICEKNESTFKFLYEDKIPLFKKIETIAQEIYHASEVVADTKIRTQLKDFESKGYAHLPICVAKTQYSFSTDPSLKGAPTGHVLPVR

SEQ ID NO: 166343 - protein, 213 aa, Unknown
  Bacterial polypetide isolated from the Sargasso Sea
MAYTNDIDIARSANLLPIEKVGSKIGVYADDVNLYGKNKAKITYKFLKNLDTKKSGKLILVTAISPTPAGEGKTTTTVGLGDALNKKNKKTIICLREPSLGPCFGMKGGAAGGGFSQVVPMEDINLHFTGDMHAITSAHNLLAAMIDNHIYWGNKLNIDTRRISYKRVLDMNDRALRKIVSSLGGISNGFSREDGFDITVASEIWAFSVYQIT

SEQ ID NO: 166344 - protein, 288 aa, Unknown
  Bacterial polypetide isolated from the Sargasso Sea
FGYTRSNEPVRAKQLNADGAITALLKDAFQPNLVQTLENNPAFMHGGPFANIAHGCNSVVSTKTALKLADYVVTEAGFGADLGAEKFFDIKCRKSGLKPDAVVLVATTKALKMHGGVKKDELSSENIDAVLKGCENLGKHIENIGKFGVPVIVGINDYVTDTKNEHEQIINFCKNLGVQCKISSHWEKGGEGAADLAEEVAKIADSNTADFKTLYDNEMTLWDKTEHIAKNIYGASEIIADKKVRNQFKKLEDDGFGDYPICMAKTQYSFSTDPLLMGAPIGHDVPIR

SEQ ID NO: 166345 - protein, 212 aa, Unknown
  Bacterial polypetide isolated from the Sargasso Sea
MVGPFANIAHGCNSIIATKTALKLSEYVITEAGFGADLGAEKFLDIKCRKAGIIPSCVVLVATIRALKMHGGVEKDDLKNEDLDALKKGMSNLERHIQNIKKFGLDVVVAINHFITDTEKEVKIIQEQCYKLGIKASLCTHWSDGGEGMRDLANNVVELCKKSDTSKFKYLYSDKISILEKVEKIAKEIYSAKGIEVDEKIKEQVKKIEQAG

SEQ ID NO: 166346 - protein, 273 aa, Unknown
  Bacterial polypetide isolated from the Sargasso Sea
LNKLKKKKDGHLILVTAITPTPAGEGKTTTSVGLNDGLNKIGKRSIVCLREPSLGPSFGMKGGAAGGGYAQVVPMEQINLHFTGDFHAITSAHNLLSAMIDNHIYWGNKLNIDEKKIVWKRVIDMNDRALRFIDINTNGVAKDFKRIDGFDITVASEVMAIFCLAKDLSDLEKKIGNITIAYNKDGQPIFAKDLNAHGPMTVLLKEAIRPNVTQTLEHNPAIIHGGPFANIAHGCNSVIATTAALKLSDYVVTEAGFGADLGAEKFLDIKCRK

SEQ ID NO: 166347 - protein, 301 aa, Unknown
  Bacterial polypetide isolated from the Sargasso Sea
MASELNAHGAMTALLKDALNPNIVQTLENNLAFIHGGPFANIAHGCNSIIATKTALGLADYVVTEAGFGADLGAEKFVDIKCRIGKLKPAIVVLVATIRALKYHGGLEIKDLGEENLSALEKGFVNLERHIDNVKNKLGLNCIVAINHFSADSEAEINLLKDKVLSMGVEVSVAHHWADGGLGAEDLAAKVVESIGSSSSKHRYLYTDDVPIWGKIEAVAKNIYRASGITADRKVRDKIETLQKDHGEMPICIAKTQMSFSTDPSLRGAPSGHVLDVREVKVAAGAGFIIVIASNIMTMPG

SEQ ID NO: 166348 - protein, 302 aa, Unknown
  Bacterial polypetide isolated from the Sargasso Sea
KSYLILVSAITPTPAGEGKTTTSVGLNDALNKIGKKSIVCLREPSLGPSFGMKGGAAGGGYAQVVPMEQINLHFTGDFHAITSAHNLLSALIDNHIYWGNKLNIDPDNIVWKRVVDLNDRSLRKIKINLEKLKNNIPRDDNFDITVASEVMAIFCLSKNIKDLEKKIGNITVAYTKKNEPVYAKDLRAEGPMSVLLKEAIRPNAVQTLENNLAIIHGGPFANIAHGCNSILATKTALKLSDYVVTEAGFGADLGAEKFLNIKCRKAKIQPSCVVLVATIRALKMHGGLEKDDLKKENLEALK

SEQ ID NO: 166349 - protein, 211 aa, Unknown
  Bacterial polypetide isolated from the Sargasso Sea
MANYPSDLEIANAANKKPIIEIAKALDIDEKHLVRFGDDKAKLNTEFTNSLSKNEDGKLILVTAISPTPAGEGKTTTSVGLVDGLCHVGKKAMICLREPSLGPCFGMKGGAAGGGYAQVIPMTDINLHFTGDFHAIGAAHNLLSALIDNHIHWSNELNIDPRRITWKRVVDMNDRSLRDITCGLGGTGNGIPRQSGFDIKVASEIMAVFCL

SEQ ID NO: 166350 - protein, 313 aa, Unknown
  Bacterial polypetide isolated from the Sargasso Sea
MNDRSLRSIIVDLGGVANGYPRQDSFDITVASELMAIFCLATDLKDLENRIANITIGYTREKKPVHAKDLNAQGPMTVLLKEAIRPNVTQTLENNPAIIHGGPFANIAHGCNSVIATKAGLKLADYVVTEAGFGADLGAEKFLNIKCRKSGLKPDCVVIVATIRALKMHGGVLKDELKNENIKALKKGLVNLERHINNTRKFGLPVTIAVNHFITDSDKEMKTLLDFCKTQGVKASKCTHWSNGGDGTAELAKNVVAICEDNQDTFKFLYEDKLPLFKKIEKIAQEIYHASEVVADTKVRQQLKDFEEKGYGS

SEQ ID NO: 166351 - protein, 252 aa, Unknown
  Bacterial polypetide isolated from the Sargasso Sea
KPIIEIGGSVNIPASDLLPFGHDKAKISQSFINSVQDRPNGKLILVTAINPTPAGEGKTTTTVGLGDGLNRIGKKAMICIREASLGPNFGMKGGAAGGGYAQIVPMEDMNLHFTGDFHAITSAHSLLSAMIDNHIYWGNELEIDNRRVVWRRVVDMNDRALRQITASLGGVANGFPREAGFDITVASEVMAILCLAKDLADLQKRLGDMIVAYRRDRSPVFCRDIKADGAMTVLLKDAIQPNLLQTLENNPA

SEQ ID NO: 166352 - protein, 277 aa, Unknown
  Bacterial polypetide isolated from the Sargasso Sea
RVLDMNDRSLRDITCGLGGTGNGIPRQSGFDITVASEIMAVFCLASDIEDLQKRIGNIVIGYTKSNEPVRASQLNADGAITALLKDAFQPNIVQTLENNPAFMHGGPFANIAHGCNSVISTKTALKLADYVVTEAGFGADLGAEKFFDIKCRKSGLEPDAVVLVATTKALKMHGGVKKEDLGSENVDAVTLGCKNLEKHVENINKFGVPVVVAINDFVTDTEREHNAIINFCKNLGVQCKISSHWEKGGLGASELAEEVAKVADSNMSEFKTLYEDT

SEQ ID NO: 166353 - protein, 267 aa, Unknown
  Bacterial polypetide isolated from the Sargasso Sea
REKKPIYAKDLNAHGPMTVLLKEAIRPNITQTLENNPAIIHGGPFANIAHGCNSVIATKAGLKLADYVVTEAGFGADLGAEKFLDIKCRKSNLKPSCVVIVATIRALKMHGGVAKDDLKNENVDALKKGLINLERHIENVKKFGLPVAVAINHFIKDTDKEVNALVEFCKKLGVNASICKHWADGGEGTKDLAKHVIDLCEKSAAKFKFLYESKTPLFKKIETIAKEIYRADEVIADTKIRDQLKNFEDAGYGELPICVRKLNIVST

SEQ ID NO: 166354 - protein, 235 aa, Unknown
  Bacterial polypetide isolated from the Sargasso Sea
MSSDIEIARKANMEPILDIGAKLDIPFKALRPFGHFKAKLSPTWLQNQSKKKNAKLILVTAINPTPAGEGKTTTSVGLNDGLNAIGKKSIVCLREPSLGPCFGMKGGAAGGGYAQVVPMEDINLHFTGDFHAITSAHNLLSAMIDNHIYWGNKQEIDPRRVTWKRVLDMNDRALRNIVVSLGGVSNGFPRETGFDITVASEIMAIFCLSENLEDLEKRLGDIIIGYRKDKSPCIL

SEQ ID NO: 166355 - protein, 296 aa, Unknown
  Bacterial polypetide isolated from the Sargasso Sea
MAIRPNITQTLENNPAIIHGGPFANIAHGCNSVIATKASLKLSDYVVTEAGFGADLGAEKFLDIKCRKSNLKPDCVVLVATIRALKMHGDVSKEDLKNENVNALKKGLVNLERHINNVRKFGLPVTVAINHFITDSRDEVDAVLSFCTTQGVKASMCTHWSDGGDGATELAQNVIDICEENKNTFKFLYEDDLTLFKKIEKIAQEIYHASEVVADTKVRRQLKDFETKGFGKLPVCIAKTQYSFSTDPNLKGAPTGHVLPIREVRLSSGAEFIVVVCGDIMTMPGLPSVPAANSIK

SEQ ID NO: 166356 - protein, 239 aa, Unknown
  Bacterial polypetide isolated from the Sargasso Sea
MLSALIDNHIYWGNKLNIDVRRVVWKRVMDMNDRSLRSIVVDLGGVANGYPRQDGFDITVASEIMAIFCLAKNLNDLEERIGNITIAYTRDKKAIYAKDLNAQGPMTVLLKDAIRPNITQTLENNPAIIHGGPFANIAHGCNSVIATKASLKLGDYVVTEAGFGADLGAEKFLDIKCRKSGLKPDCVVLVATIRALKMHGDVSKEDLKNENVEALKKGLVNLERHIINVRKFGLPVTVS

SEQ ID NO: 166357 - protein, 291 aa, Unknown
  Bacterial polypetide isolated from the Sargasso Sea
DNHIYWGNKLNIDEKKIVWKRVIDMNDRALRFVDINTDGVAKDFKRVDGFDITVASEVMAIFCLSNDLRELEKKIGNITIAYNKSGKPIFAKDLDAHGPMTVLLKEAIRPNVTQSLENNPAIIHGGPFANIAHGCNSVIATKTALKLSDYVVTEAGFGADLGAEKFLNIKCRKAGLFPSCVVIVATIRALKMHGGVEKDNLNKEDVKSLKKGLENLERHILNIKKFGLEPIVAINHFSLDTGKEIRAVLNFCKSMKVEISESKHWAKGGKGAADLAKKVVKICKNKTKFNF

SEQ ID NO: 166358 - protein, 236 aa, Unknown
  Bacterial polypetide isolated from the Sargasso Sea
HGCNSVVSTKLALKLADYVVTEAGFGADLGAEKFFDIKCRKSGLKPDAVVLVATTKALKMHGGIAKDNLGGENVDAVTKGCKNLERHIENITKFGVPVIVAINDYVTDTKDEHDAIINYCKEIGVECRISSHWEKGGKGASDLAEEVVKIADSNASKFKPLYDNKMSLWDKTEYIAKTIYGASEIIADKKVRNQFKKLEDDGFGEYPICMAKTQYSFSTDPLLMGAPSGHDVSDQR

SEQ ID NO: 166359 - protein, 277 aa, Unknown
  Bacterial polypetide isolated from the Sargasso Sea
GKTTVSVGLSDGINKIGKKSIVCLREPSLGPSFGMKGGAAGGGYAQVVPMEQINLHFTGDFHAITSAHNLLSALIDNHIYWGNALNIDDKKIVWKRVMDMNDRALRAININTKGAAKDFPREDGFDITVASEVMAIFCLSNNLEDLEKKIGNITIAYNKDGKPIYARDLNAQGPMTVLLKEAIRPNVAQTLENNPALIHGGPFANIAHGCNSVIATKAALKLSDYVVTEAGFGADLGAEKFMDIKCRKANLKPSCVVIVATIRALKMHGGVKKKIKK

SEQ ID NO: 166360 - protein, 313 aa, Unknown
  Bacterial polypetide isolated from the Sargasso Sea
KLILVTAVTPTPAGEGKTTTSVGLNDGLNKIGKKSIVCLREPSLGPSFGMKGGAAGGGYAQVVPMEQINLHFTGDFHAITSAHNLLSALIDNHIYWGNKLNIDVRRVVWKRVMDMNDRSLRSIVIDLGGVANGYPRQDGFDITVASEIMAIFCLAKNLNDLEERIGNITIAYTRDKKAIYAKDLNAQGPMTVLLKDAIRPNVTQTLENNPAIIHGGPFANIAHGCNSVIATKASLKLADYVVTEAGFGADLGAEKFLNIKCRKSDIKPDCVVLVATIRALKMHGNVSKEDLINENVTALKNGLVNLERHINNL

SEQ ID NO: 166361 - protein, 338 aa, Unknown
  Bacterial polypetide isolated from the Sargasso Sea
KGGAAGGGYSQVVPMEQINLHFTGDFHAITSAHNLLSALIDNHIYWGNKLNIDDKKIVWKRVMDMNDRALRSININTKGVAKDFPREDGFDITVASEVMAIFCLSNNLKDLEKRIGNITIAYNKGGKPIYARDLNAQGPMTVLLKEAIRPNIAQSLENNPAIIHGGPFANIAHGCNSVIATKSALKLADYVVTEAGFGADLGAEKFLDIKCRKANLKPKCIVIVATIRALKMHGGIQKENLKKENIDAVKKGLVNLERHINNVKKFGLNPVIAINNFILDTKQEINVVLNFCKKIGIEVSECTHWSNGGKGTKDLAKKVVKILYKTRNNNFKFLYKDN

SEQ ID NO: 166362 - protein, 278 aa, Unknown
  Bacterial polypetide isolated from the Sargasso Sea
CLREPSLGPSFGMKGGAAGGGYAQVVPMEQINLHFTGDFHAITSAHNLLSAMIDNHIYWGNKLNIDEKKIVWKRVMDMNDRALRFIDINTSGVAKDFKRIDGFDITVASEVMAIFCLSTDLKDLEKKIGNITIAYNKHGDPIYAKDLNAHGPMTVLLKEALRPNVTQSLENNAAIIHGGPFANIAHGCNSIIATKTALKLSDYVVTEAGFGADLGAEKFLNIKCRKAGFVPSCVVIVATIRALKMHGGVEKENLKKEDVNALKKGLVNLERHILNIKK

SEQ ID NO: 166363 - protein, 274 aa, Unknown
  Bacterial polypetide isolated from the Sargasso Sea
MSTYPSDLEIASAANKILIDKVAATIDITDKDLIKFGDDKAKISSSLIEKLKKNEDGKLILVTAISPTPAGEGKTTTSVGLVDGLCHIGKKAMICLREPSLGPCFGMKGGAAGGGYAQVIPMTDINLHFTGDFHAIGAAHNLLSALIDNHIHWDNQLNIDPRRITWKRVVDMNDRSLRDITCGLGGTGNGIPRQSGFDITVASEIMAVFCLASDIDDLQKRIGNIVIGYTKDNKPVKAKQLKADGAITVLLKDAFKPNLVQTLENNPAFMHGGP

SEQ ID NO: 166364 - protein, 255 aa, Unknown
  Bacterial polypetide isolated from the Sargasso Sea
LKHKKNGKLILVTAITPTPAGEGKTTVSVGLSDGINKIGKKSIVCLREPSLGPSFGMKGGAAGGGYAQVVPMEQINLHFTGDFHAITSAHNLLSALIDNHIYWGNKLNIDDKKIVWKRVMDMNDRALRAIDINTKGVAKDFPREDGFDITVASEIMAIFCLSNNLKDLEKRIGNITIAYNKKNQPVYAKDLNAHGPMTVLLKEAIRPNVTQTLENNPALIHGGPFANIAHGCNSVIATKAALKLSDYVVTEAGFG

SEQ ID NO: 166365 - protein, 211 aa, Unknown
  Bacterial polypetide isolated from the Sargasso Sea
KLGDYVVTEAGFGADLGAEKFLDIKCRKSELKPDCVVLVATIRALKMHGDVSKEELKNENVKALKKGLVNLERHIINIRKFGLPVTVAINHFVTDTQGEVDAVLDFCKTQGVKASMCTHWSNGGEGATELAKNVVDICEENKNTFKFLYEDNLSLFKKIEKIGQEIYHASEVVADTKVRNQLKDFESKGFGKLPVCIAKTQYSFSTDPNLK

SEQ ID NO: 166366 - protein, 164 aa, Unknown
  Bacterial polypetide isolated from the Sargasso Sea
MSDIEIARAAKKIHIRDVAAKVNIPEENLIPYGHDAAKINFDFIEKSKSNPDGKLILVTAINPTPAGEGKTTTSVGLNDGLNKIGKKSIVCLREPSLGPCFGMKGGAAGGGYAQVVPMEEINLHFTGDFHAITAAHNLLSSLIDNHIYWGNELQIDQRRITWGR

SEQ ID NO: 166367 - protein, 225 aa, Unknown
  Bacterial polypetide isolated from the Sargasso Sea
RALKMHGGIKKENLKTENIDALKKGLVNLERHINNIKKFNLPVTVAVNYFITDTEEEVNSLIDFCKKIGVKSSLCTHWSNGGEGTKELAKNVSEICDNNKNKFKFLYEDKSPLFKKIETIAKEIYHASEVVADTKVREQLKDFEAKGYGILPICIAKTQYSFSTDPSLKGAPSGHVLPVREVRLSSGAEFVVVICGSIMTMPGLPKVPAADSIKMNDKGEIEGLF

SEQ ID NO: 166368 - protein, 291 aa, Unknown
  Bacterial polypetide isolated from the Sargasso Sea
MKKYPSDLEIAQAAKKELIGDIASKLDIDSDGLIPFGNDKAKITYDFMDKVKNNKDGNLILVTAISPTPAGEGKTTTSVGLVDGLCHIGKKAMICLREPSLGPCFGMKGGAAGGGYAQVIPMTDINLHFTGDFHAIGAAHNLLSAVIDNHIHWENQLDIDPRRITWKRVVDMNDRALRDITTGLGGPGNGIPRQGGFDITVASEIMAVFCLAKDLDDLQKRIGNIVIGYTRKKEPVKVSQLDVQGAMTALLRDAFQPNLVQTLENNPALMHGGPFANIAHGCNSVIATKTA

SEQ ID NO: 166369 - protein, 275 aa, Unknown
  Bacterial polypetide isolated from the Sargasso Sea
SNIAHGCNSVVSTKLALKLADYVVTEAGFGADLGAEKFFNIKCRKSGLKPDAVVLVATTKALKMHGGLEKEDLASENVDAINKGCKNLERHIKNIRKFGLPVIVAINDYVTDTENEHNAILNFCKKIDVQCKISSHWEKGGEGAADLAEEVAKIADAGSSKFKTLYDNKMSLWDKTRCIAQNIYGAADIIADKKVRNQFKKLEDDGFGKYPICMAKTQYSFSTDPLLMGAPSGHDVPIREVRLSAGAEFIVVVCGEIMTMPGLPRIPAAENIDLD

SEQ ID NO: 166370 - protein, 227 aa, Unknown
  Bacterial polypetide isolated from the Sargasso Sea
MKTDIEIAREAKPKRIEEIASSVGISDEYLEHYGKFKGKVNLSINDEKLNDQDNGKLILVTAISPTPAGEGKTTTSVGLVDGLSHIGKKAMICLREPSLGPCFGMKGGAAGGGYAQVIPMTDINLHFTGDFHAIGAAHNLLSALVDNHIHWSNDLDIDPRRITWKRVVDMNDRSLREITCGLGGTGNGIPRQSGFDITVASEIMAVFCLASDADDLKKRIGNIVIGY

SEQ ID NO: 166371 - protein, 261 aa, Unknown
  Bacterial polypetide isolated from the Sargasso Sea
MNDRSLRDITCGLGGTGNGIPRQSGYDITVASEIMAVFCLASDIDDLKQRIGNIVIGYTRSNEPVRAKQLNADGAMIALLQDAFQPNLVQTLENNPAFIHGGPFANIAHGCNSVIATKTALKLADYVVTEAGFGADLGAEKFFDIKCRKSGLKPDAVVLVATTKALKMHGGVKKDDLGTENIDAVTKGCKNLERHIENIKKFGVPVVVAINDFITDTQKEHAAIIDYCKKIGVECKISSHWEKGGKGAAELAEEVVKIADA

SEQ ID NO: 166372 - protein, 276 aa, Unknown
  Bacterial polypetide isolated from the Sargasso Sea
RSNEPVRAKQLNADGAIAALLKDAFQPNLVQTLENNPAFIHGGPFANIAHGCNSVVSTKAALKLADYVVTEAGFGADLGAEKFFDIKCRKSGLKPDAVVLVATTKALKMHGGIKKEDLGSENVDAVKKGCKNLKKHIENIGKFGVPVVVAINDYLTDTKNEHASIIDYCKNIGVECKISSHWEKGGLGAVDLAEEVAKIADSNSAEFKPLYDNKMSLWNKTQYIAKNIYGAADIIADKKVRNQFKKLEDDGFGEYPICMAKTQYSFSTDPLLMGAP

SEQ ID NO: 166373 - protein, 261 aa, Unknown
  Bacterial polypetide isolated from the Sargasso Sea
VTEAGFGADLGAEKFLDIKCRKSNLKPSCVVIVATIRALKMHGGVAKDELKNENVDALKKGLVNLERHIENVKKFGLPVAIAVNHFIKDTDSEVKALINFCENLGVKASLCTHWANGGEGTKELAKHVAYLCEKKDANFNFLYESNTPLFKKIETIAKEIYRADEVIADTKIRDQLKNFEEAGYGELPICVAKTQYSFSTDPNLKGAPTGYVLPVREIRLSSGAEFIVVVCGAIMTMPGLPRVPAADSIKLNNNGEIEGLF

SEQ ID NO: 166374 - protein, 298 aa, Unknown
  Bacterial polypetide isolated from the Sargasso Sea
RVLDMNDRALRKTVCSIGSIGNGYPREDGFDIVVASEIMAIFCLATSLADLKKRLGDIVVGYTRDKAPILASQINAHGAMTVLLKDAVMPNLVQTLENNPAIIHGGPFANIAHGCNSVIATKASLKLADYVVTEAGFGADLGAEKFLDIKCRKANLKPAVVVLVATIRALKYHGGCPKEDFGKEGCEYLQKGLVNLEKHVENLKGHYGLPVVIGINGFATDTDAERKILQDKSEELQVPIVSSTHHANGGEGAKDLAEMVVKTIDEAENNFQYLYEDELDLWSKMETIAKKIYGCSKH

SEQ ID NO: 166375 - protein, 136 aa, Unknown
  Bacterial polypetide isolated from the Sargasso Sea
MSSDIEIARKADLNPIVEVGASLGIPNDAINPFGHYKAKISSNWLESKRKNSDGKLILVTAINPTPAGEGKTTTSVGLNDGLNSIGKNSVVCLREPSLGPCFGMKGGAAGGGYAQVVPMEDINLHFTGDFHAITSA

SEQ ID NO: 166376 - protein, 261 aa, Unknown
  Bacterial polypetide isolated from the Sargasso Sea
CLATDLKDLENRIGNITIGYTRDKQSIYAKDLNAQGPMTVLLKEAIRPNVTQTLENNPAIIHGGPFANIAHGCNSVIATKAGLKLADYVVTEAGFGADLGAEKFLDIKCRKSDLKPDCVVIVATIRALKMHGGVAKEDLKKKNVSALKDGMVNLRRHINNIRKFGLPVTVAVNHFITDTEDEMKTLLDFCETQGVKASKCTHWSNGSEGTIELAKNVTEICEDKKDTFKFLYEDDLPLFKKIEKIAQEIYSASEVVADTKV

SEQ ID NO: 166377 - protein, 315 aa, Unknown
  Bacterial polypetide isolated from the Sargasso Sea
WKYSHRYSRSNEPIRAKQLNADGAITALLKDAFQPNLVQTLENNPAFIHGGPFANIAHGCNTVVATKLALKLADYVVTEAGFGADLGAEKFFDIKCRKSGLKPDAVVLVATTKALKMHGGVTKDNLGAENVDAVTKGCKNLKRHIENIKKFGVPVMVAINDYVTDTKDEHAAIIQYCKEIGVECRISSHWEKGGKGASELAEEVVKIADSGSSDFKPLYDNKMSLWDKTQFIAQNIYDASEIIADKKVRNQFKKLEDDGFGEYPICMAKTQYSFSTDPLLMGAPSGHDVPIREVRLSAGAEFIVVVCGEIMTMPG

SEQ ID NO: 166378 - protein, 217 aa, Unknown
  Bacterial polypetide isolated from the Sargasso Sea
GLGGVGNGIPRQSGFDITVASEIMAVFCLATDLKDLEERIGNIVIGYKKNQEPIKVRQLNAQGALTALLRDAFQPNLVQTLENNPALMHGGPFANIAHGCNSVIATKSALKLADYVVTEAGFGADLGAEKFFDIKCRKARLKPDAVVLVATTKALKMHGGVKKEDLNSENIDAVINGCENLGRHIENIKKFGVPVVVAINDFITDTQNEHNAIVKFW

SEQ ID NO: 166379 - protein, 194 aa, Unknown
  Bacterial polypetide isolated from the Sargasso Sea
CLREPSLGPCFGMKGGAAGGGFAQVIPMTDINLHFTGDFHAIGAAHNLLSALIDNHIHWDNKLNIDPRRITWKRVVDMNDRSLRDITCGLGGTGNGIPRQSGFDITVASEIMAVFCLASDIDDLKKRIGNIVIGYTRTNEPVRAKQLNADGAMIALLQDAFQPNLVQTLENNPAFIHGGPFANIAHGCNSVIST

SEQ ID NO: 166380 - protein, 269 aa, Unknown
  Bacterial polypetide isolated from the Sargasso Sea
CVVIPVVSTKTALKLADYVVTEAGFGADLGAEKFFDIKCRKSGLKPDAVVLVATTKALKMHGGVKKEDLGTENVDAVTLGCKNLEKHVENINKFGVPVVVAINDYVSDTEREHNAIINFCKNLGVQCKISSHWEKGGQGASELAEEVAKLADSNMSEFKTLYEDAMSLWDKTKYIAQNIYGAQDIIADKRVRNQFKKLEDDGFGSYPVCMAKTQYSFSTDPLLMGAPTGHEVPIREVRLSAGAEFVVVVCGEIMTMPGLPRVPAAEAIG

SEQ ID NO: 166381 - protein, 463 aa, Unknown
  Bacterial polypetide isolated from the Sargasso Sea
MSEIKSDIQIAREAKMEPIKDILTKINVPDESSAFSPMGRHIAKINLNYLDSLKDKKDGKLVLVTAITPTPAGEGKTTTSVGLNDGLNKIGKKSIVCLREPSLGPSFGLKGGAAGGGYAQVVPMEQINLHFTGDFHAITSAHNLLSALIDNHIYWGNKLNIDVRRVSWRRVMDMNDRSLRSIIVDLGGVANGYPRQDSFDITVASELMAIFCLATDLKDLENRIANITIGYTREKKPVHAKDLNAQGPMTVLLKEAIRPNVTQTLENNPAIIHGGPFANIAHGCNSVIATKAGLKLADYVVTEAGFGADLGAEKFLNIKCRKSGLKPDCVVIVATIRALKMHGGVLKDELKNENVKALKKGLVNLERHINNTRKFGLPVTIAVNHFITDSDKEMKTLLDFCKTQGVKASKCTHWSDGSEGTRELAKNVVAICEDYQDTFKYLYEDKLPLFKKIEKIAQDIYHA

SEQ ID NO: 166382 - protein, 310 aa, Unknown
  Bacterial polypetide isolated from the Sargasso Sea
LLKDAFQPNLVQTLENNPAFIHGGPFANIAHGCNSVVSTKLALKLADYVVTEAGFGADLGAEKFFDIKCRKSGLKPDAVVLVATTKALKMHGGIAKDNLGGENVDAVTKGCKNLERHIENITKFGVPVIVAINDYVTDTKDEHDAIINYCKEIGVECRISSHWEKGGKGASDLAEEVVKIADSNASKFKPLYDNKMSLWDKTEYIAKNIYGASEIIADKKVRNQFKKLEDDGFGEYPICMAKTQYSFSTDPLLMGAPSGHDVPIREVRLSAGAEFIVVVCGEIMTMPGLPRIPAAEGIDVDDEGLIQGLF

SEQ ID NO: 166383 - protein, 433 aa, Unknown
  Bacterial polypetide isolated from the Sargasso Sea
MSDIEIARKAKMHPISEILEKIGVPDTPEAFSPMGRHIAKLNLEYIDKLKDKTDGKLVLVTAITPTPAGEGKTTTSVGLSDGLNKIGKKSIVCLREPSLGPSFGMKGGAAGGGYAQVVPMEQINLHFTGDFHAITSAHNLLSALIDNHIYWGNKLNIDIRRVVWKRVMDMNDRSLRSIVVDLGGVANGYPRQDGFDITVASEIMAIFCLAKNLQDLEERIGNITIAYTRDKKSIYAKDLNAQGPMTVLLKDAIRPNITQTLENNPAIIHGGPFANIAHGCNSVIATKASLKLSDYVVTEAGFGADLGAEKFLDIKCRKSNLRPDCVVLVATIRALKMHGNVSKEDLKNENVTALKNGLVNLERHINNVRKFGLPVTVAINHFITDSQKEVDAVLDFCKTQGVKASMCTHWSDGGKGTTELAQNVVEICEENKN

SEQ ID NO: 166384 - protein, 269 aa, Unknown
  Bacterial polypetide isolated from the Sargasso Sea
ALKLADYVVTEAGFGADLGAEKFFDIKCRKSDLKPDAVVLVATTKALKMHGGVKKEDLASENVDAVIGGCKNLERHVKNIRKFGVPVIVGINDYVTDTENEHAAIIDFCKNMGVACKISSHWEKGGEGASDLAKEVAKLADSGTSEFKTLYDNEMSLWDKTEYIAQNIYGASEIIADKKVRNQFKKLEDDGFGNYPICMAKTQYSFSTDPLLMGAPSGHDVPIKEVRLSAGAEFIVVVCGDIMTMPGLPRIPAAENIDVDENGLIQGLF

SEQ ID NO: 166385 - protein, 327 aa, Unknown
  Bacterial polypetide isolated from the Sargasso Sea
MAEVKSDIQIAREAKMQPIKDILSKVGVPDENFAFSPMGRHIAKINLEYLNTLKKENGKLILVTAITPTPAGEGKTTTSVGLNDGLNKIGKKSIVCLREPSLGPSFGMKGGAAGGGYAQVVPMEQINLHFTGDFHAITSAHNLLSALIDNHIYWGNKLNIDVRRVVWRRVMDMNDRSLRSIIVDLGGVANGYPRQDSFDITVASELMAIFCLATDLKDLENRIGNITIGYTRDKQSIYAKDLNAQGPMTVLLKEAIRPNVTQTLENNPAIIHGGPFANIAHGCNSVIATKAGLKLADYVVTEAGFGADLGTEKFLDIKCRKSNLKPR

SEQ ID NO: 166386 - protein, 324 aa, Unknown
  Bacterial polypetide isolated from the Sargasso Sea
IYAKDLNAQGPMTVLLKDAIRPNITQTLENNPAIIHGGPFANIAHGCNSVIATKASLKLGDYVVTEAGFGADLGAEKFLDIKCRKSGLKPDCVVLVATIRALKMHGNVSKEDLKSENVEALKKGLVNLERHIINVRKFGLPVTVAINHFITDSKSEVNAVLDFCRTQGVKASMCTHWSNGGDGATELARNVVEICEQSKNTFKFLYEDNLSLFKKIEKIGQEIYHASEVVADTKVRNQLKDFETKGFGKLPVCIAKTQYSFSTDPNLKGAPTGHVLPVREVRLSSGAEFIVVICGDIMTMPGLPSVPAANSIKLNPKGEIEGLF

SEQ ID NO: 166387 - protein, 296 aa, Unknown
  Bacterial polypetide isolated from the Sargasso Sea
MSEVKSDIQIAREAKMQPIKDILAKINVPDESFAFSPMGRHIAKINLEYLETLKNKKEGKLILVTAITPTPAGEGKTTVSVGLSDGINKIGKKSIVCLREPSLGPSFGIKGGAAGGGYAQVVPMEQINLHFTGDFHAITSAHNLLSALIDNHIYWGNKLNIDDKKIVWKRVMDMNDRALRTININTKGVAKDFPREDGFDITVASEIMAIFCLSNNLQDLEKRIGNITIAYNKNNQPIYAKDLKAQGPMTVLLKEAIRPNVTQTLENNPALIHGGPFANIAHGCNSVIATKTALKL

SEQ ID NO: 166388 - protein, 254 aa, Unknown
  Bacterial polypetide isolated from the Sargasso Sea
MDSDINIARKANSLPILEIAKNLNIPEESIIPYGNNKAKIDYGFIKSLSNKKNGKLILVTAISPTPAGEGKTTTTVGLGDGLNKIGKNTLICLREPSLGPCFGMKGGAAGGGYSQVIPMEDINLHFTGDFHAISSAHNLLSALVDNHIHWDNTLGFDVRRVSWKRVVDMNDRALRKVVLSLGGVNNGFPREGGFDITVASEIMAIFCLAEDLNDLRRRIGNIVVGFTRKNDPITAKQINADEPVTALLKDAFMP

SEQ ID NO: 166389 - protein, 313 aa, Unknown
  Bacterial polypetide isolated from the Sargasso Sea
MSEIKSDIQIAREAKMQPIKDILSKIDVPDENFAFSPMGRHIAKINLEYLDTLKNKNGKLILVTAITPTPAGEGKTTTSVGLNDGLNKIGKKSIVCLREPSLGPSFGMKGGAAGGGYAQVVPMEQINLHFTGDFHAITSAHNLLSALIDNHIYWGNKLNIDVRRVVWRRVMDMNDRSLRSIIVDLGGVANGYPRQDSFDITVASELMAIFCLATDLKDLENRIGNITIGYTRDKQAIYAKDLNAQGPMTVLLKEAIRPNVTQTLENNPAIIHGGPFANIAHGCNSVIATKAGLKLADYVVTEAGFGADLGAEK

SEQ ID NO: 166390 - protein, 74 aa, Unknown
  Bacterial polypetide isolated from the Sargasso Sea
MSDIEIARAAKKIHIRDVAAKVNIPEENLIPYGHDAAKINFDFIEKSQSNPDGKLILVTAINPTPAGEGKTTTS

SEQ ID NO: 166391 - protein, 422 aa, Unknown
  Bacterial polypetide isolated from the Sargasso Sea
MTKIKSDIEIARASKMKPIGDVLGKFNIPDDPFSFSPMGRHIAKLNFEYIDKLKEKKSNLILVTAITPTPAGEGKTTTSVGLNDGLNKIGKKSIVCLREPSLGPSFGMKGGAAGGGYAQVVPMEQINLHFTGDFHAITSAHNLLSALIDNHIYWGNKLKIDSENIVWKRVVDLNDRGLRKIKINLEKLKANIPRDDSFDITVASEVMAIFCLSNSIKDLEEKIGNITVAYTKDKKPVYAKDLKANGPMTVLLKEAIRPNAVQTLENNLAIIHGGPFANIAHGCNSIIATKTALKLSEYVITEAGFGADLGAEKFFNIKCRKAELKPSCVVLVATIRALKMHGGVEKDDLKKENLDALKKGMPNLERHIKNIKKFGLEVIVAINHFITDTDREVKIIQEQCAKLGVKVSLCTHWSDGGSGTKD

SEQ ID NO: 166392 - protein, 365 aa, Unknown
  Bacterial polypetide isolated from the Sargasso Sea
MEQINLHFTGDFHAITSAHNLLSAMIDNHIYWGNKLNIDENRIVWKRVMDMNDRALIFIDINTSGVAKDFKRVDGFDITVASEVMAIFCLSNDLKDLEKRIGNITFAYDKKGSPLYARDINAHGPMTVLLKEAIRPNVTQTLENNPAIIHGGPFANIAHGCNSVIATKSALKLSDYVVTEAGFGADLGAEKFLNIKCRKAGLSPSCVVIVATIRALKMHGGVEKEDLKKENISALEKGLVNLERHITNIKKFGLEPIVAINHFALDTKKEIKTVLNFCKKNKVEVSECKHWAKGGNGTKDLAKKVVKVCKNNKNKFKFLYNSNLKLWDKIELIAKQIYKADKITADDKVKEQLKVFEDNGHGNLP

SEQ ID NO: 166393 - protein, 271 aa, Unknown
  Bacterial polypetide isolated from the Sargasso Sea
KLALKLADYVVTEAGFGADLGAEKFFDIKCRKSGLKPDAVVLVATTKALKMHGGVTKDNLGAENVDAVTKGCKNLKRHIENIKKFGVPVMVAINDYVTDTKDEHAAIIQYCKEIGVECRISSHWEKGGKGASELAEEVVKIADSNSSDFKPLYDNKMSLWDKTQFIAKNIYGASEIIADKKVRNQFKKLEDDGFGEYPICMAKTQYSFSTDPLLMGAPSGHDVPIREVRLSAGAEFIVVVCGEIMTMPGLPRVPASEGIDVDDEGLIQGLF

SEQ ID NO: 166394 - protein, 344 aa, Unknown
  Bacterial polypetide isolated from the Sargasso Sea
YWKKTAICIREASLGPCFGMKGGAAGGGKAQVVPMEEMNLHFTGDFHAITSAHNLLSAMIDNHIYWGNKEQIDIRRVVWKRVLDMNDRALRDIVTSLGGATNGFPRQAGFDITVASEVMAILCLANDLKDLKKRLGNIIIAYRRDKSPVFCKDIKADGAMTVLLQQAMQPNIVQTLENNPALVHGGPFANIAHGCNSVIATKAALNLADYVVTEAGFGADLGAEKFLNIKCRKADLKPSAVVLVATVRALKMNGGVTKENLGEENSSAVEKGCDNLGRHIENLKNFGLPVIIAINHFISDTDNEIFKIKEYVAKKDCESILCKHWEKGSEGTIELANKVVEIAD

SEQ ID NO: 166395 - protein, 253 aa, Unknown
  Bacterial polypetide isolated from the Sargasso Sea
MKTDIEIARAAKPKKIDLIANQLGISEEYLELYGKYKCKVDLSIANKELKDKKNGKLILVTAISPTPAGEGKTTTSVGLVDGLCNIGKNAIICLREPSLGPCFGMKGGAAGGGNAQVIPMTDINLHFTGDFHAIGAAHNLLSALIDNHIHWDNQLDIDPRRITWKRVVDMNDRSLRDITCGLGGTGNGIPRQSGYDITVASEIMAVFCLATDLEDLQKRIGNIVIGYTRSNEPVRAKQLNADGAITALLKDAF

SEQ ID NO: 166396 - protein, 349 aa, Unknown
  Bacterial polypetide isolated from the Sargasso Sea
MVKIKSDIEIARKAKMQPIGNILKKFKIPDTPFAFSPMGRHVAKINLRYIKTLKEKEKNLVLVTAITPTPAGEGKTTTSVGLNDGLNKIGMKSIVCLREPSLGPSFGMKGGAAGGGYAQVVPMERINLHFTGDFHAITTAHNLLSALIDNHIYWGNKLNIDIENIVWKRVVDLNDRSLRKIKINLEQLKANHPRNDSFDITVASEVMAIFCLSNDIGELERKIGNITIAYTKNKKPIFAKDLKAQGPMTVLLKEAFRPNVVQTLENNLAIIHGGPFANIAHGCNSILATKTALRLSDYVITEAGFGADLGAEKFLDIKCRKAGLQPKCIVLVATIRALKMHGGVLKENL

SEQ ID NO: 166397 - protein, 226 aa, Unknown
  Bacterial polypetide isolated from the Sargasso Sea
MSNYPTDLEIANAAHKKPIEEIASSLDINSDNLIRYGNDKAKLSTKFVNSLSKKDNGKLILVTAISPTPAGEGKTTTSVGLVDGLCHIGKKAMICLREPSLGPCFGMKGGAAGGGYAQVIPMTDINLHFTGDFHAIGAAHNLLSALIDNHIHWENKLNIDPRRITWKRVVDMNDRSLRDITCGLGGIGNGIPRQSGYDITVASEIMAVFCLASDIDDLQERMEILS

SEQ ID NO: 166398 - protein, 295 aa, Unknown
  Bacterial polypetide isolated from the Sargasso Sea
IIQLLCMGGPFANIAHGCNSVVSTKTALKLADYVVTEAGFGADLGAEKFFDIKCRKSGLEPDAVVLVATTKALKMHGGVKKEDLGTENVDAVILGCKNLEKHVENINKFGVPVVVAINDYVTDTEKEHNAIINFCKNLGIQCKISSHWEKGGLGASELAEEVAKVADSNISDFKTLYDDAMSLWDKTKYIAQNIYGAQDIIADKKVRNQFKKLEDDGFGSYPVCMAKTQYSFSTDPLLMGAPTGHEVPIREVRLSAGAEFVVVVCGEIMTMPGLPRVPAAEAIGLDENNEIAGLF

SEQ ID NO: 166399 - protein, 335 aa, Unknown
  Bacterial polypetide isolated from the Sargasso Sea
MVIGYSRSNEPIRAKQLNADGAITALLKDAFQPNLVQTLENNPAFIHGGPFANIAHGCNSVVSTKLALKLADYVVTEAGFGADLGAEKFFDIKCRKSGLKPDAVVLVATTKALKMHGGIAKDNLGGENVDAVTKGCKNLERHIENITKFGVPVIVAINDYVTDTKDEHAAIINYCKEIGVECRISSHWEKGGKGASDLAEEVVKIADSDSSEFKPLYDNKMSLWDKTEYIAKNIYGASEIIADKKVRNQFKKLEDDGFGEYPICMAKTQYSFSTDPLLMGAPSGHDVPIREVRLSAGAEFIVVVCGEIMTMPGLPRIPAAEGIDVDDEGLIQGLF

SEQ ID NO: 166400 - protein, 250 aa, Unknown
  Bacterial polypetide isolated from the Sargasso Sea
MTKYLSDLEIANAANKKPISEIANSININEEDLIKYGNDKAKLSYDFINSLSKKDIGKLILVTAISPTPAGEGKTTTSVGLVDGLCHIGKKAMICLREPSLGPCFGMKGGAAGGGYAQVIPMTDINLHFTGDFHAIGAAHNLLSALIDNHIHWDNELNIDPRRITWKRVVDMNDRSLREITCGLGGLGNGVPRQSGYDITVASEIMAVFCLASDLEDLQNRIGNIVIGYTKDNKKVRAKQLNADGAVTAL

SEQ ID NO: 166401 - protein, 359 aa, Unknown
  Bacterial polypetide isolated from the Sargasso Sea
MNKIKSDIEIARTADIKPITEVLKKLKIPDDPFAFSPMGRHIAKLNLEYIDSLKEKQSNLILVTAITPTPAGEGKTTISVGLNDGLNKIGKQSIVCLREPSLGPSFGMKGGAAGGGYAQVIPMEQINLHFTGDFHAITSAHNLLSALIDNHIYWGNKLNIDPKNIVWKRVIDLNDRSLRKIQINLEKLKANTPRNDSFDITVASEVMAIFCLSNSIKELEKKIGNITIAYSKDNKPIYAKDLKAQGPMTVLLKEAVRPNVVQTLENNLAIIHGGPFANIAHGCNSILATKTALKLSEYVVTEAGFGADLGAEKFLDIKCRKAGIKPSCVVLVATIRALKMHGGEEKDDFKKENLEALKK

SEQ ID NO: 166402 - protein, 275 aa, Unknown
  Bacterial polypetide isolated from the Sargasso Sea
MFKSDIEIARKANTISIQKVGGKLGLEEDHLLPYGNDKAKISEKFIKSIQKNKNGKLILVTAINPTPAGEGKTTTTVGLGDGLNALGKKTSICIREASLGPCFGMKGGAAGGGLSQVIPMEDMNLHFTGDFHAITSAHNLLSAMIDNHIYWGNEENIDLRRVVWRRVVDMNDRALRDIVTSLGGVSNGVPKQTGYDITVASEVMAILCLANDLQDLQRRLGDIIVAYRSDKSPVYCRDIKADGAMTVLLKDAILPNLVQTLENNPAFVHGGPFAN

SEQ ID NO: 166403 - protein, 385 aa, Unknown
  Bacterial polypetide isolated from the Sargasso Sea
AKIDFNKIKEKKENSKLILVTAITPTPAGEGKTTTSVGLSDGLCKIGKQSIVCLREPSLGPSFGMKGGAAGGGYAQVVPMENINLHFTGDFHAITSANNLLASLIDNHIYWGNKLQIDTRRVSWKRCVDLNDRALREITANLGGVANGYPRTDGFNITVASEVMAIFCLANNLEDLERRLGNITVAYTRERKPIFAKDLNAHGPMTVLLKEAIMPNLVQTLENNPAIIHGGPFANIAHGCNSIIATKTSLQLSDYVVTEAGFGADLGAEKFLDIKCRKGELVPSAVVLVATIRALKMHGGVNKKDLQVENVDAVIKGTSNLKRHIENIQKFRLPVVVAVNHFVADTDMEIEALKNECKKLNIDAITCEHWAKGGDGTIDLANKVV

SEQ ID NO: 166404 - protein, 239 aa, Unknown
  Bacterial polypetide isolated from the Sargasso Sea
MNLPKNYNPLDIYLKIRRKLRAPFGGIIINNDNYKEAVLSTSPERFIKIDNKNFVESRPIKGTRSRDKDLNQDALNAIDLITNEKDRAENIMIVDLIRNDLSKVCETGSIMVPEILKLESFLKVHHLTSVIRGKLKKDKNWIDLLKACWPGGSITGAPKLRSCQRLFELEECERGPYCGSFLKLDWNGEFDSNILIRSFLIKDKKINIYAGCGIVIDSNPEEETDELKWKLLPLIDSLK

SEQ ID NO: 166405 - protein, 118 aa, Unknown
  Bacterial polypetide isolated from the Sargasso Sea
SLSSATIKISGINGIALTKLDVLDELDEIKICIGYDLKGNKIDYLPAAVEDQLKVKPIYKNFKGWKTSTKGIKSFEDLPKNAQEYVKGLEKFIETKVASISTSPERKDTILIENPFSI

SEQ ID NO: 166406 - protein, 117 aa, Unknown
  Bacterial polypetide isolated from the Sargasso Sea
LVRQTLKISGIDGIALTKLDVLDQLDEIKMCIAYEINGKKYDYLPASVDDQFMAKPIYKSFKGWKSSTKGIKKFEELPHYAKNYIKELEKFVETRISSISTSPERNDTILIQDPFNV

SEQ ID NO: 166407 - protein, 27 aa, Unknown
  Bacterial polypetide isolated from the Sargasso Sea
MNNVVVVGSQWGDEGKGKIVDWLSSEA

SEQ ID NO: 166408 - protein, 115 aa, Unknown
  Bacterial polypetide isolated from the Sargasso Sea
KQTIQTSGIDGIALTKLDVLDDFDEIKICIAYDLKGKKIDHLPASSEQQLKVKPIYKNFKGWKSSTCGIKKFSELPNQAQIYIKFIEEFVGAKVSAISTSPERNDTILIEDPFKV

SEQ ID NO: 166409 - protein, 32 aa, Unknown
  Bacterial polypetide isolated from the Sargasso Sea
MKNVVVIGSQWGDEGKGKIVDWLSSEADIVVR

SEQ ID NO: 166410 - protein, 67 aa, Unknown
  Bacterial polypetide isolated from the Sargasso Sea
FKKLKGGKCSTADCRKLSDLPENAMNYLRFLAELMEVPIAIVSLGANRDQTIVIEDPIHGPKRALLR

SEQ ID NO: 166411 - protein, 30 aa, Unknown
  Bacterial polypetide isolated from the Sargasso Sea
MKNVVVVGSQWGDEGKGKIVDWLSSEADIV

SEQ ID NO: 166412 - protein, 170 aa, Unknown
  Bacterial polypetide isolated from the Sargasso Sea
GPLNFDEVVGVTKAYISRVGTGPFITEQENEIGDYMIEKGAEFGTVTGRRRRCGWLDLVSLQYSTRINSLSQLFITKLDVLSGLEEIKVCVGYSFEDKKITYYPLVDEILDKCEPIYESFKGWDEDISGIIKYDELPENAKKYIEFIEDFIDVPIKYISVGPERNQNIIR

SEQ ID NO: 166413 - protein, 37 aa, Unknown
  Bacterial polypetide isolated from the Sargasso Sea
TAQISGIDMIALTKLDVLDTFEKINICVGYELDWKRD

SEQ ID NO: 166414 - protein, 123 aa, Unknown
  Bacterial polypetide isolated from the Sargasso Sea
GWFDGVLVRQTIKISGIDGIALTKLDVLDELDEIKICVEYELNGKKIDYLPAAVEDQLKIKPIYKTFDGWKTSTSGVKNINDLPENAKKYLFAIEDFIGAKISSISTSPERDDTILVENPFEV

SEQ ID NO: 166415 - protein, 110 aa, Unknown
  Bacterial polypetide isolated from the Sargasso Sea
KISGIDGIALTKLDVLDELDEINLCVAYELNGKEIDYFPAAVEDQLNVKPIYKTFMGWKSKTQGIKKFEDLPDNAKIYVKAVEEFIETKISSISTSPERTDTILLIDPFK

SEQ ID NO: 166416 - protein, 94 aa, Unknown
  Bacterial polypetide isolated from the Sargasso Sea
LVRQTIKISGINGIALTKLDVLDELDEIKMCIAYKINGKEIDYLPTTIEDQKNVEPIYKTFKGWKSSTSGIKEFNKLPQEAKIYINELVKFYRV

SEQ ID NO: 166417 - protein, 114 aa, Unknown
  Bacterial polypetide isolated from the Sargasso Sea
MNFGATTGRPRRCGWLDLVALKKAIFINSVDSLCMTKADVLDTFENISVCVAYDDNNLPIYKRFEGWQEDTSQCSSYDELPKKLKDYIKFIEETVNCKVSIISVGPSREQSIHL

SEQ ID NO: 166418 - protein, 51 aa, Unknown
  Bacterial polypetide isolated from the Sargasso Sea
YSDLPENAMNYLRFLAELMEVPIAIVSLGANRDQTIVIEDPIHGPKRALLR

SEQ ID NO: 166419 - protein, 223 aa, Unknown
  Bacterial polypetide isolated from the Sargasso Sea
IRKKLRAPFGGIIINNNYKEAVLSTSPERFLKIDNKNFVESRPIKGTRSRDKDLNQDALNAIDLITNEKDRAENIMIVDLIRNDLSKVCETGSIMVPEILKLESFLKVHHLTSVIRGKLKKDTNWIDLLKACWPGGSITGAPKLRSCQRLFELEKCERGPYCGSFLKLDWNGEFDSNILIRSFLIKDKKINIYAGCGIVIDSDPEEETDELKWKLLPLIDSLK

SEQ ID NO: 166420 - protein, 62 aa, Unknown
  Bacterial polypetide isolated from the Sargasso Sea
TFAEKLKEVMEYHNFQLVNFYKVEAVDYQKVLDDVMAIADILTSMVVDVSDLLDHARKRGDF

SEQ ID NO: 166421 - protein, 85 aa, Unknown
  Bacterial polypetide isolated from the Sargasso Sea
MNNFIENVDICIGLCWGDEGKGKIVSQLIKSNNYNFVCRWSGSSNAGHTIYIDKSKYSTHIIPAGIFYNVPSIIGPDCYINETEF

SEQ ID NO: 166422 - protein, 34 aa, Unknown
  Bacterial polypetide isolated from the Sargasso Sea
MKNVVVVGTQWGDEGKGKIVDWLSSKADVVIRFQ

SEQ ID NO: 166423 - protein, 30 aa, Unknown
  Bacterial polypetide isolated from the Sargasso Sea
MKNVVVVGSQWGDEGKGKIVDWLSREADVV

SEQ ID NO: 166424 - protein, 145 aa, Unknown
  Bacterial polypetide isolated from the Sargasso Sea
IEYPKAYATRVGEGPFPTEVFDQILKEISSRGNEFGATTGRPRRCGWLDLVLLKKAIFLNSVDSLCLTKIDILDSFEEINLCIDYKDNKPIYKRFDGWMQNTSQIKKYDDLPQKLKEYISFIQDFTKTKVSILSIGPSRDQSIYI

SEQ ID NO: 166425 - protein, 113 aa, Unknown
  Bacterial polypetide isolated from the Sargasso Sea
TIKISGIDGIALTKLDVLDELDEIKMCVEYDLNGKKIDYLPAAVEDQLKIKPIYKTFEGWKTSTNGIKNINDLPNNAKKYIFAIEDFIGAKISSISTSPERDDTILVENPFEI

SEQ ID NO: 166426 - protein, 76 aa, Unknown
  Bacterial polypetide isolated from the Sargasso Sea
INDQLCDRGSEFGTTTGRRRICGWFDGVIGKYAVSVNGLDCLAVTKLDVLDELDEIQVCIAYDLDGEEIDYFPTNS

SEQ ID NO: 166427 - protein, 144 aa, Unknown
  Bacterial polypetide isolated from the Sargasso Sea
KQGEKIRQLGHEFGATTGRERRCGWIDLPALKYAIMINGVTELSMMKADVLDEFDKIKVCTHYIHKGEKIDYFPYNIDQSVQPVYVEFDGWNTDLTELTNSDNLPLELVNYINYLEKELETPISIISVGPDRKQTIDNSKPVSI

SEQ ID NO: 166428 - protein, 33 aa, Unknown
  Bacterial polypetide isolated from the Sargasso Sea
VRRIEELIDCPVALLSTSPEREDTILVRDPFED

SEQ ID NO: 166429 - protein, 31 aa, Unknown
  Bacterial polypetide isolated from the Sargasso Sea
MNNVAVIGSQWGDEGKGKIVDWLSEKADVIV

SEQ ID NO: 166430 - protein, 101 aa, Unknown
  Bacterial polypetide isolated from the Sargasso Sea
MTKLDVLDELDEIKMCVAYKLDGKQLDYLPAGAEYQFKIKPIYKTFSGWKKSTKGIRNVEDLPDNARKYIYALEDFIEAKISSISTSPEREDTILIENPFD

SEQ ID NO: 166431 - protein, 29 aa, Unknown
  Bacterial polypetide isolated from the Sargasso Sea
MKNVVVVGSQWGDEGKGKIVDWLSSEADV

SEQ ID NO: 166432 - protein, 125 aa, Unknown
  Bacterial polypetide isolated from the Sargasso Sea
TNSHEMINFKNIINNIKNIEEENIIKTNLNFDFSKINLDEMSEKFQKNILKLKRLISKGDLFQANLTTKCEIESSKNYSPLDIYLKIRMKLRAPFGGIIVNNNDNYKEAVLSTSPERFIKIDNKN

SEQ ID NO: 166433 - protein, 117 aa, Unknown
  Bacterial polypetide isolated from the Sargasso Sea
MVKQSIKISGINGIALTKLDVLDELEEIKICVAYEINGNKIDYFPAESEKQNQVKPIYKSFEGWKCSTKGINKFQDLPNNAKIYIKYLEDFIGTKISSISTSPERDDTILIENPFKI

SEQ ID NO: 166434 - protein, 112 aa, Unknown
  Bacterial polypetide isolated from the Sargasso Sea
LKISGIDGIALTKLDVLDQLDEIKMCIAYEINGKKYDYLPASVDDQFMAKPIYKSFKGWKSSTVGIKKFEELPENAKNYIKELEKFVETTISSISTSPERNDTILIQDPFNL

SEQ ID NO: 166435 - protein, 158 aa, Unknown
  Bacterial polypetide isolated from the Sargasso Sea
KAYISRVGTGPFITEQENEIGDYMIEKGAEFGTVTGRRRRCGWLDLVSLKYSKRINSLSQLFITKLDVLSGLEEIKVCIGYSFEDKKITDYPLVDEILDKCEPIYESFEGWNEDISGITKYDALPENAKKYIEFIEDFSDVPIKYISVGPERNQNIIR

SEQ ID NO: 166436 - protein, 104 aa, Unknown
  Bacterial polypetide isolated from the Sargasso Sea
MGATVVIGGFFGDEGKGKIISYLAQKDNPAIVVRGGAGPNAGHTIKDGDKTFKVRMLPSGFLNKNSRVMIGPGVVVNPDVFLKEINDFGTDGRSFLDNNCGIIE

SEQ ID NO: 166437 - protein, 184 aa, Unknown
  Bacterial polypetide isolated from the Sargasso Sea
VTSSSTISANASIGTGIPYSKITKSIGISKSYTTRVGHGPFPTEMLDDKGLTLREFGAEYGATTGRPRRCGWLDLVALKHSVNICGLDQLVITKADILSMFDTIKLCTGYKIGKRLIKKFPQNLDNLDKVVPVYKNFKSWKSDDLNKENPPKNLINFIKYIENYLNVEISMVSVGPERDQILYL

SEQ ID NO: 166438 - protein, 37 aa, Unknown
  Bacterial polypetide isolated from the Sargasso Sea
MAIDLLLGLQWGDEGKGKIVDFLTKSYDIIARFQGGP

SEQ ID NO: 166439 - protein, 33 aa, Unknown
  Bacterial polypetide isolated from the Sargasso Sea
MRNVVVVGTQWGDEGKGKIVDWLSSKADVVVRS

SEQ ID NO: 166440 - protein, 248 aa, Unknown
  Bacterial polypetide isolated from the Sargasso Sea
MKIKKIVLEKWIDPALISHYLTKKFGDKGLAWLDSDGKENGEWSIIGIKPKKIIQSRDINNLDKTNNPFKNLKNIEKGFWMGWLSYEAGVYIEPKNPWEKSNMATLWIASYDPIIKCNLIKKEIIIEGTNSSELMNYKNIINNIKNIEEENIIKTKLNFDFSKINLDEMAEKFQKNILKLKKLIFLGDIFQANLTTKCEVESSKNYNPLDIYLKIRRKLRAPFGGIIINNNYKEAVLSTSPERFLKID

SEQ ID NO: 166441 - protein, 116 aa, Unknown
  Bacterial polypetide isolated from the Sargasso Sea
RCGWLDLEALKYSAKLNNLTSLCITKLDVLDDFNQIKVCIGYQVDGELSSFKSRLLHKSKPIYKTIDGWGCSLKDAKNFNELPIEAKAFIELIEEFTKIPVSLISNGPNREDLILR

SEQ ID NO: 166442 - protein, 36 aa, Unknown
  Bacterial polypetide isolated from the Sargasso Sea
MSNIVVVGTQWGDEGKGKIVDWLSNKADLVVRFQGG

SEQ ID NO: 166443 - protein, 120 aa, Unknown
  Bacterial polypetide isolated from the Sargasso Sea
MVCLVKQTIKTSGINGIALTKLDVLDDFDEIKVCTAYELNGEKIDYLPASSEQQFKVKPIYKSFEGWKSSTCGIEKFSKLPVKAQNYINFIEKFVDAKISTISTSPERKDTILIEDPFNT

SEQ ID NO: 166444 - protein, 76 aa, Unknown
  Bacterial polypetide isolated from the Sargasso Sea
DMLIDNGIDISGLKISSTSHVTMPYHRILDEAMEADRGSNKIGTTVRGIGPTYADKSQRNGIRIRDLLNKERLSDV

SEQ ID NO: 166445 - protein, 243 aa, Unknown
  Bacterial polypetide isolated from the Sargasso Sea
TKCEIESSKNYNPLDIYLKIRRKLRAPFGGIIINNDNNKEAVLSTSPERFIKIDNKNFVESRPIKGTRSRDKDLNQDALNAIDLITNEKDRAENIMIVDLIRNDLSKVCETGSIMVPEILKLESFLKVHHLTSVIRGKLKKDKNWIDLLKACWPGGSITGAPKLRSCQRLFELEECERGPYCGSFLKLDWNGEFDSNILIRSFLIKDKKINIYAGCGIVIDSNPEEETDELKWKLLPLIDSLK

SEQ ID NO: 166446 - protein, 183 aa, Unknown
  Bacterial polypetide isolated from the Sargasso Sea
NTSAGNAATGSGIGPLNFDEVVGVTKAYISRVGTGPFITEQENEIGDYMIEKGAEFGTVTGRRRRCGWLDLVSLKYSKRINSLSQLFITKLDVLSGLAEIKICIGYSFEDKKITDYPLVDEILDKCEPIYESFEGWDEDISGITKYDSLPENAKKYIDFIEDFIGVPIKYISVGPERNQNIIR

SEQ ID NO: 166447 - protein, 175 aa, Unknown
  Bacterial polypetide isolated from the Sargasso Sea
NASIGTGIPYSKITKSIGISKSYTTRVGHGPFPTEMLDDKGLTLREFGAEYGATTGRPRRCGWLDLVALRHSVNICGLDELVITKADILSMFDTIKLCTGYRIGKRLIKKFPQNLDNLDKVVPVYKNFKSWKSDDFNKKNPPKNLINFIKYIENYLNVKISMVSVGPERDQILYL

SEQ ID NO: 166448 - protein, 121 aa, Unknown
  Bacterial polypetide isolated from the Sargasso Sea
MQWVAKYAIQLNGIDALILTKIDVLDGFKTIKVCTGYKFKGKVFQDMPADSVILGNCEPVYTEHEGWMEKTAGVKDFEKLPEKARSYIEYLSDLLETPFQIISTGPDREETIEMDSLFIDS

SEQ ID NO: 166449 - protein, 253 aa, Unknown
  Bacterial polypetide isolated from the Sargasso Sea
GQVRRPDAARAARHRAAVPRLHARRRGGDARDGAPPHRRVRRGRRRGAARGARRARADGRCQGGALVAPRPRAASSLRRAVQGQRTAARARLALPRALAPQPLGGAAGRQGLPRERRRAPPAARRPAGPAAAPVGRAALRAREAVPPLPARLRERRPRLRGGAHARGGGAAPDPLPVQAARVPEQVRLRPAAREQDGGAQEGLPQAPRRVPQPLRPQEAHGERAGAARGRRLAPESLPAARRAVPARLRRAHG

SEQ ID NO: 166450 - protein, 234 aa, Unknown
  Bacterial polypetide isolated from the Sargasso Sea
NANIKPLALYRRLRRHCPAPFGGLMLASCEEAVLSTSPERFLQVSATGLVETRPIKGTRPRHDDPTQDADAAAELVCSAKDRAENVMIVDLMRNDLGRVCRNGSIEVPQLVGLESYRQVHHLTSVVTGQLNDPSDLAGLLRACWPGGSITGAPKIRTCQQLNALEPVARGPYCGSFFHRRPDGSFDSNILIRSLLLKGSTVRIHGGCGIVADSDPAQETEELGWKVQPLLQALS

SEQ ID NO: 166451 - protein, 418 aa, Unknown
  Bacterial polypetide isolated from the Sargasso Sea
MPSIVVVGANWGDEGKGRIVDYLAADAAASVRFQGGNNAGHTVVNDFGTFKLHQLPSGIFNPNCVAVLGPGMVISPEKLSVEIAEVEAAGIEVKLCISDRATLCLPIHALEDTLEEQRLGDLAYGSTRQGIAPAYGDRVMKKGILVGWLNQPEVLQERIQFMLDWKLPQLKALYPSCDFSQTAAEMTQWLLEVTAPWRPFICNVTEPLKALQKQDANLLFEAQLGAGRDLIYGEYPYTTSSNVTAAFAGLGSGLPALRPERVIAVAKAFSSSVGTGTLVTAMEEQDDFRKNANEFGATTGRPRDMGYFDAVATRNGVELQAATEIALTKIDCLTGMKDLKICVAYEGEHTENPIWPQTAALSPVYEQMESWSEDITGCRTFESLPKAAQHYVERIEALMGVRVSMVSVGPERDQMIIR

SEQ ID NO: 166452 - protein, 162 aa, Unknown
  Bacterial polypetide isolated from the Sargasso Sea
MGATIVIGGFFGDEGKGKIISYLAQKDDPTIVVRGGAGPNAGHTIKDGDKTFKVRMLPSGFLNKNSRVMIGPGVVVNPDVFLKEITDFGTDGRSFLDNNCGIIEKHHLEDDSKGRLKEKIGSTGSGTGPANAERAMRTLKMAKEIDSLQKYIIDVPLEINKA

SEQ ID NO: 166453 - protein, 104 aa, Unknown
  Bacterial polypetide isolated from the Sargasso Sea
IALTKLDVLDQLEEIKMCIAYEVNGKQIDYLPAATEEQIKAKPIYKNFKGWNCSTKGIKKFDDLPNNAKNYIKEVEKFIETKVASISTSPERNDTILIVDPFSN

SEQ ID NO: 166454 - protein, 123 aa, Unknown
  Bacterial polypetide isolated from the Sargasso Sea
SPSWLGLMQLWRGQAVRLNACTEIALTKLDVLDQLETIKVCVAYEVDGQRYEYLPHLRRMHDRAKPVYAEFPGWQRDLSEVTKREDLPREAVEYISFLERQMGVPVRFVCVGPGREQYLRFAA

SEQ ID NO: 166455 - protein, 123 aa, Unknown
  Bacterial polypetide isolated from the Sargasso Sea
MIYYKEAVLSTSPERFIKIDNKNFVESRPIKGTRSRDKDLNQDALNAIDLITNEKDRAENIMIVDLIRNDLSKVCETGSIMVPEILKLESYLKVHHLTSVIRGKLKKDKNWIDLLKACWPGAL

SEQ ID NO: 166456 - protein, 47 aa, Unknown
  Bacterial polypetide isolated from the Sargasso Sea
PENAMNYLRFLAELMEVPIAIVSLGANRDQTIVIEDPIHGPKRALLR

SEQ ID NO: 166457 - protein, 418 aa, Unknown
  Bacterial polypetide isolated from the Sargasso Sea
MPSIVVVGANWGDEGKGRIVDYLAADAAASVRFQGGNNAGHTVVNDYGTFKLHQLPSGIFNPNCVAVLGPGMVISPEKLSVEIAEVEAAGIEVKLCISDRATLCLPIHALEDTLEEQRLGDLAYGSTRQGIAPAYGDRVMKKGILVGWLKQPEVLQERIQFMLDWKLPQLKALYPSCDFSQTAAEMTQWLLDVTAPWRPFICNVTEPLKALQKQDANLLFEAQLGAGRDLIYGEYPYTTSSNVTAAFAGLGSGLPALRPERIIAVAKAFSSSVGTGTLVTAMEEQDDFRKNANEFGATTGRPRDMGYFDAVATRNGVELQAATEIALTKIDCLTGMKDLKICVAYDGEHTENPIWPQTAALSPVYEQMESWSEDITTCRTFESLPKAAQHYVERIEALMGVRVSMVSVGPERDQMIIR

SEQ ID NO: 166458 - protein, 152 aa, Unknown
  Bacterial polypetide isolated from the Sargasso Sea
MSLDVLLGLQWGDEGKGKVVDYLSKKYNLVARFQGGPNAGHTLEFDNKKHVLHQIPSGIFSNNSLNIIGNGVVLDPVIFKNEIEKIELKFGLTLFENLFISNKVQLITPSHRFIDKILEKEKGDKKIGSTLRGKGPTYQDKIGRHGLRVGDI

SEQ ID NO: 166459 - protein, 167 aa, Unknown
  Bacterial polypetide isolated from the Sargasso Sea
DRIIGITKAYTTRVGAGPFTAELFDEIGDHLIDVGHEYGTNTGRRRRVGWLDLVMLRYACRVNSLTELAIAKLDVLDDLDSIKICVAYEFEGKRHDWLPHNQSLQNQAVPIYEEFKGWKCDLSEIKNRSELPKEAENYLNFIENSLNIPVDLVGVGPGRHQYFRRQK

SEQ ID NO: 166460 - protein, 42 aa, Unknown
  Bacterial polypetide isolated from the Sargasso Sea
MKNIVVVGSQWGDEGKGKIVDWLSSEADIVIRFQGGHNAGHT

SEQ ID NO: 166461 - protein, 77 aa, Unknown
  Bacterial polypetide isolated from the Sargasso Sea
MKIDMILGLQWGDEGKGKIVDVLTRDYDIIARFQGGPNAGHTLIFDGTKHVLHTIPSGIFHDKKINVVGKWCGYRPP

SEQ ID NO: 166462 - protein, 264 aa, Unknown
  Bacterial polypetide isolated from the Sargasso Sea
NILKLKKLISLGDLFQANLTTKCEIESSKNYSPLDIYLRIRSKLRAPFGGIIVNNNDNYKEAVLSTSPERFIKIDNKNFVESRPIKGTRSRDNDLNQDALNAIDLITNEKDRAENIMIVDLIRNDLSKVCQTGSIMVPEILKLESFLKVHHLTSVIRGKLEKGKNWIDLLKACWPGGSITGAPKLRSCQRLFELEECERGPYCGSFIKLDWNGEFDSNILIRSFLIKDKKIKIYAGCGIVIDSNPEEETNELKWKLLPLIDSLK

SEQ ID NO: 166463 - protein, 124 aa, Unknown
  Bacterial polypetide isolated from the Sargasso Sea
RRCGWFDAIAMKRAVKLSSVSGICLTKIDVLDDLEVVKICVDYECEYKRELFDFSSASLSGVIPKYIEMPGWQESTSGLTQYDQLPEAARNYIKVLEKQIGVPISMISTGPDREETIFLTNPFG

SEQ ID NO: 166464 - protein, 74 aa, Unknown
  Bacterial polypetide isolated from the Sargasso Sea
PFDENLHDKLKPVYETIPGWRTSTFGLTGWNQLPKKARDYIDFLESKIENNISIISTGPDRVHTIDRKNLLSNS

SEQ ID NO: 166465 - protein, 161 aa, Unknown
  Bacterial polypetide isolated from the Sargasso Sea
VSSGLGIGPKHINNVIGIVKAYATRVGEGPFITELFDEDGEEIAKRGNEFGATTGRPRRCGWLDLVALKKAIFINSVDSLCMTKADVLDTFENISVCVAYDDNNLPIYKRFEGWQEDTSQCSSYDELPQKLKDYVKFIEETVECKVSIISVGPSREQSIHL

SEQ ID NO: 166466 - protein, 437 aa, Unknown
  Bacterial polypetide isolated from the Sargasso Sea
MKIKKIILEKWIDPALISHHLTKKFGDKGLAWLDSDGKENGEWSIIGIKPKKIIQSRDINNLDKTNNPFNNLRNIEKGFWIGWLSYEAGVYIEPKNPWKKSNMATLWIASYDPIIKCNLIKKEIIIEGTNSSELMNYKNIINNIKNIEEENIIKTKLNFDFSKINLDEMAEKFQKNILKLKKLISLGDIFQANLTTKCEVESSKNYNPLDIYLKIRRKLRAPFGGIIINNNYKEAVLSTSPERFLKIDNKNFVESRPIKGTRSRDKDLNQDALNAIDLITNEKDRAENIMIVDLIRNDLSKVCETGSIMVPEILKLESFLKVHHLTSVIRGKLKKDTDWIDLLKACWPGGSITGAPKLRSCQRLFELEEYERGPYCGSFLKLDWNGEFDSNILIRSFLIKDKKINIYAGCGIVIDSDPEEETDELKWKLLPLIDSLK

SEQ ID NO: 166467 - protein, 491 aa, Unknown
  Bacterial polypetide isolated from the Sargasso Sea
MISALIERHFAEAPNRIVVREMDGREYSLDELRADVARIAGKLEEVYGDCSGLVFGIAARSSYTWVATMLAIFRVKAVLLPVPIEFSDEQIGSLLHKATAIFAQDAKTAARIGSILPGISCIDAASEREGWPAAGAPTGERIEPGICGIIHTSGTTSKPKGVKIRDEAVGLLVTNVLKRVPAGPLDYLSIVPMSLLIEQVLGVFLPVLSGGSLTLMPANYAEYGARSGNARDYLDLIARVDPNFLYLPPKLLEEADALLESTGTTQLFGRRNPHIITGGAKIPATVLESLDKRGVQVYEAYGLSENSSIISLNYPGQRRIGSAGTLLDGIVPVIVDGELRVRTPTLCAGYYNSDDTSCELTDGYLHTGDIAEIVDGFLYITGRKKHVIILSTARNISPEWVETVYKESALIDDIVVFGEGREEPAAIVLSAHDEAAVRDEMARLEPRLADFARVRRVRVVTDIERFRKDYYTVTGRPRRQLIERDHAASLY

SEQ ID NO: 166468 - protein, 109 aa, Unknown
  Bacterial polypetide isolated from the Sargasso Sea
MKNVAVVGSQWGDEGKGKIVDWLSEQADVVIRFQGGHNAGHTLVIDGVTYKLRLLPSGIVRKNKVSIIGNGVVVDPWALLDEIKEIGEKGVDVNSKNFMISEAASLILP

SEQ ID NO: 166469 - protein, 66 aa, Unknown
  Bacterial polypetide isolated from the Sargasso Sea
MKNVVVVGSQWGDEGKGKIVDWLSSEADVVVRFQGGHNAGHTLVINGITYKLRLLPSGIVRKDKIS

SEQ ID NO: 166470 - protein, 132 aa, Unknown
  Bacterial polypetide isolated from the Sargasso Sea
TVTSRKRRCGWFDGVLVRQTIKISGINGIALTKLDVLDELEEIKMCIAYEIKGKKINYLPASTDEQLNIKPVYKSFNGWKSSTKGIKKFDDLPDNAKLYVTELEKFLETKVSSISTSPERNDTILIEDPFNI

SEQ ID NO: 166471 - protein, 145 aa, Unknown
  Bacterial polypetide isolated from the Sargasso Sea
MEKVWGKRGNDYGTVTARKRRCGWFDGVLVRQTIKISGINGIALTKLDVLDELDEIKMCIQYELNGKKIDYLPAASEDQFNIKPIYKSLPGWKTKTQGIRNFKDLPENAKKYIHSLEDFIGAKISSISTSPEREDTILVKDPFNT

SEQ ID NO: 166472 - protein, 165 aa, Unknown
  Bacterial polypetide isolated from the Sargasso Sea
MKNIVVVGSQWGDEGKGKIVDWLSEQADVVIRFQGGHNAGHTLVIDGVTYKLRLLPSGIVRKGKISIIGNGVVVDPWALLEEIEEIKSKGVEVNVNNFIISESANLILPFHREMDEIREDEAGKSKIGTTRRGIGPAYEDKVGRRSIRVMDLRSEKNLDQRLDYV

SEQ ID NO: 166473 - protein, 216 aa, Unknown
  Bacterial polypetide isolated from the Sargasso Sea
MFYTIIGTQWGDEGKGKIVDWLASKADTVVRFQGGNNAGHTLKIKDEIFKLNLLPSGIIRGKRCIIGNGVILDPWALLKEIEKLKTQNILINHSNFMIAENICLILPIHKIIDELNEKLRGTENIGTTKRGIGPAYEDKIGRRSIRLCDLGDKEILEKKLNNLLKFHEDRLNKHNINIDIPNLLAELISIDKKISSFSKPTWKILNELQKKETILF

SEQ ID NO: 166474 - protein, 223 aa, Unknown
  Bacterial polypetide isolated from the Sargasso Sea
MTNVAVIGSQWGDEGKGKIVDWLSSNADIVVRFQGGHNAGHTLVIDGIIYKLRLLPSGIVRKGKVSIIGNGVVVDPWALLDEIEEIKSKGVEIDKKNLIVSEAANLILPFHREMDEIREDAAGQSKIGTTRRGIGPAYEDKVGRRSIRVMDLASEKNLDHRLETVLAHHNTIRRGLGKEIFEKNKLKQDLLSIAPEILKYSQPVWKKLNEFKSKGKKILFEGA

SEQ ID NO: 166475 - protein, 178 aa, Unknown
  Bacterial polypetide isolated from the Sargasso Sea
MNNVVVVGSQWGDEGKGKIVDWLSSEADVVVRFQGGHNAGHTLVIDGVTYKLRLLPSGIVRKNKISIIGNGVVVDPWALLDEIEEAKSKGVEINENNLILSEAATLILPFHREMDEIREDSAGKSKIGTTRRGIGPAYEDKVGRRSIRVMDLASKQNLENRLSLVLEHHNAIRKGLGK

SEQ ID NO: 166476 - protein, 139 aa, Unknown
  Bacterial polypetide isolated from the Sargasso Sea
MKIDLILGLQWGDEGKGKIVDVLTENYNIIARFQGGPNAGHTLEFDGIKHVLHTIPSGIFHNNKLNIIGNGVVIDPVILKTEIDKLHELDVDLSEKLMISRKAHLILPTHRLIDKASELSKGKKKIGSTLKRNWSNLHG

SEQ ID NO: 166477 - protein, 58 aa, Unknown
  Bacterial polypetide isolated from the Sargasso Sea
MKNVVVVGSQWGDEGKGKIVDWLSSEADVIVRFQGGHNAGHTLVIDGVGYKLRLLPSG

SEQ ID NO: 166478 - protein, 137 aa, Unknown
  Bacterial polypetide isolated from the Sargasso Sea
GKEFGTVTSRKRRCGWFDGVLVRQAIKISGIDGIALTKLDVLDELDEIKMCVSYELNKKKIDYLPASAEDQLKVKPVYKVFKGWKSSTKGIKEFDKLPENAKIYVKEIEKFVEAKISSISTSPEREDTILIENPFKI

SEQ ID NO: 166479 - protein, 123 aa, Unknown
  Bacterial polypetide isolated from the Sargasso Sea
MKNVVVVGSQWGDEGKGKIVDWLSSEADIVVRFQGGHNAGHTLVIDKKIFKLRLLPSGIVREGKISILGNGVVIDPWALLSEIKEIKKQGIKVTPENFMISESASLILPFHQEMDEIREDVAE

SEQ ID NO: 166480 - protein, 152 aa, Unknown
  Bacterial polypetide isolated from the Sargasso Sea
MKNIVVVGSQWGDEGKGKIVDWLSEQADVVIRFQGGHNAGHTLVIDGVTYKLRLLPSGIVRKGKISIIGNGVVVDPWALLQEIEEIKSKGVEVNVNNFIISESANLILPFHREMDEIREDSAGKSKIGTTRRGIGPAYEDKVGRRSIRVMDL

SEQ ID NO: 166481 - protein, 82 aa, Unknown
  Bacterial polypetide isolated from the Sargasso Sea
MKNVAVIGSQWGDEGKGKIVDWLSSEADVIIRFQGGHNAGHTLVIDGKTYKLRLLPSGIVRKNKISIIGNGVVVDPWALVDE

SEQ ID NO: 166482 - protein, 87 aa, Unknown
  Bacterial polypetide isolated from the Sargasso Sea
CVGYELDGKRLDYLPTATDQQWRCKPVYEELPGWSESTEGARSWADLPANAIKYVRRVEELIECPVALLSTSPERDDTILVTDPFAD

SEQ ID NO: 166483 - protein, 72 aa, Unknown
  Bacterial polypetide isolated from the Sargasso Sea
MKNVIVIGTQWGDEGKGKIVDWLSSEADVVVRFQGGHNAGHTLVIDGITYKLRLLPSGTVRKNKVSIIGNGV

SEQ ID NO: 166484 - protein, 137 aa, Unknown
  Bacterial polypetide isolated from the Sargasso Sea
TRGKEFGTVTSRKRRCGWFDGVLVRQTIKISGIDGIALTKLDVLDELEEIKMSVAYELNGKKIDYLPAAVDDQLKVKPIYKTFRGWKSSTKGIKEFEKLPENAKIYIKELEKFIETKISSISTSPERSDTILIENPF

SEQ ID NO: 166485 - protein, 172 aa, Unknown
  Bacterial polypetide isolated from the Sargasso Sea
INYVLGIPKAYTTRVGSGPFPSELKDEIGESLGRRGKEFGTVTARKRRCGWFDGVLVRQTIKISGINGIALTKLDVLDDLEEIKMCVGYNLNGKEIDYLPAASEDQFNIKPIYKTFKGWKTKTQGVRSFKDLPDNARKYIHALEDFVGAKISSISTSPERDDTILVEDPFNN

SEQ ID NO: 166486 - protein, 104 aa, Unknown
  Bacterial polypetide isolated from the Sargasso Sea
MTKTQNFAVLGLQWGDEGKGKIVNFLSPNFHATCRFQGGHNAGHTLIVNGKKLILHLLPSSICEKDALSLIGKGVVLSPNDLFEEISEANTFLEGVEDRLKISS

SEQ ID NO: 166487 - protein, 64 aa, Unknown
  Bacterial polypetide isolated from the Sargasso Sea
EVKPVYESLPGWSESTLGVKSEDDLPANAKAYLQRIEAITGAPIDIISTGPDRVETIIKRHPFS

SEQ ID NO: 166488 - protein, 150 aa, Unknown
  Bacterial polypetide isolated from the Sargasso Sea
ELNNEIGESLGRRGKEFGTVTARKRRCGWFDGVLVRQTIKISGINGIALTKLDVLDELEEIKMCVQYELNEKKIDYLPAASEDQFNIKPIYKTFNGWKSNTQGVRNFKDLPDNAKRYIHALEDFIGARISSISTSPERDDTILVEDPFSI

SEQ ID NO: 166489 - protein, 129 aa, Unknown
  Bacterial polypetide isolated from the Sargasso Sea
MKNIVVVGSQWGDEGKGKIVDWLSEQADVVIRFQGGHNAGHTLVIEGVTYKLRLLPSGIVRKNKISIIGNGVVVDPWALLDEMEEIKLKGVDINVDNFIISESANLILPFHREMDEIREDSAGKRKNWH

SEQ ID NO: 166490 - protein, 118 aa, Unknown
  Bacterial polypetide isolated from the Sargasso Sea
MKNIVVVGSQWGDEGKGKIVDWLSDQADVIIRFQGGHNAGHTLVIDGVTYKLRLLPSGIVRKDKVSIIGNGVVIDPWALLDEIEEIKSKGVDVNQDNFIISESANLILPFHKEMDEIR

SEQ ID NO: 166491 - protein, 122 aa, Unknown
  Bacterial polypetide isolated from the Sargasso Sea
KYAVSVNGLDCLAVTKLDVLDELDEIQVCIAYDLDGEEIDYFPTNSDDLKKCKPIFKKLKGWQCSTADCRKLSDLPENAMNYLRFLAELMEVPIAIVSLGANRDQTIVIEDPIHGPKRALLR

SEQ ID NO: 166492 - protein, 143 aa, Unknown
  Bacterial polypetide isolated from the Sargasso Sea
DFLGTRGKEFGTVTSRKRRCGWFDGVLVRQTIKVSGIDGIALTKLDVLDELDEIKMCVAYDLDGRRLDYLPAAVEDQIKIKPIYETFPGWKVSTSGVKNMDSLPENAKKYIFAVEDFIGAKVSSISTSPERDDTILIENPFEV

SEQ ID NO: 166493 - protein, 46 aa, Unknown
  Bacterial polypetide isolated from the Sargasso Sea
MRNIAVVGSQWGDEGKGKIVDWLSEQADVVIRFQGGHNAGHTLVID

SEQ ID NO: 166494 - protein, 147 aa, Unknown
  Bacterial polypetide isolated from the Sargasso Sea
SEIHNEIAENIRTQGKEYGTTTGRPRRIGWLDLVQVKQAVRVNGLTEIALTKLDILSGLREVKVCTGYKYNSEIIKEMPSSLTKYRNLQPVYRTLPGWSKINPEPWKDGYSKLPKDLQNYVSFIENEIECPVKIISVGPQRHETIII

SEQ ID NO: 166495 - protein, 179 aa, Unknown
  Bacterial polypetide isolated from the Sargasso Sea
SGCGPNSINYVLGITIAYTTRVGEGPFPTELKDDVGEKLGTVGKEFGTVTSRKRRCGWFDGVLVRQTIKIAGIDGIALTKLDVLDQLDEIKMCVGYEVGNKKMDYLPAAVEDQLKAKPIYKNFKGWKCSTKGIKNFDKLPQNAKIYINELEKFIETKVASISTSPERNDTILIVDPFSN

SEQ ID NO: 166496 - protein, 128 aa, Unknown
  Bacterial polypetide isolated from the Sargasso Sea
RKRRCGWFDGVLVKQTIKISGINAIALTKLDVLDDLEEIKICVQYELNGKKIDYLPSASEDQFNIKPIYKTFPGWKTKTQGIRHMKDLPENAKKYVYAIEDFIGAKISSISTSPERDDTILLEDPFKI

SEQ ID NO: 166497 - protein, 89 aa, Unknown
  Bacterial polypetide isolated from the Sargasso Sea
MKNIVVVGSQWGDEGKGKIVDWLSEQADVVIRFQGGHNAGHTLVIDGVTYKLRLLPSGIVRKNKISIIGNGVVVDPWALLDEIKEIKLK

SEQ ID NO: 166498 - protein, 161 aa, Unknown
  Bacterial polypetide isolated from the Sargasso Sea
MSTYVVVGLQYGDEGKGKITDVLSAKSDYVVRFQGGDNAGHTVYVGDEKFVLHLLPSGVLQCKGKCIIANGVVVNPKAFMKEVGQIEEKGLKTDHIFISRRAHVIMPYHILLDTYREEEHGGTQIGTTKKGIGPCYEDKIARVGIRMVDLLNPEILREKIE

SEQ ID NO: 166499 - protein, 51 aa, Unknown
  Bacterial polypetide isolated from the Sargasso Sea
MIITIVGGQWGDEGKGKIIDHIAEKADVIARYAGGNNAGHTIENKLGKFAL

SEQ ID NO: 166500 - protein, 139 aa, Unknown
  Bacterial polypetide isolated from the Sargasso Sea
MKESLILVGTQWGDEGKGKIVDYFSQKFDAVCRFQGGHNAGHTIYSQNEKFVLHLVPSGIFYNHVQCFIGQGVILSLDSLLEEVNKLKERGINLEGKLRISRYCSLLLPIHATIDQLREDNKNSIGTTKRGIGPAYEDK

SEQ ID NO: 166501 - protein, 45 aa, Unknown
  Bacterial polypetide isolated from the Sargasso Sea
MSENTIILGLQWGDEGKGKIVDNLSANIDAVCRFQGGHNAGHTIK

SEQ ID NO: 166502 - protein, 156 aa, Unknown
  Bacterial polypetide isolated from the Sargasso Sea
MKNVVVVGSQWGDEGKGKIVDWLSSEADVIVRFQGGHNAGHTLVIDGVVYKLRLLPSGIVRKNKISIIGNGVVVDPWSLLEEINEIKSKGVEVNSNNLILSDAATLILPFHKEMDEIREDTAGKSKIGTTRRGIGPAYEDKIGRRSIRVMDLSSEN

SEQ ID NO: 166503 - protein, 156 aa, Unknown
  Bacterial polypetide isolated from the Sargasso Sea
MKNVVVVGSQWGDEGKGKIVDWLSSKADVVVRFQGGHNAGHTLVIDKITYKLRLLPSGIVRKNKVSIIGNGVVVDPWALLDEIEEVKSKGVEINENNLILSEAATLILPFHREMDEIREDSAGNLKIGTTRRGIGPAYEDKVGRRSIRAMDLASKK

SEQ ID NO: 166504 - protein, 58 aa, Unknown
  Bacterial polypetide isolated from the Sargasso Sea
MPENTLILGLQWGDEGKGKIVDNLSKTVDAVCRFQGGHNAGHTIKVNDEPTVLHLIPS

SEQ ID NO: 166505 - protein, 123 aa, Unknown
  Bacterial polypetide isolated from the Sargasso Sea
GKYAVSVNVLDCLAVTKLDVLDELDEIQVCIAYDLDGDEIDYFPTNSDDLKKCKPIFKKLKGWQCSTADCRKLSDLPENAMNYLRFLAELMEVPIAIVSLGANRDQTIVIEDPIHGPKRALLR

SEQ ID NO: 166506 - protein, 160 aa, Unknown
  Bacterial polypetide isolated from the Sargasso Sea
ELTDKIGKMLGTRGKEFGTVTSRERRCGWFDGVLVRQTIKMSGINGIALTKLDVLDELDEIKVCIGYELEGENIDYLPAAVEDQLKVKPIYKNYEGWKSSTKGIRNFDSLPDKAKVYVTELEDFIGAKICSISTSPERDDTILIENPFDNAEKRSGHWNI

SEQ ID NO: 166507 - protein, 179 aa, Unknown
  Bacterial polypetide isolated from the Sargasso Sea
MKNVVVVGSQWGDEGKGKIVDWLSSEADVIIRFQGGHNAGHTLVIDGIVYKLRLLPSGIVRKNKISIIGNGVVVDPWALLEEIDEIKSKGIKINSENLILSEAATLILPFHKEMDEIREDAAGNSKIGTTRRGIGPAYEDKIGRRSIRVMDLASDKNLDKRLEAVLQHHNAIRKGLGKT

SEQ ID NO: 166508 - protein, 154 aa, Unknown
  Bacterial polypetide isolated from the Sargasso Sea
VGESPLPSEITGEKAQTLREKGGEYGTTTGRPRRVGWLDLVQIRQAVRVNGLTDIALTKLDVLNNFDKIKVCVGYEVNGEKVYQMPASLRQYRLAKPIYKSLPGWPDLPEKVWKKGFSALPQTLKNYVSYIESETGCPIKIVSVGPQRHETILR

SEQ ID NO: 166509 - protein, 174 aa, Unknown
  Bacterial polypetide isolated from the Sargasso Sea
MNNVVVVGSQWGDEGKGKIVDWLSSEADVVVRFQGGHNAGHTLVIDGITYKLRLLPSGIVRKNKISIIGNGVVVDPWALLDEIEEAKSKGVEINKNNLILSEAATLILPFHREMDEIREDSAGKSKIGTTRRGIGPAYEDKVGRRSIRVMDLASKQNLENRLSLVLEHHNAIRK

SEQ ID NO: 166510 - protein, 162 aa, Unknown
  Bacterial polypetide isolated from the Sargasso Sea
MKNVVIVGSQWGDEGKGKIVDWLSSEADVVIRFQGGHNAGHTLVVDGVTYKLRLLPSGIVRKNKISIIGNGVVVDPWALLDEINEIKSKGVNVDAKNLILSESADLILPFHKEMDEVREDAAGKDKIGTTRRGIGPAYEDKIGRRSIRVMDLASESNIDQKL

SEQ ID NO: 166511 - protein, 181 aa, Unknown
  Bacterial polypetide isolated from the Sargasso Sea
SNTTLSGVISGTGINMGLINYGLGITKAYSTRVGHGPFPSELNNEQGERIGKIGGEVGATTGRTRRCGWLDLKVLKKAIQINNLSGIALTKIDVLDYFDKISICTSYGSINYETFEVEDLEFITLPGWESSTVGITEFNSLPKNAKAYIETIEKLTNTPIDIISTGPARDEIIQKKNILDD

SEQ ID NO: 166512 - protein, 193 aa, Unknown
  Bacterial polypetide isolated from the Sargasso Sea
YIPLPTSSNTAAGHISTGTGVSFRDIGRIIGVVKAYLSRVGESPLPSEMHGNEAEALREKGGEYGTTTGRPRRVGWLDLVQVRQAVRVNGLTEIALTKLDVLSGFESIKVCVSYDVNGENILEMPASLSQYRLARPVYESLPGWDNLPGKIWEKGFSALPETLKEYIKFVEDQVGCPVKLISVGPQRHETILR

SEQ ID NO: 166513 - protein, 152 aa, Unknown
  Bacterial polypetide isolated from the Sargasso Sea
VGNGPFPTELFDEDGEKLQNIGKEFGATTGRPRRCGWFDAPLASYSIMINGFNEITMTKLDILDEFDEIKVCTEYECNGERSKNLSTFINQFDDIKPIYTKLPGWKCSTLGINSFENLPQKAQEYIEYIEEILSIPIKHISTGPKRNDMIIR

SEQ ID NO: 166514 - protein, 132 aa, Unknown
  Bacterial polypetide isolated from the Sargasso Sea
TVTARKRRCGWFYGILVRQSIKISGINGIALTKLDVLDELNEIKMCVGYDLHGKKLDYLPAASEDQFNIKPIYKSFPGWKTKTQGIRNISDLPENAKKYIYALEDFIGAKVSSISTSPEREDTILIEDPFKS

SEQ ID NO: 166515 - protein, 80 aa, Unknown
  Bacterial polypetide isolated from the Sargasso Sea
MSNNTLILGLQWGDEGKGKIVDALAETAEAVCRFQGGHNAGHTLKVDGVQKVLHLVPSGILHPSVHCVLGNGIVFLFSPR

SEQ ID NO: 166516 - protein, 140 aa, Unknown
  Bacterial polypetide isolated from the Sargasso Sea
GTRGKEFGTVTSRKRRCGWFDGVLVRQTIKVSGIDGIALTKLDVLDELDEIKMCVAYDLDGKRLDYLPASVEDQIKIKPIYETFSGWKVSTAGVKNMDSLPENAKKYIFAVQDFIGAKVSSISTSPERDDTILIENPFEV

SEQ ID NO: 166517 - protein, 165 aa, Unknown
  Bacterial polypetide isolated from the Sargasso Sea
DKMFRNGIRMVDLLEPEVFREKLEKGFSFNKKLIETISGESLNLTIEETYKTYLEYGETLSKYIIDISVELFEEYKSGKRILFEGAQGISLDVDHGVYPFTTSSNTATGHISIGTGVNFHKVDRVIGVVKAYLSRVGESPLPTEFLDATAERIRDVGKEYGTTTG

SEQ ID NO: 166518 - protein, 106 aa, Unknown
  Bacterial polypetide isolated from the Sargasso Sea
MKNVVVVGSQWGDEGKGKIVDWLSSEADVIVRFQGGHNAGHTLVIDSIVYKLRLLPSGIVRKNKISIIGNGVVVDPWALLDEIDEIKSKGVEVNPDNLILSEAATL

SEQ ID NO: 166519 - protein, 124 aa, Unknown
  Bacterial polypetide isolated from the Sargasso Sea
IDLNELVDLNLKQAEQLKPYIGNVINEIRELQKSKKKILYEGAQGALLDVSLGTYPFVTSSNLIGGVPAGAGISPSDIDYTIGITKAYTTRVGEGPFPTELFDEMGTYLAETGGEVGATTGRPR

SEQ ID NO: 166520 - protein, 180 aa, Unknown
  Bacterial polypetide isolated from the Sargasso Sea
HISTGTGVTFRTINRVIGVVKGYLSRVGESPLPTEINGSDAESLRTKGGEYGTTTGRPRRVGWLDLVQVRQAVRVNGLTEIALTKLDILNNYKTLKVCISYDINGEAINEMPASLRKYRKSKPVYKTLPGWSSLPEKIWEKGYDSLPVELKDYISFIENEVNCPVKIVSVGPQRHQTIIR

SEQ ID NO: 166521 - protein, 69 aa, Unknown
  Bacterial polypetide isolated from the Sargasso Sea
MKNVVVVGSQWGDEGKGKIVDWLSSEADVIVRFQGGHNAGHTLVIDGVVYKLRLLPSGIVRKNKISIMK

SEQ ID NO: 166522 - protein, 129 aa, Unknown
  Bacterial polypetide isolated from the Sargasso Sea
MANVVVIGTQWGDEGKGKIVDWLSSRADVVVRFQGGHNAGHTLVIDGVEYKLSLLPSGIVRPGKMSIIGNGVVIDPSHLLEEIDLLRLQGAEITPQTLLVSDSAPLILPVHQAVDAAREALRGEQKIGT

SEQ ID NO: 166523 - protein, 96 aa, Unknown
  Bacterial polypetide isolated from the Sargasso Sea
MKNIVVVGSQWGDEGKGKIVDWLSEQADVVIRFQGGHNAGHTIVIDGVTYKLRLLPSGIVRKNKISIIGNGVVVDPWALLEEIEEIKSKGVDVNIK

SEQ ID NO: 166524 - protein, 76 aa, Unknown
  Bacterial polypetide isolated from the Sargasso Sea
MSDNTSKVTAIVGAQWGDEGKGKITDFFAGEADLVVRFHGGNNAGHTVIADGNTYKLHLIPSGVLYKHPTSVIGNG

SEQ ID NO: 166525 - protein, 58 aa, Unknown
  Bacterial polypetide isolated from the Sargasso Sea
MAQSQSKVIAIVGGQWGDEGKGKITDFFASKADYVIRFQGGNNAGHTVIVDGKTFKLH

SEQ ID NO: 166526 - protein, 169 aa, Unknown
  Bacterial polypetide isolated from the Sargasso Sea
MKNIVVVGSQWGDEGKGKIVDWLSEQADVVIRFQGGHNAGHTLVIDGVTYKLRLLPSGIVRKGKISIIGNGVVVDPWALLEEIEEIKSKGVEVNVNNFIISESANLILPFHREMDEIREDAAGKSKIGTTRRGIGPAYEDKVGRRSIRVMDLRSEKKLDQRLDSVLVHH

SEQ ID NO: 166527 - protein, 79 aa, Unknown
  Bacterial polypetide isolated from the Sargasso Sea
MKNIVVVGSQWGDEGKGKIVDWLSEQADVVIRFQGGHNAGHTLVISGITYKLRLLPSGIVRKIKFHYRKWGSGRPMGIA

SEQ ID NO: 166528 - protein, 126 aa, Unknown
  Bacterial polypetide isolated from the Sargasso Sea
RRCGWFDGVLVRQTIKISGINGIALTKLDVLDNLDEIRMCIAYEIGGKKIDYLPASVDDQFKVKPIYKNFKGWNCSTKGIKNFDDLPENAKIYIKELEKFVEAKVASISTSPERNDTILLVNPFSD

SEQ ID NO: 166529 - protein, 142 aa, Unknown
  Bacterial polypetide isolated from the Sargasso Sea
ILGTRGKEFGTVTSRKRRCGWFDGVLVRQTIKISGINGIALTKLDVLDELDEIKICIGYELNDKKIDYLPAAVEDQLKVKPIYKSYKGWKTSTKGIKSFKNLPKNAQLYIKGLEKFIDTKVASISTSPERKDTILIENPFSI

SEQ ID NO: 166530 - protein, 85 aa, Unknown
  Bacterial polypetide isolated from the Sargasso Sea
MKNIVVVGSQWGDEGKGKIVDWLSEQADVVIRFQGGHNAGHTLVIDGVTYKLRLLPSGIVRKGKISIIGNGVVVDPWALLEEIEE

SEQ ID NO: 166531 - protein, 78 aa, Unknown
  Bacterial polypetide isolated from the Sargasso Sea
MKNVVVVGSQWGDEGKGKIVDWLSSEADVVVRFQGGHNAGHTLVIDGKTYKLRLLPSGIVRENKISIIGNGVVVDPWA

SEQ ID NO: 166532 - protein, 69 aa, Unknown
  Bacterial polypetide isolated from the Sargasso Sea
MKNVVVVGSQWGDEGKGKIVDWLSSEADVVVRFQGGHNAGHTLVIDKKVFKLRLLPSGIVREGKISIFR

SEQ ID NO: 166533 - protein, 178 aa, Unknown
  Bacterial polypetide isolated from the Sargasso Sea
MGKVDVLLGLQWGDEGKGKVVDVLAPHYEIVARFQGGPNAGHTLEFEGKKHVLHQIPSGVFREGVLNIVGNGVVLDPITFQREIEELKPFNLDLKKSLVLSTKTQLIIPTHKLLDQAYERSKGEAKIGSTLRGIGPTYEDKMARVGIRLGEVLSSEFVDRYAKLKARHEAILSSYKLD

SEQ ID NO: 166534 - protein, 146 aa, Unknown
  Bacterial polypetide isolated from the Sargasso Sea
MKNIVVVGSQWGDEGKGKIVDWLSEQADVVIRFQGGHNAGHTLVIDGVTYKLRLLPSGIVRKNKISIIGNGVVVDPWALLDEIDEIESKGIKVNIENFIISESANLILPFHREMDEIREDSAGKEKIGTTRRGIGPAYEDKVGRRS

SEQ ID NO: 166535 - protein, 50 aa, Unknown
  Bacterial polypetide isolated from the Sargasso Sea
MKNVVVVGSQWGDEGKGKIVDWLSSEADVIIRFQGGHNAGHTLVIDNIVT

SEQ ID NO: 166536 - protein, 166 aa, Unknown
  Bacterial polypetide isolated from the Sargasso Sea
RIIGVVKAYLSRVGESPLPSEMHGNEAESLREKGGEYGTTTGRPRRVGWLDLVQVRQAVRVNGLTEIALTKLDVLSGFESIKVCVSYDVSGNNILEMPASLSQYRLAKPVYESLSGWGNLPDKIWEKGFDALPETLKEYIKFVEDQIDCPVKLISVGPQRHETILR

SEQ ID NO: 166537 - protein, 77 aa, Unknown
  Bacterial polypetide isolated from the Sargasso Sea
MKNIVVVGSQWGDEGKGKIVDWLSEQADVVVRFQGGHNAGHTLVIDGVTYKLRLLPSGIVRKNKISIIGNGVVVDPW

SEQ ID NO: 166538 - protein, 162 aa, Unknown
  Bacterial polypetide isolated from the Sargasso Sea
MKNVVVVGSQWGDEGKGKIVDWLSSEADVVVRFQGGHNAGHTLVIDGITYKLRLLPSGIVRKNKISIIGNGVVVDPWALLEEIEEIKSKGVEISEKNLIISEAANLILPFHREMDEIREDTAGKAKIGTTRRGIGPAYEDKVGRRSIRVMDLISEKNLDQRL

SEQ ID NO: 166539 - protein, 167 aa, Unknown
  Bacterial polypetide isolated from the Sargasso Sea
HRIIGVTKAYLSRVGEGPLPSEVHGEEAIQLREKGGEYGTTTGRPRRVGWLDLVQVRQAVRVNGLTEIALTKLDILSNSKELSVCTEYDINGVKESEIPASLHKFRSAKPIYKQLPGWGDITSSMLKDGYDSLPNELRSYVQFIENQVNCKVSIISVGPERHQTIIR

SEQ ID NO: 166540 - protein, 113 aa, Unknown
  Bacterial polypetide isolated from the Sargasso Sea
MKNIVVVGSQWGDEGKGKIVDWLSEQADVVIRFQGGHNAGHTLVIDGITYKLRLLPSGIVRKGKISIIGNGVVLDPWALLEEIEEIKSKGVEVNVNNFIISDSANLILPFHRE

SEQ ID NO: 166541 - protein, 80 aa, Unknown
  Bacterial polypetide isolated from the Sargasso Sea
MKNIVVVGSQWGDEGKGKIVDWLSEQADVVIRFQGGHNAGHTLVIDGVTYKLRLLPSGIVRKNKISIIGNGVVVDPWALL

SEQ ID NO: 166542 - protein, 106 aa, Unknown
  Bacterial polypetide isolated from the Sargasso Sea
MKNVVVVGSQWGDEGKGKIVDWLSSEADVVIRFQGGHNAGHTLVIDGITYKLRLLPSGIVRKDKVSIIGNGVVVDPWALLDEIKEIQSKGIEITQNNLIVSEAANL

SEQ ID NO: 166543 - protein, 100 aa, Unknown
  Bacterial polypetide isolated from the Sargasso Sea
MRNVVVVGSQWGDEGKGKIVDWLSSEADVVIRFQGGHNAGHTLVIDGVTYKLRLLPSGIVRKNKISIIGNGVVVDPWALLEEIKEIKSKGIEISEKNLIL

SEQ ID NO: 166544 - protein, 156 aa, Unknown
  Bacterial polypetide isolated from the Sargasso Sea
EGPFPTELTDNIGNHLGEKGHEFGTVTSRKRRCGWFDGVLVRQTIKISGIDGIALTKLDVLDELDEINFCVAYELNGKKIDYFPAAVEDQLNVKPVYKKLEGWKSKTQGIKKFDDLPNNAKIYVKAIEEFIETKISSISTSPERKDTILLIDPFNY

SEQ ID NO: 166545 - protein, 142 aa, Unknown
  Bacterial polypetide isolated from the Sargasso Sea
KLGSRGKEFGTVTSRKRRCGWFDGVLVRQTIKISGINGIALTKLDVLDDFDEIKMCIGYEINGKKIDYLPGSIEEQMEVRPIYKSFKGWKSSTVGIKTFAELPKEAKNYINNLKDFIETKISSISTSPERNDTILIEDPFKN

SEQ ID NO: 166546 - protein, 117 aa, Unknown
  Bacterial polypetide isolated from the Sargasso Sea
MKNVVVVGSQWGDEGKGKIVDWLSSEADVVVRFQGGHNAGHTLVIDGVTYKLRLLPSGIVRKNKISIIGNGVVVDPWALLDEIKEIKSKGIKVDESNLILSESANLILPFHKEMDEK

SEQ ID NO: 166547 - protein, 48 aa, Unknown
  Bacterial polypetide isolated from the Sargasso Sea
MFYTIIGTQWGDEGKGKIVDWLSSMANTVVRFQGGNNAGHTIKIKNKV

SEQ ID NO: 166548 - protein, 136 aa, Unknown
  Bacterial polypetide isolated from the Sargasso Sea
GTVTGRQRRCGWFDSILVKQAVILSNINGIAFTKLDVLDGFKEIKICVGYLLNGKHINHLPSSAEDQKNLKPIYEVIKGWEGSVAGIKNIDQLPKQAKSYIKRVEELIGCKIIMISTSPERLDTIYLENPFKENKF

SEQ ID NO: 166549 - protein, 60 aa, Unknown
  Bacterial polypetide isolated from the Sargasso Sea
MDPQWGDEGKGKIVDWLSSEADVVIRFQGGHNAGHTLVIEGVTYKLRLLPSGIVRKNKIS

SEQ ID NO: 166550 - protein, 179 aa, Unknown
  Bacterial polypetide isolated from the Sargasso Sea
SGIGPLDIDGVLGITKAYATRVGSGPFPTEIGDDYGKHMAKVGVEFGATTGRPRRCGWLDLVALRKAVNINSISQLCITKIDVLDGLDKILVAEEYEIDEKIYDTLPAMSQNRFERISPIYKEYKGWSGITSGLQSFDQLPTEAKTLIKGIEDSIGVPISLISTGPDRNDMIVIDQIFS

SEQ ID NO: 166551 - protein, 134 aa, Unknown
  Bacterial polypetide isolated from the Sargasso Sea
FGTVTARKRRCGWFDGILVRQTIKISGINGIALTKLDVLDELNEIKMCVGYDLHGKKLDYLPAASEDQFNIKPIYKSFPGWKTKTQGIRNITDLPENAKKYIYALEDFIGAKVSSISTSPEREDTILIEDPFKS

SEQ ID NO: 166552 - protein, 137 aa, Unknown
  Bacterial polypetide isolated from the Sargasso Sea
GNEFGTVTSRKRRCGWFDGVLVRQTIKISGINGIALTKLDVLDKFDEIKMCIAYEVDGKKIDYLPASVEEQIKVKPIYKIFKGWNSSTKGIKNFDQLPNNAKIYIKELEKFIETKVASISTSPERNDTILIVDPFSI

SEQ ID NO: 166553 - protein, 210 aa, Unknown
  Bacterial polypetide isolated from the Sargasso Sea
MKNIVVVGSQWGDEGKGKIVDWLSEQADVVIRFQGGHNAGHTLVIDGVTYKLRLLPSGIVRKGKISIIGNGVVVDPWALLEEIEEIKSKGVEVNVKNFIISESANLILPFHREMDEIREDEAGKSKIGTTRRGIGPAYEDKVGRRSIRVMDLRSEKNLDQRLDSVLAHHNAIRKGLGKKIFEKDKLKSDLLKIASKILEFSQPVWLKLIN

SEQ ID NO: 166554 - protein, 114 aa, Unknown
  Bacterial polypetide isolated from the Sargasso Sea
MANVTVIGAQWGDEGKGKIVDWLSNQADIVLRFQGGNNAGHTIVVNKKKIALSLIPSGIIRKNTVSIIGNGVVVNPVALLDEIDKLKKFGLKISPKNLVLSENATIIFSFHRKY

SEQ ID NO: 166555 - protein, 196 aa, Unknown
  Bacterial polypetide isolated from the Sargasso Sea
MLTTWLYPYTTSSNTIAGQIEAGGGVGLNSSKKIVGIAKAYLTYVGRGPFPTEIKGELEDKIRDVGQEYGTTTGRARRVGWIDLVQLKFANQLNDFSEIILTKVDVLSGLKNIKLCVGYKVGGKDFTGVPSDIHNFKNIEPVYETLPGWGSLPNHIESLNQCPAELKNFVARVEEVAGVKVSLISYGPDRNQTFKI

SEQ ID NO: 166556 - protein, 200 aa, Unknown
  Bacterial polypetide isolated from the Sargasso Sea
MKNVVVVGSQWGDEGKGKIVDWLSSEADIVVRFQGGHNAGHTLVIDGITYKLRLLPSGIVRKNKISIIGNGVVVDPWALLDEIKEIKSKGVIVDENNLILSESANLILPFHKEMDEIREDAAGNSKIGTTRRGIGPAYEDKIGRRSIRVMDLVSESNLDHRLETVLIHHNAIRKGLGKQVYKKDQLKKDLLKIAPEILKF

SEQ ID NO: 166557 - protein, 160 aa, Unknown
  Bacterial polypetide isolated from the Sargasso Sea
TRVGEGPFPTELKDKTGELLGKRGKEFGTVTSRKRRCGWFDGVLVRQTIKISGINGIALTKLDVLDELEEIKMCVKYKINGKEIDYLPAAVDDQLKVEPVYKVFPGWKVSTKGTRKIEDLPDKAKKYINALEEFIGARISSISTSPERQDTILLENPFKD

SEQ ID NO: 166558 - protein, 59 aa, Unknown
  Bacterial polypetide isolated from the Sargasso Sea
MKNIVVVGSQWGDEGKGKIVDWLSSEADVIIRFQGGHNAGHTLVIDGVTYKLRLLPSGV

SEQ ID NO: 166559 - protein, 66 aa, Unknown
  Bacterial polypetide isolated from the Sargasso Sea
MKNIVVVGSQWGDEGKGKIVDWLSEQADVVVRFQGGHNAGHTLVISGVTYKLRLLPSGIVRKIKYQ

SEQ ID NO: 166560 - protein, 219 aa, Unknown
  Bacterial polypetide isolated from the Sargasso Sea
MKNVVVVGSQWGDEGKGKIVDWLSSKADVVIRFQGGHNAGHTLVIDGTTYKLRLLPSGIVRKNKVSIIGNGVVVDPWALLDEIEEVKSKGVEINQNNLILSEAATLILPFHREMDEIREDSAGNSKIGTTRRGIGPAYEDKVGRRSIRVMDLASKKNLENRLTVVLEHHNAIRKGLGKPIYQKDKLVEDLLKLAPNILKYSAPVWRKIDQLKSENKKIL

SEQ ID NO: 166561 - protein, 58 aa, Unknown
  Bacterial polypetide isolated from the Sargasso Sea
MKNIVVVGSQWGDEGKGKIVDWLSEQADVVIRFQGGHNAGHTLVIDGVTYKLRLLHQE

SEQ ID NO: 166562 - protein, 45 aa, Unknown
  Bacterial polypetide isolated from the Sargasso Sea
MPVAVVVGLQWGDEGKGKIIDLFAENVDAVARFQGGHNAGHTIWF

SEQ ID NO: 166563 - protein, 84 aa, Unknown
  Bacterial polypetide isolated from the Sargasso Sea
MKNVVVVGSQWGDEGKGKIVDWLSSEADVVVRFQGGHNAGHTLVIDGITYKLRLLPSGIVRKNKVSIIGNGVVVDPWALIDEIK

SEQ ID NO: 166564 - protein, 97 aa, Unknown
  Bacterial polypetide isolated from the Sargasso Sea
MKAKNLAVLGLQWGDEGKGKIVNFLSDRADAACRYQGGHNAGHTLIVEGKKLVLHLLPSSICHQNASSLIGKGVVISCEALFAEIEEIEPIANGILD

SEQ ID NO: 166565 - protein, 176 aa, Unknown
  Bacterial polypetide isolated from the Sargasso Sea
GPNTLNYVLGITIAYTTRVGEGPFPTELKDLIGEKIGAKGNEFGTVTSRKRRCGWFDAALVRQSIKISGINGVALTKLDVLDELDEIKMCIAYEINGKKTDYLPASLDGQLKAKPIYKIFEGWKSSTKGIKNFEDLPEKAKNYIKEIEKFIQTKISSISTSPERNDTILIENPFDI

SEQ ID NO: 166566 - protein, 120 aa, Unknown
  Bacterial polypetide isolated from the Sargasso Sea
MKNVAVIGSQWGDEGKGKIVDWLSSEADVVVRFQGGHNAGHTLVIDGITYKLRLLPSGIVRKDKVSIIGNGVVIDPWALLEEIKEIKSKGVEITNKNLIISEAANLILPFHREMDEIRED

SEQ ID NO: 166567 - protein, 142 aa, Unknown
  Bacterial polypetide isolated from the Sargasso Sea
SKAYTTRVGEGPFFTELFDGDGELLAKKGNEFGATTGRPRRCGWLDLVALKKAVFTNSVTDLCITKVDVLDETKIIKVCIDYDNDNPVYKEFDGWLCSTEGITEYSELPEKAKAYIQYIENFIDCSASIISTGPSRDQTIFR

SEQ ID NO: 166568 - protein, 128 aa, Unknown
  Bacterial polypetide isolated from the Sargasso Sea
RKRRCGWFDGVLVRQTIKISGIDGIALTKLDVLDELDEIKVCIEYDLEGKKIDYLPVAVEDQLKIKPIYKTFTGWKTSTKGIKNLNDLPENAKKYVFAIEDFIEAKISSISTSPERDDTILIENPFEI

SEQ ID NO: 166569 - protein, 66 aa, Unknown
  Bacterial polypetide isolated from the Sargasso Sea
MVAENTLILGLQWGDEGKGKIVDNLSESTDIVCRFQGGHNAGHTIKVNGDKTVLHLIPSGILHENT

SEQ ID NO: 166570 - protein, 161 aa, Unknown
  Bacterial polypetide isolated from the Sargasso Sea
YSTRVGSGPMPTELHGEAAENLREIAHEYGTTTGRARRVGWFDAVAGRYSRVVNGMTGIVLTRLDILDGFDTVKICNGYRAAGHEIDRFPSNTDLLAQCEPVYEDFPGWDTPTSGATTWEALPENAQNYVRRIQDLVGCPVQIISTGPNRDETILLNPIIG

SEQ ID NO: 166571 - protein, 171 aa, Unknown
  Bacterial polypetide isolated from the Sargasso Sea
NYVLGIVKAYTTRVGEGPFPTELRNEIGDKIGRKGKEFGTVTNRKRRCGWFDAVLVKQTCIISGTKGIALTKIDVLDGLKDLYICVAYKLNGKKIDYFPSSLQDQNKVKPIYKRFNGWLTSTKGIKNWKNLPKNAQKYIKFIKNYCGVRISSISTSPKREDTILLENPFKK

SEQ ID NO: 166572 - protein, 160 aa, Unknown
  Bacterial polypetide isolated from the Sargasso Sea
TRVGSGPFPTEIDDDYGKHMAKIGVEFGATTGRPRRCGWLDLVALRKAVNINSISQLCITKIDVLDGLDKILVAEEYEIDEKIYDTLPAMSQNRFERISPIYKEYKGWSGITSGLKSFDQLPTEAKTLIKGIEESIGVPVSLISTGPDRNDMIVIDQIFS

SEQ ID NO: 166573 - protein, 159 aa, Unknown
  Bacterial polypetide isolated from the Sargasso Sea
MKNIVVVGSQWGDEGKGKIVDWLSEQADVVVRFQGGHNAGHTLVIDGITYKLRLLPSGIVRKDKISIIGNGVVVDPWALLEEIDEIKSKGVQVDIKNFIISESANLILPFHKEMDEIREDAAGKGKIGTTRRGIGPAYEDKVGRRSIRVMDLRSEKNLD

SEQ ID NO: 166574 - protein, 77 aa, Unknown
  Bacterial polypetide isolated from the Sargasso Sea
MKNIVVVGSQWGDEGKGKIVDWLSSEADVVVRFQGGHNAGHTLVIDGITYKLRLLPSGIVRKDKISIIGNGVVIDPW

SEQ ID NO: 166575 - protein, 212 aa, Unknown
  Bacterial polypetide isolated from the Sargasso Sea
MKNIVVVGSQWGDEGKGKIVDWLSEQADVVVRFQGGHNAGHTLVINGVTYKLRLLPSGIVRKNKISIIGNGVVVDPWALLDEIEEIKSKGVKVDADNFIISESANLILPFHREMDEIREDSAGKGKIGTTRRGIGPAYEDKVGRRSIRVMDLRSEKNLDQRLESVLLHHNAIRKGLGKKIYEKDQLKKDLLKIAPKILKFSKPVWLKLDEFK

SEQ ID NO: 166576 - protein, 69 aa, Unknown
  Bacterial polypetide isolated from the Sargasso Sea
PVHGERDRAREAQRGMAKMGTTGRGIGPANEDKVGRRAVRAPDLADETTWPKRMDRLLQHHKTLRKGRG

SEQ ID NO: 166577 - protein, 121 aa, Unknown
  Bacterial polypetide isolated from the Sargasso Sea
MKNVVVVGSQWGDEGKGKIVDWLSSEADVVVRFQGGHNAGHTLVIDGVTYKLRLLPSGIVRKNKISIIGNGVVVDPWALLDEIKEIKEKGVDVNENNLIVSEAADLILPFHEEMDEIREDS

SEQ ID NO: 166578 - protein, 146 aa, Unknown
  Bacterial polypetide isolated from the Sargasso Sea
MNNVVVVGSQWGDEGKGKIVDWLSSEADVVIRFQGGHNAGHTLVIDDVTYKLRLLPSGIVRKNKISIIGNGVVVDPWALLDEIEEIKSKGVEINENNLILSEGATLILPFHREMDEIREDSAGKSKIGTTRRGIGPAYEDKVGRRS

SEQ ID NO: 166579 - protein, 101 aa, Unknown
  Bacterial polypetide isolated from the Sargasso Sea
MKNIVVVGSQWGDEGKGKIVDWLSEQADVVVRFQGGHNAGHTLVIDGTTYKLRLLPSGIVRKNKISIIGNGVVVDPWALLEEIDEIKSKGVQVDIDNFIIS

SEQ ID NO: 166580 - protein, 123 aa, Unknown
  Bacterial polypetide isolated from the Sargasso Sea
MNLNISLLGLQWGDEGKGKVVDYLANDLDAAVRYQGGHNAGHTLIVNGKKIVFHLLPSAICHKNIKCFIARGVVVSLDALFSELAEANEVLGDIEDRLIISSACSLIQPYHIKLDQLREQSAN

SEQ ID NO: 166581 - protein, 155 aa, Unknown
  Bacterial polypetide isolated from the Sargasso Sea
MKNVVVVGSQWGDEGKGKIVDWLSSEADVVIRFQGGHNAGHTLVIDGKIFKLRLLPSGIVRKNKISIIGNGVVVDPWALVDEIEEIKKEGVLINEENLFLSEAATLILPIHRELDALREDNAKNSKIGTTRRGIGPAYEDKVGRRSIRVIDLLSE

SEQ ID NO: 166582 - protein, 81 aa, Unknown
  Bacterial polypetide isolated from the Sargasso Sea
MKNIAVVGSQWGDEGKGKIVDWLSEQADVVIRFQGGHNAGHTLVIDGVTYKLRLLPSGIVRKNKVSNYWKWCCSRPLGIIG

SEQ ID NO: 166583 - protein, 162 aa, Unknown
  Bacterial polypetide isolated from the Sargasso Sea
MKNIVVVGSQWGDEGKGKIVDWLSEQADIVIRFQGGHNAGHTLVIDGVTYKLRLLPSGIVRKGKISIIGNGVVVDPWALLEEIEEIKSKGVEVNVNNFIISESANLILPFHKEMDEIREDAAGKSKIGTTRRGIGPAYEDKVGRRSIRVMDLRSEKNLDQRL

SEQ ID NO: 166584 - protein, 55 aa, Unknown
  Bacterial polypetide isolated from the Sargasso Sea
MSNLISLLGLQWGDEGKGKVVDHLAKDLKAAVRYQGGHNAGHTLIIGGDKVVFHL

SEQ ID NO: 166585 - protein, 75 aa, Unknown
  Bacterial polypetide isolated from the Sargasso Sea
MKNIVVVGSQWGDEGKGKIVDWLSEQADIVVRFQGGHNAGHTLVIDGVTYKLRLLPSGIVRKNKISIIGNGVVVD

SEQ ID NO: 166586 - protein, 67 aa, Unknown
  Bacterial polypetide isolated from the Sargasso Sea
MKNVVVVGSQWGDEGKGKIVDWLSSEADVIVRFQGGHNAGHTLVIDSIVYKLRLLPSGIVRKNKISI

SEQ ID NO: 166587 - protein, 101 aa, Unknown
  Bacterial polypetide isolated from the Sargasso Sea
MKNIVVVGSQWGDEGKGKIVDWLSEQADVVIRFQGGHNAGHTLVIDGVTYKLRLLPSGVVRKGKISIIGNGVVVDPWALLEEIEEIKSKGVEVDVNNFIIS

SEQ ID NO: 166588 - protein, 69 aa, Unknown
  Bacterial polypetide isolated from the Sargasso Sea
MKNVVVVGSQWGDEGKGKIVDWLSSEADVVIRFQGGHNAGHTLVIDGVTYKLRLLPSGIVRKNKISIIG

SEQ ID NO: 166589 - protein, 52 aa, Unknown
  Bacterial polypetide isolated from the Sargasso Sea
MKNVVVVGSQWGDEGKGKIVDWLSSEADIVVRFQGGHNAGHTLVVDGITYKL

SEQ ID NO: 166590 - protein, 202 aa, Unknown
  Bacterial polypetide isolated from the Sargasso Sea
MSVDVLLGLQWGDEGKGKIVDFLAPKYDLIARFQGGPNAGHTLEFDGIKHVLHQIPSGIFREDKHNIIGNGVVLDPVIFMNEVSQIHKKFNINLEEILSISTRAQLISPVHRLLDKVLEENKGEKKIGSTLKGIGPTYQDKIGRHGLRVGEVLSNNFKEKYNKQKAYHDYFLEGHYNENFLKEEEKFFESINELKKFKILDT

SEQ ID NO: 166591 - protein, 136 aa, Unknown
  Bacterial polypetide isolated from the Sargasso Sea
RKKGSEYGTTTGRPRRVGWVDLVQVRQAVRVNGLTEIALTKLDVLSGFESIKACTSYSIGETKIHEIPASLTDFRKAKPIYSEMTGWESIPDHIWDKGYNFFPETLKQYIRFIEEEVNCPIKIISVGPQRHETVIR

SEQ ID NO: 166592 - protein, 221 aa, Unknown
  Bacterial polypetide isolated from the Sargasso Sea
MKNVVVVGSQWGDEGKGKIVDWLSSQADIIVRFQGGHNAGHTLVIDNVTYKLRLLPSGIVRKNKISIIGNGVVVDPWALLDEIEEIKSKGVDVSTKNLIISEAANLILPFHKEMDELRENAAGKNQIGTTRRGIGPAYEDKVGRRSIRVMDLISERSLDSRLDNVLLHHNVIRKGLGKEFYKKDKLKKDLLKIAPEILKYSQPVWKVIDKFKSEKKKILLK

SEQ ID NO: 166593 - protein, 164 aa, Unknown
  Bacterial polypetide isolated from the Sargasso Sea
DEVIGITKAYTTRVGEGPFPTELHSPLGEKIQQIGGEFGATTGRKRRCGWLDLPLLKYSIKSSCITSIALTKLDVLSEIEELKVCRAYKYKGQEIDIAYPGIDLSQVEPIFESFSPFNDQFDGAPLSNELKRYIALIEDSCQVDVGIIAFGPERNQIQFRKEFF

SEQ ID NO: 166594 - protein, 129 aa, Unknown
  Bacterial polypetide isolated from the Sargasso Sea
MKNVVVVGSQWGDEGKGKIVDWLSSEADVVVRFQGGHNAGHTLVIDGKTYKLRLLPSGIVRKNKISIIGNGVVVDPWALIDEIEEIKKEGIDINEKNLFLSEAATLILPIHREKDSIREDSDKNLKIGT

SEQ ID NO: 166595 - protein, 195 aa, Unknown
  Bacterial polypetide isolated from the Sargasso Sea
MKNVAVVGSQWGDEGKGKIVDWLSSEADVVVRFQGGHNAGHTLVIDGVTYKLRLLPSGIVRKNKISIIGNGVVVDPWALLDEIKEIKSKGVEISEENLILSESANLILPFHKEMDEIREDAAGKAKIGTTRRGIGPAYEDKVGRRSIRVMDLISEKNLDHRLETVLMHHNAIRKGLGKEMFEKDKLKKELLEIAP

SEQ ID NO: 166596 - protein, 148 aa, Unknown
  Bacterial polypetide isolated from the Sargasso Sea
KDEIGELLGTRGKEFGTVTSRKRRCGWFDGVLVRQTIKISGIDGIALTKLDVLDELDEIKMCIHYELDGKKIDYLPAAVEDQLKIKPIFKTFPGWKATTSGIKNMVDLPENAKKYIFAIEDFIGAKISSISTSPEREDTILVENPFDV

SEQ ID NO: 166597 - protein, 217 aa, Unknown
  Bacterial polypetide isolated from the Sargasso Sea
MKNVVVVGSQWGDEGKGKIVDWLSSEADIVVRFQGGHNAGHTLVIDGITYKLRLLPSGIVRKDKISIIGNGVVVDPWALLDEIEEIKLKGVQVSPENLIISESANLILPFHKEMDEIREDAAGKAKIGTTRRGIGPAYEDKVGRRSIRVMDLISEENLDHRLETVLMHHNAIRKGLGKEIYQKNKLKKDLLKIAPEILKYSKPVWKKIDEFKTKRKK

SEQ ID NO: 166598 - protein, 198 aa, Unknown
  Bacterial polypetide isolated from the Sargasso Sea
MKNVVVVGSQWGDEGKGKIVDWLSSEADIIVRFQGGHNAGHTLVIDSVVYKLRLLPSGIVRKNKISIIGNGVVVDPLALLEEINEIKSKGVEVNPDNLILSESATLILPFHKEMDDIREDAAGKSKIGTTRRGIGPAYEDKIGRRSIRVMDLASENNLDKRLDVVLSHHNAIRKGLGKTKFKKEQLKKNLLNIAPHNT

SEQ ID NO: 166599 - protein, 140 aa, Unknown
  Bacterial polypetide isolated from the Sargasso Sea
MKNIVVVGSQWGDEGKGKIVDWLSEQADVVIRFQGGHNAGHTLVIDGVTYKLRLLPSGIVRKGKISIIGNGVVVDPWALLEEIEEIKSKGVEVNVNNFIISESANLILPFHREMDEIREDSAGKSKIGTTRRGIGPAYED

SEQ ID NO: 166600 - protein, 199 aa, Unknown
  Bacterial polypetide isolated from the Sargasso Sea
MRNVVVVGSQWGDEGKGKIVDWLSSEADVVIRFQGGHNAGHTLVIDGVTYKLRLLPSGIVRKNKISIIGNGVVVDPWALLEEIKEIKSKGIEISEKNLILSEAANLILPFHREMDEIREDTAGKAKIGTTRRGIGPAYEDKVGRRSIRVMDLISEENLNHRLETVLMHHNAIRKGLGKEIFQKDQLKKELLEIAPKILK

SEQ ID NO: 166601 - protein, 160 aa, Unknown
  Bacterial polypetide isolated from the Sargasso Sea
MNNVVVIGSQWGDEGKGKIVDWLSSKADVVIRFQGGHNAGHTLVVDGVTYKLRLLPSGIVRKNTISIIGNGVVVDPWALLDEIKEISSKGIEITPKNLIISDSANLILPFHKELDEIREDAAGKAKIGTTRRGIGPAYEDKVGRRSIRIMDLASEKDLDK

SEQ ID NO: 166602 - protein, 174 aa, Unknown
  Bacterial polypetide isolated from the Sargasso Sea
VGIDPRMIDYSLGIAKAYTTRVGEGPFPTELDDSVGEHIAKVGGEVGATTGRPRRCGWLDAVLLSHTVKLNGIDGLCLTKIDVLDGLDEIKICTDYEGNSLNDLLETMSIEEVKPSYISMPGWEKPCAGIRDYEQLDGKAKSYIEKIESLCGAPIVMISTGPRREDTIVRQYPL

SEQ ID NO: 166603 - protein, 143 aa, Unknown
  Bacterial polypetide isolated from the Sargasso Sea
ALLGNRGKEFGTVTNRKRRCGWFDGVLVRQTIKISGIDGIALTKLDVLDELEEIKICIAYDLEGKKIDYLPTSVDEQLKVKPIYKIYKGWKSSTEGIKNFDQLPENAKIYIKDLEKFIETKISSISTSPERNDTILLEDPFKI

SEQ ID NO: 166604 - protein, 121 aa, Unknown
  Bacterial polypetide isolated from the Sargasso Sea
MSVDLILGLQWGDEGKGKIVDFLTNSYEIIARFQGGPNAGHTLEFDGIKHVLHTIPSGIFHSNVQNLIGNGVVIDPVIFKKEIENLNQFKIDLYSKLLISNKAHIILPTHRILDAVSERSK

SEQ ID NO: 166605 - protein, 161 aa, Unknown
  Bacterial polypetide isolated from the Sargasso Sea
ITKAYTTRVGEGPFPTELFDEMGTYLANTGGEVGATTGRPRRCGWLDGFLLKNMVKVSGVDGLCLTKIDVLDGLEKIKICNAYSGDLTEAEMIETMDLELAQPEYLEMPGWSKLTAGQTSYEELDDNAKAFVEKIEEISGVPVIMISTGPKREDTIIRKYI

SEQ ID NO: 166606 - protein, 61 aa, Unknown
  Bacterial polypetide isolated from the Sargasso Sea
MIGKYVSNIVVVGSQWGDEGKGKIVDYLSENADVIVRFQGGHNAGHTLVINEKTYKLSILP

SEQ ID NO: 166607 - protein, 99 aa, Unknown
  Bacterial polypetide isolated from the Sargasso Sea
MSENTLILGLQWGDEGKGKIVDNLSKSVDAVCRFQGGHNAGHTIKVNDEQTVLHLIPSGILHDNAKCLIGNGVVLALDALHDEIAKLRDKGINFHNRFY

SEQ ID NO: 166608 - protein, 181 aa, Unknown
  Bacterial polypetide isolated from the Sargasso Sea
MKNVVVVGSQWGDEGKGKIVDWLSSEADVVIRFQGGHNAGHTLVIDGVTYKLRLLPSGIVRKNKISIIGNGVVVDPWALLDEIEEAKSKGVEINENNLILSEAATLILPFHREMDEIREDSAGKSKIGTTRRGIGPAYEDKVGRRSIRVMDLASKQNLENRLSLVLEHHNAIRKGLGKPNI

SEQ ID NO: 166609 - protein, 160 aa, Unknown
  Bacterial polypetide isolated from the Sargasso Sea
TRVGEGPFPTELTDETGEELGTKGNEFGTVTSRKRRCGWFDGVLVRQTIKISGINGIALTKLDVLDDLDHIKMCVGYELGGTKIDYLPAAVDDQLKVKPIYKIFEGWKSSTKGIKNFKDLPENAKKYINELEKFIETKVSSISTSPERNDTILIEDPFKN

SEQ ID NO: 166610 - protein, 47 aa, Unknown
  Bacterial polypetide isolated from the Sargasso Sea
MPADVVIGGQWGDEGKGKVIDLLASKYSVVARFSGGNNAGHTVINDQ

SEQ ID NO: 166611 - protein, 114 aa, Unknown
  Bacterial polypetide isolated from the Sargasso Sea
MKNVVVVGSQWGDEGKGKIVDWLSSEADVVIRFQGGHNAGHTLVIDGITYKLRLLPSGIVRKNKISIIGNGVVVDPWALLDEIDEIKSKGVEINQRNLIISEAANLILPFHKEK

SEQ ID NO: 166612 - protein, 176 aa, Unknown
  Bacterial polypetide isolated from the Sargasso Sea
GTYPYVTSSSTTIGGVSSGLGIGPKHIKNVIGIVKAYATRVGEGPFMTELFDKDGEEIAKRGNEFGATTGRPRRCGWLDVVALKKAIFINSVDSLCMTKADVLDTFENINVCIAYDDKDLPIYKKFEGWQEDTSQCSSYDELPKQLKDYIKFIEQSVNCKVSIISVGPSREQSIHL

SEQ ID NO: 166613 - protein, 48 aa, Unknown
  Bacterial polypetide isolated from the Sargasso Sea
MPNVTVVGAQWGDEGKGKIVDWLSNEADIVVRFQGGNNAGHTIVVDKK

SEQ ID NO: 166614 - protein, 98 aa, Unknown
  Bacterial polypetide isolated from the Sargasso Sea
MGNVTVIGAQWGDEGKGKIVDWLSNQADIVFRFQGGNNAGHTIVIKKKKIALSLIPSGIIRKGTVSIIGNGVVVNPLALLDEIKSLRRHGVNINFKKF

SEQ ID NO: 166615 - protein, 181 aa, Unknown
  Bacterial polypetide isolated from the Sargasso Sea
MKNIVVVGSQWGDEGKGKIVDWLSEQADVVIRFQGGHNAGHTLVIEGVTYKLRLLPSGIVRKGKISIIGNGVVVDPWALLQEIEEIKSKGVEVNVNNFIISESANLILPFHREMDEIREDSAGKSKIGTTRRGIGPAYEDKVGRRSIRVMDLRSEKNLDQRLDSVLVHHNAIRKGLRKKNF

SEQ ID NO: 166616 - protein, 126 aa, Unknown
  Bacterial polypetide isolated from the Sargasso Sea
MFYTVIGTQWGDEGKGKIVDWLSSKAEAVVRFQGGNNAGHTLKIKNKVFKLNLLPSGIIRGKKCIIGNGVVLDPWALQEEILKLKKQGIKINSKNLQIAENICLILPLHKILDTINESNRGKESLG

SEQ ID NO: 166617 - protein, 125 aa, Unknown
  Bacterial polypetide isolated from the Sargasso Sea
MKNVVVVGSQWGDEGKGKIVDWLSSEADVVVRFQGGHNAGHTLVIDGVTYKLRLLPSGIVRKNKISIIGNGVVVDPWALLDEIKEIREKGIEVDENNFIISESANLILPFHKEMDEIREDSAGKA

SEQ ID NO: 166618 - protein, 64 aa, Unknown
  Bacterial polypetide isolated from the Sargasso Sea
MKNVVVVGSQWGDEGKGKIVDWLSSKADVVVRFQGGHNAGHTLVIDGVTYKLRLLPSGIVRKNK

SEQ ID NO: 166619 - protein, 161 aa, Unknown
  Bacterial polypetide isolated from the Sargasso Sea
MVCGITKAYSTRVGHGPFPSELNNEQGEKIGKIGGEVGATTGRARRCGWLDLKVLKKAIQINNLSGIALTKIDVLDHFDKISICTNYGSINYETFEVEDLEFITLPGWESSTVGVKEFNSLPKNAKTYIETIEKLTDTPIDIISTGPAREEIIQKKNILND

SEQ ID NO: 166620 - protein, 147 aa, Unknown
  Bacterial polypetide isolated from the Sargasso Sea
MKNVVVVGSQWGDEGKGKIVDWLSSEADVIVRFQGGHNAGHTLVIDSIVYKLRLLPSGIVRKNKISIIGNGVVVDPWALLDEIDEIKSKGVEVNPDNLILSEAATLILPFHKEMDEIREDAAGKSKIGTTRRGIGPAYEDKIGRRSI

SEQ ID NO: 166621 - protein, 135 aa, Unknown
  Bacterial polypetide isolated from the Sargasso Sea
MKNVVVVGSQWGDEGKGKIVDWLSSEADVVVRFQGGHNAGHTLVIDGITYKLRLLPSGIVRKDKISIIGNGVVVDPWAFLDEIKEIRSKGVTVDEKNLILSESANLILPFHKEMDEIREDAAGKAKIGTTRRGIG

SEQ ID NO: 166622 - protein, 175 aa, Unknown
  Bacterial polypetide isolated from the Sargasso Sea
IGSGVGPKNIDRIVGVTKAYISRVGSGPFITEQKNQIGDYLIEKGAEFGVVTGRRRRCGWLDLISLKYSVRVNSLTELFITKLDVLSGLEKINLCVGYKYENEVFTDYPYKESVHYKAEPVYQAFDGWTEDISSVKSFEDLPKNAQNYIKTIEDFTKVPITFISVGPERTENIII

SEQ ID NO: 166623 - protein, 134 aa, Unknown
  Bacterial polypetide isolated from the Sargasso Sea
FGTVTSRKRRCGWFDGVLVRQTIKISGIHGIALTKLDVLDELDEINLCVAYELNGKKIDYFPASVEDQLNVKPVYKKFEGWKSKTQGIKRFDDLPEKAKIYIKAIEEFIETKISSISTSPERKDTILIEDPFNP

SEQ ID NO: 166624 - protein, 44 aa, Unknown
  Bacterial polypetide isolated from the Sargasso Sea
MFYTIVGTQWGDEGKGKIVDWLSSKADLVARFQGGNNAGHTIKV

SEQ ID NO: 166625 - protein, 80 aa, Unknown
  Bacterial polypetide isolated from the Sargasso Sea
MSNLISLLGLQWGDEGKGKVVDHLAKDLKAAVRYQGGHNAGHTLIIDGDKVVFHLLPSAICHQEIKCYLGRGVVVSLDAL

SEQ ID NO: 166626 - protein, 136 aa, Unknown
  Bacterial polypetide isolated from the Sargasso Sea
KEFGTVTSRKRRCGWFDGVLVRQTIKVSGIDGIALTKLDVLDELDEIKMCVAYELDGKRLDYLPAAVEDQIKIKPIYETFPGWKVSTSGIKNIDSLPENAKKYIFAVEDFIGAKVSSISTSPERDDTILIENPFEV

SEQ ID NO: 166627 - protein, 47 aa, Unknown
  Bacterial polypetide isolated from the Sargasso Sea
MYWFGKLVQLLGVTGISLTKLDVLDGFKKLKICIGYELDGENLDYLP

SEQ ID NO: 166628 - protein, 152 aa, Unknown
  Bacterial polypetide isolated from the Sargasso Sea
EGPLPSEVHGEEAIQLREKGGEYGTTTGRPRRVGWLDLVQVRQAVRVNGLTEIALTKLDILSNTKELSVCTEYDINGAKESEIPASLHKLRSAKPIYKQLPGWGDITSSMLKDGYDSLPNELKSYVQFIENQVNCKVSIISVGPERHQTIIR

SEQ ID NO: 166629 - protein, 120 aa, Unknown
  Bacterial polypetide isolated from the Sargasso Sea
EAKHLLEKGHEFGTTTGRERRCGWFDIQSAKHSIMTNGFNKIAIMKLDVLDGMKEIKVLNGVGYDTFPGWNESTFGIKNSSALPENANKYLNYLKKELKVDIDIISTGPERDQTISTIRW

SEQ ID NO: 166630 - protein, 185 aa, Unknown
  Bacterial polypetide isolated from the Sargasso Sea
SSNTIAGQIEAGGGVGLNTSKKIVGIAKAYLTYVGRGPFPTEIKGELEDKIRDVGQEYGTTTGRARRVGWIDLVQLKFANQLNDFSEIILTKVDVLSGLKNIKLCVGYKVNGKDFAGVPSDIHNFKNIEPVYETLPGWGSLPNHIESLNQCPDELKNFVTRVEKVAGVRVSLISYGPDRNQTFKI

SEQ ID NO: 166631 - protein, 115 aa, Unknown
  Bacterial polypetide isolated from the Sargasso Sea
GTLLIHAHRAIESVTLDKETMHKKDNVMSRYAELIYNGYWYSKERFKFQKIVDLKKNKVNGSVKLKLYKGNITIQSRVTNSTAYSMKKVSFEENKSFNRSNVEKFINFHKKKLRN

SEQ ID NO: 166632 - protein, 78 aa, Unknown
  Bacterial polypetide isolated from the Sargasso Sea
GYWYSKERLKLQKIIDLKKKKVNGSVKLKLYKGNVIIQSRKTKSSAYSMKKVSFEENNTFNKSNVERFINYHKTKLRS

SEQ ID NO: 166633 - protein, 186 aa, Unknown
  Bacterial polypetide isolated from the Sargasso Sea
NLPEKPSYLKIKFVKGVPTEVDGKKLPPVKLIEYINKKAGNNGVGIVDHIEDRVVGIKSREVYETPAAICLIEAHSDLEKMVHTKHETKFKTLVDDEWAWMVYSGLWDDPLRKELDQFIEQAQKRVTGTVKLKLHKGNVRVVGRESKYSLYSHDIATYGKDSTFDQKLAKGFVELWGMQSTEANKF

SEQ ID NO: 166634 - protein, 287 aa, Unknown
  Bacterial polypetide isolated from the Sargasso Sea
HGFLRFDHVRIPRRAMLMGHSRVEPDGMYVPAPVSKVSYGTMVFIRSDIVMNAALYMKKAVTIAIRYNLVRRQSNPDTATGKECQVIDYQHSQRTLFPILAKAFAFHVTSDYMRRMYFEFQKNSRKKNDFSALPELHATSSGLKAYCSWATKDAIEACRLTCGGHGYMNLAGFGTTLASYAPNVTYEGDNNVLCLQTARYLLKVYRKMLTGETPPQVLGYLTGASSRSSLALGASLRDEKAILDAYAHRAWRLVTEACKVSGELTPDDAMRVHMVQWITAAKAHCAF

SEQ ID NO: 166635 - protein, 68 aa, Unknown
  Bacterial polypetide isolated from the Sargasso Sea
QNLIDSTQHKVSGEVKLKIFKGNVIVCGRRSLNSLYDNSLVSFDENGNYNQKDAEGFIKIQSLRLKNK

SEQ ID NO: 166636 - protein, 158 aa, Unknown
  Bacterial polypetide isolated from the Sargasso Sea
KLRPSKLLEKLNQLAGKNGIGRVDLVENRFLGIKSRGVYETPGGTLLIHAHRAMETVTLDRETMHKKENVMSRYAELIYNGYWYSKERFKLQKIMDLKKNKVNGSVKLKLYKGNITIQSRVTNSTAYSMKKVSFEENKSFNKSNVERFINFHKKKLRN

SEQ ID NO: 166637 - protein, 154 aa, Unknown
  Bacterial polypetide isolated from the Sargasso Sea
KAYAVSHGATGKGNDQVRLELGYHFFGPKIKIIAPWRIWNLKSRTDLIKYAKKNKISIPKDKKGASPFSVDDNLFHTSTEGKVLENPKNSAPEFIFERTVSPEKSPNNATFVSINFKNGDPIGINGKKLSPAKLLEKLNKIAGKNGIGRVDLVE

SEQ ID NO: 166638 - protein, 114 aa, Unknown
  Bacterial polypetide isolated from the Sargasso Sea
TLLINAHRAIESVTLDKETMHKKDQVMSRYAELIYNGYWYSKERFKLQKIVDLKRNKVNGSVKLKLYKGNITIQSRVTNSSAYSMKKVSFEENKSFNKSNVERFINFHKKKLRT

SEQ ID NO: 166639 - protein, 325 aa, Unknown
  Bacterial polypetide isolated from the Sargasso Sea
LFHNLTISANTASYQYADGAFRSSGGLDTLLNCIFWNNNSDYQIHNESGNVIIDYCDIQDGENGISNSSVVTYGNSNIETDPLFVNPSAGNYHLQSASPCIDAGDPSLPLDSDGTISDIGTYSINQNNSDLTVYFVSPNGSDILGTGTEESPYASINQGMGAAGDGDTVMVLPGTYYEHINYGGKAVLLKSTDGSEMTIIDGSQSDIVVRFESGETNGSILDGFTIQNGYTNYGAAGAGINIGSGSSPVVRYCLVIDNNANTAGGAINSYGSGLFHNLTISANTASYQYADGAFRSSGGLDTLLNCIFWNNNSDYQIHNESGNVI

SEQ ID NO: 166640 - protein, 173 aa, Unknown
  Bacterial polypetide isolated from the Sargasso Sea
MKNKNKIILAYSGGLDTSVILKWLVNLDYEVVCFIGDIGQSDDFVNAKIKAEELGASKVIIEDLKNSFIIDYVYPALQGNAIYEGRYLLGTALARPVLAKAQIEIAHNENASIVSHGSTAKGNDQVRFELAYHALDPNIKVFSPWRDEEFFHQFKGRNDLLNYADKWKIPITA

SEQ ID NO: 166641 - protein, 73 aa, Unknown
  Bacterial polypetide isolated from the Sargasso Sea
MGKEKVVLAYSGGLDTSVIVHWLASQGYDVIALCLDLGQKVENLDEIRQKGLKAGAVDVLIEDVRKEFVEDYV

SEQ ID NO: 166642 - protein, 139 aa, Unknown
  Bacterial polypetide isolated from the Sargasso Sea
GIGRVDLVENRFIGIKSRGIYETPGGTLLINAHRAIESVTLDKETMHKKDEIMPKYAELIYNGYWYSKERLKLQKIVDLKRNKVNGSVTLKLYKGNITIVSRQTESNAYSIKKVSFEENKTFNKLNVEKFINFHKKKLR

SEQ ID NO: 166643 - protein, 123 aa, Unknown
  Bacterial polypetide isolated from the Sargasso Sea
REGYTKHLGGTLLINAHRAIESVTLDKLTMHKKDRIMSRYAELIYNGYWYSKERFKLQKIVDLKRNKVNGAVKLKLYKGNITIQSRVTNSSAYSMKKVSFEENKSFNKSNVEKFINFHKKKLR

SEQ ID NO: 166644 - protein, 224 aa, Unknown
  Bacterial polypetide isolated from the Sargasso Sea
KKGASPFSVDDNLFHTSTEGKLLENPKNAAPEFIFQRTNSPEKSPNKPTFITIGFKKGDPVTINGKKLTPSKLLEKLNVLAGKNGIGRVDLVENRFIGIKSRGVYETPGGTLLINAHRAMESVTLDKKTMHKKDEIMPKYAELIYNGYWYSKARFKLQKIVDLKRNKVNGSVKLKLYKGNITIVSRQTKSNAYSMKKVSFEENKTFNKSNVERFIDYHKKKLNK

SEQ ID NO: 166645 - protein, 46 aa, Unknown
  Bacterial polypetide isolated from the Sargasso Sea
TMITGRESSMSLYNPNLATFESDNIYSQKDAEGFIKLNALRLREKK

SEQ ID NO: 166646 - protein, 79 aa, Unknown
  Bacterial polypetide isolated from the Sargasso Sea
MKKSPNKQTIVSVGFKNGDPISVNGKKLSPGKLLEKLNNLAGKNGIGRVDLVENRFIGIKSRGVYETPGGTILMIAHRT

SEQ ID NO: 166647 - protein, 95 aa, Unknown
  Bacterial polypetide isolated from the Sargasso Sea
MHLKDGAMPKYAELIYNGFWFSKARFKLQKTIDLKKNKVNGSVKLKLYKGNITILSRHSRSKAYSVKKVSFEENKSFKKSKVERFILGAARKLRA

SEQ ID NO: 166648 - protein, 61 aa, Unknown
  Bacterial polypetide isolated from the Sargasso Sea
MISVNKVVLAYSGGLDTSVIVRWLQETYDCEVVTFTAGIGQGEEVGLARAKAEALGIKEIY

SEQ ID NO: 166649 - protein, 85 aa, Unknown
  Bacterial polypetide isolated from the Sargasso Sea
YAPEREALQAFIDQSQSTVTGTVRLKLYKGNVITVGRKSDLSLYDEGIASMDDDESDYQPEDAGGFIRLNALRLKERYRKQDYKG

SEQ ID NO: 166650 - protein, 93 aa, Unknown
  Bacterial polypetide isolated from the Sargasso Sea
HKKDEIMPRYAELIYNGYWFSKERFKLQKIIDNKRNKVNGSVKLKLYKGNITIYSRLTKSKAYSMKKVSFEENKTFNKSNVERFINFHKKKLK

SEQ ID NO: 166651 - protein, 252 aa, Unknown
  Bacterial polypetide isolated from the Sargasso Sea
TDANIWGATHEAKALEELNQSMEIVAPIMGVPHWNQDESIAEEEVSLSFEDGWPVAINGASYDDPVALVLEANLIAGRHGLGMSDQIENRIIEAKSRGIYESPALALLFIAYERLVSAIHNEDTIENYRTMGRRLGRLLYEGRWFDPQSLMLRESLLRWVGSAVSGDVTLRLRRGDDYSILNTEGPNLTYEPDRLSMERVEDQAFGPLDRIGQLTMRNLDIDDSRSKLHIYGDAGTLEANQALGLESKVKDA

SEQ ID NO: 166652 - protein, 35 aa, Unknown
  Bacterial polypetide isolated from the Sargasso Sea
MDKINKVVLAYSGGLDTSVILRWLKETYQCEVATF

SEQ ID NO: 166653 - protein, 273 aa, Unknown
  Bacterial polypetide isolated from the Sargasso Sea
VERPPGRIGLLSPGPDAWYAGMLPGLISGRFSPADCRVELQPLCRAAKVELIEGEIAALDADTRILQLADGRQLQGEWLSLNVGAGMAIPPQQGDAMQVLAARPIERLLEGWQQWQSEPRRMAILGGGAGGVELALALADQVPALALFCGGSLLDGLAPGLRLRALGHLRQRGVQVREHCPIGRIEDDWLLSGDEPVWRGRRLLLASGARPWPWLAASQLSSDAAGFIAIRPTLQCESHAQIFAVGDSASLDGMRRSGRFAVRQAPVLTANLQ

SEQ ID NO: 166654 - protein, 56 aa, Unknown
  Bacterial polypetide isolated from the Sargasso Sea
MVKKIVLAYSGGLDTSVILKWLQLKYNCPVATFTADLGQGDELEPVREKAESLGVK

SEQ ID NO: 166655 - protein, 295 aa, Unknown
  Bacterial polypetide isolated from the Sargasso Sea
MTQYDLILAGAGHAHLGVLRRWALVERPPGRIGLLSPGPEAWYAGMLPGLISGRFSPADCRVELQPLCRAAKVELIEGEIASLDADARILQLADGRSLQSEWLSLNVGAGMAIPPQQGEGMQVLAARPIERMLEGWQQWQAEPRRMAILGGGAGGVELALALAGKVPALALFCGGTLLDGLGPGLRLRALGHLRQRGVQVREHCPIGRIEDDWLLSGDEPVWRGRRLLLASGARPWPWLTASQLATDAAGFIAIRPTLQCESHAQIFAVGDSASLDGMRRSGRFAVRQAPVLSAN

SEQ ID NO: 166656 - protein, 91 aa, Unknown
  Bacterial polypetide isolated from the Sargasso Sea
DLIMPRYAKLIYNGYWYSKERFKLQKIVDLKRGKVNGSVKLKLYKGNVIIESRQTNSSAYSLKKVSFEENKTFNKSNIERFINYHKKKLRY

SEQ ID NO: 166657 - protein, 194 aa, Unknown
  Bacterial polypetide isolated from the Sargasso Sea
QNIFFKERFPPEKAPSKPTYVTVGFKKGDPISVNNKKLAPAKLLQKLNLLAGKNGVGRVDLVENRFIGIKSRGVYETPGGTLLMIAHRAMESVTLDKKTMHDKDEIMPKYAELIYNGFWYSKARFKMQKIVDKNKIKVNGQVKLKLYKGNITIMSRTSSSKAYSMKKVSFEDNTFFRKGAIEKFLKIHTSSLRK

SEQ ID NO: 166658 - protein, 121 aa, Unknown
  Bacterial polypetide isolated from the Sargasso Sea
IYETPGGTILISAHRAMESVTLDKETMHKKDAIMSRYAELIYNGYWYSKERFKLQKIVDLKKHSVNGSIKLKLYKGNITIQSRITKSKAYSMKKVSFEENKAFNKSKVEKFINFQKKKIKN

SEQ ID NO: 166659 - protein, 160 aa, Unknown
  Bacterial polypetide isolated from the Sargasso Sea
MGKKLSPYKLLEKLNQLAGKNGIGRVDLVENRFIGIKSRGIYETPGGTILISAHRAMESVTLDKETMHKKDAIMSRYAELIYNGYWYSKERFKLQKIVDLKKHSVNGSIKLKLYKGNITIQSRITKSKAYSMKKVSFEENKTFNKSNVERFINFHKKKLR

SEQ ID NO: 166660 - protein, 66 aa, Unknown
  Bacterial polypetide isolated from the Sargasso Sea
MPTKIVLAYSGGLDTSVILKWLQNKYECPVVTFTADLGQGEELSLVETKAKSLGVEEIFIENLQEE

SEQ ID NO: 166661 - protein, 109 aa, Unknown
  Bacterial polypetide isolated from the Sargasso Sea
NAHRAIESVTLDKETMHKKDEIVAKYAKLIYNGYWYSKARFKLQKIVDKNRNKVNGTVKLKLYKGNIIIVSRQTKSKAYSIKRVSFEENKSFKKSNIEKFINLHKKKLK

SEQ ID NO: 166662 - protein, 124 aa, Unknown
  Bacterial polypetide isolated from the Sargasso Sea
MTGVRTQRAALFALSGDITAQWLGNEGGVLEHDDPEFVHQMRVALRRLRTLMRFFPRFADRQWRDTLGVDLRWLASLLGTVRDWDVFATESLPALIAADGGDGEWNGTLDAAQWLGNEGGVLEH

SEQ ID NO: 166663 - protein, 88 aa, Unknown
  Bacterial polypetide isolated from the Sargasso Sea
YELIKSRATSIGATQSYIPDLRKEFVENFIFESVKAKALYEGRNLLGTSLARPLTAKAQGEIGKQEKAQLLSHGATGKGNDQARFEFT

SEQ ID NO: 166664 - protein, 69 aa, Unknown
  Bacterial polypetide isolated from the Sargasso Sea
MLQALIDKSQERVEGEVRIYLRQGTMNVKGRKSKYSLYNKDLATFEEDKIYNQKDAEGYIRIKSLRLRH

SEQ ID NO: 166665 - protein, 82 aa, Unknown
  Bacterial polypetide isolated from the Sargasso Sea
MPKKIVLAYSGGLDTSVILKWLQLKYSCPVVTFTADIGQGDELDPVESKAKSLGVQEIYIEDLKEEFVRKYVFPMFRANTTL

SEQ ID NO: 166666 - protein, 143 aa, Unknown
  Bacterial polypetide isolated from the Sargasso Sea
AGKNGIGRVDLVENRFIGIKSRGVYETPGGTLLIHAHRAMESVTLDKETMHKKEEIMPNYSELIYNGYWFSKARFKLQRIIDKNKNKVNGSIKLKLYKGNITILSRQTNSKAYSMKKVSFEENKTFNKLNIEKFINLHKRKLK

SEQ ID NO: 166667 - protein, 239 aa, Unknown
  Bacterial polypetide isolated from the Sargasso Sea
DLINYAKKHGIPIPTDKKGAPPFSVDDNLFHTSTEGKVLENPKNSAPEFIFQRTTSPEKAPNKPSFITINYKNGDPIGLNGKKLSPAKVLIKLNQLAGKNGIGRVDLVENRFIGIKSRGVYETPGGTLLLVAHRAVESVTLDKDTMHKKDEVMPRYAELVYNGYWYSKERFKLQKIVDLKRNKVNGSVKLKLYKGNITIQSRQTSSNAYSMKKVSFEENKTFNKSNVERFINFHKKKLR

SEQ ID NO: 166668 - protein, 34 aa, Unknown
  Bacterial polypetide isolated from the Sargasso Sea
MDKINKVVLAYSGGLDTSVILRWLKETYQCEVAT

SEQ ID NO: 166669 - protein, 144 aa, Unknown
  Bacterial polypetide isolated from the Sargasso Sea
LAEENGIGRVDLVENRFIGVKSRGIYETPGGTLLLNAHRAIESVTLDKETMHKKDAIMSRYAELIYNGYWYSKERFKLQKIVDLKRSKVNGSVKLKLYKGNITIQSRVTKSSAYSMKKVSFEENKTFNKSNVEKFINFHKNKIR

SEQ ID NO: 166670 - protein, 105 aa, Unknown
  Bacterial polypetide isolated from the Sargasso Sea
VHTKHETKFKTLVDDEWAWMVYSGLWDDPLREELDQFIEQAQKRVTGTVKLKLYKGNVRVVGRESKYSLYSHDIATYGKDSTFDQKLAKGFVELWGMQTTEANKF

SEQ ID NO: 166671 - protein, 80 aa, Unknown
  Bacterial polypetide isolated from the Sargasso Sea
MEKSLSKKISKVVLAYSGGLDTSVILKWLQDKYECEVVTFTANIGQGDDVKVIKSKAQNFGVKDIFIENLEETFVKIMFF

SEQ ID NO: 166672 - protein, 105 aa, Unknown
  Bacterial polypetide isolated from the Sargasso Sea
MKRKKLVLAYSGGLDTSVIVHWLNNQGYEVIALCLDLGQKGEDIEKILAKGKKAGAAKVLVENVEEEFVKDYVFNSINWNALYEGTYLLGTSLARPLIAKKQIEI

SEQ ID NO: 166673 - protein, 73 aa, Unknown
  Bacterial polypetide isolated from the Sargasso Sea
SKERFKLQKIIDLKKNKVNGSIKLKLYKGNVSILSRITKSNAYSIKRVSFEENKTFNKSNVEKFINFHKKKLR

SEQ ID NO: 166674 - protein, 213 aa, Unknown
  Bacterial polypetide isolated from the Sargasso Sea
LFHTSTEGKVLENPKNSPPEFIFQRTVSPEKAPNKKTKLRIAFKNSDPVSLNGQKLKPEKLLEKLNLLAGKNAVGRVDLVENRFIGIKSRGVYETPGGTVLYIAHRAIESVTLDKETVHAKERIMPEYAELVYNGYWFSKKRLKLQKIIDKNKNKVSGEVVLSLYKGNINILSRSTKNKAYSMKKVSFEENKTFNKSKVEKFIKYHSKQLYKS

SEQ ID NO: 166675 - protein, 59 aa, Unknown
  Bacterial polypetide isolated from the Sargasso Sea
MDKINKVVLAYSGGLDTSVILRWLKETYKCEVATFTANLGQDEDYDLVKAKAEKQGTKE

SEQ ID NO: 166676 - protein, 225 aa, Unknown
  Bacterial polypetide isolated from the Sargasso Sea
KKGEPPFSVDDNIFHTSTEGKILENPNNSAPEFIFQRTKALDKTPNKASIIKIGFKNGDPISINGKKLSPEKLLQKLNLIAGNNGVGRVDLVENRFIGIKSRGVYETPGGTVLYVAHRAIESVTLDKETMHEKERIMPVYAELVYNGYWFSKKRVKLQKIIDKKRNLVVGQVVLKIFKGNVILLSRKTNNKAYSMKKVSFEENKSFNKKKVENFIKYHSKKLNKL

SEQ ID NO: 166677 - protein, 49 aa, Unknown
  Bacterial polypetide isolated from the Sargasso Sea
MQQVKKVVLAYSGGVDTSVCIPYLKNEYGVSARCYFCSRSWTRRGFRTY

SEQ ID NO: 166678 - protein, 423 aa, Unknown
  Bacterial polypetide isolated from the Sargasso Sea
MFTLVYLVQAWLRSEGVNLKEIGLFALIQFPYTWKFVWAPLMDRYVPRLPGWRPGRRRGWMLVTQILVAGAIAALGFVSPRDSIWTVAALTALVAFFGASQDISIDAYRRELLSDTQQGLGNAVHVNAYKIAALVPGSLALILSDHLPWTTVFIVTAAFMLPGMVMTLVVREPEVHGTPPKNLRDAIIEPFHEFIQRDGWRGALFVLGFIFLYKLGDTMATTLSTSFFLDIGYSRTQIGVIAKTTAFGASLAGGIVGGIWLMKIGIGRGLWIFGILQMVSTLGFAWLAHLGPASPGLAVIYDIAVWLSQGTSKLLALVGIDWAVQLDPRSVALALVYGLETFATGLTMAAFTAYIASTTDPRYTATQFALFTSLASVPRTLASAASGYVVARIGWFDYFIVCTALALPGMLLLLRIAPWRTRS

SEQ ID NO: 166679 - protein, 394 aa, Unknown
  Bacterial polypetide isolated from the Sargasso Sea
MKNKTIVLAYSGGLDTSFCLKRLSSDGFDVHAILVNTGGFNKSELINIKKQAIELGASKFISIDAKKPFYDKIIKFLIFGNVLKNNSYPLSVSSERIIQAIEIMNYSKKNNINTIAHGSTGAGNDQVRFDSIFQILNPNIKIITPIRDNNITRKQEISYLKKMGIKLKWNNSKYSINKGVWGTTIGGDETLTSYKTLPNKAFTKKLIEKRKKVLNIKFIKGEIVSINNKRSNPIDLIDYLEEISSKYAIGRDIHVGDTIIGIKGRVGFEASAARIIIKAHELLEKHTMSKWQIFQKESISKLYGMLIHEGQYFDPVIEDIEAYFEKSQRYVTGNVFVELSPYNFKLNGIKSKHDLMNDNSGVYGEENLNWSSDDIKGFIKIYSNSSRIFKQINK

SEQ ID NO: 166680 - protein, 236 aa, Unknown
  Bacterial polypetide isolated from the Sargasso Sea
MGIQIVDHFPDDSVLISIAPWRTGDQIDTIQELNQVRWVGQFPAMWKISNSLYPLMDLDGALVDLDITPSPSNSPDDLSNLERELFEKMGELHLQSHCDKYLCKVKSAKTSLISSLATDSRVLRVEMGPVLTIHNSNASMISGVDYARSLSELDLRGEGEVIGISDTGLDVDHGDFGNRLRNPIYNLFGPDSSGADSNSGHGTHVTATLLGDGTGDSNSTGIVPESTFHFYQLEVD

SEQ ID NO: 166681 - protein, 395 aa, Unknown
  Bacterial polypetide isolated from the Sargasso Sea
VATASAKANTTGVTQAKRQLGSNIKPFIYAAALEKGFTLATLINNAPINKPDISQGTAWRPKNSPDIYGGPTRLRVGLAQSINVMSVRAMRHIGLDAAIAELTKFGFDPNDLPRNESLALGSPSVTPLQVATAFNVFANGGFLVEPYYIERVEDSFGNVIEKANPTLACKPNNGSIQPNIDPMSFGEPTTTQTDEPVAHCFEQTGRYAPQIISEQTAFLITEALKSVIWGGGDWSKGTGWQGTAWRAAQLIKRHDIAGKTGTTNESRDTWFSGFGPTLTSTFWVGFDDHGRQLGRTAWNSNGEKDQITGTEAGAKTAGPGWNEFMNNVLKGVPETTAIPPEGIVSVRIDLATGKLTRKTDYTSAFEYFISGTEPKEYISESQDENNLFIDAPTDD

SEQ ID NO: 166682 - protein, 216 aa, Unknown
  Bacterial polypetide isolated from the Sargasso Sea
SIDDNLFHTSTVGKILENPKNPAPEFIFQRTISPEKAPNKPTFVTINFKNSDPIGINGKKLSPYKLLGKLNQLAGKNGIGRVDLVENRFIGIKSRGIYETPGGTILISAHRAMESVTLDKETMHKKDAVMSRYAELIYNGYWYSKERFKLQKIIDLKKNTVNGSIKLKLYKGNITIQSRITKSKAYSMTKVSFEENKTFNKSNVERFINFHKNKLR

SEQ ID NO: 166683 - protein, 74 aa, Unknown
  Bacterial polypetide isolated from the Sargasso Sea
MNSVQKFSSGEVKLKLYKGNVTVIGRKSKFSLYDYDMSTYSTTDTFNHQSAEGFIDIYSLPARIQAKKQKFNDL

SEQ ID NO: 166684 - protein, 68 aa, Unknown
  Bacterial polypetide isolated from the Sargasso Sea
RLRLYKGSVNTVGRWSEYSLYSEKHVTFEDDAGAYDQNDAAGFIQLNALRLKLLAHQKLKNTKGPKLS

SEQ ID NO: 166685 - protein, 127 aa, Unknown
  Bacterial polypetide isolated from the Sargasso Sea
GIKSRGIYETPGGTVLIFAHRAMESITLSKKLMHQKDKIMPRYAELIYNGFWFSKERIKLQKIIDKKKNKVQGEITVKLYKGNIYIIGRESNKSIYSKKKSSFESGKVFSKKYVEKFIKVAAKRLKK

SEQ ID NO: 166686 - protein, 162 aa, Unknown
  Bacterial polypetide isolated from the Sargasso Sea
MSKGKCILAYSGGMDSTISVVWIKEKYDLDVITLTVDLGAGPEIEGVREKSKSAGAIDSVVIDAKDEFVNEYIFPALKSGGMYEDVYALSTALARPLMSKKIVETARKYGAEYVSHGCTGKGNDQVRFDASIMTLSGDGESIKIIAPAREWGMTRDEEKEYA

SEQ ID NO: 166687 - protein, 157 aa, Unknown
  Bacterial polypetide isolated from the Sargasso Sea
SPEKLLNKLNILAGKNGVGRVDLVENRFIGIKSRGVYETPGGTLLYAAHRAIESVTLDKETAHKKERIMPEYAELVYNGYWFSKKRLKLQKLIDKKRGKVSGDIILSLCKGNITILSRRTKNKAYSMKKVSFEENKTFNKKKVENFIKFHSKQLNKA

SEQ ID NO: 166688 - protein, 105 aa, Unknown
  Bacterial polypetide isolated from the Sargasso Sea
AIESVTLDKDTMHKKDEVMPRYAELIYNGYWYSKERFKLQKIIDLKRNKVNGSVKLKLYKGNITIKSRQTSSSAYSMKKVSFEENKTFNKSNVERFINFHKKKLR

SEQ ID NO: 166689 - protein, 54 aa, Unknown
  Bacterial polypetide isolated from the Sargasso Sea
MVKLKLYKGNVTILSRQSKSKAYSVKKVSFEENKSFKKSKVERFISSASRKLRA

SEQ ID NO: 166690 - protein, 105 aa, Unknown
  Bacterial polypetide isolated from the Sargasso Sea
MQQVKKVVLAYSGGVDTSVCIPYLKNEYGISEVVTFVADLGQGEDLELIRQKALNSGASKSIVGNLINSFVERYAFPAIRANALYLDKYPLSTALARPLIAENLV

SEQ ID NO: 166691 - protein, 219 aa, Unknown
  Bacterial polypetide isolated from the Sargasso Sea
MTQNLWGRAIEGGVLENPFNEPPDDAFIWIKTKNLPEKPSYLKIKFVKGVPTEVDGKKLPPVKLIEYINKKAGNNGVGIVDHIEDRVVGIKSREVYETPAAICLIEAHSDLEKMVHTKHETKFKTLVDDEWAWMVYSGLWDDPLRKELDQFIEQAQKRVTGTVKLKLHKGNVRVVGRESKYSLYSHDIATYGKDSTFDQKLAKGFVELWGMQSTEANKF

SEQ ID NO: 166692 - protein, 115 aa, Unknown
  Bacterial polypetide isolated from the Sargasso Sea
GTLLMHAHRAMESVTLDKDTMHKKDQIMPRYAELIYNGYWYSKERFKLQKIVDLGKNKVNGSVKLKLYKGNVTIISRQTKSAAYSMKKVSFEENKTFNKTNVERFINFHKKKLRS

SEQ ID NO: 166693 - protein, 134 aa, Unknown
  Bacterial polypetide isolated from the Sargasso Sea
LVENRFLGIKSRGVYETPGGTLLIHAHRAIESVTLDKETMHKKDAIMSRYAELIYNGYWFSKERFKLQKIVDLKKNKINGSVKLKLYKGNITIQSRMTKSNAYSMKKVSFEENKSFIKSNVEKFINFHKKKLRN

SEQ ID NO: 166694 - protein, 259 aa, Unknown
  Bacterial polypetide isolated from the Sargasso Sea
YFGPKIKIIAPWRIWKLKSRTDLIKYAKKHGIPIPKDKKGAPPFSIDDNLFHTSTEGKILENPRNIAPEFIYQRTTAPEKAPNKPSFVTINFKNSDPFAINGRKLSPSKLLKKLNQIAGKNGIGRIDLVENRFIGIKSRGVYETPGGTLLIYAHRAMESVTLDKKTMHKKDEIMPKFAELIYNGYWFSKLRFKLQKIVDKNKYKVNGSIKLKLYKGNITILSRQTKSNAYSIKKVSFEENKTFNKLNVERFINFHKKKL

SEQ ID NO: 166695 - protein, 110 aa, Unknown
  Bacterial polypetide isolated from the Sargasso Sea
MQQVKKVVLAYSGGVDTSVCIPYLKNEYGISEVVTFVADLGQGEDLELIRQKALNSGASQSIVGNLVNNFVERYAFPAIRANALYLDKYPLSTALARPLIAENLVNMLER

SEQ ID NO: 166696 - protein, 217 aa, Unknown
  Bacterial polypetide isolated from the Sargasso Sea
FSVIDNLFHTSTEGKALRDPKNPAPDFIFQRTLSPEKSPNKPTFIVINFKNGDPVGIDGKKLSPSNLLTKLNNVAGRNGIGRVDLVENRFIGIKSRGVYETPGGSLLMIAHRAMESVTLDKKIMHKKDEIMPRYAELIYNGYWYSKERFKLQKIIDNNRKKVNGSVKLKLYKGNITIHSRRTKSKAYSMKKVSFEENKTFNKSNIEKFINFHKKKLR

SEQ ID NO: 166697 - protein, 127 aa, Unknown
  Bacterial polypetide isolated from the Sargasso Sea
IKSRGVYETPGGTLLINAHRAIESVTLDKETMHKKDEIMPKYAELIYNGYWYSKARLKLQKIIDLKRSKVNGVVKLKLYKGNVTIVSRITKSNAYSMKKVSFEENKSFNKSSVERFINLHKKKLRSF

SEQ ID NO: 166698 - protein, 111 aa, Unknown
  Bacterial polypetide isolated from the Sargasso Sea
ARRAIESITLDKGESHIKDELMPKYAEVIYNGFWFSSERISMQKLIDSMSHKVNGDVKIKIFKGNVIILGRRSSNSLYDNSLVSFDEVGEYNQKDAEGFIKINSIRLRKNN

SEQ ID NO: 166699 - protein, 121 aa, Unknown
  Bacterial polypetide isolated from the Sargasso Sea
MSKKIVLAYSGGLDTSVILKWLQQEFNCPIATYTADIGQNDDFKEIKLKAEKMGVKEICIEDLKEEFVKDYVFPMFRANAVYEGVYLLGTAIARPLIAKKQVEYANSIGADAVAHGSTGKG

SEQ ID NO: 166700 - protein, 98 aa, Unknown
  Bacterial polypetide isolated from the Sargasso Sea
MKKIVLAYSGGLDTSIILRWLQENYKAEVIAYTSDIGQIIDKRKIIRNAKKLGVKKIIIENLKNTFVKDYVFPMIRAHAVYEGVYLLGTSIARPLIAK

SEQ ID NO: 166701 - protein, 195 aa, Unknown
  Bacterial polypetide isolated from the Sargasso Sea
NSAPEFIFQRTNAPEKAPNKPTYVIINFKNSDPIGLNGKKLTPAKLLEKLNQLAGKNGIGRVDLVENRFIGIKSRGVYETPGGTLLLNAHRAIESVTLDKETMHKKDMIMPRYAELIYNGYWYSKERIKLQKIVDLKRKKVNGSVKLKLYKGNITIQSRVTRSGAYSMKKVSFEENKTFNKSNIERFINFHKNKL

SEQ ID NO: 166702 - protein, 121 aa, Unknown
  Bacterial polypetide isolated from the Sargasso Sea
MKKKRKIVLAYSGGLDTSIILKWLQEKYNAEVISYTADIGQKIEIKKIFKNAKALGVKKVIIEDLKNLFVKEYIYPMIRGHAIYERVYLLGTSIARPLIAKRQISIAKKYKAYAVSHGSTG

SEQ ID NO: 166703 - protein, 164 aa, Unknown
  Bacterial polypetide isolated from the Sargasso Sea
EIIQKANELSGVHGFGRIDMIEDRVVGIKSREIYETPGLLLLIKAHKELESITLNPDVIDFKGIVEKKWGQLVYQGFWFGPLKDSLDAFISSTQTSVNGRVKIRLHKGNAVVIGRMSDNNSLYREDLATYSKDDIFNHSLAEGFIYMWGMSNKIWAELNSKIKD

SEQ ID NO: 166704 - protein, 140 aa, Unknown
  Bacterial polypetide isolated from the Sargasso Sea
GIGRVDLVENRFLGIKSRGVYETPGGTLLIHAHRAIESVTLDKETMHKKDAIMPRYAELIYNGYWFSKERFKLQKIVDLKKNKINGSVKLKLYKGNITIQSRMTKSNAYSMKKVSFEENKSFIKSNVEKFINFHKKKLRN

SEQ ID NO: 166705 - protein, 163 aa, Unknown
  Bacterial polypetide isolated from the Sargasso Sea
MNREKLVLAYSGGLDTSVIVHWLNNQGYEVIALCLDLGQKVEDLDEILEKGEKAGAAKVIIENVEEEFVKDYVFSSIFWNALYEGTYLLGTSLARPLIAKKQIEIAELVGASAVSHGATGKGNDQVRFELSYYALKPDIRVIAPWKIPEFYKKYPGRTELLGY

SEQ ID NO: 166706 - protein, 111 aa, Unknown
  Bacterial polypetide isolated from the Sargasso Sea
MKKQKKIVLAYSGGLDTSIILKWLQENYDAEVIAYTADIGQEMDRKKIIKNAKKLGVKKIIIQDLKNIFVKDYVYPMIRGHALYEGVYLLGTSIARPLIAKDQIRVAKKFN

SEQ ID NO: 166707 - protein, 139 aa, Unknown
  Bacterial polypetide isolated from the Sargasso Sea
NGVGRVDLVKNRFIGIKSRGVYETPGGTFLMIAHRAIESVTLDKQTMHKKDEVMPKYAELIYNGFWFSKARHKLQKIVDKNKNKVNGKVKLKLYKGNITIISRQTKSKAYSLKKVSFEENKTFSKKNVENFIRKNFKKL

SEQ ID NO: 166708 - protein, 205 aa, Unknown
  Bacterial polypetide isolated from the Sargasso Sea
PEDIFAITSSIDNSPDSPQDIEIVFKNGFPVGINDEFLTPVEIIQKANDLSGAHGFGRIDMIEDRVVGIKSREIYETPGLLLLIKAHKELESITLNPDVIDFKGIVEKKWSQLVYQGFWFSPLKEGLDSFISSTQTSVNGRVKIRLHKGNAIVIGRMSENNSLYREDLATYSKDDVFNHSLAEGFIYMWGMSNKIWAELNSKTKD

SEQ ID NO: 166709 - protein, 42 aa, Unknown
  Bacterial polypetide isolated from the Sargasso Sea
KKIKVIAPWREWKLQSRTDLIKYAKKYKIQFQKIKKVRRHFL

SEQ ID NO: 166710 - protein, 113 aa, Unknown
  Bacterial polypetide isolated from the Sargasso Sea
MKKIVLAYSGGLDTSIILRWLQKNYKAEVIAYTANIGQVIDKKKIIKNAKKLGVKKIIIEDLKNTFVKEYVFPMIRAHALYEGAYLLGTSIARPLIAKRQVAVAKKYKAFAVS

SEQ ID NO: 166711 - protein, 247 aa, Unknown
  Bacterial polypetide isolated from the Sargasso Sea
MNSRNDLVAFAKKYQIPVPKDKMGEPPFSTDANLLHTSAEGKILEDPWVEAPEYVYSRTSSIEDAKKESEEIIISYKNGDPVSVNNENLKSHDLLKKLNKIAGEHGVGRKDIVENRFIGMKSRGIYETPGGTILHESHKAIESITLDKGEAHLKDEIMPKYAELIYNGLWFSSERKALQELIDSTQHKVNGDVKLRVFKGNVIITGRRSLNSKYDESLVSFDQEGNFDQKDSEGFIKINSLRLKMDK

SEQ ID NO: 166712 - protein, 139 aa, Unknown
  Bacterial polypetide isolated from the Sargasso Sea
GIGRVDLVENRFIGIKSRGVYETPGGTLLLVAHRAIESVTLDKETMHKKDEVMPRYAELVYNGYWYSKERFKLQKIVDLNRNKVNGLVKLKLYKGNVTIQSRQTSSNAYSMKKVSFEENKTFNKSNVERFINFHKRKLR

SEQ ID NO: 166713 - protein, 149 aa, Unknown
  Bacterial polypetide isolated from the Sargasso Sea
QKLNILAGKNGVGRVDLVENRFIGIKSRGIYETPGGTILMVAHRAIESVTLDKETMHKKDKVMPKYAELIYNGYWYSKTRFKFQKIVDLKRNKVNGSVKLKLYKGNITIISRQTKSSAYSMKKVSFEENKTFNKSNVERFINFHKKKLS

SEQ ID NO: 166714 - protein, 94 aa, Unknown
  Bacterial polypetide isolated from the Sargasso Sea
ADLVYDGRWFTPLKDALDAFVNQTQLSVTGSVKLKLYKGNVVLAGTTASKSLYLQDLASFTDSELYDQKDANGFIKLFGLPMKVQGLVDRKGDT

SEQ ID NO: 166715 - protein, 203 aa, Unknown
  Bacterial polypetide isolated from the Sargasso Sea
KVLESPVNYAPEFIFQRTTSPEKAPNKPTFITINFKNSDPYGINGKKLSPSKLLEKLNTIGGKNGIGRVDLVENRFIGIKSRGVYETPGGTILISAHRAMESVTLDKETMHKKDKVMPRYAELIYNGYWFSKERFNIQKIIDQKKNKVNGSVKLKLYKGNITIHSRITRSNAYSMKKVSFEENKTFNKSNVERFINYHKKKLK

SEQ ID NO: 166716 - protein, 218 aa, Unknown
  Bacterial polypetide isolated from the Sargasso Sea
PFSVDDNLFHTSTEGKVLENPKNSAPEFIFQRTTSPEKAPNKPTYVSIGFKNGDPINVNGKKLTPKKLLEKLNQLGGKNGIGRVDLVENRFIGIKSRGVYETPGGTLLLIAHRAMESVTLDKETMHKKDTIMPRYAELIYNGYWFSKERFKLQKIVDLKRNKVNGTVKLKLYKGNVTIQSRMTSSSAYSMKKVSFEENKTFNKSNVEKFINFHKKKLK

SEQ ID NO: 166717 - protein, 111 aa, Unknown
  Bacterial polypetide isolated from the Sargasso Sea
MKSNKRIVLAYSGGLDTSVILKWLQENYKAEIIAYTADIGQEIDKKKIIENAKSLGVKKVIIKDLKDVFVKNYVYPMIRGHAIYEGVYLLGTSIARPLIAKDQIRIAKKFK

SEQ ID NO: 166718 - protein, 249 aa, Unknown
  Bacterial polypetide isolated from the Sargasso Sea
RIWKLKSRTDFFNYAKKNGIPIPKDKKGAPPFSVDDNLFHTSTEGKVLENPKNSAPEFIYQRTVSPENAPNKPSFVTINFKNGDPIGINGKKMSPAKLLTKLNELAGKNGIGRVDLVENRFLGIKSRGVYETPGGTLLINAHRAIESVTLDKETMHKKDKIMSRYAELIYNGYWYSKERFKLQKIVDLKRSKVNGSVKLKLYKGNITIQSRVTNSNAYSMKKVSFEENKSFNKSNVERFINFHKKKLRS

SEQ ID NO: 166719 - protein, 203 aa, Unknown
  Bacterial polypetide isolated from the Sargasso Sea
GKVLENPKNSAPEFIFQRTTSPEKAPKKPSFITIGFKNSDPVNINGKKLSPARLLEKLNSIAGKNGIGRVDLVENRFIGIKSRGVYETPGGTLLINAHRAIESVTLDKKTMHKKDEIMPRYAELIYNGYWYSKERFKLQKIVDQKRSKVNGSVKLKLYKGNITIISRQTKSNAYSMKRVSFEENKTFNKSNIEKFINFHKKKL

SEQ ID NO: 166720 - protein, 207 aa, Unknown
  Bacterial polypetide isolated from the Sargasso Sea
TSTEGKMLENPKNTAPEFIFQRTKPIEKTPNKATLIKINFKNGDPISINGKKLKPEKLLEKLNQIGGKNGVGRVDLVENRFIGIKSRGVYETPGGTILYCAHRAIESITLDKDTMHNKERIMPVYSELVYNGYWFSKKRMKLQKIIDKKRNLVVGQVVLKIFKGNVIILSRRSNNKAYSMKKVSFEENKHFNKKKVENFIKYHAKKL

SEQ ID NO: 166721 - protein, 109 aa, Unknown
  Bacterial polypetide isolated from the Sargasso Sea
RAIESITLDKGEAHLKDEIMPKYAEVIYNGFWFSTERIAMQELIDSMQTKVNGHVKLKIFKGNIIILGRKSSNTLYDARIVSFDEKGDYNQKDAEGFIKINSIRLKNNK

SEQ ID NO: 166722 - protein, 183 aa, Unknown
  Bacterial polypetide isolated from the Sargasso Sea
PEKSPNKPTFIVINFKNGDPVGIDGKKLSPSNLLTKLNNVAGRNGIGRVDLVENRFIGIKSRGVYETPGGSLLMIAHRAMESVTLDKKIMHKKDEIMPRYAELIYNGYWYSKERFKLQKIIDNNRKKVNGSVKLKLYKGNITIHSRRTKSKAYSMKKVSFEENKTFNKSNIEKFINFHKKKLR

SEQ ID NO: 166723 - protein, 105 aa, Unknown
  Bacterial polypetide isolated from the Sargasso Sea
MESVTLNKDTMHKKDQIMPRYAELIYNGYWYSKERFKLQKIMDLSKNKVNGSVKLKLYKGNVTIISRKTKSVAYSMKKVSFEENKTFNKTNVERFINFHKKKLRS

SEQ ID NO: 166724 - protein, 223 aa, Unknown
  Bacterial polypetide isolated from the Sargasso Sea
KGAPPFSVDDNLFHTSTEGKILENPKNSAPEFIFQRTVSPEEAPNKPSFVTINFKNGDPFGINGKKMSPAKLLTKLNDLAGKNGIGRVDLVENRFLGIKSRGVYETPGGTLLINAHRAIESVTLDKETMHKKDQVMSRYAELIYNGYWYSKERFKLQKIVDLKRNKVNGSVKLKLYKGNITIQSRVTNSSAYSMKKVSFEENKSFNKSNVERFINFHKKKLRT

SEQ ID NO: 166725 - protein, 171 aa, Unknown
  Bacterial polypetide isolated from the Sargasso Sea
ISFKKEILLKLMGKKLSPAKLLEKLNKLAGKNGIGRVDLVENRFLGIKSRGVYETPGGTILIHAHRAMESVTLDKDTMHKKDSIMPRYAELIYNGYWYSKERFKLQKIVDLKKNKVNGTVKLKLYKGNITIESRITKSNAYSIKKVSFEENKSFNKLNVERFINFHKKKLK

SEQ ID NO: 166726 - protein, 149 aa, Unknown
  Bacterial polypetide isolated from the Sargasso Sea
LNSIAGKNGVGRVDLVENRFIGIKSRGVYETPGGTILYAAHRAIESVTLDKKTMHDKERVMPLYAELVYNGYWFSKKRINLQKVIDKKRKYVSGEVKIKIYKGNVTILSRKTKNKAYSMKKVSFEENKTFNKIKIEKFIKFHSKQLKKA

SEQ ID NO: 166727 - protein, 149 aa, Unknown
  Bacterial polypetide isolated from the Sargasso Sea
EKLNYIAGKNGIGRVDLVENRFIGIKSRGVYETPGGTLLINAHRAIESVTLDKKTMHKKDEIMPKYAELIYNGYWYSKARFKLQKIVDRKRNKVNGSVKLKLYKGNIIIMSRQTKSAAYSMKKVSFEENKTFNKLNVEKFINFHKKKLK

SEQ ID NO: 166728 - protein, 59 aa, Unknown
  Bacterial polypetide isolated from the Sargasso Sea
MSIENKNTGVKKVVLAYSGGLDTSAIIPWLKETYDNCEIIAFCADVGQGEEELVGLTEK

SEQ ID NO: 166729 - protein, 252 aa, Unknown
  Bacterial polypetide isolated from the Sargasso Sea
IAPWRIWKLKSRTDLINYAKKHGIPIPKDKKGAPPFSVDDNLFHTSTEGKVLENPKNSAPEFIFQRTTSPEKAPNKPSFITINYKNGDPIGLNGKKLSPAKVLDKLNQLAGKNGIGRVDLVENRFIGIKSRGIYETPGGTLLLVAHRAIESVTLDKDTMHKKDEVMPRYAELVYNGYWYSKERFKLQKIVDLNKNKVNGSVKLKLYKGNVTIQSRQTSSNAYSMKKVSFEENKTFNKSNVERFINFHKKKLR

SEQ ID NO: 166730 - protein, 302 aa, Unknown
  Bacterial polypetide isolated from the Sargasso Sea
LGQPDEENLDTVKSRMLDCGAKSAQIISGRKELAEAGLKMIQSQAKYEGGYWNTTGIARPITTKLILSSMYNKNIETLFHGATGRGNDQVRFQLASNMLYPNVEVYAPWRDPEFLEEFPGRNEMLDYCISNSLPIKSKSESKYSTDANFLGLTHEAGDLEDVTISPFFVKPGMGVWPWEAEDKYEIISIEWDKGVPVSINGEKLDLVSIFEVSNTIGSKHGVGIGTHVVENRFVGIKSRGIYESPGMEILGKSYEYLLQFILDRRARELFEFLSNTISTQVYQGYWLDLTTSAALDMLNKNN

SEQ ID NO: 166731 - protein, 108 aa, Unknown
  Bacterial polypetide isolated from the Sargasso Sea
MKLKKRIVLAYSGGLDTSVILKWLQENYKADVICYTADIGQKIDRKKIISNAKKFGVKNIIINDLKDIFVKDYVYPMIRGHAIYEGLYLLGTSIARPLIAKDQIKIAK

SEQ ID NO: 166732 - protein, 76 aa, Unknown
  Bacterial polypetide isolated from the Sargasso Sea
MGRAKKVVLAYSGGVDTSVCIPYLKQEWGVEDVITFAADLGQGDELEPIRQKALDAGASQSLVGDLIEPFIKDFAF

SEQ ID NO: 166733 - protein, 93 aa, Unknown
  Bacterial polypetide isolated from the Sargasso Sea
MQHARKVVLAYSGGVDTSVCIPYLKNEYGISEVITFVADLGQGEDLEFIRQKALNSGASESIIGSLVDNFVERYAFPAIRSNSLYLEKYPLST

SEQ ID NO: 166734 - protein, 65 aa, Unknown
  Bacterial polypetide isolated from the Sargasso Sea
MQQVKKVVLAYSGGVDTSVCIPYLKNEYGISEVVTFVADLGQGDDLEIVRQKALNSGATKSVIGN

SEQ ID NO: 166735 - protein, 119 aa, Unknown
  Bacterial polypetide isolated from the Sargasso Sea
MKSKKKIVLAYSGGLDTSIILKWLQENYNADVICYTADIGQEIDRKKIIANAKKFHVKNIIIKDLKNKFVKDYVYPMIRGHAIYEGVYLLGTSIARPLIAKDQIRIAKKFKALCSFTWI

SEQ ID NO: 166736 - protein, 83 aa, Unknown
  Bacterial polypetide isolated from the Sargasso Sea
WFAPERQMLQEAIDLSQKNVNGTVRAKLYKGNVIITGRKSPNSLYDQDLVTFEDGSIDYNHQDAEGFIKLNALRLMMNKIKQD

SEQ ID NO: 166737 - protein, 71 aa, Unknown
  Bacterial polypetide isolated from the Sargasso Sea
MQNVKKIVLAYSGGLDTSAIIPWLKENYDCEVVAFAADVGQGDEELEGLHEKAIASGASECHIIDLKERVC

SEQ ID NO: 166738 - protein, 266 aa, Unknown
  Bacterial polypetide isolated from the Sargasso Sea
MNWDIIIFGPKIKIIAPWRIWKLKSRTDLIKYAKKHRIPIPKDKKGAPPFSVDDNLFHTSTEGKILENPKKSAPEFIFQRTISPEKAPNKCSFVTIGFKNSDPISINGKKISPSKLLEKLNIIAGKNGIGRVDLVENRFIGIKSRGVYETPGGTLLINAHRAIESVTLDKETMHKKDEIVAKYAKLIYNGYWYSKARFKLQKIVDKNRNKVNGTVKLKLYKGNIIIVSRQTKSKAYSIKRVSFEENKSFKRSNIEKFINLHKKKLK

SEQ ID NO: 166739 - protein, 163 aa, Unknown
  Bacterial polypetide isolated from the Sargasso Sea
LTGKKYKAEILLEKLNKIGGANGVGRVDLVENRFIGIKSRGVYETPGGTILYFAHRAMESVTLDKATMHAKEKIMPLYAELVYNGYWFSKKRLNLQKIVDKKRNQVNGEVVLKLYKGNITIVSRRSKNNAYSLKKVSFEENKTFKKSKIEKFIKFHSKQLHKQ

SEQ ID NO: 166740 - protein, 104 aa, Unknown
  Bacterial polypetide isolated from the Sargasso Sea
MKKIVLAYSGGLDTSIILRWLQENYKAEIIAYTSDIGQVLDKKKIIKNAKRLGVKKIIIENLKNIFVRDYIFPMIRAHAVYEGVYLLGTSIARPLILQKTVEIA

SEQ ID NO: 166741 - protein, 236 aa, Unknown
  Bacterial polypetide isolated from the Sargasso Sea
IILKWLQQNYNTEVIAYTADIGQEINKKKIIKNAKNLGVKKIIIEDLKDIFIKDYVFPMIRGHAIYEGVYLLGTSIARPLIAKDQIRVAKKYKAYAVSHGSTGKGNDQIRFELGYHYFDPKIKIIAPWRIWNLKSRTDLINYAKKHGIPIPKDKKGAPPFSIDDNLFHTSTEGKILENPKNPAPEFIFQRTTPPEKAPNKPTLITINFKNSNPIGINGKKLSPYRLLNNLNKFAGK

SEQ ID NO: 166742 - protein, 179 aa, Unknown
  Bacterial polypetide isolated from the Sargasso Sea
PNKPSFITINYKNGDPIGLNGKKLSPAKVLDKLNQLAGKNGIGRVDLVENRFIGIKSRGVYETPGGTLLLVAHRAIESVTLDKDTMHKKDDVMPRYAELVYNGYWYSKERFKLQKIVDLKRNKVNGSVKLKLYKGNITIQSRQTSSNAYSMKKVSFEENKTFNKSNVERFINFHKKKLR

SEQ ID NO: 166743 - protein, 165 aa, Unknown
  Bacterial polypetide isolated from the Sargasso Sea
MKREKLVLAYSGGLDTSVIVHWLNNQGYEVIALCLDLGQKVEDLDEILKKGKKAGAAKVILENVEEEFVTDYVFNSIYWNALYEGTYLLGTSLARPLIAKKQIEIAEMLGASAVSHGATGKGNDQVRFELSYYALNPDIRVIAPWKIPEFYKKYPGRNELLKYAK

SEQ ID NO: 166744 - protein, 155 aa, Unknown
  Bacterial polypetide isolated from the Sargasso Sea
SPSKLLEKLNQLAGKNGIGRVDLVENRFIGIKSRGVYETPGGTLLINAHRAIESVTLDKNTMHKKDEIMPKYAELIYNGYWYSKARFKLQKIVDQKRNKVNGSVKLKLYKGNITIVSRQTKSNAYSMKKVSFEENKTFNKSNVERFINLHKSKLR

SEQ ID NO: 166745 - protein, 110 aa, Unknown
  Bacterial polypetide isolated from the Sargasso Sea
MKKIVLAYSGGLDTSIILKWLQENYKAEVIAYTADIGQEMNKKKIIRNAKKLGVKRIIIKNLKNIFVKDYVFPMIRGHAIYEGVYLLGTSIARPLIARDQIQVAKKFKAF

SEQ ID NO: 166746 - protein, 52 aa, Unknown
  Bacterial polypetide isolated from the Sargasso Sea
MSDIKKVVLAYSGGLDTSIILKWLQETYACEVVTLTADLGQGEELETARAKA

SEQ ID NO: 166747 - protein, 226 aa, Unknown
  Bacterial polypetide isolated from the Sargasso Sea
MAQPCVRDRVVARWGVAWVDRSRVNRYVQRPPSPDQQEVHVKIVCAYSGGLDTSCMIPWLSERYDAEIITYTGDLGQGEDLPAIRQKALDTGAAMAVVDDLRERFVREFVFPSIQAGALYEGTYPLHTALGRPLLAQRLVEVALENGADAIAHGCTGKGNDQVRFEVAAQCLGPQLKVIAPLREWDLVTREMEIDYALERNIPIPITKEKPYSIDQNIWGSAIECG

SEQ ID NO: 166748 - protein, 231 aa, Unknown
  Bacterial polypetide isolated from the Sargasso Sea
MKREKLVLAYSGGLDTSVILHWLNNQGYEVIALCLNLGQKVEDLDKILEKGEKAGATKVLVENVEEEFVKDYVLKAINWNALYEGTYLLGTSLARPLIAKKQIEIAEKEGASVVSHGATGKGNDQVRFELSYYALKPDIRVIAPWKIAEFYQKYPGRSELLKYAKKFGIPVKATKESPWSSDENLMHISFESGMLEDPWQAPLQEMFELSNSPQQAPSNPHEILIEFKNGS

SEQ ID NO: 166749 - protein, 142 aa, Unknown
  Bacterial polypetide isolated from the Sargasso Sea
ENRVLGIKSREIYETPGLLLLIQAHQELESLTLAADVLRSKRQLEMQWADLVYQGLWFGPLKDALDGFMDRTQTTVNGVVRLRLHKGTATVTGRGSADSSLYVPEMASYGSEDQFDHRAAEGFIYVWGLPTRLWSASQRRSS

SEQ ID NO: 166750 - protein, 89 aa, Unknown
  Bacterial polypetide isolated from the Sargasso Sea
VYTGFWFSPEREMLQTAIDSCRDAVNGVVRVKLYKGNVSITGRKSPNSLYNADLVTFEEGAIDYDHSDANGFIRLNALRLRVNKMVQDK

SEQ ID NO: 166751 - protein, 104 aa, Unknown
  Bacterial polypetide isolated from the Sargasso Sea
IESITLNKEIAHNKDSIMPRYAELIYNGFWFSGERSELQKIVDSDKNQVNGEVKLKLFKGNVIVLGRKSKNSLYDLSKVSFEKNNEEDQKKANEFIKLQFSKIN

SEQ ID NO: 166752 - protein, 152 aa, Unknown
  Bacterial polypetide isolated from the Sargasso Sea
MLQKLNSIAGKNGIGRVDLVENRFIGIKSRGVYETPGGTLLMIAHRAMESVTLDKETMHQKDTVMPKYAELIYNGFWFSKARFKLQKIIDLKKNQVNGLIKLKLYKGNVTIISRNSKSKAYSIKKVSFEENKSFKRSKVEKFIAGASTKLRV

SEQ ID NO: 166753 - protein, 98 aa, Unknown
  Bacterial polypetide isolated from the Sargasso Sea
MQQVKKVVLAYSGGVDTSVCIPYLKNEYGISEVVTFVADLGQGEDLEIIRQKALNSGASQSIVGNLVNSFVERYAFPAIRANSLYLDKYPLSTALARP

SEQ ID NO: 166754 - protein, 121 aa, Unknown
  Bacterial polypetide isolated from the Sargasso Sea
ETPGGTILLHARRAIESITLDKGEAHLKDEIMPKYAEVIYNGFWFSTERMALQELIDSMQNKVNGHVKLKIFKGNIIILGRKSPNTLYDSRIVSFDEKGDYNQKDAEGFIKINSIRLKNKK

SEQ ID NO: 166755 - protein, 256 aa, Unknown
  Bacterial polypetide isolated from the Sargasso Sea
TISVDWIKKNYGYDVITLTVDLGGGQFSTDLKKRAKKAGASDCIIWDVKEEFAKDFILPSLLAGAIYENEYLLATSIGRPLMAKKLVEAALEYGAKAVAHGCTGKGNDQVRFDTAIKTLSSDAPLEIIAPAREASLTRDEEKEYAKKLDIKLPGVDERVYSIDRNLWGLAIEGEDLEDPWLEPPEDAYLITSSLEDSPNEPKYIEISFNKGTPVKLNGKKLSLVNLIEDLNDIAGLCGVGRTIHVENRLVGIKSRE

SEQ ID NO: 166756 - protein, 154 aa, Unknown
  Bacterial polypetide isolated from the Sargasso Sea
PAKLLKKLNHLAGTNGIGRVDLVENRFLGIKSRGVYETPGGTLLMIAHRAIESVSLDKSTMHLKENIMSRYAELIYNGYWFSKERFKLQKIIDLKRNKVNGYVKLKLYKGNTTIISRNTSSKAYSQKNVSFEENKSFNKKNVERFINFHKKKLR

SEQ ID NO: 166757 - protein, 74 aa, Unknown
  Bacterial polypetide isolated from the Sargasso Sea
MGKANKVVLAYSGGVDTSVCIPYLKKEYGVEHVIAFAADLGQGDELDEIKKKAISAGASQSLIGNLVKPFIEDF

SEQ ID NO: 166758 - protein, 153 aa, Unknown
  Bacterial polypetide isolated from the Sargasso Sea
RKILEKLNHLGGKNGVGRVDLVENRFIGIKSRGVYETPGGTLLLIAHRAMESVTLDKDTMHKKDSIMPRYAELIYNGYWFSKERFKLQKIVDLKRNKVNGIIKLKLYKGNVVIQSRITTSSAYSMKKVSFEENKTFNKSNVERFINFQKKKLK

SEQ ID NO: 166759 - protein, 136 aa, Unknown
  Bacterial polypetide isolated from the Sargasso Sea
VDLVENRFLGIKSRGVYETPGGTLLILAHRAIESVTLDKETMHKKDNILSRYAELIYNGYWYSKERFKLQKIVDLKKNKVNGSVKLKLYKGNITIQSRVTNSAAYSMKKVSFEENKSFDRSNVEKFINFHKKKLRN

SEQ ID NO: 166760 - protein, 176 aa, Unknown
  Bacterial polypetide isolated from the Sargasso Sea
MQQVKKVVLAYFGGVDTSVCIPYLKNAYGIAEVVTFVADLGQGDDLELIRQKALNSGASKSIVGNLVNSFVERFAFPAIRANALYLDKYPLSTALARPLIAENLVNIAREINADAVAHGCTGKGNDQVRFDLAINALGPDLKIITPAREWNMSREEAIVYGEKFGIPAPVSKKSPY

SEQ ID NO: 166761 - protein, 84 aa, Unknown
  Bacterial polypetide isolated from the Sargasso Sea
MDKVNKVVLAYSGGLDTSVILRWLKETYSCEVVTFTANLGQDEDYDLVEKKATQQGVKEVFIEDLKEEFVRDYVFPMFRANPLY

SEQ ID NO: 166762 - protein, 171 aa, Unknown
  Bacterial polypetide isolated from the Sargasso Sea
FIYLNELGNKHGIGRVDMVENRFIGIKSRGIYETPGATILWAAHRDLEGIAMDKEVMHIRDMLIPKFSELIYNGFWFSPEMDFLLTSIAKSQEAVDGTVRLALLKGNVIPIGRKSPTSLYDQKISSMEVEGGFNAQDSEGFIKINSIRLKAHNLVLKNKTPYKWRKGNKNG

SEQ ID NO: 166763 - protein, 262 aa, Unknown
  Bacterial polypetide isolated from the Sargasso Sea
HYFGPKIKIIAPWRIWKLKSRTDLINYAKKHGIAIPKDKKGAPPFSVDDNLFHTSTEGKVLENPKNSAPEFIFQRTVSPEKAPNKPSFVTINFKNGDPFGINGKKMSPAKLLTKLNGLAGKNGIGRVDLVENRFLGIKSRGVYETPGGTLLINAHRAIESVTLDKETMHKKDQVMSRYAELIYNGYWYSKERFKLQKIVDFKRSKVNGSVKLKLYKGNITIQSRVTNSSAYSMKKVSFEENKSFNKSNVERFINFHKKKLRT

SEQ ID NO: 166764 - protein, 185 aa, Unknown
  Bacterial polypetide isolated from the Sargasso Sea
YFGPKIKIIAPWRIWKLKSRTDLINYAKKHGIPIPKDKKGAPPFSVDDNLFHTSTEGKVLENPKNSAPEYIFQRTTSAEKAPNRTSFVTINFKNSDPIGINGKKLSPSKLLEKLNQLAGKNGIGRVDLVENRFIGIKSRGVYETPGGTLLLAAHRAIESVTLDKETMHKKDAIMSRYAELIYNGY

SEQ ID NO: 166765 - protein, 69 aa, Unknown
  Bacterial polypetide isolated from the Sargasso Sea
IDKSQINVNGIVKLKVYKGNVIVLGRKSNSSIYSSKMATFERDDIYNQKDAEGFIKLNALRLKLLKKRT

SEQ ID NO: 166766 - protein, 234 aa, Unknown
  Bacterial polypetide isolated from the Sargasso Sea
KKHGIPIPKDKKGAPPFSIDDNLFHTSTEGKVLENPKNSAPEFIFQRTTCPEKAPNKPAFITIGFKNGDPVNINGKKLSPAKLLEKLNSIAGKNGIGRVDLVENRFIGIKSRGVYETPGGTLLINAHRAIESVTLDKQTMHKKDEIMPKYAGLIYNGYWYSKARFKLQKIIDQKRNKVNGSVKLKLYKGNIIIISRQTKSNAYSIKKVSFDENKTFNKSNVERFINFHKKKLNN

SEQ ID NO: 166767 - protein, 127 aa, Unknown
  Bacterial polypetide isolated from the Sargasso Sea
MGIKSRGVYETPGGTLLLNAHRAIESVTLDKETMHKKDMIMPRYAELIYNGYWYSKERIKLQKIVDQKRNKVNGSVKLKLYKGNISIQSRVTKSGAYSMKKVSFEENKTFNKSNVERFINFHKNKLR

SEQ ID NO: 166768 - protein, 136 aa, Unknown
  Bacterial polypetide isolated from the Sargasso Sea
RVDLVENRFIGIKSRGVYETPGGTLLLIAHRAMESVTLDKDTMHKKDSIMPRYAELIYNGYWFSKERFKLQKIVDLKKSKVNGIVKLKLYKGNVAIQSRITKSSAYSLKKVSFEENKTFNKSNVERFINFHKKKLK

SEQ ID NO: 166769 - protein, 225 aa, Unknown
  Bacterial polypetide isolated from the Sargasso Sea
VAKKFSIDQNLWGRAIEGGVLENPFNEPPDDAFIWIKTKNLPEKPAYLKIKFVKGIPTEVDGKKLPPVKLIEYINKKAGNHGVGIVDHIEDRVVGIKSREVYETPAAICLIEAHSDLEKMVHTKHETKFKTLVDDEWAWMVYSGLWDDPLRQELDQFIEQAQKRVTGTVKLKLHKGNVRVVGRESKYSLYSHDIATYGKDSTFDQKLAKGFVELWGMQSTEANKF

SEQ ID NO: 166770 - protein, 242 aa, Unknown
  Bacterial polypetide isolated from the Sargasso Sea
SRTDLIKYAKKNKIPIPQDKKGEPPFSIDDNLFHTSTEGKVLENPKNQAPEFIFQRTNSPEKAPNKVSYVTINFKKSDPIGLNDKKLSPAKLLQKLNHLAGNNGIGRVDLVENRFLGIKSRGVYETPGGTLLMIAHRAIESVSLDKSTMHLKENIMPRYAELIYNGYWFSKERFKLQKIVDLNKDKVNGSIKLKLYKGNATIVSRVTNSKAYSLKNVSFEENKSFNKKNVERFINFHKKKLR

SEQ ID NO: 166771 - protein, 152 aa, Unknown
  Bacterial polypetide isolated from the Sargasso Sea
MERLNILAGKNAVGRVDLVENRFIGIKSRGVYETPGGTLLYIAHRAIESVTLDKETAHQKERIMPEYAELVYNGYWFSKKRIKLQKIIDKKRSQVSGDVILSLYKGNVTILSRKTKNKAYSMKKVSFEENKSFNKSKVEKFIKYHSKQLYKS

SEQ ID NO: 166772 - protein, 105 aa, Unknown
  Bacterial polypetide isolated from the Sargasso Sea
MAFQHVVTFVADLGQGEDLELIRQKALNSGASQSIIGNLVNNFVEGYAFPAIRANALYLDKYPLSTALARPLIAENLVNIAREINVDAVVHGCTGKGNDQVRFDL

SEQ ID NO: 166773 - protein, 161 aa, Unknown
  Bacterial polypetide isolated from the Sargasso Sea
LNGKKLSPAKVLDKLNLLAGRNGIGRVDLVENRFIGIKSRGVYETPGGTLLLVAHRAIESVTLDKNTMHKKDEIMPRYAELVYNGYWYSKERFKLQKIVDSKRNKVNGSVKLKLYKGNITIQSRQTSSNAYSMKKVSFEENKTFNKSNVERFINFHKRKLR

SEQ ID NO: 166774 - protein, 262 aa, Unknown
  Bacterial polypetide isolated from the Sargasso Sea
FGKNKIKTIAPWREWKLQSRADLIKYAKKNNIPIPKDKKGAPPFSVDDNIFHTSTEGKVLENPKNSAPEFIYQRTVSPQKAPNKPTKVKITFKNSDPIAINGKKLSPEKLLSKLNILAGKNGIGRVDLVENRFIGIKSRGVYETPGGTLLYTAHRAIESVTLDKETAHKKERIMPEYAELVYNGYWFSKRRLKLQKLIDKKRNKVSGDIVLSLCKGNVTILSRRTKNKAYSMKKVSFEENKTFNKRKVENFIKFHSKQLNKA

SEQ ID NO: 166775 - protein, 261 aa, Unknown
  Bacterial polypetide isolated from the Sargasso Sea
CPCREASLTRDEEKEYAEKLGITLPGVEERVYSIDRNLWGLAIEGEDLEDPWVEPPEDAYLITNSIDDTPKKPTYLEISFKEGVPIKLDGKSLNFLEIIEKLNIIAGENGIGRVVHVENRLVGIKSREVYEAPAATVIHESFQSLEKLVLNRDQSRMKNFVSTTYSDLVYDGRWFSGLRENLDAYCKSSSRYMTGDVRLKLFKSKCDVVGAKSPYSLYSYDLATYSNDDKFKHGSAVGFIDIYSLPSRIQRKQQVHDELAE

SEQ ID NO: 166776 - protein, 329 aa, Unknown
  Bacterial polypetide isolated from the Sargasso Sea
MQWQARYEGTYLLGTSIARPLISKVCVDLAHAEGATVFAHGSTGKGNDQCRFQLAAEAIDPSIEVLAPWRIEAFRERFPGRKELIEFCEEKSIPVKASKAKPYSSDENCLHTSYEAGLLEELDTDGYELVDFGMSVSPQQAADAVETVRIEFESGVPVRLNGEPLPSHEMVLKLNEIGGRNGIGRIDILENRLVGMKSRGVYEAPGMTLLYESHRFIEQLTLDRDLVHLRDRLSPEFAESVYYGFWYCAKMDALLAFIREAQQPVTGIVELNLYKGNILVKSRESSESLYDAAIASMEGGGSYDQTDAEGFLRILGLPLRVQGGIRPRN

SEQ ID NO: 166777 - protein, 112 aa, Unknown
  Bacterial polypetide isolated from the Sargasso Sea
MMIAHRAIESVTLDKKTMHEKDEIMPKYAELIYNGFWFSKSRLKLQRKVDLKRNQVNGNIKLKLYKGNVTILSRQSNSKAYSIDKVSFEENKSFKKSKVERFILGAARKLRV

SEQ ID NO: 166778 - protein, 243 aa, Unknown
  Bacterial polypetide isolated from the Sargasso Sea
IAYGEKYGIVPPVSKKNPYSIDLNLLGRSIEAGPLEDPFQMPSEEVFGITSSIADSPNEPEIADILFENGYPVAINGEAMEPVSLIKKANSLAGKHGFGRLDIIEDRVVGIKSREIYETPGLLLLIKAHQEIESLTLPADLLDTKSRLERQWADLVYKGFWFSPLKEALDGFINYSQKQVNGTVRVRLFKGNVDVIGRKSKENSLYISDMSTYGSEDKFNHKSAEGFIYVWGLPSRIWSWINK

SEQ ID NO: 166779 - protein, 129 aa, Unknown
  Bacterial polypetide isolated from the Sargasso Sea
MLQKKLVVNLMKFKKKIVLAYSGGLDTSIILKWLQENYKAEVICYTADIGQKINKKKIITNAKKFGVKNIIIKDLKNTFVKDYVYPMIRGHAIYEGVYLLGTSIARPLIAKDQIRVAKKFKAYAVSHGS

SEQ ID NO: 166780 - protein, 122 aa, Unknown
  Bacterial polypetide isolated from the Sargasso Sea
MKSKKKIVLAYSGGLDTSIILKWLQENYDAEVIAYTADVGQEMDKKKIINNAKKLGVKNIIINDLKDVFVKDYVYPMIRGHALYEGSYLLGTSIARPLIAKDQVRIAKKFKAFAVSHVQRKR

SEQ ID NO: 166781 - protein, 256 aa, Unknown
  Bacterial polypetide isolated from the Sargasso Sea
KIKIIAPWRIWKLKSRTDLINYAKKHGIPIPKDKKGAPPFSVDDNLFHTSTEGKALENPKNSAPEFIFQRTTSPEKAPNKASYVIIGFKNGDPVTINGKKLSPSKLLESLNHLAGQNGIGRVDLVENRFIGIKSRGVYETPGGTLLINAHRAIESVTLDKETMHKKDDIMPKYAELIYNGYWYSKTRFKLQKIVDQKRNKVNGSVKLKLYKGNITIVSRQTKSNAYSMKKVSFEENKTFNKSNVERFINFHKKNLK

SEQ ID NO: 166782 - protein, 105 aa, Unknown
  Bacterial polypetide isolated from the Sargasso Sea
MKSKKKIVLAYSGGLDTSIILKWLQENYKAEIIAYTADIGQEIDKKKIIKNAKKLGVKKIIIKDLKDTFIKEYVYPMLRGHAIYEGVYLLGTSIARPLIAKDQIR

SEQ ID NO: 166783 - protein, 158 aa, Unknown
  Bacterial polypetide isolated from the Sargasso Sea
KLNSWKTFLTKLNFLLAGKNGIGRVDLVENRFLGIKSRGVYETPGGTLLIHAHRAIESVTLDKETMHKKDSIMPRYAELIYNGYWYSKERFKLQKIIDQKKNKVNGSVKLKLYKGNITILSRITKSNAYSMKKVSFEENKTFNKSNVERFINYHKKKL

SEQ ID NO: 166784 - protein, 251 aa, Unknown
  Bacterial polypetide isolated from the Sargasso Sea
MRLEIWKLKSRTDLINYAKKHGIPIPKDKKGAPPFSVDDNLFHTSTEGKVLENPKNSAPEFIFQRTTSPEKAPNKPSFITINYKNGDPVGLNGKKLSPSKVLDKLNLLAGRNGIGRVDLVENRFIGIKSRGVYETPGGTLLLVAHRAIESVTLDKNTMHKKDEVMPRYAELVYNGFWYSKERFKLQKIVDSKRNKVNGSVKLKLYKGNITIQSRQTSSNAYSMKKVSFEENKTFNKSNVERFINFHKRKLR

SEQ ID NO: 166785 - protein, 190 aa, Unknown
  Bacterial polypetide isolated from the Sargasso Sea
IFQRTISPEKAPNKPSFVTIGFKNGDPVTVNGKKLSPSKLLERLNHLAGKNGIGRVDLVENRFIGIKSRGVYETPGGTLLINAHRAIESVTLDKETMHKKDEIMPKYAELIYNGYWYSKARFKLQKIVDQKRNKVNGSVKLKLYKGNITIVSRQTKSNAYSMKKVSFEENKTFNKSNVERFINFHKKNLK

SEQ ID NO: 166786 - protein, 119 aa, Unknown
  Bacterial polypetide isolated from the Sargasso Sea
MQKKVVLKKKTKIVLAYSGGLDTSIILKWLQENYKAEVIAYTADIGQEINKRKIIQNAKRLGVKNIIIEDLQNIFVKDYVFPMIRGHALYEGTYLLGTSIARPLIAKRQIAIAKKFKAF

SEQ ID NO: 166787 - protein, 229 aa, Unknown
  Bacterial polypetide isolated from the Sargasso Sea
IVIPKDKKGAPPFSIDDNLFHTSTEGKILENPKNYAPEFIFQRTTSPENSPSKPTFVTINFKNSDPYGINGKKLSPSKLLEKLNILAGKNGIGRVDLVENRFIGIKSRGVYETPGGTLLINAHRAIESVTLDKETMHKKDEIMPRYAELIYNGYWFSRERFKLQKIINHNKNKVNGSVKLKLYKGNITIYSRNTKSNSYSVKKVSFEENKTFNKLNVENFINFHKKKLK

SEQ ID NO: 166788 - protein, 112 aa, Unknown
  Bacterial polypetide isolated from the Sargasso Sea
MLLIAHRAMESVTLDKETMHKKDTIMPRYAELIYNGYWFSKERFKLQKIVDLKRNKVNGNIKLKLYKGNVSIQSRMTTSSAYSMKKVSFEENKTFNKSNVERFINFHKKKLK

SEQ ID NO: 166789 - protein, 258 aa, Unknown
  Bacterial polypetide isolated from the Sargasso Sea
GPKIKIIAPWRIWKLKSRTDLIKYAKKHGILIPKDKKGAPPFSVDDNLFHTSTEGKVLENPKNSAPEFIFQRTTSPEKAPNKPSFITINYKNGDPIGLNGKKLSPAKVLDKLNQLAGKNGIGRVDLVENRFIGIKSRGVYETPGGTLLLVAHRAIESVTLDKDTMHKKDEVMPRYAELVYNGYWYSKERFKLQKIVDLKKNKVNGSVKLKLYKGNITIQSRQTSSNAYSMKKVSFEENKTFNKSNVERFINFHKKKLR

SEQ ID NO: 166790 - protein, 59 aa, Unknown
  Bacterial polypetide isolated from the Sargasso Sea
MSSIKKVVLAYSGGLDTSAIVPWLKENYGCEVIAFVADVGQGAEELEGVEEKAIASGAS

SEQ ID NO: 166791 - protein, 238 aa, Unknown
  Bacterial polypetide isolated from the Sargasso Sea
MIKYAKKNKIPIPKDKKGAPPFSVDDNLFHTSTEGKALENPKSFAPEFIYQRTISPEKAPNKPSFVTINFKNGDPYGINGKKTSPAKLLEKLNQLAGKNGIGRVDLVENRFIGIKSRGVYETPGGTLLLHAHRAIESVTLDKKTMHKKDEVMPRYAELIYNGYWFSKERFKLQRVIDDKRDKVNGSVKLKLYKGNITIFSRQTKSKAYSMKKVSFEENKTFNKSNVERFINFHKKKLK

SEQ ID NO: 166792 - protein, 253 aa, Unknown
  Bacterial polypetide isolated from the Sargasso Sea
IAPWRIWKLKSRTDLINYAKRHGIPIPKDKKGAPPFSVDDNLFHTSTEGKVLENPKNSAPEFIFQKTTSPEKAPNKPSFITIGFKNSDPITINGKKLSPSKLLERLNQLAGKNGIGRVDLVENRFIGIKSRGVYETPGGTLLINAHRAIESVTLDKDTMHKKDEIMPKYAELIYNGYWYSKARFKLQKIVDLKRSKVNGSVKLKLYKGNITIVSRQTRSNAYSMKKVSFEENKTFNKSNVERFINFHKKNLKK

SEQ ID NO: 166793 - protein, 200 aa, Unknown
  Bacterial polypetide isolated from the Sargasso Sea
TVDELIAMCDGFLFTGGRPNVHPSNYGVEATAAHGDFDRDRDALTLPLIKRAVSIGLPIFGICRGFQEVAVAMGATLHPEIRELDGRMNHRMPPDGTLAEKFAIRHEVTFRSDGIFSKILGSDRIETNTLHGQGIADAGDRLIIDGWASDGTPEALYVKDAPGYTYSVQWHPEWNAENDPISKRLFTAFGDAVRDYGNAQ

SEQ ID NO: 166794 - protein, 160 aa, Unknown
  Bacterial polypetide isolated from the Sargasso Sea
MILMIDNYDSFTWNVVQCLWELGAEVEVHRNNEISLTDIEARAPKGICISPGPCSPGEAGISMSVIEHFAGKVPIFGICLGQQSIGAVFGGQIVRAQKVMHGKTSPIHHTGDGVFKDLPSPFTATRYHSLVVEVGSLPDCLEVTAWTEDEIGAQEAIMGL

SEQ ID NO: 166795 - protein, 196 aa, Unknown
  Bacterial polypetide isolated from the Sargasso Sea
GVYLTGAGSNIDPALYGQENETPNKGQDRDRDLFDLPLIRAAIARGLPIFGICRGMQEINVALGGDIYQKVYAEPGFNDHRENPDDPVEVQYAASHSVRPVAGSWFAELMGKDEIQVNSLHGQAIRNLGKGLEVLATAEDGLIEAIHAPSLSPFLFAVQWHPEWQAAKNPDSVKIFQAFGDACHRRVASRNSRQAA

SEQ ID NO: 166796 - protein, 202 aa, Unknown
  Bacterial polypetide isolated from the Sargasso Sea
MKKTKVVVALSGGVDSSVAAYLLKNQGYDLIGLFMKNWHDETVTISDECPWLDDSNDAMLVADKLNIPFQVVDLSKDYKEKIIDYMFNEYSKGNTPNPDILCNREIKFDVFMDVALSLGADYVATGHYSRIKKNHCNENSIKYELHSGLDNTKDQSYFLCQLNQNQLSKILFPIGDLTKAESRKIAKKNNLVTAEKKISQGL

SEQ ID NO: 166797 - protein, 94 aa, Unknown
  Bacterial polypetide isolated from the Sargasso Sea
ISLPNFIKSLKDNNLYDKVWQAYAALLPVKTVGVMGDNRTYEYLCLLRAITSEDGMTADFFQFKKSFMQSISNQIVNNIRGINRVVYDITSKPP

SEQ ID NO: 166798 - protein, 51 aa, Unknown
  Bacterial polypetide isolated from the Sargasso Sea
MQKILVVDFGSQYTQLIARRLRELNVYSEVYPWDEMPNLESVDGFVLSGGP

SEQ ID NO: 166799 - protein, 118 aa, Unknown
  Bacterial polypetide isolated from the Sargasso Sea
LAIRIPGDVDENKINILKEADNIFIKSLYKYNLYHKIWQAYAALLPVKTVGVMGDNRTYEYICLLRAITSEDGMTADFFNFKKDFMQDVSNKIVNSIKGINRVVYDVTSKPPSTIELE

SEQ ID NO: 166800 - protein, 66 aa, Unknown
  Bacterial polypetide isolated from the Sargasso Sea
MGDNRTYEYICLLRAITSDDGMTADFFNFNKKFTQMVSNKIINNIRGINRVVYDVTSKPPSTIELE

SEQ ID NO: 166801 - protein, 139 aa, Unknown
  Bacterial polypetide isolated from the Sargasso Sea
MKTNKVVIALSGGVDSSVAAFLLKKKGYDLIGLFMKNWHDENVTISDECPWLEDSNDAMLVAEKLNIPFQTVDLSKEYKERIIDYMFDEYSKGNTPNPDILCNREIKFDVFMNIAISLGADYVATGHYCRVIEDNNDER

SEQ ID NO: 166802 - protein, 290 aa, Unknown
  Bacterial polypetide isolated from the Sargasso Sea
IEAFRGYKGIIISGSPSLASHGEDADYNKDIYDLDIPILGFCFGHQEIAQHYGGKVIHGGREWGYSELQTQQSHPLFSGLSSRETVWMSHFDSVAEIGPDFQEIGVTLTPDGEAEHRYAAIASDTLQRYGFQFHPEVDSTENGHKMIANFLYEICGCTSSWSMDGFIEQKEADIRKQVAGKSVFLLASGGVDSTVAAVLIGRAIGPDRLHLLHVDNGLMRKQESSNVLKLFEKLGLGTNLHFVDASERFLSALSGIVDPEAKRRIIGDTFIEVKEDQAEKIGMKNITRAG

SEQ ID NO: 166803 - protein, 265 aa, Unknown
  Bacterial polypetide isolated from the Sargasso Sea
MNSSIENIVQSNVDASKNLVIALSGGVDSSVLAHILCKISKNIRLVFVQHNQVHSKDLEASAKKIAKSLNLDLEVIQTSLKPNSSETEMREERYKHLLSNLKKDEFLLTGHNLSDKAETLLINLFRGTRLEGLKSINSENSLSSKPMINISKKEIYEYANKNEIPYSEDPTNKDNNIVRNWIRNFLIPEINNKFPGSFESKADQLSNEVAFRTNYDNDNLKYIKKSEGYVEIPALFIDNMSSEKQYYLNRVGKYIGMNSIEKKDI

SEQ ID NO: 166804 - protein, 310 aa, Unknown
  Bacterial polypetide isolated from the Sargasso Sea
KTNKVVIALSGGVDSSVAAFLLKKKGYDLIGLFMKNWHDENVTISDECPWLEDSNDAMLVAEKLNIPFQTVDLSKEYKERIIDYMFDEYSKGNTPNPDILCNREIKFDVFMDIAISLGADYVATGHYCRVIEDNNDEDVTYQLHAGIDNLKDQSYFLCQLNQSQLKKIIFPIGDLSKTEVRNIARENNLITAEKKDSQGLCFVGKVSLPDFLQQKLMKRSGNVIEISSESDLYKNDVNQLDKYEKLEFLSTRISYKKNDGRIIGQHHGAHFFTIGQRKGLSIGGYKDPLFVISTNTSSNEIYVGEGKSHP

SEQ ID NO: 166805 - protein, 91 aa, Unknown
  Bacterial polypetide isolated from the Sargasso Sea
LKKENLYDKIWQAYAALLPVKTVGVMGDNRTYEYICLLRAITSSDGMTADYFDFTKKFMQNVSNKIINNIQGINRVVYDVTSKPPSTIELE

SEQ ID NO: 166806 - protein, 61 aa, Unknown
  Bacterial polypetide isolated from the Sargasso Sea
MKNKNIEDFILIIDFGSQVTQLIARRLRELNVYCEIQPFQKIDFNFFKKFTPSGIILSRRS

SEQ ID NO: 166807 - protein, 185 aa, Unknown
  Bacterial polypetide isolated from the Sargasso Sea
MNLNIPWEWYRTFLAVMKEGSLSGAARMLAITQPTAGRHIAALESALGLVLFTRSQTGLQPTDAAVALQGHAQAMENTASMIERSAASFSAHSAGLHGVVRVSASEIIGTEVLPPLFARIKEDYPQLTLELVISNRMQDLLNREADIAVRMSTPVQEQLIARRLGSIEIGLHASPSYLARHGTPE

SEQ ID NO: 166808 - protein, 52 aa, Unknown
  Bacterial polypetide isolated from the Sargasso Sea
MKSRLETILIVDYGSQYTQLIARRIRELEVFCLVYPFNKITKKILNEIKPCA

SEQ ID NO: 166809 - protein, 146 aa, Unknown
  Bacterial polypetide isolated from the Sargasso Sea
MKKNKVVIALSGGVDSSVAAFLLKKKGYDLIGLFMKNWHDENVTISDECPWLEDSNDAMLVAEKLNIPFQTVDLSREYKERIIDYMFDEYSKGNTPNPDILCNREIKFDVFMDIAISLGADYVATGHYCRVIEDNNNEDVTYQLHA

SEQ ID NO: 166810 - protein, 103 aa, Unknown
  Bacterial polypetide isolated from the Sargasso Sea
MEKIIVLDFGSQYSHLICRRIREFSVYAELVPYDISPEELKKMNPKGIIFSGGPSSVYNDDAPTPDEELFNFDLPLLGICYGHQLIVNKFGGKVKRANKEYGS

SEQ ID NO: 166811 - protein, 259 aa, Unknown
  Bacterial polypetide isolated from the Sargasso Sea
MKVVVGLSGGVDSSVTAYLLQQQGHEVVALFMRNWNDASVTLEDECPWIEDSNDALMVAQKLGIPFQVIDMSDLYKERIVDYMFDEYQKGRTPNPDVLCNREVKFDVFMKTAMSLGADKVATGHYARVDSTIDENGNEIFHLLAGKDNNKDQSYFLCQLSQDQLSKALFPIGELTKPQVREIAKEIGLVTADKKDSQGLCFIGKVSLPQFLQQQLIPKEGEIVEIFKDSPLFAEEMPEFSSKQEELEYLSRKINYKKTD

SEQ ID NO: 166812 - protein, 103 aa, Unknown
  Bacterial polypetide isolated from the Sargasso Sea
ILKEADYFFIQALKDHGLYHKIWQAYAALLPVKTVGVMGDNRTYEYLCLLRAITSEDGMTADFFEFRKSFMQTISNKIVNSIRGINRVVYDVTSKPPSTIELE

SEQ ID NO: 166813 - protein, 85 aa, Unknown
  Bacterial polypetide isolated from the Sargasso Sea
MSKKKVLVGLSGGVDSSVSALLLKEQGHEVHALFMKNWDDDGSPYCSAKEDFMDAVFISEQLNIPLEQVSFSKEYKDNVFSYFLK

SEQ ID NO: 166814 - protein, 116 aa, Unknown
  Bacterial polypetide isolated from the Sargasso Sea
MNKKKVIIALSGGVDSSVSAYLLKEQGFDVIGVFMKIWHETNSKKNEPCPWIEDSSYALEIAEQLNIPFQVIDLSEEYKKRIIDYMFHEYSKGRTPNPDILCNKEIKFDVFLNHAL

SEQ ID NO: 166815 - protein, 102 aa, Unknown
  Bacterial polypetide isolated from the Sargasso Sea
CRKASKIVEEELWDAGVYDKVWQAYAAVGDDKAVGVVGDERKYGRIVTVRVVDSIDAMTADWTRLPNGVLEKISNRITNEIDEVTWVSYVISSKPPATIEPQ

SEQ ID NO: 166816 - protein, 106 aa, Unknown
  Bacterial polypetide isolated from the Sargasso Sea
MSLDQNLDKILIIDFGSQFTQLIARRVRELGVFSEIVSHKKIKIKDINNSIRGIVLSGGPLNVYQINKYSFDKKILKLDIPVLGICFGHQILSKLNGGSVKQSKHR

SEQ ID NO: 166817 - protein, 246 aa, Unknown
  Bacterial polypetide isolated from the Sargasso Sea
MKSKRVVIALSGGVDSSVAAYLLKEQGYDLIGLFMKNWHDENSTISDECPWLEDSNDAMLIADKLKIPFKTVDLSKEYKERIIDYMFKEYSNGRTPNPDILCNKEIKFDVFMKLALTLDADYVATGHYSQIESTNNSEYRLLQGIDKTKDQSYFLCQLNQKQLSKILFPIGHLKKSEVRDIAKKKSLITADKKDSQGLCFVGKIRLPEFLQQKLTKKKGNIIEIPSNYKGFSLKSKENQSRLNELS

SEQ ID NO: 166818 - protein, 264 aa, Unknown
  Bacterial polypetide isolated from the Sargasso Sea
MKKTKVVVALSGGVDSSVAAFLLKEQGYDLIGLFMKNWHDESVTISDECPWLEDSNDAMLVAEKLNIPFQVVDLSKDYKEKIIDYMFEEYSKGNTPNPDVLCNKEIKFDVFMDIAISLGADYVATGHYSRIKINNIRGNKTKYELHSGRDQTKDQSYFLCQLNQEQLNKILFPIGNLMKTEVREIAKKNNLVTAEKKDSQGLCFVGKVSLPDFLQQKLKKKTGNVIEIPSDSKLYDKTSNFTKDSERLKSLSDEIVYSLSDGKI

SEQ ID NO: 166819 - protein, 93 aa, Unknown
  Bacterial polypetide isolated from the Sargasso Sea
SIKGIHGLYHKIWQAYAALLPVKTVGVMGDNRTYEYLCLLRAITSEDGMTADFYEFKKSFMQIISNKIVNSIRGINRVVYDVTSKPPSTIELE

SEQ ID NO: 166820 - protein, 46 aa, Unknown
  Bacterial polypetide isolated from the Sargasso Sea
MNLNNNLKKILIIDYGSQFTQLIARRIRELGVYSIIVSHKKIKFND

SEQ ID NO: 166821 - protein, 90 aa, Unknown
  Bacterial polypetide isolated from the Sargasso Sea
KDHGLYHKIWQAYAALLPVKTVGVMGDNRTYEYLCLLRAITSEDGMTADFFEFRKSFMQTISNKIVNSIRGINRVVYDVTSKPPSTIELE

SEQ ID NO: 166822 - protein, 101 aa, Unknown
  Bacterial polypetide isolated from the Sargasso Sea
KEADHYFIQALRKNDLYHRIWQAYAALLPVKTVGVMGDNRTYEYLCLLRAITSEDGMTADFYEFKKSFIQDISNKIVNSIKGINRVVYDVTSKPPSTIELE

SEQ ID NO: 166823 - protein, 81 aa, Unknown
  Bacterial polypetide isolated from the Sargasso Sea
MAGILCIIPIKTVGVMGDERTYENTIAVRAVNSTDGMTASWSRIPYDILDLISSEIINSVKGINKVVFDISNKPPSTIEWE

SEQ ID NO: 166824 - protein, 145 aa, Unknown
  Bacterial polypetide isolated from the Sargasso Sea
KDEVRVLGKELGLIDNIRNRHPFPGPGLAIRVLGEVTKNRLEILRQADKIYIDLLKKEKLYDKIWQAFCVLLPVKTVGVMGDSRTYEYVCAVRAVTSVDGMTADYYPFDQSFLKKVSSSIINEVKGINRVVYDTTSKPPGTIEWE

SEQ ID NO: 166825 - protein, 40 aa, Unknown
  Bacterial polypetide isolated from the Sargasso Sea
SKFLFRFLERIANRIVNEVILVNRVVFDITSKPPGTIEWE

SEQ ID NO: 166826 - protein, 44 aa, Unknown
  Bacterial polypetide isolated from the Sargasso Sea
TADWTRLPNGVLEKISNRITNEIEEVTWVSYVISSKPPATIEPQ

SEQ ID NO: 166827 - protein, 115 aa, Unknown
  Bacterial polypetide isolated from the Sargasso Sea
RMPGIVTNEKIKILKEADYYFIQALRDHDLYDKIWQAYAALLPVKTVGVMGDNRTYEYLCLLRAITSEDGMTADFYEFKKSFMQRISNKIVNNIRGINRVVYDVTSKPPSTIELE

SEQ ID NO: 166828 - protein, 94 aa, Unknown
  Bacterial polypetide isolated from the Sargasso Sea
IQALRDHNLYNKIWQAYAALLPVKTVGVMGDNRTYEYLCLLRAITSEDGMTADFYDFKKSFIQIISNKIVNSIRGINRVVYDVTSKPPSTIELE

SEQ ID NO: 166829 - protein, 59 aa, Unknown
  Bacterial polypetide isolated from the Sargasso Sea
MASMISEETRNPAIVILDFGSQYSELIARRIRETEVFSLVMSYTTSADQLRSLKPKGII

SEQ ID NO: 166830 - protein, 109 aa, Unknown
  Bacterial polypetide isolated from the Sargasso Sea
MEKIIVLDFGSQYSHLICRRIREFSVYAELVPYDISPEELKKMNPKGIIFSGGPSSVYNDDAPKPDEELFDFDLPLLGICYGHQLIVNKFGGKVKRANKEYGSSLLSMD

SEQ ID NO: 166831 - protein, 133 aa, Unknown
  Bacterial polypetide isolated from the Sargasso Sea
MKRVVIGLSGGVDSSVAAYLLKEQGYEVIAMFMRNWHDESVTISNECPWIDDSNDALLVAQDLGIPFQVIDLSEAYKNRIVDYMFNEYERGRTPNPDVLCNREIKFDLFLKAALELGADYVATGHYCRKKTNE

SEQ ID NO: 166832 - protein, 55 aa, Unknown
  Bacterial polypetide isolated from the Sargasso Sea
LLRAITSEDGMTADFFKFEKSFLQNISNQIVNNIRGINRVVYDVTSKPPSTIELE

SEQ ID NO: 166833 - protein, 71 aa, Unknown
  Bacterial polypetide isolated from the Sargasso Sea
NWLVLLGDHRSYEQVCGLRAVTSVDGMTADFYPFKGEFLSKVSTRIINEVKGINRVVYDTTSKPPGTIEWE

SEQ ID NO: 166834 - protein, 169 aa, Unknown
  Bacterial polypetide isolated from the Sargasso Sea
MNSSIENIVQSNIDVSKNLVIALSGGVDSSVLAHISSKMSKNIRLVFVQHNQVHSKDLEVSAKKVAKSLNLDLEIIQTSLKSNSSETEMRDERYKHLFSNLKKDEVLLTGHNLSDKAETLLINLFRGTRLEGLKSINSENSLSSKPMINISKKEIYEYANKNDIPYSED

SEQ ID NO: 166835 - protein, 123 aa, Unknown
  Bacterial polypetide isolated from the Sargasso Sea
FPGPGLAIRIPGKINYHKIKLLQDVDEVFISYLKEKNIYNKIWQAFAVLLPVKSVGVMGDQRTYKYCVSIRAVTSVDGMTADFYMFNKKDLNEISSRIINNIDGINRVLYDFTSKPPGTIEWE

SEQ ID NO: 166836 - protein, 250 aa, Unknown
  Bacterial polypetide isolated from the Sargasso Sea
MKNKKVVIALSGGVDSSVAAYLLKKQGYSLIALFMKNWHDENLTISDECPWLEDSNDAMLIADKLKIPFKTVDLSKEYKKRIIDYMFKEYSNGRTPNPDILCNKEIKFDVFMKLALSLDADYVATGHYSQIKSTNNSKYMLLQGIDKTKDQSYFLCQLNQKQLSKILFPIGHLKKSDVRDIAKKNSLITADKKDSQGLCFVGKIRLPEFLQQQLTRKKGDIIEIPSNSKVFSLKNKGNQSRLNELSKKYK

SEQ ID NO: 166837 - protein, 94 aa, Unknown
  Bacterial polypetide isolated from the Sargasso Sea
MSKTDKERLLVALSGGVDSSVSAALLKDQGHEIEGVYVRTWEHEEDLLGDCPGAKDLADAEAVAEALGIPFRVVNFVDFYHREVVLPHGEWVRA

SEQ ID NO: 166838 - protein, 157 aa, Unknown
  Bacterial polypetide isolated from the Sargasso Sea
NLKLLEPLRNLFKDEVRVLGKELEIPDTFIGRHPFPGPGLGIRILGEITKKKVKILQEADYIFINKLKKAKLYHKIWQAFCVLLPVKTVGVMGDNRTYEYVCVIRAVSSMDGMTAESYNFNPNFITDCANEIVNNVPGINRVCYDYTSKPPGTIEWE

SEQ ID NO: 166839 - protein, 62 aa, Unknown
  Bacterial polypetide isolated from the Sargasso Sea
RQYGYVVSIRAVNTTDFMTASVSSIPHKILNSISTRIINEVDGVARVVYDITSKPPGTIEWE

SEQ ID NO: 166840 - protein, 112 aa, Unknown
  Bacterial polypetide isolated from the Sargasso Sea
GIITNEKIKILKEADYYFIQALKDHGLYHKIWQAYAALLPVKTVGVMGDNRTYEYLCLLRAITSEDGMTADYYQFKKSFMQTISNNIVNSIRGINRVVYDVTSKPPSTIELE

SEQ ID NO: 166841 - protein, 47 aa, Unknown
  Bacterial polypetide isolated from the Sargasso Sea
MKNNKVVIALSGGVDSSVAAFILKNKGYDLIGLFMKNWHDENVTISD

SEQ ID NO: 166842 - protein, 78 aa, Unknown
  Bacterial polypetide isolated from the Sargasso Sea
FAVLTDTHTVGVSGDFRTYGYLIAIRAVTSADAMTADWARLPYDVLSKISNRIANEVKDVNRVVYDITSKPPGTIEWE

SEQ ID NO: 166843 - protein, 53 aa, Unknown
  Bacterial polypetide isolated from the Sargasso Sea
RAVETVDFMTANWAHLSYDFIGKVSNRIVNEIPQISRVVYDCTGKPPATIEWE

SEQ ID NO: 166844 - protein, 35 aa, Unknown
  Bacterial polypetide isolated from the Sargasso Sea
VFHATISNKIVNSIRGINRVVYDVTSKPPSTIELE

SEQ ID NO: 166845 - protein, 70 aa, Unknown
  Bacterial polypetide isolated from the Sargasso Sea
AVGVVGDERKYGRIVTVRVVDSIDAMTADWTRLPNGVLEKISNRITNEIDEVTWVSYVISSKPPATIEPQ

SEQ ID NO: 166846 - protein, 96 aa, Unknown
  Bacterial polypetide isolated from the Sargasso Sea
NLCEYLKEKNLYDIIWQAFCVLIPIKTVGVMGDERTYENTIAIRAVNSTDGMTASWSRIPYDVLDLISSEIINSVKGINKVVFDISNKPPSTIEWE

SEQ ID NO: 166847 - protein, 44 aa, Unknown
  Bacterial polypetide isolated from the Sargasso Sea
MPNKVLILDFGSQYTQLIARRVRELNIFCEIYPYNSSKFILNDY

SEQ ID NO: 166848 - protein, 78 aa, Unknown
  Bacterial polypetide isolated from the Sargasso Sea
MINIYDRGVVILDFGSQYTQLIARRARELNVYSLILPPETSVDKILSLNPGALILSGGPSSIYDQDAPAFDQKILDVD

SEQ ID NO: 166849 - protein, 63 aa, Unknown
  Bacterial polypetide isolated from the Sargasso Sea
MEKDNLEKIIIVDYGSQVTQLIARKVREIGVYSEIINFNQAKSLKKNKYIKGIILSGGPLTIT

SEQ ID NO: 166850 - protein, 69 aa, Unknown
  Bacterial polypetide isolated from the Sargasso Sea
VGVVGDERKYGRIVTVRVVDSIDAMTADWTRLPNGVLEKISNRITNEIEEVTWVSYVISSKPPATIEPQ

SEQ ID NO: 166851 - protein, 58 aa, Unknown
  Bacterial polypetide isolated from the Sargasso Sea
HVVALRAITSSDGMTADWYPFTVDFLKTVSTRITNTVKEVNRVCYDVTSKPPATVEWE

SEQ ID NO: 166852 - protein, 36 aa, Unknown
  Bacterial polypetide isolated from the Sargasso Sea
GDSSVVAMLLHCAIGKNLTCVFVDNGLLRLNDGTQV

SEQ ID NO: 166853 - protein, 130 aa, Unknown
  Bacterial polypetide isolated from the Sargasso Sea
MTEIKNKITNLLNPNQNYVVALSGGVDSSVLLHSVRSHTSNVRSVFVNHNQKDSNKLRKSAENIAKDLDIDHSNIDTELDSGSSETKMREARYKALFDNLKHDEVLLLAHHNDDRVETFLINLFRGTRLK

SEQ ID NO: 166854 - protein, 83 aa, Unknown
  Bacterial polypetide isolated from the Sargasso Sea
MKSETETILIVDYGSQYTQLIARRIRELEVFCLVYPFNKITKKILNELKPSAFILSGGPRSVLDKNAPKLNQEILKMKKPVLA

SEQ ID NO: 166855 - protein, 162 aa, Unknown
  Bacterial polypetide isolated from the Sargasso Sea
MNSSIENIVQSNVDASKNLVIALSGGVDSSVLAHILCKISKNIRLVFVQHNQVHSKDLEASAKKIAKSLNLDLEVIQTSLKPNSSETEMRDERYKHLLSNLKKDEVLLTGHNLSDKAETLLINLFRGTRLEGLKSINSENSLSSKPMINISKKEIYEYANNK

SEQ ID NO: 166856 - protein, 55 aa, Unknown
  Bacterial polypetide isolated from the Sargasso Sea
MNSLYKNGVIILDFGSQYTQLIARRVREQNVYSEIMSPEIPLSDILKRSPSAIIL

SEQ ID NO: 166857 - protein, 82 aa, Unknown
  Bacterial polypetide isolated from the Sargasso Sea
MNKEKFLEKIVIIDYGSQFTQLIARKIRECGVYSEIISFNKIKKITNDQKIKGIILSGGPLTITKKKSEALNSNIINLNVPI

SEQ ID NO: 166858 - protein, 281 aa, Unknown
  Bacterial polypetide isolated from the Sargasso Sea
MVKKRVLLGLSGGVDSSVSGYLLKEQGFSVDAAFMRNWEDDDGSPYCSVKEDFMDAAFVADQLGIKLLEVNFSEAYKKRVFSYFLSELEAGRTPNPDILCNKEIKFDKFYKYAIENNYDFIATGHYCQVRNIKDQVCLAKGKDNNKDQSYFLHSISNKSLAKTLFPVGNLTKDHVRKIASEQDLVTSTKKDSTGICFIGERPFPEFIQNYVQKKPGPILTDQGDEIGTHIGLSFYTLGQRQGLGIGGVRNYPDLPWYVLKKDNESNALIVGQGNDNSLLFS

SEQ ID NO: 166859 - protein, 61 aa, Unknown
  Bacterial polypetide isolated from the Sargasso Sea
TYEYLCLLRAITSEDGMTADYFEFKKSFIQTVSNRIVNSIRGINRVVYDVTSKPPSTIELE

SEQ ID NO: 166860 - protein, 239 aa, Unknown
  Bacterial polypetide isolated from the Sargasso Sea
MSKGKVLVGLSGGVDSSVTALLLKEQGYEVHALFMKNWDDDDGSPYCSAKEDFMDAVFVSDQLKIPLEQISFSKEYKESVFSYFLSELKTGNTPNPDILCNKEIKFKEFYNYAMSNDYNFIATGHYAITDNQSLYKGIDNSKDQSYFLHAIDKEVLQKTIFPLGELKKEKVRQIAKENSLITSNKKDSTGICFIGERPFPEFVGGYLSREEGNIINENDDVIGIHHGLVFYTLGQRQRL

SEQ ID NO: 166861 - protein, 95 aa, Unknown
  Bacterial polypetide isolated from the Sargasso Sea
MEKIIVLDFGSQYSHLICRRIREFSVYAELVPYDISPEELKKMNPKGIIFSGGPSSVYNEDAPKPDEELFNFDLPLLGICYGHQLIVNKFGGKVK

SEQ ID NO: 166862 - protein, 106 aa, Unknown
  Bacterial polypetide isolated from the Sargasso Sea
KIKILKEADHYFINDLKKENLYNKIWQAYAALLPVKTVGVMGDNRTYDYICLLRAITSSDGMTADYFDFSKKFMQNVSNKIINNIKGINRVVYDVTSKPPSTIELE

SEQ ID NO: 166863 - protein, 30 aa, Unknown
  Bacterial polypetide isolated from the Sargasso Sea
ISRKIVNSVRGINRVVYDITSKPPGTIEWE

SEQ ID NO: 166864 - protein, 254 aa, Unknown
  Bacterial polypetide isolated from the Sargasso Sea
MKNKRVVIALSGGVDSSVAAYLLKEQGYNLIGLFMKNWHDENATISDECPWLEDSNDAMLIADKLKIPFKTVDLSKEYKERIIDYMFKEYSNGRTPNPDILCNKEIKFDVFMKLALTLDADYVATGHYSQIESTNNSEYKLLQGIDKTKDQSYFLCQLNQKQLSRILFPIGHLKKSEVRDIAKKKSLITAGKKDSQGLCFVGKIRLPEFLQQKLTKKKGNIIEIPSNLEVFSLESKENQSRLNELSKKYKFSKK

SEQ ID NO: 166865 - protein, 299 aa, Unknown
  Bacterial polypetide isolated from the Sargasso Sea
MKKKKVVVALSGGVDSSVAAFLLKNKGYELIGLFMKNWHDENVTISDECPWLDDSNDAMLVAEKLNIPFQTIDLSKEYKERIIDYMFEEYSKGNTPNPDILCNREIKFDIFMDIAISLGADYVATGHYSSIIEDKSNENTIYQLHAASDHLKDQSYFLCQLNQYQLKRIIFPLGNISKSEVRDIARKNNLITAEKKDSQGLCFVGKVSLPDFLQQKLKKKIGDVIEIPSDSYLYLNDKDKLDKYEKLEFLSSRISYKKNDGKLIGKHDGAHFFTIGQRKGLSIGGYKDPLFVISTNTSS

SEQ ID NO: 166866 - protein, 355 aa, Unknown
  Bacterial polypetide isolated from the Sargasso Sea
MSKGKVLVGLSGGVDSSVTALLLKEQGYEVHALFMKNWDDDDGSPYCSAKEDFMDAVFVSDQLKIPLEQISFSKEYKESVFSYFLSELKTGNTPNPDILCNKEIKFKEFYNYAMSNDYDFIATGHYAITDNQSLYKGIDNSKDQSYFLHAIDKEVLQKTIFPLGELKKEKVRQIAKENSLITSNKKDSTGICFIGERPFPEFVGGYLSGEEGNIINENDDVIGIHQGLVFYTLGQRQGLGIGGVKGSPDLPWYVAKKNLKTNELLCVQGNDHPLLFSRELSTKNLFKLEDSLPTSFEGTAKVRYRQEDQGCEIYVEDNALNIKFHKPQRSVTPGQSVVIYKNDKCLGGGEICTIN

SEQ ID NO: 166867 - protein, 359 aa, Unknown
  Bacterial polypetide isolated from the Sargasso Sea
MTEPIIVGLSGGVDSSVTALLLKKQGFDVECVFMKNWEGESDQCTAEEDYKDALAACNSIDIPIRSTNFSNEYWDGVFKNFIDEYSKGRTPNPDILCNKEVKFKAFLNYAADIGGSKIATGHYARIKEDDRSFKLLKGIDLNKDQSYFLYLLNQEMLSKSLFPIGDISKQEVRQIAKENGLLNHAKKDSTGICFIGEQKFFKDFLKKYIPSNPGIVKSVDGEICGEHDGLMYYTMGQRKGLGIGGGYGDNKAAWFVSDKDFNNNILIVSQGRDHPSLYHKNLNADSLHWISGKAPSRKRRLTAKIRYRQQDQHCKITSMDENTCSVEFSSPQFAITPGQSIVFYDGEVCLGGAIINGRS

SEQ ID NO: 166868 - protein, 62 aa, Unknown
  Bacterial polypetide isolated from the Sargasso Sea
MAKKRVLLGLSGGVDSSVSGYMLKEQGFSVDAAFMRNWEDDDGSPYCSVKEDFMDAAFVADQ

SEQ ID NO: 166869 - protein, 355 aa, Unknown
  Bacterial polypetide isolated from the Sargasso Sea
MSKKKVLVGLSGGVDSSVSALLLKEQGHEVHALFMKNWDDDDGSPYCSAKEDFMDAVFISEQLNIPLEQVSFSKEYKDNVFSYFLKELEAGRTPNPDILCNREIKFKEFYKYAMSQGYDYIATGHYAQTDNISLYKGVDSSKDQSYFLHAIDKEVLERTLFPLGKLEKSKVREIARNNNLITSEKKDSTGICFIGERPFPEFISNYLAGEEGNIINEKNDIIGTHSGLVFYTLGQRQGLGIGGVKGASDLPWYVAKKNLETNELTCVQGNNHPLLFSEELTTSNQFLLVDSIPEKFTGTAKVRYRQKDQDCEINILNNRINIKFASPQRSVTPGQSVVIYQDDKCLGGGEISSIN

SEQ ID NO: 166870 - protein, 92 aa, Unknown
  Bacterial polypetide isolated from the Sargasso Sea
MLEEEGLYDEIWQAFAVLIPVQTVGVMGDQRTYENLLGLRAVTSTDGMTADWYRMPPEVLSKISNKIVNSVKGINRVTYDITSKPPGTIEWE

SEQ ID NO: 166871 - protein, 27 aa, Unknown
  Bacterial polypetide isolated from the Sargasso Sea
RIINEVKGINRVVYDTTSKPPGTIEWE

SEQ ID NO: 166872 - protein, 424 aa, Unknown
  Bacterial polypetide isolated from the Sargasso Sea
MSSNIQKIIENIDLSKNYVLALSGGVDSSVLAHILAKQSAKVRLVFVQHNQKDSKKLEIIAEKISDSLNLKFKILPTSLNPKSSETKMRDERYKVLLSDLKEEEILITGHNLSDKAETLLINLFRGTRLEGLKSIKSINKKIQRPMIKISKTEIYDYANKHNLVYFDDPSNMDNKIIRNWIRNILIPEINEKFPGSFEEKIELLTNEVELRTNYKTDYLKYIKFSRGYLEIPISLLSHNSNERQLYLNEIANFLGMKSIEKNDIEKISTSLKEKKKFDFFKEWICFNSGGSIIFIDNKQWRKVTKNGDSSFIGFFEFKKINKIDIFNNWNCAHPENQDIDIRFLKNGEKIISNGISIKASEVLRNYGVDNAFRKNWPMVYVDNDLYWIVGLRKSDLAKENEKKSKKVLLQASLIKDNLYNLNNS

SEQ ID NO: 166873 - protein, 363 aa, Unknown
  Bacterial polypetide isolated from the Sargasso Sea
MNSSIENIVQSNIDASKNLVIALSGGVDSSVLAHILCKISKNIRLVFVQHNQVHSKDLEASAKKVAKSLNLDLEVIQTSLKSNSSETEMRDERYKHLLSNLKKDEVLLTGHNLSDKAETLLINLFRGSRLEGLKSINSENSLSSKPMINISKKEIYEYANKNDIPYSEDPTNKDNNIVRNWIRNFLIPEINNKFPGSFESKANQLSNEVAFRSNYDNDNLKYIKKSEGYVEIPALFIDNMSLEKQYYLNRVGKYIGMNSIEKKDIEKVEKVIDKNKKIDFFKDWICFKSGGSVLFIDKNKWIINDKSNFENYGFFNFKKISAIDIFNKWSVSIPEGSNVTIKTLQDGEKIISGNNSLKGNRNI

SEQ ID NO: 166874 - protein, 76 aa, Unknown
  Bacterial polypetide isolated from the Sargasso Sea
MDFNKIAHTENTLHAAISNDVKKLFGVQFHPEVIHSEFGMTVIKNFVYKISRCAADWTTETYIDETIPRIREQVGK

SEQ ID NO: 166875 - protein, 110 aa, Unknown
  Bacterial polypetide isolated from the Sargasso Sea
ITPEKIRILREADNIFMNELKKYKLYHKIWQAYAALLPVKTVGVMGDTRTYEHTCLLRAVTSKDGMTADHFYFPKNFLDNISNKIINNVIGINRVVYDITSKPPGTIELE

SEQ ID NO: 166876 - protein, 123 aa, Unknown
  Bacterial polypetide isolated from the Sargasso Sea
FPGPGLAIRIPGAIDENKVSILKEADDIFIKSLHEYKIYHKIWQAYAALLPVKTVGVMGDNRTYEYICLLRAITSEDGMTADYFNFKKEFMQNVSNKIVNSIKGINRVVYDVTSKPPSTIELE

SEQ ID NO: 166877 - protein, 127 aa, Unknown
  Bacterial polypetide isolated from the Sargasso Sea
MSLDLNLNKILIIDFGSQFTQLIARRVRELGVFSEIVSHKKIKLKDINNSIKGIVLSGGPLNVYQINKYSFDKKILQLGVPVLGICFGHQILSKLNGGRVKQSKHREFGLANVYKKNNSLLTTQFFG

SEQ ID NO: 166878 - protein, 385 aa, Unknown
  Bacterial polypetide isolated from the Sargasso Sea
MSNKRVVIGLSGGVDSSVAAYLLKKQGYDVIGLFMKNWHDETVTLSSECPWLEDSNDAMLVAEKIGIPFQTVDLSKEYKSRIVDYMFKEYSIGRTPNPDVLCNREIKFDLFMKIAFSLGADLIATGHYCRKSILSQNKSNTIYKLLSGKDSRKDQSYFLCQLNQEQLSKVLFPIGDLKKSEVRKIAKDLKLVTAEKKDSQGLCFIGKVSLPEFLKQRLKSKKGEIIQISSNHEVFKKYFYNKNSKSLDSLSSKFSFKPEDGELIGVHNGAHNFTIGQRKGLSIGGNVEPLFVIDINVKTNRIYVGEGKKHPGLLRYALKILKRDVHWLRKDLKLEEGESGDFQVRIRYRQPLQNATLYQTKDSLFISFYEAQSSITSGSICSMVY

SEQ ID NO: 166879 - protein, 96 aa, Unknown
  Bacterial polypetide isolated from the Sargasso Sea
MSKKKVLVGLSGGVDSSVSALLLKEQGYEVHALFMKNWDDDDGSPYCSAKEDFMDAVFISEQLNIPLEQVSFSKEYKDNVFSYFLKELEAGRTPNP

SEQ ID NO: 166880 - protein, 100 aa, Unknown
  Bacterial polypetide isolated from the Sargasso Sea
MSLDQNLNKILIIDFGSQFTQLIARRVRELGVFSEIVSHKKIKPKDINNSIKGIVLSGGPLNVYQINKYSFDKKILQLDVPVLGICFGHQILSKLNGGKS

SEQ ID NO: 166881 - protein, 55 aa, Unknown
  Bacterial polypetide isolated from the Sargasso Sea
MTDSGNLSLDQKNIDTILVLDFGSQYTQLIARRVRDFNVYSVILPWDVSLEKIKS

SEQ ID NO: 166882 - protein, 93 aa, Unknown
  Bacterial polypetide isolated from the Sargasso Sea
MNQDNLDRIIIVDYGSQVTQLIARKVREIGVYSEIINFNKSKKIRENKFIKGIILSGGPLTITKSNSLNLTDNILKLNKPILGICYGHQIRQK

SEQ ID NO: 166883 - protein, 120 aa, Unknown
  Bacterial polypetide isolated from the Sargasso Sea
PGLAIRIIGNITIEKIKILQEADFIYMNELLKNNLYDKIWQAYAALLPIKTVGVMGDSRTYEYTCLLRAVTSEDGMSADYFNFPKSFLDRISNKIVNNVKGINRVVYDISSKPPSTIELE

SEQ ID NO: 166884 - protein, 60 aa, Unknown
  Bacterial polypetide isolated from the Sargasso Sea
YENICLLRAVISEDGMTADYFNFPKFFLDSISNKIINNVKGINRVVYDITSKPPSTIELE

SEQ ID NO: 166885 - protein, 55 aa, Unknown
  Bacterial polypetide isolated from the Sargasso Sea
ALRAVTSLDGMTADYYPFEQEFLANVSTRIINEVKGINRVVYDITSKPPGTIEWE

SEQ ID NO: 166886 - protein, 106 aa, Unknown
  Bacterial polypetide isolated from the Sargasso Sea
KIKILKEADYYFIQALKDHDLYHKIWQAYAALLPVKTVGVMGDNRTYEYLCLLRAITSEDGMTADFFEFRKYFMQTISNKIVNSIRGINRVVYDITSKPPSTIELE

SEQ ID NO: 166887 - protein, 93 aa, Unknown
  Bacterial polypetide isolated from the Sargasso Sea
MIFIVDFGSQVTQLIARRVREAGVYCEIVSSKSLYRQILNRGCSGIVFSGGPASVHKSNTPKIDKRIIQFKYSNIGNLLWYAIIMLPNLVEKF

SEQ ID NO: 166888 - protein, 183 aa, Unknown
  Bacterial polypetide isolated from the Sargasso Sea
MKQKILVIDFGSQVTKLIVRRIRELGVYCEISTVKDLNKLDFFDNINGLILSGGPATVTKKKFPKIPEKIFSLNIPILGICYGLQLITKKFGGKIKSNTKQREYGRTLIINKKNSILTNSFFQNNKNEVWMSHQDCITKLPKNFKTLASSKSSKYAIIENKKRIYLVFSFIQKLVILTKGISY

SEQ ID NO: 166889 - protein, 31 aa, Unknown
  Bacterial polypetide isolated from the Sargasso Sea
MIYIVDFGSQVTQLIARRVRESGVYCEIVGS

SEQ ID NO: 166890 - protein, 116 aa, Unknown
  Bacterial polypetide isolated from the Sargasso Sea
MNQQNLQKIIIIDYGSQVTQLIARKVREIGVYSEIINFNQAKKIKKNHLIKGIILSGGPLTITSSNPLNLPNHILNLEKPILGICYGHQILAKKFGGKVKISKTREFGFAKIKSDK

SEQ ID NO: 166891 - protein, 53 aa, Unknown
  Bacterial polypetide isolated from the Sargasso Sea
RAVTSVDGMTADWFKIPDNTLTKASNKIVNNVKNVNRVVYDITSKPPGTIEWE

SEQ ID NO: 166892 - protein, 109 aa, Unknown
  Bacterial polypetide isolated from the Sargasso Sea
RQSKLEILREADAIFMEELIKQKLYNKISQAYAAFLPVKSVGVVGDARRYEYVIALRAVVTLDFMTANVFPFKQEFLNHVSTRIMNEIDKVSRVVYDISSKPPATIEWE

SEQ ID NO: 166893 - protein, 151 aa, Unknown
  Bacterial polypetide isolated from the Sargasso Sea
AFKEFFKDEVRNLGKSLELENSIRNKHPFPGPGLAIRMIGQITAKKIKILQEADYIFINELINNNLYDKIWQAYAGLLPIKTVGVMGDSRTYEYTCLLRAVISEDGMTADYFNFPKKFLDKIANKIINSVPGINRVVYDITSKPPSTIELE

SEQ ID NO: 166894 - protein, 174 aa, Unknown
  Bacterial polypetide isolated from the Sargasso Sea
MPPPNLKEKIIIVDFGSQVTKLIARRIRDLGVFCEILTIKDLFKVKDYKFIKGIVLSGGPSTVTKKKYLSIPKEIFSKKIPILGICYGLQLISKLFGGSIKSLKKKREFGRASLFKKKKSLLIQNFFKKKNISVWMSHQDAVTKLPKGFKIVASTKESKLTIIENPQSKIYGVQ

SEQ ID NO: 166895 - protein, 85 aa, Unknown
  Bacterial polypetide isolated from the Sargasso Sea
MKKNNRDKKILIIDFGSQYTQLIARRVRELGVFSEISNHKQVKKVDVDELFGIILSGGPLNVYEDKKIDFNKKILNLKVPILGVC

SEQ ID NO: 166896 - protein, 232 aa, Unknown
  Bacterial polypetide isolated from the Sargasso Sea
MHLEDTLNKILIVDFGSQFTQLIARKIRELGIYCEIISHKSIEKRKNFNKNIKGIVLSGGPLNVYENKKVKFNHNLLRLEIPILGICFGHQIISKVMGGKVKSSKFREFGLAEVTEIKKSKLTKNFFSNRKNNVWMSHADQVTKLPKNFSVIAKSNNSKMCIIQNNKKNIFGIQFHPEVSHTNKGKVILRNFIFSICKLTKNWSASDQKKKLISDVKEVVGNQKSFVHYLGV

SEQ ID NO: 166897 - protein, 95 aa, Unknown
  Bacterial polypetide isolated from the Sargasso Sea
FIRELIDNNLYNKIWQAYAALLPTKTVGVMGDSRTYEYTCLLRAVISEDGMTADYYSFPKDFLDKISNKIINGVKGINRVVYDITSKPPSTIELE

SEQ ID NO: 166898 - protein, 88 aa, Unknown
  Bacterial polypetide isolated from the Sargasso Sea
MSLDQNLNKILIIDFGSQFTQLIARRIRELGVFSEIISHKKIKLKDINHSIKGIVLSGGPLNVYQINKYSFDKKILQLDLPVLGICFG

SEQ ID NO: 166899 - protein, 106 aa, Unknown
  Bacterial polypetide isolated from the Sargasso Sea
KINILKEADHYFIQALRDHNLYHKIWQAYAALLPVKTVGVMGDNRTYEYLCLLRAITSEDGMTADFYEFKKSFIQEISNKIVNSIRGINRVVYDITSKPPSTIELE

SEQ ID NO: 166900 - protein, 188 aa, Unknown
  Bacterial polypetide isolated from the Sargasso Sea
LKKVRDCLNDCNGRFQILPVRSVGVQGDQRTYASPVALINAPRDWDWLESQATRITNEVGTVNRVVLLLGSNTKDSSDQFNFHKAFCSKDRLDLLREADYKATKFFEKHGLMPKIFQLLVILLPVSKNEEQESLVLRPVVSEDVMTAQFARIDWKLIDHLVESLLDISGIENVFYDITHKPPATFGWE

SEQ ID NO: 166901 - protein, 155 aa, Unknown
  Bacterial polypetide isolated from the Sargasso Sea
KIVEPLRELFKDEVRNVGKQLKIDKHLLSRHPFPGPGLAIRIPGIIDKKKILILQEADHIFIQYLKEKKLYNKIWQAFVVLLPVKSVGVMGDERTYNYSVSLRAITSVDGMTADFYMFTNNQLKEISSRIINKVKGINRVLYDFTSKPPGTIEWE

SEQ ID NO: 166902 - protein, 121 aa, Unknown
  Bacterial polypetide isolated from the Sargasso Sea
GPGLGIRIIGEITHDRVKILQEADNIYINELVKHDLYNKIWQAYAALLPIKTVGVMGDTRTYEYICLLRAVTSEDGMTADYFSFPAKFIDSISNKIINNVKGINRVVYDITSKPPSTIELE

SEQ ID NO: 166903 - protein, 303 aa, Unknown
  Bacterial polypetide isolated from the Sargasso Sea
MILSGGPASVYEAQTPDFNSKLLELELPILGLCYGHQLTALHFGGSIENTGSGEFGKAHLQQTHPSALWEGIDFPTQVWMSHQDSVTDLPKNFEIIAQTDGCPSAALQHRQKPIYTLQFHPEVKDTQCGSKILTNFAEICGMPKNWSMQNFINLAKEQIRQEVASRKVLMFLSGGVDSSVAFALLNEALGTDRVFGLYMDNGFMRQGESKQIMQRYQDLGYTNVEARDFSKEFLEALAGLTDPQQKRHQVGAVFIRMRERFLGELQLNPEDWMLGQGTLYPDIIESGGSEHANVIKSHHNPGG

SEQ ID NO: 166904 - protein, 75 aa, Unknown
  Bacterial polypetide isolated from the Sargasso Sea
MIFIVDFGSQVTQLIARRVREAGVYCEIVSSKSIYKQILNRGCSGIVFSGGPASVHKSNTPKIDKRIFNLNIPIL

SEQ ID NO: 166905 - protein, 70 aa, Unknown
  Bacterial polypetide isolated from the Sargasso Sea
MEEKILILDFGSQYTQLIARRIRELNIYCEIFPFNKIPEITPEYVGVILSGSPFSVHDKDSPEINFETFG

SEQ ID NO: 166906 - protein, 109 aa, Unknown
  Bacterial polypetide isolated from the Sargasso Sea
TPEKVKILQEADHIFINELINRKLYNKIWQAYAALLPMKTVGVMGDSRTYEYTCLLRAVVSEDGMTADYFNFPKDFFDKISNKIVNGVPGINRVVYDITSKPPSTIELE

SEQ ID NO: 166907 - protein, 155 aa, Unknown
  Bacterial polypetide isolated from the Sargasso Sea
KLLEPLRELFKDEVRILGNELNIPSNLVGRHPFPGPGLAIRIPGAISAEKLSILRAADDIYLQEIENFGIYNEIWQAFCVLLPVKTVGVMGDSRTYEFVCALRAVTSEDGMTADYYPFGHDFLSTVARRIVNEVKGINRVTYDITSKPPGTVEWE

SEQ ID NO: 166908 - protein, 134 aa, Unknown
  Bacterial polypetide isolated from the Sargasso Sea
KISKEIISRHPFPGPGLAIRMPGIITNEKIKILKEADYYFIQALKDHGLYHKIWQAYAALLPVKTVGVMGDNRTYEYLCLLRAITSEDGMTADFFEFKKSFLQTISNKIVNSIRGINRVVYDVTSKPPSTIELE

SEQ ID NO: 166909 - protein, 52 aa, Unknown
  Bacterial polypetide isolated from the Sargasso Sea
MTDRILIVDFGSQVTQLIARRVRESGVYCEIHPFNKVTVESICNLGPKGVIL

SEQ ID NO: 166910 - protein, 205 aa, Unknown
  Bacterial polypetide isolated from the Sargasso Sea
MSNDCLAVLDFGSQYAHLIAKRLRRQGFYTEIQTPASRASKLAHARGLILSGGPASVYEEQTPDFNSKLLELELPILGLCYGHQLTALHFGGSIENTGSGEFGKAHLQQTHPSALWKGIDFPTQVWMSHQDSVTDLPQDFEIIAQTDGCPSAALQHRQKPIYTLQFHPEVKDTLCGSEILANFSEICGMPKNWSMQNFISLAKEQ

SEQ ID NO: 166911 - protein, 64 aa, Unknown
  Bacterial polypetide isolated from the Sargasso Sea
MQEKILILDFGSQYTQLIARRVRELNVYCEIHPYNNIPILDDSIKGVILSGSPSSVREQDPPTP

SEQ ID NO: 166912 - protein, 27 aa, Unknown
  Bacterial polypetide isolated from the Sargasso Sea
RIVNEVPEVNRVVYDITSKPPGTIEWE

SEQ ID NO: 166913 - protein, 100 aa, Unknown
  Bacterial polypetide isolated from the Sargasso Sea
IEGNVLCGVSGGIDSTVAALLIHKAIGDRQTGVFVDNGLLRLDESKEIEDMFKNNFSLNFHRVDASEQFLSKLKGITDPEQKRRIVGEEFIQVFTELQNK

SEQ ID NO: 166914 - protein, 61 aa, Unknown
  Bacterial polypetide isolated from the Sargasso Sea
MLVIDFGSQVTQLIARRLRELNVYCEIHPFQKIKLNLLKKISPLAIILSGGPKSVLDNNSP

SEQ ID NO: 166915 - protein, 159 aa, Unknown
  Bacterial polypetide isolated from the Sargasso Sea
KMNLKLVEPLNSLFKDEVRILGKELGLSDDIRNRHPFPGPGLAIRILGEVTKNRLEILRQADKIYIDLLKKEKLYDKIWQAFCVLLPVKTVGVMGDSRTYENVCAIRAVTSVDGMTADYYPFDQVFLKKVSNNIINKVKGINRVVYDTTSKPPGTIEWE

SEQ ID NO: 166916 - protein, 202 aa, Unknown
  Bacterial polypetide isolated from the Sargasso Sea
MRLEDSLNKILIVDFGSQFTQLIARKIRELGIYCEIISHNKIAKKRNLDKNVKGLILSGGPLNVYQNKKTKFNKQLLHNNIPVLGICFGHQIISKEMGGKVKKSKSREFGLAKVKRVKNSILTKNFFNKGENNVWMSHADEVTKLPKNFKVVAKSSNSKLCIVENTKKNLYGIQFHPEVTHTNKGKIILKNFVFDICKLRKN

SEQ ID NO: 166917 - protein, 135 aa, Unknown
  Bacterial polypetide isolated from the Sargasso Sea
MSLDQNLNKILIIDFGSQFTQLIARRVRELGVYSEIVSHKKIKLKDINNSIKGIVLSGGPLNVYEINKYSFNKKILQFDVPFLGICFGHQILSKLNGGRVKQSKHREFGLANVYKKNDSLLTSNFFGNKKSKQVG

SEQ ID NO: 166918 - protein, 78 aa, Unknown
  Bacterial polypetide isolated from the Sargasso Sea
MQDRILILDFGSQYTQLIARRVREAGVYSEIYVGDIGIDAIESFQPSGLILSGGPESAFIDDAPRPSKEIYSIGLPIL

SEQ ID NO: 166919 - protein, 74 aa, Unknown
  Bacterial polypetide isolated from the Sargasso Sea
LPVKTVGVMGDNTTYEYLCLLRAITSEDGMTADFFEFKKSFSQMISNKIVNSIRGINRVVYDITSKPPSTIELE

SEQ ID NO: 166920 - protein, 166 aa, Unknown
  Bacterial polypetide isolated from the Sargasso Sea
MFGGLPKKMKLKLVEPLRLLFKDEVRKLGLELKLSQQIISRHPFPGPGLAIRMPGTITKEKIKILKEADNYFISELKKENLYNKIWQAYAALLPVKTVGVMGDNRTYEYICLLRAITSSDGMTADYFDFSKKFMQNVSNKIINNIQGINRVVYDVTSKPPSTIELE

SEQ ID NO: 166921 - protein, 57 aa, Unknown
  Bacterial polypetide isolated from the Sargasso Sea
MCLLRAITSEDGMTADFFNFSKQFMQLVSNKIINNIKGINRVVYDITSKPPSTIELE

SEQ ID NO: 166922 - protein, 61 aa, Unknown
  Bacterial polypetide isolated from the Sargasso Sea
RYEHVIALRAVETIDFMTARSARLPYEFVDKVSNRIMNEISQVSRVVYDISSKPPSTIEWE

SEQ ID NO: 166923 - protein, 113 aa, Unknown
  Bacterial polypetide isolated from the Sargasso Sea
MLKINLDKNLAKILIIDYGSQFTQLIARRIRELGVYSEIISHKRVKLSDISSKHVSGLILSGGPLNVYQSNKIKFDKRILNLGIPILGICFGHQILSKELGGKVKKSKSREFG

SEQ ID NO: 166924 - protein, 91 aa, Unknown
  Bacterial polypetide isolated from the Sargasso Sea
MYFQNNKEIILIIDFGSQVTKLIARRIRDLGVYSEVITPQEVHKIENFNNIKGIILSGGPSTVTKDKYQTIPKYLFEKKIPIFLEYAMVYN

SEQ ID NO: 166925 - protein, 77 aa, Unknown
  Bacterial polypetide isolated from the Sargasso Sea
CVLLPVKSVGVMGDARSYENALVLRAITSVDGMTADVYPFENKFLSRVATRIVNEVEGINRVVYDITSKPPGTIEWE

SEQ ID NO: 166926 - protein, 57 aa, Unknown
  Bacterial polypetide isolated from the Sargasso Sea
CIAIRAVDSKDAMTADWSKIPYEILSNISSRIINEVDGVNRVVYDITSKPPSTIEWE

SEQ ID NO: 166927 - protein, 54 aa, Unknown
  Bacterial polypetide isolated from the Sargasso Sea
MRAVSSEDGMTADYFNLPKKFIDNISNKIINNVKGINRVVYDITSKPPSTIELE

SEQ ID NO: 166928 - protein, 154 aa, Unknown
  Bacterial polypetide isolated from the Sargasso Sea
LIEPLKEFFKDEVRILGKSLGLDKSINLKHPFPGPGLGIRIVGNVTSERIKILQEADYIYINELEKSGLYNKIWQAYAALLPIKTVGVMGDSRTYEHICLLRAVISEDGMTADYYSFPKNFLDKISNKIINNVKGINRVVYDITSKPPSTIELE

SEQ ID NO: 166929 - protein, 88 aa, Unknown
  Bacterial polypetide isolated from the Sargasso Sea
MTKALTEQQADKGAGTENRILVIDFGSQVTQLIARRLRESGVYTEIVPYSSSEKKLKTFKPRGIILSGGPSSVTSERAPSVPNAIFES

SEQ ID NO: 166930 - protein, 77 aa, Unknown
  Bacterial polypetide isolated from the Sargasso Sea
AAFLPVKSVGVVGDARRYEYVIALRAVVTLDFMTANVFPFKPEFLNHVSTRIMNEIDKVSRVVYDISSKPPATIEWE

SEQ ID NO: 166931 - protein, 122 aa, Unknown
  Bacterial polypetide isolated from the Sargasso Sea
MKSKLDTILIVDYGSQYTQLIARRIRELEVFCLVYPFNKITKKILNEIKPSAFILSGGPRSVLDKNAPKLNQEILKMKKPVLAICYGMQLVTKNLKGEVKRSTHREYGHTIINIRKKSLLFK

SEQ ID NO: 166932 - protein, 108 aa, Unknown
  Bacterial polypetide isolated from the Sargasso Sea
MVLDFGSQYTQLIARRVRESNVYSEIFPWDINEKKILDLNPKGVILSGGPNSVTDSFTPRIPQCIFELNVPILGICYGMQTLAEQMGGQVVSADKKEFGHTNLEIENE

SEQ ID NO: 166933 - protein, 87 aa, Unknown
  Bacterial polypetide isolated from the Sargasso Sea
GLYNEIWQAFSVLIPVKTVGVMGDQRTYENLLGIRAVTSTDGMTADWFRMPKETLSKISNRIVNSVRGINRVVYDITSKPPGTIEWE

SEQ ID NO: 166934 - protein, 60 aa, Unknown
  Bacterial polypetide isolated from the Sargasso Sea
YEHVIALRAVETIDFMTARSARLPYEFVDKVSNRIMNEISQVSRVVYDISSKPPSTIEWE

SEQ ID NO: 166935 - protein, 30 aa, Unknown
  Bacterial polypetide isolated from the Sargasso Sea
VSTRIINEVKGINRVVYDITSKPPGTIEWE

SEQ ID NO: 166936 - protein, 118 aa, Unknown
  Bacterial polypetide isolated from the Sargasso Sea
LAIRMPGVITKDKIKILKEADYYFVKSLKENNLYDKIWQAYAALLPVKTVGVMGDNRTYEYLCLLRAITSEDGMTADFFEFKKSFMQSISNKIVNNIRGINRVVYDITSKPPSTIELE

SEQ ID NO: 166937 - protein, 131 aa, Unknown
  Bacterial polypetide isolated from the Sargasso Sea
DEILNRHPFPGPGLAIRIPGAIDENKVSILKEADDIFIKSLHEYKIYHKIWQAYAALLPVKTVGVMGDNRTYEYICLLRAITSEDGMTADYFNFKKEFMQNVSNKIVNSIKGINRVVYDVTSKPPSTIELE

SEQ ID NO: 166938 - protein, 68 aa, Unknown
  Bacterial polypetide isolated from the Sargasso Sea
GVVGDERRYADVIAIRAVETVDFMTATWARLPYDFLAHVSNRIVNELEGVSRVVYDISSKPPATIEWE

SEQ ID NO: 166939 - protein, 143 aa, Unknown
  Bacterial polypetide isolated from the Sargasso Sea
MRFQKENEKILIVDFGSQVTKLIARRVRDLGVYSEVVTPIEIKNIKNFNFVKGLILSGGPSSVTKKKFQSLPKNILLKKIPILGICYGLQLISKLYGGKIRSSKKRREFGRAYIFKKKESELTKNFFKAKSAVWMSHEDAVVK

SEQ ID NO: 166940 - protein, 61 aa, Unknown
  Bacterial polypetide isolated from the Sargasso Sea
NLRIFCLLRAITSEDGMTADFFNFKKDFMQDVSNKIINNIKGINRVVYDITSKPPSTIELE

SEQ ID NO: 166941 - protein, 84 aa, Unknown
  Bacterial polypetide isolated from the Sargasso Sea
MKKNNRDKKILIIDFGSQYTQLIARRVRELGVFSEISNHKQLKKVDVEELFGIILSGGPLNVYEDKKINFNKKILNLKVPILGL

SEQ ID NO: 166942 - protein, 240 aa, Unknown
  Bacterial polypetide isolated from the Sargasso Sea
KKNGVLILDFGSQYTKLIARRVREENIYSQIVSHDISLDGVLDNQPAALILSGGPSSVFEKNALKIDPKILELEIPIFGICYGLQLLAHNYGGIVEEKEKGEYGFSELSLDSSHNIFSKVPSKINAWMSHMDQVTKLPSNWKVIAQSSNKIIAAIANEDSTRVATQFHPEVAHTEFGKEILRNFLINIAQCPTNWTPSNFINDQVSKIKNDVGSEKLIIGVSGGVDSTVAAALIHKAMAI

SEQ ID NO: 166943 - protein, 122 aa, Unknown
  Bacterial polypetide isolated from the Sargasso Sea
PGPGLAIRIPGDITENKINILKEADDIFINALKEYNLYKKIWQAYAALLPIKTVGVMGDNRTYEYMCLLRAITSEDGMTADFFSFSKEFMQLVSNKIINNINGINRVVYDITSKPPSTIELE

SEQ ID NO: 166944 - protein, 131 aa, Unknown
  Bacterial polypetide isolated from the Sargasso Sea
MNSDKKNEIDRIRTSGDNEVAAYLEVASTKEVDPVYLDVPNSPETIIVIDYGSQYSMLITRRIRESNIYSELVPWDIDFDQISHLNIKGFILSGGPDSVSSAGAPTLPDFVINSKLPVLGICYGMQLLAQS

SEQ ID NO: 166945 - protein, 135 aa, Unknown
  Bacterial polypetide isolated from the Sargasso Sea
LNLSKDIISRHPFPGPGLAIRMPGVITKEKINILKEADHYFIQALKKHGLYHKIWQAYAALLPVKTVGVMGDNRTYEYLCLLRAITSEDGMTADFFEFKKSFIQEISNKIVNSIRGINRVVYDITSKPPSTIELE

SEQ ID NO: 166946 - protein, 73 aa, Unknown
  Bacterial polypetide isolated from the Sargasso Sea
MTERAIDHLQNQWLLILDFGSQYTQLIARRVRECGVYCEIQAFDVEESYFDERQPRGVILSGGPETVTAGGTP

SEQ ID NO: 166947 - protein, 53 aa, Unknown
  Bacterial polypetide isolated from the Sargasso Sea
MSLDKNLDKILIIDFGSQFTQLIARRIRESGVYSEIISHKKVKNKNIDNSIKG

SEQ ID NO: 166948 - protein, 189 aa, Unknown
  Bacterial polypetide isolated from the Sargasso Sea
MQFHKEREKILIIDFGSQVTKLIGRNIRELGVYSEIVTIKDFQKIKEFHFIKGIIFSGGPSSVTSKNHQTVSKKIFEKNIPILGICYGLQLIAKLFGGKIKPSRGTREFGRAYLTKKKHSQLTKNFFKRKTTVWMSHEDAVVKLPKSFKIIASTKNSKLTIIENSQKKIYGVQFHPEITHTENGKQIFK

SEQ ID NO: 166949 - protein, 98 aa, Unknown
  Bacterial polypetide isolated from the Sargasso Sea
MNINSYDCLLIVDFGSQVTQLIARRLREINVYCEIHPYQNVNESLLSQLSPKAIILSGGPDSVTRDGSPRAHSTIFDIGVPLLGDLLWPASDDAAAWW

SEQ ID NO: 166950 - protein, 141 aa, Unknown
  Bacterial polypetide isolated from the Sargasso Sea
EMLESNLKIDKHLLLRHPFPGPGLAIRIPGVIDKKKILILQEADHIFIQYLKEKKLYNKIWQAFVVLLPVKSVGVMGDERTYNYSVSLRAITSVDGMTADFYMFTNNQLKEISSRIINKVKGINRVLYDFTSKPPGTIEWE

SEQ ID NO: 166951 - protein, 230 aa, Unknown
  Bacterial polypetide isolated from the Sargasso Sea
MQDFIAVLDFGSQYTHLISKRIRHIGAYTKIFSPSSNENSLAEAKGIVLSGGPASVNSSNAPKFNSKLLELDKPILGLCYGHQLIAQSFGGSISNTGKGEFGKAILVHKSDSPLWENIPFPNLVWMSHQDSVTKCPEEFEVTAETETGSLAALKHCQRPIFTLQFHPEVTDTSQGRIMLKNFVNACGVRSRWSMKSFIEVTTKRLSNEVGNRKVLMFLSGGVDSSVAFAL

SEQ ID NO: 166952 - protein, 62 aa, Unknown
  Bacterial polypetide isolated from the Sargasso Sea
RRYEYVIALRAVETIDFMTAKSAKLPHTFLEKVSNRIINEIPEVSRVTYDVSSKPPATIEWE

SEQ ID NO: 166953 - protein, 98 aa, Unknown
  Bacterial polypetide isolated from the Sargasso Sea
TISLLEELKKNNLYNKISQALAVFLPIKSVGVMGDQRQYSYVVALRAVRTIDFMTASVSEIPYNILNIISTRIVNEVNGVSRVVYDITSKPPGTIEWE

SEQ ID NO: 166954 - protein, 99 aa, Unknown
  Bacterial polypetide isolated from the Sargasso Sea
ADEIFINSLKEEQEYDNIWQAFAVLIPVKTVGVMGDQRTYENLIALRAVTSLDGMTADWYRMPSEVLSKISNKIVNHVVGVNRVVYDITSKPPGTIEWE

SEQ ID NO: 166955 - protein, 141 aa, Unknown
  Bacterial polypetide isolated from the Sargasso Sea
MEKIIVLDFGSQYSHLICRRIREFSVYAELVPYDISPEELQKMNPKGIIFSGGPSSVYNEDAPKPDEELFNFDLPLLGICYGHQLIVNKFGGKVKRANKEYGSSLLSMDKNSGLLDGIGESIRAWMSHGDEAEEIPSNLKL

SEQ ID NO: 166956 - protein, 39 aa, Unknown
  Bacterial polypetide isolated from the Sargasso Sea
VDFGSQYTQLIARAVRALGVYCELHPYDIEEQYIRDFCT

SEQ ID NO: 166957 - protein, 282 aa, Unknown
  Bacterial polypetide isolated from the Sargasso Sea
NAPEFNSKLLKLDKPILGLCYGHQLIAQLFGGSVSNTGKGEFGKAKLVQKSESPLWKNISFPNQIWMSHQDSVTKCPKEFEVTAETETGCLAALKHRQLPIYTLQFHPEVSDTSYGKIMLKNFVNACCVSSRWSMDTFIEFMTKRLNNEVGDRKVLMFLSGGVDSSVAFALLNKTLGKDKLLGLYINNGFMRKHESEEILTRYSQLGYKNIQSRNYSSFFLDAIKGQVEPQNKRQIIGATFIKMRDRFLSELNLNPHEWMLGQGTLYPDIIESGGTEHSEVI

SEQ ID NO: 166958 - protein, 125 aa, Unknown
  Bacterial polypetide isolated from the Sargasso Sea
MASPPSIRLLPRSDVVALPPPTSLALARVPITPPQKRITDLDPSVVILSGGPNSVHVEGAPTVPEGFFDHCAARSIPVLGICYGMQLIVQRLGGEVESAEKAEYGRMPVHTVNDSVLYGEEMDAT

SEQ ID NO: 166959 - protein, 157 aa, Unknown
  Bacterial polypetide isolated from the Sargasso Sea
MQFHKEREKILVIDFGSQVTKLIGRNIRELGVYSEIVNLKDFKKIREFHLIKGIIFSGGPSSVTSKKYQTISKKIFEKNIPILGICYGLQLIAKLFGGKIKPSRGAREFGRAHLIEVNHSQLTKNFLKKKTTVWMSHEDAVVKLPKSFKIIASTKSS

SEQ ID NO: 166960 - protein, 154 aa, Unknown
  Bacterial polypetide isolated from the Sargasso Sea
ILEPLRELYKDEVRDVARILGVPEKLLKRHPFPGPGLSVRIMGEITPSKLAICRKASKIVEEELWDAGVYDKVWQAYAAVGDDKAVGVVGDERKYGRIVTVRVVDSIDAMTADWTRLPNGVLEKISNRITNEIDEVTWVSYVISSKPPATIEPQ

SEQ ID NO: 166961 - protein, 115 aa, Unknown
  Bacterial polypetide isolated from the Sargasso Sea
MTPNKSLNKILIIDFGSQFTQLIARRVRELGVFSEIISHKKIKYKNIDISVKGIILSGGPLNVYEIKKYSFDKKILKNKIPVLGICFGHQILSKLNGGRVKQSKHREFGLANIYK

SEQ ID NO: 166962 - protein, 118 aa, Unknown
  Bacterial polypetide isolated from the Sargasso Sea
MSLDQNLNKILIIDFGSQFTQLIARRVRELGVFSEIVSHKKIKPKDINISIKGIILSGGPLNVYQINKYSFDKKILLLDVPVLGICFGHQILSKLNGGRVKQSKHREFGLADVYKKNN

SEQ ID NO: 166963 - protein, 64 aa, Unknown
  Bacterial polypetide isolated from the Sargasso Sea
MNLKDDLSKILIIDFGSQFTQLIARRVREFGIYSEIISHKKINKKLNKKKINGIILSGGPLNVY

SEQ ID NO: 166964 - protein, 110 aa, Unknown
  Bacterial polypetide isolated from the Sargasso Sea
ITQEKIDILKEADFIFINELKKSNLYNKIWQAYVALLPLKTVGVMGDKRTYEYTCLLRAVTSEDGMTADFFYFDKNFTQKISNKIINSVNGINRVVYDITSKPPSTIELE

SEQ ID NO: 166965 - protein, 50 aa, Unknown
  Bacterial polypetide isolated from the Sargasso Sea
TSEDGMTADFFYFDKNFTQKISNKIINSVNGINRVVYDITSKPPSTIELE

SEQ ID NO: 166966 - protein, 68 aa, Unknown
  Bacterial polypetide isolated from the Sargasso Sea
GVMGDQRTYENLLGIRAVTSTDGMTADWFRMPKETLSKISNRIVNSVRGINRVVYDITSKPPGTIEWE

SEQ ID NO: 166967 - protein, 68 aa, Unknown
  Bacterial polypetide isolated from the Sargasso Sea
GVVGDERRYAELIGLRAVETVDFMTAKWAHLPYDFLELVSNRIVNEIEDVSRVVYDISSKPPATIEWE

SEQ ID NO: 166968 - protein, 155 aa, Unknown
  Bacterial polypetide isolated from the Sargasso Sea
MPNKVLILDFGSQYTQLIARRVRELNIFCEIFPYNSSNFILKDYSAVILSGSPYSVRSKDALKINLDKIKGTTPLLGICYGAQYLAHNYGGLVDLSNSREYGRANLISISSESNLLDGINQGSQVWMSHADTIVKLPKNSVRIGSTLDVKMRHSV

SEQ ID NO: 166969 - protein, 54 aa, Unknown
  Bacterial polypetide isolated from the Sargasso Sea
VNAEDIFLERLKGIDDPEDKRKIIGQTFIEVFEDEASKLENVKWLAQGTIYPDV

SEQ ID NO: 166970 - protein, 172 aa, Unknown
  Bacterial polypetide isolated from the Sargasso Sea
MKESVLIIDFGSQVTKLIARRIRELGVFSKIIPYDKVSKKTINQKNIKGVIFSGGPKSVNERNSPRILPFIYDSNIPILGICYGLQLISKNFGGIISPSDDREFGKTNLFSKKNSPLIDGVVDLKKKHQVWMSHADKVERIPNGFETIASTENCQYAIIQNLKKQIFGVQFH

SEQ ID NO: 166971 - protein, 138 aa, Unknown
  Bacterial polypetide isolated from the Sargasso Sea
GLELNLPKKIIFRHPFPGPGLAIRMPGIITKDKIKILKDADEIFIKSLITNNLYDKIWQAYAALLPVKTVGVMGDNRTYEYICLLRAITSEDGMTADFFTFKKDFIQSVSNKIINSIEGINRVVYDVTSKPPSTIELE

SEQ ID NO: 166972 - protein, 157 aa, Unknown
  Bacterial polypetide isolated from the Sargasso Sea
NLKILEPLRELYKDEVRDVARILGVPEKLLKRHPFPGPGLSVRIMGEITPSKLAICRKASKIVEEELWDAGVYDKVWQAYAAVGDDKAVGVVGDERKYGRIVTVRVVDSIDAMTADWTRLPNGVLEKISNRITNEIDEVTWVSYVISSKPPATIEPQ

SEQ ID NO: 166973 - protein, 253 aa, Unknown
  Bacterial polypetide isolated from the Sargasso Sea
NPKDWMLGQGTLYPDIIESGGTEHAEVIKSHHNRVKEVLDLISSGNVVEPLKDLYKDEVRKVGTLLGLPESIVSRHPFPGPGLSINVLCANGDESFPKIEKTLKEVKYCLKDDDCDSLILPVQSVGVQGDQRTYACPVVLLNTPRDWDWLESQSALITNKVRAVNRVVLFLGSNINYADAKFKLQKAFCSKERIDLLREADYRATKMLEKHGLMNQIFQLLVILVPVSKNGKDESLVLRPVVSEDVMSAQFAR

SEQ ID NO: 166974 - protein, 39 aa, Unknown
  Bacterial polypetide isolated from the Sargasso Sea
MTLNQNLEKIIIIDFGSQFTQLIARRIREANVFCEIVSH

SEQ ID NO: 166975 - protein, 37 aa, Unknown
  Bacterial polypetide isolated from the Sargasso Sea
MILDFGSQYSQLIARRVREAGVYSELFPWDVSPKKVV

SEQ ID NO: 166976 - protein, 177 aa, Unknown
  Bacterial polypetide isolated from the Sargasso Sea
MSKSVLIIDFGSQYTHLIGRKIRELGIYAEIYPPKYLNNVTNILNHSVLILSGGPDSVLNKNAPKIDIPLDQIPIPILGICYGFQYISKEFNGVIEKSNQREYGKTIIKISKSDLFKDTNSEQQVWMSHGDSLAKIPKGFKVLAKTKNKIPAAIYKKNIYAIQFHCEVTHSELEIRF

SEQ ID NO: 166977 - protein, 45 aa, Unknown
  Bacterial polypetide isolated from the Sargasso Sea
MTADWSKIPFQILERISNRIVNEVVSVNRVVYDITSKPPGTIEWE

SEQ ID NO: 166978 - protein, 88 aa, Unknown
  Bacterial polypetide isolated from the Sargasso Sea
MNSKSEIHNEESIIIVDFGSQFSHLIARRLREINIYSILISPSSDFDAVKRLNPKGIILSGGPYSVYDTNAPLAPDWVYTSNLPILGI

SEQ ID NO: 166979 - protein, 50 aa, Unknown
  Bacterial polypetide isolated from the Sargasso Sea
SSTDGMTADWCHLPYEFLAKTSNDIINKVKGINRVTYDISSKPPATIEWE

SEQ ID NO: 166980 - protein, 131 aa, Unknown
  Bacterial polypetide isolated from the Sargasso Sea
MKKNNRDKKILIIDFGSQYTQLIARRVRELGVFSEISNHKQVKKVDVEELFGIILSGGPLNVYEDKKINFNKKILNLKVPILGLCFGHQLISRHYGGKVITAKNREFGLATIKKKLNSKLTKNFFDNRKQR

SEQ ID NO: 166981 - protein, 30 aa, Unknown
  Bacterial polypetide isolated from the Sargasso Sea
ISNKIVNNIRGINRVVYDITSKPPSTIELE

SEQ ID NO: 166982 - protein, 144 aa, Unknown
  Bacterial polypetide isolated from the Sargasso Sea
MKLGNLGLDLNLSKEVVSRHPFPGPGLAIRMPGIITKNKINMLKEADHYFINALKEYKLYDRIWQAYAALLPVKTVGVMGDNRTYEYICLLRAITSEDGMTADFFEFNKSFMQFVSNQIINNIRGINRVVYDITSKPPSTIELE

SEQ ID NO: 166983 - protein, 77 aa, Unknown
  Bacterial polypetide isolated from the Sargasso Sea
AGLLPMKTVGVMGDSRTYEYTCLLRAVVSEDGMTADYFNFPKDFLDKISNKIVNGVPGINRVVYDITSKPPSTIELE

SEQ ID NO: 166984 - protein, 60 aa, Unknown
  Bacterial polypetide isolated from the Sargasso Sea
MSKDIIKDRILILDFGSQYTQLIARRVREMGVYCEIYHHKSSFSAIKKFNPQGVILSGGP

SEQ ID NO: 166985 - protein, 59 aa, Unknown
  Bacterial polypetide isolated from the Sargasso Sea
MLSAENQKEKKKIIIIDFGSQLTKLIARRVRELGVYCEILNLKEFKTIKNFNSVKGIIL

SEQ ID NO: 166986 - protein, 35 aa, Unknown
  Bacterial polypetide isolated from the Sargasso Sea
QLTCVFVDNGLLRLNEAAQVMETFAKHMGNKCYSH

SEQ ID NO: 166987 - protein, 139 aa, Unknown
  Bacterial polypetide isolated from the Sargasso Sea
LGKSLGLDSLILKKHPFPGPGLAIRILGKITENKIKILQNADDIFIDSLIKNNIYDKIWQAYAALLPIKTVGVMGDTRTFEYTCLLRAVTSEDGMTAAKYDFNNEYLSQVSNKIINGVSGINRVVYDITSKPPSTIELE

SEQ ID NO: 166988 - protein, 71 aa, Unknown
  Bacterial polypetide isolated from the Sargasso Sea
KSVGVVGDERRYEDVIAIRAVETVDFMTATWAKLPYDFLAHVSNRIVNELEGVSRVVYDISSKPPATIEWE

SEQ ID NO: 166989 - protein, 105 aa, Unknown
  Bacterial polypetide isolated from the Sargasso Sea
VKILQHSDKIYIDLLHEDKLYNDIWQAFAILVPVKTVGVMGDQRTYENLIALRAVTSEDGMTADWFKMPSKTLQKISSKIINNVKGVNRVVYDITSKPPGTIEWE

SEQ ID NO: 166990 - protein, 147 aa, Unknown
  Bacterial polypetide isolated from the Sargasso Sea
LFKDEVRKLGLELGLNREIISRHPFPGPGLAIRMPGKITKDKIRILKEADNYFIQSLKNNNLYDKIWQAYAALLPVKTVGVMGDNRTYEYLCLLRAITSEDGMTADFYQFNKSYIQSISNKIVNNIKGINRVVYDVTSKPPSTIELE

SEQ ID NO: 166991 - protein, 105 aa, Unknown
  Bacterial polypetide isolated from the Sargasso Sea
MNQENLDKIIIVDYGSQVTQLIARKVREIGVYSEIINFNKSKKIKENKYIKGIILSGGPLTITKSNSLNIPNNILKLKKPILGICYGHQILAKKFGGKVKISKTR

SEQ ID NO: 166992 - protein, 115 aa, Unknown
  Bacterial polypetide isolated from the Sargasso Sea
RIPGEVDKQKIDILQRVDKIYIKYLKDNMIYDKIWQAFAVLLPVKSVGVMGDERTYNYTISLRAVTSVDGMTADFYMFNKTELTNISKEIISQVKEVNRVLFDFTSKPPGTIEWE

SEQ ID NO: 166993 - protein, 122 aa, Unknown
  Bacterial polypetide isolated from the Sargasso Sea
PGPGLGIRVIGEVNEKRLQRLREADHIFLTELKNYDLYYSASQAYAFYMPIKSVGVVGDNRIYADVIGLRSVNTTDFMTAKATNLPHEFVEHVSTRIVNEIDGISRVVYDITSKPPATIEWE

SEQ ID NO: 166994 - protein, 72 aa, Unknown
  Bacterial polypetide isolated from the Sargasso Sea
MKNDSILIIDFGSQVTQLIARRLRETGVYTEILPCTTTADKIGAAKPRGIILSGGPASVAMADTPRAPQIIF

SEQ ID NO: 166995 - protein, 133 aa, Unknown
  Bacterial polypetide isolated from the Sargasso Sea
MEDKVLILDLGSQYTQLIARRVRELNIYCEIFPFNKPLINFSSYKAVILSGSPHSVLGKNSPKIDLSCVKGKIPLLGICYGAQYLAHFYDGEVSPSKTREYGRATLKIVNSKSNFFKNIPNDSQIWMSHSDTI

SEQ ID NO: 166996 - protein, 36 aa, Unknown
  Bacterial polypetide isolated from the Sargasso Sea
KNFLDKISNKIINNVKGINRVVYDITSKPPSTIELE

SEQ ID NO: 166997 - protein, 146 aa, Unknown
  Bacterial polypetide isolated from the Sargasso Sea
MESILIVDYGSQYTQLIARKIRELEVFCLVYPFNKITKKILNELKPTAFVLSGGPKSVLEKNAPKLSQDILNMHKPILAICYGMQLVAKNYKGKIKSSTNREYGHTIINIKKKSLIFKGINKKRLKVWMSHGDNIFQIPKLFSTTS

SEQ ID NO: 166998 - protein, 141 aa, Unknown
  Bacterial polypetide isolated from the Sargasso Sea
MKDFIAILDFGSQYTHLISKRIRHIGAYTRIFSPSSNDTSLSMAKGIILSGGPASVNSSNLPKFNSKLLKLDKPILGLCYGHQLIAQSFGGTISNTCRGEYGKAMLKYKSDSPLWKNISFPNQVWMSHQDSVTKCPIEFEV

SEQ ID NO: 166999 - protein, 158 aa, Unknown
  Bacterial polypetide isolated from the Sargasso Sea
MNLKLVEPLKYLFKDEVRKLGLELGLNREIISRHPFPGPGLAIRMPGKITKEKIKILKEADNYFIQSLKNNNLYDKIWQAYAALLPVKTVGVMGDNRTYEYLCLLRAITSEDGMTADFYQFNKSYIQSISNKIVNNIKGINRVVYDVTSKPPSTIELE

SEQ ID NO: 167000 - protein, 125 aa, Unknown
  Bacterial polypetide isolated from the Sargasso Sea
MSQVSLKKIIIIDFGSQFTQLIARRVRELGVYSEIISHKKKIILQKEDIIGFILSGGPLNVYQTKKVSFDKKILDLGIPILGICFGHQIISKELGGRVKESKHREFGLAQIKEIKSSALTKNFFS

SEQ ID NO: 167001 - protein, 54 aa, Unknown
  Bacterial polypetide isolated from the Sargasso Sea
MRAVETVDFMTANWAHLPYDFIGKVSNRIVNEIPLISRVVYDCTGKPPATIEWE

SEQ ID NO: 167002 - protein, 34 aa, Unknown
  Bacterial polypetide isolated from the Sargasso Sea
MQDRILILDFGSQYTQLIARRVREAGVYSEIYVR

SEQ ID NO: 167003 - protein, 111 aa, Unknown
  Bacterial polypetide isolated from the Sargasso Sea
IITKEKISILKEADYYFIKALRDYGLYDKIWQAYAALLPVKTVGVMGDNRTYEYLCLLRAITSEDGMTADFYEFKKSFAQMISNKIVNSIRGINRVVYDITSKPPSTIELE

SEQ ID NO: 167004 - protein, 45 aa, Unknown
  Bacterial polypetide isolated from the Sargasso Sea
MTADFFQFKKSFMQSISNQIVNNIRGINRVVYDITSKPPSTIELE

SEQ ID NO: 167005 - protein, 80 aa, Unknown
  Bacterial polypetide isolated from the Sargasso Sea
QAFVVYLPIKSVGVVGDERRYEDVLALRAVETVDFMTANWAHLPYDFIGKVSNRIVNEIPLVSRVVYDCTGKPPATIEWE

SEQ ID NO: 167006 - protein, 147 aa, Unknown
  Bacterial polypetide isolated from the Sargasso Sea
MRLEDTLNKILIVDFGSQFTQLIARKIRELGVYCEIISHKKIEKYQNFEKNIKGIVLSGGPLNVYESKKVKFNSKILKLGNPVLGICFGHQIISKTMGGSVRNSKYREFGLAEVKEIKKSKLTKDFFSKGKNNVWMSHADQVTKLPK

SEQ ID NO: 167007 - protein, 115 aa, Unknown
  Bacterial polypetide isolated from the Sargasso Sea
MKIINETILIIDYGSQYTQLIARKIREQNVYCEVYPYNKISSSILNNKDLSGIILSGGPNSVKDKKSPKLNKKILELKIPILGICYGLQLLCKGVWWKYWPIKFKRVRSFVNTRK

SEQ ID NO: 167008 - protein, 139 aa, Unknown
  Bacterial polypetide isolated from the Sargasso Sea
MKFSKVLILDFGSQVTKLIARNIRELNVYCEIIPYKTSYKKILDENPDCIILSGSPASIHDKKAPIFDKELLSSKIPILGICYGAQLLSKLFNSDVKKSKIREFGPAKLKKIKNDKILSKIPNKSISWMSHGDTIFKLG

SEQ ID NO: 167009 - protein, 100 aa, Unknown
  Bacterial polypetide isolated from the Sargasso Sea
EADQIYIKELNKSKIYDKIWQAYAALLPIKTVGVMGDSRTYEYTCLLRAVTSEDGMTADYFNFPKKFLDNISNKIINNVKGINRVVYDISSKPPSTIELE

SEQ ID NO: 167010 - protein, 125 aa, Unknown
  Bacterial polypetide isolated from the Sargasso Sea
HPFPGPGLAIRVLGEVTKNRLEILRQADKIYIDLLKKEKLYDKIWQAFCVLLPVKTVGVMGDSRTYEYVCAIRAVTSIDGMTADYYPFDQSFLKKVSSSIVNKVKGINRVVYDTTSKPPGTIEWE

SEQ ID NO: 167011 - protein, 166 aa, Unknown
  Bacterial polypetide isolated from the Sargasso Sea
MKRLTKLKKILIIDFGSQFTQLIARRIRELGVFSEIISHKNLKNIDQNELFGLILSGGPLSVYQNKKIKLNKNIFTFDCPILGICFGHQMISKFYGGHVRSSKTREFGLAKIKKVKNSILTKNFFDKKNLNDVWMSHADHVTKIPKNFKKIASTKDSKYTIMKTLN

SEQ ID NO: 167012 - protein, 111 aa, Unknown
  Bacterial polypetide isolated from the Sargasso Sea
EVTKDRLDKLREADLFFLSEMKKHNLYNQASQAYAFYLPIKSVGVVGDNRIYADVIGLRSVDTTDFMTANVSNLPNDFIQHVSTRIVNEVEGISRVVYDVTSKPPATIEWE

SEQ ID NO: 167013 - protein, 173 aa, Unknown
  Bacterial polypetide isolated from the Sargasso Sea
VIKSHHNWLVGLPKKMKLKLVEPLRELFKDEVRKLGLEMRLPKKFINRHPFPGPGLGIRILGEITADRVKILQEADNIYIEEIKEAGLYDKIWQAFAVLMPVKTVGVMGDHRSYEQVCGLRAVTSVDGMTADFYPFKGEFLSKVSTRIINEVKGINRVVYDTTSKPPGTIEWE

SEQ ID NO: 167014 - protein, 109 aa, Unknown
  Bacterial polypetide isolated from the Sargasso Sea
NEKKIKILQEADSIFIEELREADLYDSVSQAFAVFLPIKSVGVVGDERRYSEVIALRAVETVDFMTANWAYLPHEFLDKVSRRIVNEIEDVSRVVYDISGKPPATIEWE

SEQ ID NO: 167015 - protein, 58 aa, Unknown
  Bacterial polypetide isolated from the Sargasso Sea
MILDFGSQYSQLIARRVREAGVYSELFPWDVSSKTVIDFQPSGIILFGGPESVHGADA

SEQ ID NO: 167016 - protein, 57 aa, Unknown
  Bacterial polypetide isolated from the Sargasso Sea
MCLLRAITSEDGMTADFYEFKKSFIQEISNKIVNSIRGINRVVYDITSKPPSTIELE

SEQ ID NO: 167017 - protein, 118 aa, Unknown
  Bacterial polypetide isolated from the Sargasso Sea
MSDLSVDNKTIDTILVLDFGSQYTQLIARRVRELDVYSEILPWDIDEEKIIKLNPKGVILSGGPNSVTDSYTPRVPQVIFDLNIPLLGICYGMQTLAEQMGGHVISADKKSLDMLSSK

SEQ ID NO: 167018 - protein, 122 aa, Unknown
  Bacterial polypetide isolated from the Sargasso Sea
MPNKVLILDFGSQYTQLIARRVRELNIFCEIYPYNSSNFILNDYSAVILSGSPYSVRSKDALKINLDKIKGAIPLLGICYGAQYLAHNYGGLVDLSNSREYGRANLVSISSESNLLDGINQG

SEQ ID NO: 167019 - protein, 73 aa, Unknown
  Bacterial polypetide isolated from the Sargasso Sea
MEPSNFQKIVIVDFGSQFTQLVARKIRELGSYSEIINFKNIFKLKNDTSVKGIILSGGPLSITTNKGISLNSF

SEQ ID NO: 167020 - protein, 284 aa, Unknown
  Bacterial polypetide isolated from the Sargasso Sea
NKAIAVTVDSSANYCKSFPLIGGKQIVCENWRNLISVGASPIAITNCLNFGNPENKEVMGEFVECLQGIKEACEFLDYPVVSGNVSFYNGTNKKNIFPTPVIGGVGLISDISKTLNHHFKKENNIIILIGKTFGHIEQSCFLKENFSITEGLPPEVNLKNEKNNGEAVLKLIKKDLIMSAHDVSNGGLLVSLCEMSIGSNLGAKILKPKKLRNMFEYFFGEDQGRYIIEIDKKNLDQVMKILDEDKIYYENIGKTQKKYFEVVGELNININDLFKINNTWYNNY

SEQ ID NO: 167021 - protein, 79 aa, Unknown
  Bacterial polypetide isolated from the Sargasso Sea
KICMTFVDSSGYQTEQYPLNPNKSPSGITGITNDNGNITIMMPHPERVFRSHQFSWKPLSWGEFSPWMQIFINAKKFVS

SEQ ID NO: 167022 - protein, 355 aa, Unknown
  Bacterial polypetide isolated from the Sargasso Sea
KKYNKKEVNLDISDYHLSLIGKLGIEENDKSRRGTLGLDLESLKTIRNYFSTIKRKPTDVEIETLAQTWSEHCKHKIFSAKIDDIQEGIFKKYIKGATEKIIQLRKDNFCVSLFTDNAGGIEFNKDWIICHKVETHNTPSALDPFGGAITGIVGVNRDCLGFGKGAKPIANTYAYYLADPNKKYQLYRQKNKDPMLPANFIAKGIISGVRVGGNCSGIPTPQGNVYFDDRFAGKPLVFCGTVGIIPKKIKGKLSHKKKANPGDIILMAGGRVGKDGIHGATFSSEELDPNSPVSAVQIGDPITQKKMSDVIIRELRDENLYSSITDNGAGGLSSSIGEMAKESGGFIVNLEKVPL

SEQ ID NO: 167023 - protein, 77 aa, Unknown
  Bacterial polypetide isolated from the Sargasso Sea
AHGEGRYQCSDETLRQLQDDDAVALRYGSNPNGSVADIAGITNPAGNVLGLMPHPERACDEAIGGIDGRAMLEALLS

SEQ ID NO: 167024 - protein, 352 aa, Unknown
  Bacterial polypetide isolated from the Sargasso Sea
TLGIVREDHIIHSYAPENAENYDLILIGKPTDNSGFGGASFASLELEEEKKEQNKGAVQEPNAFLERHLLKSTYALFQYLQNENLCEKVGFKDLGAGGVACASVELAETSGYGSEVWLDKVHIGMEGLHPSVYLCSETQERFMWVSPPELTDKIITHYNEVFDLPGVSSGAKASVIGKIRKDKQYIVHNNGEKIIDALAEEVTKGFLYDREYKKPDPEFHEPSLSTPLDHNAILKKMLAHENIASRSVVYESYDKQVQGRTVSEAGQSDSGVMAPFNSDNYPEEIRKVGVALSTDHNPRYSIISPYLGGVNAVVEAMRNVAAVGATPHAISDCLCFGNPEKPHQMWEFVEAV

SEQ ID NO: 167025 - protein, 98 aa, Unknown
  Bacterial polypetide isolated from the Sargasso Sea
EGHAEFASPAALQAADQSGTVALRFVDNYGNVTTQYPSNPNGSPLGITSLTTTDGRVTIMMPHPERVFRTVANSWHPDEWQEDSPWMRMFRNARVWLG

SEQ ID NO: 167026 - protein, 187 aa, Unknown
  Bacterial polypetide isolated from the Sargasso Sea
ILYNNLVKDQFQEFFSDEKVFTLGVCNGCQMLSNLKDIIPGAEFWPSFERNLSDQFEARLAQVKISKTESVLLDGMEDWMIPVASAHGEGRAQFNNNDLQELEKSNQIAMRFVDSSENSSEIYPINPNGSPNGITGITASNGRVTIMMPHPERVFRKVQLSWHRKDWNEYSPWMQIFINAKKFSDKN

SEQ ID NO: 167027 - protein, 213 aa, Unknown
  Bacterial polypetide isolated from the Sargasso Sea
MNVLVLSGYGINCENETLHAFEVVGFKGKIIHINDLIQNPKQLNNYQVFAIPGGFSYGDDTGSGNAMAKKIMTNLYDQLIDFSLKDKLIIGICNGCQILINLGLVPSLNKKDPEVALIENKSGSYECRWIDVKVSNNKSPWLANISTLNLPVAHQEGQFMIPINLLKSIKANNLIGLQYINHHKKLAQGQFPFNPNGSKDDIAALTNQNGNIL

SEQ ID NO: 167028 - protein, 135 aa, Unknown
  Bacterial polypetide isolated from the Sargasso Sea
EKLLQDFLLSRISEGVLLAAHDLSEGGLLVALSEMLFENPDLGLSASFDSLGESGSLAALLFGESQGRVLVSVSPVHESALLEEAGKVGLQAHLVGKTTTSGCMKVSVDGREVLDARVSDLHETWAQSIPSMMSQ

SEQ ID NO: 167029 - protein, 284 aa, Unknown
  Bacterial polypetide isolated from the Sargasso Sea
MTEKIISHYNEVFDLPGVSSGARASVIGKIRNDKQYIVHNNGEKIIDALAEEVTKGFLYDREYKKPDQEFHEPSLPSPLDHNAILKKMLAHENIASRSVVYESYDKQVQGRTFSEAGQSDSGVMAPFNSDNYPEEIRKVGVALSTDHNPRYSIISPYLGGVNAVVEAMRNVASVGATPHAISDCLCFGNPEKPHQMWEFVEAVRGVSDASIGIKLKENQDHPTPIIAGNVSFYNESKSGAIPPSPIVSCLGKINNVKKSVSMSFKNETSIILMVGSRKNELGGS

SEQ ID NO: 167030 - protein, 74 aa, Unknown
  Bacterial polypetide isolated from the Sargasso Sea
NYIDNSNKVTSKYPYNPYGSKNGATAFTNLDGRITIMMPHPERLFYLNQFSYKPSDWMTSPWENFFMSAREWVK

SEQ ID NO: 167031 - protein, 107 aa, Unknown
  Bacterial polypetide isolated from the Sargasso Sea
GSRMPIAVSHGEGQAEFANDNALSQVGAQVAMRYVDNYGKPTMQYPANPNGSPQGITGLTSLDGRSTIMMPHPERVFRAVANSWRPDDWQEDGAWMRIFRNARKFVG

SEQ ID NO: 167032 - protein, 298 aa, Unknown
  Bacterial polypetide isolated from the Sargasso Sea
MAPFNSDEYPEEIRKVGIALSTDHNPNQSKINPYLGGVNATLEAMRNVAAVGATPHALSDCLCFGNPEKPHQMWEFVEAVRGVSDACKEVKLKEHPESPTPIIAGNVSFYNESKSGSIPPSPIISCLGKMNDVNKAITMSFKKIKSKIFMVGKRKDELGGSLYYSLFGELGANVPSPDLNEVKDQIYAITDCIDNELIESCHDISDGGIAVALSEMTFENNIGCSVTIPGTLSIEKLLFSETGGFIIEVKDSKIKDVNEVFNNHNINLDLIGETSKDQKLVVNDAINMEVEEMKSLWI

SEQ ID NO: 167033 - protein, 87 aa, Unknown
  Bacterial polypetide isolated from the Sargasso Sea
MKSALIIFPGSNCDRELQIALETVGMQVERVWHKETNLPEGVDIVFLPGGFSFGDYLRPGAIAASSRILRSVVSFANKGGYIVGICN

SEQ ID NO: 167034 - protein, 311 aa, Unknown
  Bacterial polypetide isolated from the Sargasso Sea
FNLSDKSKIIPKLFSEEIGLVVEVPNKHLKGVKDYYQEKDIYCEEIAKKSVEKTFKLINFNEEIFSVDINTLFKSWDSMSHQVQSERDSKTCASEEQDNFVNFDYFITPEINFVTPKISSSLFGKKPRVALLREQGINGQYDMAAALMASGFEVEDLHMSEIGERVKDLGAFNGLVIPGGFSYGDVMGAGRGMANSILLKPKMKKIFKRFFEDKTKFAFGVCNGCQFLSNLAEIIPGADGWPSFNRNTSNQYECRLVQVKIEKSQSILMQGMEGSTIPVMVSHGEGRVDFKENLVSKSIAQYVDPRHKPTS

SEQ ID NO: 167035 - protein, 139 aa, Unknown
  Bacterial polypetide isolated from the Sargasso Sea
DNTNKNEEQNEKVKNIDLWKVYDNSIGCRTIKGPLESGSYSILDLPEVNKRLVLTWGNFQDCLNEMNKNEAEPKAIINCLNFGSPEHCIKDIRESIEKLNENCKKYKIPIIGGNVSLYNTTDDISINPTVVLVMLGLKD

SEQ ID NO: 167036 - protein, 242 aa, Unknown
  Bacterial polypetide isolated from the Sargasso Sea
LFKFGNPEKDEIMGQFVETIDGMSQACNYLNFPVVSGNVSFYNETKNKGIAPTPTIGGVGLIKNLNLMMTNDFKKVDNYIFVIGKTSGHLYQSEFFREVVEIKNGPPPEVNLFNEKNNGLIVQTLIEQKLLNSVHDVSSGGIIIALSEMCITGKIGAKIKIPQKNITPHEYLFGEDQSRYLVEIDKQNKTNVSKILEKNNIYYEIIGITQKDSLEINNEFSIKLEELRELNSFWFKNYFKEN

SEQ ID NO: 167037 - protein, 153 aa, Unknown
  Bacterial polypetide isolated from the Sargasso Sea
MTYRNEIVDFSVLKAEEIKDKLSELNIPLTVSEALKIQTQMLKRPPSITELVLFSIQGSEHCSYKSSRTHLKNFITTGPDVILGAKEDAGVISIKKDKKGNKWCIVMSHESHNHPSQIVPYEGAATGVGGNVRDVMCMGAEVISNSDSLRFGN

SEQ ID NO: 167038 - protein, 293 aa, Unknown
  Bacterial polypetide isolated from the Sargasso Sea
MGDTIQKPGSDSGVVRVHGTNKAVATSVDSSAIYCYAHPLTGGKQVVCESWRNLISCGSRPIAITNCLNFGNPEKEKNMGEFVECVEGINEASKFLDYPVVSGNVSFYNETKDKGIKPTPAIGGVGLIKNYKKMVTMNLKKKDNLILVIGKTEGHIEQSSFARNILNEKKGPPPEINLFNEKNNGETLLKLIDNGLISSAHDVSLGGIITAVSKMAIKGKKGFKLDRLKVLINKFDYYFGEDQGRYIIEIERTNLEKVQKVLKENSVHYDELGLVTENEIIIDKEPILHMTID

SEQ ID NO: 167039 - protein, 237 aa, Unknown
  Bacterial polypetide isolated from the Sargasso Sea
KLKIKDILSKILSNPNVCSKEWIWQQYDHTVMGDTIQKPGGNSGVVRVHETDKAVAATVDSSAVYCWAHPLTGGKQVVCESWRNLISVGATPIAITNCLNFGSPENEDNMGEFVECVQGIGEASKFLEFPVVSGNVSFYNQTKEVGIKPTPAIGGVGLIKNYKQMITMDFKEINNLVLIIGKTEGHMDQSLFARTILDEKNGPPPEINLFNEKNNGETLLQLIKNDFIKSAHDVSLG

SEQ ID NO: 167040 - protein, 74 aa, Unknown
  Bacterial polypetide isolated from the Sargasso Sea
NNHKKLAKGQFPFNPNGSKDDIAALTNPNGNVLAMMPHPERAFYNYHVPNWQNNTSKKFGDGYKIFMNAKKFFA

SEQ ID NO: 167041 - protein, 265 aa, Unknown
  Bacterial polypetide isolated from the Sargasso Sea
SPGGKQIVCENWRNLISVGAKPLAITNCLNFGNPENKEIMGEFAECLEGIKESCEFLNYPVVSGNVSFYNGTNKKNIKPTPVIGGVGLINKLSYPLDHNFKKENSIIILIGKTFGHLEQSCFLKENYSIVDGRPPEVNLLNEKNNGELVLKLINKNLILSAHDVSSGGLITALCEMTFANSIGVKTEKPKNLRNLTQYLFGEDQGRYILEIDKKNYTTVEKIIKNADVYFENIGITQKNYFEISGEMKTAVNDLFKVNNQWYNNF

SEQ ID NO: 167042 - protein, 192 aa, Unknown
  Bacterial polypetide isolated from the Sargasso Sea
MLGRAPSISELVLFSIQGSEHCSYKSSRQHLKQFTTEGPDVILGAKEDAGVVSVAKDDEGNRWCIVMSHESHNHPSQIVPYEGAATGVGGNVRDVMCMGAEVIGCTDSFRFGDISNNKTKWIHDGVVSGVAGYGNPLGIPNIGGDLYYNAGYNENCLVTLVTLGIVREDYIIHSYAPQEASGYDLILVGKPT

SEQ ID NO: 167043 - protein, 302 aa, Unknown
  Bacterial polypetide isolated from the Sargasso Sea
IYPKNYQDKDIYESLQKILTSPNNSEKSWIWEQYDQTVMGDSIQKPGGNAGIVRIHGTNKGVALTVDSSAHYCLANAITGGKLVVCEAWRNLISVGSNPIAITNCLNFGNPEKEKIMTQFVETIDGISQACSYLNFPVVSGNVSFYNETKNKSISPTPTIGGVGLIKNLNHVMTNNFKDIENNILIIGKTLGHLYQSEFSREVLNFKEGPPPEINLFNEKNNGMAVLNLITNKLVDSVHDISSGGILVALSEMCILNKIGALIKLPKNNIKIHDYLFGEDQSRYIIEVKEKNMNKVSKFFER

SEQ ID NO: 167044 - protein, 308 aa, Unknown
  Bacterial polypetide isolated from the Sargasso Sea
KGNKKLFKKTKRKPSDVEIETIAQTWSEHCKHKIFSAEIDDIKEGIFRKYIKGATEKIIKLRKDNFCISLFTDNAGGIEFNKDWIVCHKVETHNTPSALDPFGGAITGIVGVNRDCLGFGKGAKPIANTYAYYLSFPNKNYQLFRQKYNDPMLPANFIAKGIISGVRVGGNCSGIPTPQGNIYFDDRFAGKPLVFCGTVGLIPKKIKGKLAHKKKANPGDIILMVGGRVGKDGIHGATFSSEELDPNSPVSAVQIGDPITQKKMSDVIIRELRNKNMYSSITDNGAGGLSSSIGEMAKESGGFEVNLK

SEQ ID NO: 167045 - protein, 295 aa, Unknown
  Bacterial polypetide isolated from the Sargasso Sea
MDLEQYDQTVMGDTVEKPGSDSGIVRIHGSSKAVATSVDSSAIYCYAHPLTGGKQVVCENWRNLISCGSKPIAITNCLNFGNPEKEENMGEFVECIEGINEASKFLDYPVVSGNVSFYNETKDKGIKPTPTIGGVGLVTDYKKIITMDLKNINNLILVVGKTEGHMEQSIFARNILNEKKGPPPEINLFNEKNNGETILKLINEKLIKSTHDVSLGGIITAVSKMAIKGKKGFKLIKPKVLTSKFHYYFGEDQGRYIIEIEPNNLPKVQKILKENSIHYDEIGIVTKNGGNYRQK

SEQ ID NO: 167046 - protein, 103 aa, Unknown
  Bacterial polypetide isolated from the Sargasso Sea
PIAVSHGEGQAEFANDNALSQVGAQVAMRYVDNYGKPTMQYPANPNGSPQGITGLTSLDGRSTIMMPHPERVFRAVANSWRPDDWQEDGAWMRIFRNARKFVG

SEQ ID NO: 167047 - protein, 206 aa, Unknown
  Bacterial polypetide isolated from the Sargasso Sea
MNVLVLSGYGINCENETLHAFEVVGFKGRIVHVNDLIQNPKQLNNYQVFAIPGGFSYGDDTGSGNAMAKKIMTNLYDQLIEFSSKDKLTIGICNGCQILINLGLVPNLNKKDPEVAMIENKSGSYECRWVDVKVSNSKSPWLKNINTLNLPVAHQEGQFLIPLKILKSIKAKNLIGLQYIDQNKNFAKGRFPFNPNGSKDDIAALT

SEQ ID NO: 167048 - protein, 233 aa, Unknown
  Bacterial polypetide isolated from the Sargasso Sea
SIISIQDMGAAGLTSSSIEMASKGNLGIELNLNKVPCREEKMTPYEIMLSESQERMLIVLENGKETEAKKIFDKWNLDFAVIGKTTNSKKIELFFDNNKVAEIPINILTENAPIYDRKWKKTKLPQKIKFNKDDFKKFKTAEVLKKILSLPNICSKEWIWQQYDHTVMGDTIQKPGSDSGVIRVHGTNKAVATSVDSSAVYCYAHPLTGGKQVVCESWRNLISCGSRPIAITN

SEQ ID NO: 167049 - protein, 289 aa, Unknown
  Bacterial polypetide isolated from the Sargasso Sea
HTVMGDTVQKPGGDSGVVRIHGTQKAIAACIDSSASYCFSHPSTGGKQVVCEAWRNLISVGARPIAITNCLNFGNPEKEKNMGEFVECVEGISEASKYLDFPIVSGNVSFYNETKDKGIKPTPTIGGVGLIKNYKKMISMDFKKQDNIVFVIGKTEGHLDQSIFAKDILGEKKGPPPEVNLFNEKNIGETLLKLINENLIESAHDVSLGGIIVAISKMCIKGNMGIKFKKFKSLVNKFEYLFGEDQGRYIVEINKNNINKVTEILRKNSVHFDELGILKEKDLEVEGKV

SEQ ID NO: 167050 - protein, 244 aa, Unknown
  Bacterial polypetide isolated from the Sargasso Sea
NLDFSIIGKTTNSKKIELFYDKKKVADIPVDTLVENSPMYDRKWKKTKLPKKNKVNKDTFKNLKILNVLSKLLSNPNICSKEWIWQQYDHTVMGDTIQKPGSDAGIVRVHGTNKAVAATVDASASYCYAHPLTGGKQVVCESWRNLISVGAEPIAITNCLNFGNPEKEENMGEFVECVQGLGEASKYLNFPVVSGNVSFYNQTKDKGIKPTPSIGGIGLIKNYKDMVTMGFKKADNVVLVVGKT

SEQ ID NO: 167051 - protein, 137 aa, Unknown
  Bacterial polypetide isolated from the Sargasso Sea
NLSDQLEARWAQVKISKTESILLDGMEDWVIPVASAHGEGRAQFNSNDLEELEKSNQIAMHFVDSSENSSEKYPINPNGSPNGITGITASNGRVTIMMPHPERVFRKVQLSWHRKDWNEYSPWMQIFINAKKFSDKN

SEQ ID NO: 167052 - protein, 143 aa, Unknown
  Bacterial polypetide isolated from the Sargasso Sea
MAFTKEIVDFSSLDDFQIQKKLNKFNIPLSIEEAKKIQYDMLGRAPSLVELVLFSIQGSEHCSYKSSRKYLKQFTTESPDVVLGAKEDAGVVSIATDNEGNRWCIVMSHESHNHPSQIVPYEGAATGVGGNVRDVLCMGAKVI

SEQ ID NO: 167053 - protein, 287 aa, Unknown
  Bacterial polypetide isolated from the Sargasso Sea
DSGVVRVHGTNKAVAASVDSSAVYCWAHPLTGGKQIVAESWRNLISVGATPIAITNCLNFGSPENEDNMGEFVECVQGIGEASKYLNFPVVSGNVSFYNQTKDVGIKPTPSIGGVGLIKDYKKMITMDFKEIDNLVLVIGKTEGHIDQSLFARTILDEKNGPPPEINLFNEKNNGESLLNLIDKDYIKSAHDISLGGLITALSKMCIKGNKGIKLDKPKNLINEIEYYFAEDQGRYLIEINPKDFEKVTDILNKNSVHHEKLGVIIKNDMIINDKTKVTIDELKSYN

SEQ ID NO: 167054 - protein, 241 aa, Unknown
  Bacterial polypetide isolated from the Sargasso Sea
CLNFGSPENEVNMGEFVECVQGIGEACEYLNFPVVSGNVSFYNQTKDKGIKPTPSIGGVGLIKNYKKMITMGFKELNNIVLVIGKTEGHIHQSLFARNILDEKNGPPPEINLFNEKNNGETLLKLIDNNLVKSAHDVALGGIITAVAKMCIVGKKGINIKKPKYLINEIEYFFAEDQGRYILEISEKNLKKVTDILNKNAVHFDELGTINENELYINEKTKVTIDDLRSSNKRWLIEYMSK

SEQ ID NO: 167055 - protein, 263 aa, Unknown
  Bacterial polypetide isolated from the Sargasso Sea
DSSAVYCWAHPLTGGKQVVAESWRNLISVGATPVAITNCLNFGSPENEDNMGEFVECVQGIGEASKYLNFPVVSGNVSFYNQTKEVGIKPTPTIGGVGLIKDYKKMITMDFKEINNLVLIIGKTEGHIDQSLFSRTILDEKNGPPPEVNLFNEKNNGESLLKLIEKDYVKSAHDVSLGGIITAIAKMCIKGNKGIELKKSKNLINETEFFFSEDQGRYIIEINQKDSSEVSSILNKNSVHHEELGIIIDKDMIINEKTKVTMT

SEQ ID NO: 167056 - protein, 289 aa, Unknown
  Bacterial polypetide isolated from the Sargasso Sea
RIHGKEKAIAVSVDSSANYCKAHPLTGGKQIVCENWRNIISVGAKPIAITNCLNFGNPEDPKIMGEFAECLMGIKESCEFLDYPVVSGNVSFYNGTNKKNISPTPVIGGIGVIQKLKKPMSHQFKKANNNILVIGKTFGHLEQSVFLEEIYSIIEGKPPEINLINEKNNGESVLEIIKKDLAESVHDISSGGLLIALAEMSMGSDYGVKINKPKKLTNLFKYFFGEDQSRYVLEINKENMKKVEEILKNNNIFYENIGLTQKDYFEIEKEMKISVKELYKINNQWYNNY

SEQ ID NO: 167057 - protein, 143 aa, Unknown
  Bacterial polypetide isolated from the Sargasso Sea
RALAEFLSNESGQFESRVVMVDVLDSDSVLFQDMAGTRVPAVVAHGEGRADLGQDILDTLRGRNQISLQFVDNYGERAARYPFNPNGSTEGVTGLCAANGRVTIMMPHPERNFRTVTNSWHPEDWGEHGPWLRIFQNARAFVD

SEQ ID NO: 167058 - protein, 200 aa, Unknown
  Bacterial polypetide isolated from the Sargasso Sea
SKNLILNYNDKEVANLPLSSLSSESPVYERKWIKSISPKKILPEKDYKSLNIIECLKKILSSPNNSNKSWVWEQYDHTVMADTVQKPGGDSGVIRIHGQNKGVAVTVDSSAHYCLANPLNGGKQVVCEAWRNLISAGSSPLAITNCLNFGNPEKEKIMGQFVEIIDGISQACTYLDFPVVSGNVSFYNETANKSISPTPT

SEQ ID NO: 167059 - protein, 287 aa, Unknown
  Bacterial polypetide isolated from the Sargasso Sea
MEGLHPSVYLCSETQERFMWVSPSELTEKIISHYNEVFDLPVVSSGARASVIGKIRNDKQYIVHNNGEKIIDALAEEVTKGFLYDREYKKPDQEFHEPSLPNPLDHNAILKKMLAHENIASRSVVYESYDKQVQGRTVSEAGQSDSGVMAPFNSDNYPEEIRKVGVALSTDHNPRYSIISPYLGGVNAVVEAMRNVAAVGATPHAISDCLCFGNPEKPHQMWEFVEAVRGVSDASISIKLKENQDHPTPIIAGNVSFYNESKSGAIPPSPIVSCLGEINNVEKTVSM

SEQ ID NO: 167060 - protein, 269 aa, Unknown
  Bacterial polypetide isolated from the Sargasso Sea
VHGSKKAIAASVDSSASYCFSHPLTGGKQIVCESWRNLVSVGAKPIAITNCLNFGNPEKEKNMGEFVECVEGIAEASKYLDFPVVSGNVSFYNETKDKGIKPTPAIGGVGLISDYKKMITMDFKSTGNSVYVIGKTEGHLDQSIFARDLLSEKKGPPPNINLFNEKNIGENILNLINKNLIVSCHDVSLGGILTAVAKMCIKGNKGIKIYQLKSLINKFEYFFGEDQGRYLVEIPKENLEKVNQILKKNSVHYDELGAIDEKLLSFNNE

SEQ ID NO: 167061 - protein, 218 aa, Unknown
  Bacterial polypetide isolated from the Sargasso Sea
NPNGSVNNIAAISNSSGNVMAMMPHPERTTNGDAIFSSMKEYIDENYPTINQPLSFSITNHKSKELNIDDKSTEWIIDLIITDNEAKSINTALNHLGFDIEVNRQIHWEINIEGEPTNVLNKIISSGELFNSNKEYIVDKKERYDASFLVRPNEDIYGRAKYESLTNRFDIKEISYIKRGVIWNINSKSGNLNDEINSILTTNIFFNPHCYEYYEIKK

SEQ ID NO: 167062 - protein, 294 aa, Unknown
  Bacterial polypetide isolated from the Sargasso Sea
MEDIINTLLSNLNYLNKSWVFNQYDSTVMGDTVKEPGQSSGIVKIHGTQKVIGATTDCNPLYIRINPYEGMKYTVAESYRNLIACNISPLAITNNLNFASPLDPNIMGELVLSIDGLKTAAAKFNTPIVSGNVSLYNQTNEIPIKPTPVIGMVGSNQDLKKINSNKFCNIGNKILVLGKQLEKNLSPYLLQDQNLASKINEYNDLEELDLDYEKKVADSVLKMSDFKYIMSCNDISRGGVFLSLLKMQYKDMGFKVNIPDPIDLFCEYCAGYVIEIRNEDLNNVTSFLSKNWCW

SEQ ID NO: 167063 - protein, 57 aa, Unknown
  Bacterial polypetide isolated from the Sargasso Sea
MDKFTVGVVVFPGSNCDRDVSWALEGCLDIRTKYLWHESSDLSDVDAIVLPGGFSYG

SEQ ID NO: 167064 - protein, 277 aa, Unknown
  Bacterial polypetide isolated from the Sargasso Sea
NLDFAVIGKTTDTKNIELNFDNEQVACIPVNTLVENSPMYDRKWKKAKLPKKNKIKKDLLINLKIKDVLNKILSHPNVCSKEWIWQQYDHTVMGDTIQKPGGDSGVVRVHGTDKAVAATVDSSAVYCWAHPQTGGKQIVCESWRNLISVGATPIAITNCLNFGSPENEENMGEFVECVQGIAEAAEYLEFPVVSGNVSFYNQTKEVGIKPTPSIGGVGLIKDYKKMITMNFKENNNLVLIIGKTEGHIDQSLFARTILDEKNGPPPEINLFNEKNNG

SEQ ID NO: 167065 - protein, 261 aa, Unknown
  Bacterial polypetide isolated from the Sargasso Sea
AILSFNPHPRQFFSRELDQYQIFSEEKKQLIFTELGIDHYFCLKFDELLSNLSPVDFIKKIIVDQLKVEKLIVGYDFRFGKDRKGDTNLLFDHGKIHGFNLETIEQITNPKTKTPYSSTDIRECIRSGEIEEANLLLGRPWSMQGKVIHGDKRARKMNFPTANILPHNEIYPLKGVYVVSIKFGDEVHKGIANFGTRPTVEGEKLLLEAHLFDFDRDIYGNYLTVEFLAFIRGEKKFETFDYLVKQINKDIQIAKDYHLRK

SEQ ID NO: 167066 - protein, 263 aa, Unknown
  Bacterial polypetide isolated from the Sargasso Sea
KEIFKKWDLDFVIIGKTTNTNKLILKYNNKIEGEIPLDALASKAPIYDRKWVKKKLTKNKIDFKKLKKVKIEDALIKILSSANHSDKNWITSQYDQMVMCDTAQRSGADAAIIRIHNKEKAIAVTVDSSSNYCKAHPLTGGKQIVCENWRNLISVGAKPIAITNCLNFGNPENPKIMGEFAECLIGIKESCEFLNFPVVSGNVSFYNGTNKKNISPTPVIGGVGLIQKLKKGMDHKFKKDDSIIIVIGKTFGHLEQSVFLEEI

SEQ ID NO: 167067 - protein, 107 aa, Unknown
  Bacterial polypetide isolated from the Sargasso Sea
IKSENQTSIFTKKTNIAKMPIAHNEGNYFASDETLKKIVGNDQVAFKYCNQEGEITSQSNPNGSLENIAGILNDRKNVLGLMPHPERAAESALGCDDGKYIFESILS

SEQ ID NO: 167068 - protein, 69 aa, Unknown
  Bacterial polypetide isolated from the Sargasso Sea
MEVTETIAIDHGLKKDEFSKICKLLKRTPNITELAIFSAMWNEHCSYKSSKKHLKKLHTKGKQVIQGPG

SEQ ID NO: 167069 - protein, 296 aa, Unknown
  Bacterial polypetide isolated from the Sargasso Sea
NLDFAIIGKTTNSKNIELFFNDEQVANIPVNTLVENSPMYDRKWKKSKLPKKNKIEKETLNKLKIKDVLKKILSSPNVCNKDWIWRQYDHTVMGDTIQKPGGDSGVVRVHGTNKAIAASVDSSAVYCWAHPLTGGKQIVAESWRNLISVGASPIAITNCLNFGSPENEENMGEFVECVQGIGEACKYLNFPVVSGNVSFYNQTKDTGIKPTPSIGGVGLIKNYKKMITMNFKEIDNLVLVIGKTEGHIDQSLFARIILDEKNGPPPEVNLFNEKNNGESLLNLIEKDYIKSAHDFP

SEQ ID NO: 167070 - protein, 306 aa, Unknown
  Bacterial polypetide isolated from the Sargasso Sea
DLEVSDKRLIEISDKGLLALNLDEMKAIQEHYRDPDIRSVRKAAGLPWDRPTDAELECLAQTWSEHCSHKIFAARIRHVDTVTGEDTTIDSLFKTHIMQPTLEIQEEVSWLLSIFHDNSGVISWNEDWSVCIKAETHNSPSALDPYGGAITGIVGVNRDILGTGLGARPIANTDVFCFGPPDYTGEIPPGLFHPSRVFRGVHSGVRSGGNESGIPTVNGAIVFDERYLGKPLVFCGTVGIMPRLLPDGRESHVKTPQPGDVVYMVGGRVGSDGIHGATFSSLELTEESPSSAVQIGDPITQKKMLD

SEQ ID NO: 167071 - protein, 274 aa, Unknown
  Bacterial polypetide isolated from the Sargasso Sea
YCHAHPLTGGKQVVCESWRNMISVGAKPIAITNCLNFGNPEKEKNMGEFVECVEGISEASKYLNYPVVSGNVSFYNETKDKGIKPTPSIGGIGLLSDYKKMMTMELKNDGNYLYVIGKTEGHLNQSVFARNILSEFEGPPPEINLFNEKQNGMCILNLKKENLIETCHDVSLGGILTAISKMSIKGNKGVKLFSIDGLVNKFEYFFGEDQGRYIVEIKPENLENVEKMLKKDSIHFDKLGVIETNQITYGNDLKISIDDIKQGYKNWLKEFMVN

SEQ ID NO: 167072 - protein, 56 aa, Unknown
  Bacterial polypetide isolated from the Sargasso Sea
IAGLCSEDGRHLAMMPHPERTFLKWQWGWMPHEWDSLETSPWLRMFQNARTWCDQV

SEQ ID NO: 167073 - protein, 75 aa, Unknown
  Bacterial polypetide isolated from the Sargasso Sea
MEVNEQIAIDHGLKSEEYKKICQLLKRTPNITELGIFSAMWNEHCSYKSSRLHLKKLPTKGKKVIQGPGENAGVI

SEQ ID NO: 167074 - protein, 294 aa, Unknown
  Bacterial polypetide isolated from the Sargasso Sea
GIRIHNKDKAIAVTVDSSANYCRAHPESGGKQIVCESWRNLIAVGANPIAITNCLNFGNPEDKNIMGEFADCVKGIKEACEYLNYPVVSGNVSFYNGTNKKNINPTPVIGGVGLIRNIKKPMNHKFKKEGSSIILIGKTFGHLDQSALFEEIFNLKDGPPPEINFFNEKINGEAVLEIINKDLAHSVHDVSSGGLILALAEMSLSSGIGINIEKPKKLNNIFEYFFGEDQGRYVLEIDQLKINEVKNLLNKNNIYFEIVGKTQKSVFELQNEIKISVNDLYKLNKEWYYKYHAN

SEQ ID NO: 167075 - protein, 294 aa, Unknown
  Bacterial polypetide isolated from the Sargasso Sea
AVVRIHGKNKAIVITVDSSAHYCLANPITGGKQVVAEAWRNLISTGSEPIAITNCLNFGNPEKDKIMGQFVETIDGICQACSYLNFPVVSGNVSFYNETQNKAISPTPIIGGVGLIKNLDCMMTNNLKEIGSNLLVIGKTLGHLHQSEFFREVVNYKDGPPPEVNLFNEKNNGLIVRNLISKKLINSVHDVSSGGILVALSEMCISGNIGAKIKIPIDSISPHEYLFGEDQSRYLIEINEKNRLEVCKILEKNSIYYEIIGKTQKDSLDLKKNFNITLSDLGKFNSFWFRNYFN

SEQ ID NO: 167076 - protein, 325 aa, Unknown
  Bacterial polypetide isolated from the Sargasso Sea
YNEKVTDIPIDYLSENAPLYERKWKKTKLPQKLKFVKEKFKSLKVSDCLKKIISNPNICDKEWIWEQYDHTVMGDTVQKPGGDSGVVRIHGTKKAIAACVDSSASYCFAHPNTGGKQAVCETWRNLISVGSSPIAITNCLNFGNPEKEKNMGEFVECVEGISEASKYLNFPVVSGNVSFYNETKDKGIKPTPTIGGVGLIKNYKNMITMDFKMQDNIVFVIGKTEGHLEQSIFAKDILGEKKGPPPEINLFNEKNIGETLLKLINENLIVTAHDVSLGGIIVAISKMCIKGNMGIKFKKFKSLINKFEYLFGEDQGRYIVENDKK

SEQ ID NO: 167077 - protein, 209 aa, Unknown
  Bacterial polypetide isolated from the Sargasso Sea
SKLNYPVISGNVSLYNETNGEGIYPTPAIGGVGLIRDLSNTMTIDLKNEGNVLCLIGESNNHLGNSHYLSIIQSREDGGTPSINLDDELKNGKFILDCIAKKLLKSVHDVGEGGVLVAIAEMCISGKQGIKIDITKDFLHGFFFGEDQARYLVEVSQNKLEQLEVDASKSAVKIERIGEIGGTSISINSIGEIELSSLIDHHTKWFNEF

SEQ ID NO: 167078 - protein, 295 aa, Unknown
  Bacterial polypetide isolated from the Sargasso Sea
VVRIHIKDKAIAISVDSSANYCKAEPKSGGKQVVCENWRNLISVGAKPLAITNCLNFGSPEKTKVMGEFVECVDGIREACEFLDFPVVSGNVSFYNETKSKGIFPTPVIGGIGIIDNLKKIIDIKLKKPGNIIMVIGKTIGHLDQSAFLQENFSIFDGPPPEINLVNEKNNGLAVLKLIKDNLILSAHDVSSGGILVSLAEMSIISGNGLKIYKPKKLSNSLEYFFGEDQGRYLIEISKNNQKKIETYLRENNVFFEVIAEVQNDTFEIEKIFNLKTKDLHNYNNQWYSKYYANK

SEQ ID NO: 167079 - protein, 289 aa, Unknown
  Bacterial polypetide isolated from the Sargasso Sea
KIIQLRKDNFCVSLFTDNAGGIEFNKDWIICHKVETHNTPSALDPFGGAITGIVGVNRDCLGFGKGAKPIANTYAYYLADPNKKYQLYRQKNKDPMLPANFIAKGIISGVRVGGNCSGIPTPQGNVYFDDRFAGKPLVFCGTVGIIPKKIKGKLSHKKKANPGDIILMAGGRVGKDGIHGATFSSEELDPNSPVSAVQIGDPITQKKMSDVIIRELRDENLYSSITDNGAGGLSSSIGEMAKESGGFIVNLEKVPLKYNGLYPWEIWVSESQERMTLAVPPKNVKKVIK

SEQ ID NO: 167080 - protein, 127 aa, Unknown
  Bacterial polypetide isolated from the Sargasso Sea
VQVKVEDTDSVLLRNMNGWTVPVASAHGEGRANFQMNNLEELKKQNQIAMRFVDSNAKYTEAYPLNPNGSPEGITGITASSGRVTIMMPHPERVFRKYQMSWHQKDWPEYSPWMQIFVNAKQYSDEN

SEQ ID NO: 167081 - protein, 304 aa, Unknown
  Bacterial polypetide isolated from the Sargasso Sea
ITICFSGYIIVGGFSYEDRSRAGIIAALDPIMRQIKIEADNGKPVLGICNGAQILVESGLVPGLKNYRLGAALTDNKRVKGDIVVGVGYYNTWANLKMSVTPNRCAFTRHLKKGDLINIPLAHGEGRFIVPDELLDKMILNEQTVYRYSNYNGNIIDEFPINPNGSIYNIAAICNPAGNVMAMMPHPERTENGDAIFSSMKNYIESDCPAIDNELFYELPNFEIKQYKPRSNSIVWAVDMIITDNEAESVKNALNQLGHDVSIKRQTHWEISLNKNHDKAIEQIKLSGELYNSNKEFISEINDH

SEQ ID NO: 167082 - protein, 274 aa, Unknown
  Bacterial polypetide isolated from the Sargasso Sea
YCYAHPLTGGKQVVCESWRNLISCGSKPIAITNCLNFGNPEKEKNMGEFVECVEGINEASKFLNYPIVSGNVSFYNETKDKGIKPTPTIGGVGLLKDYKKMITMNLKNKDNLILVVGKTEGHIDQSVFAINILNEKKGPPPVVNLFNEKNNGETVLRLIDEGLINSAHDVSLGGIITAVSKMAIKGKKGFKLNNLKVLINKFDYYFGEDQGRYIIEIEPNNLTKVQKILKDNSVHCDDIGIVTENEIIVDKEPILHIDDLIKSNKFWLKDFMDK

SEQ ID NO: 167083 - protein, 105 aa, Unknown
  Bacterial polypetide isolated from the Sargasso Sea
MSVEEIQDKLLNLNISITAQEALKIQNEMLGRAPSISELVLFSIQGSEHCSYKSSRQHLKQFTTEGPDVILGAKEDAGVVSVAKDDEGNRWCIVMSHESHNHPSQ

SEQ ID NO: 167084 - protein, 69 aa, Unknown
  Bacterial polypetide isolated from the Sargasso Sea
MLVNEKVAIDHGLKPEEYKKICELLKRTPNIIELGIFSAMWNEHCSYKSSKLHLKKLPTKGKKIIQGPG

SEQ ID NO: 167085 - protein, 315 aa, Unknown
  Bacterial polypetide isolated from the Sargasso Sea
VSRRSLRFGDVDRNKTKWISDGVVSGIAGYGNPLGIPNVCGDLYFDKEYNENCLVTVLTAGVVKEKCVIRSRAPKNSVDYDLILVGKPTDNSGFGGASFASLELEEEKEQQNKGAVQEPNAFLERHILKSTYALFEYLEKNNLIDDVGFKDLGAGGVACASIELADAAGLGAKVWVDKIHTSMPELDGHIILCSETQERFMWASPKELTQTILDHYNKKFDFPNVSMGAQASVVGKIIKEQHYTVYAGDKKLVDGPIEKINEGFVYDRPMSKKVVVSKDKDLPKILDYNDLMLKILAHENVSSRGPVYESYDKNV

SEQ ID NO: 167086 - protein, 77 aa, Unknown
  Bacterial polypetide isolated from the Sargasso Sea
MRALVLSGYGINCEDETLHAFEVLGFKGKIVHINDLIQNPKQLNNYQVFAIPGGFSYGDDTGSGNAMAKKIMINLYD

SEQ ID NO: 167087 - protein, 222 aa, Unknown
  Bacterial polypetide isolated from the Sargasso Sea
GIKEACEFLNFPVVSGNVSFYNGTNTKNIYPTPVIGGVGLIKDLKKTKNHKLKNINSKLIIIGKTFGHMGQTTFLDEVYSLREGLPPEVNLSNEKNNGEIIFKLIENNLINTIHDVSSGGIIVALAEMSLSSLIGIKINKPKKLSNVFEFFFGEDQSRYIIEVQENNYEKVKKILKENNIFFENIGITQNDFFELEKELRINVKELYELNNKWYNNYNAIKS

SEQ ID NO: 167088 - protein, 284 aa, Unknown
  Bacterial polypetide isolated from the Sargasso Sea
TDKAVAASVDSSAVYCWAHPLTGGRQVVCESFRNLISVGAKPIAITNCLNFGSPENDENMGEFVECVKGIGEASDYLKYPIVSGNVSFYNQTKDQGIKPTPAIGGVGLIKNYKNMITMDFKEVDNLVLVIGKTEGHIDQSLFARNILDEKNGPPPEVNLFNEKNNGETLLKLIDNNLIKSAHDVSLGGIITAVAKMCIKGKKGINIKKPKYLINETEYLFGEDQGRYIVEINKKDSNKVTEILNKNAVHFDELGTINENELYINDKTKVTIDELSTSNKSWLIN

SEQ ID NO: 167089 - protein, 53 aa, Unknown
  Bacterial polypetide isolated from the Sargasso Sea
MKSSVITFPGSNCDRDMDVALKKFGFKNEMVWHNDEELPKSDLVVLPGGFSYG

SEQ ID NO: 167090 - protein, 297 aa, Unknown
  Bacterial polypetide isolated from the Sargasso Sea
SQERMLIILESGKEEIAKKIFDKWNLDFAVIGKTTNTKNIELFFDNKQVANIPVNTLVENSPMYDRKWKKSKLPKKNKINKTIFKSLKIKDTLKKILSSPNVCSKEWIWQQYDHTVMGDTIQKPGGDSGVVRVHKTDKAIAATVDSSATYCWAHPLTGGKQVVCETWRNLISVGAKPIAVTNCLNFGSPEKEENMGEFVECVQGISEACKYLDYPVVSGNVSFYNETKDIGIKPTPTIGGVGLIKDYKKMITMNFKEIDNIVLVIGKTEGHIDQSLLSRIILNENNGPPPEVNLFNE

SEQ ID NO: 167091 - protein, 246 aa, Unknown
  Bacterial polypetide isolated from the Sargasso Sea
SIEMASKGNLGIELNLNKVPCREEKMTPYEIMLSESQERMLIVLENGREAEAKKIFDKWNLDFAVIGKTTDSKKIELFFDNNKVAEIPINILAENAPVYDRKWKKTKLPQKIKFNKDDFKKLKITEVLKKILSLPNISSKEWIWQQYDHTVMGDTIQKPGSDSGVVRVHGTNKAVATSVDSSAVYCYAHPLTGGKQVVCESWRNLISCGSKPIAITNCLNFGNPEKEKNMGEFVECVEGINEASKF

SEQ ID NO: 167092 - protein, 243 aa, Unknown
  Bacterial polypetide isolated from the Sargasso Sea
TNCLNFGNPEKEKNMGEFVECVEGIAEASKYLNYPVVSGNVSFYNETKDKGIKPTPSIGGIGLLSNYKEMMTMELKNEGNYLLVIGKTEGHLDQSVFARNMLSEFNGPPPEVNLFNEKQNGMSVLNLKNKNLLETCHDVSLGGILTAISKMGIKSGKGVKLFTLQGLVNKFEYFFGEDQGRYIIEIKPENLENVENMLKKDSIHFDKLGLVEGNEIMLENDLKISIEDIKEDYKKWLKEYMVN

SEQ ID NO: 167093 - protein, 213 aa, Unknown
  Bacterial polypetide isolated from the Sargasso Sea
DFIQKPGGDSGVVRIHGTSKAVAASVDSSALYCFAHPLSGGKQIVCESWRNLISVGAEPIAITNCLNFGNPEKEKNMGEFVECVQGISEACKYLDFPVVSGNVSFYNETKDKGIKPTPSIGGVGIIKDYKNMISMDLKNSGNIVLVIGKTIGHLEQSIFAREILSEKKGPPPEVNLFNEKNNGLTVLKMMNEKLVESCHDISLGGILVAISKM

SEQ ID NO: 167094 - protein, 253 aa, Unknown
  Bacterial polypetide isolated from the Sargasso Sea
YEKYDKQVQGRTYTETGIADAGVMAPFNSSQYPEEIREVGLALSTDHNPRFGLIDPYWSGVNAVVEAMRNVASVGATPHAITDCLCYGNPEKPQQMWEFVEGVRGISDACKTITLKHSPEDPTPIIAGNVSFYNESKNIPIPPSPIVSCLGKIKNVKKTITMSFKKEGSALIMIGKRKNELGGSIYYSLHNELGRNVPKPNLVEVKNQIYSLTDCIEQDLIVACHDISEGGIAATLSEMTFEYSIGCDVKIDS

SEQ ID NO: 167095 - protein, 158 aa, Unknown
  Bacterial polypetide isolated from the Sargasso Sea
ALEGEDRSAVQIPDPFIEKLIIEAILECRDENCINAMKDLGGGGLSCAISETAESLGIGIELDVQNVHLRESDLLPEEIMISESQERMLVITSSDNLSKINNICEKFRIQCSVIGKVKEDKMMHVKNGNETLALLPADFVARGPLISREKSKPKYLSN

SEQ ID NO: 167096 - protein, 135 aa, Unknown
  Bacterial polypetide isolated from the Sargasso Sea
MSNKVASWDTIDFSSSSDEQIKQVLEDLNIPLSIDEAKKIQFSFLKRPATLTELVLFSIQGSEHSSYKSSKNHIKRFITSGKHVILGAKDDAGVVSLTTDKKGERYGLVVSHESHNHPSQIVPYEGAATGVGGNV

SEQ ID NO: 167097 - protein, 293 aa, Unknown
  Bacterial polypetide isolated from the Sargasso Sea
KLPQKIKFNKDDFKKLKITQVLKKILALPNISSKEWIWQQYDHTVMGDTIQKPGSDSGVVRIHGTDKAVATSVDSSAVYCYAHPLTGGKQVVCESWRNLISCGSKPIAITNCLNFGNPEKEKNMGEFVECVEGINEASKFLDYPVVSGNVSFYNETKDKGIKPTPAIGGVGLIKDYKKMITMDLKNNNNLILVVGKTEGHIDQSAFAINILNEKKGPPPEINLFNEKNNGETVLKLIEEDLVKSVHDVSLGGIITAVSKMAIKGNKGFKLNKLKVLINKFDYYFGEDQGRYII

SEQ ID NO: 167098 - protein, 280 aa, Unknown
  Bacterial polypetide isolated from the Sargasso Sea
QERFMWACPKDLTQTILDHYNKVFDFPNVSVGAMASVVGKIINEKHYTVFYKDKKLVDGPIEKINEGFVYSRPMSEKKTQLENNPLPERIDYNDLMLKILSHENVASRAPVYESYDKNVQGRVVNERGKTNAGVVAPFDSKKFPKEIKDDCFSAALAHNPSIGKIDPYLVAQHAVIEACAKTVSVGASPLALTDCLCFGNPEKPEQMWQFSQSCIAIREACSLLHFNETDNLPIVAGNVSFYNQSGDQSIPASPMIGCFGRVSKEQVLMNGFMSGDANIY

SEQ ID NO: 167099 - protein, 278 aa, Unknown
  Bacterial polypetide isolated from the Sargasso Sea
LGAVIQVLDEDLDYVQEALSDAALNEYVHNIGSLSDSADIVINFQEENLISLPIKELLQNWNRVSYEIQSLRDNPDTAKAEYINDTKIKNPGLSPKITFSVPEKIDLNSYRPRIAILREQGVNGQNEMAAAFHEVGFDCIDVHMTDLIDKRQNLQDFQGLVACGGFSYGDVLGAGGGWANSILFNDELRNQFGDFFQNENVFSLGVCNGCQMLSQLRGLIPGTDNWPSFKRNISEKFEARLVQVIVKDSPSILFKHMKGSVIPVPVAHGEGRVEVSNE

SEQ ID NO: 167100 - protein, 176 aa, Unknown
  Bacterial polypetide isolated from the Sargasso Sea
EDDMSSYQYLLSESQERMLFVVKEEKINDLIEKFNKWGLYASVIGEVIGTNEVIISHKGKTVAQIPTSALSDDTPVNFHNAIDNPPDDLLNKWEWKENDLPEIHDQKIFSLKENKKFSFPEIILKLLSNPSIASKRWIYKQYDSQVQANTVFTPGKSDAAVVRKREQNKKNKSKVF

SEQ ID NO: 167101 - protein, 305 aa, Unknown
  Bacterial polypetide isolated from the Sargasso Sea
KTTNSKNIELFFNQEQVAKIPVNILVENSPMYDRKWKKSKLPKKNIIKNEVLNKFKIKDVLKKILSNQNICCKEWIWQQYDHTVMGDTIQKPGGDSGVVRVHGTNKAVAASVDSSAVYCWAHPLTGGKQVVAESWRNLISVGATPIAITNCLNFGSPEKEDNMGEFVECVQGIGEASKYLNFPVVSGNVSFYNQTKEVGIKPTPSIGGVGLIKDYKKMISMDLKEIDNLVLIIGKTEGHIDQSLFARTILDEKNGPPPEVNLFNEKNNGESILNLIDKGYVKSAHDISLGGLLVAISKMALKAIR

SEQ ID NO: 167102 - protein, 158 aa, Unknown
  Bacterial polypetide isolated from the Sargasso Sea
MTPSIIVFPASNCDNDIFNCIKSIYDLNPNLIWYQDAIPKRTDLIIIPGGFSFGDYLRCGAIAAKSKILKQINEFIKKGTPVLGICNGFQVLTEANFLPGTLLMNKNLKFICKSVNLSVVNSESSFTNLFNKNETINLPIAHKVGNYYINENGLEKII

SEQ ID NO: 167103 - protein, 60 aa, Unknown
  Bacterial polypetide isolated from the Sargasso Sea
MIHQENHDLYDLNEALKVENLTLNDYEEICKRLNRKPNRTELGMFGVMWSEHCCYRNSKT

SEQ ID NO: 167104 - protein, 223 aa, Unknown
  Bacterial polypetide isolated from the Sargasso Sea
PEIMGQLVQAIKGISQAVKELNMPIVSGNVSLYNETDGVSINPTPTIGAVGLIYEGENPINGMASEGNIAVVIGETKGHLGQTALLKEFFNRSDGDAPKVNLEVENKHGNFVLANRNLIKACIDLSDGGLALAAFELAHRSEIGFEIYEESTEFLFAEDQARYLIACEFDQAEALFVEAGKQNIPILTVGSFKGDAIAFGNSRSELVSLSAIFSNAFKNLFQN

SEQ ID NO: 167105 - protein, 262 aa, Unknown
  Bacterial polypetide isolated from the Sargasso Sea
MGKTTDTKKLILNYKNSTVANIPIEALSSKAPVYDRKWKKIKLPNKKISIKNLKKINFEDALIKILSSSNQSNKNWITEQYDQMVMCDTVQRSGANSAIIRIHKKNKGIALSVDSSANYCKSHPLTGGKQIVCENWRNLISVGSTPVAITNCLNFGNPEETKIMGEFVECVQGIKEACEFLDFPVVSGNVSFYNGTNKKNIFPTPVIGGVGLIKDLNKSINHLFKKTNSIIMVVGKTFGHLSQSIFFEEIYSIKDGPPPDIN

SEQ ID NO: 167106 - protein, 304 aa, Unknown
  Bacterial polypetide isolated from the Sargasso Sea
INKDDINNLKIIEVLKKILANPNICSKEWIWQQYDHTVMGDTIQKPGGDSGVVRVHGTNKAVAASVDSSAVYCWAHPLTGGKQVVCESFRNLISVGAKPIAITNCLNFGSPENEENMGEFVECVQGIGEASSYLKFPVVSGNVSFYNQTKNQGIKPTPSIGGVGLIKDYTKMITMDFKEVDNIVLVIGKTEGHIDQSLFARVILDEKNGPPPEINLFNEKNNGETLLKLIDSNLIKSAHDISLGGIITAISKMCIKGNKGINLKKPKYLISEIEYFFSEDQGRYIVEITKKDLKKVLDILNKNA

SEQ ID NO: 167107 - protein, 269 aa, Unknown
  Bacterial polypetide isolated from the Sargasso Sea
PLTGGKQVVAESWRNLISVGATPIAITNCLNFGSPENENNMGEFVECVQGIGEASKYLNFPVVSGNVSFYNQTKEVGIKPTPSIGGVGLIKDYKKMVTMDFKKIDNLVLVIGKTEGHIDQSLFARAILDEKNGPPPEVNLFNEKNNGESLLNLINKDYIQSAHDISLGGLITAISKMCIQGNKGIKLKKSNNFVNELEYLFCEDQGRYIIEIKPEDLKEVSNLLDKNSVHYDELGIITDKEMIINQKTKLTIDELKSYYTNWLTNYMSA

SEQ ID NO: 167108 - protein, 285 aa, Unknown
  Bacterial polypetide isolated from the Sargasso Sea
ISAPNNFNKILMDMISHENIASKSVVYESYDKQVQGRTIIEAGMGDAGVMAPFNSEKYPKEIQKVGIALSTDHNPNQSKINPYLGGVNATLESMRNVASVGATPHAMSDCLCFGNPEKPHQMWEFVEAVRGVSDTCKKMKLKEHPDSSTPIIAGNVSFYNESKSGSIPPSPIISCLGKINDISNVVTMSFKLPDSKIFMIGKRKDELGGSLYYSLHKELGANVPNPNIDEVKNQIYAITDSIDGNLINACHDISDGGVAVTLSEMTFENNIGCFVNIPGKLSFEK

SEQ ID NO: 167109 - protein, 118 aa, Unknown
  Bacterial polypetide isolated from the Sargasso Sea
SILLQNMTGWSLPVASAHGEGRANFANNNLQELKNQNQIAINFVDSNENRTEKYPINPNGSEEGITGVTAADGRITIMMPHPERVFRKIQMSWHPKNWSEFSPWMQIFVNARKFTENN

SEQ ID NO: 167110 - protein, 287 aa, Unknown
  Bacterial polypetide isolated from the Sargasso Sea
KGIAATVDSSSHYCLAHPLTGGKLVVCESWRNLISVGSYPIAITNCLNFGNPTKEKIMGQFVECIDGISQACRYLDYPVVSGNVSFYNETQKRSISPTPTIGGVGLIKNLNFMMTKNLKKINSTILVIGKTLGHLYQSEFFREVLGNNNGPPPEVNLFNEKNNGLAVQKIISKGLVNSVHDISSGGILISLAEMCISGNIGVKIKIPRNDISPNEYLFGEDQSRYLIELDKSKEDEVFKILKKSSIYYEKIGHSQKERLELDNEFSIKLDELNKLNSGWFKNYFNEN

SEQ ID NO: 167111 - protein, 272 aa, Unknown
  Bacterial polypetide isolated from the Sargasso Sea
NICSKEWIWQQYDHTVMGDTIQKPGGDSGVVRVHGTNKAVAASVDSSAVYCWAHPFTGGKQVVCESFRNLISVGAKPIAITNCLNFGSPENKENMGEFVECIQGIGEASSYLKFPVVSGNVSFYNQTKDQGIKPTPSIGGVGLIKDYTKMITMDFKEVDNVVLVIGKTEGHIDQSLFARVILDEKNGPPPEINLFNEKNNGETLLKLIDSNLIKSAHDISLGGIITAVSKMCINGNKGINLKKPKFLINEIEYFFAEDQGRYIVEISKKDQK

SEQ ID NO: 167112 - protein, 73 aa, Unknown
  Bacterial polypetide isolated from the Sargasso Sea
MEVNENIALEHGLNKPEYKKICELLKRTPNLTELGIFSAMWNEHCSYKSSRLHLKNLPTKGKKVIQGPGENAG

SEQ ID NO: 167113 - protein, 262 aa, Unknown
  Bacterial polypetide isolated from the Sargasso Sea
MRNVAAVGATPHAISDCLCFGNPEKPHQMWEFVEAVRGISDASIGIKLKENQDHPTPIIAGNVSFYNESKSGAIPPSPIVSCLGKINNVKKTVSMSFKNKNSIILMVGSRKNELGGSLFYDMHGELGANVPSPDLEKVKTQIYAITDCIEEQLFLSCHDISDGGLAVAISEMTFGNNIGCDVVVPGNLALEKLLFSETGGFIVETEHKHLQQIKNIFKAHDIGYYNIGSTSDNGRIRMNDVIDLDVKEAKSLWSNGLRDKIK

SEQ ID NO: 167114 - protein, 297 aa, Unknown
  Bacterial polypetide isolated from the Sargasso Sea
DFPNVSVGAQASIVGKIVDEKHYTVYYKNKKIVDGPIEKINEGFVYDRPMSQIDVQQSNEALPKNIDYNNLILKILSHENVASRAVVYESYDKNVQGRVVNERGKTNAGVVAPFDSKRFPEEIKDDCFSATLAHNPSIGKIDPYVVAQYAVIEACAKTVSVGASPLAITDCLCFGNPEKPEQMWQFSQSCIAIRETCSLLHFNETNNLPIVAGNVSFYNQSGDQSIPASPMIGCFGRVVKDRVLINGFKSSDANLYLLGETPAFAGGSIATNVLKINNTELKKIDVQKYGETLNCVL

SEQ ID NO: 167115 - protein, 241 aa, Unknown
  Bacterial polypetide isolated from the Sargasso Sea
NCLNFGNPEREKIMGQFVETIDGMSQACSYLNFPVVSGNVSFYNETNNQSIIPTPTIGGVGLIKDLNKMVTNNFKEIGSNIIIIGKTLGHLYQSEFFKEILNFTEGPPPSTNLFNEKNNGLTILDLVSKKLVNSIHDISAGGLLVCLTEMCLSGKIGAKIKIPRNNIEKHNYLFGEDQSRYIIEVKKENLNKITRLLNKNSIFYENIGNTQNEYLEVEDEFKLDLNELYKLNNNWFENYFK

SEQ ID NO: 167116 - protein, 279 aa, Unknown
  Bacterial polypetide isolated from the Sargasso Sea
DSSAIYCHAHPLTGGKQVVCESWRNIISVGAKPIAITNCLNFGNPEKEKNMGEFVECVEGISEASKYLNYPVVSGNVSFYNETKDKGIKPTPSIGGIGLISDYKKMITMELKNDGNYLYVIGKTEGHLNQSIFARNILSEFKGPPPEINLFNEKQNGACVLNLKKENLIETCHDVSLGGILTAISKMSIKGNKGVKLFPIDSLVNKFEYFFGEDQGRYVIEVKPENLENLENILKKDSIHFDKLGIIESNQITYGNDLKISIDDIKEGYKNWLKEYMVS

SEQ ID NO: 167117 - protein, 293 aa, Unknown
  Bacterial polypetide isolated from the Sargasso Sea
QKRKKKLLYLAKKHHLSLDLKEMMAIREYYKREDLKDFREERNLSSDPTDCELEIFAQTWSEHCKHKEFNAKITYYDEETKTKKEINSLFSSRIKAATSLIKKRFEDQGNPFLLTVFSDNAGVVKIDDKRVFIWKVETHNTPSALDPYGGAITGILGNNRDALGTGIGGAKLIFNTNCLCFGNPNSTKELAAYQHHPRYIMDGVIRGIQDGGNKSGVPTVNGSVIFDDRYAGKPLVFCGTGAIMEQKILGRRSWKKPIAAQDLILMLGGRVGKDGLHGATLSSTALDEKTPHS

SEQ ID NO: 167118 - protein, 299 aa, Unknown
  Bacterial polypetide isolated from the Sargasso Sea
SVGILSGLAAAGCGLPMLLSVVGRVAPENRRSLWFGIVSAGGTGGQMFLVPLNGYLLERMDWTDAITILAAVIFAIVPMAMLAGKASGDALNQKKDHQTLSQALKEARSHKSFIFLCLGFFTCGFQVQFVVTHLPKYLEDTGTGATIGAHAIALIGLTNVIGTALAGMLGGKFKKKNLLAGLYIGRSLVMLAFFISPITQMSVYIFAACIGFLWLATVPLTAGLVSGFFGPRYMATLYAIAFLSHQIGGFLSTWMGGIVRDATGSYDQWWWIIIFGGMLAALFHLPIQERPVERLTQPA

SEQ ID NO: 167119 - protein, 258 aa, Unknown
  Bacterial polypetide isolated from the Sargasso Sea
LENGKEAAAKKIFDKWNLDFAVIGKTTDSKKIELFFDNDKVAEIPINILAENAPVYDRKWKKTKLPQKINFNKDDFKKLKITEILKKILGLPNISSKEWIWQQYDHTVMGDTIQKPGSDSGVVRVHGTNKAVATSVDSSAVYCFAHPLTGGKQVVCESWRNLISCGSKPIAITNCLNFGNPEKEKNMGEFVECVDGINEASKFLDYPIVSGNVSFYNETKDKGIKPTPAIGGVGLIKDYKKMITMSLKSSENLILVVG

SEQ ID NO: 167120 - protein, 62 aa, Unknown
  Bacterial polypetide isolated from the Sargasso Sea
LVDNGLIVLRYKNNPNGSLFDIAGITNERGNVLGLMPHPERACDEIIGGTDGLFTLKSLISK

SEQ ID NO: 167121 - protein, 64 aa, Unknown
  Bacterial polypetide isolated from the Sargasso Sea
MKYPSNPNGSSGGATGFCNNDGRINIMMPHPERLVHINNFSWSPSKWKVSPWLKMFINAREWVN

SEQ ID NO: 167122 - protein, 183 aa, Unknown
  Bacterial polypetide isolated from the Sargasso Sea
LTNLYDQIIDFSLKDKLIIGICNGCQILINLGLVPSLNKKDPEVAMIENKSGSYECRWVDVKVNNNKSPWLKNISAMHLPVAHQEGQFMIPINLLKSIKANNLIGLQYINNHKKLAKGQFPFNPNGSKDDIAALTNQNGKVLAMMPHPERAFYHYHVPNWQNNTSKKFGDGYKIFMNAKKFFA

SEQ ID NO: 167123 - protein, 279 aa, Unknown
  Bacterial polypetide isolated from the Sargasso Sea
VDSSASYCYAHPFTGGKHVVCEAWRNLVSVGAEPIAITNCLNFGNPEKKENMGEFVECIDGINEASKYLNFPVVSGNVSFYNETKDKGIKPTPTIGGVGLLKDYENVMSMNFKSKDNLVLAIGKTEGSLDQSIFAKVILDEKKGPPPEINLFNEKNNGETILKVIKEKLALSVHDVSLGGIMIAALKMCINGNKGIKFYKFKGLINIYQYFFSEDQGRYIIEVDKKNLKKVEGILEKNSVHFDLLGETTDKEIIINDELTFTVDKVAEFYKGWLYKYMS

SEQ ID NO: 167124 - protein, 50 aa, Unknown
  Bacterial polypetide isolated from the Sargasso Sea
KKLAKGKFPFNPNGSSEDIAALTNENGNVLAMMPHPERAFYHYHFPNLAK

SEQ ID NO: 167125 - protein, 57 aa, Unknown
  Bacterial polypetide isolated from the Sargasso Sea
MINPENNDLYDLNEALKVENLTINDYEEICKRLNRKPNRTELGMFGVMWSEHCVIEI

SEQ ID NO: 167126 - protein, 274 aa, Unknown
  Bacterial polypetide isolated from the Sargasso Sea
YCWAHPLTGGKQVVCESFRNLIAVGAKPIAITNCLNFGSPENEENMGEFVECVQGIGEASEYLNFPVVSGNVSFYNQTKDEGIKPTPSIGGVGLIKNYKKMITMQFKEINNIVLVIGKTEGHIDQSLFARNVLDEKNGPPPEINLFNEKNNGETLLKLIENNLIKSAHDVSLGGIITAVAKMCIKGNKGINIKRPKYLINEMEYFFGEDQGRYILEISNKDLKKVTDILNKNAVHFDELGIITENELYINDKTKVTIDELSTSNKSWLTNYMSK

SEQ ID NO: 167127 - protein, 189 aa, Unknown
  Bacterial polypetide isolated from the Sargasso Sea
MRVLVLSGYGINCEDETLHAFEVVGFNGKIVHINDLIQDPKQLNNYQVFTIPGGFSYGDDTGSGNAMAKKIMINLYDQLLEFSSKDKLIMGICNGCQILINLGLVPNINKKDPEVALIENKSGNYECRWVDVKVGTNKSPWLKNITTLSLPVAHQEGQFMIPLNVLKSIKAKNLIGLQYIDQDKKLAKR

SEQ ID NO: 167128 - protein, 81 aa, Unknown
  Bacterial polypetide isolated from the Sargasso Sea
NLVCVRYIDNFGNVTQTYPSNPNGSESGIAGLTSSDGRATIMMPHPERVFLKKQLSWSPDTWLNEESPWMEMFNAARRTVK

SEQ ID NO: 167129 - protein, 162 aa, Unknown
  Bacterial polypetide isolated from the Sargasso Sea
MNDDQIKEKLSELNIALTPEEGRKIQHEMLGRPPSLAELVLFSIQGSEHCSYKSSRSHLKNFVTDGPDVVLGAKEDAGVVAITKDKNGNRWCIVMSHESHNHPSQIVPYEGSATGVGGNVRDVMCMGAEVIACTDSFRFGNIKNSKTKWIHDGVVAGVAGYG

SEQ ID NO: 167130 - protein, 100 aa, Unknown
  Bacterial polypetide isolated from the Sargasso Sea
AHGEGRVDASVSDITGLNNNQNTTITYSNNKGGFTEEYPANPNGSLNGIAGVTNITGTVTIMMPHPERAFLTDQYSWSPEEWTNYSPWIKFFLNAREFID

SEQ ID NO: 167131 - protein, 248 aa, Unknown
  Bacterial polypetide isolated from the Sargasso Sea
TSSSIEMASKGNLGIEIDLNKVPCRETKMTPYEIMLSESQERMLIVLENGKEEMAKKIFDKWNLDFAVIGKTTNSKNIELFFNNEQVANIPVNILVENSPMYDRKWKKAKLPKKNKIKKETYSKLKIKDVLKKILSNPNICSKEWIWQQYDHTVMGDTIQKPGGNSGVVRVHGTNKAVAASVDSSAVYCWAHPLTGGKQVVAESWRNLISVGATPIALTNCLNFGSPENEDNMGEFVECVQGIGEASK

SEQ ID NO: 167132 - protein, 268 aa, Unknown
  Bacterial polypetide isolated from the Sargasso Sea
MGGKQIVAENWRNLISVGAKPLAITNCLNFGSPEKADVMGEFIDCINGIKEACEFLNFPVVSGNVSFYNETNSKSIHPTPVIGGVGIINDLKRITNIKTKENGNLILVVGKTIGHLGQSAFLYENFAMNNGPPPEINLLNEKNNGLAVLELIKKGIALSVHDISSGGMLVSLAEMSMSSGLGLKIYKPKKLKNFYEYFFGEDQGRYLIELSKNNLKNIEVLFKKNNVFHEIVAEVQNDTFEIEGLFSLKTKDLQICNNKWYNDFNAIN

SEQ ID NO: 167133 - protein, 105 aa, Unknown
  Bacterial polypetide isolated from the Sargasso Sea
MPIAHQEGQFMIPINLLKSIKANNLIGLQYINNHKKLAKGQFPFNPNGSKDDIAALTNQNGNVLAMMPHPERAFYYYHNPNWQNNTSKKFGDGYKIFMNAKKFFA

SEQ ID NO: 167134 - protein, 78 aa, Unknown
  Bacterial polypetide isolated from the Sargasso Sea
MKEKKEKINDKLIIEHGLTLTEYKMIQKILNRKPNILELGIFSVMWSEHCSYKSTKKWLKTLPTKAKWVICGPGEMLE

SEQ ID NO: 167135 - protein, 259 aa, Unknown
  Bacterial polypetide isolated from the Sargasso Sea
NIPVNTLVENSPLYDREWKKSKLPKKNKIKNETFSKLKIKDVLKKILSNQNICSKEWIWQQYDHTVMGDTIQKPGGDSGVVRVHGTDKAVAASVDSSAVYCWAHPLTGGKQVVAESWRNLISVGATPIAITNCLNFGSPENKDNMGEFVECVQGIGEASKYLDFPVVSGNVSFYNQTKEAGIKPTPSIGGVGLIKDYKKMISMDFKEIDNLVLSIGKTEGHIDQSIFARTILDEKNGPPPEVNLFNEKNNGESLLSLIE

SEQ ID NO: 167136 - protein, 155 aa, Unknown
  Bacterial polypetide isolated from the Sargasso Sea
VCNGCQMLSNLQSIIPGSEHWPKFIKNNSNQFEARQVLVKIPKSNSMLFKDMHKSILPIIVSHGEGKISIKNKSSLKKAIMQYVDITGKYTEEYPYNPNGSLNGVTGFCNNDGRINIMMPHPERLTHVNNFSWAPEEWKLSPWLKLFNNAREWVN

SEQ ID NO: 167137 - protein, 268 aa, Unknown
  Bacterial polypetide isolated from the Sargasso Sea
NISSKEWIWQQYDHTVMGDTIQKPGSDCGVVRVHGTKKAIASTVDSSAVYCYAHPHTGGKQIVCESWRNLISCGSRPIAITNCLNFGNPEKEKNMGEFVECVEGINEASKFLEYPVVSGNVSFYNETKDKGIKPTPTIGGVGLIKDYKNMITMHLKNIGNLILVVGKTEGHIDQSIFAINILNEKKGPPPVVNLFNEKNNGVTILKLIKDGLINSAHDVSLGGIITAVSKMAIKGKKGFKFKKLKVLMNKFDYYFGEDQGRYIIEIDH

SEQ ID NO: 167138 - protein, 291 aa, Unknown
  Bacterial polypetide isolated from the Sargasso Sea
RVHGTIKAVASTVDSSASYCYAHPFTGGKQVVCEAWRNLVSVGADPIAITNCLNFGNPEKKENMGEFVECINGINEASKYLNFPVVSGNVSFYNETKDKGIKPTPTIGGVGLIKDYKNLMTMRFKSKENLVLVIGKTEGNLDQSIFANIILDEKKGPPPEINLFNEKNNGETILKIIQEKLALSVHDVSLGGIMIGALKMCIAGSKGIKFYKFKNLTNIYQYFFSEDQGRYIIEVDKNNLKKVENILKKNSVHFDLLGETTDKEIIINDEPTFTVDKVTEFYKGWLYKYMS

SEQ ID NO: 167139 - protein, 324 aa, Unknown
  Bacterial polypetide isolated from the Sargasso Sea
VLKKILSNPNVCSKEWIWQQYDHTVMGDTIQKPGGDSGVVRVHGSNKAVAASVDSSAVYCWAHPLTGGKQIVCESFRNLISVGAKPIAITNCLNFGSPENEENMGEFVECVQGIGEAAEYLKFPIVSGNVSFYNQTKEIGIKPTPSIGGVGLLKDYTKMITMDFKEVDNKVLLIGKTEGHIDQSLFARNILDEKNGPPPEVNLFNEKNNGETLLKLIDAGYIKSAHDVSIGGIITAVAKMCIKGYKGINLNKPKYLINEIEYFFSEDQGRYIIEVNKENLKKVTEILDKNAVHFDELGTINEDQLFIDEKSKITIDELKSSKYT

SEQ ID NO: 167140 - protein, 44 aa, Unknown
  Bacterial polypetide isolated from the Sargasso Sea
TGVGGIMRDVFTMGARPIANLNSIHFGSPQHKKTKNLLRGVVKG

SEQ ID NO: 167141 - protein, 64 aa, Unknown
  Bacterial polypetide isolated from the Sargasso Sea
MPREPTPEEISTEQRYLSLGLSDSEYQLVCELLGRKPNLTETGIYGVMWSEHCSYKTSKMQLYR

SEQ ID NO: 167142 - protein, 254 aa, Unknown
  Bacterial polypetide isolated from the Sargasso Sea
DSAVIRIHNKEKAIAITVDSSALYCKADPKTGGKQIVAENWRNLISVGAKPLAITNCLNFGSPEKPEVMGEFVDCINGIKEACEFLNFPVVSGNVSFYNETNSKSIHPTPVIGGIGIINNLNKITDIKTKKNGNLIIIVGQTIGHLGQSAFLYENFSLKDGPPPEINLLNEKNNGLAVLELIKKGIALSVHDISSGGMLVSLAEMSMSSGLGLRINKPKKLKNFYEYFFGEDQGRYLIEVSKSNLKTMEVFLKK

SEQ ID NO: 167143 - protein, 98 aa, Unknown
  Bacterial polypetide isolated from the Sargasso Sea
MLAPRALILRAPGTNCDFETAYAFEQAGAITRRVHIRALTEKPELANDFQIFCIPGGFSYGDDIASGRILAIELKLRLGDTLQKFRDKGGLILGICNG

SEQ ID NO: 167144 - protein, 274 aa, Unknown
  Bacterial polypetide isolated from the Sargasso Sea
YCWAHPPTGGKQVVAESWRNLISVGAVPIAITNCLNFGSPENEDNMGEFVECVEGIGEASKYLNFPVVSGNVSFYNQTKEIGIKPTPSIGGVGLIKDYKKMVTMDFKEIDNLVIIIGKTEGHIDQSLFARAILDEKNGPPPEVNLFNEKNNGESLLNLINKDYIKSAHDISLGGILTAISKMCIKGNKGFKFEKSKNLMNEFEFFFAEDQGRYLIEINPKDYKEVSKILDKNSVHHEKLGVIIEKNVIINEKTKVTIDELKSYNSNWLIDYMSA

SEQ ID NO: 167145 - protein, 100 aa, Unknown
  Bacterial polypetide isolated from the Sargasso Sea
MNVLVLSGYGINCENETLHAFEVVGFKGKIVHINDLIQNPKQLNNYQVFAIPGGFSYGDDTGSGNAMAKKILTNLYDQLIDFALKDKLIIGICNGCQNIN

SEQ ID NO: 167146 - protein, 69 aa, Unknown
  Bacterial polypetide isolated from the Sargasso Sea
GSIAKSYPANPNGSPDGLAGMCSMDGRVTIMMPHPERVFRACQNSWHPDDWNELAPSSRMFQNARKWLR

SEQ ID NO: 167147 - protein, 167 aa, Unknown
  Bacterial polypetide isolated from the Sargasso Sea
MSKLLRNSWALFTGYFILMVAHGFQGNLLGVRSVIEEFNFIATGAIMSGYFVGYFAGANTIPNLVGKVGHIRVFAAFASMASLSILIHAIFVNPVVWTLARFITGFSIVAIFIVMESWLNDRANNRTRGQLLSIYMFITLIGLSLGTLLLNFGSPEKYEPFILISFV

SEQ ID NO: 167148 - protein, 227 aa, Unknown
  Bacterial polypetide isolated from the Sargasso Sea
KWNLDFAVIGKTTKSKKIELYFDKQKVADIPVNTLVENSPMYDRKWKKAKLPKKNKIKKEDLKNLKIIDVLKKVLSNPNVCSKEWIWQQYDHTVMGDTIQKPGGDSGVVRVHGTDKAVAASVDSSAVYCWAHPLTGGKQVVCESFRNLISVGAKPIAITNCLNFGSPENEDNMGEFVECVQGIGEASKYLQFPVVSGNVSFYNQTKEEGIKPTPSIGGVGLIKDYKK

SEQ ID NO: 167149 - protein, 218 aa, Unknown
  Bacterial polypetide isolated from the Sargasso Sea
KPEWLYYNLAAVSNPAGNVLAMMPHPERTDFGDKLFTSMKEFVEHKISFKKEPLSYNPDKNEIINYVPTKNVSEWVIDMVITDNEAETVQNALQRKGLDVTVQRQQHWEIYTSDNSDDTLKKIEDTGELFNSNKEFISSIKPKENTASFLVRQKEDMHCQAKFESIRERFKIIELMQLKRGIVWNISIKNTNFQPVLDKIIDTNILFNPLSHECFRIS

SEQ ID NO: 167150 - protein, 198 aa, Unknown
  Bacterial polypetide isolated from the Sargasso Sea
MAIMPHPERTLKNEADDLFDSMKNYVESDSPFSYKALNFKSKKIDVQKFKKPSKGRELLISTIIADNEAASVEKCIHNLGVDAKVKKYVHFEIDTTEGFDVDKIISTDVLFNPSKEYIAETKEESGAYRFLVRNKDDIVGQSLVQTLRDRFELSDLKSIKRGIVWEVKINSRSTKKDVDLILNSHIFSNPVSQECHEY

SEQ ID NO: 167151 - protein, 291 aa, Unknown
  Bacterial polypetide isolated from the Sargasso Sea
GATFTFNYGLYHQTPVYENIYLNTNRQEDPQEVIEESAGFLGNATMVASRTQSYEFGFNVQVGRNWAYSIAGWVKDMDKLSTSKTYRSMLGEYSVASNGDYGTAKGIDFTLENRGQLINTTIQYTYSKAKANGEYDQAAFGNQFVDAPTQEFTMPFDRPHDLTVQLYSSRLPFGIVASLVGFYQSGIPYTGTLEKGDGEPYEDVLNKYAKRTDAYKQVDISFSKFLELKDVKLALGVNVFNVLDIRNVLDIYPETGSPKTRSEYFTKEIALPQDGGTVSNSYYDRPWHFSG

SEQ ID NO: 167152 - protein, 393 aa, Unknown
  Bacterial polypetide isolated from the Sargasso Sea
MGKTTNTKNIELFFDGEEVANIPVHTLVENSPMYDRKWKKAKLPKKNKIKKETINKLKIKDILAKILSSPNVCSKEWIWQQYDHTVMGDTIQKPGGDSGVVRVHGSNKAVAASVDSSAVYCWAHPLTGGKQVVAESWRNLISVGATPIAITNCLNFGSPENEDNMGEFVECVQGIGEASKYLNFPVVSGNVSFYNQTKEIGIKPTPSIGGVGLIKDYKKMITMDFKEIDNLVIVIGKTEGHIDQSLFARTILDEKNGPPPEVNLFNEKNNGESLLNLIEKDFIKSAHDVSLGGMLTAVTKMCIKGNKGIKFTKSKNLMSDIEYFFAEDQGRYIIEINQKNLKDVCKILDKNSVHHEELGIITDKEVIINEKTKVSIDELKSYNTNWLTDYMSS

SEQ ID NO: 167153 - protein, 267 aa, Unknown
  Bacterial polypetide isolated from the Sargasso Sea
TGGKQVVCESWRNMISVGAKPIAITNCLNFGNPEKEKNMGEFVECVEGITEASKYLNYPVVSGNVSFYNETKDRGIKPTPSIGGIGLLSDYKQMVTMELKNDGNYLLIIGKTEGHLDQSIFAKNILSNHNGPPPEINLFNEKQNGMSILNLKNKNLIETCNDVSLGGILTAVSKMGIKGNKGVKLFPIEGLVNKFEYFFGEDQGRYIIEIKPENLENVEKILKKDSIHFDKLGIVESDQITYGNDLKISIGNIKEGYKKWLNEYMIN

SEQ ID NO: 167154 - protein, 387 aa, Unknown
  Bacterial polypetide isolated from the Sargasso Sea
KEIINDNLKNSFKGFELASTKIVLIKGRKEDIIKISKNEANPLIQTIKIYPFKKYLNIFKKNQFKLEKVKLPKKKYTKKEINLDISDHNLSLIGKLGIEENNKSRRGTLGLDLESLKAIRNYFSNIKRKPTDVEIETLAQTWSEHCKHKIFSAKIDNIKEGIFKKYIKGATEKIIQLRKDNFCISLFTDNAGGVEFNKDWIICHKVETHNTPSALDPFGGAITGIVGVNRDCLGFGKGAKPIANTYAYYLAYPNKNYQLYRQKNNKDAMLPADFIAKGIISGVRVGGNCSGIPTPQGNVYFDDRFAGKPLVFCGTVGIIPKKIKGKLAHKKKANPGDIILMVGGRVGKDGIHGATFSSEELDPNSPVSAVQIGDPITQKKMSDVIIR

SEQ ID NO: 167155 - protein, 220 aa, Unknown
  Bacterial polypetide isolated from the Sargasso Sea
MGQFVQAIKGISQAVKELNMPIVSGNVSLYNETEGVSINPTPTIGAVGLINEFETPINGRASEGNMAVLIGETQGHLGQSALLQEVFNRSDGDAPKVNLEVEKKHGNFVLENRELINACIDLSDGGLALAAFELAHRSEIGFEIYEESTEFLFAEDQARYLIACEFDQAETLFVEAGKKNIPIMTIGSFKGDAIVFGNSRSELVSLSAIFSDTFKELFQS

SEQ ID NO: 167156 - protein, 535 aa, Unknown
  Bacterial polypetide isolated from the Sargasso Sea
QSGGSVQIGHAIHEKTVTDFVLAASEEHLFHAITDCGAGGLSSAVGEMGAELGAEVDLEKVPLKYDGLSATEVWISEAQERMVLAVSPSEWPRLAEVARLEGVEATPIGTFTGNGQLALRWNGEHVGDLNCHFLHEGRPRERLQSKFTPPQNLPVRWSLDDENFETVLLELLRSEDVASKEWIIRQYDHEVQGKSVLKPLLGPMGGPADATVIRGVLGRPRGILIGIGLRHHLGTINPFEMAVGGIVEAVSNCIASGADPERIALLDNFCWGDCRRPDSLGTLVEACRGCYEAAVTLRAPFVSGKDSLNNVFTWKDDAGVIKEQSIPPTLLATAIGQINDVSLCVSSDLKRASNRIAIVGVSTTELGGSQLAVIRRITGGDIPKVDFKNCREAFKSIYDLNQQRLLASCHDLSDGGLGVALAEMAIGGGLGADINLAKVPLRDTGNLAQHDNIMSLLCVACAETPGRFLIEVKEEDATEVDRILCGSTWSWIGHVTDDNLLTIRGGENSVVTQTLIHKLATAWREPSTAQTHGKS

SEQ ID NO: 167157 - protein, 359 aa, Unknown
  Bacterial polypetide isolated from the Sargasso Sea
MYEPNKIQKHDLNETILLLIGHENIASRKPVYEKYDKQVQGRVHTETGVADAGILAPFNSNDYPEEIRNIGIAISTDHNPRQNIISPYWGGVNSVVEAMRNVAAVGATPHAVTDCLCFGNPEKPEQMWEFAEATRGVSEACKKITLKNNPAHPTPIIAGNVSFYNESKNGAIPPSPIVSCLGRLKDVNNAIDMVLKDNDSMLFMIGERKNELGGSAYYNLYDELGSNVPMPDLDEVRNQIYAITDCIDFKLIKSCHDISDGGVVCSIIEMAISNSIGCDLTFNDKLPLYQTLFSETGGFVIEVDKNNINDIESIFEKYKINVIPIGKTTNTQTIMINQTIELSIDHLKITWENGLREKL

SEQ ID NO: 167158 - protein, 273 aa, Unknown
  Bacterial polypetide isolated from the Sargasso Sea
MNQVRVAVLSGFGINCETETMAVFEMAGATAVRVHVNRLVNGEMSLDDYHIMAVPGGFSFGDHLGSGRLMGNRLRFGLRDQVRRFVQSGKLVIGICNGFQVLVKMGLLPGDEEVSLTQTASLALNDSGHYENRWATLEFDPNSPCIWTKGITRMRVPVRHGEGKFVTNDRKLLDRWSESGQLAVRYVDPAMEYPSSSDEVLPYPISPNQSWRNIAGVCDPTGLVFGLMPHPEANHSTWLGATWTRDVDQGEHGEGEGMAIFRNAVEYAKSKII

SEQ ID NO: 167159 - protein, 407 aa, Unknown
  Bacterial polypetide isolated from the Sargasso Sea
MVSLLKKKKPYVKYNKTEILILDMEFLHEGYPKLNLKTSFPKIKKEKKKIIKKSSLIDKLHKLLSSPNIVSKEFIATQYDHEVQATSIIKPLQGEGRVFGNATAIKPLFDDEKSIALSQAAYPQYAETNPYDMAGCSIDTAYKNLIVSGANSKKIAILDNFCWCSSDEPDRLYQLKEAAKACYDYAVAYQTPFISGKDSMFNDFKGFDKTGKSVKISIPPTLLISSIGVVDKISHLTKMTPDDGDILLVLGNTRNELQDSVYSKIIGYEKSKNPVVNSNDALRTYRNFEKANKLGIINSAIGIDLGGIGIAVTKMAIASKKGLTIDLKLKNKISVDQFLFSETQSRILVSMKKNKLANFKKIFKGSDYTIIGKCTGSDVVEFKDNKKIIRSKISDFAKSYKQNIKGL

SEQ ID NO: 167160 - protein, 447 aa, Unknown
  Bacterial polypetide isolated from the Sargasso Sea
MASKGNVGVYINLDKVPLRQPLSAYEILLSESQERMLAVIDKKNNYKVREILQKWQIDYEVIGEITDTKRVVFESNNKKVVDLPVEIIVDDAPEYDREFYIPRKRKNKDFDFSKIKLEDMITNLLTNLNYLDKSWVFDQYDSTVMGDTIREPGQSSGIVKIHGTQKVIGASTDCNPLYIRINPYEGMKYTVAESYRNLIACNINPLAITNNLNFASPLDPNIMGELVLSIHGLKTAAVKFNTPIVSGNVSLYNQTNEIPIKPTPVIGMVGSNMDLNKINTNKFCEIGNKIIILGKQLTKNCSPYLLQDQKIAFNICEFNDLEVLDLDFEKKIANCVLELSDLKCIMSCNDISRGGIFSALLKMQYKDMGFRVKVPDPIDLFCEYSAGYVIEIRSKDFEEVTSFLTKKGAEYLEIGEIIKEGIEINSKKFDYFDIMNKYRNDFEKIIS

SEQ ID NO: 167161 - protein, 83 aa, Unknown
  Bacterial polypetide isolated from the Sargasso Sea
MVEVNEKIAIEHGLKSEEYKKICDLLKRTPNITELGVFSAMWNEHCSYKSSRMHLKKLHTKGDQVIQGPGENAGIVDIEDDDA

SEQ ID NO: 167162 - protein, 380 aa, Unknown
  Bacterial polypetide isolated from the Sargasso Sea
NQFKIEKVKLPKKKYSKKEINLDISDHQLSLIGKLGIEENDKSRRGTLGLDLESLKVIRNYFSTIKRKPTDVEIETLAQTWSEHCKHKIFSAKIDDIQEGIFKKYIKGATEKIIQLRKDNFCVSLFTDNAGGIEFNKGWIICHKVETHNTPSALDPFGGAITGIVGVNRDCLGFGKGAKPIANTYAYYLADPNKNYQLYRQKNNKDPMLPANFIAKGIISGVRVGGNCSGIPTPQGNVYFDDRFAGKPLVFCGTVGIIPKKIKGKLSHKKKANPGDIILMAGGRVGKDGIHGATFSSEELDPNSPVSAVQIGDPITQKKMSDVIIRELRDENLYSSITDNGAGGLSSSIGEMAKESGGFIVNLEKVPLKYNGLYPWEIWV

SEQ ID NO: 167163 - protein, 193 aa, Unknown
  Bacterial polypetide isolated from the Sargasso Sea
EGWSKTIMYNNKVKNQFEEFFNNQKTFTLGVCNGCQMLSNLKDIIPDADYWPSFGRNFSDQFEARLIQVKVNNTDSVLLNNMEGWTVPIASAHGEGKANFLDNNLEELKKQNQVTMTFVDSNKNPTEKYPLNPNGSIEGITGVTASNGRVTIMMPHPERVFRKYQMSWHSKDWNEFSPWMQIFINARNFSDSS

SEQ ID NO: 167164 - protein, 100 aa, Unknown
  Bacterial polypetide isolated from the Sargasso Sea
GEGRAVFEEDYINQLYASKQVAINFSDSSGNCSNDYPINPNGSIDGATGFTAADGRVTIMMPHPERVFRMAQLSWHPKSNDNYSPWMQMFINAYKFTQDV

SEQ ID NO: 167165 - protein, 366 aa, Unknown
  Bacterial polypetide isolated from the Sargasso Sea
ELLRSEDVASKEWIIRQYDHEVQGKSVLKPLLGPMGGPADATVIRGVLGRPRGILIGVGIRHHLGTINPFEMAVGGIVEAVSNCIASGADPERIALLDNFCWGDCRRPDSLGTLVEACRGCYEAAVTLQAPFVSGKDSLNNVFTWKDDTGVLKEQSIPPTLLATAIGQINDVSLCVSSDFKRAGNRIAIVGISTSELGGSQLAVSGRVTGGDIPKVNFKNCQNAFKSIYGLNQQQLIASCHDLSDGGLGVALAEMAIGGGLGADINLAKVPIDDTGNLAKPDELMSLLRVACTETPGRFLIEVKEENASEVDRILHGSTWSWIGSVTNDSLLTIRCGEDSIVSQTLVYKLATAWREQSTAQTHGKS

SEQ ID NO: 167166 - protein, 103 aa, Unknown
  Bacterial polypetide isolated from the Sargasso Sea
VAHQEGRFLIPSKIYKTIKDKSLIGLQYINIKNELADKKFPDNPNGSQNDIAAITNKTGKVIAMMPHPERALYYYHEPEWQNNKIRKFADGYKIFNNAKKYFK

SEQ ID NO: 167167 - protein, 423 aa, Unknown
  Bacterial polypetide isolated from the Sargasso Sea
MGAKVIGCTDSFRFGDIKSNKTKWIHDGVVAGIGGYANPLGVPNIGGDIYYDKSYNDNCLVTLVTLGVVREDEIFHSYAPKNADGYDLILVGKATDNSGFGGASFASLELEEGKKEQNKGAVQEPNAFLERHILKSTYSLFEIIKERGLLNKVGFKDLGAGGVACASVELADTSGYGAEVWLDNVHVGMEGLHPSVVLCSETQERFMWVCHPDITETILNHYNKTFDMPGVSKLAQASVIGKIHDKKQYIVHSGNETIVNAPAEMVTKGFNYDRDTKEPVLGLYEPDLNEPTNYDEVLNSLLCHENICSRSSVYETYDKQVQGRTIIEPGYADAGVIAPFNNSHYPEEIRKVGIAHSTDHNPLYGKISPYWCGINSVVESMRNVAATGATPHAITDCLCFGNPEKPEQMWEFAESARGVADAC

SEQ ID NO: 167168 - protein, 90 aa, Unknown
  Bacterial polypetide isolated from the Sargasso Sea
MLSPRALILRGPGTNCDQETAYAFERAGGHTKRIHVQALAQSPSLLDDFQIFCIPGGFSYGDDIASGRILALELTVRLGDTLRRFHERGG

SEQ ID NO: 167169 - protein, 282 aa, Unknown
  Bacterial polypetide isolated from the Sargasso Sea
ASVDSSATYCHAHPLTGGKQVVCESWRNMISVGAKPIAITNCLNFGNPEKEKNMGEFVECVEGITEASKYLNYPVVSGNVSFYNETKDKGIKPTPSIGGIGLLSNYKEMMTMELKNEGNYLLVIGKTEGHLDQSVFARNILSEFNGPPPEVNLFNEKQNGMSVVNLKNKNLIETCHDVSLGGILTAISKMGIKSGIGVKLFPLEGLVNKFEYFFGEDQGRYIIEVKPENLENVENMLKNDSIHFDKLGLVEGNNIILENDLKLSIDDIKEGYKNWLKEYMVN

SEQ ID NO: 167170 - protein, 60 aa, Unknown
  Bacterial polypetide isolated from the Sargasso Sea
PVISGNVSLYNETNGEGIYPTPAIGGVGLIRDLSNTMTIDLKNEGNVLYLIGGKQQSFRQ

SEQ ID NO: 167171 - protein, 432 aa, Unknown
  Bacterial polypetide isolated from the Sargasso Sea
CPKLDNVENFIFVIELLQSMHEKNKIVSYHDISDGGLLTTIAECCFAGHTGMSINIDKNFEINKFLFSEELGFVVQIEDKFLADFYMSLNSKVIEHYELGKVNSKYVLEIKNNKKIIYSNSIEKLHKIWHKNSFQIQLLRDNPKTSNDEFEKVGKKNLKGLYIKTNNNNKKKIINTKLKPKIAILKEQGVNGHYEMAQAFSMAGFDSYDVNMNSIIQKSFKLDNFQGVVFCGGFSFGDVLGAGSGWANKILHNSALKDEFQKFFSDQTKFSLGVCNGCQVLSKLTEIIPGSENWPNLCINDSERFESRYVMTKIVKSNSFFFDGMEGSELPIIVAHGEGKMQINNIDFSILEKNNQLSMRYIDNNGSITEKFPYNPNGSFKGITSVSSKSGNILMMMPHPERLLDIKQFPIYSNEKDSPWSKFFENAKKFLN

SEQ ID NO: 167172 - protein, 75 aa, Unknown
  Bacterial polypetide isolated from the Sargasso Sea
MQYVDTTGKYTEEYPYNPNGSLNGVTGFCNNDGRINIMMPHPERLIHVNNFSWAPEEWKLSPWLKLFNNAREWVN

SEQ ID NO: 167173 - protein, 432 aa, Unknown
  Bacterial polypetide isolated from the Sargasso Sea
MTLAVPPANVKKVIKRFNSRGVEVTIIGKFIKKEKAIVKYNKTEILNLDMEFLHEGYPKLNLKTSFPKIKKEKKKIIKKSSLIDKLHKLLSSPNIVSKEFIATQYDHEVQATSVVKPLQGKGRVFGNTTAIKPLFYDEKSIALSQAAYPQYAETNPYDMAGCSIDTAFKNLIVSGANSKKIAILDNFCWCSSDEPERLYQLKEAAKACYDYSVAYQTPFISGKDSMFNDFKGFDKKGKSIKISIPPTLLISSIGIVDKISHLTKITPDKDDILFVLGNTHNELEDSVYSKIIGCKKTKNPSVNSKNALKTYKNFEKANKLEIFNSAIGIDLGGLGIAITKMAIASKKGLSIDLKLKNKLSVDQFLFSETQSRILVSVKKNQLANFKKIFNVSNYTRIGKCTSTDMIEFRDKKKIVRGKILDFEKSYKQNIKG

SEQ ID NO: 167174 - protein, 28 aa, Unknown
  Bacterial polypetide isolated from the Sargasso Sea
MYNVAALSNPDGNVMAIMPHPERTPNGD

SEQ ID NO: 167175 - protein, 206 aa, Unknown
  Bacterial polypetide isolated from the Sargasso Sea
MWWISYGDVLGAGGGWSSSISYNKVVRDAFEHFFNRTETFTFGVCNGCQMLSNLKDLIPGAENWPQFLWNDSDQFEARLSQVTIAKSKSVLFDGMAGWQIPVAVAHGEGRASFKEGALQKLSERNQIAVQFTDNQGAVASIYPLNPNGSPEGITGLTSLDGRATIMMPHPERVFRSQQLSWKSSNWKEYSPWMQIFLNAYKFSQGS

SEQ ID NO: 167176 - protein, 77 aa, Unknown
  Bacterial polypetide isolated from the Sargasso Sea
QYINIKNQLASKKFPDNPNGSHNDIAAITNKTGKVIAMMPHPERALYYYHEPEWQNKKNRKFADGFKIFNNAKKYFK

SEQ ID NO: 167177 - protein, 268 aa, Unknown
  Bacterial polypetide isolated from the Sargasso Sea
MTPRVAVLSGFGINCETETMAVFEMSGAHADRVHVNRLVNGDLDLSDYQIMAIPGGFSFGDHLGSGRLMGNRLRFGLRDQVRGFVREGKPVIGICNGFQVLVKMGLLPGDEEVSLTQTASLALNDSGHYENRWATLEFDSKSPCIWTAGLERIRVPVRHGEGKFVTDDPTLMDKWAESGQLVARYVDPSNEYPSASDNILPYPISPNQSWRNVAGVCDPTGLVFGLMPHPEANHSTWLGATWTREDNEHGQGEGMAIFHNAVSHVMDA

SEQ ID NO: 167178 - protein, 276 aa, Unknown
  Bacterial polypetide isolated from the Sargasso Sea
QFYCWAHPLTGGKQVVCESFRNLISVGAKPIAITNCLNFGSPENEDNMGEFVECVQGISEASDYLNFPVVSGNVSFYNQTKDQGIKPTPAIGGVGLIKNYKNMITMEFKEVDNLVLVIGKTEGHIDQSLFARNILDEKNGPPPEVNLFNEKNNGETLLKLIDNNLIKSAHDISLGGIITAVAKMCIKGKKGINIKKPKYLINEIEYLFAEDQGRYILEINKKDFKKVADILNKNAVHFDELGTITQNELYINDKTKVTIDELSTSNKSWLNNYMSK

SEQ ID NO: 167179 - protein, 124 aa, Unknown
  Bacterial polypetide isolated from the Sargasso Sea
MRKINFGIIQFPGSNCEQDCFHVLSYVLKQNCRYIWHDTKTLKNIDCVIVPGGFSYGDYLRTGAIAAQSNISLRIKEYADKGGLVLGICNGFPILTELELLPGVSLRNKSLNFICKDVYLKTIN

SEQ ID NO: 167180 - protein, 236 aa, Unknown
  Bacterial polypetide isolated from the Sargasso Sea
KLWGQIVHSIKGISEASLKLNMPVISGNVSLYNETNGKAILPTPVIGAVGAIDENKHSASLSNAFDGNSIFVIGQDNSHTDGWVGQSIYAQEILNIDKDYAPPPINIELELANGNFILKAIEQKLTNCVHDISDGGLAIAISEILLSSQTKGIGAVINKNYNYNSESFWFGEDQGRYLVCTSKNKEIEELAESNKIKITNIATINLSDRLTFSNEDYICISELDVKHKNWFKNFMS

SEQ ID NO: 167181 - protein, 416 aa, Unknown
  Bacterial polypetide isolated from the Sargasso Sea
MDKKKIAYLQFPGSNTENETKNILQKHGMIPFGHFWNDAPELLNNYDGFIILGGFSFEDRSRSGIIASLEPVVNELKKQALFGKPILGICNGAQILVESGLVPGNQDFQTLVSLTDNKRMIGNRIVGTGYYNKWCYIKPCENTKSAFVKSGGNPMRVPIAHAEGRFLFNGDLEDEILKNNLITYKYCDSSGNLSNDFPINPNGSLHSAAALSNPNGNVMAIMPHPERTLGNEADDLFKSMRNYMESDDPFSFKSLNFSSKKINIKKFKKPAKQNEILVSTIIADNEAASVEKCINSLGVKAKVKKYLHFEIDAIERLDINTIISTDVLFNPSKEYITNIKEGSDIYRFLVRSKDDIVGQSLAQTLQDRFNLSGLKSIKKGVVWEVKINSSGAKKDVDLILNSHIFSNPISQECHEY

SEQ ID NO: 167182 - protein, 273 aa, Unknown
  Bacterial polypetide isolated from the Sargasso Sea
MLCTPLTGGKQVVCESWRNLISCGSKPIAITNCLNFGNPEKEKNMGEFVECVEGINEASKFLDYPIVSGNVSFYNETKDKGIKPTPTIGGVGLIKDYKKMTTMELKNSENLILVVGKTEGHLDQSVFAISILNEKKGPPPEVNLFNEKNNGDTVLKLINEGLISSAHDVSLGGIITAVSKMAIKGQKGFKLNKLKVLMNKFDYYFGEDQGRYIIEIEAKSLSKVQKILKNNSVHYDEIGIVTKNEIIVDKEPILHIDDLIECNKNWLKNYMDN

SEQ ID NO: 167183 - protein, 295 aa, Unknown
  Bacterial polypetide isolated from the Sargasso Sea
GVVRVHGTNKAVAACVDSSAIYCFAHPLTGGKQVVSESWRNLISVGAKPIAITNCLNFGNPEKEKNMGEFVECVNGISEAAKYLNFPVVSGNVSFYNETKDKGIKPTPSIGGIGLIEDYKNMITMKLKKEDNIILVIGKTEGYLDQSIFSRTVLLEKKGPPPEVNLFNEKNNGETILKLISKKLILSCHDVSVGGILTAVSKMCIKGKKGVKINPQINFLNKFSYFFAEDQGRYIIEIEKKNLDPVKKLLKENSVHFDEFGVVTKERLQFKDELNISIVDLSKKYKSWLEDYMAN

SEQ ID NO: 167184 - protein, 276 aa, Unknown
  Bacterial polypetide isolated from the Sargasso Sea
ATYCHAHPFTGGKQVVCESWRNMISVGAKPIAITNCLNFGNPEKEKNMGEFVECVEGISEASKYLNYPVVSGNVSFYNETKDKGIKPTPSIGGVGLLSDYKKMITMDLKNEGNYLFVVGKTEGHLDQSIFARNILSEFNGPPPEINLFNEKQNGMSILNLKKENLIETCHDVSLGGILTAISKMSIKGNKGVKLFSIDGLVNKFEYFFGEDQGRYIIEIKPENLEKVEKVLKKDSIHFDKLGVIENDQITYGNDLKISIDDIKEGYKNWLKDYMVN

SEQ ID NO: 167185 - protein, 337 aa, Unknown
  Bacterial polypetide isolated from the Sargasso Sea
YRDMSVRASRKKNGLTPNRPTDAELECLAQTWSEHCSHKIFASKIRHVDIQTGEESVIDSLFRTHIMQPTLDIQKEVDWLLSIFHDNSGVISWNDKWSVCIKAETHNSPSALDPFGGAITGIVGVNRDILGTGLGARPIANTDVFCFGPPDYSGSIPEGLFHPSRVFRGVHSGVRSGGNESGIPTVNGSIVFDERFIGKPLVFCGTIGIMPRRLPDGRESHIKTPQPGDVVYMVGGRVGSDGIHGATFSSLELTEESPSSAVQIGDPITQKKMLDMIIEARDAGLIQVITDNGAGGLSSSVGEMAELTGGADLDLSKVPLKQEGLSSWEILVSESQE

SEQ ID NO: 167186 - protein, 444 aa, Unknown
  Bacterial polypetide isolated from the Sargasso Sea
MLWEVDVHDRQNDTTAQDLVTAGNDLGFDIHSAHAANGWLIEGDLDFDEVRRIGTRLFTDSVTEVCRVAKVGEEELVSIPPGAEEAHNLILHVLPKPGVTDPAAESAKEAMALLGVNATAVRSLKKYWVPAECMTLEQVAEIAWKRLASEAIHEVIIGPLTLSRLSGGSRWKLKREHVRLNGLNDSELEELSRKQCLALTAKELHAVRDHFNSLGREPFEIELETIAQTWSEHCCHKTLGSPVDHIGPDGESRYDNLLKETVFASTETIREQLGPDDWCVSVFSDNSGVVRFDGDHDICVKVETHNHPSAIEPYGGAATGLGGVIRDVLGTGHGAKPLANLDVFCVAPLDTPAKAIPPGIIPPKKLLHGVVAGVRDYGNRMGIPTIAGAVAFHPGYLGNPLVFCGTVGLMPRDSADGRVEPGDLVVVAGGRTGRDGIHGATVSS

SEQ ID NO: 167187 - protein, 73 aa, Unknown
  Bacterial polypetide isolated from the Sargasso Sea
MYKKILVANRGEIAIRVIRACKELGIKTVAVYSDADKSSLHVNMADEAYNIGGPLPSESYFDWRKYYKSSKKN

SEQ ID NO: 167188 - protein, 168 aa, Unknown
  Bacterial polypetide isolated from the Sargasso Sea
ALFSLGVCNGCQMMSNLKSLIPGADLWPRFVRNKSERFEARFSLVEVQESASLFFKGMAGSRMPIAVSHGEGHAEFASQAALQAADQSGTVALRFVDNYGNVTTQYPSNPNGSPLGITSLTTTDGRVTIMMPHPERVFRTVANSWHPDEWQEDSPWMRMFRNARVWLG

SEQ ID NO: 167189 - protein, 289 aa, Unknown
  Bacterial polypetide isolated from the Sargasso Sea
RIHGKEKAIAVSVDSSANYCKAHPISGGKQIVCENWRNLISVGAKPIAITNCLNFGNPENPEVMGEFAECLIGIKESCEFLNYPVVSGNVSFYNGTNRKNISPTPVIGGIGLISKFKKPINHQFKKNNSTILLIGRTFGHLEQSSFLEEIYSISDGQPPEINLINEKNNGESILEIIKNNLVSSVHDVSNGGLIVTLAEMCMGSNYGAKIYKPKKLTNLLNYLFGEDQSRYILEIEKGNLEMVEKILKNNNIFYENIGSTQKDYFEIEGELKININALYKINNQWYNNY

SEQ ID NO: 167190 - protein, 389 aa, Unknown
  Bacterial polypetide isolated from the Sargasso Sea
TNSKNIELFFENKKVAEIPIDFLAENAPMYDRKWIKAKLPKENNFSKDGFKSLKLIDCLNKILTDPNIADKEWIWNQYDHTVMGDTIQKPGGNAGVVRVHGTNKAVAAAVDSSATYCHAHPLTGGKQVVCESWRNMISVGARPIAITNCLNFGNPEKEKNMGEFVECVEGITEASKYLNYPVVSGNVSFYNETKDKGIKPTPSIGGIGLLSDYKKMITMELKKDGNYLYVIGKTEGHLDQSIFAKNVLSNHDGPPPEINLFNEKQNGLSILNLKNKNLIETCHDVSLGGILTAIQKMSIKGNKGVKLFSIEGLVNKFEYFFGEDQGRYIIEIKPENLENVEKILKKDSIHFDKLGIVESDKITYGNDLKISIDDIKEGYKKWLKEYMIN

SEQ ID NO: 167191 - protein, 226 aa, Unknown
  Bacterial polypetide isolated from the Sargasso Sea
MSSQQTQMAQFITLHGICNPAGNVMAMMPHPERTRNGDVIFSSMKEFIKKKYPIINKNLSYKIKSKTLADYIPNSKATTWRISTIITDNVASSVHQTLKSFGCDIKIHRQINWEIEIKENKNHVLGQIDASGELYNSNKEFIDESKNQDYDLSLLILQKDDVHARMKQESLTNRFEIGGIKKIKRGVLWNLSLISGNIQDVLERIINSNILYNQESHECYRINQTL

SEQ ID NO: 167192 - protein, 198 aa, Unknown
  Bacterial polypetide isolated from the Sargasso Sea
MAIMPHPERTLKNEADDLFDSMKKYIESDSSFSYKALNFKSKKLSIQKFKKLSKSSELLISTIIADNEAASVEKCIHNLGVDAKVKKYVHFEVDTTESFDIDKVISTDVLFNPSKEYIAKTKEESGVCRFLVRNKEDIVGQSLTQTLQDRFELSDLKSIKRGIVWEVKINSHSIKKDVDLILNSHIFSNPVSQECHEY

SEQ ID NO: 167193 - protein, 178 aa, Unknown
  Bacterial polypetide isolated from the Sargasso Sea
MKSSVIVFPGSNCDRDIAEALKKMQFQNQMVWHKETKLPKSDLIVIPGGFSYGDYLRSGAIAGKSLIIDEVIKSANSGCLVLGICNGFQILTETGLLKGTLLRNKNLKFINKDVHIKVVNNTTRFSNKYEKDQILKINIAHNEGNYFTDAKHLDQLKKENLIAFKYCDEKGNIDDNSN

SEQ ID NO: 167194 - protein, 108 aa, Unknown
  Bacterial polypetide isolated from the Sargasso Sea
TLTTNFFLNYKKKNIIKLPIAHNEGNYFANAKLINSLEDKNLIAFKYCDEKGNINENSNPNGSVNNIAGILNNKKNILGMMPHPERVIDPLLSGEDGSIIFESLLNHK

SEQ ID NO: 167195 - protein, 90 aa, Unknown
  Bacterial polypetide isolated from the Sargasso Sea
MKSSVITFPGSNCDRDMDVALKKFGFKNKMVWHADAELPKSDLVVLPGGFSYGDYLRCGSMASKSKIMQSVINFANSGGMVLGICNGFQI

SEQ ID NO: 167196 - protein, 89 aa, Unknown
  Bacterial polypetide isolated from the Sargasso Sea
MSIGVLVFPGSNCDRDVQWATEGCLGMPTRRIWHEETDLSGLDAVVLPGGFSYGDYLRCGAIARFAPALQALLGFAAQGGRVLGICNGF

SEQ ID NO: 167197 - protein, 263 aa, Unknown
  Bacterial polypetide isolated from the Sargasso Sea
MTPYEMMLSESQERMLIILQDGKEDYARKIFQKWDLDFVVIGKTTNTKNLTLKFNKKTVGEIPIDALANKAPIYDRKWIKKKLPKYELDIKSLKKIKVEDALLKILSSPNYTNKEWITNQYDQMVMCDTAQRSGSDAAIIRIHNKDKAIAVSVDSSANYCKSHPVTGGKQIVCENWRNLISVGAKPLAITNCLNFGNPENKEIMGEFAECLEGIREACEFLNFPVVSGNVSFYNGTNKKNIFPTPVIGGIGLIKKLSKPISHN

SEQ ID NO: 167198 - protein, 156 aa, Unknown
  Bacterial polypetide isolated from the Sargasso Sea
MKSAVIIFPGSNCDRDMDVALKKFGFKNKMVWHNDQEIPKSDLIVLPGGFSYGDYLRCGSIAGKSKIIKSVIEFANSGGLVLGICNGFQILTETGLLPGVLLQNKYQKFICKNIHVKINDKENKYFKNIKKEILELHIAHNEGNYFCSMDEMKSLS

SEQ ID NO: 167199 - protein, 164 aa, Unknown
  Bacterial polypetide isolated from the Sargasso Sea
MKSSVITFPGSNCDRDMDVALKKFGFKNKMIWHNDNELPKSDLVVLPGGFSYGDYLRCGSMASKSKIMQSVINFAKSGGLVMGICNGFQILVETGLVPGVLLRNKYLEFICKNVFVKLDNKENLYFKNLDKDIFELHIAHNEGNYFCTKDQLKEIQDNNQIAIY

SEQ ID NO: 167200 - protein, 309 aa, Unknown
  Bacterial polypetide isolated from the Sargasso Sea
SILCKEKEVFSESITVLERYWRETSHAIQSIRDNKKIADSELNLLNNKNYHGLNSNVSFDENQIKNLSIKGTKPKVAILREQGVNGQNEMAAAFTIAGFEAFDVHMQDLLDGNIDLKQFQGMAVCGGFSYGDVLGAGGGWSKTILYNNNVKDQFQQFFENEATFTLGVCNGCQMLSNLKDIIPEADYWPSFERNFSDQFEARLVQVKVENTNSVLLRNMNGWTVPVASAHGEGRANFQKNNLEELKKQNQIAMRFVDSSAEHTEVYPINPNGSPEGITGITAASGRVTIMMPHPERVFRKYQMSWHQKD

SEQ ID NO: 167201 - protein, 64 aa, Unknown
  Bacterial polypetide isolated from the Sargasso Sea
MDNFTVGVVVFPGSNCDRDVSWALEGCLDIKTKYLWHESSDLSDVDAIVLPGGFSYGDYLRCGA

SEQ ID NO: 167202 - protein, 90 aa, Unknown
  Bacterial polypetide isolated from the Sargasso Sea
MKSSVIVFPGSNCDRDVAVALKKLQFKNSMIWHKETELPKSDLIVVPGGFSYGDYLRSGAIAAKSNILSEVVRAGKKGSLILGICNGFQI

SEQ ID NO: 167203 - protein, 141 aa, Unknown
  Bacterial polypetide isolated from the Sargasso Sea
MQWFSNSYRNSLLKGTLLRNKNLKFINKDINIKVLNDKTKFTSKYKLNEILKINIAHNEGNYFTDSNHLEELEQNNLVAFKYCNEKGDIDEKSNPNGAINNIAGIFNSKKNILGMMPHPERMVDKIVSNKDGLNLFSSLLN

SEQ ID NO: 167204 - protein, 96 aa, Unknown
  Bacterial polypetide isolated from the Sargasso Sea
SGLKPGLKIKLPIAHNDGNYFANNELLNKLEGNGQIAFKYDQSENHNGSKNDIAGVLSKNGRVLGMMPHPERSITKFHDSKDGKLFFELLLDQLLG

SEQ ID NO: 167205 - protein, 223 aa, Unknown
  Bacterial polypetide isolated from the Sargasso Sea
MAAAFNRAGFAAVDVHMSDILEGRLTLEQFKGLVACGGFSYGDVLGAGEGWAKSILFNDMARDQFQNFFHREDTFSLGVCNGCQMLSTLKELIPGTEHWPRFVTNKSERFEARFSLVEIQENPSVFFNGMAGSRMPIAVSHGEGHAEFANDAATKAALESGTVAVKFVDNYGNPTTQYPANPNGSPEGITGITSTDGRATVMMPHPERVFRAVANSWHPDEWK

SEQ ID NO: 167206 - protein, 280 aa, Unknown
  Bacterial polypetide isolated from the Sargasso Sea
AARNLSCVGAEPLAITNNLNFPSPETSQGYWQLAMACRGIAQACRELDTPVTGGNVSLYNETRRDDGTVQPIHPTPVIGMVGLVDDVSRAIGLGWRQAGDPIVLLGVPLDDQGDPRLGLSGSSYQQLVAGRLAGRPPIVDLSLERAVQALLRQAIAEGLLASSHDSSDGGLAVALAECCITSGLGAELSVQDQPSRLDRALFGEGGARVVVSVKSEQMEGWQCLIQRHPDVPLQALGRVVDQPSLCFDLAGQRVLNRTIQDLQTVHEEALPRRLRCDAES

SEQ ID NO: 167207 - protein, 143 aa, Unknown
  Bacterial polypetide isolated from the Sargasso Sea
PVMGICNGFQILIESGLLQGALMRNSSLSFICRDIIIKPTNTKTMFTNKSTISKMPIAHNEGNYFANSNQIKEIEDNDQIAFQYCDENGDINSHSNPNGSINNIAGVFNKSKNVLGMMPHPERAAESIHGCDDGRNIFESLLS

SEQ ID NO: 167208 - protein, 150 aa, Unknown
  Bacterial polypetide isolated from the Sargasso Sea
MKSSVIVFPGSNCDRDVAVALEKLQFKNSMVWHKETELPKSDLIVVPGGFSYGDYLRSGAIAAKSNILSEVINAGKKGALILGICNGFQILIECGLLEGALLRNSGLKFISKDILVKVQSNKNKFFNKYKAGEILKLNIAHNEGNYFTNK

SEQ ID NO: 167209 - protein, 194 aa, Unknown
  Bacterial polypetide isolated from the Sargasso Sea
MRVAVVTFPGSNCDRDVSVAVTKITGKKPLSIWHQDHEIPNCDLIIIPGGFSYGDYLRCGAVAANSPIMREVKNHASRGGAVLGICNGFQILLEAKLLNGALIRNSKLKFACKEVDLKVSTNINSPFLDKVNREDIIKLPIAHNEGNFFADEKTLERIEGEGLVALRYYNADSNSDYNPNGSINDIAGILSENG

SEQ ID NO: 167210 - protein, 91 aa, Unknown
  Bacterial polypetide isolated from the Sargasso Sea
LKINIAHNEGNYFTNSDHLKELNNENLIAFKYCNKSGDINESSNPNGSLENIAGIFNSKKNILGMMPHPERMVDNLISNTDGVNLFSSLLN

SEQ ID NO: 167211 - protein, 118 aa, Unknown
  Bacterial polypetide isolated from the Sargasso Sea
ALVANENLNFICYDVELDIVSSKGGWFNNVDEKQTIKLPIAHGEGRYHCDSDTLKKLVDNELIALRYKNNPNGSSFDIAGITNKKGNVLGLMPHPERACDETIGGTDGLFTLKSLILK

SEQ ID NO: 167212 - protein, 100 aa, Unknown
  Bacterial polypetide isolated from the Sargasso Sea
MKSAVITFPGSNCDRDMHVALNKFGFKNKMVWHNDNELPKSDLIVLPGGFSYGDYLRCGSMASKSKIMQSVINFAKSGGLVMGICNGFQILVESGLVPGI

SEQ ID NO: 167213 - protein, 201 aa, Unknown
  Bacterial polypetide isolated from the Sargasso Sea
LNFPSPETPKGYWQLAMACRGIADACRALDTPVTGGNVSLYNETRRDDGTLQPIHPTPVIGMVGLVEDIDRVVGLAWRQPGDAVLLMGVAPDEQGDDRLGLAGSSYQMLVSGALAGRPPRVDFDLERGVQTLLRRAIAAGLLASAHDSSDGGLAIALAESSIASGLSVDLRFDLPSEGLARALFAEGGARVAISVKAECRQ

SEQ ID NO: 167214 - protein, 87 aa, Unknown
  Bacterial polypetide isolated from the Sargasso Sea
NERNYFCTNDQLKEIEDNNQIAINYCDENGKIEDQFNPNGSIKNIAGVFNKEKNVLGMMPHPERMIDASLSGEDGSIFFKNLISNLK

SEQ ID NO: 167215 - protein, 128 aa, Unknown
  Bacterial polypetide isolated from the Sargasso Sea
MKSSVIIFPGSNCDRDMDVALTKFGFKNTMVWHNDQSIPKSDLIVLPGGFSYGDYLRCGSIASKSNIIKSVIDFANSGGLVLGICNGFQILTETGLLTGILPQNKYLNFICKNVFIKVKDKKINILKI

SEQ ID NO: 167216 - protein, 133 aa, Unknown
  Bacterial polypetide isolated from the Sargasso Sea
MKSSVIVFPGSNCDRDIAVALERLQFKNSMVWHKETELPNSDLVVIPGGFSYGDYLRSGAIAAKSNILSEVINAGKRGALILGICNGFQILIECGLLQGALLRNSGLKFISKDILVKVQSNKNKFFNKYKANE

SEQ ID NO: 167217 - protein, 122 aa, Unknown
  Bacterial polypetide isolated from the Sargasso Sea
YLEFICKNVFVKLDNKENAYFKNLNKDVLEFHIAHNEGNYFCTEDQLKEIKDNNQIAIYYCNKEGRIEDRYNPNGSIKNIAGIFNKEKNVLGMMPHPERMIDQSLSGEDGSIFFKNLINNIK

SEQ ID NO: 167218 - protein, 193 aa, Unknown
  Bacterial polypetide isolated from the Sargasso Sea
MNSSVIIFPGSNCDRDMDVALKKFGFKNQMVWHNDEKIPKSDLIVLPGGFSYGDYLRCGSIAGKSKIIKSVTNFANSGGLVLGICNGFQILTETELLPGILQRNKYLNFICKNIFVKIKNNENKFFKNIKKEILKLHIAHNEGNYFCSKEELKSIKDNDQIAFTYCGKNGEEDEKNNPNGALNNIAGIFNKEK

SEQ ID NO: 167219 - protein, 64 aa, Unknown
  Bacterial polypetide isolated from the Sargasso Sea
YYCNSEGKIEDQYNPNGSIKNIAGVFNKQKNVLGMMPHPERMIDQSLSGEDGSIFFKNLINNIK

SEQ ID NO: 167220 - protein, 200 aa, Unknown
  Bacterial polypetide isolated from the Sargasso Sea
MALSSLSSLRVAITVFPGSNCDRDMMVAVEQLTNRRPALVWHKEASLDPVDLVIVPGGFSFGDYLRCGALAGRSPVMNAVMDHAARGGAVLGVCNGFQVLTETGMLPGVLIRNAGLRFSCRLVRLETAETMSSPFTQGLTAGQSLDIPVAHNEGNYFADDNTLDRLQDNGQIAFRYIASDAEGPANPNGAARDIAGYFIK

SEQ ID NO: 167221 - protein, 127 aa, Unknown
  Bacterial polypetide isolated from the Sargasso Sea
MKSSVIVFPGSNCDRDVAIALKKLQFKNSMIWHKETELPKSDLIVVPGGFSYGDYLRSGAIAAKSNILSEVISAGKKGSLILGICNGFQILIECGLLKGALLRNLGLKFISKDIQVKILSNKNRFFI

SEQ ID NO: 167222 - protein, 110 aa, Unknown
  Bacterial polypetide isolated from the Sargasso Sea
MIKKINILKILKKNILELHIAHNEGNYFCSDEELKSLEDNNQIAVKYCNKDGLESDEFNPNGALKNIAGIFNKDKNILGMMPHPERMIDSYLSGEDGSLFFENLLGNLKQ

SEQ ID NO: 167223 - protein, 222 aa, Unknown
  Bacterial polypetide isolated from the Sargasso Sea
EFPTNPNGSVNNMPAISNSSGNVMAMMPHPERTTNGDAIFSSMKEYIDENYPTINQPLSFSITNHKSKELNIDDKSTEWIIDLIITDNEAKSINTALNHLGFDIEVNRQIHWEINIEGEPTNVLNKIIGSGELFNSNKEYIVDKKEKYDASFLVRPNEDIYGRAKYESLTNRFDIKEISYLKRGVIWNINSKSGNLNDEINSILTTNIFFNPHCYEYYEIKK

SEQ ID NO: 167224 - protein, 279 aa, Unknown
  Bacterial polypetide isolated from the Sargasso Sea
NAGMVRIHNTDKKLCASVDCTPRYVVSDPYEGSIQAVCEAFRNLIAVGSKPLAITNNLNFGNPEKREIMGQIVASIKGIKEASLKLNMPVVSGNVSLYNETNGNAILPTPVIGAVGIIDKNENTASMYDANIGDGIYIIGQNENQEIGWIGQSLYSKHILKISELYSPPPVDLEFELRNGNFITKAIGQNITNCVNDVSDGGLAISLAEILLNSKIPNIGAIIDKSFIKKCESFWFGEDQGRYLICSSKHHELINLAKSERIRVSKIGSINSSSRLTFS

SEQ ID NO: 167225 - protein, 64 aa, Unknown
  Bacterial polypetide isolated from the Sargasso Sea
MKSSVITFPGSNCDRDMDVALNKFGFKNKIVWHNDSDLPKSDLVVLPGGFSYGDYLRCGSMASK

SEQ ID NO: 167226 - protein, 118 aa, Unknown
  Bacterial polypetide isolated from the Sargasso Sea
MKSSVITFPGSNCDRDMDVALKKFGFKNKMVWHDDNELPKSDLVVLPGGFSYGDYLRCGSMASKSKIMHSVINFAKSGGLVVGICNGFQILVETGLLPGVLLRNKYLEFICKNVFIKV

SEQ ID NO: 167227 - protein, 243 aa, Unknown
  Bacterial polypetide isolated from the Sargasso Sea
MGDTIQKPGGDAGVVRVHGTNKAVAASVDSSAVYCWAHPLTGGKQVVCESFRNLIAVGAKPIAITNCLNFGSPENEENMGEFVECVQGIGEASEYLKFPVVSGNVSFYNQTKDEGIKPTPAIGGVGLIKDYNMMITMDFKEIDNVVLVIGKTEGHLDQTLFARNILDEKNGPPPEINLFNEKNNGETLLKLIESNLIKSAHDVSLGGIITAVAKMCIKGKKGIDLNKPKYLINEMEYFFGEDQ

SEQ ID NO: 167228 - protein, 115 aa, Unknown
  Bacterial polypetide isolated from the Sargasso Sea
ANKNLNFICDDVELDIVSSKGGWFNNGDKKQTINLPIAHGEGRYHCDSDTLKKLVDNELIALRYKNNPNGSSFDIAGITNEKGNVLGLMPHPERACDETIGGTDGLFTLKSLILK

SEQ ID NO: 167229 - protein, 290 aa, Unknown
  Bacterial polypetide isolated from the Sargasso Sea
RQIFKKWDLDFVVIGKTTDTKNLSLKFKNEVVASIPIGALSSKAPLYDRKWVKKKLDKKKINIKEHKKIKFDKAFFELISSPNHSNKKWVTEQYDQMVMGDTIERSGADAAIIKIHQKDKAIAMTVDSSANYCKSHPLSGGKQIVCESWRNLVSVGAKPIAITNCLNFGNPENPEIMGQFAENILGIKEACEFLDYPVVSGNVSFYNGTNNNNIYPTPVIGGVGLIKNLNKTKNHKFKKIDSQIMIIGKTFGHLGQSAFINELYDVHYGMPPEINLLNEKNNGEMILKLI

SEQ ID NO: 167230 - protein, 54 aa, Unknown
  Bacterial polypetide isolated from the Sargasso Sea
MRYKNNPNGSSFDIAGITNEKGNVLGLMPHPERACDETIGGTDGLFTLKSLILK

SEQ ID NO: 167231 - protein, 303 aa, Unknown
  Bacterial polypetide isolated from the Sargasso Sea
MTELLHAFSETTYRFQSLRDNPNTAKEELETILNPKDPGLSLLIPDNSVFTRVNTNLAPILKLPPKLGVLREQGVNGHIEMAAAFARAGFETMDVHMSDIVEGNEDLSDYVGLAVCGGFSYGDVLGAGRGWAGTIRFNSRAYDVFANFFENQNTFTFGVCNGCQVLSELRTLIPGSELWPKFEKNKSEQFEARLSLVEVLPSPSIVLNGLEGMRAPIAVAHSEGRMKPPAQDKLTEYTCLRFVDNFGKPTETYPANPNGSPQGLTGVTSADGRVTIMMPHPERVFLTQQLSWMQRTWRRKESP

SEQ ID NO: 167232 - protein, 46 aa, Unknown
  Bacterial polypetide isolated from the Sargasso Sea
NGSIEAIAGITNKKKNVLGMMPHPERAYSDFHQSQDGRLIIESLIS

SEQ ID NO: 167233 - protein, 63 aa, Unknown
  Bacterial polypetide isolated from the Sargasso Sea
YCGVDGAENEKTNPNGAIKNIAGIFNRNKNVLGMMPHPERMIDKYLSGEDGSLFFKNILDNFK

SEQ ID NO: 167234 - protein, 77 aa, Unknown
  Bacterial polypetide isolated from the Sargasso Sea
MSIGVLVFPGSNCDRDVQWATEGCLGMPTRRIWHEETDLSGLDAVVLPGGFSYGDYLRCGAIARFAPALQALIGFAA

SEQ ID NO: 167235 - protein, 93 aa, Unknown
  Bacterial polypetide isolated from the Sargasso Sea
MNSSVIIFPGSNCDRDMDVALKKFGFKNEMVWHDDEKLPKSDLIVLPGGFSYGDYLRCGSIAGKSKIIKSVIDFAEKGGLVLGICNGFQILTE

SEQ ID NO: 167236 - protein, 59 aa, Unknown
  Bacterial polypetide isolated from the Sargasso Sea
CDEKGLVNDETNPNGSLNNIAGILNSKKNILGMMPHPERMIDKIISNEDGLNIFSSILN

SEQ ID NO: 167237 - protein, 76 aa, Unknown
  Bacterial polypetide isolated from the Sargasso Sea
MKFGVITFPGSNCDQDMIGVLRDEMGQKVESIWHKETDLKGSDFIVLPGGFSYGDYLRSGAIARFSPNNGRDNQSC

SEQ ID NO: 167238 - protein, 187 aa, Unknown
  Bacterial polypetide isolated from the Sargasso Sea
MKSSVITFPGSNCDRDMDVALKKFGFKNKMVWHADSELPKSDLVVLPGGFSYGDYLRCGSMASKSKIMQSVINFANSGGIVMGICNGFQILVETGLVPGVLLRNKYLEFICKNVFVKIKDKKNKYFKNVDKEVFEFHIAHNEGNYFCTNDQLKEIEDNNQIAINYCDENGKIVDQFNPNGSIKNIAG

SEQ ID NO: 167239 - protein, 92 aa, Unknown
  Bacterial polypetide isolated from the Sargasso Sea
LKINIAHNEGNYFTKESHLEELNKENLIAFKYCDEKGVVNDRSNPNGALENIAGIFNAKKNILGMMPHPERMVDEIISNTDGVNLFSSLINK

SEQ ID NO: 167240 - protein, 46 aa, Unknown
  Bacterial polypetide isolated from the Sargasso Sea
SAIFDDKIEEKKPTVQVGDPFTEKLLLEACLELMAGKSIICIQDMG

SEQ ID NO: 167241 - protein, 279 aa, Unknown
  Bacterial polypetide isolated from the Sargasso Sea
GLKSNISFDENELKHINIKITKPKVAILREQGVNGQNEMAAAFTLAGFNAFDVHMQDLLDGNTNLKDFQGMAVCGGFSYGDVLGAGGGWSKTILYNNLVKDQFQEFFSDEKVFTLGVCNGCQMLSNLKDIIPGAEFWPSFERNLSDQFEARLAQVKISKTESVLLDGMEDWMIPVASAHGEGRAQFNNNDLQELEKSNQIAMHFVDSSENSSEIYPINPNGSPNGITGITASNGRVTIMMPHPERVFRKVQLSWHRKDWNEYSPWMQIFINAKKFSDKN

SEQ ID NO: 167242 - protein, 253 aa, Unknown
  Bacterial polypetide isolated from the Sargasso Sea
MYNRKWKKAKLPKKNKIKKEDIKHLKIIDTLKKILMNPNVCSKEWIWQQYDHTVMGDTIQKPGGDAGVVRVHGTDKAVAASVDSSAVYCWAHPLTGGKQVVCESFRNLISVGAKPIAITNCLNFGSPENEENMGEFVECVQGIGEASEYLKYPVVSGNVSFYNQTKEEGIKPTPAIGGVGLIKDYKNMITMEFKEVDNLVLVIGKTEGHIDQSLFARNILDEKNGPPPEVNLFNEKNNGETLLKLIDNNLIKS

SEQ ID NO: 167243 - protein, 255 aa, Unknown
  Bacterial polypetide isolated from the Sargasso Sea
KRIVDGQVVGVGYYNTWTNLKLSTKPERCAFTRHSDPKILMNIPLAHGEGRFVMPNGLLDQLIKNEQLVYKYSNDSGDIIDEFPTNPNGSVNNIAAISNSSGNVMAMMPHPERTTNGDAIFSSMKEYIDENYPTINKPLSFSITNHKSKELNIDDQSTEWVIDLIITDNEARSVNTALNHLGFDIEVNRQIHWEINIDGEPTNVLNKIIDSGELFNSNKEYIVDKKGKYDASFLVRPNEDIYGRAKYESLTNRFD

SEQ ID NO: 167244 - protein, 184 aa, Unknown
  Bacterial polypetide isolated from the Sargasso Sea
MLGRAPSLPELVLFSIQGSEHCSYKSSRTHLKQFVTDSPDVVLGAKEDAGVVAVATDKQGKRWCIVMSHESHNHPSQIVPYEGAATGVGGNVRDVMCMGAEVIACTDSFRFGNIDNAKTKWINDGVVSGIAGYGNPLGVPNIGGDIYYHNDYNENCLVTLVTLGIVKEDHIIHSYAPENANGYD

SEQ ID NO: 167245 - protein, 83 aa, Unknown
  Bacterial polypetide isolated from the Sargasso Sea
INLPIAHGEGRYHCDSDTLKKLVDNELIALKYKNNPNGSSFDIAGITNEQGNVLGLMPHPERACDEAIGGTDGLFTLKSLILK

SEQ ID NO: 167246 - protein, 311 aa, Unknown
  Bacterial polypetide isolated from the Sargasso Sea
ADEAPQYERKWIKSKIKKSELKIKDLKKVKTEVALIKILSSPDHSNKSWITDQYDQVVMCDTIQKSGGDAAVVRIHKKEKAISISVDSSANYCAAEPRTGGKQIVCENWRNLISVGSKPLAITNCLNFGSPEKPEVMGEFVECIEGMKEACEFLNFPVVSGNVSFYNETNSKSISPTPVIGGIGIFDNLNNIINIKTKKIGNLILAVGKTLGHLSQSSFLRQIYLINDGSPPEINLMNEKNNGLAVSKLINNNFVLSCHDVSSGGILVALAEMSMASMLGLKITRPKKFNDLNEYFFAEDQSRYLIEIERD

SEQ ID NO: 167247 - protein, 48 aa, Unknown
  Bacterial polypetide isolated from the Sargasso Sea
NPNGSVSDIAGITNASGSVLGLMPHPERACDPATGGTDGRRMLEALLG

SEQ ID NO: 167248 - protein, 301 aa, Unknown
  Bacterial polypetide isolated from the Sargasso Sea
FVEACLELMAGNSIISIQDMGAAGLTSSSVEMASKGKLGIELDLSKVPCREEKMTPYEIMLSESQERMLIVLESGKENEAKKIFDKWNLDFAIIGKTTNSKKIEINFNEEKVADIPIDLLSEKAPIYDRKWKTTKLPQKIKFKKESFKSLKLSNCLKNLLAHPNICDKQWIWDQYDHTVMGDTIQKPGGNAGVVRVHGTEKAVAASVDSSALYCHAHPLTGGKQVVCESWRNLISVGAQPIAITNCLNFGNPEKEKNMGEFVECVQGISEASKYLDYPVVSGNVSFYNETKDKGIKPTPSI

SEQ ID NO: 167249 - protein, 70 aa, Unknown
  Bacterial polypetide isolated from the Sargasso Sea
MKSSVITFPGSNCDRDMDVALNKFGFKNKMVWHNDHELPKSDLVVLPGGFSYGDYLRCGSMASKSKIMHS

SEQ ID NO: 167250 - protein, 117 aa, Unknown
  Bacterial polypetide isolated from the Sargasso Sea
MKSSVITFPGSNCDRDMNVALNKFGFKNKMVWHNDNDLPKSDLVVLPGGFSYGDYLRCGSMASKSKIMQSVINFAKSGGLVMGICNGFQILVEAGMVPGVLLRNKYLDFICKNVFLK

SEQ ID NO: 167251 - protein, 297 aa, Unknown
  Bacterial polypetide isolated from the Sargasso Sea
MMLSESQERMLIILEDGKENEAKKIFDKWDLDFVVIGKTTSSKNLTLKFNDNIVGEIPIDALSSKAPVYDRKWIKKKPQKSKVDLKKLKKIKIEDALIKILSSPNHSNKSWITNQYDQSVMCDTVIKSGSDAAVIRIHNKDKAIAVSVDSSANYCKSHPITGGKQIVCENWRNLITIGAKPIAITNCLNFGNPENREIMGEFSECVEGIKQACEFLSYPVVSGNVSFYNGTNKKNIDPTPVIGGVGLIKKLIKPLSHSFKKDKSPLILIGKTFGHLEQSCFLKENYSINDGSPPEIN

SEQ ID NO: 167252 - protein, 114 aa, Unknown
  Bacterial polypetide isolated from the Sargasso Sea
MKSSVIIFPGSNCDRDMDVALKKFGFENQMIWHNDAKIPKSDLIVLPGGFSYGDYLRCGSIAGKSRIIKSVIDFANSGGLVLGICNGFQILTETGLLPGILQQNKYLNFICKNV

SEQ ID NO: 167253 - protein, 155 aa, Unknown
  Bacterial polypetide isolated from the Sargasso Sea
EFANSGGLILGIFYGFQILTETGLLPGILQQNKYLNFICKNVFVKVNDKNNKYFKNIKKDILELHIAHNEGNYFCSNEELKLLEDNNQIAVTYCNKMGLENDENNPNGAIKNIAGIFNKNKNVLGMMPHPERMVDAHLSGEDGSLFFENLLENLK

SEQ ID NO: 167254 - protein, 280 aa, Unknown
  Bacterial polypetide isolated from the Sargasso Sea
MLDDRNFQGLKSNISFDENELKHINIKRTKPKVAILREQGVNGQNEMAAAFTLAGFNAFDVHMQDLLDGNTNLMDFQGMAVCGGFSYGDVLGAGGGWSKTILYNNLVKDQFHEFFNNEKVFTLGVCNGCQMLSNLKDIIPGAEFWPSFERNLSDQFEARLAQVKISKTESVLLDGMEDWMIPVASAHGEGRAQFNNNDLQELEKSNQIAMHFVDSLENSSEMYPINPNGSPNGITGITASNGRVTIMMPHPERVFRKVQLSWHRKDWNEYSPWMQIFINA

SEQ ID NO: 167255 - protein, 289 aa, Unknown
  Bacterial polypetide isolated from the Sargasso Sea
ESQERMLIVLEKGKENDAKKIFDKWNLDFAVIGETTNSKKIELVFNNKKVAEIPIDLLAENAPIYDRKWKKTKLPQKIRFDKNELKTLKLSDCLKKILNNSNICDKQWIWDQYDHTVMADTIQKPGSDAGIVRVHGTKKAVAACVDSSASYCFSHPLTGGKQIVCESWRNLISVGAKPIAITNCLNFGNPEKEKNMGEFVECVEGIAAASKYLDFPVVSGNVSFYNETKDKGIKPTPTIGGVGLINNYQKIITMEFKNPGNVVYVIGKTEGHLDQSIFARDLLSEKKGP

SEQ ID NO: 167256 - protein, 96 aa, Unknown
  Bacterial polypetide isolated from the Sargasso Sea
MIANIIVFPGSNCDRDIKVALEKFQIKCKMIWHKENELPKADLVVLPGGFSYGDYLRCGSMASKSVIMKEVIKHASTGAYVIGICNNFQILTETKL

SEQ ID NO: 167257 - protein, 179 aa, Unknown
  Bacterial polypetide isolated from the Sargasso Sea
GFSYGDYLRCGSIAGKSKIIQSVIDFANSGGLVLGICNGFQILTETGLLKGVLQQNKNIEFICKNIFVKINNSENKFFENIDKDILELHIAHNEGNYFCTKDELKSLEDNNQIAAYYCSSDGKIDDKSNPNGAIKNIAGIFNEKKNILGMMPHPERMIDQSLSGEDGSIFFENLLMNLK

SEQ ID NO: 167258 - protein, 279 aa, Unknown
  Bacterial polypetide isolated from the Sargasso Sea
QILVESGLVPGLNNFKLGLALTDNKRIQGGQVVGVGYYNTWSNLKLDVQGDRCAFTRHLEQGEFINIPLAHGEGRFVIPDSLLKEITTNKQTVFRYCNDTGSVIDEFPTNPNGSIYNLAAVCNTTGNVMAIMPHPERTKKGDVIFSSMKEYIELDNPTYDCILKYNESLTKLAQYNSNNNDEWVVDMIINDNEAASIQNALVQMGHDVDISRHTHWEINIQGQKSKILSKIDKSGELYNSNKEYISNIKKTSKTASFLIRQIDDVFGRLKLESLKNTLK

SEQ ID NO: 167259 - protein, 146 aa, Unknown
  Bacterial polypetide isolated from the Sargasso Sea
MSFQEHEKLHIKQNIKRDLTKTELQVLAAEWSEHCSYKSSKKHLRMLPTTGPNVIVEKGYDSGVLDVGGGYVVTVHIESHNHPSAVEPFGGAATGVGGVIRDILSAGTRPIALFDGLRFGNIEDDVHARWLFKNAVAGIADYGNCL

SEQ ID NO: 167260 - protein, 136 aa, Unknown
  Bacterial polypetide isolated from the Sargasso Sea
ILVESGLLPGVLLKNESLNFMCEWTNLIVKNNKTPFTNKLKLNQKIPIPIANGEGRYYADKETLNQLKKNNQIVFSYENKVNGSVSQIAGVCNNDGNVVGMMPHPERAAEKEINQIDHKPSSLIFESLIETMGVKN

SEQ ID NO: 167261 - protein, 297 aa, Unknown
  Bacterial polypetide isolated from the Sargasso Sea
DFAIIGKTTKSNNIELIFINNKVAQIPINLLAENAPVYDRKWKKTKLPQKLKFNKDEFKSLSLSDCLKKILSNPNIAEKKWIWDQYDHTVMGDTIQKPGGDAGVVRVHGSNKAIAATVDSSASYCYSHPLSGGKQVVCESWRNLISVGAKPLAITNCLNFGNPEKEKNMGEFVESVEGISEASKYLEFPIVSGNVSFYNETKDKGIKPTPTIGGVGLIKDYKNMISMDFKENDNLVYVIGKTEGHLDQSIFAKDILNEKKGPPPSINLFNEKNIGLTILNLIEKKLIISCHDVSLGG

SEQ ID NO: 167262 - protein, 279 aa, Unknown
  Bacterial polypetide isolated from the Sargasso Sea
DCTPRYCKSSPFLGGMQAVCETYRNLCSVGATPIAITNCLNFGNPEKPEIMGQFVDVVKGIAEACKKLNYPVISGNVSLYNETNGIGINPTPVIGGVGLIKNINQTSNHKFKEAGNLVYIIGDTVGHLGQSILCYDILNIKRGEPPPLELEKEIKNGKFIIEAIKQNLIQSSHDVSSGGIILSILEMCIPSKIGINLNIDKFDFQLVKYLFGEDQSRYVIEVKPENEDVLLKNMKNKAISYERIGKTIKEKYIHINHKYKLDLNNLIELHNKWFKNYNK

SEQ ID NO: 167263 - protein, 288 aa, Unknown
  Bacterial polypetide isolated from the Sargasso Sea
CIRNCNGAQILVESGLVPGLKDNRVGLALTDNKRVQKGHVVGVGYYNTWANLKLSSPSKRCAFTRHLKPGEHINIPLAHGEGRFIIPEELLGEMVRNGQTVYRYCNDDGETIDEFPTNPNGSVYNLAAVCNAPGNVMAIMPHPERTKNGDVIFSSMKDFIEDGNPATEGSLNFQVYEHHIKNLPQENDTTEWVIDMIITDNEAASVNNALKRLGHDVSITRQTHWEIKTDGDHDHILRMIDDSGELYNSNKEYIGEIISNDKTVSFLVRQKEDMHGRIKYESLTERFE

SEQ ID NO: 167264 - protein, 67 aa, Unknown
  Bacterial polypetide isolated from the Sargasso Sea
EEKKPTVQVGDPFTEKLLLEAGLELMKEEAIIAIQDMGAAGLTSSSIEMASKGEVGLEIDLSKVPMR

SEQ ID NO: 167265 - protein, 70 aa, Unknown
  Bacterial polypetide isolated from the Sargasso Sea
MKSSVIVFPGSNCDRDIAVALEKMQFKNSMVWHKETVLPKSDLIVVPGGFSYGDYLRSGAIAAKSNILSE

SEQ ID NO: 167266 - protein, 141 aa, Unknown
  Bacterial polypetide isolated from the Sargasso Sea
MDNFTVGVVVFPGSNCDRDVSWALEGCLDIRTKYLWHESSDLSDVDAIVLPGGFSYGDYLRCGAIARFSPLINALDEFVKSGKRVLGICNGFQILTESGFLPGALVANKNLNFICDDVELDIVSSKGGWFNNVDEKQTIKC

SEQ ID NO: 167267 - protein, 66 aa, Unknown
  Bacterial polypetide isolated from the Sargasso Sea
MIANIIVFPGSNCDRDIKVALEKFQVKCKMIWHQENELPKADLVVLPGGFSYGDYLRCGSMASKSV

SEQ ID NO: 167268 - protein, 229 aa, Unknown
  Bacterial polypetide isolated from the Sargasso Sea
MLNRAPTLSECILWGIQGSEHCSYKSSKNHLKKFVTDGPNVILGAKEDAGVIRICKDETGLGYGLVISHESHNHPSQVVPFEGAATGIGGNIRDVTCMGAEVIALADGLRFGDFNNPKTHWIYDGVVSGLASYGNAIGVPNITGDAYFHSGFKDNCLVTVTTLGSLKDDEIIHSYAPKDANNYALILVGKPTDNSGFGGASFASVDLEEEDSDANKGAVQEPNAFLGRM

SEQ ID NO: 167269 - protein, 81 aa, Unknown
  Bacterial polypetide isolated from the Sargasso Sea
MNSSVIVFPGSNCDRDIAVALKKLQFKNKMIWHKESKLPKSDLIVIPGGFSYGDYLRSGAIAGKSLIVNEVIKAANNGCLV

SEQ ID NO: 167270 - protein, 183 aa, Unknown
  Bacterial polypetide isolated from the Sargasso Sea
MKSSVIIFPGSNCDRDMDVALKKFGFENQMVWHNDSEIPKSDLIVLPGGFSYGDYLRCGSIAGKSRIIKSVIDFANSGGLVLGICNGFQILTETGLLPGILQQNKYLNFICKNIFVKIKNKENKYFKKIKKEVLELHIAHNEGNYFCSNDELKSIEDNGQIAVTYCDHKGNDDEKNIQTVRLP

SEQ ID NO: 167271 - protein, 277 aa, Unknown
  Bacterial polypetide isolated from the Sargasso Sea
LEKVPCREDKMTPYEIMLSESQERMLLIIDEKKEKNAEKIFRKWDLDFVVIGKTIEEKKLKLNHNKQKVADIPIEALASKAPLYDRKWNKTKLPEKKIKFNALKKVKFKDTLIKILSSYNQSNKSWVTEQYDQMVMGDTLQRSGSDSAVIKIHNKDKAIAVTVDSSASYCKSHPFTGGKQIVCESWRNLIAVGAKPLAITNCLNFGNPENPDVMGQFAESVNGMKEACEFLDYPVVSGNVSFYNGTNQRNIYPTPVIGGVGILNKINHKKNHILKKE

SEQ ID NO: 167272 - protein, 186 aa, Unknown
  Bacterial polypetide isolated from the Sargasso Sea
MKSSVIIFPGSNCDRDMDVALKKFGFKNQMVWHNDAEIPKSDLIVLPGGFSYGDYLRCGSIAGKSKIIKSVIDFANSGGLVLGICNGFQILTETGLLPGILQQNKYLNFICKNVFVKIKNKENQYFKNIKKEILELHIAHNEGNYFCSKDELKSIEDNGQIAVTYCDHEGNDNEENNPNGALKNIA

SEQ ID NO: 167273 - protein, 132 aa, Unknown
  Bacterial polypetide isolated from the Sargasso Sea
LLPGVLLRNKFSEFICKNVFVKINNTENNYFKKIKKQTLELHIAHNEGNYFCTSNQFKKIEDNNQIALFYCNEKGEIKDENNPNGSKNNIAGIFNKEKNILGMMPHPERMIDKYLSGEDGSLFFENLLNNLK

SEQ ID NO: 167274 - protein, 310 aa, Unknown
  Bacterial polypetide isolated from the Sargasso Sea
YLDEKKVADIPVNTLVENSPMYDRKWKKAKLPKKNKIRKEDIKHLKIVDILKKILANPNICSKEWIWQQYDHTVMGDTIQKPGGDAGVVRVHGTDKAVAASVDSSAVYCWAHPLTGGKQVVCESFRNLISVGAKPIAITNCLNFGSPENEENMGEFVECVQGIGEASEYLKFPVVSGNVSFYNQTKDEGIKPTPAIGGVGLIKNYKNMITMEFKEVDNLVLVIGKTEGHLDQSLFARNILDEKNGPPPEVNLFNEKNNGETLLKLIDNNLIKSAHDVSLGGIITAVAKMCIKGKKRINIQKPKFLINEIE

SEQ ID NO: 167275 - protein, 94 aa, Unknown
  Bacterial polypetide isolated from the Sargasso Sea
MELHIAHNEGNYFCNDEELKSLEDKSQIAVTYCDNKGMENNKNNPNGAIKNIAGIFNENKNVLGMMPHPERMIDKYLSGEDGSLFFENLLRNFK

SEQ ID NO: 167276 - protein, 170 aa, Unknown
  Bacterial polypetide isolated from the Sargasso Sea
MKSSVIIFPGSNCDRDMDVALNKFGFKNQMVWHNDKSIPKSDLIILPGGFSYGDYLRCGSIASKSKIIKSVIDFANSGGLVLGICNGFQILTETGLLPGILQQNKYLNFICKNVFIKIKDKNNKYFKNIKKDVLELHIAHNEGNYFCTEQELKSLEDNNLIAVTYCNPKG

SEQ ID NO: 167277 - protein, 216 aa, Unknown
  Bacterial polypetide isolated from the Sargasso Sea
EACLMLDFPVVSGNVSLYNETNGQSILPTPAIGGVGLIKDSSKSVSLALSGNGEKLILVGETLGHLGQSMYLREIQGEEAGAPPPVDLIQERRNGDLVRNLIDADLITACHDISDGGLAVAAAEMAIAGNVGTVLDSTAAGGLPVHAWLFGEDQGRYLIATNKSQGVLDAAKSASVSAKIVGVASGVDISIAEFSIPIDDIRNAHEGWMPEFMATK

SEQ ID NO: 167278 - protein, 271 aa, Unknown
  Bacterial polypetide isolated from the Sargasso Sea
ESKPKVAILREQGVNGHIEMAAAFTFAGFDAVDVHMQDIICGQEDLSSFSGLIACGGFSYGDVLGAGNGWASTIKYNSNAKNAFKLFFEDEKKFALGVCNGCQMFSQIKELIPGAEIWPNFIKNDSDQFEARLSQIRIVKSDSILLKDMHDWLIPVAVAHGEGKADLSTQQIKALKKKNMVAMSFCEANGKPTKSYPMNPNGTKDGITAFTAANGRVTIMMPHPERVFRKSQLSWQPSHLKEYSPWMQMFSHARKFCDKVLINIFCTKIAS

SEQ ID NO: 167279 - protein, 141 aa, Unknown
  Bacterial polypetide isolated from the Sargasso Sea
MKSSVIIFPGSNCDRDMGVALTKFGFKNTMVWHNDQSIPKSDLIVLPGGFSYGDYLRCGSIASKSKIIKSVIDFANSGGLVLGICNGFQILTETGLLTGILQQNKYLNFICKNVFVKVKDKKNKYFKNIKKEILELHIAHN

SEQ ID NO: 167280 - protein, 183 aa, Unknown
  Bacterial polypetide isolated from the Sargasso Sea
MVMGDTIGMPGSESGVVKIHNIDKQALAITTDCTPRYCASNAHIGGMQAVCESYRNLCSVGAIPLAITDCLNFGNPEKKEVMGQIVDAIRGISDACKKLSMPVVAGNVSLYNETEGKSIPPTPQIGAVGIIKNTDNQLSNKISENNNQDIIVLGSTRGHLQCSIYAKEIAKIEKGCPPSINLD

SEQ ID NO: 167281 - protein, 133 aa, Unknown
  Bacterial polypetide isolated from the Sargasso Sea
MKSSVIIFPGSNCDRDMDVALKKFGFKNQMVWHNDAEIPKSDLIVLPGGFSYGDYLRCGSIAGKSRIIKSVIDFANSGGLVLGICNGFQILTETGLLPGILQQNKYLNFICKNVFVKIKNKENRYFKNINKEV

SEQ ID NO: 167282 - protein, 161 aa, Unknown
  Bacterial polypetide isolated from the Sargasso Sea
MSRSALRVTVAVFPGSNCDRDIMVAIEKLAGRRPAMVWHKESSLDATDLVIIPGGFSYGDYLRCGALAARSPIMEAVLDHAARGGAVMGVCNGFQILLETGLLPGVLVENAGLKYVCRNTCVEVVGGTASPFTDGLETGQRMIIPVAHNEGQYFASDEDFS

SEQ ID NO: 167283 - protein, 270 aa, Unknown
  Bacterial polypetide isolated from the Sargasso Sea
SESQERMLIVLENGKEEQAKKIFDKWNLDFAVIGKTTKSKKIELFFDDKKVADIPVNILVENSPMYDRKWKKTKLPKKNKIKKEELNSLKILNVLEKILSHPNICSKEWIWQQYDHTVMGDTIQKPGGDSGVVRVHGTNKAIAASVDSSAVYCWAHPLTGGKQVVCESFRNLISVGAKPIAITNCLNFGSPENEENMGEFVECVKGIGEASEYLKFPVVSGNVSFYNQTKDIGIKPTPSIGGVGLIKDYKNMITMDFKEIDNIVLVIGKT

SEQ ID NO: 167284 - protein, 297 aa, Unknown
  Bacterial polypetide isolated from the Sargasso Sea
LTDNKRIQGGQVVGVGYYNTWSNLKLAVEAERCAFTRHLQKGEHINIPLAHGEGRFVIPDSLLKEIISNNQTVFRYCNDAGSVVDEFPTNPNGSIYNLAAVCNTDGNVMAIMPHPERTSKGDVIFSSMKEYIELDNPIHEHALHYKETLIKPDYYNNNNNVEWVVDMIINDNEAASVQNALGQMGYDVVISRHTHWEINIKEPKSKILSEIDKSGELFNSNKEYITNIQKAHNTASYLIRQIDDVFGRSKLESLKDTFEIKEISDLKYGVIWNIKVNSGNFDSTLDSILKTNILFNP

SEQ ID NO: 167285 - protein, 67 aa, Unknown
  Bacterial polypetide isolated from the Sargasso Sea
MKSAVIVFPGSNCDRDMDVALKKFGFKNQMVWHNDHEIPKSDLIVLPGGFSYGDYLRCGSIAGKSKI

SEQ ID NO: 167286 - protein, 111 aa, Unknown
  Bacterial polypetide isolated from the Sargasso Sea
MKSHVIVFPGSNCDRDVAVAIKNISGHLPQMIWHKETSINQSDLIVVPGGFSYGDYLRCGAMASTSPIMQDVVKKAKEGIPVLGICNGFQILIESGLLDGALMRNSSLSFI

SEQ ID NO: 167287 - protein, 130 aa, Unknown
  Bacterial polypetide isolated from the Sargasso Sea
MLKGTLLRNKNLKFINKDVNIKVMNNKTKFCKKYKKDQVIKINIAHNEGNYFTDTKHLDEMKKNDLIAFKYCDESGLVNNDSNPNGAIDNIAGIYNSRKNILGMMPHPERMTDKLISNTDGSNLFSSLMN

SEQ ID NO: 167288 - protein, 146 aa, Unknown
  Bacterial polypetide isolated from the Sargasso Sea
SIRYLYGFQIFTETGLLKEFYNKISFLIHMQQCFVKVKDKHNKYFKDLKKDVLKLHIAHNEGNYFCSDDELKSLEDNNQIAVTYCGEDGTENETTNPNGAIKNIAGIFNNSKNVLGMMPHPERMIDKYLSGEDGSLFFKNILDNFK

SEQ ID NO: 167289 - protein, 305 aa, Unknown
  Bacterial polypetide isolated from the Sargasso Sea
MSFDDVLFSSTLNKLLDEWSSVSYKVQKIRDNIESAQSEKEVYKKWDEIITPKIDFSIPSPNKNLFSKKPKIALLREQGINGHYDMAAALMEAGFEVHDVHMSELPGKIKNLDSYNGLVVPGGFSYGDVLGAGSGMSNTILFNPKIKKIFKNFLENDKKFALGICNGCQFLSGLKEIVPGAENWPAFKKNLSNQYECRLVQLKIEDSPSIFLKDMKDSIIPVMVSHGEGRADFNSEEENVIARYVDPDHKITQIYPLNPNGSVNGVAGVCNDDGRITIMMPHPERTYLTKQFSWSSKDWSEHSPW

SEQ ID NO: 167290 - protein, 161 aa, Unknown
  Bacterial polypetide isolated from the Sargasso Sea
MKSSVIIFPGSNCDRDMDVALTKFGFKNKMIWHNDVELPKSDLVVLPGGFSYGDYLRCGSIAGKSKIIKSVIDFAKTGGLVLGICNGFQILTETGLLPGVLQQNKYLNFICKNVHIKINDTKNKYFKNIKKEVLELHIAHNEGNYFCSNEELKSIKNNNQI

SEQ ID NO: 167291 - protein, 52 aa, Unknown
  Bacterial polypetide isolated from the Sargasso Sea
MEVNEKIAVDHGLKPDEYKKICDLLKRVPNFTELGIFSAMWNEHCSYKSSRL

SEQ ID NO: 167292 - protein, 301 aa, Unknown
  Bacterial polypetide isolated from the Sargasso Sea
LESQERMLIILKPGSEEKAKLIFDKWDLDFAIIGKVTNTGRLILTKDGFEACDIPLKPLVEDAPEYDKPYEIKTNKKVLKPCDVKTNLTIIDILTTIFKNPNIASKKWIWEQYDSSVMGDTIFANGDSDASILKIHGTEKNESYGKGLAITTDCTPRYVKSDPIIGGMQAVCEAARNIASSGAKPLAITNNLNFGNPDKKNVMGEIVGSIKGISEAASFLRTPIVSGNVSLYNETNGKSILPTPVIGMVGAIDEVENSLEISAKLDNVLIVLGQSDNFNAGWGGCSIYQEIINKKLERAPP

SEQ ID NO: 167293 - protein, 141 aa, Unknown
  Bacterial polypetide isolated from the Sargasso Sea
MASFTVGIVVFPGSNCDRDVSWALEGCLDIKTKFLWHESSDLNDVDSIVLPGGFSYGDYLRCGAIARFSPLINSLHDFVKSGRRVLGICNGFQILTESGFLPGALVANKNLNFICDDVDLNVITSKGGWFQKSNETQKYKI

SEQ ID NO: 167294 - protein, 113 aa, Unknown
  Bacterial polypetide isolated from the Sargasso Sea
DVHIKVINNQTRFSSKYNLNQILKINIAHNEGNYFTDNKHLETLKKDNLIAFKYCDESGNINEQSNPNGAMDNIAGIFNSKKNILGMMPHPERMIDEVISNKDGVNLFSSLLN

SEQ ID NO: 167295 - protein, 276 aa, Unknown
  Bacterial polypetide isolated from the Sargasso Sea
MGIEINLNEVPCRESKMTPYEIMLSESQERMLIVLENGKEKQAKKIFDKWNLDFAVIGKTTNSKKIQLYFDDEMVADIPVNTLVENSPMYDRKWKKAKLPKKNKIKKEDLKNFKIIDVLKKVLANPNICSKEWIWQQYDHTVMGDTIQKPGGDAGVVRVHGTNKAVAATVDSSAVYCWAHPLTGGKQVVCESFRNLIAVGAKPIAITNCLNFGSPENEENMGEFVECVKGIGEASEYLKFPVVSGNVSFYNQTKDEGIKPTPAIGGVGLIKDYNKM

SEQ ID NO: 167296 - protein, 209 aa, Unknown
  Bacterial polypetide isolated from the Sargasso Sea
MAVCGGFSYGDVLGAGGGWSKTILYNNNVKNQFEEFFNNQKTFTLGVCNGCQMLSNLKDIIPDADYWPSFERNFSDQFEARLIQVKINNTNSVLLNDMDGWTVPIASAHGEGRAKFLGNSLEELKKQNQVAMTFVDSNQDPTEKYPLNPNGSIEGITGVTASNGRVTIMMPHPERVFRKHQMSWHSKDWNEFSPWMQIFINARNFSDNN

SEQ ID NO: 167297 - protein, 85 aa, Unknown
  Bacterial polypetide isolated from the Sargasso Sea
MRSSVIIFPGSNCDRDMDVALKKFGFKNQMVWHNDKSIPKSDLIVLPGGFSYGDYLRCGSIASKSKIIKSVIDFANSGGLVLGIA

SEQ ID NO: 167298 - protein, 87 aa, Unknown
  Bacterial polypetide isolated from the Sargasso Sea
MKIDDQVIEKHGLKPEEYLNIKKLLKRDPNLLELGIFSAMWNEHCSYKSSRKHLKNLFTKGKQVIQGPGENAGVVDFGDDDAIVFKI

SEQ ID NO: 167299 - protein, 134 aa, Unknown
  Bacterial polypetide isolated from the Sargasso Sea
MKSSVIIFPGSNCDRDMDVALKKFGFENQMVWHNDAKIPKSDLIVLPGGFSYGDYLRCGSIAGKSRIIKSVIDFANSGGLVLGICNGFQILTETGLLPGILQQNKYLNFICKNVFVKIKNKENKYFKKIKKDIL

SEQ ID NO: 167300 - protein, 86 aa, Unknown
  Bacterial polypetide isolated from the Sargasso Sea
KQTIKLPIAHGEGRYHCDSDTLKKLVDNELIALRYKNNPNGSSFDIAGITNEKGNVLGLMPHPERACDETIGGTDGLFTLKSLILK

SEQ ID NO: 167301 - protein, 267 aa, Unknown
  Bacterial polypetide isolated from the Sargasso Sea
ANPYLGSKIAVAETWRNLSAAGSKPLAITDNLNFGNPEKKEIMYEIKEAIRGIKEACSSLDYPVVSGNVSLYNETNGKAIYPTPIIGGIGFIKNIENTCENKLEKNATIFLIGNTRGHMNLSSFNKEVENDETGAPPKLNLDEEKKNGVFVRNIINKGLVIGCHDLSEGGVIIGLVEMIIKNNIGLEITIPQKKISDTEWLFGEDQSRYILISNKAEKLRKFAEQNNVKCQILGSVKGKSLKIKNTLEISIKELIDYNKRFFYNYNE

SEQ ID NO: 167302 - protein, 90 aa, Unknown
  Bacterial polypetide isolated from the Sargasso Sea
MKSSVIVFPGSNCDRDVAVALERMQFKNLMVWHKETELPKSDLIVIPGGFSYGDYLRSGAIAAKSNILSEVISAGKKGALILGICNGFQI

SEQ ID NO: 167303 - protein, 257 aa, Unknown
  Bacterial polypetide isolated from the Sargasso Sea
RDSHEKNPQPGDVVYMVGGRVGADGIHGATFSSLELTEESPSSAVQIGDPITQKKMVDMTLEARDAGLISCITDNGAGGLSSSIGEMAEYTNGCEIDLAKVPLKQEGLSSWEILVSESQERMTIAVKPEDVDAFEALAKLHEVEATPVASFTNTGNFHVKYGEDTVALLPIEFLHDGVPQLQLESEWKPPIIEPFIPPESADHSNILLRMLARPNIASKETWVRQYDHEVIAQTAVKPFVGVERDGPGDAGLIAPIH

SEQ ID NO: 167304 - protein, 104 aa, Unknown
  Bacterial polypetide isolated from the Sargasso Sea
MKSSVIIFPGSNCDRDMSVALTKFGFKNKMVWHNDNELPKSDLVVLPGGFSYGDYLRCGSIAGKSQIIHSVVNFAKSGGLVLGVCNGFQILTETGLLPGVCSKI

SEQ ID NO: 167305 - protein, 125 aa, Unknown
  Bacterial polypetide isolated from the Sargasso Sea
MDVTIIRFPGTNCDFDTANAVKKILGTDPKIVSCKENEIPKSDLIIIPGGFSYGDYLRSGAIAAREPIIDDLELKGNQGVYIIGICNGFQILTERKLLPGSLMKNSSLKFISKNIELKIDRNDTF

SEQ ID NO: 167306 - protein, 126 aa, Unknown
  Bacterial polypetide isolated from the Sargasso Sea
FNKTNFLILFAKMYFVKIKNKENKYFKNIKKNILELHIAHNEGNYFCSNDELKSLEDNNQIAVTYCNEQGLEGQTHNPNGALKNIAGIFNKNKNVLGMMPHPERMIDKYLSGEDGSLFFENLLENL

SEQ ID NO: 167307 - protein, 137 aa, Unknown
  Bacterial polypetide isolated from the Sargasso Sea
MNSSVIVFPGSNCDRDIAVALEKMQFKNQMVWHKETKLPKSDLIVVPGGFSYGDYLRSGAIAGKSLIINEVIKSANDGCLVLGICNGFQILTETGLLKGVLLRNKKLKFINKDVNIKVINNDTKFSNKYKKNQVLKI

SEQ ID NO: 167308 - protein, 158 aa, Unknown
  Bacterial polypetide isolated from the Sargasso Sea
MKSSVIVFPGSNCDRDVAVALEKFQIKNQMIWHNESSLPKSDLVVLPGGFSYGDYLRTGCIASKSRIISDVLKHANSGGLILGICNGFQILIETTLLPGVLLRNKKLRFLSKDVFLKVMNINNKFCLNYNKKNIIKLPIAHNEGNYFANDDLLKKLED

SEQ ID NO: 167309 - protein, 277 aa, Unknown
  Bacterial polypetide isolated from the Sargasso Sea
SVDSSANYCKSHPITGGKQIVCENWRNIISVGAKPIAITNCLNFGNPENKEVMGEFAECIDGIKEACEFLNYPIVSGNVSFYNGTNKKNIYPTPVIGGVGLIKKLTKPLDHSFKQEKSEIILIGKTFGHLGQSCFLKENYSIVEGNPPEINLTNEKNNGEIVLKLINENLVYSVHDVSNGGLIISLCEMSMINRIGVKIEKPKKLRNLFEYFFGEDQGRYVLEIDSKQIRKVEKILKLNNIYYEKIGHTQKKYFEIEGELKVDINDLFKINNNWYNS

SEQ ID NO: 167310 - protein, 185 aa, Unknown
  Bacterial polypetide isolated from the Sargasso Sea
MNSSVIIFPGSNCDRDMDVALKKFGFNNKMVWHNDNEIPKSDLIVLPGGFSYGDYLRCGSIAGKSKIISSVIKYANSGGLVLGICNGFQILTETGLLPGVLQQNKYLNFICKNTFIKINNKSNKYFKNIKKNVLELHIAHNEGNFFCSDDELKKIKDNEQIAVTYCNSNGEEDELSNPNGAINNI

SEQ ID NO: 167311 - protein, 138 aa, Unknown
  Bacterial polypetide isolated from the Sargasso Sea
MKSSVIIFPGSNCDRDMDVALKKFGFKNQMVWHNDLEIPKSDLIVLPGGFSYGDYLRCGSIAAKSKIIKSVIEFANSGGLLLGICNGFQILTETGLLPGILQQNKYQKFICKNVYVKVNNKENKYFRNIKKEVLELHI

SEQ ID NO: 167312 - protein, 142 aa, Unknown
  Bacterial polypetide isolated from the Sargasso Sea
MGFQILTETGLLNGILQQNKFLNFICCNVFVKVKDKQNKYFKDLKKDVLELHIAHNEGNYFCSDDELKSLEDNNQIAVTYCGKDGSENETTNPNGAIKNIAGIFNKNKNVLGMMPHPERMIDKYLSGEDGSLFFKNILDNFK

SEQ ID NO: 167313 - protein, 244 aa, Unknown
  Bacterial polypetide isolated from the Sargasso Sea
GAQILVESGLVPGIKKSQTIIALTDNKRIQDSHVVGTGYYNTWANLKVTVPSESTAFTRHLNHEEIIHVPFAHAEGRFIIPEDLLNELIKNDQTVFRYCNDDGEILSQFPTNPNGSDYNLAAVSNSAGNILAMMPHPERTNLGDKLFSSMREFIEQKISVKNSSLSYSPPKVNIKNYTPEENVSEWVVDMVITDNEAETVQNALKRMGIDVTIHRQQHWEISTLDDSSNTLKKIENTGVLFNSN

SEQ ID NO: 167314 - protein, 111 aa, Unknown
  Bacterial polypetide isolated from the Sargasso Sea
MDNFTVGVVVFPGSNCDRDVSWALEGCLDIRTKYLWHESSDLSDVDAIVLPGGFSYGDYLRCGAIARFSPLINALDEFVKSGKKVLGICNGFQILTESGFLPGALVANKNL

SEQ ID NO: 167315 - protein, 65 aa, Unknown
  Bacterial polypetide isolated from the Sargasso Sea
LKKLLDNELIALRYKNNPNGSSFDIAGITNEKGNVLGLMPHPERACDEAIGGTDGLFTLKSLLMK

SEQ ID NO: 167316 - protein, 174 aa, Unknown
  Bacterial polypetide isolated from the Sargasso Sea
DYLRCGSMASKSKIMQSVVNFAKSGGLVMGICNGFQILVETGLVPGVLLRNKYLEFICKNVFVKVDSKDNPYFKNLNKDIFEFHIAHNEGNYFCTKDQLKEIEDNNQIAIYYCNNNGKTEDQYNPNGSTNNIAGIFNKEKNVLGMMPHPERMIDQSLSGEDGAIFFKNLINNIR

SEQ ID NO: 167317 - protein, 301 aa, Unknown
  Bacterial polypetide isolated from the Sargasso Sea
KMISHPNICSKQWIWEQYDHTVMGDTIQKPGGDAGVVRVHGTKKAVASSVDSSATYCHAHPFTGGKQVVCESWRNLVSVGAEPIAITNCLNFGNPEKKENMGEFVECIDGINEASKYLNFPIVSGNVSFYNETKDKGIKPTPTIGGVGLIKDYKNLMTMKFKSKENLVLVIGKTEGNLDQSIFANVILDEKKGPPPEINLFNEKNNGETVLKLIKEKLPLSVHDISLGGIMIGALKMCVAGSKGIKFYKFKNLTNIYQYFFSEDQGRYIIEVEKNNLKKVESILKKNSVHFDLLGETTDKE

SEQ ID NO: 167318 - protein, 262 aa, Unknown
  Bacterial polypetide isolated from the Sargasso Sea
MLQKWEWKENNLPEINELKILSLKENKSFSFSQIILTLLSNPSIASKRWIYKQYDSQVQANTVFKPGESDAAVIRLREQNEKNKNKVFSGVAASVDCNSRWVSLDPFRGTIAAVAESARNVSCVGAEPVAITNNLNFSSPETDIGYWQLLSSCNGISEACKALDTPVTGGNVSLYNESKSKDNEITPINPTPVIGMVGKIDNVEKAISSQWKNIYDQIWLIGSHNSETTIAASSYLEYFHGEVTGRPPKIDLLDEKICQSFL

SEQ ID NO: 167319 - protein, 142 aa, Unknown
  Bacterial polypetide isolated from the Sargasso Sea
CNGFQILTETGLLPGILQQNKYLNFICKNVFVKIKNKENKYFKKIKKEVLELHIAHNEGNYFCSSDELKSIEDNDQIAVTYCDHKGNDDEKNNPNGALKNIAGIFNKDKNILGMMPHPERMIDPFLSGEDGSLFFENLIESL

SEQ ID NO: 167320 - protein, 125 aa, Unknown
  Bacterial polypetide isolated from the Sargasso Sea
LQILAAEWSEHCSYKSSKMHLRMLPTTGPNVIVEKGYDSGVLDVGDGYVVTVHIESHNHPSAVEPFGGAATGVGGVIRDILSAGTRPIALFDGLRFGDIENDAHARWLFKNAVSGIADYGNLSWH

SEQ ID NO: 167321 - protein, 98 aa, Unknown
  Bacterial polypetide isolated from the Sargasso Sea
MEVNEQIAIDHGLKKDEYKKICDLLKRSPNLTELGIFSAMWNEHCSYKSSRLHLKKLPTKGKKVIQGPGENAGVIDIEDGDAIVFKIESHNHPSFIEP

SEQ ID NO: 167322 - protein, 74 aa, Unknown
  Bacterial polypetide isolated from the Sargasso Sea
MVENHGLKTDEFERIVEGLGREPNLTELGIFSAMWNEHCSYKSSKFWLKKLPTSGERVIQGPGENAGVIDIDDG

SEQ ID NO: 167323 - protein, 127 aa, Unknown
  Bacterial polypetide isolated from the Sargasso Sea
LHQNIYLNFICKNVFIKVKDKKNKYFKNIKKDILELHIAHNEGNYFCSEQELKSLEDNSQIAITYCDSKGLENDDNNPNGAIKNIAGIFNKSKNILGMMPHPERMIDKYLSGEDGSLFFENLLENLR

SEQ ID NO: 167324 - protein, 195 aa, Unknown
  Bacterial polypetide isolated from the Sargasso Sea
HNDDELPKSDLVVLPGGFFYGDYLRCGSMASKSKIMQSVINYAKSGGLVMGICNGFQILVETGLVPGVLLRNKYLEFICKNVFVKLNNKKNSYFKNLEKDILELHIAHNEGNYFCTRDQLKEIEDNDQIAIYYCDKEGKIQDQFNPNGSIKNIAGILNKEKNVLGMMPHPERMIDKSLSGEDGSLFFKNLINNIK

SEQ ID NO: 167325 - protein, 101 aa, Unknown
  Bacterial polypetide isolated from the Sargasso Sea
KNLKKDILELHIAHNEGNYFCSNDELKSLDDNNQIAVTYCSDKGLEEEIYNPNGAIKNIAGIFNKNKNVLGMMPHPERMIDKYLSGEDGSLFFENLLGNLK

SEQ ID NO: 167326 - protein, 84 aa, Unknown
  Bacterial polypetide isolated from the Sargasso Sea
MEVTEAVAIDHGLKKEEFSKICELLKRTPNLTELAIFSAMWNEHCSYKSSRKHLKKMHTKGKQVIQGPGENAGVIDIGDDDAIV

SEQ ID NO: 167327 - protein, 174 aa, Unknown
  Bacterial polypetide isolated from the Sargasso Sea
DYLRCGSMASKSKIMKSVINFANSGGMVMGICNGFQILVETGLVPGVLLRNKYLEFICKNVFVKIKNKKNTYFQNIDNDVLEFHIAHNEGNYFCTKDQLKKIEDNEQVAINYCDKDGKTEEQFNPNGSIKNIAGIFNKEKNVLGMMPHPERMIDPSLSGEDGSLFFNNLINNLK

SEQ ID NO: 167328 - protein, 290 aa, Unknown
  Bacterial polypetide isolated from the Sargasso Sea
MLPADFIARGIISGVRVGGNCSGIPTPQGNVYFDDRFAGKPLVFCGTVGIIPKKIKGKLAHNKKANPGDIIIIAGGRVGKDGIHGATFSSEELDPNSPVSAVQIGDPITQKKMSDVIIRELRDENFYSSITDNGAGGLSSSIGEMAKESGGFMVNLEKVPLKYNGLYPWEIWVSESQERMTLAVPPTKVKKVIELFNTRGVEATVIGKFIKKEKAIVKYNKTEILNLDMEFLHEGYPKLNLKTSFRKNKKEKKKIIKISSLIDKLHKLLSSPHIVSKEFIATQYDHEVQA

SEQ ID NO: 167329 - protein, 75 aa, Unknown
  Bacterial polypetide isolated from the Sargasso Sea
MRSSVIVFPGSNCDRDIAVALEKLQFKNTMVWHKETKMPKSDLIVVPGGFSYGDYLRSGAIAAKSNILNEVIKAG

SEQ ID NO: 167330 - protein, 168 aa, Unknown
  Bacterial polypetide isolated from the Sargasso Sea
MKSSVITFPGSNCDRDIDVALKKFGFKNKMIWHNDNELPKSDLVVLPGGFSYGDYLRCGSVASKSKIMQSVINFAKSGGLVMGICNGFQILVETGLVPGVLLRNKYLEFICKNVFVKIDNKNNPYFKNLEKDIFELHIAHNEGNYFCTKDQLKEIQDNNQVAIYYCDN

SEQ ID NO: 167331 - protein, 167 aa, Unknown
  Bacterial polypetide isolated from the Sargasso Sea
MASKSKIMQSVINFANSGGMVMGICNGFQILVETGLVPGVLLRNKYLEFICKNVFVKINNKKNKYFKNVDNEVLEFHIAHNEGNYFCTNDQLKEIEDNNQIAINYCDENGKIEDQFNPNGSIKNIAGIFNKEKNVLGMMPHPERMIDTSLSGEDGSLFFKNLINNLK

SEQ ID NO: 167332 - protein, 88 aa, Unknown
  Bacterial polypetide isolated from the Sargasso Sea
MKSAVIVFPGSNCDRDVQVALASSTDIPPVMIWHGDTGLPSVDLIVVPGGFSYGDYLRAGSMAANSPVMREVVTKAKAGTPVLGICNG

SEQ ID NO: 167333 - protein, 81 aa, Unknown
  Bacterial polypetide isolated from the Sargasso Sea
MKSSVITFPGSNCDRDIDVALKKFGFKNKMVWHADTEIPKSDLVVLPGGFSYGDYLRCGSMASKSKIMQSVINFANSGGMV

SEQ ID NO: 167334 - protein, 241 aa, Unknown
  Bacterial polypetide isolated from the Sargasso Sea
LSSSCNGISEACKVLETPVTGGNVSLYNESKNKDNEINPINPTPVIGMVGKIDNIQKAISSGWKNTNDQIWLIGSYKSETTLAASSYLEYFHGEITGRPPKIDLLDEKFCQSFLRNAIFKSFILSSHDVSDGGLAIALAECCILSRKGAKIELEKDFNREDNLLFSEGGSRIVFSIDKIKEKEWLDYLKKIQINSHSSVYVKKIGCVSSETLNIKIQDKNICNIRVEELTEKFNNSISVHF

SEQ ID NO: 167335 - protein, 151 aa, Unknown
  Bacterial polypetide isolated from the Sargasso Sea
MGGLVLGICNGFQILTETGLLKGVLQQNKNIEFICKNIFVKVNNSENKFFKNIDKDVLELHIAHNEGNYFCTEDELKSLEDNNQIAAYYCSSDGKVDDKSNPNGAIKNIAGIFNEKKNILGMMPHPERMIDQSLSGEDGSIFFENLLKNLK

SEQ ID NO: 167336 - protein, 154 aa, Unknown
  Bacterial polypetide isolated from the Sargasso Sea
MNSSVIIFPGSNCDRDMDVALKKFGFKNKMVWHDDDKLPKSDLIVLPGGFSYGDYLRCGSIAGKSKIIQSVIDFANSGGLVLGICNGFQILTETGLLKGVLQQNKNIEFICKNIFIKINNAENKFFSNIEKDILELHIAHNEGNYFCSENELKS

SEQ ID NO: 167337 - protein, 106 aa, Unknown
  Bacterial polypetide isolated from the Sargasso Sea
METKFTSKYNLNQILEINIAHNEGNYFTNETHMEELKKENLIAFKYCDEKGVVNDRSNPNGALENIAGIFNAKKNILGMMPHPERMIDKLISNTDGINLFSSLISK

SEQ ID NO: 167338 - protein, 289 aa, Unknown
  Bacterial polypetide isolated from the Sargasso Sea
IMLSESQERMLIVLEEGKEKEAKKIFDKWNLDFAVIGKTTDSKNIELFFKNEKVAEIPIDFLAKNAPMYDRKWIKSELPKENSFSKDQFKSLKLGECLNKILQDPNISDKEWIWSQYDHTVMGDTIQKPGGDAGVVRVHGTNKAVAAAVDSSATYCNAHPLTGGKQVVCESWRNMISVGAKPIAITNCLNFGNPEKEKNMGEFVECVEGISEASKYLNYPVVSGNVSFYNETKDKGIKPTPSIGGIGLLANYKKMITMELKNNGNYLFVIGKTEGHLDQSVFARNILSK

SEQ ID NO: 167339 - protein, 171 aa, Unknown
  Bacterial polypetide isolated from the Sargasso Sea
MNSSVIVFPGSNCDRDIATALTKLQFKNKMVWHKDNKLPKSDLIVIPGGFSYGDYLRSGAIAAKSNILNEVIKAANSGCLILGICNGFQILIETGLLKGALLRNKDLKFISKDVYLKVTNNNNKFCKNYKKNNIIRLNIAHNEGNYFTQKDHLKELEDKELIPFKYCNKNG

SEQ ID NO: 167340 - protein, 109 aa, Unknown
  Bacterial polypetide isolated from the Sargasso Sea
ISKVVDLRVKNISSTFTHNYSFNSIISIPIAHHEGNYFAAKDDLKKLHDENRIAFEYIENPNGASDNIAGILSKNHRVLGMMPHPERHTESAHGCQDGYPFFKGLLETS

SEQ ID NO: 167341 - protein, 281 aa, Unknown
  Bacterial polypetide isolated from the Sargasso Sea
KTGDVIAAQDMGAAGLTCSSAEMAANGNLGISIDLDLVPSREDDMSSYQYLLSESQERMLFVVKEEKINDLIEKFNKWGLYASVIGEVIETNEVIISHKGKIVAQIPTSALSDDTPVNFHNVINNPPNDLLNKWEWKENDLPEIHEQKIFSLKENKNFSFSEIILKLLSNPSIASKRWIYKQYDSQVQVNTVFKPGKSDAAVIRLREQNKKNKSKVFSGVAASVDCNSRWVALDPFRGSIAAVAESARNVSCVGAEPVAITNNLNFSSPENEIGYWQLSSS

SEQ ID NO: 167342 - protein, 305 aa, Unknown
  Bacterial polypetide isolated from the Sargasso Sea
GIELNLNKVPCREEKMTPYEIMLSESQERMLIVLESGKEERAKKIFDKWNLDFAIIGKTTDTKKIEIYFDKKKVADIPIDCLSENAPIYERKWKKTKLPQKLKFKKEKFKSLKVSDCLKKVLSNPNICDKEWIWEQYDHTVMGDTIQKPGGDSGVVRIHGSKKAVAASVDSSASYCFAHPNTGGKQIVCESWRNLISVGATPIAITNCLNFGNPEKEKNMGEFVECVEGISEASKYLDFPIVSGNVSFYNETKDKGIKPTPAIGGVGLIKNYKNMITMDFKKENNIVFVIGKTEGHLDQEHIAKD

SEQ ID NO: 167343 - protein, 177 aa, Unknown
  Bacterial polypetide isolated from the Sargasso Sea
GDYLRCGALAARSPVISSIKNHISRGGAVLGVCNGFQILIEAKILPGSLLRNKKLLFTCRETTLEVQSCIKNPFLSNFKIGECLKIPVAHNEGNYFAPKDLLKELKEEGRIALKYIKQKDREKNYNPNGSTEDIAGILSNNGRVLGMMPHPERAINYLQGGTDGLKLLTNCIEQIIG

SEQ ID NO: 167344 - protein, 71 aa, Unknown
  Bacterial polypetide isolated from the Sargasso Sea
MGLTRDEYNLICKKINKTPNMTELGIFSAMFSEHCSYKSSKKWLKTLPTEASHVIQGPGENAGVIDIGENL

SEQ ID NO: 167345 - protein, 266 aa, Unknown
  Bacterial polypetide isolated from the Sargasso Sea
QPLSAYEILLSESQERMLAVIDEKNNFKVKKILQKWQIDYEVIGEITNNKRVVFESNNEKVVDLPVDIIVDDAPEYDREFYMPRKRKGKDFDFSNIKLEDIINTLLSNLNYLDKSWVFNQYDSTVMGDTVKEPGQSSGIVKIHGTKKVIGATTDCNPLYIRINPYEGMKYTVAESYRNLIACNIRPLAITNNLNFASPLDPNIMGELVLSIDGLKTAAAKFNTPIVSGNVSLYNQTNEIPIKPTPVIGMIGSNQDLKKINSNKFCN

SEQ ID NO: 167346 - protein, 164 aa, Unknown
  Bacterial polypetide isolated from the Sargasso Sea
KSKIMQSVINFANSGGMVMGICNGFQILVETGLVPGVLLRNKYLEFICKNVFVKINNKNNSYFKNINNNVLELHIAHNEGNYFCTKDQLKEIEDNTQIAINYCDSEGKIEETFNPNGSIKNIAGIFNKEKNVLGMMPHPERMIDPSLSGDDGSIFFKNLINNLK

SEQ ID NO: 167347 - protein, 205 aa, Unknown
  Bacterial polypetide isolated from the Sargasso Sea
MKASIIVFPGSNCDRDIAVSIKKLTDLKPIMVWHKETSIPDSDLIVIPGGFTFGDYLRCGSIAANSPIMNDVIKKATDGLPTLGICNGFQILTESGLLPGTLIKNDCLSFLCKTVSIRVENNETNFSKKYKQNEVINIPIAHNEGNFFANEDTLKKIKDSNQIIFKYCNQNGEVNNEANPNGSIENIAGITNEQGNVLGMMPHPE

SEQ ID NO: 167348 - protein, 89 aa, Unknown
  Bacterial polypetide isolated from the Sargasso Sea
NIAHNEGNYFTKEKHLKKLEQENLIAFKYCDKNGKIDDDANPNGSLNNIAGIFNNKKNILGMMPHPERMIDRIISNEDGINLFQSLLNK

SEQ ID NO: 167349 - protein, 264 aa, Unknown
  Bacterial polypetide isolated from the Sargasso Sea
RDWIWEQYDTSVMGDTVIPPGQNSGVIRVHNTNKKLCASVDCTPRYVSADPFLGSMQAVCEAYRNIISVGGTPLAITNNLNFGNPEKKEIMGQIVHSIKGISEASLKLNMPVISGNVSLYNETNGKAILPTPVIGAVGAIDENKNSVSLSNAVDGNSIYVVGQDNSHTDGWVGQSIYAQEILNIDKDYAPPPVNIDAELANGNFILKAIEQKLTNCVHDISDGGLAIAISEILLSSRAKGIGAVINKNYIHNSESFWFGEDQGR

SEQ ID NO: 167350 - protein, 269 aa, Unknown
  Bacterial polypetide isolated from the Sargasso Sea
VSCVGAEPVAITNNLNFPSPETDIGYWQLSSSCNGISEACNAFETPVTGGNVSLYNESKNKENVITPINPTPVIGMVGKIDNVEKAISSEWKNIHDQIWLIGSYKSETTISASSYLEYFHGEITGRPPKLDLGDEKFCQGFLRNAILKSLVVSSHDVSDGGLCIALAECCILSGKGATIDLNKDFNRDDNLLFGEGGSRIIFSIDKMKENEWLNYLKENQINFQQSIYVKKIGNVSSKNLNIKIIDKDICNIRVEELTEKFNNSISGHL

SEQ ID NO: 167351 - protein, 109 aa, Unknown
  Bacterial polypetide isolated from the Sargasso Sea
KNKQSKYFKNLKKNILELHIAHNEGNYFCSQDELKNLEDNDQIAVAYCNEKGSEEEIHNPNGALKNIAGILNKNKNVLGMMPHPERMIDKYLSGEDGSLFFENLLGNLN

SEQ ID NO: 167352 - protein, 148 aa, Unknown
  Bacterial polypetide isolated from the Sargasso Sea
MKVAIVVFPGTWSDEDCVYAMHQVGAEPYKVWHTEKRLGSPDLVIIPGGFSYGDYLRCGAIARFSNIMEDIISYAKNGGLVVGICNGFQILCESGLLPGVLIRNDSLQFRCQDTFLKLNDNVIDSPFLNSINKNPSLKIPISHGSGNY

SEQ ID NO: 167353 - protein, 247 aa, Unknown
  Bacterial polypetide isolated from the Sargasso Sea
VLLEEMIGNEQTVYRYCNDNGQTIDEFPTNPNGSVYNLAAVCNAPGNVMAMMPHPERTKNGDVIFSSMKDFIEHDKPTIEGSLKFQAPEHHIKKLPQENDTTEWVIDMIITDNEAASVNNALKRLGHDVCITRQTHWEIKTDGDHDHILRMIDDSGELYNSNKEYIGEIISNNKTVSFLVRQKEDMHGRIKYESLTERFEIEGLKKLRRGVVWNLSINSGNINTVVNDILNTNILFNPLSHECYKIN

SEQ ID NO: 167354 - protein, 98 aa, Unknown
  Bacterial polypetide isolated from the Sargasso Sea
KYKKDQVLKINIAHNEGNYFTNPDHLKELNNENLIAFKYCDENGNINKKSNPNGSLENIAGIYNSKKNILGMMPHPERMVDNIISNTDGINLFSSLLN

SEQ ID NO: 167355 - protein, 282 aa, Unknown
  Bacterial polypetide isolated from the Sargasso Sea
VQIGDPLTQKRLTDFLLKARDLGLYSSLTDNGAGGLSSSVGEMAECTGGATLDLSKCPVKYRGLKAWELMISESQERMTFAVPPSKSRAFEDLGRKYGVSVTDIGFFHNKGVLEVFHLGERVAFLDLPLIHDLLPPMKLKALWKGPRKRKEWWKGRNESSEKEFFKEKNVLEVLMKLLSSPNIVSKENWVRQYDHEVLGSTHLKPFVGKKGDGPGDSSALWLYPHGGEENSVIQIGCGLAPKISLWDPYVMAQYAVDEAIRNIVANGGDIDQCALLDNFCWP

SEQ ID NO: 167356 - protein, 288 aa, Unknown
  Bacterial polypetide isolated from the Sargasso Sea
KLLLEACLEFLKDNSIISIQDMGAAGLTSSSVEMASKGKLGIELNLNKVPCREKGMSPYEMMLSESQERMLIILDDKKEEQAKKIFEKWDLDFVVIGKTTNNERLVLNFDDKKVADIPIIALAEKAPLYDRKSIKSKLSRNKVKIKNLKKIKIEDALIKILGSPNQSNKSWITDQYDQVVMCDTIQKSGGDAAVIRIHNKDKAIAISVDSSANYCNADPKSGAKQIVCENWRNLISVGAKPLAITNCLNFGSPEKSKVMGEFIECIEGMKEACEFLNFPVVSGECIFL

SEQ ID NO: 167357 - protein, 231 aa, Unknown
  Bacterial polypetide isolated from the Sargasso Sea
NCDIDTKNYFENSFYISYKETTLPNLDLLVLPGGFAFGDRYYKKATEQYEINPGKMAIECNVTKIIYEAHKKNIPILGICNGFQILIKLGLLPGQLLMNEKKKFISRLVKCKLNEQEIKLNIANKFGNYQIDKEGYNSLLENNQIFLKYEYYVNGSYKNIAGVCNKERNVFGLMPHPERSKNNFKTFLFEEINSNNFHYRIERLIKSEHISYKSTKKYLSKLYTKNNNIIQ

SEQ ID NO: 167358 - protein, 141 aa, Unknown
  Bacterial polypetide isolated from the Sargasso Sea
ILVETGLVPGVLLRNRYLEFICKNVFIKPANKKNLYFKNIDKDILEFHIAHNEGNYFCTNDQLKEIEDNNQIAIYYCNNKGQIEEKFNPNGSIKNIAGIFNKEKNVLGMMPHPERMIDQCLSGEDGSLFFKNLINNIKNAS

SEQ ID NO: 167359 - protein, 318 aa, Unknown
  Bacterial polypetide isolated from the Sargasso Sea
LLELNIPLTVSEALKIQTQMLERPPSITELVLFSIQGSEHCSYKSSRTHLKNFVTTGPDVILGAKEDAGVISITKDKKGNRWCIVMSHESHNHPSQIVPYEGAATGVGGNVRDVMCMGAEVISNSDSLRFGNLKSDKTKWIHNEVIAGIAGYGNPIGVPNVGGDLYYNNGYDENCLVTLTTLGIIREDEIIHSFAPKNAAGYDLILVGKPTDNSGFGGASFASLELEEEKADKNKGAVQEPNAFLERHLLKSSYELFRILKERNLISQVGFKDLGAGGVACASVELAETSGFGAEVWVDKIPVSMKDLHPSVVLCSET

SEQ ID NO: 167360 - protein, 70 aa, Unknown
  Bacterial polypetide isolated from the Sargasso Sea
MKSSVIVFPGSNCDRDIAVTLEKLQFKNSMVWHKETELPKSDLIVIPGGFSYGDYLRSGAIAAKSNILSG

SEQ ID NO: 167361 - protein, 135 aa, Unknown
  Bacterial polypetide isolated from the Sargasso Sea
ETGLLPGVLLRNKKLRFLSKNVYLKVINHNNKFCSNFTKKNIIKLPIAHNEGNYFANNDIIKNLEDNNLIAFKYCDEKGNINKDSNPNGSINNIAGILNSKKNILGMMPHPERVIDPFLSSEDGSIMFESLIKSN

SEQ ID NO: 167362 - protein, 261 aa, Unknown
  Bacterial polypetide isolated from the Sargasso Sea
IAITNNLNFSSPENEIGYWQLSSSCKGISEACKALETPVTGGNVSLYNESKNKDNKVTPIMPTPVIGMVGKLDNVEKAISTKWKNFHDEIWLIGSCKSETTIAASSYLEYFHGEITGRPPKIDLLDEKLCQSFLRNAILNNLVVSAHDISDGGLAIALAECCIMSSKGATIELQKELNRDDNLLFAEGGSRIIFSIDKMREKEWLNYLERIQVNFSSSIYVKKIGNVTSETLKINIEDKNICNIRVEELTKKFNNSISAYF

SEQ ID NO: 167363 - protein, 241 aa, Unknown
  Bacterial polypetide isolated from the Sargasso Sea
MVRANTMVNPGSDAAVIRIKADSVPGGDDREDFPEKLVALAVDCNATHVYLDPYEGSKAAVAECARNLACSGATPIGTTDNLNFGNPHNPELFWQLKEAVRGLAEGCIAFDAPVTGGNVSLYNQNPDGAIDPTPTVAMAGLVEEERHVTTQWFKEDGDAVILLGAPVDSEDALQGLGGSAYLQVAHEAKTGQPPRCNLETERTLGTTLLGLIQSDLVKSAHDCSEGGLAVALAECTFSELE

SEQ ID NO: 167364 - protein, 242 aa, Unknown
  Bacterial polypetide isolated from the Sargasso Sea
GLSLSENKRVKNGQVVGIGYFNTWVYLKSSYNNDQCAFTRTLKPEEIINIPLAHGEGRFLLKKSLLEDLISNNQIPFRYSNSRGEILEDYPTNPNGSIYNIAAVCNQSGNVMAIMPHPERTELGDEIFKSMKDFINNGTVFKRTLLSKTQRSIEIKNYKRKKECHELVIDMIITDNEALSVENTLNQLGHDVFISRKSHWEIHLKKMTPQATSLIEKSGEIYNPNKEFISKIENEKNTVTFL

SEQ ID NO: 167365 - protein, 208 aa, Unknown
  Bacterial polypetide isolated from the Sargasso Sea
MSFQEHEKLHIEKNVKRELTSTELQILAAEWSEHCSYKSSKMHLRMLPTTGPNVIVEKGYDSGVLDVGDGYVVTVHIESHNHPSAVEPFGGAATGVGGVIRDILSAGTRPIALFDGLRFGDIENDAHARWLFKNAVSGIADYGNCLGIPTIGGEVEFDTCYTNYALVDVAAVGFGKKSKLIKNHANINDLVLLIGGSTGRDGVGGSQF

SEQ ID NO: 167366 - protein, 80 aa, Unknown
  Bacterial polypetide isolated from the Sargasso Sea
FASKEQIEKLEDKNLVAFKYCDEKGNINKNTNPNGSSNNIAGILNDKKNILGMMPHPERLIDPLLSGEDGSLMFESLIKA

SEQ ID NO: 167367 - protein, 67 aa, Unknown
  Bacterial polypetide isolated from the Sargasso Sea
MDNFTVGVVVFPGSNCDRDVSWALEGCLDIRTKYLWHESSDLSDVDAIVLPGGFSYGDYLRCGAIAR

SEQ ID NO: 167368 - protein, 67 aa, Unknown; identical to SEQ ID NO: 167367
  Bacterial polypetide isolated from the Sargasso Sea

SEQ ID NO: 167369 - protein, 141 aa, Unknown
  Bacterial polypetide isolated from the Sargasso Sea
MKSSVITFPGSNCDRDMDVALKKFGFNNKMVWHDDNELPKSDLVVLPGGFSYGDYLRCGSMASKSKIMQSVINFAKSGGLVMGICNGFQILVETGLVPGVLLRNKYLEFICKNVFVKIDNKENPYFKNLSKDVFEFHNSSQ

SEQ ID NO: 167370 - protein, 239 aa, Unknown
  Bacterial polypetide isolated from the Sargasso Sea
IISIQDMGAAGLTSSSVEMASKGELGIELNLDKVPCREENMTPYEMMLSESQERMLIILEDGKEQHAKKIFKKWDLDFVIIGKTTDTNKLTLKYNNKIEGEIPLDALASKAPIYDRKWVKKKLTKSKIDLKKLKKIKIEDALIKILSSANHSNKNWITSQYDQMVMCDTAQKSGADAAIIRIHKKEKAIAVSVDSSSNYCKSHPLTGGKQIVCENWRNLISVGAKPIAITNCLNFGNPK

SEQ ID NO: 167371 - protein, 172 aa, Unknown
  Bacterial polypetide isolated from the Sargasso Sea
DYLRSGAIAAKSNILNEVIKAGKDGSLILGICNGFQILIECGLLQGALLRNSGLKFISKDIFVKVQSTKNKFLNKYKINEILKLNIAHNEGNFFTSKEHLKELEDNDLIPIKYCDKDGKVSSESNPNGSLNNIAGIFNKNKNILGMMPHPERMVDKICSDEDGLPLFLSLMN

SEQ ID NO: 167372 - protein, 223 aa, Unknown
  Bacterial polypetide isolated from the Sargasso Sea
HMQDLLDKNINLKSFNGMAACGGFSYGDVLGAGGGWAKTILNNEIVKDQFEEFFTNKNTFTLGVCNGCQMISKLKEIIPGAINWPSFEKNLSDQFEARLVQVEIQKTNSILLDNMDGWTLPVASAHGEGYARFENDSLKKLNESSQIALNFVNSDGKKTEIYPINPNGSEEGVTGVTSDDGRVTIMMPHPERVFRKIQMSWHPKHWEEFSPWMQLFINAKKIV

SEQ ID NO: 167373 - protein, 231 aa, Unknown
  Bacterial polypetide isolated from the Sargasso Sea
PPSIHELVLFSIQGSEHCSYKSSRNHLKKFTTDGPHVVLGAKEDAGVVSIATDKNGKRWCIVMSHESHNHPSQIVPYEGAATGVGGNVRDVMCMGAEVIACTDSFRFGDIKNQKTKWIHHGVVSGVAGYGNPLGIPNIGGDVYYNERYSDNCLVTLVTLGIVREDNIIHSYAPENADGHDLILIGKPTDNSGFGGASFASLELVEDEKEKNKGAVQEPNAFLERHLLKSSY

SEQ ID NO: 167374 - protein, 275 aa, Unknown
  Bacterial polypetide isolated from the Sargasso Sea
IGIELDVKNVHLRESDLSPDEIMISESQERMLVISSPDNLSKIEKICDKFRIQCSVIGKVKEDKMMHVKNGNDTLALLPADFVARGPLIDRPKSKPEYLSKLPSSPPSENQLPLSETLLKLLSSPNIASKHWVFRQYDHEVGIRTVIKPGFDSSVLRLDNGKSLSVKIDGNPKHCYIDPRQGAIGCFEEACRNVVCTGATPMGMVDHLQFGNPEDPEIFWTFMESIEGITDFAKFLNVPCVGGKVSFYNETSEGPIKPTPLIGVLGLIENSPLLP

SEQ ID NO: 167375 - protein, 237 aa, Unknown
  Bacterial polypetide isolated from the Sargasso Sea
MNSKPQIAYIQFPGSNTEAETVAAVERNHMVAVPHFWNEPIEKLRDYHGYIVLGGFSYEDRSRSGIIASLEPIMDQIKKEVLMGKPLLGICNGAQILVEAGIVPGNKNFDTVVGLTENKRIQNNQIVGTGYYNTWCHVKANKKSVSAFIEKGSAPLYIPIAHAEGRFVMDKELLKLVVEKNLINYSYCAPDGKTDSSFPTNPNGSIENIAALGNTAGNAMAIMPHPERTINGEGDSI

SEQ ID NO: 167376 - protein, 135 aa, Unknown
  Bacterial polypetide isolated from the Sargasso Sea
LIETGLLKGALLRNRNLKFINKDINIKVINNDTKFSNKYKKDQVLKINIAHNEGNYFTNPNHLKELNNENLIAFKYCNQNGEITKESNPNGSLENIAGIFNTKKNILGMMPHPERMVDNLISNTDGVNLFSSLLK

SEQ ID NO: 167377 - protein, 46 aa, Unknown
  Bacterial polypetide isolated from the Sargasso Sea
LKNIAGIFNKEKNVLGMMPHPERMIDKSLSGEDGSLFFKNLLNNIK

SEQ ID NO: 167378 - protein, 87 aa, Unknown
  Bacterial polypetide isolated from the Sargasso Sea
MKSSVIIFPGSNCDRDMDVALKKFGFKNQMVWHNEKSIPKSDLIVLPGGFSYGDYLRCGSIASKSNIIKSVVDFANSGGLVLGICNG

SEQ ID NO: 167379 - protein, 140 aa, Unknown
  Bacterial polypetide isolated from the Sargasso Sea
LSILVETGLVPGVLLRNKYLEFICKNVFIKIDNKENPYFKNLDKDVFEFHIAHNEGNYFCTKDQLKEIEDNHQIAIYYCNNKGHTEEKFNPNGSTKNIAGIFNKEKNVLGMMPHPERMIDQSLSGEDGSIFFKNLINNLK

SEQ ID NO: 167380 - protein, 276 aa, Unknown
  Bacterial polypetide isolated from the Sargasso Sea
KGKLAHLKKARPGDAIIMVGGRVGKDGIHGATFSSEELDTKSPVTAVQIGDPITQKKFSDVIIKELRDENLYNSITDNGAGGLSSSVGEMAKEAGGFVVDLDLVPLKYTGLQPWEIWISESQERMTMAVPLKNQKKVIELLNKRGVEASVIGKFVKKKSAIVKYKDSEVLNMDMNFLHEGYPKKILKSKKPNMILKKNMFLNKKNYRDILINILSSPNITSKEFISSQYDHEVQGTSVIKPLQGVGRVFSDATVIKPLFTSERCVAVSQGQYIPNL

SEQ ID NO: 167381 - protein, 89 aa, Unknown
  Bacterial polypetide isolated from the Sargasso Sea
MKSAVIIFPGSNCDRDMDVALKKFGFKNEMVWHDDEQLPKSDLIVLPGGFSYGDYLRCGSIAGKSKIIKSVIDFAAKGGLVLGICNGFQ

SEQ ID NO: 167382 - protein, 115 aa, Unknown
  Bacterial polypetide isolated from the Sargasso Sea
NVHVKVKDKKNKYFNNIKKDILELHIAHNEGNIFCSKDEIKSLEDNKQIAVTYCDQKGIENDENNPNGALKNIAGIFNKNKNVLGMMPHPERMIDKYLSGEDGSLFFENLLGNFK

SEQ ID NO: 167383 - protein, 93 aa, Unknown
  Bacterial polypetide isolated from the Sargasso Sea
WTSIAHNEGNYFCSEDELKNLEDNNQIAVAYCNEKGSEEEINNPNGALKNIAGIFNKNKNVLGMMPHPERMIDKYLSGEDGSLFFENLLGNLN

SEQ ID NO: 167384 - protein, 276 aa, Unknown
  Bacterial polypetide isolated from the Sargasso Sea
PKKKILLKDLKKVKFDETLIKILSSPNHTNKKWITEQYDQMVMCDTLQRSGSDAAVIRVHDKNKAIAVTVDSSANYSKSHPLTGGKQVVCESRRNLIAVGAKPIAITNCLNFGNPENPKIMGEFAETIIGMKEACEFLDYPVVSGNVSFYNGTNQKNIYPTPVIGGVGLIKKIKKPIGSFFKEENSVVLLVGKTFGHLYQSAFFDEIYSIKDGPPPEINLLNEKNNGDSVLKLITDGLVLSAHDVSTGGLIVGLAEMAMGSNYGIKIDKPKKLANL

SEQ ID NO: 167385 - protein, 49 aa, Unknown
  Bacterial polypetide isolated from the Sargasso Sea
NGAIKNIAGIFNEKKNILGMMPHPERMIDQSLSGEDGSIFFENLLKNLK

SEQ ID NO: 167386 - protein, 299 aa, Unknown
  Bacterial polypetide isolated from the Sargasso Sea
MENWHKVGFEIQSLRDNPVTAEAEFKNDTDINNSGLRPKINFSIPKKIQLNSTRPRVAILREQGVNGQNEMAAAFNEVGFDCIDVHMTDLISARHTLAEFEGLVACGGFSYGDVLGAGGGWANSILFNEDLRKQFGDFFHNENVFSLGVCNGCQTLSLLKSLIPGATNWPDFKRNKSEKFEARLVQVSVKESPSIFFKDMGDSIITVPVAHGEGRVDASDRDISELNKNHHTTITYSDDKGSFTENYPANPNGSLDGIAGVTNISGTVTIMMPHPERAFLKDQYSWSPDEWTHYSPLDK

SEQ ID NO: 167387 - protein, 43 aa, Unknown
  Bacterial polypetide isolated from the Sargasso Sea
IAGIFNKEKNVLGMMPHPERMIDSSLSGEDGSLFFKNLINNIK

SEQ ID NO: 167388 - protein, 299 aa, Unknown
  Bacterial polypetide isolated from the Sargasso Sea
HTVMGDTIQKPGGDAGVVRVHGTDKAIAASVDSSAVYCWAHPLTGGKQVVCESFRNLISVGAKPIAITNCLNFGSPENEENMGEFVECVQGIGEASEYLKFPVVSGNVSFYNQTKNEGIKPTPTIGGVGLIKNYKNMVTMEFKEFDNLVLVIGKTEGHIDQSLFARNVLDEKNGPPPEVNLFNEKNNGETLLKLIDNSLIKSAHDVSLGGIITAVAKMCIKGKKGIYIKKPKYLINEIEYLFAEDQSRYIIEINKKDFKKVADILNKNAVHFDELGTTIENELYINDKTKVTIDELATS

SEQ ID NO: 167389 - protein, 187 aa, Unknown
  Bacterial polypetide isolated from the Sargasso Sea
MKSSVIIFPGSNCDRDMDVALRKFGFKNQMVWHDDINLPQSDLIVLPGGFSYGDYLRCGSIAGKSKIINSVINYANSGGLVIGICNGFQILTETGLLSGVLQQNENIKFICKNVFVKINNIENKYFKNIKKNILKLHIAHNEGNYFCSNDELKSIQDNNQIALSYCNKNGEVNEENNPNGAIENIAG

SEQ ID NO: 167390 - protein, 51 aa, Unknown
  Bacterial polypetide isolated from the Sargasso Sea
NPNGSIKNIAGIFNKEKNVLGMMPHPERMIDQSLSGEDGSVFFENLIKNVK

SEQ ID NO: 167391 - protein, 186 aa, Unknown
  Bacterial polypetide isolated from the Sargasso Sea
MNSSVITFPGSNCDRDMDVALKKFGFKNKMVWHNDFELPKSDLVVLPGGFSYGDYLRCGSMAAKSKIMKSVINFANSGGMVLGICNGFQILTETGLLPGILLRNKNAKFICKNVFVKINDNKNNYFKNFKKNTLELHIAHNEGNYFCSEDELKKINNNNQIALLYCDENGEVNINSNPNGAFQKYA

SEQ ID NO: 167392 - protein, 133 aa, Unknown
  Bacterial polypetide isolated from the Sargasso Sea
MKSSVITFPGSNCDRDMNVALNKFGFKNKMVWHNDNELPKSDLVVLPGGFSYGDYLRCGSMASKSKIMQSVINFAKSGGLVMGICNGFQILVETGLVPGVLLRNKYLEFICKNVFVKLDIKKISIFKIFEKMF

SEQ ID NO: 167393 - protein, 176 aa, Unknown
  Bacterial polypetide isolated from the Sargasso Sea
MKSSVIIFPGSNCDRDMDVALKKFGFKNQMVWHNDDEIPKSDLIVLPGGFSYGDYLRCGSIAGKSRIIKSVIDFANSGGLVLGICNGFQILTETGLLPGILQQNKYLNFICKNVFVKIKNNENKFFKDIKKEILELHIAHNEGNYFCSNDELKSIEDKRQIAVTYCDHNGNDDEEN

SEQ ID NO: 167394 - protein, 291 aa, Unknown
  Bacterial polypetide isolated from the Sargasso Sea
EACLELMAGKSIISIQDMGAAGLTSSSIEMASKGDLGIEIDLTKVPCREENMTPYEIMLSESQERMLIVLEEGKENEAKKIFDKWNLDFAVIGKTTNSKNIELFFKNEKVAKIPIDFLAENAPMYNRKWIKAKLPKENKFSKDQFKSLKLGDCLKKVLIDPNIADKEWIWDQYDHTVMGDTIQKPGGNAGVVRVHGTKKAVAASVDSSATYCHAHPLTGGKQVVCESWRNMISVGAKPIAITNCLNFGNPEKEKNMGEFVECVEGITEASKYLNYPVVSGNVSFYNETKDK

SEQ ID NO: 167395 - protein, 302 aa, Unknown
  Bacterial polypetide isolated from the Sargasso Sea
MADTLKIGRPGGDAAMVRVHNTNKALAFTSDSSPRYCVADPVEGGRQVVAEAYRNITATGAFPLAITDNLNFGNPEKPKIMGQFVGCIMGMSEACKSLDFPVVSGNVSFYNETNGEAILPTPTIGAVGLISDSSKAVGIGFCEEGESILLVGRSNGHLECSLYSTIIEGFDGGVPPKVDLGMERCHGDFVREMINSDLASACHDISDGGLMIAISEMALAGNKGCKINYKPTNLELHQWAFGEDQGRYILTTKRADKVIMNAKKLKIPIQIIGVVSGQSLHWVGNGECSLSDIRSAHENWLP

SEQ ID NO: 167396 - protein, 259 aa, Unknown
  Bacterial polypetide isolated from the Sargasso Sea
VGDPFTEKLLLEACLELMAGDSIIAIQDMGAAGLTSSSIEMASKGNLGIEINLNKVPCRETKMTPYEIMLSESQERMLIVLENGKEDHAKKIFDKWNLDFAVIGKTTKSKKIELYFDEERVANIPVNTLVENSPMYNRKWKKAKLPKKNKIKKEDIKHLKIIDTLKKILTNPNVCSKEWIWQQYDHTVMGDTIQKPGGDAGVVRVHGTDKAVAASIDSSAVYCWAHPLTGGKQVVCESFRNLISVGAKPIAITNCLNFG

SEQ ID NO: 167397 - protein, 124 aa, Unknown
  Bacterial polypetide isolated from the Sargasso Sea
NKFLNFICSNVYVKVKDRQNKYFKDIKKDVLELHIAHNEGNYFCSDDELKSLEDNNQIAVTYCGEDGTENEKTNPNGAIKNIAGIFNENKNVLGMMPHPERMIDKYLSGEDGSLFFKNILDNFK

SEQ ID NO: 167398 - protein, 55 aa, Unknown
  Bacterial polypetide isolated from the Sargasso Sea
MRSSVIIFPGSNCDRDMDVALKKFGFKNQMVWHNDQSISKSDLIVLPGGFSYGDY

SEQ ID NO: 167399 - protein, 308 aa, Unknown
  Bacterial polypetide isolated from the Sargasso Sea
FKSKKVKFKDFKKISFDEAFFKIISSPNQSNKRWVTEQYDQMVMGDTIERSGTDAAIIKIHNKDKAIAVTVDSSANYCKSFPLNGGKQIVCESWRNLISVGAKPIAITNCLNFGNPENPEIMGEFAENILGIKEACEFLDYPVVSGNVSFYNGTNNNNIYPTPVIGGVGLIKNLNKIQNHRFKKIDSNIIVVGKTFGHLDQSVFINQIHNLHDGMPPDVNLLNEKNNGEMVFKLINTGIINSVHDVSTGGIILALAEMSISSQIGIKINKPKKLTNIFEYFFGEDQSRYIIEVDKKNYSKLESLFKEK

SEQ ID NO: 167400 - protein, 66 aa, Unknown
  Bacterial polypetide isolated from the Sargasso Sea
MKSSVIIFPGSNCDRDMHVALTKFGFKNKMIWHNDAELPKSDLIVLPGGFSYGDYLRCGSIAGKSK

SEQ ID NO: 167401 - protein, 238 aa, Unknown
  Bacterial polypetide isolated from the Sargasso Sea
SCNGIAEACKALETPVTGGNVSLYNESKNKENLITPINPTPVIGMVGRIDNVEKAISSEWKNIEDQIWLIGSSKSEIKIAASSYLEYFHGEITGRPPKIDLLDEKFCQSFLRNAILNSLVVSSHDISDGGLAIALAESCILSGRGATIELEKDLNRVDNLLFAEGGSRIIFSISKIKQNEWFNYLKQNQIKFPSSVYVKKIGYVSADLLNIKIDKKNICNIRVEELSEKFNNSISDYV

SEQ ID NO: 167402 - protein, 305 aa, Unknown
  Bacterial polypetide isolated from the Sargasso Sea
YEIMLSESQERMLIVLESGKEEIAKKIFDKWNLDFAVIGKTTNTKNIELFFDNKQVANIPVNTLVENSPMYDRKWKKSKLPKKNKINKTIFKSLKIKDTLKKILSSPNVCSKEWIWQQYDHTVMGDTIQKPGGDSGVVRVHKTDKAIAATVDSSATYCWAHPLTGGKQVVCETWRNLISVGAKPIAVTNCLNFGSPEKEENMGEFVECVQGISEACKYLDYPVVSGNVSFYNETKDIGIKPTPTIGGVGLIKDYKKMITMDLKEIDNIILVIGKTEGHIDQSLLSRIILNENNGPPPEVNLFNEK

SEQ ID NO: 167403 - protein, 73 aa, Unknown
  Bacterial polypetide isolated from the Sargasso Sea
RLGGDGQIPFRYTDSSTIGPANPNGASHDIAGVISKNGRVLGMMPHPERAMSDLHGSTDGAHFLLKSLEALVS

SEQ ID NO: 167404 - protein, 282 aa, Unknown
  Bacterial polypetide isolated from the Sargasso Sea
SVDSSANYCKADPKSGGKQIVCENWRNLISVGAKPLAITNCLNFGNPEKPKVMGEFVECIDGMREACEYLDFPVVSGNVSFYNETNSKSIYPTPVIGGIGLIQSLKKVINIKTKNIGSLIMVIGKTLGHIGQSAFLLENFSIDQGPPPEINFENEKNNGLAVLGLIKDNLIFSAHDISSGGMLVSLAEMSISSGFGLKVFKPKKLINSLEYFFGEDQGRYLVEISKTNQKKIEKYLKENNVFFEIVAEVQDNTFELEKTFSLKTKELQNYNNQWYNKFNAIN

SEQ ID NO: 167405 - protein, 317 aa, Unknown
  Bacterial polypetide isolated from the Sargasso Sea
PPPEYDRPYDEIKAPATIRSENIPFHKDIAAALNKLMSSPDICSKRWIWEQYDHMVMGDTVQRPGGDAAIIRIHGTTKGLAVTTDCTPRYCKAHPETGGRQAVVEAWRNLTAVGAMPLALTNNLNFGNPERRPIMGQLVGCIKGIGTAARALEFPVISGNVSLYNETNGEAILPTPVIGGVGLIDDINATVGIGIPGPGFTMLLIGETDGWLGNSLYLRELFQGEEGAPPPVDLEVERLHGNFVRSEIRSGGIAACHDLSDGGLLVGLAEMALAGKCGVTLDYSSDGPLHAWYFGEDQARYLCATKKPDTLWRTPKK

SEQ ID NO: 167406 - protein, 270 aa, Unknown
  Bacterial polypetide isolated from the Sargasso Sea
KKNRIAKEDIKHLKIIDVLKKVLANPNVCSKEWIWQQYDHTVMGDTIQKPGGDAGVVRVHGTDKAVAASVDSSAVYCWAHPLTGGKQVVCESFRNLISVGAKPIAITNCLNFGSPEKEENMGEFVECVQGIGEASEYLKFPVVSGNVSFYNQTKDKGIKPTPAIGGIGLIKDYKNMITMEFKEVDNLVLVIGKTEGHIDQSLFARNILDEKNGPPPEVNLFNEKNNGETVLKLIENNLIKSAHDVSLGGIITAVAKMCIKGKKGINIKKP

SEQ ID NO: 167407 - protein, 121 aa, Unknown
  Bacterial polypetide isolated from the Sargasso Sea
MRSSVIIFPGSNCDRDMDVALKKYGFKNHMIWHNDINLPKCDLVVLPGGFSYGDYLRCGSIAGKSKIIQSVIDFAKSGGLVLGICNGFQILTETGLLPGVLQQNKYLNFICRNVHVKVKTK

SEQ ID NO: 167408 - protein, 264 aa, Unknown
  Bacterial polypetide isolated from the Sargasso Sea
ELMADNSIIAIQDMGAAGLTSSSIEMASKGKLGIELDLNKVPCREEKMTPYEIMLSESQERMLIVLEKGKENYAKKIFDKWNLDFAVIGKTTNSKKIELIFDNKKVAEIPINLLAENAPIYDRKWKKNKLPQKIKFDKNEFKSLKLSDCLKKILSNPNVCDKQWIWDQYDHTVMGDTIQKPGSDAGIVRVHGTKKAIAASVDSSASYCFSHPLTGGKQVVCESWRNLISVGAKPIAITNCLNFGNPEKEKNMGEFVECVEGITE

SEQ ID NO: 167409 - protein, 262 aa, Unknown
  Bacterial polypetide isolated from the Sargasso Sea
LSESQERMLIVLEEGKENEAKKIFDKWNLDFAVIGKTTDSKNIELFFKNEKVAEIPIDFLAENAPMYDRKWIKAKLPKENNFSKEQFKSLKLGDCLKKILIDPNIADKEWIWDQYDHTVMGDTIQKPGGNAGVVRVHGTNKAVAASVDSSATYCNAHPLTGGKQVVCESWRNMISVGAKPIAITNCLNFGNPEKEKNMGEFVECVEGITEASKYLNYPVVSGNVSFYNETKDKGIKPTPSIGGIGLLSDYKRMMTMELKDEG

SEQ ID NO: 167410 - protein, 67 aa, Unknown; identical to SEQ ID NO: 167367
  Bacterial polypetide isolated from the Sargasso Sea

SEQ ID NO: 167411 - protein, 125 aa, Unknown
  Bacterial polypetide isolated from the Sargasso Sea
MALTTVEKQNIENLLNRPPSEVELSIFDTMWSEHCSYKSSKPVLRTLPTKGPNIMLGVGEDSGIIEFATVDGHKYGIAVSHESHNHPSQVLPVEGAATGVGGVVRDVYCMGADVIGVLDSLHFGV

SEQ ID NO: 167412 - protein, 113 aa, Unknown
  Bacterial polypetide isolated from the Sargasso Sea
PGGFSYGDYLRCGSIAGKSKIIKSVIDFANSGGLVLGICNGFQILTETGLLPGILQQNKYLNFICKNVFVKIKNKENKYFKNIKKDILELHIAHNEGNYFCSKDELKLIEDNK

SEQ ID NO: 167413 - protein, 101 aa, Unknown
  Bacterial polypetide isolated from the Sargasso Sea
MRSHVVVFPGSNCDRDIAVSIKNISGNAPEMVWHKETSINSSDLIVVPGGFSYGDYLRCGAIASTSPIMKDVVKKAHAGVPIIGICNGFQILIESSLLDGA

SEQ ID NO: 167414 - protein, 187 aa, Unknown
  Bacterial polypetide isolated from the Sargasso Sea
MKSSVIIFPGSNCDRDMDVALKKFGFKNQMVWHNDLEIPKSDLIVLPGGFSYGDYLRCGSIAAKSKIIKSIIEFANSGGLLLGICNGFQILTETGLLPGILQQNKYQKFICKNVYVKVNNKENKYFRNIKKKILELHIAHNEGNYFCSEEELKSLNNNNQIAVTYCSEDGKKSEEFNPNGTLSNIAG

SEQ ID NO: 167415 - protein, 81 aa, Unknown
  Bacterial polypetide isolated from the Sargasso Sea
MLKDELKSLNDNNQIAVTFCNKNGNENENDNPYGALGNIAGIFNKNKNILGMMPHPERMIDEYLSSNDGSFFFENLIENLK

SEQ ID NO: 167416 - protein, 82 aa, Unknown
  Bacterial polypetide isolated from the Sargasso Sea
MIEVNEKIAIDHGLKKDEYKKICELLKRNPNLTELGIFSAMWNEHCSYKSSKKHLKKLNTKGKKVIQGPGENAGVIDIGDDD

SEQ ID NO: 167417 - protein, 104 aa, Unknown
  Bacterial polypetide isolated from the Sargasso Sea
MKSSVIIFPGSNCDRDMDVALKKFGFENQMVWHNDAEIPKSDLIVLPGGFSYGDYLRCGSIAGKSKIIKSVIDFANSGGLVLGICNGFQISTETGLLPGILQQN

SEQ ID NO: 167418 - protein, 105 aa, Unknown
  Bacterial polypetide isolated from the Sargasso Sea
MKSSVIIFPGSNCDRDMDVALKKFGFKNKMVWHDDNELPKSDLIVLPGGFSYGDYLRCGSIAGKSNIIKSVIKFAQSGGLVLGICNGFQILTETGLLPGILQQNK

SEQ ID NO: 167419 - protein, 75 aa, Unknown
  Bacterial polypetide isolated from the Sargasso Sea
MKSSVIIFPGSNCDRDMHVALKKFGFNNKMVWHNDTGLPKSDLIVLPGGFSYGDYLRCGSIAGKSKIINSVIEYA

SEQ ID NO: 167420 - protein, 169 aa, Unknown
  Bacterial polypetide isolated from the Sargasso Sea
MKSSVITFPGSNCDRDMNVALKKFGFKNKMVWHDDTELPKSDLIVLPGGFSYGDYLRCGSMASKSKIMKSVINFANSGGMVMGICNGFQILVETGLVPGVLLRNKYLEFICKNVFLKINNKSNKYFNGIKNDVLEFHIAHNEGNYFCTNDQLKEIEDNEQVAINYCDEN

SEQ ID NO: 167421 - protein, 154 aa, Unknown
  Bacterial polypetide isolated from the Sargasso Sea
MRIAIIVFPGSNCDRDILVAIENITGRRPALIWHKQNNLDPIDLAILPGGFSFGDYLRCGALAAHSPIMDSLHDHAARGGSILGICNGFQILIESGMLPGYLARNKELKFICKQTTLSVNAESNCELTASLDSKKTLRIPVAHNEGNFFADSET

SEQ ID NO: 167422 - protein, 95 aa, Unknown
  Bacterial polypetide isolated from the Sargasso Sea
NNEVIKLNIAHNEGNFFTDKRHLKELEDNDLIPIKYCDEKGIVNNKSNPNGSLNNIAGIFNKNKNILGMMPHPERMSDRICSDENGLPLFLSLMN

SEQ ID NO: 167423 - protein, 264 aa, Unknown
  Bacterial polypetide isolated from the Sargasso Sea
MVAVPHFWNEPFEKLKNYDGYIILGGFSYEDRSRAGIIASLEPIMGQLKKEVVMGKPLLGICNGAQILVEAGIVPGNKDCGTLVGLTENKRIKNNQIIGTGYYNTWCHIQANQKSDSAFIEKDSSPLCVPIAHAEGRFVMDKEMLEIVTEHNLINYKYCTESGEVNDNFPTNPNGSVQNIAALGNVAGNAMAIMPHPERTTNGGGDSVFRAMHSFIKKEKAFSYKALQHSAKKIVVSPFEKKPLTKEVLISMVIADNEAGSVEK

SEQ ID NO: 167424 - protein, 73 aa, Unknown
  Bacterial polypetide isolated from the Sargasso Sea
MKTHVIVFPGSNCDRDVAVAIQNIIGSSPEMVWHKESTIQQSDLIVVPGGFSYGDYLRCGAMASTSPIMKSRD

SEQ ID NO: 167425 - protein, 253 aa, Unknown
  Bacterial polypetide isolated from the Sargasso Sea
ADFVARGPLIDRQKSIPKYLSNITSSPKKKIKKSFSNVLAQLLSSPNIASKHWVFRQYDHEVGIRTVVKPGFDSSVLRLDNGKSLSVKIDGNPKHCYLDPRHGAIGCFEEACRNVVCTGANPIGMVDHLQFGNPEDPEIFWTFMESIEGITEYAKSMKIPCVGGKVSFYNETSEGPIKPTPLIGVLGLIEKSPLLPSPPIENDVIILLGETKDELGGSEYYEYVHNFIGGIVPKVDIPTSKKNMTSVLSLISK

SEQ ID NO: 167426 - protein, 61 aa, Unknown
  Bacterial polypetide isolated from the Sargasso Sea
CDSKGIVNENSNPNGSSSNIAGILNVKKNILGMMPHPERLIDPLLSGEDGSLMFESLGQRY

SEQ ID NO: 167427 - protein, 235 aa, Unknown
  Bacterial polypetide isolated from the Sargasso Sea
PNILMNIPLAHAEGRFVMPNGLLEQLIKNEQLVYKYSNDSGDIIDEFPTNPNGSVNNIAAISNSSGNVMAMMPHPERTTNGDAIFSSMKEYIDENYPTINQPLSFSITNHKSKELNIDDKSTEWIIDLIITDNEAKSINTALNHLGFDIEVNRQIHWEINIDGEPTNVLNKIIGSGELFNSNKEYIVDKKEKYDASFLVRPNEDIYGRAKYESLTNRFDIKEISYIKRGVIWNIN

SEQ ID NO: 167428 - protein, 289 aa, Unknown
  Bacterial polypetide isolated from the Sargasso Sea
KRIQDGHVVGTGYYNTWANLKVSVPPESTAFTRHLEHEEIIHVPFAHAEGRFIIPEDLLNELIKNNQTVFRYCNDDGEILSQFPTNPNGSDYNLAAVSNSAGNILAMMPHPERTNLGDKLFSSMREFIKQKVPIKNGSLSYSTPKKNIKNYIPERHVSEWVVDMVITDNEAETVQNALRRIGIDVTIQRQQHWEISISDNSSATLKKIEDTGELFNSNKEYISSIKTNENTACLLVRQKEDMFCQSKFESLRERFSIKELIQLKRGIVWNIKIKNTNFQPVLDKIINTN

SEQ ID NO: 167429 - protein, 51 aa, Unknown
  Bacterial polypetide isolated from the Sargasso Sea
IQNGAIKNIAGILNKNKNVLGMMPHPERMIDKYLSGEDGSLFFKNILDNFK

SEQ ID NO: 167430 - protein, 160 aa, Unknown
  Bacterial polypetide isolated from the Sargasso Sea
MNSSVIIFPGSNCDRDMAVALKKFGFKNKMVWHNDTELPKSDLVVLPGGFSYGDYLRCGSMASKSKIIDSVIKFAKSGGLLLGICNGFQILTETELLPGVLLKNKYSKFICKNVFVKINNSENKYFKNIKKNILELHIAHNEGNFFCSNDQIKEINDNNQ

SEQ ID NO: 167431 - protein, 280 aa, Unknown
  Bacterial polypetide isolated from the Sargasso Sea
TNKLELKFNNKKVADIPISALTEKAPMYDRKWVKSNLSKDKIKTKDLKKISMENALIKILSSPNNSNKDWVTNQYDQVVMCDTIQKSGGDSAVIRIHKKNKAIAISVDSSANYCKADPKTGGKQIVCENWRNLISVGAKPLAITNCLNFGNPEKPKVMGEFVECVDGIKEACEYLNFPVVSGNVSFYNETNSKSIFPTPVIGGVGFIGDLKKVTNIKIKNKGNLIVAIGKTVGHLEQSVFLKENFSILDGPPPEINLVNEKNNGLAVLKLIKENLVLSAH

SEQ ID NO: 167432 - protein, 77 aa, Unknown
  Bacterial polypetide isolated from the Sargasso Sea
MKSSVITFPGSNCDRDMDVALTKFGFKNKMVWHNDQELPKSDLIVLPGGFSYGDYLRCGSMASKSKIMHSVINLQNR

SEQ ID NO: 167433 - protein, 94 aa, Unknown
  Bacterial polypetide isolated from the Sargasso Sea
MTPGDKVNFPIAHNDGNYFCDDELTKKLHNEGQIAFKYLPNDNPNGSVDNIAGVLSENGRILGMMPHPERAIENFHSSQDGKLFFNGLIKHLLG

SEQ ID NO: 167434 - protein, 112 aa, Unknown
  Bacterial polypetide isolated from the Sargasso Sea
VKVNNSENKFFENIDKDVLELHIAHNEGNYFCTEDELKSLEDNNQIAAYYCSSDGKVDDKSNPNGAIKNIAGIFNEKKNILGMMPHPERMIDQSLSGEDGSIFFENLLNNLK

SEQ ID NO: 167435 - protein, 59 aa, Unknown
  Bacterial polypetide isolated from the Sargasso Sea
MKSSVIIFPGSNCDRDMDVALKKFGFKNQMVWHNDADIPKSDLIVLPGGFSYGDYLRCG

SEQ ID NO: 167436 - protein, 292 aa, Unknown
  Bacterial polypetide isolated from the Sargasso Sea
NAAIIKIHNKDKAIAVTVDSSANYCKSHPLSGGKQIVCESWRNLISVGAKPIAITNCLNFGNPENPEVMGEFAENILGIKEACEFLDYPVVSGNVSFYNGTNNNNIYPTPVIGGVGLIKNLKKIQNHKLKKTNSQIIIIGKTFGHIDQSVFINELYDLHYGMPPEVNLLNEKNNGSIVLKLISSGIINSIHDVSTGGIILALAEMSLSSQIGVKIHKPKKLSNIFEYFFGEDQSRYLLEIDKNNFSKVQKILKDNNIYFDTVGETQKDYFELDKDLKISVKELYEINNRWYN

SEQ ID NO: 167437 - protein, 260 aa, Unknown
  Bacterial polypetide isolated from the Sargasso Sea
CVNLENLICVGAEPIAITNCLNFGNPEKPENMGEFVECVEGLNDASKYLNFPVVSGNVSFYNETKDKGIKPTPTIGGVGLIKNYKDMITMDLKEAGNIILVVGKTEGHLDQSIFAKEILNEKKGPPPEINLFNEKNNGETILKLIKDKLIRSAHDVSLGGIMTGIAKMCIKGKKGINFYKYKGLIDKFEFFFSEDQGRYIIEVKKENVDKVKKILDKNSNHYDLIGEVIEGNISINDEPNLSVDKLADYNKDWLNKYMVN

SEQ ID NO: 167438 - protein, 75 aa, Unknown
  Bacterial polypetide isolated from the Sargasso Sea
MKSSVIVFPGSNCDRDMDVALKKFGFQNKMVWHNDQHLPKCDLIVLPGGFSYGDYLRCGSIAGKSKIINSVVNFA

SEQ ID NO: 167439 - protein, 95 aa, Unknown
  Bacterial polypetide isolated from the Sargasso Sea
KQKVLKWRIAHNEGNFFANKNIIKKLPDNDQIALKYCDASGGIKQDSNPNGSIENIAGILNEQKNILGMMPHPERAVNEDIYSNDGKFFFESLLT

SEQ ID NO: 167440 - protein, 184 aa, Unknown
  Bacterial polypetide isolated from the Sargasso Sea
MKSSVIIFPGSNCDRDMHVALSKFGFKNKMVWHNDISIPKSDLIVLPGGFSYGDYLRCGSIASKSKIIKSVIDFANSGGMVLGICNGFQILTETGLLSGILQQNKYLNFICKNIFIKVKDKKNKYFNNIKKDILELHIAHNEGNYFCTESELKSLVDNNQIAVTYCDAKGIENDESNQNGAVNN

SEQ ID NO: 167441 - protein, 127 aa, Unknown
  Bacterial polypetide isolated from the Sargasso Sea
MNSSVIVFPGSNCDRDVAVALEKMQFKNKMVWHKDTTLPKSDLIVIPGGFSYGDYLRSGAIAGKSLIVSEIIKAANSGCLILGICNGFQILTETGLLKGTLLRNKNLKFINKDVNIKVVNNETKFTS

SEQ ID NO: 167442 - protein, 114 aa, Unknown
  Bacterial polypetide isolated from the Sargasso Sea
MKSSVITFPGSNCDRDMDVALKKFGFKNKMVWHDDAELPKSDLIVLPGGFSYGDYLRCGSMASKSKIMKSVINFANSGGMVMGICNGFQILVESGLVPGVLLRNKYLEFICKNV

SEQ ID NO: 167443 - protein, 168 aa, Unknown
  Bacterial polypetide isolated from the Sargasso Sea
SVASKSKIVKSVIDFANSGGLVMGICNGFQILVETGLVPGILLRNKYLEFICKNVFVKIHNKDNPYFKNLDKEVLELHIAHNEGNYFCTNDQLKEIQDNNQIAIYYSNENGQIDENYNPNGSTKNIAGIFNKHKNVLGMMPHPERMIDKYLSGEDGSLFFKNLIKNIK

SEQ ID NO: 167444 - protein, 257 aa, Unknown
  Bacterial polypetide isolated from the Sargasso Sea
MKKILSNSNISDKKWIWDQYDHTVMGDTIQKPGGDAGVVRIHGTNKAVAASVDSSALYCFSHPLTGGKQIVCESYRNLISVGAKPIAITNCLNFGNPEKEKNMGEFVECIKGITEASKYLDFPVVSGNVSFYNETKDKGIKPTPTIGGIGLISDYQQMLTMDFKTEGNLVYVIGKTDGHLDQSIFAREILNEKKGPPPTVNLFNEKNIGETLLDLSRKDLIVSCHDVSLGGILTAVSKMCIKGKKGIKINSLKGLTN

SEQ ID NO: 167445 - protein, 132 aa, Unknown
  Bacterial polypetide isolated from the Sargasso Sea
MGFQILTESGFLPGALTANKNLNFICDDVELDIVSSKGGWFNNVDEKQTIKLPIAHGEGRYHCDSDTLKKLVDNELIALRYKNNPNGSSFDIAGITNEKGNVLGLMPHPERACDETIGGTDGLFTLKSLILK

SEQ ID NO: 167446 - protein, 201 aa, Unknown
  Bacterial polypetide isolated from the Sargasso Sea
MIRNHGITPQEYEIIINLIDREPNITELGIFSAMWNEHCSYKSTKKWLKTLPISGPRVICGPGENAGIIDIDDGYALVFKIESHNHPSFIDPFQGSATGVGGILRDIFTMGARPIVTMNALSFGTNKSKVKGLLSGVIDGIGSYGNSFGVPNLGGELRFDAAYEGNCLVNVFAAGILKKDSIFYSGATESNLPLVYLGAKT

SEQ ID NO: 167447 - protein, 453 aa, Unknown
  Bacterial polypetide isolated from the Sargasso Sea
SKGNLGIEINLNKVPCRETKMTPYEIMLSESQERMLIVLENGKEKQAKKIFDKWNLDFAVIGKTTNSKKIQLYFDDEMVADIPVNTLVENSPMYDRKWKKAKLPKKNKIKKEDLKNFKIIDVLKKVLANPNICSKEWIWQQYDHTVMGDTIQKPGGDAGVVRVHGTNKAVAASVDSSAVYCWAHPLTGGKQVVCESFRNLIAVGAKPIAITNCLNFGSPENEENMGEFVECVQGISEASEYLKFPVVSGNVSFYNQTKDEGIKPTPAIGGVGLIMDYNKMITMDFKQIDNVVLVIGKTEGHLDQTLFARNILDEKNGPPPEINLFNEKNNGETLLKLIQNNLIKSAHDVSLGGVITAVAKMCIKGKKGINLNKPKYLINEMQYFFSEDQGRYIVEVGKEDLKKVTDILNKNSVHFDELGTINQNEIYIDDKTKVTIDELTDSNRNWLSDYMSN

SEQ ID NO: 167448 - protein, 363 aa, Unknown
  Bacterial polypetide isolated from the Sargasso Sea
KGKLGIEINLNKVPCRELNMTPYEIMLSESQERMLIVLENGKEKEAKKIFDKWNLDFSIIGKTTDSKKIQLFYDRKKVADIPVDTLVENSPMYDRKWKKAKLPKKNKIDKESFKNLKILNILNKLLSNPNICSKEWIWQQYDHTVMGDTIQKPGSDAGVVRIHGTSKAVAATVDASASYCYAHPLTGGKQVVCESWRNLISVGSEPIAITNCLNFGNPEKEENMGEFVECVQGLGEASKFLDFPVVSGNVSFYNQTKEKGIKPTPSIGGIGLIKNYKEMITMDLKKTGNIVLVIGKTEGHLDQSIFSRDILNIKSGPPPEVNLFNEKNNGKTILNLMNKKFVKSAHDVSLGGIIIAIAKMCIK

SEQ ID NO: 167449 - protein, 152 aa, Unknown
  Bacterial polypetide isolated from the Sargasso Sea
MKSSVIVFPGSNCDRDISVALEKLQFKNSMVWHKETELPKSDLIVIPGGFSYGDYLRSGAIAAKSNILSEVINSGKKGALILGICNGFQILIECGLLKGALLRNSGLKFISKDILVKVQSNKNNFFNKYKTGDILKLNIAQNEGNYFTDKKH

SEQ ID NO: 167450 - protein, 684 aa, Unknown
  Bacterial polypetide isolated from the Sargasso Sea
YDEHFDNYPISLSLDILFGKPPKSSRSFSTKKKDFGELKIPDHDLEELLFKVLRHPAVASKNFLITIGDRTVTGLINRDQLVGPWQVPVSDYAMTRSGFIGVSGEAMSIGERTPAAIINPAAAARISVAEAVTNILPSGISKLSDVKLSANWMGSPEKLDGDQDLYEAVEAIGMGLCPQWEIAIPVGKDSLSMSTEWEDKGKNKSVTSPLSLIVSAFTAIKDINLSVTPQLIDKESVLILIDLSKGSCRLGSSIASQVNSLFGGEVPDVECIQEMPNFVNTIHGLLKDKKILSYHDRSDGGLITTSIEMAFAGRLGVDIKLDLLPSNAEDVVSDLFNEELGVVIQIAKEDEELVMRALDSCSLKEHSYVFGVLNKDKDIKLISNNKTIHKWPLKTLLKEWHKVSYEIQSLRDNPETAKYEYLYDIDSEREGIKPSLSFQIPSTFSISKTKPSIAILREQGINGQVEMAAAFDRVGFNCIDVHMTDLISNNCHLDEFQGLVACGGFSYGDVLGAGGGWATNIIYNQALRDQFQEFFSNEEVFSLGICNGCQTISLLSSLIPGTDGWPRFKRNSSEKFEARLSQVLIQESPSIFFKDMAGSIMPIPVAHGEGRAELSEKNFSDLTSENLNPVVYSDDKGKSTESYPENPNGSPSGIAGVTNKSGRVTIMMPHPERAFLTSPVFLAS

SEQ ID NO: 167451 - protein, 447 aa, Unknown
  Bacterial polypetide isolated from the Sargasso Sea
IEINLDKVPCRETKMTPYEIMLSESQERMLIVLENGKEDLAKKIFDKWNLDFAVIGKTTNTKNIELYFENKEVANIPVNTLVENSPMYDRKWKKSKIPKKNKIKKEIYNELKIKDVLKKILSNPNVCSKEWIWQQYDHTVMGDTIQKPGGDAGVVRVHGTNKAVAASVDSSAVYCWAHPLTGGKQVVVESWRNLISVGATPIAITNCLNFGSPENEDNMGEFVECVQGIGEASKYLNFPVVSGNVSFYNQTKEIGIKPTPSIGGVGLIKDYKKMITMSLKEVDNLILIIGKTEGHIDQSLFARTILDENKGPPPEVNLFNEKNNGESLLNLIEKDLIQSAHDVSLGGIITAISKMCIKGNKGIKLKKPKNLINKIEYLFAEDQGRYIIEIKPEDLEKVSKILIKNSVHYEELGIIIDSEMVINEKTKVTIDELKSYNSNWLNNYMDS

SEQ ID NO: 167452 - protein, 471 aa, Unknown
  Bacterial polypetide isolated from the Sargasso Sea
IAIQDMGAAGLTSSSIEMASKGNLGIELNLNKVPCREGKMTPYEIMLSESQERMLIILENGKEDLAKKIFDKWNLDFAVIGKTTNSKKIELYFNDNQVASIPVNTLVENSPMYDRKWKKAKLPKKNLIKKETLNKLKIKDVLGKILSNPNVCSKEWIWQQYDHTVMGDTIQKPGGDSGVVRVHGTDKAVAATVDSSAVYCWAHPLTGGKQVVCESWRNLISVGATPVAITNCLNFGSPENENNMGEFVECVQGIGEASEYLKFPVVSGNVSFYNQTKEVGIKPTPAIGGVGLIKNYKQMITMDFKEIGNLVLIIGKTEGHIDQSLFARTILDEKNGPPPEINLFNEKNNGETLLQLIKNNFIKSAHDVSLGGIIAAISKMCIKGNKGIKFNKIKFLKSEIEYLFSEDQGRYIIEISASDLNSVIKILEKNSVHYDELGKIIENHIIINKKTKVTIDELKSYNTNWLIKYMS

SEQ ID NO: 167453 - protein, 155 aa, Unknown
  Bacterial polypetide isolated from the Sargasso Sea
MKSSVIIFPGSNCDRDMHVALKKFGFNNKMVWHNDTGLPKSDLIVLPGGFSYGDYLRCGSIAGKSKIINSVIEYAKSGGLVLGICNGFQILTETGLLPGVLQQNKYLEFICKNVYVKINNTKNKYFKNIKKEILELHIAHKEGNYFCSNDEIKIN

SEQ ID NO: 167454 - protein, 307 aa, Unknown
  Bacterial polypetide isolated from the Sargasso Sea
MGDTIQKPGGDAGVVRVHGTTKAVAASVDSSANYCYSHPLSGGKQVVCESWRNLISVGAKPISITNCLNFGNPEKEKNMGEFVECVEGITEASKYLEFPVVSGNVSFYNETKDKSIKPTPTIGGVGLINNYKNMITMDFKKSGNLVYVIGKTEGHLDQSVFAKDVLNEKKGPPPSINLFNEKNIGETILNLIENKLIFSCHDISLGGILTAVSKMCIKGKKGLKINSLKTLINKFEYFFGEDQGRYIIEISKENSQKVNEILNNNSVHFDDLGAIEGKSLTFNDDINLPIEELSNTHTYWLQRYMNN

SEQ ID NO: 167455 - protein, 254 aa, Unknown
  Bacterial polypetide isolated from the Sargasso Sea
MNVLVLSGYGINCENETLHAFEVVGFKGKIIHINDLIQNPKQLNNYQVFAIPGGFSYGDDTGSGNAMAKKIMTNLYDQLTDFSLKDKLIIGICNGCQILINLGLVPSLNKKDPEVALIENKSGSYECRWVDVKVSNNKSPWLENISTLNLPVAHQEGQFMIPINLLKSIKANNLIGLQYINHRKKLAKGQFPFNPNGSKDDIAALTNQNGNVLAMMPHPERAFYHYHIPNWQSKTLKKFGDGYKIFMNAKKFFA

SEQ ID NO: 167456 - protein, 183 aa, Unknown
  Bacterial polypetide isolated from the Sargasso Sea
MKSSVIIFPGSNCDRDMDVALKKFGFKNQMIWHNDKSIPKSDLIVLPGGFSYGDYLRCGSIASKSNIIKSVIDFANSGGLVLGICNGFQILTETGLLPGILQQNKYLNFICKNVYVKVKDKKNKYFKDIKREILELHIAHNEGNYFCSKDELKSLEDNTQIAVTYCDQKGLENDENNPNGALK

SEQ ID NO: 167457 - protein, 457 aa, Unknown
  Bacterial polypetide isolated from the Sargasso Sea
RLGASCLAQVYTQLGDSPADVVSATRLKAFFDAMQALIEKGLVCAYHDRSDGGLFTTVAEMAFAGKTGVSINLDSLVGNDIAVLFNEELGGVIQVLESDMDAVNAVLTEFGLTELTHDIGTLNSTDMIEFSRNGVAVLADSRVSMRTTWAQTTYEMQKLRDNPECAEQEHAAKQDAADPGLHAALSYDVNDDVAAPYIAKGVKPKVAILREQGVNSHLEMAAAFTRAGFDAIDVHMSDVLAGRITLEQFAGLAACGGFSYGDVLGAGEGWAKSILFNSIARDQFEGFFNRNDTFSLGVCNGCQMLSNLKSLIPGTEHWPHFVTNQSARFEARVAMVEVMESNSVLLDGMAGSRMPIAVSHGEGQAEFANDNALSQVGAQVAMRYVDNYGKPTMQYPANPNGSPQGITGLTSLDGRSTIMMPHPERVFRAVANSWRPDDWQEDGAWMRIFRNARKFVG

SEQ ID NO: 167458 - protein, 303 aa, Unknown
  Bacterial polypetide isolated from the Sargasso Sea
INQPGGNASIIRVHDTNKAIAATVDCTPRYCKSSPFLGGMQAVCETYRNLCSVGATPIAITNCLNFGNPEKPEIMGQFVDVIKGIAEACKKLNYPVISGNVSLYNETNGIGINPTPVIGGVGLIKNINQTSNHKFKEAGNLVYIIGDTVGHLGQSILCYDILNLKKGEPPPLELEKEIKNGKFIIEAIKQNLIQSSHDVSSGGIILSILEMCIPSKIGINLNIDKFGFQLVEYLFGEDQSRYIIEVHPENEAVLLKNMKNKAVSYEKIGKTINEKYIHINHKYKLDLNNLIELHNKWFKNYNK

SEQ ID NO: 167459 - protein, 456 aa, Unknown
  Bacterial polypetide isolated from the Sargasso Sea
MGMSIVSQISNDFSGNCPDVECLEEMPKLVVLFSKFIKQRKILSMHDRSDGGLFTALLEMAISGRKGININLDTYCNHQEEIIETLLNEELGLVIEVKDQDKEEIIKEINRVGLEGHCHEIGSISNRKCFEISYLNKTIFDETLNKLSKDWNSINLQMQSKRENPNTAKQEFLNDIDMERGGLNPNLSFKIPDKLNISKSRPKLAILREQGVNGHTEMAAAFHEVGFECTDVHMTDLFEKRILLKDFNGLVACGGFSYGDVLGAGGGWASSILFNNYLRDEFSEFFHRQDVFSLGVCNGCQMMALLKDLIPGTDNWPRFIRNTSEKFEARLIQLKVQRSNSILFQGMEGSIITVPVSHGEGKTDIEKNESEILLKNNLAPIAYANDDGIPTESYPQNPNGSSMGIAGVTNKQGNITIMMPHPERAFLSSQNSWAPESWSKYSPWIKFFENARKFLD

SEQ ID NO: 167460 - protein, 495 aa, Unknown
  Bacterial polypetide isolated from the Sargasso Sea
DSLSMRTTWREEGEEKSVLSPVSLIASAFAPVKDVRLTTTPVLQDREGTVLVLISLEGQRLGGSALAQVYGQLGDDCPDLEDPMRFRELLDWIISAKRNGKIMAMHDRSDGGLLTTLLEMAFAGRLGLDIKLENNELDLPYLFNEELGFVVQVLESDIGWIKETVDADVRIVAMPRRDEIVNLVNKEKTLHSFTRGELQQEWSRTSYSLQRIRDDEDCSDQEFARILMTRKDDPGVHYTKGMKFSEAPLINVGKAAKMAILREQGVNGQREMAAAFINAGFDCFDVHMSDLVKDSLYLSKFDGLAACGGFSYGDVLGAGGGWAKAILFDDELRRAFEDFFSKQLPVLGVCNGCQMLSQLREIIPGAENWPSFERNSSGQFESRTVMVKVSGNSSPWLEGLAGCVVPVAVAHGEGRVEPKDLTGAVEIDSLVAMRYVGPSDEPTEDYPYNPNGSLGGIAAITAASGSILAMMPHPERTFRSSQLIVSDPGGKGTAR

SEQ ID NO: 167461 - protein, 187 aa, Unknown
  Bacterial polypetide isolated from the Sargasso Sea
MRVTIITFPGSNCDRDVSVAIKKITGKNPSNIWHQENEVPNCDLIILPGGFSYGDYLRCGAVAAHSPVMKEVKNHAARGGAVLGICNGFQILLEAKLLEGALIRNSGLKFVCKQIALKINKQINSPFLHHFKQNDIIHLPIAHNEGNYFADSETLKKIEDKGLVALRYHTSSDGNSFNPNGSINNIA

SEQ ID NO: 167462 - protein, 403 aa, Unknown
  Bacterial polypetide isolated from the Sargasso Sea
MSTAEIMLSESQERMLMIIKPDKMDKANSIFKKWNLDIAKIGEITNSQNLEIYKNNILDAQIPITYLVDQAPEYDRDWTTPEKAPELQIKNAPIKSVSKVIEKLFNSHNLCSRNWIWEQYDTSVMGDTVIPPGQNSGVIRVHDTNKKLCASVDCTPRYVSADPFLGSMQAVCEAYRNIISVGGTPLAITNNLNFGNPEKKEIMGQIVHSIKGISEASLKLNMPVISGNVSLYNETNGKAILPTPVIGAVGVIDENKNSVSLSNAVDGNSIFVIGQDNSHTYGWVGQSIYAQEILDIEKDYAPPPVNIDAELANGNFILKAIEQKLTNCVHDISDGGLAIAISEILLSSQTRGIGAVINKNYIHNSESFWFGEDQGRYLVCTSKNKEIEELAESNKIKITNIAT

SEQ ID NO: 167463 - protein, 292 aa, Unknown
  Bacterial polypetide isolated from the Sargasso Sea
MNDDQIKEKLSELNIALTPGEGRKIQDEMLGRPPSLAELVLFSIQGSEHCSYKSSRSHLKKFVTDGPDVVLGAKEDAGVVAITKDKNGKRWCIVMSHESHNHPSQIVPYEGAATGVGGNVRDVMCMGAEVIACTDSFRFGNIKNSKTKWIHDGVVAGVAGYGNPLGIPNIGGDIYYHDGYSENCLVTLVTLGIVREDHIIHSYAPENAEGYDLILIGKPTDNSGFGGASFASLELEEDKKEQNKGAVQEPNAFLERHLLKSTYALFQYLQENNLCEKVGFKDLGAGGVACAS

SEQ ID NO: 167464 - protein, 72 aa, Unknown
  Bacterial polypetide isolated from the Sargasso Sea
NELRYKELIPIKYCDENGNINLESNPNGSINNIAGIFNNKKNILGMMPHPERMSDKILSNENGLGIFLSLMN

SEQ ID NO: 167465 - protein, 100 aa, Unknown
  Bacterial polypetide isolated from the Sargasso Sea
NIKKNILELHIAHNEGNFFCNDDELKTLEDNNQIAVTYCNEKGIEDEKHNPNGAIKNIAGIFNKNKNVLGMMPHPERMIDKYLSGEDGSTFFENLLGNLK

SEQ ID NO: 167466 - protein, 95 aa, Unknown
  Bacterial polypetide isolated from the Sargasso Sea
PVSFRTPVTGGNVSLYNESKNKDNLITPINPTPVIGMVGKLDNVEKAISSEWKNIEDQIWLIGSSKSEVKIAASSYLGIFSWRNYRSASKNRFVG

SEQ ID NO: 167467 - protein, 984 aa, Unknown
  Bacterial polypetide isolated from the Sargasso Sea
TIKVETHNHPTGISPFEGAATGSGGEIRDCSATGRVARPKAGFMGLCLSHLRLSDELESWESEPNKPDFLSSPMEIIRDAPIGSASYNNEFGRPAIFGYFRTLEYKNHGYHKPIMLAGGVGSIKEVHINKGAPKPGDVVVVLGGPAMLIGLGGGSASSTKKTNENSDLDFASVQRSNPEMQRRAQQVLDKFNERSSKNPITFIHDVGAGGISNAIPELAKDTNLGVNIRLEDIYSTDETMSPMELWCNESQERYVFSIPKEKVPALKHICERERCPFSIAGELTIDRLINVKFHNDQVVNLSLDHLFGDIPLPELIAQDYDRITEKEELPIKDLKKLIFNTIKFPAVASKKFLITIGDRTVNGLVYRDQLIGNRQLPVSDYAATLDDYDSYSGQVVSIGEKPNIAIENPEASTRMALAESITNICGVKHESLSNICFSANWMSPTKTADERGDLLRGVQSLSNMADYLGLSIPVGKDSLSMNTSWNSEGNEHSVTSPMTLNISSFSNVSDLRKSVTPELSTKDSTLLHVWINEGEFRLGGSSLYLSNNLFGGATPDVEDPEKFKQLFEASQDLISKGLIEALHDISDGGLITTLIEMSLCSNSGLDIRLDYSDKESIIPKLFSEEVGYVIEIDNEKLTEVKEDLTKRGLFFDEVGRKNIDKKINILNFDDALFSSTLNKLFDEWSSVSHKIQRIRDNIESAQSEKEVYKKWDEIITPKIDFSIPSPNKNLFSKKPKIALLREQGINGHYDMAAALMEAGFEVHDVHMSELLDKIKNFDLYNGLVVPGGFSYGDVLGAGSGMSNTILFNPKIKKIFKNFLENDKKFALGICNGCQFLSGLKEIVPGADNWPEFKKNLSNQYECRLVQLKIEDSPSIFLGGMKDSIIPVMVSHGEGRADFNLEEENVIARYVDPDHKITQTYPLNPNGSMNGVAGVCNDDGRITIMMPHPERTYLTKQFSWSPKDWEEHSPWFKMFDNAYLFSKKN

SEQ ID NO: 167468 - protein, 259 aa, Unknown
  Bacterial polypetide isolated from the Sargasso Sea
MEGCAKTVSVGATPLALTDCLCFGNPEKPEEMWQFSQSCLAIREVCDNMRFNETKNLPIVAGNVSFYNQSGDHSIPASPMIGCFGKIKKKKVLKNGFQSLSSNLFLLGETPTFLGGSIVSDVLGVNNTKIEALDLKKYNNMLGCVLEASEKALLQSCSYVGLGGLATTVTKMSFLNNIGCVVEGLDKDCLFSENLSFVVEVSEKNSEAFEKILNNKNCSYKQIGKTIDSNKVAIENFIELDIIKAKKVWKSSLKERLQK

SEQ ID NO: 167469 - protein, 173 aa, Unknown
  Bacterial polypetide isolated from the Sargasso Sea
MLDKLASWDTIDFSSSSDAEITKTLKELNIALSVDEVKKIQFSFLNRPATLTELVLFSIQGSEHSSYKSSKNHIKHFLTDGDHVILGAKDDAGVVSLSVDDNGNRYGLVVSHESHNHPSQIVPYEGAATGVGGNVRDVCCMGAEVMSLGDSLRFGDIDRNKTKWISDGVVSGI

SEQ ID NO: 167470 - protein, 73 aa, Unknown
  Bacterial polypetide isolated from the Sargasso Sea
MKSSVIIFPGSNCDRDMDVALKKFGFINQMVWHNDIDLPKSDLIVLPGGFSYGDYLRCGSIAGKSRIISSVID

SEQ ID NO: 167471 - protein, 1216 aa, Unknown
  Bacterial polypetide isolated from the Sargasso Sea
MSADEFQDDFSFYVGPRLGTISPWSSKTEDIVKNVGFKNIKRVERLYGFKLDQLVEESHDFSMFYDRMTQEVYKSKYDFENLFASEEPRPLNYVDILKNGKEALEHANTSFGFAMSSEEIDYLFNFYKKENRNPTDAELMMFAQANSEHCRHKIFNAKWDIDGNQMNNSLFDLIKDTSKASPDGIISAYKDNAAIIEGEKIERLHLNESNTYELKQDIINSTIKVETHNHPTAISPYPGASTGSGGEIRDEGATGRGAKPKIGLVGYNVSNLRIPGLQRSWEKEEKKPSRIASPLEIMTDAPIGAAAFNNEFGRPATLGYFRSFETEFNENEAYGYHKPIMLAGGIGEVRNANNFKLQIAEDYLVIVLGGPAMLIGLGGGAASSVSSGESDVDLDFASVQRDNAEMERRCQEVINKCSSQENNYIEFIHDVGAGGLSNAIPELAKDSELGVYIDLSKIPNADKSMSPMEIWSNESQERYVLAIHKDNQASFEKICIRERCEYAIVGHTTKEKSVKLFDANKNNFPVDVPLSMLFGDLPITKMKVSQTLKEEIKEIEPDDYDLSEVLIKTLQHPTVASKSFLITIGDRTVSGMVARDQFVGPYQVPVSDYSLSMRSYTSKKGEVVSIGEKPTIAVSNAGASMRMALAEALTNMAGVVIKGLNYVQVSANWMAASGDNQEDLNLRNGVEALSKLSSKLKISIPVGKDSLSMKTRWNESDAEFEVKSPLSGIITAMAPVDDIALCVTPEIDIKAETKLVLVKLNQKTRLGGSIFSEVIQETFNETPDIDDADKFKDMFYLIQDLVKNKNIIALHDISDGGLVTSIAEMCFTKKIGATIDISDFENINQTLFNEEIGFVIQIENSQLEKVLKLFEEKNLFSKEIADLNNNNFVIKRNKKIIFEEKIIRLEKYWRETSHAIQSIRDNKEIADSELGLLDSSEYTGLNSNVSFDESQIISFKNIKAKPKVAILREQGVNGQNEMAAAFTLAGFEAQDVHMQDLLDGEISLKNFNGMAVCGGFSYGDVLGAGGGWSKTIIYNEKVKDQFQAFFQDANKFTLGVCNGCQMLSNLKDIIPGGENWPSFERNFSDQFEARLVQVKIEKTNSVLLQDMEGWTVPVASAHGEGRAKFDENSLIKLKKNNQIAMRFVDSLGKDTEIYPLNPNGSPEGITGITAGDGRITIMMPHPERVFRKHQLSWYKKDWKEFSPWMQIFINANNFVK

SEQ ID NO: 167472 - protein, 254 aa, Unknown
  Bacterial polypetide isolated from the Sargasso Sea
MNVLVLSGYGINCENETLHAFEVVGFEGKIVHINDLIQNPKQLNNYQVFAIPGGFSYGDDTGSGNAMAKKILTNLYDQLIDFSLKDKLIIGICNGCQILINLGLVPSLNKKDPEVAMIENKSGSYECRWVDVKVNNNKSPWLKNISILNLPVAHQEGQFMIPINLLKSIKANNLIGLQYINNHKKLAKGQFPFNPNGSKDDIAALTNQNGNVLAMMPHPERAFYHYHVPNWQNNTSKKFGDGYKIFMNAKKFFA

SEQ ID NO: 167473 - protein, 188 aa, Unknown
  Bacterial polypetide isolated from the Sargasso Sea
MKSSVITFPGSNCDRDMEVALTKFGFKNKMVWHDDQELPKSDLIVLPGGFSYGDYLRCGSMASKSKIMHSVINFAKSGGLVMGICNGFQILVEAGLVPGVLLRNKYLQFICKNVHVKVDNKENTFFKNLDKQVLEFHIAHNEGNYFCTNDQLKEIEDNNQIAIYYCDQNGNTNDQNNPNGSIKISRVF

SEQ ID NO: 167474 - protein, 361 aa, Unknown
  Bacterial polypetide isolated from the Sargasso Sea
MYDRKWKKAKLPKKNKIKKEDIKHLKIIDVLKKILANSNVCSKEWIWQQYDHTVMGDTIQKPGGDAGVVRVHGTDKAVAATVDSSAVYCWSHPLTGGKQVVCESFRNLISVGAKPIAITNCLNFGSPENEENMGEFVECVQGIGEASEYLKFPVVSGNVSFYNQTKDAGIKPTPAIGGVGLIKNYKNMITMEFKEVDSLVLVIGKTEGHIDQSVFARNILDEKNGPPPEVNLFNEKNNGETLLKLIDNNLIKSAHDVSLGGIITAVAKMCIKGKKGINIKKPKYLINEIEYLFAEDQGRYIIEINKKDFKKVTDILHKNAVHFDDLGTINENELYINDKTKVTIDELSTSNKSWLTNYMSK

SEQ ID NO: 167475 - protein, 234 aa, Unknown
  Bacterial polypetide isolated from the Sargasso Sea
MLDKIASWDIIDFSSSSDAEIATTLKELNIPLSVEEAKKIQFSFLDRPPTLTELVLFSIQGSEHSSYKSSKNHIKHFLTDGKHVILGAKDDAGVVSLSVDNNGDRYGLVVSHESHNHPSQIVPYEGAATGVGGNVRDVCCMGAEVMSLGDSLRFGDIKRNKTKWISDGVVSGIAGYGNPLGIPNICGDLYFDKEYNENCLVTVLTAGIVKEKSVIRSKAPENSAGYDLILVGKT

SEQ ID NO: 167476 - protein, 1293 aa, Unknown
  Bacterial polypetide isolated from the Sargasso Sea
MEIIRGAPALSTFRVQKLMEACVNAALPVRQIYAEYVHLADLSELLETNERKQLEKILTYGPAIEAHTPQGSLLFVTPRPGTISPWSSKATDIAHNCGLGKVKRLERGVAYYVESDTLTAEQQQTLKGLLHDRMVEVVLDDFAKADVLFKRTEPAPFKSVNVLAEGRRALEVANVEMGLALAEDEIDYLVENFVRLNRNPNDIELMMFAQANSEHCRHKIFNADWTIDGEAQPKSLFKMIKNTFETTPDHVLSAYKDNAAVMEGSVAGRFFPDPNGVYSYHTEPMHVLMKVETHNHPTAISPYPGAATGSGGEIRDEGATGRGSKPKAGLTGFSVSNLKIPGFVQPWEGNYGKPDRIVSALDIMTEGPLGGAAFNNEFGRPALLGYFRTYEQEVSSHNGVEVRGYHKPIMLAGGLGNIREEHVQKGEITVGAKLIVLGGPAMNIGLGGGAASSMASGQSSEDLDFASVQRENPEMERRCQEVIDRCWQLGDKNPIQFIHDVGAGGLSNAFPELVNDGGRGGIFNLRNVPSDEPGMSPLEIWCNESQERYVLSVAAEDLPLFTAICERERAPFAVVGEATQEQHLTLADSHFDNNPIDLPLEVLLGKAPKMSRNVVSKKAVSPALEQSNIDIKDAVKRILSLPTVADKTFLITIGDRTVTGLVNRDQMVGPWQVPVADCAVTAASFDTYAGEAMSMGERTPLALLDFGASARMAVAESIMNIAGADIGSFKRIKLSANWMSAAGHPGEDAGLYEAVKAVGEELCPELSLTIPVGKDSMSMKTAWQQDGVNKTVTSPMSLVITAFGVVQDIRNTVTPELRSDKGETSLLLVDLGAGKNRLGGSCLAQVYGELGDIAPDLDDAALLRGFFETMQKLVANKLVIAYHDRSDGGLFTTLVEMAFAGNTGLDIDIEDLQGTDLEILFNEELGAVLQVSRDNAAKIAAQFAIAGVPCHVIGTLADDERITIKEGEREVFSETRVALRTVWSETTYRMQALRDNPACALEEFKLKQDETDLGLTVKLSFDPSEDVAAPYILKGAAPKMAILREQGVNSHVEMAAAFDRAGFESRDVHMSDILSGRISLEEFQGLVACGGFSYGDVLGAGEGWAKSILFNERARDEFSRFFERDSSFALGVCNGCQMLSNLKEIIPGSEHWPRFVRNRSERFEARFSLVEVQQSPSLFFQGMAGSRMPIAVSHGEGHAEFASAQALALAEASGTIALRFVNGKGEIATQYPQNPNGSPNGLTGICTTDGRVTLMMPHPERVFRTVANSWHPDNWGEDSPWMRMFRNARVNLG

SEQ ID NO: 167477 - protein, 90 aa, Unknown
  Bacterial polypetide isolated from the Sargasso Sea
MKSSVIVFPGSNCDRDIGVALEKMQFKNQMVWHKETKLPKSDLIVIPGGFSYGDYLRSGAIAGKSLIIEEVVKAANSGCLILGICNGFQI

SEQ ID NO: 167478 - protein, 497 aa, Unknown
  Bacterial polypetide isolated from the Sargasso Sea
EAIKIQNDMLGRAPSLAELILFSIQGSEHCSYKSSRNHLKKFVTDGPDVILGAKEDAGVVAVATDKQNRKWCVVMSHESHNHPSQLVPYEGAATGVGGNVRDVMCMGAEVIACTDSFRFGNINNNKTKWIHNGVVDGIAGYSNPLGIPNIGGDIYYNDGYNENCLVTLVTLGIVRDDLIIHSYAPENAEGYDLILIGKPTDNSGFGGASFASLELEEDKKEQNKGAVQEPNAFLERHLLKSTYALFDKLKEKKLINKVGFKDLGAGGVACASVELAETSGYGSEVWMDKIHIGMENLHPSVYLCSETQERFMWVCPPDITQMILEHYNVIYDLPNVSTGAMASAIGKIRGDGLYIIHNENDEIAHAPASQVTKGFLYDRKFENPQSLHEEPNLETEKDMNDVLLRILEHENIASREPVYEKYDKQVQGRIYTETGCADAGVLAPFNSNDYPEEIRNIGIALSTDHNPRYSEISPYWGGVNAVVEAMRNIAAVGATPH

SEQ ID NO: 167479 - protein, 290 aa, Unknown
  Bacterial polypetide isolated from the Sargasso Sea
HAARQDAADPGLQAKLSYNPAEDVAAPYIARGVSPRLAVLREQGVNSHVEMAAAFDRAGFAAVDVHMSDILEGRIKLDAFQSLVACGGFSYGDVLGAGEGWAKSILFNDGAREQFQRFFERGDTLSLGVCNGCQMMSNLRDLIPGADLWPRFVRNRSERFEARFSLVEVQDSPSAFFAGMAGSVMPIAVSHGEGRVEVRDAAHLAALQQSGLVGLRFVDNRGQVTEQYPANPNGAPAGITAVTTTDGRATIMMPHPERVFRTVANSWHPDNWGEDGAWMRMFRNARVRLG

SEQ ID NO: 167480 - protein, 356 aa, Unknown
  Bacterial polypetide isolated from the Sargasso Sea
WKKTKLPQKLKFDKDEFKSLKLSDCLKKILSNSNVSDKKWIWDQYDHTVMGDTIQKPGGDAGVVRVHGTNKAVAASVDSSALYCFSHPLTGGKQIVCESYRNLISVGAKPIAITNCLNFGNPEKEKNMGEFVECVEGITEASKYLDFPVVSGNVSFYNETKDKGIKPTPTIGGVGLIPDYQQMLTMDFKTEGNLVYVIGKTDGHLDQSIFARELLNEKKGPPPTVNLFNEKNIGETVLDLSRKKLIVSCHDVSLGGILTAVSKMCIKGKKGIKINTLKGLTNKYEYFFGEDQARYIIEIPKASLKKVNEILDKYSVHFDELGIINGNSIKYNDDINLPIEELADAHKYWLNKYMDS

SEQ ID NO: 167481 - protein, 254 aa, Unknown
  Bacterial polypetide isolated from the Sargasso Sea
MNVLVLSGYGINCENETLHAFEVVGFKGKIVHINDLIQNPKQLNNYQVFAIPGGFSYGDDTGSGNAMAKKIMTNLYDHLINFSLKDKLIIGICNGCQILINLGLVPSLNKKDPEVAMIENKSGNYECRWVDVKVSNKKSPWLKNISTLNLPVAHQEGQFMIPVNLLKNIKANNLIGLQYIDHQKKLAKGQFPFNPNGSKDDIAALTNQNGNVLAMMPHPERAFYHYHIPNWQNSTLKKFGDGYKIFMNAKKFFA

SEQ ID NO: 167482 - protein, 64 aa, Unknown
  Bacterial polypetide isolated from the Sargasso Sea
MKSSVIIFPGSNCDRDMDVALKKFGFKNTMVWHNDDKLPKSDLIVLPGGFSYGDYLRCGSIAGK

SEQ ID NO: 167483 - protein, 315 aa, Unknown
  Bacterial polypetide isolated from the Sargasso Sea
SWVTNQYDQMVMGDTVQRSGSDAAIIRIHNKDKAIAVTVDSSANYCKSQPKIGGKQIVCENWRNLISVGAKPLAITNCLNFGNPENEEVMGEFAECLEGIKEACEFLNYPVVSGNVSFYNGTNKKNIYPTPVIGGVGIIKKLSNTINHKLKKEESLILLIGKTFGHIEQSCFLKENFSITDGNPPEINFFNEKNNGEAVLNLITLGLANSVHDVSNGGLIVALCEMSMSSNYGIKIEKPKKIRNPVEYFFGEDQGRYIVEINNDNLIKVEKILQKNNVYYELIGVTQKKYFEIEGLMKSDVNDLFKINNQWYNKY

SEQ ID NO: 167484 - protein, 135 aa, Unknown
  Bacterial polypetide isolated from the Sargasso Sea
MTFQEHEKLHIEKNVKRELTSTESQILAAEWSEHCSYKSSKQHLKMLPTTGPNVIVEKGYDSGVLDVGGGYVVTVHIESHNHPSAVEPFGGAATGVGGVIRDILSAGTRPVALFDGLRFGNIENDSHARWLFKNA

SEQ ID NO: 167485 - protein, 359 aa, Unknown
  Bacterial polypetide isolated from the Sargasso Sea
AGVIAAQDEIIKEIIIQSESGKPVLGICNGAQILVESGMVPGLRNYEIGAALTENKRVKSGRILGQGYYNVWTNLKMNVDPARSAFTKHLQKGEIIRIPLAHGEGRFVIPETLLNEMVENEQELYKYCDENGSTINEFPTNPNGSINNIAAICNSAGNVMAMMPHPERTPKGDAIFSSMKKYIDDKSKPRFKTLKFKPAKLKQNKYPKDSSKIMWLIDMFITDNEAISVENALQQIGFDVRIKRQIMWEIEIEKGSIDTLEKIKKSGTLFNPNKEFIKKQTEPDLNVASILVCQKENIKGRAAYETLKSSMGIDKVLQIKHGVLWNLKINGSNFENDLERILKTNILFNQISYEYYRIK

SEQ ID NO: 167486 - protein, 419 aa, Unknown
  Bacterial polypetide isolated from the Sargasso Sea
MTINIGVIQFPGSNTERETGLAIKRGHMNPVEILWNSDTESVANCDGYIITGGFSFEDRSRAGIIASLDPIMKTIKEEAENGKPVFGICNGAQILVESGLVPGVKNSQTAIALTDNKRIQDGHVVGTGYYNTWANLKVTVPPNSTAFTRHLDHEEIIYVPFAHAEGRFIIPGELLDELIENNQTVFRYCNNDGETLSQFPTNPNGSDYNLAAISNSAGNVLAMMPHPERTNLGDKLFSSMREFIEQKISSKNGSLSYSPPGKRIKKYTPGKDVSEWVVDMVITDNEAETVQNALKRTGIDVTIHRQQHWEISTSGNSSNTLKKIENTGELFNSNKEYISSIKRKKNTACLLVRQKEDMHCQAKFESIRERFKIDELMQLKRGIVWNISVKNTNFQPVLDKILDTNILFNPLSHECFRIS

SEQ ID NO: 167487 - protein, 139 aa, Unknown
  Bacterial polypetide isolated from the Sargasso Sea
ICNGFQILIESGLLDGALMRNSSLSFICQDVLIKSKNKSSVFTRKSKLAKMPIAHNEGNFFATSEQLKKIEDNDQIAFQYCDETGNVEQSSNPNGSLANIAGILNENKNVLGMMPHPERAAEKIHGCDDGKIIFESIFN

SEQ ID NO: 167488 - protein, 169 aa, Unknown
  Bacterial polypetide isolated from the Sargasso Sea
MKSSVIIFPGSNCDRDMDIALKKFGFKNQMVWHNDKAIPKSDLIVLPGGFSYGDYLRCGSIASKSNIIKSVIDFANSGGLVLGICNGFQILTETGLLPGILQQNKYLNFICKNIFVKVKNKENKYFKNLKKDILELHIAHNEGNYFCSEDELKNLEDNNQIAVVYCNEK

SEQ ID NO: 167489 - protein, 305 aa, Unknown
  Bacterial polypetide isolated from the Sargasso Sea
MQSMRDEENCAREEHSLITMAKEDDPGLSCSVTFDVNEDICRPFIGGLERPKVAVLREQGVNGHIEMAAAFERAGFDCVDVHMTDLSESRRTLSEFDVLAACGGFSYGDVLGGGGGWAKSILFNSILRDQFSEFFESDKLVLGVCNGCQMISQIKPILPDSQNLPRFVRNRSEQFESRTVMVKVNVTKSPWLSGMEGSVLPVAVAHGEGKVEFDLSEQLNCLYDKNQVALQYVDSHHQVTERYPYNPNGAPKGIAGVLANEGKTLIMMPHPERVFRVCQNVFQDDGLEEDGPWLRLFRNARAQLD

SEQ ID NO: 167490 - protein, 1299 aa, Unknown
  Bacterial polypetide isolated from the Sargasso Sea
MIVKEGPASHSPFKLESLLIRLQSIDENISGLGARFIHLIDSKKELDQLQDDVLESILEYGPNWPLGVNEGSKIFILPRFGTTSPWSSKASDIAKVCGLTSIEKIERGVAFTFALNDKDLMPNSEAVELLYDRMTEVAITDLGQAKEIFSSLKPKPFSEIDILSDGKKALESANIELGLALNDDEIEYLLDQFTKLYRNPTDAELMMFAQANSEHCRHKVFNADWTIDGVEKERSLFQMIKNTYESSSRNVLSAYKDNAAVISGNEADWFLPNHNDQKYGRIHDQIHTMMKVETHNHPTAISPYPGAATGSGGEIRDEAATGRGAMPKAGLTGFSVSHLFIPDDVQSWEETIGKPDHIASALDIMLDGPIGGAAYNNEFGRPNILGYFRTFEERNREQENSSWGFHKPIMIVGGMGNISDSSVNKNDIAAGSLIIVLGGPAMLIGLGGGSASSLNAGSSDSDLDFASVQRDNAELERRAQEVITRCFSMGVQSNQENTNPIILIHDVGAGGLSNAIPEVADHSKMSADINLREIDNAEPGMTPLEIWCNEAQERYVLSIHPDDLELFDQICKRERCPYAVVGEVATHGNLKLKDKVFDNYPIDMPMDVLFGKPPKTKLEIATREKAIIDDGMNGIDIEEACLKILRFPTVADKTFLIHIGDRTVGGLVAQDQFVGPWQVPVSDVAVTLKDHFGSQGEAMAMGERSPIAVYNAAASGRIAVGEAITNILSAPINHISDVKFSANWMSSIMTDRLKQDLYETVEAISVDFCSKIGITIPVGKDSLSMQTSWTSEENKFINTAPLSLVISAFSPVDDVNKVITPQLKNINESILLLIDLGEGQNRMGGSCFSQIYNRNLGETPDIEDPELLKRFFNLIGTMKSKNLIQAYHDRSDGGLFACVSEMAFAGNMGVELSLHARNQEEMLQLLFTEELGCVIQIYKKDLEVVLEILNDASLSDCSYEIGNVSKDKRITIQDTNRFSKSFDLMMLRQAWSKMSYEMQKIRDNPETAEEGFRKQLDEEDPGLNPVISFDTPKIDYKRLTKSSPKVAILRDQGVNSQIEMAVAFNKAGFNAYDIHMTDLLNGRVNLEEYRGLVVCGGFSYGDVLGAGGGWAKSVLFNENARNQFHSFFHREETFSLGICNGCQMMSQLKELIPGAEHWPRFVRNLSEQFEARLNTVEVLESNSIFLKGMEGSRIPIATSHGEGRVQYLHTDDKDALIKSNTVAIRYVDNHGKPAIHYPDNPNGSESGFAGFCSKDGRSTIMMPHPERVMRAEQFSWCPDDWKDHGPWAKFFMNARDWID

SEQ ID NO: 167491 - protein, 354 aa, Unknown
  Bacterial polypetide isolated from the Sargasso Sea
ALHFLKQKNIEYRKCATQKSDAKISISSNNQIEFSDSVINLEKVWNETSYSIKSSRDNPDSAKEEHDLIEKFDDQGLVARDNFKFSAKLPALNKHLKPKVAIFREQGVNGQNEMAAAFMLAGFDAFDVHMQDLLDNPSMLSEFQGLAACGGFSYGDVLGAGGGWSSSISYNNAVRDSFEQFFNRDETFTFGVCNGCQMLSNLKDLIPGAENWPEFLWNESDQFEARLSQVTIAESPSVLLAGMAGWQIPVAVAHGEGRASFKGESLKSLSEQNQIAVQFTDHHGAVASSYPLNPNGSPKGITGLTSRDGRATIMMPHPERVFRSQQLSWKSSRWKEYSPWMQIFINAYKFCQET

SEQ ID NO: 167492 - protein, 127 aa, Unknown
  Bacterial polypetide isolated from the Sargasso Sea
GALLRNKNLKFLSKDVSLKIINNNNNFFKKYKKESIIKLNIAHNEGNYFTQQDHLKELEDENLIPLKYCDENGVINENNNPNGSINNIAGILNSKKNILGMMPHPERMVDNFISSADGVELFTSILN

SEQ ID NO: 167493 - protein, 329 aa, Unknown
  Bacterial polypetide isolated from the Sargasso Sea
NTIFKPGDADAALIRLRRQDEKNKNNEFSGVAASVDCNSRWVLLDPYRGTIAAVAESARNVSCVGAQPIAITNNLNFSSPETEIGYWQLSSACDGISKACIALETPVTGGNVSLYNESKKQNNQVTPINPTPVIGMVGTIKNVDKAISSGWKNINDQIWIIGSNASESSIAASSYLEYFHDLVTGRPPKIHLQDEKCCQSFLRDSIQKNYIASSHDVSDGGLAVALSECCILSSKGAYIQLEEKNARQDNLLFSEGGSRIIFSVNKKEEQNFLNFLEIKSKDFGKNVYVKKIGFVSEHNLDITLQDQILCNLRVDELTEKFNNSISNCF

SEQ ID NO: 167494 - protein, 164 aa, Unknown
  Bacterial polypetide isolated from the Sargasso Sea
KSKIMQSVINFANSGGMVMGICNGFQILVETGLVPGVLLRNKYLEFICKNVFIKINDKKNRYFKNIDNEVLELHIAHNEGNYFCTNDQLKEIEDNNQIAINYCDKNGKIEDQFNPNGSIKNIAGIFNKEKNVLGMMPHPERMIDTSLSGEDGSLFFKNLINNYK

SEQ ID NO: 167495 - protein, 354 aa, Unknown
  Bacterial polypetide isolated from the Sargasso Sea
IDILKIIFKNPNIATKKWIWEQYDSSVMGDTIFANGDSDASLVKIHGTEKKGSFGKGLAITTDCTPRYVKSDPIIGGMQAVCEAARNIASSGAKPLAITNNLNFGNPDKKNVMGEIVGSIKGISEAASYLSTPIVSGNVSLYNETNGKSILPTPVIGMVGAIDEVENSLKISAEPDNVLIALGQSENFKAGWVGCSIYQEIINKKYDGAPPPINLENEKKVIEIILKLNEQKLLTAAHDISDGGLLTTVCEMLFKYNLGLDINLPSNLINCDSYDPLLQSWCFGEDQARIIIATKDIKKVQLILKENNIDFFVLGETNSSSNLNLKDITTISIKDIKNLNEKTIPSMMGDQQQG

SEQ ID NO: 167496 - protein, 174 aa, Unknown
  Bacterial polypetide isolated from the Sargasso Sea
DYLRCGSMASKSKIMQSVINFANSGGMVMGICNGFQILVETGLVPGVLLRNKYLEFICKNVFVKISDKNNAYFKNIKNNVLELHIAHNEGNYFCTNDQLKEIEDNAQIAINYCDNQGKIEKSFNPNGSIKNIAGIFNKEKNVLGMMPHPERMIDPSLSGEDGSLFFKNLINNIK

SEQ ID NO: 167497 - protein, 419 aa, Unknown
  Bacterial polypetide isolated from the Sargasso Sea
MGVDVAIVQFPGSNTERETFMACERVGLNPIEFLWNENHDTLKDFAGFIIVGGFSYEDRSRSGVIASLDPIVDLIKIESEKGKPVLGICNGAQILVESGMVPGTNKYSLSSSLTNNKRIIGGKVLGTGYYNDWAYLSCTSKPSKSVFTRFLNIGEIIHIPFAHAEGRFVIPKDLLEILINNNQIPFRYCDNNGNIINEFPTNPNGSMYNIAALSNPDGNVMAIMPHPERTHNGDKIFLSMYDYIKRNNNKNISFLDYGISNNDINIYKSENNSLEWVVNMIITDNEASSVQSALSQAGVDVKITRLTHWEITGANNSSLNKIEKTGELFNSNKEYIYDYKTEKNESSITFLIRQKEDMLGRQKMQSLADRFNIQGLKEIRHGVLWNIKSKSSNFDLVIQKVLDSKILFNPFSQECYKYE

SEQ ID NO: 167498 - protein, 1258 aa, Unknown
  Bacterial polypetide isolated from the Sargasso Sea
MKKEIIFFQGEEILNKFDEKRIFGKELTNAQNKYIFSILFQKKPTEDELKRIKSILSATELDFNPNIVLTPRAGTQSSWSSKAQDIFHNIGIDSIKRIERFKGFNLLNEDSSMIENKVFDRMTESSFSNLDETRIIFKSAKRKESRKYNINEDTDLLNKLNNDLGLALNEFEISYLNSVFQELGRPISDSELMMFSQINSEHCRHKIFRSKWKTDIPFGHDSLFDAIKSTTKEKMSHVLSAYHDNSAVISSFGKKFLEIDGKNIFKNYEGNIHTTIKVETHNHPTGISPYEGAATGSGGEIRDCSATGRVARPKAGFMGLCLSHLRLSEKLESWETELNKPDFLSSPMEIIRDAPIGSASYNNEFGRPAIFGYFRTLEYKNHGYHKPIMLAGGIGSIKEVHIKKGTPKPGDVVVVLGGPAMLIGLGGGSASSTKKTNENSDLDFASVQRSNPEMQRRAQQVLDKFNERSSKNPISFIHDVGAGGISNAIPELAKDTNLGVSIRLEDIYSTDETMSPMELWCNESQERYVFSIPKEKVPALKHICERERCPYSIGGELTDDKFISVKFHDEQVVNLSLDHLFGDIPLPELIAQDYDRVTEKEELPTKDLNKLIFNTIKFPAVASKKFLITIGDRTVNGLVYRDQLIGNRQLPVSDYAATLDNYDSYTGQVISIGEKPNVAIENPEASARMALAESITNVCGVKHNSLSDICFSANWMSSTKTADERGDLLRGVQSLTNMADVLDLSIPVGKDSLSMNTSWKTKDNEHSVTSPMTLNISSFSNVPDLRKSVTPELSTKDSTLLHVWINEGEFRLGGSSLYLSNNLFGGATPDIEHPEKFKQLFEASQELISKDLVEALHDISDGGLITTLIEMSLCSNLGLDIRLDYSDKESIIPKLFSEETGYVIEINNEKLAEVKETLTEKGLFFDEVGKKNADTKINLFSFDDVLFSSSLDKLFDEWSSVSYKVQKIRDNLESADSEKQVYKKWGDMITPKIDFPIPTPNKNLFSKKPKIALLREQGINGHYDMAAALIAAGFEVNDIHMSELPDKIKNLDSYSGLVVPGGFSYGDVLGAGSGMSNTILFNPKIKKIFKNFLENDKKFALGICNGCQFLSGLKKIIPGTENWPKFKKNLSNQYECRLVQLQIEDSPSILFRDMKNSVIPVMVSHGEGRADFDLKEDNVIARYVDPDHKVTQKYPLNPNGSMNAAAGVCNDDGRITIMMPHPERTYLTKQFSWSPNDWGEYSPWFKIFDNAYLFSKKN

SEQ ID NO: 167499 - protein, 63 aa, Unknown
  Bacterial polypetide isolated from the Sargasso Sea
YCDENENMKINFNPNGSIKNIAGIFNKEKNVLGMMPHPERMIDTCLSGEDGSLFFKNLINNLK

SEQ ID NO: 167500 - protein, 93 aa, Unknown
  Bacterial polypetide isolated from the Sargasso Sea
ELHIAHNEGNYFCSKDELKSLEDNNQIAVTYCGEDGTENETTNPNGAIKNIAGIFNKNKNVLGMMPHPERMIDKYLSGEDGSLFFKNILDNFK

SEQ ID NO: 167501 - protein, 412 aa, Unknown
  Bacterial polypetide isolated from the Sargasso Sea
DRSDGGLLVTLAEMAFTGHCGIEADIHSLGEDRLAALFNEELGAVIQVRAGDREAVEALLAQHGLADCVHYLGKAVQGDRFVVEADGHAVFSESRTTMRMWWAETTWQMQRLRDNPECADQEHDAKTNDADPGINVKLTFDINDDVAAPYIATGARPKVAVLREQGVNSHVEMAAAFHRAGFDAIDVHMSDLLGGRIGLGNFQALVACGGFSYGDVLGAGEGWAKSILFNNRVRDEFETFFHRPQTLALGVCNGCQMMSNLRELIPGSDLWPRFVRNHSDRFEARFSLVEVTQSPSLLLADMVGSMMPIAVSHGEGRVEVRDGAHLAQLESKGLVALRYVDNFGKVTEAYPANPNGSPNGITAVTTENGRVTIMMPHPERVFRTVSNSWHPENWGEDSPWMRIFRNARKQLG

SEQ ID NO: 167502 - protein, 81 aa, Unknown
  Bacterial polypetide isolated from the Sargasso Sea
CTSDQLKEIEDNNQIAIYYCDHEGNLNDQNNPNGSIKNIAGIFNKEKNVLGMMPHPERMIDQSLSGEDGAIFFKNLINNIK

SEQ ID NO: 167503 - protein, 168 aa, Unknown
  Bacterial polypetide isolated from the Sargasso Sea
SIASKSNIIKSVIDFAHSGGLVLGICNGFQILTETTLLPGILQQNKYLNFICKNIFVKVKNKENKYFKNIKKDILELHIAHNEGNYFCSKDELKSLEDNNQIAVTYCDEKGLEEETHNPNGALNNIAGIFSKNKNVLGMMPHPERMIDKYLSGEDGSLFFENLLGNLN

SEQ ID NO: 167504 - protein, 110 aa, Unknown
  Bacterial polypetide isolated from the Sargasso Sea
MKSSVIIFPGSNCDRDMDVALKKFGFKNQMVWHNDAEIPKSDLIVLPGGFSYGDYLRCGSIAGKSKIIKSVIDFANSGGLVLGICNGFQILTETGLLPGILQQNKYLNFY

SEQ ID NO: 167505 - protein, 1010 aa, Unknown
  Bacterial polypetide isolated from the Sargasso Sea
MSSDEHVRIFEVTTKDLEGLPDSRGENVRSMLKTDHGIKVDSVRVIMGYQVRSTISDAQAETLTYDLFADPVIEIATTGSRILDDFSDPPEVAIQIGFKPGVTDNSAQAGLDGLTTLFPDQKEARVATYRTYAFWGVQGTVSPSELATTLHNPMIERASVADRNGCSKGHWPELGFPVVPPNIFKEPTTIDLEVSDDELLEISERGLLALNLEEMKAIQGHYRDPAVRAERTEQGLQSDRPTDAELECLAQTWSEHCSHKIFAAKIRHVDKATDEDTTINSLFKTHIMQPTLDIQKEVDWLLSIFHDNSGVISWNDEWSVCIKAETHNSPSALDPFGGAITGIVGVNRDILGTGLGARPIANTDVFCFGPPDYSGTIPPGLFHPSRVFRGVHSGVRSGGNESGIPTVNGAIVFDERYIGKPLVFCGTVGIMPRTLPDGRESHVKTPKPGDVVYMVGGRVGSDGIHGATFSSLELTEESPSSAVQIGDPITQKKMLDMILEARDEGLIQVITDNGAGGLSSSVGEMAELTGGAKLDLGKVPLKQAGLSSWEILVSESQERMTVGVRPDDCEKFETLASLHEVEATPVGEFTDSGAFVVHHGQTPVAHLPIHFLFDGCPQLNLDSEWSPPTHLPVETPELDEEGMGKLLARLLARPNVASKEWWVRSYDHEVIAQSVIKPFCGINHDAPGDAAVIAPIQGGTQGLVISNGIAPRYSDIDSYAMAAASVDEALRNAVCVGVDLDLIAGLDNFCWPDPIESSKTPDGRYKLAQLVRANRALDDVCRAYRLPCISGKDSMKNDAMMGGEKISVPPTLLFSLLGNHEDVRKAVSSDFKKPGDAIFLVGETHQELGASELAFMLRDEGSGGIGGAVPEIEPERNMTVYRALTSSMKSGLVSSAHDCSDGGLAVALAECCFGADSGASIDISPLQSDCSDLDDWGALFGESLGRILVSVRPSDKEAFEESMEGVCCHYLGLVSEGDAISVSRDGEKVLLGSMSEMRDSWKDTLHGGGL

SEQ ID NO: 167506 - protein, 351 aa, Unknown
  Bacterial polypetide isolated from the Sargasso Sea
DPIVDLIKIESEKGKPVLGICNGAQILVESGMVPGTKKYSLSSSLTNNKRVVGGKVLGTGYYNAWAYLSCTSKPSKSVFTRFLNIGEIVHIPFAHAEGRFVIPKDLLEILINNNQIPFRYCDNNGNIINEFPTNPNGSMYNVAALSNPDGNVMAIMPHPERTPNGDKIFLSMCDYIKRNNNKNISFLDYGVSNNDINIYESENNSLEWVINMIITDNEASSVQSALSQAGVDVKITRLTHWEIIGANNSSLNEIEKTGELFNSNKEYIYDYKTEKNESSVTFLIRQKEDMLGRQKMQSLADRFNIQGLKEIRHGVLWNIKSKSSNFDIVIQKVLDSKILFNPFSQECYKYG

SEQ ID NO: 167507 - protein, 553 aa, Unknown
  Bacterial polypetide isolated from the Sargasso Sea
MGSPGKLEGNKDLLKAVESVGIDLCPKWNMAIPVGKDSLSMSTEWSKNGEDKSVVSPLSLIVSGFAPIQDISIAVTPELKKSKKSSLLFIDLSKGHTRLGGSILAQLNNQLFGESPDVECEKEMPAFVDSIHKLLSHRKILAYHDRSDGGLITTLAEMSFAGRLGLEINLDSAIKDGGALLEFLFNEELGAVIQVLDEDLDYVQEALSDAGLNEFVHNIGSLSDSADIVINFQEENLLSLPIKDLLQNWNRVSYEIQSLRDNPDTAKAEYINDTKIKNPGLRPKITFSVPEKIDLNSSRPRIAILREQGVNGQNEMAAAFHEVGFDCIDVHMTDLIDKRQNLQDFQGLVACGGFSYGDVLGAGGGWANSILFNEELRNQFGDFFQNENVFSLGVCNGCQMLSKLRGLIPGTDNWPSFKRNISEKFEARLVQVIVKDSPSILFKGMKDSVIPVPVAHGEGRVEASNESLKNLDKKFTTISYADSFGEDTETYPLNPNGSPHGIAGVTNENGRVTIMMPHPERAFLNDQYSWCPEDWLNYSPWIKLFQNAKDFID

SEQ ID NO: 167508 - protein, 1293 aa, Unknown
  Bacterial polypetide isolated from the Sargasso Sea
MEIIRGAPALSTFRVQKLMEACVNAALPVRQIYAEYVHLADLSELLETNEREQLEKILTYGPAIEAHTPQGSLLFVTPRPGTISPWSSKATDIAHNCGLGKVKRLERGVAYYVESDTLTVEQQQTLKGLLHDRMVEVVLDDFAKADVLFKRTEPAPFKSVNVLAEGRRALEVANVEMGLALAEDEIDYLVENFVRLNRNPNDIELMMFAQANSEHCRHKIFNADWTIDGAVQPKSLFKMIKNTFETTPDHVLSAYKDNAAVMEGSVAGRFFPDPNGVYSYHTEPMHVLMKVETHNHPTAISPYPGAATGSGGEIRDEGATGRGSKPKAGLTGFSVSNLKIPGFVQPWEGNYGKPERIVSALDIMTEGPLGGAAFNNEFGRPALLGYFRTYEQEVSSHNGVEVRGYHKPIMLAGGLGNIREEHVQKGEITVGAKLIVLGGPAMNIGLGGGAASSMASGQSSEDLDFASVQRENPEMERRCQEVIDRCWQLGDKNPIQFIHDVGAGGLSNAFPELVNDGGRGGIFNLRNVPSDEPGMSPLEIWCNESQERYVLSVAAEDLPLFTAICERERAPFAVVGEATQEQHLTLADSHFDNNPIDLPLEVLLGKAPKMSRNVVSAKAVSPALEQSNIDVKEAVKRILSLPTVADKTFLITIGDRTVTGLVNRDQMVGPWQVPVADCAVTAASFDTYAGEAMSMGERTPLALLDFGASARMAVAESIMNIAGADIGSFKRIKLSANWMSAAGHPGEDAGLYEAVKAVGEELCPELSLTIPVGKDSMSMKTAWQQDGANKTVTAPMSLVISAFGVVQDIRNTVTPELRSDKGETSLLLVDLGAGKNRLGGSCLAQVYGELGDIAPDLDDAALLRGFFETMQKLVAKKSVIAYHDRSDGGLFTTLVEMAFAGNTGLAIDLSALQGTDVERLFNEELGGVLQVSRADAELIAAQFAQAGVPCHMIGSLANDQRITIKDGAREVFSETRVALRTIWSETTYRMQALRDNPACALEEFKLKQDETDLGLTVNLSFDPSEDVAAPYILKGAAPKMAILREQGVNSHVEMAAAFDRAGFESRDVHMSDILSGRISLEEFQGLVACGGFSYGDVLGAGEGWAKSILFNARARDEFSRFFERDSSFALGVCNGCQMLSNLKEIIPGSEHWPRFVRNRSERFEARFSLVEVQQSPSLFFQGMAGSRMPIAVSHGEGHAEFANAQALALAEASGTIALRFVNGKGEIATQYPQNPNGSPNGLTGICTTDGRVTLMMPHPERVFRTVANSWHPDNWGEDSPWMRMFRNARVNLG

SEQ ID NO: 167509 - protein, 75 aa, Unknown
  Bacterial polypetide isolated from the Sargasso Sea
NEIKDNNQIAIYYCDKNGQTEEQHNPNGSIKNIAGIFNKEKNVLGMMPHPERMIDQSLSGEDGSLFFKNLINNLK

SEQ ID NO: 167510 - protein, 145 aa, Unknown
  Bacterial polypetide isolated from the Sargasso Sea
MKSSVIIFPGSNCDRDMDVALKKYGFKNHMVWHNDLKLPKSDLVVLPGGFSYGDYLRCGSIAGKSKIIKSVIDFANSGGLVLGICNGFQILTETGLLPGVLQQNKFLNFICRNVHVKINDKDNRYFKNIKKNILELHIAHNEGNY

SEQ ID NO: 167511 - protein, 88 aa, Unknown
  Bacterial polypetide isolated from the Sargasso Sea
MTSSNWHFDTEKSLVESHGLKLDEFEKIVEGLGREPNLTELGIFSAMWNEHCSYKSSKYWLKKLPTSGERVIQGPGENAGVIDIDDGD

SEQ ID NO: 167512 - protein, 355 aa, Unknown
  Bacterial polypetide isolated from the Sargasso Sea
MLRSSAKQMNISMCQVGKPVGKRISIKTENNNIILDKCITDLERAWSQTSYHIKAMRDNKDDALAEYDLISDTDHKGLFTSDTFQMSQPKNSIFNFLKQKPKVAILREQGINGQFEMAAAFMAAGFEAVDVHMDDLIKNRMTLEDFQGLAACGGFSYGDVLGAGKGWANSILFNDRLNDEFASFFHNDKKFTLGVCNGCQMLSNLKSIIPGTQYWPTFVKNHSDQFEARLTQVKIQKSSSILFAGMEDWSLPIACAHGEGQVAFNESNDFKILDEQNQVFMNFVNSNGNSTEQYPLNPNGSVMGITGVANQDGRVSILMPHPERVFRSIQFSWKPSHWKEYSPWMQIFINAKKFC

SEQ ID NO: 167513 - protein, 216 aa, Unknown
  Bacterial polypetide isolated from the Sargasso Sea
NLNDFQGMAVCGGFSYGDVLGAGGGWSRTILYNNLVKDQFQEFFNDEKVFTLGVCNGCQMLSNLKDIIPGAEFWPSFERNLSDQFEARLAQVKISKTESILLDGMEDWVIPVASAHGEGRAQFNNNDLEELEKSNQIAMHFVDSSENSSEKYPINPNGSPNGITGITASNGRVTIMMPHPERVFRKVQLSWHRKDWNEYSPWMQIFINAKKFSDKN

SEQ ID NO: 167514 - protein, 72 aa, Unknown
  Bacterial polypetide isolated from the Sargasso Sea
DDNDQVAVKYCSKSGEVNENFNPNGSLKNIAGIFNKNKNILGMMPHPERVIDQSLSSDDGSFFFKNLIENLK

SEQ ID NO: 167515 - protein, 158 aa, Unknown
  Bacterial polypetide isolated from the Sargasso Sea
SVINFANSGGMVMGICNGFQILVETGLVPGALLRNKYLEFICKNVFVKINNKDNAYFKNIDNTVLKLHIAHNEGNYFCTNDQLKEIEDNAQVAINYCDPSGKIGQLYNPNGSIKNIAGIFNKAKNVLGMMPHPERMIDTSLSGEDGSLFFKNLINNLK

SEQ ID NO: 167516 - protein, 751 aa, Unknown
  Bacterial polypetide isolated from the Sargasso Sea
EIWSNESQERYVLAIHKDNKNAFEKICQRERCEYAIVGHTTKEMSVKLYDDKNKNYPVDVPLSMLFGDLPITEMEVKEEFVKTFNEDNSEDIDLSDSITKVLQHPTVSSKSFLITIGDRTVSGMVARDQFVGPYQVPVSDYSLSLRSYTSNNGEVLSIGEKPTIALINPAASMRMALGEALTNMSGVVIKGLNNVQVSANWMAASGENSDDFALRSGVEALSKIAVDLKVSIPVGKDSLSMRTKWSENNSDYEVSSPLSGVITAMAPVDDVTESVTPELNTSDDFSILLIKLNNKNRLAGSIFSEITETKYQHTPDIDDIEVFEKLFSSIQNLLKSKKILAMHDISDGGLITTLLEMCFTKKVGMRLNLDDSSGVNEFLFSEEIGFAIQIKKNNLDEVTNTLTNENIYVKNIAEIIDDEQFSIFKNDSELFSKSVIELEKNWRETSHAIQSIRDNEEIANSELSLLDDRNFKGLKSNISFDEDELKHISVKRTKPKVAILREQGVNGQNEMAAAFTLAGFNAFDVHMQDLLDGNTNLKDFQGMAVCGGFSYGDVLGAGGGWSKTILYNNLVKDQFQEFFNDKKVFTLGVCNGCQMLSNLKDIIPGAEFWPSFERNLSDQFEARLAQVKISKTESVLLDGMEDWMIPVASAHGEGRAQFNNNDLQELEKSNQIAMRFVDSSENSSEIYPINPNGSPNGITGITASNGRVTIMMPHPERVFRKVQLSWHRKDWNEYSPWMQIFINAKKFSDKN

SEQ ID NO: 167517 - protein, 461 aa, Unknown
  Bacterial polypetide isolated from the Sargasso Sea
TSSSIEMASKGNLGIEINLNKVPCREAKMTPYEIMLSESQERMLIVLENGKEEQAKKIFDKWNLDFAVIGKTTKSKKIELYFDEEKVADIPVNTLVENSPMYDRKWKKAKLPKKNKIKKEDLKNLKIIDVLKKILANPNVCSKEWIWQQYDHTVMGDTIQKPGGDSGVVRVHGTDKAVAASVDSSAVYCWAHPLTGGKQVVCESFRNLISVGAKPIAITNCLNFGSPENEENMGEFVECVQGIGEAAEYLKFPVVSGNVSFYNQTKDEGIKPTPSIGGVGLIKDYKKMITMKLKEVDNIVLVIGKTEGHIDQSLFARNILDEKNGPPPEINLFNEKNNGETLLKLINSDLVQSAHDVSVGGIITAVSKMCIKGNKGINLKKPKYLINEIEYFFAEDQGRYIIEITKKDLKKVTDILNKNAVHFDELGTVNENELFINEKTKVTIDELKTSNTSWLTKYMSK

SEQ ID NO: 167518 - protein, 448 aa, Unknown
  Bacterial polypetide isolated from the Sargasso Sea
AAGLTSSSVEMASKGKLGIELNLNKVPCREENMTPYEIMLSESQERMLIVLENGKEEKAKKIFDKWDLDFAIIGKTSNSKKIEIYFDEKKVADIPIDLLAENAPIYDRKWKKIKLPQKIKFKIQDFKALNIDDCLKKLLSNSNVCDKQWIWNQYDHTVMGDTIQKPGGDSGVVRIHGTNKAVAASVDSSALYCHAHPLTGGKQVVCESWRNLISVGAEPIAITNCLNFGNPEKEKNMGEFVECVKGISEASKYLDFPVVSGNVSFYNETKDKGIKPTPVIGGVGLIKDYKKMITMNFKKEENIVLVVGKTEGHLAQTIFAREILGNKNGPPPEINLFNEKNIGETLLKLIEEKLIVSSHDVSLGGILCAVAKMCIKGNKGIKISKLNNLTNKFEYFFSEDQGRYIIEINKENVEKVEVYLNKNSINFDHLGIVTNDDIVIDNETKISI

SEQ ID NO: 167519 - protein, 87 aa, Unknown
  Bacterial polypetide isolated from the Sargasso Sea
MVEVNEKIAIEHGLKSDEYKKICDLLKRSPNITELGIFSAMWNEHCSYKSSRKHLKKLHTKGEKVIQGPGENAGVVDIEDDDAIVLK

SEQ ID NO: 167520 - protein, 224 aa, Unknown
  Bacterial polypetide isolated from the Sargasso Sea
MLIILDDKKENEAKKIFDKWDLDFVVIGKTTDTNKLVLNFNNKKVADIPITALADEAPQYDRKWKKLKVKKNDFKKKELKKIKIDEALFKILSSPDHSNKSWITDQYDQVVMCDTIQKSGGDAAVVRVHKKEKAISISVDSSANYCVADPRTGGKQIVCENWRNLISVGSKPLAITNCLNFGNPEKPEVMGEFVECIEGMKEACEFLDYPVVSGNVSFYNETNQ

SEQ ID NO: 167521 - protein, 208 aa, Unknown
  Bacterial polypetide isolated from the Sargasso Sea
AVCGGFSYGDVLGAGGGWSKTILYNNNVKNQFEEFFNNQKTFTLGVCNGCQMLSNLKDIIPDADYWPSFERNFSDQFEARLIQVKINNTNSVLLNDMDGWTVPIASAHGEGRAKFLGNSLEELKKQNQVAMTFVDSNQDPTEKYPLNPNGSIEGITGVTASNGRVTIMMPHPERVFRKHQMSWHSKDWNEFSPWMQIFINARNFSDNN

SEQ ID NO: 167522 - protein, 85 aa, Unknown
  Bacterial polypetide isolated from the Sargasso Sea
GNYFCSDEELKAINENNQVALTYCGFDGTDNEEFNPNGAIKNIAGVFNKNKNVLGMMPHPERMIDKYLSGKDGSIFFENLLKINN

SEQ ID NO: 167523 - protein, 418 aa, Unknown
  Bacterial polypetide isolated from the Sargasso Sea
MINIAIIQFPGSNTERETLMACRRVGLNPVEFLWNEPAESLSDLDGFVIVGGFSYEDRSRSGVIAALDPIMKQIKIEAAKGKPVLGICNGAQILVESGLVPGLDDHRVGLALTDNKRVKDGHVVGVGYYNTWANLKMSIPSNRCAFTRHLDIGGVINIPLAHGEGRFVIPNKLLEKMITNDQTVYRYCDDDGKVVGEFPTNPNGSIYNLAAVCNPAGNVMALMPHPERTTNGDPIFSSMKEFIELGNPVVDHSLSFERFNYDLEKYIPGADATQWIIDMVITDNEAASVNNALNHLGYDVSITRQTHWEISTNEGHNDSLEKIDASGELYNSNKEFISNIRSAENTVSFLVRQKEDMHGRIKYESLKERFEIEELKEIKRGVIWNLSINSGNIDTVINDILNTNILFNPLSHECYKIN

SEQ ID NO: 167524 - protein, 71 aa, Unknown
  Bacterial polypetide isolated from the Sargasso Sea
MKSSVIVFPGSNCDRDIAVALEKLQFKNKMVWHKDSELPKSDLIVIPGGFSYGDYLRSGAIAAKSKILNEV

SEQ ID NO: 167525 - protein, 276 aa, Unknown
  Bacterial polypetide isolated from the Sargasso Sea
MQVKLTFDLEKRNNPTKISGNKPRVAILREQGVNSQYEMAAVFMRAGFEAIDVHMSDLLSGVDQLDNYQGIVACGGFSYGDVLGAGGGWAKSILYNNQLSDQFAEFFNRKNTFSLGVCNGCQMMSHLKTMIPGAECWPEFKRNKSEQFEARFSLVKIESTKSIFLAEMAGSQIPIATSHGEGRAVFSSSEVRQHAKPQIAVRYIDNYGNIAERYPENPNGSIEGVCGLTSSDGRATIIMPHPERVSKTTQNSWHPNDWEDEGPWFQMFKNARKYLA

SEQ ID NO: 167526 - protein, 172 aa, Unknown
  Bacterial polypetide isolated from the Sargasso Sea
MKSHVIVFPGSNCDRDVAVAIKNISGHQPQMIWHKETSINQSDLIVVPGGFSYGDYLRCGAMASTSPIMQDVVKKAKEGVPVLGICNGFQILIESGLLDGALMRNSSLSFICRDILIKPKNQSSVFTKKTQVAKMPIAHNEGNFFVTSEQLKKIQDNDQIAFQYCDENGNIS

SEQ ID NO: 167527 - protein, 99 aa, Unknown
  Bacterial polypetide isolated from the Sargasso Sea
IKKNILELHIAHNEGNYFCSQDELKSIEDNDQIAATYCDQNGKINKENNPNGAIKNIAGIFNKKKNVLGMMPHPERMIDKYLSGEDGSIFFTNLLNNLK

SEQ ID NO: 167528 - protein, 188 aa, Unknown
  Bacterial polypetide isolated from the Sargasso Sea
MKSAVITFPGSNCDRDMDVALKKFGFKNKMIWHTDAELPKIDLVVLPGGFSYGDYLRCGSMASKSKIMQSVINFANSGGMVMGICNGFQILVETGLVPGVLLRNKYLEFICKNVFVKINNKKNKYFKNVENEVLEFHIAHNEGNYFCTNDQLKEIEDNNQIAINYCDEDGKIEDQFNPNGSIKNIAGI

SEQ ID NO: 167529 - protein, 421 aa, Unknown
  Bacterial polypetide isolated from the Sargasso Sea
MTTAPKVGVIQFPGSNTERETVMACHRVGLEPIEFLWNQPHKELTELDGYIIVGGFSYEDRSRSGVIAALEPIMKQIRIEAGKGKPVLGICNGAQILVESGLVPGLKDNRVGLALTDNKRVQKGHVVGVGYYNTWANLKLSSPSKRCAFTRHLKPGEHINIPLAHGEGRFIIPEELLGEMVRNGQTVYRYCNDDGQTIDEFPTNPNGSIYNLAAVCNSPGNVMAIMPHPERTKSGDVIFSSMKDFIEDGNPTTEGSLNFQVSEHHIKNLPQENDTTEWVIDMIITDNEAASVNNALKRLGHDVSITRQTHWEIKTDGDHDHILRMIDDSGELYNSNKEYIGEIISNNKTVSFLVRQKEDMHGRIKYESLTERFEIEGLKKLRRGVVWNLSINSGNINTVVNDILNTNILFNPLSHECYKIN

SEQ ID NO: 167530 - protein, 450 aa, Unknown
  Bacterial polypetide isolated from the Sargasso Sea
EPFGGAATGVGGVIRDILSAGTRPIALFDGLRFGDIETDAHARWLFKNAVSGIADYGNCLGIPTIGGEVEFDTCYTNYALVDVAAVGFGKKSKLIKNHANINDLVLLIGGSTGRDGVGGSQFASDALEGEDRSAVQIPDPFIEKLIIEAILECRDENCINAMKDLGGGGLSCAISETAESLGIGIELDVKNVHLRESDLSPDEIMISESQERMLVISSPDNLSKIEKICDKFRIQCSVIGKVKEDKMMHVKNGNDTLALLPADFVARGPLIDRPKSKPEYLSQLPSSPPSENQLPLSEILLKLLSSPNIASKHWVFRQYDHEVGIRTVIKPGFDSSVLRLDNGKSLSVKIDGNPKHCYIDPRQGAIGCFEEACRNVVCTGATPMGMVDHLQFGNPEDPEIFWTFMESIEGITDFAKFLNVPCVGGKVSFYNETSKGPIKPTPLIGVLGLI

SEQ ID NO: 167531 - protein, 599 aa, Unknown
  Bacterial polypetide isolated from the Sargasso Sea
GYLFSKKLDNRKFKQISRILSNQVSQKILTKDNVVKVLSNYSNFNWVVEINFLPGVTDNLGSTAKEIISDNLKNSFKKFHLGSTKIILIKGNKKNIYNISKKEANPLIQTIKIYPFKKYIDFFKKNRFELQEVKLINKKYIKREVDLNISDHELNMIGKLGIEEKNKSRRGTLGLDIESLKTIRNYFNKIKRKPSDVEIETLAQTWSEHCKHKIFSSKIDNIKEGIFKKYIRGATENIIKLRKDNFCVSLFTDNAGGIEFNKDWIVCHKVETHNTPSALDPFGGAITGIVGVNRDCLGFGKGAKPIANTYAYYLALPNKDYQLFRQKNKKDPMLPASYIANGIISGVRVGGNCSGIPTPQGNIYFDDRFAGKPLVFCGTVGLIPKKIKGKLSHKKKANSGDFILMVGGKVGKDGIHGATFSSEELDPNSPVTAVQIGDPITQKKLSDVIITELRDKDLYTSITDNGAGGLSSSIGEMAKESGGFVVDLEKVPLKYPGLYPWEIWISESQERMTLAVKPKNLKKVIKIFNKRGVDATLIGKFTKEKKAIVKYNNIEVLNLNMDFLHEGYPKLNLKTSLPKNNILRKKQIKNVNLINKLHK

SEQ ID NO: 167532 - protein, 100 aa, Unknown
  Bacterial polypetide isolated from the Sargasso Sea
MNSSVIIFPGSNCDRDMDVALKKFGFKNKMVWHDDDKLPQSDLIVLPGGFSYGDYLRCGSIAGKSKIIQSVIDFANSGGLVLGICNGFQILTETGLLKGV

SEQ ID NO: 167533 - protein, 373 aa, Unknown
  Bacterial polypetide isolated from the Sargasso Sea
MLKNYAGYIILGGFSFEDRSRSGIIASLEPVMQEVKKHSLLGKPVLGICNGAQILVESGLVPGNQSFNTLVSLTDNKRVVGNRIVGTGYYNKWCYIKPNEASLSAFTKKGGKPLRVPIAHAEGRFVFDKDVEKEILNNNLITYQYCDSSGLLSEDFPTNPNGSLFSAAALSNPSGNVMAMMPHPERTLNNEAGDIFSSMKEYIESDKSFSYKALSFESKKIEVKKFEKNKGKTEVLVSTIIADNEADSVEKCINGLGVNAKIKKYVHFEIDGDIDLNSLLATDVLFNPSKEYMTKIDKNCDVDRFLVRNNDDIHGQSITQTLRDRFNFTGLSSVQRSVVWEVKINSGSRKKDVDLILNSHIFANPISQKCHEY

SEQ ID NO: 167534 - protein, 261 aa, Unknown
  Bacterial polypetide isolated from the Sargasso Sea
NIPLAHVKGRFVLPKPLLKEMIDSQQTVYRYCDNDGNVIDEFPTNPNGSEYSLAGVCNPQGNVMAIMPHPERTPNGDAIFSSMLEYVNEGNPRTNHQLSSKKVPLEINDYKNNNNTEWIIDMIINDNEASSVQNALTQKGYDVLLSRQTHWEIEIDENIDEILTKIDTTGELYNSNKEYLSEIKSNENTVSFLIRQKEDIHGRAKYESLTEKFGISEILNIKHGVIWNVIVNSGNFESTINSILETNILFNTLSYECYRIK

SEQ ID NO: 167535 - protein, 322 aa, Unknown
  Bacterial polypetide isolated from the Sargasso Sea
SGLIPGIKNNQTSIAFSDNKRIQDGHVVGTGYYNTWAHLKTSVPPESTAFTRHLEHEEIIYVPFAHAEGRFIIPEDLLKELIKNNQTVFRYCDNDGEIISQFPTNPNGSDYNLAAISNPAGNILAMMPHPERTNLGDKLFSSMREFIKQKISIKNDSLSYSPPNKNIKKYTPEEHVSEWVVDMVITDNEAETVQNALRRIGIDVTIKRQQHWEISTSDNSSATLKKIEDTGELFNSNKEYISSIRSNENTACLLVRQKEDMFCQSKFESIRERFSINELIQLKRGIVWNIKIKNTNFQPVLDKIIDTNILFNPLSHECFRIS

SEQ ID NO: 167536 - protein, 667 aa, Unknown
  Bacterial polypetide isolated from the Sargasso Sea
QDYDRITEKEELPTKDLKKLIFNTIKFPAVASKKFLITIGDRTVNGLVYRDQLIGNRQLPVSDYAATLDDYDSYSGQVVSIGEKPNIAIENPEASTRMALAESITNICGVKHESLSKICFSANWMSSTKTADERGDLLRGVQSLSNMADYLGLSIPVGKDSLSMNTSWNSEGNEHSVTSPMTLNISSFSNVSDLRKSVTPELSTKDSTLLHVWINEGEFRLGGSSLYLSNNLFGGATPDVEDPEKFKQLFEASQDLISKGSIEALHDISDGGLITTLIEMSLCSNSGLDIRLDYSDKESIIPKLFSEEVGYVIEIDNEKLTEVKEDLTKRGLFFDEVGRKNIDKKINILNFDDALFSSTLNKLFDEWSSVSHKVQRIRDNIESAQSEKEVYKKWDEIITPKIDFSIPSPNKNLFSKKPKIALLREQGINGHYDMAAALMEAGFEVHDVHMSELLDKIKNFDLYNGLVVPGGFSYGDVLGAGSGMSNTILFNPKIKKIFKNFLENDKKFALGICNGCQFLSGLKEIVPGADNWPEFKKNLSNQYECRLVQLKIEDSSSIFLEGMKDSIIPVMVSHGEGRADFNLEEENVIARYVDPDHKITQTYPLNPNGSMNGVAGVCNDDGRITIMMPHPERTYLTKQFSWSPKDWEEHSPWFKMFDNAYLFSKKN

SEQ ID NO: 167537 - protein, 1116 aa, Unknown
  Bacterial polypetide isolated from the Sargasso Sea
MMRLITFLEQFTKLNRNPTDAELMMFAQANSEHCRHKVFNADWVIDGVDKERSLFQMIKNTYEASSRNVLSAYKDNAAVIAGHKADWFLPYLDDQKYGRFHDEIHTMMKVETHNHPTAISPYPGAATGSGGEIRDEAATGRGAMPKAGLTGFSVSHLFIPGDLQSWEKTIGKPDHIASALDIMLDGPIGGAAYNNEFGRPNILGYFRTFEEENKEESNTSWGFHKPIMIVGGMGNISDSSVKKNDIDAGSLIIVLGGPAMLIGLGGGSASSLNAGSSDSELDFASVQRDNAELERRAQEVITRCFAMGVQNKEDNANPIILIHDVGAGGLSNAIPEVADHSKMSADINLRDIDNAEPGMSPLEIWCNEAQERYVLSIHPDDLEVFDQVCKRERCPYAVVGEVATHGNLRLKDEVYDNYPIDMPMDVLFGKPPKTKLEITSEQKSIIDDGLKGIDIEEAALKILRFPTVADKTFLIHIGDRTVGGLVSQDQFVGPWQVPVSDVAVTLKDHFGVQGEAMAMGERSPIAVHNAAASGRIAVGEAITNILSAPIGDIADIKLSANWMSSIMTDRLKQDLYETVEAISVDFCSKIGITIPVGKDSLSMQTSWVNEEKQYKNTAPLSLVISAFSPIDDVNNVITPQLKDKSESILLLIDLGQGQNRMGGSCLSQIYNRSLGETPDIENPEVLKKFFNAITKLKSRMLIQAYHDRSDGGLFACVSEMAFAGNMGLDLSLEAANQEELLKLLFSEELGCVIQIQNGDLDDVLDILNEASLSNSIYPIGTVVKDKQISIKNNEFNHSFDLKTLRQAWSKMSYEMQKLRDNPETAEEGFKKILDVNDPGLNPKIKFGPTQIDYKRLTKSSPKVAILRDQGVNSQIEMAVAFNKAGFNAYDIHMTDILNGQVNLDQYIGLVVCGGFSYGDVLGAGGGWAKSVLFNENAQNQFKTFFHREETFSLGICNGCQMMSQLKDLIPGADHWPRFVRNLSEQFEARLNMVEVLESNSIFLNGMEGSMIPIATSHGEGRVQYSNDGDMNALIEASGVTIRYVDNFGQPAINYPDNPNGSESGFAGFCSEDGRSTIMMPHPERVMRTEQFSWCPDDWKDHGPWARFFVNARDWIG

SEQ ID NO: 167538 - protein, 38 aa, Unknown
  Bacterial polypetide isolated from the Sargasso Sea
ITNEKGNVLGLMPHPERACDKTIGGTDGLFTLKSLILK

SEQ ID NO: 167539 - protein, 284 aa, Unknown
  Bacterial polypetide isolated from the Sargasso Sea
MLYKTWGAAGLTSSSVEMASKGKLGIELNLDYVPCREENMSPYEIMLSESQERMLIVLEKGKENDAKKIFDKWNLDFAVIGKTTNSKKIELFFNNKKVVEIPIDLLAENAPIYDRKWKKTKLPQKIKFNKSEFKSLKLSDCLKKILSNSNICDKQWIWDQYDHTVMGDTIQKPGSDAGVVRVHGTIKAVAASVDSSASYCFSHPLTGGKQIVCENWRNLISVGAKPIAITNCLNFGNPEKEKNMGEFVECVEGITEASKYLDFPVVSGNVSFYNETNDKGIKPT

SEQ ID NO: 167540 - protein, 328 aa, Unknown
  Bacterial polypetide isolated from the Sargasso Sea
ILSNPNICNKNGIWEQYDHTVMGDTIQKPGGDAGVVKVHGTNKAVAASVDSSATYCWSHPLTGGKQIVCESWRNLISVGAEPIAITNCLNFGNPENEENMGEFVECVQGLGEASKYLDFPVVSGNVSFYNQTKDKGIKPTPSIGGVGIIKDYQKMITMGFKKDENLVLVIGKTDGHIDQSIFARDFLNEKNGPPPEINLFNEKNNGETVLSLIKKDLVKTVHDISLGGIITAIAKMCIKGKKGIKLKKPKHLINQFEYFFGEDQSRYIVEVEKENLKKVEEILKKNSVHFDEIGEISNDDLTFDDKTKVSIDELYISNNNWLTSYMNK

SEQ ID NO: 167541 - protein, 1093 aa, Unknown
  Bacterial polypetide isolated from the Sargasso Sea
KNIFKTLKRNPTDIELMMFSQINSEHCRHKIFNSIMIDSENKEKTSLFSLIKSTHQNNKSDIISAYKDNCSIVKSYNEEILITKNKKYLNKKESSAYIIKAETHNHPTAISPFEGAATGSGGEIRDEGATGIGSIPKVGFSGYTLSNLSIKGDIKTWEQEEQKKSDRIKSSLEIILDAPIGAASYNNEFGRPNIFGYFRTFEHLISKSASTNEYYGYHKPIMIAGGIGQIRSIHTEKQKLNDGDCIIVLGGSSYLIGLGGGAASSLSSGSSSENLDFASVQRDNPEIERRCQEVINHCIYLGSNNPILSIHDVGAGGLSNAVPEIVNDSNMGAEIYLENVPLAEKSMSPLEIWCNESQERYVLVLKEKDFPTFSKICSRENCPFSKIGYVKKKKQLIVFDKKNKKVINMPMKSLLGKPPIPTVNIDGFEKKYTKNKTKFKSFIESTKMVLELPSVSDKSFLITIGDRSVSGLVARDQLVGQFQTPVANAAATFTSLGSKSGQVMSIGERPSLAISSPEASVEISLGELITNIASCNIGKLSNIKLSANWMASSNDNNELNKLYYAVKKLTDLCKELDIAIPVGKDSLSMNSTWKTNKKNNIVKSPVSLVLSGFSNINNIEDIMTPEIIEHGRIFLIDISNGKNRLGGSAYYQTHNIICSNVPRLDNLDNVKKFFKLIQTLIKNKIISSYHDKSDGGLITTLAEMGFATNCSLVINKNSHLYKNDDSLRSFFFNEELGAIVVVPKSKIDSFSDIVKLMKLDNMIYDLGFTKNQSIPSITINSQKNITIPLHILRKSWSKLSYEIQKIRDNSKLAQDDYKSKINIHKSNIKIKNKIKIQKIKKVFKSRKPSIAILREQGINGHKEMADAFMKAGFNSFDVHTNDKTINYSKFDGLVACGGFSYGDVLGAGRGWAKKILFDDRIRISLEKFFNDTNKFALGVCNGCQMLSQIRDIIPGSESWPEFIQNDSNQFEARLVRVKIKKNNSVFLHKMSGSILPLIVSHGEGKVRYSNKKNKDSAIMNYIDNSNKVTSKYPYNPNGSKNGATAFTNLDGRITIMMPHPERLFYLNQFSYKPSDWMTSPWENFFMSAREWVK

SEQ ID NO: 167542 - protein, 358 aa, Unknown
  Bacterial polypetide isolated from the Sargasso Sea
KKNKDDVLEALDSCQLTEHIYPFGNLNQDRSINLIIGEKIIHQWSLKTLLKQWHKVSYEIQSLRDNPKTAKSEYIYDLNTERKGLKPLISFDIPAKFNIKKTKPSIAILREQGINGQVEMAAAFHRVGFECIDVHMTDLIAGDFHLSNFQGLVACGGFSYGDVLGAGGGWATNILYNDMLREQFKEFFLNEEVFSLGICNGCQTLSLLSSLIPGTDNWPKFKRNISEKFEARLSQVLIKDSPSIFFRDMAGSMIPIPVAHGEGRAEFANKEEGKLVAEKLNPLVYADDTGKLTENYPENPNGSPGGIAGVTNESGLVTIMMPHPERAFLSSQYSWHPKNWGEYGPWIKFFANAKDFVS

SEQ ID NO: 167543 - protein, 869 aa, Unknown
  Bacterial polypetide isolated from the Sargasso Sea
RNKNNFKLQISEDYLVIVLGGPAMLIGLGGGAASSVSSGESDEDLDFASVQRDNAEMERRCQEVINKCSSQDNSYIEFIHDVGAGGLSNAIPELAKDSELGVYIELSKIPNADRSMSPMEIWSNESQERYVLAINKKNQAAFEKICKRERCEYAIVGKTTNEKSVKLYDESNNNFPVNVPLSMLFGDLPITEMTIKHKTINALPDSIAEDFDLKSSIIKTLQHPTVASKSFLITIGDRTVGGMVARDQFIGPFQVPVSDYSLSLRSFTSITGEVLSIGEKPTLAITNPAASMRMALAEALTNMIGVAIKGLNYVQVSANWMAASGQESQDVALRDGVEALSKMSIDLKISIPVGKDSLSMKTRWKDNENELEVISPLSGVITAMAPVEDITLSVTPELNLDEDSTILLVKLNNKNRLAGSIFSEVNECDYKDTPDIDDIDKFKTMFEVIQSMIKNKKILALHDISDGGLITTLLEMSFTKKIGMKLDLNQSNNIYRELFSEEIGFVIQVKKDEENEIKNCLKEKNIYVEQIATLAMDNFLIIKDDKELFNESIKDLEKYWRETSHAIQSIRDNKKIADSELSLLDDKNFSGLFSNEAFDEEELKKINFKAVKPKVAVLREQGVNGQNEMAAAFTIAGFEAIDVHMQDLLEGNVFLEDFNGMAVCGGFSYGDVLGAGGGWSKTILYNENVKDQFEEFFNNQKTFTLGVCNGCQMLSSLKDIIPDADYWPSFERNLSDQFEARLVQVEIKNTNSILLEDMHGWSTPIASAHGEGRAKFLNNDFKEIKKQNQIAMTFVDSNQNPTEKYPLNPNGSADGITGITAANGRVTIMMPHPERVFRKHQMSWYSRDWNEYSPWMKIFINARKYSDSN

SEQ ID NO: 167544 - protein, 761 aa, Unknown
  Bacterial polypetide isolated from the Sargasso Sea
SNADKSMSPMEIWSNESQERYVLAIHKDNKNAFEKICQRERCEYAIVGHTTKEMSVKLYDEQNKNYPVDVPLSMLFGDLPITEMEVKEEFVETFNEDNSEDIDLSDSITKVLQHPTVSSKSFLITIGDRTVSGMVARDQFVGPYQVPVSDYSLSLRSYTSNNGEVLSIGEKPTIALINPSASMRMALGEALTNMSGVVIKGLNNVQVSANWMAASGENSDDFALRSGVEALSKIAVDLKVSIPVGKDSLSMRTKWSENNSDYEVSSPLSGVITAMAPVDDVTESVTPELNTSDDTCILMIKLNNKNRLAGSIFSEITETKYQHTPDIDDIEVFEKLFSGIQNLLKSKKILAMHDISDGGLITTLLEMCFTKKVGMRMDLDDSSGVNEFLFSEEIGFAIQIKKNNLDEVTNTLKNENIYVKNIAEIIDDEQFSIFKNDSELFSKSVIELEKNWRETSHAIQSIRDNKEIANSELSLLDDENFQGLKSNISFDENELKHINIKRTKPKVAILREQGVNGQNEMAAAFTLAGFNAFDVHMQDLLDGNTNLKDFQGMAVCGGFSYGDVLGAGGGWSKTILYNNLVKDQFQEFFSDEKVFTLGVCNGCQMLSNLKDIIPGAEFWPSFERNLSDQFEARLAQVKISKTESVLLDGMEDWMIPVASAHGEGRAQFNNNDLQELEKSNQIAMHFVDSSENSSEIYPINPNGSPNGITGITASNGRVTVMMPHPERVFKKIQLSWHRKDWNEYSPWMQIFINAKKFSDKN

SEQ ID NO: 167545 - protein, 298 aa, Unknown
  Bacterial polypetide isolated from the Sargasso Sea
QSLRDNPVTAEAEFRNDTDINNSGLRPKINFSIPKKIQLNSTRPRVAILREQGVNGQNEMAAAFNEVGFDCIDVHMTDLIAARHTLSEFEGLVACGGFSYGDVLGAGGGWANSILFNEDLRKQFGDFFHNENVFSLGVCNGCQTLSLLKSLIPGATNWPDFKRNKSEKFEARLVQVSVKESPSIFFRDMGDSIITVPVAHGEGRVDASVSDISELNNNHQTTITYSDDKGSFTEDYPANPNGSLNGIAGVTNISGTVTIMMPHPERAFLKDQYSWSPDEWTHYSPWIKFFNNAREFIN

SEQ ID NO: 167546 - protein, 271 aa, Unknown
  Bacterial polypetide isolated from the Sargasso Sea
FPPGHYLWSKEGKITKYYKRDWMEYDNVKDNTSDLDELRVAFEKAVKSHMMSDVPYAVLLSGGLDSSLVSAVAAQYVAKRVEDEDKTDAWWPRLHSFAVGLEGAPDLKAAKKVADMIGTVHHEIHFTIQEGLDAIRDVIFHLETYDTTTIRAATPMYLMTRKIKAMGIKMVLSGEGSDEIFGGYLYFHKAPNAKEFHEETVRKLDRLHMFDCARANKATSAWGVEARVPFLDKNFIDVAMRLNPQDKMCLDGKIEKWILRKAFDNGETLPA

SEQ ID NO: 167547 - protein, 171 aa, Unknown
  Bacterial polypetide isolated from the Sargasso Sea
YDCLRANKSLAAWGIEGRVPFLDKEFIDIAMKINPADKMITNERMEKWVVRKSFEDYLPKQVAWRQKEQFSDGVGYSWIDSLKELVDNEVSDKMFENASERYPFQTPQNKEEYFYRSIFESHFPSQAAAETVPSVPSVACSTPIALEWDKSFKNLNDPSGRSVLNVHKDSY

SEQ ID NO: 167548 - protein, 178 aa, Unknown
  Bacterial polypetide isolated from the Sargasso Sea
MCGIIGIFDIKDKVKCLDQSLKMVPKIRHRGPDWSGSYVDDFCIIKHERLSIVDVENGAQPLYDSINQRVLAVNGEIYNHISLAKRLKKKHEWKTSSDCEVLLYLYDEFGPDFLNDLDGIFAFILYDPKTKEYFVARDHIGIIPLYIGWDDSKQVYLASEMKAIESYCSKIMEFPRGN

SEQ ID NO: 167549 - protein, 176 aa, Unknown
  Bacterial polypetide isolated from the Sargasso Sea
MCGITCAFDLKEDSSVMRPQLLEMSKKLRHRGPDWSGIYSDNNAILSHERLAIVDPASGKQPLYGQNDDVVLAVNGEIYNHLTLKEEFEGNYNFRTESDCEVILALYEKYGFDFINKLNGIFAFALYDIKNKEYLIARDHIGIVPLYMGWDKKGTFYIASELKALEGFCSKIEIFP

SEQ ID NO: 167550 - protein, 262 aa, Unknown
  Bacterial polypetide isolated from the Sargasso Sea
MCGFIGYISNKSDLNNQKYENKFNKYLIKLNNRGPDYQEKKKIFNFEKILNLGFSRLAIQDLSKTSNKIFSNNKKILLFNGEIYNFLELKKKFFYNEKFETNTDTELLFKLFDKFGPDKISECKGIFSIVFFDLNNSEIYLLRDPTGTKPLYYIRNNQFFAFSSEAWFPYSLSEKKINNDTLNFFLNFGFTSVSETLIDNVKKIVPRKIYKYNFLNDNFEIKEYFNIAKSKNSIIPDQNNLNLKIEKSIESNLISDAKIGTF

SEQ ID NO: 167551 - protein, 202 aa, Unknown
  Bacterial polypetide isolated from the Sargasso Sea
MCGIAGIVNSNKDSGELENIGSLMIKQLHHRGPDGSGIKIISKKDKRNILLAHTRLSIIDLSERGSQPMSNISGDIWITFNGEIYNYAEIRKDLSIEGYKFRTDSDTEVIIHAYKHWGMDCFKRFIGMWAIAIWDHERERFILSRDRLGIKPLYYSFDGELLMFGSEPKVILEQDPTKRKLNLNALSDYLSYRYVLDGSSFF

SEQ ID NO: 167552 - protein, 144 aa, Unknown
  Bacterial polypetide isolated from the Sargasso Sea
MCGIVCAFNIKSNSDAVRSNVLKMAKKVRHRGPDWSGVYSNQNAVLAHERLAIVDPTSGKQPIISEDGCKVIAVNGEIYNHIQLKEKYTKDYNFKTESDCEVILALYEKKGINFLNDLNGIFAFALYDSSDDKYIIARDHIGII

SEQ ID NO: 167553 - protein, 324 aa, Unknown
  Bacterial polypetide isolated from the Sargasso Sea
TVLDNMVSALIHRGPDSSGYYKEESYNAGMRRLSINGIESGNQPLYNQNKNVVLLYNGEIYNSLELRKDLQKKGYKFKTNSDGEVICHLFDEYQEECFDKLDGMFAIAMWIVDQRKLFLARDLAGEKPLYYSCLSHNEIAFSSELKSLKLFPKISKELNYKAIWDFPTFLWIPEPDTIYKNIHAVMPGELLIIDEKEILSRQIINTFETQLDEDSDEYLIYQTKKIVEQSVKRRLLSDVPIGSFLSGGLDSSIVSSIAAKNLDTLDTFTIGFENVIDPYHGMADESTAARSFADKLNTNHHEIKITSQDFNDMLDSFCKFGDQP

SEQ ID NO: 167554 - protein, 240 aa, Unknown
  Bacterial polypetide isolated from the Sargasso Sea
SLETYDVTTIRAATPMYLMARVIKSMGIKMVLSGEGADEIFGGYLYFHKAPNSEEFHEETIRKLKDLHLYDCLRANKSMAAWGVEARVPFLDKEFLEVAMKIDPKIKMINHKKIEKLILREAFEDYLPEKILYRQKEQFSDGVGYDWIDTLKTVAEERVTDDQFKNSSLIFTLNTPLSKEEYYYRKIFNEFFPSNSAALTVPSKPSVACSSETALKWDKSFDNLNDPSGRAVSTVHENSN

SEQ ID NO: 167555 - protein, 297 aa, Unknown
  Bacterial polypetide isolated from the Sargasso Sea
MCGIVGSINIKWSKDPLLSIINRGPDYQDFINIKNVFLGHTRLSIQDLSSLGNQPMQSSDGRFTLVYNGEIYNHWQIRENLIKKGYTFNSTSDTETLMYSWVEWGQDAINYFNGIFAFAIHDMKENKLFIVRDQFGVKPLYIYNKGGEIAFSSEIKAFINIKDFDSTLNFESIVNYLTFLWSPGPRTMYKYVNKLIPGQIIEIDTKTLATKQNRVPPSKLFNGEYWDLSESEWIKKIDDKLNVAVEKQLLSDAPLGYFLSGGLDSSLLVAIAKTQRPNNGLECFTIDQFKDSSGDGF

SEQ ID NO: 167556 - protein, 273 aa, Unknown
  Bacterial polypetide isolated from the Sargasso Sea
MCGIGGIVSTNNSKIDQNIANNMKVSLEHRGPDHSSINYISDSQCFIHSRLSIIDLDSRSNQPYQDEEKRYTIVFNGEIYNFKEIRTELENKGINFLTEGDTEVLLKGYIEYKAEILEKLRGQFAFAIHDVMTNSIFLARDRIGIKPLYFAKSEDWFVFSSELKTIEQSNLIPFEPDIESYIAYLRHLCVPMNRTGNLNISKVQPGEYIEFFTDNSIKSHQYWDPFVIEVDNDISEDEAIKNIDRLLTESVEYRKVSDVEVGLFLSGGLDSSL

SEQ ID NO: 167557 - protein, 281 aa, Unknown
  Bacterial polypetide isolated from the Sargasso Sea
LENYEWVKSKIEYLKHRGPDNKKIWSSETNNIIFGHTKLSIIDLSKENIQPMRDELNNITLTYNGEIYNYLDLRKELSKNHEFNTNSDTEVIIKSYLEWGEKFLNKIQGMFAFALFDEKREIVLLARDRLGEKPLFYYSNNDQFLFSSELSAFFSLSNINKRNLNETLLNGFPINREETLLSNVNQVEPGTFVKLDLKNRDIFKKKFWDINFNISSEKFVNQEKFDKILNSNIEKCLISDVRTCVTLSGGLDSSLIVAVASGQKKIDTFSIVFKNKQFDER

SEQ ID NO: 167558 - protein, 247 aa, Unknown
  Bacterial polypetide isolated from the Sargasso Sea
MRDVIYHLETYDITTVRASTPMYLMARAIKSLGIKMVLSGEGADELFGGYLYFHKAPSAEEFHNETVRKLNKLHQYDCLRANKALAAWGIEGRVPFLDKEFIEVAMNINPKDKMINKDRIEKWVIRKAFEEYLPDEVLWRQKEQFSDGVGYSWIDSLKDLVAKEITDEQMESASKKYPINPPQNKEEYYYRRIFEEHFPSDAAAKSVPSVPSVACSSPEALKWDESFQNQNDPSGRAISNVHKKSYE

SEQ ID NO: 167559 - protein, 293 aa, Unknown
  Bacterial polypetide isolated from the Sargasso Sea
LSHRGPDFKDIINFKTKKSECYLGFNRLAIIDLNSNANKIFYNDQYAFLFNGEIYNIENLKKKYLIKYKFETKTDTEILFRLLINFGSKIIKELEGMFAFTFINKLDGTMLLCRDYTGIKPLYYFHNNYGFFFSSEAWFLYSLSNKELNYSACKFYFNHGFSPEDSTLIKNVNKVLPGSIVTYNFKNNSKQTEYFFRLSKSKTVNKFKNTKNLIKDVIKKNLITDTKVGIFLSGGLDSSILAVTAKNLGFEVEAYTSYFLPEDKFTKFNVDYKYADILSKKFNFKLNKVGIDE

SEQ ID NO: 167560 - protein, 293 aa, Unknown
  Bacterial polypetide isolated from the Sargasso Sea
MKYNKVVAYNGEIYNFKELRKKLINNGYDFSSDSDCEVLIAGWDFWGKKFLNLIDGMFAFAIWDYNLKTLTLARDPYGKKPLLYYIKDKKICFSSDLKSLEKIIDNFDINKKAIESLFRFRFIHEPLTIYKQVNKLPPGHILEFKCNNNNIEKWYNLPLRNNLNYNRSEIRKNIVGLFDKAVAKRLYADVPLGVLLSGGLDSSLIVASLAEQGRSVSTYTMGFENASSYYEERPEAKKLSDYYGMKHFDLEISSNKLLNIVPEVFDANDEPFADSSALPFFALSKEVSKNVTV

SEQ ID NO: 167561 - protein, 146 aa, Unknown
  Bacterial polypetide isolated from the Sargasso Sea
MCSIFGILDIKSDAAALRKSALEMSKRLRHRGPDWSGVYSSDKAILVHERLAIVDPGNGAQPLYNPERTHVLAVNGEIYNHKELEKNLKVDFQFQTHSDCEVLLALYKEKGPAFLDDLNGIFAFILYDAEQDAYLIGRDHMGIIPL

SEQ ID NO: 167562 - protein, 269 aa, Unknown
  Bacterial polypetide isolated from the Sargasso Sea
STVVENVKRSLEHRGPDHSSHQFIKESVCLIHTRLSIIDLNDRSNQPFQSNDERYTIVFNGEIYNYKELRKELETKGHKFITNGDTEVLLQGYIEYEEKILNKLRGQFAFVIYDKITNELFMARDRIGIKPLYYSVNDNWILFGSEIKAIELSKLIEFEPDIDSYLAYLRHLCVPADSTGNKNIKKLEPGQFIRIDKNGKISKKIYWDPFTFSVNHDLNEKNVVEELDRLLNESVEYRKVSDVEVGLFLSGGLDSSLLGKLMKQNSDSS

SEQ ID NO: 167563 - protein, 290 aa, Unknown
  Bacterial polypetide isolated from the Sargasso Sea
YNHREIRKKLKNKYQFKTNSDCEVILALYKEKGKNFLDIMNGIFAFAIYDTIEDKYFIARDHVGIIPLYIGWDNRGTFYVSSELKSLESICEKIELFPPGHYLSSDEEGFKNWYSRDWESFDKVKNNSTDIDELEKALSSAVHRQLMSDVPYGVLLSGGLDSSITSALAKKFASKRVESNDTKGAWWPQLHSFSVGLKGSPDLVAARKVADHIGTIHHEIKFTIQEGLDALSDVIYHLETYDVTTVRASTPMYLMARAIKSLGIKMVLSGEGADELFGGYLYFHKAPGCK

SEQ ID NO: 167564 - protein, 187 aa, Unknown
  Bacterial polypetide isolated from the Sargasso Sea
MCGIVCAFDINSNSDEVRSNVLRMAKKVRHRGPDWSGIYSNEKAVLAHERLAIVDPTSGKQPIISDDGNKVIAVNGEIYNHIDLRERHTPDYNFKTESDCEVILALYQKKGIDFLNDLNGIFAFALYDSSNDKYLIARDHMGIIPLYIGWDKQNIFYVSSELKSLEGVCNKIEMFPPGHYLDSSDGK

SEQ ID NO: 167565 - protein, 295 aa, Unknown
  Bacterial polypetide isolated from the Sargasso Sea
LECLEELDIGGPDWSGIYSSSNAILAHERLGIVDPTSGKQPLYSNDNKLVLAANGEIYNHRSLRKYIGDKYDFSTGSDCEVILALYKLKGKNFIDDLNGMFAFALYDQEKDSYLIARDHMGIIPLYMGWDDKDTFYVASELKALEGFCKKIELFPPGCYLCSKDAEVKKWYHRSWKDYNIVKYKKTEIRAIRESLSNAVRRQLMSDVPYGVLLSGGLDSSITSAVAKIYADKRIESDGKNEAWWPTLHSFAVGLEGSPDLIAANKVAKHIGTVHHEVKFTIQEGLDAIKDVIYHL

SEQ ID NO: 167566 - protein, 291 aa, Unknown
  Bacterial polypetide isolated from the Sargasso Sea
EAGLGLAHRRLAVIDPTPEGRQPTVSRCERYVLVFNGEIYNFRELARQLATEGHPVDTSSDTVVLREAIAFWGIRKTTESLVGMFAFAVFDRKTRTLSLVRDRVGIKPVYWTHQNGAFVFGSEIKALLASERIEAKRDPSALAAYLQFAYIPAPATIYHNIQKLPPGTILALRKDQEPELETYWDIAQIARTGQGNPASLADPEVGVQLERLLAQAVTDRMISDVPLGAWLSGGLDSSLVVALMQANSTRKVRTFSIGFPAFGYDEADDARQIAAQMGTDHEEFQVSPQDA

SEQ ID NO: 167567 - protein, 192 aa, Unknown
  Bacterial polypetide isolated from the Sargasso Sea
MCSIFGVLDIKSDPAQLRTQAIEMSKLLRHRGPDWSGVYASEKAILVHERLAIVGVSSGAQPLYNPEKTHILAVNGEIYNHKELAANLNTDFTFQTQSDCEVILALYKQKGPEFLDDLNGIFAFCLYDEENDAYLIGRDHIGIIPLYTGHDEHGNFYVASELKALSPICKHIEEFPPGHYLYSKDGELKPVL

SEQ ID NO: 167568 - protein, 294 aa, Unknown
  Bacterial polypetide isolated from the Sargasso Sea
MCGIACVFDFNRDLNSQRPFVLEMSKKLRHRGPDWNGIYTSKNAILAHERLAIVDPTSGKQPLYGSEGELVLAANGEIYNHLELRKQFKNNYDFLTSSDCEIILALYQRKGVNFLDELNGIFGFAIYDNKKNEFFIARDHIGIIPLYIGWDSNETLYVASELKALEGICEKIESFPPGHYWHSSNPKPVKWYKRDWIDFQNVKKNKTSITELHDALASAVHRQLMSDVPYGVLLSGGLDSSITSALAKKFAPKRIESNDKQAAWWPQLHSFSVGLEGSPDLLASRKVADHIGTI

SEQ ID NO: 167569 - protein, 299 aa, Unknown
  Bacterial polypetide isolated from the Sargasso Sea
EISDQPMTINNVTLICNGEIYNYRELFELMGVEPETGSDCEIIIHLYKKYGIKETLSLIDGVFAFVLYDYSDYRDPARVYVARDPLGVRPLYVLSASGPRFEDRDLDSVKITYDNIYCFTSELKPLQSLMNVHGPIYYDSFRPNSLTRAQGCPPPLSTRGLLVAKQYPPGTYSLFSLSHGAHRTWTPTAMAIPYASLNVSSSSLRTESETVGRSAYEIAVWDTLNEAVRKRTVGTTERGIACCLSGGLDSSLIAALVSKYYDGDLETYSIGMEGSDDLKYAKVVATHLGSKHTEIILSE

SEQ ID NO: 167570 - protein, 249 aa, Unknown
  Bacterial polypetide isolated from the Sargasso Sea
DKKITIIFKRLSIIDLTKKSNQPMFSKNRRYVIVFNGEIYNYLEIKNILLQKGVKFKSKGDTEVLLNAYIFWGEKFVNHLRGMFSFCIWDRKYSKMVAYRDRFGQKPLYYYKTKTGIIISSEIKDITQIVKVSTNEKVITKYILRNIMDNDKNTFYKNLYRVEPSHKLEYSKKKIILKKYFSLKYSEEKNFNKEEFLEVFQDCVNSHLNADVKVAFLLSGGLDSTSLASIASINKRDIKTFSVIPKHTY

SEQ ID NO: 167571 - protein, 290 aa, Unknown
  Bacterial polypetide isolated from the Sargasso Sea
ENLMMFNGEIYNYKELKQILLRKGITFNSKNSDTEVLLEGLSIFGLDFVKNIIGQFAIVFYDIKNKNIHLIRDRVGQKPLFFNLSDRSLVFGSNLISVADLLGEKQINDKEIGNFFNYGVIKSPNTIYKNIYKLKPGEIISFNLEKNLQPQNHIYWSPIDEIDEKKFIDNEFYELFSSSVNYRLESDVPVANFLSGGLDSSSIIKNLSDNKKNINTFSAIYSDKKYDESFWIGSVKEKYQTNHIEEKLDLELDFNTLLDVINIFDEPYCDPSIVPSYMLSRLISKKYKVA

SEQ ID NO: 167572 - protein, 253 aa, Unknown
  Bacterial polypetide isolated from the Sargasso Sea
MCGIFTTYNASSQWDSIEQSFQKISYRGPDSSEHLHINNKLTMAFHRLAIMGISDSGNQPMKHPKDNSLTLICNGEIYNYKKLADDYGFKLTTGSDSEIILHLFKEIGIEGTVKALDGVFMFVLYDEINDILYAGRDPIGVRPGFISLNGDEVFISSEAKSLIKIAKDIVPFPPGSWWSSKDNKKFNKYFHCKPDGETDDSHIDILQNIKSLLTDAVIKRLMSEREIGCLLSGGLDSSLISSIVAKNYPGDKL

SEQ ID NO: 167573 - protein, 268 aa, Unknown
  Bacterial polypetide isolated from the Sargasso Sea
MTDCIAHRGPDDSGYFKDENVSFGFRRLSIIDVTHGHQPMTSIDNRYIIVFNGEIYNFKKIKNELIESGYVFETNCDTEVIIYSFDLWGKECVNRFNGMFAFVIYDKELNNIFIARDRLGIKPFYYTFVNNNFIFGSEIKSILACKEFKREADLKAISSYLTFRYTFSDRTFFKDIKKLLPGHHITIEKNVFLIEKYWEIPFIDEKDDQGEKFYLDKVRSLLEKAVERRLISDVPLGALLSGGLDSSIIVAFMSKLSGTKVNSYSIGF

SEQ ID NO: 167574 - protein, 285 aa, Unknown
  Bacterial polypetide isolated from the Sargasso Sea
FNKDALLLFNGEIYNQKILREKYLNLEQFSTSTDTEVLFKLLLKKGTKIVNEISGIFSFVFFDLKRNTLECVRDFTGTKPLYYLIQNNNFFFSSEAWFLYSLTEKKINKKSLNFFLNFGFTPEENTLIDEVKKIKPRNIFKLDYEKFKSEKRDYFIINENKNSEFVSREELNNTLENVIKSNLITDTKIGTFLSGGLDSSTVTAIAKKYNNKIEGFTTVFLPEKKYEKFNQDYIYAKKLSNELNIKLNVNFIDNISSTLDDFYEITNYLDEPISNLNFLNTYWQS

SEQ ID NO: 167575 - protein, 181 aa, Unknown
  Bacterial polypetide isolated from the Sargasso Sea
MCGITGFWLNKSYHFDSNEVLEGMMDAISHRGPDSNGSYISNEDNLCFGHVRLSILDLSSAGHQPMQSHSKRYVLTYNGEIYNHKEIRKILESGLIQKKWIGTSDTETLLAAIECWGLNEAILKCRGMFAFALWDKQEKKLFFVRDRIGEKPLYFLQDEDKIVFASEIKAIRKFSNEKLLI

SEQ ID NO: 167576 - protein, 326 aa, Unknown
  Bacterial polypetide isolated from the Sargasso Sea
MCGICGKVNFNESPPLPMDELNYMCEKIAHRGPDGTKKMIREKIAFGHTRLSIIDLESGWQPISNNKENIFTIFNGEIYNYQALRDMLIKLGYKFKTQSDTETIVHLYEEYGEDFIQYIDGMFAIALWDEKKEKLLLYRDRFGKKPLFYYFDNNELYFSSEIKSFPKKIIHSTKINIKAVFEYLNLGYIPNSMSIYEKIHKLEPAHYLVFEKNNIKVIRYWNFDPKINNSLKSEEIQETVTNLLDKSVKSRLISDVPLGFFLSGGLDSSAIVATASKFTNKINTYSIGFEDKSYNELSYAHMVSKKFHTNHEEFIVTPNIINDIEK

SEQ ID NO: 167577 - protein, 427 aa, Unknown
  Bacterial polypetide isolated from the Sargasso Sea
MCGINGVIFKTSKTDVSKILKMNALLDHRGPDDSGYINHKNLLLGHTRLSIIDTSNLGSQPMSVDGRYWIIYNGEIYNYKSLREELILKKYKFYSNSDTEVVLNAYKEWGVDSFQKFNGEWSFAILDKKHNEVIICRDGIGYKPCYIYDNNNFFAFSSEIKAFYALENTIDFDNNNLGINFTTLNNCSKTIFKNINQLTQGRYLKVNLNNLEKKLVRWDYPLNNLPKINSGFRENVHDYFDLLYESTKLRLNSDVKTGTSLSGGLDSSAIFTLMNLIQKKEKFAEDDLDLNPIIMNYQEMKTKEDAVQLSKKFQRNYQVVDFENVTADKTMDLVSSLEVVEEYFIQYELYKKQKEKGIKVSLDGHGSDEFLGYPNWIPELSVDIYNSIANNFKTINKFGKTQNINKFKRLFGLGEQEITSISFKSVP

SEQ ID NO: 167578 - protein, 529 aa, Unknown
  Bacterial polypetide isolated from the Sargasso Sea
MCGIFSYNGKKYNWSQLNKEFDKISYRGPDNSHYEDISGNVLFGFHRLAIMGISDSGNQPMSHPEDESLTLICNGEIYNYLDIAKKYHFDLKTGSDSEIILHLYKKIGIEKTINELDGVFMFVLYDAKSDLILASRDPMGVRPGFIGKKEGEVFIASEAKAIMQFCDEVIPFPPGTWWSSKNIDQHNRYFNYNSEKINESSEKLICDKINKLLIDAVKKRLMSERDIGCLLSGGLDSSLITSIVSKYQYENQLNTFSIGMQGSIDLEYSETVANYLNTKHHQIEISENEFLEAIETVIYNIESYDTTTVRASVGNYLVSKYIKENTDCKVIFNGDGSDEVCCGYVYLKNSPSENELQKESKRLVKELHYFDVLRSDRSISSNGLEARTPFLDKAFVKYYLSIPAELKEFDGVQRLEKHLLRKAFDNKDFLPKNVLWRRKCAFSDGVSSKNNSWHKIIQNHIDKIITDKEFNELKDTYDHCPPQLKESYYYRKVFDSFFPNQHKLIPHFWMPKWTNVTDPSARELEEYSE

SEQ ID NO: 167579 - protein, 297 aa, Unknown
  Bacterial polypetide isolated from the Sargasso Sea
MCGINGIIFKTSKTDVSKILKMNALLDHRGPDDSGFINHKNLLLGHTRLSIIDTSNLGSQPMSVDGRYWIIYNGEIYNYKTLREELILKKYKFFSNSDTEVVLNAYKEWGVDSFQKFNGEWSFAILDKKNDEIIVCRDGIGYKPCYIFDNNNFFALSSEIKAFYALENKIEFDNNNLGINSTTLNNCSKTIFRNVNQLTQGRYLKINLNNLEKKFFRWDYPLKNLPKINSGFRENVNDYFDLLYESTKLRLNSDVKTGTSLSGGLDSSSIFTLMNLIQKKENLVEDDLDLNPNYNGL

SEQ ID NO: 167580 - protein, 613 aa, Unknown
  Bacterial polypetide isolated from the Sargasso Sea
MCGIGGIINTNNSKIDPNIIENIKDSLEHRGPDNSSIKYISESNCFVHTRLSIIDLNDRSNQPFQSSDGRYTLVFNGEIYNFKEIRKDLESIGISFNTEGDTEVLLKGFIEHGEGILEKLRGQFAFAIYDEGEESVFLARDRVGIKPLYFSTYKDWFVFGSEIKAIEKSGVVPFEPDIDSYVTYLRHLCVPSDRTGNKNILKLQPGEYAIYSPKNGILKKKYWNPFNFEVNNDINEKEAISEVDRLLTESVEYRKVSDVEVGLFLSGGIDSSLIGKLMKENETAGLKGFNIDYEDHFAGYEGEAAEAEFASSNIDIELIKENIKYSDFQDLLNNYSFYQDDLIGDEVGIPLYFLGKSTRSNGMKVVQVGEGADELFYGYDHWLRFIKLNKYIKTINQSRSNFLSFKNHRINLVSNILFNRTSFSGGAIGFNLSEVDSLIDGGLSNEFQLINYVDNKWDEYFTKKNANLSKWMTLIDLNIRLPELLLMRMDKLVMQSGVEARVPFLDHKLVEYVLTIPEEILVNTSSTKPLLKKVARSHIPDQIIDRKKQGFRAPIGEWIKKDEDYFYESIKEFNSLVNLFSERELKKVLQGNDFQKKWYLVNLSRWHMTRVAN

SEQ ID NO: 167581 - protein, 289 aa, Unknown
  Bacterial polypetide isolated from the Sargasso Sea
MCGFLGSITFKEISNVNFEKYNKRIECRGPDEKVVICNKNFVNPDIYHNYTFNRLSIIDLSKNASQPMQSDEFNSLIMFNGEIYNHRELRAFLEQKGVMFKSSHSDTEALLLGLSAMGMDFLKKLNGQFAIFFHDINKNEYYLIRDRVGQKPLYFAKNSEGFYFGSDLISVKSLSNNHKFNEDQIKNFINFGTSITPNSFFSNVFSVSPGEFIKISLMNNNFEINKYSYWDLPSFLDDKEFIEEEFIDIFENSVEKRLESDVPVSNFLSGGLDSSAVIKALNKKKKKIN

SEQ ID NO: 167582 - protein, 335 aa, Unknown
  Bacterial polypetide isolated from the Sargasso Sea
MCGIVAINSTVGSSFPVQLMLSSMKHRGPDDSGTFISDQHDCHFGHLRLSIIDLSPAGHQPMSDSSNRYYITFNGEIYNYLDLIKYLEKLYGRIKWKSASDTEVLIEGFAREGIPFLDKLNGIFSLSIYDTEKRNMYVLRDPLGIKPLFIYKNNSSVLFCSELKGLLSLPDLKKNIRIQSLADQLAFMYVPEPHTMYKEIQKVDPGVCFTYHMGNLVNSTSLFSRLNKPISFSSEAEILESFYNNFSSAVRKQLISDVPVSVMLSGGLDSSAVVYEIINAGAKVQDAYTISISSKDSNYDKQSDDLYYAKIIAQQMGLNLNIIEANADFTSLLPN

SEQ ID NO: 167583 - protein, 585 aa, Unknown
  Bacterial polypetide isolated from the Sargasso Sea
MCGIAGYINKKNLEMDNSFISNAINSIKHRGPDEDGFYTNDKVCLINTRLSIIDLSNGKQPFINDDSSVVVVQNGEIYNYLEIKDFLIKNHHTEFKTNSDTEVILKAYEILGDKCFSHFNGMFSIAIFDARKNNVLLARDRLGVKPLYICKLSDRILFSSEIKTFLSAQDFTNDINNQSIHNYLKFNYIPLPETIFSAVSHVMPGTSIKIDLNDFTFTTKKYWEIKNTKENEISEEDLFRKMDEVLNDAIKIRLRSDVEIGAFLSGGLDSSLVSAMTKKNFNKSLNTFSIGFPEKEFDESHWAKKVADLYDLNNKKHVLDSEIVSLWEKVTWYNDQPHGDVSFIPTFVLSEFASKDYKVVFTGDGGDEFCAGYTKYFGIFENSFKQYFHHISLIKDDDEFRNLYKDNFLNSIDIDRPLEIFNEAIEEVSNKDDINKILYFDVKHLLPGNNLVKPDKMAMANSLETRSPMLDYRFLELMQSIPGSLKLTEQETKYTLKKFALKYLPNDIVYRSKQMFTVPIGEWFKTKLKNYLKKIVLSDSLDERNIFDRTYLEKMVDSHIAGSKDFTRELRAITNLEIWFREFLD

SEQ ID NO: 167584 - protein, 342 aa, Unknown
  Bacterial polypetide isolated from the Sargasso Sea
LKALEGRCEKIEIFPPGHFMTSKDCKLKKWYVRDWMNYDSVQNNETNIETLKKSLENSVYRQLMSDVPYGVLLSGGLDSSITSALAKKFSKKRIESKNTEDAWYPQLHSFSVGLKGSPDLIAAKLVADKIGSIHHEINFTIQEGLDAIKDVIYHIETYDVTTVRASTPMYLMARVIKSMGIKMVLSGEGADEIFGGYLYFHKAPNPKEFHKETVRKIDKLYQYDCLRANKSLAAWGIEGRVPFLDKEFIDVAMRINPKDKMITNDRMEKWVLRKAFESYLPNEVAWRQKEQFSDGVGYSWIDSLKELVNSEVSDDEFKNADKRFPFQTPMNKEEYYYRSIFE

SEQ ID NO: 167585 - protein, 326 aa, Unknown
  Bacterial polypetide isolated from the Sargasso Sea
SQDGKKIIAVNGEIYNHQILRESFLNSYNLKTQSDCEVIIPLYESKGVNFLNDLNGIFAFALYDSSKGTYIIARDHMGIIPLYMGWDKKNIFYVSSELKSLEGVCDKIELFPPGHFLESHDMKLKEWYKPEWTSFDSVKNAKTSISSIHDSLSDAVKRQLMSDVPYGVLLSGGLDSSITSALAKKFASKRIESGDKQDAWWPQLHSFSVGLKGAPDLKAAKIVADHIGTVHHEINFTVQEGIDAIRDVIYHLETYDVTTVRASTPMYLMARAIKSLGIKMVLSGEGADELFGGYLYFHKAPNSKEFHEETVRKLEKLHQYDCLRAN

SEQ ID NO: 167586 - protein, 230 aa, Unknown
  Bacterial polypetide isolated from the Sargasso Sea
RDLIWHLETYDTTTIRASTPMYLLSRKIKAYGIKMVLSGEGADEILGGYLYFHNAPGNEEFHKECVDRVKNLHHFDCLRANKSTMAWGVEARVPFLDQEFIETAIAVHPELKLKDSVEKWILREAFNDENEPYLPKDILWRQKEQFSDGVGYSWIDGLKEMTENAITDEDFEENKDALGVKSKEELYYKRIYNELFPENIGIKRWVPRTDWDGVGYDPSGRAQGVHENKY

SEQ ID NO: 167587 - protein, 276 aa, Unknown
  Bacterial polypetide isolated from the Sargasso Sea
SELKALEGYCNKIEIFPPGKYFSSKKGNLERWYERSWSLHTSTDNENKIADKLRTSLEKAVYQQLMTDVPYGVLLSGGLDSSIIAAITKKYSNKRIETNDSSEAWWPRLHSFSVGLQGSPDLKAAKKVSQHIDSIHHEVIFTIQEGLDAIEDVIYSLETYDVTTVRAATPMYLMARVIKSMGIKMVLSGEGADEIFGGYLYFHKAPNAIEFHNETIRKLKKLHLYDCLRANKAMAAWGVEARVPFLDKEFIDIAMGIDPKNKMIGPDKMEKSILRK

SEQ ID NO: 167588 - protein, 175 aa, Unknown
  Bacterial polypetide isolated from the Sargasso Sea
LHQYDCLRANKSLAAWGIEGRVPFLDKEFIDVAMGINPEDKMIKNGRIEKWVLREAFKDYLPESVLWRQKEQFSDGVGYSWIDSLKELVSKEVSNSDFENASKIFPINPPQNKEEFYYRSIFKDHFPSDAAAKSVPSVPSVACSTPQALEWDEAFKNMNDPSGRSVSNIHNESYE

SEQ ID NO: 167589 - protein, 237 aa, Unknown
  Bacterial polypetide isolated from the Sargasso Sea
MPRERGVRVAASEPSHVAPERAVPELRWCTHPVLLHAMRLTAVAPRDSFDTPEAPFLPAEVLWRQKEQFSDGVGYSWIDGLKAHAEQVVSDLELETAKSRFPYNTPTTKEVRAALAREAPRGPAVLAASAFGAEPPGDPHWQGAYFRTIFHSHFPNNQYGNGIEKTVPGGPSVACSTAKAIEWDAAFSNPNNQDQSGRMVDVHDDATVDASVDKADDASFEKVEVDQEADQESVAAA

SEQ ID NO: 167590 - protein, 298 aa, Unknown
  Bacterial polypetide isolated from the Sargasso Sea
QQALQLSKLLRHRGPDWSGVWNNDNAILVHERLAIVDTENGAQPLINPNRNHILAVNGEIYNHKNLEKNLTVDYQFQTKSDCEVILPLYLQHGADFIDQLQGMFAFILYDAEQNRYLIARDHIGIIPLYYGYDEHGQLYVASELKALVPVCKQMQEFPPGHYFDSKVGKLVKYYQRDWQSFDAVKDNPADLGELRAALEQSVKSHLMSDVPYGVLLSGGLDSSLISAITQQFARNRVEDDGQSEAWWPRLHSFAVGLKGSPDLAAARKVADAIGTVHHEVLFTVQEGLDSLRDVIYFL

SEQ ID NO: 167591 - protein, 284 aa, Unknown
  Bacterial polypetide isolated from the Sargasso Sea
MCGIFSVLRLTGDARKNRQRVYQLAKRLRHRGPDSYGMEVRVDDEGRQTFMVHKRLSIVAPGKSGDQPLFTDASKKTAFIANGEIYNHAELREKYGIVSENKSDCQVIGHLYEQHGPSFVSELDGMFAFVIEDRENDVIVAARDHMGKIPMYMANGKDGSVWFSSEMKTLHDDPGVANYEAFPPGYVYVKKGDAPATMERWYNPQWVADENYVPTKEANLPELRECIVDAVTKRLMADVPYAVLLSGGLDSSLITSIAVRQRKLAKNTYGADELGALFLRSVSE

SEQ ID NO: 167592 - protein, 241 aa, Unknown
  Bacterial polypetide isolated from the Sargasso Sea
MCGIVCAFDIKGDQEVVRASVLKMAQRVRHRGPDWSGIYSDDNAILAHERLAIVDPTSGKQPIISQDGKKIIAVNGEIYNHQILRESFHNSYNFKTQSDCEVIIPLYESKGVDFLNDLNGIFAFALYDSSKDTYLIARDHIGIIPLYMGWDKKNIFYVSSELKSLEGVCDKIELFPPGHFLESHDMKLKEWYKPKWTSFDSVKNAKTSISLIHDSLSDAVKRQLMSDVPYGVLLSGGLDSS

SEQ ID NO: 167593 - protein, 296 aa, Unknown
  Bacterial polypetide isolated from the Sargasso Sea
MCGIVFYKVNKKKNLSLFKEKLLKSSKLIRHRGPDWSGNSIYKGKENNILISHERLSIIDPIGGSQPIIYQKNNGHKIILAVNGEIYNYKELKIDEHKYLTSSDCEVIISQYLNCGDDYNLLLDSLDGQFAFVLYDTEKELLLSGRDPIGIASLYYGLDNENNLMISSEMKALYLCENVFTFPNGNYLLLDNKDYNLETIKNNFISYYSKNSFGRWLINSSIPDNLISIKENQEQKFYDLVKNTLIKSVEKRLMSDVPFGVLLSGGLDSSLITSITVKLIKENKTKLNWGDKIHSF

SEQ ID NO: 167594 - protein, 286 aa, Unknown
  Bacterial polypetide isolated from the Sargasso Sea
INDLTEAGMQPFIDDKSMLMCNGEIYNHKIFRYGFEKGTSDCEILLPMVNDLGMMKTMDMINGDFAIVWTNGKRIMAARDPVGVRPLFYTRYDKDSIAFASEVKALRFLQSKIEIFPPGHIFDSYLNDFVCYHTGYWHVNKYVDTYNDKLKESFIQCVHERLATTEREIGFLLSGGLDSSLIASIAAKKIGKINTFSIGLKGSPDLEAARKVAKYLNSNHTEVTFTTEEGISHVNDVIYSLESYDTTTVRASTPMWLLCKYIKEHTNCRYIFSGEGSDELLGGYLY

SEQ ID NO: 167595 - protein, 275 aa, Unknown
  Bacterial polypetide isolated from the Sargasso Sea
FSILDIQSDAKELRQVALEMSKLMRHRGPDWSGIYASDKAILAHERLAIVDIEHGAQPLLTEDGSLILAVNGEIYNHKELKAQLGDKYSYQTNSDCEVILALYQEYGTEFLDKLNGIFAFVLYDKAKDAYLIGRDHMGIIPLYTGRDAAGNFYVASEMKALMLVCKTVAEFQPGQYLYSSIGEPVQYYTRDWQSFDAVKDNGASQEELRDALEAAVKRQLMSDVPYGVLLSGGLDSSVISAITQTFAKRRIEDDDQSGAWWPPATLFCCRLKGAP

SEQ ID NO: 167596 - protein, 278 aa, Unknown
  Bacterial polypetide isolated from the Sargasso Sea
SVYLAHERLSIIDPLKGSQPIIYENDARRIVLCVNGEIYNYKQLREECSEYSYKTNSDCEVIIALYMKYVDSNIESNNHLNMVDFNTVLNKLDGQFSFCLYDNKWDVLLIGRDPIGITSLYYGFDENNNLMVCSEMKGLHLCKTVNTFNNGCYSCITSSNLNTNIFQSFGSLQATGMLSFVNYYGLSREGSWQNKSMLNNNIINKLNFKTESEYEELIYRQIRQVFTKAVKKRLMTDVPFGVLLSGGLDSSLVSSITVKLIKEGEVDLKWGNKIHSFS

SEQ ID NO: 167597 - protein, 283 aa, Unknown
  Bacterial polypetide isolated from the Sargasso Sea
SDNAILAHERLSIVDVNAGAQPLYNVKKTHILAVNGEIYNHQALRAEYGDRYQFQTGSDCEVILALYQEKGPEFLDDLQGMFAFALYDSEQDAYLIGRDHIGIIPLYMGYDEHGNFYVASEMKALVPVCRTIKEFPAGSYLWSKDGEIRQYYQRDWFEYDAVKDNVTDKNELRQALEDAVKSHLMSDVPYGVLLSGGLDSSVISAITKKYAARRVEDQERSEAWWPQLHSFAVGLEGAPDLKAAQEVANHLGTVHHEIHFTVQEGLDAIRDVIYHIETYDVTT

SEQ ID NO: 167598 - protein, 358 aa, Unknown
  Bacterial polypetide isolated from the Sargasso Sea
MCGIAGIFDFSDNDINPEIANRIGASLEHRGPDYSEVQFIKNNVVFIHTRLAIIDLDQRSNQPFKSDDKRFTIVFNGEIYNYREIRKELEALGVNFRTEGDTEVLLYGYIEFGEQILHKLRGQFAFAIFDSFENSVFLARDRIGIKPLYYSLNDEFIIFSSELKTIEQSGIINFEANVDSYLAYLRHLCIPGDQTGNKNIFKLEPGQYTVINKNGDIYKKTYWDPFKYEINNDISEHEAIKKVEELLIKSVEYRKVSDVEVGLFLSGGLDSSLIGKLMNEGNDSKIKSFNIDYEEHFEGYKGEVQEARFAASEIGVELVEDTISYSDFKQLLDNYSFYQDDLVGDEVGIPLYFLGRSS

SEQ ID NO: 167599 - protein, 337 aa, Unknown
  Bacterial polypetide isolated from the Sargasso Sea
MCSIFGVLDIQTDVKALRQQALQLSKLLRHRGPDWSGVWNNDHAILVHERLAIVDTENGAQPLINPNRNHILAVNGEIYNHKNLEKNLTVDYQFQTKSDCEVILPLYLQHDVDFIDQLQGMFAFILYDAEQNRYLIARDHIGIIPLYYGYDEHGQLYVASELKALVPVCKQMQEFPPGHYFDSKVGKLVQYYQRDWQSFDAVKDNPADLGELRAALEQSVKSHLMSDVPYGVLLSGGLDSSLISAITQQFARNRVEDDGQSEAWWPRLHSFAVGLQGSPDLVAARKVADSIGTVHHEVLFTVQEGLDSLRDVIYFLETYDVTTIRASTPMYLMARKI

SEQ ID NO: 167600 - protein, 297 aa, Unknown
  Bacterial polypetide isolated from the Sargasso Sea
MCGIVCAFNIKDNKELIRSNVLKMAQKVRHRGPDWSGIYSNDNAVLAHERLAIVDPTSGKQPLISQDGKKIVAVNGEIYNHQILRQNSLKDYSYKTQSDCEVIIPLYELKGVNFLNDLNGIFAFALYDSSTNTYLIARDHMGIIPLYMGWDDKNVFYISSELKSLEGVCDKIELFPPGHYLCSNDMELKKWYKPDWTSFNNVKNAETNISKIHDSLSDAVKRQLMSDVPYGVLLSGGLDSSITSALAKKFASKRIETGDKQDAWWPQLHSFSVGLKGAPDLKAAKIVADHIGTVHHE

SEQ ID NO: 167601 - protein, 309 aa, Unknown
  Bacterial polypetide isolated from the Sargasso Sea
MCGIVCAFNIKSNSDVVRSSVLKMAKKVRHRGPDWSGIYSDNNAILAHERLAIVDPTSGKQPIISDDGNKVIAVNGEIYNHKDLKEKYTSDYNFKTESDCEVILALYEKKGINFLNDLNGIFAFALYDSSKNKYIVARDHMGIIPLYIGWDKENIFYVSSELKSLEGVCKKIELFPPGHYLDSKTDELTKWYDPKWKLYDNVKDSETKIKEIHDSLSAAVKRQLMSDVPYGVLLSGGLDSSITSALAKKFASKRIESDDKQEAWWPQLHSFSVGLKGAPDLKAAKIVADHIGTVHHEINFTVQEGNRCH

SEQ ID NO: 167602 - protein, 613 aa, Unknown
  Bacterial polypetide isolated from the Sargasso Sea
MCGIGGIVSTNNSKIDQNIANDMKVSLEHRGPDHSSINYISDSECFIHSRLSIIDLDSRSNQPYQDDDKRYTIVFNGEIYNFKEIRAELQSKGVKFSTEGDTEVLLKGYIEYKSEILKKLRGQFAFAIHDAKTSSIFLARDRIGIKPLYFARNDDWFIFSSELKTIEQSNLIPFEPDIESYIAYLRHLCVPMNRTGNLNISKVQPGEYIEFFSDNSIKSNQYWDPFDIEVNNDISEEEAIENIDRLLNESVEYRKVSDVEVGLFLSGGLDSSLIGKLMKQNEKAGLKGFNIDFKDHFPGYEGELNEAKFAASNNDIDLIEENISYQEFQELLDNYSFYQDDLVGDEVGIPLYFLGKKTNNSKIKVVQVGEGADELFYGYDHWNRYLKLNKFFKPFFKSTKKYSSFKNHRLNMLSNILFNRTSFAGGALGFNLKELDSLIEDGLPNHSDLIFYADNKWKDYFSNKNSKISKWMTLIDLKIRLPELLLMRMDKLVMQSAVEARVPFLDHKLVEYVLSLPEELLIDLTNTKSLLKKVALKYLPDQIINRKKQGFRAPIGEWIKKDEEKFYESVQQFNSLVNLFNERELNHILNGNDYQKKWYLINLSNWHLARVAN

SEQ ID NO: 167603 - protein, 613 aa, Unknown
  Bacterial polypetide isolated from the Sargasso Sea
MCGIGGIVSTNNSKIDQNIANNMKVSLEHRGPDHSSINYISDSQCFIHSRLSIIDLDSRSNQPYQDEEKRYTIVFNGEIYNFKEIRTELESKGIKFSTEGDTEVLLKGYIEYKAEILEKLRGQFAFAIHDAMTNSIFLARDRIGIKPLYFAKSEDWFIFSSELKTIEQSNLIPFEPDIESYIAYLRHLCVPMNRTGNLNISKVQPGEYIEFFSDNSIKSNQYWDPFVIEVNNDISEDEAIKNIDRLLTESVEYRKVSDVEVGLFLSGGLDSSLIGKLMKQNEKAGLKGFNIDFEDHFPGYEGELNEAKFAASNNDIDLIEENISYKEFQDLLNNYSFYQDDLVGDEVGIPLYFLGKKTRSKNIKVVQVGEGADELFYGYDHWNRFLNLNRYLKPLFKSTKKYSSFKNHRLNLLSNIFFNRTSFAGGALGFNLKELDSLIVNGLPNDSDLIYYADNKWSEYFSNKGSKISKWMTLIDLKIRLPELLLMRMDKLVMQSAVEARVPFLDHKLVEYVLSLPEDILIDLSNTKSLLKKVASKYLPKQIINRKKQGFRAPIGEWIKKDEEKFHESVQQFNSLVNLFNERELNQILSGKDYQKKWYLINLSNWHLARVAN

SEQ ID NO: 167604 - protein, 40 aa, Unknown
  Bacterial polypetide isolated from the Sargasso Sea
EFIKSPAFSFQGHPEASPGPQEIQILFKKFSTMIEEYAKT

SEQ ID NO: 167605 - protein, 204 aa, Unknown
  Bacterial polypetide isolated from the Sargasso Sea
MNKKQKVNSKKFSHLSSGVLVLENKKIFKGIGIGYQGTATGEVCFNTSLTGYQEIISDPSYAGQIINFTFPHIGNVGTNKEDHESDKIWTKGVIFNTEITNPSNYRSLKKLDSWLKKNKIVGITGLDTRSLTNFIRDKGAPKGTISNNNKGIFNLKKLTNSSIKWPGLNGLDLAKIVTTKKKYLWKGFKTWKKEKGLKKTKRKN

SEQ ID NO: 167606 - protein, 99 aa, Unknown
  Bacterial polypetide isolated from the Sargasso Sea
NFQLKFGHRGGNQPVQDLRTMKVYITAQNHGYAVDPETLPPELKVSHVNLNDGTVAGLIHQHLPVFTIQYHSEAAPGPLDNMYLFDQFVEAVRQAKENS

SEQ ID NO: 167607 - protein, 195 aa, Unknown
  Bacterial polypetide isolated from the Sargasso Sea
MDKQPKQAVLLLADGREFYGNSFGYHGETTGEVCFNTGMSGYQEILTDPSYCKQIVTMTSPHIGNYGVNKDDIESKNIQVAGFVIKEESEIPSNWRSELSIGEYLDQQKIVGIKNIDTRALTRHIRDNGAMNGIISSIDHDIKSLKLKLDKIPSMNGLDLAKLVTTNESYEWSNNNGLYKVAAIDYGIKLNILRL

SEQ ID NO: 167608 - protein, 96 aa, Unknown
  Bacterial polypetide isolated from the Sargasso Sea
MKEKHKYKIAIKPKFPSAILILDNKTIFRGIGLGHKGEATGEVCFNTSLTGYQEIISDPSYAGQIINFTFPHIGNVGTNNEDIESDKIWTRGVIFI

SEQ ID NO: 167609 - protein, 120 aa, Unknown
  Bacterial polypetide isolated from the Sargasso Sea
MIKKVKKAHSKNSQKNTGILILENKKIFRGIGIGYQGEATGEVCFNTSLTGYQEIISDPSYAGQIINFTFPHIGNVGTNKEDFESDKIWTKGVIFNSEITSPSNYRSFQHLDTWLKKNKI

SEQ ID NO: 167610 - protein, 87 aa, Unknown
  Bacterial polypetide isolated from the Sargasso Sea
NHPVQSLADGTVMVTSQNHGFTVSDEQLPDTLKVTHRSLFDGTLQGIARIDVPAYSFQGHPEASPGPNDAETLFRPFIKAMQQRWAV

SEQ ID NO: 167611 - protein, 171 aa, Unknown
  Bacterial polypetide isolated from the Sargasso Sea
MRQVINRKKNNSHNFSTGILVFEDGTSFSGDGIGYEGNAVGEVCFNTSITGYQEIITDPSYSDQIINFTFPHIGNVGTNPEDNEADKAWVKGVIFNSNVTEPSNYRSIKKLDKWLKKRKIVGIVGLDTRVITNYIRDKGAPKGAIRFSTKGKHDLKELLDKCKSWEWSSGS

SEQ ID NO: 167612 - protein, 60 aa, Unknown
  Bacterial polypetide isolated from the Sargasso Sea
MPKNIKITHLSLFDKSLQGIEFTDTPAFSFQGHPEASPGPQEIQVLFKKFSLMVKEYAKT

SEQ ID NO: 167613 - protein, 238 aa, Unknown
  Bacterial polypetide isolated from the Sargasso Sea
PGRGFIPGADVSGVNDPPSFPDAADALLDSSSPDPPSGADGLLLLADGTRYRGRLFGAPVIAEGELVFTTGMTGYQESLTDPSFAGQILTFTWPLLGNYGVHSGASESAGVWPRGVVCRQLMEVPDHRDSIGSVHDLLFAHGVPGIQEIDTRELTRRVREHGTVLCIFGPAEAEREMLVRLDEMTPPDAEDLVAEVTCDEAVIINPGAVDNEGKPLPRLAAIDCGVKHNILRELALTL

SEQ ID NO: 167614 - protein, 134 aa, Unknown
  Bacterial polypetide isolated from the Sargasso Sea
NLGGTVQRAKDQQFEIGFYDLQPTGEGHKIFQNQKTFFQWHKEGFKVPNVCDVLAYGETFPQQAFKYKNAIGIQFHPEVNLKMHLRWLYYAGYMLREKGAQKRKYQMHQRLSHGKKINMWLDSFLDNYFLMDKS

SEQ ID NO: 167615 - protein, 118 aa, Unknown
  Bacterial polypetide isolated from the Sargasso Sea
MIKKQKNKIAINHPFSTGILVLDNKLVFKGIGLGYQGTSTGEVCFNTSLTGYQEIISDPSYAGQIINFTFPHIGNVGTNNEDLESDKIWTKGVIFNSEITSPSNYRALHTLDEWLKKN

SEQ ID NO: 167616 - protein, 85 aa, Unknown
  Bacterial polypetide isolated from the Sargasso Sea
MQPEECNAALVLQDGSVFWGYGAGLSDQDFKDTVGEVCFNTSCTGYQEILTDPSYCDQIITFTSSHIGNVGTNNQDMKLKSLVSE

SEQ ID NO: 167617 - protein, 141 aa, Unknown
  Bacterial polypetide isolated from the Sargasso Sea
MRQVLDRRKKNSNNFSTGILVFEDGTNFLGNGIGYEGSAVGEVCFNTSITGYQEIITDPSYSDQIINFTFPHIGNVGTNPEDNEADKAWVKGVVLNCNITEPSNYRSIKKLDKWLKKRKIVGVANLDTRIITNYIRDKRCS

SEQ ID NO: 167618 - protein, 122 aa, Unknown
  Bacterial polypetide isolated from the Sargasso Sea
MKEKHKNKIAIKSIFSSAILILENKTIFKGIGLGYRGEATGEVCFNTSLTGYQEIISDPSYAGQIINFTFPHIGNVGTNNEDIESDKIWTRGVIFNSEVTNPSNYRSLKHLDEWLKKNKIVG

SEQ ID NO: 167619 - protein, 155 aa, Unknown
  Bacterial polypetide isolated from the Sargasso Sea
MLVKTNLTHQIKDNLKKINPTGILVLEDGSFFEGHGFGFESTTTGEVCFNTSITGYQEIISDPSYAGQIINFTFPHIGNVGTNNDDHESDKIWTRGVIFNSEISNPSNYRALKHLDIWLKKNKIVGITGLDTRSLTNFIRDKGAPKGTISYSKKR

SEQ ID NO: 167620 - protein, 63 aa, Unknown
  Bacterial polypetide isolated from the Sargasso Sea
LPRNIEITHKSLFDECIEGIRLRNKPVFSVQYHPESNPGPQDSVYLFQEFIKMIKKNAKKKRY

SEQ ID NO: 167621 - protein, 132 aa, Unknown
  Bacterial polypetide isolated from the Sargasso Sea
MIKKAKKTNSKKSQNHTGVLVLENKRIFKGVGIGYQGKATGEICFNTSLTGYQEIISDPSYAGQIINFTFPHIGNVGTNKEDIESDKIWTRGVIFNSEITSPSNYRAFLHLNSWLKKNKIVGITGLDTRCLT

SEQ ID NO: 167622 - protein, 125 aa, Unknown
  Bacterial polypetide isolated from the Sargasso Sea
MTLKRKNKTSHLLNFNTAILVLENKSVFKGIGLGHVGEATGEVCFNTSLTGYQEIISDPSYAGQIINFTFPHIGNVGANKEDIESDKIWTRGVIFNSEITSPSNYRSLQNLDKWLKKNKIVGITG

SEQ ID NO: 167623 - protein, 200 aa, Unknown
  Bacterial polypetide isolated from the Sargasso Sea
MIKKAKKNSSKISQTHTGILVLENKKVFKGIGIGFEGVATGEVCFNTSLTGYQEIISDPSYAGQIINFTFPHIGNVGTNHEDHESDKIWTRGVIFNSEITNPSNYRSFLHLDYWLKKNKIIGITGLDTRNLTNFIRDKGAPKGTICYSNKGKFSINKLTNTTIKWGGLKNLDLAEVVSTRKNYIWKGLKTWKKETGFEKN

SEQ ID NO: 167624 - protein, 49 aa, Unknown
  Bacterial polypetide isolated from the Sargasso Sea
FDNCVEGIRSKTGPFFGVQFHPEASPGPQDSFYLFNDFINLVKQNAKKN

SEQ ID NO: 167625 - protein, 137 aa, Unknown
  Bacterial polypetide isolated from the Sargasso Sea
MSNKKRKKGLVLLADGTIFYGRSAGIDGTALGEICFNTGVTGYQEIFTDPSYFGQIMVTTTSHIGNYGIKMSESQSNEIFISGLICKSFSSVNSRSNSKSLREWFKSNKLVTLCDVDTRALVRYIRDNGAMNAAITN

SEQ ID NO: 167626 - protein, 79 aa, Unknown
  Bacterial polypetide isolated from the Sargasso Sea
VEITSQNHGFVVVEETLPKKIEVTHKSLFDNTIEGIRLKNKPIFSVQYHPESNPGPQDSVYLFQEFINNMKKNAKKKRY

SEQ ID NO: 167627 - protein, 46 aa, Unknown
  Bacterial polypetide isolated from the Sargasso Sea
EGIKLKNKPVFSVQYHPESNPGPQDSHYLFSDFIKDVKKYAKKKRY

SEQ ID NO: 167628 - protein, 231 aa, Unknown
  Bacterial polypetide isolated from the Sargasso Sea
MSYKKRKKGIVLLADGTIFYGKSVGVKGTVIGEICFNTGVTGYQEIFTDPSYYGQIMVTTTSHIGNYGIKENESQSENIYISGLICKNFSYVNSRVSSRSVDSWFNKQKLIAISDVDTRALVRYIRENGAMNAAITTDIDNLDELRKKLINSPEMEGLELASKVSTKKAYFLGNAKAKYRLAVLDLGVKKNILSNFINRDFYIKVFPYNTEFSELLKFKPNGFFLSNGPGD

SEQ ID NO: 167629 - protein, 202 aa, Unknown
  Bacterial polypetide isolated from the Sargasso Sea
MIKKAKKNSSKISQTHTGILVLENKKVFKGIGIGYEGVATGEVCFNTSLTGYQEIISDPSYAGQIINFTFPHIGNVGTNHEDHESDKIWTKGVIFNSEITNPSNYRSFLHLDYWLKKNKIIGITGLDTRNLTSFIRDKGAPKGTICYSNKGKFSINKLTNTTIKWSGLKNLDLAEVVSTRKNYVWKGLKTWKKEFGFEKNKK

SEQ ID NO: 167630 - protein, 98 aa, Unknown
  Bacterial polypetide isolated from the Sargasso Sea
SRRSPPPAPSSLLPAIYVVSAAVSSEKPWKKSDCRLVLEDGSVWPGQSFGASGTVLGEVVFNTSLSGYQEILTDPSYAGQFVLFTCPEIGNVGINLED

SEQ ID NO: 167631 - protein, 133 aa, Unknown
  Bacterial polypetide isolated from the Sargasso Sea
MVPLAATAREVPPPADHVDADGPYVFTTATGLEAQWVCNDHVVRRTLPARRAGTVIAPECGYAHPLTVVPAQTAAAARLPATPRIVALSDIHGQYDLLVRLLHAHRVIDAADRWSLGDATLVVAGDVFDRGPQ

SEQ ID NO: 167632 - protein, 133 aa, Unknown
  Bacterial polypetide isolated from the Sargasso Sea
MNKKQKVNSTNFSNLSSGVLVLENKTIFKGIGIGYQGTATGEVCFNTSLTGYQEIISDPSYAGQIINFTFPHIGNVGTNKEDHESDKIWTKGVIFNTEITNPSNYRSLKKLDTWLKKNKIIGITGLDTRSLTN

SEQ ID NO: 167633 - protein, 139 aa, Unknown
  Bacterial polypetide isolated from the Sargasso Sea
MTTKRKKKNSIKPQFSSAILVLENRSIFKGIGLGYQGNATGEICFNTSLTGYQEIISDPSYAGQIINFTFPHIGNVGTNNEDLESDKIWTRGVIFNSEITNPSNYRSLKNLDEWLKKNKIVGITGLDTRSLTNFIRDKG

SEQ ID NO: 167634 - protein, 119 aa, Unknown
  Bacterial polypetide isolated from the Sargasso Sea
INTGILVLENKKVFKGIGIGYQGEATGEVCFNTSLTGYQEIISDPSYAGQIINFTFPHIGNVGTNKEDHESDKIWARGVIFNSEITSPSNYRSFLHLDAWLKKNKIVGITGLDTRSLTN

SEQ ID NO: 167635 - protein, 141 aa, Unknown
  Bacterial polypetide isolated from the Sargasso Sea
MKEKHKNKIAIKSKFPSAILILDNKRIFRGIGLGYQGEATGEVCFNTSLTGYQEIISDPSYAGQIINFTFPHIGNVGANNEDIESDKIWTRGVIFNSEITNPSNYRSLKHLDEWLKKNKIVGITGLDTRSLTNFIRDKGLQ

SEQ ID NO: 167636 - protein, 151 aa, Unknown
  Bacterial polypetide isolated from the Sargasso Sea
MNEKQKNKIAIKHQFPTGILVLDNRLIFRGIGLGYQGTSTGEVCFNTSLTGYQEIISDPSYAGQIINFTFPHIGNVGTNYEDFESDKVWTKGVIFNSEITSPSNYRALKTLDGWLKKNKIVGLTGLDTRSLTNFIRDKGAPKGTISNSKNG

SEQ ID NO: 167637 - protein, 96 aa, Unknown
  Bacterial polypetide isolated from the Sargasso Sea
MSYNDLIKKNNYSAVLILKNGDIFYGYGFGAQGFRVGELCFNTSMSGYQEIITDPSYNGQIINFTFPHIGNVGTNTVDNEANKSFASGIITREPPP

SEQ ID NO: 167638 - protein, 72 aa, Unknown
  Bacterial polypetide isolated from the Sargasso Sea
MGFEIIKESLPKNVEITHKSLFDDCIEGIRLKNKPVFSVQYHPESNPGPQDSVYLFQEFINNIKKNAKKKRS

SEQ ID NO: 167639 - protein, 220 aa, Unknown
  Bacterial polypetide isolated from the Sargasso Sea
MGKSKLNQSYIEILKKNNLTAILILETGEVFHGSGYGKPGIKLGEVCFNTSLTGYQEIITDPSYNGQIINFTFPHIGNIGTNQEDNEANKSYASGIITREPPTGSSNWRSNKDLNDWLFEKNITGISGLDTRQLTKIIKDKNAPMGLICYNLNKRFNIDSLKQKLLSHPKIKGSNLVPVVSSNKSFNWNKSTSWPQNINYNKNRIFHILAYDFGIKYNIL

SEQ ID NO: 167640 - protein, 119 aa, Unknown
  Bacterial polypetide isolated from the Sargasso Sea
MIKNSKKINSKNIHQINTGVLVLENKKIFKGIGVGYQGEATGEVCFNTSLTGYQEIISDPSYAGQIINFTFPHIGNVGTNKEDIESDKIWTKGVIFNSEITDPSNYRSFLHLDAWLKKN

SEQ ID NO: 167641 - protein, 116 aa, Unknown
  Bacterial polypetide isolated from the Sargasso Sea
MIRKVKKNFLKNSKKNTAILVLENKKIFRGIGIGFQGIATGEVCFNTSFTGYQEIISDPSYAGQIINFTFPHIGNVGTNKEDFESDKIWTRGVIFNSEITSPSNYRSFQHLDIWLK

SEQ ID NO: 167642 - protein, 51 aa, Unknown
  Bacterial polypetide isolated from the Sargasso Sea
FDGSIEGIRLKNKPVFSVQYHPESNPGPQDSVYLFQEFIHNIKRNAKKKRY

SEQ ID NO: 167643 - protein, 271 aa, Unknown
  Bacterial polypetide isolated from the Sargasso Sea
YLEKNDIPGIYDLDTRAITRKLRDSGVMMGILTISDDIDECIEKINKSPRYGEFDVVSQVTTKNIYNWELPKSDFNKRSFIDLVSRTKKTTKKYNIVLFDYGVKFNILRSLHARNCNITVVPKNASLNDVNNLNPDGIVLSPGPGNPEFLDDSIEVIRSLSGSKPILGICLGHQLLGRAFGAKTFKLPFGHRGGNQPIRELSTGKVYVTAQNHGYALESENLSSDVKVSHININDNTVAGLVSDKFKILSIQYHSEASPGPHDSEYIFDKF

SEQ ID NO: 167644 - protein, 111 aa, Unknown
  Bacterial polypetide isolated from the Sargasso Sea
HQILALALDCKTYKLKCGHHGGNHPVMDYQTNKIEITSHNHGFSVDEDSLSEDVRVTHRNLNDQTVEGLESLQYPAYSVQYHPEAAPGPRDARYLFKRFVEMMGNTKRRSS

SEQ ID NO: 167645 - protein, 92 aa, Unknown
  Bacterial polypetide isolated from the Sargasso Sea
MQPEKCNAALVLQDGSVFWGFGAGLSGQDYKDTVGEVCFNTSYTGYQEILTDPSYCDQIVTFTSSHIGNVGTNNQDTETKQPSVRGCIIAND

SEQ ID NO: 167646 - protein, 61 aa, Unknown
  Bacterial polypetide isolated from the Sargasso Sea
MKKNVSSNKPTACLALADGTLFFGKGFGSTGETTAELCFNTSITGYQEILTDPSYARQIIT

SEQ ID NO: 167647 - protein, 254 aa, Unknown
  Bacterial polypetide isolated from the Sargasso Sea
MRQALKRKEDKSYNFSTGILVFEDGTKFFGNGLGYEGNAIGEVCFNTSITGYQEIITDPSYSDQIINFTFPHIGNVGTNIHDNEADKAWVKGVILNCNVTEPSNYRSIKKLDIWLKKRKIVGIYGLDTRIITNYIRDIGAPKGTIQFLKKGNHNFKDLLNKARSWNGLEGLDLAKKVTCNKPYKWKSLKTWDKNKGYTKNKKNKYKIIAIDYGIKKNQLRCFSDIDCSVTVVPANFSAEKIIKLKPDGVFLSNG

SEQ ID NO: 167648 - protein, 51 aa, Unknown
  Bacterial polypetide isolated from the Sargasso Sea
DDTIQGIKFKKKPFFSFQGHPEASPGPQDMAYIFLNFINNMKKYKCQKEKI

SEQ ID NO: 167649 - protein, 183 aa, Unknown
  Bacterial polypetide isolated from the Sargasso Sea
MNKKQKVNSKNFSHLSSGVLVLENKTIFKGIGIGYQGTATGEVCFNTSLTGYQEIISDPSYAGQIINFTFPHIGNVGTNQEDHESDKIWTKGVIFNTEITNPSNYRSLKKLDVWLKKNKIVGITGLDTRSLTNFIRDKGAPKGTISNNNKGTFNLKKLTNSSIKWPGLNGLDLAKIVTTKKKY

SEQ ID NO: 167650 - protein, 134 aa, Unknown
  Bacterial polypetide isolated from the Sargasso Sea
MRQVRNKKNKSHNFSTGILVFEDGTKFFGTGIGHEGSAVGEVCFNTSITGYQEIITDPSYSDQIINFTFPHIGNVGTNIEDNEADKTWAKGVILNSNITEPSNYRSIKKLDKWLKKRKVIGIVGLDTRVITNYI

SEQ ID NO: 167651 - protein, 254 aa, Unknown
  Bacterial polypetide isolated from the Sargasso Sea
MNKKQKVNSKKKSNFSPGILVLENKSIFNGIGIGYEGTATGEVCFNTSITGYQEIISDPSYAGQIINFTFPHIGNVGTNKQDNESEKVWTRGVIFNSEITNPSNYRSLIELDLWLRKNKIVGLIGLDTRSLTNLIRDKGAPRGTISHKKKGVFPVKKLINKTLKWPGLNGLDLAKTVSTKNKFTWQGLQTWTKKDGFKKIKKKKFRIVAIDYGIKTNILRYFSNFYCDVVVVPCDASAEYIMTLKPSGNFFVKR

SEQ ID NO: 167652 - protein, 56 aa, Unknown
  Bacterial polypetide isolated from the Sargasso Sea
TYKSLFDNSIEGIKLKNKPVFSVQYHPESNPGPQDSVYLFQEFINNMKKNAKKKRY

SEQ ID NO: 167653 - protein, 144 aa, Unknown
  Bacterial polypetide isolated from the Sargasso Sea
MIKKAKKTNSKKISDKQTGILVLENRKVFKGIGIGYQGTATGEVCFNTSLTGYQEIISDPSYAGQIINFTFPHIGNVGTNNEDHESDKIWTKGVIFNSEITSPSNYRSFLHLDAWLKKNKIVGITGLDTRNLTNFIRDKGHQKA

SEQ ID NO: 167654 - protein, 111 aa, Unknown
  Bacterial polypetide isolated from the Sargasso Sea
MIKKVKKAHLKNSQKNTGILVLENKKIFRGIGIGHQGEATGEVCFNTSLTGYQEIISDPSYAGQIINFTFPHIGNVGTNQEDFESDKIWTKGVIFNSEITSPSNYRSFQHL

SEQ ID NO: 167655 - protein, 41 aa, Unknown
  Bacterial polypetide isolated from the Sargasso Sea
MINPYKKNAKLVLSNGIVFPGFFFGASGTAIGEIVFNTGMT

SEQ ID NO: 167656 - protein, 123 aa, Unknown
  Bacterial polypetide isolated from the Sargasso Sea
MRQIRNKKKNNSHNFSTGILVFEDGTRFFGKGIGYEGSAVGEVCFNTSITGYQEIITDPSYSDQIINFTFPHIGNVGTNPEDNEADKAWAKGIILNSNITEPSNYRSIKKLDVWLKKEKLLVL

SEQ ID NO: 167657 - protein, 244 aa, Unknown
  Bacterial polypetide isolated from the Sargasso Sea
MNKKQKLNSANFSHLSSGILVLENKTIFKGIGIGYQGTATGEVCFNTSLTGYQEIISDPSYAGQIINFTFPHIGNVGTNREDHESDKIWAKGVIFNTEITNPSNYRSLKKLDSWLKKNKIVGITGLDTRSLTNFIRDKGAPKGTISNNNKGIFNLRKLTNSSIKWPGLNGLDLAKIVTTKKKYLWKGFKTWKKEKGFEKNKKKKYKIIAIDYGIKKNILRYFSNFNCEVIVVPCSHEAEEIIKL

SEQ ID NO: 167658 - protein, 38 aa, Unknown
  Bacterial polypetide isolated from the Sargasso Sea
PVFSVQYHPESNPGPQDSVYLFEEFINNMKKNAKKKRY

SEQ ID NO: 167659 - protein, 224 aa, Unknown
  Bacterial polypetide isolated from the Sargasso Sea
MIVHQPRSSTGDVGLKLRDRGYELDVRRPVIGEKLPDSMNDHDVAVIYGGPPSANDNLDYIKLEIDWITVALESKKPLLGICLGAQMLTKNLGGTVQRAKDQQFEIGFYDLQPTGDGHKIFQNQKTFFQWHKEGFKVPKECDVLAYGETFPQQAFKYKNAVGIQFHPEVNLKMHLRWLYYAGYMLREKGAQKRQYQMHQRLSHGKKINMWLDSFLDNYFLIDKS

SEQ ID NO: 167660 - protein, 165 aa, Unknown
  Bacterial polypetide isolated from the Sargasso Sea
MKEKHKNKIAIKSKYPTAILVLENKTVLKGIGLGYNGEATGEICFNTSLTGYQEIISDPSYAGQIINFTFPHIGNVGTNNEDIESDIIWTRGVIFNSEITNPSNYRSLKHLDDWLKKNKIVGITGLDTRSLTNFIRDKGAPKGTISNNKSGKFNIKKLIKKTTIL

SEQ ID NO: 167661 - protein, 151 aa, Unknown
  Bacterial polypetide isolated from the Sargasso Sea
MTLKRKNKSSHLSNFNTAILVLENKSVFKGIGLGYKGEATGEVCFNTSLTGYQEIISDPSYAGQIINFTFPHIGNVGTNKEDVESDKIWTRGVIFNSEITSPSNYRSLQNLDKWLKKNKIVGITGLDTRSLTNFIRDKGAPKETYQTTKWK

SEQ ID NO: 167662 - protein, 191 aa, Unknown
  Bacterial polypetide isolated from the Sargasso Sea
MNNGHYFFGKGFGYHGNFLGEICFNTSITGYQEILTDPSYFKQIITFTFPHIGIVGSNKVDVESSKIFASACIINNELTPSSNFRSEKDFESWLKINKKACITGIDTRSLTKIIRDKGACNALIHFPKNRLKKIEYLKKELKNFPSMKNTDLASEVSTKYIYKWDKNKKIPLNFENIKGKFIAVLDYGIKN

SEQ ID NO: 167663 - protein, 184 aa, Unknown
  Bacterial polypetide isolated from the Sargasso Sea
MKEKHKNKIAIKSKFPSAILVLDNKTIFKGTGLGYQGEATGEVCFNTSLTGYQEIISDPSYAGQIINFTFPHIGNVGTNNEDVESDKIWTRGVIFNSEITNPSNYRSLKHLNEWLKKNKIVGITGLDTRSLTNFIRDKGAPKGTISNNKSGKFNIKKLVKKTISWPGLNGMDLAEEVSTKKNYT

SEQ ID NO: 167664 - protein, 222 aa, Unknown
  Bacterial polypetide isolated from the Sargasso Sea
MTYKKRKKGLVLLADGTIFYGRSSGINGTSFGEICFNTGVTGYQEIFTDPSYFGQIMVTTTSHIGNYGIKMSESQSNKIYISGLICKNFSAINSRSNSESIKKWFESNKLVTLCDVDTRALVRYIRDNGAMNAAITTEVDKISDIKKKLSNFPSMNGLELASKVSTKEPYEIGNKQSNKRLAVVDLGIKKNILDNFVKRDLFVKVFPYDTSLDEMLKFKPNG

SEQ ID NO: 167665 - protein, 219 aa, Unknown
  Bacterial polypetide isolated from the Sargasso Sea
MNNGHHFLGKGFGYHGNFFGEICFNTSITGYQEILTDPSYFKQIITFTFPHIGIVGTNKVDIESSKIYASACIINNELTPSSNFRSEKNFENWLKKNKKACITGIDTRLLTKIIRDKGACNALIHFPRKNLKKIDYLKNELTSFPSMKNTDLASEVSTKYIYKWDNNKKIPVDFKDIKGKFIAVLDYGIKNNILKILNQSKYQIIVFPHNYKIEKILNK

SEQ ID NO: 167666 - protein, 130 aa, Unknown
  Bacterial polypetide isolated from the Sargasso Sea
MIKKVKKTNSKIKSQINTGVLVLENKKVFKGIGIGYQGEATGEVCFNTSLTGYQEIISDPSYAGQIINFTFPHIGNVGTNKEDHESDKLWARGVIFNSEITSPSNYRSFQHLDAWLKKNKIVGITGLDTR

SEQ ID NO: 167667 - protein, 58 aa, Unknown
  Bacterial polypetide isolated from the Sargasso Sea
EITHKSLFDNSIEGIRLKNNPVFSVQYHPESNPGPQDSVYLFKKFVNNMKKNAKKKRS

SEQ ID NO: 167668 - protein, 227 aa, Unknown
  Bacterial polypetide isolated from the Sargasso Sea
MNNGHHFFGKGFGYHGNFFGEICFNTSITGYQEILTDPSYYKQIITFTFPHIGIVGTNKIDIESSKIYASACIINNELTPSSNFRSEKNFENWLKKNKKACITGIDTRLLTKIIRDEGACNALIHFPRKNLKKIDYLKNELNSFPSMKNTDLASEVSTKYIYKWDNNKKIPINFDSIKGKFIAVLDYGIKNNILKILNQSKYQIIVFPYNFKIKKILNKNTVGFFLS

SEQ ID NO: 167669 - protein, 194 aa, Unknown
  Bacterial polypetide isolated from the Sargasso Sea
MSSGVLVLENKTIFKGIGIGYQGTATGEVCFNTSLTGYQEIISDPSYAGQIINFTFPHIGNVGTNKEDHESDKIWTKGVIFNTEITNPSNYRSLKKLDSWLKKNKIIGITGLDTRSLTNFIRDKGAPKGTISNNNKGIFNLKKLTNSAIKWPGLNGLDLAKTVTAKKQYIWKGFKTWKKDKGLKKIKRRNIKLC

SEQ ID NO: 167670 - protein, 87 aa, Unknown
  Bacterial polypetide isolated from the Sargasso Sea
MNKKQKVNSKKFSHLSSGVLVLENKTIFKGIGIGYQGTATGEVCFNTSLTGYQEIISDPSYAGQIINFTFPHIGNVGTNKEDHESDK

SEQ ID NO: 167671 - protein, 47 aa, Unknown
  Bacterial polypetide isolated from the Sargasso Sea
MKFDVKLLLENGISFEGIGFGYQKIGVGEVVFNTAITGYQEILPTHL

SEQ ID NO: 167672 - protein, 143 aa, Unknown
  Bacterial polypetide isolated from the Sargasso Sea
MIKKQKNKIAINHPFNTGILVLDNKLIFKGIGLGYQGTATGEVCFNTSLTGYQEIISDPSYAGQIINFTFPHIGNVGTNNEDLESDKVWAKGAIFNSEITSPSNYRALRTLDEWLKENKIVGLTGLDTRSLTNFIRDKGAPKG

SEQ ID NO: 167673 - protein, 252 aa, Unknown
  Bacterial polypetide isolated from the Sargasso Sea
MTGILVFEDGTKFYGNGLGFEGSAIGEVCFNTSITGYQEIITDPSYSDQIINFTFPHIGNVGTNLEDNESDKVWAKGVILNCDITEPSNYRSIKKLDIWLKKRKIVGIFGLDTRVITNYIRDIGAPKGTIQFLKKGNHNFKDLLNKARSWSGLEGLDLAKKVTCKKLYKWKSLKSWDKNKGYVKSKKNKHKVIAIDYGIKKNQLRCFSDFDCSVTVVPANFPAEEIIKLKPDGVFYQMVLETRQQLANMLYQ

SEQ ID NO: 167674 - protein, 181 aa, Unknown
  Bacterial polypetide isolated from the Sargasso Sea
MKEKQKNKIALKSKFPAAILVLDNKTIFRGIGLGYQGEATGEVCFNTSLTGYQEIISDPSYAGQIINFTFPHIGNVGTNNEDIESDKIWTRGVIFNSEITNPSNYRSLKHLDEWLKKNKIVGITGLDTRSLTNFIRDKGAPKGTIANNKSGKFNIKKLIKKTTIWPGLKGMGSAQEVSTKK

SEQ ID NO: 167675 - protein, 88 aa, Unknown
  Bacterial polypetide isolated from the Sargasso Sea
PVKNLVHDKVEITSQNHGFVVVEEALPKEIEVTHKSLFDNTIEGIRLKNRPIFSVQYHPESNPGPQDSVYLFQEFINNMKKNAKKKRY

SEQ ID NO: 167676 - protein, 109 aa, Unknown
  Bacterial polypetide isolated from the Sargasso Sea
MRQIEKKEKNNSHNFSTGILVFEDGTNFYGKGIGYEGYAIGEVCFNTSITGYQEIITDPSYSDQIINFTFPHIGNVGTNPEDNEADKAWVKGVIFNSNVTNPSNYRSIK

SEQ ID NO: 167677 - protein, 38 aa, Unknown
  Bacterial polypetide isolated from the Sargasso Sea
SIDNSVFSVQYHPESSPGPHDSRYLFQKFIEMMNAQKD

SEQ ID NO: 167678 - protein, 169 aa, Unknown
  Bacterial polypetide isolated from the Sargasso Sea
MIKKAKKTNSKNSQINTGVLVLENKKVFKGIGIGYQGEATGEVCFNTSLTGYQEIISDPSYAGQIINFTFPHIGNVGTNKEDVESDKVSTKGVIFNSEITSPSNYRAFLHLDAWLKTNKIVGITGLDTRSLTNFIRDKGAPKGTIAYSKNGKFNVSKLTNSTIRWSGLK

SEQ ID NO: 167679 - protein, 67 aa, Unknown
  Bacterial polypetide isolated from the Sargasso Sea
KSIPKNVKVTHKSLFDGSIEGIEVKSKKLFSVQYHPEANPGPQDSKYLFEKFLKIIKSKKNGKKKRY

SEQ ID NO: 167680 - protein, 50 aa, Unknown
  Bacterial polypetide isolated from the Sargasso Sea
SLFDKSLQGIQFKDLPAFSFQGHPEASPGPQEIQTLFNKFSLMIKEYAKT

SEQ ID NO: 167681 - protein, 106 aa, Unknown
  Bacterial polypetide isolated from the Sargasso Sea
ILALALNCNTYKLKCGHHGGNHPVMDYQTNKIEITSHNHGFSVDENSLPEDVRVTHRNLNDQTVEGLESLQYPAYSVQYHPEAAPGPRDARYLFKRFVEMMGNTKR

SEQ ID NO: 167682 - protein, 204 aa, Unknown
  Bacterial polypetide isolated from the Sargasso Sea
MIKKAKKTNSKIKSQINTGVLVLENKKVFKGIGIGYQGEATGEVCFNTSLTGYQEIISDPSYAGQIINFTFPHIGNVGTNKEDHESDKIWARGVIFNSEITSPSNYRSFLHLDAWLKKNKIVGITGLDTRSLTNFIRDKGAPKGTISYSKKRKFNINKLTNTTIKWSGLKNLDLAEVVSTQKNYIWKGLKTWKKEFGYKKNNKN

SEQ ID NO: 167683 - protein, 198 aa, Unknown
  Bacterial polypetide isolated from the Sargasso Sea
MTYKKRKKGLVLLADGTIFYGRSSGINGTSFGEICFNTGVTGYQEIFTDPSYFGQIMVTTTSHIGNYGIKMSESQSNKIYISGLICKNFSAINSRSNSESIKKWFESNKLVTLCDVDTRALVRYIRDNGAMNAAITSEVDKISDIKKKLSNFPSMNGLELASKVSTKETYEIGNKRSNKRLAVLDLGIKKNILDNFVK

SEQ ID NO: 167684 - protein, 244 aa, Unknown
  Bacterial polypetide isolated from the Sargasso Sea
MNKKAKKTNSKTKSQINTGILVLENKKVFKGIGIGYQGEATGEVCFNTSLTGYQEIISDPSYAGQIINFTFPHIGNVGTNKEDHESDKIWARGVIINSEITTPSNYRSFLHLDAWLKKNKIVGITGLDTRSLTNFIRDKGAPKGTISYKKNGKFNINKLTNNTIRWSGLKNLDLAQVVSTNKNYTWRGLQTWKKNIGYKKNNKNSFHVVAVDYGIKKNILRYFSDFNCKVTVVSCKTNAQKILS

SEQ ID NO: 167685 - protein, 51 aa, Unknown
  Bacterial polypetide isolated from the Sargasso Sea
FDGCIEGIKLKNKPVFSVQYHPESNPGPQDSIYLFQEFINNIKKNAKKKRY

SEQ ID NO: 167686 - protein, 43 aa, Unknown
  Bacterial polypetide isolated from the Sargasso Sea
QGIEFIDRPAFSFQGHPEASPGPQEIQILFEKFSSMVKEYAKT

SEQ ID NO: 167687 - protein, 170 aa, Unknown
  Bacterial polypetide isolated from the Sargasso Sea
MELENENEELCDSTFTHDPSIVINDGAIILNMGKKLRKKEAYEHLKLYQSIDVPILGKIINDGTVEGGDCLWINKKTLIVGESDRTNKSGINQLSEILENHGLKVISVKIPKYNDLDSCFHLMSMISLLDEDLAIAKVDMLPNNLIDIFKEYKIKLINIPDNDYKKSKTL

SEQ ID NO: 167688 - protein, 45 aa, Unknown
  Bacterial polypetide isolated from the Sargasso Sea
QTVEGLESLQYSAYSVQYHPEAAPGPRDARYLFKRFVEMMGNTKR

SEQ ID NO: 167689 - protein, 249 aa, Unknown
  Bacterial polypetide isolated from the Sargasso Sea
MIKKVNKAHSKNSQKNTGILVLENKKIFRGIGIGYQGEATGEVCFNTSLTGYQEIISDPSYAGQIINFTFPHIGNVGTNKEDFESDKIWTKGVIFNSEITSPSNYRSFQHLDAWLKKNKIVGITGLDTRSLTNFIRDKGAPKGTIAYSKKSKFHINKLINSTIKWSGLKNLDLAEKVTTQKNYIWKGLKTWRKEYGFRKNNQNSFHVVAIDYGIKKNILRYFSDFKCKVTVVSCKTPAEKILSLKPDGV

SEQ ID NO: 167690 - protein, 203 aa, Unknown
  Bacterial polypetide isolated from the Sargasso Sea
MTKNIKVKYTNSFNFSSGILVLENGLVLRGIGLGYQGTTTGEVCFNTSLTGYQEIISDPSYAGQIINFTFPHIGNVGANSEDIESDKIWTRGVIFNSEITSPSNYRSLKNLDEWLKINKIIGITGLDTRSLTNLIRDNGAPKGTISYNKKGKFNIKKLLKNSIKWPGLDGLDLASVVSTKRNYKWIGLRTWKKNIGYKKNKKK

SEQ ID NO: 167691 - protein, 123 aa, Unknown
  Bacterial polypetide isolated from the Sargasso Sea
MKKIGQNINSKKNLKKIKPTAILILQNGKFFQGVGLGYKGTATGEVCFNTSITGYQEIISDPSYADQIINFTFPHIGNVGANKEDHESDKIWTKGVIINTEITNPSNYRSLKHLDQWLKKNKI

SEQ ID NO: 167692 - protein, 154 aa, Unknown
  Bacterial polypetide isolated from the Sargasso Sea
MSFPAILVLEDGTVIEGTGFGATKPSVGELVFNTSMSGYQEIITDPSYAKQIIAFTHPHIGNTGINDEDNESHSIFASGIVIKDLPDHFSNWRATQSLNTFLESKETIGISNIDTRELTAKLRDHGSLKACIAPEDQDSLLIAQEALNQFSGLE

SEQ ID NO: 167693 - protein, 235 aa, Unknown
  Bacterial polypetide isolated from the Sargasso Sea
LVLENKSIFNGIGIGYEGTATGEVCFNTSITGYQEIISDPSYAGQIINFTFPHIGNVGTNKQDNESDKVWTKGVIFNSEITDPSNYRSYMELDLWLKKNKIIGLTGLDTRSLTNFIRDEGAPRGTISHSKNGKFNIKKLINFTLKWPGLNGLDLAKTVSTKKKYIWKGLKTWNKEQGYKKIKKKKIKIVAIDYGIKTNILRYFSNFSCDVTIVPCQTTLEEILKIKPSGVFLSNG

SEQ ID NO: 167694 - protein, 230 aa, Unknown
  Bacterial polypetide isolated from the Sargasso Sea
MIKKVKKTNSKKNTHIQTGVLVLENKTIFKGIGIGHVGTATGEVCFNTSLTGYQEIISDPSYAGQIINFTFPHIGNVGTNKEDHESDQIWTKGVIFNTEITNPSNYRSLKKLDTWLKKNKIVGITGLDTRSLTNFIRDKGAPKGTISNNNKGIFNLKKLTNDSIKWSGLNGLDLAKVVTTKKKYVWKGFKTWKKDKGFEKNKKKKYKIIAIDYGIKKNILRYFSDFNCQV

SEQ ID NO: 167695 - protein, 81 aa, Unknown
  Bacterial polypetide isolated from the Sargasso Sea
MIKKQKNKIAINHPFSAGILVLDNKLVFKGIGLGYQGTSTGEVCFNTSLTGYQEIISDPSYAGQIINFTFPHIGNVGTNNE

SEQ ID NO: 167696 - protein, 179 aa, Unknown
  Bacterial polypetide isolated from the Sargasso Sea
MIKKRKINSTKNSKFTPGVLVLENRQIFKGIGIGYEGTATGEVCFNTSITGYQEIISDPSYSGQIINFTFPHIGNVGTNKEDHESDKVWTKGVIFNSEITNPSNYRSLKNLDLWLKKNKIVGLTGLDTRSLTNFIRDKGAPKGTISNNKKGNFNLKKLIIISTKWPGLNGLDLAKNVTT

SEQ ID NO: 167697 - protein, 117 aa, Unknown
  Bacterial polypetide isolated from the Sargasso Sea
MIKKENKINSKNSQFNTGILVLENKKVFKGIGIGFQGEATGEVCFNTSLTGYQEIISDPSYAGQIINFTFPHIGNVGTNNEDYESDKIWTRGVIFNSEITTPSNYRSFQHLDAWLKI

SEQ ID NO: 167698 - protein, 245 aa, Unknown
  Bacterial polypetide isolated from the Sargasso Sea
MNKKQKVNSKNFSHLSSGVLVLENKTIFKGIGIGYQGTATGEVCFNTSLTGYQEIISDPSYAGQIINFTFPHIGNVGTNKEDHESDKIWTKGVIFNTEITNPSNYRSLKKLDTWLKKNKIVGITGLDTRSLTNFIRDKGAPKGTISNNNKGIFNLKKLTNNSIKWPGLNGLDLAKIVTTKKKYIWKGFKTWKKEKGFEKNKKKKYKIIAIDYGIKKNILRYFSNFNCQVIVVPCNLEAKDIIRLK

SEQ ID NO: 167699 - protein, 133 aa, Unknown
  Bacterial polypetide isolated from the Sargasso Sea
MTLKRKNKTSHLSNFNTAILVLENKSVFKGIGLGHTGEATGEVCFNTSLTGYQEIISDPSYAGQIINFTFPHIGNVGANKEDIESDKIWTRGVIFNSEITSPSNYRSLQNLDKWLKKNKIVGITGLDTRSLTN

SEQ ID NO: 167700 - protein, 236 aa, Unknown
  Bacterial polypetide isolated from the Sargasso Sea
MIKKVKKAHLKNSQKNTGILVLENKKIFRGIGIGHQGEATGEVCFNTSLTGYQEIISDPSYAGQIINFTFPHIGNVGTNKEDFESDRIWTKGVIFNSEITSPSNYRSFQHLDTWLKKNKIIGITGLDTRSLTNFIRDKGAPKGTIAYSNKSKFHINKLINSTIKWSGLKNLDLAEKVTTQKNYVWKGLKTWRKEHGYRKNNQNSFHVVAIDYGIKKNILRYFSNFKCKVTVVSCKT

SEQ ID NO: 167701 - protein, 89 aa, Unknown
  Bacterial polypetide isolated from the Sargasso Sea
FWAPWCNHPVHDLKNNIVFITSQNHNFAVAEPNNRDDINITHRSLFDNSIQGIEYKEKPFYSIQCHPEASPGPKEFETLFKRFFEEMNA

SEQ ID NO: 167702 - protein, 164 aa, Unknown
  Bacterial polypetide isolated from the Sargasso Sea
MKKKAKKTNSKTKSQINTGILVLENKRVFKGIGIGYQGEATGEVCFNTSLTGYQEIISDPSYAGQIINFTFPHIGNVGTNKEDHESDKIWAKGVIINSEISSPSNYRSFLHLDAWLKKNKIVGITGLDTRSLTNFIRDKGAPKGTISYLKNGKFNISKLTNNTI

SEQ ID NO: 167703 - protein, 58 aa, Unknown
  Bacterial polypetide isolated from the Sargasso Sea
THKSLFDGSIEEIEVKEKRLFSVQYHPEANPGPQDSKYLFEKFLNNIRKRNNGKKKRY

SEQ ID NO: 167704 - protein, 246 aa, Unknown
  Bacterial polypetide isolated from the Sargasso Sea
GYKGTVTGEVCFNTSITGYQEIISDPSYADQIINFTFPHVGNVGTNKEDHESDKIWTKGVIINTEITNPSNYRSLKHLNQWLKKNKIVGITGIDTRNLTNFIRDRGAPKGTISFYNKNKINIKKLIRITNKWSGLKNLDLAKIVTTKKNYLWQDYKTWKKESGYLKNKKKLLHVVAIDYGIKKNILRYFSDFNCKVTIVPCKTTAKDILKLNPNGIFLSNGPGDPAATGKYAITIIQNLIKRKLPL

SEQ ID NO: 167705 - protein, 138 aa, Unknown
  Bacterial polypetide isolated from the Sargasso Sea
MIKKQKNKIAINHQFPTGILVLDNKIVFKGIGLGYQGTSTGEVCFNTSLTGYQEIISDPSYAGQIINFTFPHIGNVGTNNEDLESNKIWTKGVIFNSEITYPSNYRALQTLDKWLKKNQIVGLTGLDTRGLTNFIRDK

SEQ ID NO: 167706 - protein, 68 aa, Unknown
  Bacterial polypetide isolated from the Sargasso Sea
MGFAIDPNSLPKDIVRITHYNLNDNTVAGLEVYNKPIFSVQYHPEAGPGPHDSDYLFKKFVSLMLERC

SEQ ID NO: 167707 - protein, 44 aa, Unknown
  Bacterial polypetide isolated from the Sargasso Sea
IKLKNKPVFSVQYHPESNPGPQDSVYLFKEFINDMKKNAKKKRS

SEQ ID NO: 167708 - protein, 113 aa, Unknown
  Bacterial polypetide isolated from the Sargasso Sea
MIKKPKKRNSKKSQIHTGILVLENKKVFKGIGIGYQGSATGEVCFNTSITGYQEIISDPSYAGQIINFTFPHIGNVGTNKEDYESDKIWTKGVVFNSEITSPSNYRSFLHLDN

SEQ ID NO: 167709 - protein, 84 aa, Unknown
  Bacterial polypetide isolated from the Sargasso Sea
CDILALGDTFPQQAFIYKNAVGIQFHPEVNLKMHLRWLYFAGYMLREKGAQKRHYQMQQRLSHGKKINMWLDSFLDNYFFINKS

SEQ ID NO: 167710 - protein, 190 aa, Unknown
  Bacterial polypetide isolated from the Sargasso Sea
MNKKQKYKIAIKQQFPTGILALDNKLVFKGIGLGYNGTATGEVCFNTSLTGYQEIISDPSYAGQIINFTFPHIGNVGTNNEDLESDKVWAKGAIFNSEITSPSNYRALRTLDEWLKKNKIVGITGLDTRSLTNFIRDKGAPKGTISNNKTGKFNMKKLINYSIKWPGLNGLDLAKEVSTKKTYSWKGFKT

SEQ ID NO: 167711 - protein, 206 aa, Unknown
  Bacterial polypetide isolated from the Sargasso Sea
MNKKQKNKIAIKNQFPTGILVLDNKLIFKGIGLGYQGTSTGEVCFNTSLTGYQEIISDPSYAGQIINFTFPHIGNVGTNNEDLESDKVWTKGAIFNSEITSPSNYRALRTLDEWLKKNKIVGLTGLDTRSLTNFIRDKGAPKGTISNNKKGKFNIKKLINYSIKWPGLNGLDLANEVSTKKTYSWKGFKTWRKETGYKKNTKKIFK

SEQ ID NO: 167712 - protein, 81 aa, Unknown
  Bacterial polypetide isolated from the Sargasso Sea
DKVEITSQNHGFVVVEETLPKKIEVTHKSLFDNTIEGIRLKNKPIFSVQYHPESNPGPQDSVYLFKEFINNMKKDAKKKRY

SEQ ID NO: 167713 - protein, 270 aa, Unknown
  Bacterial polypetide isolated from the Sargasso Sea
MQRDINNNQHLRPPSAALIFDNGEVLWGFGIGKIKSVIAELCFNTSQTGYQETLTDPSYAKQIINFTFPHIGIVGTNNEDLESNKIFAEGCIINQSIDNYSNWRAQKNLNDFLIYHNTPGITGIDTRYLTKKLSKEGAKKVALINFGENKKNLENIKESLKIWSGLENLDLATIVSTKNQFTWNEGLWKITNKQVSYKKFPIVCLDFGIKHNILRNLNNLNFQTTVLPATSSIEQILKFKPTGIFLSNGPGDPDATIKIILPTIKELIKL

SEQ ID NO: 167714 - protein, 244 aa, Unknown
  Bacterial polypetide isolated from the Sargasso Sea
NGKFFKGIGLGYKGTVTGEVCFNTSITGYQEIISDPSYADQIINFTFPHVGNVGTNQEDHESDKIWTKGVIINTEITNPSNYRSLKHLDQWLQKNKIVGITGIDTRNLTNFIRDKGAPKGTISFYNKKKINIRKLIKITNKWSGLKNLDLAEQVSTKKSYLWQDYKTWKKENGYLKNKKKLLHVVAIDYGIKKNILRYFSDFNCKVTIVPCKTTAKDILKLNPNGIFLSNGPGDPAATGKYAIP

SEQ ID NO: 167715 - protein, 152 aa, Unknown
  Bacterial polypetide isolated from the Sargasso Sea
MKKKAKKNNSKKISRIHTGVLVLENRKVFKGIGIGYLGTATGEVCFNTSLTGYQEIISDPSYAEQIINFTFPHIGNVGTNKEDHESDKIWTKGVIFNSDITNPSNYRSLANLDWWLKKNKVVGITGLDTRSLTNFIRDKGAPKGTISLSKNG

SEQ ID NO: 167716 - protein, 230 aa, Unknown
  Bacterial polypetide isolated from the Sargasso Sea
MIKKQKKTNSKKISNIKTGILVLENKKIFKGIGMGYEGIATGEVCFNTSLTGYQEIISDPSYAGQIINFTFPHIGNVGTNKEDHESDKIWTRGVILNSEITDPSNYRSLLHLDSWLKKNKIVGITGLDTRSLTNFIRDKGAPKGTISYSKNGKFNINKLSNTAIKWSGLKNLDLAEIVSTNKNYIWKGFKTWNKKNGYKKNNKNIYHVVAIDYGIKKNILRYFSDFNCKV

SEQ ID NO: 167717 - protein, 76 aa, Unknown
  Bacterial polypetide isolated from the Sargasso Sea
MVLENKKVFKGIGIGYQGEATGEVCFNTSLTGYQEIISDPSYAGQIINFTFPHIGNVGTNKEDVESDKIWTRGSNL

SEQ ID NO: 167718 - protein, 200 aa, Unknown
  Bacterial polypetide isolated from the Sargasso Sea
MVVKTNTKHNSKDNLKKINPTGVLVLEDGTFFKGKGLGYESTTTGEVCFNTSITGYQEIISDPSYAGQIINFTFPHIGNVGANNDDHESDKIWTRGVIFNSEISNPSNYRALKHLDNWLKKNKIVGIAGLDTRSLTNFIRDKGAPKGTISFSKKGKFNINKLKNLSIKWNGLKNLDLAEQVTTKKNYKWAGFKTWKKESR

SEQ ID NO: 167719 - protein, 49 aa, Unknown
  Bacterial polypetide isolated from the Sargasso Sea
GPHRNLNDGTIEGIRHKTEAAASVQYHPEAAAGPHDSSPLFLRFREMLN

SEQ ID NO: 167720 - protein, 219 aa, Unknown
  Bacterial polypetide isolated from the Sargasso Sea
MIKKQKNYFKKNTIKNSGILVLDNKTFFKGIGLGYDGTATGEICFNTSLTGYQEIISDPSYAGQIINFTFPHIGNVGTNNEDLESDKIWTRGVIFNSEITNPSNYRSLSHLDLWLKKNKVVGLTGIDTRSLTNFIREKGAPKGTISVNKNGNFNIKKLTNLSIKWPGLNGLDLAKEVTTRKTYKWKGLQTWKKGLGYKKSTKNNLIIVAIDFGIKKNIS

SEQ ID NO: 167721 - protein, 81 aa, Unknown
  Bacterial polypetide isolated from the Sargasso Sea
DKVEITSQNHGFVVVEETLPKKIVVTHKSLFDDTIEGIRLKNRPIFSVQYHPESNPGPQDSVYLFQEFINNMKKNAKKKRS

SEQ ID NO: 167722 - protein, 146 aa, Unknown
  Bacterial polypetide isolated from the Sargasso Sea
MRQALKRKKDKSYNFSTGILVFEDGTSFSGKGIGYQGAAVGEVCFNTSITGYQEIITDPSYSDQIINFTFPHIGNVGTNLEDNEADKAWVKGIILNCDVTEPSNYRSIKKLNIWLKKRKIVGIVGLDTRVITNYIRDKGAPKGSIQ

SEQ ID NO: 167723 - protein, 251 aa, Unknown
  Bacterial polypetide isolated from the Sargasso Sea
WLILQKDEYPKLPLKELEKFFEHGYDQELGWVRKPNTEHNEIGKNSRVTKWTTNSNASRANPDFDDMHSEISCYGDSFTFCRQVNDNETWEHYLSKSLNTNIQNFGVGNYGIDQSLLYLKKNFQKNKTNIIILAVVPDTISRIVSVWKHYYEYGNTFGFKPRFFLQKNNLILNKNPINSQEKFSNYEKYLEEIRNSDFFYKNKFRKEKISFPYSITVFRNAKRNFRIIYWVLKIQNLKKKGIDTKDIDWNP

SEQ ID NO: 167724 - protein, 224 aa, Unknown
  Bacterial polypetide isolated from the Sargasso Sea
MIVHQPRSSTGDVGMKLRERGYELDVRRPVIGEKLPQSMDEHDVAVIYGGPPSANDDLDYIKYEIDWISTALLSNKPFLGICLGAQMLAKNLGGTVQRAKDHQFEIGFYDIKPTGDGHKIFQNQKTFFQWHKEGFTVPKSCDILAFGETFPQQAFNYKNAVGIQFHPEVNLKMHLRWLYFAGYMLREKGAQKRNYQMQQRLSHGKKINMWLDSFIDNYFLRDKS

SEQ ID NO: 167725 - protein, 198 aa, Unknown
  Bacterial polypetide isolated from the Sargasso Sea
MKKKAKKTNSKTKSQINTAVLVLENKKIFKGIGIGYEGQATGEVCFNTSLTGYQEIISDPSYAGQIINFTFPHIGNVGTNKEDHESDKIWARGVIINSEITSPSNYRSFLHLDAWLKKNKIVGITGLDTRSLTNFIRDKGAPKGTISYSKNGKFNISKLTNNTIKWSGLKNLDLAQVVSTKKNYTLERSSDLEKRDRI

SEQ ID NO: 167726 - protein, 245 aa, Unknown
  Bacterial polypetide isolated from the Sargasso Sea
MKEKRKNKIAIKSKFSSAILVLDNKTTFKGIGLGYHGEATGEVCFNTSLTGYQEIISDPSYAGQIINFTFPHIGNVGTNNEDIESDKIWTRGVIFNSEITDPSNYRSLKHLDQWLKKNKIVGITGLDTRSLTNYIRDKGAPKGTISNSKSGKFNIKKLIKKTIIWPGLNGMDLAKEVSTKKNYKWKDFKTWSKEEGYKKNKKKLYRVIAIDYGIKKNILRYFSNFHCEVKVVHCKESAENLIKLK

SEQ ID NO: 167727 - protein, 140 aa, Unknown
  Bacterial polypetide isolated from the Sargasso Sea
MNKKQKVNSKKSSSFSSGVLVLENRTIFKGIGIGFQGTATGEVCFNTSLTGYQEIISDPSYAGQIINFTFPHIGNVGTNTEDHESDKIWTKGVIFNTEITNPSNYRSLKKLDVWLKKNKIIGITGLDTRSLTNFIRDKGA

SEQ ID NO: 167728 - protein, 246 aa, Unknown
  Bacterial polypetide isolated from the Sargasso Sea
MIKKAKKSNSKKISQINTGVLVLENKKVFKGIGIGYQGEATGEVCFNTSLTGYQEIISDPSYAGQIINFTFPHIGNVGTNKEDFESDKIWTKGVIFNSEITSPSNYRSFQHLDAWLKKNRIVGITGLDTRSLTNYIRDKGAPKGTIAFSKNGKFNISKLTNLTIKWSGLKNLDLAEKVTTTKNYIWKGLKTWKKETGYKKNSKNSFHVVAIDYGIKKNILRYFSDFKCKVTVVPCKTSAEKILALK

SEQ ID NO: 167729 - protein, 226 aa, Unknown
  Bacterial polypetide isolated from the Sargasso Sea
MTKKVKKTNSKKSQFHTGILVLENSKIFKGIGIGYQGEATGEVCFNTSLTGYQEIISDPSYAGQIINFTFPHIGNVGTNKEDVESDKIWARGVIFNSEITSPSNYRAFLHLDTWLKKNKIVGITGLDTRSLTNFIRDKGAPKGTISYSKNKKFNINKLTNSTIKWSGLKNLDLAETVTTSKNYIWKGLKTWKKETGYEKNKKNSFHIVAIDYGIKKNILRYFSDFK

SEQ ID NO: 167730 - protein, 69 aa, Unknown
  Bacterial polypetide isolated from the Sargasso Sea
KIIKESLPKSVQVTHQSLFDNCIEGIKLKNKPVFSVQYHPESNPGPQDSVYLFEEFVRSMKKNAKKKRS

SEQ ID NO: 167731 - protein, 216 aa, Unknown
  Bacterial polypetide isolated from the Sargasso Sea
STGDVGMKLRERGYELDVRRPVIGEKLPKSMIDHDVAVIYGGPPSANDNLDYIKYEIEWISKALSSNKPFLGICLGAQMLAKNLGGTVQRAKDHHFEIGFYDIKPTGDGHKIFQNQKTFFQWHKEGFTAPKSCDILALGDTFPQQAFNYKNAVGIQFHPEVNLKMHLRWLYFAGYMLREKGAQKRNYQMQQRLSHGKKINMWLDSFLDNYFLRDKS

SEQ ID NO: 167732 - protein, 121 aa, Unknown
  Bacterial polypetide isolated from the Sargasso Sea
FEIGFYDIKPTGDGHKIFQNQKTFFQWHKEGFTVPKSCDILALGETFPQQAFNYKNAVGIQFHPEVNLKMHLRWLYFAGYMLREKGAQKRNYQMQQRLSHGKKINMWLDSFIDNYFLRDKS

SEQ ID NO: 167733 - protein, 217 aa, Unknown
  Bacterial polypetide isolated from the Sargasso Sea
MTLKQKNKSSHLSNFNTAVLVLENKSVFKGIGLGYKGEATGEVCFNTSLTGYQEIISDPSYAGQIINFTFPHIGNVGTNEEDLESDKIWTRGVIFNSEITSPSNYRSLQNLDKWLRKNKIVGITGLDTRSLTNFIRDKGAPKGTISNNKNGKFNINKLINKSIKWPGLRGMDLAQEVTTNKTYIWKGYKTWKKIKGYEKNKKKKFRVVAIDYESKKI

SEQ ID NO: 167734 - protein, 137 aa, Unknown
  Bacterial polypetide isolated from the Sargasso Sea
MKKKQKTNSNKKSKLSSGILVLENGQVFRGIGLGHEGEATGEVCFNTSITGYQEIISDPSYSGQIINFTFPHIGNVGTNQEDHESDKIWTKGVIFNAEITSPSNYRSLKNLDVWLKKNRIVGLTGIDTRKFNKILSE

SEQ ID NO: 167735 - protein, 57 aa, Unknown
  Bacterial polypetide isolated from the Sargasso Sea
MTHKSLFDNSVERIKLKNKPVFSVQYHPESNPGPQDSHYLFNQFINLVKKNAKKKRY

SEQ ID NO: 167736 - protein, 58 aa, Unknown
  Bacterial polypetide isolated from the Sargasso Sea
SNIKTTHISLFDKSLQGIEFKDSPAFSFQGHPEASPGPQEIQSLFKKFSLMVENYAKT

SEQ ID NO: 167737 - protein, 49 aa, Unknown
  Bacterial polypetide isolated from the Sargasso Sea
DSIEGIRLKNKPVFSVQYHPESNPGPQDSVYLFQEFIHNIKRNAKKKRH

SEQ ID NO: 167738 - protein, 223 aa, Unknown
  Bacterial polypetide isolated from the Sargasso Sea
MNKKQKNKIAIKHQIPTGILVLDNKLVFKGIGLGYQGTATGEVCFNTSLTGYQEIISDPSYAGQIINFTFPHIGNVGTNDEDLESDKVWAKGAIFNSEITSPSNYRALKTLDEWLKKNKIVGLTGLDTRSLTNFIRDKGAPKGTISNNKKGKFNIKKLINNSIKWPGLNGLDLAKEVSTKKTYTWKGFKTWKKNIGYKKNNKNIFKIIAIDYGIKNKHSQIFF

SEQ ID NO: 167739 - protein, 159 aa, Unknown
  Bacterial polypetide isolated from the Sargasso Sea
MNKKQKNKIAIKHQFPTGILVLDNKIVFKGIGLGYQGTATGEVCFNTSLTGYQEIISDPSYAGQIINFTFPHIGNVGTNNEDLESDKVWAKGAIFNSEITSPSNYRSLRTLDEWLKKNKIVGLTGLDTRSLTNFIRDKGAPKGTISNNKRGKFNIKKIN

SEQ ID NO: 167740 - protein, 244 aa, Unknown
  Bacterial polypetide isolated from the Sargasso Sea
MKEKHKNKIAIKSKFPSAILILENKRIFRGIGLGYQGEATGEVCFNTSLTGYQEIISDPSYAGQIINFTFPHIGNVGTNNEDIESDKIWTRGVIFNSEITNPSNYRSLKHLNEWLKKNKIVGITGLDTRSLTNFIRDKGAPKGTISNNKSGKFNIKKLIKKTIAWPGLNGMDLANEVSTRKNYTWKGFKTWNKDEGYKKNNKKKFRVIAIDYGIKKNILRYFSNFDCDVKVVSCKESVENLLKL

SEQ ID NO: 167741 - protein, 81 aa, Unknown
  Bacterial polypetide isolated from the Sargasso Sea
MTKKVKKINSKNSQINTGILVLENKRVFRGIGIGYNGEATGEVCFNTSLTGYQEIISDPSYAGQIYNFTFPHIGNVGTNKE

SEQ ID NO: 167742 - protein, 85 aa, Unknown
  Bacterial polypetide isolated from the Sargasso Sea
NLVHDKVEITSQNHGFVVVEESLPKKIEVTHKSLFDNTIEGIRLKNKPIFSVQYHPESNPGPQDSVYLFQEFINNIKKNAKKKRY

SEQ ID NO: 167743 - protein, 160 aa, Unknown
  Bacterial polypetide isolated from the Sargasso Sea
MIKKAKKTNSKNSEINTGVLVLENKRVFKGIGIGYQGEATGEVCFNTSLTGYQEIISDPSYAGQIINFTFPHIGNVGTNKQDYESDKIWTKGVIFNSEITSPSNYRSFQHLDAWLKKNKIVGITGLDTRSLTNLIRDKGAPKGTIANSKTGKFNISKLTN

SEQ ID NO: 167744 - protein, 209 aa, Unknown
  Bacterial polypetide isolated from the Sargasso Sea
MGLTTVNLFHIRRKTLLKRFPLTHELYLRQALKRKKDKSYNFSTGILVFEDGTKFFGNGIGYEGNAIGEVCFNTSITGYQEIITDPSYSDQIINFTFPHIGNVGTNIEDNEADKTWVKGVILNCDITEPSNYRSVKKLDIWLKKRKIVGIFGLDTRTITNYIRDVGAPKGTIQFLKKGNHNFKDLLNKSRSWNGLIGLDLAKKVTCKKP

SEQ ID NO: 167745 - protein, 102 aa, Unknown
  Bacterial polypetide isolated from the Sargasso Sea
GLALGGSTYKLPFGHRGLNHPCGENNKVEITSQNHGFAIDPNSLSKDIVRITHYNLNDNTVAGLEVYNKPIFSVQYHPEAGPGPHDSDYLFKKFVSLMLERC

SEQ ID NO: 167746 - protein, 96 aa, Unknown
  Bacterial polypetide isolated from the Sargasso Sea
LGHRGANHPVKNLVHDKVEITSQNHGFVVVEETLPKKIEVTHKSLFDNTIEGIRLKNKPIFSVQYHPESNPGPQDSVYLFQEFINNMKKNAKKKRY

SEQ ID NO: 167747 - protein, 221 aa, Unknown
  Bacterial polypetide isolated from the Sargasso Sea
MKQIDQNINSNKNLKKIDCNAILILQNGKFFKGHGLGYQGAATGEVCFNTSITGYQEIISDPSYAEQIINFTFPHIGNVGTNKEDHESDKIWTRGVIINTEITDPSNYRSLKHLDQWLRKNKIVGITGIDTRSLTSLIRDKGAPKGTVSFSKKNKFNIKKLLRTTQKWSGLKNLDLAQKVTTKKSYVWQNYKTWKKEAGFLKNKKKSLHVVAIDYGIKKIF

SEQ ID NO: 167748 - protein, 46 aa, Unknown
  Bacterial polypetide isolated from the Sargasso Sea
EGIKLKNKPVFSVQYHPEANPGPQDSQYLFKNFIQNVKKNAKKKRH

SEQ ID NO: 167749 - protein, 130 aa, Unknown
  Bacterial polypetide isolated from the Sargasso Sea
MKKDRTTTRPKPIEGQLIFEDGSYFNGIKIGSSNMEIGEVCFNTSMTGYQEIITDPSYAGQIINFTFPHIGNVGTNHEDDESRKPFAKGIIINCDISDPSNYRSILHLDAWLKKNNVPGICNIDTRLITN

SEQ ID NO: 167750 - protein, 57 aa, Unknown
  Bacterial polypetide isolated from the Sargasso Sea
PKNVKITHKSLFDGSVEGIEHKHKKIFAVQYHPEASPGPHDSRYLFQKFKGMISSNA

SEQ ID NO: 167751 - protein, 276 aa, Unknown
  Bacterial polypetide isolated from the Sargasso Sea
MGSGLGALKSVVAELCFNTSQTGYQETLTDPSYSKQIITFTFPHIGIVGTNDEDLESNKIYAEGCIINQSIDEFSNWRAQISLDSFLKKNNIPGIIDIDTRYLTRKLSKQGPQNVALINFGETKESFDKLFQKLENWNGLENLDLATLVSTKKEYDWNRGLWNKKINTENFEKFPIVCLDFGIKQNILRNLKNLNFDPTILPATSSAKEILSKEPKGIFLSNGPGDPDATIKLILPTIKELLKFQIPIFGICLGHQIISLALGAKTKKMYQGHRGA

SEQ ID NO: 167752 - protein, 69 aa, Unknown
  Bacterial polypetide isolated from the Sargasso Sea
NHGFAIDPNSLSKDIVRITHYNLNDNTVAGLEVKNKPIFSVQYHPEAGPGPHDSDYLFQKFVSLMLERC

SEQ ID NO: 167753 - protein, 60 aa, Unknown
  Bacterial polypetide isolated from the Sargasso Sea
HGFANNTESLPKNIFESHVSLFDGSNCGIEHKEKNIFSVQYHPEASPGPHDSLYLFSKFV

SEQ ID NO: 167754 - protein, 261 aa, Unknown
  Bacterial polypetide isolated from the Sargasso Sea
IKSQFPPAILVLENKSIFKGIGLGYQGEATGEVCFNTSLTGYQEIISDPSYAGQIINFTFPHIGNVGTNKEDLESEKIWTRGVIFNSEITSPSNYRSLQSLDYWLKKNKIVGITGLDTRSLTNFIRDKGAPKGTISNNKSGSFNINKLINMTNKWPGLNGMDLAEIVTTPKTYKWIGLKTWKKEKGYQKNKKKNLKIVAIDYGIKKNILRYFSDYNCEVKVVSCKKSAEEILKLKPQGIFLSNGPGDPAATGKYAIQTIKT

SEQ ID NO: 167755 - protein, 285 aa, Unknown
  Bacterial polypetide isolated from the Sargasso Sea
MLADGSRHEGDLFGAATIAEGELVFTTNMTGYQESLTDPSFAGQVLTFTWPLLGNYGIAPGISESAGVWPRGVVCRELMMEPDHRHCIGTVHDLLLAHGVPGISGIDTRSVTRRVREYGVILSIFGPIEKEAEMAATLEKMKSPDLDDLADEVSRDDAVFLNEGATDDDGNPLPRVAALDCGIKYNILRELCSRFEVLWCPPDIDWDELCETYKIDALFCSNGPGDPAHPGKATDARHTLAKATKSGMPVMGICLGHQLMGLASGLRTYKLRYGHRGGNQPVLDL

SEQ ID NO: 167756 - protein, 63 aa, Unknown
  Bacterial polypetide isolated from the Sargasso Sea
NPTVLNLFSSYEEIIETDPSGIFLSNGPGDPYATGSKIVDVIKKLIDDNIPIFGICLGHQILG

SEQ ID NO: 167757 - protein, 88 aa, Unknown
  Bacterial polypetide isolated from the Sargasso Sea
METAVSNSGNLATEPAVLVLEDGRAMHGRSFGAVGTTFGEAVFTTGMTGYQETLTDPSYHRQVVVMTAPHVGNTGMNDEDAESERIWV

SEQ ID NO: 167758 - protein, 154 aa, Unknown
  Bacterial polypetide isolated from the Sargasso Sea
MKKDLATARPKPIESQLILEDGSVFNGIKIGSSKMEIGEVCFNTSMTGYQEIITDPSYAGQIINFTFPHIGNVGTNFDDNESKKPFAKGIIINCDISDPSNYRSILHLDAWLKKNNVPGICNIDTRLITNKIRSEGAPKGGIVEGPINSKKTSS

SEQ ID NO: 167759 - protein, 157 aa, Unknown
  Bacterial polypetide isolated from the Sargasso Sea
MSQYKPRKKAFVLLEDGTIFHGKSIGIDGTAFGELCFNTGMTGYQEIFTDPSYNGQLMVMANAHIGNYGTNLDEVESDSVKIAGLICKNFSFNFSRHGDSTSLFDFLSSNKIVCISDVDTRALVSYIRDNGAMNAVISTESIDSIDKIKKQLSKVLS

SEQ ID NO: 167760 - protein, 51 aa, Unknown
  Bacterial polypetide isolated from the Sargasso Sea
MSFKAILAFEDGSVFHGKGFGKEKYDVGELVFNTSMTGYQEIVTDPSYKKQ

SEQ ID NO: 167761 - protein, 81 aa, Unknown
  Bacterial polypetide isolated from the Sargasso Sea
MVSNGLLVLSNGMFFRGWIHGPFQATGELIFNTSMTGYQEILTDPSYCGQIVTMTAPHIGNYGTNPDDMESSTIHASALVV

SEQ ID NO: 167762 - protein, 53 aa, Unknown
  Bacterial polypetide isolated from the Sargasso Sea
MKKDRATARPKPIEGQLILEDGSHFNGIKIGSPNMEIGEVCFNTSMTGYQEII

SEQ ID NO: 167763 - protein, 133 aa, Unknown
  Bacterial polypetide isolated from the Sargasso Sea
MSFPAILVLEDDTIIEGIGFGVKELTVGEIVFNTSMSGYQEIITDPSYAKQIIAFTHPHIGNTGINDEDNESDSIHASGIVIKDLPDHFSNWRATQSLNSFLESQKTIGISNIDTRALTTRLRDHGSLKACIA

SEQ ID NO: 167764 - protein, 265 aa, Unknown
  Bacterial polypetide isolated from the Sargasso Sea
MILDDGNFFIGRAFGANVTGIGEICFNTSITGYQEIITDPSYSNQIINFTFPHIGNVGTNSDDYESNGSYASGIVTRQIPTTSSNWRSKNQFNSWLKDLKIPGISGIDTRYLTKLVRQTDSKNALLFSDDSDEYDFKKLFSILKDHPSMKGFELASKISTKSLYTWNEGIHILLKNLDKKKKKLITASNSIKIVALDFGIKKNILRNLFHRNADIVVLPQDSSYEEVMSYNPSGVFLSNGPGDPQATKNTTFQMINKLINKKIPI

SEQ ID NO: 167765 - protein, 74 aa, Unknown
  Bacterial polypetide isolated from the Sargasso Sea
MNQYNFRKKAFILLKDGTIFHGKSIGIEGTAYGELCFNTGMTGYQEIFTDPSYNGQLMVMANVHIGNYGTNNDE

SEQ ID NO: 167766 - protein, 283 aa, Unknown
  Bacterial polypetide isolated from the Sargasso Sea
MTLKRKNKTSHFSKLNTAILVLENKSVFKGIGLGYIGEATGEVCFNTSLTGYQEIISDPSYAGQIINFTFPHIGNVGVNNEDIESDKIWTRGVIFNSEITNPSNYRSLQNLDKWLKKNKIVGITGLDTRSLTNFIRDKGAPKGTISNNKNGKFNINKLINKSIKWPGLNGMDLAQKVTTKKTYIWKGYKTWKKNKGYEKNKKKKFRVVAIDYGIKKNILRYFSDFECEVKVVSCRENANKILNLKPHGIFLSNGPGDPAATGKYAIKVVKNLIKENIPLLEYV

SEQ ID NO: 167767 - protein, 181 aa, Unknown
  Bacterial polypetide isolated from the Sargasso Sea
MSFKAILAFEDGSVFHGKGFGKEKYDVGELVFNTSMTGYQEIVTDPSYKKQIITFTHPHIGNTGINKEDNESKTIHASGMVVKNFCDKPSNWRSKSTLGEFLKKNEVIGISDVDTREITTILREKGAMNCCIASLSVISDKEAVAKAKAFEGLKGMDLAKVVSTDKEYKWNEGVGPRIINL

SEQ ID NO: 167768 - protein, 112 aa, Unknown
  Bacterial polypetide isolated from the Sargasso Sea
MQGWIALENGSVFFGDSFGYPKTVEGELVFNTSMTGYQEALTDPSYAGQILMFTFPQIGNYGCNKENYESEKIQTKACIVKEWCRHPHQGEENFDEWLNREKIPGLEGIDTR

SEQ ID NO: 167769 - protein, 101 aa, Unknown
  Bacterial polypetide isolated from the Sargasso Sea
TKKMNLGHRGANHPVRNTIKGNVEITSQNHGFEIVKKSLPKNIQITHLSLFDDSIEGIKLKSQPVFSVQYHPESNPGPQDSVYLFEEFIKYMKANAKKKRY

SEQ ID NO: 167770 - protein, 85 aa, Unknown
  Bacterial polypetide isolated from the Sargasso Sea
QNLENIKVEIQSQNHGLKVEEKSLPKNLKLTHISLFDKSVRGVEDKNKGVFSVQYHPEASPGPQDSKYLFIKFLKNIKNAKKKRY

SEQ ID NO: 167771 - protein, 56 aa, Unknown
  Bacterial polypetide isolated from the Sargasso Sea
VIPPHVNLTINTSEGIRGNDIPAFSVQYHPESSPGPHDSRYLFNDFINMMKNAKKN

SEQ ID NO: 167772 - protein, 243 aa, Unknown
  Bacterial polypetide isolated from the Sargasso Sea
MRQVINKKNKSHIFSTGILVFEDGTKFFGTGIGYEGFAVGEVCFNTSITGYQEILTDPSYSDQIINFTFPHIGNVGTNIEDNEADKAWVKGVILNCDITEPSNYRSIKKLNIWLKKRKIVGIVGLDTRVITNYIRDKGAPKGTIQFLKSGNHNFKKLLNDARSWNGLLGLDLAKKVTCKKLYKWKSLKSWDKKKGYVKNKKNKYKIVAIDYGIKKNQLRCFSDIDCGVTIVPANFSADKIIKL

SEQ ID NO: 167773 - protein, 56 aa, Unknown
  Bacterial polypetide isolated from the Sargasso Sea
KELRVTHKSLFDGTVQGIEHTTLPAFSFQGHPEASPGPHDLKDLFQKFEDNMKKNA

SEQ ID NO: 167774 - protein, 275 aa, Unknown
  Bacterial polypetide isolated from the Sargasso Sea
MNKKQKVNSKKKSNFSPGILVLENKSIFNGIGIGYEGTATGEVCFNTSITGYQEIISDPSYAGQIINFTFPHIGNVGTNKQDNESEKVWTRGVIFNSEITNPSNYRSLIELDLWLKKNKIVGLTGLDTRSLTNFIRDKGAPKGTISHKKNGVFPLKKLINATLKWPGLNGLDLAKTVSTKNKFTWKGLKTWTKEDGFKKIEKKKFRVVAIDYGIKTNILRYFSNFYCDVIVVPCDASAEYIMTLKPSGIFLSNGPGDPAATGKYAIKIIKSLIKE

SEQ ID NO: 167775 - protein, 276 aa, Unknown
  Bacterial polypetide isolated from the Sargasso Sea
MRQFINRKKNNSHNFSTGILVFEDGTKFSGNGIGYEGIAVGEVCFNTSITGYQEIITDPSYSDQIINFTFPHIGNVGTNPEDNEAEKAWVKGVVFNSNVTEPSNYRSIKKLDKWLKKRKIVGIVGLDTRVITNYIRDKGAPKGTIQFSRKGKHDLGKLLNKSKSWNGLLGLDLAKKVSCKNIYNWSSLKSWDKKKGYTKNKKNKYKVVAIDYGIKKNILRCFSDINCSVTVVPANYSAEKIIKLRPDGIFLSNGPGDPAATGQYAIPIIKKLITNG

SEQ ID NO: 167776 - protein, 145 aa, Unknown
  Bacterial polypetide isolated from the Sargasso Sea
MDKHQKQAILLLDDGREFYGNSFGHHGEATGEVCFNTGMSGYQEILTDPSYCKQIVTMTSPHIGNYGINKEDIESDNVQVAGFVIKEESEIPSNWRSELSIGKYLDQQKIVGIKDIDTRALTRYIRDNGAMNGIISSIDDDIKSL

SEQ ID NO: 167777 - protein, 279 aa, Unknown
  Bacterial polypetide isolated from the Sargasso Sea
KKQKINSANYHRFYPGILVLENKTVYKGIGIGYEGTATGEVCFNTSLTGYQEIISDPSYAGQIINFTFPHIGNVGTNNEDIESDKIWTKGIILNSEITNPSNYRSLKSLDLWLKKNKIIGLTGLDTRSLTNYIRDNGAPKGTISYNKKGNLNIKKLINNSVKWTGLKGLDLAKTVTTKKKYIWKGFKTWKKEIGYEKNKKKSFKIVAIDYGIKKNILRYFSNFSCEVIVVPCNLEAKEIIKLKPDGIFLSNGPGDPAATGKYAINIIQKLIKTNIPVFG

SEQ ID NO: 167778 - protein, 62 aa, Unknown
  Bacterial polypetide isolated from the Sargasso Sea
EEDSLPKDLTITHKSLFDGTVQGIEHKTLPAFSFQGHPEASPGPHDLKDLFQKFEENMEKHA

SEQ ID NO: 167779 - protein, 46 aa, Unknown
  Bacterial polypetide isolated from the Sargasso Sea
VAGLELVDGSAFSVQYHPEAAAGPHDAAYLFDRFAEAIARRRDGGA

SEQ ID NO: 167780 - protein, 99 aa, Unknown
  Bacterial polypetide isolated from the Sargasso Sea
MSQYNSRKKAFVLLEDGTIFHGKSIGVDGTASGELCFNTGMTGYQEIFTDPSYNGQLMVMANAHIGNYGTNLDEVESDSVKIAGLICKNFSFNFSRYGQ

SEQ ID NO: 167781 - protein, 174 aa, Unknown
  Bacterial polypetide isolated from the Sargasso Sea
MSFKAILAFEDGSVFHGRGFGKEKFDVGELVFNTSMTGYQEIITDPSYKKQIITFTHPHIGNTGINYEDMESSIIHASGIVVKNYCSKPSNWRSKASLEGFLIENEIIGISEVDTREITTLLREKGAMNCCIASSTLITEEEAISAAKDFDGLKGMDLAKVVSTESKYEWNKGI

SEQ ID NO: 167782 - protein, 175 aa, Unknown
  Bacterial polypetide isolated from the Sargasso Sea
MTIKRKKKVPIKSQFCPAILVLENKSIFRGIGLGHQGNATGEICFNTSLTGYQEIISDPSYAGQIINFTFPHIGNVGTNNEDIESEKIWTRGVIFNSEITNPSNYRSLQNLDHWLKKNKIVGITGLDTRSLTNFIRDKGAPKGTISNNKTGNFNISKLINISNKWPGLNGMDLAK

SEQ ID NO: 167783 - protein, 277 aa, Unknown
  Bacterial polypetide isolated from the Sargasso Sea
MIKKVKKTNSKKISEINTGVLVLENKRVFKGIGIGYQGDATGEVCFNTSLTGYQEIISDPSYAGQIINFTFPHIGNVGTNKEDFESDKIWTKGVIINSEITSPSNYRSFQHLDAWLKKHKIVGITGLDTRSLTNFIRDKGAPKGTIAYSKNGKFNLSKLTNSTIKWSGLKNLDLAEKVTTPKNYIWKGLKTWKKEVGYKKNSKNSFHVVAIDYGIKKNILRYFSDFNCKVTVVSCKTSAEKILALKPNGIFLSNGPGDPAATGKYAIKINKDLIKKN

SEQ ID NO: 167784 - protein, 138 aa, Unknown
  Bacterial polypetide isolated from the Sargasso Sea
MVLSNGMFFRGRIHGPFQATGELIFNTSMTGYQEILTDPSYCGQIVTMTAPHIGNYGTNPDDMESSTIHASALVVTQLTQIPSNWRSNKSLSDFLWESKVPVMVGVDTRALVRVLRSDGEVKGLMVPSDSLHTLDLLR

SEQ ID NO: 167785 - protein, 93 aa, Unknown
  Bacterial polypetide isolated from the Sargasso Sea
MTKFSGLLLLEDGTTWDAIGFGHQGFGVGELCFNTAMTGYQEIISDPSYAEQIITFTFPHIGNVGTNKKDNESNKPLATGVITKAKPTTPSNG

SEQ ID NO: 167786 - protein, 123 aa, Unknown
  Bacterial polypetide isolated from the Sargasso Sea
MKKFTGILILDDGSEWLAQGYGFEGSTVGELCFNTAMTGYQEIISDPSYAEQIIVFTFPHIGNTGINNQDNESDQIAAKGIVTRTFPTQPSNWRSKYSLETWLKKHRIVAVHGIDTRSLTRRI

SEQ ID NO: 167787 - protein, 262 aa, Unknown
  Bacterial polypetide isolated from the Sargasso Sea
KFSHLSSGVLVLENKTIFKGIGIGYQGTATGEVCFNTSLTGYQEIISDPSYAGQIINFTFPHIGNVGTNKEDHESDKIWTKGVIFNTEITNPSNYRSLKKLDSWLKKNKIVGITGLDTRSLTNFIRDKGAPKGTISNNNKGIFNLKKLTNSSIKWPGLNGLDLAKIVTTKKKYLWKGFKTWKKDKGFEKNKKKKYKIIAIDYGIKKNILRYFSNFNCEVIVVPCSLEAEDIIKLKPDGVFLSNGPGDPAATGKYAIDIISKL

SEQ ID NO: 167788 - protein, 63 aa, Unknown
  Bacterial polypetide isolated from the Sargasso Sea
VDRSSLPKSVIETYISLFDGSNEGIKHISLPIFSVQYHPEASPGPHDSSYLFEEFYKLVEKNA

SEQ ID NO: 167789 - protein, 289 aa, Unknown
  Bacterial polypetide isolated from the Sargasso Sea
NLQKIDSTAILILQNGKFFKGIGLGYKGTVTGEVCFNTSITGYQEIISDPSYADQIINFTFPHVGNVGTNQEDHESDKIWTKGVIINTEITNPSNYRSLKHLDQWLQKNKIVGITGIDTRNLTNYIRDKGAPKGTISFYNKKKLNIKKLIKMTNKWSGLKNLDLAKQVSTKKNYLWQDYKTWKKENGYLKNKKKLLHVVAIDYGIKKNILRYFSDFNCKVTIVPCKTTAKDILKLNPNGIFLSNGPGDPAATGKYAIPIIQNLIKKKLPLFGICLGHQMLALALGAKTE

SEQ ID NO: 167790 - protein, 45 aa, Unknown
  Bacterial polypetide isolated from the Sargasso Sea
GIRLKNKPVFSVQYHPEANPGPQDSKYLFSNFIKDIKKYAKKKRH

SEQ ID NO: 167791 - protein, 283 aa, Unknown
  Bacterial polypetide isolated from the Sargasso Sea
GEKKAAVCELCFNTSQTGYQEALSDPSYTKQIITFTFPHVGIVGTNQEDQESKKIYADGCVINQPLSEYSNWRAENDLNSYFLKNKIPCIFGLDTRYLTKKLSVEGAKKAAIIHFGEDQNKVEKLKTQINEWKGLQNLDLAGIVSTEQNYNWKKGIWKSDKSIKSKFKYNVTCLDFGIKNNILRNLNEFNLNPTVLNLFSSYEEIIETNPSGIFLSNGPGDPYATGSKIVDVIKKLIDDNIPIFGICLGHQILGLALNAKTKKMFQGHRGSNHPVKNLTTGIV

SEQ ID NO: 167792 - protein, 221 aa, Unknown
  Bacterial polypetide isolated from the Sargasso Sea
MSFKAILAFEDGSVFHGRGFGKEKFDVGELVFNTSMTGYQEIITDPSYKKQIITFTHPHIGNTGINYEDMESNIIHASGIVVKNYCAKPSNWRSKASLEDFLIENEIIGISEVDTREITTLLREKGAMNCCIASSSLITKEEAISAAKDFDGLKGMDLAKEVSTESKYEWNKGIWPQNKKSDESFSVVAYDYGIKENILRLLTEHVGKVHVVNAKTPFEEI

SEQ ID NO: 167793 - protein, 110 aa, Unknown
  Bacterial polypetide isolated from the Sargasso Sea
LGHQILALALNCKTYKLKCGHHGGNHPVMDYQTSKIEITSHNHGFSVNEDSLPEDVRVTHRNLNDQTVEGLESLQYPAYSVQYHPEAAPGPRDARYLFKRFVEMMGNTKR

SEQ ID NO: 167794 - protein, 88 aa, Unknown
  Bacterial polypetide isolated from the Sargasso Sea
MVSNGLLVLSNGMFFRGRIHGPFQATGELIFNTSMTGYQEILTDPSYCGQIVTMTVPHIGNYGTNPDDMESSTIHASALVVTQLTRIP

SEQ ID NO: 167795 - protein, 253 aa, Unknown
  Bacterial polypetide isolated from the Sargasso Sea
FGIGYQGEVTGEVCFNTSLTGYQEIISDPSYAGQIINFTFPHIGNVGTNNEDLESDKIWTRGVIFNSEITNPSNYRSLKHLDGWLKKNKIVGITGLDTRSLTNFIRDKGAPKGTISNNKSGKFNIKKLVKKTTFWPGLNGMDLAKEVSTRKNYTWKGLKTWSKEEGYKKNNKKKFRVIAIDYGIKKNILRYFSNFDCEVKVVSCKESAENLLKLKPHGIFLSNGPGDPAATGKYAIPIVRKLIKSNLPVFGIC

SEQ ID NO: 167796 - protein, 248 aa, Unknown
  Bacterial polypetide isolated from the Sargasso Sea
TGYQETLTDPSYAKQIITFTFPHIGIVGTNNEDLESSKIYAEGCIINQTLEHYSNWRAQDSLNSFLKNNNIPAITGIDTRYLTRKLSLEGAKKAALIHFGEKNQSLEDLQKQLKQWNGLENLDLATLVSTKKFYKWNHGLWKTDFKKESFEHFPIVCLDFGIKQNILRNLKNLNFNSTILPAVTNIKEILSKKPKGIFLSNGPGDPDATIKLILPTIKELINLEIPIFGICLGHQLINLALGAKTKKM

SEQ ID NO: 167797 - protein, 242 aa, Unknown
  Bacterial polypetide isolated from the Sargasso Sea
MKNSVKRNGKNCILLLDDGSYFLGVGSGCFGDFLGEICFNTSITGYQEILTDPSYFNQIINFTFPHIGVVGANFEDYESDRIYASGCIINNPVSTASNFRSKMDFEKWLKINKKVCVSNIDTRALTKRIRNLGACKALIHFPENAFFESISNLKTKLTKFPSMKNLDLASEISTSYIYKWFNQKKLRSFKIHKNFIAVIDFGIKKNILNILSSSKYDVVVFPYNFSLVEIIKMKPAGLFFQM

SEQ ID NO: 167798 - protein, 68 aa, Unknown
  Bacterial polypetide isolated from the Sargasso Sea
NHGFAVDYKTAVSNKSVKISHKHLNDQTVAGLEIKGKDCFSVQYHPEAGPGPNDGNYLFDQFLSKLNQ

SEQ ID NO: 167799 - protein, 279 aa, Unknown
  Bacterial polypetide isolated from the Sargasso Sea
MTTKRKKNNSIKPQFSSAILVLENKSVYRGIGLGYQGEATGEICFNTSLTGYQEIISDPSYAGQIINFTFPHIGNVGTNNEDLESDKIWARGVIFNSEITSPSNYRSLKNLDEWLKKNKIVGITGLDTRSLTNFIRDKGAPKGTISNNKQGNFNIKKLINISTKWPGLNGLDLAKDVTTKKAYTWKGLKTWEKGKGFKKNKKKSLRIVAIDYGIKKNILRYFSNYDCEVKVVSCKQTAEEILKLKPNGIFLSNGPGDPAATGKYAIQTVQKLISSNLPV

SEQ ID NO: 167800 - protein, 59 aa, Unknown
  Bacterial polypetide isolated from the Sargasso Sea
SIPKNVKITHKSLFDGSVEGIEHKNKKIFAVQYHPEASPGPHDSQYLFQKFKRMINSNA

SEQ ID NO: 167801 - protein, 44 aa, Unknown
  Bacterial polypetide isolated from the Sargasso Sea
IKLKNKPVFSVQYHPEANPGPQDSQYLFKNFIQNIKKHAKKKRH

SEQ ID NO: 167802 - protein, 136 aa, Unknown
  Bacterial polypetide isolated from the Sargasso Sea
DAIFRSKGPGDPSAVGYAHKTIEALLPEYPVFGIGLGHQILTHAIGAGTYKLKFGHRGANQPVKNVESEKGSITSQNHGCASDKEQLESMGAIVTEYNLNDQTVTGMRLKESPVYTVQYHPEASPGPNDANHLCRA

SEQ ID NO: 167803 - protein, 160 aa, Unknown
  Bacterial polypetide isolated from the Sargasso Sea
MKKDHATARPKPVEGQLILEDGSHFNGIKIGSPKMEIGEVCFNTSMTGYQEIITDPSYAGQIINFTFPHIGNVGTNLEDNESRKPFAKGIIINCDISDPSNYRSILHLDKWLKKNNVPGICNIDTRLITNRIRSKGAPKGGIIEGPINDKKTALCLKEIK

SEQ ID NO: 167804 - protein, 59 aa, Unknown
  Bacterial polypetide isolated from the Sargasso Sea
LALALNAKTKKMKLGHRGANHPVKNLINNSVEITSQNHGFVVIEKSLTKNIQITHKSLY

SEQ ID NO: 167805 - protein, 224 aa, Unknown
  Bacterial polypetide isolated from the Sargasso Sea
MTTKRKKNNSIKPQFSPAILVLENKSIFKGIGLGYQGNATGEICFNTSLTGYQEIISDPSYAGQIINFTFPHIGNVGTNNEDLESDKIWTRGVIFNSEITSPSNYRSLKNLDEWLKKNKIVGITGLDTRSLTNFIRDKGAPKGTISNNKNGNFNIKKLINISTKWPGLNGLDLAKDVTTTKTYTWKGLKTWEKGKGFKKNKKKLLRIIAIDYGIKKNILRYFSN

SEQ ID NO: 167806 - protein, 53 aa, Unknown
  Bacterial polypetide isolated from the Sargasso Sea
ITHKSLFDKTIDGMKSKDQPLFSVQYHPESSPGPHDSRYLFDEFINLMDKNAS

SEQ ID NO: 167807 - protein, 236 aa, Unknown
  Bacterial polypetide isolated from the Sargasso Sea
DPSYYGQILTFTYPEIGNTGINYEDSESNINVKGIIVRNFSSNNSNWRSKKNFNQWLVEKNIIGLHGIDTRALVKILRSNGSMNGVITSEDKTVESCLKIIHDMPKMEGLNLSKIVSTKQQYLWESHTQTIFDLRKRHIESSKKLKIVAIDFGIKNSILNRLVSHGCEVLVLPSRSSLNDVLSNKPDGIFFSNGPGDPSSISEGIDLAKSLIQYGEIPMFGICLGHQIFGLALGGS

SEQ ID NO: 167808 - protein, 98 aa, Unknown
  Bacterial polypetide isolated from the Sargasso Sea
MSQYNSRKKAFVLLEDGTIFHGKSIGVDGTASGELCFNTGMTGYQEIFTDPSYNGQLMVMANAHIGNYGTNLDEVESDSVKIAGLICKNFSFNFSRYG

SEQ ID NO: 167809 - protein, 167 aa, Unknown
  Bacterial polypetide isolated from the Sargasso Sea
MFNKEKKANSNLLSSQPTGILVFENGLSIPAIGIGHKGHSVGEICFNTSMTGYQEIITDPSYSDQIINFTFPHIGNVGTNFEDIESEKIWLKGVVFAKEITEPSNYRSFEKLNLWLEKNQIVGVAGVDTRAITNLIRNKGALKATIVNGDITDTKKYLEECKNWPGL

SEQ ID NO: 167810 - protein, 73 aa, Unknown
  Bacterial polypetide isolated from the Sargasso Sea
HGFEVDKQSFTKNIIETHKSLFDDTNEGIKHKELPLFSVQYHPESSPGPHDSNYLFDEFKTLIKNNAKKKRYK

SEQ ID NO: 167811 - protein, 49 aa, Unknown
  Bacterial polypetide isolated from the Sargasso Sea
ISLFDGSNEGIKHKNLPIFSVQYHPEASPGPHDSSYLFEEFYKLIDAHA

SEQ ID NO: 167812 - protein, 215 aa, Unknown
  Bacterial polypetide isolated from the Sargasso Sea
MTSKHRNKNSHFSKFNSAILVLENKSIFRGKGLGYQGEVTGEVCFNTSLTGYQEIISDPSYAGQIINFTFPHIGNVGTNNEDIESDKIWTRGVIFNSEITNPSNYRSLQNLDNWLKRNKIVGITGLDTRGLTNFIRDKGAPKGTIANNKNGKFNIRKLIKKSINWPGLKGMDLAKEVTTPKTYTWKGLKTWEKIKGFEKNKKRKFKIVALDFGIK

SEQ ID NO: 167813 - protein, 65 aa, Unknown
  Bacterial polypetide isolated from the Sargasso Sea
IDRSETEKNKHIEISHVHLNDNTVAGIKIKNKKCFSVQYHPEASPGPNDSKYLFDEFIKLIIDKK

SEQ ID NO: 167814 - protein, 57 aa, Unknown
  Bacterial polypetide isolated from the Sargasso Sea
ATGKYAIKIVKELINKNLPLFGNCLGHQILALALGGKTKKMKLGHRGANHPVKNLIH

SEQ ID NO: 167815 - protein, 105 aa, Unknown
  Bacterial polypetide isolated from the Sargasso Sea
MSFKAILAFEDGSVFHGKGFGKEKYDVGELVFNTSMTGYQEIVTDPSYKKQIITFTHPHIGNTGVNKEDNESKTIHASGMVVKNFCEKPSNWRSEATLGEFLKKN

SEQ ID NO: 167816 - protein, 138 aa, Unknown
  Bacterial polypetide isolated from the Sargasso Sea
MSVLDNKTILNYQNGYLIYNKKYIFKGKFLSKDQFKIAEICFNTSMTGYQEILTDPSYKSQFINFTFPLIGIVGCNNEDYESWKIHASGLICNELFESSSNWRAQSNFANWIINQNSCAFFDLDTRAVTKIIRNFGPQ

SEQ ID NO: 167817 - protein, 90 aa, Unknown
  Bacterial polypetide isolated from the Sargasso Sea
MSFKAILAFEDGSVFYGKGFGKEKFDVGELVFNTSMTGYQEIITDPSYKKQIITFTHPHIGNTGINKEDNESKVIHASGMVVKNFCEKPK

SEQ ID NO: 167818 - protein, 86 aa, Unknown
  Bacterial polypetide isolated from the Sargasso Sea
MKNDILSNKATACLALADGTLFFGKGFGSTGETTAELCFNTSITGYQEILTDPSYASQIVTFTFPHIGNVGVNTEDAETQNPAAEG

SEQ ID NO: 167819 - protein, 149 aa, Unknown
  Bacterial polypetide isolated from the Sargasso Sea
MGKFTGILILDDGSEWPAFGYGFQGARIGEICFNTAMTGYQEIISDPSYAEQIIVFTFPHIGNTGTNNQDNESDYPVAKGIITRTIPTQPSNWRSEYSLESWLKKHKIVALYGIDTRSITKRIREFGACNAIIHYKKDGTHDIPALRKS

SEQ ID NO: 167820 - protein, 140 aa, Unknown
  Bacterial polypetide isolated from the Sargasso Sea
MSFKAILAFEDGSVFYGKGFGKEKYDVGELVFNTSMTGYQEIVTDPSYKKQIITFTHPHIGNTGVNNEDNESKTIHASGMVVKNFCDKPSNWRSKATLGEFLKKNEVIGIADVDTREITTILREKGAMNCCIASLSVISD

SEQ ID NO: 167821 - protein, 208 aa, Unknown
  Bacterial polypetide isolated from the Sargasso Sea
MTVLDNKIKLNYQNGYLIYNKNYIFKGKFLSKEEFKIAEICFNTSMTGYQEILTDPSYKSQFINFTFPLIGIVGCNDEDYESWKIHASGLISNELFELSSNWRAQTSFTKWILDQNSCAFYDLDTRSLTKIIRNLGPKNIMLCTENYFKSKNIEEICAQIDQSLSLEENDVIKDFTSELNIKDKETKKKKYSIAFLNFGAKDIILRKI

SEQ ID NO: 167822 - protein, 284 aa, Unknown
  Bacterial polypetide isolated from the Sargasso Sea
MRQTKNKKKNNSYNFSTGILVFEDGTKFFGKGIGYEGSAVGEVCFNTSITGYQEIITDPSYSDQIINFTFPHIGNVGTNPEDNEADKAWVKGVILNCNITEPSNYRSIKKLDIWLKKRKIVGVVNLDTRIITNYIRDKGAPKGIIQFSKKSKHNIKELVKKSKSWRGLLGLDLAKKVTCKTSYTWNSYQSWDKKRGYLKNKKNLFKIIAIDYGIKKNQLRCFSDINCKVIVVPANYSAESIMNFKPDGVFLSNGPGDPAATGKYAIPIIKKLIEYKIPIFGICL

SEQ ID NO: 167823 - protein, 289 aa, Unknown
  Bacterial polypetide isolated from the Sargasso Sea
MNKKQKNKIAIKHQFPTGILVLDNKQVFRGIGLGYQGTATGEICFNTSLTGYQEIISDPSYAGQIINFTFPHIGNVGTNNEDLESDKVWTKGVIFNSEITSPSNYRTLKTLDEWLKKNKIVGLTGLDTRSLTNLIRDKGAPKGTISNDTKGKFNLKKLINMSIKWPGLNGLDLAKEVSTKKTYIWKGFKTWKKEIGYEKNIKTKFRIVAIDYGIKKNILRYFSEYNCEVKVVSCKTDADEIVKLNPDGIFLSNGPGDPAATGEYAICNIKKLIKLNYPNFWNLPWSSKF

SEQ ID NO: 167824 - protein, 144 aa, Unknown
  Bacterial polypetide isolated from the Sargasso Sea
MVNWVSKKPTGALVLSDGTIFKGFGFGAIGRSSGEVCFNTAISGYQEIMTDPSYCSQIITFTFPHIGNVGLNLEDNESSDRPYISGAIFRSLITDPSNWRSEIDLGNWLKDNSIVGIYGIDTRALTNLIREKGLINGTIVHDNN

SEQ ID NO: 167825 - protein, 225 aa, Unknown
  Bacterial polypetide isolated from the Sargasso Sea
MSQYKPRKKAFVLLEDGTIFHGKSIGIDGTAFGELCFNTGMTGYQEIFTDPSYNGQLMVMANAHIGNYGTNLDEVESDSVKIAGLICKNFSFNFSRHGDSTSLFDFLSSNKIVCISDVDTRALVSYIRDNGAMNAVISTESIDTIDKIKKQLSKVPSMNGLELASRVSTNKSYYFGDKNSKYKIAVLDLGVKMNILKNLSKRNAYMKVFPHNTKYEDMKKWNPDA

SEQ ID NO: 167826 - protein, 279 aa, Unknown
  Bacterial polypetide isolated from the Sargasso Sea
MIKKAKKTNSKNSQINTGVLVLENKKVFKGIGIGYQGEATGEVCFNTSLTGYQEIISDPSYAGQIINFTFPHIGNVGTNKEDVESDKIWTRGVIFNSEITSPSNYRAFLHLDAWLKKNKIVGITGLDTRSLTNFIRDKGAPKGTIAYSKNGKFNVSKLTNSTIKWSGLKNLDLAETVTTSKNYIWKGLKTWKKEIGFKKNTKNLFHVVAIDYGIKKNILRYFSDFKCKVTIVSCKTSAEKILDLNPNGIFLSNGPGDPAATGKYAIEILNKLINKNLPI

SEQ ID NO: 167827 - protein, 111 aa, Unknown
  Bacterial polypetide isolated from the Sargasso Sea
MSFKAILAFEDGSVFYGKGFGKEKYDVGELVFNTSMTGYQEIVTDPSYKKQIITFTHPHIGNTGVNEEDNESKTIHASGMVVKNFCDKPSNWRSKATLGEFLIKNEVIGIA

SEQ ID NO: 167828 - protein, 33 aa, Unknown
  Bacterial polypetide isolated from the Sargasso Sea
AFSFQGHPEASPGPHEASELFDHFIELMQQRQA

SEQ ID NO: 167829 - protein, 58 aa, Unknown
  Bacterial polypetide isolated from the Sargasso Sea
IKESKSLELTHVNLNDETVEGIRVKGKKAFSVQYHPESSPGPHDSRYLFDDFINMIKK

SEQ ID NO: 167830 - protein, 183 aa, Unknown
  Bacterial polypetide isolated from the Sargasso Sea
MKNSVKRNGKNCILLLDDGSHFLGVGSGCFGDFLGEICFNTSITGYQEILTDPSYFNQIINFTFPHIGVVGANFEDYESDKIYASGCIINNPVSAASNFRSNMDFEKWLKLNKKVCVSNIDTRALTKRIRNLGACKALIHFPKDSYFENMKNLKTKLMKFPSMKNLDLASEISTSYIYKWFNK

SEQ ID NO: 167831 - protein, 279 aa, Unknown
  Bacterial polypetide isolated from the Sargasso Sea
MNKKQKVNSTKFSNLSSGVLVLENKTIFKGIGIGYQGTATGEVCFNTSLTGYQEIISDPSYAGQIINFTFPHIGNVGTNKEDHESDKIWTKGVIFNTEITNPSNYRSLKKLDKWLKKNKIVGITGLDTRSLTNFIRDKGAPKGTISNNNKGIFNLKKLTNNSIKWPGLNGLDLAKTVTTKKIYIWKGFKTWKKEKGFEKNKKKKYKIVAIDYGIKKNILRYFSNFNCQVIVVPCNFGVQDILKLKPDGIFLSNGPGDPAATGKYAIEIIQKLIKTNIPI

SEQ ID NO: 167832 - protein, 64 aa, Unknown
  Bacterial polypetide isolated from the Sargasso Sea
SLPKNVIITHKSLFDGSIEGIRLKNKPAFSVQYHPEANPGPQDSQYLFDQFIKEIKKHAKKKRH

SEQ ID NO: 167833 - protein, 51 aa, Unknown
  Bacterial polypetide isolated from the Sargasso Sea
THKSLFDGTVQGIEHTSKPFFSFQGHPEASPGPHDLKYLFDRFEDNMKKNA

SEQ ID NO: 167834 - protein, 36 aa, Unknown
  Bacterial polypetide isolated from the Sargasso Sea
VFGIQYHPEASPGPHDADHHFGRFVALMADRRDVGG

SEQ ID NO: 167835 - protein, 129 aa, Unknown
  Bacterial polypetide isolated from the Sargasso Sea
MPNIKAIIESGIPVLGICLGHQLIAKSLGVETFKLPFGHRGGNQPVKDIKKNRVYVTAQNHGYAVSSIDNHEYLEVTHINMNDGTVSGLMHKKLPVFSIQYHSEASPGPKDSEYIFDEFIKKIKEIKDK

SEQ ID NO: 167836 - protein, 237 aa, Unknown
  Bacterial polypetide isolated from the Sargasso Sea
MPFPAILVLEDGTVIEGTGFGATEPSVGEIVFNTSMSGYQEIITDPSYAKQIIAFTHPHIGNTGINNEDNESDSIFASGIVIKDLPDHFSNWRATQSLNSFLESNEIIGISNIDTRELTSKLRDHGSLKACIAPGDQDSLSIAQEAMDKFSGLEGLDLAKEVSTKNSYSWDEGTWPNYQEVKNEQLIVAVDFGIKRNILRLLRKHVGKVQVVNAEISFDELMDLKPDGVFLSNGPGD

SEQ ID NO: 167837 - protein, 86 aa, Unknown
  Bacterial polypetide isolated from the Sargasso Sea
KNLIKGNVEITSQNHGFEIVKNNLPKNIQITHQSLFDNSIEGIRLKSKPVFSVQYHPESNPGPQDSVYLFKEFVTCMKKNAKKKRY

SEQ ID NO: 167838 - protein, 275 aa, Unknown
  Bacterial polypetide isolated from the Sargasso Sea
MIKKVKKTHLKNSQNYTGILVLENKRLFKGIGIGYQGEATGEVCFNTSLTGYQEIMSDPSYAGQIINFTFPHIGNVGTNKEDFEADKIWTKGVIFNSEITSPSNYRSFQHLDAWLKKNKIVGITGLDTRSLTNFIRDKGAPKGTIAYSKKGKFNVNKLTNSTIKWSGLKNLDLAKKVTTQKNYIWKGLKTWKKEHGYRKNKRNSFHVVAIDYGIKKNILRYFSDFNCKVTVVPCKTSAERILALKPNGVFLSNGPGDPAATGKYAVKIIQNLVKK

SEQ ID NO: 167839 - protein, 93 aa, Unknown
  Bacterial polypetide isolated from the Sargasso Sea
MKMPFGHHGANHPVHDLGTNEVFITSQNHNFAVEEPINNDSIKITHKSLFDRTIQGLAHKEKPFYSIQCHPEASPGPKEFEVLFRKFFKEMNA

SEQ ID NO: 167840 - protein, 132 aa, Unknown
  Bacterial polypetide isolated from the Sargasso Sea
MSFKAILAFEDGSVFHGKGFGKEKYDVGELVFNTSMTGYQEIVTDPSYKKQIITFTHPHIGNTGINKEDNESKTIHASGMVVKNFCDKPSNWRSKSTLGEFLKKNEVIGISDVDTREITTILREKGAMNCCI

SEQ ID NO: 167841 - protein, 277 aa, Unknown
  Bacterial polypetide isolated from the Sargasso Sea
MENGEVLWGYGLGVKKAIVGELCFNTSQTGYQEALTDPSYTKQIITFTFPHIGIVGTNSEDQESNKIYADGCIINQPTNFYSNWRADNDLNTYFINNNIPCLYGVDTRYLTKKLAADGAMKAALIHFGKTKESLDNFKNEISNWSGLEHLDLASVVSTDEKYEWNEATWLNKNSNNFKKKYNVTCLDFGIKHNILRNLHEYNLNPTVLNLSSSFEEILNTKPDGIFLSNGPGDPFATGEKIIKTLKKLIENEIPIFGICLGHQILSMALGAKTKKMF

SEQ ID NO: 167842 - protein, 120 aa, Unknown
  Bacterial polypetide isolated from the Sargasso Sea
PVLGICLGHQLIAKSLGASTFKLPYGHRGGNQPVKDISTNKVYVTAQNHGYAVSDDKIPDQLEITHLNLNDGTISGLCHKTLPVFSIQYHSEASPGPKDSEYIFDQFIEKIISRKKKNEK

SEQ ID NO: 167843 - protein, 91 aa, Unknown
  Bacterial polypetide isolated from the Sargasso Sea
HPVKDLLTSKVEITSQNHGFEVDEKSIPKSVKVTHKSLFDGSIEGIEVKSKKLFSVQYHPEANPGPQDSKYLFEKFLNNIKMKKNAKKKRY

SEQ ID NO: 167844 - protein, 79 aa, Unknown
  Bacterial polypetide isolated from the Sargasso Sea
KVVYITSQNHGFAVDSSSLPKNIEPTHISLFDKSLQGITFKDKPAFSFQGHPEASPGPHELEELFTKFNLMIESYAKKN

SEQ ID NO: 167845 - protein, 123 aa, Unknown
  Bacterial polypetide isolated from the Sargasso Sea
MSFKAILAFEDGSVFHGKGFGKEKYDVGELVFNTSMTGYQEIITDPSYKKQIITFTHPHIGNTGINEEDNESKTIHASGMVVKNFCDKPSNWRSKATLGEFLEKNEVIGISGVDTREITTILR

SEQ ID NO: 167846 - protein, 93 aa, Unknown
  Bacterial polypetide isolated from the Sargasso Sea
MTTKRKKKNSIKPQFSPAILVLENKSIFKGIGLGYQGNATGEICFNTSLTGYQEIISDPSYAGQIINFTFPHIGNVGTNNEDLESNKIWTRGV

SEQ ID NO: 167847 - protein, 308 aa, Unknown
  Bacterial polypetide isolated from the Sargasso Sea
RSSKEVVSLLSHRDVHARLAWLEARQPVAVTPFSLRSGWRANMSEHEYGQKFARVQAYLHSGDCYQVNLAQRFQASYSGDEWQAFTRLNASNRAPFSAFLRLEDGAILSLSPERFIHLAEGNIQTRPIKGTLARLPDPEADRLQGQTLAASTKDRAENLMIVDLMRNDIGRVAEPGSVRVPELFVVEPFPAVHHLVSTITARLPPHRTACDLLRAAFPGGSITGAPKVRAMEIIDELEPHRRNAWCGSIGYLSLCGTMDTSITIRTLTASNGTLYCSAGGGIVADSNVQAEYQETFDKVNRILQQLEN

SEQ ID NO: 167848 - protein, 83 aa, Unknown
  Bacterial polypetide isolated from the Sargasso Sea
MSVFFKKILVANRGEIACRIIKTAHHMGIKVVAIYSDADKNAKHVRMADEAVHIGPPQSAQSYLLIDKIIDAAKLTSAEAIHP

SEQ ID NO: 167849 - protein, 41 aa, Unknown
  Bacterial polypetide isolated from the Sargasso Sea
MFKKILVANRGEIAVRVIRACKEWGIQTVAIHSDVDRNSMH

SEQ ID NO: 167850 - protein, 99 aa, Unknown
  Bacterial polypetide isolated from the Sargasso Sea
MFKKILVANRGEIAVRIIRACKEWGISTVAVHSDVDIDSMHVRLADESICIGAHQPQNSYLNIAAIMSAADVTGAEAFILAMDFYLRMPNLQKLLTNME

SEQ ID NO: 167851 - protein, 78 aa, Unknown
  Bacterial polypetide isolated from the Sargasso Sea
MFKKILVANRGEIAVRVIRACKEWGIQTVAIHSDVDRNSMHVRLADESICVGPHQAASSYLNIPAIMSAIELTNSEAV

SEQ ID NO: 167852 - protein, 320 aa, Unknown
  Bacterial polypetide isolated from the Sargasso Sea
MFKKILVANRGEIAVRIIRACKEWGIATVAIHSDVDKNSMHVRLADESVCVGTHQPANSYLNIPSIMSAIELTNADAVHPGYGFLSENAEFAKILEDYKIKFIGPSSKLIKMMGDKIQAKIIAKKYGLPVIEGSEGGVSDINEAKKIIKNIGFPVLIKAAGGGGGKGMKIVNKEEEFENLFLTAKLEAKKFFGNDEVYIEKFFQNPRHIEVQVLSGKNRTVHLHERDCSVQRRHQKLVEETPSPILNNELRQDLFSKTVKMVSQIGYEGAGTVEFIYENNRFYFLEMNTRVQVEHPVTEMVTGIENIKEQINIAFTGETA

SEQ ID NO: 167853 - protein, 147 aa, Unknown
  Bacterial polypetide isolated from the Sargasso Sea
MFKKILVANRGEIALRIQRACSELGIKAVMVYSEADRDAKYVKLAEEAVCIGPAPSPLSYLNMPAIISAAEVTDAEAIHPGYGFLSENADFAERVEKSGFQFIGPTPESIRIMGDKVSAKQAMIRAGVPCVPGSEGELPDDPVQIRR

SEQ ID NO: 167854 - protein, 130 aa, Unknown
  Bacterial polypetide isolated from the Sargasso Sea
MFKKILVANRGEIAVRIIRACKELNIKTVAIHSNVDTEAMHVKLADESVCVGSALPNESYLNIPSIISAIDITGADAVHPGYGFLSENDKFAKILSSHKVKFIGPTSKSILELGNKSNALKLASNFKLPI

SEQ ID NO: 167855 - protein, 120 aa, Unknown
  Bacterial polypetide isolated from the Sargasso Sea
MFKKILVANRGEIALRVIRTCKEMGIKTVAVYSKADEESLHVRFADEAVCIGPAPSSESYLKIPNIIAAAEITNADAIHPGYGFLSENAKFSKICGEHKIKFIGPSPEMMKKWEIRLLLF

SEQ ID NO: 167856 - protein, 206 aa, Unknown
  Bacterial polypetide isolated from the Sargasso Sea
MFKKILVANRGEIAVRIIRACKEWGIQTVAIHSDVDRNSMHVRLADESICVGPHQAANSYLNIPAIMSAIELTNSEAVHPGYGFLSENFEFAKILEENKIKFIGPSSSLIKMMGDKIEAKKIAKKYGLPVIEGSEGGVTDFAEAKKICNQIGYPVLIKAAGGGGGKGMKVVTKEDEFENLFLTAKTEAKKFFGNDEVYIEKFFQKS

SEQ ID NO: 167857 - protein, 282 aa, Unknown
  Bacterial polypetide isolated from the Sargasso Sea
MFKKILVANRGEIAVRVIRACKEWGIQTVAIHSDVDRNSMHVRLADESICVGPHQAANSYLNIPAIMSAIELTNSEAVHPGYGFLSENYEFAKILEQNKIKFIGPSSSLIKMMGDKIEAKKIAKKYGLPVIEGSDGGVSDFDEAKKICKEIGYPVLIKAAGGGGGKGMKVVTKEDEFENLFLTAKTEAKKFFGNDEVYIEKFFQNPRHIEVQVLSGKNRTVHLHERDCSIQRRHQKLIEETPSPLLNDQIRKDLFEKTVKMGKSNWDMKGGGYSRIYFLKMG

SEQ ID NO: 167858 - protein, 167 aa, Unknown
  Bacterial polypetide isolated from the Sargasso Sea
MFNKILVANRGEIALRVIRACREMGIKSVAVHSTADSDAMHVRMADESVCIGPAVGTSSYLSMPAIIAACEITGAEAIHPGYGFLSENAKFVQIVEDHGIKFIGPTAEHIRIMGDKITAKDTMRELGVPCVPGSDGGVHDIDTAKKIGADIGYPVIIKATAGGGGRG

SEQ ID NO: 167859 - protein, 128 aa, Unknown
  Bacterial polypetide isolated from the Sargasso Sea
MFKKILVANRGEIAVRIIRACKELSIPSVAVHSDVDFESMHVRLADESICIGSHKPQNSYLNIAAIMSAIDVTGADAIHPGYGFLSENHRFAEIVTKNKIKFIGPSAEIMKKMGDKIEAKRTAKKLGL

SEQ ID NO: 167860 - protein, 99 aa, Unknown
  Bacterial polypetide isolated from the Sargasso Sea
MFKKILVANRGEIAVRVIRACKEWGIQTVAIHSDVDRNSMHVRLADESICVGPHQAENSYLNIPAIMSAIELTNSEAVHPGYGFLSENYEFAKILNRTK

SEQ ID NO: 167861 - protein, 258 aa, Unknown
  Bacterial polypetide isolated from the Sargasso Sea
MFKKILVANRGEIAVRIIRACKELNIKTVAIHSNVDTEAMHVKLADESICVGSALPNGSYLNIPSIISAIDITGADAVHPGYGFLSENDKFSKILSSHKVKFIGPSSKSILDLGNKSNALSLANEFGLPILGNKNSKDIKNTSDAVKIAENIGMPIVIKAAYGGGGKGMRVFYNKTEIDKFFSQLKAEAKNYFGDDTMYAEKFLTNAKHIEFQVISDPKNNYVEIIGQRDCSIQRKNQKIIEEIPSDFVHIKNLEKIE

SEQ ID NO: 167862 - protein, 117 aa, Unknown
  Bacterial polypetide isolated from the Sargasso Sea
MFKKILVANRGEIAVRVIRACKEWGIQTVAIHSDVDRNSMHVRLADESICVGPHQAVNSYLNIPAIMSAIELTNSEAVHPGYGFLSENYEFAKILEQNKIKFIGPSSSLIKMMGDKI

SEQ ID NO: 167863 - protein, 123 aa, Unknown
  Bacterial polypetide isolated from the Sargasso Sea
MILFGKILVANRGEIACRIMNTAQRLGIKTVAIYSEVDVDAKHVNMADESICIGPGPSSESYLVIDGVLEAAQKMGADAIHPGYGFLSENNIFAQRVCDAGLVFVGPSPDSLRQWVTKLAPKN

SEQ ID NO: 167864 - protein, 445 aa, Unknown
  Bacterial polypetide isolated from the Sargasso Sea
MFKKILVANRGEIAVRVIRACKEWGIQTVAIHSDVDRNSMHVRLADESICVGPHQAANSYLNIPAIMSAIELTNSEAVHPGYGFLSENYEFAKILEQNKIKFIGPSSSLIKMMGDKIEAKKIAKKYGLPVIEGSEGGVSDFNEAKKICKQIGYPVLIKAAGGGGGKGMKIVKKEDEFENLFLTAKTEAKKFFGNDEVYIEKYFQNPRHIEVQVLSGKNRTVHLHERDCSIQRRHQKLIEETPSPLLNDQIRNELFDKTVKMVSQIGYEGAGTVEFIFEGGKFYFLEMNTRIQVEHPVTEVVTGIDLIKEQIWIAYDGNTALKQEDIKPRGHAIECRINAEDVSKNFQPSPGEITMCHQPSGFRTRVDGAIFQGYRVTPYYDSMICKVICHGRNRTEAIQRMRRSLDEFVIEGIKTTIDLHKILLNHKKFLDSDFNVSWLDKEKLL

SEQ ID NO: 167865 - protein, 445 aa, Unknown
  Bacterial polypetide isolated from the Sargasso Sea
MFKKILVANRGEIAVRVIRACKEWGIQTVAIHSDVDRNSMHVRLADESICVGPHQAANSYLNIPAIMSAIELTNSEAVHPGYGFLSENYEFAKILEQNKIKFIGPSSSLIKMMGDKIEAKKIAKKYGLPVIEGSDGGVSDFNEAKKICKQIGYPVLIKAAGGGGGKGMKVVRKEDEFESLFLTAKTEAKKFFGNDEVYIEKFFQNPRHIEVQVLSGKNRTVHLHERDCSIQRRHQKLIEETPSPLLNDQIRNDLFDKTVKMVSQIGYEGAGTVEFIFEDEKFYFLEMNTRIQVEHPVTEVVTGIDLIKEQIWIAYDGNTALKQEDIKPRGHAIECRINAEDVSKNFQPSPGEITMCHQPSGFRTRVDGSIFQGYKVTPYYDSMICKVICHGRNRTEAIQRMRRSLDEFVIEGIKTTIDLHKILLNHEKFLNSDFNVSWLDKEKLL

SEQ ID NO: 167866 - protein, 361 aa, Unknown
  Bacterial polypetide isolated from the Sargasso Sea
MFNKILVANRGEIALRVIRACREMGIKSVAVHSTADSDAMHVRMADESVCIGPAAGTSSYLSMPAIIAACEITGAEAIHPGYGFLSENAKFVQIVEDHGIKFIGPTAEHIRIMGDKITAKDTMRKLGVPCVPGSDGSVPNLDTAKKIGLDIGYPVIIKATAGGGGRGMKVANSEADMEQAFMTARAEGKAAFGNHEVYIEKYLTTPRHIEIQVFGDGKGQAVHLGERDCSLQRRHQKVFEEAPGPCISSEERERIGATCAEAVAKINYIGAGTIEFLYENGEFYFIEMNTRLQVEHPITESIFGVDIVREQIRVAAGLEMTFIQENLSIKGHSIEVRINAEKIPSFAPCPGKITAYHAPGG

SEQ ID NO: 167867 - protein, 385 aa, Unknown
  Bacterial polypetide isolated from the Sargasso Sea
MFKKILVANRGEIAVRVIRACKEWGIQTVAIHSDVDRNSMHVRLADESICVGPHQAASSYLNIPAIMSAIELTNSEAVHPGYGFLSENYEFAKILEENKIKFIGPSSSLIKMMGDKIEAKKIAKKYGLPVIEGSDGSVSDFNEAKKICKEIGYPVLIKAAGGGGGKGMKVVKKEDEFESLFLTAKTEAKKFFGNDEVYIEKFFQNPRHIEVQILSGKNRTVHLHERDCSIQRRHQKLIEETPSPLLNDKIRNDLFDKTVKMVSQIGYEGAGTVEFIFEDGKFYFLEMNTRIQVEHPVTEVVTGIDLIKEQIWIAYDGNTALKQEDIKPRGHAIECRINAEDVSKNFQPSPGEITMCHQPSGFRTRVDGAIFQGYKVTPYYDSMIL

SEQ ID NO: 167868 - protein, 323 aa, Unknown
  Bacterial polypetide isolated from the Sargasso Sea
MFKKILVANRGEIALRVIRTCKEMGIKTVAVYSKADEESLHVRFADEAVCIGPAPSSESYLKIPNIIAAAEITNADAIHPGYGFLSENAKFSKICGEHKIKFIGPSPEMIEKMGDKATAVSTMNLAKVPTIPGSGGAVENEDEALKIASKIGYPVMVKASAGGGGKGMRAVWNKADFKKNWSSAKQEASAAFGNDDMYIEKLIQEPRHIEIQIIADQFGNVCHLSERDCSIQRRHQKLTEETPSPFMTSKLRDKMGKAAVKAAKFINYEGVGTVEFLVDKDRNFYFMEMNTRIQVEHPITEQVIDYDLIKEQIKVAAGVKVSG

SEQ ID NO: 167869 - protein, 224 aa, Unknown
  Bacterial polypetide isolated from the Sargasso Sea
MDFLDFEKPIVELERRIEELRLTNTDADTAIELDDEIERLQKKCESLTKKIFGNLNEWQIAQLARHPLRPKSIQVIDAISEDFQELHGDRMYADDSAIISGLAKINNQSVMFIAQEKGSNTNEKMKRNFGMPRPEGYRKAQRMMKLAEKFKIPIVTIIDTPGAFPGIGAEERGQSEAIARNLFTLASLKTPIINLVLGEGGSGGALAIGMGDKLIMLEYSIYSV

SEQ ID NO: 167870 - protein, 229 aa, Unknown
  Bacterial polypetide isolated from the Sargasso Sea
VKEYFEILFDDGFKELNPNMSSIDFLKFKDQKKYSDRLKEATNKTKLKDSIRVGYGKSFGKNLVIACMDFKFIGGSMGSVVGEKISEAITFAIKNNYPLLIISKSGGARMMESATSLMQMAKTSARLNDLSEAGLPYISLCTDPTTGGTTASFAMLGDINIAEPRALIAFAGPRVVKDTTGKDLPEGFQKSEFLLEKGFLDFIAHRKELKKKINLYIDLIQNSPLRKYE

SEQ ID NO: 167871 - protein, 288 aa, Unknown
  Bacterial polypetide isolated from the Sargasso Sea
KLLDTQLAECIELGEKSDIDVSETCSQIRSRLKSTIREIYGNLTPWQKVQISRHPDRPYTLDYINNILGDSFLELHGDRNFKDDKAMIGGLGKIGDQSFMFIGQQKGHNTKDRQYRNFGMANPEGYRKALRLMKMAEKYNIPVVTLIDTPGAYPGLEAEERGQGEAIARNILEMTRLKVPIITVIIGEGASGGALGIGVGDTVLMLENTWYSVISPESCSSILWRSWEYKEIAASALKLTAKDMKKMNLVDKVIKEPEGGAHRNQLKTFEVVKTKYINSIRRAFQTFV

SEQ ID NO: 167872 - protein, 226 aa, Unknown
  Bacterial polypetide isolated from the Sargasso Sea
MDWFKRKDKKIKEKNKKAIPDGLWEKCPSCSEILFKPELDKNLSVCRHCNYHFRMNFHNYIDLLIDGGSFTQLFTDIKSSNFLHFTAKRNYNDQLKDAYEKSGITDAIEIYKGKIKEKSVIMGIMNFDFIGGSMGSVVGEAVSRAIVYARQKKIPLIIICKSGGARMQEGAISLMQLAKTSSQLAKFSNDGGLYISILTDPTTGGVTASYGMLGDIILAEPGALIG

SEQ ID NO: 167873 - protein, 184 aa, Unknown
  Bacterial polypetide isolated from the Sargasso Sea
MSWLDKILPSRIRATKDDKGSVPEGLWHKCSNCGAVLYTAEFDKNSHVCPKCNHHERISARKRVNIFLDNGDHEEMFNNLSPRDMLNFKDKQKYQDKFKQSQEKTGEKDALLVFKGNLKNIPVIVCAFEYSFFGGSMGSVVGEKFIRAVKLSIELNRPLICFSASGGARMQESLFSLFQMSKTS

SEQ ID NO: 167874 - protein, 174 aa, Unknown
  Bacterial polypetide isolated from the Sargasso Sea
LTFIDTPGAYAGLEAEEQGQGEAIAVNLREMFRLRVPVIATVIGEGGSGGALGIGVADRLLMFEHSVYTVASPEACASILWRDAAKAPDAAAALRITGRDLLELGVVDEVLEEPSGGNNWAPLEAGENLRAAIERHLDQLLSLSEHQLREARYSKFRAMGRFLEKTSQDVDKAA

SEQ ID NO: 167875 - protein, 215 aa, Unknown
  Bacterial polypetide isolated from the Sargasso Sea
YGGSFQELATKIITKDILKFKDTKSYGQRIKEAATTTGEEEAIIIGKGKLEGAEIVVAAFEFRYMGGSMGGAVGTKFVQGVDEAIANKVPFICFSTSGGARMQESMVSLMQMAKTSAALEKLKEAKLPYISVMIDPIYGGVSASIAMLGDINIAEPDALVGFAGRRVIEQTVRVDLPKDFQKSEFLLEHGAIDMIVHRHDLRLKISSILSKLYPQ

SEQ ID NO: 167876 - protein, 192 aa, Unknown
  Bacterial polypetide isolated from the Sargasso Sea
KPYAKRIVSEQKRTGLSDAALTGTGMIRARRVACGVTDSSFIMGSMGSVVGERLARLVERATTESLPLIIISASGGGARMHEGILSLMQMAKVSAALARYSESGGLFISVLTNPTMGGVAASFASLGDLVFAEPRALIGFAGPRTIKATIRVELPAGFQTSEFLLEHGFIDRIICRQNLKSEIARAIDYCGG

SEQ ID NO: 167877 - protein, 179 aa, Unknown
  Bacterial polypetide isolated from the Sargasso Sea
TVTDDAVVISQGNLGSIPVTCIVQDFAFMGGSLGVAAGEAIIKAMDEALRLSSPVILFSAAGGARMQEGILSLMQMPRTTIAVQKLNEARIPYIVVLTNPTTGGVTASYAMLGDIHIAEPGALIGFAGPRVIEQTIKEKLPEGFQRSEYLLEHGMIDMVVHRHDLRSKLITICKHLLNK

SEQ ID NO: 167878 - protein, 143 aa, Unknown
  Bacterial polypetide isolated from the Sargasso Sea
AVGGAIVKGAKIAVEKKLPFIIFTASGGARMQEGIISLMQMPRTVAAVDLLNQNQIPYIVVLTEPTTGGVTASFAMLGDITLAEKGSTIGFAGKRVIQDTIREELPIDFQKAEYLKEHGMIDIVCHRKDLKNTLNKILIHIHS

SEQ ID NO: 167879 - protein, 277 aa, Unknown
  Bacterial polypetide isolated from the Sargasso Sea
MAWFKRKDKNLKDSDKKVIPDGLWDKCPSCNEIIYRPELEKKLSVCHHCNHHFRVSPALYVELLLDKGTSTRHFQNIVPHDFLGFNANKAYKDQIIEAITKTGESDAVNVYDGNINDHQVVLGVMNFKFIGGSMGSVVGEIVARALIMAGEKNVPFILICSSGGARMQEGAISLMQLAKTSTRLAKFSNDGGLFIPILTDPTTGGVTASYGMLGDVILAEPGALIGFAGPRVIKQTIGQDLPKGFQRSEFLLEKGFIDCIVDRSNMKEKLSTLNFIL

SEQ ID NO: 167880 - protein, 240 aa, Unknown
  Bacterial polypetide isolated from the Sargasso Sea
MENQYVTPKDSYHVRIGSKEYFEIIFDENKIEYIADDLKPKDKLKFEDKKKYSDRIVATQKKTGLNDSMRAAYGTTSGHPIVVACMDFSFIGGSMGNVMGEKIARSVEMAIEKKCPFMLISKSGGARMMEAGISLMQMAKASAKLTQLSAEKLPYISYLTDPTTGGVTASFAMLGDLNISEPGALIGFAGPRVIKETIGRDLPEGFQTSEFLLEKGFLDFIVDRRNLKNKLSQLIEMFKN

SEQ ID NO: 167881 - protein, 148 aa, Unknown
  Bacterial polypetide isolated from the Sargasso Sea
MGGAVGTKFVKGVDEAIASKVPFVCFSTSGGARMQESMVSLMQMAKTSAALEKLKEVKLPYISVMIDPIYGGVSASIAMLGDINIAEPNALVGFAGRRVIEQTVRVDLPEDFQKSEFLLEHGAIDMIVHRKDLRSKVSSILSKLYPQQ

SEQ ID NO: 167882 - protein, 163 aa, Unknown
  Bacterial polypetide isolated from the Sargasso Sea
IITFIDTPGAYPGVGAEERGQSEAIARNLKVMAGLKVPVLCTVIGEGGSGGALAIGVGDQVNMLQYSTYSVISPEGCASILWKSADKAPIAADAMGITAPRLKELNLIDDIVSEPLGGAHRNHEQMAQSLKQALLRDLAKLEKLSLEELLDRRYKRLMSFGYC

SEQ ID NO: 167883 - protein, 214 aa, Unknown
  Bacterial polypetide isolated from the Sargasso Sea
QQKGRDTKENVARNFGMAKPGGYRKALRLMDHADRFNLPIICFIDTPGAYAGLIAEEQGQGEAIAVNLREMFRLKVPIIATVIGEGGSGGALGIGVADRLLMFEHSVYTVASPEACASILWRDAGKAPEAASALKITGPDLMKLGIVDEVLKEPSGGNNWAPLQAGDTLKNALEKHLSELLALSTTELRDNRYSKFRKMGKYLESQSIESEISV

SEQ ID NO: 167884 - protein, 167 aa, Unknown
  Bacterial polypetide isolated from the Sargasso Sea
LGEVEKRKVILCIMNFKFIGGSMGSAVGEKISKAISLASEKNCPIIILCQSGGARMQEGALSLMQLSKISTHLAKFSKKGGLYISILTYPTTGGVTASFGMQADVTIAEPKALIGFAGQRVIKQTTSQELPDHFQTSEFLKEKGFIDFVVDRKNLKNSISKVLDILA

SEQ ID NO: 167885 - protein, 97 aa, Unknown
  Bacterial polypetide isolated from the Sargasso Sea
MGGIGSINNRPVLMLGHQKGRDTKENVVRNFGMAKPGGYRKALRLMQHANRFSLPILTFIDTPGAYAGLKLKNRSRGSDCRNLREMFGLKVPLWLLL

SEQ ID NO: 167886 - protein, 217 aa, Unknown
  Bacterial polypetide isolated from the Sargasso Sea
MAWFKRKDKKLKDPEKKSIPDGLWDKCPSCNEIIYRPELEKKLSVCHHCNHHFRVLPDTYVSLLLDEGTFKSYFDDLMPKDFLDFKANKGYQDQINAAKTKTGENDAIRVYEGKMNGNDVILSIMNFSFIGGSMGSVVGEAVSRAIVMAGEKKLPFILICSSGGARMQEGAISLMQLAKTSTQLAKFSKNGGLFIPILTDPTTGGVTASFGMLGDVI

SEQ ID NO: 167887 - protein, 303 aa, Unknown
  Bacterial polypetide isolated from the Sargasso Sea
RIEELRLTNTDADTAIELDDEIERLQKKCESLTKKIFGSLSEWQIAQLARHPLRPKSIQVIDAISEDFQELHGDRMYADDSAIISGLAKINNQSVMFIAQEKGSNTNEKMKRNFGMPRPEGYRKAQRMMKLAEKFKIPIVTIIDTPGAFPGIGAEERGQSEAIARNLFTLASLKTPIINLVLGEGGSGGALAIGMGDKLIMLEYSIYSVISPEACSSILWRTPNETETAAEAMGISSSRLNKLGLVDEIIDEPLGGFHRNPEKTFTSIKESIANALQALKSEDPETLLDQRRARYKAIGEFNE

SEQ ID NO: 167888 - protein, 126 aa, Unknown
  Bacterial polypetide isolated from the Sargasso Sea
NCPIIILCQSGGARMQEGALSLMQLSKISTHLAKFSKKGGLYISILTYPTTGGVTASFGMQADVTIAEPKALIGFAGQRVIKQTTSQELPDHFQTSEFLKKKGFIDFVVDRKNLKNSISKVLDVLA

SEQ ID NO: 167889 - protein, 203 aa, Unknown
  Bacterial polypetide isolated from the Sargasso Sea
MAWFKRKSKKIQTSTEEKKDIPAGLWYKTPTGEIIDTKELTDNQYVSPEDDYHVHIGSQEYFEILFDNNKFTEIDSKVNPVDFLNFIDTKKYSDRIKEAQSKTGLKDAIRVGYGKSYGKEIVIACMDFKFIGGSMGSVVGEKIVRAIDYSIKKKAPLLIISKSGGARMMESATSLMQMAKTAAKLNELSESKIPYVSLCTDPT

SEQ ID NO: 167890 - protein, 272 aa, Unknown
  Bacterial polypetide isolated from the Sargasso Sea
TKKIFGSLSEWQIAQLARHPLRPKSIQVIDAISEDFQELHGDRMYADDSAIISGLAKINNQSVMFIAQEKGGNTNEKMKRNFGMPRPEGYRKAQRMMKLAEKFKIPIVTIIDTPGAFPGIGAEERGQSEAIARNLFTLASLKTPIINLVLGEGGSGGALAIGMGDKLIMLEYSIYSVISPEACSSILWRTPNETETAAEAMGISSSRLNKLGLVDEIIDEPLGGFHRNPEKTFTSIKESIANALQTLKSEDPETLLDQRRARYKAIGEFNEN

SEQ ID NO: 167891 - protein, 254 aa, Unknown
  Bacterial polypetide isolated from the Sargasso Sea
HHMPISPRARFKNLFDGGVFVEIDVPKPIIDPLQFKDQKKYPDRMKAAQKKSSEKEAMLVAEGEIGRTPIVAAAQDFSFMGGSMGMYVGNAIITAAQRAVELNRPLILFSAAGGARMQEGILSLMQMPRTTVAIQLLKEAKLPYIVILTHPTTGGVTASYAMLGDVQISEPNALICFAGPRVIEQTIREKLPEGFQRAEYLLDHGMLDLVTPRTEIRNTLIKITRILLGLGPVVVGDLPKPSQDSSSEEIEEKI

SEQ ID NO: 167892 - protein, 218 aa, Unknown
  Bacterial polypetide isolated from the Sargasso Sea
IDLLFDEGSAKQLFSDLKSRNFLEFYAKQDYGDQLKDAYEKSGITDAIEIFTGKIYEQPVIMGVMNFEFIGGSMGSVVGEAVSRAIVYARKNKLPLIIICKSGGARMQEGAISLMQLAKTSAQLAKFSNDGGLYISILTDPTTGGVTASFGMLGDIILAEPGALIGFAGPRVIKQTIGQDLPKGFQRSEFLKEKGFIDQIVSRHKMKDKLYSIINILN

SEQ ID NO: 167893 - protein, 173 aa, Unknown
  Bacterial polypetide isolated from the Sargasso Sea
MKMAERFNLPIITFIDTPGAYPGVGAEERGQSEAIAKNLFEMAELTVPIVCTVIGEGGSGGALAIGVGDRVNMLQYSTYSVISPEGCASILWKSAEKAPLAAEAMGVSAPQIKELGLINSIVEEPLGGAHRDHNSMAANLKAVLKQQLSQLKELDKDKLLEERYQRLMSFGYC

SEQ ID NO: 167894 - protein, 204 aa, Unknown
  Bacterial polypetide isolated from the Sargasso Sea
LKFEDQKKYSDRLKDAQSKTKLKEAIRIGYGKSFGKNILIACMDFNFIGGSMGSVVGEKISLAIDYAIKYKCPLVIISKSGGARMMESATSLMQMAKTSAKLNDLSESKLPYISLCTDPTTGGTTASFAMLGDINIAEPNALIAFAGPRVVKDTTGQDLPDGFQKSEFLLEKGFLDFISHRKDLKKRINLYIDLIENLPLRNYE

SEQ ID NO: 167895 - protein, 115 aa, Unknown
  Bacterial polypetide isolated from the Sargasso Sea
AIQSLREAKLPYIVVLTNPTTGGVTASYAMLGDITIAEPNALICFAGPRVIEQTIGEKLPDGFQKSEYLLDHGMIDMVTSRDKIRDELILLLHILMKKPRAIRGNIKKDIDKINS

SEQ ID NO: 167896 - protein, 238 aa, Unknown
  Bacterial polypetide isolated from the Sargasso Sea
DNFHIRIGSLEYFKILFDNNKYEVLFDNLISADPLKFVDTKSYPKRVKDAQKKTGLNDAIKVAYGKSFGKKLTIASMDFTYIGGSMGSVVGEKISRAIDHAIKEKTPLVIISKSGGARMMEGAISLMQMAKTSAKLTQLSKNKLPYISLCTDPTTGGTTASFAMLGDIIISEPGALIGFAGPRVVKDTTGQDLPEGFQRSEFLLDNGFIDFISHRNDLKKNINLYIDLILNTPLRAYN

SEQ ID NO: 167897 - protein, 98 aa, Unknown
  Bacterial polypetide isolated from the Sargasso Sea
ENDAFVVIRGRVYGEQVVCGAFEFGFLGGSMGSVVGEKIVLAVEDAIAHKCPLVIFTASGGARMPESLFSLMQMAKTSAALGKLKDAGLPYIVVLTDP

SEQ ID NO: 167898 - protein, 238 aa, Unknown
  Bacterial polypetide isolated from the Sargasso Sea
DNFHLRIGSIEYFKILFDNNEYEVLFDNLISADPLKFVDTKSYPKRVKDAQKKTGLNEAIKVAYGKSFGKKLTIASMDFTYIGGSMGSVVGEKISRAIDHAIKEKTPLVIISKSGGARMMEGAISLMQMAKTSAKLTQLSKNKLPYISLCTDPTTGGTTASFAMLGDIIISEPGALIGFAGPRVVKDTTGQDLPDGFQRSEFLLDNGFIDFISHRNDLKKNINLYIDLILNTPLRAYN

SEQ ID NO: 167899 - protein, 90 aa, Unknown
  Bacterial polypetide isolated from the Sargasso Sea
MKTTFLEFEQPIAELEAKIEELRFVQDDSAVDISEEISRLASKSQQLTKDLYANLTPWQVAQIARHPQRPYTLDYVREIFTDFHELHGDR

SEQ ID NO: 167900 - protein, 101 aa, Unknown
  Bacterial polypetide isolated from the Sargasso Sea
MKRHYLPFEKPLKDLDFEIEKLTTSESDSKQLKDLIAERENLEKEIFTDLSPWETVQLARHPNRPYTLDYINAWCDNFTELHGDKAFSDDNAVIAGIGIID

SEQ ID NO: 167901 - protein, 235 aa, Unknown
  Bacterial polypetide isolated from the Sargasso Sea
MSILDWFEKREKKIKNTGRLEIPGDLWLKCPTCSDVIFKKDLELNFMVCPSCEHHFRIIPKQRLDYFFDTGSFEEMDALLEPTDFLGFVDTQPYEKRIKSAKKKSEKSEAITTGTALLNNKKVNVGIMDFSYMGGSMGSVVGEKVTRLIEKSIEDRSPLILFTMSGGARMQEGIVSLMQMAKTSAALSRLSEERILFISVLCDPTTGGTSASFAMLGDVQIAEPGALISFAGPRV

SEQ ID NO: 167902 - protein, 108 aa, Unknown
  Bacterial polypetide isolated from the Sargasso Sea
MKEYNPNYLDFEQPLLEIEAKIKQLKNDPEKTAKSEASITKLEKDYVEQTNKIFNGLTDWQISQLARHPLRPYTLDYIPNLFSSFDELHGDRMFGDDPAIIAGMAKID

SEQ ID NO: 167903 - protein, 181 aa, Unknown
  Bacterial polypetide isolated from the Sargasso Sea
KALRLMKLAEKFSLPVLTFIDTPGAHAGVTAEEHNQSEAIAKNLFAMAELKTPIICTVIGEGGSGGALAIGVGDRVAMLQHAIYSVISPEGCASILWKSAEHAAEAAEAMGITAQRLHDLKLIDHVIDEPLGGAHRDITATAENLKAWLQPELRALQSMSVDDLLQTRQQRLLSIGVDNPS

SEQ ID NO: 167904 - protein, 181 aa, Unknown
  Bacterial polypetide isolated from the Sargasso Sea
MGRTPVVIAAQDFSFMGGSMGMYVGNAIVKAAERAVELKRPLILFSAAGGARMQEGILSLMQMPRTTVAIQLLKEAKLPYIVVLTHPTTGGVTASYAMLGDIHIAEPNALICFAGPRVIEQTIREKLPEGFQRAEYLLDHGMLDRVTSRLEMRDELITIVRILTNNSPQIKGDLPSPTQET

SEQ ID NO: 167905 - protein, 208 aa, Unknown
  Bacterial polypetide isolated from the Sargasso Sea
MSWFDRLIPPKIKDVASAATRRGVPQGLWRKCDDCSTVLYSADLDRGMQVCPKCGHHMRLGARARLNGFFDDGRFEEIGAGLRAVDVLNFRDAKRYRDRLSEAGKTSQEPEALLAARGKLLDIPISAAAFEFGFMGGSMGSVVGEKFARCVDDAVEQGNPFICFSASGGARMQEGLFSLLQMAKTTAALNKLKDARLPFVSVLTDPTM

SEQ ID NO: 167906 - protein, 271 aa, Unknown
  Bacterial polypetide isolated from the Sargasso Sea
IMTSKSKSKVPDGLWSSCPSCESVLYAPDLEKSLFVCPKCDHHLRIGARKRLEIFLDNGHFEEIAADIKTKDSLKFKDTKNYSSRIKDAVSNTGENEAIIIGKGTLDSMDVVVAAFEFRFMGGSMGGVVGEKFVQGVNEAIKSHCPFICFSTSGGARMQESMISLMQMAKTSAALQKLKAEKLPYISVMVDPIYGGVSASLAMLGDINIAEPDALVGFAGRRVIEQTVRVDLPDDFQKSEFLLKHGAIDMIVHRRNIRTKVHGLLKKIYKA

SEQ ID NO: 167907 - protein, 250 aa, Unknown
  Bacterial polypetide isolated from the Sargasso Sea
IGTQELTENNYVSPEDDYHVHIGSKEYFEIIFDNNKYEEIDPKLKSRDFLKFIDSKKYINRLKEAHKKTGLYDAIRVAIGLSKGKKIVIACMDFRFIGGSMGSVVGEKISRAIDCSIKHRIPLIIISKSGGARMMESATSLMQMAKTSAKLNLLSEEKIPYISLCTDPTTGGTTASFAMLGDINISEPGALIAFAGPRVVKDTVGKELPKGFQTSEFQLEKGFLDFISHRKDLKNKINLYLDLILNKKVR

SEQ ID NO: 167908 - protein, 207 aa, Unknown
  Bacterial polypetide isolated from the Sargasso Sea
LATKITTKDILNFKDTKSYGQRIKEAVKSTGEEEAIIVGKGKLEGVEIVVAAFEFRYMGGSMGGAVGTKFVKGVDEAIASKAPFICFSTSGGARMQESMVSLMQMAKTSAALEKLKAAKLPYISVMIDPIYGGVSASIAMLGDINIAEPNALVGFAGRRVIEQTVRVDLPEDFQKSEFLLEHGAIDMIVHRKDLRYKVSSILSKLYP

SEQ ID NO: 167909 - protein, 190 aa, Unknown
  Bacterial polypetide isolated from the Sargasso Sea
MKYYLEFEEPIRLLDEEIHLKESISEKSTELTKEIALLHEDRLKLINKIHSNLTRWQRVQLARHPERPYALDYINLIFADFLEIHGDRLFADDPAVVAGFAKIGDRKVAIIAQQKGRNTKENLYRNFGMMKPEGYRKALRIMKLAEKFKIPIITLMDTPGAFPGIGAEERGAGEAIAKNLIEMSAMKVPI

SEQ ID NO: 167910 - protein, 168 aa, Unknown
  Bacterial polypetide isolated from the Sargasso Sea
IITFIDTPGAYPGIEAEERGQAEAIARNLRDMSGIKVPIITVVIGEGGSGGALGIGVSNRVYMMEYGIYSVISPEGCASILFRDAGKADVASESLKLTAKDVVSLGIADGIIPEPLGGGHTDWEQVCSDIKKVITKDLSSYKTKKVNSILDERYQKFRSMGQFIEDGA

SEQ ID NO: 167911 - protein, 146 aa, Unknown
  Bacterial polypetide isolated from the Sargasso Sea
MGSVVGECVFRSIEYADKYKIPFILICSSGGARMQESALALMQLAKTSSRLAKFKSNGGLYIPLLTDPTTGGVTASYGMLGDIILAEPGALIGFAGPRVIKQTIGEDLPKGFQTSEFLLEKGFIDHIISREEMKTKLSRIINLLSL

SEQ ID NO: 167912 - protein, 144 aa, Unknown
  Bacterial polypetide isolated from the Sargasso Sea
MAKRYLLDFEKPLVELEKQIEQIKELARDSEVDVSQQLLQLETLAARRREEIFKSLTPAQKIQVARHPQRPSTLDFVQMFCDDWIELHGDRNGGDDMALIGGIGSINNRPVLMLGHQKGRDTKENVVRNFGMAKPGGYRKALRL

SEQ ID NO: 167913 - protein, 268 aa, Unknown
  Bacterial polypetide isolated from the Sargasso Sea
YGNLSAWQRVQLSRHPNRPYTLDYIKYICGDSFLEMHGDRNVSDDKAMIGGLGKVDNQSFMFIGTQKGYNTKTRQYRNFGMSKPEGYRKALRLMRQAEKFNIPIVTLIDTPGAYPGQDAEERGQGEAIARNIYEMMNIKVPIISIIIGEGASGGALGIGVGDKILMLENTWYSVISPESCSSILWRSWEHKEEAAEALKLTADDMLKNKLIDKIISEPLGGAHYDPDETFKSVKENILLFHKKIKSLSKNKMINNRRKKFTKIGNFRG

SEQ ID NO: 167914 - protein, 259 aa, Unknown
  Bacterial polypetide isolated from the Sargasso Sea
MNWLRRLIPSIGTLKSKSKVPDGLWSSCKKCDSVLYVPELEKSLYVCPKCDYHFRIGARKRLEIFLDNNSYKEISPNLTTKDPLKFKDLKHYSSRIKEAEANTGEKEAIIIVEGNLDSINVVVAAFEFRFLGGSMGSVVGEKFVQGINAAIKNRKPFICFATSGGARMQESMVALMQMAKTSAAIQRLKKEKLPYICVLVDPIFGGVSASIAMLGDINIAEPHASSGFTGRRVIEQTVRIELPDNFQTSEYLLNNGAMI

SEQ ID NO: 167915 - protein, 257 aa, Unknown
  Bacterial polypetide isolated from the Sargasso Sea
MSWFKRTNKNISTKTEEKKDIPAGLWYKTPSGKIIETKELAKNLYVSPEDDYHVHIGSKEYFEILFDDTFKELNSRMKSIDFLKFEDQKKYSERLKDAQIKTNLNDAIRVGYGKSFGKELVVACMDFKFIGGSMGSVVGEKISQAITFAIKKKYPLIIISKSGGARMMESATSLMQMAKTSARLNDLSEAGLPYISLCTDPTTGGTTASFAMLGDINIAEPKALIAFAGPRVVKDTTGQDLPEGFQRSEFLLEKGFL

SEQ ID NO: 167916 - protein, 157 aa, Unknown
  Bacterial polypetide isolated from the Sargasso Sea
MEFLEFELPIKKVIDQIDKYKSKKNESALSNSKKYKLLQKKLDEAKKNVYGNLTPWQKVQLSRHPNRPYTLDYINNILGDTFLELHGDRNISDDKAMIGGLGKIDNQTFMVIGTQKGNNTKTRQYRNFGMSNPEGYRKALRLMKKAEKFNIPVISTY

SEQ ID NO: 167917 - protein, 318 aa, Unknown
  Bacterial polypetide isolated from the Sargasso Sea
MKYYLDFEEPLRLLDEEIHLKEAVMDPSSEINKEIAILIEKRLKKINEIHTSLGRWQRVQLARHPDRPYSKDYIDKIFTDFVELHGDRLFADDPAVICGIAKLDQKKIVIIAQQKGRNTKDNLYRNFGMMRPEGYRKALRIMKLAEKFNLPVITFMDTPGAFPGIGAEERGQGEAIARNLLEMSSLKVPIVSIVIGEGASGGALGIGVCDRFLMMQNTWYSVISPEGCASILFRDATKAEEAAEALKVIPNDLVKMGICDKIIEEPNGGAHRDIESSSQNLKSAILSELKELEPVDPLSFIDLRIQKYDKLGFYEDLK

SEQ ID NO: 167918 - protein, 315 aa, Unknown
  Bacterial polypetide isolated from the Sargasso Sea
MTREYLEFEEPIAQIERQILELESAGDLSADDISSEIEVLNKSIIETTQKIYKKLTPWQCVQVARHPSRPHFFNYLEKVFEDFDELHGDRSFGDDRALVGGLAKIGNYSVVVIGHEKGRTTEEKLEHNFGMPQPEGYRKAGRLMKLAERFEIPIVTFIDTPGAYPGIDSEERGQSEAIASNLEIMSNLRTPILVNVIGEGGSGGALAIGVGDTISMMEYSTYSVASPEACASIVWRDPSMAPQAAEAMKLNSENLLSLGLIDEIIEEPLGGAHRDPDQAATSIKKSIINNLTELSKYTMEDLLDRRYQRLMSYGK

SEQ ID NO: 167919 - protein, 209 aa, Unknown
  Bacterial polypetide isolated from the Sargasso Sea
MSWLEKILPKTTKSSGRKEIPEGVWAKCTACDSILYKAELEKSLNVCPKCDHHMRVSGRKRLEHFLDEGDRTELGTEHEPKDVLKFKDSKKYSDRISAAQKSSGEKDALVAMKGRLKGIPVAAVAFEFSFMGGSMASVVGARFVDAVDQCLEHNMPLVCFSASGGARMQEALMSLMQMAKTSAALAKMSEKGLPFISVMTDPTMGGVSA

SEQ ID NO: 167920 - protein, 274 aa, Unknown
  Bacterial polypetide isolated from the Sargasso Sea
MSWFTRKKQNINKNPKKDLPSDLWIKCPNCGEILYKPELEANNFICHHCNFHFPITSEQYQDIILDKKKENLFSDITSIDTLGFKANKSYEEILEKVPNNKEAVDCFLGEVEKRKVVLCIMNFKFIGGSMGSAVGEKISKSISLASEKNCPLIILCQSGGARMQEGALSLMQLSKISTHLAKFSKKGGLYISILTYPTTGGVTASFGMQADVTIAEPKALIGFAGQRVIKQTTSQELPDHFQTSEFLKEKGFIDFVVDRKNLKNSISKVLDVLA

SEQ ID NO: 167921 - protein, 287 aa, Unknown
  Bacterial polypetide isolated from the Sargasso Sea
MAWFRRQKKGIQTDTQDKKDTPEGLWHKTPSGKIVDNDELIDNNFVSPEDNFHLRIGSQEYFKILFDDNEYEVLFDNLISADPLKFVDTKSYPKRVKDAQKKTGLNEAIKVAYGKSFGKKLTIASMDFTYIGGSMGSVVGEKISRAIDHAIKEKSPLLIISKSGGARMMEGAISLMQMAKTSAKLTQLSKNKLPYISLCTDPTTGGTTASFAMLGDIIISEPGALIGFAGPRVVKDTTGQDLPEGFQRSEFLLDNGFIDFISHRNDLKKNINLYIDLILNTPLRAYN

SEQ ID NO: 167922 - protein, 142 aa, Unknown
  Bacterial polypetide isolated from the Sargasso Sea
MKPSVENFQELHGDRMYADDAAIISGLAKIGSRSVMFIAQEKGANTNEKMRRNFGMPRPEGYRKALRMMKLAEKFHIPVVTIIDTPGAFPGIGAEERGQSEAIARNLFTLASLKTPIINLVLGEGGSGGALAIGMGDKLIML

SEQ ID NO: 167923 - protein, 226 aa, Unknown
  Bacterial polypetide isolated from the Sargasso Sea
MSWFKRSKKGILTSTEEKKNIPEGLWYKTPSGKVVETKELAENFYVSPEDDYHIHIGSKEYFEIIFDDNDFEELDEGLKPKDFLKFVDNKNYKDRIIEAQKKTNLKDALRSAVGKSKGKEVVVCCMDFAFIGGSMGSVVGEKIARATDFCVKNSYPLLIISKSGGARMMESATSLMQMAKTSAKLAHLAEAKLPYISLCTDPTTGGTTASFAMLGDINIAEPNALI

SEQ ID NO: 167924 - protein, 319 aa, Unknown
  Bacterial polypetide isolated from the Sargasso Sea
MDFLDFEKPIVELERRIEELRLTNTDADTAIELDDEIERLQKKCESLTKKIFGSLSEWQIAQLARHPLRPKSIQVIEAISEDFQELHGDRMYADDSAIISGLAKINNQSVMFIAQEKGNNTNEKMKRNFGMPRPEGYRKAQRMMKLAEKFKIPIVTIIDTPGAFPGIGAEERGQSEAIARNLFTLASLKTPIINLVLGEGGSGGALAIGMGDKLIMLEYSIYSVISPEACSSILWRTPDETETAAEAMGISSSRLNKLGLVDEIIDEPLGGFHRNPEKTFTSIKESIANALHILQSEDPETLLEQRRARYKAIGEFNEN

SEQ ID NO: 167925 - protein, 200 aa, Unknown
  Bacterial polypetide isolated from the Sargasso Sea
MNWLTRLIPSIGKSSTKSKSKIPDGVWTSCPSCESALYQPELQKTLYVCPKCDHHLRIGARTRFNIFFDNGNFTEIASNVETGDPLGFKDVKAYPARIKEAKKNTGESEALLVGFGKLDGRLVTAAAFEFKFMGGSMGSVVGEKFVQGIEQAIENKTPFICFSTSGGARMQESMVSLMQMAKTSAAIQKLKSNKLPYISV

SEQ ID NO: 167926 - protein, 274 aa, Unknown
  Bacterial polypetide isolated from the Sargasso Sea
MSWFTRKKQNIEKNPKKDLPSDLWIKCPNCGEILYIPELEANNFICHHCNFHFPITSEKYQEIILDEKADSLFSEVTSIDMLGFKANKSYEEILEKVPNNKEAVDCFFGKIQERKVVLCIMNFKFIGGSMGSAVGEKISKAINLASEKNCPIIILCQSGGARMQEGALSLMQLSKISTHLAKFSKKGGLYISILTYPTTGGVTASFGMQADVTIAEPKALIGFAGQRVIKQTTSQELPDHFQTSEFLKEKGFIDLVVDRKNLKNSISNVLEVLT

SEQ ID NO: 167927 - protein, 231 aa, Unknown
  Bacterial polypetide isolated from the Sargasso Sea
MRSKEYFEILFDGKFKEIGINVAPVDFLKFQDQKKYSDRLKDAQNKTKLKDAIRVGYGKSHGKEVVIACMDFKFIGGSMGSVVGEKISMSIDYAIKRKCPLIVISKSGGARMMESATSLMQMAKTSAKLNDLSEASLPYISLCTDPTTGGTTASFAMLGDINIAEPKALIAFAGPRVVKDTTGQDLPEGFQKSEFLLEKGFLDFITHRKDLKKKVNLYIDLIQNNSLRKYD

SEQ ID NO: 167928 - protein, 284 aa, Unknown
  Bacterial polypetide isolated from the Sargasso Sea
MNWFKKLVPSRITTKKQQRVKSVPEGVWVTCDSCGAQLYRAELERNLHVCIKCNHHMRIPARKRLESFFDPSSTTEYFANLSANDPLKFRDTKRYRDRISESTKKSGEKDALIVMSGKVNEIEMIACAFEFKFLGGSMGSVVGEKFVRAVNLSIEKNAPLVSFSSSGGARMQEAFLSLMQLAKTTSALVELDAKRIPYISVLTDPTTGGVSASIAMLGDINLAEPGALIGFAGPRVIEQTVGEKLPEGFQRSDFLLEKGAIDMIVDRRQMRDTIATLISNLMNN

SEQ ID NO: 167929 - protein, 243 aa, Unknown
  Bacterial polypetide isolated from the Sargasso Sea
MAWFKRKDKKLKNPEKKSIPDGLWDKCPSCNEIIYRPELEKKLSVCHHCNHHFRISPQIYVDLLLDKGTYRRHFQDIISTDFLGFNANKAYSDQIIEATNKTGDNDAICVYDGDINSHRVILGIMNFKFIGGSMGSVVGEIVSRALVLAGDIKAPFILICSSGGARMQEGAISLMQLAKTSTQLAKFSGEGGLFIPILTDPTTGGVTASYGMLGDVILAEPGALIGFAGPRVIKQTIGQDYQR

SEQ ID NO: 167930 - protein, 306 aa, Unknown
  Bacterial polypetide isolated from the Sargasso Sea
MKQKQSTQTDHKPESESFRNQHDSSQRPSMTEGPRMPGPRPKRGVPEGLWLKCNGCGSTIYRKEAEEMLNVCPQCGFHWYVSAKQRIEQLFDPGTFEEWDGGLQPTDPLTFSDKKPYAKRIVSEQKRTGLSDAALTGTGMIRARRVACGVTDSSFIMGSMGSVVGERLARLIERATTESLPLIIISASGGGARMHEGILSLMQMAKVSAALARYSESGGLFISVLTNPTMGGVAASFASLGDLVFAEPRALIGFAGPRTIKATIRVELPAGFQTSEFLLEHGFIDRIISRQNLKSEIARAIDYCGG

SEQ ID NO: 167931 - protein, 252 aa, Unknown
  Bacterial polypetide isolated from the Sargasso Sea
SCNNHMYMSPEDRFRSLFDDSLYSAIDYDAPAQDPLNFKDTKKYTDRIKDAQRSTGQKEAILISEGQLGGMKTIIACQDFKFMGGSMGMAVGNAILEGVKRAVKNKSPFILFAAAGGARMQESVLSLIQMPRTTVAIEMLRDAKLPYIVVLTNPTTGGVTASYAMLGDVQIAEPNALICFAGPRVIEQTIRERLPEGFQRSEYLLDHGMLDKVVPRKFMREELIKLIYLLKNQPPPIRGNITEFDGPNGRDT

SEQ ID NO: 167932 - protein, 139 aa, Unknown
  Bacterial polypetide isolated from the Sargasso Sea
ILFAAAGGARMQEGILSLMQMPRTTVAIQMLKEAKLPYIVVLTHPTTGGVTASYAMLGDIHIAEPNALICFAGPRVIEQTIREKLPEGFQRAEYLLDHGMLDRVTSRLEMRDELITVIRILTNKSPQIKGDLPSPTQET

SEQ ID NO: 167933 - protein, 162 aa, Unknown
  Bacterial polypetide isolated from the Sargasso Sea
MEEITAAAFEFNFMGGSMGSAVGEKFVQGVKVAMKEKTPFICFATSGGARMQESMISLMQMAKTSAVIQKFKKMNLPYISVMVDPIFGGVSASLAMLGDINIAEPKAFVGFAGRRVIEQTVRVELPEDFQKSEFLLAHGAVDMIVHRTEIKSKISGLLEKIL

SEQ ID NO: 167934 - protein, 260 aa, Unknown
  Bacterial polypetide isolated from the Sargasso Sea
IPDGLWDKCPSCNEIIYRPELEKKLSVCHHCNHHFRISPQIYVDLLLDKGTYRRHFQDIISTDFLGFNANKAYSDQIIEATNKTGDNDAICVYDGDINSHRVILGIMNFKFIGGSMGSVVGEIVSRALVLAGEIKAPFILICSSGGARMQEGAISLMQLAKTSTQLAKFSGEGGLFIPILTDPTTGGVTASYGMLGDVILAEPGALIGFAGPRVIKQTIGQDLPEGFQRSEFLLEKGFIDHIVDRNSMKEKLSTLISILS

SEQ ID NO: 167935 - protein, 284 aa, Unknown
  Bacterial polypetide isolated from the Sargasso Sea
MNWFKKLVPSRITTKKKQRVKSVPEGVWVTCDSCGAQLYRAELERNLNVCIKCNHHMRIPARERLESFFDPSSSTEYFANLTANDPLKFRDTKRYRDRISESTKKSGEKDALIVMSGKVNEIEMIACAFEFKFLGGSMGSVVGEKFVRAVNLSIEKNAPLVSFSSSGGARMQEAFLSLMQLAKTTSALVELDAKRIPYISVLTDPTTGGVSASIAMLGDINLAEPGALIGFAGPRVIEQTVGEKLPEGFQRSDFLLEKGAIDMIVDRRQMRDTISTLISNLMNH

SEQ ID NO: 167936 - protein, 317 aa, Unknown
  Bacterial polypetide isolated from the Sargasso Sea
MEFLEFELPIKEIIDQIDKYKSKKDEAGLSNSKTYKLLQKKLDETKKTIYGNLTPWQKVQLSRHPNRPYTLDYIKNILGDTFLELHGDRKISDDKAMIGGLGKIDNQTFMIIGTQKGNNTKMRQYRNFGMSNPEGYRKALRLMKKAEKFNIPVISLVDTPGAYPGLEAEERGQGEAIARNLYEMMSLKVPIIVIIIGEGASGGALGIGVGDNIMMLENTWYSVISPESCSSILWRSWDYKENAAEALKLTADDMYRNKLIDKIIKEPFGGAHYNKEEVYYNVKKEIIKSYKKLQGLSSEKLISNRRDRFYKIGNFNN

SEQ ID NO: 167937 - protein, 320 aa, Unknown
  Bacterial polypetide isolated from the Sargasso Sea
MNTSKTYLEFEKPIKEIDQKIEEMIARADSENLDMTTEIGALKKRARDLERETYRNLTRWQRVQVARHPQRPYTMDYIDTMLTDFVELHGDRQYRDDPAIVGGLGRIDGRPIMLIGQQKGRNTKENLHRNFGMPYPEGYRKALRLMHMAAKFARPVVCLVDTPGAFPGLGSEERNVSEAIGRNLFEMAKLPVPIIVVIIGEGASGGALGIGVGDRILMLENAWYSVINPDSCSLILWRNRDKKEEAADAMKITADDLTEYGIVDRIVREPMGGAHKDPIQASDNLKRAIVETLDELAAIPVGSLSPERIEKFSKMGVWEE

SEQ ID NO: 167938 - protein, 240 aa, Unknown
  Bacterial polypetide isolated from the Sargasso Sea
MARRFLLEFEKPLVELENQIDQIRELARDSEVDVSQQLLQLETLAARRREEIFNALTPAQKIQVARHPQRPSTLDYIQMFCDDWVELHGDRNGTDDQALIGGLARIGEKSVLLIGQQKGRDTKENVARNFGMAKPGGYRKALRLMDHADRFDLPIISFIDTPGAYAGLIAEEQGQGEAIAVNLREMFRLKVPIIATVIGEGGSGGALGIGVADRLLMFEHSVYTVASPEACASILWRDAG

SEQ ID NO: 167939 - protein, 117 aa, Unknown
  Bacterial polypetide isolated from the Sargasso Sea
LKEANLPYIVILTHPTTGGVTASYAMLGDVQISEPNALICFAGPRVIEQTIREKLPEGFQRAEYLLDHGMLDLVTPRTKIRNELIKIIRMLLGLSPVVVGDLPKPPPDNPSEEAKEL

SEQ ID NO: 167940 - protein, 273 aa, Unknown
  Bacterial polypetide isolated from the Sargasso Sea
MSWFTRKKQNIEKNTKKDLPNDLWRKCSCGEILYNPELEASFSICHHCNFHFPITSEQYQDIILDKKTESLFSDISSIDMLGFKANKSYEEILETVPNNKEAVDCFLGDIEKRKVVLCIMNFKFIGGSMGSAVGEKISKAISLASEKNCPIIILCQSGGARMQEGALSLMQLSKISTHLAKFSKKGGLYISILTYPTTGGVTASFGMQADVTIAEPKALIGFAGQRVIKQTTSQELPDHFQTSEFLKEKGFIDFVVDRKNLKNSISKVLDVLA

SEQ ID NO: 167941 - protein, 200 aa, Unknown
  Bacterial polypetide isolated from the Sargasso Sea
MNWLRRLIPSIATFKSKSNVPDGLWSTCKKCESVLYVPELEKSLFVCPKCGYHNRIGARQRLNMFLDNNNYTEIAPDLITKDPLKFKDSKHYTSRIKEAVASTGEKEALLVVSGELDQRKVIVAAFEFRFMGGSMGSVVGEKFVQGIKTAIKNKCPFICFATSGGARMQESMISLMQMAKTSAAIQKLKKEKLPYISVLV

SEQ ID NO: 167942 - protein, 318 aa, Unknown
  Bacterial polypetide isolated from the Sargasso Sea
MSDYYLDFELPLKEIDQKILELESDPNSKNTSEEISSLSLQKKERLEEIFSKLTRWQKVQLARHPQRPLSMDYIHSLSPDFIELHGDRYFGDDPAIICGLGSIDGNKVVYIAQQKGKNTKENIFRNFGMMRPEGYRKALRIMKLAEKFSLPIISLIDTPGAYPGIGAEERGQGEAIARNLFEMSSLETPIIAVVIGEGASGGALGIGICDKMLMLENTWYSVISPEGCASILWRDAAKAPEAADAMKVAPEDLFEMEICDEIINEPLGGAHREFEQTAFSLKSSVLDKIEILNSVDPKTFLDQRIKRYEKMGKISEEK

SEQ ID NO: 167943 - protein, 271 aa, Unknown
  Bacterial polypetide isolated from the Sargasso Sea
MDFLDFEKPIVELERRIEELKLTNTDANTAIELDDEIHRLQKKCASLTKKIFSNLSEWQIAQLARHPLRPKSIQVIEAISENFQELHGDRMYADDAAIISGLAKIDSRSVMFIAQEKGANTNEKMRRNFGMPRPEGYRKALRMMKLAEKFHIPVVTIIDTPGAFPGIGAEERGQSEAIARNLFTLASLKTPIINLVLGEGGSGGALAIGMGDKLIMLEYSIYSVISPEACSSILWRTPDETERAAEAMGISSSRLNELGLIDEIIEEPLGG

SEQ ID NO: 167944 - protein, 220 aa, Unknown
  Bacterial polypetide isolated from the Sargasso Sea
EEIGADLEPVDRLKFRDSKKYKDRLAGAQKQTGEKDALISMSGTLEGMPIAVCAFEFSFMGGSMGAIVGERFVRAANVALEKRCPLVCFSASGGARMQEALISLMQMAKTSAALARLREEGLPFISVLTDPVYGGVSASLAMLGDVIVAEPKALIGFAGPRVIEQTVRERLPEGFQRSEFLLEHGAIDMIISRNELRPRLARLLAQMMNRPSPVPLPATA

SEQ ID NO: 167945 - protein, 300 aa, Unknown
  Bacterial polypetide isolated from the Sargasso Sea
MKTTFLDFEQPIAELEAKIEELRFVQDDSAVDISEEIERLSKKSQQLTKDLYANLTPWQVSQIARHPQRPYTFDYVNELFTDFHELHGDRNYADDLSIVGGLARFNGQACMVIGHQKGRDTKERALRNFGMPRPEGYRKAERLMRLAEKFGLPIFTFIDTPGAYPGIGAEERGQSEAIGRNLYVMAELKTPLIATIIGEGGSGGALAIAVGDSVLMLQFSTYSVISPEGCASILWKSAAKAPEAAEALGLTAHRLKALGLIDKIVNEPLGGAHRDPKGMAAMVRRALADSLRQFQGMSIN

SEQ ID NO: 167946 - protein, 263 aa, Unknown
  Bacterial polypetide isolated from the Sargasso Sea
EWQIAQLARHPLRPKSIQVIEAISKNFQELHGDRMYADDAAIISGLAKIDSRSVMFIAQEKGANTNEKMRRNFGMPRPEGYRKALRMMKLAEKFHIPIVTIIDTPGAFPGIGAEERGQSEAIARNLFTLASLKTPIINLVLGEGGSGGALAIGMGDKLIMLEYSIYSVISPEACSSILWRTPGETERAAEAMGISSSRLNELGLIDEIIEEPLGGFHRNPDETYISIKKSIINSLQAIESIEPENLLEQRRARYKAIGEFNEN

SEQ ID NO: 167947 - protein, 230 aa, Unknown
  Bacterial polypetide isolated from the Sargasso Sea
HGDRHFADDAAIVGGIARLDGRAVMVIGHQKGRDVKEKVRRNFGMPKPEGYRKACRLMEMAERFKMPIVTFIDTPGAYPGIDAEERGQSEAIAWNLQVMSRLKTPIIATVIGEGGSGGALAIGVCDHLMMLQYSTYSVISPEGCASILWKSAEKAADAAAAMGITAERLKELGLVDTLIPEPLGGAQRSPQETAARIKQQLITQLDKLSAHSSDELLEARYQRLMSFGIQ

SEQ ID NO: 167948 - protein, 167 aa, Unknown
  Bacterial polypetide isolated from the Sargasso Sea
GSINNHELILSVMNFEFIGGSMGSVVGELVSRSIDLAREKKIPLVLICASGGARMQESAFSLMQLAKTSSKLARFQKEGGLYIPILTDPTTGGVTASFGMLGDIILAEPGALIGFAGPRVIKQTIGEDLPDGFQRAELLKEKGFIDHIVSRSDMKEKLSSLIELLTK

SEQ ID NO: 167949 - protein, 188 aa, Unknown
  Bacterial polypetide isolated from the Sargasso Sea
TQNKTGEKDALLVFTGNLKKIPIVVCAFEYSFFGGSMGSVVGEKFNRAVNLAIELRRPLVCFSASGGARMQESLFSLFQMSKTSAALAKLSEEAIPYISVLTDPTMGGVSASLAVLGDINIAEPNALIGFAGPRVIEQTVREKLPEGFQRSEFLQEHGTIDMIVERKDQPEKIANILKMLGFSDYAKI

SEQ ID NO: 167950 - protein, 150 aa, Unknown
  Bacterial polypetide isolated from the Sargasso Sea
WVAQWGSVVGEKFVQGIEQAIENKTPFICFSTSGGARMQESMVSLMQMAKTSAAIQKLKSKKLPYISVMVDPIFGGVSASLAMLGDINIAEPKAFVGFAGRRVIEQTVRVELPEDFQKSEFLLEHGAIDMIVHRSEIRSKIIGILDKISK

SEQ ID NO: 167951 - protein, 183 aa, Unknown
  Bacterial polypetide isolated from the Sargasso Sea
RIKEAKKNTGESEALLVGFGKLDGRLVTAAAFEFKFMGGSMGSVVGEKFVQGIEQAIESKTPFICFSTSGGARMQESMVSLMQMAKTSAAIQKLKSNKLPYISVMVDPIFGGVSASLAMLGDINIAEPKAFVGFAGRRVIEQTVRVELPEDFQKSEFLLEHGAIDMIVHRSEIRSKIIGILDK

SEQ ID NO: 167952 - protein, 248 aa, Unknown
  Bacterial polypetide isolated from the Sargasso Sea
MYFLDFEQPIAELEAKIDELRSVESEQDVNVSDEIAVLKKRSDDLTQSIFSSLTSWQISQISRHPKRPYTRDYIERIFVDFEELHGERYFGDDPAIICGIGRLGKQSVVIIGHQKGRDTKERIMRNYGMPKPEGYRKALRVMQLAERFNMPILTFIDTPGAYPGIEAEERGQSEAIAKNLLVMSELQTPIISTVIGEGGSGGALAIGVADHLLMLEYSTYSVISPEGCASILWKSADKAKEAAQSMGI

SEQ ID NO: 167953 - protein, 281 aa, Unknown
  Bacterial polypetide isolated from the Sargasso Sea
METKSRKLTREIFASLDAWQITQLARHPQRPHTLDYISRVFSNFQELSGDRMYRDDPAIVGGLARVGGKGVMVIGHQKGRDTKEKVRRNFGMPSPEGYRKAQRLMRIAEKFRLPVITLIDTPGAYPGIGAEERGQSEAIAQNIAMMAGLKVPIVSIVIGEGGSGGALAIGVCDRLVMLQFATYSVISPEGCASILWKSADKAQTAATAMKITSESLKQNGLVDIVVQEPLGGAHRDPDQTAEQLRVVIQEQLQAFDSLTTEELLRQRYTRLRSFGRFKDEF

SEQ ID NO: 167954 - protein, 240 aa, Unknown
  Bacterial polypetide isolated from the Sargasso Sea
MSNWLVDKLIPSIMRSETQKSSVPEGLWHKCPSCEAVLYRPELEKTLDVCPKCQHHMRIDARSRLDIFLDAEGREEIAAELEPVDRLKFRDSKKYKDRLSAAQKQTGEKDALIAMSGKVVNIPVVACAFEFSFMGGSMGAIVGERFVRAANVALEKRCPLVCFSASGGARMQEALISLMQMAKTSAVLARMREEGLPFISVLTDPVYGGVSASLAMLGDVIVAEPKALIGFAGPRVIEQT

SEQ ID NO: 167955 - protein, 265 aa, Unknown
  Bacterial polypetide isolated from the Sargasso Sea
DFEKPIVELERRIEELKLTNTDANTAIELDDEIHRLQKKCASLTKKIFSSLSEWQITQLARHPLRPKSIQVIEAISKNFQELHGDRMYADDAAIISGLAKIDSRSVMFIAQEKGANTNEKMRRNFGMPRPEGYRKALRMMKLAEKFHIPIVTIIDTPGAFPGIGAEERGQSEAIARNLFTLASLKTPIINLVLGEGGSGGALAIGMGDKLIMLEYSIYSVISPEACSSILWRTPDETERAAEAMGISSSRLNELGLIDEIIEEPL

SEQ ID NO: 167956 - protein, 204 aa, Unknown
  Bacterial polypetide isolated from the Sargasso Sea
MFSKPKYSKVNVKSREGVPKGVFTKCPETGEMVFAKELKNNLMVVPKSGYHFPLSAPERIASLADEGSFVEHDSELQSTDPLDFKGLASYKEKLDQNKEKCGLTDAVVSGVAKMGGRWVSLAVMDFRFLGGSMGSVVGEKITRAIERGLENSIPVIIVSASGGARMYEGILSLMQMAKTSAALAKLSAKGIPYFSVLTNPTMAG

SEQ ID NO: 167957 - protein, 186 aa, Unknown
  Bacterial polypetide isolated from the Sargasso Sea
MPKPEGYRKALRLMKMAERFNMPIITFIDTPGAYPGVGAEERGQSEAIAKNLFEMAELTVPIVCTVIGEGGSGGALAIGVGDRVNMLQYSTYSVISPEGCASILWKSAEKAPLAAEAMGVSAPQIKELGLINSIVEEPLGGAHRDHNGMAANLKAVIKQQLNQLKELDKTKLMEERYQRLMSFGYC

SEQ ID NO: 167958 - protein, 168 aa, Unknown
  Bacterial polypetide isolated from the Sargasso Sea
GELDQRKVIVAAFEFRFMGGSMGSVVGEKFVQGIKTAIKNKYPFICFATSGGARMQESMISLMQMAKTSAAIQKLKKEKLPYISVLVDPIYGGVSASIAMLGDINIAEPNALSGFTGRRVIEQTVRLELPDNFQKSEYLLSNGAIDMIVHRKNLRSKISGILKKIHKT

SEQ ID NO: 167959 - protein, 226 aa, Unknown
  Bacterial polypetide isolated from the Sargasso Sea
RISIFLDQGEHKEMFNDLSPRDMLKFKDKQKYQDKFEQTQNKTGEKDALLVFTGNLKKIPIVVCAFEYSFFGGSMGSVVGEKFNRAVNLAIELRRPLVCFSASGGARMQESLFSLFQMSKTSAALAKLSEEAIPYISVLTDPTMGGVSASLAVLGDINIAEPNALIGFAGPRVIEQTVREKLPEGFQRSEFLQEHGTIDMIVERKDQPEKIANIIEMLGFSDHAKI

SEQ ID NO: 167960 - protein, 286 aa, Unknown
  Bacterial polypetide isolated from the Sargasso Sea
MPRRYLLDFEKPLVELEKQIEQIRELARDSEVDVSQQLLQLETLATRRREEIFRSLTPAQKIQVARHPQRPSTLDFIQMFCDDWTELHGDRNGGDDMALIGGLGSINNQPVLLLGHQKGRDTKENVVRNFGMAKPGGYRKALRLMQHADRFSLPILTFIDTPGAYAGLSAEEQGQGEAIARNLREMFGFQVPIIATIIGEGGSGGALGIGVADRLLMFEHSVYTVASPEACASILWRDAAKASEAATALKITGQDLLELGVIDEVLSEPAGGNNWAPIEAGNTLKG

SEQ ID NO: 167961 - protein, 177 aa, Unknown
  Bacterial polypetide isolated from the Sargasso Sea
MFHDYLSFEQPIAELEAKIDELRLVNSDNRISINEEIDNLLIKSERLTEKVYSNLSPWQVSQVARHPLRPYTLDYIRHIFTDFEELHGDRAFGDDQSLIGGLANLESTPVMLIGHQKGRGTKEKLKHNFGMPRPEGYRKARRLIKLAEKFKLPILTFIDTPGAYPGMDSEERGINEA

SEQ ID NO: 167962 - protein, 224 aa, Unknown
  Bacterial polypetide isolated from the Sargasso Sea
DKAIICGFAKLDDKAFMLIGHQKGRDSKEKVYRNFGMPKPEGYRKALRAMKLAEKFGIPVLTFIDTPGAYPGIDAESRNQSIAIADNLYEMSKLKCPIISVVIGEGGSGGALAIGVADKLAMLQYSIYSVISPEGCASILWKDASKANLAAEALSITSDKLLNHELIDRIIPEPLGAAHRNYSAMYSSLKSNILDMLNEVNAVSQSDLLNARNTKLMSYGQFES

SEQ ID NO: 167963 - protein, 193 aa, Unknown
  Bacterial polypetide isolated from the Sargasso Sea
DKFKLSQEKTGEKDALLVFKGNLKTIPVIVCAFEYSFFGGSMGSVVGEKFIRAVKLSIELNRPLICFSASGGARMQESLFSLFQMSKTSAALAELSDHAIPYISVLTDPTMGGVSASLAVLGDINIAEPNALIGFAGPRVIEQTVREKLPEGFQRSEFLQEHGAIDMIIERKEQPDKIANILSILGFPNEKKI

SEQ ID NO: 167964 - protein, 282 aa, Unknown
  Bacterial polypetide isolated from the Sargasso Sea
LYLLELEKHHSVCPKCEHHLRLTARKRLDWFLDKQGREEIAAEIEPNDRLKFRDSKKYKDRLTAAQKETGEKDALVAMRGELEGLPIVAVAFEFTFMGGSMGAVVGEKFVRAATIALEEGIPLVCFAASGGARMQEALFSLMQMAKTSAALEKLKQAGVPYISVLTDPVFGGVSASLAMLGDLNIAEPNALIGFAGPRVIEQTVRETLPEGFQRSEFLLEHGTVDMIVHRHDMRARVGGVLRKLTHQSARPVNDESSDAEVVEPVEMKSSWPMPLKHLPKAR

SEQ ID NO: 167965 - protein, 162 aa, Unknown
  Bacterial polypetide isolated from the Sargasso Sea
MSEYNPNYLDFEQPLLDIENKITAIKTSASASQKDLKKIDNLKIDLDKNISKIFSSLSDWQISQIARHPLRPYTLDYIENMFSSFTEIHGDRMFGDDKAIICGFAKLDDKPFMLIGHQKGRDSKEKVFRNFGMPKPEGYRKALRAMKLAEKFNIPILTFIDT

SEQ ID NO: 167966 - protein, 217 aa, Unknown
  Bacterial polypetide isolated from the Sargasso Sea
GGIARLGDQPVMIIGHQKGREVREKVRRNFGMPRPEGYRKACRLMEMAERFKMPILTFIDTPGAYPGIDAEERGQSEAIAWNLRVMARLKTPIIATVIGEGGSGGALAIGVCDQLNMLQYSTYSVISPEGCASILWRTAEKAPDAAEAMGITAERLKDLGIVDQVIAEPLGGAHRDPAAASESIRQELIKQLASLQKHDTDALLKRRYDRLMSYGIA

SEQ ID NO: 167967 - protein, 220 aa, Unknown
  Bacterial polypetide isolated from the Sargasso Sea
LNIFLDDSSYEEIAANLTTKDPLKFKDSKYYTSRVKEAVAATGEKEALIVVKGKLEGISVVVAAFEFRFLGGSMGSVVGEKFVQGINTAIKEKVPFVCFATSGGARMQESMISLMQMAKTSAAIQKLKKEKLPYISVLIDPIYGGVSASIAMLGDINIAEPNALSGFTGRRVIEQTVRIELPDNFQKSEYLLSNGAIDMIVHRKNLRSKISSILNKIYKA

SEQ ID NO: 167968 - protein, 217 aa, Unknown
  Bacterial polypetide isolated from the Sargasso Sea
GRDTKENVVRNFGMAKPGGYRKALRLMQHANRFSLPILTFIDTPGAYAGLKAEEQGQGEAIARNLREMFGLKVPIVATVIGEGGSGGALGIGVADRLLMFEHSVYTVASPEACASILWRDAAKAPEAASALKITGKDLLKLGIIDEVLPEPSGGNNWAPLDAGNTLKEAIEKHLNSLLQMPEDELIEERYKKFRVLGKFIEANNIEEIYSEIPQKTE

SEQ ID NO: 167969 - protein, 279 aa, Unknown
  Bacterial polypetide isolated from the Sargasso Sea
MSWLDKLLPPKIQQTDPSQRKGIPEGLWVKCPACESVLYRTDVEANLHVCPKCDHHMRIGARARLDALLDAEGRYELGQEIVPVDALKFKDTKKYPDRIKAAMDDTGETDAMVVMGGAIHALPVVVACFEFEFMGGSMGSVVGERFTRGAQMALEQKVPFICVSATGGARMQESLLSLMQMAKTTSMIQKLAEAKLPFISVLTDPTMGGVSASFAFMGDVVIAEPKALIGFAGPRVIEQTVREKLPEGFQRAEFLLQKGAIDMIVDRRNMRREIAELLA

SEQ ID NO: 167970 - protein, 281 aa, Unknown
  Bacterial polypetide isolated from the Sargasso Sea
MNWLRRLIPSIGTFKSKSKVPDGLWVSCKKCESVLYVPELEKSLYVCPKCGYHMRIGARKRLDIFLDNSSYEEIAPNLTTKDPLRFKDSKYYTSRVKEAIAATGEKEALIVVKGMLEGVNIVVAAFEFRFLGGSMGSVVGEKFVQGINTAIKEKIPFICFATSGGARMQESMISLMQMAKTSAAIQKLKKEKLPYISVLIDPIYGGVSASIAMLGDINIAEPNALSGFTGRRVIEQTVRIELPDNFQKSEYLLSNGAIDMIVHRKNLRSRISSILNKIYKA

SEQ ID NO: 167971 - protein, 134 aa, Unknown
  Bacterial polypetide isolated from the Sargasso Sea
KVPFICFTASGGARMQESLLSLMQMAKTTAMLTKLAEAKLPFISVLTDPTMGGVSASFAFLGDVVIAEPKALIGFAGPRVIEQTVREKLPEGFQRAEFLLTKGAVDMIVDRRKLREEIAQLMALLSHQPADAVA

SEQ ID NO: 167972 - protein, 290 aa, Unknown
  Bacterial polypetide isolated from the Sargasso Sea
MSWLEKILPRTSSSSRRNIPEGVWTKCTSCDAVLYKAELDRNLGVCPKCDNHMRISARDRINNFLDTGGMVELAAELEPQDLLKFKDSKKYKDRIVAAQKETNEKDAMVVMRGTLLGMPVVVASFEFAFMGGSMASVVGAKFVKGVEYALEHKVPFICFSASGGARMQEALLSLMQMAKTSAALAKLSEAGLPYISVLTDPTMGGVSASLAMLGDLNIGEPKALIGFAGPRVIEQTVREKLPEGFQRSEFLLEHGAIDMIVDRRQMRDTIARLVAKFMRWPAPAKEHRVA

SEQ ID NO: 167973 - protein, 290 aa, Unknown
  Bacterial polypetide isolated from the Sargasso Sea
MSWLDKILPSRIRAKREGKASVPEGLWHKCSNCETVIYRAEYEKNLNVCPKCNHHGRISARKRADIILDKENKTEILTDIKPVDMLNFKDKEKYRDKLQSTQKKTGEDDALVVYKATMNNQPVIACFFEYSFFGGSMGSVVGEKFTKAVYKCLESYSSLICFSASGGARMQESLFSLFQMAKTSCALNELSKKRLPYISVLTDPTMGGVSASLAMLGDINIAEPNALIGFAGPRVIEQTVGEKLPEGFQRSEFLRDHGAIDLILSRKDQKNKISDILSTLTTHTLDGNTT

SEQ ID NO: 167974 - protein, 290 aa, Unknown
  Bacterial polypetide isolated from the Sargasso Sea
MSWLDKILPSRIRANKENKGSVPDGLWHKCPNCDAVIYRAEYEKNLNVCPKCNHHGRISARKRADIVLDVENRVEVLNNIMPVDMLNFKDNEKYKDKLTSTQKRTGEKDAMLVYKGSINKIPVVTCFFEYSFFGGSMGSVVGEKFTSAVKICIEEERPLICFSASGGARMQESLFSLFQMAKTSAALNNLSDAKLPYISMLTDPTMGGVSASLAMLGDINIAEPNALIGFAGPRVIEQTVGEKLPKGFQKSEFLQDHGSIDFILDRNSQKDKLAQIISSLMSNHESEKAS

SEQ ID NO: 167975 - protein, 206 aa, Unknown
  Bacterial polypetide isolated from the Sargasso Sea
MIIGHQKGREVREKVRRNFGMPRPEGYRKACRLMEMAERFKMPILTFIDTPGAYPGIDAEERGQSEAIAWNLRVMARLKTPIIATVIGEGGSGGALAIGVCDQLNMLQYSTYSVISPEGCASILWRTAEKAPDAAEAMGITAERLKDLGIVDQVIAEPLGGAHRDPAAASESIRQELTKQLASLQKHDTETLLKRRYDRLMSYGIA

SEQ ID NO: 167976 - protein, 314 aa, Unknown
  Bacterial polypetide isolated from the Sargasso Sea
MKKHYLSFEKPLKDLDFEIEKLSNSESDNTKLNQLIDERKELEKEIFSDLSSWETVQLARHPNRPYTLDYINAWCDNFTELHGDKAFSDDNAVVSGIGIIDGLKVAIIGQQKGRNTKENIFRNFGMMKPEGYRKALRVMKLAEKFKLPIVTLIDTPGADPGIGAEERGQGYAIANNLFEMASIKTQILSIVIGEGASGGALGIGLCDKMIMLEHTWFSVISPEGCASILWKDSSKAPEAAESLKLTPKDLVEHNICNMVVYEPPGGAHRHFDETADILKKSILSEIKELRENVNDNFLDYRVSRYDKLGVFRED

SEQ ID NO: 167977 - protein, 283 aa, Unknown
  Bacterial polypetide isolated from the Sargasso Sea
MNWLTRLIPSIGKSSSKSKKSKIPDGVWTSCPSCESALYKPELQKTLYVCPKCDHHLRIGARTRFNIFFDNGNFTEIASNVETNDPLGFKDVKAYPARIKEAKKNTGESEALLVGFGKLDGRLVTAAAFEFKFMGGSMGSVVGEKFVQGIQQAIETNTPFICFSTSGGARMQESMVSLMQMAKTSAAIQKLKSNKLPYISVMVDPIFGGVSASLAMLGDINIAEPKAFVGFAGRRVIEQTVRVELPEDFQKSEFLLEHGAVDMIVHRSEIRSKIIGILDKISK

SEQ ID NO: 167978 - protein, 111 aa, Unknown
  Bacterial polypetide isolated from the Sargasso Sea
MSIQFLDFEQPIAELEAKIEELRLVNQGGEFDVGIEEEINKLRGKSAELTKKIFSDLGAWQVSQLARHPMRPYTLDYIPRIFTEFDELAGDRAFADDKAIVGGPAMLDDQP

SEQ ID NO: 167979 - protein, 278 aa, Unknown
  Bacterial polypetide isolated from the Sargasso Sea
MAWFKREKQKIAPIEKKGVPDGLWVKCPTCSEFLYKPELDKSLSVCRHCSHHFRIDPKSYHDLLLDKGSSQELFTNIRSKDFLGFKAEKKYKDQLNDASKKTGYNDAINTYTGTIKSKKIILGIMNFAFIGGSMGSVVGEKVSRMIDHAHKNKLPIILVCASGGARMQEGAISLMQLAKTSAKLAQFSEGGGLYIPILTDPTTGGVTASYGMLGDIILAEPGALIGFAGPRVIKQTIGQDLPEGFQRTEFLKEKGFVDHIVTREKMKLTLYNILTILT

SEQ ID NO: 167980 - protein, 323 aa, Unknown
  Bacterial polypetide isolated from the Sargasso Sea
MKTTFLDFEQPIAELEAKIEELRFVQDDSAVDISEEIERLSKKSQQLTKDLYANLSPWQVSQIARHPQRPYTLDYVAELFTDFHELHGDRAFADDVSIVGGLARFGGHPCMVIGHQKGRDTKERAARNFGMPRPEGYRKAERLMRLAEKFGLPIFTFVDTPGAYPGIGAEERGQSEAIGRNLYVMAELKTPIITTVIGEGGSGGALAIAVADTVMMLQFSTYSVISPEGCASILWKSAAKAPEAAEALGLTAHRLKALGLIDKIINEPLGGAHRDPKGMAALLRRALADSLRQFQGMSIDALRERRFERLMAYGKFKETTPGA

SEQ ID NO: 167981 - protein, 317 aa, Unknown
  Bacterial polypetide isolated from the Sargasso Sea
MDFVDFELPIMDLEAKIEELCLVEGNNDLGLASEIDNLRKKSEALTREIFSSLKAWQISKIARHPKRPYTMDYVKLVFEEFVEFHGDRVFADDSAMICGLGTIESRNLVFIGHQKGRGTKENLARNFGMPKPEGYRKALRAMKLAEQFKLPLLTFIDTPGAYPGIGAEERGQSEAIATNLRTMSNLRVPIVSVVIGEGGSGGALAIGMGDKILMKQYSTYSVISPEGCASILWKSADAAKDAANAMHITADHLFKLGIVDEIIEEPLGGAHRNVEAAAQNLKGAILASFDELRSVEKNELIDRRRKKFSAIGEFSEN

SEQ ID NO: 167982 - protein, 193 aa, Unknown
  Bacterial polypetide isolated from the Sargasso Sea
KIKRNFGMPKPEGYRKALRLMKMAERFNMPIITFIDTPGAYPGVGAEERGQSEAIAKNLFEMAELTVPIVCTVIGEGGSGGALAIGVGDRVNMLQYSTYSVISPEGCASILWKSAEKAPLAAEAMGVSAPQIKELGLINSIVEEPLGGAHRDHNGMAANLKAVIKQQLNQLKELDKTKLMEERYQRLMSFGYC

SEQ ID NO: 167983 - protein, 320 aa, Unknown
  Bacterial polypetide isolated from the Sargasso Sea
MNEYDPNYLDFEQPILELEAKIKKIHDDPEKTAKSDKTLDKLQIERDNLISKIFNNLSDWQISQVARHPLRPHTLDYIPNIFDNFTELHGDRMFGDDSAIVTGLATIDNYKFVLIGHQKGRDAKEKVKRNFGMSKPEGYRKALRIMRLAEKFSLPILTFIDTPGAYPGIDAESRNQSQAIAENLYVMSNLKVPIISVVIGEGGSGGALAIGIADRLCMLQNSIYSVISPEGCASILWKDSKKASHAAEALCITSNKLLKFNLIDKIIPEPLGGAHRDIVATSSSLKMNILSIIDELNNYPVDQLLSERHNKIQSYGEFEK

SEQ ID NO: 167984 - protein, 281 aa, Unknown
  Bacterial polypetide isolated from the Sargasso Sea
MNWLRRLIPSIGTFKSKSKVPDGLWSSCKKCESVLYAPELEKSLFVCPKCDYHLRIGARQRLDMFLDNSNYSEIAPDLTTKDPLKFKDSKHYTSRIKEAVASTGEKEALLVVSGELDQRKVIVAAFEFRFMGGSMGSVVGEKFVQGIKTAIKNKYPFICFATSGGARMQESMISLMQMAKTSAAIQKLKKEKLPYISVLVDPIYGGVSASIAMLGDINIAEPNALSGFTGRRVIEQTVRLELPDNFQKSEYLLSNGAIDMIVHRKNLRSKISGILKKIHKT

SEQ ID NO: 167985 - protein, 189 aa, Unknown
  Bacterial polypetide isolated from the Sargasso Sea
HANRFSLPILTFIDTPGAYAGLKAEEQGQGEAIARNLREMFGLKVPIVATVIGEGGSGGALGIGVADRLLMFEHSVYTVASPEACASILWRDAAKAPEAASALKITGKDLLKLGVIDEVLPEPSGGNNWAPLDAGNTLKEAIEKHLNALLQMPEDELIEERYKKFRVLGNFIEANNIEEIYSEIPQKTE

SEQ ID NO: 167986 - protein, 282 aa, Unknown
  Bacterial polypetide isolated from the Sargasso Sea
MNWLTRLIPSIGKSSTKSKSKIPDGVWTSCPSCESALYQPELQKTLYVCPKCDHHLRIGARTRFNIFFDNGNFTEIASNVETGDPLGFKDVKAYPARIKEAKKNTGESEALLVGFGKLDGRLVTAAAFEFKFMGGSMGSVVGEKFVQGIEQAIESKTPFICFSTSGGARMQESMVSLMQMAKTSAAIQKLKLNKLPYISVMVDPIFGGVSASLAMLGDINIAEPKAFVGFAGRRVIEQTVRVELPEDFQKSEFLLEHGAIDMIVHRSEIRSKIIGILDKISK

SEQ ID NO: 167987 - protein, 314 aa, Unknown
  Bacterial polypetide isolated from the Sargasso Sea
MKRYYLPFEKPLKDLDFEIERLTTSESDSKQLKDLIVERENLEKEIFADLSPWETVQLARHPNRPYTLDYINAWCDNFTELHGDKAFSDDNAVVAGIGIIEGMKVAIIGQQKGRNTKDNIFRNFGMMKPEGYRKALRVMKLAEKFKLPIITLIDTPGADPGIGAEERGQGYAIANNLFEMASIKTQILSIVIGEGASGGALGIGLCDKMIMLENTWFSVISPEGCASILWKDSSKAPEAAKSLKLTPKDLMEHDICNMIVYEPSGGAHRHFDSTADILKETILSEIKELQKNLSNDFLESRVSRYDKLGVFRED

SEQ ID NO: 167988 - protein, 282 aa, Unknown
  Bacterial polypetide isolated from the Sargasso Sea
MNWLTRLIPSIGKSSSKSKSKIPDGVWTSCPSCEAALYQPELQKTLYVCPKCDHHLRIGARTRFNIFFDNGNFTEVASNIETKDPLGFKDVKRYPARIKEAKRNTGENEALLVGFGKLDGRLVTAAAFEFKFMGGSMGSVVGEKFVQGIEQAIERSTPFICFSTSGGARMQESMVSLMQMAKTSAAIQKLKSEKLPYISVMVDPIFGGVSASLAMLGDINMAEPKAFVGFAGRRVIEQTVKVELPEDFQKSEFLLEHGAIDMIVHRSEIRSKIIGILDKISK

SEQ ID NO: 167989 - protein, 174 aa, Unknown
  Bacterial polypetide isolated from the Sargasso Sea
EALLVGFGKLDGRLVTAAAFEFKFMGGSMGSVVGEKFVQGIQQAIETNTPFICFSTSGGARMQESMVSLMQMAKTSAAIQKLKSNKLPYISVMVDPIFGGVSASLAMLGDINIAEPKAFVGFAGRRVIEQTVRVELPEDFQKSEFLLEHGAIDMIVHRSEIRSKIIGILDKISK

SEQ ID NO: 167990 - protein, 290 aa, Unknown
  Bacterial polypetide isolated from the Sargasso Sea
MSWLEKILPRTSSSSRRNIPEGVWTKCTSCDAVLYKAELDRNLGVCPKCDNHMRISARDRLNSFLDTGGMVELAAELEPQDLLKFKDSKKYKDRIVAAQKETNEKDAMVVMRGTLLGMPVVVASFEFAFMGGSMASVVGAKFVKGVEYALENKVPFICFSASGGARMQEALLSLMQMAKTSAALAKLSEAGLPYISVLTDPTMGGVSASLAMLGDLNIGEPKALIGFAGPRVIEQTVREKLPEGFQRSEFLLEHGAIDMIVDRRQMRDTIARLVAKFMRWPAPAKEHRVA

SEQ ID NO: 167991 - protein, 281 aa, Unknown
  Bacterial polypetide isolated from the Sargasso Sea
MNWLRRLIPSIGTFKSKSKVPDGLWSSCKKCESVLYAPELEKSLYVCPKCDYHLRIGARKRLNIFLDDSSYEEIAANLTTKDPLKFKDSKYYTSRVKEAVAATGEKEALIVVKGKLEGVSIVVAAFEFRFLGGSMGSVVGEKFVQGINTAIKEKVPFICFATSGGARMQESMISLMQMAKTSAAIQKLKKEKLPYISVLIDPIYGGVSASIAMLGDINIAEPNALSGFTGRRVIEQTVRIELPDNFQKSEYLLSNGAIDMIVHRKNLRSKISSILNKIYKS

SEQ ID NO: 167992 - protein, 285 aa, Unknown
  Bacterial polypetide isolated from the Sargasso Sea
MATYLEFEEPIKLLEEQITQAKEISSNTGVDMSDNIKQLQKNLTDKTKEIISNLTPWQRVQLSRHPDRPYTMAYINALTNGEFQELHGDRNVKDDKAMVGGFGLMDDRSIMFIGQQKGINTKMRQFRNFGMPNPEGYRKALRLMKLAEKFNKPIVTFIDTPGAFPGLEAEERGQGEAIARNIYEMMRLKVPVICIIIGEGASGGALGIGVGDRVMMLENTWYSVISPESCSSILWRSWDFKETAADALKLTSAHMKKLSIVDEVIKEPIQGAHRNKEEMFRRVRK

SEQ ID NO: 167993 - protein, 238 aa, Unknown
  Bacterial polypetide isolated from the Sargasso Sea
PKCNHHMKIAARSRLQYFLDEEYKKEIGINIKPIDVLKFRDTKRYKDRLSQAKKNTGENDAIVVMSGNLKGLPVVVCAFEFGFMGGSMGSVVGEKFVLGVEKAIELNASLICFSSSGGARMQEALFSLMQMAKTAAALANFRKYRLPFISVMTHPTTGGVSASLATLGDINIAEPNALIGFAGPRVIEQTVREKLPEGFQRSEFLLEHGDIDMIIDRRELRTKIAEIISVLTHQQTSV

SEQ ID NO: 167994 - protein, 304 aa, Unknown
  Bacterial polypetide isolated from the Sargasso Sea
MYFLDFEKPIAELEAKIDELRSVESEQDVNVSNEIAALKKRSDDLTQSIFSTLTSWQISQISRHPKRPYTRDYIDRIFIDFEELHGERCFGDDPAIITGIGRLGKQSVVIIGHQKGRDTKERIKRNYGMPKPEGYRKALRVMQLAERFNMPILTFIDTPGAYPGIEAEERGQSEAIAKNLLVMSELQTPIIATVIGEGGSGGALAIGVADHLLMLEYSTYSVISPEGCASILWKSADKAKEAAQSMGIDAKKLKELGLIDRIIDEPLGGAHRDFDETARRIKQTIIEELEQLCVRPVSQVVNQR

SEQ ID NO: 167995 - protein, 151 aa, Unknown
  Bacterial polypetide isolated from the Sargasso Sea
FLGGSMGSVVGEKFVQGINKAIKYKTPFICFATSGGARMQESMISLMQMAKTSAAIQKLKKEKLPYISVLVDPIYGGVSASIAMLGDINIAEPNALSGFTGRRVIEQTVRIELPDNFQKSEYLLSNGAIDMIVHRNNLRSKISGLLKKIHK

SEQ ID NO: 167996 - protein, 373 aa, Unknown
  Bacterial polypetide isolated from the Sargasso Sea
CGHFGYGKINGKLVYVFSQDFTVFGGSLSETHAEKICKVMDHAVRNGAPLIGLNDSGGARIQEGVVSLGGYAEVFKRNVLASGVVPQISLVMGPCAGGAVYSPAMTDFIFMVEDSSYMFVTGPDVVKTVTHEEVTAEELGGASTHSQKSGVADLTFENDTDALLMTREFMSYLPQSNQEHPETIECKDSTEREEPALDTLVPQDPSKPYDIKEVIHKVADEGEFFELQPKYAQNIVTGFIRLNGSSIGVVANQPMVLAGCLDINSSIKAARFVRFCDAFNVPILTLVDVPGFMPGTSQEYGGIIKHGAKLLFAYAEATVPKVTMITRKAYGGAYDVMSSKHIRGDINFAWPSAEIAVMGPKGAVEIIFRQDIG

SEQ ID NO: 167997 - protein, 192 aa, Unknown
  Bacterial polypetide isolated from the Sargasso Sea
VGVVATQPLVLAGCLDIDSSKKAARFVRFCDCFNIPIITFVDVPGFLPGTAQEYGGIIKHGAKLLFAYAEATVPKITVITRKAYGGAYDVMSSKHIRGDLNYAWPTAEIAVMGPKGAVEIIYREDRDDPAKIESRTEEYRDKFANPFVAAQKGFIDDVIFPRNTRRRLCRSLRLLKNKKLENPWKKHDNIPL

SEQ ID NO: 167998 - protein, 151 aa, Unknown
  Bacterial polypetide isolated from the Sargasso Sea
MSDILTELENRRAEARLGGGKQRINAQHAKGKLTARERIEILLDEGSFEEFDMFVVHRCEDFGMADQRPAGDGVVTGWGTINGRMIYVFSQDFTVFGGSLSETHARKICKIMDMAMQNGAPVIGINDSGGARIQEGVASLAGYAEVFQRNV

SEQ ID NO: 167999 - protein, 263 aa, Unknown
  Bacterial polypetide isolated from the Sargasso Sea
SNRERSPEIANEDNVKRMEPSLDTLIPENPNTPYDMKELILKICDCADFFETQEQFAKNIITGFCRFNGQTVGVVANQPLVLAGCLDIDSSKKAARFVRFCDAFEIPLLTLVDVPGFLPGTAQEYGGVIKHGAKLLFAYGEATVPKVTVITRKAYGGAYDVMSSKHLRGDFNYAWPTAEIAVMGAKGAVEILYRSELQDTKKITKRTSEYEDRFANPFVAAQKGFIDEVIMPHNTRKRVVGAFSTLKNKKLSNPQKKHDNIPL

SEQ ID NO: 168000 - protein, 268 aa, Unknown
  Bacterial polypetide isolated from the Sargasso Sea
TDFIFMVKDSSYMFVTGPDVVKTVTNEVVTAEELGGASTHTKKSSVADGAFENDVEALAEIRRLMDFLPLNNREKAPVRPFFDDPDRIELSLDTLIPENPNTPYDMKELIVKVADESNFFEIQEDFAKNIIIGFIRLEGQTIGVVANQPIVLAGCLDIDSSRKAARFVRFCDAFEIPILTLVDVPGFLPGTSQEYGGVIKHGAKLLFAYGEATVPKVTVITRKAYGGAYDVMSSKHLRGDFNYAWPTAEIAVMGAKGATEIIHRNDLG

SEQ ID NO: 168001 - protein, 144 aa, Unknown
  Bacterial polypetide isolated from the Sargasso Sea
MKEIAKELARRRRSAEEGGGPARVKAQHGKGKLTARERLEILLDPGSFEEYDAFVEHRSTEFGMGSSKIPGDGVVTGHGTINGRALFVFSQDFTVFGGSLSEAHAEKICKVMDQAMKVGVPVIGINDSGGARIQEGVASLGGYA

SEQ ID NO: 168002 - protein, 276 aa, Unknown
  Bacterial polypetide isolated from the Sargasso Sea
KTGCPVIGLNDSGGARIQEGVVSLGGYAEIFYRNVQSSGVIPQFSLILGPCAGGAVYSPAMTDFTLMVKDSSHMFITGPDVIKTVTHEEVTFEELGGAMTHNSTSGVAHLACESEESMFESLRELLSFIPQNNMENVPIMPYEKKELDSINELDEIIPDNSNVPYDMTKVINLIFDDHLFEVQPHWAKNIITGFARLRGHPVGIVANQPSFLAGCLDIDASTKAARFVRFCDAFNIPLVTFVDVPGFLPGTEQEHGGIIRHGAKLLYAFSEASFQN

SEQ ID NO: 168003 - protein, 294 aa, Unknown
  Bacterial polypetide isolated from the Sargasso Sea
GKLTARERLELLVDEGTFHEIDSLVEHRCRDFDMDKNVIPGDGVVTGHGKIGGKPIYCFAQDFTVYGGSLGEMHGLKICKVLDMALKTGVPVIGLNDSGGARIQEGVASLGSYAEIFFRNVRASGVIPQISLIMGPCAGGAVYSPAITDFVVMVDKSAHMFITGPEVIKTVTNEIVSFEDLGGAATHNSKSGVSHFIAENDEDAIEIARELISILPANNLQKAPSKNSNDNPNRLCEDLIDLVPEDPSQPYDVKKVISSIVDDGAFLEVQAEWAKNIVIGYSHLKWKSNWGYCK

SEQ ID NO: 168004 - protein, 282 aa, Unknown
  Bacterial polypetide isolated from the Sargasso Sea
VTGYGTINGRLTFVFSQDFTVFGGSLSESHAEKICKIMDKALQVGAPVIGLNDSGGARIQEGVASLAGYAEVFQRNVLSSGVIPQISVIMGPCAGGAVYSPAMTDFIFMVKDTSYMFVTGPDVLKTVTHEEVSHEELGGASTHTKKSGVADLAFENDVEALFQLRRFMGFLPSSNKEQPPTRPSEDPADRLEFSLDTLVPDNPNKPYDMKELITKVVDDRDFFETQSDYAANIITGFARMTGSPVGIVANQPMVLAGCLDNNSARKAARFVRFCDCFNIPII

SEQ ID NO: 168005 - protein, 220 aa, Unknown
  Bacterial polypetide isolated from the Sargasso Sea
DILLDDGSFQELDMFVEHRAVDFDMDKQKIPGDGVVTGYGKINGKLVYVFSQDFTVFGGSLSETHAEKICKVMDHAVRNGAPLIGLNDSGGARIQEGVVSLGGYAEVFKRNVLASGVVPQISLVMGPCAGGAVYSPAMTDFIFMVEDSSYMFVTGPDVVKTVTHEEVTAEELGGASTHSQKSGVADLTFENDTDALLMTREFMSYLPQSNQEHPETIECE

SEQ ID NO: 168006 - protein, 191 aa, Unknown
  Bacterial polypetide isolated from the Sargasso Sea
GVVANQPMVLAGCLDIDSSRKAARFVRFCDAFEIPILTLVDVPGFLPGTSQEYGGVIKHGAKLLFAYGEATVPKVTVITRKAYGGAYDVMSSKHLRGDFNYAWPTAEIAVMGAKGATEIIHRNDLGNEKKIAKHTADYEQRFANPFVAAERGFIDEVIQPRSTRKRISRAFAALRGKQLKNPWKKHDNIPL

SEQ ID NO: 168007 - protein, 235 aa, Unknown
  Bacterial polypetide isolated from the Sargasso Sea
EFDMFVVHRCEDFGMADQRPAGDGVVTGWGTINGRMVYVFSQDFTVFGGSLSETHAQKICKIMDMAMQNGAPVIGINDSGGARIQEGVASLAGYAEVFQRNVMASGVIPQISVIMGPCAGGAVYSPAMTDFIFMVKDSSYMFVTGPDVVKTVTNEVITAEELGGASTHTKKSSVADGAFENDIEALAEIRRLMDFLPLNNREKAPVRPFFDDPGRVELSLDTLIPENPNTPYDMK

SEQ ID NO: 168008 - protein, 510 aa, Unknown
  Bacterial polypetide isolated from the Sargasso Sea
MKENIKELERKKAAAKLGGGEERIKKQHAKGKLTARERLEILLDEGSFQELDMFVEHRAVDFDMDKQKIPGDGVVTGYGKINGKLVYVFSQDFTVFGGSLSETHAEKICKIMDHAVRNGAPLIGLNDSGGARIQEGVVSLGGYAEVFKRNVLASGVIPQISLVMGPCAGGAVYSPSMTDFIFMVEDSSYMFVTGPDVVKTVTHEEVTAEELGGASTHSQKSGVADLTFENDRDALLMTREFMSYLPQSNQEYPETIECNDSIDREESALDTLVPQDPSKPYDIKEVIHKVADDGDFFELQPKYAQNIVTGFIRLNGSSIGVVANQPLVLAGCLDINSSIKAARFVRFCDAFNIPILTLVDVPGFMPGTSQEYGGIIKHGAKLLFAYAEATVPKVTLITRKAYGGAYDVMSSKHIGGDINFAWPSAEIAVMGPKGAVEIIFRQDIGDDKKIEKRTQEYTEKFANPFIAASRGYIDDVIMPNNSRKKLIESFEMLKNKQQENPWRKHDNIPL

SEQ ID NO: 168009 - protein, 516 aa, Unknown
  Bacterial polypetide isolated from the Sargasso Sea
MTIHEKLQRLEEMGREAQEGGGAERIKAQRERGKLSARERLDLLLDEGSFVELDRFVTHRSSDFGLEEKKILGDGVVTGYGTIHGRLVFAFSQDFTVFGGSLSETHAEKIVKLQDMAMRNGAPIIGLNDSGGARIQEGVVSLGGYADIFLRNTMASGVIPQISVILGPCAGGAVYSPAITDFVYMVRGTSYMFVTGPNVVKTVTHEDIDMEGLGGADIHASTSGVAHFARDSEPECLESVRELFQYIPQNNSETPPSASGIDPHDRKDEKLLEVVPDNPNQPYDMCDVIRRVVDDGEFYEVHEKFAGNILVGFAHLGGHAVGIVANQPAVLAGVLDIDSSDKGARFVRFCDAFNIPLIVLEDVPGFLPGVAQEHGGIIRNGAKLLYAFAEATVPKVTVITRKAYGGAYDVMNSKHIRGDMNFSWPQAEIAVMGPKGAVEVLFRKEIAEASDPEAATEARIEEYREKFAHPYIAASRGYVDDVIDPRETRPRLISALDMLQNKRDENPIKKHGNIPL

SEQ ID NO: 168010 - protein, 510 aa, Unknown
  Bacterial polypetide isolated from the Sargasso Sea
MKENIKELEKRKAAAKLGGGEERIKKQHAKGKLTARERLDILLDDGSFQELDMFVEHRAVDFDMDKQKIPGDGVVTGYGKINGKLVYVFSQDFTVFGGSLSETHAEKICKVMDHAVRNGAPLIGLNDSGGARIQEGVVSLGGYAEVFKRNVLASGVVPQISLVMGPCAGGAVYSPAMTDFIFMVEDSSYMFVTGPDVVKTVTHEEVTAEELGGASTHSQKSGVADLTFENDTDALLMTREFMSYLPQSNQEHPETIECKDSTEREEPALDTLVPQDPSKPYDIKEVIHKVADEGEFFELQPKYAQNIVTGFIRLNGSSIGVVANQPMVLAGCLDINSSIKAARFVRFCDAFNVPILTLVDVPGFMPGTSQEYGGIIKHGAKLLFAYAEATVPKVTMITRKAYGGAYDVMSSKHIRGDINFAWPSAEIAVMGPKGAVEIIFRQDIGDEEKIEKRTQEYTEKFANPFIAASRGYIDDVIMPHNSRKKLIESFEMLKNKHQENPWRKHDNIPL

SEQ ID NO: 168011 - protein, 242 aa, Unknown
  Bacterial polypetide isolated from the Sargasso Sea
MVEQNENLKNLQKKVDSALQGGGLERINKQHKKGKLTARERLMVLLDDDSFEEFDMFVEHRETEFGMANNKIPGDGVVTGHGKINGRLVFVFSQDFTVFGGSLSETHAEKICKIMDKAMSVGAPLIGINDSGGARIQEGVASLGGYANVFQKTILASGVVPQISLIMGPCAGGAVYAPAMTDFIFMVNKTSHMFVTGPDVVKTVTHEEVSHEELGGATTHTTKSSVADLAFDDDIQTLIQAR

SEQ ID NO: 168012 - protein, 315 aa, Unknown
  Bacterial polypetide isolated from the Sargasso Sea
MDKNKELEKKREESKLGGGLSRIEKQHSQGKLSARERIFLLLDEGSFQEIGALVSHRSTDFGLDKKKFPGDGVVTGYGYVHGRLVYVFSQDFTVFGGSLSESHASKICQVMDLALKNGAPLIGLNDSGGARIQEGVVSLAGYADIFYRNTRASGVIPQISVIMGPCAGGAVYSPALTDFVFMVEDTSFMFVTGPNVVKTVTHEEVSSEDLGGAMTHAEKSGVNHFTSPNDLECIRSVRDLVSYIPQNYSELPPQRENGNVFEENKLERIKGIVPDNSNLPYDIREVIDCVIDDDSFKEFNRISPKILSLAFVELM

SEQ ID NO: 168013 - protein, 365 aa, Unknown
  Bacterial polypetide isolated from the Sargasso Sea
QKIPGDGVITGWGTINGRLVYVFSQDFTVLGGSLSESHAKKICKIMDMAVQNRAPVIGLNDSGGARIQEGVASLAGYAEVFKRNTLASGVIPQISVIMGPCAGGAVYSPAMTDFIFMVKNTSYMFVTGPDVVKAVTNEVVTAEELGGAKTHTSKSSVADAAYDNDIIVLKQVRRFFDFIPLNNTDKCPAIKVYDSIYRSENSLDTLVPQNPNTPYDMKELILKIADENDFFEIQKEFARNILVGFIRINGSTVGVVANQPMVLAGCLDIDSSRKAARFVRFCDAFEIPILTFVDVPGFLPGTSQEYGGVIKHGAKLLFAYAEATVPKVTVITRKAYGGAYDVMSSKHLRGDFNYAWPTAEIAVMG

SEQ ID NO: 168014 - protein, 380 aa, Unknown
  Bacterial polypetide isolated from the Sargasso Sea
MNDILTELENRRAEARLGGGKKRIDAQHAKGKLTARERVEILLDEGSFEEFDMFVVHRCEDFGMADQRPAGDGVVTGWGTINGRMIYVFSQDFTVFGGSLSETHARKICKIMDMAMQNGAPVIGINDSGGARIQEGVASLAGYAEVFQRNVMASGVVPQISVIMGPCAGGAVYSPAMTDFIFMVKDSSYMFVTGPDVVKTVTNEVVTAEELGGASTHTKKSSVADGAFENDVEALAEIRRLMDFLPLNNREKAPLRPFFDDPGRVELSLDTLIPENPNTPYDMKELIVKVADESDFYEIQKDFAKNIIIGFIRLEGQTVGVVANQPMVLAGCLDIDSSRKAARFVRFCDAFEIPILTLVDVPGFLPGTSQEYGGVIKHGA

SEQ ID NO: 168015 - protein, 488 aa, Unknown
  Bacterial polypetide isolated from the Sargasso Sea
RIEAQHSKGKLTARERIEILMDQDSFEEFDMFVTHRCTDFDMEKSKTAGDGVVTGWGTINGRLVYVFSQDFTVFGGSLSETHAQKICKIMDMAIQNGAPVIGLNDSGGARIQEGVASLAGYAEVFQRNVMASGVIPQISVIMGPCAGGAVYSPAMTDFIFMVKDSSYMFVTGPDVVKTVTNEVVTAEELGGASTHTKRSSVADAAFENDIEALFEVRRLVDFLPLNNRGKVPVRPFFDDPNRIESSLDTLIPDNPNTPYDMEELIEKLADEGDFYEIQGEFAKNIITGFVRLEGQTVGVVANQPMVLAGCLDIDSSRKAARFVRFCDAFEIPILTLVDVPGFLPGTSQEYGGVIKHGAKLLFAYGEATVPKVTVITRKAYGGAYDVMSSKHLRGDFNYAWPTAEIAVMGAKGATEIIHRADLGDKENISKHAQEYEDRFANPFIAAERGFIDEVIQPRSTRKRVSRAFAALRNKKLINPWKKHDNIPL

SEQ ID NO: 168016 - protein, 305 aa, Unknown
  Bacterial polypetide isolated from the Sargasso Sea
MLQKNGFEFQVPVFSCMLAHDGAKHPKKIKGDCLVEYKYDGVRVIAIVKNNKATLYSRNGKIFYNFPNIESALSKPEYNNTVFDGEVMSDDFQALMKQVYRKSGAQTDDAYLALFDILPLKEFNNGKSKLNSIDRKKELNQLSKTFEDVIKLVDYEIINFDNENGQNKFSIMNKEALDKGFEGLMIKPNENFYECKRSHAWLKIKPFIEVTLKIIDIQEGTGKHEGKLGAFHVEGNDDGKFFSLSVGSGLTDEDREKFWASKDNLIGRLVEIRADAVTQSIEGEHYSLRFPRFKNFRGFKEDEKI

SEQ ID NO: 168017 - protein, 428 aa, Unknown
  Bacterial polypetide isolated from the Sargasso Sea
MNDPWKIIKELESDNSRLFKEGVVENNLNNIDFQEGLSMCLDPLITFGVKQVPESEQDGDGLKWDDFKKDVDLLIEREKTGHAARDLIIDLMSSAKKDQWNDWYRRILIKDLRCGVSEKTVNNVAKRMDLEFKVPIFSCMLAHDGAKHPKKIKGNCLVEYKYDGVRVIAIVKNGKATLYSRNGKIFHNFPHIENALSKSEYNNIVFDGEVMSDDFQALMKQVYRKSGAQTDDAYLALFDILPLKEFNEGKSKLSSIERKKELNKLSKSFENAIKLVDYEVINFDEKNGQDKFASMNKEALEKGFEGLMIKPNDNYYECKRSHAWLKIKPFIEVTLKIIDIQEGAGKHSGKLGAFHVEGDDDGKFFSLSVGSGLTDEEREKFWASKDKLIGRLVEIRADAITQSIEGEHYSLRFPRFKNFRGFKKDEKI

SEQ ID NO: 168018 - protein, 324 aa, Unknown
  Bacterial polypetide isolated from the Sargasso Sea
MLAHPINIEKDFEGLDPNNYQAEWKWDGIRVQAVFDDSNKRLFSRTGDDISRAFPDIVSELNGRAVLDGELLVGKNFAALPFNKLQQRLNRKSPAKVHLDAYPAFIRVYDMLFCNNEDIRDLPLQSRRQKLEGWLGRTRNSRLDISEILSFDSWDSLAELRTEKAETLGHEGVMIKNLQSKYSAGRPKGLWFKWKRDPKYVDGVMMYAQRGHGRRSSFYSDYTFGIWRGNELVPVGKAYSGFTDEELLELDKWVRANTLNRFGPVREVKKELVVELAFDSAHESTRHKSGVALRFPRVHRIRWDKPAQEADTIETIQSIIRPEN

SEQ ID NO: 168019 - protein, 352 aa, Unknown
  Bacterial polypetide isolated from the Sargasso Sea
MVPLGENVTKNIKTIKSIPLKLHGKNIPDIIEIRGEVFISKKGFLSINSSESEKKFANARNAAAGSLRQLDSKIAASRPLDAFFYAIGFTSDNIKINTQSEILEQLKNWGFKICNFNERVTGMDGCEKFYKKIYSIRDSIPYDIDGIVYKVDNLNYQEALGYVSRAPRWAIAHKFPAEEKSTFIEDVRFQVGRTGVLTPVASLKPVEVGGVIIRNATLHNMDEIRKKDIHIGDKVSLRRAGDVIPEIVSVISKNKLRKKINLPKKCPCPLASKIEKEKGMAFAKCTGSKSCPAQKKGAIIHYVSKKAMDIQGVGEKLINRLVDENILDDVSDLYKLNKKILGDFVMSTAIRE

SEQ ID NO: 168020 - protein, 362 aa, Unknown
  Bacterial polypetide isolated from the Sargasso Sea
LSLDNVFSMDELMSFEKRIKDRLSLIEDIEFIAEPKFDGVAVNLVYESGKLSYATTRGDGKTGEDVTHNILTIKSIPIKLNTSYPPEKIEIRGEVIISKNDFEKMNRENEAKNLKVFANPRNAAAGSIRQLDPNIAKSRPLRFYAHGYGFLSNENDFNNHSDVIKYLNDSGIVISPLSQIVTGSEECDKYYQNINSTRDSLDFEIDGVVYKVNKISYQKELGFVSKAPRWAIAHKFSSVEVESKILDVDFQIGRTGTITPVAKLDPINVGGVIVSNATLHNMDEISRKDIRNGDHVFVRRAGDVIPEIVSVNKKKRSQQTKKIVFPKNCPSCGSEIVRKDGESAAKCTGGSVCPDQIKEGLN

SEQ ID NO: 168021 - protein, 313 aa, Unknown
  Bacterial polypetide isolated from the Sargasso Sea
QLKIFQKKINKTDFPKVLDVRGEVYISKSDFKKINKQFANPRNAAGGSLRQKDHNETKKIPLKFVAYGFGIVEPKNFKTQSEYLNLLKKWGFETNSLNTLVNTIEDIEKNHKTIEAKRSVIDYDLDGLVYKVDDLKLQNRLGFVSNSPRWAIAHKFSSEKGFSIIKNIEVQIGRTGALTPVAKIEPVNIGGVVVSNATLHNEDEINRKDIRIGDAVCIQRAGDVIPQVLYVDKDKRNKNIKKFNFPNNCPSCGSKTIKEFNYSTKKKDVVTRCPDPKFNCAEILREKLKHFVSKDALNIDGFGKKIVQNFWDL

SEQ ID NO: 168022 - protein, 220 aa, Unknown
  Bacterial polypetide isolated from the Sargasso Sea
MKDIELKIRKLIDEINFHNYQYHGMDDPKISDRDFDQMVRALHDLEKNYPQLIQADSPTQRVGSKPIDRFIQIDHLTPMLSLDNVFSMDELMSFEKRIKDKLSLIEDIEFIAEPKFDGVAVNLVYESGKLSYATTRGDGKTGEDVTHNVLTIKSIPIKLNTSSPPEKIEIRGEIIISKNDFEKMNRKNEAKNIKVFANPRNAAAGSIRQLDPNIAKSRPL

SEQ ID NO: 168023 - protein, 328 aa, Unknown
  Bacterial polypetide isolated from the Sargasso Sea
DAEWDMLMRELVGLEDQYPHLRTMDSPTQNVGGSPSKIFSPVTHRVPMMSLDNAFEVEALDQWKTRLERKLAAGTKIGDLVCELKFDGLAISVRYEQGRLVQAATRGDGVVGEDVTHNVLTISDLPHVIRGAPPILEVRGEVYLRRSEFQKLNRAAKKNDGKEYVNPRNAAAGSLRQKDSSIAATRNLSFWAYQLGEVEEGPELASHYETLEFLSSLELPVNENAKLVKDIAGALGYIQEFQEARDSLDYEFDGIVIKVDSLLLQEELGNTAKAPRWAVAYKLPAEEQVTTLLDIEVSIGAAGSATPFARLEPVFVGGVTVSTATLHN

SEQ ID NO: 168024 - protein, 264 aa, Unknown
  Bacterial polypetide isolated from the Sargasso Sea
PINDYANPVNNTDEMKKNHLKLENLGSNLDYDVDGVVYKVNNLDFQERLGSTANSPRWAIAYKFSSVKASSKITNIVIQVGRTGAITPVAKINPVTVGGVVVSNATLHNEDEINRKDIRIGDTVTIQRAGDVIPQVLSVDKAKRGKNSKKFIFPTKCLCGAITKKETSITTKKIDAVRRCLKGYECDFTAKEKLKHIVSKEAFDIEGLGKKVIDNFWNLNLIKTPADIFRLDYLKIRKLEGWGELSIKNLQNAIDKSKKYNVRQ

SEQ ID NO: 168025 - protein, 176 aa, Unknown
  Bacterial polypetide isolated from the Sargasso Sea
MNPEKKAKLLREEINKANKLYYVDNSPSMSDQEWDKKFQELIAIEKEFPETKTTDSPTQRVGASPAKGFNEHKHLLPMLSLGNAFNEIQIRDWYERVLKLLEIENLDMVCELKIDGLAVSIFYENGVLTKAATRGNGVIGEEVTENVKTIRSIPLTLNGNYPEKFEIRGEVFLPLS

SEQ ID NO: 168026 - protein, 318 aa, Unknown
  Bacterial polypetide isolated from the Sargasso Sea
MNEIISRIFELEKIINNHNHNYYDLDKNLISDFEYDKLLNELVKLESKHPEFYDENSPSNRVGGGLSDKFNSESHVFQMYSLDNTYSSEELESWYTRVVKILNTDNFEFCCELKYDGASVNLMYEDGKLIRALTRGDGTQGDNITNNIKTIRSVPIKLNNTILNKFEIRGEIIIRNDSFEKLNRKREKLGEPLFKNPRNTASGSIKLLDSDEVARRPLECFLYSIVSEEVKIKNHSELLSIARKMGFDVPKYERVVDGLNGVRDYIDFWDKNRSSLPFEIDGIVIKINNIDFQKKLGFTSKFPRWAIAYKYKAENWQQ

SEQ ID NO: 168027 - protein, 232 aa, Unknown
  Bacterial polypetide isolated from the Sargasso Sea
MKKSEITKKYLKKIKLINKFNKFYFEKDKPIVSDGVYDDLKKEILLLERKYIFLNSKNSPSQVVGHKPSKNFKKVQHKVPMLSLSNAFTEEDLKNFEKKISNFLSKKNDFKIFYSAEPKIDGISASLTYKNGNLIRGLSRGDGKEGEDITDNLITIKDIPKKILSKDFPEEIDVRGEVFIQNSDFEYLKDKFANPRNAASGSLRQKNSGDTKKIPLKFIAYTFGFENGLKAE

SEQ ID NO: 168028 - protein, 260 aa, Unknown
  Bacterial polypetide isolated from the Sargasso Sea
MKNRNLIKKEYLTKINKLKEHNQLYYEKSKPKISDAEYDELKKEIIELEKQYDFLKSKNSPSSSIGAKPSKNFMKSKHRVKMLSLSNAFDQEDLKNFEKKISNFLNLKESTDIEYSVEPKIDGISASLNYKNNNLVLGLSRGDGIEGEIITENLKTIKDIPKFIKDKKFPKEIDIRGEVYIGKNDFEKIKDRFANPRNAASGSLRQKNPNETKKIPLRFIAYTYGFCSEINFKKQSEFLNLLKDWGFKTNSYNKVISGIA

SEQ ID NO: 168029 - protein, 125 aa, Unknown
  Bacterial polypetide isolated from the Sargasso Sea
MDLFSAPTPVDKAQPAIKIKALRDQLNTWAHQYYVLDEPTVPDAEYDRVFRELQALEAEHPDLITPDSPTQRVIGAVMEGLAPVRHAVPMLSIHTETDTEATGAQAFDARVRRELGLSESDPAIE

SEQ ID NO: 168030 - protein, 217 aa, Unknown
  Bacterial polypetide isolated from the Sargasso Sea
MNKNIKKNYQKKINEFKNHNKLYYESSSPKISDKAFDKLKKEILELEKKYTFLKSNFSPSQAVGFKPSKNFLKFKHRQQMLSLSNAFNEEDLLNFEKKVLNFLNEKFYLEYSVEPKIDGISASLTYKNGLLTYGVSRGDGKEGEIITENLKTIKDIPHKVENNNFPKDIEIRGEVFINKNDFEKIKDTFANPRNAASGSLRQKNPEETRKIPLNFIA

SEQ ID NO: 168031 - protein, 125 aa, Unknown
  Bacterial polypetide isolated from the Sargasso Sea
MKDLLKKYEQLKEEIQLHNYNYHALDDPKISDSEYDKLFRDLLNLEEENPHLVTPDSPTQRVGFSPIDEFETSEHSVPMLSLANVFSEKEFLDFHDRILKRLVNKNDFEYFCEPKMDGAASITNY

SEQ ID NO: 168032 - protein, 234 aa, Unknown
  Bacterial polypetide isolated from the Sargasso Sea
LKLEKKSKFANPRNAAAGSLRQLDVSISHSRPLKFIPHGIGKCSYNFDKIENYYDQLKSWSITPNNISKKCNSVEEIINFYNQINQKRSGIDYDIDGLVVKINSFKLQERLGYVGKNPRWAVALKFSAEKANTIIQSVDYQVGRTGAITPVARLQPVNLGGVIISNASLHNFDEINKKNINVSDLVEIERAGDVIPYVTRLVNKNSKLNTKIKPPKTCPICKSNVLKEKDEAIL

SEQ ID NO: 168033 - protein, 273 aa, Unknown
  Bacterial polypetide isolated from the Sargasso Sea
MKWLEKNNIITVKNTKSKKINNEYLSELLVDWRSTYKYEIDGIIVINDKIYPRENKNPAHAFAFKMVLSDQVAEVKVIDVNYSISKYGYLKPVIQIEPVHIRGADIEFATAHNIKNVIDNNIGIGAIVQLSRSGDVIPKIEKVIVPAEEPKLPDVAWKWNETHVDALLKDSASNEEVRNKNIISFFAKLNTTGFGPGNITKVIEHGFDTIPKILKMSIEDFEEIPGFQITTAKKVYNGIKDKIDNVSLSVLMDATNIFGRGMGESRISAVLDV

SEQ ID NO: 168034 - protein, 248 aa, Unknown
  Bacterial polypetide isolated from the Sargasso Sea
MSSSDIKKKYSFKINEIKRHNQFYFEKNNPKISDREYDNLKKEIIELEKKYNFLNNQDSPSKSVGFKPSKHFLKSEHRVPMLSLSNAFDEEDLNNFEKKIFNFLNLDKNTKLEYSVEPKIDGISASLTYKDGALIKGLSRGNGFEGELITENLKTISDIPKKLKSKNCPKDIDIRGEVFIENNDFEKIKENFANPRNAASGSLRQKNPNETKKIPLKFIAYTFGFIKNFKLDKQSDFLEFLKEWGFKT

SEQ ID NO: 168035 - protein, 204 aa, Unknown
  Bacterial polypetide isolated from the Sargasso Sea
MKNKNLIKKKYLSKIQELKKHNRLYYDKSSPEISDSEYDQLKKDIIELENNNSFLRNKKSPTLSVGTKPSKNFLKSKHRIKMLSLSNAFDHEDLINFEKKISNFLNLSENKNFEYSVEPKIDGISASLTYKNNNLVLGLSRGDGIEGEIITENLKTIKDIPKIIKDKNFPKDIDIRGEVYIGKKDFEKIKDRFANPRNAASGSL

SEQ ID NO: 168036 - protein, 299 aa, Unknown
  Bacterial polypetide isolated from the Sargasso Sea
KNVLGIIGIPKVLKNCKSNLIEIRGEVFFIRKDFEKLNKEFEKKKQFSNPRNAASGSLRLINSKMTKDRPLRFIPHGYGKLSYEKEFLNFEDFLSFCKKNNFNKTGYAKKYSNLKDVHDYISEIEKKRSSINFDIDGMVIKINDLNLQRMLGSTNKFPRWAIAAKFSSEEALTQVEKIELQIGRTGAITPVARLKPINIGGVVVSNATLHNFDEVIRKDIRIDDFVWVKRAGDVIPYITKVDIEKRKKTNKKFVAPSKCLCGSKIIKIEDEAVQRCSAGKNECKYQKLENFKHFVSKKA

SEQ ID NO: 168037 - protein, 214 aa, Unknown
  Bacterial polypetide isolated from the Sargasso Sea
MSRDKEKIKNLYQSKLEKLKKHNKKYYEDSNPQIDDSEYDKLKKNILDLEEKYKFLKNKDSPSKTVGLKPSKIFLKSKHRLKMLSLSNAFDEKDLINFEKKISNFLNLKEYKNIEYSVEPKIDGISASLTYKNNILNLGLSRGDGIEGEIITENLKTIKDIPKNINHKTFPKDIDIRGEVYIAKKDFESIKDRFANPRNAASGSLRQKDSNETK

SEQ ID NO: 168038 - protein, 281 aa, Unknown
  Bacterial polypetide isolated from the Sargasso Sea
YDIDGIVYKVNNLNFQKRLGSTSNSPRWAIAYKFSSIKAISTINDIIIQVGRTGAITPVAKINPVTVGGVVVSNATLHNEDEINRKDIRIGDTVTIQRAGDVIPQVLSVDKSKRKKNSKKFSFPLNCLCGSPTKKEINRSTNKKDAVRRCTKGYDCDFTAKEKLKHLVSKDAFDIEGLGKKVIDSFWDLSFIRTPADIFSIDYEKLERLEGWGELSIKNLKKAINDSRKITLSKFIYSIGIRHIGQENAKILAAFFRTDKKFSELFDPVKRKHILKSLDDL

SEQ ID NO: 168039 - protein, 270 aa, Unknown
  Bacterial polypetide isolated from the Sargasso Sea
DLKREIIELEKKYKYLKSDHSPSINIGFKPSKNFKKAIHRVRMLSLSNVFSKDDLVNFEKKVCNFLNLKHGAKIEYSVEPKIDGISASLNYKNGILISGLSRGDGNEGELITENLKTIKDIPKKIDIQGFPNDIDIRGEVFITNKDFQKIKENFANPRNAASGSLRQKNSNETKKIPLKFIAYNYGYLEELKINKQSEFLEKLQLWGFKVSKFNKIISGIGNLIKNHEEIENKRYELDYDVDGLVYKINSIELQNRIGFLSNSPRWATAK

SEQ ID NO: 168040 - protein, 262 aa, Unknown
  Bacterial polypetide isolated from the Sargasso Sea
MANKDFDKIKDYFANPRNAASGSLRQKNPNETKKIPLKFIAYSYGHFENINFKKQSEFLSALKRWGFNTSEFNKVITGVDNLFTNHKEFENNRFKLDYDIDGLVYKINDFKFQNRLGFVTNAPRWAVAHKFSAESSFSEILNIEIQVGRTGALTPVAKIKPVNIGGVIVSNATLHNQDEIERKDIRIGDTVKIERAGDVIPHVISVDVNKRKKESRRFIFPEKCPSCGSKAIKEYNFQTKKYDAVKRCSSEGYECEKIAIEK

SEQ ID NO: 168041 - protein, 282 aa, Unknown
  Bacterial polypetide isolated from the Sargasso Sea
MSKNNEKKIVLKLKELSKQIKKHSDLYYNLDKPIISDKEYDKLIIENNILENKYPHLVLNNSPNKLVGAKVKSEFKKIEHYSQMYSLANAFDKNDIEEFFKRSNKFLNLQNNLFIESFCEPKIDGLSLNLLYKNGKLVSASTRGDGKIGENVTENILNINEIPKNLKNNFPEIIEIRGEIFINKTDFEIINSNLKDNEKFANPRNAAAGSLRQLDTSISHSRPLKFIAHGLGKSSINFDTIEEYYSNLKNWKIPLSDFTKKCNSIKDIMLHYEAINNKRANL

SEQ ID NO: 168042 - protein, 272 aa, Unknown
  Bacterial polypetide isolated from the Sargasso Sea
TFKKVKHSVPMLSLGNAFDKEDLINFEKKIINFLSFEKNKKFEYSAEPKIDGISASLIYKNGNFIQGLSRGNGVEGEDITENLKTIKDIPKKINYRNFPSEIDIRGEVFINKKDFEKIEENFANPRNAASGSLRQKNASETKKIPLKFIAYTFGYVRNYKLLKQTDFLDDLRKWGFKTNSLNKKISGIENLIKNYNQIENVRSDLDYDIDGIVYKINDLSLQNRLGFSSNAPRWAVAHKFSANKGYSKIIKIDIQIGRTGALTPVAKINPVN

SEQ ID NO: 168043 - protein, 207 aa, Unknown
  Bacterial polypetide isolated from the Sargasso Sea
MKKKDIQIFYEKKIKQYEFYNKYYYEKNNPKVLDSEYDNLKAEILNLEKEYNFLKSNKSPSINVGFKPSKNFQKVQHKVPMLSLANAFSEEDLENFEKKIINYLSIEKGFKIFYSAEPKIDGISASLTFKNGKFVIGLSRGDGKEGEDITANLLTINDIPKVISSKNFPEEIDIRGEVFIQNSDFEKLKDKFANPRNAASGSLRQKI

SEQ ID NO: 168044 - protein, 282 aa, Unknown
  Bacterial polypetide isolated from the Sargasso Sea
HNVKTINAIPLQLRKSVKTPTFMEVRGEIFMNISDFNKLNKSRELLEEKLFANARNAAAGSVRQLDPKITASRNLSIFCYEIGGSEDIEFNNQVEMLDYLKSIGLPVNPISKKITSANEMIAYHHTLESNRNHIDYEIDGSVIKVNNYKKRERLGLRSRSPRWAIAAKFKAKQAESQIIGIDLQVGRTGVITPVAKIKEVDLSGVMISSATLHNQDEIDRKDIRINDFVLIERSGDVIPKITQVLKNKRPKNTKKFSISDFNWPDPDCKIERIEGEAAYRCI

SEQ ID NO: 168045 - protein, 265 aa, Unknown
  Bacterial polypetide isolated from the Sargasso Sea
NLATIKDFPKKIISTDFPKEIDIRGEVFIKNSEFENIKHKFANPRNAASGSLRQKNPEDTKKIPLNFIAYTFGFEKGLNVDNQFEYLSKLNEWGFKTNPLNRLISGIKNLIKNYNEIEKLRTNLDFDIDGIVYKVNEFVLQKRLGNVANAPRWAVAHKFSSNKAVSQITDIEIQIGRTGAMTPVAKIKPINIGGVLVSNATLHNEDEINRKDIRIGDTVTVERAGDVIPHILTVDLIKRPKLSSKFIFPKNCPSCGSKTIKELNK

SEQ ID NO: 168046 - protein, 263 aa, Unknown
  Bacterial polypetide isolated from the Sargasso Sea
MNKEVEKIYKRKIKEFQKHNKLYYDKSSPAISDKEFDELKADIINLEKKYSFLRSTKSPSHSVGFKPSKNFEKFKHKVQMLSLSNAFDRDDLINFEKKILNYLNEKISLEYSVEPKIDGISASLTYINGNLTYGVSRGDGSEGELITNNLKTIKDIPHKILKKNIPKEIEIRGEVFIEKKDFEKIKDKFANPRNAASGSLRQKDPKETSKIPLKFIAYTFGFISENKFKNQSDFLNELKSWGFLTSDYNKVIKSTDELIIHHE

SEQ ID NO: 168047 - protein, 240 aa, Unknown
  Bacterial polypetide isolated from the Sargasso Sea
MNEKLLKKEYLKKISQLQKFNLAYYDKSAPIVADSEYDKLKKDIINFERKYDFLKSPNSPSLIVGFKPSKNFKKKRHRVQMLSLSNAFNKEDLINFEKRIINYLDKKNDFKIEYSAEPKIDGISASLIYKKGKFVTGLSRGDGKQGEDITENLKTINDIPQNILDKDFPEEIDIRGEVFIKNSDFKKLSNKFANPRNAASGSLRQKDPNETKKIPLKFIAYTFGFQRNLQIKSQTEFSKN

SEQ ID NO: 168048 - protein, 179 aa, Unknown
  Bacterial polypetide isolated from the Sargasso Sea
VAKRGLDSFLYSVYMNRNPITSHYQQILNAEEWGFKVPPIKERYIEKSASVEEIMNFINHWDIHRHDLPFEIDGIVLKVNNVHQQNEIGATAKSPRWAIAYKFKAERVETILQSVSYQVGRTGAITPVANLEPVSLGGTTVKRASLHNADQIEKNDLHIGDTVYLEKGGEIIPKIVGVK

SEQ ID NO: 168049 - protein, 292 aa, Unknown
  Bacterial polypetide isolated from the Sargasso Sea
VDHLTPMLSLDNVFSMDELMSFEKRIIDKLSLKEDIEFIAEPKFDGVAVNLVYESGKLSHATTRGDGKTGEDVTHNILTIKSIPITLNTSSPPEKIEIRGEIIISKNDFEKMNRENKDKNLKVFANPRNAAAGSIRQLDPKIAKSRPLRFYAHGYGLLSNENDFTNHSDVINYLNDSGIVVSSLSQLVTGADECGKYYQKMDSIRGSLDFEIDGVVYKVNKISYQKELGFVSKAPRWAIAHKFSSVEVESRILDIDFQVGRTGTITPVAKLDPINVGGVMVSNATLHNMDEI

SEQ ID NO: 168050 - protein, 317 aa, Unknown
  Bacterial polypetide isolated from the Sargasso Sea
EDLGFMLEKNPRWAIAYKFESEKAYTIIKKIDLQVGRTGAITPVARLKPIIIGGVTVSNASLHNFDEIDKKDIRENDTVEIERAGDVIPRVIRVSKKSNKRNKKVIAPKKCPVCKQNLYKEEDEAVIRCINYYNCSAQLVERLIHFASKKSFNIDGLGEKQINLFWQLKYLNKTSDIFRLNTYEKKIIELDGWGEISYLNLINSINKSKTINLQKFIYSLGIRYVGEINSQILSKHFINIQSFIKNANNIENLNSIDGLGPKAILSITEFLKNKYNLDEINEIAKYCKIIDYKKINSNNPFNNKSIIFTGKLTNMSR

SEQ ID NO: 168051 - protein, 292 aa, Unknown
  Bacterial polypetide isolated from the Sargasso Sea
MKDIKSKMRVLIDEINFHNYQYHGMDDPKISDYQFDKLVIELLDLEKEDPTLIQVDSPTQRVGSRPIDGFTQIDHLTPMLSLDNVFNMEELMSFEKRAKDKLSLEDKIEFIAEPKLDGVAVNLVYESGILSYATTRGDGTTGEDVTHNVLTIKSIPIKLKSSSPPKTIEIRGEIIISKNDFKIMNRDNAGKELKVFANPRNAAAGSIRQLDPNISKDRPLKFYAHGYGLLSDDDKFSTHYDVMNYLNDSGIVISPYSEVVIGAEECGKYYEKIDSLRDSLDFEIDGVVYKVN

SEQ ID NO: 168052 - protein, 304 aa, Unknown
  Bacterial polypetide isolated from the Sargasso Sea
NAINDEKINDFYKRIKKWLNNSEVDFVAEPKIDGLGVSLIYKNGILERALTRGDGFKGEDITHNVKTINAIPLQLRKSVKTPTFMEVRGEIFMNISDFNKLNKSREVLKEKLFANARNAAAGSVRQLDPKITASRNLSIFCYEIGGSEDIEFNNQVEMLDYLKSIGLPVNPLSKKITSASEMIAYHHTLEINRNHIDYEIDGSVIKVDNYKKRERLGLRSRSPRWAIAAKFKAKQAESQIIGIDLQVGRTGVVTPVAKIKEVELSGVMISSATLHNQDEIDRKDIRINDFVLIERSGDVIPKIT

SEQ ID NO: 168053 - protein, 275 aa, Unknown
  Bacterial polypetide isolated from the Sargasso Sea
MKENEIKKIYKKKINQLIKHNQLYFQKNKPSIPDADYDKLKREIFELEIKYKYLNDKNSPRFSVGFTPSKHFKKEKHRIPMLSLSNAFDRDDLENFQKKIFNFLNIKNNIDLEYSVEPKIDGISASLTYLNGKLTYGLSRGDGKEGELITENLKTISDIPKEVADSDFPDDIDIRGEVFIKNNDFQKIEDKFANPRNAASGSLRQKNPEKVKKIPLNFIAYTYGYFKNNKFKKQSELIKSLKKWGFKTSEYNSVIKGVDNLIKNHEKFEKNRFKL

SEQ ID NO: 168054 - protein, 269 aa, Unknown
  Bacterial polypetide isolated from the Sargasso Sea
TKEDLINFEKKIFNFLSKDKNYKIIYSAEPKIDGISASLTYKNGVFIKGLSRGDGKEGEDITANLLTLTDIPKKIKSKDFPEEIDIRGEVFIQNSDFEKIKEKFANPRNAASGSLRQKNPEDTKKIPLKFIAYTFGFEKGLKTNSQFDYLIELNKWGFKTNPLNKLISGISNLIENYNFVEKQRSNLDFDIDGIVYKVNDFILQKRLGNVANAPRWAVAHKFSSNKATSQIIDIEIQIGRTGALTPVAKIKPINIGGVLVSNATLHNED

SEQ ID NO: 168055 - protein, 287 aa, Unknown
  Bacterial polypetide isolated from the Sargasso Sea
FKKIAKQFANPRNAAGGSLRQKDSNETSKIPLKFVAYAFGTVEPKNFKKQSEYLKLLKTWGFNTNSHNRLVSTIEDIEKNHKTIEEQRLTIDYDLDGLVYKVDDLELQNRLGFVSNSPRWAIAHKFSSEKGFSIIKNIEIQVGRTGALTPVAKIEPVNIGGVVVSNATLHNEDEINRKDIRIGDTVCIQRAGDVIPQVLYVDKTKREKNTKKFNFPDKCPSCGSKTIKEFNYSTKKKDAVTRCPDLKFDCKEILREKLKHFVSKDAFNIDGFGKKIIQNFWDLNMIK

SEQ ID NO: 168056 - protein, 290 aa, Unknown
  Bacterial polypetide isolated from the Sargasso Sea
EKLGELTRRPRWAIAYKYAAQEAETVLLDVEFQVGRTGAITPVAKLKPVFVGGVTVSNATLHNMDEVERLGLYRGAEVVLRRAGDVIPQILKVSNPKSESRRKVIERPSVCPSCGTPIKLSTDNVVMRCEAAANECPAKLKEMLKHFSSRLAFNLEGLGEKIIELLIACGLVSEPADFFKLTKSALEALPGFGEKSAQNLLKEIEKKRTVDLHKFIYALGIREVGEATSKLLAKSFCDLENLIKANLEELNAVDDVGPIVADQIHTYFANSSNILMLRNLLSSGVIVLSL

SEQ ID NO: 168057 - protein, 295 aa, Unknown
  Bacterial polypetide isolated from the Sargasso Sea
IEKHNYYYYTLNSPRISDGEFDKLFKELQSLEQKNPEIITSDSPTQKIGSKPLKEFKSIKHSIPMLSLDNAMGKNDIIAFDERIKKWLNTKDNIEYVAEPKLDGIGIEVTYKNGILVSGSTRGDGIIGEDITENIKTIRNLPLKIYGNNFPKLLEVRGEVFIKTDDFKTLNKTRLGQDESIFANPRNAAAGSLRQLDSKITHSRPLSIFLYDSGKVDGYDFQTHKEFINKLIDFGLPVNPLIKKISGVDNLIDYHSKMELDRNKLPYEIDGTVFKVNKIKLREVWERGVDLRGGP

SEQ ID NO: 168058 - protein, 265 aa, Unknown
  Bacterial polypetide isolated from the Sargasso Sea
RNAASGSLRQKDPKATSKIPLKFIAYTYGFAKNLSIKTQSSFLKNLKNWGFKTNEYNKTICGINNLIVNHNHLEKKRDEIDFDIDGIVYKINDIELQKRLGYVTNAPRWAIAHKFSANSSISEILNIEIQVGRTGALTPVAKIKPVKIGGVTVSNATLHNEDEITRKDIRVGDTATIERAGDVIPHVISVDLNKRKKNSQKFIFPKKCPSCGSSTVKEFNESTKRNDAVRRCSSEGFECDQISIEKIKHFVSKEALNIEGFGKKL

SEQ ID NO: 168059 - protein, 295 aa, Unknown
  Bacterial polypetide isolated from the Sargasso Sea
KEYKKKIKLLIYYNKRYYNDNYSKITDSEYDELKKDIINLEKKYKYLKSKDSPTLEIGYKPSKNFKKILHRTPMLSLANAFSEGDLLNFEKKILNFLSRNNNSNISYTAEPKIDGISASLSYKNGKLISGLSRGDGKEGEDITSNLATIKDIPKIILSKDFPEEIDIRGEVFIQNTDFDNLKDKFANPRNAASGSLRQKDPKDTQKIPLKFIAYNFGFEKGLKINNQFEYLKKLSEWGFKTNPLNKLITGVKNLIKNYNHVEKQRADLNFDIDGIVYKINDFSLQKRLGYVANHQ

SEQ ID NO: 168060 - protein, 287 aa, Unknown
  Bacterial polypetide isolated from the Sargasso Sea
NKIKLFKKLNKFYYEKSQPMVDDRDYDQLKKDILELENKYEYLNSDFSPSKTIGYKPSKNFTKIFHRVPMLSLSNAFTKDDLINFEKKILNFLSKKNNFKLNYSAEPKIDGISASLTYKDGKLEKGLSRGDGKEGEDITENLKTINDIPKKILSKDFPEYIDIRGEVFIKNSKFNKLKDKFANPRNAASGSLRQKNPKDTEKIPLNFIAYTFGFEKGLKVENQFDFLKKLDDWGFKTNPLNKLISGIDNLFLNYHDIEKQRSNLDFDIDGIVYKINEFKLQKRLGNV

SEQ ID NO: 168061 - protein, 232 aa, Unknown
  Bacterial polypetide isolated from the Sargasso Sea
KVVGHKPSKNFKKSIHKVPMLSLGNAFSEEDLNNFEKKIKNFLSIKENFKIYYSAEPKIDGISASLTYIGGKFCKGLSRGDGKEGEEITENLATISDIPKVISSKDFPKEIDIRGEVFIQNSDFKSISEKFANPRNAASGSLRQKNPNETKKIPLKFIAYTFGYEKGLIVENQSNFIKKLSEWGFKTNPLNKLISGVKNLVKNYNEIEKKRTNLDFDIDGIVYKVNDFAMQR

SEQ ID NO: 168062 - protein, 282 aa, Unknown
  Bacterial polypetide isolated from the Sargasso Sea
MKDIEIKIRTLIDEINFHNYQYHGMDDPKISDHDFDQMVRALHDLEKNYPQLIQADSPTQRVGSKPIDRFIQIDHITPMLSLDNVFSIDELMSFEKRIKDKLSLNENIEFIAEPKFDGVAVNLVYESGKLSYATTRGDGKTGEDVTHNILTIKSIPITLNASFPPEKIEIRGEVIISKNDFEKMNQENEAKNLKVFANPRNAAAGSIRQLDPNIAKCRPLRFYAHGYGFLSNENDFNNHTDVIKYLNDSGIVISPLSQIVIGAEECDKYYQKIDSTRDSLDF

SEQ ID NO: 168063 - protein, 224 aa, Unknown
  Bacterial polypetide isolated from the Sargasso Sea
MRESEIKKKYLEKIKELEKHNKFYFEESAPKISDSEYDQIKKEIINLEKKYSYLKSTSSPSNSLGYTPSKNFIKSKHRVKMLSLSNAFDIEDLENFEKKIFNYLNKKIEVKYSVEPKIDGISASLTYKNGLLVSGTSRGDGTTGEVITENLKTISDIPQRITNKDFPKDIDIRGEVFIEKNDFIKLKNDFANPRNAASGSLRQKNPSETKKIPLKFVAYTYGYF

SEQ ID NO: 168064 - protein, 196 aa, Unknown
  Bacterial polypetide isolated from the Sargasso Sea
GIPLKLENFSTKDPKDFDVRGEIYMELSSFNELNKQLAEKKFANPRNAAAGSLRQLDSKIVARRPLKMIAHGIGFISDESYFESHSSMIQQFKKWGLPTNDLVKEFASINDCESYFNEIALLRDSLDYEIDGMVIKIDDLKIQEEIGLNARSPKWAIARKFKALEVITKVKKIIFNMGRTGKLTPVAQLDPVQVGG

SEQ ID NO: 168065 - protein, 297 aa, Unknown
  Bacterial polypetide isolated from the Sargasso Sea
DSNYDKLKREIIDLEKKYIFLNSDISPSNTVGFTPSKNFLKATHRERMLSLSNAFDKNDLENFEKKLLNYLNIKDKKILEYSVEPKIDGISASLTYKNNHLVLGLSRGDGTEGEVITENLKTIKDIPKSIKDRRFPKDIDIRGEVYISKNDFEKIKNRFANPRNAASGTLRQKDPNETKKIPLRFIAYAYGFNNKINFNKQSEFLNLLKNWGFKTNMYNKIISGIDDLVQNHKELEKKRHSLDFDLDGLVYKINDLDLQKRLGFVANAPRWAIAHKFSADSSFSKILNIEIQIGRTG

SEQ ID NO: 168066 - protein, 212 aa, Unknown
  Bacterial polypetide isolated from the Sargasso Sea
NIARDMGFNVPKYEKVVNGLDGVKEYIDYWDKNRSSLPFEIDGIVIKINNIDYQKKLGFTSKFPRWAIAYKYKAENLATKLNSISFNVGRTGAITPVANLEPVLISGSTVKRASLHSFDQMMKLRLRANDSVYVEKGGEIIPKITGIDIENRGSEYDEIKFPTNCPECNSELVKLDSESNFFCPNVKECTPQAIGRIQHFVSRKAMNIDGLG

SEQ ID NO: 168067 - protein, 295 aa, Unknown
  Bacterial polypetide isolated from the Sargasso Sea
MKNCKSDLIEIRGEVFFFRKDFEKLNKLLEKKNQFSNPRNAASGSLRQINSKITKDRPLRFIPHGYGKFSSEKEFTNFEEFLSFCKKNNFDQTGYAKKYTSLKNIHSYVSEIEKKRSSIKFDIDGMVIKINDLDLQNMLGSTNKFPRWAIAAKFSSEEALTQVEKIELQIGRTGAITPVARLKPINIGGVIVSNATLHNFDEITRKDIRINDFVWVKRAGDVIPYVSKVDIERRKKSSDEYVIPKKCLCGSKIIKIKGEAVQRCSARKNQCKYQNLESFKHFVSKKAMNIDGLGA

SEQ ID NO: 168068 - protein, 230 aa, Unknown
  Bacterial polypetide isolated from the Sargasso Sea
MNVSLKEYKKKINLLKKYNKYYYQKQKPLVPDREFDILKQEILELEKKFNFNNSNSPSKKVGFEPSKKFKKFKHKVKMLSLSNAFNKEDLNNFQKKNINYLALDKNFQFEYSVEPKIDGISASLKYKNGEFVLGLSRGDGEEGEDITANLKTIKDIPLSIDKNDFPDEIDIRGEVFIENRDFKKIEKNFANPRNAASGSLRQKDPQKTKLIPLKFIAYTFGFTSTIKAKK

SEQ ID NO: 168069 - protein, 287 aa, Unknown
  Bacterial polypetide isolated from the Sargasso Sea
PRFLDVIWSPSKDGYLKPRVRIEPIELGGVNVEYATGFNGSFIEENKIGVGAIIKIIRSGDVIPHIMDVVIPAVNAKMPEEDYIWNKTRVDVMLKDADTNPVVMEKKITLFFKNLEIAGVGSGNVKRLIQAKYDTIPKILAMEEKEYLNVEGFKAKLANKVYTNIKTQIEKASLVSLMKASNIFGRGLGERKIQPILDKHPDILTSDDTREEKVEKVKAVKGIAEKSAIAFVDQIVPFVKFMEEAKLDSKLQVEEKEVPVYDEEHPLFGKKIVLTEIKGKELERFIK

SEQ ID NO: 168070 - protein, 270 aa, Unknown
  Bacterial polypetide isolated from the Sargasso Sea
VTQDIEYKTHDDFLKNIASFGLPVNPLIEKIIGIKNMVRYHNNLEKNREQLEYEIDGTVFKINNYNERMKVGSRSRSPRWAIAGKFKAQQATSIITDIIIQVGRTGALTPVARVKPVFVSGVTVSNVTLHNQDEIDRKDIRLGDKVLIERSGDVIPKIVKVIKRKNQNSIKFKIDNLCPSCGQKTVKQNDEAIIRCNNFYCPSQMLGRIQHYCSKLAMNIEGLGVKIVEQLIENKLVKNIDDLYSIKKNKISKINGLGERSAKNIIDSIN

SEQ ID NO: 168071 - protein, 269 aa, Unknown
  Bacterial polypetide isolated from the Sargasso Sea
KKNYLKKIKEITKFNESYYNKNNPLVSDGEYDLLKKKIISLEQEYDFLDHKDSPSKNVGFKPSKNFKKIDHKVPMLSLANAFSEEDLINFEKKIINYLNEKKNFTIEYSAEPKIDGISASLIYKNKKFVTGLSRGDGQTGEDITANLKTISDIPQNISAKDFPEEIDIRGEVFIQNSDFKKLADKFANPRNAASGSLRQKNPNDTKKIPLKFIAYTFGFAKGMKVNNQKDFLKKLSDWGFKTNHLNKIIDGTKNLMQNYNQIEKKRVDL

SEQ ID NO: 168072 - protein, 236 aa, Unknown
  Bacterial polypetide isolated from the Sargasso Sea
MDKNKIKKEYDKKIQNLVKLNKHYYDFSKPLVTDQEYDQIKAEILSLEKKFNFLDNKSSPSKVVGFKPSKNFKKVLHRVPMLSLSNAFDEEDLVNFEKKINNFLDQKSSNELEYSAEPKIDGISASLIYKKGKFITGLSRGDGKEGEDITQNLMTIDDIPKNILAKNFPDEIDIRGEVFIQNNDFENLKDKFANPRNAASGSLRQKNPNDTKKIPLKFIAYTFGYVNNMEIEDQSS

SEQ ID NO: 168073 - protein, 260 aa, Unknown
  Bacterial polypetide isolated from the Sargasso Sea
LRDTINRHDHLYYVKNSPTISDREYDSLYCRLKELENKYPEFVSSSSPTQRVGGKAEQRFQQVVHPTPMLSLDNTYNIDEMRAFHERVIKCLPGVAEDSIEYVVELKFDGLAIALTYEDGKLLRGATRGDGVQGEDITANLKTIRSIPLKISVEPFKKIEVRGEVYMPKKEFQRLNAIRKKAGETPFANPRNAAAGALRVLDPAITDSRKLGIFIYTVGFLDKDIYKTHFELQRQLAALRFPVNEHNRLCANFEETIAVI

SEQ ID NO: 168074 - protein, 282 aa, Unknown
  Bacterial polypetide isolated from the Sargasso Sea
INELKKHNKLYFEDSSPLISDKDYDKIKKDILNLEKKFSYLKDASSPSISLGFTPSKNFIKSKHRVKMLSLSNAFDIEDLENFERKIFNYLNKKIKLEYSVEPKIDGISASLTYKNGSLIMGTSRGDGTTGEVITENLKTIKDIPQKITSKDFPKDIDIRGEVFIKRSEFDKLKNDFANPRNAASGSLRQKNPNETKKIPLNFVAYTYGYFESDKIRKQSDFLNFLQRWGFKTNEHNKILSSIDDLRNFHKKFEKERFNLEYDVDGLVYKINSLELQKRLGF

SEQ ID NO: 168075 - protein, 298 aa, Unknown
  Bacterial polypetide isolated from the Sargasso Sea
SVGEVITENLKTIKDIPQKITNKDFPKDIDIRGEVFIEKDDFNKLKNDFANPRNAASGSLRQKNPLETKKIPLNFIAYTYGYFESDKIKKQSDFLSFLKKWGFKTNEHNKVLKNITDLEKFHKKFENDRFNLKYDVDGLVYKINSLDLQNRLGFTANSPRWAVAHKFSADSGYSQITDINIQVGRTGALTPVARIKPVNIGGVVVSNATLHNEDEIIRKDIRVGDTIKIERAGDVIPHVILVDLEKRDKKSKKFIFPDECPSCGSETIKEFNNTTKKYDAVRRCSNEGFDCEKIAIKK

SEQ ID NO: 168076 - protein, 273 aa, Unknown
  Bacterial polypetide isolated from the Sargasso Sea
SLTYKNGKFVKGLSRGDGKEGEDITSNLETIKDIPKKIFNKNFPEEIDIRGEVFIKNSDFENLKDKFANPRNAASGSLRQKDPNDTSKIPLKFIAYTFGYEKNLNIDNQFDFLKNLDEWGFQTNPLNKLISGVKNLLLNYKEIEKKRSEIDFDIDGIVYKINDFKLQKRLGNVANAPRWAVAHKFSSNKAVSKIISIDIQIGRTGALTPVAKIKPINIGGVQVSNASLHNEDEIKRKDVRIGDAVVVERAGDVIPNILSVDINKRPKKNIKFV

SEQ ID NO: 168077 - protein, 227 aa, Unknown
  Bacterial polypetide isolated from the Sargasso Sea
GSLRQLDPRITSSRPLRIFCYAPGIINGMSFKNQKDFLDFLPKYGFPVNPHTAIGNGIDFLHKYYTKCENLRETLDYDIDGAVFKVNSYDYQNQIGERSRSPRWAIAGKFKAQQETTKIKNIIISVGRTGALTPVAKLEPVNVGGVVVSNATLHNQDEIDKKDIRIGDTVLIQRAGDVIPEIVKVIKEYRKDTSVKYIINSICPECNSPAKKNKSESVLRCNNNICP

SEQ ID NO: 168078 - protein, 282 aa, Unknown
  Bacterial polypetide isolated from the Sargasso Sea
EKNYSYLKSKYSPSNSLGFTPSKNFIKSSHRIKMLSLSNAFDLRDLENFEKKIYNYLNEKIDVEYSVEPKIDGISASLTYKNGILVLGTSRGDGNTGEVITENLKTISDIPQKIISKDFPKDIDIRGEVFIKKSDFSNLKNNFANPRNAASGTLRQKDPDQTKKIPLNFVAYTYGYFENKTIKKQSEFLRSLKKWGFKTSEHNKVLKNINDLENFHKNFEKDRFDLEYDVDGLVYKINSLDLQKRLGFTASSPRWAIAHKFSADSAYSQIEDINIQVEEQVH

SEQ ID NO: 168079 - protein, 256 aa, Unknown
  Bacterial polypetide isolated from the Sargasso Sea
IDGIVYKVNQINLQKRLGSTANAPRWAIAYKFSSEKAVTKIKNIIIQVGRTGAITPVAKVEPVNVGGVLVSNATLHNEEEIKRKDIRVGDTVLLQRAGDVIPQVISVQKNLRNKNSKEFQFPKKCLCGANTIKEISKTTKKEDAVRRCNRGYACQFTVKEKLKHMVSKDAFNIDGLGKKVIDNFFEIDLIKEPADIFKLNFDKILNLEGWGKLSVENLKKAILKAKKISLNRFIYSIGIRHIGQENAKTLAGFLEK

SEQ ID NO: 168080 - protein, 317 aa, Unknown
  Bacterial polypetide isolated from the Sargasso Sea
SLANAFTEEDLINFEKKIINFLSKKNDFKIFYSAEPKIDGISASLTYKNGELFRGLSRGDGKVGEDITDNLNTIIDIPKKILSKDFPEEVDIRGEVFIQNSDFEYLKDKFANPRNAASGSLRQKNPEDTKKIPLKFIAYTFGFENGLKVENQSDYLKKLKEWGFKINPLNKLISGIDNLIENYNEIEKIRADLDFDIDGIVYKVNDFTLQKRLGNVANGPRWAVAHKFSSNKAISLIEDIEIQIGRTGALTPVAKIKPINIGGVQVSNATLHNEDEIIRKDIRIGDTVTVERAGDVIPHVVSVDVLKRKNTSKKLFP

SEQ ID NO: 168081 - protein, 212 aa, Unknown
  Bacterial polypetide isolated from the Sargasso Sea
MDKNKIKKSYNDKIQNLVKLNKHYYDLSKPLVNDDEYDQLKADILSLEKKYDFLDSNNSPSKIVGFKPSKTFKKVLHRVPMLSLSNAFDEEDLVNFEKKINNFLDQKNSNELEYSAEPKIDGISASLIYKKGKFVIGLSRGDGKEGEDITQNLMTINDIPKNISIKNFPEEIEIRGEVFIQNKDFEKSLKHKFANPRNAASGSLRQKNPKDT

SEQ ID NO: 168082 - protein, 311 aa, Unknown
  Bacterial polypetide isolated from the Sargasso Sea
NHTELENLRSTIDYDVDGIVYKINNIGFQHRLGSTSNSPRWAIAYKFSSVKASSRIKEISIQVGRTGAITPVAKIDPITVGGVVVSNATLHNEDEINRKDIRVGDVVTIQRAGDVIPQVLSVDKSKRNNKSKKFIFPEKCLCGYPTKKEINLTTKKVDAVRRCIRGYECDFTAREKLKHLVSKDAFDIDGLGKKVIDNFWDLKLIRTPSDIFSLNYEKIEKLEGWGKLSIKNLKNAISKSKKIILDRFIFSIGIRHIGQENAKILSGFFKNSKKFSELFHSQKRKDILDNLYDLDGIGETQVKSIEDFFSR

SEQ ID NO: 168083 - protein, 260 aa, Unknown
  Bacterial polypetide isolated from the Sargasso Sea
RELRKHNELYFVQSSPKISDKEYDEIKREIINLEKKHSYLTSNISPSNSLGFAPSKNFIKYSHRVKMLSLSNAFDLEDLENFEKRIFNYLNKKIDVEYSVEPKIDGISASLTYKDGLLVLGASRGDGMIGEVITENLKTISDIPQKITYKDFPKDIDIRGEVFIKKSDFSNLKNNFANPRNAASGSLRQKNSEQTKKIPLNFIAYTYGYFESKTIKKQSEFLSSLKKWGFKTSEHNKVLKTINDLENFHKNFEKDRFELE

SEQ ID NO: 168084 - protein, 131 aa, Unknown
  Bacterial polypetide isolated from the Sargasso Sea
KFPDDIDIRGEVFILNSDFEKIKKNFANPRNAASGSLRQKNPNETKKIPLKFIAYTFGFCNKNIFLKQSDFIRSLKSWGFKISKYNKIISGTDNLFKNHLDFENKRFEIDYDIDGLVYKVNDFKLQKRLGS

SEQ ID NO: 168085 - protein, 291 aa, Unknown
  Bacterial polypetide isolated from the Sargasso Sea
MDKEDKILKRLRELANLIKKHNYNYHTLDKPKITDQEFDKLVKENDILEKKYPSLILKDSPNKNYGGKIKDNFKKIKHESQMYSLANAFNYNDIKEFIKRSIKFLNLDNDDDFQYICEPKIDGLSLNLVYENGNLVSAGTRGDGFIGEDVTENISNIKNIPSKLKKNFPDFIEIRGEVFLNKSDFEKLNSKLENKSKFANPRNAAAGSLRQLDTSISHSRPLKFIPHGIGKCSDNFDKIEDYYNQLKNWDIIPNKLSKKCYSVEEIIKFYNQIDHKRSDINYDIDGLVVKI

SEQ ID NO: 168086 - protein, 306 aa, Unknown
  Bacterial polypetide isolated from the Sargasso Sea
EELGFTAKSPRWAIAYKFQTQQVETLLNSISYQVGRTGAITPVANLEPVLLAGTTVKRASLHNADQIEKLDIRLGDIVKVEKGGEIIPKVVGVNLEKRKADSVAVNYINHCPECNTELQRIDGEAQHYCPNVYACPPQIKGRMIHFIGRKAMNVDGMGEETIELLYDAGLIKNIADLYELNAEQLLPLERMAETSVNKLLEGIQSSKEVAFPKVLFAIGIRHVGETVAKKLAKYFKDMQSLASASIEDLVPVDEIGEKIATSVVNFFQDDENIKIIQRLKESGLQMSITENEQTIESTILEDKKIV

SEQ ID NO: 168087 - protein, 296 aa, Unknown
  Bacterial polypetide isolated from the Sargasso Sea
KKKYKFLKHKESPSINIGFKPSKIFEKHKHKVPMLSLSNVFNRDDIINFEKKIKNYLGFNFNKYFEYSVEPKIDGISASLTYEKGKLTIGLSRGDGYEGEVITENLKTINEIPKVINSKDFPQNVEIRGEVYITKKDFEQLKEKFANPRNAASGSLRQKSSEETKKIPLKFIAYTFGHLPNNKFTDQSEFLKSLKKWGFKTSKYNKIISSIDELINNHQVFEKKRYELEYDVDGLVYKINDLSLQSRLGFVGNAPRWAAAHKFSAASSFSKILNIEVQVGRTGALTPVAKIEPVNM

SEQ ID NO: 168088 - protein, 221 aa, Unknown
  Bacterial polypetide isolated from the Sargasso Sea
MQKREIKKIYFDKINELKKHNFQYFEKNEPRISDHNYDKLKKEILDLEKKYNFLYSKYSPSNSVGFYPSKNFLKAQHRVKMLSLSNAFDKNDLENFEKKIANYLNFNQKMSLEYSVEPKIDGISASLTYKNGLLVSGLSRGDGKEGELITENLKTINDIPNKVISEDFPKDIDIRGEVFITNKDFEKIKDNFANPRNAASGSLRQKNPIETKKIPLRFIAY

SEQ ID NO: 168089 - protein, 261 aa, Unknown
  Bacterial polypetide isolated from the Sargasso Sea
KKYTFDLEKKYKYLSHKNSPSKNIGFKPSKNFKKQKHKVPMLSLSNIFNKEDLENFEKKIKNYLDFNQIQKFEYSVEPKIDGISASLTYVNGNLELGVSRGDGYEGELITENLKTINDIPKKINLKGFPKNIEIRGEVYINKSDFENLKEKFANPRNAASGSLRQKESIETKKIPLKFIAYTFGLFEDNYFNKQSEFLNSLEKWGFKTSKYNKVISNIDELIKNHEAFEKKRYELEYDVDGLVYKLNNLKLQSRLGFVGNA

SEQ ID NO: 168090 - protein, 129 aa, Unknown
  Bacterial polypetide isolated from the Sargasso Sea
MKDLLKKYEQLKEEIQLHNYNYHALDDPKISDGEYDKLFRSLLDLEEENPHLVTPDSPTQRVGFSPIDEFETFEHSVPMLSLANVFSEEEFSDFHDRILKRLVNIDDFEYFCEPKMDGAAVSLIYENGY

SEQ ID NO: 168091 - protein, 201 aa, Unknown
  Bacterial polypetide isolated from the Sargasso Sea
MNKIKLINKYNKFYYSESKPLVDDSSYDKIKGEILNLEKRYPFLKSDDSPSLSVGFKPSKNFKKVDHKVPMLSLGNAFDKNDLANFEKKIINFLSLKKNQKIEYSTEPKIDGISASLFYRDGIFEQGLSRGDGIQGEDITENLRTIKDIPKKLNGNDFPDEIDIRGEVFINNSDFVKLKNKFANPRNAASGSLRQKDPRET

SEQ ID NO: 168092 - protein, 241 aa, Unknown
  Bacterial polypetide isolated from the Sargasso Sea
FSPFNALGYTPSKNFEKAAHRVKMLSLSNAFNLEDLENFEKKIFNYLNHKTEIEYSAEPKIDGISASLTYKNGVLVLGTSRGDGTTGEVITDNLKTIKDIPKKITDKDFPKDIDIRGEVFIKKSQFNNLKNNFANPRNAASGSLRQKNPEVTKKIPLNFVAYTFGYFESDKIKKQSDFLKSLQKWGFKISEHNKVLKNINELENFHKRFEEDRFNLEYDVDGLVYKINNLELQKRLGFTSN

SEQ ID NO: 168093 - protein, 262 aa, Unknown
  Bacterial polypetide isolated from the Sargasso Sea
MRSNDSKLIKKKYLKKINLINKYNKAYYKNNNPIIDDFEYDNLKLEILDLENKYKFLKSEKSPSLVVGFKPSKNFKKVKHKRPMLSLGNAFNKDDLLNFEKKIFNFLSLNKNTIIEYSAEPKIDGISASLFYKNGKFIQGLSRGDGIEGEDITENLKTIKDIPKNISNKNFPEEIDIRGEVYIGNKDFVSIKNKFANPRNAASGSLRQKNPDETAKIPLRFIAYTYGFSKELNINTQSEFLKSLKLWGFRINYYNNVIKGID

SEQ ID NO: 168094 - protein, 249 aa, Unknown
  Bacterial polypetide isolated from the Sargasso Sea
TQRVGTSPAEAFNQVTHTVPMLSLSNVFGDEDLIDWIDKTTKAVNQNIFPLVCELKIDGLAVSVKYDDGKLFQGATRGNGVEGEDITNNVKTIRSIPLEIEDKNTIEARGEIFFPNSRFTNLNEQRESEGLSTFSNPRNAASGSVRQLDPNETAKRPLDIFFYSLYNIEGQEIFDSQYKSLQEMKKLGLKTNKNYKKIQNKQELFEYIEFWSNNRANLDYGTDGIVIKIDDVKIQKKLGSTGRIPKWAT

SEQ ID NO: 168095 - protein, 280 aa, Unknown
  Bacterial polypetide isolated from the Sargasso Sea
IEIFENFPEYNFNINLLNKIGDKPSPLFSKIKHEFPMLSLTNAFTKTDIFEFDDRIRKYLTLKNSQKIDMVSEPKIDGLSISIRYENGVLVQASTRGDGFEGEDVLLNVKTIEDIPKYLKFTKPNILEVRGEIFMKKINFLNLNSTLKDLKLKLFANPRNAAAGSLRQKDPKVTKNRSLNFFAYDIGFVSEKFSETHWETLTRLKEYGFPVNSLSKIFDDIRDNIKYFDEISKLRSNLDYDIDGVVLKINNLNFQKRLGNISRSPRWAIAQKLPSQKGQT

SEQ ID NO: 168096 - protein, 238 aa, Unknown
  Bacterial polypetide isolated from the Sargasso Sea
NQNYQNKINEFKKHNKLYYENSSPIISDKKFDKLKKEILDLEKKYTFLKSNFSPSKAVGFKPSKNFLKFKHRQQMLSLSNAFKEEDLLNFEKKILNFLNEKVDLEYSVEPKIDGISASLTYKNGILNYGVSRGDGKEGEIITDNLKTIKDIPHKIVNSNFPKDIEIRGEVFINKNDFEKIKDSFANPRNAASGSLRQKNPEETRKIPLNFIAYTFGYFQDNEFKLQSDFLKHLKIWGI

SEQ ID NO: 168097 - protein, 245 aa, Unknown
  Bacterial polypetide isolated from the Sargasso Sea
MNFEEIKKKYNKKINEILKHNENYYDKNNPLISDEKYDELKKEILDLEKKHKFLASDKSPSKIVGFKPSKNFRKVKHRVSMLSLSNAFNEEDLINFEKKIINFLDKKKDLQIEYSAEPKIDGISASLLYENGKFITGLSRGDGKEGEDITENLKTIKDIPLEIDSKNFPQEIDIRGEVFIRNSDFKKLSDKFANPRNAASGSLRQKNPNETKKIPLRFIAYTYGFEKNMKIDTQSEYLKNLKKWG

SEQ ID NO: 168098 - protein, 265 aa, Unknown
  Bacterial polypetide isolated from the Sargasso Sea
MKKEEINKRYRKQKKLLDKYNHHYFNLDAPLISDSKYDKIKNEVIEIEKNYPFLVEKKSVLDQVGAPITKKFKKIKHSIPMLSLSNTFDTTGMNDFISKVSNYLNIKNKNFTFSSELKIDGISASLTYKKGILIKGLSRGDGVTGEDILENLKTIKDIPKKISDEYLPEILEVRGEVYIGKKDFKKIKKNFANPRNAAGGSLRQKDPKETNKIPLKFFAYGFGVINPMIYKKQSEFILKLKDWGFNVNPLNTLVKGVEQIEKHHK

SEQ ID NO: 168099 - protein, 292 aa, Unknown
  Bacterial polypetide isolated from the Sargasso Sea
KKNIIFLKSNFSPSEAVGFKPSKNFLKFKHRQKMLSLSNAFKEEDLVNFEKKILNFLNEKINLEYSVEPKIDGISASLTYKNGILNYGVSRGDGNEGEIITDNLKTIKDIPHKVENNNFPKDIEIRGEVFINKNDFEKIKDTFANPRNAASGTLRQKNPEETRKIPLNFIAYTFGYFEDNQFNLQSDFLKNLKIWGFKISEHNKIAKDISGLVSLHKKYEKERFQLEYDVDGLVYKVNNLQLQKRLGFTSNAPRWAIAHKFSADYSYSEILNIDIQVGRTGALTPVAKVKPI

SEQ ID NO: 168100 - protein, 295 aa, Unknown
  Bacterial polypetide isolated from the Sargasso Sea
GVVLRGEFIISKSTFQTKYADKFANPRNFVAGVVNQKKVDPDKFKDIDFVCYEVIQPPLKPSEQMAFLSTMDSTKMIPVKHTTQPISMETLTNDYLASTLQEWRTHYEYEIDGVICSDDQIYPRTKGNPAHSFAFKMMLSEQMVEAKVVNVHWAASKDGYLKPRVQIEPIVLGGVRIEYATGFNAKFVNDQGINAGAIVRIIRSGDVIPHIVEVVEPATTPGMPTIDYEWNQTGVDIVLKNPEDDAMVREKTIAGFFRNIGVDGLSTGHTRKLIEAGFDTIPKIISMTQDDFLNG

SEQ ID NO: 168101 - protein, 272 aa, Unknown
  Bacterial polypetide isolated from the Sargasso Sea
MPMLSLSNAFDKDDLLNFEKKIYNYLNKNINFEYSVEPKIDGISASLTYKNNKLAYGVSRGDGNVGEIITENLKTIRDIPLEIKNTDFPDEIEIRGEVFIKKKDFLKIKENFANPRNAASGTLRQKDPNETKKIPLNFIAYTFGFVKQNNIKYQSEFLKALKSWGFQVNKENKVIKTINELIEFHTKFEDKRFDLEYDVDGLVYKVNDLNLQSRLGFTSNSPRWAIAHKFSADSAYTKIINIDIQVGRTGALTPVAKVEPINIGGVIVSNAT

SEQ ID NO: 168102 - protein, 277 aa, Unknown
  Bacterial polypetide isolated from the Sargasso Sea
NNSVKKDYLKKIKLINKYNKFYYDKSDPSVSDQEYDQLKKNILKIEEKYPEIIIKGSPSQVVGFKPSRNFKKIKHKVPMLSLNNAFDENDLKNFEKKIINFLSLNKNAQIEYSIEPKIDGISASIKYENGILAKGLSRGDGIEGEDITENLKTIEDIPKKIISKNFPKEIDIRGEVFITKNNFKKMNKKFANPRNAASGSLRQKDPLETKKIPLNFVAYTFGYLEKNIFGNQSNFLQFLNNWGFKTSKHNKTMKGIKNLVLHHKKFEEIRYDLDYDI

SEQ ID NO: 168103 - protein, 185 aa, Unknown
  Bacterial polypetide isolated from the Sargasso Sea
LNLQKRLGNTSNSPRWAIAYKFSAEKAITQIKDIIIQVGRTGAITPVAKVEPVTVGGVVVSNATLHNEEEINRKDIRIGDTVTIQRAGDVIPQVISTDKSKRSKESKKYFFPKRCLCGSISVKEVSKSTKKMDAVRRCLKGYECDFIAREKLKHIVSKDAFNIDGFGKKVIDQFWDLKLVRKPSD

SEQ ID NO: 168104 - protein, 293 aa, Unknown
  Bacterial polypetide isolated from the Sargasso Sea
MDYDVDGVVYKVNNLDFQERLGSTANSPRWAIAYKFSSVKASSKIINIVIQVGRTGAITPVAKINPVTVGGVVVSNATLHNEDEINRKDIRIGDTVTIQRAGDVIPQVLSVDKAKRSKNSKKFIFPTKCLCGAITKKETSVTTKKIDAVRRCLKGYECDFTAKEKLKHIVSKDAFDIEGLGKKVIDNFWNLNLIKTPADIFRLDYLKIRKLDGWGELSIKNLQNAIDKSKNITLDKFIFSIGIRHIGQENAKIIGNFFKKSKHFSELFNDKKRAKILQNLEDLNGIGDTQIRS

SEQ ID NO: 168105 - protein, 258 aa, Unknown
  Bacterial polypetide isolated from the Sargasso Sea
FSQVEHRQRMYSLDNSEYINDIEKWLERLEKITDEMLFPIVIEPKIDGLAISLIYEDGLFVQGLTRGDGFIGEDVTHNVKTIKNIPLKLKEETKGILEIRGEVYMPTESFNILNDFNKKENIPTFINSRNAAAGSLRQKDSNITATRDLRLLSYQLINHEEIDLSLNYSKQLNNLKKYGFQVNNFYEVSDINEIKKILDEIETLRDKFSYQIDGAVLKIDSATSQDQLGFTSKAPRWAIAYKFQAEEQTTVLKDIKLQ

SEQ ID NO: 168106 - protein, 293 aa, Unknown
  Bacterial polypetide isolated from the Sargasso Sea
GISASLTYINKKLLYGVSRGDGNVGELITENLKTIKDIPQEIKFKNFPEEIEIRGEVFIKKKDFLKIKDKFANARNAASGSLRQKDPKETKKIPLNFVAYTFGYLKNNSFNKQSDFLNKLKEWGFKVNKNNNKISTIKDLIKFHKLFESKRFNLDYDIDGLVYKVNDLSMQSRLGFTSNAPRWAIAHKFSADKANTKIVNIDIQIGRTGALTPVAKVEPVNIGGVVVSNATLHNEDEINRKDIRIGDVVKIERAGDVIPHVIEVDKTKRKSDSKKYEFPSVCPSCGSQTIKEF

SEQ ID NO: 168107 - protein, 311 aa, Unknown
  Bacterial polypetide isolated from the Sargasso Sea
FQINSHCKTIKSIDEIEKNHGELESLRSSLDYDLDGIVYKVNDLKFQERLGSTSNSPRWAIAYKFSSVKASSKIKDIVIQVGRTGAITPVAKIDPVTVGGVVISNATLHNEDEINRKDIRVGDTVTIQRAGDVIPQVVSVDKSKRSKNSKKFIFPSKCLCGFPTKKEINLVTKKADAVRRCARGYECDFTAREKLKHIVSKDAFDIEGLGKKVIDNFWELKFIKTPADIFRLNYDQIEKLEGWGELSIKNLQKAIKDSKAIVLDRFIYSIGIRHIGQENAKILGAFFKTDKKFSELFSPKKKKRYFKESVR

SEQ ID NO: 168108 - protein, 492 aa, Unknown
  Bacterial polypetide isolated from the Sargasso Sea
MKKDSALKTYNNKKKLILKYDHHYFNLDSPLVSDAKYDKIKQELIKLEEQFTFLKKKESIQNKVGAPLTRKFKKIKHSKPMLSLSNTFNAKGMEDFISKISNFLNSKNKDFDFSSELKIDGISASLTYEKGVLIKGLSRGDGVTGEDILENLKTIKQIPKKIFDKNLPEVLEVRGEVYIGKKDFKSIKKNFANPRNAAGGSLRQKDFRETKKIPLKFFAYGFGVIEPMIYKSQSEFIKKLKEWGFSTNEHNKLVNGIDEIEIHHKKLESIRSTLDYDIDGLVYKIDDISLQKRLGNTSNSPRWATAYKFSSEKAISRIKNILIQVGRTGAITPVAKIEPVTVGGVVVSNATLHNQDEILRKDIRIGDTIVIQRAGDVIPQVVSVDINKRSKGTKKYIFPKKCLCGGKIFKEFNSTTKKEDSVQRCIKEYDCSFIAKEKLKHIVSKEAFNIEGLGKKVIEQFWKLNLIKNPSDIFNLDYKKIVKLEGWGELSV

SEQ ID NO: 168109 - protein, 520 aa, Unknown
  Bacterial polypetide isolated from the Sargasso Sea
IEDIPDQVKSKNFPKEIDIRGEVFIKNNDFKKLSNNFANPRNAASGSLRQKNPEETKKIPLKFIAYTFGYERGLEVSLQSEYLKKLKFWGFKTNPLNKTIKNVKNLMKNYNEIEKKRGDLDFDIDGIVYKVNDFKLQKRLGNVANAPRWAVAHKFSANSTVSKIENIEIQIGRTGALTPVAKIKPVNIGGVVVSNATLHNEEEIVRKDIRIGDTVVVERAGDVIPHVVSVDKGKRKTDSKKFIFPTKCPCGFDTIKEFNKVTKKFDAVRRCPDRGFDCDKMAKERLKHFVSKEALNIEGLGKKIVENFWSLNLIKLPQDIFKIDYNKVENLDGWGKQSVANLRYSINSKKKISFEKFIYALGIRHIGLENAKILSKNLKSLKNFMLLSKKNDLSDLLNIDGIGETQINSIKNFFLNNTNKKVLKELEEVLVVKDAKIKKMDGLLNNKTFMFTGKLLGISRAEAKSLIEENSGSIVSNVSKKLNYLIIGEKPTKKKVLNAKELKIEIIDQNQFLKMLNKTS

SEQ ID NO: 168110 - protein, 530 aa, Unknown
  Bacterial polypetide isolated from the Sargasso Sea
FRTRKNYDYLKHIDSPSNTIGFKPSKKFQKKNHKVPMLSLSNIFDKEDLNNFEKKIKNYLNINSKQSFEYSVEPKIDGISASLTYENGKLVLGLSRGDGYEGEVITENLKTIKDIPKKIEAKDFPTNIEIRGEVYITKGDFENLKEKFANPRNAASGSLRQKEPSETQKIPLHFIAYTFGFFENNKFIKQSDFLKSLRQWGFQTSKYNSVILNINDLIKNHIIFESKRYELDYDVDGLVYKINDLKLQNRLGFVGNAPRWAAAHKFSAASSFSKIVNIEIQIGRTGALTPVAKIEPVNIGGVIVSNATLHNEDEINKKDIRVGDVVKIERAGDVIPHVVSVDLSKRKSNVSKYKFPNKCPSCGSKIEKEYNQQTKKFDAVKRCSSEGYSCEKISVEKIKHFVSKEALNIDGLGKKVVEKFWDQNFIRYPQDIFKLDFKKIEKLEGWGPQSVSNLKHAIDKSKKISLSKFIFALGIRHIGQENAKLIAKHLKTKENFIKINKSYDFKSFENIDGIGEIQISSIRNFFLIKE

SEQ ID NO: 168111 - protein, 286 aa, Unknown
  Bacterial polypetide isolated from the Sargasso Sea
MTEFQPKKRVIDLSDQLQRFRQAYYCGNSQIEDEEYDQLKEELQKLEFEFPELILDDSPLIRVQAKPQESFPTRTHRSPMLSLGNVYSMEELRDWETGLQKLLNDEKPEYVCELKIDGLALSILYEKGELQAGVTRGDGSQGDEITPNLKTLSKLPLKLKSPLDLEVRGEVYLSKKYFSELNQRRQLTQEPEFKNPRNAAAGSVRMLDSNEVRRRKLDLFVYLLADGPLKPQHSENLQLLKDLQFPVNPETKTCKNIDEVIEFCRYWERHKDELPYEIDGVVVKVD

SEQ ID NO: 168112 - protein, 251 aa, Unknown
  Bacterial polypetide isolated from the Sargasso Sea
MDSHQPPGVTKKKKTKPPQPNGSVDPSGKIQALRAEIEEHNYRYHVLDDPTISDSRYDGLVRDLEQLEAEYPDLVTSNSPTQRVGAAPLDRFESVAHEVPMLSLNNAFSVDEVGEFDRRCRQGTGREFLSYVAEPKIDGLAISLLYEQGELVRAATRGDGRTGEDVTLNVRSISSIPLKLRSDRVPPSLEVRGEVFMPIAGFARLNQQQQARDEKLYVNPRNAAAGSLRQLDSNVCAQRPLSFFCYAVGVW

SEQ ID NO: 168113 - protein, 330 aa, Unknown
  Bacterial polypetide isolated from the Sargasso Sea
MNVENKILELRKSLHRHNHLYYMLDNPEISDLQFDQMLKDLEELEKTYPEFHDSNSPTQRVGSSLNNDFISVQHNYPMYSLENSYTNDELIKWKDRLVKILNTDKISFSCELKLDGVSISLSYQNGNLVRGLTRGDGQKGDDVTKNLKTINTIPLKTLKKIDYDFDIRGEVVIEKTDFEQLNKLRLKNGEEPYMNPRNTASGSIKLVSSKEVRKRPLKCYFFQIISEESPFKSQSESLSLAKELGFNVSNTHKYCKNIDEVFDYINFWDKERKNLNFEIDGIVIKVNNLKMQTELGFTSKFPRWAIAFKFQTEQVSTKLIDITYQVGRTG

SEQ ID NO: 168114 - protein, 350 aa, Unknown
  Bacterial polypetide isolated from the Sargasso Sea
MVPNNDSSKNLINFSEKAAIDELVRVHKEILLADVAYYQENNPVMHDSEYDKLVVYFETILKTHPAAAKKTRLQKGIGGKPQLGFEKVDHKIPMLSLTNALNRLDIENFQKGIKKFLKLSVDTEIAFTSEPKIDGLSLSLRYLDGNLVQAVTRGDGYQGENVTSNIRFIRDVPKKLSEKIPVLEVRGEVYMSRNNFSRLNQAQIEKGLKIFANPRNAAAGTLRQLKVEEGSDRRLNFFAYSWGETSYLLGQGQFEAINKLAELGFKTNELTQKCETIDELISHYEKILIERADLNYDIDGVVYKVDDLRLQKRLGFTSTAPRWAIAHKFPSEKAVTQILNIEIQVGRTGS

SEQ ID NO: 168115 - protein, 377 aa, Unknown
  Bacterial polypetide isolated from the Sargasso Sea
KLNDKEKFSNPRNAAAGSLRQLDPKIAKSRPLRFIAHGLGHTDKEYKSIKSFYDDLTNWKIPINDNIDFQNSIESMLKFFKKIENKRSSIKYDIDGIVFKVNEYNLQKRLGFVGKNPRWAIALKFSAEKTSTEIIDINFQVGRTGAITPVARLKPVNIGGVLVSNATLHNFEEIEKKDIRINDLIEIQRAGDVIPQVLRVLKKSINRSKPIYAPKKCPSCNSKTVKDKNEAVLRCNNSDNCNSQIIGRLVHFVSKKNMNIDGFGEKQIIQFYKSNIIKKIEDIFLIHEHKETILNLEGWGELSYKNLINSISNSKNIDLDKFIFSLGIRYVGETISKILAKEFVNINSFLDKAKNKEKLSLIDGLGPKVVDSIFNFL

SEQ ID NO: 168116 - protein, 569 aa, Unknown
  Bacterial polypetide isolated from the Sargasso Sea
WDADVRKRLGGQKPSYVCELKIDGVAVSFIYRNGFLEAGVTRGDGNQGEEITSNIKTISSLPLSIKDKSDLEIRGEVYLNRKNFNALNQRRTTNGESLFKNPRNSAAGSIRLLDSTETRRRKLDVFIYNIAEGGPQENHTGNLDYLRQMDFPVNRETKLADTIEEAVEYCRYWEDQKQYLPYDIDGIVIKVNAIKHHRQLGFTSSSPRWATSVKFSAEQAVSVLREVEIGVGRTGNLTPVAILEPVELNGTTVSRATLHNYDQVERLNLHLGDHVTLEKGGEIIPKIVSVDPTLRSENAQKIKPPSNCPSCGSTAEHFEEDVEWRCQNKNCNAQQKEQILHFVSRRAMDIDTIGPALIEQLMHKRLLKNAADLYLLRHKDLSKLDRMGNKSSENVLAGIDKSKQCTLGQFVHALGITNVGEKTAGILAQHFGTLEKLMSAEREDLEMIEEIGPVTAENVFFFFKDPEKNQFIADFLARGVQPMEEQILKISDSHFSGKTVVLTGTLSEPREVWKKRLILAGAKVSNSISSKTDYLLAGENAGSKMLKAKKMEVNVIDEGVAINFLENEN

SEQ ID NO: 168117 - protein, 434 aa, Unknown
  Bacterial polypetide isolated from the Sargasso Sea
MVYKGLTAEYIDSLGSGEATLEVKKLLKLVSEADRAYHTEDDPIITDAEYDTIKVDILHLAEKFPSALLEVKKVEGVGGELGSGFKKVKHVLPMLSLSNGRSKKDIYNFEKSIRSFLGLSCNDHIWFVSEPKIDGLSLALRYEKGKLVQALTRGDGVVGENVTLNAKTLSDIPKRLLNKLDVMEIRGEVYMSKRHFSQLNKFQKEIGDKLFANPRNAAAGSIRQLDPKKTAERKLGFFAYSFGELSEPLAKTHFEGLKKLKELGFNIDPAVTLCASIEEVLSHYEDIAFNRANLDYDIDGVVYKVDDMELQRRLGSRSTTPRWAIAHKFPPAEAITQIIAIDVQVGRTGSLSPVAKLRPVNIGGVMVSSATLHNEDYIAAVDNYGSSIRDGVDIRVNDWVKVFRAGDVIPKIKGVVLEKRGPEAQKFKYPVSCP

SEQ ID NO: 168118 - protein, 301 aa, Unknown
  Bacterial polypetide isolated from the Sargasso Sea
MVSNQTKRQIENLRIEIEQANEAYYVEENSSMSDFEYDKKFRELIDLEKKYPELISENSPTQRIGGLPAENFNQVQHLTPMLSLSNVFNYEELKEWIERNSKTIGVNIFPIMCELKIDGLAVSVKYINGFLSEASTRGNGVTGEEITNNVKTIRSLPLRINSLDPLEFRGEIYFPNSKFNQFNNQRESEGLRIYSNPRNAASGSVRQLDPSETSKRPINIFFYSLLNGQGSELLDSQSKALDKIKDLGLRTEKNYKKINSFEELLEFIEYWSSNRSNLDYGTDGIVIKIDNVNYQKKLGST

SEQ ID NO: 168119 - protein, 700 aa, Unknown
  Bacterial polypetide isolated from the Sargasso Sea
MKKSNASENDSKSRLDFLYEEIVKHNKKYHQENNPSISDAEYDDLVREALEIEKKFPNLKKIDSPTDLVGAEPVEGFKKIKHQIPMLSIQNAKNISDVNSWIDGLRNFLLLNDEEEIEFIAEPKIDGLSATLLYKKGELILGATRGDGSFGEDVTENLRTIIDIPQYLEKKIAPDILEVRGEVYITHDEFNELNDKQKQSGKDIFKNPRNAAAGSLKQLDPNETAKRPLRFFAFSWGLFPENNFNYHSDIINYFNDLGLITNPESSNHKSLESLEKYYNNLLDKRMDLGYDIDGIVYKLNRIDWRDRLQSTGHHPRWAIAHKFPAEKAISEIVDVQIQVGRTGVLTPVARLKPVNIGGALVSNASLHNYDDIQKKDIRIGDAVWVQRAGDVIPQVIEAITSKRKKENKKISVPTNCPICKSNVYREILAENNGVKTFEKYIRCTGGFTCPSQAKERLKHFVSKEGFDIDGLGDKQINDYFDMEIIRDPTDIFSLEKKYKENPPQIWVYTSGSKSKINTIKDSAIKLFKAIEDKKTINFDRFIYSLGIRHLGSSTASLLASHCISLKKLISIFSSKNSEEIDEIRSLDGIGDKVVNALIDFFQNKETRSLVNNLLEVGVEVQDFEKIETDSMLSEKRIVITGTLESMSRAEAKVRIESLGGKVVSSISKNTNYLITGGKPTNSKKEKANSLGIEIINEEAM

SEQ ID NO: 168120 - protein, 309 aa, Unknown
  Bacterial polypetide isolated from the Sargasso Sea
MKNRNLIKKDYFAKIKELKKHNQHYYEKSNPKISDAEYDKLKKEIIEFEKQYIFLKSKSSPSLSVGSKPSKNFIKSKHRIKMLSLSNAFDSDDLKNFEKKISNFLNLKSKSSIEYSVEPKVDGISASLTYKNNNLVLGLSRGDGIEGEIITENLKTIKDIPKEVKDKNFPKDIDIRGEVYIGKEDFDKIKDRFANPRNAASGSLRQKNPNETKKIPLRFIAYTYGFNARINFKKQSEFLDLLKIWGFNTNIYNKIIIGIDNLVKNHQEFEKKRHDLDFDVDGLVYKINDLDLQKRLGFVANAPQVGNCT

SEQ ID NO: 168121 - protein, 208 aa, Unknown
  Bacterial polypetide isolated from the Sargasso Sea
MNQIIDKIKSIRDQLNNHNYQYYILDAPIISDSEYDVLFRKLQELETRHPELISNDSPTQRVGAKPLESFGSIDHSIPMLSLDNAMNKDETSAFYERLQKGLKTDQSIEIVAEPKLDGLGVELVYKNGMLSHGSTRGDGFTGEDITLNLRTIPSIPLSLRTENRDIIELLEVRGEVFITKAGFNELNNDRLNNDLPTFANPRNAAAGS

SEQ ID NO: 168122 - protein, 669 aa, Unknown
  Bacterial polypetide isolated from the Sargasso Sea
MKDIEIKKYYKKKIKELKIHNKSYFDDSSPKISDKQYDDIKKEILNLEKNYNFLKSNFSPSKSLGFTPSKNFIKSRHRVKMLSLSNAFDKEDLLNFEKKIFNFLNKRIDVEYSVEPKIDGISASLTYKNGILVMGTSRGDGTTGEVITENLKTIKDIPQKITNKDFPEDIDVRGEVFIEKDDFNKLKNDFANARNAASGSLRQKNPLETKKIPLHFVAYTYGYFESDKIKKQSDFLSSLKKWGFKVNEHNKVLKTIKELESFHKKFENDRFDLKYDVDGLVYKINNLDLQNRLGFTANSPRWAIAHKFSADSAYSIIKDINIQVGRTGALTPVARIKPVNIGGVIVSNATLHNEDEIIRKDIRLGDTVKVERAGDVIPHVVLVDLKKRKKDSKKFVFPKKCPCGFDTIKEFNKVTKKYDAVRRCPDRGFECEKIAVEKIKHFISKEALNIDGLGKKVVENFWNLKLIRYPQDIFNLDYAKISNLEGWGDLSVSNLKYSIDQSKKVSLDKFLYAIGIRHIGIENAKLLAEYTKSIINFLNLIKNKKFNEFLNIDGIGGTQINSLKTFFENKSNYKIIEKLSSILNISDLKLNKDGKLLNNTFMFTGKLSNMSRAEAKSLIEENSGSVVSSVNKKLKYLIIGEKPTNRKVQQARELGIKVLSQKEWLNLLN

SEQ ID NO: 168123 - protein, 342 aa, Unknown
  Bacterial polypetide isolated from the Sargasso Sea
MSTTEDFEAINVEELTESQASREIIILKEQIRKHDISYHSDDAPIISDYEYDRLRIRITAIVSRFPNLKGEDDPSLYVGATSDIGFSKIVHEKSMLSLGNIFSREDLNSFIDGIRRFLVELRDNPDLLVEIVAEPKIDGLSISLKYENGTLVTGATRGNGIEGENVTRNVMVIDQVPKKLLGDFPELLEVRGEIYMTKNDFIELNHRQSEINEKVFANPRNAAAGSLRQLDWRVTSKRPLRMFAYAVPVSSKPVADSQWGLLERLKEWGFAVNPLSQVCESVGKLMSYYENISFQRSGLEYDIDGIVYKVNRLDWQERLGFLSRAPRWAVAHKFPGEQVRTK

SEQ ID NO: 168124 - protein, 705 aa, Unknown
  Bacterial polypetide isolated from the Sargasso Sea
MKKSNVSENDNQSKLNSLYEQIIEHNKKYHQDNNPSISDAEYDELVREAIEIEKEFPEFKQTNSPTDLVGSAPLEGFAKIQHKIPMLSIQNAKNIDEVNNWVDGLKNFLLLEDKEEIEFIAEPKIDGLSATLIYDKGELILGATRGDGAFGEDVTDNLRTIIDIPKSLNKNLAPDRLEVRGEVYITHDEFNDLNEKQKKDGKDIFKNPRNAAAGSLKQLDPKETSKRPLRFFAFSWGVFSDNNFNLHSDIMNYFNDLGLITNPESSTHMSVNSLEKYYNNLLDKRMDLGYDIDGIVYKLNRIDWRERLQSTGHHPRWAIAHKFPAEKAISEIIDVQIQVGRTGVLTPVARLKPVNIGGALVSNASLHNYEDIKKKDIRIGDTVWVQRAGDVIPQVIEVIKSKRKKENKEIKVPKNCPVCNSDAYREILTENKGAITYEKYIRCTGGFTCSSQAKERLKHFVSKEGFDIDGLGDKQINDYFDMGIIKDPTDIFSLEQTYKKNPPQIWVYSSGSKSKINTIKDSAIKLFKAIDDKKNINFDRFIYSLGIRHLGSSTASLLASHFIAFNNMVSVFKLHKLDEIDEVRSLDGIGDKVVNALIDFFQNRETLNLVNDLIKMGVTIQDYEKIETDSILSGKRIVITGTLESMSRAEAKVRIESLGGKVVSSISKNTNYLITGEKPTNSKIDKANSLEVKIINENEMFKLLQ

SEQ ID NO: 168125 - protein, 236 aa, Unknown
  Bacterial polypetide isolated from the Sargasso Sea
MNISEKIKSIREKINEHNYQYYVLDNPIISDGEYDKLFLELESLEKQNPEFVIPESPTQRIGATPIESFGTVTHRITMMSLANAMDTNELKAFDKRLKKKLKTDDELEYVIEPKLDGLAVELIYENGIFVNGSTRGDGNIGEDITSNLKTIKAIPLKLRDDSTSSPRLLEVRGEVFIRKNDFQDLNTKRLQSNEQPFANPRNAAAGSLRQLDPKVTANRALSIYCYQSGLVDGIDF

SEQ ID NO: 168126 - protein, 237 aa, Unknown
  Bacterial polypetide isolated from the Sargasso Sea
MYNKKIKLLNQFNKLYYDLSKPKVSDQEYDKLKNEIVLLEKEYKFLKSTNSPTQKVGFKPSKNFKKLPHKVPMLSLSNAFSEEDLKNFEKKIINYLDKKDEFEIFYSAEPKIDGISASIIYKNGKFITGLSRGDGKEGEDITENLKTIKDIPNEINSKNFPKEIDIRGEVFIKNSEFKKLSNKFANPRNAASGSLRQKDPNETKKIPLNFIAYTYGYEKGLEVETQHEFLEMLKHWG

SEQ ID NO: 168127 - protein, 565 aa, Unknown
  Bacterial polypetide isolated from the Sargasso Sea
KITDEMLFPIVIEPKIDGLAISLIYENGLFVQGLTRGDGFIGEDVTHNVKTIKNIPLKLKKETKGILEIRGEVYMPTESFNILNDINKKENLPTFINSRNAAAGSLRQKDSNITATRDLRLLSYQLINHEEIDLSLNYSKQLNNLKTYGFQVNNFYEVSDISEITKILDEIEAMRDKFSYQIDGAVLKIDSATSQDQLGFTSKAPRWAIAYKFQAEEQTTVLKDIKLQTGRTGAITPVAVLEPINVGGAKVSSATLHNPDEIRRKDLRINDYVIVRRAGDVIPEVVSSIKERRDGTQKMWSLPTSCPCGDSTIEFNEEEKVPRCKEKLSCSLARKEGIIFFGSRAGLEIDGLGKETIETLIENNLIKKVEDIYDLKFEELISLPQWEEKKTNNLLKAISKSINTDPEKLLTALGIRHIGKRTAKQLIQNFGSINGVLDATKDKIETIHGISESVADSLTEWKSDNENIKTMSSLEKHGFKFDKKAATSTGKLNGKTFVITGTLENYSRQDLINLIESLGGIVTTSVSKNTDILIAGKKSGTKLDKAKKLEIKIMNEDEALNYINK

SEQ ID NO: 168128 - protein, 359 aa, Unknown
  Bacterial polypetide isolated from the Sargasso Sea
MDKKKVNEIINKLSKAEHDYYVMNKPTMSDAEYDKLYNQLKSIEEANPELILSYSPTQRVTGTPSNAFQQVEHRQRMYSLDNSENINDIEKWLERLEKITDEMLFPIVIEPKIDGLAISLIYEDGLFVQGLTRGDGFIGEDVTHNVKTIKNIPLKLKKEAKGILEIRGEVYMPTESFNILNDFNKKENIPKFINSRNAAAGSLRQKDSNITATRDLRLLSYQLINHEEIDLSLNYSKQLNNLKKYGFQVNNFYEVSDINEIKKILDEIETKRDKFSYQIDGAVLKIDSATSQDQLGFTSKAPRWAIAYKFQAEEQTTVLKDIKLQTGRTGAITPVAVLEPVSVGGAMVSFATLHNPDEI

SEQ ID NO: 168129 - protein, 296 aa, Unknown
  Bacterial polypetide isolated from the Sargasso Sea
MDKDLKLIKKNYLSLIQELKKNNKFYYEKSDPKISDIEYDKLKIKIFDLEKEFKFLKSKDSPSNAIGFKPSKNFLKYKHRTKMLSLSNAFDQKDLLNFEKKISNFLNFKENNNTEYSVEPKIDGISASLTYKNCNLVLGLSRGDGIEGEIITDNLKTIKDIPKKINYKNFPKDIDIRGEVYIGKKDFEKIKDRFANPRNAASGSLRQKDPNETKKIPLRFIAYTYGFISDINIKKQSEFLDLLKKWGFNTNKHNDVISGVDNLVKNHKEFEKKRYDLDFDVDGLVYKINNVDIKKD

SEQ ID NO: 168130 - protein, 416 aa, Unknown
  Bacterial polypetide isolated from the Sargasso Sea
ISDRDYDELKKKILEFESKYVYLNKKDSPSKNIGFKPSKIFQKQKHKVAMLSLSNIFNKNDIINFEKKIKNYLNLSSFKFFEYSIEPKIDGISASLTYKNGKLTTGLSRGDGYEGEVITENLKTISDIPKHINSKDFPSEIEIRGEVYIEKNDFELLKDKFANPRNAASGSLRQKNPSETKKIPLKFIAYTFGLFEKNKFIKQSDFLKSLKAWGFKTSRYNKIISNIDDIIKNHQNFEKKRYELEYDVDGLVYKINDLKLQNRLGFVGNAPRWAAAHKFSAASSFSKILKIEIQLGRTGALTPVAKVEPVNIGGVVVSNATLHNEDEINKKDIRIGDIVKIERAGDVIPHVISVDFSKRPPKSFKYKFPENCPSCGSKVEKEFNKQTKKYDAVKRCSSEGFTCEKIAIEKIKHLFK

SEQ ID NO: 168131 - protein, 659 aa, Unknown
  Bacterial polypetide isolated from the Sargasso Sea
MTEFQPKKRVIDLSGQLQRSRQAYYCGNTHIKDEAYDQLKEELQKLEFEFPELILDDSPLIRVQAKPQESFPTRTHRSPMLSLGNVYSMEELRDWETGLQKLLNDEKTEYVCELKIDGLALSILYEKGELQAGVTRGDGSQGDEITPNLKTLSKLPLKLESPHDLEVRGEVYLSKKHFSQLNQRRQLTQEPEFKNPRNAAAGSVRMLDSNEVRRRKLDLFVYLLADGPLKPKHSENLQLLKDLQFPVNPETKTCKNIDEVIEFCRYWELHKDELPYEIDGVVVKVDDIQLQQKLGFTAKSPRWATAVKFSAEQAFSIIRSLEIGVGRSGVLTPVALVDPVELNGTIVSRATLHNYDQVNRLNLHLGDRVILEKGGEIIPKIVKSERGPAKGWPIRYPESCPVCDSQVSQLPGEVDWHCTNMDCPAQLNERLLHFVSRKAMNIDTVGPALIEQLTFKKKLRNPADLYRLHISDLEKLERMGTKSAENVLNAIEYSKDCKLGQFIHALGIPHVGEKTASVLANKHGSLQTLMQCTPETLEEIDEIGPIIAKSVFYFFQDQNNLDWIRDLLELGVIPRNQEALEGSGIPFFEGKVFVITGTLSEAREVWKERIEAAGAKVTGSVSSKTDFLLAGENAGSKLEKARTLGVQVLDEIEVSKELG

SEQ ID NO: 168132 - protein, 263 aa, Unknown
  Bacterial polypetide isolated from the Sargasso Sea
MKRLIDEINFHNYQYHGMDDPKISDYQFDKLVIELLDLEKENPQLIQVDSPTQRIGSRPIDGFTQIDHLTPMLSLDNVFTMEELMSFEMRAKDKLSLEDRIEFIAEPKLDGVAVNLVYESGILSYATTRGDGTTGEDVTHNVLTIKSIPMKLKSSSPPKTIEIRGEIIISKNDFETMNRENAGKELKVFANPRNAAAGSIRQLDPNISKDRPLRFYAHGYGLLSNEDKFSSHYDVMNYLNDSGIVISPYSEVVTGAEECGRYY

SEQ ID NO: 168133 - protein, 507 aa, Unknown
  Bacterial polypetide isolated from the Sargasso Sea
INAIPLQLRKSVKTPTFMEIRGEIFMNISDFNKLNKSRELLGEKLFANARNAAAGSVRQLDPKITASRNLSIFCYEIGGSEDIEFNNQVEMLDYLKSIGLPVNPLSKKITSASEMIAYHHTLESNRNHIDYEIDGSVIKVNNYKRRERLGLRSRSPRWAIAAKFKAKQAESQIIGIDLQVGRTGVVTPVAKIKEVELSGVMISSATLHNQDEIDRKDIRINDFVLIERSGDVIPKITQVLKNKRPQNTQKFSISDYKWPDPDCKIERIEGEAAYRCINPNCKSRVMGILEHFCSKNAMNIEGMGPQIVKQLFEADLLNSFDDIYKIKYEDLINLDRFKNKSAMNLIDSINQSKKTTFPRFLFGLGIPNVGQHISKIIDKYCNSSLEKLTELTVEEMVEIDGIGETVAIAIQDYFNDNNNKNIVESCLQLGIEIIPTTYDTSKMTMLNHKVVITGSFESLSRSDLKLRLEKLGATVNSSVSSKTSVVIVGKNPGSKLSKAQDLSIKIC

SEQ ID NO: 168134 - protein, 553 aa, Unknown
  Bacterial polypetide isolated from the Sargasso Sea
VSLRYVDGVFVQASTRGDGTTGENVTQNIRTIRSIPLKLKGKRIPHVLDVRGEVLMFKRDFERLNERQRAAQQKEFANPRNAAAGSLRQLDSKITAQRPLSFFAYGIGVLEGFEMPDTHSELLDWYKELGLPVNGERAVVQGAEGLLKFFQSVGEKRDALPYDIDGVVYKVNRRDEQDVLGFVSRAPRFALAHKFPAQEALTTLLAIDVQVGRTGAITPVARLEPVFVGGATVTNATLHNEDEVRRKDIRIGDTVIVRRAGDVIPEVVGALLDRRPDDAREFVMPTHCPVCGSSIERLPDETIARCTGGLFCPAQRKQALWHFAQRRALDIDGLGEKIIDQLVEQNLVRTPADLFNLGFATLAELDRFAEKSAQNLLDSLEKAKHTTLARFIYALGIRHVGESTAKDLAKHFGSLTPIMDASVEELLEVNDVGPVVAESIHRFFAEEHNRTVIEQLRAPGKVTWPEGPPAPKAPQGVLAGKTVVLTGTLPTLAREEAKEMLEAAGAKVAGSVSKKTDYVVAGAEAGSKLAKAEELGIPVLDEDGMRKLLEGQL

SEQ ID NO: 168135 - protein, 671 aa, Unknown
  Bacterial polypetide isolated from the Sargasso Sea
MEKTIKKRIDSLIAEINNHNYAYYVLDDPKLTDIEYDALFRELETLERDNPNLISKISPTQRVGHPVTSGFKSYEHSIPMLSLSNAINDEEINDFHKRIVKWLNNSEVNFVAEPKIDGLGVSLIYENGLLKRALTRGDGFKGEDITHNVKTINAVPLELRQSKKKTPSFIEVRGEIFMNISDFNQLNKNREISDEKIFANARNAAAGSVRQLDPNITASRNLSIFCYEIGGSKDIKLDNQIEMLEYLKSVGLPVNPLSKKITSSEDMVSYHHTLETNRTHIDYEIDGSVIKVNNYQKRERLGLRSRSPRWAIAAKFKAKQAESQIIGIDLQVGRTGVITPVAKIKEVDLSGVMISSATLHNQDEIDRKDIRINDFVLIERSGDVIPKITKVLKEKRPKNTKKFSISDFNWPDPECKIERVDGEAAYRCTNPNCKSRVMGVLEHFCSKNAMNIEGMGPQIVKQLLEADLLISFDDIYKIKYEDLIELDRFKNKSAMNLIDSINQSKKTTFPRFLFGLGIPNVGQHISKVIDRYCNSSLEKLTELKIEEMKEIDGIGETVAIAMEDYFKNDNNKSIIESCLKLGVKIIPTTYDTSRMRMLNQKIVITGSFESLSRSDLKLRLENLGATVTSSVSSKTDAVIVGKNPGSKLSKAQDLNIRIVEEKDLIGFLGEA

SEQ ID NO: 168136 - protein, 397 aa, Unknown
  Bacterial polypetide isolated from the Sargasso Sea
NNLEKIREKLEYEIDGTVFKINNYNERMKVGSRSRSPRWAIAGKFKAQQATSIITDIIIQVGRTGALTPVARVKPVFVSGVTVSNVTLHNQDEIDRKDIRLGDKVLIERSGDVIPKIIKVIERENQNSLKFKIDNICPSCGQKTRKQNDEAIIRCNNFYCPSQVLGRIQHYCSKLAMNIEGLGEKIVEQLIENKLVKNIDDLYLIKKNEISKLDGLGERSAKNIIDSINNSKETTFSKFVYALGIRNVGEHTSKLLEKKFKGDMERFKNATEIGLLEVDEIGEIVARSIVSFWKDEKNSTMVQNCLDRGVIINRPIDSLSNKFSDKVFVFTGALSMMSRKDAKALVEESGGQTKNSITKKTTYLVAGENSGSKLDKAKELGISILSEKDFIDLIGNK

SEQ ID NO: 168137 - protein, 235 aa, Unknown
  Bacterial polypetide isolated from the Sargasso Sea
LKRLVNINDFEYFCEPKMDGAAVSLIYKNGILERAVTRGDGRVGEDISQNVKTIRSIPQKLSSSEANIPSLLVIRGEIFISKDAFEKMNERAKENNEKLFANPRNAASGSLRQLDSKITSSRPLSFIAHGLGECEGIQFSSISEFYDHLKAWKIPTSDLCKKVETKDDCLKFHDKILKERESIPYEIDGVVFKVNDYDLQKRLGFISRAPRWAIAHKFPAEGATTILEDMNSKWK

SEQ ID NO: 168138 - protein, 275 aa, Unknown
  Bacterial polypetide isolated from the Sargasso Sea
ERIKKFLNYKHNEKLEYLCEPKIDGLSLNLTYSDGKLHSAATRGDGNEGEDVTDNILNIKNIPNKLKNNFPNIIEIRGEIYLTKSDFENLNKKLDQKNQFANPRNAAAGSLRQLDTRISHSRPLKFLAHGLGLCSNQYNTLNDYYNDLNKWEIFPNPIRKKVNSVQSIMKYYNEINDLRSNLDYDIDGLVIKLNKIQNQIRLGVVGKNPRWSIALKFSAETARTVINSIDFQVGRTGAITPVARLNKVNLGGVLISNATLHNFDEINKKDIGVET

SEQ ID NO: 168139 - protein, 263 aa, Unknown
  Bacterial polypetide isolated from the Sargasso Sea
SLFKELIDFENNNDFLNTENSPTQRIGFSPLDEFQKYSHRKKMLSLDNAFSINDLTDFNKRINPKEKFNNLKFSCEPKMDGVAISIRYKDGLFHSAGTRGDGSIGEDVTQNVKTIQGIPLKLESFSTKDPKDFDVRGEIYMELSSFNELNKQLAEKKFANPRNAAAGSLRQLDSKIVARRPLKMIAHGIGFVSDESYFESHSSMIQQFKKWGLPTNDLVKEFSSVNDCESYFNEISLLRDSLDYEIDGMVIKIDDLKIQEEVG

SEQ ID NO: 168140 - protein, 286 aa, Unknown
  Bacterial polypetide isolated from the Sargasso Sea
KSAKVFANPRNAAAGSLRQLDSKITAKRPLMFYSYSLGVVEPESFDLPNTHSERLNKLASWGLPLCPDIGTAEGGTGCLDYYNLILNKRDALPYDIDGVVFKVDDISIQRTLGFVARAPRWAIAQKFPAQEEVTTLVDVEFQVGRTGAITPVARLEPVFVGGVTVSNATLHNQDEIERLGVKIGDTVVIRRAGDVIPQVVSVVEANRTGNEVDINFPAQCPVCDSKAEKLEDEAVARCTGGLICPAQRKQALKHFASRKAFDIDGLGDKLVDQLVDADLVHSPADF

SEQ ID NO: 168141 - protein, 303 aa, Unknown
  Bacterial polypetide isolated from the Sargasso Sea
ASSPSISLGFTPSKNFIKSKHRVKMLSLSNAFDTEDLENFEKKIFNYLNKKIELEYSVEPKIDGISASLTYKNGSLIMGTSRGDGTTGEVITENLKTIKDIPQKITSKDFPKDIDIRGEVFIKRSEFDKLKNDFANPRNAASGSLRQKNPNETKKIPLNFVAYTYGYFESDKIRKQSDFLNSLQRWGFKTNEHNKILSSIDDLRNFHKKFEKERFNLEYDVDGLVYKINSLELQKRLGFTANSPRWAIAHKFSADSAFSKIIDINIQVGRTGALTPVARIKPVNIGGVVVSNATLHNEDEIIE

SEQ ID NO: 168142 - protein, 249 aa, Unknown
  Bacterial polypetide isolated from the Sargasso Sea
MKDSPKIKERVLELHKLINLHSHNYHSLDEPSIEDHQYDALFNELLDLEAKFPKYQFSYSPSQRVGGKPLDGFKKIEHLTPMLSLDNAFNDDDMEDFNKRILERLLVKGNISFSCEPKLDGIAVNLLYKSGHLDIASTRGDGKVGEDITHNIRTINSIPLSLIGDSSDLPSLIEIRGEVFIEKKDFDLANKKAIKEGEKTFANPRNAAAGSLRQLDPSIAASRPLKFYAHGIGYIKEGNFKLPDSQSEM

SEQ ID NO: 168143 - protein, 316 aa, Unknown
  Bacterial polypetide isolated from the Sargasso Sea
QIFNSSIQTKYFCEPKIDGAAVSLTYLNGNLEIGATRGDGETGENITSNVRTINSIPLKLIGLKDIPEILEVRGEIFMPKDEFTRLNKLQEKEGNKLFSNPRNAASGSLRQLDPQITKSRPLHFFAHGVGMIKGISFSSQEEVFKKFESWGLPVNPLNIIADDLEDCIKYFEKIDKNRESLNYEIDGVVYKVNNIDDQNKIGEIARSPRWAIARKFPAEEVQTKIIDINFQVGRTGVITPVAKLEKVFVGGVNVSNCTLHNVDELERLDPRPGDTVIIKRAGDVIPPIIRVIAKDKNRASKVKIPKLCECGSEVSL

SEQ ID NO: 168144 - protein, 297 aa, Unknown
  Bacterial polypetide isolated from the Sargasso Sea
CKLNKYYYELSKPLVNDYEYDQIKADILFLEKKYDFLVSANSPSKIVGFKPSKTFKKVLHRVPMLSLSNAFDEEDLVNFEKKINNFLDQKSSNELEYSAEPKIDGISASLIFKKGKFIMGLSRGDGNEGEDITNNLMTIDDIPKNISAKNFPDEIDIRGEVFIQNNDFENLKDKFANPRNAASGSLRQKNSQDTKKIPLRFIAYTFGYVNNMEIKNQSDYLQQLSEWGFKTNPFNKTIKGIKNLMKNYHEIEKKRNEINFDIDGIVYKINSFDLQKRLGNVANSPRWAIAHKFSANK

SEQ ID NO: 168145 - protein, 120 aa, Unknown
  Bacterial polypetide isolated from the Sargasso Sea
MAEQQQRAAELRSLLNRASHAYYVLDAPVMEDTVYDRLYRELQQLEQAHPSLLSADSPTQRVGGPPATGFHSVEHRIPLQSLDNAFDQGELKAWHQRLLKLLDRSDDSALPLVGELKIDG

SEQ ID NO: 168146 - protein, 277 aa, Unknown
  Bacterial polypetide isolated from the Sargasso Sea
KNFPSLKDNNSPTLKVGFKPSKNFVKAKHKVPMLSLSNAFNEEDLKNFEKKIINFLALKKSGELEFSAEPKIDGISASLIYKNGIFKRGLSRGDGFEGEDITENLKTIIDIPKKISFENFPIEIDIRGEVFITNSDFKSISEKFANPRNAASGSLRQKNPEETKKIPLKFIAYTFGYTSNLETKNQSDFLSNLKKWGFKISKFNKTIKGINNLVLYHEEFEKKRYNIDYDVDGIVYKINNFDLQKRLGFVANAPRWAIAHKFSADSSISKIINIDIQ

SEQ ID NO: 168147 - protein, 290 aa, Unknown
  Bacterial polypetide isolated from the Sargasso Sea
IPQNLPTKIEVIDVRGEVYMEHKDFEILNKNYGSLGKKIFANPRNAAAGSLRQLDATITAERPLKFLAYAWGELTEPLDISQFGAIKKLKNLGFKTNSHTKLCKTIDEALAHYDELSKIRSDLGYDIDGIVYKVDSLNLQERLGYRSTTPRWAIAHKFPAEYSWTRLEAIDIQVGRTGALSPVARLQPVTVGGVVVSNATLHNQDYIEGRDSSGKEIRSGKDIRINDWVEVYRAGDVIPKISDVDLTRRQVDSLPYTFPVNCPECGSKAIRDEGDAVIRCTGGIDCPAQA

SEQ ID NO: 168148 - protein, 222 aa, Unknown
  Bacterial polypetide isolated from the Sargasso Sea
SDFEKLKNNFANPRNAASGSLRQKDPKETKKIPLKFIAYTFGFEKGLRAVSQDEYLKNLKEWGFKTNPLNKTLEKVENLMINYKEIEKKRSDIDFDIDGIVYKVNDFNLQKRLGNVANAPRWAIAHKFSANSGISKIKNIEIQIGRTGALTPVAKIDPVNIGGVVVSNATLHNEEEINRKDIRVGDTVLIERAGDVIPHVISVDQKMRIKDSKKFIFPHKCP

SEQ ID NO: 168149 - protein, 243 aa, Unknown
  Bacterial polypetide isolated from the Sargasso Sea
GEDILENLKTIKNIPKKIVSEKVPDLLEIRCEIFIGKKDFTNIKGNFANPRNAAGGSLRQKNSSETEKIPLNYFAYGFGAVNPMIFETQSSFLNKISEWKFNVNPYSKLLNNFQEIQKHYLNIDSIRSTLDYDIDGLVFKVNDIRLQSRLGNTSNSPRWAIAYKFSAEKAITKIKDIQIQVGRTGAITPVAKVDPVNVGGVVVSNATLHNEEEIDRKDVRIGDIIQIQRAGDVIPQVVSVDNS

SEQ ID NO: 168150 - protein, 278 aa, Unknown
  Bacterial polypetide isolated from the Sargasso Sea
GKEGEDITANLSTIKDIPKKILDKDFPKDIDIRGEVFIQNSDFESLKEKFANPRNAASGSLRQKNSEDTKKIPLKFIAYTYGFEQGLRQINQSDYLKKLDEWGFKTNPLNKTISGVKNLIQNYNDIEQQRANLDFDIDGIVYKINNFELQKRLGNVANAPRWAIAHKFSSDKAISKILDIDIQIGRTGALTPVAKIKPINIGGVLVSNATLHNEDEIKRKDIRIGDIVTVERAGDVIPHILSVDLNKRPKKSAKFIFPNKCPSCGSKTEKEFNKVTKK

SEQ ID NO: 168151 - protein, 284 aa, Unknown
  Bacterial polypetide isolated from the Sargasso Sea
MNIFCEPKIDGVSLNVTYKNGDLLTASTRGDGKTGENVTNNIKKILNIPKKLKNNYPKFIEIRGEVYLSKKDFRDLNNNLDQKTKFANPRNAAAGSLRQLDPSITYSRPLKFIPHGVGFSSKAYIQLEEFYKDLKEWNIMPNNLTKKYSSVDSLKKYCDEIEKARSTIEYDIDGLVFKVNNIENQNRLGFVGKNPRWAIAYKLSSKKTVTKIKSIDFQVGRTGAITPVARLEEVNLGGVIITNATLHNFEEIIKKNISINDIVEIQRAGDVIPKVNKVIKKSKD

SEQ ID NO: 168152 - protein, 316 aa, Unknown
  Bacterial polypetide isolated from the Sargasso Sea
KFKKDLSRGDGREGEDITLNLTTIKDIPKKILDKDFPKDIDIRGEVFIQNSDFENLKEKFANPRNAASGSLRQKNPEDTKKIPLNFIAYTFGFEQGLKQIKQSDYLKKLGEWGFKTNPLNKTISGIKNLIQNYNEVEEQRANLDFDIDGIVYKVNDFALQKRLGNVANAPRWAIAHKFSSDKAISEILDIDIQIGRTGALTPVAKIKPVNIGGVIVSNATLHNEDEINRKNIRIGDTAVIERAGDVIPHILSVDKKKRSKNSKKFFFPKNCPSCGSETIKEFNKVTKKVDAVRRCSSEGYYCDKISIEKLKHLFKR

SEQ ID NO: 168153 - protein, 286 aa, Unknown
  Bacterial polypetide isolated from the Sargasso Sea
MARIRRFLNLTAHSPVEIVGEPKIDGLSLSLRYENRELVSAATRGDGTEGEDVTANVAHITDIPKILPDDAPADVVEIRGEVYMARSAFQKLNETQSETGGKTFANPRNAAAGSLRQLDPTISAKRPLRFFAYSFGELSESLAQTHWDFISKIKGWGFVTNPHTTLLHNTDEIMAFYEELGNQRAELDYDIDGIVYKVNDFELQLRLGFVSRSPRWAIAHKFPAEQARTRVKAIDIQVGRTGALTPVARLEPVTVGGVVVSNATLHNRDEIERLGVRVNDLVVIQR

SEQ ID NO: 168154 - protein, 223 aa, Unknown
  Bacterial polypetide isolated from the Sargasso Sea
LNYKNGNLIKGLSRGDGEEGEDITENLKTIKDIPLNISHKNFPQEIDIRGEVFIETNDFKKIENDFANPRNAASGSLRQKDPKKTELIPLKFIAYTFGFNSNLRESKQSDFIKDLDRWGFKTSELNKTIKGINNLVRYHAEIEKKRFSLNYDIDGIVYKVNDFSLQKRLGFMATAPRWAIAHKFSANYSVTKIVGIDIQVGRTGALTPVAKVKPVNIGGVMVS

SEQ ID NO: 168155 - protein, 257 aa, Unknown
  Bacterial polypetide isolated from the Sargasso Sea
MKDSPKIKERVLELHKLINLHSYNYHSLDEPSIEDYQYDALFSELLDLEDKFPKYQFSFSPSQRVGGKPLDGFKKIEHLTPMLSLDNAFNDDDMEDFNKRILERLLVEANISFSCEPKLDGIAVNLLYKSGHLDIASTRGDGKVGEDITHNIRTINSVPLSLIGDSSDLPTMIEIRGEVFIEKKDFDLANKKAIKEGEKTFANPRNAAAGSLRQLDPSIAASRPLKFYAHGIGFIEEGNFKLPDSQSEMLKQYQSWG

SEQ ID NO: 168156 - protein, 273 aa, Unknown
  Bacterial polypetide isolated from the Sargasso Sea
PPDKIEIRGEVFITKSDFQKLNKINSGQFANPRNAAAGSLRQLDSAVTSKRPLKFISHGFGHFEETDQETYYQQMKEFKKWGIPISPYLEICTGIKDLEHIYYNINKKRADIPYDIDGLVYKINNLDLQRRLGTVGKAPRWAIAHKFESESAETTVERIDIQIGRTGSVTPVARLKPVNIGGVLVSNATLHNFDEMHKKDIREGDNIIVERAGDVIPHVIEVVKTKNKKRNNTYKVPTKCPVCGSKIVIDEDEVVIRCSGTYQCEAQIIGRLR

SEQ ID NO: 168157 - protein, 268 aa, Unknown
  Bacterial polypetide isolated from the Sargasso Sea
YARAYYTENKPLISDAEYDQLYRRITMYENDNPLLISSESPTQRIGDQVLDTFSSFQHHSTLPSLSNVFDEEELQAWWDRIQKTEKNPDLEFTIEPKVDGLAIAIHYKNGVLDIAATRGDGKTGEVVTANIKTIKNLPHKLPKPITIEVRGEVFMRKSQFATISDQFANPRNAAAGSLRQLDPAIAAERQLDIFIYQGIYNDIPTHFDMISFLKTLNLPVIPHIQKVTGVQDLQNTALSLYSQREDLDYEIDGAVMKVNNFSVQKQLG

SEQ ID NO: 168158 - protein, 312 aa, Unknown
  Bacterial polypetide isolated from the Sargasso Sea
IEKYDLKKIKDRFANPRNAASGSLRQKNSSETKKIPLRFIAYSYGFNNEINFKKQSEFLQRLKNWGFKTNKFNKIVSGIDNLVRVHKELEKKRYDLDFDVDGLVYKINDLELQNRLGFVANAPRWAIAHKFSADSSFSKILNIDIQIGRTGALTPVAKVKPVNIGGVLVSNATLHNEEEINRKDIRVGDTVKIERAGDVIPHVLLVDLNKRPKDSKKFLFPQNCPSCGSKVIKDFNKISKKYDAVKRCSSEGYKCEKIAIEKIKHFVSKEAFNIEGLGKKVVEKFWNLKLIKLPYDIFNLNYKKIEKLDGWG

SEQ ID NO: 168159 - protein, 231 aa, Unknown
  Bacterial polypetide isolated from the Sargasso Sea
TCWIIPQCRIVKYDRAMQALLAMEATHPQWITADSPSQRVGDKPLDAFEQVEHAVLMLSLDNAFNGEELQEFDRRLRERLHKQTGRDLDAEVVYTCEPKLDGIAVSLTYINGVLAVGATRGDGSTGENITQNLRTLDSVPLKLIGTGWPEVLEVRGEAYMPTAGFEALNARLIAAGEKTYVNPRNTAAGSLRQLDSRITATRPLEFCAYSLGQTSASDSLPKQHFDMLTLT

SEQ ID NO: 168160 - protein, 282 aa, Unknown
  Bacterial polypetide isolated from the Sargasso Sea
TQRVGGAPAAGFSSVEHRIGLLSLDNGFNPEELQAWDERLARQLEDSEEQSREFVCELKIDGNALALSYQDGLLVRAATRGDGRRGEEITTNVRTIQSVPLRLRLEKPPAWVEVRGEAFIPDDTFAAINTERESRGEALFANPRNACAGTLRQLDPKVVASRRLDFFAYTLHLPAEVKGPASQWESLQWLESAGFRVNPHRERASGAAGVIDFYQRWEEERHQLPYATDGVVVKLDSLEQQQLAGFTQKAPRWAIALKYAAEEAPSRLLRLVAQVGRTGKVT

SEQ ID NO: 168161 - protein, 294 aa, Unknown
  Bacterial polypetide isolated from the Sargasso Sea
EKGLNVEYSAEPKIDGISASLFYKDGKFVTGLSRGDGKEGEDITENLKTIKDIPHELKFKNFPKELDIRGEVFIQNSDFRDLKDKFANPRNAASGSLRQKDPKETQKIPLKFIAYTFGYERGLEVSSQEDFLKKLKEWGFKTNPLNKTIKTIKDLMKNYNEIEKKRGQIDFDIDGIVYKVNNFTLQKRLGNVANAPRWAIAHKFSANSSISKIENIEIQIGRTGALTPVAKIRPVNIGGVVVSNATLHNEEEINRKDIRIGDTVLIERAGDVIPHVISVDLKLRSKDSKKFNFR

SEQ ID NO: 168162 - protein, 298 aa, Unknown
  Bacterial polypetide isolated from the Sargasso Sea
LKSKNTNHKFNVDCKIDGVSLSLIYKNKNLFKAITRGDGLVGEEITDNVIGIKGIPKILNYCKSDFIEIRGEVFFLRTDFEKLNNQFEKKNQFSNPRNAASGSLRQLDSKITKDRPLRFIPHGYGKISYEKEFLNFEEFLSFCKKNNFDQTGFSKSYDNLQNLYNYIHEIEKKRFSINFDIDGMVIKLSDLNLQRMLGNTSKFPRWAIAAKFSSQEALTQVKKIELQIGRTGAITPVARLKPINIGGVIVSNATLHNFDEIIRKDIRINDFVWVKRAGDVIPYVSKVDKQKRNKSHKK

SEQ ID NO: 168163 - protein, 294 aa, Unknown
  Bacterial polypetide isolated from the Sargasso Sea
SLTYINKKLVYGVSRGDGKVGEDITKNIKTIKDIPLLIKDVNFPNEIEIRGEVFIKKNDFLKIKDNFANPRNAASGSLRQKDEKETKKIPLKFIAYSYGFFKENNFKNQSDFLKELKKWGFKTNKDNKILNGINELLNFHKQFENNRYNLDYDVDGLVYKINDLNLQNRLGYTSNAPRWAIAHKFSANNANTKILSIDIQVGRTGALTPVAKVDPVNIGGVVVSNATLHNEDEIIRKDIRIGDIVKIERAGDVIPHVIEVDKTKREKNSISFTFPNKCPSCGSEAIKEFNKITK

SEQ ID NO: 168164 - protein, 293 aa, Unknown
  Bacterial polypetide isolated from the Sargasso Sea
IIFLKNKDSPSQSVGFTPSRNFKKVEHKIPMLSLGNAFSKDDLVNFEKKIINFLSLNKSTEIEYSAEPKIDGISASLIYKNKKFAQGLSRGNGKEGEDITENLKTINDIPKEILSKNFPNEIDIRGEIFIRNDDFNIIKDKFANPRNAASGSLRQKDPKITKKIPLKFIAYTFGYTDELNINSQSDFLKNLKDWGFKINKFNKVIKGINNLVINHKNLEEKRKSIDFDIDGIVYKVNNFELQKRLGFAANAPRWAIAHKFSANRSVSEIVNIEIQVGRTGALTPVAKIKPINI

SEQ ID NO: 168165 - protein, 330 aa, Unknown
  Bacterial polypetide isolated from the Sargasso Sea
DIDIRGEVFIEKTDFIKLKNDFANPRNAASGSLRQKNPLETKKIPLNFVAYTYGYFESNKIKKQSDFLSSLKKWGFKTNEHNKVLKTIKDLDSFHKKFENDRFDLKYDVDGLVYKINNLDLQNRLGFTANSPRWAIAHKFSADSAYSIIKDINIQVGRTGALTPVARIKPVNIGGVVVSNATLHNEDEIIRKDIRLGDTVKVERAGDVIPHVVLVDLKKRKSSSKKFVFPKKCPCGFDTIKEFNKLTKKYDAVRRCPDRGFECEKIAVEKIKHFISKEALNIDGLGKKVVEKFWDLQLIRFPQDVFNLDYSQISKLEGWGNLSVSNLNFS

SEQ ID NO: 168166 - protein, 305 aa, Unknown
  Bacterial polypetide isolated from the Sargasso Sea
IPKKISEKNFPEEIDIRGEVYIKNSDFKKLSDKFANPRNAASGSLRQKNPDETKKIPLRFIAYTFGFQKNMKVNLQTEFLKNLDKWGFKVNSFNKRIISIKNLLENYKSLEKKRDELDFDIDGIVYKVNDLELQKRLGNVANAPRWAIAHKFSANSGVSKILNIEIQIGRTGALTPVAKIKPINIGGVVVSNATLHNEDEIKRKDIRIGDVATIERAGDVIPHITSIQIKKRNKNSKKFIFPIKCPSCGSSTIKDFNLVTKKNDAVRRCSSEGYECEKISIEKIKHFVSKEAFNIEGFGKKIVEK

SEQ ID NO: 168167 - protein, 232 aa, Unknown
  Bacterial polypetide isolated from the Sargasso Sea
TRGDGQIGENITDNVITIKDIPKILKTKYPPVSIEIRGEIFITKNDFMKLNTDNKFANPRNAAAGSLRQLDSKVTAKRPLKFIAHGFGSFSEEKSSYYDQLIEFKSWGIPISPFLKKAKNLKDLIKIYDEVNKKRAEIPYDIDGLVYKVNNLSLQNRLGIVGKSPRWAIAHKFASETAQTEIKKIDIQIGRTGSVTPVARLKSINIGGVLVSNATLHNFEEIEKKDIREGDS

SEQ ID NO: 168168 - protein, 258 aa, Unknown
  Bacterial polypetide isolated from the Sargasso Sea
NKAKHKVPMLSLSNAFNEEDLINFEKKIINFLSLKKSEEIEFSAEPKIDGISASLTFKNGIFVKGLSRGDGIEGEDITENLKTISDIPKKISSKNFPSEIDIRGEVFIANNDFKFLSEKFANPRNAASGSLRQKNSQETKKIPLKFIAYTFGYTSKLDIKNQSDFLTNLKEWGFKTSKFNKTIKGINNLVLYHSQFEKKRYDIDYDVDGIVYKINNFDLQKRLGFVANAPRWAIAHKFSADSSISKIINIDIQVGRTG

SEQ ID NO: 168169 - protein, 281 aa, Unknown
  Bacterial polypetide isolated from the Sargasso Sea
SPMLSLGNAFEKKDITDFKKKISNFLNFKSDIQFSSEPKIDGISSTLRYENGDLVFGLSRGDGTFGENITENLATIDDIPKKLLDPPEIIEVRGEVYIGKKDFEKIKDKFANPRNAAGGSLRQKNSNETAKIPLKFFAYGIGEIKPKLFKKQSDLLKRLKTWGFPVNELCETVNNTEEIEKNHMKLENLRSNLDYDVDGVVYKVNNLDFQERLGSTANSPRWAIAYKFSSVKASSKITNIVIQVGRTGAITPVAKINPVTVGGVVVSNATLHNEDEINRKD

SEQ ID NO: 168170 - protein, 310 aa, Unknown
  Bacterial polypetide isolated from the Sargasso Sea
VEYSCEPKLDGIAVNLTYKEGLLEIATTRGDGKTGEDITHNVKTIKSIPLSLISKDSNYPEHIEIRGEVFIEKAAFDLANKNSIKAGEKTFANPRNAAAGSLRQLDPAITASRPLQFFAHGVGYVQAKKFNLPETHVEILELYRSWGLPINPITKVAKNIEECNEYFLTIIDKREKLPYEIDGVVYKVNNISKQTSLGQVSRAPRWAIARKFPAEVGTTIVKTISFQVGRVGSITPVAEFVPVNIGGVTVSHASIHNFDEIDRLDVREGDTVKIKRAGDVIPQIISVEKEKRKQKSKKVIPPISCPSCDS

SEQ ID NO: 168171 - protein, 291 aa, Unknown
  Bacterial polypetide isolated from the Sargasso Sea
MQDIQLDKRLSELLSQAVTPHNAQPLMQALCQSLNEHNIRYYVDDAPSITDSEYDRLMQQLKQLEAEYPQFVAADSPTQRVGGMALAKFEQITHLKPMLSLDNAFDEADFSAFHKRVSDRVGEVSFCCEPKLDGLAVSILYRNGVLERAATRGDGTVGEDITENVKTIKSIPLKLRGDNYPELVEVRGEAFMPKAAFEALNERARLKDEKLFVNPRNAAAGSLRQLDSKITASRALSFYAYALGVVEPTSHELAKTHYEQLQQLKSWGLPVSSEIKVCDELSQVFAYYQDI

SEQ ID NO: 168172 - protein, 271 aa, Unknown
  Bacterial polypetide isolated from the Sargasso Sea
KPSKIFKKVKHKIQMLSLSNAFDKEDMINFEKKICNFLSLKKNTIIEYSAEPKIDGISASLLYKNGKFIQGLSRGDGVEGEDITENLNTIKDIPKYISKKNFPEEIDIRGEVYIGNKDFNLIKDKFANPRNAASGSLRQKNPDETSKIPLRFIAYTYGFSKGLSISTQSEFLKNLRIWGFRINEYNNIIKGIDNLMQNHKNLEEKRNKIDFDIDGIVYKINNFDLQRRLGFVANSPRWAIAHKFSANSSVSEILNIEITSWKNWSPYTCCK

SEQ ID NO: 168173 - protein, 311 aa, Unknown
  Bacterial polypetide isolated from the Sargasso Sea
ELERKYKYLNHKSSPSKIVGHKPSRYFKKIAHKVPMLSLGNAFTENDLKNFEKKILNFLSQNDNKNISYTSEPKIDGISASLTYINGKLERGLSRGDGKEGEDITTNLSTIKDIPKVIQSKDFPEEIDIRGEVFIQNNDFDSLKNKFANPRNAASGSLRQKNSEDTKKIPLKFIAYTFGFQKGLKVNNQFDFLKKLSEWGFKTSPLNRLITGVGELIKNYNLVEKKRANLDFDIDGLVYKINDFTLQKRLGFVANAPRWAIAHKFSSNKAISKIIDIDIQIGRTGALTPVAKIKPINIGGVLVSNATLHNE

SEQ ID NO: 168174 - protein, 276 aa, Unknown
  Bacterial polypetide isolated from the Sargasso Sea
EIITENLKTIKDIPKSIKDKKFPKDVDIRGEVYIGKGDFEKIKDRFANPRNAASGSLRQKNPNETKKIPLRFIAYTYGFNSEMNFKKQSEFLNLLKTWGFNTNTHNKIIIGLNNLVQNHKDFEKKRYDLDFDVDGLVYKINDLDLQKRLGFVANAPRWAIAHKFSADSSFSKILNIEIQIGRTGALTPVAKIKPVNIGGVVVSNATLHNEEEIIRKDIRAGDTVKVERAGDVIPHVLSVDLNKRLKESKKFLFPKNCPSCGSKVIKDFNKISKKYD

SEQ ID NO: 168175 - protein, 243 aa, Unknown
  Bacterial polypetide isolated from the Sargasso Sea
NIQKKTPPKLLDIRCEIFIGKKDFLKLKDKFANPRNAAGGSLRQKNPLETSKIPLKYFAYGFGAVEPMIFKTQADFLNKISKWKFNINPLSKIIRNLKEVEIEHNKINQIRSSLDYDIDGIVYKVNDLNLQKRLGNTSNSPRWAIAYKFSAEKASTRIKDIVIQVGRTGAITPVAKVEPVTVGGVVVSNATLHNEDEIKRKDIRVGDSIIIQRAGDVIPQVVSVDKSKRNENSKKYIFPKKCL

SEQ ID NO: 168176 - protein, 273 aa, Unknown
  Bacterial polypetide isolated from the Sargasso Sea
NLNEKFANPRNAASGSLRQKNPDDTRKIPLKFIAYTFGFEKGLKVKNQFDFIKKLNEWGFKTNQENKLISGVKNLIKNYKEIEKKRLAIDYDIDGIVYKVNDFELQRRLGNISNAPRWAIAHKFSSNKAISKILDIEIQIGRTGALTPVAKIKTVNIGGVKVSNATLHNEDEIDRKDIRIGDTVTVERAGDVIPHILSVDFSKRLKESVPFSFPKKCPSCGSKTIKEFNLITKKKDAVRRCSSEGYYCEKISIEKLKHFVSKDALNIDGLEKK

SEQ ID NO: 168177 - protein, 294 aa, Unknown
  Bacterial polypetide isolated from the Sargasso Sea
DQEFDILKNDIIELEKKYNFLNSEFSPSKSVGFKPSKNFKKVNHKSPMLSLSNAFTKEDLLNFEKKILNYLNKKKDFEIEYSAEPKIDGISASLIYIDGKFKTGLSRGDGKQGEDITDNLKTITDIPKNILNKDFPKEIDIRGEVFIQNSDFKKISNKFANPRNAASGSLRQKNPEDTKKIPLKFIAYTFGFEKGLKIENQKDFLKCLKKWGFKTNSLNISAKGIDNLMTNYKRIEEKRDKIDFDVDGIVYKVNSFELQKRLGNVANSPRWAIAHKFSANKGISKINNIDIQME

SEQ ID NO: 168178 - protein, 289 aa, Unknown
  Bacterial polypetide isolated from the Sargasso Sea
KLTYGLSRGDGIFGEDITDNLSMISQIPKKINNPPKIVDVRGEVYISKKDFESIKNKFANPRNAAGGSLRQKNSNETKKIPLKFFAYGIGKIEPKIFKDQTELLKNLKKWGFQINQHCKKIKSIQEIEKNHSELESIRSSLDYDVDGIVYKVNNLSLQNRLGSTSNSPRWAIAYKFSSVKAISKINEIIIQVGRTGAITPVAKIDPVTVGGVVVSNATLHNEDEITRKDIRVNDTVLVQRAGDVIPQVLSVDKTKRSIKSKKFIFPEKCLCGYKTKKEISLTTKKTDAV

SEQ ID NO: 168179 - protein, 283 aa, Unknown
  Bacterial polypetide isolated from the Sargasso Sea
FSRNEHNFLKKKDSIQHIIGSPPSKKFKKIKHKKAMLSLSNAFGKEDMNDFLKKIKNFLKSYDSTIDIFSEPKIDGISASLIYENGLLKTGLSRGDGETGEDILNNLKTINQIPKKIDAKQIPEILEIRGEVYIGKNDFENIKENFANPRNAAGGSLRQKFSEETAKIPLQFFAHGFGVVEPMIFKTQSEFLKKINQWGFSTNPHSKLVKNLNEIEDHHQKIESLRASLDYDIDGLVYKVNDVELQSRLGNTSSSPRWAIAYKFSSEKATTKIKDIAIQVGRT

SEQ ID NO: 168180 - protein, 278 aa, Unknown
  Bacterial polypetide isolated from the Sargasso Sea
QYKKSHSPTQRVGSSPIKKFNTIEHKEPMLSLSNAMNSNELFDFHNRNKKTLNQKSITYVAEPKLDGLGVTLTYSKGSLLHGATRGDGNNGEDITHNLKTIKSIPLKLRDVGKEIPKYIEIRGEVFIKKKNFLKLNKLQAKTGEQIFANPRNAAAGSLRQLDPKITATRPLSIFCYEAGLIEGKLFKDHNSLLKALRIWGFPVSPLIKTITGHTGLKKYQKDLEKIRNDLPYEIDGTVFKINNYKHREILGYRSRSPRWAIAGKFKAQQATTIIRNIE

SEQ ID NO: 168181 - protein, 235 aa, Unknown
  Bacterial polypetide isolated from the Sargasso Sea
MNLEKKLDYICEAKIDGLSLNLTYKDGILVSAATRGDGFIGEDVTQNIVNIKNIPKKLKGNFPSSIEVRGEVFLTKKDFENINSKLDDKNQFANPRNAAAGSLRQLDVNISKSRPLKFLAHGLGYSSYEFTYFDEYYEKLEKWGIKKNNINLKASNINSIFEFYNSMNETRSTLDYDIDGLVIKLNKISNQKRLGNVGKNPRWAIALKFSAEKARTKIQDIDFQVGRTGSITPVA

SEQ ID NO: 168182 - protein, 140 aa, Unknown
  Bacterial polypetide isolated from the Sargasso Sea
MGWAEAYFERDAPVVADADYDQAMRQLEAIEREFPDLVTPDSPTQRVGSAPLGEFESVEHRLPMLSLDNAFSSDDMDDFHRRVTERLGDGDVSYCCEPKLDGVAVSVVYEHGALVLAATRGDGTRGENITANVRTISNVP

SEQ ID NO: 168183 - protein, 269 aa, Unknown
  Bacterial polypetide isolated from the Sargasso Sea
FIKRSVKFLNLDNDDDFQYICEPKIDGLSLNLVYKNGNLISAGTRGDGFIGEDVTENILNIKNIPPKLKKDFPDFIEIRGEVFLNKSDFEKLNSKLENKSKFANPRNAAAGSLRQLDTSISHSRPLKFIPHGIGKCSHNFDNIENYYDRLKNWNISPNNLSKNCQSIEQIIKFYNQINQKRSGIDYDIDGLVVKINSFKLQERLGYVGKNPRWAIAIKFSAEKANTIIQSVDFQVGRTGAITPVARLQPVNLGGVIISNASLHNFDEIN

SEQ ID NO: 168184 - protein, 135 aa, Unknown
  Bacterial polypetide isolated from the Sargasso Sea
MAEQQQRAAELRSLLNRAAHAYYVVDAPVMEDTVYDRLYRELQQLEQADPSLLSGDSPTQRVGGPPATGFHSVEHRIPLQSLDNAFDQGELRAWHERLVKVLDRADDSALPMVGELKIDGNALALSYRHGVLARA

SEQ ID NO: 168185 - protein, 277 aa, Unknown
  Bacterial polypetide isolated from the Sargasso Sea
DLVTPESPSQRVGAPPLSQFEKVTHLKPMLSLDKSTNQKELKDWMERCENRLGPTERMSYACEPKIDGVAVSLTYREGVLERASTRGDGETGENITANVRTIRSIPLSLGDKDCPSFFEVRGEIYMEKSKFHLFNQKASEKDNKQLINPRNAAAGSLRQLDSSVTAQRPLTMFCYSLGALEGSWSPSTHEEVMRQFSKWGFRVNPSTCVATTLVEIESYLEKVASSRAQLDYEIDGVVIKVNELTHQAALGEMIRRPRWAIAYKFPAEEVTSRILDV

SEQ ID NO: 168186 - protein, 268 aa, Unknown
  Bacterial polypetide isolated from the Sargasso Sea
TKHRVPMLSLGNAFTEDDLINFEKKILNFLNKDNNFRIIYSAEPKIDGISASLIYRNGKFVTGLSRGDGKEGEDITENLKTIRDIPYLIKSKNFPREIDIRGEVFIQNSDFEKLKNKFANPRNAASGSLRQKDPKETKKIPLKFIAYTFGHEKGLKAVSQNEYLENLKEWGFKTNPLNKTLDKIENLMINYQEIEKKRGEIDFDIDGIVYKVNEFNLQKRLGNVANAPRWAIAHKFSANSGISKINDIEIQIGRTGALTPVAKINPVN

SEQ ID NO: 168187 - protein, 294 aa, Unknown
  Bacterial polypetide isolated from the Sargasso Sea
NDELEAQFPELVREDSPTKKVGAAVREGFRKITHARPMLSLGNAFSDDDVYEFTDRVRRFLTLAEDEVLEIAAEPKIDGLSLSIRYEQGRFVHAVTRGDGGVGEDVTQNVETMGDIPQKLPGSVPDVLEIRGEVYMSKQDFADLNARQAATGQKTFANPRNAAAGSLRQLDPTITAARPLRFFGYAWGEVSENFGATLWEARSRIATWGFQLNEPAALCTSAGALLAYYVDMTYRRPELPFDIDGIVYKVNRLDWQERLGFVSRAPRWAIAHKFPAEKAETRLNKITIQVGRTG

SEQ ID NO: 168188 - protein, 271 aa, Unknown
  Bacterial polypetide isolated from the Sargasso Sea
MNSKNIDEKKIIKRLEALAELIKKHNYNYHTLDKPLILDKEYDSLVKENQKLEKKYPFLKLKNSPENNVGSKISNKFIKIEHKSSMLSLANAFDEKDIYEFDDRIKKFLNLKSSKKFEYLCEPKIDGLSLNLTYKNGNLISAATRGDGSIGENVTNNILHIKDIPNQLKFDYPDLIEIRGEIYLTKSDFESLNKKLSEKEKFANPRNAAAGSLRQLDSKISQSRPLKFTAHGLGFCSKSYSSLIDYYDNLTKWKIYPNPLRKKIASIEAIM

SEQ ID NO: 168189 - protein, 290 aa, Unknown
  Bacterial polypetide isolated from the Sargasso Sea
YQFDKLVIELLDLEREDPTLIQVDSPTQRVGSRPIDGFTQIDHLTPMLSLDNVFTMEELMSFERRAKDKLSLDDKIEFIAEPKLDGVAVNLVYESGILSYATTRGDGTTGEDVTHNVLTIKSIPIKLKSSSPPKTIEIRGEIIISKNDFKIMNRDNVGKELKIFANPRNAAAGSIRQLDPNISKDRPLKFYAHGYGLLSDEDKFSTHYDVMNYLNDSGIVISPYSEVVLGAEECGKYYEKIDSLRDSLDFEIDGVVYKVNNISHQKELGFVSKAPRWAIAHKFSSIEVES

SEQ ID NO: 168190 - protein, 305 aa, Unknown
  Bacterial polypetide isolated from the Sargasso Sea
MKYWYKKKVKLFKKYNKFYYTKSNPLVLDHEYDELKREISLLEKKYDYLKSKDSPLVSVGYKPSKNFKKVLHRTPMLSLANAFSENDLLNFEKKILNFLSKEENFKLTYSAEPKIDGISASLAFKNGKFIQGLSRGDGKEGEDITANLSTIDDIPHNINSKDFPKEIDIRGEVFIKNSDFENLKEKFANPRNAASGSLRQKNPEDTKKIPLNFIAYTFGYEQGLKQKKQSDYLKKLSDWGFKINPLNKTISGIKNLIQNYNDVEQQRANLDFDIDGIVYKINDFELQKRLGNVANAPRWAIAHKF

SEQ ID NO: 168191 - protein, 275 aa, Unknown
  Bacterial polypetide isolated from the Sargasso Sea
PVGELKIDGNALAISYRNGLMERAATRGDGSRGEDITANVRTISSIPLRLPLENPPEWAEIRGEAFIPKDTFEAINAERDKRGEALFANPRNACAGTLRQLDPKVVAARRLDFFAYTLHLPPERQPQSQWEVLSWLEQAGFRVNPNRELCQDLSGIHRFCDSWEEARHQLPYATDGVVVKLNNLALQDEAGFTQKAPRWAVALKFPSEEAPSRLLRVSVQVGRTGVVTPVAEFEPVALAGTSVSRATLHNADRIAELDLHLGDTVVVRKAGEIIP

SEQ ID NO: 168192 - protein, 267 aa, Unknown
  Bacterial polypetide isolated from the Sargasso Sea
EFSSEPKIDGISATLIYENGILTKGLSRGDGVTGEDILENLKTINEIPKKIKGNNIPSLLEIRGEIYIGKKDFNKIKGNFANPRNAAGGSLRQKDSKETSKIPLKYFAYGFGAIKPMMFSSQAEFLETIKNWGFSTNPLVKVVKNLEEIESQHSFIDSKRSALDYDIDGLVYKVNDLKLQSRLGNTSNSPRWAIAYKFSAEKAVTKIKDIAIQVGRTGAITPVAKVEPVTVGGVVVSNATLHNEDEINRKDIRIGDTVQIQRAGDVI

SEQ ID NO: 168193 - protein, 293 aa, Unknown
  Bacterial polypetide isolated from the Sargasso Sea
TYKNGKLIMGLSRGDGIEGEVITENLKTIKDIPKNINSSSFPKNIDIRGEVFIKNKDFKKLNDRFANPRNAASGSLRQKNPNDTKKIPLNFIAYTFGYFENNTLKKQSDFLKKLKEWGFKTSKYNDVIKGVDNLIKNHENFESSRFDLDYDVDGLVYKINDYNLQTRLGNVTNAPRWAIAHKFSAHSSFSEILKIDIQVGRTGALTPVAKIKPVNIGGVLVSNATLHNEDEINRKDIRIGDTVKVERAGDVIPHVVAVDLQKRKNDSKIFEFPTKCPSCGSITIKEFNKLTKK

SEQ ID NO: 168194 - protein, 285 aa, Unknown
  Bacterial polypetide isolated from the Sargasso Sea
NNFLNNKSEIQLSSEPKIDGISATLRYENGKLVYGLSRGDGVFGENITENLTTIKDIPKSLTNSPRVIEVRGEVYIGKKDFEKLKDKFANPRNAAGGSLRQKDSKETAKIPLKFFAYGIGEVNPKIFKKQTELLKKLKSWGFPINSNCKLVNSIGEVEKNHSDMEALRSTLDYDVDGIVYKVNDFNFQERLGSTSNAPRWAIAYKFSSVKASSKIKNIVIQVGRTGAITPVAKINPVTVGGVVVSNATLHNEDEINRKDIRIGDVINIQRAGDVIPQVVSVDKSR

SEQ ID NO: 168195 - protein, 246 aa, Unknown
  Bacterial polypetide isolated from the Sargasso Sea
LNLNKNFVFEYSAEPKIDGISASLTYKSGKLIRGLSRGNGEEGEDITLNLKTISDIPHYIDQTDFPDDIDIRGEVFIQNNDFEKIKDSFANPRNAASGSLRQKDPKKTSKIPLKFVAYTFGFSSDETFDKQTNFLIKLKKWGFKTSELNKKISGIKNLLSNHQNIEKKRFELNYDIDGIVYKINDFKLQKRLGFVTNAPRWAIAHKFSASNSVSEILSIDIQVGRTGALTPVAKVKPVNIGGVVVS

SEQ ID NO: 168196 - protein, 279 aa, Unknown
  Bacterial polypetide isolated from the Sargasso Sea
IDFEEKKLKITGDNRIKDSVGYKPSEKFSKVKHDENMLSLDNAFNDEDILDFYKKLNNFLNLKPDTRIELLAEPKIDGISASLKYINGIYVQGISRGDGNFGEEISENLATISDIPKKLKNSSDGELIVRGEVYIAKSDFKNLEGKFANPRNAASGSLRQKNSKNTSKIPLKFFAYGTIFKNHNITKMQSDFLIKLKEYGFKTNPLSKILYNEKELKLNYRKIEEKRSSLDYDIDGIVYKVNNFKLQRRLGNLTNSPRWAIAHKFSAEKGISKIKSIEI

SEQ ID NO: 168197 - protein, 262 aa, Unknown
  Bacterial polypetide isolated from the Sargasso Sea
NLKTIKDIPQKVTSKDFPKDIDIRGEVFIKRSEFGKLKNDFANPRNAASGSLRQKNPNETKKIPLNFVAYTYGYFESDKIIKQSDFLKFLQRWGFKTNEHNKILNSIDDLINFHKKFEKERFDLEYDVDGLVYKINSLELQKRLGFTANSPRWAIAHKFSADSAFSQIIDINIQVGRTGALTPVARIKPVNIGGVVVSNATLHNEDEIIRKDIRISDTVKIERAGDVIPHVVSVDLKKRKKSSKKFVFPKKCPCGFDTTKEI

SEQ ID NO: 168198 - protein, 281 aa, Unknown
  Bacterial polypetide isolated from the Sargasso Sea
VSAGTRGDGFTGENVLENISRIKEIPLNLNKNYPDLIEIRGEIYINKIDFEIINKNLNTKDKFANPRNAAAGSLRQLDTSISHNRPLRFIAHGIGFSSKLYKNIQDFYQDLNKWKIPTNKFLKFCLSADEVMNHYNLINQKRADIEFDIDGLVIKIDNIELQKRLGYVGKNPRWAIALKFSAEKAETTILDIDFQVGRTGAITPVARLKPVNIGGVIVSNVSLHNFDEIDKKNINIRDIVEIERAGDVIPHVTKLVSKKSNINNKIFPPKGLSKIAKVKTI

SEQ ID NO: 168199 - protein, 244 aa, Unknown
  Bacterial polypetide isolated from the Sargasso Sea
RTINDHNYNYYVLDNPIISDIEYDTLLRELDTLETKRPDLITTDSPTQRVGAAPLAAFTSVEHSIPMLSLENAMNSDELIAYYDRTKKGLGEIRDIQFVAEPKLDGIGVELIYQDGSLIRGLTRGDGTMGEDITQNIKTIRSIPLALRNDKRNFPNLLEVRGEVFMLKKDFQKLNIARENNNEPLFANPRNAAAGSLRQLDPSITAKRPLSIFCYEAGNITGDAFSSHKDFLSALAEWGFPGTA

SEQ ID NO: 168200 - protein, 313 aa, Unknown
  Bacterial polypetide isolated from the Sargasso Sea
LNKHNKLYYNKSKPIISDSEYDNLKLDILNLEQKYKYLKSVKSPSKIVGHKPSKLFEKYQHKVPMLSLSNAFDENDLLNFEKKIFNYLNKKIKLNYSVEPKIDGISASLTYIDKKLKFGVSRGDGEVGELITENLKTIKDIPLEIKNKDFPNEIEIRGEVFIKKNDFFKIKDKFANPRNAASGSLRQKNPLETKKIPLNFIAYTFGYSRKYLKKRQSDFLNDLKKWGFKINIDNKILNSIDELLKFHKSFEAKRFDLDYDLDGLVYKVNDFDLQSRLGFTSNSPRWAIAHKFSADSANTKVIKIEIQVGRTGA

SEQ ID NO: 168201 - protein, 239 aa, Unknown
  Bacterial polypetide isolated from the Sargasso Sea
YDKLVKEYLELEIKFPDIKLKSNPISKIGGKINNKFSKSEHLSPMYSLANGFNENDLLEFDERIKKYLNLEIKEKLEYICEPKIDGLSLNLTYKNGNLFSAATRGDGFIGEDVTNNIRNIKNIPQKLNYKFPNLLEIRGEVFINKSDFEKINLKLNDKNKFANPRNAAAGSLRQLDYSISHSRPLKFLAHGLGLSSQNFVKFDNFYKCIENFGIKRNLLSIKTSSLKKIFEFYQKINAQ

SEQ ID NO: 168202 - protein, 145 aa, Unknown
  Bacterial polypetide isolated from the Sargasso Sea
IRGEVFIGNKDFEKIKNKFANPRNAASGSLRQKNPNDTKKIPLKFIAYTFGYEKGMKVQKQNEYLQKLTDWGFKTNPFNKTLKGVQNLMYNYYEIEKKRNEIDFDIDGIVYKINDFNLQKRLGNVANSPRWAIAHKFSANKGISK

SEQ ID NO: 168203 - protein, 243 aa, Unknown
  Bacterial polypetide isolated from the Sargasso Sea
PNKISEKNFPEEIDIRGEVFIRNSDFKKLSNKFANPRNAASGSLRQKNPGETKKIPLKFIAYTFGFQKNMQIKSQTEFLKNLDKWGFKVNPFNKKITSIENLLENYKSLEHKRDEIDFDIDGIVYKVNNFELQRRLGNVANAPRWAIAHKFSANSGVSKILNIEIQIGRTGALTPVAKIKPINIGGVIVSNATLHNEDEIKRKDIRIGDIATIERAGDVIPHITSIEVKKRGKNSKKFIFPTN

SEQ ID NO: 168204 - protein, 264 aa, Unknown
  Bacterial polypetide isolated from the Sargasso Sea
EPKIDGISASLIFKKGKFIMGLSRGDGKVGEDITNNLMTIDDIPKNISAENFPDEIDIRGEVFIQNNDFENLKDKFANPRNAASGSLRQKNPQDTKKIPLKFIAYTFGYVNNMEIKNQSNYLQQLSKWGFKTNPFNKTIKGIKNLMKNYYEIEKKRNEIDFDIDGIVYKINSFDLQKRLGNVANSPRWAIAHKFSANKGTSKILNIEIQVGRTGALTPVAKIKPINIGGVVVSNATLHNEDEIIRKDIRIGDIVIVERAGDVIP

SEQ ID NO: 168205 - protein, 196 aa, Unknown
  Bacterial polypetide isolated from the Sargasso Sea
MKDLRAQVNEHNYRYYVADAPTIADVEYDRLLRDIGDLEAAHPELITPDSPTQRVGCKPDTAFSSVAHRVPMLSLSNVFTPEDLALFFSRIQQKIPHAVDCEVLCEPKLDGLAVTLIYVDGQLVTAATRGDGQVGENITLNARTIKSVPLVLRGTGYPQRLEVRGEVFMMKAGFDQLNQLALQREEKTFANPRNAA

SEQ ID NO: 168206 - protein, 299 aa, Unknown
  Bacterial polypetide isolated from the Sargasso Sea
KKIINFLSLKKSAEIEYSAEPKIDGISASLIYKKGIFVQGLSRGDGREGEDITENLKTINDIPKKISSKNFPIEIDIRGEVFIKNNDFNIIKDKFANPRNAASGSLRQKDPRVTKKIPLKFIAYTFGYAEKLSINSQSDFLKNLKHWGFKINQFNKVIKGVDNLILNHKNLEEKRKSIDFDIDGIVYKINNFDLQKRLGFVTNAPRWAIAHKFLANSSISEIINIEIQVGRTGALTPVAKIKPTNIGGVTVSNATLHNEDEIIRKDIRIGDTVTIERAGDVIPTCNFCRLKKTKKKSKK

SEQ ID NO: 168207 - protein, 281 aa, Unknown
  Bacterial polypetide isolated from the Sargasso Sea
KNYGSKIKDNFKKIKHDSQMYSLANAFDNNDIHDFIKRSVKFLNLENDDDFQYICEPKIDGLSLNLVYKKGNLISAGTRGDGFIGEDVTENILNIKNIPSKLKINFPDFIEIRGEVFLNKSDFEKLNSKLEDKSKFANPRNAAAGSLRQLDIAISHSRPLQFIPHGIGKCSENFENIENYYDQLKNWKIIPNDLCKKFQSVKEIIKFYNQINQKRSSINYDIDGLVVKINSFKLQERLGYVGKNPRWAIAIKFSAEKANTIIKSVDYQVGRTGAITPVARC

SEQ ID NO: 168208 - protein, 202 aa, Unknown
  Bacterial polypetide isolated from the Sargasso Sea
NEHRKIINSVVEIADYYAYWTEMRNSLNYDTDGIVIKVDSYQKQNVLGAVAREPRWAIAYKYPAKTEITKLIQIGINVGRTGSLNPFAELDPIAIGGVTVKNATLHNYEDIQKKDIRVNDFVYIRRSGDVIPQILGPVLEKRTGNEQVFTMPTECPSCNSQIYKYSDDVNYYCINSECPDQFENHLIHFVSKNCMDIRGLGE

SEQ ID NO: 168209 - protein, 285 aa, Unknown
  Bacterial polypetide isolated from the Sargasso Sea
IDGISASLTYKGGKFEKGLSRGDGKEGEDITANLATIKDIPKVIQSEDFPEEIDIRGEVFIKNTDFDNLKEKFANPRNAASGSLRQKNPDDTKKIPLKFIAYTFGYEKGLLANNQFDYLNKLKEWGFKTNPLNRLISGTKNLIKNYIVVEKQRSSLEFDIDGIVYKINDFALQKRLGNVANAPRWAIAHKFSSNKATSIILDIEIQVGRTGALTPVAKIKPINIGGVVVSNATLHNEDEINRKDIRVGDTVTVERAGDVIPHILSVDINKRPKKSIKFIFPDKCP

SEQ ID NO: 168210 - protein, 276 aa, Unknown
  Bacterial polypetide isolated from the Sargasso Sea
VAVNLLYEEGKLIKASTRGDGKIGEDITHNIKTIKTIPLSLIGANFPNTLEVRGEVFIEKDDFYQINQEAKEKEEKVFANPRNAAAGSLRQLDPSITSNRPLKVFVYGFGILEGKDLPNNQYDMLSLVSEWGFPVNSETKLCRSLKESIDYFEFISSKRDKLAYEIDGVVYKVNEFDLQKKLGQISRAPRWAIARKFPAEVGRTLLKKISFQVGRLGSITPVAELDPVIVGGVTISNASLHNFDEVERLDVREGDYVFVKRAGDVIPHNNRSRSIN

SEQ ID NO: 168211 - protein, 257 aa, Unknown
  Bacterial polypetide isolated from the Sargasso Sea
EDVTKNILNIKNIPKKLKGKFPSFIEIRGEVFLTKKDFENINSKLDIKNKFANPRNAAAGSLRQLDVNISKSRPLQFLAHGIGYSSYEFSYFDEYYENLENWGIKKNNINLKASNLNSILQFYNRINESRSNLDYDIDGLVIKLNNILNQKRLGNVGKNPRWAIALKFSAEKAKTIIEDIDFQVGRTGSITPVARLQSINLGGVIISNATLHNFDEIKKKNIQIGDKVEIQRAGDVIPQVIKVIKKANKVNKLIIPP

SEQ ID NO: 168212 - protein, 155 aa, Unknown
  Bacterial polypetide isolated from the Sargasso Sea
MAEQQQRAAELRSLLNRAAHAYYVLDVPVMEDTVYDRLYRELQQLEQADPSLLTADSPTQRVGGPPATGFHSVEHRIPLQSLDNAFDQGELKAWHQRLLKLLDRPDDSALPLVGELKIDGNALALSYRQGVLERAATRGDGSSGEEITAKCAHHQ

SEQ ID NO: 168213 - protein, 265 aa, Unknown
  Bacterial polypetide isolated from the Sargasso Sea
QNNNLNISYTAEPKIDGISASLTYRKGKLIRGLSRGDGKEGEDITSNLETIKDIPKIILSKDFPEEIDVRGEVFITNSDFNNLKAKFANPRNAASGSLRQKNPEDTKKIPLKFIAYTFGFEKGLKINNQFEYLKKLSEWGFKTNPLNRLISGVKNLVKNYNDVEKKRSNLDFDIDGIVYKINDFALQKRLGYVGNAPRWAIAHKFSSNKAISEILDIDIQIGRTGALTPVAKIKPINIGGVLVSNATLHNEDEINRKDIRIGDTV

SEQ ID NO: 168214 - protein, 243 aa, Unknown
  Bacterial polypetide isolated from the Sargasso Sea
FRELQELETNNPSLIDKNSPTQRVGAKPLKGFKTAAHRIPMLSLSNAMNEDELILFNERIKKLLETTHKIEYMAEPKLDGIGVELIYQDGILIKGLTRGDGFEGEDITQNVRTIKSLPLKLLGNRFPSLLEVRGEVFIKISDFDKLNENQLERGLQVFANPRNAAAGSLRQLDPRITSSRPLSINCYEPGVIEDKNFKTHQEFLFYIKNLGLPVNSMIKKVSGAKNVIKYHNTLELKRNELNY

SEQ ID NO: 168215 - protein, 259 aa, Unknown
  Bacterial polypetide isolated from the Sargasso Sea
SFQYICEPKIDGLSLNLVYKNGKLVSAGTRGDGFIGEDVTENILNIKNIPSKLKKNFPDFIEIRGEVFLTKSDFEKLNSKLEIKSKFANPRNAAAGSLRQLDTSISHSRPLKFIPHGIGKCSYKFDEIENYYDQLKDWNILPNKLSKKCYSVEEIIKFYNQINFKRSGIDYDIDGLVVKINSFKLQERLGYVGKNPRWAIAIKFSAEKANTIIQSVDYQVGRTGAITPVARLQPVNLGGVIISNASLHNFDEIKKKNIN

SEQ ID NO: 168216 - protein, 284 aa, Unknown
  Bacterial polypetide isolated from the Sargasso Sea
GKPSELFSKFNHPTRMLSLDNAMSEDDLVNFQKKISNFLNKKTIDFEFSTEPKIDGLSVNLIYKNGKLVIAATRGDGQTGENITNNVITIKDIPKLLKTKSPPTSIEIRGEIFITKEDFIKLNTENNFANPRNAAAGSLRQLDPKETAKRPLKFIAHGFGSFNGEKKNYYDQLIELKSWGIPISPFLKKVQNLNELMTIYGEINKKRAEIPYDIDGLVYKVNNLSFQNRLGIVGKSPRWAIAHKFASETAQTEIKKIDIQVGRTGSLTPVARLKPINIGGVLVS

SEQ ID NO: 168217 - protein, 312 aa, Unknown
  Bacterial polypetide isolated from the Sargasso Sea
NIKQDYQKKIDELKKHNKFYYENSSPEISDKEYDKLKRQILNLEKEHAYLKSNFSPSKIVGFKPSKNFAKYKHREKMLSLSNAFDEEDLINFEKKIFNFLNEKADLNYSVEPKIDGISASLTYKNGFLIYGVSRGDGTEGEIITENLKTIKDIPHKVTNINFPKDIEIRGEVYINKDDFQKIKASFANPRNAASGSLRQKDSKETSKIPLKFIAYTFGFMSENKFKNQSDFLKELKSWGFLTSEYNEVIKSINGLVNFHQQFEKKRFDLKYDIDGLVYKVNNIQLQRRLGFTSNAPRWAIAHKFSADHAYSE

SEQ ID NO: 168218 - protein, 261 aa, Unknown
  Bacterial polypetide isolated from the Sargasso Sea
HRVKMLSLSNAFDLNDLENFEKKIFNYLNNKVDIEYSVEPKIDGISASLTYKNGFLVMGTSRGDGSTGEVITENLKTINDIPHKIANKDFPKDIDIRGEVFIEKEDFNKLKNNFANPRNAASGSLRQKNPLETKKIPLKFIAYTFGYFKSDKIKKQSDFLSSLKKWGFKTNDHNKVLKTIKDLENFHKKFENDRYDLKYDVDGLVYKINSLDLQNRLGFTANSPRWAIAHKFSADSAFSIIKDINIQVGRTGALTPVARIK

SEQ ID NO: 168219 - protein, 306 aa, Unknown
  Bacterial polypetide isolated from the Sargasso Sea
FEYICELKYDGVAISLIYENGQLFKGVTRGDGVRGEVVTNNIRTIQAIPLKLVGDFPEKIEVRGEIIFPTPAFEELNNQRKLTGLPLFSNPRNTASGSLKLQDSAEVAKRNLDCFLYAVYMKDSIFNNASDQYNYLQQLGFKTPSVKDRYIQKASSIDNIMDFINYWDDKRNALPFEIDGIVIKVNQLDLQQEIGHTAKSPRWAIAYKYRAQQVSTILENIVYQVGRTGAITPVAHLSPVEISGTIVKRASVHNEDQIQKLDLRIGDTVFVEKGGEIIPKIVGVDKSKRSSISESFNFIENCPECK

SEQ ID NO: 168220 - protein, 279 aa, Unknown
  Bacterial polypetide isolated from the Sargasso Sea
EPKIDGISATLIYENGVLTKGLSRGDGIAGEDILNNLKTIKSIPKKITDNNVPSLIEIRCEIFIGKKDFNLIKGNFANPRNAAGGSLRQKNSKETAKIPLQYFAYGLGANESIELKTQSEFLNKIKKWGFKTNPLVKIVKNLNEIQSQYSLIDSKRASLDYDIDGLVLKVNDLKLQLRLGNTSNSPRWAIAYKFSSEKAFTKIKDIIIQVGRTGAITPVAKVEPVTVGGVVVSNATLHNEDEIKRKDIRVEDIVQIQRAGDVIPQSCYCRYSKRKKSSK

SEQ ID NO: 168221 - protein, 276 aa, Unknown
  Bacterial polypetide isolated from the Sargasso Sea
MNLEKARREAEKLRKIILQHNYQYYVMDDPEISDTEYDILFKKLIKIEQEYPKLRTPNSPTQRVGAEPLSEFDEVKHAIPMLSLANAFDEKEMTRFYERLMGELDIKDLVFTGEPKFDGLAVSIFYRNANLEISATRGDGYIGENITQNIRTISQVPLTLIGLNIPDKLEVRGEVFITNKDFSNLNIRQKRDNQKIFANPRNAAAGSLRQLDPKITAKRPLSFCAYGIGEYKGGVKLTDHAQVLNQLKHWGLPISSEFKVLKGLPMCLRYYKQIGR

SEQ ID NO: 168222 - protein, 425 aa, Unknown
  Bacterial polypetide isolated from the Sargasso Sea
FEKRLKDRLKDSSTLDFSCEPKLDGLAVSILYENGELVRAATRGDGQVGENITANVRTISNVPLTLRGEHYPERVEVRGEVFMPRDGFAKLNEHQKETGGKVFANPRNAAAGSLRQLDSKITAKRPLMFYAYSLGVVQPESFELPTTHSERLKQLGNWGLPLCPDIDTAEGGKGCLAYYNHILEKRDNLPYDIDGVVFKVNRIDLQNALGFVARAPRWAIAQKFPAQEEVTKLLDVEFQVGRTGAITPVARLEPVFVGGVTVSNATLHNQDEISRLGVKVGDTVVIRRAGDVIPQVVSVVEADRTGSETDITFPSQCPVCDSQIEKLEDEAVARCTGGLICAAQRKQALKHFASRKAFDIDGLGDKLVDQLVDADLVHSPADFFTLSLGDVVGLERMAEKSASKLLASLEASKQTTLCQVLYALG

SEQ ID NO: 168223 - protein, 386 aa, Unknown
  Bacterial polypetide isolated from the Sargasso Sea
MMQKNEIKKKYSNKIKELNKHNLLYYEKSKPIISDKDYDKLKKEIFELEKKYSFLISDISPSNTVGFKPSKNFVKAVHRERMLSLSNAFDKNDLENFEKRVFNYLNIKDKKILEYSVEPKIDGISASLTYKNNNLVLGLSRGDGTEGEVITENLKTIKDIPKFIEDIKFPKDIDIRGEVYIEKDDFENIKDRFANPRNAASGSLRQKNPSETKKIPLRFIAYSFGFNNKINFKKQSEFLQLLKNWGFKTNKFNKVVSGVDNLVQVHKELEKNRYDLDFDVDGLVYKINNLELQNRLGFVANAPRWAIAHKFSADSSFSKILNIEIQIGRTGALTPVAKVKPVNIGGVLVSNATLHNEERITRKDIRVGDTVKIERAGDVIPHVLLV

SEQ ID NO: 168224 - protein, 327 aa, Unknown
  Bacterial polypetide isolated from the Sargasso Sea
MKEAEIKKYYKKKINELKNHNKLYFEKSSPKISDKEYDEIKKEILDLENKFSFLKSSSSPSNSLGFAPSKNFIKSTHRVKMLSLSNAFGIKDLENFEKKIFNYLNKRIDIEYSVEPKIDGISASLTYKNGLLVMGTSRGDGTTGEVITENLKTINDIPHKITNKDFPKDIDIRGEVFIEKDDFKKLKNDFANPRNAASGSLRQKNPLETKKIPLNFVAYTYGYFENNKIKKQSDFLISLKKWGFKINEHNKVFKTIKDLEIFHKQFENDRFNLKYDVDGLVYKINNLDLQNRLGFTANSPRWAIAHKFSADSAYSLIKDINIQVGRT

SEQ ID NO: 168225 - protein, 268 aa, Unknown
  Bacterial polypetide isolated from the Sargasso Sea
MKDLLKKYEQLKEEIQLHNYNYHALDDPKISDSEYDNLFRSLLDLEEENPHLVTSDSPTQRVGFSPIDEFETFEHSVPMLSLANVFSEKEFLDFHDRILKRLVNIDDFEYFCEPKMDGAAVSLIYKDGILQRAVTRGDGRVGEDISQNVKTIRSIPQKLSSSKANVPSLLVIRGEIFISKDAFEKMNAKAMQNNEKVFANPRNAASGSLRQLDPKITSSRPLSFIAHGLGECEGIQFSSISEFYDHLKAWKIPTSDLSKKVKTKDDCL

SEQ ID NO: 168226 - protein, 304 aa, Unknown
  Bacterial polypetide isolated from the Sargasso Sea
MNKKEDLKKIKKRLKELAKLIKLHNVHYHQNDKPIISDGEFDKLVNENFDLEKKYPNLILKNSPNENIGSKLKHKFKKIEHKSPMLSLGNAFNLKDVEEFDERIKKYLNIKNEVKLEYICEAKIDGLSLNLIYKNGDLISAATRGDGVNGEDVKENISNIKNIPKRLSGQFPNFIEIRGEVFLLRNDFEKINSKLDDKDKFANPRNAAAGSLRQLDFNVSRSRPLQFLAHGMGYSSIQFDYFDEFYLNLKKWGIKKNNIYLKSSNINSIFDFYSEINDTRNSLEYDIDGLVIKLDNILHQKRLG

SEQ ID NO: 168227 - protein, 428 aa, Unknown
  Bacterial polypetide isolated from the Sargasso Sea
MTEKNKILKLYQEKVKKFNKFNKAYFEKDNPIVSDRVFDELKKELINLEKQYSFLKSPKGITNTVGFNPSGKFEKIKHSKQMLSLSNAFDKNDMLDFEKKIKNFLNLNKEIELSSEPKIDGISASIRYEEGKLVYGLSRGDGVFGENITENLITINEIPKKISNAPKLIEVRGEVYIGKKDFEILKDKFANPRNAAGGSLRQKDSKETKKIPLKFFAYGIGEIKPPIFEKQTDLLEKLKKWGFKVNSYCKKIANIEEIEKNHSQIESLRSSLDYDVDGIVYKVNNLDFQNRLGSTSNSPRWAIAYKFSSVKASSKIRSIAIQVGRTGAITPVAKIDPVTVGGVVVSNATLHNEDEIMRKDIRPGDFVTIQRAGDVIPQVLEVDKSKRDKNSKKFIFPDKCLCGFPTKKDMNLSTKKTDAVRRCSRGYE

SEQ ID NO: 168228 - protein, 256 aa, Unknown
  Bacterial polypetide isolated from the Sargasso Sea
MNQIIDKIKSIRDQLNNHNYQYYILDAPIISDSEYDILYRELQKLETLHPELISNDSPTQRVGAKPLESFGSIDHSVPMLSLDNAMNKDETSAFYERLQKGLKTDQTIEIIAEPKLDGLGVELVYKNGMLSHGSTRGDGFTGEDITLNLRTIPSIPLSLRTKNRDIIELLEVRGEVFITKAGFNELNNDRLDNDLPTFANPRNAAAGSLRQLDPKVTAERHLSIFCYEAGQLKGASFNTHKEFLSALKDWGFPSKS

SEQ ID NO: 168229 - protein, 369 aa, Unknown
  Bacterial polypetide isolated from the Sargasso Sea
MKKKEIEKKYKSYIESFKKYNLYYFSKSKPLVSDGDYDKLKRDILDLEKQYKYLKSNDSPSILIGHRPSKNFKKFPHRVPMLSLGNAFSEEDLINFEKKITNFLSSKEDFEISYCAEPKIDGISASLTYINGIFEKGLSRGDGKEGEDITRNLKTIQDIPKKILSESFPKEIDIRGEVFIQNSDFENLKEKFANPRNAASGSLRQKNPEDTKKIPLKFIAYTFGFEKGLKAKNQFDYLQKLSTWGFKTNRLNKLISGVKNLIQNYNEIEKKRANLDFDIDGIVYKVNDFNLQKRLGNVANAPRWAIAHKFSSNKATSEINDIEIQVGRTGALTPVAKIKPINIGGVLVSNATIHNEDEIIRKDIRIDDT

SEQ ID NO: 168230 - protein, 676 aa, Unknown
  Bacterial polypetide isolated from the Sargasso Sea
MKADSEAKSRVLELHKIINEHSYNYHTEDNPIISDSEYDDLFKELIELEANYPDLSFSHSPTQRVGSKPLDGFTKVDHLTAMLSLENAFNNKDLQDFDNRIKERLISEENISFSCEPKLDGIAVNLIYKEGYLHQATTRGDGKTGEDITHNIRTIPSIPLSLRVTEIEPPKLIEIRGEVFIDIEDFKKINRNAKSSSEKVFANPRNAAAGSLRQLDSKITASRPLKFFAHGLGALDYGKNHSIQTQMEVFDFYRSWGLPINPLTELSHHINECISYFTRIEGLRTQLPYEIDGVVFKVNSFKTQESLGQVSRAPRWAIARKFPAEVGSTKVKSITFQVGRVGSITPVAEFEPLNLGGVVVSHASIHNFDEIERLDVREGDSVQIKRAGDVIPQIIKVDLSKRHKSSKKIKPPSQCPSCDNKLIKLEDEAILRCNAGKNCPAQKTESIRHYVSRNALNIDGLGEKIIELLVQKSLISDFSDLYNLNKEALVELEGFAEKSATNLLESIEKSKETTLARFIYALGIREVGEATALNLSINFQDIDKLLMASKEELIEINDIGPIVADHIFEFFSNGDNKELIDKLLKSGVIFQEVQAQSDNLFSSKVIVITGSFKGIARSQLKEELIRSGARVSGSVSSRTDYLIAGEKPGSKLKKAIDLGIEVLEEDKVLEILANQR

SEQ ID NO: 168231 - protein, 419 aa, Unknown
  Bacterial polypetide isolated from the Sargasso Sea
KKIDKFKDYNKAYYDDSNPKVSDEEYDGLKKKILKLENEYNFLKSKFSPSNIVGFKPSKNFKKSLHKVPMLSLGNAFSEEDLVNFEKKLINFLSLKKNYEIYYSAEPKIDGISASLTYKKGKFYKGLSRGDGKEGEDITENLSTIRDIPKTIFSKDFPEEIDIRGEVYIQNSDFKNLNEKFANPRNAASGSLRQKNPEDTKKIPLKFIAYTYGYQKGLLVNNQSDFLKKLNEWGFKTNPLNKVISGIKNLLKNYNEVEKKRANLDFDIDGIVYKVNDFMLQKRLGNVANAPRWAIAHKFSSNKAISEILDIEIQIGRTGALTPVAKIKSINIGGVIVSNATLHNEDEINRKDLRVGDTVVVERAGDVIPHIISVDLQKRPKNTFKFEFPKTCPSCGSKTIKEFNTITKKIDAVRRCSSE

SEQ ID NO: 168232 - protein, 454 aa, Unknown
  Bacterial polypetide isolated from the Sargasso Sea
MNSKLKIIEIYKKKIDLLKKHNRLYFNSDDPIISDSEYDSLKKEIINLEKKNIFLKKLNLNKKIVGSPPSNKFNKIKHLKPMLSLSNAFDKNDMKDFLSKINNFLSIKEKSIEFSSEPKIDGISATFIYEKGVLTKGLSRGDGVTGEDILENLKTIKEIPRKIKDNNVPSLLEIRGEIYIGKKDFNNIKGNFANPRNAAGGSLRQKNPQETSKIPLKYFAYGFGAIEPMKFKTQSEFLEKIKSWGFSINPIVKTVKSLEDIESQHSYIDSIRSSLDYDIDGLVYKVNDLKLQSRLGNTSNSPRWAIAYKFSAEKAVTRIKDIIIQVGRTGAITPVAKVEPVTVGGVVVSNATLHNEDEIIRKDIRIGDTVQIQRAGDVIPQVISVDLLKRNHNSKKYIFPEKCLCGAITHKEVNKSTKKEDAVRRCSKGYECDFTAREKLKHVVSKDAFNIDGL

SEQ ID NO: 168233 - protein, 674 aa, Unknown
  Bacterial polypetide isolated from the Sargasso Sea
MKDSLKIKERVLELHKLINLHSHNYHSLDEPSIEDHQYDALFNELLDLEAKFPKYQFSYSPSQRVGGKPLEGFKKIEHLTPMLSLDNAFNDEDMEDFNKRILERLLIQGNISFSCEPKLDGIAVNLLYKSGHLDVASTRGDGKIGEDITHNIRTINSIPLSLIDNDSELPSLIEIRGEVFIEKKDFDLANKKAIKEGEKTFANPRNAAAGSLRQLDPSIAASRPLKFYAHGIGCIEEGKFKLPDSQSEMLKQYQSWGLPINPFSDVADDLKACEEYFHKISNARENLPYEIDGIVFKVNDLDKQISLGEVSRAPRWAIARKFPAEVGTTVVKKISYQIGRVGSITPVAEFTPVNIGGVTVSHASIHNFDEIDRLDVREGDTVDIKRAGDVIPQIISVDLDKRKKGSQKISLPKRLPCCKKDLVKIEGEAILRCTMGLDCPAQRIGSLIHFVSRNALNIDGLGERIIELLVDKNLVSNFADLFRLEIKDIIDLEGFGEKSATNLIRSIQESRETTLPRFIYSLGIREVGEATAMNLALNFNNITNFLSANEEDLLEINDIGPVASNFIKEFLAIEENISLVEDLITLGVNPKPVEIKEDNPFSSKSIVITGSFNGIARSQLKEELIRVGAKVSSSVSSKTEFLIAGEKPGSKLKKASDLQIPILDEEEALKILDS

SEQ ID NO: 168234 - protein, 672 aa, Unknown
  Bacterial polypetide isolated from the Sargasso Sea
MSSSNIKKKYSLKISEIKKHNQFYFEKNTPKISDKEYDDLKKEILDLEKEYPFLISKDSPSNSVGFRPSKNFLKSRHRVPMLSLANAFDKEGLVNFEKKIFNFLNLDKNINLEYSVEPKIDGISASLTYKNGKLVKGLSRGNGFEGELITENLKTISDIPKILRSKSCPDDIDIRGEVFIENKDFKIIKEKFANPRNAASGSLRQKDPQQTKKIPLKFIAYTFGFIKNFKLNKQSDFLEFLKQWGFKTSQFNKVISGIDNLQKNHSEFEEKRHDLDYDVDGLVYKINNFKLQERLGFVANAPRWAIAHKFSSDSSFSEIMDIDVQVGRTGALTPVAKIKPVNIGGVVVSNATLHNEDEIIRKDIRIGDTVKVERAGDVIPHVLSVDLTKRSDNSKKYSFPEKCPSCGSKVVKEFNLTTKKYDAVKRCPSEGFKCEKIAIEKIKHFVSKEALNIEGLGKKVVENFWEIKLIKLPQDIFNLDYKKIESLDGWGKLSVSNLKYAIEESKKITLEKFIFSLGIRHIGQENAKLLSKHFKTVKKFIDIDTKFNFNTLLNIDGMGETQVNSLKRFFSDKKNILVVNKLYQNLNVSNQEILQTGKFQNKTFMITGKLDGISRAEAKSLIEKNAGRFVSNVSKKLNYLIIGENPTSKKVNRAKELNIKIIDQKKWQELLN

SEQ ID NO: 168235 - protein, 471 aa, Unknown
  Bacterial polypetide isolated from the Sargasso Sea
MNPRNTASGSIKLLDSKEVARRPLECFLYSIVSDNLNTNKHSELLTLGRELGFNIPKHDRVYNTIDGVKDYIEYWDKERENLPFEIDGIVIKVNNISYQKKLGFTSKFPRWAIAYKFKAENLQTRLNSISFNVGRTGAITPVANLEPVLISGSIVKRASLHSYDQFIKYKLRVNDSIFVEKGGEIIPKITGIDDKNRGLEEDEIAFPHICPECNTTLEKHKSEANYFCPNSLNCRPQAIGRIQHFVSRKAMDIDGLGDETIRLLYDKGLLNDVSDIYNLDYDKISEFDGFAKKSVENLSMGIENSKTKSFQKVLYGIGIRYVGESASKKITKHIDSIYDLIRMDYETLSSIDEIGDKTAYSIVSYFNNDANNKMLERLENAGLIFSKDEESKNISNKLKGKKIVISGVFRNYSRGELINIVEINGGEIKSSVSSAISFIIGGDKIGVSKKEKAEKLNIQIITEEDFTNLIS

SEQ ID NO: 168236 - protein, 455 aa, Unknown
  Bacterial polypetide isolated from the Sargasso Sea
MSKPSKKYISIQKTIRSYDYEYYILDDPSISDHEYDELFRELKQIESEHPDWITPESPSQRVGIKPENDFDTFKHFQPMLSLANAFNEDDLNNFHDRILKNLGTDKQIDYFCEPKMDGAAVSLIYEEGILVRGVTRGDGNLGEDITSNIRTIRSIPLILKESKSPFPTMIEVRGEVFISKPDFETLNVSAEKNGEKIFANPRNAAAGSLRQLDPAITSSRPLAFFAHGIGLCQGKKFIDLQEIFSVFASWGLPVNNLNKLSSSIDECLNYFKDVESSRDSIPFEIDGVVFKVNEISLQKQLGEIARSPRWAIAHKFPAEEVHTEIEKIEFQVGRTGILTPVAKLKTVNVGGVNVSNCTLHNLDELRRLDPRVGDGAIIKRAGDVIPKMVMVIPKKNNRADAVETPKKCPSCQSAIAHNYQSEWTIFDKSKSMPIKKFSSSYEAQKFVESNHSKKF

SEQ ID NO: 168237 - protein, 665 aa, Unknown
  Bacterial polypetide isolated from the Sargasso Sea
MDIETKIQDLRKKLNDHNYHYYVLNDPIISDSEYDELLRLLQDIEQKNPNLVTDDSPTQRVGAPPLDSFESVEHRVPMLSLENAMDSDELISYYNRTKKGLDIDADIDFIAEPKLDGIGVELIYEEGHLKYGLTRGDGLKGENITQNLKTINAIPLSLRTNLRPAPYLLEVRGEVFMDKDRFRELNNYRSKNDLSIFANPRNAAAGSLRQLDSSITASRPLSIYCYEPGEIIGESFQTHKSFLDALTEWGFPVNNEISVTNSIDEIVNYHQTLEAKRNNLPYEIDGTVFKVNKIEYRNSLGLRSRSPRWAIAGKFKAEQVTSVVLDIIASIGRTGAVTPVARLDPVNVGGVIVTNATLHNQDEIDKKDVRIGDTVLVQRAGDVIPEVVKIIETKRPEKTEKYKLPRSCPECDKEIVRPKGESVARCHNLSCPAQIKGRIQHFISKGGLDIDGFGEKLVNQLVDKNLVRTFDDIYKLNFDDLVDLDRMAEKSAENIIASIEHSKKTTFSRFVYALGIRNVGAHLSKVLESKFSSDLSKFKQATIEDLEQINEVGPIVAEAIVQFWSDESNIKIVEKCLSHGIEFSQRSKQISQKFEGLSFVFTGTLKTLTRGNAKKIVESNGGRVNSSVSKNTDYVVAGESAGSKLEKAKSVGVKIISENEFLKIA

SEQ ID NO: 168238 - protein, 488 aa, Unknown
  Bacterial polypetide isolated from the Sargasso Sea
LIASLIEIRGEVFIEKKDFDLANKKAIKEGEKTFANPRNAAAGSLRQLDPSIAASRPLKFYAHGIGYIEEGNFKLPDSQSEMLKQYQSWGLPINPFSHVASDLKACEEYFLKISNARDNLPYEIDGIVFKVNDLDKQISLGQVSRAPRWAIARKFPAEVGTTVVKKISYQVGRVGSITPVAEFTPVNIGGVTVSHASIHNFDEIDRLDVREGDTVDIKRAGDVIPQIISVDLAKRKKGSLKISLPKRLPCCKKDLVKIEGEAILRCTMGLDCPAQRIGSLIHFVSRNALNIDGLGERIIELLVDKNLVSNFADLFRLEIKDIIDLEGFGEKSATNLIHSIQESRETTLPRFIYSLGIREVGEATAMNLALNFNNITNFLSANEEDLLEINDIGPVASNFIKEFLAIEENISLVKDLITLGVNPKAVEIKGGNPFSSKSIVITGSFNSIARSQLKEELIRVGAKVSSSVSSKTEFLIAGEKPGSKLKKA

SEQ ID NO: 168239 - protein, 668 aa, Unknown
  Bacterial polypetide isolated from the Sargasso Sea
MKDIESKMKRLIDEINFHNYQYHGMDDPKISDYQFDKLVIELLDLEKENPQLIQVDSPTQRVGSRPIDGFTQIDHLTPMLSLDNVFTMEELMSFEKRIKDKLSLEDKIEFIAEPKLDGVAVNLVYESGILSYATTRGDGTTGEDVTHNVLTIKSIPMKLKSSTPPKTIEIRGEIIISKNDFETMNRENADKELKVFANPRNAAAGSIRQLDPNISKDRPLRFYAHGYGLLSNEDKFSSHYEVMNYLNDSGIIISPYSEIVTGAEECGRYYEKIDSLRESLDFEIDGVVYKVNNISQQKELGFVSKAPRWAIAHKFSSIEVESKIIDVDFQVGRTGTITPVAKLKPINVGGVVVSNATLHNMDEINRKDVRKGDYVFVRRAGDVIPEIVSVNKKKRSNITKRIIFPDQCPSCGSEIVRKQGESAAKCTGGSICPDQTKELLKHFVSRKAFDIEGLGEKILDQLLESNMISNTSDLFSLKIDDLISLDRMGKKSSQNLISSIEASKNISFDRFIYAQGIHDVGLATSKSLSECFSSLEKLINAEMDDLLIIRDIGPVAANNIISFFNDRKKIKNIDRLIHLGVVIVYESEMDSHILNDKTFVITGTIQNMTRTDVQDLIEKNGGRVTSSISKKTSYLVAGDNPGSKIKKAADIGVTIINEEQLSELIKNG

SEQ ID NO: 168240 - protein, 460 aa, Unknown
  Bacterial polypetide isolated from the Sargasso Sea
MKNRNLIKKDYLNRIKELNEHNQHYYEKSSPKISDAEYDKLKLKITELEKKYSFLKNKNSPTLLVGAKPSKNFLKSKHRVRMLSLANAFGYEDLKNFEKKISNFLNLKKDTNIEYSVEPKIDGISASLTYKNNNLVLGLSRGDGAEGEIITDNLKTIRGIPKSIKDKKFPKDIDIRGEVYIGKSDFEKIKDRFANPRNAASGSLRQKDPSETKKIPLRFIAYTYGFNSEMNFKKQSEFLNLLKNWGFNTNIHNKIISGVNNLVQNHREFEKKRYDLDFDVDGMVYKINDLDLQKRLGFVANAPRWAIAHKFSADNSFSKILNIEIQIGRTGALTPVAKIKPVNIGGVVVSNATLHNEEEIIRKDIRIGDTVKVERAGDVIPHVLSVDLKKRPKESKKFLFPKNCPACGSKVIKDFNKISKKYDAVQRCSSEGYKCEKIAIEKIKHFVSKEAFNIEGLGKK

SEQ ID NO: 168241 - protein, 511 aa, Unknown
  Bacterial polypetide isolated from the Sargasso Sea
MNKKEILFNYKKKIDKFKEYNKAYYESSDPKVSDEEYDYLKNNILKLENEYNFLKSKFSPSNIVGFKPSKNFKKSLHKVPMLSLGNAFSEEDLVNFEKKLINFLSLKKNYEIFYSAEPKIDGISASLTFKKGKFYKGLSRGDGKEGEDITENLSTIKDIPKTILSKDFPEEIDIRGEVYIQNSDFKILNDKFANPRNAASGSLRQKNPEDTKKIPLKFIAYTFGYEKGLLVNNQFNYLEKLNEWGFKTNPLNKLISGVKNLIKNYIEVEKKRTNLDFDIDGIVYKVNEFALQKRLGNVANAPRWAIAHKFSSNKAISEILDIEIQIGRTGALTPVAKIKPINIGGVVVSNATLHNEDEINRKDIRVGDTVVVERAGDVIPHIISVDLKKRSKNSLKFKFPTKCPSCGSKTIKEFNTITKKIDAVRRCSSEGYDCGKISVEKLKHFVSKDAFNIDGFGKKIVEGFWKIKLIKYPQDIFKLDYNKIENLDGWGKLSVKNLKYSINEKKNISWK

SEQ ID NO: 168242 - protein, 388 aa, Unknown
  Bacterial polypetide isolated from the Sargasso Sea
MKKEIQKHIHELRDEIHHHNFLYYTKDKPIISDYEFDQKLNKLISLEESYPEYDDINSPTKRIGGGLLNNFETKKHNYPMYSLDNTYTKDEVNDWVKKIKKIIGDDDELSFTCELKYDGVSVSLLYEEGLLIQALTRGDGVSGDDITENVRTIPTVPLVLNKFSPKNIEIRGEILMTKKSFEELNLKRVKDGLPKYMNPRNTASGTLKLKDSKLVAKRKLVCYLFSVINKNENHLTQFDSLSNSRSYGFKVPNELILAKDINSVFSFIDKWNYDRKKLDYEIDGIVIKVNNFQLQKKLGFTSKYPRWAIAYKFKPENIYTRLNSVTYQVGRTGAITPVAELSPVLISGTTIKRASLHNSDQIDKLELRIGDYVKVEKGGEIIPKIIGG

SEQ ID NO: 168243 - protein, 666 aa, Unknown
  Bacterial polypetide isolated from the Sargasso Sea
MNISEKIKSIREKINEHNYQYYVLDNPIISDGEYDKLFLELESLEKQNPEFVIPESPTQRIGAKPIESFGTVTHRITMMSLANAMDTNELKAFDKRLKKRLKTDDELEYVIEPKLDGLAVELIYENGIFVNGSTRGDGNTGEDITSNLKTIKAIPLKLRDDSTSSPRLLEVRGEVFIRKNDFQDLNTKRLQSNEQPFANPRNAAAGSLRQLDPKVTANRALSIYCYQSGLVDGIDFKTHLEFLEFLKSCGIPVNPEVKIVKGIDKAIDFHKKLEIKRNQFPYEIDGSVIKVNSLSIRNELGVRSRSPRWAIAGKFKAQQVTTIINDIFASVGRTGAVTPVARLEPVEVGGVTVTNATLHNQDEINRKDIRIGDTVIIERSGDVIPKVVKVIQEKRTDNTKAYYLPAYCPECDSELNRPENEVVYRCLNYSCPAKIKGNIKHFVSKNALDIDGLGEKLIDQLVNEQIIKTVDDLFRINKDQLANLERMGNKSADNIIESISKCKQTTFSRFIYGLGIRHVGEHTSKLLEKAFNSDLEVFIKCSFEDLESIEEVGPIVADSIIGFWNDESNKKIANECFSLGVKFKKNYETAIQTLLGKTFVFTGSLKIFTRAEAKQIVEKLGARASNSISKNTDYLVAGPGSGSKLGKAKQLGIKIINEGEFEKLIA

SEQ ID NO: 168244 - protein, 496 aa, Unknown
  Bacterial polypetide isolated from the Sargasso Sea
MKESLKIKERVIELHKLINFHSYNYHSLDSPSIEDHEYDALFNELLNLEAEYPSYKFSYSPSQRVGSEPLEGFVKVEHLAPMLSLDNAFNSDDMHDFNKRILDRLTGKEAISYSCEPKLDGIAVNLLYKNGCIEKATTRGDGKVGEDITHNVKTINSIPLSLMNDESELPNLIEIRGEVFIEKDDFDSNNKKAAKLGQKTFANPRNAAAGSLRQLDPTVAASRPLKFFAHGIGFIDKGNFELPESQSDTLKLYKAWGLPTNPLSDVVSNIEECEAYFEKVSNQRQKLPYEIDGVVFKVNDLKDQITLGQVSRAPRWAIARKFPAEVGTTFVKKISFQVGRVGSITPVAEFEPVNIGGVIVSHASIHNFDEIERLDVREGDTVRVKRAGDVIPQIISVDIGKRKKTSTEVQPPDSCPSCDGKLIKPDGEAILRCTAGLICPAQKCESLIHFVSRNALNIDGLGERIIDLLVERGLVSNFADLFKLEKDDILKLDGFR

SEQ ID NO: 168245 - protein, 322 aa, Unknown
  Bacterial polypetide isolated from the Sargasso Sea
MLKSSAKKEYEKKIKQYKKYSKKYYEDSAPIISDRDFDLLKKEILDLEKKFDFNDKESPSKTLGFTPSKNFEKFPHRVRMLSLANAFDEEDLINFEKKIVNFLNLKKNFEFEYSAEPKIDGISASLTYKSGKLIRGLSRGNGEEGEDITLNLKTISDIPHFIDQKDFPNDIDIRGEVFIQNNDFEKMKDNFANPRNAASGSLRQKDPTKTSKIPLKFVAYTFGFSSDQIIDTQTNFLSKLKKWGFKTSELNKKITGIKNLLSNHQNIEKKRFELNYDIDGIVYKINDFKLQKRLGFVTNAPRWAIAHKFSASNSVTEILNID

SEQ ID NO: 168246 - protein, 342 aa, Unknown
  Bacterial polypetide isolated from the Sargasso Sea
MNKKEDIKQIKNRIKLLAKLINEHNVHYHQNDKPIISDGEFDKLGIENSLLEKKYPNLKLKSGPNENVGGKLKNKFKKITHKSPMLSLANAFNEEDIEEFDERVKKYLNIDIEKKLDYICEAKIDGLSLNLTYKDGILISAATRGDGLIGEDVTKNIINIKNIPKKLKGSFPNFIEVRGEVFLTKKDFENINSKLDNKNKFANPRNAAAGSLRQLDVNISKSRPLQFLAHGIGHSSYEFSYFDEYYENLEKWGIKKNQINLKISNKKSIFDFYNSINEKRSNLDYDIDGLVIKLNNISNQKRLGNVGKNPRWAIALKFSAEKAKTIIKDVDFPVGRTGSITP

SEQ ID NO: 168247 - protein, 638 aa, Unknown
  Bacterial polypetide isolated from the Sargasso Sea
LRNILNNHNHLYYVMDSPEISDHEYDQLFKELSSLEDKFPEMKDTSSPTQNVGSIAGSAFNTVTHEVPMLSLENAFDKEELERFDKRIHEKLKLPMNEPVTYSCELKFDGAAVSVIYKNGNLMRAATRGDGKKGEDITHNIRTIESLPMTLTGDDFPEYLEIRGEVFMTISGFSEHNKIAKKNNEKVFINPRNAASGSLRQLDPNITKKRPLDIYFFGIGQISKDFIPKNHHEAIDNLKKWGINICPHRHLAVGIEECLTFYEEIYKKRGSLDYDIDGLVYKVDSIDLQKHLGFVSRAPRWAIAHKFPAQEKYSIVEDVHFQVGRTGAVTPVAKIKPVFIGGATIQNVTLHNMDELKRKDIRIGDTVSVRRAGDVIPEIVSVITSKRKNSEMIRMPHRCPICGSIIQKVESEAIYRCTGGYSCRSQKIEYLKHFVSRQAMDIDGMGSKLIEQLVDKNLISTPDQIFKLSHSQLCELDRMASKSAKNIITSISISKKTTLSKFLYSMGIREVGLTMADTLEQHFKSLEGIKNASIDELLEAPEIGPIVANNIKNFFANDSNQEIINNLINSGVTWHIESLNKNDEKLLLKGKVIVLTGTLEKMSRLEAMDFIKYRGGKVSSSISKKTDFLVIGNNPGFK

SEQ ID NO: 168248 - protein, 694 aa, Unknown
  Bacterial polypetide isolated from the Sargasso Sea
MAKDELTRLADLLNRANNAYHRDDSPIMTDAEFDFLKKRNLEIELKFPQYKKSDSPTEKIGSLPSEKFSKIKHAKKMFSLANAFENSDLYDFDEQVRRFLNFKHSDLLEYTVEPKIDGLSLSLRYENGELAFAVTRGDGTTGENVTANALKIEDIPTNLPTKTEILEVRGEVYMEHKDFEILNSNQASLGKKVFANPRNAAAGSLRQLDPAVTAERPLKFLAYAWGELSQPLDTNQFGAIEKLKNLGFKTNSHTKLCKNIDEALTHYEELSKIRSELGYDIDGIVYKVDSLDLQSRLGYRSTTPRWAIAHKFPAEYSWTKLIAIDLQVGRTGALSPVARLNPVTVGGVVVSNATLHNQDYIAGRDNYGKEIRSGKDIRVNDWVEVYRAGDVIPKISDVDITRRPKDSMAYRFPSSCPECNSAVVRDEGDAVIRCNAGINCPAQAIEKMKHFVSRKAFDIEGLGAKQIEMFFADEALPIKEPVDIFTLEFRDQNNFTKLKDRHGFGKKSAENLFDAIKEKKTIEFSRFLFSLGIRHVGENVSKLLARHFLKWSKFISFISLAQNRESQEYFDLVSIDGIGTTVVNSLLSTFEIGKERDSIEKLVEHLDISDENLPDLDNNVLSGKTLVFTGTLEQMSRSEAKSLAENFGAKVSGSVSAKTDLVIAGPGAGSKIRKAEELGVKTLDEIEWLSLIGK

SEQ ID NO: 168249 - protein, 411 aa, Unknown
  Bacterial polypetide isolated from the Sargasso Sea
FDKLVKTLLVLEKENPQLIQVDSPTQRVGSKPIDGFTQIEHLTPMLSLDNVFSIDELISFEKRVKDRISLKENIEFIAEPKLDGVAVNLVYESGKLSYATTRGDGTTGEDVTHNILTIKSIPIKLKSSSPPKRIEIRGEVIISKDDFKKMNKDNADKDMKVFANPRNAAAGSIRQLDPNISQERPLRFYAHGYGLFSDEGNFASHSDVMSYLSDAGVVVSPYSEVVTGSSECSRYYEKIDTIRHSLDFEIDGVVYKVNNISYQKELGFVSKAPRWAIAHKFSSIEVESKILDIDFQVGRTGTITPVAKLKPINVGGVIVSNATLHNMDEINRKDVRKGDYVFVRRAGDVIPEIVSVNTRKRSKKTEEIIFPKQCPSCGSEITRKDGESAVKCIGGNICPDQRKRGPQTLCF

SEQ ID NO: 168250 - protein, 382 aa, Unknown
  Bacterial polypetide isolated from the Sargasso Sea
THNIRTIPSIPLSLLEFKIKAPSLIEIRGEVFIDIKDFKEINEKAKVDSEKIFANPRNAAAGSLRQLDPRVAASRPLKFFAHGIGSLDFGKGTEPRTQMEVFDCYVTWGLPINPLAEQASDINECISYFKKIESLRGQLPYEIDGVVFKVNSFDMQESLGQVSRAPRWAIARKFPAEVGSTKVKSITFQVGRVGSITPVAEFEPLNLGGVVVSHASIHNFDEIERLDVREGDTVQIKRAGDVIPQIIKVDLSKRKKALQKVKPPTTCPSCDTKLIKLENEAILRCNAGTNCPAQKTESIRHYVSRNALNIDGLGERIIELLVQNNLVSDLPDLYLLKKKDLLELEGFAEKSASKLLNSIENSKETTLSRFIYALGIREVGEA

SEQ ID NO: 168251 - protein, 486 aa, Unknown
  Bacterial polypetide isolated from the Sargasso Sea
MKDIEKKIRTLIDEINFHNYQYHGMDDPKISDHDFDQMVRALHDLEKNYPQLIQADSPTQRVGSKPIDRFIQIDHLTPMLSLDNVFTKDELISFEKRIKDKLSLKENIEFIAEPKFDGVAVNLVYESGILSYATTRGDGKTGEDVTHNILTIKSIPITLNTSSPPEKIEIRGEIIISKNDFEKMNRENEAKNLKVFANPRNAAAGSIRQLDPNIAKSRPLRFYAHGYGFLSNENDFNNHSDVIKYLNDSGIVISPLSQIVTGAEECDKYYQKIDSTRDSLDFEIDGVVYKVNKISYQKELGFVSKAPRWAIAHKFSSVEVESKILDVDFQIGRTGTITPVAKLDPINVGGVIVSNATLHNMDEISRKDIRNGDHVFVRRAGDVIPEIVSVNKKKRSQQTKKIVFPKQCPSCGSEILRKDGESAAKCTGGSVCPDQIKQGLKHFVSRNAFDIEGLGEKIIDQLLDSNLIRTTSDLFSLNSDELISLR

SEQ ID NO: 168252 - protein, 595 aa, Unknown
  Bacterial polypetide isolated from the Sargasso Sea
FIKSKHRVKMLSLSNAFDAEDLENFEKKIFNYLNKKIVLEYSVEPKIDGISASLTYKNGLLIMGTSRGDGTTGEVITENLKTIKDIPQKITSKDFPKDIDIRGEVFIKRSEFDKLKNDFANPRNAASGSLRQKNPNETKKIPLNFVAYTYGYFKSGEIRKQSDFLNSLQRWGFKTNEHNKILNSIDDLINFHKKFEKERFDLEYDVDGLVYKINSLELQKRLGFTANSPRWAIAHKFSADSAFSQIIDINIQVGRTGALTPVARIKPVNIGGVVVSNATLHNEDEIIRKDIRLHDTVKIERAGDVIPHVISVDLKKRKKSSKKFVFPKKCPCGFDTTKEFNKVTNKFDAVRRCPDRGFECEKMAVEKIKHFISKEALNIDGLGKKVVEKFWDLKLIRFPQDIFNLDYTQISKLEGWGDLSVSNLKFSINQSKKVSLDKFLYSIGIRHIGIENAKLLAEYTISISNFLNFIKNKKINEFLNIDGIGDTQINSLKKFFENKSNYKIIEKLSSILNISDLKLNKNGKLLNNSFMFTGKLSNMSRAEAKSLIEENSGSVVSSINKKLKYLIIGEKPTNRKVEQAKELGIKILSEKEWLN

SEQ ID NO: 168253 - protein, 472 aa, Unknown
  Bacterial polypetide isolated from the Sargasso Sea
FANPRNAAAGSLRQLDPAITAERPLSVYFYESGLVEGLIFETHLSFLESIKLLGFPVNPLIKPVVDDQGMINYHEQIEQKRNKLPYEIDGTVFKINEYSLRNKLGARSRSPRWAIAGKFKGQQATTTIKDIETQVGRTGALTPVAKLEPVFVAGVTVSNATLHNQDEIDRKDIRIGDTVLIERAGDVIPKVIKVIKDKRPNASLPFHIPTICPVCDQKAYRSEDEAVWRCSNIACSRQIKARIQHFASKSAMDIDGLGEKVVDQLVEKGMINSISDLYLIAKNKLSKIERFGEKSSENLILAIEKSKETTFSRFVYGLGIRNVGEHISRLLESNFNGDLTQFSESNIDELESIEGIGPIVAKEIVNFWSNKTNMTIVNECLERGVTLKWESGSQGNFLEGAIFVFTGSLEKLNRKEAQEKVYSLGGKTSSSVSKKTKYVVAGAGSGSKLIKAEDLSIKIISEDEFLNMIDGK

SEQ ID NO: 168254 - protein, 567 aa, Unknown
  Bacterial polypetide isolated from the Sargasso Sea
GGRAQIDGNALALSYRHGVLERAATRGDGSSGEQITANVRTISSIPLRLQIEDPPEWVEVRGEAFIPDDTFTAINNERAARGEALFANPRNACAGTLRQLDPKVVAARRLDFFAYTLHLPSDASNRPECQWDVLAWLEQAGFRVNPNRELCDGLNGIERFCDRWEQQRHQLPYATDGVVVKLNDLRLQDEAGTTQKAPRWAIALKYPAEEAPSKLLKLVVQVGRTGAVTPVAEFEPVTLAGTSVSRATLHNADRIAELDLHLGDTVVVRKAGEIIPEVVRVLPELRPEGAVPLDLPDHCPECGSTLVRDDSEAATRCINSSCPAILRGGLRHWVSKGALDVDGLGSKLIEQLVERGLVRSIADLYRLDAALLASLERMGEKSATNLVAALEQSKQQPWHRQLYGLGIRHIGEVNAKALATVYPSSASLATAEPERIAALHGIGPEISRSLQQWHTNPSNTRLLEDLRAVGLSLEANASELNANGTGEDNSAGVLFGKTLVLTGTMPNLSRSDAKSLIEAAGGKVSGSVSKKTDYLVAGDAAGSKLSKAESLGIQVLNEAELEELLKS

SEQ ID NO: 168255 - protein, 353 aa, Unknown
  Bacterial polypetide isolated from the Sargasso Sea
CKSLLIATYNPEEGALRDHVLDRFAIVLSADQSIDNAQRVEITKSVLSHAENNIKFSEKWSEESDNLSTQLILARQWLKDVKITKEQITYLVNEALRGGVEGHRSELFAVKVAKANAALRGDENVNSEDLKVAVRLVILPRAMQVPPDDDIQPPPPEDQSPPPPPQSNNEESEPEANENDDNQEQEQEEDNSDGEEESTPEIPEEFILDPEACMVDPDLLLFSSAKAKAGNSGSRSVIFSDSRGRYVKPIIPRGKVKRIAVDATLRAAAPYQKSRRIRNPNKSIVIEENDFRAKLLQKKAGALVIFLVDASGSMALNRMQSAKGAVIRLLTEAYENRDEVALIPFRGNQAEVL

SEQ ID NO: 168256 - protein, 195 aa, Unknown
  Bacterial polypetide isolated from the Sargasso Sea
MTSNFPFSAIVGQETMKQALILTAIDPSIGGVLVFGERGTGKSTIVRSLTALLPEIKAIKGCPYNCYEVSTECLFCEAQKNGRREKKSTPIVDLPLGSTEDRVVGALNLEIALSQGKKSFEPGLLANANRGYLYIDEVNLLEDHIVDLLLDVAASGENLVEREGLSIKHESKFVLVGSGNPEEGELRPQLLDRFG

SEQ ID NO: 168257 - protein, 242 aa, Unknown
  Bacterial polypetide isolated from the Sargasso Sea
MKFPFPFSAIVGQEEMKQAIILTAIDPSIGGVLVFGDRGTGKSTAVRGLASLLPKIKVLKGCPYNCNEFSKSCPHCGNKKPSKFIEKETPVIDLPLGSSEDRVVGALDLEAALVEGKKVFEPGLLAKANKGFLYIDEVNLLEDHIVDLLLDAAASGENLVEREGLSIKHEAKFVLVGSGNPEEGELRPQLLDRFGLSVEVSSPQDISERVEVIKRRDAYETDYAKFIKKWRREDSKTRKKIL

SEQ ID NO: 168258 - protein, 312 aa, Unknown
  Bacterial polypetide isolated from the Sargasso Sea
MGQVVGRSAEPQQGACMSIAYPFTAIVGQDDMKRALTIAAVDPGIGGVLVLGERGTGKSTTIRALAALLPKIDVVSGCSYQCDPLSPRPGLCAQCGKPSDTPDAKAMTIPVVDLPLGSTEDRVVGALDIERALVNGEKAFQPGLLAQANRGFLYVDEVNLLEDHIVDALLDVAASGENVVEREGLSVRHPARFVLVGSGNPEEGELRPQLQDRFGLSVDVRTPGDVPTRVEIIRLREAFDQDCATFRKKWARKESALRRKIQSAREQLDNVDTPAVLLETAAKLCLALGTDGLRGRAHPGPQRSGTGGTGGQ

SEQ ID NO: 168259 - protein, 168 aa, Unknown
  Bacterial polypetide isolated from the Sargasso Sea
GELRPQLLDRFGMSVEVKTVRDAELRVQVVDQRTSFDDNPDEFSLSVEKQQDELQQKVIKAQEILNSVQMDDDLRLNISAICGELDVDGLRGDIVTNRSARAIAAFEGRTEVQEDDIARVISCSLRHRLRKDPLEQVDSGERVIQAFCKVFDLDEKENLSKFQLSAEA

SEQ ID NO: 168260 - protein, 269 aa, Unknown
  Bacterial polypetide isolated from the Sargasso Sea
MNNAFPFAAIVGQEDMKLAMIMTAIDPKIGGVLVFGDRGTGKSTAVRGLANLLPPIKSVEGCPVNSGSSDEVPSWSENTSKKTVEIPMPVVDLPLGIGSDRVTGALDIEKALVDGVKSFQPGLLAKANRGYLYIDEVNLLEDHIVDLLLDVSQSGENVIEREGLSIRHPSDFILIGSGNPEEGELRPQLLDRFGLSVEVITPQTIQERIEVIKRRDLFDQDPENFQKNWEKEDKKICKKIIAARKSINKIKTSESILELCAEICIEIGE

SEQ ID NO: 168261 - protein, 280 aa, Unknown
  Bacterial polypetide isolated from the Sargasso Sea
AINPSIGGVLIRGNKGTAKSTAVRSLALLLPELNLIQGCVYNCDHDSPQSICEYCDKAELKKNVARPVQIVQLPVGATEDRLVGSLNIEEAIKTGTREFEPGLLATANKGILYIDEVNLLNDHLVDVLLDAAAMGRNYVEREGVSVSHEAQFILIGTMNPEEGDLRPQLLDRFGLAVEVSNEIETEARIEVVKRRMRFEQDPATFVASWDEKEELERKRIVQSRELLPEINVSDEMLYMISDICAGFGVDGLRGDIVMYKTAITIAAYEGRTEVNSDDVR

SEQ ID NO: 168262 - protein, 286 aa, Unknown
  Bacterial polypetide isolated from the Sargasso Sea
DNLSTQLILARLWLKDVKITKEQITYLVNEALRGGVEGHRSELFAVKVAKANAALRGDENVNSDDLKVAVRLVILPRAMQIPPEEDDIQPPPPEDQSPPPPPQSNNDDSEPDANENDDNQEQEQEEDNSDGEEESTPEIPEEFILDPEACMVDPDLLLFSSAKAKAGNSGSRSIIFSDSRGRYVKPIIPRGKVKRIAVDATLRAAAPYQKSRRLRNPNKSIIIEENDFRAKLLQKKAGALVIFLVDASGSMALNRMQSAKGAVIRLLTEAYENRDEVALIPFRGNQ

SEQ ID NO: 168263 - protein, 319 aa, Unknown
  Bacterial polypetide isolated from the Sargasso Sea
MVGAVDVAASLASGSAVFQPGLLADAHRGVLYVDELNLLDDGIVNLMLAAVGSGENRVEREGLSLSHPCLPLLIATYNPEEGNVRDHLLDRFAIALSANQLVSTEQRVEITGAVLSHGQCSRSFAQKWGEETDALATQLLLARQWLPDVQISREQIEYLVTEAIRGGVEGHRSELYAVRVARAHAALSGRDTVEADDLQVAVALVIAPRASQMPPPDQQMEPPPPQDQEPPPPPQDQGDQQQDNPPPPLEGSDEEDNDPPEDSNDDNDTEDDDGDGEEDQAPPAVPEEFMLDPEAIEVDPDLLLFHAAKAKSGAQRSRS

SEQ ID NO: 168264 - protein, 180 aa, Unknown
  Bacterial polypetide isolated from the Sargasso Sea
QICFIGSGNPEEGELRPQLLDRFGMSVEVKTVRDAELRVKVVDQRTSFDDNPDEFSISVEKQQDDLQQKVIKAQEILNSVQLDDDLRLNISAICGELDVDGLRGDIVTNRSARAIAAFEGRTEVQEEDIARVITCSLRHRLRKDPLEQVDSGERVIQAFCKVFDLNEKEDLSKFQLSSQE

SEQ ID NO: 168265 - protein, 290 aa, Unknown
  Bacterial polypetide isolated from the Sargasso Sea
VLSADQSIDNAQRVEITKSVLSHAENNIKFSEKWSEESDNLSTQLILARQWLKDVKITKEQITYLVNEALRGGVEGHRSELFAVKVAKANAALRGDENVNSEDLKVAVRLVILPRAMQIPPDDDDIQPPPPEDQIPPPPPQSNNEESEPDTNENDNEQDQEREEEDNSDGEEESTPEIPEEFILDPEACMVDPDLLLFSSAKSKAGNSGSRSVIFSDSRGRYVKPIIPRGKVKRIAVDATLRAAAPYQKSRRLRNPNKSIIIEENDFRAKLLQKKAGALVIFLVDASGSM

SEQ ID NO: 168266 - protein, 331 aa, Unknown
  Bacterial polypetide isolated from the Sargasso Sea
MVASGVAVTDDRATRAFPLAAITGHGTLKLALLLAAVDPGLGGVVIAGGRGTGKSVLARGLHALLPPIDILDVDNGVGRNLDPQNPEEWDATTRERISGEPPSRVIPAPFVQIPLGITEDRLVGAVDVAASLASGSAVFQPGLLADAHRGVLYVDELNLLDDGIVNLMLAAVGSGENRVEREGLSLSHPCRPLLIATYNPEEGNIRDHLLDRFAIALSANQLVSTEQRVEITGAVLSHGQCSRSFAQKWGEETDALATQLLLARQWLPDVLISREQIEYLVTEAIRGGVEGHRSELYAVRVARAHAALSGRDTVEADDLQVAVALVIAPRA

SEQ ID NO: 168267 - protein, 354 aa, Unknown
  Bacterial polypetide isolated from the Sargasso Sea
MNAAIQRPIFPFAALIGQTPLQQALLLAAVDPGLGGVLVSGPRGTAKSTAARALAELLPEGQWVNLPLGASEDRLIGTLDIETVLRDGSVRFSPGLLAKAHRGVLYVDEVNLLPDALVDALLDAAASGVNTVERDGVSHSHEANFVLIGTMNPEEGELRPQLIDRFGLMVELQNCFEPQVREQIVKARLGFDLDPQGFRARYTQQQETYVQRIRAAREALPRLNFDDAVHAHVSALCIEAAVDGLRADLVMLRAARALAALEQAAAVTTEHVGRVAEAVLAHRRHDREVRAGGETLEREVPQQAADNADAAPSRSSQEAVPGAAAVDNDWGYLPPQPAGVAQVKGVVPLDAKKR

SEQ ID NO: 168268 - protein, 257 aa, Unknown
  Bacterial polypetide isolated from the Sargasso Sea
MATGVAVKDDQATRAFPLAAITGHGTLKLALLLAAVDPGLGGVVIAGGRGTGKSVLARGLHALLPPIDILDAEGGVGRNLDPQNPEEWDDATRERITGEAPSKVIPAPFVQIPLGITEDRLVGAVDVAASLSSGSAVFQPGLLAEAHRGVLYVDELNLLDDGIVNLMLAAVGSGENRVEREGLSLNHPCRPLLIATYNPEEGNVRDHLLDRFAIALSANQLVSTEQRVEITNAVISHGQCSRSFAEKWGEQTDALAT

SEQ ID NO: 168269 - protein, 297 aa, Unknown
  Bacterial polypetide isolated from the Sargasso Sea
ARQWLKDVKITQEQISYLVNEALRGGVEGHRSELFAVKVAKANAALRGDENVNSEDLKVAVRLVILPRAMQIPPEDEDIQPPPPEDQSPPPPPQSNNDDSEPEANENDDNQEQEKEEDNSDGEEESTPEIPEEFILDPEACIVDPDLLLFSSAKAKAGNSGSRSVIFSDSRGRYVKPIIPRGKVKRIAVDATLRAAAPYQKSRRLRNPNKSIVIEENDFRAKLLQKKAGALVIFLVDASGSMALNRMQSAKGAVIRLLTEAYENRDEVALIPFRGNQAEVLLPPTRSITAAKRRLET

SEQ ID NO: 168270 - protein, 301 aa, Unknown
  Bacterial polypetide isolated from the Sargasso Sea
RGGVEGHRSELFAVKVAKANAALRGDENVNSEDLKVAVRLVILPRAMQIPPEDDDIQPPPPEDQSPPPPPQSNNEESEPEANENDNEQDQEQEEDNSDGEEESTPEIPEEFILDPEACMVDPDLLLFSSAKAKAGNSGSRSVIFSDSRGRYVKPIIPRGKVKRIAVDATLRAAAPYQKSRRLRNPDKSIVIEENDFRAKLLQKKAGALVIFLVDASGSMALNRMQSAKGAVIRLLTEAYENRDEVALIPFRGNQAEVLLPPTRSITAAKRRLETMPCGGGSPLAHGLTQSAKVAKNALATG

SEQ ID NO: 168271 - protein, 296 aa, Unknown
  Bacterial polypetide isolated from the Sargasso Sea
QEQEQEQEEDNSNVEEESTPEVPEEFILDPEACMVDPDLLLFSSAKAKAGNSGSRSIIFSDSRGRYVKPIIPRGKVKRIAVDATLRAAAPYQKSRRLRNPNKSIIIEESDFRAKLLQKKAGALVIFLVDASGSMALNRMQSAKGAVIRLLTEAYENRDEVALIPFRGNQAEVLLPPTRSITAAKRRLETMPCGGGSPLAHGLTQSAKVAKNALSTGDIGQVIVVGITDGRGNVPLGLSLGQNEVEEKDNANENVNLKQEVLDIAAKYPMLGIKLLIIDTERKFIASGFGKELAEAA

SEQ ID NO: 168272 - protein, 298 aa, Unknown
  Bacterial polypetide isolated from the Sargasso Sea
MGGVVIAGGRGTGKSVLARGLHALLPAIEILEGSWNEEPDGENPSKVIPAPFVQIPLGVTEDRLVGSVDATRSLSEGRTVFQPGLLAEAHRGVLYIDELNLLDANALNLVLAAVGSGTNQVEREGLSVAHPCRPLLIATYNPEEGAVRDHLLDRFAIALSSDQTIDSASRVSIAEAAIAYGENAVAFQAQFQEETDALATQLLLARQWLPDVQINREQIAYLVNEALRGGVEGHRAELYALRVARAHAALQGRDQVEAEDLQLAVRLVIAPRAKLMPPPDDQQQPPPPPPPSNNEDQA

SEQ ID NO: 168273 - protein, 320 aa, Unknown
  Bacterial polypetide isolated from the Sargasso Sea
VAVRLVILPRAMQMPPKDDDIQPPPPEDQSPPPPPQSNNDDSEPEANENDDNQEQEQEEDNSDGEEESTPEIPEEFILDPEACMVDPDLLLFSSAKAKAGNSGSRSVIFSDSRGRYVKPIIPRGKVKRIAVDATLRAAAPYQKSRRLRNPNKSIVIEENDFRAKLLQKKAGALVIFLVDASGSMALNRMQSAKGAVIRLLTEAYENRDEVALIPFRGNQAEVLLPPTRSITAAKRRLETMPCGGGSPLAHGLTQSAKVAKNALSTGDIGQVIVVGITDGRGNVPLGLSLGKNEFEEKDSENNNVHLKQEVLDIAAKFPML

SEQ ID NO: 168274 - protein, 299 aa, Unknown
  Bacterial polypetide isolated from the Sargasso Sea
SEESDNLSTQLILARQWLKEVKITKEQITYLVNEALRGGVEGHRSELFAVKVAKANAALRGDENVNSEDLKVAVRLVILPRAMQIPPNDDDIQPPPPEDQSPPPPPQSNNDDSEPDSNDIDDNQEQEQEEDNSDGEEESTPDIPEEFILDPEACMVDPDLLLFSSAKAKAGNSGSRSVIFSDSRGRYVKPIIPRGKVKRIAVDATLRAAAPYQKSRRLRNPDKSIVIEENDFRAKLLQKKAGALVIFLVDASGSMALNRMQSAKGAVIRLLTEAYENRDEVALIPFRGNQAEVLLPPTR

SEQ ID NO: 168275 - protein, 207 aa, Unknown
  Bacterial polypetide isolated from the Sargasso Sea
FFKKAGALVIFLVDASGSMALNRMQSAKGAVIRLLTEAYENRDEVALIPFRGNQAEVLLPPTRSITAAKRRLETMPCGGGSPLAHGLTQSAKVAKNALSTGDIGQVIVVGITDGRGNVPLGLSLGKNEVEGKDNENENVNLKQEVLDIAAKYPMLGIKLLVIDTERKFIASGFGKELAEAAKGKYVQLPKATDKAIAAMTLNAINEF

SEQ ID NO: 168276 - protein, 231 aa, Unknown
  Bacterial polypetide isolated from the Sargasso Sea
VRLVIAPRAKLMPPPDDQQQPPPPPPPPPGDNEDQADPPENENNNEDDEPDPPEPDEPEDDTPPSVPEEFMLDAEATAIDPELMQFQSAKNRAASSGSRGIVLSESRGRYVRPVLPRGPIRRIAVDATLRAAAPYQKARRAREPHRKVIVQDGDLRAKQLQRKAGALVIFLVDASGSMALNRMQSAKGAVLRLLTEAYENRDEVALIPFRGEQAEVLLPPTRSITAAKRRL

SEQ ID NO: 168277 - protein, 327 aa, Unknown
  Bacterial polypetide isolated from the Sargasso Sea
ITYLVTEALRGGVEGHRAELYAVRVAKAHAALQGRDQVEAEDLQLAVRLVIAPRAKLQPPPDDQQQQPPPPPPPGDNEEEPDPPDSEEENSEEDEPDEPDDPETDSPPSVPEEFMLDAEATAIDPELLQFQSAKSRAASSGSRGVVLSDSRGRYVRPIIPRGPVRRIAVDATLRAAAPYQRARREREPHRKVIVQDGDLRAKQLQRKAGALVIFLVDASGSMALNRMQSAKGAVLRLLTEAYENRDEVSLIPFRGEQAEVLLPPTRSITAAKRRLETMACGGGSPLAHGLAQAARVGANALQTGELSQVVVVAITDGRGNVPLGRSL

SEQ ID NO: 168278 - protein, 241 aa, Unknown
  Bacterial polypetide isolated from the Sargasso Sea
DATLRAAAPYQKSRRLRNPNKSIVIEENDFRAKLLQKKAGALVIFLVDASGSMALNRMQSAKGAVIRLLTEAYENRDEIALIPFIGNQAEVLLPPTRSITAAKRRLETMPCGGGSPLAHGLTQSAKVAKNALATGDIGQVIVVGITDGRGNVPLGVSLGQNEVEGKDNENENVNLKQEVLDIAAKYPMLGIKLLVIDTERKFIASGFGKELAEAAQGKYVQLPKATDKAIAAMALNAINEF

SEQ ID NO: 168279 - protein, 198 aa, Unknown
  Bacterial polypetide isolated from the Sargasso Sea
IFLVDASGSMALNRMQSAKGAVIRLLTEAYENRDEVALIPFRGNQAEVLLPPTRSITAAKRRLETMPCGGGSPLAHGLTQSAKVAKNALSTGDIGQVIVVGITDGRGNVPLGVSLGQNDVEGKDNENENVNLKQEVLDIAAKYPMLGIKLLVIDTERKFIASGFGKELAEAAQGKYVQLPKATDKAIAAMALNAINEF

SEQ ID NO: 168280 - protein, 265 aa, Unknown
  Bacterial polypetide isolated from the Sargasso Sea
QSYLVTVEGRYVKPIIPRGKVKRIAVDATFRAAAPYQKSRRLRNPNKSIIIEENDFRAKLLQKKAGALVIFLVDASGSMALNRMQSAKGAVIRLLTEAYENRDEVALIPFRGNQAEVLLPPTRSITAAKRRLETMPCGGGSPLAHGLTQSAKVAKNALSTGDIGQVIVVGITDGRGNVPLGLSLGQNEVEGKDNENVNLKQEVLDIAAKYPMLGIKLLVIDTERKFIASGFGKELAEAAQGKYVQLPKATDKAIAAMALNAINEF

SEQ ID NO: 168281 - protein, 245 aa, Unknown
  Bacterial polypetide isolated from the Sargasso Sea
MLPRGPVRRIAVDATLRAAAPYQKIRREREPGRSVIVEEGDLRAKLLQRKAGALVVFLVDASGSMALNRMQSAKGAVIRLLTEAYENRDEVALIPFRGDQAEVLLPPTRSITAARRRLESMPCGGGSPLAHGLTQAARVGANALATGDLGQVVVVAITDGRGNVPLSTSLGQPELDGEEKPDLKQEVLDVAARYRMLGIKLLVIDTERKFIGSGMGKDLAEAAGGKYVQLPKASDQAIAAVAMDA

SEQ ID NO: 168282 - protein, 164 aa, Unknown
  Bacterial polypetide isolated from the Sargasso Sea
STPEIPEEFILDPEACMVDPDLLLFSSAKAKAGNSGSRSVIFSDSRGRYVKPIIPRGKVKRIAVDATLRAAAPYQKSRRLRNPNKSIIIEENDFRAKLLQKKAGALVIFLVDASGSMALNRMQSAKGAVIRLLTEAYENRDEVALIPFRGNQAEVLLPPTRSIT

SEQ ID NO: 168283 - protein, 285 aa, Unknown
  Bacterial polypetide isolated from the Sargasso Sea
LLQYLEEFILDPEACMVDPDLLLFSSAKAKAGNSGSRSVIFSDSRGRYVKPIIPRGKVKRIAVDATLRAAAPYQKSRRLRNPNKSIIIEENDFRAKLLQKKAGALVIFLVDASGSMALNRMQSAKGAVIRLLTEAYENRDEVALIPFRGNQAEVLLPPTRSITAAKRRLETMPCGGGSPLAHGLTQSAKVAKNALSTGDIGQVIVVGITDGRGNVPLGLSLGQNEVEGKDNENENVNLKQEVLDIAAKYPMLGIKLLVIDTERKFIASGFGKELAEAAQGKYVPL

SEQ ID NO: 168284 - protein, 414 aa, Unknown
  Bacterial polypetide isolated from the Sargasso Sea
GTSFSPGILAEAHRGVLYVDDINLLDDGIVNLILEATGREKNNIERDGLSLSHPCKSLLIATYNPEEGALRDHVLDRFAIVLSADQSIDNAQRVEITKSVLSHAENNIKFSEKWSEESDNLSTQLILARQWLKDVKITKEQITYLVNEALRGGVEGHRSELFAVKVAKANAALRGDEHVNSEDLKVAVRLVILPRAMQLPPEDDDIQPPPPEDQSPPPPPQSNNQESEPESNENDDDQEQEQEDDNSDGEEESTPDIPEEFILDPEACMVDPDLLLFSSAKAKAGNSGSRSVIFSESRGRYVKPILPRGKVKRIAVDATLRAAAPYQKSRRLRNPDKSIIIEENDFRAKLLQKKAGALVIFLVDASGSMALNRMQSAKGAVIRLLTEAYENRDEVALILFRGNQAEVLLPQQDL

SEQ ID NO: 168285 - protein, 384 aa, Unknown
  Bacterial polypetide isolated from the Sargasso Sea
TYNPEEGALRDHVLDRFAIVLSADQSIDNAQRVEITKSVLSHAENNIKFSEKWSEESDNLSTQLILARQWLKDVKITKEQITYLVNEALRGGVEGHRSELFAVKVAKANAALRGDENVNSEDLKVAVRLVILPRAMQIPPEDEDIQPPPPEDQSPPPPPQSNNEESEPEANENDNEQDQEQEEDNSDGEEESTPEIPEEFILDPEACMVDPDLLLFSSAKAKAGNSGSRSVILSDSRGRYVKPIIPRGKVKRIAVDATLRAAAPYQKSRRLRNPNKSIVIEENDFRAKLLQKKAGALVIFLVDASGSMALNRMQSAKGAVIRLLTEAYENRDEVALIPFRGNQAEVLLPPTRSITAAKRRLETMPCGGGSPLAHGLTQSAKVAK

SEQ ID NO: 168286 - protein, 480 aa, Unknown
  Bacterial polypetide isolated from the Sargasso Sea
DRFAIVLSADHSIDNAQRVEITKSVLSHAENNIKFSEKWSEESDNLSTQLILARQWLKDVKITKEQITYLVNEALRGGVEGHRSELFAVKVAKANAALRGDENVNSEDLKVAVRLVILPRAMQIPPEDDDIQPPPPEDQSPPPPPQSNNEESEPEANENDNEQDQEQEEDNSDGEEESTPEIPEEFILDPEACMVDPDLLLFSSAKAKAGNSGSRSVIFSDSRGRYVKPIIPRGKVKRIAVDATLRAAAPYQKSRRLRNPNKSIVIEENDFRAKLLQKKAGALVIFLVDASGSMALNRMQSAKGAVIRLLTEAYENRDEVALIPFRGNQAEVLLPPTRSITAAKRRLETMPCGGGSPLAHGLTQSAKVAKNALSTGDIGQVIVVGITDGRGNVPLGLSLGQNEVEGKDNENLNLKQEVLDIAAKYPMLGIKLLVIDTERKFIASGFGKELAEAAQGKYVQLPKATDKAIAAMALNAINEF

SEQ ID NO: 168287 - protein, 492 aa, Unknown
  Bacterial polypetide isolated from the Sargasso Sea
PRGGQCARSLLDRFAIALSANQLVTTEQRVEITNAVLNHGQCSRSFAQTWAEETDALATQLLLARQWLPDVQISREQIQYLVNEAIRGGVEGHRSELYAVRVARAHAALSGRDRVEADDLQVAVALVIAPRASQLPPPDQQMEPPPPQEQEPPPPPEGETPPDEEQEPPEDSNEDDDEPDNEDEDDTPEDQAPPSIPEEFMLDPEAVAIDPDLLLFNAAKSKSGSSGSRSMVMSDSRGRYVKPMLPRGPVRRIAVDATLRAAAPYQKVRRERQPKRTVIVEEGDLRAKLLQRKAGALVVFLVDASGSMALNRMQSAKGAVIRLLTEAYENRDEVALIPFRGDQAEVLLPPTRSITAARRRLESMPCGGGSPLAHGLTQAARVGANALATGDLSQVVVVAITDGRGNVPLSTSLGQPELEGEDKPDLKQEVLDVAARYRMLGIKLLVIDTERKFIGSGMGKDLAEAAGGKYVQLPKASDQAIAAVAMDAISTI

SEQ ID NO: 168288 - protein, 429 aa, Unknown
  Bacterial polypetide isolated from the Sargasso Sea
MARQWLKDVKITKEQITYLVNEALRGGVEGHRSELFAVKVAKANAALRGDDNVNSEDLKVAVRLVILPRAMQIPPEDDDIQPPPPEDQSPPPPPQSNNEESEPETSENDNEQDQEQEEDNSDGEEESTPEIPEEFILDPEACNVDPDLLLFSSAKAKAGNSGSRSVIFSDSRGRYVKPIIPRGKVKRIAVDATLRAAAPYQKSRRLRNPNKSIIIEENDFRAKLLQKKAGALVIFLVDASGSMALNRMQSAKGAVIRLLTEAYENRDEVALIPFRGNQAEVLLPPTRSITAAKRRLETMPCGGGSPLAHGLTQSAKVAKNALSTGDIGQVIVVGITDGRGNVPLGLSLGQNEVEGKDNENLNLKQEVLDIAAKYPMLGIKLLVIDTERKFIASGFGKELAEAAQGKYVQLPKATDKAIAAMALNAINEF

SEQ ID NO: 168289 - protein, 353 aa, Unknown
  Bacterial polypetide isolated from the Sargasso Sea
PQDQEPPPPPQDQGDQQQENPPPPPEGSGEEEDNDPPEDNTDDDDGDGEEDQAPPAVPEEFMLDPEAIEVDSDLLLFNAAKAKSGNSGSRSVVLSDSRGRYVKPMLPRGPVRRIAVDATLRAAAPYQKIRREREPGRSVIVEEGDLRAKLLQRKAGALVVFLVDASGSMALNRMQSAKGAVIRLLTEAYENRDEVALIPFRGDQAEVLLPPTRSITAARRRLESMPCGGGSPLAHGLTQAARVGANALATGDLGQVVVVAITDGRGNVPLSTSLGQPELEGEEKPDLKQEVLDVAARYRMLGIKLLVIDTERKFIGSGMGKDLAEAAGGKYVQLPKASDQAIAAVAMNAINEI

SEQ ID NO: 168290 - protein, 508 aa, Unknown
  Bacterial polypetide isolated from the Sargasso Sea
EQVFQPGILAEAHRGVLYVDDINLLDDGIVNLILEATGREKNNIERDGLSLSHPCKSLLIATYNPEEGTLRDHVLDRFAIVLSADQSIDNAQRVEITKSVLSHAENNIKFSEKWSEESDNLSTQLILARQWLKDVKITKEQITYLVNEALRGGVEGHRSELFAVKVAKANAALRGDENVNSEDLKVAVRLVILPRAMQIPPEDDDIQPPPPEDQSPPPPPQSNNEDSEPETSENDNEQDQEQEEDNSDGEDESTPEIPEEFILDPEACMVDPDLLLFSSAKAKAGNSGSRSVIFSDSRGRYVKPIIPRGKVKRIAVDATLRAAAPYQKSRRLRNPNKSIIIEENDFRAKLLQKKAGALVIFLVDASGSMALNRMQSAKGAVIRLLTEAYENRDEVALIPFRGNQAEVLLPPTRSITAAKRRLETMPCGGGSPLAHGLTQSAKVAKNALSTGDIGQVIVVGITDGRGNVPLGLSLGQNEVEGKDNENENVNLKQEVLDIAAKYPMLGIK

SEQ ID NO: 168291 - protein, 634 aa, Unknown
  Bacterial polypetide isolated from the Sargasso Sea
MNPELKEKGEIKDLMKSKDSFRAFPLAAITGHSLLKLSLLLAAVDPSLGGVIIAGGRGTGKSVLARGLHTLLPPIEVLDNELILEKLTEKNSGTSLRPIGRNLDPDKPEEWDISTNKLLEEVIGSDYLNQIEEIPKKVREAPFIQVPIGITEDRLVGSIDVAASLSTGEQVFQPGILAEAHRGVLYVDDINLLDDGIVNLILEATGREKNNIERDGLSLSHPCKSLLIATYNPEEGALRDHVLDRFAIVLSADQSIDNAQRVEITKSVLSHAENNIKFSEKWSEESDNLSTQLILARQWLKDVKITKEQITYLVNEALRGGVEGHRSELFAVKVAKANAALRGDENVNSEDLKVAVRLVILPRAMQIPPEDDDIQPPPPEDQSPPPPPQSNNEESEPESNENDDAQDQEQEEDNSDGEEESTPEIPEEFILDPEACMVDPDLLLFSSAKAKAGNSGSRSVIFSDSRGRYVKPIIPRGKVKRIAVDATLRAAAPYQKSRRLRNPNKSIVIEENDFRAKLLQKKAGALVIFLVDASGSMALNRMQSAKGAVIRLLTEAYENRDEVALIPFRGNQAEVLLPPTRSITAAKRRLETMPCGGGSPLAHGLTQSAKVAKNALSTGDIGQVIVVGITDGRG

SEQ ID NO: 168292 - protein, 285 aa, Unknown
  Bacterial polypetide isolated from the Sargasso Sea
FFLSSWMIAAIELDKQLTIRDVEYLAKYQTDSNTFIFRGIPYAEPPINNLRWKSPIPAKKNLKIDARQFKPACMQDRYNTGWYHNVIKAFGSDPSLFEHVNSISEDCLYLNIWTKSLETSARKPVMVWIHGGNDTAGWSYEPDYIGHNLSNKDVVVVSIGYRLNIFGFFKHPNMSKQTGNFGLEDQILSLQWLKENIKYFGGDPNNITIFGESAGGAHISYHLVSPASEGLFEKAIIQSGGYNLISSYSLLDIQEAYNFAKEATDITSPNNFETLRKIDPNKLLD

SEQ ID NO: 168293 - protein, 260 aa, Unknown
  Bacterial polypetide isolated from the Sargasso Sea
VKVCTEFSAVCAQESFPAEIEMKIMDVPGSQSEDCLYLNVWSESETDKKPVMVWIHGGGLGLGAASQPLYDGQYLARKGVVVVTINYRMGALGFLHLNTVTDGAIPATGNEGFLDQIAALEWVRDNIAGFGGDPGNVTIFGESAGGWSVTALMAMPRAKGLFHKAIAQSGVSNAALSLGHAADLGREFLNDVANDPTDAEALRALPADKVLSAGSSFVRSIAALMTGQGEANRYHRAVIDGDTLPGSVLDLIADGASSEV

SEQ ID NO: 168294 - protein, 410 aa, Unknown
  Bacterial polypetide isolated from the Sargasso Sea
MAGPQVQTKYGIVEGARENDQNVFRGIPFAKPPINELRWCAPEEPESWEGVKVCTEFSAVCAQESFPAEIEMKIMDVPGSQSEDCLYLNVWSEGDTDKKPVMVWIHGGGLGLGAASQPLYDGQYLARKGVVVVTINYRMGALGFLHLDTVTDGAIPATGNEGFLDQIAALEWVRDNIAGFGGDPGNVTIFGESAGGWSVTALMAMPRAKGLFHKAIAQSGVSNAALSLDHAADLGREFLNDVANDPTDAEALRALPADKVLSAGSSFVRSIAALMTGQGEANRYHRAVIDGDTLPGSVLDLIADGASSEVVLMAGTTRDEMAAAVAPGASQEEVEEVVSKSAYGIETKDMIELYRQSRMKRLARVGDAEVASAIITDATMRIPCIRLIEAQRKYQPSYHYIVTWSTPAGD

SEQ ID NO: 168295 - protein, 447 aa, Unknown
  Bacterial polypetide isolated from the Sargasso Sea
MIAAIELDKQLTIRDVEYLGKYQTDSNTFIFRGIPYAEPPINNLRWKSPIPAKKNLKIDARQFKPACMQDRYNTDWYHNVIKAFGSDPSLFEHVNSISEDCLYLNIWTKSLETSARKPVMVWIHGGNDTAGWSYEPDYIGHNLSNKDVVVVSIGYRLNIFGFFKHPNMSKQTGNFGLEDQILSLQWLKENIKYFGGDPNNITIFGESAGGAHISYHLVSPASEGLFEKAIIQSGGYNLVSPYSLLDIQEAYNFAKEATDIISPNNFEALRNIDSKRLLDVSKAMGYPFHPIIDGNLIEKQILNIYSRGNLNKVDLIIGSNKNEEYLYIDKEMSLEDLIKQIKERNPDKADKIISLLDLSDIPLASDRVGTNQLTACPSIFIARQMTKSGNKVYQYLFSKQRIKSENILSYHGAEIPYVFSTHDAYLPTTNNDLKLTDSIMNYWTQFC

SEQ ID NO: 168296 - protein, 254 aa, Unknown
  Bacterial polypetide isolated from the Sargasso Sea
MSVSVERFGQGPDLVLLHGWGMNGAVWHGIVPALASRYRVHLVDLPGFGNSPLAGGIEYSLPWLAEQVETILPEQCHLLGWSLGGLVASQLALSHPERLHSLITVASSPCFMARGDWPGIAPKVLTGFNQMLAGDFKQTIERFLAIQAMGSEHARDDIRQLRHWLAERPAPQLAALEAGLGLLAEVDLRDELISLSLPWLRVYGRLDSLVPKASIPLLDERYPGSRSVVLEKASHAPFISHPQQFIEIIEHFVG

SEQ ID NO: 168297 - protein, 192 aa, Unknown
  Bacterial polypetide isolated from the Sargasso Sea
METFLVVGLGNPGSRYANTRHNAGTDFVHMLCEKYDVELTEKRKYKASIGKFLLKDMEVILSIPTLFMNQSGKSVAPTVKGENIKLKNLLVVHDDLDLSPGVSKLKFSGGDGGHNGLKDIMQSLSGKKDFKRLRIGIGHPGDTKKVNSFVVKKGSSSERKNKIIAMHNALEVFELVAFDDWEKALTQLHSKK

SEQ ID NO: 168298 - protein, 190 aa, Unknown
  Bacterial polypetide isolated from the Sargasso Sea
MLLLVGLGNPGPNNTNNRHNIGFKIIDAINQEFNLSKQKPKFKGLLTTGNIENKKVYAIKPLTFMNNSGVCIKELIEYFKIDAKNVIVFHDDLDIDLGKVKAKFGGTSAGHNGIESIDKFIGKDYSRVRIGIGRPKQKSKVNNHVLDDFNENEEERMKDITGHIVKMVLTLINKEMDLFSSKVNQNLNGI

SEQ ID NO: 168299 - protein, 186 aa, Unknown
  Bacterial polypetide isolated from the Sargasso Sea
MKKFLIVGLGNVGDEYTGTRHNIGFDILDNLISSFEGDFKEDKHGKIFKTKFSGKSLVFLKPNTFMNLSGKAVLYWAKKEKINLSNILVIVDDLNLDFGISRLRKSGTDGGHNGLKDINSKLNTIKYPRLRFGIGNNFKDGKQIDFVLEKWNDDETKNLSKLIEHNSSIVLDYVKHGIDNTMNKFN

SEQ ID NO: 168300 - protein, 175 aa, Unknown
  Bacterial polypetide isolated from the Sargasso Sea
MISDELKLLVGLGNPGTEYHKTRHNVGFMVLEEIARQNNSTFRENKKLYGKTCEIGSGINKTRLLMPTTFMNDSGKSVRSAKDWFNFETNQLIVLVDDIDLPLGKIRLRSKGSSGGHNGLKSIVSHLGTNEFKRLKIGIGSPSEILKERKSKTVSHVLGKFSKEELIKLNFIIKK

SEQ ID NO: 168301 - protein, 197 aa, Unknown
  Bacterial polypetide isolated from the Sargasso Sea
MFLHVGLGNPGSEHKLDRHNIGFMAIDHLLNFYRINDTLKKKFNGHYYKLSQKNGTIFFLKPQTFMNNSGSSVSSLIKFFSIKPSSVIVWHDEIDLDKGRIKVKFGGGHGGHNGIRDIIKHIGENFLRVRIGIGRPDNNLDPSKWVLSSFYKNEFDDWVNDLLSIMASEVELLHLNNSIDFMNRVAILRNNQNIEIM

SEQ ID NO: 168302 - protein, 192 aa, Unknown
  Bacterial polypetide isolated from the Sargasso Sea
MSLKLIVGLGNPEQRYLTTRHNVGFWVLDSLAEKLSKKFSQQKKYESELFEYEFDSKLFHMMKPLSYINNSGIPIRKFIKNKNIEVENILIIYDDLDLDVGKIRLKQGGGSGGHNGLNSIIEQIGSKNFWRLRIGIGKPDDKNKVIDYVLGKPSLDDKNLIHQSIEVMLSEIDAFFNGESVKLMNKLNGENK

SEQ ID NO: 168303 - protein, 180 aa, Unknown
  Bacterial polypetide isolated from the Sargasso Sea
MLLLVGLGNPGPNNTNNRHNIGFKIIDAINQQFSLSKQKPKFKGLLTTGNIENEKVYAIKPLTFMNNSGVCIKELIEYFKIDAKDVIVFHDDLDIDLGKIKAKFGGSSAGHNGIESIDKFIGKDYSRVRIGIGRPKQKGKVNNHVLEDFSDNEEDRIKDITNNIVKLVPTLIKKEIDLFK

SEQ ID NO: 168304 - protein, 188 aa, Unknown
  Bacterial polypetide isolated from the Sargasso Sea
MFLFIGLGNPGLKYMNNRHNIGYMIIDKINEFYEFPNFVNKKHSCLSIKKIDDQKVILLKPTTFMNLSGISAQNIKSFYNIKNENIYVFHDEIDLKPSEIKIKNGGGNNGHNGLKSIDNHIGKDYYRIRVGVGRPLNNETCKKSDLISNWVLSDFSKTEKKEWVDNKINFISKNFYDLKDKVFDVFVK

SEQ ID NO: 168305 - protein, 180 aa, Unknown
  Bacterial polypetide isolated from the Sargasso Sea
MNDIYLIGLGNPGKKYSKNRHNIGFLLLENLSKKYNSNFLIKDKLKSSCSEFKINNSTYRLFLPNTFMNNSGEAVRAILDWYKINLDQIIVIVDDKDLPLGKIRFRKKGSSGGHNGLKSIIEKLQTYNFNRIRIGIGSPPSIKGKNNFNTISHVLGNISIEEKSILDKVYKRVIKSLEQL

SEQ ID NO: 168306 - protein, 145 aa, Unknown
  Bacterial polypetide isolated from the Sargasso Sea
MLLLVGLGNPGPNNTNNRHNIGFKIIDAINSEFSLSKQKPKFKGLLTTGNIKDKKVYAIKPLTFMNNSGVCIKELIDYFKIDAKNVIVFHDDLDIDLGKVKAKVGGSSAGHNGIESIDKFIGKDYSRVRIGIGRPKQKSKVNTHF

SEQ ID NO: 168307 - protein, 113 aa, Unknown
  Bacterial polypetide isolated from the Sargasso Sea
MKYLIVGLGNIGPEYELTRHNIGFLTLDRLADKHGAKFEMDRLAYHTELKHKGRTIHLIKPTTYMNLSGKAMRHWMTELKIAKENCLVIVDDIAIPFGKLRMRAKGSSAGHNG

SEQ ID NO: 168308 - protein, 190 aa, Unknown
  Bacterial polypetide isolated from the Sargasso Sea
MYLLVGLGNPGKKYCYNRHNIGYMVIDHLAKNYALPSFKKKTKSSFSLGLIESYKVILLKPTTYMNLSGESILEIKSFYNIDLDNVFVFHDEIDLKLGEIKVKKGGGHNGHNGLKSIDNCIGSSYHRIRIGVDRPIVDRIQNKRDIVSKWVLTDFTESEKENIIHKNLSFISNNLVNLISKEFECFNNNK

SEQ ID NO: 168309 - protein, 146 aa, Unknown
  Bacterial polypetide isolated from the Sargasso Sea
MKLFVGLGNPGERYKITRHNVGFMVLDNLIKQSSVEGWDNKFDSFLNKIIINQKSVILLKPLTFMNISGYAVQKVKKFYGIDPNDIVIIHDDIDLELGKIKFKKGGGDGGHNGLKSIIKLIGSEFNRIRIGIGRPEKISVSSYVLN

SEQ ID NO: 168310 - protein, 165 aa, Unknown
  Bacterial polypetide isolated from the Sargasso Sea
MFSIFKYFRKGSVSPNNKKFLIVGLGNIGEEYKNTRHNIGFDIVDQLGVILNGTFNSAKYGDILKSKYAGKQIILLKPNTFMNLSGKAVVYWLKKEKIQINNLIVVVDDLNINFGKSRLKASGSDGGHNGLKDIVNSLNTSNFTRLRFGIGNNFKKKDQVDFVLS

SEQ ID NO: 168311 - protein, 182 aa, Unknown
  Bacterial polypetide isolated from the Sargasso Sea
MQLIAGLGNPGEKYQDNPHNIGFRTLDQLMKALDLEGFQRRFNSEFQRTLENGQVTLMLKPETYMNRSGEAIAECARYFKIPSEKILVISDDLDLPAGKARLRVSGGHGGHNGLRSVIQSLGTDQFLRARIGIGRPNSSSYGKETSVSQYVLGKMEETKAELCLQAMEKVVDMLVRFVRQSR

SEQ ID NO: 168312 - protein, 157 aa, Unknown
  Bacterial polypetide isolated from the Sargasso Sea
MLSDELKLLVGLGNPGTEYEKTRHNVGFMVLEEIARKNNCSFRESKKLFGRTCEYGSGIEKTRLLMPNTYMNESGKSVRSAKDWFDFKNNQLIVLVDDMDLPLGKIRVRSRGSSGGHNGLKSIINHLGTAEFKRLKIGIGAPSNTHKRENLKLFLTF

SEQ ID NO: 168313 - protein, 225 aa, Unknown
  Bacterial polypetide isolated from the Sargasso Sea
MQLFVGLGNPGQQYQMNRHNIGFMAVDEIANANSFGPWRSKFQGLFCEGNLENQKIIILKPSTFMNLSGQSVGELARFYKINSQDITVFHDELDLTPGKCRFKFSGGHAGHNGLKSIHSHIGENYKRIRLGIGHPGQKDLVSKYVLENFSKKEQQWLEKLLKKIADEATHLANDASEKFINKISLSSESQNKKDKQIEELKVATPSEKTNFRAEESEMQKSTLQK

SEQ ID NO: 168314 - protein, 203 aa, Unknown
  Bacterial polypetide isolated from the Sargasso Sea
MQLIVGLGNPGGKYQYTRHNIGYMAIDNIVSVQQDYKIKKKFNSIIYETIIDNNRIILIKPETYMNNSGDAVSQIANFYKIDSKNILVLHDELDIPFGKIRIKSGGGNAGHNGLKSISKKIDNNYTRVRLGIGHPGNKERVNGHVMGNFTGSEKQKLNQILNYLTNNIHEILNKKERFIINFELVEVQNQEINPLKKILGLFK

SEQ ID NO: 168315 - protein, 186 aa, Unknown
  Bacterial polypetide isolated from the Sargasso Sea
MFLICGLGNPGVNYKNTRHNVGFHLVDNIISYFNFDKIKEDKIKELYSGLINNQKIFVLKPLTFMNLSGKAVSEIVNFYKIKLDHTYIIHDDLDLELSKVKIKQGGGNGGHNGLESIDQFIGENYFRIRIGIDHPGHKDLVSSYVLNKFSKSEEEIINKKIDKMVKNIELIFSDIPLFLTKISEQN

SEQ ID NO: 168316 - protein, 171 aa, Unknown
  Bacterial polypetide isolated from the Sargasso Sea
MADALRLVVGLGNPGTKYEGTRHNIGFMALERMASREGFSFRQQSKLHGLAAEHGIGESRLRLLMPQTYMNDSGRSIRAALDWFGFTPEQLLVLVDDMDIPLGRLRLRAQGSAGGHNGLRSTIQHLGTQAFPRLRIGIGAPADNPAERRARTVSHVLGPFSRAEQSEVDAV

SEQ ID NO: 168317 - protein, 194 aa, Unknown
  Bacterial polypetide isolated from the Sargasso Sea
MPDDPIKLIVGLGNPGPQHDSNRHNAGVIFLHHLCKAYGNSLRSEAKFFGEFSSISIGGTEIKLLFPTTFMNNSGKSVAAVCKFFKIAPENMLVAYDEIDFDVGISRFKEGGGHGGHNGVRDIISSIGGKKDFYRLRIGVGHPGHKSMVSNYVLNDPSRSEADTIMSNIEDAIRILPTAVDGNWEEAMRLLHTD

SEQ ID NO: 168318 - protein, 210 aa, Unknown
  Bacterial polypetide isolated from the Sargasso Sea
MHWISRRKKGITAPKYLAGKRRMKLFVGLGNPGAKYAGNRHNIGFMALDQIASDHGFSPWKSKFQAQMSEGTLTGEKVILLKPQTFMNNSGQSVGEALRFFKLTPADVVVFHDELDLAPGKCRVKQGGGHAGHNGLRSIHAHIGADYARVRLGVGHPGHKDAVAGYVLRDFPKADQGWLDDLLRGLSDGAHSLATGNSGRFMNAVALRVA

SEQ ID NO: 168319 - protein, 200 aa, Unknown
  Bacterial polypetide isolated from the Sargasso Sea
MQEIYLIGLGNPGKKYYNSRHNIGFLLLKKLSKKYNSNFLLKDKLKSSCSEFQINNSTFRLFLPNTFMNNSGDAVQAIVNWYKINLDQILIIVDDKDLPLGKIRFRKKGSSGGHNGLKSIIEQLQTQNFKRIRIGIGSPPLIKEENHFNTISHVLGNISLEEKLILDKVYKRVIESLEQFNTKKEDHIINELNSFNKDQL

SEQ ID NO: 168320 - protein, 182 aa, Unknown
  Bacterial polypetide isolated from the Sargasso Sea
MGLGNPGDQYAQTRHNVGAQLLLDAAEHEGLKWQLESKLKAHTVKRADGQRLLLSTTFMNDSGQALQAVMHYYKIPIGAVLVIHDELDFGPGTARLKFAGGHGGHNGLRDIIRAVGAQFWRLRLGIGHPGHKDRVHGYVLQRANANDQQRIDTASAHAADIMPLCFAGKFQQAMQQLHEEDR

SEQ ID NO: 168321 - protein, 113 aa, Unknown
  Bacterial polypetide isolated from the Sargasso Sea
MIVGLGNPGLKYDNTRHNIGFKALDHVAKQTDALFVSSKYGEITSFKYKGKSVFLLKPNTYMNLSGGAVNYWLKKEKILSSNLLIVTDDLNLLLGKLRLKTNGSDGGHNGLKN

SEQ ID NO: 168322 - protein, 172 aa, Unknown
  Bacterial polypetide isolated from the Sargasso Sea
MYNRHNIGYLIIDKIYEVYKFPKFLQKKNSFLSIKKIENQKVILLKPTTFMNLSGVSVQNIKSFYNIKNENIFVFHDEIDLKPSEIKIKKGGGNNGHNGLKSIDNFIGNDYYRIRIGVGRPANNMLYKKSEIVSNWVLSDFSNKEKKEWLESSLNLISEKFKSLKNKEFDVF

SEQ ID NO: 168323 - protein, 128 aa, Unknown
  Bacterial polypetide isolated from the Sargasso Sea
KPSTYMNLSGKAVNYWMQKEKISTENILVITDDLSLPLGKIRLRTKGSDGGHNGLKNIQLILNTTNYSRLRFGIGNDFQKGKQVSHVLGPWKEEEIEVLSSKIEIAVECIKSFCTVGVSMAMTNWNNK

SEQ ID NO: 168324 - protein, 184 aa, Unknown
  Bacterial polypetide isolated from the Sargasso Sea
MLLLVGLGNPGPDSENNRHNIGFKIIDAINSHFKLSKQKPKFKGLLTTGNIESKKVYAIKPLTFMNNSGTAIKELIDYFKIDAKNVIVFHDDLDIDFGKIKAKVGGSSAGHNGIKSLDKFIGTDYSRVRVGIGHPKEKRSVNRHVLEDFKDDEEEKIKEITESIVKLVPTLIDKKIDLFSSKVI

SEQ ID NO: 168325 - protein, 187 aa, Unknown
  Bacterial polypetide isolated from the Sargasso Sea
MPDQPIKLIVGLGNPGPQHERNRHNAGVIFLHHLCKAYGNNLRVETKFFGEFSSIVIDGADIKLLFPTTFMNNSGKSVATVCKFFKLAPENLLVAYDEIDFDVGITRFKEGGGHGGHNGVRDIINALGGKNDFSRLRIGVGHPGHKSMVANYVLNDPSRVEADAIMSNIEDAIRILPTAIKGNGKKQ

SEQ ID NO: 168326 - protein, 139 aa, Unknown
  Bacterial polypetide isolated from the Sargasso Sea
MNEVFLIGLGNPGKKYQYNRHNIGFLILENLSKKYNANFLLKDKLKSYCSEFKINDSTYRLFLPTTFMNNSGDAVRAIVDWYKINVDQVFIIVDDKDLPLGKIRFRKKGSSGGHNGLKSIIEKLQTQNFNRIRIGIGSP

SEQ ID NO: 168327 - protein, 203 aa, Unknown
  Bacterial polypetide isolated from the Sargasso Sea
MADVLRLVVGLGNPGTKYEGTRHNIGFMALERMASREGFSFRQQSKLHGLAAEHGIGESRLRLLMPQTYMNDSGRSIRAALDWFGFTPEQLLVLVDDMDIPLGRLRLRAQGSAGGHNGLRSTIQHLGTQAFPRLRIGIGAPADNPAERRARTVSHVLGPFSRGEQSEVDAVLDGVLEAIQRIQRQGLDRAGNWINGFRPASVE

SEQ ID NO: 168328 - protein, 169 aa, Unknown
  Bacterial polypetide isolated from the Sargasso Sea
MKYLIVGLGNVGEEYEGTRHNIGFEILDSFSKKNKSDFIVDKHAEISTLNLKGKKVNLIKPSNYVNNSGKAVNYWCQKIGIKKENLLVIVDDIALPFGKIRLKKTGSDGGHNGLKSIDIHLNDRDYCRLRFGIDNNFRKGQQSKYVLSKFSKEEYKELEFFIIDACEAI

SEQ ID NO: 168329 - protein, 183 aa, Unknown
  Bacterial polypetide isolated from the Sargasso Sea
LFVGLGNPDPKHKNNRHNIGFMLIDALNKKFNFSKQKPKFKGLLTSGEINNHKIILVKPLTFMNNSGVCLREIQDYYKIEKKNIFVFHDDLDLELGKIRCKNGGSSGGHNGIKSITTILGDDFNRIRIGIDHPGNKNYVDQHVLNDFSGEEKNIIEESISKILENVYLLFENKLDDFSSKTNN

SEQ ID NO: 168330 - protein, 150 aa, Unknown
  Bacterial polypetide isolated from the Sargasso Sea
MVVGLGNPGDKYLGSRHNLGYEVIEKLAEMQRAKLEVSRPAKARVAVVDFFGLRCILACPTTYMNLSGEAVSPLIRNNGVTDISRVIVVHDELDLEPGRVKIKRGGSSAGHNGLKSISQHLKNDEFIRIRVGVGKPPHPDQGKNWVLRRP

SEQ ID NO: 168331 - protein, 190 aa, Unknown
  Bacterial polypetide isolated from the Sargasso Sea
MIVGLANPGAEYAATRHNAGAWYVDLLADRHRAPLREESKFFGYTSRINLAGEDVRLLVPTTFMNLSGKAVAAIATFYRINPDEILVAHDELDLPPGVAKFKLGGGHGGHNGLKDIISKLGNNPNFHRLRVGIGHPGDKNKVVGFVLGKPPTSEQKLIDEAVDEAARCTEVWLKEGLTKATNRLHAFKAQ

SEQ ID NO: 168332 - protein, 170 aa, Unknown
  Bacterial polypetide isolated from the Sargasso Sea
MKLLVGLGNPGAKYEQTRHNIGFFIVDQIAKKYSSENWRKKFQGVVCSCDINTFKVLILKPETFMNNSGLSVLEASKFFKLNLADIIVIHDDLDLQPGQLRIKTAGGHAGHNGLKSIHQLLGPSYNRIRIGIGHPGDRDKVSSFVLSNFSKTDKLWLGKITQHFLDELTM

SEQ ID NO: 168333 - protein, 182 aa, Unknown
  Bacterial polypetide isolated from the Sargasso Sea
MKEIFLIGLGNPGKKYLNNRHNIGFLLLKNFSKKYNSNFLLKDKIKSSCSEFQVNDSNFRLFLPNTFMNNSGDAVRAIVDWYKINLDQIFIIVDDKDLPLGKIRFRRKGSSGGHNGLKSIIEQLQTQNFKRIRIGIGSPPLIKEKNNFNTISHVLGNISLAEQSILDKVYKRVIESLEQINT

SEQ ID NO: 168334 - protein, 196 aa, Unknown
  Bacterial polypetide isolated from the Sargasso Sea
MTESIQLIVGLGNPGPEYSQTRHNAGQWFVEQLARRYNVSLRPDSKFFGLTGKFVTQGQEYKLLVPTTYMNLSGKAVAAMAQFYKLLPENILVAHDEMAIAPGVAKFKLGGGHAGHNGLKDITSKLGNNANFYRLRLGIGHPGHKDLVTGYVLGKAPQSEQKLIDEALDESMRCFELWLSDGLIKAQHRLHSFSAT

SEQ ID NO: 168335 - protein, 203 aa, Unknown
  Bacterial polypetide isolated from the Sargasso Sea
MADVLRLVVGLGNPGSKYEGTRHNIGFMALERMASRGGFSFRQQNKLHGLAAENGIGESRLRLLMPQTYMNDSGRSIRAALDWFGFTPEQLLVLVDDMDIPLGRLRLRAQGSAGGHNGLRSTIQHLGTQAFPRLRIGIGAPADNPAERRARTVSYVLGPFSRAEQPEVDAVLDGVLEAIQRIQRQGLDRAGNWINGFRPASVE

SEQ ID NO: 168336 - protein, 186 aa, Unknown
  Bacterial polypetide isolated from the Sargasso Sea
MFLICGLGNPGVNYKNTRHNVGFHLADNVISHFNLDIIKEDRKKELYSGVINNQKIFVLKPLTFMNLSGKAVSEIVNFYKIKLDHTFVIHDDLDLELSKVKIKQGGGNGGHNGLESIDQFIGENYFRIRIGIDHPGHKDLVSSYVLNKFSKSEEEIINKKIDKMVKNIELIFSDIPLFLTKISEQN

SEQ ID NO: 168337 - protein, 233 aa, Unknown
  Bacterial polypetide isolated from the Sargasso Sea
MQLFVGLGNPGQQYQMNRHNIGFMAVDEIANANSFGPWRSKFQGLFCEGSLENQKVLILKPSTFMNLSGQSVGELARFYKINSQNITVFHDELDLTPGKCRFKLSGSHAGHNGLKSIHSHIGENYKRIRLGIGHPGQKELVSKYVLENFSKKEQQWLEKLLKKIAAEATHLANDASEKFINQISLGSKNENKKDKKGKKFKVATPSKKTNFQTDENKMQKSTLQKLMDKFSRK

SEQ ID NO: 168338 - protein, 229 aa, Unknown
  Bacterial polypetide isolated from the Sargasso Sea
MCNYSAFGDKHAVFCQAHRQTVNYTSFIETLRTKHVAIKLIVGLANPGAEYAATRHNAGAWYVDLLAERLRAPLRDEPKFFGYTSRVTLEGEDVRLLVPTTFMNLSGKAVGAMASFYRINPDEILVAHDELDLPPGVAKFKLGGGHGGHNGLKDIISKLGNNPNFHRLRVGIGHPGDKNKVVGFVLGKPPVSEQKLIDEAIDEAARCTEILFKDGLTKATSRLHTFKAQ

SEQ ID NO: 168339 - protein, 200 aa, Unknown
  Bacterial polypetide isolated from the Sargasso Sea
MIKLIVGLGNPGAEYTATRHNAGFWLVDQLAREAGTTLRDERRFHGFYAKARLHGEEVHLLEPQTYMNRSGQSVVALAQFFKILPDEILVAHDELDMPPGSVKLKLGGGSGGHNGLKDITAHLSSQQYWRLRIGIGHPRDLIPESARAGAKPDVANYVLKPPRREEQDVIDASIERALAVMPQIIKGELERAMMQLHRNP

SEQ ID NO: 168340 - protein, 195 aa, Unknown
  Bacterial polypetide isolated from the Sargasso Sea
MIPDQPIKLIVGLGNPGPQHERNRHNAGVIFLHHLCKAYGNNLRGEAKFFGEFSSIVIEGADIKLLFPTTFMNNSGKSVATVCNFFKLAPENLLVAYDEIDFDVGVTRFKDGGGHGGHNGVRDIINALGGKNDFFRLRIGVGHPGHKSMVANYVLNDPSRAEANAIMSNIEDAIRLLPTAINGNWEEAMRVLHSN

SEQ ID NO: 168341 - protein, 199 aa, Unknown
  Bacterial polypetide isolated from the Sargasso Sea
MIKLIVGLGNPGAEYTATRHNAGFWLIDQLAREAGTTLRDERRFHGFYAKARLHGEEVHLLEPQTYMNRSGQSVVALAQFFKILPDQILVAHDELDLPPGTVKLKLGGGSGGHNGLKDITAHLSSQQYWRLRIGIGHPRDLIPESARTGAKPDVANFVLKPPRREEQDVIDASIERALAVMPMVVKGELDRATMQLHRN

SEQ ID NO: 168342 - protein, 233 aa, Unknown
  Bacterial polypetide isolated from the Sargasso Sea
MQLFVGLGNPGQQYQMNRHNIGFMAVDEIANANSFGPWRSKFQGLFCEGRLEKQKVIILKPSTFMNLSGQSVGELARFYKINSQDITVFHDELDLTPGKCRFKLSGGHAGHNGLKSIHSHIGENYKRIRLGIGHPGQKDLVSKYVLENFSKKDQQWLEKLLKKIADEATHLANDASEKFINQISIGSKNENKKDKKSKELKVANPSEKTNFQTDENKVQKSTLQKLMNKFSRK

SEQ ID NO: 168343 - protein, 186 aa, Unknown
  Bacterial polypetide isolated from the Sargasso Sea
MFLICGLGNPGVNYNNTRHNVGFHLADNIISHFNLDKIKENKKKELYSGVINNQKIFVLKPLTFMNLSGKAVSEIVNFYKIKLDHTFVIHDDLDLELSKVKIKQGGGNGGHNGLESIDQFIGENYFRIRIGIDHPGHKDLVSSYVLNKFSKSEEEIINKKIDKMVKNIELIFSDIPLFLTKISEQN

SEQ ID NO: 168344 - protein, 198 aa, Unknown
  Bacterial polypetide isolated from the Sargasso Sea
MQEIYLIGLGNPGKKYYNSRHNIGFLLLEKLSKKYNSNFLLKDKLKSSCSEFQINNSTFRLFLPNTFMNNSGNAVRAIVDWYKVNLDQIFIIVDDKDLPLGKIRFRRKGSSGGHNGLKSIIEQLQTQNFKRIRIGIGSPPLLKGENNFNTISHVLGNISLEEKLILDKVYKRVIESLEQINTKKEDHIINELNSFNKD

SEQ ID NO: 168345 - protein, 195 aa, Unknown
  Bacterial polypetide isolated from the Sargasso Sea
MSEIKLIVGLANPGAEYAQTRHNAGAWYVEELARICGVSLVPDSKYFGLTARAVLHGKDVRLLIPTTYMNLSGKAVGALASFFRITPEEILVAHDELDMPPGVAKFKLGGGHGGHNGLKDIIAKLANDKNFYRLRIGIGHPGDKNKVSGYVLGKAPAKEQELINAAVDEAVRSTEVLFKEDMVKAMTRLHSFKAE

SEQ ID NO: 168346 - protein, 190 aa, Unknown
  Bacterial polypetide isolated from the Sargasso Sea
MLLLVGLGNPGPDSENNRHNIGFKIIDAINSHFKLSKQKPKFKGLLTTGNIESKKVYAIKPLTFMNNSGTAIKELIDYFKIDAKNVIVFHDDLDIDFGKVKAKVGGTSAGHNGIKSIDKFIGTDYSRVRVGIGHPKEKRRVNSHVLEDFKDDEEERIKEITENIVKLVPTLIDKKIDLFSSKVNQNLNGI

SEQ ID NO: 168347 - protein, 200 aa, Unknown
  Bacterial polypetide isolated from the Sargasso Sea
MKEIFLIGLGNPGKKYLNNRHNIGFLLLENFSKKYNSNFLLKDKLKSSCSEFQINDSNFRLFLPNTFMNNSGDAVRAIVDWYKINLDQIFIIVDDKDLPLGKIRFRTKGSSGGHNGLKSIIEKLQTQNFKRIRIGIGSPPLTKGKNNFNTISHVLGNISIEEKSILDKVYKRVIESLEQINTKKEEFIINELNSFDKDQP

SEQ ID NO: 168348 - protein, 200 aa, Unknown
  Bacterial polypetide isolated from the Sargasso Sea
MNEIFLIGLGNPGKKYSKSRHNIGFLLLEHLSKKYNSNFLLKDKLKSSCSEFQINDSTFRLFLPNTFMNNSGDAVRAIVDWYKINLDQILIIVDDKDLPLGKIRFRKKGSSGGHNGLKSIIEQLQTQNFKRIRIGIGSPPLMEGKNNFNTISHVLGNISLEEKSILDKVYKRVIESLEQINTKKEEFIINELNSFDKDQT

SEQ ID NO: 168349 - protein, 123 aa, Unknown
  Bacterial polypetide isolated from the Sargasso Sea
MSAIRLIVGLGNPGTQYEGTRHNAGAFFVRRLATQFGLTLAADRNAVGDSARGTVAGHDLRLLIPETFMNESGRSVAAMARYYRIETNAILIAHDELDIPPGESRFKHDGGHGGHNGLRDIIP

SEQ ID NO: 168350 - protein, 200 aa, Unknown
  Bacterial polypetide isolated from the Sargasso Sea
MKEIFLIGLGNPGKKYLNNRHNIGFLLLENFSKKYNSNFLLKDKLKSSCSEFQINDSNFRLFLPNTFMNNSGDAVRAIVDWYKINLDQIFIIVDDKDLPLGKIRFRRKGSSGGHNGLKSIIEQLQTQNFKRIRIGIGSPPLIKGKNNFNTISHVLGNISLEEKSILDKVYKRVIESLEQINTKKEEFIINELNSFDKDQP

SEQ ID NO: 168351 - protein, 193 aa, Unknown
  Bacterial polypetide isolated from the Sargasso Sea
MADIRLIVGLGNPGPEYENTRHNAGEWFLNQLADAYNAPLKPETKFFGKTARITIAGKDIRLLYPTTFMNKSGQAVAALANFYRIEPEQILVAFDELDLPPGIAKYKVGGSSSQNGVRDIVAKMGNNKNFLRLRIGIGHPGHKSRVTGHVLGKPPAEEKAAIESAIDEAVRCTEILLKEDLKQAQNRLHSHKG

SEQ ID NO: 168352 - protein, 190 aa, Unknown
  Bacterial polypetide isolated from the Sargasso Sea
MLLLVGLGNPGPNNTNNRHNIGFKIIDAINSEFSLSKQKPKFKGLLTTGSIQDKKVYAIKPLTFMNNSGVCIKELIDYFKIDAKNVIVFHDDLDIDLGKVKAKFGGTSAGHNGIESIDKFIGKDYSRVRIGIGRPEQKSKVNNHVLEDFNENEEDRIKDITENIVKLIPALINKEMDLFSSKVNQNLNGI

SEQ ID NO: 168353 - protein, 195 aa, Unknown
  Bacterial polypetide isolated from the Sargasso Sea
MSEIKLIVGLANPGAEYAQTRHNAGAWYVEELARICGVSLVADSKYFGLTARAVLHGKDVRLLIPTTYMNLSGKAVGALANFFRITPEEILVAHDELDMPPGVAKFKLGGGHGGHNGLKDIIAKLANDKNFYRLRIGIGHPGDKNKVSGYVLGKAPAKEQELINAAVDEAVRSTEILFKEDMVKAMTRLHSFKAE

SEQ ID NO: 168354 - protein, 201 aa, Unknown
  Bacterial polypetide isolated from the Sargasso Sea
MQLIVGLGNPGEKYQDNPHNIGFRTIDQLMTALDLEGYQRRFNSEFQRTLENGQVTLMLKPETYMNRSGEAIAECARYFKIPSEKILVISDDLDLPAGKARLRVSGGHGGHNGLRSVIQCLGTDQFLRARIGIGRPDSSSSGKEASVSQYVLGKMEETKAELCLQAIEKVVEILVRFVRQSRFQSTSISIPTPALPATGQG

SEQ ID NO: 168355 - protein, 197 aa, Unknown
  Bacterial polypetide isolated from the Sargasso Sea
MIHSPLKLLVGLGNPDAHLLKTRHNVGFWFVDQFAEKISQQFKLVKKYESEIIELEDKNLNILKPMNYINNSGVAIQKFIKQSSINANQILVIYDDLDLKVGQIRLKKGGSSGGHNGLNSIISECGSKDFWRLRIGIGKPIAKEETVKYVLGKPSLADTEIIYESFNKILVNFDDILKGNFSKVMNLFNQRSERDGV

SEQ ID NO: 168356 - protein, 190 aa, Unknown
  Bacterial polypetide isolated from the Sargasso Sea
MLLLVGLGNPGPNNTNNRHNIGFKIIDAINSEFSLSKQKPKFKGLLTTGNIQDKKVYAIKPLTFMNNSGVCIKELIDYFKIDAKNVIVFHDDLDIDLGKVKAKVGGSSAGHNGIESIDKFIGKDYSRVRIGIGRPKQKSKVNTHVLEDFSENEEDRIKDITDNIVKLIPALINKEMDLFSSKVNQNLNGI

SEQ ID NO: 168357 - protein, 206 aa, Unknown
  Bacterial polypetide isolated from the Sargasso Sea
MSNRLRLVVGLGNPGGKYQGTRHNIGFMALELLAEKNGFQFRHQSKLHGLTADVGIGDQRLRLLMPQTFMNDSGRSIRAALDWFDLVPDQLLVLVDDMDLPLGRLRLRAKGSAGGHNGLRSTIQHLSTEMFPRLRIGIGAPAENPTERKARTVSHVLGSFGKDEQGTVKQVLNEVLDGLQLIQRVGIERAGNSINAFRPEHHSAQR

SEQ ID NO: 168358 - protein, 192 aa, Unknown
  Bacterial polypetide isolated from the Sargasso Sea
MSLKLIVGLGNPEKKYLSTRHNVGFWVLDSLAEKLTKTFSQQKKYESELLEYEFDSKLFHMMKPLSYINNSGIPIRKFIKNKNIEAENILIIYDDLDLGVGKIRLKQGGGSGGHNGLNSIIEQIGSKNFWRLRIGIGKPNDKNNVIDYVLGKPSLDDKNLIHQSIEIMLSEIDAFFNGESTKLMNKLNRENK

SEQ ID NO: 168359 - protein, 201 aa, Unknown
  Bacterial polypetide isolated from the Sargasso Sea
MQLIAGLGNPGEKYQDNPHNIGFRTLDQLMKALDLEGFQRRFNSEFQRTLENGQVTLMLKPETYMNRSGEAIAECARYFKIPSEKILVISDDLDLPAGKARLRVSGGHGGHNGLRSVIQCLGTDQFLRARIGIGRPDSSSSGKETSVSQYVLGKMEETKAELCLQAMEKVVDMLVRFVRQSRFQSTSISIPTPALPATGQG

SEQ ID NO: 168360 - protein, 200 aa, Unknown
  Bacterial polypetide isolated from the Sargasso Sea
MKEIFLIGLGNPGKKYSKSRHNIGFLLLENFSKKYNSNFLLKDKLKSSCSEFQINDSNFRLFLPNTFMNNSGDAVRAIVDWYKINLDQIFIIVDDKDLPLGKIRFRRKGSSGGHNGLKSIIEQLQTQNFKRIRIGIGSPPLIKGKNNINTISHVLGNISLEEKSILDKVYKRVIESLEQLNTKKEEYIINELNSFDKDQP

SEQ ID NO: 168361 - protein, 277 aa, Unknown
  Bacterial polypetide isolated from the Sargasso Sea
MPVVMVSALTTKGSLEALRSLELGAVDIVEKPKLDVREGLEDISIQICDKIKAAAQARLKTAHQRYLTPQKKLSADAILPAKSSVSKSKGQESLIAIGASTGGTVALRELLTPLPSDMPGIVIVQHMPKAFTKSFSESLDKECRLNVQEAGEGEKVERGKVLVSPGDQHMMLKLEGNGYSVTMNNGELVNRHRPSVDVLFRSVANLAGSNSIGVILTGMGDDGAKGMVEMHDAGSHTLAQDEESCVVYGMPRKAVANGAVDEVLNLEEISKRLIELS

SEQ ID NO: 168362 - protein, 322 aa, Unknown
  Bacterial polypetide isolated from the Sargasso Sea
ALALRPDVITMDIEMPVMDGISAVREILKVQRTPILMFSSLTHEGAKATLDALEAGAIDFLPKKFEDIARDKAEAADVLRQRVKTVARRRVISRPSSLTGSASSTLASRTSATPAASPTAIPARAPLAQSLAARALAERAELQNRAAERAETHRSGSFDSSGKNYKLVAIGTSTGGPVALQQIITALPANFPLPIVLIQHMPAAFTGAFASRLNGLAKIEVKEAADNDVLRPGVAYLAPGGKQMLLDGNENQARLRVREDDSPRITFKPSVDITFGTAAKIFNDKVLAIVLTGMGSDGREGCRLLKQSGSRIWSQDEASCVV

SEQ ID NO: 168363 - protein, 176 aa, Unknown
  Bacterial polypetide isolated from the Sargasso Sea
MSKIRVLSVDDSALMRQIMTEIINSHSDMEMVATAPDPLVARDLIKKYNPDVLTLDVEMPRMDGLDFLEKLMRLRPMPVVMVSSLTGKGSEVTLRALELGAIDFVTKPQLGIREGMLAYSEMIAEKIRTASRAKLAAHKPLAAPTTLKTGPLLSSEKLLVIGASTGGTEAIRHYSS

SEQ ID NO: 168364 - protein, 236 aa, Unknown
  Bacterial polypetide isolated from the Sargasso Sea
TQKGAPEALKSLELGAVEVIGKPDTTVREGMEEISIQIVDAVKAAAQAKLKKNTDIFLKAPEKLTADVIIPKNPPKHLSHSIEPIIAIGASTGGTEALMTLLTQLPESMPGIVMVQHMPGSFTKSFAERLDHHCRLFVKEAESGERIRPGTAYLAPGDQHLLLKNQDKGYCVELNDGPLVCRHRPSVDALFRSTAQVARHHATGVILTGMGDDGAQGMLEMKEAGSFNIAQDEASS

SEQ ID NO: 168365 - protein, 245 aa, Unknown
  Bacterial polypetide isolated from the Sargasso Sea
ALTLAAPYPALTAILGNKAAERPALSRSSLERPRLTERVAPAAGAGRYSASGKSYKLVAIGTSTGGPVALQRIITSLPADFPLPIVLIQHMPAAFTGAFAQRLNTLAKIEVREAQDNDVLRPGVAYLAPGGKQMLIEGHERDARLRIKEDDSPRITFKPSVDITFATAAKAFTDKVLAIVLTGMGSDGREGARLLKQAGSRIWAQDEASCVVYGMPQAIAAAGLMDMEVALNDVASRLITEVLHG

SEQ ID NO: 168366 - protein, 191 aa, Unknown
  Bacterial polypetide isolated from the Sargasso Sea
MPAPPNGVFMAVKVLVVDDSGFFRRRVSEILSADPSIQVVGTATNGKEAIDQAIALKPDVITMDYEMPMMDGITAVRHIMQRCPTPVLMFSSLTHEGARVTLDALDAGAVDFLPKNFEDISRNPEKVKQLLCEKVHSISRSNRRSLFSAPAPAPTPVAAPAPTSASTFGRPAPAPVARPAAAPVRASAPAA

SEQ ID NO: 168367 - protein, 206 aa, Unknown
  Bacterial polypetide isolated from the Sargasso Sea
SKHRVCSSEKTTGKRKATGQEPLVAIGASTGGTEVLREILSSLPPTMPGIVIVQHMPKAFTGSFANSLDRVSELEIKEAEDGDMVESGKAFLAPGDAHMILKTNGSSYQVKLDTGELVNRHRPAVDVLFRSVASIAGSAAVGVILTGMGNDGAKGMTEMHDQGALTLAQDQESCVVYGMPKVAVESGAVDESLTPEQIVKRLIEWS

SEQ ID NO: 168368 - protein, 125 aa, Unknown
  Bacterial polypetide isolated from the Sargasso Sea
QEPLIAIGASTGGTEVLREILSSLPPNLPGIVIVQHMPKAFTGSFANSLDRVSELEIKEAEDGDMVESGKALLAPGDAHMILKTSGSSYQAQLDTGELVNRHRPAVDVLFRSVASIAGSAAVGVI

SEQ ID NO: 168369 - protein, 128 aa, Unknown
  Bacterial polypetide isolated from the Sargasso Sea
LVLPGRVLIAPGGKHLVLRRDGQQYYVETLDGPLVSRHKPSVDVLFRSAAKAAGSNAVGIIMTGMGDDGARGMREMADCGAATYAQDEASSVVFGMPKEAIHMGGVGDVLPLDHISAVIEQYASREPQ

SEQ ID NO: 168370 - protein, 188 aa, Unknown
  Bacterial polypetide isolated from the Sargasso Sea
MAIKVLVVDDSSFFRRRVSEIVNQDPDLEVIAVAVNGKEAVDMAAKLKPQVITMDIEMPVMDGISAVRAIMANNPTPILMFSSLTHDGAKATLDALEAGALDFLPKRFEDIATNKDEAILLLQQRIKALGRRRIYRPSIAPLPASSSESRRPIGGAESTLAARRPLTSRLSNHSATNSALTLSQRCFC

SEQ ID NO: 168371 - protein, 179 aa, Unknown
  Bacterial polypetide isolated from the Sargasso Sea
PGGTQALEHILTALPRVCPGIIIVQHMPERFTAAFAERLNGLCQIEVLEARHGDRVMPGRALIAPGGRHMLLKRSGAQYMVEVVDGPPVSRHKPSVDVLFRSTARAAGANATGIIMTGMGDDGARGLREMFEAGAQTLGQDEASCVVYGMPKEAKKLGAVGREIPLEQIPAQILRAERA

SEQ ID NO: 168372 - protein, 76 aa, Unknown
  Bacterial polypetide isolated from the Sargasso Sea
MAVKVLVVDDSSFFRRRVSEIITQDPMLTVIDTAQNGREAVDKAIQLRPDVITMDIEMPVMDGISAVREIMAKCPT

SEQ ID NO: 168373 - protein, 279 aa, Unknown
  Bacterial polypetide isolated from the Sargasso Sea
MAVKVLVVDDSGFFRRRVTEILAGDPQIQVVGTANNGREAIEQTLALHPDVITMDYEMPVMDGIEAVRQIMQRCPTPVIMFSSLTYEGARVSLDALDAGAADYLPKNFEDISRNPDKVRQLLCERVQGLARTNRRSLGLSNTHHAQPASTLSTPARSISPTPAAPPPRPAAAPTTPAKTSPAPRKRSYKLVAIGTSTGGPVALQKVLTQLPANFPAPLLLVQHMPAAFTKAFAERLDKLCRISVKEAEDGDTLRPGRALLAPGGKQMMVDSRGVVRILP

SEQ ID NO: 168374 - protein, 227 aa, Unknown
  Bacterial polypetide isolated from the Sargasso Sea
PRQSASSVLGGTSTPAQPAPAPVRSSPATSIRPSGKQYKLLLIGTSTGGPVALQKILTQFPANYPHPILLIQHMPAAFTPAFANRLNGLCKIEVKEAANGDVLRPGCAYLAPGGMQMMVERAGVTGRVKVLAGSAEMNYKPCVDITFASASKSYGGDVLAVVLTGMGADGREGARMLKSAGATIWAQDEASCVVYGMPQAVASAGIATQSISLDNMAESILKESARG

SEQ ID NO: 168375 - protein, 250 aa, Unknown
  Bacterial polypetide isolated from the Sargasso Sea
MSKIRVLSVDDSALMRQIMTEIINSYSDMEMVATAPDPLVARDLIKKYNPDVLTLDVEMPRMDGLDFLEKLMRLRPMPVVMVSSLTGKGSEVTLRALELGAIDFVTKPQLGIREGMLAYSEMIAEKVRTASRARLTAHKPLAAPVTLKAGPLLSSEKLIAIGASTGGTEAIRHVLQPLPLSSPAVIITQHMPPGFTRSFAERLNKLCHIAVKEAEDGERVLPGHAYIAPGDKHMELARSGANYQIKIHDG

SEQ ID NO: 168376 - protein, 271 aa, Unknown
  Bacterial polypetide isolated from the Sargasso Sea
DPLFAMDKLARQWPDVIVLDIEMPRMDGITFLKKIMHERPTPVVICSTLTEKGAETTMQAMSAGAVEIITKPKMGLKTFLQQSSAELLRAVRAAAQARVRKLAVVASPVSTPAKLSADTILAAGNKESMAQTTERIIAMGTSTGGTQALEQVLTALPKVCAGIVIVQHMPEKFTASFAERLNNLCQIEVREARHDDRVMPGLALIAPGGKHMLLKRSGAYYKVEVIDGPQVNRHRPSVDVLFRSVARFAGRNAVGIIMTGMGDDGARGMKE

SEQ ID NO: 168377 - protein, 255 aa, Unknown
  Bacterial polypetide isolated from the Sargasso Sea
MAVKVLVVDDSSFFRRRVSEILEQDSGIEVIGFAVNGREAVDKTAQLRPDVITMDVEMPVLDGISAVKEIMASNPTPILMFSSLTRAGASATLDALDAGAMDFLPKKFEDIARNNDDAIKLLQNKVKEIGRQRIGRITRAPAAPSIKPAPSTSERFANKPIVQPARSFKSASPTPSSSASTRASGKQYQLIAIGTSTGGPVALQTILTQLPANFPHPILLIQHMPAAFTHAFATRLDSLCKIKKEEAQQGDRLQP

SEQ ID NO: 168378 - protein, 358 aa, Unknown
  Bacterial polypetide isolated from the Sargasso Sea
MTKKPLPPYKVLIIDDSAVVRQTLSGIYSSDPELEVVGTAPDALIALKKIGELKPDVLSLDVQMPRMDGLTFLERLMKSNPMPVVMVSALTTEGSMEALRSLELGAVDIVEKPKLDVREGLEEISIQICDKIKAAAQARLKTARQLYLNPPKKLSADAILPASSSVSKNKGKESLIAIGSSTGGTIALRELLTPLPADMPGIVIVQHMPKAFTKSFSESLDKDCSLKVCEAGEGEKVERGKVLVSPGDQHMMLKLEGNGYAVTMNSGELVNRHRPSVDVLFRSVANLAGSNSIGVILTGMGDDGAKGMFEMHKAGSYNLAQDEESCVVYGMPRKAVENGAVDEVLNLEGIFKRLIELS

SEQ ID NO: 168379 - protein, 351 aa, Unknown
  Bacterial polypetide isolated from the Sargasso Sea
MTIKVLVVDDSALIRNLLGKMIEADPELSLVGMAADAYMAKDMVNQHRPDVITLDIEMPKVDGLTFLDRLMKARPTAVVMISSLTEEGADATFNALGLGAVDFIPKPKLDSPQDFNEYQDLILEKIKSAANAKLKTQRTQPVAVTPPSLKPTLSNRVINTQLLAIGASTGGTEAILYLLQQFPAVMPPIVITQHMPPGFTRTFAERLNKLTRLNVKQADDGERLLPCYVYIAPGDQHLEVIKVGGSFKTRLTQGDKVSGHRPSVDVLFNSVAACAGTNTTAAILTGMGKDGADGMALIDQQGGKTFAQGEQSCVVFGMPREAIKRGVIHHVVELPQLADKMLNYLASLKRD

SEQ ID NO: 168380 - protein, 354 aa, Unknown
  Bacterial polypetide isolated from the Sargasso Sea
MSEPAKVLIIDDSAVARQTLKNILSEDPELEVVGTAPDALIALKKISELNPDVLTLDVQMPKMDGLTFLERLMKSRPMPVVMVSSYTQEGSETAMRSLELGAVDIIEKPKFEVREGLNEIAILITDKVKAAAQAKMKTARQIFMQTSPKQSTEVVLPKTTGKRKAAGQEPLIAIGASTGGTEVLREILSSLPSTMPGIVIVQHMPKAFTGSFANSLDRVSELEIKEAEDGDRVESGKALLAPGDAHMILKTNGSSYQVKLNTGELVNRHRPAVDVLFRSVASSAGSAAVGVILTGMGNDGAKGMTEMHDQGALTLAQDQESCVVYGMPKVAVESGAVDESLTPEQIVSRLIEWS

SEQ ID NO: 168381 - protein, 376 aa, Unknown
  Bacterial polypetide isolated from the Sargasso Sea
MVFKVLVVDDSTFYRRRVKEILDGDRELEVVGEARNGRDALEKAEALKPDVITMDVEMPVMDGISAVKAIMDKRPTPILMFSSLTHHGAQATLDALEAGALDFLPKKFEDIAQDRKDASRLLCTKVRLIARRGIGLKRPSFRSTEARKLPDNAPKQAFFKTSGLLSGHKDAAKQPTVSSVRATGKHYKCLAIGASTGGPVALQKVLSPLPAEFPYPILLVQHMPGTFTTAFAQRLDTNCKIRVKEAEHGDILKPGHAYLAPGGKQMLLETIGANKRIAIVDASASDKVNYKPSVDLTFSSLAKAYGGDVLGIILTGMGADGREGCRMLKEKGATIWAQDQDSCVVYGMPQAVAVANISSKNINIDDMSSCVQTEMR

SEQ ID NO: 168382 - protein, 353 aa, Unknown
  Bacterial polypetide isolated from the Sargasso Sea
MKQIKVMLVDDSAVVRQVLQAILEQEPDIKVIATASDPLFALEKLKKEWPDVIVLDVEMPRMDGITFLTKIMAEHPTPVVICSSLTEKGAETTLQAMAAGAVDIITKPTVGLKSFLQESAQELAMAVRAAAQANVRRLAKVPAPSVAPKLNADAIMPAASQHAMAQTTERIVAIGTSTGGTQALEAVLTTLPRVCPGIVIVQHMPEKFTASFAERLNSLCQIEVREAKSNDRVIPGLALIAPGGKHMLLKRSGAYYHVDVMDGPLINRHRPSVDVLFRSVAKFAGGNATGIIMTGMGDDGARGLREMLEAGANTFAQDEASCVVFGMPKEAIKLGAARHVLPLQDIHHAIVGR

SEQ ID NO: 168383 - protein, 358 aa, Unknown
  Bacterial polypetide isolated from the Sargasso Sea
MTIRVLIVDDSALVREVLTQMLSKAEDIEVIGAAFDPIFAMQQMKKCWPDVIILDIEMPRMDGLTFLKKIMAEHPTPVIICSSLTEEGAMITLEAMSAGAISIVTKPSVGIKSFLQQSANDFIQEIRGAVGAKLRNLLPGAAPLPVTPRRNADEVLSPPAERISFRTTEKIVALGTSTGGTQALEYLLSRLPATCPGIAIVQHMPARFTASFAERLNGLSQLEVKEAETGDRLLPGVAIIAPGGKHLLIQRSGTQYLAEVKEGPPVSRHCPSVDVLFRSVAVSAGRNALGVIMTGMGDDGARGMRELHDTGARTIAQDEASCVVFGMPKEAIAHGGVDEVMSLTHITQTLSRPDLRGV

SEQ ID NO: 168384 - protein, 371 aa, Unknown
  Bacterial polypetide isolated from the Sargasso Sea
MAVKVLVVDDSSFFRRRVSEIITQDPMLTVIDTAQNGREAVDKAIQLRPDVITMDIEMPVMDGISAVREIMAKCPTPILMFSSLTHEGAKATLDALDAGALDFLPKKFEDIARDKDEAVRLLQQRVKEISRKRFLMAAPARPKAPEPAARSPLGSPIARPAARQAEPPRAMPAAAFKRSGKSYQLVAIGTSTGGPVALQNVLTKLPGDFPHPILLIQHMPATFTAAFAARLNGLCQIGVKEAEDGDVLKPGHAYLAPGGKQMLLEGRGAGARIRIVDGNDKVNYKPCVDITFASAAKTYADKVLAIVLTGMGADGRDGARLLKEQGSTIWAQDEASCVVYGMPQAVAKAGIATESLPLDRVAQRILVELGR

SEQ ID NO: 168385 - protein, 342 aa, Unknown
  Bacterial polypetide isolated from the Sargasso Sea
MAIRVLVVDDSSFFRRRLTEILSQDAELEVIDTANNGKEAVEKALALRPDVITMDIEMPVMDGISAVREILKVQRTPILMFSSLTHEGAKATLDALEAGAIDFLPKKFEDIARDKAEAADVLRQRVKTVARRRVISRPSGLTGSASSALASRASSTFATGSTAVPARAPLAQSLAARALAERAELQNKVAERAETQRGGSFESSGKNYKLVAIGTSTGGPVALQQIITALPANFPLPIVLIQHMPAAFTGAFAARLNGLAKIEVKEAADNDILRPGVAYLAPGGKQMLVDGNENQARLRVREDDSPRITFKPSVDITFGTAAKVFNDKVLAIVLTGMGSDGR

SEQ ID NO: 168386 - protein, 350 aa, Unknown
  Bacterial polypetide isolated from the Sargasso Sea
MAIKVLVVDDSALIRSLLGRMVESDPELCLVGMAVDAYMAKDMVNQFRPDVITLDIEMPKVDGLTFLDRLMKARPTAVVMISALTEEGADATFNALALGAVDFIPKPKLDSPQGFNEYQDLILEKIKSAAKAKLQSLPAPTITVKPSLKPALNQRTVNTQLVAIGASTGGTEAILHLLQQFPAVMPPIVITQHMPAGFTRTFAERLNKLTRLNVKQAEEGERLLPCYAYIAPGDQHLEIIKVGGSFKAKLSQGDKVSGHRPSVDVLFHSVAQYAGANATAVILTGMGKDGADGMEAIDKQGGKTFAQGEQSCVVFGMPKEAIKRGAIHHIVELPQLGDKLLQYLASLKRD

SEQ ID NO: 168387 - protein, 374 aa, Unknown
  Bacterial polypetide isolated from the Sargasso Sea
MAIKVLVVDDSSFFRRRVSEIVNQDPELEVIATAANGAEAVKMAAELNPQVITMDIEMPVMDGITAVREIMAKCPTPILMFSSLTHDGAKATLDALDAGALDFLPKRFEDIATNKDEAILLLQQRVKALGRRRIFRPVARPSVAPIPPRPNTGSVLGNVTTPVQSAPAPVRTSPVSSIRASGKQYKLLLIGTSTGGPVALQKILTQFPANYPHPILLIQHMPAAFTPAFANRLNGLCKIEVKEAANGDILRPGCAYLAPGGMQMMVERTGVTGRIKVLAGSAEMNYKPCVDITFASASKAYGGDVLAVVLTGMGADGREGARMLKAAGATIWAQDEASCVVYGMPQAVASAGIATQSISLEHMAESILKESARG

SEQ ID NO: 168388 - protein, 358 aa, Unknown
  Bacterial polypetide isolated from the Sargasso Sea
MNASGNTVQVLIVDDSALVRKVMTEILSSDSMIEVVGTAPDAQIATRQIRKLNPDVITLDIQMPGMNGLDYLERLMKSQPRPVVMVSSLTQKGAPEALKALELGAVEVIGKPDTTVREGMEEISIQIVDAVKAAAQAKLKKNTDIFLKAPEKLTADVIIPKNPPKHLSHSIEPIIAIGASTGGTEALMTLLTQLPESMPGIVMVQHMPGSFTKSFAERLDHHCRLTVKEAESGERIRPGTAYLAPGDQHLLLKNQDKGYCVELNDGPLVCRHRPSVDALFRSTAQVARHHATGVILTGMGDDGAQGMLEMKESGSFNIAQDEASSVVYGMPKMALSKGGVDEVHSLNEIPHVLVKHSH

SEQ ID NO: 168389 - protein, 363 aa, Unknown
  Bacterial polypetide isolated from the Sargasso Sea
MTAVQKIKVLCVDDSALIRSLMTEIINSQPDMTVCATAPDPLVARELIKQHNPDVLTLDVEMPRMDGLDFLEKLMRLRPMPVVMVSSLTERGSEITLRALELGAVDFVTKPRVGIRDGMLDYAEKLADKIRAASRARVRQAPQPQAAARTADSHSAAPMINNPLVSTEKLIIIGASTGGTEAIREVLTPLPPDAPAVLIAQHMPPGFTKSFAQRLNGLCRIAVKEAEHGERVLPGHAYIAPGHAHLLLARSGANYIAQLSDEPPVNRHRPSVDVLFRSAATHAGKNALGVILTGMGRDGAAGLLEMKRAGAHTFAQDEASCIVFGMPREAIALGGADEIVPLAEMSRRVMARLATMGDRVQRV

SEQ ID NO: 168390 - protein, 188 aa, Unknown
  Bacterial polypetide isolated from the Sargasso Sea
MVFKVLVVDDSTFYRRRVREILDGDRELEVVGEARNGRDALDKAEALKPDVITMDVEMPVMDGISAVKVIMDKRPTPILMFSSLTHHGAQATLDALEAGALDFLPKKFEDIAQDRKDASRLLCTKVRLIARRGLGLKRPSFRNIESRKLPDNAPKQAFFKTSGLLSGHKDAAKQPTVSSVRPTREASI

SEQ ID NO: 168391 - protein, 348 aa, Unknown
  Bacterial polypetide isolated from the Sargasso Sea
MPIKVLVVDDSALIRQILSEIVTRDPGLTLVGAAPDAYAAKRMVQEFRPDVITLDIEMPKVDGLRFLEVMMKAMPTPVVMISTLTERGADATLRALELGAVDFMAKPKLGVAQGMAEYAAVIVEKIKAAAHSRLGQPTQTRCTKHASMRYTGTEKLIGIGASTGGTEAIKDVIMHFPRNAPATIISQHMPPGFTTTYAKRLDSLCEITVREAHGGERLLPGFAYLAPGNKHLKVERSGADYRLTLDDGPKVSGHKPSVDVMFDSLAEHAGANAVGVLLTGMGRDGAKGLKSMHTKGSVTFCQDEKTCVVYGMPKVAVEMKAASFIKPLEDISDAILDTLEALGAGSRL

SEQ ID NO: 168392 - protein, 374 aa, Unknown
  Bacterial polypetide isolated from the Sargasso Sea
MAIKVLVVDDSSFFRRRVSEIVNQDPELEVIATASNGAEAVKMAAELNPQVITMDIEMPVMDGITAVREIMAKCPTPILMFSSLTHDGAKATLDALDAGALDFLPKRFEDIATNKDDAILLLQQRVKALGRRRIFRPVVRPTTPTPPPRQSASSVLGGASTHAQPSPAPVRSSPATSIRPSGKQYKLLLIGTSTGGPVALQKILTQFPANFPHPILLIQHMPAAFTPAFANRLNGLCKIEVKEAANGDVLRPGCAYLAPGGMQMMVERAGVTGRVKVLAGSAEMNYKPCVDITFASASKAYGGDVLAVVLTGMGADGREGARMLKSAGATIWAQDEASCVVYGMPQAVASAGIATQSISLDNMAESILKESARG

SEQ ID NO: 168393 - protein, 378 aa, Unknown
  Bacterial polypetide isolated from the Sargasso Sea
MVVKVLVVDDSGFFRRRVSEILSADPSIQVVGTATNGREAIDQALALKPDVITMDYEMPMMDGITAVRNIMQRCPTPVLMFSSLTHEGARVTLDALDAGAVDFLPKNFEDISRNPEKVKQMLCEKVHSIARSNRRFSAAAVAPAPTAASPSAAPTSRPAVSTRPAAPAPAVPARPAAAAGGAAPTSSAPKRKAYKLVAIGTSTGGPVALQRVLTQLPANFPAPLVLIQHMPAAFTKAFAERLDKLCRIQVKEAEDGDILRPGLALLAPGGKQMMVDARGAIKILPGDERLNYKPCVDITFGSAAKSYGDKVLAVVLTGMGADGREGARLLKQGGSQVWAQDEASCVIYGMPMAVVKANLADAVYGLDDIGRHLTEACQ

SEQ ID NO: 168394 - protein, 351 aa, Unknown
  Bacterial polypetide isolated from the Sargasso Sea
MTIKVLVVDDSALIRNLLGKMIEADPELSLVGMAADAYMAKDMVNQHRPDVITLDIEMPKVDGLTFLDRLMKARPTAVVMISSLTEEGADATFNALGLGAVDFIPKPKLDSPQDFNEYQDLILEKIKSAANAKLKTQRTQPVAVTPPSLKPTLANRVINTQLLAIGASTGGTEAILYLLQQFPAVMPPIVITQHMPPGFTRTFAERLNKLTRLNVKQADDGERLLPCYVYIAPGDQHLEVIKVGGSFKTRLTQGDKVSGHRPSVDVLFNSVAACAGANTTAAILTGMGKDGADGMALIDQQGGKTFAQGEQSCVVFGMPREAIKRGVIHHVVELPQLADKMLNYLASLKRD

SEQ ID NO: 168395 - protein, 258 aa, Unknown
  Bacterial polypetide isolated from the Sargasso Sea
MINVLIIDDSPLIRGLLTEILQQANDINVVGCAEDPYQAREMIKKLNPDVLTLDVEMPKMDGISFLKNLMRLRPMPVVMISTLTQKGSPITLEALELGAVDFIAKPTSNVRAQLSHYASLVQQKVRIAAGARIRSFKKAPPDTKPISSETEFLLNKVIAIGASTGGTEAIKEVLIKMPVNCPPIVITQHIPPVFSASFAERMDRTCLINVKEAQHGDKLSPGWAYIAPGGLHLSVKKRGIALYCQLDDGEPVNRHKPA

SEQ ID NO: 168396 - protein, 180 aa, Unknown
  Bacterial polypetide isolated from the Sargasso Sea
MFQDNPLLAQLKQQLHSQTPRVEGVVKGTEKGFGFLEVDAQKSYFIPPPQMKKVMHGDRISAVIHTEKERESAEPEELIEPFLTRFVGKVHKKDDRLSIVPDHPLLKDAIPCRADRSVSHDFKEGDWAVAEMRRHPLKGDRGFYAELTQFITFSDDHFVPWWVTLARHNLKKKPRTACDR

SEQ ID NO: 168397 - protein, 595 aa, Unknown
  Bacterial polypetide isolated from the Sargasso Sea
QMKKVMHGDRIVAVIHTEKDRESAEPEELIEPFLTRFVGKVQGKNDRLSIVPDHPLLKDAIPCRATRGVEHEFKEGDWAVAEMRRHPLKGDRTFYAELTQFITFADDHFVPWWVTLARHNLEKEAPDGVATEMLDEGLVREDLTALNFVTIDSASTEDMDDALYAEEQADGTLQLTVAIADPTAWIAEGSKLDKTAKIRAFTNYLPGFNIPMLPRELSDDLCSLRANEVRPVLACRMSITADGTIEDNITFFAATIESKAKLAYDNVSDWLEGTGEWQPENDAIAEQIRLLHRICLSRGEWRHNHALVFKDRPDYRFVLGEKGEVLDIVAEPRRIANRIVEESMIAANICAARVLRDKLGFGIYNVHMGFDPANADALAALLKTHGMHVDAEEVLTLEGFCKLRRELDAQPSGFLDSRIRRFQSYAEISIEPGPHFGLGLEAYATWTSPIRKYGDMINHRLLKAVIKGETIARPQDDTTVQMAERRRLNRMAERDVGDWLYARFLSDKAGTDTRFAAEIIDVSRGGMRVRLVDNGAVAFIPAPFLHAVRDELVCSQESGTVQIKGEVVYKVTDVIDVTIAEVRMETRSVIARPAA

SEQ ID NO: 168398 - protein, 226 aa, Unknown
  Bacterial polypetide isolated from the Sargasso Sea
MDLASLRAQQLELASSLIREDRLKNDPPDLIGGADVGFEQGGEVTRAAMVLLKYPTLELVEYKVARIATTMPYIPGFLSFRETPALMAAWQLLSHKPDLLFVDGHGISHPRRLGVASHFGLLVDVPTIGVAKKRLCGKFEPLAAEPGALVPLLDKGEQLAWVWRSKARCNPLFISTGHRVSMDSALAWVQRCMNGYRLPEPTRWADAVASERPAFTRLAAKAPHIG

SEQ ID NO: 168399 - protein, 176 aa, Unknown
  Bacterial polypetide isolated from the Sargasso Sea
MSVNVILGIDPGSRLTGYGVVRQSGMKFEYVASGCIRLNTDDLLPERLLDIFNGVSEIIAQTRPTIFAIEQVFMARNADSALKLGQARGAAIVAAKHAGLEVFEYSARQVKQSVVGTGAADKAQVQHMVRTLLKLPANPQADAADALAVALCHGHTQQSLVSLAGQARKTVRGRLR

SEQ ID NO: 168400 - protein, 172 aa, Unknown
  Bacterial polypetide isolated from the Sargasso Sea
MALILGIDPGSRRTGYGVVDVVGNRSRAVAFGTITTSHKEIPPRLGEIFAGIDQVVKEYGPAEVSIEKVFMARNADSALKLGQARGAAIAAVMQACVPVFEYSARQVKQAVVGKGGAEKNQVGEMVKYLLKLDQRPQEDAADALAIALCHAHMRLSLARMAGATSVRRGRVR

SEQ ID NO: 168401 - protein, 119 aa, Unknown
  Bacterial polypetide isolated from the Sargasso Sea
MVILGIDPGSRITGYGLIARKQGKLVYVASGCIRVGTADLPSRLANIFTGVGDIIRQYKPDQFAIEQVFMAKNPDSALKLGQARGAAIVAATQAQIPVAEYSARQIKQSVVEKVVQIKR

SEQ ID NO: 168402 - protein, 138 aa, Unknown
  Bacterial polypetide isolated from the Sargasso Sea
MSIILGIDPGSRITGYGVIRIVAGKAEYLGSGCIRTDLGELPSRLKQVYDGVSEIITQFKPDEFAIERVFMARNADSALKLGQARGSAIVAAVNALLPVSEYSATQIKQAVVGTGGAAKEQVQHMVTHLLKLSATPQA

SEQ ID NO: 168403 - protein, 136 aa, Unknown
  Bacterial polypetide isolated from the Sargasso Sea
MSIILGIDPGSRMTGIGIISSENNNINHIHHDVIKTKTDCLSERLHIIYQGIYDAISQYQPQMTAIEEVFFSRNAQSALKLGQARGAAITACANHGFSVAEYSARQIKQAVVGYGAASKTQIQQMIKIMLHLDTTP

SEQ ID NO: 168404 - protein, 171 aa, Unknown
  Bacterial polypetide isolated from the Sargasso Sea
MTLILGIDPGSRITGYGVVRDTGRGCEYVASGCIRTGNGPLAERLQIVFRGVSEVIRIHGPVTMGIEQVFMARNADSALKLGQARGAAIVAAVEAGLEVSEYTATQVKQAVVGTGAADKQQVQMMVMHLLKLVQKPQIDASDALGIALCHAHHRQSLIPHGLAGAKRRGGR

SEQ ID NO: 168405 - protein, 172 aa, Unknown
  Bacterial polypetide isolated from the Sargasso Sea
MVILGIDPGSRITGYGLIARKQGKLVYVASGCIRVGTADLPSRLANIFTGVGDIIRQYKPDQFAIEQVFMAKNPDSALKLGQARGAAIVAATQAQLPVAEYSARQIKQSVVGKGGADKTQVQHMVKHLLSLSGAPQADAADALAVALCHAHTEQSLLNMAGQARKTVRGRLR

SEQ ID NO: 168406 - protein, 167 aa, Unknown
  Bacterial polypetide isolated from the Sargasso Sea
FGVLERHGHKLVYVASGTIKSNGNADLPSRLKTLYDGVSELVSTYRPDCASIEKVFVNVNPQSTLLLGQARGAVICGLMSGNLPVFEYTALQLKQAVVGYGRANKDQVQEMVVRLLNLAGRPGADASDALGVAICHAHGGETLAAMAGLAPQLAQKGLRVRRGRLVG

SEQ ID NO: 168407 - protein, 172 aa, Unknown
  Bacterial polypetide isolated from the Sargasso Sea
MIKILGIDPGSINTGYGIIESKGNHNKHINNGVIKVKAETLAEKLKIINSEVTTIIKIFEPDEIAIEKVFMHRNADSALKLGQARGAAITACAMKGIPLFEYSANQVKQACVGKGHATKEQVQHMIKILLCLEKKPLADAADALAIALCHANSRESLLRMQGVSGMKYGRLQ

SEQ ID NO: 168408 - protein, 180 aa, Unknown
  Bacterial polypetide isolated from the Sargasso Sea
MRILGIDPGLRVTGFGVIDVSGHRLAYVTSGVIRTPTADLATRLGTIFQGVSTIVREHAPDQAAIEKVFVNVNPQSTLLLGQARGAAICGLVAGGLPVAEYTALQLKQAVVGYGRATKTQMQEMVTRLLNLSGQPGSDAADALGMAICHAHGGDTLSTLGGLAPALAKKGLRVRRGRLVG

SEQ ID NO: 168409 - protein, 173 aa, Unknown
  Bacterial polypetide isolated from the Sargasso Sea
MAIILGIDPGSRLTGYGVVRQTGQKFEYIASGCIRLTLNDIPDRLKQIFDGVSEIIQQTQPDVFAIEQVFMARNPDSALKLGQARGAAIVAAKNAGLEVFEYSARQVKQAVVGTGAADKTQVQHMIRTLLKLPGNPQADAADALAVAMCHGHTHQSLLHMAGQATKTVRGRLR

SEQ ID NO: 168410 - protein, 180 aa, Unknown
  Bacterial polypetide isolated from the Sargasso Sea
MRILGIDPGLRVTGFGVIDQHGHRLSYVASGTIKTADADLPSRLGTIFEGISTLIRQHSPDQSAIEKVFVNVNPQSTLLLGQARGAAICGLVAGGVPVAEYTALQLKQAVVGYGRATKEQMQQMVVRLLNLSGVPGTDAADALGMAICHAHGGSTLSTLGGIAPSLAKKGLRVRRGRLVG

SEQ ID NO: 168411 - protein, 173 aa, Unknown
  Bacterial polypetide isolated from the Sargasso Sea
MAIILGVDPGSRITGYGVIQCQGRQQLYLGSGCIRTSGEDLPLRLKQIFDGISEIIRQYQPDEFAIERVFLAKNADSALKLGQARGAAIVAATVANLPVAEYSATQIKNAVVGTGRAKKEQVQHMIQQLLKLPAAPQADAADALGVAVCHYHTNQSLVALSGRATTRTYGRYR

SEQ ID NO: 168412 - protein, 79 aa, Unknown
  Bacterial polypetide isolated from the Sargasso Sea
MQVTFLGTSSGVPTLNRNVSAMVLKPPQRSELWLFDCGEGTQHQFIRSNLKLSQIKKIFITHMHGDHIYGLPGLLASMD

SEQ ID NO: 168413 - protein, 222 aa, Unknown
  Bacterial polypetide isolated from the Sargasso Sea
DHLFGLPGLLCSRSMAGNVQPLTLYGPKGLREFTETALRLSGSWTDYPMEIVEITAGEIVDDGLRKVTAYPLAHPLECYGFRIQEHDKPGALDANALKAAGVKAGPWFQDLKAGKTIVLEDGRTIHGADFLAPATRGKSVAIFGDTGPCASAIELARGVDVMVHETTLDASMEEKANSRGHSSTRQAAQLALDAGVGRLIMTHVSSRYDEKGCQRLLEECKA

SEQ ID NO: 168414 - protein, 290 aa, Unknown
  Bacterial polypetide isolated from the Sargasso Sea
NVSAVALRLPQRADLWLFDCGEGTQHQFLRSELRVSQLRRIFITHMHGDHVFGLPGLLASLGMAGTCDGVDLYGPEPLEAFVLSALQHSATRIGYPLRFHPVEAAASSGEPLLVDGEFSVSCTPLKHRVPAFGYRIQQSERPGRFDIAKAKAMRLPPGPEFARLKAGETVTFADGRRIDGRELCGPSQPGCSVVYCTDTVFSERAVALAQGADLLIHEATFSHRDAAMAYQRQHSTSTMAAQTAAEAGVQQLALTHLSPRYVPGATESPDDLLQEAKAIFPNTVLAKDFL

SEQ ID NO: 168415 - protein, 215 aa, Unknown
  Bacterial polypetide isolated from the Sargasso Sea
MQVTFLGTSSGVPTRARNVSAVALRLPQRSEMWLFDCGEGTQHQFLRSDLRLSQLRRVFITHMHGDHIFGLPGLLASLGLAGSSPAGVDLYGPDPLESYLNGVLRTSSTRIGYPLEVHRVRSAAEQGSLLFEDDDFTVRCTPLTHRVPAYAYRIEQKPLAGRFDIQKARELNIPPGPVYARLKRGETVKLEDGRTIDGTSLCGEERPGVSVVYCT

SEQ ID NO: 168416 - protein, 125 aa, Unknown
  Bacterial polypetide isolated from the Sargasso Sea
MDIQFLGTGAGQPSKARNVSSLALKLLDEINEVWLFDCGEGTQNRILETTIRPRKVSKIFITHLHGDHIFGLPGFLSSRAFQANEEQTDLEIYGPQGIKSFVLTSLRVSGSRLPYRIHFHEFDQD

SEQ ID NO: 168417 - protein, 218 aa, Unknown
  Bacterial polypetide isolated from the Sargasso Sea
GLMKKLGYQFQQVALLEQALTHRSCKGEHNERLEFLGDALLSMVIAEALYKHFPKAREGDLTRMRSSLVKGITLAEIAKELELAEYLRLGPGEMKSGGLRRESIQADAVEAILGAIFLDSGIDACKERILSWFGSRLTGIQPGVQKDSKTQLQEYLQGRRLALPLYEVIDTQGEDHDQVFTVRCTVQGRAPVIASGNSRRKAEQDSARMLLEQIKNDH

SEQ ID NO: 168418 - protein, 256 aa, Unknown
  Bacterial polypetide isolated from the Sargasso Sea
MSLDALQQRLGYRFSKPELLQQALTHRSHSAMHNERLEFLGDSILNCAVADMLYGMFGKLDEGDLSRVRANLVKQQALYEIAQMLQLPDALRLGEGELKSGGFRRPSILADALEAIFGAVFLDGGFDAARTLIRKLYIPILEQVDPRTLGKDAKTLLQEYLQGHKIALPLYTVVATHGAAHNQQFEVECSIPKLEIRVSGSGASRRAAEQSAAKLALDEAHRLVPQLVKRSRAERTGKTRKQATPPDPQLSLRLKE

SEQ ID NO: 168419 - protein, 225 aa, Unknown
  Bacterial polypetide isolated from the Sargasso Sea
MKKNVTELYNKIGYEFSDQGLLEQAMTHRSHKGQHNERLEFLGDSILSFVIANALYAKFPKAREGDLSRMRSTLVRGQTLAEFGVEFGLGDYLRLGPGELKSGGFRRESTLADAVEAIIGAAFLDSGIERCSELILSWYESRLDAISPGLNQKDPKTLLQEHLQGRKLPLPGYTVVDTKGQAHNQTFTVECIVDGMDSIISVGSSRRKAEQKAAEKALKIIKNES

SEQ ID NO: 168420 - protein, 228 aa, Unknown
  Bacterial polypetide isolated from the Sargasso Sea
MQGIDKYRRLYKAIGYTFTNEALLEQALTHRSAAKQHNERLEFLGDAILGMIVGETLFKRFPTVPEGKLTRMRSTLVKGDTLAELAKEASVGELLNLGPGELKSGGHRRSSILADAVEAILGAIYLDSGMDEVRGVIDRLWETRINKLDPNAHPKDSKTRLQEFLQGRKQALPTYEVLSISGKDHAQTFEVSCQVESLPEAVVASGNSRRKAEQEAARLTLEKLDDNA

SEQ ID NO: 168421 - protein, 223 aa, Unknown
  Bacterial polypetide isolated from the Sargasso Sea
MNIKMNRLQSRLGHVFQDQELLTRALTHRSAGSRHNERLEFLGDSILSLVIADDLFHRFPQAAEGDLSRMRATLVREKTLAELGREFDLGDHLILGPGELKSGGFRRESILADTVEAVIGAVYLDTNLETVRTLLLGWYASRLDEIKPGIEQKDPKTRLQEILQGSRKSLPTYTVTNVKGEAHNQEFTVQCDVEGLDGPLVGVGTSRRKAEQAAAQQALEKLS

SEQ ID NO: 168422 - protein, 226 aa, Unknown
  Bacterial polypetide isolated from the Sargasso Sea
MEPIKNLPRLCRTLGYEFKNIDLLTQALTHRSAANKHNERLEFLGDSILSIVISDALYHQFPKATEGDLSRMRATLVRGDTLTLIAQAFKLGDYLFLGPGELKSGGFRRESILADAVEAIIGAIYLDSDLEVCRELLLKWYAERLSEIQPGVNQKDAKTLLQEYLQGLKKPLPDYQVINIEGDAHDQTFTVECRIDDLSESVIGVASSRRKAEQIAAAQVLELLKK

SEQ ID NO: 168423 - protein, 226 aa, Unknown
  Bacterial polypetide isolated from the Sargasso Sea
MEPIKNLPRLCRTLGYEFKNLELLTQALTHRSAANKHNERLEFLGDSILSIVISDALYHQFPKATEGDLSRMRATLVRGDTLTLIAKAFKLGDYLFLGPGELKSGGFRRESILADAVEAIIGAIYLDSDLEVCRKLLLHWYAERLAGIQPGVNQKDAKTLLQEYLQGLKKPLPDYQVINIEGDAHDQTFTVECRIDDLSESVIGVASSRRKAEQIAAAQVLELLKK

SEQ ID NO: 168424 - protein, 159 aa, Unknown
  Bacterial polypetide isolated from the Sargasso Sea
MNVEVYTDGSSKGNPGPGGFGIVMIFGGKRKEISQGFRLTTNNRMELMAIVIVLESLKSKKHPVHITSDSKYVIDSITKGWVYSWVKKNFKGKKNKDLWLRYIAAEKGYKLSFTWVKGHAGHIENERCDQLAVLAADLGPWQEDVGYNDGETSENDLFN

SEQ ID NO: 168425 - protein, 156 aa, Unknown
  Bacterial polypetide isolated from the Sargasso Sea
MRKTVAIYTDGSCLGNPGPGGYGVVLRYQQHQKEMSGGYKQTTNNRMELLAAIVGLESLKQPCDVDLTTDSQYVRLGITQWLANWKKNNWKTSQKEPVKNQDLWRRLDTACQGHKVNWHWVKGHAGHPENERCDELARVAATHQATEVDEGFQPSA

SEQ ID NO: 168426 - protein, 190 aa, Unknown
  Bacterial polypetide isolated from the Sargasso Sea
MHKLIAGVDEVGRGPLVGDVVTAAVILDPENPIEGLTDSKKLSEKKRVALAQEIREKALYWNIGRASPEEIDKLNILHATMLAMIRAVEGLPVKPDFVRVDGNRVPAWNFESEAVVKGDSLHAEISAASIIAKVERDNDMISLHEAYPQYNFAGHKGYPTKAHFEAIAEYGILDCYRKSFKPVKALLEEK

SEQ ID NO: 168427 - protein, 198 aa, Unknown
  Bacterial polypetide isolated from the Sargasso Sea
MLKVFDNKIFVCGIDEAGRGCLAGPVTAAAVVLPKKYTNPFIKDSKKLNKSDRLDLFNEIIECSLDYAIIDISPKIIDSINVLESTFLAMNNAISKIHNKIDYTIIDGNKFKTEKRIKYKCIVKGDNIYQSIAAASILAKVHRDKIMEDLHLNFPKYDWINNKGYGTSKHRLAIRNYGITKYHRKSFNLVEKQLKIKI

SEQ ID NO: 168428 - protein, 161 aa, Unknown
  Bacterial polypetide isolated from the Sargasso Sea
MTITAGVDEVGRGPLAGPVVAAAVILPEDHTIDGLRDSKKLSKLKREFLFPLIHEQAIGVGVGEVDVKTIDKINIREATFKAMQIALNGLSTVPEKALIDGHPLNNQVIPNEGIIGGDDKVDSIKAASIIAKVTRDRIMKEYAIIFPEYDFENNSGYGTKK

SEQ ID NO: 168429 - protein, 92 aa, Unknown
  Bacterial polypetide isolated from the Sargasso Sea
IIDGNFSLNYKSYKEKSIIKGDNKSLSIAAASIIAKVHRDRLMKKLSIKFQDFGWEKNAGYGTKKHIENIHRFGPTIHHRKTFEPIKSLIHN

SEQ ID NO: 168430 - protein, 112 aa, Unknown
  Bacterial polypetide isolated from the Sargasso Sea
GTKLSMKRVVDKFNLKNAELIIDGNFSLNYKSYKEQPIIKGDNKSLSIAAASIIAKVHRDRLMKKLSIKFQDFGWEKNAGYGTKKHIENIYRFGPTIHHRKTFEPIKSLIHN

SEQ ID NO: 168431 - protein, 118 aa, Unknown
  Bacterial polypetide isolated from the Sargasso Sea
MTNETDIEIFTDGACLGNPGPGGWGVLLRWRGTEKELSGGEKETTNNRMELMAAIQGLEALKRPGRVTLTTDSTYVKDGITKWIFTWKKNGWRSAAKKPVKNVDLWQRLDAAVAGHDV

SEQ ID NO: 168432 - protein, 58 aa, Unknown
  Bacterial polypetide isolated from the Sargasso Sea
MKITCGVDEAGRGPLAGPVVAAAVILPEEHQISGLNDSKKLTEKNRVKLYKEISDLAQ

SEQ ID NO: 168433 - protein, 136 aa, Unknown
  Bacterial polypetide isolated from the Sargasso Sea
MICGVDEVGRGPLVGAVVTAAVILDPNNPIIGLNDSKKLSEKKRLQLAEEIKAKALSWSLGRAEVHEIDSLNILHATMLAMTRAVQGLHIKPEWALIDGNRVPKDIGVQASAVVKGDALVPEISAASIWPKWRGRR

SEQ ID NO: 168434 - protein, 147 aa, Unknown
  Bacterial polypetide isolated from the Sargasso Sea
MKIIGIDEAGRGPLAGPVAIGAVQLDPNKEFAELNDSKKLSEKKRNEQELYIKENALYFDVKLIDNQIIDELGIKQATIFGMEEIIKSIQPIPDKVIIDGNDEINTSINYQSIVNGDQTEKPIMAASIIAKVARDKLMLEIDEEFPE

SEQ ID NO: 168435 - protein, 104 aa, Unknown
  Bacterial polypetide isolated from the Sargasso Sea
VVDKFNIENAYLLIDGNFSLNYKSFREQSIIKGDDKSLSIAAASIIAKVHRDRLMKKLSLKFQDFGWEKNAGYGTKMHIENIYRLGPTIHHRKTFEPIKSLIHS

SEQ ID NO: 168436 - protein, 188 aa, Unknown
  Bacterial polypetide isolated from the Sargasso Sea
MVEGPLAGPVISCGCHFKSYTILNEFKDFIEDSKKLSEKKRELSFRFLQSLKKENIIDFHLGIANVYEIDNLNILEATKLSMKRVIDKFNLKNAKLIIDGNFSLNYKSYKEQSIVKGDNKSLSIAAASIIAKVHRDRLMKKLSIKFQDFGWEKNAGYATKMHIENIHRFGPTIHHRKTFEPIKSLIHN

SEQ ID NO: 168437 - protein, 150 aa, Unknown
  Bacterial polypetide isolated from the Sargasso Sea
MERVIKVDIFTDGACRGNPGPGGWAALLRYGDTEKMFSGAQEQTTNNRMELMAAIEGLEKLKKPMDVVLTTDSQYVKDGITKWIDGWKKKGWITSQKKPVKNVDLWKRLDAAVANHSVEWKWVKGHSGHTENEIVDQAANVAIDNLLVTK

SEQ ID NO: 168438 - protein, 101 aa, Unknown
  Bacterial polypetide isolated from the Sargasso Sea
MIAGVDEVGRGPLAGPVVAAAVILGHDFDISGLMDSKKLTALKREKLSAIIWENALAVSIAEASVEEIDEINILQASLLAMKRAVLGLSISPREILVDGSH

SEQ ID NO: 168439 - protein, 188 aa, Unknown
  Bacterial polypetide isolated from the Sargasso Sea
MLTAGVDEVGRGPLAGPVVAAAVILKLDEKIEELNDSKKLSPTKRENLVDTIKSNSISWSIGISSQIEIDSINILQASLLAMKRAVEGLKIVPELVLIDGNKAPDLGIQTQTIIKGDQSERCIMAASILAKVHRDNYMKDIDKFYPNYGFKLHKGYPTKLHLEALKSYGVTKEHRLSFKPVKNIYESN

SEQ ID NO: 168440 - protein, 143 aa, Unknown
  Bacterial polypetide isolated from the Sargasso Sea
MKEVIIYTDGACRGNPGLGGWGVLMQYHDENKELYGGERNTTNNKMELSAVIQGLGALKEPCQVKLFTDSKYVMDGINSWIHNWKRNNWKTANKKPVKNKELWVELDKLVQKHNISWNWVKGHSGDPGNEKADALANLGIEDL

SEQ ID NO: 168441 - protein, 204 aa, Unknown
  Bacterial polypetide isolated from the Sargasso Sea
MPDWSYEDAANRDGHDIVVGVDEAGRGPLAGPVVAAAVILERDQLSAVLREGLDDSKKIRATMRAELFQELKCTARYGIGKASVHEIDTQNILRATLLAMSRAVSNINKPAPQYALVDGNHEPILDCPVRCVIKGDSHSFSIAAASIIAKVARDQIMRDLDAYYPGYGWDRNSGYGTPEHQNAILRLGITAEHRKSFAPIRNML

SEQ ID NO: 168442 - protein, 193 aa, Unknown
  Bacterial polypetide isolated from the Sargasso Sea
MKNRKNFKIIAGVDEVGRGCLAGPVVSAAVILKKGVLIKNLKDSKKLTFEQRIEVSKDIKKNSFFSIGVASVKEIEKLNILQASLLSMKRAILSLSRKPDLILVDGIFAPQVFNKCKTVVKGDEKIKCISAASILAKVYRDKIMIKMSKKYKNYSWNKNFGYGTKQHILGLKKYGLTTMHRKNFKPIHKMLLK

SEQ ID NO: 168443 - protein, 212 aa, Unknown
  Bacterial polypetide isolated from the Sargasso Sea
MRVLQKIFRPTLEFENAAYSRGFSKIAGIDEAGRGPLAGPVVVAAVILGKNWNTEFEINDSKQLTAKKRQKLFDLICAESSAFKIVSVSPQEIDRLNILQATMFGMQRCSAEIEPIPDYLLVDGNRYPVTNIQGQAIVKGDCLSKSIAAASILAKVTRDRKMVEFGEKYPQWGFERHKGYPTSQHREAIAEHGLSPIHRRSFRLKPVQTNLL

SEQ ID NO: 168444 - protein, 111 aa, Unknown
  Bacterial polypetide isolated from the Sargasso Sea
AVIGGDALIKSISAASILAKVTRDRMLLELHQTYPVYGFDAHAGYGTPQHLAALREHGPCEHHRRSFAPVREAQLRFGMALKPPLGDVIVVPGTLADAMLDDDAFGERSGA

SEQ ID NO: 168445 - protein, 184 aa, Unknown
  Bacterial polypetide isolated from the Sargasso Sea
MKKNLIAGTDEVGRGCLAGPVVAAAVILKNKVDNLNDSKKLSTKKRNLLSKKILENSYYGFGIVSNNEIDKINILNASLLAMKRAILNLPIKPALVLVDGIYKPDLNIPMKTIIGGDSIEDAISAASIIAKVYRDNLMIEYNNKYPDYNFKKNKGYGTKEHFFAIQQKGICTIHRKSFKGVLNK

SEQ ID NO: 168446 - protein, 148 aa, Unknown
  Bacterial polypetide isolated from the Sargasso Sea
MEIKIYTDGACVGNPGPGGWAAVILIDNKKEEIFGGEKLTTNNRMELTAAIKALEHCVSADGSQPSLKQIKIYTDSSYVKDGITNWINNWEKNNWKTADKKNVKNVDLWKKLKELSSLNQIEWFWVKGHSNNPMNELADKLAKKATPI

SEQ ID NO: 168447 - protein, 202 aa, Unknown
  Bacterial polypetide isolated from the Sargasso Sea
MDLLEYETKAIAKGYGNIAGIDEAGRGPLAGPVVAAAVIFATKVDIAGLDDSKKLSPKKRQELFPQIQAKASAYGIAIVNREVIDEINILQASRLAMKQAVEQLQPIPDLLLIDGSQKIDSSLDQWAIVKGDSKSFSIAAASVLAKVTRDRIMEDYHKVYPQYEFHRHKGYGTKLHRALIEKHGPCPIHRSTFKGVLEFINS

SEQ ID NO: 168448 - protein, 198 aa, Unknown
  Bacterial polypetide isolated from the Sargasso Sea
MIEFVYPHTHLVAGVDEVGRGPLVGAVVTAAVILDPARPIIGLNDSKKLSEKRRLALFDEIKEKALSWSLGRAEPHEIDELNILHATMLAMQRAVAGLHIVPEYVLIDGNRCPALPVPSMAVVKGDSRVAEISAASILAKVIRDAEMAALDTVFPQYGFAQHKGYPTAFHLEKLALHGATEHHRRSFGPVKRALGLSS

SEQ ID NO: 168449 - protein, 73 aa, Unknown
  Bacterial polypetide isolated from the Sargasso Sea
KSISSASIIAKVSRDNLMKNQISNNYPMYKFEKNKGYGTKEHMDAIKTFGITKQHRKSFEPIKSMIENNHEAN

SEQ ID NO: 168450 - protein, 172 aa, Unknown
  Bacterial polypetide isolated from the Sargasso Sea
MIEAGVDEAGRGPLAGPVFAAAVILDKEIQIEGLNDSKKISEKKRESIAQEIKENAIAWSIGISSSEEIDEVNILKATLIAMKRAIEGLKILPDIALIDGQHAPQTVCKVRTIVKGDQSKKNIMAASILAKVSRDNYMKEIDDKYPEYGFEQHKGYPTKMHLEALKLYGITS

SEQ ID NO: 168451 - protein, 140 aa, Unknown
  Bacterial polypetide isolated from the Sargasso Sea
KRNLLSKKILENSYYGFGIVSNNEIDKINILNASLLAMKRAILNLPIKPALVLVDGIYKPDLNIPMKTIIGGDSIEDAISAASIIAKVYRDNLMIEYNNKYPDYNFKKNKGYGTKEHFFAIQQKGICTIHRKSFKGVLNK

SEQ ID NO: 168452 - protein, 115 aa, Unknown
  Bacterial polypetide isolated from the Sargasso Sea
MNILHASLLAMKRSIKKLKKKPKLVLIDGNNLPKIKNYKLKSIIKGDQKIASISAASIIAKVTRDKIITNLGKRFKRYKWNKNYGYGTKQHINAIKVLGITPHHRKSFSPINKLK

SEQ ID NO: 168453 - protein, 143 aa, Unknown
  Bacterial polypetide isolated from the Sargasso Sea
MKTVIIYTDGACRGNPGPGGWGVLIEYGELSKQLYGGDVSTTNNKMELTAAIMALKEIKEPCEIILYTDSKYVLQGIEEWIHNWKKRDWRGANKKPVKNIDLWKELDELRDKHNIKWNWVKGHSGDPGNETADMLANRGIDEL

SEQ ID NO: 168454 - protein, 192 aa, Unknown
  Bacterial polypetide isolated from the Sargasso Sea
MPSLDFELEAFQQNHTYVAGLDEVGRGTIAGPVVSGAVILDLNKHYEFYEEINDSKKLTSKKRTSLSILIKRFSLTYGIGISSAKEIDNIGIVPATKLSMIRAINHLTPKPEYLLIDSLEIPEINIDQNSLIKGDNISISIAAASIIAKVARDRMMEKYDKYFPNYSFKSHKGYYTKSHASELIQKELLNPP

SEQ ID NO: 168455 - protein, 207 aa, Unknown
  Bacterial polypetide isolated from the Sargasso Sea
MPDFSLEESLGLSTSAVIVGVDEVGRGPLAGPVTAAAVVVDRQKITLDLLTKIDDSKKISQKKHATISKQIESIAIIGIGWASSGEIDQLNILEATMLAMQRAISSLRKQIISDPDYILIDGNKVPRLDFPSKAIVRGDEKSLSIAAASIVAKNKRDAFMTSLSKLYPGYGWEKNAGYGTGEHLAAIEREGITVHHRRSFKPIAKYL

SEQ ID NO: 168456 - protein, 154 aa, Unknown
  Bacterial polypetide isolated from the Sargasso Sea
MLKKIDLYTDGSCLGNPGPGGYGAVMVYGKHRKELAGGFRLTTNNRMELMAAIMGLRTLNEPCQVRLTTDSQYVRQGITQWIIGWKKKGWMTASRQPVKNVDLWQALDAEVARHQIEWLWVKGHSGHPENERCDELAREAASGKQLAEDTGYQP

SEQ ID NO: 168457 - protein, 279 aa, Unknown
  Bacterial polypetide isolated from the Sargasso Sea
LAAAAPPPPMRSVATKAKATENDAAGANGAAGDAKATKTTSRGRKTSKPATFEASPAKRAKKATGPGPDRSHEKKHWEAGRHRVVGVDEAGRGPLAGPVVAAACYVPKDCVVDCVNDSKQLTEEGRDEIFEELMANKDIEYGVCVIDQDRIDEINILECTMEAMTKSAADVPNVDWVLIDGNRVPKPLEGKAEAIVKGDAKNVAIAAASIIAKVTRDRMMLEIDEEFPMYGFKDHKGYGTKAHMAAIDKYGPCIYHRKTFAPIKHMDLSKWPDCMKKKD

SEQ ID NO: 168458 - protein, 143 aa, Unknown
  Bacterial polypetide isolated from the Sargasso Sea
MKTVIIYTDGACRGNPGPGGWGVLIEYGKLSKQLYGGDLSTTNNKMELTAAIMALKEIKEPCKIILYTDSKYVLQGIEEWIHNWKKRGWRGANKKPVKNIELWKELDELRDEHNIKWNWVKGHSGDPGNETADMLANRGIDEL

SEQ ID NO: 168459 - protein, 143 aa, Unknown
  Bacterial polypetide isolated from the Sargasso Sea
MKYKIYTDGACSGNPGPGGWAVIILVNNEIKEMFFGSEKNTTNNQMELLAPIKAIQKFKKKSEISIFTDSTYVRDGITIWIKQWEKNGWKTASKKPVKNKELWKKLKNLSSKHSIKWIWVKGHAQDKYNNLVDELAQGAIKNK

SEQ ID NO: 168460 - protein, 106 aa, Unknown
  Bacterial polypetide isolated from the Sargasso Sea
TNNQMELLAAISALEALDRPSKIKIITDSSYVKNGVTQWLENWKNNKWKTASKKPVKNAELWRRLDQAKSRHEVIWKWVKGHAGHPENERADELARKGMQPFKNQS

SEQ ID NO: 168461 - protein, 201 aa, Unknown
  Bacterial polypetide isolated from the Sargasso Sea
MKFDPHKLIAFENNFSLPIAGIDEVGRGPLAGPVIAAAVILDRKNIPEGINDSKKIPKAKRILLAEKIKENSIYAYGAASEIEIDEINILQASLLAMKRASDRLSVVPKTTLIDGNFKPDIKNNTISIIKGDSKSVSIAAASILAKVYRDEIMLKYSKQFPEYGFQTNSGYGTKEHLSALKNYGITPIHRKSFKPVHNILN

SEQ ID NO: 168462 - protein, 156 aa, Unknown
  Bacterial polypetide isolated from the Sargasso Sea
GLNDSKKISENKRESIAQEIKEKAIAWSIGTSSIKEIDEINILKATLLAMKRAIEGLKISPDIALIDGQHAPQTECKVRTIVKGDQSKKNIMAASILAKVSRDKYMKEIDVKYPEYGFKQHKGYPTKMHLEALKLYGVTSEHRLSFKPVKTINEPS

SEQ ID NO: 168463 - protein, 188 aa, Unknown
  Bacterial polypetide isolated from the Sargasso Sea
MIEAGVDEAGRGPLAGPVFAAAVILDKEIQIEGLNDSKKISETKRESIAQEIKEKAIAWSIGISSSEEIDEVNILKATLIAMKRAIEGLKIFPDIALIDGQHAPQTDCKVRTIVKGDQSKKNIMAASILAKVSRDNYMKEIDDKYPEYGFKQHKGYPTKMHLEALKLYGVTSEHRLSFKPVKIINEPS

SEQ ID NO: 168464 - protein, 80 aa, Unknown
  Bacterial polypetide isolated from the Sargasso Sea
KEESIIKGDQKSISIAAASIIAKIYRDRLMNILSQKYKDFNWDHNAGYGTKKHIEELTKRGPTIHHRKSFEPIKSIIFSN

SEQ ID NO: 168465 - protein, 83 aa, Unknown
  Bacterial polypetide isolated from the Sargasso Sea
MNDSFGIDVVDIYTDGACSGNPGPGGWGALLIFGEHEKEISGGEHKTTNNRMELQAAIEALNALKRPMKVRLHTDSTYLRDGI

SEQ ID NO: 168466 - protein, 215 aa, Unknown
  Bacterial polypetide isolated from the Sargasso Sea
MFEFDKKYFSKFNIVAGVDEAGRGPLAGPVVASAVIYDSGIYIEGVDDSKKISEKKREVYYKEIMSKAKHVGVGIVFQEEIDKMNILNATKEAMRKAIQNLTVKPELVLVDGNQIEFSDYNQESIIKGDAKSFSIASASIVAKVTRDKIMENYSKLLPEYGFENHKGYGTKKHLEAISKYRSSIIHRKSFKPISEHMPTFDYYFKNKAVDRLLIQ

SEQ ID NO: 168467 - protein, 146 aa, Unknown
  Bacterial polypetide isolated from the Sargasso Sea
REKLFLFFKKLQKEKKLQYYLGYASVEEIDTINILEATKLSMKRVVDKFNFENPHLIIDGNFSLNYQNEKSIIGGDKKSLSIASASIIAKIHRDRLMSILDSKFTFYDWKKNAGYGTKKHIDAIHKYGVTQFHRKSFEPIKSLFKK

SEQ ID NO: 168468 - protein, 122 aa, Unknown
  Bacterial polypetide isolated from the Sargasso Sea
EIEKLNILNASLLAMKRAIKKLSRKPSLVLIDGNKIPKLKNYNLKYVIKGDEKIPEISAASIIAKVTRDRLITKMSKKFIKYAWDKNAGYGTKQHLRAIKNFGVTKHHRKTFGPIHNILSPN

SEQ ID NO: 168469 - protein, 149 aa, Unknown
  Bacterial polypetide isolated from the Sargasso Sea
MTSQGSGDNHVEIYTDGACSGNPGPGGWGAILRFKGVEKELSGGDPETTNNRMEMMAAISALEALKRPCVVDIYTDSSYVRDGITKWIFGWQKRGWKTADKKPVKNVELWQRMLDALRPHKVEWHWVKGHAGHPENERCDELARMAVPK

SEQ ID NO: 168470 - protein, 190 aa, Unknown
  Bacterial polypetide isolated from the Sargasso Sea
MKKIIAGVDEVGRGSLVGPVLAAAVIFRNNVDKEKFKDSKQLSKHKRNFLEKYIKKNCIWSIGSASLKEIEKLNILNASLLAMKRAVKKLKSKPTMVLIDGNRSPDLKCYKIKCIIKGDQKIPEISAASIVAKVTRDRLITKMSKKFNKYAWNKNAGYGTKQHLRAIKKFGVTKHHRKTFGPIHNILSPN

SEQ ID NO: 168471 - protein, 177 aa, Unknown
  Bacterial polypetide isolated from the Sargasso Sea
PVVSCGCYFSNYNDLESEIPITDSKKHTVKQREKLFLFFKKLQKEKKLQYYLGYASVEEIDKINILEATKLSMRRAIDKFNFENPFLIIDGNFSLHYQNEKSIIGGDKKSLSIASASIIAKVHRDRLMSILDSKFTFYDWKKNAGYGTKKHIDAIHKHGVTQFHRKSFEPIKSLLKK

SEQ ID NO: 168472 - protein, 190 aa, Unknown
  Bacterial polypetide isolated from the Sargasso Sea
TINGQVVGIDEAGRGPLAGPVFAASVILNKKKIPSGIDDSKSLSPEKRQALYKKITESSIYGLSMSSVIEIDRLNILQATLLAMRRSYINLSWKLSTLPSHALIDGNQSPRLPCKTITIIKGDKKSKSIAAASIIAKVSRDRYIKFLHSIYPNYDWINNQGYSSKKHRLGLTILGPSPHHRLTFKPLKSK

SEQ ID NO: 168473 - protein, 272 aa, Unknown
  Bacterial polypetide isolated from the Sargasso Sea
SKKLSEKKRERLFGEIFISAIAIGIGIVHESEIDEDNILQATYKSMRKSLGNLSVKPEVILVDGNKADIKHYRQENIVNGDQKSLSIAAASIIAKVTRDRIMKQYDLVFPNYAFGKHKGYGTKQHIEAIKFNKAVPIHRKTFNPVPKYLPTIAFYKQNNLVDTLGVQLVACKMIRLNSTILEINYNLSDLRKVDIISIEKNIIKFTNVKTFTFNDNKEAEAFNFSDSDSGKEEELALSFMNDNNLDLDYKFQNAIITIGKGEPEITGINLEK

SEQ ID NO: 168474 - protein, 139 aa, Unknown
  Bacterial polypetide isolated from the Sargasso Sea
MKRIEIYTDGACRGNPGPGGWGALLKFDNHEKEISGGEKNTTNNRMELMAAIKALDKVKEMCEIDLYTDSKYVKQGITEWIIKWKVNGFKNSKKKPVVNADLWVQLDDLTSKHKINWFWVKGHAGHEFNERADLLAHKG

SEQ ID NO: 168475 - protein, 146 aa, Unknown
  Bacterial polypetide isolated from the Sargasso Sea
MSKIKIYTDGACSGNPGPGGWGAVIINDNITNELYGYEKNTTNNRMELLAVIRSLEYLEKTIEIEIFTDSTYVMEGITNWIKNWKKNNWLNSSKKPVKNEDLWKKLDKLTVDKEINWVWVKGHSGNPGNEKADYLARKAIKRGMSG

SEQ ID NO: 168476 - protein, 206 aa, Unknown
  Bacterial polypetide isolated from the Sargasso Sea
MSHELKAWREGFRNIAGVDETGRGPLAGPVVVSAVILGRNWNENHRLDDSKALKLKEREELYNIICQEALAVSTVSMSAELVDRLNVLQASLQGMKKAVERLNPKADYALIDGNRYPEMKLPGEALVKGDSRSASIAAASIVGKVVRDRVMQGMECLYPSWGFERHKGYPTQEHRELLQKRKPSMIHRQSFQCVGNSEDLIQPSLF

SEQ ID NO: 168477 - protein, 212 aa, Unknown
  Bacterial polypetide isolated from the Sargasso Sea
MRVLQKILSPTLELENAAYSRGFRKIAGIDEAGRGPLAGPVVVAAVILGINWNTTFELNDSKQLTAKKRQVLYDLICAEASAYKVVSVSPQEIDRLNILQATMFGMQRCSDEIDPSPDFLLVDGNRYPVTNIQGQAVVKGDCLSKSIAAASILAKVTRDKKMVEFGKEYPQWGFERHKGYPTKEHREAIAEYGLSPIHRRSFGPKTEQMSLL

SEQ ID NO: 168478 - protein, 121 aa, Unknown
  Bacterial polypetide isolated from the Sargasso Sea
MRESSFVEIYTDGACRGNPGPGGWAALLRFNGAEKIISGAEEETTNNRMELMAAIHGLEALSRACSVKLTTDSKYVMQGITSWLTTWKGNNWKTSQKKPVKNVDLWARLDSSVEKHRVEWC

SEQ ID NO: 168479 - protein, 143 aa, Unknown
  Bacterial polypetide isolated from the Sargasso Sea
MKEVIIYTDGACRGNPGLGGWGVLMQYHNENKELYGGEKSTTNNKMELSAVIHGLGALKEPCQVKLFTDSKYVMDGINSWIHNWKKNDWKTANKKPVKNKELWVELDQLVQKHKISWNWVKGHSGDPGNERADELANLGMEGL

SEQ ID NO: 168480 - protein, 170 aa, Unknown
  Bacterial polypetide isolated from the Sargasso Sea
CSAAVILDPQNPIEGLTDSKKLSEKKRVALAQEIREKALYWNIGRASPEEIDKLNILHATMLAMIRAVEGLPVKPDFVRVDGNRLPAWNFDSEAVVKGDSLHAEISAASIIAKVERDNDMISLHEAFPQYNFAGHKGYPTKAHFEAIAEYGILDCYRKSFKPVKALLEEK

SEQ ID NO: 168481 - protein, 208 aa, Unknown
  Bacterial polypetide isolated from the Sargasso Sea
MSLKNYHLKEGIEAGCDEAGRGCLAGPVVAAAVILDPRKWNSALNDSKKLSEKQRHKLRLWIEENALAWSVSFVNEKKIDEINILHASILGMHLALDNLNHSFDRILVDGNKFKPYKNIEHHCMVKGDARFRSIAAASILAKTHRDQFMLQLHEKYPEYGWNQNKGYPTKMHRKAIKSNGSNIHHRISFKTTSRSTQFDTVGFFTKER

SEQ ID NO: 168482 - protein, 112 aa, Unknown
  Bacterial polypetide isolated from the Sargasso Sea
MEATKLSMKRVIHKFNFENPHLIIDGNFSLNYQNEKSIISGDKKSVSIASASIIAKVHRDRLMSILDTKFKVYDWKKNAGYGTKKHIEAIHKHGITNFHRKSFEPIKSLLKK

SEQ ID NO: 168483 - protein, 148 aa, Unknown
  Bacterial polypetide isolated from the Sargasso Sea
MEVKIYTDGACIGNPGPGGWAAIILIDNRKEEIFGGEKLTTNNRMELTAAIKALEHCVSADGSQPSLKQIKIYTDSSYVKDGITNWINNWEKNNWKTADKKNVKNVDLWKKLKELSSLNQIEWFWVKGHSNNPMNELADKLAKKATPI

SEQ ID NO: 168484 - protein, 211 aa, Unknown
  Bacterial polypetide isolated from the Sargasso Sea
GLGVIGQSMALSEEKIAGVDEAGRGPLAGPVVAAAVILPQSHSIHGLADSKALSVRARERIYQTIIEHHMVVWSVAVVEAAVIDEINILQATLQAMRQAVMQLCKVPSAVWVDGRDCPDVPMECRAIVKGDQCVEAISAASIVAKVTRDRLMGEYAEQYPQYGLMQHKGYGTKQHLQALKTYGPSPIHRRSYRPVMEAMRAHDMSEVAHGS

SEQ ID NO: 168485 - protein, 186 aa, Unknown
  Bacterial polypetide isolated from the Sargasso Sea
MKFIAGVDEVGRGSLIGPVYAAAVILNRSINKRLLRDSKSLTKSQREILSKYIKKNSIWSIGKASVREIEQINILQASLLAMKRAIKKLKKKPSIVFIDGNTLPDIKNYKLRSVIKGDQKIPSISAASIIAKVTRDKMITHLAKKCKGYYWEKNYGYGTKQHLKAIKDLGITSEHRKNFSPINKMK

SEQ ID NO: 168486 - protein, 143 aa, Unknown
  Bacterial polypetide isolated from the Sargasso Sea
YEAIQANDTIISAVAMVEAAVIDEINILQATHRAMNQALAGLGPPAKHALVDGRPVPSLTLPQTAIVKGDAKSFSIAAASILAKVTRDRLMVQYDEQFPGYGFASHKGYGTKAHLLAIEELGACPLHRMSFAPLKNNQPDLFE

SEQ ID NO: 168487 - protein, 205 aa, Unknown
  Bacterial polypetide isolated from the Sargasso Sea
IVADFSIEKSIDGPVIGLDEVGRGPLAGPVVSCGCYYLNYDDLKSEIPITDSKKHTPRQREKLFLFFKNLQKENKLQYHLGYASVEEIDKINILEATKLSMKRVINKFSIDSPNIIIDGNFSLNYKNEKSVIGGDKKSLSIATASIIAKVHRDRLMNILDSKFNYYHWKSNAGYGTKKHIEAIHKHGITLFHRKSFEPIKSLLNK

SEQ ID NO: 168488 - protein, 183 aa, Unknown
  Bacterial polypetide isolated from the Sargasso Sea
RGPLAGPVVSCGCHYLHYDDLESEIPITDSKKHTPKQREKLFLFFKKLQKENKLQYYLGYASVEEIDKINILEATKLSMKRVINKFSINDPNLIIDGNFSLNYKNEKSVIGGDKKSLSIATASIIAKVHRDRLMNILDSKFNYYHWKSNAGYGTKKHIEAIHKHGITLFHRKSFEPIKSLLNK

SEQ ID NO: 168489 - protein, 193 aa, Unknown
  Bacterial polypetide isolated from the Sargasso Sea
MPDNASQIIAGVDEAGRGALAGPVVACSVVLKPSFNLNKEVNDSKKLSEKKRYQLFDVLLNDIYLGIGLNSHRYINQYNVLNATMTAMATSIRKNKGIFNHIIIDGNKAPKLGHSYETMVKADAKIIEVMVASICAKVIRDRIMLKYNRLYPDYGFEKHKGYGTKIHYDAIFNQGPCPVHRTSFNLNRQLTLF

SEQ ID NO: 168490 - protein, 184 aa, Unknown
  Bacterial polypetide isolated from the Sargasso Sea
KISAGVDEVGRGSLAGPVVAAAVIFKGSIKRSLFKDSKKLSFNRRMIIAKYIKKNSIYGIGVADVKEIYKFNILNASLLAMKRAISKLSTKPNQIYIDGIYVPKGIKNCKAIIKGDQKIKVISAASILAKVYRDLLMIKLSKKYKNYFWEKNFGYGTKDHLKSLKKYGISSLHRRDFKPVYNML

SEQ ID NO: 168491 - protein, 146 aa, Unknown
  Bacterial polypetide isolated from the Sargasso Sea
MSKKIQIYSDGACRGNPGPGGWGVLLIYDGTEKEIYGGELGTTNNRMELMAAIVGMESIKYSSDIIITTDSKYVMDGITKWMHDWKKRNWKTASKKPVKNKDLWQRLDEACSLHSIEWCWVKGHSGHEKNERVDLLANKAIDELVL

SEQ ID NO: 168492 - protein, 214 aa, Unknown
  Bacterial polypetide isolated from the Sargasso Sea
MDYKIVERILNVSPNFLLEKDLIHSGYSIIAGVDEVGRGPLAGPVTAAAVILDPLNIPENLNDSKLLSLKKREKIYEELMYSSTFAIAHVSPEEIDKLNILQASLLAMVNAVSKLNVTPNHILIDGNKVPEQLGGIATAIVKGDSKVASIAAASIIAKVTRDRLMRDLDADFPVYEWAKNSGYPTKCHMNAILKYGITPHHRRSFKPIHNILCG

SEQ ID NO: 168493 - protein, 96 aa, Unknown
  Bacterial polypetide isolated from the Sargasso Sea
PAAIEGLRALKRPMRVAIHTDSTYVKDGITKWIVNWKRNGWKTAAKKPVKNVDLWQALDDVLIGHEVEWHWVKGHAGHPENERADALARAAVPTGA

SEQ ID NO: 168494 - protein, 193 aa, Unknown
  Bacterial polypetide isolated from the Sargasso Sea
MDFEKNFNSPVAGVDEVGRGPLAGPVVAAAVILDKNNLPGGIRDSKKISKNKREIIAEKIKLNSHYAYGVASVEEIDNLNILQASLLAMKRAIESLKIVPSISLIDGIYTPEVDLICKPIVKGDSKSISIAAASILAKVYRDKIMTNLADKYPEYSFAKNSGYGTKEHLLALKYHGITPIHRKSFKPIYNILN

SEQ ID NO: 168495 - protein, 142 aa, Unknown
  Bacterial polypetide isolated from the Sargasso Sea
MKYKIYTDGACSGNPGPGGWAAIILADDKVKDEISGSEKNTTNNKMELLAPIRAIQKFKKKSEILIYTDSTYVKDGITTWIKKWEKNGWKTASKKPVKNIELWKKLKNLSSKHSIKWIWVKGHAQNKYNNLVDEIAQGAIKR

SEQ ID NO: 168496 - protein, 143 aa, Unknown
  Bacterial polypetide isolated from the Sargasso Sea
MKTVIIYTDGACRGNPGPGGWGALIEYGESSKQLYGGDISTTNNKMELTAAIMALKEIKEPCEIILYTDSKYVLQGIEEWIHNWKKRGWKGANKKPVKNIELWKELDEVRDEHNIKWNWVKGHSGDPGNETADMLANRGIDEL

SEQ ID NO: 168497 - protein, 111 aa, Unknown
  Bacterial polypetide isolated from the Sargasso Sea
MKRIEIYTDGACRGNPGPGGWGALLKFDNHEKEISGGEDNTTNNRMELMAAIKALETVKEMCEIDLYTDSKYVKQGITEWIIKWKVNGFKNSKKKPVVNADLWVQLDDLTQ

SEQ ID NO: 168498 - protein, 143 aa, Unknown
  Bacterial polypetide isolated from the Sargasso Sea
MRYKIYTDGACVGNPGPGGWAAIILLDDKIKDEISGSEKNTTNNKMELLAPIRAIQKFKKKSEIIIYTDSTYVKDGITIWIKKWEKNGWKTASKKPVKNIELWKKLKNLSSKHSIKWIWVKGHAQNKYNNLVDEIAQGAIKDK

SEQ ID NO: 168499 - protein, 200 aa, Unknown
  Bacterial polypetide isolated from the Sargasso Sea
MISKVYPNLKIEKSFLDKEIICGIDEVGRGCLAGPVIAAAVILDYKNIPKGINDSKKLSKKMREIISNEIKKTSIEVAIGEASVYEIDKLNILNASILAMKRAYYNLPKKPNVALIDGNFSPDINCKVLNIIKGDTKSLSIAAASIIAKVHKDKIFQLLHKKFPKYNFKNNSGYGTKEHYTAISEFGICQHHRKSFKLYK

SEQ ID NO: 168500 - protein, 161 aa, Unknown
  Bacterial polypetide isolated from the Sargasso Sea
MQKSSNQIKTNNIEVVAGVDEVGRGALAGPVVTTAIILTKDCPINELKDSKELSEKKRNDLYIKLLKTTPYIRTAIINNNVIDTINILNATLKGMLYCVKKLKKKAEIIYIDGNQTPKDDNYNMEAIIKGDRFVPAISAASIIAKVTRDKIMSLYDNEYPQ

SEQ ID NO: 168501 - protein, 189 aa, Unknown
  Bacterial polypetide isolated from the Sargasso Sea
MKSIIAGVDEVGRGSLIGPVYAAAVIFNKNINKKNIKDSKKLNKSKREVLAKYVKKNSIWSIGSASLKEVEKINVLNASLLAMKRAIKKLKKKPTIVLIDGNKVPKIRNYKLKSIIKGDQKIPEISAASIIAKVSRDRFVTSLSKNFKKYNWSKNAGYGTKDHINAIKKYGVTKLHRKSFKPIHNMLSL

SEQ ID NO: 168502 - protein, 197 aa, Unknown
  Bacterial polypetide isolated from the Sargasso Sea
MDYNHTNTVAGVDEAGRGPLAGPVVAAAVVLPEGSVIDGLNDSKKITEKARERLYPTICELAISYAVGVVTAQEIDEMNILQATLTAMQRAVLALECDITRVLVDGNQPPRLPFHTETVIKGDQKVGCIAAASIVAKVTRDRMMMELDQRYPQYGFSGHKGYGTKKHLLALAEHGPCPVHRQSFAPVRRSSGVSGAV

SEQ ID NO: 168503 - protein, 191 aa, Unknown
  Bacterial polypetide isolated from the Sargasso Sea
LDEVGRGPLAGPVVSCGCLFNRYDRLPENIQITDSKKHTAKQRQKLFSLFKKLQEDKIIEFHLGFASVNEIDEFNILEATKLSMKRVLDKFNNTNLNIIIDGNFSLNYKNIYEKSVIGGDKISLSIATASIIAKVHRDRLMSLYDGKFKVYGWKKNSGYGTKQHINAIHENGITVQHRKTFEPIKSLSKQR

SEQ ID NO: 168504 - protein, 206 aa, Unknown
  Bacterial polypetide isolated from the Sargasso Sea
SIEKSIKGPVIGLDEVGRGPLAGPVVSCGCLFYNYENLQSDIIIKDSKKHTTKQREKLFLYFKKLTKEKIMKYHLGFASVKEIDQLNILEATKLSMKRVINKFNNYSDNIIIDGNFLLNYKNIKERSVIGGDKLSLSIAAASIIAKVHRDRMMAIYSNKYQIYGWKQNAGYGTKKHINAIIKNGITDLHRKSYEPIKSLFNDNNKM

SEQ ID NO: 168505 - protein, 208 aa, Unknown
  Bacterial polypetide isolated from the Sargasso Sea
MTNTEKIIAGVDEAGRGPLAGPVVAAAVILPKNHSIKGLIDSKKLTANKRENLYNEIIKVSDYGIGIVSHRTIDKINILHATFKAMKKAILNLNLKPDKTLVDGYGLPDQTIKNEGIIGGDNLIECISAASILAKVTRDRLMINIDKIFPEYGFSKHKGYGTKMHIEMLKINKATPIHRKSFRPVKENLPTMEWLGRNNRIETLGMQL

SEQ ID NO: 168506 - protein, 207 aa, Unknown
  Bacterial polypetide isolated from the Sargasso Sea
MELYRYEEKLEAGLDEAGRGCLAGPVFAAAVIWPKELDDSLEHPMLNDSKKLSKKKREYLRNYIQENAIDYSVAFCTNQEIDEINILKASHKAMHRCIDKLNIEPEMLLVDGNSFTPYVKKSDGDVIEHECIIKGDGKYASISAASILAKTYHDDYIEELLEKNPDFEKYGWKTNMCYGTRPHMEAVKKHGPTEYHRLTFNLYPCFQ

SEQ ID NO: 168507 - protein, 106 aa, Unknown
  Bacterial polypetide isolated from the Sargasso Sea
MIVAGVDEAGRGPLAGPVVSAAVILDPNYKLVGLNDSKKLSAIKRKTLSDEIKTHSKAWSIGIATVEEIDDLNILGATLLSMKRAIKDLSGVPEKVIVDGQNTPEI

SEQ ID NO: 168508 - protein, 116 aa, Unknown
  Bacterial polypetide isolated from the Sargasso Sea
EINILQASLLAMKRASDGLSIVPKTTLIDGNFKPDIKNNTITIIKGDSKSVSIAAASILAKVYRDEIMLKYSKQFPEYGFQTNSGYGTKEHLSALKNFGITPIHRKSFKPVHNILN

SEQ ID NO: 168509 - protein, 159 aa, Unknown
  Bacterial polypetide isolated from the Sargasso Sea
MNKKIIIYTDGACRGNPGPGGWGVVFQSQGVEDGLLNGYELETTNNRMELKAAIHALLSLNGSYEMELYTDSQYLRLGMTQWMASWKRKGWKNAKREPVKNQDLWRRLDDLVVARNIVWHWVKGHSGHPGNDKADALANAAIDAQGQSHALTEDWFEHL

SEQ ID NO: 168510 - protein, 151 aa, Unknown
  Bacterial polypetide isolated from the Sargasso Sea
MSDDWVEIYTDGACKGNPGPGGWGALLTYKGVKRELWGGEPDTTNNRMELMAAIRGLAELKRSCKVRLVTDSQYVMQGINDWMPNWKKRGWKTASKQPVKNADLWQQLDEQVNRHQVSWEWVRGHTGHPGNEHADLLANRGVVQAKRQPIV

SEQ ID NO: 168511 - protein, 173 aa, Unknown
  Bacterial polypetide isolated from the Sargasso Sea
MRVLQKILSPTLEFENAAYSRGFRRIAGIDEAGRGPLAGPVVVAAVILGRNWDKKFELNDSKQLTAKKRQVLYDLICTEASAFKIVSVCPQEIDRINILQATMVGMQRCSDEIEPPPDYLLVDGNRYPITNIHGQAVVKGDCLSKSIAAASILAKVTRDRKMVKFGEKYPQWG

SEQ ID NO: 168512 - protein, 205 aa, Unknown
  Bacterial polypetide isolated from the Sargasso Sea
MQEKKEEDLRQVLNKVYEVGMDEVGRGSIFGPVFSAVVVLTEKNKFTLKKFGVMDSKKITSKKRNFLFPKILSLSTDYGIGQSSVREIDKLGIRVATELSMIRALKKLKEKPSELLIDGPLLLRPWNGIQKNIVSGDSKFTSISAASIVAKVSRDNLMESLEKKYSGYLIFRNKGYGTKEHLSNIKKNGITNLHRKSFLKKSNLI

SEQ ID NO: 168513 - protein, 150 aa, Unknown
  Bacterial polypetide isolated from the Sargasso Sea
MERVIKVDIFTDGACRGNPGPGGWAALLRYGDTEKMFSGAQEQTTNNRMELMAAIEGLEQLKKPMDVVLTTDSQYVKDGITKWIDGWKKKGWITSQKKPVKNVDLWKRLDAAVVNHSVEWKWVKGHSGHTENEMVDQAANIAINNLLATR

SEQ ID NO: 168514 - protein, 140 aa, Unknown
  Bacterial polypetide isolated from the Sargasso Sea
MSDSKIEIFTDGACKGNPGPGGWGALLKYGDKEKEINGFNSSTTNNIMELTAVIEALKHIKKPYLINITTDSTYVRNGITEWIHNWKSNGWKTAAKKSVKNKELWIELDRLIQGKKLNWIWVKGHSGHPGNERADQLANA

SEQ ID NO: 168515 - protein, 159 aa, Unknown
  Bacterial polypetide isolated from the Sargasso Sea
VVIVDSEIKETDPTLVEIFTDGACSGNPGPGGWGALLCWRNEEREIWGGEAHTTNNRMELTAAIKALESIKKPVKAVLYTDSTYVKEGITSWLPAWKARNWKTAAKKPVKNIDLWQALEEVVDKHQIQWCWVKGHAGHPGNERADALARRGVKEIQDSE

SEQ ID NO: 168516 - protein, 166 aa, Unknown
  Bacterial polypetide isolated from the Sargasso Sea
MKIIAGVDEAGRGALAGPVVAAAVILPDKYDLVGLNDSKKVSPLKRERLFGQISNQAISIGVGIVSSDEIDQINILESTFKAMKMSLGKLNPVPDEALIDGFPLKTQIIPNRGIIRGDETIDIIKAASIIAKVTRDKIMVEYDLQYPSYGFKNHKGYGTKEHMEML

SEQ ID NO: 168517 - protein, 158 aa, Unknown
  Bacterial polypetide isolated from the Sargasso Sea
MTELKLIHIFTDGSCLGNPGPGGYGIVMNYKGHTKEISDGFALTTNNRMELLAPIVALEALKEPCKIILTSDSQYMRQGITTWIHGWKKKGWMTSNRTPVKNVDLWKRLDNAAQLHQIDWRWVKGHAGHAENERCDQLARAAAEANPTQIDAGYQAES

SEQ ID NO: 168518 - protein, 184 aa, Unknown
  Bacterial polypetide isolated from the Sargasso Sea
MIIAGVDEVGRGCLAGPVVAAAVILENSITGLNDSKKISKKKREVLYGEILENATSVAVGVKWNDYIDKHNIKVASEHAMIDAINLLNVKPNKVLIDGFSLDIDIENEGIIKGDQKFEQIMAASIIAKVTRDEIMRSFHYIYPEYDFMSNSGYGTKKHLKALEKYSYTPIHRLTFKPISTDIKK

SEQ ID NO: 168519 - protein, 183 aa, Unknown
  Bacterial polypetide isolated from the Sargasso Sea
MSKIIIAGTDEVGRGSLAGPVVAAAVILKSKIANLQDSKSLSPKKRECLSEEILKSSYYGFGIVSNIKIDQINILNASLLAMKRAILNLPIKPTMVLVDGIHKPDLDIPMRAIIGGDSIEEAISASSIIAKVYRDNLMIKYETKYPGFFFKKNKGYGTKEHLDAIKQIGSCKIHRKSFKGVIT

SEQ ID NO: 168520 - protein, 193 aa, Unknown
  Bacterial polypetide isolated from the Sargasso Sea
MDFEKNFNCPVAGVDEVGRGPLAGPVVAAAVILDKNNLPAGIRDSKKISKNKREIIAEKIRLNSHYAYGEASVEEIDNLNILQASLLAMKRAIESLKIVPSMSLIDGIYTPKVDLKCKPIVKGDSKSISIAAASILAKVYRDKIMTNLADKYPEYSFEKNAGYGTKEHLLALKSHGITPIHRKSFKPIYNILN

SEQ ID NO: 168521 - protein, 209 aa, Unknown
  Bacterial polypetide isolated from the Sargasso Sea
MAVFKTLTDADIATFSTGFVAGVDEVGRGPLVGDVVTAAVILDPNRPIAGLNDSKKLTEKRREALFDEICEKALSYHVGRASPLEIDELNILHATMLAMQRAVAGLTRAPELVLVDGNRSPAFTHQGLSLTSHSIVKGDGLIASISAASIIAKVTRDREMDALDAAYPQYGFAKHKGYPTKAHFDAIAEYGVFDQYRKSFKPVKALLER

SEQ ID NO: 168522 - protein, 198 aa, Unknown
  Bacterial polypetide isolated from the Sargasso Sea
MLKVFDNKIFVCGIDEAGRGCLAGPVTAAAVVLPKKYKNSFIKDSKKLNKSDRLDLFNEIIECSLDYAIIDISPKIIDSINILESTFLAMNNAISKIHNKIDYTIIDGNKFKTEKKIKYKCIVKGDNIYQSIAAASILAKVHRDKIMEDLHLNFPKYDWINNKGYGTSKHRLAIRNYGITKHHRKSFNLVEKQLKIKI

SEQ ID NO: 168523 - protein, 142 aa, Unknown
  Bacterial polypetide isolated from the Sargasso Sea
MKYKIYTDGACSGNPGPGGWAAIILVDNKIKDEISGSEKNTTNNKMELLAPIRAIQKFKKKSEILIYTDSTYVKDGITTWIKKWEKNGWKTVSKKPVKNIELWKKLKNLSSKHSIKWVWVKGHAQNKYNNLVDEIAQGAIKR

SEQ ID NO: 168524 - protein, 190 aa, Unknown
  Bacterial polypetide isolated from the Sargasso Sea
MHKLIAGVDEVGRGPLVGDVVTAAVILDPENPIEGLTDSKKLSEKKRVALAQEIREKALYWNIGRASPEEIDKLNILHATMLAMIRAVEGLPVRPDFVRVDGNRVPAWNFESEAVVKGDSLHAEISAASIIAKVERDNDMISLHEAYPQYNFAGHKGYPTKAHFEAIAEYGILDCYRKSFKPVKALLEEK

SEQ ID NO: 168525 - protein, 151 aa, Unknown
  Bacterial polypetide isolated from the Sargasso Sea
MNSGITTVYTDGACSGNPGPGGWAWVVPDGEFAAGSDSETTNQRMELKAALEAVKALQGEIVIVSDSTYVVKCFHDRWWEGWLRRGWVNSAKKPVKNRDLWEPLIESYRDRNNISFRWVKGHSGDRWNDEADRLAVQAGSEQISLKGNLSS

SEQ ID NO: 168526 - protein, 51 aa, Unknown
  Bacterial polypetide isolated from the Sargasso Sea
MKRIEIYTDGACRGNPGPGGWGALLKFDNHEKEISGGEDNTTNNRMELMAA

SEQ ID NO: 168527 - protein, 306 aa, Unknown
  Bacterial polypetide isolated from the Sargasso Sea
MADRADHAAAGLPAVRRLAEHPGGALRRARAAAAFRDARGACRCDAHAAARRREPSHADRSLYRNASFAAAEHGCEGGRSGRARARTTQGARMTAVRAPRRRASSDVQGGFDFSRPDEIVCGVDEAGRGPLAGPVVAAAVILDPAQPIDGLDDSKALSAKKRDALYELIVARSLSYCVASASVDEIDTLNILHATMLAMKRAVEGLSILPTLAQIDGNRCPTLTVRAEAIVSGDALVPSISAASILAKVSRDRMLVDLHERFPVYGFNVHAGYGTVKHLAALREHGPCEAHRRSFAPVRAALDLIR

SEQ ID NO: 168528 - protein, 195 aa, Unknown
  Bacterial polypetide isolated from the Sargasso Sea
MIDIPDDRLVAGVDEVGRGPLVGDVVTAAVILDPANPIIGLNDSKKLSEKKRLALFDEIKEKALAWSVGRASPAEIDELNILHATMLAMQRAVAGLSITPELVFIDGNRCPSLPMEARAVVKGDSLVAAISAASILAKVTRDAEMTELDSRHPEYGFARHKGYPTAEHLAILAERGPLPEYRKSFKPVRRALGIE

SEQ ID NO: 168529 - protein, 202 aa, Unknown
  Bacterial polypetide isolated from the Sargasso Sea
MISSIDDLEIGNAKLIAGVDEVGRGPLAGPVIASAVILDPKKKIDNLCDSKKLSSKMRFLISKNIKMNCIEWSVGRAEVNEIDELNILQASLLAMKRAVDKLKVKPELVVVDGQYTPNIDIKKIAIIRGDNFIPSISAASIIAKVERDEEMIALDKIYPNYGFSSHKGYPTKKHIESIEQLGVTVIHRRTFSPVKKIIDKSC

SEQ ID NO: 168530 - protein, 199 aa, Unknown
  Bacterial polypetide isolated from the Sargasso Sea
MANFNHERSVVTMGYASVCGVDEVGRGCLAGPLVAGAVVFDIVDSEWITRVNDSKKLSPAIRLELSELIKIKAKDWALGLVNAQELDQVGLTKATELVMKQAIDSLNHVPDYLLLDYVPISSWNQPYQLIKQGDSSSYSIAAASIIAKVHRDEIMTAIDELYPQYDFASNKGYGTKLHMEALSIHGPCDIHRRKFSPGQ

SEQ ID NO: 168531 - protein, 147 aa, Unknown
  Bacterial polypetide isolated from the Sargasso Sea
MKRIEIYTDGACRGNPGPGGWGALLKFDNHEKEISGGEKNTTNNRMELMAAIKALDSVKEMCEIDLYTDSKYVKQGITEWIIKWKVNGFKNSKKKPVVNADLWVQLDDLTSKHKINWFWVKGHAGHEFNERADLLANKGLDDMLESS

SEQ ID NO: 168532 - protein, 203 aa, Unknown
  Bacterial polypetide isolated from the Sargasso Sea
IEKEFDGPVIGIDEVGRGPLAGPVVSCGCYFKDYNFLNNSLDFIKDSKKISAKKRFSVLKYLNKLKNNKILKYNLGIASVREIDDLNILNATKLSMRRVVDKFNLSNATLIIDGNFKLNYKNYKEKSIVRGDQISISIAAASIIAKVHRDRLMSILSTKFEGFDWHKNSGYGTAKHIREIYKVGPTIHHRKTFEPIKSLIPTK

SEQ ID NO: 168533 - protein, 144 aa, Unknown
  Bacterial polypetide isolated from the Sargasso Sea
MKEVIIYTDGACRGNPGPGGWGALIKFDTTEKEIFGGQNNTTNNQMELSAAIEGLSILKEPCSVELFTDSKYVMDGITQWIQNWKKNNWKTSAKKEVKNKELWQQLDRLMSYHQVQWHWVKGHSGDPGNETADLLANKGIDSIL

SEQ ID NO: 168534 - protein, 194 aa, Unknown
  Bacterial polypetide isolated from the Sargasso Sea
MIIAGVDEAGRGPLAGPVVSAAVILDPNYKLVDLNDSKKLSAIKRKALSDEIKTHSKAWSIGIATVEEIDDLNILGATLLSMKRAIKDLSGVPEKVIVDGQFTPEIDVPCEAIIQGDATEESIMAASIIAKVERDMIMVELDKKYPHYGFSKHKGYPTKLHLQILKKFGPCNDHRQTFKPVKTYLAELSDHGKT

SEQ ID NO: 168535 - protein, 118 aa, Unknown
  Bacterial polypetide isolated from the Sargasso Sea
NEIDKINILNASLLAMKRAILNLPIKPALVLVDGIYKPDLNIPMKTIIGGDSIEDAISAASIIAKVYRDNLMIEYNNKYPDYNFKKNKGYGTKEHFFAIQQKGICTIHRKSFKGVLNK

SEQ ID NO: 168536 - protein, 76 aa, Unknown
  Bacterial polypetide isolated from the Sargasso Sea
VVKGDCHSKSIAAASILAKVTRDRKMVEFGKKYPQWGFERHKGYPTREHREAINEYGLSPIHRRSFGPKTEQMSLL

SEQ ID NO: 168537 - protein, 144 aa, Unknown
  Bacterial polypetide isolated from the Sargasso Sea
MKDVIIYTDGACRGNPGPGGWGALIKFDIAQREIFGGQNNTTNNQMELSAAIEGLSTLKEPCNVELFTDSRYVMDGITQWIQNWKKNNWKTSSKKEVKNKELWQKLDQLMSYHKVKWNWVKGHSGDPGNEVADLLANKGIDSIL

SEQ ID NO: 168538 - protein, 223 aa, Unknown
  Bacterial polypetide isolated from the Sargasso Sea
MICGIDEVGRGPLAGPVVSAAVILPISHGIAGLKDSKKISPKIREELFEQIIKISDVGIGVVSSRQIDKINILQATHKSMEKALYNLKRQPDKIMVDGFALPLKGIKSEGVIKGDEKIEQISAASIIAKVVRDKFMKLVDSIFPEYEFKKNKGYGTKNHIAALKDNKATLIHRKTFRPVSENLPSKQITNTVSYKAQLSSQKDLLKELNKDINNWFKLNALIK

SEQ ID NO: 168539 - protein, 42 aa, Unknown
  Bacterial polypetide isolated from the Sargasso Sea
MLIDDLEVNETDLIAGVDEVGRGPLAGPVVAAAVILDPKKPM

SEQ ID NO: 168540 - protein, 199 aa, Unknown
  Bacterial polypetide isolated from the Sargasso Sea
LWNKNYNYICGIDEVGRGCLAGPVYSGAVILDKNKSFEDPFFEKINDSKKVSTKVRENLVNYINEISISTAVGLCTAEEIDAIGIQNAVKLSMKRALNNLSIKPDYLLIDSLSIDSKIPQKNIIRGDQASKSISSASIIAKVSRDNYMINEISNEYPNYSFEKNKGYGTKVHMEAIKNFGITNIHRKSFEPIKSMILEN

SEQ ID NO: 168541 - protein, 147 aa, Unknown
  Bacterial polypetide isolated from the Sargasso Sea
MPEVEIFTDGACRGNPGPGGWAALLRSQGVEKMFSGAEQETTNNQMELMAAIQGLEALKRASSVVLTTDSQYVRQGITQWIHGWKRNGWKTSQKQPVKNKVLWQRLDVAVAKHQVEWHWVKGHSGHEENERVDMAANDAIDVMRAQT

SEQ ID NO: 168542 - protein, 187 aa, Unknown
  Bacterial polypetide isolated from the Sargasso Sea
MKIIAGVDEAGRGALAGPVVASAVILPEEYDLDGLNDSKKVSPPKREVLFDKITSQAISIGVGIVPAIEIDRINILESTYKAMKMSLGKLNPVPEEALIDGFPLNTQIIPNRGIIKGDETIDVIKAASIIAKVTRDRIMVKYDQKYPLYGFKKHKGYGTKEHLKMLQLHKSCDIHRKTFKPVSKMLK

SEQ ID NO: 168543 - protein, 144 aa, Unknown
  Bacterial polypetide isolated from the Sargasso Sea
MNKKVDIYTDGACSGNPGPGGWGVLIEIDNENIELSGGDRETTNNRMELMAAIKALEEIDKDYEITLYTDSNYVKDGITSWISNWKKNNWKTASKKDVKNKELWMRLDEAIKDKNISWVWVKGHAGNAGNEQADYLARSALEKL

SEQ ID NO: 168544 - protein, 208 aa, Unknown
  Bacterial polypetide isolated from the Sargasso Sea
MPNFFIEKKFKGPVIGLDEVGRGPLAGPVISCGCYFKDYKFINKNNEFINDSKKLNTKKRLIAFNYLKKLKREKILDYKLGIATVDEIDKINILNATKLSMKRVIEKFQLTNPTLIIDGNFNLNYKNYKEKSIIKGDQISFSIASASIIAKIHRDRLMAILSKKFYNFNWHKNAGYGTKKHIQEIMNNGPTIYHRKSFEPIKSLIHNK

SEQ ID NO: 168545 - protein, 145 aa, Unknown
  Bacterial polypetide isolated from the Sargasso Sea
MKKVDIYTDGACRGNPGPGGWGALLIHNDVKKTIYGGEKDTTNNRMEMIAVIEALKLIKSDCEISLYTDSKYVMDGVNKWLSGWKQKGWKTSNKKPVKNQDLWESIDQCITKHNIEWHWVKGHAGNPGNELADELANRGIDELII

SEQ ID NO: 168546 - protein, 143 aa, Unknown
  Bacterial polypetide isolated from the Sargasso Sea
MKTVIIYTDGACRGNPGPGGWGVLIEYGESSKQLYGGDISTTNNKMELTAAIMALKEIKEPCEIILYTDSKYVLQGIEEWIHNWKKRGWRGANKKPVKNIDLWKELDELRDEHNIKWNWVKGHSGDPGNETADMLANRGIDEL

SEQ ID NO: 168547 - protein, 201 aa, Unknown
  Bacterial polypetide isolated from the Sargasso Sea
MQKPTLDLEKEASKKGFNLVAGLDEAGRGPLAGPLVVACVILGKSLCDNDTIDDSKKISPKKREDLFKIITNKALAFKIISITPEEIDRINILQATLYGMYRCLKEIKPIPDYALVDGNRFPKTQIMGKSVIGGDRISKSIAAASILAKVTRDRFMINSAKLYPEWSFERHKGYPTKHHKNLILKYGLTPLHRKTYNKKQI

SEQ ID NO: 168548 - protein, 158 aa, Unknown
  Bacterial polypetide isolated from the Sargasso Sea
MTELKLIHIFTDGSCLGNPGPGGYGIVMNYKGHTKEMSDGFALTTNNRMELLAPIVALEALKEPCKVILTSDSQYMRQGITTWIHGWKKKGWMTSNRTPVKNVDLWKRLDKAAQLHQIDWRWVKGHAGHAENERCDQLARTAAEASPTQVDEGYQPES

SEQ ID NO: 168549 - protein, 184 aa, Unknown
  Bacterial polypetide isolated from the Sargasso Sea
MKKNLIAGTDEVGRGCLAGPVVAAAVILKNKVDNLDDSKKLSTKKRDLLSKKVLENSYYGFGIVSNNEIDKINILNASLLAMKRAILNLPIKPALVLVDGIYKPDLNIPMKTIIGGDSIEDAISAASIIAKVYRDNLMIEYNKKYPDYNFKKNKGYGTKEHFFAIQQKGICTIHRKSFKGVLNK

SEQ ID NO: 168550 - protein, 245 aa, Unknown
  Bacterial polypetide isolated from the Sargasso Sea
MLARHIGVDEAGRGPAIGPLVVSALNIPERDRSILRDLGVDDSKNLSKKNRNRLYKEILSYTESLDWTIGLVICDARRIDEWMDDGNLNSLEVLLFSEAIGDAAEPGENLEIFLDACDVDAERFGRMVSKSLGDDWDDCKIYSEHKMDSRDEVVAAASIIAKVSRDSAMEELSQELNIDLGSGYPSDPKTRGALEILCKEEVLADCIRRKWANVKRTWSRSHNRPIQTRANERNGVFQSALDEWE

SEQ ID NO: 168551 - protein, 310 aa, Unknown
  Bacterial polypetide isolated from the Sargasso Sea
MMIIAGVDEVGRGPLAGPVVAAAVILPKDHTIEGLRDSKKISKKRRESLFPLIYEQAIDIGTGEVDVKTIDKINIREATFKAMKMALDDLSTIPDRALIDGHPLNDQSIPNEGIIGGDDKVDSIKAASIIAKVTRDRIMKEYSIIFPEYGFENHSGYGTKIHIEALEKYRATPIHRRSFKPVKNLMPTFKWLVDHDRISWMGKKIAALHLKKSGMSVMDLDWEGISNNSIDIVAKDNDHLIFVDVNTYYKNQDDLKKDNEVDRLKKTMLPAMNLYLSDKLAVSNFRIDSISVILSSNNPEILHNKDIKID

SEQ ID NO: 168552 - protein, 147 aa, Unknown
  Bacterial polypetide isolated from the Sargasso Sea
MKRIEIYTDGACRGNPGPGGWGALLKFDNHEKEISGGEDNTTNNRMELMAAIKALETVKEMCEIDLYTDSKYVKQGITEWIIKWKVNGFKNSKKKPVVNADLWVQLDDLTSKHKINWFWVKGHAGHEFNERADLLANKGLDDMLESS

SEQ ID NO: 168553 - protein, 189 aa, Unknown
  Bacterial polypetide isolated from the Sargasso Sea
MVAGVDEVGRGPLAGDVVAAAVILAESPLEGVTDSKMLTPERREALAERIRDEAVSWALGRAAVAEIDELNILQASLLAMRRAVEALPIQPSLVLVDGNRLPKWPYEARAIVKGDLSQPSIAAASILAKVQRDAEMQALHEHYPAYGFDRHKGYPTKAHLAALETVGVSPVHRRSFGPVRRLLADPEVG

SEQ ID NO: 168554 - protein, 209 aa, Unknown
  Bacterial polypetide isolated from the Sargasso Sea
MAVFKTLTDTDIATFSTGLVAGVDEVGRGPLVGDVVTAAVILDPNRPIWGLNDSKKLSEKRREALFDEICEKALSFHVGRASPAEIDELNILHATMLAMQRAVAGLARAPELVLVDGNRSPAFTHQGLSLASHSIVKGDGLIASISAASIIAKVTRDREMDALDAAYPQYGFAKHKGYPTKAHFDAIAEHGVFDQYRKSFKPVKALLER

SEQ ID NO: 168555 - protein, 144 aa, Unknown
  Bacterial polypetide isolated from the Sargasso Sea
MSIKVYTDGACKGNPGPGGWGALIIDGDSRKELYAGNPDTTNNQMEMQAAIEALKYLKGTSEIIELYTDSNYLRQGITEWIVNWKSNNWRTASKKPVANRELWIEVDELSNTLNVEWHWVKGHDGDPGNERADYLANLGADSVS

SEQ ID NO: 168556 - protein, 146 aa, Unknown
  Bacterial polypetide isolated from the Sargasso Sea
MKVYRVYTDGACSGNPGPGGWGVVIVHNNQIDKLDGYDPQTTNNRMELLAAIKGIKETPDNSEVLLYTDSKYVKDGITNWITKWKKNEWVTSSKTSVKNKDLWIILDELNSSRKVSWHWVKGHQDSKTDDSLYNNLADELARSAIK

SEQ ID NO: 168557 - protein, 144 aa, Unknown
  Bacterial polypetide isolated from the Sargasso Sea
MSSPVIIYTDGACRGNPGPGGWGVLIIENNNEITLFGGEKNTTNNQMEMTAAIEGLSYFEERTHIEIYTDSNYLKDGIESWIHSWKKNGWKTASKKPVKNQELWMKVDELNQFHNVSWSWVKGHSGNRENDIADMLANKGIDEI

SEQ ID NO: 168558 - protein, 136 aa, Unknown
  Bacterial polypetide isolated from the Sargasso Sea
MAVPLWIHGSRRRPLVANFWRHLHDQGDQARARHAPRRPAESEETGPCRGPRARHPEHTQPHSMTSDIIDIYTDGACKGNPGPGGWGALLRFGDQEKELFGGEPNTTNNRMELMGVIAALEALKRPCKAVVHTDSQ

SEQ ID NO: 168559 - protein, 143 aa, Unknown
  Bacterial polypetide isolated from the Sargasso Sea
MKYKIYTDGACSGNPGPGGWAVIILANNEIKEMFSGSEKNTTNNQMELLAPIKAIQKFKKKSEISVFTDSTYVKDGMTTWIKQWEKNGWKTASKKPVKNKDLWKKLKNLSSKHSIKWIWVKGHAQDKYNNLVDELAQGAIKNK

SEQ ID NO: 168560 - protein, 198 aa, Unknown
  Bacterial polypetide isolated from the Sargasso Sea
MRKFSKIESELLLKEELTVGIDEVGRGSLIGPVVACAFQLDSIIKNIELNDSKMLSENKRISKVLELLINNSVFALGYSSNQEIDEINILNATKLAMKRAVKNLNAKPATLLIDGNHDIGTGLKEICIIKGDKTCKSIAAASIIAKFTRDFILKKISRIYPYYRLEKNKGYGTQEHVDSLRKYGPSPFHRKTFRIKQN

SEQ ID NO: 168561 - protein, 180 aa, Unknown
  Bacterial polypetide isolated from the Sargasso Sea
MIAGTDEVGRGCLAGPVVAAAVILKEDIPGLTDSKKLSPKKRQFLADLILKKSFFAYGVVSNNKIDKINILNASLLAMKRAILKLPVRPSMVLVDGTFKPDLDIPMRAIIGGDSSENAISAASIIAKVYRDNLMIKYDSIFPVYDLKGNKGYGTKKHLEALKNYGHCEIHRTTFNGVVIK

SEQ ID NO: 168562 - protein, 130 aa, Unknown
  Bacterial polypetide isolated from the Sargasso Sea
MNNNIIAGTDEVGRGCLAGPVVAAAVILKQEIAGLKDSKKLSPSKRVLLAEEILKNSYYGYGIVDNKKIDEINILKASLLAMKGAILNLPVKPNLVLVDGMYKPDLDIPMRTIIGGDSSEDVISAASIVA

SEQ ID NO: 168563 - protein, 142 aa, Unknown
  Bacterial polypetide isolated from the Sargasso Sea
MKYKIYTDGACSGNPGPGGWAAIIIIDDKIKDKISGSEKNTTNNKMELLAPIKAIQKFKKKSEILIFTDSTYVKDGITTWIKKWEKNGWKTASKKPVKNVELWKKLKNLSSNHSIKWIWVKGHAQNKYNNLVDELAQGAIKR

SEQ ID NO: 168564 - protein, 142 aa, Unknown
  Bacterial polypetide isolated from the Sargasso Sea
MKYKIYTDGACSGNPGPGGWAAIIIVDDKIRDEISGSEKNTTNNKMELLAPIRAIQKFKKKSEILIYTDSTYVKDGITTWIKKWEKNGWKTASKKPVKNIELWKKLKNLSSKHSIKWIWVKGHAQNRYNNLVDEIAQGAIKR

SEQ ID NO: 168565 - protein, 145 aa, Unknown
  Bacterial polypetide isolated from the Sargasso Sea
MTKNIKCGDQPLEAGVDEAGRGPLAGPVSAAAVILDPKQKIEGLNDSKKLSAKKREILSDEIKRKALSWNIVLIHRETIDKINILQASLLAMKEAVEGLTIKPEIILVDGENDIDVNQPCRPIVNGDQQVESIMAASILAKVRRD

SEQ ID NO: 168566 - protein, 189 aa, Unknown
  Bacterial polypetide isolated from the Sargasso Sea
MKKVAGVDEVGRGSLVGPVYAAAVIFKKNIDKSKIKDSKKLSKEKRNILEKYIKKNSIWGIGSVSLKEIEKLNILNASLLAMKRSIKKLKIKPTSTLIDGNKLPKMKGYKLKSVIRGDQKISEISAASIIAKVARDRLITNMSKKFKEYAWDKNAGYGTKEHLKAIKKFGITKHHRKNFRPIHNILSQN

SEQ ID NO: 168567 - protein, 147 aa, Unknown
  Bacterial polypetide isolated from the Sargasso Sea
MKRIEIYTDGACRGNPGPGGWGALLKFDNHEKEISGGEDNTTNNRMELLAAIKAIESVKETCEIDLYTDSKYVKQGITEWIIKWKTNGFKNSKKKPVVNADLWVQLDDLTNKHKINWFWVKGHAGHEFNERADMLANKGLDDMLENS

SEQ ID NO: 168568 - protein, 141 aa, Unknown
  Bacterial polypetide isolated from the Sargasso Sea
YQLQATKKIKFSLGMASVKEIDELNILEATKLSMKRAVIKLNRPPLPLIIDGKIDLKLRNYPSHGIIKGDQKSLSIATASIIAKVHRDRYMQFLSYTFPYYNWSSNAGYGTKKHIEQICKKGITIHHRKSFEPIKSLIHNK

SEQ ID NO: 168569 - protein, 177 aa, Unknown
  Bacterial polypetide isolated from the Sargasso Sea
MKAGVDEAGRGPLAGPVFAAAVILDETIKIDGLNDSKKISETKRLELADEIKLKAISWSVQSCSALEIDKTNILKATLEAMKKAIEGLCSRPKLVLVDGLHSPKINVPVRTIVKGDQLEKTIMAASILAKVHRDKYMKKVDILYPNYGFKHHKGYPTKIHLEALKSYGITEEHRLTF

SEQ ID NO: 168570 - protein, 180 aa, Unknown
  Bacterial polypetide isolated from the Sargasso Sea
MVAGTDEVGRGCLAGPVVAAAVILKTKIDNLKDSKKLTEKKRELLSKIILENSFFGFGIVSNLEIDNINILNASLLAMKRAILNLESKPALVLIDGIHKPDLDVPMQTIIGGDSIEPAISAASIIAKVYRDNLMTVYDKKYPEFNFKKNKGYGTKEHFQAIALNGICCIHRKSFKGVEIR

SEQ ID NO: 168571 - protein, 153 aa, Unknown
  Bacterial polypetide isolated from the Sargasso Sea
MSKTKVEIYTDGACSPNPGVGGWGAILISSKHKIRTEISGAEGDSTNNRMEMTAAIKALEALKKPCVVDLYTDSSYLKNAFEQKWINNWKNKGWRTKGGDPVANKDLWLRLLEVSQNHKVSWYWVKGHSGHPENERCDELAVKARKEWSKSVK

SEQ ID NO: 168572 - protein, 147 aa, Unknown
  Bacterial polypetide isolated from the Sargasso Sea
MTTDTIDIYTDGACKGNPGPGGWGALMRYGDKEKELFGGEPNTTNNRMELMGVIAALEALKRPCQVIVHTDSQYVQKGISEWIHGWKKKGWVTAAKTPVKNADLWKRLDALVAQHEVEWRWVKGHAGHPENERADALANRGVESLTA

SEQ ID NO: 168573 - protein, 165 aa, Unknown
  Bacterial polypetide isolated from the Sargasso Sea
MVYTTGNGVNGFTFDPGIGVFFLSHPNMKIPASGRLYSVNEGNLNEFKDGVKKYISYCQSESEKDNKKPYSSRYIGSLVADFHRNLIKGGIYMYPSTKSAPNGKLRLLYECAPLAFIIEQAGGKAISESGRIMDIIPKELHERIPIFIGSSNMVDTIEQLMNSEG

SEQ ID NO: 168574 - protein, 289 aa, Unknown
  Bacterial polypetide isolated from the Sargasso Sea
MDKKNKLLDDYLDDLDLDDNLKKILSVISNTCYKISEAIRSSNINNLVGKTGEINVQGEQVEKLDEFSNDLLIKNLSESGKVFLMGSEEIESVIVPNPNNKDADYIVVFDPLDGSSNIDVAVTIGTIFAIYKKINNDQSDESNLLQKGSNAIVAGYTVYGSSSVMCISSKEDTSMFSFDKNGKALVTNEKIIHGNSKVYSVNESNWNKFTDKDKRWIESLRSGENGKYTARYVGSLVADFHRNLLKGGVFAYPADPKTGQGRLRLIYECNPLSFIAENTGGDANDGENK

SEQ ID NO: 168575 - protein, 283 aa, Unknown
  Bacterial polypetide isolated from the Sargasso Sea
MNLEKFLELQYKNKKNNINYNSNNLIQIFNLLSISAVEISKIISNPEQSELSNKSGVTNSDGDETKNLDLKADSIIRQNLSSTDIKWYASEEEKDFVFLNKNGSFTICIDPLDGSSNIETNAPIGTIFGIYKSRINPNETILQSGDNLIASGFFIYGPRLKLIFSIGNGTSVFQLNQSDEFVLMQEAIKIPENAKELSINFSNYAFWPSYIKSYVQERINLYKSNGQNNYNMRWIGSLVADCYRILARGGIFLYPQDKRKGYEKGRLRIVYEANPVAFLIEQS

SEQ ID NO: 168576 - protein, 305 aa, Unknown
  Bacterial polypetide isolated from the Sargasso Sea
KHYSVLSNAAKKISKSLAKNGLPENQLGTQVGEINSDGDTQKALDLIADENIVTALKNKNVVAYFSEERESALLLDPEGNLIVCADPLDGSSNIDNNMSVGTIFSILPRKTEVFEADQLLRDALQSGINQLASGFFVYGPQTSLILTTGKGAAAFLLDEEEFFKMEWEPNLPTKGSQFAINISNMRFWSQCTRSYIQSCVDGTEGTFAKNYNMRWCGSLVADAWRIFREGGIFLYPEDKRDNYKEGRLRLVYEANPIAFIAEQAGGRATNGNTDILFIKPGSLHQRVPLIFGSKEEVIKYESLNK

SEQ ID NO: 168577 - protein, 249 aa, Unknown
  Bacterial polypetide isolated from the Sargasso Sea
MSSQSSIITVQQHIMREQKRFPGASGEFSFLLSGITLATKMIQAQVRRAGLTDVLGEIGDINVQGEIQQKLDVLSNEALVHCLSSRESIGVLASEENENPMIVHEGSEEAKYAVVFDPLDGSSNIDVNVSVGTTFSILRKPDEVTGDNPEAWVLQPGSKQIAAGYVVYGSSTILVYSAGHGVHGFTLDPAIGAYVLSHENMTMPEQGKYYSVNEAYRDGFPTRYGEYIDRLRSGILGVNYSSRYIGSMV

SEQ ID NO: 168578 - protein, 251 aa, Unknown
  Bacterial polypetide isolated from the Sargasso Sea
MVQKAGISGMTGAAGAVNVQGEDQKKLDVVSNEIFCEVLRTSGRTGVIASEEEDTPVAVEETYNGNYVVVFDPLDGSSNIDAAVSTGSIFGVYSSDQSCVPDWGADDEGVVQEKCITNVCQPGNNLLAAGYCMYSSSCILMLTVGHGVYGFTLDPSIGEFVLSHEDVKIPEKGKIYSFNEGNYVNWEPGLKEYMDALKKGGHTEDGKPYSARYIGSLVGDFHRTMLYGGIYGYPGDAKNANGKLRLLYECA

SEQ ID NO: 168579 - protein, 168 aa, Unknown
  Bacterial polypetide isolated from the Sargasso Sea
AVLPPQKSGACALLVSEEQEDPIVVPPELRGSLCCAFDPLDGSSNIDCNVSTGTIFSVFKKTTGDDVEPAASDILKPGTEMVAAGYCMYGSAIDMVMTFGTGVHRFTLDDSLGEFVHIGPMNFPAKNKTIYSCNEGNYQLWDPQIQQVTPNSLSLSLSLSLSLSLSLS

SEQ ID NO: 168580 - protein, 236 aa, Unknown
  Bacterial polypetide isolated from the Sargasso Sea
MRNMITMGEFIVKKQADYPTATGELTSLLSSIRLAAKVVNREINKAGLADIIGSMGAENVQGEVQQKLDVYANERFKAALEARGEVCGMASEEEEDFVSFDSELSRHSKYVVLIDPLDGSSNIDVNVSVGTIFSIYRRVSKPGAGVTLEDFLQPGNRQVAAGYVVYGSSTMLVYTTGFGVNGFTYDPSIGCFCLSHENIRIPEEGKIYSINEGNYIKFPDGVKKYLKYVRSGTRRP

SEQ ID NO: 168581 - protein, 273 aa, Unknown
  Bacterial polypetide isolated from the Sargasso Sea
MLSISAIEISKIISNPEQSELSNKSGTINSDGDETKNLDLKADSIIRQNLLSTDIQWYASEEEQDFVFLNKNGSFTICVDPLDGSSNIETNAPIGTIFGIYKSRINPNETILQSGDNLIASGFFIYGPRLKLIFSIGNGTSVFQLNKNDEFVLIQEAIKIPQDTNELSINFSNYAFWPRYIKSYTEECINLYKSNSLSKYNMRWIGSLVADCYRILVRGGVFLYPQDTRKDYERGRLRIVYEANPVAFLIEQSGGFATDGQKRILSLKPKASR

SEQ ID NO: 168582 - protein, 338 aa, Unknown
  Bacterial polypetide isolated from the Sargasso Sea
MALQRRTTLTKYLIEQQRETNNLPADLRLLIEVVARACKAISYHVSKGALGDALGTAGSENVQGEVQKKLDILSNEILLEANEWGGNLAGMASEEMEQFFPIPANYPKGEYLLVFDPLDGSSNIDVNVSIGTIFSVLRCPDGQQPTEQSFLQPGTQQVAAGYAVYGPQTVLVLTTGNGVNCFTLDRELGSWVLTQSDMRIPVETREYAINASNERHWYPPVEKYIGELKAGKEGPRQSDFNMRWIASMVADVHRILNRGGIFMYPADKRTPDKPGKLRLMYEANPMAFIVEQAGGAATNGEKRILDIQPKSLHERVAVFLGSKNEVDRVTRYHLEAKK

SEQ ID NO: 168583 - protein, 287 aa, Unknown
  Bacterial polypetide isolated from the Sargasso Sea
LGSMGTENVQGEVQKKLDVISNEILLEANEWGGHLAGMASEEMDHAYQIPGQYPKGAYLLVFDPLDGSSNIDVNVSVGTIFSVLRCPDKYVEQSGSLDEHAFLQPGTEQVAAGYAIYGPQTMLILTLGDGVMGFTLDREMGSFVLTHENMKVPTSTAEFAINMSNQRHWEEPVKRYVSELLAGEEGPLEKNYNMRWIASMVADVHRILTRGGLFMYPRDAREPEKPGKLRLMYEANPMSMLIEQAGGAATNGSQRILDIQPESLHQRVAVFLGSKEEVERVTGYHQG

SEQ ID NO: 168584 - protein, 316 aa, Unknown
  Bacterial polypetide isolated from the Sargasso Sea
MDLNDYLLKNSKDDQISSIVKSLADAAIRISNTIRSLKPYESISKSDTKLNYDGDIQKPLDIISDEIILNFLKTSPAAGYASEEQEGYIDFKNNNNFIVFADPLDGSSNIDVNVSIGTIFSIMSKNKLSLEKAFIQNGSHQKSSGFFVYGPQTTLFITVGVGTSLFALDEIQGKFILIKDNITIPETTTEFAINAAYRRFWDSTTLKYITECQKGESGSRKKNFGMRWVGSLVADASRIFNRGGVFLYPSDTREKYKNGRLRLTYEANPIAFLVEQANGVATDGHKNILDLEVNELHQRSPLIFGSKEEVLEYKKS

SEQ ID NO: 168585 - protein, 285 aa, Unknown
  Bacterial polypetide isolated from the Sargasso Sea
MNGSIFDEDAIGGNQAVKSVVLKIAEVAIYLSEVISLGELRGSLVKSTGINADGDDQKELDVIADKAYLQALQKSEVRFYASEEQDEVLELNSSGVVALAIDPLDGSSNIDTNVSIGSIFSLRNVSPSSDSEVSYTQRQFFGPGTEQIAAGYIIFGPQTLLVLTTGDGVKQFVLDRNKNTFLLARESLKIPTNTHEYAVNASNYRHWSKPVRQYIEDSNAGEVGPRGSNFNMRWIASLVAETHRILTRGGIFIYPSDSRKNYRSGRLRMVYECAPIAFLVEQANG

SEQ ID NO: 168586 - protein, 325 aa, Unknown
  Bacterial polypetide isolated from the Sargasso Sea
MKRLNSQLQQDGAPLELILLIRTLLAGCKEISFRVSQGALAGVLGSTLSENVQGETQKKLDVISNHILKDTLRESGYVKAISSEEEDDVVPCNPDGNYLVSFDPLDGSSNTEINSLIGTIFSITHAPQWMKPDDPSAFLQPGTQMVAAGYVLYGPSTMLALTTGRGTHIYTLDKTHGGFLLTHPNIQVPEQTSEFSINASNQRHWEPAMQAYIADLLAGKDGPRGKNFNMRWVAAMVGDIHRLLCRGGIFMYPFDNRDPSKPGKLRLLYEANPMAFLMEQAGGKAETGTGRILEVMPEEIHQRVPCIIGSKEEVEMCLSYNDNAK

SEQ ID NO: 168587 - protein, 325 aa, Unknown
  Bacterial polypetide isolated from the Sargasso Sea
MKEKLAGDKNRELIALLKDLKLAGRQVSKELNTGALTGSLGDNTGSKNTHGEKVKKLDLIANDLFIKSLENGGNCAGIVSEENEKILIFNNPNSKNANYLVLIDPLDGSSNIDVNVPVGTIFSVLKKPKTSKKISVKDFLQEGKKQVAAGYIIYGSSTIYVLTVGKGVDAFTLDPHVNEFYVSQTNIQIPEKARMYSVNQGNFFEFPLALQEYIRWCEQKDPKTGRPYSLRYVGSMVADLHRSLFKGGLFIYSQAKNAPEGKLRLMYECNPMAYIIEQAGGLATDGRKSILTIKPKSIHQKSPIFIGSSEMVKLVDKYLKSKLFS

SEQ ID NO: 168588 - protein, 337 aa, Unknown
  Bacterial polypetide isolated from the Sargasso Sea
MSIARRTTLSKFLIEQQRETNNLPADLRLLIEVVARACKAISYNVSKGALGEALGTAGSENVQGEVQKKLDILSNEILLDANEWGGNLAAMASEEMETFFPIPANYPRGEYLLVFDPLDGSSNIDVNVSIGTIFSVLRCPDGKQATEESFLQPGTQQVAAGYAVYGPQTVFVLTTGNGVNCFTLDREVGSWVLTQSNMQIPADTREYAINASNARHWYDPVKRYIDELNAGKNGPRGDNFNMRWIASMVADVHRILNRGGIFMYPADKRTPDRPGKLRLMYEANPMSFIVEQAGGAATTGTQRIMEVQPTGLHQRVPVFLGSKNEVERVTGYHQEKE

SEQ ID NO: 168589 - protein, 330 aa, Unknown
  Bacterial polypetide isolated from the Sargasso Sea
MQTLAQHLTSKAVNESLAQLILTLADTSKAISHAVRHGALAGVLGATEQENVQGETQKKLDIITNDMLKDALKADGTVRGLASEEEDHVVEVSANGQYLVCFDPLDGSSNIDINSLVGTIFSVLPAPAGELTETSFLQSGRHQLAAGYVLYGPSTMLALTTGQGVQLFTLHPETNEFLLTNAAMSISPDTQEFAINMSNQRFWEAPMQTYIADLLLGKIGPREKSFNMRWIAAMVGDVHRVLSRGGIFTYPTDNKDPKKPYKLRLMYEANPMALLVEQAGGKASTGYETILDIQPTQIHQRVAVILGSANEVDACLSYHGIDYSEEPSLD

SEQ ID NO: 168590 - protein, 336 aa, Unknown
  Bacterial polypetide isolated from the Sargasso Sea
MRRELAIEFSRVTEAAALAGYKWLGRGDKNIADGAAVAAMRHILNQIQIDGEIVIGEGEIDEAPMLYIGEKVGTGLGDAVDIAVDPIEGTRMTAMGQANALAVLAVGDKGSFLKAPDMYMEKLIVGPKAKGAIDLDQALELNLKAVAKALGKPLSRLTVITLAKPRHDKAIKEMQGLGVRVFAIPDGDVAASILTCLPDSEVDMLYGIGGAPEGVISAAVIRALDGDMQARLVPRHQVKGDSPEVRALGEQEIARCEALGIDVSKVLKLEDLAKNDNVIFSATGITKGDLLDGITSDGVMATTETLLIRGKSRTIRRIKSIHFLDRKDSVVRDIIL

SEQ ID NO: 168591 - protein, 330 aa, Unknown
  Bacterial polypetide isolated from the Sargasso Sea
MQTLAQHLTSKAVNESLSQLILTLADTSKAISHAVRHGALAGVLGATEQENVQGETQKKLDIITNDMLKDALKADGTVRGLASEEEDHVVEVSANGQYLVCFDPLDGSSNIDINSLVGTIFSVLPAPQGELTETSFLQSGRNQLAAGYVLYGPSTMLALTTGQGVQLFTLHPETNEFLLTNAAMSISPDTQEFAINMSNQRFWEAPMQTYIADLLLGKIGPREKSFNMRWIAAMVGDVHRVLSRGGIFTYPTDNKDPKKPYKLRLMYEANPMALLVEQAGGKASTGYETILDIQPTQIHQRVAVILGSANEVDACLSYHGIDYSEEPSLD

SEQ ID NO: 168592 - protein, 319 aa, Unknown
  Bacterial polypetide isolated from the Sargasso Sea
GELAVVLSSIGLACKQIASLVQRAGLAGMTGLAGEQNVQGEDQKKLDVISNDVFCDVLRQSGRTGVIASEEEDVPVAVEETYGGNYVVVFDPLDGSSNIDAAVSTGSIWGIYESDSSCIPDFSAEDSAKIEEKCVMNVCQPGNNLLCAGYCMYSSSTILVLTIGQGVYGFTLDPTVGEFIMSHDNIKVPESGKIYSFNEGNYGMWSEGLKKYMDSLKDGGKEAGSKPYSARYIGSLVGDFHRTILYGGIYGYPGDSKNPNGKLRLLYECAPMSMIVEQAGGKGSTGTERVLDIVPDKVHQRVPFFVGSKNEVDYLESFM

SEQ ID NO: 168593 - protein, 303 aa, Unknown
  Bacterial polypetide isolated from the Sargasso Sea
LIRTILAACKEISFRVGQGALSGVLGSTLDENIQGETQKKLDVLSNQLLKDILLESGTVKAIASEEEDYTVAGNPDAKYIVAFDPLDGSSNTDINSLVGTIFSIMEAPEGSDAADESIFMQPGHKQVAAGYVLYGPSTMLALSTGKGTRMFTLDKTQGSFLLTEDFATIPADTNEFAINASNQRHWQPAMQNYINDLLEGDTGPRAKNFNMRWIAAMVGDVHRVLSRGGVFTYPTDTKDPNKPNKLRLLYEANPMAMLVEQAGGIASTGSERIMDIQPDAIHQRVAVILGSKNEVETCLEYHK

SEQ ID NO: 168594 - protein, 199 aa, Unknown
  Bacterial polypetide isolated from the Sargasso Sea
MSNVEAHIETLKQCKTITEAEVVSLCQKAKDILFEEENVHHVPIPATVVGDIHGQFWDLLELFDVGGQVPDVNYVFMGDFVDRGYYSVETFLLLLALKVRYPKRVTLIRGNHESRQITQVYGFYDECLKKYGTTTVWKSCVEVFDCLCLCAVVDNSVLCVHGGLSPSLDTVDQVQDLNRVQEPPHEGPMCDLMWSDPDD

SEQ ID NO: 168595 - protein, 118 aa, Unknown
  Bacterial polypetide isolated from the Sargasso Sea
MCDLLWSDPDDRCGWGISPRGAGYTFGQDISEQFNHANGLDLIARAHQLVQDGYEWAHDRSVVTVFSAPNYCYRCGNRGAIMEVDENRRRAFLQYEQYRRAVNPEARRNMVKTPDYFL

SEQ ID NO: 168596 - protein, 225 aa, Unknown
  Bacterial polypetide isolated from the Sargasso Sea
TGHGLSLQSPLRVEKADELFGEGIEAWGCSGTPADCVKLALSELLDHKPDLVLSGINHGPNLGTDIFCSGTVAAAMEGTLENVPSMAISVASFKWKNFEFAGEIAMNIAEQAINDSWPASLLLNLNIPPCEKNKIKELSWTRLSVRKYKNQFSKREDPRGDDYYWLAGEVVLDLKSKGYGPKNWPSDVSQIQENKISLTPVEPDLFWRGNLKNLPKINNSFVNPS

SEQ ID NO: 168597 - protein, 148 aa, Unknown
  Bacterial polypetide isolated from the Sargasso Sea
MKPLNILISNDDGVFASGIRALAKSAQKRGHKVKVVCPDQERSATGHGLTLQSPLRVEKADELFGEGIEAWGCSGTPADCVKLALSELLDHKPDLVLSGINHGPNLGTDIFCSGTVAAAMEGTLENVPSMAISVASFKWKNFEFAGEM

SEQ ID NO: 168598 - protein, 145 aa, Unknown
  Bacterial polypetide isolated from the Sargasso Sea
MKPLNILISNDDGVFAAGIRALAKSAQKRGHKVKVVCPDQERSATGHGLTLLSPLRVEKADELFGQGIEAWGCSGTPADCVKLALSELLDHKPDLVLSGINHGPNLGTDIFCSGTVAAAMEGTLENVPSMAISVASFKWKNFEFA

SEQ ID NO: 168599 - protein, 240 aa, Unknown
  Bacterial polypetide isolated from the Sargasso Sea
DDGYQASVISILAEVLSEIGNVTVVAPDRDRSGASNSLTLDSPLYVKQDKRGFYYVNGTPSDCVHLAITGLLDEEPDMVISGINAGANLGDDVLYSGTVAAAMEGRFLGCPAIAFSLAGESSNYKSAVLVVKKVIQSLIKNPLEEILLNINIPDVNYDSIEGYEVTRLGNRHKSEPAIETHDPKGRKVYWVGEVGAERDAGKGTDFYAIRKNKVSITPMHIDLTKHQFLSTISNWIEVLN

SEQ ID NO: 168600 - protein, 190 aa, Unknown
  Bacterial polypetide isolated from the Sargasso Sea
MFALLTNDDGIYAPGLAALEDAVNNELRTLVVAPSTEQSGVGHGITFLSPLTAKEVFRGEKRCGWAVDGSPADAVKLGVSEICPQRPDLIISGINAGLNAGINVLYSGTVAAAIEGSFFGITSIAVSLEWDDQMNFERAAQFASGLIKQLISLRPPAGSLFNINIPTAALVETPEVRVVPMSVARYGEAF

SEQ ID NO: 168601 - protein, 190 aa, Unknown
  Bacterial polypetide isolated from the Sargasso Sea
MRILISNDDGYLAPGLAALNAAVSSIAETFVIAPDRNRSGASNSLTLTRPLRVSTAHNGFRRLDGTPTDCVHVGLTGLMDPEPDMVIAGINHGANLGDDVLYSGTVAAAMEGRYLGFPAVAISLAGSDVQHFDAAARIALQVLERMQAHPLPRDSILNVNVPDLPFELIKGFRATRLGCRHKSDPVIRAQ

SEQ ID NO: 168602 - protein, 212 aa, Unknown
  Bacterial polypetide isolated from the Sargasso Sea
MDLPVRVKRIDHYTCSVAGTPTDCVHLALTGMLEYDPDIVVSGINNAANLGDDVIYSGTVSAAMEGRFLGLPAVAMSLVSHNHDPRNFETAARAAVEIVTRLKADPLPADTILNVNVPDLPWAEVRGFEVTRLGNRHRAEGCIAQRDPRGNEVFWIGPAGREQDSGPGTDFHAVRNGYISITPIQVDLTRYQALEKVASWVGGLTAALDRPA

SEQ ID NO: 168603 - protein, 270 aa, Unknown
  Bacterial polypetide isolated from the Sargasso Sea
MNLRCSRILVTNDDGINAPGLRVLEKIAKSLSDDVWVVAPESEQSASGHSLTLTLPLRVRKAGARKFAVDGTPTDSVLLGVRHIINGKKPDLMLSGVNAGGNLGEDITYSGTVAAAMEGTLLGIPSIALSQMRVYGENVGWGPTERHAVHIIKKLTRETWPSNVLMNVNFPDLPAEDVEKIEVTVQGRRKIGDAITTGRDPRGYDYVWIGAERNEDPSFRGSDLKAVNEGRISVTPLCLDLTHKRSMRRLREFFDESGSQSHSADHGASP

SEQ ID NO: 168604 - protein, 119 aa, Unknown
  Bacterial polypetide isolated from the Sargasso Sea
MKPLNILISNDDGVFAAGIRALAKSAQKRGHKVKVICPDQERSATGHGLTLQSPLRVEKADELFGQGIEAWGCSGTPADCVKLALSELLDHKPDLVLSGINNGPNLGTDIFVQAQSLQL

SEQ ID NO: 168605 - protein, 189 aa, Unknown
  Bacterial polypetide isolated from the Sargasso Sea
MKLALFELVKDKPDLVLSGINHGPNLGTDVFCSGTVAAAMEGTLEGIPSMAISSACFQWRQFQAGAELAVEIAEQALADQWPENLLLNLNIPPCNRDAMGPLRWTRLSIRRYDEQFSSRVDPRGRAYYWLAGEVVNDLESAGEGPRDWPSDVAQIHANSPSLTPIQPDLFWRGSLSGLPQLKLKDQLVR

SEQ ID NO: 168606 - protein, 167 aa, Unknown
  Bacterial polypetide isolated from the Sargasso Sea
MIILLSNDDGYNANGIKVLSKSLDQIARVILCAPMENHSGSSSSLSLRKDISVKQIEKDVFVFSGTPADTVHLGLSGFLDVTPDLVVSGINHGANLGEDILYSGTVAAAIEGRVLDMPSIAVSSLGDTERDFKVAARVTIELIQRLKKYPLPKETILNVNVPAINYE

SEQ ID NO: 168607 - protein, 128 aa, Unknown
  Bacterial polypetide isolated from the Sargasso Sea
MKPLNILISNDDGVFAAGIRALAKSAQKRGHKVKVVCPDQERSATGHGLTLQSPLRVEKADELFGEGIQAWGCSGTPADCVKLALSELLDHKPDLILSGINHGPNLGTDIFCSGTVAAAMEGTLENVP

SEQ ID NO: 168608 - protein, 182 aa, Unknown
  Bacterial polypetide isolated from the Sargasso Sea
MRILISNDDGYLAPGLTALNAVVSSIAETFVIAPDRNRSGASNSLTLTRPLRVSTAHNGFRRLDGTPTDCVHVGLTGLMDPEPDMVIAGINHGANLGDDVLYSGTVAAAMEGRYLGFPAVAISLAGSNVEHFDAAARIALQVLERMQAHPLPRDSILNVNVPDLPFELIKGFRATRLGCRHK

SEQ ID NO: 168609 - protein, 137 aa, Unknown
  Bacterial polypetide isolated from the Sargasso Sea
MRILISNDDGVNAPGIAALHQALADYAECVVVAPAEDKSGASSALTLDRPLHPVALPNGFISLNGTPTDCVHLGINGLLEQTPEMVVSGINLGANLGDDVLYSGTVAAALEGRFLDKTAFAFSLLSRLPDTCPRLPI

SEQ ID NO: 168610 - protein, 209 aa, Unknown
  Bacterial polypetide isolated from the Sargasso Sea
DELFEEGIEAWGCSGTPADCVKLALSELLDKKPDLVLSGINHGPNLGTDIFCSGTVAAAMEGTLENVPSMAISVASFKWKNFDFAGEIAMNIAEQAIKDSWPASLLLNLNIPPCDKSKIKELSWTRLSVRKYKNQFSKREDPRGDDYYWLAGEVVLDLKSKGYGPKNWPSDVSQIQDNKISLTPVEPDLFWRGNLEDLPKINNSFVNPS

SEQ ID NO: 168611 - protein, 245 aa, Unknown
  Bacterial polypetide isolated from the Sargasso Sea
MVSNDDGVHAEGIRALSEALAACGEVIVVAPDRNRSGASHSLTLEVPLRVTRIAETGYHAVKGTPTDCVHLAVNELVRPEPDMVVAGINHGANLGDDVIYSGTVAAATEGRHLGFPSLAISLVGKTHFATAAHYAAQLVKGMMVHPLPADQILNVNVPDLPLDQIKGIRVTRLGNRHRAESVICSEDPRGQPIYWIGPPGSQQDAGEGTDFAAIEQGYVSITPLTIDMTAYSSLAGLGAWLDLQG

SEQ ID NO: 168612 - protein, 231 aa, Unknown
  Bacterial polypetide isolated from the Sargasso Sea
MTRKDQLQSWSYFTIPVKSEKADELFREGIEAWGCSGTPADCVKLALSELLDHKPDLVLSGINHGPNLGTDIFCSGTVAAAMEGTLENVPSMAISVASFKWKNFEFAGEIAMNIAEQAIKDSWPASLLLNLNIPPCEKNKIKELSWTRLSVRKYKNQFSKREDPRGDDYYWLAGEVVLDLKSKGYGPKNWPSDVSQIQENKISLTPVEPDLFWRGNLDDLPKINNSFVNPS

SEQ ID NO: 168613 - protein, 210 aa, Unknown
  Bacterial polypetide isolated from the Sargasso Sea
ADELFEKGMEAWGCSGTPADCVKLALSELLDNKPDLLLSGINHGPNLGTDIFCSGTVAAAMEGTLENVPSMAISVASFQWKNFEFAGEIAINIAEQAIKDNWPASLLLNLNIPPCEKSKIKELTWTRLSARKYKNQFSKREDPRGDDYYWLAGEVVLDLKSKGHGPKNWPSDVSQIQDNKISLTPVEPDLFWRGNLEDLPKINNSFIYPS

SEQ ID NO: 168614 - protein, 128 aa, Unknown
  Bacterial polypetide isolated from the Sargasso Sea
MKPLNILISNDDGVFAAGIRALAKSAQKRGHKVKVVCPDQERSATGHGLTLQSPLRVEKANELFGEGIEAWGCSGTPADCVKLALSELLDNKPDLVLSGINHGPNLGTDIFCSGTVAAAMEGTLENVP

SEQ ID NO: 168615 - protein, 289 aa, Unknown
  Bacterial polypetide isolated from the Sargasso Sea
MALSRTRYSATCIRPAGRVFRHRGGARIARSGASRADGYSMRILISNDDGVNAPGIAALHQALADYADCVVIAPAEDRSGASSALTLDRPLHPMALANGYISLNGTPTDCVHLGLNGLLEQTPDMVVSGINLGANLGDDVLYSGTVAAALEGRFLSKPAFAFSLLSRLPDNLPTAAYFARKLVEAHERLELPPRTVLNINVPNLPLEHIRGVQLTRLGHRARAAAPVKVVNPRGKEGYWIAAAGDVEDGSQGTDFHAVMQGYVSITPLRLDRTFNEALETMDGWLEGIF

SEQ ID NO: 168616 - protein, 231 aa, Unknown
  Bacterial polypetide isolated from the Sargasso Sea
MKILLSNDDGYHAIGIQELIKQLEKEHDIYVAAPSKNHSAGSSALSVRKDIKINNIKKNHYIIDGTPSDCVHIALTCLIKDKIDMVVSGINLGANLGDDVIYSGTVAAALEGRHLEMSPIAISLVSHDKLSMSKAAIESSKIIQEIVCKEEIAKKTLLNINIPDFESENLSFEFTRLGKRGIPLPASNIKDDFYKIGAAGPPEDDSEGTDFYCINKNKISITPLTYDLTNI

SEQ ID NO: 168617 - protein, 249 aa, Unknown
  Bacterial polypetide isolated from the Sargasso Sea
MIRILVSNDDGVNAPGIKALTEALAEIATVMTVAPDRNCSGASNSLTLTNPLRINRLDNGYISVHGTPTDCVHLAIRELCDGEPDMVVSGINAGANMGDDTLYSGTVAAAMEGRFLGFPAVAISLNGKALKHYHTAAVYARRIVQGLLAHPIASDQILNINVPDLPLDEIKGIRVTRLGARHKAEGIVRTQDPAGKEIFWLGPPGVEQDASEGTDFHAVAHGYVSITPLTVDLTAYRQLSVLQDWVDKI

SEQ ID NO: 168618 - protein, 245 aa, Unknown
  Bacterial polypetide isolated from the Sargasso Sea
MKILLTNDDGYFSKGIVMLDEMLSEVGDVTIVAPENNHSGASSSLTLKNPLRIRKYKDNGFYVNGTPADCVFMALTRILKSPPDILISGINHGANLGDDVLYSGTVGAAMGGRFHPFPSLAVSITNLKPDHFTTAVEVVREIIEEKLDKLPNPSSILNINVPDIPIEQIEGYSLTRLGRRELPENDRINTDAYGNEIHWVGPPPEPILGEEGTDFDAISKNRVSITPLETDFTDFKSMDEFQNWL

SEQ ID NO: 168619 - protein, 298 aa, Unknown
  Bacterial polypetide isolated from the Sargasso Sea
MRCFPEHAERRSATRRRGVSGGPQPSIRSRRTVALAPSFLGYNRRMRILLSNDDGYLAPGLAALSDALQPLAELTVIAPEQNCSGASNSLTLSRPLSVQRAASTGFFYVNGTPTDSVHIALTGMAEASPDLVVSGINNGQNMGEDTLYSGTVAAATEGIMFGVPAIAFSLVDKGWAHLADAARVAAEIVEHYLAHPLPGQPLLNVNIPNLPYDELKGWKVTRLGKRHPSQPVIRQTDPRGEPIYWIGAAGEALDASDGTDFHAVANGFVSITPLQLDLTHTQMLPATREWARAGGRAS

SEQ ID NO: 168620 - protein, 245 aa, Unknown
  Bacterial polypetide isolated from the Sargasso Sea
MKILLTNDDGYFSKGIVMLDEMLSEVGDVTIVAPENNHSGASSSLTLKNPLRIRKYKDNGFYVNGTPADCVFMALTRILKSPPDILISGINHGANLGDDVLYSGTVGAAMGGRFHPFPSLAVSITNLKPDHFSTAVEVVREIVEKKLDKLPNPSSILNINVPDIPIEQIEGYSLTRLGRRELPENDRINTDAYGNEIHWVGPPPEPILGEEGTDFDAISKNRVSITPLETDFTDFKSMDEFQNWL

SEQ ID NO: 168621 - protein, 245 aa, Unknown
  Bacterial polypetide isolated from the Sargasso Sea
MRILLTNDDGYFSKGITMLDEMLSEIGEVTIVAPENNYSGASSSLTLKNPLRIRKYKDNGFYVNGTPADCVFMALTRILKNPPDILISGINHGANLGDDVLYSGTVGAAMGGRFHPFPSIAISITNLKPDHLSTAVEVLREIIDKKLDRLPNPSSILNVNVPDIPIDEIQGYSLTRLGRRELPQNDRINTDAYGNEIHWVGPPPEPVLGDEGTDFDAISKNRVSITPLKTDFTDFKSMEALKDWL

SEQ ID NO: 168622 - protein, 249 aa, Unknown
  Bacterial polypetide isolated from the Sargasso Sea
MIRILVSNDDGVNAPGIKALTEALAEIATVMTVAPDRNCSGASNSLTLTNPLRINRLDNGYISVYGTPTDCVHLAIRELCDGEPDMVVSGINAGANMGDDTLYSGTVAAAMEGRFLGFPAVAISLNGKAFKHYHTAAVYARRIVQGLLAHPIASDQILNINVPDLPLDEIKGIRVTRLGARHKAEGIVRTQDPAGREIFWLGPPGVEQDASEGTDFHAIAHGYVSITPLTVDLTAYKQLSILQNWVDKI

SEQ ID NO: 168623 - protein, 255 aa, Unknown
  Bacterial polypetide isolated from the Sargasso Sea
MKKHKPRILLTNDDGIYSKGIYALWEAMCEIGEVTVMAPNTEKSAVGHAITISDPVGIEPCNRHGDFKGYAVNGTPADCVKIAIGSFLDKKPNIVVSGINAGANVGTNILYSGTVSAAAEGTMLGVPSVAFSLNTFKANNYDLSKEVAKKMTTNVLKHGLPKGTLLNVNIPKCEISECKGYKITTQGKEYFLDDLKKRESPRGRLYYWMSGKIVNNDMSDEQDGYAVINNWVSVSPIQYKLTDHKFLDNLKSWEL

SEQ ID NO: 168624 - protein, 266 aa, Unknown
  Bacterial polypetide isolated from the Sargasso Sea
MRVLISNDDGVFAEGIRTLAAAAVARGHEVTVVCPDQERSATGHGLTLQTPIRAERADELFVPGVTAWACSGTPADCMKLALFELVKQKPDLVLSGINHGPNLGTDVFCSGTVAAAMEGTLEGIPSMAISSACFQWRQFQAGAELAVDVAEQALADQWQDNLLLNLNIPPCDRDAMGPLRWTRLSIRRYDEQFSSRVDPRGRAYYWLAGEVVNDLESAGEGPRDWPSDVAQIHNNCPSLTPIQPDLFWRGSLSGLPQLKLKDQLVR

SEQ ID NO: 168625 - protein, 252 aa, Unknown
  Bacterial polypetide isolated from the Sargasso Sea
MKILLTNDDGYDAINIKAIYEKLSEEHEVWIVAPKGNCSGMSAAISYLNEIEVKKIDEKIFSVDGTPADCSYLGLLSIVDFEFDMVVSGINHGANIGNDVLYSGTVGAAVGGRNLKYPPIAISVASYDAKDINFIAKKSCEIVDKIFSANGLLKGRVININFPDITEDEYKGIKSTVISKRDIPARPIKLESNSSEDGIYKYRYNLSGEPLKEDIFITDAEAVKNGFVSFSVLDYSLNSENFINDVTELIDV

SEQ ID NO: 168626 - protein, 269 aa, Unknown
  Bacterial polypetide isolated from the Sargasso Sea
MKPLNILISNDDGVFAAGIRALAKSAQKRGHKVKVVCPDQERSATGHGLTLQSPLRLEKADELFGEGIEAWGCSGTPADCVKLALSELLENKPDLILSGINHGPNLGTDIFCSGTVAAAMEGTLENVPSMAISVASFKWKNFEYAGEIAMNIAEQAINDSWPASLLLNLNIPPCEKSKIKELSWTRLSVRKYKNQFSKREDPRGDDYYWLAGEVVLDLKSKGYGPKKWPSDVSQIQENKISLTPVEPDLFWRGNLDKLPKINNSFINPS

SEQ ID NO: 168627 - protein, 209 aa, Unknown
  Bacterial polypetide isolated from the Sargasso Sea
MNYFGKGIEAWGCSGTPADCVKLALSELLDHKPDLVLSGINHGPNLGTDIFCSGTVAAAMEGTLENVPSMAISVASFKWKNFEFAGEIAMNIAEQAINDSWPASLLLNLNIPPCEKSKIKELSWTRLSIRKYKNQFSKREDPRGDDYYWLAGEVVLDLKSKGYGPKKWPSDVAQIQENKISLTPVEPDLFWRGNLDKLPKINNSFINPS

SEQ ID NO: 168628 - protein, 269 aa, Unknown
  Bacterial polypetide isolated from the Sargasso Sea
MESLNILISNDDGVFAEGIRALAKSALKKGHKVTVVCPDQERSATGHGLTLQSPLRVERADELFDKGIKAWGCSGTPADCVKLALSELLDKKPDLVLSGINHGPNLGTDIFCSGTVAAAMEGTLENVPSMAISVASFKWKNFEFASEIAMNIAEQAIKDSWPKSLLLNLNIPPCERNKIKELSWTRLSIRKYKNQFSKREDPRGDDYYWLAGEAVLDLKSKGDGPKNWPSDVSQIQENKISLTPVEPDLFWRGSLDVLPKINTSFINAS

SEQ ID NO: 168629 - protein, 269 aa, Unknown
  Bacterial polypetide isolated from the Sargasso Sea
MKPLNILISNDDGVFAAGIRALAKSAQKRGHKVKVVCPDQERSATGHGLTLQSPLRVEKADELFGEGIEAWGCSGTPADCVKLALSELLDHKPDLVLSGINHGPNLGTDIFCSGTVAAAMEGTLENVPSMAISVASFKWKNFEFAGEIAMNIAEQAINDSWPASLLLNLNIPPCEKNKIKELSWTRLSVRKYKNQFSKREDPRGDDYYWLAGEVVLDLKSKGYGPKNWPSDVSQIQENKISLTPVEPDLFWRGNLDDLPKINNSFVNPS

SEQ ID NO: 168630 - protein, 201 aa, Unknown
  Bacterial polypetide isolated from the Sargasso Sea
MSKVLVLKSSILAGYSQSGQLSDYFVEQWREKHSADEITIRDLAANPVPVLDGELVGAMRPSDTPLTPRQQEALALSDELIAELKAHDVIVIAAPMYNFNIPTQLKNYFDLIARAGVTFRYTEKGPEGLVTGKRAVVLTSRGGIHKDTPTDLITPYLNVFLGFIGITDVNVVFAEGIAYGPEVASKAQSDAKAAIDSVVAA

SEQ ID NO: 168631 - protein, 174 aa, Unknown
  Bacterial polypetide isolated from the Sargasso Sea
MTKIDFRNKINWRRRYRSPQGVSSEHEILRIFESDRGRIINSPAIRRLQQKTQVFPLERNAAVRTRLTHSMEVQQVGRYIAKEILSRLKEKKLLEVYGLDDLTGPFESIVEMACLMHDIGNPPFGHFGEAAINDWFSQRLAPKDALSQPLSHDRCEVADLRLRKGEETLNTLRS

SEQ ID NO: 168632 - protein, 202 aa, Unknown
  Bacterial polypetide isolated from the Sargasso Sea
MTENIIVAPTPTPTPTPTPTPTPTPTPTPTPTPTPESRAATIAFTGDILSHSPVFEAAKRYGDTTKEYNYLPMFSEVNELIQGADLAICHLETPISADNKELSGYPIFNAPKELANDLASVGYNGCSTASNHSLDKGPIGVFSTLDELEAAGLKWAGMARNMQEKQVPTFYLVNEIVIAHLSYTYGLNGFLIPSKLPFLVDV

SEQ ID NO: 168633 - protein, 196 aa, Unknown
  Bacterial polypetide isolated from the Sargasso Sea
SVVHSFVHSFVHSCVHSFINSFVHSFIHSFVHSFIHSFVRSFDHSIVNSFNHSRHPHDTDTPTPTPTPAPAPTPTPTPTPTPTPTPTSHAHAHAHAHAHARARARAHAHARDPPPCRRSSRRTCPPAAPRRTGPILAAYTPLAEHFPFGHPPPKLRYMCVFVYMYIIIYIYIYIYMYVCMYVYMCRERDTMIFRMI

SEQ ID NO: 168634 - protein, 171 aa, Unknown
  Bacterial polypetide isolated from the Sargasso Sea
MLALILSGTSFKSIASEGEEGSEAFDDPNAEEEAESTEEAPEETGSEAGGGSAVAGAGVWVAITGAILGLFSGGSSEYVTPSGNDPVTPTPTPTPTPTPTPTPTPTPTPTPTPTTPATTATTATTATTATTATTATTGTTATTTTSTTSTTSSTTGTTTSTSSSSTGTTGS

SEQ ID NO: 168635 - protein, 174 aa, Unknown
  Bacterial polypetide isolated from the Sargasso Sea
MLIFVLSGTSFKSIASEGDESSEAFDDPNASEEEASEDAVSETSGNSSGSSSGTGAGTGVWVAITGAVLALFSGGGSSSDDVPPQPEPPVTPTPTPTPTPTPTPTPTPTPTPTPTPTPTPTPTPTPTTGTTGTTGTTGTTGTTGTTGTTGTTGTSGTTGTTGTTGTTGTTGTTG

SEQ ID NO: 168636 - protein, 177 aa, Unknown
  Bacterial polypetide isolated from the Sargasso Sea
MLALILSGTSFKSIASEGEEGSEAFDDPNAEEEAESTEEAPEETGSEAGGGSAVAGAGVWVAITGAILGLFSGGSSEYVTPSGNDPVTPTPTPTPTPTPTPTPTPTPTPTPTPTPTPTPTTPATTATTATTATTATTATTATTGTTATTTTSTTSTTSSTTGTTTSTSSSSTGTTGS

SEQ ID NO: 168637 - protein, 115 aa, Unknown
  Bacterial polypetide isolated from the Sargasso Sea
AVLALFGGGGSEYTTPSGNPPVTPTPTPTPTPTPTPTPTPTPTPTPTPTPTPTPTPTPTPTPVTTTTSTGTTGTTASTSTTSTTGTTASTSTTASTSTTGVTTTTTSTSSSSSSN

SEQ ID NO: 168638 - protein, 215 aa, Unknown
  Bacterial polypetide isolated from the Sargasso Sea
MTKAKFAISVAGLLLSAAAAFGLIAVLTDNLPFLGNQAVLEPTPTIIPVAAIEPTPTPTPTPTPTPTPTPTLTPTPTPLPTGNPIPEAVPPAPRAPIILPAPTPSPTPQPTLQYTLATNLGVTNSLLVIGQNKIRLSCEHTGLPLKEWRIDFLNKESTSSKSFSAKGSTPNCDGRLHFDNRGSWEWDTLTLTSTNGVVTQQRSDGTYSVNNPREE

SEQ ID NO: 168639 - protein, 271 aa, Unknown
  Bacterial polypetide isolated from the Sargasso Sea
MRLLIAFLFASLVLVSCGGGGGGSSASPTNPTGNTTPSPTPSPTPTPTPTPTPTPTPTPSSSPTPSPTPTPTPVPSNLPISGAISLTNDFELDKASYEGSEEYMEQSGLALINASSAYARGATGVGSLIGVMDSGVDISHQELDGANKLTSDSYLVYSDRSPTTDEKRHGTHVSAIALGERDGSGMHGVAFDAQLFFISIKLGTAGEDYEPAQIDTTVDYTGVDSSWSQLEGVFVERGVTVVNGSFGYQGNINDYTEEDLRYAFPKLLKLW

SEQ ID NO: 168640 - protein, 238 aa, Unknown
  Bacterial polypetide isolated from the Sargasso Sea
MALDSFGARGRGTPPTITANPATADFNFPISSTGQYQATTTQTFQLTIGGSSPDPTISLQNPVGFTLADATLKNASGKNISLAGSAEVPAGTYDLTISVPDPGQTPSNASVTIQLDSGRLGKATADVSGRIGRDLPGAAPPTPTPTPTPTPTPTPTPTPTPTPTPTPTPTPTPTPTPTPTPTPTPTPTPTPTPTPTPTPTPTPTPPTGGGGGPTQPPIKIIPTPWSGGTTRMPAKTNH

SEQ ID NO: 168641 - protein, 230 aa, Unknown
  Bacterial polypetide isolated from the Sargasso Sea
MPIALFACADPPPVEEQLPAVVVVEKPTDHRPAYHFTPREGWMNDPNGMVYYAGEYHLFYQYYPYATVWGPMHWGHAVSKDLTNWEHLPIALSPDENGLIFSGSAVIDWNNTSGFGQDSIPPMVAIFTHHNLLGEKVGSDDFQTQGIAYSLDSGRTWTKYANNPVIANPGIRDFRDPKVIWHGGTQRWIMVLAAGDRIQLYNSPDLKEWKLTSEFGEGSVPNLGVWECPD

SEQ ID NO: 168642 - protein, 154 aa, Unknown
  Bacterial polypetide isolated from the Sargasso Sea
MSGTSFKNFASEGEEGSEAFDDPNAEAAEAEAAESASGAGAAAAAGAAAAGGAAAGATVWVAITGAILGLFSGGSSEYATPIGDDPVTPTPTPTPTPTPTPTPTPTPTPTPTPTTTTTTTGTTTGTTTGTTTGTTTGTTTSSTTSSTTTSSTGG

SEQ ID NO: 168643 - protein, 193 aa, Unknown
  Bacterial polypetide isolated from the Sargasso Sea
MTDTDGTVFGTHSLSVPSITIGINSPTPTPTPTPTPTPTPTPTPTPTPTPTPTPTPTPTPVPLGNYLPVLQELSVNPTSLNQGQQPAITVRATGGMPGYSGNTNDTHHVASAYIRWVDGSNSVKAESHCSFTGSSSYSTSCNFNETGGGLSNITTLQIGDIQVKDHATQWRTYKNSYVHGESFIFVWWPGLLG

SEQ ID NO: 168644 - protein, 241 aa, Unknown
  Bacterial polypetide isolated from the Sargasso Sea
NYEENVECSFYWNGDKNCNWIPVITPTPTPTPTPTPTPTPIPTPVTSWTTGDIDQIIGNGESISFQTDLLSNSVSSLTIKYGLWNSPNVNLRILLNGSEVVNMLVDTAWFDISGPKISTWNISNYLIPGVNIVDVESSTGGDAMIGFIRIDNTIIPTPTPTPTPTPTPSPTPTVTPTPTPIPTDYGGGNISNNQIIESSIDFNGDIDEWTFNGNTLNKISVTMNLIQSSNGLNPYLELISP

SEQ ID NO: 168645 - protein, 180 aa, Unknown
  Bacterial polypetide isolated from the Sargasso Sea
MILSGTSFKSFAQDEGAKGPTEEFDDPNEEATDDAAAGAASTSSSAGTATAGSGVWVAITGAILGLFSGGSSSMDLPTGEPPVTPTPTPTPTPTPTPTPTPTSTPTPTPTPTPTPTPTPTPTPTPTPTPTPTPTPTPTPTPTPTPTPTPTPTSTTTTTTTTTTEEAATTTTTTTTTTTGT

SEQ ID NO: 168646 - protein, 198 aa, Unknown
  Bacterial polypetide isolated from the Sargasso Sea
MRIAQNSILVLLFICSLIITSCNSEEPISENIPDIEATVQARLDEAVRIAILSTPTPTPIPTPTPTPTPTPTPIPTPTPTPTPTPTPIPTPTPTPIPTPTPTPTPIPTPTPLPLPTPTPMVVVVRADQATIPEFNPLSSSEMKKMLSIIYEENPSAYSSSTSFSLDLNSGNMEANTITTDYTDEITSIFNTGYWLVTG

SEQ ID NO: 168647 - protein, 112 aa, Unknown
  Bacterial polypetide isolated from the Sargasso Sea
MKDLIKRILATLGTLALILFPQTALSAEEGAADAAGNSGGSAAGGNATGAAVGGVTAGTIAAVVAIAAAAAAISDSGSGGGAIAPTPTPTPTPTPTPTPTPTPTPTPTPTPT

SEQ ID NO: 168648 - protein, 130 aa, Unknown
  Bacterial polypetide isolated from the Sargasso Sea
CWVAITGAVLALFSGGDSEYTTPSGDAPVTLTPTPTPTPTPTPTPTPTPTPTPTPTPTPTPTPTPTPTVTTTATTGTTGTTGTTGTTGTTGTTGTTGTTGTTGTTGTTGTTGTTATTGTTGTTSSSSTTN

SEQ ID NO: 168649 - protein, 193 aa, Unknown
  Bacterial polypetide isolated from the Sargasso Sea
TAGTIAAVVAIAAAAAALSDSGSGGGAVVPTPTPTPTPTPTPTPTPTPTPTPTPTPTPTPTPTIEEYTYVKTVEVPAVAGYTITHGTAIRETGAVATRYSGETATRVTGATASRTTGLTTSNTLHTNVANSVTIGTDGRGDPIYEITEVYDVVEDYETIEEYNVEEEYTQTTVVAPIATSTTTVTATATRESQ

SEQ ID NO: 168650 - protein, 190 aa, Unknown
  Bacterial polypetide isolated from the Sargasso Sea
MKLFKKLGTYFSMLILVLSGTSFKSIASEGEEGSEAFDDPNSADEESSSDVSSEASKTAPAGTGAAAGAGAGAGVWVAITGAILGLFSGGSSEYTTPSGNPPVTPPAPTPTPTPTPTPTPTPTPTPTPTPTPTPTPTPTPTPTPTPATTTSTGTTGTTGTTGTTGTTGTTGTTGTTTTTTTTSTTTTSTN

SEQ ID NO: 168651 - protein, 138 aa, Unknown
  Bacterial polypetide isolated from the Sargasso Sea
SSDQQSTSSGSSSAGAGAGVWVAITGAILGLFSGGSSEYTTPSGNDPVTPTPTPTPTPTPTPTPTPTPTPTPTPTPTPTPTPTPTPTPTATTTTTTTPATTTTTTPATTTTTTPATTTTTTGTTTTTTTTTTSTTSGT

SEQ ID NO: 168652 - protein, 175 aa, Unknown
  Bacterial polypetide isolated from the Sargasso Sea
MYDRIKNLNNIMKRIIQNIIATVGTLSFLLFPQIAISEEEAATGSESGTGSAAGSNAAGTAVGGVTAGTIAAVVAIAAAAAAISDSGSGGGAVTPTPTPTPTPTPTPTPTPTPTPTIETYVTEVIVDVPGVASYTQAGPTATRTSGATATRTTGATSSNVTQATATRTTGATATR

SEQ ID NO: 168653 - protein, 188 aa, Unknown
  Bacterial polypetide isolated from the Sargasso Sea
MKLFKKLGTYFSMLMLLLSGTSFKSIASEGEEDAEAFDDPNAEEEASSGEAGSAAAGAAAGAAAGGAAAGAGVWVAITGAILGLFSGGSSEYVTPSGNDPVTPTPTPTPTPTPTPTPTPTPTPTPTPTPTPTPTPTPTPTPTPATTTTTTSTTSAPTTTTSSTSTTSTTTGTTTSTTSTTTGTTTTGT

SEQ ID NO: 168654 - protein, 324 aa, Unknown
  Bacterial polypetide isolated from the Sargasso Sea
MTRNLKLLGVAAATVLAWFGAENAQAATSTITVAGLQYKLCAQENGTCKFLGTASVVFGAVPPTAPSAMLTAPATFSNGVGCYVGAVSQTDPAFGYGKSCWVRAVAASATPTPTPTPTPTPTPTPTPTPTPTPTPTPTPTPTPTPTPTPTPTPTPTPTPTPTPTPTPTPTPTPTPTPTPTPGSSTLSCGTPTHTAGGTANGVISADTPTTDGLRIFQNNAPFKLTITTNAPSADTVVWSVADSNGAIKTQGSFAVSAGVRTNSIPCTSTWSGYGALTATLRSNGGTLPNSGTRPVGIATFGVLPNLTPVLGTVTYAHQDQHRFG

SEQ ID NO: 168655 - protein, 151 aa, Unknown
  Bacterial polypetide isolated from the Sargasso Sea
MKLFKKLGTYFSMLTLVLTGTSFKSIASEGEEDAEAFDDPNTSEEEDSGAEAAAAATGTAASAGTGAGVWVAITGAVLALFSGSDGEYTTPSGDEPVTPTPTPTPTPTPTPTPTPTPTPTPTPTPTPTPTPTPKTPSTTTTTTTTSTTSTT

SEQ ID NO: 168656 - protein, 145 aa, Unknown
  Bacterial polypetide isolated from the Sargasso Sea
MVLSGTSLKSIASEGEENSEAFDDPNASEEASSSASSTGGTGSGVSSGVWVAITGAVLALFSGGSSEFTTPSGADPVTPTPTPTPTPTPTPTPTPTPTPTPTPTPTPTPTPTPTTTATATATTTGTSTSTSTSTSTGTSTSTSTS

SEQ ID NO: 168657 - protein, 111 aa, Unknown
  Bacterial polypetide isolated from the Sargasso Sea
MEAEASTSAATGAGATAGAGVWVAITGAVLALFSGGSSEYTTPVGADPVTPTPTPTPTPTPTPTPTPTPTPTPTPTPTPTPTPTPTPTPTPTATATATATATSTSTSTSTS

SEQ ID NO: 168658 - protein, 120 aa, Unknown
  Bacterial polypetide isolated from the Sargasso Sea
SGGDSEYTTPSGDAPVTPTPTPTPTPTPTPTPTPTPTPTPTPTPTPTPTPTPTPTVTTTATTGTTGTTGTTGTTGTTGTTGTTGTTGTTGTTGTTGTTGTTGTTATTGTTGTTSSSSTTN

SEQ ID NO: 168659 - protein, 621 aa, Unknown
  Bacterial polypetide isolated from the Sargasso Sea
MNRNFKMTTIAMCVSSLMVLQGCGSTLTTKSPTLGTGSGSGAITGGGGGSGGGSGSGAGSGSGSGSGNGTPTPTPTPTPTPTPTPTPTPTPTPTPTPTPTPTPTPTPTPTPTPTPTPTPTPTPTPTPTPTPTPTPTPTPTPTPTPTPTPTPTPTPTPTPTPTPTPTPTPTPTPTPTPTPTPTPTPTPTPTPTPTPTPTPTPTPTPTPTPTPTPTPTPTSANPLGVVVQNTGNVVTATGQTVSAIGSQIGLTPIPGGNTATTTALGGVVSNLGAGVSALGTGAFNGLGQLGNSTDPLGTTLASSGNLVYDAGQAVNSAGQLVTSLGSGPTAPLSPLTNPLGSTISTVGTAVSSLGTQLGSTLTNGPVQQLTQTLSTAITPITATLAQTTQTVGDTTGLGKPLDGLLSTIGHGLDTAGGQIGSTTGNPIGKNLGNVVTQLGNTVTSVGGLLTAGGSGSGNPLGGLTGILNPGGGSSGNPLAPLTSILTSLPGTLTGGLGGIGGSTNPLAPLVGTLTSLTSSLTSVVGGPGSPLAPLTGLTVSAGVALNGATGSANNPLAPATSVASSSTGALHASGGSGAAGTTNLLAPVTGLVTALTSALGGASGGTSGSSGAVPGGLTARK

SEQ ID NO: 168660 - protein, 577 aa, Unknown
  Bacterial polypetide isolated from the Sargasso Sea
MIPRIRATRRGRPLPFSFETRARPMSQTPWWQSAVIYQIYPKSFQDSAARGTGDLKGIMARLDYLKTLGVDALWLTPVYVSPQVDNGYDIADYLAIDPAYGIMADFEALLTAAHARDIRIVMDIVVNHTSTEHAWFKSALGDKNSPYRDYYIWRDPVDGGVPNNWQSKFGGSAWELDEITGQYYLHLFAREQADLNWENPEVRAEVKNIIHFWAKKGVDGFRLDVINLISKDQAFPNDEIGDGRRFYTDGPRIHEFLQDVSRDVFAPVGAMTVGEMSSTSLEHCQRYGALDGSELSMVFNFHHLKVDYPNGDKWTKAPFDFLELKRIFNHWQSGMHGKGWSALFWCNHDQPRIVSRFGDEGEHRVVAAKMLASTLHGLQGTPYIYQGEEIGMTNPGYQRIDDYQDVESRNIFAIKQTEGMSKAEILAILGAKSRDNSRTPMQWSAAANAGFTQGTPWLKPAANYPLINAEAALADQHSVFWHYRDLIRLRKTHPIFTQGDYQELLAGHPQIWAYARRANGQTLLVVSNFYGEPATFALPDELATGKGRLLLGNYPDSPARPQSCMLRPYESLIWLVE

SEQ ID NO: 168661 - protein, 149 aa, Unknown
  Bacterial polypetide isolated from the Sargasso Sea
SFDDPNASAEDSSNGGSAGAAQATGAGAGVWVAITGAVLALFSGGSSEDAIIVPPTPPTPAPTPTPTPTPTPTPTPTPTPTPTPTPTPTPTPTTATTSTTVATTATTNTGVTGTTGTGATSGTTGTTATSATTATSTNSTQPNRIINID

SEQ ID NO: 168662 - protein, 181 aa, Unknown
  Bacterial polypetide isolated from the Sargasso Sea
SGTSFKSIASEGDEDDESFDDPNASAEDSSNGGSAGAAQATGAGAGVWVAITGAVLALFSGGSSEDAIIVPPTPPTPAPTPTPTPTPTPTPTPTPTPTPTPTPTPTPTPTPTPTPTPTPTPTPVTTGTTATSATTATGTTTGTTGTTGTGATTGTTGTTATSATTATSTNSTQPNRIINID

SEQ ID NO: 168663 - protein, 368 aa, Unknown
  Bacterial polypetide isolated from the Sargasso Sea
EHITGNQWWTRYQPVSYQLQSRGGNRTQFVDMVNRCKSAGVDIYVDTLINHMAAGSGNGVAGSTFGNKQYPIYSPQDFHESCSINPEDYGNNRYRVQNCELVGLADLNTSSNYVQNTLAAYINDLQAIGVKGFRFDAAKHVAASDIQSLMAKINGSPLVFHEVIDQGTEAVDASEYLSTGLVTEFKYSTQLGNTFRNGSLAWLSNFGEGWGFMPSSSAVVFVDNHDNQRGHGGAGNVITFEDGRLYDLANVFMLAYPYGYPKVMSSYDFHGDTDAGGPSVPVHNSGNLECFASNWKCEHRWSYIAGGVDFRNNTADNWAVTNWWDNTNNQISFGRGSSGHMAINKEDAALNATVQTDMAPGQYCNVLK

SEQ ID NO: 168664 - protein, 423 aa, Unknown
  Bacterial polypetide isolated from the Sargasso Sea
MILQGFNWESCDEGDRNGKSWYQVLNERVPDIAAAGFTAVWMPPATKSVSRQGYLPTDLYNLNSLYGSEDELRSCVARMREYNITPVADIVINHRCAEARDDAGRWNVYTGRLDWDSRAITCENQEFGGRGSQSTGEDYLPAPNIDHTQEFVRNDLKEWLAWLRQDVGFRGWRFDFVKGYSGVFTGEYVEATRPFLSFGEFWDECSYRDGVLEYNQDSHRQRTCDWVDSTGGNTAAFDFTTKGILQEALARNEYWRLIDARGRPPGFCGMWPSRAVTFIENHDTGSTLQHWPFPSDKILQGYAYILTHPGTPTVFYDHWADQSLVEAINDMLAIRKRNEISSKDCAVHIQVATAGVYAAHVGHSPNPYTEGLSMDVDTTRPSICMKIGHGEWSPNSKSVGDLSWQCKASGDGWAIWEDKRFAE

SEQ ID NO: 168665 - protein, 306 aa, Unknown
  Bacterial polypetide isolated from the Sargasso Sea
MNRRDWIKLSACASAVFPFVGFTKPFLLENPIEKELKASDFGKDFLWGAACAAYQVEGAWNKDGRGPSIWDTFSHKKGKVHNNENGDVASDFYHRYKEDIALLKELNFKVFRFSISWSRIFPDGTGKINQKGIAFYHQVIDECLKQNIQPWITLYHWDLPQVLEDKGGWANRDIVNWFLNYVDFCTKEYGSKVKNWMVMNEPAAFVGIGYMMGYHAPGKKSVSKFLKATHHACLAMAEGGRKIKSNVPDSNVGTTFSCSHIDPYRSGLKDIKAVASMDALLNRLYIEPSLGMGYPYDAIPALKKIE

SEQ ID NO: 168666 - protein, 270 aa, Unknown
  Bacterial polypetide isolated from the Sargasso Sea
DKDTPRDESYAEDVATAAEAKGDKAITYRHLRAGAESGWDFSSRWFGDGRTIATIHTTDIVPVDLNSLMLAMEQRIEARCQKAGDSACATEFAGLARKRKAAIDRYLWVGKEGRYADWDSKAKKPTAILSAATLYPLFVGAASPAQADAVATTVRAKLLGSGGLRTTPNRTGQQWDTPNGWAPLQWVAIDGLARNGQETLARDIAGRWIGTVAAAYAETGKMLEKYDVEERKPGGGGEYPLQDGFGWTNGVTSALLDRYPDIAAELEKAE

SEQ ID NO: 168667 - protein, 306 aa, Unknown
  Bacterial polypetide isolated from the Sargasso Sea
AHQKLPHAPSEEMTIDIDLLYEMDPCELKLDEMIEAEPEPEMIAGLPASDALTPADRYLELFEHVQSSKLFADSKTFPDCAPKMDPLDILIRYRKVKRHRDFDLRRFVENHFWLPETPSSEYVSDPASSLKEHIDQLWPVLTREPQDHIPWSSLLALPQSYIVPGGRFSETYYWDSYFTMLGLAESGREDLLKCMADNFAWMIENYGHIPNGNRTYYLSRSQPPVFALMVELFEEDGVRGARRYLEHLKMEYAFWMDGADSLVLNQAYRHVIRMSDGSLLHRYWDDRDTPRDESWLEDVETAKHSG

SEQ ID NO: 168668 - protein, 489 aa, Unknown
  Bacterial polypetide isolated from the Sargasso Sea
MFKHVQMAQLFPDSKTFADAIVKTDLNTVLAAYEQACLDAEKSGEAVDLATFVNTHFDIPEMISATSQTKFENVADYIEHMWQVLTRTPDTEQKDSLIALTRPYIVPGGRFREIYYWDTYFTALGLIDAGRTDMAINMLVNFVDILNEVGCIPNGNRAYYYSRSQPPILALFYNLLKDALSDQQKEYVIWGLKKEYQFWMNEAGENASQKGAAQLRTVTMPCGATLNRYFDTEPTPRPESYREDIETAEHIGADKSQFYQHVRAACESGWDFSSRWLANPNSLASIRTTEIIPVDLNALLVTLEQTLASVTKGAEQARYSTASTARIKAINTYLFNAEKAGYFDYHFPTQTQTDVVSAAMCVPLFVGIANEQQAEGVRAAVMNTLLKKGGVVTTSNATSQQWDAPNGWAPLQLFAVEGLRNYGFEMQAQTIMLRFCKTIERHFASSGVLLEKYNVCEPEIKAGGGEYDVQLGFGWTNGVYTRFQTYLNQ

SEQ ID NO: 168669 - protein, 199 aa, Unknown
  Bacterial polypetide isolated from the Sargasso Sea
MNAFLYKLESTIANISALKGDKETEALFRQKASDRRDAVNRYLWDDENGCYRDYDWRREQMALFSAASIVPLYVGMATHEQADRLANAVRSRLLTPGGILATEHETGEQWDKPNGWAPLQWMAIQGFKLYGDDHLGDEIARNWLKTVNLFYQEHHKLIEKYHIADAAPREGGGGEYPLQDGFGWTNGVVRRLIGLYGEP

SEQ ID NO: 168670 - protein, 538 aa, Unknown
  Bacterial polypetide isolated from the Sargasso Sea
MAVAYLAVAGCAAQADNANQAAAQSPPPATAAIATAASGTLLPPPSQLYGDLFVAVQTAQIYPDQKTFVDATPDSDPATIVQLYQQQKSQPGFSLKAFVAQHFTPPPEGGVTPPPNQTLRQHIDWLWPQLTRTSTTVPPYSSLIPLPKPYVVPGGRFREGYYWDTYFTMLGLQVSGREDLVDDMLDNFAHLIDTIGHIPNGNRTYYASRSQPPFFAYMVTLAAQAEGDKVYQKYLPELRKEHAYWMQGEATTPRGQATRNVVAMPDGAVLNRYWDASDTPRDESYLEDVTTAKSVPGRPANEVYRDLRAGAESGWDYSSRWFGDGKTLATIRTTSIVPVDLNSLMFHLETTIVKGCAVTRDVACVTDFSARAARRAAAINRYLWNRKGYYGDYDWQLRKPRDAVTAAALYPLFAGVAWPERAKATAREVRKTLLQPGGLATTTENTGQQWDAPNGWAPLQWIAIDGLRRYGEPALAKDIGTRFLSDVKHVYATEGKLVEKYVVEGAGTGGGGGGEYPLQDGFGWTNGVTLKLLGLYGE

SEQ ID NO: 168671 - protein, 235 aa, Unknown
  Bacterial polypetide isolated from the Sargasso Sea
MLDCQAEELLPEEKEKLAHPVVGGVILFSRNYHDKRQLSALVQDIRRFAKQPVLIAVDHEGGRVQRFREGFTAIPAMGDILRQSEHQDESAAYAKACGLVLAYELKTLDIDFSFAPVLDINGVSQVIGDRAFSDNADDVIRLAAHLIQGLKAVNMPAIGKHFPGHGSVAPDSHIALPVDEREFDEIRSTDMVVFERLIERALLDGVMPAHVIYNQVCDKPAGFSTKWLQDILKQD

SEQ ID NO: 168672 - protein, 134 aa, Unknown
  Bacterial polypetide isolated from the Sargasso Sea
DAIMPAHVIYSDVDPRLASGSAHWLKTVLRGELGFDGVIFSDDLSMEGAAIMGSYAERGQASLDAGCDMILVCNNRKGAVSVLDNLSPIKAELVTKLYHKGSFTRQELRDSARWKTVNAQLEQLHARWQEAKSA

SEQ ID NO: 168673 - protein, 342 aa, Unknown
  Bacterial polypetide isolated from the Sargasso Sea
MSYLMLDLLSLEVSEAEAEMLRHPQVGGLILFSRNFTSRGQLIALVQQIRQIRPEILIAVDHEGGRVQRFREGFTLIPAMGDILPAAKGEMALAKRWACELGFLMAIELLACDIDLSFAPVLDLNGISQVIGKRSFSAKPDEVIALAQSFIEGMAEAGMGAVGKHFPGHGSVAADSHIAQPIDEREAEAIFNQDILPFKDLIAQGKLSGIMPAHVIYPKVDPNPAGFSTYWLKQILRQDLGFNGVIFSDDLGMKGASFAGDYLGRAQAALDAGCDMILVCNDNPGVMSLLNGFVWPSAAPKHPASLLKPNAAQTAIALENSARWENAKQLAEQIQLAQQAKV

SEQ ID NO: 168674 - protein, 342 aa, Unknown
  Bacterial polypetide isolated from the Sargasso Sea
MSYLMLDLLSLDVSEAEAEMLRHPQVGGLILFSRNFSSREQLISLVQQIRQIRPEILIAVDHEGGRVQRFREGFTLIPAMGDILPAAKGDLVLAKRWACELGFLMAIELLACDIDLSFAPVLDLNGISQVIGKRSFSAKPDEVMALAQSFIEGMAEAGMGAVGKHFPGHGSVAADSHIAQPIDEREAEAIFNQDILPFKELIAKGKLSGIMPAHVIYPKVDPNPAGFSSYWLKQILRQELGFNGVIFSDDLGMKGATFAGDYLGRAQAALDAGCDMILVCNDNPGVMSLLNGFVWPAAAPQHPASLLKPNAAQTAIALENASRWENAKQLAEQIQLAQQAKV

SEQ ID NO: 168675 - protein, 244 aa, Unknown
  Bacterial polypetide isolated from the Sargasso Sea
MEDYKVKDISQAEFGRKEISIAESEMPGLMALREEYSKDKPLKGARIIGCLHMTIQTAVLIETLVALGAEVRWSSCNIFSTQDHAAAAIAKAGIPVYAWKGETEEEYLWCIKQTIVGKPDWKPNMLLDDGGDLTAIMHNEYQDLMKDIKGVSEETTTGIKALNKMEKDKLLLVPAINVNDSVTKSKFDNLYGCRESLVDGIRRATDVMMSGKIAIVAGFGDVGKGSAASLRQSGARVLVTEADP

SEQ ID NO: 168676 - protein, 118 aa, Unknown
  Bacterial polypetide isolated from the Sargasso Sea
SSNVQRDTIKPQVDRYTFDDGHSVYLLAEGRLMNLGCATGHPSFVMSNSFTNQVLAQIALAKDKPDLGVYMLPKELDEEVARLHLSHLGVTLTELSDEQADYIGVSKSGPFKPEHYRY

SEQ ID NO: 168677 - protein, 259 aa, Unknown
  Bacterial polypetide isolated from the Sargasso Sea
TLLVPAINVNDSVTKSKFDNLYGCRESLVDGIKRATDVMMSGKVAIVAGFGDVGKGSAASLRQSGARVMVTETDPICALQAAMEGYEVVLMDEMIGQADIVVTATGNKDIVTADHMRAMKDRSILCNIGHFDNEIQVDALKNYKWDEIKPQVHEITFPDNKRLILLAEGRLVNLGCATGHPSFVMSASFTNQVTAQIELWNNSDNYENKVYVLPKHLDEKVARLHLEKVGAKLTPLSKDQADYISVKTEGPYKPDAYRY

SEQ ID NO: 168678 - protein, 168 aa, Unknown
  Bacterial polypetide isolated from the Sargasso Sea
MNDFKVRDLLQADFGRKEISIAESEMPGLMAIREEYGKKKPLKDARIIGCLHMTIQTAVLIETLVYLGADVRWSSCNIFSTQDHAAAAIAKAGIPIYAWKGETEEEYLWCIKQTIEGKKDWKPNMLLDDGGDLTAIMHNEYKDLLENVKGVSEETTTGIKALNKMKKR

SEQ ID NO: 168679 - protein, 275 aa, Unknown
  Bacterial polypetide isolated from the Sargasso Sea
MANEDYKVADINLADFGRKEISLAETEMPGLMALRSEYEGKKPLEGARILGCLHMTIQTAVLIETLVELGADVRWSSCNIFSTQDHAAAAIAKAGIPVYAWKGETEEEYWWCVRQTIEGKEGWKPNMILDDGGDLTSLMHKEYNDLLKDVKGLSEETTTGVLALKKMESEGTLMVPAINVNDSVTKSKFDNLYGCRESLVDGIKRATDVMMSGKVAIVAGFGDVGKGSAASLRQSGARVMVTETDPICALQAAMEGYEVVLMDEMIKEADIVYSN

SEQ ID NO: 168680 - protein, 195 aa, Unknown
  Bacterial polypetide isolated from the Sargasso Sea
MSQDFKVKDINLADFGRKEISIAESEMPGLMALRKEYKGKKPLNGANILGCLHMTIQTAVLIETLVELGASVRWSSCNIFSTQDHAAAAIAKAGIPVYAWKGETEKEYWWCIKQTIEGDKSWKPNMILDDGGDLTGLMHKDYKDLLKNIKGVSEETTTGVLALKKMESNKTLLIPAINVNDSVTKSKFDNLYGCR

SEQ ID NO: 168681 - protein, 119 aa, Unknown
  Bacterial polypetide isolated from the Sargasso Sea
MEDYKVKDIAQAEFGRKEISIAESEMPGLIALREEYSKEKPLKGARIIGCLHMTIQTAVLIETLVALGAEVRWSSCNIFSTQDHAAAAIAKAGIPVYAWKGETEEEYLWCIKQTIVGKP

SEQ ID NO: 168682 - protein, 271 aa, Unknown
  Bacterial polypetide isolated from the Sargasso Sea
MKDYAITDIKLAEWGRKEISIAETEMPGLIACRELFSNDKPLKGTRIAGCLHMTIQTAVLIETLTSLGASVRWASCNIFSTQDHAAAAIAKQDIPVFAKKGETLKEYWNYVDQIFTWSNDTVANMILDDGGDATLYIILGAKAESGEQVLPNPANEEEEALKSQILSRLESSPGWFTKVKKSIKGVTEETTTGVLRLYQMAEKGDLPFPAINVNDSVTKSKFDNLYGCRESLVDGIRRATDVMLSGKVAVVAGYGDVGKDLQLHFVKVEPR

SEQ ID NO: 168683 - protein, 168 aa, Unknown
  Bacterial polypetide isolated from the Sargasso Sea
DEMISEADIVVTATGNKDIVTADHMREMKDRAILCNIGHFDNEIQVDALKNYKWDEIKPQVHEITLPDGKRIILLAEGRLVNLGCATGHPSFVMSASFTNQVTAQIELWNNSDKYEKKVYVLPKHLDEKVARLHLEKVGAKLTKLSKDQADYISVKQDGPYKPNAYRY

SEQ ID NO: 168684 - protein, 87 aa, Unknown
  Bacterial polypetide isolated from the Sargasso Sea
MAETAKENKIDLMNDYKVADISLAEWGEKEIKIAETEMPGLMSIREEFGKEKPLKGARIAGCLHMTIQTAVLIETLIELGADIRWSS

SEQ ID NO: 168685 - protein, 324 aa, Unknown
  Bacterial polypetide isolated from the Sargasso Sea
ELGASVRWSSCNIFSTQDHAAAAIAKAGIPVYAWKGETEKEYWWCIKQTIEADKNWKPNMILDDGGDLTGLMHKDYKDLLKNIKGVSEETTTGVLALKKMESNKTLLIPAINVNDSVTKSKFDNLYGCRESLVDGIKRATDVMMSGKVAIVAGFGDVGKGSAASLRQSGARVMVTETDPICALQAAMEGYEVVLMDEAIKDADIVVTATGNKDIVTADHMREMKDRAILCNIGHFDNEIQVDALKNYKWTEIKPQVHEIELPNKKRIILLAEGRLVNLGCATGHPSFVMSASFTNQVIAQIELWNNSKNYEKKVYVLPKHLDEK

SEQ ID NO: 168686 - protein, 65 aa, Unknown
  Bacterial polypetide isolated from the Sargasso Sea
MSNNDYKVADISLAEWGRKEIIIAQSEMPALMQLRDRYKKEQPLKGANILGCIHMTIQTAVLIET

SEQ ID NO: 168687 - protein, 121 aa, Unknown
  Bacterial polypetide isolated from the Sargasso Sea
MTDYKVKDINEAEFGRKEISLAETEMPGLMAVRAEYKGKNPLKGARILGCLHMTIQTAVLIETLVDLGAECRWSSCNIFSTQDHAAAAIAKAGIPVFAWKGETEEEILVVCKTDYRRQKRL

SEQ ID NO: 168688 - protein, 67 aa, Unknown
  Bacterial polypetide isolated from the Sargasso Sea
MAQDYKVKDINQAAFGRKEISLAETEMPGLIALRKEYKGKKPLKGAKILGCLHMTIQTAVLIETLVE

SEQ ID NO: 168689 - protein, 342 aa, Unknown
  Bacterial polypetide isolated from the Sargasso Sea
QDHAAAAIAKAGIPVYAWKGETEEEYLWCIKQTIVGKSDWKPNMLLDDGGDLTAIMHNEHKELMNDVKGVSEETTTGIKALNKMEKDKSLLVPAINVNDSVTKSKFDNLYGCRESLVDGIRRATDVMMSGKIAIVAGFGDVGKGSAASLRQSGARVLVTEADPICALQAAMEGYEVVLMEEAISRADIVVTATGNKDIVTADHMRDMKDRAILCNIGHFDNEIQVEALKNYKWTEVKPQVHEIELPSGKRIILLAEGRLVNLGCATGHPSFVMSASFTNQVIAQIELWHNHKNYDNKVYVLPKHLDEKVATLHLKKVGAKLTKLSKDQADYISVGTEGPFKP

SEQ ID NO: 168690 - protein, 190 aa, Unknown
  Bacterial polypetide isolated from the Sargasso Sea
ITEADPICALQAAMEGYEVVLMDEAISKADIVVTATGNKDIVTADHMRDMKDRAILCNIGHFDNEIQVEALKNYKWTEVKPQVHEIELPSKKRIILLAEGRLVNLGCATGHPSFVMSASFTNQVIAQIELWNNYKNYENKVYVLPKHLDEKVATLHLKKVGAKLTKLSKEQADYISVGVEGPFKPNAYRY

SEQ ID NO: 168691 - protein, 314 aa, Unknown
  Bacterial polypetide isolated from the Sargasso Sea
EIKIAETEMPGLMSIREEFGKEKPLKGARIAGCLHMTIQTAVLIETLIELGADIRWSSCNIFSTQDHAAAALAAKGIPIFAWKDESEEEYWWCVEKTINGPDGWTPNLILDDGGDLTGLMHEKYPELMKDIIGVSEETTTGVLRLYNMEKDGTLMCPAINVNDSVTKSKFDNLYGCRESLVDGIKRATDVMVAGKIAVVAGYGDVGKGSAQSLRGLGATVWITEIDPICALQAAMEGYRVVTMDDACSQADIFVTATGNYNVIDKHHLEQMKDQAIVCNIGHFDNEINVESMKDHEWINIKPQVDHIVFPDGKR

SEQ ID NO: 168692 - protein, 241 aa, Unknown
  Bacterial polypetide isolated from the Sargasso Sea
MEDFKVKDITQADFGRKEISIAETEMPGLMALRKEYKGKQPLKGAKIVGCLHMTIQTAVLIETLVELGAEVRWSSCNIFSTQDHAAAAIAKAGIPVFAWKGETEEEYWWCVRQTIEGKKDWKPNMILDDGGDLTALMHKDYKDLLKNIKGLSEETTTGVLALKKMESEGKLLVPAINVNDSVTKSKFDNLYGCRESLVDGIKRATDVMMSGKVAIVAGFGDVGKGSAASLRQSGARVMITE

SEQ ID NO: 168693 - protein, 350 aa, Unknown
  Bacterial polypetide isolated from the Sargasso Sea
PLKGARIAGCLHMTIQTAVLIETLIELGADIRWSSCNIFSTQDHAAAALAAKGIPIFAWKDESEEEYWWCVEQTIKGPNGWTPNLILDDGGDLTGLMHEKYPELMKDIIGVSEETTTGVLRLYNMEKDGSLMCPAINVNDSVTKSKFDNLYGCRESLVDGIKRATDVMVAGKIAIVAGYGDVGKGSAQSLRGLGATVWITEIDPICALQAAMEGYRVVTMDDACSKADIFVTATGNYNVIDKHHLEQMKDQAIVCNIGHFDNEINVESMKDLEWINIKPQVDHIVFPDGKRIILLAEGRLVNLGCGTGHPSFVMSNSFCNQTLAQIELFKNSSNYDKQVYVLPKSLEKKC

SEQ ID NO: 168694 - protein, 195 aa, Unknown
  Bacterial polypetide isolated from the Sargasso Sea
MADYKVKDISEAEFGRKEISLAETEMPGLMALRKEYKGKSPLKGARILGCLHMTIQTAVLIETLVDLGAEVRWSSCNIFSTQDHAAAAIAKVGIPVFAWKGETEEEYWWCVKQTIEGKKDWKPNMILDDGGDLTALMHKEYKDLLKDIKGLSEETTTGVLALKKMEAQGTLLVPAINVNDSVTKSKFDNLYGCRE

SEQ ID NO: 168695 - protein, 126 aa, Unknown
  Bacterial polypetide isolated from the Sargasso Sea
MNDYKVKDINQAEFGRKEISLAETEMPGLMALRKEYKGKHPLKGARILGCLHMTIQTAVLIETLVDLGAEVRWSSCNIFSTQDHAAAAIAKAGIPVFAWKGETEEEYWWCVKQTIKEKKMETKHDS

SEQ ID NO: 168696 - protein, 319 aa, Unknown
  Bacterial polypetide isolated from the Sargasso Sea
MKTVEDNALDKDYKVADITLADWGRKEIAIAETEMPGLIALREEYGETKPLDGARISGCLHMTIQTAVLIETLTALGAEVRWSSCNIFSTQDQAAAAIASTGVPVFAWKEESEEEFWWCIDKTIEGPNGWRPNLILDDGGDLTAVMHEKYPEFLKDVRGLSEETTTGVHRLHEMAQDKSLMVPAFNVNDSVTKSKFDNLYGCRESLVDGIRRATDVMMAGKVAVVCGFGDVGKGSSASLRNAGCRVLVTEVDPICALQAAMEGYEVVTIEDVASQADIFVTTTGNVDVVNIEHMRDMKDRAIVCKHWHFDTEIQVSALK

SEQ ID NO: 168697 - protein, 102 aa, Unknown
  Bacterial polypetide isolated from the Sargasso Sea
MSDYKVKDINLAEFGRKEISLAETEMPGLMALRKEYKGKNPLKGARILGCLHMTIQTAVLIETLVDLGAEVRWSSCNIFSTQDHAAAAIAKAGIPVFAWKGE

SEQ ID NO: 168698 - protein, 302 aa, Unknown
  Bacterial polypetide isolated from the Sargasso Sea
TGLIHQPYPEMLDRIHGVSEQTTTGVHRLKELLRNGELKIPAINVNDSVTKSKNDNKYGCRHSLNDGIKRATDMLLSGKKALVIGYGDVGKGSALSLAQEGMIVRVVESDPICAMHACMDGFEVVSTYENGVVSRKDEDINKTLLQDTDLLVTTTGNVNVCDAPILRNIKNTALVCNIGHFDNEIDTAYMRDAWHWEEIKPQVHRVFRDATPDEEPDLSSKNYIVLLAEGRLVNLGNATGHPSRIMDGSFANQVLAQIFLYEQAFANINDDEKKKELITVKVLPKKRDEEVAELMVQGLEEP

SEQ ID NO: 168699 - protein, 334 aa, Unknown
  Bacterial polypetide isolated from the Sargasso Sea
TCFCMKSETEKEYWCCIKQTIEGKKDWKANMILDDGGDLTALMHKDYKDLLKNIKGVSEETTTGVLALKKMESNNELLIPAINVNDSVTKSKFDNLYGCRESLVDGIKRATDVMMSGKVAIVAGFGDVGKGSAASLRQAGARVMVTETDPICALQAAMEGYEVVLMDEAIKDADIVVTATGNKDIVTADHMRDMKDRAILCNIGHFDNEIQVDALKNYKWDEIKPQVHEIELPSKKRIILLAEGRLVNLGCATGHPSFVMSASFTNQVIAQIELWNNSNKYEKKVYVLPKHLDEKVATLHLGKVGAKLTKMSKEQADYISVKQSGPFKPDTYRY

SEQ ID NO: 168700 - protein, 165 aa, Unknown
  Bacterial polypetide isolated from the Sargasso Sea
MLSSLKDGAVVCNIGHFDTEIDTKYMQDEWYWEEVKPQVHRIFRDCSPDQEPDLSSKNYLILLAEGRLVNLGNATGHPSRIMDGSFANQVLAQMHLYSAGFANVNDEDKKKELIQVEVLPKKLDEEVASLMVQGFGGVVTQLTEEQANYINVPQDGPFKEDSYKY

SEQ ID NO: 168701 - protein, 268 aa, Unknown
  Bacterial polypetide isolated from the Sargasso Sea
ERMKNGSLTLPAINVNDSVTKSKFDNKYGCKESAVDAVRRATDIMLAGKKVVVCGYGDVGKGTAASFRGAGSIVTVTEIDPICALQASMDGYEVKKLMNVVSKADIVVTATGNKDIVNSESFKMMKDKTIVCNIGHFDNEIDMNWLETNFSDHKTNIKPQVDSYRISKDKEIIILAEGRLVNLGCATGHPSFVMSNSFTNQVLAQMELWNNSDKYENKVYMLPKNLDELVAKLHLEKLGVELEELSSDQAQYIGVQKSGPFKPEYYRY

SEQ ID NO: 168702 - protein, 192 aa, Unknown
  Bacterial polypetide isolated from the Sargasso Sea
VVSAYENGNVGKDGKNLDKKLLEKYDLVVTTTGNINVLDRHMLDALKSGCVVCNIGHFDSEIDVKYLKNYEWKEIKPGVHKIIRNKDEYIILLGEGRLVNLALATGHPSRVMDGSFCNQVLAQIALFEDGFADKSDDQKELYVKVLPKKLDEEVASLMVKGFGGTLTKLTKEQEEYISVSEEGPFKDDSYTY

SEQ ID NO: 168703 - protein, 250 aa, Unknown
  Bacterial polypetide isolated from the Sargasso Sea
YDSVTKSKFDNKYGCRESLVDGVRRATDVMMAGKVAVVAGFGDVGKGSAESLRSAGCRVLVTEADPICALQAAMEGFEVVTMNDAAPRGDIFVTATGNIDVITLDHMRAMKDRAIVCNIGHFDSEIQVEALRNYKWENVKPQVDEIEFPDGKRLILLAEGRLVNLGCATGHPSFVMSASFANQVLAQIELWQNASDYDRKVYVLPKHLDEKVAALHLAKLGAQLTELSAEQAAYIGIGQDGPFKGEHYRY

SEQ ID NO: 168704 - protein, 177 aa, Unknown
  Bacterial polypetide isolated from the Sargasso Sea
ELLATTDVLVTCTGNANVCDSAMLSTIKSGAIVCNIGHFDNEIDTEYMRENWQWETVKDQVHQIYRSDNRDDYLILLSEGRLVNLGNAMGHPSRIMDGSFANQVLAQMHLYEQKWADQPENQRSPISVEVLPKKLDEEVAQLMVEGFGGLITKLTADQADYIGVTTEGPFKPEAYKY

SEQ ID NO: 168705 - protein, 177 aa, Unknown
  Bacterial polypetide isolated from the Sargasso Sea
MEGFKVVTMEKVCTEADIFVTATGNFSVIDYTHMSKMKDQAIVCNIGHFDNEIDVASLSKCKWTNIKPQVDHVEFENGNKIILLAEGRLINLGCATGHPSFVMSNSFTNQVLAQIELWENHSSYENKVYVLPKKLDEEVARLHLEKVGAELTELSEEQAKYIGVDSNGPYKNDTYRY

SEQ ID NO: 168706 - protein, 132 aa, Unknown
  Bacterial polypetide isolated from the Sargasso Sea
IGHFDNEINVESMKDLEWINIKPQVDHIVFPDGKRIILLAEGRLVNLGCGTGHPSFVMSNSFCNQTLAQIELFKNSSNYDKQVYVLPKSLDEKVAKLHLDKIGAKLTKLTTEQAEYIGVKESGPYKPEHYRY

SEQ ID NO: 168707 - protein, 132 aa, Unknown
  Bacterial polypetide isolated from the Sargasso Sea
GVALANAGHFDVEINLEALKNESTKVERVREHVESYKYKDKEILVLAEGRLVNLAAATGHPASVMDMSFANQALASEWIKDNHKKLESKVYTLPKEVDIKIAATKLSLMGGELEILSDEQIKYLDSWEHGTS

SEQ ID NO: 168708 - protein, 256 aa, Unknown
  Bacterial polypetide isolated from the Sargasso Sea
MEDYKVKDIAQAEFGRKEISIAESEMPGLMALREEYSKKKPLKGARIIGCLHMTIQTAVLIETLVALGAEVRWSSCNIFSTQDHAAAAIAKAGIPVYAWKGETEEEYLWCIKQTIVGKPDWKPNMLLDDGGDLTAIMHKEYQDLMKDIKGVSEETTTGIKALNKMEKDKSLLVPAINVNDSVTKSKFDNLYGCRESLVDGIRRATDVMMSGKIAIVAGFGDVGKGSAASLRQSGARVLVTEADPICALPAAMEGYE

SEQ ID NO: 168709 - protein, 112 aa, Unknown
  Bacterial polypetide isolated from the Sargasso Sea
SKPQVHEIELPSGKRIILLAEGRLVNLGCATGHPSFVMSASFTNQVIAQIELWHNHKNYENKVYVLPKHLDEKVATLHLKKVGAKLTKLSKEQADYISVETEGPFKPDAYRY

SEQ ID NO: 168710 - protein, 161 aa, Unknown
  Bacterial polypetide isolated from the Sargasso Sea
MEDYKVKDLSQAEFGRKEISIAESEMPGLMALREEYAGKSPLKGAKIIGCLHMTIQTAVLIETLVDLGAEVRWSSCNIFSTQDHAAAAIAKAGIPVYAWKGETEEEYVWCIKQTIEGKKSWKPNMLLDDGGDLTAMMHNEYKDLLKDVKGSFGRDNYRDKS

SEQ ID NO: 168711 - protein, 304 aa, Unknown
  Bacterial polypetide isolated from the Sargasso Sea
METLTKIKRIVEDIDYKVADISLSEDGRKDLDIAEKEMPGLMATRKKYGANKPLSGKKLTGSLHMTVETAVLIETLVELGAEVRWASCNIFSTQDHAAACIAETDVPVFAWKGESLEEYWWCTLQALTFNGNEGPDLIVDDGGDATLLIHKGFELEEYYAKNNTIPKITTKIKEEQIIENLLREVLEKDPMHWHKVAKNIIGVSEETTTGVHRLEQMSKDQTLLFPAYNVNDSVTKSKFDNVYGCRESLADGLKRSMDVMVAGKTVLVCGYGDVGRGCVQSMRGYGARVLVTEIDPICALSAAM

SEQ ID NO: 168712 - protein, 95 aa, Unknown
  Bacterial polypetide isolated from the Sargasso Sea
MLAEGRLVNLGCATGHPSFVMSASFTNQVTAQIELWNNSDKYEKKVYVLPKHLDEKVARLHLEKVGAKLTPLSKDQADYISVKTEGPYKPDAYRY

SEQ ID NO: 168713 - protein, 59 aa, Unknown
  Bacterial polypetide isolated from the Sargasso Sea
NNSEKYEKKVYVLPKHLDEKVARLHLEKVGAKLTKMSKDQADYISVTPDGPYKPDAYRY

SEQ ID NO: 168714 - protein, 329 aa, Unknown
  Bacterial polypetide isolated from the Sargasso Sea
PLIDLGAEIRWSGCNIFSTQDHAAAAMAERGIPVFAWKGQTDEEFDWCIEQTILKDGEPWDANMILDDGGDLTHMVHTKYPEMLETIHGISEETTTGVYRLKKMLEKGELKVPAINVNDSVTKSKNDNKYGCRHSLNDGIKRATDMLLSGKKALVIGYGDVGKGSAASLAQEGMVVRVTESDPICAMQACMDGFSLVSCYKDGNVTGKEDDINKTLLQDTDILVTTTGNVNVCDSAILNSLKNGAVVCNIGHFDTEIDTVYMKDVWYWEEIKPQVHRVFRDCSPDQEPDLTSKNYILLLAEGRLVNLGNATGHPSRIMDGSFAHQVLAQ

SEQ ID NO: 168715 - protein, 133 aa, Unknown
  Bacterial polypetide isolated from the Sargasso Sea
MTDYKVKDINEAEFGRKEISLAETEMPGLMAVRAEYKGKNPLKGARILGCLHMTIQTAVLIETLVDLGAECRWSSCNIFSTQDHAAAAIAKAGIPVFAWKGETEEEYWWCVKQTIEGKKDWIPNMILDDGGDL

SEQ ID NO: 168716 - protein, 342 aa, Unknown
  Bacterial polypetide isolated from the Sargasso Sea
KPLKDARIIGCLHMTIQTAVLIETLVELGAEVRWSSCNIFSTQDHAAAAIAKAGIPVYAWKGETEEEYLWCIKQTIVGKSDWKPNMLLDDGGDLTAIMHNEYRELMKDVKGVSEETTTGIKALKKMEKDKSLLVPAINVNDSVTKSKFDNLYGCRESLVDGIRRATDVMMSGKIAIVAGFGDVGKGSAASLRQSGARVLVTEADPICALQAAMEGYEVVLMEEAISRADIVVTATGNKDIVTADHMRDMKDRAILCNIGHFDNEIQVEALKNYKWTEVKPQVHEIELPSGKRIILLAEGRLVNLGCATGHPSFVMSASFTNQVIAQIELWHNHKNYDNKVYV

SEQ ID NO: 168717 - protein, 276 aa, Unknown
  Bacterial polypetide isolated from the Sargasso Sea
QAAFGRKELDIAETEMPGLMALREKYGTEKPLKGARIAGSLHMTIQTACLIETLVELGAEVRWASCNIFSTQDHAAAAIAAQNIPVFAVKGETLEEYWEYTHRILEWGDGGSPNMILDDGGDATGLVMLGSKAEQDITVLDNPSNEEETFLFASIKKKLAQDPTFYSRTKAEIQGVTEETTTGVARLYKMQKSGELPFPAINVNDSVTKSKFDNLYGCRESLVDSIKRATDVMVAGKQALVMGYGDVGKGSAQSLRGLGATVCIAEVDPICALQAA

SEQ ID NO: 168718 - protein, 177 aa, Unknown
  Bacterial polypetide isolated from the Sargasso Sea
TTTGNVNVCDSAMISTLKNTAVVCNIGHFDNEIDTAYMRENYYWDEIKPQVHRVFRDTAPDGTPDLSSKNYIILLAEGRLVNLGNATGHPSRIMDGSFANQVLAQIHLYKQGFANINDADKKAEMLTVEVLPKKLDEEVASLMVEGFGGTVTQLTKEQADYINVPQEGPFKEETYKY

SEQ ID NO: 168719 - protein, 113 aa, Unknown
  Bacterial polypetide isolated from the Sargasso Sea
MEDYKVKDIAQAEFGRKEISIAESEMPGLMALREEYSKEKPLKGARIIGCLHMTIQTAVLIETLVALGAEVRWSSCNIFSTQDHAAAAIAKAGIPVYAWKGETEEEYLWCINK

SEQ ID NO: 168720 - protein, 82 aa, Unknown
  Bacterial polypetide isolated from the Sargasso Sea
MSKDYKVKDIELAEFGRQEILLAQDEMPALMQLRDNYLDEQPLKGAKIMGCIHMTIQTAVLIETLIDLGAEVRWSSCNIFST

SEQ ID NO: 168721 - protein, 177 aa, Unknown
  Bacterial polypetide isolated from the Sargasso Sea
MKAYEVVVMDEAIKDADIVVTATGNKDIVTADHMRNMKDRAILCNIGHFDNEIQVEALKNYKWDEIKPQVHEIELPSKKRIILLAEGRLVNLGCATGHPSFVMSASFTNQVIAQIELWNNSDKYEKKVYVLPKHLDEKVAMLHLEKVGAKLTKMSKEQADYISVKPSGPFKPDTYRY

SEQ ID NO: 168722 - protein, 125 aa, Unknown
  Bacterial polypetide isolated from the Sargasso Sea
IQTEALQNYKSDEIKPQVREVEFPDGKKILLLSEGRLVNLGNATGHPSFVMSASFTNQVLAQLELWKNSKNYENKVYVLPKHLDEKVASLHLKKVGAKLTELTDKQAEYIGVSKQGPFKDNTYRY

SEQ ID NO: 168723 - protein, 262 aa, Unknown
  Bacterial polypetide isolated from the Sargasso Sea
FGKEKPLKGARIAGCLHMTIQTAVLIETLIELGADIRWSSCNIFSTQDHAAAALAAKGIPIFAWKDESEEEYWWCVEKTINGPGGWTPNLILDDGGDLTGLMHEKYPELMKDIIGVSEETTTGVLRLYNMEKDGTLMCPAINVNDSVTKSKFDNLYGCRESLVDGIKRATDVMVAGKIAVVAGYGDVGKGSAQSLRGLGATVWITEIDPICALQAAMEGYRVVTMDDACSQADIFVTATGNYNVIDKHHLEQMKDQAIVCNI

SEQ ID NO: 168724 - protein, 154 aa, Unknown
  Bacterial polypetide isolated from the Sargasso Sea
AVVVGPNGTVDNPEGVPVFAWKGETLEEYWWATEQLFHWPDGEGPNLILDDGGDATMMVHKGLEYLESGDIPTAGSEDSEEWGVFLNRLQTIQGEGAIDWAAISSGIMGVSEETTTGVHRLYQMQDEGSLLFPAINVNDAVTKSKFDNLYGCRH

SEQ ID NO: 168725 - protein, 253 aa, Unknown
  Bacterial polypetide isolated from the Sargasso Sea
RLCHDSVTKSKFDNLYGCRESLVDGIKRATDVMMSGKVAIVAGFGDVGKGSAASLRQAGARVMVTETDPICALQAAMEGYEVVLMDEAIKLADIVVTATGNKDIVTADHMRNMKDRAILCNIGHFDNEIQVEALKNYKWDEVKPQVHEIELPSKKRIILLAEGRLVNLGCATGHPSFVMSASFTNQVIAQIELWNNSDKYEKKVYVLPKHLDEKVAKLHLEKVGAKLTKMSKEQADYISVKPSGPFKPDTYRY

SEQ ID NO: 168726 - protein, 275 aa, Unknown
  Bacterial polypetide isolated from the Sargasso Sea
ETTTGVLALKKMEANKKLMIPAINVNDSVTKSKFDNLYGCRESLVDGIKRATDVMMSGKVAIVAGFGDVGKGSAASLKQAGARVMITETDPICALQAAMEGYEVVLMDEAIKKADIVVTATGNKDIVTADHMREMKDRAILCNIGHFDNEIQVDALKNYKWDEIKPQVHEIELPSKKRIILLAEGRLVNLGCATGHPSFVMSASFTNQVIAQIELWNNSNKYEKKVYVLPKHLDEKVAMLHLGKVGAKLTKMSKEQADYISVKQSGPFKPDTYRY

SEQ ID NO: 168727 - protein, 159 aa, Unknown
  Bacterial polypetide isolated from the Sargasso Sea
MEDYKVRDLSQAEFGRKEISIAESEMPGLMALREEYAGKSPLKGAKIIGCLHMTIQTAVLIETLVDLGAEVRWSSCNIFSTQDHAAAAIAKAGIPVYAWKGETEEEYVWCIKQTIEGKKSWKPNMLLDDGGDLTAMMHNEYKDLLKDVKGVSEETTTGI

SEQ ID NO: 168728 - protein, 62 aa, Unknown
  Bacterial polypetide isolated from the Sargasso Sea
MTDYKVKDINLAEFGRKEISLAETEMPGLMALRKEYSGKSPLKGAKILGCLHMTIQTAVLIE

SEQ ID NO: 168729 - protein, 302 aa, Unknown
  Bacterial polypetide isolated from the Sargasso Sea
IAESEMPGLMALRKEFKGKKPLKGANILGCLHMTIQTAVLIETLVELGASVRWSSCNIFSTQDHAAAAIAKAGIPVYAWKGETEKEYWWCIKQTIEGDKNWKPNMILDDGGDLTGLMHKDYKDLLKNIKGVSEETTTGVLALKKMESNKTLLVPAINVNDSVTKSKFDNLYGCRESLVDGIKRATDVMMSGKVAIVAGFGDVGKGSAASLRQSGARVMVTETDPICALQAAMEGYEVVLMDEAIKDADIVVTATGNKDIVTADHMREMKDRAILCNIGHFDNEIQVDALKNYKWTEIKPQVP

SEQ ID NO: 168730 - protein, 247 aa, Unknown
  Bacterial polypetide isolated from the Sargasso Sea
VTKSKFDNLYGCKESLVDGIRRGTDVMMAGKIAVVAGYGDVGKGSAASLRGAGARVCVTEVDPINALQAAMEGFEVVTMDDACSYGDIFVTATGNVDIITLDHMRKMRDRAIVCNIGHFDNEIQTEALRNYKTEEIKPQVDEIEFPDGKKLILLSQGRLVNLGNATGHPSFVMSASFTNQVMAQLELWNNYKNYENKVYVLPKHLDEKVAMLHLKKVGAKLTELSNKQAEYIGVKKEGPFKDDTYRY

SEQ ID NO: 168731 - protein, 153 aa, Unknown
  Bacterial polypetide isolated from the Sargasso Sea
NKDIVTADHMRDMKDRAILCNIGHFDNEIQVEALRNYKWTEVKPQVHEIELPSSKRIILLAEGRLVNLGCATGHPSFVMSASFTNQVIAQIELWHNHKNYENKVYVLPKHLDEKVATLHLKKVGAKLTKLSKEQADYISVGTEGPFKPDAYRY

SEQ ID NO: 168732 - protein, 115 aa, Unknown
  Bacterial polypetide isolated from the Sargasso Sea
MENDYKVADIKLAEFGRREISLAENEMPALMALRDKYRAEQPLAGAKIMGCIHMTIQTAVLMETLLDLGAELRWSSCNIFSTQDHAAAAMAANGVPVFAWKGETEEEYEWCIDKL

SEQ ID NO: 168733 - protein, 121 aa, Unknown
  Bacterial polypetide isolated from the Sargasso Sea
MTVDYKVKDISLSEWGRKEIAIAETEMPGLMAIREEYGNTKPLEGARIVGCLHMTIQTAVLIETLVHLGASVRWSSCNIFSTQDQAAAAIAAKGIPVFAWKGMSDDEFWWCIEQTLSGPEG

SEQ ID NO: 168734 - protein, 140 aa, Unknown
  Bacterial polypetide isolated from the Sargasso Sea
VHRLKEMLEKGELKIPAINVNDSVTKAKNDNKYGCRHSLNDALKRGTDMLLSGKKGLVIGYGDVGKGSAASLAQEGMIVSVVESDPICAMQACMDGFAVVSCYKNGVVTRDPKDINMDVMGDTDLIVTTPGNVNVCDSAM

SEQ ID NO: 168735 - protein, 207 aa, Unknown
  Bacterial polypetide isolated from the Sargasso Sea
MGRRKIGIAEGEMPGLMALRKEYGKEKPLAGARITGSLHMTVETAVLIETLVELGAEVRWSSCNIFSTQDEAAAAIAAAGIPVFAWKGETEEEYWWCIEQTLKWDGNEGTNLLLDDGGDLTWYVHDKYPQLLENIMGLSEETTTGVHRLHQMARKNELKVPAYNVNDSVTKSKFDNLYGCRESLVDGIKRATDVMIAGKLAVVAGYG

SEQ ID NO: 168736 - protein, 149 aa, Unknown
  Bacterial polypetide isolated from the Sargasso Sea
MKDFNDFKVKDILLADFGRQEILLAQDEMPALMQLREKYRHEQPLSGAKIMGCIHMTVQTAVLIETLIDLGAEVRWSSCNIFSTQDHAAAAIAAKGIPVFAWKGETEEEYEWCLDQTINKDGAPWDANMILDDGGDLTIKIHTEYPEML

SEQ ID NO: 168737 - protein, 255 aa, Unknown
  Bacterial polypetide isolated from the Sargasso Sea
KAEKDLSVLDNPGNEEEIALFNAIKSKLENDSDFYSRIKSNIIGVTEETTTGVARLYQLQKQNSLPFPAINVNDSVTKSKFDNLYGCRESLVDSIKRATDVMIAGKVALVMGFGDVGKGSAQSLRGLGAIVKVAEVDPICALQAAMEGFSVVTLDDVVKDIDIFVTATGNYQVITHENLIKMKDEAIVCNIGHFDNEIDVASLKNYEWENIKPQVDHITLPSGNKIILLAEGRLVNLGCATGHPSFVMSNSFTNQ

SEQ ID NO: 168738 - protein, 161 aa, Unknown
  Bacterial polypetide isolated from the Sargasso Sea
MSLAEKTKQELLPYKVKDLELSNWGRKEILLAEAEMPGLMSLREEYSASKPLQGARIAGCLHMTIQTAVLIETLTDLGAEVSWSSCNIFSTQDHAAAAIAITGVPVYAWKGMNEEEFDWCIEQTLFAFKDGKPLNMILDDGGDLTNMVLDNYPELVSEIKG

SEQ ID NO: 168739 - protein, 306 aa, Unknown
  Bacterial polypetide isolated from the Sargasso Sea
NINDADFGNREISLAETEMPGLMAIRNEYKKNKPLKGAKIIGCLHMTIQTAVLIETLVELGAEVRWSSCNIFSTQDHAAAAIAKKGIPVFAWKGETEEDYWWCIKQTIEGEKNWKPNLLLDDGGDLTALMHSDYQDLLKNIKGVSEETTTGVKALKKMENQKKLMIPAFNVNDSVTKSKFDNLYGCRESLVDGIRRATDVMMSGKVAVVAGYGDVGKGSAASLRQSGARVMITESDPICALQAAMEGYEVVLMDEVIEKADIVVTATGNKDIVTIEHMRKMKDRSILCNIGHFDNEIQVDSLKNYK

SEQ ID NO: 168740 - protein, 137 aa, Unknown
  Bacterial polypetide isolated from the Sargasso Sea
AIVCNIGHFDNEIQSEALQNYKSDEIKPQVREVEFPDGKKILLLSEGRLVNLGNATGHPSFVMSASFTNQVLAQIELWKNSKNYENKVYVLPKHLDEKVASLHLKKVGAKLTELTDKQAEYIGVSKEGPFKDNTYRY

SEQ ID NO: 168741 - protein, 246 aa, Unknown
  Bacterial polypetide isolated from the Sargasso Sea
MSQQYIVKDISLSDFGRKELSIAETEMPGLMALRSEYGESKPLKGARIVGSLHMTIQTAVLIETLVALGADVRWASCNIFSTQDHAAAAIAAANIPVFAIKGQSLEEHWDYLDKSFMFPDGPNMILDDGGDATLYVLLGARAEAGEDIIPVPQSEEEEVIKVQIKKRMEQSPGWFTKTRDAIKGVSEETTTGVHRLYELVKNGQLPFPAINVNDSVTKSKFDNKYGCKESLVDGIRRATDTMMAGK

SEQ ID NO: 168742 - protein, 288 aa, Unknown
  Bacterial polypetide isolated from the Sargasso Sea
ILDDGGDLTALMHKDYKELMKDIKGLSEETTTGVLALKKMEQDGTLLVPAINVNDSVTKSKFDNLYGCRESLVDGIKRATDVMMSGKVAIVAGFGDVGKGSAASLRQSGARVMVTETDPICALQAAMEGYEVVTMDDMISQADIVVTATGNKDIVTADHMREMKDRAILCNIGHFDNEIQVDALKNYKWDEIKPQVHEITLPSNKRIILLAEGRLVNLGCATGHPSFVMSASFTNQVTAQIELWNNSEKYEKKVYVLPKHLDEKVAMLHLEKVGAKLTKLSKDQADYI

SEQ ID NO: 168743 - protein, 226 aa, Unknown
  Bacterial polypetide isolated from the Sargasso Sea
RKEISLAETEMPGLMALRKEYKSSKPLKGAKILGCLHMTIQTAVLIETLVDLGAEVRWSSCNIFSTQDHAAAAIAKSGIPVFAWKGETEKEYWWCVRQTIEGKKSWKPNMILDDGGDLTALMHKDYKNLLKDIKGVSEETTTGVLALKKMEKNKELLIPAINVNDSVTKSKFDNLYGCRESLTDGIKRATDVMMSGKVAIVAGFGDVGKGSAASLRQAGARVMIQK

SEQ ID NO: 168744 - protein, 246 aa, Unknown
  Bacterial polypetide isolated from the Sargasso Sea
MSEDFKVKDIKLADFGRKEISLAETEMPGLMALRKEYKSKKPLKGARILGCLHMTIQTAVLIETLVELGAEVRWSSCNIFSTQDHAAAAIAKAGIPVFAWKGETEKEYWWCVKQTIEGKKDWKPNMILDDGGDLTALMHKDYKDLLKNIKGVSEETTTGVLALKKMEVNKQLLIPAINVNDSVTKSKFDNLYGCRESLVDGIKRATDVMMSGKVAIVAGFGDVGKGSAASLRQAGARVMVTETDPI

SEQ ID NO: 168745 - protein, 263 aa, Unknown
  Bacterial polypetide isolated from the Sargasso Sea
EEQGTLLVPAINVNDSVTKSKFDNLYGCRESLVDGIKRATDVMMSGKVAIVAGFGDVGKGSAASLRQSGARVMVTETDPICALQAAMEGYEVVLMDEMIGEADIVVTATGNKDIVTADHMRAMKDRSILCNIGHFDNEIQVEALKNYKWDEIKPQVHEITFPDNKRLILLAEGRLVNLGCATGHPSFVMSASFTNQVTAQIELWNNSEKYENKVYVLPKHLDEKVARLHLEKVGAKLTKLSKDQADYISVTTEGPYKPDAYRY

SEQ ID NO: 168746 - protein, 266 aa, Unknown
  Bacterial polypetide isolated from the Sargasso Sea
RVKNGTLPLPAINVNDSVTKSKFDNKYGCQESAVDAVRRATDIMMAGKRVVVAGYGDVGKGTVASFSGAGAIVTVVEVDPICALQASMDGHEVKKMKTAITNADIIVTATGNKDILKDEHFRLMKDKAIVCNIGHFDNEIDMAWLNENYGHTKDEIKPQVDLYNIDGKDVIILAEGRLVNLGCATGHPSFVMSNSFTNQTLAQLELWKNSGSYENKVYMLPKHLDEKVAKLHLERLGVELEELNQEQADYIGVNINGPFKPEYYRY

SEQ ID NO: 168747 - protein, 278 aa, Unknown
  Bacterial polypetide isolated from the Sargasso Sea
MAQDYKVKDISQADFGRKEISLAETEMPGLMALRKEYKGKKPLKGAKILGCLHMTIQTAVLIETLVELGAEVRWSSCNIFSTQDHAAAAIAKAGIPVFAWKGETEEEYWWCVKQTIEGKKDWKPNMILDDGGDLTALMHKEYKNLLKDVKGVSEETTTGVLALKKMESNKELLIPAINVNDSVTKSKFDNLYGCRESLVDGIKRATDVMMSGKLAIVAGFGDVGKGSAASLRQAGARVMVTETDPICALQAAMEGYEVVIMDEAIKDADIVVTATGNK

SEQ ID NO: 168748 - protein, 238 aa, Unknown
  Bacterial polypetide isolated from the Sargasso Sea
MTDYKVKDISQAEFGRKEISLAETEMPGLMALRKEYKGKNPLKGARILGCLHMTIQTAVLIETLVELGAEVRWSSCNIFSTQDHAAAAIAKAGIPVFAWKGETEEEYWWCVKQTIEGKKDWKPNMILDDGGDLTALMHKDYKDLLKSVKGLSEETTTGVLALKKMEAEGTLLVPAINVNDSVTKSKFDNLYGCRESLVDGIKRATDVMMSGKVAIVAGFGDVEKEVLHHLDKVEQELW

SEQ ID NO: 168749 - protein, 153 aa, Unknown
  Bacterial polypetide isolated from the Sargasso Sea
MEDFKVKDISQAEFGRKEISIAETEMPGLMALRKEYKGKHPLKGSKIVGCLHMTIQTAVLIETLVELGAEVRWSSCNIFSTQDHAAAAIAKAGIPVFAWKGETEEEYWWCVKQTIEGKKDWKPNMILDDGGDLTALMHKDYKDLLKDVKGLSE

SEQ ID NO: 168750 - protein, 156 aa, Unknown
  Bacterial polypetide isolated from the Sargasso Sea
MEDYKVKDIAQAEFGRKEISIAESEMPGLMALREEYSKEKPLKGARIIGCLHMTIQTAVLIETLVALGAEVRWSSCNIFSTQDHAAAAIAKAGIPVYAWKGETEEEYLWCIKQTIIGKPDWKPNMLLDDGGDLTAIMHNEYKDLMKDIKGVSERDY

SEQ ID NO: 168751 - protein, 92 aa, Unknown
  Bacterial polypetide isolated from the Sargasso Sea
EGRLVILGAQTDIQSFVMSASFTNQVIAQIELWHNHKNYENKVYVLPKHLDEKVATLHLRKVGAKLTKLSKEQADYISVGTEGPFKPDAYRY

SEQ ID NO: 168752 - protein, 258 aa, Unknown
  Bacterial polypetide isolated from the Sargasso Sea
LLIPAINVNDSVTKSKFDNLYGCRESLVDGIKRATDVMMSGKVAIVAGYGDVGKGSAASLRQAGARVLVTETDPICALQAAMEGYEVVVMDDAIKDADIVVTATGNKDVVTADHMRNMKDRAILCNIGHFDNEIQVEALRNYKWDEIKPQVHEIELPSKKRIILLAEGRLVNLGCATGHPSFVMSASFTNQVIAQIELWNNSEKYENKVYVLPKHLDEKVAMLHLEKVGAKLTKMSKDQADYISVKQSGPFKPDTYRY

SEQ ID NO: 168753 - protein, 266 aa, Unknown
  Bacterial polypetide isolated from the Sargasso Sea
TQDHAAAAIAKAGIPVFAWKGETEEEYWWCVRQTIEGKKDWKPNMILDDGGDLTALMHKDYKELMKSIKGLSEETTTGVLALKKMESEGTLMVPAINVNDSVTKSKFDNLYGCRESLVDGIKRATDVMMSGKVAIVAGFGDVGKGSAASLRQSGARVMVTETDPICALQAAMEGYEVVLMDEMIKHADIVVTATGNKDIVTADHIRDMKDRAILCNIGHFDNEIQVEALKNYKWEEIKPQVHEITLPSKKRIILLAEGRLVNLGCA

SEQ ID NO: 168754 - protein, 214 aa, Unknown
  Bacterial polypetide isolated from the Sargasso Sea
MNDYKVKDISLAEFGRKEISLAETEMPGLMALRKEYQGKHPLKGARILGCLHMTIQTAVLIETLTNLGAEVRWSSCNIFSTQDHAAAAIAKTGIPVFAWKGETEEEYWWCVKQTIEGKKDWLPNMILDDGGDLTALMHKDYKDLLKGVKGLSEETTTGVLALKKMQEEGKLLVPAINVNDSVTKSKFDNLYGCRESLVDGIKRATDVMMSGKVA

SEQ ID NO: 168755 - protein, 319 aa, Unknown
  Bacterial polypetide isolated from the Sargasso Sea
CFDGTLLDLGAELRWSSCNIFSTQDHAAAAMAAKGVPVFAWKGETEEEYEWCIEQTICKDGKPWDANMILDDGSDLTAMVHAKFPDMLETIHGVSEETTTGVHRLKEMLEKGELKIPAINVNDSVTKAKNDNKYGCRHSLNDALKRGTDMLLSGKKGLVIGYGDVGKGSAASLAQEGMIVSVVESDPICAMQACMDGFAVVSCYKNGVVTRDPKDINMDVMGDTDLIVTTTGNVNVCDSAMISTLKNTAVVCNIGHFDNEIDTAYMRENYYWDEIKPQVHRVFRDTAPEGTPDLSSKNYIILLAERRLVNLGNATGHPS

SEQ ID NO: 168756 - protein, 285 aa, Unknown
  Bacterial polypetide isolated from the Sargasso Sea
PGLIALRKEYGNKKPLNGARILGCLHMTIQTAVLIETLIKLGAECRWSSCNIFSTQDHAAAAIAKAGIPVFAWKGETEKEYWWCVKQTIEGKKDWVPNMILDDGGDLTALMHKEYKDLLKNIKGVSEETTTGVLALKKMEANKELLIPAINVNDSVTKSKFDNLYGCRESLVDGIKRATDVMMSGKVAIVAGYGDVGKGSAASLRQAGARVLVTETDPICALQAAMEGYEVVLMDDAIKDADIIVTATGNKDIVTADHMRNMKDRAILCNIGHFDNEIQVEALKN

SEQ ID NO: 168757 - protein, 314 aa, Unknown
  Bacterial polypetide isolated from the Sargasso Sea
AETEMPGLMALRKEYKGKSPLKGAKILGCLHMTIQTAVLIETLVELGAEVRWSSCNIFSTQDHAAAAIAKAGIPVFAWKGETEEEYWWCVKQTIVGKKDWKPNMILDDGGDLTGLMHKEYKDLLKNIKGVSEETTTGVLALKKMEEKKQLLIPAFNVNDSVTKSKFDNLYGCRESLVDGIKRATDIMMSGKVAIVAGFGDVGKGSAASLRQAGARVMITETDPICALQAAMEGYEVVLMQDAIKDADIVVTATGNKDIVTADHMRNMKDRAILCNIGHFDNEIQVEALKNYKWDEIKPQVHEIELPSKKRNYFI

SEQ ID NO: 168758 - protein, 273 aa, Unknown
  Bacterial polypetide isolated from the Sargasso Sea
QLGVLALKKMEAQGTLLVPAINVNDSVTKSKFDNLYGCRESLVDGIKRATDVMMSGKVAIVAGFGDVGKGSAASLRQSGARVMVTETDPICALQAAMEGYEVVLMDEMIKEADIVVTATGNKDIVTADHMRDMKDRAILCNIGHFDNEIQVEALKNYKWDEIKPQVHEITLPSKKRIILLAEGRLVNLGCATGHPSFVMSASFTNQVTAQIELWNNSDKYEKKVYVLPKHLDEKVARLHLEKVGAKLTKMSKDQAEYISVTPEGPYKPDTYRY

SEQ ID NO: 168759 - protein, 85 aa, Unknown
  Bacterial polypetide isolated from the Sargasso Sea
MNTFKDYIVKDIAQSTWGQKELDIAETEMPGLMSLRDEYGKTKPLKGARIAGCLHMTIQTGVLIETLKELGADIRWASCNIFSTQ

SEQ ID NO: 168760 - protein, 101 aa, Unknown
  Bacterial polypetide isolated from the Sargasso Sea
DGKKLLLLSKGRLVNLGNATGHPSFVMSASFTNQVMAQIELWENYKNYENKVYVLPKHLDEKVAFLHLNKVGAKLTKLTDKQAEYIGVKKEGPFKDNDYRY

SEQ ID NO: 168761 - protein, 134 aa, Unknown
  Bacterial polypetide isolated from the Sargasso Sea
MENDYKVADINLAEFGRREISLAENEMPALMALRDKYRDDQPLAGAKIMGCIHMTIQTAVLMETLIDLGAELRWSSCNIFSTQDHAAAAMAAIGVPVFAWKGETDEEYEWCIEQTICKDGKPWDANMILDDGSD

SEQ ID NO: 168762 - protein, 310 aa, Unknown
  Bacterial polypetide isolated from the Sargasso Sea
KVGIPVYAWKGETEEEYWWCVRQTIEGKEGWKPNLILDDGGDLTGLMHREYKELLNDVKGLSEETTTGVLALKKMEIDGTLMVPAINVNDSVTKSKFDNLYGCRESLVDGIKRATDVMMSGKVAIVAGFGDVGKGSAASLRQSGARVMVTEADPICALQAAMEGYEVVTMDDMIKEADIVVTATGNKDIVTADHMREMKDRAILCNIGHFDNEIQVEALKNYKWDEIKPQVHEITLPSEKRIILLAEGRLVNLGCATGHPSFVMSASFTNQVTAQIELWNNPEKYEKKVYVLPKHLDEKVCRLHLEKVSA

SEQ ID NO: 168763 - protein, 179 aa, Unknown
  Bacterial polypetide isolated from the Sargasso Sea
AAMEGYEVVLMNDAIKEADIVVTATGNKDIVTADHMRNMKDRAILCNIGHFDNEIQVEALKNYKWDEIKPQVHEIELPSKKRIILLAEGRLVNLGCATGHPSFVMSASFTNQVIAQIELWKNSDKYEKKVYVLPKHLDEKVAMLHLEKVGAKLTKMSKEQADYISVKPSGPFKPDTYRY

SEQ ID NO: 168764 - protein, 147 aa, Unknown
  Bacterial polypetide isolated from the Sargasso Sea
ADHMRDMKDRAILCNIGHFDNEIQVEALKNYKWTEVKPQVHEIELPGGKRIILLAEGRLVNLGCATGHPSFVMSASFTNQVIAQIELWHNHKNYENKVYVLPKHLDEKVATLHLKKVGAKLTKLSKDQADYISVGTEGPFKPDAYRY

SEQ ID NO: 168765 - protein, 131 aa, Unknown
  Bacterial polypetide isolated from the Sargasso Sea
MEDYKVKDIAQAEFGRKEISIAESEMPGLMALREEYSKEKPLKGARIIGCLHMTIQTAVLIETLVALGAEVRWSSCNIFSTQDHAAAAIAKAGIPVYAWKGETEEEYLWCIKQTIVGKPDWKPNMLLDDGG

SEQ ID NO: 168766 - protein, 303 aa, Unknown
  Bacterial polypetide isolated from the Sargasso Sea
LMALRKEYKGKSPLKGARILGCLHMTIQTAVLIETLVDLGAEVRWSSCNIFSTQDHAAAAIAKVGIPVFAWKGETEEEYWWCVKQTIEGKKDWKPNMILDDGGDLTALMHKDYKDLLKDIKGLSEETTTGVLALKKMEAQGTLLVPAINVNDSVTKSKFDNLYGCRESLVDGIKRATDVMMSGKVAIVAGFGDVGKGSAASLRQSGARVMVTETDPICALQAAMEGYEVVLMDEMIKEADIVVTATGNKDIVTADHMRDMKDRAILCNIGHFDNEIQVEALKNYKWDEIKPQVHEITLPSKKR

SEQ ID NO: 168767 - protein, 262 aa, Unknown
  Bacterial polypetide isolated from the Sargasso Sea
KLQVPAINVNDSVTKSKFDNLYGCRESLADGIKRATDVMVAGKVVVVAGYGDVGKGSAQSMRMLGARVIITEIDPICALQAAMEGFEVLNMKAAAALGDIFVTATGCCDVINEDHFHLMKDKAILCNIGHFDSEINVAYLHDNPRVEKINIKPQVDLFKFSNKKSLIVLADGRLVNLGCATGHPSFVMSNSFCNQVLAQIELWNHRDRYDISLYRLPKHLDEKVATLHLEKLGVSLTQLTSKQSEYLNIPIEGPFKPEHYRY

SEQ ID NO: 168768 - protein, 232 aa, Unknown
  Bacterial polypetide isolated from the Sargasso Sea
LVDGIKRATDVMMSGKTAIVAGLGDVGKGSAASLRQSGARVMVTEADPICALQAAMEGYEVVLMDEAIGNADIVVTATGNKDIVTADHMRKMKDRSILCNIGHFDNEIQVEALKNYKWTEIKPQVHEIEFPDKKRILLLAEGRLVNLGCATGHPSFVMSASFTNQTIAQIELWNNSDKYENKVYVLPKHLDEKVAMLHLDKVGAKLTKLSKNQADYISVNEKGPFKPDSYRY

SEQ ID NO: 168769 - protein, 275 aa, Unknown
  Bacterial polypetide isolated from the Sargasso Sea
AEVTWSSCNIFSTQDHAAAAIAAAGIPVYAWKGESDEEFEWCIEQTLMFPSGKPLNMILDDGGDLTAMVHEQFPELLTNIYGVSEETTAGIHRLEVLNKTGALQVPAINVNDSATKSKFDNLYGCRESLADGVKRATDIMLAGKVAVVCGYGDVGKGCAASLKSYGCRVIVTEIDPINALQAAMEGFEVVTMEDACKEGNLFVTTTGNKDIILGKHIEHMPNDAILCNIGHFDTEIDVAWLEQQVADGKVSKDEIKAADIGAVDRYTFNGNGRSV

SEQ ID NO: 168770 - protein, 295 aa, Unknown
  Bacterial polypetide isolated from the Sargasso Sea
MLLDDGGDLTAMMHNEYKDLIIGVKGVSEETTTGIKALNKMEKEKSLLVPAINVNDSVTKSKFDNLYGCRESLVDGIRRATDVMMSGKIAIVAGFGDVGKGSAASLRQSGARVLVTEADPICALQAAMEGYEVVLMDEAISKADIVVTATGNKDIVTADHMRDMKDRAILCNIGHFDNEIQVEALKNYKWTEVKPQVHEIELPSKKRIILLAEGRLVNLGCATGHPSFVMSASFTNQVIAQIELWNNYKNYEKKVYVLPKHLDEKVATLHLKKVGAKLTKLSKDQADYISVGVEG

SEQ ID NO: 168771 - protein, 240 aa, Unknown
  Bacterial polypetide isolated from the Sargasso Sea
MKLDYKVKDINLAEFGRKEISLAETEMPGLIALRKEYKDQKPLKGANILGCLHMTIQTAVLIETLIQLGASVRWSSCNIFSTQDHAAAAIAKAGIPVYAWKGETEEEYWWCIKQTIEGDKNWRPNILLDDGGDLTALMHKEHKELLKSVKGVSEETTTGIKALKKMEAKKELMIPAINVNDSVTKSKFDNLYGCRESLVDGIKRATDIMMSGKVAIVAGFGDVGKGSAASLRQAGARVMV

SEQ ID NO: 168772 - protein, 86 aa, Unknown
  Bacterial polypetide isolated from the Sargasso Sea
LGCATGHPSFVMSNSFTNQVLAQIELWNNYKNYDNKVYMLPKNLDEMVAKLHLDKLGVELEELSKEQAEYIGVQLNGPYKPEYYRY

SEQ ID NO: 168773 - protein, 281 aa, Unknown
  Bacterial polypetide isolated from the Sargasso Sea
ETLIELGADIRWSSCNIFSTQDHAAAALAAKGVPIFAWKDESEEEYWWCVEKTINGPDGWAPNLILDDGGDLTGLMHEKYPELMKDIIGVSEETTTGVLRLYNMEKDGTLMCPAINVNDSVTKSKFDNLYGCRESLVDGIKRATDVMVAGKIAVVAGYGDVGKGSAQSLRGLGATVWITEIDPICALQAAMEGYRVVTMDDACSQADIFVTATGNYNVIDKHHLEQMKDQAIVCNIGHFDNEINVESMKDHEWINIKPQVDHIVYPDGKRIILLAEGRLVT

SEQ ID NO: 168774 - protein, 195 aa, Unknown
  Bacterial polypetide isolated from the Sargasso Sea
RVIITEIDPICALQASMDGFQVKKLETVISEVDIVVTATGNKDIVEGRHFELMKDKTIVCNIGHFDNEIDIAWLNKNFGDTKDEIKPQVDKYTINGKDVIILAEGRLVNLGNATGHPSFVMSNSFCNQVLAQIELWNNNDNYNNEVYVLPKHLDEKVARLHLEKLSVELTELRDDQAEYIGVKVKGPFKPEEYRY

SEQ ID NO: 168775 - protein, 81 aa, Unknown
  Bacterial polypetide isolated from the Sargasso Sea
GHPSFVMSNSFTNQVLAQIELFNKSDKYSKEVYVLPKHLDEMVARLHLDKIGAKLTKLTKDQADYINVSVEGPYKPEQYRY

SEQ ID NO: 168776 - protein, 240 aa, Unknown
  Bacterial polypetide isolated from the Sargasso Sea
NLYGCRESLADGIKRSTEIMLAGKTVVICGYGDVGKGSAQSMKSYGCKVIVTEIDPICALQAAMEGFEVRILEDVLDRGNIFVTTTGNKDIITLKHMKKMKDQAIVCNIGHFDNEIQVDALNKSDAKRDQIKPQLDRYTFKNGKQIFILAEGRLVNLGCATGHASFVMSTSFSNQVLAQVFLAKNKPATGIYDLPRKLDEEVARIHLKHLDADLTKLTKSQANYIGVNVNGPFKKDEYRY

SEQ ID NO: 168777 - protein, 225 aa, Unknown
  Bacterial polypetide isolated from the Sargasso Sea
MSDYKVKDISEAEFGRKEISIAESEMPGLMALREEYSGKTPLKGAKIIGCLHMTIQTAVLIETLVDLGAEVRWSSCNIFSTQDHAAAAIAKAGIPVYAWKGETEEEYLWCIKQTIVGNKNWKPNMLLDDGGDLTAIMHNEYKDLLKDVKGVSEETTTGIKALNKMEKDNSLLVPAINVNDSVTKSKFDNLYGCRESLVDGIRRATDVMMSGKIAIVAGFGDVGKR

SEQ ID NO: 168778 - protein, 270 aa, Unknown
  Bacterial polypetide isolated from the Sargasso Sea
VHRLKDMEKNGLLKVPAINVNDSVTKSKFDNLYGCKESLVDGIRRGTDVMMAGKVAVVAGYGDVGKGSAASLRGAGARVCVTEIDPINALQAAMEGYEVVTMDDAASYGDIFVTATGNLDVITLDHMRKMRDRAIVCNIGHFDNEIQTEALQNYKSDEIKPQVREVEFPDGKKILLLSEGRLVNLGNATGHPSFVMSASFSNQVIAQIELWENYKNYENKVYVLPKKLDEKVALLHLKKVGAKLTELNEKQADYIGVSKAGPFKDDTYRY

SEQ ID NO: 168779 - protein, 311 aa, Unknown
  Bacterial polypetide isolated from the Sargasso Sea
CIEQTICKDGKPWDANMILDDGSDLTAMVHAKFPDMLETIHGVSEETTTGVHRLKEMLEKGELKIPAINVNDSVTKAKNDNKYGCRHSLNDALKRGTDMLLSGKKGLVIGYGDVGKGSAASLAQEGMIVSVVESDPICAMQACMDGFAVVSCYKNGVVTRDPKDINMDVMGDTDLIVTTTGNVNVCDSAMISTLKNTAVVCNIGHFDNEIDTAYMRENYYWDEIKPQVHRVFRDTAPDGTPDLSSKNYIILLAEGRLVNLGNATGHPSRIMDGSFANQVLAQIHLYKQGFANVNDADKKAEMLTVEVLPKK

SEQ ID NO: 168780 - protein, 151 aa, Unknown
  Bacterial polypetide isolated from the Sargasso Sea
FGTGNMHALDKQHFDVMKDGVALANAGHFDVEINLNVLKEHSSSVDRVREHVESYKYNDKEILVLAEGRLVNLAAATGHPASVMDMSFANQALAAEWIKDNYKNLESKVYTLPKEVDLKIAATKLGLMGGELEILTEEQINYLDSWEHGTS

SEQ ID NO: 168781 - protein, 235 aa, Unknown
  Bacterial polypetide isolated from the Sargasso Sea
TYYSHINSVVSEKPNITIDDGADLVAFLHQEKPELMSEIIGGMEETTTGVIRLKALANEKKLKYPIIAANDSQTKHMFDNRYGTGQSTLDGIIRATNILLSGKNFVIIGYGWCGRGLAQRAKGMGAQTIVCEVDPIKALEAVMDGHQVMKMEEAAKEGDIFVTVTGGLHAIGKSHIENMKDGAIIANSGHFNVEIDLDSLEEMSETKSTLRPFVEEYVLENGKTICVLGEGSLLI

SEQ ID NO: 168782 - protein, 236 aa, Unknown
  Bacterial polypetide isolated from the Sargasso Sea
MENDYKVADIKLAEFGRREISLAENEMPALMALRDKYRDEQPLAGAKIMGCIHMTIQTAVLMETLVDLGAELRWSSCNIFSTQDHAAAAMAAKGVPVFAWKGETEEEYEWCIEQTICKDGKPWDANMILDDGSDLTGMVHAKFPDMLETIHGVSEETTTGVHRLKEMLEKGELKIPAINVNDSVTKAKNDNKYGCRHSLNDALKRGTDMLLSGKKGLVIGYGDVGKGSAASWLKKA

SEQ ID NO: 168783 - protein, 83 aa, Unknown
  Bacterial polypetide isolated from the Sargasso Sea
ATGHPSFVMSASFTNQVIAQIELWNNSDKYKNRVYVLPKHLDEKVAMLHLEKVGAKLTKMSKDQADYISVKQSGPFKPDTYRY

SEQ ID NO: 168784 - protein, 111 aa, Unknown
  Bacterial polypetide isolated from the Sargasso Sea
MSLAEKTKQDLLPYKVKDLELSSWGRKEILLAEAEMPGLMSLREEYSASKPLQGARIAGCLHMTIQTAVLIETLTDLGAEVSWSSCNIFSTQDHAAAAIAATGVPRICMER

SEQ ID NO: 168785 - protein, 177 aa, Unknown
  Bacterial polypetide isolated from the Sargasso Sea
MEGYEVVLMDEMIKEADIVVTATGNKDIVTADHMREMKDRAILCNIGHFDNEIQVEALKNYKWDEIKPQVHEITLPSKKRIILLAEGRLVNLGCATGHPSFVMSASFTNQVTAQIELWNNSDKYEKKVYVLPKHLDEKVARLHLEKVGAKLTKMSKDQADYISVTPDGPYKPDAYRY

SEQ ID NO: 168786 - protein, 95 aa, Unknown
  Bacterial polypetide isolated from the Sargasso Sea
LLAEGRLVNLGCATGHPSFVMSASFTNQVIAQIELWNNHKNYENKVYVLPKHLDEKVATLHLKKVGAKLTKLSKDQADYISVGVEGPFKPNAYRY

SEQ ID NO: 168787 - protein, 276 aa, Unknown
  Bacterial polypetide isolated from the Sargasso Sea
MTDYKVKDINEAEFGRKEISLAETEMPGLMAVRAEYKGKNPLKGARILGCLHMTIQTAVLIETLVDLGAECRWSSCNIFSTQDHAAAAIAKAGIPVFAWKGETEEEYWWCVKQTIEGKKDWVPNMILDDGGDLTALMHKDYKDLLKGVKGLSEETTTGVLALKKMEEQGQLLVPAINVNDSVTKSKFDNLYGCRESLVDGIKRATDVMMSGKVAIVAGFGDVGKGSAASLRQSGARVLVTETDPICALQAAMEGYEVVLMDEMIGQADIVVTATGK

SEQ ID NO: 168788 - protein, 190 aa, Unknown
  Bacterial polypetide isolated from the Sargasso Sea
MSEDFKVKDISLADFGDKEIAIAETEMPGLMALREEYGDSKPLDGARIVGCLHMTIQTAVLIETLVFLGATVRWSSCNIFSTQDHAAAAIAAKGIPVFAWKGMTEEEFWWCIEKTLEGPDGWKPNMILDDGGDATKLIHEKYPKMLEEILGLSEETTTGVHRLKEMEKNGTLKVPAINVNDSVTKSKFDN

SEQ ID NO: 168789 - protein, 252 aa, Unknown
  Bacterial polypetide isolated from the Sargasso Sea
PLKGAKILGCLHMTIQTAVLIETLVDLGAEVRWSSCNIFSTQDHAAAAIAKAGIPVFAWKGETEEEYWWCVKQTIEGKKDWKPNMILDDGGDLTALMHKDYKDLLKDIKGLSEETTTGVLALKKMEAQGTLLVPAINVNDSVTKSKFDNLYGCRESLVDGIKRATDVMMSGKVAIVAGFGDVGKGSAASLRQSGARVMVTETDPICALQAAMEGYEVVLMDEMIKEADIVVTATGNKDIVTADHMREMKDRA

SEQ ID NO: 168790 - protein, 295 aa, Unknown
  Bacterial polypetide isolated from the Sargasso Sea
MILDDGGDLTALMHKDYKDMLKNIKGVSEETTTGVLALKKMEAKKELLIPAINVNDSVTKSKFDNLYGCRESLVDGIKRATDVMMSGKVAIVAGFGDVGKGSAASLRQAGARVMITETDPICALQAAMEGYEVVLMNDAIKHADIVVTATGNKDIVTADHMRDMKDRAILCNIGHFDNEIQVEALKNYKWDEIKPQVHEIELPSKKRIILLAEGRLVNLGCATGHPSFVMSASFTNQVIAQIELWNNSDKYEKKVYVLPKHLDEKVAMLHLEKVGAKLTKMSKEQADYISVKPSG

SEQ ID NO: 168791 - protein, 267 aa, Unknown
  Bacterial polypetide isolated from the Sargasso Sea
MQRDGSLLFPAINVNDSVTKSKFDNKYGCRHSLVDGINRATDTLIGGKVAVVFGYGDVGKGSADSLRGQGARVIVTEVDPICALQAAMDGYQVARLDDVIGEADIFITATGCFDVITADDMQKMKHQAIVGNIGHFDNEIDMAGLAALPGVTRKTIKPQVDEWTFADGRSIIVLSEGRLLNLGNATGHPSFVMSNSFTNQVLAQIELFTKRDEYPIGVYTLPKHLDEKVARLHLDALGVRLTELNKQQAEYLGVDVAGPYKPDHYRY

SEQ ID NO: 168792 - protein, 272 aa, Unknown
  Bacterial polypetide isolated from the Sargasso Sea
MPGLMSTRNKYGPEKPLKGKKLTGSLHMTVETAVLIETLVDLGADVRWASCNIFSTQDHAAAVIADSGIPVYAWKGETLEEYWWCTLQALTFPDGSGPDLIVDDGGDATLLIHKGYELENFYAKYGNVPDITTKVEEEIIIEKLLREVLEKDPNHWHKVKENVIGVSEETTTGVHRLVQMEKDGHLLFPAYNVNDSVTKSKFDNVYGCKESLADGLKRALDIMVAGKTVVICGYGDVGRGCAQSMRGYGARVIVTEIDPICALQAAMEGFEV

SEQ ID NO: 168793 - protein, 296 aa, Unknown
  Bacterial polypetide isolated from the Sargasso Sea
KKNTKGKSPLKGAKILGCLHMTIQTAVLIETLVDLGAEVRWSSCNIFSTQDHAAAAIAKAGIPVFAWKGETEEEYWWCVRQTIEGKKDWKANMILDDGGDLTALMHKDYKELLKNVKGLSEETTTGVLALKKMEEQGTLMVPAINVNDSVTKSKFDNLYGCRESLVDGIKRATDVMMSGKVAIVAGFGDVGKGSAASLRQSGARVMITETDPICALQAAMEGYEVVLMDEMISQADIVVTATGNKDIVTADHMRAMKDRSILCNIGHFDNEIQVEALKNYKWDEIKPQVHEITFPE

SEQ ID NO: 168794 - protein, 261 aa, Unknown
  Bacterial polypetide isolated from the Sargasso Sea
NKTLMVPAINVNDSVTKSKFDNLYGCRESLVDGIKRATDVMMSGKVAIVAGFGDVGKGSAASLRQSGARVMVTETDPICALQAAMEGYEVVLMDEMIKEADIVVTATGNKDIVTADHMRDMKDRAILCNIGHFDNEIQVDALKNYKWDEIKPQVHEITLPSDKRIILLAEGRLVNLGCATGHPSFVMSASFTNQVTAQIELWNNSNKYENKVYVLPKHLDEKVAKLHLEKVGAKLTKMSKDQADYISVAPEGPYKPDAYRY

SEQ ID NO: 168795 - protein, 107 aa, Unknown
  Bacterial polypetide isolated from the Sargasso Sea
LRKEYKGKSPLKGARILGCLHMTIQTAVLIETLVDLGAEVRWSSCNIFSTQDHAAAAIAKAGIPVFAWKGETEEEYWWCVKQTIEGKKDWKPNMILDDGGDLTCTYA

SEQ ID NO: 168796 - protein, 87 aa, Unknown
  Bacterial polypetide isolated from the Sargasso Sea
NLGCATGHPSFVMSASFTNQVTAQIELWNNSENYEKKVYVLPKHLDEKVARLHLDKVGAKLTPLSKDQADYISVKQDGPYKPDAYRY

SEQ ID NO: 168797 - protein, 131 aa, Unknown
  Bacterial polypetide isolated from the Sargasso Sea
GHFDNEIQVEALKNYKWDEIKPQVHEIELPSKKRIILLAEGRLVNLGCATGHPSFVMSASFTNQVIAQIELWNNSDKYEKKVYVLPKHLDEKVAMLHLEKVGAKLTKMSKDQADYISVKPSGPFKPDTYRY

SEQ ID NO: 168798 - protein, 165 aa, Unknown
  Bacterial polypetide isolated from the Sargasso Sea
MSDYKVKDISQAEFGRKEISLAETEMPGLMALRKEYKGKNPLKGARILGCLHMTIQTAVLIETLVDLGAEVRWSSCNIFSTQDHAAAAIAKVGIPVFAWKGETEEEYWWCVKQTIEGKKDWKPNMILDDGGDLTALMHKDYKDLLKDIKGLSEETTTGVLALKKN

SEQ ID NO: 168799 - protein, 297 aa, Unknown
  Bacterial polypetide isolated from the Sargasso Sea
AEFGRKEISLAETEMPGLMAIRKEYGKKKPLKGARILGCLHMTIQTAVLIETLVELGAECRWSSCNIFSTQDHAAAAIAKAGVPVFAWKGETEKEYWWCVKQTIEGKKDWVPNMILDDGGDLTALMHKEYKNLLKNVKGVSEETTTGVLALKKMEANKQLLIPAINVNDSVTKSKFDNLYGCRESLVDGIKRATDVMMSGKVAIVAGYGDVGKGSAASLRQAGARVLVTETDPICALQAAMEGYEVVLMDDAIKDADIVVTATGNKDIVTADHMRNMKDRAILCNIGHFDNEIQVEA

SEQ ID NO: 168800 - protein, 240 aa, Unknown
  Bacterial polypetide isolated from the Sargasso Sea
GEEEVIIEKLLQKFHKKNPHYWHTIVPNIIGVSEETTTGVLRLEQMEKDNKLLFAAFNVNDSATKSKFDNLYGCRESLADGIKRSTEIMLAGKTVVVCGYGDVGKGCAQSMKSYGCKVIVTEIDPICALQASMEGFPVKKIEDTLNEGNIFVTATGNRDIITLKHMKKMNDQAIVCNIGHFDNEIEMDALNKSNAKKEEIKPQYDCYTFPNGKQIFILSEGRLVNLGSATGHASFVMSTS

SEQ ID NO: 168801 - protein, 309 aa, Unknown
  Bacterial polypetide isolated from the Sargasso Sea
RGVIFFSTQDHAAAAIAESGVPVFAWKGQTEEEFNWCIEQTILFEGKPWDANMILDDGGDLTAMAHEKYPEILEHIHGITEETTTGVVRLNEMIERGELKVPAINVNDSVTKSKNDNKYGTRHSLNDGIKRGTDMFLAGRKALVIGYGDVGKGSAQSLKQEGMVVRVTEIDPICAMQACMDGYEVVSPYIDGVNNNDEKSINKDLLEDTDLIVTTTGNYKVCDKHMLKALKKGAVVCNIGHFDTEIDTQFMRDNWAWEEVKPQVHKIFRDTKTSKSPNLDSEDYLILLSERRLVNLGNATGHPFRIMDG

SEQ ID NO: 168802 - protein, 121 aa, Unknown
  Bacterial polypetide isolated from the Sargasso Sea
MTQDYKVKDINQADFGRKEISLAETEMPGLMALRKEYKGKKPLKGAKILGCLHMTIQTAVLIETLVELGAEVRWSSCNIFSTQDHAAAAIAKAGIPVFAWKGETEEEYWWCVKQTIEGKKD

SEQ ID NO: 168803 - protein, 86 aa, Unknown
  Bacterial polypetide isolated from the Sargasso Sea
LGNATGHPSFVMSASFSNQVLAQIELWKNGKNYSNSVYTLPKHLDEKVARLHLEKIGVKLTKLEKDQADYIGVNEAGPFKSDSYRY

SEQ ID NO: 168804 - protein, 285 aa, Unknown
  Bacterial polypetide isolated from the Sargasso Sea
MENDYKVADINLAEFGRREISLAENEMPALMALRDKYRSEQPLAGAKIMGCIHMTIQTAVLMETLIDLGAELRWSSCNIFSTQDHAAAAMAAKGIPTFAWKGETEEEFEWCIEQTICKDGKPWDANMILDDGSDLTAMVHEKFPDMLETIHGVSEETTTGVHRLKEMLEKGELKIPAINVNDSVTKSKNDNKYGCRHSLNDALKRGTDMLLSGKKGLVIGYGDVGKGSALSLAQEGMIVSVVESDPICAMQACMDGFSVVSCYKDGVVTRDTKDINVQVMEILTW

SEQ ID NO: 168805 - protein, 154 aa, Unknown
  Bacterial polypetide isolated from the Sargasso Sea
MVIANSIKKSVPAFVISDIALSAFGRKEIKIAETEMPGLMALRVKYQSEKPLKGAKIAGSLHMTIQTAVLIETLVDLGAEVKWASCNIFSTQDHAAAAIADQGISVYAKKGETLDEYWQYTHYILDWGSESPNMILDDGGDATGLLILGSKAEK

SEQ ID NO: 168806 - protein, 201 aa, Unknown
  Bacterial polypetide isolated from the Sargasso Sea
MVQDYKVKDINEADFGRKEISLAETEMPGLMALRKEYKGKKPLKGAKILGCLHMTIQTAVLIETLVELGAEVRWSSCNIFSTQDHAAAAIAKAGIPVFAWKGETEEEYWWCVKQTIEGKKDWKPNMILDDGGDLTALMHKEYKNLLKDVKGVSEETTTGVLALKKMEAAQELLIPAINVNDSVTKSKFDNLYGCREKLVDG

SEQ ID NO: 168807 - protein, 295 aa, Unknown
  Bacterial polypetide isolated from the Sargasso Sea
CLHMTIQTAVLIETLVDLGAEVRWSSCNIFSTQDHAAAAIAKAGIPVFAWKGETEKEYWWCLEQTIEGKKDWKPNMILDDGGDLTALMHKDYKELLKNVKGLSEETTTGVLALKKMEANNQLLVPAINVNDSVTKSKFDNLYGCRESLVDGIKRATDVMMSGKVAIVAGFGDVGKGSAASLRQAGARVMVTETDPICALQAAMEGYEVVLMDDAIKDADIVVTATGNKDIVTADHMRNMKDRSILCNIGHFDNEIQVEALKNYKWDEIKPQVHEIELPSKKRIILLAEGRLVNLG

SEQ ID NO: 168808 - protein, 105 aa, Unknown
  Bacterial polypetide isolated from the Sargasso Sea
MESSTVAQNKSLGYLVADIGLAEFGRKEIEIAEHEMPGLMSIRNEYSNDKPLDGIRITGSLHMTVQTAVLIETLVDLGASVRWASCNIFSTQDHAAAAIAKSGTP

SEQ ID NO: 168809 - protein, 99 aa, Unknown
  Bacterial polypetide isolated from the Sargasso Sea
KRIILLAEGILVNLGCATGHPSFVMSASFTNQVTAQIELWNNSVKYENKVYVLPKHLDEKVARLHLEKVGAKLTPLSKDQADYISVKPEGPYKPDAYRY

SEQ ID NO: 168810 - protein, 84 aa, Unknown
  Bacterial polypetide isolated from the Sargasso Sea
RLAEAEMPGLMSLREEYGDSKPLAGARIAGCLHMTIQTAVLIETLVELGAEVTWSSCNISFYTRSSSSSYSRFWCSCLCMERNE

SEQ ID NO: 168811 - protein, 266 aa, Unknown
  Bacterial polypetide isolated from the Sargasso Sea
MLLDDGGDLTAIMHNEYQDLMKDIKGVSEETTTGIKALNKMEKDNSLLVPAINVNDSVTKSKFDNLYGCRESLVDGIRRATDVMMSGKIAIVAGFGDVGKGSAASLRQSGARVLVTEADPICALQAAMEGYEVVLMEEAISRADIVVTATGNKDIVTADHMRDMKDRAILCNIGHFDNEIQVEALKNYKWTEVKPQVHEIELPSKKRIILLAEGRLVNLGCATGHPSFVMSASFTNQVIAQIELWNNHKNYENKVYVLPKHLDEKV

SEQ ID NO: 168812 - protein, 253 aa, Unknown
  Bacterial polypetide isolated from the Sargasso Sea
INVNDSVTKSKIDNLYGCRESLVDGIKRATDVMVAGKIAVVAGYGDVGKGSAQSLRGLGATVWITEIDPICALQAAMEGYRVVTMDDACTQADIFVTATGNYNVIDKHHLEQMKDQAIVCNIGHFDNEINVESIKDHEWINIKPQVDHIVFPDGKRIILLAEGRLVNLGCGTGHPSFVMSNSFCNQTLAQIELFKNSSNYENQVYVLPKSLDEKVAKLHLDKIGAKLTKLTTEQAEYIGVKESGPYKPDHYRY

SEQ ID NO: 168813 - protein, 109 aa, Unknown
  Bacterial polypetide isolated from the Sargasso Sea
MQNRVKNTEIAKNDFKVADLSLAELGRKSITMAEHEMPGLMMLRDEYKDKKPLAGARITGSLHMTVETAVLIETLIILGAEVRWSSCNIFSTQDEAAAAMAEAGVPVFA

SEQ ID NO: 168814 - protein, 260 aa, Unknown
  Bacterial polypetide isolated from the Sargasso Sea
LYVPAININDSVTKSKFDNKYGCRESLVDGIRRATDVMIAGKVAVVAGFGDVGKGSAESLRGAGARVIVTEIDPICALQAAMEGYEVKKMKDAIPEADIVVTATGNKDIISGEHFEIMKDKTIVCNIGHFDNEIDVAWLNDNWGESKDTIKPQVDKYTIGNHDIILLAEGRLINLGCATGHPSFVMSASFTNQVIAQIELWNNIDNYEKKVYTLPKHLDEKVARLHLAKIGVELDELDKDQADYIGVPVNGPYKPDYYRY

SEQ ID NO: 168815 - protein, 251 aa, Unknown
  Bacterial polypetide isolated from the Sargasso Sea
STQDHAAAAIAKAGIPVFAWKGETEEEYWWCVKKTIEGKKDWKANMILDDGGDLTALMHKDYKDMLKNIKGLSEETTTGVLALKKMQSQGTLLVPAINVNDSVTKSKFDNLYGCRESLVDGIKRATDVMMSGKVAIVAGFGDVGKGSAASLRQSGARVMVTETDPICALQAAMEGYEVVIMDEMIKEADIVVTATGNKDIVTADHMRDMKDRAILCNIGHFDNEIQVEALKNYKWDEIKPQVHEITLPSKK

SEQ ID NO: 168816 - protein, 212 aa, Unknown
  Bacterial polypetide isolated from the Sargasso Sea
AGFGDVGKGSAASLRQSGARVLVTEADPICALQAAMEGYEVVLMEEAISRADIVVTATGNKDIVTADHMRDMKDRAILCNIGHFDNEIQVEALKNYKWTEVKPQVHEIELPSGKRIILLAEGRLVNLGCATGHPSFVMSASFTNQVIAQIELWHNHKNYENKVYVLPKHLDEKVATLHLKKVGAKLTKLSKEQADYISVKTEGPFKPDAYRY

SEQ ID NO: 168817 - protein, 136 aa, Unknown
  Bacterial polypetide isolated from the Sargasso Sea
MVIANSVKTSTPNYVIADISLSDFGRKEIKIAETEMPGLMALRDKYQSEKPLKGAKIAGSLHMTIQTAVLIETLVDLGAEVKWASCNIFSTQDHAAAAIADQGISVYAKKGETLDEYWQYTHCILDWGSDSPKYDS

SEQ ID NO: 168818 - protein, 73 aa, Unknown
  Bacterial polypetide isolated from the Sargasso Sea
MEDYKVKDISEAEFGRKEISLAETEMPGLMALRKEYGQTKPLKGARIVGCLHMTIQTAVLIETLVELGADVRW

SEQ ID NO: 168819 - protein, 305 aa, Unknown
  Bacterial polypetide isolated from the Sargasso Sea
ALRAEYGESQPLKGSRIVGSLHMTIQTAVLIETLVALGADVRWASCNIFSTQDHAAAAIADGGTPVFAIKGQTLTEHWDYLDRSFQFPEGANLILDDGGDATLYVLLGARVEAGETGLIEVPTSEEEEAIFAQIKKRMAESPGWFTKTRDAIKGVSEETTTGVHRLYDLHKKGQLPFPAINVNDSVTKSKFDNKYGCKESLVDGIRRATDTMMAGKVSVVCGYGDVGKGCAASLSGAGARVKVTEVDPICALQAAMDGFEVVLLEDVVDSADIFITTTGNKDVIRIEHMRAMKDMAIVGNIGHFD

SEQ ID NO: 168820 - protein, 307 aa, Unknown
  Bacterial polypetide isolated from the Sargasso Sea
ILQEIIIMSSSYIVKDINLAGFGKKEILIAETEMPGLVATVDELGEKKPLSGAKIAGCLHMTIQTAVLIETLVKLGAQVRWASCNIFSTQDHAAAAIAAQEIPVFAKKGETLKEYWEYVDKIFHFDDGFANLILDDGGDATMYIILGARAESGDVDFLKAPNSEEEEFLFETIKMRLEKSPGWFSKQKSSIKGVSEETTTGVHRLYQMMENNDLPFPAINVNDSVTKSKFDNKYGCRESLVDGIRRATDTMISGKTAVVCGYGDVGKGSAASLRGAGAKVVVTEVDPICALQGSMDGFDVVTLDQVV

SEQ ID NO: 168821 - protein, 280 aa, Unknown
  Bacterial polypetide isolated from the Sargasso Sea
MILDDGGDLTALMHKDYKELMKLIKGLSEETTTGVLALKKMQSEGKLLVPAINVNDSVTKSKFDNLYGCRESLVDGIKRATDVMMSGKVAIVAGFGDVGKGSAASLRQSGARVMVTESDPICALQAAMEGYEVVLMDEMIKEADVVVTATGNKDIVTADHMREMKDRAILCNIGHFDNEIQVEALKNYKWDEIKPQVHEITFPDKKRIILLAEGRLVNLGCATGHPSFVMSASFTNQVTAQIELWNNSDKYEKKVYVLPKHLDEKVARLHLDKVGAKLTK

SEQ ID NO: 168822 - protein, 76 aa, Unknown
  Bacterial polypetide isolated from the Sargasso Sea
NVVHRFTNQVTAQIELWNNSSKYEKKVYVLPKHLDEKVAMLHLDKVGAKLTKLSKEQADYISVKQEGPYKPDAYRY

SEQ ID NO: 168823 - protein, 179 aa, Unknown
  Bacterial polypetide isolated from the Sargasso Sea
MSEDYKVKDISLADFGNKEIAIAETEMPGLMAIREEYGDKKPLQGARIVGCLHMTIQTAVLIETLVYLGATVRWSSCNIFSTQDHAAAAIAAKGIPVFAWKGQTEEEFWWCIEKTLEGPDGWQPNMILDDGGDATKIIHEKYPKMLENILGLSEETTTGVHRLKEMEKKGLLKVPAINV

SEQ ID NO: 168824 - protein, 203 aa, Unknown
  Bacterial polypetide isolated from the Sargasso Sea
SAASLRQSGARVMVTEADPICALQAAMEGYEVVLMDEAIGSADIVVTATGNKDIVTADHMRKMKDRSILCNIGHFDNEIQVEALKNYKWNEIKPQVHEIEFPDKKRILLLAEGRLVNLGCATGHPSFVMSASFTNQTIAQIELWNNSDKYENKVYVLPKHLDEKVAMLHLNKVGAKLTKLTKNQADYISVGVKGPFKPDSYRY

SEQ ID NO: 168825 - protein, 276 aa, Unknown
  Bacterial polypetide isolated from the Sargasso Sea
NNLGPNLIVDDGGDATLLIHKGYELENYFNKHKKLPKITTQVEEEIVIEKLLRKVHKLNPNHWHNIVPEIVGVSEETTTGVARLQQMVEDATLLFPAFNVNDAATKSKFDNLYGCRESLADGIKRSTEIMLAGKTVVVCGYGDVGKGSAQSMKSYGCKVIITEIDPICALQAAMEGFEVRRLEDVLDRGNIFVTTTGNKDIITLKHMKKMKDQAIVCNIGHFDNEIQVEALNKSNAKRDQIKPQLDRYTFKNGRQIFILAEGRLVNLGCATGHASF

SEQ ID NO: 168826 - protein, 56 aa, Unknown
  Bacterial polypetide isolated from the Sargasso Sea
KNYENKVYVLPKHLDEKVATLHLKKVGAKLTKLSKDQADYISVGVEGPFKPNAYRY

SEQ ID NO: 168827 - protein, 197 aa, Unknown
  Bacterial polypetide isolated from the Sargasso Sea
PLGELHIFSTQDQAAAAIAKAGTSSVFAWKGETLEEYWWCTEQMLTWPGKDGPDLIVDDGGDATMLIHEGRKAEEKYAKDGTLPDPASTTNAEFKCVLALIRESIKKDPKKWTKMSKCVRGVSEETTTGVHRLKQMAAKGELLFPAINVNDCVTKSKFDNVYGCRHSLTDGIMRATDVIHGGLFDGEDVALLKNDDT

SEQ ID NO: 168828 - protein, 63 aa, Unknown
  Bacterial polypetide isolated from the Sargasso Sea
MNFWNNSDKYEKKVYVLPKHLDEKVARLHLEKVGAKLTKLSEDQAQYISVTTEGPYKPDAYRY

SEQ ID NO: 168829 - protein, 264 aa, Unknown
  Bacterial polypetide isolated from the Sargasso Sea
MSQDFKVKDINQAEFGRKEISIAETEMPGLMALRKEYQGKKPLKGAKILGCLHMTIQTAVLIETLVELGADVRWSSCNIFSTQDHAAAAIAKAGIPVYAWKGETEEEYWWCIKQTIEGKKDWKPNMLLDDGGDLTALMHKDYKNLLKSVKGLSEETTTGIKALKKMEAEKKLLVPAINVNDSVTKSKFDNLYGCRESLVDGIKRATDVMMSGKTAIVAGFGDVGKGSAASLRQSGARVMVTEADPICALQAAMEGYEVVLMDEA

SEQ ID NO: 168830 - protein, 259 aa, Unknown
  Bacterial polypetide isolated from the Sargasso Sea
GTDMLLSGKKGLVIGYGDVGKGSAASLAQEGMIVSVVESDPICAMQACMDGFSVVSCYKDGIVTRKPDDINMSVMGDTDLIVTTTGNVNVCDSAMLSTLKNTAVVCNIGHFDNEIDTAFMREQYYWDEIKPQVHRVFRDTAPDGTPDLSSKNYIILLAEGRLVNLGNATGHPSRIMDGSFANQVLAQIHLFKQGFANVNDADKKAEMITVEVLPKKLDEEVASLMVEGFGGMVTKLTKDQADYINVPQEGPFKEESYKY

SEQ ID NO: 168831 - protein, 109 aa, Unknown
  Bacterial polypetide isolated from the Sargasso Sea
MVTKNEKISKIGTDYKVADISLAEFGKKEIKIAETEMPGLMAIREEYKNQKPLKGANILGCLHMTIQTAVLIETLGDLGASVRWSSCNIFSTQDHAAAAIASQNIPVYA

SEQ ID NO: 168832 - protein, 107 aa, Unknown
  Bacterial polypetide isolated from the Sargasso Sea
MANQAIDITKKENDYKVADISLADWGRKEITIAESEMPALIALREKYRSEQPLAGAKILGCIHMTIQTAVLIETLESLGAEVRWTSCNIFSTQDHAAAAIAANGTPV

SEQ ID NO: 168833 - protein, 113 aa, Unknown
  Bacterial polypetide isolated from the Sargasso Sea
MSDYKVKDINLAEFGRKEISLAETEMPGLMALRKEYKGKNPLKGARILGCLHMTIQTAVLIETLVELGAEVRWSSCNIFSTQDHAAAAIAKAGIPVFAWKGETEEEYWWCVRQ

SEQ ID NO: 168834 - protein, 119 aa, Unknown
  Bacterial polypetide isolated from the Sargasso Sea
MEFNDYKVADIGLADWGRKEIEIAETEMPGLITLRNELSKSKPLKGANIVGCLHMTIQTAVLIETLIDLGATVRWSSCNIFSTQDHAAAAIAIKSIPVFAWKGETEEEYEWCIRQTIEG

SEQ ID NO: 168835 - protein, 299 aa, Unknown
  Bacterial polypetide isolated from the Sargasso Sea
LMALRSEYKGKKPLDGARILGCLHMTIQTAVLIETLVELGADVRWSSCNIFSTQDHAAAAIAKAGIPVYAWKGETEEEYWWCVRQTIEGKEGWKPNMILDDGGDLTSLMHKEYNELLKEVKGLSEETTTGVLALKKMENDGTLMVPAINVNDSVTKSKFDNLYGCRESLVDGIKRATDVMMSGKVAIVAGFGDVGKGSAASLRQSGARVMVTETDPICALQAAMEGYEVVLMDEMIKEADIVVTATGNKDIVTADHMRDMKDRAILCNIGHFDNEIQVDALRNYRWDEIQATSSRNHIP

SEQ ID NO: 168836 - protein, 172 aa, Unknown
  Bacterial polypetide isolated from the Sargasso Sea
MAGDATLFVHLGVQAEENPSILDKKPGSHEEKILFSQLKKSLKKDPKRFSRISRMILGVSEETTTGVHRLYKMHERNELLFPAINVNDSVTKSKFDNLYGCRHSLVDAIMRSTDIMISGKIAVVAGYGDVGKGSVQSLKGQGARIIVTEIDPVCALQASMEGYEVMAMDDAL

SEQ ID NO: 168837 - protein, 280 aa, Unknown
  Bacterial polypetide isolated from the Sargasso Sea
PLKGARILGCLHMTIQTAVLIETLVDLGAECRWSSCNIFSTQDHAAAAIAKAGIPVFAWKGETEEEYWWCVKQTIEGKKDWIPNMILDDGGDLTALMHKDYKDLLKGIKGLSEETTTGVLALKKMEEQGQLLVPAINVNDSVTKSKFDNLYGCRESLVDGIKRATDVMMSGKVAIVAGFGDVGKGSAASLRQSGARVLVTETDPICALQAAMEGYEVVLMDEMIGQADIVVTATGNKDVVTADHMRAMKDRSILCNIGHFDNEIQVEALKNYKWDEVKPQ

SEQ ID NO: 168838 - protein, 289 aa, Unknown
  Bacterial polypetide isolated from the Sargasso Sea
IANSVKASTPNFVIADISLSDFGRKEIKIAETEMPGLMALRDKYQSEKPLKGAKIAGSLHMTIQTAVLIETLVDLGAEVKWASCNIFSTQDHAAAAIADQGIPVYAKKGETLDEYWQYTHYILDWGSDSPNMILDDGGDATGLLILGSKAEKDLSVLDNPGNEEEIALFNSIKSKLENDSNFYSRIKSNIIGVTEETTTGVARLYQLQKQNALPFPAINVNDSVTKSKFDNLYGCRESLVDSIKRATDVMIAGKVALVMGFGDVGKGSAQSLRGLGAIVKVAEVDPNLC

SEQ ID NO: 168839 - protein, 101 aa, Unknown
  Bacterial polypetide isolated from the Sargasso Sea
SGKRIILLSEGRLVNLGCATGHPSFVMSASFTNQVIAQIELWHNHKNYENKVYVLPKHLDEKVATLHLKKVGAKLTKLSKEQADYISVGTEGPFKPDAYRY

SEQ ID NO: 168840 - protein, 268 aa, Unknown
  Bacterial polypetide isolated from the Sargasso Sea
MEDYKVKDISQADFGRKEISIAESEMPGLMALREEYSKEKPLKGAKIIGCLHMTIQTAVLIETLVALGAEVRWSSCNIFSTQDHAAAAIAKAGIPVYAWKGETEEEYLWCIKQTIVGKPDWKPNMLLDDGGDLTAIMHNEYQDLMKDIKGVSEETTTGIKALNKMEKDKLLLVPAINVNDSVTKSKFDNLYGCRESLVDGIRRATDVMMSGKIAIVAGFGDVGKGSAASLRQSGARVLVTEADPICALQAAMKGYEVVLMDEAISRAD

SEQ ID NO: 168841 - protein, 239 aa, Unknown
  Bacterial polypetide isolated from the Sargasso Sea
MILTISKMEQDYKVKDINLADFGRKEISLAETEMPGLMALRKEYKGKKPLKGARILGCLHMTIQTAVLIETLVDLGAEVRWSSCNIFSTQDHAAAAIAKAGIPVFAWKGETEDEYWWCVKQTIEGKKNWKPNMILDDGGDLTGLMHKDYKDMLKEVKGVSEETTTGVLALKKMESNNQLLIPAFNVNDSVTKSKFDNLYGCRESLVDGIKRATDLMMSGKVAIVAGFGDVGKGSAASLR

SEQ ID NO: 168842 - protein, 127 aa, Unknown
  Bacterial polypetide isolated from the Sargasso Sea
NEIQVEALKNYKWTEVKPQVHEIELPSGKRIILLAEGRLVNLGCATGHPSFVMSASFTNQVIAQIELWHNHKNYENKVYVLPKHLDEKVATLHLKKVGAKLTKLSKEQADYISVGTEGPFKPDAYRY

SEQ ID NO: 168843 - protein, 159 aa, Unknown
  Bacterial polypetide isolated from the Sargasso Sea
MDYKVKDISLSDWGLKEIAIAETEMPGLMALREEYGKTKPLSGAKIVGCLHMTIQTAVLIETLVHLGASVRWSSCNIFSTQDQAAAAIASKGIPVFAWKGQNEEEFWWCIEQTLSGPDNWKPNMILDDGGDATQIIHKKYPELLEEIKGLSEETTTGVL

SEQ ID NO: 168844 - protein, 251 aa, Unknown
  Bacterial polypetide isolated from the Sargasso Sea
MGDFKVKDISEAEFGRKEISIAESEMPGLMALREEYSGKSPLKGAKIIGCLHMTIQTAVLIETLVDLGAEVRWSSCNIFSTQDHAAAAIAEAGIPVYAWKGESEEEYLWCIKQTIVGNKNWKPNMLLDDGGDLTAIMHNEYKDLLKDVKGVSEETTTGIKALNKMEKENSLLVPAINVNDSVTKSKFDNLYGCRESLVDGIRRATDVMMSGKIAIVAGFGDVGKGSAASLRQSGARVMVTEADPICALQAA

SEQ ID NO: 168845 - protein, 243 aa, Unknown
  Bacterial polypetide isolated from the Sargasso Sea
KFDNFYGCRESLVDGLKRATDVMLAGKVAVVCGFGDVGKGSAESLRSQGARVIVTEIDPICALQASMEGYEVSTVDDVTKSADIFVTATGNKDVITLEHMREMKDRAIVANIGHFDSEIQVSKLKNFKWDNIKPQVDEIEFPDGKKIILLAEGRLVNLGCATGHPSFVMSASFSNQVLAQIEIWNNYKNYENKVYVLPKHLDEKVAYIHLEKLGVKLTELSDDQADYLSLNKEGPFKPDHYRY

SEQ ID NO: 168846 - protein, 253 aa, Unknown
  Bacterial polypetide isolated from the Sargasso Sea
INVNDSVTKSKFDNKYGCRESLVDGIRRATDVMMAGKIAVVAGYGDVGKGSAESLRNAGCRVLITEIDPICALQAAMDGYEVITMDEASKKADIFVTATGNVDVITVDHMRDMKDRSIVCNIGHFDSEIQIESLKNFKWNNIKPQVDEIEFPDGKKIIVLAEGRLVNLGCATGHPSFVMSASFCNQVLAQIELWKNFVKYKNKVYVLPKHLDEKVAMIHLDKVGAMLTKLTEKQGKYINVPVNGPFKTDEYRY

SEQ ID NO: 168847 - protein, 245 aa, Unknown
  Bacterial polypetide isolated from the Sargasso Sea
KSKFDNLYGCRESLVDSIKRATDVMIAGKVALVIGFGDVGKGSAQSLRGLGAIVKVAEVDPICALQAAMEGFSVVTLDDVVEDIDIFVTATGNYQVITNENLVKMKNEAIVCNIGHFDNEIDVASLKDYPWENIKPQVDHITLPSGNKIILLAEGRLVNLGCATGHPSFVMSNSFTNQVLAQVELFNKSEKYSKKVYVLPKHLDEMVARLHLDKIGAKLTKLTKEQADYINVSVEGPYKPELYRY

SEQ ID NO: 168848 - protein, 111 aa, Unknown
  Bacterial polypetide isolated from the Sargasso Sea
MSDYKVKDINLAEFGRKEISLAETEMPGLMALRKEYKGKNPLKGARILGCLHMTIQTAVLIETLVDLGAEVRWSSCNIFSTQDHAAAAIAKVGIPVFAWKGETEEEYWWCV

SEQ ID NO: 168849 - protein, 248 aa, Unknown
  Bacterial polypetide isolated from the Sargasso Sea
MSEDFKVKDISLADFGDKEIAIAETEMPGLMALREEYGDSKPLDGARIVGCLHMTIQTAVLIETLVFLGATVRWSSCNIFSTQDHAAAAIAAKGIPVFAWKGMTEEEFWWCIEKTLEGPDGWKPNMILDDGGDATKIIHEKYPKMLEEILGLSEETTTGVHRLKEMEKNGTLKVPAINVNDSVTKSKFDNLYGCKESLVDGIRRGTDVMMAGKIAVVAGYGDVGKGSAASLRGAGARVCVTEIDPINA

SEQ ID NO: 168850 - protein, 149 aa, Unknown
  Bacterial polypetide isolated from the Sargasso Sea
VTADHMRDMKDRAILCNIGHFDNEIQVEALKNYKWNEIKPQVHEIELPNKKRIILLAEGRLVNLGCATGHPSFVMSASFTNQVIAQIELWNNSDKYEKKVYVLPKHLDEKVAMLHLDKVGAKLTKMSKEQADYISVKPSGPFKPDTYRY

SEQ ID NO: 168851 - protein, 141 aa, Unknown
  Bacterial polypetide isolated from the Sargasso Sea
MDDYKVKDITQAEFGRKEISIAESEMPGLMALREEYSKEKPLKGARIIGCLHMTIQTAVLIETLVALGAEVRWSSCNIFSTQDHAAAAIAKAGIPVYAWKGETEEEYLWCIKQTIDGKPDWKPNMLLDDGGDLTAIMHNEY

SEQ ID NO: 168852 - protein, 208 aa, Unknown
  Bacterial polypetide isolated from the Sargasso Sea
MSNDYKVADIELADFGRREISLAENEMPALMALREKYKTEQPLAGAKIMGCIHMTIQTAVLMETLVDLGAELRWSGCNIFSTQDHAAAAMAKAGIPVFAWKGQTDEEFDWCIEQTILKDGKPWDANMILDDGGDLTHMVHTRFAEMLETIHGISEETTTGVHRLKAMLEKGELKVPAINVNDSVTKAKNDNKYGCRHSLNDGIKRGTD

SEQ ID NO: 168853 - protein, 115 aa, Unknown
  Bacterial polypetide isolated from the Sargasso Sea
MEFNDYKVADIGLADWGRKEIEIAETEMPGLITLRNELSKSKPLKGANIVGCLHMTIQTAVLIETLIDLGATVRWSSCNIFSTQDHAAAAIASKNIPVFAWKGETEEEYDWCIRQ

SEQ ID NO: 168854 - protein, 245 aa, Unknown
  Bacterial polypetide isolated from the Sargasso Sea
MPDYKVKDISQAEFGRKEISLAETEMPGLMALRKEYKGKSPLKGAKILGCLHMTIQTAVLIETLVDLGAEVRWSSCNIFSTQDHAAAAIAKAGIPVFAWKGETEEEYWWCVKQTIEGKKDWKPNMILDDGGDLTALMHKDYKELLKDIKGLSEETTTGVLALKKMEEQGTLMVPAINVNDSVTKSKFDNLYGCRESLVDGIKRATDVMMSGKVAIVAGFGDVGKGSAASLRQSGARVMITETDPI

SEQ ID NO: 168855 - protein, 288 aa, Unknown
  Bacterial polypetide isolated from the Sargasso Sea
AWKGETEEEYWWCVKQTIEGKKDWKPNMILDDGGDLTALMHKDYKDLLKDIKGLSEETTTGVLALKKMEAQGTLLVPAINVNDSVTKSKFDNLYGCRESLVDGIKRATDVMMSGKVAIVAGFGDVGKGSAASLRQSGARVMVTETDPICALQAAMEGYEVVLMDEMIKEADIVVTATGNKDIVTADHMRDMKDRAILCNIGHFDNEIQVEALKNYKWDEIKPQVHEITLPSKKRIILLAEGRLVNLGCATGHPSFVMSASFTNQVTAQIELWNNSDKYEKKVYVLPKH

SEQ ID NO: 168856 - protein, 258 aa, Unknown
  Bacterial polypetide isolated from the Sargasso Sea
LLVPAINVNDSVTKSKFDNLYGCRESLVDGIRRATDVMMSGKIAIVAGFGDVGKGSAASLRQSGARVLVTEADPICALQAAMEGYEVVLMEEAISKADIVVTATGNKDIVTADHMRDMKDRAILCNIGHFDNEIQVEALKNYKWTEVKPQVHEIELPSKKRIILLAEGRLVNLGCATGHPSFVMSASFTNQVIAQIELWNNYKNYENKVYVLPKHLDEKVATLHLKKVGAKLTKLSKDQADYISVGVEGPFKPNAYRY

SEQ ID NO: 168857 - protein, 241 aa, Unknown
  Bacterial polypetide isolated from the Sargasso Sea
KDINLAEFGRKEISLAETEMPGLMALRKEYKGNQPLKGARILGCLHMTIQTAVLIETLAELGAEIRWSSCNIFSTQDHAAAAIAKAGIPVFAWKGETEEEYWWCVRQTIEGKKDWKPNMILDDGGDLTALMHKDYKEMLKSIKGLSEETTTGVLALKKMESEGTLMVPAINVNDSVTKSKFDNLYGCRESLVDGIKRATDVMMSGKVAIVAGFGDVGKGSAASLRQSGARVMVTETDPICA

SEQ ID NO: 168858 - protein, 219 aa, Unknown
  Bacterial polypetide isolated from the Sargasso Sea
SICAMQACMDGFSVVSCYKDGIVTRNPDDINMAVMGDTDLIVTTTGNVNVCDSAMLSTVKNTAVVCNIGHFDNEIDTAYMRENFYWDEIKPQVHRVFRDTSPDGTPDLSSKDYIILLAEGRLVNLGNATGHPSRIMDGSFANQVLAQIHLFKQGFANINDADKRSEMITVEVLPKKLDEEVASLMVAGFGGMVTKLTKDQADYINVPQDGPFKEESYKY

SEQ ID NO: 168859 - protein, 75 aa, Unknown
  Bacterial polypetide isolated from the Sargasso Sea
MSASFTNQVLAQLELWTNSEEYKNEVYVLPKKLDEKVAMLHLNKIGVRLTDLEKDQADYIGVDKSGPFKPDHYRY

SEQ ID NO: 168860 - protein, 124 aa, Unknown
  Bacterial polypetide isolated from the Sargasso Sea
MSDYKVKDINEAEFGRKEISLAETEMPGLMALRTEYKGKHPLKGARILGCLHMTIQTAVLIETLVDLGAEVRWSSCNIFSTQDHAAAAIAKAGIPVFAWKGETEEEYWWCVRQTIEGKKDGNLI

SEQ ID NO: 168861 - protein, 290 aa, Unknown
  Bacterial polypetide isolated from the Sargasso Sea
ICVENLPYKVKDLSLSEDGRKALDIAEKEMPGLMSTRNKYGPEKPLKGKKLTGSLHMTVETAVLIETLVDLGADVRWASCNIFSTQDHAAAVIADSSIPVYAWKGETLEEYWWCTLQALTFPDGSGPDLIVDDGGDATLLIHKGYELENFYAKYGNVPDITTKVEEEIIIEKLLREVLEKDPNHWHKVQENVIGVSEETTTGVHRLVQMEKDGHLLFPAYNVNDSVTKSKFDNVYGCKESLADGLKRALDIMVAGKTVVICGYGDVGRGCAQSMRGYGARVIVTEIDPIC

SEQ ID NO: 168862 - protein, 205 aa, Unknown
  Bacterial polypetide isolated from the Sargasso Sea
KGSAASLRQSGARVLVTEADPICALQAAMEGYEVVLMEEAISRADIVVTATGNKDIVTADHMRDMKDRAILCNIGHFDNEIQVEALKNYKWTEVKPQVHEIELPSGKRIILLAEGRLVNLGCATGHPSFVMSASFTNQVIAQIELWHNHKNYENKVYVLPKHLDEKVATLHLKKVGAKLTKLSKEQADYISVGTEGPFKPDAYRY

SEQ ID NO: 168863 - protein, 211 aa, Unknown
  Bacterial polypetide isolated from the Sargasso Sea
GFEDVGKGSAQSLRGLGAIVKVAEVDPICALQAAMEGFSVVTLDDVVKDIDIFVTATGNYQVITNENLVKMKDEAIVCNIGHFDNEIDVASLKDYPWENIKPQVDHITLPSGNKIILLAEGRLVNLGCATGHPSFVMSNSFTNQVLAQIELFNKSEKYAKEVYVLPKHLDEMVARLHLDKIGAKLTKLTKEQADYINVSVEGPYKPELYRY

SEQ ID NO: 168864 - protein, 317 aa, Unknown
  Bacterial polypetide isolated from the Sargasso Sea
KDSKPLEGARIVGCLHMTIQTAVLIETLTFLGAEVRWSSCNIFSTQDHAAAAIADSNIPVFAWKGETEEEFWNCIEKTITGPNEWRPNLILDDGGDLTKIMHDKYPDLLKNIRGLSEETTTGVHRLYEMEKENSLLVPAINVNDSVTKSKFDNLYGCRESLVDGIRRATDVMMSGKVAVVAGYGDVGKGSAASLKNAGARVLVTEIDPICALQASMEGYEVVTMENAAKIADIFVTATGNCDVINIDHMREMKDRAIICNIGHFDSEIEISSLKNYPWEEIKPQVDQVTFPDGKKIICLAEGRLVNLGCATGHPSFV

SEQ ID NO: 168865 - protein, 250 aa, Unknown
  Bacterial polypetide isolated from the Sargasso Sea
LIHEGYKAEIEFAKSGAVPDPASTDNAEMKCVLKIIAENLKTNPNRWHKIVETCVGVSEETTTGVKRLYEMQKAGELLFPAINVNDSVTKCKFDNLYGCRHSLPDGIMRATDVMIASKTCWVAGYGDVGKGSAAALKAAGARVIVSEIDPICALQAAMEGYQVAPIEDVVDQVDIFITTTGNKDIIMVKHMEKMKNNAIVGNIGHFDNEIDMAGLESFPGIKRQNIKPQCDRFEFPDGHGIIMLAEGRLL

SEQ ID NO: 168866 - protein, 275 aa, Unknown
  Bacterial polypetide isolated from the Sargasso Sea
ILDDGGDLTALMHKDYQDLLSGVKGLSEETTTGVLALKKMESEGKLLVPAINVNDSVTKSKFDNLYGCRESLVDGIKRATDVMMSGKVAIVAGFGDVGKGSAASLRQSGARVMITETDPICALQAAMEGYEVVTMDDMIEHADIVVTATGNKDIVTADHMREMKDRAILCNIGHFDNEIQVEALRNYKWDEIKPQVHEITLPSNKRIILLAEGRLVNLGCATGHPSFVMSASFTNQTIAQIELWNNSDNYKNKVYVLPKKLDEKVAMLHLEKVGA

SEQ ID NO: 168867 - protein, 194 aa, Unknown
  Bacterial polypetide isolated from the Sargasso Sea
ARVMITETDPICALQAAMEGYEVVTMDDMIGQADIVVTATGNKDIVTADHMREMKDRAILCNIGHFDNEIQVDALRNYKWDEIKPQVHEITLPSKKRIILLAEGRLVNLGCATGHPSFVMSASFTNQTIAQIELWNNSDNYENKVYVLPKKLDEKVAMLHLEKVGAKLTKLSKDQAEYIGVSEQGPYKPEAYRY

SEQ ID NO: 168868 - protein, 256 aa, Unknown
  Bacterial polypetide isolated from the Sargasso Sea
AAIAKSGVPVYAWKGETEEEYWWCINQTINGDKSWKPNLILDDGGDLTGLLHKSYKDLLKSIKGVSEETTTGVLALKRMEREKKLLIPAINVNDSVTKSKFDNLYGCRESLVDGIKRATDVMMSGKVAIVAGFGDVGKGSAASLRQSGARVLITETDPICALQAAMEGYKVVLMDEAIKEADIVVTATGNKDIVTADHMRNMKDRAILCNIGHFDNEIQVEALKNYKWNEIKPQVHEIELPSKKRIILLAEGRLVN

SEQ ID NO: 168869 - protein, 228 aa, Unknown
  Bacterial polypetide isolated from the Sargasso Sea
IKRATDVMMSGKVAIVAGFGDVGKGSAASLRQSGARVMVTETDPICALQAAMEGYEVVLMDEMIGQADIVVTATGNKDIVTADHMRDMKDRSILCNIGHFDNEIQVEALKNYKWDEIKPQVHEITFPDNKRLILLAEGRLVNLGCATGHPSFVMSASFTNQVTAQIELWNNSEKYERKVYVLPKHLDEKVARLHLEKVGAKLTKLSKDQADYISVTTEGPYKPDAYRY

SEQ ID NO: 168870 - protein, 141 aa, Unknown
  Bacterial polypetide isolated from the Sargasso Sea
MKDRAILCNIGHFDNEIHVDAMKNYKWTEIKPQVHEIELPDKKRIILLAEGRLVNLGCATGHPSFVMSASFTNQVMAQIELWNNYKKYEKKVYVLPKHLDEKVAMLHLNKVGAKLTKLSKDQADYIGVNTKGPFKSDSYRY

SEQ ID NO: 168871 - protein, 134 aa, Unknown
  Bacterial polypetide isolated from the Sargasso Sea
TEMPGLMQIREEYKDSKPLKGANIVGCLHMTIQTAVLIETLKHLGASVRWSSCNIFSTQDHAAAAIARKGIPVFAWKGETEEEYWWCIRQTIEGNKNWKPNMILDDGGDLTAILHKDYKELIKDIRGVSEETTT

SEQ ID NO: 168872 - protein, 242 aa, Unknown
  Bacterial polypetide isolated from the Sargasso Sea
MKNKTDNKYVAYRVKDISLAEWGRKEIKLAEAEMPGLMALRDRFKKEKPLKGSRIAGCLHMTIQTSVLIETLVDLGAEVTWSSCNIFSTQDHAAAAIADNGISVYAWKGMTEEEFNWCIEQTLFFGEEKNPLNMILDDGGDLTNMVLDEYPELVSAIKGLSEETTTGVHRLYDRMKNGTLPLPAINVNDSVTKSKFDNKYGCKESAVDAVRRATDIMLAGKRVVVCGYGDVGKGTAASFRGA

SEQ ID NO: 168873 - protein, 306 aa, Unknown
  Bacterial polypetide isolated from the Sargasso Sea
MGVHRLKEMLEKGELKIPAINVNDSVTKAKNDNKYGCRHSLNDALKRGTDMLLSGKKGLVIGYGDVGKGSAASLAQEGMIVSVVESDPICAMQACMDGFAVVSCYKNGVVTRDPKDINMDVMGDTDLIVTTTGNVNVCDSAMISTLKNTAVVCNIGHFDNEIDTAYMRENYYWDEIKPQVHRVFRDTAPDGTPDLSSKNYIILLAEGRLVNLGNATGHPSRIMDGSFANQVLAQIHLYKQGFANVNDADKKAEMLSVEVLPKKLDEEVASLMVEGFGGTVTQLTKEQADYINVPQDGPFKEEKLQY

SEQ ID NO: 168874 - protein, 229 aa, Unknown
  Bacterial polypetide isolated from the Sargasso Sea
MSNDYKVKDISLSDWGLKEIAIAETEMPGLMALRDEFKDSKPLKDAKIVGCLHMTIQTAVLIETLVHLGASVRWSSCNIFSTQDQAAAAIAAKGIPVFAWKGMSEEEFWWCIEQTLKGPDGWKPNMILDDGGDATKIIHDKYPEMLKEIKGLSEETTTGVHRLKEMEKQGTLKVPAINVNDSVTKSKFDNLYGCKESLVDGIRRGTDVMMAGKIAVVAGYGDVGKGSAA

SEQ ID NO: 168875 - protein, 268 aa, Unknown
  Bacterial polypetide isolated from the Sargasso Sea
IKIHTEYPEMLNHIHGISEETTTGVKRLKEMLANGKLKVPAINVNDSITKSKNDNKYGCRHGLDDAIKRGTDMLLSGKKALVIGYGDVGKGSADSLMQQKMIVDVTEVDPICAMQACFDGFSVVSAYKDGKVSNDGTNLDEELLKKYDLVVTTTGNINVLDKYMLDALRSGCVVCNIGHFDNEIDVKHLKSFDWYEVKPGVHKVIRAKNDYLLLLGEGRLVNLALATGHPSRVMDGSFCNQVLAQIILFKEGFASKKPKEKRLYVKVL

SEQ ID NO: 168876 - protein, 104 aa, Unknown
  Bacterial polypetide isolated from the Sargasso Sea
MDDFKVKDISQAEFGRKEISIAESEMPGLMALREEYKGKQPLKGAKIIGCLHMTIQTAVLIETLKDLGADVRWSSCNIFSTQDHAAAAIAKAGIPVYAWKSETE

SEQ ID NO: 168877 - protein, 235 aa, Unknown
  Bacterial polypetide isolated from the Sargasso Sea
ETEEEYWWCVKQTIEGKKDWKPNMILDDGGDLTALMHKDYKDLLKDIKGLSEETTTGVLALKKMEAQGTLLVPAINVNDSVTKSKFDNLYGCRESLVDGIKRATDVMMSGKVAIVAGFGDVGKGSAASLRQSGARVMVTETDPICALQAAMEGYEVVLMDEMIKEADIVVTATGNKDIVTADHMREMKDRAILCNIGHFDNEIQVEALKNYKWDEIKPQVHEITLPSKKRIILLA

SEQ ID NO: 168878 - protein, 284 aa, Unknown
  Bacterial polypetide isolated from the Sargasso Sea
MKDIKGVSEETTTGIKALNKMEKDKSLLVPAINVNDSVTKSKFDNLYGCRESLVDGIRRATDVMMSGKIAIVAGFGDVGKGSAASLRQSGARVLVTEADPICALQAAMEGYEVVLMEEAISRADIVVTATGNKDIVTADHMRDMKDRAILCNIGHFDNEIQVEALKNYKWTEVKPQVHEIELPSGKRIILLAEGRLVNLGCATGHPSFVMSASFTNQVIAQIELWNNHKNYENKVYVLPKHLDEKVATLHLKKVGAKLTKLSKEQAEYISVGTEGPFKPDAYRY

SEQ ID NO: 168879 - protein, 245 aa, Unknown
  Bacterial polypetide isolated from the Sargasso Sea
MSQDFKVKDINQAEFGRKEISLAETEMPGLMALRKEYKSKKPLKGARILGCLHMTIQTAVLIETLVELGAEVRWSSCNIFSTQDHAAAAIAKAGIPVFAWKGETEEEYWWCVKQTIEGKKDWKPNLILDDGGDLTALMHKDHKDLLKNVKGVSEETTTGVLALKKMEAKKELLIPAINVNDSVTKSKFDNLYGCRESLVDGIKRATDVMMSGKVAIVAGFGDVGKGSAASLRQAGARVMVTETDP

SEQ ID NO: 168880 - protein, 211 aa, Unknown
  Bacterial polypetide isolated from the Sargasso Sea
GFGDVGKGSAASLRQSGARVMVTETDPICALQAAMEGYEVVLMDDMIKEADIVVTATGNKDIVTADHMREMKDRAILCNIGHFDNEIQVEALKNYKWDEIKPQVHEITLPSNKRIILLAEGRLVNLGCATGHPSFVMSASFTNQVTAQIELWNNSEKYENKVYVLPKHLDEKVARLHLEKVGAKLTQMSKDQADYISVTPEGPYKPDTYRY

SEQ ID NO: 168881 - protein, 241 aa, Unknown
  Bacterial polypetide isolated from the Sargasso Sea
VRWSSCNIFSTQDHAAAAIAKAGTPVYAWKGETEEEYLWCIKQTIVGRKDWKPNMLLDDGGDLTAIMHKEYKDLLKEVKGVSEETTTGIKALNKMEKDKTLLVPAINVNDSVTKSKFDNLYGCRESLVDGIRRATDVMMSGKIAIVAGFGDVGKGSAASLRQSGARVLVTEADPICALQAAMEGYEVVLMDEAISKADIVVTATGNKDIVTADHMRDMKDRAILCNIGHFDNEIQVEALKN

SEQ ID NO: 168882 - protein, 204 aa, Unknown
  Bacterial polypetide isolated from the Sargasso Sea
ICAMQACFDGFSVVSPYKNGEVDEAGKNLDSKLLKKYDVVVTTTGNINVLDKFMLDALRSGCVVCNIGHFDNEIDVEYLKTFEWYEVKSGVHKVLRSNKDYLLLLGEGRLVNLALATGHPSRVMDGSFCNQVLAQILLYKEAFANKDKNKKEPYVKVLPKELDEEVAHLMVKGFGGTLTKLTKQQEDYISVNINGPFKDDTYSY

SEQ ID NO: 168883 - protein, 267 aa, Unknown
  Bacterial polypetide isolated from the Sargasso Sea
MEDYKVKDIAQAEFGRKEISIAESEMPGLMALREEYSKEKPLKGARIIGCLHMTIQTAVLIETLVALGAEVRWSSCNIFSTQDHAAAAIAKAGIPVYAWKGETEEEYLWCIKQTIVGKPDWKPNMLLDDGGDLTAIMHNEYQDLMKDIKGVSEETTTGIKALNKMEKDKSLLVPAINVNDSVTKSKFDNLYGCRESLVDGIRRATDVMMSGKIAIVAGFGDVGKGSAASLRQSGARVLVTEADPICALQAAMEGYEVVLMDEAISRA

SEQ ID NO: 168884 - protein, 312 aa, Unknown
  Bacterial polypetide isolated from the Sargasso Sea
AKAGIPVFAWKGETEEEYWWCVRQTIEGKKDWKPNMILDDGGDLTALMHKDYKELMKNIKGLSEETTTGVLALKKMEQEGTLLVPAINVNDSVTKSKFDNLYGCRESLVDGIKRATDVMMSGKVAIVAGFGDVGKGSAASLRQSGARVMVTETDPICALQAAMEGYEVVTMDDMISQADIIVTATGNKDIVTADHMREMKDRAILCNIGHFDNEIQVDALKNYKWDEIKPQVHEITLPSNKRIILLAEGRLVNLGCATGHPSFVMSASFTNQVTAQIELWNNSDKYEKKVYVLPKHLDEKVAMLHLEKVGAK

SEQ ID NO: 168885 - protein, 254 aa, Unknown
  Bacterial polypetide isolated from the Sargasso Sea
EISIAESEMPGLMALREEYVGKHPLKGAKIVGCLHMTIQTAVLIETLVHLGAEVRWSSCNIFSTQDHAAAAIAKAGIPVYAWKGETEDEYWWCVKQTIEGKKDWKPNMILDDGGDLTALMHKEYKDLMKDVKGLSEETTTGVLALKKMEKEKTLLVPAINVNDSVTKSKFDNLYGCRESLVDGIKRATDVMMSGKVAIVAIVAGFGDVGKGSAASLRQSGARVMITETDPICALQAAMEGYEVVTMDDMISEAK

SEQ ID NO: 168886 - protein, 314 aa, Unknown
  Bacterial polypetide isolated from the Sargasso Sea
EISIAESEMPGLMALRREYKGKKPLKGAKILGCLHMTIQTAVLIETLVHLGAEVRWSSCNIFSTQDHAAAAIAKEGIPVFAWKGETEKEYWWCVKQTIEGKKDWKPNMILDDGGDLTALMHKEYKDLLKNVKGVSEETTTGVLALKKMEASKQLMIPAINVNDSVTKSKFDNLYGCRESLVDGIKRATDVMMSGKVAIVAGFGDVGKGSAASLRQAGARVMITETDPICALQAAMEGYEVVLMDEAIKDADIVVTATGNKDIVTADHMRDMKDRAILCNIGHFDNEIQVDALKNYKWDEIKPQVHEIELPSKKR

SEQ ID NO: 168887 - protein, 99 aa, Unknown
  Bacterial polypetide isolated from the Sargasso Sea
MPEDFKVKDIKQADFGRKEISIAETEMPGLMALRKEFKEKKPLKGANILGCLHMTIQTAVLIETLVELGADVRWSSCNIFSTQDHAAAAIAKAGVPVYA

SEQ ID NO: 168888 - protein, 260 aa, Unknown
  Bacterial polypetide isolated from the Sargasso Sea
TLLVPAINGYNDSVTKSKFDNLYGCRESLVDGIKRATDVMMSGKVAIVAGFGDVGKGSAASLRQSGARVMVTETDPICALQAAMEGYEVVLMDEMISQADIVVTATGNKDIVTADHMRDMKDRAILCNIGHFDNEIQVEALKNYKWDEIKPQVHEITFPDNKRLILLAEGRLVNLGCATGHPSFVMSASFTNQVTAQIELWNNSEKYENKVYVLPKHLDEKVARLHLEKVGAKLTKLSKDQADYISVKTEGPYKPDAYRY

SEQ ID NO: 168889 - protein, 212 aa, Unknown
  Bacterial polypetide isolated from the Sargasso Sea
MEDYKVRDLSQAEFGRKEISIAESEMPGLMALREEYAGKSPLKGAKIIGCLHMTIQTAVLIETLVDLGAEVRWSSCNIFSTQDHAAAAIAKAGIPVYAWKGETEEEYVWCIKQTIEGKKSWKPNMLLDDGGDLTAMMHNEYKDLLKDVKGVSEETTTGIKALNKMEKENSLLVPAINVNDSVTKSKFDNLYGCRESLVDGIRRATDVMMSGK

SEQ ID NO: 168890 - protein, 203 aa, Unknown
  Bacterial polypetide isolated from the Sargasso Sea
SAASLRQAGARVLVTETDPICALQAAMEGYEVVLMDDAIKDADIVVTATGNKDIVTADHMRNMKDRAILCNIGHFDNEIQVEALKNYKWDEIKPQVHEIELPSKKRIILLAEGRLVNLGCATGHPSFVMSASFTNQVIAQIELWNNSDNYENKVYVLPKHLDEKVAMLHLEKVGAKLTKMSKDQADYISVKQSGPFKPDTYRY

SEQ ID NO: 168891 - protein, 111 aa, Unknown
  Bacterial polypetide isolated from the Sargasso Sea
MVIANSVKTSTPNYVIADISLSHFGRKEIKIAETEMPGLMALREKYQSVKPLKGAKIAGSLHMTIQTAVLIETLVDLGAEVKWASCNIFSTQDHAAAAIADKGISVYAKKG

SEQ ID NO: 168892 - protein, 157 aa, Unknown
  Bacterial polypetide isolated from the Sargasso Sea
MSQKYIVKDISLSDFGRKELSIAETEMPGLMALRSEYGESKPLKGARIVGSLHMTIQTAVLIETLVALGADVRWASCNIFSTQDHAAAAIAAANIPVFAIKGQSLEEHWDYLDKSFMFPDGPNMILDDGGDATLYVLLGARAEAGEDIIPVPQSEEE

SEQ ID NO: 168893 - protein, 178 aa, Unknown
  Bacterial polypetide isolated from the Sargasso Sea
VRALEALMHGYEVKTSINAAKIADVIVSVTGNMHALDKQHFDVMKDGVALANAGHFDVEINLNALKEHSSSIDRVREHVESYKYNNKEILVLAEGRLVNLAAATGHPASVMDMSFANQALAAEWIKDNYKNLESKVYTLPKEVDLKIAATKLGLMGGELEILTEEQINYLDSWEHGTS

SEQ ID NO: 168894 - protein, 162 aa, Unknown
  Bacterial polypetide isolated from the Sargasso Sea
ADIVVTATGNKDIVTADHMRDMKDRAILCNIGHFDNEIQVEALKNYKWDEIKPQVHEIELPSKKRIILLAEGRLVNLGCATGHPSFVMSASFTNQVIAQIELWNNSDKYEKKVYVLPKHLDEKVAMLHLDKVGAKLTKMSKDQADYISVKQSGPFKSDTYRY

SEQ ID NO: 168895 - protein, 144 aa, Unknown
  Bacterial polypetide isolated from the Sargasso Sea
MRAMKDRSILCNIGHFDNEIQVDALKNYKWDEIKPQVHEITFPDNKRLILLAEGRLVNLGCATGHPSFVMSASFTNQVTAQIELWNNSDNYENKVYVLPKHLDEKVARLHLEKVGAKLTPLSKDQADYISVKTEGPYKPDAYRY

SEQ ID NO: 168896 - protein, 87 aa, Unknown
  Bacterial polypetide isolated from the Sargasso Sea
ATDVMMSGKVAIVAGFGDVGKGSAASLRQAGARVMVTETDPICALQAAMEGYEVVLMDEAIKDADIVVTATGNKDIVTADHMSRNER

SEQ ID NO: 168897 - protein, 141 aa, Unknown
  Bacterial polypetide isolated from the Sargasso Sea
MKDRAILCNIGHFDNEIQVEALKNYKWDEVKPQVHEIELPSKKRIILLAEGRLVNLGCATGHPSFVMSASFTNQVIAQIELWNNSDKYERKVYVLPKHLDEKVAMLHLDKVGAKLTKMSKDQADYISVKPSGPFKPDTYRY

SEQ ID NO: 168898 - protein, 171 aa, Unknown
  Bacterial polypetide isolated from the Sargasso Sea
NVCDSAMLSTLKDGAVVCNIGHFDTEIDTKYMQKEWYWEEVKPQVHRIFRDCSPDQEPDLSSKNYLILLAEGRLVNLGNATGHPSRIMDGSFANQVLAQMHLYSAGFANVNDEDKKKELIQVEVLPKKLDEEVASLMVQGFGGVVTKLTEEQADYINVPQDGPFKEDSYKY

SEQ ID NO: 168899 - protein, 136 aa, Unknown
  Bacterial polypetide isolated from the Sargasso Sea
ILCNIGHFDNEIQVDALKNFKWTEVKPQVHEIELPSKKRIILLAEGRLVNLGCATGHPSFVMSASFTNQVIAQIELWNNYKNYENKVYVLPKHLDEKVATLHLKKVGAKLTKLSKDQADYISVGVEGPFKPNAYRY

SEQ ID NO: 168900 - protein, 232 aa, Unknown
  Bacterial polypetide isolated from the Sargasso Sea
LVDGIRRATDVMMSGKIAIVAGFGDVGKGSAASLRQSGARVLVTEADPICALQAAMEGYEVVLMEEAISKADIVVTATGNKDIVTADHMREMKDRAILCNIGHFDNEIQVEALKNYKWTEVKPQVHEIELPSKKRIILLAEGRLVNLGCATGHPSFVMSASFTNQVIAQIELWNNHKNYENKVYVLPKHLDEKVATLHLKKVGAKLTKLSQEQADYISVGVEGPFKPNAYRY

SEQ ID NO: 168901 - protein, 211 aa, Unknown
  Bacterial polypetide isolated from the Sargasso Sea
MEFKDYKVADINLADWGRKEIILAQAEMPALMKLRKRYGEEKPLKGAKIMGCIHMTIQTAVLIETLVELGAEVRWSSCNVFSTQDHAAAAIAAAGIPVFAWKGMNDEEFDWCIEQTILNGEKPWDANMILDDGGDLTEMVHDKFPEMLESIHGISEETTTGVHRLNEMVEKGELKVPAINVNDSVTKSKNDNKYGCRHSLNDAIKRGTDML

SEQ ID NO: 168902 - protein, 207 aa, Unknown
  Bacterial polypetide isolated from the Sargasso Sea
MPFDHCKIADPSLSDWGRKEMNIAEIEMPGLMALREEYGEAQPLKGAKIAGSLHMTIQTAVLIETLTALGAEVRWASCNIFSTQDHAAAAIAATGVPVFATKGETLEEYWEYAHNIFEWHDGSTPNMILDDGGDATLLVHLGIKAEKDLSVLDNPTNDEEQALYAAIRKRVEAKSGWYSELGAAIKGVTEETTTGVHRLQHMAEDGT

SEQ ID NO: 168903 - protein, 270 aa, Unknown
  Bacterial polypetide isolated from the Sargasso Sea
VFAIKGQSLEEHWDYLDQSFMFPDGPNMILDDGGDATLYVLLGARAEEGEDIIPVPQSEEEEVIKAQIKKRMEQSPGWFTKTRDAIKGVSEETTTGVHRLYELVKNGQLPFPAINVNDSVTKSKFDNKYGCKESLVDGIRRATDTMMAGKTAVVCGYGDVGKGSAASLRGAGARVKVTEVDPICALQAAMDGFEVVTLEDTLESADIFITTTGNKDVIRIEHMREMKDMAIVGNIGHFDNEIQVAHLKNHKWTNIKEQVDMIEMPSGNRL

SEQ ID NO: 168904 - protein, 123 aa, Unknown
  Bacterial polypetide isolated from the Sargasso Sea
MTDTNDYKVADIELAEFGRKEISLAETEMPGLMALRSEYGNEKPLKGARIVGCLHMTIQTAVLIETLVELGADVRWSSCNIFSTQDHAAAAIAKAGIPVFAWKGETEEEYWWCVRQTIEGKDG

SEQ ID NO: 168905 - protein, 302 aa, Unknown
  Bacterial polypetide isolated from the Sargasso Sea
IAETEMPGLMALREEYGDSKPLDGARIVGCLHMTIQTAVLIETLVFLGATVRWSSCNIFSTQDHAAAAIAAKGIPVFAWKGMTEEEFWWCIEKTLEGPDGWKPNMILDDGGDATKIIHEKYPKMLEEILGLSEETTTGVHRLKEMEKNGTLKVPAINVNDSVTKSKFDNLYGCKESLVDGIRRGTDVMMAGKIAVVAGYGDVGKGSAASLRGAGARVCVTEIDPINALQAAMEGYEVVTMDDACKYGDIFVTATGNLDVITQDHMRQMRDRAIVCNIGHFDNEIQTEALQNYKSDEIKPQVR

SEQ ID NO: 168906 - protein, 160 aa, Unknown
  Bacterial polypetide isolated from the Sargasso Sea
ARVLVTEIDPICALQAAMEGYEVVSMEKAAKIGDIFVTATGNCDVINLDHMRDMKDRAIVCNIGHFDSEIEISSLQNYKWEEIKPQVDQITFPDGKKLIVLAKGRLVNLGCATGHPSFVMSASFTNQVLAQIELWQNYASYENKVYTLPKELDEKVAHLH

SEQ ID NO: 168907 - protein, 120 aa, Unknown
  Bacterial polypetide isolated from the Sargasso Sea
MNEDFKVKDISQADFGRKEISIAESEMPGLMALRKEYKGKKPLKGAKILGCLHMTIQTAVLIETLVELGADVRWSSCNIFSTQDHAAAAIAKAGIPVYAWKGETEEEYWWCIKKTIEGKK

SEQ ID NO: 168908 - protein, 156 aa, Unknown
  Bacterial polypetide isolated from the Sargasso Sea
MSDYKVKDISQAEFGRKEISLAETEMPGLMALRKEYKGKSPLKGARILGCLHMTIQTAVLIETLVDLGAEVRWSSCNIFSTQDHAAAAIAKAGIPVFAWKGETEEEYWWCVKQTIEGKKDWKPNMILDDGGDLTALMHKDYKDLLKDIKGLSEETT

SEQ ID NO: 168909 - protein, 279 aa, Unknown
  Bacterial polypetide isolated from the Sargasso Sea
SCYKPHLMSDYKVKDINQAEFGRKEISLAETEMPGLMALRKEYQGKNPLKGARILGCLHMTIQTAVLIETLVDLGAEVRWSSCNIFSTQDHAAAAIAKAGIPVFAWKGETEEEYWWCVKQTIEGKKDWKPNMILDDGGDLTALMHKDYKDLMKDIKGLSEETTTGVLALKKMEEQGTLLVPAINVNDSVTKSKFDNLYGCRESLVDGIKRATDVMMSGKVAIVAGFGDVGKGSAASLRQSGARVMVTETDPICALQAAMEGYEVVLMDEMIGQADIVVT

SEQ ID NO: 168910 - protein, 142 aa, Unknown
  Bacterial polypetide isolated from the Sargasso Sea
MPFKVKDINLAGDGRKALDIAEKEMPGLMSTRNKYGPEKPLAGKKLTGSLHMTVETAVLIETLVELGADVRWASCNIFSTQDHAAAVIAESGVPVYAWKGESLEEYWWCTLPALTFPDGSGPDLIVDDGGDATLLIHKGYEL

SEQ ID NO: 168911 - protein, 248 aa, Unknown
  Bacterial polypetide isolated from the Sargasso Sea
PDRWTPNMILDDGGDLTVYLHDKFPELMDDVKGLSEETTTGVKRLYDMQKDGSLACPAFNVNDSVTKSKFDNLYGCRESLVDGIKRATDVMIAGKIAIVCGFGDVGKGSAQSLRGLGATVWVTEIDPINALQAAMEGYRVVDFDEVCDQADIVVTATGNFHVVSGAQMERMKDQAILCNIGHFDNEIDVAHLQQYEWENIKPQVDHIIFPDGKRIILLAEGRLVNLGCATGHPSFVMSNSFTNQVLAQ

SEQ ID NO: 168912 - protein, 207 aa, Unknown
  Bacterial polypetide isolated from the Sargasso Sea
VGKGSAASLRQSGARVLVTEADPICALQAAMEGYEVVLMEEAISKADIVVTATGNKDIVTADHMREMKDRAILCNIGHFDNEIQVEALKNYKWTEVKPQVHEIELPSKKRIILLAEGRLVNLGCATGHPSFVMSASFTNQVIAQIELWNNHKNYDNKVYVLPKHLDEKVATLHLKKVGAKLTKLSKEQADYISVGVEGPFKPNAYRY

SEQ ID NO: 168913 - protein, 216 aa, Unknown
  Bacterial polypetide isolated from the Sargasso Sea
MSEKGDLPFPAINVNDSVTKSKFDNLYGCRESLVDGIKRATDVMLAGKVAVVCGFGDVGKGSAASLRQGGARVMVTEIDPICALQAAMEGYEVVTMDQAASRADIFVTATGNKDVITVDHMREMKDRAVVCNIGHFDSEIQISGLNNMIWDEIKPQVDEVKFPDGKKIIMLAKGRLVNLGCATGHPSFVMSASFTNQVLAQMEIFNNNDAYDNKVY

SEQ ID NO: 168914 - protein, 256 aa, Unknown
  Bacterial polypetide isolated from the Sargasso Sea
EEEYWWCVKQTVEGKKEWKPNMILDDGGDLTALMHKDYKDLMKDIKGLSEETTTGVLALKKMEKEGTLLVPAINVNDSVTKSKFDNLYGCRESLVDGIKRATDVMMSGKVAIVAGFGDVGKGSAASLRQSGARVMITETDPICALQAAMEGYEVVTMDDMISEADIVVTATGNKDIVTADHMREMKDRAILCNIGHFDNEIQVDALKNYKWDEIKPQVHEITLPSKKRIILLAEGRLVNSRLCNRSPKFCNECFFH

SEQ ID NO: 168915 - protein, 230 aa, Unknown
  Bacterial polypetide isolated from the Sargasso Sea
DGIKRATDVMMAGKVAVVAGYGDVGKGSSESLRSAGCRVLVTEVDPICALQAAMDGYEVTTMEDAVKRSDIFVTATGNVDVITIDHMRDMKDRSIVCNIGHFDSEIQINALRNHKWNNIKPQVDEIEFPDGKKIIVLAEGRLVNLGCATGHPSFVMSASFSNQVLAQIELWQNNNKYENKVYVLPKKLDEKVAKLHLDKIGAMLTQLSEKQGKYINVPINGPFKNDEYRY

SEQ ID NO: 168916 - protein, 297 aa, Unknown
  Bacterial polypetide isolated from the Sargasso Sea
VADIDLADWGRREIEIAEGEMPALMALREKYRTEKPLAGAKILGCIHMTIQTGVLIETLVDLGAEVRWSSCNIFSTQDHAAAAIAAAGIAVFAWKGETEEEYDWCIEQTIQKDGRPWSANMVLDDGGDLTAMLHEKFPSMLNQIHGITEETTTGVHRLQEMLNDGTLKVPAINVNDSVTKSKNDNKYGCRHSLNDAIKRALDHLLAGKRALVIGYGDVGKGSAQSLRQEGMIVRIAEIDPICAMQACMDGFEVVSPFINGINDGTEASVDESLLGATDLLVTTTGNVNVCNGHFSKL

SEQ ID NO: 168917 - protein, 103 aa, Unknown
  Bacterial polypetide isolated from the Sargasso Sea
MNKDFKVADISLADFGRREISLAENEMPALMALREKYKDDQPLAGAKIMGCIHMTIQTAVLMETLVDLGAELRWSSCNIFSTQDHAAAAMAANDIPVFAWKGE

SEQ ID NO: 168918 - protein, 212 aa, Unknown
  Bacterial polypetide isolated from the Sargasso Sea
AGYGDVGKGSAESLRNAGCRVVVTEIDPICALQAAMDGFEVNTMDNVADKADIFVTATGNVDVITIDHMRKMKDRSIVCNIGHFDSEIQIEALKNYKWDNIKPQVDEIEFPDGKKIIVLAEGRLVNLGCATGHPSFVMSASFSNQVLAQIELWKNYSKYKNKVYVLPKKLDEKVARIHLDKIGAKLTKLSKNQGDYINVPVGGPYKSEEYRY

SEQ ID NO: 168919 - protein, 138 aa, Unknown
  Bacterial polypetide isolated from the Sargasso Sea
RAILCNIGHFDNEIQVEALRNYKWTEVKPQVHEIELPSGKRIILLAEGRLVNLGCATGHPSFVMSASFTNQVIAQIELWHNHKNYKNKVYVLPKHLDEKVATLHLKKVGAKLTKLSKDQADYISVGTEGPFKPDAYRY

SEQ ID NO: 168920 - protein, 83 aa, Unknown
  Bacterial polypetide isolated from the Sargasso Sea
ATGHPSFVMSASFTNQVIAQIELWNNSEKYKKQVYVLPKHLDEKVAMLHLDKVGAKLTKMSKDQADYISVKQSGPFKPDTYRY

SEQ ID NO: 168921 - protein, 93 aa, Unknown
  Bacterial polypetide isolated from the Sargasso Sea
MEDYKVKDISQADFGRKEISIAESEMPGLMALREEYSKNKPLKGAKIIGCLHMTIQTAVLIETLVDLGAEVRWSSCNIFSTQDHAAAAIAKAG

SEQ ID NO: 168922 - protein, 128 aa, Unknown
  Bacterial polypetide isolated from the Sargasso Sea
MSQDYKVKDMKLAEWGLKEIAIAETEMPGLMALREEYGDSKPLDGAKIVGCLHMTIQTAVLIETLVHLGASVRWSSCNIFSTQDQAAAAIASKNIPVFAWKGMSDEEFWWCIEQTLSGPDGWKPNMIL

SEQ ID NO: 168923 - protein, 143 aa, Unknown
  Bacterial polypetide isolated from the Sargasso Sea
MTDYKVKDINEAEFGRKEISLAETEMPGLMALRKEYKGKYPLKGAKILGCLHMTIQTAVLIETLVDLGAEVRWSSCNIFSTQDHAAAAIAKAGIPVFAWKGETEEEYWWCVRQTIEGKKDWKPNMILDDGGDLTALMHKDYKD

SEQ ID NO: 168924 - protein, 274 aa, Unknown
  Bacterial polypetide isolated from the Sargasso Sea
MSEDFKVKDISLADFGDKEIAIAETEMPGLMALREEYGDSKPLDGARIVGCLHMTIQTAVLIETLVYLGATVRWSSCNIFSTQDHAAAAIAAKGIPVFAWKGMTEEEFWWCIEKTLEGPDGWKPNMILDDGGDATKIIHEKYPKMLEEILGLSEETTTGVHRLKEMEKNGTLKVPAINVNDSVTKSKFDNLYGCKESLVDGIRRGTDVMMAGKIAVVAGYGDVGKGSAASLRGAGARVCVTEIDPINALQAAMEGYEVVTMDDACKYGDIFVTA

SEQ ID NO: 168925 - protein, 113 aa, Unknown
  Bacterial polypetide isolated from the Sargasso Sea
MSKQDYKVKDISLAEYGRQEILLAQDEMPALMQLRDNYRDKQPLKGAKIMGCIHMTVQTAVLIETLIELGAEVRWSSCNIFSTQDHAAAAIADQGIPVFAWKGETEEEYEWCL

SEQ ID NO: 168926 - protein, 182 aa, Unknown
  Bacterial polypetide isolated from the Sargasso Sea
GIRRGTDVMMAGKVAVVAGYGDVGKGSAASLRGAGARVCVTEIDPINALQAAMEGYEVVTMDDAASYGDIYVTATGNLDVITLEHMRKMRDRTIVCNIGHFDNEIQTEALQNYKSDEIKPQVREVEFPDGKKILLLSEGRLVNLGNATGHPSFVMSASFSNQVIAQIELWENYKNYENKVYV

SEQ ID NO: 168927 - protein, 205 aa, Unknown
  Bacterial polypetide isolated from the Sargasso Sea
MTDYKVKDISQAEFGRKEISIAESEMPGLMALREEYKGKTPLKGAKIIGCLHMTIQTAVLIETLVNLGAEVRWSSCNIFSTQDHAAAAIAKAGIPVYAWKGETEEEYLWCIKQTIDGNKDWKPNMLLDDGGDLTAIMHKDYKNLLKDVKGVSEETTTGIKALNKMEKEKSLLVPAINVNDSVTKSKFDNLYGCRESLVDGIRRAT

SEQ ID NO: 168928 - protein, 75 aa, Unknown
  Bacterial polypetide isolated from the Sargasso Sea
MSASFTNQVMAQLELWQNYKNYENKVYVLPKHLDEKVALLHLKKVGAKLTTLSEKQAEYIGVKKQGPFKDDSYRY

SEQ ID NO: 168929 - protein, 170 aa, Unknown
  Bacterial polypetide isolated from the Sargasso Sea
MSEDFKVKDINLADFGRKEISIAETEMPGLMALREEFNKKKPLKGAKILGCLHMTIQTAVLIETLIDLGAEVRWSSCNIFSTQDHAAAAIAKAKIPVFAWKGETEEEYWWCIKQTIEGKKDWKPNMLLDDGGDLTDLMHKKYKDLLKSVRGLSEETTTGIKALNKLEKEK

SEQ ID NO: 168930 - protein, 157 aa, Unknown
  Bacterial polypetide isolated from the Sargasso Sea
GYKDIVNQSSFMMMKDKTIVCNIGHFDNEIDMDWLESNFGSQKTTIKPQVDSYRINKDKEIIILAEGRLVNLGCATGHPSFVMSNSFTNQVLAQIELWNNSKNYENKVYMLPKNLDEMVAKLHLDKLGVELEDLSEDQAKYIGVKVNGPYKPEYYRY

SEQ ID NO: 168931 - protein, 136 aa, Unknown
  Bacterial polypetide isolated from the Sargasso Sea
HTLHIGHFDNEIQVEALKNYKWDEIKPQVHEITLPSKKRIILLAEGRLVNLGCATGHPSFVMSASFTNQVTAQIELWNNSDKYEKKVYVLPKHLDEKVARLHLEKVGAKLTKMSKDQADYISVTPDGPYKPDAYRY

SEQ ID NO: 168932 - protein, 272 aa, Unknown
  Bacterial polypetide isolated from the Sargasso Sea
TDYKVKDINEAEFGRKEISLAETEMPGLMALRKEYKGKHPLKGARILGCLHMTIQTAVLIETLVDLGAEVRWSSCNIFSTQDHAAAAIAKAGIPVFAWKGETEEEYWWCVRQTIEGKKDWKPNMILDDGGDLTALMHKDYKDLLRDIKGLSEETTTGVLALKKMEEQGTLLVPAINVNDSVTKSKFDNLYGCRESLVDGIKRATDVMMSGKVAIVAGFGDVGKGSAASLRQSGARVMVTETDPICALQAAMEGYEVVLMDEMIGQADIVVTA

SEQ ID NO: 168933 - protein, 219 aa, Unknown
  Bacterial polypetide isolated from the Sargasso Sea
PICAMQACMDGFSVVSCYKDGVFTRDANDINMAVMGDTDLVVTTTGNVNVCDSAMISTLKNTAVVCNIGHFDNEIDTAFMRENYYWDEIKPQVHRVFRDTAPDGTPDLSSKNYIILLAEGRLVNLGNATGHPSRIMDGSFANQVLAQIHLYKQGFANVNDADKRAEMITVEVLPKKLDEEVASLMVEGFGGTVTKLTQDQADYINVPQDGPFKEESYKY

SEQ ID NO: 168934 - protein, 309 aa, Unknown
  Bacterial polypetide isolated from the Sargasso Sea
KDFVIKDISLADFGDKEIELAKNEMPGLVALADEYKNQKPLSGARIVGCLHMTIQTAVLIETLVELGAKVRWASCNIFSTQDHAAAAIAKKKIPVFAYKNESLEEYWEFVDRIFQWEDGDPNMILDDGGDATIYIILGAKYEKNKSVIDKPQNEEEEVLFKQIKKRSDLSPNWFSKIKDQIIGVTEETTTGVNRLKMMENDNTLPFAAINVNNSVTKSKFDNLYGCRESLIDGIRRATDVMIAGKLAVVAGYGDVGKGCASSLKAAGARVVVTEIDPICALQAALEGFEVRTIDEVSKIADIFVTATGN

SEQ ID NO: 168935 - protein, 145 aa, Unknown
  Bacterial polypetide isolated from the Sargasso Sea
NLVKMKDEAIVCNIGHFDNEIDVASLKDYPWENIKPQVDHITLPSGNKIILLAEGRLVNLGCATGHPSFVMSNSFTNQVLAQIELFNKSEQYAREVYVLPKHLDEMVARLHLDKIGAKLTKLTKEQADYINVSIEGPYKPELYRY

SEQ ID NO: 168936 - protein, 318 aa, Unknown
  Bacterial polypetide isolated from the Sargasso Sea
NKQGRDRVEWAYKDMPVLQEINGSMSKRKPLKGMNISACLHITTETANLLITLKNAGAKVSCCASNPLSTQDDVAAHLSKDYGIETFAIKGINNKGYYKHIIDSLKIGPNLTMDDGCDLVTVVHKSHKKYLPNIIGGTEETTTGVIRLKSMSDNNVLKYPIIAVNNAFTKHLFDNRYGTGQSVMDSIMRATNRLVSGKNFVVCGYGWCGKGLAMRAHGLGANVIVTEIDPTKALEAKMDGFRVMSGNEAFMIADFICSVTGNLNVIDKHHFKNMKDGVIVSNAGHFNVEINIDSLKKMSTKRKKIRNDIEEYSIGKKE

SEQ ID NO: 168937 - protein, 297 aa, Unknown
  Bacterial polypetide isolated from the Sargasso Sea
MHKDYKDLLKGVKGLSEETTTGVLALKKMEEQGQLLVPAINVNDSVTKSKFDNLYGCRESLVDGIKRATDVMMSGKVAIVAGFGDVGKGSAASLRQSGARVLVTETDPICALQAAMEGYEVVLMDEMIGQADIVVTATGNKDVVTADHMRAMKDRSILCNIGHFDNEIQVEALKNYKWDEVKPQVHEITFPDDKRLILLAEGRLVNLGCGTGHPSFVMSASFTNQVIAQIELWNNSDNYENKVYVLPKHLDEKVARLHLDKVGAKLTPLSKDQADYISVTLRGTIQATCLPLLEVAK

SEQ ID NO: 168938 - protein, 174 aa, Unknown
  Bacterial polypetide isolated from the Sargasso Sea
YEVVLMDEAIKDADIVVTATGNKDIVTADHMREMKDRAILCNIGHFDNEIQVEALKNYKWDEVKPQVHEIELPSKKRIILLAEGRLVNLGCATGHPSFVMSASFTNQVIAQIELWNNSDKYERKVYVLPKHLDEKVAMLHLDKVGAKLTKMSKDQADYISVKPSGPFKPDTYRY

SEQ ID NO: 168939 - protein, 259 aa, Unknown
  Bacterial polypetide isolated from the Sargasso Sea
MSEDFKVKDIKLADFGRKEISIAESEMPGLMALRKEYDKKKPLKGAKILGCLHMTIQTAVLIETLVDLGAEVRWSSCNIFSTQDHAAAAIAKAGIPVFAWKGETEEDYWWCVKQTIEGKKNWKPNMILDDGGDLTGLMHKEYKDLLKNVKGVSEETTTGVLALKKMESNKQLLIPAFNVNDSVTKSKFDNLYGCRESLVDGIKRATDVMMSGKVAIVAGFGDVGKGSAASLRQAGARVLVTETDPICALQAAMEGYEVV

SEQ ID NO: 168940 - protein, 289 aa, Unknown
  Bacterial polypetide isolated from the Sargasso Sea
LKGAKIVGCLHMTIQTAVLIETLVELGAEVRWSSCNIFSTQDHAAAAIAKAGIPVFAWKGETEEEYWWCVKQTIEGNKNWKPNMILDDGGDLTALMHKDYKDLLKDIKGLSEETTTGVLALKKMESEGKLLVPAINVNDSVTKSKFDNLYGCRESLVDGIKRATDVMMSGKVAIVAGFGDVGKGSAASLRQSGARVMITETDPICALQAAMEGYEVVTMDDMIGQADIVVTATGNKDIVTADHMREMKDRAILCNIGHFDNEIQVEALRNYKWDEIKPQVHEITLPSEK

SEQ ID NO: 168941 - protein, 220 aa, Unknown
  Bacterial polypetide isolated from the Sargasso Sea
MSGKIAIVAGFGDVGKGSAASLRQSGARVLVTEADPICALQAAMEGYEVVLMEEAISRADIVVTATGNKDIVTADHMRDMKDRAILCNIGHFDNEIQVEALKNYKWTEVKPQVHEIELPSGKRIILLAEGRLVNLGCATGHPSFVMSASFTNQVIAQIELWHNHKNYENKVYVLPKHLDEKVATLHLKKVGAKLTKLSKEQADYISVGTEGPFKPDAYRY

SEQ ID NO: 168942 - protein, 245 aa, Unknown
  Bacterial polypetide isolated from the Sargasso Sea
MTQDYKVKDISQAKFGRKEISLAETEMPGLMALRKEYKGKKPLKGAKILGCLHMTIQTAVLIETLVELGAEVRWSSCNIFSTQDHAAAAIAKAGIPVFAWKGETEEEYWWCVKQTIEGKKDWKPNLILDDGGDLTALMHKEYKNLLKDIKGVSEETTTGVLALKKMESNNELLIPAINVNDSVTKSKFDNLYGCRESLVDGIKRATDIMMSGKVAIVAGFGDVGKGSAASLRQNRCKSNGNRDRP

SEQ ID NO: 168943 - protein, 126 aa, Unknown
  Bacterial polypetide isolated from the Sargasso Sea
KIQVEALKNYKWDEIKPQVHEIELPSKKRIILLAEGRLVNLGCATGHPSFVMSASFTNQVIAQIELWNNSDKYENKVYVLPKHLDEKVAMLHLEKVGAKLTKMSKDQADYISVKQSGPFKPDTYRY

SEQ ID NO: 168944 - protein, 246 aa, Unknown
  Bacterial polypetide isolated from the Sargasso Sea
MSNDFKVADIELADFGRREISLAENEMPALMALREKYKTEQPLAGAKIMGCIHMTIQTAVLMETLVDLGAELRWSGCNIFSTQDHAAAAMAKAGIPVFAWKGQTDEEFDWCIEQTILKDGKPWDANMILDDGGDLTHMVHTRFAEMLETIHGISEETTTGVHRLKAMLEKGELKVPAINVNDSVTKAKNDNKYGCRHSLNDGIKRGTDMLLSGKKALVIGYGDVGKGSAASLAQEGMVVRVTESDP

SEQ ID NO: 168945 - protein, 158 aa, Unknown
  Bacterial polypetide isolated from the Sargasso Sea
MTADYKVKDISLSEWGRKEIAIAETEMPGLMAIREEYGNSKPLEGARIVGCLHMTIQTAVLIETLVHLGASVRWSSCNIFSTQDQAAAAIAAEGIPVFAWKGMNDDEFWWCIEQTLSGPKGWQPNMILDDGGDATGIIHEKFPEMINDIKGLSEETTT

SEQ ID NO: 168946 - protein, 264 aa, Unknown
  Bacterial polypetide isolated from the Sargasso Sea
MTDYKVKDINEAEFGRKEISLAETEMPGLMALRKEYKGKHPLKGARILGCLHMTIQTAVLIETLVDLGAEVRWSSCNIFSTQDHAAAAIAKAGIPVFAWKGETEEEYWWCVRQTIEGKKDWKPNMILDDGGDLTALMHKDYKDLMKDVKGLSEETTTGVLALKKMEEQGTLLVPAINVNDSVTKSKFDNLYGCRESLVDGIKRATDVMMSGKVAIVAGFGDVGKGSAASLRQSGARVMVTETDPICALQAAMEGYEVVLMDEMI

SEQ ID NO: 168947 - protein, 329 aa, Unknown
  Bacterial polypetide isolated from the Sargasso Sea
LDDGSDLTAMVHEKFPDMLETIHGVSEETTTGVHRLKEMLEKGELKIPAINVNDSVTKAKNDNKYGCRHSLNDALKRGTDMLLSGKKGLVIGYGDVGKGSAASLAQEGMIVRVVESDPICAMQACMDGFSVVSCYKDGVVTRDPKDINMEIMGDTDLIVTTTGNVNVCDSAMLSTLKNTAVVCNIGHFDNEIDTAFMRENYYWDEIKPQVHRVFRDTPPDGTPDLSSKNYIILLAEGRLVNLGNATGHPSRIMDGSFANQVLAQIHLYKQGFANVNDADKKAEMLTVEVLPKKLDEEVASLMVQGFGGTVTQLTKEQADYINVPQDGSF

SEQ ID NO: 168948 - protein, 257 aa, Unknown
  Bacterial polypetide isolated from the Sargasso Sea
MTDYKVKDINEAEFGRKEISLAETEMPGLMAVRAEYKGKNPLKGARILGCLHMTIQTAVLIETLVDLGAECRWSSCNIFSTQDHAAAAIAKAGIPVFAWKGETEEEYWWCVKQTIEGKKDWIPNMILDDGGDLTALMHKDYKDLLKGIKGLSEETTTGVLALKKMEEQGQLLVPAINVNDSVTKSKFDNLYGCRESLVDGIKRATDVMMSGKVAIVAGFGDVGKGSAASLRQSGARVLVTETDPICALQAAMEGYEV

SEQ ID NO: 168949 - protein, 212 aa, Unknown
  Bacterial polypetide isolated from the Sargasso Sea
MSKQDYKVKDISLAEYGRQEILLAQDEMPALMQLRDNYRDKQPLKGAKIMGCIHMTVQTAVLIETLIELGAEVRWSSCNIFSTQDHAAAAIADQGIPVFAWKGETEEEYEWCLDQTINKDGKPWGANMILDDGGDLSLKVHKEYPEMLSKIHGISEETTTGVKRLKEMLESGELKVPAINVNDSITKSKNDNKYGCRHGLDDAIKPRNRQCS

SEQ ID NO: 168950 - protein, 107 aa, Unknown
  Bacterial polypetide isolated from the Sargasso Sea
MSEDFKVKDISLADFGNKEIAIAETEMPGLMALRDEYKDTKPLMGARIVGCLHMTIQTAVLIETLVYLGATVRWSSCNIFSTQDHAASAIAAKGIPVFAWKGMTEEE

SEQ ID NO: 168951 - protein, 220 aa, Unknown
  Bacterial polypetide isolated from the Sargasso Sea
MAGKVAVVAGFGDVGKGSAESLRSAGCRVLVTEADPICALQAAMEGFEVVTMNDAAPRADIFVTATGNIDVITLDHMREMKDRAIVCNIGHFDSEIQVEALRNYKWDNVKPQVDEIEFPGGKRLILLAEGRLVNLGCATGHPSFVMSASFANQVLAQIELWQNASDYDRKVYVLPKHLDEKVAALHLAKLGAKLTELSAEQAAYIGIGQDGPFKTEQYRY

SEQ ID NO: 168952 - protein, 272 aa, Unknown
  Bacterial polypetide isolated from the Sargasso Sea
KEYPQLMKNIKGVSEETTTGIKALNKMEQEGKLLVPAINVNDSVTKSKFDNLYGCRESLTDGIKRATDVMLSGKVAIVAGFGDVGKGSAASLRQNGARVLVTEADPICALQAAMEGYEVVLMEDAIKDADLVVTATGNKDVVTADHMRMMKDRAILCNIGHFDNEIQVEALKNYKWNEIKPQVHEIELPSKKRIILLAEGRLVNLGCATGHPSFVMSASFTNQVIAQIELFHNSKKYENKVYVLPKHLDEKVATLHLEKVGAKLTKLSKEQA

SEQ ID NO: 168953 - protein, 151 aa, Unknown
  Bacterial polypetide isolated from the Sargasso Sea
GKGSAQSMKSYGCKVIVTEIDPICALQAAMEGFEVRRLEDVLNRGNIFVTTTGNKDIITLKHMKKMKDQAIVCNIGHFDNEIQVDALNKSSAKKDQIKPQLDRYTFKNGKQIFLLAEGRLVNLGCATGHASFVMSTSFSNQVLATGIFSKK

SEQ ID NO: 168954 - protein, 263 aa, Unknown
  Bacterial polypetide isolated from the Sargasso Sea
MGAEPSEMRKYMEMALDLKPHLVIDDGGDLVEILHETRTDLLEGMLGACEETTTGVLRAQARAKADQLQFPVMLVNEARCKYLFDNVHGTGQSVWDAVMRSTNLVLAGKTVVVAGYGWCGRGCALRAQGMGASVIVCEVDPVKACDALMNGCRVMPLMEACKEADVVLSVTGVRHTIRKEHFKVIKDNALLANAGHFWEEIDVEGLSGMSKDRKQMRTNVEGFLLQDGRWLNLLGNGNIVNIACADGHPAEIMDTSFALQALS

SEQ ID NO: 168955 - protein, 120 aa, Unknown
  Bacterial polypetide isolated from the Sargasso Sea
LKNYKWDEIKPQVHEITLPSKKRIILLAEGRLVNLGCATGHPSFVMSASFTNQVTAQIELWNNSDKYEKKVYVLPKHLDEKVARLHLEKVGAKLTKMSKDQADYISVTPDGPYKPDAYRY

SEQ ID NO: 168956 - protein, 220 aa, Unknown
  Bacterial polypetide isolated from the Sargasso Sea
MSGKVAIVAGFGDVGKGSAASLRQSGARVMVTETDPICALQAAMEGYEVVLMDEMIGQADIVVTATGNKDIVTADHMRAMKDRSILCNIGHFDNEIQVDALKNYKWDEIKPQVHEITFPDNKRLILLAEGRLVNLGCATGHPSFVMSASFTNQVTAQIELWNNSDNYENKVYVLPKHLDEKVARLHLEKVGAKLTPLSKDQADYISVKTEGPYKPDAYRY

SEQ ID NO: 168957 - protein, 127 aa, Unknown
  Bacterial polypetide isolated from the Sargasso Sea
MKTQDYKIADITLADWGRKEIAIAETEMPGLMALRKEFAGKAPLQGARITGCLHMTIQTAVLIETLTALGAEVRWSSCNIYSTQDHAAAAIASTGVPVFAWKGETEAEYEECIINTITGPDGWRPNL

SEQ ID NO: 168958 - protein, 315 aa, Unknown
  Bacterial polypetide isolated from the Sargasso Sea
KISPKQNFGRKEISLAETEMPGLMALRKEYKGKHPLKGARILGCLHMTIQTAVLIETLVDLGAEVRWSSCNIFSTQDHAAAAIAKAGIPVFAWKGETEEEYWWCVRQTIEGKKDWKPNMILDDGGDLTALMHKDYKDLMKDIKGLSEETTTGVLALKKMEEQGTLLVPAINVNDSVTKSKFDNLYGCRESLVDGIKRATDVMMSGKVAIVAGFGDVGKGSAASLRQSGARVMVTETDPICALQAAMEGYEVVLMDEMISQADIVVTATGNKDIVTADHMRAMKDRSILCNIGHFDNEIQVDALKNYKWDEIKPTS

SEQ ID NO: 168959 - protein, 194 aa, Unknown
  Bacterial polypetide isolated from the Sargasso Sea
MSKVVEKIGPDYKVADISLSAWGNKEIKIAETEMPGLMALREKYAKEQPLKGARIVGCLHMTIQTAVLIETLVALGASVRWSSCNIYSTQDHAAAAIAEKGIPVFAWKGETEEEYLWCIDQTIIGDPSWKPNMILDDGGDLTSIIHKKYPEMLSHISGLSEETTTGVHRLYEMVEKNELKVPAFNVNDSVTKIK

SEQ ID NO: 168960 - protein, 273 aa, Unknown
  Bacterial polypetide isolated from the Sargasso Sea
RWSSCNIFSTQDHAAAAIAKAGIPVFAWKGETEEEYWWCVKQTIEGKKDWIPNMILDDGGDLTALMHKDYKELLKNVKGLSEETTTGVLALKKMEEQGTLLVPAINVNDSVTKSKFDNLYGCRESLVDGIKRATDVMMSGKVAIVAGFGDVGKGSAASLRQSGARVLVTETDPICALQAAMEGYEVVLMDEMIGQADIVVTATGNKDVVTADHMRAMKDRSILCNIGHFDNEIQVDALKNYKWDEVKPQVHEITFPDEKRLILLAEGRLVNLG

SEQ ID NO: 168961 - protein, 216 aa, Unknown
  Bacterial polypetide isolated from the Sargasso Sea
VAIVAGFGDVGKGSAASLRQSGARVMITETDPICALQAAMEGYEVVLMDEMIKEADIVVTATGNKDIITADHMRDMKDRAILCNIGHFDNEIQVEALKNYKWDEIKPQVHEIELPSKKRIILLAEGRLVNLGCATGHPSFVMSASFTNQVTAQIELWNNSSKYEKKVYVLPKHLDEKVAMLHLEKVGAKLTKLSKEQADYISVKQEGPYKPDAYRY

SEQ ID NO: 168962 - protein, 229 aa, Unknown
  Bacterial polypetide isolated from the Sargasso Sea
GSAASLRQEGMIVKVTEIDPICAMQACMDGFEVVSPYINGENNGTLECVDADLLGKTDLIVTTTGNVNVCDKNMLQKLKSGAVVCNIGHFDNEIDTAYMRENWKWDEVKPQVHKVYRDEAADDHLILLSEGRLVNLGNATGHPSRIMDGSFANQVLAQIYLYERKFADMMEAEKKESIYVKVLPKKLDEEVAKDMVEGFGGVITKLTGDQASYINVDVDGPYKPEAYKY

SEQ ID NO: 168963 - protein, 235 aa, Unknown
  Bacterial polypetide isolated from the Sargasso Sea
IQTAVLIETLVDLGAEVRWSSCNIFSTQDHAAAAIAKAGIPVYAWKGETEEEYLWCIKQTIVGKSDWKPNMLLDDGGDLTAIMHNEYNELMKDVKGVSEETTTGIKALNKMEKDKSLLVPAINVNDSVTKSKFDNLYGCRESLVDGIRRATDVMMSGKIAIVAGFGDVGKGSAASLRQSGARVLVTEADPICALQAAMEGYEVVLMEEAISRADIVVTATGNKDIVTADHMRDMK

SEQ ID NO: 168964 - protein, 244 aa, Unknown
  Bacterial polypetide isolated from the Sargasso Sea
SKFDNLYGCRESLVDGIKRATDVMMSGKVAIVAGFGDVGKGSAASLRQAGARVMVTETDPICALQAAMEGYEVVLMDDAIKVADIVVTATGNKDIVTADHMRDMKDRAILCNIGHFDNEIQVEALKNYKWNEVKPQVHEIELPSKKRIILLAEGRLVNLGCATGHPSFVMSASFTNQVIAQIELWKNSEKYKNKVYVLPKHLDEKVAMLHLDKVGAKLTKMSKDQADYISVKQSGPFKPDTYRY

SEQ ID NO: 168965 - protein, 98 aa, Unknown
  Bacterial polypetide isolated from the Sargasso Sea
MEDYKVKDIAQAEFGRKEISIAESEMPGLMALREEYSKEKPLKGARIIGCLHMTIQTAVLIETLVALGAEVRWSSCNIFSTQDHAAAAIAKAGIPVYA

SEQ ID NO: 168966 - protein, 131 aa, Unknown
  Bacterial polypetide isolated from the Sargasso Sea
DNEIDMSGLEKMSDVQRRNIKPQVDEYIFPNGNSILVLAEGRLVNLGCATGHPSFVMSMSFTNQVLAQIELHANADSLANEVHLLPKHLDEEVARLHLDKLGVKLTTLTEEQANYIGVPVEGPFKPDHYRY

SEQ ID NO: 168967 - protein, 190 aa, Unknown
  Bacterial polypetide isolated from the Sargasso Sea
VAEVDPICALQAAMEGFRVVRLEDVVDQMDIFVTATGNFQVIRHEHLVRMKDEAIVCNIGHFDNEIDVASLKQYEWDNIKPQVDHITLPSGNKIILLAEGRLVNLGCATGHPSFVMSNSFTNQTLAQIELFTKRDQYENKVYVLPKHLDEMVARLHLDKIGAKLTELTSEQAAYINVPVEGPYKVDHYRY

SEQ ID NO: 168968 - protein, 119 aa, Unknown
  Bacterial polypetide isolated from the Sargasso Sea
MEDYKVKDITLAEFGRKEISLAETEMPGLMALRKEYKGKFPLKGARILGCLHMTIQTAVLIETLVELGAEVRWSSCNIFSTQDHAAAAIAKAGIPVFAWKGETEEEYWWCVRQTIEGKK

SEQ ID NO: 168969 - protein, 225 aa, Unknown
  Bacterial polypetide isolated from the Sargasso Sea
RVTEIDPICAMQACMDGYEVVSPYIDGINNDSEESMNLALLEDTDLIVTTTGNYKVCDKHMLKAVKNGAVICNIGHFDTEIDTQYMRDEWCWEEVKPQVHKIFRDTKAGDTPNLDSDDYIILLSEGRLVNLGNATGHPSRIMDGSFANQVLAQMYLFEKKFAHINDEDKKQELIKVEVLPKKLDEEVASYMVEGFGGVMTKLSSDQAEYINVPEEGPFKSEIYKY

SEQ ID NO: 168970 - protein, 184 aa, Unknown
  Bacterial polypetide isolated from the Sargasso Sea
MSLDYKVKDIKLADWGRKEIAIAETEMPGLMAIREENKGQSPLKGARIVGCLHMTIQTAVLIETLVELGASVRWSSCNIFSTQDQAAAAIAAKGIPVFAWKGMNDEEFWWCIEQTLQGPNDWKPNMILDDGGDATKIIHEKYPKLLDDIRGLSEETTTGVHRLKDMEKNGLLKVPAINVNDSVT

SEQ ID NO: 168971 - protein, 159 aa, Unknown
  Bacterial polypetide isolated from the Sargasso Sea
MGLLYVILGHFDTEIDTKYMQEKWYWEEVKPQVHRIFRDCSPDQEPDLSSKNYLILLAEGRLVNLGNATGHPSRIMDGSFANQVLAQMHLYSAGFANVNDEDKKKELIQVEVLPKKLDEEVASLMVQGFGGVVTKLTEEQADYINVPQDGPFKEDSYKY

SEQ ID NO: 168972 - protein, 185 aa, Unknown
  Bacterial polypetide isolated from the Sargasso Sea
PICALQAAMEGYEVVLMDEMIGQADIVVTATGNKDIVTADHMRAMKDRSILCNIGHFDNEIQVEALKNYKWDEIKPQVHEITFPDNKRIILLAEGRLVNLGCATGHPSFVMSASFTNQVTAQIELWNNSDKYENKVYVLPKHLDEKVARLHLEKVGAKLTPLSKDQADYISVKPEGPYKPDAYRY

SEQ ID NO: 168973 - protein, 317 aa, Unknown
  Bacterial polypetide isolated from the Sargasso Sea
TAVLIETLIELGAEVRWSSCNIFSTQDHAAAAIAKAGIPVYAWKGETEKEYWWCIKQTIEGKKDWKPNMLLDDGGDLTALMHKDYEDLLKSVRGLSEETTTGIKALKQMEKEKKLLVPAINVNDSVTKSKFDNLYGCRESLVDGIKRATDVMMSGKTAIVAGFGDVGKGSAASLRQSGARVMVTETDPICALQAAMEGYEVVLMEDAIEYADIVVTATGNKDIVTADHMRKMKDRSILCNIGHFDNEIQVDALKNYKWVEIKPQVHEIEFPDKKRIILLAEGRLVNLGCATGHPSFVMSASFTNQVIAQIELWNNYK

SEQ ID NO: 168974 - protein, 186 aa, Unknown
  Bacterial polypetide isolated from the Sargasso Sea
MAETAKENKIDLMDDFKVADISLAEWGEKEIKIAETEMPGLMSIREEFGAEKPLKGARIAGCLHMTIQTAVLIETLIELGADIRWSSCNIFSTQDHAAAALAEKGIPIFAWKDESEEEYWWCVEQTIKGPNGWTPNLILDDGGDLTGLMHDKYPELMKDIIGVSEETTTGVLRLYNMEKDGTLMCP

SEQ ID NO: 168975 - protein, 162 aa, Unknown
  Bacterial polypetide isolated from the Sargasso Sea
MSETLTQSIVDAMPYKVKDINLAGDGRKALDIAEKEMPGLMSTRNKYGPEKPLAGKKLTGSLHMTVETAVLIETLVDLGADVRWASCNIFSTQDHAAAVIAESGVPVYAWKGESLEEYWWCTLQALTFPDGSGPDLIVDDGGDATLLIHKGYELEEYFSKIW

SEQ ID NO: 168976 - protein, 271 aa, Unknown
  Bacterial polypetide isolated from the Sargasso Sea
GVHRLKEMEKNGTLKVPAINVNDSVTKSKFDNLYGCKESLVDGIRRGTDVMMAGKIAVVAGYGDVGKGSAASLRGAGARVCVTEIDPINALQAAMEGYEVVTMDDACKYGDIFVTATGNLDVITQDHMRQMRDRAIVCNIGHFDNEIQTEALQNYKSDEIKPQVREVEFPDGKKILLLSEGRLVNLGNATGHPSFVMSASFTNQVLAQLELWKNSKNYENKVYVLPKHLDEKVASLHLKKVGAKLTELTDKQAEYIGVSKQGPFKDNTYRY

SEQ ID NO: 168977 - protein, 133 aa, Unknown
  Bacterial polypetide isolated from the Sargasso Sea
MSQQYIVKDISLSDFGRKELSIAETEMPGLMALRSEYGESKPLKGARIVGSLHMTIQTAVLIETLVALGADVRWASCNIFSTQDHAAAAIAAANIPVFAIKGQSLEEHWDYLDKSFMFPDGPNMILDDGGDAT

SEQ ID NO: 168978 - protein, 191 aa, Unknown
  Bacterial polypetide isolated from the Sargasso Sea
MFQDYKVKDINQAEFGRKEISLAETEMPGLMALRKEYKGKNPLKGAHILGCLHMTIQTAVLIETLVELGAEVRWSSCNIFSTQDHAAAAIAKAGIPVFAWKGETEEEYWWCVRQTIEGKKDWKPNMILDDGGDLTALMHKDYKDMLKNIKGVSEETTTGVLALKKMEEKKELLIPAINVNDSVTKSKFDNL

SEQ ID NO: 168979 - protein, 157 aa, Unknown
  Bacterial polypetide isolated from the Sargasso Sea
MIKDYKVKDINEADFGRKEISLAETEMPGLMALRKEYKGKKPLKGAKILGCLHMTIQTAVLIETLVELGAEVRWSSCNIFSTQDHAAAAIAKAGIPVFAWKGETEDEYWWCVKQTIEGKKDWKPNMILDDGGDLTALMHKDYKNLLKDVKGVFRGNH

SEQ ID NO: 168980 - protein, 231 aa, Unknown
  Bacterial polypetide isolated from the Sargasso Sea
INVNDSVTKSKFDNLYGCRESLVDGIRRATDVMMSGKIAIVAGFGDVGKGSAASLRQSGARVLVTEADPICALQAAMEGYEVVLMDEAISKADIVVTATGNKDIVTADHMRDMKDRAILCNIGHFDNEIQVEALKNYKWTEVKPQVHEIELPSKKRIILLAEGRLVNLGCATGHPSFVMSASFTNQVIAQIELWNNHKNYKNKVYVLPKHLDEKVATLHLKKVGAKLTKTF

SEQ ID NO: 168981 - protein, 241 aa, Unknown
  Bacterial polypetide isolated from the Sargasso Sea
MTDYKVKDIKEAEFGRKEISLAETEMPGLMALRKEYKDKKPLKGARIVGCLHMTIQTAVLIETLVELGAEVRWSSCNIFSTQDHAAAAIAKVGIPVFAWKGETEEEYWWCVRQTIEGKKDWKPNMILDDGGDLTALMHKDYKELMKDIKGLSEETTTGVLALKKMEQEGTLLVPAINVNDSVTKSKFDNLYGCRESLVDGIKRATDVMMSGKVAIVAGFGDVGKGSAASLRQSGARVMVTE

SEQ ID NO: 168982 - protein, 84 aa, Unknown
  Bacterial polypetide isolated from the Sargasso Sea
MQLGHPSFVMSASFSNQVLAQIELWKNGKNYSNSVYTLPKHLDEKVARLHLEKIGVKLTKLEKDQADYIGVNEAGPFKSDSYRY

SEQ ID NO: 168983 - protein, 262 aa, Unknown
  Bacterial polypetide isolated from the Sargasso Sea
PAINVNDSVTKSKNDNKYGCRHSLNDGIKRGTDMLLSGKHALVIGYGDVGKGSAQSLRQEGMIVKVAEIDPICAMQACMDGFEVDSPYKSGENTGDESAINKALLSKMDMIVTATGNINVCDKRMLQNVKRGAIICNIGHFDNEIDTAFMRESWEWEEVKPQVHKIYRSGLNVKDDYLLLLSEGRLINLGNATGHPSRIMDGSFANQVLAQIHLFAKKFADNSKEFKDSNIEVEVLPKHLDEQVAALMVEGFGGVMTKLTPT

SEQ ID NO: 168984 - protein, 164 aa, Unknown
  Bacterial polypetide isolated from the Sargasso Sea
MSDDFKVKDISLADFGNKEIAIAETEMPGLMAIRDEYGDKKPLEGAKIVGCLHMTIQTAVLIETLVYLGATVRWSSCNIFSTQDHAAAAIAGKGIPVFAWKGQTEEDFWWCIEKTLEGPNGWKPNMILDDGGDATKIIHEKYPKMLEDILGLSEETTTGVHRLK

SEQ ID NO: 168985 - protein, 137 aa, Unknown
  Bacterial polypetide isolated from the Sargasso Sea
LLVANIGHFDSEIQVAELKNFKWDNIKPQVDEIEFPDGKKIILLAEGRLVNLGCATGHPSFVMSASFSNQVLAQIEIWNNYENYENKVYVLPKHLDEKVAYIHLEKLGVKLTELSNSQADYLNLSKEGPFKPDHYRY

SEQ ID NO: 168986 - protein, 133 aa, Unknown
  Bacterial polypetide isolated from the Sargasso Sea
MVIANSVSTITPNYLIADISLSDFGRKEIKIAETEMPGLMALRDKYQSEKPLKGAKIAGSLHMTIQTAVLIETLVDLGAEVKWASCNIFSTQDHAAAAIADQGIPVYAKKGETLDEYWQYTHYISDWGSDSPN

SEQ ID NO: 168987 - protein, 216 aa, Unknown
  Bacterial polypetide isolated from the Sargasso Sea
MSKDYKVKDIAQADFGRKEISIAETEMPGLMALRKEYKNKNPLKGAKILGCLHMTIQTAVLIETLVELGADVRWSSCNIFSTQDHAAAAIAKSGIPVYAWKGETEEEYWWCIKQTIEGKKDWKPNMLLDDGGDLTALMHKEYKNLLKDVKGVSEETTTGVMALKKMEANKTLLVPAINVNDSVTKSKFDNLYGCRESLVDGIKRATDVMMSGKTAI

SEQ ID NO: 168988 - protein, 331 aa, Unknown
  Bacterial polypetide isolated from the Sargasso Sea
DCKAGIPVFAWKGETEKEYWWCVKQTIEGKKDWKPNLILDDGGDLTGLMHKEYKDLLKNIKGVSEETTTGVLALKKMESNKELLIPAFNVNDSVTKSKFDNLYGCRESLVDGIKRATDVMMSGKVAIVAGFGDVGKGSAASLRQAGARVMVTETDPICALQAAMEGYEVVVMDEAIKDADIVVTATGNKDIVTADHMRDMKDRAILCNIGHFDNEIQVEALKNYKWDEIKPQVHEIELPSKKRIILLAEGRLVNLGCATGHPSFVMSASFTNQVIAQIELWNNSDKYEKKVYVLPKHLDEKVAMLHLEKVGAKLTKMSKEQAEYISVKPSG

SEQ ID NO: 168989 - protein, 120 aa, Unknown
  Bacterial polypetide isolated from the Sargasso Sea
LEDVVATADIFVTTTGNKDIIRIEHMREMKDMAIVGNIGHFDNEIQISSLRNYTWTNVKPQVDMISFPDGKRILLLSEGRLLNLGNATGHPSFVMSASFTNQVLAQMEIFQNHDKYENTV

SEQ ID NO: 168990 - protein, 315 aa, Unknown
  Bacterial polypetide isolated from the Sargasso Sea
LFEGKKDWKPNMILDDGGDLTALMHKDYKELLKDIKGLSEETTTGVLALKKMEEQGTLMVPAINVNDSVTKSKFDNLYGCRESLVDGIKRATDVMMSGKVAIVAGFGDVGKGSAASLRQSGARVMITETDPICALQAAMEGYEVVLMDEMIGQADIVVTATGNKDIVTADHMRAMKDRSILCNIGHFDNEIQVEALKNYKWDEIKPQVHEITFPDNKRLILLAEGRLVNLGCATGHPSFVMSASFTNQVTAQIELWNNSEKYEKKVYVLPKHLDEKVARLHLEKVGAKLTPLSKDQADYISVKPEGPYKPDAYRY

SEQ ID NO: 168991 - protein, 279 aa, Unknown
  Bacterial polypetide isolated from the Sargasso Sea
GLSEETTTGVLALKKMEEQGQLLVPAINVNDSVTKSKFDNLYGCRESLVDGIKRATDVMMSGKVAIVAGFGDVGKGSAASLRQSGARVLVTETDPICALQAAMEGYEVVLMDEMIGQADIVVTATGNKDVVTADHMRAMKDRSILCNIGHFDNEIQVEALKNYKWDEVKPQVHEITFPDDKRLILLAEGRLVNLGCGTGHPSFVMSASFTNQVIAQIELWNNSDNYENKVYVLPKHLDEKVARLHLDKVGAKLTPLSKEQADYISVTPEGPYKPHAYRY

SEQ ID NO: 168992 - protein, 174 aa, Unknown
  Bacterial polypetide isolated from the Sargasso Sea
YEVVLMDDAISNADIVVTATGNKDIVNADHMRKMKDRAILCNIGHFDNEIQVDALKNYKWTEIKPQVHEIELTDKKRIILLAEGRLVNLGCATGHPSFVMSASFTNQVMAQIELWNNYKKYEKKVYVLPKHLDEKVAMLHLNKVGAKLTKLSKDQADYIGVDTKGPFKSDSYRY

SEQ ID NO: 168993 - protein, 237 aa, Unknown
  Bacterial polypetide isolated from the Sargasso Sea
GCRESLVDGIKRATDVMMSGKVAIVAGFGDVGKGSAASLRQSGARVMITETDPICALQAAMEGYEVVTMDDMISEADIVVTATGNKDIVTADHMREMKDRAILCNIGHFDNEIQVDALKNYKWDEIKPQVHEITLPSKKRIILLAEGRLVNLGCATGHPSFVMSASFTNQVIAQIELWNNSKNYEKKVYVLPKHLDEKVATLHLKKVGAKLTKLSKDQADYISVKVEGPYKPDAYRY

SEQ ID NO: 168994 - protein, 100 aa, Unknown
  Bacterial polypetide isolated from the Sargasso Sea
GKKIILLSKGRLVNLGNAMGHPSFVMSASFSNQVLAQIELWNNPQKYEKKVYVLPKNLDEKVAAIHLDKLGAKLTKLTKEQSDYIGVDNTGPFKPEYYRY

SEQ ID NO: 168995 - protein, 125 aa, Unknown
  Bacterial polypetide isolated from the Sargasso Sea
MSEDFKVKDINQAEFGRKEISIAETEMPGLMALRKEHKGKKPLKGARILGCLHMTIQTAVLIETLVELGAEVRWSSCNIFSTQDHAAAAIAKVGIPVYAWKGETEEEYWWCIKQTIEAKKNWTPN

SEQ ID NO: 168996 - protein, 38 aa, Unknown
  Bacterial polypetide isolated from the Sargasso Sea
SVTKSKFDNLYGCRESLVDGIKRTTDVMMSGKVAIVAG

SEQ ID NO: 168997 - protein, 83 aa, Unknown
  Bacterial polypetide isolated from the Sargasso Sea
MVAAPTSPAELKLSGDHVIADINLADFGRKELDIAETEMPGLMALRQKYGKEKPLKGARIAGSLHMTIQTASLIETLVELGAE

SEQ ID NO: 168998 - protein, 268 aa, Unknown
  Bacterial polypetide isolated from the Sargasso Sea
MSEDFKVKDINLADFGNKEIAIAETEMPGLMALREEYGDSKPLDGARIVGCLHMTIQTAVLIETLVFLGATVRWSSCNIFSTQDHAAAAIAAKGIPVFAWKGMSEEEFWWCIEKTLEGPDGWMPNMILDDGGDATKIIHEKYPKMLEDILGLSEETTTGVHRLKEMEKNGSLKVPAINVNDSVTKSKFDNLYGCKESLVDGIRRGTDVMMAGKIAVVAGYGDVGKGSAASLRGAGARVCVTEIDPINALQAAMEGYEVVTMDDACKYA

SEQ ID NO: 168999 - protein, 218 aa, Unknown
  Bacterial polypetide isolated from the Sargasso Sea
MIVKVVEVDPICAMQACMDGYEIVSPYMNGINDGSLENIDRRLMGNIDLLVTCTGNVNVCDSNMLRSLQSGAIVCNIGHFDTEIDTHYMRDNWRWAEVKEQVHMVYRSDNPRDYLILLSEGRLVNLGNATGHPSRIMDGSFANQVLAQIYLYERKWADHDDDQREPITVEVLPKKLDEEVASLMVAGFGGVLTKLTQKQADYINVPVTGPYKIEQYKY

SEQ ID NO: 169000 - protein, 199 aa, Unknown
  Bacterial polypetide isolated from the Sargasso Sea
MGKNRQSSCLAACVKIGGIQMTMTLEKQKMDYHVRDMSLADFGRKEIDIAEMEMPGLMATREKYGPDKPLAGVKIMGSLHMTIQTAVLIETLVELGADVRWCSCNIFSTQDHAAAAIAAAGVPVFAWKGETLEEYWDCTFKALTWPDGSGPDQIVDDGGDATLLIHKGLELENGSDWVDSKSDSEEEQVYQNLLKKVNA

SEQ ID NO: 169001 - protein, 149 aa, Unknown
  Bacterial polypetide isolated from the Sargasso Sea
MEFNDYKVADIGLADWGRKEIEIAETEMPGLITLRNELSKSKPLKGANIVGCLHMTIQTAVLIETLIDLGATVRWSSCNIFSTQDHAAAAIASKNIPVFAWKGETEEEYDWCIRQTIEGSSDWKPNMILDDGGDLTKIKHEEYQDLLDD

SEQ ID NO: 169002 - protein, 199 aa, Unknown
  Bacterial polypetide isolated from the Sargasso Sea
SSSSGARVLVTETDPICALQAAMEGYEVVLMEDAIKDADIVVTATGNKDIVTADHMRDMKDRAILCNIGHFDNEIQVEALKNYKWDEIKPQVHEIELPSKKRIILLAEGRLVNLGCATGHPSFVMSASFTNQVIAQIELWNNSDKYENKVYVLPKHLDEKVAMLHLEKVGAKLTKMSKEQADYISVKPSGPFKPDTYRY

SEQ ID NO: 169003 - protein, 141 aa, Unknown
  Bacterial polypetide isolated from the Sargasso Sea
DTNHMINMKDGAIIANSGHFNVEINIPGLQDISSSSKVTRQYIEQFTVRDKKINLLAEGRLVNLAAAEGHPSSVMDMSFANQALCVEHIIKFSEKLSISVHDVPKEIDEEIGRLKLSTMGVSIDNLTQEQIKYLHSWTTGT

SEQ ID NO: 169004 - protein, 74 aa, Unknown
  Bacterial polypetide isolated from the Sargasso Sea
SASFTNQVLAQIELWKKGGEYKNDVYILPKHLDEKVARLHLERIGVKLTKLATDQAEYIGVTPEGPFKPEHYRY

SEQ ID NO: 169005 - protein, 237 aa, Unknown
  Bacterial polypetide isolated from the Sargasso Sea
GCRESLVDGIKRATDVMMSGKVAIVAGFGDVGKGSAASLRQSGARVMVTETDPICALQAAMEGYEVVLMDEMIKEADIVVTATGNKDIVTADHMRDMKDRAILCNIGHFDNEIQVEAMKNYKWDEIKPQVHEITFPDNKRIILLAEGRLVNLGCATGHPSFVMSASFTNQVTAQIELWNNSDKYENKVYVLPKHLDEKVAMLHLDKVGAKLTKLSKDQADYISVTPEGPYKPDTYRY

SEQ ID NO: 169006 - protein, 314 aa, Unknown
  Bacterial polypetide isolated from the Sargasso Sea
WWCIEKTLSGPNDWKPNMILDDGGDATKIIHEKYPNLLEGIRGLSEETTTGVHRLKDMEKKGSLKVPAINVNDSVTKSKFDNLYGCKESLVDGIRRGTDVMMAGKIAVVAGYGDVGKGSAASLRGAGARVCVTEVDPINALQAAMEGYEVVTMDDACEYGDIFVTATGNVDVITLDHMRKMRDRAIVCNIGHFDNEIQTEALRNYKTEEIKPQVDEIEFPDGKKLILLSQGRLVNLGNATGHPSFVMSASFTNQVMAQIELWENHANYENKVYVLPKHLDEKVAFLHLKKVGAKLTNLSDKTAEYIGVKKEGPF

SEQ ID NO: 169007 - protein, 47 aa, Unknown
  Bacterial polypetide isolated from the Sargasso Sea
LPKELDEKVARLHLDKLGVKLEQLSERQASYMGVATEGPYKPGHYRY

SEQ ID NO: 169008 - protein, 204 aa, Unknown
  Bacterial polypetide isolated from the Sargasso Sea
GSAQSLRGLGATVCIAEVDPICALQAAMEGYRVVRLEDVVEEMDIFVTATGNYQVIRNEHLVKMKDEAIVCNIGHFDNEIDVASLKEYEWENIKPQVDHITLPSGNKIILLAEGRLVNLGCATGHPSFVMSNSFTNQVLAQIELFTKGDEYGKEVYVLPKHLDEMVARLHLGRIGAKLTELSKDQADYINVPVEGPYKPDHYRY

SEQ ID NO: 169009 - protein, 286 aa, Unknown
  Bacterial polypetide isolated from the Sargasso Sea
KEISIAETEMPGLMALRKEYKGKKPLNGARILGCLHMTIQTAVLIETLVELGADVRWSSCNIFSTQDHAAAAIAKAGVPVYAWKGETEEEYWWCIKQTIEGKKDWKPNMLLDDGGDLTALMHKDYKNLLKSVKGLSEETTTGIKALKKMEAENKLLVPAINVNDSVTKSKFDNLYGCRESLVDGIKRATDVMMSGKTAIVAGFGDVGKGSAASLRQSGARVMVTEADPICALQAAMEGYEVVLMDEAISNADIVVTATGNKDIVTADHMRKMKDRSILCNIGHFDN

SEQ ID NO: 169010 - protein, 64 aa, Unknown
  Bacterial polypetide isolated from the Sargasso Sea
FIAESEMPALMGLRRKYAAEQPLKGAKILGCIHMTIQTAVLIETLVALGAEVRWSSCNIFSTQD

SEQ ID NO: 169011 - protein, 156 aa, Unknown
  Bacterial polypetide isolated from the Sargasso Sea
MEDFKVKDISQAEFGRKEISIAESEMPGLMALREEYSGKSPLKGAKIIGCLHMTIQTAVLIETLVDLGAEVRWSSCNIFSTQDHAAAAIAKAGVPVYAWKGETEEEYLWCIKQTIVAKKDWKPNMLLDDGGDLTAIIHNEYKDLLKDVRGVQRRQQ

SEQ ID NO: 169012 - protein, 269 aa, Unknown
  Bacterial polypetide isolated from the Sargasso Sea
ASCNIFSTQDHAAAAIADQGISVYAKKGETLDEYWEYTHCILDWGSDSPNMILDDGGDATGLLILGSKAEKDLSVLDNPGNEEEIALFNSIKSKLENDSDFYSRIKSNIIGVTEETTTGVARLYQLQKQNALPFPAINVNDSVTKSKFDNLYGCRESLVDSIKRATDVMIAGKVALVIGFGDVGKGSAQSLRGLGAIVKVAEVDPICALQAAMEGFSVVTLDDVVEDIDIFVTATGNYQVITNENLIKMKNEAIVCNIGHFDNEIDVAS

SEQ ID NO: 169013 - protein, 61 aa, Unknown
  Bacterial polypetide isolated from the Sargasso Sea
LWNNSDNYENKVYVLPKHLDEKVARLHLDKVGAKLTPLSKEQADYISVTPEGPYKPHAYRY

SEQ ID NO: 169014 - protein, 295 aa, Unknown
  Bacterial polypetide isolated from the Sargasso Sea
TEEEYKWCIDQTINGPEGWKPNMLLDDGGDLTGIIHEEHKELLDDILGVSEETTTGVHRLYEMEKNNELKMPAMNVNDSVTKSKFDNLYGCRESLVDGIKRATDTMIAGKLAVVCGYGDVGKGSAGSLRGLGANVLITEVDPICALQASMEGYKVVDMNDYIEEIDIFVTATGNFNVINHDQMVKMKNGAIVCNIGHFDNEIDVEGLKKYQWENIKPQVDHIIFPDGKRIILLAEGRLINLGCATGHPSFVMSCSFTNQVMAQIELWNNHKKYENKVYVLPKDLDEKVARLHLEK

SEQ ID NO: 169015 - protein, 220 aa, Unknown
  Bacterial polypetide isolated from the Sargasso Sea
TADYKVKDISLSDWGRKEIAIAETEMPGLMALREEYGNTKPLDGARIVGCLHMTIQTAVLIETLVHLGASVRWSSCNIFSTQDQAAAAIAAKNIPVFAWKGMNDEEFWWCIEQTLSGPNNWKPNMILDDGGDATGIIHEKFPEMLEEIRGLSEETTTGVHRLKEMEKEGKLKVPAINVNDSVTKSKFDNLYGCKESLVDGIRRGTDVMMAGKIAVVAGYG

SEQ ID NO: 169016 - protein, 276 aa, Unknown
  Bacterial polypetide isolated from the Sargasso Sea
MKNKTLTEYVPYKVKDISLAEWGKKEIKLAEAEMPGLMALRARLKKEKPLKGARIAGCLHMTIQTAVLIETLIDLGAEVTWSSCNIFSTQDHAAAAIASMGIPVYAWKGMNEKEFNWCIEQTLFFGEKKEPLNMILDDGGDLTNMVLDQYPELVPGIKGLSEETTTGVHRLYERMKTGQLPLPAINVNDSVTKSKFDNKYGCKESAVDAIRRATDIMIAGKRVVVCGYGDVGKGTAASFRGAGAIVTITEIDPICALQASMDGYEVKKLNTVVKDA

SEQ ID NO: 169017 - protein, 262 aa, Unknown
  Bacterial polypetide isolated from the Sargasso Sea
KKNKLLVPAINVNDSVTKSKFDNLYGCRESLVDGIRRATDIMLSGKVAVVCGYGDVGKGSAASLRNGGARVMVTEIDPICALQASMEGYEVVKIEDVLKKGDIFCTATGNVDVITLEHMRKMKDRAIVCNIGHFDSEIQIDALKNYKWDEIKPQVDEVQFPDGKKLIVLSKGRLVNLGNATGHPSFVMSASFTNQVLAQIELWKKAKSYKNKVYVLPKELDEKVAELHLGKLGSKLTKLSKKQAKYINVNENGPFKPGYYRY

SEQ ID NO: 169018 - protein, 160 aa, Unknown
  Bacterial polypetide isolated from the Sargasso Sea
MVIANSVKTSTPNFVITDISLSDFGRKEIKIAETEMPGLMALRDKYQSEKPLKGAKIAGSLHMTIQTAVLIETLVDLGAEVKWASCNIFSTQDHAAAAIADQGISVYAKKGETLDEYWQYTHYILDWGSESPNMILDDGGDATGLLILGSKAEKDLSVLD

SEQ ID NO: 169019 - protein, 240 aa, Unknown
  Bacterial polypetide isolated from the Sargasso Sea
NLYGCRESLVDGIKRATDVMMSGKVAIVAGFGDVGKGSAASLRQSGARVMVTETDPICALQAAMEGYEVVLMDEMIGHADIVVTATGNKDIVTADHMRAMKDRSILCNIGHFDNEIQVEALKNYKWDEIKPQVHEITFPDNKRIILLAEGRLVNLGCATGHPSFVMSASFTNQVTAQIELWNNSEKYEKKVYVLPKHLDEKVARLHLEKVGAKLTKLSEDQADYISVKTEGPYKPDAYRY

SEQ ID NO: 169020 - protein, 111 aa, Unknown
  Bacterial polypetide isolated from the Sargasso Sea
PIKPQVDQYTFPSGNSIFLLAEGRLVNLGCATGHPSFVMSNSFTNQALAQIDLWEKEYEIGVFTLPKHLDEEVARLHLDALGARLTVLSKDQSEYIGIPIEGPYKSDLYRY

SEQ ID NO: 169021 - protein, 216 aa, Unknown
  Bacterial polypetide isolated from the Sargasso Sea
MTDYKVKDINEAEFGRKEISLAETEMPGLMALRKEYKGKNPLKGARIVGCLHMTIQTAVLIETLVELGAEVRWSSCNIFSTQDHAAAAIAKAGIPVFAWKGETEEEYWWCVRQTIEGKKDWKPNMILDDGGDLTALMHKDYKELMKNIKGLSEETTTGVLALKKMEQEGTLLVPAINVNDSVTKSKFDNLYGCRESLVDGIKRATDVMMSGKVAIV

SEQ ID NO: 169022 - protein, 169 aa, Unknown
  Bacterial polypetide isolated from the Sargasso Sea
MDEMIKEADIVVTATGNKDIVTADHMRDMKDRAILCNIGHFDNEIQVDALRNYKWDEIKPQVHEITFPDEKRIILLAEGRLVNLGCATGHPSFVMSASFTNQVTAQIELWNNSENYEKKVYVLPKHLDEKVARLHLEKVGAKLTQLSKDQADYISVTPEGPYKPEAYRY

SEQ ID NO: 169023 - protein, 168 aa, Unknown
  Bacterial polypetide isolated from the Sargasso Sea
DEAISKADIVVTATGNKDIVTADHMRDMKDRAILCNIGHFDNEIQVEALKNYKWTEVKPQVHEIELPSKKRIILLAEGRLVNLGCATGHPSFVMSASFTNQVIAQIELWNNHKNYENKVYVLPKHLDEKVATLHLKKVGAKLTKLSKDQADYISVGVEGPFKPNAYRY

SEQ ID NO: 169024 - protein, 250 aa, Unknown
  Bacterial polypetide isolated from the Sargasso Sea
ATLYIILGAKAESGEQILPNPANEEEEALKAQILSRLESSPGWFTKVKNSIKGVTEETTTGVLRLYQMAEKGDLPFPAINVNDSVTKSKFDNLYGCRESLVDGIRRATDVMLSGKVAVVAGYGDVGKGSAASLRQGGARVIVTEIDPICALQAAMEGYEVCSMEEACSRGDIFVTATGNKDVITVDHMREMKDRAIVCNIGHFDSEIQVESLQNMKWSEVKPQVDEVEFQDGKRLIVLAKGRLVNLGCAT

SEQ ID NO: 169025 - protein, 273 aa, Unknown
  Bacterial polypetide isolated from the Sargasso Sea
YKELLKNIRGVSEETTTGVLALKKMEKNNQLLIPAINVNDSVTKSKFDNLYGCRESLVDGIKRATDVMMSGKVAIVAGFGDVGKGSAASLRQAGARVMVTETDPICALQAAMEGYEVVLMEDAIKYADIVVTATGNKDIVTADHMREMKDRAILCNIGHFDNEIQVDALKNYKWNEIKPQVHEIELPSKKRIILLAEGRLVNLGCATGHPSFVMSASFTNQVIAQIELWNNYMKYEKKVYVLPKHLDEKVAMLHLEKVGAKLTKMSKDQADYI

SEQ ID NO: 169026 - protein, 252 aa, Unknown
  Bacterial polypetide isolated from the Sargasso Sea
ARILGCLHMTIQTAVLIETLVDLGAEVRWSSCNIFSTQDHAAAAIAKAGIPVFAWKGETEEEYWWCVKQTIEGKKDWIPNMILDDGGDLTALMHKEYKDLLKGIKGLSEETTTGVLALKKMEEQGTLLVPAINVNDSVTKSKFDNLYGCRESLVDGIKRATDVMMSGKVAIVAGFGDVGKGSAASLRQSGARVMVTETDPICALQAAMEGYEVVLMDEMIGEADIVVTATGNKDVVTADHMRAMKDRSILCN

SEQ ID NO: 169027 - protein, 227 aa, Unknown
  Bacterial polypetide isolated from the Sargasso Sea
RSLDVMVAGKTVVVCGYGDVGRGCAQSMRGYGARVIITEIDPICALQAAMEGFEVTTLENALSEGHIFVTTTGNKDVIRKDHMYSMRDQAIVCNIGHFDNEIQVNALNDDEKVIREIIKPQVDRYQFPDGHQVFLLAEGRLVNLGCATGHPSFVMSNSFTNQVMAQIALAKDAPEIGVYMLPKELDEEVARLHLDHLGVTLTELTDEQADYIGVPKEGPYKPDHYRY

SEQ ID NO: 169028 - protein, 269 aa, Unknown
  Bacterial polypetide isolated from the Sargasso Sea
MELLHIFSTQDHAAAAVADSGVPVFAWKGESEEEFWWCIEQTITGPNNWTPNMILDDGGDLTKLMHEKYPTLIANVKGVSEETTTGVHRLYEMEHDGSLKVPAFNVNDSVTKSKFDNLYGCRESLVDGIRRATDVMLSGKVAVVCGYGGVGKGSAESLRSAGARVLITEIDPICALQAAMEGYEVVDMSVAAARGDIFVTATGNVDVITLDHMREMKDLAIICNIGHFDSEIQIDSLSNLEWTEIKPQVDQVTFPDGKRLIVLAQGRLV

SEQ ID NO: 169029 - protein, 254 aa, Unknown
  Bacterial polypetide isolated from the Sargasso Sea
KGVTEETTTGVQRLYQMQKKGELPFPAINVNDSVTKSKFDNLYGCRESLVDGIKRATDVMVAGKIALVLGYGDVGKGCAQSLRGLGATVWVTEIDPICALQAAMEGYRVVKIDDICDKVDIFVTATGNFNVIQHDHMLKMKDQAIVSNIGHFDNEIDVASIEKYEWVEIKPQVDHVIFPDGKRIILLAKGRLVNLGCATGHPSFVMSNSFTNQVLAQIELFTSNENYKKDVYVLPKHLDEKVARLHLERIGANL

SEQ ID NO: 169030 - protein, 261 aa, Unknown
  Bacterial polypetide isolated from the Sargasso Sea
REYGRLKPLQGARIAGCLHMTIQTAVLIETLTELGAEVRWSSCNIFSTQDHAAAAIAATGVPVFAWKGMNEEEFDWCIEKTLRWPDGKGLNMILDDGGDLTNMVHDKCPELISEIRGLSEETTTGVHRLYERQRKGTLKMPAINVNDSVTKSKFDNLYGCRESLVDGIKRATDVMIAGKTCVVAGYGDVGKGSAGSFKGLGGRVVVTEIDPICALQAAMEGYEVMKMEDAAKIGDIFVTTTGCVDVINGSHLDAMKDGAIV

SEQ ID NO: 169031 - protein, 239 aa, Unknown
  Bacterial polypetide isolated from the Sargasso Sea
MYGCRESLVDGIKRATDVMMSGKVAIVAGFGDVGKGSAASLRMSGARVMVTETDPICALQAAMEGYEVVRMDDMIGEADIICTATGNKDIVTADHMRAMKDRAILCNIGHFDNEIQVEALKNYKWDEIKPQVHEITFPDDKRIILLAEGRLVNLGCATGHPSFVMSASFTNQVTAQIELWNNSANYEKKVYVLPKHLDEKVAMLHLEKVGAKLTKLSKDQADYISVKQEGPYKPDAYRY

SEQ ID NO: 169032 - protein, 280 aa, Unknown
  Bacterial polypetide isolated from the Sargasso Sea
LILGSKAEKDLSVLDNPSNEEEIALFKSIKSKLQEDNEFYSRIKSKIIGVTEETTTGVARLYQLQKQNALPFPAINVNDSVTKSKFDNLYGCRESLVDSIKRATDVMIAGKVALVMGFGDVGKGSAQSLRGLGAIVKVAEVDPICALQAAMEGFSVVKLDDVVEDIDIFVTATGNYQVITHSNLVKMKDEAIVCNIGHFDNEIDVASLKDYPWDNIKPQVDHITLPSGNKIILLAEGRLVNLGCATGHPSFVMSNSFTNQVLAQIELFNKSEQYSNKVYV

SEQ ID NO: 169033 - protein, 194 aa, Unknown
  Bacterial polypetide isolated from the Sargasso Sea
MSKVIEKIGPDYKVADISLADWGHKEMRIAETEMPGLMALREKYGKGQPLKGARIVGCLHMTIQTAVLIETLVDLGASVRWSSCNIYSTQDHAAAAIAEKGIPVFAWKGETEKEYLWCIDQTIIGDPGWKPNMILDDGGDLTSIIHEKYPELLLEVKGLSEETTTGVHRLYEMVKKGELKVPAFNVNDSVTKSK

SEQ ID NO: 169034 - protein, 257 aa, Unknown
  Bacterial polypetide isolated from the Sargasso Sea
LLKSVKGVSEETTTGIKALKKMESEKKLMIPAINVNDSVTKSKFDNLYGCRESLVDGIKRATDVMMSGKTAIVAGFGDVGKGSAASLRQSGARVMVTEADPICALQAAMEGYEVVLMDEAISGADIVVTATGNKDIVTADHMRKMKDRSILCNIGHFDNEIQVEALKNYKWTEIKPQVHEIEFPDKKRILLLAEGRLVNLGCATGHPSFVMSASFTNQTIAQIELWNNSEKYENKVYVLPKHLDEKVALLHLNKVGA

SEQ ID NO: 169035 - protein, 115 aa, Unknown
  Bacterial polypetide isolated from the Sargasso Sea
MEDYKVKDISQADFGRKEISIAESEMPGLMALREEYSKNKPLKGAKIIGCLHMTIQTAVLIETLVDLGAEVRWSSCNIFSTQDHAAAAIAKAGIPVYGWKVKLKKNTYGVLNRLS

SEQ ID NO: 169036 - protein, 266 aa, Unknown
  Bacterial polypetide isolated from the Sargasso Sea
KKMEEQGTLLVPAINVNDSVTKSKFDNLYGCRESLVDGIKRATDVMMSGKVAIVAGFGDVGKGSAASLRQSGARVMVTETDPICALQAAMEGYEVVLMDEMIGQADIVVTATGNKDIVTADHMRAMKDRSILCNIGHFDNEIQVEALKNYRWDEIKPQVHEITFPDNKRLILLAEGRLVNLGCATGHPSFVMSASFTNQVTAQIELWNNSDKYENKVYVLPKHLDEKVARLHLEKVGAKLTPLSKEQADYISVKTEGPYKPDAYRY

SEQ ID NO: 169037 - protein, 290 aa, Unknown
  Bacterial polypetide isolated from the Sargasso Sea
RWASCNIFSTQDEAAAAIAKTKTPVFAWKGETLEDYWECTLQALTFKNNLGPNLIVDDGGDATLLIHKGYELEKHYNENKKIPKITTKIEEEIVIEKLLRKVHKKNPNHWHSIVPEIIGVSEETTTGVARLQQMVEDASLLFPAFNVNDAATKSKFDNLYGCRESLADGIKRSTEIMLAGKTVVVCGYGDVGKGSAQSMKSYGCKVIVTEIDPICALQAAMEGFEVRRLEDVLRRGNIFVTTTGNKDIITLKHMKKMKDQAIVCNIGHFDNEIQVDALNKSEAKRDKIKP

SEQ ID NO: 169038 - protein, 254 aa, Unknown
  Bacterial polypetide isolated from the Sargasso Sea
IKLKIYHKQNSGRKEISLAETEMPGLMALRKEYKGKSPLKGARILGCLHMTIQTAVLIETLVDLGAEVRWSSCNIFSTQDHAAAAIAKAGIPVFAWKGETEEEYWWCVKQTIEGKKDWKPNMILDDGGDLTALMHKDYKDLLKDIKGLSEETTTGVLALKKMEAQGTLLVPAINVNDSVTKSKFDNLYGCRESLVDGIKRATDVMMSGKVAIVAGFGDVGKGSAASLRQSGARVMVTETDPICALQAAMEGYEV

SEQ ID NO: 169039 - protein, 151 aa, Unknown
  Bacterial polypetide isolated from the Sargasso Sea
IIRVEHMEKMLDQSIVCNIGHFDNEIQIAALEDFPGIGKEEIKPQVDKYTFPDGRAIFILAEGRLVNLGCATGHPSFVMSNSFTNQVLAQIDLWKYDREVDVYRLPKHLDEEVARLHLKKLGVKLTTLSEDQAEYIGVKLGGPYKPDHYKY

SEQ ID NO: 169040 - protein, 280 aa, Unknown
  Bacterial polypetide isolated from the Sargasso Sea
FPEETTTGVHRLYQMVEDGSLLFPAINVNDSVTKSKFDNLYGCRESLVDGIKRATDVMISGKTAVVCGYGDVGKGSAQALKSQGAKVIVTEVDPICALQASMEGFNVQTVEETLGVADIYVTATGNRDVITLEHMESMKDQTIVCNIGHFDNEIQVERLETSNASHTNIKPQVDKYTFDSGNSIFLLASGRLVNLGCATGHPSFVMSTSFANQTLAQIDLLENRGSYENKVYTLPKKLDEEVARLHLDKIGAKLTVLTNDQADYIDVPVHGPYKKTEYRY

SEQ ID NO: 169041 - protein, 213 aa, Unknown
  Bacterial polypetide isolated from the Sargasso Sea
GYGWCGRGLASRAQGMGARTVVCEVDSVKALEAIMDNHEVMTMEEASKIGDIFVTVTGGLHAVDKEHFELMKDGAIVANSGHFNVELNLEALEKMTENRRRVRENVEEYTLETGKHVIVLGEGRLVNLAAAEGHPPSVMDMSFANQALASEYIVKNHKGFKNEVYTLPKSVDQEIAALKIRSFGKNFDKLKAKQEKYLNSWELGTGSSQEGLE

SEQ ID NO: 169042 - protein, 300 aa, Unknown
  Bacterial polypetide isolated from the Sargasso Sea
MALREEYYNKKPLKDARIIGCLHMTIQTAVLIETLVDLGAEVRWSSCNIFSTQDHAAAAIAKAGIPVYAWKGETEEEYLWCIKQTIVGKSDWKPNMLLDDGGDLTAIMHNEHKELMKDVKGVSEETTTGIKALNKMEKDKSLLVPAINVNDSVTKSKFDNLYGCRESLVDGIRRATDVMMSGKIAIVAGFGDVGKGSAASLRQSGARVLVTEADPICALQAAMEGYEVVLMEEAISRADIVVTATGNKDIVTADHMREMKDRAILCNIGHFDNEIQVEALKNYKWTEVKPQVHEIELTSG

SEQ ID NO: 169043 - protein, 228 aa, Unknown
  Bacterial polypetide isolated from the Sargasso Sea
MTDKQDFKVADIGLAEFGRKEISLAETEMPGLMALRKEYNGKKPLKGSRIVGCLHMTIQTAVLIETLVDLGADVRWSSCNIFSTQDHAAAAIAKAGIPVFAWKGETEEEYWWCVRQTIEGKEGWTPNMILDDGGDLTALMHKDYKELLKDVKGLSEETTTGVLALKKMELDGSLLVPAINVNDSVTKSKFDNLYGCRESLVDGIKRATDVMMSGKVAIVAGFGDVGKG

SEQ ID NO: 169044 - protein, 267 aa, Unknown
  Bacterial polypetide isolated from the Sargasso Sea
MTDYKVKDINLADFGRKEISLAETEMPGLMALRKEYKGKNPLEGAKILGCLHMTIQTAVLIETLVDLGAECRWSSCNIFSTQDHAAAAIAKSGTPVFAWKGETEEEYWWCVRQTIEGKKDWKPNMILDDGGDLTALMHKDYKHLMKDIKGLSEETTTGVLALKKMESEGTLLVPAINVNDSVTKSKFDNLYGCRESLVDGIKRATDVMMSGKVAIVAGFGDVGKGSAASLRQAGARVMITETDPICALQAAMEGYEVVLMDDMIQHA

SEQ ID NO: 169045 - protein, 236 aa, Unknown
  Bacterial polypetide isolated from the Sargasso Sea
CRESLVDGIKRATDVMMSGKVAIVAGFGDVGKGSAASLRQAGARVMVTETDPICALQAAMEGYEVVVMDEAIKDADIVVTATGNKDIVTADHMRNMKDRAILCNIGHFDNEIQVEALKNYKWDEIKPQVHEIELPSKKRIILLAEGRLVNLGCATGHPSFVMSASFTNQVIAQIELWNNSDKYEKKVYVLPKHLDEKVAMLHLEKVGAKLTKMSKEQADYISVKPSGPFKPDTYRY

SEQ ID NO: 169046 - protein, 115 aa, Unknown
  Bacterial polypetide isolated from the Sargasso Sea
KTEIKPQVDLYKINNGVEIIVLAEGRLVNLGCATGHPSFVMSNSFTNQVLAQIELWKNHANYENDVYTLPKHLDEKVAKLHLKHLGVELEDLSEDQAKYIGVKKSGPYKPDYYRY

SEQ ID NO: 169047 - protein, 268 aa, Unknown
  Bacterial polypetide isolated from the Sargasso Sea
MSEDFKVKDISLADFGDKEIAIAETEMPGLMALREEYGDSKPLDGARIVGCLHMTIQTAVLIETLVFLGATVRWSSCNIFSTQDHAAAAIAAKGIPVFAWKGMTEEEFWWCIEKTLEGPDGWKPNMILDDGGDATKIIHEKYPKMLEEILGLSEETTTGVHRLKEMEKNGQLKIPAINVNDSVTKSKFDNLYGCKESLVDGIRRGTDVMMAGKIAVVAGYGDVGKGSAASLRGAGARVCVTEIDPINALQAAMEGYEVVTMDDACKYG

SEQ ID NO: 169048 - protein, 126 aa, Unknown
  Bacterial polypetide isolated from the Sargasso Sea
MENNQSSPETNFSDYKIADLSLSDLGRRKIGIAEGEMPGLMALRKEYGNEKPLAGARITGSLHMTVETAVLIETLVELGAEVRWSSCNIFSTQDEAAAAIAAAGIPVFAWKGETEEEYWWCMNKPS

SEQ ID NO: 169049 - protein, 105 aa, Unknown
  Bacterial polypetide isolated from the Sargasso Sea
IELPSKKRIILLAEGRLVNLGCATGHPSFVMSASFTNQVIAQIELWNNSDKYEKKVYVLPKHLDEKVAMLHLGKVGAKLTKMSKEQADYISVKQSGPFKPDTYRY

SEQ ID NO: 169050 - protein, 149 aa, Unknown
  Bacterial polypetide isolated from the Sargasso Sea
VTADHMRKMKDRSILCNIGHFDNEIQVEALKNYKWTEIKPQVHEIEFPDKKRILLLAEGRLVNLGCATGHPSFVMSASFTNQVIAQIELWKNSEKYEKKVYVLPKHLDEKVAMLHLNKVGAKLTKLTKGQAEYISVDTNGPFKSDSYRY

SEQ ID NO: 169051 - protein, 108 aa, Unknown
  Bacterial polypetide isolated from the Sargasso Sea
MTIFVFPDGKRIILLAEGRLVNLGCGTGHPSFVMSNSFCNQTLAQIELFKNSSNYDKQVYVLPKSLDEKVAKLHLDKIGAKLTKLTTEQAEYIGVKESGPYKPEHYRY

SEQ ID NO: 169052 - protein, 139 aa, Unknown
  Bacterial polypetide isolated from the Sargasso Sea
MAETAKENKIDLMNDYKVADISLAEWGEKEIKIAETEMPGLMSIREEFGKEKPLKGARIAGCLHMTIQTAVLIETLIELGADIRWSSCNIFSTQDHAAAALAAKGIPIFAWKDESEEEYWWCVEKTINGPGGWTPNLIL

SEQ ID NO: 169053 - protein, 308 aa, Unknown
  Bacterial polypetide isolated from the Sargasso Sea
KNIPVYAWKGMNEDEFNWCIEQTLFFGKDRKPLNMILDDGGDLTNMVFDKFPELIPEIKGLSEETTTGVLRLYERMNKEKLPIPAINVNDSVTKSKFDNKYGCKESAVDAVRRATDIMLAGKRVIVCGYGDVGKGTAASFRGAGAIVTITEIDPICALQAAMDGFEVKKLSNVIGSADIVVTATGNKDIIEKESFLALKDKAIVCNIGHFDNEIDMSWLNKNYSHTKTEIKPQVDLYTLENNKQLIILAEGRLVNLGCATGHPSFVMSTSFTNQVLAQIELWNHSKKYENKVYMLPKHLDEKVASLHL

SEQ ID NO: 169054 - protein, 278 aa, Unknown
  Bacterial polypetide isolated from the Sargasso Sea
ALVLRSGGAQVSVTGSNPESTKDDVVAALAEEGLRVYARHGAEPSEMRKYMEIALDLKPHLVIDDGGDLVEILHETRTDLLEGMLGACEETTTGVLRAQARAKAAQLQFPVMLVNEARCKYLFDNVHGTGQSVWDAVMRSTNLVLAGKTVVVAGYGWCGRGCALRAQGMGASVIVCEVDPVKACDALMNGCRVMPLMEACKEADVVLSVTGVRHTIRKEHYNVIKDNALLANAGHFWEEIDVEGLSVMSKDRKQMRTNVEGFLLQDGRWLNLLGNGNI

SEQ ID NO: 169055 - protein, 166 aa, Unknown
  Bacterial polypetide isolated from the Sargasso Sea
AISNADIVVTATGNKDIVTADHMRKMKDRSILCNIGHFDNEIQVEALKNYKWNEIKPQVHEIEFPDKKRILLLAEGRLVNLGCATGHPSFVMSASFTNQTIAQIELWNNSDKYENKVYVLPKHLDEKVAILHLKKVGAKLTKLSKDQADYIRVDVKGPFKPDTYRY

SEQ ID NO: 169056 - protein, 165 aa, Unknown
  Bacterial polypetide isolated from the Sargasso Sea
MSKDYKVKDISQADFGRKEISLAETEMPGLIALRKEYKGKKPLKGAKILGCLHMTIQTAVLIETLVELGAEVRWSSCNIFSTQDHAAAAIAKAGIPVFAWKGETEEEYWWCVKQTIEGKKDWKPNMILDDGGDLTALMHKEYKNLLKDVKGVSEETTTGVLALKK

SEQ ID NO: 169057 - protein, 52 aa, Unknown
  Bacterial polypetide isolated from the Sargasso Sea
KKVYVLPKHLDEKVARLHLEKVGAKLTKMSKDQADYISVTPDGPYKPDAYRY

SEQ ID NO: 169058 - protein, 154 aa, Unknown
  Bacterial polypetide isolated from the Sargasso Sea
MSEDFKVQDISLADFGNKEIAIAETEMPGLMALREEYGNSKPLEGARIVGCLHMTIQTAVLIETLVYLGATVRWSSCNIFSTQDHAAAAIAAKGIPVFAWKGQTEEEFWWCIEKTLEGPNGWKPNMILDDGGDATKIIHEKYPKMLEDILGLSE

SEQ ID NO: 169059 - protein, 171 aa, Unknown
  Bacterial polypetide isolated from the Sargasso Sea
VTLEDAVSTADVFITATGNKDVIKIDHIRNMKNMAIVGNIGHFDNEIEVASLKNNKWTKIKDQVDMIEMSSGKNIILLSEGRLLNLGNATGHPSFVMSASFSNQVLAQIELWKNTKNYSNEVYTLPKHLDEKVARLHLEKIGVKLTKLETDQAEYIGVNENGPFKSENYRY

SEQ ID NO: 169060 - protein, 212 aa, Unknown
  Bacterial polypetide isolated from the Sargasso Sea
KLLRDVLEKNPNHWRPVAKNIIGVSEETTTGVHRLVQMEKDGHLLFPAYNVNDSVTKSKFDNVYGCRESLADGLKRSLDIMVAGKTVLVCGYGDVGKGCVQSLRGYGARVLVTEIDPICALQAAMEGYEVTTIDDVIDDVHIFVTTTGNKDIITKDHMYKMRDQAVVCNIGHFDNEIQVNAVNDDKSVMKENIKPQLDRYTFPDGHQIFMLC

SEQ ID NO: 169061 - protein, 282 aa, Unknown
  Bacterial polypetide isolated from the Sargasso Sea
GDATLLIHKGYQLENYYNKNNKLPKITATIEEEIVIEKLLRKIHKKNPNHWHNIVPDIIGVSEETTTGVARLQQMVENASLLFPAFNVNDAATKSKFDNLYGCRESLADGIKRSTEIMLAGKTVVVCGYGDVGKGSAQSMKSYGCKVIVTEIDPICALQAAMEGFEVRKLEDVLDRGNIFVTTTGNKDIITLKHMRKMKDQAIVCNIGHFDNEIQVDALNASNAKRDTIKPQLDRYTFKNGKQIFLLAEGRLVNLGCATGHASFVMSTSFSNPSSCSNIFST

SEQ ID NO: 169062 - protein, 97 aa, Unknown
  Bacterial polypetide isolated from the Sargasso Sea
MDDYKVKDISQAEFGRKEISLAETEMPGLMALRKEYKGKSPLKGARILGCLHMTIQTAVLIETLVDLGAEVRWSSCNIFSTQDHAAAAIAKAGIPVF

SEQ ID NO: 169063 - protein, 272 aa, Unknown
  Bacterial polypetide isolated from the Sargasso Sea
MQALTWPDGSGPDLIVDDGGDATLLIHKGYELEEFYEKNNYVPEIKTTIEEEIVIEKLIREVLKKDSSHWRSVAKNIIGVSEETTTGVHRLVQMDKDGHLLFPAYNVNDSVTKAKFDNVYGCRESLADGLKRSLDIMVAGKTVLVCGYGDVGKGSAQSLRGYGARVLISEIDPICALQAAMEGYEVVTIEDVIDQVHIFVTATGNKDIITKDHMYRMKDQAVVCNIGHFDNEIQVNAVNDDSSVKRETIKPQLDRYTFEDGHPVFMLAEGRL

SEQ ID NO: 169064 - protein, 252 aa, Unknown
  Bacterial polypetide isolated from the Sargasso Sea
MNTAVEQSVFADYKVADIHLADWGRRELGIAESEMPALMALRAHYSDSQPLAGAKILGCIHMTIQTGVLIETLVALGAEVRWSSCNIFSTQDHAAAAIAAAGIPVFAWKGETEEEYDWCIEQTILADGKPWDANMVLDDGGDLTAMLHEHYPEMLERIHGITEETTTGVHRLYEMLANGELKVPAINVNDAVTKSKNDNKYGCRHSLNDAIKRGLDHLLAGKRALVIGYGDVGKGSAQSLRQEGMIVRVTEM

SEQ ID NO: 169065 - protein, 241 aa, Unknown
  Bacterial polypetide isolated from the Sargasso Sea
MAETAKENKIDLINDFKVADISLAEWGEKEIKIAETEMPGLMSIREEFGKDKPLKGARIAGCLHMTIQTAVLIETLIELGADIRWSSCNIFSTQDHAAAALAAKGIPIFAWKDESEEEYWWCVEQTINGPNGWTPNLILDDGGDLTGLMHDKYPELMKDIIGVSEETTTGVLRLYNMEKDGTLMCPAINVNDSVTKSKFDNLYGCRESLVDGIKRATDVMVAGKIAIVAGYGDVEKVLHKV

SEQ ID NO: 169066 - protein, 250 aa, Unknown
  Bacterial polypetide isolated from the Sargasso Sea
NDSVTKSKFDNFYGCRESLVDGLKRATDVMLAGKVAVVCGFGDVGKGSAESLRSQGARVIVTEIDPICALQASMEGYEVSTVDDVTKSADIFITATGNKDVITLEHMREMKDRAIVANIGHFDSEIQVSKLKNFKWDNIKPQVDEIEFPDGKKIILLAEGRLVNLGCATGHPSFVMSASFSNQVLAQIEIWNNYKNYENKVYVLPKHLDEKVAYIHLEKLGVKLTELSDDQADYLSLNKEGPFKPDHYRY

SEQ ID NO: 169067 - protein, 279 aa, Unknown
  Bacterial polypetide isolated from the Sargasso Sea
KEIKIAETEMPGLMSIREEFGKEKPLKGARIAGCLHMTIQTAVLIETLIELGADIRWSSCNIFSTQDHAAAALAAKGIPIFAWKDESEEEYWWCVEKTIKGPDGWTPNLILDDGGDLTGLMHEKYPELMKDIIGVSEETTTGVLRLYNMEKDGTLMCPAINVNDSVTKSKFDNLYGCRESLVDGIKRATDVMVAGKIAVVAGYGDVGKGSAQSLRGLGATVWITEIDPICALQAAMEGYRVVTMDDACSQADIFVTATGNYNVIDKHHLEQMKDQAIVC

SEQ ID NO: 169068 - protein, 171 aa, Unknown
  Bacterial polypetide isolated from the Sargasso Sea
QTLDDTAGRADIYVTTTGNKDVITVDHMRQMKNNAIVCNIGHFDSEIQVAGLKNFKWDEIKPQVHHVEFPDGKKIILLSEGRLVNLGNATGHPSFVMSASFTNQTLAQIELWTNADKYENKVYTLPKHLDEKVAMLHLAKLGAKLTVLTKEQADYINVPVEGPFKADHYRY

SEQ ID NO: 169069 - protein, 209 aa, Unknown
  Bacterial polypetide isolated from the Sargasso Sea
GDVGKGSAASLRQAGARVMITETDPICALQAAMEGYEVVLMDEAIKDADIVVTATGNKDIVTADHMREMKDRAILCNIGHFDNEIQVEALKNYKWDEVKPQVHEIELPSKKRIILLAEGRLVNLGCATGHPSFVMSASFTNQVIAQIELWNNSDKYERKVYVLPKHLDEKVAMLHLDKVGAKLTKMSKDQADYISVKPSGPFKPDTYRY

SEQ ID NO: 169070 - protein, 134 aa, Unknown
  Bacterial polypetide isolated from the Sargasso Sea
MSNDYKVADINQADFGRREISLAEIEMPALMALRSKYKDSQPLSGAKIMGCIHMTVQTAVLMETLVELGAELRWSSCNIFSTQDHAAAAMAAKGIPVFAWKGETEEEFEWCIEQTILSDGTPWDANMILDDGGD

SEQ ID NO: 169071 - protein, 282 aa, Unknown
  Bacterial polypetide isolated from the Sargasso Sea
EIRGLSEETTTGVHRLKDMEKNGLLKVPAINVNDSVTKSKFDNLYGCKESLVDGIRRGTDVMMAGKVAVVAGYGDVGKGSAASLRGAGARVCVTEIDPINALQAAMEGYEVVTMDDAASYGDIFVTATGNLDVITLDHMRKMRDRAIVCNIGHFDNEIQTEALQNYKSDEIKPQVREVEFPDGKKILLLSEGRLVNLGNATGHPSFVMSASFSNQVIAQIELWENYKNYENKVYVLPKKLDEKVALLHLKKVGAKLTELNEKQADYIGVSKAGPFKDDTYRY

SEQ ID NO: 169072 - protein, 93 aa, Unknown
  Bacterial polypetide isolated from the Sargasso Sea
MSDYKVKDINLAEFGRKEISLAETEMPGLMALRKEYKGKNPLKGARILGCLHMTIQTAVLIETLVDLGAEVRWSSCNIFSTQDHAAAAIAKAG

SEQ ID NO: 169073 - protein, 301 aa, Unknown
  Bacterial polypetide isolated from the Sargasso Sea
VALGAEVRWSSCNIFSTQDHAAAAIAKAGIPVFAWKGETEEEYWWCVKQTIEGKKEWKPNMILDDGGDLTALMHKDYKELLKNVKGVSEETTTGVLALKKMETNKKLLIPAINVNDSVTKSKFDNLYGCRESLVDGIKRATDVMMSGKVAIVAGFGDVGKGSAASLRQAGARVMVTETDPICALQAAMEGYEVVLMDKAIKDADIVVTATGNKDIVTADHMRDMKDRAILCNIGHFDNEIQVEALKNYKWNEIKPQVHEIELPSKKRIILLAEGRLVNLGCATGPPSFVMSASFTNQVIAQ

SEQ ID NO: 169074 - protein, 244 aa, Unknown
  Bacterial polypetide isolated from the Sargasso Sea
FKVKDISFAEFGRKEISLAETEMPGLMALRKEYGNKKPLKGARILGCLHMTIQTAVLIETLTKLGAECRWSSCNIFSTQDHAAAAIAKAGVPVFAWKGETEKEYWWCVKQTIEGKKDWVPNMILDDGGDLTALMHKEYKDLLKNVKGVSEETTTGVLALKKMEANKQLLIPAINVNDSVTKSKFDNLYGCRESLVDGIKRATDVMMSGKVAIVAGYGDVGKGSAASLRQAGARVLVTETDPICA

SEQ ID NO: 169075 - protein, 110 aa, Unknown
  Bacterial polypetide isolated from the Sargasso Sea
PQVDHIVFPDGKRIILLAEGRLVNLGCGTGHPSFVMSNSFCNQTLAQIELFKNSSNYDKQVYVLPKSLDEKVAKLHLDKIGAKLTKLTTEQAEYIGVKESGPYKPEHYRY

SEQ ID NO: 169076 - protein, 283 aa, Unknown
  Bacterial polypetide isolated from the Sargasso Sea
GRKEISIAESEMPGLMALREEYSGKSPLKGAKIIGCLHMTIQTAVLIETLVALGAEVRWSSCNIFSTQDHAAAAIAKAGIPVYAWKGETEEEYIWCIKQTIEGKKDWAPNMLLDDGGDLTAMMHQEYKELIKNVKGVSEETTTGIKALNKMEKDKTLLVPAINVNDSVTKSKFDNLYGCRESLVDGIRRATDVMMSGKIAIVAGFGDVGKGSAASLRQSGARVLVTEADPICALQAAMEGYEVVLMEEAISKADIVVTATGNKDIVTADHMREMKDRAILCNI

SEQ ID NO: 169077 - protein, 214 aa, Unknown
  Bacterial polypetide isolated from the Sargasso Sea
IVAGFGDVGKGSAASLRQSGARVLVTEADPICALQAAMEGYEVVLMEEAISRADIVVTATGNKDIVTADHMRDMKDRAILCNIGHFDNEIQVEALKNYKWTEVKPQVHEIELPSGKRIILLAEGRLVNLGCATGHPSFVMSASFTNQVIAQIELWHNHKNYENKVYVLPKHLDEKVATLHLKKVGAKLTKLSKEQADYISVGTEGPFKPDAYRY

SEQ ID NO: 169078 - protein, 296 aa, Unknown
  Bacterial polypetide isolated from the Sargasso Sea
MQLGLLILGSKAEKDLSVLDNPSNDEEIALFNSIKSKLKVDSEFYSRVKSNIIGVTEETTTGVARLYQLQKQNALPFPAINVNDSVTKSKFDNLYGCRESLVDSIKRATDVMIAGKVALVMGFGDVGKGSAQSLRGLGAIVKVAEVDPICALQAAMEGFSVVTLDDVVQDIDIFVTATGNYQVITHKNLVKMKDEAIVCNIGHFDNEIDVASLKNYPWENIKPQVDHITLPSGNKIILLAEGRLVNLGCATGHPSFVMSNSFTNQVLAQIELFNKAEQYAKEVYVLPKHLDEMVAR

SEQ ID NO: 169079 - protein, 269 aa, Unknown
  Bacterial polypetide isolated from the Sargasso Sea
LIETLVDLGAEVRWSSCNIFSTQDHAAAAIAKAGIPVFAWKGETEEEYWWCVRQTIEGKKDWKPNMILDDGGDLTALMHKDYKELMKDIKGLSEETTTGVLALKKMEEQGTLLVPAINVNDSVTKSKFDNLYGCRESLVDGIKRATDVMMSGKVAIVAGFGDVGKGSAASLRQSGARVMVTETDPICALQAAMEGYEVVLMDEMIGQADIVVTATGNKDIVTADHMRDMKDRSILCNIGHFDNEIQVEALKNYKWDEIKPQVHEITFPE

SEQ ID NO: 169080 - protein, 108 aa, Unknown
  Bacterial polypetide isolated from the Sargasso Sea
MYKQKKMTDYKVKDINLADFGRKEISLAETEMPGLMALRKEYKGKSPLKGARILGCLHMTIQTAVLIETLVDLGAECRWSSCNIFSTQDHAAAAIAKSGTPVFAWKGE

SEQ ID NO: 169081 - protein, 256 aa, Unknown
  Bacterial polypetide isolated from the Sargasso Sea
GCRHSLNDALKRGTDMLLSGKKGLVIGYGDVGKGSAASLAQEGMIVRVVESDPICAMQACMDGFSVVSCYKDGVVTRDPKDINMEIIGDTDLIVTTTGNVNVCDSAMLSTLKNTAVVCNIGHFDNEIDTAFMRENYYWDEIKPQVHRIFRDTPPDGGPDLSSKNYIILLAEGRLVNLGNATGHPSRIMDGSFANQVLAQIHLYKQGFANVNDADKKAEMLTVEVLPKKLDEEVASLMVQGFGETVTQLTKEQADYI

SEQ ID NO: 169082 - protein, 160 aa, Unknown
  Bacterial polypetide isolated from the Sargasso Sea
IFVTATGNKDVITVDHMREMKDRAIVCNIGHFDSEIQVESLQNMKWSEVKPQVDEVEFQDGKRLIVLAKGRLVNLGCATGHPSFVMSASFTNQVLAQIELWEKPENYENKVYTLPRHLDEKVAKLHLDKVGATLSKLSNEQADYIGVPVQGPFKSDNYRY

SEQ ID NO: 169083 - protein, 121 aa, Unknown
  Bacterial polypetide isolated from the Sargasso Sea
ALKNYKWDEIKPQVHEITFPDNKRLILLAEGRLVNLGCATGHPSFVMSASFTNQVTAQIELWNNSDKYENKVYVLPKHLDEKVARLHLEKVGAKLTKLSKEQADYISVTTEGPYKPDAYRY

SEQ ID NO: 169084 - protein, 138 aa, Unknown
  Bacterial polypetide isolated from the Sargasso Sea
MSAVIQPQSDQDYVVADISLADFGRKEIAIAETEMPGLMALREKYGPSQPLKGARVAGSLHMTIQTAVLIETLRALGADVRWASCNIFSTQDHAAAAIAAGGTPVFAYKGENLVEYWAYTHRIFEWSDGGTPNMILDD

SEQ ID NO: 169085 - protein, 294 aa, Unknown
  Bacterial polypetide isolated from the Sargasso Sea
MSDYKVKDINEAEFGRKEISLAETEMPGLMALRTEYKGKHPLKGARILGCLHMTIQTAVLIETLVDLGAEVRWSSCNIFSTQDHAAAAIAKAGIPVFAWKGETEEEYWWCVRQTIEGKKDWKPNMILDDGGDLTALMHKDYKDLLKDIKGLSEETTTGVLALKKMEEQGTLLVPAINVNDSVTKSKFDNLYGCRESLVDGIKRATDVMMSGKVAIVAGFGDVGKGSAASLRQSGARVMVTETDPICALQAAMEGYEVVLMDEMIGQADIVVTATGNKDIVTADHMRAMKDRSIL

SEQ ID NO: 169086 - protein, 303 aa, Unknown
  Bacterial polypetide isolated from the Sargasso Sea
ILDDGGDLTALMHKDYKDLLKDIKGLSEETTTGVLALKKMESEGKLLVPAINVNDSVTKSKFDNLYGCRESLVDGIKRATDVMMSGKVAIVAGFGDVGKGSAASLRQSGARVMITETDPICALQAAMEGYEVVTMNDMIGQADIVVTATGNKDIVTADHMREMKDRAILCNIGHFDNEIQVEALRNYKWDEIKPQVHEITLPSKKRIILLAEGRLVNLGCATGHPSFVMSASFTNQTIAQIELWNNSDKYENKVYVLPKKLDEKVAMLHLEKVGAKLTKLSKDQAEYIGVSEQGPYKPEAYRY

SEQ ID NO: 169087 - protein, 218 aa, Unknown
  Bacterial polypetide isolated from the Sargasso Sea
GKVAIVAGFGDVGKGSAASLRQSGARVMVTETDPICALQAAMEGYEVVLLDEMIKEADIVVTATGNKDIVTADHMREMKDRAILCNIGHFDNEIQVEALKNYKWDEIKPQVHEITLPSKKRIILLAEGRLVNLGCATGHPSFVMSASFTNQVTAQIELWNNSDKYEKKVYVLPKHLDEKVARLHLDKVGAKLTKLSKDQADYISVKQEGPYKPDAYRY

SEQ ID NO: 169088 - protein, 305 aa, Unknown
  Bacterial polypetide isolated from the Sargasso Sea
TILKEKKTGKPNMILDDGGDLTALMHKEYKNLLKDVKGVSEETTTGVLALKKMEAAKELLIPAINVNDSVTKSKFDNLYGCRESLVDGIKRATDVMMSGKVAIVAGFGDVGKGSAASLRQAGARVMVTETDPICALQAAMEGYEVVVMDEAIKDADIVVTATGNKDIVTADHMRDMKDRAILCNIGHFDNEIQVEALKNYKWDEIKPQVHEIELPSKKRIILLAEGRLVNLGCATGHPSFVMSASFTNQVIAQIELWNNSDKYEKKVYVLPKHLDEKVAMLHLEKVGAKLTKMSKEQADYISVKP

SEQ ID NO: 169089 - protein, 246 aa, Unknown
  Bacterial polypetide isolated from the Sargasso Sea
MLMSGKKALVIGYGDVGKGSAQSLRQEGMIVKIVEVDPICAMQACMDGYEVVSAYKNGINTGKVESIDKELLATTDVLVTCTGNANVCDSAMLSTIKSGAIVCNIGHFDNEIDTEYMRDNWRWETVKDQVHQIYRSDNRDDYLILLSEGRLVNLGNAMGHPSRIMDGSFANQVLAQMHLYEQKWADQPENQRSPISVEVLPKKLDEEVAQLMVEGFGGLITKLTADQADYIGVTTEGPFKPEAYKY

SEQ ID NO: 169090 - protein, 205 aa, Unknown
  Bacterial polypetide isolated from the Sargasso Sea
MSKDFIVKDISLASFGRKEIAIAETEMPGLMAIRKEFEGKKPLRGARIAGSLHMTIQTAVLIETLVDLGADVRWASCNIFSTQDHAAAAIAESGVPVFAYKGETLDEYWEYADKIFLFKEETANLILDDGGDATMYVLLGSRAESGDTEFLEKPSSEEEEALFKQIKKRLQSSKGWFTKQKEAILGVSEETTTGVNRLYQLEREG

SEQ ID NO: 169091 - protein, 132 aa, Unknown
  Bacterial polypetide isolated from the Sargasso Sea
MVAAPTSPAELKLGVDCVIADINQADFGRKELDIAETEMPGLMALREKYGSEKPLKGARIAGSLHMTIQTAVLIETLVELGAEVRWASCNIFSTQDHAAAAIAASGVPVFAVKGETLEEYWDYTHRILEWGD

SEQ ID NO: 169092 - protein, 186 aa, Unknown
  Bacterial polypetide isolated from the Sargasso Sea
MVTKNEKISKIGTDYKVADISLAEFGKKEIKIAETEMPGLMAIREEYKNQKPLKGANILGCLHMTIQTAVLIETLVDLGASVRWSSCNIFSTQDHAAAAIASQNIPVYAWKGETEEEYNWCIKQTIEGDKDWKPNLLLDDGGDLTAIMHNDYPQLMSDIRGVSEETTTGVHRLYEMEKNIHSKFRL

SEQ ID NO: 169093 - protein, 186 aa, Unknown
  Bacterial polypetide isolated from the Sargasso Sea
DPICALQAAMEGYRVVTMDEACSQADIFVTATGNYNVIDKHHLEQMKDQAIVCNIGHFDNEINVESMKDHEWINIKPQVDHIVFPDGKRIILLAEGRLVNLGCGTGHPSFVMSNSFCNQTLAQIELFKNSSNYENQVYVLPKSLDEKVAKLHLDKIGAKLTKLTTEQAEYIGVKESGPYKPDHYRY

SEQ ID NO: 169094 - protein, 139 aa, Unknown
  Bacterial polypetide isolated from the Sargasso Sea
GRGDRLHIGHFDNEIDVASLKTYEWENIKPQVDHITLPSGNRIILLAEGRLVNLGCATGHPSFVMSNSFTNQVLAQIELFTKGSEYGKEVYVLPKHLDEMVARLHLDRIGAKLTELSKDQADYINVPVEGPFKPDHYRY

SEQ ID NO: 169095 - protein, 265 aa, Unknown
  Bacterial polypetide isolated from the Sargasso Sea
MSNDFKVKDINLAEFGRKEISIAESEMPGLMALRKEFKGKKPLKGANILGCLHMTIQTAVLIETLVDLGASVRWSSCNIFSTQDHAAAAIAKAGIPVFAWKGETEKEYWWCVEQTIEGDKNWKPNMILDDGGDLTGLMHKKYKDLLKNVKGVSEETTTGVLALKKMESNNELLIPAINVNDSVTKSKFDNLYGCRESLVDGIKRATDVMMSGKVAIVAGFGDVGKGSAASLRQAGARVMVTETDPICALQAAMEGYEVVLMDEAI

SEQ ID NO: 169096 - protein, 272 aa, Unknown
  Bacterial polypetide isolated from the Sargasso Sea
MCAGQVVIFFSTQDEAAAAIAKTKTPVFAWKGETLEEYWDCTLQALTFKNNLGPNLIVDDGGDATLLIHKGYELENYFNKHKKLPKITTKVEEEIVIEKLLRKVHKLNPNHWHNIVPDIIGVSEETTTGVARLQQMVEDASLLFPAFNVNDAATKSKFDNLYGCRESLADGIKRSTEIMLAGKTVVVCGYGDVGKGSAQSMKSYGCKVIVTEIDPICALQAAMEGFEVRRLEDVLNRGNIFVTTTGNKDIITLKHIRKMKDQAIVCNIDILI

SEQ ID NO: 169097 - protein, 253 aa, Unknown
  Bacterial polypetide isolated from the Sargasso Sea
IETLVELGAEVTWSSCNIFSTQDHAAAAIAEAGIPVFAWKGMNDEEFDWCIEQTLTAFEGGKPLNIILDDGGDLTNMVFDNFPHLAKDIKGLSEETTTGVHRLYEREKNGTLVMPAINVNDSVTKSKFDNKYGCRESLVDGIRRATDVMMAGKVAVVAGYGDVGKGSADSLRGAGARVIVTEIDPICALQAAMEGFEVKNMDNAIPEADIVVTTTGNFNIIVGRHFEAMKDKAIVCNIGHFDNEIDMAWLNQN

SEQ ID NO: 169098 - protein, 179 aa, Unknown
  Bacterial polypetide isolated from the Sargasso Sea
RATDIMLAGKRVLVAGYGDVGKGTAASFQGAGSIVTISEIDPICALQAAMDGFEVKKIMSIIENMDIIVTATGNKDIIGEDAFLKMKDKAIICNIGHFDNEIDMNWLNKNFGHTKTEIKPQVDIYTLKSSKQLIILAEGRLVNLGCATGHPSFVMSNSFTNQTLAQIELWSSSKNYENK

SEQ ID NO: 169099 - protein, 162 aa, Unknown
  Bacterial polypetide isolated from the Sargasso Sea
MVTVLEENDGGAAFQVSDISLSEFGRKEIEIAEHEMPGLMAIREKYASEKPLQGVRITGSLHMTIQTAVLIETLVDLGASVRWASCNIFSTQDHAAAAIAKSGVPVFAWKGMSLEEYWDCTLKAISHPGGLGPELIVDDGGDATLLIHKGYELEKGSDWIDT

SEQ ID NO: 169100 - protein, 312 aa, Unknown
  Bacterial polypetide isolated from the Sargasso Sea
LAEAEMPGLMALRAKLKKEKPLKGARIAGCLHMTIQTAVLIETLIDLGAEVTWSSCNIFSTQDHAAAAIASMGIPVYAWKGMNEEEFNWCIEQTLFFGEKRDPLNMILDDGGDLTNMVLDQYPELVPGIKGLSEETTTGVHRLYDRMKAGKLPLPAINVNDSVTKSKFDNKYGCKESAVDAVRRATDIMLAGKRVVVCGYGDVGKGTAASFRGAGSIVTVTEIDPICALQASMDGYEVKKLNTVIKNADIVITATGNKDIVTKEHFKAMKDKTIVCNIGHFDNEIDMDWLNSNYGDTKSNIKPQVDIYTIDS

SEQ ID NO: 169101 - protein, 203 aa, Unknown
  Bacterial polypetide isolated from the Sargasso Sea
SAQSLRGLGATVWITEIDPICALQAAMEGYRVVTMDDACSQADIFVTATGNYNVIDKHHLEQMKDQAIVCNIGHFDNEINVESMKDHEWINIKPQVDHIVFPDGKRIILLAEGRLVNLGCGTGHPSFVMSNSFCNQTLAQIELFKNSSNYENQVYVLPKSLDEKVAKLHLDKIGAKLTKLTTEQAEYIGVKESGPYKPDHYRY

SEQ ID NO: 169102 - protein, 137 aa, Unknown
  Bacterial polypetide isolated from the Sargasso Sea
MLLVIGDMEKNMDYKVADIGLAEFGRKEIFLAEKEMPALIAIRKKYEKEQPLSGAKIIGCIHMTIQTAVLIETLVHLGAEVRWSSCNIFSTQDHAAAAMADAGIPVFAWKGETEEEYLQCIENTILVDGKPWDANLL

SEQ ID NO: 169103 - protein, 97 aa, Unknown
  Bacterial polypetide isolated from the Sargasso Sea
MANEDFKVADIEQAEFGRKEISLAETEMPGLMALREEYNGQKPLDGARIVGCLHMTIQTAVLIETLVELGADVRWSSCNIFSTQDHAAAAIAKAGIP

SEQ ID NO: 169104 - protein, 259 aa, Unknown
  Bacterial polypetide isolated from the Sargasso Sea
MGFLHIFSTQDHAASAIAESGIPVFAVKGETLEEYWEYADKIFNFEEGTCNLILDDGGDATMYILLGARAENGDTQFLENPSSEEEIFLFSQIRKRIENNPGWFVKQRDEILGVSEETTTGVHRLYQLMEKGELPFPAINVNDSVTKSKFDNKYGCKESLVDGIRRATDTMLAGKTAVVCGYGDVGKGSAASLSGSGARVKVTEVDPICALQAAMDGFEVIKIEDALETADIFITATGNKDVIKIDHMRKMKNMAIVGN

SEQ ID NO: 169105 - protein, 111 aa, Unknown
  Bacterial polypetide isolated from the Sargasso Sea
MEDFKVKDLNQAEFGRKEISIAESEMPGLMALREEYSGNLPLKGAKIIGCLHMTIQTAVLIETLVALGAEVRWSSCNIFSTQDHAAAAIAKAGIPVYAWKGETEEEYIWCI

SEQ ID NO: 169106 - protein, 293 aa, Unknown
  Bacterial polypetide isolated from the Sargasso Sea
EAAFMTDYKVKDINLADFGRKEISLAETEMPGLMALRKEYKGKNPLKGAKILGCLHMTIQTAVLIETLVELGAEVRWSSCNIFSTQDHAAAAIAKAGIPVFAWKGETEEEYWWCVRQTIEGKKDWKPNMILDDGGDLTALMHKDYKELMKSIKGLSEETTTGVLALKKMQSEGTLLVPAINVNDSVTKSKFDNLYGCRESLVDGIKRATDVMMSGKVAIVAGFGDVGKGSAASLRQSGARVMVTETDPICALQAAMEGYEVVLMDEMIKEADIIVTATGNKDIVTADHMRAMK

SEQ ID NO: 169107 - protein, 203 aa, Unknown
  Bacterial polypetide isolated from the Sargasso Sea
MVIANSIKTSLPNYVIADISLSDFGRKEIKIAETEMPGLMALRDKYQSEMPLKGAKIAGSLHMTIQTAVLIETLVSLGAEVKWASCNIFSTQDHAAAAIADQGIPVYAKKGETLDEYWKYTHYILDWGSDSPNMILDDGGDATGLLILGSKAEKDLSVLDNPINEEEIALFNSIKSKLKNDSDFYSRIKSNIIGVTEETTTGV

SEQ ID NO: 169108 - protein, 288 aa, Unknown
  Bacterial polypetide isolated from the Sargasso Sea
MALRDEYKGQKPLDGARIVGCLHMTIQTAVLIETLVELGADVRWSSCNIFSTQDHAAAAIAKAGIPVYAWKGETEEEYWWCVRQTIEGKEGWKPNLILDDGGDLTGLMHKEYKELLHDVRGLSEETTTGVLALKKMEIDGTLMVPAINVNDSVTKSKFDNLYGCRESLVDGIKRATDVMMSGKVAIVAGFGDVGKGSAASLRQSGARVMVTEADPICALQAAMEGYEVVTMDDMIKEADIVVTATGNKDIVTADHMREMKDRAILCNIGHFDNEIQVEALKNYKWDEI

SEQ ID NO: 169109 - protein, 262 aa, Unknown
  Bacterial polypetide isolated from the Sargasso Sea
PALMSLREKFREQQPLQGARILGCIHMTVQTAVLIETLIALGAEVRWSSCNIFSTQDHAAACIAAQGIAVYAWKGQTEEEGMWCVEQTILKNGAPWDANMILDDGGDLTAMVHEKYPNMLKYIHGITEETTTGVLRLIEMKGKGTLKVPAINVNDSVTKSKNDNKYGCRHSLNDGIKRGTDMLLSGKHALVIGYGDVGKGSAQSLRQEGMIVKVAEIDPICAMQACMDGFEVDSPYKLGENTGDESAINEALLSKMDMIVTA

SEQ ID NO: 169110 - protein, 303 aa, Unknown
  Bacterial polypetide isolated from the Sargasso Sea
NIFSTQDHAAAAIAKAGIPVYAWKGETEEEYLWCIKQTIIAKSDWKPNMLLDDGGDLTAIMHNEYKELMKDVKGVSEETTTGIKALNKMEKDKSLLVPAINVNDSVTKSKFDNLYGCRESLVDGIRRATDVMMSGKIAIVAGFGDVGKGSAASLRQSGARVLVTEADPICALQAAMEGYEVVLMEEAISRADIVVTATGNKDIVTADHMRDMKDRAILCNIGHFDNEIQVEALKNYKWTEVKPQVHEIELPGGKRIILLAEGRLVNLGCATGHPSFVMSASFTNQVIAQIELWHNHKNYENKV

SEQ ID NO: 169111 - protein, 209 aa, Unknown
  Bacterial polypetide isolated from the Sargasso Sea
MSDYKVKDINDAEFGRKEISLAETEMPGLMALRTEYKGKHPLKGARILGCLHMTIQTAVLIETLVDLGAEVRWSSCNIFSTQDHAAAAIAKAGIPVFAWKGETEEEYWWCVKQTIEGKKDWKPNMILDDGGDLTALMHKDYKDLLKDIKGLSEETTTGVLALKKMEENGTLLVPAINVNDSVTKSKFDNLYGCRESLVDGIKRATDVMM

SEQ ID NO: 169112 - protein, 114 aa, Unknown
  Bacterial polypetide isolated from the Sargasso Sea
TEVKPQVDEVEFNDGKKIIILAKGRLVNLGCATGHPSFVMSASFTNQVLAQMEIWESFEKYDNKVYTLPKHLDEKVAKLHLEKVGAVLTKLTDEQANYIGVSSKGPFKSDNYRY

SEQ ID NO: 169113 - protein, 248 aa, Unknown
  Bacterial polypetide isolated from the Sargasso Sea
SATKSKFDNLYGCRESLVDSIKRATDVMVAGKLAVVLGYGDVGKGSAQSLRGLGATVWITEIDPICALQAAMEGYRVVTMEEAASQADIFVTATGNFEVITHDHMKQMKDQAIVCNIGHFDNEIACASLEQYEWENIKPQVDHVIFPDGKRIILLAQGRLVNLGCATGHPSFVMSASFTNQTLAQIELFQKRDQYENKVYILPKHLDEMVARLHLEKIGAKLTQLTDQQAAYIDVSADGPYKADHYRY

SEQ ID NO: 169114 - protein, 282 aa, Unknown
  Bacterial polypetide isolated from the Sargasso Sea
MILDDGGDLTALMHKDYKDLLKDIKGLSEETTTGVLALKKMESEGTLLVPAINVNDSVTKSKFDNLYGCRESLVDGIKRATDVMMSGKVAIVAGFGDVGKGSAASLRQSGARVMVTETDPICALQAAMEGYEVVLMDDMIKEADIVVTATGNKDVVTADHMRDMKDRAILCNIGHFDNEIQVEALKNYKWDEIKPQVHEITLPSDKRIILLAEGRLVNLGCATGHPSFVMSASFTNQVTAQIELWNNSDKYEKKVYVLPKHLDEKVARLHLEKVGAKLTKLS

SEQ ID NO: 169115 - protein, 298 aa, Unknown
  Bacterial polypetide isolated from the Sargasso Sea
MENDYKVADIKLAEFGRREISLAENEMPALMALRDKYRDEQPLAGAKIMGCIHMTIQTAVLMETLLDLGAELRWSSCNIFSTQDHAAAAMAAKGVPVFAWKGETEEEYEWCIEQTICKDGKPWDANMILDDGSDLTAMVHAKFPDMLETIHGVSEETTTGVHRLKEMLEKGELKIPAINVNDSVTKAKNDNKYGCRHSLNDALKRGTDMLLSGKKGLVIGYGDVGKGSAASLAQEGMIVSVVESDPICAMQACMDGFAVVSCYKNGVVTRDPKDINMDVMGDTDLIVTTTGHVNVCDS

SEQ ID NO: 169116 - protein, 262 aa, Unknown
  Bacterial polypetide isolated from the Sargasso Sea
GETEEEYWWCVKQTIEGKKDWKPNMILDDGGDLTALMHKDYKNLLKDIKGLSEETTTGVLALKKMEAQGTLLVPAINVNDSVTKSKFDNLYGCRESLVDGIKRATDVMMSGKVAIVAGFGDVGKGSAASLRQSGARVMVTETDPICALQAAMEGYEVVLMDEMIKEADIVVTATGNKDIVTADHMRDMKDRAILCNIGHFDNEIQVEALKNYKWDEIKPQVHEITLPSKKRIILLAEGRLVNLGCATGHPSFVMSASFTNQV

SEQ ID NO: 169117 - protein, 317 aa, Unknown
  Bacterial polypetide isolated from the Sargasso Sea
IAETEMPGLMSIREEFGAEKPLKGARIAGCLHMTIQTAVLIETLIELGADIRWSSCNIFSTQDHAAAALAAKGIPIFAWKDESEEEYWWCVEQTINGPNGWTPNLILDDGGDLTGLMHDKYPELMKDIIGVSEETTTGVLRLYNMEKDGTLMCPAINVNDSVTKSKFDNLYGCRESLVDGIKRATDVMVAGKIAIVAGYGDVGKGSAQSLRGLGATVWITEIDPICALQAAMEGYRVVTMDDACSQADIFVTATGNYNVIDKHHLEQMKDQAIVCNIGHFDNEINVESMNDLEWINIKPQVDHIVFPDGKRIILLAE

SEQ ID NO: 169118 - protein, 232 aa, Unknown
  Bacterial polypetide isolated from the Sargasso Sea
MTDYKVKDISEAEFGRKEISLAETEMPGLMALRKEYKGKKPLKGAKILGCLHMTIQTAVLIETLVDLGAEVRWSSCNIFSTQDHAAAAIAKAGIPVFAWKGETEEEYWWCVRQTIEGKKDWKPNMILDDGGDLTALMHKDYKNLMKDIKGLSEETTTGVLALKKMEEQGTLLVPAINVNDSVTKSKFDNLYGCRESLVDGIKRATDVMMSGKVAIVAGFGDVGKGSAASLRT

SEQ ID NO: 169119 - protein, 180 aa, Unknown
  Bacterial polypetide isolated from the Sargasso Sea
MSNSTTTTSLVDLLPYKIKDIALSKDGRNAIEISEKEMPGLMATREKYGSGKPLKGKKITGSLHMTIETAVLIDTLVDLGADVRWASCNIFSTQDHAAAAVADSGVPVFAWKGETLEEYWWCTMQALTWPDGSGPDLIVDDGGDATLLIHKGYELEEFYEKNNYVPEIKTTKKKKLLLKS

SEQ ID NO: 169120 - protein, 257 aa, Unknown
  Bacterial polypetide isolated from the Sargasso Sea
MFKDFVIKDISLADFGNKEIELAKNEMPGLVALTDEYKEQKPLSGARIVGCLHMTIQTAVLIETLVELGAKVRWASCNIFSTQDHAAAAMAKKEIPVFAYKNESLEEYWEFVDRIFQWEDGDPNMILDDGGDATIYIILGARYEKNKSVIDNPQNEEEEVLFKQIKKRSDLSPNWFSKIKDQIIGVTEETTTGVNRLKMMENDNTLPFAAINVNNSVTKSKFDNLYGCRESLIDGIRRATDVMIAGKLAVVAGYGDV

SEQ ID NO: 169121 - protein, 183 aa, Unknown
  Bacterial polypetide isolated from the Sargasso Sea
MVIANSVKTSTPNYVIADISLSDFGRKEIKIAETEMPGLMALRDKYQSEKPLKGAKIAGSLHMTIQTAVLIETLVDLGAEVKWASCNIFSTQDHAAAAIADQGVSVYAKKGETLDEYWQYTHYILDWGSDSPNMILDDGGDATGLLILGSKAEKDLSVLDNPGNEEEIALFSSIKSKLENDSD

SEQ ID NO: 169122 - protein, 205 aa, Unknown
  Bacterial polypetide isolated from the Sargasso Sea
MEDFKVKDISQAEFGRKEISLAETEMPGLMAIRKEYKGKSPLKGARIVGCLHMTIQTAVLIETLVELGADVRWSSCNIFSTQDHAAAAIAKVGIPVFAWKGETEEEYWWCVKQTIVGKKGWEPNMILDDGGDLTALMHKEYKELLKNVKGLSEETTTGVLALKKMQEKGTLMVPAINVNDSVTKSKFDNLYGCRESLVDGIKRAT

SEQ ID NO: 169123 - protein, 286 aa, Unknown
  Bacterial polypetide isolated from the Sargasso Sea
MSYKKYIPFKVKDVSLADWGRKEIKLAEAEMPGLMALRDEYGNSKPLKGARIAGCLHMTIQTAVLIETLVELGAQVTWSSCNIFSTQDHAAAAIAAAGIPVYAWKGMNEEEFKWCIEQTVFFGKDKKPLNMILDDGGDLTNLVLDHYPDLVDEIKGLSEETTTGVHRLYERVKNGTLPLPAINVNDSVTKSKFDNKYGCQESAVDAVRRATDIMMAGKRVVVAGYGDVGKGTVASFSGAGAIVTVVEIDPICALPASMDGYEVKKMKTVIGNADIIVTATGNKDIP

SEQ ID NO: 169124 - protein, 155 aa, Unknown
  Bacterial polypetide isolated from the Sargasso Sea
QGNKDVIRIEHMREMKDMAIVANIGHFDNEIQVAHLKNHKWTNIKDQVDMIEMPSGNRLILLSEGRLLNLGNATGHPSFVMSASFTNQVLAQIELWKKGGEYKNDVYILPKHLDEKVARLHLERIGVKLTKLATDQAEYIGVTPEGPFKPEHYRY

SEQ ID NO: 169125 - protein, 197 aa, Unknown
  Bacterial polypetide isolated from the Sargasso Sea
MANVIEKIKDDFKVADISLAEWGDKEIKIAETEMPGLMSVREKYAGKQPLKGANIVGCLHMTIQTAVLIETLIELGASVRWSSCNIFSTQDHAAAALAAKGIPIFAWKGETEEEYLWCIKKSIEGNPSWKPNMILDDGGDLTSIMHKNYPELLANVKGLSEETTTGVLRLNEMVANKELKVPAFNVNDSVTKSKFDN

SEQ ID NO: 169126 - protein, 183 aa, Unknown
  Bacterial polypetide isolated from the Sargasso Sea
CALQAAMEGYEVVLMDDMIKHADIVVTATGNKDIITADHMRDMKDRAILCNIGHFDNEIQVEALRNYKWDEIKPQVHEIELPSKKRIILLAEGRLVNLGCATGHPSFVMSASFTNQVTAQIELWNNFDKYKKKVYVLPKHLDEKVAMLHLEKVGAKLTKLSKEQADYISVKQEGPYKPDAYRY

SEQ ID NO: 169127 - protein, 269 aa, Unknown
  Bacterial polypetide isolated from the Sargasso Sea
KEIPVFAWKGESEEEFWWCIEQTIKGPDGWKPNLILDDGGDLTKLMHEKYPEMMDDIKGLSEETTTGVLRLIEMEKNETLKVPAINVNDSVTKSKFDNKYGCRESLVDGIRRATDVMMAGKVAVVAGYGDVGKGSAESLRNAGCRVLVTEVDPICALQAAMDGFEVTTMEEASERADIFVTATGNIDVITVDHMRSMKDRSIVCNIGHFDSEIQIESLKNYKWNNIKAQVDEIEFPDGKKIIVLAEGRLVNLGCATGHPSFVMSASFCN

SEQ ID NO: 169128 - protein, 139 aa, Unknown
  Bacterial polypetide isolated from the Sargasso Sea
MSDFKVKDISLAEFGRKEISLAETEMPGLMALRKEYKGKNPLKGARILGCLHMTIQTAVLIETLVDLGAEVRWSSCNIFSTQDHAAAAIAKAGIPVFAWKGETEEEYWWCVKQTIEGKKDWKPNMILGDGGDLTALMHK

SEQ ID NO: 169129 - protein, 246 aa, Unknown
  Bacterial polypetide isolated from the Sargasso Sea
KYGCRHGLDDAIKRGTDMLLSGKKALVIGYGDVGKGSADSLMQQKMIVDVTEVDPICAMQACFDGFSVVSAYKEGNVSRDGTNLDKNLLKKYDLVVTTTGNINVLDKYMLDSLKSGCVICNIGHFDNEIDVNYLKSFKWYEVKQGVHKIIRSKDDYLILLGEGRLVNLALATGHPSRVMDGSFCNQVLAQIALYKDSFATKKEDEKEIYVKVLPKELDEEVAQMMVVGFGGTLTKLTEEQSKYIGV

SEQ ID NO: 169130 - protein, 226 aa, Unknown
  Bacterial polypetide isolated from the Sargasso Sea
MENDYKVADMSLADFGRREISLAENEMPALMALRTKYKDAQPLKGAKVMGCIHMTIQTAVLIETLVDLGAEVRWSGCNIFSTQDHAAAAIAAAGIPVFAWKGQTDEEFDWCIEQTILKDDQPWDANMILDDGGDLTHMVHTKFPDMLDTIHGVSEETTTGVHRLKAMLESNTLKVPAINVNDSVTKSKNDNKYGCRHSLNDGIKRATDMFLSSKKALVIGYGDVEK

SEQ ID NO: 169131 - protein, 288 aa, Unknown
  Bacterial polypetide isolated from the Sargasso Sea
VRWSGANIFSTQDHAAAAIAAAGIPVFAWKGQTDEEFDWCMEQTIVKDGAPWDANMILDDGGDLTHMVHSKFPDMLESIHGISEETTTGVHRLKAMLEKNELKVPAINVNDSVTKSKNDNKYGCRHSLNDAIKRGTDMFLSSKKALVIGYGDVGKGSALSLAQEGMIVRVVESDPICAMQACMDGFEVVSTYNNGVVTRDVKDINTAVLEDTDLIVTTTGNVNVCDEAMLRSVKNTAVICNIGHFDNEIDTQFMRDKWYWEEIKPQVHRVFRDTSPSETPNLQSKNYV

SEQ ID NO: 169132 - protein, 190 aa, Unknown
  Bacterial polypetide isolated from the Sargasso Sea
MSQQYIVKDISLSDFGRKELSIAETEMPGLMALRSEYGESKPLKGARIVGSLHMTIQTAVLIETLVALGADVRWASCNIFSTQDHAAAAIAAANIPVFAIKGQSLEEHWDYLDQSFMFPDGPNMILDDGGDATLYVLLGARAEEGEDIIPVPQSEEEEVIKAQIKKRMEQSPGWFTKTQDAIKGVSEETT

SEQ ID NO: 169133 - protein, 257 aa, Unknown
  Bacterial polypetide isolated from the Sargasso Sea
MHKDYKELMKDIKGLSEETTTGVLALKKMEQDGTLLVPAINVNDSVTKSKFDNLYGCRESLVDGIKRATDVMMSGKVAIVAGFGDVGKGSAASLRQSGARVMVTETDPICALQAAMEGYEVVTMDDMISQADIVVTATGNKDIVTADHMREMKDRAILCNIGHFDNEIQVDALKNYKWDEIKPQVHEITLPSNKRIILLAEGRLVNLGCATGHPSFVMSASFTNQVTAQIELWNNSEKYEKKVYVLPKHLDEKVAML

SEQ ID NO: 169134 - protein, 294 aa, Unknown
  Bacterial polypetide isolated from the Sargasso Sea
LKGSRIAGCLHMTIQTAVLIETLVDLGAEVTWSSCNIFSTQDHAAAAIAANGIAVYAWKGMTEEEFNWCIEQTLFFGEEKNPLNMILDDGGDLTNMVLDEYPELVSEIKGLSEETTTGVHRLYDRMKNGTLPLPAINVNDSVTKSKFDNKYGCKESAVDAVRRATDIMLAGKRVVVCGYGDVGKGTAASFRGAGSIVTVTEIDPICALQASMDGYEVKKLKSVISNADIVITATGNKDIVNSESFKMMKDKAIVCNIGHFDNEIDMSWLETNFSEQKTTIKPQVDSYRISKDKE

SEQ ID NO: 169135 - protein, 263 aa, Unknown
  Bacterial polypetide isolated from the Sargasso Sea
WCLDQTINKDGKPWDANMILDDGGDLTLKVHKDYPEMLSKIHGVSEETTTGVKRLKEMLESGELKVPAINVNDSITKSKNDNKYGCRHGLDDAIKRGTDMLLSGKKALVIGYGDVGKGSADSLNQQKMIVDITEIDPICAMQACFDGFNVVSAYENGNVSKDGKNLDKKLLGKYDLVVTTTGNINVLDKHMLDALKSGCVVCNIGHFDSEIDVKHLKNYEWKEIKPGVHKVIKNEDDYIILLGEGRLVNLALATGHPSRVMDG

SEQ ID NO: 169136 - protein, 182 aa, Unknown
  Bacterial polypetide isolated from the Sargasso Sea
TDVLVTTTGNVNVCDSALLSTLKDGAVVCNIGHFDTEIDTKYMQEKWYWEEVKPQVHRIFRDCSPDQEPDLSSKNYLILLAEGRLVNLGNATGHPSRIMDGSFANQVLAQMHLYSAGFANVNDEDKKKELIQVEVLPKKLDEEVASLMVQGFGGVVTKLTEEQADYINVPQDGPFKEDSYKY

SEQ ID NO: 169137 - protein, 130 aa, Unknown
  Bacterial polypetide isolated from the Sargasso Sea
FDNEIQVDKLNESSNVQRDTIKPQVDRYTFDDGHSVYLLAEGRLMNLGCATGHPSFVMSNSFTNQVLAQIALVKDKPDLGVYMLPKELDEEVARLHLSHLGVTLTELSDEQADYIGVSKSGPFKPEHYRY

SEQ ID NO: 169138 - protein, 260 aa, Unknown
  Bacterial polypetide isolated from the Sargasso Sea
CLHMTIQTAVLIETLVFLGATVRWSSCNIFSTQDHTAAAIAAKGIPVFAWKGMTEEEFWWCIEKTLQGPDGWKPNMILDDGGDATKIIHEKYPKMLEEILGLSEETTTGVHRLKEMEKNGTLKVPAINVNDSVTKSKFDNLYGCKESLVDGIRRRTDVMMAGKIAVVAGYGDVGKGSAASLRGAGARVCVTEINPINALQAAMEGYEVVTMDDACKYGDIFVTATGNLDVITQDHMRQMRDRAIVCNIGHFDNEIQTEAL

SEQ ID NO: 169139 - protein, 284 aa, Unknown
  Bacterial polypetide isolated from the Sargasso Sea
MRKEYKGKNPLKGARILGCLHMTIQTAVLIETLVDLGAEVRWSSCNIFSTQDHAAAAIAKAGIPVFAWKGETEEEYWWCVKQTIEGKKDWKPNMILDDGGDLTALMHKDYKDLLKDIKGLSEETTTGVLALKKMESQGTLLVPAINVNDSVTKSKFDNLYGCRESLVDGIKRATDVMMSGKVAIVAGFGDVGKGSAASLRQSGARVMVTETDPICALQAAMEGYEVVLMDEMIKEADIVVTATGNKDIVTADHMRDMKDRAILCNIGHFDNEIQVEALKNYKWG

SEQ ID NO: 169140 - protein, 267 aa, Unknown
  Bacterial polypetide isolated from the Sargasso Sea
KEISLAETEMPGLMALRKEYKGKNPLKGARILGCLHMTIQTAVLIETLVDLGAEVRWSSCNIFSTQDHAAAAIAKVGIPVFAWKGETEEEYWWCVKQTIEGKKDWKPNMILDDGGDLTALMHKDYKDLLKDIKGLSEETTTGVLALKKMEAQGTLLVPAINVNDSVTKSKFDNLYGCRESLVDGIKRATDVMMSGKVAIVAGFGDVGKGSAASLRQSGARVMVTETDPICALQAAMEGYEVVLMDEMIKEADIVVTATGNKDIVTAD

SEQ ID NO: 169141 - protein, 106 aa, Unknown
  Bacterial polypetide isolated from the Sargasso Sea
EVEFPDGKKIILLSEGRLVNLGNATGHPSFVMSASFSNQVIAQIELWENYKNYENKVYVLPKKLDEKVAALHLKKVGAKLTELSEKQADYIGVSKVGPFKDETYRY

SEQ ID NO: 169142 - protein, 63 aa, Unknown
  Bacterial polypetide isolated from the Sargasso Sea
MTDYKVKDINEAEFGRKEISLAETEMPGLMALRKEYKGKNPLKGARILGCLHMTIQTAVLIEL

SEQ ID NO: 169143 - protein, 161 aa, Unknown
  Bacterial polypetide isolated from the Sargasso Sea
VKNTAVICNIGHFDNEIDTQYMRDKWYWEEIKPQVHRVFRDTSPSDTPDLQSKDYVILLAEGRLVNLGNATGHPSRIMDGSFANQVLAQMHLYKQGFANINDADKQNEMITVEVLPKKLDEEVAELMVQGFGGTITKLTGEQADYINVPVDGPFKEEEYKY

SEQ ID NO: 169144 - protein, 265 aa, Unknown
  Bacterial polypetide isolated from the Sargasso Sea
MNNKIKCDIKDINLAKEGALRAEWASKEMPVLHSIKERFIKEKPLKGTKISGCLHITAETANLVETLSAGGADVFMCASNPLSTQDDIAAYLVSQGISVYAINGEDDNTYDSHLEAVLSEKPNLTIDDGADLVAKLHGDNHPGLENIIGSMEETTTGIIRLKALSSEGKLKFPVIAVNDSDTKHMFDNRYGTGQSTLDGIIRATNILLAGKTIVIIGYGWCGRGLASRAQGMGARTVVCEVDSVKALEAIMDNHEVMTMEEASKI

SEQ ID NO: 169145 - protein, 327 aa, Unknown
  Bacterial polypetide isolated from the Sargasso Sea
AVLIETLVELGAEVRWSSCNIFSTQDHAAAAIAKAGIPVFAWKGETEEEYWWCVKQTIEGKKDWKPNMILDDGGDLTALMHKDYKELMKSIKGLSEETTTGVLALKKMQSEGKLLVPAINVNDSVTKSKFDNLYGCRESLVDGIKRATDVMMSGKVAIVAGFGDVGKGSAASLRQSGARVMVTETDPICALQAAMEGYEVVLMDEMIKEADIVVTATGNKDIVTADHMRDMKDRAILCNIGHFDNEIQVEAMKNYKWDEIKPQVHEITFPDGKRIILLAEGRLVNLGCATGHPSFVMSASFTNQVTAQIELWNNSDKYEKKVYVFAK

SEQ ID NO: 169146 - protein, 300 aa, Unknown
  Bacterial polypetide isolated from the Sargasso Sea
LTFPDGSGPDLIVDDGGDATLLIHKGYQLEEYYASYNNIPEIKTEVEEEQIIEKLLRDVLAKDPNHWHRVQKNVIGVSEETTTGVHRLVQMEKDGHLLFPAYNVNDSVTKSKFDNVYGCKESLADGLKRSLDIMVAGKTVVICGYGDVGRGCAQSMKGYGARVIVTEIDPICALQAAMEGFEVTTLEDSLSDGHIFVTTTGNKDVITVEHMYGMRDQAIVCNIGHFDNEIQVYALNEDSSVHREIIKPQVDRYTFPNGNQVFLLAEGRLVNLGCATGHPSFVMSNSFTNQVMAQIALAKE

SEQ ID NO: 169147 - protein, 262 aa, Unknown
  Bacterial polypetide isolated from the Sargasso Sea
TDGTLMVPAINVNDSVTKSKFDNLYGCRESLVDSIRRATDVMMSGKVAIVAGFGDVGKGSAASLRQSGARVLVTETDPICALQAAMEGYEVVLMDEMIKEADIVVTATGNKDIVTADHVRDMKDRAILCNIGHFDNEIQVDALKNYKWDEIKPQVHEITLPDGKRIILLAEGRLVNLGCATGHPSFVMSASFTNQVTAQMELWNHSDKYETKLYVLPKHLDEKVARLHLEKVGAKLTKLSKDQADYISVTPEGPYKPEAYRY

SEQ ID NO: 169148 - protein, 139 aa, Unknown
  Bacterial polypetide isolated from the Sargasso Sea
MSQDYKVKDMELAEWGLKEIAIAETEMPGLMALREEYGNSKPLNGARIVGCLHMTIQTAVLIETLVHLGASVRWSSCNIFSTQDQAAAAIASKNIPVFAWKGMSEDEFWWCIEQTLQGPDGWKPKHDFRKWRRCNANNP

SEQ ID NO: 169149 - protein, 125 aa, Unknown
  Bacterial polypetide isolated from the Sargasso Sea
MTQPSSYKVKDIGLASWGRKEITLAEKEMPGLMALREEYGPSQPLKGARIAGCLHMTIQTAVLIETLVALGAEVTWSSCNIFSTQDHAAAAIAEAGIAVYAWKGMNEEEFDWCIEPDPFLGEERQ

SEQ ID NO: 169150 - protein, 112 aa, Unknown
  Bacterial polypetide isolated from the Sargasso Sea
MVTKTEKISKIGTDYKVADISLAEFGKKEIKIAETEMPGLMAIREEYKNQKPLKGANILGCLHMTIQTAVLIETLVDLGASVRWSSLYIFSTQDHAAGCIASQNIPVYAWKG

SEQ ID NO: 169151 - protein, 154 aa, Unknown
  Bacterial polypetide isolated from the Sargasso Sea
MPQDFKVKDINQADFGRKEISLAETEMPGLMALRKEYKGKKPLKGAHILGCLHMTIQTAVLIETLVDLGAEVRWSSCNIFSTQDHAAAAIAKAGIPVFAWKGETEEEYWWCVKQTIEGKKDWKPNMILDDGGDLTALMHKDYEDMLKNIKGVSE

SEQ ID NO: 169152 - protein, 248 aa, Unknown
  Bacterial polypetide isolated from the Sargasso Sea
MSQSRTSGDIKDINLAPEGIRRIKWAEREMPVLRQIKQRFAQEKPLKGMKIAACLHVTTETANLMITLKEGGADVTICASNPLSTQDDVAAALVAEYGINTYAIKGEDRDTYYNHLVSTLETRPHMTMDDGADLVAMLHGERSDLMENIVGGTEETTTGVIRLKSLADEGNLKYPVIAVNDADTKHFFDNRYGTGQSTLDGITRATNILWAGKTVVVIGYGWCGRGVAARARGMGAQTVVCEVNHIRG

SEQ ID NO: 169153 - protein, 287 aa, Unknown
  Bacterial polypetide isolated from the Sargasso Sea
KELLKDIKGLSEETTTGVLALKKMEEQGTLLVPAINVNDSVTKSKFDNLYGCRESLVDGIKRATDVMMSGKVAIVAGFGDVGKGSAASLRQSGARVMVTETDPICALQAAMEGYEVVLMDEVIGQADIVVTATGNKDIVTADHMRAMKDRSILCNIGHFDNEIQVEALKNYKWDEIKPQVHEITFPDNKRLILLAEGRLVNLGCATGHPSFVMSASFTNQVTAQIELWNNSDKYEKKVYVLPKHLDEKVARLHLEKVGAKLTPLSKDQADYISVKTEGPYKPDTYRY

SEQ ID NO: 169154 - protein, 87 aa, Unknown
  Bacterial polypetide isolated from the Sargasso Sea
MSEDFKVKDISLSDFGDKEIAIAETEMPGLMALREEYKDSKPLDGARIVGCLHMTIQTAVLIETLVYLGATVRWSSCNIFSTQDHAA

SEQ ID NO: 169155 - protein, 224 aa, Unknown
  Bacterial polypetide isolated from the Sargasso Sea
MEDYKVKDISQAEFGRKEISIAESEMPGLMALREEYSKEKPLKGARIIGCLHMTIQTAVLIETLVALGADVRWSSCNIFSTQDHAAAAIAKAGIPVYAWKGETEEEYLWCIKQTIVGKPDWKPNMLLDDGGDLTAIMHNEFQDLMKDIKGVSEETTTGIKALNKMEKDKSLLVPAINVNDSVTKSKFDNLYGCRESLVDGIRRATDVMMSGKIAVVAGLEMWKR

SEQ ID NO: 169156 - protein, 240 aa, Unknown
  Bacterial polypetide isolated from the Sargasso Sea
NLYGCRESLVDGIKRATDVMMSGKVAIVAGFGDVGKGSAASLRQSGARVMVTETDPICALQAAMEGYEVVLMDEAISQADIVVTATGNKDVVTADHMRAMKDRSILCNIGHFDNEIQVEALKNYKWDEVKPQVHEITFPDNKRLILLAEGRLVNLGCATGHPSFVMSASFTNQVTAQIELWNNSEKYENKVYVLPKHLDEKVARLHLDKVGAKLTPLSKEQADYISVTPEGPYKPDAYRY

SEQ ID NO: 169157 - protein, 311 aa, Unknown
  Bacterial polypetide isolated from the Sargasso Sea
CIKQTIEGKKDWKPNMLLDDGGDLTALMHKDYKELLKSVKGLSEETTTGIKALKKMEAEKKLLVPAINVNDSVTKSKFDNLYGCRESLVDGIKRATDVMMSGKTAIVAGFGDVGKGSAASLRQSGARVMVTEADPICALQAAMEGYEVVLMDEAIGNADIVVTATGNKDIVTADHMRKMKDRSILCNIGHFDNEIQVEALKNYKWSEIKPQVHEIEFPDKKRILLLAEGRLVNLGCATGHPSFVMSASFTNQVIAQIELWNNSNKYEKKVYVLPKHLDEKVAMLHLNKVGAKLTKLSKDQADYISVDVKGP

SEQ ID NO: 169158 - protein, 163 aa, Unknown
  Bacterial polypetide isolated from the Sargasso Sea
MPEDYKVKDINQADFGRKEISIAESEMPGLMALRKEFKGKKPLKGARILGCLHMTIQTAVLIETLVELGADVRWSSCNIFSTQDHAAAAIAKAGIPVYAWKGETEEEYWWCIKQTIEAKKDWKPNMLLDDGGDLTALMHKDYKDLLKSVKGLSEETTTGIKAL

SEQ ID NO: 169159 - protein, 244 aa, Unknown
  Bacterial polypetide isolated from the Sargasso Sea
MSQDFKVKDISQAAFGRKEISLAETEMPGLMALRKEYKTKKPLKGARILGCLHMTIQTAVLIETLVELGAEVRWSSCNIFSTQDHAAAAIAKAGIPVFAWKGETEEEYWWCVKQTIEGKKDWKPNMILDDGGDLTALMHKDYKDMLKNIKGVSEETTTGVLALKKMEAKKELLIPAINVNDSVTKSKFDNLYGCRESLVDGIKRATDVMMSGKVAIVAGFGDVGKGSAASLRQAGARVMVTETD

SEQ ID NO: 169160 - protein, 214 aa, Unknown
  Bacterial polypetide isolated from the Sargasso Sea
MSTKTVPYTAFKVKDISLADWGRKEIELAEAEMPGLMSLREEYGDEQPLKGARIAGCLHMTIQTAVLIETLVALGAEVTWSSCNIFSTQDHAAAAIAAAGIPVYAWKGMTEEEFDWCIEQTLFFGEDRKPLNMILDDGGDLTNMVLDKYPELAAGVKGISEETTTGVHRLYERMKKGTLPMPAININDSVTKSKFDNKYGCRESAVDAIRRATD

SEQ ID NO: 169161 - protein, 94 aa, Unknown
  Bacterial polypetide isolated from the Sargasso Sea
LAEGRLVNLGCATGHPSFVMSASFTNQVIAQIELWVNHKNYENKVYVLPKHLDEKVATLHLKKVGAKLTKLSKDQADYISVGVEGPFKPNAYRY

SEQ ID NO: 169162 - protein, 95 aa, Unknown
  Bacterial polypetide isolated from the Sargasso Sea
LLAEGRLVNLGCATGHPSFVMSASFTNQTIAQIELWNNSDNYENKVYVLPKKLDEKVAMLHLEKVGAKLTKLTKDQAEYIGVSEQGPYKPEAYRY

SEQ ID NO: 169163 - protein, 77 aa, Unknown
  Bacterial polypetide isolated from the Sargasso Sea
MAETAKENKIDLMKDYKVADISLAEWGEKEIKIAETEMPGLMSIREEFGKEKPLKGARIAGCLHMTIQTAVLIETLI

SEQ ID NO: 169164 - protein, 291 aa, Unknown
  Bacterial polypetide isolated from the Sargasso Sea
TLLIHKGYELENYFNKYKKLPKITSTIEEEIVIEKLLRKVHKLNPNHWHNIVPDIIGVSEETTTGVARLQQMVEDASLLFPAFNVNDAATKSKFDNLYGCRESLADGIKRSTEIMLAGKTVVVCGYGDVGKGSAQSMKSYGCKVIVTEIDPICALQAAMEGFEVRRLEDVLNRGNIFVTTTGNKDIITLKHMKKMKDQAIVCNIGHFDNEIQVDALNKSNAKRDQIKPQLDRYTFKNGKQIFLLAEGRLVNLGCATGHASFVMSTSFSNQVLAQVFLAKNKPKAGIYDLPR

SEQ ID NO: 169165 - protein, 194 aa, Unknown
  Bacterial polypetide isolated from the Sargasso Sea
CRVCVTEIDPINALQAAMEGYEVVTMDDACKYGDIFVTATGNLDVITQDHMRQMRDRAIVCNIGHFDNEIQTEALQNYKSDEIKPQVREVEFPDGKKILLLSEGRLVNLGNATGHPSFVMSASFTNQVLAQLELWKNSKNYENKVYVLPKHLDEKVASLHLKKVGAKLTELTDKQAEYIGVSKQGPFKDNTYRY

SEQ ID NO: 169166 - protein, 166 aa, Unknown
  Bacterial polypetide isolated from the Sargasso Sea
MRVQTTKSNKSIKTKNKTKNRSKEIVKSLPFKIKDIALAKLGRDKIDISEKEMPGLMELRKKYAKSKPLKGFRLTGSLHMTIETAILIETLKDLGADVRWASCNIFSTQDEAAAAIAKTKTPVFAWKGETLEEYWDCTLHALTFKNNLGPNLIVDDGGDATLLIHK

SEQ ID NO: 169167 - protein, 270 aa, Unknown
  Bacterial polypetide isolated from the Sargasso Sea
VLALKKMESEGTLLVPAINVNDSVTKSKFDNLYGCRESLVDGIKRATDVMMSGKVAIVAGFGDVGKGSAASLRQSGARVMITETDPICALQAAMEGYEVVLMDEMIKEADIVVTATGNKDIITADHMRDMKDRAILCNIGHFDNEIQVEALKNYKWDEIKPQVHEIELPSKKRIILLAEGRLVNLGCATGHPSFVMSASFTNQVTAQIELWNNSSKYEKKVYVLPKHLDEKVAMLHLEKVGAKLTKLSKEQADYISVKQEGPYKPDAYRY

SEQ ID NO: 169168 - protein, 261 aa, Unknown
  Bacterial polypetide isolated from the Sargasso Sea
DGTLMVPAINVNDSVTKSKFDNLYGCRESLVDGIKRATDVMMSGKVAIVAGFGDVGKGSAASLRQSGARVMVTETDPICALQAAMEGYEVVLMDEMIKEADIVVTATGNKDIVTADHMRDMKDRAILCNIGHFDNEIQVDALRNYKWDEIKPQVHEITFPDEKRIILLAEGRLVNLGCATGHPSFVMSASFTNQVTAQIELWNNSENYEKKVYVLPKHLDEKVARLHLEKVGAKLTQLSKDQADYISVTPEGPYKPEAYRY

SEQ ID NO: 169169 - protein, 254 aa, Unknown
  Bacterial polypetide isolated from the Sargasso Sea
SRAPALRGSLHMTIQTAVLIETLVELGAEVRWASCNIFSTQDHAAAAIAAQAIPVFAVKGETLEEYWDYTHRILEWGDGGSPNMILDDGGDATGLVMLGSKAEQDITVLDNPGNEEETFLFASIKKKLAQDPSFYSRTKAQIQGVTEETTTGVARLYKMQKSGELPFPAINVNDSVTKSKFDNLYGCRESLVDSIKRATDVMVAGKQALVIGYGDVGKGSAQSLRGLGATVCIAEVDPICALQAAMEGYRVVRL

SEQ ID NO: 169170 - protein, 136 aa, Unknown
  Bacterial polypetide isolated from the Sargasso Sea
MLLVIADMEKNMDYKVADIGLAEFGRKEIFLAEKEMPALIAIRKKYEKEQPLAGAKIIGCIHMTIQTAVLIETLVHLGAEVRWSSCNIFSTQDHAAAAMADAGIPVFAWKGETEEEYLQCIENTILVDGKPWDANL

SEQ ID NO: 169171 - protein, 235 aa, Unknown
  Bacterial polypetide isolated from the Sargasso Sea
SLVDAIRRSTDIMMAGKVAVVAGYGDVGKGSAASLKGAGARVIVTEIDPICALQASMDGFEVKRLETAIPEADIVVTATGNKDIVRGEHFEAMNDKTIVCNIGHFDNEIDMAWLNQHYGETKDTIKPQVDKYHVKGKDIIVLAEGRLVNLGCATGHPSFVMSNSFTNQTLAQIELWKNSENYENDVYLLPKTLDEKVARLHLDKLSVELTELREDQADYIGVKKQGPFKSDDYRY

SEQ ID NO: 169172 - protein, 281 aa, Unknown
  Bacterial polypetide isolated from the Sargasso Sea
MGILQYFSTQDHAAAAIAAANIPVFAIKGQSLEEHWDYLDQSFMFPDGPNMILDDGGDATLYVLLGARAEEGEDIIPVPQSEEEEVIKAQIKKRMEQSPGWFTKTRDAIKGVSEETTTGVHRLYELVKNGQLPFPAINVNDSVTKSKFDNKYGCKESLVDGIRRATDTMMAGKTAVVCGYGDVGKGSAASLRGAGARVKVTEVDPICALQAAMDGFEVVTLEDTLESADIFITTTGNKDVIRIEHMREMKDMAIVGNIGHFDNEIQVAHLKNHKWTNIKSK

SEQ ID NO: 169173 - protein, 64 aa, Unknown
  Bacterial polypetide isolated from the Sargasso Sea
QALKGARIVVSLHMTIQTAVLIETLVALGADVRWASCNIFPHKTTQPQQLPQQIFLFLQLRVNL

SEQ ID NO: 169174 - protein, 203 aa, Unknown
  Bacterial polypetide isolated from the Sargasso Sea
MADYKVKDISEAEFGRKEISLAETEMPGLMALRKEYKGKSPLKGARILGCLHMTIQTAVLIETLVDLGAEVRWSSCNIFSTQDHAAAAIAKVGIPVFAWKGETEEEYWWCVKQTIEGKKDWKPNMILDDGGDLTALMHKEYKDLLKDIKGLSEETTTGVLALKKMEAQGTLLVPAINVNDSVTKSKFDNLYGCRESLVDGIKR

SEQ ID NO: 169175 - protein, 126 aa, Unknown
  Bacterial polypetide isolated from the Sargasso Sea
MTTNDYKVSDIALAEWGRKEIVIAQSEMPALMKLRERYAAEQPLKGAKILGCIHMTIQTAVLIETLTALGAEVRWSGCNIFSTQDHAAAAIAESGIPVFASNPSPSPSPTFPQVAPSPQVGPLPPK

SEQ ID NO: 169176 - protein, 173 aa, Unknown
  Bacterial polypetide isolated from the Sargasso Sea
EVVLMEEAIKEADIVVTATGNKDIVTADHMREMKDRAILCNIGHFDNEIQVEALKNYKWDEIKPQVHEIELPSKKRIILLAEGRLVNLGCATGHPSFVMSASFTNQVIAQIELWKNSDKYENKVYVLPKHLDEKVAMLHLEKVGAKLTKMSKEQADYISVKPSGPFKPDTYRY

SEQ ID NO: 169177 - protein, 116 aa, Unknown
  Bacterial polypetide isolated from the Sargasso Sea
MSEDFKVKDINQADFGRKEISIAETEMPGLMALRQEYKGKKPLKGAKILGCLHMTIQTAVLIETLVDLGADVRWSSCNIFSTQDHAAAAIAKAGIPVYAWKGETEEEYWWCIKQTI

SEQ ID NO: 169178 - protein, 278 aa, Unknown
  Bacterial polypetide isolated from the Sargasso Sea
KNLLKNIKGLSEETTTGVLALKKMEAQGTLLVPAINVNDSVTKSKFDNLYGCRESLVDGIKRATDVMMSGKVAIVAGFGDVGKGSAASLRQSGARVMVTETDPICALQAAMEGYEVVLMDEMIKEADIVVTATGNKDIVTADHMREMKDRAILCNIGHFDNEIQVEALKNYKWDEIKPQVHEITLPSKKRIILLAEGRLVNLGCATGHPSFVMSASFTNQVTAQIELWNNSDKYEKKVYVLPKHLDEKVARLHLEKVGAKLTKMSKDQADYISVSPQG

SEQ ID NO: 169179 - protein, 122 aa, Unknown
  Bacterial polypetide isolated from the Sargasso Sea
DALKNYKWDEIKPQVHEITFPDNKRLILLAEGRLVNLGCATGHPSFVMSASFTNQVTAQIELWNNSDKYENKVYVLPKHLDEKVARLHLEKVGAKLTPLSKDQADYISVKTEGPYKPDAYRY

SEQ ID NO: 169180 - protein, 188 aa, Unknown
  Bacterial polypetide isolated from the Sargasso Sea
EADPICALQASMEGYEVVLMDEAIDKADIVVTATGNKDIVTADHMRRMKDRAILCNIGHFDNEIQVEALKNNKWTEVKPQVHEIELPSGKRIILLAEGRLVNLGCATGHPSFVMSASFTNQVIAQIELWNNSKNYENKVYVLPKHLDEKVAMLHLKKVGAKLTKLSKEQADYISVKVEGPFKPNAYRY

SEQ ID NO: 169181 - protein, 175 aa, Unknown
  Bacterial polypetide isolated from the Sargasso Sea
GYEVVLMDEMIGQADIVVTATGNKDVVTADHMRAMKDRSILCNIGHFDNEIQVEALKNYKWDEVKPQVHEITFPDDKRLILLAEGRLVNLGCGTGHPSFVMSASFTNQVIAQIELWNNSDNYENKVYVLPKHLDEKVARLHLDKVGAKLTPLSKEQADYISVTPEGPYKPHAYRY

SEQ ID NO: 169182 - protein, 229 aa, Unknown
  Bacterial polypetide isolated from the Sargasso Sea
SCNIFSTQDHAAAAIAKAGIPVYAWKGETEEEYWWCVRQTIEGKEGWQPNMILDDGGDLTSLMHKEYNDLLKEVKGLSEETTTGVLALKKMESEGTLMVPAINVNDSVTKSKFDNLYGCRESLVDGIKRATDVMMSGKVAIVAGFGDVGKGSAASLRQSGARVMVTETDPICALQAAMEGYEVVLMDEMIKEADIVVTATGNKDIVTADHMRDMKDRAILCNIGHFDNE

SEQ ID NO: 169183 - protein, 248 aa, Unknown
  Bacterial polypetide isolated from the Sargasso Sea
VLQNQKFDNKYGCKESLVMRIRRATDTMLAGKTAVVCGYGDVGKGSAASLRGSGARVKVTEVDPICALQAAMDGFEVIKLEDALETADVFITATGNKDVIKVDHMRKMKNMAIVGNIGHFDNEIQIDGLKNHKWTNIKDQVDMIEMPSGNNIILLSEGRLLNLGNATGHPSFVMSASFTNQVLAQLELWMNPEGYKNEVYVLPKKLDEKVAMLHLNKIGVRLTALEKDQADYIGVDKSGPFKPDHYRY

SEQ ID NO: 169184 - protein, 123 aa, Unknown
  Bacterial polypetide isolated from the Sargasso Sea
MSEDYKVKDIKLAEFGRKEISLAETEMPGLMAIRKEYGNKKPLKGARILGCLHMTIQTAVLIETLIELGAECRWSSCNIFSTQDHAAAAIAKAGTPVFAWKGETEKEYWWCVKQTIEGKKDWI

SEQ ID NO: 169185 - protein, 289 aa, Unknown
  Bacterial polypetide isolated from the Sargasso Sea
MSEEEFWWCMSQTLQGPDGWKPNMILDDGGDATQIIHEKYPELLKEIRGLSEETTTGVHRLKDMEKKGLLKVPAINVNDSVTKSKFDNLYGCKESLVDGIRRGTDVMMAGKVAVVAGYGDVGKGSAASLRGAGARVCVTEIDPINALQAAMEGYEVVTMDDACSYADIFVTATGNLDVITLDHMRKMRDRAIVCNIGHFDNEIQTEALRNYKSDEIKPQVKEVEFPDGKKIILLSEGRLVNLGNATGHPSFVMSASFSNQVIAQIELWENYKNYENKVYVLPKKLDEKV

SEQ ID NO: 169186 - protein, 229 aa, Unknown
  Bacterial polypetide isolated from the Sargasso Sea
GIKRATDVMMSGKVAIVAGFGDVGKGSAASLRQSGARVLVTETDPICALQAAMEGYEVVLMDEMIGQADIVVTATGNKDVVTADHMRAMKDRSILCNIGHFDNEIQVEALKNYKWDEVKPQVHEITFPDNKRLILLAEGRLVNLGCGTGHPSFVMSASFTNQVIAQIELWNNSKNYENKVYVLPKHLDEKVARLHLDKVGAKLTPLSKEQADYISVTPEGPYKPHAYRY

SEQ ID NO: 169187 - protein, 141 aa, Unknown
  Bacterial polypetide isolated from the Sargasso Sea
MKDRAILCNIGHFDNEIQVEALKNYKWTEVKPQVHEIELPSKKRIILLAEGRLVNLGCATGHPSFVMSASFTNQVIAQIELWNNYKNYENKVYVLPKHLDEKVATLHLKKVGAKLTKLSKEQADYISVGVEGPFKPNAYRY

SEQ ID NO: 169188 - protein, 424 aa, Unknown
  Bacterial polypetide isolated from the Sargasso Sea
MFAATKSNLNSIENNTDYVVNDITEAEFGRKELLIAETEMPGLMALRKKYGSQKPLKGAFIAGSLHMTIQTGVLIETLVELGAKVRWASCNIFSTQDHAAAAIANAGVPVFAKKGETLDEYWEYTHKIFEWRDGESANMILDDGGDATGLIILGSKAEEDISVLNNPSNEEEIALFASIKKKLSQDPTFYSKAKSFIKGITEETTTGVARLYQMEKNGELVFPAINVNDSVTKSKFDNLYGCRESLVDGIKRATDVMVAGKVALVMGYGDVGKGSAQSLRGLGATVMIAEIDPICALQAAMEGYRVVRLNEVVEDVDIFVTATGNFQVIRHEHLIRMKNESIVCNIGHFDNEIEVSSLKSYEWENIKPQVDHITLPSGNKIILLAEGRLVNLGCATGHPSFVMSNSFTNQVLAQIELFKYGVKY

SEQ ID NO: 169189 - protein, 244 aa, Unknown
  Bacterial polypetide isolated from the Sargasso Sea
MTDYKVKDINEAEFGRKEISLAETEMPGLMAVRAEYKGKNPLKGARILGCLHMTIQTAVLIETLVDLGAECRWSSCNIFSTQDHAAAAIAKAGIPVFAWKGETEEEYWWCVKQTIEGKKDWIPNMILDDGGDLTALMHKDYKDLLKGIKGLSEETTTGVLALKKMEEQGQLLVPAINVNDSVTKSKFDNLYGCRESLVDGIKRATDVMMSGKVAIVAGFGDVGKGSAASLRQSGARVLITETDP

SEQ ID NO: 169190 - protein, 308 aa, Unknown
  Bacterial polypetide isolated from the Sargasso Sea
MTDYKVKDINEAEFGRKEISLAETEMPGLMAVRAEYKGKNPLKGARILGCLHMTIQTAVLIETLVDLGAECRWSSCNIFSTQDHAAAAIAKAGIPVFAWKGETEEEYWWCVKQTIEGKKGWIPNMILDDGGDLTALMHKDYKDLLKGVKGLSEETTTGVLALKKMEEQGQLLVPAINVNDSVTKSKFDNLYGCRESLVDGIKRATDVMMSGKVAIVAGFGDVGKGSAASLRQSGARVLVTETDPICALQAAMEGYEVVLMDEMIGQADIVVTATGNKDVVTADHMRAMKDRSILCNIGHFDNEIQVEA

SEQ ID NO: 169191 - protein, 391 aa, Unknown
  Bacterial polypetide isolated from the Sargasso Sea
MKVLDEIKSDFMKNKPLDGLKIGACMHVTKETANLMLTLKAAGANVSLCASNPLSTKDSVAAYLSENDVEVHAVHGVSNDDFFKHLNSVLDTKPDITMDDGADLVSLLHTERSDIPVMGSMEETTTGVIRLKSMEKNNKLRFPVVAVNDSDTKHLFDNRFGTGQSAMDGVVRATDLLIAGLDVVVIGFGDCGKGVAERAYGMGAKVTIVEPNSVRALEALMHGYEVKTSINAAKIADVIVSVTGNMHALDKQHFDVMKDGVALANAGHFDVEINLNALKENSSQVDKVREHVESYKYNGKEILVLAEGRLVNLAAATGHPASVMDMSFANQALAAEWIKDNYKQLEPKVYTLPTEVDLKIAATKLELMGGELEILTKEQIDYLDSWEHGTS

SEQ ID NO: 169192 - protein, 404 aa, Unknown
  Bacterial polypetide isolated from the Sargasso Sea
MIETLCALGAEVRWVSCNIFSTQDHAAAAIAEQGIPVFAYKGETLEEYWDYTHHIMTWSDGGSPNMILDDGGDATLLLVLGSKAEKDPSVIENPESEEEIYLFASIKKRLAKDKDFYSRTLSSIKGVTEETTTGVQRLYQMKKKGELSFSAINVNDSVTKSKFDNLYGCRESLVDGIKRATDVMVAGKVALVLGYGDVGKGSAQSLRGLGATVWVTEIDPICALQASMEGFRIVTLEDVIDKVDIFVTATGNFNIIRHEHMLGMKDQAIVCNIGHFDNEIDVASLEKYDWEEIKPQVDHVIFPDGKRIILLAKGRLVNLGCATGHPSFVMSNSFTNQVLAQIELFTEGEKYENDVYVLPKHLDEKVARLHLDRIGAKLTALTKEQAEYINVEIEGPYKSDHYRY

SEQ ID NO: 169193 - protein, 315 aa, Unknown
  Bacterial polypetide isolated from the Sargasso Sea
MVAAPTTAPELKLGTDCVVADITQAAFGRKELDIAETEMPGLMALRQKYGTEKPLKGARIAGSLHMTIQTACLIETLVELGAEVRWASCNIFSTQDHAAAAIAAQNIPVFAVKGETLEEYWDYTHRILEWGDGGSPNMILDDGGDATGLVMLGSKAEQDITVLENPANEEETYLFASIKKKLAQDPSFYSRTKAQIQGVTEETTTGVARLYKMQKSGELPFPAINVNDSVTKSKFDNLYGCRESLVDSIKRATDVMVAGKQALVMGYGDVGKGSAQSLRGLGATVCIAEVDPICALQAAMEGYRVVRLEDVVEEM

SEQ ID NO: 169194 - protein, 298 aa, Unknown
  Bacterial polypetide isolated from the Sargasso Sea
TTTGVHRLLDMMREGSLKVPAINVNDSVTKSKNDNKYGCRHSLNDAVKRATDMLMSGKRALVIGYGDVGKGSAQSLRQEGMIVRVTEVDPICGMQACMDGYEVVSCYENGVNSQKEEDLNQRLLQDTDLLVTCTGNSDVCDSGILKALKDGAVVCNIGHFDNEIDTAFMRENWSWVEVKEQVHMIKRSDRTGDHLILLSEGRLVNLGNAMGHPSRIMDGSFANQVLAQMHLFEQAWADQNQNQRAPISVEVLPKKLDEEVAELMVQGFGGVLTRLTKSQADYIGVNQEGPYKTDDYKY

SEQ ID NO: 169195 - protein, 429 aa, Unknown
  Bacterial polypetide isolated from the Sargasso Sea
MTQDYKVKDISQADFGRKEISLAETEMPGLMALRKEYKGKKPLKGARILGCLHMTIQTAVLIETLVELGAEVRWSSCNIFSTQDHAAAAIAKAGIPVFAWKGETEEEYWWCVKQTIEGKKDWKPNMILDDGGDLTALMHKEYKNLLKDVKGVSEETTTGVLALKKMESNKELLIPAINVNDSVTKSKFDNLYGCRESLVDGIKRATDVMMSGKVAIVAGFGDVGKGSAASLRQAGARVMVTETDPICALQAAMEGYEVVVMDEAIKDADIVVTATGNKDIVTADHMRNMKDRAILCNIGHFDNEIQVEALKNYKWDEIKPQVHEIELPSKKRIILLAEGRLVNLGCATGHPSFVMSASFTNQVIAQIELWNNSNKYEKKVYVLPKHLDEKVAMLHLEKVGAKLTKMSKEQADYISVKPSGPFKPDTYRY

SEQ ID NO: 169196 - protein, 385 aa, Unknown
  Bacterial polypetide isolated from the Sargasso Sea
GAKIVGCLHMTIQTAVLIETLIELGADVRWSSCNIFSTQDHAAAAIAKAGIPVFAWKGETEEEYWWCVKQTIEGKKGWEPNMILDDGGDLTALMHKDYKELLKNVKGLSEETTTGVLALKKMQEKGTLLVPAINVNDSVTKSKFDNLYGCRESLVDGIKRATDVMMSGKVAIVAGFGDVGKGSAASLRQSGARVMVTETDPICALQAAMEGYEVVLMDEMIGEADIIVTATGNKDIVTADHMRMMKDRAILCNIGHFDNEIQVEALKNYKWDEIKPQVHEITLPSNKRIILLAEGRLVNLGCATGHPSFVMSASFTNQVTAQIELWNNSSKYEKKVYVLPKHLDEKVARLHLEKVGAKLTKMSKDQADYISVTPEGPYKPDAYRY

SEQ ID NO: 169197 - protein, 428 aa, Unknown
  Bacterial polypetide isolated from the Sargasso Sea
MNDYKVKDIKQAEFGRKEISLAETEMPGLMAIRKEYKGKFPLKGAKILGCLHMTIQTAVLIETLVELGAEVRWSSCNIFSTQDHAAAAIAKVGIPVFAWKGETEEEYWWCVRQTIEGKKDWKPNMILDDGGDLTALMHKDYKDLMKSIKGLSEETTTGVLALKKMENEGTLLVPAINVNDSVTKSKFDNLYGCRESLVDGIKRATDVMMSGKVAIVAGFGDVGKGSAASLRQSGARVMVTETDPICALQAAMEGYEVVLMDEMIKEADIVVTATGNKDIVTADHMRMMKDRAILCNIGHFDNEIQVDALKNYKWDEIKPQVHEITLPSNKRIILLAEGRLVNLGCATGHPSFVMSASFTNQVTAQIELWNNSEKYEKKVYVLPKHLDEKVARLHLDKVGAKLTELSKDQADYISVKKEGPFKSDAYRY

SEQ ID NO: 169198 - protein, 428 aa, Unknown
  Bacterial polypetide isolated from the Sargasso Sea
MEDFKVKDLSQANFGRKEISIAESEMPGLMALREEYSGKSPLKGAKIIGCLHMTIQTAVLIETLVDLGADVRWSSCNIFSTQDHAAAAIAKAGIPVYAWKGETEEEYIWCIKQTIVGKKDWKPNMLLDDGGDLTAIMHNEYKELLKDVKGVSEETTTGIKALNKMEKDNSLLIPAINVNDSVTKSKFDNLYGCRESLVDGIRRATDVMMSGKIAIVAGFGDVGKGSAASLRQSGARVLVTEADPICALQAAMEGYEVVLMEEAISKADIVVTATGNKDIVTADHMREMKDRAILCNIGHFDNEIQVEALKNYKWTEVKPQVHEIELPSKKRIILLAEGRLVNLGCATGHPSFVMSASFTNQVIAQIELWNNYKNYENKVYVLPKHLDEKVATLHLKKVGAKLTKLSKEQADYISVGVEGPFKPNAYRY

SEQ ID NO: 169199 - protein, 462 aa, Unknown
  Bacterial polypetide isolated from the Sargasso Sea
MANDYIVKEISLAEFGRRELDIAETEMPGLMALREEYGSSKPLKGSRIVGSLHMTIQTAVLIETLVALGADVRWASCNIFSTQDHAAAAIAKAGVPVFAIKGQSLEEHWDYLDRSFQFENGPNMILDDGGDATLYVLLGARAEAGEEILSVPQSEEEEVVKAQIYKRIKQSPGWFTKTRDAIRGVSEETTTGVHRLYDLVKNGQLPFPAINVNDSVTKSKFDNKYGCKESLVDGIRRATDTMMAGKTAVVCGYGDVGKGSSASLRGAGARVKVTEVDPICALQAAMDGFEVVVLEDVVSDADIFITTTGNKDVIRIEHMREMKDMAIVGNIGHFDNEIQVSHLRNHKWTNIKEQVDMIEMPNGNRLILLSEGRLLNLGNATGHPSFVMSASFTNQVLAQIELWTNGQNYKNEVFILPKHLDEKVARLHLNRIGVKLTKLAADQADYIGVTPEGPYKPEHYRY

SEQ ID NO: 169200 - protein, 205 aa, Unknown
  Bacterial polypetide isolated from the Sargasso Sea
MQDYKVKDINQAEFGRKEISLAETEMPGLMAIREEYKNKHPLKGARILGCLHMTIQTAVLIETLVELGAEVRWSSCNIFSTQDHAAAAIAKVGIPVFAWKGETEEEYWWCVRQTIEGKKDWKPNMILDDGGDLTALMHKDYKELMKSIKGLSEETTTGVLALKKMEKEGTLLVPAINVNDSVTKSKFDNLYGCRESLVDGIKRAT

SEQ ID NO: 169201 - protein, 264 aa, Unknown
  Bacterial polypetide isolated from the Sargasso Sea
MTDYKVKDINEAEFGRKEISLAETEMPGLMAVRDEYKGKNPLKGARILGCLHMTIQTAVLIETLVDLGAECRWSSCNIFSTQDHAAAAIAKAGIPVFAWKGETEEEYWWCVKQTIEGKKDWIPNMILDDGGDLTALMHKDYKDLLKGVKGLSEETTTGVLALKKMEEQGQLLVPAINVNDSVTKSKFDNLYGCRESLVDGIKRATDVMMSGKVAIVAGFGDVGKGSAASLRQSGARVLVTETDPICALQAAMEGYEVVLMDEMI

SEQ ID NO: 169202 - protein, 465 aa, Unknown
  Bacterial polypetide isolated from the Sargasso Sea
MSTNDYKVSDISLAEWGRKEIVIAQSEMPALMKLRERYAAEQPLKGAKILGCIHMTIQTAVLIETLTALGAEVRWSGCNIFSTQDHAAAAIAASGVPVFAWKGQTEEEFNWCIEQTILSNGTPWDANMILDDGGDLTSMAHEKYPEILENIHGITEETTTGVLRLNEMIEKGQLKVPAINVNDSVTKSKNDNKYGTRHSLNDGIKRGTDMFLAGRKALVIGYGDVGKGSAQSLKQEGMVVRVTEIDPICAMQACMDGYEVVSPYIDGVNDGSENSINKTLLEDTDLIVTTTGNYKVCDKHMLKAVKSGSVICNIGHFDTEIDTQYMREEWAWEEVKPQVHKIFRDTKSGDSPNLDSDDYIILLSEGRLVNLGNATGHPSRIMDGSFANQVLAQMYLYEKKFAQINDEDKKQELIKVEILPKKLDEEVASYMVEGFGGVMTKLSSEQADYISVPEEGPFKSDLYKY

SEQ ID NO: 169203 - protein, 284 aa, Unknown
  Bacterial polypetide isolated from the Sargasso Sea
MEDFKVKDISQAEFGRKEISIAESEMPGLMALREEYSGKLPLKGAKIIGCLHMTIQTAVLIETLVDLGAEVRWSSCNIFSTQDHAAAAIAKAGIPVYAWKGETEEEYLWCIKQTIVGKKDWKPNMLLDDGGDLTAIMHNEYADLLKDVKGVSEETTTGIKALNKMEKDKSLLLPAINVNDSVTKSKFDNLYGCRESLVDGIRRATDVMMSGKIAIVAGFGDVGKGSAASLRQSGARVLVTEADPICALQAAMEGYEVVLMEEAISKADIVVTATGNKILLQLII

SEQ ID NO: 169204 - protein, 136 aa, Unknown
  Bacterial polypetide isolated from the Sargasso Sea
MEDFKVKDISQADFGRKEISIAESEMPGLMALREEYSSNKPLRGARIIGCLHMTIQTAVLIETLVALGAEVRWSSCNIFSTQDHAAAAIAKAGIPVYAWKGETEEEYLWCIKQTIIGKTDWKPNMLLDDGGDLTAI

SEQ ID NO: 169205 - protein, 253 aa, Unknown
  Bacterial polypetide isolated from the Sargasso Sea
MTEDFKIKDINQAEFGRKEISIAETEMPGLMALRKEFKGKKPLKGARILGCLHMTIQTAVLIETLVELGADVRWSSCNIFSTQDHAAAAIAKTGIPVYAWKGETEKEYWWCIKQTIEGKKDWKPNMLLDDGGDLTALMHKEYKDLLKSVKGLSEETTTGIKALKKMEAEKKLLVPAINVNDSVTKSKFDNLYGCRESLVDGIKRATDVMMSGKTAIVAGFGDVGKGSAASLRQSGARVMVTDSGSNSVHYKQL

SEQ ID NO: 169206 - protein, 405 aa, Unknown
  Bacterial polypetide isolated from the Sargasso Sea
MAVDYKVKDISLSDWGRKEIAIAETEMPGLMALREEYGNTKPLDGARIVGCLHMTIQTAVLIETLVHLGASVRWSSCNIFSTQDQAAAAIAAKNIPVFAWKGMNDEEFWWCIEQTLSGPNNWKPNMILDDGGDATGIIHEKFPVMLEEIRGLSEETTTGVHRLKEMEKEGKLKVPAINVNDSVTKSKFDNLYGCKESLVDGIRRGTDVMMAGKIAIVAGYGDVGKGSAASLRGAGARVCVTEVDPINALQAAMEGYEVVTMDDACSYGDIFVTATGNVDIITLDHMRKMRDRAIVCNIGHFDNEIQTEALQNYKTDEIKPQVDEVEFPDGKKILLLSQGRLVNLGNATGHPSFVMSASFTNQVMAQLELWNNYKNYENKVYVLPKHLDEKVAMLHLKKLALNLLH

SEQ ID NO: 169207 - protein, 451 aa, Unknown
  Bacterial polypetide isolated from the Sargasso Sea
VADINLAEFGRREISLAENEMPALMALREKYRAEQPLAGAKIMGCIHMTIQTAVLMETLIDLGAELRWSSCNIFSTQDHAAAAMAARGVPTFAWKGETEEEFEWCIEQTICKDGKPWDANMILDDGSDLTAMVHEKFPDMLETIHGVSEETTTGVHRLKEMLEKGELKIPAINVNDSVTKSKNDNKYGCRHSLNDALKRGTDMLLSGKKGLVIGYGDVGKGSALSLAQEGMIVSVVESDPICAMQACMDGFSVVSCYKDGVVTRDPKDINTQVMEDTDLVVTTTGNVNVCDSAMLSTLKNTAVVCNIGHFDNEIDTAFMRENYYWDEIKPQVHRIFRDTAPDGTPDLSSKNYIILLAEGRLVNLGNATGHPSRIMDGSFANQVLAQIHLYQQGFANINDEDKKAEMITVEVLPKKLDEEVASLMVEGFGGMVTKLTQDQADYINVPKDGPF

SEQ ID NO: 169208 - protein, 466 aa, Unknown
  Bacterial polypetide isolated from the Sargasso Sea
MSSKVDYVVADISLADWGRKELDIAETEMPGLMSLREEYSKSQDLKGARIAGCLHMTIQTAVLIETLKVLGADIRWASCNIFSTQDHAAAVIAKAGIPVFAKKGETVQEYWEYVDKIFDWSDGGYPNMILDDGGDATSYIIFGAKMEAGDEVLKNPENEEEEAMKAQILKRMASNPGWFTEVKNSLKGVSEETTTGVLRLHQMSEKGDLPFPAINVNDSVTKSKFDNVYGCRESLVDSIKRATDVMLAGKVAVVCGFGDVGKGSAASLRQGGARVMVTEIDPICALQASMEGYEVVTMEQAASKADIFVTATGNKDVITVDHMRDMKDRAVVCNIGHFDSEIQISGLNNMVWDEIKPQVDEVKFPDGKKIIMLAKGRLVNLGCGTGHPSFVMSASFTNQVLAQMEIFNNTAAYENKVYTLPRKLDEKVAELHLAKVGATLTKLSDEQASYIGISSDSAFKSDEYRY

SEQ ID NO: 169209 - protein, 428 aa, Unknown
  Bacterial polypetide isolated from the Sargasso Sea
MEDYKVKNINEADFGDKEISLAETEMPGLMAIREEYKDSKPLKGANIVGCLHMTIQTAVLIETLKHLGASIRWSSCNIFSTQDHAAAAIARKGIPVFAWKGETEEEYWWCIKQTIEGNKNWKPNMILDDGGDLTSIMHKDYKELIKDIRGVSEETTTGVKELKKMEKEGTLMVPAFNVNDSVTKSKFDNLYGCRESLVDSIRRATDVMMSGKVAIVAGFGDVGKGSAASLRQAGARVMVTETDPICALQASMEGYEVVLMDDTIGKADIVVTATGNKDIVTADHMRKMKDRSILCNIGHFDNEIQVDALRNYKWNEVKPQVHEIEFPDKKRIILLAEGRLVNLGCATGHPSFVMSASFTNQVMAQIELWNNSKKYEKKVYVLPKHLDEKVAELHLAKVGAKLTKLSNDQADYIGVSPQGPFKGDAYRY

SEQ ID NO: 169210 - protein, 275 aa, Unknown
  Bacterial polypetide isolated from the Sargasso Sea
ETTTGVLRLYEMEKKNELLFPAINVNDSVTKSKFDNLYGCRESLVDGIRRGTDVMMAGKIATIAGYGDVGKGSAQSLRNAGCRVMVTEIDPICALQAAMEGFEVVTMEEAAKKSDIFVTATGNKDVITIEHMREMKDRAIVCNIGHFDSEIQVAGLRNMNWHEVKPQVDEVEFPDGKKIILLSKGRLVNLGNAMGHPSFVMSASFSNQVLAQMELWNNTSQYEKKVYVLPKNLDEKVAAIHLDKLGAKLTKLTKEQSDYIGIENSGPFKPEYYRY

SEQ ID NO: 169211 - protein, 275 aa, Unknown
  Bacterial polypetide isolated from the Sargasso Sea
MSNNDYKVSDISLAEWGRKEIVIAQSEMPALMKLRERYASEQPLKGAKILGCIHMTIQTAVLIETLTALGAEVRWSGCNIFSTQDHAAAAIADSGVPVFAWKGQTEEEFNWCIEQTILFEGKPWDANMILDDGGDLTAMAHEKYPEILEHIHGITEETTTGVVRLNEMIEKGELKVPAINVNDSVTKSKNDNKYGTRHSLNDGIKRGTDMFLAGRKALVIGYGDVGKGSAQSLKQEGMVVRVTEIDPICAMQACMDGYEVVSPYIDGVNNNDEKS

SEQ ID NO: 169212 - protein, 154 aa, Unknown
  Bacterial polypetide isolated from the Sargasso Sea
WYYNVIDKHHLEQMKDQAIVCNIGHFDNEINVDSMKDHEWINIKPQVDHIVFPDGKRIILLAEGRLVNLGCGTGHPSFVMSNSFCNQTLAQIELFKNSSNYENQVYVLPKSLDEKVAKLHLDKIGAKLTKLTTEQAEYIGVKESGPYKPDHYRY

SEQ ID NO: 169213 - protein, 326 aa, Unknown
  Bacterial polypetide isolated from the Sargasso Sea
TEILHKKYPQMLERIHGVTEETTTGVHRLLDMLKAGTLKVPAINVNDAVTKSKNDNKYGCRHSLNDAIKRGTDHLLSGKQALVIGYGDVGKGSAQSLRQEGMIVKVSEIDPICAMQACMDGFELVSPYKNGINDGTEASVDAALLGKIDLIVTTTGNVNVCDAGMLKALKKRAVVCNIGHFDNEIDTAFMRKNWAWEEVKPQVHKIHRTGAGTFDPTNDDYLILLAEGRLVNLGNATGHPSRIMDGSFANQVLAQIFLFEQKFADLSAEKKAERLTVEVLPKKLDEEVALEMVKGFGGVVTQLTKQQAEYIGVTVEGPFKPDAYRY

SEQ ID NO: 169214 - protein, 208 aa, Unknown
  Bacterial polypetide isolated from the Sargasso Sea
FAVVSCYKDGIVTRDPIDINMDVMGDTDLIVTTTGNVNVCDSAMIRTLKNTAVVCNIGHFDNEIDTAYMRENYYWDEIKPQVHRVFRDTAPDGTPNLSSKDYIILLAEGRLVNLGNATGHPSRIMDGSFANQVLAQIHLYKQGFANVNDDDKKAEMLTVEVLPKKLDEEVASLMVEGFGGTVTQLTKEQADYINVPQDGPYKEETYKY

SEQ ID NO: 169215 - protein, 395 aa, Unknown
  Bacterial polypetide isolated from the Sargasso Sea
MSKDFKVKDINLAEFGRKEISIAESEMPGLMALRKEFKGKKPLKGANILGCLHMTIQTAVLIETLVELGASVRWSSCNIFSTQDHAAAAIAKAGIPVFAWKGETEKEYWWCVEQTIEGDKNWKPNMILDDGGDLTGLMHKKYKDLLKNVKGVSEETTTGVLALKKMEANKELLIPAINVNDSVTKSKFDNLYGCRESLVDGIKRATDVMMSGKVAIVAGFGDVGKGSAASLRQAGARVMITETDPICALQAAMEGYEVVLMDEAIKHADIVVTATGNKDIVTADHMRDMKDRAILCNIGHFDNEIQVEALKNYKWNEVKPQVHEIELPSKKRIILLAEGRLVNLGCATGHPSFVMSASFTNQVIAQIELWNNSDKYEKKVYVLPKHLDEKVAMLH

SEQ ID NO: 169216 - protein, 289 aa, Unknown
  Bacterial polypetide isolated from the Sargasso Sea
KFPEMLDEIKGLSEETTTGVHRLKEMERDNKLKVPAINVNDSVTKSKFDNLYGCKESLVDGIRRGTDVMMAGKIAVVAGFGDVGKGSAASLRGAGARVCVTEVDPINALQAAMEGYEVVTMDDACSYGDIFVTATGNVDIITLEHMRKMRDRAIVCNIGHFDNEIQTEALRNYKTDEIKPQVDEIEFPDGKKLILLSQGRLVNLGNATGHPSFVMSASFTNQVMAQLELWNNHKNYENKVYVLPKHLDEKVAMLHLKKVGAKLTELSDKQADYIGVKKEGPFKDDTYRY

SEQ ID NO: 169217 - protein, 400 aa, Unknown
  Bacterial polypetide isolated from the Sargasso Sea
MEDYKVKDISQADFGRKEISLAETEMPGLMALRKEYKGKHPLKGAKILGCLHMTIQTAVLIETLVDLGAEVRWSSCNIFSTQDHAAAAIAKAGIPVFAWKGETEEEYWWCVKQTIEGKKDWKPNMILDDGGDLTALMHKNYKDLLKDIKGLSEETTTGVLALKKMEAQGTLMVPAINVNDSVTKSKFDNLYGCRESLVDGIKRATDVMMSGKVAIVAGFGDVGKGSAASLRQSGARVMVTETDPICALQAAMEGYEVVLMDEMIKEADIVVTATGNKDIVTADHMREMKDRAILCNIGHFDNEIQVEALKNYKWDEIKPQVHEITLPSKKRIILLAEGRLVNLGCATGHPSFVMSASFTNQVTAQIELWNNSDKYEKKVYVLPKHLDEKVARLHLEKVGA

SEQ ID NO: 169218 - protein, 368 aa, Unknown
  Bacterial polypetide isolated from the Sargasso Sea
MKTLVDLGAEVRWSSCNIFSTQDHAAAAIAKVGIPVFAWKGETEEEYWWCVRQTIEGKKDWKPNMILDDGGDLTALMHKEYKDLLKDIKGLSEETTTGVLALKKMEEQGTLLVPAINVNDSVTKSKFDNLYGCRESLVDGIKRATDVMMSGKVAIVAGFGDVGKGSAASLRQSGARVMVTETDPICALQAAMEGYEVVLMDEMISQADIVVTATGNKDIVTADHMREMKDRAILCNIGHFDNEIQVEALKNYKWDEIKPQVHEITLPSNKRIILLAEGRLVNLGCATGHPSFVMSASFTNQVTAQIELWNNSSKYEKKVYVLPKHLDEKVARLHLEKVGAKLTPLSKDQADYISVKTEGPYKPDAYRY

SEQ ID NO: 169219 - protein, 428 aa, Unknown
  Bacterial polypetide isolated from the Sargasso Sea
MEDYKVKDISEAEFGRKEISLAETEMPGLMALREEYKGKKPLKGARIVGCLHMTIQTAVLIETLVELGAEVRWSSCNIFSTQDHAAAAIAKAGIPVFAWKGETEEEYWWCVKQTIEGKDGWKPNMILDDGGDLTALMHKDYKDLLKDIKGLSEETTTGVLALKKMEIEGTLLVPAINVNDSVTKSKFDNLYGCRESLVDGIKRATDVMMSGKVAIVAGFGDVGKGSAASLRQSGARVMVTETDPICALQAAMEGYEVVLMDDMIKEADIVVTATGNKDVVTADHMRDMKDRAILCNIGHFDNEIQVEALKNYKWDEIKPQVHEITLPSNKRIILLAEGRLVNLGCATGHPSFVMSASFTNQVTAQIELWNNSDKYEKKVYVLPKHLDEKVARLHLEKVGAKLTKLSEDQAQYISVTTEGPYKPDAYRY

SEQ ID NO: 169220 - protein, 440 aa, Unknown
  Bacterial polypetide isolated from the Sargasso Sea
MKNKTDNKYVAYKVKDISLAEWGRKEIKLAEAEMPGLMALRDRFKKEKPLKGSRIAGCLHMTIQTAVLIETLVDLGAEVTWSSCNIFSTQDHAAAAIAANGIAVYAWKGMSEEEFNWCIEQTLFFGEEKNPLNMILDDGGDLTNMVLDEFPELVSEIKGLSEETTTGVHRLYDRMKNGTLPLPAINVNDSVTKSKFDNKYGCKESAVDAVRRATDIMLAGKRVVVCGYGDVGKGTAASFRGAGSIVTVTEIDPICALQASMDGYEVKKLKSVVSNADIVVTATGNKDIVNKEAFRMMKDKTIVCNIGHFDNEIDMNWLETNFSEQKTNIKPQVDSYRISKDKEIIILAEGRLVNLGCATGHPSFVMSNSFTNQVLAQIELWNNADKYENKVYMLPKNLDEMVAKLHLDKLGVELEELSSEQAKYIGVQKNGPFKPEYYRY

SEQ ID NO: 169221 - protein, 133 aa, Unknown
  Bacterial polypetide isolated from the Sargasso Sea
MVTCDNEIQVNAVNDDKSVMKDNIKPQLDRYTFPDGHQIFMLAEGRLMNLGCATGHPSFVMSNSFTNQVMAQIALAKDTPKVGVYMLPKELDEEVARLHLDHLGAKLTELSDEQAEYIGVPKEGPFKPEHYKY

SEQ ID NO: 169222 - protein, 351 aa, Unknown
  Bacterial polypetide isolated from the Sargasso Sea
MSEVALKSIIETLPYKIKDISLAKDGRNAISISEKEMPGLMATRAKYGPDKPLRGKKITGSLHMTIETAVLIETLVDLGADVRWASCNIFSTQDHAAAAIADAGVPVFAWKGETLEEYWWCTMQALTFPDGSGPDLIVDDGGDATLLIHKGFELEEFYEKNNYAPEVTTNIEEEQVIEKLLRDVLEKNPNHWRPVAKNIIGVSEETTTGVHRLVQMEKDGHLLFPAYNVNDSVTKSKFDNVYGCRESLADGLKRSLDIMVAGKTVLVCGYGDVGKGCVQSLRGYGARVLVTEIDPICALQAAMEGYEVTTIEDVIDDVHIFVTTTGNKDIITKDHMYKMRDQAVVCNIGHL

SEQ ID NO: 169223 - protein, 364 aa, Unknown
  Bacterial polypetide isolated from the Sargasso Sea
MQDYKVKDISEAEFGRKEISLAETEMPGLMALRKEYKGKNPLKGARIVGCLHMTIQTAVLIETLVDLGADVRWSSCNIFSTQDHAAAAIAKAGIPVFAWKGETEEEYWWCVRQTIEGKEGWKPNMILDDGGDLTALMHKDYKDLMKDIKGLSEETTTGVLALKKMEKEGTLLVPAINVNDSVTKSKFDNLYGCRESLVDGIKRATDVMMSGKVAIVAGFGDVGKGSAASLRMSGARVMVTETDPICALQAAMEGYEVVRMDDMIGEADIICTATGNKDIVTADHMRAMKDRAILCNIGHFDNEIQVEALKNYKWDEIKPQVHEITFPDDKRIILLAEGRLVNLGCATGHPSFVMSASFTNQVTA

SEQ ID NO: 169224 - protein, 430 aa, Unknown
  Bacterial polypetide isolated from the Sargasso Sea
MVIANSVKTSTPNYVIADISLSDFGRKEIKIAETEMPGLMALRDKYQSEKPLKGAKIAGSLHMTIQTAVLIETLVDLGAEVKWASCNIFSTQDHAAAAIADQGISVYAKKGETLDEYWQYTHYILDWGSHFPNMILDDGGDATGLLILGSKAEKDLSVLDNPGNEEEIALFKSIQSKLENDSNFYSRIKSNIIGVTEETTTGVARLYQLQKQNALPFPAINVNDSVTKSKFDNLYGCRESLVDSIKRATDVMIAGKVALVMGFGDVGKGSAQSLRGLGAIVKVAEVDPICALQAAMEGFSVVRLEDVVEDIDIFVTATGNYQVITNENLVKMKDEAIVCNIGHFDNEIDVASLKDYPWENIKPQVDHITLPSGNKIILLAEGRLVNLGCATGHPSFVMSNSFTNQVLAQIELFNKSEKYDKEVYVLPKHL

SEQ ID NO: 169225 - protein, 450 aa, Unknown
  Bacterial polypetide isolated from the Sargasso Sea
MNKDYKVKDIALAEFGRQEILLAQDEMPALMQLRENYRSEQPLKGAKIMGCIHMTVQTAVLIETLIELGAEVRWSSCNIFSTQDHAAAAIAAKDIPVFAWKGETEEEYEWCLDQTINKDGKPWDANMILDDGGDLTVKVHNEYPEMLNQIHGISEETTTGVKRLKEMLAKGELKVPAINVNDSITKSKNDNKYGCRHGLDDAIKRGTDMLLSGKKALVIGYGDVGKGSADCLNQQKMIVDVTEVDPICAMQACFDGYSVVSAYKNGDVGEAGINLDKKLLEKYDLVVTTTGNINVLDKFMLNALKSGCVVCNIGHFDNEIDVQHLRTFEWYEIKPGVHKILRSHNDYLILLGEGRLVNLALATGHPSRVMDGSFCNQVLAQIMLFKDGFAYKPDDQKELYVKVLPKKLDEEVAHLMVKGFGGTLTKLTKKQQEYISVSENGPFKDNSYTY

SEQ ID NO: 169226 - protein, 309 aa, Unknown
  Bacterial polypetide isolated from the Sargasso Sea
MSDYKVKDINLAEFGRKEISLAETEMPGLMALRKEYKGKSPLKGARILGCLHMTIQTAVLIETLVALGAECRWSSCNIFSTQDHAAAAIAKAGIPVFAWKGETEEEYWWCVKQTIEGKKDWKPNMILDDGGDLTALMHKDYKHLMKDIKGLSEETTTGVLALKKMESEGTLLVPAINVNDSVTKSKFDNLYGCRESLVDGIKRATDVMMSGKVAIVAGFGDVGKGSAASLRQSGARVMITETDPICALQAAMEGYEVVLMDEMIKEADIVVTATGNKDIITADHMRDMKDRAILCNIGHFDNEIQVEAL

SEQ ID NO: 169227 - protein, 428 aa, Unknown
  Bacterial polypetide isolated from the Sargasso Sea
MEDFKVKDISQAEFGRKEISLAETEMPGLMALREEYKGKKPLNGARIVGCLHMTIQTAVLIETLVELGAEVRWSSCNIFSTQDHAAAAIAKAGIPVFAWKGETEEEYWWCVKQTIEGKDGWKPNMILDDGGDLTALMHKDYKELLNDVKGLSEETTTGVLALKKMESEGNLLVPAINVNDSVTKSKFDNLYGCRESLVDGIKRATDVMMSGKVAIVAGFGDVGKGSAASLRQSGARVMVTETDPICALQAAMEGYEVVLMDEMIKEADIVVTATGNKDIVTADHMREMKDRAILCNIGHFDNEIQVDALKNYKWDEIKPQVHEITLPDGKRIILLAEGRLVNLGCATGHPSFVMSASFTNQVTAQIELWNNSDKYEKKVYVLPKHLDEKVARLHLEKVGAKLTKLSDDQAKYISVTPEGPYKPDAYRY

SEQ ID NO: 169228 - protein, 129 aa, Unknown
  Bacterial polypetide isolated from the Sargasso Sea
FDNEIQVEALKNYKWDEIKPQVHEITFPDNKRLILLAEGRLVNLGCATGHPSFVMSASFTNQVTAQIELWNNSEKYENKVYVLPKHLDEKVARLHLEKVGAKLTQLSKDQADYISVKTEGPYKPDAYRY

SEQ ID NO: 169229 - protein, 472 aa, Unknown
  Bacterial polypetide isolated from the Sargasso Sea
MVIANSVKTSTPNYVIADISLSDFGRKEIKIAETEMPGLMALRDKYQSEKPLKGAKIAGSLHMTIQTAVLIETLVDLGAEVKWASCNIFSTQDHAAAAIADQGIPVYAKKGETLDEYWQYTHYILDWGSDSPNMILDDGGDATGLLILGSKAEKDLSVLDNPGNEEEIALFNSIKSKLENDSDFYSRIKSNIIGVTEETTTGVARLYQLQKQNALPFPAINVNDSVTKSKFDNLYGCRESLVDSIKRATDVMIAGKVALVMGFGDVGKGSAQSLRGLGAIVKVAEVDPICALQAAMEGFSVVTLDDVVEDIDIFVTATGNYQVITNENLVKMKDEAIVCNIGHFDNEIDVASLKDYPWENIKPQVDHITLPSGNKIILLAEGRLVNLGCATGHPSFVMSNSFTNQVLAQIELFNKSEKYAKEVYVLPKHLDEMVARLHLDKIGAKLTKLTKEQADYINVSVEGPYKPELYRY

SEQ ID NO: 169230 - protein, 149 aa, Unknown
  Bacterial polypetide isolated from the Sargasso Sea
MSEDFKIKDISLADFGDKEIAIAETEMPGLMALREEYGDSKPLDGAKIVGCLHMTIQTAVLIETLVFLGATVRWSSCNIFSTQDHAAAAIAAKGIPVFAWKGMTEEEFWWCIEKTLEGPDGWKPNMILDDGGDATKIIHEKYPKMLEEI

SEQ ID NO: 169231 - protein, 451 aa, Unknown
  Bacterial polypetide isolated from the Sargasso Sea
MSVQDYKVKDISLAEYGRQEILLAQDEMPALMQLRDNYREEQPLKGAKIMGCIHMTVQTAVLIETLIELGAEVRWSSCNIFSTQDHAAAAIADQGIPVFAWKGETEEEYEWCLDQTINKDGKPWEANLILDDGGDLTLKIHKDYPEMLSKIHGVSEETTTGVKRLKEMLESGELKVPAINVNDSITKSKNDNKYGCRHGLDDAIKRGTDMLLSGKKALVIGYGDVGKGSADSLNQQKMIVDVTEIDPICAMQACFDGFSVVSAYENGNVSEDGKNLDKKLLEKYDLVVTTTGNINVLDKHMLDALKSGCVVCNIGHFDSEIDIKHLKNYEWKEIKTGVHKVIKNKDKYLILLGEGRLVNLALATGHPSRVMDGSFCNQVLAQIALFKDDFANKSIDEKELYVKVLPKELDEEVANLMVKGFGGTLTKLTKEQEEYISVSKDGPFKDDSYTY

SEQ ID NO: 169232 - protein, 416 aa, Unknown
  Bacterial polypetide isolated from the Sargasso Sea
MSQQYIVKDISLSDFGRKELSIAETEMPGLMALRAEYGESKPLKGARIVGSLHMTIQTAVLIETLVALGADVRWASCNIFSTQDHAAAAIAAANIPVFAIKGQSLEEHWDYLDKSFMFPDGPNMILDDGGDATLYVLLGARAEAGEDIIPVPQSEEEDVIKVQIKKRMEQSPGWFTKTRDAIKGVSEETTTGVHRLYELVKNGQLPFPAINVNDSVTKSKFDNKYGCKESLVDGIRRATDTMMAGKTAVVCGYGDVGKGSAASLRGAGARVKVTEVDPICALQAAMDGFEVVTLEDTLESADIFITTTGNKDVIRIEHMREMKDMAIVGNIGHFDNEIQVAHLKNHKWTNIKDQVDMIEMPSGNRLILLSEGRLLNLGNATGHPSFVMSASFTNQVLAQIELWKKGGEYKNDVYIL

SEQ ID NO: 169233 - protein, 330 aa, Unknown
  Bacterial polypetide isolated from the Sargasso Sea
ETEEEYWWCIEQTLKWEGNEGPNLLLDDGGDLTWYVHDKYPQLLDNIMGLSEETTTGVHRLHQMARKNELKVPAYNVNDSVTKSKFDNLYGCRESLVDGIKRATDVMIAGKLAVVAGYGDVGKGSAASLRNQGARVVVTEIDPICALQAVMEGYQVVRMEEVAAEADIFVTATGCAGIIRREHMDQMKNDAIVCNIGHFDIEIDVASLNDDPSINKINVKPQVDQYIWDTGKRIILLAEGRLVNLGCATGHPSFVMSNSFCNQVLAQMDLYEKGKQYENQVYVLPKELDEKVARLHLDQLGVHLTELQQDQADYLGIPTKGPFKPEHYRY

SEQ ID NO: 169234 - protein, 280 aa, Unknown
  Bacterial polypetide isolated from the Sargasso Sea
MVFQRKQQTGVARLQQMVENASLLFPAFNVNDAATKSKFDNLYGCRESLADGIKRSTEIMLAGKTVVVCGYGDVGKGSAQSMKSYGCKVIVTEIDPICALQAAMEGFEVRKLEDVLDRGNIFVTTTGNKDIITLKHMRKMKDQAIVCNIGHFDNEIQVDALNTSNAKRDTIKPQLDRYTFKNGKQIFLLAEGRLVNLGCATGHASFVMSTSFSNQVLAQIFLAKNKPATGMYDLPRKLDEEVARIHLEHLDADLTKLSKSQADYIGVAVNGPFKKDEYRY

SEQ ID NO: 169235 - protein, 300 aa, Unknown
  Bacterial polypetide isolated from the Sargasso Sea
MAETAKENKIDLMNDYKVADISLAEWGEKEIKIAETEMPGLMSIREEFGKEKPLEGARIAGCLHMTIQTAVLIETLIELGADIRWSSCNIFSTQDHAAAALAAKGIPVFAWKDESEEEYWWCVEKTIKGPDGWTPNLILDDGGDLTGLMHEKYPELMKEIIGVSEETTTGVLRLYNMEKDGTLMCPAINVNDSVTKSKFDNLYGCRESLVDGIKRATDVMVAGKIAVVAGYGDVGKGSAQSLRGLGATVWITEIDPICALSAAMEGYRVVTMDDACSQADIFVTATGNYNVIDKHHLKQM

SEQ ID NO: 169236 - protein, 428 aa, Unknown
  Bacterial polypetide isolated from the Sargasso Sea
MQDYKVKDLSQAEFGRKEISLAETEMPGLMALRKEYKGKSPLKGAKILGCLHMTIQTAVLIETLVDLGAEVRWSSCNIFSTQDHAAAAIAKAGIPVFAWKGETEEEYWWCVRQTIEGKKDWKPNMILDDGGDLTALMHKDYKELLKNIKGLSEETTTGVLALKKMEEQGTLMVPAINVNDSVTKSKFDNLYGCRESLVDGIKRATDVMMSGKVAIVAGFGDVGKGSAASLRQSGARVMITETDPICALQAAMEGYEVVLMDEMISQADIVVTATGNKDIVTADHMRAMKDRSILCNIGHFDNEIQVEALKNYKWDEIKPQVHEITFPDNKRLILLAEGRLVNLGCATGHPSFVMSASFTNQVTAQIELWNNSEKYEKKVYVLPKHLDEKVARLHLEKVGAKLTPLSKDQADYISVKPEGPYKPDAYRY

SEQ ID NO: 169237 - protein, 428 aa, Unknown
  Bacterial polypetide isolated from the Sargasso Sea
MTDYRVKDINEAEFGRKEISLAETEMPGLMALRKEYKGKYPLKGAKILGCLHMTIQTAVLIETLVDLGAEVRWSSCNIFSTQDHAAAAIAKAGIPVFAWKGETEEEYWWCVRQTIEGKKDWKPNMILDDGGDLTALMHKDYKDLMKDIKGLSEETTTGVLALKKMEEQGTLLVPAINVNDSVTKSKFDNLYGCRESLVDGIKRATDVMMSGKVAIVAGFGDVGKGSAASLRQSGARVMVTETDPICALQAAMEGYEVVLMDEMISQADIVVTATGNKDIVTADHMRAMKDRSILCNIGHFDNEIQVDALKNYKWDEIKPQVHEITFPDNKRLILLAEGRLVNLGCATGHPSFVMSASFTNQVTAQIELWNNSDNYENKVYVLPKHLDEKVARLHLEKVGAKLTPLSKDQADYISVKTEGPYKPDAYRY

SEQ ID NO: 169238 - protein, 427 aa, Unknown
  Bacterial polypetide isolated from the Sargasso Sea
MDYKVKDISLSEWGLKEIAIAETEMPGLMALREEYKDNKPLKGAKIVGCLHMTIQTAVLIETLIDLGASVRWSSCNIFSTQDQAAAAIASKGIPVFAWKGMNEEEFWWCIEKTLEGPNGWKPNMILDDGGDATKIIHEKYPDLLKDIKGLSEETTTGVHRLKDMEKNNLLKVPAINVNDSVTKSKFDNLYGCKESLVDGIRRGTDVMMAGKIAVVAGYGDVGKGSAASLRGAGARVCVTEIDPINALQAAMEGYEVVTMDDACSYGDIFVTATGNADVITLEHMRKMHDRAIVCNIGHFDNEIQTEALRNYKSEEIKPQVDEIEFPDGKKLLLLSQGRLVNLGNATGHPSFVMSASFTNQVMAQIELWENYNNYENKVYVLPKHLDEKVATLHLKKVGAKLTKLTDKQAEYIGVKKEGPFKDDTYRY

SEQ ID NO: 169239 - protein, 316 aa, Unknown
  Bacterial polypetide isolated from the Sargasso Sea
MDQDFKVKDINLADFGRKEISIAESEMPGLMALRKEYKGKKPLNGANILGCLHMTIQTAVLIETLVELGASVRWSSCNIFSTQDHAAAAIAKAGIPVYAWKGETEKEYWWCIKQTIEGDKNWKPNMILDDGGDLTGLMHKDYKDLLKNIKGVSEETTTGVLALKKMESNKTLLIPAINVNDSVTKSKFDNLYGCRESLVDGIKRATDVMMSGKVAIVAGFGDVGKGSAASLRQSGARVMVTETDPICALQAAMEGYEVVLMDEAIKAADIVVTATGNKDIVTADHMREMKDRAILCNIGHFDNEIQVDALKNYKWT

SEQ ID NO: 169240 - protein, 261 aa, Unknown
  Bacterial polypetide isolated from the Sargasso Sea
QGTLLVPAINVNDSVTKSKFDNLYGCRESLVDGIKRATDVMMSGKVAIVAGFGDVGKGSAASLRQSGARVMVTETDPICALQAAMEGYEVVLMDEMIGQADIVVTATGNKDIVTADHMRAMKDRSILCNIGHFDNEIQVDALKNYKWDEIKPQVHEITFPDNKRLILLAEGRLVNLGCATGHPSFVMSASFTNQVTAQIELWNNSDNYQNKVYVLPKHLDEKVARLHLEKVGAKLTPLSKDQADYISVKTEGPYKPDAYRY

SEQ ID NO: 169241 - protein, 318 aa, Unknown
  Bacterial polypetide isolated from the Sargasso Sea
LENIHGITEETTTGVLRLNEMIEKGELKVPAINVNDSVTKSKADNKYGTRHSLNDGIKRGTDMFLAGRKALVIGYGDVGKGSAQSLKQEGMVVRVTEIDPICAMQACMDGYEVVSPYIDGINNDSEDSMNKALLEDTDLIVTTTGNYKVCDKHMLKALKNGAVVCNIGHFDTEIDTQYMRDEWQWEEVKPQVHKIFRDTKAGETPDMDSEDYIILLSEGRLVNLGNATGHPSRIMDGSFANQVLAQMYLYDKKFAQINDEDKKQELIRVEVLPKKLDEEVASYMVEGFGGVMTKLSSDQAEYINVPEEGPFKSEIYKY

SEQ ID NO: 169242 - protein, 441 aa, Unknown
  Bacterial polypetide isolated from the Sargasso Sea
MSLAEKTQTDLLPYKVKDIKLAEWGRKEITLAEAEMPGLMSLCEEYGESKPLKGARIAGCLHMTIQTAVLIETLTKLGAEVSWSSCNIFSTQDHAAAAIAATGIPVYAWKGMNEEEFDWCIEQTLFAFKDGKPLNMILDDGGDLTNMVLDNFPELVSNIKGLSEETTTGVHRLYERVKNGTLTMPAINVNDSVTKSKFDNKYGCQESLVDAIRRSTDIMMAGKVAVVAGYGDVGKGSAASLKGAGARVIVTEIDPICALQASMDGFEVKRLETAIPEADIVVTATGNKDIVRGEHFEAMNDKTIVCNIGHFDNEIDMAWLNQHYGETKDTIKPQVDKYHVKGKDIIVLAEGRLVNLGCATGHPSFVMSNSFTNQTLAQIELWKNSENYENDVYLLPKTLDEKVARLHLDKLSVELTELREDQADYIGVKKQGPFKSDDYRY

SEQ ID NO: 169243 - protein, 191 aa, Unknown
  Bacterial polypetide isolated from the Sargasso Sea
MVTETDPICALQAAMEGYEVVLMDEMIKEADIVVTATGNKDIVTADHMREMKDRAILCNIGHFDNEIQVDALKNYKWDEIKPQVHEITLNDNKRIILLAEGRLVNLGCATGHPSFVMSASFTNQVTAQIELWNNPDQYEKKVYVLPKHLDEKVARLHLEKVGAKLTKLSEDQAEYISVTTEGPYKPEAYRY

SEQ ID NO: 169244 - protein, 582 aa, Unknown
  Bacterial polypetide isolated from the Sargasso Sea
MDDFKVKDISQAEFGRKEISIAESEMPGLMALREEYSKEKPLKGARIIGCLHMTIQTAVLIETLVDLGAEVRWSSCNIFSTQDHAAAAIAKAGIPVYAWKGETEEEYLWCIKQTIVGKPDWKPNMLLDDGGDLTAIMHNEYKDLMKDIKGVSEETTTGIKALNKMEKDNSLLVPAINVNDSVTKSKFDNLYGCRESLVDGIRRATDVMMSGKIAIVAGFGDVGKGSAASLRQSGARVLVTEADPICALQAAMEGYEVVLMEEAISRADIVVTATGNKDIVTADHMRDMKDRAILCNIGHFDNEIQVEALKNYKWTEVKPQVHEIALPSKKRIILLAEGRLVNLGCATGHPSFVMSASFTNQVIAQIELWNNHKNYENKVYVLPKHLDEKVATLHLEKVGAKLTKLSKEQADYISVKQKGLTNQMPIATKSSKFDISKKKNLEKIIVKVLNKIKTGDTLLLYGAIGIGKTTSARLFINNFQKKRKVKISEVTSPTFNIVNEYLVDDILISHFDLFRLRNKNECKNIGIEEDIDKKITIVEWAEKINQRPKNRLELYYKYSKNFKSRSLIIKSFGRLKKYEFFK

SEQ ID NO: 169245 - protein, 439 aa, Unknown
  Bacterial polypetide isolated from the Sargasso Sea
MVTKTEKISKIGTDYKVADISLAEFGKKEIKIAETEMPGLMAIREEYKDQKPLKGANILGCLHMTIQTAVLIETLVDLGASVRWSSCNIFSTQDHAAAAIASQNIPVYAWKGETEEEYNWCIKQTIEGDKDWKPNLLLDDGGDLTAIMHNDYPQLMSDIRGVSEETTTGVHRLYEMEKNNSLKVPALNVNDSVTKSKFDNLYGCRESLVDGIKRATDSMIAGKLAIVCGYGDVGKGSAASLRGLGANVLISEIDPICALQASMEGYQVVTIEDYLDKIDIFVTATGNLNVIQHDHMAKMKNGAIVCNIGHFDNEIDVESLRKYEWENVKPQVDQIIFPDGKRIILLAEGRLINLGCATGHPSFVMSCSFTNQVMAQIELWENYSKYENKVYVLPKNLDEKVARLHLEKLGVKLTRLSKEQAEYINVDQDGPFKKDEYRY

SEQ ID NO: 169246 - protein, 402 aa, Unknown
  Bacterial polypetide isolated from the Sargasso Sea
ALKFVGQVAIFFSTQDHAAACIAETGVPVFAWKGESLEEYWWCTLQALTFNGNEGPDLIVDDGGDATLLIHKGYELEEYYAKNNTTPKITTKIKEEQVIENLLREVLDKDPMHWHKVAKNIIGVSEETTTGVHRLEQMSKDQTLLFPAYNVNDSVTKSKFDNVYGCRESLVDGLKRSMDVMVAGKTVLVCGYGDVGRGCVQSMRGYGARVLVTEIDPICALQAAMEGYEVVTIEQAISVTNIFVSATGNRDVITLEHMQKMKDQAIICNIGHFDNEIQVDKLNESSNVQRDTIKPQVDRYTFDDGHSVYLLAEGRLMNLGCATGHPSFVMSNSFTNQVLAQIALVKDKPDLGVYMLPKELDEEVARLHLSHLGVTLTELSDEQADYIGVSKSGPFKPEHYRY

SEQ ID NO: 169247 - protein, 191 aa, Unknown
  Bacterial polypetide isolated from the Sargasso Sea
MENDYKVADINLAEFGRREISLAENEMPALMALREKYRSEQPLAGAKIMGCIHMTIQTAVLMETLIDLGAELRWSSCNIFSTQDHAAAAMAARGVPVFAWKGETEEEFEWCIEQTICKDGKPWDANMILDDGSDLTAMVHEKFPEMLETIHGVSEETTTGVHRLKEMLEKGELKVPAINVNDSVTKAKNDN

SEQ ID NO: 169248 - protein, 114 aa, Unknown
  Bacterial polypetide isolated from the Sargasso Sea
DEIKPQVHEIELPSKKRIILLAEGRLVNLGCATGHPSFVMSASFTNQVTAQIELWNNSDKYEKKVYVLPKHLDEKVAMLHLEKVGAKLTKLSKEQADYISVKQEGPYKPDAYRY

SEQ ID NO: 169249 - protein, 403 aa, Unknown
  Bacterial polypetide isolated from the Sargasso Sea
MENDYKVADINLAEFGRREISLAENEMPALMALREKYKDEQPLAGAKIMGCIHMTIQTAVLMETLLELGAELRWSSCNIFSTQDHAAAAMAARGVPVFAWKGETEEEYEWCIEQTICKDGNPWDANMILDDGSDLTAMVHEKFPDMLETIHGVSEETTTGVHRLKEMLEKGELKIPAINVNDSVTKAKNDNKYGCRHSLNDALKRGTDMLLSGKKGLVIGYGDVGKGSAASLAQEGMIVRVVESDPICAMQACMDGFSVVSCYKDGVVTRDPKDINMEIMGDTDLIVTTTGNVNVCDSAMLSTLKNTAVVCNIGHFDNEIDTAFMRENYYWDEIKPQVHRVFRDTPPDGTPDLSSKNYIILLAEGRLVNLGNATGHPSRIMDGSFANQVLAQIHLYKQGYANV

SEQ ID NO: 169250 - protein, 126 aa, Unknown
  Bacterial polypetide isolated from the Sargasso Sea
MEFNDYKVADIGLADWGRKEIEIAETEMPGLITLRNELSKSKPLKGANIVGCLHMTIQTAVLIETLIDLGATVRWSSCNIFSTQDHAAAAIASKNIPVFAWKGETEEEYDWCIRQTIEGSSDWKPN

SEQ ID NO: 169251 - protein, 430 aa, Unknown
  Bacterial polypetide isolated from the Sargasso Sea
MEFNDYKVADIGLADWGRKEIEIAETEMPGLITLRNELSKSKPLKGANIVGCLHMTIQTAVLIETLIDLGATVRWSSCNIFSTQDHAAAAIASKNIPVFAWKGETEEEYDWCIRQTIEGSSDWKPNMILDDGGDLTKIIHEEYQDLLDDIRGLSEETTTGVLRLYEMEKENSLAVPAINVNDSVTKSKFDNFYGCRESLVDGLKRATDVMLAGKVAVVCGFGDVGKGSAESLRSQGARVIVTEIDPICALQASMEGYEVSTVNDVAKTADIFVTATGNKDVITLEHMREMKDRAIVANIGHFDSEIQVSELKNFKWDNIKPQVDEIEFPDGKKIILLAEGRLVNLGCATGHPSFVMSASFSNQVLAQIEIWNNYKSYENKVYVLPKHLDEKVAYIHLEKLGVKLTELSDDQADYLSLNKEGPFKPDHYRY

SEQ ID NO: 169252 - protein, 451 aa, Unknown
  Bacterial polypetide isolated from the Sargasso Sea
MSKQDYKVKDISLAEYGRQEILLAQDEMPALMQLRDNYRDKQPLKGAKIMGCIHMTVQTAVLIETLIELGAEVRWSSCNIFSTQDHAAAAIADQGIPVFAWKGETEEEYEWCLDQTINKDGKPWSANMILDDGGDLSLKVHKEYPEMLSKIHGISEETTTGVKRLKEMLESGELKVPAINVNDSITKSKNDNKYGCRHGLDDAIKRGTDMLLSGKKALVIGYGDVGKGSADSLNQQKMIVDITEIDPICAMQACFDGFSVVSAYENGNVGKDGMNLDKKLLAKYDLVVTTTGNVNVLDQHMLDALKSGCVVCNIGHFDSEIDVKHLKNYEWKEIKPGVHKVIKNKDEYIILLGEGRLVNLALATGHPSRVMDGSFCNQVLAQIALFKDGFADKSDDQKELYVKVLPKELDEEVASLMVKGFGGTLTKLTKEQEEYISVSKEGPFKDDSYTY

SEQ ID NO: 169253 - protein, 130 aa, Unknown
  Bacterial polypetide isolated from the Sargasso Sea
MKAKSKTINQSKKIVDSLPFKIKDVSLAKLGRDKIDISEKEMPGLMELRKEYSKSKPLKGLRLTGSLHMTIETAILIETLKDLGADVRWASCNIFSTQDEAAAAIAKTKTPVFAWKGETLEEYWDCTLQA

SEQ ID NO: 169254 - protein, 356 aa, Unknown
  Bacterial polypetide isolated from the Sargasso Sea
MSTIKDKNLATIGQQEVDWAARQMKVLEEIKTEFSSSRPLNGLNIGACMHVTKETANLMLTLKAAGANVALCASNPLSTKDSVAAYLSENDIEVHAVHGVSNDDFFKHLNSVLDTKPDITMDDGADLVTLLLTDRADIPIMGSMEETTTGVIRLKSMEKNNKLRFPVVAVNDSETKHLFDNRFGTGQSAMDGVVRATDLLIAGLDVVVIGFGDCGKGVAERAYGMGAKVTVVEPNSVRALEALMHGYEVKSSVNASKIADVIVSVTGNMHALDKQHFDVMKDGVVLANAGHFDVEINLEALKQESAEIHRVRDHVESYLYDGKEILVLAEGRLVNLAAASGHPASVMDMSFANQAL

SEQ ID NO: 169255 - protein, 136 aa, Unknown
  Bacterial polypetide isolated from the Sargasso Sea
MTDYKVKDINEAEFGRKEISLAETEMPGLMAVRAEYKGKNPLKGARILGCLHMTIQTAVLIETLVDLGAECRWSSCNIFSTQDHAAAAIAKAGIPVFAWKGETEEEYWWCVKQTIEGKKDWIPNMILDDGGDLTAL

SEQ ID NO: 169256 - protein, 465 aa, Unknown
  Bacterial polypetide isolated from the Sargasso Sea
MTTNDYKVSDIALAEWGRKEIVIAQSEMPALMKLRERYAAEQPLKGAKILGCIHMTIQTAVLIETLTALGAEVRWSGCNIFSTQDHAAAAIAESGIPVFAWKGQTEEEFNWCIEQTILSEGKPWDANMILDDGGDLTAMAHEKYPEILENIHGITEETTTGVVRLNEMIEKGELKVPAINVNDSVTKSKNDNKYGTRHSLNDGIKRGTDMFLAGRKALVIGYGDVGKGSAQSLKQEGMVVRVTEIDPICAMQACMDGYEVVSPYVDGLNNNDDNSINKDLLEDTDLIVTTTGNYKVCDKHMLKALKKGAVVCNIGHFDTEIDTQFMREEWAWEEVKPQVHKVFRDTKAGQSPNLDSADYLILLSEGRLVNLGNATGHPSRIMDGSFANQVLAQMYLYEKKFAHVNDEDTKKELIKVEVLPKKLDEEVASYMVEGFGGVMTKLSSEQADYISVPKEGPFKSDIYKY

SEQ ID NO: 169257 - protein, 195 aa, Unknown
  Bacterial polypetide isolated from the Sargasso Sea
GARVMVTETDPICALQAAMEGYEVVLMDEMIKEADIVVTATGNKDIVTADHMRDMKDRAILCNIGHFDNEIQVEALKNYKWDEIKPQVHEITLPSNKRIILLAEGRLVNLGCATGHPSFVMSASFTNQVTAQIELWNNSDKYENKVYVLPKHLDEKVARLHLEKVGAKLTKMSKDQADYISVTPEGPYKPDAYRY

SEQ ID NO: 169258 - protein, 253 aa, Unknown
  Bacterial polypetide isolated from the Sargasso Sea
MDYDVKDLKLNKTGRDRVEWAYKDMPVLQEINKNLSKKKPLKGINISACLHVTTETANLLITLKNAGAKVACCASNPLSTQDDVAAHLTKDYGINTFAIKGINNKGYYKHLVDSLKIKPNITMDDGCDLVSILHKSHKQFMKNIIGGTEETTTGVIRLESMSKNNVLNYPIIAVNNAFTKHLFDNRYGTGQSVIDSIMRATNRLLSGKTFVVCGYGWCGKGLAMRAAGLGANVVVTEIDPTKGLKQKWMDSKL

SEQ ID NO: 169259 - protein, 464 aa, Unknown
  Bacterial polypetide isolated from the Sargasso Sea
MSNDYKVADIELADFGRREISLAENEMPALMALREKYKAEQPLAGAKIMGCIHMTIQTAVLMETLVDLGAELRWSGCNIFSTQDHAAAAMAKAGIPVFAWKGQTDEEFDWCIEQTILKDGKPWDANMILDDGGDLTHMVHTRFAEMLETIHGISEETTTGVHRLKAMLEKGELKVPAINVNDSVTKAKNDNKYGCRHSLNDGIKRGTDMLLSGKKALVIGYGDVGKGSAASLAQEGMVVRVTESDPICAMQACMDGFSVVSCYSNGKVTGNTDDINKDLMQDTDVLVTTTGNVNVCDSAMLSTLKDGAVVCNIGHFDTEIDTKYMQEKWYWEEVKPQVHRIFRDCSPDQEPDLSSKNYLILLAEGRLVNLGNATGHPSRIMDGSFANQVLAQMHLYSAGFANVNDEDKKKELIQVEVLPKKLDEEVASLMVQGFGGVVTKLTEEQADYINVPQDGPFKEDSYKY

SEQ ID NO: 169260 - protein, 194 aa, Unknown
  Bacterial polypetide isolated from the Sargasso Sea
ARVLVTEADPICALQAAMEGYEVVLMEEAISRADIVVTATGNKDIVTADHMRDMKDRAILCNIGHFDNEIEVEALKNYKWTEVKPQVHEIELPSGKRIILLAEGRLVNLGCATGHPSFVMSASFTNQVIAQIELWHNHKNYENKVYVLPKHLDEKVATLHLKKVGAKLTKLSKEQADYISVGTEGPFKPDAYRY

SEQ ID NO: 169261 - protein, 464 aa, Unknown
  Bacterial polypetide isolated from the Sargasso Sea
MDNDYKVADIKLAEFGRREISLAENEMPALMALRDKYRDEQPLAGAKIMGCIHMTIQTAVLMETLVDLGAELRWSSCNIFSTQDHAAAAMAAIGIPVFAWKGETDEEYEWCIEQTICKDGKPWDANMILDDGSDLTSMVHSKFPDMLETIHGVSEETTTGVHRLKEMLEKGELKIPAINVNDSVTKAKNDNKYGCRHSLNDALKRGTDMLLSGKKGLVIGYGDVGKGSAASLAQEGMIVSVVESDPICAMQACMDGFSVVSCYKNGVVTRDPKDINMAVMGDTDLIVTTTGNVNVCDSAMIDTLKNTAVICNIGHFDNEIDTAFMRENYYWDEIKPQVHRVFRDTAPDGTPDLSSKNYVILLAEGRLVNLGNATGHPSRIMDGSFANQVLAQIHLYKQGFANVNDADKKAEMITVEVLPKKLDEEVASLMVEGFGGTVTQLTEEQADYINVPKDGPFKEESYKY

SEQ ID NO: 169262 - protein, 462 aa, Unknown
  Bacterial polypetide isolated from the Sargasso Sea
MANQAIDISKKENDYKVADISLADWGRKEITIAESEMPALIALREKYRSEQPLAGAKILGCIHMTIQTAVLIETLESLGAEVRWTSCNIFSTQDHAAAAIAANGTPVFAWKGETEEEYEWCLEQQVNKNGSPWDANMILDDGGDLTALLHKKYPDVLKSVHGVTEETTTGVHRLYEMLEAGELKIPAINVNDSVTKSKCDNKYGCRHSLNDAVKRATDHLLSGKRAVVVGYGDVGKGSAQSLRQEGMIVKITEIDPICAMQACLDGFEVVSIYENGKVSNGANKELLANTDMLVTSTGNYNVCNSEVLDALKSGSVVCNIGHFDNEIDTNYMRENWQWEEIKEQVHKIYRSEDKNDHLLLLAEGRLVNLGNATGHPSRIMDGSFANQVLAQIELYKRGFASKDAETQKELLKVEILPKHLDEEVAKYMVEGFGGVMTKLTKEQADYIGVEEEGPFKPEYYRY

SEQ ID NO: 169263 - protein, 440 aa, Unknown
  Bacterial polypetide isolated from the Sargasso Sea
MTRSLDGDFKVADLSLAGAGRKQIELAEEEMPGLMALRAQGYDSQPLAGARIMGSLHMTVQTAVLIETLVDLGAEVRWVSCNIFSTQDDAAAAVVVGRNGSEDDPAGVSVYAWKGETLEEYWWCTEQALNWPGASGPNLILDDGGDATLLVHLGARYEGAGAVPPPETATSHDEEEILKLLASVYEHSPSFWSDMISEIRGVSEETTTGVHRLYEMVERGDLQFPAYNVNDSVTKSKFDNLYGCRHSLIDGLNRATDVMLGGKVAFVAGYGDVGKGCAQSLRGQGCRVVVSEVDPINALQAAMEGFEVDRLDNVVGDIDIFVTTTGNKDIISAEHMGAMKHNAVVCNIGHFDNEIDMSGLEKLSDVQRRNIKPQVDEYIFPNGNSVIVLAEGRLVNLGCATGHPSFVMSMSFTNQVLAQMELHQNADSLANDVHLLPKRL

SEQ ID NO: 169264 - protein, 135 aa, Unknown
  Bacterial polypetide isolated from the Sargasso Sea
MRLQTTETNKSTKTTNKVINQSKKIVESLQYKIKDIALAKLGRDKIEISEKEMPGLMELRKKYSKSKPLNGFRLTGSLHMTIETAVLIETLKDLGADIRWASCNIFSTQDEAAAAIAKTKTPVFTWKGETLEEYW

SEQ ID NO: 169265 - protein, 88 aa, Unknown
  Bacterial polypetide isolated from the Sargasso Sea
MSDYKVKDINLAEFGRKEISLAETEMPGLMALRKEYKGKNPLKGARILGCLHMTIQTAVLIETLVDLGAEVRWSSCNIFFHARSCSSS

SEQ ID NO: 169266 - protein, 138 aa, Unknown
  Bacterial polypetide isolated from the Sargasso Sea
KQFVCNIGHFDAEIQVSKLKNLKWVNVKPQVDEIEFPDGKKIILLAEGRLVNLGCATGHPSFIMSASFTNQVLAQIELFNNKDKYTNKVYMLPKELDEKVASLHLKKLNVNLTKLNEEQSEYIGVPNNGPFKPDHYRY

SEQ ID NO: 169267 - protein, 93 aa, Unknown
  Bacterial polypetide isolated from the Sargasso Sea
AEGRLVNLGCATGHPSFVMSASFTNQVTAQIELWNNSDKYEKKVYVLPKHLDEKVARLHLEKVGAKLTKMSKDQADYISVTPDGPYKPDAYRY

SEQ ID NO: 169268 - protein, 429 aa, Unknown
  Bacterial polypetide isolated from the Sargasso Sea
MSQDFKVKDISLAEFGRKEISLAETEMPGLMALRKEYKTKKPLKGAHILGCLHMTIQTAVLIETLVELGAEVRWSSCNIFSTQDHAAAAIAKAGIPVFAWKGETEKEYWWCVKQTIEGKKDWKPNLILDDGGDLTGLMHKDYKDMLKNIKGVSEETTTGVLALKKMEANKELLIPAINVNDSVTKSKFDNLYGCRESLVDGIKRATDIMMSGKVAIVAGFGDVGKGSAASLRQAGARVMVTETDPICALQAAMEGYEVVLMNDAIKDADIVVTATGNKDIVTADHMRDMKDRAILCNIGHFDNEIQVEALKNYKWDEIKPQVHEIELPSKKRIILLAEGRLVNLGCATGHPSFVMSASFTNQVIAQIELFHNSDKYEKKVYVLPKHLDEKVAKLHLDKVGAKLTKMTKEQADYISVKTSGPFKPDSYRY

SEQ ID NO: 169269 - protein, 259 aa, Unknown
  Bacterial polypetide isolated from the Sargasso Sea
MNDYKVKDINQAEFGRKEISLAETEMPGLMALRSEYKGKNPLKGARILGCLHMTIQTAVLIETLVDLGAEVRWSSCNIFSTQDHAAAAIAKAGIPVFAWKGETEEEYWWCVRQTIEGKKDWKPNMILDDGGDLTALMHKDYKELLEDIKGLSEETTTGVLALKKMEEQGTLLVPAINVNDSVTKSKFDNLYGCRESLVDGIKRATDVMMSGKVAIVAGFGDVGKGSAASLRQSGARVMVTETDPICALQAAMEGYEVVL

SEQ ID NO: 169270 - protein, 142 aa, Unknown
  Bacterial polypetide isolated from the Sargasso Sea
MKNKTLTEYVPYKIKDLSLAEWGKKEIKLAEAEMPGLMALRAKLKKEKPLKGARIAGCLHMTIQTAVLIETLIDLGAEVTWSSCNIFSTQDHAAAAIASMGIPIYAWKGMNEKEFNWCIEQTLFFGEKREPLNMILDDGGDL

SEQ ID NO: 169271 - protein, 464 aa, Unknown
  Bacterial polypetide isolated from the Sargasso Sea
MENDYKVADINLAEFGRREISLAENEMPALMALREKYRSEQPLAGAKIMGCIHMTIQTAVLMETLIDLGAELRWSSCNIFSTQDHAAAAMAERGVPVFAWKGETEEEFEWCIEQTICKDGKPWDANMILDDGSDLTAMVHEKFPEMLETIHGVSEETTTGVHRLKEMLEKGELKVPAINVNDSVTKAKNDNKYGCRHSLNDALKRGTDMLLSGKKGLVIGYGDVGKGSAASLAQEGMIVSVVESDPICAMQACMDGFSVVSCYKDGVVTRNAADINMQVMGDTDLVVTTTGNVNVCDSAMLSTLKNTAVVCNIGHFDNEIDTAFMRENYYWDEIKPQVHRIFRDTAPDGTPDLSSKNYIILLAEGRLVNLGNATGHPSRIMDGSFANQVLAQIHLYKQGFANINDEDTRAEMITVEVLPKKLDEEVASLMVEGFGGTVTKLTKDQADYINVPQDGPFKEESYKY

SEQ ID NO: 169272 - protein, 118 aa, Unknown
  Bacterial polypetide isolated from the Sargasso Sea
MSKQDYKVKDISLAEYGRQEILLAQDEMPALMQLRDNYRDKQPLKGAKIMGCIHMTVQTAVLIETLIELGAEVRWSSCNIFSTQDHAAAAIADQGIPVFAWKGETEEEYEWCLDQTIN

SEQ ID NO: 169273 - protein, 388 aa, Unknown
  Bacterial polypetide isolated from the Sargasso Sea
SCNIFSTQDHAAAAIADQGIPVYAKKGETLDEYWQYTHYILDWGSESPNMILDDGGDATGLLILGSKAEKDLSVLDNPGNEEEVALFNSIKSKLENDSDFYSRIKSNIIGVTEETTTGVARLYQLQKQNALPFPAINVNDSVTKSKFDNLYGCRESLVDSIKRATDVMIAGKVALVMGFGDVGKGSAQSLRGLGAIVKVAEVDPICALQAAMEGFSVVTLDDVVEDIDIFVTATGNYQVITNENLVKMKDEAIVCNIGHFDNEIDVASLKDYPWENIKPQVDHITLPSGNKIILLAEGRLVNLGCATGHPSFVMSNSFTNQVLAQIELFNNSEKYAKEVYVLPKHLDEMVARLHLDKIGAKLTKLTKEQADYINVSVEGPYKPELYRY

SEQ ID NO: 169274 - protein, 399 aa, Unknown
  Bacterial polypetide isolated from the Sargasso Sea
MALREEYYNKKPLKDARIIGCLHMTIQTAVLIETLVDLGAEVRWSSCNIFSTQDHAAAAIAKAGIPVYAWKGETEEEYLWCIKQTIVGKSDWKPNMLLDDGGDLTAIMHNEHKELMKDVKGVSEETTTGIKALNKMEKDKSLLVPAINVNDSVTKSKFDNLYGCRESLVDGIRRATDVMMSGKIAIVAGFGDVGKGSAASLRQSGARVLVTEADPICALQAAMEGYEVVLMEEAISRADIVVTATGNKDIVTADHMREMKDRAILCNIGHFDNEIQVEALKNYKWTEVKPQVHEIELTSGKRIILLAEGRLVNLGCATGHPSFVMSASFTNQVIAQIELWHNHKNYDNKVYVLPKHLDEKVATLHLKKVGAKLTKLSKDQADYISVGTEGPFKPDAYRY

SEQ ID NO: 169275 - protein, 200 aa, Unknown
  Bacterial polypetide isolated from the Sargasso Sea
MSKQDYKVKDISLAEYGRQEILLAQDEMPALMQLRDNYRDKQPLKGAKIMGCIHMTVQTAVLIETLIELGAEVRWSSCNIFSTQDHAAAAIADQGIPVFAWKGETEEEYEWCLDQTINKDGKPWEANLILDDGGDLTLKVHKDYPEMLSKIHGISEETTTGVKRLKEMLESGELKVPAINVNDSITKSKNDNKYGCRHGL

SEQ ID NO: 169276 - protein, 431 aa, Unknown
  Bacterial polypetide isolated from the Sargasso Sea
RTKYKDAQPLAGAKVMGCIHMTIQTAVLIETLVDLGAEVRWSGCNIFSTQDHAAAAIAAAGIPVFAWKGQTDEEFDWCIEQTIVKDGSPWDANMILDDGGDLTHMVHSKFPDMLENIHGISEETTTGVHRLKAMLEKNELKVPAINVNDSVTKSKNDNKYGCRHSLNDAIKRGTDMFLSSKKALVIGYGDVGKGSALSLAQEGMIVRVVESDPICAMQACMDGFEVVSTYNNGVVTRDVNDINMAVLEDTDLIVTTTGNVNVCDEAMLRSVKNTAVICNIGHFDNEIDTQFMRDKWYWEEIKPQVHRVFRDTSPSDTPDLQSKNYIILLAEGRLVNLGNATGHPSRIMDGSFANQVLAQMHLYKQGFANVNDADKQKEMITVEVLPKKLDEEVAELMVQGFGGIITKLTGEQADYINVPVDGPFKEEEYKY

SEQ ID NO: 169277 - protein, 187 aa, Unknown
  Bacterial polypetide isolated from the Sargasso Sea
TDPICALQAAMEGYEVVLMDEMIKEADIVVTATGNKDIVTADHMREMKDRAILCNIGHFDNEIQVDALKNYKWDEIKPQVHEITLNDNKRIILLAEGRLVNLGCATGHPSFVMSASFTNQVTAQIELWNNPDQYEKKVYVLPKHLDEKVARLHLEKVGAKLTRLSEDQAEYISVTTEGPYKPEAYRY

SEQ ID NO: 169278 - protein, 323 aa, Unknown
  Bacterial polypetide isolated from the Sargasso Sea
MANEDYKVADINLADFGRKEISLAETEMPGLMALRREYKGKKPLEGARILGCLHMTIQTAVLIETLVELGADVRWSSCNIFSTQDHAAAAIAKAGIPVYAWKGETEEEYWWCVRQTIEGKEGWKPNMILDDGGDLTSLMHKEYNDLLKEVKGLSEETTTGVLALKKMESEGTLMVPAINVNDSVTKSKFDNLYGCRESLVDGIKRATDVMMSGKVAIVAGFGDVGKGSAASLRQSGARVMVTETDPICALQAAMEGYEVVLMDEMIKEADIVVTATGNKDIVTADHMRDMKDRAILCNIGHFDNEIQVDALRNYKWDEIKPQV

SEQ ID NO: 169279 - protein, 428 aa, Unknown
  Bacterial polypetide isolated from the Sargasso Sea
MSDYKVKDISQADFGRKEISLAETEMPGLMALRKEYKGKSPLKGARILGCLHMTIQTAVLIETLVDLGAEVRWSSCNIFSTQDHAAAAIAKVGIPVFAWKGETEEEYWWCVKQTIEGKKDWKPNMILDDGGDLTALMHKDYKDLLKDIKGLSEETTTGVLALKKMEAQGTLLVPAINVNDSVTKSKFDNLYGCRESLVDGIKRATDVMMSGKVAIVAGFGDVGKGSAASLRQSGARVMVTETDPICALQAAMEGYEVVLMDEMIKEADIVVTATGNKDIVTADHMREMKDRAILCNIGHFDNEIQVEALKNYKWDEIKPQVHEITLPSKKRIILLAEGRLVNLGCATGHPSFVMSASFTNQVTAQIELWNNSDKYENKVYVLPKHLDEKVARLHLEKVGAKLTKMSKDQADYISVTPDGPYKPDAYRY

SEQ ID NO: 169280 - protein, 156 aa, Unknown
  Bacterial polypetide isolated from the Sargasso Sea
MEDFKVKDLTQAEFGRKEISIAESEMPGLMALREEYSGKSPLKGAKIIGCLHMTIQTAVLIETLVALGAEVRWSSCNIFSTQDHAAAAIAKAGVPVYAWKGETEEEYIWCIKQTIEGKKDWAPNMLLDDGGDLTAIMHQEYKELLKNVKGVSEETT

SEQ ID NO: 169281 - protein, 142 aa, Unknown
  Bacterial polypetide isolated from the Sargasso Sea
MAETAKENKIDLMNDYKVADISLAEWGEKEIKIAETEMPGLMSIREEFGKEKPLEGARIAGCLHMTIQTAVLIETLIELGADIRWSSCNIFSTQDHAAAALAAKGIPIFAWKDESEEEYWWCVEKQSTVQTVGRQILYLMTA

SEQ ID NO: 169282 - protein, 428 aa, Unknown
  Bacterial polypetide isolated from the Sargasso Sea
MEDYKVKDISQADFGRKEISIAESEMPGLIALREEYSKEKPLKGARIIGCLHMTIQTAVLIETLVELGAEVRWSSCNIFSTQDHAAAAIAKAGIPVYAWKGETEEEYLWCIKQTIVGKSDWKPNMLLDDGGDLTAIMHNEYKELMKDVKGVSEETTTGIKALNKMEKDQSLLVPAINVNDSVTKSKFDNLYGCRESLVDGIRRATDVMMSGKIAIVAGFGDVGKGSAASLRQSGARVLVTEADPICALQAAMEGYEVVLMEEAISRADIVVTATGNKDIVTADHMRDMKDRAILCNIGHFDNEIQVEALKNYKWSEVKPQVHEIELPSGKRIILLAEGRLVNLGCATGHPSFVMSASFTNQVIAQIELWHNHKNYDNKVYVLPKHLDEKVATLHLKKVGAKLTKLSKDQADYISVGTEGPFKPDAYRY

SEQ ID NO: 169283 - protein, 342 aa, Unknown
  Bacterial polypetide isolated from the Sargasso Sea
WDANMILDDGGDLTHMVHTKFPDMLETIHGISEETTTGVHRLKAMLESNTLKVPAINVNDSVTKSKNDNKYGCRHSLNDAIKRGTDMFLSSKKALVIGYGDVGKGSALSLAQEGMIVRVVESDPICAMQACMDGFEVVSTYKNGIVTRDVKDINLGLLEDTDLIVTTTGNVNVCDEAMLKTVKNTAVICNIGHFDNEIDTQYMRDEWYWEEIKPQVHRVFRDTAPSDTPDLQSKNYIILLAEGRLVNLGNATGHPSRIMDGSFANQVLAQMYLFKQGFANINDNDKKSEMLTVKVLPKKLDEEVAELMVQGFGGTITKLTSNQAEYINVPVDGPFKEEEYKY

SEQ ID NO: 169284 - protein, 352 aa, Unknown
  Bacterial polypetide isolated from the Sargasso Sea
NIFSTQDHAAAAIAKAGIPVYAWKGETEEEYWWCVRQTIEGKEGWKPNMILDDGGDLTSLMHKEYNDLLKEVKGLSEETTTGVLALKKMESEGTLMVPAINVNDSVTKSKFDNLYGCRESLVDGIKRATDVMMSGKVAIVAGFGDVGKGSAASLRQSGARVMVTETDPICALQAAMEGYEVVLMDEMIKEADIVVTATGNKDIVTADHMRDMKDRAILCNIGHFDNEIQVDALRNYKWDEIKPQVHEITFPDEKRIILLAEGRLVNLGCATGHPSFVMSASFTNQVTAQIELWNNSENYEKKVYVLPKHLDEKVARLHLEKVGAKLTQLSKDQADYISVTPEGPYKPEAYRY

SEQ ID NO: 169285 - protein, 246 aa, Unknown
  Bacterial polypetide isolated from the Sargasso Sea
MENNQSSPGTNFGDYKIADLSLSDLGRRKIGIAEGEMPGLMALRKEYGNEKPLAGARITGSLHMTVETAVLIETLVELGAEVRWSSCNIFSTQDEAAAAIAAAGIPVFAWKGETEEEYWWCIEQTLKWEGNEGPNLLLDDGGDLTWYVHDKYPQLLDPIMGLSEETTSGVHRLHQMARKNELKVPAYNVNDSVTKSKFDNLYGCRESLVDGIKRATDVMIAGKLAVVAGYGDVRKGSAASLRNQGA

SEQ ID NO: 169286 - protein, 273 aa, Unknown
  Bacterial polypetide isolated from the Sargasso Sea
TTGVLALKKMEEQGQLLVPAINVNDSVTKSKFDNLYGCRESLVDGIKRATDVMMSGKVAIVAGFGDVGKGSAASLRQSGARVLVTETDPICALQAAMEGYEVVLMDEMIGQADIVVTATGNKDVVTADHMRAMKDRSILCNIGHFDNEIQVEALKNYKWDEVKPQVHEITFPDDKRLILLAEGRLVNLGCGTGHPSFVMSASFTNQVIAQIELWNNSDNYENKVYVLPKHLDEKVARLHLDKVGAKLTPLSKEQADYISVTPEGPYKPHAYRY

SEQ ID NO: 169287 - protein, 373 aa, Unknown
  Bacterial polypetide isolated from the Sargasso Sea
HAAAAIAKANIPVFAKKGESLEEYWEYVDKIFLWDDDHSPNMILDDGGDATLYIILGSRLEYGEDVLKNPKNEEEIALKNQILKRIKSSPNWFSKKKNFIKGVTEETTTGVLRLYQMSEKGELPFPAINVNDSVTKSKFDNLYGCRESLVDGIRRATDVMLSGKVAVVAGFGDVGKGSAASLRQGGARVLVTEIDPICALQAAMEGYEVCSMDEAAKKGDIFVTATGNKDVITMDHMRDMKDRAIVCNIGHFDSEIQIEALQNMKWNEVKPQVDEVEFNDGKKIIVLAKGRLVNLGCATGHPSFVMSASFTNQVLAQLEIWEKSDQYENKVYTLPKHLDEKVAQLHLEKVGAILTKIVERSGKLYWCFCRWTV

SEQ ID NO: 169288 - protein, 352 aa, Unknown
  Bacterial polypetide isolated from the Sargasso Sea
PDGSGPDLIVDDGGDATLLIHKGYELEEYFSKYGDVPEITTNVEEERIIENLLREVLAKDPNHWHKVQKSIIGVSEETTTGVHRLVQMEKDGHLLFPAYNVNDSVTKSKFDNVYGCRESLADGLKRALDVMVAGKTVVVCGYGDVGRGCAQSMRGYGARVIVTEIDPICALQAAMEGFEVTTVEEVLKDGHIFVTTTGNKDVITKDHMYGMRDQAIVCNIGHFDNEIQVNALNDDSSVDREIIKPQVDRYTFPNGNQVFLLAEGRLVNLGCATGHPSFVMSNSFTNQVMAQIALAKEAPEIGVYMLPKELDEEVARLHLDHLGVILTELTDEQADYIGVSKNGPYKPDHYRY

SEQ ID NO: 169289 - protein, 429 aa, Unknown
  Bacterial polypetide isolated from the Sargasso Sea
MSQDYKVKDIELAEWGLKEIAIAETEMPGLMALREEYGNSKPLDGARIVGCLHMTIQTAVLIETLVHLGASVRWSSCNIFSTQDQAAAAIASKNIPVFAWKGMSDEEFWWCIEQTLTGPDGWKPNMILDDGGDATQIIHEKFPELLKDIRGLSEETTTGVHRLKDMEKKGLLKVPAINVNDSVTKSKFDNLYGCKESLVDGIRRGTDVMMAGKVAVVAGYGDVGKGSAASLRGAGARVCVTEIDPINALQAAMEGYEVVTMDDAASYGDIFVTATGNLDVITLDHMRKMRDRAIVCNIGHFDNEIQTEALQNYKSDEIKPQVREVEFPDGKKILLLSEGRLVNLGNATGHPSFVMSASFSNQVIAQIELWENYKNYENKVYVLPKKLDEKVALLHLKKVGAKLTELNEKQADYIGVSKAGPFKDDTYRY

SEQ ID NO: 169290 - protein, 338 aa, Unknown
  Bacterial polypetide isolated from the Sargasso Sea
MSKYLPFKVKDINLADWGRKEINLAEAEMPGLIALRDEYGKIKPLKGARIAGCLHMTIQTAVLIETLVELGAEVTWSSCNIFSTQDHAAAAIAATGIQVYAWKGMNEEEFNWCIEQTLYFGEKRKPLNMILDDGGDLTNLVLDNYPDLVDEIKGLSEETTTGVHRLYERVKNGTLPLPAINVNDSVTKSKFDNKYGCQESAVDAVRRATDIMMAGKRVVVAGYGDVGKGTVASFSGAGAIVTVVEIDPICALQASMDGFEVKRMKTVIGNADIVVTATGNKDILKEEHFRLMKDKTIVCNIGHFDNEIDMEWLNNNYGHTKNEIKPQVDLYNIEGTDI

SEQ ID NO: 169291 - protein, 341 aa, Unknown
  Bacterial polypetide isolated from the Sargasso Sea
MENDYKVADINLAEFGRREISLAENEMPALMALRDKYRAEQPLAGAKIMGCIHMTIQTAVLMETLVDLGAELRWSSCNIFSTQDHAAAAMAAKGVPVFAWKGETDEEYEWCIEQTICKDGKPWDANMILDDGSDLTSMVHEKFPDMLETIHGVSEETTTGVHRLKEMLEKGELKIPAINVNDSVTKAKNDNKYGCRHSLNDALKRGTDMLLSGKKGLVIGYGDVGKGSAASLAQEGMIVSVVESDPICAMQACMDGFSVVSCYKDGVVTRDPKDINMAVMGDTDLIVTTTGNVNVCDSAMISTLKNTAVICNIGHFDNEIDTAFMRENYYWDEIKPQVHRV

SEQ ID NO: 169292 - protein, 394 aa, Unknown
  Bacterial polypetide isolated from the Sargasso Sea
MSFKDYKVADLNLADFGRKEIALAEAEMPALMKLREKYGDSKPLAGAKIMGCIHMTIQTAVLIETLVALGASVRWSSCNIFSTQDHAAAAIAASEIPVFAWKGMNEEEFDWCIEQTILEDGKPWDANMILDDGGDLTAMVHEKYPDMLNNIHGISEETTTGVHRLWEMLEKGELKVPAINVNDSVTKSKNDNKYGCRHSLNDAIKRGTDMLLAGRKALVFGYGDVGKGSAMSLRQEGMVVRISEIDPICAMQACMDGYEVVSPYIDGVNNNSDDCINKALLADTDVIVTATGNVNVCDRFILDNLKSGTMVCNIGHFDNEIDTQYMRDHWHWEEIKPQVHKISKTKEANDKNYIVLLAEGRLVNLGNATGHPSRIMDGSFANQVLAQMFLYKQA

SEQ ID NO: 169293 - protein, 386 aa, Unknown
  Bacterial polypetide isolated from the Sargasso Sea
MENDYKVADINLAEFGRREISLAENEMPALMALREKYRSEQPLAGAKIMGCIHMTIQTAVLMETLIDLGAELRWSSCNIFSTQDHAAAAMAARGVPVFAWKGETEEEFEWCIEQTICKDGKPWDANMILDDGSDLTAMVHEKFPEMLETIHGVSEETTTGVHRLKEMLEKGELKVPAINVNDSVTKAKNDNKYGCRHSLNDALKRGTDMLLSGKKGLVIGYGDVGKGSAASLAQEGMIVSVVESDPICAMQACMDGFSVVSCYKDGVVTRNAADINMQVMGDTDLVVTTTGNVNVCDSAMLSTLKNTAVVCNIGHFDNEIDTAFMRENYYWDEIKPQVHRIFRDTAPDGTPDLSSKNYIILLAEGRLVNLGNATGHPSRIMDGSFR

SEQ ID NO: 169294 - protein, 236 aa, Unknown
  Bacterial polypetide isolated from the Sargasso Sea
MENDYKVADINLAEFGRREISLAENEMPALMALREKYKDEQPLAGAKIMGCIHMTIQTAVLMETLLELGAELRWSSCNIFSTQDHAAAAMAARGVPVFAWKGETEEEYEWCIEQTICKDGNPWDANMILDDGSDLTAMVHEKFPDMLETIHGVSEETTTGVHRLKEMLEKGELKIPAINVNDSVTKAKNDNKYGCRHSLNDALKRGTDMLLSGKKGLVIGYGDVEKDRLPVWLKKE

SEQ ID NO: 169295 - protein, 228 aa, Unknown
  Bacterial polypetide isolated from the Sargasso Sea
MIVRVVESDPICAMQACMDGFSVVSCYKDGVVTRDPKDINMEIMGDTDLIVTTTGNVNVCDSAMLSTLKNTAVVCNIGHFDNEIDTAFMRENYYWDEIKPQVHRVFRDTPPDGTPDLSSKNYIILLAEGRLVNLGNATGHPSRIMDGSFANQVLAQIHLYKQGFANVNDADKKAEMLTVEVLPKKLDEEVASLMVQGFGGTVTQLTKEQADYINVPQDGPFKEETYKY

SEQ ID NO: 169296 - protein, 199 aa, Unknown
  Bacterial polypetide isolated from the Sargasso Sea
LRSQGARVIVTEIDPICALQASMEGYEVSTVDDVTKSADIFVTATGNKDVITLEHMREMKDRAIVANIGHFDSEIQVSKLKNFKWDNIKPQVDEIEFPDGKKIILLAEGRLVNLGCATGHPSFVMSASFSNQVLAQIEIWNNYKNYENKVYVLPKHLDEKVAYIHLEKLGVKLTELSDDQADYLSLNKKGPFKPDHYRY

SEQ ID NO: 169297 - protein, 221 aa, Unknown
  Bacterial polypetide isolated from the Sargasso Sea
DAGWQVAVVAGYGDVGKGSAASLRQGGARVMVTEIDPICALQAAMEGYEVVTMEQAAPKADIFVTATGNQDVITIEHMRDMKDRAIVCNIGHFDNEIQVAALNNYTWSEVKPQVDEIEFPDGKRMILLAKGRLVNLGCATGHPSFVMSASFTNQVLAQMELWAEGEKYENKVYTLPRHLDEKVAALHLSKVGATLSTLRPDQADYIGVEQQGPFKSEQYRY

SEQ ID NO: 169298 - protein, 357 aa, Unknown
  Bacterial polypetide isolated from the Sargasso Sea
RWSSCNIFSTQDHAAAAIATDGIPVFAWKGETEEEYDWCIKQTIEGPKGWRPNMLLDDGGDLTKIMHEDYPELLEAVRGVSEETTTGVLRLLEMQEAGSLKIPAFNVNDSVTKSKFDNLYGCRESLTDGIRRATDVMLSGKVAVVNGYGDVGKGSASSLRNGGARVIVTEVDPICALQAAMEGFEVATMDEYASKADIFVTATGNQDIITVDHMREMKDRAIVCNIGHFDTEIQVEGLRNYKWYPVKPQVDEVEFPDGKRIILLAEGRLVNLGCATGHPSFVMSASFTNQTLAQIELWGNPGKYSNEVYILPKSLDEKVAELHLARVGAKLTKMSKEQAAYVGVSQEGPFKSDNYRY

SEQ ID NO: 169299 - protein, 170 aa, Unknown
  Bacterial polypetide isolated from the Sargasso Sea
VCDSAMISTLKNTAVVCNIGHFDNEIDTAFMRENYYWDEIKPQVHRVFRDTAPDGTPDLSSKNYIILLAEGRLVNLGNATGHPSRIMDGSFANQVLAQIHLYKQGFANVNDADKRAEMITVEVLPKKLDEEVASLMVEGFGGTVTKLTQDQADYINVPQDGPFKEESYKY

SEQ ID NO: 169300 - protein, 429 aa, Unknown
  Bacterial polypetide isolated from the Sargasso Sea
MSQDFKVKDINLADFGRKEISIAESEMPGLMALRKEYKGKKPLNGANILGCLHMTIQTAVLIETLVELGASVRWSSCNIFSTQDHAAAAIAKAGIPVYAWKGETEKEYWWCIKQTIEGDKNWKPNMILDDGGDLTGLMHKDYKDLLKNIKGVSEETTTGVLALKKMESNKTLLVPAINVNDSVTKSKFDNLYGCRESLVDGIKRATDVMMSGKVAIVAGFGDVGKGSAASLRQSGARVMVTETDPICALQAAMEGYEVVLMDEAIKDADIVVTATGNKDIVTADHMREMKDRAILCNIGHFDNEIQVDALKNYKWTEIKPQVHEIELPSKKRIILLAEGRLVNLGCATGHPSFVMSASFTNQVIAQIELWNNSKNYEKKVYVLPKHLDEKVATLHLGKVGAKLTKMSKEQADYISVKPSGPFKPDTYRY

SEQ ID NO: 169301 - protein, 60 aa, Unknown
  Bacterial polypetide isolated from the Sargasso Sea
WNNSDNYENKVYVLPKHLDEKVARLHLDKVGAKLTPLSKEQADYISVTPEGPYKPHAYRY

SEQ ID NO: 169302 - protein, 348 aa, Unknown
  Bacterial polypetide isolated from the Sargasso Sea
LCDGKPWDANMILDDGGDLTSMAHEKYPEILENIHGITEETTTGVVRLNEMIEKGELKVPAINVNDSVTKSKNDNKYGTRHSLNDGIKRGTDMFLAGRKALVIGYGDVGKGSAQSLKQEGMVVRVTEIDPICAMQACMDGYEVVSPYIDGINNDSEDSINKALLEDTDLIVTTTGNYHVCDKHMLKAVKDGAVICNIGHFDTEIDTQYMRDEWCWEEVKPQVHKVFRDTKAGDAPNLDSENYIILLSEGRLVNLGNATGHPSRIMDGSFANQVLAQMYLYEKKFAHINDDDKKKELIKVEVLPKKLDEEVASYMVEGFGGVMTKLSSDQADYINVPEEGPFKSEIYKY

SEQ ID NO: 169303 - protein, 115 aa, Unknown
  Bacterial polypetide isolated from the Sargasso Sea
MSETLTQPLVELLPYKVKDIGLAEDGRKALDIAEKEMPGLMSTRNKYGPEKPLAGKKLTGSLHMTVETAVLIETLVDLGADVRWASCNIFSTQDHAAAVIAETGVPVFAWKGETL

SEQ ID NO: 169304 - protein, 208 aa, Unknown
  Bacterial polypetide isolated from the Sargasso Sea
MENDYKVADMSLAEFGRREISLAENEMPALMALRTKYKDVQPLAGAKVMGCIHMTIQTAVLIETLVDLGAEVRWSGCNIFSTQDHAAAAIAAAGIPVFAWKGQTDEEFDWCIEQTIVKDGIPWDANMILDDGGDLTHMVHSKFPEMLESIHGISEETTTGVHRLKAMLEKNELKVPAINVNDSVTKSKNDNKYGCRHSLNDAIKRGTD

SEQ ID NO: 169305 - protein, 472 aa, Unknown
  Bacterial polypetide isolated from the Sargasso Sea
MNAIIDSKATHDYVVADMALAGWGRKELNIAETEMPGLVQIRDEYKAQQPLKGARIAGSLHMTIQTGVLIETLKALGADVRWASCNIFSTQDHAAAAIVEAGTPVFAFKGESLDEYWEFSHRIFEWPNGEFANMILDDGGDATLLLILGAKAEKDRSVIAKPTNEEEVALYKSIAKHLDADPTWYSTRLAHIKGVTEETTTGVHRLYQMEKDGRLPFPAFNVNDSVTKSKFDNLYGCRESLVDGIKRATDVMIAGKVAVVAGYGDVGKGCAQSLRGLGATVWVTEIDPICALQAAMEGYRVVTMEYAADKADIFVTATGNYHVINHDHMKAMRHNAIVCNIGHFDSEIDVASTRQYQWENIKPQVDHIIFPDGKRVILLAEGRLVNLGCATGHPSFVMSNSFANQTLAQIELFVRGNEYENKVYVLPKHLDEKVARLHLARIGANLSVLSDEQASYIGVQKDGPFKPNHYRY

SEQ ID NO: 169306 - protein, 299 aa, Unknown
  Bacterial polypetide isolated from the Sargasso Sea
MEFKDYKVADINLADWGRKEIILAQAEMPALMKLRERYGEEKPLKGAKIMGCIHMTIQTAVLIETLVELGAEVRWSSCNIFSTQDHAAAAIAAAGIPVFAWKGMNDEEFDWCIEQTILKGEKPWDANMILDDGGDLTAMVHDKFPEMLESIHGISEETTTGVHRLNEMVEKGELKVPAINVNDSVTKSKNDNKYGCRHSLNDAIKRATDMLLSGRKALVIGYGDVGKGSAMSLRQEGMVTRVTEIDPICAMQACMDGYEVVSPYVNGQNNNNDESINKSLLQDTDLIVTTTGNVNVCDK

SEQ ID NO: 169307 - protein, 440 aa, Unknown
  Bacterial polypetide isolated from the Sargasso Sea
MKNKTLTEYVPYKIKDLSLAEWGKKEIKLAEAEMPGLMALRAKLKKEKPLKGARIAGCLHMTIQTAVLIETLIDLGAEVTWSSCNIFSTQDHAAAAIASMGIPIYAWKGMNEKEFNWCIEQTLFFGEKREPLNMILDDGGDLTNMVLDQYPELVPGIKGLSEETTTGVHRLYDRMKAGKLPLPAINVNDSVTKSKFDNKYGCKESAVDAVRRATDIMLAGKRVVVCGYGDVGKGTAASFRGAGSIVTVTEIDPICALQASMDGYEVKKLNTVVENSDIIITATGNKDIVTEEHFKKMKDKAIVCNIGHFDNEIDMDWLNSNYGNTKSTIKPQVDIYTLEKNSQVIVLAEGRLVNLGCATGHPSFVMSNSFTNQTLAQIELWKNHNNYENKVYMLPKNLDEMVALLHLPKLGVELEDLTEDQAEYIGVNKVGPYKPDYYRY

SEQ ID NO: 169308 - protein, 314 aa, Unknown
  Bacterial polypetide isolated from the Sargasso Sea
MSNNDYKVADMELADWGRKEIVIAQSEMPALMKLRDRYGAEQPLKGAKILGCIHMTIQTAVLIETLTALGAEVRWSGCNIFSTQDHAAAAIAESGVPVFAWKGQTEEEFDWCIEQTILCDGKPWEANMILDDGGDLTSMAHNKYPEILENIHGITEETTTGVLRLNEMIEKGELKVPAINVNDSVTKSKNDNKYGTRHSLNDGIKRGTDMFLAGRKALVIGYGDVGKGSAQSLKQEGMVVRVTEIDPICAMQACMDGYEVVSPYIDGVNNDSEESMNLALLEDTDLIVTTTGNYKVCDKHMLKVVKNGAVICNI

SEQ ID NO: 169309 - protein, 429 aa, Unknown
  Bacterial polypetide isolated from the Sargasso Sea
MSSDYKVKDIKLADFGRKEISLAETEMPGLMALRKEFKNKKPLKGARILGCLHMTIQTAVLIETLVDLGAEVRWSSCNIFSTQDHAAAAIAKAKIPVFAWKGETEKEYWWCIKQTIEGKKDWKPNMILDDGGDLTALMHKDYKEMLKGIKGVSEETTTGVLALKKMEANNQLLIPAINVNDSVTKSKFDNLYGCRESLVDGIKRATDVMMSGKVAIVAGFGDVGKGSAASLRQAGARVMVTETDPICALQAAMEGYEVVLMDDAIKDADIVVTATGNKDIVTADHMRNMKDRAILCNIGHFDNEIQVDALKNYKWDEIKPQVHEIELPSKKRIILLAEGRLVNLGCATGHPSFVMSASFTNQVIAQIELWNNSKKYEKKVYVLPKHLDEKVAMLHLGKVGAKLTKMSKEQADYISVKQSGPFKPDTYRY

SEQ ID NO: 169310 - protein, 137 aa, Unknown
  Bacterial polypetide isolated from the Sargasso Sea
MTKLNDKDYVVQDISLARWGKDEISIAETEMPGLMKLREEFQNKHPLKGSKIAGCLHMTIQTAVLIETLKDLGAELRWSSCNIFSTQDHAAAAIADQGIPVYAKKGETLEEYWEYVHKIFEWHDGGTPNMILDDGGD

SEQ ID NO: 169311 - protein, 91 aa, Unknown
  Bacterial polypetide isolated from the Sargasso Sea
AEGRLMNLGCATGHPSFVMSNSFANQVLAQIALAKDAPEVGVYMLPKELDEEVARLHLEHLGAKLTELSDDQAHYIGVSKDGPYKPSHYKY

SEQ ID NO: 169312 - protein, 73 aa, Unknown
  Bacterial polypetide isolated from the Sargasso Sea
MSSKVDYVVADISLADWGRKELDIAETEMPGLMSLREEYAKSQDLKGARIAGCLHMTIQTAVLIETLKVLGAD

SEQ ID NO: 169313 - protein, 246 aa, Unknown
  Bacterial polypetide isolated from the Sargasso Sea
MENDYKVADIKLAEFGRREISLAENEMPALMALRDKYRDEQPLAGAKIMGCIHMTIQTAVLMETLLDLGAELRWSSCNIFSTQDHAAAAMAAKGVPVFAWKGETEEEYEWCIEQTICKDGKPWDANMILDDGSDLTAMVHAKFPDMLETIHGVSEETTTGVHRLKEMLEKGELKIPAINVNDSVTKAKNDNKYGCRHSLNDALKRGTDMLLSGKKGLVIGYGDVGKGSAASLAQESMIVSVVESDP

SEQ ID NO: 169314 - protein, 464 aa, Unknown
  Bacterial polypetide isolated from the Sargasso Sea
MENDYKVADINLAEFGRREISLAENEMPALMALREKYRAEQPLAGAKIMGCIHMTIQTAVLMETLIDLGAELRWSSCNIFSTQDHAAAAMAAKGIPTFAWKGETEEEFEWCIEQTICKDGKPWDANMILDDGSDLTAMVHEKFPDMLETIHGVSEETTTGVHRLKEMLEKGELKIPAINVNDSVTKSKNDNKYGCRHSLNDALKRGTDMLLSGKKGLVIGYGDVGKGSALSLAQEGMIVSVVESDPICAMQACMDGFSVVSCYKDGVVTRDTKDINMQVMEDTDLVVTTTGNVNVCDSAMLSTLKNTAVVCNIGHFDNEIDTAFMRENFYWDEIKPQVHRIFRDTAPDGTPDLSSKNYIILLAEGRLVNLGNATGHPSRIMDGSFANQVLAQIHLYKQGFANINDADKKAEMITVEVLPKKLDEEVASLMVEGFGGVVTKLTQNQADYINVPKDGPFKEEEYKY

SEQ ID NO: 169315 - protein, 210 aa, Unknown
  Bacterial polypetide isolated from the Sargasso Sea
DGYEVVLPYIDGINNDSEDSMNKALLEDTDLIVTTTGNYKVCDKHMLKALKNGAVVCNIGHFDTEIDTQYMRDEWQWEEVKPQVHKIFRDTKAGETPDMDSEDYIILLSEGRLVNLGNATGHPSRIMDGSFANQVLAQMYLYEKKFAQINDEDKKQELIRVEVLPKKLDEEVASYMVEGFGGVMTKLSSDQAEYINVPEEGPFKSEIYKY

SEQ ID NO: 169316 - protein, 304 aa, Unknown
  Bacterial polypetide isolated from the Sargasso Sea
MLLDDGGDLTAIMHNDYPQLMSDIRGVSEETTTGVHRLYEMEKNNSLKVPALNVNDSVTKSKFDNLYGCRESLVDGIKRATDSMIAGKLAIVCGYGDVGKGSAASLRGLGANVLISEIDPICALQASMEGYQVVTIEDYLDKIDIFVTATGNLNVIQHDHMANMKNGAIVCNIGHFDNEIDVESLRKYEWENVKPQVDQIIFPDGKRIILLAEGRLINLGCATGHPSFVMSCSFTNQVMAQIELWKNYSKYENKVYVLPKNLDEKVAKLHLEKLGVKLTRLSKEQAEYINVDQDGPFKKDEYRY

SEQ ID NO: 169317 - protein, 372 aa, Unknown
  Bacterial polypetide isolated from the Sargasso Sea
MEFNDYKVADIGLADWGRKEIEIAETEMPGLITLRNELSKSKPLKGANIVGCLHMTIQTAVLIETLIDLGATVRWSSCNIFSTQDHAAAAIASKNIPVFAWKGETEEEYDWCIRQTIEGSPDWKPNIILDDGGDLTKIIHEEYQDLLDDIRGLSEETTTGVLRLYEMEKDNTLSVPAINVNDSVTKSKFDNFYGCRESLVDGLKRATDVMLAGKVAVVCGFGDVGKGSAESLRSQGARVIVTEIDPICALQASMEGYEVSTVNDVAKTADIFVTATGNKDVITLEHMREMKDRAIVANIGHFDSEIQVSELKNFKWDNIKPQVDEIEFPDGKKIILLAEGRLVNLGCATGHPSFVMSASFSNQVLAQIEIWN

SEQ ID NO: 169318 - protein, 464 aa, Unknown
  Bacterial polypetide isolated from the Sargasso Sea
MENDYKVADVSLAEFGRREISLAENEMPALMALRTKYKDAQPLAGAKVMGCIHMTIQTAVLIETLIDLGAEVRWSGCNIFSTQDHAAAAIAAAGIPVFAWKGQTDEEFDWCIEQTIVKDGIPWDANMILDDGGDLTHMVHSKFPEMLENIHGISEETTTGVHRLKAMLEKNELKVPAINVNDSVTKSKNDNKYGCRHSLNDAIKRGTDMFLSSKKALVIGYGDVGKGSALSLAQEGMIVRVVESDPICAMQACMDGFEVVSTYNNGIVTRDVKDINIAVLEDTDLIVTTTGNVNVCDEAMLRSVKNTAVICNIGHFDNEIDTQYMRDKWYWEEIKPQVHRVFRDTSPSDTPDLQSKDYVILLAEGRLVNLGNATGHPSRIMDGSFANQVLAQMHLYKQGFANINDADKQNEMITVEVLPKKLDEEVAELMVQGFGGTITKLTDEQADYISVPVDGPFKEEEYKY

SEQ ID NO: 169319 - protein, 472 aa, Unknown
  Bacterial polypetide isolated from the Sargasso Sea
MVIANSVKASIPNYVIADISLTDFGRKEIKIAETEMPGLMALRDKYQSEKPLKGAKIAGSLHMTIQTAVLIETLVELGAQVKWASCNIFSTQDHAAAAIADQGISVYAKKGETLDEYWQYTHYILDWGSDSPNMILDDGGDATGLLILGSKAEKDLSVLDNPGNEEEIALFNSIKSKLENDSDFYSRIKNNIIGVTEETTTGVARLYQLQKQNALPFPAINVNDSVTKSKFDNLYGCRESLVDSIKRATDVMIAGKVALVMGFGDVGKGSAQSLRGLGAIVKVAEVDPICALQAAMEGFSVVTLDDVVEDIDIFVTATGNYQVITNENLVKMKDEAIVCNIGHFDNEIDVASLKDYPWENIKPQVDHITLPSGNKIILLAEGRLVNLGCATGHPSFVMSNSFTNQVLAQIELFNKSEKYAREVYVLPKHLDEMVARLHLDKIGAKLTKLTKEQADYINVSVEGPYKPELYRY

SEQ ID NO: 169320 - protein, 428 aa, Unknown
  Bacterial polypetide isolated from the Sargasso Sea
MEDYKVKDIAQAEFGRKEISIAESEMPGLMALREEYSKEKPLKGARIIGCLHMTIQTAVLIETLVALGAEVRWSSCNIFSTQDHAAAAIAKAGIPVYAWKGETEEEYLWCIKQTIIGKPDWKPNMLLDDGGDLTAIMHNEYQDLMKDIKGVSEETTTGIKALNKMEKDKSLLVPAINVNDSVTKSKFDNLYGCRESLVDGIRRATDVMMSGKIAIVAGFGDVGKGSAASLRQSGARVLVTEADPICALQAAMEGYEVVLMEEAISRADIVVTATGNKDIVTADHMRDMKDRAILCNIGHFDNEIQVEALKNYKWTEVKPQVHEIELPSGKRIILLAEGRLVNLGCATGHPSFVMSASFTNQVIAQIELWHNHKNYENKVYVLPKHLDEKVATLHLKKVGAKLTKLSKEQADYISVGTEGPFKPDAYRY

SEQ ID NO: 169321 - protein, 181 aa, Unknown
  Bacterial polypetide isolated from the Sargasso Sea
MANEDYKVADINLADFGRKEISLAETEMPGLMALRSEYKGKKPLEGARILGCLHMTIQTAVLIETLVELGADVRWSSCNIFSTQDHAAAAIAKAGIPVYAWKGETEEEYWWCVRQTIEGKEGWKPNMILDDGGDLTSLMHKEYNDLLKEVKGLSEETTTGVLALKKMESDGTLMVPAINVN

SEQ ID NO: 169322 - protein, 188 aa, Unknown
  Bacterial polypetide isolated from the Sargasso Sea
MPYKVADMSLAEWGRKEITLAENEMPGLMALREKYGDSKPLAGARIAGCLHMTIQTAVLIETLVELGAEVTWSSCNIFSTQDHAAAAIAAAGIPVYAWKGESDEEFEWCIEQTLMFPSGKPLNMILDDGGDLTAMVHEQFPELLTNIYGVSEETTAGIHRLEVLNKTGALKVPAINVNDSATKSKFDN

SEQ ID NO: 169323 - protein, 428 aa, Unknown
  Bacterial polypetide isolated from the Sargasso Sea
MSDYKVKDINEAEFGRKEISLAETEMPGLMALRKEYKGKHPLKGARILGCLHMTIQTAVLIETLVDLGAEVRWSSCNIFSTQDHAAAAIAKAGIPVFAWKGETEEEYWWCVRQTIEGKKDWKPNMILDDGGDLTALMHKDYKDLLKDIKGLSEETTTGVLALKKMEEQGTLLVPAINVNDSVTKSKFDNLYGCRESLVDGIKRATDVMMSGKVAIVAGFGDVGKGSAASLRQSGARVMVTETDPICALQAAMEGYEVVLMDEMIGQADIVVTATGNKDIVTADHMRAMKDRSILCNIGHFDNEIQVEALKNYKWDEIKPQVHEITFPDNKRLILLAEGRLVNLGCATGHPSFVMSASFTNQVTAQIELWNNSDKYENKVYVLPKHLDEKVARLHLEKVGAKLTKLSKEQADYISVTTEGPYKPDAYRY

SEQ ID NO: 169324 - protein, 304 aa, Unknown
  Bacterial polypetide isolated from the Sargasso Sea
MILDDGGDLTGLMHKEYKDMLKSVKGISEETTTGVLALKKMESNKQLMVPAFNVNDSVTKSKFDNLYGCRESLVDGIKRATDVMMSGKVAVVAGFGDVGKGSAASLRQAGARVMVTETDPICALQAAMEGYEVVLMEDAIKDADIVVTATGNKDIVTADHMRNMKDRAILCNIGHFDNEIQVEALKNYKWDEIKPQVHEIELPSKKRIILLAEGRLVNLGCATGHPSFVMSASFTNQVIAQIELWNNSDKYENKVYVLPKHLDEKVAMLHLEKVGAKLTKMSKDQADYISVKPSGPFKPDTYRY

SEQ ID NO: 169325 - protein, 114 aa, Unknown
  Bacterial polypetide isolated from the Sargasso Sea
PDLSSKNYLILLAEGRLVNLGNATGHPSRIMDGSFANQVLAQIHLYKQGFANINDADKRAEMITVEVLPKKLDEEVASLMVQGFGGTVTKLTQDQADYINVPKDGPFKEETYKY

SEQ ID NO: 169326 - protein, 244 aa, Unknown
  Bacterial polypetide isolated from the Sargasso Sea
MPDYKVKDISQAEFGRKEISLAETEMPGLMALRKEYKGKSPLKGAKILGCLHMTIQTAVLIETLVDLGAEVRWSSCNIFSTQDHAAAAIAKAGIPVFAWKGETEEEYWWCVKQTIEGKKDWKPNMILDDGGDLTALMHKDYKELLKDIKGLSEETTTGVLALKKMEEQGTLMVPAINVNDSVTKSKFDNLYGCRESLVDGIKRATDVMMSGKVAIVAGFGDVGKGSAASLRQSGARVMITETDP

SEQ ID NO: 169327 - protein, 141 aa, Unknown
  Bacterial polypetide isolated from the Sargasso Sea
MKSGAIVCNIGHFDNEIDVASLKDYQWENIKPQVDEITFPDGKKIVLLAEGRLINLGCATGHPSFVMSCSFTNQVMAQIELWENHSKYEKEVYVLPKHLDEKVALLHLDKLDAKITTLTDEQAEYIGVGKNGPFKKDTYRY

SEQ ID NO: 169328 - protein, 416 aa, Unknown
  Bacterial polypetide isolated from the Sargasso Sea
IAGSLHMTIQTAVLIETLVDLGAEVKWASCNIFSTQDHAAAAIANQGISVYAKKGETLDEYWQYTHYILDWGSDSPNMILDDGGDATGLLILGSKAEKDLSVLDNPGNEEEIALFKSIKTKLENDSDFYSRIKSNIIGVTEETTTGVARLYQLQKQNALPFPAINVNDSVTKSKFDNLYGCRESLVDSIKRATDVMIAGKVALVMGFGDVGKGSAQSLRGLGAIVKVAEVDPICALQAAMEGFSVVTLDDVVEDIDIFVTATGNYQVITNKNLVKMKNEAIVCNIGHFDNEIDVASLKDYPWENIKPQVDHITLPSGNKIILLAEGRLVNLGCATGHPSFVMSNSFTNQVLAQIELFNKSDEYSKEVYVLPKHLDEMVARLHLDKIGAKLTKLTKEQADYINVAVEGPYKPELYRY

SEQ ID NO: 169329 - protein, 135 aa, Unknown
  Bacterial polypetide isolated from the Sargasso Sea
MAETAKENKIDLMDDFKVADISLAEWGEKEIKIAETEMPGLMSIREEFGTEKPLKGARIAGCLHMTIQTAVLIETLIELGADIRWSSCNIFSTQDHAAAALAAKGIPIFAWKDESEEEYWWCVEQTIKGPNGWTP

SEQ ID NO: 169330 - protein, 429 aa, Unknown
  Bacterial polypetide isolated from the Sargasso Sea
MIRDYKVKDINEADFGRKEISLAETEMPGLMALRKEYKGKKPLKGAKILGCLHMTIQTAVLIETLVELGAEVRWSSCNIFSTQDHAAAAIAKADIPVFAWKGETEEEYWWCIKQTIEGKKDWKPNMILDDGGDLTALMHKEYKNLLKDVKGVSEETTTGVLALKKMETNKELLIPAINVNDSVTKSKFDNLYGCRESLVDGIKRATDIMMSGKVAIVAGFGDVGKGSAASLRQAGARVMVTETDPICALQAAMEGYEVVVMDEAIKDADIVVTATGNKDIVTADHMRDMKDRAILCNIGHFDNEIQVEALKNYKWNEIKPQVHEIELPNKKRIILLAEGRLVNLGCATGHPSFVMSASFTNQVIAQIELWNNSDKYEKKVYVLPKHLDEKVAMLHLEKVGAKLTKMSKEQADYISVKPSGPFKPDTYRY

SEQ ID NO: 169331 - protein, 384 aa, Unknown
  Bacterial polypetide isolated from the Sargasso Sea
MSDFKVKDISLAEYGRQEILLAQDEMPALMQLRDNYRDEQPLKGAKIMGCIHMTIQTAVLIETLIDLGAEVRWSSCNIFSTQDHAAAAIADQGIPVFAWKGETEEEYEWCLDQTINKDGKPWEANLILDDGGDLTLKVHKDYPEMLSKIHGISEETTTGVKRLKEMLESGELKVPVINVNDSITKSKNDNKYGCRHGLDDAIKRGTDMLLSGKKALVIGYGDVGKGSADSLAQQKMIVDVTEVDPICAMQACFDGFSVVSAYKGGEVTNDGTKLNQELLKKYDLIVTTTGNVNVLDKFMLDALKSGCVICNIGHFDNEIDIKHLKTFEWYEVKSGVHKVKRSDNDYLLLLGEGRLVNLALATGHPSRVMDGSFCKSVLAQIMLF

SEQ ID NO: 169332 - protein, 381 aa, Unknown
  Bacterial polypetide isolated from the Sargasso Sea
LGCLHMTIQTAVLIETLVQLGGNVRWSSCNIFSTQDHAAAAIAKVGIPVFAWKGETEKEYWWCIKQTIEGKKDWKPNMLLDDGGDLTALMHKEYKDLLKSVRGLSEETTTGIKALKKMEAQKKLLVPAINVNDSVTKSKFDNLYGCRESLVDGIKRATDVMMSGKTAIVAGFGDVGKGSAASLRQSGARVMVTEADPICALQAAMEGYEVVLMDDAIGNADIVVTATGNKDIITADHIRKMKDRAILCNIGHFDNEIQVDALRNYKWDEIKPQVHEIELPNKKRIILLAEGRLVNLGCATGHPSFVMSASFTNQVIAQIELWNNHKKYENKVYVLPKHLDEKVAMLHLNKVGAKLTKLSKAQADYIGVDSQGPFKTDSYRY

SEQ ID NO: 169333 - protein, 188 aa, Unknown
  Bacterial polypetide isolated from the Sargasso Sea
MSNDYKVADIELADFGRREISLAENEMPALMALREKYKAEQPLAGAKIMGCIHMTIQTAVLMETLVDLGAELRWSGCNIFSTQDHAAAAMAKAGIPVFAWKGQTDEEFDWCIEQTILKDGKPWDANMILDDGGDLTHMVHTRFAEMLETIHGISEETTTGVHRLKAMLEKGELKVPAINVNDSVTKAK

SEQ ID NO: 169334 - protein, 428 aa, Unknown
  Bacterial polypetide isolated from the Sargasso Sea
MEDFKVKDISQADFGRKEISLAETEMPGLMALRKEYKGKLPLKGAKILGCLHMTIQTAVLIETLVELGAEVRWSSCNIFSTQDHAAAAIAKVGIPVFAWKGETEEEYWWCVKQTIEGKKDWKPNMILDDGGDLTALMHKEYKDLLKSVKGLSEETTTGVLALKKMESEGKLLVPAINVNDSVTKSKFDNLYGCRESLVDGIKRATDVMMSGKVAIVAGFGDVGKGSAASLRQSGARVMVTETDPICALQAAMEGYEVVLLDEMIKEADIVVTATGNKDIVTADHMREMKDRAILCNIGHFDNEIQVEALKNYKWDEIKPQVHEITLPSKKRIILLAEGRLVNLGCATGHPSFVMSASFTNQVTAQIELWNNSDKYEKKVYVLPKHLDEKVARLHLDKVGAKLTKLSKDQADYISVKEEGPYKPDAYRY

SEQ ID NO: 169335 - protein, 75 aa, Unknown
  Bacterial polypetide isolated from the Sargasso Sea
MSASFTNQVTAQIELWNNSENYEKKVYVLPKHLDEKVARLHLEKVGAKLTQLSKDQADYISVTPEGPYKPEAYRY

SEQ ID NO: 169336 - protein, 421 aa, Unknown
  Bacterial polypetide isolated from the Sargasso Sea
GSLHMTIETAVLIETLVDLGADVRWASCNIFSTQDHAAAAIADAGVPVFAWKGETLEEYWWCTMQALTFPDGSGPDLIVDDGGDATLLIHKGYELEEFYEKNNYTPEVTTTIEEEQVIEKLLRDVLEKNPNHWRPVAKNIIGVSEETTTGVHRLVQMDKDGHLLFPAYNVNDSVTKAKFDNVYGCRESLADGLKRSLDIMVAGKTVLVCGYGDVGKGSAQSLRGYGARVLISEIDPICALQAAMEGFEVTTIEDVISDVHIFVTATGNKDIITKDHMYKMRDQAVVCNIGHFDNEIQVNAVNDDESVKKENIKPQLDLYTFPDGHQIFMLAEGRLMNLGCATGHPSFVMSNSFTNQVLAQIALAKDAPEVGVYMLPKELDEEVARLHLDHLGAKLTELSDDQAEYIGVPKEGPFKPEHYKY

SEQ ID NO: 169337 - protein, 294 aa, Unknown
  Bacterial polypetide isolated from the Sargasso Sea
MEDYKVKDISLADWGRKEINIAETEMPGLMALRNEYKKSKPLKGAKILGCLHMTIQTAVLIETLKDLGAEVRWSSCNIFSTQDHAAAAIAKKGIPVFAWKGMTEKEFWWCIEQTIIGKKDWKPNLILDDGGDLTKVMHEKYKHLLKTVKGLSEETTTGVHRLYDMEKKNKLLVPAINVNDSVTKSKFDNLYGCRESLVDGIRRATDVMLSGKVAVVCGYGDVGKGSAASLRNGGARVMVTEIDPICALQASMEGYEVVKIEDVVNKGDIFCTATGNVDVITLEHMRKMKDRAIV

SEQ ID NO: 169338 - protein, 239 aa, Unknown
  Bacterial polypetide isolated from the Sargasso Sea
MKTDEIKKIGTDYKVADISLAEFGKKEIKIAETEMPGLMAIREEYKNKKPLKGARIIGCLHMTIQTAVLIETLVDLGADVRWSSCNIFSTQDHAAAAIADQDIPVYAWKGETEEEYKWCIDQTINGPEGWKPNMLLDDGGDLTGIIHEEHKELLDDILGVSEETTTGVHRLYEMEKNNELKMPAMNVNDSVTKSKFDNLYGCRESLVDGIKRATDTMIAGKLAVVCGYGDVGKGFQLVL

SEQ ID NO: 169339 - protein, 258 aa, Unknown
  Bacterial polypetide isolated from the Sargasso Sea
LPFPAINVNDSVTKSKFDNKYGCKESLVDGIRRATDTMMAGKTAVVCGYGDVGKGSSASLRGAGARVKVTEVDPICALQAAMDGFEVVVLEDVVSDADIFITTTGNKDVIRIEHMREMKDMAIVGNIGHFDNEIQVSHLRNHKWTNIKEQVDMIEMPNGNRLILLSEGRLLNLGNATGHPSFVMSASFTNQVLAQIELWTNGQNYKNEVFILPKHLDEKVARLHLDRIGVKLTKLAADQADYIGVTPEGPYKPEHYRY

SEQ ID NO: 169340 - protein, 256 aa, Unknown
  Bacterial polypetide isolated from the Sargasso Sea
MSDYKVKDINEAEFGRKEISLAETEMPGLMALRKEYKGKHPLKGARILGCLHMTIQTAVLIETLVDLGAEVRWSSCNIFSTQDHAAAAIAKAGIPVFAWKGETEEEYWWCVRQTIEGKKDWKPNMILDDGGDLTALMHKDYKDLLKDIKGLSEETTTGVLALKKMEEQGTLLVPAINVNDSVTKSKFDNLYGCRESLVDGIKRATDVMMSGKVAIVAGFGDVGKGSAASLRQSGARVMVTETDPICALQAAMEGYE

SEQ ID NO: 169341 - protein, 143 aa, Unknown
  Bacterial polypetide isolated from the Sargasso Sea
MENDYKVADINLAEFGRREISLAENEMPALMALREKYKDEQPLAGAKIMGCIHMTIQTAVLMETLLELGAELRWSSCNIFSTQDHAAAAMAARGVPVFAWKGETEEEYEWCIEQTICKDGNPWDANMILDDGSDLTAMVHEKF

SEQ ID NO: 169342 - protein, 442 aa, Unknown
  Bacterial polypetide isolated from the Sargasso Sea
MQNRVKSTENAKNDFKVADLSLAKLGRKSITMAEHEMPGLMMLRDEYKDKKPLAGARITGSLHMTVETAVLIETLLILGAEVRWSSCNIFSTQDEAAAAMAEAGVPVFAWKGESEEEYWWCLEQTLEWPDGKGPNLLLDDGGDLTGYIHKNRADMLEGIYGVSEETTTGVHRLEQMESLGELKIPAFNVNDSVTKSKFDNLYGCRESLIDGIKRATDVMVAGKIAVVAGYGDVGKGSAQSLRGLGARVLVTEIDPICALQASMEGFEVVTMEDAAPIADIFVTTTGCSDIICRDHMDAMKDQAIVCNIGHFDIEIDVASLNNDRSLKKINIKPQVDQYIWPDGKRMLLLAEGRLVNLGCATGHPAFVMSNSFTNQIMAQIDLWENGSTYQNKVYVLPKLLDEKVARFHLEKLGVRLTRLNKKQAEYLNIPIDGPYKPDHYRY

SEQ ID NO: 169343 - protein, 75 aa, Unknown
  Bacterial polypetide isolated from the Sargasso Sea
MSASFTNQVIAQIELWNNSDNYENKVYVLPKHLDEKVARLHLDKVGAKLTPLSKEQADYISVTPEGPYKPHAYRY

SEQ ID NO: 169344 - protein, 110 aa, Unknown
  Bacterial polypetide isolated from the Sargasso Sea
MKSTNKISKNNVVEILPFIVKDIKLAKLGRDKIDISEREMPGLMSLRNKYAKTKPLKGFKLTGSLHMTIETAILIETLKDLGADVRWASCNIFSTQDEAAAAIAQTKTPV

SEQ ID NO: 169345 - protein, 90 aa, Unknown
  Bacterial polypetide isolated from the Sargasso Sea
MINKDYKVADMELADWGRKEIVIAQSEMPALMKLRERYGNEQPLKGAKILGCIHMTIQTAVLIETLTALGAEVRWSGCNIFSTQDHAAAA

SEQ ID NO: 169346 - protein, 243 aa, Unknown
  Bacterial polypetide isolated from the Sargasso Sea
MSEDFKVKDISLADFGDKEIAIAETEMPGLMALREEYGDSKPLEGARIVGCLHMTIQTAVLIETLVFLGATVRWSSCNIFSTQDHAAAAIAAKGIPVFAWKGMTEEEFWWCIEKTLEGPDGWKPNMILDDGGDATKIIHEKYPKMLEEILGLSEETTTGVHRLKEMEKNGTLKVPAINVNDSVTKSKFDNLYGCKESLVDGIRRGTDVMMAGKIAVVAGYGDVGKGSAASLRGAGARVCVTEI

SEQ ID NO: 169347 - protein, 113 aa, Unknown
  Bacterial polypetide isolated from the Sargasso Sea
MEDYKVKDISLAEFGRKEISIAESEMPGLMALREEYSGKHPLKGAKIIGCLHMTIQTAVLIETLVELGAEVRWSSCNIFSTQDHAAAAIAKAGIPVYAWKGETEEEYVWCIKQ

SEQ ID NO: 169348 - protein, 335 aa, Unknown
  Bacterial polypetide isolated from the Sargasso Sea
MAIREKHANERPLEGVRITGSLHMTIQTAVLIETLTELGASVRWASCNIFSTQDHAAAAIADSGVPVFAWKGMSLEEYWDCTLLALSHPDGLGPQLIVDDGGDATLLIHKGFELENGSDWVETASENHEEQCIKDLLKRVHSESPKFWHQVVEDCRGVSEETTTGVHRLQQMVAGGSLLFPAINVNDSVTKSKFDNLYGCRESLVDGIKRATDVMISGKTAVVCGYGDVGKGSAQALKSHGAKVIVTEVDPICALQACMEGFQVLTLEETLGSADIYVTATGNRDVITLEHMGEMKDQAIVCNIGHFDNEIQVDSLEASSASHTNIKPQVDKFTF

SEQ ID NO: 169349 - protein, 92 aa, Unknown
  Bacterial polypetide isolated from the Sargasso Sea
MANEDYKVADINLADFGRKEISLAETEMPGLMALRSEYKGKKPLEGARILGCLHMTIQTAVLIETLVELGADVRWSSCNIFSTQDHAAAAIA

SEQ ID NO: 169350 - protein, 264 aa, Unknown
  Bacterial polypetide isolated from the Sargasso Sea
MESNNQLLIPAFNVNDSVTKSKFDNLYGCRESLVDGIKRATDLMMSGKVAIVAGFGDVGKGSAASLRQAGARVMVTETDPICALQAAMEGYEVVLMEDAIKQADIVVTATGNKDIVTADHMRNMKDRAILCNIGHFDNEIQVEALKNYKWDEIKPQVHEIELPSKKRIILLAEGRLVNLGCATGHPSFVMSASFTNQVIAQIELWNNSNKYENKVYVLPKHLDEKVAMLHLEKVGAKLTKMSKEQADYISVKPSGPFKPDTYRY

SEQ ID NO: 169351 - protein, 307 aa, Unknown
  Bacterial polypetide isolated from the Sargasso Sea
EPNMILDDGGDLTALMHKDYKDLLKDIKGLSEETTTGVLALKKMESQGTLMVPAINVNDSVTKSKFDNLYGCRESLVDGIKRATDVMMSGKVAIVAGFGDVGKGSAASLRQSGARVMVTETDPICALQAAMEGYEVVLMDEMIKEADIVVTATGNKDIVTADHMREMKDRAILCNIGHFDNEIQVEALKNYKWDEIKPQVHEITLPSKKRIILLAEGRLVNLGCATGHPSFVMSASFTNQVTAQIELWNNSDKYDKKVYVLPKHLDEKVARLHLEKVGAKLTKMSKDQADYISVTPDGPYKPDAYRY

SEQ ID NO: 169352 - protein, 72 aa, Unknown
  Bacterial polypetide isolated from the Sargasso Sea
MEDYKVKDIAQAEFGRKEISIAESEMPGLMALREEYSKEKPLKGARIIGCLHMTIQTAVLIETLVELGAEIR

SEQ ID NO: 169353 - protein, 98 aa, Unknown
  Bacterial polypetide isolated from the Sargasso Sea
MSDYKVKDISQAEFGRKEISLAETEMPGLMALRNEYKGKSPLKGAKILGCLHMTIQTAVLIETLVDLGAEVRWSSCNIFSTQDHAAAAIAKAGIPVFA

SEQ ID NO: 169354 - protein, 232 aa, Unknown
  Bacterial polypetide isolated from the Sargasso Sea
MSEDFKVKDINLSDFGRKEISIAESEMPGLMALRKEYEGKKPLKGAKILGCLHMTIQTAVLIETLVELGADIRWSSCNIFSTQDHAAAAIAKSGIPVYAWKGETEEEYWWCIKKTIEGKKGWEPNMLLDDGGDLTAVMHKDYKNLLKSVRGLSEETTTGIKALKKMEVEKKLLVPAINVNDSVTKSKFDNLYGCRESLVDGIKRATDVMMSGKTAIVAGFGDVGKGSAASFR

SEQ ID NO: 169355 - protein, 371 aa, Unknown
  Bacterial polypetide isolated from the Sargasso Sea
GVPVFAWKGQTEEEFNWCIEQTILSDGKPWDANMILDDGGDLTAMAHNKYPEILENIHGITEETTTGVLRLNEMIEKGELKVPAINVNDSVTKSKADNKYGTRHSLNDGIKRGTDMFLSGRKALVIGYGDVGKGSAQSLKQEGMVVRVTEIDPICAMQACMDGYEVVSPYIDGINNDSEDSINKALLEDTDLIVTTTGNYKVCDKHMLKALKNGAVVCNIGHFDTEIDTQYMRDEWQWEEVKPQVHKIFRDTKAGEMPDMDSEDYIILLSEGRLVNLGNATGHPSRIMDGSFANQVLAQMYLYEKKFAQINDEEKKQELIRVEVLPKKLDEEVASYMVEGFGGVMTKLSSDQAEYINVPEEGPFKSEIYKY

SEQ ID NO: 169356 - protein, 62 aa, Unknown
  Bacterial polypetide isolated from the Sargasso Sea
MSQDFKVKDIKLADFGRKEISIAESEMPGLMALRKEFKGKKPLKGANIIGCLHMTIQTAVLK

SEQ ID NO: 169357 - protein, 120 aa, Unknown
  Bacterial polypetide isolated from the Sargasso Sea
FETINGDEIKPQVHEIELPSKKRIILLAEGRLVNLGCATGHPSFVMSASFTNQVIAQIELWNNSDKYENKVYVLPKHLDEKVAMLHLEKVGAKLTKMSKDQADYISVKPSGPFKPDTYRY

SEQ ID NO: 169358 - protein, 361 aa, Unknown
  Bacterial polypetide isolated from the Sargasso Sea
GAEVRWSSCNIFSTQDHAAAAIAEAGIPVYAWKGETEEEYIWCIKQTIVGKPDWKPNMLLDDGGDLTAIMHNEYKNLMKDIKGVSEETTTGIKALNKMEKDKSLLVPAINVNDSVTKSKFDNLYGCRESLVDGIRRATDVMMSGKIAIVAGFGDVGKGSAASLRQSGARVLVTEADPICALQAAMEGYEVVLMEEAISRADIVVTATGNKDIVTADHMREMKDRAILCNIGHFDNEIQVEALKNYKWTEVKPQVHEIELPSGKRIILLAEGRLVNLGCATGHPSFVMSASFTNQVIAQIELWHNYKNYENKVYVLPKHLDEKVATLHLKKVGAKLTKLSKEQADYISVGTEGPFKPNAYRY

SEQ ID NO: 169359 - protein, 418 aa, Unknown
  Bacterial polypetide isolated from the Sargasso Sea
MTDYKVKDISQAEFGRKEISLAETEMPGLMALRKEYNGKKPLKGAKILGCLHMTIQTAVLIETLVDLGAEVRWSSCNIFSTQDHAAAAIAKAGIPVFAWKGETEEEYWWCVRQTIEGKKDWKPNMILDDGGDLTALMHKDYKNLMKDIKGLSEETTTGVLALKKMEEQGTLLVPAINVNDSVTKSKFDNLYGCRESLVDGIKRATDVMMSGKVAIVAGFGDVGKGSAASLRQSGARVMVTETDPICALQAAMEGYEVVLMDEMIGQADIVVTATGNKDIVTADHMRAMKDRSILCNIGHFDNEIQVEALKNYKWDEIKPQVHEITFPDNKRIILLAEGRLVNLGCATGHPSFVMSASFTNQVTAQIELWNNSDKYENKVYVLPKHLDEKVARLHLEKVGAKLTPLSKDQADYISVKPE

SEQ ID NO: 169360 - protein, 263 aa, Unknown
  Bacterial polypetide isolated from the Sargasso Sea
EEQGTLLVPAINVNDSVTKSKFDNLYGCRESLVDGIKRATDVMMSGKVAIVAGFGDVGKGSAASLRQSGARVMVTETDPICALQAAMEGYEVVLMDEMIGHADIVVTATGNKDIVTADHMRAMKDRSILCNIGHFDNEIQVEALKNYKWDEIKPQVHEITFPDEKRIILLAEGRLVNLGCATGHPSFVMSASFTNQVTAQIELWNNSEKYEKKVYVLPKHLDEKVARLHLEKVGAKLTPLSKDQADYISVKTEGPYKPDAYRY

SEQ ID NO: 169361 - protein, 108 aa, Unknown
  Bacterial polypetide isolated from the Sargasso Sea
MEDYKVKDITQAEFGRKEISIAESEMPGLMALREEYSKEKPLKGARIIGCLHMTIQTAVLIETLVALGAEVRWSSCNIFSTQDHAAAAIAKAGIPVYAWKGETEEEYS

SEQ ID NO: 169362 - protein, 436 aa, Unknown
  Bacterial polypetide isolated from the Sargasso Sea
MIKEKYTKYKVKDLSLAEWGRREINIAEAEMPGLMALRKEYSEVKPLKGARIAGCLHMTIQTAVLIETLVEMGAQVTWSSCNIFSTQDHAAAAIASVGIPVYAWKGMNEDEFNWCIEQTIFFGEERKPLNMILDDGGDLTNMVFDKYPDLVDGIKGLSEETTTGVHRLYERMKNNTLPIPAINVNDSVTKSKFDNKYGCKESAVDAIRRATDTMMAGKRVVVAGYGDVGKGTVASFSGAGAIVTVCEIDPICALQAAMDGYEVKKMMSVISNADIIVTATGNKDIICKDHFRLMKDKAILCNIGHFDNEIDMQWLNKNYGSSKIEVKPQVDLYKLGDKEVIVLAEGRLVNLGCATGHPSFVMSNSFTNQVLAQLELWVNTKNYQNKVYMLPKHLDEKVAKLHLEKLGVELDELTKEQAKYIGVENNGPFKPNYYRY

SEQ ID NO: 169363 - protein, 77 aa, Unknown
  Bacterial polypetide isolated from the Sargasso Sea
FVMSASFTNQVIAQIELWNNSKNYEKKVYVLPKHLDEKVATLHLGKVGAKLTKMSKEQADYISVKPSGPFKPDTYRY

SEQ ID NO: 169364 - protein, 442 aa, Unknown
  Bacterial polypetide isolated from the Sargasso Sea
MENIQSSSGTNFSDYKIADISLSDLGRRKIGIAEGEMPGLMALRKEYGKEKPLAGARITGSLHMTVETAVLIETLVELGAEVRWSSCNIFSTQDEAAAAIAAAGIPVFAWKGETEEEYWWCIEQTLKWDGNEGTNLLLDDGGDLTWYVHDKYPQLLDNIMGLSEETTTGVHRLHQMARKNELKVPAFNVNDSVTKSKFDNLYGCRESLVDGIKRATDVMIAGKLAVVAGYGDVGKGSAASLRNQGARVVVTEIDPICALQAVMEGYQVVRIEEVAAEADIFVTATGCAGIIRREHMDQMKNDAIVCNIGHFDIEIDVASLNDDPSINKINVKPQVDQYIWDSGKRIILLAEGRLVNLGCATGHPSFVMSNSFCNQVLAQMDLYENGKQYENQVYVLPKELDEKVARLHLDQLGVHLTELQQDQADYLGIPTKGPFKPEHYRY

SEQ ID NO: 169365 - protein, 196 aa, Unknown
  Bacterial polypetide isolated from the Sargasso Sea
SGARVLVTEADPICALQAAMEGYEVVLMEEAISRADIVVTATGNKDIVTADHMREMKDRAILCNIGHFDNEIQVEALKNYKWTEVKPQVHEIELPSGKRIILLAEGRLVNLGCATGHPSFVMSASFTNQVIAQIELWHNHKNYENKVYVLPKHLDEKVATLHLKKVGAKLTKLSQEQAEYISVRTEGPFKPDAYRY

SEQ ID NO: 169366 - protein, 62 aa, Unknown
  Bacterial polypetide isolated from the Sargasso Sea
MEIELAQVEMPGLMSCIAEFGPAQPLAGANISGSLHMTIQTAVLIETLVALGANVRWCSCNI

SEQ ID NO: 169367 - protein, 270 aa, Unknown
  Bacterial polypetide isolated from the Sargasso Sea
EETTTGVIRLKSMEKNNKLRFPVVAVNDSDTKHLFDNRFGTGQSAMDGVVRATDLLIAGLNVVVIGFGDCGKGVAERAYGMGAKVTVVEPNSVRALEALMHGYEVKTSINAAKIADIVVSVTGNLHALDKQHFDVMKDGVALANAGHFDVEINLEALKNESTEVERVREHVESYKYKGKEILVLAEGRLVNLAAATGHPASVMDMSFANQALASEWIKENHENLESKVYTLPKEVDIKIAATKLSLMGGELEILSDEQIKYLDSWEHGTS

SEQ ID NO: 169368 - protein, 227 aa, Unknown
  Bacterial polypetide isolated from the Sargasso Sea
IKRATDVMMSGKVALLLFRRCGKGSAASLRQSGARVMVTETDPICALQAAMEGYEVVLMDEMIGEADIVVTATGNKDIVTADHMRAMKDRSILCNIGHFDNEIQVEALKNYKWDEIKPQVHEITFPDNKRLILLAEGRLVNLGCATGHPSFVMSASFTNQVTAQIELWNNSEKYEKKVYVLPKHLDEKVARLHLEKVGAKLTKLSKDQADYISVTTEGPYKPDAYRY

SEQ ID NO: 169369 - protein, 159 aa, Unknown
  Bacterial polypetide isolated from the Sargasso Sea
FCTATGNYNVINHDHMKNMKSGAIVANIGHFDNEIDVASLKDYEWDNIKPQVDEITFPDGKKIVLLAEGRLINLGCATGHPSFVMSCSFTNQVMAQIELWENNSKYEKQVYVLPKHLDEKVALLHLEKLDAKITNLTEEQADYIGVNTSGPFKKDTYRY

SEQ ID NO: 169370 - protein, 464 aa, Unknown
  Bacterial polypetide isolated from the Sargasso Sea
MENDYKVADINLAEFGRREISLAENEMPALMALREKYRAEQPLAGAKIMGCIHMTIQTAVLMETLIDLGAELRWSSCNIFSTQDHAAAAMAAKGVPTFAWKGETEEEFEWCIEQTICKDGKPWDANMILDDGSDLTAMVHEKFPDMLETIHGVSEETTTGVHRLKEMLENGELKIPAINVNDSVTKSKNDNKYGCRHSLNDALKRGTDMLLSGKKGLVIGYGDVGKGSALSLAQEGMIVSVVESDPICAMQACMDGFSVVSCYKDGVVTRDPKDINMQVMEDTDLVVTTTGNVNVCDSAMLSTLKNTAVVCNIGHFDNEIDTAFMRENYYWDEIKPQVHRIFRDTAPDGTPDLSSKNYIILLAEGRLVNLGNATGHPSRIMDGSFANQVLAQIHLYKQGFANINDEDKKAEMITVEVLPKKLDEEVASLMVEGFGGMVTKLTQDQADYINVPKDGPFKEETYKY

SEQ ID NO: 169371 - protein, 85 aa, Unknown
  Bacterial polypetide isolated from the Sargasso Sea
MSKQDYKVKDISLAEYGRQEILLAQDEMPALMQLRDNYRDKQPLKGAKIMGCIHMTVQTAVLIETLIELGAEVRWSSCNIFSTQD

SEQ ID NO: 169372 - protein, 428 aa, Unknown
  Bacterial polypetide isolated from the Sargasso Sea
MEDYKVRDLSQAEFGRKEISIAESEMPGLMALREEYAGKSPLKGAKIIGCLHMTIQTAVLIETLVDLGAEVRWSSCNIFSTQDHAAAAIAKAGIPVYAWKGETEEEYVWCIKQTIEGKKSWKPNMLLDDGGDLTAMMHNEYKDLLKDVKGVSEETTTGIKALNKMEKENSLLVPAINVNDSVTKSKFDNLYGCRESLVDGIRRATDVMMSGKIAIVAGFGDVGKGSAASLRQSGARVLVTEADPICALQAAMEGYEVVLMDEAISKADIVVTATGNKDIVTADHMRDMKDRAILCNIGHFDNEIQVEALKNYKWTEVKPQVHEIELPSKKRIILLAEGRLVNLGCATGHPSFVMSASFTNQVIAQIELWNNHKNYENKVYVLPKHLDEKVATLHLKKVGAKLTKLSKDQADYISVGVEGPFKPNAYRY

SEQ ID NO: 169373 - protein, 180 aa, Unknown
  Bacterial polypetide isolated from the Sargasso Sea
MELDKVKRIKDDYKVADMSQASFGHKEIRIAETEMPGLMALRKEYGSSKPLNGTRIIGCLHMTIQTAVLIETLVELGAEVRWSSCNIFSTQDHAAAAIADQNIPVFAWKGETEEEYIWCLKQSIEGNPEWKPNLLLDDGGDLTSMIHKEYPHLIDDIKGVSEETTTGVLRLYDMAKEGSR

SEQ ID NO: 169374 - protein, 207 aa, Unknown
  Bacterial polypetide isolated from the Sargasso Sea
MNKDYKVKDINLAEFGRQEILLAQDEMPALMHLREQYKEEQPLQGAKILGCIHMTIQTAVLIETLIDLGAEVRWSSCNIFSTQDHAAAAIADKGVPVFAWKGETEEEYDWCIEQTILKNGQAWDANMILDDGGDLTAKIHKDYPEMLEKIHGISEETTTGVHRLKDLLKKGKLAVPAINVNDSITKSKNDNKYGCRHSLDDAIKKRY

SEQ ID NO: 169375 - protein, 216 aa, Unknown
  Bacterial polypetide isolated from the Sargasso Sea
MIVDVAETDPICAMQACFDGFSIVSAYKNGEISNNASDINKDLLKKYDLVVTATGNTGVLNGLMLDALKSSCVVCNIGHFDNEIDVKYLKKYEWYEIKPGVHKVIRGEGDYLILLAEGRLANLALATGHPSRVMDGSFCNQVLAQIFLYKDKFADLSKEEKLKKVSVKVLPKYLDEEVASLMVKGFGGTLTKLTKEQADYIGVEQQGPFKEDSYNY

SEQ ID NO: 169376 - protein, 440 aa, Unknown
  Bacterial polypetide isolated from the Sargasso Sea
MAETAKENKIDLMDDFKVADISLAEWGEKEIKIAETEMPGLMSIREEFGTEKPLKGARIAGCLHMTIQTAVLIETLIELGADIRWSSCNIFSTQDHAAAALAAKGIPIFAWKDESEEEYWWCVEQTIKGPNGWTPNLILDDGGDLTGLMHDKYPELMKDIIGVSEETTTGVLRLYNMEKDGTLMCPAINVNDSVTKSKFDNLYGCRESLVDGIKRATDVMVAGKIAIVAGYGDVGKGSAQSLRGLGATVWITEIDPICALQAAMEGYRVVTMDDACSKADIFVTATGNYNVIDKHHLEQMKDQAIVCNIGHFDNEINVESMKDLEWINIKPQVDHIVFPDGKRIILLAEGRLVNLGCGTGHPSFVMSNSFCNQTLAQIELFKNSSNYDKQVYVLPKSLDEKVAKLHLDKIGAKLTKLTTEQAEYIGVKESGPYKPEHYRY

SEQ ID NO: 169377 - protein, 381 aa, Unknown
  Bacterial polypetide isolated from the Sargasso Sea
MKKQTKNIVESLPFKIKDIKLAKLGRDKIDISEKEMPGLMELRKKYSKSKPLKGFRLTGSLHMTIETAILIETLKDLGADVRWASCNIFSTQDEAAAAIAKTKTPVFAWKGETLEEYWDCTLQALTFKNNLGPNLIVDDGGDATLFIHKGYELENYFNKHKKLPKITTRVEEEIVIEKLLRKVHKKNPNHWHSIVPDIIGVSEETTTGVARLQQMVEDATLLFPAFNVNDAATKSKFDNLYGCRESLADGIKRSTEIMLAGKTVVVCGYGDVGKGSAQSMKSYGCKVIVTEIDPICALQAAMEGFEVRRLEDVLDRGNIFVTTTGNKDIITLKHMKKMKDQAIVCNIGHFDNEIQVDALNKSNAKKDQIKPQLDRYTFKNG

SEQ ID NO: 169378 - protein, 174 aa, Unknown
  Bacterial polypetide isolated from the Sargasso Sea
YEVVLMDEMIGQADIVVTATGNKDVVTADHMRAMKDRSILCNIGHFDNEIQVEALKNYKWDEVKPQVHEITFPDDKRLILLAEGRLVNLGCGTGHPSFVMSASFTNQVIAQIELWNNSDNYENKVYVLPKHLDEKVARLHLDKVGAKLTPLSKEQADYISVTPEGPYKPHAYRY

SEQ ID NO: 169379 - protein, 414 aa, Unknown
  Bacterial polypetide isolated from the Sargasso Sea
MTDYKVKDINLAEFGRKEISLAETEMPGLMALRKEYKGKNPLKGARILGCLHMTIQTAVLIETLVDLGAEVRWSSCNIFSTQDHAAAAIAKVGIPVFAWKGETEDEYWWCVKQTIEGKKDWKPNMILDDGGDLTALMHKDYKDLLKDIKGLSEETTTGVLALKKMESQGTLLVPAINVNDSVTKSKFDNLYGCRESLVDGIKRATDVMMSGKVAIVAGFGDVGKGSAASLRQSGARVMVTETDPICALQAAMEGYEVVLMDEMIKEADIVVTATGNKDIVTADHMREMKDRAILCNIGHFDNEIQVEALKNYKWDEIKPQVHEITLPSNKRIILLAEGRLVNLGCATGHPSFVMSASFTNQVTAQIELWNNSDKYEKKVYVLPKHLDEKVARLHLEKVGAKLTKMSKDQADYIS

SEQ ID NO: 169380 - protein, 257 aa, Unknown
  Bacterial polypetide isolated from the Sargasso Sea
MTDKQDYKVADIELSEFGRKEISLAETEMPGLMALRKEYKGKKPLEGARIVGCLHMTIQTAVLIETLVDLGADVRWSSCNIFSTQDHAAAAIAKAGIPVFAWKGETEEEYWWCVKQTIEGKEGWTPNMILDDGGDLTALMHKDYKELLKDVRGLSEETTTGVLALKKMEIDGSLLVPAINVNDSVTKSKFDNLYGCRESLVDGIKRATDVMMSGKVAIVAGFGDVGKGSAASLRQSGARVMVTETDPICALQAAMEG

SEQ ID NO: 169381 - protein, 325 aa, Unknown
  Bacterial polypetide isolated from the Sargasso Sea
MSETLTTNNIVENLPYKVKDLSLAVDGRKALDIAEKEMPGLMSTRNKYGPEKPLKGKKLTGSLHMTVETAVLIETLVDLGADVRWASCNIFSTQDHAAAVIADSGIPVYAWKGETLEEYWWCTLQALTFPDGSGPDLIVDDGGDATLLIHKGYELENFYAKYGNVPDITTKVEEEIIIEKLLREVLEKDPNHWHKVKENVIGVSEETTTGVHRLVQMEKDGHLLFPAYNVNDSVTKSKFDNVYGCKESLADGLKRALDIMVAGKTVVICGYGDVGRGCAQSMRGYGARVIVTEIDPICALQAAMEGFEVTTIETVLKDGHIFVTT

SEQ ID NO: 169382 - protein, 431 aa, Unknown
  Bacterial polypetide isolated from the Sargasso Sea
MKEDYKVADITLAEFGRREVSLAENEMPALMALRDKYKEEQPLSGAKIMGCIHMTIQTAVLMETLIDLGAEIRWSGCNIFSTQDHAAAAMAEKGIPVFAWKGQTDEEFDWCIEQTILKDGEPWDANMILDDGGDLTHMVHTKYPEMLETIHGISEETTTGVYRLKKMLEKGELKVPAINVNDSVTKSKNDNKYGCRHSLNDGIKRATDMLLSGKKALIIGYGDVGKGSAASLAQEGMVVRVTETDPICAMQACMDGFSLVSCYKDGNVTGKEDDINKDLLQDTDILVTTTGNVNVCDSAILNSLKNGAVVCNIGHFDTEIDTVYMKNVWYWEEIKPQVHRVFRDCSPDQEPDLTSKNYILLLAEGRLVNLGNATGHPSRIMDGSFANQVLAQMHLYEKSFAKINDEEKKKALIKVEVLPKKLDEEVAALMV

SEQ ID NO: 169383 - protein, 231 aa, Unknown
  Bacterial polypetide isolated from the Sargasso Sea
MSEDFKVKDISLADFGNKEIAIAETEMPGLMAIREEYGDKKPLNGARIVGCLHMTIQTAVLIETLVYLGATVRWSSCNIFSTQDHAAAAIAAKGIPVFAWKGMNEEEFWWCIEKTLEGPDGWKPNMILDDGGDATKIIHEKYPKMLEDILGLSEETTTGVHRLKEMEKKGLLKVPAINVNDSVTKSKFDNLYGCKESLVDGIRRGTDVMMAGKVAVVAGYGDVGKRICCES

SEQ ID NO: 169384 - protein, 449 aa, Unknown
  Bacterial polypetide isolated from the Sargasso Sea
MKDYSITDIKLAEWGRKEISIAETEMPGLMACRELFSKDKPLKGTRIAGCLHMTIQTAVLIETLTSLGASVRWASCNIFSTQDHAAAEIAKQGIPVFAKKGETLKEYWNYVDQIFTWSDDTVANMILDDGGDATLYIILGAKAENGEQVLPNPANEEEEALKSQILSRLKSSPGWFTKAKNSIKGVTEETTTGVLRLYQMAEKGDLPFPAINVNDSVTKSKFDNLYGCRESLVDGIRRATDVMLSGKVAVVAGYGDVGKGSAASLRQGGARVIVTEIDPICALQAAMEGYEVCSMEEACSRGDIFVTATGNKDVITVDHMREMKDRAIVCNIGHFDSEIQVESLQNMKWSEVKPQVDEVEFQDGKRLIVLAKGRLVNLGCATGHPSFVMSASFTNQVLAQIELWEKPENYDNKVYTLPRHLDEKVAKLHLDKVGATLSKLSNEQADYIG

SEQ ID NO: 169385 - protein, 430 aa, Unknown
  Bacterial polypetide isolated from the Sargasso Sea
MEFKDYKVADIGLAEWGRKEIEIAETEMPGLITLRKELSKSKPLKGANIVGCLHMTIQTAVLIETLIDLGATVRWSSCNIFSTQDHAAAAIASKNIPVFAWKGETEEEYDWCIKQTIEGSSDWKPNMILDDGGDLTKIIHEEYPDLLSEIRGLSEETTTGVLRLYEMEKAKTLAVPAINVNDSVTKSKFDNFYGCRESLVDGLKRATDVMLAGKVAVVCGFGDVGKGSAESLRSQGARVIVTEIDPICALQASMEGYEVSTVDDVAKTADIFITATGNKDVITLEHMREMKDRAIVANIGHFDSEIQVAELKNFKWDNIKPQVDEIEFPDGKKIILLAEGRLVNLGCATGHPSFVMSASFSNQVLAQIEIWNNYENYENKVYVLPKHLDEKVAYIHLEKLGVKLTELSNSQADYLNLNKEGPFKPDHYRY

SEQ ID NO: 169386 - protein, 151 aa, Unknown
  Bacterial polypetide isolated from the Sargasso Sea
MSDYKVKDIKLAEFGRKEISLAETEMPGLMALRKEYKGKFPLKGARILGCLHMTIQTAVLIETLVALGAECRWSSCNIFSTQDHAAAAIAKAGIPVFAWKGETEEEYWWCVKQTIEGKKDWKPNMILDDGGDLTALMQKDYKHLMKDIKGL

SEQ ID NO: 169387 - protein, 368 aa, Unknown
  Bacterial polypetide isolated from the Sargasso Sea
MKKDYKVADITLAEFGRREVSLAENEMPALMALREKYKEEQPLSGAKIMGCIHMTIQTAVLMETLIDLGAEIRWSGCNIFSTQDHAAAAMAERGIPVFAWKGQTDEEFDWCIEQTILKDGEPWDANMILDDGGDLTHMVHTKYPEMLETIHGISEETTTGVYRLKKMLEKGELKVPAINVNDSVTKSKNDNKYGCRHSLNDGIKRATDMLLSGKKALVIGYGDVGKGSAASLAQEGMVVRVTETDPICAMQACMDGFSLVSCYKDGNVTGKEDDINKDLLQDTDILVTTTGNVNVCDSAILNSLKNGAVVCNIGHFDTEIDTVYMKDVWHWEEIKPQVHRVFRDCSPNQEPDLTSKNYILLLAEGRLV

SEQ ID NO: 169388 - protein, 75 aa, Unknown
  Bacterial polypetide isolated from the Sargasso Sea
FVMSNSFTNQVMAQIALAKEAPAVGVYMLPKELDEEVARLHLDHLGVILTELTDEQADYIGVSKEGPYKPDHYRY

SEQ ID NO: 169389 - protein, 373 aa, Unknown
  Bacterial polypetide isolated from the Sargasso Sea
MEDYKVKDISQAEFGRKEISIAESEMPGLMALREEYSGKLPLKGAKIIGCLHMTIQTAVLIETLVDLGAEVRWSSCNIFSTQDHAAAAIAKEGIPVYAWKGETEEEYLWCIKQTIIAKKDWKPNMLLDDGGDLTAIMHNEYKDLLKDVKGVSEETTTGIKALNKMEKDKSLLVPAINVNDSVTKSKFDNLYGCRESLVDGIRRATDVMMSGKIAIVAGFGDVGKGSAASLRQSGARVLITEADPICALQAAMEGYEVVLMEEAIKKADIVVTATGNKDIVTADHMRDMKDRAILCNIGHFDNEIQVEALKNYKWTEIKPQVHEIELPSKKRIILLAEGRLVNLGCATGHPSFVMSASFTNQVIAQIELWKNHK

SEQ ID NO: 169390 - protein, 75 aa, Unknown
  Bacterial polypetide isolated from the Sargasso Sea
MSASFTNQVTAQIELWNNSDKYEKKVYVLPKHLDEKVARLHLEKVGAKLTKMSKDQADYISVTPDGPYKPDAYRY

SEQ ID NO: 169391 - protein, 170 aa, Unknown
  Bacterial polypetide isolated from the Sargasso Sea
FMEEAISRADIVVTATGNKDIVTADHMRDMKDRAILCNIGHFDNEIQVEALKNYKWTEVKPQVHEIELPSGKRIILLAEGRLVNLGCATGHPSFVMSASFTNQVIAQIELWHNHKNYDNKVYVLPKHLDEKVATLHLKKVGAKLTKLSKDQADYISVGTEGPFKPDAYRY

SEQ ID NO: 169392 - protein, 399 aa, Unknown
  Bacterial polypetide isolated from the Sargasso Sea
MEDFKVKDISLAEFGRKEISLAETEMPGLMALRKEYKGKNPLKGARILGCLHMTIQTAVLIETLVDLGAEVRWSSCNIFSTQDHAAAAIAKAGIPVFAWKGETEEEYWWCVKQTIEGKKDWKPNMILDDGGDLTALMHKDYKDLLKNIKGLSEETTTGVLALKKMEAQGTLLVPAINVNDSVTKSKFDNLYGCRESLVDGIKRATDVMMSGKVAIVAGFGDVGKGSAASLRQSGARVMVTETDPICALQAAMEGYEVVLMDDMIKEADIVVTATGNKDIVTADHMREMKDRAILCNIGHFDNEIQVEALKNYKWDEIKPQVHEITLPSKKRIILLAEGRLVNLGCATGHPSFVMSASFTNQVTAQIELWNNSDKYEKKVYVLPKHLDEKVARLHLDKVG

SEQ ID NO: 169393 - protein, 178 aa, Unknown
  Bacterial polypetide isolated from the Sargasso Sea
VTTTGNVNVCDSAMLSTLKNTAVVCNIGHFDNEIDTAFMRDNYYWDEIKPQVHRIFRDTKPDGTPDLSSKNYLILLAEGRLVNLGNATGHPSRIMDGSFANQVLAQIHLYKQGFANINDAETKAEMITVEVLPKKLDEEVASLMVAGFGGVMTKLTKDQADYINVPQDGPFKEESYKY

SEQ ID NO: 169394 - protein, 343 aa, Unknown
  Bacterial polypetide isolated from the Sargasso Sea
AAAIAAVGIPVFAWKGMNDEEFWWCIEQTLEGPNDWKPNMILDDGGDATKIIHEKFPDLLNDIKGLSEETTTGVHRLKDMEKKGLLKVPAINVNDSVTKSKFDNLYGCKESLVDGIRRGTDVMMAGKIAVVAGYGDVGKGSAASLRGAGARVCVTEVDPINALQAAMEGYEVVTMNDACEYGDIFVTATGNVDVITLEHMRKMRDRAIVCNIGHFDNEIQTEALRNYKTDEIKPQVDEIEFPDGKKLLLLSQGRLVNLGNATGHPSFVMSASFTNQVMAQLELWNNYKNYENKVYVLPKHLDEKVASLHLKKVGAKLTELSDKQAEYIGVEKAGPFKDDSYRY

SEQ ID NO: 169395 - protein, 429 aa, Unknown
  Bacterial polypetide isolated from the Sargasso Sea
MSGDFKVKDISLADFGDKEIAIAETEMPGLMALREEYGDSKPLDGARIVGCLHMTIQTAVLIETLIFLGATVRWSSCNIFSTQDHAAAAIAAKGIPVFAWKGMTEEEFWWCIEKTLEGPDGWKPNMILDDGGDATKIIHEKYPKMLEEILGLSEETTTGVHRLKEMEKNGTLKVPAINVNDSVTKSKFDNLYGCKESLVDGIRRGTDVMMAGKIAVVAGYGDVGKGSAASLRGAGARVCVTEIDPINALQAAMEGYEVVTMDDACKYGDIFVTATGNLDVITQDHMRQMRDRAIVCNIGHFDNEIQTEALQNYKSDEIKPQVREVEFPDGKKILLLSEGRLVNLGNATGHPSFVMSASFTNQVLAQLELWKNSKNYENKVYVLPKHLDEKVASLHLKKVGAKLTELTDKQAEYIGVSKQGPFKDNTYRY

SEQ ID NO: 169396 - protein, 112 aa, Unknown
  Bacterial polypetide isolated from the Sargasso Sea
LSSKNYIILLAEGRLVNLGNATGHPSRIMDGSFANQVLAQIHLYKQGFANINDADKKAEMLTVEVLPKKLDEEVASLMVEGFGGTVTQLTKEQADYINVPQDGPFKEESYKY

SEQ ID NO: 169397 - protein, 292 aa, Unknown
  Bacterial polypetide isolated from the Sargasso Sea
MHEKYPELLKNVRGLSEETTTGVLRLEQMASKGTLQVPAINVNDSVTKSKFDNLYGCKESLVDGIRRGTDVMMAGKVAVVAGFGDVGKGSAASLRGAGARVQVTEVDPICALQAAMEGYEVVTMDDACKYADIFVTATGNKDIITQDHMREMKDRAIVCNIGHFDNEIQIDDLQNYKWEEIKPQVDQVTFPDGKKLIILSKGRLVNLGNATGHPSFVMSASFSNQVLAQIEIWENYKNYENKVYVLPKKLDEMVAMFHLQKVGAKLTEMSKEQSDYLGVEQQGPFKKDTYRY

SEQ ID NO: 169398 - protein, 414 aa, Unknown
  Bacterial polypetide isolated from the Sargasso Sea
MSTIKDKNLSVVGQQEVDWAARQMKVLEEIKTEFSSNKPLNGLNIGACMHVTKETANLMLTLKAAGANVALCASNPLSTKDSVAAYLAENDVEVHAVHGVSNDEFFKHLNSVLDTKPDITMDDGADLVTLLLTDRSDIPVMGSMEETTTGVIRLKSMEKNNKLRFPVVAVNDSDTKHLFDNRFGTGQSAMDGVVRATDLLIAGLDVVVIGFGDCGKGVAERAYGMGAKVTVVEPNSVRALEALMHGYEVKSSVNAAKIADVIVSVTGNMHALDKKHFDVMKDGVVLANAGHFDVEINLEALKQDSAEVHRVRDHVESYLYDGKEILVLAEGRLVNLAAATGHPASVMDMSFANQALAAEWIKENHEDLEPKVYTLPNEVDLKIAATKLGLMGGELEILTKEQIEYLDSWEHGTS

SEQ ID NO: 169399 - protein, 86 aa, Unknown
  Bacterial polypetide isolated from the Sargasso Sea
MANEDFKVADIEQAEFGRKEISLAETEMPGLMALRDEYKGKKPLDGARIVGCLHMTIQTAVLIETLVELGADVRWSSCNIFQHKIM

SEQ ID NO: 169400 - protein, 350 aa, Unknown
  Bacterial polypetide isolated from the Sargasso Sea
FSTQDHAAAALAAKGIPIFAWKDESEEEYWWCVEKTIKGPDGWTPNLILDDGGDLTGLMHEKYPELMKDIIGVSEETTTGVLRLYNMEKDGTLMCPAINVNDSVTKSKFDNLYGCRESLVDGIKRATDVMVAGKIAVVAGYGDVGKGSAQSLRGLGATVWITEIDPICALQAAMEGYRVVTMDDACSQADIFVTATGNYNVIDKHHLEQMKDQAIVCNIGHFDNEINVESMKDHEWINIKPQVDHIVFPDGKRIILLAEGRLVNLGCGTGHPSFVMSNSFCNQTLAQIELFKNSSNYENQVYVLPKSLDEKVAKLHLDKIGAKLTKLTTEQAEYIGVKESGPYKPDHYRY

SEQ ID NO: 169401 - protein, 378 aa, Unknown
  Bacterial polypetide isolated from the Sargasso Sea
MSDYKVKDISEADFGRKEISLAETEMPGLMALREEYKGKSPLKGAKILGCLHMTIQTAVLIETLVALGAEVRWSSCNIFSTQDHAAAAIAKAGIPVFAWKGETEEEYWWCVRQTIEGKKDWKPNMILDDGGDLTALMHKDYKELLKDIKGLSEETTTGVLALKKMEAQGTLMVPAINVNDSVTKSKFDNLYGCRESLVDGIKRATDVMMSGKVAIVAGFGDVGKGSAASLRQSGARVMVTETDPICALQAAMEGYEVVLMNDMIKHADIVVTATGNKDIVTADHMREMKDRAILCNIGHFDNEIQVEALKNYKWDEIKPQVHEITLPSNKRIILLAEGRLVNLGCATGHPSFVMSASFTNQVTAQLELWNNSDKYENK

SEQ ID NO: 169402 - protein, 413 aa, Unknown
  Bacterial polypetide isolated from the Sargasso Sea
MSDYKVKDISQAEFGRKEISLAETEMPGLMALRKEYKGKNPLKGARILGCLHMTIQTAVLIETLVDLGAEVRWSSCNIFSTQDHAAAAIAKVGIPVFAWKGETEEEYWWCVKQTIEGKKDWKPNMILDDGGDLTALMHKDYKDLLKDIKGLSEETTTGVLALKKMEAQGTLLVPAINVNDSVTKSKFDNLYGCRESLVDGIKRATDVMMSGKVAIVAGFGDVGKGSAASLRQSGARVMVTETDPICALQAAMEGYEVVLMDEMIKEADIVVTATGNKDIVTADHMREMKDRAILCNIGHFDNEIQVEALKNYKWDEIKPQVHEITLPSKKRIILLAEGRLVNLGCATGHPSFVMSASFTNQVTAQIELWNNSDKYEKKVYVLPKHLDEKVARLHLGKVGAKLTKMSKDQADYI

SEQ ID NO: 169403 - protein, 428 aa, Unknown
  Bacterial polypetide isolated from the Sargasso Sea
MSDYKVKDINEAEFGRKEISLAETEMPGLMALRKEYKGKNPLKGAKILGCLHMTIQTAVLIETLVDLGAEVRWSSCNIFSTQDHAAAAIAKAGIPVFAWKGETEEEYWWCVKQTIEGKKDWKPNMILDDGGDLTALMHKDYKDLLKDIKGLSEETTTGVLALKKMEEQGTLLVPAINVNDSVTKSKFDNLYGCRESLVDGIKRATDVMMSGKVAIVAGFGDVGKGSAASLRQSGARVMVTETDPICALQAAMEGYEVVLMDEMIGEADIVVTATGNKDIVTADHMRAMKDRSILCNIGHFDNEIQVEALKNYKWDEIKPQVHEITFPDNKRLILLAEGRLVNLGCATGHPSFVMSASFTNQVTAQIELWNNSDKYENKVYVLPKHLDEKVARLHLEKVGAKLTKLSKEQADYISVTTEGPYKPDAYRY

SEQ ID NO: 169404 - protein, 429 aa, Unknown
  Bacterial polypetide isolated from the Sargasso Sea
MSQDFKVKDINQAEFGRKEISLAETEMPGLMALRKEYKSKKPLKGAHILGCLHMTIQTAVLIETLVELGAEVRWSSCNIFSTQDHAAAAIAKAGIPVFAWKGETEKEYWWCVRQTIEGKKDWKPNLILDDGGDLTALMHKDYKDMLKNIKGVSEETTTGVLALKKMEAKKELLIPAINVNDSVTKSKFDNLYGCRESLVDGIKRATDIMMSGKVAIVAGFGDVGKGSAASLRQAGARVMITETDPICALQAAMEGYEVVLMNDAIKHADIVVTATGNKDIVTADHMRDMKDRAILCNIGHFDNEIQVEALKNYKWDEIKPQVHEIELPSKKRIILLAEGRLVNLGCATGHPSFVMSASFTNQVIAQIELWNNSDKYEKKVYVLPKHLDEKVAMLHLEKVGAKLTKMSKEQADYISVKPSGPFKPDTYRY

SEQ ID NO: 169405 - protein, 415 aa, Unknown
  Bacterial polypetide isolated from the Sargasso Sea
MNYDVKDLNLADEGKRKAEWAAKEMPVLGEIKKRFEKEKPLQGSKISGCLHVTSETANLALTLKAGGADFSLCASNPLSTQDDIAAYLVSAGIPVYAINGEDNETYYKHINSVVENKPNITIDDGADLVAYLHQDKPELMSEIIGGMEETTTGVIRLKALANEKKLKYPIIAANDSQTKHMFDNRYGTGQSTLDGIIRATNILLSGKTFVIIGYGWCGRGLASRAKGMGARTIVCEIDPVKALEAVMDGHQVMKMDEAVKEGDFFVTLTGGLHAIGKSHLENMKDGAIVANSGHFNVEIDLESLEEMSETKSRVRPFVEEYVLENGKKICVLGEGRLINLAAAEGHPPSVMDMSFANQALGCEFLKKNSLEIGVHVLAEDIDKEIAALKLKAMQMNFDKLTPAQEKYFNSWDIGT

SEQ ID NO: 169406 - protein, 334 aa, Unknown
  Bacterial polypetide isolated from the Sargasso Sea
MKDDFKIKDINLSDFGRKEISIAETEMPGLMALRKEFKGKKPLKGANILGCLHMTIQTAVLIETLVELGADVRWSSCNIFSTQDHAAAAIAKAGIPVFAWKGETEKEYWWCIKQTIEGKKDWKPNMLLDDGGDLTAMMHKDYKELLKSVRGLSEETTTGIKALKKMESQNKLLVPAINVNDSVTKSKFDNLYGCRESLVDGIKRATDVMMSGKTAIVAGFGDVGKGSAASLRQSGARVMVTEADPICALQAAMEGYEVVLMDDAIGNADIVVTATGNKDIVNADHVRKMKDRAILCNIGHFDNEIQVDALKNYKWTEIKPQVHEIELPSKKRII

SEQ ID NO: 169407 - protein, 473 aa, Unknown
  Bacterial polypetide isolated from the Sargasso Sea
MNAAVLDSNKKQDFLVADMSLAAWGRKELNIAETEMPGLMQTREEYKNSQPLKGARIAGSLHMTIQTGVLIETLTALGADVRWASCNIFSTQDHAAAAIAEGGVPVFAFKGESLDEYWEFSHRIFEWPNGEFANMILDDGGDATLLLILGSKAEKDRSVISKPENEEEVALYKSIARHLDADPVWYSTRLAHIKGVTEETTTGVHRLYQMEKEGRLPFPAINVNDSVTKSKFDNLYGCRESLVDGIKRATDVMIAGKIAVVAGYGDVGKGCAQSLRGLGATVWVTEIDPICALQAAMEGYRVVTMEYAADKADIFVTATGNYHVIGHDHMAAMRNNAIVCNIGHFDSEIDVASTRKYQWENIKPQVDHIIFPDGKRVILLAEGRLVNLGCATGHPSFVMSASFTNQTIAQIELFVHGDKYENKVYVLPKHLDEKVARLHLGRIGAELTVLSDYQANYISVDKNGPFKPNHYRY

SEQ ID NO: 169408 - protein, 464 aa, Unknown
  Bacterial polypetide isolated from the Sargasso Sea
MENDYKVADINLAEFGRREISLAENEMPALMALREKYKDEQPLAGAKIMGCIHMTIQTAVLMETLLELGAELRWSSCNIFSTQDHAAAAMAARGVPVFAWKGETEEEYEWCIEQTICKDGNPWDANMILDDGSDLTAMVHEKFPDMLETIHGVSEETTTGVHRLKEMLEKGELKIPAINVNDSVTKAKNDNKYGCRHSLNDALKRGTDMLLSGKKGLVIGYGDVGKGSAASLAQEGMIVRVVESDPICAMQACMDGFSVVSCYKDGVVTRDPKDINMEIMGDTDLIVTTTGNVNVCDSAMLSTLKNTAVVCNIGHFDNEIDTAFMRENFYWDEIKPQVHRVFRDTPPDGTPDLSSKNYIILLAEGRLVNLGNATGHPSRIMDGSFANQVLAQIHLYKQGYANVNDADKKAEMLTVEVLPKKLDEEVASLMVQGFGGTVTQLTKEQADYINVPQEGPFKEETYKY

SEQ ID NO: 169409 - protein, 232 aa, Unknown
  Bacterial polypetide isolated from the Sargasso Sea
LVDGIRRATDVMMSGKIAIVAGFGDVGKGSAASLRQSGARVLVTEADPICALQAAMEGYEVVLMEEAISRADIVVTATGNKDIVTADHMRDMKDRAILCNIGHFDNEIQVEALKNYKWTEVKPQVHEIELTSGKRIILLAEGRLVNLGCATGHPSFVMSASFTNQVIAQIELWHNHKNYENKVYVLPKHLDEKVATLHLKKVGAKLTKLSKDQADYISVGTEGPFKPDAYRY

SEQ ID NO: 169410 - protein, 121 aa, Unknown
  Bacterial polypetide isolated from the Sargasso Sea
ALKNYKWTEVNPQVHEIELPSGKRIILLAEGRLVNLGCATGHPSFVMSASFTNQVIAQIELWHNYKNYENKVYVLPKHLDEKVATLHLKKVGAKLTKLSKEQADYISVGTEGPFKPDAYRY

SEQ ID NO: 169411 - protein, 370 aa, Unknown
  Bacterial polypetide isolated from the Sargasso Sea
MSKQDYKVKDISLAEYGRQEILLAQDEMPALMQLRDNYKDQQPLKGAKIMGCIHMTVQTAVLIETLIELGAEVRWSSCNIFSTQDHAAAAIADQGIPVFAWKGETEEEYEWCLDQTINKDGKPWEANLILDDGGDLTLKVHKDYPEMLSKIHGVSEETTTGVKRLKEMLESGELKVPAINVNDSITKSKNDNKYGCRHGLDDAIKRGTDMLLSGKKALVIGYGDVGKGSADSLNQQKMIVDITEIDPICAMQACFDGFSVVSAYENGNVGQDGKNLDKKLLEKYDLVVTTTGNINVLDRHMLDALKSGCVVCNIGHFDSEIDVKHLKNYEWKEIKPGVHKIIRNKDEYIILLGEGRLVNLALATRTSKQS

SEQ ID NO: 169412 - protein, 251 aa, Unknown
  Bacterial polypetide isolated from the Sargasso Sea
VNDSVTKSKFDNLYGCRESLVDGIKRATDVMMSGKVAIVAGFGDVGKGSAASLRQSGARVMITETDPICALQAAMEGYEVVLMDEMIKEADIVVTATGNKDIITADHMRDMKDRAILCNIGHFDNEIQVEALKNYKWDEIKPQVHEIELPSKKRIILLAEGRLVNLGCATGHPSFVMSASFTNQVTAQIELWNNSSKYEKKVYVLPKHLDEKVAMLHLEKVGAKLTKLSKEQADYISVKQEGPYKPDAYRY

SEQ ID NO: 169413 - protein, 232 aa, Unknown
  Bacterial polypetide isolated from the Sargasso Sea
LVDGIRRATDVMMSGKIAIVAGFGDVGKGSAASLRQSGARVLVTEADPICALQAAMEGYEVVLMEEAISRADIVVTATGNKDIVTADHMRDMKDRAILCNIGHFDNEIQVEALKNYKWTEVKPQVHEIELPSGKRIILLAEGRLVNLGCATGHPSFVMSASFTNQVIAQIELWHNHKNYDNKVYVLPKHLDEKVATLHLKKVGAKLTKLSKDQADYISVGTEGPFKPDAYRY

SEQ ID NO: 169414 - protein, 376 aa, Unknown
  Bacterial polypetide isolated from the Sargasso Sea
MTIQTAVLIETLIELGAEVRWSSCNIFSTQDHAAAAIAKAGIPVFAWKGETEEEYLWCIKQTIVGKSDWKPNMLLDDGGDLTAIMHNEYKDLMKDVKGVSEETTTGIKALNKMEKDKSLLVPAINVNDSVTKSKFDNLYGCRESLVDGIRRATDVMMSGKIAIVAGFGDVGKGSAASLRQSGARVLITEADPICALQAAMEGYEVVLMEEAISRADIVVTATGNKDIVTADHMRDMKDRAILCNIGHFDNEIQVEALKNYKWSEVKPQVHEIELPSGKRIILLAEGRLVNLGCATGHPSFVMSASFTNQVIAQIELWHNHQNYDNKVYVLPKHLDEKVATLHLKKVGAKLTKLSKDQADYISVGTEGPFKPDAYRY

SEQ ID NO: 169415 - protein, 353 aa, Unknown
  Bacterial polypetide isolated from the Sargasso Sea
MSDYKVKDISQAEFGRKEISLAETEMPGLMALRKEYKGKNPLKGARILGCLHMTIQTAVLIETLVDLGAEVRWSSCNIFSTQDHAAAAIAKVGIPVFAWKGETEEEYWWCVKQTIEGKKDWKPNMILDDGGDLTALMHKDYKDLLKDIKGLSEETTTGVLALKKMEAQGTLLVPAINVNDSVTKSKFDNLYGCRESLVDGIKRATDVMMSGKVAIVAGFGDVGKGSAASLRQSGARVMVTETDPICALQAAMEGYEVVLMDEMIKEADIVVTATGNKDIVTADHMREMKDRAILCNIGHFDNEIQVEALKNYKWDEIKPQVHEITLPSKKRIILLAEGRLVNLGCATGHPSFV

SEQ ID NO: 169416 - protein, 314 aa, Unknown
  Bacterial polypetide isolated from the Sargasso Sea
IEGKKDWKPNMILDDGGDLTALMHKDYKDLLEDIKGLSEETTTGVLALKKMEAQGTLLVPAINVNDSVTKSKFDDLYGCRESLIDGIKRATDVMMSGKVAIVAGFGDVGKGSAASLRQSGARVMVTETDPICALQAAMEGYEVVLMDEMIKEADIVVTATGNKDIVTADHMREMKDRAILCNIGHFDNEIQVEALKNYKWDEIKPQVHEITLPSKKRIILLAEGRLVNLGCATGHPSFVMSASFTNQVTAQIELWNNSDKYENKVYVLPKHLDEKVARLHLEKVGAKLTKMSKDQADYISVTPDGPYKPDAYRY

SEQ ID NO: 169417 - protein, 464 aa, Unknown
  Bacterial polypetide isolated from the Sargasso Sea
MENDYKVADIKLAEFGRREISLAENEMPALMALRDKYRDEQPLAGAKIMGCIHMTIQTAVLMETLLDLGAELRWSSCNIFSTQDHAAAAMAAKGVPVFAWKGETEEEYEWCIEQTICKDGKPWDANMILDDGSDLTAMVHAKFPDMLETIHGVSEETTTGVHRLKEMLEKGELKIPAINVNDSVTKAKNDNKYGCRHSLNDALKRGTDMLLSGKKGLVIGYGDVGKGSAASLAQEGMIVSVVESDPICAMQACMDGFAVVSCYKNGVVTRDPKDINMDVMGDTDLIVTTTGNVNVCDSAMISTLKNTAVVCNIGHFDNEIDTAYMRENYYWDEIKPQVHRVFRDTAPDGTPDLSSKNYIILLAEGRLVNLGNATGHPSRIMDGSFANQVLAQIHLYKQGFANINDADKKAEMLTVEVLPKKLDEEVASLMVEGFGGTVTQLTKEQADYINVPQDGPFKEESYKY

SEQ ID NO: 169418 - protein, 158 aa, Unknown
  Bacterial polypetide isolated from the Sargasso Sea
KIADVIISVTGNLHALDKQHFDVMKDGVALANAGHFDVEINLEALKNESTKVERVREHVESYKYKDKEILVLAEGRLVNLAAATGHPASVMDMSFANQALASEWIKENYEKLESKVYTLPKEVDIKIAATKLGLMGGELEILSDEQIKYLDSWEHGTS

SEQ ID NO: 169419 - protein, 356 aa, Unknown
  Bacterial polypetide isolated from the Sargasso Sea
NIFSTQDHAAAAIAAKGIAVYAWKDMTEEEFNWCIEQTLFFGEEKSPLNMILDDGGDLTNMVLDEYPELVSGIKGLSEETTTGVHRLYDRMKNGTLPLPAINVNDSVTKSKFDNKYGCKESAVDAVRRATDIMLAGKRVVVCGYGDVGKGTAASFRGAGSIVTVTEIDPICALQASMDGYEVKKLKTVISNADIVVTATGNKDIVNKEVFRMMKDKTIVCNIGHFDNEIDMNWLETNFSEQKTNIKPQVDSFRISKDKEIIILAEGRLVNLGCATGHPSFVMSNSFTNQVLAQIELWNNADNYENKVYMLPKNLDEMVAMLHLDKLGVELEELSSEQAKYIGVQKNGPFKPEYYRY

SEQ ID NO: 169420 - protein, 369 aa, Unknown
  Bacterial polypetide isolated from the Sargasso Sea
PVFAWKGETDEEYEWCIEQTICKDGNPWDANMILDDGSDLTSMVHAKFPDMLETIHGVSEETTTGVHRLKEMLEKGELKVPAINVNDSVTKAKNDNKYGCRHSLNDALKRGTDMLLSGKKGLVIGYGDVGKGSAASLAQEGMIVSVVESDPICAMQACMDGFSVVSCYKDGVVTRDPKDINMTVMGDTDLVVTTTGNVNVCDSAMISTLKNTAVVCNIGHFDNEIDTAFMRENYYWDEIKPQVHRVFRDTAPDGTPDLSSKNYIILLAEGRLVNLGNATGHPSRIMDGSFANQVLAQIHLYKQGFANVNDADKRAEMITVEVLPKKLDEEVASLMVEGFGGTVTKLTQDQADYINVPQDGPFKEESYKY

SEQ ID NO: 169421 - protein, 360 aa, Unknown
  Bacterial polypetide isolated from the Sargasso Sea
AEVRWSSCNIFSTQDHAAAAIAKAGIPVFAWKGETEEEYWWCVKQTIEGKEGWKPNMILDDGGDLTALMHKDYKDLLKDIKGLSEETTTGVLALKKMESEGTLLVPAINVNDSVTKSKFDNLYGCRESLVDGIKRATDVMMSGKVAIVAGFGDVGKGSAASLRQSGARVMVTETDPICALQAAMEGYEVVLMDDMIKEADIVVTATGNKDVVTADHMRDMKDRAILCNIGHFDNEIQVEALKNYKWDEIKPQVHEITLPSNKRIILLAEGRLVNLGCATGHPSFVMSASFTNQVTAQIELWNNSDKYEKKVYVLPKHLDEKVARLHLEKVGAKLTKLSEDQAQYISVTTEGPYKPDAYRY

SEQ ID NO: 169422 - protein, 365 aa, Unknown
  Bacterial polypetide isolated from the Sargasso Sea
LVALGAEVRWSSCNIFSTQDHAAAAIAKAGIPVYAWKGETEEEYLWCIKQTIVGKPDWKPNMLLDDGGDLTAIMHNEYQDLMKDIKGVSEETTTGIKALNKMEKDKSLLVPAINVNDSVTKSKFDNLYGCRESLVDGIRRATDVMMSGKIAIVAGFGDVGKGSAASLRQSGARVLVTEADPICALQAAMEGYEVVLMEEAISRADIVVTATGNKDIVTADHMRDMKDRAILCNIGHFDNEIQVEALKNYKWTEVKPQVHEIELPSGKRIILLAEGRLVNLGCATGHPSFVMSASFTNQVIAQIELWHNHKNYENKVYVLPKHLDEKVATLHLKKVGAKLTKLSKDQADYISVKTEGPFKPDAYRY

SEQ ID NO: 169423 - protein, 250 aa, Unknown
  Bacterial polypetide isolated from the Sargasso Sea
NDSVTKSKFDNLYGCRESLVDGIKRATDVMMSGKTAIVAGFGDVGKGSAASLRQSGARVMVTEADPICALQAAMEGYEVVLMDEAISDADIVVTATGNRDIVTADHMRKMKDRSILCNIGHFDNEIQVEALKNYKWNEIKPQVHEIEFPDKKRIILLAEGRLVNLGCATGHPSFVMSASFTNQVMAQIELWNNHKNYENKVYVLPKHLDEKVAMLHLGKVGAKLTKLTKNQADYISVDTKGPFKSDSYRY

SEQ ID NO: 169424 - protein, 354 aa, Unknown
  Bacterial polypetide isolated from the Sargasso Sea
SCNIFSTQDHAASAIAKAGIPVFAWKGETETEYWWCVKQTIEGKKDWKPNMILDDGGDLTALMHKDYKDLLKSIKGVSEETTTGVLALKKMEAKKELLIPAINVNDSVTKSKFDNLYGCRESLVDGIKRATDVMMSGKVAIVAGYGDVGKGSAASLRQAGARVMVTETDPICALQAAMEGYEVVLMDEAIKDADIVVTATGNKDIVTADHMRDMKDRAILCNIGHFDNEIQVEALKNYKWDEIKPQVHEIELPSKKRIILLAEGRLVNLGCATGHPSFVMSASFTNQVIAQIELWNNSDKYEKKVYVLPKHLDEKVAMLHLEKVGAKLTKMSKEQADYISVKPSGPFKPDTYRY

SEQ ID NO: 169425 - protein, 340 aa, Unknown
  Bacterial polypetide isolated from the Sargasso Sea
IAAKGIPVFAWKGMTEEEFWWCIEKTLEGPDGWKPNMILDDGGDATKIIHEKYPKMLEEILGLSEETTTGVHRLKEMEKNGTLKVPAINVNDSVTKSKFDNLYGCKESLVDGIRRGTDVMMAGKIAVVAGYGDVGKGSAASLRGAGARVCVTEIDPINALQAAMEGYEVVTMDDACKYGDIFVTATGNLDVITQDHMRQMRDRAIVCNIGHFDNEIQTEALQNYKSDEIKPQVREVEFPDGKKILLLSEGRLVNLGNATGHPSFVMSASFTNQVLAQLELWKNSKNYGNKVYVLPKHLDEKVASLHLKKVGAKLTELTDKQAEYIGVSKQGPFKDNTYRY

SEQ ID NO: 169426 - protein, 217 aa, Unknown
  Bacterial polypetide isolated from the Sargasso Sea
TVLVCGYGDVGRGCVQSMRGYGARVLVTEIDPICALQAAMEGYEVVTIDQAISETNIFVSATGNRDVITFDHMKKMNDQAIVCNIGHFDNEIQVDKLNESSNVHRDTIKPQVDRYTFDDGHSVYLLAEGRLMNLGCATGHPSFVMSNSFTNQVLAQIALAEEKPELGVYMLPKELDEEVARLHLDHLGVTLTELSDEQADYIGVSKSGPYKPDHYRY

SEQ ID NO: 169427 - protein, 255 aa, Unknown
  Bacterial polypetide isolated from the Sargasso Sea
PAINVNDSVTKSKLTNLYGVRESLVDGIRRGTDVMMAGKIAVVAGYGDVGKGSAASLRGAGARVCVTEIDPINALQAAMEGYEVVTMDDACKYGDIFVTATGNLDVITQDHMRQMRDRAIVCNIGHFDNEIQTEALQNYKSDEIKPQVREVEFPDGKKILLLSEGRLVNLGNATGHPSFVMSASFTNQVLAQLELWKNSKNYENKVYVLPKHLDEKVASLHLKKVGAKLTELTDKQAEYIGVSKQGPFKDNTYRY

SEQ ID NO: 169428 - protein, 164 aa, Unknown
  Bacterial polypetide isolated from the Sargasso Sea
TSLNAAKIADVIISVTGNLHALDKQHFDVMKDGVALANAGHFDVEINLEALKNESTKVERVREHVESYTYKGKEILVLAEGRLVNLAAATGHPASVMDMSFANQALASEWIKDNHKKLESKVYTLPKEVDIKIAATKLSLMGGELEILSDEQIKYLDSWEHGTS

SEQ ID NO: 169429 - protein, 295 aa, Unknown
  Bacterial polypetide isolated from the Sargasso Sea
DLGNLPPNLCHPSYLAEEAKNLGKAYKNLKVEILDEKKLKELGAGAFLAVAQGSDQPPRMIVLNYQGGKKNEKPYALVGKGITFDTGGISIKPAAGMDEMKYDMCGAASVFGTLKAVLELQLPINLVCLLACAENMPSGGATRPGDIVTTMSGQTVEILNTDAEGRLVLCDTLTYAERFKPQAVIDIATLTGACIVALGSNVSGLMGNNDELVQQILGAGLTADDRAWQLPLYDEYQEQLDSPFADIANIGGPKAGTITAGCFLSRFAKAYNWAHLDIAGTAWISGGKDKGATGR

SEQ ID NO: 169430 - protein, 213 aa, Unknown
  Bacterial polypetide isolated from the Sargasso Sea
MEFSVKSGSPEKQRSACIVVGVYEPRRLSGIAEQLDKISEGYISNLLRRGDLEGKPGQMLLLHHVPNVLSERVLLVGCGKERELDERQYKQIITKTINTLNETGSMEAVCFLTELHVKGRDTYWKVRQAVETTNSSLYSFDALKTRKGETRRPLRKLVFNVPTRRELTLGERAIEHGMAVSAGMHLCRDVANMPPNICNPAYLASQARQLAEV

SEQ ID NO: 169431 - protein, 226 aa, Unknown
  Bacterial polypetide isolated from the Sargasso Sea
TFDTGGISIKPSQAMDEMKYDMCGAASVLGTLSAVAELGLPINVVGIVPATENMPSGDATNPGDIFTSMSGQTVEVLNTDAEGRLILCDAITYSKKYNPDVVIDIATLTGACVIALGKHATGLLSNHNPLAREIINAGEDAGDRAWQLPLWDEYQQQLNSPFADIANIGGRDAGTITAACFLSRFAEKLQWAHLDIAGTAWLSGSKKGATGRPVSLLMQYILNKIK

SEQ ID NO: 169432 - protein, 309 aa, Unknown
  Bacterial polypetide isolated from the Sargasso Sea
GNLPPNDCYPEYLSGVARDLGKAYDKLTVKVISQAQAEKMGMGAFVAVAKGSERQGQIIVMEYKGAKPGKAGPVALVGKGITFDTGGISLKPGANMDEMKYDMGGAASVFGSVKTVCELDLPIHMVAVVAAAENMPDGRASRPGDIVKTLSGQTVEILNTDAEGRLVLCDALTYVQQKHKPHTVIDVATLTGACVVALGAHAQAVYSNDDDLSQALLAAGQETGDRGWPMPLWDEYQSQLDSPFADMQNIGGPKAGSITAACFLSRFAKDVKWAHLDIAGTAWISGGMSKGATGRPVPMLTRYLMNLSQ

SEQ ID NO: 169433 - protein, 314 aa, Unknown
  Bacterial polypetide isolated from the Sargasso Sea
MLLLHHVPNVLSERVLLVGCGKERELDERQYRQIIAKTISTLNETGSMEAVCFLSELHVKGRDTYWKVRHAVETTQDCLYVFDKLKSRKDETRRPLRKIVFNVPTRRDLTIGEKAVEHGLAVAAGIKVCKDVSNMPPNICTPAYLADQAVALAQHDKVSVEVLGIAEMTALGMHSYVAVGRGSENEAKMAVIKYNGAMDNSAPVVLVGKGLTFDTGGISIKPSDAMDEMKYDMCGAASVLGTMHAVVSLGLPINMVAVLAGAENMPDGRAYRPGDILTTMSGQTVEVLNTDAEGRLVLCDALTYVERFDPGRGH

SEQ ID NO: 169434 - protein, 234 aa, Unknown
  Bacterial polypetide isolated from the Sargasso Sea
MEFSVKSGSPEKQRSACIVVGVYEPRRLSGIAEQLDKISEGYISNLLRRGDLEGKPGQMLLLHHVPNVLSERVLLVGCGKERELDERQYKQIITKTINTLNETGSMEAVCFLTELHVKGRDTYWKVRQAVETTNSSLYSFDALKTRKGETRRPLRKLVFNVPTRRELTLGERAIEHGMAVSAGMHLCRDVANMPPNICNPAYLASQARQLAEVHENLHVTTVGEEQMAKLGMNS

SEQ ID NO: 169435 - protein, 282 aa, Unknown
  Bacterial polypetide isolated from the Sargasso Sea
LRVKVLSQAQAEKMGMGVFHAVAKGSERQGQIIVMEYKGAKPTKQGPVALVGKGITFDTGGISLKPGATMDEMKYDMGGAASVFGSVKTVCELDLPIHLVAVVAAAENMPDGRAARPGDIVKTLSGQTVEILNTDAEGRLVLCDALTYVQQKHKPHTVIDIATLTGACVVALGAHAQAVYSNDDDLSEALLAAGKETGDRGWPMPLWDEYQGQLDSPFADMQNIGGPKAGSITAACFLSRFTKEVKWAHLDIAGTAWTSGGMSKGATGRPVPMLTRYLMDNA

SEQ ID NO: 169436 - protein, 503 aa, Unknown
  Bacterial polypetide isolated from the Sargasso Sea
MEFSVKSGSPEKQRSACIVVGVFEPRRLSPIAEQLDKISDGYISALLRRGELEGKPGQTLLLHHVPNVLSERILLIGCGKERELDERQYKQVIQKTINTLNDTGSMEAVCFLTELHVKGRNNYWKVRQAVETAQETLYSFDQLKTNKSEPRRPLRKMVFNVPTRRELTSGERAIQHGLAIAAGIKAAKDLGNMPPNICNAAYLASQARQLADSYSKNVVTRVIGEQQMKELGMHSYLAVGHGSQNESLMSVIEYKGNPSEDARPIVLVGKGLTFDSGGISIKPAEGMDEMKYDMCGAAAVYGVMRMVAELQLPINVVGVLAGCENMPGGRAYRPGDVLTTMSGQTVEVLNTDAEGRLVLCDVLTYVERFEPEAVIDVATLTGACVIALGHHITGLMSNHNPLAHELIGASEQAGDRAWRLPLGDEYQEQLESNFADMANIGGRPGGAITAGCFLSRFTRKYNWAHLDIAGTAWRSGKAKGATGRPVALLSQFLLNRAGFNGEE

SEQ ID NO: 169437 - protein, 438 aa, Unknown
  Bacterial polypetide isolated from the Sargasso Sea
RPETLKTATLVVAIGEGRKLGIAAKAVDLASNGALSAVLKRGDIAGKPGQTLLLHSLPGLKAERVLLVGCGKGDLSDRQLRKLVASVHGVLKGLGGGDALLALGELKVKGRNTYGKTRLIVETLADGTYLFEQFKSQKADPRALKKITLVVDKAELADAERGLQHARAIANGVAFTKDLGNLPPNLCHPSYLAEEAKALGKAHKNLKVEILDEKKLKELGAGAFLAVAQGSEQPPRMIVMHYQGGKKDDKPFALVGKGITFDTGGISIKPAAGMDEMKYDMCGAASVFGTLKAVLELQLPINLVCLLACAENMPSGRATRPGDIVTTMSGQTVEILNTDAEGRLVLCDTLTYAERFKPQAVIDIATLTGACIVALGSNVSGLMGNNDALIKQILKAGESADDRAWQLPLYDEYQEQLDSPFADIANIGGAEGRHHHRR

SEQ ID NO: 169438 - protein, 501 aa, Unknown
  Bacterial polypetide isolated from the Sargasso Sea
MEFSVKSGSPEKQRSACIVVGVYEPRRLSAVAEQLDKISEGYISNLLRRGDLEGKPGQMLLLHHVPNVLSERVLLVGCGKERELDERQYRQIIAKTISTLNETGSMEAVCFLSELHVKGRDTYWKVRHAVETTQDCLYVFDKLKSRKDETRRPLRKIVFNVPTRRDLTIGEKAVEHGLAVAAGIKVCKDVSNMPPNICTPAYLADQAVALAQHDKVSVEVLGIAEMTALGMHSYVAVGRGSENEAKMAVIKYNGAMDNSAPVVLVGKGLTFDTGGISIKPSDAMDEMKYDMCGAASVLGTMHAVVSLGLPINMVAVLAGAENMPDGRAYRPGDILTTMSGQTVEVLNTDAEGRLVLCDALTYVERFDPDVVIDVATLTGACVIALGKHASGLLSNHNPLAHEILNASDQSGDRAWRLPLWDDYQDQLESPFADFSNLGGRAAGTITAACFLSRFTRKYNWAHLDIAGTAWRSGGKDKGATGRPVAMLTQFLINRVGTDIEG

SEQ ID NO: 169439 - protein, 152 aa, Unknown
  Bacterial polypetide isolated from the Sargasso Sea
DAEGRLVLCDALTYVERFDPELVIDVATLTGAAIIALGHHATAVMSTHNPLAHELLNASEQSSDRAWRLPLWDDYQEQLESPFADMTNLGGRPAGSITAGCFLSRFTKKYNWAHLDIAGTAWRSGKNKGATGRPVPMLSQFLMNRADIKLED

SEQ ID NO: 169440 - protein, 502 aa, Unknown
  Bacterial polypetide isolated from the Sargasso Sea
MSIKVLNTISTKNLSGKEIVKYKSSLLVVVVDKTFTKNELISNMDESTKGSFKRSIRHFLNSKASSVNLQNVNGLQAKDVLLVKSPDQEDTFVWLDCFKAIPKMANSLEKRDLSVIFAASLPKGKDLNWVLEITARQIESNAYIFGSSKNKTVKKPSLKSASVIVNSLSPKDLTLARKAVKRGFAVGEAMNAAKFLGDLPANHCTPRIIERKVKGLKKLFPKLKIKTFGEKDLTSLKMGSFLSVGRGSDEPSRMMTIEYTGGKSSEKPIVLVGKGITFDTGGISLKPSPAMDEMKWDMCGAASVFGTMIALARLNAKVNVVGVMACAENMPSAHATKPGDVVTSMSGQTIEILNTDAEGRLVLCDALTYVKRFKPAHVIDIATLTGAVVVALGNFASGLMANDQKLADKLLDCGEITGDRAWQLPLWNEYKACTKTNFADLANIGGAGAGTVTAACFLSKFTDDYSWAHIDIAGTAWMKGAEKGGTGRPVPLLCQHILGAVK

SEQ ID NO: 169441 - protein, 502 aa, Unknown
  Bacterial polypetide isolated from the Sargasso Sea
MEFSVKSGSPEKQRSACIVVGVYEPRRLSGIAEQLDKISEGYISNLLRRGDLEGKPGQMLLLHHVPNVLSERVLLVGCGKERELDERQYKQIITKTINTLNETGSMEAVCFLTELHVKGRDTYWKVRQAVETTNSSLYSFDALKTRKGETRRPLRKLVFNVPTRRELTLGERAIEHGMAVSAGMHLCRDVANMPPNICNPAYLASQARQLAEVHENLHVSTVGEEQMAKLGMNSYLAVGRASANESIMTVMEYKGAVDNTEKPIVLIGKGLTFDSGGISLKPGEAMDEMKYDMGGAAGVIGTMKAICEMKLPINVVGILAGCENMPSGNAYRPGDILTTMSGQTVEVLNTDAEGRLVLCDVLTYVERFDPELVIDTATLTGACVIALGKHASGLFSSHNPLAHELLNAGEQSGDRAWRMPLWDEYQDMLDSPFADMTNLGGRPAGAITAACFLSRFAKKYNWAHLDVAGTAWNSGANKGSTGRPVPILTQFLINRAGVELGE

SEQ ID NO: 169442 - protein, 502 aa, Unknown
  Bacterial polypetide isolated from the Sargasso Sea
MEFSVKSGSPEKQRSACIVVGVYEPRRLSGIAEQLDKISEGYISNLLRRGDLEGKPGQMLLLHHVPNVLSERVLLVGCGKERELDERQYKQIITKTINTLNETGSMEAVCFLTELHVKGRDTYWKVRQAVETTNSSLYSFDALKTRKGETRRPLRKLVFNVPTRRELTLGERAIEHGMAVSAGMHLCRDVANMPPNICNPAYLASQARQLAEVHENLHVTTVGEEQMAKLGMNSYLAVGRASANESIMTVMEYKGAVDSTEKPIVLIGKGLTFDSGGISLKPGEAMDEMKYDMGGAAGVIGTMKAICDMKLPINVVGILAGCENMPSGNAYRPGDILTTMSGQTVEVLNTDAEGRLVLCDVLTYVERFDPELVIDTATLTGACVIALGKHASGLFSSHNPLAHELLNAGEQSGDRAWRMPLWDEYQDMLDSPFADMTNLGGRPAGAITAACFLSRFAKKYNWAHLDVAGTAWNSGANKGSTGRPVPILTQFLINRAGVELGE

SEQ ID NO: 169443 - protein, 502 aa, Unknown
  Bacterial polypetide isolated from the Sargasso Sea
MEFSVKSGSPEKQRSACVVVGVFEPRRLSPVAEQLDKISDGYISSLLRRGDLEGKPGQMLLLHQVPGVLSERVLLVGCGKERELDERQYKQIINKTITTLNETGSMEAVCFLTELHVKGRDTYWKVRQAVETTKAGLYSFDQFKTNKAEPRRPLRKLVFNVPTRRELTIGEKAIAHGLAVAKGVRVCRDVANMPPNVCNPAYLASQARRLADAFDNITTKVIGEQEMAELGMNSYLAVARGSDNEAMMAIIEYKGHPDAKPIVLVGKGLTFDSGGISIKPAEGMDEMKYDMGGAASVLGTMHALAQLQLPINVIGVLAGCENMPGGNAYRPGDILTSMSGQTIEVLNTDAEGRLVLCDALTYVDRFEPETVIDVATLTGACIIALGHHTTGLLANHNPLAHELLNASEQAGDRAWRLPLFDEYQEQLESPFADMANIGGRPAGTITAAAFLSRFTKKYNWAHLDIAGTAWKSGKEKGSTGRPVPLLTQFLLNRSGVVIEEKE

SEQ ID NO: 169444 - protein, 231 aa, Unknown
  Bacterial polypetide isolated from the Sargasso Sea
KGITFDTGGISIKPSNAMDEMKYDMCGAASVIGTMNALASMKAKTNVIGIVAASENMPGGMATKPGDVVKTMSGQTVEILNTDAEGRLVLCDALTYASKFKPEIVIDIATLTGAVLVALGKVASGLMSNNSSLAKEICKVSFESHDYVWELPMWEEFQSELDSNFADIANIGKRYAGSITAACFLSRFTENYKWAHLDIAGTAWNEGSNKGGTGRPVSLLTYFVLKKAKII

SEQ ID NO: 169445 - protein, 289 aa, Unknown
  Bacterial polypetide isolated from the Sargasso Sea
RKVKALKKPFPKLKISTFNEKDLAKLKMGSFLSVGRGSDEPSRMMTIEHKGGKAGEKPIVLVGKGITFDTGGISLKPSPAMDEMKWDMCGAASVFGVMIALARLNAKVNVVGLLACAENMPSAHATKPGDVVTSMSGQTIEILNTDAEGRLVLCDALTYVKKYKPAHVIDIATLTGACVVALGNYASGLMANDQKLADKILQAGENSGDRAWQLPLWDEYKSCTKTNFADLANIGGAGAGTVTAACFLSKFTEDYSWAHLDIAGTAWVKGNEKGGTGRPVPLLCDLILS

SEQ ID NO: 169446 - protein, 237 aa, Unknown
  Bacterial polypetide isolated from the Sargasso Sea
STLDMLTDYVKPGISTDKIDQLGYEFINDNGGHSAPLYYRGFKKSLCTSLNHVVCHGIPSDRILNDGDAVNIDVTAIVNEYYGDTSRMYSVGEISIKAKNLIDATYESMMKAIKILKPGITLGDIGFEIQSYVEEKGFSVVRDFCGHGISNTFHEPPNILHYGKKNTGTELKPGMTFTIEPMINAGKLDVKVLNDGWTAVTKDKSLSAQFEHTLGITEDSYEIFTESVKDYRKPPYK

SEQ ID NO: 169447 - protein, 191 aa, Unknown
  Bacterial polypetide isolated from the Sargasso Sea
CTSLNHVVCHGIPSDRILQEGDAVNVDVTAIVDEHYGDTSRMFCIGKTPVKLNNLIDATYESMMRAIKILKPGIKLGDIGYEIQSYVEEKGFSVVRDFCGHGISTTFHEPPNILHYGNKNTGMELRPGMTFTIEPMINSGKYDVKMLNDGWTAVTKDKSLSAQFEHTLGITENGYEIFTESAKGYSKPPYL

SEQ ID NO: 169448 - protein, 202 aa, Unknown
  Bacterial polypetide isolated from the Sargasso Sea
PLFYRGFKKSLCTSLNHVVCHGVPSDRIVNDGDILNVDVTAIVDGYYGDTSRMFAVGKTSVKANNLINATYESMIKAISILKPGIKLGDIGYEIQNYVEEKGFSVVKDFCGHGISNIFHEPPNVLHYGKKNTGVDLTPGMTFTIEPMINAGKYDVKVLTDGWTAVTKDKSLSAQFEHTIGITENGYEVFTESVKGYSRPPYN

SEQ ID NO: 169449 - protein, 201 aa, Unknown
  Bacterial polypetide isolated from the Sargasso Sea
LYYRGFTKSLCTSLNHVICHGIPSDRILQEGDAVNVDVTAIVDEHYGDTSRMFCIGKTPVKLNNLIDATYESMMKAIKILKPGIKLGDIGYEIQSFVEEKGFSVVRDFCGHGISTTFHEPPNILHYGRKNTGMELRPGMTFTIEPMINAGKYDVKMLNDGWTAVTKDKSLSAQFEHTLGITENGYEIFTESAKGYSKPPYL

SEQ ID NO: 169450 - protein, 223 aa, Unknown
  Bacterial polypetide isolated from the Sargasso Sea
VSTEKIDQLGYEFIKDNNGYSAPQFYRGFKKSLCTSLNHVVCHGIPGDRILDEGDIVNVDVTAIINGHYGDTSRMFCVGEVSVKAKNLIETTYNSMMKAIEILKPGIKLGDIGYTIQSYVEEKGFSVVKDFCGHGISTKFHEPPNILHYGKKNTGIEIQPGMTFTIEPMINAGKYDVKVLDDGWTAVTKDKTLSAQFEHTLGITENGYEIFTESVKGYKKPPY

SEQ ID NO: 169451 - protein, 173 aa, Unknown
  Bacterial polypetide isolated from the Sargasso Sea
ADGDALNVDVTAIVDEYYGDTSRMFCIGKTPIKLNNLINTTYESMMRAVKILKPGIKLGDIGYEIQSFVEEKGFSVVRDFCGHGISKTFHEPPNILHYGNKNSGMELIPGMTFTIEPMINAGKYDTKMLNDGWTAVTKDKSLSAQFEHTLGITENGYEIFTESAKGYSKPPYL

SEQ ID NO: 169452 - protein, 277 aa, Unknown
  Bacterial polypetide isolated from the Sargasso Sea
MLTDYIKPGITTEKIDLLGYEYIKDNGGYSAPQFYRGFKKSLCTSLNHVVCHGIPSDRVLEDGDIINVDITAIVNEYYGDTSRMFMIGNPSVKAKNLIETTYDSLMKAIKILKPGIKLGDIGNEIQSHVEEKGYSVVRDFCGHGISNTFHEAPNILHYGKKNTGLELYPGMTFTIEPMINAGKYDVKILNDGWTAVTKDKSLSAQFEHTVGITENGYEIFTESVKGYSKTPLLIMIDRYSRKELKAIWSEENKYKIWLDIEVAAAEAMESIKLSQKV

SEQ ID NO: 169453 - protein, 185 aa, Unknown
  Bacterial polypetide isolated from the Sargasso Sea
VCHGIPSENRFLEEGDAVNVDITAIINDHYGDTSRMFCIGKTGIKLNNLIDATYDSMMKAIKILKPGIKLGDIGHEIQSYVEEKGFSVVRDFCGHGISTTFHEPPNILHYGSKNTGMEIKPGMTFTIEPMINAGKFGTKMLNDGWTAVTKDKSLSAQFEHTIGITENGYEIFTESDKGYSKPPYL

SEQ ID NO: 169454 - protein, 192 aa, Unknown
  Bacterial polypetide isolated from the Sargasso Sea
MYIFNHVVCHGVPSKDRILEEGDAVNVDVTAIVNEYYGDTSRMFCIGKTSVKLNNLIDTTYDSMMKAIKILKPGIKLGDIGYEIQSYVEEKGFSVVRDFCGHGISTTFHEPPNVLHYGNKNTGKELTPGMTFTIEPMINAGKYDVKMLNDGWTAVTKDKSLSAQFEHTIGITENGYEIFTESAKGYLKPPYL

SEQ ID NO: 169455 - protein, 119 aa, Unknown
  Bacterial polypetide isolated from the Sargasso Sea
GIKLGDIGHEIQSYVEKEGFSVVRDFCGHGISTTFHEPPNILHYGNKNTGMELKPGMTFTIEPMINAGKFSVKMLNDGWTAVTKDKSLSAQFEHTLGITENGYEIFTESAKGYSKPPYL

SEQ ID NO: 169456 - protein, 255 aa, Unknown
  Bacterial polypetide isolated from the Sargasso Sea
MTKYKEKFEKMRIAGNLASRTLDMLTGFIKPGISTDKIDQLGFEFIKDNGGHSAPQFYRGFKKSLCTSLNHVVCHGIPSDRIVEDGDIINVDVTAIVNEYYGDTSRMFMIGNPSVKAKNLIETTYNSMMKAIQILKPGIKLGDIGNTIQSCVEEKGYSVVRDFCGHGISNTFHESPNILHYGKKNTGLEVYTGMTFTIEPMINAGKYDVKILKDGWTAVTKDRSLSAQFEHTVGITENGYEIFTKSAKEYNKPPY

SEQ ID NO: 169457 - protein, 222 aa, Unknown
  Bacterial polypetide isolated from the Sargasso Sea
AHIDKLGYEFIRDNGGYSAPLYYRGFSKSLCTSLNHVVCHGIPTEDRILEEGDAVNVDITVIKNEYHGDTSRMFCIGKTPVKLNNLIDATYESMMRAIKILKPGIKLGDIGYEIQSYVEEKGFSVVRDFCGHGIGKVFHQQPNILHYGNKNTGEQLIPGMTFTIEPMINAGKYHTKMLNDGWTAVTKDKSLSAQFEHTIGITENGYEIFTESAKGYLKPPYL

SEQ ID NO: 169458 - protein, 193 aa, Unknown
  Bacterial polypetide isolated from the Sargasso Sea
LCTSLNHVVCHGVPSEDRILVDGDALNVDVTAIIDDHYGDTSRMFCIGKTSVKLNNLIDATYQSMMKAIKILKPGIKLGDIGHEIQSFIEEKGFSVVKDFCGHGISTQFHEPPNILHYGTKNTGMELKPGMTFTIEPMINAGKFNVKMLNDGWTAVTKDKSLSAQFEHTVGITENGYEIFTESAKGYSKPPYL

SEQ ID NO: 169459 - protein, 239 aa, Unknown
  Bacterial polypetide isolated from the Sargasso Sea
MSNYSEKFEKMRIAGKLASRTLDMLTDEVKAGITTDKIDQLGYEFIRDNGGHSAPLYYRGFKKSLCTSLNHVVCHGIPSDRVLNEGDAVNIDVTAIINEYYGDTSRMFTIGEIPVKAKNLIETTYESMMKGIEILKPGIKLGDIGYEIQSFVEQRGFSVVRDFCGHGISNTFHEQPNILHYGKKNTGHEVTPGMTFTIEPMINVGKLDVKVLNDGWTAVTKDKSLSAQFEHTIGITEDS

SEQ ID NO: 169460 - protein, 238 aa, Unknown
  Bacterial polypetide isolated from the Sargasso Sea
MNKNYLEKFEKMKVAGKLASSTLDMLTNYIKPGVSTEKIDQLGYEFIKDNNGYSAPQFYRGFKKSLCTSLNHVVCHGIPGDRILDEGDIVNVDVTAIINGHYGDTSRMFCIGEVSVKAKNLIETTYNSMMKAIEILKPGIKLGDIGYTIQSYVEEKGFSVVKDFCGHGISTKFHEPPNILHYGKKNTGIEIQPGMTFTIEPMINAGKYDVKVLDDGWTAVTKDKTLSAQFEHTLGITE

SEQ ID NO: 169461 - protein, 246 aa, Unknown
  Bacterial polypetide isolated from the Sargasso Sea
MSNYLEKFEKMRVAGKLASQTLDMLTGFVKPGISTDKIDQLGYEFINDNGGHSAPLYYRGFKKSLCTSLNHVVCHGIPSDRVLIDGDIVNIDVTAIVNEYYGDTSRMFTIGEISIKAKNLIDATYESMMKSINILKPGIKLGDIGFEIQSYVESKGFSVVRDFCGHGISNTFHESPNVLHYGKKNTGIELKPGMTFTIEPMINAGKLDVKVLNDGWTAVTKDKSLSAQFEHTIGITEDSYEIFTES

SEQ ID NO: 169462 - protein, 216 aa, Unknown
  Bacterial polypetide isolated from the Sargasso Sea
LCYEFIRDNGGYSAPQFYRGFEKSICTSLNHVVCHGIPGDRTLQDGDIVNIDVTAIINDHYGDTSRMYTVGDISIKSKKLINVTYESLNRAIKILKPGKRIGDIGHEIQSFVEKNGFSVVRDFCGHGIGTNFHQEPNILHYGSKDTGDELKPGMTFTIEPMINAGKYHTKVLNDGWTAVTKDKTLSAQFEHTVGITENGYEIFTESAKGYKEPPYN

SEQ ID NO: 169463 - protein, 234 aa, Unknown
  Bacterial polypetide isolated from the Sargasso Sea
DMLTENIKPGISTDYIDKLSYEFIRDNGGYSAPLFYRGFKKSLCTSLNHVVCHGVPSDRVLNEGDALNIDVTAIINDYYGDTSRMFCVGKTPVKLNNLINTTYEAMIRAIKILKPGIKLGDIGFEIQSFVEKNGFSVVRDFCGHGISNTFHELPNVLHYGKKNTGMELRPGMTFTIEPMINAGKYDVKVLADGWTAVTKDKSLSAQFEHTIGITENGYEIFTESVKGYSKPPYL

SEQ ID NO: 169464 - protein, 257 aa, Unknown
  Bacterial polypetide isolated from the Sargasso Sea
MSNYSEKFEKMRVAGKLAARTLDMLTENIKEGISTAYIDKLGYEFIRDNGGYSAPLYYRGFQKSLCTSLNHVVCHGIPSEDRILEEGDAVNVDVTAIINEHYGDTSRMFCIGKTSIKLNNLIETTYESMMRAIKILKPGIKLGDIGHTIQSYVEERGFSVVRDFCGHGISTTFHEPPNILHYGAKNTGMELKPGMTFTIEPMINAGKFEVKMLNDGWTAVTKDKSLSAQFEHTIGITENGYEIFTESAKGYSKPPYL

SEQ ID NO: 169465 - protein, 192 aa, Unknown
  Bacterial polypetide isolated from the Sargasso Sea
LCTSLNHVVCHGIPSDRVLRDGDAVNVDVTAIVDEHYGDTSRMFCIGKTPIKLNNLIDATYESMMRAIKILKPGIKLGDIGYVIQSFAEEKGYSVVRDFCGHGISTTFHEPPNILHYGNKNSGLELKPGMTFTIEPMINSGKYDVKMLNDGWTAVTKDKSLSAQFEHTLGITENGYEIFTESAKGYSKPPYL

SEQ ID NO: 169466 - protein, 212 aa, Unknown
  Bacterial polypetide isolated from the Sargasso Sea
FIRDNGGYSAPLYYRGYKKSLCTSLNHTVCHGIPSERILNSSDVLNIDVTAIVNEYHGDTSRMFYVGEAPIKAKNLIEATYQSMMRAIKILKPGIKIGDIGNEIQSYVETKGYSVVRDFCGHGISNVFHEAPNILHYGKKNTGIDLFPGMTFTIEPMINAGKFDVKILNDGWTAVTKDKSLSAQFEHTVGITENGYEIFTESVKGLHKPPYN

SEQ ID NO: 169467 - protein, 258 aa, Unknown
  Bacterial polypetide isolated from the Sargasso Sea
MKKNYSEKFEKMRLAGNLASKTLDMITDHVKPNIDTNKIDKLCYEFIRDNGGYSAPLFYRGFTKSLCTSLNHVVCHGIPSERILDDGDILNIDVTAIVEGYHGDTSRMFYVGEVPVKAKKLVDTTYQSMMNAIKILKPGIKLGDIGYEIQSHVEKNGFSVVRDFCGHGVSNVFHEPPNILHYGKKNTGQEIQPGMTFTIEPMINAGKYDVKVLNDGWTAVTKDKSLSAQFEHTIGISEDGYEIFTESVKGYNKPPYNN

SEQ ID NO: 169468 - protein, 246 aa, Unknown
  Bacterial polypetide isolated from the Sargasso Sea
MSNYKEKFEKMRVAGDLAARTLDMLTDNIKEGISTDYIDKLGYEFIRDNGGHSAPLYYRGFTKSLCTSLNHVVCHGIPSDRVLRDGDAVNVDITAIVDEHYGDTSRMFCIGKTPIKLNNLIDTTYESMMRAIRILKPGIKLGDIGYEIQSFVEEKGYSVVRDFCGHGISTTFHEPPNILHYGSKNSGPELKPGMTFTIEPMINSGKYDVKMLNDGWTAVTKDKSLSAQFEHTLGITENGYEIFTES

SEQ ID NO: 169469 - protein, 195 aa, Unknown
  Bacterial polypetide isolated from the Sargasso Sea
TKSLCTSLNHVVCHGIPSDRILQEGDAINVDVTAIVDEHYGDTSRMFCIGKTPVKLNNLIDATYESMMKAIKILKPGIKLGDIGHEIQTFIEEKGFSVVRDFCGHGISTTFHEAPNILHYGRKNTGMELRPGMTFTIEPMINAGKYDVKMLNDGWTAVTKDKSLSAQFEHTLGITENGYEIFTESAKGYSKPPYL

SEQ ID NO: 169470 - protein, 211 aa, Unknown
  Bacterial polypetide isolated from the Sargasso Sea
MNNYSEKFEKMRDAGNLASRTLDMLTEYIKAGIQTKKIDQLAYEFIKDNDGYSAPQFYRGFKKSLCTSLNHVVCHGIPSDRVLEDGDVINVDVTAVVSEYYGDTSRMYIIGNTSVKARNLIETTYESMMRAIKILKPGIKLGDIGNEIQTYVEKNGYSVVRDFCGHGISNTFHESPNILHYGKKNTGLELCPGMTFTIEPMINAGKYDVKI

SEQ ID NO: 169471 - protein, 218 aa, Unknown
  Bacterial polypetide isolated from the Sargasso Sea
RQLGYEFIRDNGGYSAPLYYRGFAKSLCTSLNHVVCHGIPSDRILQEGDAINVDVTAIVDEHYGDTSRMFCIGKTPVKLNNLIDTTYESMMRAIKILKPGIKLGDIGFEIQSFVEEKGFSVVRDFCGHGISTTFHEPPNILHYGKKNTGMELRPGMTFTIEPMINAGKYDVKMLNDGWTAVTKDKSLSAQFEHTLGITENGYEIFTESAKGYLKPPYL

SEQ ID NO: 169472 - protein, 181 aa, Unknown
  Bacterial polypetide isolated from the Sargasso Sea
GILSERILNDGDILNIDVTAIVDGYYGDTSRMFSAGKVPVKAMNLIEATYQSMMNAIKILKPGIKLGDIGFEIQSYVENKGYSVVRDFCGHGISNVFHEAPNILHYGKKNTGIELVPGMTFTIEPMINAGKFETKVLNDGWTAVTKDKSLSAQFEHTLGITENGYEIFTESVKSLHKPPYN

SEQ ID NO: 169473 - protein, 143 aa, Unknown
  Bacterial polypetide isolated from the Sargasso Sea
SVKLNNLINTTYESMMRAIKILKPGIKLGDIGYEIQSYVEEKGFSVVKDFCGHGVSTKFHEPPNILHYGTKNTGMELKPGMTFTIEPMINAGKFDVKMLNDGWTAVTKDKSLSAQFEHTIGITENGYEIFTKSVKGYSKPPYL

SEQ ID NO: 169474 - protein, 200 aa, Unknown
  Bacterial polypetide isolated from the Sargasso Sea
YYRGFEKSLCTSLNHVICHGIPGERILEEGDILNVDVTAVVDGFYGDTSRMYSIGKISVKAQNLIDATYESLMRSIKILKPGIKLGDIGNEIQTYVEDKGFSVVRDFCGHGISDKFHEPPNILHYGKKNIGTTLTPGMTFTIEPMINSGKFDVKILDDGWTAVSKDKSLSAQFEHTVGIKDNGYEIFTESVKGYLKPPYN

SEQ ID NO: 169475 - protein, 213 aa, Unknown
  Bacterial polypetide isolated from the Sargasso Sea
YIKDNGGYSAPLYYRGFEKSSCTSLNHVICHGIPSDRELEENDILNIDVTSIVDDYYGDTSRMFTVGEISIKAKNLIDVTYDSLMNATKILKPGIKLGDIGHEIQSYVEAKGFSVVRDFCGHGISNIFHEPPNVLHYGKKNTGSELQPGMTFTIEPMINSGKYDAKVLKDGWTAVTKDKSLSAQFEHTVGITENGYEIFTESVKGYKKPPYNK

SEQ ID NO: 169476 - protein, 181 aa, Unknown
  Bacterial polypetide isolated from the Sargasso Sea
GIPSDRILHEGDAVNVDVTAIVDEHYGDTSRMFCIGKTPVKLNNLIDATYESMMRAIKILKPGIKLGDIGYEIQSFVEEKGFSVVRDFCGHGISTTFHEPPNILHYGKKNTGMELRPGMTFTIEPMINAGKYDVKMLNDGWTAVTKDKSLSAQFEHTLGITENGYEIFTESAKGYSKPPYL

SEQ ID NO: 169477 - protein, 255 aa, Unknown
  Bacterial polypetide isolated from the Sargasso Sea
MIKYKEKFEKMRVAGELASKTLDMLTEYIKPGISTDKIDQLAFSFIKDNGGYSAPQFYRGFKKSLCTSLNHVVCHGIPSDRVLEDGDVINIDVTAVVNEYYGDTSRMFVIGNSSIKANNLVDATYEAMMKAIKILKPGIKLGDIGYEIQTFVEGKGYSVVRDFCGHGISNTFHESPNILHYGKKNTGLEIYPGMTFTIEPMINAGKFDVKILNDGWTAVTKDKSLSAQFEHTVGITENGYEIFTESGKGYNKPPY

SEQ ID NO: 169478 - protein, 257 aa, Unknown
  Bacterial polypetide isolated from the Sargasso Sea
MSEYSEKFEKMRVAGKLAAQTLDMLTEYIKEGISTNYIDKLGYEYIRDNGGYSAPLFYRGFKKSLCTSLNHVVCHGIPTEDRILEEGDALNVDVTAIINEHYGDTSRMFCIGKTSVKLNNLIETTYESMMRAIKILKPGIKLGDIGNEIQTYVEEKGFSVVRDFCGHGISTTFHESPNILHYGSKNTGIELKPGMTFTIEPMINAGKFDVKMLNDGWTAVTKDKSLSAQFEHTLGITENGYEIFTESAKGYSKPPYN

SEQ ID NO: 169479 - protein, 256 aa, Unknown
  Bacterial polypetide isolated from the Sargasso Sea
MTDYKEKFEKMRIAGNLAARTLDMLTDNLKEGVSTDYIDKIGYEFIRDNGGYSAPLYYRGFNKSLCTSLNHVVCHGIPSDRILRDGDAVNVDVTAIVDEHYGDTSRMFCIGKTSVKLQNLIDATYESMIRAIKILRPGIKLGDIGYEIQSFVEEKGFSVVRDFCGHGISTSFHEPPNILHYGKKNTGMDLKPGMTFTIEPMINAGKYDVKMLNDGWTAVTKDKSLSAQFEHTLGITENGYEIFTESAKGYSKPPYL

SEQ ID NO: 169480 - protein, 257 aa, Unknown
  Bacterial polypetide isolated from the Sargasso Sea
MVSNYSEKFEKMRIAGKLAAKTLDMLTDFIKPGITTDKIDQLSYEFIKDNGGYSAPQYYRGFKKSLCTSLNHVVCHGIPSERILEDGDAVNVDVTAIVNEFYGDTSRMFYVGDISIKAKNLIDVTYESMMKGIKILKPGIKLGDIGYEIQSYVEEKGFSVVKDFCGHGISNKFHESPNILHYGKKNTGLELKPGMTFTIEPMINAGKFDVKILNDGWTAVTKDKSLSAQFEHTLGITEDSYEIFTESDKEYRKPPYN

SEQ ID NO: 169481 - protein, 256 aa, Unknown
  Bacterial polypetide isolated from the Sargasso Sea
MTDYKEKFEKMRIAGNLAARTLDMLTENIKEGVSTDHIDKLGYEFIKDNGGYSAPLYYRGFTKSLCTSLNHVVCHGIPSDRILQEGDAVNVDVTAIVDKHYGDTSRMFCIGKTPVKLNNLIDATYESMMRAIKILKPGIKLGDIGYEIQSYVEEKGFSVVRDFCGHGISTTFHEPPNILHYGNKNTGMELRPGMTFTIEPMINSGKYDVKMLNDGWTAVTKDKSLSAQFEHTLGITENGYEIFTESAKGYSKPPYL

SEQ ID NO: 169482 - protein, 249 aa, Unknown
  Bacterial polypetide isolated from the Sargasso Sea
MTDYKEKFEKMRVAGNLAARTLDMLTENIKEGISTDYIDKLGYEFIRDNGGYSAPLYYRGFSKSLCTSLNHVVCHGIPSDRILQEGDAVNVDVTAIVDKHYGDTSRMFCIGKTPVKLNNLIETTYESMMKAISILKPGIKLGDIGYEIQSFVEEKGFSVVRDFCGHGISTTFHESPNILHYGQKNTGMELKPGMTFTIEPMINSGKYDVKMLNDGWTAVTKDKSLSAQFEHTLGITENGYEIFTESAKG

SEQ ID NO: 169483 - protein, 256 aa, Unknown
  Bacterial polypetide isolated from the Sargasso Sea
MTDYKEKFEKMRIAGNLAARTLDMLTDNIKEGVSTDYIDKIGYEFIRDNGGHSAPLYYRGFNKSLCTSLNHVVCHGIPSDRILRDGDAVNVDVTAIVNEHYGDTSRMFSIGKTPVKLQNLIDATYESMIRAIKILKPGIKLGDIGYEIQSFVEEKGFSVVRDFCGHGISTTFHEPPNILHYGKKNTGMDLKPGMTFTIEPMINAGKYDVKMLNDGWTAVTKDKSLSAQFEHTLGITENGYEIFTESAKGYSKPPYL

SEQ ID NO: 169484 - protein, 257 aa, Unknown
  Bacterial polypetide isolated from the Sargasso Sea
MSDYSEKFEKMKIAGRLAAQTLDMLTDNIKEGISTAAIDKLGYEFIRDNGGYSAPLYYRGFKKSLCTSLNHVVCHGIPSKERILEDGDAVNVDVTAIINDHYGDTSRMFCIGKTSVKLNNLVNATYESMIKAIKILRPGKKLGDIGYEIQSYVEERGFSVVRDFCGHGIGNVFHESPNILHYGKKNTGIELKPGMTFTIEPMINAGKFDTKVLNDGWTAVTKDKSLSAQFEHTVGITENGYEIFTESDKGYTKPPYI

SEQ ID NO: 169485 - protein, 257 aa, Unknown
  Bacterial polypetide isolated from the Sargasso Sea
MNNYSEKFEKMRIAGNLAARTLDMLTDFIKPGIKTDYIDKLAYEFIKDSGGYSAPLFYRGFKKSLCTSLNHVVCHGIPSDRTLEDGDIVNIDVTAIINNHYGDTSRMFCIGKTPVKANNLIEITYNSMMRAIRILKPGIKLGDIGNEIQTYVEENGFSVVKDFCGHGISTVFHEAPNILHYGKKNTGSELETGMTFTIEPMINAGKYDVKVLADGWTAVTKDKSLSAQFEHTVGITENGYEIFTESAKGYSKPPYNN

SEQ ID NO: 169486 - protein, 256 aa, Unknown
  Bacterial polypetide isolated from the Sargasso Sea
MSDYKEKFEKMKVAGNLAARTLDMLTENIKEGVSTDYIDKLGYEFIRDNGGYSAPLYYRGFTKSLCTSLNHVVCHGIPSDRILRDGDAVNVDITAIVDEHYGDTSRMFCIGKTPVKLNNLIETTYESMMRAIKILKPGIKLGDIGYTIQSFVEEKGFSVVRDFCGHGISTTFHESPNILHYGSKNTGMELRPGMTFTIEPMINSGKYDVKMLNDGWTAVTKDKSLSAQFEHTLGITENGYEIFTESAKGYLKPPYL

SEQ ID NO: 169487 - protein, 256 aa, Unknown
  Bacterial polypetide isolated from the Sargasso Sea
MSNYSEKFEKMRIAGKLASKTLDMLTDEVKEGISTDKIDQLGYEFIRDNGGHSAPLYYRGFKKSLCTSLNHVVCHGIPSDRVLIEGDAVNIDVTAVVNEYYGDTSRMFTIGDIPVKAKNLIDTTYESMMRGIEILKPGIKLGDIGYEIQSYVEQRGFSVVRDFCGHGISNTFHEPPNILHYGKKNTGHELTPGMTFTIEPMINVGKLDVKVLNDGWTAVTKDKSLSAQFEHTIGITEDSYEIFTESVKGYKRPPYN

SEQ ID NO: 169488 - protein, 256 aa, Unknown
  Bacterial polypetide isolated from the Sargasso Sea
MNKNYLEKFEKMKVAGKLVSSTLDMLTDYIKPGVSTEKIDQLGYEFIKDNNGYSAPQFYRGFKKSLCTSLNHVVCHGIPGERILDEGDIINVDVTAIINGHYGDTSRMFSIGEVSVKAKNLIETTYNSMMRAIEILKPGIKLGDIGHTIQSYVEEKGFSVVKDFCGHGISTRFHEAPNILHYGKKNTGIELQPGMTFTIEPMINVGKYDVKVLDDGWTAVTKDKTLSAQFEHTLGITENGYEIFTESVKGYSKPPY

SEQ ID NO: 169489 - protein, 256 aa, Unknown
  Bacterial polypetide isolated from the Sargasso Sea
MSDYKEKFEKMKVAGNLAARTLDMLTENIKEGVSTDYIDKLGYEFIRDNGGYSAPLYYRGFTKSLCTSLNHVVCHGIPSDRILRDGDAVNVDVTAIVDEHYGDTSRMFCIGKTPVKLNNLIETTYESMMRAIKILKPGIKLGDIGYTIQSFVEEKGFSVVRDFCGHGISTTFHESPNILHYGSKNTGMELRPGMTFTIEPMINSGKYDVKMLNDGWTAVTKDKSLSAQFEHTLGITENGYEIFTESAKGYSKPPYL

SEQ ID NO: 169490 - protein, 244 aa, Unknown
  Bacterial polypetide isolated from the Sargasso Sea
IAGKLASQTLYMLTDHVKPGVSTDKIDQLGYEFINDNGGHSAPLYYRGFKKSLCTSLNHVVCHGIPSERILNEGDVVNIDVTAIVNEYYGDTSRMYTVGEISIKAKNLIDVTYESMMNAIKILKPGVKLGDIGFEIQSYVEEKGFSVVRDFCGHGISNTFHEPPNILHYGKKNTGIELKPGMTFTIEPMINAGKLDVKVLNDGWTAVTKDKSLSAQFEHTLGITEDSYEIFTESVKGYRKPPYK

SEQ ID NO: 169491 - protein, 256 aa, Unknown
  Bacterial polypetide isolated from the Sargasso Sea
MSNYLEKFEKMRIAGSLASKTLDMITDYVKEGTATNHIDKLCYEFIRDNGGYSAPQFYRGFEKSICTSLNHVVCHGIPGDRTLQDGDIVNIDVTAVINDHYGDTSRMYTVGDISVKSKKLINVTYESLNKAIQILKPGKRIGDIGYEIQSFVEKNGFSVVRDFCGHGIGTNFHQEPNILHYGSKNTGDELKPGMTFTIEPMINAGKYNTKVLNDGWTAVTKDKTLSAQFEHTVGITENGYEIFTESAKGYKEPPYN

SEQ ID NO: 169492 - protein, 256 aa, Unknown
  Bacterial polypetide isolated from the Sargasso Sea
MNKNYLEKFEKMKVAGKLASSTLDMLTNYIKPGVSTEKIDQLGYEFIKDNNGYSAPQFYRGFKKSLCTSLNHVVCHGIPGDRILDEGDIVNVDVTAIINGHYGDTSRMFCVGEVSVKAKNLIETTYNSMMKAIEILKPGIKLGDIGYTIQSYVEEKGFSVVKDFCGHGISTKFHEPPNILHYGKKNTGIEIQPGMTFTIEPMINAGKYDVKVLDDGWTAVTKDKTLSAQFEHTLGITENGYEIFTESVKGYTKPPY

SEQ ID NO: 169493 - protein, 256 aa, Unknown
  Bacterial polypetide isolated from the Sargasso Sea
MTDYKEKFEKMRIAGNLAARTLDMLTENIKEGISTDHIDKLGYEFIRDNGGYSAPLYYRGFTKSLCTSLNHVICHGIPSDRILQEGDAVNVDVTAIVDEHYGDTSRMFCIGKTPVKLNNLIDATYESMMRAIKILKPGIKLGDIGYEIQSFVEEKGFSVVRDFCGHGISTTFHEPPNILHYGKKNTGMELRPGMTFTIEPMINAGKYDVKMLNDGWTAVTKDKSLSAQFEHTLGITENGYEIFTESAKGYSKPPYL

SEQ ID NO: 169494 - protein, 234 aa, Unknown
  Bacterial polypetide isolated from the Sargasso Sea
MSNYFEKFEKMRVAGKLASNTLDMITDYVKPGVSTDKLDQLCYEYIKDHGGYSAPQYYRGFKKSLCTSLNHVVCHGIPSDRILNDGDILNIDITAIVNNHYGDTSRMFSIGDIPIKAKNLIDETYTSMMKSIKILKPGIKLGDIGNEIQSHVESKGFSVVRDFCGHGIGDVFHQPPNILHYGEKNTGSTITPGMTFTIEPMINAGKYNVKVLNDGWTAVTKDKSLSAQLSIPWN

SEQ ID NO: 169495 - protein, 215 aa, Unknown
  Bacterial polypetide isolated from the Sargasso Sea
LAYNFIKDNGGYSAPQFYRGFKKSLCTSLNHVVCHGIPSDRILEDGDVVNIDVTAVVNEYYGDTSRMFTIGNSSIKANNLIDATYESMMKAIKILKPGVKLGDIGNEIQNFVEEKGYSVVRDFCGHGISNTFHESPNILHYGKKNTGPKIYPGMTFTIEPMINAGKYDVKILNDGWTAVTKDKSLSAQFEHTVGITENGYEIFTESGKGYNKPPY

SEQ ID NO: 169496 - protein, 258 aa, Unknown
  Bacterial polypetide isolated from the Sargasso Sea
IDTSFKLDAKKETLSLSTKSNVTGKIKLCIEYTGILNDRLLGFYRSKYTDSKGKTKYLATTQFEAADARRAFPCWDDPATKATFDVSLLVEKHHMAISNMPIMKKQNFGSKIIYEFERTPIMSTYLLYLGVGEFEFIEDKLRNIQIRVLTTKGNKNKAKLSLELTKKFLGEYEKYFGIKYPLPKLDMLAIPDFAAGAMENWGAITFRETILLYDPKTSSTRTKQFIAEVISHELAHQWFGNLVTMKWWNDLWLNESFA

SEQ ID NO: 169497 - protein, 831 aa, Unknown
  Bacterial polypetide isolated from the Sargasso Sea
MGISEINYDIQFEPLFSNFTFKGMEILSFKTTPSNKFVLNCAEIKIKKCYILSKNKTIDVNFKLNAKNESLSIVSKSKVSGKIKLCIEYAGILNDRLLGFYRSKYTDPSGKTKYMATTQFEAADARRAFPCWDEPATKATFDVSLLVEKNYMAISNMPVRKKQNFGSKIIYEFERTPIMSTYLLYLGVGEFEYVETKLRNIQIRVLTTKGNKNKAKLSLELTKKFLGEYEKYFGIKYPLPKLDMLAIPDFAAGAMENWGAITFRETILLYDPKTSSTKTKQFIAEVISHELAHQWFGNLVTMKWWNDLWLNESFATFMATKIVDKFYPEWDLWDQFLEDAMNTAMSLDALKTSHPIDVKVNHPSEIREIFDSISYDKGGCVLRMLENFVTDKNFQKGLQKYLKKYAYSNAEGRDLWKSIGEVAKKPIDKIMSTWIDQVGFPIVSVNRKGSQLSLKQSRYLLEETKTSKKGIWKIPLIVDEGDVSTSHIMDKKSQSIKLKNKERNFIINSGRTGFYRMDYDSETLDNLSLLIDEKILNYVDRWSIQNDYYSQCVTGKKKVQDYLDFTNAYFDEDNYISSLNLAQHLYSLYSLTHKEKFSDEIKQYSFNFLRTIFDRLGWDAKKNEPHTNALLRSFAISGLGKLGDEEILKESKRRFDKFLKNQNSLSADLQETVFVLVAWNGNETIYKKFASLYKKAKSQEEKLRFLAAMCNFQQKNLLLKTLEFTLGPDVRSQNIQMPIMRIATNLHGKEFLWVWLKKNWKKIVKKAGIGNPLLNRVVASIGQVVEAKQEKEIRKFFKDNPLRGTEMTLEQTMERVRVSSKFLNSIKKEFS

SEQ ID NO: 169498 - protein, 669 aa, Unknown
  Bacterial polypetide isolated from the Sargasso Sea
KNFGSKIIYEFERTPIMSTYLLYLGVGEFEYIEDKLRNIQIRVLTTKGNKSKAKLSLELTKKFLGEYEKYFGIKYPLPKLDMLAIPDFAAGAMENWGAITFRETILLYDPKTSSTRTKQFIAEVISHELAHQWFGNLVTMKWWNDLWLNESFATFMATKIVDKFYPEWDLWDQFLEDAMNTAMSLDALKTSHPIDVKVNHPSEIREIFDSISYDKGGCILRMLEHFVTEKNFQKGLQKYLKKHEYSNAEGKDLWKSIGEVAKKPIDKMMKTWINQVGFPILSVKRKGQEISLKQSRYLLEETKSSQKGIWKIPLIVDEGNVSTSHILEKKSGSLKLKNKDRNFIINSGRTGFYRMDYDSETLDNLSLLIDEKILNYVDRWSIQNDYYSQCVTGKKKLQEYLDFTNAYFDEDNYISSLNLGQHLYSLYSLTHKEKFSDEIKQYAINFLRTIFERLGWDSKKGEPHTNALLRSFAISGLGKLGDQEILEESKKRFNKFLKNPNSLSADLQETVFVLVAWQGNESTYKKFLSLYKKANSQEEKLRFLAAMCNFQQKNLLLKTLEFTLSSDVRSQNIQMPIMRIAANIHGKDFLWGWLKKNWKKIVKKAGIGNPLLNRVVASIGQVIDAKQEKEIRQFFKANPLRGTEMTLEQTMERVRVSSKFRNSIKKEFS

SEQ ID NO: 169499 - protein, 309 aa, Unknown
  Bacterial polypetide isolated from the Sargasso Sea
VEWAALDEAQRKELDNRLKIIDWVRDTINAPAEELGPEQLAQRAVDLLCSVACDNVSYRITKGEDLREQNYMGLHTVGRGSERPPVLLALDYNPTGDKEAPVYACLVGKGITFDSGGYSIKQSAFMDSMKSDMGGAATVTGALAFAITRGLNKRVKLYLCCADNLISGNAFKLGDIIHYRNGKKVEVMNTDAEGRLVLADGLIDASAQKPELIIDAATLTGAAKTALGNDYHALFSFDDQLAARLLASAAQENEPFWRLPLAEFHRSQLPSNFAELNNTGSAAYPAGASTAAGFLSHFVENYQQGWLHI

SEQ ID NO: 169500 - protein, 430 aa, Unknown
  Bacterial polypetide isolated from the Sargasso Sea
MSELKVTEVMRVELTKDTPAAHWGKADVTFNAEGALVHLGGGDELRQIQMAARKLRNQGISTVALAGALWDLNSQWVFAQGFATAKPGYKIQWCGDDAVQAELQRRLEVATFARQLINDTPENLSPVKLAQQAAKWLADIGGAKVSYRIIEGEALLEEQWIGIHAVGRGSERPPAMLELDFNPLSADAPVSVALVGKGITFDSGGYSIKASEGMLGMKCDMGGAATVTAALGLAIKSGLNKRVKLFLCCAENLISGRAYKLGDILTYKNGVTVEVVNTDAEGRLVLADGLQAASATGAPFIIDAATLTGAAVMAVGSNYNAIFSPQTEVLQLAQQKASTVAERVWPLPLDPWHKDMCPSAYADTANSRPVKGGGAGGASNAAGFLWRFVSPEAKWLHVDLAAAFEDSASALWGAGATTHGVLTISELIKG

SEQ ID NO: 169501 - protein, 430 aa, Unknown
  Bacterial polypetide isolated from the Sargasso Sea
MSERKVTEVMRVELTKDTPAAHWGKADVTFNGEGALVHLGGGDELRQIQMAARKLRNQGINTVALVGSLWDLNSQWVFAQGFATAKPGYKIQWCGDEVVQAELQCRLEVATFARQLINDTPENLSPVKLAQQAAKWLAELGGAKVSYRIIEGEALLAEQWIGIHAVGRGSERPPAMLELDFNPLSADAPVSVALVGKGITFDSGGYSIKASEGMLGMKCDMGGAATVTAALGLAIKSGLNKRVKLFLCCAENLISGRAYKLGDILTYKNGVTVEVVNTDAEGRLVLADGLQAASATGAPFIIDAATLTGAAVMAVGSNYNAIFSPQTEVLQLAQQKASTVAERVWPLPLDPWHKDMCPSAYADTANSRPVKGGGAGGASNAAGFLWRFVSPEAKWLHVDLAAAFEDSASALWGAGATTHGVLTISELIKG

SEQ ID NO: 169502 - protein, 433 aa, Unknown
  Bacterial polypetide isolated from the Sargasso Sea
MADMMNVRLSSQAAAAHWGEGALLSFNGDEAHLHLGSGQEKEALRAIQRAARRLESSGIKRVKLVGEGWNGERRYAFAQGFYAAKGVRELDFGEQSDQEAAELAALLKATRWVREVTNGCPQEIYPMSLAESALLLIRSLAGDKVTARITAGEALQEAGHIGIWSVGRGSEREPVLLELDYNPTGDANAPVLAALVGKGITFDSGGYSMKSSDNMLPMKSDMGGAAMVTGALALAISRGLNKRVKLILCCAENLVSGHAFKLGDILTYRNGISVEIQNTDAEGRLVLADGLLAASESGAAYILDAATLTGAAKTALGRDYNAVFALDEAEQARALAAAKAENEQAWALPLEPWHAGQLTSAFAELGNVASAEGTAGATTAAAFLSRFVRDEGKGWVHLDLAASYQKSGNDLWATGAKGHGLRTIARWLQEVSE

SEQ ID NO: 169503 - protein, 207 aa, Unknown
  Bacterial polypetide isolated from the Sargasso Sea
MVTGALALAISRGLNKRVKLILCCAENLVSGHAFKLGDILTYRNGISVEIQNTDAEGRLVLADGLLAASESGAAYILDAATLTGAAKTALGRDYNAVFAFDEAEQDRALAAAKAENEQAWALPLEPWHAGQLTSAFAELGNVASAEGTAGATTAAAFLSRFVRDEGKGWVHLDLAASYQKSGNDLWATGAKGHGLRTIARWLQEVSA

SEQ ID NO: 169504 - protein, 254 aa, Unknown
  Bacterial polypetide isolated from the Sargasso Sea
KAKNIPHGDIRVAFTPDEEVGKGAKHFDVAAFDARWAYTVDGGGVGELEFENFNAASVTIKIVGNNVHPGTAKGVMVNALSLAARIHAEIPADEVPEMTEGYEGFYHLASMKGSVDRAEMHYIIRDFDRKQFEARKRKMMEIAKKVGKGLHPDCYIELVIEDSYYNMHEKVMSHPHVVEIARQAMVDCDIEPQMKPIRGGTDGAQLSFMGLPCPNLFTGGYNYHGKHEFVTLEGMEKAVQVIVRIAELTAKRGA

SEQ ID NO: 169505 - protein, 101 aa, Unknown
  Bacterial polypetide isolated from the Sargasso Sea
DCYIELVIEDSYYNMREKIVDHPHIIDIACQAMRDCDIEPQMKAIRGGTDGAQLSFMGLPCPNLFTGGYNYHGKHEFVTLEGMEKAVQVIVRIAELTAKQE

SEQ ID NO: 169506 - protein, 413 aa, Unknown
  Bacterial polypetide isolated from the Sargasso Sea
MENGFKDELTERLIRYTAIDSQSDELSHKSPSTDQQLDMLNLLKEELLALGVEDVKLTDYGVVLATVPGNISAPSVGFLAHVDTAPQFNASGVKPRLIKGYNGGDITFPDDPELTLSPNEFEYLNDKKGDDIITASGTTLLGADDKAGVSIIMTAINHLLQNSELKHGPIRVAFTPDEEIGRGVKKQLATDLGVDTAYTFDGGKIGDLEYETFSADKAEVKIKGISIHPGLAKDKLVNAIHIAAKLISTLPQTTITPETTEDNEGFIHATDMVGGSSEMTLRFILRDFELAGLKEKGDLLKQVCEVVNFSEPRAEITCEIIPQYRNMRYWLEKNMRPVEIAKRAMENLGIVPLSKPIRGGTDGSFLTELGIPTPNLFTGMQNIHGPLEWISAQDMEKATHLCLEIIKEFSKEN

SEQ ID NO: 169507 - protein, 407 aa, Unknown
  Bacterial polypetide isolated from the Sargasso Sea
MDTLLERFLRYVTFHTRSDATNPACPSSEGQLVFARALCDEMQQMGLSRVTLDQYGYLTACLPGNQPDAPAIGLIAHMDTADYEAAHVVPQIIENYQGGDICLGKGDEVLAIRDYRFLKNYLGQDLITTDGSTLLGADDKAGIAEILTAIDHLLAHPEIPRGDVWVGFTPDEEIGRGADRFPLDRFPAKWAYTVDGGELGELEYENFNAAGATVRFIGNNVHPGTAKGSMINSQTLAARFHAAMPAEQTPEATDGYQGFFHLAQMNGTVEETSLHYIIRDFDDEGFAARKAQLKERVASLQLEAPRARIELTLTDSYRNMRSQIEPHMHIVELAKAAMLAADVTPRIKPIRGGTDGARLSFMGLPCPNLFTGGHNFHGKHEFIPLQSMEKAVTTLVALVRLTSAWRG

SEQ ID NO: 169508 - protein, 453 aa, Unknown
  Bacterial polypetide isolated from the Sargasso Sea
MKTQVVFWKASTALALILAMSLGGCSSGGGGHKSSVAASSPDAGAGAGGGTGGGDGGTGGGTGGGTGGGDGGTGGGTGGGTGGGDGGTGGGTGGGTGGGTGGGTGGGTGGGTGGGTGGGTGGGTGGGTGGGTGGGTGGGTGGGTGGGTGGGTGGGTGGGTGGGTGGGTGGGTGSTTTPLVTGQIAGTLGTTVGNVGTAVGNLGSTLNGVPIVGATAGGLVTSAGTAVNSIGTGVTAGLGSLGTNTNSLGTTVAGVGNGVADLGGGLSTTGQTLSTTLGGIPVVGGATGGVGTAVGGVVDKVGTTVTMLGDTLSTASTTGPLGSLTNTLGSKVVVPVVSLVENTTGNLGNATGLGTPLNGVLDKVGSTVTSLGTQVASTGGTGNPVTGVVGTVLTGVGGTLDKSGGYVAPTGGTSAPGIPELVGGLVANVGTGLNVGNTNGTVSATGVTGGAVG

SEQ ID NO: 169509 - protein, 298 aa, Unknown
  Bacterial polypetide isolated from the Sargasso Sea
MIPMSMEQHSMNPGDLPWPMIVGGVPVNPACPNCKYDFMVSLQYDGWWGGHFCGGSLVREDWVVTAAHCVQGESPNNIEVVIGLHNVNGTNGSQTRNVSEIIIHPNYSNNSLNNDYALLRLSSPITDFEPIQLCTDTDHDEEPVMSTTMGWGATSSGGSSSAILLEVDVPIDDSCGNYSNSDITNNMVCAGYNNGGYDSCQGDSGGPLIMTNDDGEYELIGIVSWGYGCAEPGYPGVYSKIHSRLNWFFGYIGEPEEDFVVELYGDVNFDGELNITDVITLINFILGTTPTEEEALTA

SEQ ID NO: 169510 - protein, 329 aa, Unknown
  Bacterial polypetide isolated from the Sargasso Sea
LDEIDKLGADYRGDPSSALLEVLDPEQNNSFNDHYLEVDYDLSDTMFITTANTLRMPPALLDRMEIIRIAGYTEDEKLEIVKQHLAPQMLEKHGLKKDELILDDTAILGLIRYYTREAGVRSLERELSNLARKTVKKIVAGEVASIKIDESNLNDFAGVRKFKYGEIDNDDQVGIVTGLAWTEVGGDILPIESVIMPGKGRMTITGKLGDVMKESIQAAKSYVRSRCIEFGIKPTIFPQRDIHIHVPEGAIPKDGPSAGLGMVTSIVSVLTGIPVRKDIAMTGEVTLRGKALGIGGLKEKLLAALRAGTKTVIVPKENEKDMADIPDNV

SEQ ID NO: 169511 - protein, 323 aa, Unknown
  Bacterial polypetide isolated from the Sargasso Sea
VLVEGVYRAQVESYTETDDLYAARVLQLDADEVSERESEVLSRSVMTQFDQYVKLNKKVPPEIISSLSSIDDPSRLADTIAAHMAIKIQDKQEVLEIVDLRERLEHLIKLMESEIDLLQVEKKLRGRVKKQMEKSQREYYLNEQMKAIQNELGEIEDGVNEFDELAGKIEKSGMSKEAREKAENELKKLRMMSPMSAEATVVRNYIDWILSVPWKKRSKVKRDLNLAEETLEADHYGLEKVKERILEYLAVQQRVKKMKGPILCLVGPPGVGKTSLGRSIARATNRKFVRMSLGGVRDEAEIRGHRRTYVGSLPGKICRIWRK

SEQ ID NO: 169512 - protein, 280 aa, Unknown
  Bacterial polypetide isolated from the Sargasso Sea
MEKIKGPILCLIGPPGVGKTSLGKSIAKATNRQFVRMSLGGVRDEAEIRGHRRTYIGSLPGKIIQMMKKAGTKNPLILLDEIDKVGNDYRGDPSSALLEALDPEQNTNFNDHYLEVDYDLSDVMFVTTANTLNILPPLLDRMEVIRIPGYTEDEKINIADKYLLPKQIKENGVKKEELEVANGTIREIIRSYTRESGVRNLEREISKVARKVVKKVVSGEEKKVNVSDKNIGDFLGVKKFKYGEVEAEDRIGIVTGLAWTEFGGEILKIETIHMPGKGRM

SEQ ID NO: 169513 - protein, 264 aa, Unknown
  Bacterial polypetide isolated from the Sargasso Sea
LVEGEKRVKILKHSESSNNFLNCEVEVVDDQNTSKDLEQFASGLVKKFERLQTLSKREFNESSNNIKNLKDPSQIANNISSNLNIQIFEKQELLEITDLKKKLEKIHAIIEKETSVISVEKKIRGRVKNQMEKTQREYYLNEQLKAIQKELGEIDEGKDELSSLSKAISEAKMPKLAKEKCLSELKKLKSMSPMSAEATVVRNYLDWMTELPWSNKSKINTDLNNAQKILDEDHYGLEKVKERIIEFLAVQKRIQKMKGPILCL

SEQ ID NO: 169514 - protein, 166 aa, Unknown
  Bacterial polypetide isolated from the Sargasso Sea
RASSLGLASNFHEKKDIHIHVPEGATPKDGPSAGIGMCTALVSVLTGIPVKADVAMTGEITLRGQVLPIGGLKEKLLAAHRGGIKTVIIPAENEKDLKEIPENVKSNLDIVSVKWMDEVLSLGLESVPVAKSSTRKSGRSKEGSASQNSSSTRKKREDISVGVKTH

SEQ ID NO: 169515 - protein, 369 aa, Unknown
  Bacterial polypetide isolated from the Sargasso Sea
AARLADTMLPHMPLKVDDKQKVLEIIDVTERLEFLMAMMESEIDILQVERRIRSRVKKQMEKSQREYYLNEQMKAIQRELGELEDTPDEFETLSKKIEQAQMPEEARTKATAELQKLKMMSPMSAEATVVRSYIDWLTNVPWKKRSKVKKDLAGAERILDSDHYGLDKVKERILEYLAVQQRVNKLKGPILCLVGPPGVGKTSLGQSVAKATGRKYVRMALGGVRDEAEIRGHRRTYIGSMPGKIIQKMAKVGVRNPLFLLDEIDKMASDFRGDPAAALLEVLDPEQNTAFSDHYLEVDYDLSDVMFFATSNSLNIPAALLDRMEVIRLAGYTEDEKLNISKQHLINKQIERNGLKPHEIEIEDSAIIG

SEQ ID NO: 169516 - protein, 185 aa, Unknown
  Bacterial polypetide isolated from the Sargasso Sea
GKAKLTITGSLGEVMKESIKAAVSYVRSKSLNLGINPNDFEKYDIHIHVPEGATPKDGPSAGIAIFNSLVSSMTHNKVRKDVAMTGEITLRGRVLPIGGLKEKIYAASRAGIKKVLIPEENHREIVEFDKEILKTLKIIPVSEAISILEHTLIKPVIPINLSESDLQENQKRSSELDLSKENITH

SEQ ID NO: 169517 - protein, 324 aa, Unknown
  Bacterial polypetide isolated from the Sargasso Sea
ILEQINIKERLEYVIGLIEVEIDMMKVEQKVRGRVKDQMEKSQKEYYLNEQMKAIQKELGDLDNANNEFDELEEKIKQSGMTKEADEKASSELKKLQMMSPMSAEATVVRNFLDVLVSAPWKKKTKAKVSLDQAHEILDEDHYGLKTVKERIIEYLAVQKRVKKLKGPILCLVGPPGVGKTSLGASIARATGRKFVRMSLGGVRDEAEIRGHRRTYIGAMPGKIMQNLNKVGVRNPLFLLDEIDKMSMDFRGDPSSALLEVLDPEQNTTFNDHYMEVDFDLSDVMFICTANTLNIPPPLLDRMEVIRIEGYTEDEKMNIAEKYL

SEQ ID NO: 169518 - protein, 333 aa, Unknown
  Bacterial polypetide isolated from the Sargasso Sea
IAKATNRQFIRMSLGGVRDEAEIRGHRRTYIGSLPGKIIQMMKKAGTKNPLFLLDEIDKIGNDYRGDPSSALLEALDPEQNTTFNDHYLEVDYDLSDVMFVTTANTLNILPPLLDRMEVIRIPGYTEDEKINIANKYLLPKQIKDNGIKQGEMNLHEGTIKEIIRNYTRESGVRNLEREISKVTRKVVKKVVNEEEKSVEVNEKNLSDFLGVKKFKFGELESENKIGIVIGLAWTEFGGEILKIETVNMPGKGRMQITGKLGDVMQESVKAAKSFVRSKSLEYGIIPPTFEKKDFHIHVPEGATPKDGPSAGIAMVTSIVSSITNIPVNKEIA

SEQ ID NO: 169519 - protein, 349 aa, Unknown
  Bacterial polypetide isolated from the Sargasso Sea
LGGIRDEAEIRGHRRTYIGSLPGKIIQMMKKAGTKNPLFLLDEIDKVGNDYRGDPSSALLEALDPEQNKEFNDHYLEVDYDLSDVMFVTTANTLNILPPLLDRMEVIRLSGYTEDEKVNISQKFLIPKQSENNGLKKGEWSINEEVNREIIRNYTRESGVRNLEREISKIARKLVKKIDNNEKVNSSIKGTDLKNLLGVPKFKYGEIEEENRIGVVTGLAWTEVGGEILKIESAIMPGKGKMQITGKLGDVMQESVKAAKSYIRSKSLEFGIIPPIFDKKDFHIHVPEGATPKDGPSAGVGMVTSIISAITEIPVDKNVAMTGEITLRGIVLPIGGLKEKLLAAHRAGI

SEQ ID NO: 169520 - protein, 254 aa, Unknown
  Bacterial polypetide isolated from the Sargasso Sea
GKSIARATNRKFARMSLGGVRDEAEIRGHRRTYIGSMPGKIIQKLSKVEVKNPLFLLDEIDKMGMDHRGDPASALLEVLDPEQNNTFSDHYLEVDFDLSEIMFVCTANSLNIPGPLLDRMEIIRLPGYIEDEKLNIAKQYLIPKQLERNGLDNTEVKLTDKSVLDIVRYYTREAGVRGLERQIAKIFRKSVKERVLSDSKKAKSIINITPKNLEKYCGVPKFKFGEADVEDIVGKVAGLAWTEVGGELLTIESS

SEQ ID NO: 169521 - protein, 358 aa, Unknown
  Bacterial polypetide isolated from the Sargasso Sea
DVEKKIRDRVKKQMEKSQREYYLNEQIKAAQKELGEIGEEGDELENLEKKIHEVGMTKEALKKAKSELAKFKHMAPSSAEASVVRTYLDCLVDVPWKKKSKIKTDIKASMDILEEDHYGLEEVKERIVEYLAVQKRVKSMKAPVLCLVGPPGVGKTSLGESIARATNRKFVRMSLGGVRDESEIRGHRRTYIGSMPGKIVQKLSKVGVKNPLFLLDEIDKIGMDHRGDPASALLEVLDPEQNNTFSDHYLEVDYDLSEVMFVCTANSLNIPTPLLDRMEIIRIPGYIEDEKVNIANKYLLPKQMSRNGVKDNEIKLNKEVILALIRYYTREAGVRGLERQIAKILRKVVKERLIAKKP

SEQ ID NO: 169522 - protein, 286 aa, Unknown
  Bacterial polypetide isolated from the Sargasso Sea
VAQKNSEVDEPQQKDIFSYGCLSKILQLLKLPDGTVKVLVEGLSRVKITEISDENKKYLSCKIDSINDEKETEENKLYATSLIKKFEKLSSLSKKDSMDFIKTLKSLNGAAQIVDNIASNLNISIQDKQFLLELVSLKKRLEKIYEILEKETSVISMEKKIRGRVKNQMEKTQREYYLNEQLKAIQKELGEIEEGKDEISNLTKSIVKAKMTKDAQNKCMSELRKLKAMSPMSAEATVVRNYLDWMIDLPWNNKSKVIKDLNSAQKILDEDHFGLEKVKERIIEFL

SEQ ID NO: 169523 - protein, 343 aa, Unknown
  Bacterial polypetide isolated from the Sargasso Sea
QFKQAILKSKMPKEVQKKCMSELKKLRNMSPMSAEATVVRNYLDWMIDIPWYKKDKVDIDLNKALKILDEDHFGLDKVKERIIEFLAVQKRMEKIKGPILCLVGPPGVGKTSLGKSIAKATNRQFVRMSLGGIRDEAEIRGHRRTYIGSLPGKIIQMMKKAGTKNPLILLDEIDKVGNDYRGDPSSALLESLDPEQNTTFNDHYLEVDYDLSDVMFVTTANTLNILPPLLDRMEVIRIPGYTEDEKINIANKFLLPKTIKENGVKDGEMDLSDGTIKEVIRNYTKESGVRNLEREISKITRKVVKKVVNAEETKVKINEKNLTDFLGVKKFKFGELENENKVG

SEQ ID NO: 169524 - protein, 241 aa, Unknown
  Bacterial polypetide isolated from the Sargasso Sea
SQKKVTNISNKNLDKYSGVKKLKYGIAEKDNAIGQVTGLAWTEVGGELLTIEASNIKGKGRIIKTGSLGDVMQESIQAALTVVRSRSDSLGIDSDFYEKYDVHIHVPEGATPKDGPSAGGAMAISLISVFTGIPVRADTAMTGEITLRGQILKIGGLKEKLLAAKRGGIKNVIIPKENMPDLQEIPKQITDSLEIKPVEWIDEIINFALTDEPTPLLKNQKLAKSKNASKKSTKSSDKQTH

SEQ ID NO: 169525 - protein, 294 aa, Unknown
  Bacterial polypetide isolated from the Sargasso Sea
RSKILDLKDDDKFLTCTVESQSDVITKNEDLLPLAVSAYRKLEKLNSVNKKIANETINNIKILKDPSKIADNIASHLNTTISEKQQLFETLDLKKRLSAIIKIMENETSIIGVEKRIRGRVKTQMEKTQREYYLNEQLKAIQKELGEIEDGKDETSNLNKAIQKAKMPKEVHKKCMSELKKLRNMSPMSAEATVVRNYLDWMIEIPWFKKDKVDIDLNKALKILDEDHFGLEKVKERIIEFLAVQKRMEKIKGPILCLVGPPGVGKTSLGKSIAKATNRQFVRMSLGGIRDEAK

SEQ ID NO: 169526 - protein, 310 aa, Unknown
  Bacterial polypetide isolated from the Sargasso Sea
EAQIDLTEVEQRIRGRVRKQMEKSQKEYFLNEQIKAAQKELGEIGEEKNELDEIQKKIEATKLSKDALEKVNSEFSKLKQMSPMSAEATVVRTYIETLLEVPWSNSTKINLDLNRAKSVLDTDHYGLKEIKDRIIEYLAVQKRVKKMKAPVLCFVGPPGVGKTSLGESIARSVNRNFIRLSLGGVRDEAEIRGHRKTYIGSMPGKIIQKLTKVKVKNPLFLLDEVDKVGMDQRGDPSSALLEVLDPEQNNTFNDHYLEVDYDLSEVMFICTANSLNIPAPLLDRMEIIRLPGYIEDEKLNIAKNYLVPRN

SEQ ID NO: 169527 - protein, 328 aa, Unknown
  Bacterial polypetide isolated from the Sargasso Sea
KGPILCLVGPPGVEKTSLGASIARATGRKFVRMSLGGVRDEAEIRGHRRTYIGAMPGKIMQNLNKVGVRNPLFLLDEIDKMSMDFRGDPSSALLEVLDPEQNTTFNDHYMEVDFDLSDVMFICTANTLNIPPPLLDRMEVIRIEGYTEDEKMNIAEKYLVKKQTEANGLKDSEIKITNSAILSIIRHYTREAGVRNLDREIAKIARKVVKSLVMKSKDETVHVRPGSLEKYLGVQKFKYGIAEKDNQIGQVTGLAWTQVGGELLTIESTAIPGKGKLINTGQLGDVMKESIQAATTVVRSRSKALGIKEDFHQKMDMHIHVPEGATPK

SEQ ID NO: 169528 - protein, 296 aa, Unknown
  Bacterial polypetide isolated from the Sargasso Sea
DIYSYGCESKVLQLLKLPDGTVKVLVEGIDRVKILECKDDKDFLSTAVDVVKDKVEDIDNLLPLAIALVRKLEKLTNLNKKISSELMVNLKELKDPTRIADQIASQISISISEKQILLETVVLKQRLEKLMDHINNEINVIGVEKRIRGRVKNQMEKTQREYYLNEQMKAIQKELGEIEDGKDEIANLQKSIIKAKMTKEATKKCLAELKKLKSMSSMSAEATVVRNYLDWMVELPWVNKDKKIDGISIPEAKKVLDEDHYGLEKVKERILEYLAVQKRVGKIKGAILCLVGPPLG

SEQ ID NO: 169529 - protein, 348 aa, Unknown
  Bacterial polypetide isolated from the Sargasso Sea
AEATVVRNYLDWMIDIPWFKKDKVDIDLKNALKVLDDDHYGLDKVKERIIEFLAVQKRMEKIKGPILCLIGPPGVGKTSLGKSIARATNRQFVRMSLGGVRDEAEIRGHRRTYIGSLPGKIIQLMKKAGTKNPLILLDEIDKVGNDYRGDPSSALLEALDPEQNTTFNDHYLEVDYDLSDVMFVTTANTLNILPPLLDRMEVIRIPGYTEDEKINIANKYLLPKQIKENGVKTEELELEDGTIREIIRSFTRESGVRNLEREISKVARKVVKKVVSGEEKKVVVTNKNIPEFLGVKKFKYGEVESEDRVGIVTGLAWTEFGGEILKIETVHMPGKGRMQITGKLGDVM

SEQ ID NO: 169530 - protein, 322 aa, Unknown
  Bacterial polypetide isolated from the Sargasso Sea
LNILPPLLDRMEVIRLSGYTEDEKVNISQKFLIPKQSENNGLKKEEWNIDEKVNRKIIRDYTRESGVRNLEREISKIARKLVKKIDNNEKINNPIKEEDMKDLLGVQKFNYGEIEDENRIGVVTGLAWTEVGGEILKIESAVMPGKGKMQITGKLGDVMQESVKAAKSYIRSKSLEFGIIPPIFDKKDFHIHVPEGATPKDGPSAGVGMVTSIISAITEIPVDKKVAMTGEITLRGIILPIGGLKEKLLAAHRAGIKKVLIPIENKKDLVEVPKTILETMEIIPVKNVDEVLKVALIKPLKRVEWVEVDQITDKNKTKKEEL

SEQ ID NO: 169531 - protein, 312 aa, Unknown
  Bacterial polypetide isolated from the Sargasso Sea
TSLGKSIAKATNRQFIRMSLGGVRDEAEIRGHRRTYIGSLPGKIIQMMKKAGTKNPLFLLDEVDKIGNDYRGDPSSALLEALDPEQNTAFNDHYLEVDYDLSDVMFVTTANTLNILPPLLDRMEVIRIPGYTEDEKVNIANKYLLPKQVKENGVKEGELNLEDGTIKEIIRSYTRESGVRNLEREISKVTRKVVKKVVSGEVEKVQVNEKNITDFLGIKKFKFGEVEDKDKTGIVIGLAWTEVGGEILKIETVNMPGKGRMQITGKLGDVMQESVKAAKSYVRSKSLEYGIIPPFFEKKDFHIHVPEGATPK

SEQ ID NO: 169532 - protein, 254 aa, Unknown
  Bacterial polypetide isolated from the Sargasso Sea
VTTANSLNILPPLLDRMEVIRLSGYTEDEKVKISQKFLIPKQSENNGLKKEEWNIDEKVNRKIIRDYTRESGVRNLEREISKIARKLVKKIDNDEKINNPIKEKDMKDLLGVQKFNYGEIEEENRIGVVTGLAWTEVGGEILKIESAIMPGKGKMQITGKLGDVMQESVKAAKSYIRSKSLEYGIIPPIFDKKDFHIHVPEGATPKDGPSAGVGMVTSIISAITEIPVDKNVAMTGEITLRGIVLPIGGLKEKY

SEQ ID NO: 169533 - protein, 302 aa, Unknown
  Bacterial polypetide isolated from the Sargasso Sea
KDLSLAQQILDRDHHGLEKVKERIVEYLAVQQRTGKVKGPILCLVGPPGVGKTSLGKSIADSTGRNFVRMSLGGVRDEAEIRGHRRTYIGSLPGKIVHSMKKAKTSNPLFLLDEIDKLGNDYRGDPSSALLEVLDPEQNNTFQDHYLEVDYDLSDVMFVTTANTLRMPQPLLDRMEIIRLSGYTEDEKLEIANKHLIRKQQEQHGLKKGEWEVAESGLRDLIRYYTREAGVRNLEREIANLARKAVKEILTEGVPKIIVTAKNLEEYAGVRKYRFGEVEESDLVGVTTGLAWTEVGGEILSI

SEQ ID NO: 169534 - protein, 289 aa, Unknown
  Bacterial polypetide isolated from the Sargasso Sea
LDEDHFGLEKVKERIIEFLAVQKRMEKIKGPILCLVGPPGVGKTSLGKSIAKATNRQFIRMSLGGVRDEAEIRGHRRTYIGSLPGKIIQMMKKAGTKNPLFLLDEVDKIGNDYRGDPSSALLEALDPEQNTAFNDHYLEVDYDLSDVMFVTTANTLNILPPLLDRMEVIRIPGYTEDEKINIANKYLLPKQVKENGVKEGELNLEDGTIKEIIRSYTRESGVRNLEREISKVTRKVVKKVVSGEVEKVQVNDKNIPDFLGIKKFKFGEVEDKNKTGIVIGLAWTEVGGE

SEQ ID NO: 169535 - protein, 295 aa, Unknown
  Bacterial polypetide isolated from the Sargasso Sea
WKLPDGTLKVLVEGIQRAKVTKINFNKEFISASISEINQKSYKNPNIKALQKLITEQFAEFQKINKKVSLDVINNVKTINDPDKIVDIIVSNISISLDQKQEILEIIKTEDRLNKIYGYLVSEIDSFQVEKKIKGRVKRQMEKTQKEYYLNEQMKAIQKELGENEDLDEIAELERKLNNYNLSKEAKDKCSSEIKKLKNMSPMSAEATVIRNYLDWVMSIPWNNPDQISQNIKKASTILENDHYGLDKVKERILEYLAVQKRTNKLKGPILCLVGPPGVGKTSLGKSIANATGRS

SEQ ID NO: 169536 - protein, 321 aa, Unknown
  Bacterial polypetide isolated from the Sargasso Sea
KTSLGESIARATNRKFIRMSLGGVRDEAEIRGHRRTYIGSMPGKIIQKLTKVGVKNPLFLLDEVDKIGMDHRGDPASALLEVLDPEQNTSFSDHYLEVDYDLSEVMFVCTANSLNIPGPLLDRMEIIRIPGYIEDEKLQIAKNYLLPKQLERNGLEDKELNLNKNVLLDLVRYYTREAGVRGLERQISKILRKVVKERLLSKKKTATKIDSKNLEKYSGVRKFKFGEAESSNTIGQVCGLAWTEVGGELLTIEASKVSGKGKTIKTGSLGEVMQESIQAALTVVRSRSDSLGIKKDFYEKFDTHIHVPEGATPKDGPSAGV

SEQ ID NO: 169537 - protein, 334 aa, Unknown
  Bacterial polypetide isolated from the Sargasso Sea
DKSITALNEVMKGDKKIVLVTQKNSEVDDPNKNDVFLYGCESNILQLLKLPDGTVKVLVEGIKRVKIVDFKDDEKFISCTFEYQKDILSKDEDLLPLALTAVRRLEKLTSINKKVSTETINNIKQLKDASKIADNIASHLNATISEKQQIFETLDVKKRLNGVIKIMENETSIIGVEKRIRGRVKTQMEKTQREYYLNEQLKAIQKELGEIEDGKDETTNLKKSIQKAKMPKEVEKKCMAELKKLKNMSPMSAEATVVRNYLDWMIDIPWFKKDKVDIDLNKALKILDEDHFGLEKVKERIIEFLAVQKRMDKIKGPILCLVGPPGVGKTSLGK

SEQ ID NO: 169538 - protein, 310 aa, Unknown
  Bacterial polypetide isolated from the Sargasso Sea
KKIILVTQKNSEIDDPNKTDVFMYGCEGNILQLLKLPDGTVKVLVEGIKRVKILDFKDNEKFITCDYTYFNDVLSKDEDLFPLAATALRRLEKLTSINKKISNETINTIKQLKDPSQIADNIASHIAASISEKQQIFETNDVKKRLNAIIKIMENETSIIGVEKRIRGRVKTQMEKTQREYYLNEQLKAIQKELGEIEDGKDETTSINKAITKAKMPKDVEKKCLQELKKLKNMSPMSAEATVVRNYLDWMTELPWHKKSEVDIDLAKAQNTLDKDHFGLEKIKERIVEFLAVQKRMEKIKGPILCLVGP

SEQ ID NO: 169539 - protein, 343 aa, Unknown
  Bacterial polypetide isolated from the Sargasso Sea
PPGVGKTSLGESIARATNRKFVRMSLGGVRDEAEIRGHRRTYIGSLPGKIIQNMARTGTRNPLFMLDEVDKMSMDFRGDPSSALLEVLDPEQNHKFGDHYLEVDYDLSEVMFVATANTLNIPGPLLDRMEVIRISGYTEDEKINIATRYLVEKQKGNNGLKEGEISINRQALTDIVRYYTREAGVRGLDREIAKICRKVAKELLLDTSRTRVQVSSRNLGKYLGVQRHRFGRAEEGNRIGQVTGLAWTEVGGELLSIEAAVMPGKGKHSFTGKLGDVMQESIQAAMSVVRTRSAQYDIDADFFQNKDIHIHVPEGATPKDGPSAGIGMCTAVISAITGIPARS

SEQ ID NO: 169540 - protein, 286 aa, Unknown
  Bacterial polypetide isolated from the Sargasso Sea
QKRLDEDHYGLPKVKERVLEYLAVRSLKKKVTKEETVRGPILCFTGPPGVGKTSLGKSIAKSMGREFVRISLGGVRDEAEIRGHRRTYIGALPGRIIQSLKKAKTNNPVFMLDEIDKLGSDFRGDPSSAMLEVLDPEQNHAFSDHYLEVDFDLSKVMFIATANYPDNIPPALYDRMEMIDFRGYIDDEKVQIAKKHLIPKQVKENGLTSKQVKFNDTGIKEIISSYTRESGVRSLEREISNVLRKIAVDVVNKKLKTASISKKSVNEYLGIPKFQSDLAERTTKPG

SEQ ID NO: 169541 - protein, 260 aa, Unknown
  Bacterial polypetide isolated from the Sargasso Sea
LHRCISKICRKIIKSLTLGKTNSKMLKINPLNLNDFLGVRQHSYGSIDKKDMIGQVNGLAWTSTGGELLRIECALMSGKGKITQTGKLGDVMQESIKAAITVVRTRSASLGIDSDFYQNKDIHIHVPEGATPKDGPSAGISMALAVASSLSGIAVKSDVAMTGEITLRGQVLEIGGLKEKLLAALRGGIKEVIIPKDNEKDLVEIPDNVKRGLKIHPVKFVDEVFAIALKSKPAKSKNLSKKTSLQNKKTKSSSSKRLPH

SEQ ID NO: 169542 - protein, 309 aa, Unknown
  Bacterial polypetide isolated from the Sargasso Sea
TNREFVRMSVGGMRDEAEIRGHRRTYIGSLPGKIIQMMKKAGTKNPLILLDEIDKVGNDYRGDPSSALLEALDPEQNTTFNDHYLEVDYDLSDVMFVTTANTLNILPPLLDRMEVIRLAGYTEDEKISIANKYLLPKQIKDNGVKEHEMKLDDDIIKNVIRGYTKESGVRNLEREISKITRKVVKKVVSGEEKEVNINNKNLSDFLGVAKFKFGELESDNRIGIVTGLAWTEYGGEILKIETVTMPGKGRMQITGKLGDVMQESVKAAKSFVRSKCLEYGIIPPLFEKKDFHIHVPEGATPKDGPSAGV

SEQ ID NO: 169543 - protein, 256 aa, Unknown
  Bacterial polypetide isolated from the Sargasso Sea
DPEQNDKFNDHYLELDYDLSDAMFVCTANTLNIPPALLDRMEVIRIPGYTDKEKNIIAQKYLIPKQIKNHYLKKNEVRFSNNIINQIIRNYTREAGVRNLEKEISKVCRKTVKSLETSNKKFIHLNDDKLKDFLGISKFRSNEIEKKNLIGVTNGLAWTEVGGEILSIEVILSIGKGKLTITGKLGEVMKESVQAAISYVKSHSLNLGIHPFDFDKFDIHVHVPEGATPKDGPSAGIAIFNSLVSSLTSNKSKKRC

SEQ ID NO: 169544 - protein, 189 aa, Unknown
  Bacterial polypetide isolated from the Sargasso Sea
KTLNNDHYGLEKVKERIIEFLAVQKRMEKIKGPILCLVGPPGVGKTSLGKSIAKATNRQFVRMSLGGVRDEAEVRGHRRTYIGSLPGKIIQMMKKAGTKNPLFLLDEVDKIGNDYRGDPSSALLEALDPEQNTTFNDHYLEVDYDLSDVMFVTTANTLNILPPLLDRMEVIRIPGYTEDEKINIANKYL

SEQ ID NO: 169545 - protein, 40 aa, Unknown
  Bacterial polypetide isolated from the Sargasso Sea
DPSAALLEVLDPEQNDKFNDHYLEVDYDLSDVMFIQQQIL

SEQ ID NO: 169546 - protein, 322 aa, Unknown
  Bacterial polypetide isolated from the Sargasso Sea
TSRVEINKVENDNKLSCTYSDFSSNGPTNDNQSDALFRTLEDTFSNYVKLNKKVPPEVISSITGIDDLSKLADSIAAHMTLKLEEKQQVLELIDIKKRCEFLIKAMEGELDILHVEKKIRSRVKQQMEKSQREYYLNEQMKAIQKELGEIGDESNDLDQLLNKIKSLKLPSDANEKAMSEFNKLKMMSPMSAEATVVRNYLDILVNLPWNQSTEISTDMNNANNVLEQDHHGLEKVKERVLEYLAVTKRVNKIRGPILCLVGPPGVGKTSLAKSIARATSRKFIKMSLGGVRDEAEIRGHRKTYIGSMPGKIMQNLSKVKTN

SEQ ID NO: 169547 - protein, 285 aa, Unknown
  Bacterial polypetide isolated from the Sargasso Sea
NRKFIRISLGGIRDEAEIRGHRRTYIGSLPGKIIQMMKKAGTKNPLFLLDEIDKVGNDYRGDPSSALLEALDPEQNKEFNDHYLEVDYDLSDVMFVTTANTLNILPPLLDRMEVIRLSGYTEDEKVNISQKFLIPNQSKNNGLKSDEWNIDENINRKIIRHYTRESGVRNLEREISKIARKLVKKIDNNEKINNPINEKDLKDLLGVQKFNYGEIEEENRIGVVTGLAWTEVGGEILKIESAIMPGKGKMQITGKLGDVMQESVKAAKSFIRSRSLEYGIIPPNI

SEQ ID NO: 169548 - protein, 242 aa, Unknown
  Bacterial polypetide isolated from the Sargasso Sea
VELNEIEEAIKKAKMPEDAEKVALKELDRLTKIPTQSPEYTVARTYLDWLTDLPWSISSEDSIDVKESKNILDEDHYGLEKVKERIIEYLAVRALKMKNNPDSAIRGPILCFAGPPGVGKTSLGKSIAKSMGREFVRMSLGGVRDEAEIRGHRRTYIGALPGRIIQSLKKAGSNNPVFMLDEIDKLGMDFRGDPSSALLEVLDPEQNSAFADHYLEVDFDLRQGNVHSNSKLPRPYSTSFKG

SEQ ID NO: 169549 - protein, 286 aa, Unknown
  Bacterial polypetide isolated from the Sargasso Sea
IAKRHLVDKAVKNHGLRKGEFELTNGALTGIVRYYTREAGVRNLEREISKLARKSVTKIVKNEEKNIKVTMDNLGDFLGVKKFRFGLAEQDDQIGVVTGLAWTSVGGDLLHIEALKLPGKGRMKTTGKLGDVMKESIDAANSYVRSISAEVGIKPPKFDKTDIHVHVPEGATPKDGPSAGLAMVTSIVSVLTGIPVRKDLAMTGEVTLRGNALAIGGLKEKLLAALRGGIKTVLIPVENEKDLVDIPDNVKSSLDIIAVKNVSEVIKIALTKTPTPIEWDEAARRL

SEQ ID NO: 169550 - protein, 297 aa, Unknown
  Bacterial polypetide isolated from the Sargasso Sea
FVGRDKSITALNEVMKSDKKIILVTQKNSEIDDPKKNDVFAFGCESNILQLLKLPDGTVKVLVEGIKRVKILDFNDEEKFISCTYENQSEHISKDDNILPLALTAIRRLEKLTSVNKKLSTETINSIKQLKDPSKIADNIASHLNTTISEKQNLFETLDVKKRLNEIIKIIENEASIIGVEKRIRGRVKTQMEKTQREYYLNEQLKAIQKELGEIEDGKDETSNLNKAILKAKMPKEVQKKCMAELKKLKNMSPMSAEATVVRNYLDWMIDIPWNKKDDVNIDLNKATKILDEDHFG

SEQ ID NO: 169551 - protein, 305 aa, Unknown
  Bacterial polypetide isolated from the Sargasso Sea
SDKSIVLVTQKNSEVDDPDSKDLYQYGCLSKVLQLLKLPDGTVKVLVEGEKRAKILKYEENSNDYIKCEVEVVDDQNSSKDTEQLALGLVKKFERLQVLNKKEFIEGANNLKNLKDPSQILNNISSNLNIQIFEKQELLEIKDLKKKIEKIHSIIDKETSVLSVEKKIRGRVKNQMEKTQREYYLNEQLKAIQKELGEIDEGKDELTSLSKAINDAKMPKLAKEKCLSELKKLKTMSPMSAEATVVRNYLDWMTELPWSNKSKINTDLENAQKILDEDHYGLEKVKERIIEFLAVQKRIQKMKGP

SEQ ID NO: 169552 - protein, 301 aa, Unknown
  Bacterial polypetide isolated from the Sargasso Sea
KVKEANMPNEVRESAEKEVKKLKMMSPLSAEANVIRNYLEWLVAMPWDVTTEDNFDLKRAQKILDEDHYGLEKVKERIIEYLAVASLKKSLKGPILCLTGPPGVGKTSLAQSIAGALDRKFVRISLGGVRDEAEIRGHRRTYIGALPGKIIQSIRKAKSRNPVLLIDEIDKLYQSALSDPSAAMLEVLDPEQNNTFMDHYLEVEWDLSSVLFICTANTTQSISSPLLDRMEQIPLSGYTELEKQEIANRFLIPRQAKDHGLKENWIRFKKDALQEVIIGYTREAGVRNLEREIGKVCRKVG

SEQ ID NO: 169553 - protein, 262 aa, Unknown
  Bacterial polypetide isolated from the Sargasso Sea
QKNSEVDDPKRNDVFSYGCESNILQLLKLPDGTVKVLVEGIKRVKIIDFNYGDKFISCTYEQQKDILNKDDDLLPLALTAVKRLEKLTSVNKKVSSDTINNIKQLKDPSKIADNIVSNLNASISEKQQIFETLDVKKRLNAAIKMMESETSIIGVEKRIRGRVKTQMEKTQREYYLNEQLKAIQKELGEIEDGKDETSNLKKSIQKSKMPKEVEKKCMSELKKLKNMSPMSAEATVVRNYLDWMIDLPWFKKDNVDIDLNKG

SEQ ID NO: 169554 - protein, 261 aa, Unknown
  Bacterial polypetide isolated from the Sargasso Sea
LEYLAVQKRMNKLKGPILCLVGPPGVGKTSLGKSIANATGRSFVRMSLGGVRDEAEIRGHRKTYIGSMPGRFIQAMKKSKSSNPLILLDEIDKLGSDWRGDPSSALLEVLDPEQNNKFNDHYLELDYDLSDVMFVCTANTLNIPPALLDRMEIIRIPGYTEKEKNQIAQKYLVPKQLKNHGLKKSEININSKIINSVIRNYTREAGVRNLEKEISKICRKAVKLIETSRKNKVTLDQNKLHEFLGVIKFRSNEIEKKNLVG

SEQ ID NO: 169555 - protein, 161 aa, Unknown
  Bacterial polypetide isolated from the Sargasso Sea
KAAKSYIRSKSLDYGIIPPIFDKKDFHIHVPEGATPKDGPSAGVGMVTSIISAITEIPVNKDVAMTGEITLRGLVLPIGGLKEKLLAAHRAGIKKVLIPIENKKDLVEVPKTILDSIEVITVKNIEEVLKVALTKPFKRVDWVEVDQISKKEKAKKEISTH

SEQ ID NO: 169556 - protein, 328 aa, Unknown
  Bacterial polypetide isolated from the Sargasso Sea
MFLGYKKDKVDIDLNKALKTLDEDHFGLEKVKERIVEFLAVQKRMEKIKGPILCLVGPPGVGKTSLGKSIAKATNRQFVRMSLGGVRDEAEIRGHRRTYIGSLPGKIIQMMKKAGTKNPLILLDEIDKVGNDYRGDPSSALLEALDPEQNSTFSDHYLEVDYDLSDVMFVTTANTLNILPPLLDRMEIIRIPGYTEDEKINISNNFLLPKQVKENGIKEGEFELSDGTIKHIIRNYTRESGVRNLEREISKVARKVVKKVVNGEEKKVTVNTDNLSDFLGVKKFKYGELETSDKIGIVTGLAWTEFGGEIFEIETVHMPGKGKMQITR

SEQ ID NO: 169557 - protein, 290 aa, Unknown
  Bacterial polypetide isolated from the Sargasso Sea
KAEKVLNKDHFGLEDIKKRILEHMAVLKLKKNMKSPILCLVGPPGVGKTSLGKSIADALGRKYVRMSLGGLHDESEIRGHRKTYIGAMAGRLLQSIKKAGTSNPVIVLDEIDKLGQGIHGDPSSALLEVLDPEQNNNFYDNFLEIGYDLSKVMFIATANSLSTVQTPLLDRMEIIQLSGYTIEEKVEIAKRHLIKKQMEENGLTSDSFKLGNKEIAHVVEAHTRESGVRRLEKHIAKIARWVALQITMEKDYNQKISIDKIDEILGVPIPKNFSEMTDVPGVVTGLAWTS

SEQ ID NO: 169558 - protein, 296 aa, Unknown
  Bacterial polypetide isolated from the Sargasso Sea
LGGVRDEAEIRGHRRTYIGSLPGKIIHMMKKAGTKNPLILLDEIDKVGNDYRGDPSSALLEALDPEQNTTFNDHYLEVDYDLSDVMFVTTANTLNILPPLLDRMEVIRIPGYTEDEKINIAEKFLLEKQIKDNGVKDGEFEITDGTIKEIIRNYTRESGVRNLEREISKIIRKAVKKVVNNEEKKVSISDKNLSDFLGVKKFKYGELESKDRVGIVTGLAWTEFGGEILKIETVHMPGKGRMQITGKLGDVMQESVKAAKSFVRSKSLEYGIIPPIFEKKDFHIHVPEGATPKDGP

SEQ ID NO: 169559 - protein, 192 aa, Unknown
  Bacterial polypetide isolated from the Sargasso Sea
SHLSSGKGMINATGKLGDVMKESITAALGYIKSNSVEFGVNPKVFDKVDIHLHVPEGAIPKDGPSAGITIFTSLISSLTEIKIKRDIAMTGEITLKGRVLPIGGLKEKLLAAIRYGIKTVIIPKENEKDLAEIQKDFQNKLVIKKVEFAKEVLDLALDGKISKINKKLDWRHLVTESMKPKNQQNQEKTFVN

SEQ ID NO: 169560 - protein, 302 aa, Unknown
  Bacterial polypetide isolated from the Sargasso Sea
TTANTLNILPPLLDRMEVIRIPGYTEDEKINIANKYLLPKQIKENGVNKEELNLLDGTIKEIIRSYTRESGVRNLEREISKVARKVVKKVVSGEEKKVTVNDANIHDFLGVKKFKYGEVESEDKIGVVTGLAWTEFGGEILKIETVHMPGKGRMQITGKLGDVMQESVKAAKSFVRSKSLEYGIIPPIFEKKDFHIHVPEGATPKDGPSAGIAMVTSIVSSITNNPVHKHVAMTGEVTITGQVLPIGGLKEKLLAAHRAGIKQVIIPKENEKDLVDIPKKVREDIKITAVENVDEVLKIALK

SEQ ID NO: 169561 - protein, 259 aa, Unknown
  Bacterial polypetide isolated from the Sargasso Sea
AHKKCMSELKKLKNMSPMSAEATVVRNYLDWMIDIPWFKKDKVDINLDKALKILDEDHFGLEKVKERIIEFLAVQKRMDKIKGPILCLVGPPGVGKTSLGKSIARATNRQFVRMSLGGIRDEAEIRGHRRTYIGSLPGKIIQMMKKAGTKNPLILLDEIDKVGNDYRGDPSSALLETLDPEQNTTFNDHYLEVDYDLSDVLFVTTANTLNILPPLLDRMEVIRIPGYTEDEKINIANKYLLPKQIKENGVKEGELDLKD

SEQ ID NO: 169562 - protein, 290 aa, Unknown
  Bacterial polypetide isolated from the Sargasso Sea
RKFHGLEEKQLRFMKSAIEEITHGYTREAGVRNLEREIGKVCRKVVTRLVRTKEKKAPVVTPKLVHELLGVPKYERDQREDKSDVGVAMGLGVTPMGGEMLLIEVGLMPGSGKVVLTGKLGEVMQESAKAAFSYVRSNSDYLEIDPEIFAKTDLHVHLPEGATPKDGPSAGLPLIMAIISSFTKISVKHNVGMTGEITLRGHVTEIGSLKEKLIAAKRGLLDTVLIPAENQKDLVDVPDEIKKGLDINIVKNVKEALGIALVAHPKEIKDQQKDVSDISWTSDSGSQPAA

SEQ ID NO: 169563 - protein, 334 aa, Unknown
  Bacterial polypetide isolated from the Sargasso Sea
GASIARATGRKFVRMSLGGVRDEAEIRGHRRTYIGAMPGKIMQNLNKAGVRNPLFLLDEIDKMSMDFRGDPSSALLEVLDPEQNTTFNDHYMEVDFDLSDVMFICTANTLNIPPPLLDRMEVIRIEGYTEDEKMNIAERYLVNKQTEANGLKDSEIKITNSAILSIIRHYTREAGVRNLDREIAKIARKVVKSLIMKSKDQTVHVRPGSLEKYLGVKKFKYGIAEKDNQIGQVTGLAWTQVGGELLTIESTAIAGKGKLINTGQLGDVMKESIQAATTVVRSRAKALGIKEDFHQKKDMHIHVPEGATPKDGPSAGIGMCTALISSLTVYSCQS

SEQ ID NO: 169564 - protein, 265 aa, Unknown
  Bacterial polypetide isolated from the Sargasso Sea
NIMPVGPPGVGKTSLGMSIARSTNRKFIKMSLGGVRDEAEIRGHRKTYIGSMPGKVIQNLTKAKTKNPLFLLDEIDKMAMDFRGDPSSALLEVLDPEQNFAFNDHYLEVDFDLSDVMFIATANSMESIPAPLLDRMEIIRLPGYTEDEKVDIAKKYLLQKQFKQNGLKTKELTISIPSIRDIIRFYTREAGVRGLDRSISKICRKVIKSLTLGNNKSKSIKITPLNLSNYLGVKQFGFGSVDKKDMIGQVNGLAWTSTGGELLRI

SEQ ID NO: 169565 - protein, 249 aa, Unknown
  Bacterial polypetide isolated from the Sargasso Sea
MVKLHLGKSIAESTGRNFVRMSLGGVRDEAEVRGHRRTYIGSLPGKVIQGMKKAKTSNPLFLLDEIDKLGNDYRGDPSSALLEVLDPEQNSSFQDHYLEVDYDLSDVMFVTTANTLRMAQPLLDRMEIIRLSGYTEDEKVEIAKKHLIGKQRDQHGLLDTEWSITDDALRDLIRFYTREAGVRNLEREIANLARKSVKEILMTELKQLKITKKNLEKFSGVRKFRFGETEDSDLVGVTTGLAWTEVGGE

SEQ ID NO: 169566 - protein, 266 aa, Unknown
  Bacterial polypetide isolated from the Sargasso Sea
DYLSCDVEKIEESNRNKDSDTYALSLVKRFEKLLILNKRDLSESVESIKKLKDSSEIADNIASNLNLEIFQKQELLELSDVRKRLEKIYELIEKETSVVSVEKKIRGRVKNQMEKTQREYYLNEQLKAIQKELGEIDEGKDEVSNLTKSIAKAKMPKLVQEKCLSELKKLKSMSPMSAEATVVRNYLDWMTELPWSNKSKINSDLKNAQKILDEDHFGLEKVKERIIEFLAVQKRTEKMKGPILCLVGPPGVGKTSLGKSIARATG

SEQ ID NO: 169567 - protein, 291 aa, Unknown
  Bacterial polypetide isolated from the Sargasso Sea
FLAVQKRMDKIKGPILCLVGPPGVGKTSLGKSIAKATNREFVRMSVGGMRDEAEIRGHRRTYIGSLPGKIIQMMKKAGTKNPLVLLDEIDKIGNDYRGDPSSALLEALDPEQNTSFNDHYLEVDYDLSDVMFVTTANTLNILPPLLDRMEVIRLAGYTEDEKINIANKFLLPKQIKNNGVKENEMKLDTDIIQQVIRNYTKESGVRNLEREISKLARKVVKKVVSGEQKEVKITKENLNDFLGVAKHKFGELETDNKVGIVTGLAWTEYGGEILKIETVTMPGKGRMQITG

SEQ ID NO: 169568 - protein, 274 aa, Unknown
  Bacterial polypetide isolated from the Sargasso Sea
MKSTDIAFDKSSIAKIINDYTRESGVRNLERKIASVIRSVAKSVAMEEEYISKINAEQVREILGPEIFDKDNYEDNSVPGVVTGLAWTPSGGDILFIESSLSRGKGKLTLSGQLGDVMKESAIAALSYLRSHSEMLGIDHRVFDAYDLHVHVPAGAIPKDGPSAGITMLTSLASVFTQKKVKKKIAMTGEITLRGKVLPVGGIKEKILAARRAGIKEIIMCHRNQKDLEDIDQIYLKGLNIHFVEYVPEVLEIALTNQRASNPIEFILPEEKKD

SEQ ID NO: 169569 - protein, 237 aa, Unknown
  Bacterial polypetide isolated from the Sargasso Sea
YIDWLLDMPWGDKTEDRFDLDAAEKILNKGHYGLEKIKERIIEYLAVAQKVGSLKGPIICLVGPPGVGKTSLARSVADALGRKFARMSLGGVRDEAEIRGHRRTYVGAMPGKIIQSLRKVKSKNPLLLLDEVDKMTRGVMGDPSSALLEVLDPEQNHTFMDHYLEVEFDLSDVLFFCTANVAQDIPPALQDRMEVINLSGYTELEKVHILKRHLLPKQIEENGLNSSQLGFQNKSFD

SEQ ID NO: 169570 - protein, 228 aa, Unknown
  Bacterial polypetide isolated from the Sargasso Sea
EDEKVEIVKQHLAPQMLEKHGLKIGELILDDSAITGLIRYYTREAGVRSLERELANLARKTVKRIVAGDIGSLTINKDNLHEFAGVRKFKFGEIDNDDQVGIVTGLAWTEVGGDILPIESVIMPGKGRMTITGKLGDVMKESIQAAKSYVRSRCIEFGIKPTIFPIRDIHIHVPEGAIPKDGPSAGLGMVTSIVSVLTGIPVRKDIAMTGEVTLRGKALGIGGLKEKL

SEQ ID NO: 169571 - protein, 322 aa, Unknown
  Bacterial polypetide isolated from the Sargasso Sea
FLAVQKRMDKLKGPILCLVGPPGVGKTSLGKSIAKATNRQFVRMSLGGVRDEAEIRGHRRTYIGSLPGKIIQMMKKAGTKNPLILLDEIDKVGNDYRGDPSSALLEALDPEQNTTFNDHYLEVDYDLSDVMFVTTANTLNILQPLLDRMEVIRIPGYTEDEKINIANKYLLPKQIKENGVKANELDLEDGTIKEIIRSYTRESGVRNLEREISKVSRKVVKKVVNGEKEKVNVNKDNLSDFLGVKKFKYGEVEAQDRVGIVTGLAWTEFGGEILKIETVNMPGKGRMQITGKLGDVMQESVKAAKSFVRSKSLDYGIIPPIF

SEQ ID NO: 169572 - protein, 326 aa, Unknown
  Bacterial polypetide isolated from the Sargasso Sea
GIGRGKKRVRILDFKDNDKFITCDYTVFNDVISKDEDLFPLATTALRRLEKLTSINKKISNETINTIKELKDPSQIADNIASHISASISEKQQIFETNDVKKRLNAIIKIMENETSIIGVEKRIRGRVKTQMEKTQREYYLNEQLKAIQKELGEIEDGKDETSSISKAITKAKMPKDVEKKCLQELKKLKNMSPMSAEATVVRNYLDWMTDLPWHKKSEVDIDLSKAQNTLDKDHFGLEKIKERIVEFLAVQKRMEKIKGPILCLVGPPGVGKTSLGKSIAKATNREFVRMSVGGMRDEAEIRGHRRTYIGSLPGKIIQMMKKAGT

SEQ ID NO: 169573 - protein, 215 aa, Unknown
  Bacterial polypetide isolated from the Sargasso Sea
DQVGIVTGLAWTEVGGDILPIESVIMPGKGRMTITGKLGDVMKESIQAAKSYVRSRCIEFGIKPTIFPMRDIHIHVPEGAIPKDGPSAGLGMVTSIVSVLTGIPVRKDIAMTGEVTLRGKALGIGGLKEKLLAALRAGTKTVIIPKENEKDMADIPNNVKDGLELIFVDNVDEVLRIALTKPLLPIEWDEDDSPSSSSEISDEDAEQDSDNPITH

SEQ ID NO: 169574 - protein, 326 aa, Unknown
  Bacterial polypetide isolated from the Sargasso Sea
WYKKDDVNIELNKAVKTLDEDHFGLEKVKERIIEFLAVQKRMQKLKGPILCLVGPPGVGKTSLGKSIARATNRQFIRMSLGGVRDEAEIRGHRRTYIGSLPGKIIQMMKKAGTKNPLFLLDEIDKVGNDYRGDPSSALLEALDPEQNTTFNDHYLEVDYDLSDVMFVTTANTLNILPPLLDRMEVIRIPGYTEDEKINIANRYLLPKQIKDNGVKEGELLLSDGTIKEIIRNYTKESGVRNLEREISKVARKVVKKVISKEETKVNVNEDNLSNFLGVKKYKFGELESENKIGIVTGLAWTEYGGEILKIETVNMPGKGRMQITGK

SEQ ID NO: 169575 - protein, 314 aa, Unknown
  Bacterial polypetide isolated from the Sargasso Sea
IEDPKSKDLYSVETLSKILQLLKLPDGTLKVLVEGKKRVKINFLPIKKEFDYLTCKYTALTNLGLSKIDVTKINELHTVFEDYLNLNKKSNNEIINLITDIKDASKLCDTIISNLTLSINEKQEFLEINDVSSRIHKLISKLKVEVDTLEIDKKVRNRVKSQMEKTQREYYLNEQLKAIQKELGNDEDDKDEFQEIKEKITKTKLPKDALEKVNSEFKKLKNMSPMSAESGVVRSYIDWILSLPWKKVSKINYDLSLAKKILDEDHYGLKKVKERILEFLVVQKRSKSLKGPILCLVGPPGVGKTSLGKSIAKA

SEQ ID NO: 169576 - protein, 326 aa, Unknown
  Bacterial polypetide isolated from the Sargasso Sea
ENESKNLVSLIKANFEDYISVTKEFPPEIVSTVDSLDELSRLMDTITGHLPIETSKKQEILETVDLKERAEKVLTFIESQLDVVDVEKKVRDRVKRQMEKSQREYYLNEQIKAAQKELGEIGEEGDELDNLEKKIHEVGMTKEALKKAKSELAKFKHMAPSSAEASVVRTYLDCLVDVPWKKKSKVKTDVKASMEILEEDHYGLEEVKERIVEYLAVQKRVKSMKAPVLCLVGPPGVGKTSLGESIARATNRKFVRMSLGGVRDESEIRGHRRTYIGSMPGKIIQKLSKVGVKNPLFLLDEIDKIGMDHRGDPASALLEVLDPEQN

SEQ ID NO: 169577 - protein, 291 aa, Unknown
  Bacterial polypetide isolated from the Sargasso Sea
MSQDNKKPLLPLRDIVIFPSVVVPLFVGRKKSIRALEEVMKTDKSIVLVAQKNSEVDDPQEKDIFSYGCLSKILQLLKLPDGTVKVLVEGLSRAKIKEITDENKKFLSCSIDKINDEKETEENKLYALNLIKKFEKLSSLSKKDSMDFVKTLKSLKESSQIADNISSNLNISINDKQLLLEIGDLKKRLEKIYEILEKETSVISMEKRIRGRVKNQMEKTQREYYLNEQLKAIQKELGEIEEGKDEVSNLSKSITKAKMTKDAQNKCMSELRKLKAMSPMSAEATVVRNYL

SEQ ID NO: 169578 - protein, 300 aa, Unknown
  Bacterial polypetide isolated from the Sargasso Sea
EKKCMSELKKLKNMSPMSAEATVVRNYLDWMIDLPWFKKNNVDIDLNKGLKILDEDHFGLEKVKERIIEFLAVQKRMEKIKGPILCLVGPPGVGKTSLGKSIAKATNRQFIRMSLGGVRDEAEIRGHRRTYIGSLPGKIIQMMKKAGTKNPLFLLDEVDKIGNDYRGDPSSALLEALDPEQNTAFNDHYLEVDYDLSDVMFVTTANTLNILPPLLDRMEVIRIPGYTEDEKINIANKYLLPKQVKENGVKEGELNLEDGTIKEIIRSYTRESGVRNLEREISKVTRKVVKKVVSGEVKKF

SEQ ID NO: 169579 - protein, 319 aa, Unknown
  Bacterial polypetide isolated from the Sargasso Sea
LGESIARATNRKFVRMSLGGMRDEAEIRGHRRTYIGSMPGKILQKMSKASVVNPLFLLDEIDKMGMDVRGDPASALLEVLDPEQNNTFNDHYLEVDYDLSDVFFVCTSNSMNIPAPLLDRMEVIRLPGYTEDEKLNIAKKYLVPKQTKLNGLKPDELTISDAAITDIIRYYTKEAGVRGLEREIAKVARKVVTEKELGRKAQKISVSEKLLEKYNGVRKFSYGLAEEKNEVGIVTGLAWTQVGGELLNIEAVVVPGKGRHTKTGSLGDVMQESIQAAMTFVRSRASSLGLASNFHEKKDIHIHVSEGAPQRMALARVLG

SEQ ID NO: 169580 - protein, 303 aa, Unknown
  Bacterial polypetide isolated from the Sargasso Sea
DLYWVHSPGRIIQNIKKAGTNNPVFMLDEVDKLGSDFRGDPSSALLEVLDPEQNHSFNDHYLELDFDLSKVMFIATANNYGNIPPALRDRMEILEFSGYIQDEKVQIAKRHLIPKQIKENGLKKTEVTLDLNSIKELISAYTREAGVRQLERQIANVLRKVARDIVESKKKQIKVTKTKVHDLLGASRFHSELAERATEPGVVTGLAWTAAGGDILFIESTKMQGKGKLTLTGQLGDVMKESATAGLTFVRAHASTFGIDSNFNEETDIHVHVPAGAIPKDGPSAGVSMVTSLVSLMTNNPVK

SEQ ID NO: 169581 - protein, 307 aa, Unknown
  Bacterial polypetide isolated from the Sargasso Sea
KFVRISLGGIRDEAEIRGHRRTYIGSLPGKIIQMMKKAGTKNPLFLLDEIDKVGSDYRGDPSSALLEALDPEQNKQFNDHYLEVDYDLSDVMFVTTANTLNILPPLLDRMEIIRIPGYTENEKTNIAQKFLIPKQGKDNGLKNDEWKISETVIKKVIRDYTRESGVRNLEREISKIARKMVKKIDSKEKINHELSEKDVNSYLGVKKYNYGEIESENKIGVSTGLAWTEVGGEILKIESVNMPGKGKMQITGKLGEVMQESVKAAKSYVRSKSLEFGIIPPLFEKKDFHVHVPEGATPKDGPSAGIA

SEQ ID NO: 169582 - protein, 249 aa, Unknown
  Bacterial polypetide isolated from the Sargasso Sea
EVQKKCMAELKKLRSMSPMSAEATVVRNYLDWMIDLPWHKKDKVDIDLNKALKILDEDHFGLDKVKERIIEFLAVQKRMDKIKGPILCLVGPPGVGKTSLGKSIAKATNRQFVRISLGGIRDEAEVRGHRRTYIGSLPGKIIQMMKKAGTKNPLFLLDEIDKVGNDYRGDPSSALLEALDPEQNTTFNDHYLEVDYDLSDVMFVTTANTLNILPPLLDRMEVIRIPGYTEDEKVNIADKFLLPKAIKEN

SEQ ID NO: 169583 - protein, 169 aa, Unknown
  Bacterial polypetide isolated from the Sargasso Sea
MQESIHAAMTVVRSRATVLGIEDDYFHQRDFHVHVPEGATPKDGPSAGIGMCTAIVSAITNIPVLADVAMTGEITLRGEVLPIGGLKEKLLAALRGGVKNVIIPHENKRDLKEIPDNVKQGMSIHPVRWIDEVFELALVKQPSPLVKSRKRKPAAKKKSTAKAKRKRAN

SEQ ID NO: 169584 - protein, 313 aa, Unknown
  Bacterial polypetide isolated from the Sargasso Sea
EVFRLSGYTEDEKVNISQKYLIPNQSKNNGLKDHEWKITEDINRKIIRDYTRESGVRNLEREISKIARKLVKKIDNNEKVKNPINETDLKNLLGVQKFNYGEIEEENRIGVVTGLAWTEVGGEILKIESVIMPGKGKMQITGKLGDVMQESVKAAKSYIRSKSLEFGIIPPIFDKKDFHIHVPEGATPKDGPSAGVGMVTSIISAITEVPVNKDVAMTGEITLRGLVLPIGGLKEKLLAAHRAGIKKVIIPKENKKDLMEVPKTILESMEIISVKNVDEVLKVALTKPLKRVEWVEVDQISKNEKGKEELSTH

SEQ ID NO: 169585 - protein, 340 aa, Unknown
  Bacterial polypetide isolated from the Sargasso Sea
IIEFLAVQKRIQKMKGPILCLVGPPGVGKTSLGKSIAKATNRKFIRISLGGIRDEAEIRGHRRTYIGSLPGKIIQMMKKAGTKNPLFLLDEIDKVGNDYRGDPSSALLEALDPEQNKEFNDHYLEVDYDLSDVMFVTTANTLNILPPLLDRMEVIRLSGYTEDEKVNISQKFLIPKQSENNGLKKEEWNIDEKVNRKIIRDYTREAGVRNLEREISKIARKLVKKIDNKEKINNPLKETDVKDLLGVQKFNYGEIEEENRIGVVTGLAWTEVGGEILKIESAIMPGKGKMQITGKLGDVMPESVKAAKSYIRSKSLDYGIIPPVFDKKDFHIHVPERSTQ

SEQ ID NO: 169586 - protein, 163 aa, Unknown
  Bacterial polypetide isolated from the Sargasso Sea
SVKAAKSYITFKSLDYGIIPPIFDKKDFHIHVPEGATPKDGPSAGVGMVTSIISAITEIPVNKDVAMTGEITLRGLVLPIGGLKEKLLAAHRAGIKKVLIPVENKKDLIEVPKTILKSMEIIPVKNIDEVLKVALTKPFKRVEWVEVDQISKKGKVKEELSTH

SEQ ID NO: 169587 - protein, 281 aa, Unknown
  Bacterial polypetide isolated from the Sargasso Sea
TNNNLKALIKVVVENFEEYSKVNKKIPSEVITNLNSISDPNKISDIISINLTINMAQKQELLEMLNLEERLNKIHLYLVSEIDSFQMEKKIKGRVKRQMEKTQKEYYLNEQMKAIQKELGDNEDTDDIAEIEKKIDTVKLSKEAKEKCKSEIKKLKNMSPMSAEATVIRNYLDWVLSIPWNKSSAISKNIKKAKSILENDHYGLDKVKERILEYLAVQKRTDKIKGPILCLVGPPGVGKTSLGKSIATATGRNFVRMSLGGVRDEAEIRGHRKTYIGSMPG

SEQ ID NO: 169588 - protein, 314 aa, Unknown
  Bacterial polypetide isolated from the Sargasso Sea
LNKNTTFNDHYLEVDYDLSDVMFVQTANTLNILPPLLDRMEVIRLAGYTEDEKINIANKFLLPKQIKDNGVKEKEMKLGDDIIKEIIRSYTKESGVRNLEREISKVARKVVKKVVSGEEKEVNIDTKNLADFLGIPKFKSGELESEDRVGIVTGLAWTEYGGEILKIETVTMPGKGRMQITGKLGDVMQESVKAAKSFVRSKCLEYGIIPPLFEKKDFHIHVPEGATPKDGPSAGIGMVTSIVSSITNIPVRKDIAMTGEVTLTGQVLPIGGLKEKLLAAHRAGIKEALIPKENEKDLVDMPKKIIDEIKITPS

SEQ ID NO: 169589 - protein, 304 aa, Unknown
  Bacterial polypetide isolated from the Sargasso Sea
CRKTSLGKSIAKATNREFVRMSVGGMRDEAEIRGHRRTYIGSLPGKIIQMMKKAGTKNPLILLDEIDKIGNDYRGDPSSALLEALDPEQNTTFNDHYLEVDYDLSDVMFVTTANTLNILPPLLDRMEVIRLAGYTEDEKINIANKFLLPKQIKDNGVKENEMKLDDNIIKEIIRRYTRESGVRNLEREISKVARKVVKKVVSGEEKEVNVNNKNLSDFLGVPKHKFGELESDNKVGIVTGLAWTEYGGEILKIETVTMPGKGRMQITGKLGDVMQESVKAAKSFVRSKCLEYGIIPPLFEKKDF

SEQ ID NO: 169590 - protein, 247 aa, Unknown
  Bacterial polypetide isolated from the Sargasso Sea
KKNDIFNYGCESSILQLLKLPDGTVKVLVEGITRVKINDFHDNEQFLSCSYEKLIEIVDKNEDLMPLALNSIKKLEKLTSINKKISNETINNIKLLKDPSKISDNIASHLNATISEKQQVFETLELKKRLNLINKIMDNETSIIGVEKRIRGRVKTQMEKTQREYYLNEQLKAIQKELGEIEDGKDETSSLNKAILRSKMPKEVEKKCMSELKKLKNMSPMSAEATVVRNYLDWMIDLPWFKKDKVD

SEQ ID NO: 169591 - protein, 293 aa, Unknown
  Bacterial polypetide isolated from the Sargasso Sea
KQMSRNGVKDNEIKLNKEVILALIRYYTREAGVRGLERQIAKILRKVVKERLIAKKPNSKATSITARNLEKYSGVRKFKYGIAEKDNAVGQVTGLAWTEVGGELLTIEASNIDGKGRVIKTGSLGDVMQESIQAAMTVVRSRADSLGIKPNFYEKYDIHIHVPEGATPKDGPSAGGAMAISLISIFTGIPVRADTAMTGEITLRGQILKIGGLKEKLLAAKRGGIKNVIIPKENEPDLQEIPEQITKSLNIIPVEWIDDVISAALVEEPTPKTKKIKTEKSKTSTKTENKTAH

SEQ ID NO: 169592 - protein, 311 aa, Unknown
  Bacterial polypetide isolated from the Sargasso Sea
TVKVLVEGVRRVKILDFKDNDKFITCDYTVYNDLINNDEDLYPLAVTAVRRLEKLTSINKKISSETINSIKQLKDPSQIADNIASHISATISEKQQIFETADVKKRLNAIIKIMENETSIIGVEKRIRGRVKTQMEKTQREYYLNEQLKAIQKELGEIEDGKDESTSLNKAILKAKMPKEVEKKCLQELKKLKNMSPMSAEATVVRNYLDWMTELPWHKKSAVDIDLKKALEILDRDHFGLEKVKERIIEFLAVQKRMEKIKGPILCLVGPPGVGKTSLGKSIAKATNREFVRMSVGGMRDEAEIRGHRRT

SEQ ID NO: 169593 - protein, 232 aa, Unknown
  Bacterial polypetide isolated from the Sargasso Sea
MGSLPGKIIQMMKKAGTKNPLILLDEIDKVGNDYRGDPSSALLEALDPEQNTNFNDHYLEVDYDLSDVMFVTTANTLNILPPLLDRMEVIRIPGYTEDEKISIADKYLLPKQIKENGVKKEELELANGTIKEIIRSYTRESGVRNLEREISKVARKVVKKVVSGEEKKVNVNEKNISDFLGVKKFKYGEVEPEDRIGVVTGLAWTEVGGEILKIETIHMPGKGKMQITGKLG

SEQ ID NO: 169594 - protein, 323 aa, Unknown
  Bacterial polypetide isolated from the Sargasso Sea
RAKIRNFIPGEKFHQVEVDLVNEIVLDDPEIEALARSCLMQFESYTKINRKISTDTFNTVSEIDDYSKIADTIASNLQIKLSQKQQILEINNLKERFELILGFLEGEIDVLQTEKRIRGRVKRQMEKTQREYYLNEQMKAIQKELGKDSEDAGDDINELEDKLESLKLPKDVREKAKSEFKKLKQMSPMSAEATVVRNYLDWIVSIPWAKKSRFNKPITFSEDILDNDHYGLEKVKERIIEYIAVQKRTKKLKGPILCLVGPPGVGKTSLGKSIAQATGRDFVRVSLGGVRDEAEIRGHRRTYIGSLPGRIIQSMKKVKTKNP

SEQ ID NO: 169595 - protein, 306 aa, Unknown
  Bacterial polypetide isolated from the Sargasso Sea
TETIGNIKQLKDPSKIADNISSHLSTTILEKQQLFETFDVQKRLNSIIKIMENETSIIGVEKRIRGRVKTQMEKTQREYYLNEQLKAIQKELGEIEDGKDETSNLNKAILKAKMPKEVQKKCMAELKKLKNMSPMSAEATVVRNYLDWMVDIPWHKKNDVNIDLSKASKVLDEDHFGLEKVKERIVEFLAVQKRMQKIKGPILCLVGPPGVGKTSLGKSIARATNRPFVRMSLGGVRDEAEIRGHRRTYIGSLPGKIIQMMKKAGTKNPLFLLDEIDKVGNDYRGDPSSALLEALDSEQNTTFNDH

SEQ ID NO: 169596 - protein, 299 aa, Unknown
  Bacterial polypetide isolated from the Sargasso Sea
LAIQQRSKKIKGPILCLLGPPGVGKTSLGKSIASATGREFIRIALGGVHDESEIRGHRRTYIGSMPGKIIQSMKKAKTTNPLILLDEVDKMGRDFRGDPASAMLEVLDPEQNSTFTDHYLEVEYDLSNVMFITTANTYNMARPLLDRMEIISLAGYTEIEKRDIATEHLISKQMKAHGLKDAEFSINENGLLEIIRRYTREAGVRNLEREIAKLCRKSLTKIIKGEAKKVNVTLKNIDDFLGVKKFKFGLAEEENQIGVTTGLAWTETGGDLLSIESFALPGKGRMNLLVTGRKYEEVL

SEQ ID NO: 169597 - protein, 277 aa, Unknown
  Bacterial polypetide isolated from the Sargasso Sea
IEEKVNRKIIRDYTRESGVRNLEREISKIARKLVKKIDNNEKINNPLKEEDMKDLLGVQKFNYGEIEEENRIGVVTGLAWTEVGGEILKIESAVMPGKGKMQITGKLGDVMQESVKAAKSYIRSKSLEYGIIPPIFDKKDFHIHVPEGATPKDGPSAGIGMVTSIISAITEIPVDKKVAMTGEITLRGVILPIGGLKEKLLAAHRAGIKKVLIPMENKKDLIEVPKTILDTMEIIPVKNVDEVLKVALIKPLKRVEWVEVDPIAKKEKTKKEELSTH

SEQ ID NO: 169598 - protein, 286 aa, Unknown
  Bacterial polypetide isolated from the Sargasso Sea
ILESSDLKLRAEKVLTFIESQLDVVDVEKKVRDRVKKQMEKSQREYYLNEQIKAAQKELGEIGEEGDELENLEKKINEVGMTKEALKKAKSEFAKFKHMAPSSAEASVVRTYLDCLVDVPWKKKSKVKSDIKASMSILEEDHYGLEEVKERIVEYLAVQKRVKSMKAPVLCLVGPPGVGKTSLGESIARATNRKFVRMSLGGVRDESEIRGHRRTYIGSMPGKIIQKLSKVSVKNPLFLLDEIDKIGMDHRGDPASALLEVLDPEQNNTFSDHYLEVDYDLSEVMF

SEQ ID NO: 169599 - protein, 308 aa, Unknown
  Bacterial polypetide isolated from the Sargasso Sea
PWSEKTKINTDLNSAQKILDEDHYGLEKVKERIIEFLAVQKRIQKMKGPILCLVGPPGVGKTSLGKSIAKATNRKFIRISLGGIRDEAEIRGHRRTYIGSLPGKIIQMMKKAGSRNPLFLLDEIDKVGNDYRGDPSSALLEALDPEQNKEFNDHYLEVDYDLSDVMFVTTANTLNILPPLLDRMEVIRISGYTEDEKVNISQKYLIPKQSTNNGLKKDEWELSEEINRKIIRNYTRESGVRNLEREIAKIARKLVKKIDAKEKVNTSLNEKDLSNFLGVQKFKYGEIEEENRIGVVTGLAWTEVGGEI

SEQ ID NO: 169600 - protein, 290 aa, Unknown
  Bacterial polypetide isolated from the Sargasso Sea
KNSEVDDPGEKDIYSYGCLSKVLQLLKLPDGTVKVLVEGLARVKILEIEDDVKKYLSCKTQIIEADKENEEHKVFASNLIKKFEKLSSLNKKDVSDFTKGLKSLKNANQLADNICSNLNIQIFEKQALLEMNDLKKRLEKIYELIEKETSVISMEKRIRGRVKNQMEKTQREYYLNEQLKAIQKELGEIEDGKDEISNLTKAIAKAKMPKEAQNKCMAELKKLKGMSPMSAEATVVRNYLDWMIDLPWGNKSKIISDLNSAQKVLDQDHYGLAKVKERIIEYLAVQKRIE

SEQ ID NO: 169601 - protein, 263 aa, Unknown
  Bacterial polypetide isolated from the Sargasso Sea
TVKVLVEGTKRVKILDFKDNEKFITCDYTHYHDVLTKDEDLFPLAATALRRLEKLTSINKKISSETINTIKQLKDPSQIADNIASHITATISEKQQIFETVDVKKRLNAIIKIMENETSIIGVEKRIRGRVKTQMEKTQREYYLNEQLKAIQKELGEIEDGKDETTSLNKAITKAKMPKEVEKKCLQELKKLKNMSPMSAEATVVRNYLDWMTELPWHKKSEVDINLTKALNILDKDHFGLEKVKERIIKFLAVQKRMKKLKG

SEQ ID NO: 169602 - protein, 285 aa, Unknown
  Bacterial polypetide isolated from the Sargasso Sea
LRDEAEIRGHRKTYIGAMPGRVLQNLIKAKTSNPVFVLDEIDKVSNDFHGDPSSALLEVLDPEQNNAFNDNFVELDYDLSNVLFLATANSLATIQPALRDRMEIIEINGYTLEEKVQIANRHLIPKLIKDNGLKSDQIKISPAVIEKICDEYTRESGVRNLEKRLAKVVRFAAKSIAMEEEYDPKISVEKTVEILGPGHSKDKYQGNDVAGVVTGLAWTQVGGDILYVEVSLSKGKGKFTLTGNLGDVMKESATIALEYIKAHATEFGIKEDVFENWNVHIHVPE

SEQ ID NO: 169603 - protein, 279 aa, Unknown
  Bacterial polypetide isolated from the Sargasso Sea
YYLNEQMKAIQKELGESDETPNELEEIVEKLESSGMSKEAREKTEAEIRKLKMMAPMSAEATVVRSYIDWMLGVPWKKRSRARNSISDAEDVLNTDHYGLEEVKERILEYLAVQRRIKKIKGPVLCLVGPPGVGKTSLGESIARATNRKFVRMALGGVRDEAEIRGHRRTYIGSMPGKVIQKISKAGVKNPLFMLDEIDKMGQDYRGDPASALLEVLDPEQNNTFNDHYMEVDYDLSDVMFICTSNSMNIPPALLDRMEIIRIPGYTEHEKLNIARRYL

SEQ ID NO: 169604 - protein, 281 aa, Unknown
  Bacterial polypetide isolated from the Sargasso Sea
MEVIRLAGYTEDEKINIANKYLLPKQIKDNGVKENEMKIGNEIIKEIIRSYTKESGVRNLEREISKVARKVVKKVVSGEEKEVNIENKNLPDFLGIPKYKFGELETENRVGIVTGLAWTEYGGEILKVETVTMPGKGRMQITGKLGDVMQESVKAAKSFVRSKCLEYGIIPPLFEKKDFHIHVPEGATPKDGPSAGIAMVTSIVSSITTIPVRKDVAMTGEVTLTGQVLPIGGLKEKLLAAHRAGIKEVLIPKENEKDLVDMPKKILDELKITPVEYADEV

SEQ ID NO: 169605 - protein, 151 aa, Unknown
  Bacterial polypetide isolated from the Sargasso Sea
MKESAVIALEYIKSNYQDLGINKEIDYSKYNIHIHVPEGATPKDGPSAGITILTSLVSLFTQKRVKKNIAMTGEITLRGKVLPVGGIKEKILAAKRANIKEIILSSYNKKDIEEIDQKYLKGLNFIYVDNMSDVISHSLTNRKVLNPKNIN

SEQ ID NO: 169606 - protein, 240 aa, Unknown
  Bacterial polypetide isolated from the Sargasso Sea
KKRLNSVIKIMENETSIIGVEKRIRGRVKTQMEKTQREYYLNEQLKAIQKELGEIEDGKDETSNLNKSILKAKMPKEVQKKCMSELKKLKNMSPMSAEATVVRNYLDWMIDIPWFKKDKVDIDLNKALKQLDEDHYGLEKVKERIIEFLAVQKRMDKLKGPILCLVGPPGVGKTSLGKSIAKATNRQFVRMSLGGVRDEAEIRGHRRTYIGSLPGKIIQMMKKAGTKNPLILLDEIDKVG

SEQ ID NO: 169607 - protein, 296 aa, Unknown
  Bacterial polypetide isolated from the Sargasso Sea
KKLISFNCNVETIEENNKNKDSEIYAQNLIKKFEKLVGINKKDFTDSVDNIRKLKDPSSIADNIASNLNLQIFEKQELLELSDLRRRLEKIYNYIDKETSLISVERKIRGRVKNQMEKTQREYYLNEQLKAIQKELGEIDEGKDEITNLSKAIAKAKMPKLVQEKCLSELKKLKSMSPMSAEATVVRNYLDWMTELPWSHKSKINTDLKNAQKILDEDHYGLEKVKERIIEFLAVQKRIQKMKGPILCLVGPPGVGKTSLGQSIAKATGRKFVRISLGGIRDEAEIRGHRRTYIGS

SEQ ID NO: 169608 - protein, 276 aa, Unknown
  Bacterial polypetide isolated from the Sargasso Sea
MTHYQVEKKIKGRVKRQMEKTQKEYYLNEQMKAIQKELGDSDDVDDISELEKKIEDLKLTEEAKEKCKSELKKLKTMSPMSAEATVIRNYLDWVLSIPWNNPTSISKNIKKAKSILEEDHYGLDKVKERILEYLAVQKRITKLKGPILCLVGPPGVGKTSLGKSIASATSRNFVRMSLGGVRDEAEIRGHRKTYIGSMPGRFIQSMKKSKSSNPLILLDEIDKLGSDWRGDPSSALLEVLDPEQNHKFNDHYLELDYDLSDVMFVCTANTLNIPPA

SEQ ID NO: 169609 - protein, 296 aa, Unknown
  Bacterial polypetide isolated from the Sargasso Sea
LEALDPEQNTTFNDHYLEVDYDLSDVMFVTTANTLNILPPLLDRMEVIRLAGYTEDEKISIANKYLLPKQIKDNGVKEKEMKLDDDIIKEVIRGYTKESGVRNLEREISKLARKVVKKIVAGEEKEVGINNKNLSDFLGVPKFKFGELETENRVGIVTGLAWTEYGGEILKIETVTMPGKGRMQITGKLGDVMQESVKAAKSFVRSKCLEYGIIPPVFEKKDFHIHVPEGATPKDGPSAGIGMVTSIVSSITNIPIKRDVAMTGEVTLTGQVLPIGGLKEKLLAAHRAGIKEVLIP

SEQ ID NO: 169610 - protein, 304 aa, Unknown
  Bacterial polypetide isolated from the Sargasso Sea
SEDGKSEFDEIEEKINDGKLTKEAKEKALSELKKLKNMSPMSAEATVSRSYIDWLVSIPWTKTNKVKTNIAKAREILDNDHYGLEKVKDRIIEFLAVQKRTKEIKGPILCLVGPPGVGKTSLGKSIAKATGREYIRMALGGVRDEAEIRGHRRTYIGSLPGKIVHGMKKASAINPLFLLDEIDKLGNDYRGDPSSALLEVLDPEQNKCFQDHYLEIDYDLSKVLFITTSNTLNMPQALLDRMEIIRLSGYTEDEKLEIAKRHLIKKQMDNCKLKESEFSINEEAIKIIIQSYTREAGVRTLERQ

SEQ ID NO: 169611 - protein, 272 aa, Unknown
  Bacterial polypetide isolated from the Sargasso Sea
ELTIKEEAIKEIIRKYTRESGVRGLERELSKLSRKSVKEIVSKIKLNISVDDKNIDQYLGVKKFKYGEIENEDKVGVVTGLAWTEVGGELLSIESLVMPGKGKLEHTGKLGDVMKESIKAAKSFVRSRCLDYGIIPPTFEKKDIHIHVPEGATPKDGPSAGIAMVTSIVSALAGVPVKKDVAMTGEVTLRGRVLPIGGLKEKLLAALRGGIKTAIIPSENEKDLKELPKNILDGLKIIPVKDVEEVLKIALVKELNPIEWIEVDKLQSKTAS

SEQ ID NO: 169612 - protein, 247 aa, Unknown
  Bacterial polypetide isolated from the Sargasso Sea
MEKIKGPILCLVGPPGVGKTSLGKSIAKATNREFLRMSVGGMRDEAEIRGHRRTYIGSLPGKIIQMMKKAGTKNPLILLDEIDKIGNDYRGDPSSALLEALDPEQNTTFNDHYLEVDYDLSDVMFVTTANTLNILPPLLDRMEVIRLAGYTEDEKISIADKYLLPKQIKDNGIKEKELKLDDDIIKEVIRGYTKESGVRNLEREISKIARKVVKKIVAGEEKEVSVNNKNLQDFLGVAKFNFGELEA

SEQ ID NO: 169613 - protein, 303 aa, Unknown
  Bacterial polypetide isolated from the Sargasso Sea
FDKLNKISKKFNEENNINLKNLTDPKIISNKIAANLKIDLNDKQKILEILDIQKKLETILSFLENEIDVLSVEKKIRGRVKNQMEKTQREYYLNEQLKAIQKELGDIEDGKDEVKQLEEAIKKCKMTKEAEEKSLSELKKLKTMSPMSAESTVVRNYLDWMTGLPWQKMSEVNTDIRRAEDILNKDHYGLEKVKDRILEFLAVQSRIKKIKGPILCLVGPPGVGKTSLGKSIARSTGREFVRMSLGGVRDEAEIRGHRRTYIGSLPGKIVQLMKKAGTKNPLILLDEIDKIGMDYRGDPSSAL

SEQ ID NO: 169614 - protein, 302 aa, Unknown
  Bacterial polypetide isolated from the Sargasso Sea
MDIKVTLPLLPLRDIVVFPSMVIPLFVGRDKSITALNEVMKGDKKIVLVTQKNSEVDDPKKNDVFTYGCESNILQLLKLPDGTVKVLVEGTKRVKIVDFKDDENFIKCSFEYQKDIISKDDDLLPLSLTAIKRLEKLTSVNKKISSETINNIKQLKDPSKIADNIISHINASISEKQQIFETLDVKKRLNSVVKIMENEASIIGVEKRIRGRVKTQMEKTQREYYLNEQLKAIQKELGEIEDGKDETTSLKKSILKAKMPKEVEKKCMSELKKLKNMSPMSAEATVVRNYLDWMIDLPWLKK

SEQ ID NO: 169615 - protein, 216 aa, Unknown
  Bacterial polypetide isolated from the Sargasso Sea
KILDEDHYGLEKVKERIIEFLAVQKRIEKLKGPILCLVGPPGVGKTSLGKSIARATGRKFVRISLGGIRDEAEIRGHRRTYIGSLPGKIIQMMKKAGTKNPLFLLDEVDKVGSDYRGDPSSALLEALDPEQNKQFNDHYLEVDYDLSDVMFVTTANTLNILPPLLDRMEIIRIPGYTESEKINISQKFLIPKQSKDNGLKDGEWKISEKVNKQIIR

SEQ ID NO: 169616 - protein, 334 aa, Unknown
  Bacterial polypetide isolated from the Sargasso Sea
EIGEEGDELETLRRKINEVGMTRKALKKAKSEFAKFKHMAPSSAEASVVRTYLDCLVDVPWKKKSKVKSDIKASMSILEEDHYGLEEVKERIVEYLAVQKRVKAMKAPVLCLVGPPGVGKTSLGESIARATNRKFVRMSLGGVRDESEIRGHRRTYIGSMPGKIIQKLSKVGVKNPLFLLDEIDKIGMDHRGDPASALLEVLDPEQNNTFSDHYLEVDYDLSEVMFVCTANSLNIPTPLLDRMEIIRIPGYIEDEKINIAEKYLLPKQMKRNGLKETELKLNKNVLLSLIRYYTREAGVRGLERQIAKILRKVVKERLVNNYDDNKSTSISPKN

SEQ ID NO: 169617 - protein, 293 aa, Unknown
  Bacterial polypetide isolated from the Sargasso Sea
LVSFLENQLDLTQMEKKIRDRVKKQMEKSQKDYYLTEQMKALKKEMGEDEDQDEIETITKNIEKSGMPKDAKDKVNSELNKFKMMPPMSAEASVVRGYIDWMTSIPWKKKSKIQTEITKASEVLDSDHYGLEEVKERILEYLAVQQRVSKIKGPVLCLVGPPGVGKTSLGESIAKSTGRKFVRMSLGGVRDESEIRGHRRTYIGSMPGKILQKLSKVGVKNPLFLLDEIDKMGMDFRGDPAAALLEVLDPEQNHTFNDHYLEVDYDLSDVMFVCTANSMDIPPALLDRMEIIR

SEQ ID NO: 169618 - protein, 277 aa, Unknown
  Bacterial polypetide isolated from the Sargasso Sea
LLEALDPEQNTTFNDHYLEVDYDLSDVMFVTTANTLNILPPLLDRMEVIRLAGYTEDEKISIANKYLLPKQIKDNGVKEKEMKLDDNIIKEVIRGYTKESGVRNLEREISKLARKVVKKIVAGEEKEVGINNKNLSDFLGVPKFKFGELEAENRVGIVTGLAWTEYGGEILKIETVTMPGKGRMQITGKLGDVMQESVKAAKSFVRSKCLEYGIIPPIFEKKDFHIHVPEGATPKDGPSAGIGMVTSIVSSITNIPVRRDVAMTGEVTLTGQVLPIG

SEQ ID NO: 169619 - protein, 206 aa, Unknown
  Bacterial polypetide isolated from the Sargasso Sea
TSLGKSIAKATNREFVRMSVGGMRDEAEIRGHRRTYIGSLPGKIIQMMKKAGTKNPLILLDEIDKIGNDYRGDPSSALLEALDPEQNTTFNDHYLEVDYDLSDVMFVTTANTLNILPPLLDRMEVIRLAGYTEDEKISIANKYLLPKQIKDNGVKEKEMKLDDDIIKEIIRAYTKESGVRNLEREISKLARKVVKKIVAGEEKEVG

SEQ ID NO: 169620 - protein, 202 aa, Unknown
  Bacterial polypetide isolated from the Sargasso Sea
KKFFRDKYENNTVAGVVTGLAWTSVGGEILFIESSISEGKGNLSITGNLGKIMKESAIIALEYIKSNQNELGIEKELDYSKYNIHIHVPEGATPKDGPSAGITILTSLVSLFTQKRVKKSIAMTGEITLRGKVLPVGGIKEKILAAKRANIKEIILSSYNKKDIQEINPKYLKGLKFIYVDSMKDVISNAIINRKVINPKLI

SEQ ID NO: 169621 - protein, 285 aa, Unknown
  Bacterial polypetide isolated from the Sargasso Sea
AEATVVRNYFDWMLGIPWKKRSRVKTDIEFAEKVLDADHYGLDKVKERILEYLAVQHRVKKMKGPILCLVGAPGVGKTSLGRSIARATGRQFVRISLGGVRDEAEIRGHRRTYIGSMPGKIIQSMKKAKFSNPIFMLDEVDKLGSDFRGDPASALLEVLDPEQNSTFNDHYLEVDYDLSDVMFIATANTLKIPAPLLDRMEVIRLSGYTEDEKLEIAKKHLLCKQMDSHGLKSNEWSITDDALRNLIRLYTREAGVRGLEREIANLARKSTRQLVQEKRKDIKVT

SEQ ID NO: 169622 - protein, 294 aa, Unknown
  Bacterial polypetide isolated from the Sargasso Sea
LKDPSQIADNIASHISASISEKQQIFETNDVKKRLNAIIKIMENETSIIGVEKRIRGRVKTQMEKTQREYYLNEQLKAIQKELGEIEDGKDETSSLNKAISKAKMPKEVEKKCLQELKKLKNMSPMSAEATVVRNYLDWMTELPWHKKSEVDIDLAKAQNTLDKDHFGLEKIKERIVEFLAVQKRMEKIKGPILCLVGPPGVGKTSLGKSIAKATNREFVRMSVGGMRDEAEIRGHRRTYIGSLPGKIIQMMKKAGTKNPLILLDEIDKIGNDYRGDPSSALLEALDPEQNTTF

SEQ ID NO: 169623 - protein, 267 aa, Unknown
  Bacterial polypetide isolated from the Sargasso Sea
VLVEGIKRVKILDFKDNEKFITCDYTYFNDFLSKDEDLFPLAATALRRLEKLTSINKKISNETINTIKQLKDPSQIADNIASHIAASISEKQQIFETNDVKKRLNAIIKIMENETSIIGVEKRIRGRVKTQMEKTQREYYLNEQLKAIQKELGEIEDGKDETTSINKAITKAKMPKDVEKKCLQELKKLKNMSPMSAEATVVRNYLDWMTELPWYKKSEVDIDLAKAQNTLDKDHFGLEKIKERIVEFLAVQKRMEKIKGPILCLVG

SEQ ID NO: 169624 - protein, 310 aa, Unknown
  Bacterial polypetide isolated from the Sargasso Sea
TSVNKKISSETINNIKQLKEPSKIVDNIVSNLNASISEKQQIFETLDVKKRLNAVIKMMESETSIIGVEKRIRGRVKTQMEKTQREYYLNEQLKAIQKELGEIEDGKDETTNLKKSIQKAKMPKEVEKKCMSELKKLKNMSPMSAEATVVRNYLDWMIDLPWFKKNDVDIDLNKGLKILDEDHFGLEKVKERIIEFLAVQKRMDKIKGPILCLVGPPGVGKTSLGKSIAKATNRQFIRMSLGGVRDEAEIRGHRRTYIGSLPGKIIQMMKKAGTKNPLFLLDEVDKIGNDYRGDPSSALLEALDPEQIQH

SEQ ID NO: 169625 - protein, 272 aa, Unknown
  Bacterial polypetide isolated from the Sargasso Sea
LKSEMEVLKIEKRVHGRVRKQMERSQKEFYLNEQMKAIQKELGKRDEFKSDFDELKQKIKKAKMPKEVSDKAKKELKRLELMQPMSAEATVARTYIEWLTDIPWEKAAGTEKIKIPEAQKVLDADHYGLEKVKERITEHLAVLKLVKKIKGPIICLVGPPGVGKTSLGKSIGKAMGRKFVRISLGGIRDEAEIRGHRRTYIGALPGKIIQGMKKAEVHNPVFMLDEVDKMNADFRGDPSSALLEVLDPEQNSNFNDHYLEIDYDLSNVLFIC

SEQ ID NO: 169626 - protein, 260 aa, Unknown
  Bacterial polypetide isolated from the Sargasso Sea
NSEVDDPKKTDIFMYGCESSILQLLKLPDGTVKVLVEGLKRVKIVDFKDDEKFITCTYELNNDVLPQDEDLMPLAMIAIRRLEKLTSINKKISSETISNIKDLKDPAKISDNIASHLNCTISEKQQLFETTDVKKRLNGVIKIMENETSIIGVEKRIRGRVKTQMEKTQREYYLNEQLKAIQKELGEIEDGKDETSNLNKAIQKAKMPKEVQKKCLSELKKLKNMSPMSAEATVVRNYLDWMIDIPWYKKDKVDIDLNKA

SEQ ID NO: 169627 - protein, 288 aa, Unknown
  Bacterial polypetide isolated from the Sargasso Sea
QREYYLNEQLKAIQKELGEIEDGKDETTSLKKSILKAKMPKEVEKKCMSELKKLKNMSPMSAEATVVRNYLDWMIDLPWFKKDKVDIDLNKALKILEEDHFGLEKVKERIIEFLAVQKRMDKIKGPILCLVGPPGVGKTSLGKSIAKATNRQFVRMSLGGVRDEAEVRGHRRTYIGSLPGKIIQMMKKAGTKNPLFLLDEIDKVGNDYRGDPSSALLEALDPEQNTTFNDHYLEVDYDLSDVMFVTTANTLNILPPLLDRMEVIRIPGYTEDEKINIANKYLLPKQIK

SEQ ID NO: 169628 - protein, 133 aa, Unknown
  Bacterial polypetide isolated from the Sargasso Sea
MFRGIKKINVDINLNKALKTLDEDHFGLEKVKERIVEFLAVQKRMEKIKGPILCLVGPPGVGKTSLGKSIARSTNRQFVRMSLGGVRDEAEIRGHRRTYIGSLPGKIIQMMKKAGTKNPLILLDEIDKVGNDY

SEQ ID NO: 169629 - protein, 315 aa, Unknown
  Bacterial polypetide isolated from the Sargasso Sea
QSPEYNVSRTYIEWLSDLPWSSSSKDRIDLKEAKKILDEDHFGLDKVKERIIEYLAVRNLKQKKKPNGSVRGPILCFGGPPGVGKTSLGRSIARSMGREFVRLSLGGVRDEAEIRGHRRTYIGALPGRIIQSIKKAGKNNPVFMLDEIDKLGSDFRGDPSSALLEVLDPEQNHSFSDHYLEVDFDLSNVMFIATANYQDAIPPALRDRMEVLDFSGYIEDEKVQIAKRHIVPKQVEENGLTKSDVAFDDGSLKELIRSYTREAGVRNLEREIANVLRKVARGVVENKVKKTKVTKTKVSDYLGAARFHSELAERV

SEQ ID NO: 169630 - protein, 253 aa, Unknown
  Bacterial polypetide isolated from the Sargasso Sea
LEREISKIARKVVKKVVSGEEKEVVIESKNLPNFLGVPKFKFGELESDNRVGVATGLAWTEYGGEILKIETVTMSGKGRMQITGKLGDVMQESVKAAKSFVKSKCLEYGIIPPVFEKKDFHIHVPEGATPKDGPSAGIGMVTSIVSSITNIPIRKDVAMTGEVTLTGQVLAIGGLKEKLLAAHRAGIKKVLIPKENEKDLVDIPKKIKDEIEIISVEYADEVLKIALTKELKKTEWVEVDISKKDDKSQASIQ

SEQ ID NO: 169631 - protein, 149 aa, Unknown
  Bacterial polypetide isolated from the Sargasso Sea
SKSVSLGINPKDLKSYDIHIHVPEGATPKDGPSAGIAIFNSLVSSLTNNKIRRDVAMTGEITLRGRVLPIGGLKEKIYAASRAGIKKVLIPQENFREVSEFDKEVIRGIKIIPVSDAFAILEHTLTKSVIPLNLTESQLKNNQNTTSTH

SEQ ID NO: 169632 - protein, 310 aa, Unknown
  Bacterial polypetide isolated from the Sargasso Sea
MDKIKGPILCLVGPPGVGKTSLGKSIAKATNREFVRMSVGGMRDEAEIRGHRRTYIGSLPGKIIQMMKKAGTKNPLILLDEIDKVGNDYRGDPSSALLEALDPEQNTTFNDHYLEVDYDLSDVMFVTTANTLNILPPLLDRMEVIRLAGYTEDEKINIANKYLLPKQIKDNGVKEKEMNLGNDIIKEVIRSYTKESGVRNLEREISKIARKVVKKVVSGEEKEVNINIKNLPDFLGVPKFKSGELESENRVGIVTGLAWTEYGGEILKIETVTMPGKGRMQITGKLGDVMPESVKAAKSFVRIKCLEYGI

SEQ ID NO: 169633 - protein, 291 aa, Unknown
  Bacterial polypetide isolated from the Sargasso Sea
YSLSKEAKDKCKSEIKKLKSMSPMSAEATVIRNYLDWVLSIPWNQPNQISKNIKKASDILENDHYGLIKVKERILEYLAVQKRMDKIKGPILCLVGPPGVGKTSLGKSIANATGRSFVRMSLGGVRDEAEIRGHRKTYIGSMPGRFIQSMKKSKTSNPLILLDEIDKLGSDWRGDPSSALLEVLDPEQNGKFNDHYLELDYDLSDVMFVCTANTLNIPPALLDRMEIIRIPGYTDKEKNQIAQKYLVPKQLTNHGLKKTELRFNSKILNQIIRNFTREAGVRNLEKEISKV

SEQ ID NO: 169634 - protein, 280 aa, Unknown
  Bacterial polypetide isolated from the Sargasso Sea
YLNEQLKAIQKELGEIEDGKDESTNLKKSILKAKMPKEVEKKCLSELKKLKNMSPMSAEATVVRNYLDWMIDLPWFKKDKVDIDLSNAIKTLDEDHFGLEKVKERIVEFLAVQKRMEKIKGPILCLIGPPGVGKTSLGKSIAKATNRQFVRMSLGGVRDEAEIRGHRRTYIGSLPGKIIQMMKKAGTKNPLILLDEIDKVGNDYRGDPSSALLEALDPEQNTSFNDHYLEVDYDLSDVMFVTTANTLNILPPLLDRMEVIRIPGYTEDEKINIANKYLLP

SEQ ID NO: 169635 - protein, 302 aa, Unknown
  Bacterial polypetide isolated from the Sargasso Sea
TTANTLRMPPALLDRMEIIRIAGYTEDEKVEIVKQHLAPQMLEKHGLKSGELILDDSAITGLIRYYTREAGVRSLERELANLARKTVKKIVAGDIGSLTINEDNLHEFAGVRKFKFGEIDNDDQVGIVTGLAWTEVGGDILPIESVIMPGKGRMTITGKLGDVMKESIQAAKSYVRSRCIEFGIKPTIFPIRDIHIHVPEGAIPKDGPSAGLGMVTSIVSVLTGIPVRKDIAMTGEVTLRGKALGIGGLKEKLLAALRAGTKTVIIPKENEKDMADIPDNVKDGLELIFVDNVDEVLKIALI

SEQ ID NO: 169636 - protein, 272 aa, Unknown
  Bacterial polypetide isolated from the Sargasso Sea
DGTVKVLVEGIKRVKIVDFKDEQEFISCSFEFNNDVLSSQDDLLALGLTAIRRLEKLTSVNKKLSSETITNIKNLKDASKIADNIASHLNCTISEKQQLFETLDVKKRLNSVIKIMENETSIIGVEKRIRGRVKTQMEKTQREYYLNEQLKAIQKELGEIEDGKDETSNLNKSILKAKMPKEVQKKCMSELKKLKNMSPMSAEATVVRNYLDWMIDIPWSKKDKVDIDLNKALQQLDEDHYGLEKVKERIVEFLAVQKRMDKLKGPILCLVG

SEQ ID NO: 169637 - protein, 275 aa, Unknown
  Bacterial polypetide isolated from the Sargasso Sea
ILDQDHYGLEKVKERILEYLAVQKRVGKIKGAILCLVGPPGVGKTSLGKSIARATGRKFVRVSLGGIRDEAEIRGHRRTYIGSLPGKIIQQMKKAGAKNPLFLLDEIDKVGSDYRGDPSSALLEALDPEQNVTFNDHYLEVDYDLSDVMFVTTANTLNILPPLLDRLEVIRIPGYTEDEKVNIANNYLIPKQVKDNGLKDNELTLNNDVLKDVIRSYTKEAGVRNLEREISKLARKTVKRILTKEQNGQKISPENLHNYLGVKKFKYGEIESENR

SEQ ID NO: 169638 - protein, 149 aa, Unknown
  Bacterial polypetide isolated from the Sargasso Sea
MKESATISLEYIKSNAKLLNIKESIFDDYNFHLHVPEGATPKDGPSAGVTMITSLVSLLSQRKVKSKLAMTGEITLRGKVLPVGGIKEKILAAKRAKINSIILPADNKKNVDEIDKKYLKGLNFFYVENILEVLEYALLRKKVSNFKKL

SEQ ID NO: 169639 - protein, 329 aa, Unknown
  Bacterial polypetide isolated from the Sargasso Sea
IEFLAVQKRIQKMKGPILCLVGPPGVGKTSLGKSIAKATNRKFIRISLGGIRDEAEIRGHRRTYIGSLPGKIIQMMKKAGSKNPLFLLDEIDKVGNDYRGDPSSALLEALDPEQNKEFNDHYLEVDYDLSDVMFVTTANTLNILPPLLDRMEVIRLSGYTEDEKVNISQKFLIPNQSKNNGLKKEEWNIDESINRKIIRHYTRESGVRNLEREISKIARKLVKKIDSKEKINNPITDNDLKDLLGVQKFNYGEIEEENRIGVVTGLAWTEVGGEILKIESVMMPGKGKMQITGKLGDVMQESVKAAKSYIRSKSLDFGIIPPLFDKKIF

SEQ ID NO: 169640 - protein, 313 aa, Unknown
  Bacterial polypetide isolated from the Sargasso Sea
NVEKRAEKAISLIAREIQRIKLGDEIQSEVHDEITKTQREYYLREQMKAIKKELGEDEGSVDHKELEEKLEAAKLPKEAKVVAMKELGRLSRIPTQSPEYNVSRTYIEWLSDLPWSKSSKDRIDLKKALNILDEDHYGLDKVKQRIIEYLAVRNLKQKKDPNGTVRGPILCFGGPPGVGKTSLGKSIARAMGREFVRLSLGGVRDEAEIRGHRRTYIGALPGRVIQSIKKAGKNNPIFMLDEIDKLGSDFRGDPSSALLEVLDPEQNHSFSDHYLEVDFDLSKVMFIATANYQDAIPPALLDRMEIIDFSGYI

SEQ ID NO: 169641 - protein, 282 aa, Unknown
  Bacterial polypetide isolated from the Sargasso Sea
ILPPLLDRMEVIRIPGYTEDEKINIANKFLLPKQIKDNGVKEQEMSLVDGTIKEIIRSYTRESGVRNLEREISKITRKVVKKVVNKEEKNVEINSQNISEFLGVKKFKFGMLEEKDKTGIVIGLAWTEFGGEILKIETVIMPGKGRMQITGKLGDVMQESVKAAKSYVRSKSLEFGIIPPIFEKKDFHIHVPEGATPKDGPSAGIAMVTSIVSSITQIPVNKEIAMTGEVTVTGQVLPIGGLKEKLLAAHRAGVKKVLIPKDNEKDLADVPKKVKEDIKIIP

SEQ ID NO: 169642 - protein, 317 aa, Unknown
  Bacterial polypetide isolated from the Sargasso Sea
ILCFGGPPGVGKTSLGKSIARAMGREFIRLSLGGVRDEAEIRGHRRTYIGALPGRIIQNIKKAGTNNPVFMLDEVDKLGSDFRGDPSSALLEVLDPEQNHSFNDHYLELDFDLSKVMFIATANNYANIPPALRDRMEILEFSGYIQDEKVQIAKRHLIPKQIKENGLNKTEVTLDLNSIKELISAYTREAGVRQLERQIANVLRKVARDIVESKKKQIKVTKTKVHELLGASRFHSELAERATEPGVVTGLAWTAAGGDILFIESTKMHGKGKLTLTGQLGDVMKESATAGLTFVRAHANTFGIGLNFIEETDIPMF

SEQ ID NO: 169643 - protein, 196 aa, Unknown
  Bacterial polypetide isolated from the Sargasso Sea
EVGGEILKIESAVMPGKGKMQITGKLGEVMQESVKAAKSYIRSKSLEFGIIPPIFDKKDFHIHVPEGATPKDGPSAGIAMVTSIVSAITEIPVDKNVAMTGEVTLRGLVLPIGGLKEKLLAAHRAGIKKVLIPIENKKDLIEVPESIKKNMEIIAVKNVDEVLKIALTKNLKRVEWVEVEQLPKSKNKEESKAPIN

SEQ ID NO: 169644 - protein, 281 aa, Unknown
  Bacterial polypetide isolated from the Sargasso Sea
YRGDPSSALLEALDPEQNTTFNDHYLEVDYDLSDVMFVTTANTLNILPPLLDRMEVIRIPGYTEDEKINIANKYLLPKQIKDNGVKEGEMKLADDTIKEIIRSYTRESGVRNLEREISKVTRKVVKKVVNNEEKSVEVNEKNIPDFLGIKKFKFGELEAKDKVGIVIGLAWTEFGGEILKVETVNMPGKGRMQITGKLGDVMQESVKAAKSYVRSKCLEFGVTPPLFEKKDFHIHVPEGATPKDGPSAGIAMVTSIVSSITKVPVKREIAMTGEVTITGQV

SEQ ID NO: 169645 - protein, 316 aa, Unknown
  Bacterial polypetide isolated from the Sargasso Sea
RMSLGGVRDEAEIRGHRRTYIGAMPGKIMQNLNKVGVRNPLFLLDEIDKMSMDFRGDPSSALLEVLDPEQNTTFNDHYMEVDFDLSDVMFICTANTLNIPPPLLDRMEVIRIEGYTEDEKMNIAEKYLVNKQTEANGLKDSEIKITNSAILSIIRHYTREAGVRNLDREIAKISRKVVKSLVMKSKDETVHVRPGSLEKYLGVQKFKYGIAEKDNQIGQVTGLAWTQVGGELLTIESTAIPGKGKLINTGQLGDVMKESIQAATTVVRSRSKALGIKEDFHQKMDMHIHVPEGATPKDGPSAGIGMCTALISSLTD

SEQ ID NO: 169646 - protein, 263 aa, Unknown
  Bacterial polypetide isolated from the Sargasso Sea
NAIIKIMENETSIIGVEKRIRGRVKTQMEKTQREYYLNEQLKAIQKELGEIEDGKDETTSINKAITKAKMPKDVEKKCLQELKKLKNMSPMSAEATVVRNYLDWMTELPWYKKSEVDIDLAKAQNTLDKDHFGLEKIKERIVEFLAVQKRMEKIKGPILCLVGPPGVGKTSLGKSIAKATNREFVRMSVGGMRDEAEIRGHRRTYIGSLPGKIIQMMKKAGTKNPLILLDEIDKIGNDYRGDPSSALLEALDPEQNTTFNDHY

SEQ ID NO: 169647 - protein, 310 aa, Unknown
  Bacterial polypetide isolated from the Sargasso Sea
KFVRMSLGGVRDEAEIRGHRRTYIGSLPGKVLQMMKKAGSSNPLFLLDEIDKLGADYRGDPSSALLEVLDPEQNNSFNDHYLEVDYDLSDTMFITTANTLRMPPALLDRMEIIRIAGYTEDEKVEIVKQHLAPQMLEKHGLKSGELILDDSAITGLIRYYTREAGVRSLERELANLARKTVKKIVAGDIGSLTINEDNLHEFAGVRKFKFGEIDNDDQVGIVTGLAWTEVGGDILPIESVIMPGKGRMTITGKLGDVMKESIQAAKSYVRSRCIEFGIKPTIFPIRDIHIHVPEGAIPKDGPSAGLGMVT

SEQ ID NO: 169648 - protein, 253 aa, Unknown
  Bacterial polypetide isolated from the Sargasso Sea
ICRKAVKVIETTKNKKVSLDKKTMNKFLGVEKFKTNEIEKKNLVGVTNGLAWTEVGGEILSIEVILSEGKGKLTITGKLGDVMKESIQAAVSFVRAKAINFGINPKTFDKKDIHVHVPEGATPKDGPSAGIAIFSSLVSSLTNIKVKKDVAMTGEITLRGRVLPIGGLKEKLYAAVRAGIKTVLVPEDNLKDIKEIDKNIIKAISIIGISDATSVLDHSLTKAVIPLEYSESDNVKDLKTSISRDNLSESVAH

SEQ ID NO: 169649 - protein, 306 aa, Unknown
  Bacterial polypetide isolated from the Sargasso Sea
SIAKATNREFVRMSVGGMRDEAEIRGHRRTYIGSLPGKIIQMMKKAGTKNPLILLDEIDKIGNDYRGDPSSALLEALDPEQNTTFNDHYLEVDYDLSDVMFVTTANTLNILPPLLDRMEVIRLAGYTEDEKISIANKYLLPKQIKDNGVKDKEMNLSDDIIKEVIRGYTKESGVRNLEREISKIARKVVKKIVGGEEKEVNVNNKNLSDFLGVAKFNFGELEADNKVGIVVGLAWTEYGGEILKIETVTMPGKGRMQITGKLGDVMQESVKAAKSFVRSKCLEYGIIPPVFEKKDFHIHVPEGATP

SEQ ID NO: 169650 - protein, 252 aa, Unknown
  Bacterial polypetide isolated from the Sargasso Sea
SLGGVRDESEIRGHRRTYIGSMPGKIVQALKKAKTTNPLILLDEIDKMGQDFRGDPASAMLEVLDPEQNSTFTDHYLEVEYDLSNVMFITTANSYNMPAPLLDRMEIIPLSGYTEDEKIEIAKRHLIDKAIKNHGLRKGEFELTDSALTGIVRYYTREAGVRNLEREISKLSRKSVTKIVKNEQKHINVTMENLEDFLGVKKFKFGLAEQDDQIGVVTGLAWTSVGGDLLHIEALKLPGKGRMKTTGKLGDV

SEQ ID NO: 169651 - protein, 267 aa, Unknown
  Bacterial polypetide isolated from the Sargasso Sea
MKKSKSSNPLILLDEIDKLGSDWRGDPSSALLEVLDPEQNSKFNDHYLELDYDLSDVMFVCTANTLNIPPALLDRMEIIRIPGYTEKEKNQIAKRYLVPKQIKNHGIKKSEISFNSKVLNLIIRNYTKEAGVRSLEKEISKVCRKTVKKLETSRLKKMNLNDKSLQNLLGIAKYRSSEIEKKNLVGVTNGLAWTEVGGEILSVEVILSIGKGKLTITGKLGEVMRESIQAATSYVKSKSVSLGINPKDFENYDIHIHVPEGATPKDG

SEQ ID NO: 169652 - protein, 329 aa, Unknown
  Bacterial polypetide isolated from the Sargasso Sea
SIFEKQELLEIIDLKKRLEKIHSYIEKETSVISVEKKIRGRVKNQMEKTQREYYLNEQLKAIQKELGEIDEGKDELSSLSKAISEAKMPKLAKDKCLSELKKLKSMSPMSAEATVVRNYLDWMTDLPWSVKSKINTDLVNAQKILDEDHYGLEKVKERIIEFLAVQKRIKKMKGPILCLVGPPGVGKTSLGKSIAKATNRKFIRISLGGIRDEAEIRGHRRTYIGSLPGKIIQMMKKAGTSNPLFLLDEIDKVGNDYRGDPSSALLEALDPEQNKEFNDHYLEVDYDLSDVMFVTTANTLNILPPLLDRMEVIRLSGYTEDEKVIYLKN

SEQ ID NO: 169653 - protein, 305 aa, Unknown
  Bacterial polypetide isolated from the Sargasso Sea
AEFEEQLKKKDIPEDIKKRIEKEIRKLKSMSSMSAEATVVRNYIDWLVTLPWNSDITKDEISIDKAQEVLDEDHFGLEKPKERITEYLAVRALTSKQKGPILCLVGPPGVGKTSLAKSVARAMGRKFVRMSLGGVRDEAEIRGHRRTYIGALPGKIIQGMKKAGSKNPVFLLDEIDKIGTDFRGDPSSALLEALDPEQNNNFNDHYLEIDYDLSQVLFITTANVLHTIPWALQDRMEIIKLSGYTELEKNAIAKKYLIPKQVENNGLTSTNIRISDKALNFLIQRYTREAGVRTLEREIGNICRK

SEQ ID NO: 169654 - protein, 264 aa, Unknown
  Bacterial polypetide isolated from the Sargasso Sea
MKKNEIKFNVKALNQIIRNYTREAGVRNLEKEISKICRKTVKLIETSKKTDVKLDNKTLQNFLGVIKYRSNEIEKKNLIGITNGLAWTEVGGEILSIEVLLSIGKGKVTTTGKLGEVMKESIQAATSYVKSKSLQLGINPKDFDKYDIHIHVPEGATPKDGPSAGIAIFNSLVSSLTNNKIRKDVAMTGEITLRGRVLPIGGLKEKIYAASRAGIKKVLIPEENFREIVEFDKEVLKSIKIIPVSDAFSILEHTLLKPVIPINL

SEQ ID NO: 169655 - protein, 227 aa, Unknown
  Bacterial polypetide isolated from the Sargasso Sea
ANSMNIPGPLLDRMEVIRLPGYTEDEKVNIAIKYLAPKQIKANGLKKGELEFDEAAIRDIIRYYTREAGVRSLERQIAKVCRKAVKEHASEKRFQVRVTADSLEHFLGVRKHRYGLAEQQDQIGQVTGLAWTQVGGELLTIETAVVPGKGNLIKTGSLGDVMAESMTAAMTVVRSRAKSLGIPADFNEKRDVHIHMPEGATPKDGPSAGIGLCTALVSALTQIPVRA

SEQ ID NO: 169656 - protein, 267 aa, Unknown
  Bacterial polypetide isolated from the Sargasso Sea
IEKETSVLSVEKKIRGRVKNQMEKTQREYYLNEQLKAIQKELGEIDEGKDELSSLSKAISDAKMPKLAREKCLSELKKLKSMSPMSAEATVVRNYLDWMTELPWSNKSKINTDLNNAQKILDEDHYGLEKVKERIIEFLAVQKRIQKMKGPILCLVGPPGVGKTSLGKSIAKATNRKFIRISLGGIRDEAEIRGHRRTYIGSLPGKIIQMMKKAGTKNPLFLLDEIDKVGNDYRGDPSSALLEALDPEQNKEFNDHYLEVDYDLSDV

SEQ ID NO: 169657 - protein, 289 aa, Unknown
  Bacterial polypetide isolated from the Sargasso Sea
NKYVETLDTRKRLNSIIKIMENETSIIGVEKRIRGRVKTQMEKTQREYYLNEQLKAIQKELGEIEDGKDETTNLKKSIQKAKMPKEVEKKCMAELKKLKNMSPMSAEATVVRNYLDWMIDIPWFKKDKVDINLNKALKTLDDDHYGLEKVKERIIEFLAVQKRMEKIKGPILCLIGPPGVGKTSLGKSIAKATNRQFIRMSLGGVRDEAEVRGHRRTYIGSLPGKIIQMMKKAGTKNPLFLLDEIDKIGNDYRGDPSSALLEALDPEQNTTFNDHYLEVDYDLSDVMFV

SEQ ID NO: 169658 - protein, 214 aa, Unknown
  Bacterial polypetide isolated from the Sargasso Sea
FAREKCLSELKKLKSMSPMSAEATVVRNYLDWMTEIPWSTKTKINTDLKTAQKILDEDHYGLDKVKERIIEFLAVQKRIQKMKGPILCLVGPPGVGKTSLGKSIAKATNRKFIRISLGGIRDEAEIRGHRRTYIGSLPGKIIQMMKKAGTKNPLFLLDEIDKVGNDYRGDPSSALLEALDPEQNKEFNDHYLEVDYDLSDVMFVTTANTLNILP

SEQ ID NO: 169659 - protein, 269 aa, Unknown
  Bacterial polypetide isolated from the Sargasso Sea
GYIEDEKLNISKNYLVPKNKEKNGLKENEITFSDNAILKIIRNYTREAGVRNLDRQINKVCRKKVKDLSLGAKATKLIDNRVVRNILGAEPFKYGQHDGENSLGQVNGLAWTSVGGELLQIEAAVTAGKGRVIKTGSLGDVMQESIQAALTVAKNIAKDKNIKSEFFDKHDIHIHVPEGATPKDGPSAGITMCTAITSLATEKKVKANLAMTGEITLAGKVLKIGGLKEKLIAAKRSGITNIIIPHENLGDVEEIESNILKDLEIIPVK

SEQ ID NO: 169660 - protein, 266 aa, Unknown
  Bacterial polypetide isolated from the Sargasso Sea
VQKRVKKLKGPVLCLVGPPGVGKTSLGESIARATNRKFIRMSLGGVRDEAEIRGHRRTYIGSMPGRILQKLSKTEVKNPLFLLDEVDKMGMDFRGDPASALLEVLDPEQNHTFNDHYLEVDYDLSDIMFVCTANSMNIPGPLLDRMEIIRIPGYTEDEKVNIAEKYLLPKQMKNNGLNQKELNLTTDSLKDLIRFFTREAGVRSLEREISKICRKLVRNNSDKKKPRKLKLTPDLLEDYCGVRKFEYGEAVEKDRIGQVTGLAWTQ

SEQ ID NO: 169661 - protein, 282 aa, Unknown
  Bacterial polypetide isolated from the Sargasso Sea
GGVRDEAEIRGHRKTYIGSMPGRFIQSMKKSNSSNPLILLDEVDKLGSDWRGDPSSALLEVLDPEQNNKFNDHYLELDYDLSDVMFICTANTLNIPPALLDRMEIIRIPGYTEKEKNKIAQKYLVPKQLKNHGLKKKESKFNTSIINQIIRNYTREAGVRNLEKEISKICRKTVKLIETSSRKKINYDSKTLQNFLGVPRFRSNEIEKKNLIGITNGLAWTEVGGEILSIEVLLSIGKGKLTITGKLGDVMKESIQAATSYVRSQCLHLGIHPHDFENMISM

SEQ ID NO: 169662 - protein, 296 aa, Unknown
  Bacterial polypetide isolated from the Sargasso Sea
EDHFGLEEVKERILEYLAVQKRVKKLKGPVLCLVGPPGVGKTSLGESIARATNRKFVRMSLGGVRDEAEIRGHRRTYIGSMPGRILQKLSKTGVKNPLFLLDEIDKMGMDFRGDPASALLEVLDPEQNHTFNDHYLEVDYDLSDIMFVCTANSMNIPSALLDRMEIITLPGYTEDEKVNIAEKYLIEKQKKNNGLKDEELSIPKNTIKDLIRYFTREAGVRSLEREIAKICRKVVKKNTALDKPKKVSIKPNTLEDYCGVRKFEFGEAEENDRIGQVTGLAWTQVGGELLTMRPQA

SEQ ID NO: 169663 - protein, 238 aa, Unknown
  Bacterial polypetide isolated from the Sargasso Sea
YLKRSELKFTIKIINQIIRNYTREAGVRNLEKEISKVCRKTVKLLETTKKNSVNLNEEMLRTFLGITKFRSSEIEKKNLIGVTNGLAWTEVGGEILSIEVILSIGKGRLTITGKLGEVMKESVQAAISYVRSHSLDLGIHPFDFDKFDIHVHVPEGATPKDGPSAGIAIFNSLVSSLTANKVRKDVAMTGEITLRGRVLPIGGLKEKIYAASRAGIKKVLIPEENKKEITEFDKEILK

SEQ ID NO: 169664 - protein, 265 aa, Unknown
  Bacterial polypetide isolated from the Sargasso Sea
VDELQNKINEARMPEEALEKANAELSKLKMMSPMSAEASVVRGYLDWMVSIPWFKRSKVRHDLKRAQAVLDEDHFGLEEVKERILEYLAVQKRVRKLKGPVLCLVGPPGVGKTSLGESIARSTNRKFIRMALGGVRDEAEIRGHRRTYIGSMPGKLLQKMSKAGVRNPLFLLDEIDKMGMDHRGDPASAMLEVLDPEQNHAFNDHYLEVDYDLSDVMFVCTSNTMNIPGPLLDRMEVIRIPGYTEDEKLNIAQKYLIPKQIKLNG

SEQ ID NO: 169665 - protein, 298 aa, Unknown
  Bacterial polypetide isolated from the Sargasso Sea
KELGEIEDGKDESTNLKKSILKSKMPKEVEKKCLSELKKLKNMSPMSAEATVVRNYLDWMIDLPWYKKDKVDIDLNNAIKTLDEDHFGLEKVKERIIEFLAVQKRMEKIKGPILCLIGPPGVGKTSLGKSIAKATNRQFVRMSLGGVRDEAEIRGHRRTYIGSLPGKIIQMMKKAGTKNPLILLDEIDKVGNDYRGDPSSALLEALDPEQNTNFNDHYLEVDYDLSDVMFVTTANTLNILPPLLDRMEVIRIPGYTEDEKINIANKYLLPKQIKENGVKEKELDLIDGTIKEIIRSYT

SEQ ID NO: 169666 - protein, 303 aa, Unknown
  Bacterial polypetide isolated from the Sargasso Sea
KTSNPIILLDEIDKVGSDWRGDPSSALLEVLDPEQNNQFNDHYLEVDYDLSNVMFICTGNTYNIPGPLLDRLEVIEVSGYTEKEKVEIAKKYLIPRKMNKNILKNNEFKLDKSSITKIVRHYTRESGVRGLEKVFDKLFRKLVFQLEKNKSRSKKPFVFDDKAIKNFLGPEKFKDSVLEKKNLVGITNGLAWTQVGGDILNIEVNLSSGKGMINATGKLGDVMKESITAALGYIKSNSVEFGVNPKVFDKIDIHLHVPEGAIPKDGPSAGITIFTSLISSLTDIKIKRDIAMTGEITLKGRVL

SEQ ID NO: 169667 - protein, 299 aa, Unknown
  Bacterial polypetide isolated from the Sargasso Sea
GLDKVKERIIEFLAVQKRIEKLKGPILCLVGPPGVGKTSLGKSIARATGRKFVRISLGGVRDEAEIRGHRRTYIGSLPGKIIQMMKKAGTKNPLFLLDEIDKVGSDYRGDPSSALLEALDPEQNKQFNDHYLEVDYDLSDVMFVTTANTLNILPPLLDRMEIIRIPGYTEDEKTNIAQKYLIPKQSKNNGLKDSEWKISPNVIKKIIRDYTRESGVRNLEREISKIARKTVKKIDSSEKIEKELLEKDVNSFLGVKKYNYGEIESENKIGVSTGLAWTEVGGEILKIESVNMPGKGKMQ

SEQ ID NO: 169668 - protein, 286 aa, Unknown
  Bacterial polypetide isolated from the Sargasso Sea
LKIMGVKEKEMKLDDDIIKAVIRGYTKESGVRNLEREISKLARKVVKKIVSGEEKEVEINNKNLSDFLGVPKFKFGELEAENRVGIVTGLAWTEYGGEILKIETATMPGKGRMQITGKLGDVMQESIKAAKSFVRSKCLEYGIIPPVFEKKDFHIHVPEGATPKDGPSAGIGMVTSIVSSITGIPVRRDVAMTGEVTLTGQVLPIGGLKEKLLAAHRAGIKEVLIPKENEKDLVDMPKKIVDDIKITPVEYADQVVKIALTKELKPTEWVEVDISKKDDKSQASIQ

SEQ ID NO: 169669 - protein, 285 aa, Unknown
  Bacterial polypetide isolated from the Sargasso Sea
LKIKWEKTQREYYLNELLKAIQKELGEIEDGKDETTSLNKAITKAKMPKEVEKKCLQELKKLKNMSPMSAEATVVRNYLDWMTELPWHKKSEVDIDLTKALNILDKDHFGLEKVKERIIEFLAVQKRMEKIKGPILCLVGPPGVGKTSLGKSIAKATNREFVRMSVGGMRDEAEIRGHRRTYIGSLPGKIIQMMKKAGTKNPLILLDEIDKIGNDYRGDPSSALLEALDPEQNTTFNDHYLEVDYDLSDVMFVTTANTLNILPPLLDRMEVIRLAGYTEDDKISI

SEQ ID NO: 169670 - protein, 267 aa, Unknown
  Bacterial polypetide isolated from the Sargasso Sea
QSIANATNREFIRMSLGGVRDEAEIRGHRRTYIGSMPGKIIQKITKVESKNPLFLFDEIDKMGMDYRGDPASALLEVLDPEQNTTFSDHYLEVDFDLSEVMFVCTANSLNIPPPLMDRMEIIRIPGYIEDEKLNIAKQYLVPKQMERNGLKSGEVDLKDNAILDIIRYYTREAGVRGLERQIAKILRKTVKEIELTDKKTNTKKLAAITSKNLEKYNGVRKFKFGTAEKENSVGKVSGLAWTQVGGELLTIETSHVSGKGKIIKTGS

SEQ ID NO: 169671 - protein, 264 aa, Unknown
  Bacterial polypetide isolated from the Sargasso Sea
GCEGNILQLLKLPDGTVKVLVEGIKRVKILDYHDNEKYITCDYTPHNDILTDKEDLYPLAVTAVRRLEKLTSINKKISGETLSNIKQLKDPSQIADNIASHITATISEKQQIFETIDVKKRLNAIIKLMENETSIIGVEKRIRGRVKTQMEKTQREYYLNEQLKAIQKELGEIEDGKDESTNLNKAILKSKMPKEVEKKCLQELKKLKNMSPMSAEATVVRNYLDWMIDLPWHKKSEVDIDLKKALNILDKDHFGLEKIKERII

SEQ ID NO: 169672 - protein, 302 aa, Unknown
  Bacterial polypetide isolated from the Sargasso Sea
VRDEAEIRGHRKTYIGSMPGRFIQAMKKSKTSNPLILLDEIDKLGSDWRGDPSSALLEVLDPEQNNKFNDHYLELDYDLSDVMFVCTANTLNIPPALLDRMEVIRIAGYTEKEKICIAQKYLVPKQIKNNGLKNTEIKFNIKSLNQIIRSYTREAGVRNLEKEISKICRKAVKEIETKSNKKIILDKKTIEKNLGVEKYRHSEIEKKNLVGITNGLAWTEVGGEILSIEVLLSLGKGKLTITGKLGDVMKESIQAASSYVRSQSLNLGINPLDFEKYDIHVHVPEGATPKDGPSAGIAIFNS

SEQ ID NO: 169673 - protein, 259 aa, Unknown
  Bacterial polypetide isolated from the Sargasso Sea
VRLIKAKFEDYISVTKRIPPEIVSTVDSLDELSRLMDTITGHLSIETSKKQEILETLDLKERAEKVLTFIESQLDVVDVEKKVRDRVKKQMEKSQREYYLNEQIKAAQKELGEIGEEGDELENLEKKIHEVGMTKEALKKAKSEFAKFKHMAPSSAEASVVRTYLDCLVDVPWKKKSKVKTDIKASMEILEEDHYGLEEVKERIVEYLAVQKRVKSMKAPVLCLVGPPGVGKTSLGESIARATNREFVRMSLGGVRDES

SEQ ID NO: 169674 - protein, 299 aa, Unknown
  Bacterial polypetide isolated from the Sargasso Sea
GVRDEAEIRGHRKTYIGSMPGRFVQSMKKAKSSNPLILLDEIDKLGADWRGDPSSALLEVLDPEQNNKFNDHYLEVDYDLSDVMFVCTANTLSIPAPLLDRMEIIRIPGYTEKEKNVIAQKYLLPKQLKNHVLNKNEIKFGTKIINNIIRNYTREAGVRNLEKEISKVCRKVVKILETSNKKKIELNEDLLSKFLGYSKFRTSEIEKKNLVGVTNGLAWTEVGGEILSIEVILSIGKGKLSITGKLGEVMKESVQAAISYVKSNSIDLGIHPLDFDKYDIHVHVPEGATPKDGPSAGIA

SEQ ID NO: 169675 - protein, 314 aa, Unknown
  Bacterial polypetide isolated from the Sargasso Sea
PSADDIHDFGTIGSVLQLLKLPDGTVKVLVEGVQRAKITKYKDNVNHFEAYVETVFEDNNNEKDLDAVARSVINQFEQYVKLNKKIPAEVLVSLNQIDDPSKLADTIASHLSIKVSEKQELLEIISTSDRLEKIYGLMESEIGVLQVEKKIRGRVKRQMEKTQREYYLNEQLKAIQKELGDSDDSRDESNELEEKINKLKLTKEAKEKAHAELKKLRSMSPMSAEATVVRNYLDWILGIPWKKRSRVKADLSYAEKVLDADHYGLEKVKERILEYLAVQHRVKKMKGPILCLVGAPGVGKTSLGKSIAKATVEI

SEQ ID NO: 169676 - protein, 276 aa, Unknown
  Bacterial polypetide isolated from the Sargasso Sea
DEIDKMGHDFRGDPASAMLEVLDPEQNSTFTDHYMEVEYDLSNVMFLTTANTYNMPSPLLDRMEIIPLAGYTEEEKIEIAKQHLYEKQKISHGLKNDEFELERSGLVEIIRRYTREAGVRNLEREIAKLCRKALTNIIKKKEKKVVISESNIQEFLGVKKFKYGLAEDENQVGVTTGLAWTEVGGDLLSVEALKLPGKGRMKTTGKLGDVMKESIDAASSYVRSISPTIGVKPPVFEKVDIHVHVPEGATPKDGPSAGIAMVTAIVSVLSGIPVRR

SEQ ID NO: 169677 - protein, 289 aa, Unknown
  Bacterial polypetide isolated from the Sargasso Sea
YGLEKVKERIIEFLAVQKRMEKIKGPILCLIGPPGVGKTSLGKSIAKATNRQFVRMSLGGVRDEAEIRGHRRTYIGSLPGKIIQLMKKAGTKNPLILLDEIDKVGNDYRGDPSSALLEALDPEQNTNFNDHYLEVDYDLSDVMFVTTANTLNILPPLLDRMEVIRIPGYTEDEKISIANKYLLPKQIKENGVKKEELEIADGTIREIIKSYTRESGVRNLEREISKVARKVVKKVVNGEEKKVIVDNKNIPDFLGVKKFKQGEIEPEDKVGVVTGLAWTEFGGEILKIE

SEQ ID NO: 169678 - protein, 210 aa, Unknown
  Bacterial polypetide isolated from the Sargasso Sea
ELESENKVGIVTGLAWTEYGGEILKIETVTMPGKGRMQITGKLGDVMQESVKAAKSFVRSKCLEYGIIPPLFEKKDFHIHVPEGATPKDGPSAGIGMVTSIVSSITNIPIRRDIAMTGEVTLTGQVLPIGGLKEKLLAAHRAGIKEVLIPKENEKDLVDMPKKIIDDIKITGVEHADEVLKIALTKELKRTEWVEVDISKKDDKSQASIQ

SEQ ID NO: 169679 - protein, 268 aa, Unknown
  Bacterial polypetide isolated from the Sargasso Sea
REYYLNEQLKAIQKELGEIEDGKDETSNLNKAIQKAKMPKEVQKKCMSELKKLKNMSPMSAEATVVRNYLDWMIDLPWFKKDKVDIDLNKALNTLDEDHYGLEKVKERIIEFLAVQKRMDKIKGPILCLVGPPGVGKTSLGKSIAKATNRQFVRMSLGGVRDEAEIRGHRRTYIGSLPGKIIQMMKKAGTKNPLILLDEVDKVGNDYRGDPSSALLEALDPEQNTTFNDHYLEVDYDLSDVMFVTTANTLNILPPLLDRMEVIRIPGY

SEQ ID NO: 169680 - protein, 250 aa, Unknown
  Bacterial polypetide isolated from the Sargasso Sea
HMSLKLDEKQKILEQINIKERLEYVIGLIEVEIDMIEVEQKVRGRVKDQMEKSQKEYYLNEQMKAIQKELGDLDNANNEFDELEQKIKQSGMTKEADEKASSELKKLQMMSPMSAEATVVRNFLDVLVSAPWKKKTKAKVTLDKAHEILDEDHYGLKTVKERIIEYLAVQKRVKKLKGPILCLVGPPGVGKTSLGASIARATGRKFVRMSLGGVRDEAEIRGHRRTYIGAMPGKIMQNLNKVGVRNPLFL

SEQ ID NO: 169681 - protein, 308 aa, Unknown
  Bacterial polypetide isolated from the Sargasso Sea
QLKEPSQIADNIASHIAASISEKQQIFETNDVKKRLNAIIKIMENETSIIGVEKRIRGRVKTQMEKTQREYYLNEQLKAIQKELGEIEDGKDETTSINKAISKAKMPKDVEKKCLQELKKLKNMSPMSAEATVVRNYLDWMTELPWHKKSEVDIDLAKAQNTLDKDHFGLEKIKERIVEFLAVQKRMEKIKGPILCLVGPPGVGKTSLGKSIAKATNREFVRMSVGGMRDEAEIRGHRRTYIGSLPGKIIQMMKKAGTKNPLILLDEIDKIGNDYRGDPSSALLEALDPERNTTFNDHYLEVDYDLSD

SEQ ID NO: 169682 - protein, 297 aa, Unknown
  Bacterial polypetide isolated from the Sargasso Sea
EADKENEEHKTCASNLIKKFEKLSTLNKKDVSDFTKGLKSLKNANQLADNICSNLNIQIFEKQALLETIDLKKRLEKIYELIEKETSVISMEKRIRGRVKNQMEKTQREYYLNEQLKAIQKELGEIEDGKDEISNLNKAISKAKMPKEAQTKCLAELKKLKGMSPMSAEATVVRNYLDWMVDLPWNNKSKIISDLNTAQKVLDEDHYGLAKVKERIIEYLAVQKRIEKLKGPILCLVGPPGVGKTSLGKSIAKATGRKFVRISLGGIRDEAEIRGHRRTYIGSLPGKIIQMRKKLYK

SEQ ID NO: 169683 - protein, 336 aa, Unknown
  Bacterial polypetide isolated from the Sargasso Sea
VDIDLTKALNILDKDHFGLEKVKERIIEFLAVQKRMEKIKGPILCLVGPPGVGKTSLGKSIAKATNREFVRMSVGGMRDEAEIRGHRRTYIGSLPGKIIQMMKKAGTKNPLILLDEIDKIGNDYRGDPSSALLEALDPEQNTTFNDHYLEVDYDLSDVMFVTTANTLNILPPLLDRMEVIRLAGYTEDEKISIANKYLLPKQIKDNGVKEKEMNLDDDIIKEVIRSYTKESGVRNLEREISKLARKVVKKVVSGEKKEVKIDKNNLSEFLGVPKYKSGELETEDRVGIVTGLAWTEYGGEILKIETVTMPGKGRMQITGKLGDVMQESVKAAKSFV

SEQ ID NO: 169684 - protein, 241 aa, Unknown
  Bacterial polypetide isolated from the Sargasso Sea
MVVRNYLDWMTELPWSQKSKINTDLNNAQKILDEDHYGLEKVKDRIIEFLAVQKRIQKMKGPILCLVGPPGVGKTSLGKSIAKATNRKFIRISLGGIRDEAEIRGHRRTYIGSLPGKIIQMMKKAGTKNPLFLLDEIDKVGNDYRGDPSSALLEALDPEQNKDFNDHYLEVDYDLSDVMFVTTANTLNILPPLLDRMEVIRLSGYTEDEKVNISQKFLIPKQSENNGLKKEEWSISEKVNR

SEQ ID NO: 169685 - protein, 241 aa, Unknown
  Bacterial polypetide isolated from the Sargasso Sea
EATVVRNYLDWMIDLPWFKKDDVDIDLNKGLKILDEDHFGLEKVKERIIEFLAVQKRMEKIKGPILCLVGPPGVGKTSLGKSIAKATNRQFIRMSLGGVRDEAEIRGHRRTYIGSLPGKIIQMMKKAGTKNPLFLLDEVDKIGNDYRGDPSSALLEALDPEQNTAFNDHYLEVDYDLSDVMFVTTANTLNILPPLLDRMEVIRIPGYTEDEKINIANKYLLPKQVKENGVKEGELNLEDGQ

SEQ ID NO: 169686 - protein, 299 aa, Unknown
  Bacterial polypetide isolated from the Sargasso Sea
KTKIMKADKENEEHKTFASNLIKKFEKLSTLNKKDVSDFAKGLKSLKNANQLADNICSNLNIQIFEKQALLETIDLKKRLEKIYELIEKETSVISMEKRIRGRVKNQMEKTQREYYLNEQLKAIQKELGEIEDGKDEISNLNKAITKAKMPKEAQTKCLAELKKLKGMSPMSAEATVVRNYLDWMVDLPWNNKSKIISDLNTAQKVLDEDHYGLAKVKERIIEYLAVQKRIEKLKGPILCLVGPPGVGKTSLGKSIAKATGRKFVRISLGGIRDEAEIRGHRRTYIGSLPGKIIQMMKK

SEQ ID NO: 169687 - protein, 241 aa, Unknown
  Bacterial polypetide isolated from the Sargasso Sea
EIEDGKDETSNLNKAILKAKMPKEVQKKCMSELKKLRNMSPMSAEATVVRNYLDWMIDIPWYKKDQVDIDLNKAMKVLDQDHFGLEKVKERIIEFLAVQKRMQKIKGPILCLVGPPGVGKTSLGKSIARATNRQFVRMSLGGVRDEAEIRGHRRTYIGSLPGKILQMMKKAGTKNPLFLLDEVDKIGNDYRGDPSSALLEALDPEQNKTFNDHYLEVDYDLSDVLFVTTANTLNILPPLLD

SEQ ID NO: 169688 - protein, 235 aa, Unknown
  Bacterial polypetide isolated from the Sargasso Sea
PGYTENEKNQIAKRYLVPKQIKNNGLKNSEINFSPSLIKQIIRFYTREAGVRGLEKEISKVCRKVVKDLETRTKRKILLDKKAINNYLGVEKFRNNEIEKKNLIGVTNGLAWTEVGGEILSIEVLLSIGKGKLTITGKLGDVMKESIQAASSYVRSQALSLGINPLDFDKYDIHVHVPEGATPKDGPSAGIAIFNSLVSSLTGIKIKKDIAMTGEITLRGRVLPIGGLKEKLYAA

SEQ ID NO: 169689 - protein, 277 aa, Unknown
  Bacterial polypetide isolated from the Sargasso Sea
IPWNNPSAISKNIKKAKSILESDHYGLEKVKDRILEYLAVQKRINKIKGPILCLVGPPGVGKTSLGKSIANSTGRNFVRMSLGGVRDEAEIRGHRKTYIGSMPGRFLQSMKKSKTSNPLILLDEIDKLGSDWRGDPSSALLEVLDPEQNNKFNDHYLELDYDLSDVMFVCTANTLNIPTALLDRMEIIRIPGYTENEKNQIAKRYLVPKQIKNNGLKKSEINFNSTLIKHIIRYYTREAGVRGLEKEISKICRKVVKDLKTKTKRKNLLDKKSIQNY

SEQ ID NO: 169690 - protein, 313 aa, Unknown
  Bacterial polypetide isolated from the Sargasso Sea
LEALDPEQNTTFNDHYLEVDYDLSDVMFVTTANTLNILPPLLDRMEVIRIPGYTEDEKINIANKYLLPKQIKDNGVKDGELNLEDGTIKEIIRSYTRESGVRNLEREISKVTRKVVKKVVNAEEIKVDVNDKNISDFLGIKKFKFGELENENKIGIVIGLAWTEFGGEILKIETVNMPGKGRMQITGKLGDVMQESVKAAKSFVRSKSLEYGIIPPFFEKKDFHIHVPEGATPKDGPSAGIAMVTSIVSSMTNIPVNREIAMTGEVTVTGQVLPIGGLKEKLLAAHRAGVKKVLITKENEKDLVDIPKKVERR

SEQ ID NO: 169691 - protein, 265 aa, Unknown
  Bacterial polypetide isolated from the Sargasso Sea
TQKNSEIDDPKSTDIFSYGCESNILQLLKLPDGTVKVLVEGNKRVKIVGFKEEEQFISCNYEYQNEIIGNEEELKPLALSAIKKLEKLNFVNKKISNETINNIKQLKEPLKIVDNIAAHITTTITEKQQLFETFDVKKRLESIIKIIENETSIIGVEKRIRGRVKTQMEKTQREYYLNEQLKAIQKELGEIEDGKDETSNLNKSILKAKMPKEVQKKCMSELKKLRNMSPMSAEATVVRNYLDWMIDIPWYKKDKVDIDLNKASK

SEQ ID NO: 169692 - protein, 238 aa, Unknown
  Bacterial polypetide isolated from the Sargasso Sea
ITATISEKQQIFETVDVKKRLNSIIKIMENETSIIGVEKRIRGRVKNQMEKTQREYYLNEQLKAIQKELGEIEDGKDESTSLNKAILKAKMPKEVEKKCLQELKKLKNMSPMSAEATVVRNYLDWMTELPWYKKSAVDIDLKKALEILDKDHFGLEKVKERIIEFLAVQKRMDKIKGPILCLVGPPGVGKTSLGKSIAKATNREFVRMSVGGMRDEAEIRGHRRTYIGSLPGKIIQMM

SEQ ID NO: 169693 - protein, 280 aa, Unknown
  Bacterial polypetide isolated from the Sargasso Sea
WRKSSRLKRDIDDARAILDADHYGLDKVKDRIVEFLAVQQRTKALRGPILCLVGPPGVGKTSLGKSIAKATGRNYVRMALGGVRDEAEIRGHRRTYIGSMPGKILQGMKKAGTRNPLFLLDEVDKLGADWRGDPTSALLEVLDPAQNNNFQDHYLEVDFDLSNVMFITTANTLNMPQPLMDRMEIIRLSGYTEDEKLEIAKRHLITKQIKDHGLKDGELTIDDNALRNAIRLYTREAGVRNLEREIAKIARKTVTAIISGKVSSVTVTANNLGDYLGVQS

SEQ ID NO: 169694 - protein, 271 aa, Unknown
  Bacterial polypetide isolated from the Sargasso Sea
AGVRALERQIAKVCRKMVKAFALGERELGQTISSESLPDILGVRKFNFGTAEQENKVGQVTGLAWTSVGGELLTVEVAATRGKGRVVKTGSLGDVMQESIQAANTVVRAKSQTLGIPARFHDTRDMHIHVPEGATPKDGPSAGIAMCTALVSSFTEIPVRADVAMTGEITLRGEVLPIGGLKEKLLAARRGGIGTVVIPHENERDLQEVPDNIKENLDIRPVKWIDEVLAIALESLPEPLDDDTYLADSENIGRGDEAGQDSTDANRPRSH

SEQ ID NO: 169695 - protein, 219 aa, Unknown
  Bacterial polypetide isolated from the Sargasso Sea
TNNLKNLKNPSQIANNISSNLNIQIFEKQELLEITDLKKRLEKIHSLIEKEISVLSVEKKIRGRVKNQMEKTQREYYLNEQLKAIQKELGEIDEGKDELSSLSKAISDAKMPKLAKEKCLSELKKLKSMSPMSAEATVVRNYLDWMTELPWSNKSKINTDLKNAQKILDEDHYGLEKVKERIIEFLAVQKRMQKMKGPILCLVGPPGVGKTSLGKSIAK
